United States Patent Application Publication US 2015/0141320 A1 - sequence listing, part 38

SEQ ID NO: 1451710 - DNA, 15 bp, Homo sapiens
gctgagtctcccatg

SEQ ID NO: 1451711 - DNA, 15 bp, Homo sapiens
agctgagtctcccat

SEQ ID NO: 1451712 - DNA, 15 bp, Homo sapiens
tagctgagtctccca

SEQ ID NO: 1451713 - DNA, 15 bp, Homo sapiens
ctagctgagtctccc

SEQ ID NO: 1451714 - DNA, 15 bp, Homo sapiens
gctagctgagtctcc

SEQ ID NO: 1451715 - DNA, 15 bp, Homo sapiens
ggctagctgagtctc

SEQ ID NO: 1451716 - DNA, 15 bp, Homo sapiens
gggctagctgagtct

SEQ ID NO: 1451717 - DNA, 15 bp, Homo sapiens
cgggctagctgagtc

SEQ ID NO: 1451718 - DNA, 15 bp, Homo sapiens
acgggctagctgagt

SEQ ID NO: 1451719 - DNA, 15 bp, Homo sapiens
cacgggctagctgag

SEQ ID NO: 1451720 - DNA, 15 bp, Homo sapiens
acacgggctagctga

SEQ ID NO: 1451721 - DNA, 15 bp, Homo sapiens
aacacgggctagctg

SEQ ID NO: 1451722 - DNA, 15 bp, Homo sapiens
caacacgggctagct

SEQ ID NO: 1451723 - DNA, 15 bp, Homo sapiens
gcaacacgggctagc

SEQ ID NO: 1451724 - DNA, 15 bp, Homo sapiens
agcaacacgggctag

SEQ ID NO: 1451725 - DNA, 15 bp, Homo sapiens
tagcaacacgggcta

SEQ ID NO: 1451726 - DNA, 15 bp, Homo sapiens
atagcaacacgggct

SEQ ID NO: 1451727 - DNA, 15 bp, Homo sapiens
catagcaacacgggc

SEQ ID NO: 1451728 - DNA, 15 bp, Homo sapiens
gcatagcaacacggg

SEQ ID NO: 1451729 - DNA, 15 bp, Homo sapiens
ggcatagcaacacgg

SEQ ID NO: 1451730 - DNA, 15 bp, Homo sapiens
gggcatagcaacacg

SEQ ID NO: 1451731 - DNA, 15 bp, Homo sapiens
ggggcatagcaacac

SEQ ID NO: 1451732 - DNA, 15 bp, Homo sapiens
tggggcatagcaaca

SEQ ID NO: 1451733 - DNA, 15 bp, Homo sapiens
gtggggcatagcaac

SEQ ID NO: 1451734 - DNA, 15 bp, Homo sapiens
agtggggcatagcaa

SEQ ID NO: 1451735 - DNA, 15 bp, Homo sapiens
aagtggggcatagca

SEQ ID NO: 1451736 - DNA, 15 bp, Homo sapiens
gaagtggggcatagc

SEQ ID NO: 1451737 - DNA, 15 bp, Homo sapiens
tgaagtggggcatag

SEQ ID NO: 1451738 - DNA, 15 bp, Homo sapiens
ttgaagtggggcata

SEQ ID NO: 1451739 - DNA, 15 bp, Homo sapiens
attgaagtggggcat

SEQ ID NO: 1451740 - DNA, 15 bp, Homo sapiens
aattgaagtggggca

SEQ ID NO: 1451741 - DNA, 15 bp, Homo sapiens
caattgaagtggggc

SEQ ID NO: 1451742 - DNA, 15 bp, Homo sapiens
acaattgaagtgggg

SEQ ID NO: 1451743 - DNA, 15 bp, Homo sapiens
gacaattgaagtggg

SEQ ID NO: 1451744 - DNA, 15 bp, Homo sapiens
ggacaattgaagtgg

SEQ ID NO: 1451745 - DNA, 15 bp, Homo sapiens
aggacaattgaagtg

SEQ ID NO: 1451746 - DNA, 15 bp, Homo sapiens
taggacaattgaagt

SEQ ID NO: 1451747 - DNA, 15 bp, Homo sapiens
ataggacaattgaag

SEQ ID NO: 1451748 - DNA, 15 bp, Homo sapiens
gataggacaattgaa

SEQ ID NO: 1451749 - DNA, 15 bp, Homo sapiens
agataggacaattga

SEQ ID NO: 1451750 - DNA, 15 bp, Homo sapiens
tagataggacaattg

SEQ ID NO: 1451751 - DNA, 15 bp, Homo sapiens
ttagataggacaatt

SEQ ID NO: 1451752 - DNA, 15 bp, Homo sapiens
cttagataggacaat

SEQ ID NO: 1451753 - DNA, 15 bp, Homo sapiens
tcttagataggacaa

SEQ ID NO: 1451754 - DNA, 15 bp, Homo sapiens
ttcttagataggaca

SEQ ID NO: 1451755 - DNA, 15 bp, Homo sapiens
cttcttagataggac

SEQ ID NO: 1451756 - DNA, 15 bp, Homo sapiens
gcttcttagatagga

SEQ ID NO: 1451757 - DNA, 15 bp, Homo sapiens
ggcttcttagatagg

SEQ ID NO: 1451758 - DNA, 15 bp, Homo sapiens
tggcttcttagatag

SEQ ID NO: 1451759 - DNA, 15 bp, Homo sapiens
atggcttcttagata

SEQ ID NO: 1451760 - DNA, 15 bp, Homo sapiens
gatggcttcttagat

SEQ ID NO: 1451761 - DNA, 15 bp, Homo sapiens
agatggcttcttaga

SEQ ID NO: 1451762 - DNA, 15 bp, Homo sapiens
aagatggcttcttag

SEQ ID NO: 1451763 - DNA, 15 bp, Homo sapiens
caagatggcttctta

SEQ ID NO: 1451764 - DNA, 15 bp, Homo sapiens
tcaagatggcttctt

SEQ ID NO: 1451765 - DNA, 15 bp, Homo sapiens
atcaagatggcttct

SEQ ID NO: 1451766 - DNA, 15 bp, Homo sapiens
aatcaagatggcttc

SEQ ID NO: 1451767 - DNA, 15 bp, Homo sapiens
aaatcaagatggctt

SEQ ID NO: 1451768 - DNA, 15 bp, Homo sapiens
aaaatcaagatggct

SEQ ID NO: 1451769 - DNA, 15 bp, Homo sapiens
taaaatcaagatggc

SEQ ID NO: 1451770 - DNA, 15 bp, Homo sapiens
ataaaatcaagatgg

SEQ ID NO: 1451771 - DNA, 15 bp, Homo sapiens
tataaaatcaagatg

SEQ ID NO: 1451772 - DNA, 15 bp, Homo sapiens
atataaaatcaagat

SEQ ID NO: 1451773 - DNA, 15 bp, Homo sapiens
gatataaaatcaaga

SEQ ID NO: 1451774 - DNA, 15 bp, Homo sapiens
tgatataaaatcaag

SEQ ID NO: 1451775 - DNA, 15 bp, Homo sapiens
ttgatataaaatcaa

SEQ ID NO: 1451776 - DNA, 15 bp, Homo sapiens
tttgatataaaatca

SEQ ID NO: 1451777 - DNA, 15 bp, Homo sapiens
ttttgatataaaatc

SEQ ID NO: 1451778 - DNA, 15 bp, Homo sapiens
attttgatataaaat

SEQ ID NO: 1451779 - DNA, 15 bp, Homo sapiens
aattttgatataaaa

SEQ ID NO: 1451780 - DNA, 15 bp, Homo sapiens
gaattttgatataaa

SEQ ID NO: 1451781 - DNA, 15 bp, Homo sapiens
tgaattttgatataa

SEQ ID NO: 1451782 - DNA, 15 bp, Homo sapiens
atgaattttgatata

SEQ ID NO: 1451783 - DNA, 15 bp, Homo sapiens
catgaattttgatat

SEQ ID NO: 1451784 - DNA, 15 bp, Homo sapiens
ccatgaattttgata

SEQ ID NO: 1451785 - DNA, 15 bp, Homo sapiens
cccatgaattttgat

SEQ ID NO: 1451786 - DNA, 15 bp, Homo sapiens
ccccatgaattttga

SEQ ID NO: 1451787 - DNA, 15 bp, Homo sapiens
tccccatgaattttg

SEQ ID NO: 1451788 - DNA, 15 bp, Homo sapiens
ttccccatgaatttt

SEQ ID NO: 1451789 - DNA, 15 bp, Homo sapiens
tttccccatgaattt

SEQ ID NO: 1451790 - DNA, 15 bp, Homo sapiens
ttttccccatgaatt

SEQ ID NO: 1451791 - DNA, 15 bp, Homo sapiens
attttccccatgaat

SEQ ID NO: 1451792 - DNA, 15 bp, Homo sapiens
cattttccccatgaa

SEQ ID NO: 1451793 - DNA, 15 bp, Homo sapiens
acattttccccatga

SEQ ID NO: 1451794 - DNA, 15 bp, Homo sapiens
cacattttccccatg

SEQ ID NO: 1451795 - DNA, 15 bp, Homo sapiens
ggcacattttcccca

SEQ ID NO: 1451796 - DNA, 15 bp, Homo sapiens
aggcacattttcccc

SEQ ID NO: 1451797 - DNA, 15 bp, Homo sapiens
aaggcacattttccc

SEQ ID NO: 1451798 - DNA, 15 bp, Homo sapiens
caaggcacattttcc

SEQ ID NO: 1451799 - DNA, 15 bp, Homo sapiens
tcaaggcacattttc

SEQ ID NO: 1451800 - DNA, 15 bp, Homo sapiens
gtcaaggcacatttt

SEQ ID NO: 1451801 - DNA, 15 bp, Homo sapiens
agtcaaggcacattt

SEQ ID NO: 1451802 - DNA, 15 bp, Homo sapiens
aagtcaaggcacatt

SEQ ID NO: 1451803 - DNA, 15 bp, Homo sapiens
gaagtcaaggcacat

SEQ ID NO: 1451804 - DNA, 15 bp, Homo sapiens
ggaagtcaaggcaca

SEQ ID NO: 1451805 - DNA, 15 bp, Homo sapiens
aggaagtcaaggcac

SEQ ID NO: 1451806 - DNA, 15 bp, Homo sapiens
aaggaagtcaaggca

SEQ ID NO: 1451807 - DNA, 15 bp, Homo sapiens
aaaggaagtcaaggc

SEQ ID NO: 1451808 - DNA, 15 bp, Homo sapiens
aaaaggaagtcaagg

SEQ ID NO: 1451809 - DNA, 15 bp, Homo sapiens
taaaaggaagtcaag

SEQ ID NO: 1451810 - DNA, 15 bp, Homo sapiens
ttaaaaggaagtcaa

SEQ ID NO: 1451811 - DNA, 15 bp, Homo sapiens
tttaaaaggaagtca

SEQ ID NO: 1451812 - DNA, 15 bp, Homo sapiens
atttaaaaggaagtc

SEQ ID NO: 1451813 - DNA, 15 bp, Homo sapiens
catttaaaaggaagt

SEQ ID NO: 1451814 - DNA, 15 bp, Homo sapiens
gcatttaaaaggaag

SEQ ID NO: 1451815 - DNA, 15 bp, Homo sapiens
ggcatttaaaaggaa

SEQ ID NO: 1451816 - DNA, 15 bp, Homo sapiens
aggcatttaaaagga

SEQ ID NO: 1451817 - DNA, 15 bp, Homo sapiens
aaggcatttaaaagg

SEQ ID NO: 1451818 - DNA, 15 bp, Homo sapiens
taaggcatttaaaag

SEQ ID NO: 1451819 - DNA, 15 bp, Homo sapiens
ataaggcatttaaaa

SEQ ID NO: 1451820 - DNA, 15 bp, Homo sapiens
aataaggcatttaaa

SEQ ID NO: 1451821 - DNA, 15 bp, Homo sapiens
aaataaggcatttaa

SEQ ID NO: 1451822 - DNA, 15 bp, Homo sapiens
aaaataaggcattta

SEQ ID NO: 1451823 - DNA, 15 bp, Homo sapiens
caaaataaggcattt

SEQ ID NO: 1451824 - DNA, 15 bp, Homo sapiens
acaaaataaggcatt

SEQ ID NO: 1451825 - DNA, 15 bp, Homo sapiens
gacaaaataaggcat

SEQ ID NO: 1451826 - DNA, 15 bp, Homo sapiens
agacaaaataaggca

SEQ ID NO: 1451827 - DNA, 15 bp, Homo sapiens
cagacaaaataaggc

SEQ ID NO: 1451828 - DNA, 15 bp, Homo sapiens
acagacaaaataagg

SEQ ID NO: 1451829 - DNA, 15 bp, Homo sapiens
cacagacaaaataag

SEQ ID NO: 1451830 - DNA, 15 bp, Homo sapiens
gcacagacaaaataa

SEQ ID NO: 1451831 - DNA, 15 bp, Homo sapiens
tgcacagacaaaata

SEQ ID NO: 1451832 - DNA, 15 bp, Homo sapiens
gtgcacagacaaaat

SEQ ID NO: 1451833 - DNA, 15 bp, Homo sapiens
tgtgcacagacaaaa

SEQ ID NO: 1451834 - DNA, 15 bp, Homo sapiens
atgtgcacagacaaa

SEQ ID NO: 1451835 - DNA, 15 bp, Homo sapiens
gatgtgcacagacaa

SEQ ID NO: 1451836 - DNA, 15 bp, Homo sapiens
tgatgtgcacagaca

SEQ ID NO: 1451837 - DNA, 15 bp, Homo sapiens
atgatgtgcacagac

SEQ ID NO: 1451838 - DNA, 15 bp, Homo sapiens
tatgatgtgcacaga

SEQ ID NO: 1451839 - DNA, 15 bp, Homo sapiens
gtatgatgtgcacag

SEQ ID NO: 1451840 - DNA, 15 bp, Homo sapiens
ggtatgatgtgcaca

SEQ ID NO: 1451841 - DNA, 15 bp, Homo sapiens
gggtatgatgtgcac

SEQ ID NO: 1451842 - DNA, 15 bp, Homo sapiens
tgggtatgatgtgca

SEQ ID NO: 1451843 - DNA, 15 bp, Homo sapiens
ctgggtatgatgtgc

SEQ ID NO: 1451844 - DNA, 15 bp, Homo sapiens
cctgggtatgatgtg

SEQ ID NO: 1451845 - DNA, 15 bp, Homo sapiens
tcctgggtatgatgt

SEQ ID NO: 1451846 - DNA, 15 bp, Homo sapiens
gtcctgggtatgatg

SEQ ID NO: 1451847 - DNA, 15 bp, Homo sapiens
agtcctgggtatgat

SEQ ID NO: 1451848 - DNA, 15 bp, Homo sapiens
cagtcctgggtatga

SEQ ID NO: 1451849 - DNA, 15 bp, Homo sapiens
acagtcctgggtatg

SEQ ID NO: 1451850 - DNA, 15 bp, Homo sapiens
aacagtcctgggtat

SEQ ID NO: 1451851 - DNA, 15 bp, Homo sapiens
caacagtcctgggta

SEQ ID NO: 1451852 - DNA, 15 bp, Homo sapiens
tcaacagtcctgggt

SEQ ID NO: 1451853 - DNA, 15 bp, Homo sapiens
ctcaacagtcctggg

SEQ ID NO: 1451854 - DNA, 15 bp, Homo sapiens
tctcaacagtcctgg

SEQ ID NO: 1451855 - DNA, 15 bp, Homo sapiens
atctcaacagtcctg

SEQ ID NO: 1451856 - DNA, 15 bp, Homo sapiens
catctcaacagtcct

SEQ ID NO: 1451857 - DNA, 15 bp, Homo sapiens
ccatctcaacagtcc

SEQ ID NO: 1451858 - DNA, 15 bp, Homo sapiens
accatctcaacagtc

SEQ ID NO: 1451859 - DNA, 15 bp, Homo sapiens
taccatctcaacagt

SEQ ID NO: 1451860 - DNA, 15 bp, Homo sapiens
ttaccatctcaacag

SEQ ID NO: 1451861 - DNA, 15 bp, Homo sapiens
cttaccatctcaaca

SEQ ID NO: 1451862 - DNA, 15 bp, Homo sapiens
tcttaccatctcaac

SEQ ID NO: 1451863 - DNA, 15 bp, Homo sapiens
ttcttaccatctcaa

SEQ ID NO: 1451864 - DNA, 15 bp, Homo sapiens
cttcttaccatctca

SEQ ID NO: 1451865 - DNA, 15 bp, Homo sapiens
tcttcttaccatctc

SEQ ID NO: 1451866 - DNA, 15 bp, Homo sapiens
atcttcttaccatct

SEQ ID NO: 1451867 - DNA, 15 bp, Homo sapiens
tatcttcttaccatc

SEQ ID NO: 1451868 - DNA, 15 bp, Homo sapiens
gtatcttcttaccat

SEQ ID NO: 1451869 - DNA, 15 bp, Homo sapiens
tgtatcttcttacca

SEQ ID NO: 1451870 - DNA, 15 bp, Homo sapiens
atgtatcttcttacc

SEQ ID NO: 1451871 - DNA, 15 bp, Homo sapiens
aatgtatcttcttac

SEQ ID NO: 1451872 - DNA, 15 bp, Homo sapiens
caatgtatcttctta

SEQ ID NO: 1451873 - DNA, 15 bp, Homo sapiens
ccaatgtatcttctt

SEQ ID NO: 1451874 - DNA, 15 bp, Homo sapiens
gccaatgtatcttct

SEQ ID NO: 1451875 - DNA, 15 bp, Homo sapiens
tgccaatgtatcttc

SEQ ID NO: 1451876 - DNA, 15 bp, Homo sapiens
atgccaatgtatctt

SEQ ID NO: 1451877 - DNA, 15 bp, Homo sapiens
aatgccaatgtatct

SEQ ID NO: 1451878 - DNA, 15 bp, Homo sapiens
aaatgccaatgtatc

SEQ ID NO: 1451879 - DNA, 15 bp, Homo sapiens
caaatgccaatgtat

SEQ ID NO: 1451880 - DNA, 15 bp, Homo sapiens
ccaaatgccaatgta

SEQ ID NO: 1451881 - DNA, 15 bp, Homo sapiens
cccaaatgccaatgt

SEQ ID NO: 1451882 - DNA, 15 bp, Homo sapiens
ccccaaatgccaatg

SEQ ID NO: 1451883 - DNA, 15 bp, Homo sapiens
cccccaaatgccaat

SEQ ID NO: 1451884 - DNA, 15 bp, Homo sapiens
ccccccaaatgccaa

SEQ ID NO: 1451885 - DNA, 15 bp, Homo sapiens
tccccccaaatgcca

SEQ ID NO: 1451886 - DNA, 15 bp, Homo sapiens
atccccccaaatgcc

SEQ ID NO: 1451887 - DNA, 15 bp, Homo sapiens
aatccccccaaatgc

SEQ ID NO: 1451888 - DNA, 15 bp, Homo sapiens
gaatccccccaaatg

SEQ ID NO: 1451889 - DNA, 15 bp, Homo sapiens
ggaatccccccaaat

SEQ ID NO: 1451890 - DNA, 15 bp, Homo sapiens
aggaatccccccaaa

SEQ ID NO: 1451891 - DNA, 15 bp, Homo sapiens
aaggaatccccccaa

SEQ ID NO: 1451892 - DNA, 15 bp, Homo sapiens
taaggaatcccccca

SEQ ID NO: 1451893 - DNA, 15 bp, Homo sapiens
gtaaggaatcccccc

SEQ ID NO: 1451894 - DNA, 15 bp, Homo sapiens
ggtaaggaatccccc

SEQ ID NO: 1451895 - DNA, 15 bp, Homo sapiens
gggtaaggaatcccc

SEQ ID NO: 1451896 - DNA, 15 bp, Homo sapiens
tgggtaaggaatccc

SEQ ID NO: 1451897 - DNA, 15 bp, Homo sapiens
gtgggtaaggaatcc

SEQ ID NO: 1451898 - DNA, 15 bp, Homo sapiens
ggtgggtaaggaatc

SEQ ID NO: 1451899 - DNA, 15 bp, Homo sapiens
aggtgggtaaggaat

SEQ ID NO: 1451900 - DNA, 15 bp, Homo sapiens
gaggtgggtaaggaa

SEQ ID NO: 1451901 - DNA, 15 bp, Homo sapiens
tgaggtgggtaagga

SEQ ID NO: 1451902 - DNA, 15 bp, Homo sapiens
atgaggtgggtaagg

SEQ ID NO: 1451903 - DNA, 15 bp, Homo sapiens
aatgaggtgggtaag

SEQ ID NO: 1451904 - DNA, 15 bp, Homo sapiens
aaatgaggtgggtaa

SEQ ID NO: 1451905 - DNA, 15 bp, Homo sapiens
gaaatgaggtgggta

SEQ ID NO: 1451906 - DNA, 15 bp, Homo sapiens
ggaaatgaggtgggt

SEQ ID NO: 1451907 - DNA, 15 bp, Homo sapiens
aggaaatgaggtggg

SEQ ID NO: 1451908 - DNA, 15 bp, Homo sapiens
aaggaaatgaggtgg

SEQ ID NO: 1451909 - DNA, 15 bp, Homo sapiens
caaggaaatgaggtg

SEQ ID NO: 1451910 - DNA, 15 bp, Homo sapiens
tcaaggaaatgaggt

SEQ ID NO: 1451911 - DNA, 15 bp, Homo sapiens
ctcaaggaaatgagg

SEQ ID NO: 1451912 - DNA, 15 bp, Homo sapiens
tctcaaggaaatgag

SEQ ID NO: 1451913 - DNA, 15 bp, Homo sapiens
ttctcaaggaaatga

SEQ ID NO: 1451914 - DNA, 15 bp, Homo sapiens
gttctcaaggaaatg

SEQ ID NO: 1451915 - DNA, 15 bp, Homo sapiens
ggttctcaaggaaat

SEQ ID NO: 1451916 - DNA, 15 bp, Homo sapiens
tggttctcaaggaaa

SEQ ID NO: 1451917 - DNA, 15 bp, Homo sapiens
ttggttctcaaggaa

SEQ ID NO: 1451918 - DNA, 15 bp, Homo sapiens
tttggttctcaagga

SEQ ID NO: 1451919 - DNA, 15 bp, Homo sapiens
atttggttctcaagg

SEQ ID NO: 1451920 - DNA, 15 bp, Homo sapiens
aatttggttctcaag

SEQ ID NO: 1451921 - DNA, 15 bp, Homo sapiens
gaatttggttctcaa

SEQ ID NO: 1451922 - DNA, 15 bp, Homo sapiens
agaatttggttctca

SEQ ID NO: 1451923 - DNA, 15 bp, Homo sapiens
tagaatttggttctc

SEQ ID NO: 1451924 - DNA, 15 bp, Homo sapiens
ttagaatttggttct

SEQ ID NO: 1451925 - DNA, 15 bp, Homo sapiens
tttagaatttggttc

SEQ ID NO: 1451926 - DNA, 15 bp, Homo sapiens
ctttagaatttggtt

SEQ ID NO: 1451927 - DNA, 15 bp, Homo sapiens
gctttagaatttggt

SEQ ID NO: 1451928 - DNA, 15 bp, Homo sapiens
agctttagaatttgg

SEQ ID NO: 1451929 - DNA, 15 bp, Homo sapiens
gagctttagaatttg

SEQ ID NO: 1451930 - DNA, 15 bp, Homo sapiens
agagctttagaattt

SEQ ID NO: 1451931 - DNA, 15 bp, Homo sapiens
aagagctttagaatt

SEQ ID NO: 1451932 - DNA, 15 bp, Homo sapiens
caagagctttagaat

SEQ ID NO: 1451933 - DNA, 15 bp, Homo sapiens
gcaagagctttagaa

SEQ ID NO: 1451934 - DNA, 15 bp, Homo sapiens
ggcaagagctttaga

SEQ ID NO: 1451935 - DNA, 15 bp, Homo sapiens
tggcaagagctttag

SEQ ID NO: 1451936 - DNA, 15 bp, Homo sapiens
ctggcaagagcttta

SEQ ID NO: 1451937 - DNA, 15 bp, Homo sapiens
gctggcaagagcttt

SEQ ID NO: 1451938 - DNA, 15 bp, Homo sapiens
ggctggcaagagctt

SEQ ID NO: 1451939 - DNA, 15 bp, Homo sapiens
aggctggcaagagct

SEQ ID NO: 1451940 - DNA, 15 bp, Homo sapiens
aaggctggcaagagc

SEQ ID NO: 1451941 - DNA, 15 bp, Homo sapiens
taaggctggcaagag

SEQ ID NO: 1451942 - DNA, 15 bp, Homo sapiens
gtaaggctggcaaga

SEQ ID NO: 1451943 - DNA, 15 bp, Homo sapiens
tgtaaggctggcaag

SEQ ID NO: 1451944 - DNA, 15 bp, Homo sapiens
ctgtaaggctggcaa

SEQ ID NO: 1451945 - DNA, 15 bp, Homo sapiens
tctgtaaggctggca

SEQ ID NO: 1451946 - DNA, 15 bp, Homo sapiens
gtctgtaaggctggc

SEQ ID NO: 1451947 - DNA, 15 bp, Homo sapiens
tgtctgtaaggctgg

SEQ ID NO: 1451948 - DNA, 15 bp, Homo sapiens
gtgtctgtaaggctg

SEQ ID NO: 1451949 - DNA, 15 bp, Homo sapiens
ggtgtctgtaaggct

SEQ ID NO: 1451950 - DNA, 15 bp, Homo sapiens
gggtgtctgtaaggc

SEQ ID NO: 1451951 - DNA, 15 bp, Homo sapiens
tgggtgtctgtaagg

SEQ ID NO: 1451952 - DNA, 15 bp, Homo sapiens
ttgggtgtctgtaag

SEQ ID NO: 1451953 - DNA, 15 bp, Homo sapiens
attgggtgtctgtaa

SEQ ID NO: 1451954 - DNA, 15 bp, Homo sapiens
cattgggtgtctgta

SEQ ID NO: 1451955 - DNA, 15 bp, Homo sapiens
ccattgggtgtctgt

SEQ ID NO: 1451956 - DNA, 15 bp, Homo sapiens
tccattgggtgtctg

SEQ ID NO: 1451957 - DNA, 15 bp, Homo sapiens
ttccattgggtgtct

SEQ ID NO: 1451958 - DNA, 15 bp, Homo sapiens
attccattgggtgtc

SEQ ID NO: 1451959 - DNA, 15 bp, Homo sapiens
gattccattgggtgt

SEQ ID NO: 1451960 - DNA, 15 bp, Homo sapiens
ggattccattgggtg

SEQ ID NO: 1451961 - DNA, 15 bp, Homo sapiens
gggattccattgggt

SEQ ID NO: 1451962 - DNA, 15 bp, Homo sapiens
agggattccattggg

SEQ ID NO: 1451963 - DNA, 15 bp, Homo sapiens
cagggattccattgg

SEQ ID NO: 1451964 - DNA, 15 bp, Homo sapiens
gcagggattccattg

SEQ ID NO: 1451965 - DNA, 15 bp, Homo sapiens
agcagggattccatt

SEQ ID NO: 1451966 - DNA, 15 bp, Homo sapiens
gagcagggattccat

SEQ ID NO: 1451967 - DNA, 15 bp, Homo sapiens
tgagcagggattcca

SEQ ID NO: 1451968 - DNA, 15 bp, Homo sapiens
atgagcagggattcc

SEQ ID NO: 1451969 - DNA, 15 bp, Homo sapiens
tatgagcagggattc

SEQ ID NO: 1451970 - DNA, 15 bp, Homo sapiens
atatgagcagggatt

SEQ ID NO: 1451971 - DNA, 15 bp, Homo sapiens
catatgagcagggat

SEQ ID NO: 1451972 - DNA, 15 bp, Homo sapiens
gcatatgagcaggga

SEQ ID NO: 1451973 - DNA, 15 bp, Homo sapiens
tgcatatgagcaggg

SEQ ID NO: 1451974 - DNA, 15 bp, Homo sapiens
atgcatatgagcagg

SEQ ID NO: 1451975 - DNA, 15 bp, Homo sapiens
tatgcatatgagcag

SEQ ID NO: 1451976 - DNA, 15 bp, Homo sapiens
atatgcatatgagca

SEQ ID NO: 1451977 - DNA, 15 bp, Homo sapiens
aatatgcatatgagc

SEQ ID NO: 1451978 - DNA, 15 bp, Homo sapiens
aaatatgcatatgag

SEQ ID NO: 1451979 - DNA, 15 bp, Homo sapiens
aaaatatgcatatga

SEQ ID NO: 1451980 - DNA, 15 bp, Homo sapiens
caaaatatgcatatg

SEQ ID NO: 1451981 - DNA, 15 bp, Homo sapiens
ccaaaatatgcatat

SEQ ID NO: 1451982 - DNA, 15 bp, Homo sapiens
cccaaaatatgcata

SEQ ID NO: 1451983 - DNA, 15 bp, Homo sapiens
acccaaaatatgcat

SEQ ID NO: 1451984 - DNA, 15 bp, Homo sapiens
cacccaaaatatgca

SEQ ID NO: 1451985 - DNA, 15 bp, Homo sapiens
gcacccaaaatatgc

SEQ ID NO: 1451986 - DNA, 15 bp, Homo sapiens
tgcacccaaaatatg

SEQ ID NO: 1451987 - DNA, 15 bp, Homo sapiens
atgcacccaaaatat

SEQ ID NO: 1451988 - DNA, 15 bp, Homo sapiens
gatgcacccaaaata

SEQ ID NO: 1451989 - DNA, 15 bp, Homo sapiens
tgatgcacccaaaat

SEQ ID NO: 1451990 - DNA, 15 bp, Homo sapiens
ctgatgcacccaaaa

SEQ ID NO: 1451991 - DNA, 15 bp, Homo sapiens
actgatgcacccaaa

SEQ ID NO: 1451992 - DNA, 15 bp, Homo sapiens
tactgatgcacccaa

SEQ ID NO: 1451993 - DNA, 15 bp, Homo sapiens
atactgatgcaccca

SEQ ID NO: 1451994 - DNA, 15 bp, Homo sapiens
catactgatgcaccc

SEQ ID NO: 1451995 - DNA, 15 bp, Homo sapiens
acatactgatgcacc

SEQ ID NO: 1451996 - DNA, 15 bp, Homo sapiens
aacatactgatgcac

SEQ ID NO: 1451997 - DNA, 15 bp, Homo sapiens
aaacatactgatgca

SEQ ID NO: 1451998 - DNA, 15 bp, Homo sapiens
caaacatactgatgc

SEQ ID NO: 1451999 - DNA, 15 bp, Homo sapiens
acaaacatactgatg

SEQ ID NO: 1452000 - DNA, 15 bp, Homo sapiens
gacaaacatactgat

SEQ ID NO: 1452001 - DNA, 15 bp, Homo sapiens
tgacaaacatactga

SEQ ID NO: 1452002 - DNA, 15 bp, Homo sapiens
atgacaaacatactg

SEQ ID NO: 1452003 - DNA, 15 bp, Homo sapiens
aatgacaaacatact

SEQ ID NO: 1452004 - DNA, 15 bp, Homo sapiens
aaatgacaaacatac

SEQ ID NO: 1452005 - DNA, 15 bp, Homo sapiens
aaaatgacaaacata

SEQ ID NO: 1452006 - DNA, 15 bp, Homo sapiens
gaaaatgacaaacat

SEQ ID NO: 1452007 - DNA, 15 bp, Homo sapiens
agaaaatgacaaaca

SEQ ID NO: 1452008 - DNA, 15 bp, Homo sapiens
gagaaaatgacaaac

SEQ ID NO: 1452009 - DNA, 15 bp, Homo sapiens
ggagaaaatgacaaa

SEQ ID NO: 1452010 - DNA, 15 bp, Homo sapiens
gggagaaaatgacaa

SEQ ID NO: 1452011 - DNA, 15 bp, Homo sapiens
agggagaaaatgaca

SEQ ID NO: 1452012 - DNA, 15 bp, Homo sapiens
cagggagaaaatgac

SEQ ID NO: 1452013 - DNA, 15 bp, Homo sapiens
ccagggagaaaatga

SEQ ID NO: 1452014 - DNA, 15 bp, Homo sapiens
tccagggagaaaatg

SEQ ID NO: 1452015 - DNA, 15 bp, Homo sapiens
ttccagggagaaaat

SEQ ID NO: 1452016 - DNA, 15 bp, Homo sapiens
tttccagggagaaaa

SEQ ID NO: 1452017 - DNA, 15 bp, Homo sapiens
gtttccagggagaaa

SEQ ID NO: 1452018 - DNA, 15 bp, Homo sapiens
cgtttccagggagaa

SEQ ID NO: 1452019 - DNA, 15 bp, Homo sapiens
ccgtttccagggaga

SEQ ID NO: 1452020 - DNA, 15 bp, Homo sapiens
accgtttccagggag

SEQ ID NO: 1452021 - DNA, 15 bp, Homo sapiens
aaccgtttccaggga

SEQ ID NO: 1452022 - DNA, 15 bp, Homo sapiens
aaaccgtttccaggg

SEQ ID NO: 1452023 - DNA, 15 bp, Homo sapiens
gaaaccgtttccagg

SEQ ID NO: 1452024 - DNA, 15 bp, Homo sapiens
agaaaccgtttccag

SEQ ID NO: 1452025 - DNA, 15 bp, Homo sapiens
gagaaaccgtttcca

SEQ ID NO: 1452026 - DNA, 15 bp, Homo sapiens
tgagaaaccgtttcc

SEQ ID NO: 1452027 - DNA, 15 bp, Homo sapiens
gtgagaaaccgtttc

SEQ ID NO: 1452028 - DNA, 15 bp, Homo sapiens
tgtgagaaaccgttt

SEQ ID NO: 1452029 - DNA, 15 bp, Homo sapiens
gtgtgagaaaccgtt

SEQ ID NO: 1452030 - DNA, 15 bp, Homo sapiens
ggtgtgagaaaccgt

SEQ ID NO: 1452031 - DNA, 15 bp, Homo sapiens
gggtgtgagaaaccg

SEQ ID NO: 1452032 - DNA, 15 bp, Homo sapiens
tgggtgtgagaaacc

SEQ ID NO: 1452033 - DNA, 15 bp, Homo sapiens
gtgggtgtgagaaac

SEQ ID NO: 1452034 - DNA, 15 bp, Homo sapiens
cgtgggtgtgagaaa

SEQ ID NO: 1452035 - DNA, 15 bp, Homo sapiens
acgtgggtgtgagaa

SEQ ID NO: 1452036 - DNA, 15 bp, Homo sapiens
aacgtgggtgtgaga

SEQ ID NO: 1452037 - DNA, 15 bp, Homo sapiens
caacgtgggtgtgag

SEQ ID NO: 1452038 - DNA, 15 bp, Homo sapiens
gcaacgtgggtgtga

SEQ ID NO: 1452039 - DNA, 15 bp, Homo sapiens
tgcaacgtgggtgtg

SEQ ID NO: 1452040 - DNA, 15 bp, Homo sapiens
ttgcaacgtgggtgt

SEQ ID NO: 1452041 - DNA, 15 bp, Homo sapiens
cttgcaacgtgggtg

SEQ ID NO: 1452042 - DNA, 15 bp, Homo sapiens
acttgcaacgtgggt

SEQ ID NO: 1452043 - DNA, 15 bp, Homo sapiens
cacttgcaacgtggg

SEQ ID NO: 1452044 - DNA, 15 bp, Homo sapiens
acacttgcaacgtgg

SEQ ID NO: 1452045 - DNA, 15 bp, Homo sapiens
cacacttgcaacgtg

SEQ ID NO: 1452046 - DNA, 15 bp, Homo sapiens
acacacttgcaacgt

SEQ ID NO: 1452047 - DNA, 15 bp, Homo sapiens
cacacacttgcaacg

SEQ ID NO: 1452048 - DNA, 15 bp, Homo sapiens
tcacacacttgcaac

SEQ ID NO: 1452049 - DNA, 15 bp, Homo sapiens
atcacacacttgcaa

SEQ ID NO: 1452050 - DNA, 15 bp, Homo sapiens
gatcacacacttgca

SEQ ID NO: 1452051 - DNA, 15 bp, Homo sapiens
agatcacacacttgc

SEQ ID NO: 1452052 - DNA, 15 bp, Homo sapiens
cagatcacacacttg

SEQ ID NO: 1452053 - DNA, 15 bp, Homo sapiens
acagatcacacactt

SEQ ID NO: 1452054 - DNA, 15 bp, Homo sapiens
cacagatcacacact

SEQ ID NO: 1452055 - DNA, 15 bp, Homo sapiens
tcacagatcacacac

SEQ ID NO: 1452056 - DNA, 15 bp, Homo sapiens
atcacagatcacaca

SEQ ID NO: 1452057 - DNA, 15 bp, Homo sapiens
aatcacagatcacac

SEQ ID NO: 1452058 - DNA, 15 bp, Homo sapiens
taatcacagatcaca

SEQ ID NO: 1452059 - DNA, 15 bp, Homo sapiens
ataatcacagatcac

SEQ ID NO: 1452060 - DNA, 15 bp, Homo sapiens
tataatcacagatca

SEQ ID NO: 1452061 - DNA, 15 bp, Homo sapiens
atataatcacagatc

SEQ ID NO: 1452062 - DNA, 15 bp, Homo sapiens
gatataatcacagat

SEQ ID NO: 1452063 - DNA, 15 bp, Homo sapiens
agatataatcacaga

SEQ ID NO: 1452064 - DNA, 15 bp, Homo sapiens
gagatataatcacag

SEQ ID NO: 1452065 - DNA, 15 bp, Homo sapiens
agagatataatcaca

SEQ ID NO: 1452066 - DNA, 15 bp, Homo sapiens
aagagatataatcac

SEQ ID NO: 1452067 - DNA, 15 bp, Homo sapiens
aaagagatataatca

SEQ ID NO: 1452068 - DNA, 15 bp, Homo sapiens
aaaagagatataatc

SEQ ID NO: 1452069 - DNA, 15 bp, Homo sapiens
gaaaagagatataat

SEQ ID NO: 1452070 - DNA, 15 bp, Homo sapiens
agaaaagagatataa

SEQ ID NO: 1452071 - DNA, 15 bp, Homo sapiens
cagaaaagagatata

SEQ ID NO: 1452072 - DNA, 15 bp, Homo sapiens
acagaaaagagatat

SEQ ID NO: 1452073 - DNA, 15 bp, Homo sapiens
cacagaaaagagata

SEQ ID NO: 1452074 - DNA, 15 bp, Homo sapiens
acacagaaaagagat

SEQ ID NO: 1452075 - DNA, 15 bp, Homo sapiens
gacacagaaaagaga

SEQ ID NO: 1452076 - DNA, 15 bp, Homo sapiens
ggacacagaaaagag

SEQ ID NO: 1452077 - DNA, 15 bp, Homo sapiens
aggacacagaaaaga

SEQ ID NO: 1452078 - DNA, 15 bp, Homo sapiens
gaggacacagaaaag

SEQ ID NO: 1452079 - DNA, 15 bp, Homo sapiens
agaggacacagaaaa

SEQ ID NO: 1452080 - DNA, 15 bp, Homo sapiens
aagaggacacagaaa

SEQ ID NO: 1452081 - DNA, 15 bp, Homo sapiens
aaagaggacacagaa

SEQ ID NO: 1452082 - DNA, 15 bp, Homo sapiens
caaagaggacacaga

SEQ ID NO: 1452083 - DNA, 15 bp, Homo sapiens
gcaaagaggacacag

SEQ ID NO: 1452084 - DNA, 15 bp, Homo sapiens
ggcaaagaggacaca

SEQ ID NO: 1452085 - DNA, 15 bp, Homo sapiens
aggcaaagaggacac

SEQ ID NO: 1452086 - DNA, 15 bp, Homo sapiens
caggcaaagaggaca

SEQ ID NO: 1452087 - DNA, 15 bp, Homo sapiens
ccaggcaaagaggac

SEQ ID NO: 1452088 - DNA, 15 bp, Homo sapiens
tccaggcaaagagga

SEQ ID NO: 1452089 - DNA, 15 bp, Homo sapiens
ctccaggcaaagagg

SEQ ID NO: 1452090 - DNA, 15 bp, Homo sapiens
gctccaggcaaagag

SEQ ID NO: 1452091 - DNA, 15 bp, Homo sapiens
cgctccaggcaaaga

SEQ ID NO: 1452092 - DNA, 15 bp, Homo sapiens
tcgctccaggcaaag

SEQ ID NO: 1452093 - DNA, 15 bp, Homo sapiens
ctcgctccaggcaaa

SEQ ID NO: 1452094 - DNA, 15 bp, Homo sapiens
cctcgctccaggcaa

SEQ ID NO: 1452095 - DNA, 15 bp, Homo sapiens
ccctcgctccaggca

SEQ ID NO: 1452096 - DNA, 15 bp, Homo sapiens
gccctcgctccaggc

SEQ ID NO: 1452097 - DNA, 15 bp, Homo sapiens
agccctcgctccagg

SEQ ID NO: 1452098 - DNA, 15 bp, Homo sapiens
cagccctcgctccag

SEQ ID NO: 1452099 - DNA, 15 bp, Homo sapiens
tcagccctcgctcca

SEQ ID NO: 1452100 - DNA, 15 bp, Homo sapiens
ctcagccctcgctcc

SEQ ID NO: 1452101 - DNA, 15 bp, Homo sapiens
tctcagccctcgctc

SEQ ID NO: 1452102 - DNA, 15 bp, Homo sapiens
ttctcagccctcgct

SEQ ID NO: 1452103 - DNA, 15 bp, Homo sapiens
gttctcagccctcgc

SEQ ID NO: 1452104 - DNA, 15 bp, Homo sapiens
tgttctcagccctcg

SEQ ID NO: 1452105 - DNA, 15 bp, Homo sapiens
atgttctcagccctc

SEQ ID NO: 1452106 - DNA, 15 bp, Homo sapiens
catgttctcagccct

SEQ ID NO: 1452107 - DNA, 15 bp, Homo sapiens
tcatgttctcagccc

SEQ ID NO: 1452108 - DNA, 15 bp, Homo sapiens
atcatgttctcagcc

SEQ ID NO: 1452109 - DNA, 15 bp, Homo sapiens
aatcatgttctcagc

SEQ ID NO: 1452110 - DNA, 15 bp, Homo sapiens
gaatcatgttctcag

SEQ ID NO: 1452111 - DNA, 15 bp, Homo sapiens
tgaatcatgttctca

SEQ ID NO: 1452112 - DNA, 15 bp, Homo sapiens
ctgaatcatgttctc

SEQ ID NO: 1452113 - DNA, 15 bp, Homo sapiens
gctgaatcatgttct

SEQ ID NO: 1452114 - DNA, 15 bp, Homo sapiens
agctgaatcatgttc

SEQ ID NO: 1452115 - DNA, 15 bp, Homo sapiens
aagctgaatcatgtt

SEQ ID NO: 1452116 - DNA, 15 bp, Homo sapiens
taagctgaatcatgt

SEQ ID NO: 1452117 - DNA, 15 bp, Homo sapiens
ctaagctgaatcatg

SEQ ID NO: 1452118 - DNA, 15 bp, Homo sapiens
cctaagctgaatcat

SEQ ID NO: 1452119 - DNA, 15 bp, Homo sapiens
ccctaagctgaatca

SEQ ID NO: 1452120 - DNA, 15 bp, Homo sapiens
tccctaagctgaatc

SEQ ID NO: 1452121 - DNA, 15 bp, Homo sapiens
ttccctaagctgaat

SEQ ID NO: 1452122 - DNA, 15 bp, Homo sapiens
tttccctaagctgaa

SEQ ID NO: 1452123 - DNA, 15 bp, Homo sapiens
atttccctaagctga

SEQ ID NO: 1452124 - DNA, 15 bp, Homo sapiens
catttccctaagctg

SEQ ID NO: 1452125 - DNA, 15 bp, Homo sapiens
tcatttccctaagct

SEQ ID NO: 1452126 - DNA, 15 bp, Homo sapiens
atcatttccctaagc

SEQ ID NO: 1452127 - DNA, 15 bp, Homo sapiens
tatcatttccctaag

SEQ ID NO: 1452128 - DNA, 15 bp, Homo sapiens
gtatcatttccctaa

SEQ ID NO: 1452129 - DNA, 15 bp, Homo sapiens
tgtatcatttcccta

SEQ ID NO: 1452130 - DNA, 15 bp, Homo sapiens
ttgtatcatttccct

SEQ ID NO: 1452131 - DNA, 15 bp, Homo sapiens
tttgtatcatttccc

SEQ ID NO: 1452132 - DNA, 15 bp, Homo sapiens
ttttgtatcatttcc

SEQ ID NO: 1452133 - DNA, 15 bp, Homo sapiens
attttgtatcatttc

SEQ ID NO: 1452134 - DNA, 15 bp, Homo sapiens
cattttgtatcattt

SEQ ID NO: 1452135 - DNA, 15 bp, Homo sapiens
acattttgtatcatt

SEQ ID NO: 1452136 - DNA, 15 bp, Homo sapiens
cacattttgtatcat

SEQ ID NO: 1452137 - DNA, 15 bp, Homo sapiens
ccacattttgtatca

SEQ ID NO: 1452138 - DNA, 15 bp, Homo sapiens
accacattttgtatc

SEQ ID NO: 1452139 - DNA, 15 bp, Homo sapiens
aaccacattttgtat

SEQ ID NO: 1452140 - DNA, 15 bp, Homo sapiens
caaccacattttgta

SEQ ID NO: 1452141 - DNA, 15 bp, Homo sapiens
acaaccacattttgt

SEQ ID NO: 1452142 - DNA, 15 bp, Homo sapiens
aacaaccacattttg

SEQ ID NO: 1452143 - DNA, 15 bp, Homo sapiens
taacaaccacatttt

SEQ ID NO: 1452144 - DNA, 15 bp, Homo sapiens
ttaacaaccacattt

SEQ ID NO: 1452145 - DNA, 15 bp, Homo sapiens
tttaacaaccacatt

SEQ ID NO: 1452146 - DNA, 15 bp, Homo sapiens
ctttaacaaccacat

SEQ ID NO: 1452147 - DNA, 15 bp, Homo sapiens
actttaacaaccaca

SEQ ID NO: 1452148 - DNA, 15 bp, Homo sapiens
cactttaacaaccac

SEQ ID NO: 1452149 - DNA, 15 bp, Homo sapiens
tcactttaacaacca

SEQ ID NO: 1452150 - DNA, 15 bp, Homo sapiens
atcactttaacaacc

SEQ ID NO: 1452151 - DNA, 15 bp, Homo sapiens
gatcactttaacaac

SEQ ID NO: 1452152 - DNA, 15 bp, Homo sapiens
agatcactttaacaa

SEQ ID NO: 1452153 - DNA, 15 bp, Homo sapiens
aagatcactttaaca

SEQ ID NO: 1452154 - DNA, 15 bp, Homo sapiens
aaagatcactttaac

SEQ ID NO: 1452155 - DNA, 15 bp, Homo sapiens
gaaagatcactttaa

SEQ ID NO: 1452156 - DNA, 15 bp, Homo sapiens
tgaaagatcacttta

SEQ ID NO: 1452157 - DNA, 15 bp, Homo sapiens
ttgaaagatcacttt

SEQ ID NO: 1452158 - DNA, 15 bp, Homo sapiens
tttgaaagatcactt

SEQ ID NO: 1452159 - DNA, 15 bp, Homo sapiens
ttttgaaagatcact

SEQ ID NO: 1452160 - DNA, 15 bp, Homo sapiens
tttttgaaagatcac

SEQ ID NO: 1452161 - DNA, 15 bp, Homo sapiens
ctttttgaaagatca

SEQ ID NO: 1452162 - DNA, 15 bp, Homo sapiens
gctttttgaaagatc

SEQ ID NO: 1452163 - DNA, 15 bp, Homo sapiens
tgctttttgaaagat

SEQ ID NO: 1452164 - DNA, 15 bp, Homo sapiens
ctgctttttgaaaga

SEQ ID NO: 1452165 - DNA, 15 bp, Homo sapiens
gctgctttttgaaag

SEQ ID NO: 1452166 - DNA, 15 bp, Homo sapiens
agctgctttttgaaa

SEQ ID NO: 1452167 - DNA, 15 bp, Homo sapiens
aagctgctttttgaa

SEQ ID NO: 1452168 - DNA, 15 bp, Homo sapiens
aaagctgctttttga

SEQ ID NO: 1452169 - DNA, 15 bp, Homo sapiens
aaaagctgctttttg

SEQ ID NO: 1452170 - DNA, 15 bp, Homo sapiens
aaaaagctgcttttt

SEQ ID NO: 1452171 - DNA, 15 bp, Homo sapiens
taaaaagctgctttt

SEQ ID NO: 1452172 - DNA, 15 bp, Homo sapiens
ataaaaagctgcttt

SEQ ID NO: 1452173 - DNA, 15 bp, Homo sapiens
tataaaaagctgctt

SEQ ID NO: 1452174 - DNA, 15 bp, Homo sapiens
atataaaaagctgct

SEQ ID NO: 1452175 - DNA, 15 bp, Homo sapiens
catataaaaagctgc

SEQ ID NO: 1452176 - DNA, 15 bp, Homo sapiens
acatataaaaagctg

SEQ ID NO: 1452177 - DNA, 15 bp, Homo sapiens
cacatataaaaagct

SEQ ID NO: 1452178 - DNA, 15 bp, Homo sapiens
acacatataaaaagc

SEQ ID NO: 1452179 - DNA, 15 bp, Homo sapiens
cacacatataaaaag

SEQ ID NO: 1452180 - DNA, 15 bp, Homo sapiens
gcacacatataaaaa

SEQ ID NO: 1452181 - DNA, 15 bp, Homo sapiens
tgcacacatataaaa

SEQ ID NO: 1452182 - DNA, 15 bp, Homo sapiens
ctgcacacatataaa

SEQ ID NO: 1452183 - DNA, 15 bp, Homo sapiens
actgcacacatataa

SEQ ID NO: 1452184 - DNA, 15 bp, Homo sapiens
gactgcacacatata

SEQ ID NO: 1452185 - DNA, 15 bp, Homo sapiens
tgactgcacacatat

SEQ ID NO: 1452186 - DNA, 15 bp, Homo sapiens
gtgactgcacacata

SEQ ID NO: 1452187 - DNA, 15 bp, Homo sapiens
agtgactgcacacat

SEQ ID NO: 1452188 - DNA, 15 bp, Homo sapiens
tagtgactgcacaca

SEQ ID NO: 1452189 - DNA, 15 bp, Homo sapiens
atagtgactgcacac

SEQ ID NO: 1452190 - DNA, 15 bp, Homo sapiens
catagtgactgcaca

SEQ ID NO: 1452191 - DNA, 15 bp, Homo sapiens
gcatagtgactgcac

SEQ ID NO: 1452192 - DNA, 15 bp, Homo sapiens
agcatagtgactgca

SEQ ID NO: 1452193 - DNA, 15 bp, Homo sapiens
aagcatagtgactgc

SEQ ID NO: 1452194 - DNA, 15 bp, Homo sapiens
caagcatagtgactg

SEQ ID NO: 1452195 - DNA, 15 bp, Homo sapiens
ccaagcatagtgact

SEQ ID NO: 1452196 - DNA, 15 bp, Homo sapiens
accaagcatagtgac

SEQ ID NO: 1452197 - DNA, 15 bp, Homo sapiens
caccaagcatagtga

SEQ ID NO: 1452198 - DNA, 15 bp, Homo sapiens
acaccaagcatagtg

SEQ ID NO: 1452199 - DNA, 15 bp, Homo sapiens
tacaccaagcatagt

SEQ ID NO: 1452200 - DNA, 15 bp, Homo sapiens
ctacaccaagcatag

SEQ ID NO: 1452201 - DNA, 15 bp, Homo sapiens
gctacaccaagcata

SEQ ID NO: 1452202 - DNA, 15 bp, Homo sapiens
ggctacaccaagcat

SEQ ID NO: 1452203 - DNA, 15 bp, Homo sapiens
aggctacaccaagca

SEQ ID NO: 1452204 - DNA, 15 bp, Homo sapiens
taggctacaccaagc

SEQ ID NO: 1452205 - DNA, 15 bp, Homo sapiens
ataggctacaccaag

SEQ ID NO: 1452206 - DNA, 15 bp, Homo sapiens
cataggctacaccaa

SEQ ID NO: 1452207 - DNA, 15 bp, Homo sapiens
tcataggctacacca

SEQ ID NO: 1452208 - DNA, 15 bp, Homo sapiens
gtcataggctacacc

SEQ ID NO: 1452209 - DNA, 15 bp, Homo sapiens
agtcataggctacac

SEQ ID NO: 1452210 - DNA, 15 bp, Homo sapiens
aagtcataggctaca

SEQ ID NO: 1452211 - DNA, 15 bp, Homo sapiens
gaagtcataggctac

SEQ ID NO: 1452212 - DNA, 15 bp, Homo sapiens
tgaagtcataggcta

SEQ ID NO: 1452213 - DNA, 15 bp, Homo sapiens
atgaagtcataggct

SEQ ID NO: 1452214 - DNA, 15 bp, Homo sapiens
aatgaagtcataggc

SEQ ID NO: 1452215 - DNA, 15 bp, Homo sapiens
gaatgaagtcatagg

SEQ ID NO: 1452216 - DNA, 15 bp, Homo sapiens
tgaatgaagtcatag

SEQ ID NO: 1452217 - DNA, 15 bp, Homo sapiens
gtgaatgaagtcata

SEQ ID NO: 1452218 - DNA, 15 bp, Homo sapiens
ggtgaatgaagtcat

SEQ ID NO: 1452219 - DNA, 15 bp, Homo sapiens
aggtgaatgaagtca

SEQ ID NO: 1452220 - DNA, 15 bp, Homo sapiens
caggtgaatgaagtc

SEQ ID NO: 1452221 - DNA, 15 bp, Homo sapiens
tcaggtgaatgaagt

SEQ ID NO: 1452222 - DNA, 15 bp, Homo sapiens
ttcaggtgaatgaag

SEQ ID NO: 1452223 - DNA, 15 bp, Homo sapiens
cttcaggtgaatgaa

SEQ ID NO: 1452224 - DNA, 15 bp, Homo sapiens
gcttcaggtgaatga

SEQ ID NO: 1452225 - DNA, 15 bp, Homo sapiens
tgcttcaggtgaatg

SEQ ID NO: 1452226 - DNA, 15 bp, Homo sapiens
ttgcttcaggtgaat

SEQ ID NO: 1452227 - DNA, 15 bp, Homo sapiens
attgcttcaggtgaa

SEQ ID NO: 1452228 - DNA, 15 bp, Homo sapiens
cattgcttcaggtga

SEQ ID NO: 1452229 - DNA, 15 bp, Homo sapiens
tcattgcttcaggtg

SEQ ID NO: 1452230 - DNA, 15 bp, Homo sapiens
ttcattgcttcaggt

SEQ ID NO: 1452231 - DNA, 15 bp, Homo sapiens
cttcattgcttcagg

SEQ ID NO: 1452232 - DNA, 15 bp, Homo sapiens
gcttcattgcttcag

SEQ ID NO: 1452233 - DNA, 15 bp, Homo sapiens
tgcttcattgcttca

SEQ ID NO: 1452234 - DNA, 15 bp, Homo sapiens
ctgcttcattgcttc

SEQ ID NO: 1452235 - DNA, 15 bp, Homo sapiens
tctgcttcattgctt

SEQ ID NO: 1452236 - DNA, 15 bp, Homo sapiens
atctgcttcattgct

SEQ ID NO: 1452237 - DNA, 15 bp, Homo sapiens
aatctgcttcattgc

SEQ ID NO: 1452238 - DNA, 15 bp, Homo sapiens
gaatctgcttcattg

SEQ ID NO: 1452239 - DNA, 15 bp, Homo sapiens
ggaatctgcttcatt

SEQ ID NO: 1452240 - DNA, 15 bp, Homo sapiens
tggaatctgcttcat

SEQ ID NO: 1452241 - DNA, 15 bp, Homo sapiens
ctggaatctgcttca

SEQ ID NO: 1452242 - DNA, 15 bp, Homo sapiens
cctggaatctgcttc

SEQ ID NO: 1452243 - DNA, 15 bp, Homo sapiens
tcctggaatctgctt

SEQ ID NO: 1452244 - DNA, 15 bp, Homo sapiens
atcctggaatctgct

SEQ ID NO: 1452245 - DNA, 15 bp, Homo sapiens
aatcctggaatctgc

SEQ ID NO: 1452246 - DNA, 15 bp, Homo sapiens
aaatcctggaatctg

SEQ ID NO: 1452247 - DNA, 15 bp, Homo sapiens
aaaatcctggaatct

SEQ ID NO: 1452248 - DNA, 15 bp, Homo sapiens
taaaatcctggaatc

SEQ ID NO: 1452249 - DNA, 15 bp, Homo sapiens
ctaaaatcctggaat

SEQ ID NO: 1452250 - DNA, 15 bp, Homo sapiens
tctaaaatcctggaa

SEQ ID NO: 1452251 - DNA, 15 bp, Homo sapiens
ttctaaaatcctgga

SEQ ID NO: 1452252 - DNA, 15 bp, Homo sapiens
attctaaaatcctgg

SEQ ID NO: 1452253 - DNA, 15 bp, Homo sapiens
aattctaaaatcctg

SEQ ID NO: 1452254 - DNA, 15 bp, Homo sapiens
taattctaaaatcct

SEQ ID NO: 1452255 - DNA, 15 bp, Homo sapiens
ataattctaaaatcc

SEQ ID NO: 1452256 - DNA, 15 bp, Homo sapiens
cataattctaaaatc

SEQ ID NO: 1452257 - DNA, 15 bp, Homo sapiens
ccataattctaaaat

SEQ ID NO: 1452258 - DNA, 15 bp, Homo sapiens
accataattctaaaa

SEQ ID NO: 1452259 - DNA, 15 bp, Homo sapiens
gaccataattctaaa

SEQ ID NO: 1452260 - DNA, 15 bp, Homo sapiens
agaccataattctaa

SEQ ID NO: 1452261 - DNA, 15 bp, Homo sapiens
aagaccataattcta

SEQ ID NO: 1452262 - DNA, 15 bp, Homo sapiens
caagaccataattct

SEQ ID NO: 1452263 - DNA, 15 bp, Homo sapiens
ccaagaccataattc

SEQ ID NO: 1452264 - DNA, 15 bp, Homo sapiens
tccaagaccataatt

SEQ ID NO: 1452265 - DNA, 15 bp, Homo sapiens
gtccaagaccataat

SEQ ID NO: 1452266 - DNA, 15 bp, Homo sapiens
tgtccaagaccataa

SEQ ID NO: 1452267 - DNA, 15 bp, Homo sapiens
ttgtccaagaccata

SEQ ID NO: 1452268 - DNA, 15 bp, Homo sapiens
tttgtccaagaccat

SEQ ID NO: 1452269 - DNA, 15 bp, Homo sapiens
gtttgtccaagacca

SEQ ID NO: 1452270 - DNA, 15 bp, Homo sapiens
ggtttgtccaagacc

SEQ ID NO: 1452271 - DNA, 15 bp, Homo sapiens
aggtttgtccaagac

SEQ ID NO: 1452272 - DNA, 15 bp, Homo sapiens
taggtttgtccaaga

SEQ ID NO: 1452273 - DNA, 15 bp, Homo sapiens
ctaggtttgtccaag

SEQ ID NO: 1452274 - DNA, 15 bp, Homo sapiens
tctaggtttgtccaa

SEQ ID NO: 1452275 - DNA, 15 bp, Homo sapiens
ttctaggtttgtcca

SEQ ID NO: 1452276 - DNA, 15 bp, Homo sapiens
cttctaggtttgtcc

SEQ ID NO: 1452277 - DNA, 15 bp, Homo sapiens
tcttctaggtttgtc

SEQ ID NO: 1452278 - DNA, 15 bp, Homo sapiens
gtcttctaggtttgt

SEQ ID NO: 1452279 - DNA, 15 bp, Homo sapiens
tgtcttctaggtttg

SEQ ID NO: 1452280 - DNA, 15 bp, Homo sapiens
gtgtcttctaggttt

SEQ ID NO: 1452281 - DNA, 15 bp, Homo sapiens
ggtgtcttctaggtt

SEQ ID NO: 1452282 - DNA, 15 bp, Homo sapiens
aggtgtcttctaggt

SEQ ID NO: 1452283 - DNA, 15 bp, Homo sapiens
caggtgtcttctagg

SEQ ID NO: 1452284 - DNA, 15 bp, Homo sapiens
gcaggtgtcttctag

SEQ ID NO: 1452285 - DNA, 15 bp, Homo sapiens
agcaggtgtcttcta

SEQ ID NO: 1452286 - DNA, 15 bp, Homo sapiens
aagcaggtgtcttct

SEQ ID NO: 1452287 - DNA, 15 bp, Homo sapiens
aaagcaggtgtcttc

SEQ ID NO: 1452288 - DNA, 15 bp, Homo sapiens
aaaagcaggtgtctt

SEQ ID NO: 1452289 - DNA, 15 bp, Homo sapiens
taaaagcaggtgtct

SEQ ID NO: 1452290 - DNA, 15 bp, Homo sapiens
ctaaaagcaggtgtc

SEQ ID NO: 1452291 - DNA, 15 bp, Homo sapiens
cctaaaagcaggtgt

SEQ ID NO: 1452292 - DNA, 15 bp, Homo sapiens
gcctaaaagcaggtg

SEQ ID NO: 1452293 - DNA, 15 bp, Homo sapiens
ggcctaaaagcaggt

SEQ ID NO: 1452294 - DNA, 15 bp, Homo sapiens
gggcctaaaagcagg

SEQ ID NO: 1452295 - DNA, 15 bp, Homo sapiens
agggcctaaaagcag

SEQ ID NO: 1452296 - DNA, 15 bp, Homo sapiens
aagggcctaaaagca

SEQ ID NO: 1452297 - DNA, 15 bp, Homo sapiens
caagggcctaaaagc

SEQ ID NO: 1452298 - DNA, 15 bp, Homo sapiens
ccaagggcctaaaag

SEQ ID NO: 1452299 - DNA, 15 bp, Homo sapiens
tccaagggcctaaaa

SEQ ID NO: 1452300 - DNA, 15 bp, Homo sapiens
atccaagggcctaaa

SEQ ID NO: 1452301 - DNA, 15 bp, Homo sapiens
tatccaagggcctaa

SEQ ID NO: 1452302 - DNA, 15 bp, Homo sapiens
atatccaagggccta

SEQ ID NO: 1452303 - DNA, 15 bp, Homo sapiens
tatatccaagggcct

SEQ ID NO: 1452304 - DNA, 15 bp, Homo sapiens
ttatatccaagggcc

SEQ ID NO: 1452305 - DNA, 15 bp, Homo sapiens
attatatccaagggc

SEQ ID NO: 1452306 - DNA, 15 bp, Homo sapiens
gattatatccaaggg

SEQ ID NO: 1452307 - DNA, 15 bp, Homo sapiens
agattatatccaagg

SEQ ID NO: 1452308 - DNA, 15 bp, Homo sapiens
aagattatatccaag

SEQ ID NO: 1452309 - DNA, 15 bp, Homo sapiens
taagattatatccaa

SEQ ID NO: 1452310 - DNA, 15 bp, Homo sapiens
ataagattatatcca

SEQ ID NO: 1452311 - DNA, 15 bp, Homo sapiens
aataagattatatcc

SEQ ID NO: 1452312 - DNA, 15 bp, Homo sapiens
aaataagattatatc

SEQ ID NO: 1452313 - DNA, 15 bp, Homo sapiens
gaaataagattatat

SEQ ID NO: 1452314 - DNA, 15 bp, Homo sapiens
tgaaataagattata

SEQ ID NO: 1452315 - DNA, 15 bp, Homo sapiens
atgaaataagattat

SEQ ID NO: 1452316 - DNA, 15 bp, Homo sapiens
aatgaaataagatta

SEQ ID NO: 1452317 - DNA, 15 bp, Homo sapiens
aaatgaaataagatt

SEQ ID NO: 1452318 - DNA, 15 bp, Homo sapiens
taaatgaaataagat

SEQ ID NO: 1452319 - DNA, 15 bp, Homo sapiens
ttaaatgaaataaga

SEQ ID NO: 1452320 - DNA, 15 bp, Homo sapiens
tttaaatgaaataag

SEQ ID NO: 1452321 - DNA, 15 bp, Homo sapiens
ttttaaatgaaataa

SEQ ID NO: 1452322 - DNA, 15 bp, Homo sapiens
cttttaaatgaaata

SEQ ID NO: 1452323 - DNA, 15 bp, Homo sapiens
tcttttaaatgaaat

SEQ ID NO: 1452324 - DNA, 15 bp, Homo sapiens
atcttttaaatgaaa

SEQ ID NO: 1452325 - DNA, 15 bp, Homo sapiens
aatcttttaaatgaa

SEQ ID NO: 1452326 - DNA, 15 bp, Homo sapiens
aaatcttttaaatga

SEQ ID NO: 1452327 - DNA, 15 bp, Homo sapiens
aaaatcttttaaatg

SEQ ID NO: 1452328 - DNA, 15 bp, Homo sapiens
caaaatcttttaaat

SEQ ID NO: 1452329 - DNA, 15 bp, Homo sapiens
tcaaaatcttttaaa

SEQ ID NO: 1452330 - DNA, 15 bp, Homo sapiens
ttcaaaatcttttaa

SEQ ID NO: 1452331 - DNA, 15 bp, Homo sapiens
cttcaaaatctttta

SEQ ID NO: 1452332 - DNA, 15 bp, Homo sapiens
tcttcaaaatctttt

SEQ ID NO: 1452333 - DNA, 15 bp, Homo sapiens
atcttcaaaatcttt

SEQ ID NO: 1452334 - DNA, 15 bp, Homo sapiens
aatcttcaaaatctt

SEQ ID NO: 1452335 - DNA, 15 bp, Homo sapiens
aaatcttcaaaatct

SEQ ID NO: 1452336 - DNA, 15 bp, Homo sapiens
aaaatcttcaaaatc

SEQ ID NO: 1452337 - DNA, 15 bp, Homo sapiens
caaaatcttcaaaat

SEQ ID NO: 1452338 - DNA, 15 bp, Homo sapiens
tcaaaatcttcaaaa

SEQ ID NO: 1452339 - DNA, 15 bp, Homo sapiens
ctcaaaatcttcaaa

SEQ ID NO: 1452340 - DNA, 15 bp, Homo sapiens
tctcaaaatcttcaa

SEQ ID NO: 1452341 - DNA, 15 bp, Homo sapiens
gtctcaaaatcttca

SEQ ID NO: 1452342 - DNA, 15 bp, Homo sapiens
tgtctcaaaatcttc

SEQ ID NO: 1452343 - DNA, 15 bp, Homo sapiens
ttgtctcaaaatctt

SEQ ID NO: 1452344 - DNA, 15 bp, Homo sapiens
tttgtctcaaaatct

SEQ ID NO: 1452345 - DNA, 15 bp, Homo sapiens
ctttgtctcaaaatc

SEQ ID NO: 1452346 - DNA, 15 bp, Homo sapiens
cctttgtctcaaaat

SEQ ID NO: 1452347 - DNA, 15 bp, Homo sapiens
gcctttgtctcaaaa

SEQ ID NO: 1452348 - DNA, 15 bp, Homo sapiens
cgcctttgtctcaaa

SEQ ID NO: 1452349 - DNA, 15 bp, Homo sapiens
gcgcctttgtctcaa

SEQ ID NO: 1452350 - DNA, 15 bp, Homo sapiens
cgcgcctttgtctca

SEQ ID NO: 1452351 - DNA, 15 bp, Homo sapiens
acgcgcctttgtctc

SEQ ID NO: 1452352 - DNA, 15 bp, Homo sapiens
cacgcgcctttgtct

SEQ ID NO: 1452353 - DNA, 15 bp, Homo sapiens
gcacgcgcctttgtc

SEQ ID NO: 1452354 - DNA, 15 bp, Homo sapiens
agcacgcgcctttgt

SEQ ID NO: 1452355 - DNA, 15 bp, Homo sapiens
tagcacgcgcctttg

SEQ ID NO: 1452356 - DNA, 15 bp, Homo sapiens
ttagcacgcgccttt

SEQ ID NO: 1452357 - DNA, 15 bp, Homo sapiens
gttagcacgcgcctt

SEQ ID NO: 1452358 - DNA, 15 bp, Homo sapiens
agttagcacgcgcct

SEQ ID NO: 1452359 - DNA, 15 bp, Homo sapiens
aagttagcacgcgcc

SEQ ID NO: 1452360 - DNA, 15 bp, Homo sapiens
aaagttagcacgcgc

SEQ ID NO: 1452361 - DNA, 15 bp, Homo sapiens
caaagttagcacgcg

SEQ ID NO: 1452362 - DNA, 15 bp, Homo sapiens
gcaaagttagcacgc

SEQ ID NO: 1452363 - DNA, 15 bp, Homo sapiens
agcaaagttagcacg

SEQ ID NO: 1452364 - DNA, 15 bp, Homo sapiens
gagcaaagttagcac

SEQ ID NO: 1452365 - DNA, 15 bp, Homo sapiens
ggagcaaagttagca

SEQ ID NO: 1452366 - DNA, 15 bp, Homo sapiens
cggagcaaagttagc

SEQ ID NO: 1452367 - DNA, 15 bp, Homo sapiens
acggagcaaagttag

SEQ ID NO: 1452368 - DNA, 15 bp, Homo sapiens
cacggagcaaagtta

SEQ ID NO: 1452369 - DNA, 15 bp, Homo sapiens
tcacggagcaaagtt

SEQ ID NO: 1452370 - DNA, 15 bp, Homo sapiens
atcacggagcaaagt

SEQ ID NO: 1452371 - DNA, 15 bp, Homo sapiens
aatcacggagcaaag

SEQ ID NO: 1452372 - DNA, 15 bp, Homo sapiens
taatcacggagcaaa

SEQ ID NO: 1452373 - DNA, 15 bp, Homo sapiens
ttaatcacggagcaa

SEQ ID NO: 1452374 - DNA, 15 bp, Homo sapiens
attaatcacggagca

SEQ ID NO: 1452375 - DNA, 15 bp, Homo sapiens
gattaatcacggagc

SEQ ID NO: 1452376 - DNA, 15 bp, Homo sapiens
ggattaatcacggag

SEQ ID NO: 1452377 - DNA, 15 bp, Homo sapiens
aggattaatcacgga

SEQ ID NO: 1452378 - DNA, 15 bp, Homo sapiens
aaggattaatcacgg

SEQ ID NO: 1452379 - DNA, 15 bp, Homo sapiens
gaaggattaatcacg

SEQ ID NO: 1452380 - DNA, 15 bp, Homo sapiens
ggaaggattaatcac

SEQ ID NO: 1452381 - DNA, 15 bp, Homo sapiens
tggaaggattaatca

SEQ ID NO: 1452382 - DNA, 15 bp, Homo sapiens
ctggaaggattaatc

SEQ ID NO: 1452383 - DNA, 15 bp, Homo sapiens
tctggaaggattaat

SEQ ID NO: 1452384 - DNA, 15 bp, Homo sapiens
ctctggaaggattaa

SEQ ID NO: 1452385 - DNA, 15 bp, Homo sapiens
actctggaaggatta

SEQ ID NO: 1452386 - DNA, 15 bp, Homo sapiens
aactctggaaggatt

SEQ ID NO: 1452387 - DNA, 15 bp, Homo sapiens
aaactctggaaggat

SEQ ID NO: 1452388 - DNA, 15 bp, Homo sapiens
caaactctggaagga

SEQ ID NO: 1452389 - DNA, 15 bp, Homo sapiens
acaaactctggaagg

SEQ ID NO: 1452390 - DNA, 15 bp, Homo sapiens
aacaaactctggaag

SEQ ID NO: 1452391 - DNA, 15 bp, Homo sapiens
caacaaactctggaa

SEQ ID NO: 1452392 - DNA, 15 bp, Homo sapiens
gcaacaaactctgga

SEQ ID NO: 1452393 - DNA, 15 bp, Homo sapiens
ggcaacaaactctgg

SEQ ID NO: 1452394 - DNA, 15 bp, Homo sapiens
tggcaacaaactctg

SEQ ID NO: 1452395 - DNA, 15 bp, Homo sapiens
atggcaacaaactct

SEQ ID NO: 1452396 - DNA, 15 bp, Homo sapiens
gatggcaacaaactc

SEQ ID NO: 1452397 - DNA, 15 bp, Homo sapiens
agatggcaacaaact

SEQ ID NO: 1452398 - DNA, 15 bp, Homo sapiens
aagatggcaacaaac

SEQ ID NO: 1452399 - DNA, 15 bp, Homo sapiens
caagatggcaacaaa

SEQ ID NO: 1452400 - DNA, 15 bp, Homo sapiens
tcaagatggcaacaa

SEQ ID NO: 1452401 - DNA, 15 bp, Homo sapiens
atcaagatggcaaca

SEQ ID NO: 1452402 - DNA, 15 bp, Homo sapiens
aatcaagatggcaac

SEQ ID NO: 1452403 - DNA, 15 bp, Homo sapiens
aaatcaagatggcaa

SEQ ID NO: 1452404 - DNA, 15 bp, Homo sapiens
aaaatcaagatggca

SEQ ID NO: 1452405 - DNA, 15 bp, Homo sapiens
tttttgatataaaat

SEQ ID NO: 1452406 - DNA, 15 bp, Homo sapiens
atttttgatataaaa

SEQ ID NO: 1452407 - DNA, 15 bp, Homo sapiens
gatttttgatataaa

SEQ ID NO: 1452408 - DNA, 15 bp, Homo sapiens
tgatttttgatataa

SEQ ID NO: 1452409 - DNA, 15 bp, Homo sapiens
atgatttttgatata

SEQ ID NO: 1452410 - DNA, 15 bp, Homo sapiens
catgatttttgatat

SEQ ID NO: 1452411 - DNA, 15 bp, Homo sapiens
tcatgatttttgata

SEQ ID NO: 1452412 - DNA, 15 bp, Homo sapiens
ctcatgatttttgat

SEQ ID NO: 1452413 - DNA, 15 bp, Homo sapiens
cctcatgatttttga

SEQ ID NO: 1452414 - DNA, 15 bp, Homo sapiens
tcctcatgatttttg

SEQ ID NO: 1452415 - DNA, 15 bp, Homo sapiens
ttcctcatgattttt

SEQ ID NO: 1452416 - DNA, 15 bp, Homo sapiens
tttcctcatgatttt

SEQ ID NO: 1452417 - DNA, 15 bp, Homo sapiens
ttttcctcatgattt

SEQ ID NO: 1452418 - DNA, 15 bp, Homo sapiens
attttcctcatgatt

SEQ ID NO: 1452419 - DNA, 15 bp, Homo sapiens
cattttcctcatgat

SEQ ID NO: 1452420 - DNA, 15 bp, Homo sapiens
acattttcctcatga

SEQ ID NO: 1452421 - DNA, 15 bp, Homo sapiens
aacattttcctcatg

SEQ ID NO: 1452422 - DNA, 15 bp, Homo sapiens
aaacattttcctcat

SEQ ID NO: 1452423 - DNA, 15 bp, Homo sapiens
gaaacattttcctca

SEQ ID NO: 1452424 - DNA, 15 bp, Homo sapiens
agaaacattttcctc

SEQ ID NO: 1452425 - DNA, 15 bp, Homo sapiens
aagaaacattttcct

SEQ ID NO: 1452426 - DNA, 15 bp, Homo sapiens
caagaaacattttcc

SEQ ID NO: 1452427 - DNA, 15 bp, Homo sapiens
tcaagaaacattttc

SEQ ID NO: 1452428 - DNA, 15 bp, Homo sapiens
gtcaagaaacatttt

SEQ ID NO: 1452429 - DNA, 15 bp, Homo sapiens
ggtcaagaaacattt

SEQ ID NO: 1452430 - DNA, 15 bp, Homo sapiens
aggtcaagaaacatt

SEQ ID NO: 1452431 - DNA, 15 bp, Homo sapiens
gaggtcaagaaacat

SEQ ID NO: 1452432 - DNA, 15 bp, Homo sapiens
ggaggtcaagaaaca

SEQ ID NO: 1452433 - DNA, 15 bp, Homo sapiens
aggaggtcaagaaac

SEQ ID NO: 1452434 - DNA, 15 bp, Homo sapiens
aaggaggtcaagaaa

SEQ ID NO: 1452435 - DNA, 15 bp, Homo sapiens
aaaggaggtcaagaa

SEQ ID NO: 1452436 - DNA, 15 bp, Homo sapiens
aaaaggaggtcaaga

SEQ ID NO: 1452437 - DNA, 15 bp, Homo sapiens
taaaaggaggtcaag

SEQ ID NO: 1452438 - DNA, 15 bp, Homo sapiens
ttaaaaggaggtcaa

SEQ ID NO: 1452439 - DNA, 15 bp, Homo sapiens
tttaaaaggaggtca

SEQ ID NO: 1452440 - DNA, 15 bp, Homo sapiens
atttaaaaggaggtc

SEQ ID NO: 1452441 - DNA, 15 bp, Homo sapiens
catttaaaaggaggt

SEQ ID NO: 1452442 - DNA, 15 bp, Homo sapiens
gcatttaaaaggagg

SEQ ID NO: 1452443 - DNA, 15 bp, Homo sapiens
ggcatttaaaaggag

SEQ ID NO: 1452444 - DNA, 15 bp, Homo sapiens
tggcatttaaaagga

SEQ ID NO: 1452445 - DNA, 15 bp, Homo sapiens
atggcatttaaaagg

SEQ ID NO: 1452446 - DNA, 15 bp, Homo sapiens
tatggcatttaaaag

SEQ ID NO: 1452447 - DNA, 15 bp, Homo sapiens
atatggcatttaaaa

SEQ ID NO: 1452448 - DNA, 15 bp, Homo sapiens
aatatggcatttaaa

SEQ ID NO: 1452449 - DNA, 15 bp, Homo sapiens
aaatatggcatttaa

SEQ ID NO: 1452450 - DNA, 15 bp, Homo sapiens
gaaatatggcattta

SEQ ID NO: 1452451 - DNA, 15 bp, Homo sapiens
tgaaatatggcattt

SEQ ID NO: 1452452 - DNA, 15 bp, Homo sapiens
atgaaatatggcatt

SEQ ID NO: 1452453 - DNA, 15 bp, Homo sapiens
gatgaaatatggcat

SEQ ID NO: 1452454 - DNA, 15 bp, Homo sapiens
agatgaaatatggca

SEQ ID NO: 1452455 - DNA, 15 bp, Homo sapiens
cagatgaaatatggc

SEQ ID NO: 1452456 - DNA, 15 bp, Homo sapiens
acagatgaaatatgg

SEQ ID NO: 1452457 - DNA, 15 bp, Homo sapiens
cacagatgaaatatg

SEQ ID NO: 1452458 - DNA, 15 bp, Homo sapiens
gcacagatgaaatat

SEQ ID NO: 1452459 - DNA, 15 bp, Homo sapiens
tgcacagatgaaata

SEQ ID NO: 1452460 - DNA, 15 bp, Homo sapiens
gtgcacagatgaaat

SEQ ID NO: 1452461 - DNA, 15 bp, Homo sapiens
tgtgcacagatgaaa

SEQ ID NO: 1452462 - DNA, 15 bp, Homo sapiens
atgtgcacagatgaa

SEQ ID NO: 1452463 - DNA, 15 bp, Homo sapiens
aatgtgcacagatga

SEQ ID NO: 1452464 - DNA, 15 bp, Homo sapiens
caatgtgcacagatg

SEQ ID NO: 1452465 - DNA, 15 bp, Homo sapiens
acaatgtgcacagat

SEQ ID NO: 1452466 - DNA, 15 bp, Homo sapiens
tacaatgtgcacaga

SEQ ID NO: 1452467 - DNA, 15 bp, Homo sapiens
gtacaatgtgcacag

SEQ ID NO: 1452468 - DNA, 15 bp, Homo sapiens
ggtacaatgtgcaca

SEQ ID NO: 1452469 - DNA, 15 bp, Homo sapiens
gggtacaatgtgcac

SEQ ID NO: 1452470 - DNA, 15 bp, Homo sapiens
tgggtacaatgtgca

SEQ ID NO: 1452471 - DNA, 15 bp, Homo sapiens
ctgggtacaatgtgc

SEQ ID NO: 1452472 - DNA, 15 bp, Homo sapiens
cctgggtacaatgtg

SEQ ID NO: 1452473 - DNA, 15 bp, Homo sapiens
tcctgggtacaatgt

SEQ ID NO: 1452474 - DNA, 15 bp, Homo sapiens
atcctgggtacaatg

SEQ ID NO: 1452475 - DNA, 15 bp, Homo sapiens
aatcctgggtacaat

SEQ ID NO: 1452476 - DNA, 15 bp, Homo sapiens
caatcctgggtacaa

SEQ ID NO: 1452477 - DNA, 15 bp, Homo sapiens
acaatcctgggtaca

SEQ ID NO: 1452478 - DNA, 15 bp, Homo sapiens
aacaatcctgggtac

SEQ ID NO: 1452479 - DNA, 15 bp, Homo sapiens
caacaatcctgggta

SEQ ID NO: 1452480 - DNA, 15 bp, Homo sapiens
tcaacaatcctgggt

SEQ ID NO: 1452481 - DNA, 15 bp, Homo sapiens
ctcaacaatcctggg

SEQ ID NO: 1452482 - DNA, 15 bp, Homo sapiens
tctcaacaatcctgg

SEQ ID NO: 1452483 - DNA, 15 bp, Homo sapiens
atctcaacaatcctg

SEQ ID NO: 1452484 - DNA, 15 bp, Homo sapiens
catctcaacaatcct

SEQ ID NO: 1452485 - DNA, 15 bp, Homo sapiens
ccatctcaacaatcc

SEQ ID NO: 1452486 - DNA, 15 bp, Homo sapiens
accatctcaacaatc

SEQ ID NO: 1452487 - DNA, 15 bp, Homo sapiens
taccatctcaacaat

SEQ ID NO: 1452488 - DNA, 15 bp, Homo sapiens
ttaccatctcaacaa

SEQ ID NO: 1452489 - DNA, 15 bp, Homo sapiens
tcaatgtatcttctt

SEQ ID NO: 1452490 - DNA, 15 bp, Homo sapiens
gtcaatgtatcttct

SEQ ID NO: 1452491 - DNA, 15 bp, Homo sapiens
tgtcaatgtatcttc

SEQ ID NO: 1452492 - DNA, 15 bp, Homo sapiens
caaatgtcaatgtat

SEQ ID NO: 1452493 - DNA, 15 bp, Homo sapiens
ccaaatgtcaatgta

SEQ ID NO: 1452494 - DNA, 15 bp, Homo sapiens
cccaaatgtcaatgt

SEQ ID NO: 1452495 - DNA, 15 bp, Homo sapiens
ccccaaatgtcaatg

SEQ ID NO: 1452496 - DNA, 15 bp, Homo sapiens
cccccaaatgtcaat

SEQ ID NO: 1452497 - DNA, 15 bp, Homo sapiens
ccccccaaatgtcaa

SEQ ID NO: 1452498 - DNA, 15 bp, Homo sapiens
tccccccaaatgtca

SEQ ID NO: 1452499 - DNA, 15 bp, Homo sapiens
atccccccaaatgtc

SEQ ID NO: 1452500 - DNA, 15 bp, Homo sapiens
aatccccccaaatgt

SEQ ID NO: 1452501 - DNA, 15 bp, Homo sapiens
ataaggctggcaaga

SEQ ID NO: 1452502 - DNA, 15 bp, Homo sapiens
tataaggctggcaag

SEQ ID NO: 1452503 - DNA, 15 bp, Homo sapiens
ctataaggctggcaa

SEQ ID NO: 1452504 - DNA, 15 bp, Homo sapiens
tctataaggctggca

SEQ ID NO: 1452505 - DNA, 15 bp, Homo sapiens
atctataaggctggc

SEQ ID NO: 1452506 - DNA, 15 bp, Homo sapiens
tatctataaggctgg

SEQ ID NO: 1452507 - DNA, 15 bp, Homo sapiens
gtatctataaggctg

SEQ ID NO: 1452508 - DNA, 15 bp, Homo sapiens
ggtatctataaggct

SEQ ID NO: 1452509 - DNA, 15 bp, Homo sapiens
gggtatctataaggc

SEQ ID NO: 1452510 - DNA, 15 bp, Homo sapiens
tgggtatctataagg

SEQ ID NO: 1452511 - DNA, 15 bp, Homo sapiens
ttgggtatctataag

SEQ ID NO: 1452512 - DNA, 15 bp, Homo sapiens
attgggtatctataa

SEQ ID NO: 1452513 - DNA, 15 bp, Homo sapiens
cattgggtatctata

SEQ ID NO: 1452514 - DNA, 15 bp, Homo sapiens
ccattgggtatctat

SEQ ID NO: 1452515 - DNA, 15 bp, Homo sapiens
tccattgggtatcta

SEQ ID NO: 1452516 - DNA, 15 bp, Homo sapiens
ttccattgggtatct

SEQ ID NO: 1452517 - DNA, 15 bp, Homo sapiens
attccattgggtatc

SEQ ID NO: 1452518 - DNA, 15 bp, Homo sapiens
gattccattgggtat

SEQ ID NO: 1452519 - DNA, 15 bp, Homo sapiens
ggattccattgggta

SEQ ID NO: 1452520 - DNA, 15 bp, Homo sapiens
gtatgcatatgagca

SEQ ID NO: 1452521 - DNA, 15 bp, Homo sapiens
agtatgcatatgagc

SEQ ID NO: 1452522 - DNA, 15 bp, Homo sapiens
aagtatgcatatgag

SEQ ID NO: 1452523 - DNA, 15 bp, Homo sapiens
aaagtatgcatatga

SEQ ID NO: 1452524 - DNA, 15 bp, Homo sapiens
caaagtatgcatatg

SEQ ID NO: 1452525 - DNA, 15 bp, Homo sapiens
ccaaagtatgcatat

SEQ ID NO: 1452526 - DNA, 15 bp, Homo sapiens
cccaaagtatgcata

SEQ ID NO: 1452527 - DNA, 15 bp, Homo sapiens
acccaaagtatgcat

SEQ ID NO: 1452528 - DNA, 15 bp, Homo sapiens
aacccaaagtatgca

SEQ ID NO: 1452529 - DNA, 15 bp, Homo sapiens
gaacccaaagtatgc

SEQ ID NO: 1452530 - DNA, 15 bp, Homo sapiens
tgaacccaaagtatg

SEQ ID NO: 1452531 - DNA, 15 bp, Homo sapiens
atgaacccaaagtat

SEQ ID NO: 1452532 - DNA, 15 bp, Homo sapiens
gatgaacccaaagta

SEQ ID NO: 1452533 - DNA, 15 bp, Homo sapiens
cgatgaacccaaagt

SEQ ID NO: 1452534 - DNA, 15 bp, Homo sapiens
ccgatgaacccaaag

SEQ ID NO: 1452535 - DNA, 15 bp, Homo sapiens
accgatgaacccaaa

SEQ ID NO: 1452536 - DNA, 15 bp, Homo sapiens
caccgatgaacccaa

SEQ ID NO: 1452537 - DNA, 15 bp, Homo sapiens
tcaccgatgaaccca

SEQ ID NO: 1452538 - DNA, 15 bp, Homo sapiens
atcaccgatgaaccc

SEQ ID NO: 1452539 - DNA, 15 bp, Homo sapiens
aatcaccgatgaacc

SEQ ID NO: 1452540 - DNA, 15 bp, Homo sapiens
aaatcaccgatgaac

SEQ ID NO: 1452541 - DNA, 15 bp, Homo sapiens
aaaatcaccgatgaa

SEQ ID NO: 1452542 - DNA, 15 bp, Homo sapiens
aaaaatcaccgatga

SEQ ID NO: 1452543 - DNA, 15 bp, Homo sapiens
caaaaatcaccgatg

SEQ ID NO: 1452544 - DNA, 15 bp, Homo sapiens
gcaaaaatcaccgat

SEQ ID NO: 1452545 - DNA, 15 bp, Homo sapiens
agcaaaaatcaccga

SEQ ID NO: 1452546 - DNA, 15 bp, Homo sapiens
gagcaaaaatcaccg

SEQ ID NO: 1452547 - DNA, 15 bp, Homo sapiens
tgagcaaaaatcacc

SEQ ID NO: 1452548 - DNA, 15 bp, Homo sapiens
gtgagcaaaaatcac

SEQ ID NO: 1452549 - DNA, 15 bp, Homo sapiens
agtgagcaaaaatca

SEQ ID NO: 1452550 - DNA, 15 bp, Homo sapiens
cagtgagcaaaaatc

SEQ ID NO: 1452551 - DNA, 15 bp, Homo sapiens
acagtgagcaaaaat

SEQ ID NO: 1452552 - DNA, 15 bp, Homo sapiens
cacagtgagcaaaaa

SEQ ID NO: 1452553 - DNA, 15 bp, Homo sapiens
tcacagtgagcaaaa

SEQ ID NO: 1452554 - DNA, 15 bp, Homo sapiens
gtcacagtgagcaaa

SEQ ID NO: 1452555 - DNA, 15 bp, Homo sapiens
agtcacagtgagcaa

SEQ ID NO: 1452556 - DNA, 15 bp, Homo sapiens
tagtcacagtgagca

SEQ ID NO: 1452557 - DNA, 15 bp, Homo sapiens
ttagtcacagtgagc

SEQ ID NO: 1452558 - DNA, 15 bp, Homo sapiens
attagtcacagtgag

SEQ ID NO: 1452559 - DNA, 15 bp, Homo sapiens
gattagtcacagtga

SEQ ID NO: 1452560 - DNA, 15 bp, Homo sapiens
ggattagtcacagtg

SEQ ID NO: 1452561 - DNA, 15 bp, Homo sapiens
aggattagtcacagt

SEQ ID NO: 1452562 - DNA, 15 bp, Homo sapiens
aaggattagtcacag

SEQ ID NO: 1452563 - DNA, 15 bp, Homo sapiens
gaaggattagtcaca

SEQ ID NO: 1452564 - DNA, 15 bp, Homo sapiens
ggaaggattagtcac

SEQ ID NO: 1452565 - DNA, 15 bp, Homo sapiens
tggaaggattagtca

SEQ ID NO: 1452566 - DNA, 15 bp, Homo sapiens
ctggaaggattagtc

SEQ ID NO: 1452567 - DNA, 15 bp, Homo sapiens
actggaaggattagt

SEQ ID NO: 1452568 - DNA, 15 bp, Homo sapiens
cactggaaggattag

SEQ ID NO: 1452569 - DNA, 15 bp, Homo sapiens
acactggaaggatta

SEQ ID NO: 1452570 - DNA, 15 bp, Homo sapiens
aacactggaaggatt

SEQ ID NO: 1452571 - DNA, 15 bp, Homo sapiens
aaacactggaaggat

SEQ ID NO: 1452572 - DNA, 15 bp, Homo sapiens
caaacactggaagga

SEQ ID NO: 1452573 - DNA, 15 bp, Homo sapiens
acaaacactggaagg

SEQ ID NO: 1452574 - DNA, 15 bp, Homo sapiens
tacaaacactggaag

SEQ ID NO: 1452575 - DNA, 15 bp, Homo sapiens
ctacaaacactggaa

SEQ ID NO: 1452576 - DNA, 15 bp, Homo sapiens
gctacaaacactgga

SEQ ID NO: 1452577 - DNA, 15 bp, Homo sapiens
ggctacaaacactgg

SEQ ID NO: 1452578 - DNA, 15 bp, Homo sapiens
aggctacaaacactg

SEQ ID NO: 1452579 - DNA, 15 bp, Homo sapiens
aaggctacaaacact

SEQ ID NO: 1452580 - DNA, 15 bp, Homo sapiens
aaaggctacaaacac

SEQ ID NO: 1452581 - DNA, 15 bp, Homo sapiens
gaaaggctacaaaca

SEQ ID NO: 1452582 - DNA, 15 bp, Homo sapiens
agaaaggctacaaac

SEQ ID NO: 1452583 - DNA, 15 bp, Homo sapiens
aagaaaggctacaaa

SEQ ID NO: 1452584 - DNA, 15 bp, Homo sapiens
taagaaaggctacaa

SEQ ID NO: 1452585 - DNA, 15 bp, Homo sapiens
ataagaaaggctaca

SEQ ID NO: 1452586 - DNA, 15 bp, Homo sapiens
tataagaaaggctac

SEQ ID NO: 1452587 - DNA, 15 bp, Homo sapiens
ttataagaaaggcta

SEQ ID NO: 1452588 - DNA, 15 bp, Homo sapiens
cttataagaaaggct

SEQ ID NO: 1452589 - DNA, 15 bp, Homo sapiens
ccttataagaaaggc

SEQ ID NO: 1452590 - DNA, 15 bp, Homo sapiens
tccttataagaaagg

SEQ ID NO: 1452591 - DNA, 15 bp, Homo sapiens
ctccttataagaaag

SEQ ID NO: 1452592 - DNA, 15 bp, Homo sapiens
tctccttataagaaa

SEQ ID NO: 1452593 - DNA, 15 bp, Homo sapiens
ttctccttataagaa

SEQ ID NO: 1452594 - DNA, 15 bp, Homo sapiens
gttctccttataaga

SEQ ID NO: 1452595 - DNA, 15 bp, Homo sapiens
agttctccttataag

SEQ ID NO: 1452596 - DNA, 15 bp, Homo sapiens
aagttctccttataa

SEQ ID NO: 1452597 - DNA, 15 bp, Homo sapiens
gaagttctccttata

SEQ ID NO: 1452598 - DNA, 15 bp, Homo sapiens
agaagttctccttat

SEQ ID NO: 1452599 - DNA, 15 bp, Homo sapiens
tagaagttctcctta

SEQ ID NO: 1452600 - DNA, 15 bp, Homo sapiens
atagaagttctcctt

SEQ ID NO: 1452601 - DNA, 15 bp, Homo sapiens
aatagaagttctcct

SEQ ID NO: 1452602 - DNA, 15 bp, Homo sapiens
aaatagaagttctcc

SEQ ID NO: 1452603 - DNA, 15 bp, Homo sapiens
gaaatagaagttctc

SEQ ID NO: 1452604 - DNA, 15 bp, Homo sapiens
tgaaatagaagttct

SEQ ID NO: 1452605 - DNA, 15 bp, Homo sapiens
ctgaaatagaagttc

SEQ ID NO: 1452606 - DNA, 15 bp, Homo sapiens
gctgaaatagaagtt

SEQ ID NO: 1452607 - DNA, 15 bp, Homo sapiens
agctgaaatagaagt

SEQ ID NO: 1452608 - DNA, 15 bp, Homo sapiens
aagctgaaatagaag

SEQ ID NO: 1452609 - DNA, 15 bp, Homo sapiens
aaagctgaaatagaa

SEQ ID NO: 1452610 - DNA, 15 bp, Homo sapiens
caaagctgaaataga

SEQ ID NO: 1452611 - DNA, 15 bp, Homo sapiens
acaaagctgaaatag

SEQ ID NO: 1452612 - DNA, 15 bp, Homo sapiens
aacaaagctgaaata

SEQ ID NO: 1452613 - DNA, 15 bp, Homo sapiens
taacaaagctgaaat

SEQ ID NO: 1452614 - DNA, 15 bp, Homo sapiens
ttaacaaagctgaaa

SEQ ID NO: 1452615 - DNA, 15 bp, Homo sapiens
attaacaaagctgaa

SEQ ID NO: 1452616 - DNA, 15 bp, Homo sapiens
aattaacaaagctga

SEQ ID NO: 1452617 - DNA, 15 bp, Homo sapiens
aaattaacaaagctg

SEQ ID NO: 1452618 - DNA, 15 bp, Homo sapiens
caaattaacaaagct

SEQ ID NO: 1452619 - DNA, 15 bp, Homo sapiens
ccaaattaacaaagc

SEQ ID NO: 1452620 - DNA, 15 bp, Homo sapiens
gccaaattaacaaag

SEQ ID NO: 1452621 - DNA, 15 bp, Homo sapiens
agccaaattaacaaa

SEQ ID NO: 1452622 - DNA, 15 bp, Homo sapiens
aagccaaattaacaa

SEQ ID NO: 1452623 - DNA, 15 bp, Homo sapiens
gaagccaaattaaca

SEQ ID NO: 1452624 - DNA, 15 bp, Homo sapiens
tgaagccaaattaac

SEQ ID NO: 1452625 - DNA, 15 bp, Homo sapiens
gtgaagccaaattaa

SEQ ID NO: 1452626 - DNA, 15 bp, Homo sapiens
tgtgaagccaaatta

SEQ ID NO: 1452627 - DNA, 15 bp, Homo sapiens
ttgtgaagccaaatt

SEQ ID NO: 1452628 - DNA, 15 bp, Homo sapiens
tttgtgaagccaaat

SEQ ID NO: 1452629 - DNA, 15 bp, Homo sapiens
ctttgtgaagccaaa

SEQ ID NO: 1452630 - DNA, 15 bp, Homo sapiens
actttgtgaagccaa

SEQ ID NO: 1452631 - DNA, 15 bp, Homo sapiens
tactttgtgaagcca

SEQ ID NO: 1452632 - DNA, 15 bp, Homo sapiens
ttactttgtgaagcc

SEQ ID NO: 1452633 - DNA, 15 bp, Homo sapiens
tttactttgtgaagc

SEQ ID NO: 1452634 - DNA, 15 bp, Homo sapiens
ttttactttgtgaag

SEQ ID NO: 1452635 - DNA, 15 bp, Homo sapiens
attttactttgtgaa

SEQ ID NO: 1452636 - DNA, 15 bp, Homo sapiens
tattttactttgtga

SEQ ID NO: 1452637 - DNA, 15 bp, Homo sapiens
ttattttactttgtg

SEQ ID NO: 1452638 - DNA, 15 bp, Homo sapiens
cttattttactttgt

SEQ ID NO: 1452639 - DNA, 15 bp, Homo sapiens
ccttattttactttg

SEQ ID NO: 1452640 - DNA, 15 bp, Homo sapiens
cccttattttacttt

SEQ ID NO: 1452641 - DNA, 15 bp, Homo sapiens
ccccttattttactt

SEQ ID NO: 1452642 - DNA, 15 bp, Homo sapiens
gccccttattttact

SEQ ID NO: 1452643 - DNA, 15 bp, Homo sapiens
ggccccttattttac

SEQ ID NO: 1452644 - DNA, 15 bp, Homo sapiens
gggccccttatttta

SEQ ID NO: 1452645 - DNA, 15 bp, Homo sapiens
ggggccccttatttt

SEQ ID NO: 1452646 - DNA, 15 bp, Homo sapiens
tggggccccttattt

SEQ ID NO: 1452647 - DNA, 15 bp, Homo sapiens
atggggccccttatt

SEQ ID NO: 1452648 - DNA, 15 bp, Homo sapiens
aatggggccccttat

SEQ ID NO: 1452649 - DNA, 15 bp, Homo sapiens
caatggggcccctta

SEQ ID NO: 1452650 - DNA, 15 bp, Homo sapiens
acaatggggcccctt

SEQ ID NO: 1452651 - DNA, 15 bp, Homo sapiens
aacaatggggcccct

SEQ ID NO: 1452652 - DNA, 15 bp, Homo sapiens
aaacaatggggcccc

SEQ ID NO: 1452653 - DNA, 15 bp, Homo sapiens
aaaacaatggggccc

SEQ ID NO: 1452654 - DNA, 15 bp, Homo sapiens
caaaacaatggggcc

SEQ ID NO: 1452655 - DNA, 15 bp, Homo sapiens
acaaaacaatggggc

SEQ ID NO: 1452656 - DNA, 15 bp, Homo sapiens
gacaaaacaatgggg

SEQ ID NO: 1452657 - DNA, 15 bp, Homo sapiens
agacaaaacaatggg

SEQ ID NO: 1452658 - DNA, 15 bp, Homo sapiens
aagacaaaacaatgg

SEQ ID NO: 1452659 - DNA, 15 bp, Homo sapiens
taagacaaaacaatg

SEQ ID NO: 1452660 - DNA, 15 bp, Homo sapiens
ttaagacaaaacaat

SEQ ID NO: 1452661 - DNA, 15 bp, Homo sapiens
attaagacaaaacaa

SEQ ID NO: 1452662 - DNA, 15 bp, Homo sapiens
gattaagacaaaaca

SEQ ID NO: 1452663 - DNA, 15 bp, Homo sapiens
tgattaagacaaaac

SEQ ID NO: 1452664 - DNA, 15 bp, Homo sapiens
ctgattaagacaaaa

SEQ ID NO: 1452665 - DNA, 15 bp, Homo sapiens
actgattaagacaaa

SEQ ID NO: 1452666 - DNA, 15 bp, Homo sapiens
cactgattaagacaa

SEQ ID NO: 1452667 - DNA, 15 bp, Homo sapiens
tcactgattaagaca

SEQ ID NO: 1452668 - DNA, 15 bp, Homo sapiens
ttcactgattaagac

SEQ ID NO: 1452669 - DNA, 15 bp, Homo sapiens
cttcactgattaaga

SEQ ID NO: 1452670 - DNA, 15 bp, Homo sapiens
ccttcactgattaag

SEQ ID NO: 1452671 - DNA, 15 bp, Homo sapiens
cccttcactgattaa

SEQ ID NO: 1452672 - DNA, 15 bp, Homo sapiens
tcccttcactgatta

SEQ ID NO: 1452673 - DNA, 15 bp, Homo sapiens
ttcccttcactgatt

SEQ ID NO: 1452674 - DNA, 15 bp, Homo sapiens
attcccttcactgat

SEQ ID NO: 1452675 - DNA, 15 bp, Homo sapiens
tattcccttcactga

SEQ ID NO: 1452676 - DNA, 15 bp, Homo sapiens
atattcccttcactg

SEQ ID NO: 1452677 - DNA, 15 bp, Homo sapiens
catattcccttcact

SEQ ID NO: 1452678 - DNA, 15 bp, Homo sapiens
ccatattcccttcac

SEQ ID NO: 1452679 - DNA, 15 bp, Homo sapiens
cccatattcccttca

SEQ ID NO: 1452680 - DNA, 15 bp, Homo sapiens
tcccatattcccttc

SEQ ID NO: 1452681 - DNA, 15 bp, Homo sapiens
atcccatattccctt

SEQ ID NO: 1452682 - DNA, 15 bp, Homo sapiens
catcccatattccct

SEQ ID NO: 1452683 - DNA, 15 bp, Homo sapiens
acatcccatattccc

SEQ ID NO: 1452684 - DNA, 15 bp, Homo sapiens
gacatcccatattcc

SEQ ID NO: 1452685 - DNA, 15 bp, Homo sapiens
ggacatcccatattc

SEQ ID NO: 1452686 - DNA, 15 bp, Homo sapiens
aggacatcccatatt

SEQ ID NO: 1452687 - DNA, 15 bp, Homo sapiens
caggacatcccatat

SEQ ID NO: 1452688 - DNA, 15 bp, Homo sapiens
tcaggacatcccata

SEQ ID NO: 1452689 - DNA, 15 bp, Homo sapiens
atcaggacatcccat

SEQ ID NO: 1452690 - DNA, 15 bp, Homo sapiens
tatcaggacatccca

SEQ ID NO: 1452691 - DNA, 15 bp, Homo sapiens
atatcaggacatccc

SEQ ID NO: 1452692 - DNA, 15 bp, Homo sapiens
tatatcaggacatcc

SEQ ID NO: 1452693 - DNA, 15 bp, Homo sapiens
ttatatcaggacatc

SEQ ID NO: 1452694 - DNA, 15 bp, Homo sapiens
attatatcaggacat

SEQ ID NO: 1452695 - DNA, 15 bp, Homo sapiens
aattatatcaggaca

SEQ ID NO: 1452696 - DNA, 15 bp, Homo sapiens
taattatatcaggac

SEQ ID NO: 1452697 - DNA, 15 bp, Homo sapiens
ctaattatatcagga

SEQ ID NO: 1452698 - DNA, 15 bp, Homo sapiens
actaattatatcagg

SEQ ID NO: 1452699 - DNA, 15 bp, Homo sapiens
gactaattatatcag

SEQ ID NO: 1452700 - DNA, 15 bp, Homo sapiens
ggactaattatatca

SEQ ID NO: 1452701 - DNA, 15 bp, Homo sapiens
aggactaattatatc

SEQ ID NO: 1452702 - DNA, 15 bp, Homo sapiens
aaggactaattatat

SEQ ID NO: 1452703 - DNA, 15 bp, Homo sapiens
aaaggactaattata

SEQ ID NO: 1452704 - DNA, 15 bp, Homo sapiens
caaaggactaattat

SEQ ID NO: 1452705 - DNA, 15 bp, Homo sapiens
tcaaaggactaatta

SEQ ID NO: 1452706 - DNA, 15 bp, Homo sapiens
atcaaaggactaatt

SEQ ID NO: 1452707 - DNA, 15 bp, Homo sapiens
aatcaaaggactaat

SEQ ID NO: 1452708 - DNA, 15 bp, Homo sapiens
aaatcaaaggactaa

SEQ ID NO: 1452709 - DNA, 15 bp, Homo sapiens
aaaatcaaaggacta

SEQ ID NO: 1452710 - DNA, 15 bp, Homo sapiens
aaaaatcaaaggact

SEQ ID NO: 1452711 - DNA, 15 bp, Homo sapiens
taaaaatcaaaggac

SEQ ID NO: 1452712 - DNA, 15 bp, Homo sapiens
ctaaaaatcaaagga

SEQ ID NO: 1452713 - DNA, 15 bp, Homo sapiens
actaaaaatcaaagg

SEQ ID NO: 1452714 - DNA, 15 bp, Homo sapiens
gactaaaaatcaaag

SEQ ID NO: 1452715 - DNA, 15 bp, Homo sapiens
ggactaaaaatcaaa

SEQ ID NO: 1452716 - DNA, 15 bp, Homo sapiens
aggactaaaaatcaa

SEQ ID NO: 1452717 - DNA, 15 bp, Homo sapiens
taggactaaaaatca

SEQ ID NO: 1452718 - DNA, 15 bp, Homo sapiens
ataggactaaaaatc

SEQ ID NO: 1452719 - DNA, 15 bp, Homo sapiens
gataggactaaaaat

SEQ ID NO: 1452720 - DNA, 15 bp, Homo sapiens
ggataggactaaaaa

SEQ ID NO: 1452721 - DNA, 15 bp, Homo sapiens
tggataggactaaaa

SEQ ID NO: 1452722 - DNA, 15 bp, Homo sapiens
ctggataggactaaa

SEQ ID NO: 1452723 - DNA, 15 bp, Homo sapiens
gctggataggactaa

SEQ ID NO: 1452724 - DNA, 15 bp, Homo sapiens
ggctggataggacta

SEQ ID NO: 1452725 - DNA, 15 bp, Homo sapiens
gggctggataggact

SEQ ID NO: 1452726 - DNA, 15 bp, Homo sapiens
cgggctggataggac

SEQ ID NO: 1452727 - DNA, 15 bp, Homo sapiens
ccgggctggatagga

SEQ ID NO: 1452728 - DNA, 15 bp, Homo sapiens
cccgggctggatagg

SEQ ID NO: 1452729 - DNA, 15 bp, Homo sapiens
gcccgggctggatag

SEQ ID NO: 1452730 - DNA, 15 bp, Homo sapiens
agcccgggctggata

SEQ ID NO: 1452731 - DNA, 15 bp, Homo sapiens
aagcccgggctggat

SEQ ID NO: 1452732 - DNA, 15 bp, Homo sapiens
caagcccgggctgga

SEQ ID NO: 1452733 - DNA, 15 bp, Homo sapiens
gcaagcccgggctgg

SEQ ID NO: 1452734 - DNA, 15 bp, Homo sapiens
agcaagcccgggctg

SEQ ID NO: 1452735 - DNA, 15 bp, Homo sapiens
aagcaagcccgggct

SEQ ID NO: 1452736 - DNA, 15 bp, Homo sapiens
caagcaagcccgggc

SEQ ID NO: 1452737 - DNA, 15 bp, Homo sapiens
tcaagcaagcccggg

SEQ ID NO: 1452738 - DNA, 15 bp, Homo sapiens
ctcaagcaagcccgg

SEQ ID NO: 1452739 - DNA, 15 bp, Homo sapiens
tctcaagcaagcccg

SEQ ID NO: 1452740 - DNA, 15 bp, Homo sapiens
ttctcaagcaagccc

SEQ ID NO: 1452741 - DNA, 15 bp, Homo sapiens
cttctcaagcaagcc

SEQ ID NO: 1452742 - DNA, 15 bp, Homo sapiens
acttctcaagcaagc

SEQ ID NO: 1452743 - DNA, 15 bp, Homo sapiens
gacttctcaagcaag

SEQ ID NO: 1452744 - DNA, 15 bp, Homo sapiens
ggacttctcaagcaa

SEQ ID NO: 1452745 - DNA, 15 bp, Homo sapiens
gggacttctcaagca

SEQ ID NO: 1452746 - DNA, 15 bp, Homo sapiens
agggacttctcaagc

SEQ ID NO: 1452747 - DNA, 15 bp, Homo sapiens
aagggacttctcaag

SEQ ID NO: 1452748 - DNA, 15 bp, Homo sapiens
caagggacttctcaa

SEQ ID NO: 1452749 - DNA, 15 bp, Homo sapiens
acaagggacttctca

SEQ ID NO: 1452750 - DNA, 15 bp, Homo sapiens
cacaagggacttctc

SEQ ID NO: 1452751 - DNA, 15 bp, Homo sapiens
acacaagggacttct

SEQ ID NO: 1452752 - DNA, 15 bp, Homo sapiens
tacacaagggacttc

SEQ ID NO: 1452753 - DNA, 15 bp, Homo sapiens
ctacacaagggactt

SEQ ID NO: 1452754 - DNA, 15 bp, Homo sapiens
gctacacaagggact

SEQ ID NO: 1452755 - DNA, 15 bp, Homo sapiens
ggctacacaagggac

SEQ ID NO: 1452756 - DNA, 15 bp, Homo sapiens
gggctacacaaggga

SEQ ID NO: 1452757 - DNA, 15 bp, Homo sapiens
agggctacacaaggg

SEQ ID NO: 1452758 - DNA, 15 bp, Homo sapiens
tagggctacacaagg

SEQ ID NO: 1452759 - DNA, 15 bp, Homo sapiens
atagggctacacaag

SEQ ID NO: 1452760 - DNA, 15 bp, Homo sapiens
tatagggctacacaa

SEQ ID NO: 1452761 - DNA, 15 bp, Homo sapiens
atatagggctacaca

SEQ ID NO: 1452762 - DNA, 15 bp, Homo sapiens
aatatagggctacac

SEQ ID NO: 1452763 - DNA, 15 bp, Homo sapiens
taatatagggctaca

SEQ ID NO: 1452764 - DNA, 15 bp, Homo sapiens
ataatatagggctac

SEQ ID NO: 1452765 - DNA, 15 bp, Homo sapiens
gataatatagggcta

SEQ ID NO: 1452766 - DNA, 15 bp, Homo sapiens
tgataatatagggct

SEQ ID NO: 1452767 - DNA, 15 bp, Homo sapiens
ctgataatatagggc

SEQ ID NO: 1452768 - DNA, 15 bp, Homo sapiens
tctgataatataggg

SEQ ID NO: 1452769 - DNA, 15 bp, Homo sapiens
gtctgataatatagg

SEQ ID NO: 1452770 - DNA, 15 bp, Homo sapiens
tgtctgataatatag

SEQ ID NO: 1452771 - DNA, 15 bp, Homo sapiens
atgtctgataatata

SEQ ID NO: 1452772 - DNA, 15 bp, Homo sapiens
catgtctgataatat

SEQ ID NO: 1452773 - DNA, 15 bp, Homo sapiens
gcatgtctgataata

SEQ ID NO: 1452774 - DNA, 15 bp, Homo sapiens
agcatgtctgataat

SEQ ID NO: 1452775 - DNA, 15 bp, Homo sapiens
tagcatgtctgataa

SEQ ID NO: 1452776 - DNA, 15 bp, Homo sapiens
atagcatgtctgata

SEQ ID NO: 1452777 - DNA, 15 bp, Homo sapiens
tatagcatgtctgat

SEQ ID NO: 1452778 - DNA, 15 bp, Homo sapiens
atatagcatgtctga

SEQ ID NO: 1452779 - DNA, 15 bp, Homo sapiens
gatatagcatgtctg

SEQ ID NO: 1452780 - DNA, 15 bp, Homo sapiens
tgatatagcatgtct

SEQ ID NO: 1452781 - DNA, 15 bp, Homo sapiens
gtgatatagcatgtc

SEQ ID NO: 1452782 - DNA, 15 bp, Homo sapiens
tgtgatatagcatgt

SEQ ID NO: 1452783 - DNA, 15 bp, Homo sapiens
ctgtgatatagcatg

SEQ ID NO: 1452784 - DNA, 15 bp, Homo sapiens
gctgtgatatagcat

SEQ ID NO: 1452785 - DNA, 15 bp, Homo sapiens
tgctgtgatatagca

SEQ ID NO: 1452786 - DNA, 15 bp, Homo sapiens
ttgctgtgatatagc

SEQ ID NO: 1452787 - DNA, 15 bp, Homo sapiens
cttgctgtgatatag

SEQ ID NO: 1452788 - DNA, 15 bp, Homo sapiens
gcttgctgtgatata

SEQ ID NO: 1452789 - DNA, 15 bp, Homo sapiens
tgcttgctgtgatat

SEQ ID NO: 1452790 - DNA, 15 bp, Homo sapiens
gtgcttgctgtgata

SEQ ID NO: 1452791 - DNA, 15 bp, Homo sapiens
ggtgcttgctgtgat

SEQ ID NO: 1452792 - DNA, 15 bp, Homo sapiens
aggtgcttgctgtga

SEQ ID NO: 1452793 - DNA, 15 bp, Homo sapiens
aaggtgcttgctgtg

SEQ ID NO: 1452794 - DNA, 15 bp, Homo sapiens
aaaggtgcttgctgt

SEQ ID NO: 1452795 - DNA, 15 bp, Homo sapiens
aaaaggtgcttgctg

SEQ ID NO: 1452796 - DNA, 15 bp, Homo sapiens
caaaaggtgcttgct

SEQ ID NO: 1452797 - DNA, 15 bp, Homo sapiens
tcaaaaggtgcttgc

SEQ ID NO: 1452798 - DNA, 15 bp, Homo sapiens
atcaaaaggtgcttg

SEQ ID NO: 1452799 - DNA, 15 bp, Homo sapiens
catcaaaaggtgctt

SEQ ID NO: 1452800 - DNA, 15 bp, Homo sapiens
acatcaaaaggtgct

SEQ ID NO: 1452801 - DNA, 15 bp, Homo sapiens
aacatcaaaaggtgc

SEQ ID NO: 1452802 - DNA, 15 bp, Homo sapiens
aaacatcaaaaggtg

SEQ ID NO: 1452803 - DNA, 15 bp, Homo sapiens
taaacatcaaaaggt

SEQ ID NO: 1452804 - DNA, 15 bp, Homo sapiens
ttaaacatcaaaagg

SEQ ID NO: 1452805 - DNA, 15 bp, Homo sapiens
cttaaacatcaaaag

SEQ ID NO: 1452806 - DNA, 15 bp, Homo sapiens
tcttaaacatcaaaa

SEQ ID NO: 1452807 - DNA, 15 bp, Homo sapiens
ttcttaaacatcaaa

SEQ ID NO: 1452808 - DNA, 15 bp, Homo sapiens
attcttaaacatcaa

SEQ ID NO: 1452809 - DNA, 15 bp, Homo sapiens
aattcttaaacatca

SEQ ID NO: 1452810 - DNA, 15 bp, Homo sapiens
taattcttaaacatc

SEQ ID NO: 1452811 - DNA, 15 bp, Homo sapiens
ttaattcttaaacat

SEQ ID NO: 1452812 - DNA, 15 bp, Homo sapiens
attaattcttaaaca

SEQ ID NO: 1452813 - DNA, 15 bp, Homo sapiens
aattaattcttaaac

SEQ ID NO: 1452814 - DNA, 15 bp, Homo sapiens
gaattaattcttaaa

SEQ ID NO: 1452815 - DNA, 15 bp, Homo sapiens
ggaattaattcttaa

SEQ ID NO: 1452816 - DNA, 15 bp, Homo sapiens
aggaattaattctta

SEQ ID NO: 1452817 - DNA, 15 bp, Homo sapiens
aaggaattaattctt

SEQ ID NO: 1452818 - DNA, 15 bp, Homo sapiens
aaaggaattaattct

SEQ ID NO: 1452819 - DNA, 15 bp, Homo sapiens
taaaggaattaattc

SEQ ID NO: 1452820 - DNA, 15 bp, Homo sapiens
ttaaaggaattaatt

SEQ ID NO: 1452821 - DNA, 15 bp, Homo sapiens
cttaaaggaattaat

SEQ ID NO: 1452822 - DNA, 15 bp, Homo sapiens
ccttaaaggaattaa

SEQ ID NO: 1452823 - DNA, 15 bp, Homo sapiens
tccttaaaggaatta

SEQ ID NO: 1452824 - DNA, 15 bp, Homo sapiens
ttccttaaaggaatt

SEQ ID NO: 1452825 - DNA, 15 bp, Homo sapiens
gaattccttaaagga

SEQ ID NO: 1452826 - DNA, 15 bp, Homo sapiens
agaattccttaaagg

SEQ ID NO: 1452827 - DNA, 15 bp, Homo sapiens
tagaattccttaaag

SEQ ID NO: 1452828 - DNA, 15 bp, Homo sapiens
ttagaattccttaaa

SEQ ID NO: 1452829 - DNA, 15 bp, Homo sapiens
tttagaattccttaa

SEQ ID NO: 1452830 - DNA, 15 bp, Homo sapiens
ttttagaattcctta

SEQ ID NO: 1452831 - DNA, 15 bp, Homo sapiens
tttttagaattcctt

SEQ ID NO: 1452832 - DNA, 15 bp, Homo sapiens
ttttttagaattcct

SEQ ID NO: 1452833 - DNA, 15 bp, Homo sapiens
cttttttagaattcc

SEQ ID NO: 1452834 - DNA, 15 bp, Homo sapiens
tcttttttagaattc

SEQ ID NO: 1452835 - DNA, 15 bp, Homo sapiens
ttcttttttagaatt

SEQ ID NO: 1452836 - DNA, 15 bp, Homo sapiens
tttcttttttagaat

SEQ ID NO: 1452837 - DNA, 15 bp, Homo sapiens
ctttcttttttagaa

SEQ ID NO: 1452838 - DNA, 15 bp, Homo sapiens
tctttcttttttaga

SEQ ID NO: 1452839 - DNA, 15 bp, Homo sapiens
atctttcttttttag

SEQ ID NO: 1452840 - DNA, 15 bp, Homo sapiens
tatctttctttttta

SEQ ID NO: 1452841 - DNA, 15 bp, Homo sapiens
atatctttctttttt

SEQ ID NO: 1452842 - DNA, 15 bp, Homo sapiens
aatatctttcttttt

SEQ ID NO: 1452843 - DNA, 15 bp, Homo sapiens
aaatatctttctttt

SEQ ID NO: 1452844 - DNA, 15 bp, Homo sapiens
aaaatatctttcttt

SEQ ID NO: 1452845 - DNA, 15 bp, Homo sapiens
gaaaatatctttctt

SEQ ID NO: 1452846 - DNA, 15 bp, Homo sapiens
tgaaaatatctttct

SEQ ID NO: 1452847 - DNA, 15 bp, Homo sapiens
ctgaaaatatctttc

SEQ ID NO: 1452848 - DNA, 15 bp, Homo sapiens
gctgaaaatatcttt

SEQ ID NO: 1452849 - DNA, 15 bp, Homo sapiens
tgctgaaaatatctt

SEQ ID NO: 1452850 - DNA, 15 bp, Homo sapiens
atgctgaaaatatct

SEQ ID NO: 1452851 - DNA, 15 bp, Homo sapiens
aatgctgaaaatatc

SEQ ID NO: 1452852 - DNA, 15 bp, Homo sapiens
taatgctgaaaatat

SEQ ID NO: 1452853 - DNA, 15 bp, Homo sapiens
ttaatgctgaaaata

SEQ ID NO: 1452854 - DNA, 15 bp, Homo sapiens
gttaatgctgaaaat

SEQ ID NO: 1452855 - DNA, 15 bp, Homo sapiens
tgttaatgctgaaaa

SEQ ID NO: 1452856 - DNA, 15 bp, Homo sapiens
atgttaatgctgaaa

SEQ ID NO: 1452857 - DNA, 15 bp, Homo sapiens
gatgttaatgctgaa

SEQ ID NO: 1452858 - DNA, 15 bp, Homo sapiens
ggatgttaatgctga

SEQ ID NO: 1452859 - DNA, 15 bp, Homo sapiens
aggatgttaatgctg

SEQ ID NO: 1452860 - DNA, 15 bp, Homo sapiens
taggatgttaatgct

SEQ ID NO: 1452861 - DNA, 15 bp, Homo sapiens
ttaggatgttaatgc

SEQ ID NO: 1452862 - DNA, 15 bp, Homo sapiens
tttaggatgttaatg

SEQ ID NO: 1452863 - DNA, 15 bp, Homo sapiens
atttaggatgttaat

SEQ ID NO: 1452864 - DNA, 15 bp, Homo sapiens
gatttaggatgttaa

SEQ ID NO: 1452865 - DNA, 15 bp, Homo sapiens
tgatttaggatgtta

SEQ ID NO: 1452866 - DNA, 15 bp, Homo sapiens
ttgatttaggatgtt

SEQ ID NO: 1452867 - DNA, 15 bp, Homo sapiens
gttgatttaggatgt

SEQ ID NO: 1452868 - DNA, 15 bp, Homo sapiens
tgttgatttaggatg

SEQ ID NO: 1452869 - DNA, 15 bp, Homo sapiens
atgttgatttaggat

SEQ ID NO: 1452870 - DNA, 15 bp, Homo sapiens
aatgttgatttagga

SEQ ID NO: 1452871 - DNA, 15 bp, Homo sapiens
aaatgttgatttagg

SEQ ID NO: 1452872 - DNA, 15 bp, Homo sapiens
gaaatgttgatttag

SEQ ID NO: 1452873 - DNA, 15 bp, Homo sapiens
ggaaatgttgattta

SEQ ID NO: 1452874 - DNA, 15 bp, Homo sapiens
tggaaatgttgattt

SEQ ID NO: 1452875 - DNA, 15 bp, Homo sapiens
atggaaatgttgatt

SEQ ID NO: 1452876 - DNA, 15 bp, Homo sapiens
aatggaaatgttgat

SEQ ID NO: 1452877 - DNA, 15 bp, Homo sapiens
aaatggaaatgttga

SEQ ID NO: 1452878 - DNA, 15 bp, Homo sapiens
aaaatggaaatgttg

SEQ ID NO: 1452879 - DNA, 15 bp, Homo sapiens
gaaaatggaaatgtt

SEQ ID NO: 1452880 - DNA, 15 bp, Homo sapiens
agaaaatggaaatgt

SEQ ID NO: 1452881 - DNA, 15 bp, Homo sapiens
cagaaaatggaaatg

SEQ ID NO: 1452882 - DNA, 15 bp, Homo sapiens
tcagaaaatggaaat

SEQ ID NO: 1452883 - DNA, 15 bp, Homo sapiens
ctcagaaaatggaaa

SEQ ID NO: 1452884 - DNA, 15 bp, Homo sapiens
cctcagaaaatggaa

SEQ ID NO: 1452885 - DNA, 15 bp, Homo sapiens
tcctcagaaaatgga

SEQ ID NO: 1452886 - DNA, 15 bp, Homo sapiens
atcctcagaaaatgg

SEQ ID NO: 1452887 - DNA, 15 bp, Homo sapiens
catcctcagaaaatg

SEQ ID NO: 1452888 - DNA, 15 bp, Homo sapiens
acatcctcagaaaat

SEQ ID NO: 1452889 - DNA, 15 bp, Homo sapiens
aacatcctcagaaaa

SEQ ID NO: 1452890 - DNA, 15 bp, Homo sapiens
aaacatcctcagaaa

SEQ ID NO: 1452891 - DNA, 15 bp, Homo sapiens
gaaacatcctcagaa

SEQ ID NO: 1452892 - DNA, 15 bp, Homo sapiens
agaaacatcctcaga

SEQ ID NO: 1452893 - DNA, 15 bp, Homo sapiens
aagaaacatcctcag

SEQ ID NO: 1452894 - DNA, 15 bp, Homo sapiens
aaagaaacatcctca

SEQ ID NO: 1452895 - DNA, 15 bp, Homo sapiens
taaagaaacatcctc

SEQ ID NO: 1452896 - DNA, 15 bp, Homo sapiens
ctaaagaaacatcct

SEQ ID NO: 1452897 - DNA, 15 bp, Homo sapiens
gctaaagaaacatcc

SEQ ID NO: 1452898 - DNA, 15 bp, Homo sapiens
tgctaaagaaacatc

SEQ ID NO: 1452899 - DNA, 15 bp, Homo sapiens
gtgctaaagaaacat

SEQ ID NO: 1452900 - DNA, 15 bp, Homo sapiens
agtgctaaagaaaca

SEQ ID NO: 1452901 - DNA, 15 bp, Homo sapiens
tagtgctaaagaaac

SEQ ID NO: 1452902 - DNA, 15 bp, Homo sapiens
ctagtgctaaagaaa

SEQ ID NO: 1452903 - DNA, 15 bp, Homo sapiens
cctagtgctaaagaa

SEQ ID NO: 1452904 - DNA, 15 bp, Homo sapiens
gcctagtgctaaaga

SEQ ID NO: 1452905 - DNA, 15 bp, Homo sapiens
tgcctagtgctaaag

SEQ ID NO: 1452906 - DNA, 15 bp, Homo sapiens
atgcctagtgctaaa

SEQ ID NO: 1452907 - DNA, 15 bp, Homo sapiens
gatgcctagtgctaa

SEQ ID NO: 1452908 - DNA, 15 bp, Homo sapiens
cgatgcctagtgcta

SEQ ID NO: 1452909 - DNA, 15 bp, Homo sapiens
gcgatgcctagtgct

SEQ ID NO: 1452910 - DNA, 15 bp, Homo sapiens
agcgatgcctagtgc

SEQ ID NO: 1452911 - DNA, 15 bp, Homo sapiens
cagcgatgcctagtg

SEQ ID NO: 1452912 - DNA, 15 bp, Homo sapiens
tcagcgatgcctagt

SEQ ID NO: 1452913 - DNA, 15 bp, Homo sapiens
ctcagcgatgcctag

SEQ ID NO: 1452914 - DNA, 15 bp, Homo sapiens
tctcagcgatgccta

SEQ ID NO: 1452915 - DNA, 15 bp, Homo sapiens
atctcagcgatgcct

SEQ ID NO: 1452916 - DNA, 15 bp, Homo sapiens
tatctcagcgatgcc

SEQ ID NO: 1452917 - DNA, 15 bp, Homo sapiens
ctatctcagcgatgc

SEQ ID NO: 1452918 - DNA, 15 bp, Homo sapiens
tctatctcagcgatg

SEQ ID NO: 1452919 - DNA, 15 bp, Homo sapiens
ttctatctcagcgat

SEQ ID NO: 1452920 - DNA, 15 bp, Homo sapiens
tttctatctcagcga

SEQ ID NO: 1452921 - DNA, 15 bp, Homo sapiens
ttttctatctcagcg

SEQ ID NO: 1452922 - DNA, 15 bp, Homo sapiens
attttctatctcagc

SEQ ID NO: 1452923 - DNA, 15 bp, Homo sapiens
cattttctatctcag

SEQ ID NO: 1452924 - DNA, 15 bp, Homo sapiens
tcattttctatctca

SEQ ID NO: 1452925 - DNA, 15 bp, Homo sapiens
ctcattttctatctc

SEQ ID NO: 1452926 - DNA, 15 bp, Homo sapiens
actcattttctatct

SEQ ID NO: 1452927 - DNA, 15 bp, Homo sapiens
aactcattttctatc

SEQ ID NO: 1452928 - DNA, 15 bp, Homo sapiens
gaactcattttctat

SEQ ID NO: 1452929 - DNA, 15 bp, Homo sapiens
agaactcattttcta

SEQ ID NO: 1452930 - DNA, 15 bp, Homo sapiens
cagaactcattttct

SEQ ID NO: 1452931 - DNA, 15 bp, Homo sapiens
tcagaactcattttc

SEQ ID NO: 1452932 - DNA, 15 bp, Homo sapiens
ctcagaactcatttt

SEQ ID NO: 1452933 - DNA, 15 bp, Homo sapiens
tctcagaactcattt

SEQ ID NO: 1452934 - DNA, 15 bp, Homo sapiens
ctctcagaactcatt

SEQ ID NO: 1452935 - DNA, 15 bp, Homo sapiens
tctctcagaactcat

SEQ ID NO: 1452936 - DNA, 15 bp, Homo sapiens
gtctctcagaactca

SEQ ID NO: 1452937 - DNA, 15 bp, Homo sapiens
agtctctcagaactc

SEQ ID NO: 1452938 - DNA, 15 bp, Homo sapiens
aagtctctcagaact

SEQ ID NO: 1452939 - DNA, 15 bp, Homo sapiens
aaagtctctcagaac

SEQ ID NO: 1452940 - DNA, 15 bp, Homo sapiens
gaaagtctctcagaa

SEQ ID NO: 1452941 - DNA, 15 bp, Homo sapiens
agaaagtctctcaga

SEQ ID NO: 1452942 - DNA, 15 bp, Homo sapiens
aagaaagtctctcag

SEQ ID NO: 1452943 - DNA, 15 bp, Homo sapiens
aaagaaagtctctca

SEQ ID NO: 1452944 - DNA, 15 bp, Homo sapiens
caaagaaagtctctc

SEQ ID NO: 1452945 - DNA, 15 bp, Homo sapiens
ccaaagaaagtctct

SEQ ID NO: 1452946 - DNA, 15 bp, Homo sapiens
tccaaagaaagtctc

SEQ ID NO: 1452947 - DNA, 15 bp, Homo sapiens
ttccaaagaaagtct

SEQ ID NO: 1452948 - DNA, 15 bp, Homo sapiens
tttccaaagaaagtc

SEQ ID NO: 1452949 - DNA, 15 bp, Homo sapiens
gtttccaaagaaagt

SEQ ID NO: 1452950 - DNA, 15 bp, Homo sapiens
tgtttccaaagaaag

SEQ ID NO: 1452951 - DNA, 15 bp, Homo sapiens
ttgtttccaaagaaa

SEQ ID NO: 1452952 - DNA, 15 bp, Homo sapiens
tttgtttccaaagaa

SEQ ID NO: 1452953 - DNA, 15 bp, Homo sapiens
ttttgtttccaaaga

SEQ ID NO: 1452954 - DNA, 15 bp, Homo sapiens
attttgtttccaaag

SEQ ID NO: 1452955 - DNA, 15 bp, Homo sapiens
cattttgtttccaaa

SEQ ID NO: 1452956 - DNA, 15 bp, Homo sapiens
ccattttgtttccaa

SEQ ID NO: 1452957 - DNA, 15 bp, Homo sapiens
gccattttgtttcca

SEQ ID NO: 1452958 - DNA, 15 bp, Homo sapiens
agccattttgtttcc

SEQ ID NO: 1452959 - DNA, 15 bp, Homo sapiens
gagccattttgtttc

SEQ ID NO: 1452960 - DNA, 15 bp, Homo sapiens
tgagccattttgttt

SEQ ID NO: 1452961 - DNA, 15 bp, Homo sapiens
gtgagccattttgtt

SEQ ID NO: 1452962 - DNA, 15 bp, Homo sapiens
ggtgagccattttgt

SEQ ID NO: 1452963 - DNA, 15 bp, Homo sapiens
gggtgagccattttg

SEQ ID NO: 1452964 - DNA, 15 bp, Homo sapiens
agggtgagccatttt

SEQ ID NO: 1452965 - DNA, 15 bp, Homo sapiens
aagggtgagccattt

SEQ ID NO: 1452966 - DNA, 15 bp, Homo sapiens
taagggtgagccatt

SEQ ID NO: 1452967 - DNA, 15 bp, Homo sapiens
ttaagggtgagccat

SEQ ID NO: 1452968 - DNA, 15 bp, Homo sapiens
tttaagggtgagcca

SEQ ID NO: 1452969 - DNA, 15 bp, Homo sapiens
atttaagggtgagcc

SEQ ID NO: 1452970 - DNA, 15 bp, Homo sapiens
aatttaagggtgagc

SEQ ID NO: 1452971 - DNA, 15 bp, Homo sapiens
aaatttaagggtgag

SEQ ID NO: 1452972 - DNA, 15 bp, Homo sapiens
gaaatttaagggtga

SEQ ID NO: 1452973 - DNA, 15 bp, Homo sapiens
ggaaatttaagggtg

SEQ ID NO: 1452974 - DNA, 15 bp, Homo sapiens
gggaaatttaagggt

SEQ ID NO: 1452975 - DNA, 15 bp, Homo sapiens
ggggaaatttaaggg

SEQ ID NO: 1452976 - DNA, 15 bp, Homo sapiens
cggggaaatttaagg

SEQ ID NO: 1452977 - DNA, 15 bp, Homo sapiens
acggggaaatttaag

SEQ ID NO: 1452978 - DNA, 15 bp, Homo sapiens
aacggggaaatttaa

SEQ ID NO: 1452979 - DNA, 15 bp, Homo sapiens
aaacggggaaattta

SEQ ID NO: 1452980 - DNA, 15 bp, Homo sapiens
gaaacggggaaattt

SEQ ID NO: 1452981 - DNA, 15 bp, Homo sapiens
agaaacggggaaatt

SEQ ID NO: 1452982 - DNA, 15 bp, Homo sapiens
cagaaacggggaaat

SEQ ID NO: 1452983 - DNA, 15 bp, Homo sapiens
ccagaaacggggaaa

SEQ ID NO: 1452984 - DNA, 15 bp, Homo sapiens
tccagaaacggggaa

SEQ ID NO: 1452985 - DNA, 15 bp, Homo sapiens
atccagaaacgggga

SEQ ID NO: 1452986 - DNA, 15 bp, Homo sapiens
catccagaaacgggg

SEQ ID NO: 1452987 - DNA, 15 bp, Homo sapiens
tcatccagaaacggg

SEQ ID NO: 1452988 - DNA, 15 bp, Homo sapiens
ttcatccagaaacgg

SEQ ID NO: 1452989 - DNA, 15 bp, Homo sapiens
tttcatccagaaacg

SEQ ID NO: 1452990 - DNA, 15 bp, Homo sapiens
atttcatccagaaac

SEQ ID NO: 1452991 - DNA, 15 bp, Homo sapiens
gatttcatccagaaa

SEQ ID NO: 1452992 - DNA, 15 bp, Homo sapiens
agatttcatccagaa

SEQ ID NO: 1452993 - DNA, 15 bp, Homo sapiens
cagatttcatccaga

SEQ ID NO: 1452994 - DNA, 15 bp, Homo sapiens
tcagatttcatccag

SEQ ID NO: 1452995 - DNA, 15 bp, Homo sapiens
atcagatttcatcca

SEQ ID NO: 1452996 - DNA, 15 bp, Homo sapiens
aatcagatttcatcc

SEQ ID NO: 1452997 - DNA, 15 bp, Homo sapiens
aaatcagatttcatc

SEQ ID NO: 1452998 - DNA, 15 bp, Homo sapiens
taaatcagatttcat

SEQ ID NO: 1452999 - DNA, 15 bp, Homo sapiens
ttaaatcagatttca

SEQ ID NO: 1453000 - DNA, 15 bp, Homo sapiens
attaaatcagatttc

SEQ ID NO: 1453001 - DNA, 15 bp, Homo sapiens
tattaaatcagattt

SEQ ID NO: 1453002 - DNA, 15 bp, Homo sapiens
ttattaaatcagatt

SEQ ID NO: 1453003 - DNA, 15 bp, Homo sapiens
attattaaatcagat

SEQ ID NO: 1453004 - DNA, 15 bp, Homo sapiens
tattattaaatcaga

SEQ ID NO: 1453005 - DNA, 15 bp, Homo sapiens
gtattattaaatcag

SEQ ID NO: 1453006 - DNA, 15 bp, Homo sapiens
tgtattattaaatca

SEQ ID NO: 1453007 - DNA, 15 bp, Homo sapiens
ctgtattattaaatc

SEQ ID NO: 1453008 - DNA, 15 bp, Homo sapiens
actgtattattaaat

SEQ ID NO: 1453009 - DNA, 15 bp, Homo sapiens
tactgtattattaaa

SEQ ID NO: 1453010 - DNA, 15 bp, Homo sapiens
atactgtattattaa

SEQ ID NO: 1453011 - DNA, 15 bp, Homo sapiens
aatactgtattatta

SEQ ID NO: 1453012 - DNA, 15 bp, Homo sapiens
caatactgtattatt

SEQ ID NO: 1453013 - DNA, 15 bp, Homo sapiens
gagcaatactgtatt

SEQ ID NO: 1453014 - DNA, 15 bp, Homo sapiens
agagcaatactgtat

SEQ ID NO: 1453015 - DNA, 15 bp, Homo sapiens
aagagcaatactgta

SEQ ID NO: 1453016 - DNA, 15 bp, Homo sapiens
gaagagcaatactgt

SEQ ID NO: 1453017 - DNA, 15 bp, Homo sapiens
tgaagagcaatactg

SEQ ID NO: 1453018 - DNA, 15 bp, Homo sapiens
ttgaagagcaatact

SEQ ID NO: 1453019 - DNA, 15 bp, Homo sapiens
tttgaagagcaatac

SEQ ID NO: 1453020 - DNA, 15 bp, Homo sapiens
atttgaagagcaata

SEQ ID NO: 1453021 - DNA, 15 bp, Homo sapiens
tatttgaagagcaat

SEQ ID NO: 1453022 - DNA, 15 bp, Homo sapiens
atatttgaagagcaa

SEQ ID NO: 1453023 - DNA, 15 bp, Homo sapiens
catatttgaagagca

SEQ ID NO: 1453024 - DNA, 15 bp, Homo sapiens
tcatatttgaagagc

SEQ ID NO: 1453025 - DNA, 15 bp, Homo sapiens
ctcatatttgaagag

SEQ ID NO: 1453026 - DNA, 15 bp, Homo sapiens
tctcatatttgaaga

SEQ ID NO: 1453027 - DNA, 15 bp, Homo sapiens
ctctcatatttgaag

SEQ ID NO: 1453028 - DNA, 15 bp, Homo sapiens
tctctcatatttgaa

SEQ ID NO: 1453029 - DNA, 15 bp, Homo sapiens
ttctctcatatttga

SEQ ID NO: 1453030 - DNA, 15 bp, Homo sapiens
tttctctcatatttg

SEQ ID NO: 1453031 - DNA, 15 bp, Homo sapiens
atttctctcatattt

SEQ ID NO: 1453032 - DNA, 15 bp, Homo sapiens
gatttctctcatatt

SEQ ID NO: 1453033 - DNA, 15 bp, Homo sapiens
tgatttctctcatat

SEQ ID NO: 1453034 - DNA, 15 bp, Homo sapiens
atgatttctctcata

SEQ ID NO: 1453035 - DNA, 15 bp, Homo sapiens
aatgatttctctcat

SEQ ID NO: 1453036 - DNA, 15 bp, Homo sapiens
caatgatttctctca

SEQ ID NO: 1453037 - DNA, 15 bp, Homo sapiens
acaatgatttctctc

SEQ ID NO: 1453038 - DNA, 15 bp, Homo sapiens
tacaatgatttctct

SEQ ID NO: 1453039 - DNA, 15 bp, Homo sapiens
ttacaatgatttctc

SEQ ID NO: 1453040 - DNA, 15 bp, Homo sapiens
cttacaatgatttct

SEQ ID NO: 1453041 - DNA, 15 bp, Homo sapiens
ccttacaatgatttc

SEQ ID NO: 1453042 - DNA, 15 bp, Homo sapiens
tccttacaatgattt

SEQ ID NO: 1453043 - DNA, 15 bp, Homo sapiens
ttccttacaatgatt

SEQ ID NO: 1453044 - DNA, 15 bp, Homo sapiens
cttccttacaatgat

SEQ ID NO: 1453045 - DNA, 15 bp, Homo sapiens
tcttccttacaatga

SEQ ID NO: 1453046 - DNA, 15 bp, Homo sapiens
ttcttccttacaatg

SEQ ID NO: 1453047 - DNA, 15 bp, Homo sapiens
attcttccttacaat

SEQ ID NO: 1453048 - DNA, 15 bp, Homo sapiens
cattcttccttacaa

SEQ ID NO: 1453049 - DNA, 15 bp, Homo sapiens
acattcttccttaca

SEQ ID NO: 1453050 - DNA, 15 bp, Homo sapiens
cacattcttccttac

SEQ ID NO: 1453051 - DNA, 15 bp, Homo sapiens
ccacattcttcctta

SEQ ID NO: 1453052 - DNA, 15 bp, Homo sapiens
cccacattcttcctt

SEQ ID NO: 1453053 - DNA, 15 bp, Homo sapiens
acccacattcttcct

SEQ ID NO: 1453054 - DNA, 15 bp, Homo sapiens
aacccacattcttcc

SEQ ID NO: 1453055 - DNA, 15 bp, Homo sapiens
aaacccacattcttc

SEQ ID NO: 1453056 - DNA, 15 bp, Homo sapiens
aaaacccacattctt

SEQ ID NO: 1453057 - DNA, 15 bp, Homo sapiens
taaaacccacattct

SEQ ID NO: 1453058 - DNA, 15 bp, Homo sapiens
ttaaaacccacattc

SEQ ID NO: 1453059 - DNA, 15 bp, Homo sapiens
tttaaaacccacatt

SEQ ID NO: 1453060 - DNA, 15 bp, Homo sapiens
ctttaaaacccacat

SEQ ID NO: 1453061 - DNA, 15 bp, Homo sapiens
tctttaaaacccaca

SEQ ID NO: 1453062 - DNA, 15 bp, Homo sapiens
ttctttaaaacccac

SEQ ID NO: 1453063 - DNA, 15 bp, Homo sapiens
attctttaaaaccca

SEQ ID NO: 1453064 - DNA, 15 bp, Homo sapiens
tattctttaaaaccc

SEQ ID NO: 1453065 - DNA, 15 bp, Homo sapiens
ctattctttaaaacc

SEQ ID NO: 1453066 - DNA, 15 bp, Homo sapiens
tctattctttaaaac

SEQ ID NO: 1453067 - DNA, 15 bp, Homo sapiens
ttctattctttaaaa

SEQ ID NO: 1453068 - DNA, 15 bp, Homo sapiens
attctattctttaaa

SEQ ID NO: 1453069 - DNA, 15 bp, Homo sapiens
cattctattctttaa

SEQ ID NO: 1453070 - DNA, 15 bp, Homo sapiens
ccattctattcttta

SEQ ID NO: 1453071 - DNA, 15 bp, Homo sapiens
cccattctattcttt

SEQ ID NO: 1453072 - DNA, 15 bp, Homo sapiens
acccattctattctt

SEQ ID NO: 1453073 - DNA, 15 bp, Homo sapiens
aacccattctattct

SEQ ID NO: 1453074 - DNA, 15 bp, Homo sapiens
caacccattctattc

SEQ ID NO: 1453075 - DNA, 15 bp, Homo sapiens
ccaacccattctatt

SEQ ID NO: 1453076 - DNA, 15 bp, Homo sapiens
tccaacccattctat

SEQ ID NO: 1453077 - DNA, 15 bp, Homo sapiens
atccaacccattcta

SEQ ID NO: 1453078 - DNA, 15 bp, Homo sapiens
tatccaacccattct

SEQ ID NO: 1453079 - DNA, 15 bp, Homo sapiens
ttatccaacccattc

SEQ ID NO: 1453080 - DNA, 15 bp, Homo sapiens
tttatccaacccatt

SEQ ID NO: 1453081 - DNA, 15 bp, Homo sapiens
atttatccaacccat

SEQ ID NO: 1453082 - DNA, 15 bp, Homo sapiens
catttatccaaccca

SEQ ID NO: 1453083 - DNA, 15 bp, Homo sapiens
acatttatccaaccc

SEQ ID NO: 1453084 - DNA, 15 bp, Homo sapiens
aacatttatccaacc

SEQ ID NO: 1453085 - DNA, 15 bp, Homo sapiens
aaacatttatccaac

SEQ ID NO: 1453086 - DNA, 15 bp, Homo sapiens
aaaacatttatccaa

SEQ ID NO: 1453087 - DNA, 15 bp, Homo sapiens
aaaaacatttatcca

SEQ ID NO: 1453088 - DNA, 15 bp, Homo sapiens
taaaaacatttatcc

SEQ ID NO: 1453089 - DNA, 15 bp, Homo sapiens
ataaaaacatttatc

SEQ ID NO: 1453090 - DNA, 15 bp, Homo sapiens
tataaaaacatttat

SEQ ID NO: 1453091 - DNA, 15 bp, Homo sapiens
ttataaaaacattta

SEQ ID NO: 1453092 - DNA, 15 bp, Homo sapiens
tttataaaaacattt

SEQ ID NO: 1453093 - DNA, 15 bp, Homo sapiens
ttttataaaaacatt

SEQ ID NO: 1453094 - DNA, 15 bp, Homo sapiens
attttataaaaacat

SEQ ID NO: 1453095 - DNA, 15 bp, Homo sapiens
tattttataaaaaca

SEQ ID NO: 1453096 - DNA, 15 bp, Homo sapiens
ctattttataaaaac

SEQ ID NO: 1453097 - DNA, 15 bp, Homo sapiens
tctattttataaaaa

SEQ ID NO: 1453098 - DNA, 15 bp, Homo sapiens
ttctattttataaaa

SEQ ID NO: 1453099 - DNA, 15 bp, Homo sapiens
cttctattttataaa

SEQ ID NO: 1453100 - DNA, 15 bp, Homo sapiens
acttctattttataa

SEQ ID NO: 1453101 - DNA, 15 bp, Homo sapiens
cacttctattttata

SEQ ID NO: 1453102 - DNA, 15 bp, Homo sapiens
tcacttctattttat

SEQ ID NO: 1453103 - DNA, 15 bp, Homo sapiens
ttcacttctatttta

SEQ ID NO: 1453104 - DNA, 15 bp, Homo sapiens
tttcacttctatttt

SEQ ID NO: 1453105 - DNA, 15 bp, Homo sapiens
ctttcacttctattt

SEQ ID NO: 1453106 - DNA, 15 bp, Homo sapiens
cctttcacttctatt

SEQ ID NO: 1453107 - DNA, 15 bp, Homo sapiens
tcctttcacttctat

SEQ ID NO: 1453108 - DNA, 15 bp, Homo sapiens
atcctttcacttcta

SEQ ID NO: 1453109 - DNA, 15 bp, Homo sapiens
gatcctttcacttct

SEQ ID NO: 1453110 - DNA, 15 bp, Homo sapiens
tgatcctttcacttc

SEQ ID NO: 1453111 - DNA, 15 bp, Homo sapiens
ctgatcctttcactt

SEQ ID NO: 1453112 - DNA, 15 bp, Homo sapiens
tctgatcctttcact

SEQ ID NO: 1453113 - DNA, 15 bp, Homo sapiens
ttctgatcctttcac

SEQ ID NO: 1453114 - DNA, 15 bp, Homo sapiens
tttctgatcctttca

SEQ ID NO: 1453115 - DNA, 15 bp, Homo sapiens
atttctgatcctttc

SEQ ID NO: 1453116 - DNA, 15 bp, Homo sapiens
gatttctgatccttt

SEQ ID NO: 1453117 - DNA, 15 bp, Homo sapiens
tgatttctgatcctt

SEQ ID NO: 1453118 - DNA, 15 bp, Homo sapiens
ctgatttctgatcct

SEQ ID NO: 1453119 - DNA, 15 bp, Homo sapiens
gctgatttctgatcc

SEQ ID NO: 1453120 - DNA, 15 bp, Homo sapiens
tgctgatttctgatc

SEQ ID NO: 1453121 - DNA, 15 bp, Homo sapiens
ctgctgatttctgat

SEQ ID NO: 1453122 - DNA, 15 bp, Homo sapiens
actgctgatttctga

SEQ ID NO: 1453123 - DNA, 15 bp, Homo sapiens
tactgctgatttctg

SEQ ID NO: 1453124 - DNA, 15 bp, Homo sapiens
atactgctgatttct

SEQ ID NO: 1453125 - DNA, 15 bp, Homo sapiens
gatactgctgatttc

SEQ ID NO: 1453126 - DNA, 15 bp, Homo sapiens
tgatactgctgattt

SEQ ID NO: 1453127 - DNA, 15 bp, Homo sapiens
ttgatactgctgatt

SEQ ID NO: 1453128 - DNA, 15 bp, Homo sapiens
tttgatactgctgat

SEQ ID NO: 1453129 - DNA, 15 bp, Homo sapiens
ttttgatactgctga

SEQ ID NO: 1453130 - DNA, 15 bp, Homo sapiens
gttttgatactgctg

SEQ ID NO: 1453131 - DNA, 15 bp, Homo sapiens
tgttttgatactgct

SEQ ID NO: 1453132 - DNA, 15 bp, Homo sapiens
ttgttttgatactgc

SEQ ID NO: 1453133 - DNA, 15 bp, Homo sapiens
gttgttttgatactg

SEQ ID NO: 1453134 - DNA, 15 bp, Homo sapiens
tgttgttttgatact

SEQ ID NO: 1453135 - DNA, 15 bp, Homo sapiens
ttgttgttttgatac

SEQ ID NO: 1453136 - DNA, 15 bp, Homo sapiens
cttgttgttttgata

SEQ ID NO: 1453137 - DNA, 15 bp, Homo sapiens
tcttgttgttttgat

SEQ ID NO: 1453138 - DNA, 15 bp, Homo sapiens
ttcttgttgttttga

SEQ ID NO: 1453139 - DNA, 15 bp, Homo sapiens
cttcttgttgttttg

SEQ ID NO: 1453140 - DNA, 15 bp, Homo sapiens
tcttcttgttgtttt

SEQ ID NO: 1453141 - DNA, 15 bp, Homo sapiens
ttcttcttgttgttt

SEQ ID NO: 1453142 - DNA, 15 bp, Homo sapiens
gttcttcttgttgtt

SEQ ID NO: 1453143 - DNA, 15 bp, Homo sapiens
agttcttcttgttgt

SEQ ID NO: 1453144 - DNA, 15 bp, Homo sapiens
cagttcttcttgttg

SEQ ID NO: 1453145 - DNA, 15 bp, Homo sapiens
tcagttcttcttgtt

SEQ ID NO: 1453146 - DNA, 15 bp, Homo sapiens
atcagttcttcttgt

SEQ ID NO: 1453147 - DNA, 15 bp, Homo sapiens
aatcagttcttcttg

SEQ ID NO: 1453148 - DNA, 15 bp, Homo sapiens
taatcagttcttctt

SEQ ID NO: 1453149 - DNA, 15 bp, Homo sapiens
ttaatcagttcttct

SEQ ID NO: 1453150 - DNA, 15 bp, Homo sapiens
tttaatcagttcttc

SEQ ID NO: 1453151 - DNA, 15 bp, Homo sapiens
gtttaatcagttctt

SEQ ID NO: 1453152 - DNA, 15 bp, Homo sapiens
ggtttaatcagttct

SEQ ID NO: 1453153 - DNA, 15 bp, Homo sapiens
tggtttaatcagttc

SEQ ID NO: 1453154 - DNA, 15 bp, Homo sapiens
atggtttaatcagtt

SEQ ID NO: 1453155 - DNA, 15 bp, Homo sapiens
catggtttaatcagt

SEQ ID NO: 1453156 - DNA, 15 bp, Homo sapiens
gcatggtttaatcag

SEQ ID NO: 1453157 - DNA, 15 bp, Homo sapiens
tgcatggtttaatca

SEQ ID NO: 1453158 - DNA, 15 bp, Homo sapiens
gtgcatggtttaatc

SEQ ID NO: 1453159 - DNA, 15 bp, Homo sapiens
agtgcatggtttaat

SEQ ID NO: 1453160 - DNA, 15 bp, Homo sapiens
aagtgcatggtttaa

SEQ ID NO: 1453161 - DNA, 15 bp, Homo sapiens
caagtgcatggttta

SEQ ID NO: 1453162 - DNA, 15 bp, Homo sapiens
acaagtgcatggttt

SEQ ID NO: 1453163 - DNA, 15 bp, Homo sapiens
aacaagtgcatggtt

SEQ ID NO: 1453164 - DNA, 15 bp, Homo sapiens
taacaagtgcatggt

SEQ ID NO: 1453165 - DNA, 15 bp, Homo sapiens
gtaacaagtgcatgg

SEQ ID NO: 1453166 - DNA, 15 bp, Homo sapiens
ggtaacaagtgcatg

SEQ ID NO: 1453167 - DNA, 15 bp, Homo sapiens
aggtaacaagtgcat

SEQ ID NO: 1453168 - DNA, 15 bp, Homo sapiens
gaggtaacaagtgca

SEQ ID NO: 1453169 - DNA, 15 bp, Homo sapiens
agaggtaacaagtgc

SEQ ID NO: 1453170 - DNA, 15 bp, Homo sapiens
cagaggtaacaagtg

SEQ ID NO: 1453171 - DNA, 15 bp, Homo sapiens
tcagaggtaacaagt

SEQ ID NO: 1453172 - DNA, 15 bp, Homo sapiens
ttcagaggtaacaag

SEQ ID NO: 1453173 - DNA, 15 bp, Homo sapiens
attcagaggtaacaa

SEQ ID NO: 1453174 - DNA, 15 bp, Homo sapiens
aattcagaggtaaca

SEQ ID NO: 1453175 - DNA, 15 bp, Homo sapiens
aaattcagaggtaac

SEQ ID NO: 1453176 - DNA, 15 bp, Homo sapiens
gaaattcagaggtaa

SEQ ID NO: 1453177 - DNA, 15 bp, Homo sapiens
agaaattcagaggta

SEQ ID NO: 1453178 - DNA, 15 bp, Homo sapiens
gagaaattcagaggt

SEQ ID NO: 1453179 - DNA, 15 bp, Homo sapiens
agagaaattcagagg

SEQ ID NO: 1453180 - DNA, 15 bp, Homo sapiens
aagagaaattcagag

SEQ ID NO: 1453181 - DNA, 15 bp, Homo sapiens
aaagagaaattcaga

SEQ ID NO: 1453182 - DNA, 15 bp, Homo sapiens
caaagagaaattcag

SEQ ID NO: 1453183 - DNA, 15 bp, Homo sapiens
gcaaagagaaattca

SEQ ID NO: 1453184 - DNA, 15 bp, Homo sapiens
tgcaaagagaaattc

SEQ ID NO: 1453185 - DNA, 15 bp, Homo sapiens
ctgcaaagagaaatt

SEQ ID NO: 1453186 - DNA, 15 bp, Homo sapiens
tctgcaaagagaaat

SEQ ID NO: 1453187 - DNA, 15 bp, Homo sapiens
ttctgcaaagagaaa

SEQ ID NO: 1453188 - DNA, 15 bp, Homo sapiens
tttctgcaaagagaa

SEQ ID NO: 1453189 - DNA, 15 bp, Homo sapiens
atttctgcaaagaga

SEQ ID NO: 1453190 - DNA, 15 bp, Homo sapiens
aatttctgcaaagag

SEQ ID NO: 1453191 - DNA, 15 bp, Homo sapiens
gaatttctgcaaaga

SEQ ID NO: 1453192 - DNA, 15 bp, Homo sapiens
agaatttctgcaaag

SEQ ID NO: 1453193 - DNA, 15 bp, Homo sapiens
tagaatttctgcaaa

SEQ ID NO: 1453194 - DNA, 15 bp, Homo sapiens
gtagaatttctgcaa

SEQ ID NO: 1453195 - DNA, 15 bp, Homo sapiens
agtagaatttctgca

SEQ ID NO: 1453196 - DNA, 15 bp, Homo sapiens
aagtagaatttctgc

SEQ ID NO: 1453197 - DNA, 15 bp, Homo sapiens
gaagtagaatttctg

SEQ ID NO: 1453198 - DNA, 15 bp, Homo sapiens
tgaagtagaatttct

SEQ ID NO: 1453199 - DNA, 15 bp, Homo sapiens
ttgaagtagaatttc

SEQ ID NO: 1453200 - DNA, 15 bp, Homo sapiens
attgaagtagaattt

SEQ ID NO: 1453201 - DNA, 15 bp, Homo sapiens
aattgaagtagaatt

SEQ ID NO: 1453202 - DNA, 15 bp, Homo sapiens
aaattgaagtagaat

SEQ ID NO: 1453203 - DNA, 15 bp, Homo sapiens
aaaattgaagtagaa

SEQ ID NO: 1453204 - DNA, 15 bp, Homo sapiens
taaaattgaagtaga

SEQ ID NO: 1453205 - DNA, 15 bp, Homo sapiens
ttaaaattgaagtag

SEQ ID NO: 1453206 - DNA, 15 bp, Homo sapiens
tttaaaattgaagta

SEQ ID NO: 1453207 - DNA, 15 bp, Homo sapiens
ttttaaaattgaagt

SEQ ID NO: 1453208 - DNA, 15 bp, Homo sapiens
attttaaaattgaag

SEQ ID NO: 1453209 - DNA, 15 bp, Homo sapiens
aattttaaaattgaa

SEQ ID NO: 1453210 - DNA, 15 bp, Homo sapiens
gaattttaaaattga

SEQ ID NO: 1453211 - DNA, 15 bp, Homo sapiens
tgaattttaaaattg

SEQ ID NO: 1453212 - DNA, 15 bp, Homo sapiens
ctgaattttaaaatt

SEQ ID NO: 1453213 - DNA, 15 bp, Homo sapiens
tctgaattttaaaat

SEQ ID NO: 1453214 - DNA, 15 bp, Homo sapiens
ttctgaattttaaaa

SEQ ID NO: 1453215 - DNA, 15 bp, Homo sapiens
attctgaattttaaa

SEQ ID NO: 1453216 - DNA, 15 bp, Homo sapiens
aattctgaattttaa

SEQ ID NO: 1453217 - DNA, 15 bp, Homo sapiens
taattctgaatttta

SEQ ID NO: 1453218 - DNA, 15 bp, Homo sapiens
ttaattctgaatttt

SEQ ID NO: 1453219 - DNA, 15 bp, Homo sapiens
tttaattctgaattt

SEQ ID NO: 1453220 - DNA, 15 bp, Homo sapiens
ttttaattctgaatt

SEQ ID NO: 1453221 - DNA, 15 bp, Homo sapiens
tttttaattctgaat

SEQ ID NO: 1453222 - DNA, 15 bp, Homo sapiens
ttttttaattctgaa

SEQ ID NO: 1453223 - DNA, 15 bp, Homo sapiens
tttttttaattctga

SEQ ID NO: 1453224 - DNA, 15 bp, Homo sapiens
ttttttttaattctg

SEQ ID NO: 1453225 - DNA, 15 bp, Homo sapiens
tttttttttaattct

SEQ ID NO: 1453226 - DNA, 15 bp, Homo sapiens
atttttttttaattc

SEQ ID NO: 1453227 - DNA, 15 bp, Homo sapiens
tatttttttttaatt

SEQ ID NO: 1453228 - DNA, 15 bp, Homo sapiens
atatttttttttaat

SEQ ID NO: 1453229 - DNA, 15 bp, Homo sapiens
aatatttttttttaa

SEQ ID NO: 1453230 - DNA, 15 bp, Homo sapiens
gaatattttttttta

SEQ ID NO: 1453231 - DNA, 15 bp, Homo sapiens
tgaatattttttttt

SEQ ID NO: 1453232 - DNA, 15 bp, Homo sapiens
ttgaatatttttttt

SEQ ID NO: 1453233 - DNA, 15 bp, Homo sapiens
tttgaatattttttt

SEQ ID NO: 1453234 - DNA, 15 bp, Homo sapiens
ctttgaatatttttt

SEQ ID NO: 1453235 - DNA, 15 bp, Homo sapiens
cctttgaatattttt

SEQ ID NO: 1453236 - DNA, 15 bp, Homo sapiens
tcctttgaatatttt

SEQ ID NO: 1453237 - DNA, 15 bp, Homo sapiens
atcctttgaatattt

SEQ ID NO: 1453238 - DNA, 15 bp, Homo sapiens
tatcctttgaatatt

SEQ ID NO: 1453239 - DNA, 15 bp, Homo sapiens
ctatcctttgaatat

SEQ ID NO: 1453240 - DNA, 15 bp, Homo sapiens
actatcctttgaata

SEQ ID NO: 1453241 - DNA, 15 bp, Homo sapiens
aactatcctttgaat

SEQ ID NO: 1453242 - DNA, 15 bp, Homo sapiens
taactatcctttgaa

SEQ ID NO: 1453243 - DNA, 15 bp, Homo sapiens
ttaactatcctttga

SEQ ID NO: 1453244 - DNA, 15 bp, Homo sapiens
attaactatcctttg

SEQ ID NO: 1453245 - DNA, 15 bp, Homo sapiens
cattaactatccttt

SEQ ID NO: 1453246 - DNA, 15 bp, Homo sapiens
tcattaactatcctt

SEQ ID NO: 1453247 - DNA, 15 bp, Homo sapiens
ttcattaactatcct

SEQ ID NO: 1453248 - DNA, 15 bp, Homo sapiens
gttcattaactatcc

SEQ ID NO: 1453249 - DNA, 15 bp, Homo sapiens
tgttcattaactatc

SEQ ID NO: 1453250 - DNA, 15 bp, Homo sapiens
ttgttcattaactat

SEQ ID NO: 1453251 - DNA, 15 bp, Homo sapiens
tttgttcattaacta

SEQ ID NO: 1453252 - DNA, 15 bp, Homo sapiens
ttttgttcattaact

SEQ ID NO: 1453253 - DNA, 15 bp, Homo sapiens
tttttgttcattaac

SEQ ID NO: 1453254 - DNA, 15 bp, Homo sapiens
gtttttgttcattaa

SEQ ID NO: 1453255 - DNA, 15 bp, Homo sapiens
agtttttgttcatta

SEQ ID NO: 1453256 - DNA, 15 bp, Homo sapiens
aagtttttgttcatt

SEQ ID NO: 1453257 - DNA, 15 bp, Homo sapiens
aaagtttttgttcat

SEQ ID NO: 1453258 - DNA, 15 bp, Homo sapiens
taaagtttttgttca

SEQ ID NO: 1453259 - DNA, 15 bp, Homo sapiens
ctaaagtttttgttc

SEQ ID NO: 1453260 - DNA, 15 bp, Homo sapiens
cctaaagtttttgtt

SEQ ID NO: 1453261 - DNA, 15 bp, Homo sapiens
tcctaaagtttttgt

SEQ ID NO: 1453262 - DNA, 15 bp, Homo sapiens
ttcctaaagtttttg

SEQ ID NO: 1453263 - DNA, 15 bp, Homo sapiens
tttcctaaagttttt

SEQ ID NO: 1453264 - DNA, 15 bp, Homo sapiens
ctttcctaaagtttt

SEQ ID NO: 1453265 - DNA, 15 bp, Homo sapiens
actttcctaaagttt

SEQ ID NO: 1453266 - DNA, 15 bp, Homo sapiens
gactttcctaaagtt

SEQ ID NO: 1453267 - DNA, 15 bp, Homo sapiens
tgactttcctaaagt

SEQ ID NO: 1453268 - DNA, 15 bp, Homo sapiens
ttgactttcctaaag

SEQ ID NO: 1453269 - DNA, 15 bp, Homo sapiens
tttgactttcctaaa

SEQ ID NO: 1453270 - DNA, 15 bp, Homo sapiens
gtttgactttcctaa

SEQ ID NO: 1453271 - DNA, 15 bp, Homo sapiens
tgtttgactttccta

SEQ ID NO: 1453272 - DNA, 15 bp, Homo sapiens
atgtttgactttcct

SEQ ID NO: 1453273 - DNA, 15 bp, Homo sapiens
catgtttgactttcc

SEQ ID NO: 1453274 - DNA, 15 bp, Homo sapiens
ccatgtttgactttc

SEQ ID NO: 1453275 - DNA, 15 bp, Homo sapiens
accatgtttgacttt

SEQ ID NO: 1453276 - DNA, 15 bp, Homo sapiens
caccatgtttgactt

SEQ ID NO: 1453277 - DNA, 15 bp, Homo sapiens
acaccatgtttgact

SEQ ID NO: 1453278 - DNA, 15 bp, Homo sapiens
cacaccatgtttgac

SEQ ID NO: 1453279 - DNA, 15 bp, Homo sapiens
ccacaccatgtttga

SEQ ID NO: 1453280 - DNA, 15 bp, Homo sapiens
gccacaccatgtttg

SEQ ID NO: 1453281 - DNA, 15 bp, Homo sapiens
tgccacaccatgttt

SEQ ID NO: 1453282 - DNA, 15 bp, Homo sapiens
atgccacaccatgtt

SEQ ID NO: 1453283 - DNA, 15 bp, Homo sapiens
tatgccacaccatgt

SEQ ID NO: 1453284 - DNA, 15 bp, Homo sapiens
ctatgccacaccatg

SEQ ID NO: 1453285 - DNA, 15 bp, Homo sapiens
cctatgccacaccat

SEQ ID NO: 1453286 - DNA, 15 bp, Homo sapiens
tcctatgccacacca

SEQ ID NO: 1453287 - DNA, 15 bp, Homo sapiens
atcctatgccacacc

SEQ ID NO: 1453288 - DNA, 15 bp, Homo sapiens
aatcctatgccacac

SEQ ID NO: 1453289 - DNA, 15 bp, Homo sapiens
caatcctatgccaca

SEQ ID NO: 1453290 - DNA, 15 bp, Homo sapiens
ccaatcctatgccac

SEQ ID NO: 1453291 - DNA, 15 bp, Homo sapiens
cccaatcctatgcca

SEQ ID NO: 1453292 - DNA, 15 bp, Homo sapiens
ccccaatcctatgcc

SEQ ID NO: 1453293 - DNA, 15 bp, Homo sapiens
gccccaatcctatgc

SEQ ID NO: 1453294 - DNA, 15 bp, Homo sapiens
agccccaatcctatg

SEQ ID NO: 1453295 - DNA, 15 bp, Homo sapiens
tagccccaatcctat

SEQ ID NO: 1453296 - DNA, 15 bp, Homo sapiens
ttagccccaatccta

SEQ ID NO: 1453297 - DNA, 15 bp, Homo sapiens
tttagccccaatcct

SEQ ID NO: 1453298 - DNA, 15 bp, Homo sapiens
ctttagccccaatcc

SEQ ID NO: 1453299 - DNA, 15 bp, Homo sapiens
actttagccccaatc

SEQ ID NO: 1453300 - DNA, 15 bp, Homo sapiens
cactttagccccaat

SEQ ID NO: 1453301 - DNA, 15 bp, Homo sapiens
tcactttagccccaa

SEQ ID NO: 1453302 - DNA, 15 bp, Homo sapiens
ttcactttagcccca

SEQ ID NO: 1453303 - DNA, 15 bp, Homo sapiens
attcactttagcccc

SEQ ID NO: 1453304 - DNA, 15 bp, Homo sapiens
tattcactttagccc

SEQ ID NO: 1453305 - DNA, 15 bp, Homo sapiens
atattcactttagcc

SEQ ID NO: 1453306 - DNA, 15 bp, Homo sapiens
catattcactttagc

SEQ ID NO: 1453307 - DNA, 15 bp, Homo sapiens
gcatattcactttag

SEQ ID NO: 1453308 - DNA, 15 bp, Homo sapiens
tgcatattcacttta

SEQ ID NO: 1453309 - DNA, 15 bp, Homo sapiens
ctgcatattcacttt

SEQ ID NO: 1453310 - DNA, 15 bp, Homo sapiens
actgcatattcactt

SEQ ID NO: 1453311 - DNA, 15 bp, Homo sapiens
aactgcatattcact

SEQ ID NO: 1453312 - DNA, 15 bp, Homo sapiens
aaactgcatattcac

SEQ ID NO: 1453313 - DNA, 15 bp, Homo sapiens
taaactgcatattca

SEQ ID NO: 1453314 - DNA, 15 bp, Homo sapiens
ctaaactgcatattc

SEQ ID NO: 1453315 - DNA, 15 bp, Homo sapiens
tctaaactgcatatt

SEQ ID NO: 1453316 - DNA, 15 bp, Homo sapiens
ttctaaactgcatat

SEQ ID NO: 1453317 - DNA, 15 bp, Homo sapiens
attctaaactgcata

SEQ ID NO: 1453318 - DNA, 15 bp, Homo sapiens
aattctaaactgcat

SEQ ID NO: 1453319 - DNA, 15 bp, Homo sapiens
caattctaaactgca

SEQ ID NO: 1453320 - DNA, 15 bp, Homo sapiens
gcaattctaaactgc

SEQ ID NO: 1453321 - DNA, 15 bp, Homo sapiens
agcaattctaaactg

SEQ ID NO: 1453322 - DNA, 15 bp, Homo sapiens
tagcaattctaaact

SEQ ID NO: 1453323 - DNA, 15 bp, Homo sapiens
ctagcaattctaaac

SEQ ID NO: 1453324 - DNA, 15 bp, Homo sapiens
actagcaattctaaa

SEQ ID NO: 1453325 - DNA, 15 bp, Homo sapiens
cactagcaattctaa

SEQ ID NO: 1453326 - DNA, 15 bp, Homo sapiens
tcactagcaattcta

SEQ ID NO: 1453327 - DNA, 15 bp, Homo sapiens
gtcactagcaattct

SEQ ID NO: 1453328 - DNA, 15 bp, Homo sapiens
tgtcactagcaattc

SEQ ID NO: 1453329 - DNA, 15 bp, Homo sapiens
atgtcactagcaatt

SEQ ID NO: 1453330 - DNA, 15 bp, Homo sapiens
aatgtcactagcaat

SEQ ID NO: 1453331 - DNA, 15 bp, Homo sapiens
caatgtcactagcaa

SEQ ID NO: 1453332 - DNA, 15 bp, Homo sapiens
acaatgtcactagca

SEQ ID NO: 1453333 - DNA, 15 bp, Homo sapiens
tacaatgtcactagc

SEQ ID NO: 1453334 - DNA, 15 bp, Homo sapiens
atacaatgtcactag

SEQ ID NO: 1453335 - DNA, 15 bp, Homo sapiens
gatacaatgtcacta

SEQ ID NO: 1453336 - DNA, 15 bp, Homo sapiens
tgatacaatgtcact

SEQ ID NO: 1453337 - DNA, 15 bp, Homo sapiens
atgatacaatgtcac

SEQ ID NO: 1453338 - DNA, 15 bp, Homo sapiens
tatgatacaatgtca

SEQ ID NO: 1453339 - DNA, 15 bp, Homo sapiens
ttatgatacaatgtc

SEQ ID NO: 1453340 - DNA, 15 bp, Homo sapiens
tttatgatacaatgt

SEQ ID NO: 1453341 - DNA, 15 bp, Homo sapiens
ttttatgatacaatg

SEQ ID NO: 1453342 - DNA, 15 bp, Homo sapiens
cttttatgatacaat

SEQ ID NO: 1453343 - DNA, 15 bp, Homo sapiens
tcttttatgatacaa

SEQ ID NO: 1453344 - DNA, 15 bp, Homo sapiens
ttcttttatgataca

SEQ ID NO: 1453345 - DNA, 15 bp, Homo sapiens
gttcttttatgatac

SEQ ID NO: 1453346 - DNA, 15 bp, Homo sapiens
agttcttttatgata

SEQ ID NO: 1453347 - DNA, 15 bp, Homo sapiens
cagttcttttatgat

SEQ ID NO: 1453348 - DNA, 15 bp, Homo sapiens
tcagttcttttatga

SEQ ID NO: 1453349 - DNA, 15 bp, Homo sapiens
ctcagttcttttatg

SEQ ID NO: 1453350 - DNA, 15 bp, Homo sapiens
actcagttcttttat

SEQ ID NO: 1453351 - DNA, 15 bp, Homo sapiens
tactcagttctttta

SEQ ID NO: 1453352 - DNA, 15 bp, Homo sapiens
ttactcagttctttt

SEQ ID NO: 1453353 - DNA, 15 bp, Homo sapiens
tttactcagttcttt

SEQ ID NO: 1453354 - DNA, 15 bp, Homo sapiens
ctttactcagttctt

SEQ ID NO: 1453355 - DNA, 15 bp, Homo sapiens
tctttactcagttct

SEQ ID NO: 1453356 - DNA, 15 bp, Homo sapiens
ttctttactcagttc

SEQ ID NO: 1453357 - DNA, 15 bp, Homo sapiens
cttctttactcagtt

SEQ ID NO: 1453358 - DNA, 15 bp, Homo sapiens
tcttctttactcagt

SEQ ID NO: 1453359 - DNA, 15 bp, Homo sapiens
ttcttctttactcag

SEQ ID NO: 1453360 - DNA, 15 bp, Homo sapiens
gttcttctttactca

SEQ ID NO: 1453361 - DNA, 15 bp, Homo sapiens
ggttcttctttactc

SEQ ID NO: 1453362 - DNA, 15 bp, Homo sapiens
tggttcttctttact

SEQ ID NO: 1453363 - DNA, 15 bp, Homo sapiens
ttggttcttctttac

SEQ ID NO: 1453364 - DNA, 15 bp, Homo sapiens
cttggttcttcttta

SEQ ID NO: 1453365 - DNA, 15 bp, Homo sapiens
tcttggttcttcttt

SEQ ID NO: 1453366 - DNA, 15 bp, Homo sapiens
ttcttggttcttctt

SEQ ID NO: 1453367 - DNA, 15 bp, Homo sapiens
attcttggttcttct

SEQ ID NO: 1453368 - DNA, 15 bp, Homo sapiens
gattcttggttcttc

SEQ ID NO: 1453369 - DNA, 15 bp, Homo sapiens
agattcttggttctt

SEQ ID NO: 1453370 - DNA, 15 bp, Homo sapiens
aagattcttggttct

SEQ ID NO: 1453371 - DNA, 15 bp, Homo sapiens
aaagattcttggttc

SEQ ID NO: 1453372 - DNA, 15 bp, Homo sapiens
caaagattcttggtt

SEQ ID NO: 1453373 - DNA, 15 bp, Homo sapiens
ccaaagattcttggt

SEQ ID NO: 1453374 - DNA, 15 bp, Homo sapiens
cccaaagattcttgg

SEQ ID NO: 1453375 - DNA, 15 bp, Homo sapiens
gcccaaagattcttg

SEQ ID NO: 1453376 - DNA, 15 bp, Homo sapiens
tgcccaaagattctt

SEQ ID NO: 1453377 - DNA, 15 bp, Homo sapiens
gtgcccaaagattct

SEQ ID NO: 1453378 - DNA, 15 bp, Homo sapiens
tgtgcccaaagattc

SEQ ID NO: 1453379 - DNA, 15 bp, Homo sapiens
atgtgcccaaagatt

SEQ ID NO: 1453380 - DNA, 15 bp, Homo sapiens
aatgtgcccaaagat

SEQ ID NO: 1453381 - DNA, 15 bp, Homo sapiens
aaatgtgcccaaaga

SEQ ID NO: 1453382 - DNA, 15 bp, Homo sapiens
caaatgtgcccaaag

SEQ ID NO: 1453383 - DNA, 15 bp, Homo sapiens
tcaaatgtgcccaaa

SEQ ID NO: 1453384 - DNA, 15 bp, Homo sapiens
atcaaatgtgcccaa

SEQ ID NO: 1453385 - DNA, 15 bp, Homo sapiens
tatcaaatgtgccca

SEQ ID NO: 1453386 - DNA, 15 bp, Homo sapiens
ttatcaaatgtgccc

SEQ ID NO: 1453387 - DNA, 15 bp, Homo sapiens
tttatcaaatgtgcc

SEQ ID NO: 1453388 - DNA, 15 bp, Homo sapiens
ttttatcaaatgtgc

SEQ ID NO: 1453389 - DNA, 15 bp, Homo sapiens
tttttatcaaatgtg

SEQ ID NO: 1453390 - DNA, 15 bp, Homo sapiens
ttttttatcaaatgt

SEQ ID NO: 1453391 - DNA, 15 bp, Homo sapiens
attttttatcaaatg

SEQ ID NO: 1453392 - DNA, 15 bp, Homo sapiens
tattttttatcaaat

SEQ ID NO: 1453393 - DNA, 15 bp, Homo sapiens
ttattttttatcaaa

SEQ ID NO: 1453394 - DNA, 15 bp, Homo sapiens
tttattttttatcaa

SEQ ID NO: 1453395 - DNA, 15 bp, Homo sapiens
ctttattttttatca

SEQ ID NO: 1453396 - DNA, 15 bp, Homo sapiens
actttattttttatc

SEQ ID NO: 1453397 - DNA, 15 bp, Homo sapiens
aactttattttttat

SEQ ID NO: 1453398 - DNA, 15 bp, Homo sapiens
caactttatttttta

SEQ ID NO: 1453399 - DNA, 15 bp, Homo sapiens
tcaactttatttttt

SEQ ID NO: 1453400 - DNA, 15 bp, Homo sapiens
ttcaactttattttt

SEQ ID NO: 1453401 - DNA, 15 bp, Homo sapiens
tttcaactttatttt

SEQ ID NO: 1453402 - DNA, 15 bp, Homo sapiens
ttttcaactttattt

SEQ ID NO: 1453403 - DNA, 15 bp, Homo sapiens
cttttcaactttatt

SEQ ID NO: 1453404 - DNA, 15 bp, Homo sapiens
ccttttcaactttat

SEQ ID NO: 1453405 - DNA, 15 bp, Homo sapiens
tccttttcaacttta

SEQ ID NO: 1453406 - DNA, 15 bp, Homo sapiens
ttccttttcaacttt

SEQ ID NO: 1453407 - DNA, 15 bp, Homo sapiens
tttccttttcaactt

SEQ ID NO: 1453408 - DNA, 15 bp, Homo sapiens
atttccttttcaact

SEQ ID NO: 1453409 - DNA, 15 bp, Homo sapiens
tatttccttttcaac

SEQ ID NO: 1453410 - DNA, 15 bp, Homo sapiens
atatttccttttcaa

SEQ ID NO: 1453411 - DNA, 15 bp, Homo sapiens
gatatttccttttca

SEQ ID NO: 1453412 - DNA, 15 bp, Homo sapiens
tgatatttccttttc

SEQ ID NO: 1453413 - DNA, 15 bp, Homo sapiens
ttgatatttcctttt

SEQ ID NO: 1453414 - DNA, 15 bp, Homo sapiens
tttgatatttccttt

SEQ ID NO: 1453415 - DNA, 15 bp, Homo sapiens
ctttgatatttcctt

SEQ ID NO: 1453416 - DNA, 15 bp, Homo sapiens
tctttgatatttcct

SEQ ID NO: 1453417 - DNA, 15 bp, Homo sapiens
atctttgatatttcc

SEQ ID NO: 1453418 - DNA, 15 bp, Homo sapiens
catctttgatatttc

SEQ ID NO: 1453419 - DNA, 15 bp, Homo sapiens
acatctttgatattt

SEQ ID NO: 1453420 - DNA, 15 bp, Homo sapiens
tacatctttgatatt

SEQ ID NO: 1453421 - DNA, 15 bp, Homo sapiens
atacatctttgatat

SEQ ID NO: 1453422 - DNA, 15 bp, Homo sapiens
aatacatctttgata

SEQ ID NO: 1453423 - DNA, 15 bp, Homo sapiens
taatacatctttgat

SEQ ID NO: 1453424 - DNA, 15 bp, Homo sapiens
gtaatacatctttga

SEQ ID NO: 1453425 - DNA, 15 bp, Homo sapiens
tgtaatacatctttg

SEQ ID NO: 1453426 - DNA, 15 bp, Homo sapiens
ttgtaatacatcttt

SEQ ID NO: 1453427 - DNA, 15 bp, Homo sapiens
tttgtaatacatctt

SEQ ID NO: 1453428 - DNA, 15 bp, Homo sapiens
ctttgtaatacatct

SEQ ID NO: 1453429 - DNA, 15 bp, Homo sapiens
tctttgtaatacatc

SEQ ID NO: 1453430 - DNA, 15 bp, Homo sapiens
gtctttgtaatacat

SEQ ID NO: 1453431 - DNA, 15 bp, Homo sapiens
tgtctttgtaataca

SEQ ID NO: 1453432 - DNA, 15 bp, Homo sapiens
ttgtctttgtaatac

SEQ ID NO: 1453433 - DNA, 15 bp, Homo sapiens
tttgtctttgtaata

SEQ ID NO: 1453434 - DNA, 15 bp, Homo sapiens
ttttgtctttgtaat

SEQ ID NO: 1453435 - DNA, 15 bp, Homo sapiens
tttttgtctttgtaa

SEQ ID NO: 1453436 - DNA, 15 bp, Homo sapiens
ctttttgtctttgta

SEQ ID NO: 1453437 - DNA, 15 bp, Homo sapiens
cctttttgtctttgt

SEQ ID NO: 1453438 - DNA, 15 bp, Homo sapiens
tcctttttgtctttg

SEQ ID NO: 1453439 - DNA, 15 bp, Homo sapiens
atcctttttgtcttt

SEQ ID NO: 1453440 - DNA, 15 bp, Homo sapiens
tatcctttttgtctt

SEQ ID NO: 1453441 - DNA, 15 bp, Homo sapiens
atatcctttttgtct

SEQ ID NO: 1453442 - DNA, 15 bp, Homo sapiens
aatatcctttttgtc

SEQ ID NO: 1453443 - DNA, 15 bp, Homo sapiens
gaatatcctttttgt

SEQ ID NO: 1453444 - DNA, 15 bp, Homo sapiens
agaatatcctttttg

SEQ ID NO: 1453445 - DNA, 15 bp, Homo sapiens
tagaatatccttttt

SEQ ID NO: 1453446 - DNA, 15 bp, Homo sapiens
atagaatatcctttt

SEQ ID NO: 1453447 - DNA, 15 bp, Homo sapiens
tatagaatatccttt

SEQ ID NO: 1453448 - DNA, 15 bp, Homo sapiens
ttatagaatatcctt

SEQ ID NO: 1453449 - DNA, 15 bp, Homo sapiens
tttatagaatatcct

SEQ ID NO: 1453450 - DNA, 15 bp, Homo sapiens
ttttatagaatatcc

SEQ ID NO: 1453451 - DNA, 15 bp, Homo sapiens
tttttatagaatatc

SEQ ID NO: 1453452 - DNA, 15 bp, Homo sapiens
ctttttatagaatat

SEQ ID NO: 1453453 - DNA, 15 bp, Homo sapiens
actttttatagaata

SEQ ID NO: 1453454 - DNA, 15 bp, Homo sapiens
tactttttatagaat

SEQ ID NO: 1453455 - DNA, 15 bp, Homo sapiens
ttactttttatagaa

SEQ ID NO: 1453456 - DNA, 15 bp, Homo sapiens
cttactttttataga

SEQ ID NO: 1453457 - DNA, 15 bp, Homo sapiens
ccttactttttatag

SEQ ID NO: 1453458 - DNA, 15 bp, Homo sapiens
tccttactttttata

SEQ ID NO: 1453459 - DNA, 15 bp, Homo sapiens
ctccttactttttat

SEQ ID NO: 1453460 - DNA, 15 bp, Homo sapiens
cctccttacttttta

SEQ ID NO: 1453461 - DNA, 15 bp, Homo sapiens
gcctccttacttttt

SEQ ID NO: 1453462 - DNA, 15 bp, Homo sapiens
tgcctccttactttt

SEQ ID NO: 1453463 - DNA, 15 bp, Homo sapiens
gtgcctccttacttt

SEQ ID NO: 1453464 - DNA, 15 bp, Homo sapiens
agtgcctccttactt

SEQ ID NO: 1453465 - DNA, 15 bp, Homo sapiens
aagtgcctccttact

SEQ ID NO: 1453466 - DNA, 15 bp, Homo sapiens
taagtgcctccttac

SEQ ID NO: 1453467 - DNA, 15 bp, Homo sapiens
ctaagtgcctcctta

SEQ ID NO: 1453468 - DNA, 15 bp, Homo sapiens
cctaagtgcctcctt

SEQ ID NO: 1453469 - DNA, 15 bp, Homo sapiens
ccctaagtgcctcct

SEQ ID NO: 1453470 - DNA, 15 bp, Homo sapiens
tccctaagtgcctcc

SEQ ID NO: 1453471 - DNA, 15 bp, Homo sapiens
ctccctaagtgcctc

SEQ ID NO: 1453472 - DNA, 15 bp, Homo sapiens
cctccctaagtgcct

SEQ ID NO: 1453473 - DNA, 15 bp, Homo sapiens
tcctccctaagtgcc

SEQ ID NO: 1453474 - DNA, 15 bp, Homo sapiens
atcctccctaagtgc

SEQ ID NO: 1453475 - DNA, 15 bp, Homo sapiens
catcctccctaagtg

SEQ ID NO: 1453476 - DNA, 15 bp, Homo sapiens
ccatcctccctaagt

SEQ ID NO: 1453477 - DNA, 15 bp, Homo sapiens
tccatcctccctaag

SEQ ID NO: 1453478 - DNA, 15 bp, Homo sapiens
atccatcctccctaa

SEQ ID NO: 1453479 - DNA, 15 bp, Homo sapiens
tatccatcctcccta

SEQ ID NO: 1453480 - DNA, 15 bp, Homo sapiens
atatccatcctccct

SEQ ID NO: 1453481 - DNA, 15 bp, Homo sapiens
aatatccatcctccc

SEQ ID NO: 1453482 - DNA, 15 bp, Homo sapiens
taatatccatcctcc

SEQ ID NO: 1453483 - DNA, 15 bp, Homo sapiens
ttaatatccatcctc

SEQ ID NO: 1453484 - DNA, 15 bp, Homo sapiens
tttaatatccatcct

SEQ ID NO: 1453485 - DNA, 15 bp, Homo sapiens
ttttaatatccatcc

SEQ ID NO: 1453486 - DNA, 15 bp, Homo sapiens
attttaatatccatc

SEQ ID NO: 1453487 - DNA, 15 bp, Homo sapiens
aattttaatatccat

SEQ ID NO: 1453488 - DNA, 15 bp, Homo sapiens
caattttaatatcca

SEQ ID NO: 1453489 - DNA, 15 bp, Homo sapiens
gcaattttaatatcc

SEQ ID NO: 1453490 - DNA, 15 bp, Homo sapiens
tgcaattttaatatc

SEQ ID NO: 1453491 - DNA, 15 bp, Homo sapiens
ttgcaattttaatat

SEQ ID NO: 1453492 - DNA, 15 bp, Homo sapiens
tttgcaattttaata

SEQ ID NO: 1453493 - DNA, 15 bp, Homo sapiens
ctttgcaattttaat

SEQ ID NO: 1453494 - DNA, 15 bp, Homo sapiens
actttgcaattttaa

SEQ ID NO: 1453495 - DNA, 15 bp, Homo sapiens
cactttgcaatttta

SEQ ID NO: 1453496 - DNA, 15 bp, Homo sapiens
acactttgcaatttt

SEQ ID NO: 1453497 - DNA, 15 bp, Homo sapiens
aacactttgcaattt

SEQ ID NO: 1453498 - DNA, 15 bp, Homo sapiens
taacactttgcaatt

SEQ ID NO: 1453499 - DNA, 15 bp, Homo sapiens
ataacactttgcaat

SEQ ID NO: 1453500 - DNA, 15 bp, Homo sapiens
aataacactttgcaa

SEQ ID NO: 1453501 - DNA, 15 bp, Homo sapiens
taataacactttgca

SEQ ID NO: 1453502 - DNA, 15 bp, Homo sapiens
ttaataacactttgc

SEQ ID NO: 1453503 - DNA, 15 bp, Homo sapiens
attaataacactttg

SEQ ID NO: 1453504 - DNA, 15 bp, Homo sapiens
cattaataacacttt

SEQ ID NO: 1453505 - DNA, 15 bp, Homo sapiens
gcattaataacactt

SEQ ID NO: 1453506 - DNA, 15 bp, Homo sapiens
agcattaataacact

SEQ ID NO: 1453507 - DNA, 15 bp, Homo sapiens
cagcattaataacac

SEQ ID NO: 1453508 - DNA, 15 bp, Homo sapiens
acagcattaataaca

SEQ ID NO: 1453509 - DNA, 15 bp, Homo sapiens
cacagcattaataac

SEQ ID NO: 1453510 - DNA, 15 bp, Homo sapiens
ccacagcattaataa

SEQ ID NO: 1453511 - DNA, 15 bp, Homo sapiens
accacagcattaata

SEQ ID NO: 1453512 - DNA, 15 bp, Homo sapiens
aaccacagcattaat

SEQ ID NO: 1453513 - DNA, 15 bp, Homo sapiens
taaccacagcattaa

SEQ ID NO: 1453514 - DNA, 15 bp, Homo sapiens
ctaaccacagcatta

SEQ ID NO: 1453515 - DNA, 15 bp, Homo sapiens
cctaaccacagcatt

SEQ ID NO: 1453516 - DNA, 15 bp, Homo sapiens
tcctaaccacagcat

SEQ ID NO: 1453517 - DNA, 15 bp, Homo sapiens
ttcctaaccacagca

SEQ ID NO: 1453518 - DNA, 15 bp, Homo sapiens
gttcctaaccacagc

SEQ ID NO: 1453519 - DNA, 15 bp, Homo sapiens
tgttcctaaccacag

SEQ ID NO: 1453520 - DNA, 15 bp, Homo sapiens
ctgttcctaaccaca

SEQ ID NO: 1453521 - DNA, 15 bp, Homo sapiens
gctgttcctaaccac

SEQ ID NO: 1453522 - DNA, 15 bp, Homo sapiens
tgctgttcctaacca

SEQ ID NO: 1453523 - DNA, 15 bp, Homo sapiens
ctgctgttcctaacc

SEQ ID NO: 1453524 - DNA, 15 bp, Homo sapiens
tctgctgttcctaac

SEQ ID NO: 1453525 - DNA, 15 bp, Homo sapiens
atctgctgttcctaa

SEQ ID NO: 1453526 - DNA, 15 bp, Homo sapiens
tatctgctgttccta

SEQ ID NO: 1453527 - DNA, 15 bp, Homo sapiens
ctatctgctgttcct

SEQ ID NO: 1453528 - DNA, 15 bp, Homo sapiens
actatctgctgttcc

SEQ ID NO: 1453529 - DNA, 15 bp, Homo sapiens
cactatctgctgttc

SEQ ID NO: 1453530 - DNA, 15 bp, Homo sapiens
ccactatctgctgtt

SEQ ID NO: 1453531 - DNA, 15 bp, Homo sapiens
accactatctgctgt

SEQ ID NO: 1453532 - DNA, 15 bp, Homo sapiens
caccactatctgctg

SEQ ID NO: 1453533 - DNA, 15 bp, Homo sapiens
ccaccactatctgct

SEQ ID NO: 1453534 - DNA, 15 bp, Homo sapiens
tccaccactatctgc

SEQ ID NO: 1453535 - DNA, 15 bp, Homo sapiens
ttccaccactatctg

SEQ ID NO: 1453536 - DNA, 15 bp, Homo sapiens
tttccaccactatct

SEQ ID NO: 1453537 - DNA, 15 bp, Homo sapiens
atttccaccactatc

SEQ ID NO: 1453538 - DNA, 15 bp, Homo sapiens
tatttccaccactat

SEQ ID NO: 1453539 - DNA, 15 bp, Homo sapiens
ctatttccaccacta

SEQ ID NO: 1453540 - DNA, 15 bp, Homo sapiens
actatttccaccact

SEQ ID NO: 1453541 - DNA, 15 bp, Homo sapiens
cactatttccaccac

SEQ ID NO: 1453542 - DNA, 15 bp, Homo sapiens
ccactatttccacca

SEQ ID NO: 1453543 - DNA, 15 bp, Homo sapiens
tccactatttccacc

SEQ ID NO: 1453544 - DNA, 15 bp, Homo sapiens
ctccactatttccac

SEQ ID NO: 1453545 - DNA, 15 bp, Homo sapiens
tctccactatttcca

SEQ ID NO: 1453546 - DNA, 15 bp, Homo sapiens
atctccactatttcc

SEQ ID NO: 1453547 - DNA, 15 bp, Homo sapiens
gatctccactatttc

SEQ ID NO: 1453548 - DNA, 15 bp, Homo sapiens
agatctccactattt

SEQ ID NO: 1453549 - DNA, 15 bp, Homo sapiens
tagatctccactatt

SEQ ID NO: 1453550 - DNA, 15 bp, Homo sapiens
gtagatctccactat

SEQ ID NO: 1453551 - DNA, 15 bp, Homo sapiens
ggtagatctccacta

SEQ ID NO: 1453552 - DNA, 15 bp, Homo sapiens
aggtagatctccact

SEQ ID NO: 1453553 - DNA, 15 bp, Homo sapiens
taggtagatctccac

SEQ ID NO: 1453554 - DNA, 15 bp, Homo sapiens
ctaggtagatctcca

SEQ ID NO: 1453555 - DNA, 15 bp, Homo sapiens
cctaggtagatctcc

SEQ ID NO: 1453556 - DNA, 15 bp, Homo sapiens
gcctaggtagatctc

SEQ ID NO: 1453557 - DNA, 15 bp, Homo sapiens
tgcctaggtagatct

SEQ ID NO: 1453558 - DNA, 15 bp, Homo sapiens
ttgcctaggtagatc

SEQ ID NO: 1453559 - DNA, 15 bp, Homo sapiens
tttgcctaggtagat

SEQ ID NO: 1453560 - DNA, 15 bp, Homo sapiens
ctttgcctaggtaga

SEQ ID NO: 1453561 - DNA, 15 bp, Homo sapiens
cctttgcctaggtag

SEQ ID NO: 1453562 - DNA, 15 bp, Homo sapiens
gcctttgcctaggta

SEQ ID NO: 1453563 - DNA, 15 bp, Homo sapiens
tgcctttgcctaggt

SEQ ID NO: 1453564 - DNA, 15 bp, Homo sapiens
gtgcctttgcctagg

SEQ ID NO: 1453565 - DNA, 15 bp, Homo sapiens
tgtgcctttgcctag

SEQ ID NO: 1453566 - DNA, 15 bp, Homo sapiens
ttgtgcctttgccta

SEQ ID NO: 1453567 - DNA, 15 bp, Homo sapiens
attgtgcctttgcct

SEQ ID NO: 1453568 - DNA, 15 bp, Homo sapiens
cattgtgcctttgcc

SEQ ID NO: 1453569 - DNA, 15 bp, Homo sapiens
acattgtgcctttgc

SEQ ID NO: 1453570 - DNA, 15 bp, Homo sapiens
tacattgtgcctttg

SEQ ID NO: 1453571 - DNA, 15 bp, Homo sapiens
ctacattgtgccttt

SEQ ID NO: 1453572 - DNA, 15 bp, Homo sapiens
cctacattgtgcctt

SEQ ID NO: 1453573 - DNA, 15 bp, Homo sapiens
tcctacattgtgcct

SEQ ID NO: 1453574 - DNA, 15 bp, Homo sapiens
ttcctacattgtgcc

SEQ ID NO: 1453575 - DNA, 15 bp, Homo sapiens
tttcctacattgtgc

SEQ ID NO: 1453576 - DNA, 15 bp, Homo sapiens
ttttcctacattgtg

SEQ ID NO: 1453577 - DNA, 15 bp, Homo sapiens
cttttcctacattgt

SEQ ID NO: 1453578 - DNA, 15 bp, Homo sapiens
ccttttcctacattg

SEQ ID NO: 1453579 - DNA, 15 bp, Homo sapiens
tccttttcctacatt

SEQ ID NO: 1453580 - DNA, 15 bp, Homo sapiens
atccttttcctacat

SEQ ID NO: 1453581 - DNA, 15 bp, Homo sapiens
catccttttcctaca

SEQ ID NO: 1453582 - DNA, 15 bp, Homo sapiens
tcatccttttcctac

SEQ ID NO: 1453583 - DNA, 15 bp, Homo sapiens
ttcatccttttccta

SEQ ID NO: 1453584 - DNA, 15 bp, Homo sapiens
cttcatccttttcct

SEQ ID NO: 1453585 - DNA, 15 bp, Homo sapiens
ccttcatccttttcc

SEQ ID NO: 1453586 - DNA, 15 bp, Homo sapiens
tccttcatccttttc

SEQ ID NO: 1453587 - DNA, 15 bp, Homo sapiens
ttccttcatcctttt

SEQ ID NO: 1453588 - DNA, 15 bp, Homo sapiens
tttccttcatccttt

SEQ ID NO: 1453589 - DNA, 15 bp, Homo sapiens
ctttccttcatcctt

SEQ ID NO: 1453590 - DNA, 15 bp, Homo sapiens
tctttccttcatcct

SEQ ID NO: 1453591 - DNA, 15 bp, Homo sapiens
ctctttccttcatcc

SEQ ID NO: 1453592 - DNA, 15 bp, Homo sapiens
tctctttccttcatc

SEQ ID NO: 1453593 - DNA, 15 bp, Homo sapiens
ttctctttccttcat

SEQ ID NO: 1453594 - DNA, 15 bp, Homo sapiens
cttctctttccttca

SEQ ID NO: 1453595 - DNA, 15 bp, Homo sapiens
acttctctttccttc

SEQ ID NO: 1453596 - DNA, 15 bp, Homo sapiens
tacttctctttcctt

SEQ ID NO: 1453597 - DNA, 15 bp, Homo sapiens
atacttctctttcct

SEQ ID NO: 1453598 - DNA, 15 bp, Homo sapiens
aatacttctctttcc

SEQ ID NO: 1453599 - DNA, 15 bp, Homo sapiens
aaatacttctctttc

SEQ ID NO: 1453600 - DNA, 15 bp, Homo sapiens
gaaatacttctcttt

SEQ ID NO: 1453601 - DNA, 15 bp, Homo sapiens
tgaaatacttctctt

SEQ ID NO: 1453602 - DNA, 15 bp, Homo sapiens
atgaaatacttctct

SEQ ID NO: 1453603 - DNA, 15 bp, Homo sapiens
tatgaaatacttctc

SEQ ID NO: 1453604 - DNA, 15 bp, Homo sapiens
ttatgaaatacttct

SEQ ID NO: 1453605 - DNA, 15 bp, Homo sapiens
gttatgaaatacttc

SEQ ID NO: 1453606 - DNA, 15 bp, Homo sapiens
cgttatgaaatactt

SEQ ID NO: 1453607 - DNA, 15 bp, Homo sapiens
acgttatgaaatact

SEQ ID NO: 1453608 - DNA, 15 bp, Homo sapiens
cacgttatgaaatac

SEQ ID NO: 1453609 - DNA, 15 bp, Homo sapiens
acacgttatgaaata

SEQ ID NO: 1453610 - DNA, 15 bp, Homo sapiens
cacacgttatgaaat

SEQ ID NO: 1453611 - DNA, 15 bp, Homo sapiens
gcacacgttatgaaa

SEQ ID NO: 1453612 - DNA, 15 bp, Homo sapiens
agcacacgttatgaa

SEQ ID NO: 1453613 - DNA, 15 bp, Homo sapiens
tagcacacgttatga

SEQ ID NO: 1453614 - DNA, 15 bp, Homo sapiens
ttagcacacgttatg

SEQ ID NO: 1453615 - DNA, 15 bp, Homo sapiens
attagcacacgttat

SEQ ID NO: 1453616 - DNA, 15 bp, Homo sapiens
gattagcacacgtta

SEQ ID NO: 1453617 - DNA, 15 bp, Homo sapiens
agattagcacacgtt

SEQ ID NO: 1453618 - DNA, 15 bp, Homo sapiens
aagattagcacacgt

SEQ ID NO: 1453619 - DNA, 15 bp, Homo sapiens
aaagattagcacacg

SEQ ID NO: 1453620 - DNA, 15 bp, Homo sapiens
caaagattagcacac

SEQ ID NO: 1453621 - DNA, 15 bp, Homo sapiens
ccaaagattagcaca

SEQ ID NO: 1453622 - DNA, 15 bp, Homo sapiens
cccaaagattagcac

SEQ ID NO: 1453623 - DNA, 15 bp, Homo sapiens
gcccaaagattagca

SEQ ID NO: 1453624 - DNA, 15 bp, Homo sapiens
tgcccaaagattagc

SEQ ID NO: 1453625 - DNA, 15 bp, Homo sapiens
ctgcccaaagattag

SEQ ID NO: 1453626 - DNA, 15 bp, Homo sapiens
cctgcccaaagatta

SEQ ID NO: 1453627 - DNA, 15 bp, Homo sapiens
acctgcccaaagatt

SEQ ID NO: 1453628 - DNA, 15 bp, Homo sapiens
cacctgcccaaagat

SEQ ID NO: 1453629 - DNA, 15 bp, Homo sapiens
acacctgcccaaaga

SEQ ID NO: 1453630 - DNA, 15 bp, Homo sapiens
cacacctgcccaaag

SEQ ID NO: 1453631 - DNA, 15 bp, Homo sapiens
acacacctgcccaaa

SEQ ID NO: 1453632 - DNA, 15 bp, Homo sapiens
gacacacctgcccaa

SEQ ID NO: 1453633 - DNA, 15 bp, Homo sapiens
agacacacctgccca

SEQ ID NO: 1453634 - DNA, 15 bp, Homo sapiens
aagacacacctgccc

SEQ ID NO: 1453635 - DNA, 15 bp, Homo sapiens
caagacacacctgcc

SEQ ID NO: 1453636 - DNA, 15 bp, Homo sapiens
acaagacacacctgc

SEQ ID NO: 1453637 - DNA, 15 bp, Homo sapiens
tacaagacacacctg

SEQ ID NO: 1453638 - DNA, 15 bp, Homo sapiens
atacaagacacacct

SEQ ID NO: 1453639 - DNA, 15 bp, Homo sapiens
catacaagacacacc

SEQ ID NO: 1453640 - DNA, 15 bp, Homo sapiens
acatacaagacacac

SEQ ID NO: 1453641 - DNA, 15 bp, Homo sapiens
tacatacaagacaca

SEQ ID NO: 1453642 - DNA, 15 bp, Homo sapiens
ttacatacaagacac

SEQ ID NO: 1453643 - DNA, 15 bp, Homo sapiens
tttacatacaagaca

SEQ ID NO: 1453644 - DNA, 15 bp, Homo sapiens
atttacatacaagac

SEQ ID NO: 1453645 - DNA, 15 bp, Homo sapiens
catttacatacaaga

SEQ ID NO: 1453646 - DNA, 15 bp, Homo sapiens
gcatttacatacaag

SEQ ID NO: 1453647 - DNA, 15 bp, Homo sapiens
ggcatttacatacaa

SEQ ID NO: 1453648 - DNA, 15 bp, Homo sapiens
aggcatttacataca

SEQ ID NO: 1453649 - DNA, 15 bp, Homo sapiens
caggcatttacatac

SEQ ID NO: 1453650 - DNA, 15 bp, Homo sapiens
acaggcatttacata

SEQ ID NO: 1453651 - DNA, 15 bp, Homo sapiens
gacaggcatttacat

SEQ ID NO: 1453652 - DNA, 15 bp, Homo sapiens
tgacaggcatttaca

SEQ ID NO: 1453653 - DNA, 15 bp, Homo sapiens
atgacaggcatttac

SEQ ID NO: 1453654 - DNA, 15 bp, Homo sapiens
tatgacaggcattta

SEQ ID NO: 1453655 - DNA, 15 bp, Homo sapiens
ttatgacaggcattt

SEQ ID NO: 1453656 - DNA, 15 bp, Homo sapiens
tttatgacaggcatt

SEQ ID NO: 1453657 - DNA, 15 bp, Homo sapiens
ttttatgacaggcat

SEQ ID NO: 1453658 - DNA, 15 bp, Homo sapiens
cttttatgacaggca

SEQ ID NO: 1453659 - DNA, 15 bp, Homo sapiens
ccttttatgacaggc

SEQ ID NO: 1453660 - DNA, 15 bp, Homo sapiens
gccttttatgacagg

SEQ ID NO: 1453661 - DNA, 15 bp, Homo sapiens
tgccttttatgacag

SEQ ID NO: 1453662 - DNA, 15 bp, Homo sapiens
ttgccttttatgaca

SEQ ID NO: 1453663 - DNA, 15 bp, Homo sapiens
tttgccttttatgac

SEQ ID NO: 1453664 - DNA, 15 bp, Homo sapiens
gtttgccttttatga

SEQ ID NO: 1453665 - DNA, 15 bp, Homo sapiens
tgtttgccttttatg

SEQ ID NO: 1453666 - DNA, 15 bp, Homo sapiens
gtgtttgccttttat

SEQ ID NO: 1453667 - DNA, 15 bp, Homo sapiens
agtgtttgcctttta

SEQ ID NO: 1453668 - DNA, 15 bp, Homo sapiens
cagtgtttgcctttt

SEQ ID NO: 1453669 - DNA, 15 bp, Homo sapiens
tcagtgtttgccttt

SEQ ID NO: 1453670 - DNA, 15 bp, Homo sapiens
ttcagtgtttgcctt

SEQ ID NO: 1453671 - DNA, 15 bp, Homo sapiens
tttcagtgtttgcct

SEQ ID NO: 1453672 - DNA, 15 bp, Homo sapiens
ttttcagtgtttgcc

SEQ ID NO: 1453673 - DNA, 15 bp, Homo sapiens
tttttcagtgtttgc

SEQ ID NO: 1453674 - DNA, 15 bp, Homo sapiens
ttttttcagtgtttg

SEQ ID NO: 1453675 - DNA, 15 bp, Homo sapiens
cttttttcagtgttt

SEQ ID NO: 1453676 - DNA, 15 bp, Homo sapiens
tcttttttcagtgtt

SEQ ID NO: 1453677 - DNA, 15 bp, Homo sapiens
ttcttttttcagtgt

SEQ ID NO: 1453678 - DNA, 15 bp, Homo sapiens
attcttttttcagtg

SEQ ID NO: 1453679 - DNA, 15 bp, Homo sapiens
cattcttttttcagt

SEQ ID NO: 1453680 - DNA, 15 bp, Homo sapiens
tcattcttttttcag

SEQ ID NO: 1453681 - DNA, 15 bp, Homo sapiens
ttcattcttttttca

SEQ ID NO: 1453682 - DNA, 15 bp, Homo sapiens
tttcattcttttttc

SEQ ID NO: 1453683 - DNA, 15 bp, Homo sapiens
ttttcattctttttt

SEQ ID NO: 1453684 - DNA, 15 bp, Homo sapiens
tttttcattcttttt

SEQ ID NO: 1453685 - DNA, 15 bp, Homo sapiens
ttttttcattctttt

SEQ ID NO: 1453686 - DNA, 15 bp, Homo sapiens
cttttttcattcttt

SEQ ID NO: 1453687 - DNA, 15 bp, Homo sapiens
acttttttcattctt

SEQ ID NO: 1453688 - DNA, 15 bp, Homo sapiens
tacttttttcattct

SEQ ID NO: 1453689 - DNA, 15 bp, Homo sapiens
ttacttttttcattc

SEQ ID NO: 1453690 - DNA, 15 bp, Homo sapiens
tttacttttttcatt

SEQ ID NO: 1453691 - DNA, 15 bp, Homo sapiens
atttacttttttcat

SEQ ID NO: 1453692 - DNA, 15 bp, Homo sapiens
gatttacttttttca

SEQ ID NO: 1453693 - DNA, 15 bp, Homo sapiens
agatttacttttttc

SEQ ID NO: 1453694 - DNA, 15 bp, Homo sapiens
aagatttactttttt

SEQ ID NO: 1453695 - DNA, 15 bp, Homo sapiens
taagatttacttttt

SEQ ID NO: 1453696 - DNA, 15 bp, Homo sapiens
ataagatttactttt

SEQ ID NO: 1453697 - DNA, 15 bp, Homo sapiens
tataagatttacttt

SEQ ID NO: 1453698 - DNA, 15 bp, Homo sapiens
ttataagatttactt

SEQ ID NO: 1453699 - DNA, 15 bp, Homo sapiens
gttataagatttact

SEQ ID NO: 1453700 - DNA, 15 bp, Homo sapiens
agttataagatttac

SEQ ID NO: 1453701 - DNA, 15 bp, Homo sapiens
gagttataagattta

SEQ ID NO: 1453702 - DNA, 15 bp, Homo sapiens
tgagttataagattt

SEQ ID NO: 1453703 - DNA, 15 bp, Homo sapiens
ctgagttataagatt

SEQ ID NO: 1453704 - DNA, 15 bp, Homo sapiens
tctgagttataagat

SEQ ID NO: 1453705 - DNA, 15 bp, Homo sapiens
atctgagttataaga

SEQ ID NO: 1453706 - DNA, 15 bp, Homo sapiens
aatctgagttataag

SEQ ID NO: 1453707 - DNA, 15 bp, Homo sapiens
caatctgagttataa

SEQ ID NO: 1453708 - DNA, 15 bp, Homo sapiens
acaatctgagttata

SEQ ID NO: 1453709 - DNA, 15 bp, Homo sapiens
tacaatctgagttat

SEQ ID NO: 1453710 - DNA, 15 bp, Homo sapiens
ctacaatctgagtta

SEQ ID NO: 1453711 - DNA, 15 bp, Homo sapiens
tctacaatctgagtt

SEQ ID NO: 1453712 - DNA, 15 bp, Homo sapiens
atctacaatctgagt

SEQ ID NO: 1453713 - DNA, 15 bp, Homo sapiens
gatctacaatctgag

SEQ ID NO: 1453714 - DNA, 15 bp, Homo sapiens
agatctacaatctga

SEQ ID NO: 1453715 - DNA, 15 bp, Homo sapiens
cagatctacaatctg

SEQ ID NO: 1453716 - DNA, 15 bp, Homo sapiens
tcagatctacaatct

SEQ ID NO: 1453717 - DNA, 15 bp, Homo sapiens
ctcagatctacaatc

SEQ ID NO: 1453718 - DNA, 15 bp, Homo sapiens
actcagatctacaat

SEQ ID NO: 1453719 - DNA, 15 bp, Homo sapiens
aactcagatctacaa

SEQ ID NO: 1453720 - DNA, 15 bp, Homo sapiens
taactcagatctaca

SEQ ID NO: 1453721 - DNA, 15 bp, Homo sapiens
ataactcagatctac

SEQ ID NO: 1453722 - DNA, 15 bp, Homo sapiens
tataactcagatcta

SEQ ID NO: 1453723 - DNA, 15 bp, Homo sapiens
ttataactcagatct

SEQ ID NO: 1453724 - DNA, 15 bp, Homo sapiens
tttataactcagatc

SEQ ID NO: 1453725 - DNA, 15 bp, Homo sapiens
ttttataactcagat

SEQ ID NO: 1453726 - DNA, 15 bp, Homo sapiens
attttataactcaga

SEQ ID NO: 1453727 - DNA, 15 bp, Homo sapiens
tattttataactcag

SEQ ID NO: 1453728 - DNA, 15 bp, Homo sapiens
ctattttataactca

SEQ ID NO: 1453729 - DNA, 15 bp, Homo sapiens
tctattttataactc

SEQ ID NO: 1453730 - DNA, 15 bp, Homo sapiens
ttctattttataact

SEQ ID NO: 1453731 - DNA, 15 bp, Homo sapiens
attctattttataac

SEQ ID NO: 1453732 - DNA, 15 bp, Homo sapiens
aattctattttataa

SEQ ID NO: 1453733 - DNA, 15 bp, Homo sapiens
taattctattttata

SEQ ID NO: 1453734 - DNA, 15 bp, Homo sapiens
ttaattctattttat

SEQ ID NO: 1453735 - DNA, 15 bp, Homo sapiens
attaattctatttta

SEQ ID NO: 1453736 - DNA, 15 bp, Homo sapiens
tattaattctatttt

SEQ ID NO: 1453737 - DNA, 15 bp, Homo sapiens
ctattaattctattt

SEQ ID NO: 1453738 - DNA, 15 bp, Homo sapiens
tctattaattctatt

SEQ ID NO: 1453739 - DNA, 15 bp, Homo sapiens
ttctattaattctat

SEQ ID NO: 1453740 - DNA, 15 bp, Homo sapiens
tttctattaattcta

SEQ ID NO: 1453741 - DNA, 15 bp, Homo sapiens
ttttctattaattct

SEQ ID NO: 1453742 - DNA, 15 bp, Homo sapiens
gttttctattaattc

SEQ ID NO: 1453743 - DNA, 15 bp, Homo sapiens
tgttttctattaatt

SEQ ID NO: 1453744 - DNA, 15 bp, Homo sapiens
ctgttttctattaat

SEQ ID NO: 1453745 - DNA, 15 bp, Homo sapiens
actgttttctattaa

SEQ ID NO: 1453746 - DNA, 15 bp, Homo sapiens
aactgttttctatta

SEQ ID NO: 1453747 - DNA, 15 bp, Homo sapiens
aaactgttttctatt

SEQ ID NO: 1453748 - DNA, 15 bp, Homo sapiens
taaactgttttctat

SEQ ID NO: 1453749 - DNA, 15 bp, Homo sapiens
ataaactgttttcta

SEQ ID NO: 1453750 - DNA, 15 bp, Homo sapiens
aataaactgttttct

SEQ ID NO: 1453751 - DNA, 15 bp, Homo sapiens
gaataaactgttttc

SEQ ID NO: 1453752 - DNA, 15 bp, Homo sapiens
ggaataaactgtttt

SEQ ID NO: 1453753 - DNA, 15 bp, Homo sapiens
gggaataaactgttt

SEQ ID NO: 1453754 - DNA, 15 bp, Homo sapiens
agggaataaactgtt

SEQ ID NO: 1453755 - DNA, 15 bp, Homo sapiens
tagggaataaactgt

SEQ ID NO: 1453756 - DNA, 15 bp, Homo sapiens
ctagggaataaactg

SEQ ID NO: 1453757 - DNA, 15 bp, Homo sapiens
cctagggaataaact

SEQ ID NO: 1453758 - DNA, 15 bp, Homo sapiens
acctagggaataaac

SEQ ID NO: 1453759 - DNA, 15 bp, Homo sapiens
aacctagggaataaa

SEQ ID NO: 1453760 - DNA, 15 bp, Homo sapiens
taacctagggaataa

SEQ ID NO: 1453761 - DNA, 15 bp, Homo sapiens
ataacctagggaata

SEQ ID NO: 1453762 - DNA, 15 bp, Homo sapiens
aataacctagggaat

SEQ ID NO: 1453763 - DNA, 15 bp, Homo sapiens
aaataacctagggaa

SEQ ID NO: 1453764 - DNA, 15 bp, Homo sapiens
aaaataacctaggga

SEQ ID NO: 1453765 - DNA, 15 bp, Homo sapiens
aaaaataacctaggg

SEQ ID NO: 1453766 - DNA, 15 bp, Homo sapiens
taaaaataacctagg

SEQ ID NO: 1453767 - DNA, 15 bp, Homo sapiens
ttaaaaataacctag

SEQ ID NO: 1453768 - DNA, 15 bp, Homo sapiens
tttaaaaataaccta

SEQ ID NO: 1453769 - DNA, 15 bp, Homo sapiens
atttaaaaataacct

SEQ ID NO: 1453770 - DNA, 15 bp, Homo sapiens
tatttaaaaataacc

SEQ ID NO: 1453771 - DNA, 15 bp, Homo sapiens
gtatttaaaaataac

SEQ ID NO: 1453772 - DNA, 15 bp, Homo sapiens
agtatttaaaaataa

SEQ ID NO: 1453773 - DNA, 15 bp, Homo sapiens
aagtatttaaaaata

SEQ ID NO: 1453774 - DNA, 15 bp, Homo sapiens
gaagtatttaaaaat

SEQ ID NO: 1453775 - DNA, 15 bp, Homo sapiens
agaagtatttaaaaa

SEQ ID NO: 1453776 - DNA, 15 bp, Homo sapiens
cagaagtatttaaaa

SEQ ID NO: 1453777 - DNA, 15 bp, Homo sapiens
acagaagtatttaaa

SEQ ID NO: 1453778 - DNA, 15 bp, Homo sapiens
aacagaagtatttaa

SEQ ID NO: 1453779 - DNA, 15 bp, Homo sapiens
caacagaagtattta

SEQ ID NO: 1453780 - DNA, 15 bp, Homo sapiens
tcaacagaagtattt

SEQ ID NO: 1453781 - DNA, 15 bp, Homo sapiens
atcaacagaagtatt

SEQ ID NO: 1453782 - DNA, 15 bp, Homo sapiens
catcaacagaagtat

SEQ ID NO: 1453783 - DNA, 15 bp, Homo sapiens
tcatcaacagaagta

SEQ ID NO: 1453784 - DNA, 15 bp, Homo sapiens
atcatcaacagaagt

SEQ ID NO: 1453785 - DNA, 15 bp, Homo sapiens
aatcatcaacagaag

SEQ ID NO: 1453786 - DNA, 15 bp, Homo sapiens
aaatcatcaacagaa

SEQ ID NO: 1453787 - DNA, 15 bp, Homo sapiens
taaatcatcaacaga

SEQ ID NO: 1453788 - DNA, 15 bp, Homo sapiens
ttaaatcatcaacag

SEQ ID NO: 1453789 - DNA, 15 bp, Homo sapiens
attaaatcatcaaca

SEQ ID NO: 1453790 - DNA, 15 bp, Homo sapiens
aattaaatcatcaac

SEQ ID NO: 1453791 - DNA, 15 bp, Homo sapiens
gaattaaatcatcaa

SEQ ID NO: 1453792 - DNA, 15 bp, Homo sapiens
agaattaaatcatca

SEQ ID NO: 1453793 - DNA, 15 bp, Homo sapiens
ttcagaattaaatca

SEQ ID NO: 1453794 - DNA, 15 bp, Homo sapiens
attcagaattaaatc

SEQ ID NO: 1453795 - DNA, 15 bp, Homo sapiens
cattcagaattaaat

SEQ ID NO: 1453796 - DNA, 15 bp, Homo sapiens
tcattcagaattaaa

SEQ ID NO: 1453797 - DNA, 15 bp, Homo sapiens
gtcattcagaattaa

SEQ ID NO: 1453798 - DNA, 15 bp, Homo sapiens
agtcattcagaatta

SEQ ID NO: 1453799 - DNA, 15 bp, Homo sapiens
tagtcattcagaatt

SEQ ID NO: 1453800 - DNA, 15 bp, Homo sapiens
ttagtcattcagaat

SEQ ID NO: 1453801 - DNA, 15 bp, Homo sapiens
gttagtcattcagaa

SEQ ID NO: 1453802 - DNA, 15 bp, Homo sapiens
agttagtcattcaga

SEQ ID NO: 1453803 - DNA, 15 bp, Homo sapiens
cagttagtcattcag

SEQ ID NO: 1453804 - DNA, 15 bp, Homo sapiens
ccagttagtcattca

SEQ ID NO: 1453805 - DNA, 15 bp, Homo sapiens
cccagttagtcattc

SEQ ID NO: 1453806 - DNA, 15 bp, Homo sapiens
tcccagttagtcatt

SEQ ID NO: 1453807 - DNA, 15 bp, Homo sapiens
ttcccagttagtcat

SEQ ID NO: 1453808 - DNA, 15 bp, Homo sapiens
tttcccagttagtca

SEQ ID NO: 1453809 - DNA, 15 bp, Homo sapiens
ctttcccagttagtc

SEQ ID NO: 1453810 - DNA, 15 bp, Homo sapiens
cctttcccagttagt

SEQ ID NO: 1453811 - DNA, 15 bp, Homo sapiens
ccctttcccagttag

SEQ ID NO: 1453812 - DNA, 15 bp, Homo sapiens
cccctttcccagtta

SEQ ID NO: 1453813 - DNA, 15 bp, Homo sapiens
tcccctttcccagtt

SEQ ID NO: 1453814 - DNA, 15 bp, Homo sapiens
atcccctttcccagt

SEQ ID NO: 1453815 - DNA, 15 bp, Homo sapiens
tatcccctttcccag

SEQ ID NO: 1453816 - DNA, 15 bp, Homo sapiens
ctatcccctttccca

SEQ ID NO: 1453817 - DNA, 15 bp, Homo sapiens
tctatcccctttccc

SEQ ID NO: 1453818 - DNA, 15 bp, Homo sapiens
ttctatcccctttcc

SEQ ID NO: 1453819 - DNA, 15 bp, Homo sapiens
tttctatcccctttc

SEQ ID NO: 1453820 - DNA, 15 bp, Homo sapiens
ttttctatccccttt

SEQ ID NO: 1453821 - DNA, 15 bp, Homo sapiens
gttttctatcccctt

SEQ ID NO: 1453822 - DNA, 15 bp, Homo sapiens
agttttctatcccct

SEQ ID NO: 1453823 - DNA, 15 bp, Homo sapiens
aagttttctatcccc

SEQ ID NO: 1453824 - DNA, 15 bp, Homo sapiens
caagttttctatccc

SEQ ID NO: 1453825 - DNA, 15 bp, Homo sapiens
acaagttttctatcc

SEQ ID NO: 1453826 - DNA, 15 bp, Homo sapiens
cacaagttttctatc

SEQ ID NO: 1453827 - DNA, 15 bp, Homo sapiens
gcacaagttttctat

SEQ ID NO: 1453828 - DNA, 15 bp, Homo sapiens
agcacaagttttcta

SEQ ID NO: 1453829 - DNA, 15 bp, Homo sapiens
tagcacaagttttct

SEQ ID NO: 1453830 - DNA, 15 bp, Homo sapiens
ctagcacaagttttc

SEQ ID NO: 1453831 - DNA, 15 bp, Homo sapiens
actagcacaagtttt

SEQ ID NO: 1453832 - DNA, 15 bp, Homo sapiens
tactagcacaagttt

SEQ ID NO: 1453833 - DNA, 15 bp, Homo sapiens
ttactagcacaagtt

SEQ ID NO: 1453834 - DNA, 15 bp, Homo sapiens
cttactagcacaagt

SEQ ID NO: 1453835 - DNA, 15 bp, Homo sapiens
ccttactagcacaag

SEQ ID NO: 1453836 - DNA, 15 bp, Homo sapiens
tccttactagcacaa

SEQ ID NO: 1453837 - DNA, 15 bp, Homo sapiens
ttccttactagcaca

SEQ ID NO: 1453838 - DNA, 15 bp, Homo sapiens
gttccttactagcac

SEQ ID NO: 1453839 - DNA, 15 bp, Homo sapiens
agttccttactagca

SEQ ID NO: 1453840 - DNA, 15 bp, Homo sapiens
cagttccttactagc

SEQ ID NO: 1453841 - DNA, 15 bp, Homo sapiens
tcagttccttactag

SEQ ID NO: 1453842 - DNA, 15 bp, Homo sapiens
atcagttccttacta

SEQ ID NO: 1453843 - DNA, 15 bp, Homo sapiens
aatcagttccttact

SEQ ID NO: 1453844 - DNA, 15 bp, Homo sapiens
taatcagttccttac

SEQ ID NO: 1453845 - DNA, 15 bp, Homo sapiens
gtaatcagttcctta

SEQ ID NO: 1453846 - DNA, 15 bp, Homo sapiens
tgtaatcagttcctt

SEQ ID NO: 1453847 - DNA, 15 bp, Homo sapiens
ctgtaatcagttcct

SEQ ID NO: 1453848 - DNA, 15 bp, Homo sapiens
actgtaatcagttcc

SEQ ID NO: 1453849 - DNA, 15 bp, Homo sapiens
tactgtaatcagttc

SEQ ID NO: 1453850 - DNA, 15 bp, Homo sapiens
atactgtaatcagtt

SEQ ID NO: 1453851 - DNA, 15 bp, Homo sapiens
tatactgtaatcagt

SEQ ID NO: 1453852 - DNA, 15 bp, Homo sapiens
ctatactgtaatcag

SEQ ID NO: 1453853 - DNA, 15 bp, Homo sapiens
cctatactgtaatca

SEQ ID NO: 1453854 - DNA, 15 bp, Homo sapiens
tcctatactgtaatc

SEQ ID NO: 1453855 - DNA, 15 bp, Homo sapiens
ctcctatactgtaat

SEQ ID NO: 1453856 - DNA, 15 bp, Homo sapiens
tctcctatactgtaa

SEQ ID NO: 1453857 - DNA, 15 bp, Homo sapiens
ctctcctatactgta

SEQ ID NO: 1453858 - DNA, 15 bp, Homo sapiens
gctctcctatactgt

SEQ ID NO: 1453859 - DNA, 15 bp, Homo sapiens
cgctctcctatactg

SEQ ID NO: 1453860 - DNA, 15 bp, Homo sapiens
ccgctctcctatact

SEQ ID NO: 1453861 - DNA, 15 bp, Homo sapiens
accgctctcctatac

SEQ ID NO: 1453862 - DNA, 15 bp, Homo sapiens
aaccgctctcctata

SEQ ID NO: 1453863 - DNA, 15 bp, Homo sapiens
aaaccgctctcctat

SEQ ID NO: 1453864 - DNA, 15 bp, Homo sapiens
taaaccgctctccta

SEQ ID NO: 1453865 - DNA, 15 bp, Homo sapiens
ataaaccgctctcct

SEQ ID NO: 1453866 - DNA, 15 bp, Homo sapiens
cataaaccgctctcc

SEQ ID NO: 1453867 - DNA, 15 bp, Homo sapiens
ccataaaccgctctc

SEQ ID NO: 1453868 - DNA, 15 bp, Homo sapiens
accataaaccgctct

SEQ ID NO: 1453869 - DNA, 15 bp, Homo sapiens
taccataaaccgctc

SEQ ID NO: 1453870 - DNA, 15 bp, Homo sapiens
gtaccataaaccgct

SEQ ID NO: 1453871 - DNA, 15 bp, Homo sapiens
agtaccataaaccgc

SEQ ID NO: 1453872 - DNA, 15 bp, Homo sapiens
cagtaccataaaccg

SEQ ID NO: 1453873 - DNA, 15 bp, Homo sapiens
acagtaccataaacc

SEQ ID NO: 1453874 - DNA, 15 bp, Homo sapiens
cacagtaccataaac

SEQ ID NO: 1453875 - DNA, 15 bp, Homo sapiens
ccacagtaccataaa

SEQ ID NO: 1453876 - DNA, 15 bp, Homo sapiens
gccacagtaccataa

SEQ ID NO: 1453877 - DNA, 15 bp, Homo sapiens
agccacagtaccata

SEQ ID NO: 1453878 - DNA, 15 bp, Homo sapiens
cagccacagtaccat

SEQ ID NO: 1453879 - DNA, 15 bp, Homo sapiens
acagccacagtacca

SEQ ID NO: 1453880 - DNA, 15 bp, Homo sapiens
gacagccacagtacc

SEQ ID NO: 1453881 - DNA, 15 bp, Homo sapiens
agacagccacagtac

SEQ ID NO: 1453882 - DNA, 15 bp, Homo sapiens
cagacagccacagta

SEQ ID NO: 1453883 - DNA, 15 bp, Homo sapiens
tcagacagccacagt

SEQ ID NO: 1453884 - DNA, 15 bp, Homo sapiens
ttcagacagccacag

SEQ ID NO: 1453885 - DNA, 15 bp, Homo sapiens
attcagacagccaca

SEQ ID NO: 1453886 - DNA, 15 bp, Homo sapiens
tattcagacagccac

SEQ ID NO: 1453887 - DNA, 15 bp, Homo sapiens
ctattcagacagcca

SEQ ID NO: 1453888 - DNA, 15 bp, Homo sapiens
actattcagacagcc

SEQ ID NO: 1453889 - DNA, 15 bp, Homo sapiens
cactattcagacagc

SEQ ID NO: 1453890 - DNA, 15 bp, Homo sapiens
ccactattcagacag

SEQ ID NO: 1453891 - DNA, 15 bp, Homo sapiens
gccactattcagaca

SEQ ID NO: 1453892 - DNA, 15 bp, Homo sapiens
ggccactattcagac

SEQ ID NO: 1453893 - DNA, 15 bp, Homo sapiens
gggccactattcaga

SEQ ID NO: 1453894 - DNA, 15 bp, Homo sapiens
ggggccactattcag

SEQ ID NO: 1453895 - DNA, 15 bp, Homo sapiens
gggggccactattca

SEQ ID NO: 1453896 - DNA, 15 bp, Homo sapiens
tgggggccactattc

SEQ ID NO: 1453897 - DNA, 15 bp, Homo sapiens
ttgggggccactatt

SEQ ID NO: 1453898 - DNA, 15 bp, Homo sapiens
tttgggggccactat

SEQ ID NO: 1453899 - DNA, 15 bp, Homo sapiens
ctttgggggccacta

SEQ ID NO: 1453900 - DNA, 15 bp, Homo sapiens
tctttgggggccact

SEQ ID NO: 1453901 - DNA, 15 bp, Homo sapiens
atctttgggggccac

SEQ ID NO: 1453902 - DNA, 15 bp, Homo sapiens
catctttgggggcca

SEQ ID NO: 1453903 - DNA, 15 bp, Homo sapiens
acatctttgggggcc

SEQ ID NO: 1453904 - DNA, 15 bp, Homo sapiens
gacatctttgggggc

SEQ ID NO: 1453905 - DNA, 15 bp, Homo sapiens
ggacatctttggggg

SEQ ID NO: 1453906 - DNA, 15 bp, Homo sapiens
tggacatctttgggg

SEQ ID NO: 1453907 - DNA, 15 bp, Homo sapiens
gtggacatctttggg

SEQ ID NO: 1453908 - DNA, 15 bp, Homo sapiens
tgtggacatctttgg

SEQ ID NO: 1453909 - DNA, 15 bp, Homo sapiens
gtgtggacatctttg

SEQ ID NO: 1453910 - DNA, 15 bp, Homo sapiens
ggtgtggacatcttt

SEQ ID NO: 1453911 - DNA, 15 bp, Homo sapiens
tggtgtggacatctt

SEQ ID NO: 1453912 - DNA, 15 bp, Homo sapiens
atggtgtggacatct

SEQ ID NO: 1453913 - DNA, 15 bp, Homo sapiens
tatggtgtggacatc

SEQ ID NO: 1453914 - DNA, 15 bp, Homo sapiens
ttatggtgtggacat

SEQ ID NO: 1453915 - DNA, 15 bp, Homo sapiens
attatggtgtggaca

SEQ ID NO: 1453916 - DNA, 15 bp, Homo sapiens
gattatggtgtggac

SEQ ID NO: 1453917 - DNA, 15 bp, Homo sapiens
ggattatggtgtgga

SEQ ID NO: 1453918 - DNA, 15 bp, Homo sapiens
gggattatggtgtgg

SEQ ID NO: 1453919 - DNA, 15 bp, Homo sapiens
cgggattatggtgtg

SEQ ID NO: 1453920 - DNA, 15 bp, Homo sapiens
tcgggattatggtgt

SEQ ID NO: 1453921 - DNA, 15 bp, Homo sapiens
atcgggattatggtg

SEQ ID NO: 1453922 - DNA, 15 bp, Homo sapiens
catcgggattatggt

SEQ ID NO: 1453923 - DNA, 15 bp, Homo sapiens
ccatcgggattatgg

SEQ ID NO: 1453924 - DNA, 15 bp, Homo sapiens
tccatcgggattatg

SEQ ID NO: 1453925 - DNA, 15 bp, Homo sapiens
atccatcgggattat

SEQ ID NO: 1453926 - DNA, 15 bp, Homo sapiens
aatccatcgggatta

SEQ ID NO: 1453927 - DNA, 15 bp, Homo sapiens
aaatccatcgggatt

SEQ ID NO: 1453928 - DNA, 15 bp, Homo sapiens
taaatccatcgggat

SEQ ID NO: 1453929 - DNA, 15 bp, Homo sapiens
ataaatccatcggga

SEQ ID NO: 1453930 - DNA, 15 bp, Homo sapiens
cataaatccatcggg

SEQ ID NO: 1453931 - DNA, 15 bp, Homo sapiens
acataaatccatcgg

SEQ ID NO: 1453932 - DNA, 15 bp, Homo sapiens
aacataaatccatcg

SEQ ID NO: 1453933 - DNA, 15 bp, Homo sapiens
taacataaatccatc

SEQ ID NO: 1453934 - DNA, 15 bp, Homo sapiens
ataacataaatccat

SEQ ID NO: 1453935 - DNA, 15 bp, Homo sapiens
aataacataaatcca

SEQ ID NO: 1453936 - DNA, 15 bp, Homo sapiens
aaataacataaatcc

SEQ ID NO: 1453937 - DNA, 15 bp, Homo sapiens
aaaataacataaatc

SEQ ID NO: 1453938 - DNA, 15 bp, Homo sapiens
taaaataacataaat

SEQ ID NO: 1453939 - DNA, 15 bp, Homo sapiens
gtaaaataacataaa

SEQ ID NO: 1453940 - DNA, 15 bp, Homo sapiens
agtaaaataacataa

SEQ ID NO: 1453941 - DNA, 15 bp, Homo sapiens
aagtaaaataacata

SEQ ID NO: 1453942 - DNA, 15 bp, Homo sapiens
aaagtaaaataacat

SEQ ID NO: 1453943 - DNA, 15 bp, Homo sapiens
caaagtaaaataaca

SEQ ID NO: 1453944 - DNA, 15 bp, Homo sapiens
gcaaagtaaaataac

SEQ ID NO: 1453945 - DNA, 15 bp, Homo sapiens
gactttcaattcatt

SEQ ID NO: 1453946 - DNA, 15 bp, Homo sapiens
ggactttcaattcat

SEQ ID NO: 1453947 - DNA, 15 bp, Homo sapiens
aggactttcaattca

SEQ ID NO: 1453948 - DNA, 15 bp, Homo sapiens
gaggactttcaattc

SEQ ID NO: 1453949 - DNA, 15 bp, Homo sapiens
ggaggactttcaatt

SEQ ID NO: 1453950 - DNA, 15 bp, Homo sapiens
aggaggactttcaat

SEQ ID NO: 1453951 - DNA, 15 bp, Homo sapiens
gaggaggactttcaa

SEQ ID NO: 1453952 - DNA, 15 bp, Homo sapiens
agaggaggactttca

SEQ ID NO: 1453953 - DNA, 15 bp, Homo sapiens
gagaggaggactttc

SEQ ID NO: 1453954 - DNA, 15 bp, Homo sapiens
agagaggaggacttt

SEQ ID NO: 1453955 - DNA, 15 bp, Homo sapiens
cagagaggaggactt

SEQ ID NO: 1453956 - DNA, 15 bp, Homo sapiens
ccagagaggaggact

SEQ ID NO: 1453957 - DNA, 15 bp, Homo sapiens
accagagaggaggac

SEQ ID NO: 1453958 - DNA, 15 bp, Homo sapiens
caccagagaggagga

SEQ ID NO: 1453959 - DNA, 15 bp, Homo sapiens
acaccagagaggagg

SEQ ID NO: 1453960 - DNA, 15 bp, Homo sapiens
cacaccagagaggag

SEQ ID NO: 1453961 - DNA, 15 bp, Homo sapiens
ccacaccagagagga

SEQ ID NO: 1453962 - DNA, 15 bp, Homo sapiens
tccacaccagagagg

SEQ ID NO: 1453963 - DNA, 15 bp, Homo sapiens
ctccacaccagagag

SEQ ID NO: 1453964 - DNA, 15 bp, Homo sapiens
tctccacaccagaga

SEQ ID NO: 1453965 - DNA, 15 bp, Homo sapiens
atctccacaccagag

SEQ ID NO: 1453966 - DNA, 15 bp, Homo sapiens
tatctccacaccaga

SEQ ID NO: 1453967 - DNA, 15 bp, Homo sapiens
ttatctccacaccag

SEQ ID NO: 1453968 - DNA, 15 bp, Homo sapiens
gttatctccacacca

SEQ ID NO: 1453969 - DNA, 15 bp, Homo sapiens
cgttatctccacacc

SEQ ID NO: 1453970 - DNA, 15 bp, Homo sapiens
acgttatctccacac

SEQ ID NO: 1453971 - DNA, 15 bp, Homo sapiens
aacgttatctccaca

SEQ ID NO: 1453972 - DNA, 15 bp, Homo sapiens
caacgttatctccac

SEQ ID NO: 1453973 - DNA, 15 bp, Homo sapiens
tcaacgttatctcca

SEQ ID NO: 1453974 - DNA, 15 bp, Homo sapiens
ttcaacgttatctcc

SEQ ID NO: 1453975 - DNA, 15 bp, Homo sapiens
gttcaacgttatctc

SEQ ID NO: 1453976 - DNA, 15 bp, Homo sapiens
agttcaacgttatct

SEQ ID NO: 1453977 - DNA, 15 bp, Homo sapiens
cagttcaacgttatc

SEQ ID NO: 1453978 - DNA, 15 bp, Homo sapiens
tcagttcaacgttat

SEQ ID NO: 1453979 - DNA, 15 bp, Homo sapiens
atcagttcaacgtta

SEQ ID NO: 1453980 - DNA, 15 bp, Homo sapiens
gatcagttcaacgtt

SEQ ID NO: 1453981 - DNA, 15 bp, Homo sapiens
ggatcagttcaacgt

SEQ ID NO: 1453982 - DNA, 15 bp, Homo sapiens
tggatcagttcaacg

SEQ ID NO: 1453983 - DNA, 15 bp, Homo sapiens
ctggatcagttcaac

SEQ ID NO: 1453984 - DNA, 15 bp, Homo sapiens
cctggatcagttcaa

SEQ ID NO: 1453985 - DNA, 15 bp, Homo sapiens
acctggatcagttca

SEQ ID NO: 1453986 - DNA, 15 bp, Homo sapiens
aacctggatcagttc

SEQ ID NO: 1453987 - DNA, 15 bp, Homo sapiens
gaacctggatcagtt

SEQ ID NO: 1453988 - DNA, 15 bp, Homo sapiens
ggaacctggatcagt

SEQ ID NO: 1453989 - DNA, 15 bp, Homo sapiens
aggaacctggatcag

SEQ ID NO: 1453990 - DNA, 15 bp, Homo sapiens
caggaacctggatca

SEQ ID NO: 1453991 - DNA, 15 bp, Homo sapiens
tcaggaacctggatc

SEQ ID NO: 1453992 - DNA, 15 bp, Homo sapiens
ctcaggaacctggat

SEQ ID NO: 1453993 - DNA, 15 bp, Homo sapiens
gctcaggaacctgga

SEQ ID NO: 1453994 - DNA, 15 bp, Homo sapiens
tgctcaggaacctgg

SEQ ID NO: 1453995 - DNA, 15 bp, Homo sapiens
ctgctcaggaacctg

SEQ ID NO: 1453996 - DNA, 15 bp, Homo sapiens
gctgctcaggaacct

SEQ ID NO: 1453997 - DNA, 15 bp, Homo sapiens
agctgctcaggaacc

SEQ ID NO: 1453998 - DNA, 15 bp, Homo sapiens
gagctgctcaggaac

SEQ ID NO: 1453999 - DNA, 15 bp, Homo sapiens
tgagctgctcaggaa

SEQ ID NO: 1454000 - DNA, 15 bp, Homo sapiens
ttgagctgctcagga

SEQ ID NO: 1454001 - DNA, 15 bp, Homo sapiens
cttgagctgctcagg

SEQ ID NO: 1454002 - DNA, 15 bp, Homo sapiens
ccttgagctgctcag

SEQ ID NO: 1454003 - DNA, 15 bp, Homo sapiens
tccttgagctgctca

SEQ ID NO: 1454004 - DNA, 15 bp, Homo sapiens
ctccttgagctgctc

SEQ ID NO: 1454005 - DNA, 15 bp, Homo sapiens
cctccttgagctgct

SEQ ID NO: 1454006 - DNA, 15 bp, Homo sapiens
acctccttgagctgc

SEQ ID NO: 1454007 - DNA, 15 bp, Homo sapiens
gacctccttgagctg

SEQ ID NO: 1454008 - DNA, 15 bp, Homo sapiens
cgacctccttgagct

SEQ ID NO: 1454009 - DNA, 15 bp, Homo sapiens
tcgacctccttgagc

SEQ ID NO: 1454010 - DNA, 15 bp, Homo sapiens
atcgacctccttgag

SEQ ID NO: 1454011 - DNA, 15 bp, Homo sapiens
catcgacctccttga

SEQ ID NO: 1454012 - DNA, 15 bp, Homo sapiens
ccatcgacctccttg

SEQ ID NO: 1454013 - DNA, 15 bp, Homo sapiens
tccatcgacctcctt

SEQ ID NO: 1454014 - DNA, 15 bp, Homo sapiens
ttccatcgacctcct

SEQ ID NO: 1454015 - DNA, 15 bp, Homo sapiens
cttccatcgacctcc

SEQ ID NO: 1454016 - DNA, 15 bp, Homo sapiens
tcttccatcgacctc

SEQ ID NO: 1454017 - DNA, 15 bp, Homo sapiens
ctcttccatcgacct

SEQ ID NO: 1454018 - DNA, 15 bp, Homo sapiens
cctcttccatcgacc

SEQ ID NO: 1454019 - DNA, 15 bp, Homo sapiens
tcctcttccatcgac

SEQ ID NO: 1454020 - DNA, 15 bp, Homo sapiens
ttcctcttccatcga

SEQ ID NO: 1454021 - DNA, 15 bp, Homo sapiens
tttcctcttccatcg

SEQ ID NO: 1454022 - DNA, 15 bp, Homo sapiens
ttttcctcttccatc

SEQ ID NO: 1454023 - DNA, 15 bp, Homo sapiens
cttttcctcttccat

SEQ ID NO: 1454024 - DNA, 15 bp, Homo sapiens
ccttttcctcttcca

SEQ ID NO: 1454025 - DNA, 15 bp, Homo sapiens
tccttttcctcttcc

SEQ ID NO: 1454026 - DNA, 15 bp, Homo sapiens
atccttttcctcttc

SEQ ID NO: 1454027 - DNA, 15 bp, Homo sapiens
aatccttttcctctt

SEQ ID NO: 1454028 - DNA, 15 bp, Homo sapiens
aaatccttttcctct

SEQ ID NO: 1454029 - DNA, 15 bp, Homo sapiens
taaatccttttcctc

SEQ ID NO: 1454030 - DNA, 15 bp, Homo sapiens
ttaaatccttttcct

SEQ ID NO: 1454031 - DNA, 15 bp, Homo sapiens
attaaatccttttcc

SEQ ID NO: 1454032 - DNA, 15 bp, Homo sapiens
cattaaatccttttc

SEQ ID NO: 1454033 - DNA, 15 bp, Homo sapiens
acattaaatcctttt

SEQ ID NO: 1454034 - DNA, 15 bp, Homo sapiens
tacattaaatccttt

SEQ ID NO: 1454035 - DNA, 15 bp, Homo sapiens
ttacattaaatcctt

SEQ ID NO: 1454036 - DNA, 15 bp, Homo sapiens
tttacattaaatcct

SEQ ID NO: 1454037 - DNA, 15 bp, Homo sapiens
atttacattaaatcc

SEQ ID NO: 1454038 - DNA, 15 bp, Homo sapiens
aatttacattaaatc

SEQ ID NO: 1454039 - DNA, 15 bp, Homo sapiens
aaatttacattaaat

SEQ ID NO: 1454040 - DNA, 15 bp, Homo sapiens
taaatttacattaaa

SEQ ID NO: 1454041 - DNA, 15 bp, Homo sapiens
ttaaatttacattaa

SEQ ID NO: 1454042 - DNA, 15 bp, Homo sapiens
attaaatttacatta

SEQ ID NO: 1454043 - DNA, 15 bp, Homo sapiens
cattaaatttacatt

SEQ ID NO: 1454044 - DNA, 15 bp, Homo sapiens
gcattaaatttacat

SEQ ID NO: 1454045 - DNA, 15 bp, Homo sapiens
tgcattaaatttaca

SEQ ID NO: 1454046 - DNA, 15 bp, Homo sapiens
ctgcattaaatttac

SEQ ID NO: 1454047 - DNA, 15 bp, Homo sapiens
actgcattaaattta

SEQ ID NO: 1454048 - DNA, 15 bp, Homo sapiens
aactgcattaaattt

SEQ ID NO: 1454049 - DNA, 15 bp, Homo sapiens
aaactgcattaaatt

SEQ ID NO: 1454050 - DNA, 15 bp, Homo sapiens
gaaactgcattaaat

SEQ ID NO: 1454051 - DNA, 15 bp, Homo sapiens
agaaactgcattaaa

SEQ ID NO: 1454052 - DNA, 15 bp, Homo sapiens
aagaaactgcattaa

SEQ ID NO: 1454053 - DNA, 15 bp, Homo sapiens
taagaaactgcatta

SEQ ID NO: 1454054 - DNA, 15 bp, Homo sapiens
ctaagaaactgcatt

SEQ ID NO: 1454055 - DNA, 15 bp, Homo sapiens
tctaagaaactgcat

SEQ ID NO: 1454056 - DNA, 15 bp, Homo sapiens
atctaagaaactgca

SEQ ID NO: 1454057 - DNA, 15 bp, Homo sapiens
gatctaagaaactgc

SEQ ID NO: 1454058 - DNA, 15 bp, Homo sapiens
agatctaagaaactg

SEQ ID NO: 1454059 - DNA, 15 bp, Homo sapiens
cagatctaagaaact

SEQ ID NO: 1454060 - DNA, 15 bp, Homo sapiens
tcagatctaagaaac

SEQ ID NO: 1454061 - DNA, 15 bp, Homo sapiens
atcagatctaagaaa

SEQ ID NO: 1454062 - DNA, 15 bp, Homo sapiens
gatcagatctaagaa

SEQ ID NO: 1454063 - DNA, 15 bp, Homo sapiens
agatcagatctaaga

SEQ ID NO: 1454064 - DNA, 15 bp, Homo sapiens
aagatcagatctaag

SEQ ID NO: 1454065 - DNA, 15 bp, Homo sapiens
taagatcagatctaa

SEQ ID NO: 1454066 - DNA, 15 bp, Homo sapiens
ctaagatcagatcta

SEQ ID NO: 1454067 - DNA, 15 bp, Homo sapiens
tctaagatcagatct

SEQ ID NO: 1454068 - DNA, 15 bp, Homo sapiens
ctctaagatcagatc

SEQ ID NO: 1454069 - DNA, 15 bp, Homo sapiens
tctctaagatcagat

SEQ ID NO: 1454070 - DNA, 15 bp, Homo sapiens
ttctctaagatcaga

SEQ ID NO: 1454071 - DNA, 15 bp, Homo sapiens
attctctaagatcag

SEQ ID NO: 1454072 - DNA, 15 bp, Homo sapiens
tattctctaagatca

SEQ ID NO: 1454073 - DNA, 15 bp, Homo sapiens
atattctctaagatc

SEQ ID NO: 1454074 - DNA, 15 bp, Homo sapiens
gatattctctaagat

SEQ ID NO: 1454075 - DNA, 15 bp, Homo sapiens
agatattctctaaga

SEQ ID NO: 1454076 - DNA, 15 bp, Homo sapiens
tagatattctctaag

SEQ ID NO: 1454077 - DNA, 15 bp, Homo sapiens
ttagatattctctaa

SEQ ID NO: 1454078 - DNA, 15 bp, Homo sapiens
gttagatattctcta

SEQ ID NO: 1454079 - DNA, 15 bp, Homo sapiens
agttagatattctct

SEQ ID NO: 1454080 - DNA, 15 bp, Homo sapiens
tagttagatattctc

SEQ ID NO: 1454081 - DNA, 15 bp, Homo sapiens
ctagttagatattct

SEQ ID NO: 1454082 - DNA, 15 bp, Homo sapiens
cctagttagatattc

SEQ ID NO: 1454083 - DNA, 15 bp, Homo sapiens
acctagttagatatt

SEQ ID NO: 1454084 - DNA, 15 bp, Homo sapiens
aacctagttagatat

SEQ ID NO: 1454085 - DNA, 15 bp, Homo sapiens
caacctagttagata

SEQ ID NO: 1454086 - DNA, 15 bp, Homo sapiens
tcaacctagttagat

SEQ ID NO: 1454087 - DNA, 15 bp, Homo sapiens
ttcaacctagttaga

SEQ ID NO: 1454088 - DNA, 15 bp, Homo sapiens
tttcaacctagttag

SEQ ID NO: 1454089 - DNA, 15 bp, Homo sapiens
ttttcaacctagtta

SEQ ID NO: 1454090 - DNA, 15 bp, Homo sapiens
attttcaacctagtt

SEQ ID NO: 1454091 - DNA, 15 bp, Homo sapiens
aattttcaacctagt

SEQ ID NO: 1454092 - DNA, 15 bp, Homo sapiens
gaattttcaacctag

SEQ ID NO: 1454093 - DNA, 15 bp, Homo sapiens
agaattttcaaccta

SEQ ID NO: 1454094 - DNA, 15 bp, Homo sapiens
gagaattttcaacct

SEQ ID NO: 1454095 - DNA, 15 bp, Homo sapiens
agagaattttcaacc

SEQ ID NO: 1454096 - DNA, 15 bp, Homo sapiens
aagagaattttcaac

SEQ ID NO: 1454097 - DNA, 15 bp, Homo sapiens
aaagagaattttcaa

SEQ ID NO: 1454098 - DNA, 15 bp, Homo sapiens
gaaagagaattttca

SEQ ID NO: 1454099 - DNA, 15 bp, Homo sapiens
agaaagagaattttc

SEQ ID NO: 1454100 - DNA, 15 bp, Homo sapiens
cagaaagagaatttt

SEQ ID NO: 1454101 - DNA, 15 bp, Homo sapiens
acagaaagagaattt

SEQ ID NO: 1454102 - DNA, 15 bp, Homo sapiens
aacagaaagagaatt

SEQ ID NO: 1454103 - DNA, 15 bp, Homo sapiens
caacagaaagagaat

SEQ ID NO: 1454104 - DNA, 15 bp, Homo sapiens
acaacagaaagagaa

SEQ ID NO: 1454105 - DNA, 15 bp, Homo sapiens
tacaacagaaagaga

SEQ ID NO: 1454106 - DNA, 15 bp, Homo sapiens
atacaacagaaagag

SEQ ID NO: 1454107 - DNA, 15 bp, Homo sapiens
aatacaacagaaaga

SEQ ID NO: 1454108 - DNA, 15 bp, Homo sapiens
aaatacaacagaaag

SEQ ID NO: 1454109 - DNA, 15 bp, Homo sapiens
aaaatacaacagaaa

SEQ ID NO: 1454110 - DNA, 15 bp, Homo sapiens
gaaaatacaacagaa

SEQ ID NO: 1454111 - DNA, 15 bp, Homo sapiens
tgaaaatacaacaga

SEQ ID NO: 1454112 - DNA, 15 bp, Homo sapiens
ttgaaaatacaacag

SEQ ID NO: 1454113 - DNA, 15 bp, Homo sapiens
attgaaaatacaaca

SEQ ID NO: 1454114 - DNA, 15 bp, Homo sapiens
cattgaaaatacaac

SEQ ID NO: 1454115 - DNA, 15 bp, Homo sapiens
ccattgaaaatacaa

SEQ ID NO: 1454116 - DNA, 15 bp, Homo sapiens
tccattgaaaataca

SEQ ID NO: 1454117 - DNA, 15 bp, Homo sapiens
ttccattgaaaatac

SEQ ID NO: 1454118 - DNA, 15 bp, Homo sapiens
cttccattgaaaata

SEQ ID NO: 1454119 - DNA, 15 bp, Homo sapiens
tcttccattgaaaat

SEQ ID NO: 1454120 - DNA, 15 bp, Homo sapiens
ctcttccattgaaaa

SEQ ID NO: 1454121 - DNA, 15 bp, Homo sapiens
gctcttccattgaaa

SEQ ID NO: 1454122 - DNA, 15 bp, Homo sapiens
tgctcttccattgaa

SEQ ID NO: 1454123 - DNA, 15 bp, Homo sapiens
ttgctcttccattga

SEQ ID NO: 1454124 - DNA, 15 bp, Homo sapiens
gttgctcttccattg

SEQ ID NO: 1454125 - DNA, 15 bp, Homo sapiens
tgttgctcttccatt

SEQ ID NO: 1454126 - DNA, 15 bp, Homo sapiens
ttgttgctcttccat

SEQ ID NO: 1454127 - DNA, 15 bp, Homo sapiens
tttgttgctcttcca

SEQ ID NO: 1454128 - DNA, 15 bp, Homo sapiens
ctttgttgctcttcc

SEQ ID NO: 1454129 - DNA, 15 bp, Homo sapiens
cctttgttgctcttc

SEQ ID NO: 1454130 - DNA, 15 bp, Homo sapiens
tcctttgttgctctt

SEQ ID NO: 1454131 - DNA, 15 bp, Homo sapiens
atcctttgttgctct

SEQ ID NO: 1454132 - DNA, 15 bp, Homo sapiens
aatcctttgttgctc

SEQ ID NO: 1454133 - DNA, 15 bp, Homo sapiens
aaatcctttgttgct

SEQ ID NO: 1454134 - DNA, 15 bp, Homo sapiens
gaaatcctttgttgc

SEQ ID NO: 1454135 - DNA, 15 bp, Homo sapiens
agaaatcctttgttg

SEQ ID NO: 1454136 - DNA, 15 bp, Homo sapiens
tagaaatcctttgtt

SEQ ID NO: 1454137 - DNA, 15 bp, Homo sapiens
ttagaaatcctttgt

SEQ ID NO: 1454138 - DNA, 15 bp, Homo sapiens
attagaaatcctttg

SEQ ID NO: 1454139 - DNA, 15 bp, Homo sapiens
aattagaaatccttt

SEQ ID NO: 1454140 - DNA, 15 bp, Homo sapiens
taattagaaatcctt

SEQ ID NO: 1454141 - DNA, 15 bp, Homo sapiens
ttaattagaaatcct

SEQ ID NO: 1454142 - DNA, 15 bp, Homo sapiens
attaattagaaatcc

SEQ ID NO: 1454143 - DNA, 15 bp, Homo sapiens
tattaattagaaatc

SEQ ID NO: 1454144 - DNA, 15 bp, Homo sapiens
ttattaattagaaat

SEQ ID NO: 1454145 - DNA, 15 bp, Homo sapiens
tttattaattagaaa

SEQ ID NO: 1454146 - DNA, 15 bp, Homo sapiens
ctttattaattagaa

SEQ ID NO: 1454147 - DNA, 15 bp, Homo sapiens
gctttattaattaga

SEQ ID NO: 1454148 - DNA, 15 bp, Homo sapiens
ggctttattaattag

SEQ ID NO: 1454149 - DNA, 15 bp, Homo sapiens
aggctttattaatta

SEQ ID NO: 1454150 - DNA, 15 bp, Homo sapiens
aaggctttattaatt

SEQ ID NO: 1454151 - DNA, 15 bp, Homo sapiens
aaaggctttattaat

SEQ ID NO: 1454152 - DNA, 15 bp, Homo sapiens
aaaaggctttattaa

SEQ ID NO: 1454153 - DNA, 15 bp, Homo sapiens
aaaaaggctttatta

SEQ ID NO: 1454154 - DNA, 15 bp, Homo sapiens
caaaaaggctttatt

SEQ ID NO: 1454155 - DNA, 15 bp, Homo sapiens
acaaaaaggctttat

SEQ ID NO: 1454156 - DNA, 15 bp, Homo sapiens
cacaaaaaggcttta

SEQ ID NO: 1454157 - DNA, 15 bp, Homo sapiens
gcacaaaaaggcttt

SEQ ID NO: 1454158 - DNA, 15 bp, Homo sapiens
ggcacaaaaaggctt

SEQ ID NO: 1454159 - DNA, 15 bp, Homo sapiens
tggcacaaaaaggct

SEQ ID NO: 1454160 - DNA, 15 bp, Homo sapiens
ttggcacaaaaaggc

SEQ ID NO: 1454161 - DNA, 15 bp, Homo sapiens
cttggcacaaaaagg

SEQ ID NO: 1454162 - DNA, 15 bp, Homo sapiens
gcttggcacaaaaag

SEQ ID NO: 1454163 - DNA, 15 bp, Homo sapiens
agcttggcacaaaaa

SEQ ID NO: 1454164 - DNA, 15 bp, Homo sapiens
cagcttggcacaaaa

SEQ ID NO: 1454165 - DNA, 15 bp, Homo sapiens
tcagcttggcacaaa

SEQ ID NO: 1454166 - DNA, 15 bp, Homo sapiens
gtcagcttggcacaa

SEQ ID NO: 1454167 - DNA, 15 bp, Homo sapiens
agtcagcttggcaca

SEQ ID NO: 1454168 - DNA, 15 bp, Homo sapiens
aagtcagcttggcac

SEQ ID NO: 1454169 - DNA, 15 bp, Homo sapiens
aaagtcagcttggca

SEQ ID NO: 1454170 - DNA, 15 bp, Homo sapiens
taaagtcagcttggc

SEQ ID NO: 1454171 - DNA, 15 bp, Homo sapiens
ctaaagtcagcttgg

SEQ ID NO: 1454172 - DNA, 15 bp, Homo sapiens
tctaaagtcagcttg

SEQ ID NO: 1454173 - DNA, 15 bp, Homo sapiens
ttctaaagtcagctt

SEQ ID NO: 1454174 - DNA, 15 bp, Homo sapiens
attctaaagtcagct

SEQ ID NO: 1454175 - DNA, 15 bp, Homo sapiens
tattctaaagtcagc

SEQ ID NO: 1454176 - DNA, 15 bp, Homo sapiens
ttattctaaagtcag

SEQ ID NO: 1454177 - DNA, 15 bp, Homo sapiens
tttattctaaagtca

SEQ ID NO: 1454178 - DNA, 15 bp, Homo sapiens
ttttattctaaagtc

SEQ ID NO: 1454179 - DNA, 15 bp, Homo sapiens
attttattctaaagt

SEQ ID NO: 1454180 - DNA, 15 bp, Homo sapiens
aattttattctaaag

SEQ ID NO: 1454181 - DNA, 15 bp, Homo sapiens
gaattttattctaaa

SEQ ID NO: 1454182 - DNA, 15 bp, Homo sapiens
tgaattttattctaa

SEQ ID NO: 1454183 - DNA, 15 bp, Homo sapiens
atgaattttattcta

SEQ ID NO: 1454184 - DNA, 15 bp, Homo sapiens
aatgaattttattct

SEQ ID NO: 1454185 - DNA, 15 bp, Homo sapiens
gaatgaattttattc

SEQ ID NO: 1454186 - DNA, 15 bp, Homo sapiens
cgaatgaattttatt

SEQ ID NO: 1454187 - DNA, 15 bp, Homo sapiens
acgaatgaattttat

SEQ ID NO: 1454188 - DNA, 15 bp, Homo sapiens
aacgaatgaatttta

SEQ ID NO: 1454189 - DNA, 15 bp, Homo sapiens
caacgaatgaatttt

SEQ ID NO: 1454190 - DNA, 15 bp, Homo sapiens
tcaacgaatgaattt

SEQ ID NO: 1454191 - DNA, 15 bp, Homo sapiens
atcaacgaatgaatt

SEQ ID NO: 1454192 - DNA, 15 bp, Homo sapiens
aatcaacgaatgaat

SEQ ID NO: 1454193 - DNA, 15 bp, Homo sapiens
aaatcaacgaatgaa

SEQ ID NO: 1454194 - DNA, 15 bp, Homo sapiens
caaatcaacgaatga

SEQ ID NO: 1454195 - DNA, 15 bp, Homo sapiens
gcaaatcaacgaatg

SEQ ID NO: 1454196 - DNA, 15 bp, Homo sapiens
ggcaaatcaacgaat

SEQ ID NO: 1454197 - DNA, 15 bp, Homo sapiens
aggcaaatcaacgaa

SEQ ID NO: 1454198 - DNA, 15 bp, Homo sapiens
aaggcaaatcaacga

SEQ ID NO: 1454199 - DNA, 15 bp, Homo sapiens
aaaggcaaatcaacg

SEQ ID NO: 1454200 - DNA, 15 bp, Homo sapiens
aaaaggcaaatcaac

SEQ ID NO: 1454201 - DNA, 15 bp, Homo sapiens
aaaaaggcaaatcaa

SEQ ID NO: 1454202 - DNA, 15 bp, Homo sapiens
taaaaaggcaaatca

SEQ ID NO: 1454203 - DNA, 15 bp, Homo sapiens
ttaaaaaggcaaatc

SEQ ID NO: 1454204 - DNA, 15 bp, Homo sapiens
tttaaaaaggcaaat

SEQ ID NO: 1454205 - DNA, 15 bp, Homo sapiens
tcttttttaaaaagg

SEQ ID NO: 1454206 - DNA, 15 bp, Homo sapiens
gtcttttttaaaaag

SEQ ID NO: 1454207 - DNA, 15 bp, Homo sapiens
tgtcttttttaaaaa

SEQ ID NO: 1454208 - DNA, 15 bp, Homo sapiens
ctgtcttttttaaaa

SEQ ID NO: 1454209 - DNA, 15 bp, Homo sapiens
tctgtcttttttaaa

SEQ ID NO: 1454210 - DNA, 15 bp, Homo sapiens
ttctgtcttttttaa

SEQ ID NO: 1454211 - DNA, 15 bp, Homo sapiens
tttctgtctttttta

SEQ ID NO: 1454212 - DNA, 15 bp, Homo sapiens
ctttctgtctttttt

SEQ ID NO: 1454213 - DNA, 15 bp, Homo sapiens
actttctgtcttttt

SEQ ID NO: 1454214 - DNA, 15 bp, Homo sapiens
gactttctgtctttt

SEQ ID NO: 1454215 - DNA, 15 bp, Homo sapiens
tgactttctgtcttt

SEQ ID NO: 1454216 - DNA, 15 bp, Homo sapiens
atgactttctgtctt

SEQ ID NO: 1454217 - DNA, 15 bp, Homo sapiens
tatgactttctgtct

SEQ ID NO: 1454218 - DNA, 15 bp, Homo sapiens
ttatgactttctgtc

SEQ ID NO: 1454219 - DNA, 15 bp, Homo sapiens
cttatgactttctgt

SEQ ID NO: 1454220 - DNA, 15 bp, Homo sapiens
gcttatgactttctg

SEQ ID NO: 1454221 - DNA, 15 bp, Homo sapiens
tgcttatgactttct

SEQ ID NO: 1454222 - DNA, 15 bp, Homo sapiens
atgcttatgactttc

SEQ ID NO: 1454223 - DNA, 15 bp, Homo sapiens
gatgcttatgacttt

SEQ ID NO: 1454224 - DNA, 15 bp, Homo sapiens
ggatgcttatgactt

SEQ ID NO: 1454225 - DNA, 15 bp, Homo sapiens
aggatgcttatgact

SEQ ID NO: 1454226 - DNA, 15 bp, Homo sapiens
aaggatgcttatgac

SEQ ID NO: 1454227 - DNA, 15 bp, Homo sapiens
gaaggatgcttatga

SEQ ID NO: 1454228 - DNA, 15 bp, Homo sapiens
agaaggatgcttatg

SEQ ID NO: 1454229 - DNA, 15 bp, Homo sapiens
cagaaggatgcttat

SEQ ID NO: 1454230 - DNA, 15 bp, Homo sapiens
ccagaaggatgctta

SEQ ID NO: 1454231 - DNA, 15 bp, Homo sapiens
accagaaggatgctt

SEQ ID NO: 1454232 - DNA, 15 bp, Homo sapiens
aaccagaaggatgct

SEQ ID NO: 1454233 - DNA, 15 bp, Homo sapiens
aaaccagaaggatgc

SEQ ID NO: 1454234 - DNA, 15 bp, Homo sapiens
caaaccagaaggatg

SEQ ID NO: 1454235 - DNA, 15 bp, Homo sapiens
gcaaaccagaaggat

SEQ ID NO: 1454236 - DNA, 15 bp, Homo sapiens
tgcaaaccagaagga

SEQ ID NO: 1454237 - DNA, 15 bp, Homo sapiens
ctgcaaaccagaagg

SEQ ID NO: 1454238 - DNA, 15 bp, Homo sapiens
cctgcaaaccagaag

SEQ ID NO: 1454239 - DNA, 15 bp, Homo sapiens
acctgcaaaccagaa

SEQ ID NO: 1454240 - DNA, 15 bp, Homo sapiens
gacctgcaaaccaga

SEQ ID NO: 1454241 - DNA, 15 bp, Homo sapiens
agacctgcaaaccag

SEQ ID NO: 1454242 - DNA, 15 bp, Homo sapiens
aagacctgcaaacca

SEQ ID NO: 1454243 - DNA, 15 bp, Homo sapiens
caagacctgcaaacc

SEQ ID NO: 1454244 - DNA, 15 bp, Homo sapiens
tcaagacctgcaaac

SEQ ID NO: 1454245 - DNA, 15 bp, Homo sapiens
atcaagacctgcaaa

SEQ ID NO: 1454246 - DNA, 15 bp, Homo sapiens
catcaagacctgcaa

SEQ ID NO: 1454247 - DNA, 15 bp, Homo sapiens
tcatcaagacctgca

SEQ ID NO: 1454248 - DNA, 15 bp, Homo sapiens
atcatcaagacctgc

SEQ ID NO: 1454249 - DNA, 15 bp, Homo sapiens
aatcatcaagacctg

SEQ ID NO: 1454250 - DNA, 15 bp, Homo sapiens
taatcatcaagacct

SEQ ID NO: 1454251 - DNA, 15 bp, Homo sapiens
gtaatcatcaagacc

SEQ ID NO: 1454252 - DNA, 15 bp, Homo sapiens
ggtaatcatcaagac

SEQ ID NO: 1454253 - DNA, 15 bp, Homo sapiens
gggtaatcatcaaga

SEQ ID NO: 1454254 - DNA, 15 bp, Homo sapiens
ggggtaatcatcaag

SEQ ID NO: 1454255 - DNA, 15 bp, Homo sapiens
aggggtaatcatcaa

SEQ ID NO: 1454256 - DNA, 15 bp, Homo sapiens
gaggggtaatcatca

SEQ ID NO: 1454257 - DNA, 15 bp, Homo sapiens
agaggggtaatcatc

SEQ ID NO: 1454258 - DNA, 15 bp, Homo sapiens
aagaggggtaatcat

SEQ ID NO: 1454259 - DNA, 15 bp, Homo sapiens
aaagaggggtaatca

SEQ ID NO: 1454260 - DNA, 15 bp, Homo sapiens
taaagaggggtaatc

SEQ ID NO: 1454261 - DNA, 15 bp, Homo sapiens
ataaagaggggtaat

SEQ ID NO: 1454262 - DNA, 15 bp, Homo sapiens
aataaagaggggtaa

SEQ ID NO: 1454263 - DNA, 15 bp, Homo sapiens
aaataaagaggggta

SEQ ID NO: 1454264 - DNA, 15 bp, Homo sapiens
gaaataaagaggggt

SEQ ID NO: 1454265 - DNA, 15 bp, Homo sapiens
agaaataaagagggg

SEQ ID NO: 1454266 - DNA, 15 bp, Homo sapiens
cagaaataaagaggg

SEQ ID NO: 1454267 - DNA, 15 bp, Homo sapiens
tcagaaataaagagg

SEQ ID NO: 1454268 - DNA, 15 bp, Homo sapiens
ctcagaaataaagag

SEQ ID NO: 1454269 - DNA, 15 bp, Homo sapiens
tctcagaaataaaga

SEQ ID NO: 1454270 - DNA, 15 bp, Homo sapiens
ttctcagaaataaag

SEQ ID NO: 1454271 - DNA, 15 bp, Homo sapiens
gttctcagaaataaa

SEQ ID NO: 1454272 - DNA, 15 bp, Homo sapiens
agttctcagaaataa

SEQ ID NO: 1454273 - DNA, 15 bp, Homo sapiens
tgagttctcagaaat

SEQ ID NO: 1454274 - DNA, 15 bp, Homo sapiens
ctgagttctcagaaa

SEQ ID NO: 1454275 - DNA, 15 bp, Homo sapiens
cctgagttctcagaa

SEQ ID NO: 1454276 - DNA, 15 bp, Homo sapiens
tcctgagttctcaga

SEQ ID NO: 1454277 - DNA, 15 bp, Homo sapiens
ttcctgagttctcag

SEQ ID NO: 1454278 - DNA, 15 bp, Homo sapiens
cttcctgagttctca

SEQ ID NO: 1454279 - DNA, 15 bp, Homo sapiens
gcttcctgagttctc

SEQ ID NO: 1454280 - DNA, 15 bp, Homo sapiens
tgcttcctgagttct

SEQ ID NO: 1454281 - DNA, 15 bp, Homo sapiens
atgcttcctgagttc

SEQ ID NO: 1454282 - DNA, 15 bp, Homo sapiens
gatgcttcctgagtt

SEQ ID NO: 1454283 - DNA, 15 bp, Homo sapiens
agatgcttcctgagt

SEQ ID NO: 1454284 - DNA, 15 bp, Homo sapiens
gagatgcttcctgag

SEQ ID NO: 1454285 - DNA, 15 bp, Homo sapiens
ggagatgcttcctga

SEQ ID NO: 1454286 - DNA, 15 bp, Homo sapiens
cggagatgcttcctg

SEQ ID NO: 1454287 - DNA, 15 bp, Homo sapiens
ccggagatgcttcct

SEQ ID NO: 1454288 - DNA, 15 bp, Homo sapiens
gccggagatgcttcc

SEQ ID NO: 1454289 - DNA, 15 bp, Homo sapiens
tgccggagatgcttc

SEQ ID NO: 1454290 - DNA, 15 bp, Homo sapiens
ctgccggagatgctt

SEQ ID NO: 1454291 - DNA, 15 bp, Homo sapiens
cctgccggagatgct

SEQ ID NO: 1454292 - DNA, 15 bp, Homo sapiens
ccctgccggagatgc

SEQ ID NO: 1454293 - DNA, 15 bp, Homo sapiens
cccctgccggagatg

SEQ ID NO: 1454294 - DNA, 15 bp, Homo sapiens
acccctgccggagat

SEQ ID NO: 1454295 - DNA, 15 bp, Homo sapiens
aacccctgccggaga

SEQ ID NO: 1454296 - DNA, 15 bp, Homo sapiens
taacccctgccggag

SEQ ID NO: 1454297 - DNA, 15 bp, Homo sapiens
ataacccctgccgga

SEQ ID NO: 1454298 - DNA, 15 bp, Homo sapiens
gataacccctgccgg

SEQ ID NO: 1454299 - DNA, 15 bp, Homo sapiens
ggataacccctgccg

SEQ ID NO: 1454300 - DNA, 15 bp, Homo sapiens
aggataacccctgcc

SEQ ID NO: 1454301 - DNA, 15 bp, Homo sapiens
aaggataacccctgc

SEQ ID NO: 1454302 - DNA, 15 bp, Homo sapiens
taaggataacccctg

SEQ ID NO: 1454303 - DNA, 15 bp, Homo sapiens
ttaaggataacccct

SEQ ID NO: 1454304 - DNA, 15 bp, Homo sapiens
attaaggataacccc

SEQ ID NO: 1454305 - DNA, 15 bp, Homo sapiens
tattaaggataaccc

SEQ ID NO: 1454306 - DNA, 15 bp, Homo sapiens
ctattaaggataacc

SEQ ID NO: 1454307 - DNA, 15 bp, Homo sapiens
cctattaaggataac

SEQ ID NO: 1454308 - DNA, 15 bp, Homo sapiens
gcctattaaggataa

SEQ ID NO: 1454309 - DNA, 15 bp, Homo sapiens
ggcctattaaggata

SEQ ID NO: 1454310 - DNA, 15 bp, Homo sapiens
gggcctattaaggat

SEQ ID NO: 1454311 - DNA, 15 bp, Homo sapiens
ggggcctattaagga

SEQ ID NO: 1454312 - DNA, 15 bp, Homo sapiens
gggggcctattaagg

SEQ ID NO: 1454313 - DNA, 15 bp, Homo sapiens
cgggggcctattaag

SEQ ID NO: 1454314 - DNA, 15 bp, Homo sapiens
tcgggggcctattaa

SEQ ID NO: 1454315 - DNA, 15 bp, Homo sapiens
atcgggggcctatta

SEQ ID NO: 1454316 - DNA, 15 bp, Homo sapiens
gatcgggggcctatt

SEQ ID NO: 1454317 - DNA, 15 bp, Homo sapiens
agatcgggggcctat

SEQ ID NO: 1454318 - DNA, 15 bp, Homo sapiens
gagatcgggggccta

SEQ ID NO: 1454319 - DNA, 15 bp, Homo sapiens
tgagatcgggggcct

SEQ ID NO: 1454320 - DNA, 15 bp, Homo sapiens
ctgagatcgggggcc

SEQ ID NO: 1454321 - DNA, 15 bp, Homo sapiens
cctgagatcgggggc

SEQ ID NO: 1454322 - DNA, 15 bp, Homo sapiens
ccctgagatcggggg

SEQ ID NO: 1454323 - DNA, 15 bp, Homo sapiens
accctgagatcgggg

SEQ ID NO: 1454324 - DNA, 15 bp, Homo sapiens
aaccctgagatcggg

SEQ ID NO: 1454325 - DNA, 15 bp, Homo sapiens
aaaccctgagatcgg

SEQ ID NO: 1454326 - DNA, 15 bp, Homo sapiens
aaaaccctgagatcg

SEQ ID NO: 1454327 - DNA, 15 bp, Homo sapiens
taaaaccctgagatc

SEQ ID NO: 1454328 - DNA, 15 bp, Homo sapiens
ttaaaaccctgagat

SEQ ID NO: 1454329 - DNA, 15 bp, Homo sapiens
cttaaaaccctgaga

SEQ ID NO: 1454330 - DNA, 15 bp, Homo sapiens
tcttaaaaccctgag

SEQ ID NO: 1454331 - DNA, 15 bp, Homo sapiens
ttcttaaaaccctga

SEQ ID NO: 1454332 - DNA, 15 bp, Homo sapiens
attcttaaaaccctg

SEQ ID NO: 1454333 - DNA, 15 bp, Homo sapiens
gattcttaaaaccct

SEQ ID NO: 1454334 - DNA, 15 bp, Homo sapiens
tgattcttaaaaccc

SEQ ID NO: 1454335 - DNA, 15 bp, Homo sapiens
gtgattcttaaaacc

SEQ ID NO: 1454336 - DNA, 15 bp, Homo sapiens
tgtgattcttaaaac

SEQ ID NO: 1454337 - DNA, 15 bp, Homo sapiens
atgtgattcttaaaa

SEQ ID NO: 1454338 - DNA, 15 bp, Homo sapiens
aatgtgattcttaaa

SEQ ID NO: 1454339 - DNA, 15 bp, Homo sapiens
caatgtgattcttaa

SEQ ID NO: 1454340 - DNA, 15 bp, Homo sapiens
ccaatgtgattctta

SEQ ID NO: 1454341 - DNA, 15 bp, Homo sapiens
cccaatgtgattctt

SEQ ID NO: 1454342 - DNA, 15 bp, Homo sapiens
tcccaatgtgattct

SEQ ID NO: 1454343 - DNA, 15 bp, Homo sapiens
ttcccaatgtgattc

SEQ ID NO: 1454344 - DNA, 15 bp, Homo sapiens
tttcccaatgtgatt

SEQ ID NO: 1454345 - DNA, 15 bp, Homo sapiens
ttttcccaatgtgat

SEQ ID NO: 1454346 - DNA, 15 bp, Homo sapiens
gttttcccaatgtga

SEQ ID NO: 1454347 - DNA, 15 bp, Homo sapiens
ggttttcccaatgtg

SEQ ID NO: 1454348 - DNA, 15 bp, Homo sapiens
cggttttcccaatgt

SEQ ID NO: 1454349 - DNA, 15 bp, Homo sapiens
tcggttttcccaatg

SEQ ID NO: 1454350 - DNA, 15 bp, Homo sapiens
gtcggttttcccaat

SEQ ID NO: 1454351 - DNA, 15 bp, Homo sapiens
tgtcggttttcccaa

SEQ ID NO: 1454352 - DNA, 15 bp, Homo sapiens
ctgtcggttttccca

SEQ ID NO: 1454353 - DNA, 15 bp, Homo sapiens
tctgtcggttttccc

SEQ ID NO: 1454354 - DNA, 15 bp, Homo sapiens
atctgtcggttttcc

SEQ ID NO: 1454355 - DNA, 15 bp, Homo sapiens
catctgtcggttttc

SEQ ID NO: 1454356 - DNA, 15 bp, Homo sapiens
ccatctgtcggtttt

SEQ ID NO: 1454357 - DNA, 15 bp, Homo sapiens
tccatctgtcggttt

SEQ ID NO: 1454358 - DNA, 15 bp, Homo sapiens
atccatctgtcggtt

SEQ ID NO: 1454359 - DNA, 15 bp, Homo sapiens
tatccatctgtcggt

SEQ ID NO: 1454360 - DNA, 15 bp, Homo sapiens
ttatccatctgtcgg

SEQ ID NO: 1454361 - DNA, 15 bp, Homo sapiens
tttatccatctgtcg

SEQ ID NO: 1454362 - DNA, 15 bp, Homo sapiens
ttttatccatctgtc

SEQ ID NO: 1454363 - DNA, 15 bp, Homo sapiens
tttttatccatctgt

SEQ ID NO: 1454364 - DNA, 15 bp, Homo sapiens
ttttttatccatctg

SEQ ID NO: 1454365 - DNA, 15 bp, Homo sapiens
attttttatccatct

SEQ ID NO: 1454366 - DNA, 15 bp, Homo sapiens
tattttttatccatc

SEQ ID NO: 1454367 - DNA, 15 bp, Homo sapiens
ttattttttatccat

SEQ ID NO: 1454368 - DNA, 15 bp, Homo sapiens
attattttttatcca

SEQ ID NO: 1454369 - DNA, 15 bp, Homo sapiens
aattattttttatcc

SEQ ID NO: 1454370 - DNA, 15 bp, Homo sapiens
taattattttttatc

SEQ ID NO: 1454371 - DNA, 15 bp, Homo sapiens
gtaattattttttat

SEQ ID NO: 1454372 - DNA, 15 bp, Homo sapiens
ggtaattatttttta

SEQ ID NO: 1454373 - DNA, 15 bp, Homo sapiens
tggtaattatttttt

SEQ ID NO: 1454374 - DNA, 15 bp, Homo sapiens
gtggtaattattttt

SEQ ID NO: 1454375 - DNA, 15 bp, Homo sapiens
tgtggtaattatttt

SEQ ID NO: 1454376 - DNA, 15 bp, Homo sapiens
gtgtggtaattattt

SEQ ID NO: 1454377 - DNA, 15 bp, Homo sapiens
tgtgtggtaattatt

SEQ ID NO: 1454378 - DNA, 15 bp, Homo sapiens
ctgtgtggtaattat

SEQ ID NO: 1454379 - DNA, 15 bp, Homo sapiens
actgtgtggtaatta

SEQ ID NO: 1454380 - DNA, 15 bp, Homo sapiens
cactgtgtggtaatt

SEQ ID NO: 1454381 - DNA, 15 bp, Homo sapiens
acactgtgtggtaat

SEQ ID NO: 1454382 - DNA, 15 bp, Homo sapiens
cacactgtgtggtaa

SEQ ID NO: 1454383 - DNA, 15 bp, Homo sapiens
tcacactgtgtggta

SEQ ID NO: 1454384 - DNA, 15 bp, Homo sapiens
ctcacactgtgtggt

SEQ ID NO: 1454385 - DNA, 15 bp, Homo sapiens
actcacactgtgtgg

SEQ ID NO: 1454386 - DNA, 15 bp, Homo sapiens
tactcacactgtgtg

SEQ ID NO: 1454387 - DNA, 15 bp, Homo sapiens
ttactcacactgtgt

SEQ ID NO: 1454388 - DNA, 15 bp, Homo sapiens
tttactcacactgtg

SEQ ID NO: 1454389 - DNA, 15 bp, Homo sapiens
ttttactcacactgt

SEQ ID NO: 1454390 - DNA, 15 bp, Homo sapiens
gttttactcacactg

SEQ ID NO: 1454391 - DNA, 15 bp, Homo sapiens
ggttttactcacact

SEQ ID NO: 1454392 - DNA, 15 bp, Homo sapiens
aggttttactcacac

SEQ ID NO: 1454393 - DNA, 15 bp, Homo sapiens
aaggttttactcaca

SEQ ID NO: 1454394 - DNA, 15 bp, Homo sapiens
aaaggttttactcac

SEQ ID NO: 1454395 - DNA, 15 bp, Homo sapiens
aaaaggttttactca

SEQ ID NO: 1454396 - DNA, 15 bp, Homo sapiens
taaaaggttttactc

SEQ ID NO: 1454397 - DNA, 15 bp, Homo sapiens
ttaaaaggttttact

SEQ ID NO: 1454398 - DNA, 15 bp, Homo sapiens
tttaaaaggttttac

SEQ ID NO: 1454399 - DNA, 15 bp, Homo sapiens
ttttaaaaggtttta

SEQ ID NO: 1454400 - DNA, 15 bp, Homo sapiens
tttttaaaaggtttt

SEQ ID NO: 1454401 - DNA, 15 bp, Homo sapiens
ctttttaaaaggttt

SEQ ID NO: 1454402 - DNA, 15 bp, Homo sapiens
actttttaaaaggtt

SEQ ID NO: 1454403 - DNA, 15 bp, Homo sapiens
gactttttaaaaggt

SEQ ID NO: 1454404 - DNA, 15 bp, Homo sapiens
agactttttaaaagg

SEQ ID NO: 1454405 - DNA, 15 bp, Homo sapiens
tagactttttaaaag

SEQ ID NO: 1454406 - DNA, 15 bp, Homo sapiens
atagactttttaaaa

SEQ ID NO: 1454407 - DNA, 15 bp, Homo sapiens
aatagactttttaaa

SEQ ID NO: 1454408 - DNA, 15 bp, Homo sapiens
taatagactttttaa

SEQ ID NO: 1454409 - DNA, 15 bp, Homo sapiens
gtaatagacttttta

SEQ ID NO: 1454410 - DNA, 15 bp, Homo sapiens
agtaatagacttttt

SEQ ID NO: 1454411 - DNA, 15 bp, Homo sapiens
gagtaatagactttt

SEQ ID NO: 1454412 - DNA, 15 bp, Homo sapiens
agagtaatagacttt

SEQ ID NO: 1454413 - DNA, 15 bp, Homo sapiens
cagagtaatagactt

SEQ ID NO: 1454414 - DNA, 15 bp, Homo sapiens
ccagagtaatagact

SEQ ID NO: 1454415 - DNA, 15 bp, Homo sapiens
cccagagtaatagac

SEQ ID NO: 1454416 - DNA, 15 bp, Homo sapiens
tcccagagtaataga

SEQ ID NO: 1454417 - DNA, 15 bp, Homo sapiens
ctcccagagtaatag

SEQ ID NO: 1454418 - DNA, 15 bp, Homo sapiens
gctcccagagtaata

SEQ ID NO: 1454419 - DNA, 15 bp, Homo sapiens
tgctcccagagtaat

SEQ ID NO: 1454420 - DNA, 15 bp, Homo sapiens
gtgctcccagagtaa

SEQ ID NO: 1454421 - DNA, 15 bp, Homo sapiens
tgtgctcccagagta

SEQ ID NO: 1454422 - DNA, 15 bp, Homo sapiens
ctgtgctcccagagt

SEQ ID NO: 1454423 - DNA, 15 bp, Homo sapiens
tctgtgctcccagag

SEQ ID NO: 1454424 - DNA, 15 bp, Homo sapiens
ctctgtgctcccaga

SEQ ID NO: 1454425 - DNA, 15 bp, Homo sapiens
actctgtgctcccag

SEQ ID NO: 1454426 - DNA, 15 bp, Homo sapiens
cactctgtgctccca

SEQ ID NO: 1454427 - DNA, 15 bp, Homo sapiens
ccactctgtgctccc

SEQ ID NO: 1454428 - DNA, 15 bp, Homo sapiens
gccactctgtgctcc

SEQ ID NO: 1454429 - DNA, 15 bp, Homo sapiens
cgccactctgtgctc

SEQ ID NO: 1454430 - DNA, 15 bp, Homo sapiens
tcgccactctgtgct

SEQ ID NO: 1454431 - DNA, 15 bp, Homo sapiens
gtcgccactctgtgc

SEQ ID NO: 1454432 - DNA, 15 bp, Homo sapiens
cgtcgccactctgtg

SEQ ID NO: 1454433 - DNA, 15 bp, Homo sapiens
ccgtcgccactctgt

SEQ ID NO: 1454434 - DNA, 15 bp, Homo sapiens
accgtcgccactctg

SEQ ID NO: 1454435 - DNA, 15 bp, Homo sapiens
aaccgtcgccactct

SEQ ID NO: 1454436 - DNA, 15 bp, Homo sapiens
aaaccgtcgccactc

SEQ ID NO: 1454437 - DNA, 15 bp, Homo sapiens
gaaaccgtcgccact

SEQ ID NO: 1454438 - DNA, 15 bp, Homo sapiens
ggaaaccgtcgccac

SEQ ID NO: 1454439 - DNA, 15 bp, Homo sapiens
gggaaaccgtcgcca

SEQ ID NO: 1454440 - DNA, 15 bp, Homo sapiens
ggggaaaccgtcgcc

SEQ ID NO: 1454441 - DNA, 15 bp, Homo sapiens
tggggaaaccgtcgc

SEQ ID NO: 1454442 - DNA, 15 bp, Homo sapiens
ctggggaaaccgtcg

SEQ ID NO: 1454443 - DNA, 15 bp, Homo sapiens
cctggggaaaccgtc

SEQ ID NO: 1454444 - DNA, 15 bp, Homo sapiens
gcctggggaaaccgt

SEQ ID NO: 1454445 - DNA, 15 bp, Homo sapiens
ggcctggggaaaccg

SEQ ID NO: 1454446 - DNA, 15 bp, Homo sapiens
aggcctggggaaacc

SEQ ID NO: 1454447 - DNA, 15 bp, Homo sapiens
gaggcctggggaaac

SEQ ID NO: 1454448 - DNA, 15 bp, Homo sapiens
agaggcctggggaaa

SEQ ID NO: 1454449 - DNA, 15 bp, Homo sapiens
tagaggcctggggaa

SEQ ID NO: 1454450 - DNA, 15 bp, Homo sapiens
gtagaggcctgggga

SEQ ID NO: 1454451 - DNA, 15 bp, Homo sapiens
agtagaggcctgggg

SEQ ID NO: 1454452 - DNA, 15 bp, Homo sapiens
aagtagaggcctggg

SEQ ID NO: 1454453 - DNA, 15 bp, Homo sapiens
aaagtagaggcctgg

SEQ ID NO: 1454454 - DNA, 15 bp, Homo sapiens
taaagtagaggcctg

SEQ ID NO: 1454455 - DNA, 15 bp, Homo sapiens
ctaaagtagaggcct

SEQ ID NO: 1454456 - DNA, 15 bp, Homo sapiens
cctaaagtagaggcc

SEQ ID NO: 1454457 - DNA, 15 bp, Homo sapiens
tcctaaagtagaggc

SEQ ID NO: 1454458 - DNA, 15 bp, Homo sapiens
ctcctaaagtagagg

SEQ ID NO: 1454459 - DNA, 15 bp, Homo sapiens
tctcctaaagtagag

SEQ ID NO: 1454460 - DNA, 15 bp, Homo sapiens
gtctcctaaagtaga

SEQ ID NO: 1454461 - DNA, 15 bp, Homo sapiens
agtctcctaaagtag

SEQ ID NO: 1454462 - DNA, 15 bp, Homo sapiens
aagtctcctaaagta

SEQ ID NO: 1454463 - DNA, 15 bp, Homo sapiens
caagtctcctaaagt

SEQ ID NO: 1454464 - DNA, 15 bp, Homo sapiens
ccaagtctcctaaag

SEQ ID NO: 1454465 - DNA, 15 bp, Homo sapiens
accaagtctcctaaa

SEQ ID NO: 1454466 - DNA, 15 bp, Homo sapiens
aaccaagtctcctaa

SEQ ID NO: 1454467 - DNA, 15 bp, Homo sapiens
caaccaagtctccta

SEQ ID NO: 1454468 - DNA, 15 bp, Homo sapiens
tcaaccaagtctcct

SEQ ID NO: 1454469 - DNA, 15 bp, Homo sapiens
ctcaaccaagtctcc

SEQ ID NO: 1454470 - DNA, 15 bp, Homo sapiens
tctcaaccaagtctc

SEQ ID NO: 1454471 - DNA, 15 bp, Homo sapiens
gtctcaaccaagtct

SEQ ID NO: 1454472 - DNA, 15 bp, Homo sapiens
tgtctcaaccaagtc

SEQ ID NO: 1454473 - DNA, 15 bp, Homo sapiens
ttgtctcaaccaagt

SEQ ID NO: 1454474 - DNA, 15 bp, Homo sapiens
attgtctcaaccaag

SEQ ID NO: 1454475 - DNA, 15 bp, Homo sapiens
aattgtctcaaccaa

SEQ ID NO: 1454476 - DNA, 15 bp, Homo sapiens
taattgtctcaacca

SEQ ID NO: 1454477 - DNA, 15 bp, Homo sapiens
gtaattgtctcaacc

SEQ ID NO: 1454478 - DNA, 15 bp, Homo sapiens
agtaattgtctcaac

SEQ ID NO: 1454479 - DNA, 15 bp, Homo sapiens
aagtaattgtctcaa

SEQ ID NO: 1454480 - DNA, 15 bp, Homo sapiens
gaagtaattgtctca

SEQ ID NO: 1454481 - DNA, 15 bp, Homo sapiens
tgaagtaattgtctc

SEQ ID NO: 1454482 - DNA, 15 bp, Homo sapiens
gtgaagtaattgtct

SEQ ID NO: 1454483 - DNA, 15 bp, Homo sapiens
agtgaagtaattgtc

SEQ ID NO: 1454484 - DNA, 15 bp, Homo sapiens
cagtgaagtaattgt

SEQ ID NO: 1454485 - DNA, 15 bp, Homo sapiens
ccagtgaagtaattg

SEQ ID NO: 1454486 - DNA, 15 bp, Homo sapiens
cccagtgaagtaatt

SEQ ID NO: 1454487 - DNA, 15 bp, Homo sapiens
gcccagtgaagtaat

SEQ ID NO: 1454488 - DNA, 15 bp, Homo sapiens
agcccagtgaagtaa

SEQ ID NO: 1454489 - DNA, 15 bp, Homo sapiens
cagcccagtgaagta

SEQ ID NO: 1454490 - DNA, 15 bp, Homo sapiens
gcagcccagtgaagt

SEQ ID NO: 1454491 - DNA, 15 bp, Homo sapiens
tgcagcccagtgaag

SEQ ID NO: 1454492 - DNA, 15 bp, Homo sapiens
atgcagcccagtgaa

SEQ ID NO: 1454493 - DNA, 15 bp, Homo sapiens
gatgcagcccagtga

SEQ ID NO: 1454494 - DNA, 15 bp, Homo sapiens
agatgcagcccagtg

SEQ ID NO: 1454495 - DNA, 15 bp, Homo sapiens
cagatgcagcccagt

SEQ ID NO: 1454496 - DNA, 15 bp, Homo sapiens
tcagatgcagcccag

SEQ ID NO: 1454497 - DNA, 15 bp, Homo sapiens
ttcagatgcagccca

SEQ ID NO: 1454498 - DNA, 15 bp, Homo sapiens
cttcagatgcagccc

SEQ ID NO: 1454499 - DNA, 15 bp, Homo sapiens
ccttcagatgcagcc

SEQ ID NO: 1454500 - DNA, 15 bp, Homo sapiens
cccttcagatgcagc

SEQ ID NO: 1454501 - DNA, 15 bp, Homo sapiens
tcccttcagatgcag

SEQ ID NO: 1454502 - DNA, 15 bp, Homo sapiens
gtcccttcagatgca

SEQ ID NO: 1454503 - DNA, 15 bp, Homo sapiens
cgtcccttcagatgc

SEQ ID NO: 1454504 - DNA, 15 bp, Homo sapiens
ccgtcccttcagatg

SEQ ID NO: 1454505 - DNA, 15 bp, Homo sapiens
accgtcccttcagat

SEQ ID NO: 1454506 - DNA, 15 bp, Homo sapiens
gaccgtcccttcaga

SEQ ID NO: 1454507 - DNA, 15 bp, Homo sapiens
tgaccgtcccttcag

SEQ ID NO: 1454508 - DNA, 15 bp, Homo sapiens
atgaccgtcccttca

SEQ ID NO: 1454509 - DNA, 15 bp, Homo sapiens
gatgaccgtcccttc

SEQ ID NO: 1454510 - DNA, 15 bp, Homo sapiens
agatgaccgtccctt

SEQ ID NO: 1454511 - DNA, 15 bp, Homo sapiens
aagatgaccgtccct

SEQ ID NO: 1454512 - DNA, 15 bp, Homo sapiens
taagatgaccgtccc

SEQ ID NO: 1454513 - DNA, 15 bp, Homo sapiens
ttaagatgaccgtcc

SEQ ID NO: 1454514 - DNA, 15 bp, Homo sapiens
attaagatgaccgtc

SEQ ID NO: 1454515 - DNA, 15 bp, Homo sapiens
gattaagatgaccgt

SEQ ID NO: 1454516 - DNA, 15 bp, Homo sapiens
tgattaagatgaccg

SEQ ID NO: 1454517 - DNA, 15 bp, Homo sapiens
ctgattaagatgacc

SEQ ID NO: 1454518 - DNA, 15 bp, Homo sapiens
actgattaagatgac

SEQ ID NO: 1454519 - DNA, 15 bp, Homo sapiens
tactgattaagatga

SEQ ID NO: 1454520 - DNA, 15 bp, Homo sapiens
ctactgattaagatg

SEQ ID NO: 1454521 - DNA, 15 bp, Homo sapiens
cctactgattaagat

SEQ ID NO: 1454522 - DNA, 15 bp, Homo sapiens
tcctactgattaaga

SEQ ID NO: 1454523 - DNA, 15 bp, Homo sapiens
ttcctactgattaag

SEQ ID NO: 1454524 - DNA, 15 bp, Homo sapiens
tttcctactgattaa

SEQ ID NO: 1454525 - DNA, 15 bp, Homo sapiens
ttttcctactgatta

SEQ ID NO: 1454526 - DNA, 15 bp, Homo sapiens
gttttcctactgatt

SEQ ID NO: 1454527 - DNA, 15 bp, Homo sapiens
tgttttcctactgat

SEQ ID NO: 1454528 - DNA, 15 bp, Homo sapiens
atgttttcctactga

SEQ ID NO: 1454529 - DNA, 15 bp, Homo sapiens
aatgttttcctactg

SEQ ID NO: 1454530 - DNA, 15 bp, Homo sapiens
aaatgttttcctact

SEQ ID NO: 1454531 - DNA, 15 bp, Homo sapiens
caaatgttttcctac

SEQ ID NO: 1454532 - DNA, 15 bp, Homo sapiens
gcaaatgttttccta

SEQ ID NO: 1454533 - DNA, 15 bp, Homo sapiens
ggcaaatgttttcct

SEQ ID NO: 1454534 - DNA, 15 bp, Homo sapiens
tggcaaatgttttcc

SEQ ID NO: 1454535 - DNA, 15 bp, Homo sapiens
ttggcaaatgttttc

SEQ ID NO: 1454536 - DNA, 15 bp, Homo sapiens
tttggcaaatgtttt

SEQ ID NO: 1454537 - DNA, 15 bp, Homo sapiens
gtttggcaaatgttt

SEQ ID NO: 1454538 - DNA, 15 bp, Homo sapiens
ggtttggcaaatgtt

SEQ ID NO: 1454539 - DNA, 15 bp, Homo sapiens
gggtttggcaaatgt

SEQ ID NO: 1454540 - DNA, 15 bp, Homo sapiens
tgggtttggcaaatg

SEQ ID NO: 1454541 - DNA, 15 bp, Homo sapiens
ctgggtttggcaaat

SEQ ID NO: 1454542 - DNA, 15 bp, Homo sapiens
gctgggtttggcaaa

SEQ ID NO: 1454543 - DNA, 15 bp, Homo sapiens
agctgggtttggcaa

SEQ ID NO: 1454544 - DNA, 15 bp, Homo sapiens
tagctgggtttggca

SEQ ID NO: 1454545 - DNA, 15 bp, Homo sapiens
gtagctgggtttggc

SEQ ID NO: 1454546 - DNA, 15 bp, Homo sapiens
ggtagctgggtttgg

SEQ ID NO: 1454547 - DNA, 15 bp, Homo sapiens
cggtagctgggtttg

SEQ ID NO: 1454548 - DNA, 15 bp, Homo sapiens
acggtagctgggttt

SEQ ID NO: 1454549 - DNA, 15 bp, Homo sapiens
tacggtagctgggtt

SEQ ID NO: 1454550 - DNA, 15 bp, Homo sapiens
ttacggtagctgggt

SEQ ID NO: 1454551 - DNA, 15 bp, Homo sapiens
cttacggtagctggg

SEQ ID NO: 1454552 - DNA, 15 bp, Homo sapiens
tcttacggtagctgg

SEQ ID NO: 1454553 - DNA, 15 bp, Homo sapiens
ttcttacggtagctg

SEQ ID NO: 1454554 - DNA, 15 bp, Homo sapiens
attcttacggtagct

SEQ ID NO: 1454555 - DNA, 15 bp, Homo sapiens
aattcttacggtagc

SEQ ID NO: 1454556 - DNA, 15 bp, Homo sapiens
aaattcttacggtag

SEQ ID NO: 1454557 - DNA, 15 bp, Homo sapiens
taaattcttacggta

SEQ ID NO: 1454558 - DNA, 15 bp, Homo sapiens
ttaaattcttacggt

SEQ ID NO: 1454559 - DNA, 15 bp, Homo sapiens
attaaattcttacgg

SEQ ID NO: 1454560 - DNA, 15 bp, Homo sapiens
cattaaattcttacg

SEQ ID NO: 1454561 - DNA, 15 bp, Homo sapiens
gcattaaattcttac

SEQ ID NO: 1454562 - DNA, 15 bp, Homo sapiens
agcattaaattctta

SEQ ID NO: 1454563 - DNA, 15 bp, Homo sapiens
cagcattaaattctt

SEQ ID NO: 1454564 - DNA, 15 bp, Homo sapiens
acagcattaaattct

SEQ ID NO: 1454565 - DNA, 15 bp, Homo sapiens
aacagcattaaattc

SEQ ID NO: 1454566 - DNA, 15 bp, Homo sapiens
taacagcattaaatt

SEQ ID NO: 1454567 - DNA, 15 bp, Homo sapiens
ttaacagcattaaat

SEQ ID NO: 1454568 - DNA, 15 bp, Homo sapiens
tttaacagcattaaa

SEQ ID NO: 1454569 - DNA, 15 bp, Homo sapiens
atttaacagcattaa

SEQ ID NO: 1454570 - DNA, 15 bp, Homo sapiens
catttaacagcatta

SEQ ID NO: 1454571 - DNA, 15 bp, Homo sapiens
tcatttaacagcatt

SEQ ID NO: 1454572 - DNA, 15 bp, Homo sapiens
atcatttaacagcat

SEQ ID NO: 1454573 - DNA, 15 bp, Homo sapiens
tatcatttaacagca

SEQ ID NO: 1454574 - DNA, 15 bp, Homo sapiens
ctatcatttaacagc

SEQ ID NO: 1454575 - DNA, 15 bp, Homo sapiens
actatcatttaacag

SEQ ID NO: 1454576 - DNA, 15 bp, Homo sapiens
aactatcatttaaca

SEQ ID NO: 1454577 - DNA, 15 bp, Homo sapiens
aaactatcatttaac

SEQ ID NO: 1454578 - DNA, 15 bp, Homo sapiens
caaactatcatttaa

SEQ ID NO: 1454579 - DNA, 15 bp, Homo sapiens
acaaactatcattta

SEQ ID NO: 1454580 - DNA, 15 bp, Homo sapiens
cacaaactatcattt

SEQ ID NO: 1454581 - DNA, 15 bp, Homo sapiens
ccacaaactatcatt

SEQ ID NO: 1454582 - DNA, 15 bp, Homo sapiens
cccacaaactatcat

SEQ ID NO: 1454583 - DNA, 15 bp, Homo sapiens
tcccacaaactatca

SEQ ID NO: 1454584 - DNA, 15 bp, Homo sapiens
atcccacaaactatc

SEQ ID NO: 1454585 - DNA, 15 bp, Homo sapiens
tatcccacaaactat

SEQ ID NO: 1454586 - DNA, 15 bp, Homo sapiens
ttatcccacaaacta

SEQ ID NO: 1454587 - DNA, 15 bp, Homo sapiens
cttatcccacaaact

SEQ ID NO: 1454588 - DNA, 15 bp, Homo sapiens
acttatcccacaaac

SEQ ID NO: 1454589 - DNA, 15 bp, Homo sapiens
aacttatcccacaaa

SEQ ID NO: 1454590 - DNA, 15 bp, Homo sapiens
aaacttatcccacaa

SEQ ID NO: 1454591 - DNA, 15 bp, Homo sapiens
caaacttatcccaca

SEQ ID NO: 1454592 - DNA, 15 bp, Homo sapiens
ccaaacttatcccac

SEQ ID NO: 1454593 - DNA, 15 bp, Homo sapiens
cccaaacttatccca

SEQ ID NO: 1454594 - DNA, 15 bp, Homo sapiens
ccccaaacttatccc

SEQ ID NO: 1454595 - DNA, 15 bp, Homo sapiens
accccaaacttatcc

SEQ ID NO: 1454596 - DNA, 15 bp, Homo sapiens
taccccaaacttatc

SEQ ID NO: 1454597 - DNA, 15 bp, Homo sapiens
ataccccaaacttat

SEQ ID NO: 1454598 - DNA, 15 bp, Homo sapiens
tataccccaaactta

SEQ ID NO: 1454599 - DNA, 15 bp, Homo sapiens
ttataccccaaactt

SEQ ID NO: 1454600 - DNA, 15 bp, Homo sapiens
gttataccccaaact

SEQ ID NO: 1454601 - DNA, 15 bp, Homo sapiens
agttataccccaaac

SEQ ID NO: 1454602 - DNA, 15 bp, Homo sapiens
aagttataccccaaa

SEQ ID NO: 1454603 - DNA, 15 bp, Homo sapiens
gaagttataccccaa

SEQ ID NO: 1454604 - DNA, 15 bp, Homo sapiens
agaagttatacccca

SEQ ID NO: 1454605 - DNA, 15 bp, Homo sapiens
tagaagttatacccc

SEQ ID NO: 1454606 - DNA, 15 bp, Homo sapiens
atagaagttataccc

SEQ ID NO: 1454607 - DNA, 15 bp, Homo sapiens
aatagaagttatacc

SEQ ID NO: 1454608 - DNA, 15 bp, Homo sapiens
aaatagaagttatac

SEQ ID NO: 1454609 - DNA, 15 bp, Homo sapiens
caaatagaagttata

SEQ ID NO: 1454610 - DNA, 15 bp, Homo sapiens
acaaatagaagttat

SEQ ID NO: 1454611 - DNA, 15 bp, Homo sapiens
tacaaatagaagtta

SEQ ID NO: 1454612 - DNA, 15 bp, Homo sapiens
ctacaaatagaagtt

SEQ ID NO: 1454613 - DNA, 15 bp, Homo sapiens
actacaaatagaagt

SEQ ID NO: 1454614 - DNA, 15 bp, Homo sapiens
gactacaaatagaag

SEQ ID NO: 1454615 - DNA, 15 bp, Homo sapiens
ggactacaaatagaa

SEQ ID NO: 1454616 - DNA, 15 bp, Homo sapiens
aggactacaaataga

SEQ ID NO: 1454617 - DNA, 15 bp, Homo sapiens
taggactacaaatag

SEQ ID NO: 1454618 - DNA, 15 bp, Homo sapiens
ttaggactacaaata

SEQ ID NO: 1454619 - DNA, 15 bp, Homo sapiens
attaggactacaaat

SEQ ID NO: 1454620 - DNA, 15 bp, Homo sapiens
gattaggactacaaa

SEQ ID NO: 1454621 - DNA, 15 bp, Homo sapiens
tgattaggactacaa

SEQ ID NO: 1454622 - DNA, 15 bp, Homo sapiens
atgattaggactaca

SEQ ID NO: 1454623 - DNA, 15 bp, Homo sapiens
catgattaggactac

SEQ ID NO: 1454624 - DNA, 15 bp, Homo sapiens
ccatgattaggacta

SEQ ID NO: 1454625 - DNA, 15 bp, Homo sapiens
cccatgattaggact

SEQ ID NO: 1454626 - DNA, 15 bp, Homo sapiens
acccatgattaggac

SEQ ID NO: 1454627 - DNA, 15 bp, Homo sapiens
gacccatgattagga

SEQ ID NO: 1454628 - DNA, 15 bp, Homo sapiens
agacccatgattagg

SEQ ID NO: 1454629 - DNA, 15 bp, Homo sapiens
tagacccatgattag

SEQ ID NO: 1454630 - DNA, 15 bp, Homo sapiens
ctagacccatgatta

SEQ ID NO: 1454631 - DNA, 15 bp, Homo sapiens
actagacccatgatt

SEQ ID NO: 1454632 - DNA, 15 bp, Homo sapiens
cactagacccatgat

SEQ ID NO: 1454633 - DNA, 15 bp, Homo sapiens
gcactagacccatga

SEQ ID NO: 1454634 - DNA, 15 bp, Homo sapiens
agcactagacccatg

SEQ ID NO: 1454635 - DNA, 15 bp, Homo sapiens
tagcactagacccat

SEQ ID NO: 1454636 - DNA, 15 bp, Homo sapiens
gtagcactagaccca

SEQ ID NO: 1454637 - DNA, 15 bp, Homo sapiens
agtagcactagaccc

SEQ ID NO: 1454638 - DNA, 15 bp, Homo sapiens
cagtagcactagacc

SEQ ID NO: 1454639 - DNA, 15 bp, Homo sapiens
tcagtagcactagac

SEQ ID NO: 1454640 - DNA, 15 bp, Homo sapiens
ttcagtagcactaga

SEQ ID NO: 1454641 - DNA, 15 bp, Homo sapiens
attcagtagcactag

SEQ ID NO: 1454642 - DNA, 15 bp, Homo sapiens
aattcagtagcacta

SEQ ID NO: 1454643 - DNA, 15 bp, Homo sapiens
taattcagtagcact

SEQ ID NO: 1454644 - DNA, 15 bp, Homo sapiens
ataattcagtagcac

SEQ ID NO: 1454645 - DNA, 15 bp, Homo sapiens
aataattcagtagca

SEQ ID NO: 1454646 - DNA, 15 bp, Homo sapiens
aaataattcagtagc

SEQ ID NO: 1454647 - DNA, 15 bp, Homo sapiens
aaaataattcagtag

SEQ ID NO: 1454648 - DNA, 15 bp, Homo sapiens
aaaaataattcagta

SEQ ID NO: 1454649 - DNA, 15 bp, Homo sapiens
aaaaaataattcagt

SEQ ID NO: 1454650 - DNA, 15 bp, Homo sapiens
aaaaaaataattcag

SEQ ID NO: 1454651 - DNA, 15 bp, Homo sapiens
gaaaaaaataattca

SEQ ID NO: 1454652 - DNA, 15 bp, Homo sapiens
ggaaaaaaataattc

SEQ ID NO: 1454653 - DNA, 15 bp, Homo sapiens
aggaaaaaaataatt

SEQ ID NO: 1454654 - DNA, 15 bp, Homo sapiens
aaggaaaaaaataat

SEQ ID NO: 1454655 - DNA, 15 bp, Homo sapiens
caaggaaaaaaataa

SEQ ID NO: 1454656 - DNA, 15 bp, Homo sapiens
gcaaggaaaaaaata

SEQ ID NO: 1454657 - DNA, 15 bp, Homo sapiens
agcaaggaaaaaaat

SEQ ID NO: 1454658 - DNA, 15 bp, Homo sapiens
cagcaaggaaaaaaa

SEQ ID NO: 1454659 - DNA, 15 bp, Homo sapiens
acagcaaggaaaaaa

SEQ ID NO: 1454660 - DNA, 15 bp, Homo sapiens
tacagcaaggaaaaa

SEQ ID NO: 1454661 - DNA, 15 bp, Homo sapiens
gtacagcaaggaaaa

SEQ ID NO: 1454662 - DNA, 15 bp, Homo sapiens
ggtacagcaaggaaa

SEQ ID NO: 1454663 - DNA, 15 bp, Homo sapiens
aggtacagcaaggaa

SEQ ID NO: 1454664 - DNA, 15 bp, Homo sapiens
caggtacagcaagga

SEQ ID NO: 1454665 - DNA, 15 bp, Homo sapiens
tcaggtacagcaagg

SEQ ID NO: 1454666 - DNA, 15 bp, Homo sapiens
ctcaggtacagcaag

SEQ ID NO: 1454667 - DNA, 15 bp, Homo sapiens
tctcaggtacagcaa

SEQ ID NO: 1454668 - DNA, 15 bp, Homo sapiens
atctcaggtacagca

SEQ ID NO: 1454669 - DNA, 15 bp, Homo sapiens
tatctcaggtacagc

SEQ ID NO: 1454670 - DNA, 15 bp, Homo sapiens
gtatctcaggtacag

SEQ ID NO: 1454671 - DNA, 15 bp, Homo sapiens
tgtatctcaggtaca

SEQ ID NO: 1454672 - DNA, 15 bp, Homo sapiens
atgtatctcaggtac

SEQ ID NO: 1454673 - DNA, 15 bp, Homo sapiens
tatgtatctcaggta

SEQ ID NO: 1454674 - DNA, 15 bp, Homo sapiens
atatgtatctcaggt

SEQ ID NO: 1454675 - DNA, 15 bp, Homo sapiens
tatatgtatctcagg

SEQ ID NO: 1454676 - DNA, 15 bp, Homo sapiens
atatatgtatctcag

SEQ ID NO: 1454677 - DNA, 15 bp, Homo sapiens
tatatatgtatctca

SEQ ID NO: 1454678 - DNA, 15 bp, Homo sapiens
ttatatatgtatctc

SEQ ID NO: 1454679 - DNA, 15 bp, Homo sapiens
gttatatatgtatct

SEQ ID NO: 1454680 - DNA, 15 bp, Homo sapiens
tgttatatatgtatc

SEQ ID NO: 1454681 - DNA, 15 bp, Homo sapiens
gtgttatatatgtat

SEQ ID NO: 1454682 - DNA, 15 bp, Homo sapiens
agtgttatatatgta

SEQ ID NO: 1454683 - DNA, 15 bp, Homo sapiens
aagtgttatatatgt

SEQ ID NO: 1454684 - DNA, 15 bp, Homo sapiens
aaagtgttatatatg

SEQ ID NO: 1454685 - DNA, 15 bp, Homo sapiens
taaagtgttatatat

SEQ ID NO: 1454686 - DNA, 15 bp, Homo sapiens
ataaagtgttatata

SEQ ID NO: 1454687 - DNA, 15 bp, Homo sapiens
aataaagtgttatat

SEQ ID NO: 1454688 - DNA, 15 bp, Homo sapiens
aaataaagtgttata

SEQ ID NO: 1454689 - DNA, 15 bp, Homo sapiens
gaaataaagtgttat

SEQ ID NO: 1454690 - DNA, 15 bp, Homo sapiens
agaaataaagtgtta

SEQ ID NO: 1454691 - DNA, 15 bp, Homo sapiens
gagaaataaagtgtt

SEQ ID NO: 1454692 - DNA, 15 bp, Homo sapiens
ggagaaataaagtgt

SEQ ID NO: 1454693 - DNA, 15 bp, Homo sapiens
tggagaaataaagtg

SEQ ID NO: 1454694 - DNA, 15 bp, Homo sapiens
ttggagaaataaagt

SEQ ID NO: 1454695 - DNA, 15 bp, Homo sapiens
tttggagaaataaag

SEQ ID NO: 1454696 - DNA, 15 bp, Homo sapiens
ttttggagaaataaa

SEQ ID NO: 1454697 - DNA, 15 bp, Homo sapiens
attttggagaaataa

SEQ ID NO: 1454698 - DNA, 15 bp, Homo sapiens
tattttggagaaata

SEQ ID NO: 1454699 - DNA, 15 bp, Homo sapiens
ttattttggagaaat

SEQ ID NO: 1454700 - DNA, 15 bp, Homo sapiens
gttattttggagaaa

SEQ ID NO: 1454701 - DNA, 15 bp, Homo sapiens
tgttattttggagaa

SEQ ID NO: 1454702 - DNA, 15 bp, Homo sapiens
atgttattttggaga

SEQ ID NO: 1454703 - DNA, 15 bp, Homo sapiens
tatgttattttggag

SEQ ID NO: 1454704 - DNA, 15 bp, Homo sapiens
gtatgttattttgga

SEQ ID NO: 1454705 - DNA, 15 bp, Homo sapiens
ggtatgttattttgg

SEQ ID NO: 1454706 - DNA, 15 bp, Homo sapiens
aggtatgttattttg

SEQ ID NO: 1454707 - DNA, 15 bp, Homo sapiens
caggtatgttatttt

SEQ ID NO: 1454708 - DNA, 15 bp, Homo sapiens
gcaggtatgttattt

SEQ ID NO: 1454709 - DNA, 15 bp, Homo sapiens
ggcaggtatgttatt

SEQ ID NO: 1454710 - DNA, 15 bp, Homo sapiens
tggcaggtatgttat

SEQ ID NO: 1454711 - DNA, 15 bp, Homo sapiens
ctggcaggtatgtta

SEQ ID NO: 1454712 - DNA, 15 bp, Homo sapiens
actggcaggtatgtt

SEQ ID NO: 1454713 - DNA, 15 bp, Homo sapiens
aactggcaggtatgt

SEQ ID NO: 1454714 - DNA, 15 bp, Homo sapiens
aaactggcaggtatg

SEQ ID NO: 1454715 - DNA, 15 bp, Homo sapiens
aaaactggcaggtat

SEQ ID NO: 1454716 - DNA, 15 bp, Homo sapiens
gaaaactggcaggta

SEQ ID NO: 1454717 - DNA, 15 bp, Homo sapiens
agaaaactggcaggt

SEQ ID NO: 1454718 - DNA, 15 bp, Homo sapiens
cagaaaactggcagg

SEQ ID NO: 1454719 - DNA, 15 bp, Homo sapiens
ccagaaaactggcag

SEQ ID NO: 1454720 - DNA, 15 bp, Homo sapiens
tccagaaaactggca

SEQ ID NO: 1454721 - DNA, 15 bp, Homo sapiens
atccagaaaactggc

SEQ ID NO: 1454722 - DNA, 15 bp, Homo sapiens
tatccagaaaactgg

SEQ ID NO: 1454723 - DNA, 15 bp, Homo sapiens
atatccagaaaactg

SEQ ID NO: 1454724 - DNA, 15 bp, Homo sapiens
gatatccagaaaact

SEQ ID NO: 1454725 - DNA, 15 bp, Homo sapiens
ggatatccagaaaac

SEQ ID NO: 1454726 - DNA, 15 bp, Homo sapiens
aggatatccagaaaa

SEQ ID NO: 1454727 - DNA, 15 bp, Homo sapiens
caggatatccagaaa

SEQ ID NO: 1454728 - DNA, 15 bp, Homo sapiens
gcaggatatccagaa

SEQ ID NO: 1454729 - DNA, 15 bp, Homo sapiens
ggcaggatatccaga

SEQ ID NO: 1454730 - DNA, 15 bp, Homo sapiens
tggcaggatatccag

SEQ ID NO: 1454731 - DNA, 15 bp, Homo sapiens
ttggcaggatatcca

SEQ ID NO: 1454732 - DNA, 15 bp, Homo sapiens
tttggcaggatatcc

SEQ ID NO: 1454733 - DNA, 15 bp, Homo sapiens
ttttggcaggatatc

SEQ ID NO: 1454734 - DNA, 15 bp, Homo sapiens
gttttggcaggatat

SEQ ID NO: 1454735 - DNA, 15 bp, Homo sapiens
agttttggcaggata

SEQ ID NO: 1454736 - DNA, 15 bp, Homo sapiens
cagttttggcaggat

SEQ ID NO: 1454737 - DNA, 15 bp, Homo sapiens
tcagttttggcagga

SEQ ID NO: 1454738 - DNA, 15 bp, Homo sapiens
ttcagttttggcagg

SEQ ID NO: 1454739 - DNA, 15 bp, Homo sapiens
attcagttttggcag

SEQ ID NO: 1454740 - DNA, 15 bp, Homo sapiens
cattcagttttggca

SEQ ID NO: 1454741 - DNA, 15 bp, Homo sapiens
gcattcagttttggc

SEQ ID NO: 1454742 - DNA, 15 bp, Homo sapiens
tgcattcagttttgg

SEQ ID NO: 1454743 - DNA, 15 bp, Homo sapiens
ttgcattcagttttg

SEQ ID NO: 1454744 - DNA, 15 bp, Homo sapiens
tttgcattcagtttt

SEQ ID NO: 1454745 - DNA, 15 bp, Homo sapiens
atttgcattcagttt

SEQ ID NO: 1454746 - DNA, 15 bp, Homo sapiens
aatttgcattcagtt

SEQ ID NO: 1454747 - DNA, 15 bp, Homo sapiens
aaatttgcattcagt

SEQ ID NO: 1454748 - DNA, 15 bp, Homo sapiens
aaaatttgcattcag

SEQ ID NO: 1454749 - DNA, 15 bp, Homo sapiens
aaaaatttgcattca

SEQ ID NO: 1454750 - DNA, 15 bp, Homo sapiens
gaaaaatttgcattc

SEQ ID NO: 1454751 - DNA, 15 bp, Homo sapiens
agaaaaatttgcatt

SEQ ID NO: 1454752 - DNA, 15 bp, Homo sapiens
gagaaaaatttgcat

SEQ ID NO: 1454753 - DNA, 15 bp, Homo sapiens
agagaaaaatttgca

SEQ ID NO: 1454754 - DNA, 15 bp, Homo sapiens
gagagaaaaatttgc

SEQ ID NO: 1454755 - DNA, 15 bp, Homo sapiens
ggagagaaaaatttg

SEQ ID NO: 1454756 - DNA, 15 bp, Homo sapiens
tggagagaaaaattt

SEQ ID NO: 1454757 - DNA, 15 bp, Homo sapiens
ttggagagaaaaatt

SEQ ID NO: 1454758 - DNA, 15 bp, Homo sapiens
tttggagagaaaaat

SEQ ID NO: 1454759 - DNA, 15 bp, Homo sapiens
ttttggagagaaaaa

SEQ ID NO: 1454760 - DNA, 15 bp, Homo sapiens
tttttggagagaaaa

SEQ ID NO: 1454761 - DNA, 15 bp, Homo sapiens
gtttttggagagaaa

SEQ ID NO: 1454762 - DNA, 15 bp, Homo sapiens
agtttttggagagaa

SEQ ID NO: 1454763 - DNA, 15 bp, Homo sapiens
cagtttttggagaga

SEQ ID NO: 1454764 - DNA, 15 bp, Homo sapiens
gcagtttttggagag

SEQ ID NO: 1454765 - DNA, 15 bp, Homo sapiens
tgcagtttttggaga

SEQ ID NO: 1454766 - DNA, 15 bp, Homo sapiens
ttgcagtttttggag

SEQ ID NO: 1454767 - DNA, 15 bp, Homo sapiens
cttgcagtttttgga

SEQ ID NO: 1454768 - DNA, 15 bp, Homo sapiens
acttgcagtttttgg

SEQ ID NO: 1454769 - DNA, 15 bp, Homo sapiens
aacttgcagtttttg

SEQ ID NO: 1454770 - DNA, 15 bp, Homo sapiens
aaacttgcagttttt

SEQ ID NO: 1454771 - DNA, 15 bp, Homo sapiens
caaacttgcagtttt

SEQ ID NO: 1454772 - DNA, 15 bp, Homo sapiens
ccaaacttgcagttt

SEQ ID NO: 1454773 - DNA, 15 bp, Homo sapiens
cccaaacttgcagtt

SEQ ID NO: 1454774 - DNA, 15 bp, Homo sapiens
ccccaaacttgcagt

SEQ ID NO: 1454775 - DNA, 15 bp, Homo sapiens
gccccaaacttgcag

SEQ ID NO: 1454776 - DNA, 15 bp, Homo sapiens
agccccaaacttgca

SEQ ID NO: 1454777 - DNA, 15 bp, Homo sapiens
aagccccaaacttgc

SEQ ID NO: 1454778 - DNA, 15 bp, Homo sapiens
caagccccaaacttg

SEQ ID NO: 1454779 - DNA, 15 bp, Homo sapiens
tcaagccccaaactt

SEQ ID NO: 1454780 - DNA, 15 bp, Homo sapiens
atcaagccccaaact

SEQ ID NO: 1454781 - DNA, 15 bp, Homo sapiens
aatcaagccccaaac

SEQ ID NO: 1454782 - DNA, 15 bp, Homo sapiens
aaatcaagccccaaa

SEQ ID NO: 1454783 - DNA, 15 bp, Homo sapiens
taaatcaagccccaa

SEQ ID NO: 1454784 - DNA, 15 bp, Homo sapiens
ttaaatcaagcccca

SEQ ID NO: 1454785 - DNA, 15 bp, Homo sapiens
attaaatcaagcccc

SEQ ID NO: 1454786 - DNA, 15 bp, Homo sapiens
aattaaatcaagccc

SEQ ID NO: 1454787 - DNA, 15 bp, Homo sapiens
aaattaaatcaagcc

SEQ ID NO: 1454788 - DNA, 15 bp, Homo sapiens
aaaattaaatcaagc

SEQ ID NO: 1454789 - DNA, 15 bp, Homo sapiens
gaaaattaaatcaag

SEQ ID NO: 1454790 - DNA, 15 bp, Homo sapiens
agaaaattaaatcaa

SEQ ID NO: 1454791 - DNA, 15 bp, Homo sapiens
gagaaaattaaatca

SEQ ID NO: 1454792 - DNA, 15 bp, Homo sapiens
ggagaaaattaaatc

SEQ ID NO: 1454793 - DNA, 15 bp, Homo sapiens
tggagaaaattaaat

SEQ ID NO: 1454794 - DNA, 15 bp, Homo sapiens
atggagaaaattaaa

SEQ ID NO: 1454795 - DNA, 15 bp, Homo sapiens
catggagaaaattaa

SEQ ID NO: 1454796 - DNA, 15 bp, Homo sapiens
tcatggagaaaatta

SEQ ID NO: 1454797 - DNA, 15 bp, Homo sapiens
ttcatggagaaaatt

SEQ ID NO: 1454798 - DNA, 15 bp, Homo sapiens
cttcatggagaaaat

SEQ ID NO: 1454799 - DNA, 15 bp, Homo sapiens
tcttcatggagaaaa

SEQ ID NO: 1454800 - DNA, 15 bp, Homo sapiens
ttcttcatggagaaa

SEQ ID NO: 1454801 - DNA, 15 bp, Homo sapiens
attcttcatggagaa

SEQ ID NO: 1454802 - DNA, 15 bp, Homo sapiens
tattcttcatggaga

SEQ ID NO: 1454803 - DNA, 15 bp, Homo sapiens
ctattcttcatggag

SEQ ID NO: 1454804 - DNA, 15 bp, Homo sapiens
cctattcttcatgga

SEQ ID NO: 1454805 - DNA, 15 bp, Homo sapiens
gcctattcttcatgg

SEQ ID NO: 1454806 - DNA, 15 bp, Homo sapiens
tgcctattcttcatg

SEQ ID NO: 1454807 - DNA, 15 bp, Homo sapiens
ttgcctattcttcat

SEQ ID NO: 1454808 - DNA, 15 bp, Homo sapiens
cttgcctattcttca

SEQ ID NO: 1454809 - DNA, 15 bp, Homo sapiens
gcttgcctattcttc

SEQ ID NO: 1454810 - DNA, 15 bp, Homo sapiens
agcttgcctattctt

SEQ ID NO: 1454811 - DNA, 15 bp, Homo sapiens
aagcttgcctattct

SEQ ID NO: 1454812 - DNA, 15 bp, Homo sapiens
caagcttgcctattc

SEQ ID NO: 1454813 - DNA, 15 bp, Homo sapiens
tcaagcttgcctatt

SEQ ID NO: 1454814 - DNA, 15 bp, Homo sapiens
atcaagcttgcctat

SEQ ID NO: 1454815 - DNA, 15 bp, Homo sapiens
catcaagcttgccta

SEQ ID NO: 1454816 - DNA, 15 bp, Homo sapiens
ccatcaagcttgcct

SEQ ID NO: 1454817 - DNA, 15 bp, Homo sapiens
cccatcaagcttgcc

SEQ ID NO: 1454818 - DNA, 15 bp, Homo sapiens
gcccatcaagcttgc

SEQ ID NO: 1454819 - DNA, 15 bp, Homo sapiens
tgcccatcaagcttg

SEQ ID NO: 1454820 - DNA, 15 bp, Homo sapiens
ctgcccatcaagctt

SEQ ID NO: 1454821 - DNA, 15 bp, Homo sapiens
gctgcccatcaagct

SEQ ID NO: 1454822 - DNA, 15 bp, Homo sapiens
tgctgcccatcaagc

SEQ ID NO: 1454823 - DNA, 15 bp, Homo sapiens
ttgctgcccatcaag

SEQ ID NO: 1454824 - DNA, 15 bp, Homo sapiens
gttgctgcccatcaa

SEQ ID NO: 1454825 - DNA, 15 bp, Homo sapiens
agttgctgcccatca

SEQ ID NO: 1454826 - DNA, 15 bp, Homo sapiens
gagttgctgcccatc

SEQ ID NO: 1454827 - DNA, 15 bp, Homo sapiens
agagttgctgcccat

SEQ ID NO: 1454828 - DNA, 15 bp, Homo sapiens
aagagttgctgccca

SEQ ID NO: 1454829 - DNA, 15 bp, Homo sapiens
caagagttgctgccc

SEQ ID NO: 1454830 - DNA, 15 bp, Homo sapiens
acaagagttgctgcc

SEQ ID NO: 1454831 - DNA, 15 bp, Homo sapiens
tacaagagttgctgc

SEQ ID NO: 1454832 - DNA, 15 bp, Homo sapiens
gtacaagagttgctg

SEQ ID NO: 1454833 - DNA, 15 bp, Homo sapiens
tgtacaagagttgct

SEQ ID NO: 1454834 - DNA, 15 bp, Homo sapiens
ttgtacaagagttgc

SEQ ID NO: 1454835 - DNA, 15 bp, Homo sapiens
attgtacaagagttg

SEQ ID NO: 1454836 - DNA, 15 bp, Homo sapiens
aattgtacaagagtt

SEQ ID NO: 1454837 - DNA, 15 bp, Homo sapiens
taattgtacaagagt

SEQ ID NO: 1454838 - DNA, 15 bp, Homo sapiens
ttaattgtacaagag

SEQ ID NO: 1454839 - DNA, 15 bp, Homo sapiens
tttaattgtacaaga

SEQ ID NO: 1454840 - DNA, 15 bp, Homo sapiens
gtttaattgtacaag

SEQ ID NO: 1454841 - DNA, 15 bp, Homo sapiens
tgtttaattgtacaa

SEQ ID NO: 1454842 - DNA, 15 bp, Homo sapiens
atgtttaattgtaca

SEQ ID NO: 1454843 - DNA, 15 bp, Homo sapiens
aatgtttaattgtac

SEQ ID NO: 1454844 - DNA, 15 bp, Homo sapiens
taatgtttaattgta

SEQ ID NO: 1454845 - DNA, 15 bp, Homo sapiens
ctaatgtttaattgt

SEQ ID NO: 1454846 - DNA, 15 bp, Homo sapiens
actaatgtttaattg

SEQ ID NO: 1454847 - DNA, 15 bp, Homo sapiens
tactaatgtttaatt

SEQ ID NO: 1454848 - DNA, 15 bp, Homo sapiens
gtactaatgtttaat

SEQ ID NO: 1454849 - DNA, 15 bp, Homo sapiens
agtactaatgtttaa

SEQ ID NO: 1454850 - DNA, 15 bp, Homo sapiens
aagtactaatgttta

SEQ ID NO: 1454851 - DNA, 15 bp, Homo sapiens
taagtactaatgttt

SEQ ID NO: 1454852 - DNA, 15 bp, Homo sapiens
ttaagtactaatgtt

SEQ ID NO: 1454853 - DNA, 15 bp, Homo sapiens
tttaagtactaatgt

SEQ ID NO: 1454854 - DNA, 15 bp, Homo sapiens
ttttaagtactaatg

SEQ ID NO: 1454855 - DNA, 15 bp, Homo sapiens
attttaagtactaat

SEQ ID NO: 1454856 - DNA, 15 bp, Homo sapiens
aattttaagtactaa

SEQ ID NO: 1454857 - DNA, 15 bp, Homo sapiens
taattttaagtacta

SEQ ID NO: 1454858 - DNA, 15 bp, Homo sapiens
ttaattttaagtact

SEQ ID NO: 1454859 - DNA, 15 bp, Homo sapiens
gttaattttaagtac

SEQ ID NO: 1454860 - DNA, 15 bp, Homo sapiens
ggttaattttaagta

SEQ ID NO: 1454861 - DNA, 15 bp, Homo sapiens
aggttaattttaagt

SEQ ID NO: 1454862 - DNA, 15 bp, Homo sapiens
taggttaattttaag

SEQ ID NO: 1454863 - DNA, 15 bp, Homo sapiens
gtaggttaattttaa

SEQ ID NO: 1454864 - DNA, 15 bp, Homo sapiens
agtaggttaatttta

SEQ ID NO: 1454865 - DNA, 15 bp, Homo sapiens
aagtaggttaatttt

SEQ ID NO: 1454866 - DNA, 15 bp, Homo sapiens
aaagtaggttaattt

SEQ ID NO: 1454867 - DNA, 15 bp, Homo sapiens
caaagtaggttaatt

SEQ ID NO: 1454868 - DNA, 15 bp, Homo sapiens
tcaaagtaggttaat

SEQ ID NO: 1454869 - DNA, 15 bp, Homo sapiens
ctcaaagtaggttaa

SEQ ID NO: 1454870 - DNA, 15 bp, Homo sapiens
tctcaaagtaggtta

SEQ ID NO: 1454871 - DNA, 15 bp, Homo sapiens
ttctcaaagtaggtt

SEQ ID NO: 1454872 - DNA, 15 bp, Homo sapiens
tttctcaaagtaggt

SEQ ID NO: 1454873 - DNA, 15 bp, Homo sapiens
ttttctcaaagtagg

SEQ ID NO: 1454874 - DNA, 15 bp, Homo sapiens
gttttctcaaagtag

SEQ ID NO: 1454875 - DNA, 15 bp, Homo sapiens
tgttttctcaaagta

SEQ ID NO: 1454876 - DNA, 15 bp, Homo sapiens
ctgttttctcaaagt

SEQ ID NO: 1454877 - DNA, 15 bp, Homo sapiens
gctgttttctcaaag

SEQ ID NO: 1454878 - DNA, 15 bp, Homo sapiens
agctgttttctcaaa

SEQ ID NO: 1454879 - DNA, 15 bp, Homo sapiens
tagctgttttctcaa

SEQ ID NO: 1454880 - DNA, 15 bp, Homo sapiens
ttagctgttttctca

SEQ ID NO: 1454881 - DNA, 15 bp, Homo sapiens
cttagctgttttctc

SEQ ID NO: 1454882 - DNA, 15 bp, Homo sapiens
ccttagctgttttct

SEQ ID NO: 1454883 - DNA, 15 bp, Homo sapiens
tccttagctgttttc

SEQ ID NO: 1454884 - DNA, 15 bp, Homo sapiens
ttccttagctgtttt

SEQ ID NO: 1454885 - DNA, 15 bp, Homo sapiens
tttccttagctgttt

SEQ ID NO: 1454886 - DNA, 15 bp, Homo sapiens
ttttccttagctgtt

SEQ ID NO: 1454887 - DNA, 15 bp, Homo sapiens
attttccttagctgt

SEQ ID NO: 1454888 - DNA, 15 bp, Homo sapiens
cattttccttagctg

SEQ ID NO: 1454889 - DNA, 15 bp, Homo sapiens
acattttccttagct

SEQ ID NO: 1454890 - DNA, 15 bp, Homo sapiens
tacattttccttagc

SEQ ID NO: 1454891 - DNA, 15 bp, Homo sapiens
ttacattttccttag

SEQ ID NO: 1454892 - DNA, 15 bp, Homo sapiens
cttacattttcctta

SEQ ID NO: 1454893 - DNA, 15 bp, Homo sapiens
ccttacattttcctt

SEQ ID NO: 1454894 - DNA, 15 bp, Homo sapiens
gccttacattttcct

SEQ ID NO: 1454895 - DNA, 15 bp, Homo sapiens
agccttacattttcc

SEQ ID NO: 1454896 - DNA, 15 bp, Homo sapiens
cagccttacattttc

SEQ ID NO: 1454897 - DNA, 15 bp, Homo sapiens
acagccttacatttt

SEQ ID NO: 1454898 - DNA, 15 bp, Homo sapiens
aacagccttacattt

SEQ ID NO: 1454899 - DNA, 15 bp, Homo sapiens
aaacagccttacatt

SEQ ID NO: 1454900 - DNA, 15 bp, Homo sapiens
taaacagccttacat

SEQ ID NO: 1454901 - DNA, 15 bp, Homo sapiens
ataaacagccttaca

SEQ ID NO: 1454902 - DNA, 15 bp, Homo sapiens
tataaacagccttac

SEQ ID NO: 1454903 - DNA, 15 bp, Homo sapiens
ttataaacagcctta

SEQ ID NO: 1454904 - DNA, 15 bp, Homo sapiens
gttataaacagcctt

SEQ ID NO: 1454905 - DNA, 15 bp, Homo sapiens
tgttataaacagcct

SEQ ID NO: 1454906 - DNA, 15 bp, Homo sapiens
atgttataaacagcc

SEQ ID NO: 1454907 - DNA, 15 bp, Homo sapiens
aatgttataaacagc

SEQ ID NO: 1454908 - DNA, 15 bp, Homo sapiens
gaatgttataaacag

SEQ ID NO: 1454909 - DNA, 15 bp, Homo sapiens
tgaatgttataaaca

SEQ ID NO: 1454910 - DNA, 15 bp, Homo sapiens
atgaatgttataaac

SEQ ID NO: 1454911 - DNA, 15 bp, Homo sapiens
tatgaatgttataaa

SEQ ID NO: 1454912 - DNA, 15 bp, Homo sapiens
gtatgaatgttataa

SEQ ID NO: 1454913 - DNA, 15 bp, Homo sapiens
tgtatgaatgttata

SEQ ID NO: 1454914 - DNA, 15 bp, Homo sapiens
atgtatgaatgttat

SEQ ID NO: 1454915 - DNA, 15 bp, Homo sapiens
gatgtatgaatgtta

SEQ ID NO: 1454916 - DNA, 15 bp, Homo sapiens
agatgtatgaatgtt

SEQ ID NO: 1454917 - DNA, 15 bp, Homo sapiens
tagatgtatgaatgt

SEQ ID NO: 1454918 - DNA, 15 bp, Homo sapiens
atagatgtatgaatg

SEQ ID NO: 1454919 - DNA, 15 bp, Homo sapiens
tatagatgtatgaat

SEQ ID NO: 1454920 - DNA, 15 bp, Homo sapiens
ttatagatgtatgaa

SEQ ID NO: 1454921 - DNA, 15 bp, Homo sapiens
attatagatgtatga

SEQ ID NO: 1454922 - DNA, 15 bp, Homo sapiens
gattatagatgtatg

SEQ ID NO: 1454923 - DNA, 15 bp, Homo sapiens
tgattatagatgtat

SEQ ID NO: 1454924 - DNA, 15 bp, Homo sapiens
ctgattatagatgta

SEQ ID NO: 1454925 - DNA, 15 bp, Homo sapiens
gctgattatagatgt

SEQ ID NO: 1454926 - DNA, 15 bp, Homo sapiens
ggctgattatagatg

SEQ ID NO: 1454927 - DNA, 15 bp, Homo sapiens
aggctgattatagat

SEQ ID NO: 1454928 - DNA, 15 bp, Homo sapiens
aaggctgattataga

SEQ ID NO: 1454929 - DNA, 15 bp, Homo sapiens
aaaggctgattatag

SEQ ID NO: 1454930 - DNA, 15 bp, Homo sapiens
gaaaggctgattata

SEQ ID NO: 1454931 - DNA, 15 bp, Homo sapiens
cgaaaggctgattat

SEQ ID NO: 1454932 - DNA, 15 bp, Homo sapiens
acgaaaggctgatta

SEQ ID NO: 1454933 - DNA, 15 bp, Homo sapiens
aacgaaaggctgatt

SEQ ID NO: 1454934 - DNA, 15 bp, Homo sapiens
gaacgaaaggctgat

SEQ ID NO: 1454935 - DNA, 15 bp, Homo sapiens
tgaacgaaaggctga

SEQ ID NO: 1454936 - DNA, 15 bp, Homo sapiens
atgaacgaaaggctg

SEQ ID NO: 1454937 - DNA, 15 bp, Homo sapiens
tatgaacgaaaggct

SEQ ID NO: 1454938 - DNA, 15 bp, Homo sapiens
ctatgaacgaaaggc

SEQ ID NO: 1454939 - DNA, 15 bp, Homo sapiens
tctatgaacgaaagg

SEQ ID NO: 1454940 - DNA, 15 bp, Homo sapiens
atctatgaacgaaag

SEQ ID NO: 1454941 - DNA, 15 bp, Homo sapiens
tatctatgaacgaaa

SEQ ID NO: 1454942 - DNA, 15 bp, Homo sapiens
ctatctatgaacgaa

SEQ ID NO: 1454943 - DNA, 15 bp, Homo sapiens
cctatctatgaacga

SEQ ID NO: 1454944 - DNA, 15 bp, Homo sapiens
tcctatctatgaacg

SEQ ID NO: 1454945 - DNA, 15 bp, Homo sapiens
ttcctatctatgaac

SEQ ID NO: 1454946 - DNA, 15 bp, Homo sapiens
cttcctatctatgaa

SEQ ID NO: 1454947 - DNA, 15 bp, Homo sapiens
gcttcctatctatga

SEQ ID NO: 1454948 - DNA, 15 bp, Homo sapiens
tgcttcctatctatg

SEQ ID NO: 1454949 - DNA, 15 bp, Homo sapiens
atgcttcctatctat

SEQ ID NO: 1454950 - DNA, 15 bp, Homo sapiens
gatgcttcctatcta

SEQ ID NO: 1454951 - DNA, 15 bp, Homo sapiens
agatgcttcctatct

SEQ ID NO: 1454952 - DNA, 15 bp, Homo sapiens
cagatgcttcctatc

SEQ ID NO: 1454953 - DNA, 15 bp, Homo sapiens
acagatgcttcctat

SEQ ID NO: 1454954 - DNA, 15 bp, Homo sapiens
cacagatgcttccta

SEQ ID NO: 1454955 - DNA, 15 bp, Homo sapiens
ccacagatgcttcct

SEQ ID NO: 1454956 - DNA, 15 bp, Homo sapiens
tccacagatgcttcc

SEQ ID NO: 1454957 - DNA, 15 bp, Homo sapiens
ctccacagatgcttc

SEQ ID NO: 1454958 - DNA, 15 bp, Homo sapiens
gctccacagatgctt

SEQ ID NO: 1454959 - DNA, 15 bp, Homo sapiens
tgctccacagatgct

SEQ ID NO: 1454960 - DNA, 15 bp, Homo sapiens
ttgctccacagatgc

SEQ ID NO: 1454961 - DNA, 15 bp, Homo sapiens
tttgctccacagatg

SEQ ID NO: 1454962 - DNA, 15 bp, Homo sapiens
gtttgctccacagat

SEQ ID NO: 1454963 - DNA, 15 bp, Homo sapiens
ggtttgctccacaga

SEQ ID NO: 1454964 - DNA, 15 bp, Homo sapiens
tggtttgctccacag

SEQ ID NO: 1454965 - DNA, 15 bp, Homo sapiens
atggtttgctccaca

SEQ ID NO: 1454966 - DNA, 15 bp, Homo sapiens
tatggtttgctccac

SEQ ID NO: 1454967 - DNA, 15 bp, Homo sapiens
ttatggtttgctcca

SEQ ID NO: 1454968 - DNA, 15 bp, Homo sapiens
attatggtttgctcc

SEQ ID NO: 1454969 - DNA, 15 bp, Homo sapiens
gattatggtttgctc

SEQ ID NO: 1454970 - DNA, 15 bp, Homo sapiens
agattatggtttgct

SEQ ID NO: 1454971 - DNA, 15 bp, Homo sapiens
aagattatggtttgc

SEQ ID NO: 1454972 - DNA, 15 bp, Homo sapiens
caagattatggtttg

SEQ ID NO: 1454973 - DNA, 15 bp, Homo sapiens
acaagattatggttt

SEQ ID NO: 1454974 - DNA, 15 bp, Homo sapiens
aacaagattatggtt

SEQ ID NO: 1454975 - DNA, 15 bp, Homo sapiens
taacaagattatggt

SEQ ID NO: 1454976 - DNA, 15 bp, Homo sapiens
ataacaagattatgg

SEQ ID NO: 1454977 - DNA, 15 bp, Homo sapiens
tataacaagattatg

SEQ ID NO: 1454978 - DNA, 15 bp, Homo sapiens
ttataacaagattat

SEQ ID NO: 1454979 - DNA, 15 bp, Homo sapiens
attataacaagatta

SEQ ID NO: 1454980 - DNA, 15 bp, Homo sapiens
tattataacaagatt

SEQ ID NO: 1454981 - DNA, 15 bp, Homo sapiens
gtattataacaagat

SEQ ID NO: 1454982 - DNA, 15 bp, Homo sapiens
ggtattataacaaga

SEQ ID NO: 1454983 - DNA, 15 bp, Homo sapiens
aggtattataacaag

SEQ ID NO: 1454984 - DNA, 15 bp, Homo sapiens
gaggtattataacaa

SEQ ID NO: 1454985 - DNA, 15 bp, Homo sapiens
ggaggtattataaca

SEQ ID NO: 1454986 - DNA, 15 bp, Homo sapiens
gggaggtattataac

SEQ ID NO: 1454987 - DNA, 15 bp, Homo sapiens
agggaggtattataa

SEQ ID NO: 1454988 - DNA, 15 bp, Homo sapiens
tagggaggtattata

SEQ ID NO: 1454989 - DNA, 15 bp, Homo sapiens
ctagggaggtattat

SEQ ID NO: 1454990 - DNA, 15 bp, Homo sapiens
gctagggaggtatta

SEQ ID NO: 1454991 - DNA, 15 bp, Homo sapiens
ggctagggaggtatt

SEQ ID NO: 1454992 - DNA, 15 bp, Homo sapiens
aggctagggaggtat

SEQ ID NO: 1454993 - DNA, 15 bp, Homo sapiens
aaggctagggaggta

SEQ ID NO: 1454994 - DNA, 15 bp, Homo sapiens
aaaggctagggaggt

SEQ ID NO: 1454995 - DNA, 15 bp, Homo sapiens
aaaaggctagggagg

SEQ ID NO: 1454996 - DNA, 15 bp, Homo sapiens
aaaaaggctagggag

SEQ ID NO: 1454997 - DNA, 15 bp, Homo sapiens
gaaaaaggctaggga

SEQ ID NO: 1454998 - DNA, 15 bp, Homo sapiens
agaaaaaggctaggg

SEQ ID NO: 1454999 - DNA, 15 bp, Homo sapiens
aagaaaaaggctagg

SEQ ID NO: 1455000 - DNA, 15 bp, Homo sapiens
aaagaaaaaggctag

SEQ ID NO: 1455001 - DNA, 15 bp, Homo sapiens
aaaagaaaaaggcta

SEQ ID NO: 1455002 - DNA, 15 bp, Homo sapiens
aaaaagaaaaaggct

SEQ ID NO: 1455003 - DNA, 15 bp, Homo sapiens
gaaaaagaaaaaggc

SEQ ID NO: 1455004 - DNA, 15 bp, Homo sapiens
tgaaaaagaaaaagg

SEQ ID NO: 1455005 - DNA, 15 bp, Homo sapiens
atgaaaaagaaaaag

SEQ ID NO: 1455006 - DNA, 15 bp, Homo sapiens
gatgaaaaagaaaaa

SEQ ID NO: 1455007 - DNA, 15 bp, Homo sapiens
agatgaaaaagaaaa

SEQ ID NO: 1455008 - DNA, 15 bp, Homo sapiens
aagatgaaaaagaaa

SEQ ID NO: 1455009 - DNA, 15 bp, Homo sapiens
aaagatgaaaaagaa

SEQ ID NO: 1455010 - DNA, 15 bp, Homo sapiens
aaaagatgaaaaaga

SEQ ID NO: 1455011 - DNA, 15 bp, Homo sapiens
aaaaagatgaaaaag

SEQ ID NO: 1455012 - DNA, 15 bp, Homo sapiens
aaaaaagatgaaaaa

SEQ ID NO: 1455013 - DNA, 15 bp, Homo sapiens
aaaaaaagatgaaaa

SEQ ID NO: 1455014 - DNA, 15 bp, Homo sapiens
caaaaaaaaaagatg

SEQ ID NO: 1455015 - DNA, 15 bp, Homo sapiens
ccaaaaaaaaaagat

SEQ ID NO: 1455016 - DNA, 15 bp, Homo sapiens
tccaaaaaaaaaaga

SEQ ID NO: 1455017 - DNA, 15 bp, Homo sapiens
ctccaaaaaaaaaag

SEQ ID NO: 1455018 - DNA, 15 bp, Homo sapiens
ttctccaaaaaaaaa

SEQ ID NO: 1455019 - DNA, 15 bp, Homo sapiens
cttctccaaaaaaaa

SEQ ID NO: 1455020 - DNA, 15 bp, Homo sapiens
ccttctccaaaaaaa

SEQ ID NO: 1455021 - DNA, 15 bp, Homo sapiens
accttctccaaaaaa

SEQ ID NO: 1455022 - DNA, 15 bp, Homo sapiens
gaccttctccaaaaa

SEQ ID NO: 1455023 - DNA, 15 bp, Homo sapiens
agaccttctccaaaa

SEQ ID NO: 1455024 - DNA, 15 bp, Homo sapiens
gagaccttctccaaa

SEQ ID NO: 1455025 - DNA, 15 bp, Homo sapiens
tgagaccttctccaa

SEQ ID NO: 1455026 - DNA, 15 bp, Homo sapiens
ctgagaccttctcca

SEQ ID NO: 1455027 - DNA, 15 bp, Homo sapiens
actgagaccttctcc

SEQ ID NO: 1455028 - DNA, 15 bp, Homo sapiens
gactgagaccttctc

SEQ ID NO: 1455029 - DNA, 15 bp, Homo sapiens
agactgagaccttct

SEQ ID NO: 1455030 - DNA, 15 bp, Homo sapiens
cagactgagaccttc

SEQ ID NO: 1455031 - DNA, 15 bp, Homo sapiens
acagactgagacctt

SEQ ID NO: 1455032 - DNA, 15 bp, Homo sapiens
gacagactgagacct

SEQ ID NO: 1455033 - DNA, 15 bp, Homo sapiens
cgacagactgagacc

SEQ ID NO: 1455034 - DNA, 15 bp, Homo sapiens
gcgacagactgagac

SEQ ID NO: 1455035 - DNA, 15 bp, Homo sapiens
ggcgacagactgaga

SEQ ID NO: 1455036 - DNA, 15 bp, Homo sapiens
gggcgacagactgag

SEQ ID NO: 1455037 - DNA, 15 bp, Homo sapiens
tgggcgacagactga

SEQ ID NO: 1455038 - DNA, 15 bp, Homo sapiens
ctgggcgacagactg

SEQ ID NO: 1455039 - DNA, 15 bp, Homo sapiens
cctgggcgacagact

SEQ ID NO: 1455040 - DNA, 15 bp, Homo sapiens
gcctgggcgacagac

SEQ ID NO: 1455041 - DNA, 15 bp, Homo sapiens
ttccagcctgggcga

SEQ ID NO: 1455042 - DNA, 15 bp, Homo sapiens
attccagcctgggcg

SEQ ID NO: 1455043 - DNA, 15 bp, Homo sapiens
cattccagcctgggc

SEQ ID NO: 1455044 - DNA, 15 bp, Homo sapiens
ggcattccagcctgg

SEQ ID NO: 1455045 - DNA, 15 bp, Homo sapiens
cggcattccagcctg

SEQ ID NO: 1455046 - DNA, 15 bp, Homo sapiens
acggcattccagcct

SEQ ID NO: 1455047 - DNA, 15 bp, Homo sapiens
cacggcattccagcc

SEQ ID NO: 1455048 - DNA, 15 bp, Homo sapiens
ccacggcattccagc

SEQ ID NO: 1455049 - DNA, 15 bp, Homo sapiens
accacggcattccag

SEQ ID NO: 1455050 - DNA, 15 bp, Homo sapiens
caccacggcattcca

SEQ ID NO: 1455051 - DNA, 15 bp, Homo sapiens
gcaccacggcattcc

SEQ ID NO: 1455052 - DNA, 15 bp, Homo sapiens
tgcaccacggcattc

SEQ ID NO: 1455053 - DNA, 15 bp, Homo sapiens
ttgcaccacggcatt

SEQ ID NO: 1455054 - DNA, 15 bp, Homo sapiens
attgcaccacggcat

SEQ ID NO: 1455055 - DNA, 15 bp, Homo sapiens
gattgcaccacggca

SEQ ID NO: 1455056 - DNA, 15 bp, Homo sapiens
agattgcaccacggc

SEQ ID NO: 1455057 - DNA, 15 bp, Homo sapiens
aagattgcaccacgg

SEQ ID NO: 1455058 - DNA, 15 bp, Homo sapiens
caagattgcaccacg

SEQ ID NO: 1455059 - DNA, 15 bp, Homo sapiens
acagtgagccaagat

SEQ ID NO: 1455060 - DNA, 15 bp, Homo sapiens
tacagtgagccaaga

SEQ ID NO: 1455061 - DNA, 15 bp, Homo sapiens
ctacagtgagccaag

SEQ ID NO: 1455062 - DNA, 15 bp, Homo sapiens
cctacagtgagccaa

SEQ ID NO: 1455063 - DNA, 15 bp, Homo sapiens
gcctacagtgagcca

SEQ ID NO: 1455064 - DNA, 15 bp, Homo sapiens
ggcctacagtgagcc

SEQ ID NO: 1455065 - DNA, 15 bp, Homo sapiens
gggcctacagtgagc

SEQ ID NO: 1455066 - DNA, 15 bp, Homo sapiens
tgggcctacagtgag

SEQ ID NO: 1455067 - DNA, 15 bp, Homo sapiens
gtgggcctacagtga

SEQ ID NO: 1455068 - DNA, 15 bp, Homo sapiens
agtgggcctacagtg

SEQ ID NO: 1455069 - DNA, 15 bp, Homo sapiens
cagtgggcctacagt

SEQ ID NO: 1455070 - DNA, 15 bp, Homo sapiens
gcagtgggcctacag

SEQ ID NO: 1455071 - DNA, 15 bp, Homo sapiens
tgcagtgggcctaca

SEQ ID NO: 1455072 - DNA, 15 bp, Homo sapiens
ctgcagtgggcctac

SEQ ID NO: 1455073 - DNA, 15 bp, Homo sapiens
gctgcagtgggccta

SEQ ID NO: 1455074 - DNA, 15 bp, Homo sapiens
ggctgcagtgggcct

SEQ ID NO: 1455075 - DNA, 15 bp, Homo sapiens
aggctgcagtgggcc

SEQ ID NO: 1455076 - DNA, 15 bp, Homo sapiens
gaggctgcagtgggc

SEQ ID NO: 1455077 - DNA, 15 bp, Homo sapiens
tgaggctgcagtggg

SEQ ID NO: 1455078 - DNA, 15 bp, Homo sapiens
ttgaggctgcagtgg

SEQ ID NO: 1455079 - DNA, 15 bp, Homo sapiens
taggaggttgaggct

SEQ ID NO: 1455080 - DNA, 15 bp, Homo sapiens
ctaggaggttgaggc

SEQ ID NO: 1455081 - DNA, 15 bp, Homo sapiens
cctaggaggttgagg

SEQ ID NO: 1455082 - DNA, 15 bp, Homo sapiens
gcctaggaggttgag

SEQ ID NO: 1455083 - DNA, 15 bp, Homo sapiens
agcctaggaggttga

SEQ ID NO: 1455084 - DNA, 15 bp, Homo sapiens
gagcctaggaggttg

SEQ ID NO: 1455085 - DNA, 15 bp, Homo sapiens
tgagcctaggaggtt

SEQ ID NO: 1455086 - DNA, 15 bp, Homo sapiens
ttgagcctaggaggt

SEQ ID NO: 1455087 - DNA, 15 bp, Homo sapiens
cttgagcctaggagg

SEQ ID NO: 1455088 - DNA, 15 bp, Homo sapiens
cgcttgagcctagga

SEQ ID NO: 1455089 - DNA, 15 bp, Homo sapiens
tcgcttgagcctagg

SEQ ID NO: 1455090 - DNA, 15 bp, Homo sapiens
atcgcttgagcctag

SEQ ID NO: 1455091 - DNA, 15 bp, Homo sapiens
tatcgcttgagccta

SEQ ID NO: 1455092 - DNA, 15 bp, Homo sapiens
gtatcgcttgagcct

SEQ ID NO: 1455093 - DNA, 15 bp, Homo sapiens
aagtatcgcttgagc

SEQ ID NO: 1455094 - DNA, 15 bp, Homo sapiens
aaagtatcgcttgag

SEQ ID NO: 1455095 - DNA, 15 bp, Homo sapiens
gaaagtatcgcttga

SEQ ID NO: 1455096 - DNA, 15 bp, Homo sapiens
tgaaagtatcgcttg

SEQ ID NO: 1455097 - DNA, 15 bp, Homo sapiens
gtgaaagtatcgctt

SEQ ID NO: 1455098 - DNA, 15 bp, Homo sapiens
ggtgaaagtatcgct

SEQ ID NO: 1455099 - DNA, 15 bp, Homo sapiens
aggtgaaagtatcgc

SEQ ID NO: 1455100 - DNA, 15 bp, Homo sapiens
gaggtgaaagtatcg

SEQ ID NO: 1455101 - DNA, 15 bp, Homo sapiens
tgaggtgaaagtatc

SEQ ID NO: 1455102 - DNA, 15 bp, Homo sapiens
ctgaggtgaaagtat

SEQ ID NO: 1455103 - DNA, 15 bp, Homo sapiens
gctgaggtgaaagta

SEQ ID NO: 1455104 - DNA, 15 bp, Homo sapiens
ggctgaggtgaaagt

SEQ ID NO: 1455105 - DNA, 15 bp, Homo sapiens
gggctgaggtgaaag

SEQ ID NO: 1455106 - DNA, 15 bp, Homo sapiens
ggggctgaggtgaaa

SEQ ID NO: 1455107 - DNA, 15 bp, Homo sapiens
aggggctgaggtgaa

SEQ ID NO: 1455108 - DNA, 15 bp, Homo sapiens
taggggctgaggtga

SEQ ID NO: 1455109 - DNA, 15 bp, Homo sapiens
ttaggggctgaggtg

SEQ ID NO: 1455110 - DNA, 15 bp, Homo sapiens
tttaggggctgaggt

SEQ ID NO: 1455111 - DNA, 15 bp, Homo sapiens
atttaggggctgagg

SEQ ID NO: 1455112 - DNA, 15 bp, Homo sapiens
tatttaggggctgag

SEQ ID NO: 1455113 - DNA, 15 bp, Homo sapiens
ctatttaggggctga

SEQ ID NO: 1455114 - DNA, 15 bp, Homo sapiens
gctatttaggggctg

SEQ ID NO: 1455115 - DNA, 15 bp, Homo sapiens
ggctatttaggggct

SEQ ID NO: 1455116 - DNA, 15 bp, Homo sapiens
tggctatttaggggc

SEQ ID NO: 1455117 - DNA, 15 bp, Homo sapiens
ttggctatttagggg

SEQ ID NO: 1455118 - DNA, 15 bp, Homo sapiens
cttggctatttaggg

SEQ ID NO: 1455119 - DNA, 15 bp, Homo sapiens
tcttggctatttagg

SEQ ID NO: 1455120 - DNA, 15 bp, Homo sapiens
gtcttggctatttag

SEQ ID NO: 1455121 - DNA, 15 bp, Homo sapiens
agtcttggctattta

SEQ ID NO: 1455122 - DNA, 15 bp, Homo sapiens
tagtcttggctattt

SEQ ID NO: 1455123 - DNA, 15 bp, Homo sapiens
gtagtcttggctatt

SEQ ID NO: 1455124 - DNA, 15 bp, Homo sapiens
tgtagtcttggctat

SEQ ID NO: 1455125 - DNA, 15 bp, Homo sapiens
ctgtagtcttggcta

SEQ ID NO: 1455126 - DNA, 15 bp, Homo sapiens
cctgtagtcttggct

SEQ ID NO: 1455127 - DNA, 15 bp, Homo sapiens
gcctgtagtcttggc

SEQ ID NO: 1455128 - DNA, 15 bp, Homo sapiens
cgcctgtagtcttgg

SEQ ID NO: 1455129 - DNA, 15 bp, Homo sapiens
acgcctgtagtcttg

SEQ ID NO: 1455130 - DNA, 15 bp, Homo sapiens
tacgcctgtagtctt

SEQ ID NO: 1455131 - DNA, 15 bp, Homo sapiens
atacgcctgtagtct

SEQ ID NO: 1455132 - DNA, 15 bp, Homo sapiens
catacgcctgtagtc

SEQ ID NO: 1455133 - DNA, 15 bp, Homo sapiens
gcatacgcctgtagt

SEQ ID NO: 1455134 - DNA, 15 bp, Homo sapiens
ggcatacgcctgtag

SEQ ID NO: 1455135 - DNA, 15 bp, Homo sapiens
tggcatacgcctgta

SEQ ID NO: 1455136 - DNA, 15 bp, Homo sapiens
gtggcatacgcctgt

SEQ ID NO: 1455137 - DNA, 15 bp, Homo sapiens
ggtggcatacgcctg

SEQ ID NO: 1455138 - DNA, 15 bp, Homo sapiens
tggtggcatacgcct

SEQ ID NO: 1455139 - DNA, 15 bp, Homo sapiens
gtggtggcatacgcc

SEQ ID NO: 1455140 - DNA, 15 bp, Homo sapiens
cgtggtggcatacgc

SEQ ID NO: 1455141 - DNA, 15 bp, Homo sapiens
gcgtggtggcatacg

SEQ ID NO: 1455142 - DNA, 15 bp, Homo sapiens
ggcgtggtggcatac

SEQ ID NO: 1455143 - DNA, 15 bp, Homo sapiens
gggcgtggtggcata

SEQ ID NO: 1455144 - DNA, 15 bp, Homo sapiens
tgggcgtggtggcat

SEQ ID NO: 1455145 - DNA, 15 bp, Homo sapiens
atgggcgtggtggca

SEQ ID NO: 1455146 - DNA, 15 bp, Homo sapiens
gatgggcgtggtggc

SEQ ID NO: 1455147 - DNA, 15 bp, Homo sapiens
cgatgggcgtggtgg

SEQ ID NO: 1455148 - DNA, 15 bp, Homo sapiens
tcgatgggcgtggtg

SEQ ID NO: 1455149 - DNA, 15 bp, Homo sapiens
ttcgatgggcgtggt

SEQ ID NO: 1455150 - DNA, 15 bp, Homo sapiens
attcgatgggcgtgg

SEQ ID NO: 1455151 - DNA, 15 bp, Homo sapiens
aattcgatgggcgtg

SEQ ID NO: 1455152 - DNA, 15 bp, Homo sapiens
aaattcgatgggcgt

SEQ ID NO: 1455153 - DNA, 15 bp, Homo sapiens
aaaattcgatgggcg

SEQ ID NO: 1455154 - DNA, 15 bp, Homo sapiens
aaaaattcgatgggc

SEQ ID NO: 1455155 - DNA, 15 bp, Homo sapiens
aaaaaattcgatggg

SEQ ID NO: 1455156 - DNA, 15 bp, Homo sapiens
aaaaaaattcgatgg

SEQ ID NO: 1455157 - DNA, 15 bp, Homo sapiens
taaaaaaattcgatg

SEQ ID NO: 1455158 - DNA, 15 bp, Homo sapiens
ataaaaaaattcgat

SEQ ID NO: 1455159 - DNA, 15 bp, Homo sapiens
tataaaaaaattcga

SEQ ID NO: 1455160 - DNA, 15 bp, Homo sapiens
atataaaaaaattcg

SEQ ID NO: 1455161 - DNA, 15 bp, Homo sapiens
aatataaaaaaattc

SEQ ID NO: 1455162 - DNA, 15 bp, Homo sapiens
aaatataaaaaaatt

SEQ ID NO: 1455163 - DNA, 15 bp, Homo sapiens
aaaatataaaaaaat

SEQ ID NO: 1455164 - DNA, 15 bp, Homo sapiens
caaaatataaaaaaa

SEQ ID NO: 1455165 - DNA, 15 bp, Homo sapiens
acaaaatataaaaaa

SEQ ID NO: 1455166 - DNA, 15 bp, Homo sapiens
ctacaaaatataaaa

SEQ ID NO: 1455167 - DNA, 15 bp, Homo sapiens
tctacaaaatataaa

SEQ ID NO: 1455168 - DNA, 15 bp, Homo sapiens
ctctacaaaatataa

SEQ ID NO: 1455169 - DNA, 15 bp, Homo sapiens
tctctacaaaatata

SEQ ID NO: 1455170 - DNA, 15 bp, Homo sapiens
gtctctacaaaatat

SEQ ID NO: 1455171 - DNA, 15 bp, Homo sapiens
gcaacatagggagac

SEQ ID NO: 1455172 - DNA, 15 bp, Homo sapiens
ggcaacatagggaga

SEQ ID NO: 1455173 - DNA, 15 bp, Homo sapiens
ccaagaccagcctgg

SEQ ID NO: 1455174 - DNA, 15 bp, Homo sapiens
accaagaccagcctg

SEQ ID NO: 1455175 - DNA, 15 bp, Homo sapiens
gaccaagaccagcct

SEQ ID NO: 1455176 - DNA, 15 bp, Homo sapiens
agaccaagaccagcc

SEQ ID NO: 1455177 - DNA, 15 bp, Homo sapiens
cagaccaagaccagc

SEQ ID NO: 1455178 - DNA, 15 bp, Homo sapiens
ccagaccaagaccag

SEQ ID NO: 1455179 - DNA, 15 bp, Homo sapiens
cccagaccaagacca

SEQ ID NO: 1455180 - DNA, 15 bp, Homo sapiens
gcccagaccaagacc

SEQ ID NO: 1455181 - DNA, 15 bp, Homo sapiens
agcccagaccaagac

SEQ ID NO: 1455182 - DNA, 15 bp, Homo sapiens
gagcccagaccaaga

SEQ ID NO: 1455183 - DNA, 15 bp, Homo sapiens
tgagcccagaccaag

SEQ ID NO: 1455184 - DNA, 15 bp, Homo sapiens
ttgagcccagaccaa

SEQ ID NO: 1455185 - DNA, 15 bp, Homo sapiens
cttgagcccagacca

SEQ ID NO: 1455186 - DNA, 15 bp, Homo sapiens
gcttgagcccagacc

SEQ ID NO: 1455187 - DNA, 15 bp, Homo sapiens
tgcttgagcccagac

SEQ ID NO: 1455188 - DNA, 15 bp, Homo sapiens
ctgcttgagcccaga

SEQ ID NO: 1455189 - DNA, 15 bp, Homo sapiens
actgcttgagcccag

SEQ ID NO: 1455190 - DNA, 15 bp, Homo sapiens
gactgcttgagccca

SEQ ID NO: 1455191 - DNA, 15 bp, Homo sapiens
ggactgcttgagccc

SEQ ID NO: 1455192 - DNA, 15 bp, Homo sapiens
aggactgcttgagcc

SEQ ID NO: 1455193 - DNA, 15 bp, Homo sapiens
gaggactgcttgagc

SEQ ID NO: 1455194 - DNA, 15 bp, Homo sapiens
agggaggactgcttg

SEQ ID NO: 1455195 - DNA, 15 bp, Homo sapiens
gagggaggactgctt

SEQ ID NO: 1455196 - DNA, 15 bp, Homo sapiens
ggagggaggactgct

SEQ ID NO: 1455197 - DNA, 15 bp, Homo sapiens
aggagggaggactgc

SEQ ID NO: 1455198 - DNA, 15 bp, Homo sapiens
gaggagggaggactg

SEQ ID NO: 1455199 - DNA, 15 bp, Homo sapiens
cgaggagggaggact

SEQ ID NO: 1455200 - DNA, 15 bp, Homo sapiens
tcgaggagggaggac

SEQ ID NO: 1455201 - DNA, 15 bp, Homo sapiens
gtcgaggagggagga

SEQ ID NO: 1455202 - DNA, 15 bp, Homo sapiens
ggtcgaggagggagg

SEQ ID NO: 1455203 - DNA, 15 bp, Homo sapiens
aggtcgaggagggag

SEQ ID NO: 1455204 - DNA, 15 bp, Homo sapiens
gaggtcgaggaggga

SEQ ID NO: 1455205 - DNA, 15 bp, Homo sapiens
ggaggtcgaggaggg

SEQ ID NO: 1455206 - DNA, 15 bp, Homo sapiens
gggaggtcgaggagg

SEQ ID NO: 1455207 - DNA, 15 bp, Homo sapiens
tgggaggtcgaggag

SEQ ID NO: 1455208 - DNA, 15 bp, Homo sapiens
ttgggaggtcgagga

SEQ ID NO: 1455209 - DNA, 15 bp, Homo sapiens
tgcacagtggttcat

SEQ ID NO: 1455210 - DNA, 15 bp, Homo sapiens
atgcacagtggttca

SEQ ID NO: 1455211 - DNA, 15 bp, Homo sapiens
catgcacagtggttc

SEQ ID NO: 1455212 - DNA, 15 bp, Homo sapiens
ccatgcacagtggtt

SEQ ID NO: 1455213 - DNA, 15 bp, Homo sapiens
gccatgcacagtggt

SEQ ID NO: 1455214 - DNA, 15 bp, Homo sapiens
ggccatgcacagtgg

SEQ ID NO: 1455215 - DNA, 15 bp, Homo sapiens
tggccatgcacagtg

SEQ ID NO: 1455216 - DNA, 15 bp, Homo sapiens
gtggccatgcacagt

SEQ ID NO: 1455217 - DNA, 15 bp, Homo sapiens
ggtggccatgcacag

SEQ ID NO: 1455218 - DNA, 15 bp, Homo sapiens
aggtggccatgcaca

SEQ ID NO: 1455219 - DNA, 15 bp, Homo sapiens
gaggtggccatgcac

SEQ ID NO: 1455220 - DNA, 15 bp, Homo sapiens
ggaggtggccatgca

SEQ ID NO: 1455221 - DNA, 15 bp, Homo sapiens
gggaggtggccatgc

SEQ ID NO: 1455222 - DNA, 15 bp, Homo sapiens
tgggaggtggccatg

SEQ ID NO: 1455223 - DNA, 15 bp, Homo sapiens
ttgggaggtggccat

SEQ ID NO: 1455224 - DNA, 15 bp, Homo sapiens
cttgggaggtggcca

SEQ ID NO: 1455225 - DNA, 15 bp, Homo sapiens
gcttgggaggtggcc

SEQ ID NO: 1455226 - DNA, 15 bp, Homo sapiens
agcttgggaggtggc

SEQ ID NO: 1455227 - DNA, 15 bp, Homo sapiens
aagcttgggaggtgg

SEQ ID NO: 1455228 - DNA, 15 bp, Homo sapiens
aaagcttgggaggtg

SEQ ID NO: 1455229 - DNA, 15 bp, Homo sapiens
aaaagcttgggaggt

SEQ ID NO: 1455230 - DNA, 15 bp, Homo sapiens
taaaagcttgggagg

SEQ ID NO: 1455231 - DNA, 15 bp, Homo sapiens
ttaaaagcttgggag

SEQ ID NO: 1455232 - DNA, 15 bp, Homo sapiens
tttaaaagcttggga

SEQ ID NO: 1455233 - DNA, 15 bp, Homo sapiens
ttttaaaagcttggg

SEQ ID NO: 1455234 - DNA, 15 bp, Homo sapiens
cttttaaaagcttgg

SEQ ID NO: 1455235 - DNA, 15 bp, Homo sapiens
gcttttaaaagcttg

SEQ ID NO: 1455236 - DNA, 15 bp, Homo sapiens
ggcttttaaaagctt

SEQ ID NO: 1455237 - DNA, 15 bp, Homo sapiens
gggcttttaaaagct

SEQ ID NO: 1455238 - DNA, 15 bp, Homo sapiens
agggcttttaaaagc

SEQ ID NO: 1455239 - DNA, 15 bp, Homo sapiens
aagggcttttaaaag

SEQ ID NO: 1455240 - DNA, 15 bp, Homo sapiens
taagggcttttaaaa

SEQ ID NO: 1455241 - DNA, 15 bp, Homo sapiens
ataagggcttttaaa

SEQ ID NO: 1455242 - DNA, 15 bp, Homo sapiens
gataagggcttttaa

SEQ ID NO: 1455243 - DNA, 15 bp, Homo sapiens
tgataagggctttta

SEQ ID NO: 1455244 - DNA, 15 bp, Homo sapiens
gtgataagggctttt

SEQ ID NO: 1455245 - DNA, 15 bp, Homo sapiens
tgtgataagggcttt

SEQ ID NO: 1455246 - DNA, 15 bp, Homo sapiens
ttgtgataagggctt

SEQ ID NO: 1455247 - DNA, 15 bp, Homo sapiens
attgtgataagggct

SEQ ID NO: 1455248 - DNA, 15 bp, Homo sapiens
tattgtgataagggc

SEQ ID NO: 1455249 - DNA, 15 bp, Homo sapiens
atattgtgataaggg

SEQ ID NO: 1455250 - DNA, 15 bp, Homo sapiens
gatattgtgataagg

SEQ ID NO: 1455251 - DNA, 15 bp, Homo sapiens
tgatattgtgataag

SEQ ID NO: 1455252 - DNA, 15 bp, Homo sapiens
atgatattgtgataa

SEQ ID NO: 1455253 - DNA, 15 bp, Homo sapiens
aatgatattgtgata

SEQ ID NO: 1455254 - DNA, 15 bp, Homo sapiens
caatgatattgtgat

SEQ ID NO: 1455255 - DNA, 15 bp, Homo sapiens
ccaatgatattgtga

SEQ ID NO: 1455256 - DNA, 15 bp, Homo sapiens
accaatgatattgtg

SEQ ID NO: 1455257 - DNA, 15 bp, Homo sapiens
taccaatgatattgt

SEQ ID NO: 1455258 - DNA, 15 bp, Homo sapiens
ctaccaatgatattg

SEQ ID NO: 1455259 - DNA, 15 bp, Homo sapiens
tctaccaatgatatt

SEQ ID NO: 1455260 - DNA, 15 bp, Homo sapiens
gtctaccaatgatat

SEQ ID NO: 1455261 - DNA, 15 bp, Homo sapiens
ggtctaccaatgata

SEQ ID NO: 1455262 - DNA, 15 bp, Homo sapiens
gggtctaccaatgat

SEQ ID NO: 1455263 - DNA, 15 bp, Homo sapiens
ggggtctaccaatga

SEQ ID NO: 1455264 - DNA, 15 bp, Homo sapiens
tggggtctaccaatg

SEQ ID NO: 1455265 - DNA, 15 bp, Homo sapiens
ctggggtctaccaat

SEQ ID NO: 1455266 - DNA, 15 bp, Homo sapiens
actggggtctaccaa

SEQ ID NO: 1455267 - DNA, 15 bp, Homo sapiens
cactggggtctacca

SEQ ID NO: 1455268 - DNA, 15 bp, Homo sapiens
ccactggggtctacc

SEQ ID NO: 1455269 - DNA, 15 bp, Homo sapiens
cccactggggtctac

SEQ ID NO: 1455270 - DNA, 15 bp, Homo sapiens
gcccactggggtcta

SEQ ID NO: 1455271 - DNA, 15 bp, Homo sapiens
tgcccactggggtct

SEQ ID NO: 1455272 - DNA, 15 bp, Homo sapiens
ttgcccactggggtc

SEQ ID NO: 1455273 - DNA, 15 bp, Homo sapiens
tttgcccactggggt

SEQ ID NO: 1455274 - DNA, 15 bp, Homo sapiens
ttttgcccactgggg

SEQ ID NO: 1455275 - DNA, 15 bp, Homo sapiens
tttttgcccactggg

SEQ ID NO: 1455276 - DNA, 15 bp, Homo sapiens
atttttgcccactgg

SEQ ID NO: 1455277 - DNA, 15 bp, Homo sapiens
aatttttgcccactg

SEQ ID NO: 1455278 - DNA, 15 bp, Homo sapiens
caatttttgcccact

SEQ ID NO: 1455279 - DNA, 15 bp, Homo sapiens
ccaatttttgcccac

SEQ ID NO: 1455280 - DNA, 15 bp, Homo sapiens
gccaatttttgccca

SEQ ID NO: 1455281 - DNA, 15 bp, Homo sapiens
agccaatttttgccc

SEQ ID NO: 1455282 - DNA, 15 bp, Homo sapiens
gagccaatttttgcc

SEQ ID NO: 1455283 - DNA, 15 bp, Homo sapiens
tgagccaatttttgc

SEQ ID NO: 1455284 - DNA, 15 bp, Homo sapiens
atgagccaatttttg

SEQ ID NO: 1455285 - DNA, 15 bp, Homo sapiens
catgagccaattttt

SEQ ID NO: 1455286 - DNA, 15 bp, Homo sapiens
tcatgagccaatttt

SEQ ID NO: 1455287 - DNA, 15 bp, Homo sapiens
atcatgagccaattt

SEQ ID NO: 1455288 - DNA, 15 bp, Homo sapiens
tatcatgagccaatt

SEQ ID NO: 1455289 - DNA, 15 bp, Homo sapiens
gtatcatgagccaat

SEQ ID NO: 1455290 - DNA, 15 bp, Homo sapiens
agtatcatgagccaa

SEQ ID NO: 1455291 - DNA, 15 bp, Homo sapiens
cagtatcatgagcca

SEQ ID NO: 1455292 - DNA, 15 bp, Homo sapiens
acagtatcatgagcc

SEQ ID NO: 1455293 - DNA, 15 bp, Homo sapiens
tacagtatcatgagc

SEQ ID NO: 1455294 - DNA, 15 bp, Homo sapiens
ctacagtatcatgag

SEQ ID NO: 1455295 - DNA, 15 bp, Homo sapiens
cctacagtatcatga

SEQ ID NO: 1455296 - DNA, 15 bp, Homo sapiens
ccctacagtatcatg

SEQ ID NO: 1455297 - DNA, 15 bp, Homo sapiens
cccctacagtatcat

SEQ ID NO: 1455298 - DNA, 15 bp, Homo sapiens
tcccctacagtatca

SEQ ID NO: 1455299 - DNA, 15 bp, Homo sapiens
gtcccctacagtatc

SEQ ID NO: 1455300 - DNA, 15 bp, Homo sapiens
tgtcccctacagtat

SEQ ID NO: 1455301 - DNA, 15 bp, Homo sapiens
ttgtcccctacagta

SEQ ID NO: 1455302 - DNA, 15 bp, Homo sapiens
tttgtcccctacagt

SEQ ID NO: 1455303 - DNA, 15 bp, Homo sapiens
ttttgtcccctacag

SEQ ID NO: 1455304 - DNA, 15 bp, Homo sapiens
tttttgtcccctaca

SEQ ID NO: 1455305 - DNA, 15 bp, Homo sapiens
gtttttgtcccctac

SEQ ID NO: 1455306 - DNA, 15 bp, Homo sapiens
tgtttttgtccccta

SEQ ID NO: 1455307 - DNA, 15 bp, Homo sapiens
ttgtttttgtcccct

SEQ ID NO: 1455308 - DNA, 15 bp, Homo sapiens
tttgtttttgtcccc

SEQ ID NO: 1455309 - DNA, 15 bp, Homo sapiens
gtttgtttttgtccc

SEQ ID NO: 1455310 - DNA, 15 bp, Homo sapiens
tgtttgtttttgtcc

SEQ ID NO: 1455311 - DNA, 15 bp, Homo sapiens
ttgtttgtttttgtc

SEQ ID NO: 1455312 - DNA, 15 bp, Homo sapiens
tattttgtttgtttg

SEQ ID NO: 1455313 - DNA, 15 bp, Homo sapiens
gtattttgtttgttt

SEQ ID NO: 1455314 - DNA, 15 bp, Homo sapiens
agtattttgtttgtt

SEQ ID NO: 1455315 - DNA, 15 bp, Homo sapiens
aagtattttgtttgt

SEQ ID NO: 1455316 - DNA, 15 bp, Homo sapiens
aaagtattttgtttg

SEQ ID NO: 1455317 - DNA, 15 bp, Homo sapiens
aaaagtattttgttt

SEQ ID NO: 1455318 - DNA, 15 bp, Homo sapiens
gaaaagtattttgtt

SEQ ID NO: 1455319 - DNA, 15 bp, Homo sapiens
ggaaaagtattttgt

SEQ ID NO: 1455320 - DNA, 15 bp, Homo sapiens
aggaaaagtattttg

SEQ ID NO: 1455321 - DNA, 15 bp, Homo sapiens
aaggaaaagtatttt

SEQ ID NO: 1455322 - DNA, 15 bp, Homo sapiens
aaaggaaaagtattt

SEQ ID NO: 1455323 - DNA, 15 bp, Homo sapiens
taaaggaaaagtatt

SEQ ID NO: 1455324 - DNA, 15 bp, Homo sapiens
gtaaaggaaaagtat

SEQ ID NO: 1455325 - DNA, 15 bp, Homo sapiens
tgtaaaggaaaagta

SEQ ID NO: 1455326 - DNA, 15 bp, Homo sapiens
atgtaaaggaaaagt

SEQ ID NO: 1455327 - DNA, 15 bp, Homo sapiens
aatgtaaaggaaaag

SEQ ID NO: 1455328 - DNA, 15 bp, Homo sapiens
aaatgtaaaggaaaa

SEQ ID NO: 1455329 - DNA, 15 bp, Homo sapiens
gaaatgtaaaggaaa

SEQ ID NO: 1455330 - DNA, 15 bp, Homo sapiens
tgaaatgtaaaggaa

SEQ ID NO: 1455331 - DNA, 15 bp, Homo sapiens
ctgaaatgtaaagga

SEQ ID NO: 1455332 - DNA, 15 bp, Homo sapiens
cctgaaatgtaaagg

SEQ ID NO: 1455333 - DNA, 15 bp, Homo sapiens
acctgaaatgtaaag

SEQ ID NO: 1455334 - DNA, 15 bp, Homo sapiens
aacctgaaatgtaaa

SEQ ID NO: 1455335 - DNA, 15 bp, Homo sapiens
aaacctgaaatgtaa

SEQ ID NO: 1455336 - DNA, 15 bp, Homo sapiens
taaacctgaaatgta

SEQ ID NO: 1455337 - DNA, 15 bp, Homo sapiens
ctaaacctgaaatgt

SEQ ID NO: 1455338 - DNA, 15 bp, Homo sapiens
actaaacctgaaatg

SEQ ID NO: 1455339 - DNA, 15 bp, Homo sapiens
cactaaacctgaaat

SEQ ID NO: 1455340 - DNA, 15 bp, Homo sapiens
ccactaaacctgaaa

SEQ ID NO: 1455341 - DNA, 15 bp, Homo sapiens
gccactaaacctgaa

SEQ ID NO: 1455342 - DNA, 15 bp, Homo sapiens
agccactaaacctga

SEQ ID NO: 1455343 - DNA, 15 bp, Homo sapiens
cagccactaaacctg

SEQ ID NO: 1455344 - DNA, 15 bp, Homo sapiens
ccagccactaaacct

SEQ ID NO: 1455345 - DNA, 15 bp, Homo sapiens
cccagccactaaacc

SEQ ID NO: 1455346 - DNA, 15 bp, Homo sapiens
ccccagccactaaac

SEQ ID NO: 1455347 - DNA, 15 bp, Homo sapiens
gccccagccactaaa

SEQ ID NO: 1455348 - DNA, 15 bp, Homo sapiens
ggccccagccactaa

SEQ ID NO: 1455349 - DNA, 15 bp, Homo sapiens
aggccccagccacta

SEQ ID NO: 1455350 - DNA, 15 bp, Homo sapiens
caggccccagccact

SEQ ID NO: 1455351 - DNA, 15 bp, Homo sapiens
acaggccccagccac

SEQ ID NO: 1455352 - DNA, 15 bp, Homo sapiens
cacaggccccagcca

SEQ ID NO: 1455353 - DNA, 15 bp, Homo sapiens
tcacaggccccagcc

SEQ ID NO: 1455354 - DNA, 15 bp, Homo sapiens
ttcacaggccccagc

SEQ ID NO: 1455355 - DNA, 15 bp, Homo sapiens
attcacaggccccag

SEQ ID NO: 1455356 - DNA, 15 bp, Homo sapiens
aattcacaggcccca

SEQ ID NO: 1455357 - DNA, 15 bp, Homo sapiens
taattcacaggcccc

SEQ ID NO: 1455358 - DNA, 15 bp, Homo sapiens
ttaattcacaggccc

SEQ ID NO: 1455359 - DNA, 15 bp, Homo sapiens
tttaattcacaggcc

SEQ ID NO: 1455360 - DNA, 15 bp, Homo sapiens
gtttaattcacaggc

SEQ ID NO: 1455361 - DNA, 15 bp, Homo sapiens
agtttaattcacagg

SEQ ID NO: 1455362 - DNA, 15 bp, Homo sapiens
cagtttaattcacag

SEQ ID NO: 1455363 - DNA, 15 bp, Homo sapiens
tcagtttaattcaca

SEQ ID NO: 1455364 - DNA, 15 bp, Homo sapiens
gtcagtttaattcac

SEQ ID NO: 1455365 - DNA, 15 bp, Homo sapiens
tgtcagtttaattca

SEQ ID NO: 1455366 - DNA, 15 bp, Homo sapiens
ttgtcagtttaattc

SEQ ID NO: 1455367 - DNA, 15 bp, Homo sapiens
tttgtcagtttaatt

SEQ ID NO: 1455368 - DNA, 15 bp, Homo sapiens
ttttgtcagtttaat

SEQ ID NO: 1455369 - DNA, 15 bp, Homo sapiens
cttttgtcagtttaa

SEQ ID NO: 1455370 - DNA, 15 bp, Homo sapiens
ccttttgtcagttta

SEQ ID NO: 1455371 - DNA, 15 bp, Homo sapiens
accttttgtcagttt

SEQ ID NO: 1455372 - DNA, 15 bp, Homo sapiens
taccttttgtcagtt

SEQ ID NO: 1455373 - DNA, 15 bp, Homo sapiens
ttaccttttgtcagt

SEQ ID NO: 1455374 - DNA, 15 bp, Homo sapiens
tttaccttttgtcag

SEQ ID NO: 1455375 - DNA, 15 bp, Homo sapiens
atttaccttttgtca

SEQ ID NO: 1455376 - DNA, 15 bp, Homo sapiens
aatttaccttttgtc

SEQ ID NO: 1455377 - DNA, 15 bp, Homo sapiens
taatttaccttttgt

SEQ ID NO: 1455378 - DNA, 15 bp, Homo sapiens
ttaatttaccttttg

SEQ ID NO: 1455379 - DNA, 15 bp, Homo sapiens
gttaatttacctttt

SEQ ID NO: 1455380 - DNA, 15 bp, Homo sapiens
ggttaatttaccttt

SEQ ID NO: 1455381 - DNA, 15 bp, Homo sapiens
tggttaatttacctt

SEQ ID NO: 1455382 - DNA, 15 bp, Homo sapiens
ctggttaatttacct

SEQ ID NO: 1455383 - DNA, 15 bp, Homo sapiens
tctggttaatttacc

SEQ ID NO: 1455384 - DNA, 15 bp, Homo sapiens
ctctggttaatttac

SEQ ID NO: 1455385 - DNA, 15 bp, Homo sapiens
tctctggttaattta

SEQ ID NO: 1455386 - DNA, 15 bp, Homo sapiens
ttctctggttaattt

SEQ ID NO: 1455387 - DNA, 15 bp, Homo sapiens
tttctctggttaatt

SEQ ID NO: 1455388 - DNA, 15 bp, Homo sapiens
ttttctctggttaat

SEQ ID NO: 1455389 - DNA, 15 bp, Homo sapiens
tttttctctggttaa

SEQ ID NO: 1455390 - DNA, 15 bp, Homo sapiens
ctttttctctggtta

SEQ ID NO: 1455391 - DNA, 15 bp, Homo sapiens
gctttttctctggtt

SEQ ID NO: 1455392 - DNA, 15 bp, Homo sapiens
tgctttttctctggt

SEQ ID NO: 1455393 - DNA, 15 bp, Homo sapiens
atgctttttctctgg

SEQ ID NO: 1455394 - DNA, 15 bp, Homo sapiens
tatgctttttctctg

SEQ ID NO: 1455395 - DNA, 15 bp, Homo sapiens
gtatgctttttctct

SEQ ID NO: 1455396 - DNA, 15 bp, Homo sapiens
tgtatgctttttctc

SEQ ID NO: 1455397 - DNA, 15 bp, Homo sapiens
gtgtatgctttttct

SEQ ID NO: 1455398 - DNA, 15 bp, Homo sapiens
tgtgtatgctttttc

SEQ ID NO: 1455399 - DNA, 15 bp, Homo sapiens
atgtgtatgcttttt

SEQ ID NO: 1455400 - DNA, 15 bp, Homo sapiens
aatgtgtatgctttt

SEQ ID NO: 1455401 - DNA, 15 bp, Homo sapiens
aaatgtgtatgcttt

SEQ ID NO: 1455402 - DNA, 15 bp, Homo sapiens
aaaatgtgtatgctt

SEQ ID NO: 1455403 - DNA, 15 bp, Homo sapiens
taaaatgtgtatgct

SEQ ID NO: 1455404 - DNA, 15 bp, Homo sapiens
ataaaatgtgtatgc

SEQ ID NO: 1455405 - DNA, 15 bp, Homo sapiens
gataaaatgtgtatg

SEQ ID NO: 1455406 - DNA, 15 bp, Homo sapiens
tgataaaatgtgtat

SEQ ID NO: 1455407 - DNA, 15 bp, Homo sapiens
attgataaaatgtgt

SEQ ID NO: 1455408 - DNA, 15 bp, Homo sapiens
cattgataaaatgtg

SEQ ID NO: 1455409 - DNA, 15 bp, Homo sapiens
acattgataaaatgt

SEQ ID NO: 1455410 - DNA, 15 bp, Homo sapiens
aacattgataaaatg

SEQ ID NO: 1455411 - DNA, 15 bp, Homo sapiens
taacattgataaaat

SEQ ID NO: 1455412 - DNA, 15 bp, Homo sapiens
ttaacattgataaaa

SEQ ID NO: 1455413 - DNA, 15 bp, Homo sapiens
gttaacattgataaa

SEQ ID NO: 1455414 - DNA, 15 bp, Homo sapiens
tgttaacattgataa

SEQ ID NO: 1455415 - DNA, 15 bp, Homo sapiens
atgttaacattgata

SEQ ID NO: 1455416 - DNA, 15 bp, Homo sapiens
aatgttaacattgat

SEQ ID NO: 1455417 - DNA, 15 bp, Homo sapiens
aaatgttaacattga

SEQ ID NO: 1455418 - DNA, 15 bp, Homo sapiens
aaaatgttaacattg

SEQ ID NO: 1455419 - DNA, 15 bp, Homo sapiens
aaaaatgttaacatt

SEQ ID NO: 1455420 - DNA, 15 bp, Homo sapiens
taaaaatgttaacat

SEQ ID NO: 1455421 - DNA, 15 bp, Homo sapiens
ataaaaatgttaaca

SEQ ID NO: 1455422 - DNA, 15 bp, Homo sapiens
cataaaaatgttaac

SEQ ID NO: 1455423 - DNA, 15 bp, Homo sapiens
tcataaaaatgttaa

SEQ ID NO: 1455424 - DNA, 15 bp, Homo sapiens
ctcataaaaatgtta

SEQ ID NO: 1455425 - DNA, 15 bp, Homo sapiens
gctcataaaaatgtt

SEQ ID NO: 1455426 - DNA, 15 bp, Homo sapiens
tgctcataaaaatgt

SEQ ID NO: 1455427 - DNA, 15 bp, Homo sapiens
atgctcataaaaatg

SEQ ID NO: 1455428 - DNA, 15 bp, Homo sapiens
catgctcataaaaat

SEQ ID NO: 1455429 - DNA, 15 bp, Homo sapiens
ccatgctcataaaaa

SEQ ID NO: 1455430 - DNA, 15 bp, Homo sapiens
cccatgctcataaaa

SEQ ID NO: 1455431 - DNA, 15 bp, Homo sapiens
ccccatgctcataaa

SEQ ID NO: 1455432 - DNA, 15 bp, Homo sapiens
gccccatgctcataa

SEQ ID NO: 1455433 - DNA, 15 bp, Homo sapiens
agccccatgctcata

SEQ ID NO: 1455434 - DNA, 15 bp, Homo sapiens
aagccccatgctcat

SEQ ID NO: 1455435 - DNA, 15 bp, Homo sapiens
gaagccccatgctca

SEQ ID NO: 1455436 - DNA, 15 bp, Homo sapiens
tgaagccccatgctc

SEQ ID NO: 1455437 - DNA, 15 bp, Homo sapiens
gtgaagccccatgct

SEQ ID NO: 1455438 - DNA, 15 bp, Homo sapiens
tgtgaagccccatgc

SEQ ID NO: 1455439 - DNA, 15 bp, Homo sapiens
ctgtgaagccccatg

SEQ ID NO: 1455440 - DNA, 15 bp, Homo sapiens
actgtgaagccccat

SEQ ID NO: 1455441 - DNA, 15 bp, Homo sapiens
tactgtgaagcccca

SEQ ID NO: 1455442 - DNA, 15 bp, Homo sapiens
ctactgtgaagcccc

SEQ ID NO: 1455443 - DNA, 15 bp, Homo sapiens
actactgtgaagccc

SEQ ID NO: 1455444 - DNA, 15 bp, Homo sapiens
tactactgtgaagcc

SEQ ID NO: 1455445 - DNA, 15 bp, Homo sapiens
atactactgtgaagc

SEQ ID NO: 1455446 - DNA, 15 bp, Homo sapiens
tatactactgtgaag

SEQ ID NO: 1455447 - DNA, 15 bp, Homo sapiens
atatactactgtgaa

SEQ ID NO: 1455448 - DNA, 15 bp, Homo sapiens
tatatactactgtga

SEQ ID NO: 1455449 - DNA, 15 bp, Homo sapiens
ttatatactactgtg

SEQ ID NO: 1455450 - DNA, 15 bp, Homo sapiens
cttatatactactgt

SEQ ID NO: 1455451 - DNA, 15 bp, Homo sapiens
tcttatatactactg

SEQ ID NO: 1455452 - DNA, 15 bp, Homo sapiens
ttcttatatactact

SEQ ID NO: 1455453 - DNA, 15 bp, Homo sapiens
cttcttatatactac

SEQ ID NO: 1455454 - DNA, 15 bp, Homo sapiens
acttcttatatacta

SEQ ID NO: 1455455 - DNA, 15 bp, Homo sapiens
cacttcttatatact

SEQ ID NO: 1455456 - DNA, 15 bp, Homo sapiens
acacttcttatatac

SEQ ID NO: 1455457 - DNA, 15 bp, Homo sapiens
aacacttcttatata

SEQ ID NO: 1455458 - DNA, 15 bp, Homo sapiens
aaacacttcttatat

SEQ ID NO: 1455459 - DNA, 15 bp, Homo sapiens
taaacacttcttata

SEQ ID NO: 1455460 - DNA, 15 bp, Homo sapiens
ctaaacacttcttat

SEQ ID NO: 1455461 - DNA, 15 bp, Homo sapiens
tctaaacacttctta

SEQ ID NO: 1455462 - DNA, 15 bp, Homo sapiens
gtctaaacacttctt

SEQ ID NO: 1455463 - DNA, 15 bp, Homo sapiens
agtctaaacacttct

SEQ ID NO: 1455464 - DNA, 15 bp, Homo sapiens
gagtctaaacacttc

SEQ ID NO: 1455465 - DNA, 15 bp, Homo sapiens
tgagtctaaacactt

SEQ ID NO: 1455466 - DNA, 15 bp, Homo sapiens
ctgagtctaaacact

SEQ ID NO: 1455467 - DNA, 15 bp, Homo sapiens
cctgagtctaaacac

SEQ ID NO: 1455468 - DNA, 15 bp, Homo sapiens
ccctgagtctaaaca

SEQ ID NO: 1455469 - DNA, 15 bp, Homo sapiens
gccctgagtctaaac

SEQ ID NO: 1455470 - DNA, 15 bp, Homo sapiens
agccctgagtctaaa

SEQ ID NO: 1455471 - DNA, 15 bp, Homo sapiens
aagccctgagtctaa

SEQ ID NO: 1455472 - DNA, 15 bp, Homo sapiens
caagccctgagtcta

SEQ ID NO: 1455473 - DNA, 15 bp, Homo sapiens
acaagccctgagtct

SEQ ID NO: 1455474 - DNA, 15 bp, Homo sapiens
gacaagccctgagtc

SEQ ID NO: 1455475 - DNA, 15 bp, Homo sapiens
agacaagccctgagt

SEQ ID NO: 1455476 - DNA, 15 bp, Homo sapiens
tagacaagccctgag

SEQ ID NO: 1455477 - DNA, 15 bp, Homo sapiens
gtagacaagccctga

SEQ ID NO: 1455478 - DNA, 15 bp, Homo sapiens
ggtagacaagccctg

SEQ ID NO: 1455479 - DNA, 15 bp, Homo sapiens
aggtagacaagccct

SEQ ID NO: 1455480 - DNA, 15 bp, Homo sapiens
taggtagacaagccc

SEQ ID NO: 1455481 - DNA, 15 bp, Homo sapiens
ttaggtagacaagcc

SEQ ID NO: 1455482 - DNA, 15 bp, Homo sapiens
gttaggtagacaagc

SEQ ID NO: 1455483 - DNA, 15 bp, Homo sapiens
agttaggtagacaag

SEQ ID NO: 1455484 - DNA, 15 bp, Homo sapiens
aagttaggtagacaa

SEQ ID NO: 1455485 - DNA, 15 bp, Homo sapiens
taagttaggtagaca

SEQ ID NO: 1455486 - DNA, 15 bp, Homo sapiens
ctaagttaggtagac

SEQ ID NO: 1455487 - DNA, 15 bp, Homo sapiens
actaagttaggtaga

SEQ ID NO: 1455488 - DNA, 15 bp, Homo sapiens
tactaagttaggtag

SEQ ID NO: 1455489 - DNA, 15 bp, Homo sapiens
ctactaagttaggta

SEQ ID NO: 1455490 - DNA, 15 bp, Homo sapiens
cctactaagttaggt

SEQ ID NO: 1455491 - DNA, 15 bp, Homo sapiens
ccctactaagttagg

SEQ ID NO: 1455492 - DNA, 15 bp, Homo sapiens
tccctactaagttag

SEQ ID NO: 1455493 - DNA, 15 bp, Homo sapiens
ttccctactaagtta

SEQ ID NO: 1455494 - DNA, 15 bp, Homo sapiens
tttccctactaagtt

SEQ ID NO: 1455495 - DNA, 15 bp, Homo sapiens
ttttccctactaagt

SEQ ID NO: 1455496 - DNA, 15 bp, Homo sapiens
cttttccctactaag

SEQ ID NO: 1455497 - DNA, 15 bp, Homo sapiens
ccttttccctactaa

SEQ ID NO: 1455498 - DNA, 15 bp, Homo sapiens
cccttttccctacta

SEQ ID NO: 1455499 - DNA, 15 bp, Homo sapiens
tcccttttccctact

SEQ ID NO: 1455500 - DNA, 15 bp, Homo sapiens
ctcccttttccctac

SEQ ID NO: 1455501 - DNA, 15 bp, Homo sapiens
tctcccttttcccta

SEQ ID NO: 1455502 - DNA, 15 bp, Homo sapiens
ctctcccttttccct

SEQ ID NO: 1455503 - DNA, 15 bp, Homo sapiens
cctctcccttttccc

SEQ ID NO: 1455504 - DNA, 15 bp, Homo sapiens
tcctctcccttttcc

SEQ ID NO: 1455505 - DNA, 15 bp, Homo sapiens
ttcctctcccttttc

SEQ ID NO: 1455506 - DNA, 15 bp, Homo sapiens
cttcctctccctttt

SEQ ID NO: 1455507 - DNA, 15 bp, Homo sapiens
tcttcctctcccttt

SEQ ID NO: 1455508 - DNA, 15 bp, Homo sapiens
ttcttcctctccctt

SEQ ID NO: 1455509 - DNA, 15 bp, Homo sapiens
tttcttcctctccct

SEQ ID NO: 1455510 - DNA, 15 bp, Homo sapiens
ttttcttcctctccc

SEQ ID NO: 1455511 - DNA, 15 bp, Homo sapiens
cttttcttcctctcc

SEQ ID NO: 1455512 - DNA, 15 bp, Homo sapiens
acttttcttcctctc

SEQ ID NO: 1455513 - DNA, 15 bp, Homo sapiens
aacttttcttcctct

SEQ ID NO: 1455514 - DNA, 15 bp, Homo sapiens
aaacttttcttcctc

SEQ ID NO: 1455515 - DNA, 15 bp, Homo sapiens
gaaacttttcttcct

SEQ ID NO: 1455516 - DNA, 15 bp, Homo sapiens
ggaaacttttcttcc

SEQ ID NO: 1455517 - DNA, 15 bp, Homo sapiens
aggaaacttttcttc

SEQ ID NO: 1455518 - DNA, 15 bp, Homo sapiens
taggaaacttttctt

SEQ ID NO: 1455519 - DNA, 15 bp, Homo sapiens
ataggaaacttttct

SEQ ID NO: 1455520 - DNA, 15 bp, Homo sapiens
cataggaaacttttc

SEQ ID NO: 1455521 - DNA, 15 bp, Homo sapiens
ccataggaaactttt

SEQ ID NO: 1455522 - DNA, 15 bp, Homo sapiens
cccataggaaacttt

SEQ ID NO: 1455523 - DNA, 15 bp, Homo sapiens
tcccataggaaactt

SEQ ID NO: 1455524 - DNA, 15 bp, Homo sapiens
ttcccataggaaact

SEQ ID NO: 1455525 - DNA, 15 bp, Homo sapiens
cttcccataggaaac

SEQ ID NO: 1455526 - DNA, 15 bp, Homo sapiens
ccttcccataggaaa

SEQ ID NO: 1455527 - DNA, 15 bp, Homo sapiens
tccttcccataggaa

SEQ ID NO: 1455528 - DNA, 15 bp, Homo sapiens
gtccttcccatagga

SEQ ID NO: 1455529 - DNA, 15 bp, Homo sapiens
tgtccttcccatagg

SEQ ID NO: 1455530 - DNA, 15 bp, Homo sapiens
ttgtccttcccatag

SEQ ID NO: 1455531 - DNA, 15 bp, Homo sapiens
tttgtccttcccata

SEQ ID NO: 1455532 - DNA, 15 bp, Homo sapiens
atttgtccttcccat

SEQ ID NO: 1455533 - DNA, 15 bp, Homo sapiens
catttgtccttccca

SEQ ID NO: 1455534 - DNA, 15 bp, Homo sapiens
ccatttgtccttccc

SEQ ID NO: 1455535 - DNA, 15 bp, Homo sapiens
gccatttgtccttcc

SEQ ID NO: 1455536 - DNA, 15 bp, Homo sapiens
agccatttgtccttc

SEQ ID NO: 1455537 - DNA, 15 bp, Homo sapiens
aagccatttgtcctt

SEQ ID NO: 1455538 - DNA, 15 bp, Homo sapiens
aaagccatttgtcct

SEQ ID NO: 1455539 - DNA, 15 bp, Homo sapiens
aaaagccatttgtcc

SEQ ID NO: 1455540 - DNA, 15 bp, Homo sapiens
aaaaagccatttgtc

SEQ ID NO: 1455541 - DNA, 15 bp, Homo sapiens
taaaaagccatttgt

SEQ ID NO: 1455542 - DNA, 15 bp, Homo sapiens
ctaaaaagccatttg

SEQ ID NO: 1455543 - DNA, 15 bp, Homo sapiens
cctaaaaagccattt

SEQ ID NO: 1455544 - DNA, 15 bp, Homo sapiens
tcctaaaaagccatt

SEQ ID NO: 1455545 - DNA, 15 bp, Homo sapiens
ctcctaaaaagccat

SEQ ID NO: 1455546 - DNA, 15 bp, Homo sapiens
cctcctaaaaagcca

SEQ ID NO: 1455547 - DNA, 15 bp, Homo sapiens
tcctcctaaaaagcc

SEQ ID NO: 1455548 - DNA, 15 bp, Homo sapiens
gtcctcctaaaaagc

SEQ ID NO: 1455549 - DNA, 15 bp, Homo sapiens
tgtcctcctaaaaag

SEQ ID NO: 1455550 - DNA, 15 bp, Homo sapiens
ttgtcctcctaaaaa

SEQ ID NO: 1455551 - DNA, 15 bp, Homo sapiens
cttgtcctcctaaaa

SEQ ID NO: 1455552 - DNA, 15 bp, Homo sapiens
acttgtcctcctaaa

SEQ ID NO: 1455553 - DNA, 15 bp, Homo sapiens
aacttgtcctcctaa

SEQ ID NO: 1455554 - DNA, 15 bp, Homo sapiens
taacttgtcctccta

SEQ ID NO: 1455555 - DNA, 15 bp, Homo sapiens
ctaacttgtcctcct

SEQ ID NO: 1455556 - DNA, 15 bp, Homo sapiens
actaacttgtcctcc

SEQ ID NO: 1455557 - DNA, 15 bp, Homo sapiens
cactaacttgtcctc

SEQ ID NO: 1455558 - DNA, 15 bp, Homo sapiens
ccactaacttgtcct

SEQ ID NO: 1455559 - DNA, 15 bp, Homo sapiens
accactaacttgtcc

SEQ ID NO: 1455560 - DNA, 15 bp, Homo sapiens
taccactaacttgtc

SEQ ID NO: 1455561 - DNA, 15 bp, Homo sapiens
ttaccactaacttgt

SEQ ID NO: 1455562 - DNA, 15 bp, Homo sapiens
attaccactaacttg

SEQ ID NO: 1455563 - DNA, 15 bp, Homo sapiens
cattaccactaactt

SEQ ID NO: 1455564 - DNA, 15 bp, Homo sapiens
acattaccactaact

SEQ ID NO: 1455565 - DNA, 15 bp, Homo sapiens
aacattaccactaac

SEQ ID NO: 1455566 - DNA, 15 bp, Homo sapiens
aaacattaccactaa

SEQ ID NO: 1455567 - DNA, 15 bp, Homo sapiens
aaaacattaccacta

SEQ ID NO: 1455568 - DNA, 15 bp, Homo sapiens
aaaaacattaccact

SEQ ID NO: 1455569 - DNA, 15 bp, Homo sapiens
gaaaaacattaccac

SEQ ID NO: 1455570 - DNA, 15 bp, Homo sapiens
agaaaaacattacca

SEQ ID NO: 1455571 - DNA, 15 bp, Homo sapiens
aagaaaaacattacc

SEQ ID NO: 1455572 - DNA, 15 bp, Homo sapiens
aaagaaaaacattac

SEQ ID NO: 1455573 - DNA, 15 bp, Homo sapiens
taaagaaaaacatta

SEQ ID NO: 1455574 - DNA, 15 bp, Homo sapiens
ataaagaaaaacatt

SEQ ID NO: 1455575 - DNA, 15 bp, Homo sapiens
cataaagaaaaacat

SEQ ID NO: 1455576 - DNA, 15 bp, Homo sapiens
tcataaagaaaaaca

SEQ ID NO: 1455577 - DNA, 15 bp, Homo sapiens
ctcataaagaaaaac

SEQ ID NO: 1455578 - DNA, 15 bp, Homo sapiens
actcataaagaaaaa

SEQ ID NO: 1455579 - DNA, 15 bp, Homo sapiens
tactcataaagaaaa

SEQ ID NO: 1455580 - DNA, 15 bp, Homo sapiens
atactcataaagaaa

SEQ ID NO: 1455581 - DNA, 15 bp, Homo sapiens
aatactcataaagaa

SEQ ID NO: 1455582 - DNA, 15 bp, Homo sapiens
taatactcataaaga

SEQ ID NO: 1455583 - DNA, 15 bp, Homo sapiens
ctaatactcataaag

SEQ ID NO: 1455584 - DNA, 15 bp, Homo sapiens
actaatactcataaa

SEQ ID NO: 1455585 - DNA, 15 bp, Homo sapiens
cactaatactcataa

SEQ ID NO: 1455586 - DNA, 15 bp, Homo sapiens
ccactaatactcata

SEQ ID NO: 1455587 - DNA, 15 bp, Homo sapiens
accactaatactcat

SEQ ID NO: 1455588 - DNA, 15 bp, Homo sapiens
gaccactaatactca

SEQ ID NO: 1455589 - DNA, 15 bp, Homo sapiens
agaccactaatactc

SEQ ID NO: 1455590 - DNA, 15 bp, Homo sapiens
aagaccactaatact

SEQ ID NO: 1455591 - DNA, 15 bp, Homo sapiens
aaagaccactaatac

SEQ ID NO: 1455592 - DNA, 15 bp, Homo sapiens
gaaagaccactaata

SEQ ID NO: 1455593 - DNA, 15 bp, Homo sapiens
agaaagaccactaat

SEQ ID NO: 1455594 - DNA, 15 bp, Homo sapiens
cagaaagaccactaa

SEQ ID NO: 1455595 - DNA, 15 bp, Homo sapiens
acagaaagaccacta

SEQ ID NO: 1455596 - DNA, 15 bp, Homo sapiens
gacagaaagaccact

SEQ ID NO: 1455597 - DNA, 15 bp, Homo sapiens
agacagaaagaccac

SEQ ID NO: 1455598 - DNA, 15 bp, Homo sapiens
gagacagaaagacca

SEQ ID NO: 1455599 - DNA, 15 bp, Homo sapiens
ggagacagaaagacc

SEQ ID NO: 1455600 - DNA, 15 bp, Homo sapiens
gggagacagaaagac

SEQ ID NO: 1455601 - DNA, 15 bp, Homo sapiens
agggagacagaaaga

SEQ ID NO: 1455602 - DNA, 15 bp, Homo sapiens
gagggagacagaaag

SEQ ID NO: 1455603 - DNA, 15 bp, Homo sapiens
tgagggagacagaaa

SEQ ID NO: 1455604 - DNA, 15 bp, Homo sapiens
ctgagggagacagaa

SEQ ID NO: 1455605 - DNA, 15 bp, Homo sapiens
cctgagggagacaga

SEQ ID NO: 1455606 - DNA, 15 bp, Homo sapiens
ccctgagggagacag

SEQ ID NO: 1455607 - DNA, 15 bp, Homo sapiens
gccctgagggagaca

SEQ ID NO: 1455608 - DNA, 15 bp, Homo sapiens
ggccctgagggagac

SEQ ID NO: 1455609 - DNA, 15 bp, Homo sapiens
tggccctgagggaga

SEQ ID NO: 1455610 - DNA, 15 bp, Homo sapiens
gtggccctgagggag

SEQ ID NO: 1455611 - DNA, 15 bp, Homo sapiens
tgtggccctgaggga

SEQ ID NO: 1455612 - DNA, 15 bp, Homo sapiens
ttgtggccctgaggg

SEQ ID NO: 1455613 - DNA, 15 bp, Homo sapiens
tttgtggccctgagg

SEQ ID NO: 1455614 - DNA, 15 bp, Homo sapiens
ttttgtggccctgag

SEQ ID NO: 1455615 - DNA, 15 bp, Homo sapiens
attttgtggccctga

SEQ ID NO: 1455616 - DNA, 15 bp, Homo sapiens
aattttgtggccctg

SEQ ID NO: 1455617 - DNA, 15 bp, Homo sapiens
gaattttgtggccct

SEQ ID NO: 1455618 - DNA, 15 bp, Homo sapiens
ggaattttgtggccc

SEQ ID NO: 1455619 - DNA, 15 bp, Homo sapiens
gggaattttgtggcc

SEQ ID NO: 1455620 - DNA, 15 bp, Homo sapiens
ggggaattttgtggc

SEQ ID NO: 1455621 - DNA, 15 bp, Homo sapiens
aggggaattttgtgg

SEQ ID NO: 1455622 - DNA, 15 bp, Homo sapiens
caggggaattttgtg

SEQ ID NO: 1455623 - DNA, 15 bp, Homo sapiens
ccaggggaattttgt

SEQ ID NO: 1455624 - DNA, 15 bp, Homo sapiens
tccaggggaattttg

SEQ ID NO: 1455625 - DNA, 15 bp, Homo sapiens
ctccaggggaatttt

SEQ ID NO: 1455626 - DNA, 15 bp, Homo sapiens
tctccaggggaattt

SEQ ID NO: 1455627 - DNA, 15 bp, Homo sapiens
ttctccaggggaatt

SEQ ID NO: 1455628 - DNA, 15 bp, Homo sapiens
cttctccaggggaat

SEQ ID NO: 1455629 - DNA, 15 bp, Homo sapiens
ccttctccaggggaa

SEQ ID NO: 1455630 - DNA, 15 bp, Homo sapiens
cccttctccagggga

SEQ ID NO: 1455631 - DNA, 15 bp, Homo sapiens
tcccttctccagggg

SEQ ID NO: 1455632 - DNA, 15 bp, Homo sapiens
atcccttctccaggg

SEQ ID NO: 1455633 - DNA, 15 bp, Homo sapiens
aatcccttctccagg

SEQ ID NO: 1455634 - DNA, 15 bp, Homo sapiens
aaatcccttctccag

SEQ ID NO: 1455635 - DNA, 15 bp, Homo sapiens
taaatcccttctcca

SEQ ID NO: 1455636 - DNA, 15 bp, Homo sapiens
gtaaatcccttctcc

SEQ ID NO: 1455637 - DNA, 15 bp, Homo sapiens
tgtaaatcccttctc

SEQ ID NO: 1455638 - DNA, 15 bp, Homo sapiens
ctgtaaatcccttct

SEQ ID NO: 1455639 - DNA, 15 bp, Homo sapiens
actgtaaatcccttc

SEQ ID NO: 1455640 - DNA, 15 bp, Homo sapiens
tactgtaaatccctt

SEQ ID NO: 1455641 - DNA, 15 bp, Homo sapiens
ctactgtaaatccct

SEQ ID NO: 1455642 - DNA, 15 bp, Homo sapiens
gctactgtaaatccc

SEQ ID NO: 1455643 - DNA, 15 bp, Homo sapiens
ggctactgtaaatcc

SEQ ID NO: 1455644 - DNA, 15 bp, Homo sapiens
aggctactgtaaatc

SEQ ID NO: 1455645 - DNA, 15 bp, Homo sapiens
gaggctactgtaaat

SEQ ID NO: 1455646 - DNA, 15 bp, Homo sapiens
tgaggctactgtaaa

SEQ ID NO: 1455647 - DNA, 15 bp, Homo sapiens
ttgaggctactgtaa

SEQ ID NO: 1455648 - DNA, 15 bp, Homo sapiens
tttgaggctactgta

SEQ ID NO: 1455649 - DNA, 15 bp, Homo sapiens
atttgaggctactgt

SEQ ID NO: 1455650 - DNA, 15 bp, Homo sapiens
gatttgaggctactg

SEQ ID NO: 1455651 - DNA, 15 bp, Homo sapiens
agatttgaggctact

SEQ ID NO: 1455652 - DNA, 15 bp, Homo sapiens
gagatttgaggctac

SEQ ID NO: 1455653 - DNA, 15 bp, Homo sapiens
tgagatttgaggcta

SEQ ID NO: 1455654 - DNA, 15 bp, Homo sapiens
ctgagatttgaggct

SEQ ID NO: 1455655 - DNA, 15 bp, Homo sapiens
tctgagatttgaggc

SEQ ID NO: 1455656 - DNA, 15 bp, Homo sapiens
ttctgagatttgagg

SEQ ID NO: 1455657 - DNA, 15 bp, Homo sapiens
cttctgagatttgag

SEQ ID NO: 1455658 - DNA, 15 bp, Homo sapiens
gcttctgagatttga

SEQ ID NO: 1455659 - DNA, 15 bp, Homo sapiens
agcttctgagatttg

SEQ ID NO: 1455660 - DNA, 15 bp, Homo sapiens
tagcttctgagattt

SEQ ID NO: 1455661 - DNA, 15 bp, Homo sapiens
gtagcttctgagatt

SEQ ID NO: 1455662 - DNA, 15 bp, Homo sapiens
agtagcttctgagat

SEQ ID NO: 1455663 - DNA, 15 bp, Homo sapiens
cagtagcttctgaga

SEQ ID NO: 1455664 - DNA, 15 bp, Homo sapiens
gcagtagcttctgag

SEQ ID NO: 1455665 - DNA, 15 bp, Homo sapiens
agcagtagcttctga

SEQ ID NO: 1455666 - DNA, 15 bp, Homo sapiens
aagcagtagcttctg

SEQ ID NO: 1455667 - DNA, 15 bp, Homo sapiens
aaagcagtagcttct

SEQ ID NO: 1455668 - DNA, 15 bp, Homo sapiens
aaaagcagtagcttc

SEQ ID NO: 1455669 - DNA, 15 bp, Homo sapiens
taaaagcagtagctt

SEQ ID NO: 1455670 - DNA, 15 bp, Homo sapiens
ctaaaagcagtagct

SEQ ID NO: 1455671 - DNA, 15 bp, Homo sapiens
actaaaagcagtagc

SEQ ID NO: 1455672 - DNA, 15 bp, Homo sapiens
gactaaaagcagtag

SEQ ID NO: 1455673 - DNA, 15 bp, Homo sapiens
tgactaaaagcagta

SEQ ID NO: 1455674 - DNA, 15 bp, Homo sapiens
ctgactaaaagcagt

SEQ ID NO: 1455675 - DNA, 15 bp, Homo sapiens
tctgactaaaagcag

SEQ ID NO: 1455676 - DNA, 15 bp, Homo sapiens
atctgactaaaagca

SEQ ID NO: 1455677 - DNA, 15 bp, Homo sapiens
tatctgactaaaagc

SEQ ID NO: 1455678 - DNA, 15 bp, Homo sapiens
ttatctgactaaaag

SEQ ID NO: 1455679 - DNA, 15 bp, Homo sapiens
cttatctgactaaaa

SEQ ID NO: 1455680 - DNA, 15 bp, Homo sapiens
ccttatctgactaaa

SEQ ID NO: 1455681 - DNA, 15 bp, Homo sapiens
cccttatctgactaa

SEQ ID NO: 1455682 - DNA, 15 bp, Homo sapiens
tcccttatctgacta

SEQ ID NO: 1455683 - DNA, 15 bp, Homo sapiens
ttcccttatctgact

SEQ ID NO: 1455684 - DNA, 15 bp, Homo sapiens
cttcccttatctgac

SEQ ID NO: 1455685 - DNA, 15 bp, Homo sapiens
tcttcccttatctga

SEQ ID NO: 1455686 - DNA, 15 bp, Homo sapiens
atcttcccttatctg

SEQ ID NO: 1455687 - DNA, 15 bp, Homo sapiens
gatcttcccttatct

SEQ ID NO: 1455688 - DNA, 15 bp, Homo sapiens
ggatcttcccttatc

SEQ ID NO: 1455689 - DNA, 15 bp, Homo sapiens
tggatcttcccttat

SEQ ID NO: 1455690 - DNA, 15 bp, Homo sapiens
ttggatcttccctta

SEQ ID NO: 1455691 - DNA, 15 bp, Homo sapiens
cttggatcttccctt

SEQ ID NO: 1455692 - DNA, 15 bp, Homo sapiens
tcttggatcttccct

SEQ ID NO: 1455693 - DNA, 15 bp, Homo sapiens
ttcttggatcttccc

SEQ ID NO: 1455694 - DNA, 15 bp, Homo sapiens
tttcttggatcttcc

SEQ ID NO: 1455695 - DNA, 15 bp, Homo sapiens
ctttcttggatcttc

SEQ ID NO: 1455696 - DNA, 15 bp, Homo sapiens
gctttcttggatctt

SEQ ID NO: 1455697 - DNA, 15 bp, Homo sapiens
agctttcttggatct

SEQ ID NO: 1455698 - DNA, 15 bp, Homo sapiens
aagctttcttggatc

SEQ ID NO: 1455699 - DNA, 15 bp, Homo sapiens
aaagctttcttggat

SEQ ID NO: 1455700 - DNA, 15 bp, Homo sapiens
caaagctttcttgga

SEQ ID NO: 1455701 - DNA, 15 bp, Homo sapiens
acaaagctttcttgg

SEQ ID NO: 1455702 - DNA, 15 bp, Homo sapiens
aacaaagctttcttg

SEQ ID NO: 1455703 - DNA, 15 bp, Homo sapiens
aaacaaagctttctt

SEQ ID NO: 1455704 - DNA, 15 bp, Homo sapiens
taaacaaagctttct

SEQ ID NO: 1455705 - DNA, 15 bp, Homo sapiens
ctaaacaaagctttc

SEQ ID NO: 1455706 - DNA, 15 bp, Homo sapiens
gctaaacaaagcttt

SEQ ID NO: 1455707 - DNA, 15 bp, Homo sapiens
tgctaaacaaagctt

SEQ ID NO: 1455708 - DNA, 15 bp, Homo sapiens
gtgctaaacaaagct

SEQ ID NO: 1455709 - DNA, 15 bp, Homo sapiens
agtgctaaacaaagc

SEQ ID NO: 1455710 - DNA, 15 bp, Homo sapiens
aagtgctaaacaaag

SEQ ID NO: 1455711 - DNA, 15 bp, Homo sapiens
caagtgctaaacaaa

SEQ ID NO: 1455712 - DNA, 15 bp, Homo sapiens
acaagtgctaaacaa

SEQ ID NO: 1455713 - DNA, 15 bp, Homo sapiens
aacaagtgctaaaca

SEQ ID NO: 1455714 - DNA, 15 bp, Homo sapiens
caacaagtgctaaac

SEQ ID NO: 1455715 - DNA, 15 bp, Homo sapiens
tcaacaagtgctaaa

SEQ ID NO: 1455716 - DNA, 15 bp, Homo sapiens
ttcaacaagtgctaa

SEQ ID NO: 1455717 - DNA, 15 bp, Homo sapiens
attcaacaagtgcta

SEQ ID NO: 1455718 - DNA, 15 bp, Homo sapiens
gattcaacaagtgct

SEQ ID NO: 1455719 - DNA, 15 bp, Homo sapiens
agattcaacaagtgc

SEQ ID NO: 1455720 - DNA, 15 bp, Homo sapiens
tagattcaacaagtg

SEQ ID NO: 1455721 - DNA, 15 bp, Homo sapiens
ttagattcaacaagt

SEQ ID NO: 1455722 - DNA, 15 bp, Homo sapiens
tttagattcaacaag

SEQ ID NO: 1455723 - DNA, 15 bp, Homo sapiens
ttttagattcaacaa

SEQ ID NO: 1455724 - DNA, 15 bp, Homo sapiens
attttagattcaaca

SEQ ID NO: 1455725 - DNA, 15 bp, Homo sapiens
cattttagattcaac

SEQ ID NO: 1455726 - DNA, 15 bp, Homo sapiens
acattttagattcaa

SEQ ID NO: 1455727 - DNA, 15 bp, Homo sapiens
gacattttagattca

SEQ ID NO: 1455728 - DNA, 15 bp, Homo sapiens
agacattttagattc

SEQ ID NO: 1455729 - DNA, 15 bp, Homo sapiens
aagacattttagatt

SEQ ID NO: 1455730 - DNA, 15 bp, Homo sapiens
gaagacattttagat

SEQ ID NO: 1455731 - DNA, 15 bp, Homo sapiens
tgaagacattttaga

SEQ ID NO: 1455732 - DNA, 15 bp, Homo sapiens
ctgaagacattttag

SEQ ID NO: 1455733 - DNA, 15 bp, Homo sapiens
gctgaagacatttta

SEQ ID NO: 1455734 - DNA, 15 bp, Homo sapiens
agctgaagacatttt

SEQ ID NO: 1455735 - DNA, 15 bp, Homo sapiens
aagctgaagacattt

SEQ ID NO: 1455736 - DNA, 15 bp, Homo sapiens
taagctgaagacatt

SEQ ID NO: 1455737 - DNA, 15 bp, Homo sapiens
ttaagctgaagacat

SEQ ID NO: 1455738 - DNA, 15 bp, Homo sapiens
cttaagctgaagaca

SEQ ID NO: 1455739 - DNA, 15 bp, Homo sapiens
tcttaagctgaagac

SEQ ID NO: 1455740 - DNA, 15 bp, Homo sapiens
atcttaagctgaaga

SEQ ID NO: 1455741 - DNA, 15 bp, Homo sapiens
tatcttaagctgaag

SEQ ID NO: 1455742 - DNA, 15 bp, Homo sapiens
ttatcttaagctgaa

SEQ ID NO: 1455743 - DNA, 15 bp, Homo sapiens
attatcttaagctga

SEQ ID NO: 1455744 - DNA, 15 bp, Homo sapiens
gattatcttaagctg

SEQ ID NO: 1455745 - DNA, 15 bp, Homo sapiens
agattatcttaagct

SEQ ID NO: 1455746 - DNA, 15 bp, Homo sapiens
aagattatcttaagc

SEQ ID NO: 1455747 - DNA, 15 bp, Homo sapiens
caagattatcttaag

SEQ ID NO: 1455748 - DNA, 15 bp, Homo sapiens
tcaagattatcttaa

SEQ ID NO: 1455749 - DNA, 15 bp, Homo sapiens
ttcaagattatctta

SEQ ID NO: 1455750 - DNA, 15 bp, Homo sapiens
tttcaagattatctt

SEQ ID NO: 1455751 - DNA, 15 bp, Homo sapiens
gtttcaagattatct

SEQ ID NO: 1455752 - DNA, 15 bp, Homo sapiens
ggtttcaagattatc

SEQ ID NO: 1455753 - DNA, 15 bp, Homo sapiens
tggtttcaagattat

SEQ ID NO: 1455754 - DNA, 15 bp, Homo sapiens
ttggtttcaagatta

SEQ ID NO: 1455755 - DNA, 15 bp, Homo sapiens
attggtttcaagatt

SEQ ID NO: 1455756 - DNA, 15 bp, Homo sapiens
cattggtttcaagat

SEQ ID NO: 1455757 - DNA, 15 bp, Homo sapiens
gcattggtttcaaga

SEQ ID NO: 1455758 - DNA, 15 bp, Homo sapiens
agcattggtttcaag

SEQ ID NO: 1455759 - DNA, 15 bp, Homo sapiens
cagcattggtttcaa

SEQ ID NO: 1455760 - DNA, 15 bp, Homo sapiens
ccagcattggtttca

SEQ ID NO: 1455761 - DNA, 15 bp, Homo sapiens
tccagcattggtttc

SEQ ID NO: 1455762 - DNA, 15 bp, Homo sapiens
ctccagcattggttt

SEQ ID NO: 1455763 - DNA, 15 bp, Homo sapiens
actccagcattggtt

SEQ ID NO: 1455764 - DNA, 15 bp, Homo sapiens
aactccagcattggt

SEQ ID NO: 1455765 - DNA, 15 bp, Homo sapiens
gaactccagcattgg

SEQ ID NO: 1455766 - DNA, 15 bp, Homo sapiens
agaactccagcattg

SEQ ID NO: 1455767 - DNA, 15 bp, Homo sapiens
cagaactccagcatt

SEQ ID NO: 1455768 - DNA, 15 bp, Homo sapiens
tcagaactccagcat

SEQ ID NO: 1455769 - DNA, 15 bp, Homo sapiens
ctcagaactccagca

SEQ ID NO: 1455770 - DNA, 15 bp, Homo sapiens
actcagaactccagc

SEQ ID NO: 1455771 - DNA, 15 bp, Homo sapiens
cactcagaactccag

SEQ ID NO: 1455772 - DNA, 15 bp, Homo sapiens
ccactcagaactcca

SEQ ID NO: 1455773 - DNA, 15 bp, Homo sapiens
tccactcagaactcc

SEQ ID NO: 1455774 - DNA, 15 bp, Homo sapiens
atccactcagaactc

SEQ ID NO: 1455775 - DNA, 15 bp, Homo sapiens
gatccactcagaact

SEQ ID NO: 1455776 - DNA, 15 bp, Homo sapiens
ggatccactcagaac

SEQ ID NO: 1455777 - DNA, 15 bp, Homo sapiens
gggatccactcagaa

SEQ ID NO: 1455778 - DNA, 15 bp, Homo sapiens
ggggatccactcaga

SEQ ID NO: 1455779 - DNA, 15 bp, Homo sapiens
tggggatccactcag

SEQ ID NO: 1455780 - DNA, 15 bp, Homo sapiens
gtggggatccactca

SEQ ID NO: 1455781 - DNA, 15 bp, Homo sapiens
tgtggggatccactc

SEQ ID NO: 1455782 - DNA, 15 bp, Homo sapiens
ttgtggggatccact

SEQ ID NO: 1455783 - DNA, 15 bp, Homo sapiens
gttgtggggatccac

SEQ ID NO: 1455784 - DNA, 15 bp, Homo sapiens
tgttgtggggatcca

SEQ ID NO: 1455785 - DNA, 15 bp, Homo sapiens
ctgttgtggggatcc

SEQ ID NO: 1455786 - DNA, 15 bp, Homo sapiens
tctgttgtggggatc

SEQ ID NO: 1455787 - DNA, 15 bp, Homo sapiens
ctctgttgtggggat

SEQ ID NO: 1455788 - DNA, 15 bp, Homo sapiens
gctctgttgtgggga

SEQ ID NO: 1455789 - DNA, 15 bp, Homo sapiens
tgctctgttgtgggg

SEQ ID NO: 1455790 - DNA, 15 bp, Homo sapiens
ctgctctgttgtggg

SEQ ID NO: 1455791 - DNA, 15 bp, Homo sapiens
actgctctgttgtgg

SEQ ID NO: 1455792 - DNA, 15 bp, Homo sapiens
aactgctctgttgtg

SEQ ID NO: 1455793 - DNA, 15 bp, Homo sapiens
gaactgctctgttgt

SEQ ID NO: 1455794 - DNA, 15 bp, Homo sapiens
tgaactgctctgttg

SEQ ID NO: 1455795 - DNA, 15 bp, Homo sapiens
ttgaactgctctgtt

SEQ ID NO: 1455796 - DNA, 15 bp, Homo sapiens
attgaactgctctgt

SEQ ID NO: 1455797 - DNA, 15 bp, Homo sapiens
cattgaactgctctg

SEQ ID NO: 1455798 - DNA, 15 bp, Homo sapiens
acattgaactgctct

SEQ ID NO: 1455799 - DNA, 15 bp, Homo sapiens
tacattgaactgctc

SEQ ID NO: 1455800 - DNA, 15 bp, Homo sapiens
ttacattgaactgct

SEQ ID NO: 1455801 - DNA, 15 bp, Homo sapiens
tttacattgaactgc

SEQ ID NO: 1455802 - DNA, 15 bp, Homo sapiens
ctttacattgaactg

SEQ ID NO: 1455803 - DNA, 15 bp, Homo sapiens
tctttacattgaact

SEQ ID NO: 1455804 - DNA, 15 bp, Homo sapiens
ttctttacattgaac

SEQ ID NO: 1455805 - DNA, 15 bp, Homo sapiens
attctttacattgaa

SEQ ID NO: 1455806 - DNA, 15 bp, Homo sapiens
tattctttacattga

SEQ ID NO: 1455807 - DNA, 15 bp, Homo sapiens
gtattctttacattg

SEQ ID NO: 1455808 - DNA, 15 bp, Homo sapiens
agtattctttacatt

SEQ ID NO: 1455809 - DNA, 15 bp, Homo sapiens
cagtattctttacat

SEQ ID NO: 1455810 - DNA, 15 bp, Homo sapiens
gcagtattctttaca

SEQ ID NO: 1455811 - DNA, 15 bp, Homo sapiens
tgcagtattctttac

SEQ ID NO: 1455812 - DNA, 15 bp, Homo sapiens
ttgcagtattcttta

SEQ ID NO: 1455813 - DNA, 15 bp, Homo sapiens
tttgcagtattcttt

SEQ ID NO: 1455814 - DNA, 15 bp, Homo sapiens
ctttgcagtattctt

SEQ ID NO: 1455815 - DNA, 15 bp, Homo sapiens
cctttgcagtattct

SEQ ID NO: 1455816 - DNA, 15 bp, Homo sapiens
acctttgcagtattc

SEQ ID NO: 1455817 - DNA, 15 bp, Homo sapiens
cacctttgcagtatt

SEQ ID NO: 1455818 - DNA, 15 bp, Homo sapiens
tcacctttgcagtat

SEQ ID NO: 1455819 - DNA, 15 bp, Homo sapiens
ctcacctttgcagta

SEQ ID NO: 1455820 - DNA, 15 bp, Homo sapiens
gctcacctttgcagt

SEQ ID NO: 1455821 - DNA, 15 bp, Homo sapiens
ggctcacctttgcag

SEQ ID NO: 1455822 - DNA, 15 bp, Homo sapiens
cggctcacctttgca

SEQ ID NO: 1455823 - DNA, 15 bp, Homo sapiens
tcggctcacctttgc

SEQ ID NO: 1455824 - DNA, 15 bp, Homo sapiens
ctcggctcacctttg

SEQ ID NO: 1455825 - DNA, 15 bp, Homo sapiens
tctcggctcaccttt

SEQ ID NO: 1455826 - DNA, 15 bp, Homo sapiens
atctcggctcacctt

SEQ ID NO: 1455827 - DNA, 15 bp, Homo sapiens
gatctcggctcacct

SEQ ID NO: 1455828 - DNA, 15 bp, Homo sapiens
cgatctcggctcacc

SEQ ID NO: 1455829 - DNA, 15 bp, Homo sapiens
ctgcagtggcgcgat

SEQ ID NO: 1455830 - DNA, 15 bp, Homo sapiens
actgcagtggcgcga

SEQ ID NO: 1455831 - DNA, 15 bp, Homo sapiens
gactgcagtggcgcg

SEQ ID NO: 1455832 - DNA, 15 bp, Homo sapiens
tggactgcagtggcg

SEQ ID NO: 1455833 - DNA, 15 bp, Homo sapiens
ctggactgcagtggc

SEQ ID NO: 1455834 - DNA, 15 bp, Homo sapiens
gcccaggctggactg

SEQ ID NO: 1455835 - DNA, 15 bp, Homo sapiens
tgcccaggctggact

SEQ ID NO: 1455836 - DNA, 15 bp, Homo sapiens
ttgcccaggctggac

SEQ ID NO: 1455837 - DNA, 15 bp, Homo sapiens
cgctctgttgcccag

SEQ ID NO: 1455838 - DNA, 15 bp, Homo sapiens
tctcgctctgttgcc

SEQ ID NO: 1455839 - DNA, 15 bp, Homo sapiens
gtctcgctctgttgc

SEQ ID NO: 1455840 - DNA, 15 bp, Homo sapiens
agtctcgctctgttg

SEQ ID NO: 1455841 - DNA, 15 bp, Homo sapiens
gagtctcgctctgtt

SEQ ID NO: 1455842 - DNA, 15 bp, Homo sapiens
atatttttttttttt

SEQ ID NO: 1455843 - DNA, 15 bp, Homo sapiens
aatattttttttttt

SEQ ID NO: 1455844 - DNA, 15 bp, Homo sapiens
caatatttttttttt

SEQ ID NO: 1455845 - DNA, 15 bp, Homo sapiens
gcaatattttttttt

SEQ ID NO: 1455846 - DNA, 15 bp, Homo sapiens
tgcaatatttttttt

SEQ ID NO: 1455847 - DNA, 15 bp, Homo sapiens
ttgcaatattttttt

SEQ ID NO: 1455848 - DNA, 15 bp, Homo sapiens
tttgcaatatttttt

SEQ ID NO: 1455849 - DNA, 15 bp, Homo sapiens
ctttgcaatattttt

SEQ ID NO: 1455850 - DNA, 15 bp, Homo sapiens
cctttgcaatatttt

SEQ ID NO: 1455851 - DNA, 15 bp, Homo sapiens
gcctttgcaatattt

SEQ ID NO: 1455852 - DNA, 15 bp, Homo sapiens
agcctttgcaatatt

SEQ ID NO: 1455853 - DNA, 15 bp, Homo sapiens
cagcctttgcaatat

SEQ ID NO: 1455854 - DNA, 15 bp, Homo sapiens
ccagcctttgcaata

SEQ ID NO: 1455855 - DNA, 15 bp, Homo sapiens
cccagcctttgcaat

SEQ ID NO: 1455856 - DNA, 15 bp, Homo sapiens
acccagcctttgcaa

SEQ ID NO: 1455857 - DNA, 15 bp, Homo sapiens
cacccagcctttgca

SEQ ID NO: 1455858 - DNA, 15 bp, Homo sapiens
gcacccagcctttgc

SEQ ID NO: 1455859 - DNA, 15 bp, Homo sapiens
cgcacccagcctttg

SEQ ID NO: 1455860 - DNA, 15 bp, Homo sapiens
ccgcacccagccttt

SEQ ID NO: 1455861 - DNA, 15 bp, Homo sapiens
gccgcacccagcctt

SEQ ID NO: 1455862 - DNA, 15 bp, Homo sapiens
tgccgcacccagcct

SEQ ID NO: 1455863 - DNA, 15 bp, Homo sapiens
ctgccgcacccagcc

SEQ ID NO: 1455864 - DNA, 15 bp, Homo sapiens
cctgccgcacccagc

SEQ ID NO: 1455865 - DNA, 15 bp, Homo sapiens
ccctgccgcacccag

SEQ ID NO: 1455866 - DNA, 15 bp, Homo sapiens
gccctgccgcaccca

SEQ ID NO: 1455867 - DNA, 15 bp, Homo sapiens
tgccctgccgcaccc

SEQ ID NO: 1455868 - DNA, 15 bp, Homo sapiens
atgccctgccgcacc

SEQ ID NO: 1455869 - DNA, 15 bp, Homo sapiens
catgccctgccgcac

SEQ ID NO: 1455870 - DNA, 15 bp, Homo sapiens
gcatgccctgccgca

SEQ ID NO: 1455871 - DNA, 15 bp, Homo sapiens
ggcatgccctgccgc

SEQ ID NO: 1455872 - DNA, 15 bp, Homo sapiens
aggcatgccctgccg

SEQ ID NO: 1455873 - DNA, 15 bp, Homo sapiens
caggcatgccctgcc

SEQ ID NO: 1455874 - DNA, 15 bp, Homo sapiens
acaggcatgccctgc

SEQ ID NO: 1455875 - DNA, 15 bp, Homo sapiens
tacaggcatgccctg

SEQ ID NO: 1455876 - DNA, 15 bp, Homo sapiens
ttacaggcatgccct

SEQ ID NO: 1455877 - DNA, 15 bp, Homo sapiens
attacaggcatgccc

SEQ ID NO: 1455878 - DNA, 15 bp, Homo sapiens
gattacaggcatgcc

SEQ ID NO: 1455879 - DNA, 15 bp, Homo sapiens
ttgctgggattacag

SEQ ID NO: 1455880 - DNA, 15 bp, Homo sapiens
attgctgggattaca

SEQ ID NO: 1455881 - DNA, 15 bp, Homo sapiens
aattgctgggattac

SEQ ID NO: 1455882 - DNA, 15 bp, Homo sapiens
aaattgctgggatta

SEQ ID NO: 1455883 - DNA, 15 bp, Homo sapiens
caaattgctgggatt

SEQ ID NO: 1455884 - DNA, 15 bp, Homo sapiens
ccaaattgctgggat

SEQ ID NO: 1455885 - DNA, 15 bp, Homo sapiens
cccaaattgctggga

SEQ ID NO: 1455886 - DNA, 15 bp, Homo sapiens
tcccaaattgctggg

SEQ ID NO: 1455887 - DNA, 15 bp, Homo sapiens
ctcccaaattgctgg

SEQ ID NO: 1455888 - DNA, 15 bp, Homo sapiens
cctcccaaattgctg

SEQ ID NO: 1455889 - DNA, 15 bp, Homo sapiens
gcctcccaaattgct

SEQ ID NO: 1455890 - DNA, 15 bp, Homo sapiens
agcctcccaaattgc

SEQ ID NO: 1455891 - DNA, 15 bp, Homo sapiens
cagcctcccaaattg

SEQ ID NO: 1455892 - DNA, 15 bp, Homo sapiens
tcagcctcccaaatt

SEQ ID NO: 1455893 - DNA, 15 bp, Homo sapiens
ccttgcctcagcctc

SEQ ID NO: 1455894 - DNA, 15 bp, Homo sapiens
cccttgcctcagcct

SEQ ID NO: 1455895 - DNA, 15 bp, Homo sapiens
ccccttgcctcagcc

SEQ ID NO: 1455896 - DNA, 15 bp, Homo sapiens
tccccttgcctcagc

SEQ ID NO: 1455897 - DNA, 15 bp, Homo sapiens
atccccttgcctcag

SEQ ID NO: 1455898 - DNA, 15 bp, Homo sapiens
gatccccttgcctca

SEQ ID NO: 1455899 - DNA, 15 bp, Homo sapiens
tgatccccttgcctc

SEQ ID NO: 1455900 - DNA, 15 bp, Homo sapiens
ctgatccccttgcct

SEQ ID NO: 1455901 - DNA, 15 bp, Homo sapiens
actgatccccttgcc

SEQ ID NO: 1455902 - DNA, 15 bp, Homo sapiens
aactgatccccttgc

SEQ ID NO: 1455903 - DNA, 15 bp, Homo sapiens
caactgatccccttg

SEQ ID NO: 1455904 - DNA, 15 bp, Homo sapiens
tcaactgatcccctt

SEQ ID NO: 1455905 - DNA, 15 bp, Homo sapiens
ttcaactgatcccct

SEQ ID NO: 1455906 - DNA, 15 bp, Homo sapiens
tttcaactgatcccc

SEQ ID NO: 1455907 - DNA, 15 bp, Homo sapiens
atttcaactgatccc

SEQ ID NO: 1455908 - DNA, 15 bp, Homo sapiens
gatttcaactgatcc

SEQ ID NO: 1455909 - DNA, 15 bp, Homo sapiens
tgatttcaactgatc

SEQ ID NO: 1455910 - DNA, 15 bp, Homo sapiens
ctgatttcaactgat

SEQ ID NO: 1455911 - DNA, 15 bp, Homo sapiens
cctgatttcaactga

SEQ ID NO: 1455912 - DNA, 15 bp, Homo sapiens
tcctgatttcaactg

SEQ ID NO: 1455913 - DNA, 15 bp, Homo sapiens
ctcctgatttcaact

SEQ ID NO: 1455914 - DNA, 15 bp, Homo sapiens
actcctgatttcaac

SEQ ID NO: 1455915 - DNA, 15 bp, Homo sapiens
aactcctgatttcaa

SEQ ID NO: 1455916 - DNA, 15 bp, Homo sapiens
aaactcctgatttca

SEQ ID NO: 1455917 - DNA, 15 bp, Homo sapiens
caaactcctgatttc

SEQ ID NO: 1455918 - DNA, 15 bp, Homo sapiens
tcaaactcctgattt

SEQ ID NO: 1455919 - DNA, 15 bp, Homo sapiens
ctcaaactcctgatt

SEQ ID NO: 1455920 - DNA, 15 bp, Homo sapiens
cgttggccaggctgg

SEQ ID NO: 1455921 - DNA, 15 bp, Homo sapiens
acgttggccaggctg

SEQ ID NO: 1455922 - DNA, 15 bp, Homo sapiens
cacgttggccaggct

SEQ ID NO: 1455923 - DNA, 15 bp, Homo sapiens
tcacgttggccaggc

SEQ ID NO: 1455924 - DNA, 15 bp, Homo sapiens
gtcacgttggccagg

SEQ ID NO: 1455925 - DNA, 15 bp, Homo sapiens
tgtcacgttggccag

SEQ ID NO: 1455926 - DNA, 15 bp, Homo sapiens
ttgtcacgttggcca

SEQ ID NO: 1455927 - DNA, 15 bp, Homo sapiens
tttgtcacgttggcc

SEQ ID NO: 1455928 - DNA, 15 bp, Homo sapiens
ttttgtcacgttggc

SEQ ID NO: 1455929 - DNA, 15 bp, Homo sapiens
gttttgtcacgttgg

SEQ ID NO: 1455930 - DNA, 15 bp, Homo sapiens
ggttttgtcacgttg

SEQ ID NO: 1455931 - DNA, 15 bp, Homo sapiens
aggttttgtcacgtt

SEQ ID NO: 1455932 - DNA, 15 bp, Homo sapiens
aaggttttgtcacgt

SEQ ID NO: 1455933 - DNA, 15 bp, Homo sapiens
caaggttttgtcacg

SEQ ID NO: 1455934 - DNA, 15 bp, Homo sapiens
acaaggttttgtcac

SEQ ID NO: 1455935 - DNA, 15 bp, Homo sapiens
gacaaggttttgtca

SEQ ID NO: 1455936 - DNA, 15 bp, Homo sapiens
agacaaggttttgtc

SEQ ID NO: 1455937 - DNA, 15 bp, Homo sapiens
gagacaaggttttgt

SEQ ID NO: 1455938 - DNA, 15 bp, Homo sapiens
agagacaaggttttg

SEQ ID NO: 1455939 - DNA, 15 bp, Homo sapiens
tagagacaaggtttt

SEQ ID NO: 1455940 - DNA, 15 bp, Homo sapiens
agtagagacaaggtt

SEQ ID NO: 1455941 - DNA, 15 bp, Homo sapiens
tagtagagacaaggt

SEQ ID NO: 1455942 - DNA, 15 bp, Homo sapiens
ttagtagagacaagg

SEQ ID NO: 1455943 - DNA, 15 bp, Homo sapiens
tttagtagagacaag

SEQ ID NO: 1455944 - DNA, 15 bp, Homo sapiens
gtttagtagagacaa

SEQ ID NO: 1455945 - DNA, 15 bp, Homo sapiens
cgtttagtagagaca

SEQ ID NO: 1455946 - DNA, 15 bp, Homo sapiens
acgtttagtagagac

SEQ ID NO: 1455947 - DNA, 15 bp, Homo sapiens
tacgtttagtagaga

SEQ ID NO: 1455948 - DNA, 15 bp, Homo sapiens
gtacgtttagtagag

SEQ ID NO: 1455949 - DNA, 15 bp, Homo sapiens
tgtacgtttagtaga

SEQ ID NO: 1455950 - DNA, 15 bp, Homo sapiens
ttgtacgtttagtag

SEQ ID NO: 1455951 - DNA, 15 bp, Homo sapiens
tttgtacgtttagta

SEQ ID NO: 1455952 - DNA, 15 bp, Homo sapiens
ttttgtacgtttagt

SEQ ID NO: 1455953 - DNA, 15 bp, Homo sapiens
tttttgtacgtttag

SEQ ID NO: 1455954 - DNA, 15 bp, Homo sapiens
atttttgtacgttta

SEQ ID NO: 1455955 - DNA, 15 bp, Homo sapiens
aatttttgtacgttt

SEQ ID NO: 1455956 - DNA, 15 bp, Homo sapiens
taatttttgtacgtt

SEQ ID NO: 1455957 - DNA, 15 bp, Homo sapiens
ctaatttttgtacgt

SEQ ID NO: 1455958 - DNA, 15 bp, Homo sapiens
gctaatttttgtacg

SEQ ID NO: 1455959 - DNA, 15 bp, Homo sapiens
tccggctaatttttg

SEQ ID NO: 1455960 - DNA, 15 bp, Homo sapiens
atccggctaattttt

SEQ ID NO: 1455961 - DNA, 15 bp, Homo sapiens
catccggctaatttt

SEQ ID NO: 1455962 - DNA, 15 bp, Homo sapiens
acatccggctaattt

SEQ ID NO: 1455963 - DNA, 15 bp, Homo sapiens
cacatccggctaatt

SEQ ID NO: 1455964 - DNA, 15 bp, Homo sapiens
ccacatccggctaat

SEQ ID NO: 1455965 - DNA, 15 bp, Homo sapiens
accacatccggctaa

SEQ ID NO: 1455966 - DNA, 15 bp, Homo sapiens
caccacatccggcta

SEQ ID NO: 1455967 - DNA, 15 bp, Homo sapiens
ccaccacatccggct

SEQ ID NO: 1455968 - DNA, 15 bp, Homo sapiens
gccaccacatccggc

SEQ ID NO: 1455969 - DNA, 15 bp, Homo sapiens
tgccaccacatccgg

SEQ ID NO: 1455970 - DNA, 15 bp, Homo sapiens
gtgccaccacatccg

SEQ ID NO: 1455971 - DNA, 15 bp, Homo sapiens
tgtgccaccacatcc

SEQ ID NO: 1455972 - DNA, 15 bp, Homo sapiens
gtgtgccaccacatc

SEQ ID NO: 1455973 - DNA, 15 bp, Homo sapiens
cgtgtgccaccacat

SEQ ID NO: 1455974 - DNA, 15 bp, Homo sapiens
gcctctgcctcctgg

SEQ ID NO: 1455975 - DNA, 15 bp, Homo sapiens
agcctctgcctcctg

SEQ ID NO: 1455976 - DNA, 15 bp, Homo sapiens
cagcctctgcctcct

SEQ ID NO: 1455977 - DNA, 15 bp, Homo sapiens
gcagcctctgcctcc

SEQ ID NO: 1455978 - DNA, 15 bp, Homo sapiens
tgctcttgtcgccca

SEQ ID NO: 1455979 - DNA, 15 bp, Homo sapiens
ttgctcttgtcgccc

SEQ ID NO: 1455980 - DNA, 15 bp, Homo sapiens
tttgctcttgtcgcc

SEQ ID NO: 1455981 - DNA, 15 bp, Homo sapiens
ttttgctcttgtcgc

SEQ ID NO: 1455982 - DNA, 15 bp, Homo sapiens
gttttgctcttgtcg

SEQ ID NO: 1455983 - DNA, 15 bp, Homo sapiens
agttttgctcttgtc

SEQ ID NO: 1455984 - DNA, 15 bp, Homo sapiens
cggagttttgctctt

SEQ ID NO: 1455985 - DNA, 15 bp, Homo sapiens
acggagttttgctct

SEQ ID NO: 1455986 - DNA, 15 bp, Homo sapiens
gacggagttttgctc

SEQ ID NO: 1455987 - DNA, 15 bp, Homo sapiens
agacggagttttgct

SEQ ID NO: 1455988 - DNA, 15 bp, Homo sapiens
gagacggagttttgc

SEQ ID NO: 1455989 - DNA, 15 bp, Homo sapiens
tgagacggagttttg

SEQ ID NO: 1455990 - DNA, 15 bp, Homo sapiens
ttgagacggagtttt

SEQ ID NO: 1455991 - DNA, 15 bp, Homo sapiens
tattctttttttttt

SEQ ID NO: 1455992 - DNA, 15 bp, Homo sapiens
gtattcttttttttt

SEQ ID NO: 1455993 - DNA, 15 bp, Homo sapiens
agtattctttttttt

SEQ ID NO: 1455994 - DNA, 15 bp, Homo sapiens
tagtattcttttttt

SEQ ID NO: 1455995 - DNA, 15 bp, Homo sapiens
gtagtattctttttt

SEQ ID NO: 1455996 - DNA, 15 bp, Homo sapiens
tgtagtattcttttt

SEQ ID NO: 1455997 - DNA, 15 bp, Homo sapiens
ttgtagtattctttt

SEQ ID NO: 1455998 - DNA, 15 bp, Homo sapiens
tttgtagtattcttt

SEQ ID NO: 1455999 - DNA, 15 bp, Homo sapiens
ctttgtagtattctt

SEQ ID NO: 1456000 - DNA, 15 bp, Homo sapiens
cctttgtagtattct

SEQ ID NO: 1456001 - DNA, 15 bp, Homo sapiens
ccctttgtagtattc

SEQ ID NO: 1456002 - DNA, 15 bp, Homo sapiens
accctttgtagtatt

SEQ ID NO: 1456003 - DNA, 15 bp, Homo sapiens
gaccctttgtagtat

SEQ ID NO: 1456004 - DNA, 15 bp, Homo sapiens
agaccctttgtagta

SEQ ID NO: 1456005 - DNA, 15 bp, Homo sapiens
gagaccctttgtagt

SEQ ID NO: 1456006 - DNA, 15 bp, Homo sapiens
agagaccctttgtag

SEQ ID NO: 1456007 - DNA, 15 bp, Homo sapiens
cagagaccctttgta

SEQ ID NO: 1456008 - DNA, 15 bp, Homo sapiens
acagagaccctttgt

SEQ ID NO: 1456009 - DNA, 15 bp, Homo sapiens
cacagagaccctttg

SEQ ID NO: 1456010 - DNA, 15 bp, Homo sapiens
acacagagacccttt

SEQ ID NO: 1456011 - DNA, 15 bp, Homo sapiens
aacacagagaccctt

SEQ ID NO: 1456012 - DNA, 15 bp, Homo sapiens
gaacacagagaccct

SEQ ID NO: 1456013 - DNA, 15 bp, Homo sapiens
agaacacagagaccc

SEQ ID NO: 1456014 - DNA, 15 bp, Homo sapiens
cagaacacagagacc

SEQ ID NO: 1456015 - DNA, 15 bp, Homo sapiens
ccagaacacagagac

SEQ ID NO: 1456016 - DNA, 15 bp, Homo sapiens
accagaacacagaga

SEQ ID NO: 1456017 - DNA, 15 bp, Homo sapiens
gaccagaacacagag

SEQ ID NO: 1456018 - DNA, 15 bp, Homo sapiens
agaccagaacacaga

SEQ ID NO: 1456019 - DNA, 15 bp, Homo sapiens
gagaccagaacacag

SEQ ID NO: 1456020 - DNA, 15 bp, Homo sapiens
agagaccagaacaca

SEQ ID NO: 1456021 - DNA, 15 bp, Homo sapiens
cagagaccagaacac

SEQ ID NO: 1456022 - DNA, 15 bp, Homo sapiens
acagagaccagaaca

SEQ ID NO: 1456023 - DNA, 15 bp, Homo sapiens
tacagagaccagaac

SEQ ID NO: 1456024 - DNA, 15 bp, Homo sapiens
ctacagagaccagaa

SEQ ID NO: 1456025 - DNA, 15 bp, Homo sapiens
actacagagaccaga

SEQ ID NO: 1456026 - DNA, 15 bp, Homo sapiens
gactacagagaccag

SEQ ID NO: 1456027 - DNA, 15 bp, Homo sapiens
ggactacagagacca

SEQ ID NO: 1456028 - DNA, 15 bp, Homo sapiens
gggactacagagacc

SEQ ID NO: 1456029 - DNA, 15 bp, Homo sapiens
tgggactacagagac

SEQ ID NO: 1456030 - DNA, 15 bp, Homo sapiens
gtgggactacagaga

SEQ ID NO: 1456031 - DNA, 15 bp, Homo sapiens
agtgggactacagag

SEQ ID NO: 1456032 - DNA, 15 bp, Homo sapiens
tagtgggactacaga

SEQ ID NO: 1456033 - DNA, 15 bp, Homo sapiens
atagtgggactacag

SEQ ID NO: 1456034 - DNA, 15 bp, Homo sapiens
tatagtgggactaca

SEQ ID NO: 1456035 - DNA, 15 bp, Homo sapiens
ttatagtgggactac

SEQ ID NO: 1456036 - DNA, 15 bp, Homo sapiens
attatagtgggacta

SEQ ID NO: 1456037 - DNA, 15 bp, Homo sapiens
aattatagtgggact

SEQ ID NO: 1456038 - DNA, 15 bp, Homo sapiens
aaattatagtgggac

SEQ ID NO: 1456039 - DNA, 15 bp, Homo sapiens
taaattatagtggga

SEQ ID NO: 1456040 - DNA, 15 bp, Homo sapiens
ataaattatagtggg

SEQ ID NO: 1456041 - DNA, 15 bp, Homo sapiens
tataaattatagtgg

SEQ ID NO: 1456042 - DNA, 15 bp, Homo sapiens
ttataaattatagtg

SEQ ID NO: 1456043 - DNA, 15 bp, Homo sapiens
gttataaattatagt

SEQ ID NO: 1456044 - DNA, 15 bp, Homo sapiens
tgttataaattatag

SEQ ID NO: 1456045 - DNA, 15 bp, Homo sapiens
atgttataaattata

SEQ ID NO: 1456046 - DNA, 15 bp, Homo sapiens
tatgttataaattat

SEQ ID NO: 1456047 - DNA, 15 bp, Homo sapiens
ttatgttataaatta

SEQ ID NO: 1456048 - DNA, 15 bp, Homo sapiens
gttatgttataaatt

SEQ ID NO: 1456049 - DNA, 15 bp, Homo sapiens
agttatgttataaat

SEQ ID NO: 1456050 - DNA, 15 bp, Homo sapiens
aagttatgttataaa

SEQ ID NO: 1456051 - DNA, 15 bp, Homo sapiens
caagttatgttataa

SEQ ID NO: 1456052 - DNA, 15 bp, Homo sapiens
tcaagttatgttata

SEQ ID NO: 1456053 - DNA, 15 bp, Homo sapiens
atcaagttatgttat

SEQ ID NO: 1456054 - DNA, 15 bp, Homo sapiens
tatcaagttatgtta

SEQ ID NO: 1456055 - DNA, 15 bp, Homo sapiens
atatcaagttatgtt

SEQ ID NO: 1456056 - DNA, 15 bp, Homo sapiens
tatatcaagttatgt

SEQ ID NO: 1456057 - DNA, 15 bp, Homo sapiens
ctatatcaagttatg

SEQ ID NO: 1456058 - DNA, 15 bp, Homo sapiens
gctatatcaagttat

SEQ ID NO: 1456059 - DNA, 15 bp, Homo sapiens
agctatatcaagtta

SEQ ID NO: 1456060 - DNA, 15 bp, Homo sapiens
aagctatatcaagtt

SEQ ID NO: 1456061 - DNA, 15 bp, Homo sapiens
aaagctatatcaagt

SEQ ID NO: 1456062 - DNA, 15 bp, Homo sapiens
aaaagctatatcaag

SEQ ID NO: 1456063 - DNA, 15 bp, Homo sapiens
taaaagctatatcaa

SEQ ID NO: 1456064 - DNA, 15 bp, Homo sapiens
ctaaaagctatatca

SEQ ID NO: 1456065 - DNA, 15 bp, Homo sapiens
cctaaaagctatatc

SEQ ID NO: 1456066 - DNA, 15 bp, Homo sapiens
acctaaaagctatat

SEQ ID NO: 1456067 - DNA, 15 bp, Homo sapiens
aacctaaaagctata

SEQ ID NO: 1456068 - DNA, 15 bp, Homo sapiens
caacctaaaagctat

SEQ ID NO: 1456069 - DNA, 15 bp, Homo sapiens
gcaacctaaaagcta

SEQ ID NO: 1456070 - DNA, 15 bp, Homo sapiens
ggcaacctaaaagct

SEQ ID NO: 1456071 - DNA, 15 bp, Homo sapiens
aggcaacctaaaagc

SEQ ID NO: 1456072 - DNA, 15 bp, Homo sapiens
aaggcaacctaaaag

SEQ ID NO: 1456073 - DNA, 15 bp, Homo sapiens
gaaggcaacctaaaa

SEQ ID NO: 1456074 - DNA, 15 bp, Homo sapiens
ggaaggcaacctaaa

SEQ ID NO: 1456075 - DNA, 15 bp, Homo sapiens
aggaaggcaacctaa

SEQ ID NO: 1456076 - DNA, 15 bp, Homo sapiens
caggaaggcaaccta

SEQ ID NO: 1456077 - DNA, 15 bp, Homo sapiens
acaggaaggcaacct

SEQ ID NO: 1456078 - DNA, 15 bp, Homo sapiens
cacaggaaggcaacc

SEQ ID NO: 1456079 - DNA, 15 bp, Homo sapiens
tcacaggaaggcaac

SEQ ID NO: 1456080 - DNA, 15 bp, Homo sapiens
atcacaggaaggcaa

SEQ ID NO: 1456081 - DNA, 15 bp, Homo sapiens
aatcacaggaaggca

SEQ ID NO: 1456082 - DNA, 15 bp, Homo sapiens
caatcacaggaaggc

SEQ ID NO: 1456083 - DNA, 15 bp, Homo sapiens
gcaatcacaggaagg

SEQ ID NO: 1456084 - DNA, 15 bp, Homo sapiens
tgcaatcacaggaag

SEQ ID NO: 1456085 - DNA, 15 bp, Homo sapiens
atgcaatcacaggaa

SEQ ID NO: 1456086 - DNA, 15 bp, Homo sapiens
tatgcaatcacagga

SEQ ID NO: 1456087 - DNA, 15 bp, Homo sapiens
ctatgcaatcacagg

SEQ ID NO: 1456088 - DNA, 15 bp, Homo sapiens
cctatgcaatcacag

SEQ ID NO: 1456089 - DNA, 15 bp, Homo sapiens
tcctatgcaatcaca

SEQ ID NO: 1456090 - DNA, 15 bp, Homo sapiens
ttcctatgcaatcac

SEQ ID NO: 1456091 - DNA, 15 bp, Homo sapiens
cttcctatgcaatca

SEQ ID NO: 1456092 - DNA, 15 bp, Homo sapiens
tcttcctatgcaatc

SEQ ID NO: 1456093 - DNA, 15 bp, Homo sapiens
gtcttcctatgcaat

SEQ ID NO: 1456094 - DNA, 15 bp, Homo sapiens
tgtcttcctatgcaa

SEQ ID NO: 1456095 - DNA, 15 bp, Homo sapiens
ttgtcttcctatgca

SEQ ID NO: 1456096 - DNA, 15 bp, Homo sapiens
cttgtcttcctatgc

SEQ ID NO: 1456097 - DNA, 15 bp, Homo sapiens
gcttgtcttcctatg

SEQ ID NO: 1456098 - DNA, 15 bp, Homo sapiens
tgcttgtcttcctat

SEQ ID NO: 1456099 - DNA, 15 bp, Homo sapiens
gtgcttgtcttccta

SEQ ID NO: 1456100 - DNA, 15 bp, Homo sapiens
cgtgcttgtcttcct

SEQ ID NO: 1456101 - DNA, 15 bp, Homo sapiens
gcgtgcttgtcttcc

SEQ ID NO: 1456102 - DNA, 15 bp, Homo sapiens
agcgtgcttgtcttc

SEQ ID NO: 1456103 - DNA, 15 bp, Homo sapiens
gagcgtgcttgtctt

SEQ ID NO: 1456104 - DNA, 15 bp, Homo sapiens
agagcgtgcttgtct

SEQ ID NO: 1456105 - DNA, 15 bp, Homo sapiens
cagagcgtgcttgtc

SEQ ID NO: 1456106 - DNA, 15 bp, Homo sapiens
gcagagcgtgcttgt

SEQ ID NO: 1456107 - DNA, 15 bp, Homo sapiens
agcagagcgtgcttg

SEQ ID NO: 1456108 - DNA, 15 bp, Homo sapiens
cagcagagcgtgctt

SEQ ID NO: 1456109 - DNA, 15 bp, Homo sapiens
gcagcagagcgtgct

SEQ ID NO: 1456110 - DNA, 15 bp, Homo sapiens
agcagcagagcgtgc

SEQ ID NO: 1456111 - DNA, 15 bp, Homo sapiens
gagcagcagagcgtg

SEQ ID NO: 1456112 - DNA, 15 bp, Homo sapiens
agagcagcagagcgt

SEQ ID NO: 1456113 - DNA, 15 bp, Homo sapiens
gagagcagcagagcg

SEQ ID NO: 1456114 - DNA, 15 bp, Homo sapiens
agagagcagcagagc

SEQ ID NO: 1456115 - DNA, 15 bp, Homo sapiens
aagagagcagcagag

SEQ ID NO: 1456116 - DNA, 15 bp, Homo sapiens
caagagagcagcaga

SEQ ID NO: 1456117 - DNA, 15 bp, Homo sapiens
ccaagagagcagcag

SEQ ID NO: 1456118 - DNA, 15 bp, Homo sapiens
gccaagagagcagca

SEQ ID NO: 1456119 - DNA, 15 bp, Homo sapiens
tgccaagagagcagc

SEQ ID NO: 1456120 - DNA, 15 bp, Homo sapiens
ttgccaagagagcag

SEQ ID NO: 1456121 - DNA, 15 bp, Homo sapiens
cttgccaagagagca

SEQ ID NO: 1456122 - DNA, 15 bp, Homo sapiens
ccttgccaagagagc

SEQ ID NO: 1456123 - DNA, 15 bp, Homo sapiens
accttgccaagagag

SEQ ID NO: 1456124 - DNA, 15 bp, Homo sapiens
gaccttgccaagaga

SEQ ID NO: 1456125 - DNA, 15 bp, Homo sapiens
agaccttgccaagag

SEQ ID NO: 1456126 - DNA, 15 bp, Homo sapiens
aagaccttgccaaga

SEQ ID NO: 1456127 - DNA, 15 bp, Homo sapiens
taagaccttgccaag

SEQ ID NO: 1456128 - DNA, 15 bp, Homo sapiens
gtaagaccttgccaa

SEQ ID NO: 1456129 - DNA, 15 bp, Homo sapiens
cgtaagaccttgcca

SEQ ID NO: 1456130 - DNA, 15 bp, Homo sapiens
tcgtaagaccttgcc

SEQ ID NO: 1456131 - DNA, 15 bp, Homo sapiens
atcgtaagaccttgc

SEQ ID NO: 1456132 - DNA, 15 bp, Homo sapiens
aatcgtaagaccttg

SEQ ID NO: 1456133 - DNA, 15 bp, Homo sapiens
caatcgtaagacctt

SEQ ID NO: 1456134 - DNA, 15 bp, Homo sapiens
gcaatcgtaagacct

SEQ ID NO: 1456135 - DNA, 15 bp, Homo sapiens
ggcaatcgtaagacc

SEQ ID NO: 1456136 - DNA, 15 bp, Homo sapiens
aggcaatcgtaagac

SEQ ID NO: 1456137 - DNA, 15 bp, Homo sapiens
gaggcaatcgtaaga

SEQ ID NO: 1456138 - DNA, 15 bp, Homo sapiens
tgaggcaatcgtaag

SEQ ID NO: 1456139 - DNA, 15 bp, Homo sapiens
ttgaggcaatcgtaa

SEQ ID NO: 1456140 - DNA, 15 bp, Homo sapiens
tttgaggcaatcgta

SEQ ID NO: 1456141 - DNA, 15 bp, Homo sapiens
gtttgaggcaatcgt

SEQ ID NO: 1456142 - DNA, 15 bp, Homo sapiens
tgtttgaggcaatcg

SEQ ID NO: 1456143 - DNA, 15 bp, Homo sapiens
ttgtttgaggcaatc

SEQ ID NO: 1456144 - DNA, 15 bp, Homo sapiens
gttgtttgaggcaat

SEQ ID NO: 1456145 - DNA, 15 bp, Homo sapiens
tgttgtttgaggcaa

SEQ ID NO: 1456146 - DNA, 15 bp, Homo sapiens
ttgttgtttgaggca

SEQ ID NO: 1456147 - DNA, 15 bp, Homo sapiens
gttgttgtttgaggc

SEQ ID NO: 1456148 - DNA, 15 bp, Homo sapiens
agttgttgtttgagg

SEQ ID NO: 1456149 - DNA, 15 bp, Homo sapiens
tagttgttgtttgag

SEQ ID NO: 1456150 - DNA, 15 bp, Homo sapiens
ctagttgttgtttga

SEQ ID NO: 1456151 - DNA, 15 bp, Homo sapiens
tctagttgttgtttg

SEQ ID NO: 1456152 - DNA, 15 bp, Homo sapiens
gtctagttgttgttt

SEQ ID NO: 1456153 - DNA, 15 bp, Homo sapiens
tgtctagttgttgtt

SEQ ID NO: 1456154 - DNA, 15 bp, Homo sapiens
gtgtctagttgttgt

SEQ ID NO: 1456155 - DNA, 15 bp, Homo sapiens
tgtgtctagttgttg

SEQ ID NO: 1456156 - DNA, 15 bp, Homo sapiens
gtgtgtctagttgtt

SEQ ID NO: 1456157 - DNA, 15 bp, Homo sapiens
agtgtgtctagttgt

SEQ ID NO: 1456158 - DNA, 15 bp, Homo sapiens
cagtgtgtctagttg

SEQ ID NO: 1456159 - DNA, 15 bp, Homo sapiens
ccagtgtgtctagtt

SEQ ID NO: 1456160 - DNA, 15 bp, Homo sapiens
gccagtgtgtctagt

SEQ ID NO: 1456161 - DNA, 15 bp, Homo sapiens
agccagtgtgtctag

SEQ ID NO: 1456162 - DNA, 15 bp, Homo sapiens
tagccagtgtgtcta

SEQ ID NO: 1456163 - DNA, 15 bp, Homo sapiens
ttagccagtgtgtct

SEQ ID NO: 1456164 - DNA, 15 bp, Homo sapiens
attagccagtgtgtc

SEQ ID NO: 1456165 - DNA, 15 bp, Homo sapiens
aattagccagtgtgt

SEQ ID NO: 1456166 - DNA, 15 bp, Homo sapiens
taattagccagtgtg

SEQ ID NO: 1456167 - DNA, 15 bp, Homo sapiens
gtaattagccagtgt

SEQ ID NO: 1456168 - DNA, 15 bp, Homo sapiens
agtaattagccagtg

SEQ ID NO: 1456169 - DNA, 15 bp, Homo sapiens
gagtaattagccagt

SEQ ID NO: 1456170 - DNA, 15 bp, Homo sapiens
agagtaattagccag

SEQ ID NO: 1456171 - DNA, 15 bp, Homo sapiens
gagagtaattagcca

SEQ ID NO: 1456172 - DNA, 15 bp, Homo sapiens
tgagagtaattagcc

SEQ ID NO: 1456173 - DNA, 15 bp, Homo sapiens
ctgagagtaattagc

SEQ ID NO: 1456174 - DNA, 15 bp, Homo sapiens
actgagagtaattag

SEQ ID NO: 1456175 - DNA, 15 bp, Homo sapiens
tactgagagtaatta

SEQ ID NO: 1456176 - DNA, 15 bp, Homo sapiens
ttactgagagtaatt

SEQ ID NO: 1456177 - DNA, 15 bp, Homo sapiens
cttactgagagtaat

SEQ ID NO: 1456178 - DNA, 15 bp, Homo sapiens
tcttactgagagtaa

SEQ ID NO: 1456179 - DNA, 15 bp, Homo sapiens
atcttactgagagta

SEQ ID NO: 1456180 - DNA, 15 bp, Homo sapiens
gatcttactgagagt

SEQ ID NO: 1456181 - DNA, 15 bp, Homo sapiens
tgatcttactgagag

SEQ ID NO: 1456182 - DNA, 15 bp, Homo sapiens
ctgatcttactgaga

SEQ ID NO: 1456183 - DNA, 15 bp, Homo sapiens
gctgatcttactgag

SEQ ID NO: 1456184 - DNA, 15 bp, Homo sapiens
agctgatcttactga

SEQ ID NO: 1456185 - DNA, 15 bp, Homo sapiens
gagctgatcttactg

SEQ ID NO: 1456186 - DNA, 15 bp, Homo sapiens
tgagctgatcttact

SEQ ID NO: 1456187 - DNA, 15 bp, Homo sapiens
ctgagctgatcttac

SEQ ID NO: 1456188 - DNA, 15 bp, Homo sapiens
actgagctgatctta

SEQ ID NO: 1456189 - DNA, 15 bp, Homo sapiens
aactgagctgatctt

SEQ ID NO: 1456190 - DNA, 15 bp, Homo sapiens
taactgagctgatct

SEQ ID NO: 1456191 - DNA, 15 bp, Homo sapiens
ataactgagctgatc

SEQ ID NO: 1456192 - DNA, 15 bp, Homo sapiens
cataactgagctgat

SEQ ID NO: 1456193 - DNA, 15 bp, Homo sapiens
gcataactgagctga

SEQ ID NO: 1456194 - DNA, 15 bp, Homo sapiens
ggcataactgagctg

SEQ ID NO: 1456195 - DNA, 15 bp, Homo sapiens
tggcataactgagct

SEQ ID NO: 1456196 - DNA, 15 bp, Homo sapiens
ttggcataactgagc

SEQ ID NO: 1456197 - DNA, 15 bp, Homo sapiens
tttggcataactgag

SEQ ID NO: 1456198 - DNA, 15 bp, Homo sapiens
ttttggcataactga

SEQ ID NO: 1456199 - DNA, 15 bp, Homo sapiens
gttttggcataactg

SEQ ID NO: 1456200 - DNA, 15 bp, Homo sapiens
ggttttggcataact

SEQ ID NO: 1456201 - DNA, 15 bp, Homo sapiens
tggttttggcataac

SEQ ID NO: 1456202 - DNA, 15 bp, Homo sapiens
ttggttttggcataa

SEQ ID NO: 1456203 - DNA, 15 bp, Homo sapiens
tttggttttggcata

SEQ ID NO: 1456204 - DNA, 15 bp, Homo sapiens
atttggttttggcat

SEQ ID NO: 1456205 - DNA, 15 bp, Homo sapiens
gatttggttttggca

SEQ ID NO: 1456206 - DNA, 15 bp, Homo sapiens
ggatttggttttggc

SEQ ID NO: 1456207 - DNA, 15 bp, Homo sapiens
tggatttggttttgg

SEQ ID NO: 1456208 - DNA, 15 bp, Homo sapiens
ttggatttggttttg

SEQ ID NO: 1456209 - DNA, 15 bp, Homo sapiens
gttggatttggtttt

SEQ ID NO: 1456210 - DNA, 15 bp, Homo sapiens
tgttggatttggttt

SEQ ID NO: 1456211 - DNA, 15 bp, Homo sapiens
gtgttggatttggtt

SEQ ID NO: 1456212 - DNA, 15 bp, Homo sapiens
agtgttggatttggt

SEQ ID NO: 1456213 - DNA, 15 bp, Homo sapiens
aagtgttggatttgg

SEQ ID NO: 1456214 - DNA, 15 bp, Homo sapiens
aaagtgttggatttg

SEQ ID NO: 1456215 - DNA, 15 bp, Homo sapiens
aaaagtgttggattt

SEQ ID NO: 1456216 - DNA, 15 bp, Homo sapiens
gaaaagtgttggatt

SEQ ID NO: 1456217 - DNA, 15 bp, Homo sapiens
agaaaagtgttggat

SEQ ID NO: 1456218 - DNA, 15 bp, Homo sapiens
gagaaaagtgttgga

SEQ ID NO: 1456219 - DNA, 15 bp, Homo sapiens
tgagaaaagtgttgg

SEQ ID NO: 1456220 - DNA, 15 bp, Homo sapiens
ctgagaaaagtgttg

SEQ ID NO: 1456221 - DNA, 15 bp, Homo sapiens
actgagaaaagtgtt

SEQ ID NO: 1456222 - DNA, 15 bp, Homo sapiens
aactgagaaaagtgt

SEQ ID NO: 1456223 - DNA, 15 bp, Homo sapiens
taactgagaaaagtg

SEQ ID NO: 1456224 - DNA, 15 bp, Homo sapiens
ttaactgagaaaagt

SEQ ID NO: 1456225 - DNA, 15 bp, Homo sapiens
attaactgagaaaag

SEQ ID NO: 1456226 - DNA, 15 bp, Homo sapiens
aattaactgagaaaa

SEQ ID NO: 1456227 - DNA, 15 bp, Homo sapiens
caattaactgagaaa

SEQ ID NO: 1456228 - DNA, 15 bp, Homo sapiens
acaattaactgagaa

SEQ ID NO: 1456229 - DNA, 15 bp, Homo sapiens
aacaattaactgaga

SEQ ID NO: 1456230 - DNA, 15 bp, Homo sapiens
taacaattaactgag

SEQ ID NO: 1456231 - DNA, 15 bp, Homo sapiens
ttaacaattaactga

SEQ ID NO: 1456232 - DNA, 15 bp, Homo sapiens
gttaacaattaactg

SEQ ID NO: 1456233 - DNA, 15 bp, Homo sapiens
tgttaacaattaact

SEQ ID NO: 1456234 - DNA, 15 bp, Homo sapiens
atgttaacaattaac

SEQ ID NO: 1456235 - DNA, 15 bp, Homo sapiens
gatgttaacaattaa

SEQ ID NO: 1456236 - DNA, 15 bp, Homo sapiens
agatgttaacaatta

SEQ ID NO: 1456237 - DNA, 15 bp, Homo sapiens
aagatgttaacaatt

SEQ ID NO: 1456238 - DNA, 15 bp, Homo sapiens
aaagatgttaacaat

SEQ ID NO: 1456239 - DNA, 15 bp, Homo sapiens
gaaagatgttaacaa

SEQ ID NO: 1456240 - DNA, 15 bp, Homo sapiens
tgaaagatgttaaca

SEQ ID NO: 1456241 - DNA, 15 bp, Homo sapiens
ctgaaagatgttaac

SEQ ID NO: 1456242 - DNA, 15 bp, Homo sapiens
actgaaagatgttaa

SEQ ID NO: 1456243 - DNA, 15 bp, Homo sapiens
tactgaaagatgtta

SEQ ID NO: 1456244 - DNA, 15 bp, Homo sapiens
ctactgaaagatgtt

SEQ ID NO: 1456245 - DNA, 15 bp, Homo sapiens
tctactgaaagatgt

SEQ ID NO: 1456246 - DNA, 15 bp, Homo sapiens
ttctactgaaagatg

SEQ ID NO: 1456247 - DNA, 15 bp, Homo sapiens
tttctactgaaagat

SEQ ID NO: 1456248 - DNA, 15 bp, Homo sapiens
ttttctactgaaaga

SEQ ID NO: 1456249 - DNA, 15 bp, Homo sapiens
gttttctactgaaag

SEQ ID NO: 1456250 - DNA, 15 bp, Homo sapiens
tgttttctactgaaa

SEQ ID NO: 1456251 - DNA, 15 bp, Homo sapiens
atgttttctactgaa

SEQ ID NO: 1456252 - DNA, 15 bp, Homo sapiens
gatgttttctactga

SEQ ID NO: 1456253 - DNA, 15 bp, Homo sapiens
agatgttttctactg

SEQ ID NO: 1456254 - DNA, 15 bp, Homo sapiens
aagatgttttctact

SEQ ID NO: 1456255 - DNA, 15 bp, Homo sapiens
caagatgttttctac

SEQ ID NO: 1456256 - DNA, 15 bp, Homo sapiens
ccaagatgttttcta

SEQ ID NO: 1456257 - DNA, 15 bp, Homo sapiens
tccaagatgttttct

SEQ ID NO: 1456258 - DNA, 15 bp, Homo sapiens
ttccaagatgttttc

SEQ ID NO: 1456259 - DNA, 15 bp, Homo sapiens
tttccaagatgtttt

SEQ ID NO: 1456260 - DNA, 15 bp, Homo sapiens
atttccaagatgttt

SEQ ID NO: 1456261 - DNA, 15 bp, Homo sapiens
gatttccaagatgtt

SEQ ID NO: 1456262 - DNA, 15 bp, Homo sapiens
agatttccaagatgt

SEQ ID NO: 1456263 - DNA, 15 bp, Homo sapiens
aagatttccaagatg

SEQ ID NO: 1456264 - DNA, 15 bp, Homo sapiens
aaagatttccaagat

SEQ ID NO: 1456265 - DNA, 15 bp, Homo sapiens
aaaagatttccaaga

SEQ ID NO: 1456266 - DNA, 15 bp, Homo sapiens
taaaagatttccaag

SEQ ID NO: 1456267 - DNA, 15 bp, Homo sapiens
ttaaaagatttccaa

SEQ ID NO: 1456268 - DNA, 15 bp, Homo sapiens
tttaaaagatttcca

SEQ ID NO: 1456269 - DNA, 15 bp, Homo sapiens
ttttaaaagatttcc

SEQ ID NO: 1456270 - DNA, 15 bp, Homo sapiens
cttttaaaagatttc

SEQ ID NO: 1456271 - DNA, 15 bp, Homo sapiens
acttttaaaagattt

SEQ ID NO: 1456272 - DNA, 15 bp, Homo sapiens
gacttttaaaagatt

SEQ ID NO: 1456273 - DNA, 15 bp, Homo sapiens
tgacttttaaaagat

SEQ ID NO: 1456274 - DNA, 15 bp, Homo sapiens
atgacttttaaaaga

SEQ ID NO: 1456275 - DNA, 15 bp, Homo sapiens
catgacttttaaaag

SEQ ID NO: 1456276 - DNA, 15 bp, Homo sapiens
tcatgacttttaaaa

SEQ ID NO: 1456277 - DNA, 15 bp, Homo sapiens
ttcatgacttttaaa

SEQ ID NO: 1456278 - DNA, 15 bp, Homo sapiens
attcatgacttttaa

SEQ ID NO: 1456279 - DNA, 15 bp, Homo sapiens
gattcatgactttta

SEQ ID NO: 1456280 - DNA, 15 bp, Homo sapiens
tgattcatgactttt

SEQ ID NO: 1456281 - DNA, 15 bp, Homo sapiens
ttgattcatgacttt

SEQ ID NO: 1456282 - DNA, 15 bp, Homo sapiens
attgattcatgactt

SEQ ID NO: 1456283 - DNA, 15 bp, Homo sapiens
tattgattcatgact

SEQ ID NO: 1456284 - DNA, 15 bp, Homo sapiens
ctattgattcatgac

SEQ ID NO: 1456285 - DNA, 15 bp, Homo sapiens
tctattgattcatga

SEQ ID NO: 1456286 - DNA, 15 bp, Homo sapiens
atctattgattcatg

SEQ ID NO: 1456287 - DNA, 15 bp, Homo sapiens
gatctattgattcat

SEQ ID NO: 1456288 - DNA, 15 bp, Homo sapiens
tgatctattgattca

SEQ ID NO: 1456289 - DNA, 15 bp, Homo sapiens
ttgatctattgattc

SEQ ID NO: 1456290 - DNA, 15 bp, Homo sapiens
cttgatctattgatt

SEQ ID NO: 1456291 - DNA, 15 bp, Homo sapiens
acttgatctattgat

SEQ ID NO: 1456292 - DNA, 15 bp, Homo sapiens
gacttgatctattga

SEQ ID NO: 1456293 - DNA, 15 bp, Homo sapiens
tgacttgatctattg

SEQ ID NO: 1456294 - DNA, 15 bp, Homo sapiens
ctgacttgatctatt

SEQ ID NO: 1456295 - DNA, 15 bp, Homo sapiens
tctgacttgatctat

SEQ ID NO: 1456296 - DNA, 15 bp, Homo sapiens
atctgacttgatcta

SEQ ID NO: 1456297 - DNA, 15 bp, Homo sapiens
tatctgacttgatct

SEQ ID NO: 1456298 - DNA, 15 bp, Homo sapiens
atatctgacttgatc

SEQ ID NO: 1456299 - DNA, 15 bp, Homo sapiens
aatatctgacttgat

SEQ ID NO: 1456300 - DNA, 15 bp, Homo sapiens
aaatatctgacttga

SEQ ID NO: 1456301 - DNA, 15 bp, Homo sapiens
aaaatatctgacttg

SEQ ID NO: 1456302 - DNA, 15 bp, Homo sapiens
gaaaatatctgactt

SEQ ID NO: 1456303 - DNA, 15 bp, Homo sapiens
tgaaaatatctgact

SEQ ID NO: 1456304 - DNA, 15 bp, Homo sapiens
atgaaaatatctgac

SEQ ID NO: 1456305 - DNA, 15 bp, Homo sapiens
catgaaaatatctga

SEQ ID NO: 1456306 - DNA, 15 bp, Homo sapiens
ccatgaaaatatctg

SEQ ID NO: 1456307 - DNA, 15 bp, Homo sapiens
cccatgaaaatatct

SEQ ID NO: 1456308 - DNA, 15 bp, Homo sapiens
acccatgaaaatatc

SEQ ID NO: 1456309 - DNA, 15 bp, Homo sapiens
aacccatgaaaatat

SEQ ID NO: 1456310 - DNA, 15 bp, Homo sapiens
caacccatgaaaata

SEQ ID NO: 1456311 - DNA, 15 bp, Homo sapiens
acaacccatgaaaat

SEQ ID NO: 1456312 - DNA, 15 bp, Homo sapiens
cacaacccatgaaaa

SEQ ID NO: 1456313 - DNA, 15 bp, Homo sapiens
acacaacccatgaaa

SEQ ID NO: 1456314 - DNA, 15 bp, Homo sapiens
aacacaacccatgaa

SEQ ID NO: 1456315 - DNA, 15 bp, Homo sapiens
aaacacaacccatga

SEQ ID NO: 1456316 - DNA, 15 bp, Homo sapiens
aaaacacaacccatg

SEQ ID NO: 1456317 - DNA, 15 bp, Homo sapiens
taaaacacaacccat

SEQ ID NO: 1456318 - DNA, 15 bp, Homo sapiens
ttaaaacacaaccca

SEQ ID NO: 1456319 - DNA, 15 bp, Homo sapiens
attaaaacacaaccc

SEQ ID NO: 1456320 - DNA, 15 bp, Homo sapiens
tattaaaacacaacc

SEQ ID NO: 1456321 - DNA, 15 bp, Homo sapiens
gtattaaaacacaac

SEQ ID NO: 1456322 - DNA, 15 bp, Homo sapiens
tgtattaaaacacaa

SEQ ID NO: 1456323 - DNA, 15 bp, Homo sapiens
ttgtattaaaacaca

SEQ ID NO: 1456324 - DNA, 15 bp, Homo sapiens
attgtattaaaacac

SEQ ID NO: 1456325 - DNA, 15 bp, Homo sapiens
gattgtattaaaaca

SEQ ID NO: 1456326 - DNA, 15 bp, Homo sapiens
agattgtattaaaac

SEQ ID NO: 1456327 - DNA, 15 bp, Homo sapiens
gagattgtattaaaa

SEQ ID NO: 1456328 - DNA, 15 bp, Homo sapiens
agagattgtattaaa

SEQ ID NO: 1456329 - DNA, 15 bp, Homo sapiens
aagagattgtattaa

SEQ ID NO: 1456330 - DNA, 15 bp, Homo sapiens
aaagagattgtatta

SEQ ID NO: 1456331 - DNA, 15 bp, Homo sapiens
gaaagagattgtatt

SEQ ID NO: 1456332 - DNA, 15 bp, Homo sapiens
ggaaagagattgtat

SEQ ID NO: 1456333 - DNA, 15 bp, Homo sapiens
tggaaagagattgta

SEQ ID NO: 1456334 - DNA, 15 bp, Homo sapiens
ctggaaagagattgt

SEQ ID NO: 1456335 - DNA, 15 bp, Homo sapiens
tctggaaagagattg

SEQ ID NO: 1456336 - DNA, 15 bp, Homo sapiens
ttctggaaagagatt

SEQ ID NO: 1456337 - DNA, 15 bp, Homo sapiens
tttctggaaagagat

SEQ ID NO: 1456338 - DNA, 15 bp, Homo sapiens
atttctggaaagaga

SEQ ID NO: 1456339 - DNA, 15 bp, Homo sapiens
gatttctggaaagag

SEQ ID NO: 1456340 - DNA, 15 bp, Homo sapiens
ggatttctggaaaga

SEQ ID NO: 1456341 - DNA, 15 bp, Homo sapiens
gggatttctggaaag

SEQ ID NO: 1456342 - DNA, 15 bp, Homo sapiens
tgggatttctggaaa

SEQ ID NO: 1456343 - DNA, 15 bp, Homo sapiens
atgggatttctggaa

SEQ ID NO: 1456344 - DNA, 15 bp, Homo sapiens
tatgggatttctgga

SEQ ID NO: 1456345 - DNA, 15 bp, Homo sapiens
ctatgggatttctgg

SEQ ID NO: 1456346 - DNA, 15 bp, Homo sapiens
gctatgggatttctg

SEQ ID NO: 1456347 - DNA, 15 bp, Homo sapiens
tgctatgggatttct

SEQ ID NO: 1456348 - DNA, 15 bp, Homo sapiens
atgctatgggatttc

SEQ ID NO: 1456349 - DNA, 15 bp, Homo sapiens
catgctatgggattt

SEQ ID NO: 1456350 - DNA, 15 bp, Homo sapiens
ccatgctatgggatt

SEQ ID NO: 1456351 - DNA, 15 bp, Homo sapiens
tccatgctatgggat

SEQ ID NO: 1456352 - DNA, 15 bp, Homo sapiens
ctccatgctatggga

SEQ ID NO: 1456353 - DNA, 15 bp, Homo sapiens
actccatgctatggg

SEQ ID NO: 1456354 - DNA, 15 bp, Homo sapiens
aactccatgctatgg

SEQ ID NO: 1456355 - DNA, 15 bp, Homo sapiens
aaactccatgctatg

SEQ ID NO: 1456356 - DNA, 15 bp, Homo sapiens
aaaactccatgctat

SEQ ID NO: 1456357 - DNA, 15 bp, Homo sapiens
caaaactccatgcta

SEQ ID NO: 1456358 - DNA, 15 bp, Homo sapiens
gcaaaactccatgct

SEQ ID NO: 1456359 - DNA, 15 bp, Homo sapiens
ggcaaaactccatgc

SEQ ID NO: 1456360 - DNA, 15 bp, Homo sapiens
tggcaaaactccatg

SEQ ID NO: 1456361 - DNA, 15 bp, Homo sapiens
ttggcaaaactccat

SEQ ID NO: 1456362 - DNA, 15 bp, Homo sapiens
tttggcaaaactcca

SEQ ID NO: 1456363 - DNA, 15 bp, Homo sapiens
ttttggcaaaactcc

SEQ ID NO: 1456364 - DNA, 15 bp, Homo sapiens
tttttggcaaaactc

SEQ ID NO: 1456365 - DNA, 15 bp, Homo sapiens
ttttttggcaaaact

SEQ ID NO: 1456366 - DNA, 15 bp, Homo sapiens
tttttttggcaaaac

SEQ ID NO: 1456367 - DNA, 15 bp, Homo sapiens
gtttttttggcaaaa

SEQ ID NO: 1456368 - DNA, 15 bp, Homo sapiens
tgtttttttggcaaa

SEQ ID NO: 1456369 - DNA, 15 bp, Homo sapiens
ttgtttttttggcaa

SEQ ID NO: 1456370 - DNA, 15 bp, Homo sapiens
tttgtttttttggca

SEQ ID NO: 1456371 - DNA, 15 bp, Homo sapiens
ttttgtttttttggc

SEQ ID NO: 1456372 - DNA, 15 bp, Homo sapiens
tttttgtttttttgg

SEQ ID NO: 1456373 - DNA, 15 bp, Homo sapiens
ttttttgtttttttg

SEQ ID NO: 1456374 - DNA, 15 bp, Homo sapiens
atgttttttgttttt

SEQ ID NO: 1456375 - DNA, 15 bp, Homo sapiens
aatgttttttgtttt

SEQ ID NO: 1456376 - DNA, 15 bp, Homo sapiens
caatgttttttgttt

SEQ ID NO: 1456377 - DNA, 15 bp, Homo sapiens
tcaatgttttttgtt

SEQ ID NO: 1456378 - DNA, 15 bp, Homo sapiens
ctcaatgttttttgt

SEQ ID NO: 1456379 - DNA, 15 bp, Homo sapiens
cctcaatgttttttg

SEQ ID NO: 1456380 - DNA, 15 bp, Homo sapiens
gcctcaatgtttttt

SEQ ID NO: 1456381 - DNA, 15 bp, Homo sapiens
ggcctcaatgttttt

SEQ ID NO: 1456382 - DNA, 15 bp, Homo sapiens
tggcctcaatgtttt

SEQ ID NO: 1456383 - DNA, 15 bp, Homo sapiens
ctggcctcaatgttt

SEQ ID NO: 1456384 - DNA, 15 bp, Homo sapiens
cctggcctcaatgtt

SEQ ID NO: 1456385 - DNA, 15 bp, Homo sapiens
acctggcctcaatgt

SEQ ID NO: 1456386 - DNA, 15 bp, Homo sapiens
cacctggcctcaatg

SEQ ID NO: 1456387 - DNA, 15 bp, Homo sapiens
acacctggcctcaat

SEQ ID NO: 1456388 - DNA, 15 bp, Homo sapiens
cacacctggcctcaa

SEQ ID NO: 1456389 - DNA, 15 bp, Homo sapiens
ccacacctggcctca

SEQ ID NO: 1456390 - DNA, 15 bp, Homo sapiens
accacacctggcctc

SEQ ID NO: 1456391 - DNA, 15 bp, Homo sapiens
caccacacctggcct

SEQ ID NO: 1456392 - DNA, 15 bp, Homo sapiens
ccaccacacctggcc

SEQ ID NO: 1456393 - DNA, 15 bp, Homo sapiens
agccaccacacctgg

SEQ ID NO: 1456394 - DNA, 15 bp, Homo sapiens
taagtgctgggatta

SEQ ID NO: 1456395 - DNA, 15 bp, Homo sapiens
ctaagtgctgggatt

SEQ ID NO: 1456396 - DNA, 15 bp, Homo sapiens
tctaagtgctgggat

SEQ ID NO: 1456397 - DNA, 15 bp, Homo sapiens
ctctaagtgctggga

SEQ ID NO: 1456398 - DNA, 15 bp, Homo sapiens
tctctaagtgctggg

SEQ ID NO: 1456399 - DNA, 15 bp, Homo sapiens
ctctctaagtgctgg

SEQ ID NO: 1456400 - DNA, 15 bp, Homo sapiens
cctctctaagtgctg

SEQ ID NO: 1456401 - DNA, 15 bp, Homo sapiens
gcctctctaagtgct

SEQ ID NO: 1456402 - DNA, 15 bp, Homo sapiens
ggcctctctaagtgc

SEQ ID NO: 1456403 - DNA, 15 bp, Homo sapiens
cggcctctctaagtg

SEQ ID NO: 1456404 - DNA, 15 bp, Homo sapiens
tcggcctctctaagt

SEQ ID NO: 1456405 - DNA, 15 bp, Homo sapiens
ctcggcctctctaag

SEQ ID NO: 1456406 - DNA, 15 bp, Homo sapiens
cctcggcctctctaa

SEQ ID NO: 1456407 - DNA, 15 bp, Homo sapiens
acctcggcctctcta

SEQ ID NO: 1456408 - DNA, 15 bp, Homo sapiens
cacctcggcctctct

SEQ ID NO: 1456409 - DNA, 15 bp, Homo sapiens
ccacctcggcctctc

SEQ ID NO: 1456410 - DNA, 15 bp, Homo sapiens
cccacctcggcctct

SEQ ID NO: 1456411 - DNA, 15 bp, Homo sapiens
gcccacctcggcctc

SEQ ID NO: 1456412 - DNA, 15 bp, Homo sapiens
tgtgatctgcccacc

SEQ ID NO: 1456413 - DNA, 15 bp, Homo sapiens
ttgtgatctgcccac

SEQ ID NO: 1456414 - DNA, 15 bp, Homo sapiens
cttgtgatctgccca

SEQ ID NO: 1456415 - DNA, 15 bp, Homo sapiens
ccttgtgatctgccc

SEQ ID NO: 1456416 - DNA, 15 bp, Homo sapiens
ttttttgtgttttta

SEQ ID NO: 1456417 - DNA, 15 bp, Homo sapiens
tttttttgtgttttt

SEQ ID NO: 1456418 - DNA, 15 bp, Homo sapiens
ttttttttgtgtttt

SEQ ID NO: 1456419 - DNA, 15 bp, Homo sapiens
attttttttgtgttt

SEQ ID NO: 1456420 - DNA, 15 bp, Homo sapiens
aattttttttgtgtt

SEQ ID NO: 1456421 - DNA, 15 bp, Homo sapiens
taattttttttgtgt

SEQ ID NO: 1456422 - DNA, 15 bp, Homo sapiens
ctaattttttttgtg

SEQ ID NO: 1456423 - DNA, 15 bp, Homo sapiens
ggctaattttttttg

SEQ ID NO: 1456424 - DNA, 15 bp, Homo sapiens
gcccaccaccacacc

SEQ ID NO: 1456425 - DNA, 15 bp, Homo sapiens
cgcccaccaccacac

SEQ ID NO: 1456426 - DNA, 15 bp, Homo sapiens
gcgcccaccaccaca

SEQ ID NO: 1456427 - DNA, 15 bp, Homo sapiens
ggcgcccaccaccac

SEQ ID NO: 1456428 - DNA, 15 bp, Homo sapiens
ctacaggcgcccacc

SEQ ID NO: 1456429 - DNA, 15 bp, Homo sapiens
actacaggcgcccac

SEQ ID NO: 1456430 - DNA, 15 bp, Homo sapiens
gactacaggcgccca

SEQ ID NO: 1456431 - DNA, 15 bp, Homo sapiens
tacgccattctcctg

SEQ ID NO: 1456432 - DNA, 15 bp, Homo sapiens
ttacgccattctcct

SEQ ID NO: 1456433 - DNA, 15 bp, Homo sapiens
tttacgccattctcc

SEQ ID NO: 1456434 - DNA, 15 bp, Homo sapiens
gtttacgccattctc

SEQ ID NO: 1456435 - DNA, 15 bp, Homo sapiens
agtttacgccattct

SEQ ID NO: 1456436 - DNA, 15 bp, Homo sapiens
gagtttacgccattc

SEQ ID NO: 1456437 - DNA, 15 bp, Homo sapiens
tgagtttacgccatt

SEQ ID NO: 1456438 - DNA, 15 bp, Homo sapiens
ctgagtttacgccat

SEQ ID NO: 1456439 - DNA, 15 bp, Homo sapiens
cctgagtttacgcca

SEQ ID NO: 1456440 - DNA, 15 bp, Homo sapiens
tcctgagtttacgcc

SEQ ID NO: 1456441 - DNA, 15 bp, Homo sapiens
ctcctgagtttacgc

SEQ ID NO: 1456442 - DNA, 15 bp, Homo sapiens
cctcctgagtttacg

SEQ ID NO: 1456443 - DNA, 15 bp, Homo sapiens
gcctcctgagtttac

SEQ ID NO: 1456444 - DNA, 15 bp, Homo sapiens
tgcctcctgagttta

SEQ ID NO: 1456445 - DNA, 15 bp, Homo sapiens
ctgcctcctgagttt

SEQ ID NO: 1456446 - DNA, 15 bp, Homo sapiens
tctgcctcctgagtt

SEQ ID NO: 1456447 - DNA, 15 bp, Homo sapiens
ctctgcctcctgagt

SEQ ID NO: 1456448 - DNA, 15 bp, Homo sapiens
gctctgcctcctgag

SEQ ID NO: 1456449 - DNA, 15 bp, Homo sapiens
agctctgcctcctga

SEQ ID NO: 1456450 - DNA, 15 bp, Homo sapiens
aagctctgcctcctg

SEQ ID NO: 1456451 - DNA, 15 bp, Homo sapiens
caagctctgcctcct

SEQ ID NO: 1456452 - DNA, 15 bp, Homo sapiens
ccgatctcggctcac

SEQ ID NO: 1456453 - DNA, 15 bp, Homo sapiens
cccgatctcggctca

SEQ ID NO: 1456454 - DNA, 15 bp, Homo sapiens
gcccgatctcggctc

SEQ ID NO: 1456455 - DNA, 15 bp, Homo sapiens
ggcccgatctcggct

SEQ ID NO: 1456456 - DNA, 15 bp, Homo sapiens
tggcccgatctcggc

SEQ ID NO: 1456457 - DNA, 15 bp, Homo sapiens
atggcccgatctcgg

SEQ ID NO: 1456458 - DNA, 15 bp, Homo sapiens
aatggcccgatctcg

SEQ ID NO: 1456459 - DNA, 15 bp, Homo sapiens
caatggcccgatctc

SEQ ID NO: 1456460 - DNA, 15 bp, Homo sapiens
gcaatggcccgatct

SEQ ID NO: 1456461 - DNA, 15 bp, Homo sapiens
tgcaatggcccgatc

SEQ ID NO: 1456462 - DNA, 15 bp, Homo sapiens
gtgcaatggcccgat

SEQ ID NO: 1456463 - DNA, 15 bp, Homo sapiens
agtgcaatggcccga

SEQ ID NO: 1456464 - DNA, 15 bp, Homo sapiens
aagtgcaatggcccg

SEQ ID NO: 1456465 - DNA, 15 bp, Homo sapiens
gaagtgcaatggccc

SEQ ID NO: 1456466 - DNA, 15 bp, Homo sapiens
tgaagtgcaatggcc

SEQ ID NO: 1456467 - DNA, 15 bp, Homo sapiens
ctgaagtgcaatggc

SEQ ID NO: 1456468 - DNA, 15 bp, Homo sapiens
gctgaagtgcaatgg

SEQ ID NO: 1456469 - DNA, 15 bp, Homo sapiens
ggctgaagtgcaatg

SEQ ID NO: 1456470 - DNA, 15 bp, Homo sapiens
aggctgaagtgcaat

SEQ ID NO: 1456471 - DNA, 15 bp, Homo sapiens
caggctgaagtgcaa

SEQ ID NO: 1456472 - DNA, 15 bp, Homo sapiens
gcccaggctgaagtg

SEQ ID NO: 1456473 - DNA, 15 bp, Homo sapiens
cgcccaggctgaagt

SEQ ID NO: 1456474 - DNA, 15 bp, Homo sapiens
tcgcccaggctgaag

SEQ ID NO: 1456475 - DNA, 15 bp, Homo sapiens
gtcgcccaggctgaa

SEQ ID NO: 1456476 - DNA, 15 bp, Homo sapiens
tgtcgcccaggctga

SEQ ID NO: 1456477 - DNA, 15 bp, Homo sapiens
ggtcttgctctgtcg

SEQ ID NO: 1456478 - DNA, 15 bp, Homo sapiens
tgagatggggtcttg

SEQ ID NO: 1456479 - DNA, 15 bp, Homo sapiens
ttgagatggggtctt

SEQ ID NO: 1456480 - DNA, 15 bp, Homo sapiens
tttgagatggggtct

SEQ ID NO: 1456481 - DNA, 15 bp, Homo sapiens
ttttgagatggggtc

SEQ ID NO: 1456482 - DNA, 15 bp, Homo sapiens
tttttgagatggggt

SEQ ID NO: 1456483 - DNA, 15 bp, Homo sapiens
ttttttgagatgggg

SEQ ID NO: 1456484 - DNA, 15 bp, Homo sapiens
tttttttgagatggg

SEQ ID NO: 1456485 - DNA, 15 bp, Homo sapiens
gtttttttgagatgg

SEQ ID NO: 1456486 - DNA, 15 bp, Homo sapiens
tgtttttttgagatg

SEQ ID NO: 1456487 - DNA, 15 bp, Homo sapiens
ttgtttttttgagat

SEQ ID NO: 1456488 - DNA, 15 bp, Homo sapiens
tttgtttttttgaga

SEQ ID NO: 1456489 - DNA, 15 bp, Homo sapiens
ttttgtttttttgag

SEQ ID NO: 1456490 - DNA, 15 bp, Homo sapiens
tttttgtttttttga

SEQ ID NO: 1456491 - DNA, 15 bp, Homo sapiens
tgttttgtttttgtt

SEQ ID NO: 1456492 - DNA, 15 bp, Homo sapiens
ttgttttgtttttgt

SEQ ID NO: 1456493 - DNA, 15 bp, Homo sapiens
tttgttttgtttttg

SEQ ID NO: 1456494 - DNA, 15 bp, Homo sapiens
gtgttttgttttgtt

SEQ ID NO: 1456495 - DNA, 15 bp, Homo sapiens
agtgttttgttttgt

SEQ ID NO: 1456496 - DNA, 15 bp, Homo sapiens
cagtgttttgttttg

SEQ ID NO: 1456497 - DNA, 15 bp, Homo sapiens
tcagtgttttgtttt

SEQ ID NO: 1456498 - DNA, 15 bp, Homo sapiens
ttcagtgttttgttt

SEQ ID NO: 1456499 - DNA, 15 bp, Homo sapiens
attcagtgttttgtt

SEQ ID NO: 1456500 - DNA, 15 bp, Homo sapiens
tattcagtgttttgt

SEQ ID NO: 1456501 - DNA, 15 bp, Homo sapiens
ttattcagtgttttg

SEQ ID NO: 1456502 - DNA, 15 bp, Homo sapiens
attattcagtgtttt

SEQ ID NO: 1456503 - DNA, 15 bp, Homo sapiens
tattattcagtgttt

SEQ ID NO: 1456504 - DNA, 15 bp, Homo sapiens
gtattattcagtgtt

SEQ ID NO: 1456505 - DNA, 15 bp, Homo sapiens
agtattattcagtgt

SEQ ID NO: 1456506 - DNA, 15 bp, Homo sapiens
gagtattattcagtg

SEQ ID NO: 1456507 - DNA, 15 bp, Homo sapiens
cgagtattattcagt

SEQ ID NO: 1456508 - DNA, 15 bp, Homo sapiens
gcgagtattattcag

SEQ ID NO: 1456509 - DNA, 15 bp, Homo sapiens
tgcgagtattattca

SEQ ID NO: 1456510 - DNA, 15 bp, Homo sapiens
atgcgagtattattc

SEQ ID NO: 1456511 - DNA, 15 bp, Homo sapiens
gatgcgagtattatt

SEQ ID NO: 1456512 - DNA, 15 bp, Homo sapiens
tgatgcgagtattat

SEQ ID NO: 1456513 - DNA, 15 bp, Homo sapiens
ttgatgcgagtatta

SEQ ID NO: 1456514 - DNA, 15 bp, Homo sapiens
cttgatgcgagtatt

SEQ ID NO: 1456515 - DNA, 15 bp, Homo sapiens
ccttgatgcgagtat

SEQ ID NO: 1456516 - DNA, 15 bp, Homo sapiens
gccttgatgcgagta

SEQ ID NO: 1456517 - DNA, 15 bp, Homo sapiens
agccttgatgcgagt

SEQ ID NO: 1456518 - DNA, 15 bp, Homo sapiens
aagccttgatgcgag

SEQ ID NO: 1456519 - DNA, 15 bp, Homo sapiens
aaagccttgatgcga

SEQ ID NO: 1456520 - DNA, 15 bp, Homo sapiens
gaaagccttgatgcg

SEQ ID NO: 1456521 - DNA, 15 bp, Homo sapiens
agaaagccttgatgc

SEQ ID NO: 1456522 - DNA, 15 bp, Homo sapiens
tagaaagccttgatg

SEQ ID NO: 1456523 - DNA, 15 bp, Homo sapiens
ctagaaagccttgat

SEQ ID NO: 1456524 - DNA, 15 bp, Homo sapiens
tctagaaagccttga

SEQ ID NO: 1456525 - DNA, 15 bp, Homo sapiens
atctagaaagccttg

SEQ ID NO: 1456526 - DNA, 15 bp, Homo sapiens
aatctagaaagcctt

SEQ ID NO: 1456527 - DNA, 15 bp, Homo sapiens
taatctagaaagcct

SEQ ID NO: 1456528 - DNA, 15 bp, Homo sapiens
gtaatctagaaagcc

SEQ ID NO: 1456529 - DNA, 15 bp, Homo sapiens
tgtaatctagaaagc

SEQ ID NO: 1456530 - DNA, 15 bp, Homo sapiens
atgtaatctagaaag

SEQ ID NO: 1456531 - DNA, 15 bp, Homo sapiens
tatgtaatctagaaa

SEQ ID NO: 1456532 - DNA, 15 bp, Homo sapiens
atatgtaatctagaa

SEQ ID NO: 1456533 - DNA, 15 bp, Homo sapiens
gatatgtaatctaga

SEQ ID NO: 1456534 - DNA, 15 bp, Homo sapiens
cgatatgtaatctag

SEQ ID NO: 1456535 - DNA, 15 bp, Homo sapiens
acgatatgtaatcta

SEQ ID NO: 1456536 - DNA, 15 bp, Homo sapiens
cacgatatgtaatct

SEQ ID NO: 1456537 - DNA, 15 bp, Homo sapiens
ccacgatatgtaatc

SEQ ID NO: 1456538 - DNA, 15 bp, Homo sapiens
accacgatatgtaat

SEQ ID NO: 1456539 - DNA, 15 bp, Homo sapiens
gaccacgatatgtaa

SEQ ID NO: 1456540 - DNA, 15 bp, Homo sapiens
tgaccacgatatgta

SEQ ID NO: 1456541 - DNA, 15 bp, Homo sapiens
ctgaccacgatatgt

SEQ ID NO: 1456542 - DNA, 15 bp, Homo sapiens
actgaccacgatatg

SEQ ID NO: 1456543 - DNA, 15 bp, Homo sapiens
tactgaccacgatat

SEQ ID NO: 1456544 - DNA, 15 bp, Homo sapiens
ttactgaccacgata

SEQ ID NO: 1456545 - DNA, 15 bp, Homo sapiens
gttactgaccacgat

SEQ ID NO: 1456546 - DNA, 15 bp, Homo sapiens
agttactgaccacga

SEQ ID NO: 1456547 - DNA, 15 bp, Homo sapiens
aagttactgaccacg

SEQ ID NO: 1456548 - DNA, 15 bp, Homo sapiens
aaagttactgaccac

SEQ ID NO: 1456549 - DNA, 15 bp, Homo sapiens
aaaagttactgacca

SEQ ID NO: 1456550 - DNA, 15 bp, Homo sapiens
caaaagttactgacc

SEQ ID NO: 1456551 - DNA, 15 bp, Homo sapiens
gcaaaagttactgac

SEQ ID NO: 1456552 - DNA, 15 bp, Homo sapiens
ggcaaaagttactga

SEQ ID NO: 1456553 - DNA, 15 bp, Homo sapiens
aggcaaaagttactg

SEQ ID NO: 1456554 - DNA, 15 bp, Homo sapiens
caggcaaaagttact

SEQ ID NO: 1456555 - DNA, 15 bp, Homo sapiens
tcaggcaaaagttac

SEQ ID NO: 1456556 - DNA, 15 bp, Homo sapiens
ttcaggcaaaagtta

SEQ ID NO: 1456557 - DNA, 15 bp, Homo sapiens
tttcaggcaaaagtt

SEQ ID NO: 1456558 - DNA, 15 bp, Homo sapiens
ttttcaggcaaaagt

SEQ ID NO: 1456559 - DNA, 15 bp, Homo sapiens
gttttcaggcaaaag

SEQ ID NO: 1456560 - DNA, 15 bp, Homo sapiens
ggttttcaggcaaaa

SEQ ID NO: 1456561 - DNA, 15 bp, Homo sapiens
aggttttcaggcaaa

SEQ ID NO: 1456562 - DNA, 15 bp, Homo sapiens
taggttttcaggcaa

SEQ ID NO: 1456563 - DNA, 15 bp, Homo sapiens
ataggttttcaggca

SEQ ID NO: 1456564 - DNA, 15 bp, Homo sapiens
cataggttttcaggc

SEQ ID NO: 1456565 - DNA, 15 bp, Homo sapiens
tcataggttttcagg

SEQ ID NO: 1456566 - DNA, 15 bp, Homo sapiens
gtcataggttttcag

SEQ ID NO: 1456567 - DNA, 15 bp, Homo sapiens
tgtcataggttttca

SEQ ID NO: 1456568 - DNA, 15 bp, Homo sapiens
atgtcataggttttc

SEQ ID NO: 1456569 - DNA, 15 bp, Homo sapiens
tatgtcataggtttt

SEQ ID NO: 1456570 - DNA, 15 bp, Homo sapiens
ctatgtcataggttt

SEQ ID NO: 1456571 - DNA, 15 bp, Homo sapiens
cctatgtcataggtt

SEQ ID NO: 1456572 - DNA, 15 bp, Homo sapiens
gcctatgtcataggt

SEQ ID NO: 1456573 - DNA, 15 bp, Homo sapiens
tgcctatgtcatagg

SEQ ID NO: 1456574 - DNA, 15 bp, Homo sapiens
gtgcctatgtcatag

SEQ ID NO: 1456575 - DNA, 15 bp, Homo sapiens
ggtgcctatgtcata

SEQ ID NO: 1456576 - DNA, 15 bp, Homo sapiens
aggtgcctatgtcat

SEQ ID NO: 1456577 - DNA, 15 bp, Homo sapiens
gaggtgcctatgtca

SEQ ID NO: 1456578 - DNA, 15 bp, Homo sapiens
agaggtgcctatgtc

SEQ ID NO: 1456579 - DNA, 15 bp, Homo sapiens
aagaggtgcctatgt

SEQ ID NO: 1456580 - DNA, 15 bp, Homo sapiens
aaagaggtgcctatg

SEQ ID NO: 1456581 - DNA, 15 bp, Homo sapiens
gaaagaggtgcctat

SEQ ID NO: 1456582 - DNA, 15 bp, Homo sapiens
tgaaagaggtgccta

SEQ ID NO: 1456583 - DNA, 15 bp, Homo sapiens
gtgaaagaggtgcct

SEQ ID NO: 1456584 - DNA, 15 bp, Homo sapiens
agtgaaagaggtgcc

SEQ ID NO: 1456585 - DNA, 15 bp, Homo sapiens
aagtgaaagaggtgc

SEQ ID NO: 1456586 - DNA, 15 bp, Homo sapiens
caagtgaaagaggtg

SEQ ID NO: 1456587 - DNA, 15 bp, Homo sapiens
acaagtgaaagaggt

SEQ ID NO: 1456588 - DNA, 15 bp, Homo sapiens
cacaagtgaaagagg

SEQ ID NO: 1456589 - DNA, 15 bp, Homo sapiens
ccacaagtgaaagag

SEQ ID NO: 1456590 - DNA, 15 bp, Homo sapiens
gccacaagtgaaaga

SEQ ID NO: 1456591 - DNA, 15 bp, Homo sapiens
tgccacaagtgaaag

SEQ ID NO: 1456592 - DNA, 15 bp, Homo sapiens
atgccacaagtgaaa

SEQ ID NO: 1456593 - DNA, 15 bp, Homo sapiens
gatgccacaagtgaa

SEQ ID NO: 1456594 - DNA, 15 bp, Homo sapiens
agatgccacaagtga

SEQ ID NO: 1456595 - DNA, 15 bp, Homo sapiens
gagatgccacaagtg

SEQ ID NO: 1456596 - DNA, 15 bp, Homo sapiens
tgagatgccacaagt

SEQ ID NO: 1456597 - DNA, 15 bp, Homo sapiens
atgagatgccacaag

SEQ ID NO: 1456598 - DNA, 15 bp, Homo sapiens
aatgagatgccacaa

SEQ ID NO: 1456599 - DNA, 15 bp, Homo sapiens
aaatgagatgccaca

SEQ ID NO: 1456600 - DNA, 15 bp, Homo sapiens
taaatgagatgccac

SEQ ID NO: 1456601 - DNA, 15 bp, Homo sapiens
ttaaatgagatgcca

SEQ ID NO: 1456602 - DNA, 15 bp, Homo sapiens
tttaaatgagatgcc

SEQ ID NO: 1456603 - DNA, 15 bp, Homo sapiens
ctttaaatgagatgc

SEQ ID NO: 1456604 - DNA, 15 bp, Homo sapiens
tctttaaatgagatg

SEQ ID NO: 1456605 - DNA, 15 bp, Homo sapiens
atctttaaatgagat

SEQ ID NO: 1456606 - DNA, 15 bp, Homo sapiens
aatctttaaatgaga

SEQ ID NO: 1456607 - DNA, 15 bp, Homo sapiens
aaatctttaaatgag

SEQ ID NO: 1456608 - DNA, 15 bp, Homo sapiens
caaatctttaaatga

SEQ ID NO: 1456609 - DNA, 15 bp, Homo sapiens
acaaatctttaaatg

SEQ ID NO: 1456610 - DNA, 15 bp, Homo sapiens
aacaaatctttaaat

SEQ ID NO: 1456611 - DNA, 15 bp, Homo sapiens
aaacaaatctttaaa

SEQ ID NO: 1456612 - DNA, 15 bp, Homo sapiens
taaacaaatctttaa

SEQ ID NO: 1456613 - DNA, 15 bp, Homo sapiens
ataaacaaatcttta

SEQ ID NO: 1456614 - DNA, 15 bp, Homo sapiens
tataaacaaatcttt

SEQ ID NO: 1456615 - DNA, 15 bp, Homo sapiens
gtataaacaaatctt

SEQ ID NO: 1456616 - DNA, 15 bp, Homo sapiens
tgtataaacaaatct

SEQ ID NO: 1456617 - DNA, 15 bp, Homo sapiens
gtgtataaacaaatc

SEQ ID NO: 1456618 - DNA, 15 bp, Homo sapiens
agtgtataaacaaat

SEQ ID NO: 1456619 - DNA, 15 bp, Homo sapiens
aagtgtataaacaaa

SEQ ID NO: 1456620 - DNA, 15 bp, Homo sapiens
caagtgtataaacaa

SEQ ID NO: 1456621 - DNA, 15 bp, Homo sapiens
tcaagtgtataaaca

SEQ ID NO: 1456622 - DNA, 15 bp, Homo sapiens
gtcaagtgtataaac

SEQ ID NO: 1456623 - DNA, 15 bp, Homo sapiens
tgtcaagtgtataaa

SEQ ID NO: 1456624 - DNA, 15 bp, Homo sapiens
atgtcaagtgtataa

SEQ ID NO: 1456625 - DNA, 15 bp, Homo sapiens
aatgtcaagtgtata

SEQ ID NO: 1456626 - DNA, 15 bp, Homo sapiens
aaatgtcaagtgtat

SEQ ID NO: 1456627 - DNA, 15 bp, Homo sapiens
gaaatgtcaagtgta

SEQ ID NO: 1456628 - DNA, 15 bp, Homo sapiens
agaaatgtcaagtgt

SEQ ID NO: 1456629 - DNA, 15 bp, Homo sapiens
cagaaatgtcaagtg

SEQ ID NO: 1456630 - DNA, 15 bp, Homo sapiens
acagaaatgtcaagt

SEQ ID NO: 1456631 - DNA, 15 bp, Homo sapiens
tacagaaatgtcaag

SEQ ID NO: 1456632 - DNA, 15 bp, Homo sapiens
ctacagaaatgtcaa

SEQ ID NO: 1456633 - DNA, 15 bp, Homo sapiens
tctacagaaatgtca

SEQ ID NO: 1456634 - DNA, 15 bp, Homo sapiens
ttctacagaaatgtc

SEQ ID NO: 1456635 - DNA, 15 bp, Homo sapiens
cttctacagaaatgt

SEQ ID NO: 1456636 - DNA, 15 bp, Homo sapiens
tcttctacagaaatg

SEQ ID NO: 1456637 - DNA, 15 bp, Homo sapiens
gtcttctacagaaat

SEQ ID NO: 1456638 - DNA, 15 bp, Homo sapiens
agtcttctacagaaa

SEQ ID NO: 1456639 - DNA, 15 bp, Homo sapiens
aagtcttctacagaa

SEQ ID NO: 1456640 - DNA, 15 bp, Homo sapiens
aaagtcttctacaga

SEQ ID NO: 1456641 - DNA, 15 bp, Homo sapiens
gaaagtcttctacag

SEQ ID NO: 1456642 - DNA, 15 bp, Homo sapiens
agaaagtcttctaca

SEQ ID NO: 1456643 - DNA, 15 bp, Homo sapiens
cagaaagtcttctac

SEQ ID NO: 1456644 - DNA, 15 bp, Homo sapiens
tcagaaagtcttcta

SEQ ID NO: 1456645 - DNA, 15 bp, Homo sapiens
ctcagaaagtcttct

SEQ ID NO: 1456646 - DNA, 15 bp, Homo sapiens
cctcagaaagtcttc

SEQ ID NO: 1456647 - DNA, 15 bp, Homo sapiens
gcctcagaaagtctt

SEQ ID NO: 1456648 - DNA, 15 bp, Homo sapiens
agcctcagaaagtct

SEQ ID NO: 1456649 - DNA, 15 bp, Homo sapiens
gagcctcagaaagtc

SEQ ID NO: 1456650 - DNA, 15 bp, Homo sapiens
agagcctcagaaagt

SEQ ID NO: 1456651 - DNA, 15 bp, Homo sapiens
gagagcctcagaaag

SEQ ID NO: 1456652 - DNA, 15 bp, Homo sapiens
agagagcctcagaaa

SEQ ID NO: 1456653 - DNA, 15 bp, Homo sapiens
cagagagcctcagaa

SEQ ID NO: 1456654 - DNA, 15 bp, Homo sapiens
tcagagagcctcaga

SEQ ID NO: 1456655 - DNA, 15 bp, Homo sapiens
ttcagagagcctcag

SEQ ID NO: 1456656 - DNA, 15 bp, Homo sapiens
tttcagagagcctca

SEQ ID NO: 1456657 - DNA, 15 bp, Homo sapiens
gtttcagagagcctc

SEQ ID NO: 1456658 - DNA, 15 bp, Homo sapiens
ggtttcagagagcct

SEQ ID NO: 1456659 - DNA, 15 bp, Homo sapiens
gggtttcagagagcc

SEQ ID NO: 1456660 - DNA, 15 bp, Homo sapiens
tgggtttcagagagc

SEQ ID NO: 1456661 - DNA, 15 bp, Homo sapiens
ctgggtttcagagag

SEQ ID NO: 1456662 - DNA, 15 bp, Homo sapiens
gctgggtttcagaga

SEQ ID NO: 1456663 - DNA, 15 bp, Homo sapiens
ggctgggtttcagag

SEQ ID NO: 1456664 - DNA, 15 bp, Homo sapiens
aggctgggtttcaga

SEQ ID NO: 1456665 - DNA, 15 bp, Homo sapiens
gaggctgggtttcag

SEQ ID NO: 1456666 - DNA, 15 bp, Homo sapiens
tgaggctgggtttca

SEQ ID NO: 1456667 - DNA, 15 bp, Homo sapiens
ttgaggctgggtttc

SEQ ID NO: 1456668 - DNA, 15 bp, Homo sapiens
cttgaggctgggttt

SEQ ID NO: 1456669 - DNA, 15 bp, Homo sapiens
gcttgaggctgggtt

SEQ ID NO: 1456670 - DNA, 15 bp, Homo sapiens
tgcttgaggctgggt

SEQ ID NO: 1456671 - DNA, 15 bp, Homo sapiens
ttgcttgaggctggg

SEQ ID NO: 1456672 - DNA, 15 bp, Homo sapiens
tttgcttgaggctgg

SEQ ID NO: 1456673 - DNA, 15 bp, Homo sapiens
ctttgcttgaggctg

SEQ ID NO: 1456674 - DNA, 15 bp, Homo sapiens
actttgcttgaggct

SEQ ID NO: 1456675 - DNA, 15 bp, Homo sapiens
aactttgcttgaggc

SEQ ID NO: 1456676 - DNA, 15 bp, Homo sapiens
taactttgcttgagg

SEQ ID NO: 1456677 - DNA, 15 bp, Homo sapiens
ataactttgcttgag

SEQ ID NO: 1456678 - DNA, 15 bp, Homo sapiens
gataactttgcttga

SEQ ID NO: 1456679 - DNA, 15 bp, Homo sapiens
agataactttgcttg

SEQ ID NO: 1456680 - DNA, 15 bp, Homo sapiens
cagataactttgctt

SEQ ID NO: 1456681 - DNA, 15 bp, Homo sapiens
ccagataactttgct

SEQ ID NO: 1456682 - DNA, 15 bp, Homo sapiens
cccagataactttgc

SEQ ID NO: 1456683 - DNA, 15 bp, Homo sapiens
tcccagataactttg

SEQ ID NO: 1456684 - DNA, 15 bp, Homo sapiens
ttcccagataacttt

SEQ ID NO: 1456685 - DNA, 15 bp, Homo sapiens
tttcccagataactt

SEQ ID NO: 1456686 - DNA, 15 bp, Homo sapiens
ctttcccagataact

SEQ ID NO: 1456687 - DNA, 15 bp, Homo sapiens
tctttcccagataac

SEQ ID NO: 1456688 - DNA, 15 bp, Homo sapiens
atctttcccagataa

SEQ ID NO: 1456689 - DNA, 15 bp, Homo sapiens
gatctttcccagata

SEQ ID NO: 1456690 - DNA, 15 bp, Homo sapiens
tgatctttcccagat

SEQ ID NO: 1456691 - DNA, 15 bp, Homo sapiens
gtgatctttcccaga

SEQ ID NO: 1456692 - DNA, 15 bp, Homo sapiens
tgtgatctttcccag

SEQ ID NO: 1456693 - DNA, 15 bp, Homo sapiens
atgtgatctttccca

SEQ ID NO: 1456694 - DNA, 15 bp, Homo sapiens
catgtgatctttccc

SEQ ID NO: 1456695 - DNA, 15 bp, Homo sapiens
acatgtgatctttcc

SEQ ID NO: 1456696 - DNA, 15 bp, Homo sapiens
gacatgtgatctttc

SEQ ID NO: 1456697 - DNA, 15 bp, Homo sapiens
tgacatgtgatcttt

SEQ ID NO: 1456698 - DNA, 15 bp, Homo sapiens
ctgacatgtgatctt

SEQ ID NO: 1456699 - DNA, 15 bp, Homo sapiens
cctgacatgtgatct

SEQ ID NO: 1456700 - DNA, 15 bp, Homo sapiens
acctgacatgtgatc

SEQ ID NO: 1456701 - DNA, 15 bp, Homo sapiens
gacctgacatgtgat

SEQ ID NO: 1456702 - DNA, 15 bp, Homo sapiens
agacctgacatgtga

SEQ ID NO: 1456703 - DNA, 15 bp, Homo sapiens
aagacctgacatgtg

SEQ ID NO: 1456704 - DNA, 15 bp, Homo sapiens
gaagacctgacatgt

SEQ ID NO: 1456705 - DNA, 15 bp, Homo sapiens
agaagacctgacatg

SEQ ID NO: 1456706 - DNA, 15 bp, Homo sapiens
aagaagacctgacat

SEQ ID NO: 1456707 - DNA, 15 bp, Homo sapiens
aaagaagacctgaca

SEQ ID NO: 1456708 - DNA, 15 bp, Homo sapiens
caaagaagacctgac

SEQ ID NO: 1456709 - DNA, 15 bp, Homo sapiens
ccaaagaagacctga

SEQ ID NO: 1456710 - DNA, 15 bp, Homo sapiens
accaaagaagacctg

SEQ ID NO: 1456711 - DNA, 15 bp, Homo sapiens
aaccaaagaagacct

SEQ ID NO: 1456712 - DNA, 15 bp, Homo sapiens
aaaccaaagaagacc

SEQ ID NO: 1456713 - DNA, 15 bp, Homo sapiens
aaaaccaaagaagac

SEQ ID NO: 1456714 - DNA, 15 bp, Homo sapiens
gaaaaccaaagaaga

SEQ ID NO: 1456715 - DNA, 15 bp, Homo sapiens
tgaaaaccaaagaag

SEQ ID NO: 1456716 - DNA, 15 bp, Homo sapiens
atgaaaaccaaagaa

SEQ ID NO: 1456717 - DNA, 15 bp, Homo sapiens
aatgaaaaccaaaga

SEQ ID NO: 1456718 - DNA, 15 bp, Homo sapiens
taatgaaaaccaaag

SEQ ID NO: 1456719 - DNA, 15 bp, Homo sapiens
ataatgaaaaccaaa

SEQ ID NO: 1456720 - DNA, 15 bp, Homo sapiens
tataatgaaaaccaa

SEQ ID NO: 1456721 - DNA, 15 bp, Homo sapiens
ttataatgaaaacca

SEQ ID NO: 1456722 - DNA, 15 bp, Homo sapiens
tttataatgaaaacc

SEQ ID NO: 1456723 - DNA, 15 bp, Homo sapiens
ttttataatgaaaac

SEQ ID NO: 1456724 - DNA, 15 bp, Homo sapiens
tttttataatgaaaa

SEQ ID NO: 1456725 - DNA, 15 bp, Homo sapiens
ttttttataatgaaa

SEQ ID NO: 1456726 - DNA, 15 bp, Homo sapiens
tttttttataatgaa

SEQ ID NO: 1456727 - DNA, 15 bp, Homo sapiens
atttttttataatga

SEQ ID NO: 1456728 - DNA, 15 bp, Homo sapiens
gatttttttataatg

SEQ ID NO: 1456729 - DNA, 15 bp, Homo sapiens
tgatttttttataat

SEQ ID NO: 1456730 - DNA, 15 bp, Homo sapiens
atgatttttttataa

SEQ ID NO: 1456731 - DNA, 15 bp, Homo sapiens
aatgatttttttata

SEQ ID NO: 1456732 - DNA, 15 bp, Homo sapiens
caatgatttttttat

SEQ ID NO: 1456733 - DNA, 15 bp, Homo sapiens
acaatgattttttta

SEQ ID NO: 1456734 - DNA, 15 bp, Homo sapiens
cacaatgattttttt

SEQ ID NO: 1456735 - DNA, 15 bp, Homo sapiens
gcacaatgatttttt

SEQ ID NO: 1456736 - DNA, 15 bp, Homo sapiens
ggcacaatgattttt

SEQ ID NO: 1456737 - DNA, 15 bp, Homo sapiens
tggcacaatgatttt

SEQ ID NO: 1456738 - DNA, 15 bp, Homo sapiens
gtggcacaatgattt

SEQ ID NO: 1456739 - DNA, 15 bp, Homo sapiens
ggtggcacaatgatt

SEQ ID NO: 1456740 - DNA, 15 bp, Homo sapiens
aggtggcacaatgat

SEQ ID NO: 1456741 - DNA, 15 bp, Homo sapiens
gaggtggcacaatga

SEQ ID NO: 1456742 - DNA, 15 bp, Homo sapiens
ggaggtggcacaatg

SEQ ID NO: 1456743 - DNA, 15 bp, Homo sapiens
tggaggtggcacaat

SEQ ID NO: 1456744 - DNA, 15 bp, Homo sapiens
atggaggtggcacaa

SEQ ID NO: 1456745 - DNA, 15 bp, Homo sapiens
catggaggtggcaca

SEQ ID NO: 1456746 - DNA, 15 bp, Homo sapiens
acatggaggtggcac

SEQ ID NO: 1456747 - DNA, 15 bp, Homo sapiens
aacatggaggtggca

SEQ ID NO: 1456748 - DNA, 15 bp, Homo sapiens
taacatggaggtggc

SEQ ID NO: 1456749 - DNA, 15 bp, Homo sapiens
ctaacatggaggtgg

SEQ ID NO: 1456750 - DNA, 15 bp, Homo sapiens
cctaacatggaggtg

SEQ ID NO: 1456751 - DNA, 15 bp, Homo sapiens
tcctaacatggaggt

SEQ ID NO: 1456752 - DNA, 15 bp, Homo sapiens
ttcctaacatggagg

SEQ ID NO: 1456753 - DNA, 15 bp, Homo sapiens
attcctaacatggag

SEQ ID NO: 1456754 - DNA, 15 bp, Homo sapiens
gattcctaacatgga

SEQ ID NO: 1456755 - DNA, 15 bp, Homo sapiens
agattcctaacatgg

SEQ ID NO: 1456756 - DNA, 15 bp, Homo sapiens
tagattcctaacatg

SEQ ID NO: 1456757 - DNA, 15 bp, Homo sapiens
ttagattcctaacat

SEQ ID NO: 1456758 - DNA, 15 bp, Homo sapiens
gttagattcctaaca

SEQ ID NO: 1456759 - DNA, 15 bp, Homo sapiens
ggttagattcctaac

SEQ ID NO: 1456760 - DNA, 15 bp, Homo sapiens
aggttagattcctaa

SEQ ID NO: 1456761 - DNA, 15 bp, Homo sapiens
caggttagattccta

SEQ ID NO: 1456762 - DNA, 15 bp, Homo sapiens
tcaggttagattcct

SEQ ID NO: 1456763 - DNA, 15 bp, Homo sapiens
atcaggttagattcc

SEQ ID NO: 1456764 - DNA, 15 bp, Homo sapiens
catcaggttagattc

SEQ ID NO: 1456765 - DNA, 15 bp, Homo sapiens
ccatcaggttagatt

SEQ ID NO: 1456766 - DNA, 15 bp, Homo sapiens
cccatcaggttagat

SEQ ID NO: 1456767 - DNA, 15 bp, Homo sapiens
tcccatcaggttaga

SEQ ID NO: 1456768 - DNA, 15 bp, Homo sapiens
gtcccatcaggttag

SEQ ID NO: 1456769 - DNA, 15 bp, Homo sapiens
tgtcccatcaggtta

SEQ ID NO: 1456770 - DNA, 15 bp, Homo sapiens
gtgtcccatcaggtt

SEQ ID NO: 1456771 - DNA, 15 bp, Homo sapiens
ggtgtcccatcaggt

SEQ ID NO: 1456772 - DNA, 15 bp, Homo sapiens
gggtgtcccatcagg

SEQ ID NO: 1456773 - DNA, 15 bp, Homo sapiens
agggtgtcccatcag

SEQ ID NO: 1456774 - DNA, 15 bp, Homo sapiens
gagggtgtcccatca

SEQ ID NO: 1456775 - DNA, 15 bp, Homo sapiens
tgagggtgtcccatc

SEQ ID NO: 1456776 - DNA, 15 bp, Homo sapiens
gtgagggtgtcccat

SEQ ID NO: 1456777 - DNA, 15 bp, Homo sapiens
ggtgagggtgtccca

SEQ ID NO: 1456778 - DNA, 15 bp, Homo sapiens
gggtgagggtgtccc

SEQ ID NO: 1456779 - DNA, 15 bp, Homo sapiens
tgggtgagggtgtcc

SEQ ID NO: 1456780 - DNA, 15 bp, Homo sapiens
ctgggtgagggtgtc

SEQ ID NO: 1456781 - DNA, 15 bp, Homo sapiens
tctgggtgagggtgt

SEQ ID NO: 1456782 - DNA, 15 bp, Homo sapiens
ttctgggtgagggtg

SEQ ID NO: 1456783 - DNA, 15 bp, Homo sapiens
tttctgggtgagggt

SEQ ID NO: 1456784 - DNA, 15 bp, Homo sapiens
gtttctgggtgaggg

SEQ ID NO: 1456785 - DNA, 15 bp, Homo sapiens
tgtttctgggtgagg

SEQ ID NO: 1456786 - DNA, 15 bp, Homo sapiens
atgtttctgggtgag

SEQ ID NO: 1456787 - DNA, 15 bp, Homo sapiens
tatgtttctgggtga

SEQ ID NO: 1456788 - DNA, 15 bp, Homo sapiens
ctatgtttctgggtg

SEQ ID NO: 1456789 - DNA, 15 bp, Homo sapiens
cctatgtttctgggt

SEQ ID NO: 1456790 - DNA, 15 bp, Homo sapiens
tcctatgtttctggg

SEQ ID NO: 1456791 - DNA, 15 bp, Homo sapiens
gtcctatgtttctgg

SEQ ID NO: 1456792 - DNA, 15 bp, Homo sapiens
tgtcctatgtttctg

SEQ ID NO: 1456793 - DNA, 15 bp, Homo sapiens
gtgtcctatgtttct

SEQ ID NO: 1456794 - DNA, 15 bp, Homo sapiens
agtgtcctatgtttc

SEQ ID NO: 1456795 - DNA, 15 bp, Homo sapiens
aagtgtcctatgttt

SEQ ID NO: 1456796 - DNA, 15 bp, Homo sapiens
gaagtgtcctatgtt

SEQ ID NO: 1456797 - DNA, 15 bp, Homo sapiens
tgaagtgtcctatgt

SEQ ID NO: 1456798 - DNA, 15 bp, Homo sapiens
ctgaagtgtcctatg

SEQ ID NO: 1456799 - DNA, 15 bp, Homo sapiens
cctgaagtgtcctat

SEQ ID NO: 1456800 - DNA, 15 bp, Homo sapiens
gcctgaagtgtccta

SEQ ID NO: 1456801 - DNA, 15 bp, Homo sapiens
tgcctgaagtgtcct

SEQ ID NO: 1456802 - DNA, 15 bp, Homo sapiens
gtgcctgaagtgtcc

SEQ ID NO: 1456803 - DNA, 15 bp, Homo sapiens
ggtgcctgaagtgtc

SEQ ID NO: 1456804 - DNA, 15 bp, Homo sapiens
aggtgcctgaagtgt

SEQ ID NO: 1456805 - DNA, 15 bp, Homo sapiens
gaggtgcctgaagtg

SEQ ID NO: 1456806 - DNA, 15 bp, Homo sapiens
tgaggtgcctgaagt

SEQ ID NO: 1456807 - DNA, 15 bp, Homo sapiens
ctgaggtgcctgaag

SEQ ID NO: 1456808 - DNA, 15 bp, Homo sapiens
actgaggtgcctgaa

SEQ ID NO: 1456809 - DNA, 15 bp, Homo sapiens
cactgaggtgcctga

SEQ ID NO: 1456810 - DNA, 15 bp, Homo sapiens
tcactgaggtgcctg

SEQ ID NO: 1456811 - DNA, 15 bp, Homo sapiens
atcactgaggtgcct

SEQ ID NO: 1456812 - DNA, 15 bp, Homo sapiens
aatcactgaggtgcc

SEQ ID NO: 1456813 - DNA, 15 bp, Homo sapiens
aaatcactgaggtgc

SEQ ID NO: 1456814 - DNA, 15 bp, Homo sapiens
caaatcactgaggtg

SEQ ID NO: 1456815 - DNA, 15 bp, Homo sapiens
tcaaatcactgaggt

SEQ ID NO: 1456816 - DNA, 15 bp, Homo sapiens
ctcaaatcactgagg

SEQ ID NO: 1456817 - DNA, 15 bp, Homo sapiens
actcaaatcactgag

SEQ ID NO: 1456818 - DNA, 15 bp, Homo sapiens
gactcaaatcactga

SEQ ID NO: 1456819 - DNA, 15 bp, Homo sapiens
agactcaaatcactg

SEQ ID NO: 1456820 - DNA, 15 bp, Homo sapiens
aagactcaaatcact

SEQ ID NO: 1456821 - DNA, 15 bp, Homo sapiens
caagactcaaatcac

SEQ ID NO: 1456822 - DNA, 15 bp, Homo sapiens
tcaagactcaaatca

SEQ ID NO: 1456823 - DNA, 15 bp, Homo sapiens
ttcaagactcaaatc

SEQ ID NO: 1456824 - DNA, 15 bp, Homo sapiens
gttcaagactcaaat

SEQ ID NO: 1456825 - DNA, 15 bp, Homo sapiens
cgttcaagactcaaa

SEQ ID NO: 1456826 - DNA, 15 bp, Homo sapiens
tcgttcaagactcaa

SEQ ID NO: 1456827 - DNA, 15 bp, Homo sapiens
atcgttcaagactca

SEQ ID NO: 1456828 - DNA, 15 bp, Homo sapiens
aatcgttcaagactc

SEQ ID NO: 1456829 - DNA, 15 bp, Homo sapiens
aaatcgttcaagact

SEQ ID NO: 1456830 - DNA, 15 bp, Homo sapiens
caaatcgttcaagac

SEQ ID NO: 1456831 - DNA, 15 bp, Homo sapiens
gcaaatcgttcaaga

SEQ ID NO: 1456832 - DNA, 15 bp, Homo sapiens
agcaaatcgttcaag

SEQ ID NO: 1456833 - DNA, 15 bp, Homo sapiens
gagcaaatcgttcaa

SEQ ID NO: 1456834 - DNA, 15 bp, Homo sapiens
agagcaaatcgttca

SEQ ID NO: 1456835 - DNA, 15 bp, Homo sapiens
aagagcaaatcgttc

SEQ ID NO: 1456836 - DNA, 15 bp, Homo sapiens
gaagagcaaatcgtt

SEQ ID NO: 1456837 - DNA, 15 bp, Homo sapiens
tgaagagcaaatcgt

SEQ ID NO: 1456838 - DNA, 15 bp, Homo sapiens
ctgaagagcaaatcg

SEQ ID NO: 1456839 - DNA, 15 bp, Homo sapiens
gctgaagagcaaatc

SEQ ID NO: 1456840 - DNA, 15 bp, Homo sapiens
ggctgaagagcaaat

SEQ ID NO: 1456841 - DNA, 15 bp, Homo sapiens
tggctgaagagcaaa

SEQ ID NO: 1456842 - DNA, 15 bp, Homo sapiens
atggctgaagagcaa

SEQ ID NO: 1456843 - DNA, 15 bp, Homo sapiens
aatggctgaagagca

SEQ ID NO: 1456844 - DNA, 15 bp, Homo sapiens
caatggctgaagagc

SEQ ID NO: 1456845 - DNA, 15 bp, Homo sapiens
acaatggctgaagag

SEQ ID NO: 1456846 - DNA, 15 bp, Homo sapiens
gacaatggctgaaga

SEQ ID NO: 1456847 - DNA, 15 bp, Homo sapiens
tgacaatggctgaag

SEQ ID NO: 1456848 - DNA, 15 bp, Homo sapiens
ttgacaatggctgaa

SEQ ID NO: 1456849 - DNA, 15 bp, Homo sapiens
tttgacaatggctga

SEQ ID NO: 1456850 - DNA, 15 bp, Homo sapiens
ttttgacaatggctg

SEQ ID NO: 1456851 - DNA, 15 bp, Homo sapiens
tttttgacaatggct

SEQ ID NO: 1456852 - DNA, 15 bp, Homo sapiens
gtttttgacaatggc

SEQ ID NO: 1456853 - DNA, 15 bp, Homo sapiens
agtttttgacaatgg

SEQ ID NO: 1456854 - DNA, 15 bp, Homo sapiens
tagtttttgacaatg

SEQ ID NO: 1456855 - DNA, 15 bp, Homo sapiens
ctagtttttgacaat

SEQ ID NO: 1456856 - DNA, 15 bp, Homo sapiens
cctagtttttgacaa

SEQ ID NO: 1456857 - DNA, 15 bp, Homo sapiens
gcctagtttttgaca

SEQ ID NO: 1456858 - DNA, 15 bp, Homo sapiens
agcctagtttttgac

SEQ ID NO: 1456859 - DNA, 15 bp, Homo sapiens
cagcctagtttttga

SEQ ID NO: 1456860 - DNA, 15 bp, Homo sapiens
tcagcctagtttttg

SEQ ID NO: 1456861 - DNA, 15 bp, Homo sapiens
atcagcctagttttt

SEQ ID NO: 1456862 - DNA, 15 bp, Homo sapiens
catcagcctagtttt

SEQ ID NO: 1456863 - DNA, 15 bp, Homo sapiens
gcatcagcctagttt

SEQ ID NO: 1456864 - DNA, 15 bp, Homo sapiens
tgcatcagcctagtt

SEQ ID NO: 1456865 - DNA, 15 bp, Homo sapiens
atgcatcagcctagt

SEQ ID NO: 1456866 - DNA, 15 bp, Homo sapiens
aatgcatcagcctag

SEQ ID NO: 1456867 - DNA, 15 bp, Homo sapiens
aaatgcatcagccta

SEQ ID NO: 1456868 - DNA, 15 bp, Homo sapiens
caaatgcatcagcct

SEQ ID NO: 1456869 - DNA, 15 bp, Homo sapiens
tcaaatgcatcagcc

SEQ ID NO: 1456870 - DNA, 15 bp, Homo sapiens
atcaaatgcatcagc

SEQ ID NO: 1456871 - DNA, 15 bp, Homo sapiens
tatcaaatgcatcag

SEQ ID NO: 1456872 - DNA, 15 bp, Homo sapiens
atatcaaatgcatca

SEQ ID NO: 1456873 - DNA, 15 bp, Homo sapiens
aatatcaaatgcatc

SEQ ID NO: 1456874 - DNA, 15 bp, Homo sapiens
aaatatcaaatgcat

SEQ ID NO: 1456875 - DNA, 15 bp, Homo sapiens
taaatatcaaatgca

SEQ ID NO: 1456876 - DNA, 15 bp, Homo sapiens
ttaaatatcaaatgc

SEQ ID NO: 1456877 - DNA, 15 bp, Homo sapiens
tttaaatatcaaatg

SEQ ID NO: 1456878 - DNA, 15 bp, Homo sapiens
ttttaaatatcaaat

SEQ ID NO: 1456879 - DNA, 15 bp, Homo sapiens
tttttaaatatcaaa

SEQ ID NO: 1456880 - DNA, 15 bp, Homo sapiens
ctttttaaatatcaa

SEQ ID NO: 1456881 - DNA, 15 bp, Homo sapiens
gctttttaaatatca

SEQ ID NO: 1456882 - DNA, 15 bp, Homo sapiens
tgctttttaaatatc

SEQ ID NO: 1456883 - DNA, 15 bp, Homo sapiens
atgctttttaaatat

SEQ ID NO: 1456884 - DNA, 15 bp, Homo sapiens
aatgctttttaaata

SEQ ID NO: 1456885 - DNA, 15 bp, Homo sapiens
aaatgctttttaaat

SEQ ID NO: 1456886 - DNA, 15 bp, Homo sapiens
aaaatgctttttaaa

SEQ ID NO: 1456887 - DNA, 15 bp, Homo sapiens
aaaaatgctttttaa

SEQ ID NO: 1456888 - DNA, 15 bp, Homo sapiens
taaaaatgcttttta

SEQ ID NO: 1456889 - DNA, 15 bp, Homo sapiens
ctaaaaatgcttttt

SEQ ID NO: 1456890 - DNA, 15 bp, Homo sapiens
gctaaaaatgctttt

SEQ ID NO: 1456891 - DNA, 15 bp, Homo sapiens
agctaaaaatgcttt

SEQ ID NO: 1456892 - DNA, 15 bp, Homo sapiens
cagctaaaaatgctt

SEQ ID NO: 1456893 - DNA, 15 bp, Homo sapiens
ccagctaaaaatgct

SEQ ID NO: 1456894 - DNA, 15 bp, Homo sapiens
cccagctaaaaatgc

SEQ ID NO: 1456895 - DNA, 15 bp, Homo sapiens
gcccagctaaaaatg

SEQ ID NO: 1456896 - DNA, 15 bp, Homo sapiens
cgcccagctaaaaat

SEQ ID NO: 1456897 - DNA, 15 bp, Homo sapiens
gcgcccagctaaaaa

SEQ ID NO: 1456898 - DNA, 15 bp, Homo sapiens
tgcgcccagctaaaa

SEQ ID NO: 1456899 - DNA, 15 bp, Homo sapiens
ctgcgcccagctaaa

SEQ ID NO: 1456900 - DNA, 15 bp, Homo sapiens
actgcgcccagctaa

SEQ ID NO: 1456901 - DNA, 15 bp, Homo sapiens
cactgcgcccagcta

SEQ ID NO: 1456902 - DNA, 15 bp, Homo sapiens
ccactgcgcccagct

SEQ ID NO: 1456903 - DNA, 15 bp, Homo sapiens
gccactgcgcccagc

SEQ ID NO: 1456904 - DNA, 15 bp, Homo sapiens
agccactgcgcccag

SEQ ID NO: 1456905 - DNA, 15 bp, Homo sapiens
gagccactgcgccca

SEQ ID NO: 1456906 - DNA, 15 bp, Homo sapiens
cgtgagccactgcgc

SEQ ID NO: 1456907 - DNA, 15 bp, Homo sapiens
gcgtgagccactgcg

SEQ ID NO: 1456908 - DNA, 15 bp, Homo sapiens
ggcgtgagccactgc

SEQ ID NO: 1456909 - DNA, 15 bp, Homo sapiens
gggcgtgagccactg

SEQ ID NO: 1456910 - DNA, 15 bp, Homo sapiens
tgggcgtgagccact

SEQ ID NO: 1456911 - DNA, 15 bp, Homo sapiens
actgggattatgggc

SEQ ID NO: 1456912 - DNA, 15 bp, Homo sapiens
tactgggattatggg

SEQ ID NO: 1456913 - DNA, 15 bp, Homo sapiens
ctactgggattatgg

SEQ ID NO: 1456914 - DNA, 15 bp, Homo sapiens
actactgggattatg

SEQ ID NO: 1456915 - DNA, 15 bp, Homo sapiens
aactactgggattat

SEQ ID NO: 1456916 - DNA, 15 bp, Homo sapiens
aaactactgggatta

SEQ ID NO: 1456917 - DNA, 15 bp, Homo sapiens
caaactactgggatt

SEQ ID NO: 1456918 - DNA, 15 bp, Homo sapiens
ccaaactactgggat

SEQ ID NO: 1456919 - DNA, 15 bp, Homo sapiens
cccaaactactggga

SEQ ID NO: 1456920 - DNA, 15 bp, Homo sapiens
ccccaaactactggg

SEQ ID NO: 1456921 - DNA, 15 bp, Homo sapiens
cccccaaactactgg

SEQ ID NO: 1456922 - DNA, 15 bp, Homo sapiens
ccccccaaactactg

SEQ ID NO: 1456923 - DNA, 15 bp, Homo sapiens
gccccccaaactact

SEQ ID NO: 1456924 - DNA, 15 bp, Homo sapiens
ggccccccaaactac

SEQ ID NO: 1456925 - DNA, 15 bp, Homo sapiens
cggccccccaaacta

SEQ ID NO: 1456926 - DNA, 15 bp, Homo sapiens
tcggccccccaaact

SEQ ID NO: 1456927 - DNA, 15 bp, Homo sapiens
ctcggccccccaaac

SEQ ID NO: 1456928 - DNA, 15 bp, Homo sapiens
cctcggccccccaaa

SEQ ID NO: 1456929 - DNA, 15 bp, Homo sapiens
gcctcggccccccaa

SEQ ID NO: 1456930 - DNA, 15 bp, Homo sapiens
tgcctcggcccccca

SEQ ID NO: 1456931 - DNA, 15 bp, Homo sapiens
ctgcctcggcccccc

SEQ ID NO: 1456932 - DNA, 15 bp, Homo sapiens
gcctgcctcggcccc

SEQ ID NO: 1456933 - DNA, 15 bp, Homo sapiens
cgcctgcctcggccc

SEQ ID NO: 1456934 - DNA, 15 bp, Homo sapiens
ccgcctgcctcggcc

SEQ ID NO: 1456935 - DNA, 15 bp, Homo sapiens
tccgcctgcctcggc

SEQ ID NO: 1456936 - DNA, 15 bp, Homo sapiens
atccgcctgcctcgg

SEQ ID NO: 1456937 - DNA, 15 bp, Homo sapiens
aatccgcctgcctcg

SEQ ID NO: 1456938 - DNA, 15 bp, Homo sapiens
caatccgcctgcctc

SEQ ID NO: 1456939 - DNA, 15 bp, Homo sapiens
gcaatccgcctgcct

SEQ ID NO: 1456940 - DNA, 15 bp, Homo sapiens
agcaatccgcctgcc

SEQ ID NO: 1456941 - DNA, 15 bp, Homo sapiens
aagcaatccgcctgc

SEQ ID NO: 1456942 - DNA, 15 bp, Homo sapiens
taagcaatccgcctg

SEQ ID NO: 1456943 - DNA, 15 bp, Homo sapiens
ttaagcaatccgcct

SEQ ID NO: 1456944 - DNA, 15 bp, Homo sapiens
cttaagcaatccgcc

SEQ ID NO: 1456945 - DNA, 15 bp, Homo sapiens
gcttaagcaatccgc

SEQ ID NO: 1456946 - DNA, 15 bp, Homo sapiens
agcttaagcaatccg

SEQ ID NO: 1456947 - DNA, 15 bp, Homo sapiens
gagcttaagcaatcc

SEQ ID NO: 1456948 - DNA, 15 bp, Homo sapiens
tgagcttaagcaatc

SEQ ID NO: 1456949 - DNA, 15 bp, Homo sapiens
ttgagcttaagcaat

SEQ ID NO: 1456950 - DNA, 15 bp, Homo sapiens
cttgagcttaagcaa

SEQ ID NO: 1456951 - DNA, 15 bp, Homo sapiens
tcttgagcttaagca

SEQ ID NO: 1456952 - DNA, 15 bp, Homo sapiens
ctcttgagcttaagc

SEQ ID NO: 1456953 - DNA, 15 bp, Homo sapiens
actcttgagcttaag

SEQ ID NO: 1456954 - DNA, 15 bp, Homo sapiens
aactcttgagcttaa

SEQ ID NO: 1456955 - DNA, 15 bp, Homo sapiens
gaactcttgagctta

SEQ ID NO: 1456956 - DNA, 15 bp, Homo sapiens
tgaactcttgagctt

SEQ ID NO: 1456957 - DNA, 15 bp, Homo sapiens
ttgaactcttgagct

SEQ ID NO: 1456958 - DNA, 15 bp, Homo sapiens
cttgaactcttgagc

SEQ ID NO: 1456959 - DNA, 15 bp, Homo sapiens
tcttgaactcttgag

SEQ ID NO: 1456960 - DNA, 15 bp, Homo sapiens
gtcttgaactcttga

SEQ ID NO: 1456961 - DNA, 15 bp, Homo sapiens
ggtcttgaactcttg

SEQ ID NO: 1456962 - DNA, 15 bp, Homo sapiens
tggtcttgaactctt

SEQ ID NO: 1456963 - DNA, 15 bp, Homo sapiens
ctggtcttgaactct

SEQ ID NO: 1456964 - DNA, 15 bp, Homo sapiens
tactatgttgcccag

SEQ ID NO: 1456965 - DNA, 15 bp, Homo sapiens
ttactatgttgccca

SEQ ID NO: 1456966 - DNA, 15 bp, Homo sapiens
tttactatgttgccc

SEQ ID NO: 1456967 - DNA, 15 bp, Homo sapiens
ttttactatgttgcc

SEQ ID NO: 1456968 - DNA, 15 bp, Homo sapiens
gttttactatgttgc

SEQ ID NO: 1456969 - DNA, 15 bp, Homo sapiens
ggttttactatgttg

SEQ ID NO: 1456970 - DNA, 15 bp, Homo sapiens
gggttttactatgtt

SEQ ID NO: 1456971 - DNA, 15 bp, Homo sapiens
ggggttttactatgt

SEQ ID NO: 1456972 - DNA, 15 bp, Homo sapiens
tggggttttactatg

SEQ ID NO: 1456973 - DNA, 15 bp, Homo sapiens
atggggttttactat

SEQ ID NO: 1456974 - DNA, 15 bp, Homo sapiens
gatggggttttacta

SEQ ID NO: 1456975 - DNA, 15 bp, Homo sapiens
agatggggttttact

SEQ ID NO: 1456976 - DNA, 15 bp, Homo sapiens
tgtagagatggggtt

SEQ ID NO: 1456977 - DNA, 15 bp, Homo sapiens
gtgtagagatggggt

SEQ ID NO: 1456978 - DNA, 15 bp, Homo sapiens
tgtgtagagatgggg

SEQ ID NO: 1456979 - DNA, 15 bp, Homo sapiens
ttgtgtagagatggg

SEQ ID NO: 1456980 - DNA, 15 bp, Homo sapiens
tttgtgtagagatgg

SEQ ID NO: 1456981 - DNA, 15 bp, Homo sapiens
ttttgtgtagagatg

SEQ ID NO: 1456982 - DNA, 15 bp, Homo sapiens
tttttgtgtagagat

SEQ ID NO: 1456983 - DNA, 15 bp, Homo sapiens
atttttgtgtagaga

SEQ ID NO: 1456984 - DNA, 15 bp, Homo sapiens
tatttttgtgtagag

SEQ ID NO: 1456985 - DNA, 15 bp, Homo sapiens
atatttttgtgtaga

SEQ ID NO: 1456986 - DNA, 15 bp, Homo sapiens
catatttttgtgtag

SEQ ID NO: 1456987 - DNA, 15 bp, Homo sapiens
acatatttttgtgta

SEQ ID NO: 1456988 - DNA, 15 bp, Homo sapiens
tacatatttttgtgt

SEQ ID NO: 1456989 - DNA, 15 bp, Homo sapiens
ctacatatttttgtg

SEQ ID NO: 1456990 - DNA, 15 bp, Homo sapiens
tctacatatttttgt

SEQ ID NO: 1456991 - DNA, 15 bp, Homo sapiens
ctctacatatttttg

SEQ ID NO: 1456992 - DNA, 15 bp, Homo sapiens
tctctacatattttt

SEQ ID NO: 1456993 - DNA, 15 bp, Homo sapiens
atctctacatatttt

SEQ ID NO: 1456994 - DNA, 15 bp, Homo sapiens
gatctctacatattt

SEQ ID NO: 1456995 - DNA, 15 bp, Homo sapiens
tgatctctacatatt

SEQ ID NO: 1456996 - DNA, 15 bp, Homo sapiens
atgatctctacatat

SEQ ID NO: 1456997 - DNA, 15 bp, Homo sapiens
catgatctctacata

SEQ ID NO: 1456998 - DNA, 15 bp, Homo sapiens
tcatgatctctacat

SEQ ID NO: 1456999 - DNA, 15 bp, Homo sapiens
ttcatgatctctaca

SEQ ID NO: 1457000 - DNA, 15 bp, Homo sapiens
tttcatgatctctac

SEQ ID NO: 1457001 - DNA, 15 bp, Homo sapiens
ttttcatgatctcta

SEQ ID NO: 1457002 - DNA, 15 bp, Homo sapiens
attttcatgatctct

SEQ ID NO: 1457003 - DNA, 15 bp, Homo sapiens
cattttcatgatctc

SEQ ID NO: 1457004 - DNA, 15 bp, Homo sapiens
tcattttcatgatct

SEQ ID NO: 1457005 - DNA, 15 bp, Homo sapiens
gtcattttcatgatc

SEQ ID NO: 1457006 - DNA, 15 bp, Homo sapiens
ggtcattttcatgat

SEQ ID NO: 1457007 - DNA, 15 bp, Homo sapiens
aggtcattttcatga

SEQ ID NO: 1457008 - DNA, 15 bp, Homo sapiens
caggtcattttcatg

SEQ ID NO: 1457009 - DNA, 15 bp, Homo sapiens
tcaggtcattttcat

SEQ ID NO: 1457010 - DNA, 15 bp, Homo sapiens
ttcaggtcattttca

SEQ ID NO: 1457011 - DNA, 15 bp, Homo sapiens
gttcaggtcattttc

SEQ ID NO: 1457012 - DNA, 15 bp, Homo sapiens
tgttcaggtcatttt

SEQ ID NO: 1457013 - DNA, 15 bp, Homo sapiens
ctgttcaggtcattt

SEQ ID NO: 1457014 - DNA, 15 bp, Homo sapiens
cctgttcaggtcatt

SEQ ID NO: 1457015 - DNA, 15 bp, Homo sapiens
gcctgttcaggtcat

SEQ ID NO: 1457016 - DNA, 15 bp, Homo sapiens
ggcctgttcaggtca

SEQ ID NO: 1457017 - DNA, 15 bp, Homo sapiens
tggcctgttcaggtc

SEQ ID NO: 1457018 - DNA, 15 bp, Homo sapiens
ctggcctgttcaggt

SEQ ID NO: 1457019 - DNA, 15 bp, Homo sapiens
cctggcctgttcagg

SEQ ID NO: 1457020 - DNA, 15 bp, Homo sapiens
gcctggcctgttcag

SEQ ID NO: 1457021 - DNA, 15 bp, Homo sapiens
cgcctggcctgttca

SEQ ID NO: 1457022 - DNA, 15 bp, Homo sapiens
ccgcctggcctgttc

SEQ ID NO: 1457023 - DNA, 15 bp, Homo sapiens
cccgcctggcctgtt

SEQ ID NO: 1457024 - DNA, 15 bp, Homo sapiens
ccccgcctggcctgt

SEQ ID NO: 1457025 - DNA, 15 bp, Homo sapiens
accccgcctggcctg

SEQ ID NO: 1457026 - DNA, 15 bp, Homo sapiens
caccccgcctggcct

SEQ ID NO: 1457027 - DNA, 15 bp, Homo sapiens
ccaccccgcctggcc

SEQ ID NO: 1457028 - DNA, 15 bp, Homo sapiens
gccaccccgcctggc

SEQ ID NO: 1457029 - DNA, 15 bp, Homo sapiens
agccaccccgcctgg

SEQ ID NO: 1457030 - DNA, 15 bp, Homo sapiens
gagccaccccgcctg

SEQ ID NO: 1457031 - DNA, 15 bp, Homo sapiens
tgagccaccccgcct

SEQ ID NO: 1457032 - DNA, 15 bp, Homo sapiens
gtgagccaccccgcc

SEQ ID NO: 1457033 - DNA, 15 bp, Homo sapiens
cgtgagccaccccgc

SEQ ID NO: 1457034 - DNA, 15 bp, Homo sapiens
acgtgagccaccccg

SEQ ID NO: 1457035 - DNA, 15 bp, Homo sapiens
gacgtgagccacccc

SEQ ID NO: 1457036 - DNA, 15 bp, Homo sapiens
agacgtgagccaccc

SEQ ID NO: 1457037 - DNA, 15 bp, Homo sapiens
acccgcctcagcctc

SEQ ID NO: 1457038 - DNA, 15 bp, Homo sapiens
cacccgcctcagcct

SEQ ID NO: 1457039 - DNA, 15 bp, Homo sapiens
ccacccgcctcagcc

SEQ ID NO: 1457040 - DNA, 15 bp, Homo sapiens
tccacccgcctcagc

SEQ ID NO: 1457041 - DNA, 15 bp, Homo sapiens
atccacccgcctcag

SEQ ID NO: 1457042 - DNA, 15 bp, Homo sapiens
gatccacccgcctca

SEQ ID NO: 1457043 - DNA, 15 bp, Homo sapiens
tgtgatccacccgcc

SEQ ID NO: 1457044 - DNA, 15 bp, Homo sapiens
ttgtgatccacccgc

SEQ ID NO: 1457045 - DNA, 15 bp, Homo sapiens
cttgtgatccacccg

SEQ ID NO: 1457046 - DNA, 15 bp, Homo sapiens
ccttgtgatccaccc

SEQ ID NO: 1457047 - DNA, 15 bp, Homo sapiens
accttgtgatccacc

SEQ ID NO: 1457048 - DNA, 15 bp, Homo sapiens
tttggccaggctggt

SEQ ID NO: 1457049 - DNA, 15 bp, Homo sapiens
atttggccaggctgg

SEQ ID NO: 1457050 - DNA, 15 bp, Homo sapiens
tatttggccaggctg

SEQ ID NO: 1457051 - DNA, 15 bp, Homo sapiens
atatttggccaggct

SEQ ID NO: 1457052 - DNA, 15 bp, Homo sapiens
catatttggccaggc

SEQ ID NO: 1457053 - DNA, 15 bp, Homo sapiens
ccatatttggccagg

SEQ ID NO: 1457054 - DNA, 15 bp, Homo sapiens
accatatttggccag

SEQ ID NO: 1457055 - DNA, 15 bp, Homo sapiens
caccatatttggcca

SEQ ID NO: 1457056 - DNA, 15 bp, Homo sapiens
tcaccatatttggcc

SEQ ID NO: 1457057 - DNA, 15 bp, Homo sapiens
ttcaccatatttggc

SEQ ID NO: 1457058 - DNA, 15 bp, Homo sapiens
tttcaccatatttgg

SEQ ID NO: 1457059 - DNA, 15 bp, Homo sapiens
gtttcaccatatttg

SEQ ID NO: 1457060 - DNA, 15 bp, Homo sapiens
ggtttcaccatattt

SEQ ID NO: 1457061 - DNA, 15 bp, Homo sapiens
tggggtttcaccata

SEQ ID NO: 1457062 - DNA, 15 bp, Homo sapiens
actaatttttgtact

SEQ ID NO: 1457063 - DNA, 15 bp, Homo sapiens
cactaatttttgtac

SEQ ID NO: 1457064 - DNA, 15 bp, Homo sapiens
ccactaatttttgta

SEQ ID NO: 1457065 - DNA, 15 bp, Homo sapiens
cccactaatttttgt

SEQ ID NO: 1457066 - DNA, 15 bp, Homo sapiens
ccccactaatttttg

SEQ ID NO: 1457067 - DNA, 15 bp, Homo sapiens
accccactaattttt

SEQ ID NO: 1457068 - DNA, 15 bp, Homo sapiens
caccccactaatttt

SEQ ID NO: 1457069 - DNA, 15 bp, Homo sapiens
acaccccactaattt

SEQ ID NO: 1457070 - DNA, 15 bp, Homo sapiens
cacaccccactaatt

SEQ ID NO: 1457071 - DNA, 15 bp, Homo sapiens
ccacaccccactaat

SEQ ID NO: 1457072 - DNA, 15 bp, Homo sapiens
accacaccccactaa

SEQ ID NO: 1457073 - DNA, 15 bp, Homo sapiens
caccacaccccacta

SEQ ID NO: 1457074 - DNA, 15 bp, Homo sapiens
ccaccacaccccact

SEQ ID NO: 1457075 - DNA, 15 bp, Homo sapiens
gccaccacaccccac

SEQ ID NO: 1457076 - DNA, 15 bp, Homo sapiens
tgccaccacacccca

SEQ ID NO: 1457077 - DNA, 15 bp, Homo sapiens
ctgccaccacacccc

SEQ ID NO: 1457078 - DNA, 15 bp, Homo sapiens
cgcctgccaccacac

SEQ ID NO: 1457079 - DNA, 15 bp, Homo sapiens
gcgcctgccaccaca

SEQ ID NO: 1457080 - DNA, 15 bp, Homo sapiens
ctacaggcgcctgcc

SEQ ID NO: 1457081 - DNA, 15 bp, Homo sapiens
actacaggcgcctgc

SEQ ID NO: 1457082 - DNA, 15 bp, Homo sapiens
gactacaggcgcctg

SEQ ID NO: 1457083 - DNA, 15 bp, Homo sapiens
ggactacaggcgcct

SEQ ID NO: 1457084 - DNA, 15 bp, Homo sapiens
ggtagctgggactac

SEQ ID NO: 1457085 - DNA, 15 bp, Homo sapiens
ctcctgggtagctgg

SEQ ID NO: 1457086 - DNA, 15 bp, Homo sapiens
cctcctgggtagctg

SEQ ID NO: 1457087 - DNA, 15 bp, Homo sapiens
gcctcctgggtagct

SEQ ID NO: 1457088 - DNA, 15 bp, Homo sapiens
agcctcctgggtagc

SEQ ID NO: 1457089 - DNA, 15 bp, Homo sapiens
cagcctcctgggtag

SEQ ID NO: 1457090 - DNA, 15 bp, Homo sapiens
cctccgcctcctggg

SEQ ID NO: 1457091 - DNA, 15 bp, Homo sapiens
ctcactgcaacctcc

SEQ ID NO: 1457092 - DNA, 15 bp, Homo sapiens
atctcgctctgtcac

SEQ ID NO: 1457093 - DNA, 15 bp, Homo sapiens
aatctcgctctgtca

SEQ ID NO: 1457094 - DNA, 15 bp, Homo sapiens
gaatctcgctctgtc

SEQ ID NO: 1457095 - DNA, 15 bp, Homo sapiens
ggaatctcgctctgt

SEQ ID NO: 1457096 - DNA, 15 bp, Homo sapiens
cggaatctcgctctg

SEQ ID NO: 1457097 - DNA, 15 bp, Homo sapiens
acggaatctcgctct

SEQ ID NO: 1457098 - DNA, 15 bp, Homo sapiens
gacggaatctcgctc

SEQ ID NO: 1457099 - DNA, 15 bp, Homo sapiens
agacggaatctcgct

SEQ ID NO: 1457100 - DNA, 15 bp, Homo sapiens
gagacggaatctcgc

SEQ ID NO: 1457101 - DNA, 15 bp, Homo sapiens
tgagacggaatctcg

SEQ ID NO: 1457102 - DNA, 15 bp, Homo sapiens
ttgagacggaatctc

SEQ ID NO: 1457103 - DNA, 15 bp, Homo sapiens
tttgagacggaatct

SEQ ID NO: 1457104 - DNA, 15 bp, Homo sapiens
ttttgagacggaatc

SEQ ID NO: 1457105 - DNA, 15 bp, Homo sapiens
tttttgagacggaat

SEQ ID NO: 1457106 - DNA, 15 bp, Homo sapiens
ttttttgagacggaa

SEQ ID NO: 1457107 - DNA, 15 bp, Homo sapiens
attttctttttttct

SEQ ID NO: 1457108 - DNA, 15 bp, Homo sapiens
cattttctttttttc

SEQ ID NO: 1457109 - DNA, 15 bp, Homo sapiens
gtcattttctttttt

SEQ ID NO: 1457110 - DNA, 15 bp, Homo sapiens
ggtcattttcttttt

SEQ ID NO: 1457111 - DNA, 15 bp, Homo sapiens
aggtcattttctttt

SEQ ID NO: 1457112 - DNA, 15 bp, Homo sapiens
caggtcattttcttt

SEQ ID NO: 1457113 - DNA, 15 bp, Homo sapiens
tcaggtcattttctt

SEQ ID NO: 1457114 - DNA, 15 bp, Homo sapiens
ttcaggtcattttct

SEQ ID NO: 1457115 - DNA, 15 bp, Homo sapiens
atgttcaggtcattt

SEQ ID NO: 1457116 - DNA, 15 bp, Homo sapiens
tatgttcaggtcatt

SEQ ID NO: 1457117 - DNA, 15 bp, Homo sapiens
ttatgttcaggtcat

SEQ ID NO: 1457118 - DNA, 15 bp, Homo sapiens
cttatgttcaggtca

SEQ ID NO: 1457119 - DNA, 15 bp, Homo sapiens
acttatgttcaggtc

SEQ ID NO: 1457120 - DNA, 15 bp, Homo sapiens
cacttatgttcaggt

SEQ ID NO: 1457121 - DNA, 15 bp, Homo sapiens
acacttatgttcagg

SEQ ID NO: 1457122 - DNA, 15 bp, Homo sapiens
gacacttatgttcag

SEQ ID NO: 1457123 - DNA, 15 bp, Homo sapiens
tgacacttatgttca

SEQ ID NO: 1457124 - DNA, 15 bp, Homo sapiens
ttgacacttatgttc

SEQ ID NO: 1457125 - DNA, 15 bp, Homo sapiens
attgacacttatgtt

SEQ ID NO: 1457126 - DNA, 15 bp, Homo sapiens
aattgacacttatgt

SEQ ID NO: 1457127 - DNA, 15 bp, Homo sapiens
taattgacacttatg

SEQ ID NO: 1457128 - DNA, 15 bp, Homo sapiens
ctaattgacacttat

SEQ ID NO: 1457129 - DNA, 15 bp, Homo sapiens
cctaattgacactta

SEQ ID NO: 1457130 - DNA, 15 bp, Homo sapiens
gcctaattgacactt

SEQ ID NO: 1457131 - DNA, 15 bp, Homo sapiens
tgcctaattgacact

SEQ ID NO: 1457132 - DNA, 15 bp, Homo sapiens
ctgcctaattgacac

SEQ ID NO: 1457133 - DNA, 15 bp, Homo sapiens
actgcctaattgaca

SEQ ID NO: 1457134 - DNA, 15 bp, Homo sapiens
aactgcctaattgac

SEQ ID NO: 1457135 - DNA, 15 bp, Homo sapiens
aaactgcctaattga

SEQ ID NO: 1457136 - DNA, 15 bp, Homo sapiens
caaactgcctaattg

SEQ ID NO: 1457137 - DNA, 15 bp, Homo sapiens
ccaaactgcctaatt

SEQ ID NO: 1457138 - DNA, 15 bp, Homo sapiens
cccaaactgcctaat

SEQ ID NO: 1457139 - DNA, 15 bp, Homo sapiens
tcccaaactgcctaa

SEQ ID NO: 1457140 - DNA, 15 bp, Homo sapiens
ttcccaaactgccta

SEQ ID NO: 1457141 - DNA, 15 bp, Homo sapiens
tttcccaaactgcct

SEQ ID NO: 1457142 - DNA, 15 bp, Homo sapiens
atttcccaaactgcc

SEQ ID NO: 1457143 - DNA, 15 bp, Homo sapiens
tatttcccaaactgc

SEQ ID NO: 1457144 - DNA, 15 bp, Homo sapiens
ctatttcccaaactg

SEQ ID NO: 1457145 - DNA, 15 bp, Homo sapiens
gctatttcccaaact

SEQ ID NO: 1457146 - DNA, 15 bp, Homo sapiens
agctatttcccaaac

SEQ ID NO: 1457147 - DNA, 15 bp, Homo sapiens
tagctatttcccaaa

SEQ ID NO: 1457148 - DNA, 15 bp, Homo sapiens
ctagctatttcccaa

SEQ ID NO: 1457149 - DNA, 15 bp, Homo sapiens
gctagctatttccca

SEQ ID NO: 1457150 - DNA, 15 bp, Homo sapiens
agctagctatttccc

SEQ ID NO: 1457151 - DNA, 15 bp, Homo sapiens
tagctagctatttcc

SEQ ID NO: 1457152 - DNA, 15 bp, Homo sapiens
ttagctagctatttc

SEQ ID NO: 1457153 - DNA, 15 bp, Homo sapiens
cttagctagctattt

SEQ ID NO: 1457154 - DNA, 15 bp, Homo sapiens
acttagctagctatt

SEQ ID NO: 1457155 - DNA, 15 bp, Homo sapiens
tacttagctagctat

SEQ ID NO: 1457156 - DNA, 15 bp, Homo sapiens
ctacttagctagcta

SEQ ID NO: 1457157 - DNA, 15 bp, Homo sapiens
gctacttagctagct

SEQ ID NO: 1457158 - DNA, 15 bp, Homo sapiens
tgctacttagctagc

SEQ ID NO: 1457159 - DNA, 15 bp, Homo sapiens
atgctacttagctag

SEQ ID NO: 1457160 - DNA, 15 bp, Homo sapiens
aatgctacttagcta

SEQ ID NO: 1457161 - DNA, 15 bp, Homo sapiens
caatgctacttagct

SEQ ID NO: 1457162 - DNA, 15 bp, Homo sapiens
gcaatgctacttagc

SEQ ID NO: 1457163 - DNA, 15 bp, Homo sapiens
tgcaatgctacttag

SEQ ID NO: 1457164 - DNA, 15 bp, Homo sapiens
atgcaatgctactta

SEQ ID NO: 1457165 - DNA, 15 bp, Homo sapiens
aatgcaatgctactt

SEQ ID NO: 1457166 - DNA, 15 bp, Homo sapiens
aaatgcaatgctact

SEQ ID NO: 1457167 - DNA, 15 bp, Homo sapiens
gaaatgcaatgctac

SEQ ID NO: 1457168 - DNA, 15 bp, Homo sapiens
tgaaatgcaatgcta

SEQ ID NO: 1457169 - DNA, 15 bp, Homo sapiens
atgaaatgcaatgct

SEQ ID NO: 1457170 - DNA, 15 bp, Homo sapiens
tatgaaatgcaatgc

SEQ ID NO: 1457171 - DNA, 15 bp, Homo sapiens
atatgaaatgcaatg

SEQ ID NO: 1457172 - DNA, 15 bp, Homo sapiens
aatatgaaatgcaat

SEQ ID NO: 1457173 - DNA, 15 bp, Homo sapiens
aaatatgaaatgcaa

SEQ ID NO: 1457174 - DNA, 15 bp, Homo sapiens
gaaatatgaaatgca

SEQ ID NO: 1457175 - DNA, 15 bp, Homo sapiens
tgaaatatgaaatgc

SEQ ID NO: 1457176 - DNA, 15 bp, Homo sapiens
atgaaatatgaaatg

SEQ ID NO: 1457177 - DNA, 15 bp, Homo sapiens
aatgaaatatgaaat

SEQ ID NO: 1457178 - DNA, 15 bp, Homo sapiens
aaatgaaatatgaaa

SEQ ID NO: 1457179 - DNA, 15 bp, Homo sapiens
aaaatgaaatatgaa

SEQ ID NO: 1457180 - DNA, 15 bp, Homo sapiens
aaaaatgaaatatga

SEQ ID NO: 1457181 - DNA, 15 bp, Homo sapiens
aaaaaatgaaatatg

SEQ ID NO: 1457182 - DNA, 15 bp, Homo sapiens
aaaaaaatgaaatat

SEQ ID NO: 1457183 - DNA, 15 bp, Homo sapiens
taaaaaaatgaaata

SEQ ID NO: 1457184 - DNA, 15 bp, Homo sapiens
ttaaaaaaatgaaat

SEQ ID NO: 1457185 - DNA, 15 bp, Homo sapiens
gttaaaaaaatgaaa

SEQ ID NO: 1457186 - DNA, 15 bp, Homo sapiens
agttaaaaaaatgaa

SEQ ID NO: 1457187 - DNA, 15 bp, Homo sapiens
tagttaaaaaaatga

SEQ ID NO: 1457188 - DNA, 15 bp, Homo sapiens
atagttaaaaaaatg

SEQ ID NO: 1457189 - DNA, 15 bp, Homo sapiens
aatagttaaaaaaat

SEQ ID NO: 1457190 - DNA, 15 bp, Homo sapiens
taatagttaaaaaaa

SEQ ID NO: 1457191 - DNA, 15 bp, Homo sapiens
ctaatagttaaaaaa

SEQ ID NO: 1457192 - DNA, 15 bp, Homo sapiens
tctaatagttaaaaa

SEQ ID NO: 1457193 - DNA, 15 bp, Homo sapiens
ttctaatagttaaaa

SEQ ID NO: 1457194 - DNA, 15 bp, Homo sapiens
gttctaatagttaaa

SEQ ID NO: 1457195 - DNA, 15 bp, Homo sapiens
agttctaatagttaa

SEQ ID NO: 1457196 - DNA, 15 bp, Homo sapiens
aagttctaatagtta

SEQ ID NO: 1457197 - DNA, 15 bp, Homo sapiens
aaagttctaatagtt

SEQ ID NO: 1457198 - DNA, 15 bp, Homo sapiens
taaagttctaatagt

SEQ ID NO: 1457199 - DNA, 15 bp, Homo sapiens
gtaaagttctaatag

SEQ ID NO: 1457200 - DNA, 15 bp, Homo sapiens
tgtaaagttctaata

SEQ ID NO: 1457201 - DNA, 15 bp, Homo sapiens
gtgtaaagttctaat

SEQ ID NO: 1457202 - DNA, 15 bp, Homo sapiens
tgtgtaaagttctaa

SEQ ID NO: 1457203 - DNA, 15 bp, Homo sapiens
ttgtgtaaagttcta

SEQ ID NO: 1457204 - DNA, 15 bp, Homo sapiens
attgtgtaaagttct

SEQ ID NO: 1457205 - DNA, 15 bp, Homo sapiens
cattgtgtaaagttc

SEQ ID NO: 1457206 - DNA, 15 bp, Homo sapiens
gcattgtgtaaagtt

SEQ ID NO: 1457207 - DNA, 15 bp, Homo sapiens
agcattgtgtaaagt

SEQ ID NO: 1457208 - DNA, 15 bp, Homo sapiens
aagcattgtgtaaag

SEQ ID NO: 1457209 - DNA, 15 bp, Homo sapiens
gaagcattgtgtaaa

SEQ ID NO: 1457210 - DNA, 15 bp, Homo sapiens
agaagcattgtgtaa

SEQ ID NO: 1457211 - DNA, 15 bp, Homo sapiens
aagaagcattgtgta

SEQ ID NO: 1457212 - DNA, 15 bp, Homo sapiens
taagaagcattgtgt

SEQ ID NO: 1457213 - DNA, 15 bp, Homo sapiens
ttaagaagcattgtg

SEQ ID NO: 1457214 - DNA, 15 bp, Homo sapiens
tttaagaagcattgt

SEQ ID NO: 1457215 - DNA, 15 bp, Homo sapiens
gtttaagaagcattg

SEQ ID NO: 1457216 - DNA, 15 bp, Homo sapiens
ggtttaagaagcatt

SEQ ID NO: 1457217 - DNA, 15 bp, Homo sapiens
cggtttaagaagcat

SEQ ID NO: 1457218 - DNA, 15 bp, Homo sapiens
tcggtttaagaagca

SEQ ID NO: 1457219 - DNA, 15 bp, Homo sapiens
ttcggtttaagaagc

SEQ ID NO: 1457220 - DNA, 15 bp, Homo sapiens
cttcggtttaagaag

SEQ ID NO: 1457221 - DNA, 15 bp, Homo sapiens
acttcggtttaagaa

SEQ ID NO: 1457222 - DNA, 15 bp, Homo sapiens
cacttcggtttaaga

SEQ ID NO: 1457223 - DNA, 15 bp, Homo sapiens
gcacttcggtttaag

SEQ ID NO: 1457224 - DNA, 15 bp, Homo sapiens
tgcacttcggtttaa

SEQ ID NO: 1457225 - DNA, 15 bp, Homo sapiens
gtgcacttcggttta

SEQ ID NO: 1457226 - DNA, 15 bp, Homo sapiens
tgtgcacttcggttt

SEQ ID NO: 1457227 - DNA, 15 bp, Homo sapiens
atgtgcacttcggtt

SEQ ID NO: 1457228 - DNA, 15 bp, Homo sapiens
tatgtgcacttcggt

SEQ ID NO: 1457229 - DNA, 15 bp, Homo sapiens
ttatgtgcacttcgg

SEQ ID NO: 1457230 - DNA, 15 bp, Homo sapiens
cttatgtgcacttcg

SEQ ID NO: 1457231 - DNA, 15 bp, Homo sapiens
tcttatgtgcacttc

SEQ ID NO: 1457232 - DNA, 15 bp, Homo sapiens
ttcttatgtgcactt

SEQ ID NO: 1457233 - DNA, 15 bp, Homo sapiens
attcttatgtgcact

SEQ ID NO: 1457234 - DNA, 15 bp, Homo sapiens
gattcttatgtgcac

SEQ ID NO: 1457235 - DNA, 15 bp, Homo sapiens
tgattcttatgtgca

SEQ ID NO: 1457236 - DNA, 15 bp, Homo sapiens
atgattcttatgtgc

SEQ ID NO: 1457237 - DNA, 15 bp, Homo sapiens
gatgattcttatgtg

SEQ ID NO: 1457238 - DNA, 15 bp, Homo sapiens
agatgattcttatgt

SEQ ID NO: 1457239 - DNA, 15 bp, Homo sapiens
gagatgattcttatg

SEQ ID NO: 1457240 - DNA, 15 bp, Homo sapiens
tgagatgattcttat

SEQ ID NO: 1457241 - DNA, 15 bp, Homo sapiens
ctgagatgattctta

SEQ ID NO: 1457242 - DNA, 15 bp, Homo sapiens
tctgagatgattctt

SEQ ID NO: 1457243 - DNA, 15 bp, Homo sapiens
ctctgagatgattct

SEQ ID NO: 1457244 - DNA, 15 bp, Homo sapiens
gctctgagatgattc

SEQ ID NO: 1457245 - DNA, 15 bp, Homo sapiens
agctctgagatgatt

SEQ ID NO: 1457246 - DNA, 15 bp, Homo sapiens
aagctctgagatgat

SEQ ID NO: 1457247 - DNA, 15 bp, Homo sapiens
gaagctctgagatga

SEQ ID NO: 1457248 - DNA, 15 bp, Homo sapiens
agaagctctgagatg

SEQ ID NO: 1457249 - DNA, 15 bp, Homo sapiens
gagaagctctgagat

SEQ ID NO: 1457250 - DNA, 15 bp, Homo sapiens
ggagaagctctgaga

SEQ ID NO: 1457251 - DNA, 15 bp, Homo sapiens
tggagaagctctgag

SEQ ID NO: 1457252 - DNA, 15 bp, Homo sapiens
ttggagaagctctga

SEQ ID NO: 1457253 - DNA, 15 bp, Homo sapiens
tttggagaagctctg

SEQ ID NO: 1457254 - DNA, 15 bp, Homo sapiens
ttttggagaagctct

SEQ ID NO: 1457255 - DNA, 15 bp, Homo sapiens
attttggagaagctc

SEQ ID NO: 1457256 - DNA, 15 bp, Homo sapiens
cattttggagaagct

SEQ ID NO: 1457257 - DNA, 15 bp, Homo sapiens
gcattttggagaagc

SEQ ID NO: 1457258 - DNA, 15 bp, Homo sapiens
tgcattttggagaag

SEQ ID NO: 1457259 - DNA, 15 bp, Homo sapiens
ctgcattttggagaa

SEQ ID NO: 1457260 - DNA, 15 bp, Homo sapiens
tctgcattttggaga

SEQ ID NO: 1457261 - DNA, 15 bp, Homo sapiens
atctgcattttggag

SEQ ID NO: 1457262 - DNA, 15 bp, Homo sapiens
aatctgcattttgga

SEQ ID NO: 1457263 - DNA, 15 bp, Homo sapiens
aaatctgcattttgg

SEQ ID NO: 1457264 - DNA, 15 bp, Homo sapiens
gaaatctgcattttg

SEQ ID NO: 1457265 - DNA, 15 bp, Homo sapiens
agaaatctgcatttt

SEQ ID NO: 1457266 - DNA, 15 bp, Homo sapiens
cagaaatctgcattt

SEQ ID NO: 1457267 - DNA, 15 bp, Homo sapiens
ccagaaatctgcatt

SEQ ID NO: 1457268 - DNA, 15 bp, Homo sapiens
tccagaaatctgcat

SEQ ID NO: 1457269 - DNA, 15 bp, Homo sapiens
atccagaaatctgca

SEQ ID NO: 1457270 - DNA, 15 bp, Homo sapiens
gatccagaaatctgc

SEQ ID NO: 1457271 - DNA, 15 bp, Homo sapiens
ggatccagaaatctg

SEQ ID NO: 1457272 - DNA, 15 bp, Homo sapiens
gggatccagaaatct

SEQ ID NO: 1457273 - DNA, 15 bp, Homo sapiens
tgggatccagaaatc

SEQ ID NO: 1457274 - DNA, 15 bp, Homo sapiens
gtgggatccagaaat

SEQ ID NO: 1457275 - DNA, 15 bp, Homo sapiens
tgtgggatccagaaa

SEQ ID NO: 1457276 - DNA, 15 bp, Homo sapiens
ttgtgggatccagaa

SEQ ID NO: 1457277 - DNA, 15 bp, Homo sapiens
tttgtgggatccaga

SEQ ID NO: 1457278 - DNA, 15 bp, Homo sapiens
gtttgtgggatccag

SEQ ID NO: 1457279 - DNA, 15 bp, Homo sapiens
agtttgtgggatcca

SEQ ID NO: 1457280 - DNA, 15 bp, Homo sapiens
gagtttgtgggatcc

SEQ ID NO: 1457281 - DNA, 15 bp, Homo sapiens
tgagtttgtgggatc

SEQ ID NO: 1457282 - DNA, 15 bp, Homo sapiens
ctgagtttgtgggat

SEQ ID NO: 1457283 - DNA, 15 bp, Homo sapiens
tctgagtttgtggga

SEQ ID NO: 1457284 - DNA, 15 bp, Homo sapiens
atctgagtttgtggg

SEQ ID NO: 1457285 - DNA, 15 bp, Homo sapiens
catctgagtttgtgg

SEQ ID NO: 1457286 - DNA, 15 bp, Homo sapiens
gcatctgagtttgtg

SEQ ID NO: 1457287 - DNA, 15 bp, Homo sapiens
agcatctgagtttgt

SEQ ID NO: 1457288 - DNA, 15 bp, Homo sapiens
cagcatctgagtttg

SEQ ID NO: 1457289 - DNA, 15 bp, Homo sapiens
tcagcatctgagttt

SEQ ID NO: 1457290 - DNA, 15 bp, Homo sapiens
atcagcatctgagtt

SEQ ID NO: 1457291 - DNA, 15 bp, Homo sapiens
aatcagcatctgagt

SEQ ID NO: 1457292 - DNA, 15 bp, Homo sapiens
taatcagcatctgag

SEQ ID NO: 1457293 - DNA, 15 bp, Homo sapiens
ataatcagcatctga

SEQ ID NO: 1457294 - DNA, 15 bp, Homo sapiens
tataatcagcatctg

SEQ ID NO: 1457295 - DNA, 15 bp, Homo sapiens
ctataatcagcatct

SEQ ID NO: 1457296 - DNA, 15 bp, Homo sapiens
actataatcagcatc

SEQ ID NO: 1457297 - DNA, 15 bp, Homo sapiens
tactataatcagcat

SEQ ID NO: 1457298 - DNA, 15 bp, Homo sapiens
ttactataatcagca

SEQ ID NO: 1457299 - DNA, 15 bp, Homo sapiens
tttactataatcagc

SEQ ID NO: 1457300 - DNA, 15 bp, Homo sapiens
atttactataatcag

SEQ ID NO: 1457301 - DNA, 15 bp, Homo sapiens
gatttactataatca

SEQ ID NO: 1457302 - DNA, 15 bp, Homo sapiens
tgatttactataatc

SEQ ID NO: 1457303 - DNA, 15 bp, Homo sapiens
ttgatttactataat

SEQ ID NO: 1457304 - DNA, 15 bp, Homo sapiens
cttgatttactataa

SEQ ID NO: 1457305 - DNA, 15 bp, Homo sapiens
ccttgatttactata

SEQ ID NO: 1457306 - DNA, 15 bp, Homo sapiens
cccttgatttactat

SEQ ID NO: 1457307 - DNA, 15 bp, Homo sapiens
acccttgatttacta

SEQ ID NO: 1457308 - DNA, 15 bp, Homo sapiens
aacccttgatttact

SEQ ID NO: 1457309 - DNA, 15 bp, Homo sapiens
caacccttgatttac

SEQ ID NO: 1457310 - DNA, 15 bp, Homo sapiens
tcaacccttgattta

SEQ ID NO: 1457311 - DNA, 15 bp, Homo sapiens
ttcaacccttgattt

SEQ ID NO: 1457312 - DNA, 15 bp, Homo sapiens
tttcaacccttgatt

SEQ ID NO: 1457313 - DNA, 15 bp, Homo sapiens
ttttcaacccttgat

SEQ ID NO: 1457314 - DNA, 15 bp, Homo sapiens
gttttcaacccttga

SEQ ID NO: 1457315 - DNA, 15 bp, Homo sapiens
ggttttcaacccttg

SEQ ID NO: 1457316 - DNA, 15 bp, Homo sapiens
tggttttcaaccctt

SEQ ID NO: 1457317 - DNA, 15 bp, Homo sapiens
ctggttttcaaccct

SEQ ID NO: 1457318 - DNA, 15 bp, Homo sapiens
cctggttttcaaccc

SEQ ID NO: 1457319 - DNA, 15 bp, Homo sapiens
ccctggttttcaacc

SEQ ID NO: 1457320 - DNA, 15 bp, Homo sapiens
tccctggttttcaac

SEQ ID NO: 1457321 - DNA, 15 bp, Homo sapiens
ttccctggttttcaa

SEQ ID NO: 1457322 - DNA, 15 bp, Homo sapiens
gttccctggttttca

SEQ ID NO: 1457323 - DNA, 15 bp, Homo sapiens
agttccctggttttc

SEQ ID NO: 1457324 - DNA, 15 bp, Homo sapiens
cagttccctggtttt

SEQ ID NO: 1457325 - DNA, 15 bp, Homo sapiens
acagttccctggttt

SEQ ID NO: 1457326 - DNA, 15 bp, Homo sapiens
tacagttccctggtt

SEQ ID NO: 1457327 - DNA, 15 bp, Homo sapiens
gtacagttccctggt

SEQ ID NO: 1457328 - DNA, 15 bp, Homo sapiens
agtacagttccctgg

SEQ ID NO: 1457329 - DNA, 15 bp, Homo sapiens
aagtacagttccctg

SEQ ID NO: 1457330 - DNA, 15 bp, Homo sapiens
gaagtacagttccct

SEQ ID NO: 1457331 - DNA, 15 bp, Homo sapiens
tgaagtacagttccc

SEQ ID NO: 1457332 - DNA, 15 bp, Homo sapiens
ttgaagtacagttcc

SEQ ID NO: 1457333 - DNA, 15 bp, Homo sapiens
gttgaagtacagttc

SEQ ID NO: 1457334 - DNA, 15 bp, Homo sapiens
tgttgaagtacagtt

SEQ ID NO: 1457335 - DNA, 15 bp, Homo sapiens
ttgttgaagtacagt

SEQ ID NO: 1457336 - DNA, 15 bp, Homo sapiens
cttgttgaagtacag

SEQ ID NO: 1457337 - DNA, 15 bp, Homo sapiens
gcttgttgaagtaca

SEQ ID NO: 1457338 - DNA, 15 bp, Homo sapiens
tgcttgttgaagtac

SEQ ID NO: 1457339 - DNA, 15 bp, Homo sapiens
gtgcttgttgaagta

SEQ ID NO: 1457340 - DNA, 15 bp, Homo sapiens
ggtgcttgttgaagt

SEQ ID NO: 1457341 - DNA, 15 bp, Homo sapiens
cggtgcttgttgaag

SEQ ID NO: 1457342 - DNA, 15 bp, Homo sapiens
acggtgcttgttgaa

SEQ ID NO: 1457343 - DNA, 15 bp, Homo sapiens
aacggtgcttgttga

SEQ ID NO: 1457344 - DNA, 15 bp, Homo sapiens
taacggtgcttgttg

SEQ ID NO: 1457345 - DNA, 15 bp, Homo sapiens
ttaacggtgcttgtt

SEQ ID NO: 1457346 - DNA, 15 bp, Homo sapiens
cttaacggtgcttgt

SEQ ID NO: 1457347 - DNA, 15 bp, Homo sapiens
acttaacggtgcttg

SEQ ID NO: 1457348 - DNA, 15 bp, Homo sapiens
cacttaacggtgctt

SEQ ID NO: 1457349 - DNA, 15 bp, Homo sapiens
tcacttaacggtgct

SEQ ID NO: 1457350 - DNA, 15 bp, Homo sapiens
atcacttaacggtgc

SEQ ID NO: 1457351 - DNA, 15 bp, Homo sapiens
aatcacttaacggtg

SEQ ID NO: 1457352 - DNA, 15 bp, Homo sapiens
gaatcacttaacggt

SEQ ID NO: 1457353 - DNA, 15 bp, Homo sapiens
tgaatcacttaacgg

SEQ ID NO: 1457354 - DNA, 15 bp, Homo sapiens
ttgaatcacttaacg

SEQ ID NO: 1457355 - DNA, 15 bp, Homo sapiens
tttgaatcacttaac

SEQ ID NO: 1457356 - DNA, 15 bp, Homo sapiens
atttgaatcacttaa

SEQ ID NO: 1457357 - DNA, 15 bp, Homo sapiens
aatttgaatcactta

SEQ ID NO: 1457358 - DNA, 15 bp, Homo sapiens
aaatttgaatcactt

SEQ ID NO: 1457359 - DNA, 15 bp, Homo sapiens
caaatttgaatcact

SEQ ID NO: 1457360 - DNA, 15 bp, Homo sapiens
tcaaatttgaatcac

SEQ ID NO: 1457361 - DNA, 15 bp, Homo sapiens
ctcaaatttgaatca

SEQ ID NO: 1457362 - DNA, 15 bp, Homo sapiens
tctcaaatttgaatc

SEQ ID NO: 1457363 - DNA, 15 bp, Homo sapiens
ttctcaaatttgaat

SEQ ID NO: 1457364 - DNA, 15 bp, Homo sapiens
tttctcaaatttgaa

SEQ ID NO: 1457365 - DNA, 15 bp, Homo sapiens
ttttctcaaatttga

SEQ ID NO: 1457366 - DNA, 15 bp, Homo sapiens
cttttctcaaatttg

SEQ ID NO: 1457367 - DNA, 15 bp, Homo sapiens
gcttttctcaaattt

SEQ ID NO: 1457368 - DNA, 15 bp, Homo sapiens
agcttttctcaaatt

SEQ ID NO: 1457369 - DNA, 15 bp, Homo sapiens
cagcttttctcaaat

SEQ ID NO: 1457370 - DNA, 15 bp, Homo sapiens
ccagcttttctcaaa

SEQ ID NO: 1457371 - DNA, 15 bp, Homo sapiens
gccagcttttctcaa

SEQ ID NO: 1457372 - DNA, 15 bp, Homo sapiens
agccagcttttctca

SEQ ID NO: 1457373 - DNA, 15 bp, Homo sapiens
aagccagcttttctc

SEQ ID NO: 1457374 - DNA, 15 bp, Homo sapiens
taagccagcttttct

SEQ ID NO: 1457375 - DNA, 15 bp, Homo sapiens
ttaagccagcttttc

SEQ ID NO: 1457376 - DNA, 15 bp, Homo sapiens
cttaagccagctttt

SEQ ID NO: 1457377 - DNA, 15 bp, Homo sapiens
ccttaagccagcttt

SEQ ID NO: 1457378 - DNA, 15 bp, Homo sapiens
cccttaagccagctt

SEQ ID NO: 1457379 - DNA, 15 bp, Homo sapiens
acccttaagccagct

SEQ ID NO: 1457380 - DNA, 15 bp, Homo sapiens
tacccttaagccagc

SEQ ID NO: 1457381 - DNA, 15 bp, Homo sapiens
ttacccttaagccag

SEQ ID NO: 1457382 - DNA, 15 bp, Homo sapiens
tttacccttaagcca

SEQ ID NO: 1457383 - DNA, 15 bp, Homo sapiens
atttacccttaagcc

SEQ ID NO: 1457384 - DNA, 15 bp, Homo sapiens
tatttacccttaagc

SEQ ID NO: 1457385 - DNA, 15 bp, Homo sapiens
ttatttacccttaag

SEQ ID NO: 1457386 - DNA, 15 bp, Homo sapiens
tttatttacccttaa

SEQ ID NO: 1457387 - DNA, 15 bp, Homo sapiens
atttatttaccctta

SEQ ID NO: 1457388 - DNA, 15 bp, Homo sapiens
tatttatttaccctt

SEQ ID NO: 1457389 - DNA, 15 bp, Homo sapiens
ctatttatttaccct

SEQ ID NO: 1457390 - DNA, 15 bp, Homo sapiens
actatttatttaccc

SEQ ID NO: 1457391 - DNA, 15 bp, Homo sapiens
tactatttatttacc

SEQ ID NO: 1457392 - DNA, 15 bp, Homo sapiens
gtactatttatttac

SEQ ID NO: 1457393 - DNA, 15 bp, Homo sapiens
tgtactatttattta

SEQ ID NO: 1457394 - DNA, 15 bp, Homo sapiens
ttgtactatttattt

SEQ ID NO: 1457395 - DNA, 15 bp, Homo sapiens
attgtactatttatt

SEQ ID NO: 1457396 - DNA, 15 bp, Homo sapiens
aattgtactatttat

SEQ ID NO: 1457397 - DNA, 15 bp, Homo sapiens
aaattgtactattta

SEQ ID NO: 1457398 - DNA, 15 bp, Homo sapiens
taaattgtactattt

SEQ ID NO: 1457399 - DNA, 15 bp, Homo sapiens
ttaaattgtactatt

SEQ ID NO: 1457400 - DNA, 15 bp, Homo sapiens
tttaaattgtactat

SEQ ID NO: 1457401 - DNA, 15 bp, Homo sapiens
ttttaaattgtacta

SEQ ID NO: 1457402 - DNA, 15 bp, Homo sapiens
tttttaaattgtact

SEQ ID NO: 1457403 - DNA, 15 bp, Homo sapiens
ttttttaaattgtac

SEQ ID NO: 1457404 - DNA, 15 bp, Homo sapiens
attttttaaattgta

SEQ ID NO: 1457405 - DNA, 15 bp, Homo sapiens
gattttttaaattgt

SEQ ID NO: 1457406 - DNA, 15 bp, Homo sapiens
agattttttaaattg

SEQ ID NO: 1457407 - DNA, 15 bp, Homo sapiens
aagattttttaaatt

SEQ ID NO: 1457408 - DNA, 15 bp, Homo sapiens
taagattttttaaat

SEQ ID NO: 1457409 - DNA, 15 bp, Homo sapiens
gtaagattttttaaa

SEQ ID NO: 1457410 - DNA, 15 bp, Homo sapiens
tgtaagattttttaa

SEQ ID NO: 1457411 - DNA, 15 bp, Homo sapiens
ctgtaagatttttta

SEQ ID NO: 1457412 - DNA, 15 bp, Homo sapiens
tctgtaagatttttt

SEQ ID NO: 1457413 - DNA, 15 bp, Homo sapiens
gtctgtaagattttt

SEQ ID NO: 1457414 - DNA, 15 bp, Homo sapiens
tgtctgtaagatttt

SEQ ID NO: 1457415 - DNA, 15 bp, Homo sapiens
ctgtctgtaagattt

SEQ ID NO: 1457416 - DNA, 15 bp, Homo sapiens
cctgtctgtaagatt

SEQ ID NO: 1457417 - DNA, 15 bp, Homo sapiens
ccctgtctgtaagat

SEQ ID NO: 1457418 - DNA, 15 bp, Homo sapiens
accctgtctgtaaga

SEQ ID NO: 1457419 - DNA, 15 bp, Homo sapiens
aaccctgtctgtaag

SEQ ID NO: 1457420 - DNA, 15 bp, Homo sapiens
aaaccctgtctgtaa

SEQ ID NO: 1457421 - DNA, 15 bp, Homo sapiens
ttgaaaccctgtctg

SEQ ID NO: 1457422 - DNA, 15 bp, Homo sapiens
tttgaaaccctgtct

SEQ ID NO: 1457423 - DNA, 15 bp, Homo sapiens
atttgaaaccctgtc

SEQ ID NO: 1457424 - DNA, 15 bp, Homo sapiens
gatttgaaaccctgt

SEQ ID NO: 1457425 - DNA, 15 bp, Homo sapiens
tgatttgaaaccctg

SEQ ID NO: 1457426 - DNA, 15 bp, Homo sapiens
atgatttgaaaccct

SEQ ID NO: 1457427 - DNA, 15 bp, Homo sapiens
catgatttgaaaccc

SEQ ID NO: 1457428 - DNA, 15 bp, Homo sapiens
acatgatttgaaacc

SEQ ID NO: 1457429 - DNA, 15 bp, Homo sapiens
gacatgatttgaaac

SEQ ID NO: 1457430 - DNA, 15 bp, Homo sapiens
tgacatgatttgaaa

SEQ ID NO: 1457431 - DNA, 15 bp, Homo sapiens
atgacatgatttgaa

SEQ ID NO: 1457432 - DNA, 15 bp, Homo sapiens
aatgacatgatttga

SEQ ID NO: 1457433 - DNA, 15 bp, Homo sapiens
taatgacatgatttg

SEQ ID NO: 1457434 - DNA, 15 bp, Homo sapiens
ataatgacatgattt

SEQ ID NO: 1457435 - DNA, 15 bp, Homo sapiens
aataatgacatgatt

SEQ ID NO: 1457436 - DNA, 15 bp, Homo sapiens
aaataatgacatgat

SEQ ID NO: 1457437 - DNA, 15 bp, Homo sapiens
aaaataatgacatga

SEQ ID NO: 1457438 - DNA, 15 bp, Homo sapiens
taaaataatgacatg

SEQ ID NO: 1457439 - DNA, 15 bp, Homo sapiens
ttaaaataatgacat

SEQ ID NO: 1457440 - DNA, 15 bp, Homo sapiens
tttaaaataatgaca

SEQ ID NO: 1457441 - DNA, 15 bp, Homo sapiens
aatttaaaataatga

SEQ ID NO: 1457442 - DNA, 15 bp, Homo sapiens
caatttaaaataatg

SEQ ID NO: 1457443 - DNA, 15 bp, Homo sapiens
acaatttaaaataat

SEQ ID NO: 1457444 - DNA, 15 bp, Homo sapiens
cacaatttaaaataa

SEQ ID NO: 1457445 - DNA, 15 bp, Homo sapiens
acacaatttaaaata

SEQ ID NO: 1457446 - DNA, 15 bp, Homo sapiens
tacacaatttaaaat

SEQ ID NO: 1457447 - DNA, 15 bp, Homo sapiens
ttacacaatttaaaa

SEQ ID NO: 1457448 - DNA, 15 bp, Homo sapiens
attacacaatttaaa

SEQ ID NO: 1457449 - DNA, 15 bp, Homo sapiens
gattacacaatttaa

SEQ ID NO: 1457450 - DNA, 15 bp, Homo sapiens
ggattacacaattta

SEQ ID NO: 1457451 - DNA, 15 bp, Homo sapiens
aggattacacaattt

SEQ ID NO: 1457452 - DNA, 15 bp, Homo sapiens
caggattacacaatt

SEQ ID NO: 1457453 - DNA, 15 bp, Homo sapiens
ccaggattacacaat

SEQ ID NO: 1457454 - DNA, 15 bp, Homo sapiens
cccaggattacacaa

SEQ ID NO: 1457455 - DNA, 15 bp, Homo sapiens
ccccaggattacaca

SEQ ID NO: 1457456 - DNA, 15 bp, Homo sapiens
tccccaggattacac

SEQ ID NO: 1457457 - DNA, 15 bp, Homo sapiens
ttccccaggattaca

SEQ ID NO: 1457458 - DNA, 15 bp, Homo sapiens
tttccccaggattac

SEQ ID NO: 1457459 - DNA, 15 bp, Homo sapiens
gtttccccaggatta

SEQ ID NO: 1457460 - DNA, 15 bp, Homo sapiens
agtttccccaggatt

SEQ ID NO: 1457461 - DNA, 15 bp, Homo sapiens
tagtttccccaggat

SEQ ID NO: 1457462 - DNA, 15 bp, Homo sapiens
ttagtttccccagga

SEQ ID NO: 1457463 - DNA, 15 bp, Homo sapiens
attagtttccccagg

SEQ ID NO: 1457464 - DNA, 15 bp, Homo sapiens
gattagtttccccag

SEQ ID NO: 1457465 - DNA, 15 bp, Homo sapiens
agattagtttcccca

SEQ ID NO: 1457466 - DNA, 15 bp, Homo sapiens
aagattagtttcccc

SEQ ID NO: 1457467 - DNA, 15 bp, Homo sapiens
aaagattagtttccc

SEQ ID NO: 1457468 - DNA, 15 bp, Homo sapiens
aaaagattagtttcc

SEQ ID NO: 1457469 - DNA, 15 bp, Homo sapiens
aaaaagattagtttc

SEQ ID NO: 1457470 - DNA, 15 bp, Homo sapiens
aaaaaagattagttt

SEQ ID NO: 1457471 - DNA, 15 bp, Homo sapiens
taaaaaagattagtt

SEQ ID NO: 1457472 - DNA, 15 bp, Homo sapiens
gtaaaaaagattagt

SEQ ID NO: 1457473 - DNA, 15 bp, Homo sapiens
ggtaaaaaagattag

SEQ ID NO: 1457474 - DNA, 15 bp, Homo sapiens
aggtaaaaaagatta

SEQ ID NO: 1457475 - DNA, 15 bp, Homo sapiens
gaggtaaaaaagatt

SEQ ID NO: 1457476 - DNA, 15 bp, Homo sapiens
tgaggtaaaaaagat

SEQ ID NO: 1457477 - DNA, 15 bp, Homo sapiens
ctgaggtaaaaaaga

SEQ ID NO: 1457478 - DNA, 15 bp, Homo sapiens
actgaggtaaaaaag

SEQ ID NO: 1457479 - DNA, 15 bp, Homo sapiens
aactgaggtaaaaaa

SEQ ID NO: 1457480 - DNA, 15 bp, Homo sapiens
aaactgaggtaaaaa

SEQ ID NO: 1457481 - DNA, 15 bp, Homo sapiens
gaaactgaggtaaaa

SEQ ID NO: 1457482 - DNA, 15 bp, Homo sapiens
agaaactgaggtaaa

SEQ ID NO: 1457483 - DNA, 15 bp, Homo sapiens
aagaaactgaggtaa

SEQ ID NO: 1457484 - DNA, 15 bp, Homo sapiens
gaagaaactgaggta

SEQ ID NO: 1457485 - DNA, 15 bp, Homo sapiens
ggaagaaactgaggt

SEQ ID NO: 1457486 - DNA, 15 bp, Homo sapiens
tggaagaaactgagg

SEQ ID NO: 1457487 - DNA, 15 bp, Homo sapiens
atggaagaaactgag

SEQ ID NO: 1457488 - DNA, 15 bp, Homo sapiens
aatggaagaaactga

SEQ ID NO: 1457489 - DNA, 15 bp, Homo sapiens
taatggaagaaactg

SEQ ID NO: 1457490 - DNA, 15 bp, Homo sapiens
ataatggaagaaact

SEQ ID NO: 1457491 - DNA, 15 bp, Homo sapiens
tataatggaagaaac

SEQ ID NO: 1457492 - DNA, 15 bp, Homo sapiens
ttataatggaagaaa

SEQ ID NO: 1457493 - DNA, 15 bp, Homo sapiens
tttataatggaagaa

SEQ ID NO: 1457494 - DNA, 15 bp, Homo sapiens
ctttataatggaaga

SEQ ID NO: 1457495 - DNA, 15 bp, Homo sapiens
actttataatggaag

SEQ ID NO: 1457496 - DNA, 15 bp, Homo sapiens
cactttataatggaa

SEQ ID NO: 1457497 - DNA, 15 bp, Homo sapiens
tcactttataatgga

SEQ ID NO: 1457498 - DNA, 15 bp, Homo sapiens
ttcactttataatgg

SEQ ID NO: 1457499 - DNA, 15 bp, Homo sapiens
tttcactttataatg

SEQ ID NO: 1457500 - DNA, 15 bp, Homo sapiens
ttttcactttataat

SEQ ID NO: 1457501 - DNA, 15 bp, Homo sapiens
attttcactttataa

SEQ ID NO: 1457502 - DNA, 15 bp, Homo sapiens
aattttcactttata

SEQ ID NO: 1457503 - DNA, 15 bp, Homo sapiens
taattttcactttat

SEQ ID NO: 1457504 - DNA, 15 bp, Homo sapiens
ttaattttcacttta

SEQ ID NO: 1457505 - DNA, 15 bp, Homo sapiens
tttaattttcacttt

SEQ ID NO: 1457506 - DNA, 15 bp, Homo sapiens
ttttaattttcactt

SEQ ID NO: 1457507 - DNA, 15 bp, Homo sapiens
tttttaattttcact

SEQ ID NO: 1457508 - DNA, 15 bp, Homo sapiens
atttttaattttcac

SEQ ID NO: 1457509 - DNA, 15 bp, Homo sapiens
aatttttaattttca

SEQ ID NO: 1457510 - DNA, 15 bp, Homo sapiens
taatttttaattttc

SEQ ID NO: 1457511 - DNA, 15 bp, Homo sapiens
gtaatttttaatttt

SEQ ID NO: 1457512 - DNA, 15 bp, Homo sapiens
agtaatttttaattt

SEQ ID NO: 1457513 - DNA, 15 bp, Homo sapiens
aagtaatttttaatt

SEQ ID NO: 1457514 - DNA, 15 bp, Homo sapiens
caagtaatttttaat

SEQ ID NO: 1457515 - DNA, 15 bp, Homo sapiens
tcaagtaatttttaa

SEQ ID NO: 1457516 - DNA, 15 bp, Homo sapiens
ctcaagtaattttta

SEQ ID NO: 1457517 - DNA, 15 bp, Homo sapiens
gctcaagtaattttt

SEQ ID NO: 1457518 - DNA, 15 bp, Homo sapiens
tgctcaagtaatttt

SEQ ID NO: 1457519 - DNA, 15 bp, Homo sapiens
ttgctcaagtaattt

SEQ ID NO: 1457520 - DNA, 15 bp, Homo sapiens
tttgctcaagtaatt

SEQ ID NO: 1457521 - DNA, 15 bp, Homo sapiens
ctttgctcaagtaat

SEQ ID NO: 1457522 - DNA, 15 bp, Homo sapiens
cctttgctcaagtaa

SEQ ID NO: 1457523 - DNA, 15 bp, Homo sapiens
ccctttgctcaagta

SEQ ID NO: 1457524 - DNA, 15 bp, Homo sapiens
accctttgctcaagt

SEQ ID NO: 1457525 - DNA, 15 bp, Homo sapiens
gaccctttgctcaag

SEQ ID NO: 1457526 - DNA, 15 bp, Homo sapiens
tgaccctttgctcaa

SEQ ID NO: 1457527 - DNA, 15 bp, Homo sapiens
atgaccctttgctca

SEQ ID NO: 1457528 - DNA, 15 bp, Homo sapiens
aatgaccctttgctc

SEQ ID NO: 1457529 - DNA, 15 bp, Homo sapiens
aaatgaccctttgct

SEQ ID NO: 1457530 - DNA, 15 bp, Homo sapiens
aaaatgaccctttgc

SEQ ID NO: 1457531 - DNA, 15 bp, Homo sapiens
taaaatgaccctttg

SEQ ID NO: 1457532 - DNA, 15 bp, Homo sapiens
ttaaaatgacccttt

SEQ ID NO: 1457533 - DNA, 15 bp, Homo sapiens
cttaaaatgaccctt

SEQ ID NO: 1457534 - DNA, 15 bp, Homo sapiens
ccttaaaatgaccct

SEQ ID NO: 1457535 - DNA, 15 bp, Homo sapiens
tccttaaaatgaccc

SEQ ID NO: 1457536 - DNA, 15 bp, Homo sapiens
atccttaaaatgacc

SEQ ID NO: 1457537 - DNA, 15 bp, Homo sapiens
gatccttaaaatgac

SEQ ID NO: 1457538 - DNA, 15 bp, Homo sapiens
tgatccttaaaatga

SEQ ID NO: 1457539 - DNA, 15 bp, Homo sapiens
ttgatccttaaaatg

SEQ ID NO: 1457540 - DNA, 15 bp, Homo sapiens
tttgatccttaaaat

SEQ ID NO: 1457541 - DNA, 15 bp, Homo sapiens
atttgatccttaaaa

SEQ ID NO: 1457542 - DNA, 15 bp, Homo sapiens
catttgatccttaaa

SEQ ID NO: 1457543 - DNA, 15 bp, Homo sapiens
tcatttgatccttaa

SEQ ID NO: 1457544 - DNA, 15 bp, Homo sapiens
ctcatttgatcctta

SEQ ID NO: 1457545 - DNA, 15 bp, Homo sapiens
actcatttgatcctt

SEQ ID NO: 1457546 - DNA, 15 bp, Homo sapiens
gactcatttgatcct

SEQ ID NO: 1457547 - DNA, 15 bp, Homo sapiens
agactcatttgatcc

SEQ ID NO: 1457548 - DNA, 15 bp, Homo sapiens
cagactcatttgatc

SEQ ID NO: 1457549 - DNA, 15 bp, Homo sapiens
tcagactcatttgat

SEQ ID NO: 1457550 - DNA, 15 bp, Homo sapiens
ttcagactcatttga

SEQ ID NO: 1457551 - DNA, 15 bp, Homo sapiens
attcagactcatttg

SEQ ID NO: 1457552 - DNA, 15 bp, Homo sapiens
cattcagactcattt

SEQ ID NO: 1457553 - DNA, 15 bp, Homo sapiens
acattcagactcatt

SEQ ID NO: 1457554 - DNA, 15 bp, Homo sapiens
gacattcagactcat

SEQ ID NO: 1457555 - DNA, 15 bp, Homo sapiens
ggacattcagactca

SEQ ID NO: 1457556 - DNA, 15 bp, Homo sapiens
aggacattcagactc

SEQ ID NO: 1457557 - DNA, 15 bp, Homo sapiens
taggacattcagact

SEQ ID NO: 1457558 - DNA, 15 bp, Homo sapiens
gtaggacattcagac

SEQ ID NO: 1457559 - DNA, 15 bp, Homo sapiens
ggtaggacattcaga

SEQ ID NO: 1457560 - DNA, 15 bp, Homo sapiens
tggtaggacattcag

SEQ ID NO: 1457561 - DNA, 15 bp, Homo sapiens
gtggtaggacattca

SEQ ID NO: 1457562 - DNA, 15 bp, Homo sapiens
tgtggtaggacattc

SEQ ID NO: 1457563 - DNA, 15 bp, Homo sapiens
ctgtggtaggacatt

SEQ ID NO: 1457564 - DNA, 15 bp, Homo sapiens
gctgtggtaggacat

SEQ ID NO: 1457565 - DNA, 15 bp, Homo sapiens
tgctgtggtaggaca

SEQ ID NO: 1457566 - DNA, 15 bp, Homo sapiens
gtgctgtggtaggac

SEQ ID NO: 1457567 - DNA, 15 bp, Homo sapiens
ggtgctgtggtagga

SEQ ID NO: 1457568 - DNA, 15 bp, Homo sapiens
cggtgctgtggtagg

SEQ ID NO: 1457569 - DNA, 15 bp, Homo sapiens
ccggtgctgtggtag

SEQ ID NO: 1457570 - DNA, 15 bp, Homo sapiens
cccggtgctgtggta

SEQ ID NO: 1457571 - DNA, 15 bp, Homo sapiens
tcccggtgctgtggt

SEQ ID NO: 1457572 - DNA, 15 bp, Homo sapiens
ctcccggtgctgtgg

SEQ ID NO: 1457573 - DNA, 15 bp, Homo sapiens
cctcccggtgctgtg

SEQ ID NO: 1457574 - DNA, 15 bp, Homo sapiens
tcctcccggtgctgt

SEQ ID NO: 1457575 - DNA, 15 bp, Homo sapiens
atcctcccggtgctg

SEQ ID NO: 1457576 - DNA, 15 bp, Homo sapiens
tatcctcccggtgct

SEQ ID NO: 1457577 - DNA, 15 bp, Homo sapiens
ctatcctcccggtgc

SEQ ID NO: 1457578 - DNA, 15 bp, Homo sapiens
tctatcctcccggtg

SEQ ID NO: 1457579 - DNA, 15 bp, Homo sapiens
ttctatcctcccggt

SEQ ID NO: 1457580 - DNA, 15 bp, Homo sapiens
tttctatcctcccgg

SEQ ID NO: 1457581 - DNA, 15 bp, Homo sapiens
ctttctatcctcccg

SEQ ID NO: 1457582 - DNA, 15 bp, Homo sapiens
gctttctatcctccc

SEQ ID NO: 1457583 - DNA, 15 bp, Homo sapiens
tgctttctatcctcc

SEQ ID NO: 1457584 - DNA, 15 bp, Homo sapiens
gtgctttctatcctc

SEQ ID NO: 1457585 - DNA, 15 bp, Homo sapiens
tgtgctttctatcct

SEQ ID NO: 1457586 - DNA, 15 bp, Homo sapiens
atgtgctttctatcc

SEQ ID NO: 1457587 - DNA, 15 bp, Homo sapiens
tatgtgctttctatc

SEQ ID NO: 1457588 - DNA, 15 bp, Homo sapiens
ttatgtgctttctat

SEQ ID NO: 1457589 - DNA, 15 bp, Homo sapiens
attatgtgctttcta

SEQ ID NO: 1457590 - DNA, 15 bp, Homo sapiens
tattatgtgctttct

SEQ ID NO: 1457591 - DNA, 15 bp, Homo sapiens
ttattatgtgctttc

SEQ ID NO: 1457592 - DNA, 15 bp, Homo sapiens
tttattatgtgcttt

SEQ ID NO: 1457593 - DNA, 15 bp, Homo sapiens
atttattatgtgctt

SEQ ID NO: 1457594 - DNA, 15 bp, Homo sapiens
catttattatgtgct

SEQ ID NO: 1457595 - DNA, 15 bp, Homo sapiens
gcatttattatgtgc

SEQ ID NO: 1457596 - DNA, 15 bp, Homo sapiens
agcatttattatgtg

SEQ ID NO: 1457597 - DNA, 15 bp, Homo sapiens
cagcatttattatgt

SEQ ID NO: 1457598 - DNA, 15 bp, Homo sapiens
tcagcatttattatg

SEQ ID NO: 1457599 - DNA, 15 bp, Homo sapiens
gtcagcatttattat

SEQ ID NO: 1457600 - DNA, 15 bp, Homo sapiens
agtcagcatttatta

SEQ ID NO: 1457601 - DNA, 15 bp, Homo sapiens
cagtcagcatttatt

SEQ ID NO: 1457602 - DNA, 15 bp, Homo sapiens
acagtcagcatttat

SEQ ID NO: 1457603 - DNA, 15 bp, Homo sapiens
gacagtcagcattta

SEQ ID NO: 1457604 - DNA, 15 bp, Homo sapiens
tgacagtcagcattt

SEQ ID NO: 1457605 - DNA, 15 bp, Homo sapiens
atgacagtcagcatt

SEQ ID NO: 1457606 - DNA, 15 bp, Homo sapiens
aatgacagtcagcat

SEQ ID NO: 1457607 - DNA, 15 bp, Homo sapiens
taatgacagtcagca

SEQ ID NO: 1457608 - DNA, 15 bp, Homo sapiens
ataatgacagtcagc

SEQ ID NO: 1457609 - DNA, 15 bp, Homo sapiens
aataatgacagtcag

SEQ ID NO: 1457610 - DNA, 15 bp, Homo sapiens
taataatgacagtca

SEQ ID NO: 1457611 - DNA, 15 bp, Homo sapiens
ataataatgacagtc

SEQ ID NO: 1457612 - DNA, 15 bp, Homo sapiens
gataataatgacagt

SEQ ID NO: 1457613 - DNA, 15 bp, Homo sapiens
tgataataatgacag

SEQ ID NO: 1457614 - DNA, 15 bp, Homo sapiens
gtgataataatgaca

SEQ ID NO: 1457615 - DNA, 15 bp, Homo sapiens
ggtgataataatgac

SEQ ID NO: 1457616 - DNA, 15 bp, Homo sapiens
tggtgataataatga

SEQ ID NO: 1457617 - DNA, 15 bp, Homo sapiens
gtggtgataataatg

SEQ ID NO: 1457618 - DNA, 15 bp, Homo sapiens
tgtggtgataataat

SEQ ID NO: 1457619 - DNA, 15 bp, Homo sapiens
atgtggtgataataa

SEQ ID NO: 1457620 - DNA, 15 bp, Homo sapiens
tatgtggtgataata

SEQ ID NO: 1457621 - DNA, 15 bp, Homo sapiens
atatgtggtgataat

SEQ ID NO: 1457622 - DNA, 15 bp, Homo sapiens
aatatgtggtgataa

SEQ ID NO: 1457623 - DNA, 15 bp, Homo sapiens
aaatatgtggtgata

SEQ ID NO: 1457624 - DNA, 15 bp, Homo sapiens
aaaatatgtggtgat

SEQ ID NO: 1457625 - DNA, 15 bp, Homo sapiens
gaaaatatgtggtga

SEQ ID NO: 1457626 - DNA, 15 bp, Homo sapiens
tgaaaatatgtggtg

SEQ ID NO: 1457627 - DNA, 15 bp, Homo sapiens
ttgaaaatatgtggt

SEQ ID NO: 1457628 - DNA, 15 bp, Homo sapiens
tttgaaaatatgtgg

SEQ ID NO: 1457629 - DNA, 15 bp, Homo sapiens
gtttgaaaatatgtg

SEQ ID NO: 1457630 - DNA, 15 bp, Homo sapiens
ggtttgaaaatatgt

SEQ ID NO: 1457631 - DNA, 15 bp, Homo sapiens
aggtttgaaaatatg

SEQ ID NO: 1457632 - DNA, 15 bp, Homo sapiens
aaggtttgaaaatat

SEQ ID NO: 1457633 - DNA, 15 bp, Homo sapiens
caaggtttgaaaata

SEQ ID NO: 1457634 - DNA, 15 bp, Homo sapiens
tcaaggtttgaaaat

SEQ ID NO: 1457635 - DNA, 15 bp, Homo sapiens
gtcaaggtttgaaaa

SEQ ID NO: 1457636 - DNA, 15 bp, Homo sapiens
agtcaaggtttgaaa

SEQ ID NO: 1457637 - DNA, 15 bp, Homo sapiens
gagtcaaggtttgaa

SEQ ID NO: 1457638 - DNA, 15 bp, Homo sapiens
tgagtcaaggtttga

SEQ ID NO: 1457639 - DNA, 15 bp, Homo sapiens
ctgagtcaaggtttg

SEQ ID NO: 1457640 - DNA, 15 bp, Homo sapiens
cctgagtcaaggttt

SEQ ID NO: 1457641 - DNA, 15 bp, Homo sapiens
ccctgagtcaaggtt

SEQ ID NO: 1457642 - DNA, 15 bp, Homo sapiens
accctgagtcaaggt

SEQ ID NO: 1457643 - DNA, 15 bp, Homo sapiens
taccctgagtcaagg

SEQ ID NO: 1457644 - DNA, 15 bp, Homo sapiens
ctaccctgagtcaag

SEQ ID NO: 1457645 - DNA, 15 bp, Homo sapiens
actaccctgagtcaa

SEQ ID NO: 1457646 - DNA, 15 bp, Homo sapiens
cactaccctgagtca

SEQ ID NO: 1457647 - DNA, 15 bp, Homo sapiens
gcactaccctgagtc

SEQ ID NO: 1457648 - DNA, 15 bp, Homo sapiens
ggcactaccctgagt

SEQ ID NO: 1457649 - DNA, 15 bp, Homo sapiens
tggcactaccctgag

SEQ ID NO: 1457650 - DNA, 15 bp, Homo sapiens
ctggcactaccctga

SEQ ID NO: 1457651 - DNA, 15 bp, Homo sapiens
actggcactaccctg

SEQ ID NO: 1457652 - DNA, 15 bp, Homo sapiens
cactggcactaccct

SEQ ID NO: 1457653 - DNA, 15 bp, Homo sapiens
gcactggcactaccc

SEQ ID NO: 1457654 - DNA, 15 bp, Homo sapiens
agcactggcactacc

SEQ ID NO: 1457655 - DNA, 15 bp, Homo sapiens
aagcactggcactac

SEQ ID NO: 1457656 - DNA, 15 bp, Homo sapiens
taagcactggcacta

SEQ ID NO: 1457657 - DNA, 15 bp, Homo sapiens
ctaagcactggcact

SEQ ID NO: 1457658 - DNA, 15 bp, Homo sapiens
cctaagcactggcac

SEQ ID NO: 1457659 - DNA, 15 bp, Homo sapiens
ccctaagcactggca

SEQ ID NO: 1457660 - DNA, 15 bp, Homo sapiens
tccctaagcactggc

SEQ ID NO: 1457661 - DNA, 15 bp, Homo sapiens
ttccctaagcactgg

SEQ ID NO: 1457662 - DNA, 15 bp, Homo sapiens
cttccctaagcactg

SEQ ID NO: 1457663 - DNA, 15 bp, Homo sapiens
acttccctaagcact

SEQ ID NO: 1457664 - DNA, 15 bp, Homo sapiens
aacttccctaagcac

SEQ ID NO: 1457665 - DNA, 15 bp, Homo sapiens
aaacttccctaagca

SEQ ID NO: 1457666 - DNA, 15 bp, Homo sapiens
aaaacttccctaagc

SEQ ID NO: 1457667 - DNA, 15 bp, Homo sapiens
aaaaacttccctaag

SEQ ID NO: 1457668 - DNA, 15 bp, Homo sapiens
gaaaaacttccctaa

SEQ ID NO: 1457669 - DNA, 15 bp, Homo sapiens
agaaaaacttcccta

SEQ ID NO: 1457670 - DNA, 15 bp, Homo sapiens
tagaaaaacttccct

SEQ ID NO: 1457671 - DNA, 15 bp, Homo sapiens
atagaaaaacttccc

SEQ ID NO: 1457672 - DNA, 15 bp, Homo sapiens
catagaaaaacttcc

SEQ ID NO: 1457673 - DNA, 15 bp, Homo sapiens
ccatagaaaaacttc

SEQ ID NO: 1457674 - DNA, 15 bp, Homo sapiens
cccatagaaaaactt

SEQ ID NO: 1457675 - DNA, 15 bp, Homo sapiens
acccatagaaaaact

SEQ ID NO: 1457676 - DNA, 15 bp, Homo sapiens
tacccatagaaaaac

SEQ ID NO: 1457677 - DNA, 15 bp, Homo sapiens
gtacccatagaaaaa

SEQ ID NO: 1457678 - DNA, 15 bp, Homo sapiens
ggtacccatagaaaa

SEQ ID NO: 1457679 - DNA, 15 bp, Homo sapiens
gggtacccatagaaa

SEQ ID NO: 1457680 - DNA, 15 bp, Homo sapiens
tgggtacccatagaa

SEQ ID NO: 1457681 - DNA, 15 bp, Homo sapiens
gtgggtacccataga

SEQ ID NO: 1457682 - DNA, 15 bp, Homo sapiens
tgtgggtacccatag

SEQ ID NO: 1457683 - DNA, 15 bp, Homo sapiens
ctgtgggtacccata

SEQ ID NO: 1457684 - DNA, 15 bp, Homo sapiens
actgtgggtacccat

SEQ ID NO: 1457685 - DNA, 15 bp, Homo sapiens
tactgtgggtaccca

SEQ ID NO: 1457686 - DNA, 15 bp, Homo sapiens
atactgtgggtaccc

SEQ ID NO: 1457687 - DNA, 15 bp, Homo sapiens
aatactgtgggtacc

SEQ ID NO: 1457688 - DNA, 15 bp, Homo sapiens
aaatactgtgggtac

SEQ ID NO: 1457689 - DNA, 15 bp, Homo sapiens
taaatactgtgggta

SEQ ID NO: 1457690 - DNA, 15 bp, Homo sapiens
gtaaatactgtgggt

SEQ ID NO: 1457691 - DNA, 15 bp, Homo sapiens
agtaaatactgtggg

SEQ ID NO: 1457692 - DNA, 15 bp, Homo sapiens
gagtaaatactgtgg

SEQ ID NO: 1457693 - DNA, 15 bp, Homo sapiens
agagtaaatactgtg

SEQ ID NO: 1457694 - DNA, 15 bp, Homo sapiens
aagagtaaatactgt

SEQ ID NO: 1457695 - DNA, 15 bp, Homo sapiens
gaagagtaaatactg

SEQ ID NO: 1457696 - DNA, 15 bp, Homo sapiens
agaagagtaaatact

SEQ ID NO: 1457697 - DNA, 15 bp, Homo sapiens
aagaagagtaaatac

SEQ ID NO: 1457698 - DNA, 15 bp, Homo sapiens
aaagaagagtaaata

SEQ ID NO: 1457699 - DNA, 15 bp, Homo sapiens
aaaagaagagtaaat

SEQ ID NO: 1457700 - DNA, 15 bp, Homo sapiens
caaaagaagagtaaa

SEQ ID NO: 1457701 - DNA, 15 bp, Homo sapiens
acaaaagaagagtaa

SEQ ID NO: 1457702 - DNA, 15 bp, Homo sapiens
tacaaaagaagagta

SEQ ID NO: 1457703 - DNA, 15 bp, Homo sapiens
ctacaaaagaagagt

SEQ ID NO: 1457704 - DNA, 15 bp, Homo sapiens
gctacaaaagaagag

SEQ ID NO: 1457705 - DNA, 15 bp, Homo sapiens
ggctacaaaagaaga

SEQ ID NO: 1457706 - DNA, 15 bp, Homo sapiens
gggctacaaaagaag

SEQ ID NO: 1457707 - DNA, 15 bp, Homo sapiens
agggctacaaaagaa

SEQ ID NO: 1457708 - DNA, 15 bp, Homo sapiens
cagggctacaaaaga

SEQ ID NO: 1457709 - DNA, 15 bp, Homo sapiens
tcagggctacaaaag

SEQ ID NO: 1457710 - DNA, 15 bp, Homo sapiens
gtcagggctacaaaa

SEQ ID NO: 1457711 - DNA, 15 bp, Homo sapiens
ggtcagggctacaaa

SEQ ID NO: 1457712 - DNA, 15 bp, Homo sapiens
gggtcagggctacaa

SEQ ID NO: 1457713 - DNA, 15 bp, Homo sapiens
tgggtcagggctaca

SEQ ID NO: 1457714 - DNA, 15 bp, Homo sapiens
ctgggtcagggctac

SEQ ID NO: 1457715 - DNA, 15 bp, Homo sapiens
cctgggtcagggcta

SEQ ID NO: 1457716 - DNA, 15 bp, Homo sapiens
ccctgggtcagggct

SEQ ID NO: 1457717 - DNA, 15 bp, Homo sapiens
gccctgggtcagggc

SEQ ID NO: 1457718 - DNA, 15 bp, Homo sapiens
agccctgggtcaggg

SEQ ID NO: 1457719 - DNA, 15 bp, Homo sapiens
aagccctgggtcagg

SEQ ID NO: 1457720 - DNA, 15 bp, Homo sapiens
taagccctgggtcag

SEQ ID NO: 1457721 - DNA, 15 bp, Homo sapiens
ttaagccctgggtca

SEQ ID NO: 1457722 - DNA, 15 bp, Homo sapiens
tttaagccctgggtc

SEQ ID NO: 1457723 - DNA, 15 bp, Homo sapiens
ttttaagccctgggt

SEQ ID NO: 1457724 - DNA, 15 bp, Homo sapiens
cttttaagccctggg

SEQ ID NO: 1457725 - DNA, 15 bp, Homo sapiens
acttttaagccctgg

SEQ ID NO: 1457726 - DNA, 15 bp, Homo sapiens
cacttttaagccctg

SEQ ID NO: 1457727 - DNA, 15 bp, Homo sapiens
acacttttaagccct

SEQ ID NO: 1457728 - DNA, 15 bp, Homo sapiens
aacacttttaagccc

SEQ ID NO: 1457729 - DNA, 15 bp, Homo sapiens
aaacacttttaagcc

SEQ ID NO: 1457730 - DNA, 15 bp, Homo sapiens
aaaacacttttaagc

SEQ ID NO: 1457731 - DNA, 15 bp, Homo sapiens
aaaaacacttttaag

SEQ ID NO: 1457732 - DNA, 15 bp, Homo sapiens
gaaaaacacttttaa

SEQ ID NO: 1457733 - DNA, 15 bp, Homo sapiens
tgaaaaacactttta

SEQ ID NO: 1457734 - DNA, 15 bp, Homo sapiens
atgaaaaacactttt

SEQ ID NO: 1457735 - DNA, 15 bp, Homo sapiens
aatgaaaaacacttt

SEQ ID NO: 1457736 - DNA, 15 bp, Homo sapiens
aaatgaaaaacactt

SEQ ID NO: 1457737 - DNA, 15 bp, Homo sapiens
caaatgaaaaacact

SEQ ID NO: 1457738 - DNA, 15 bp, Homo sapiens
acaaatgaaaaacac

SEQ ID NO: 1457739 - DNA, 15 bp, Homo sapiens
cacaaatgaaaaaca

SEQ ID NO: 1457740 - DNA, 15 bp, Homo sapiens
acacaaatgaaaaac

SEQ ID NO: 1457741 - DNA, 15 bp, Homo sapiens
aacacaaatgaaaaa

SEQ ID NO: 1457742 - DNA, 15 bp, Homo sapiens
gaacacaaatgaaaa

SEQ ID NO: 1457743 - DNA, 15 bp, Homo sapiens
ggaacacaaatgaaa

SEQ ID NO: 1457744 - DNA, 15 bp, Homo sapiens
aggaacacaaatgaa

SEQ ID NO: 1457745 - DNA, 15 bp, Homo sapiens
caggaacacaaatga

SEQ ID NO: 1457746 - DNA, 15 bp, Homo sapiens
gcaggaacacaaatg

SEQ ID NO: 1457747 - DNA, 15 bp, Homo sapiens
tgcaggaacacaaat

SEQ ID NO: 1457748 - DNA, 15 bp, Homo sapiens
atgcaggaacacaaa

SEQ ID NO: 1457749 - DNA, 15 bp, Homo sapiens
tatgcaggaacacaa

SEQ ID NO: 1457750 - DNA, 15 bp, Homo sapiens
gtatgcaggaacaca

SEQ ID NO: 1457751 - DNA, 15 bp, Homo sapiens
agtatgcaggaacac

SEQ ID NO: 1457752 - DNA, 15 bp, Homo sapiens
gagtatgcaggaaca

SEQ ID NO: 1457753 - DNA, 15 bp, Homo sapiens
ggagtatgcaggaac

SEQ ID NO: 1457754 - DNA, 15 bp, Homo sapiens
tggagtatgcaggaa

SEQ ID NO: 1457755 - DNA, 15 bp, Homo sapiens
ttggagtatgcagga

SEQ ID NO: 1457756 - DNA, 15 bp, Homo sapiens
cttggagtatgcagg

SEQ ID NO: 1457757 - DNA, 15 bp, Homo sapiens
tcttggagtatgcag

SEQ ID NO: 1457758 - DNA, 15 bp, Homo sapiens
ctcttggagtatgca

SEQ ID NO: 1457759 - DNA, 15 bp, Homo sapiens
tctcttggagtatgc

SEQ ID NO: 1457760 - DNA, 15 bp, Homo sapiens
ttctcttggagtatg

SEQ ID NO: 1457761 - DNA, 15 bp, Homo sapiens
tttctcttggagtat

SEQ ID NO: 1457762 - DNA, 15 bp, Homo sapiens
atttctcttggagta

SEQ ID NO: 1457763 - DNA, 15 bp, Homo sapiens
gatttctcttggagt

SEQ ID NO: 1457764 - DNA, 15 bp, Homo sapiens
agatttctcttggag

SEQ ID NO: 1457765 - DNA, 15 bp, Homo sapiens
gagatttctcttgga

SEQ ID NO: 1457766 - DNA, 15 bp, Homo sapiens
agagatttctcttgg

SEQ ID NO: 1457767 - DNA, 15 bp, Homo sapiens
aagagatttctcttg

SEQ ID NO: 1457768 - DNA, 15 bp, Homo sapiens
caagagatttctctt

SEQ ID NO: 1457769 - DNA, 15 bp, Homo sapiens
gcaagagatttctct

SEQ ID NO: 1457770 - DNA, 15 bp, Homo sapiens
agcaagagatttctc

SEQ ID NO: 1457771 - DNA, 15 bp, Homo sapiens
aagcaagagatttct

SEQ ID NO: 1457772 - DNA, 15 bp, Homo sapiens
caagcaagagatttc

SEQ ID NO: 1457773 - DNA, 15 bp, Homo sapiens
gcaagcaagagattt

SEQ ID NO: 1457774 - DNA, 15 bp, Homo sapiens
agcaagcaagagatt

SEQ ID NO: 1457775 - DNA, 15 bp, Homo sapiens
aagcaagcaagagat

SEQ ID NO: 1457776 - DNA, 15 bp, Homo sapiens
aaagcaagcaagaga

SEQ ID NO: 1457777 - DNA, 15 bp, Homo sapiens
aaaagcaagcaagag

SEQ ID NO: 1457778 - DNA, 15 bp, Homo sapiens
aaaaagcaagcaaga

SEQ ID NO: 1457779 - DNA, 15 bp, Homo sapiens
aaaaaagcaagcaag

SEQ ID NO: 1457780 - DNA, 15 bp, Homo sapiens
caaaaaagcaagcaa

SEQ ID NO: 1457781 - DNA, 15 bp, Homo sapiens
tcaaaaaagcaagca

SEQ ID NO: 1457782 - DNA, 15 bp, Homo sapiens
ttcaaaaaagcaagc

SEQ ID NO: 1457783 - DNA, 15 bp, Homo sapiens
cttcaaaaaagcaag

SEQ ID NO: 1457784 - DNA, 15 bp, Homo sapiens
acttcaaaaaagcaa

SEQ ID NO: 1457785 - DNA, 15 bp, Homo sapiens
gacttcaaaaaagca

SEQ ID NO: 1457786 - DNA, 15 bp, Homo sapiens
ggacttcaaaaaagc

SEQ ID NO: 1457787 - DNA, 15 bp, Homo sapiens
gggacttcaaaaaag

SEQ ID NO: 1457788 - DNA, 15 bp, Homo sapiens
agggacttcaaaaaa

SEQ ID NO: 1457789 - DNA, 15 bp, Homo sapiens
tagggacttcaaaaa

SEQ ID NO: 1457790 - DNA, 15 bp, Homo sapiens
ctagggacttcaaaa

SEQ ID NO: 1457791 - DNA, 15 bp, Homo sapiens
tctagggacttcaaa

SEQ ID NO: 1457792 - DNA, 15 bp, Homo sapiens
atctagggacttcaa

SEQ ID NO: 1457793 - DNA, 15 bp, Homo sapiens
tatctagggacttca

SEQ ID NO: 1457794 - DNA, 15 bp, Homo sapiens
atatctagggacttc

SEQ ID NO: 1457795 - DNA, 15 bp, Homo sapiens
tatatctagggactt

SEQ ID NO: 1457796 - DNA, 15 bp, Homo sapiens
ctatatctagggact

SEQ ID NO: 1457797 - DNA, 15 bp, Homo sapiens
tctatatctagggac

SEQ ID NO: 1457798 - DNA, 15 bp, Homo sapiens
ctctatatctaggga

SEQ ID NO: 1457799 - DNA, 15 bp, Homo sapiens
actctatatctaggg

SEQ ID NO: 1457800 - DNA, 15 bp, Homo sapiens
tactctatatctagg

SEQ ID NO: 1457801 - DNA, 15 bp, Homo sapiens
ttactctatatctag

SEQ ID NO: 1457802 - DNA, 15 bp, Homo sapiens
attactctatatcta

SEQ ID NO: 1457803 - DNA, 15 bp, Homo sapiens
aattactctatatct

SEQ ID NO: 1457804 - DNA, 15 bp, Homo sapiens
taattactctatatc

SEQ ID NO: 1457805 - DNA, 15 bp, Homo sapiens
gtaattactctatat

SEQ ID NO: 1457806 - DNA, 15 bp, Homo sapiens
ggtaattactctata

SEQ ID NO: 1457807 - DNA, 15 bp, Homo sapiens
gggtaattactctat

SEQ ID NO: 1457808 - DNA, 15 bp, Homo sapiens
ggggtaattactcta

SEQ ID NO: 1457809 - DNA, 15 bp, Homo sapiens
aggggtaattactct

SEQ ID NO: 1457810 - DNA, 15 bp, Homo sapiens
aaggggtaattactc

SEQ ID NO: 1457811 - DNA, 15 bp, Homo sapiens
aaaggggtaattact

SEQ ID NO: 1457812 - DNA, 15 bp, Homo sapiens
aaaaggggtaattac

SEQ ID NO: 1457813 - DNA, 15 bp, Homo sapiens
aaaaaggggtaatta

SEQ ID NO: 1457814 - DNA, 15 bp, Homo sapiens
aaaaaaggggtaatt

SEQ ID NO: 1457815 - DNA, 15 bp, Homo sapiens
caaaaaaggggtaat

SEQ ID NO: 1457816 - DNA, 15 bp, Homo sapiens
gcaaaaaaggggtaa

SEQ ID NO: 1457817 - DNA, 15 bp, Homo sapiens
agcaaaaaaggggta

SEQ ID NO: 1457818 - DNA, 15 bp, Homo sapiens
aagcaaaaaaggggt

SEQ ID NO: 1457819 - DNA, 15 bp, Homo sapiens
taagcaaaaaagggg

SEQ ID NO: 1457820 - DNA, 15 bp, Homo sapiens
ataagcaaaaaaggg

SEQ ID NO: 1457821 - DNA, 15 bp, Homo sapiens
aataagcaaaaaagg

SEQ ID NO: 1457822 - DNA, 15 bp, Homo sapiens
caataagcaaaaaag

SEQ ID NO: 1457823 - DNA, 15 bp, Homo sapiens
acaataagcaaaaaa

SEQ ID NO: 1457824 - DNA, 15 bp, Homo sapiens
gacaataagcaaaaa

SEQ ID NO: 1457825 - DNA, 15 bp, Homo sapiens
ggacaataagcaaaa

SEQ ID NO: 1457826 - DNA, 15 bp, Homo sapiens
tggacaataagcaaa

SEQ ID NO: 1457827 - DNA, 15 bp, Homo sapiens
gtggacaataagcaa

SEQ ID NO: 1457828 - DNA, 15 bp, Homo sapiens
tgtggacaataagca

SEQ ID NO: 1457829 - DNA, 15 bp, Homo sapiens
atgtggacaataagc

SEQ ID NO: 1457830 - DNA, 15 bp, Homo sapiens
tatgtggacaataag

SEQ ID NO: 1457831 - DNA, 15 bp, Homo sapiens
atatgtggacaataa

SEQ ID NO: 1457832 - DNA, 15 bp, Homo sapiens
aatatgtggacaata

SEQ ID NO: 1457833 - DNA, 15 bp, Homo sapiens
gaatatgtggacaat

SEQ ID NO: 1457834 - DNA, 15 bp, Homo sapiens
agaatatgtggacaa

SEQ ID NO: 1457835 - DNA, 15 bp, Homo sapiens
aagaatatgtggaca

SEQ ID NO: 1457836 - DNA, 15 bp, Homo sapiens
caagaatatgtggac

SEQ ID NO: 1457837 - DNA, 15 bp, Homo sapiens
acaagaatatgtgga

SEQ ID NO: 1457838 - DNA, 15 bp, Homo sapiens
gacaagaatatgtgg

SEQ ID NO: 1457839 - DNA, 15 bp, Homo sapiens
tgacaagaatatgtg

SEQ ID NO: 1457840 - DNA, 15 bp, Homo sapiens
gtgacaagaatatgt

SEQ ID NO: 1457841 - DNA, 15 bp, Homo sapiens
ggtgacaagaatatg

SEQ ID NO: 1457842 - DNA, 15 bp, Homo sapiens
tggtgacaagaatat

SEQ ID NO: 1457843 - DNA, 15 bp, Homo sapiens
atggtgacaagaata

SEQ ID NO: 1457844 - DNA, 15 bp, Homo sapiens
gatggtgacaagaat

SEQ ID NO: 1457845 - DNA, 15 bp, Homo sapiens
ggatggtgacaagaa

SEQ ID NO: 1457846 - DNA, 15 bp, Homo sapiens
aggatggtgacaaga

SEQ ID NO: 1457847 - DNA, 15 bp, Homo sapiens
caggatggtgacaag

SEQ ID NO: 1457848 - DNA, 15 bp, Homo sapiens
ccaggatggtgacaa

SEQ ID NO: 1457849 - DNA, 15 bp, Homo sapiens
accaggatggtgaca

SEQ ID NO: 1457850 - DNA, 15 bp, Homo sapiens
aaccaggatggtgac

SEQ ID NO: 1457851 - DNA, 15 bp, Homo sapiens
aaaccaggatggtga

SEQ ID NO: 1457852 - DNA, 15 bp, Homo sapiens
aaaaccaggatggtg

SEQ ID NO: 1457853 - DNA, 15 bp, Homo sapiens
taaaaccaggatggt

SEQ ID NO: 1457854 - DNA, 15 bp, Homo sapiens
ataaaaccaggatgg

SEQ ID NO: 1457855 - DNA, 15 bp, Homo sapiens
aataaaaccaggatg

SEQ ID NO: 1457856 - DNA, 15 bp, Homo sapiens
taataaaaccaggat

SEQ ID NO: 1457857 - DNA, 15 bp, Homo sapiens
ataataaaaccagga

SEQ ID NO: 1457858 - DNA, 15 bp, Homo sapiens
cataataaaaccagg

SEQ ID NO: 1457859 - DNA, 15 bp, Homo sapiens
acataataaaaccag

SEQ ID NO: 1457860 - DNA, 15 bp, Homo sapiens
gacataataaaacca

SEQ ID NO: 1457861 - DNA, 15 bp, Homo sapiens
tgacataataaaacc

SEQ ID NO: 1457862 - DNA, 15 bp, Homo sapiens
ctgacataataaaac

SEQ ID NO: 1457863 - DNA, 15 bp, Homo sapiens
gctgacataataaaa

SEQ ID NO: 1457864 - DNA, 15 bp, Homo sapiens
agctgacataataaa

SEQ ID NO: 1457865 - DNA, 15 bp, Homo sapiens
gagctgacataataa

SEQ ID NO: 1457866 - DNA, 15 bp, Homo sapiens
ggagctgacataata

SEQ ID NO: 1457867 - DNA, 15 bp, Homo sapiens
gggagctgacataat

SEQ ID NO: 1457868 - DNA, 15 bp, Homo sapiens
cgggagctgacataa

SEQ ID NO: 1457869 - DNA, 15 bp, Homo sapiens
acgggagctgacata

SEQ ID NO: 1457870 - DNA, 15 bp, Homo sapiens
gacgggagctgacat

SEQ ID NO: 1457871 - DNA, 15 bp, Homo sapiens
tgacgggagctgaca

SEQ ID NO: 1457872 - DNA, 15 bp, Homo sapiens
atgacgggagctgac

SEQ ID NO: 1457873 - DNA, 15 bp, Homo sapiens
catgacgggagctga

SEQ ID NO: 1457874 - DNA, 15 bp, Homo sapiens
gcatgacgggagctg

SEQ ID NO: 1457875 - DNA, 15 bp, Homo sapiens
ggcatgacgggagct

SEQ ID NO: 1457876 - DNA, 15 bp, Homo sapiens
tggcatgacgggagc

SEQ ID NO: 1457877 - DNA, 15 bp, Homo sapiens
atggcatgacgggag

SEQ ID NO: 1457878 - DNA, 15 bp, Homo sapiens
aatggcatgacggga

SEQ ID NO: 1457879 - DNA, 15 bp, Homo sapiens
aaatggcatgacggg

SEQ ID NO: 1457880 - DNA, 15 bp, Homo sapiens
taaatggcatgacgg

SEQ ID NO: 1457881 - DNA, 15 bp, Homo sapiens
ataaatggcatgacg

SEQ ID NO: 1457882 - DNA, 15 bp, Homo sapiens
gataaatggcatgac

SEQ ID NO: 1457883 - DNA, 15 bp, Homo sapiens
ggataaatggcatga

SEQ ID NO: 1457884 - DNA, 15 bp, Homo sapiens
tggataaatggcatg

SEQ ID NO: 1457885 - DNA, 15 bp, Homo sapiens
ctggataaatggcat

SEQ ID NO: 1457886 - DNA, 15 bp, Homo sapiens
actggataaatggca

SEQ ID NO: 1457887 - DNA, 15 bp, Homo sapiens
aactggataaatggc

SEQ ID NO: 1457888 - DNA, 15 bp, Homo sapiens
aaactggataaatgg

SEQ ID NO: 1457889 - DNA, 15 bp, Homo sapiens
caaactggataaatg

SEQ ID NO: 1457890 - DNA, 15 bp, Homo sapiens
gcaaactggataaat

SEQ ID NO: 1457891 - DNA, 15 bp, Homo sapiens
ggcaaactggataaa

SEQ ID NO: 1457892 - DNA, 15 bp, Homo sapiens
tggcaaactggataa

SEQ ID NO: 1457893 - DNA, 15 bp, Homo sapiens
gtggcaaactggata

SEQ ID NO: 1457894 - DNA, 15 bp, Homo sapiens
tgtggcaaactggat

SEQ ID NO: 1457895 - DNA, 15 bp, Homo sapiens
atgtggcaaactgga

SEQ ID NO: 1457896 - DNA, 15 bp, Homo sapiens
catgtggcaaactgg

SEQ ID NO: 1457897 - DNA, 15 bp, Homo sapiens
acatgtggcaaactg

SEQ ID NO: 1457898 - DNA, 15 bp, Homo sapiens
cacatgtggcaaact

SEQ ID NO: 1457899 - DNA, 15 bp, Homo sapiens
tgtttgccacatgtg

SEQ ID NO: 1457900 - DNA, 15 bp, Homo sapiens
ctgtttgccacatgt

SEQ ID NO: 1457901 - DNA, 15 bp, Homo sapiens
actgtttgccacatg

SEQ ID NO: 1457902 - DNA, 15 bp, Homo sapiens
cactgtttgccacat

SEQ ID NO: 1457903 - DNA, 15 bp, Homo sapiens
tcactgtttgccaca

SEQ ID NO: 1457904 - DNA, 15 bp, Homo sapiens
atcactgtttgccac

SEQ ID NO: 1457905 - DNA, 15 bp, Homo sapiens
aatcactgtttgcca

SEQ ID NO: 1457906 - DNA, 15 bp, Homo sapiens
taatcactgtttgcc

SEQ ID NO: 1457907 - DNA, 15 bp, Homo sapiens
ataatcactgtttgc

SEQ ID NO: 1457908 - DNA, 15 bp, Homo sapiens
aataatcactgtttg

SEQ ID NO: 1457909 - DNA, 15 bp, Homo sapiens
aaataatcactgttt

SEQ ID NO: 1457910 - DNA, 15 bp, Homo sapiens
taaataatcactgtt

SEQ ID NO: 1457911 - DNA, 15 bp, Homo sapiens
ataaataatcactgt

SEQ ID NO: 1457912 - DNA, 15 bp, Homo sapiens
tataaataatcactg

SEQ ID NO: 1457913 - DNA, 15 bp, Homo sapiens
ttataaataatcact

SEQ ID NO: 1457914 - DNA, 15 bp, Homo sapiens
tttataaataatcac

SEQ ID NO: 1457915 - DNA, 15 bp, Homo sapiens
ctttataaataatca

SEQ ID NO: 1457916 - DNA, 15 bp, Homo sapiens
tctttataaataatc

SEQ ID NO: 1457917 - DNA, 15 bp, Homo sapiens
ttctttataaataat

SEQ ID NO: 1457918 - DNA, 15 bp, Homo sapiens
tttctttataaataa

SEQ ID NO: 1457919 - DNA, 15 bp, Homo sapiens
atttctttataaata

SEQ ID NO: 1457920 - DNA, 15 bp, Homo sapiens
aatttctttataaat

SEQ ID NO: 1457921 - DNA, 15 bp, Homo sapiens
caatttctttataaa

SEQ ID NO: 1457922 - DNA, 15 bp, Homo sapiens
acaatttctttataa

SEQ ID NO: 1457923 - DNA, 15 bp, Homo sapiens
tacaatttctttata

SEQ ID NO: 1457924 - DNA, 15 bp, Homo sapiens
ctacaatttctttat

SEQ ID NO: 1457925 - DNA, 15 bp, Homo sapiens
actacaatttcttta

SEQ ID NO: 1457926 - DNA, 15 bp, Homo sapiens
aactacaatttcttt

SEQ ID NO: 1457927 - DNA, 15 bp, Homo sapiens
gaactacaatttctt

SEQ ID NO: 1457928 - DNA, 15 bp, Homo sapiens
tgaactacaatttct

SEQ ID NO: 1457929 - DNA, 15 bp, Homo sapiens
atgaactacaatttc

SEQ ID NO: 1457930 - DNA, 15 bp, Homo sapiens
aatgaactacaattt

SEQ ID NO: 1457931 - DNA, 15 bp, Homo sapiens
gaatgaactacaatt

SEQ ID NO: 1457932 - DNA, 15 bp, Homo sapiens
ggaatgaactacaat

SEQ ID NO: 1457933 - DNA, 15 bp, Homo sapiens
gggaatgaactacaa

SEQ ID NO: 1457934 - DNA, 15 bp, Homo sapiens
agggaatgaactaca

SEQ ID NO: 1457935 - DNA, 15 bp, Homo sapiens
tagggaatgaactac

SEQ ID NO: 1457936 - DNA, 15 bp, Homo sapiens
gtagggaatgaacta

SEQ ID NO: 1457937 - DNA, 15 bp, Homo sapiens
ggtagggaatgaact

SEQ ID NO: 1457938 - DNA, 15 bp, Homo sapiens
tggtagggaatgaac

SEQ ID NO: 1457939 - DNA, 15 bp, Homo sapiens
atggtagggaatgaa

SEQ ID NO: 1457940 - DNA, 15 bp, Homo sapiens
tatggtagggaatga

SEQ ID NO: 1457941 - DNA, 15 bp, Homo sapiens
atatggtagggaatg

SEQ ID NO: 1457942 - DNA, 15 bp, Homo sapiens
tatatggtagggaat

SEQ ID NO: 1457943 - DNA, 15 bp, Homo sapiens
ttatatggtagggaa

SEQ ID NO: 1457944 - DNA, 15 bp, Homo sapiens
attatatggtaggga

SEQ ID NO: 1457945 - DNA, 15 bp, Homo sapiens
aattatatggtaggg

SEQ ID NO: 1457946 - DNA, 15 bp, Homo sapiens
taattatatggtagg

SEQ ID NO: 1457947 - DNA, 15 bp, Homo sapiens
gtaattatatggtag

SEQ ID NO: 1457948 - DNA, 15 bp, Homo sapiens
cgtaattatatggta

SEQ ID NO: 1457949 - DNA, 15 bp, Homo sapiens
ccgtaattatatggt

SEQ ID NO: 1457950 - DNA, 15 bp, Homo sapiens
gccgtaattatatgg

SEQ ID NO: 1457951 - DNA, 15 bp, Homo sapiens
tgccgtaattatatg

SEQ ID NO: 1457952 - DNA, 15 bp, Homo sapiens
ttgccgtaattatat

SEQ ID NO: 1457953 - DNA, 15 bp, Homo sapiens
tttgccgtaattata

SEQ ID NO: 1457954 - DNA, 15 bp, Homo sapiens
atttgccgtaattat

SEQ ID NO: 1457955 - DNA, 15 bp, Homo sapiens
aatttgccgtaatta

SEQ ID NO: 1457956 - DNA, 15 bp, Homo sapiens
caatttgccgtaatt

SEQ ID NO: 1457957 - DNA, 15 bp, Homo sapiens
tcaatttgccgtaat

SEQ ID NO: 1457958 - DNA, 15 bp, Homo sapiens
ttcaatttgccgtaa

SEQ ID NO: 1457959 - DNA, 15 bp, Homo sapiens
attcaatttgccgta

SEQ ID NO: 1457960 - DNA, 15 bp, Homo sapiens
aattcaatttgccgt

SEQ ID NO: 1457961 - DNA, 15 bp, Homo sapiens
gaattcaatttgccg

SEQ ID NO: 1457962 - DNA, 15 bp, Homo sapiens
agaattcaatttgcc

SEQ ID NO: 1457963 - DNA, 15 bp, Homo sapiens
tagaattcaatttgc

SEQ ID NO: 1457964 - DNA, 15 bp, Homo sapiens
ttagaattcaatttg

SEQ ID NO: 1457965 - DNA, 15 bp, Homo sapiens
cttagaattcaattt

SEQ ID NO: 1457966 - DNA, 15 bp, Homo sapiens
gcttagaattcaatt

SEQ ID NO: 1457967 - DNA, 15 bp, Homo sapiens
ggcttagaattcaat

SEQ ID NO: 1457968 - DNA, 15 bp, Homo sapiens
gggcttagaattcaa

SEQ ID NO: 1457969 - DNA, 15 bp, Homo sapiens
tgggcttagaattca

SEQ ID NO: 1457970 - DNA, 15 bp, Homo sapiens
ttgggcttagaattc

SEQ ID NO: 1457971 - DNA, 15 bp, Homo sapiens
tttgggcttagaatt

SEQ ID NO: 1457972 - DNA, 15 bp, Homo sapiens
gtttgggcttagaat

SEQ ID NO: 1457973 - DNA, 15 bp, Homo sapiens
ggtttgggcttagaa

SEQ ID NO: 1457974 - DNA, 15 bp, Homo sapiens
gggtttgggcttaga

SEQ ID NO: 1457975 - DNA, 15 bp, Homo sapiens
ggggtttgggcttag

SEQ ID NO: 1457976 - DNA, 15 bp, Homo sapiens
aggggtttgggctta

SEQ ID NO: 1457977 - DNA, 15 bp, Homo sapiens
aaggggtttgggctt

SEQ ID NO: 1457978 - DNA, 15 bp, Homo sapiens
aaaggggtttgggct

SEQ ID NO: 1457979 - DNA, 15 bp, Homo sapiens
caaaggggtttgggc

SEQ ID NO: 1457980 - DNA, 15 bp, Homo sapiens
gcaaaggggtttggg

SEQ ID NO: 1457981 - DNA, 15 bp, Homo sapiens
tgcaaaggggtttgg

SEQ ID NO: 1457982 - DNA, 15 bp, Homo sapiens
ttgcaaaggggtttg

SEQ ID NO: 1457983 - DNA, 15 bp, Homo sapiens
tttgcaaaggggttt

SEQ ID NO: 1457984 - DNA, 15 bp, Homo sapiens
atttgcaaaggggtt

SEQ ID NO: 1457985 - DNA, 15 bp, Homo sapiens
tatttgcaaaggggt

SEQ ID NO: 1457986 - DNA, 15 bp, Homo sapiens
ctatttgcaaagggg

SEQ ID NO: 1457987 - DNA, 15 bp, Homo sapiens
actatttgcaaaggg

SEQ ID NO: 1457988 - DNA, 15 bp, Homo sapiens
aactatttgcaaagg

SEQ ID NO: 1457989 - DNA, 15 bp, Homo sapiens
aaactatttgcaaag

SEQ ID NO: 1457990 - DNA, 15 bp, Homo sapiens
aaaactatttgcaaa

SEQ ID NO: 1457991 - DNA, 15 bp, Homo sapiens
aaaaactatttgcaa

SEQ ID NO: 1457992 - DNA, 15 bp, Homo sapiens
caaaaactatttgca

SEQ ID NO: 1457993 - DNA, 15 bp, Homo sapiens
ccaaaaactatttgc

SEQ ID NO: 1457994 - DNA, 15 bp, Homo sapiens
gccaaaaactatttg

SEQ ID NO: 1457995 - DNA, 15 bp, Homo sapiens
agccaaaaactattt

SEQ ID NO: 1457996 - DNA, 15 bp, Homo sapiens
tagccaaaaactatt

SEQ ID NO: 1457997 - DNA, 15 bp, Homo sapiens
ttagccaaaaactat

SEQ ID NO: 1457998 - DNA, 15 bp, Homo sapiens
tttagccaaaaacta

SEQ ID NO: 1457999 - DNA, 15 bp, Homo sapiens
gtttagccaaaaact

SEQ ID NO: 1458000 - DNA, 15 bp, Homo sapiens
tgtttagccaaaaac

SEQ ID NO: 1458001 - DNA, 15 bp, Homo sapiens
ttgtttagccaaaaa

SEQ ID NO: 1458002 - DNA, 15 bp, Homo sapiens
attgtttagccaaaa

SEQ ID NO: 1458003 - DNA, 15 bp, Homo sapiens
gattgtttagccaaa

SEQ ID NO: 1458004 - DNA, 15 bp, Homo sapiens
agattgtttagccaa

SEQ ID NO: 1458005 - DNA, 15 bp, Homo sapiens
cagattgtttagcca

SEQ ID NO: 1458006 - DNA, 15 bp, Homo sapiens
tcagattgtttagcc

SEQ ID NO: 1458007 - DNA, 15 bp, Homo sapiens
ttcagattgtttagc

SEQ ID NO: 1458008 - DNA, 15 bp, Homo sapiens
tttcagattgtttag

SEQ ID NO: 1458009 - DNA, 15 bp, Homo sapiens
ttttcagattgttta

SEQ ID NO: 1458010 - DNA, 15 bp, Homo sapiens
gttttcagattgttt

SEQ ID NO: 1458011 - DNA, 15 bp, Homo sapiens
agttttcagattgtt

SEQ ID NO: 1458012 - DNA, 15 bp, Homo sapiens
cagttttcagattgt

SEQ ID NO: 1458013 - DNA, 15 bp, Homo sapiens
gcagttttcagattg

SEQ ID NO: 1458014 - DNA, 15 bp, Homo sapiens
ggcagttttcagatt

SEQ ID NO: 1458015 - DNA, 15 bp, Homo sapiens
aggcagttttcagat

SEQ ID NO: 1458016 - DNA, 15 bp, Homo sapiens
caggcagttttcaga

SEQ ID NO: 1458017 - DNA, 15 bp, Homo sapiens
gcaggcagttttcag

SEQ ID NO: 1458018 - DNA, 15 bp, Homo sapiens
ggcaggcagttttca

SEQ ID NO: 1458019 - DNA, 15 bp, Homo sapiens
aggcaggcagttttc

SEQ ID NO: 1458020 - DNA, 15 bp, Homo sapiens
caggcaggcagtttt

SEQ ID NO: 1458021 - DNA, 15 bp, Homo sapiens
tcaggcaggcagttt

SEQ ID NO: 1458022 - DNA, 15 bp, Homo sapiens
atcaggcaggcagtt

SEQ ID NO: 1458023 - DNA, 15 bp, Homo sapiens
tatcaggcaggcagt

SEQ ID NO: 1458024 - DNA, 15 bp, Homo sapiens
ttatcaggcaggcag

SEQ ID NO: 1458025 - DNA, 15 bp, Homo sapiens
tttatcaggcaggca

SEQ ID NO: 1458026 - DNA, 15 bp, Homo sapiens
ttttatcaggcaggc

SEQ ID NO: 1458027 - DNA, 15 bp, Homo sapiens
attttatcaggcagg

SEQ ID NO: 1458028 - DNA, 15 bp, Homo sapiens
aattttatcaggcag

SEQ ID NO: 1458029 - DNA, 15 bp, Homo sapiens
caattttatcaggca

SEQ ID NO: 1458030 - DNA, 15 bp, Homo sapiens
ccaattttatcaggc

SEQ ID NO: 1458031 - DNA, 15 bp, Homo sapiens
tccaattttatcagg

SEQ ID NO: 1458032 - DNA, 15 bp, Homo sapiens
ctccaattttatcag

SEQ ID NO: 1458033 - DNA, 15 bp, Homo sapiens
cctccaattttatca

SEQ ID NO: 1458034 - DNA, 15 bp, Homo sapiens
tcctccaattttatc

SEQ ID NO: 1458035 - DNA, 15 bp, Homo sapiens
ttcctccaattttat

SEQ ID NO: 1458036 - DNA, 15 bp, Homo sapiens
tttcctccaatttta

SEQ ID NO: 1458037 - DNA, 15 bp, Homo sapiens
gtttcctccaatttt

SEQ ID NO: 1458038 - DNA, 15 bp, Homo sapiens
agtttcctccaattt

SEQ ID NO: 1458039 - DNA, 15 bp, Homo sapiens
cagtttcctccaatt

SEQ ID NO: 1458040 - DNA, 15 bp, Homo sapiens
tcagtttcctccaat

SEQ ID NO: 1458041 - DNA, 15 bp, Homo sapiens
ctcagtttcctccaa

SEQ ID NO: 1458042 - DNA, 15 bp, Homo sapiens
tctcagtttcctcca

SEQ ID NO: 1458043 - DNA, 15 bp, Homo sapiens
gtctcagtttcctcc

SEQ ID NO: 1458044 - DNA, 15 bp, Homo sapiens
tgtctcagtttcctc

SEQ ID NO: 1458045 - DNA, 15 bp, Homo sapiens
ctgtctcagtttcct

SEQ ID NO: 1458046 - DNA, 15 bp, Homo sapiens
cctgtctcagtttcc

SEQ ID NO: 1458047 - DNA, 15 bp, Homo sapiens
ccctgtctcagtttc

SEQ ID NO: 1458048 - DNA, 15 bp, Homo sapiens
cccctgtctcagttt

SEQ ID NO: 1458049 - DNA, 15 bp, Homo sapiens
tcccctgtctcagtt

SEQ ID NO: 1458050 - DNA, 15 bp, Homo sapiens
ctcccctgtctcagt

SEQ ID NO: 1458051 - DNA, 15 bp, Homo sapiens
actcccctgtctcag

SEQ ID NO: 1458052 - DNA, 15 bp, Homo sapiens
cactcccctgtctca

SEQ ID NO: 1458053 - DNA, 15 bp, Homo sapiens
gcactcccctgtctc

SEQ ID NO: 1458054 - DNA, 15 bp, Homo sapiens
ggcactcccctgtct

SEQ ID NO: 1458055 - DNA, 15 bp, Homo sapiens
aggcactcccctgtc

SEQ ID NO: 1458056 - DNA, 15 bp, Homo sapiens
aaggcactcccctgt

SEQ ID NO: 1458057 - DNA, 15 bp, Homo sapiens
gaaggcactcccctg

SEQ ID NO: 1458058 - DNA, 15 bp, Homo sapiens
tgaaggcactcccct

SEQ ID NO: 1458059 - DNA, 15 bp, Homo sapiens
ttgaaggcactcccc

SEQ ID NO: 1458060 - DNA, 15 bp, Homo sapiens
attgaaggcactccc

SEQ ID NO: 1458061 - DNA, 15 bp, Homo sapiens
aattgaaggcactcc

SEQ ID NO: 1458062 - DNA, 15 bp, Homo sapiens
taattgaaggcactc

SEQ ID NO: 1458063 - DNA, 15 bp, Homo sapiens
ttaattgaaggcact

SEQ ID NO: 1458064 - DNA, 15 bp, Homo sapiens
cttaattgaaggcac

SEQ ID NO: 1458065 - DNA, 15 bp, Homo sapiens
ccttaattgaaggca

SEQ ID NO: 1458066 - DNA, 15 bp, Homo sapiens
gccttaattgaaggc

SEQ ID NO: 1458067 - DNA, 15 bp, Homo sapiens
tgccttaattgaagg

SEQ ID NO: 1458068 - DNA, 15 bp, Homo sapiens
gtgccttaattgaag

SEQ ID NO: 1458069 - DNA, 15 bp, Homo sapiens
agtgccttaattgaa

SEQ ID NO: 1458070 - DNA, 15 bp, Homo sapiens
tagtgccttaattga

SEQ ID NO: 1458071 - DNA, 15 bp, Homo sapiens
gtagtgccttaattg

SEQ ID NO: 1458072 - DNA, 15 bp, Homo sapiens
tgtagtgccttaatt

SEQ ID NO: 1458073 - DNA, 15 bp, Homo sapiens
ttgtagtgccttaat

SEQ ID NO: 1458074 - DNA, 15 bp, Homo sapiens
cttgtagtgccttaa

SEQ ID NO: 1458075 - DNA, 15 bp, Homo sapiens
gcttgtagtgcctta

SEQ ID NO: 1458076 - DNA, 15 bp, Homo sapiens
ggcttgtagtgcctt

SEQ ID NO: 1458077 - DNA, 15 bp, Homo sapiens
gggcttgtagtgcct

SEQ ID NO: 1458078 - DNA, 15 bp, Homo sapiens
tgggcttgtagtgcc

SEQ ID NO: 1458079 - DNA, 15 bp, Homo sapiens
ctgggcttgtagtgc

SEQ ID NO: 1458080 - DNA, 15 bp, Homo sapiens
actgggcttgtagtg

SEQ ID NO: 1458081 - DNA, 15 bp, Homo sapiens
aactgggcttgtagt

SEQ ID NO: 1458082 - DNA, 15 bp, Homo sapiens
aaactgggcttgtag

SEQ ID NO: 1458083 - DNA, 15 bp, Homo sapiens
caaactgggcttgta

SEQ ID NO: 1458084 - DNA, 15 bp, Homo sapiens
tcaaactgggcttgt

SEQ ID NO: 1458085 - DNA, 15 bp, Homo sapiens
ttcaaactgggcttg

SEQ ID NO: 1458086 - DNA, 15 bp, Homo sapiens
attcaaactgggctt

SEQ ID NO: 1458087 - DNA, 15 bp, Homo sapiens
cattcaaactgggct

SEQ ID NO: 1458088 - DNA, 15 bp, Homo sapiens
tcattcaaactgggc

SEQ ID NO: 1458089 - DNA, 15 bp, Homo sapiens
ctcattcaaactggg

SEQ ID NO: 1458090 - DNA, 15 bp, Homo sapiens
gctcattcaaactgg

SEQ ID NO: 1458091 - DNA, 15 bp, Homo sapiens
agctcattcaaactg

SEQ ID NO: 1458092 - DNA, 15 bp, Homo sapiens
tagctcattcaaact

SEQ ID NO: 1458093 - DNA, 15 bp, Homo sapiens
ctagctcattcaaac

SEQ ID NO: 1458094 - DNA, 15 bp, Homo sapiens
tctagctcattcaaa

SEQ ID NO: 1458095 - DNA, 15 bp, Homo sapiens
gtctagctcattcaa

SEQ ID NO: 1458096 - DNA, 15 bp, Homo sapiens
agtctagctcattca

SEQ ID NO: 1458097 - DNA, 15 bp, Homo sapiens
aagtctagctcattc

SEQ ID NO: 1458098 - DNA, 15 bp, Homo sapiens
aaagtctagctcatt

SEQ ID NO: 1458099 - DNA, 15 bp, Homo sapiens
taaagtctagctcat

SEQ ID NO: 1458100 - DNA, 15 bp, Homo sapiens
ttaaagtctagctca

SEQ ID NO: 1458101 - DNA, 15 bp, Homo sapiens
attaaagtctagctc

SEQ ID NO: 1458102 - DNA, 15 bp, Homo sapiens
aattaaagtctagct

SEQ ID NO: 1458103 - DNA, 15 bp, Homo sapiens
taattaaagtctagc

SEQ ID NO: 1458104 - DNA, 15 bp, Homo sapiens
ctaattaaagtctag

SEQ ID NO: 1458105 - DNA, 15 bp, Homo sapiens
cctaattaaagtcta

SEQ ID NO: 1458106 - DNA, 15 bp, Homo sapiens
tcctaattaaagtct

SEQ ID NO: 1458107 - DNA, 15 bp, Homo sapiens
gtcctaattaaagtc

SEQ ID NO: 1458108 - DNA, 15 bp, Homo sapiens
tgtcctaattaaagt

SEQ ID NO: 1458109 - DNA, 15 bp, Homo sapiens
gtgtcctaattaaag

SEQ ID NO: 1458110 - DNA, 15 bp, Homo sapiens
tgtgtcctaattaaa

SEQ ID NO: 1458111 - DNA, 15 bp, Homo sapiens
ttgtgtcctaattaa

SEQ ID NO: 1458112 - DNA, 15 bp, Homo sapiens
cttgtgtcctaatta

SEQ ID NO: 1458113 - DNA, 15 bp, Homo sapiens
tcttgtgtcctaatt

SEQ ID NO: 1458114 - DNA, 15 bp, Homo sapiens
ttcttgtgtcctaat

SEQ ID NO: 1458115 - DNA, 15 bp, Homo sapiens
cttcttgtgtcctaa

SEQ ID NO: 1458116 - DNA, 15 bp, Homo sapiens
gcttcttgtgtccta

SEQ ID NO: 1458117 - DNA, 15 bp, Homo sapiens
tgcttcttgtgtcct

SEQ ID NO: 1458118 - DNA, 15 bp, Homo sapiens
ttgcttcttgtgtcc

SEQ ID NO: 1458119 - DNA, 15 bp, Homo sapiens
attgcttcttgtgtc

SEQ ID NO: 1458120 - DNA, 15 bp, Homo sapiens
aattgcttcttgtgt

SEQ ID NO: 1458121 - DNA, 15 bp, Homo sapiens
aaattgcttcttgtg

SEQ ID NO: 1458122 - DNA, 15 bp, Homo sapiens
taaattgcttcttgt

SEQ ID NO: 1458123 - DNA, 15 bp, Homo sapiens
ctaaattgcttcttg

SEQ ID NO: 1458124 - DNA, 15 bp, Homo sapiens
tctaaattgcttctt

SEQ ID NO: 1458125 - DNA, 15 bp, Homo sapiens
ctctaaattgcttct

SEQ ID NO: 1458126 - DNA, 15 bp, Homo sapiens
tctctaaattgcttc

SEQ ID NO: 1458127 - DNA, 15 bp, Homo sapiens
atctctaaattgctt

SEQ ID NO: 1458128 - DNA, 15 bp, Homo sapiens
tatctctaaattgct

SEQ ID NO: 1458129 - DNA, 15 bp, Homo sapiens
ttatctctaaattgc

SEQ ID NO: 1458130 - DNA, 15 bp, Homo sapiens
attatctctaaattg

SEQ ID NO: 1458131 - DNA, 15 bp, Homo sapiens
gattatctctaaatt

SEQ ID NO: 1458132 - DNA, 15 bp, Homo sapiens
agattatctctaaat

SEQ ID NO: 1458133 - DNA, 15 bp, Homo sapiens
gagattatctctaaa

SEQ ID NO: 1458134 - DNA, 15 bp, Homo sapiens
tgagattatctctaa

SEQ ID NO: 1458135 - DNA, 15 bp, Homo sapiens
gtgagattatctcta

SEQ ID NO: 1458136 - DNA, 15 bp, Homo sapiens
agtgagattatctct

SEQ ID NO: 1458137 - DNA, 15 bp, Homo sapiens
tagtgagattatctc

SEQ ID NO: 1458138 - DNA, 15 bp, Homo sapiens
ttagtgagattatct

SEQ ID NO: 1458139 - DNA, 15 bp, Homo sapiens
tttagtgagattatc

SEQ ID NO: 1458140 - DNA, 15 bp, Homo sapiens
atttagtgagattat

SEQ ID NO: 1458141 - DNA, 15 bp, Homo sapiens
gatttagtgagatta

SEQ ID NO: 1458142 - DNA, 15 bp, Homo sapiens
tgatttagtgagatt

SEQ ID NO: 1458143 - DNA, 15 bp, Homo sapiens
ttgatttagtgagat

SEQ ID NO: 1458144 - DNA, 15 bp, Homo sapiens
tttgatttagtgaga

SEQ ID NO: 1458145 - DNA, 15 bp, Homo sapiens
ttttgatttagtgag

SEQ ID NO: 1458146 - DNA, 15 bp, Homo sapiens
tttttgatttagtga

SEQ ID NO: 1458147 - DNA, 15 bp, Homo sapiens
ttttttgatttagtg

SEQ ID NO: 1458148 - DNA, 15 bp, Homo sapiens
gttttttgatttagt

SEQ ID NO: 1458149 - DNA, 15 bp, Homo sapiens
agttttttgatttag

SEQ ID NO: 1458150 - DNA, 15 bp, Homo sapiens
cagttttttgattta

SEQ ID NO: 1458151 - DNA, 15 bp, Homo sapiens
tcagttttttgattt

SEQ ID NO: 1458152 - DNA, 15 bp, Homo sapiens
ttcagttttttgatt

SEQ ID NO: 1458153 - DNA, 15 bp, Homo sapiens
attcagttttttgat

SEQ ID NO: 1458154 - DNA, 15 bp, Homo sapiens
cattcagttttttga

SEQ ID NO: 1458155 - DNA, 15 bp, Homo sapiens
tcattcagttttttg

SEQ ID NO: 1458156 - DNA, 15 bp, Homo sapiens
atcattcagtttttt

SEQ ID NO: 1458157 - DNA, 15 bp, Homo sapiens
tatcattcagttttt

SEQ ID NO: 1458158 - DNA, 15 bp, Homo sapiens
ttatcattcagtttt

SEQ ID NO: 1458159 - DNA, 15 bp, Homo sapiens
cttatcattcagttt

SEQ ID NO: 1458160 - DNA, 15 bp, Homo sapiens
gcttatcattcagtt

SEQ ID NO: 1458161 - DNA, 15 bp, Homo sapiens
cgcttatcattcagt

SEQ ID NO: 1458162 - DNA, 15 bp, Homo sapiens
acgcttatcattcag

SEQ ID NO: 1458163 - DNA, 15 bp, Homo sapiens
cacgcttatcattca

SEQ ID NO: 1458164 - DNA, 15 bp, Homo sapiens
tcacgcttatcattc

SEQ ID NO: 1458165 - DNA, 15 bp, Homo sapiens
ctcacgcttatcatt

SEQ ID NO: 1458166 - DNA, 15 bp, Homo sapiens
gctcacgcttatcat

SEQ ID NO: 1458167 - DNA, 15 bp, Homo sapiens
tgctcacgcttatca

SEQ ID NO: 1458168 - DNA, 15 bp, Homo sapiens
atgctcacgcttatc

SEQ ID NO: 1458169 - DNA, 15 bp, Homo sapiens
aatgctcacgcttat

SEQ ID NO: 1458170 - DNA, 15 bp, Homo sapiens
taatgctcacgctta

SEQ ID NO: 1458171 - DNA, 15 bp, Homo sapiens
gtaatgctcacgctt

SEQ ID NO: 1458172 - DNA, 15 bp, Homo sapiens
agtaatgctcacgct

SEQ ID NO: 1458173 - DNA, 15 bp, Homo sapiens
cagtaatgctcacgc

SEQ ID NO: 1458174 - DNA, 15 bp, Homo sapiens
acagtaatgctcacg

SEQ ID NO: 1458175 - DNA, 15 bp, Homo sapiens
cacagtaatgctcac

SEQ ID NO: 1458176 - DNA, 15 bp, Homo sapiens
gcacagtaatgctca

SEQ ID NO: 1458177 - DNA, 15 bp, Homo sapiens
tgcacagtaatgctc

SEQ ID NO: 1458178 - DNA, 15 bp, Homo sapiens
ctgcacagtaatgct

SEQ ID NO: 1458179 - DNA, 15 bp, Homo sapiens
tctgcacagtaatgc

SEQ ID NO: 1458180 - DNA, 15 bp, Homo sapiens
ctctgcacagtaatg

SEQ ID NO: 1458181 - DNA, 15 bp, Homo sapiens
tctctgcacagtaat

SEQ ID NO: 1458182 - DNA, 15 bp, Homo sapiens
ttctctgcacagtaa

SEQ ID NO: 1458183 - DNA, 15 bp, Homo sapiens
tttctctgcacagta

SEQ ID NO: 1458184 - DNA, 15 bp, Homo sapiens
atttctctgcacagt

SEQ ID NO: 1458185 - DNA, 15 bp, Homo sapiens
catttctctgcacag

SEQ ID NO: 1458186 - DNA, 15 bp, Homo sapiens
tcatttctctgcaca

SEQ ID NO: 1458187 - DNA, 15 bp, Homo sapiens
atcatttctctgcac

SEQ ID NO: 1458188 - DNA, 15 bp, Homo sapiens
aatcatttctctgca

SEQ ID NO: 1458189 - DNA, 15 bp, Homo sapiens
aaatcatttctctgc

SEQ ID NO: 1458190 - DNA, 15 bp, Homo sapiens
aaaatcatttctctg

SEQ ID NO: 1458191 - DNA, 15 bp, Homo sapiens
gaaaatcatttctct

SEQ ID NO: 1458192 - DNA, 15 bp, Homo sapiens
ggaaaatcatttctc

SEQ ID NO: 1458193 - DNA, 15 bp, Homo sapiens
aggaaaatcatttct

SEQ ID NO: 1458194 - DNA, 15 bp, Homo sapiens
caggaaaatcatttc

SEQ ID NO: 1458195 - DNA, 15 bp, Homo sapiens
acaggaaaatcattt

SEQ ID NO: 1458196 - DNA, 15 bp, Homo sapiens
aacaggaaaatcatt

SEQ ID NO: 1458197 - DNA, 15 bp, Homo sapiens
caacaggaaaatcat

SEQ ID NO: 1458198 - DNA, 15 bp, Homo sapiens
tcaacaggaaaatca

SEQ ID NO: 1458199 - DNA, 15 bp, Homo sapiens
ttcaacaggaaaatc

SEQ ID NO: 1458200 - DNA, 15 bp, Homo sapiens
cttcaacaggaaaat

SEQ ID NO: 1458201 - DNA, 15 bp, Homo sapiens
ccttcaacaggaaaa

SEQ ID NO: 1458202 - DNA, 15 bp, Homo sapiens
tccttcaacaggaaa

SEQ ID NO: 1458203 - DNA, 15 bp, Homo sapiens
ctccttcaacaggaa

SEQ ID NO: 1458204 - DNA, 15 bp, Homo sapiens
tctccttcaacagga

SEQ ID NO: 1458205 - DNA, 15 bp, Homo sapiens
atctccttcaacagg

SEQ ID NO: 1458206 - DNA, 15 bp, Homo sapiens
aatctccttcaacag

SEQ ID NO: 1458207 - DNA, 15 bp, Homo sapiens
taatctccttcaaca

SEQ ID NO: 1458208 - DNA, 15 bp, Homo sapiens
ataatctccttcaac

SEQ ID NO: 1458209 - DNA, 15 bp, Homo sapiens
cataatctccttcaa

SEQ ID NO: 1458210 - DNA, 15 bp, Homo sapiens
ccataatctccttca

SEQ ID NO: 1458211 - DNA, 15 bp, Homo sapiens
tccataatctccttc

SEQ ID NO: 1458212 - DNA, 15 bp, Homo sapiens
ctccataatctcctt

SEQ ID NO: 1458213 - DNA, 15 bp, Homo sapiens
gctccataatctcct

SEQ ID NO: 1458214 - DNA, 15 bp, Homo sapiens
tgctccataatctcc

SEQ ID NO: 1458215 - DNA, 15 bp, Homo sapiens
gtgctccataatctc

SEQ ID NO: 1458216 - DNA, 15 bp, Homo sapiens
ggtgctccataatct

SEQ ID NO: 1458217 - DNA, 15 bp, Homo sapiens
aggtgctccataatc

SEQ ID NO: 1458218 - DNA, 15 bp, Homo sapiens
aaggtgctccataat

SEQ ID NO: 1458219 - DNA, 15 bp, Homo sapiens
taaggtgctccataa

SEQ ID NO: 1458220 - DNA, 15 bp, Homo sapiens
ctaaggtgctccata

SEQ ID NO: 1458221 - DNA, 15 bp, Homo sapiens
tctaaggtgctccat

SEQ ID NO: 1458222 - DNA, 15 bp, Homo sapiens
ctctaaggtgctcca

SEQ ID NO: 1458223 - DNA, 15 bp, Homo sapiens
gctctaaggtgctcc

SEQ ID NO: 1458224 - DNA, 15 bp, Homo sapiens
agctctaaggtgctc

SEQ ID NO: 1458225 - DNA, 15 bp, Homo sapiens
cagctctaaggtgct

SEQ ID NO: 1458226 - DNA, 15 bp, Homo sapiens
acagctctaaggtgc

SEQ ID NO: 1458227 - DNA, 15 bp, Homo sapiens
tacagctctaaggtg

SEQ ID NO: 1458228 - DNA, 15 bp, Homo sapiens
ctacagctctaaggt

SEQ ID NO: 1458229 - DNA, 15 bp, Homo sapiens
cctacagctctaagg

SEQ ID NO: 1458230 - DNA, 15 bp, Homo sapiens
tcctacagctctaag

SEQ ID NO: 1458231 - DNA, 15 bp, Homo sapiens
ttcctacagctctaa

SEQ ID NO: 1458232 - DNA, 15 bp, Homo sapiens
cttcctacagctcta

SEQ ID NO: 1458233 - DNA, 15 bp, Homo sapiens
acttcctacagctct

SEQ ID NO: 1458234 - DNA, 15 bp, Homo sapiens
cacttcctacagctc

SEQ ID NO: 1458235 - DNA, 15 bp, Homo sapiens
ccacttcctacagct

SEQ ID NO: 1458236 - DNA, 15 bp, Homo sapiens
tccacttcctacagc

SEQ ID NO: 1458237 - DNA, 15 bp, Homo sapiens
ttccacttcctacag

SEQ ID NO: 1458238 - DNA, 15 bp, Homo sapiens
tttccacttcctaca

SEQ ID NO: 1458239 - DNA, 15 bp, Homo sapiens
gtttccacttcctac

SEQ ID NO: 1458240 - DNA, 15 bp, Homo sapiens
cgtttccacttccta

SEQ ID NO: 1458241 - DNA, 15 bp, Homo sapiens
ccgtttccacttcct

SEQ ID NO: 1458242 - DNA, 15 bp, Homo sapiens
tccgtttccacttcc

SEQ ID NO: 1458243 - DNA, 15 bp, Homo sapiens
gtccgtttccacttc

SEQ ID NO: 1458244 - DNA, 15 bp, Homo sapiens
tgtccgtttccactt

SEQ ID NO: 1458245 - DNA, 15 bp, Homo sapiens
atgtccgtttccact

SEQ ID NO: 1458246 - DNA, 15 bp, Homo sapiens
catgtccgtttccac

SEQ ID NO: 1458247 - DNA, 15 bp, Homo sapiens
tcatgtccgtttcca

SEQ ID NO: 1458248 - DNA, 15 bp, Homo sapiens
ttcatgtccgtttcc

SEQ ID NO: 1458249 - DNA, 15 bp, Homo sapiens
attcatgtccgtttc

SEQ ID NO: 1458250 - DNA, 15 bp, Homo sapiens
aattcatgtccgttt

SEQ ID NO: 1458251 - DNA, 15 bp, Homo sapiens
taattcatgtccgtt

SEQ ID NO: 1458252 - DNA, 15 bp, Homo sapiens
ataattcatgtccgt

SEQ ID NO: 1458253 - DNA, 15 bp, Homo sapiens
aataattcatgtccg

SEQ ID NO: 1458254 - DNA, 15 bp, Homo sapiens
aaataattcatgtcc

SEQ ID NO: 1458255 - DNA, 15 bp, Homo sapiens
aaaataattcatgtc

SEQ ID NO: 1458256 - DNA, 15 bp, Homo sapiens
aaaaataattcatgt

SEQ ID NO: 1458257 - DNA, 15 bp, Homo sapiens
taaaaataattcatg

SEQ ID NO: 1458258 - DNA, 15 bp, Homo sapiens
ttaaaaataattcat

SEQ ID NO: 1458259 - DNA, 15 bp, Homo sapiens
tttaaaaataattca

SEQ ID NO: 1458260 - DNA, 15 bp, Homo sapiens
ctttaaaaataattc

SEQ ID NO: 1458261 - DNA, 15 bp, Homo sapiens
tctttaaaaataatt

SEQ ID NO: 1458262 - DNA, 15 bp, Homo sapiens
ttctttaaaaataat

SEQ ID NO: 1458263 - DNA, 15 bp, Homo sapiens
tttctttaaaaataa

SEQ ID NO: 1458264 - DNA, 15 bp, Homo sapiens
atttctttaaaaata

SEQ ID NO: 1458265 - DNA, 15 bp, Homo sapiens
catttctttaaaaat

SEQ ID NO: 1458266 - DNA, 15 bp, Homo sapiens
acatttctttaaaaa

SEQ ID NO: 1458267 - DNA, 15 bp, Homo sapiens
cacatttctttaaaa

SEQ ID NO: 1458268 - DNA, 15 bp, Homo sapiens
acacatttctttaaa

SEQ ID NO: 1458269 - DNA, 15 bp, Homo sapiens
tacacatttctttaa

SEQ ID NO: 1458270 - DNA, 15 bp, Homo sapiens
gtacacatttcttta

SEQ ID NO: 1458271 - DNA, 15 bp, Homo sapiens
tgtacacatttcttt

SEQ ID NO: 1458272 - DNA, 15 bp, Homo sapiens
atgtacacatttctt

SEQ ID NO: 1458273 - DNA, 15 bp, Homo sapiens
aatgtacacatttct

SEQ ID NO: 1458274 - DNA, 15 bp, Homo sapiens
aaatgtacacatttc

SEQ ID NO: 1458275 - DNA, 15 bp, Homo sapiens
taaatgtacacattt

SEQ ID NO: 1458276 - DNA, 15 bp, Homo sapiens
ataaatgtacacatt

SEQ ID NO: 1458277 - DNA, 15 bp, Homo sapiens
tataaatgtacacat

SEQ ID NO: 1458278 - DNA, 15 bp, Homo sapiens
atataaatgtacaca

SEQ ID NO: 1458279 - DNA, 15 bp, Homo sapiens
tatataaatgtacac

SEQ ID NO: 1458280 - DNA, 15 bp, Homo sapiens
atatataaatgtaca

SEQ ID NO: 1458281 - DNA, 15 bp, Homo sapiens
tatatataaatgtac

SEQ ID NO: 1458282 - DNA, 15 bp, Homo sapiens
ttatatataaatgta

SEQ ID NO: 1458283 - DNA, 15 bp, Homo sapiens
gttatatataaatgt

SEQ ID NO: 1458284 - DNA, 15 bp, Homo sapiens
tgttatatataaatg

SEQ ID NO: 1458285 - DNA, 15 bp, Homo sapiens
atgttatatataaat

SEQ ID NO: 1458286 - DNA, 15 bp, Homo sapiens
aatgttatatataaa

SEQ ID NO: 1458287 - DNA, 15 bp, Homo sapiens
aaatgttatatataa

SEQ ID NO: 1458288 - DNA, 15 bp, Homo sapiens
caaatgttatatata

SEQ ID NO: 1458289 - DNA, 15 bp, Homo sapiens
gcaaatgttatatat

SEQ ID NO: 1458290 - DNA, 15 bp, Homo sapiens
tgcaaatgttatata

SEQ ID NO: 1458291 - DNA, 15 bp, Homo sapiens
gtgcaaatgttatat

SEQ ID NO: 1458292 - DNA, 15 bp, Homo sapiens
ggtgcaaatgttata

SEQ ID NO: 1458293 - DNA, 15 bp, Homo sapiens
aggtgcaaatgttat

SEQ ID NO: 1458294 - DNA, 15 bp, Homo sapiens
gaggtgcaaatgtta

SEQ ID NO: 1458295 - DNA, 15 bp, Homo sapiens
tgaggtgcaaatgtt

SEQ ID NO: 1458296 - DNA, 15 bp, Homo sapiens
ttgaggtgcaaatgt

SEQ ID NO: 1458297 - DNA, 15 bp, Homo sapiens
tttgaggtgcaaatg

SEQ ID NO: 1458298 - DNA, 15 bp, Homo sapiens
ctttgaggtgcaaat

SEQ ID NO: 1458299 - DNA, 15 bp, Homo sapiens
tctttgaggtgcaaa

SEQ ID NO: 1458300 - DNA, 15 bp, Homo sapiens
ttctttgaggtgcaa

SEQ ID NO: 1458301 - DNA, 15 bp, Homo sapiens
gttctttgaggtgca

SEQ ID NO: 1458302 - DNA, 15 bp, Homo sapiens
cgttctttgaggtgc

SEQ ID NO: 1458303 - DNA, 15 bp, Homo sapiens
gcgttctttgaggtg

SEQ ID NO: 1458304 - DNA, 15 bp, Homo sapiens
agcgttctttgaggt

SEQ ID NO: 1458305 - DNA, 15 bp, Homo sapiens
aagcgttctttgagg

SEQ ID NO: 1458306 - DNA, 15 bp, Homo sapiens
aaagcgttctttgag

SEQ ID NO: 1458307 - DNA, 15 bp, Homo sapiens
aaaagcgttctttga

SEQ ID NO: 1458308 - DNA, 15 bp, Homo sapiens
caaaagcgttctttg

SEQ ID NO: 1458309 - DNA, 15 bp, Homo sapiens
tcaaaagcgttcttt

SEQ ID NO: 1458310 - DNA, 15 bp, Homo sapiens
ttcaaaagcgttctt

SEQ ID NO: 1458311 - DNA, 15 bp, Homo sapiens
cttcaaaagcgttct

SEQ ID NO: 1458312 - DNA, 15 bp, Homo sapiens
acttcaaaagcgttc

SEQ ID NO: 1458313 - DNA, 15 bp, Homo sapiens
tacttcaaaagcgtt

SEQ ID NO: 1458314 - DNA, 15 bp, Homo sapiens
ttacttcaaaagcgt

SEQ ID NO: 1458315 - DNA, 15 bp, Homo sapiens
attacttcaaaagcg

SEQ ID NO: 1458316 - DNA, 15 bp, Homo sapiens
aattacttcaaaagc

SEQ ID NO: 1458317 - DNA, 15 bp, Homo sapiens
taattacttcaaaag

SEQ ID NO: 1458318 - DNA, 15 bp, Homo sapiens
gtaattacttcaaaa

SEQ ID NO: 1458319 - DNA, 15 bp, Homo sapiens
tgtaattacttcaaa

SEQ ID NO: 1458320 - DNA, 15 bp, Homo sapiens
ttgtaattacttcaa

SEQ ID NO: 1458321 - DNA, 15 bp, Homo sapiens
tttgtaattacttca

SEQ ID NO: 1458322 - DNA, 15 bp, Homo sapiens
atttgtaattacttc

SEQ ID NO: 1458323 - DNA, 15 bp, Homo sapiens
aatttgtaattactt

SEQ ID NO: 1458324 - DNA, 15 bp, Homo sapiens
gaatttgtaattact

SEQ ID NO: 1458325 - DNA, 15 bp, Homo sapiens
tgaatttgtaattac

SEQ ID NO: 1458326 - DNA, 15 bp, Homo sapiens
ctgaatttgtaatta

SEQ ID NO: 1458327 - DNA, 15 bp, Homo sapiens
actgaatttgtaatt

SEQ ID NO: 1458328 - DNA, 15 bp, Homo sapiens
tactgaatttgtaat

SEQ ID NO: 1458329 - DNA, 15 bp, Homo sapiens
atactgaatttgtaa

SEQ ID NO: 1458330 - DNA, 15 bp, Homo sapiens
tatactgaatttgta

SEQ ID NO: 1458331 - DNA, 15 bp, Homo sapiens
ctatactgaatttgt

SEQ ID NO: 1458332 - DNA, 15 bp, Homo sapiens
gctatactgaatttg

SEQ ID NO: 1458333 - DNA, 15 bp, Homo sapiens
agctatactgaattt

SEQ ID NO: 1458334 - DNA, 15 bp, Homo sapiens
tagctatactgaatt

SEQ ID NO: 1458335 - DNA, 15 bp, Homo sapiens
ttagctatactgaat

SEQ ID NO: 1458336 - DNA, 15 bp, Homo sapiens
gttagctatactgaa

SEQ ID NO: 1458337 - DNA, 15 bp, Homo sapiens
agttagctatactga

SEQ ID NO: 1458338 - DNA, 15 bp, Homo sapiens
gagttagctatactg

SEQ ID NO: 1458339 - DNA, 15 bp, Homo sapiens
cgagttagctatact

SEQ ID NO: 1458340 - DNA, 15 bp, Homo sapiens
ccgagttagctatac

SEQ ID NO: 1458341 - DNA, 15 bp, Homo sapiens
tccgagttagctata

SEQ ID NO: 1458342 - DNA, 15 bp, Homo sapiens
ctccgagttagctat

SEQ ID NO: 1458343 - DNA, 15 bp, Homo sapiens
cctccgagttagcta

SEQ ID NO: 1458344 - DNA, 15 bp, Homo sapiens
ccctccgagttagct

SEQ ID NO: 1458345 - DNA, 15 bp, Homo sapiens
tccctccgagttagc

SEQ ID NO: 1458346 - DNA, 15 bp, Homo sapiens
gtccctccgagttag

SEQ ID NO: 1458347 - DNA, 15 bp, Homo sapiens
agtccctccgagtta

SEQ ID NO: 1458348 - DNA, 15 bp, Homo sapiens
cagtccctccgagtt

SEQ ID NO: 1458349 - DNA, 15 bp, Homo sapiens
tcagtccctccgagt

SEQ ID NO: 1458350 - DNA, 15 bp, Homo sapiens
atcagtccctccgag

SEQ ID NO: 1458351 - DNA, 15 bp, Homo sapiens
catcagtccctccga

SEQ ID NO: 1458352 - DNA, 15 bp, Homo sapiens
acatcagtccctccg

SEQ ID NO: 1458353 - DNA, 15 bp, Homo sapiens
aacatcagtccctcc

SEQ ID NO: 1458354 - DNA, 15 bp, Homo sapiens
caacatcagtccctc

SEQ ID NO: 1458355 - DNA, 15 bp, Homo sapiens
acaacatcagtccct

SEQ ID NO: 1458356 - DNA, 15 bp, Homo sapiens
aacaacatcagtccc

SEQ ID NO: 1458357 - DNA, 15 bp, Homo sapiens
aaacaacatcagtcc

SEQ ID NO: 1458358 - DNA, 15 bp, Homo sapiens
aaaacaacatcagtc

SEQ ID NO: 1458359 - DNA, 15 bp, Homo sapiens
caaaacaacatcagt

SEQ ID NO: 1458360 - DNA, 15 bp, Homo sapiens
acaaaacaacatcag

SEQ ID NO: 1458361 - DNA, 15 bp, Homo sapiens
gacaaaacaacatca

SEQ ID NO: 1458362 - DNA, 15 bp, Homo sapiens
tgacaaaacaacatc

SEQ ID NO: 1458363 - DNA, 15 bp, Homo sapiens
atgacaaaacaacat

SEQ ID NO: 1458364 - DNA, 15 bp, Homo sapiens
aatgacaaaacaaca

SEQ ID NO: 1458365 - DNA, 15 bp, Homo sapiens
aaatgacaaaacaac

SEQ ID NO: 1458366 - DNA, 15 bp, Homo sapiens
taaatgacaaaacaa

SEQ ID NO: 1458367 - DNA, 15 bp, Homo sapiens
ttaaatgacaaaaca

SEQ ID NO: 1458368 - DNA, 15 bp, Homo sapiens
cttaaatgacaaaac

SEQ ID NO: 1458369 - DNA, 15 bp, Homo sapiens
tcttaaatgacaaaa

SEQ ID NO: 1458370 - DNA, 15 bp, Homo sapiens
atcttaaatgacaaa

SEQ ID NO: 1458371 - DNA, 15 bp, Homo sapiens
tatcttaaatgacaa

SEQ ID NO: 1458372 - DNA, 15 bp, Homo sapiens
atatcttaaatgaca

SEQ ID NO: 1458373 - DNA, 15 bp, Homo sapiens
aatatcttaaatgac

SEQ ID NO: 1458374 - DNA, 15 bp, Homo sapiens
taatatcttaaatga

SEQ ID NO: 1458375 - DNA, 15 bp, Homo sapiens
ttaatatcttaaatg

SEQ ID NO: 1458376 - DNA, 15 bp, Homo sapiens
tttaatatcttaaat

SEQ ID NO: 1458377 - DNA, 15 bp, Homo sapiens
ttttaatatcttaaa

SEQ ID NO: 1458378 - DNA, 15 bp, Homo sapiens
attttaatatcttaa

SEQ ID NO: 1458379 - DNA, 15 bp, Homo sapiens
tattttaatatctta

SEQ ID NO: 1458380 - DNA, 15 bp, Homo sapiens
ttattttaatatctt

SEQ ID NO: 1458381 - DNA, 15 bp, Homo sapiens
tttattttaatatct

SEQ ID NO: 1458382 - DNA, 15 bp, Homo sapiens
ctttattttaatatc

SEQ ID NO: 1458383 - DNA, 15 bp, Homo sapiens
actttattttaatat

SEQ ID NO: 1458384 - DNA, 15 bp, Homo sapiens
aactttattttaata

SEQ ID NO: 1458385 - DNA, 15 bp, Homo sapiens
aaactttattttaat

SEQ ID NO: 1458386 - DNA, 15 bp, Homo sapiens
aaaactttattttaa

SEQ ID NO: 1458387 - DNA, 15 bp, Homo sapiens
gtaaaactttatttt

SEQ ID NO: 1458388 - DNA, 15 bp, Homo sapiens
agtaaaactttattt

SEQ ID NO: 1458389 - DNA, 15 bp, Homo sapiens
gagtaaaactttatt

SEQ ID NO: 1458390 - DNA, 15 bp, Homo sapiens
ggagtaaaactttat

SEQ ID NO: 1458391 - DNA, 15 bp, Homo sapiens
tggagtaaaacttta

SEQ ID NO: 1458392 - DNA, 15 bp, Homo sapiens
ttggagtaaaacttt

SEQ ID NO: 1458393 - DNA, 15 bp, Homo sapiens
cttggagtaaaactt

SEQ ID NO: 1458394 - DNA, 15 bp, Homo sapiens
gcttggagtaaaact

SEQ ID NO: 1458395 - DNA, 15 bp, Homo sapiens
cgcttggagtaaaac

SEQ ID NO: 1458396 - DNA, 15 bp, Homo sapiens
gcgcttggagtaaaa

SEQ ID NO: 1458397 - DNA, 15 bp, Homo sapiens
agcgcttggagtaaa

SEQ ID NO: 1458398 - DNA, 15 bp, Homo sapiens
gagcgcttggagtaa

SEQ ID NO: 1458399 - DNA, 15 bp, Homo sapiens
agagcgcttggagta

SEQ ID NO: 1458400 - DNA, 15 bp, Homo sapiens
cagagcgcttggagt

SEQ ID NO: 1458401 - DNA, 15 bp, Homo sapiens
ccagagcgcttggag

SEQ ID NO: 1458402 - DNA, 15 bp, Homo sapiens
accagagcgcttgga

SEQ ID NO: 1458403 - DNA, 15 bp, Homo sapiens
taccagagcgcttgg

SEQ ID NO: 1458404 - DNA, 15 bp, Homo sapiens
ctaccagagcgcttg

SEQ ID NO: 1458405 - DNA, 15 bp, Homo sapiens
cctaccagagcgctt

SEQ ID NO: 1458406 - DNA, 15 bp, Homo sapiens
tcctaccagagcgct

SEQ ID NO: 1458407 - DNA, 15 bp, Homo sapiens
ctcctaccagagcgc

SEQ ID NO: 1458408 - DNA, 15 bp, Homo sapiens
cctcctaccagagcg

SEQ ID NO: 1458409 - DNA, 15 bp, Homo sapiens
acctcctaccagagc

SEQ ID NO: 1458410 - DNA, 15 bp, Homo sapiens
cacctcctaccagag

SEQ ID NO: 1458411 - DNA, 15 bp, Homo sapiens
ccacctcctaccaga

SEQ ID NO: 1458412 - DNA, 15 bp, Homo sapiens
tccacctcctaccag

SEQ ID NO: 1458413 - DNA, 15 bp, Homo sapiens
ttccacctcctacca

SEQ ID NO: 1458414 - DNA, 15 bp, Homo sapiens
attccacctcctacc

SEQ ID NO: 1458415 - DNA, 15 bp, Homo sapiens
cattccacctcctac

SEQ ID NO: 1458416 - DNA, 15 bp, Homo sapiens
gcattccacctccta

SEQ ID NO: 1458417 - DNA, 15 bp, Homo sapiens
ggcattccacctcct

SEQ ID NO: 1458418 - DNA, 15 bp, Homo sapiens
tggcattccacctcc

SEQ ID NO: 1458419 - DNA, 15 bp, Homo sapiens
ttggcattccacctc

SEQ ID NO: 1458420 - DNA, 15 bp, Homo sapiens
cttggcattccacct

SEQ ID NO: 1458421 - DNA, 15 bp, Homo sapiens
tcttggcattccacc

SEQ ID NO: 1458422 - DNA, 15 bp, Homo sapiens
ttcttggcattccac

SEQ ID NO: 1458423 - DNA, 15 bp, Homo sapiens
cttcttggcattcca

SEQ ID NO: 1458424 - DNA, 15 bp, Homo sapiens
acttcttggcattcc

SEQ ID NO: 1458425 - DNA, 15 bp, Homo sapiens
aacttcttggcattc

SEQ ID NO: 1458426 - DNA, 15 bp, Homo sapiens
aaacttcttggcatt

SEQ ID NO: 1458427 - DNA, 15 bp, Homo sapiens
gaaacttcttggcat

SEQ ID NO: 1458428 - DNA, 15 bp, Homo sapiens
agaaacttcttggca

SEQ ID NO: 1458429 - DNA, 15 bp, Homo sapiens
cagaaacttcttggc

SEQ ID NO: 1458430 - DNA, 15 bp, Homo sapiens
tcagaaacttcttgg

SEQ ID NO: 1458431 - DNA, 15 bp, Homo sapiens
ttcagaaacttcttg

SEQ ID NO: 1458432 - DNA, 15 bp, Homo sapiens
attcagaaacttctt

SEQ ID NO: 1458433 - DNA, 15 bp, Homo sapiens
tattcagaaacttct

SEQ ID NO: 1458434 - DNA, 15 bp, Homo sapiens
ttattcagaaacttc

SEQ ID NO: 1458435 - DNA, 15 bp, Homo sapiens
tttattcagaaactt

SEQ ID NO: 1458436 - DNA, 15 bp, Homo sapiens
ttttattcagaaact

SEQ ID NO: 1458437 - DNA, 15 bp, Homo sapiens
gttttattcagaaac

SEQ ID NO: 1458438 - DNA, 15 bp, Homo sapiens
tgttttattcagaaa

SEQ ID NO: 1458439 - DNA, 15 bp, Homo sapiens
tttgttttattcaga

SEQ ID NO: 1458440 - DNA, 15 bp, Homo sapiens
atttgttttattcag

SEQ ID NO: 1458441 - DNA, 15 bp, Homo sapiens
tatttgttttattca

SEQ ID NO: 1458442 - DNA, 15 bp, Homo sapiens
atatttgttttattc

SEQ ID NO: 1458443 - DNA, 15 bp, Homo sapiens
gatatttgttttatt

SEQ ID NO: 1458444 - DNA, 15 bp, Homo sapiens
agatatttgttttat

SEQ ID NO: 1458445 - DNA, 15 bp, Homo sapiens
cagatatttgtttta

SEQ ID NO: 1458446 - DNA, 15 bp, Homo sapiens
ccagatatttgtttt

SEQ ID NO: 1458447 - DNA, 15 bp, Homo sapiens
cccagatatttgttt

SEQ ID NO: 1458448 - DNA, 15 bp, Homo sapiens
acccagatatttgtt

SEQ ID NO: 1458449 - DNA, 15 bp, Homo sapiens
gacccagatatttgt

SEQ ID NO: 1458450 - DNA, 15 bp, Homo sapiens
ggacccagatatttg

SEQ ID NO: 1458451 - DNA, 15 bp, Homo sapiens
tggacccagatattt

SEQ ID NO: 1458452 - DNA, 15 bp, Homo sapiens
ctggacccagatatt

SEQ ID NO: 1458453 - DNA, 15 bp, Homo sapiens
gctggacccagatat

SEQ ID NO: 1458454 - DNA, 15 bp, Homo sapiens
tgctggacccagata

SEQ ID NO: 1458455 - DNA, 15 bp, Homo sapiens
atgctggacccagat

SEQ ID NO: 1458456 - DNA, 15 bp, Homo sapiens
aatgctggacccaga

SEQ ID NO: 1458457 - DNA, 15 bp, Homo sapiens
aaatgctggacccag

SEQ ID NO: 1458458 - DNA, 15 bp, Homo sapiens
aaaatgctggaccca

SEQ ID NO: 1458459 - DNA, 15 bp, Homo sapiens
gaaaatgctggaccc

SEQ ID NO: 1458460 - DNA, 15 bp, Homo sapiens
ggaaaatgctggacc

SEQ ID NO: 1458461 - DNA, 15 bp, Homo sapiens
tggaaaatgctggac

SEQ ID NO: 1458462 - DNA, 15 bp, Homo sapiens
ctggaaaatgctgga

SEQ ID NO: 1458463 - DNA, 15 bp, Homo sapiens
actggaaaatgctgg

SEQ ID NO: 1458464 - DNA, 15 bp, Homo sapiens
aactggaaaatgctg

SEQ ID NO: 1458465 - DNA, 15 bp, Homo sapiens
taactggaaaatgct

SEQ ID NO: 1458466 - DNA, 15 bp, Homo sapiens
ataactggaaaatgc

SEQ ID NO: 1458467 - DNA, 15 bp, Homo sapiens
aataactggaaaatg

SEQ ID NO: 1458468 - DNA, 15 bp, Homo sapiens
taataactggaaaat

SEQ ID NO: 1458469 - DNA, 15 bp, Homo sapiens
ataataactggaaaa

SEQ ID NO: 1458470 - DNA, 15 bp, Homo sapiens
aataataactggaaa

SEQ ID NO: 1458471 - DNA, 15 bp, Homo sapiens
aaataataactggaa

SEQ ID NO: 1458472 - DNA, 15 bp, Homo sapiens
aaaataataactgga

SEQ ID NO: 1458473 - DNA, 15 bp, Homo sapiens
aaaaataataactgg

SEQ ID NO: 1458474 - DNA, 15 bp, Homo sapiens
gaaaaataataactg

SEQ ID NO: 1458475 - DNA, 15 bp, Homo sapiens
agaaaaataataact

SEQ ID NO: 1458476 - DNA, 15 bp, Homo sapiens
gagaaaaataataac

SEQ ID NO: 1458477 - DNA, 15 bp, Homo sapiens
agagaaaaataataa

SEQ ID NO: 1458478 - DNA, 15 bp, Homo sapiens
gagagaaaaataata

SEQ ID NO: 1458479 - DNA, 15 bp, Homo sapiens
ggagagaaaaataat

SEQ ID NO: 1458480 - DNA, 15 bp, Homo sapiens
aggagagaaaaataa

SEQ ID NO: 1458481 - DNA, 15 bp, Homo sapiens
gaggagagaaaaata

SEQ ID NO: 1458482 - DNA, 15 bp, Homo sapiens
ggaggagagaaaaat

SEQ ID NO: 1458483 - DNA, 15 bp, Homo sapiens
aggaggagagaaaaa

SEQ ID NO: 1458484 - DNA, 15 bp, Homo sapiens
gaggaggagagaaaa

SEQ ID NO: 1458485 - DNA, 15 bp, Homo sapiens
agaggaggagagaaa

SEQ ID NO: 1458486 - DNA, 15 bp, Homo sapiens
aagaggaggagagaa

SEQ ID NO: 1458487 - DNA, 15 bp, Homo sapiens
gaagaggaggagaga

SEQ ID NO: 1458488 - DNA, 15 bp, Homo sapiens
agaagaggaggagag

SEQ ID NO: 1458489 - DNA, 15 bp, Homo sapiens
aagaagaggaggaga

SEQ ID NO: 1458490 - DNA, 15 bp, Homo sapiens
aaagaagaggaggag

SEQ ID NO: 1458491 - DNA, 15 bp, Homo sapiens
aaaagaagaggagga

SEQ ID NO: 1458492 - DNA, 15 bp, Homo sapiens
aaaaagaagaggagg

SEQ ID NO: 1458493 - DNA, 15 bp, Homo sapiens
taaaaagaagaggag

SEQ ID NO: 1458494 - DNA, 15 bp, Homo sapiens
gtaaaaagaagagga

SEQ ID NO: 1458495 - DNA, 15 bp, Homo sapiens
agtaaaaagaagagg

SEQ ID NO: 1458496 - DNA, 15 bp, Homo sapiens
gagtaaaaagaagag

SEQ ID NO: 1458497 - DNA, 15 bp, Homo sapiens
tgagtaaaaagaaga

SEQ ID NO: 1458498 - DNA, 15 bp, Homo sapiens
gtgagtaaaaagaag

SEQ ID NO: 1458499 - DNA, 15 bp, Homo sapiens
tgtgagtaaaaagaa

SEQ ID NO: 1458500 - DNA, 15 bp, Homo sapiens
atgtgagtaaaaaga

SEQ ID NO: 1458501 - DNA, 15 bp, Homo sapiens
aatgtgagtaaaaag

SEQ ID NO: 1458502 - DNA, 15 bp, Homo sapiens
gaatgtgagtaaaaa

SEQ ID NO: 1458503 - DNA, 15 bp, Homo sapiens
agaatgtgagtaaaa

SEQ ID NO: 1458504 - DNA, 15 bp, Homo sapiens
aagaatgtgagtaaa

SEQ ID NO: 1458505 - DNA, 15 bp, Homo sapiens
aaagaatgtgagtaa

SEQ ID NO: 1458506 - DNA, 15 bp, Homo sapiens
aaaagaatgtgagta

SEQ ID NO: 1458507 - DNA, 15 bp, Homo sapiens
aaaaagaatgtgagt

SEQ ID NO: 1458508 - DNA, 15 bp, Homo sapiens
aaaaaagaatgtgag

SEQ ID NO: 1458509 - DNA, 15 bp, Homo sapiens
caaaaaagaatgtga

SEQ ID NO: 1458510 - DNA, 15 bp, Homo sapiens
ccaaaaaagaatgtg

SEQ ID NO: 1458511 - DNA, 15 bp, Homo sapiens
accaaaaaagaatgt

SEQ ID NO: 1458512 - DNA, 15 bp, Homo sapiens
taccaaaaaagaatg

SEQ ID NO: 1458513 - DNA, 15 bp, Homo sapiens
gtaccaaaaaagaat

SEQ ID NO: 1458514 - DNA, 15 bp, Homo sapiens
tgtaccaaaaaagaa

SEQ ID NO: 1458515 - DNA, 15 bp, Homo sapiens
atgtaccaaaaaaga

SEQ ID NO: 1458516 - DNA, 15 bp, Homo sapiens
catgtaccaaaaaag

SEQ ID NO: 1458517 - DNA, 15 bp, Homo sapiens
acatgtaccaaaaaa

SEQ ID NO: 1458518 - DNA, 15 bp, Homo sapiens
aacatgtaccaaaaa

SEQ ID NO: 1458519 - DNA, 15 bp, Homo sapiens
gaacatgtaccaaaa

SEQ ID NO: 1458520 - DNA, 15 bp, Homo sapiens
agaacatgtaccaaa

SEQ ID NO: 1458521 - DNA, 15 bp, Homo sapiens
aagaacatgtaccaa

SEQ ID NO: 1458522 - DNA, 15 bp, Homo sapiens
gaagaacatgtacca

SEQ ID NO: 1458523 - DNA, 15 bp, Homo sapiens
tgaagaacatgtacc

SEQ ID NO: 1458524 - DNA, 15 bp, Homo sapiens
ttgaagaacatgtac

SEQ ID NO: 1458525 - DNA, 15 bp, Homo sapiens
tttgaagaacatgta

SEQ ID NO: 1458526 - DNA, 15 bp, Homo sapiens
gtttgaagaacatgt

SEQ ID NO: 1458527 - DNA, 15 bp, Homo sapiens
agtttgaagaacatg

SEQ ID NO: 1458528 - DNA, 15 bp, Homo sapiens
cagtttgaagaacat

SEQ ID NO: 1458529 - DNA, 15 bp, Homo sapiens
acagtttgaagaaca

SEQ ID NO: 1458530 - DNA, 15 bp, Homo sapiens
cacagtttgaagaac

SEQ ID NO: 1458531 - DNA, 15 bp, Homo sapiens
acacagtttgaagaa

SEQ ID NO: 1458532 - DNA, 15 bp, Homo sapiens
aacacagtttgaaga

SEQ ID NO: 1458533 - DNA, 15 bp, Homo sapiens
aaacacagtttgaag

SEQ ID NO: 1458534 - DNA, 15 bp, Homo sapiens
gaaacacagtttgaa

SEQ ID NO: 1458535 - DNA, 15 bp, Homo sapiens
tgaaacacagtttga

SEQ ID NO: 1458536 - DNA, 15 bp, Homo sapiens
ctgaaacacagtttg

SEQ ID NO: 1458537 - DNA, 15 bp, Homo sapiens
tctgaaacacagttt

SEQ ID NO: 1458538 - DNA, 15 bp, Homo sapiens
ttctgaaacacagtt

SEQ ID NO: 1458539 - DNA, 15 bp, Homo sapiens
tttctgaaacacagt

SEQ ID NO: 1458540 - DNA, 15 bp, Homo sapiens
ttttctgaaacacag

SEQ ID NO: 1458541 - DNA, 15 bp, Homo sapiens
attttctgaaacaca

SEQ ID NO: 1458542 - DNA, 15 bp, Homo sapiens
tattttctgaaacac

SEQ ID NO: 1458543 - DNA, 15 bp, Homo sapiens
atattttctgaaaca

SEQ ID NO: 1458544 - DNA, 15 bp, Homo sapiens
catattttctgaaac

SEQ ID NO: 1458545 - DNA, 15 bp, Homo sapiens
acatattttctgaaa

SEQ ID NO: 1458546 - DNA, 15 bp, Homo sapiens
tacatattttctgaa

SEQ ID NO: 1458547 - DNA, 15 bp, Homo sapiens
atacatattttctga

SEQ ID NO: 1458548 - DNA, 15 bp, Homo sapiens
catacatattttctg

SEQ ID NO: 1458549 - DNA, 15 bp, Homo sapiens
tcatacatattttct

SEQ ID NO: 1458550 - DNA, 15 bp, Homo sapiens
atcatacatattttc

SEQ ID NO: 1458551 - DNA, 15 bp, Homo sapiens
aatcatacatatttt

SEQ ID NO: 1458552 - DNA, 15 bp, Homo sapiens
gaatcatacatattt

SEQ ID NO: 1458553 - DNA, 15 bp, Homo sapiens
ggaatcatacatatt

SEQ ID NO: 1458554 - DNA, 15 bp, Homo sapiens
gggaatcatacatat

SEQ ID NO: 1458555 - DNA, 15 bp, Homo sapiens
tgggaatcatacata

SEQ ID NO: 1458556 - DNA, 15 bp, Homo sapiens
gtgggaatcatacat

SEQ ID NO: 1458557 - DNA, 15 bp, Homo sapiens
ggtgggaatcataca

SEQ ID NO: 1458558 - DNA, 15 bp, Homo sapiens
tggtgggaatcatac

SEQ ID NO: 1458559 - DNA, 15 bp, Homo sapiens
gtggtgggaatcata

SEQ ID NO: 1458560 - DNA, 15 bp, Homo sapiens
agtggtgggaatcat

SEQ ID NO: 1458561 - DNA, 15 bp, Homo sapiens
cagtggtgggaatca

SEQ ID NO: 1458562 - DNA, 15 bp, Homo sapiens
acagtggtgggaatc

SEQ ID NO: 1458563 - DNA, 15 bp, Homo sapiens
gacagtggtgggaat

SEQ ID NO: 1458564 - DNA, 15 bp, Homo sapiens
tgacagtggtgggaa

SEQ ID NO: 1458565 - DNA, 15 bp, Homo sapiens
atgacagtggtggga

SEQ ID NO: 1458566 - DNA, 15 bp, Homo sapiens
gatgacagtggtggg

SEQ ID NO: 1458567 - DNA, 15 bp, Homo sapiens
agatgacagtggtgg

SEQ ID NO: 1458568 - DNA, 15 bp, Homo sapiens
cagatgacagtggtg

SEQ ID NO: 1458569 - DNA, 15 bp, Homo sapiens
ccagatgacagtggt

SEQ ID NO: 1458570 - DNA, 15 bp, Homo sapiens
cccagatgacagtgg

SEQ ID NO: 1458571 - DNA, 15 bp, Homo sapiens
gcccagatgacagtg

SEQ ID NO: 1458572 - DNA, 15 bp, Homo sapiens
agcccagatgacagt

SEQ ID NO: 1458573 - DNA, 15 bp, Homo sapiens
tagcccagatgacag

SEQ ID NO: 1458574 - DNA, 15 bp, Homo sapiens
atagcccagatgaca

SEQ ID NO: 1458575 - DNA, 15 bp, Homo sapiens
aatagcccagatgac

SEQ ID NO: 1458576 - DNA, 15 bp, Homo sapiens
aaatagcccagatga

SEQ ID NO: 1458577 - DNA, 15 bp, Homo sapiens
aaaatagcccagatg

SEQ ID NO: 1458578 - DNA, 15 bp, Homo sapiens
aaaaatagcccagat

SEQ ID NO: 1458579 - DNA, 15 bp, Homo sapiens
gaaaaatagcccaga

SEQ ID NO: 1458580 - DNA, 15 bp, Homo sapiens
agaaaaatagcccag

SEQ ID NO: 1458581 - DNA, 15 bp, Homo sapiens
cagaaaaatagccca

SEQ ID NO: 1458582 - DNA, 15 bp, Homo sapiens
ccagaaaaatagccc

SEQ ID NO: 1458583 - DNA, 15 bp, Homo sapiens
gccagaaaaatagcc

SEQ ID NO: 1458584 - DNA, 15 bp, Homo sapiens
agccagaaaaatagc

SEQ ID NO: 1458585 - DNA, 15 bp, Homo sapiens
gagccagaaaaatag

SEQ ID NO: 1458586 - DNA, 15 bp, Homo sapiens
tgagccagaaaaata

SEQ ID NO: 1458587 - DNA, 15 bp, Homo sapiens
ttgagccagaaaaat

SEQ ID NO: 1458588 - DNA, 15 bp, Homo sapiens
attgagccagaaaaa

SEQ ID NO: 1458589 - DNA, 15 bp, Homo sapiens
aattgagccagaaaa

SEQ ID NO: 1458590 - DNA, 15 bp, Homo sapiens
caattgagccagaaa

SEQ ID NO: 1458591 - DNA, 15 bp, Homo sapiens
gcaattgagccagaa

SEQ ID NO: 1458592 - DNA, 15 bp, Homo sapiens
tgcaattgagccaga

SEQ ID NO: 1458593 - DNA, 15 bp, Homo sapiens
gtgcaattgagccag

SEQ ID NO: 1458594 - DNA, 15 bp, Homo sapiens
tgtgcaattgagcca

SEQ ID NO: 1458595 - DNA, 15 bp, Homo sapiens
ttgtgcaattgagcc

SEQ ID NO: 1458596 - DNA, 15 bp, Homo sapiens
attgtgcaattgagc

SEQ ID NO: 1458597 - DNA, 15 bp, Homo sapiens
tattgtgcaattgag

SEQ ID NO: 1458598 - DNA, 15 bp, Homo sapiens
atattgtgcaattga

SEQ ID NO: 1458599 - DNA, 15 bp, Homo sapiens
aatattgtgcaattg

SEQ ID NO: 1458600 - DNA, 15 bp, Homo sapiens
caatattgtgcaatt

SEQ ID NO: 1458601 - DNA, 15 bp, Homo sapiens
acaatattgtgcaat

SEQ ID NO: 1458602 - DNA, 15 bp, Homo sapiens
cacaatattgtgcaa

SEQ ID NO: 1458603 - DNA, 15 bp, Homo sapiens
tcacaatattgtgca

SEQ ID NO: 1458604 - DNA, 15 bp, Homo sapiens
ttcacaatattgtgc

SEQ ID NO: 1458605 - DNA, 15 bp, Homo sapiens
tttcacaatattgtg

SEQ ID NO: 1458606 - DNA, 15 bp, Homo sapiens
ctttcacaatattgt

SEQ ID NO: 1458607 - DNA, 15 bp, Homo sapiens
gctttcacaatattg

SEQ ID NO: 1458608 - DNA, 15 bp, Homo sapiens
tgctttcacaatatt

SEQ ID NO: 1458609 - DNA, 15 bp, Homo sapiens
atgctttcacaatat

SEQ ID NO: 1458610 - DNA, 15 bp, Homo sapiens
aatgctttcacaata

SEQ ID NO: 1458611 - DNA, 15 bp, Homo sapiens
gaatgctttcacaat

SEQ ID NO: 1458612 - DNA, 15 bp, Homo sapiens
tgaatgctttcacaa

SEQ ID NO: 1458613 - DNA, 15 bp, Homo sapiens
ttgaatgctttcaca

SEQ ID NO: 1458614 - DNA, 15 bp, Homo sapiens
gttgaatgctttcac

SEQ ID NO: 1458615 - DNA, 15 bp, Homo sapiens
tgttgaatgctttca

SEQ ID NO: 1458616 - DNA, 15 bp, Homo sapiens
atgttgaatgctttc

SEQ ID NO: 1458617 - DNA, 15 bp, Homo sapiens
gatgttgaatgcttt

SEQ ID NO: 1458618 - DNA, 15 bp, Homo sapiens
tgatgttgaatgctt

SEQ ID NO: 1458619 - DNA, 15 bp, Homo sapiens
ctgatgttgaatgct

SEQ ID NO: 1458620 - DNA, 15 bp, Homo sapiens
actgatgttgaatgc

SEQ ID NO: 1458621 - DNA, 15 bp, Homo sapiens
aactgatgttgaatg

SEQ ID NO: 1458622 - DNA, 15 bp, Homo sapiens
taactgatgttgaat

SEQ ID NO: 1458623 - DNA, 15 bp, Homo sapiens
ttaactgatgttgaa

SEQ ID NO: 1458624 - DNA, 15 bp, Homo sapiens
cttaactgatgttga

SEQ ID NO: 1458625 - DNA, 15 bp, Homo sapiens
tcttaactgatgttg

SEQ ID NO: 1458626 - DNA, 15 bp, Homo sapiens
ctcttaactgatgtt

SEQ ID NO: 1458627 - DNA, 15 bp, Homo sapiens
actcttaactgatgt

SEQ ID NO: 1458628 - DNA, 15 bp, Homo sapiens
cactcttaactgatg

SEQ ID NO: 1458629 - DNA, 15 bp, Homo sapiens
tcactcttaactgat

SEQ ID NO: 1458630 - DNA, 15 bp, Homo sapiens
gtcactcttaactga

SEQ ID NO: 1458631 - DNA, 15 bp, Homo sapiens
agtcactcttaactg

SEQ ID NO: 1458632 - DNA, 15 bp, Homo sapiens
cagtcactcttaact

SEQ ID NO: 1458633 - DNA, 15 bp, Homo sapiens
ccagtcactcttaac

SEQ ID NO: 1458634 - DNA, 15 bp, Homo sapiens
tccagtcactcttaa

SEQ ID NO: 1458635 - DNA, 15 bp, Homo sapiens
ctccagtcactctta

SEQ ID NO: 1458636 - DNA, 15 bp, Homo sapiens
actccagtcactctt

SEQ ID NO: 1458637 - DNA, 15 bp, Homo sapiens
tactccagtcactct

SEQ ID NO: 1458638 - DNA, 15 bp, Homo sapiens
atactccagtcactc

SEQ ID NO: 1458639 - DNA, 15 bp, Homo sapiens
catactccagtcact

SEQ ID NO: 1458640 - DNA, 15 bp, Homo sapiens
tcatactccagtcac

SEQ ID NO: 1458641 - DNA, 15 bp, Homo sapiens
ttcatactccagtca

SEQ ID NO: 1458642 - DNA, 15 bp, Homo sapiens
attcatactccagtc

SEQ ID NO: 1458643 - DNA, 15 bp, Homo sapiens
tattcatactccagt

SEQ ID NO: 1458644 - DNA, 15 bp, Homo sapiens
gtattcatactccag

SEQ ID NO: 1458645 - DNA, 15 bp, Homo sapiens
tgtattcatactcca

SEQ ID NO: 1458646 - DNA, 15 bp, Homo sapiens
ttgtattcatactcc

SEQ ID NO: 1458647 - DNA, 15 bp, Homo sapiens
tttgtattcatactc

SEQ ID NO: 1458648 - DNA, 15 bp, Homo sapiens
gtttgtattcatact

SEQ ID NO: 1458649 - DNA, 15 bp, Homo sapiens
cgtttgtattcatac

SEQ ID NO: 1458650 - DNA, 15 bp, Homo sapiens
tcgtttgtattcata

SEQ ID NO: 1458651 - DNA, 15 bp, Homo sapiens
ctcgtttgtattcat

SEQ ID NO: 1458652 - DNA, 15 bp, Homo sapiens
cctcgtttgtattca

SEQ ID NO: 1458653 - DNA, 15 bp, Homo sapiens
tcctcgtttgtattc

SEQ ID NO: 1458654 - DNA, 15 bp, Homo sapiens
atcctcgtttgtatt

SEQ ID NO: 1458655 - DNA, 15 bp, Homo sapiens
gatcctcgtttgtat

SEQ ID NO: 1458656 - DNA, 15 bp, Homo sapiens
ggatcctcgtttgta

SEQ ID NO: 1458657 - DNA, 15 bp, Homo sapiens
tggatcctcgtttgt

SEQ ID NO: 1458658 - DNA, 15 bp, Homo sapiens
gtggatcctcgtttg

SEQ ID NO: 1458659 - DNA, 15 bp, Homo sapiens
cgtggatcctcgttt

SEQ ID NO: 1458660 - DNA, 15 bp, Homo sapiens
gcgtggatcctcgtt

SEQ ID NO: 1458661 - DNA, 15 bp, Homo sapiens
agcgtggatcctcgt

SEQ ID NO: 1458662 - DNA, 15 bp, Homo sapiens
cagcgtggatcctcg

SEQ ID NO: 1458663 - DNA, 15 bp, Homo sapiens
tcagcgtggatcctc

SEQ ID NO: 1458664 - DNA, 15 bp, Homo sapiens
ttcagcgtggatcct

SEQ ID NO: 1458665 - DNA, 15 bp, Homo sapiens
cttcagcgtggatcc

SEQ ID NO: 1458666 - DNA, 15 bp, Homo sapiens
gcttcagcgtggatc

SEQ ID NO: 1458667 - DNA, 15 bp, Homo sapiens
tgcttcagcgtggat

SEQ ID NO: 1458668 - DNA, 15 bp, Homo sapiens
atgcttcagcgtgga

SEQ ID NO: 1458669 - DNA, 15 bp, Homo sapiens
aatgcttcagcgtgg

SEQ ID NO: 1458670 - DNA, 15 bp, Homo sapiens
aaatgcttcagcgtg

SEQ ID NO: 1458671 - DNA, 15 bp, Homo sapiens
aaaatgcttcagcgt

SEQ ID NO: 1458672 - DNA, 15 bp, Homo sapiens
taaaatgcttcagcg

SEQ ID NO: 1458673 - DNA, 15 bp, Homo sapiens
gtaaaatgcttcagc

SEQ ID NO: 1458674 - DNA, 15 bp, Homo sapiens
agtaaaatgcttcag

SEQ ID NO: 1458675 - DNA, 15 bp, Homo sapiens
tagtaaaatgcttca

SEQ ID NO: 1458676 - DNA, 15 bp, Homo sapiens
ctagtaaaatgcttc

SEQ ID NO: 1458677 - DNA, 15 bp, Homo sapiens
tctagtaaaatgctt

SEQ ID NO: 1458678 - DNA, 15 bp, Homo sapiens
ttctagtaaaatgct

SEQ ID NO: 1458679 - DNA, 15 bp, Homo sapiens
tttctagtaaaatgc

SEQ ID NO: 1458680 - DNA, 15 bp, Homo sapiens
ttttctagtaaaatg

SEQ ID NO: 1458681 - DNA, 15 bp, Homo sapiens
attttctagtaaaat

SEQ ID NO: 1458682 - DNA, 15 bp, Homo sapiens
aattttctagtaaaa

SEQ ID NO: 1458683 - DNA, 15 bp, Homo sapiens
taattttctagtaaa

SEQ ID NO: 1458684 - DNA, 15 bp, Homo sapiens
ctaattttctagtaa

SEQ ID NO: 1458685 - DNA, 15 bp, Homo sapiens
actaattttctagta

SEQ ID NO: 1458686 - DNA, 15 bp, Homo sapiens
aactaattttctagt

SEQ ID NO: 1458687 - DNA, 15 bp, Homo sapiens
caactaattttctag

SEQ ID NO: 1458688 - DNA, 15 bp, Homo sapiens
gcaactaattttcta

SEQ ID NO: 1458689 - DNA, 15 bp, Homo sapiens
tgcaactaattttct

SEQ ID NO: 1458690 - DNA, 15 bp, Homo sapiens
ttgcaactaattttc

SEQ ID NO: 1458691 - DNA, 15 bp, Homo sapiens
tttgcaactaatttt

SEQ ID NO: 1458692 - DNA, 15 bp, Homo sapiens
ttttgcaactaattt

SEQ ID NO: 1458693 - DNA, 15 bp, Homo sapiens
tttttgcaactaatt

SEQ ID NO: 1458694 - DNA, 15 bp, Homo sapiens
gtttttgcaactaat

SEQ ID NO: 1458695 - DNA, 15 bp, Homo sapiens
tgtttttgcaactaa

SEQ ID NO: 1458696 - DNA, 15 bp, Homo sapiens
atgtttttgcaacta

SEQ ID NO: 1458697 - DNA, 15 bp, Homo sapiens
tatgtttttgcaact

SEQ ID NO: 1458698 - DNA, 15 bp, Homo sapiens
atatgtttttgcaac

SEQ ID NO: 1458699 - DNA, 15 bp, Homo sapiens
aatatgtttttgcaa

SEQ ID NO: 1458700 - DNA, 15 bp, Homo sapiens
taatatgtttttgca

SEQ ID NO: 1458701 - DNA, 15 bp, Homo sapiens
gtaatatgtttttgc

SEQ ID NO: 1458702 - DNA, 15 bp, Homo sapiens
agtaatatgtttttg

SEQ ID NO: 1458703 - DNA, 15 bp, Homo sapiens
aagtaatatgttttt

SEQ ID NO: 1458704 - DNA, 15 bp, Homo sapiens
taagtaatatgtttt

SEQ ID NO: 1458705 - DNA, 15 bp, Homo sapiens
ataagtaatatgttt

SEQ ID NO: 1458706 - DNA, 15 bp, Homo sapiens
cataagtaatatgtt

SEQ ID NO: 1458707 - DNA, 15 bp, Homo sapiens
ccataagtaatatgt

SEQ ID NO: 1458708 - DNA, 15 bp, Homo sapiens
tccataagtaatatg

SEQ ID NO: 1458709 - DNA, 15 bp, Homo sapiens
ttccataagtaatat

SEQ ID NO: 1458710 - DNA, 15 bp, Homo sapiens
tttccataagtaata

SEQ ID NO: 1458711 - DNA, 15 bp, Homo sapiens
atttccataagtaat

SEQ ID NO: 1458712 - DNA, 15 bp, Homo sapiens
aatttccataagtaa

SEQ ID NO: 1458713 - DNA, 15 bp, Homo sapiens
taatttccataagta

SEQ ID NO: 1458714 - DNA, 15 bp, Homo sapiens
gtaatttccataagt

SEQ ID NO: 1458715 - DNA, 15 bp, Homo sapiens
tgtaatttccataag

SEQ ID NO: 1458716 - DNA, 15 bp, Homo sapiens
atgtaatttccataa

SEQ ID NO: 1458717 - DNA, 15 bp, Homo sapiens
catgtaatttccata

SEQ ID NO: 1458718 - DNA, 15 bp, Homo sapiens
gcatgtaatttccat

SEQ ID NO: 1458719 - DNA, 15 bp, Homo sapiens
tgcatgtaatttcca

SEQ ID NO: 1458720 - DNA, 15 bp, Homo sapiens
gtgcatgtaatttcc

SEQ ID NO: 1458721 - DNA, 15 bp, Homo sapiens
tgtgcatgtaatttc

SEQ ID NO: 1458722 - DNA, 15 bp, Homo sapiens
atgtgcatgtaattt

SEQ ID NO: 1458723 - DNA, 15 bp, Homo sapiens
aatgtgcatgtaatt

SEQ ID NO: 1458724 - DNA, 15 bp, Homo sapiens
aaatgtgcatgtaat

SEQ ID NO: 1458725 - DNA, 15 bp, Homo sapiens
taaatgtgcatgtaa

SEQ ID NO: 1458726 - DNA, 15 bp, Homo sapiens
ataaatgtgcatgta

SEQ ID NO: 1458727 - DNA, 15 bp, Homo sapiens
aataaatgtgcatgt

SEQ ID NO: 1458728 - DNA, 15 bp, Homo sapiens
taataaatgtgcatg

SEQ ID NO: 1458729 - DNA, 15 bp, Homo sapiens
ttaataaatgtgcat

SEQ ID NO: 1458730 - DNA, 15 bp, Homo sapiens
tttaataaatgtgca

SEQ ID NO: 1458731 - DNA, 15 bp, Homo sapiens
ttttaataaatgtgc

SEQ ID NO: 1458732 - DNA, 15 bp, Homo sapiens
attttaataaatgtg

SEQ ID NO: 1458733 - DNA, 15 bp, Homo sapiens
tattttaataaatgt

SEQ ID NO: 1458734 - DNA, 15 bp, Homo sapiens
ttattttaataaatg

SEQ ID NO: 1458735 - DNA, 15 bp, Homo sapiens
attattttaataaat

SEQ ID NO: 1458736 - DNA, 15 bp, Homo sapiens
cattattttaataaa

SEQ ID NO: 1458737 - DNA, 15 bp, Homo sapiens
acattattttaataa

SEQ ID NO: 1458738 - DNA, 15 bp, Homo sapiens
aacattattttaata

SEQ ID NO: 1458739 - DNA, 15 bp, Homo sapiens
taacattattttaat

SEQ ID NO: 1458740 - DNA, 15 bp, Homo sapiens
ttaacattattttaa

SEQ ID NO: 1458741 - DNA, 15 bp, Homo sapiens
tttaacattatttta

SEQ ID NO: 1458742 - DNA, 15 bp, Homo sapiens
ttttaacattatttt

SEQ ID NO: 1458743 - DNA, 15 bp, Homo sapiens
tttttaacattattt

SEQ ID NO: 1458744 - DNA, 15 bp, Homo sapiens
ttttttaacattatt

SEQ ID NO: 1458745 - DNA, 15 bp, Homo sapiens
attttttaacattat

SEQ ID NO: 1458746 - DNA, 15 bp, Homo sapiens
gattttttaacatta

SEQ ID NO: 1458747 - DNA, 15 bp, Homo sapiens
ggattttttaacatt

SEQ ID NO: 1458748 - DNA, 15 bp, Homo sapiens
tggattttttaacat

SEQ ID NO: 1458749 - DNA, 15 bp, Homo sapiens
ttggattttttaaca

SEQ ID NO: 1458750 - DNA, 15 bp, Homo sapiens
cttggattttttaac

SEQ ID NO: 1458751 - DNA, 15 bp, Homo sapiens
acttggattttttaa

SEQ ID NO: 1458752 - DNA, 15 bp, Homo sapiens
gacttggatttttta

SEQ ID NO: 1458753 - DNA, 15 bp, Homo sapiens
ggacttggatttttt

SEQ ID NO: 1458754 - DNA, 15 bp, Homo sapiens
gggacttggattttt

SEQ ID NO: 1458755 - DNA, 15 bp, Homo sapiens
agggacttggatttt

SEQ ID NO: 1458756 - DNA, 15 bp, Homo sapiens
gagggacttggattt

SEQ ID NO: 1458757 - DNA, 15 bp, Homo sapiens
tgagggacttggatt

SEQ ID NO: 1458758 - DNA, 15 bp, Homo sapiens
gtgagggacttggat

SEQ ID NO: 1458759 - DNA, 15 bp, Homo sapiens
ggtgagggacttgga

SEQ ID NO: 1458760 - DNA, 15 bp, Homo sapiens
gggtgagggacttgg

SEQ ID NO: 1458761 - DNA, 15 bp, Homo sapiens
agggtgagggacttg

SEQ ID NO: 1458762 - DNA, 15 bp, Homo sapiens
cagggtgagggactt

SEQ ID NO: 1458763 - DNA, 15 bp, Homo sapiens
tcagggtgagggact

SEQ ID NO: 1458764 - DNA, 15 bp, Homo sapiens
ttcagggtgagggac

SEQ ID NO: 1458765 - DNA, 15 bp, Homo sapiens
attcagggtgaggga

SEQ ID NO: 1458766 - DNA, 15 bp, Homo sapiens
gattcagggtgaggg

SEQ ID NO: 1458767 - DNA, 15 bp, Homo sapiens
ggattcagggtgagg

SEQ ID NO: 1458768 - DNA, 15 bp, Homo sapiens
aggattcagggtgag

SEQ ID NO: 1458769 - DNA, 15 bp, Homo sapiens
aaggattcagggtga

SEQ ID NO: 1458770 - DNA, 15 bp, Homo sapiens
aaaggattcagggtg

SEQ ID NO: 1458771 - DNA, 15 bp, Homo sapiens
aaaaggattcagggt

SEQ ID NO: 1458772 - DNA, 15 bp, Homo sapiens
aaaaaggattcaggg

SEQ ID NO: 1458773 - DNA, 15 bp, Homo sapiens
gaaaaaggattcagg

SEQ ID NO: 1458774 - DNA, 15 bp, Homo sapiens
agaaaaaggattcag

SEQ ID NO: 1458775 - DNA, 15 bp, Homo sapiens
aagaaaaaggattca

SEQ ID NO: 1458776 - DNA, 15 bp, Homo sapiens
aaagaaaaaggattc

SEQ ID NO: 1458777 - DNA, 15 bp, Homo sapiens
aaaagaaaaaggatt

SEQ ID NO: 1458778 - DNA, 15 bp, Homo sapiens
aaaaagaaaaaggat

SEQ ID NO: 1458779 - DNA, 15 bp, Homo sapiens
ttaaaaaaaagaaaa

SEQ ID NO: 1458780 - DNA, 15 bp, Homo sapiens
gttaaaaaaaagaaa

SEQ ID NO: 1458781 - DNA, 15 bp, Homo sapiens
tgttaaaaaaaagaa

SEQ ID NO: 1458782 - DNA, 15 bp, Homo sapiens
atgttaaaaaaaaga

SEQ ID NO: 1458783 - DNA, 15 bp, Homo sapiens
gatgttaaaaaaaag

SEQ ID NO: 1458784 - DNA, 15 bp, Homo sapiens
tgatgttaaaaaaaa

SEQ ID NO: 1458785 - DNA, 15 bp, Homo sapiens
ttgatgttaaaaaaa

SEQ ID NO: 1458786 - DNA, 15 bp, Homo sapiens
tttgatgttaaaaaa

SEQ ID NO: 1458787 - DNA, 15 bp, Homo sapiens
ttttgatgttaaaaa

SEQ ID NO: 1458788 - DNA, 15 bp, Homo sapiens
gttttgatgttaaaa

SEQ ID NO: 1458789 - DNA, 15 bp, Homo sapiens
ggttttgatgttaaa

SEQ ID NO: 1458790 - DNA, 15 bp, Homo sapiens
tggttttgatgttaa

SEQ ID NO: 1458791 - DNA, 15 bp, Homo sapiens
atggttttgatgtta

SEQ ID NO: 1458792 - DNA, 15 bp, Homo sapiens
aatggttttgatgtt

SEQ ID NO: 1458793 - DNA, 15 bp, Homo sapiens
aaatggttttgatgt

SEQ ID NO: 1458794 - DNA, 15 bp, Homo sapiens
aaaatggttttgatg

SEQ ID NO: 1458795 - DNA, 15 bp, Homo sapiens
aaaaatggttttgat

SEQ ID NO: 1458796 - DNA, 15 bp, Homo sapiens
aaaaaatggttttga

SEQ ID NO: 1458797 - DNA, 15 bp, Homo sapiens
aaaaaaatggttttg

SEQ ID NO: 1458798 - DNA, 15 bp, Homo sapiens
aaaaaaaatggtttt

SEQ ID NO: 1458799 - DNA, 15 bp, Homo sapiens
aaaaaaaaatggttt

SEQ ID NO: 1458800 - DNA, 15 bp, Homo sapiens
gaaaaaaaaatggtt

SEQ ID NO: 1458801 - DNA, 15 bp, Homo sapiens
agaaaaaaaaatggt

SEQ ID NO: 1458802 - DNA, 15 bp, Homo sapiens
aagaaaaaaaaatgg

SEQ ID NO: 1458803 - DNA, 15 bp, Homo sapiens
aaagaaaaaaaaatg

SEQ ID NO: 1458804 - DNA, 15 bp, Homo sapiens
aaaagaaaaaaaaat

SEQ ID NO: 1458805 - DNA, 15 bp, Homo sapiens
caaaagaaaaaaaaa

SEQ ID NO: 1458806 - DNA, 15 bp, Homo sapiens
ccaaaagaaaaaaaa

SEQ ID NO: 1458807 - DNA, 15 bp, Homo sapiens
tccaaaagaaaaaaa

SEQ ID NO: 1458808 - DNA, 15 bp, Homo sapiens
ctccaaaagaaaaaa

SEQ ID NO: 1458809 - DNA, 15 bp, Homo sapiens
cctccaaaagaaaaa

SEQ ID NO: 1458810 - DNA, 15 bp, Homo sapiens
gcctccaaaagaaaa

SEQ ID NO: 1458811 - DNA, 15 bp, Homo sapiens
tgcctccaaaagaaa

SEQ ID NO: 1458812 - DNA, 15 bp, Homo sapiens
ctgcctccaaaagaa

SEQ ID NO: 1458813 - DNA, 15 bp, Homo sapiens
cctgcctccaaaaga

SEQ ID NO: 1458814 - DNA, 15 bp, Homo sapiens
ccctgcctccaaaag

SEQ ID NO: 1458815 - DNA, 15 bp, Homo sapiens
accctgcctccaaaa

SEQ ID NO: 1458816 - DNA, 15 bp, Homo sapiens
caccctgcctccaaa

SEQ ID NO: 1458817 - DNA, 15 bp, Homo sapiens
acaccctgcctccaa

SEQ ID NO: 1458818 - DNA, 15 bp, Homo sapiens
gacaccctgcctcca

SEQ ID NO: 1458819 - DNA, 15 bp, Homo sapiens
tgacaccctgcctcc

SEQ ID NO: 1458820 - DNA, 15 bp, Homo sapiens
gtgacaccctgcctc

SEQ ID NO: 1458821 - DNA, 15 bp, Homo sapiens
agtgacaccctgcct

SEQ ID NO: 1458822 - DNA, 15 bp, Homo sapiens
gagtgacaccctgcc

SEQ ID NO: 1458823 - DNA, 15 bp, Homo sapiens
agagtgacaccctgc

SEQ ID NO: 1458824 - DNA, 15 bp, Homo sapiens
cagagtgacaccctg

SEQ ID NO: 1458825 - DNA, 15 bp, Homo sapiens
acagagtgacaccct

SEQ ID NO: 1458826 - DNA, 15 bp, Homo sapiens
gacagagtgacaccc

SEQ ID NO: 1458827 - DNA, 15 bp, Homo sapiens
tgacagagtgacacc

SEQ ID NO: 1458828 - DNA, 15 bp, Homo sapiens
gtgacagagtgacac

SEQ ID NO: 1458829 - DNA, 15 bp, Homo sapiens
ggtgacagagtgaca

SEQ ID NO: 1458830 - DNA, 15 bp, Homo sapiens
gggtgacagagtgac

SEQ ID NO: 1458831 - DNA, 15 bp, Homo sapiens
ttgggtgacagagtg

SEQ ID NO: 1458832 - DNA, 15 bp, Homo sapiens
gctgcactccagctt

SEQ ID NO: 1458833 - DNA, 15 bp, Homo sapiens
tgctgcactccagct

SEQ ID NO: 1458834 - DNA, 15 bp, Homo sapiens
ctgctgcactccagc

SEQ ID NO: 1458835 - DNA, 15 bp, Homo sapiens
gctgctgcactccag

SEQ ID NO: 1458836 - DNA, 15 bp, Homo sapiens
agctgctgcactcca

SEQ ID NO: 1458837 - DNA, 15 bp, Homo sapiens
aagctgctgcactcc

SEQ ID NO: 1458838 - DNA, 15 bp, Homo sapiens
caagctgctgcactc

SEQ ID NO: 1458839 - DNA, 15 bp, Homo sapiens
tcaagctgctgcact

SEQ ID NO: 1458840 - DNA, 15 bp, Homo sapiens
atcaagctgctgcac

SEQ ID NO: 1458841 - DNA, 15 bp, Homo sapiens
gatcaagctgctgca

SEQ ID NO: 1458842 - DNA, 15 bp, Homo sapiens
cgatcaagctgctgc

SEQ ID NO: 1458843 - DNA, 15 bp, Homo sapiens
acgatcaagctgctg

SEQ ID NO: 1458844 - DNA, 15 bp, Homo sapiens
cacgatcaagctgct

SEQ ID NO: 1458845 - DNA, 15 bp, Homo sapiens
ccacgatcaagctgc

SEQ ID NO: 1458846 - DNA, 15 bp, Homo sapiens
gccacgatcaagctg

SEQ ID NO: 1458847 - DNA, 15 bp, Homo sapiens
agccacgatcaagct

SEQ ID NO: 1458848 - DNA, 15 bp, Homo sapiens
gagccacgatcaagc

SEQ ID NO: 1458849 - DNA, 15 bp, Homo sapiens
tgagccacgatcaag

SEQ ID NO: 1458850 - DNA, 15 bp, Homo sapiens
gtgagccacgatcaa

SEQ ID NO: 1458851 - DNA, 15 bp, Homo sapiens
agtgagccacgatca

SEQ ID NO: 1458852 - DNA, 15 bp, Homo sapiens
cagtgagccacgatc

SEQ ID NO: 1458853 - DNA, 15 bp, Homo sapiens
gcagtgagccacgat

SEQ ID NO: 1458854 - DNA, 15 bp, Homo sapiens
tgcagtgagccacga

SEQ ID NO: 1458855 - DNA, 15 bp, Homo sapiens
ctgcagtgagccacg

SEQ ID NO: 1458856 - DNA, 15 bp, Homo sapiens
gctgcagtgagccac

SEQ ID NO: 1458857 - DNA, 15 bp, Homo sapiens
gtcgaggctgcagtg

SEQ ID NO: 1458858 - DNA, 15 bp, Homo sapiens
ggtcgaggctgcagt

SEQ ID NO: 1458859 - DNA, 15 bp, Homo sapiens
aggaggtcgaggctg

SEQ ID NO: 1458860 - DNA, 15 bp, Homo sapiens
caggaggtcgaggct

SEQ ID NO: 1458861 - DNA, 15 bp, Homo sapiens
ccaggaggtcgaggc

SEQ ID NO: 1458862 - DNA, 15 bp, Homo sapiens
cccaggaggtcgagg

SEQ ID NO: 1458863 - DNA, 15 bp, Homo sapiens
gcccaggaggtcgag

SEQ ID NO: 1458864 - DNA, 15 bp, Homo sapiens
agcccaggaggtcga

SEQ ID NO: 1458865 - DNA, 15 bp, Homo sapiens
gagcccaggaggtcg

SEQ ID NO: 1458866 - DNA, 15 bp, Homo sapiens
cgagcccaggaggtc

SEQ ID NO: 1458867 - DNA, 15 bp, Homo sapiens
tcgagcccaggaggt

SEQ ID NO: 1458868 - DNA, 15 bp, Homo sapiens
ctcgagcccaggagg

SEQ ID NO: 1458869 - DNA, 15 bp, Homo sapiens
tctcgagcccaggag

SEQ ID NO: 1458870 - DNA, 15 bp, Homo sapiens
ctctcgagcccagga

SEQ ID NO: 1458871 - DNA, 15 bp, Homo sapiens
tctctcgagcccagg

SEQ ID NO: 1458872 - DNA, 15 bp, Homo sapiens
atctctcgagcccag

SEQ ID NO: 1458873 - DNA, 15 bp, Homo sapiens
gatctctcgagccca

SEQ ID NO: 1458874 - DNA, 15 bp, Homo sapiens
agatctctcgagccc

SEQ ID NO: 1458875 - DNA, 15 bp, Homo sapiens
gagatctctcgagcc

SEQ ID NO: 1458876 - DNA, 15 bp, Homo sapiens
ggagatctctcgagc

SEQ ID NO: 1458877 - DNA, 15 bp, Homo sapiens
gggagatctctcgag

SEQ ID NO: 1458878 - DNA, 15 bp, Homo sapiens
tgggagatctctcga

SEQ ID NO: 1458879 - DNA, 15 bp, Homo sapiens
gtgggagatctctcg

SEQ ID NO: 1458880 - DNA, 15 bp, Homo sapiens
ggtgggagatctctc

SEQ ID NO: 1458881 - DNA, 15 bp, Homo sapiens
aggtgggagatctct

SEQ ID NO: 1458882 - DNA, 15 bp, Homo sapiens
gaggtgggagatctc

SEQ ID NO: 1458883 - DNA, 15 bp, Homo sapiens
tgaggtgggagatct

SEQ ID NO: 1458884 - DNA, 15 bp, Homo sapiens
ctgaggtgggagatc

SEQ ID NO: 1458885 - DNA, 15 bp, Homo sapiens
gctgaggtgggagat

SEQ ID NO: 1458886 - DNA, 15 bp, Homo sapiens
atttgggaggctgag

SEQ ID NO: 1458887 - DNA, 15 bp, Homo sapiens
tatttgggaggctga

SEQ ID NO: 1458888 - DNA, 15 bp, Homo sapiens
ttatttgggaggctg

SEQ ID NO: 1458889 - DNA, 15 bp, Homo sapiens
gttatttgggaggct

SEQ ID NO: 1458890 - DNA, 15 bp, Homo sapiens
agttatttgggaggc

SEQ ID NO: 1458891 - DNA, 15 bp, Homo sapiens
tagttatttgggagg

SEQ ID NO: 1458892 - DNA, 15 bp, Homo sapiens
ctagttatttgggag

SEQ ID NO: 1458893 - DNA, 15 bp, Homo sapiens
cctagttatttggga

SEQ ID NO: 1458894 - DNA, 15 bp, Homo sapiens
acctagttatttggg

SEQ ID NO: 1458895 - DNA, 15 bp, Homo sapiens
gacctagttatttgg

SEQ ID NO: 1458896 - DNA, 15 bp, Homo sapiens
agacctagttatttg

SEQ ID NO: 1458897 - DNA, 15 bp, Homo sapiens
tagacctagttattt

SEQ ID NO: 1458898 - DNA, 15 bp, Homo sapiens
gtagacctagttatt

SEQ ID NO: 1458899 - DNA, 15 bp, Homo sapiens
tgtagacctagttat

SEQ ID NO: 1458900 - DNA, 15 bp, Homo sapiens
ctgtagacctagtta

SEQ ID NO: 1458901 - DNA, 15 bp, Homo sapiens
cctgtagacctagtt

SEQ ID NO: 1458902 - DNA, 15 bp, Homo sapiens
gcctgtagacctagt

SEQ ID NO: 1458903 - DNA, 15 bp, Homo sapiens
tgcctgtagacctag

SEQ ID NO: 1458904 - DNA, 15 bp, Homo sapiens
atgcctgtagaccta

SEQ ID NO: 1458905 - DNA, 15 bp, Homo sapiens
catgcctgtagacct

SEQ ID NO: 1458906 - DNA, 15 bp, Homo sapiens
acatgcctgtagacc

SEQ ID NO: 1458907 - DNA, 15 bp, Homo sapiens
tacatgcctgtagac

SEQ ID NO: 1458908 - DNA, 15 bp, Homo sapiens
ctacatgcctgtaga

SEQ ID NO: 1458909 - DNA, 15 bp, Homo sapiens
actacatgcctgtag

SEQ ID NO: 1458910 - DNA, 15 bp, Homo sapiens
aactacatgcctgta

SEQ ID NO: 1458911 - DNA, 15 bp, Homo sapiens
aaactacatgcctgt

SEQ ID NO: 1458912 - DNA, 15 bp, Homo sapiens
aaaactacatgcctg

SEQ ID NO: 1458913 - DNA, 15 bp, Homo sapiens
aaaaactacatgcct

SEQ ID NO: 1458914 - DNA, 15 bp, Homo sapiens
aaaaaactacatgcc

SEQ ID NO: 1458915 - DNA, 15 bp, Homo sapiens
caaaaaactacatgc

SEQ ID NO: 1458916 - DNA, 15 bp, Homo sapiens
acaaaaaactacatg

SEQ ID NO: 1458917 - DNA, 15 bp, Homo sapiens
tacaaaaaactacat

SEQ ID NO: 1458918 - DNA, 15 bp, Homo sapiens
ctacaaaaaactaca

SEQ ID NO: 1458919 - DNA, 15 bp, Homo sapiens
tctacaaaaaactac

SEQ ID NO: 1458920 - DNA, 15 bp, Homo sapiens
ctctacaaaaaacta

SEQ ID NO: 1458921 - DNA, 15 bp, Homo sapiens
tctctacaaaaaact

SEQ ID NO: 1458922 - DNA, 15 bp, Homo sapiens
gtctctacaaaaaac

SEQ ID NO: 1458923 - DNA, 15 bp, Homo sapiens
aaccctgtctctaca

SEQ ID NO: 1458924 - DNA, 15 bp, Homo sapiens
cgaaaccctgtctct

SEQ ID NO: 1458925 - DNA, 15 bp, Homo sapiens
gcgaaaccctgtctc

SEQ ID NO: 1458926 - DNA, 15 bp, Homo sapiens
agcgaaaccctgtct

SEQ ID NO: 1458927 - DNA, 15 bp, Homo sapiens
tagcgaaaccctgtc

SEQ ID NO: 1458928 - DNA, 15 bp, Homo sapiens
atagcgaaaccctgt

SEQ ID NO: 1458929 - DNA, 15 bp, Homo sapiens
catagcgaaaccctg

SEQ ID NO: 1458930 - DNA, 15 bp, Homo sapiens
acatagcgaaaccct

SEQ ID NO: 1458931 - DNA, 15 bp, Homo sapiens
aacatagcgaaaccc

SEQ ID NO: 1458932 - DNA, 15 bp, Homo sapiens
caacatagcgaaacc

SEQ ID NO: 1458933 - DNA, 15 bp, Homo sapiens
gcaacatagcgaaac

SEQ ID NO: 1458934 - DNA, 15 bp, Homo sapiens
ggcaacatagcgaaa

SEQ ID NO: 1458935 - DNA, 15 bp, Homo sapiens
gggcaacatagcgaa

SEQ ID NO: 1458936 - DNA, 15 bp, Homo sapiens
cctgggcaacatagc

SEQ ID NO: 1458937 - DNA, 15 bp, Homo sapiens
gaggagttcaagacc

SEQ ID NO: 1458938 - DNA, 15 bp, Homo sapiens
tgaggagttcaagac

SEQ ID NO: 1458939 - DNA, 15 bp, Homo sapiens
atgaggagttcaaga

SEQ ID NO: 1458940 - DNA, 15 bp, Homo sapiens
gatgaggagttcaag

SEQ ID NO: 1458941 - DNA, 15 bp, Homo sapiens
agatgaggagttcaa

SEQ ID NO: 1458942 - DNA, 15 bp, Homo sapiens
gagatgaggagttca

SEQ ID NO: 1458943 - DNA, 15 bp, Homo sapiens
tgagatgaggagttc

SEQ ID NO: 1458944 - DNA, 15 bp, Homo sapiens
ttgagatgaggagtt

SEQ ID NO: 1458945 - DNA, 15 bp, Homo sapiens
cttgagatgaggagt

SEQ ID NO: 1458946 - DNA, 15 bp, Homo sapiens
gcttgagatgaggag

SEQ ID NO: 1458947 - DNA, 15 bp, Homo sapiens
tgcttgagatgagga

SEQ ID NO: 1458948 - DNA, 15 bp, Homo sapiens
atgcttgagatgagg

SEQ ID NO: 1458949 - DNA, 15 bp, Homo sapiens
gatgcttgagatgag

SEQ ID NO: 1458950 - DNA, 15 bp, Homo sapiens
ggatgcttgagatga

SEQ ID NO: 1458951 - DNA, 15 bp, Homo sapiens
aggatgcttgagatg

SEQ ID NO: 1458952 - DNA, 15 bp, Homo sapiens
caggatgcttgagat

SEQ ID NO: 1458953 - DNA, 15 bp, Homo sapiens
gcaggatgcttgaga

SEQ ID NO: 1458954 - DNA, 15 bp, Homo sapiens
ggcaggatgcttgag

SEQ ID NO: 1458955 - DNA, 15 bp, Homo sapiens
gggcaggatgcttga

SEQ ID NO: 1458956 - DNA, 15 bp, Homo sapiens
cgggcaggatgcttg

SEQ ID NO: 1458957 - DNA, 15 bp, Homo sapiens
gcgggcaggatgctt

SEQ ID NO: 1458958 - DNA, 15 bp, Homo sapiens
ggcgggcaggatgct

SEQ ID NO: 1458959 - DNA, 15 bp, Homo sapiens
aggcgggcaggatgc

SEQ ID NO: 1458960 - DNA, 15 bp, Homo sapiens
gaggcgggcaggatg

SEQ ID NO: 1458961 - DNA, 15 bp, Homo sapiens
agaggcgggcaggat

SEQ ID NO: 1458962 - DNA, 15 bp, Homo sapiens
cagaggcgggcagga

SEQ ID NO: 1458963 - DNA, 15 bp, Homo sapiens
acagaggcgggcagg

SEQ ID NO: 1458964 - DNA, 15 bp, Homo sapiens
gacagaggcgggcag

SEQ ID NO: 1458965 - DNA, 15 bp, Homo sapiens
agacagaggcgggca

SEQ ID NO: 1458966 - DNA, 15 bp, Homo sapiens
gagacagaggcgggc

SEQ ID NO: 1458967 - DNA, 15 bp, Homo sapiens
ggagacagaggcggg

SEQ ID NO: 1458968 - DNA, 15 bp, Homo sapiens
gggagacagaggcgg

SEQ ID NO: 1458969 - DNA, 15 bp, Homo sapiens
tgggagacagaggcg

SEQ ID NO: 1458970 - DNA, 15 bp, Homo sapiens
ttgggagacagaggc

SEQ ID NO: 1458971 - DNA, 15 bp, Homo sapiens
tttgggagacagagg

SEQ ID NO: 1458972 - DNA, 15 bp, Homo sapiens
ctttgggagacagag

SEQ ID NO: 1458973 - DNA, 15 bp, Homo sapiens
actttgggagacaga

SEQ ID NO: 1458974 - DNA, 15 bp, Homo sapiens
cactttgggagacag

SEQ ID NO: 1458975 - DNA, 15 bp, Homo sapiens
gcactttgggagaca

SEQ ID NO: 1458976 - DNA, 15 bp, Homo sapiens
tagtggctcatgcct

SEQ ID NO: 1458977 - DNA, 15 bp, Homo sapiens
gtagtggctcatgcc

SEQ ID NO: 1458978 - DNA, 15 bp, Homo sapiens
cgtagtggctcatgc

SEQ ID NO: 1458979 - DNA, 15 bp, Homo sapiens
gcgtagtggctcatg

SEQ ID NO: 1458980 - DNA, 15 bp, Homo sapiens
ggcgtagtggctcat

SEQ ID NO: 1458981 - DNA, 15 bp, Homo sapiens
gggcgtagtggctca

SEQ ID NO: 1458982 - DNA, 15 bp, Homo sapiens
tgggcgtagtggctc

SEQ ID NO: 1458983 - DNA, 15 bp, Homo sapiens
ctgggcgtagtggct

SEQ ID NO: 1458984 - DNA, 15 bp, Homo sapiens
gctgggcgtagtggc

SEQ ID NO: 1458985 - DNA, 15 bp, Homo sapiens
ggctgggcgtagtgg

SEQ ID NO: 1458986 - DNA, 15 bp, Homo sapiens
tggctgggcgtagtg

SEQ ID NO: 1458987 - DNA, 15 bp, Homo sapiens
atggctgggcgtagt

SEQ ID NO: 1458988 - DNA, 15 bp, Homo sapiens
gatggctgggcgtag

SEQ ID NO: 1458989 - DNA, 15 bp, Homo sapiens
agatggctgggcgta

SEQ ID NO: 1458990 - DNA, 15 bp, Homo sapiens
aagatggctgggcgt

SEQ ID NO: 1458991 - DNA, 15 bp, Homo sapiens
taagatggctgggcg

SEQ ID NO: 1458992 - DNA, 15 bp, Homo sapiens
ttaagatggctgggc

SEQ ID NO: 1458993 - DNA, 15 bp, Homo sapiens
gttaagatggctggg

SEQ ID NO: 1458994 - DNA, 15 bp, Homo sapiens
ggttaagatggctgg

SEQ ID NO: 1458995 - DNA, 15 bp, Homo sapiens
tggttaagatggctg

SEQ ID NO: 1458996 - DNA, 15 bp, Homo sapiens
atggttaagatggct

SEQ ID NO: 1458997 - DNA, 15 bp, Homo sapiens
aatggttaagatggc

SEQ ID NO: 1458998 - DNA, 15 bp, Homo sapiens
aaatggttaagatgg

SEQ ID NO: 1458999 - DNA, 15 bp, Homo sapiens
aaaatggttaagatg

SEQ ID NO: 1459000 - DNA, 15 bp, Homo sapiens
taaaatggttaagat

SEQ ID NO: 1459001 - DNA, 15 bp, Homo sapiens
ttaaaatggttaaga

SEQ ID NO: 1459002 - DNA, 15 bp, Homo sapiens
tttaaaatggttaag

SEQ ID NO: 1459003 - DNA, 15 bp, Homo sapiens
ttttaaaatggttaa

SEQ ID NO: 1459004 - DNA, 15 bp, Homo sapiens
attttaaaatggtta

SEQ ID NO: 1459005 - DNA, 15 bp, Homo sapiens
cattttaaaatggtt

SEQ ID NO: 1459006 - DNA, 15 bp, Homo sapiens
acattttaaaatggt

SEQ ID NO: 1459007 - DNA, 15 bp, Homo sapiens
tacattttaaaatgg

SEQ ID NO: 1459008 - DNA, 15 bp, Homo sapiens
gtacattttaaaatg

SEQ ID NO: 1459009 - DNA, 15 bp, Homo sapiens
gtgtacattttaaaa

SEQ ID NO: 1459010 - DNA, 15 bp, Homo sapiens
agtgtacattttaaa

SEQ ID NO: 1459011 - DNA, 15 bp, Homo sapiens
aagtgtacattttaa

SEQ ID NO: 1459012 - DNA, 15 bp, Homo sapiens
gaagtgtacatttta

SEQ ID NO: 1459013 - DNA, 15 bp, Homo sapiens
tgaagtgtacatttt

SEQ ID NO: 1459014 - DNA, 15 bp, Homo sapiens
ctgaagtgtacattt

SEQ ID NO: 1459015 - DNA, 15 bp, Homo sapiens
actgaagtgtacatt

SEQ ID NO: 1459016 - DNA, 15 bp, Homo sapiens
cactgaagtgtacat

SEQ ID NO: 1459017 - DNA, 15 bp, Homo sapiens
tcactgaagtgtaca

SEQ ID NO: 1459018 - DNA, 15 bp, Homo sapiens
atcactgaagtgtac

SEQ ID NO: 1459019 - DNA, 15 bp, Homo sapiens
tatcactgaagtgta

SEQ ID NO: 1459020 - DNA, 15 bp, Homo sapiens
gtatcactgaagtgt

SEQ ID NO: 1459021 - DNA, 15 bp, Homo sapiens
agtatcactgaagtg

SEQ ID NO: 1459022 - DNA, 15 bp, Homo sapiens
tagtatcactgaagt

SEQ ID NO: 1459023 - DNA, 15 bp, Homo sapiens
ttagtatcactgaag

SEQ ID NO: 1459024 - DNA, 15 bp, Homo sapiens
cttagtatcactgaa

SEQ ID NO: 1459025 - DNA, 15 bp, Homo sapiens
acttagtatcactga

SEQ ID NO: 1459026 - DNA, 15 bp, Homo sapiens
tacttagtatcactg

SEQ ID NO: 1459027 - DNA, 15 bp, Homo sapiens
ttacttagtatcact

SEQ ID NO: 1459028 - DNA, 15 bp, Homo sapiens
tttacttagtatcac

SEQ ID NO: 1459029 - DNA, 15 bp, Homo sapiens
ttttacttagtatca

SEQ ID NO: 1459030 - DNA, 15 bp, Homo sapiens
attttacttagtatc

SEQ ID NO: 1459031 - DNA, 15 bp, Homo sapiens
aattttacttagtat

SEQ ID NO: 1459032 - DNA, 15 bp, Homo sapiens
gaattttacttagta

SEQ ID NO: 1459033 - DNA, 15 bp, Homo sapiens
tgaattttacttagt

SEQ ID NO: 1459034 - DNA, 15 bp, Homo sapiens
gtgaattttacttag

SEQ ID NO: 1459035 - DNA, 15 bp, Homo sapiens
tgtgaattttactta

SEQ ID NO: 1459036 - DNA, 15 bp, Homo sapiens
atgtgaattttactt

SEQ ID NO: 1459037 - DNA, 15 bp, Homo sapiens
aatgtgaattttact

SEQ ID NO: 1459038 - DNA, 15 bp, Homo sapiens
caatgtgaattttac

SEQ ID NO: 1459039 - DNA, 15 bp, Homo sapiens
acaatgtgaatttta

SEQ ID NO: 1459040 - DNA, 15 bp, Homo sapiens
aacaatgtgaatttt

SEQ ID NO: 1459041 - DNA, 15 bp, Homo sapiens
caacaatgtgaattt

SEQ ID NO: 1459042 - DNA, 15 bp, Homo sapiens
acaacaatgtgaatt

SEQ ID NO: 1459043 - DNA, 15 bp, Homo sapiens
cacaacaatgtgaat

SEQ ID NO: 1459044 - DNA, 15 bp, Homo sapiens
gcacaacaatgtgaa

SEQ ID NO: 1459045 - DNA, 15 bp, Homo sapiens
tgcacaacaatgtga

SEQ ID NO: 1459046 - DNA, 15 bp, Homo sapiens
gtgcacaacaatgtg

SEQ ID NO: 1459047 - DNA, 15 bp, Homo sapiens
ggtgcacaacaatgt

SEQ ID NO: 1459048 - DNA, 15 bp, Homo sapiens
gggtgcacaacaatg

SEQ ID NO: 1459049 - DNA, 15 bp, Homo sapiens
agggtgcacaacaat

SEQ ID NO: 1459050 - DNA, 15 bp, Homo sapiens
aagggtgcacaacaa

SEQ ID NO: 1459051 - DNA, 15 bp, Homo sapiens
taagggtgcacaaca

SEQ ID NO: 1459052 - DNA, 15 bp, Homo sapiens
ctaagggtgcacaac

SEQ ID NO: 1459053 - DNA, 15 bp, Homo sapiens
gctaagggtgcacaa

SEQ ID NO: 1459054 - DNA, 15 bp, Homo sapiens
ggctaagggtgcaca

SEQ ID NO: 1459055 - DNA, 15 bp, Homo sapiens
tggctaagggtgcac

SEQ ID NO: 1459056 - DNA, 15 bp, Homo sapiens
atggctaagggtgca

SEQ ID NO: 1459057 - DNA, 15 bp, Homo sapiens
ttatgctcctccata

SEQ ID NO: 1459058 - DNA, 15 bp, Homo sapiens
attatgctcctccat

SEQ ID NO: 1459059 - DNA, 15 bp, Homo sapiens
tattatgctcctcca

SEQ ID NO: 1459060 - DNA, 15 bp, Homo sapiens
ctattatgctcctcc

SEQ ID NO: 1459061 - DNA, 15 bp, Homo sapiens
actattatgctcctc

SEQ ID NO: 1459062 - DNA, 15 bp, Homo sapiens
gactattatgctcct

SEQ ID NO: 1459063 - DNA, 15 bp, Homo sapiens
ggactattatgctcc

SEQ ID NO: 1459064 - DNA, 15 bp, Homo sapiens
aggactattatgctc

SEQ ID NO: 1459065 - DNA, 15 bp, Homo sapiens
aaggactattatgct

SEQ ID NO: 1459066 - DNA, 15 bp, Homo sapiens
gaaggactattatgc

SEQ ID NO: 1459067 - DNA, 15 bp, Homo sapiens
tgaaggactattatg

SEQ ID NO: 1459068 - DNA, 15 bp, Homo sapiens
gtgaaggactattat

SEQ ID NO: 1459069 - DNA, 15 bp, Homo sapiens
tgtgaaggactatta

SEQ ID NO: 1459070 - DNA, 15 bp, Homo sapiens
ctgtgaaggactatt

SEQ ID NO: 1459071 - DNA, 15 bp, Homo sapiens
tctgtgaaggactat

SEQ ID NO: 1459072 - DNA, 15 bp, Homo sapiens
ttctgtgaaggacta

SEQ ID NO: 1459073 - DNA, 15 bp, Homo sapiens
tttctgtgaaggact

SEQ ID NO: 1459074 - DNA, 15 bp, Homo sapiens
ctttctgtgaaggac

SEQ ID NO: 1459075 - DNA, 15 bp, Homo sapiens
tctttctgtgaagga

SEQ ID NO: 1459076 - DNA, 15 bp, Homo sapiens
ttctttctgtgaagg

SEQ ID NO: 1459077 - DNA, 15 bp, Homo sapiens
cttctttctgtgaag

SEQ ID NO: 1459078 - DNA, 15 bp, Homo sapiens
ccttctttctgtgaa

SEQ ID NO: 1459079 - DNA, 15 bp, Homo sapiens
tccttctttctgtga

SEQ ID NO: 1459080 - DNA, 15 bp, Homo sapiens
ttccttctttctgtg

SEQ ID NO: 1459081 - DNA, 15 bp, Homo sapiens
tttccttctttctgt

SEQ ID NO: 1459082 - DNA, 15 bp, Homo sapiens
ctttccttctttctg

SEQ ID NO: 1459083 - DNA, 15 bp, Homo sapiens
tctttccttctttct

SEQ ID NO: 1459084 - DNA, 15 bp, Homo sapiens
gctctttccttcttt

SEQ ID NO: 1459085 - DNA, 15 bp, Homo sapiens
tgctctttccttctt

SEQ ID NO: 1459086 - DNA, 15 bp, Homo sapiens
ttgctctttccttct

SEQ ID NO: 1459087 - DNA, 15 bp, Homo sapiens
gttgctctttccttc

SEQ ID NO: 1459088 - DNA, 15 bp, Homo sapiens
ggttgctctttcctt

SEQ ID NO: 1459089 - DNA, 15 bp, Homo sapiens
aggttgctctttcct

SEQ ID NO: 1459090 - DNA, 15 bp, Homo sapiens
caggttgctctttcc

SEQ ID NO: 1459091 - DNA, 15 bp, Homo sapiens
tcaggttgctctttc

SEQ ID NO: 1459092 - DNA, 15 bp, Homo sapiens
ctcaggttgctcttt

SEQ ID NO: 1459093 - DNA, 15 bp, Homo sapiens
tctcaggttgctctt

SEQ ID NO: 1459094 - DNA, 15 bp, Homo sapiens
ctctcaggttgctct

SEQ ID NO: 1459095 - DNA, 15 bp, Homo sapiens
tctctcaggttgctc

SEQ ID NO: 1459096 - DNA, 15 bp, Homo sapiens
gtctctcaggttgct

SEQ ID NO: 1459097 - DNA, 15 bp, Homo sapiens
tgtctctcaggttgc

SEQ ID NO: 1459098 - DNA, 15 bp, Homo sapiens
ctgtctctcaggttg

SEQ ID NO: 1459099 - DNA, 15 bp, Homo sapiens
gctgtctctcaggtt

SEQ ID NO: 1459100 - DNA, 15 bp, Homo sapiens
agctgtctctcaggt

SEQ ID NO: 1459101 - DNA, 15 bp, Homo sapiens
aagctgtctctcagg

SEQ ID NO: 1459102 - DNA, 15 bp, Homo sapiens
aaagctgtctctcag

SEQ ID NO: 1459103 - DNA, 15 bp, Homo sapiens
aaaagctgtctctca

SEQ ID NO: 1459104 - DNA, 15 bp, Homo sapiens
taaaagctgtctctc

SEQ ID NO: 1459105 - DNA, 15 bp, Homo sapiens
gtaaaagctgtctct

SEQ ID NO: 1459106 - DNA, 15 bp, Homo sapiens
ggtaaaagctgtctc

SEQ ID NO: 1459107 - DNA, 15 bp, Homo sapiens
aggtaaaagctgtct

SEQ ID NO: 1459108 - DNA, 15 bp, Homo sapiens
aaggtaaaagctgtc

SEQ ID NO: 1459109 - DNA, 15 bp, Homo sapiens
gaaggtaaaagctgt

SEQ ID NO: 1459110 - DNA, 15 bp, Homo sapiens
ggaaggtaaaagctg

SEQ ID NO: 1459111 - DNA, 15 bp, Homo sapiens
gggaaggtaaaagct

SEQ ID NO: 1459112 - DNA, 15 bp, Homo sapiens
agggaaggtaaaagc

SEQ ID NO: 1459113 - DNA, 15 bp, Homo sapiens
gagggaaggtaaaag

SEQ ID NO: 1459114 - DNA, 15 bp, Homo sapiens
tgagggaaggtaaaa

SEQ ID NO: 1459115 - DNA, 15 bp, Homo sapiens
gtgagggaaggtaaa

SEQ ID NO: 1459116 - DNA, 15 bp, Homo sapiens
tgtgagggaaggtaa

SEQ ID NO: 1459117 - DNA, 15 bp, Homo sapiens
gtgtgagggaaggta

SEQ ID NO: 1459118 - DNA, 15 bp, Homo sapiens
agtgtgagggaaggt

SEQ ID NO: 1459119 - DNA, 15 bp, Homo sapiens
aagtgtgagggaagg

SEQ ID NO: 1459120 - DNA, 15 bp, Homo sapiens
taagtgtgagggaag

SEQ ID NO: 1459121 - DNA, 15 bp, Homo sapiens
ctaagtgtgagggaa

SEQ ID NO: 1459122 - DNA, 15 bp, Homo sapiens
cctaagtgtgaggga

SEQ ID NO: 1459123 - DNA, 15 bp, Homo sapiens
ccctaagtgtgaggg

SEQ ID NO: 1459124 - DNA, 15 bp, Homo sapiens
tccctaagtgtgagg

SEQ ID NO: 1459125 - DNA, 15 bp, Homo sapiens
ctccctaagtgtgag

SEQ ID NO: 1459126 - DNA, 15 bp, Homo sapiens
tctccctaagtgtga

SEQ ID NO: 1459127 - DNA, 15 bp, Homo sapiens
ctctccctaagtgtg

SEQ ID NO: 1459128 - DNA, 15 bp, Homo sapiens
cctctccctaagtgt

SEQ ID NO: 1459129 - DNA, 15 bp, Homo sapiens
acctctccctaagtg

SEQ ID NO: 1459130 - DNA, 15 bp, Homo sapiens
aacctctccctaagt

SEQ ID NO: 1459131 - DNA, 15 bp, Homo sapiens
aaacctctccctaag

SEQ ID NO: 1459132 - DNA, 15 bp, Homo sapiens
aaaacctctccctaa

SEQ ID NO: 1459133 - DNA, 15 bp, Homo sapiens
aaaaacctctcccta

SEQ ID NO: 1459134 - DNA, 15 bp, Homo sapiens
caaaaacctctccct

SEQ ID NO: 1459135 - DNA, 15 bp, Homo sapiens
tcaaaaacctctccc

SEQ ID NO: 1459136 - DNA, 15 bp, Homo sapiens
gtcaaaaacctctcc

SEQ ID NO: 1459137 - DNA, 15 bp, Homo sapiens
tgtcaaaaacctctc

SEQ ID NO: 1459138 - DNA, 15 bp, Homo sapiens
ctgtcaaaaacctct

SEQ ID NO: 1459139 - DNA, 15 bp, Homo sapiens
gctgtcaaaaacctc

SEQ ID NO: 1459140 - DNA, 15 bp, Homo sapiens
agctgtcaaaaacct

SEQ ID NO: 1459141 - DNA, 15 bp, Homo sapiens
tagctgtcaaaaacc

SEQ ID NO: 1459142 - DNA, 15 bp, Homo sapiens
atagctgtcaaaaac

SEQ ID NO: 1459143 - DNA, 15 bp, Homo sapiens
catagctgtcaaaaa

SEQ ID NO: 1459144 - DNA, 15 bp, Homo sapiens
tcatagctgtcaaaa

SEQ ID NO: 1459145 - DNA, 15 bp, Homo sapiens
ctcatagctgtcaaa

SEQ ID NO: 1459146 - DNA, 15 bp, Homo sapiens
gctcatagctgtcaa

SEQ ID NO: 1459147 - DNA, 15 bp, Homo sapiens
tgctcatagctgtca

SEQ ID NO: 1459148 - DNA, 15 bp, Homo sapiens
gtgctcatagctgtc

SEQ ID NO: 1459149 - DNA, 15 bp, Homo sapiens
agtgctcatagctgt

SEQ ID NO: 1459150 - DNA, 15 bp, Homo sapiens
cagtgctcatagctg

SEQ ID NO: 1459151 - DNA, 15 bp, Homo sapiens
acagtgctcatagct

SEQ ID NO: 1459152 - DNA, 15 bp, Homo sapiens
tacagtgctcatagc

SEQ ID NO: 1459153 - DNA, 15 bp, Homo sapiens
gtacagtgctcatag

SEQ ID NO: 1459154 - DNA, 15 bp, Homo sapiens
ggtacagtgctcata

SEQ ID NO: 1459155 - DNA, 15 bp, Homo sapiens
aggtacagtgctcat

SEQ ID NO: 1459156 - DNA, 15 bp, Homo sapiens
caggtacagtgctca

SEQ ID NO: 1459157 - DNA, 15 bp, Homo sapiens
ccaggtacagtgctc

SEQ ID NO: 1459158 - DNA, 15 bp, Homo sapiens
cccaggtacagtgct

SEQ ID NO: 1459159 - DNA, 15 bp, Homo sapiens
tcccaggtacagtgc

SEQ ID NO: 1459160 - DNA, 15 bp, Homo sapiens
ttcccaggtacagtg

SEQ ID NO: 1459161 - DNA, 15 bp, Homo sapiens
tttcccaggtacagt

SEQ ID NO: 1459162 - DNA, 15 bp, Homo sapiens
ttttcccaggtacag

SEQ ID NO: 1459163 - DNA, 15 bp, Homo sapiens
cttttcccaggtaca

SEQ ID NO: 1459164 - DNA, 15 bp, Homo sapiens
tcttttcccaggtac

SEQ ID NO: 1459165 - DNA, 15 bp, Homo sapiens
ttcttttcccaggta

SEQ ID NO: 1459166 - DNA, 15 bp, Homo sapiens
attcttttcccaggt

SEQ ID NO: 1459167 - DNA, 15 bp, Homo sapiens
gattcttttcccagg

SEQ ID NO: 1459168 - DNA, 15 bp, Homo sapiens
tgattcttttcccag

SEQ ID NO: 1459169 - DNA, 15 bp, Homo sapiens
gtgattcttttccca

SEQ ID NO: 1459170 - DNA, 15 bp, Homo sapiens
cgtgattcttttccc

SEQ ID NO: 1459171 - DNA, 15 bp, Homo sapiens
ccgtgattcttttcc

SEQ ID NO: 1459172 - DNA, 15 bp, Homo sapiens
gccgtgattcttttc

SEQ ID NO: 1459173 - DNA, 15 bp, Homo sapiens
tgccgtgattctttt

SEQ ID NO: 1459174 - DNA, 15 bp, Homo sapiens
ctgccgtgattcttt

SEQ ID NO: 1459175 - DNA, 15 bp, Homo sapiens
actgccgtgattctt

SEQ ID NO: 1459176 - DNA, 15 bp, Homo sapiens
cactgccgtgattct

SEQ ID NO: 1459177 - DNA, 15 bp, Homo sapiens
gcactgccgtgattc

SEQ ID NO: 1459178 - DNA, 15 bp, Homo sapiens
agcactgccgtgatt

SEQ ID NO: 1459179 - DNA, 15 bp, Homo sapiens
cagcactgccgtgat

SEQ ID NO: 1459180 - DNA, 15 bp, Homo sapiens
ccagcactgccgtga

SEQ ID NO: 1459181 - DNA, 15 bp, Homo sapiens
cccagcactgccgtg

SEQ ID NO: 1459182 - DNA, 15 bp, Homo sapiens
tcccagcactgccgt

SEQ ID NO: 1459183 - DNA, 15 bp, Homo sapiens
atcccagcactgccg

SEQ ID NO: 1459184 - DNA, 15 bp, Homo sapiens
catcccagcactgcc

SEQ ID NO: 1459185 - DNA, 15 bp, Homo sapiens
ccatcccagcactgc

SEQ ID NO: 1459186 - DNA, 15 bp, Homo sapiens
cccatcccagcactg

SEQ ID NO: 1459187 - DNA, 15 bp, Homo sapiens
ccccatcccagcact

SEQ ID NO: 1459188 - DNA, 15 bp, Homo sapiens
tccccatcccagcac

SEQ ID NO: 1459189 - DNA, 15 bp, Homo sapiens
atccccatcccagca

SEQ ID NO: 1459190 - DNA, 15 bp, Homo sapiens
aatccccatcccagc

SEQ ID NO: 1459191 - DNA, 15 bp, Homo sapiens
aaatccccatcccag

SEQ ID NO: 1459192 - DNA, 15 bp, Homo sapiens
gaaatccccatccca

SEQ ID NO: 1459193 - DNA, 15 bp, Homo sapiens
tgaaatccccatccc

SEQ ID NO: 1459194 - DNA, 15 bp, Homo sapiens
ctgaaatccccatcc

SEQ ID NO: 1459195 - DNA, 15 bp, Homo sapiens
tctgaaatccccatc

SEQ ID NO: 1459196 - DNA, 15 bp, Homo sapiens
gtctgaaatccccat

SEQ ID NO: 1459197 - DNA, 15 bp, Homo sapiens
agtctgaaatcccca

SEQ ID NO: 1459198 - DNA, 15 bp, Homo sapiens
gagtctgaaatcccc

SEQ ID NO: 1459199 - DNA, 15 bp, Homo sapiens
agagtctgaaatccc

SEQ ID NO: 1459200 - DNA, 15 bp, Homo sapiens
aagagtctgaaatcc

SEQ ID NO: 1459201 - DNA, 15 bp, Homo sapiens
taagagtctgaaatc

SEQ ID NO: 1459202 - DNA, 15 bp, Homo sapiens
ttaagagtctgaaat

SEQ ID NO: 1459203 - DNA, 15 bp, Homo sapiens
tttaagagtctgaaa

SEQ ID NO: 1459204 - DNA, 15 bp, Homo sapiens
atttaagagtctgaa

SEQ ID NO: 1459205 - DNA, 15 bp, Homo sapiens
tatttaagagtctga

SEQ ID NO: 1459206 - DNA, 15 bp, Homo sapiens
atatttaagagtctg

SEQ ID NO: 1459207 - DNA, 15 bp, Homo sapiens
catatttaagagtct

SEQ ID NO: 1459208 - DNA, 15 bp, Homo sapiens
tcatatttaagagtc

SEQ ID NO: 1459209 - DNA, 15 bp, Homo sapiens
atcatatttaagagt

SEQ ID NO: 1459210 - DNA, 15 bp, Homo sapiens
aatcatatttaagag

SEQ ID NO: 1459211 - DNA, 15 bp, Homo sapiens
gaatcatatttaaga

SEQ ID NO: 1459212 - DNA, 15 bp, Homo sapiens
agaatcatatttaag

SEQ ID NO: 1459213 - DNA, 15 bp, Homo sapiens
aagaatcatatttaa

SEQ ID NO: 1459214 - DNA, 15 bp, Homo sapiens
aaagaatcatattta

SEQ ID NO: 1459215 - DNA, 15 bp, Homo sapiens
gaaagaatcatattt

SEQ ID NO: 1459216 - DNA, 15 bp, Homo sapiens
agaaagaatcatatt

SEQ ID NO: 1459217 - DNA, 15 bp, Homo sapiens
tagaaagaatcatat

SEQ ID NO: 1459218 - DNA, 15 bp, Homo sapiens
atagaaagaatcata

SEQ ID NO: 1459219 - DNA, 15 bp, Homo sapiens
gatagaaagaatcat

SEQ ID NO: 1459220 - DNA, 15 bp, Homo sapiens
ggatagaaagaatca

SEQ ID NO: 1459221 - DNA, 15 bp, Homo sapiens
aggatagaaagaatc

SEQ ID NO: 1459222 - DNA, 15 bp, Homo sapiens
caggatagaaagaat

SEQ ID NO: 1459223 - DNA, 15 bp, Homo sapiens
acaggatagaaagaa

SEQ ID NO: 1459224 - DNA, 15 bp, Homo sapiens
cacaggatagaaaga

SEQ ID NO: 1459225 - DNA, 15 bp, Homo sapiens
acacaggatagaaag

SEQ ID NO: 1459226 - DNA, 15 bp, Homo sapiens
gacacaggatagaaa

SEQ ID NO: 1459227 - DNA, 15 bp, Homo sapiens
ggacacaggatagaa

SEQ ID NO: 1459228 - DNA, 15 bp, Homo sapiens
aggacacaggataga

SEQ ID NO: 1459229 - DNA, 15 bp, Homo sapiens
caggacacaggatag

SEQ ID NO: 1459230 - DNA, 15 bp, Homo sapiens
tcaggacacaggata

SEQ ID NO: 1459231 - DNA, 15 bp, Homo sapiens
gtcaggacacaggat

SEQ ID NO: 1459232 - DNA, 15 bp, Homo sapiens
agtcaggacacagga

SEQ ID NO: 1459233 - DNA, 15 bp, Homo sapiens
gagtcaggacacagg

SEQ ID NO: 1459234 - DNA, 15 bp, Homo sapiens
agagtcaggacacag

SEQ ID NO: 1459235 - DNA, 15 bp, Homo sapiens
aagagtcaggacaca

SEQ ID NO: 1459236 - DNA, 15 bp, Homo sapiens
aaagagtcaggacac

SEQ ID NO: 1459237 - DNA, 15 bp, Homo sapiens
aaaagagtcaggaca

SEQ ID NO: 1459238 - DNA, 15 bp, Homo sapiens
aaaaagagtcaggac

SEQ ID NO: 1459239 - DNA, 15 bp, Homo sapiens
aaaaaagagtcagga

SEQ ID NO: 1459240 - DNA, 15 bp, Homo sapiens
aaaaaaagagtcagg

SEQ ID NO: 1459241 - DNA, 15 bp, Homo sapiens
taaaaaaagagtcag

SEQ ID NO: 1459242 - DNA, 15 bp, Homo sapiens
ctaaaaaaagagtca

SEQ ID NO: 1459243 - DNA, 15 bp, Homo sapiens
tctaaaaaaagagtc

SEQ ID NO: 1459244 - DNA, 15 bp, Homo sapiens
gtctaaaaaaagagt

SEQ ID NO: 1459245 - DNA, 15 bp, Homo sapiens
ggtctaaaaaaagag

SEQ ID NO: 1459246 - DNA, 15 bp, Homo sapiens
aggtctaaaaaaaga

SEQ ID NO: 1459247 - DNA, 15 bp, Homo sapiens
gaggtctaaaaaaag

SEQ ID NO: 1459248 - DNA, 15 bp, Homo sapiens
tgaggtctaaaaaaa

SEQ ID NO: 1459249 - DNA, 15 bp, Homo sapiens
ctgaggtctaaaaaa

SEQ ID NO: 1459250 - DNA, 15 bp, Homo sapiens
gctgaggtctaaaaa

SEQ ID NO: 1459251 - DNA, 15 bp, Homo sapiens
ggctgaggtctaaaa

SEQ ID NO: 1459252 - DNA, 15 bp, Homo sapiens
aggctgaggtctaaa

SEQ ID NO: 1459253 - DNA, 15 bp, Homo sapiens
aaggctgaggtctaa

SEQ ID NO: 1459254 - DNA, 15 bp, Homo sapiens
caaggctgaggtcta

SEQ ID NO: 1459255 - DNA, 15 bp, Homo sapiens
tcaaggctgaggtct

SEQ ID NO: 1459256 - DNA, 15 bp, Homo sapiens
gtcaaggctgaggtc

SEQ ID NO: 1459257 - DNA, 15 bp, Homo sapiens
agtcaaggctgaggt

SEQ ID NO: 1459258 - DNA, 15 bp, Homo sapiens
aagtcaaggctgagg

SEQ ID NO: 1459259 - DNA, 15 bp, Homo sapiens
aaagtcaaggctgag

SEQ ID NO: 1459260 - DNA, 15 bp, Homo sapiens
aaaagtcaaggctga

SEQ ID NO: 1459261 - DNA, 15 bp, Homo sapiens
aaaaagtcaaggctg

SEQ ID NO: 1459262 - DNA, 15 bp, Homo sapiens
aaaaaagtcaaggct

SEQ ID NO: 1459263 - DNA, 15 bp, Homo sapiens
taaaaaagtcaaggc

SEQ ID NO: 1459264 - DNA, 15 bp, Homo sapiens
ctaaaaaagtcaagg

SEQ ID NO: 1459265 - DNA, 15 bp, Homo sapiens
tctaaaaaagtcaag

SEQ ID NO: 1459266 - DNA, 15 bp, Homo sapiens
gtctaaaaaagtcaa

SEQ ID NO: 1459267 - DNA, 15 bp, Homo sapiens
agtctaaaaaagtca

SEQ ID NO: 1459268 - DNA, 15 bp, Homo sapiens
aagtctaaaaaagtc

SEQ ID NO: 1459269 - DNA, 15 bp, Homo sapiens
aaagtctaaaaaagt

SEQ ID NO: 1459270 - DNA, 15 bp, Homo sapiens
aaaagtctaaaaaag

SEQ ID NO: 1459271 - DNA, 15 bp, Homo sapiens
aaaaagtctaaaaaa

SEQ ID NO: 1459272 - DNA, 15 bp, Homo sapiens
taaaaagtctaaaaa

SEQ ID NO: 1459273 - DNA, 15 bp, Homo sapiens
ctaaaaagtctaaaa

SEQ ID NO: 1459274 - DNA, 15 bp, Homo sapiens
tctaaaaagtctaaa

SEQ ID NO: 1459275 - DNA, 15 bp, Homo sapiens
gtctaaaaagtctaa

SEQ ID NO: 1459276 - DNA, 15 bp, Homo sapiens
tgtctaaaaagtcta

SEQ ID NO: 1459277 - DNA, 15 bp, Homo sapiens
ttgtctaaaaagtct

SEQ ID NO: 1459278 - DNA, 15 bp, Homo sapiens
cttgtctaaaaagtc

SEQ ID NO: 1459279 - DNA, 15 bp, Homo sapiens
gcttgtctaaaaagt

SEQ ID NO: 1459280 - DNA, 15 bp, Homo sapiens
tgcttgtctaaaaag

SEQ ID NO: 1459281 - DNA, 15 bp, Homo sapiens
atgcttgtctaaaaa

SEQ ID NO: 1459282 - DNA, 15 bp, Homo sapiens
catgcttgtctaaaa

SEQ ID NO: 1459283 - DNA, 15 bp, Homo sapiens
tcatgcttgtctaaa

SEQ ID NO: 1459284 - DNA, 15 bp, Homo sapiens
ttcatgcttgtctaa

SEQ ID NO: 1459285 - DNA, 15 bp, Homo sapiens
cttcatgcttgtcta

SEQ ID NO: 1459286 - DNA, 15 bp, Homo sapiens
acttcatgcttgtct

SEQ ID NO: 1459287 - DNA, 15 bp, Homo sapiens
aacttcatgcttgtc

SEQ ID NO: 1459288 - DNA, 15 bp, Homo sapiens
aaacttcatgcttgt

SEQ ID NO: 1459289 - DNA, 15 bp, Homo sapiens
gaaacttcatgcttg

SEQ ID NO: 1459290 - DNA, 15 bp, Homo sapiens
agaaacttcatgctt

SEQ ID NO: 1459291 - DNA, 15 bp, Homo sapiens
aagaaacttcatgct

SEQ ID NO: 1459292 - DNA, 15 bp, Homo sapiens
caagaaacttcatgc

SEQ ID NO: 1459293 - DNA, 15 bp, Homo sapiens
tcaagaaacttcatg

SEQ ID NO: 1459294 - DNA, 15 bp, Homo sapiens
ttcaagaaacttcat

SEQ ID NO: 1459295 - DNA, 15 bp, Homo sapiens
tttcaagaaacttca

SEQ ID NO: 1459296 - DNA, 15 bp, Homo sapiens
ttttcaagaaacttc

SEQ ID NO: 1459297 - DNA, 15 bp, Homo sapiens
attttcaagaaactt

SEQ ID NO: 1459298 - DNA, 15 bp, Homo sapiens
aattttcaagaaact

SEQ ID NO: 1459299 - DNA, 15 bp, Homo sapiens
aaattttcaagaaac

SEQ ID NO: 1459300 - DNA, 15 bp, Homo sapiens
caaattttcaagaaa

SEQ ID NO: 1459301 - DNA, 15 bp, Homo sapiens
gcaaattttcaagaa

SEQ ID NO: 1459302 - DNA, 15 bp, Homo sapiens
tgcaaattttcaaga

SEQ ID NO: 1459303 - DNA, 15 bp, Homo sapiens
ccatgcaaattttca

SEQ ID NO: 1459304 - DNA, 15 bp, Homo sapiens
tccatgcaaattttc

SEQ ID NO: 1459305 - DNA, 15 bp, Homo sapiens
atccatgcaaatttt

SEQ ID NO: 1459306 - DNA, 15 bp, Homo sapiens
tatccatgcaaattt

SEQ ID NO: 1459307 - DNA, 15 bp, Homo sapiens
ttatccatgcaaatt

SEQ ID NO: 1459308 - DNA, 15 bp, Homo sapiens
attatccatgcaaat

SEQ ID NO: 1459309 - DNA, 15 bp, Homo sapiens
tattatccatgcaaa

SEQ ID NO: 1459310 - DNA, 15 bp, Homo sapiens
ttattatccatgcaa

SEQ ID NO: 1459311 - DNA, 15 bp, Homo sapiens
cttattatccatgca

SEQ ID NO: 1459312 - DNA, 15 bp, Homo sapiens
ccttattatccatgc

SEQ ID NO: 1459313 - DNA, 15 bp, Homo sapiens
gccttattatccatg

SEQ ID NO: 1459314 - DNA, 15 bp, Homo sapiens
agccttattatccat

SEQ ID NO: 1459315 - DNA, 15 bp, Homo sapiens
cagccttattatcca

SEQ ID NO: 1459316 - DNA, 15 bp, Homo sapiens
gcagccttattatcc

SEQ ID NO: 1459317 - DNA, 15 bp, Homo sapiens
tgcagccttattatc

SEQ ID NO: 1459318 - DNA, 15 bp, Homo sapiens
ttgcagccttattat

SEQ ID NO: 1459319 - DNA, 15 bp, Homo sapiens
gttgcagccttatta

SEQ ID NO: 1459320 - DNA, 15 bp, Homo sapiens
tgttgcagccttatt

SEQ ID NO: 1459321 - DNA, 15 bp, Homo sapiens
ctgttgcagccttat

SEQ ID NO: 1459322 - DNA, 15 bp, Homo sapiens
tctgttgcagcctta

SEQ ID NO: 1459323 - DNA, 15 bp, Homo sapiens
ctctgttgcagcctt

SEQ ID NO: 1459324 - DNA, 15 bp, Homo sapiens
cctctgttgcagcct

SEQ ID NO: 1459325 - DNA, 15 bp, Homo sapiens
gcctctgttgcagcc

SEQ ID NO: 1459326 - DNA, 15 bp, Homo sapiens
tgcctctgttgcagc

SEQ ID NO: 1459327 - DNA, 15 bp, Homo sapiens
ctgcctctgttgcag

SEQ ID NO: 1459328 - DNA, 15 bp, Homo sapiens
cctgcctctgttgca

SEQ ID NO: 1459329 - DNA, 15 bp, Homo sapiens
gcctgcctctgttgc

SEQ ID NO: 1459330 - DNA, 15 bp, Homo sapiens
agcctgcctctgttg

SEQ ID NO: 1459331 - DNA, 15 bp, Homo sapiens
gagcctgcctctgtt

SEQ ID NO: 1459332 - DNA, 15 bp, Homo sapiens
ggagcctgcctctgt

SEQ ID NO: 1459333 - DNA, 15 bp, Homo sapiens
aggagcctgcctctg

SEQ ID NO: 1459334 - DNA, 15 bp, Homo sapiens
gaggagcctgcctct

SEQ ID NO: 1459335 - DNA, 15 bp, Homo sapiens
agaggagcctgcctc

SEQ ID NO: 1459336 - DNA, 15 bp, Homo sapiens
aagaggagcctgcct

SEQ ID NO: 1459337 - DNA, 15 bp, Homo sapiens
aaagaggagcctgcc

SEQ ID NO: 1459338 - DNA, 15 bp, Homo sapiens
gaaagaggagcctgc

SEQ ID NO: 1459339 - DNA, 15 bp, Homo sapiens
agaaagaggagcctg

SEQ ID NO: 1459340 - DNA, 15 bp, Homo sapiens
gagaaagaggagcct

SEQ ID NO: 1459341 - DNA, 15 bp, Homo sapiens
tgagaaagaggagcc

SEQ ID NO: 1459342 - DNA, 15 bp, Homo sapiens
ctgagaaagaggagc

SEQ ID NO: 1459343 - DNA, 15 bp, Homo sapiens
actgagaaagaggag

SEQ ID NO: 1459344 - DNA, 15 bp, Homo sapiens
tactgagaaagagga

SEQ ID NO: 1459345 - DNA, 15 bp, Homo sapiens
ctactgagaaagagg

SEQ ID NO: 1459346 - DNA, 15 bp, Homo sapiens
gctactgagaaagag

SEQ ID NO: 1459347 - DNA, 15 bp, Homo sapiens
tgctactgagaaaga

SEQ ID NO: 1459348 - DNA, 15 bp, Homo sapiens
ttgctactgagaaag

SEQ ID NO: 1459349 - DNA, 15 bp, Homo sapiens
gttgctactgagaaa

SEQ ID NO: 1459350 - DNA, 15 bp, Homo sapiens
tgttgctactgagaa

SEQ ID NO: 1459351 - DNA, 15 bp, Homo sapiens
atgttgctactgaga

SEQ ID NO: 1459352 - DNA, 15 bp, Homo sapiens
gatgttgctactgag

SEQ ID NO: 1459353 - DNA, 15 bp, Homo sapiens
agatgttgctactga

SEQ ID NO: 1459354 - DNA, 15 bp, Homo sapiens
tagatgttgctactg

SEQ ID NO: 1459355 - DNA, 15 bp, Homo sapiens
atagatgttgctact

SEQ ID NO: 1459356 - DNA, 15 bp, Homo sapiens
aatagatgttgctac

SEQ ID NO: 1459357 - DNA, 15 bp, Homo sapiens
aaatagatgttgcta

SEQ ID NO: 1459358 - DNA, 15 bp, Homo sapiens
caaatagatgttgct

SEQ ID NO: 1459359 - DNA, 15 bp, Homo sapiens
acaaatagatgttgc

SEQ ID NO: 1459360 - DNA, 15 bp, Homo sapiens
tacaaatagatgttg

SEQ ID NO: 1459361 - DNA, 15 bp, Homo sapiens
ctacaaatagatgtt

SEQ ID NO: 1459362 - DNA, 15 bp, Homo sapiens
tctacaaatagatgt

SEQ ID NO: 1459363 - DNA, 15 bp, Homo sapiens
ttctacaaatagatg

SEQ ID NO: 1459364 - DNA, 15 bp, Homo sapiens
attctacaaatagat

SEQ ID NO: 1459365 - DNA, 15 bp, Homo sapiens
tattctacaaataga

SEQ ID NO: 1459366 - DNA, 15 bp, Homo sapiens
ctattctacaaatag

SEQ ID NO: 1459367 - DNA, 15 bp, Homo sapiens
gctattctacaaata

SEQ ID NO: 1459368 - DNA, 15 bp, Homo sapiens
tgctattctacaaat

SEQ ID NO: 1459369 - DNA, 15 bp, Homo sapiens
ctgctattctacaaa

SEQ ID NO: 1459370 - DNA, 15 bp, Homo sapiens
gctgctattctacaa

SEQ ID NO: 1459371 - DNA, 15 bp, Homo sapiens
tgctgctattctaca

SEQ ID NO: 1459372 - DNA, 15 bp, Homo sapiens
ttgctgctattctac

SEQ ID NO: 1459373 - DNA, 15 bp, Homo sapiens
attgctgctattcta

SEQ ID NO: 1459374 - DNA, 15 bp, Homo sapiens
cattgctgctattct

SEQ ID NO: 1459375 - DNA, 15 bp, Homo sapiens
tcattgctgctattc

SEQ ID NO: 1459376 - DNA, 15 bp, Homo sapiens
gtcattgctgctatt

SEQ ID NO: 1459377 - DNA, 15 bp, Homo sapiens
tgtcattgctgctat

SEQ ID NO: 1459378 - DNA, 15 bp, Homo sapiens
ttgtcattgctgcta

SEQ ID NO: 1459379 - DNA, 15 bp, Homo sapiens
attgtcattgctgct

SEQ ID NO: 1459380 - DNA, 15 bp, Homo sapiens
cattgtcattgctgc

SEQ ID NO: 1459381 - DNA, 15 bp, Homo sapiens
acattgtcattgctg

SEQ ID NO: 1459382 - DNA, 15 bp, Homo sapiens
gacattgtcattgct

SEQ ID NO: 1459383 - DNA, 15 bp, Homo sapiens
tgacattgtcattgc

SEQ ID NO: 1459384 - DNA, 15 bp, Homo sapiens
atgacattgtcattg

SEQ ID NO: 1459385 - DNA, 15 bp, Homo sapiens
tatgacattgtcatt

SEQ ID NO: 1459386 - DNA, 15 bp, Homo sapiens
ctatgacattgtcat

SEQ ID NO: 1459387 - DNA, 15 bp, Homo sapiens
gctatgacattgtca

SEQ ID NO: 1459388 - DNA, 15 bp, Homo sapiens
ggctatgacattgtc

SEQ ID NO: 1459389 - DNA, 15 bp, Homo sapiens
gggctatgacattgt

SEQ ID NO: 1459390 - DNA, 15 bp, Homo sapiens
agggctatgacattg

SEQ ID NO: 1459391 - DNA, 15 bp, Homo sapiens
tagggctatgacatt

SEQ ID NO: 1459392 - DNA, 15 bp, Homo sapiens
ttagggctatgacat

SEQ ID NO: 1459393 - DNA, 15 bp, Homo sapiens
attagggctatgaca

SEQ ID NO: 1459394 - DNA, 15 bp, Homo sapiens
cattagggctatgac

SEQ ID NO: 1459395 - DNA, 15 bp, Homo sapiens
ccattagggctatga

SEQ ID NO: 1459396 - DNA, 15 bp, Homo sapiens
cccattagggctatg

SEQ ID NO: 1459397 - DNA, 15 bp, Homo sapiens
gcccattagggctat

SEQ ID NO: 1459398 - DNA, 15 bp, Homo sapiens
ggcccattagggcta

SEQ ID NO: 1459399 - DNA, 15 bp, Homo sapiens
aggcccattagggct

SEQ ID NO: 1459400 - DNA, 15 bp, Homo sapiens
aaggcccattagggc

SEQ ID NO: 1459401 - DNA, 15 bp, Homo sapiens
taaggcccattaggg

SEQ ID NO: 1459402 - DNA, 15 bp, Homo sapiens
gtaaggcccattagg

SEQ ID NO: 1459403 - DNA, 15 bp, Homo sapiens
tgtaaggcccattag

SEQ ID NO: 1459404 - DNA, 15 bp, Homo sapiens
ctgtaaggcccatta

SEQ ID NO: 1459405 - DNA, 15 bp, Homo sapiens
tctgtaaggcccatt

SEQ ID NO: 1459406 - DNA, 15 bp, Homo sapiens
ttctgtaaggcccat

SEQ ID NO: 1459407 - DNA, 15 bp, Homo sapiens
cttctgtaaggccca

SEQ ID NO: 1459408 - DNA, 15 bp, Homo sapiens
tcttctgtaaggccc

SEQ ID NO: 1459409 - DNA, 15 bp, Homo sapiens
ttcttctgtaaggcc

SEQ ID NO: 1459410 - DNA, 15 bp, Homo sapiens
tttcttctgtaaggc

SEQ ID NO: 1459411 - DNA, 15 bp, Homo sapiens
ttttcttctgtaagg

SEQ ID NO: 1459412 - DNA, 15 bp, Homo sapiens
cttttcttctgtaag

SEQ ID NO: 1459413 - DNA, 15 bp, Homo sapiens
tcttttcttctgtaa

SEQ ID NO: 1459414 - DNA, 15 bp, Homo sapiens
ttcttttcttctgta

SEQ ID NO: 1459415 - DNA, 15 bp, Homo sapiens
attcttttcttctgt

SEQ ID NO: 1459416 - DNA, 15 bp, Homo sapiens
tattcttttcttctg

SEQ ID NO: 1459417 - DNA, 15 bp, Homo sapiens
atattcttttcttct

SEQ ID NO: 1459418 - DNA, 15 bp, Homo sapiens
tatattcttttcttc

SEQ ID NO: 1459419 - DNA, 15 bp, Homo sapiens
atatattcttttctt

SEQ ID NO: 1459420 - DNA, 15 bp, Homo sapiens
tatatattcttttct

SEQ ID NO: 1459421 - DNA, 15 bp, Homo sapiens
gtatatattcttttc

SEQ ID NO: 1459422 - DNA, 15 bp, Homo sapiens
tgtatatattctttt

SEQ ID NO: 1459423 - DNA, 15 bp, Homo sapiens
atgtatatattcttt

SEQ ID NO: 1459424 - DNA, 15 bp, Homo sapiens
gatgtatatattctt

SEQ ID NO: 1459425 - DNA, 15 bp, Homo sapiens
tgatgtatatattct

SEQ ID NO: 1459426 - DNA, 15 bp, Homo sapiens
ttgatgtatatattc

SEQ ID NO: 1459427 - DNA, 15 bp, Homo sapiens
attgatgtatatatt

SEQ ID NO: 1459428 - DNA, 15 bp, Homo sapiens
cattgatgtatatat

SEQ ID NO: 1459429 - DNA, 15 bp, Homo sapiens
acattgatgtatata

SEQ ID NO: 1459430 - DNA, 15 bp, Homo sapiens
tacattgatgtatat

SEQ ID NO: 1459431 - DNA, 15 bp, Homo sapiens
atacattgatgtata

SEQ ID NO: 1459432 - DNA, 15 bp, Homo sapiens
tatacattgatgtat

SEQ ID NO: 1459433 - DNA, 15 bp, Homo sapiens
gtatacattgatgta

SEQ ID NO: 1459434 - DNA, 15 bp, Homo sapiens
tgtatacattgatgt

SEQ ID NO: 1459435 - DNA, 15 bp, Homo sapiens
gtgtatacattgatg

SEQ ID NO: 1459436 - DNA, 15 bp, Homo sapiens
tgtgtatacattgat

SEQ ID NO: 1459437 - DNA, 15 bp, Homo sapiens
atgtgtatacattga

SEQ ID NO: 1459438 - DNA, 15 bp, Homo sapiens
tatgtgtatacattg

SEQ ID NO: 1459439 - DNA, 15 bp, Homo sapiens
atatgtgtatacatt

SEQ ID NO: 1459440 - DNA, 15 bp, Homo sapiens
tatatgtgtatacat

SEQ ID NO: 1459441 - DNA, 15 bp, Homo sapiens
gtatatgtgtataca

SEQ ID NO: 1459442 - DNA, 15 bp, Homo sapiens
agtatatgtgtatac

SEQ ID NO: 1459443 - DNA, 15 bp, Homo sapiens
tagtatatgtgtata

SEQ ID NO: 1459444 - DNA, 15 bp, Homo sapiens
ttagtatatgtgtat

SEQ ID NO: 1459445 - DNA, 15 bp, Homo sapiens
attagtatatgtgta

SEQ ID NO: 1459446 - DNA, 15 bp, Homo sapiens
cattagtatatgtgt

SEQ ID NO: 1459447 - DNA, 15 bp, Homo sapiens
ccattagtatatgtg

SEQ ID NO: 1459448 - DNA, 15 bp, Homo sapiens
accattagtatatgt

SEQ ID NO: 1459449 - DNA, 15 bp, Homo sapiens
taccattagtatatg

SEQ ID NO: 1459450 - DNA, 15 bp, Homo sapiens
ctaccattagtatat

SEQ ID NO: 1459451 - DNA, 15 bp, Homo sapiens
gctaccattagtata

SEQ ID NO: 1459452 - DNA, 15 bp, Homo sapiens
tgctaccattagtat

SEQ ID NO: 1459453 - DNA, 15 bp, Homo sapiens
gtgctaccattagta

SEQ ID NO: 1459454 - DNA, 15 bp, Homo sapiens
tgtgctaccattagt

SEQ ID NO: 1459455 - DNA, 15 bp, Homo sapiens
ttgtgctaccattag

SEQ ID NO: 1459456 - DNA, 15 bp, Homo sapiens
cttgtgctaccatta

SEQ ID NO: 1459457 - DNA, 15 bp, Homo sapiens
acttgtgctaccatt

SEQ ID NO: 1459458 - DNA, 15 bp, Homo sapiens
gacttgtgctaccat

SEQ ID NO: 1459459 - DNA, 15 bp, Homo sapiens
agacttgtgctacca

SEQ ID NO: 1459460 - DNA, 15 bp, Homo sapiens
aagacttgtgctacc

SEQ ID NO: 1459461 - DNA, 15 bp, Homo sapiens
caagacttgtgctac

SEQ ID NO: 1459462 - DNA, 15 bp, Homo sapiens
ccaagacttgtgcta

SEQ ID NO: 1459463 - DNA, 15 bp, Homo sapiens
tccaagacttgtgct

SEQ ID NO: 1459464 - DNA, 15 bp, Homo sapiens
ctccaagacttgtgc

SEQ ID NO: 1459465 - DNA, 15 bp, Homo sapiens
tctccaagacttgtg

SEQ ID NO: 1459466 - DNA, 15 bp, Homo sapiens
atctccaagacttgt

SEQ ID NO: 1459467 - DNA, 15 bp, Homo sapiens
tatctccaagacttg

SEQ ID NO: 1459468 - DNA, 15 bp, Homo sapiens
ttatctccaagactt

SEQ ID NO: 1459469 - DNA, 15 bp, Homo sapiens
attatctccaagact

SEQ ID NO: 1459470 - DNA, 15 bp, Homo sapiens
aattatctccaagac

SEQ ID NO: 1459471 - DNA, 15 bp, Homo sapiens
aaattatctccaaga

SEQ ID NO: 1459472 - DNA, 15 bp, Homo sapiens
gaaattatctccaag

SEQ ID NO: 1459473 - DNA, 15 bp, Homo sapiens
cgaaattatctccaa

SEQ ID NO: 1459474 - DNA, 15 bp, Homo sapiens
acgaaattatctcca

SEQ ID NO: 1459475 - DNA, 15 bp, Homo sapiens
cacgaaattatctcc

SEQ ID NO: 1459476 - DNA, 15 bp, Homo sapiens
gcacgaaattatctc

SEQ ID NO: 1459477 - DNA, 15 bp, Homo sapiens
agcacgaaattatct

SEQ ID NO: 1459478 - DNA, 15 bp, Homo sapiens
tagcacgaaattatc

SEQ ID NO: 1459479 - DNA, 15 bp, Homo sapiens
atagcacgaaattat

SEQ ID NO: 1459480 - DNA, 15 bp, Homo sapiens
tatagcacgaaatta

SEQ ID NO: 1459481 - DNA, 15 bp, Homo sapiens
ttatagcacgaaatt

SEQ ID NO: 1459482 - DNA, 15 bp, Homo sapiens
cttatagcacgaaat

SEQ ID NO: 1459483 - DNA, 15 bp, Homo sapiens
tcttatagcacgaaa

SEQ ID NO: 1459484 - DNA, 15 bp, Homo sapiens
ttcttatagcacgaa

SEQ ID NO: 1459485 - DNA, 15 bp, Homo sapiens
attcttatagcacga

SEQ ID NO: 1459486 - DNA, 15 bp, Homo sapiens
aattcttatagcacg

SEQ ID NO: 1459487 - DNA, 15 bp, Homo sapiens
gaattcttatagcac

SEQ ID NO: 1459488 - DNA, 15 bp, Homo sapiens
ggaattcttatagca

SEQ ID NO: 1459489 - DNA, 15 bp, Homo sapiens
tggaattcttatagc

SEQ ID NO: 1459490 - DNA, 15 bp, Homo sapiens
ttggaattcttatag

SEQ ID NO: 1459491 - DNA, 15 bp, Homo sapiens
tttggaattcttata

SEQ ID NO: 1459492 - DNA, 15 bp, Homo sapiens
ttttggaattcttat

SEQ ID NO: 1459493 - DNA, 15 bp, Homo sapiens
tttttggaattctta

SEQ ID NO: 1459494 - DNA, 15 bp, Homo sapiens
ttttttggaattctt

SEQ ID NO: 1459495 - DNA, 15 bp, Homo sapiens
tttttttggaattct

SEQ ID NO: 1459496 - DNA, 15 bp, Homo sapiens
ctttttttggaattc

SEQ ID NO: 1459497 - DNA, 15 bp, Homo sapiens
cctttttttggaatt

SEQ ID NO: 1459498 - DNA, 15 bp, Homo sapiens
gcctttttttggaat

SEQ ID NO: 1459499 - DNA, 15 bp, Homo sapiens
tgcctttttttggaa

SEQ ID NO: 1459500 - DNA, 15 bp, Homo sapiens
ttgcctttttttgga

SEQ ID NO: 1459501 - DNA, 15 bp, Homo sapiens
attgcctttttttgg

SEQ ID NO: 1459502 - DNA, 15 bp, Homo sapiens
aattgcctttttttg

SEQ ID NO: 1459503 - DNA, 15 bp, Homo sapiens
aaattgccttttttt

SEQ ID NO: 1459504 - DNA, 15 bp, Homo sapiens
gaaattgcctttttt

SEQ ID NO: 1459505 - DNA, 15 bp, Homo sapiens
cagaaattgcctttt

SEQ ID NO: 1459506 - DNA, 15 bp, Homo sapiens
tcagaaattgccttt

SEQ ID NO: 1459507 - DNA, 15 bp, Homo sapiens
ttcagaaattgcctt

SEQ ID NO: 1459508 - DNA, 15 bp, Homo sapiens
tttcagaaattgcct

SEQ ID NO: 1459509 - DNA, 15 bp, Homo sapiens
ctttcagaaattgcc

SEQ ID NO: 1459510 - DNA, 15 bp, Homo sapiens
gctttcagaaattgc

SEQ ID NO: 1459511 - DNA, 15 bp, Homo sapiens
agctttcagaaattg

SEQ ID NO: 1459512 - DNA, 15 bp, Homo sapiens
cagctttcagaaatt

SEQ ID NO: 1459513 - DNA, 15 bp, Homo sapiens
ccagctttcagaaat

SEQ ID NO: 1459514 - DNA, 15 bp, Homo sapiens
cccagctttcagaaa

SEQ ID NO: 1459515 - DNA, 15 bp, Homo sapiens
tcccagctttcagaa

SEQ ID NO: 1459516 - DNA, 15 bp, Homo sapiens
atcccagctttcaga

SEQ ID NO: 1459517 - DNA, 15 bp, Homo sapiens
catcccagctttcag

SEQ ID NO: 1459518 - DNA, 15 bp, Homo sapiens
tcatcccagctttca

SEQ ID NO: 1459519 - DNA, 15 bp, Homo sapiens
atcatcccagctttc

SEQ ID NO: 1459520 - DNA, 15 bp, Homo sapiens
aatcatcccagcttt

SEQ ID NO: 1459521 - DNA, 15 bp, Homo sapiens
caatcatcccagctt

SEQ ID NO: 1459522 - DNA, 15 bp, Homo sapiens
acaatcatcccagct

SEQ ID NO: 1459523 - DNA, 15 bp, Homo sapiens
aacaatcatcccagc

SEQ ID NO: 1459524 - DNA, 15 bp, Homo sapiens
caacaatcatcccag

SEQ ID NO: 1459525 - DNA, 15 bp, Homo sapiens
gcaacaatcatccca

SEQ ID NO: 1459526 - DNA, 15 bp, Homo sapiens
ggcaacaatcatccc

SEQ ID NO: 1459527 - DNA, 15 bp, Homo sapiens
aggcaacaatcatcc

SEQ ID NO: 1459528 - DNA, 15 bp, Homo sapiens
taggcaacaatcatc

SEQ ID NO: 1459529 - DNA, 15 bp, Homo sapiens
ttaggcaacaatcat

SEQ ID NO: 1459530 - DNA, 15 bp, Homo sapiens
attaggcaacaatca

SEQ ID NO: 1459531 - DNA, 15 bp, Homo sapiens
aattaggcaacaatc

SEQ ID NO: 1459532 - DNA, 15 bp, Homo sapiens
caattaggcaacaat

SEQ ID NO: 1459533 - DNA, 15 bp, Homo sapiens
acaattaggcaacaa

SEQ ID NO: 1459534 - DNA, 15 bp, Homo sapiens
aacaattaggcaaca

SEQ ID NO: 1459535 - DNA, 15 bp, Homo sapiens
taacaattaggcaac

SEQ ID NO: 1459536 - DNA, 15 bp, Homo sapiens
ttaacaattaggcaa

SEQ ID NO: 1459537 - DNA, 15 bp, Homo sapiens
tttaacaattaggca

SEQ ID NO: 1459538 - DNA, 15 bp, Homo sapiens
ttttaacaattaggc

SEQ ID NO: 1459539 - DNA, 15 bp, Homo sapiens
attttaacaattagg

SEQ ID NO: 1459540 - DNA, 15 bp, Homo sapiens
cattttaacaattag

SEQ ID NO: 1459541 - DNA, 15 bp, Homo sapiens
tcattttaacaatta

SEQ ID NO: 1459542 - DNA, 15 bp, Homo sapiens
gtcattttaacaatt

SEQ ID NO: 1459543 - DNA, 15 bp, Homo sapiens
agtcattttaacaat

SEQ ID NO: 1459544 - DNA, 15 bp, Homo sapiens
cagtcattttaacaa

SEQ ID NO: 1459545 - DNA, 15 bp, Homo sapiens
gcagtcattttaaca

SEQ ID NO: 1459546 - DNA, 15 bp, Homo sapiens
cgcagtcattttaac

SEQ ID NO: 1459547 - DNA, 15 bp, Homo sapiens
acgcagtcattttaa

SEQ ID NO: 1459548 - DNA, 15 bp, Homo sapiens
aacgcagtcatttta

SEQ ID NO: 1459549 - DNA, 15 bp, Homo sapiens
aaacgcagtcatttt

SEQ ID NO: 1459550 - DNA, 15 bp, Homo sapiens
taaacgcagtcattt

SEQ ID NO: 1459551 - DNA, 15 bp, Homo sapiens
gtaaacgcagtcatt

SEQ ID NO: 1459552 - DNA, 15 bp, Homo sapiens
agtaaacgcagtcat

SEQ ID NO: 1459553 - DNA, 15 bp, Homo sapiens
aagtaaacgcagtca

SEQ ID NO: 1459554 - DNA, 15 bp, Homo sapiens
taagtaaacgcagtc

SEQ ID NO: 1459555 - DNA, 15 bp, Homo sapiens
ttaagtaaacgcagt

SEQ ID NO: 1459556 - DNA, 15 bp, Homo sapiens
attaagtaaacgcag

SEQ ID NO: 1459557 - DNA, 15 bp, Homo sapiens
tattaagtaaacgca

SEQ ID NO: 1459558 - DNA, 15 bp, Homo sapiens
atattaagtaaacgc

SEQ ID NO: 1459559 - DNA, 15 bp, Homo sapiens
tatattaagtaaacg

SEQ ID NO: 1459560 - DNA, 15 bp, Homo sapiens
ttatattaagtaaac

SEQ ID NO: 1459561 - DNA, 15 bp, Homo sapiens
tttatattaagtaaa

SEQ ID NO: 1459562 - DNA, 15 bp, Homo sapiens
atttatattaagtaa

SEQ ID NO: 1459563 - DNA, 15 bp, Homo sapiens
aatttatattaagta

SEQ ID NO: 1459564 - DNA, 15 bp, Homo sapiens
aaatttatattaagt

SEQ ID NO: 1459565 - DNA, 15 bp, Homo sapiens
aaaatttatattaag

SEQ ID NO: 1459566 - DNA, 15 bp, Homo sapiens
taaaatttatattaa

SEQ ID NO: 1459567 - DNA, 15 bp, Homo sapiens
ataaaatttatatta

SEQ ID NO: 1459568 - DNA, 15 bp, Homo sapiens
aataaaatttatatt

SEQ ID NO: 1459569 - DNA, 15 bp, Homo sapiens
aaataaaatttatat

SEQ ID NO: 1459570 - DNA, 15 bp, Homo sapiens
caaataaaatttata

SEQ ID NO: 1459571 - DNA, 15 bp, Homo sapiens
tcaaataaaatttat

SEQ ID NO: 1459572 - DNA, 15 bp, Homo sapiens
ttcaaataaaattta

SEQ ID NO: 1459573 - DNA, 15 bp, Homo sapiens
tttcaaataaaattt

SEQ ID NO: 1459574 - DNA, 15 bp, Homo sapiens
atttcaaataaaatt

SEQ ID NO: 1459575 - DNA, 15 bp, Homo sapiens
tatttcaaataaaat

SEQ ID NO: 1459576 - DNA, 15 bp, Homo sapiens
gtatttcaaataaaa

SEQ ID NO: 1459577 - DNA, 15 bp, Homo sapiens
agtatttcaaataaa

SEQ ID NO: 1459578 - DNA, 15 bp, Homo sapiens
tagtatttcaaataa

SEQ ID NO: 1459579 - DNA, 15 bp, Homo sapiens
atagtatttcaaata

SEQ ID NO: 1459580 - DNA, 15 bp, Homo sapiens
catagtatttcaaat

SEQ ID NO: 1459581 - DNA, 15 bp, Homo sapiens
tcatagtatttcaaa

SEQ ID NO: 1459582 - DNA, 15 bp, Homo sapiens
ttcatagtatttcaa

SEQ ID NO: 1459583 - DNA, 15 bp, Homo sapiens
tttcatagtatttca

SEQ ID NO: 1459584 - DNA, 15 bp, Homo sapiens
atttcatagtatttc

SEQ ID NO: 1459585 - DNA, 15 bp, Homo sapiens
tatttcatagtattt

SEQ ID NO: 1459586 - DNA, 15 bp, Homo sapiens
ttatttcatagtatt

SEQ ID NO: 1459587 - DNA, 15 bp, Homo sapiens
tttatttcatagtat

SEQ ID NO: 1459588 - DNA, 15 bp, Homo sapiens
ttttatttcatagta

SEQ ID NO: 1459589 - DNA, 15 bp, Homo sapiens
gttttatttcatagt

SEQ ID NO: 1459590 - DNA, 15 bp, Homo sapiens
tgttttatttcatag

SEQ ID NO: 1459591 - DNA, 15 bp, Homo sapiens
atgttttatttcata

SEQ ID NO: 1459592 - DNA, 15 bp, Homo sapiens
gatgttttatttcat

SEQ ID NO: 1459593 - DNA, 15 bp, Homo sapiens
tgatgttttatttca

SEQ ID NO: 1459594 - DNA, 15 bp, Homo sapiens
ttgatgttttatttc

SEQ ID NO: 1459595 - DNA, 15 bp, Homo sapiens
attgatgttttattt

SEQ ID NO: 1459596 - DNA, 15 bp, Homo sapiens
tattgatgttttatt

SEQ ID NO: 1459597 - DNA, 15 bp, Homo sapiens
ctattgatgttttat

SEQ ID NO: 1459598 - DNA, 15 bp, Homo sapiens
tctattgatgtttta

SEQ ID NO: 1459599 - DNA, 15 bp, Homo sapiens
ttctattgatgtttt

SEQ ID NO: 1459600 - DNA, 15 bp, Homo sapiens
tttctattgatgttt

SEQ ID NO: 1459601 - DNA, 15 bp, Homo sapiens
atttctattgatgtt

SEQ ID NO: 1459602 - DNA, 15 bp, Homo sapiens
gatttctattgatgt

SEQ ID NO: 1459603 - DNA, 15 bp, Homo sapiens
agatttctattgatg

SEQ ID NO: 1459604 - DNA, 15 bp, Homo sapiens
aagatttctattgat

SEQ ID NO: 1459605 - DNA, 15 bp, Homo sapiens
caagatttctattga

SEQ ID NO: 1459606 - DNA, 15 bp, Homo sapiens
acaagatttctattg

SEQ ID NO: 1459607 - DNA, 15 bp, Homo sapiens
tacaagatttctatt

SEQ ID NO: 1459608 - DNA, 15 bp, Homo sapiens
atacaagatttctat

SEQ ID NO: 1459609 - DNA, 15 bp, Homo sapiens
aatacaagatttcta

SEQ ID NO: 1459610 - DNA, 15 bp, Homo sapiens
taatacaagatttct

SEQ ID NO: 1459611 - DNA, 15 bp, Homo sapiens
ataatacaagatttc

SEQ ID NO: 1459612 - DNA, 15 bp, Homo sapiens
cataatacaagattt

SEQ ID NO: 1459613 - DNA, 15 bp, Homo sapiens
acataatacaagatt

SEQ ID NO: 1459614 - DNA, 15 bp, Homo sapiens
cacataatacaagat

SEQ ID NO: 1459615 - DNA, 15 bp, Homo sapiens
gcacataatacaaga

SEQ ID NO: 1459616 - DNA, 15 bp, Homo sapiens
tgcacataatacaag

SEQ ID NO: 1459617 - DNA, 15 bp, Homo sapiens
ttgcacataatacaa

SEQ ID NO: 1459618 - DNA, 15 bp, Homo sapiens
tttgcacataataca

SEQ ID NO: 1459619 - DNA, 15 bp, Homo sapiens
ttttgcacataatac

SEQ ID NO: 1459620 - DNA, 15 bp, Homo sapiens
attttgcacataata

SEQ ID NO: 1459621 - DNA, 15 bp, Homo sapiens
aattttgcacataat

SEQ ID NO: 1459622 - DNA, 15 bp, Homo sapiens
aaattttgcacataa

SEQ ID NO: 1459623 - DNA, 15 bp, Homo sapiens
caaattttgcacata

SEQ ID NO: 1459624 - DNA, 15 bp, Homo sapiens
tcaaattttgcacat

SEQ ID NO: 1459625 - DNA, 15 bp, Homo sapiens
ttcaaattttgcaca

SEQ ID NO: 1459626 - DNA, 15 bp, Homo sapiens
tttcaaattttgcac

SEQ ID NO: 1459627 - DNA, 15 bp, Homo sapiens
atttcaaattttgca

SEQ ID NO: 1459628 - DNA, 15 bp, Homo sapiens
aatttcaaattttgc

SEQ ID NO: 1459629 - DNA, 15 bp, Homo sapiens
taatttcaaattttg

SEQ ID NO: 1459630 - DNA, 15 bp, Homo sapiens
gtaatttcaaatttt

SEQ ID NO: 1459631 - DNA, 15 bp, Homo sapiens
tgtaatttcaaattt

SEQ ID NO: 1459632 - DNA, 15 bp, Homo sapiens
gtgtaatttcaaatt

SEQ ID NO: 1459633 - DNA, 15 bp, Homo sapiens
agtgtaatttcaaat

SEQ ID NO: 1459634 - DNA, 15 bp, Homo sapiens
cagtgtaatttcaaa

SEQ ID NO: 1459635 - DNA, 15 bp, Homo sapiens
acagtgtaatttcaa

SEQ ID NO: 1459636 - DNA, 15 bp, Homo sapiens
cacagtgtaatttca

SEQ ID NO: 1459637 - DNA, 15 bp, Homo sapiens
gcacagtgtaatttc

SEQ ID NO: 1459638 - DNA, 15 bp, Homo sapiens
tgcacagtgtaattt

SEQ ID NO: 1459639 - DNA, 15 bp, Homo sapiens
atgcacagtgtaatt

SEQ ID NO: 1459640 - DNA, 15 bp, Homo sapiens
gatgcacagtgtaat

SEQ ID NO: 1459641 - DNA, 15 bp, Homo sapiens
tgatgcacagtgtaa

SEQ ID NO: 1459642 - DNA, 15 bp, Homo sapiens
ttgatgcacagtgta

SEQ ID NO: 1459643 - DNA, 15 bp, Homo sapiens
tttgatgcacagtgt

SEQ ID NO: 1459644 - DNA, 15 bp, Homo sapiens
ctttgatgcacagtg

SEQ ID NO: 1459645 - DNA, 15 bp, Homo sapiens
cctttgatgcacagt

SEQ ID NO: 1459646 - DNA, 15 bp, Homo sapiens
tcctttgatgcacag

SEQ ID NO: 1459647 - DNA, 15 bp, Homo sapiens
ttcctttgatgcaca

SEQ ID NO: 1459648 - DNA, 15 bp, Homo sapiens
tttcctttgatgcac

SEQ ID NO: 1459649 - DNA, 15 bp, Homo sapiens
ttttcctttgatgca

SEQ ID NO: 1459650 - DNA, 15 bp, Homo sapiens
tttttcctttgatgc

SEQ ID NO: 1459651 - DNA, 15 bp, Homo sapiens
ttttttcctttgatg

SEQ ID NO: 1459652 - DNA, 15 bp, Homo sapiens
attttttcctttgat

SEQ ID NO: 1459653 - DNA, 15 bp, Homo sapiens
cattttttcctttga

SEQ ID NO: 1459654 - DNA, 15 bp, Homo sapiens
gcattttttcctttg

SEQ ID NO: 1459655 - DNA, 15 bp, Homo sapiens
tgcattttttccttt

SEQ ID NO: 1459656 - DNA, 15 bp, Homo sapiens
ttgcattttttcctt

SEQ ID NO: 1459657 - DNA, 15 bp, Homo sapiens
cttgcattttttcct

SEQ ID NO: 1459658 - DNA, 15 bp, Homo sapiens
ccttgcattttttcc

SEQ ID NO: 1459659 - DNA, 15 bp, Homo sapiens
tccttgcattttttc

SEQ ID NO: 1459660 - DNA, 15 bp, Homo sapiens
atccttgcatttttt

SEQ ID NO: 1459661 - DNA, 15 bp, Homo sapiens
aatccttgcattttt

SEQ ID NO: 1459662 - DNA, 15 bp, Homo sapiens
aaatccttgcatttt

SEQ ID NO: 1459663 - DNA, 15 bp, Homo sapiens
aaaatccttgcattt

SEQ ID NO: 1459664 - DNA, 15 bp, Homo sapiens
caaaatccttgcatt

SEQ ID NO: 1459665 - DNA, 15 bp, Homo sapiens
acaaaatccttgcat

SEQ ID NO: 1459666 - DNA, 15 bp, Homo sapiens
tacaaaatccttgca

SEQ ID NO: 1459667 - DNA, 15 bp, Homo sapiens
ttacaaaatccttgc

SEQ ID NO: 1459668 - DNA, 15 bp, Homo sapiens
attacaaaatccttg

SEQ ID NO: 1459669 - DNA, 15 bp, Homo sapiens
aattacaaaatcctt

SEQ ID NO: 1459670 - DNA, 15 bp, Homo sapiens
aaattacaaaatcct

SEQ ID NO: 1459671 - DNA, 15 bp, Homo sapiens
gaaattacaaaatcc

SEQ ID NO: 1459672 - DNA, 15 bp, Homo sapiens
tgaaattacaaaatc

SEQ ID NO: 1459673 - DNA, 15 bp, Homo sapiens
ttgaaattacaaaat

SEQ ID NO: 1459674 - DNA, 15 bp, Homo sapiens
tttgaaattacaaaa

SEQ ID NO: 1459675 - DNA, 15 bp, Homo sapiens
ctttgaaattacaaa

SEQ ID NO: 1459676 - DNA, 15 bp, Homo sapiens
gctttgaaattacaa

SEQ ID NO: 1459677 - DNA, 15 bp, Homo sapiens
ggctttgaaattaca

SEQ ID NO: 1459678 - DNA, 15 bp, Homo sapiens
tggctttgaaattac

SEQ ID NO: 1459679 - DNA, 15 bp, Homo sapiens
ctggctttgaaatta

SEQ ID NO: 1459680 - DNA, 15 bp, Homo sapiens
actggctttgaaatt

SEQ ID NO: 1459681 - DNA, 15 bp, Homo sapiens
gactggctttgaaat

SEQ ID NO: 1459682 - DNA, 15 bp, Homo sapiens
agactggctttgaaa

SEQ ID NO: 1459683 - DNA, 15 bp, Homo sapiens
cagactggctttgaa

SEQ ID NO: 1459684 - DNA, 15 bp, Homo sapiens
acagactggctttga

SEQ ID NO: 1459685 - DNA, 15 bp, Homo sapiens
tacagactggctttg

SEQ ID NO: 1459686 - DNA, 15 bp, Homo sapiens
ttacagactggcttt

SEQ ID NO: 1459687 - DNA, 15 bp, Homo sapiens
tttacagactggctt

SEQ ID NO: 1459688 - DNA, 15 bp, Homo sapiens
ttttacagactggct

SEQ ID NO: 1459689 - DNA, 15 bp, Homo sapiens
gttttacagactggc

SEQ ID NO: 1459690 - DNA, 15 bp, Homo sapiens
agttttacagactgg

SEQ ID NO: 1459691 - DNA, 15 bp, Homo sapiens
tagttttacagactg

SEQ ID NO: 1459692 - DNA, 15 bp, Homo sapiens
atagttttacagact

SEQ ID NO: 1459693 - DNA, 15 bp, Homo sapiens
aatagttttacagac

SEQ ID NO: 1459694 - DNA, 15 bp, Homo sapiens
aaatagttttacaga

SEQ ID NO: 1459695 - DNA, 15 bp, Homo sapiens
taaatagttttacag

SEQ ID NO: 1459696 - DNA, 15 bp, Homo sapiens
ataaatagttttaca

SEQ ID NO: 1459697 - DNA, 15 bp, Homo sapiens
cataaatagttttac

SEQ ID NO: 1459698 - DNA, 15 bp, Homo sapiens
acataaatagtttta

SEQ ID NO: 1459699 - DNA, 15 bp, Homo sapiens
aacataaatagtttt

SEQ ID NO: 1459700 - DNA, 15 bp, Homo sapiens
taacataaatagttt

SEQ ID NO: 1459701 - DNA, 15 bp, Homo sapiens
ttaacataaatagtt

SEQ ID NO: 1459702 - DNA, 15 bp, Homo sapiens
attaacataaatagt

SEQ ID NO: 1459703 - DNA, 15 bp, Homo sapiens
cattaacataaatag

SEQ ID NO: 1459704 - DNA, 15 bp, Homo sapiens
ccattaacataaata

SEQ ID NO: 1459705 - DNA, 15 bp, Homo sapiens
gccattaacataaat

SEQ ID NO: 1459706 - DNA, 15 bp, Homo sapiens
tgccattaacataaa

SEQ ID NO: 1459707 - DNA, 15 bp, Homo sapiens
gtgccattaacataa

SEQ ID NO: 1459708 - DNA, 15 bp, Homo sapiens
tgtgccattaacata

SEQ ID NO: 1459709 - DNA, 15 bp, Homo sapiens
atgtgccattaacat

SEQ ID NO: 1459710 - DNA, 15 bp, Homo sapiens
catgtgccattaaca

SEQ ID NO: 1459711 - DNA, 15 bp, Homo sapiens
tcatgtgccattaac

SEQ ID NO: 1459712 - DNA, 15 bp, Homo sapiens
atcatgtgccattaa

SEQ ID NO: 1459713 - DNA, 15 bp, Homo sapiens
tatcatgtgccatta

SEQ ID NO: 1459714 - DNA, 15 bp, Homo sapiens
ctatcatgtgccatt

SEQ ID NO: 1459715 - DNA, 15 bp, Homo sapiens
gctatcatgtgccat

SEQ ID NO: 1459716 - DNA, 15 bp, Homo sapiens
agctatcatgtgcca

SEQ ID NO: 1459717 - DNA, 15 bp, Homo sapiens
gagctatcatgtgcc

SEQ ID NO: 1459718 - DNA, 15 bp, Homo sapiens
ggagctatcatgtgc

SEQ ID NO: 1459719 - DNA, 15 bp, Homo sapiens
tggagctatcatgtg

SEQ ID NO: 1459720 - DNA, 15 bp, Homo sapiens
gtggagctatcatgt

SEQ ID NO: 1459721 - DNA, 15 bp, Homo sapiens
agtggagctatcatg

SEQ ID NO: 1459722 - DNA, 15 bp, Homo sapiens
tagtggagctatcat

SEQ ID NO: 1459723 - DNA, 15 bp, Homo sapiens
atagtggagctatca

SEQ ID NO: 1459724 - DNA, 15 bp, Homo sapiens
tatagtggagctatc

SEQ ID NO: 1459725 - DNA, 15 bp, Homo sapiens
ttatagtggagctat

SEQ ID NO: 1459726 - DNA, 15 bp, Homo sapiens
cttatagtggagcta

SEQ ID NO: 1459727 - DNA, 15 bp, Homo sapiens
acttatagtggagct

SEQ ID NO: 1459728 - DNA, 15 bp, Homo sapiens
tacttatagtggagc

SEQ ID NO: 1459729 - DNA, 15 bp, Homo sapiens
ttacttatagtggag

SEQ ID NO: 1459730 - DNA, 15 bp, Homo sapiens
tttacttatagtgga

SEQ ID NO: 1459731 - DNA, 15 bp, Homo sapiens
ttttacttatagtgg

SEQ ID NO: 1459732 - DNA, 15 bp, Homo sapiens
tttttacttatagtg

SEQ ID NO: 1459733 - DNA, 15 bp, Homo sapiens
ctttttacttatagt

SEQ ID NO: 1459734 - DNA, 15 bp, Homo sapiens
tctttttacttatag

SEQ ID NO: 1459735 - DNA, 15 bp, Homo sapiens
ttctttttacttata

SEQ ID NO: 1459736 - DNA, 15 bp, Homo sapiens
tttctttttacttat

SEQ ID NO: 1459737 - DNA, 15 bp, Homo sapiens
atttctttttactta

SEQ ID NO: 1459738 - DNA, 15 bp, Homo sapiens
tatttctttttactt

SEQ ID NO: 1459739 - DNA, 15 bp, Homo sapiens
gtatttctttttact

SEQ ID NO: 1459740 - DNA, 15 bp, Homo sapiens
ggtatttctttttac

SEQ ID NO: 1459741 - DNA, 15 bp, Homo sapiens
gggtatttcttttta

SEQ ID NO: 1459742 - DNA, 15 bp, Homo sapiens
tgggtatttcttttt

SEQ ID NO: 1459743 - DNA, 15 bp, Homo sapiens
ttgggtatttctttt

SEQ ID NO: 1459744 - DNA, 15 bp, Homo sapiens
gttgggtatttcttt

SEQ ID NO: 1459745 - DNA, 15 bp, Homo sapiens
tgttgggtatttctt

SEQ ID NO: 1459746 - DNA, 15 bp, Homo sapiens
gtgttgggtatttct

SEQ ID NO: 1459747 - DNA, 15 bp, Homo sapiens
ggtgttgggtatttc

SEQ ID NO: 1459748 - DNA, 15 bp, Homo sapiens
gggtgttgggtattt

SEQ ID NO: 1459749 - DNA, 15 bp, Homo sapiens
agggtgttgggtatt

SEQ ID NO: 1459750 - DNA, 15 bp, Homo sapiens
aagggtgttgggtat

SEQ ID NO: 1459751 - DNA, 15 bp, Homo sapiens
aaagggtgttgggta

SEQ ID NO: 1459752 - DNA, 15 bp, Homo sapiens
caaagggtgttgggt

SEQ ID NO: 1459753 - DNA, 15 bp, Homo sapiens
acaaagggtgttggg

SEQ ID NO: 1459754 - DNA, 15 bp, Homo sapiens
gacaaagggtgttgg

SEQ ID NO: 1459755 - DNA, 15 bp, Homo sapiens
tgacaaagggtgttg

SEQ ID NO: 1459756 - DNA, 15 bp, Homo sapiens
ttgacaaagggtgtt

SEQ ID NO: 1459757 - DNA, 15 bp, Homo sapiens
attgacaaagggtgt

SEQ ID NO: 1459758 - DNA, 15 bp, Homo sapiens
gattgacaaagggtg

SEQ ID NO: 1459759 - DNA, 15 bp, Homo sapiens
agattgacaaagggt

SEQ ID NO: 1459760 - DNA, 15 bp, Homo sapiens
aagattgacaaaggg

SEQ ID NO: 1459761 - DNA, 15 bp, Homo sapiens
gaagattgacaaagg

SEQ ID NO: 1459762 - DNA, 15 bp, Homo sapiens
tgaagattgacaaag

SEQ ID NO: 1459763 - DNA, 15 bp, Homo sapiens
ctgaagattgacaaa

SEQ ID NO: 1459764 - DNA, 15 bp, Homo sapiens
cctgaagattgacaa

SEQ ID NO: 1459765 - DNA, 15 bp, Homo sapiens
ccctgaagattgaca

SEQ ID NO: 1459766 - DNA, 15 bp, Homo sapiens
tccctgaagattgac

SEQ ID NO: 1459767 - DNA, 15 bp, Homo sapiens
ttccctgaagattga

SEQ ID NO: 1459768 - DNA, 15 bp, Homo sapiens
tttccctgaagattg

SEQ ID NO: 1459769 - DNA, 15 bp, Homo sapiens
ttttccctgaagatt

SEQ ID NO: 1459770 - DNA, 15 bp, Homo sapiens
attttccctgaagat

SEQ ID NO: 1459771 - DNA, 15 bp, Homo sapiens
cattttccctgaaga

SEQ ID NO: 1459772 - DNA, 15 bp, Homo sapiens
ccattttccctgaag

SEQ ID NO: 1459773 - DNA, 15 bp, Homo sapiens
cccattttccctgaa

SEQ ID NO: 1459774 - DNA, 15 bp, Homo sapiens
acccattttccctga

SEQ ID NO: 1459775 - DNA, 15 bp, Homo sapiens
aacccattttccctg

SEQ ID NO: 1459776 - DNA, 15 bp, Homo sapiens
gaacccattttccct

SEQ ID NO: 1459777 - DNA, 15 bp, Homo sapiens
agaacccattttccc

SEQ ID NO: 1459778 - DNA, 15 bp, Homo sapiens
cagaacccattttcc

SEQ ID NO: 1459779 - DNA, 15 bp, Homo sapiens
tcagaacccattttc

SEQ ID NO: 1459780 - DNA, 15 bp, Homo sapiens
ttcagaacccatttt

SEQ ID NO: 1459781 - DNA, 15 bp, Homo sapiens
attcagaacccattt

SEQ ID NO: 1459782 - DNA, 15 bp, Homo sapiens
aattcagaacccatt

SEQ ID NO: 1459783 - DNA, 15 bp, Homo sapiens
taattcagaacccat

SEQ ID NO: 1459784 - DNA, 15 bp, Homo sapiens
ataattcagaaccca

SEQ ID NO: 1459785 - DNA, 15 bp, Homo sapiens
cataattcagaaccc

SEQ ID NO: 1459786 - DNA, 15 bp, Homo sapiens
tcataattcagaacc

SEQ ID NO: 1459787 - DNA, 15 bp, Homo sapiens
ctcataattcagaac

SEQ ID NO: 1459788 - DNA, 15 bp, Homo sapiens
tctcataattcagaa

SEQ ID NO: 1459789 - DNA, 15 bp, Homo sapiens
ctctcataattcaga

SEQ ID NO: 1459790 - DNA, 15 bp, Homo sapiens
gctctcataattcag

SEQ ID NO: 1459791 - DNA, 15 bp, Homo sapiens
agctctcataattca

SEQ ID NO: 1459792 - DNA, 15 bp, Homo sapiens
cagctctcataattc

SEQ ID NO: 1459793 - DNA, 15 bp, Homo sapiens
acagctctcataatt

SEQ ID NO: 1459794 - DNA, 15 bp, Homo sapiens
cacagctctcataat

SEQ ID NO: 1459795 - DNA, 15 bp, Homo sapiens
tcacagctctcataa

SEQ ID NO: 1459796 - DNA, 15 bp, Homo sapiens
gtcacagctctcata

SEQ ID NO: 1459797 - DNA, 15 bp, Homo sapiens
agtcacagctctcat

SEQ ID NO: 1459798 - DNA, 15 bp, Homo sapiens
tagtcacagctctca

SEQ ID NO: 1459799 - DNA, 15 bp, Homo sapiens
ttagtcacagctctc

SEQ ID NO: 1459800 - DNA, 15 bp, Homo sapiens
attagtcacagctct

SEQ ID NO: 1459801 - DNA, 15 bp, Homo sapiens
cattagtcacagctc

SEQ ID NO: 1459802 - DNA, 15 bp, Homo sapiens
tcattagtcacagct

SEQ ID NO: 1459803 - DNA, 15 bp, Homo sapiens
ctcattagtcacagc

SEQ ID NO: 1459804 - DNA, 15 bp, Homo sapiens
actcattagtcacag

SEQ ID NO: 1459805 - DNA, 15 bp, Homo sapiens
cactcattagtcaca

SEQ ID NO: 1459806 - DNA, 15 bp, Homo sapiens
tcactcattagtcac

SEQ ID NO: 1459807 - DNA, 15 bp, Homo sapiens
atcactcattagtca

SEQ ID NO: 1459808 - DNA, 15 bp, Homo sapiens
aatcactcattagtc

SEQ ID NO: 1459809 - DNA, 15 bp, Homo sapiens
aaatcactcattagt

SEQ ID NO: 1459810 - DNA, 15 bp, Homo sapiens
aaaatcactcattag

SEQ ID NO: 1459811 - DNA, 15 bp, Homo sapiens
gaaaatcactcatta

SEQ ID NO: 1459812 - DNA, 15 bp, Homo sapiens
tgaaaatcactcatt

SEQ ID NO: 1459813 - DNA, 15 bp, Homo sapiens
ctgaaaatcactcat

SEQ ID NO: 1459814 - DNA, 15 bp, Homo sapiens
cctgaaaatcactca

SEQ ID NO: 1459815 - DNA, 15 bp, Homo sapiens
tcctgaaaatcactc

SEQ ID NO: 1459816 - DNA, 15 bp, Homo sapiens
ttcctgaaaatcact

SEQ ID NO: 1459817 - DNA, 15 bp, Homo sapiens
attcctgaaaatcac

SEQ ID NO: 1459818 - DNA, 15 bp, Homo sapiens
cattcctgaaaatca

SEQ ID NO: 1459819 - DNA, 15 bp, Homo sapiens
gcattcctgaaaatc

SEQ ID NO: 1459820 - DNA, 15 bp, Homo sapiens
tgcattcctgaaaat

SEQ ID NO: 1459821 - DNA, 15 bp, Homo sapiens
atgcattcctgaaaa

SEQ ID NO: 1459822 - DNA, 15 bp, Homo sapiens
aatgcattcctgaaa

SEQ ID NO: 1459823 - DNA, 15 bp, Homo sapiens
aaatgcattcctgaa

SEQ ID NO: 1459824 - DNA, 15 bp, Homo sapiens
gaaatgcattcctga

SEQ ID NO: 1459825 - DNA, 15 bp, Homo sapiens
agaaatgcattcctg

SEQ ID NO: 1459826 - DNA, 15 bp, Homo sapiens
cagaaatgcattcct

SEQ ID NO: 1459827 - DNA, 15 bp, Homo sapiens
acagaaatgcattcc

SEQ ID NO: 1459828 - DNA, 15 bp, Homo sapiens
cacagaaatgcattc

SEQ ID NO: 1459829 - DNA, 15 bp, Homo sapiens
acacagaaatgcatt

SEQ ID NO: 1459830 - DNA, 15 bp, Homo sapiens
aacacagaaatgcat

SEQ ID NO: 1459831 - DNA, 15 bp, Homo sapiens
taacacagaaatgca

SEQ ID NO: 1459832 - DNA, 15 bp, Homo sapiens
ctaacacagaaatgc

SEQ ID NO: 1459833 - DNA, 15 bp, Homo sapiens
tctaacacagaaatg

SEQ ID NO: 1459834 - DNA, 15 bp, Homo sapiens
atctaacacagaaat

SEQ ID NO: 1459835 - DNA, 15 bp, Homo sapiens
catctaacacagaaa

SEQ ID NO: 1459836 - DNA, 15 bp, Homo sapiens
gcatctaacacagaa

SEQ ID NO: 1459837 - DNA, 15 bp, Homo sapiens
tgcatctaacacaga

SEQ ID NO: 1459838 - DNA, 15 bp, Homo sapiens
gtgcatctaacacag

SEQ ID NO: 1459839 - DNA, 15 bp, Homo sapiens
agtgcatctaacaca

SEQ ID NO: 1459840 - DNA, 15 bp, Homo sapiens
cagtgcatctaacac

SEQ ID NO: 1459841 - DNA, 15 bp, Homo sapiens
gcagtgcatctaaca

SEQ ID NO: 1459842 - DNA, 15 bp, Homo sapiens
ggcagtgcatctaac

SEQ ID NO: 1459843 - DNA, 15 bp, Homo sapiens
gggcagtgcatctaa

SEQ ID NO: 1459844 - DNA, 15 bp, Homo sapiens
agggcagtgcatcta

SEQ ID NO: 1459845 - DNA, 15 bp, Homo sapiens
aagggcagtgcatct

SEQ ID NO: 1459846 - DNA, 15 bp, Homo sapiens
caagggcagtgcatc

SEQ ID NO: 1459847 - DNA, 15 bp, Homo sapiens
acaagggcagtgcat

SEQ ID NO: 1459848 - DNA, 15 bp, Homo sapiens
cacaagggcagtgca

SEQ ID NO: 1459849 - DNA, 15 bp, Homo sapiens
gcacaagggcagtgc

SEQ ID NO: 1459850 - DNA, 15 bp, Homo sapiens
agcacaagggcagtg

SEQ ID NO: 1459851 - DNA, 15 bp, Homo sapiens
gagcacaagggcagt

SEQ ID NO: 1459852 - DNA, 15 bp, Homo sapiens
agagcacaagggcag

SEQ ID NO: 1459853 - DNA, 15 bp, Homo sapiens
cagagcacaagggca

SEQ ID NO: 1459854 - DNA, 15 bp, Homo sapiens
tcagagcacaagggc

SEQ ID NO: 1459855 - DNA, 15 bp, Homo sapiens
ttcagagcacaaggg

SEQ ID NO: 1459856 - DNA, 15 bp, Homo sapiens
cttcagagcacaagg

SEQ ID NO: 1459857 - DNA, 15 bp, Homo sapiens
ccttcagagcacaag

SEQ ID NO: 1459858 - DNA, 15 bp, Homo sapiens
gccttcagagcacaa

SEQ ID NO: 1459859 - DNA, 15 bp, Homo sapiens
agccttcagagcaca

SEQ ID NO: 1459860 - DNA, 15 bp, Homo sapiens
aagccttcagagcac

SEQ ID NO: 1459861 - DNA, 15 bp, Homo sapiens
aaagccttcagagca

SEQ ID NO: 1459862 - DNA, 15 bp, Homo sapiens
caaagccttcagagc

SEQ ID NO: 1459863 - DNA, 15 bp, Homo sapiens
tcaaagccttcagag

SEQ ID NO: 1459864 - DNA, 15 bp, Homo sapiens
atcaaagccttcaga

SEQ ID NO: 1459865 - DNA, 15 bp, Homo sapiens
catcaaagccttcag

SEQ ID NO: 1459866 - DNA, 15 bp, Homo sapiens
acatcaaagccttca

SEQ ID NO: 1459867 - DNA, 15 bp, Homo sapiens
aacatcaaagccttc

SEQ ID NO: 1459868 - DNA, 15 bp, Homo sapiens
gaacatcaaagcctt

SEQ ID NO: 1459869 - DNA, 15 bp, Homo sapiens
agaacatcaaagcct

SEQ ID NO: 1459870 - DNA, 15 bp, Homo sapiens
aagaacatcaaagcc

SEQ ID NO: 1459871 - DNA, 15 bp, Homo sapiens
taagaacatcaaagc

SEQ ID NO: 1459872 - DNA, 15 bp, Homo sapiens
ttaagaacatcaaag

SEQ ID NO: 1459873 - DNA, 15 bp, Homo sapiens
cttaagaacatcaaa

SEQ ID NO: 1459874 - DNA, 15 bp, Homo sapiens
ccttaagaacatcaa

SEQ ID NO: 1459875 - DNA, 15 bp, Homo sapiens
cccttaagaacatca

SEQ ID NO: 1459876 - DNA, 15 bp, Homo sapiens
gcccttaagaacatc

SEQ ID NO: 1459877 - DNA, 15 bp, Homo sapiens
tgcccttaagaacat

SEQ ID NO: 1459878 - DNA, 15 bp, Homo sapiens
ctgcccttaagaaca

SEQ ID NO: 1459879 - DNA, 15 bp, Homo sapiens
actgcccttaagaac

SEQ ID NO: 1459880 - DNA, 15 bp, Homo sapiens
aactgcccttaagaa

SEQ ID NO: 1459881 - DNA, 15 bp, Homo sapiens
caactgcccttaaga

SEQ ID NO: 1459882 - DNA, 15 bp, Homo sapiens
ccaactgcccttaag

SEQ ID NO: 1459883 - DNA, 15 bp, Homo sapiens
tccaactgcccttaa

SEQ ID NO: 1459884 - DNA, 15 bp, Homo sapiens
gtccaactgccctta

SEQ ID NO: 1459885 - DNA, 15 bp, Homo sapiens
agtccaactgccctt

SEQ ID NO: 1459886 - DNA, 15 bp, Homo sapiens
gagtccaactgccct

SEQ ID NO: 1459887 - DNA, 15 bp, Homo sapiens
tgagtccaactgccc

SEQ ID NO: 1459888 - DNA, 15 bp, Homo sapiens
atgagtccaactgcc

SEQ ID NO: 1459889 - DNA, 15 bp, Homo sapiens
aatgagtccaactgc

SEQ ID NO: 1459890 - DNA, 15 bp, Homo sapiens
taatgagtccaactg

SEQ ID NO: 1459891 - DNA, 15 bp, Homo sapiens
ataatgagtccaact

SEQ ID NO: 1459892 - DNA, 15 bp, Homo sapiens
aataatgagtccaac

SEQ ID NO: 1459893 - DNA, 15 bp, Homo sapiens
gaataatgagtccaa

SEQ ID NO: 1459894 - DNA, 15 bp, Homo sapiens
agaataatgagtcca

SEQ ID NO: 1459895 - DNA, 15 bp, Homo sapiens
cagaataatgagtcc

SEQ ID NO: 1459896 - DNA, 15 bp, Homo sapiens
gcagaataatgagtc

SEQ ID NO: 1459897 - DNA, 15 bp, Homo sapiens
tgcagaataatgagt

SEQ ID NO: 1459898 - DNA, 15 bp, Homo sapiens
atgcagaataatgag

SEQ ID NO: 1459899 - DNA, 15 bp, Homo sapiens
aatgcagaataatga

SEQ ID NO: 1459900 - DNA, 15 bp, Homo sapiens
taatgcagaataatg

SEQ ID NO: 1459901 - DNA, 15 bp, Homo sapiens
ataatgcagaataat

SEQ ID NO: 1459902 - DNA, 15 bp, Homo sapiens
aataatgcagaataa

SEQ ID NO: 1459903 - DNA, 15 bp, Homo sapiens
aaataatgcagaata

SEQ ID NO: 1459904 - DNA, 15 bp, Homo sapiens
aaaataatgcagaat

SEQ ID NO: 1459905 - DNA, 15 bp, Homo sapiens
gaaaataatgcagaa

SEQ ID NO: 1459906 - DNA, 15 bp, Homo sapiens
tgaaaataatgcaga

SEQ ID NO: 1459907 - DNA, 15 bp, Homo sapiens
atgaaaataatgcag

SEQ ID NO: 1459908 - DNA, 15 bp, Homo sapiens
aatgaaaataatgca

SEQ ID NO: 1459909 - DNA, 15 bp, Homo sapiens
aaatgaaaataatgc

SEQ ID NO: 1459910 - DNA, 15 bp, Homo sapiens
aaaatgaaaataatg

SEQ ID NO: 1459911 - DNA, 15 bp, Homo sapiens
aaaaatgaaaataat

SEQ ID NO: 1459912 - DNA, 15 bp, Homo sapiens
aaaaaatgaaaataa

SEQ ID NO: 1459913 - DNA, 15 bp, Homo sapiens
gaaaaaaatgaaaat

SEQ ID NO: 1459914 - DNA, 15 bp, Homo sapiens
ggaaaaaaatgaaaa

SEQ ID NO: 1459915 - DNA, 15 bp, Homo sapiens
aggaaaaaaatgaaa

SEQ ID NO: 1459916 - DNA, 15 bp, Homo sapiens
caggaaaaaaatgaa

SEQ ID NO: 1459917 - DNA, 15 bp, Homo sapiens
ccaggaaaaaaatga

SEQ ID NO: 1459918 - DNA, 15 bp, Homo sapiens
tccaggaaaaaaatg

SEQ ID NO: 1459919 - DNA, 15 bp, Homo sapiens
ctccaggaaaaaaat

SEQ ID NO: 1459920 - DNA, 15 bp, Homo sapiens
cctccaggaaaaaaa

SEQ ID NO: 1459921 - DNA, 15 bp, Homo sapiens
tcctccaggaaaaaa

SEQ ID NO: 1459922 - DNA, 15 bp, Homo sapiens
ttcctccaggaaaaa

SEQ ID NO: 1459923 - DNA, 15 bp, Homo sapiens
tttcctccaggaaaa

SEQ ID NO: 1459924 - DNA, 15 bp, Homo sapiens
gtttcctccaggaaa

SEQ ID NO: 1459925 - DNA, 15 bp, Homo sapiens
tgtttcctccaggaa

SEQ ID NO: 1459926 - DNA, 15 bp, Homo sapiens
atgtttcctccagga

SEQ ID NO: 1459927 - DNA, 15 bp, Homo sapiens
tatgtttcctccagg

SEQ ID NO: 1459928 - DNA, 15 bp, Homo sapiens
ctatgtttcctccag

SEQ ID NO: 1459929 - DNA, 15 bp, Homo sapiens
gctatgtttcctcca

SEQ ID NO: 1459930 - DNA, 15 bp, Homo sapiens
agctatgtttcctcc

SEQ ID NO: 1459931 - DNA, 15 bp, Homo sapiens
tagctatgtttcctc

SEQ ID NO: 1459932 - DNA, 15 bp, Homo sapiens
gtagctatgtttcct

SEQ ID NO: 1459933 - DNA, 15 bp, Homo sapiens
agtagctatgtttcc

SEQ ID NO: 1459934 - DNA, 15 bp, Homo sapiens
gagtagctatgtttc

SEQ ID NO: 1459935 - DNA, 15 bp, Homo sapiens
agagtagctatgttt

SEQ ID NO: 1459936 - DNA, 15 bp, Homo sapiens
tagagtagctatgtt

SEQ ID NO: 1459937 - DNA, 15 bp, Homo sapiens
ctagagtagctatgt

SEQ ID NO: 1459938 - DNA, 15 bp, Homo sapiens
actagagtagctatg

SEQ ID NO: 1459939 - DNA, 15 bp, Homo sapiens
cactagagtagctat

SEQ ID NO: 1459940 - DNA, 15 bp, Homo sapiens
acactagagtagcta

SEQ ID NO: 1459941 - DNA, 15 bp, Homo sapiens
tacactagagtagct

SEQ ID NO: 1459942 - DNA, 15 bp, Homo sapiens
ctacactagagtagc

SEQ ID NO: 1459943 - DNA, 15 bp, Homo sapiens
gctacactagagtag

SEQ ID NO: 1459944 - DNA, 15 bp, Homo sapiens
tgctacactagagta

SEQ ID NO: 1459945 - DNA, 15 bp, Homo sapiens
ctgctacactagagt

SEQ ID NO: 1459946 - DNA, 15 bp, Homo sapiens
cctgctacactagag

SEQ ID NO: 1459947 - DNA, 15 bp, Homo sapiens
ccctgctacactaga

SEQ ID NO: 1459948 - DNA, 15 bp, Homo sapiens
gccctgctacactag

SEQ ID NO: 1459949 - DNA, 15 bp, Homo sapiens
tgccctgctacacta

SEQ ID NO: 1459950 - DNA, 15 bp, Homo sapiens
ttgccctgctacact

SEQ ID NO: 1459951 - DNA, 15 bp, Homo sapiens
tttgccctgctacac

SEQ ID NO: 1459952 - DNA, 15 bp, Homo sapiens
gtttgccctgctaca

SEQ ID NO: 1459953 - DNA, 15 bp, Homo sapiens
ggtttgccctgctac

SEQ ID NO: 1459954 - DNA, 15 bp, Homo sapiens
aggtttgccctgcta

SEQ ID NO: 1459955 - DNA, 15 bp, Homo sapiens
aaggtttgccctgct

SEQ ID NO: 1459956 - DNA, 15 bp, Homo sapiens
caaggtttgccctgc

SEQ ID NO: 1459957 - DNA, 15 bp, Homo sapiens
acaaggtttgccctg

SEQ ID NO: 1459958 - DNA, 15 bp, Homo sapiens
cacaaggtttgccct

SEQ ID NO: 1459959 - DNA, 15 bp, Homo sapiens
ccacaaggtttgccc

SEQ ID NO: 1459960 - DNA, 15 bp, Homo sapiens
tccacaaggtttgcc

SEQ ID NO: 1459961 - DNA, 15 bp, Homo sapiens
atccacaaggtttgc

SEQ ID NO: 1459962 - DNA, 15 bp, Homo sapiens
catccacaaggtttg

SEQ ID NO: 1459963 - DNA, 15 bp, Homo sapiens
tcatccacaaggttt

SEQ ID NO: 1459964 - DNA, 15 bp, Homo sapiens
ttcatccacaaggtt

SEQ ID NO: 1459965 - DNA, 15 bp, Homo sapiens
tttcatccacaaggt

SEQ ID NO: 1459966 - DNA, 15 bp, Homo sapiens
gtttcatccacaagg

SEQ ID NO: 1459967 - DNA, 15 bp, Homo sapiens
cgtttcatccacaag

SEQ ID NO: 1459968 - DNA, 15 bp, Homo sapiens
ccgtttcatccacaa

SEQ ID NO: 1459969 - DNA, 15 bp, Homo sapiens
tccgtttcatccaca

SEQ ID NO: 1459970 - DNA, 15 bp, Homo sapiens
ttccgtttcatccac

SEQ ID NO: 1459971 - DNA, 15 bp, Homo sapiens
tttccgtttcatcca

SEQ ID NO: 1459972 - DNA, 15 bp, Homo sapiens
atttccgtttcatcc

SEQ ID NO: 1459973 - DNA, 15 bp, Homo sapiens
tatttccgtttcatc

SEQ ID NO: 1459974 - DNA, 15 bp, Homo sapiens
atatttccgtttcat

SEQ ID NO: 1459975 - DNA, 15 bp, Homo sapiens
gatatttccgtttca

SEQ ID NO: 1459976 - DNA, 15 bp, Homo sapiens
agatatttccgtttc

SEQ ID NO: 1459977 - DNA, 15 bp, Homo sapiens
aagatatttccgttt

SEQ ID NO: 1459978 - DNA, 15 bp, Homo sapiens
taagatatttccgtt

SEQ ID NO: 1459979 - DNA, 15 bp, Homo sapiens
gtaagatatttccgt

SEQ ID NO: 1459980 - DNA, 15 bp, Homo sapiens
tgtaagatatttccg

SEQ ID NO: 1459981 - DNA, 15 bp, Homo sapiens
ttgtaagatatttcc

SEQ ID NO: 1459982 - DNA, 15 bp, Homo sapiens
tttgtaagatatttc

SEQ ID NO: 1459983 - DNA, 15 bp, Homo sapiens
ttttgtaagatattt

SEQ ID NO: 1459984 - DNA, 15 bp, Homo sapiens
attttgtaagatatt

SEQ ID NO: 1459985 - DNA, 15 bp, Homo sapiens
cattttgtaagatat

SEQ ID NO: 1459986 - DNA, 15 bp, Homo sapiens
acattttgtaagata

SEQ ID NO: 1459987 - DNA, 15 bp, Homo sapiens
tacattttgtaagat

SEQ ID NO: 1459988 - DNA, 15 bp, Homo sapiens
ttacattttgtaaga

SEQ ID NO: 1459989 - DNA, 15 bp, Homo sapiens
tttacattttgtaag

SEQ ID NO: 1459990 - DNA, 15 bp, Homo sapiens
gtttacattttgtaa

SEQ ID NO: 1459991 - DNA, 15 bp, Homo sapiens
ggtttacattttgta

SEQ ID NO: 1459992 - DNA, 15 bp, Homo sapiens
aggtttacattttgt

SEQ ID NO: 1459993 - DNA, 15 bp, Homo sapiens
gaggtttacattttg

SEQ ID NO: 1459994 - DNA, 15 bp, Homo sapiens
agaggtttacatttt

SEQ ID NO: 1459995 - DNA, 15 bp, Homo sapiens
aagaggtttacattt

SEQ ID NO: 1459996 - DNA, 15 bp, Homo sapiens
caagaggtttacatt

SEQ ID NO: 1459997 - DNA, 15 bp, Homo sapiens
acaagaggtttacat

SEQ ID NO: 1459998 - DNA, 15 bp, Homo sapiens
tacaagaggtttaca

SEQ ID NO: 1459999 - DNA, 15 bp, Homo sapiens
atacaagaggtttac

SEQ ID NO: 1460000 - DNA, 15 bp, Homo sapiens
aatacaagaggttta

SEQ ID NO: 1460001 - DNA, 15 bp, Homo sapiens
taatacaagaggttt

SEQ ID NO: 1460002 - DNA, 15 bp, Homo sapiens
ttaatacaagaggtt

SEQ ID NO: 1460003 - DNA, 15 bp, Homo sapiens
tttaatacaagaggt

SEQ ID NO: 1460004 - DNA, 15 bp, Homo sapiens
ttttaatacaagagg

SEQ ID NO: 1460005 - DNA, 15 bp, Homo sapiens
tttttaatacaagag

SEQ ID NO: 1460006 - DNA, 15 bp, Homo sapiens
ctttttaatacaaga

SEQ ID NO: 1460007 - DNA, 15 bp, Homo sapiens
actttttaatacaag

SEQ ID NO: 1460008 - DNA, 15 bp, Homo sapiens
aactttttaatacaa

SEQ ID NO: 1460009 - DNA, 15 bp, Homo sapiens
taactttttaataca

SEQ ID NO: 1460010 - DNA, 15 bp, Homo sapiens
ttaactttttaatac

SEQ ID NO: 1460011 - DNA, 15 bp, Homo sapiens
tttaactttttaata

SEQ ID NO: 1460012 - DNA, 15 bp, Homo sapiens
attttaactttttaa

SEQ ID NO: 1460013 - DNA, 15 bp, Homo sapiens
aattttaacttttta

SEQ ID NO: 1460014 - DNA, 15 bp, Homo sapiens
gaattttaacttttt

SEQ ID NO: 1460015 - DNA, 15 bp, Homo sapiens
ggaattttaactttt

SEQ ID NO: 1460016 - DNA, 15 bp, Homo sapiens
cggaattttaacttt

SEQ ID NO: 1460017 - DNA, 15 bp, Homo sapiens
ccggaattttaactt

SEQ ID NO: 1460018 - DNA, 15 bp, Homo sapiens
gccggaattttaact

SEQ ID NO: 1460019 - DNA, 15 bp, Homo sapiens
ggccggaattttaac

SEQ ID NO: 1460020 - DNA, 15 bp, Homo sapiens
cggccggaattttaa

SEQ ID NO: 1460021 - DNA, 15 bp, Homo sapiens
ccggccggaatttta

SEQ ID NO: 1460022 - DNA, 15 bp, Homo sapiens
cccggccggaatttt

SEQ ID NO: 1460023 - DNA, 15 bp, Homo sapiens
acccggccggaattt

SEQ ID NO: 1460024 - DNA, 15 bp, Homo sapiens
cacccggccggaatt

SEQ ID NO: 1460025 - DNA, 15 bp, Homo sapiens
gcacccggccggaat

SEQ ID NO: 1460026 - DNA, 15 bp, Homo sapiens
cgcacccggccggaa

SEQ ID NO: 1460027 - DNA, 15 bp, Homo sapiens
ccgcacccggccgga

SEQ ID NO: 1460028 - DNA, 15 bp, Homo sapiens
accgcacccggccgg

SEQ ID NO: 1460029 - DNA, 15 bp, Homo sapiens
caccgcacccggccg

SEQ ID NO: 1460030 - DNA, 15 bp, Homo sapiens
gtcaccgcacccggc

SEQ ID NO: 1460031 - DNA, 15 bp, Homo sapiens
agtcaccgcacccgg

SEQ ID NO: 1460032 - DNA, 15 bp, Homo sapiens
gagtcaccgcacccg

SEQ ID NO: 1460033 - DNA, 15 bp, Homo sapiens
tgagtcaccgcaccc

SEQ ID NO: 1460034 - DNA, 15 bp, Homo sapiens
gtgagtcaccgcacc

SEQ ID NO: 1460035 - DNA, 15 bp, Homo sapiens
cgtgagtcaccgcac

SEQ ID NO: 1460036 - DNA, 15 bp, Homo sapiens
gcgtgagtcaccgca

SEQ ID NO: 1460037 - DNA, 15 bp, Homo sapiens
ggcgtgagtcaccgc

SEQ ID NO: 1460038 - DNA, 15 bp, Homo sapiens
aggcgtgagtcaccg

SEQ ID NO: 1460039 - DNA, 15 bp, Homo sapiens
caggcgtgagtcacc

SEQ ID NO: 1460040 - DNA, 15 bp, Homo sapiens
acaggcgtgagtcac

SEQ ID NO: 1460041 - DNA, 15 bp, Homo sapiens
tacaggcgtgagtca

SEQ ID NO: 1460042 - DNA, 15 bp, Homo sapiens
ttacaggcgtgagtc

SEQ ID NO: 1460043 - DNA, 15 bp, Homo sapiens
attacaggcgtgagt

SEQ ID NO: 1460044 - DNA, 15 bp, Homo sapiens
cattacaggcgtgag

SEQ ID NO: 1460045 - DNA, 15 bp, Homo sapiens
gcattacaggcgtga

SEQ ID NO: 1460046 - DNA, 15 bp, Homo sapiens
ggcattacaggcgtg

SEQ ID NO: 1460047 - DNA, 15 bp, Homo sapiens
tggcattacaggcgt

SEQ ID NO: 1460048 - DNA, 15 bp, Homo sapiens
ctggcattacaggcg

SEQ ID NO: 1460049 - DNA, 15 bp, Homo sapiens
tgctggcattacagg

SEQ ID NO: 1460050 - DNA, 15 bp, Homo sapiens
gtgctggcattacag

SEQ ID NO: 1460051 - DNA, 15 bp, Homo sapiens
agtgctggcattaca

SEQ ID NO: 1460052 - DNA, 15 bp, Homo sapiens
aagtgctggcattac

SEQ ID NO: 1460053 - DNA, 15 bp, Homo sapiens
aaagtgctggcatta

SEQ ID NO: 1460054 - DNA, 15 bp, Homo sapiens
caaagtgctggcatt

SEQ ID NO: 1460055 - DNA, 15 bp, Homo sapiens
ccaaagtgctggcat

SEQ ID NO: 1460056 - DNA, 15 bp, Homo sapiens
cccaaagtgctggca

SEQ ID NO: 1460057 - DNA, 15 bp, Homo sapiens
tcccaaagtgctggc

SEQ ID NO: 1460058 - DNA, 15 bp, Homo sapiens
tcctcggcctcccaa

SEQ ID NO: 1460059 - DNA, 15 bp, Homo sapiens
ctcctcggcctccca

SEQ ID NO: 1460060 - DNA, 15 bp, Homo sapiens
cctcctcggcctccc

SEQ ID NO: 1460061 - DNA, 15 bp, Homo sapiens
ccctcctcggcctcc

SEQ ID NO: 1460062 - DNA, 15 bp, Homo sapiens
gccctcctcggcctc

SEQ ID NO: 1460063 - DNA, 15 bp, Homo sapiens
cgccctcctcggcct

SEQ ID NO: 1460064 - DNA, 15 bp, Homo sapiens
ccgccctcctcggcc

SEQ ID NO: 1460065 - DNA, 15 bp, Homo sapiens
tccgccctcctcggc

SEQ ID NO: 1460066 - DNA, 15 bp, Homo sapiens
atccgccctcctcgg

SEQ ID NO: 1460067 - DNA, 15 bp, Homo sapiens
gatccgccctcctcg

SEQ ID NO: 1460068 - DNA, 15 bp, Homo sapiens
tgatccgccctcctc

SEQ ID NO: 1460069 - DNA, 15 bp, Homo sapiens
gtgatccgccctcct

SEQ ID NO: 1460070 - DNA, 15 bp, Homo sapiens
cgtgatccgccctcc

SEQ ID NO: 1460071 - DNA, 15 bp, Homo sapiens
tcgtgatccgccctc

SEQ ID NO: 1460072 - DNA, 15 bp, Homo sapiens
ctcgtgatccgccct

SEQ ID NO: 1460073 - DNA, 15 bp, Homo sapiens
cggatggtctcgatc

SEQ ID NO: 1460074 - DNA, 15 bp, Homo sapiens
ccggatggtctcgat

SEQ ID NO: 1460075 - DNA, 15 bp, Homo sapiens
cccggatggtctcga

SEQ ID NO: 1460076 - DNA, 15 bp, Homo sapiens
gcccggatggtctcg

SEQ ID NO: 1460077 - DNA, 15 bp, Homo sapiens
agcccggatggtctc

SEQ ID NO: 1460078 - DNA, 15 bp, Homo sapiens
tagcccggatggtct

SEQ ID NO: 1460079 - DNA, 15 bp, Homo sapiens
ttagcccggatggtc

SEQ ID NO: 1460080 - DNA, 15 bp, Homo sapiens
gttagcccggatggt

SEQ ID NO: 1460081 - DNA, 15 bp, Homo sapiens
tgttagcccggatgg

SEQ ID NO: 1460082 - DNA, 15 bp, Homo sapiens
atgttagcccggatg

SEQ ID NO: 1460083 - DNA, 15 bp, Homo sapiens
catgttagcccggat

SEQ ID NO: 1460084 - DNA, 15 bp, Homo sapiens
ccatgttagcccgga

SEQ ID NO: 1460085 - DNA, 15 bp, Homo sapiens
accatgttagcccgg

SEQ ID NO: 1460086 - DNA, 15 bp, Homo sapiens
caccatgttagcccg

SEQ ID NO: 1460087 - DNA, 15 bp, Homo sapiens
tcaccatgttagccc

SEQ ID NO: 1460088 - DNA, 15 bp, Homo sapiens
tccagctaatttttt

SEQ ID NO: 1460089 - DNA, 15 bp, Homo sapiens
gtccagctaattttt

SEQ ID NO: 1460090 - DNA, 15 bp, Homo sapiens
cgtccagctaatttt

SEQ ID NO: 1460091 - DNA, 15 bp, Homo sapiens
acgtccagctaattt

SEQ ID NO: 1460092 - DNA, 15 bp, Homo sapiens
cacgtccagctaatt

SEQ ID NO: 1460093 - DNA, 15 bp, Homo sapiens
ccacgtccagctaat

SEQ ID NO: 1460094 - DNA, 15 bp, Homo sapiens
accacgtccagctaa

SEQ ID NO: 1460095 - DNA, 15 bp, Homo sapiens
caccacgtccagcta

SEQ ID NO: 1460096 - DNA, 15 bp, Homo sapiens
ccaccacgtccagct

SEQ ID NO: 1460097 - DNA, 15 bp, Homo sapiens
gccaccacgtccagc

SEQ ID NO: 1460098 - DNA, 15 bp, Homo sapiens
cgccaccacgtccag

SEQ ID NO: 1460099 - DNA, 15 bp, Homo sapiens
ccgccaccacgtcca

SEQ ID NO: 1460100 - DNA, 15 bp, Homo sapiens
cccgccaccacgtcc

SEQ ID NO: 1460101 - DNA, 15 bp, Homo sapiens
gcccgccaccacgtc

SEQ ID NO: 1460102 - DNA, 15 bp, Homo sapiens
cgcccgccaccacgt

SEQ ID NO: 1460103 - DNA, 15 bp, Homo sapiens
cgcagtggtgccatc

SEQ ID NO: 1460104 - DNA, 15 bp, Homo sapiens
gcgcagtggtgccat

SEQ ID NO: 1460105 - DNA, 15 bp, Homo sapiens
agcgcagtggtgcca

SEQ ID NO: 1460106 - DNA, 15 bp, Homo sapiens
gagcgcagtggtgcc

SEQ ID NO: 1460107 - DNA, 15 bp, Homo sapiens
ggagcgcagtggtgc

SEQ ID NO: 1460108 - DNA, 15 bp, Homo sapiens
tggagcgcagtggtg

SEQ ID NO: 1460109 - DNA, 15 bp, Homo sapiens
ctggagcgcagtggt

SEQ ID NO: 1460110 - DNA, 15 bp, Homo sapiens
gctggagcgcagtgg

SEQ ID NO: 1460111 - DNA, 15 bp, Homo sapiens
ggctggagcgcagtg

SEQ ID NO: 1460112 - DNA, 15 bp, Homo sapiens
aggctggagcgcagt

SEQ ID NO: 1460113 - DNA, 15 bp, Homo sapiens
taggctggagcgcag

SEQ ID NO: 1460114 - DNA, 15 bp, Homo sapiens
ctaggctggagcgca

SEQ ID NO: 1460115 - DNA, 15 bp, Homo sapiens
cctaggctggagcgc

SEQ ID NO: 1460116 - DNA, 15 bp, Homo sapiens
acctaggctggagcg

SEQ ID NO: 1460117 - DNA, 15 bp, Homo sapiens
cacctaggctggagc

SEQ ID NO: 1460118 - DNA, 15 bp, Homo sapiens
tcacctaggctggag

SEQ ID NO: 1460119 - DNA, 15 bp, Homo sapiens
gtcacctaggctgga

SEQ ID NO: 1460120 - DNA, 15 bp, Homo sapiens
tgtcacctaggctgg

SEQ ID NO: 1460121 - DNA, 15 bp, Homo sapiens
tctgtcacctaggct

SEQ ID NO: 1460122 - DNA, 15 bp, Homo sapiens
ctctgtcacctaggc

SEQ ID NO: 1460123 - DNA, 15 bp, Homo sapiens
actctgtcacctagg

SEQ ID NO: 1460124 - DNA, 15 bp, Homo sapiens
cactctgtcacctag

SEQ ID NO: 1460125 - DNA, 15 bp, Homo sapiens
tcactctgtcaccta

SEQ ID NO: 1460126 - DNA, 15 bp, Homo sapiens
ctcactctgtcacct

SEQ ID NO: 1460127 - DNA, 15 bp, Homo sapiens
acttttttctttttt

SEQ ID NO: 1460128 - DNA, 15 bp, Homo sapiens
aacttttttcttttt

SEQ ID NO: 1460129 - DNA, 15 bp, Homo sapiens
taacttttttctttt

SEQ ID NO: 1460130 - DNA, 15 bp, Homo sapiens
ctaacttttttcttt

SEQ ID NO: 1460131 - DNA, 15 bp, Homo sapiens
tctaacttttttctt

SEQ ID NO: 1460132 - DNA, 15 bp, Homo sapiens
atctaacttttttct

SEQ ID NO: 1460133 - DNA, 15 bp, Homo sapiens
aatctaacttttttc

SEQ ID NO: 1460134 - DNA, 15 bp, Homo sapiens
aaatctaactttttt

SEQ ID NO: 1460135 - DNA, 15 bp, Homo sapiens
gaaatctaacttttt

SEQ ID NO: 1460136 - DNA, 15 bp, Homo sapiens
ggaaatctaactttt

SEQ ID NO: 1460137 - DNA, 15 bp, Homo sapiens
tggaaatctaacttt

SEQ ID NO: 1460138 - DNA, 15 bp, Homo sapiens
ctggaaatctaactt

SEQ ID NO: 1460139 - DNA, 15 bp, Homo sapiens
cctggaaatctaact

SEQ ID NO: 1460140 - DNA, 15 bp, Homo sapiens
tcctggaaatctaac

SEQ ID NO: 1460141 - DNA, 15 bp, Homo sapiens
atcctggaaatctaa

SEQ ID NO: 1460142 - DNA, 15 bp, Homo sapiens
gatcctggaaatcta

SEQ ID NO: 1460143 - DNA, 15 bp, Homo sapiens
agatcctggaaatct

SEQ ID NO: 1460144 - DNA, 15 bp, Homo sapiens
gagatcctggaaatc

SEQ ID NO: 1460145 - DNA, 15 bp, Homo sapiens
agagatcctggaaat

SEQ ID NO: 1460146 - DNA, 15 bp, Homo sapiens
aagagatcctggaaa

SEQ ID NO: 1460147 - DNA, 15 bp, Homo sapiens
aaagagatcctggaa

SEQ ID NO: 1460148 - DNA, 15 bp, Homo sapiens
gaaagagatcctgga

SEQ ID NO: 1460149 - DNA, 15 bp, Homo sapiens
agaaagagatcctgg

SEQ ID NO: 1460150 - DNA, 15 bp, Homo sapiens
tagaaagagatcctg

SEQ ID NO: 1460151 - DNA, 15 bp, Homo sapiens
ttagaaagagatcct

SEQ ID NO: 1460152 - DNA, 15 bp, Homo sapiens
attagaaagagatcc

SEQ ID NO: 1460153 - DNA, 15 bp, Homo sapiens
cattagaaagagatc

SEQ ID NO: 1460154 - DNA, 15 bp, Homo sapiens
ccattagaaagagat

SEQ ID NO: 1460155 - DNA, 15 bp, Homo sapiens
gccattagaaagaga

SEQ ID NO: 1460156 - DNA, 15 bp, Homo sapiens
ggccattagaaagag

SEQ ID NO: 1460157 - DNA, 15 bp, Homo sapiens
cggccattagaaaga

SEQ ID NO: 1460158 - DNA, 15 bp, Homo sapiens
tcggccattagaaag

SEQ ID NO: 1460159 - DNA, 15 bp, Homo sapiens
ttcggccattagaaa

SEQ ID NO: 1460160 - DNA, 15 bp, Homo sapiens
cttcggccattagaa

SEQ ID NO: 1460161 - DNA, 15 bp, Homo sapiens
tcttcggccattaga

SEQ ID NO: 1460162 - DNA, 15 bp, Homo sapiens
atcttcggccattag

SEQ ID NO: 1460163 - DNA, 15 bp, Homo sapiens
aatcttcggccatta

SEQ ID NO: 1460164 - DNA, 15 bp, Homo sapiens
taatcttcggccatt

SEQ ID NO: 1460165 - DNA, 15 bp, Homo sapiens
ctaatcttcggccat

SEQ ID NO: 1460166 - DNA, 15 bp, Homo sapiens
tctaatcttcggcca

SEQ ID NO: 1460167 - DNA, 15 bp, Homo sapiens
ctctaatcttcggcc

SEQ ID NO: 1460168 - DNA, 15 bp, Homo sapiens
tctctaatcttcggc

SEQ ID NO: 1460169 - DNA, 15 bp, Homo sapiens
atctctaatcttcgg

SEQ ID NO: 1460170 - DNA, 15 bp, Homo sapiens
gatctctaatcttcg

SEQ ID NO: 1460171 - DNA, 15 bp, Homo sapiens
tgatctctaatcttc

SEQ ID NO: 1460172 - DNA, 15 bp, Homo sapiens
atgatctctaatctt

SEQ ID NO: 1460173 - DNA, 15 bp, Homo sapiens
catgatctctaatct

SEQ ID NO: 1460174 - DNA, 15 bp, Homo sapiens
ccatgatctctaatc

SEQ ID NO: 1460175 - DNA, 15 bp, Homo sapiens
gccatgatctctaat

SEQ ID NO: 1460176 - DNA, 15 bp, Homo sapiens
agccatgatctctaa

SEQ ID NO: 1460177 - DNA, 15 bp, Homo sapiens
aagccatgatctcta

SEQ ID NO: 1460178 - DNA, 15 bp, Homo sapiens
caagccatgatctct

SEQ ID NO: 1460179 - DNA, 15 bp, Homo sapiens
acaagccatgatctc

SEQ ID NO: 1460180 - DNA, 15 bp, Homo sapiens
cacaagccatgatct

SEQ ID NO: 1460181 - DNA, 15 bp, Homo sapiens
ccacaagccatgatc

SEQ ID NO: 1460182 - DNA, 15 bp, Homo sapiens
tccacaagccatgat

SEQ ID NO: 1460183 - DNA, 15 bp, Homo sapiens
ctccacaagccatga

SEQ ID NO: 1460184 - DNA, 15 bp, Homo sapiens
gctccacaagccatg

SEQ ID NO: 1460185 - DNA, 15 bp, Homo sapiens
tgctccacaagccat

SEQ ID NO: 1460186 - DNA, 15 bp, Homo sapiens
gtgctccacaagcca

SEQ ID NO: 1460187 - DNA, 15 bp, Homo sapiens
tgtgctccacaagcc

SEQ ID NO: 1460188 - DNA, 15 bp, Homo sapiens
atgtgctccacaagc

SEQ ID NO: 1460189 - DNA, 15 bp, Homo sapiens
gatgtgctccacaag

SEQ ID NO: 1460190 - DNA, 15 bp, Homo sapiens
agatgtgctccacaa

SEQ ID NO: 1460191 - DNA, 15 bp, Homo sapiens
gagatgtgctccaca

SEQ ID NO: 1460192 - DNA, 15 bp, Homo sapiens
tgagatgtgctccac

SEQ ID NO: 1460193 - DNA, 15 bp, Homo sapiens
atgagatgtgctcca

SEQ ID NO: 1460194 - DNA, 15 bp, Homo sapiens
gatgagatgtgctcc

SEQ ID NO: 1460195 - DNA, 15 bp, Homo sapiens
agatgagatgtgctc

SEQ ID NO: 1460196 - DNA, 15 bp, Homo sapiens
aagatgagatgtgct

SEQ ID NO: 1460197 - DNA, 15 bp, Homo sapiens
gaagatgagatgtgc

SEQ ID NO: 1460198 - DNA, 15 bp, Homo sapiens
tgaagatgagatgtg

SEQ ID NO: 1460199 - DNA, 15 bp, Homo sapiens
gtgaagatgagatgt

SEQ ID NO: 1460200 - DNA, 15 bp, Homo sapiens
agtgaagatgagatg

SEQ ID NO: 1460201 - DNA, 15 bp, Homo sapiens
aagtgaagatgagat

SEQ ID NO: 1460202 - DNA, 15 bp, Homo sapiens
aaagtgaagatgaga

SEQ ID NO: 1460203 - DNA, 15 bp, Homo sapiens
gaaagtgaagatgag

SEQ ID NO: 1460204 - DNA, 15 bp, Homo sapiens
agaaagtgaagatga

SEQ ID NO: 1460205 - DNA, 15 bp, Homo sapiens
cagaaagtgaagatg

SEQ ID NO: 1460206 - DNA, 15 bp, Homo sapiens
acagaaagtgaagat

SEQ ID NO: 1460207 - DNA, 15 bp, Homo sapiens
cacagaaagtgaaga

SEQ ID NO: 1460208 - DNA, 15 bp, Homo sapiens
tcacagaaagtgaag

SEQ ID NO: 1460209 - DNA, 15 bp, Homo sapiens
ttcacagaaagtgaa

SEQ ID NO: 1460210 - DNA, 15 bp, Homo sapiens
attcacagaaagtga

SEQ ID NO: 1460211 - DNA, 15 bp, Homo sapiens
cattcacagaaagtg

SEQ ID NO: 1460212 - DNA, 15 bp, Homo sapiens
ccattcacagaaagt

SEQ ID NO: 1460213 - DNA, 15 bp, Homo sapiens
cccattcacagaaag

SEQ ID NO: 1460214 - DNA, 15 bp, Homo sapiens
tcccattcacagaaa

SEQ ID NO: 1460215 - DNA, 15 bp, Homo sapiens
gtcccattcacagaa

SEQ ID NO: 1460216 - DNA, 15 bp, Homo sapiens
ggtcccattcacaga

SEQ ID NO: 1460217 - DNA, 15 bp, Homo sapiens
tggtcccattcacag

SEQ ID NO: 1460218 - DNA, 15 bp, Homo sapiens
ttggtcccattcaca

SEQ ID NO: 1460219 - DNA, 15 bp, Homo sapiens
attggtcccattcac

SEQ ID NO: 1460220 - DNA, 15 bp, Homo sapiens
cattggtcccattca

SEQ ID NO: 1460221 - DNA, 15 bp, Homo sapiens
gcattggtcccattc

SEQ ID NO: 1460222 - DNA, 15 bp, Homo sapiens
tgcattggtcccatt

SEQ ID NO: 1460223 - DNA, 15 bp, Homo sapiens
ctgcattggtcccat

SEQ ID NO: 1460224 - DNA, 15 bp, Homo sapiens
cctgcattggtccca

SEQ ID NO: 1460225 - DNA, 15 bp, Homo sapiens
tcctgcattggtccc

SEQ ID NO: 1460226 - DNA, 15 bp, Homo sapiens
ttcctgcattggtcc

SEQ ID NO: 1460227 - DNA, 15 bp, Homo sapiens
attcctgcattggtc

SEQ ID NO: 1460228 - DNA, 15 bp, Homo sapiens
aattcctgcattggt

SEQ ID NO: 1460229 - DNA, 15 bp, Homo sapiens
caattcctgcattgg

SEQ ID NO: 1460230 - DNA, 15 bp, Homo sapiens
tcaattcctgcattg

SEQ ID NO: 1460231 - DNA, 15 bp, Homo sapiens
ttcaattcctgcatt

SEQ ID NO: 1460232 - DNA, 15 bp, Homo sapiens
tttcaattcctgcat

SEQ ID NO: 1460233 - DNA, 15 bp, Homo sapiens
ttttcaattcctgca

SEQ ID NO: 1460234 - DNA, 15 bp, Homo sapiens
tttttcaattcctgc

SEQ ID NO: 1460235 - DNA, 15 bp, Homo sapiens
atttttcaattcctg

SEQ ID NO: 1460236 - DNA, 15 bp, Homo sapiens
tatttttcaattcct

SEQ ID NO: 1460237 - DNA, 15 bp, Homo sapiens
ctatttttcaattcc

SEQ ID NO: 1460238 - DNA, 15 bp, Homo sapiens
tctatttttcaattc

SEQ ID NO: 1460239 - DNA, 15 bp, Homo sapiens
ctctatttttcaatt

SEQ ID NO: 1460240 - DNA, 15 bp, Homo sapiens
gctctatttttcaat

SEQ ID NO: 1460241 - DNA, 15 bp, Homo sapiens
ggctctatttttcaa

SEQ ID NO: 1460242 - DNA, 15 bp, Homo sapiens
aggctctatttttca

SEQ ID NO: 1460243 - DNA, 15 bp, Homo sapiens
gaggctctatttttc

SEQ ID NO: 1460244 - DNA, 15 bp, Homo sapiens
tgaggctctattttt

SEQ ID NO: 1460245 - DNA, 15 bp, Homo sapiens
gtgaggctctatttt

SEQ ID NO: 1460246 - DNA, 15 bp, Homo sapiens
tgtgaggctctattt

SEQ ID NO: 1460247 - DNA, 15 bp, Homo sapiens
atgtgaggctctatt

SEQ ID NO: 1460248 - DNA, 15 bp, Homo sapiens
aatgtgaggctctat

SEQ ID NO: 1460249 - DNA, 15 bp, Homo sapiens
caatgtgaggctcta

SEQ ID NO: 1460250 - DNA, 15 bp, Homo sapiens
tcaatgtgaggctct

SEQ ID NO: 1460251 - DNA, 15 bp, Homo sapiens
gtcaatgtgaggctc

SEQ ID NO: 1460252 - DNA, 15 bp, Homo sapiens
tgtcaatgtgaggct

SEQ ID NO: 1460253 - DNA, 15 bp, Homo sapiens
ttgtcaatgtgaggc

SEQ ID NO: 1460254 - DNA, 15 bp, Homo sapiens
cttgtcaatgtgagg

SEQ ID NO: 1460255 - DNA, 15 bp, Homo sapiens
tcttgtcaatgtgag

SEQ ID NO: 1460256 - DNA, 15 bp, Homo sapiens
gtcttgtcaatgtga

SEQ ID NO: 1460257 - DNA, 15 bp, Homo sapiens
tgtcttgtcaatgtg

SEQ ID NO: 1460258 - DNA, 15 bp, Homo sapiens
ctgtcttgtcaatgt

SEQ ID NO: 1460259 - DNA, 15 bp, Homo sapiens
tctgtcttgtcaatg

SEQ ID NO: 1460260 - DNA, 15 bp, Homo sapiens
ttctgtcttgtcaat

SEQ ID NO: 1460261 - DNA, 15 bp, Homo sapiens
tttctgtcttgtcaa

SEQ ID NO: 1460262 - DNA, 15 bp, Homo sapiens
atttctgtcttgtca

SEQ ID NO: 1460263 - DNA, 15 bp, Homo sapiens
agatttctgtcttgt

SEQ ID NO: 1460264 - DNA, 15 bp, Homo sapiens
tagatttctgtcttg

SEQ ID NO: 1460265 - DNA, 15 bp, Homo sapiens
atagatttctgtctt

SEQ ID NO: 1460266 - DNA, 15 bp, Homo sapiens
aatagatttctgtct

SEQ ID NO: 1460267 - DNA, 15 bp, Homo sapiens
caatagatttctgtc

SEQ ID NO: 1460268 - DNA, 15 bp, Homo sapiens
gcaatagatttctgt

SEQ ID NO: 1460269 - DNA, 15 bp, Homo sapiens
agcaatagatttctg

SEQ ID NO: 1460270 - DNA, 15 bp, Homo sapiens
tagcaatagatttct

SEQ ID NO: 1460271 - DNA, 15 bp, Homo sapiens
ctagcaatagatttc

SEQ ID NO: 1460272 - DNA, 15 bp, Homo sapiens
cctagcaatagattt

SEQ ID NO: 1460273 - DNA, 15 bp, Homo sapiens
tcctagcaatagatt

SEQ ID NO: 1460274 - DNA, 15 bp, Homo sapiens
gtcctagcaatagat

SEQ ID NO: 1460275 - DNA, 15 bp, Homo sapiens
agtcctagcaataga

SEQ ID NO: 1460276 - DNA, 15 bp, Homo sapiens
aagtcctagcaatag

SEQ ID NO: 1460277 - DNA, 15 bp, Homo sapiens
aaagtcctagcaata

SEQ ID NO: 1460278 - DNA, 15 bp, Homo sapiens
caaagtcctagcaat

SEQ ID NO: 1460279 - DNA, 15 bp, Homo sapiens
gcaaagtcctagcaa

SEQ ID NO: 1460280 - DNA, 15 bp, Homo sapiens
tgcaaagtcctagca

SEQ ID NO: 1460281 - DNA, 15 bp, Homo sapiens
ttgcaaagtcctagc

SEQ ID NO: 1460282 - DNA, 15 bp, Homo sapiens
cttgcaaagtcctag

SEQ ID NO: 1460283 - DNA, 15 bp, Homo sapiens
tcttgcaaagtccta

SEQ ID NO: 1460284 - DNA, 15 bp, Homo sapiens
atcttgcaaagtcct

SEQ ID NO: 1460285 - DNA, 15 bp, Homo sapiens
aatcttgcaaagtcc

SEQ ID NO: 1460286 - DNA, 15 bp, Homo sapiens
aaatcttgcaaagtc

SEQ ID NO: 1460287 - DNA, 15 bp, Homo sapiens
taaatcttgcaaagt

SEQ ID NO: 1460288 - DNA, 15 bp, Homo sapiens
ataaatcttgcaaag

SEQ ID NO: 1460289 - DNA, 15 bp, Homo sapiens
aataaatcttgcaaa

SEQ ID NO: 1460290 - DNA, 15 bp, Homo sapiens
taataaatcttgcaa

SEQ ID NO: 1460291 - DNA, 15 bp, Homo sapiens
ttaataaatcttgca

SEQ ID NO: 1460292 - DNA, 15 bp, Homo sapiens
cttaataaatcttgc

SEQ ID NO: 1460293 - DNA, 15 bp, Homo sapiens
tcttaataaatcttg

SEQ ID NO: 1460294 - DNA, 15 bp, Homo sapiens
ttcttaataaatctt

SEQ ID NO: 1460295 - DNA, 15 bp, Homo sapiens
tttcttaataaatct

SEQ ID NO: 1460296 - DNA, 15 bp, Homo sapiens
ctttcttaataaatc

SEQ ID NO: 1460297 - DNA, 15 bp, Homo sapiens
actttcttaataaat

SEQ ID NO: 1460298 - DNA, 15 bp, Homo sapiens
cactttcttaataaa

SEQ ID NO: 1460299 - DNA, 15 bp, Homo sapiens
ccactttcttaataa

SEQ ID NO: 1460300 - DNA, 15 bp, Homo sapiens
accactttcttaata

SEQ ID NO: 1460301 - DNA, 15 bp, Homo sapiens
gaccactttcttaat

SEQ ID NO: 1460302 - DNA, 15 bp, Homo sapiens
tgaccactttcttaa

SEQ ID NO: 1460303 - DNA, 15 bp, Homo sapiens
ctgaccactttctta

SEQ ID NO: 1460304 - DNA, 15 bp, Homo sapiens
actgaccactttctt

SEQ ID NO: 1460305 - DNA, 15 bp, Homo sapiens
cactgaccactttct

SEQ ID NO: 1460306 - DNA, 15 bp, Homo sapiens
acactgaccactttc

SEQ ID NO: 1460307 - DNA, 15 bp, Homo sapiens
aacactgaccacttt

SEQ ID NO: 1460308 - DNA, 15 bp, Homo sapiens
aaacactgaccactt

SEQ ID NO: 1460309 - DNA, 15 bp, Homo sapiens
aaaacactgaccact

SEQ ID NO: 1460310 - DNA, 15 bp, Homo sapiens
taaaacactgaccac

SEQ ID NO: 1460311 - DNA, 15 bp, Homo sapiens
ttaaaacactgacca

SEQ ID NO: 1460312 - DNA, 15 bp, Homo sapiens
tttaaaacactgacc

SEQ ID NO: 1460313 - DNA, 15 bp, Homo sapiens
ttttaaaacactgac

SEQ ID NO: 1460314 - DNA, 15 bp, Homo sapiens
attttaaaacactga

SEQ ID NO: 1460315 - DNA, 15 bp, Homo sapiens
cattttaaaacactg

SEQ ID NO: 1460316 - DNA, 15 bp, Homo sapiens
tcattttaaaacact

SEQ ID NO: 1460317 - DNA, 15 bp, Homo sapiens
gtcattttaaaacac

SEQ ID NO: 1460318 - DNA, 15 bp, Homo sapiens
cgtcattttaaaaca

SEQ ID NO: 1460319 - DNA, 15 bp, Homo sapiens
ccgtcattttaaaac

SEQ ID NO: 1460320 - DNA, 15 bp, Homo sapiens
gccgtcattttaaaa

SEQ ID NO: 1460321 - DNA, 15 bp, Homo sapiens
agccgtcattttaaa

SEQ ID NO: 1460322 - DNA, 15 bp, Homo sapiens
tagccgtcattttaa

SEQ ID NO: 1460323 - DNA, 15 bp, Homo sapiens
ttagccgtcatttta

SEQ ID NO: 1460324 - DNA, 15 bp, Homo sapiens
attagccgtcatttt

SEQ ID NO: 1460325 - DNA, 15 bp, Homo sapiens
aattagccgtcattt

SEQ ID NO: 1460326 - DNA, 15 bp, Homo sapiens
aaattagccgtcatt

SEQ ID NO: 1460327 - DNA, 15 bp, Homo sapiens
gaaattagccgtcat

SEQ ID NO: 1460328 - DNA, 15 bp, Homo sapiens
tgaaattagccgtca

SEQ ID NO: 1460329 - DNA, 15 bp, Homo sapiens
gtgaaattagccgtc

SEQ ID NO: 1460330 - DNA, 15 bp, Homo sapiens
ggtgaaattagccgt

SEQ ID NO: 1460331 - DNA, 15 bp, Homo sapiens
gggtgaaattagccg

SEQ ID NO: 1460332 - DNA, 15 bp, Homo sapiens
tgggtgaaattagcc

SEQ ID NO: 1460333 - DNA, 15 bp, Homo sapiens
ctgggtgaaattagc

SEQ ID NO: 1460334 - DNA, 15 bp, Homo sapiens
tctgggtgaaattag

SEQ ID NO: 1460335 - DNA, 15 bp, Homo sapiens
ttctgggtgaaatta

SEQ ID NO: 1460336 - DNA, 15 bp, Homo sapiens
cttctgggtgaaatt

SEQ ID NO: 1460337 - DNA, 15 bp, Homo sapiens
gcttctgggtgaaat

SEQ ID NO: 1460338 - DNA, 15 bp, Homo sapiens
tgcttctgggtgaaa

SEQ ID NO: 1460339 - DNA, 15 bp, Homo sapiens
atgcttctgggtgaa

SEQ ID NO: 1460340 - DNA, 15 bp, Homo sapiens
catgcttctgggtga

SEQ ID NO: 1460341 - DNA, 15 bp, Homo sapiens
ccatgcttctgggtg

SEQ ID NO: 1460342 - DNA, 15 bp, Homo sapiens
tccatgcttctgggt

SEQ ID NO: 1460343 - DNA, 15 bp, Homo sapiens
ttccatgcttctggg

SEQ ID NO: 1460344 - DNA, 15 bp, Homo sapiens
tttccatgcttctgg

SEQ ID NO: 1460345 - DNA, 15 bp, Homo sapiens
ttttccatgcttctg

SEQ ID NO: 1460346 - DNA, 15 bp, Homo sapiens
tttttccatgcttct

SEQ ID NO: 1460347 - DNA, 15 bp, Homo sapiens
ctttttccatgcttc

SEQ ID NO: 1460348 - DNA, 15 bp, Homo sapiens
cctttttccatgctt

SEQ ID NO: 1460349 - DNA, 15 bp, Homo sapiens
gcctttttccatgct

SEQ ID NO: 1460350 - DNA, 15 bp, Homo sapiens
tgcctttttccatgc

SEQ ID NO: 1460351 - DNA, 15 bp, Homo sapiens
gtgcctttttccatg

SEQ ID NO: 1460352 - DNA, 15 bp, Homo sapiens
agtgcctttttccat

SEQ ID NO: 1460353 - DNA, 15 bp, Homo sapiens
gagtgcctttttcca

SEQ ID NO: 1460354 - DNA, 15 bp, Homo sapiens
tgagtgcctttttcc

SEQ ID NO: 1460355 - DNA, 15 bp, Homo sapiens
atgagtgcctttttc

SEQ ID NO: 1460356 - DNA, 15 bp, Homo sapiens
aatgagtgccttttt

SEQ ID NO: 1460357 - DNA, 15 bp, Homo sapiens
gaatgagtgcctttt

SEQ ID NO: 1460358 - DNA, 15 bp, Homo sapiens
tgaatgagtgccttt

SEQ ID NO: 1460359 - DNA, 15 bp, Homo sapiens
ctgaatgagtgcctt

SEQ ID NO: 1460360 - DNA, 15 bp, Homo sapiens
gctgaatgagtgcct

SEQ ID NO: 1460361 - DNA, 15 bp, Homo sapiens
ggctgaatgagtgcc

SEQ ID NO: 1460362 - DNA, 15 bp, Homo sapiens
tggctgaatgagtgc

SEQ ID NO: 1460363 - DNA, 15 bp, Homo sapiens
atggctgaatgagtg

SEQ ID NO: 1460364 - DNA, 15 bp, Homo sapiens
aatggctgaatgagt

SEQ ID NO: 1460365 - DNA, 15 bp, Homo sapiens
caatggctgaatgag

SEQ ID NO: 1460366 - DNA, 15 bp, Homo sapiens
acaatggctgaatga

SEQ ID NO: 1460367 - DNA, 15 bp, Homo sapiens
gacaatggctgaatg

SEQ ID NO: 1460368 - DNA, 15 bp, Homo sapiens
agacaatggctgaat

SEQ ID NO: 1460369 - DNA, 15 bp, Homo sapiens
cagacaatggctgaa

SEQ ID NO: 1460370 - DNA, 15 bp, Homo sapiens
gcagacaatggctga

SEQ ID NO: 1460371 - DNA, 15 bp, Homo sapiens
agcagacaatggctg

SEQ ID NO: 1460372 - DNA, 15 bp, Homo sapiens
aagcagacaatggct

SEQ ID NO: 1460373 - DNA, 15 bp, Homo sapiens
taagcagacaatggc

SEQ ID NO: 1460374 - DNA, 15 bp, Homo sapiens
ataagcagacaatgg

SEQ ID NO: 1460375 - DNA, 15 bp, Homo sapiens
aataagcagacaatg

SEQ ID NO: 1460376 - DNA, 15 bp, Homo sapiens
taataagcagacaat

SEQ ID NO: 1460377 - DNA, 15 bp, Homo sapiens
ttaataagcagacaa

SEQ ID NO: 1460378 - DNA, 15 bp, Homo sapiens
attaataagcagaca

SEQ ID NO: 1460379 - DNA, 15 bp, Homo sapiens
tattaataagcagac

SEQ ID NO: 1460380 - DNA, 15 bp, Homo sapiens
ttattaataagcaga

SEQ ID NO: 1460381 - DNA, 15 bp, Homo sapiens
tttattaataagcag

SEQ ID NO: 1460382 - DNA, 15 bp, Homo sapiens
ttttattaataagca

SEQ ID NO: 1460383 - DNA, 15 bp, Homo sapiens
tttttattaataagc

SEQ ID NO: 1460384 - DNA, 15 bp, Homo sapiens
gtttttattaataag

SEQ ID NO: 1460385 - DNA, 15 bp, Homo sapiens
ggtttttattaataa

SEQ ID NO: 1460386 - DNA, 15 bp, Homo sapiens
aggtttttattaata

SEQ ID NO: 1460387 - DNA, 15 bp, Homo sapiens
caggtttttattaat

SEQ ID NO: 1460388 - DNA, 15 bp, Homo sapiens
acaggtttttattaa

SEQ ID NO: 1460389 - DNA, 15 bp, Homo sapiens
tacaggtttttatta

SEQ ID NO: 1460390 - DNA, 15 bp, Homo sapiens
ctacaggtttttatt

SEQ ID NO: 1460391 - DNA, 15 bp, Homo sapiens
gctacaggtttttat

SEQ ID NO: 1460392 - DNA, 15 bp, Homo sapiens
agctacaggttttta

SEQ ID NO: 1460393 - DNA, 15 bp, Homo sapiens
aagctacaggttttt

SEQ ID NO: 1460394 - DNA, 15 bp, Homo sapiens
taagctacaggtttt

SEQ ID NO: 1460395 - DNA, 15 bp, Homo sapiens
gtaagctacaggttt

SEQ ID NO: 1460396 - DNA, 15 bp, Homo sapiens
tgtaagctacaggtt

SEQ ID NO: 1460397 - DNA, 15 bp, Homo sapiens
atgtaagctacaggt

SEQ ID NO: 1460398 - DNA, 15 bp, Homo sapiens
tatgtaagctacagg

SEQ ID NO: 1460399 - DNA, 15 bp, Homo sapiens
ctatgtaagctacag

SEQ ID NO: 1460400 - DNA, 15 bp, Homo sapiens
actatgtaagctaca

SEQ ID NO: 1460401 - DNA, 15 bp, Homo sapiens
cactatgtaagctac

SEQ ID NO: 1460402 - DNA, 15 bp, Homo sapiens
tcactatgtaagcta

SEQ ID NO: 1460403 - DNA, 15 bp, Homo sapiens
ttcactatgtaagct

SEQ ID NO: 1460404 - DNA, 15 bp, Homo sapiens
cttcactatgtaagc

SEQ ID NO: 1460405 - DNA, 15 bp, Homo sapiens
gcttcactatgtaag

SEQ ID NO: 1460406 - DNA, 15 bp, Homo sapiens
agcttcactatgtaa

SEQ ID NO: 1460407 - DNA, 15 bp, Homo sapiens
cagcttcactatgta

SEQ ID NO: 1460408 - DNA, 15 bp, Homo sapiens
tcagcttcactatgt

SEQ ID NO: 1460409 - DNA, 15 bp, Homo sapiens
ctcagcttcactatg

SEQ ID NO: 1460410 - DNA, 15 bp, Homo sapiens
actcagcttcactat

SEQ ID NO: 1460411 - DNA, 15 bp, Homo sapiens
aactcagcttcacta

SEQ ID NO: 1460412 - DNA, 15 bp, Homo sapiens
caactcagcttcact

SEQ ID NO: 1460413 - DNA, 15 bp, Homo sapiens
gcaactcagcttcac

SEQ ID NO: 1460414 - DNA, 15 bp, Homo sapiens
ggcaactcagcttca

SEQ ID NO: 1460415 - DNA, 15 bp, Homo sapiens
gggcaactcagcttc

SEQ ID NO: 1460416 - DNA, 15 bp, Homo sapiens
agggcaactcagctt

SEQ ID NO: 1460417 - DNA, 15 bp, Homo sapiens
cagggcaactcagct

SEQ ID NO: 1460418 - DNA, 15 bp, Homo sapiens
tcagggcaactcagc

SEQ ID NO: 1460419 - DNA, 15 bp, Homo sapiens
ctcagggcaactcag

SEQ ID NO: 1460420 - DNA, 15 bp, Homo sapiens
tctcagggcaactca

SEQ ID NO: 1460421 - DNA, 15 bp, Homo sapiens
ttctcagggcaactc

SEQ ID NO: 1460422 - DNA, 15 bp, Homo sapiens
attctcagggcaact

SEQ ID NO: 1460423 - DNA, 15 bp, Homo sapiens
aattctcagggcaac

SEQ ID NO: 1460424 - DNA, 15 bp, Homo sapiens
taattctcagggcaa

SEQ ID NO: 1460425 - DNA, 15 bp, Homo sapiens
gtaattctcagggca

SEQ ID NO: 1460426 - DNA, 15 bp, Homo sapiens
tgtaattctcagggc

SEQ ID NO: 1460427 - DNA, 15 bp, Homo sapiens
gtgtaattctcaggg

SEQ ID NO: 1460428 - DNA, 15 bp, Homo sapiens
ggtgtaattctcagg

SEQ ID NO: 1460429 - DNA, 15 bp, Homo sapiens
tggtgtaattctcag

SEQ ID NO: 1460430 - DNA, 15 bp, Homo sapiens
ctggtgtaattctca

SEQ ID NO: 1460431 - DNA, 15 bp, Homo sapiens
gctggtgtaattctc

SEQ ID NO: 1460432 - DNA, 15 bp, Homo sapiens
agctggtgtaattct

SEQ ID NO: 1460433 - DNA, 15 bp, Homo sapiens
cagctggtgtaattc

SEQ ID NO: 1460434 - DNA, 15 bp, Homo sapiens
acagctggtgtaatt

SEQ ID NO: 1460435 - DNA, 15 bp, Homo sapiens
gacagctggtgtaat

SEQ ID NO: 1460436 - DNA, 15 bp, Homo sapiens
agacagctggtgtaa

SEQ ID NO: 1460437 - DNA, 15 bp, Homo sapiens
aagacagctggtgta

SEQ ID NO: 1460438 - DNA, 15 bp, Homo sapiens
aaagacagctggtgt

SEQ ID NO: 1460439 - DNA, 15 bp, Homo sapiens
gaaagacagctggtg

SEQ ID NO: 1460440 - DNA, 15 bp, Homo sapiens
agaaagacagctggt

SEQ ID NO: 1460441 - DNA, 15 bp, Homo sapiens
cagaaagacagctgg

SEQ ID NO: 1460442 - DNA, 15 bp, Homo sapiens
tcagaaagacagctg

SEQ ID NO: 1460443 - DNA, 15 bp, Homo sapiens
gtcagaaagacagct

SEQ ID NO: 1460444 - DNA, 15 bp, Homo sapiens
agtcagaaagacagc

SEQ ID NO: 1460445 - DNA, 15 bp, Homo sapiens
tagtcagaaagacag

SEQ ID NO: 1460446 - DNA, 15 bp, Homo sapiens
ttagtcagaaagaca

SEQ ID NO: 1460447 - DNA, 15 bp, Homo sapiens
tttagtcagaaagac

SEQ ID NO: 1460448 - DNA, 15 bp, Homo sapiens
atttagtcagaaaga

SEQ ID NO: 1460449 - DNA, 15 bp, Homo sapiens
aatttagtcagaaag

SEQ ID NO: 1460450 - DNA, 15 bp, Homo sapiens
gaatttagtcagaaa

SEQ ID NO: 1460451 - DNA, 15 bp, Homo sapiens
tgaatttagtcagaa

SEQ ID NO: 1460452 - DNA, 15 bp, Homo sapiens
ttgaatttagtcaga

SEQ ID NO: 1460453 - DNA, 15 bp, Homo sapiens
cttgaatttagtcag

SEQ ID NO: 1460454 - DNA, 15 bp, Homo sapiens
gcttgaatttagtca

SEQ ID NO: 1460455 - DNA, 15 bp, Homo sapiens
tgcttgaatttagtc

SEQ ID NO: 1460456 - DNA, 15 bp, Homo sapiens
ctgcttgaatttagt

SEQ ID NO: 1460457 - DNA, 15 bp, Homo sapiens
actgcttgaatttag

SEQ ID NO: 1460458 - DNA, 15 bp, Homo sapiens
cactgcttgaattta

SEQ ID NO: 1460459 - DNA, 15 bp, Homo sapiens
ccactgcttgaattt

SEQ ID NO: 1460460 - DNA, 15 bp, Homo sapiens
gccactgcttgaatt

SEQ ID NO: 1460461 - DNA, 15 bp, Homo sapiens
agccactgcttgaat

SEQ ID NO: 1460462 - DNA, 15 bp, Homo sapiens
aagccactgcttgaa

SEQ ID NO: 1460463 - DNA, 15 bp, Homo sapiens
aaagccactgcttga

SEQ ID NO: 1460464 - DNA, 15 bp, Homo sapiens
taaagccactgcttg

SEQ ID NO: 1460465 - DNA, 15 bp, Homo sapiens
ttaaagccactgctt

SEQ ID NO: 1460466 - DNA, 15 bp, Homo sapiens
gttaaagccactgct

SEQ ID NO: 1460467 - DNA, 15 bp, Homo sapiens
agttaaagccactgc

SEQ ID NO: 1460468 - DNA, 15 bp, Homo sapiens
cagttaaagccactg

SEQ ID NO: 1460469 - DNA, 15 bp, Homo sapiens
tcagttaaagccact

SEQ ID NO: 1460470 - DNA, 15 bp, Homo sapiens
gtcagttaaagccac

SEQ ID NO: 1460471 - DNA, 15 bp, Homo sapiens
ggtcagttaaagcca

SEQ ID NO: 1460472 - DNA, 15 bp, Homo sapiens
aggtcagttaaagcc

SEQ ID NO: 1460473 - DNA, 15 bp, Homo sapiens
aaggtcagttaaagc

SEQ ID NO: 1460474 - DNA, 15 bp, Homo sapiens
aaaggtcagttaaag

SEQ ID NO: 1460475 - DNA, 15 bp, Homo sapiens
aaaaggtcagttaaa

SEQ ID NO: 1460476 - DNA, 15 bp, Homo sapiens
aaaaaggtcagttaa

SEQ ID NO: 1460477 - DNA, 15 bp, Homo sapiens
aaaaaaggtcagtta

SEQ ID NO: 1460478 - DNA, 15 bp, Homo sapiens
aaaaaaaggtcagtt

SEQ ID NO: 1460479 - DNA, 15 bp, Homo sapiens
aaaaaaaaggtcagt

SEQ ID NO: 1460480 - DNA, 15 bp, Homo sapiens
aaaaaaaaaggtcag

SEQ ID NO: 1460481 - DNA, 15 bp, Homo sapiens
aaaaaaaaaaggtca

SEQ ID NO: 1460482 - DNA, 15 bp, Homo sapiens
aaaaaaaaaaaggtc

SEQ ID NO: 1460483 - DNA, 15 bp, Homo sapiens
cagataaaaaaaaaa

SEQ ID NO: 1460484 - DNA, 15 bp, Homo sapiens
tcagataaaaaaaaa

SEQ ID NO: 1460485 - DNA, 15 bp, Homo sapiens
ttcagataaaaaaaa

SEQ ID NO: 1460486 - DNA, 15 bp, Homo sapiens
attcagataaaaaaa

SEQ ID NO: 1460487 - DNA, 15 bp, Homo sapiens
aattcagataaaaaa

SEQ ID NO: 1460488 - DNA, 15 bp, Homo sapiens
taattcagataaaaa

SEQ ID NO: 1460489 - DNA, 15 bp, Homo sapiens
ttaattcagataaaa

SEQ ID NO: 1460490 - DNA, 15 bp, Homo sapiens
cttaattcagataaa

SEQ ID NO: 1460491 - DNA, 15 bp, Homo sapiens
tcttaattcagataa

SEQ ID NO: 1460492 - DNA, 15 bp, Homo sapiens
atcttaattcagata

SEQ ID NO: 1460493 - DNA, 15 bp, Homo sapiens
gatcttaattcagat

SEQ ID NO: 1460494 - DNA, 15 bp, Homo sapiens
tgatcttaattcaga

SEQ ID NO: 1460495 - DNA, 15 bp, Homo sapiens
atgatcttaattcag

SEQ ID NO: 1460496 - DNA, 15 bp, Homo sapiens
aatgatcttaattca

SEQ ID NO: 1460497 - DNA, 15 bp, Homo sapiens
aaatgatcttaattc

SEQ ID NO: 1460498 - DNA, 15 bp, Homo sapiens
caaatgatcttaatt

SEQ ID NO: 1460499 - DNA, 15 bp, Homo sapiens
ccaaatgatcttaat

SEQ ID NO: 1460500 - DNA, 15 bp, Homo sapiens
cccaaatgatcttaa

SEQ ID NO: 1460501 - DNA, 15 bp, Homo sapiens
gcccaaatgatctta

SEQ ID NO: 1460502 - DNA, 15 bp, Homo sapiens
ggcccaaatgatctt

SEQ ID NO: 1460503 - DNA, 15 bp, Homo sapiens
tggcccaaatgatct

SEQ ID NO: 1460504 - DNA, 15 bp, Homo sapiens
gtggcccaaatgatc

SEQ ID NO: 1460505 - DNA, 15 bp, Homo sapiens
tgtggcccaaatgat

SEQ ID NO: 1460506 - DNA, 15 bp, Homo sapiens
gtgtggcccaaatga

SEQ ID NO: 1460507 - DNA, 15 bp, Homo sapiens
ggtgtggcccaaatg

SEQ ID NO: 1460508 - DNA, 15 bp, Homo sapiens
aggtgtggcccaaat

SEQ ID NO: 1460509 - DNA, 15 bp, Homo sapiens
taggtgtggcccaaa

SEQ ID NO: 1460510 - DNA, 15 bp, Homo sapiens
ataggtgtggcccaa

SEQ ID NO: 1460511 - DNA, 15 bp, Homo sapiens
cataggtgtggccca

SEQ ID NO: 1460512 - DNA, 15 bp, Homo sapiens
tcataggtgtggccc

SEQ ID NO: 1460513 - DNA, 15 bp, Homo sapiens
ctcataggtgtggcc

SEQ ID NO: 1460514 - DNA, 15 bp, Homo sapiens
gctcataggtgtggc

SEQ ID NO: 1460515 - DNA, 15 bp, Homo sapiens
agctcataggtgtgg

SEQ ID NO: 1460516 - DNA, 15 bp, Homo sapiens
cagctcataggtgtg

SEQ ID NO: 1460517 - DNA, 15 bp, Homo sapiens
tcagctcataggtgt

SEQ ID NO: 1460518 - DNA, 15 bp, Homo sapiens
ctcagctcataggtg

SEQ ID NO: 1460519 - DNA, 15 bp, Homo sapiens
cctcagctcataggt

SEQ ID NO: 1460520 - DNA, 15 bp, Homo sapiens
acctcagctcatagg

SEQ ID NO: 1460521 - DNA, 15 bp, Homo sapiens
gacctcagctcatag

SEQ ID NO: 1460522 - DNA, 15 bp, Homo sapiens
agacctcagctcata

SEQ ID NO: 1460523 - DNA, 15 bp, Homo sapiens
tagacctcagctcat

SEQ ID NO: 1460524 - DNA, 15 bp, Homo sapiens
ctagacctcagctca

SEQ ID NO: 1460525 - DNA, 15 bp, Homo sapiens
actagacctcagctc

SEQ ID NO: 1460526 - DNA, 15 bp, Homo sapiens
aactagacctcagct

SEQ ID NO: 1460527 - DNA, 15 bp, Homo sapiens
gaactagacctcagc

SEQ ID NO: 1460528 - DNA, 15 bp, Homo sapiens
tgaactagacctcag

SEQ ID NO: 1460529 - DNA, 15 bp, Homo sapiens
ctgaactagacctca

SEQ ID NO: 1460530 - DNA, 15 bp, Homo sapiens
tctgaactagacctc

SEQ ID NO: 1460531 - DNA, 15 bp, Homo sapiens
atctgaactagacct

SEQ ID NO: 1460532 - DNA, 15 bp, Homo sapiens
aatctgaactagacc

SEQ ID NO: 1460533 - DNA, 15 bp, Homo sapiens
aaatctgaactagac

SEQ ID NO: 1460534 - DNA, 15 bp, Homo sapiens
caaatctgaactaga

SEQ ID NO: 1460535 - DNA, 15 bp, Homo sapiens
acaaatctgaactag

SEQ ID NO: 1460536 - DNA, 15 bp, Homo sapiens
aacaaatctgaacta

SEQ ID NO: 1460537 - DNA, 15 bp, Homo sapiens
caacaaatctgaact

SEQ ID NO: 1460538 - DNA, 15 bp, Homo sapiens
ccaacaaatctgaac

SEQ ID NO: 1460539 - DNA, 15 bp, Homo sapiens
tccaacaaatctgaa

SEQ ID NO: 1460540 - DNA, 15 bp, Homo sapiens
ctccaacaaatctga

SEQ ID NO: 1460541 - DNA, 15 bp, Homo sapiens
tctccaacaaatctg

SEQ ID NO: 1460542 - DNA, 15 bp, Homo sapiens
ttctccaacaaatct

SEQ ID NO: 1460543 - DNA, 15 bp, Homo sapiens
attctccaacaaatc

SEQ ID NO: 1460544 - DNA, 15 bp, Homo sapiens
cattctccaacaaat

SEQ ID NO: 1460545 - DNA, 15 bp, Homo sapiens
gcattctccaacaaa

SEQ ID NO: 1460546 - DNA, 15 bp, Homo sapiens
agcattctccaacaa

SEQ ID NO: 1460547 - DNA, 15 bp, Homo sapiens
gagcattctccaaca

SEQ ID NO: 1460548 - DNA, 15 bp, Homo sapiens
tgagcattctccaac

SEQ ID NO: 1460549 - DNA, 15 bp, Homo sapiens
gtgagcattctccaa

SEQ ID NO: 1460550 - DNA, 15 bp, Homo sapiens
ggtgagcattctcca

SEQ ID NO: 1460551 - DNA, 15 bp, Homo sapiens
gggtgagcattctcc

SEQ ID NO: 1460552 - DNA, 15 bp, Homo sapiens
tgggtgagcattctc

SEQ ID NO: 1460553 - DNA, 15 bp, Homo sapiens
atgggtgagcattct

SEQ ID NO: 1460554 - DNA, 15 bp, Homo sapiens
gatgggtgagcattc

SEQ ID NO: 1460555 - DNA, 15 bp, Homo sapiens
tgatgggtgagcatt

SEQ ID NO: 1460556 - DNA, 15 bp, Homo sapiens
ctgatgggtgagcat

SEQ ID NO: 1460557 - DNA, 15 bp, Homo sapiens
actgatgggtgagca

SEQ ID NO: 1460558 - DNA, 15 bp, Homo sapiens
tactgatgggtgagc

SEQ ID NO: 1460559 - DNA, 15 bp, Homo sapiens
ttactgatgggtgag

SEQ ID NO: 1460560 - DNA, 15 bp, Homo sapiens
attactgatgggtga

SEQ ID NO: 1460561 - DNA, 15 bp, Homo sapiens
aattactgatgggtg

SEQ ID NO: 1460562 - DNA, 15 bp, Homo sapiens
aaattactgatgggt

SEQ ID NO: 1460563 - DNA, 15 bp, Homo sapiens
aaaattactgatggg

SEQ ID NO: 1460564 - DNA, 15 bp, Homo sapiens
aaaaattactgatgg

SEQ ID NO: 1460565 - DNA, 15 bp, Homo sapiens
aaaaaattactgatg

SEQ ID NO: 1460566 - DNA, 15 bp, Homo sapiens
caaaaaattactgat

SEQ ID NO: 1460567 - DNA, 15 bp, Homo sapiens
tcaaaaaattactga

SEQ ID NO: 1460568 - DNA, 15 bp, Homo sapiens
gtcaaaaaattactg

SEQ ID NO: 1460569 - DNA, 15 bp, Homo sapiens
agtcaaaaaattact

SEQ ID NO: 1460570 - DNA, 15 bp, Homo sapiens
cagtcaaaaaattac

SEQ ID NO: 1460571 - DNA, 15 bp, Homo sapiens
tcagtcaaaaaatta

SEQ ID NO: 1460572 - DNA, 15 bp, Homo sapiens
atcagtcaaaaaatt

SEQ ID NO: 1460573 - DNA, 15 bp, Homo sapiens
aatcagtcaaaaaat

SEQ ID NO: 1460574 - DNA, 15 bp, Homo sapiens
gaatcagtcaaaaaa

SEQ ID NO: 1460575 - DNA, 15 bp, Homo sapiens
tgaatcagtcaaaaa

SEQ ID NO: 1460576 - DNA, 15 bp, Homo sapiens
ttgaatcagtcaaaa

SEQ ID NO: 1460577 - DNA, 15 bp, Homo sapiens
cttgaatcagtcaaa

SEQ ID NO: 1460578 - DNA, 15 bp, Homo sapiens
gcttgaatcagtcaa

SEQ ID NO: 1460579 - DNA, 15 bp, Homo sapiens
ggcttgaatcagtca

SEQ ID NO: 1460580 - DNA, 15 bp, Homo sapiens
gggcttgaatcagtc

SEQ ID NO: 1460581 - DNA, 15 bp, Homo sapiens
ggggcttgaatcagt

SEQ ID NO: 1460582 - DNA, 15 bp, Homo sapiens
aggggcttgaatcag

SEQ ID NO: 1460583 - DNA, 15 bp, Homo sapiens
aaggggcttgaatca

SEQ ID NO: 1460584 - DNA, 15 bp, Homo sapiens
caaggggcttgaatc

SEQ ID NO: 1460585 - DNA, 15 bp, Homo sapiens
tcaaggggcttgaat

SEQ ID NO: 1460586 - DNA, 15 bp, Homo sapiens
gtcaaggggcttgaa

SEQ ID NO: 1460587 - DNA, 15 bp, Homo sapiens
ggtcaaggggcttga

SEQ ID NO: 1460588 - DNA, 15 bp, Homo sapiens
tggtcaaggggcttg

SEQ ID NO: 1460589 - DNA, 15 bp, Homo sapiens
ttggtcaaggggctt

SEQ ID NO: 1460590 - DNA, 15 bp, Homo sapiens
attggtcaaggggct

SEQ ID NO: 1460591 - DNA, 15 bp, Homo sapiens
cattggtcaaggggc

SEQ ID NO: 1460592 - DNA, 15 bp, Homo sapiens
ccattggtcaagggg

SEQ ID NO: 1460593 - DNA, 15 bp, Homo sapiens
tccattggtcaaggg

SEQ ID NO: 1460594 - DNA, 15 bp, Homo sapiens
gtccattggtcaagg

SEQ ID NO: 1460595 - DNA, 15 bp, Homo sapiens
tgtccattggtcaag

SEQ ID NO: 1460596 - DNA, 15 bp, Homo sapiens
atgtccattggtcaa

SEQ ID NO: 1460597 - DNA, 15 bp, Homo sapiens
aatgtccattggtca

SEQ ID NO: 1460598 - DNA, 15 bp, Homo sapiens
taatgtccattggtc

SEQ ID NO: 1460599 - DNA, 15 bp, Homo sapiens
ctaatgtccattggt

SEQ ID NO: 1460600 - DNA, 15 bp, Homo sapiens
tctaatgtccattgg

SEQ ID NO: 1460601 - DNA, 15 bp, Homo sapiens
ctctaatgtccattg

SEQ ID NO: 1460602 - DNA, 15 bp, Homo sapiens
cctctaatgtccatt

SEQ ID NO: 1460603 - DNA, 15 bp, Homo sapiens
tcctctaatgtccat

SEQ ID NO: 1460604 - DNA, 15 bp, Homo sapiens
atcctctaatgtcca

SEQ ID NO: 1460605 - DNA, 15 bp, Homo sapiens
catcctctaatgtcc

SEQ ID NO: 1460606 - DNA, 15 bp, Homo sapiens
tcatcctctaatgtc

SEQ ID NO: 1460607 - DNA, 15 bp, Homo sapiens
ttcatcctctaatgt

SEQ ID NO: 1460608 - DNA, 15 bp, Homo sapiens
attcatcctctaatg

SEQ ID NO: 1460609 - DNA, 15 bp, Homo sapiens
cattcatcctctaat

SEQ ID NO: 1460610 - DNA, 15 bp, Homo sapiens
tcattcatcctctaa

SEQ ID NO: 1460611 - DNA, 15 bp, Homo sapiens
ctcattcatcctcta

SEQ ID NO: 1460612 - DNA, 15 bp, Homo sapiens
tctcattcatcctct

SEQ ID NO: 1460613 - DNA, 15 bp, Homo sapiens
ttctcattcatcctc

SEQ ID NO: 1460614 - DNA, 15 bp, Homo sapiens
tttctcattcatcct

SEQ ID NO: 1460615 - DNA, 15 bp, Homo sapiens
ctttctcattcatcc

SEQ ID NO: 1460616 - DNA, 15 bp, Homo sapiens
actttctcattcatc

SEQ ID NO: 1460617 - DNA, 15 bp, Homo sapiens
attccactttctcat

SEQ ID NO: 1460618 - DNA, 15 bp, Homo sapiens
tattccactttctca

SEQ ID NO: 1460619 - DNA, 15 bp, Homo sapiens
gtattccactttctc

SEQ ID NO: 1460620 - DNA, 15 bp, Homo sapiens
tgtattccactttct

SEQ ID NO: 1460621 - DNA, 15 bp, Homo sapiens
atgtattccactttc

SEQ ID NO: 1460622 - DNA, 15 bp, Homo sapiens
aatgtattccacttt

SEQ ID NO: 1460623 - DNA, 15 bp, Homo sapiens
taatgtattccactt

SEQ ID NO: 1460624 - DNA, 15 bp, Homo sapiens
ttaatgtattccact

SEQ ID NO: 1460625 - DNA, 15 bp, Homo sapiens
cttaatgtattccac

SEQ ID NO: 1460626 - DNA, 15 bp, Homo sapiens
acttaatgtattcca

SEQ ID NO: 1460627 - DNA, 15 bp, Homo sapiens
tacttaatgtattcc

SEQ ID NO: 1460628 - DNA, 15 bp, Homo sapiens
ttacttaatgtattc

SEQ ID NO: 1460629 - DNA, 15 bp, Homo sapiens
gttacttaatgtatt

SEQ ID NO: 1460630 - DNA, 15 bp, Homo sapiens
agttacttaatgtat

SEQ ID NO: 1460631 - DNA, 15 bp, Homo sapiens
aagttacttaatgta

SEQ ID NO: 1460632 - DNA, 15 bp, Homo sapiens
taagttacttaatgt

SEQ ID NO: 1460633 - DNA, 15 bp, Homo sapiens
ctaagttacttaatg

SEQ ID NO: 1460634 - DNA, 15 bp, Homo sapiens
tctaagttacttaat

SEQ ID NO: 1460635 - DNA, 15 bp, Homo sapiens
ttctaagttacttaa

SEQ ID NO: 1460636 - DNA, 15 bp, Homo sapiens
attctaagttactta

SEQ ID NO: 1460637 - DNA, 15 bp, Homo sapiens
cattctaagttactt

SEQ ID NO: 1460638 - DNA, 15 bp, Homo sapiens
tcattctaagttact

SEQ ID NO: 1460639 - DNA, 15 bp, Homo sapiens
ttcattctaagttac

SEQ ID NO: 1460640 - DNA, 15 bp, Homo sapiens
cttcattctaagtta

SEQ ID NO: 1460641 - DNA, 15 bp, Homo sapiens
tcttcattctaagtt

SEQ ID NO: 1460642 - DNA, 15 bp, Homo sapiens
ttcttcattctaagt

SEQ ID NO: 1460643 - DNA, 15 bp, Homo sapiens
tttcttcattctaag

SEQ ID NO: 1460644 - DNA, 15 bp, Homo sapiens
ttttcttcattctaa

SEQ ID NO: 1460645 - DNA, 15 bp, Homo sapiens
tttttcttcattcta

SEQ ID NO: 1460646 - DNA, 15 bp, Homo sapiens
atttttcttcattct

SEQ ID NO: 1460647 - DNA, 15 bp, Homo sapiens
gatttttcttcattc

SEQ ID NO: 1460648 - DNA, 15 bp, Homo sapiens
tgatttttcttcatt

SEQ ID NO: 1460649 - DNA, 15 bp, Homo sapiens
atgatttttcttcat

SEQ ID NO: 1460650 - DNA, 15 bp, Homo sapiens
tatgatttttcttca

SEQ ID NO: 1460651 - DNA, 15 bp, Homo sapiens
ctatgatttttcttc

SEQ ID NO: 1460652 - DNA, 15 bp, Homo sapiens
gctatgatttttctt

SEQ ID NO: 1460653 - DNA, 15 bp, Homo sapiens
tgctatgatttttct

SEQ ID NO: 1460654 - DNA, 15 bp, Homo sapiens
atgctatgatttttc

SEQ ID NO: 1460655 - DNA, 15 bp, Homo sapiens
tatgctatgattttt

SEQ ID NO: 1460656 - DNA, 15 bp, Homo sapiens
ttatgctatgatttt

SEQ ID NO: 1460657 - DNA, 15 bp, Homo sapiens
cttatgctatgattt

SEQ ID NO: 1460658 - DNA, 15 bp, Homo sapiens
tcttatgctatgatt

SEQ ID NO: 1460659 - DNA, 15 bp, Homo sapiens
ctcttatgctatgat

SEQ ID NO: 1460660 - DNA, 15 bp, Homo sapiens
tctcttatgctatga

SEQ ID NO: 1460661 - DNA, 15 bp, Homo sapiens
atctcttatgctatg

SEQ ID NO: 1460662 - DNA, 15 bp, Homo sapiens
tatctcttatgctat

SEQ ID NO: 1460663 - DNA, 15 bp, Homo sapiens
gtatctcttatgcta

SEQ ID NO: 1460664 - DNA, 15 bp, Homo sapiens
tgtatctcttatgct

SEQ ID NO: 1460665 - DNA, 15 bp, Homo sapiens
atgtatctcttatgc

SEQ ID NO: 1460666 - DNA, 15 bp, Homo sapiens
aatgtatctcttatg

SEQ ID NO: 1460667 - DNA, 15 bp, Homo sapiens
aaatgtatctcttat

SEQ ID NO: 1460668 - DNA, 15 bp, Homo sapiens
aaaatgtatctctta

SEQ ID NO: 1460669 - DNA, 15 bp, Homo sapiens
aaaaatgtatctctt

SEQ ID NO: 1460670 - DNA, 15 bp, Homo sapiens
caaaaatgtatctct

SEQ ID NO: 1460671 - DNA, 15 bp, Homo sapiens
tcaaaaatgtatctc

SEQ ID NO: 1460672 - DNA, 15 bp, Homo sapiens
gtcaaaaatgtatct

SEQ ID NO: 1460673 - DNA, 15 bp, Homo sapiens
tgtcaaaaatgtatc

SEQ ID NO: 1460674 - DNA, 15 bp, Homo sapiens
gtgtcaaaaatgtat

SEQ ID NO: 1460675 - DNA, 15 bp, Homo sapiens
agtgtcaaaaatgta

SEQ ID NO: 1460676 - DNA, 15 bp, Homo sapiens
aagtgtcaaaaatgt

SEQ ID NO: 1460677 - DNA, 15 bp, Homo sapiens
aaagtgtcaaaaatg

SEQ ID NO: 1460678 - DNA, 15 bp, Homo sapiens
caaagtgtcaaaaat

SEQ ID NO: 1460679 - DNA, 15 bp, Homo sapiens
acaaagtgtcaaaaa

SEQ ID NO: 1460680 - DNA, 15 bp, Homo sapiens
tacaaagtgtcaaaa

SEQ ID NO: 1460681 - DNA, 15 bp, Homo sapiens
ttacaaagtgtcaaa

SEQ ID NO: 1460682 - DNA, 15 bp, Homo sapiens
gttacaaagtgtcaa

SEQ ID NO: 1460683 - DNA, 15 bp, Homo sapiens
tgttacaaagtgtca

SEQ ID NO: 1460684 - DNA, 15 bp, Homo sapiens
atgttacaaagtgtc

SEQ ID NO: 1460685 - DNA, 15 bp, Homo sapiens
catgttacaaagtgt

SEQ ID NO: 1460686 - DNA, 15 bp, Homo sapiens
acatgttacaaagtg

SEQ ID NO: 1460687 - DNA, 15 bp, Homo sapiens
tacatgttacaaagt

SEQ ID NO: 1460688 - DNA, 15 bp, Homo sapiens
ttacatgttacaaag

SEQ ID NO: 1460689 - DNA, 15 bp, Homo sapiens
tttacatgttacaaa

SEQ ID NO: 1460690 - DNA, 15 bp, Homo sapiens
atttacatgttacaa

SEQ ID NO: 1460691 - DNA, 15 bp, Homo sapiens
aatttacatgttaca

SEQ ID NO: 1460692 - DNA, 15 bp, Homo sapiens
taatttacatgttac

SEQ ID NO: 1460693 - DNA, 15 bp, Homo sapiens
ataatttacatgtta

SEQ ID NO: 1460694 - DNA, 15 bp, Homo sapiens
tataatttacatgtt

SEQ ID NO: 1460695 - DNA, 15 bp, Homo sapiens
ttataatttacatgt

SEQ ID NO: 1460696 - DNA, 15 bp, Homo sapiens
attataatttacatg

SEQ ID NO: 1460697 - DNA, 15 bp, Homo sapiens
aattataatttacat

SEQ ID NO: 1460698 - DNA, 15 bp, Homo sapiens
taattataatttaca

SEQ ID NO: 1460699 - DNA, 15 bp, Homo sapiens
ttaattataatttac

SEQ ID NO: 1460700 - DNA, 15 bp, Homo sapiens
attaattataattta

SEQ ID NO: 1460701 - DNA, 15 bp, Homo sapiens
tattaattataattt

SEQ ID NO: 1460702 - DNA, 15 bp, Homo sapiens
gtattaattataatt

SEQ ID NO: 1460703 - DNA, 15 bp, Homo sapiens
tgtattaattataat

SEQ ID NO: 1460704 - DNA, 15 bp, Homo sapiens
atgtattaattataa

SEQ ID NO: 1460705 - DNA, 15 bp, Homo sapiens
tatgtattaattata

SEQ ID NO: 1460706 - DNA, 15 bp, Homo sapiens
ttatgtattaattat

SEQ ID NO: 1460707 - DNA, 15 bp, Homo sapiens
tttatgtattaatta

SEQ ID NO: 1460708 - DNA, 15 bp, Homo sapiens
atttatgtattaatt

SEQ ID NO: 1460709 - DNA, 15 bp, Homo sapiens
aatttatgtattaat

SEQ ID NO: 1460710 - DNA, 15 bp, Homo sapiens
aaatttatgtattaa

SEQ ID NO: 1460711 - DNA, 15 bp, Homo sapiens
caaatttatgtatta

SEQ ID NO: 1460712 - DNA, 15 bp, Homo sapiens
gcaaatttatgtatt

SEQ ID NO: 1460713 - DNA, 15 bp, Homo sapiens
tgcaaatttatgtat

SEQ ID NO: 1460714 - DNA, 15 bp, Homo sapiens
gtgcaaatttatgta

SEQ ID NO: 1460715 - DNA, 15 bp, Homo sapiens
ggtgcaaatttatgt

SEQ ID NO: 1460716 - DNA, 15 bp, Homo sapiens
tggtgcaaatttatg

SEQ ID NO: 1460717 - DNA, 15 bp, Homo sapiens
ttggtgcaaatttat

SEQ ID NO: 1460718 - DNA, 15 bp, Homo sapiens
attggtgcaaattta

SEQ ID NO: 1460719 - DNA, 15 bp, Homo sapiens
aattggtgcaaattt

SEQ ID NO: 1460720 - DNA, 15 bp, Homo sapiens
taattggtgcaaatt

SEQ ID NO: 1460721 - DNA, 15 bp, Homo sapiens
gtaattggtgcaaat

SEQ ID NO: 1460722 - DNA, 15 bp, Homo sapiens
agtaattggtgcaaa

SEQ ID NO: 1460723 - DNA, 15 bp, Homo sapiens
aagtaattggtgcaa

SEQ ID NO: 1460724 - DNA, 15 bp, Homo sapiens
caagtaattggtgca

SEQ ID NO: 1460725 - DNA, 15 bp, Homo sapiens
tcaagtaattggtgc

SEQ ID NO: 1460726 - DNA, 15 bp, Homo sapiens
gtcaagtaattggtg

SEQ ID NO: 1460727 - DNA, 15 bp, Homo sapiens
agtcaagtaattggt

SEQ ID NO: 1460728 - DNA, 15 bp, Homo sapiens
gagtcaagtaattgg

SEQ ID NO: 1460729 - DNA, 15 bp, Homo sapiens
tgagtcaagtaattg

SEQ ID NO: 1460730 - DNA, 15 bp, Homo sapiens
ttgagtcaagtaatt

SEQ ID NO: 1460731 - DNA, 15 bp, Homo sapiens
cttgagtcaagtaat

SEQ ID NO: 1460732 - DNA, 15 bp, Homo sapiens
tcttgagtcaagtaa

SEQ ID NO: 1460733 - DNA, 15 bp, Homo sapiens
ctcttgagtcaagta

SEQ ID NO: 1460734 - DNA, 15 bp, Homo sapiens
gctcttgagtcaagt

SEQ ID NO: 1460735 - DNA, 15 bp, Homo sapiens
agctcttgagtcaag

SEQ ID NO: 1460736 - DNA, 15 bp, Homo sapiens
gagctcttgagtcaa

SEQ ID NO: 1460737 - DNA, 15 bp, Homo sapiens
tgagctcttgagtca

SEQ ID NO: 1460738 - DNA, 15 bp, Homo sapiens
ttgagctcttgagtc

SEQ ID NO: 1460739 - DNA, 15 bp, Homo sapiens
tttgagctcttgagt

SEQ ID NO: 1460740 - DNA, 15 bp, Homo sapiens
ttttgagctcttgag

SEQ ID NO: 1460741 - DNA, 15 bp, Homo sapiens
gttttgagctcttga

SEQ ID NO: 1460742 - DNA, 15 bp, Homo sapiens
agttttgagctcttg

SEQ ID NO: 1460743 - DNA, 15 bp, Homo sapiens
aagttttgagctctt

SEQ ID NO: 1460744 - DNA, 15 bp, Homo sapiens
aaagttttgagctct

SEQ ID NO: 1460745 - DNA, 15 bp, Homo sapiens
gaaagttttgagctc

SEQ ID NO: 1460746 - DNA, 15 bp, Homo sapiens
agaaagttttgagct

SEQ ID NO: 1460747 - DNA, 15 bp, Homo sapiens
cagaaagttttgagc

SEQ ID NO: 1460748 - DNA, 15 bp, Homo sapiens
acagaaagttttgag

SEQ ID NO: 1460749 - DNA, 15 bp, Homo sapiens
tacagaaagttttga

SEQ ID NO: 1460750 - DNA, 15 bp, Homo sapiens
ttacagaaagttttg

SEQ ID NO: 1460751 - DNA, 15 bp, Homo sapiens
attacagaaagtttt

SEQ ID NO: 1460752 - DNA, 15 bp, Homo sapiens
cattacagaaagttt

SEQ ID NO: 1460753 - DNA, 15 bp, Homo sapiens
ccattacagaaagtt

SEQ ID NO: 1460754 - DNA, 15 bp, Homo sapiens
cccattacagaaagt

SEQ ID NO: 1460755 - DNA, 15 bp, Homo sapiens
acccattacagaaag

SEQ ID NO: 1460756 - DNA, 15 bp, Homo sapiens
aacccattacagaaa

SEQ ID NO: 1460757 - DNA, 15 bp, Homo sapiens
aaacccattacagaa

SEQ ID NO: 1460758 - DNA, 15 bp, Homo sapiens
caaacccattacaga

SEQ ID NO: 1460759 - DNA, 15 bp, Homo sapiens
tcaaacccattacag

SEQ ID NO: 1460760 - DNA, 15 bp, Homo sapiens
ttcaaacccattaca

SEQ ID NO: 1460761 - DNA, 15 bp, Homo sapiens
cttcaaacccattac

SEQ ID NO: 1460762 - DNA, 15 bp, Homo sapiens
gcttcaaacccatta

SEQ ID NO: 1460763 - DNA, 15 bp, Homo sapiens
tgcttcaaacccatt

SEQ ID NO: 1460764 - DNA, 15 bp, Homo sapiens
gtgcttcaaacccat

SEQ ID NO: 1460765 - DNA, 15 bp, Homo sapiens
tgtgcttcaaaccca

SEQ ID NO: 1460766 - DNA, 15 bp, Homo sapiens
ttgtgcttcaaaccc

SEQ ID NO: 1460767 - DNA, 15 bp, Homo sapiens
tttgtgcttcaaacc

SEQ ID NO: 1460768 - DNA, 15 bp, Homo sapiens
ttttgtgcttcaaac

SEQ ID NO: 1460769 - DNA, 15 bp, Homo sapiens
tttttgtgcttcaaa

SEQ ID NO: 1460770 - DNA, 15 bp, Homo sapiens
atttttgtgcttcaa

SEQ ID NO: 1460771 - DNA, 15 bp, Homo sapiens
tatttttgtgcttca

SEQ ID NO: 1460772 - DNA, 15 bp, Homo sapiens
gtatttttgtgcttc

SEQ ID NO: 1460773 - DNA, 15 bp, Homo sapiens
tgtatttttgtgctt

SEQ ID NO: 1460774 - DNA, 15 bp, Homo sapiens
ctgtatttttgtgct

SEQ ID NO: 1460775 - DNA, 15 bp, Homo sapiens
actgtatttttgtgc

SEQ ID NO: 1460776 - DNA, 15 bp, Homo sapiens
cactgtatttttgtg

SEQ ID NO: 1460777 - DNA, 15 bp, Homo sapiens
acactgtatttttgt

SEQ ID NO: 1460778 - DNA, 15 bp, Homo sapiens
aacactgtatttttg

SEQ ID NO: 1460779 - DNA, 15 bp, Homo sapiens
aaacactgtattttt

SEQ ID NO: 1460780 - DNA, 15 bp, Homo sapiens
taaacactgtatttt

SEQ ID NO: 1460781 - DNA, 15 bp, Homo sapiens
ataaacactgtattt

SEQ ID NO: 1460782 - DNA, 15 bp, Homo sapiens
tataaacactgtatt

SEQ ID NO: 1460783 - DNA, 15 bp, Homo sapiens
ctataaacactgtat

SEQ ID NO: 1460784 - DNA, 15 bp, Homo sapiens
actataaacactgta

SEQ ID NO: 1460785 - DNA, 15 bp, Homo sapiens
gactataaacactgt

SEQ ID NO: 1460786 - DNA, 15 bp, Homo sapiens
tgactataaacactg

SEQ ID NO: 1460787 - DNA, 15 bp, Homo sapiens
ctgactataaacact

SEQ ID NO: 1460788 - DNA, 15 bp, Homo sapiens
tctgactataaacac

SEQ ID NO: 1460789 - DNA, 15 bp, Homo sapiens
ctctgactataaaca

SEQ ID NO: 1460790 - DNA, 15 bp, Homo sapiens
actctgactataaac

SEQ ID NO: 1460791 - DNA, 15 bp, Homo sapiens
cactctgactataaa

SEQ ID NO: 1460792 - DNA, 15 bp, Homo sapiens
gcactctgactataa

SEQ ID NO: 1460793 - DNA, 15 bp, Homo sapiens
tgcactctgactata

SEQ ID NO: 1460794 - DNA, 15 bp, Homo sapiens
ctgcactctgactat

SEQ ID NO: 1460795 - DNA, 15 bp, Homo sapiens
gctgcactctgacta

SEQ ID NO: 1460796 - DNA, 15 bp, Homo sapiens
ggctgcactctgact

SEQ ID NO: 1460797 - DNA, 15 bp, Homo sapiens
aggctgcactctgac

SEQ ID NO: 1460798 - DNA, 15 bp, Homo sapiens
aaggctgcactctga

SEQ ID NO: 1460799 - DNA, 15 bp, Homo sapiens
aaaggctgcactctg

SEQ ID NO: 1460800 - DNA, 15 bp, Homo sapiens
taaaggctgcactct

SEQ ID NO: 1460801 - DNA, 15 bp, Homo sapiens
gtaaaggctgcactc

SEQ ID NO: 1460802 - DNA, 15 bp, Homo sapiens
agtaaaggctgcact

SEQ ID NO: 1460803 - DNA, 15 bp, Homo sapiens
aagtaaaggctgcac

SEQ ID NO: 1460804 - DNA, 15 bp, Homo sapiens
aaagtaaaggctgca

SEQ ID NO: 1460805 - DNA, 15 bp, Homo sapiens
gaaagtaaaggctgc

SEQ ID NO: 1460806 - DNA, 15 bp, Homo sapiens
tgaaagtaaaggctg

SEQ ID NO: 1460807 - DNA, 15 bp, Homo sapiens
ttgaaagtaaaggct

SEQ ID NO: 1460808 - DNA, 15 bp, Homo sapiens
attgaaagtaaaggc

SEQ ID NO: 1460809 - DNA, 15 bp, Homo sapiens
tattgaaagtaaagg

SEQ ID NO: 1460810 - DNA, 15 bp, Homo sapiens
ttattgaaagtaaag

SEQ ID NO: 1460811 - DNA, 15 bp, Homo sapiens
attattgaaagtaaa

SEQ ID NO: 1460812 - DNA, 15 bp, Homo sapiens
cattattgaaagtaa

SEQ ID NO: 1460813 - DNA, 15 bp, Homo sapiens
ccattattgaaagta

SEQ ID NO: 1460814 - DNA, 15 bp, Homo sapiens
accattattgaaagt

SEQ ID NO: 1460815 - DNA, 15 bp, Homo sapiens
aaccattattgaaag

SEQ ID NO: 1460816 - DNA, 15 bp, Homo sapiens
taaccattattgaaa

SEQ ID NO: 1460817 - DNA, 15 bp, Homo sapiens
ataaccattattgaa

SEQ ID NO: 1460818 - DNA, 15 bp, Homo sapiens
cataaccattattga

SEQ ID NO: 1460819 - DNA, 15 bp, Homo sapiens
ccataaccattattg

SEQ ID NO: 1460820 - DNA, 15 bp, Homo sapiens
tccataaccattatt

SEQ ID NO: 1460821 - DNA, 15 bp, Homo sapiens
ttccataaccattat

SEQ ID NO: 1460822 - DNA, 15 bp, Homo sapiens
tttccataaccatta

SEQ ID NO: 1460823 - DNA, 15 bp, Homo sapiens
ctttccataaccatt

SEQ ID NO: 1460824 - DNA, 15 bp, Homo sapiens
gctttccataaccat

SEQ ID NO: 1460825 - DNA, 15 bp, Homo sapiens
tgctttccataacca

SEQ ID NO: 1460826 - DNA, 15 bp, Homo sapiens
ttgctttccataacc

SEQ ID NO: 1460827 - DNA, 15 bp, Homo sapiens
cttgctttccataac

SEQ ID NO: 1460828 - DNA, 15 bp, Homo sapiens
acttgctttccataa

SEQ ID NO: 1460829 - DNA, 15 bp, Homo sapiens
aacttgctttccata

SEQ ID NO: 1460830 - DNA, 15 bp, Homo sapiens
aaacttgctttccat

SEQ ID NO: 1460831 - DNA, 15 bp, Homo sapiens
caaacttgctttcca

SEQ ID NO: 1460832 - DNA, 15 bp, Homo sapiens
ccaaacttgctttcc

SEQ ID NO: 1460833 - DNA, 15 bp, Homo sapiens
gccaaacttgctttc

SEQ ID NO: 1460834 - DNA, 15 bp, Homo sapiens
agccaaacttgcttt

SEQ ID NO: 1460835 - DNA, 15 bp, Homo sapiens
aagccaaacttgctt

SEQ ID NO: 1460836 - DNA, 15 bp, Homo sapiens
aaagccaaacttgct

SEQ ID NO: 1460837 - DNA, 15 bp, Homo sapiens
taaagccaaacttgc

SEQ ID NO: 1460838 - DNA, 15 bp, Homo sapiens
ctaaagccaaacttg

SEQ ID NO: 1460839 - DNA, 15 bp, Homo sapiens
cctaaagccaaactt

SEQ ID NO: 1460840 - DNA, 15 bp, Homo sapiens
acctaaagccaaact

SEQ ID NO: 1460841 - DNA, 15 bp, Homo sapiens
aacctaaagccaaac

SEQ ID NO: 1460842 - DNA, 15 bp, Homo sapiens
caacctaaagccaaa

SEQ ID NO: 1460843 - DNA, 15 bp, Homo sapiens
acaacctaaagccaa

SEQ ID NO: 1460844 - DNA, 15 bp, Homo sapiens
tacaacctaaagcca

SEQ ID NO: 1460845 - DNA, 15 bp, Homo sapiens
ttacaacctaaagcc

SEQ ID NO: 1460846 - DNA, 15 bp, Homo sapiens
tttacaacctaaagc

SEQ ID NO: 1460847 - DNA, 15 bp, Homo sapiens
ctttacaacctaaag

SEQ ID NO: 1460848 - DNA, 15 bp, Homo sapiens
tctttacaacctaaa

SEQ ID NO: 1460849 - DNA, 15 bp, Homo sapiens
ctctttacaacctaa

SEQ ID NO: 1460850 - DNA, 15 bp, Homo sapiens
actctttacaaccta

SEQ ID NO: 1460851 - DNA, 15 bp, Homo sapiens
aactctttacaacct

SEQ ID NO: 1460852 - DNA, 15 bp, Homo sapiens
aaactctttacaacc

SEQ ID NO: 1460853 - DNA, 15 bp, Homo sapiens
aaaactctttacaac

SEQ ID NO: 1460854 - DNA, 15 bp, Homo sapiens
gaaaaactctttaca

SEQ ID NO: 1460855 - DNA, 15 bp, Homo sapiens
tgaaaaactctttac

SEQ ID NO: 1460856 - DNA, 15 bp, Homo sapiens
ctgaaaaactcttta

SEQ ID NO: 1460857 - DNA, 15 bp, Homo sapiens
actgaaaaactcttt

SEQ ID NO: 1460858 - DNA, 15 bp, Homo sapiens
cactgaaaaactctt

SEQ ID NO: 1460859 - DNA, 15 bp, Homo sapiens
gcactgaaaaactct

SEQ ID NO: 1460860 - DNA, 15 bp, Homo sapiens
ggcactgaaaaactc

SEQ ID NO: 1460861 - DNA, 15 bp, Homo sapiens
tggcactgaaaaact

SEQ ID NO: 1460862 - DNA, 15 bp, Homo sapiens
ttggcactgaaaaac

SEQ ID NO: 1460863 - DNA, 15 bp, Homo sapiens
cttggcactgaaaaa

SEQ ID NO: 1460864 - DNA, 15 bp, Homo sapiens
ccttggcactgaaaa

SEQ ID NO: 1460865 - DNA, 15 bp, Homo sapiens
gccttggcactgaaa

SEQ ID NO: 1460866 - DNA, 15 bp, Homo sapiens
tgccttggcactgaa

SEQ ID NO: 1460867 - DNA, 15 bp, Homo sapiens
atgccttggcactga

SEQ ID NO: 1460868 - DNA, 15 bp, Homo sapiens
aatgccttggcactg

SEQ ID NO: 1460869 - DNA, 15 bp, Homo sapiens
aaatgccttggcact

SEQ ID NO: 1460870 - DNA, 15 bp, Homo sapiens
caaatgccttggcac

SEQ ID NO: 1460871 - DNA, 15 bp, Homo sapiens
tcaaatgccttggca

SEQ ID NO: 1460872 - DNA, 15 bp, Homo sapiens
gtcaaatgccttggc

SEQ ID NO: 1460873 - DNA, 15 bp, Homo sapiens
agtcaaatgccttgg

SEQ ID NO: 1460874 - DNA, 15 bp, Homo sapiens
cagtcaaatgccttg

SEQ ID NO: 1460875 - DNA, 15 bp, Homo sapiens
gcagtcaaatgcctt

SEQ ID NO: 1460876 - DNA, 15 bp, Homo sapiens
ggcagtcaaatgcct

SEQ ID NO: 1460877 - DNA, 15 bp, Homo sapiens
gggcagtcaaatgcc

SEQ ID NO: 1460878 - DNA, 15 bp, Homo sapiens
agggcagtcaaatgc

SEQ ID NO: 1460879 - DNA, 15 bp, Homo sapiens
aagggcagtcaaatg

SEQ ID NO: 1460880 - DNA, 15 bp, Homo sapiens
aaagggcagtcaaat

SEQ ID NO: 1460881 - DNA, 15 bp, Homo sapiens
gaaagggcagtcaaa

SEQ ID NO: 1460882 - DNA, 15 bp, Homo sapiens
agaaagggcagtcaa

SEQ ID NO: 1460883 - DNA, 15 bp, Homo sapiens
aagaaagggcagtca

SEQ ID NO: 1460884 - DNA, 15 bp, Homo sapiens
aaagaaagggcagtc

SEQ ID NO: 1460885 - DNA, 15 bp, Homo sapiens
gaaagaaagggcagt

SEQ ID NO: 1460886 - DNA, 15 bp, Homo sapiens
agaaagaaagggcag

SEQ ID NO: 1460887 - DNA, 15 bp, Homo sapiens
aagaaagaaagggca

SEQ ID NO: 1460888 - DNA, 15 bp, Homo sapiens
taagaaagaaagggc

SEQ ID NO: 1460889 - DNA, 15 bp, Homo sapiens
ataagaaagaaaggg

SEQ ID NO: 1460890 - DNA, 15 bp, Homo sapiens
aataagaaagaaagg

SEQ ID NO: 1460891 - DNA, 15 bp, Homo sapiens
gaataagaaagaaag

SEQ ID NO: 1460892 - DNA, 15 bp, Homo sapiens
agaataagaaagaaa

SEQ ID NO: 1460893 - DNA, 15 bp, Homo sapiens
gagaataagaaagaa

SEQ ID NO: 1460894 - DNA, 15 bp, Homo sapiens
ggagaataagaaaga

SEQ ID NO: 1460895 - DNA, 15 bp, Homo sapiens
tggagaataagaaag

SEQ ID NO: 1460896 - DNA, 15 bp, Homo sapiens
atggagaataagaaa

SEQ ID NO: 1460897 - DNA, 15 bp, Homo sapiens
aatggagaataagaa

SEQ ID NO: 1460898 - DNA, 15 bp, Homo sapiens
caatggagaataaga

SEQ ID NO: 1460899 - DNA, 15 bp, Homo sapiens
acaatggagaataag

SEQ ID NO: 1460900 - DNA, 15 bp, Homo sapiens
gacaatggagaataa

SEQ ID NO: 1460901 - DNA, 15 bp, Homo sapiens
agacaatggagaata

SEQ ID NO: 1460902 - DNA, 15 bp, Homo sapiens
aagacaatggagaat

SEQ ID NO: 1460903 - DNA, 15 bp, Homo sapiens
caagacaatggagaa

SEQ ID NO: 1460904 - DNA, 15 bp, Homo sapiens
gcaagacaatggaga

SEQ ID NO: 1460905 - DNA, 15 bp, Homo sapiens
tgcaagacaatggag

SEQ ID NO: 1460906 - DNA, 15 bp, Homo sapiens
ctgcaagacaatgga

SEQ ID NO: 1460907 - DNA, 15 bp, Homo sapiens
tctgcaagacaatgg

SEQ ID NO: 1460908 - DNA, 15 bp, Homo sapiens
gtctgcaagacaatg

SEQ ID NO: 1460909 - DNA, 15 bp, Homo sapiens
ggtctgcaagacaat

SEQ ID NO: 1460910 - DNA, 15 bp, Homo sapiens
tggtctgcaagacaa

SEQ ID NO: 1460911 - DNA, 15 bp, Homo sapiens
ctggtctgcaagaca

SEQ ID NO: 1460912 - DNA, 15 bp, Homo sapiens
tctggtctgcaagac

SEQ ID NO: 1460913 - DNA, 15 bp, Homo sapiens
atctggtctgcaaga

SEQ ID NO: 1460914 - DNA, 15 bp, Homo sapiens
catctggtctgcaag

SEQ ID NO: 1460915 - DNA, 15 bp, Homo sapiens
tcatctggtctgcaa

SEQ ID NO: 1460916 - DNA, 15 bp, Homo sapiens
atcatctggtctgca

SEQ ID NO: 1460917 - DNA, 15 bp, Homo sapiens
catcatctggtctgc

SEQ ID NO: 1460918 - DNA, 15 bp, Homo sapiens
acatcatctggtctg

SEQ ID NO: 1460919 - DNA, 15 bp, Homo sapiens
cacatcatctggtct

SEQ ID NO: 1460920 - DNA, 15 bp, Homo sapiens
gcacatcatctggtc

SEQ ID NO: 1460921 - DNA, 15 bp, Homo sapiens
agcacatcatctggt

SEQ ID NO: 1460922 - DNA, 15 bp, Homo sapiens
aagcacatcatctgg

SEQ ID NO: 1460923 - DNA, 15 bp, Homo sapiens
gaagcacatcatctg

SEQ ID NO: 1460924 - DNA, 15 bp, Homo sapiens
agaagcacatcatct

SEQ ID NO: 1460925 - DNA, 15 bp, Homo sapiens
cagaagcacatcatc

SEQ ID NO: 1460926 - DNA, 15 bp, Homo sapiens
gcagaagcacatcat

SEQ ID NO: 1460927 - DNA, 15 bp, Homo sapiens
tgcagaagcacatca

SEQ ID NO: 1460928 - DNA, 15 bp, Homo sapiens
atgcagaagcacatc

SEQ ID NO: 1460929 - DNA, 15 bp, Homo sapiens
gatgcagaagcacat

SEQ ID NO: 1460930 - DNA, 15 bp, Homo sapiens
cgatgcagaagcaca

SEQ ID NO: 1460931 - DNA, 15 bp, Homo sapiens
gcgatgcagaagcac

SEQ ID NO: 1460932 - DNA, 15 bp, Homo sapiens
tgcgatgcagaagca

SEQ ID NO: 1460933 - DNA, 15 bp, Homo sapiens
gtgcgatgcagaagc

SEQ ID NO: 1460934 - DNA, 15 bp, Homo sapiens
agtgcgatgcagaag

SEQ ID NO: 1460935 - DNA, 15 bp, Homo sapiens
gagtgcgatgcagaa

SEQ ID NO: 1460936 - DNA, 15 bp, Homo sapiens
tgagtgcgatgcaga

SEQ ID NO: 1460937 - DNA, 15 bp, Homo sapiens
atgagtgcgatgcag

SEQ ID NO: 1460938 - DNA, 15 bp, Homo sapiens
catgagtgcgatgca

SEQ ID NO: 1460939 - DNA, 15 bp, Homo sapiens
tcatgagtgcgatgc

SEQ ID NO: 1460940 - DNA, 15 bp, Homo sapiens
atcatgagtgcgatg

SEQ ID NO: 1460941 - DNA, 15 bp, Homo sapiens
catcatgagtgcgat

SEQ ID NO: 1460942 - DNA, 15 bp, Homo sapiens
tcatcatgagtgcga

SEQ ID NO: 1460943 - DNA, 15 bp, Homo sapiens
ctcatcatgagtgcg

SEQ ID NO: 1460944 - DNA, 15 bp, Homo sapiens
tctcatcatgagtgc

SEQ ID NO: 1460945 - DNA, 15 bp, Homo sapiens
atctcatcatgagtg

SEQ ID NO: 1460946 - DNA, 15 bp, Homo sapiens
aatctcatcatgagt

SEQ ID NO: 1460947 - DNA, 15 bp, Homo sapiens
caatctcatcatgag

SEQ ID NO: 1460948 - DNA, 15 bp, Homo sapiens
acaatctcatcatga

SEQ ID NO: 1460949 - DNA, 15 bp, Homo sapiens
gacaatctcatcatg

SEQ ID NO: 1460950 - DNA, 15 bp, Homo sapiens
ggacaatctcatcat

SEQ ID NO: 1460951 - DNA, 15 bp, Homo sapiens
aggacaatctcatca

SEQ ID NO: 1460952 - DNA, 15 bp, Homo sapiens
gaggacaatctcatc

SEQ ID NO: 1460953 - DNA, 15 bp, Homo sapiens
ggaggacaatctcat

SEQ ID NO: 1460954 - DNA, 15 bp, Homo sapiens
aggaggacaatctca

SEQ ID NO: 1460955 - DNA, 15 bp, Homo sapiens
caggaggacaatctc

SEQ ID NO: 1460956 - DNA, 15 bp, Homo sapiens
gcaggaggacaatct

SEQ ID NO: 1460957 - DNA, 15 bp, Homo sapiens
tgcaggaggacaatc

SEQ ID NO: 1460958 - DNA, 15 bp, Homo sapiens
atgcaggaggacaat

SEQ ID NO: 1460959 - DNA, 15 bp, Homo sapiens
aatgcaggaggacaa

SEQ ID NO: 1460960 - DNA, 15 bp, Homo sapiens
caatgcaggaggaca

SEQ ID NO: 1460961 - DNA, 15 bp, Homo sapiens
gcaatgcaggaggac

SEQ ID NO: 1460962 - DNA, 15 bp, Homo sapiens
agcaatgcaggagga

SEQ ID NO: 1460963 - DNA, 15 bp, Homo sapiens
aagcaatgcaggagg

SEQ ID NO: 1460964 - DNA, 15 bp, Homo sapiens
gaagcaatgcaggag

SEQ ID NO: 1460965 - DNA, 15 bp, Homo sapiens
ggaagcaatgcagga

SEQ ID NO: 1460966 - DNA, 15 bp, Homo sapiens
aggaagcaatgcagg

SEQ ID NO: 1460967 - DNA, 15 bp, Homo sapiens
gaggaagcaatgcag

SEQ ID NO: 1460968 - DNA, 15 bp, Homo sapiens
agaggaagcaatgca

SEQ ID NO: 1460969 - DNA, 15 bp, Homo sapiens
cagaggaagcaatgc

SEQ ID NO: 1460970 - DNA, 15 bp, Homo sapiens
ccagaggaagcaatg

SEQ ID NO: 1460971 - DNA, 15 bp, Homo sapiens
gccagaggaagcaat

SEQ ID NO: 1460972 - DNA, 15 bp, Homo sapiens
ggccagaggaagcaa

SEQ ID NO: 1460973 - DNA, 15 bp, Homo sapiens
gggccagaggaagca

SEQ ID NO: 1460974 - DNA, 15 bp, Homo sapiens
ggggccagaggaagc

SEQ ID NO: 1460975 - DNA, 15 bp, Homo sapiens
aggggccagaggaag

SEQ ID NO: 1460976 - DNA, 15 bp, Homo sapiens
ccaggggccagagga

SEQ ID NO: 1460977 - DNA, 15 bp, Homo sapiens
accaggggccagagg

SEQ ID NO: 1460978 - DNA, 15 bp, Homo sapiens
caccaggggccagag

SEQ ID NO: 1460979 - DNA, 15 bp, Homo sapiens
tcaccaggggccaga

SEQ ID NO: 1460980 - DNA, 15 bp, Homo sapiens
gtcaccaggggccag

SEQ ID NO: 1460981 - DNA, 15 bp, Homo sapiens
tgtcaccaggggcca

SEQ ID NO: 1460982 - DNA, 15 bp, Homo sapiens
atgtcaccaggggcc

SEQ ID NO: 1460983 - DNA, 15 bp, Homo sapiens
aatgtcaccaggggc

SEQ ID NO: 1460984 - DNA, 15 bp, Homo sapiens
aaatgtcaccagggg

SEQ ID NO: 1460985 - DNA, 15 bp, Homo sapiens
caaatgtcaccaggg

SEQ ID NO: 1460986 - DNA, 15 bp, Homo sapiens
acaaatgtcaccagg

SEQ ID NO: 1460987 - DNA, 15 bp, Homo sapiens
cacaaatgtcaccag

SEQ ID NO: 1460988 - DNA, 15 bp, Homo sapiens
ccacaaatgtcacca

SEQ ID NO: 1460989 - DNA, 15 bp, Homo sapiens
accacaaatgtcacc

SEQ ID NO: 1460990 - DNA, 15 bp, Homo sapiens
caccacaaatgtcac

SEQ ID NO: 1460991 - DNA, 15 bp, Homo sapiens
ccaccacaaatgtca

SEQ ID NO: 1460992 - DNA, 15 bp, Homo sapiens
cccaccacaaatgtc

SEQ ID NO: 1460993 - DNA, 15 bp, Homo sapiens
gcccaccacaaatgt

SEQ ID NO: 1460994 - DNA, 15 bp, Homo sapiens
cgcccaccacaaatg

SEQ ID NO: 1460995 - DNA, 15 bp, Homo sapiens
acgcccaccacaaat

SEQ ID NO: 1460996 - DNA, 15 bp, Homo sapiens
aacgcccaccacaaa

SEQ ID NO: 1460997 - DNA, 15 bp, Homo sapiens
gaacgcccaccacaa

SEQ ID NO: 1460998 - DNA, 15 bp, Homo sapiens
agaacgcccaccaca

SEQ ID NO: 1460999 - DNA, 15 bp, Homo sapiens
gagaacgcccaccac

SEQ ID NO: 1461000 - DNA, 15 bp, Homo sapiens
tgagaacgcccacca

SEQ ID NO: 1461001 - DNA, 15 bp, Homo sapiens
atgagaacgcccacc

SEQ ID NO: 1461002 - DNA, 15 bp, Homo sapiens
aatgagaacgcccac

SEQ ID NO: 1461003 - DNA, 15 bp, Homo sapiens
caatgagaacgccca

SEQ ID NO: 1461004 - DNA, 15 bp, Homo sapiens
acaatgagaacgccc

SEQ ID NO: 1461005 - DNA, 15 bp, Homo sapiens
cacaatgagaacgcc

SEQ ID NO: 1461006 - DNA, 15 bp, Homo sapiens
ccacaatgagaacgc

SEQ ID NO: 1461007 - DNA, 15 bp, Homo sapiens
accacaatgagaacg

SEQ ID NO: 1461008 - DNA, 15 bp, Homo sapiens
gaccacaatgagaac

SEQ ID NO: 1461009 - DNA, 15 bp, Homo sapiens
ggaccacaatgagaa

SEQ ID NO: 1461010 - DNA, 15 bp, Homo sapiens
aggaccacaatgaga

SEQ ID NO: 1461011 - DNA, 15 bp, Homo sapiens
caggaccacaatgag

SEQ ID NO: 1461012 - DNA, 15 bp, Homo sapiens
tcaggaccacaatga

SEQ ID NO: 1461013 - DNA, 15 bp, Homo sapiens
gtcaggaccacaatg

SEQ ID NO: 1461014 - DNA, 15 bp, Homo sapiens
ggtcaggaccacaat

SEQ ID NO: 1461015 - DNA, 15 bp, Homo sapiens
tggtcaggaccacaa

SEQ ID NO: 1461016 - DNA, 15 bp, Homo sapiens
atggtcaggaccaca

SEQ ID NO: 1461017 - DNA, 15 bp, Homo sapiens
gatggtcaggaccac

SEQ ID NO: 1461018 - DNA, 15 bp, Homo sapiens
agatggtcaggacca

SEQ ID NO: 1461019 - DNA, 15 bp, Homo sapiens
cagatggtcaggacc

SEQ ID NO: 1461020 - DNA, 15 bp, Homo sapiens
acagatggtcaggac

SEQ ID NO: 1461021 - DNA, 15 bp, Homo sapiens
cacagatggtcagga

SEQ ID NO: 1461022 - DNA, 15 bp, Homo sapiens
gcacagatggtcagg

SEQ ID NO: 1461023 - DNA, 15 bp, Homo sapiens
ggcacagatggtcag

SEQ ID NO: 1461024 - DNA, 15 bp, Homo sapiens
tggcacagatggtca

SEQ ID NO: 1461025 - DNA, 15 bp, Homo sapiens
ttggcacagatggtc

SEQ ID NO: 1461026 - DNA, 15 bp, Homo sapiens
cttggcacagatggt

SEQ ID NO: 1461027 - DNA, 15 bp, Homo sapiens
tcttggcacagatgg

SEQ ID NO: 1461028 - DNA, 15 bp, Homo sapiens
ctcttggcacagatg

SEQ ID NO: 1461029 - DNA, 15 bp, Homo sapiens
gctcttggcacagat

SEQ ID NO: 1461030 - DNA, 15 bp, Homo sapiens
agctcttggcacaga

SEQ ID NO: 1461031 - DNA, 15 bp, Homo sapiens
aagctcttggcacag

SEQ ID NO: 1461032 - DNA, 15 bp, Homo sapiens
caagctcttggcaca

SEQ ID NO: 1461033 - DNA, 15 bp, Homo sapiens
ccaagctcttggcac

SEQ ID NO: 1461034 - DNA, 15 bp, Homo sapiens
gccaagctcttggca

SEQ ID NO: 1461035 - DNA, 15 bp, Homo sapiens
cgccaagctcttggc

SEQ ID NO: 1461036 - DNA, 15 bp, Homo sapiens
ccgccaagctcttgg

SEQ ID NO: 1461037 - DNA, 15 bp, Homo sapiens
accgccaagctcttg

SEQ ID NO: 1461038 - DNA, 15 bp, Homo sapiens
gaccgccaagctctt

SEQ ID NO: 1461039 - DNA, 15 bp, Homo sapiens
tgaccgccaagctct

SEQ ID NO: 1461040 - DNA, 15 bp, Homo sapiens
ttgaccgccaagctc

SEQ ID NO: 1461041 - DNA, 15 bp, Homo sapiens
cttgaccgccaagct

SEQ ID NO: 1461042 - DNA, 15 bp, Homo sapiens
ccttgaccgccaagc

SEQ ID NO: 1461043 - DNA, 15 bp, Homo sapiens
gccttgaccgccaag

SEQ ID NO: 1461044 - DNA, 15 bp, Homo sapiens
cgccttgaccgccaa

SEQ ID NO: 1461045 - DNA, 15 bp, Homo sapiens
ccgccttgaccgcca

SEQ ID NO: 1461046 - DNA, 15 bp, Homo sapiens
tccgccttgaccgcc

SEQ ID NO: 1461047 - DNA, 15 bp, Homo sapiens
ttccgccttgaccgc

SEQ ID NO: 1461048 - DNA, 15 bp, Homo sapiens
cttccgccttgaccg

SEQ ID NO: 1461049 - DNA, 15 bp, Homo sapiens
gcttccgccttgacc

SEQ ID NO: 1461050 - DNA, 15 bp, Homo sapiens
ggcttccgccttgac

SEQ ID NO: 1461051 - DNA, 15 bp, Homo sapiens
tggcttccgccttga

SEQ ID NO: 1461052 - DNA, 15 bp, Homo sapiens
atggcttccgccttg

SEQ ID NO: 1461053 - DNA, 15 bp, Homo sapiens
catggcttccgcctt

SEQ ID NO: 1461054 - DNA, 15 bp, Homo sapiens
tcatggcttccgcct

SEQ ID NO: 1461055 - DNA, 15 bp, Homo sapiens
ttcatggcttccgcc

SEQ ID NO: 1461056 - DNA, 15 bp, Homo sapiens
cttcatggcttccgc

SEQ ID NO: 1461057 - DNA, 15 bp, Homo sapiens
tcttcatggcttccg

SEQ ID NO: 1461058 - DNA, 15 bp, Homo sapiens
ttcttcatggcttcc

SEQ ID NO: 1461059 - DNA, 15 bp, Homo sapiens
cttcttcatggcttc

SEQ ID NO: 1461060 - DNA, 15 bp, Homo sapiens
gcttcttcatggctt

SEQ ID NO: 1461061 - DNA, 15 bp, Homo sapiens
cgcttcttcatggct

SEQ ID NO: 1461062 - DNA, 15 bp, Homo sapiens
gcgcttcttcatggc

SEQ ID NO: 1461063 - DNA, 15 bp, Homo sapiens
tgcgcttcttcatgg

SEQ ID NO: 1461064 - DNA, 15 bp, Homo sapiens
ttgcgcttcttcatg

SEQ ID NO: 1461065 - DNA, 15 bp, Homo sapiens
cttgcgcttcttcat

SEQ ID NO: 1461066 - DNA, 15 bp, Homo sapiens
acttgcgcttcttca

SEQ ID NO: 1461067 - DNA, 15 bp, Homo sapiens
aacttgcgcttcttc

SEQ ID NO: 1461068 - DNA, 15 bp, Homo sapiens
gaacttgcgcttctt

SEQ ID NO: 1461069 - DNA, 15 bp, Homo sapiens
agaacttgcgcttct

SEQ ID NO: 1461070 - DNA, 15 bp, Homo sapiens
gagaacttgcgcttc

SEQ ID NO: 1461071 - DNA, 15 bp, Homo sapiens
agagaacttgcgctt

SEQ ID NO: 1461072 - DNA, 15 bp, Homo sapiens
aagagaacttgcgct

SEQ ID NO: 1461073 - DNA, 15 bp, Homo sapiens
taagagaacttgcgc

SEQ ID NO: 1461074 - DNA, 15 bp, Homo sapiens
ttaagagaacttgcg

SEQ ID NO: 1461075 - DNA, 15 bp, Homo sapiens
tttaagagaacttgc

SEQ ID NO: 1461076 - DNA, 15 bp, Homo sapiens
ctttaagagaacttg

SEQ ID NO: 1461077 - DNA, 15 bp, Homo sapiens
cctttaagagaactt

SEQ ID NO: 1461078 - DNA, 15 bp, Homo sapiens
ccctttaagagaact

SEQ ID NO: 1461079 - DNA, 15 bp, Homo sapiens
cccctttaagagaac

SEQ ID NO: 1461080 - DNA, 15 bp, Homo sapiens
tcccctttaagagaa

SEQ ID NO: 1461081 - DNA, 15 bp, Homo sapiens
ttcccctttaagaga

SEQ ID NO: 1461082 - DNA, 15 bp, Homo sapiens
cttcccctttaagag

SEQ ID NO: 1461083 - DNA, 15 bp, Homo sapiens
ccttcccctttaaga

SEQ ID NO: 1461084 - DNA, 15 bp, Homo sapiens
tccttcccctttaag

SEQ ID NO: 1461085 - DNA, 15 bp, Homo sapiens
ctccttcccctttaa

SEQ ID NO: 1461086 - DNA, 15 bp, Homo sapiens
cctccttccccttta

SEQ ID NO: 1461087 - DNA, 15 bp, Homo sapiens
gcctccttccccttt

SEQ ID NO: 1461088 - DNA, 15 bp, Homo sapiens
agcctccttcccctt

SEQ ID NO: 1461089 - DNA, 15 bp, Homo sapiens
aagcctccttcccct

SEQ ID NO: 1461090 - DNA, 15 bp, Homo sapiens
caagcctccttcccc

SEQ ID NO: 1461091 - DNA, 15 bp, Homo sapiens
acaagcctccttccc

SEQ ID NO: 1461092 - DNA, 15 bp, Homo sapiens
tacaagcctccttcc

SEQ ID NO: 1461093 - DNA, 15 bp, Homo sapiens
ctacaagcctccttc

SEQ ID NO: 1461094 - DNA, 15 bp, Homo sapiens
tctacaagcctcctt

SEQ ID NO: 1461095 - DNA, 15 bp, Homo sapiens
ttctacaagcctcct

SEQ ID NO: 1461096 - DNA, 15 bp, Homo sapiens
tttctacaagcctcc

SEQ ID NO: 1461097 - DNA, 15 bp, Homo sapiens
ctttctacaagcctc

SEQ ID NO: 1461098 - DNA, 15 bp, Homo sapiens
gctttctacaagcct

SEQ ID NO: 1461099 - DNA, 15 bp, Homo sapiens
tgctttctacaagcc

SEQ ID NO: 1461100 - DNA, 15 bp, Homo sapiens
ttgctttctacaagc

SEQ ID NO: 1461101 - DNA, 15 bp, Homo sapiens
tttgctttctacaag

SEQ ID NO: 1461102 - DNA, 15 bp, Homo sapiens
ctttgctttctacaa

SEQ ID NO: 1461103 - DNA, 15 bp, Homo sapiens
actttgctttctaca

SEQ ID NO: 1461104 - DNA, 15 bp, Homo sapiens
tactttgctttctac

SEQ ID NO: 1461105 - DNA, 15 bp, Homo sapiens
gtactttgctttcta

SEQ ID NO: 1461106 - DNA, 15 bp, Homo sapiens
tgtactttgctttct

SEQ ID NO: 1461107 - DNA, 15 bp, Homo sapiens
ctgtactttgctttc

SEQ ID NO: 1461108 - DNA, 15 bp, Homo sapiens
tctgtactttgcttt

SEQ ID NO: 1461109 - DNA, 15 bp, Homo sapiens
ttctgtactttgctt

SEQ ID NO: 1461110 - DNA, 15 bp, Homo sapiens
cttctgtactttgct

SEQ ID NO: 1461111 - DNA, 15 bp, Homo sapiens
gcttctgtactttgc

SEQ ID NO: 1461112 - DNA, 15 bp, Homo sapiens
agcttctgtactttg

SEQ ID NO: 1461113 - DNA, 15 bp, Homo sapiens
cagcttctgtacttt

SEQ ID NO: 1461114 - DNA, 15 bp, Homo sapiens
acagcttctgtactt

SEQ ID NO: 1461115 - DNA, 15 bp, Homo sapiens
tacagcttctgtact

SEQ ID NO: 1461116 - DNA, 15 bp, Homo sapiens
gtacagcttctgtac

SEQ ID NO: 1461117 - DNA, 15 bp, Homo sapiens
agtacagcttctgta

SEQ ID NO: 1461118 - DNA, 15 bp, Homo sapiens
gagtacagcttctgt

SEQ ID NO: 1461119 - DNA, 15 bp, Homo sapiens
tgagtacagcttctg

SEQ ID NO: 1461120 - DNA, 15 bp, Homo sapiens
atgagtacagcttct

SEQ ID NO: 1461121 - DNA, 15 bp, Homo sapiens
gatgagtacagcttc

SEQ ID NO: 1461122 - DNA, 15 bp, Homo sapiens
cgatgagtacagctt

SEQ ID NO: 1461123 - DNA, 15 bp, Homo sapiens
ccgatgagtacagct

SEQ ID NO: 1461124 - DNA, 15 bp, Homo sapiens
gccgatgagtacagc

SEQ ID NO: 1461125 - DNA, 15 bp, Homo sapiens
tgccgatgagtacag

SEQ ID NO: 1461126 - DNA, 15 bp, Homo sapiens
gtgccgatgagtaca

SEQ ID NO: 1461127 - DNA, 15 bp, Homo sapiens
cgtgccgatgagtac

SEQ ID NO: 1461128 - DNA, 15 bp, Homo sapiens
gcgtgccgatgagta

SEQ ID NO: 1461129 - DNA, 15 bp, Homo sapiens
cgcgtgccgatgagt

SEQ ID NO: 1461130 - DNA, 15 bp, Homo sapiens
acgcgtgccgatgag

SEQ ID NO: 1461131 - DNA, 15 bp, Homo sapiens
gacgcgtgccgatga

SEQ ID NO: 1461132 - DNA, 15 bp, Homo sapiens
ggacgcgtgccgatg

SEQ ID NO: 1461133 - DNA, 15 bp, Homo sapiens
tggacgcgtgccgat

SEQ ID NO: 1461134 - DNA, 15 bp, Homo sapiens
gtggacgcgtgccga

SEQ ID NO: 1461135 - DNA, 15 bp, Homo sapiens
ggtggacgcgtgccg

SEQ ID NO: 1461136 - DNA, 15 bp, Homo sapiens
aggtggacgcgtgcc

SEQ ID NO: 1461137 - DNA, 15 bp, Homo sapiens
caggtggacgcgtgc

SEQ ID NO: 1461138 - DNA, 15 bp, Homo sapiens
gcaggtggacgcgtg

SEQ ID NO: 1461139 - DNA, 15 bp, Homo sapiens
cgcaggtggacgcgt

SEQ ID NO: 1461140 - DNA, 15 bp, Homo sapiens
ccgcaggtggacgcg

SEQ ID NO: 1461141 - DNA, 15 bp, Homo sapiens
tccgcaggtggacgc

SEQ ID NO: 1461142 - DNA, 15 bp, Homo sapiens
ttccgcaggtggacg

SEQ ID NO: 1461143 - DNA, 15 bp, Homo sapiens
gttccgcaggtggac

SEQ ID NO: 1461144 - DNA, 15 bp, Homo sapiens
ggttccgcaggtgga

SEQ ID NO: 1461145 - DNA, 15 bp, Homo sapiens
aggttccgcaggtgg

SEQ ID NO: 1461146 - DNA, 15 bp, Homo sapiens
caggttccgcaggtg

SEQ ID NO: 1461147 - DNA, 15 bp, Homo sapiens
acaggttccgcaggt

SEQ ID NO: 1461148 - DNA, 15 bp, Homo sapiens
cacaggttccgcagg

SEQ ID NO: 1461149 - DNA, 15 bp, Homo sapiens
acacaggttccgcag

SEQ ID NO: 1461150 - DNA, 15 bp, Homo sapiens
aacacaggttccgca

SEQ ID NO: 1461151 - DNA, 15 bp, Homo sapiens
aaacacaggttccgc

SEQ ID NO: 1461152 - DNA, 15 bp, Homo sapiens
gaaacacaggttccg

SEQ ID NO: 1461153 - DNA, 15 bp, Homo sapiens
ggaaacacaggttcc

SEQ ID NO: 1461154 - DNA, 15 bp, Homo sapiens
aggaaacacaggttc

SEQ ID NO: 1461155 - DNA, 15 bp, Homo sapiens
caggaaacacaggtt

SEQ ID NO: 1461156 - DNA, 15 bp, Homo sapiens
ccaggaaacacaggt

SEQ ID NO: 1461157 - DNA, 15 bp, Homo sapiens
gccaggaaacacagg

SEQ ID NO: 1461158 - DNA, 15 bp, Homo sapiens
cgccaggaaacacag

SEQ ID NO: 1461159 - DNA, 15 bp, Homo sapiens
gcgccaggaaacaca

SEQ ID NO: 1461160 - DNA, 15 bp, Homo sapiens
tgcgccaggaaacac

SEQ ID NO: 1461161 - DNA, 15 bp, Homo sapiens
ctgcgccaggaaaca

SEQ ID NO: 1461162 - DNA, 15 bp, Homo sapiens
cctgcgccaggaaac

SEQ ID NO: 1461163 - DNA, 15 bp, Homo sapiens
tcctgcgccaggaaa

SEQ ID NO: 1461164 - DNA, 15 bp, Homo sapiens
ctcctgcgccaggaa

SEQ ID NO: 1461165 - DNA, 15 bp, Homo sapiens
tctcctgcgccagga

SEQ ID NO: 1461166 - DNA, 15 bp, Homo sapiens
atctcctgcgccagg

SEQ ID NO: 1461167 - DNA, 15 bp, Homo sapiens
catctcctgcgccag

SEQ ID NO: 1461168 - DNA, 15 bp, Homo sapiens
ccatctcctgcgcca

SEQ ID NO: 1461169 - DNA, 15 bp, Homo sapiens
tccatctcctgcgcc

SEQ ID NO: 1461170 - DNA, 15 bp, Homo sapiens
gtccatctcctgcgc

SEQ ID NO: 1461171 - DNA, 15 bp, Homo sapiens
tgtccatctcctgcg

SEQ ID NO: 1461172 - DNA, 15 bp, Homo sapiens
ctgtccatctcctgc

SEQ ID NO: 1461173 - DNA, 15 bp, Homo sapiens
cctgtccatctcctg

SEQ ID NO: 1461174 - DNA, 15 bp, Homo sapiens
ccctgtccatctcct

SEQ ID NO: 1461175 - DNA, 15 bp, Homo sapiens
gccctgtccatctcc

SEQ ID NO: 1461176 - DNA, 15 bp, Homo sapiens
ggccctgtccatctc

SEQ ID NO: 1461177 - DNA, 15 bp, Homo sapiens
tggccctgtccatct

SEQ ID NO: 1461178 - DNA, 15 bp, Homo sapiens
gtggccctgtccatc

SEQ ID NO: 1461179 - DNA, 15 bp, Homo sapiens
cgtggccctgtccat

SEQ ID NO: 1461180 - DNA, 15 bp, Homo sapiens
tcgtggccctgtcca

SEQ ID NO: 1461181 - DNA, 15 bp, Homo sapiens
gtcgtggccctgtcc

SEQ ID NO: 1461182 - DNA, 15 bp, Homo sapiens
tgtcgtggccctgtc

SEQ ID NO: 1461183 - DNA, 15 bp, Homo sapiens
ctgtcgtggccctgt

SEQ ID NO: 1461184 - DNA, 15 bp, Homo sapiens
cctgtcgtggccctg

SEQ ID NO: 1461185 - DNA, 15 bp, Homo sapiens
ccctgtcgtggccct

SEQ ID NO: 1461186 - DNA, 15 bp, Homo sapiens
gccctgtcgtggccc

SEQ ID NO: 1461187 - DNA, 15 bp, Homo sapiens
agccctgtcgtggcc

SEQ ID NO: 1461188 - DNA, 15 bp, Homo sapiens
gagccctgtcgtggc

SEQ ID NO: 1461189 - DNA, 15 bp, Homo sapiens
agagccctgtcgtgg

SEQ ID NO: 1461190 - DNA, 15 bp, Homo sapiens
cagagccctgtcgtg

SEQ ID NO: 1461191 - DNA, 15 bp, Homo sapiens
tcagagccctgtcgt

SEQ ID NO: 1461192 - DNA, 15 bp, Homo sapiens
ctcagagccctgtcg

SEQ ID NO: 1461193 - DNA, 15 bp, Homo sapiens
tctcagagccctgtc

SEQ ID NO: 1461194 - DNA, 15 bp, Homo sapiens
ctctcagagccctgt

SEQ ID NO: 1461195 - DNA, 15 bp, Homo sapiens
cctctcagagccctg

SEQ ID NO: 1461196 - DNA, 15 bp, Homo sapiens
gcctctcagagccct

SEQ ID NO: 1461197 - DNA, 15 bp, Homo sapiens
agcctctcagagccc

SEQ ID NO: 1461198 - DNA, 15 bp, Homo sapiens
gagcctctcagagcc

SEQ ID NO: 1461199 - DNA, 15 bp, Homo sapiens
tgagcctctcagagc

SEQ ID NO: 1461200 - DNA, 15 bp, Homo sapiens
atgagcctctcagag

SEQ ID NO: 1461201 - DNA, 15 bp, Homo sapiens
gatgagcctctcaga

SEQ ID NO: 1461202 - DNA, 15 bp, Homo sapiens
ggatgagcctctcag

SEQ ID NO: 1461203 - DNA, 15 bp, Homo sapiens
gggatgagcctctca

SEQ ID NO: 1461204 - DNA, 15 bp, Homo sapiens
agggatgagcctctc

SEQ ID NO: 1461205 - DNA, 15 bp, Homo sapiens
gagggatgagcctct

SEQ ID NO: 1461206 - DNA, 15 bp, Homo sapiens
tgagggatgagcctc

SEQ ID NO: 1461207 - DNA, 15 bp, Homo sapiens
ctgagggatgagcct

SEQ ID NO: 1461208 - DNA, 15 bp, Homo sapiens
actgagggatgagcc

SEQ ID NO: 1461209 - DNA, 15 bp, Homo sapiens
cactgagggatgagc

SEQ ID NO: 1461210 - DNA, 15 bp, Homo sapiens
ccactgagggatgag

SEQ ID NO: 1461211 - DNA, 15 bp, Homo sapiens
gccactgagggatga

SEQ ID NO: 1461212 - DNA, 15 bp, Homo sapiens
tgccactgagggatg

SEQ ID NO: 1461213 - DNA, 15 bp, Homo sapiens
ttgccactgagggat

SEQ ID NO: 1461214 - DNA, 15 bp, Homo sapiens
gttgccactgaggga

SEQ ID NO: 1461215 - DNA, 15 bp, Homo sapiens
tgttgccactgaggg

SEQ ID NO: 1461216 - DNA, 15 bp, Homo sapiens
ctgttgccactgagg

SEQ ID NO: 1461217 - DNA, 15 bp, Homo sapiens
tctgttgccactgag

SEQ ID NO: 1461218 - DNA, 15 bp, Homo sapiens
ttctgttgccactga

SEQ ID NO: 1461219 - DNA, 15 bp, Homo sapiens
tttctgttgccactg

SEQ ID NO: 1461220 - DNA, 15 bp, Homo sapiens
gtttctgttgccact

SEQ ID NO: 1461221 - DNA, 15 bp, Homo sapiens
tgtttctgttgccac

SEQ ID NO: 1461222 - DNA, 15 bp, Homo sapiens
ctgtttctgttgcca

SEQ ID NO: 1461223 - DNA, 15 bp, Homo sapiens
cctgtttctgttgcc

SEQ ID NO: 1461224 - DNA, 15 bp, Homo sapiens
gcctgtttctgttgc

SEQ ID NO: 1461225 - DNA, 15 bp, Homo sapiens
tgcctgtttctgttg

SEQ ID NO: 1461226 - DNA, 15 bp, Homo sapiens
gtgcctgtttctgtt

SEQ ID NO: 1461227 - DNA, 15 bp, Homo sapiens
tgtgcctgtttctgt

SEQ ID NO: 1461228 - DNA, 15 bp, Homo sapiens
ttgtgcctgtttctg

SEQ ID NO: 1461229 - DNA, 15 bp, Homo sapiens
gttgtgcctgtttct

SEQ ID NO: 1461230 - DNA, 15 bp, Homo sapiens
agttgtgcctgtttc

SEQ ID NO: 1461231 - DNA, 15 bp, Homo sapiens
cagttgtgcctgttt

SEQ ID NO: 1461232 - DNA, 15 bp, Homo sapiens
ccagttgtgcctgtt

SEQ ID NO: 1461233 - DNA, 15 bp, Homo sapiens
tccagttgtgcctgt

SEQ ID NO: 1461234 - DNA, 15 bp, Homo sapiens
ttccagttgtgcctg

SEQ ID NO: 1461235 - DNA, 15 bp, Homo sapiens
cttccagttgtgcct

SEQ ID NO: 1461236 - DNA, 15 bp, Homo sapiens
tcttccagttgtgcc

SEQ ID NO: 1461237 - DNA, 15 bp, Homo sapiens
gtcttccagttgtgc

SEQ ID NO: 1461238 - DNA, 15 bp, Homo sapiens
agtcttccagttgtg

SEQ ID NO: 1461239 - DNA, 15 bp, Homo sapiens
aagtcttccagttgt

SEQ ID NO: 1461240 - DNA, 15 bp, Homo sapiens
caagtcttccagttg

SEQ ID NO: 1461241 - DNA, 15 bp, Homo sapiens
ccaagtcttccagtt

SEQ ID NO: 1461242 - DNA, 15 bp, Homo sapiens
tccaagtcttccagt

SEQ ID NO: 1461243 - DNA, 15 bp, Homo sapiens
ttccaagtcttccag

SEQ ID NO: 1461244 - DNA, 15 bp, Homo sapiens
gttccaagtcttcca

SEQ ID NO: 1461245 - DNA, 15 bp, Homo sapiens
ggttccaagtcttcc

SEQ ID NO: 1461246 - DNA, 15 bp, Homo sapiens
aggttccaagtcttc

SEQ ID NO: 1461247 - DNA, 15 bp, Homo sapiens
gaggttccaagtctt

SEQ ID NO: 1461248 - DNA, 15 bp, Homo sapiens
tgaggttccaagtct

SEQ ID NO: 1461249 - DNA, 15 bp, Homo sapiens
ttgaggttccaagtc

SEQ ID NO: 1461250 - DNA, 15 bp, Homo sapiens
tttgaggttccaagt

SEQ ID NO: 1461251 - DNA, 15 bp, Homo sapiens
ctttgaggttccaag

SEQ ID NO: 1461252 - DNA, 15 bp, Homo sapiens
gctttgaggttccaa

SEQ ID NO: 1461253 - DNA, 15 bp, Homo sapiens
agctttgaggttcca

SEQ ID NO: 1461254 - DNA, 15 bp, Homo sapiens
aagctttgaggttcc

SEQ ID NO: 1461255 - DNA, 15 bp, Homo sapiens
caagctttgaggttc

SEQ ID NO: 1461256 - DNA, 15 bp, Homo sapiens
acaagctttgaggtt

SEQ ID NO: 1461257 - DNA, 15 bp, Homo sapiens
tacaagctttgaggt

SEQ ID NO: 1461258 - DNA, 15 bp, Homo sapiens
atacaagctttgagg

SEQ ID NO: 1461259 - DNA, 15 bp, Homo sapiens
aatacaagctttgag

SEQ ID NO: 1461260 - DNA, 15 bp, Homo sapiens
gaatacaagctttga

SEQ ID NO: 1461261 - DNA, 15 bp, Homo sapiens
ggaatacaagctttg

SEQ ID NO: 1461262 - DNA, 15 bp, Homo sapiens
tggaatacaagcttt

SEQ ID NO: 1461263 - DNA, 15 bp, Homo sapiens
atggaatacaagctt

SEQ ID NO: 1461264 - DNA, 15 bp, Homo sapiens
gatggaatacaagct

SEQ ID NO: 1461265 - DNA, 15 bp, Homo sapiens
agatggaatacaagc

SEQ ID NO: 1461266 - DNA, 15 bp, Homo sapiens
cagatggaatacaag

SEQ ID NO: 1461267 - DNA, 15 bp, Homo sapiens
gcagatggaatacaa

SEQ ID NO: 1461268 - DNA, 15 bp, Homo sapiens
agcagatggaataca

SEQ ID NO: 1461269 - DNA, 15 bp, Homo sapiens
cagcagatggaatac

SEQ ID NO: 1461270 - DNA, 15 bp, Homo sapiens
acagcagatggaata

SEQ ID NO: 1461271 - DNA, 15 bp, Homo sapiens
tacagcagatggaat

SEQ ID NO: 1461272 - DNA, 15 bp, Homo sapiens
ctacagcagatggaa

SEQ ID NO: 1461273 - DNA, 15 bp, Homo sapiens
gctacagcagatgga

SEQ ID NO: 1461274 - DNA, 15 bp, Homo sapiens
tgctacagcagatgg

SEQ ID NO: 1461275 - DNA, 15 bp, Homo sapiens
ttgctacagcagatg

SEQ ID NO: 1461276 - DNA, 15 bp, Homo sapiens
attgctacagcagat

SEQ ID NO: 1461277 - DNA, 15 bp, Homo sapiens
cattgctacagcaga

SEQ ID NO: 1461278 - DNA, 15 bp, Homo sapiens
ccattgctacagcag

SEQ ID NO: 1461279 - DNA, 15 bp, Homo sapiens
gccattgctacagca

SEQ ID NO: 1461280 - DNA, 15 bp, Homo sapiens
agccattgctacagc

SEQ ID NO: 1461281 - DNA, 15 bp, Homo sapiens
tagccattgctacag

SEQ ID NO: 1461282 - DNA, 15 bp, Homo sapiens
ttagccattgctaca

SEQ ID NO: 1461283 - DNA, 15 bp, Homo sapiens
tttagccattgctac

SEQ ID NO: 1461284 - DNA, 15 bp, Homo sapiens
ctttagccattgcta

SEQ ID NO: 1461285 - DNA, 15 bp, Homo sapiens
cctttagccattgct

SEQ ID NO: 1461286 - DNA, 15 bp, Homo sapiens
ccctttagccattgc

SEQ ID NO: 1461287 - DNA, 15 bp, Homo sapiens
accctttagccattg

SEQ ID NO: 1461288 - DNA, 15 bp, Homo sapiens
gaccctttagccatt

SEQ ID NO: 1461289 - DNA, 15 bp, Homo sapiens
tgaccctttagccat

SEQ ID NO: 1461290 - DNA, 15 bp, Homo sapiens
ttgaccctttagcca

SEQ ID NO: 1461291 - DNA, 15 bp, Homo sapiens
cttgaccctttagcc

SEQ ID NO: 1461292 - DNA, 15 bp, Homo sapiens
tcttgaccctttagc

SEQ ID NO: 1461293 - DNA, 15 bp, Homo sapiens
atcttgaccctttag

SEQ ID NO: 1461294 - DNA, 15 bp, Homo sapiens
gatcttgacccttta

SEQ ID NO: 1461295 - DNA, 15 bp, Homo sapiens
agatcttgacccttt

SEQ ID NO: 1461296 - DNA, 15 bp, Homo sapiens
aagatcttgaccctt

SEQ ID NO: 1461297 - DNA, 15 bp, Homo sapiens
taagatcttgaccct

SEQ ID NO: 1461298 - DNA, 15 bp, Homo sapiens
ctaagatcttgaccc

SEQ ID NO: 1461299 - DNA, 15 bp, Homo sapiens
gctaagatcttgacc

SEQ ID NO: 1461300 - DNA, 15 bp, Homo sapiens
agctaagatcttgac

SEQ ID NO: 1461301 - DNA, 15 bp, Homo sapiens
cagctaagatcttga

SEQ ID NO: 1461302 - DNA, 15 bp, Homo sapiens
acagctaagatcttg

SEQ ID NO: 1461303 - DNA, 15 bp, Homo sapiens
tacagctaagatctt

SEQ ID NO: 1461304 - DNA, 15 bp, Homo sapiens
atacagctaagatct

SEQ ID NO: 1461305 - DNA, 15 bp, Homo sapiens
catacagctaagatc

SEQ ID NO: 1461306 - DNA, 15 bp, Homo sapiens
ccatacagctaagat

SEQ ID NO: 1461307 - DNA, 15 bp, Homo sapiens
tccatacagctaaga

SEQ ID NO: 1461308 - DNA, 15 bp, Homo sapiens
ctccatacagctaag

SEQ ID NO: 1461309 - DNA, 15 bp, Homo sapiens
actccatacagctaa

SEQ ID NO: 1461310 - DNA, 15 bp, Homo sapiens
tactccatacagcta

SEQ ID NO: 1461311 - DNA, 15 bp, Homo sapiens
ttactccatacagct

SEQ ID NO: 1461312 - DNA, 15 bp, Homo sapiens
gttactccatacagc

SEQ ID NO: 1461313 - DNA, 15 bp, Homo sapiens
agttactccatacag

SEQ ID NO: 1461314 - DNA, 15 bp, Homo sapiens
tagttactccataca

SEQ ID NO: 1461315 - DNA, 15 bp, Homo sapiens
atagttactccatac

SEQ ID NO: 1461316 - DNA, 15 bp, Homo sapiens
aatagttactccata

SEQ ID NO: 1461317 - DNA, 15 bp, Homo sapiens
aaatagttactccat

SEQ ID NO: 1461318 - DNA, 15 bp, Homo sapiens
gaaatagttactcca

SEQ ID NO: 1461319 - DNA, 15 bp, Homo sapiens
tgaaatagttactcc

SEQ ID NO: 1461320 - DNA, 15 bp, Homo sapiens
ctgaaatagttactc

SEQ ID NO: 1461321 - DNA, 15 bp, Homo sapiens
tctgaaatagttact

SEQ ID NO: 1461322 - DNA, 15 bp, Homo sapiens
ttctgaaatagttac

SEQ ID NO: 1461323 - DNA, 15 bp, Homo sapiens
tttctgaaatagtta

SEQ ID NO: 1461324 - DNA, 15 bp, Homo sapiens
ttttctgaaatagtt

SEQ ID NO: 1461325 - DNA, 15 bp, Homo sapiens
gttttctgaaatagt

SEQ ID NO: 1461326 - DNA, 15 bp, Homo sapiens
ggttttctgaaatag

SEQ ID NO: 1461327 - DNA, 15 bp, Homo sapiens
gggttttctgaaata

SEQ ID NO: 1461328 - DNA, 15 bp, Homo sapiens
agggttttctgaaat

SEQ ID NO: 1461329 - DNA, 15 bp, Homo sapiens
tagggttttctgaaa

SEQ ID NO: 1461330 - DNA, 15 bp, Homo sapiens
atagggttttctgaa

SEQ ID NO: 1461331 - DNA, 15 bp, Homo sapiens
tatagggttttctga

SEQ ID NO: 1461332 - DNA, 15 bp, Homo sapiens
ttatagggttttctg

SEQ ID NO: 1461333 - DNA, 15 bp, Homo sapiens
cttatagggttttct

SEQ ID NO: 1461334 - DNA, 15 bp, Homo sapiens
tcttatagggttttc

SEQ ID NO: 1461335 - DNA, 15 bp, Homo sapiens
ttcttatagggtttt

SEQ ID NO: 1461336 - DNA, 15 bp, Homo sapiens
cttcttatagggttt

SEQ ID NO: 1461337 - DNA, 15 bp, Homo sapiens
acttcttatagggtt

SEQ ID NO: 1461338 - DNA, 15 bp, Homo sapiens
aacttcttatagggt

SEQ ID NO: 1461339 - DNA, 15 bp, Homo sapiens
gaacttcttataggg

SEQ ID NO: 1461340 - DNA, 15 bp, Homo sapiens
tgaacttcttatagg

SEQ ID NO: 1461341 - DNA, 15 bp, Homo sapiens
atgaacttcttatag

SEQ ID NO: 1461342 - DNA, 15 bp, Homo sapiens
aatgaacttcttata

SEQ ID NO: 1461343 - DNA, 15 bp, Homo sapiens
aaatgaacttcttat

SEQ ID NO: 1461344 - DNA, 15 bp, Homo sapiens
aaaatgaacttctta

SEQ ID NO: 1461345 - DNA, 15 bp, Homo sapiens
gaaaatgaacttctt

SEQ ID NO: 1461346 - DNA, 15 bp, Homo sapiens
agaaaatgaacttct

SEQ ID NO: 1461347 - DNA, 15 bp, Homo sapiens
aagaaaatgaacttc

SEQ ID NO: 1461348 - DNA, 15 bp, Homo sapiens
aaagaaaatgaactt

SEQ ID NO: 1461349 - DNA, 15 bp, Homo sapiens
gaaagaaaatgaact

SEQ ID NO: 1461350 - DNA, 15 bp, Homo sapiens
tgaaagaaaatgaac

SEQ ID NO: 1461351 - DNA, 15 bp, Homo sapiens
ttgaaagaaaatgaa

SEQ ID NO: 1461352 - DNA, 15 bp, Homo sapiens
tttgaaagaaaatga

SEQ ID NO: 1461353 - DNA, 15 bp, Homo sapiens
ttttgaaagaaaatg

SEQ ID NO: 1461354 - DNA, 15 bp, Homo sapiens
cttttgaaagaaaat

SEQ ID NO: 1461355 - DNA, 15 bp, Homo sapiens
acttttgaaagaaaa

SEQ ID NO: 1461356 - DNA, 15 bp, Homo sapiens
tacttttgaaagaaa

SEQ ID NO: 1461357 - DNA, 15 bp, Homo sapiens
ttacttttgaaagaa

SEQ ID NO: 1461358 - DNA, 15 bp, Homo sapiens
gttacttttgaaaga

SEQ ID NO: 1461359 - DNA, 15 bp, Homo sapiens
tgttacttttgaaag

SEQ ID NO: 1461360 - DNA, 15 bp, Homo sapiens
ctgttacttttgaaa

SEQ ID NO: 1461361 - DNA, 15 bp, Homo sapiens
actgttacttttgaa

SEQ ID NO: 1461362 - DNA, 15 bp, Homo sapiens
tactgttacttttga

SEQ ID NO: 1461363 - DNA, 15 bp, Homo sapiens
atactgttacttttg

SEQ ID NO: 1461364 - DNA, 15 bp, Homo sapiens
tatactgttactttt

SEQ ID NO: 1461365 - DNA, 15 bp, Homo sapiens
atatactgttacttt

SEQ ID NO: 1461366 - DNA, 15 bp, Homo sapiens
aatatactgttactt

SEQ ID NO: 1461367 - DNA, 15 bp, Homo sapiens
taatatactgttact

SEQ ID NO: 1461368 - DNA, 15 bp, Homo sapiens
ataatatactgttac

SEQ ID NO: 1461369 - DNA, 15 bp, Homo sapiens
aataatatactgtta

SEQ ID NO: 1461370 - DNA, 15 bp, Homo sapiens
aaataatatactgtt

SEQ ID NO: 1461371 - DNA, 15 bp, Homo sapiens
caaataatatactgt

SEQ ID NO: 1461372 - DNA, 15 bp, Homo sapiens
acaaataatatactg

SEQ ID NO: 1461373 - DNA, 15 bp, Homo sapiens
tacaaataatatact

SEQ ID NO: 1461374 - DNA, 15 bp, Homo sapiens
gtacaaataatatac

SEQ ID NO: 1461375 - DNA, 15 bp, Homo sapiens
tgtacaaataatata

SEQ ID NO: 1461376 - DNA, 15 bp, Homo sapiens
ctgtacaaataatat

SEQ ID NO: 1461377 - DNA, 15 bp, Homo sapiens
actgtacaaataata

SEQ ID NO: 1461378 - DNA, 15 bp, Homo sapiens
cactgtacaaataat

SEQ ID NO: 1461379 - DNA, 15 bp, Homo sapiens
acactgtacaaataa

SEQ ID NO: 1461380 - DNA, 15 bp, Homo sapiens
tacactgtacaaata

SEQ ID NO: 1461381 - DNA, 15 bp, Homo sapiens
ctacactgtacaaat

SEQ ID NO: 1461382 - DNA, 15 bp, Homo sapiens
actacactgtacaaa

SEQ ID NO: 1461383 - DNA, 15 bp, Homo sapiens
tactacactgtacaa

SEQ ID NO: 1461384 - DNA, 15 bp, Homo sapiens
atactacactgtaca

SEQ ID NO: 1461385 - DNA, 15 bp, Homo sapiens
tatactacactgtac

SEQ ID NO: 1461386 - DNA, 15 bp, Homo sapiens
gtatactacactgta

SEQ ID NO: 1461387 - DNA, 15 bp, Homo sapiens
tgtatactacactgt

SEQ ID NO: 1461388 - DNA, 15 bp, Homo sapiens
ttgtatactacactg

SEQ ID NO: 1461389 - DNA, 15 bp, Homo sapiens
tttgtatactacact

SEQ ID NO: 1461390 - DNA, 15 bp, Homo sapiens
gtttgtatactacac

SEQ ID NO: 1461391 - DNA, 15 bp, Homo sapiens
ggtttgtatactaca

SEQ ID NO: 1461392 - DNA, 15 bp, Homo sapiens
tggtttgtatactac

SEQ ID NO: 1461393 - DNA, 15 bp, Homo sapiens
atggtttgtatacta

SEQ ID NO: 1461394 - DNA, 15 bp, Homo sapiens
aatggtttgtatact

SEQ ID NO: 1461395 - DNA, 15 bp, Homo sapiens
taatggtttgtatac

SEQ ID NO: 1461396 - DNA, 15 bp, Homo sapiens
ataatggtttgtata

SEQ ID NO: 1461397 - DNA, 15 bp, Homo sapiens
cataatggtttgtat

SEQ ID NO: 1461398 - DNA, 15 bp, Homo sapiens
tcataatggtttgta

SEQ ID NO: 1461399 - DNA, 15 bp, Homo sapiens
atcataatggtttgt

SEQ ID NO: 1461400 - DNA, 15 bp, Homo sapiens
aatcataatggtttg

SEQ ID NO: 1461401 - DNA, 15 bp, Homo sapiens
aaatcataatggttt

SEQ ID NO: 1461402 - DNA, 15 bp, Homo sapiens
taaatcataatggtt

SEQ ID NO: 1461403 - DNA, 15 bp, Homo sapiens
ataaatcataatggt

SEQ ID NO: 1461404 - DNA, 15 bp, Homo sapiens
cataaatcataatgg

SEQ ID NO: 1461405 - DNA, 15 bp, Homo sapiens
gcataaatcataatg

SEQ ID NO: 1461406 - DNA, 15 bp, Homo sapiens
agcataaatcataat

SEQ ID NO: 1461407 - DNA, 15 bp, Homo sapiens
tagcataaatcataa

SEQ ID NO: 1461408 - DNA, 15 bp, Homo sapiens
gtagcataaatcata

SEQ ID NO: 1461409 - DNA, 15 bp, Homo sapiens
agtagcataaatcat

SEQ ID NO: 1461410 - DNA, 15 bp, Homo sapiens
aagtagcataaatca

SEQ ID NO: 1461411 - DNA, 15 bp, Homo sapiens
taagtagcataaatc

SEQ ID NO: 1461412 - DNA, 15 bp, Homo sapiens
ttaagtagcataaat

SEQ ID NO: 1461413 - DNA, 15 bp, Homo sapiens
tttaagtagcataaa

SEQ ID NO: 1461414 - DNA, 15 bp, Homo sapiens
ttttaagtagcataa

SEQ ID NO: 1461415 - DNA, 15 bp, Homo sapiens
tttttaagtagcata

SEQ ID NO: 1461416 - DNA, 15 bp, Homo sapiens
atttttaagtagcat

SEQ ID NO: 1461417 - DNA, 15 bp, Homo sapiens
tatttttaagtagca

SEQ ID NO: 1461418 - DNA, 15 bp, Homo sapiens
atatttttaagtagc

SEQ ID NO: 1461419 - DNA, 15 bp, Homo sapiens
aatatttttaagtag

SEQ ID NO: 1461420 - DNA, 15 bp, Homo sapiens
taatatttttaagta

SEQ ID NO: 1461421 - DNA, 15 bp, Homo sapiens
ttaatatttttaagt

SEQ ID NO: 1461422 - DNA, 15 bp, Homo sapiens
tttaatatttttaag

SEQ ID NO: 1461423 - DNA, 15 bp, Homo sapiens
ttttaatatttttaa

SEQ ID NO: 1461424 - DNA, 15 bp, Homo sapiens
attttaatattttta

SEQ ID NO: 1461425 - DNA, 15 bp, Homo sapiens
tattttaatattttt

SEQ ID NO: 1461426 - DNA, 15 bp, Homo sapiens
ctattttaatatttt

SEQ ID NO: 1461427 - DNA, 15 bp, Homo sapiens
tctattttaatattt

SEQ ID NO: 1461428 - DNA, 15 bp, Homo sapiens
ctctattttaatatt

SEQ ID NO: 1461429 - DNA, 15 bp, Homo sapiens
actctattttaatat

SEQ ID NO: 1461430 - DNA, 15 bp, Homo sapiens
cactctattttaata

SEQ ID NO: 1461431 - DNA, 15 bp, Homo sapiens
ccactctattttaat

SEQ ID NO: 1461432 - DNA, 15 bp, Homo sapiens
accactctattttaa

SEQ ID NO: 1461433 - DNA, 15 bp, Homo sapiens
gaccactctatttta

SEQ ID NO: 1461434 - DNA, 15 bp, Homo sapiens
agaccactctatttt

SEQ ID NO: 1461435 - DNA, 15 bp, Homo sapiens
cagaccactctattt

SEQ ID NO: 1461436 - DNA, 15 bp, Homo sapiens
acagaccactctatt

SEQ ID NO: 1461437 - DNA, 15 bp, Homo sapiens
cacagaccactctat

SEQ ID NO: 1461438 - DNA, 15 bp, Homo sapiens
acacagaccactcta

SEQ ID NO: 1461439 - DNA, 15 bp, Homo sapiens
aacacagaccactct

SEQ ID NO: 1461440 - DNA, 15 bp, Homo sapiens
taacacagaccactc

SEQ ID NO: 1461441 - DNA, 15 bp, Homo sapiens
ataacacagaccact

SEQ ID NO: 1461442 - DNA, 15 bp, Homo sapiens
aataacacagaccac

SEQ ID NO: 1461443 - DNA, 15 bp, Homo sapiens
aaataacacagacca

SEQ ID NO: 1461444 - DNA, 15 bp, Homo sapiens
aaaataacacagacc

SEQ ID NO: 1461445 - DNA, 15 bp, Homo sapiens
gaaaataacacagac

SEQ ID NO: 1461446 - DNA, 15 bp, Homo sapiens
agaaaataacacaga

SEQ ID NO: 1461447 - DNA, 15 bp, Homo sapiens
tagaaaataacacag

SEQ ID NO: 1461448 - DNA, 15 bp, Homo sapiens
atagaaaataacaca

SEQ ID NO: 1461449 - DNA, 15 bp, Homo sapiens
aatagaaaataacac

SEQ ID NO: 1461450 - DNA, 15 bp, Homo sapiens
aaatagaaaataaca

SEQ ID NO: 1461451 - DNA, 15 bp, Homo sapiens
gaaatagaaaataac

SEQ ID NO: 1461452 - DNA, 15 bp, Homo sapiens
ggaaatagaaaataa

SEQ ID NO: 1461453 - DNA, 15 bp, Homo sapiens
aggaaatagaaaata

SEQ ID NO: 1461454 - DNA, 15 bp, Homo sapiens
aaggaaatagaaaat

SEQ ID NO: 1461455 - DNA, 15 bp, Homo sapiens
aaaggaaatagaaaa

SEQ ID NO: 1461456 - DNA, 15 bp, Homo sapiens
aaaaggaaatagaaa

SEQ ID NO: 1461457 - DNA, 15 bp, Homo sapiens
aaaaaggaaatagaa

SEQ ID NO: 1461458 - DNA, 15 bp, Homo sapiens
aaaaaaggaaataga

SEQ ID NO: 1461459 - DNA, 15 bp, Homo sapiens
taaaaaaggaaatag

SEQ ID NO: 1461460 - DNA, 15 bp, Homo sapiens
ataaaaaaggaaata

SEQ ID NO: 1461461 - DNA, 15 bp, Homo sapiens
cataaaaaaggaaat

SEQ ID NO: 1461462 - DNA, 15 bp, Homo sapiens
gcataaaaaaggaaa

SEQ ID NO: 1461463 - DNA, 15 bp, Homo sapiens
agcataaaaaaggaa

SEQ ID NO: 1461464 - DNA, 15 bp, Homo sapiens
aagcataaaaaagga

SEQ ID NO: 1461465 - DNA, 15 bp, Homo sapiens
taagcataaaaaagg

SEQ ID NO: 1461466 - DNA, 15 bp, Homo sapiens
ctaagcataaaaaag

SEQ ID NO: 1461467 - DNA, 15 bp, Homo sapiens
tctaagcataaaaaa

SEQ ID NO: 1461468 - DNA, 15 bp, Homo sapiens
ttctaagcataaaaa

SEQ ID NO: 1461469 - DNA, 15 bp, Homo sapiens
gttctaagcataaaa

SEQ ID NO: 1461470 - DNA, 15 bp, Homo sapiens
tgttctaagcataaa

SEQ ID NO: 1461471 - DNA, 15 bp, Homo sapiens
gtgttctaagcataa

SEQ ID NO: 1461472 - DNA, 15 bp, Homo sapiens
ggtgttctaagcata

SEQ ID NO: 1461473 - DNA, 15 bp, Homo sapiens
tggtgttctaagcat

SEQ ID NO: 1461474 - DNA, 15 bp, Homo sapiens
ctggtgttctaagca

SEQ ID NO: 1461475 - DNA, 15 bp, Homo sapiens
cctggtgttctaagc

SEQ ID NO: 1461476 - DNA, 15 bp, Homo sapiens
ccctggtgttctaag

SEQ ID NO: 1461477 - DNA, 15 bp, Homo sapiens
accctggtgttctaa

SEQ ID NO: 1461478 - DNA, 15 bp, Homo sapiens
aaccctggtgttcta

SEQ ID NO: 1461479 - DNA, 15 bp, Homo sapiens
aaaccctggtgttct

SEQ ID NO: 1461480 - DNA, 15 bp, Homo sapiens
taaaccctggtgttc

SEQ ID NO: 1461481 - DNA, 15 bp, Homo sapiens
ttaaaccctggtgtt

SEQ ID NO: 1461482 - DNA, 15 bp, Homo sapiens
tttaaaccctggtgt

SEQ ID NO: 1461483 - DNA, 15 bp, Homo sapiens
ttttaaaccctggtg

SEQ ID NO: 1461484 - DNA, 15 bp, Homo sapiens
tttttaaaccctggt

SEQ ID NO: 1461485 - DNA, 15 bp, Homo sapiens
ttttttaaaccctgg

SEQ ID NO: 1461486 - DNA, 15 bp, Homo sapiens
tttttttaaaccctg

SEQ ID NO: 1461487 - DNA, 15 bp, Homo sapiens
ttttttttaaaccct

SEQ ID NO: 1461488 - DNA, 15 bp, Homo sapiens
tttttttttaaaccc

SEQ ID NO: 1461489 - DNA, 15 bp, Homo sapiens
ttttttttttaaacc

SEQ ID NO: 1461490 - DNA, 15 bp, Homo sapiens
tttttttttttaaac

SEQ ID NO: 1461491 - DNA, 15 bp, Homo sapiens
cctcacctttttttt

SEQ ID NO: 1461492 - DNA, 15 bp, Homo sapiens
tcctcaccttttttt

SEQ ID NO: 1461493 - DNA, 15 bp, Homo sapiens
gtcctcacctttttt

SEQ ID NO: 1461494 - DNA, 15 bp, Homo sapiens
tgtcctcaccttttt

SEQ ID NO: 1461495 - DNA, 15 bp, Homo sapiens
atgtcctcacctttt

SEQ ID NO: 1461496 - DNA, 15 bp, Homo sapiens
gatgtcctcaccttt

SEQ ID NO: 1461497 - DNA, 15 bp, Homo sapiens
agatgtcctcacctt

SEQ ID NO: 1461498 - DNA, 15 bp, Homo sapiens
cagatgtcctcacct

SEQ ID NO: 1461499 - DNA, 15 bp, Homo sapiens
ccagatgtcctcacc

SEQ ID NO: 1461500 - DNA, 15 bp, Homo sapiens
cccagatgtcctcac

SEQ ID NO: 1461501 - DNA, 15 bp, Homo sapiens
acccagatgtcctca

SEQ ID NO: 1461502 - DNA, 15 bp, Homo sapiens
gacccagatgtcctc

SEQ ID NO: 1461503 - DNA, 15 bp, Homo sapiens
agacccagatgtcct

SEQ ID NO: 1461504 - DNA, 15 bp, Homo sapiens
gagacccagatgtcc

SEQ ID NO: 1461505 - DNA, 15 bp, Homo sapiens
tgagacccagatgtc

SEQ ID NO: 1461506 - DNA, 15 bp, Homo sapiens
atgagacccagatgt

SEQ ID NO: 1461507 - DNA, 15 bp, Homo sapiens
aatgagacccagatg

SEQ ID NO: 1461508 - DNA, 15 bp, Homo sapiens
aaatgagacccagat

SEQ ID NO: 1461509 - DNA, 15 bp, Homo sapiens
caaatgagacccaga

SEQ ID NO: 1461510 - DNA, 15 bp, Homo sapiens
gcaaatgagacccag

SEQ ID NO: 1461511 - DNA, 15 bp, Homo sapiens
agcaaatgagaccca

SEQ ID NO: 1461512 - DNA, 15 bp, Homo sapiens
aagcaaatgagaccc

SEQ ID NO: 1461513 - DNA, 15 bp, Homo sapiens
gaagcaaatgagacc

SEQ ID NO: 1461514 - DNA, 15 bp, Homo sapiens
agaagcaaatgagac

SEQ ID NO: 1461515 - DNA, 15 bp, Homo sapiens
cagaagcaaatgaga

SEQ ID NO: 1461516 - DNA, 15 bp, Homo sapiens
gcagaagcaaatgag

SEQ ID NO: 1461517 - DNA, 15 bp, Homo sapiens
agcagaagcaaatga

SEQ ID NO: 1461518 - DNA, 15 bp, Homo sapiens
tagcagaagcaaatg

SEQ ID NO: 1461519 - DNA, 15 bp, Homo sapiens
ctagcagaagcaaat

SEQ ID NO: 1461520 - DNA, 15 bp, Homo sapiens
cctagcagaagcaaa

SEQ ID NO: 1461521 - DNA, 15 bp, Homo sapiens
acctagcagaagcaa

SEQ ID NO: 1461522 - DNA, 15 bp, Homo sapiens
aacctagcagaagca

SEQ ID NO: 1461523 - DNA, 15 bp, Homo sapiens
taacctagcagaagc

SEQ ID NO: 1461524 - DNA, 15 bp, Homo sapiens
ttaacctagcagaag

SEQ ID NO: 1461525 - DNA, 15 bp, Homo sapiens
tttaacctagcagaa

SEQ ID NO: 1461526 - DNA, 15 bp, Homo sapiens
gtttaacctagcaga

SEQ ID NO: 1461527 - DNA, 15 bp, Homo sapiens
agtttaacctagcag

SEQ ID NO: 1461528 - DNA, 15 bp, Homo sapiens
aagtttaacctagca

SEQ ID NO: 1461529 - DNA, 15 bp, Homo sapiens
aaagtttaacctagc

SEQ ID NO: 1461530 - DNA, 15 bp, Homo sapiens
aaaagtttaacctag

SEQ ID NO: 1461531 - DNA, 15 bp, Homo sapiens
taaaagtttaaccta

SEQ ID NO: 1461532 - DNA, 15 bp, Homo sapiens
gtaaaagtttaacct

SEQ ID NO: 1461533 - DNA, 15 bp, Homo sapiens
agtaaaagtttaacc

SEQ ID NO: 1461534 - DNA, 15 bp, Homo sapiens
aagtaaaagtttaac

SEQ ID NO: 1461535 - DNA, 15 bp, Homo sapiens
caagtaaaagtttaa

SEQ ID NO: 1461536 - DNA, 15 bp, Homo sapiens
tcaagtaaaagttta

SEQ ID NO: 1461537 - DNA, 15 bp, Homo sapiens
gtcaagtaaaagttt

SEQ ID NO: 1461538 - DNA, 15 bp, Homo sapiens
tgtcaagtaaaagtt

SEQ ID NO: 1461539 - DNA, 15 bp, Homo sapiens
ttgtcaagtaaaagt

SEQ ID NO: 1461540 - DNA, 15 bp, Homo sapiens
gttgtcaagtaaaag

SEQ ID NO: 1461541 - DNA, 15 bp, Homo sapiens
tgttgtcaagtaaaa

SEQ ID NO: 1461542 - DNA, 15 bp, Homo sapiens
ttgttgtcaagtaaa

SEQ ID NO: 1461543 - DNA, 15 bp, Homo sapiens
cttgttgtcaagtaa

SEQ ID NO: 1461544 - DNA, 15 bp, Homo sapiens
ccttgttgtcaagta

SEQ ID NO: 1461545 - DNA, 15 bp, Homo sapiens
tccttgttgtcaagt

SEQ ID NO: 1461546 - DNA, 15 bp, Homo sapiens
atccttgttgtcaag

SEQ ID NO: 1461547 - DNA, 15 bp, Homo sapiens
aatccttgttgtcaa

SEQ ID NO: 1461548 - DNA, 15 bp, Homo sapiens
gaatccttgttgtca

SEQ ID NO: 1461549 - DNA, 15 bp, Homo sapiens
ggaatccttgttgtc

SEQ ID NO: 1461550 - DNA, 15 bp, Homo sapiens
aggaatccttgttgt

SEQ ID NO: 1461551 - DNA, 15 bp, Homo sapiens
caggaatccttgttg

SEQ ID NO: 1461552 - DNA, 15 bp, Homo sapiens
gcaggaatccttgtt

SEQ ID NO: 1461553 - DNA, 15 bp, Homo sapiens
agcaggaatccttgt

SEQ ID NO: 1461554 - DNA, 15 bp, Homo sapiens
cagcaggaatccttg

SEQ ID NO: 1461555 - DNA, 15 bp, Homo sapiens
tcagcaggaatcctt

SEQ ID NO: 1461556 - DNA, 15 bp, Homo sapiens
ttcagcaggaatcct

SEQ ID NO: 1461557 - DNA, 15 bp, Homo sapiens
cttcagcaggaatcc

SEQ ID NO: 1461558 - DNA, 15 bp, Homo sapiens
acttcagcaggaatc

SEQ ID NO: 1461559 - DNA, 15 bp, Homo sapiens
gacttcagcaggaat

SEQ ID NO: 1461560 - DNA, 15 bp, Homo sapiens
agacttcagcaggaa

SEQ ID NO: 1461561 - DNA, 15 bp, Homo sapiens
cagacttcagcagga

SEQ ID NO: 1461562 - DNA, 15 bp, Homo sapiens
gttcagacttcagca

SEQ ID NO: 1461563 - DNA, 15 bp, Homo sapiens
ggttcagacttcagc

SEQ ID NO: 1461564 - DNA, 15 bp, Homo sapiens
aggttcagacttcag

SEQ ID NO: 1461565 - DNA, 15 bp, Homo sapiens
aaggttcagacttca

SEQ ID NO: 1461566 - DNA, 15 bp, Homo sapiens
taaggttcagacttc

SEQ ID NO: 1461567 - DNA, 15 bp, Homo sapiens
gtaaggttcagactt

SEQ ID NO: 1461568 - DNA, 15 bp, Homo sapiens
agtaaggttcagact

SEQ ID NO: 1461569 - DNA, 15 bp, Homo sapiens
cagtaaggttcagac

SEQ ID NO: 1461570 - DNA, 15 bp, Homo sapiens
acagtaaggttcaga

SEQ ID NO: 1461571 - DNA, 15 bp, Homo sapiens
cacagtaaggttcag

SEQ ID NO: 1461572 - DNA, 15 bp, Homo sapiens
acacagtaaggttca

SEQ ID NO: 1461573 - DNA, 15 bp, Homo sapiens
tacacagtaaggttc

SEQ ID NO: 1461574 - DNA, 15 bp, Homo sapiens
ttacacagtaaggtt

SEQ ID NO: 1461575 - DNA, 15 bp, Homo sapiens
gttacacagtaaggt

SEQ ID NO: 1461576 - DNA, 15 bp, Homo sapiens
ggttacacagtaagg

SEQ ID NO: 1461577 - DNA, 15 bp, Homo sapiens
gggttacacagtaag

SEQ ID NO: 1461578 - DNA, 15 bp, Homo sapiens
agggttacacagtaa

SEQ ID NO: 1461579 - DNA, 15 bp, Homo sapiens
gagggttacacagta

SEQ ID NO: 1461580 - DNA, 15 bp, Homo sapiens
tgagggttacacagt

SEQ ID NO: 1461581 - DNA, 15 bp, Homo sapiens
ctgagggttacacag

SEQ ID NO: 1461582 - DNA, 15 bp, Homo sapiens
actgagggttacaca

SEQ ID NO: 1461583 - DNA, 15 bp, Homo sapiens
aactgagggttacac

SEQ ID NO: 1461584 - DNA, 15 bp, Homo sapiens
aaactgagggttaca

SEQ ID NO: 1461585 - DNA, 15 bp, Homo sapiens
gaaactgagggttac

SEQ ID NO: 1461586 - DNA, 15 bp, Homo sapiens
ggaaactgagggtta

SEQ ID NO: 1461587 - DNA, 15 bp, Homo sapiens
tggaaactgagggtt

SEQ ID NO: 1461588 - DNA, 15 bp, Homo sapiens
gtggaaactgagggt

SEQ ID NO: 1461589 - DNA, 15 bp, Homo sapiens
agtggaaactgaggg

SEQ ID NO: 1461590 - DNA, 15 bp, Homo sapiens
atagtggaaactgag

SEQ ID NO: 1461591 - DNA, 15 bp, Homo sapiens
aatagtggaaactga

SEQ ID NO: 1461592 - DNA, 15 bp, Homo sapiens
taatagtggaaactg

SEQ ID NO: 1461593 - DNA, 15 bp, Homo sapiens
ttaatagtggaaact

SEQ ID NO: 1461594 - DNA, 15 bp, Homo sapiens
tttaatagtggaaac

SEQ ID NO: 1461595 - DNA, 15 bp, Homo sapiens
ctttaatagtggaaa

SEQ ID NO: 1461596 - DNA, 15 bp, Homo sapiens
tctttaatagtggaa

SEQ ID NO: 1461597 - DNA, 15 bp, Homo sapiens
ctctttaatagtgga

SEQ ID NO: 1461598 - DNA, 15 bp, Homo sapiens
actctttaatagtgg

SEQ ID NO: 1461599 - DNA, 15 bp, Homo sapiens
tactctttaatagtg

SEQ ID NO: 1461600 - DNA, 15 bp, Homo sapiens
atactctttaatagt

SEQ ID NO: 1461601 - DNA, 15 bp, Homo sapiens
gatactctttaatag

SEQ ID NO: 1461602 - DNA, 15 bp, Homo sapiens
agatactctttaata

SEQ ID NO: 1461603 - DNA, 15 bp, Homo sapiens
aagatactctttaat

SEQ ID NO: 1461604 - DNA, 15 bp, Homo sapiens
aaagatactctttaa

SEQ ID NO: 1461605 - DNA, 15 bp, Homo sapiens
aaaagatactcttta

SEQ ID NO: 1461606 - DNA, 15 bp, Homo sapiens
caaaagatactcttt

SEQ ID NO: 1461607 - DNA, 15 bp, Homo sapiens
tcaaaagatactctt

SEQ ID NO: 1461608 - DNA, 15 bp, Homo sapiens
gtcaaaagatactct

SEQ ID NO: 1461609 - DNA, 15 bp, Homo sapiens
cgtcaaaagatactc

SEQ ID NO: 1461610 - DNA, 15 bp, Homo sapiens
acgtcaaaagatact

SEQ ID NO: 1461611 - DNA, 15 bp, Homo sapiens
gacgtcaaaagatac

SEQ ID NO: 1461612 - DNA, 15 bp, Homo sapiens
agacgtcaaaagata

SEQ ID NO: 1461613 - DNA, 15 bp, Homo sapiens
cagacgtcaaaagat

SEQ ID NO: 1461614 - DNA, 15 bp, Homo sapiens
gcagacgtcaaaaga

SEQ ID NO: 1461615 - DNA, 15 bp, Homo sapiens
agcagacgtcaaaag

SEQ ID NO: 1461616 - DNA, 15 bp, Homo sapiens
aagcagacgtcaaaa

SEQ ID NO: 1461617 - DNA, 15 bp, Homo sapiens
caagcagacgtcaaa

SEQ ID NO: 1461618 - DNA, 15 bp, Homo sapiens
ccaagcagacgtcaa

SEQ ID NO: 1461619 - DNA, 15 bp, Homo sapiens
tccaagcagacgtca

SEQ ID NO: 1461620 - DNA, 15 bp, Homo sapiens
ttccaagcagacgtc

SEQ ID NO: 1461621 - DNA, 15 bp, Homo sapiens
tttccaagcagacgt

SEQ ID NO: 1461622 - DNA, 15 bp, Homo sapiens
ttttccaagcagacg

SEQ ID NO: 1461623 - DNA, 15 bp, Homo sapiens
attttccaagcagac

SEQ ID NO: 1461624 - DNA, 15 bp, Homo sapiens
cattttccaagcaga

SEQ ID NO: 1461625 - DNA, 15 bp, Homo sapiens
tcattttccaagcag

SEQ ID NO: 1461626 - DNA, 15 bp, Homo sapiens
ttcattttccaagca

SEQ ID NO: 1461627 - DNA, 15 bp, Homo sapiens
attcattttccaagc

SEQ ID NO: 1461628 - DNA, 15 bp, Homo sapiens
tattcattttccaag

SEQ ID NO: 1461629 - DNA, 15 bp, Homo sapiens
ctattcattttccaa

SEQ ID NO: 1461630 - DNA, 15 bp, Homo sapiens
actattcattttcca

SEQ ID NO: 1461631 - DNA, 15 bp, Homo sapiens
tactattcattttcc

SEQ ID NO: 1461632 - DNA, 15 bp, Homo sapiens
atactattcattttc

SEQ ID NO: 1461633 - DNA, 15 bp, Homo sapiens
tatactattcatttt

SEQ ID NO: 1461634 - DNA, 15 bp, Homo sapiens
gtatactattcattt

SEQ ID NO: 1461635 - DNA, 15 bp, Homo sapiens
agtatactattcatt

SEQ ID NO: 1461636 - DNA, 15 bp, Homo sapiens
cagtatactattcat

SEQ ID NO: 1461637 - DNA, 15 bp, Homo sapiens
ccagtatactattca

SEQ ID NO: 1461638 - DNA, 15 bp, Homo sapiens
accagtatactattc

SEQ ID NO: 1461639 - DNA, 15 bp, Homo sapiens
taccagtatactatt

SEQ ID NO: 1461640 - DNA, 15 bp, Homo sapiens
ttaccagtatactat

SEQ ID NO: 1461641 - DNA, 15 bp, Homo sapiens
gttaccagtatacta

SEQ ID NO: 1461642 - DNA, 15 bp, Homo sapiens
agttaccagtatact

SEQ ID NO: 1461643 - DNA, 15 bp, Homo sapiens
gagttaccagtatac

SEQ ID NO: 1461644 - DNA, 15 bp, Homo sapiens
tgagttaccagtata

SEQ ID NO: 1461645 - DNA, 15 bp, Homo sapiens
ctgagttaccagtat

SEQ ID NO: 1461646 - DNA, 15 bp, Homo sapiens
actgagttaccagta

SEQ ID NO: 1461647 - DNA, 15 bp, Homo sapiens
gactgagttaccagt

SEQ ID NO: 1461648 - DNA, 15 bp, Homo sapiens
agactgagttaccag

SEQ ID NO: 1461649 - DNA, 15 bp, Homo sapiens
gagactgagttacca

SEQ ID NO: 1461650 - DNA, 15 bp, Homo sapiens
ggagactgagttacc

SEQ ID NO: 1461651 - DNA, 15 bp, Homo sapiens
tggagactgagttac

SEQ ID NO: 1461652 - DNA, 15 bp, Homo sapiens
ctggagactgagtta

SEQ ID NO: 1461653 - DNA, 15 bp, Homo sapiens
actggagactgagtt

SEQ ID NO: 1461654 - DNA, 15 bp, Homo sapiens
gactggagactgagt

SEQ ID NO: 1461655 - DNA, 15 bp, Homo sapiens
tgactggagactgag

SEQ ID NO: 1461656 - DNA, 15 bp, Homo sapiens
gtgactggagactga

SEQ ID NO: 1461657 - DNA, 15 bp, Homo sapiens
ggtgactggagactg

SEQ ID NO: 1461658 - DNA, 15 bp, Homo sapiens
aggtgactggagact

SEQ ID NO: 1461659 - DNA, 15 bp, Homo sapiens
gaggtgactggagac

SEQ ID NO: 1461660 - DNA, 15 bp, Homo sapiens
agaggtgactggaga

SEQ ID NO: 1461661 - DNA, 15 bp, Homo sapiens
cagaggtgactggag

SEQ ID NO: 1461662 - DNA, 15 bp, Homo sapiens
acagaggtgactgga

SEQ ID NO: 1461663 - DNA, 15 bp, Homo sapiens
cacagaggtgactgg

SEQ ID NO: 1461664 - DNA, 15 bp, Homo sapiens
acacagaggtgactg

SEQ ID NO: 1461665 - DNA, 15 bp, Homo sapiens
gacacagaggtgact

SEQ ID NO: 1461666 - DNA, 15 bp, Homo sapiens
agacacagaggtgac

SEQ ID NO: 1461667 - DNA, 15 bp, Homo sapiens
gagacacagaggtga

SEQ ID NO: 1461668 - DNA, 15 bp, Homo sapiens
agagacacagaggtg

SEQ ID NO: 1461669 - DNA, 15 bp, Homo sapiens
aagagacacagaggt

SEQ ID NO: 1461670 - DNA, 15 bp, Homo sapiens
taagagacacagagg

SEQ ID NO: 1461671 - DNA, 15 bp, Homo sapiens
ttaagagacacagag

SEQ ID NO: 1461672 - DNA, 15 bp, Homo sapiens
cttaagagacacaga

SEQ ID NO: 1461673 - DNA, 15 bp, Homo sapiens
gcttaagagacacag

SEQ ID NO: 1461674 - DNA, 15 bp, Homo sapiens
tgcttaagagacaca

SEQ ID NO: 1461675 - DNA, 15 bp, Homo sapiens
ttgcttaagagacac

SEQ ID NO: 1461676 - DNA, 15 bp, Homo sapiens
cttgcttaagagaca

SEQ ID NO: 1461677 - DNA, 15 bp, Homo sapiens
tcttgcttaagagac

SEQ ID NO: 1461678 - DNA, 15 bp, Homo sapiens
ctcttgcttaagaga

SEQ ID NO: 1461679 - DNA, 15 bp, Homo sapiens
tctcttgcttaagag

SEQ ID NO: 1461680 - DNA, 15 bp, Homo sapiens
atctcttgcttaaga

SEQ ID NO: 1461681 - DNA, 15 bp, Homo sapiens
aatctcttgcttaag

SEQ ID NO: 1461682 - DNA, 15 bp, Homo sapiens
gaatctcttgcttaa

SEQ ID NO: 1461683 - DNA, 15 bp, Homo sapiens
agaatctcttgctta

SEQ ID NO: 1461684 - DNA, 15 bp, Homo sapiens
tagaatctcttgctt

SEQ ID NO: 1461685 - DNA, 15 bp, Homo sapiens
ttagaatctcttgct

SEQ ID NO: 1461686 - DNA, 15 bp, Homo sapiens
tttagaatctcttgc

SEQ ID NO: 1461687 - DNA, 15 bp, Homo sapiens
ttttagaatctcttg

SEQ ID NO: 1461688 - DNA, 15 bp, Homo sapiens
cttttagaatctctt

SEQ ID NO: 1461689 - DNA, 15 bp, Homo sapiens
tcttttagaatctct

SEQ ID NO: 1461690 - DNA, 15 bp, Homo sapiens
atcttttagaatctc

SEQ ID NO: 1461691 - DNA, 15 bp, Homo sapiens
aatcttttagaatct

SEQ ID NO: 1461692 - DNA, 15 bp, Homo sapiens
caatcttttagaatc

SEQ ID NO: 1461693 - DNA, 15 bp, Homo sapiens
ccaatcttttagaat

SEQ ID NO: 1461694 - DNA, 15 bp, Homo sapiens
cccaatcttttagaa

SEQ ID NO: 1461695 - DNA, 15 bp, Homo sapiens
tcccaatcttttaga

SEQ ID NO: 1461696 - DNA, 15 bp, Homo sapiens
ttcccaatcttttag

SEQ ID NO: 1461697 - DNA, 15 bp, Homo sapiens
tttcccaatctttta

SEQ ID NO: 1461698 - DNA, 15 bp, Homo sapiens
ttttcccaatctttt

SEQ ID NO: 1461699 - DNA, 15 bp, Homo sapiens
gttttcccaatcttt

SEQ ID NO: 1461700 - DNA, 15 bp, Homo sapiens
tgttttcccaatctt

SEQ ID NO: 1461701 - DNA, 15 bp, Homo sapiens
atgttttcccaatct

SEQ ID NO: 1461702 - DNA, 15 bp, Homo sapiens
tatgttttcccaatc

SEQ ID NO: 1461703 - DNA, 15 bp, Homo sapiens
atatgttttcccaat

SEQ ID NO: 1461704 - DNA, 15 bp, Homo sapiens
gatatgttttcccaa

SEQ ID NO: 1461705 - DNA, 15 bp, Homo sapiens
ggatatgttttccca

SEQ ID NO: 1461706 - DNA, 15 bp, Homo sapiens
aggatatgttttccc

SEQ ID NO: 1461707 - DNA, 15 bp, Homo sapiens
gaggatatgttttcc

SEQ ID NO: 1461708 - DNA, 15 bp, Homo sapiens
ggaggatatgttttc

SEQ ID NO: 1461709 - DNA, 15 bp, Homo sapiens
tggaggatatgtttt

SEQ ID NO: 1461710 - DNA, 15 bp, Homo sapiens
ttggaggatatgttt

SEQ ID NO: 1461711 - DNA, 15 bp, Homo sapiens
gttggaggatatgtt

SEQ ID NO: 1461712 - DNA, 15 bp, Homo sapiens
tgttggaggatatgt

SEQ ID NO: 1461713 - DNA, 15 bp, Homo sapiens
gtgttggaggatatg

SEQ ID NO: 1461714 - DNA, 15 bp, Homo sapiens
ggtgttggaggatat

SEQ ID NO: 1461715 - DNA, 15 bp, Homo sapiens
aggtgttggaggata

SEQ ID NO: 1461716 - DNA, 15 bp, Homo sapiens
caggtgttggaggat

SEQ ID NO: 1461717 - DNA, 15 bp, Homo sapiens
gcaggtgttggagga

SEQ ID NO: 1461718 - DNA, 15 bp, Homo sapiens
ggcaggtgttggagg

SEQ ID NO: 1461719 - DNA, 15 bp, Homo sapiens
aggcaggtgttggag

SEQ ID NO: 1461720 - DNA, 15 bp, Homo sapiens
aaggcaggtgttgga

SEQ ID NO: 1461721 - DNA, 15 bp, Homo sapiens
aaaggcaggtgttgg

SEQ ID NO: 1461722 - DNA, 15 bp, Homo sapiens
caaaggcaggtgttg

SEQ ID NO: 1461723 - DNA, 15 bp, Homo sapiens
gcaaaggcaggtgtt

SEQ ID NO: 1461724 - DNA, 15 bp, Homo sapiens
ggcaaaggcaggtgt

SEQ ID NO: 1461725 - DNA, 15 bp, Homo sapiens
aggcaaaggcaggtg

SEQ ID NO: 1461726 - DNA, 15 bp, Homo sapiens
taggcaaaggcaggt

SEQ ID NO: 1461727 - DNA, 15 bp, Homo sapiens
ttaggcaaaggcagg

SEQ ID NO: 1461728 - DNA, 15 bp, Homo sapiens
gttaggcaaaggcag

SEQ ID NO: 1461729 - DNA, 15 bp, Homo sapiens
ggttaggcaaaggca

SEQ ID NO: 1461730 - DNA, 15 bp, Homo sapiens
tggttaggcaaaggc

SEQ ID NO: 1461731 - DNA, 15 bp, Homo sapiens
atggttaggcaaagg

SEQ ID NO: 1461732 - DNA, 15 bp, Homo sapiens
aatggttaggcaaag

SEQ ID NO: 1461733 - DNA, 15 bp, Homo sapiens
taatggttaggcaaa

SEQ ID NO: 1461734 - DNA, 15 bp, Homo sapiens
ataatggttaggcaa

SEQ ID NO: 1461735 - DNA, 15 bp, Homo sapiens
aataatggttaggca

SEQ ID NO: 1461736 - DNA, 15 bp, Homo sapiens
aaataatggttaggc

SEQ ID NO: 1461737 - DNA, 15 bp, Homo sapiens
aaaataatggttagg

SEQ ID NO: 1461738 - DNA, 15 bp, Homo sapiens
aaaaataatggttag

SEQ ID NO: 1461739 - DNA, 15 bp, Homo sapiens
gaaaaataatggtta

SEQ ID NO: 1461740 - DNA, 15 bp, Homo sapiens
tgaaaaataatggtt

SEQ ID NO: 1461741 - DNA, 15 bp, Homo sapiens
gtgaaaaataatggt

SEQ ID NO: 1461742 - DNA, 15 bp, Homo sapiens
ggtgaaaaataatgg

SEQ ID NO: 1461743 - DNA, 15 bp, Homo sapiens
tggtgaaaaataatg

SEQ ID NO: 1461744 - DNA, 15 bp, Homo sapiens
ctggtgaaaaataat

SEQ ID NO: 1461745 - DNA, 15 bp, Homo sapiens
tctggtgaaaaataa

SEQ ID NO: 1461746 - DNA, 15 bp, Homo sapiens
atctggtgaaaaata

SEQ ID NO: 1461747 - DNA, 15 bp, Homo sapiens
aatctggtgaaaaat

SEQ ID NO: 1461748 - DNA, 15 bp, Homo sapiens
taatctggtgaaaaa

SEQ ID NO: 1461749 - DNA, 15 bp, Homo sapiens
gtaatctggtgaaaa

SEQ ID NO: 1461750 - DNA, 15 bp, Homo sapiens
agtaatctggtgaaa

SEQ ID NO: 1461751 - DNA, 15 bp, Homo sapiens
aagtaatctggtgaa

SEQ ID NO: 1461752 - DNA, 15 bp, Homo sapiens
gaagtaatctggtga

SEQ ID NO: 1461753 - DNA, 15 bp, Homo sapiens
agaagtaatctggtg

SEQ ID NO: 1461754 - DNA, 15 bp, Homo sapiens
aagaagtaatctggt

SEQ ID NO: 1461755 - DNA, 15 bp, Homo sapiens
taagaagtaatctgg

SEQ ID NO: 1461756 - DNA, 15 bp, Homo sapiens
ttaagaagtaatctg

SEQ ID NO: 1461757 - DNA, 15 bp, Homo sapiens
cttaagaagtaatct

SEQ ID NO: 1461758 - DNA, 15 bp, Homo sapiens
tcttaagaagtaatc

SEQ ID NO: 1461759 - DNA, 15 bp, Homo sapiens
ctcttaagaagtaat

SEQ ID NO: 1461760 - DNA, 15 bp, Homo sapiens
tctcttaagaagtaa

SEQ ID NO: 1461761 - DNA, 15 bp, Homo sapiens
ctctcttaagaagta

SEQ ID NO: 1461762 - DNA, 15 bp, Homo sapiens
cctctcttaagaagt

SEQ ID NO: 1461763 - DNA, 15 bp, Homo sapiens
ccctctcttaagaag

SEQ ID NO: 1461764 - DNA, 15 bp, Homo sapiens
tccctctcttaagaa

SEQ ID NO: 1461765 - DNA, 15 bp, Homo sapiens
ctccctctcttaaga

SEQ ID NO: 1461766 - DNA, 15 bp, Homo sapiens
cctccctctcttaag

SEQ ID NO: 1461767 - DNA, 15 bp, Homo sapiens
acctccctctcttaa

SEQ ID NO: 1461768 - DNA, 15 bp, Homo sapiens
cacctccctctctta

SEQ ID NO: 1461769 - DNA, 15 bp, Homo sapiens
tcacctccctctctt

SEQ ID NO: 1461770 - DNA, 15 bp, Homo sapiens
atcacctccctctct

SEQ ID NO: 1461771 - DNA, 15 bp, Homo sapiens
aatcacctccctctc

SEQ ID NO: 1461772 - DNA, 15 bp, Homo sapiens
gaatcacctccctct

SEQ ID NO: 1461773 - DNA, 15 bp, Homo sapiens
agaatcacctccctc

SEQ ID NO: 1461774 - DNA, 15 bp, Homo sapiens
cagaatcacctccct

SEQ ID NO: 1461775 - DNA, 15 bp, Homo sapiens
tcagaatcacctccc

SEQ ID NO: 1461776 - DNA, 15 bp, Homo sapiens
ttcagaatcacctcc

SEQ ID NO: 1461777 - DNA, 15 bp, Homo sapiens
cttcagaatcacctc

SEQ ID NO: 1461778 - DNA, 15 bp, Homo sapiens
tcttcagaatcacct

SEQ ID NO: 1461779 - DNA, 15 bp, Homo sapiens
ttcttcagaatcacc

SEQ ID NO: 1461780 - DNA, 15 bp, Homo sapiens
cttcttcagaatcac

SEQ ID NO: 1461781 - DNA, 15 bp, Homo sapiens
ccttcttcagaatca

SEQ ID NO: 1461782 - DNA, 15 bp, Homo sapiens
gccttcttcagaatc

SEQ ID NO: 1461783 - DNA, 15 bp, Homo sapiens
agccttcttcagaat

SEQ ID NO: 1461784 - DNA, 15 bp, Homo sapiens
aagccttcttcagaa

SEQ ID NO: 1461785 - DNA, 15 bp, Homo sapiens
gaagccttcttcaga

SEQ ID NO: 1461786 - DNA, 15 bp, Homo sapiens
agaagccttcttcag

SEQ ID NO: 1461787 - DNA, 15 bp, Homo sapiens
tagaagccttcttca

SEQ ID NO: 1461788 - DNA, 15 bp, Homo sapiens
atagaagccttcttc

SEQ ID NO: 1461789 - DNA, 15 bp, Homo sapiens
gatagaagccttctt

SEQ ID NO: 1461790 - DNA, 15 bp, Homo sapiens
agatagaagccttct

SEQ ID NO: 1461791 - DNA, 15 bp, Homo sapiens
gagatagaagccttc

SEQ ID NO: 1461792 - DNA, 15 bp, Homo sapiens
tgagatagaagcctt

SEQ ID NO: 1461793 - DNA, 15 bp, Homo sapiens
ttgagatagaagcct

SEQ ID NO: 1461794 - DNA, 15 bp, Homo sapiens
tttgagatagaagcc

SEQ ID NO: 1461795 - DNA, 15 bp, Homo sapiens
ttttgagatagaagc

SEQ ID NO: 1461796 - DNA, 15 bp, Homo sapiens
tttttgagatagaag

SEQ ID NO: 1461797 - DNA, 15 bp, Homo sapiens
ctttttgagatagaa

SEQ ID NO: 1461798 - DNA, 15 bp, Homo sapiens
gctttttgagataga

SEQ ID NO: 1461799 - DNA, 15 bp, Homo sapiens
tgctttttgagatag

SEQ ID NO: 1461800 - DNA, 15 bp, Homo sapiens
gtgctttttgagata

SEQ ID NO: 1461801 - DNA, 15 bp, Homo sapiens
agtgctttttgagat

SEQ ID NO: 1461802 - DNA, 15 bp, Homo sapiens
cagtgctttttgaga

SEQ ID NO: 1461803 - DNA, 15 bp, Homo sapiens
ccagtgctttttgag

SEQ ID NO: 1461804 - DNA, 15 bp, Homo sapiens
cccagtgctttttga

SEQ ID NO: 1461805 - DNA, 15 bp, Homo sapiens
gcccagtgctttttg

SEQ ID NO: 1461806 - DNA, 15 bp, Homo sapiens
agcccagtgcttttt

SEQ ID NO: 1461807 - DNA, 15 bp, Homo sapiens
aagcccagtgctttt

SEQ ID NO: 1461808 - DNA, 15 bp, Homo sapiens
gaagcccagtgcttt

SEQ ID NO: 1461809 - DNA, 15 bp, Homo sapiens
ggaagcccagtgctt

SEQ ID NO: 1461810 - DNA, 15 bp, Homo sapiens
aggaagcccagtgct

SEQ ID NO: 1461811 - DNA, 15 bp, Homo sapiens
aaggaagcccagtgc

SEQ ID NO: 1461812 - DNA, 15 bp, Homo sapiens
taaggaagcccagtg

SEQ ID NO: 1461813 - DNA, 15 bp, Homo sapiens
ataaggaagcccagt

SEQ ID NO: 1461814 - DNA, 15 bp, Homo sapiens
aataaggaagcccag

SEQ ID NO: 1461815 - DNA, 15 bp, Homo sapiens
gaataaggaagccca

SEQ ID NO: 1461816 - DNA, 15 bp, Homo sapiens
tgaataaggaagccc

SEQ ID NO: 1461817 - DNA, 15 bp, Homo sapiens
atgaataaggaagcc

SEQ ID NO: 1461818 - DNA, 15 bp, Homo sapiens
gatgaataaggaagc

SEQ ID NO: 1461819 - DNA, 15 bp, Homo sapiens
agatgaataaggaag

SEQ ID NO: 1461820 - DNA, 15 bp, Homo sapiens
cagatgaataaggaa

SEQ ID NO: 1461821 - DNA, 15 bp, Homo sapiens
acagatgaataagga

SEQ ID NO: 1461822 - DNA, 15 bp, Homo sapiens
aacagatgaataagg

SEQ ID NO: 1461823 - DNA, 15 bp, Homo sapiens
gaacagatgaataag

SEQ ID NO: 1461824 - DNA, 15 bp, Homo sapiens
agaacagatgaataa

SEQ ID NO: 1461825 - DNA, 15 bp, Homo sapiens
aagaacagatgaata

SEQ ID NO: 1461826 - DNA, 15 bp, Homo sapiens
caagaacagatgaat

SEQ ID NO: 1461827 - DNA, 15 bp, Homo sapiens
acaagaacagatgaa

SEQ ID NO: 1461828 - DNA, 15 bp, Homo sapiens
aacaagaacagatga

SEQ ID NO: 1461829 - DNA, 15 bp, Homo sapiens
caacaagaacagatg

SEQ ID NO: 1461830 - DNA, 15 bp, Homo sapiens
acaacaagaacagat

SEQ ID NO: 1461831 - DNA, 15 bp, Homo sapiens
aacaacaagaacaga

SEQ ID NO: 1461832 - DNA, 15 bp, Homo sapiens
aaacaacaagaacag

SEQ ID NO: 1461833 - DNA, 15 bp, Homo sapiens
aaaacaacaagaaca

SEQ ID NO: 1461834 - DNA, 15 bp, Homo sapiens
aaaaacaacaagaac

SEQ ID NO: 1461835 - DNA, 15 bp, Homo sapiens
caaaaacaacaagaa

SEQ ID NO: 1461836 - DNA, 15 bp, Homo sapiens
tcaaaaacaacaaga

SEQ ID NO: 1461837 - DNA, 15 bp, Homo sapiens
gtcaaaaacaacaag

SEQ ID NO: 1461838 - DNA, 15 bp, Homo sapiens
cgtcaaaaacaacaa

SEQ ID NO: 1461839 - DNA, 15 bp, Homo sapiens
ccgtcaaaaacaaca

SEQ ID NO: 1461840 - DNA, 15 bp, Homo sapiens
tccgtcaaaaacaac

SEQ ID NO: 1461841 - DNA, 15 bp, Homo sapiens
ctccgtcaaaaacaa

SEQ ID NO: 1461842 - DNA, 15 bp, Homo sapiens
actccgtcaaaaaca

SEQ ID NO: 1461843 - DNA, 15 bp, Homo sapiens
aactccgtcaaaaac

SEQ ID NO: 1461844 - DNA, 15 bp, Homo sapiens
taactccgtcaaaaa

SEQ ID NO: 1461845 - DNA, 15 bp, Homo sapiens
ttaactccgtcaaaa

SEQ ID NO: 1461846 - DNA, 15 bp, Homo sapiens
tttaactccgtcaaa

SEQ ID NO: 1461847 - DNA, 15 bp, Homo sapiens
ttttaactccgtcaa

SEQ ID NO: 1461848 - DNA, 15 bp, Homo sapiens
tttttaactccgtca

SEQ ID NO: 1461849 - DNA, 15 bp, Homo sapiens
ttttttaactccgtc

SEQ ID NO: 1461850 - DNA, 15 bp, Homo sapiens
cttttttaactccgt

SEQ ID NO: 1461851 - DNA, 15 bp, Homo sapiens
acttttttaactccg

SEQ ID NO: 1461852 - DNA, 15 bp, Homo sapiens
aacttttttaactcc

SEQ ID NO: 1461853 - DNA, 15 bp, Homo sapiens
aaacttttttaactc

SEQ ID NO: 1461854 - DNA, 15 bp, Homo sapiens
caaacttttttaact

SEQ ID NO: 1461855 - DNA, 15 bp, Homo sapiens
acaaacttttttaac

SEQ ID NO: 1461856 - DNA, 15 bp, Homo sapiens
cacaaacttttttaa

SEQ ID NO: 1461857 - DNA, 15 bp, Homo sapiens
acacaaactttttta

SEQ ID NO: 1461858 - DNA, 15 bp, Homo sapiens
cacacaaactttttt

SEQ ID NO: 1461859 - DNA, 15 bp, Homo sapiens
gcacacaaacttttt

SEQ ID NO: 1461860 - DNA, 15 bp, Homo sapiens
tgcacacaaactttt

SEQ ID NO: 1461861 - DNA, 15 bp, Homo sapiens
ttgcacacaaacttt

SEQ ID NO: 1461862 - DNA, 15 bp, Homo sapiens
attgcacacaaactt

SEQ ID NO: 1461863 - DNA, 15 bp, Homo sapiens
tattgcacacaaact

SEQ ID NO: 1461864 - DNA, 15 bp, Homo sapiens
gtattgcacacaaac

SEQ ID NO: 1461865 - DNA, 15 bp, Homo sapiens
tgtattgcacacaaa

SEQ ID NO: 1461866 - DNA, 15 bp, Homo sapiens
ttgtattgcacacaa

SEQ ID NO: 1461867 - DNA, 15 bp, Homo sapiens
attgtattgcacaca

SEQ ID NO: 1461868 - DNA, 15 bp, Homo sapiens
tattgtattgcacac

SEQ ID NO: 1461869 - DNA, 15 bp, Homo sapiens
atattgtattgcaca

SEQ ID NO: 1461870 - DNA, 15 bp, Homo sapiens
tatattgtattgcac

SEQ ID NO: 1461871 - DNA, 15 bp, Homo sapiens
gtatattgtattgca

SEQ ID NO: 1461872 - DNA, 15 bp, Homo sapiens
tgtatattgtattgc

SEQ ID NO: 1461873 - DNA, 15 bp, Homo sapiens
atgtatattgtattg

SEQ ID NO: 1461874 - DNA, 15 bp, Homo sapiens
catgtatattgtatt

SEQ ID NO: 1461875 - DNA, 15 bp, Homo sapiens
tcatgtatattgtat

SEQ ID NO: 1461876 - DNA, 15 bp, Homo sapiens
atcatgtatattgta

SEQ ID NO: 1461877 - DNA, 15 bp, Homo sapiens
catcatgtatattgt

SEQ ID NO: 1461878 - DNA, 15 bp, Homo sapiens
acatcatgtatattg

SEQ ID NO: 1461879 - DNA, 15 bp, Homo sapiens
cacatcatgtatatt

SEQ ID NO: 1461880 - DNA, 15 bp, Homo sapiens
tcacatcatgtatat

SEQ ID NO: 1461881 - DNA, 15 bp, Homo sapiens
ttcacatcatgtata

SEQ ID NO: 1461882 - DNA, 15 bp, Homo sapiens
cttcacatcatgtat

SEQ ID NO: 1461883 - DNA, 15 bp, Homo sapiens
ccttcacatcatgta

SEQ ID NO: 1461884 - DNA, 15 bp, Homo sapiens
tccttcacatcatgt

SEQ ID NO: 1461885 - DNA, 15 bp, Homo sapiens
gtccttcacatcatg

SEQ ID NO: 1461886 - DNA, 15 bp, Homo sapiens
tgtccttcacatcat

SEQ ID NO: 1461887 - DNA, 15 bp, Homo sapiens
gtgtccttcacatca

SEQ ID NO: 1461888 - DNA, 15 bp, Homo sapiens
agtgtccttcacatc

SEQ ID NO: 1461889 - DNA, 15 bp, Homo sapiens
gagtgtccttcacat

SEQ ID NO: 1461890 - DNA, 15 bp, Homo sapiens
agagtgtccttcaca

SEQ ID NO: 1461891 - DNA, 15 bp, Homo sapiens
aagagtgtccttcac

SEQ ID NO: 1461892 - DNA, 15 bp, Homo sapiens
gaagagtgtccttca

SEQ ID NO: 1461893 - DNA, 15 bp, Homo sapiens
tgaagagtgtccttc

SEQ ID NO: 1461894 - DNA, 15 bp, Homo sapiens
ctgaagagtgtcctt

SEQ ID NO: 1461895 - DNA, 15 bp, Homo sapiens
gctgaagagtgtcct

SEQ ID NO: 1461896 - DNA, 15 bp, Homo sapiens
agctgaagagtgtcc

SEQ ID NO: 1461897 - DNA, 15 bp, Homo sapiens
aagctgaagagtgtc

SEQ ID NO: 1461898 - DNA, 15 bp, Homo sapiens
taagctgaagagtgt

SEQ ID NO: 1461899 - DNA, 15 bp, Homo sapiens
ctaagctgaagagtg

SEQ ID NO: 1461900 - DNA, 15 bp, Homo sapiens
actaagctgaagagt

SEQ ID NO: 1461901 - DNA, 15 bp, Homo sapiens
cactaagctgaagag

SEQ ID NO: 1461902 - DNA, 15 bp, Homo sapiens
tcactaagctgaaga

SEQ ID NO: 1461903 - DNA, 15 bp, Homo sapiens
ttcactaagctgaag

SEQ ID NO: 1461904 - DNA, 15 bp, Homo sapiens
tttcactaagctgaa

SEQ ID NO: 1461905 - DNA, 15 bp, Homo sapiens
gtttcactaagctga

SEQ ID NO: 1461906 - DNA, 15 bp, Homo sapiens
cgtttcactaagctg

SEQ ID NO: 1461907 - DNA, 15 bp, Homo sapiens
gcgtttcactaagct

SEQ ID NO: 1461908 - DNA, 15 bp, Homo sapiens
agcgtttcactaagc

SEQ ID NO: 1461909 - DNA, 15 bp, Homo sapiens
cagcgtttcactaag

SEQ ID NO: 1461910 - DNA, 15 bp, Homo sapiens
acagcgtttcactaa

SEQ ID NO: 1461911 - DNA, 15 bp, Homo sapiens
aacagcgtttcacta

SEQ ID NO: 1461912 - DNA, 15 bp, Homo sapiens
aaacagcgtttcact

SEQ ID NO: 1461913 - DNA, 15 bp, Homo sapiens
aaaacagcgtttcac

SEQ ID NO: 1461914 - DNA, 15 bp, Homo sapiens
gaaaacagcgtttca

SEQ ID NO: 1461915 - DNA, 15 bp, Homo sapiens
tgaaaacagcgtttc

SEQ ID NO: 1461916 - DNA, 15 bp, Homo sapiens
atgaaaacagcgttt

SEQ ID NO: 1461917 - DNA, 15 bp, Homo sapiens
aatgaaaacagcgtt

SEQ ID NO: 1461918 - DNA, 15 bp, Homo sapiens
aaatgaaaacagcgt

SEQ ID NO: 1461919 - DNA, 15 bp, Homo sapiens
aaaatgaaaacagcg

SEQ ID NO: 1461920 - DNA, 15 bp, Homo sapiens
aaaaatgaaaacagc

SEQ ID NO: 1461921 - DNA, 15 bp, Homo sapiens
aaaaaatgaaaacag

SEQ ID NO: 1461922 - DNA, 15 bp, Homo sapiens
aaaaaaaaatgaaaa

SEQ ID NO: 1461923 - DNA, 15 bp, Homo sapiens
aaaaaaaaaatgaaa

SEQ ID NO: 1461924 - DNA, 15 bp, Homo sapiens
aaaaaaaaaaatgaa

SEQ ID NO: 1461925 - DNA, 15 bp, Homo sapiens
aaaaaaaaaaaatga

SEQ ID NO: 1461926 - DNA, 15 bp, Homo sapiens
aaaaaaaaaaaaatg

SEQ ID NO: 1461927 - DNA, 15 bp, Homo sapiens
cctacaaaaaaaaaa

SEQ ID NO: 1461928 - DNA, 15 bp, Homo sapiens
acctacaaaaaaaaa

SEQ ID NO: 1461929 - DNA, 15 bp, Homo sapiens
gacctacaaaaaaaa

SEQ ID NO: 1461930 - DNA, 15 bp, Homo sapiens
tgacctacaaaaaaa

SEQ ID NO: 1461931 - DNA, 15 bp, Homo sapiens
ctgacctacaaaaaa

SEQ ID NO: 1461932 - DNA, 15 bp, Homo sapiens
tctgacctacaaaaa

SEQ ID NO: 1461933 - DNA, 15 bp, Homo sapiens
ttctgacctacaaaa

SEQ ID NO: 1461934 - DNA, 15 bp, Homo sapiens
tttctgacctacaaa

SEQ ID NO: 1461935 - DNA, 15 bp, Homo sapiens
ttttctgacctacaa

SEQ ID NO: 1461936 - DNA, 15 bp, Homo sapiens
tttttctgacctaca

SEQ ID NO: 1461937 - DNA, 15 bp, Homo sapiens
ttttttctgacctac

SEQ ID NO: 1461938 - DNA, 15 bp, Homo sapiens
tttttttctgaccta

SEQ ID NO: 1461939 - DNA, 15 bp, Homo sapiens
gtttttttctgacct

SEQ ID NO: 1461940 - DNA, 15 bp, Homo sapiens
tgtttttttctgacc

SEQ ID NO: 1461941 - DNA, 15 bp, Homo sapiens
ttgtttttttctgac

SEQ ID NO: 1461942 - DNA, 15 bp, Homo sapiens
gttgtttttttctga

SEQ ID NO: 1461943 - DNA, 15 bp, Homo sapiens
tgttgtttttttctg

SEQ ID NO: 1461944 - DNA, 15 bp, Homo sapiens
ttgttgtttttttct

SEQ ID NO: 1461945 - DNA, 15 bp, Homo sapiens
tttgttgtttttttc

SEQ ID NO: 1461946 - DNA, 15 bp, Homo sapiens
ttttgttgttttttt

SEQ ID NO: 1461947 - DNA, 15 bp, Homo sapiens
attttgttgtttttt

SEQ ID NO: 1461948 - DNA, 15 bp, Homo sapiens
gattttgttgttttt

SEQ ID NO: 1461949 - DNA, 15 bp, Homo sapiens
tgattttgttgtttt

SEQ ID NO: 1461950 - DNA, 15 bp, Homo sapiens
ctgattttgttgttt

SEQ ID NO: 1461951 - DNA, 15 bp, Homo sapiens
gaactgattttgttg

SEQ ID NO: 1461952 - DNA, 15 bp, Homo sapiens
tgaactgattttgtt

SEQ ID NO: 1461953 - DNA, 15 bp, Homo sapiens
ttgaactgattttgt

SEQ ID NO: 1461954 - DNA, 15 bp, Homo sapiens
cttgaactgattttg

SEQ ID NO: 1461955 - DNA, 15 bp, Homo sapiens
gcttgaactgatttt

SEQ ID NO: 1461956 - DNA, 15 bp, Homo sapiens
tgcttgaactgattt

SEQ ID NO: 1461957 - DNA, 15 bp, Homo sapiens
atgcttgaactgatt

SEQ ID NO: 1461958 - DNA, 15 bp, Homo sapiens
aatgcttgaactgat

SEQ ID NO: 1461959 - DNA, 15 bp, Homo sapiens
aaatgcttgaactga

SEQ ID NO: 1461960 - DNA, 15 bp, Homo sapiens
aaaatgcttgaactg

SEQ ID NO: 1461961 - DNA, 15 bp, Homo sapiens
aaaaatgcttgaact

SEQ ID NO: 1461962 - DNA, 15 bp, Homo sapiens
aaaaaatgcttgaac

SEQ ID NO: 1461963 - DNA, 15 bp, Homo sapiens
aaaaaaatgcttgaa

SEQ ID NO: 1461964 - DNA, 15 bp, Homo sapiens
aaaaaaaatgcttga

SEQ ID NO: 1461965 - DNA, 15 bp, Homo sapiens
aaaaaaaaatgcttg

SEQ ID NO: 1461966 - DNA, 15 bp, Homo sapiens
gaaaaaaaaatgctt

SEQ ID NO: 1461967 - DNA, 15 bp, Homo sapiens
agaaaaaaaaatgct

SEQ ID NO: 1461968 - DNA, 15 bp, Homo sapiens
aagaaaaaaaaatgc

SEQ ID NO: 1461969 - DNA, 15 bp, Homo sapiens
gacaaagaaaaaaaa

SEQ ID NO: 1461970 - DNA, 15 bp, Homo sapiens
aggacaaagaaaaaa

SEQ ID NO: 1461971 - DNA, 15 bp, Homo sapiens
aaggacaaagaaaaa

SEQ ID NO: 1461972 - DNA, 15 bp, Homo sapiens
caaggacaaagaaaa

SEQ ID NO: 1461973 - DNA, 15 bp, Homo sapiens
gcaaggacaaagaaa

SEQ ID NO: 1461974 - DNA, 15 bp, Homo sapiens
ggcaaggacaaagaa

SEQ ID NO: 1461975 - DNA, 15 bp, Homo sapiens
aggcaaggacaaaga

SEQ ID NO: 1461976 - DNA, 15 bp, Homo sapiens
aaggcaaggacaaag

SEQ ID NO: 1461977 - DNA, 15 bp, Homo sapiens
caaggcaaggacaaa

SEQ ID NO: 1461978 - DNA, 15 bp, Homo sapiens
tcaaggcaaggacaa

SEQ ID NO: 1461979 - DNA, 15 bp, Homo sapiens
atcaaggcaaggaca

SEQ ID NO: 1461980 - DNA, 15 bp, Homo sapiens
catcaaggcaaggac

SEQ ID NO: 1461981 - DNA, 15 bp, Homo sapiens
acatcaaggcaagga

SEQ ID NO: 1461982 - DNA, 15 bp, Homo sapiens
aacatcaaggcaagg

SEQ ID NO: 1461983 - DNA, 15 bp, Homo sapiens
taacatcaaggcaag

SEQ ID NO: 1461984 - DNA, 15 bp, Homo sapiens
ataacatcaaggcaa

SEQ ID NO: 1461985 - DNA, 15 bp, Homo sapiens
cataacatcaaggca

SEQ ID NO: 1461986 - DNA, 15 bp, Homo sapiens
tcataacatcaaggc

SEQ ID NO: 1461987 - DNA, 15 bp, Homo sapiens
ctcataacatcaagg

SEQ ID NO: 1461988 - DNA, 15 bp, Homo sapiens
actcataacatcaag

SEQ ID NO: 1461989 - DNA, 15 bp, Homo sapiens
tactcataacatcaa

SEQ ID NO: 1461990 - DNA, 15 bp, Homo sapiens
atactcataacatca

SEQ ID NO: 1461991 - DNA, 15 bp, Homo sapiens
aatactcataacatc

SEQ ID NO: 1461992 - DNA, 15 bp, Homo sapiens
taatactcataacat

SEQ ID NO: 1461993 - DNA, 15 bp, Homo sapiens
ttaatactcataaca

SEQ ID NO: 1461994 - DNA, 15 bp, Homo sapiens
tttaatactcataac

SEQ ID NO: 1461995 - DNA, 15 bp, Homo sapiens
ttttaatactcataa

SEQ ID NO: 1461996 - DNA, 15 bp, Homo sapiens
gttttaatactcata

SEQ ID NO: 1461997 - DNA, 15 bp, Homo sapiens
ggttttaatactcat

SEQ ID NO: 1461998 - DNA, 15 bp, Homo sapiens
tggttttaatactca

SEQ ID NO: 1461999 - DNA, 15 bp, Homo sapiens
ctggttttaatactc

SEQ ID NO: 1462000 - DNA, 15 bp, Homo sapiens
cctggttttaatact

SEQ ID NO: 1462001 - DNA, 15 bp, Homo sapiens
tcctggttttaatac

SEQ ID NO: 1462002 - DNA, 15 bp, Homo sapiens
ctcctggttttaata

SEQ ID NO: 1462003 - DNA, 15 bp, Homo sapiens
cctcctggttttaat

SEQ ID NO: 1462004 - DNA, 15 bp, Homo sapiens
tcctcctggttttaa

SEQ ID NO: 1462005 - DNA, 15 bp, Homo sapiens
atcctcctggtttta

SEQ ID NO: 1462006 - DNA, 15 bp, Homo sapiens
aatcctcctggtttt

SEQ ID NO: 1462007 - DNA, 15 bp, Homo sapiens
caatcctcctggttt

SEQ ID NO: 1462008 - DNA, 15 bp, Homo sapiens
gcaatcctcctggtt

SEQ ID NO: 1462009 - DNA, 15 bp, Homo sapiens
agcaatcctcctggt

SEQ ID NO: 1462010 - DNA, 15 bp, Homo sapiens
cagcaatcctcctgg

SEQ ID NO: 1462011 - DNA, 15 bp, Homo sapiens
gcagcaatcctcctg

SEQ ID NO: 1462012 - DNA, 15 bp, Homo sapiens
ggcagcaatcctcct

SEQ ID NO: 1462013 - DNA, 15 bp, Homo sapiens
tggcagcaatcctcc

SEQ ID NO: 1462014 - DNA, 15 bp, Homo sapiens
atggcagcaatcctc

SEQ ID NO: 1462015 - DNA, 15 bp, Homo sapiens
aatggcagcaatcct

SEQ ID NO: 1462016 - DNA, 15 bp, Homo sapiens
caatggcagcaatcc

SEQ ID NO: 1462017 - DNA, 15 bp, Homo sapiens
acaatggcagcaatc

SEQ ID NO: 1462018 - DNA, 15 bp, Homo sapiens
cacaatggcagcaat

SEQ ID NO: 1462019 - DNA, 15 bp, Homo sapiens
gcacaatggcagcaa

SEQ ID NO: 1462020 - DNA, 15 bp, Homo sapiens
tgcacaatggcagca

SEQ ID NO: 1462021 - DNA, 15 bp, Homo sapiens
ctgcacaatggcagc

SEQ ID NO: 1462022 - DNA, 15 bp, Homo sapiens
actgcacaatggcag

SEQ ID NO: 1462023 - DNA, 15 bp, Homo sapiens
aactgcacaatggca

SEQ ID NO: 1462024 - DNA, 15 bp, Homo sapiens
aaactgcacaatggc

SEQ ID NO: 1462025 - DNA, 15 bp, Homo sapiens
caaactgcacaatgg

SEQ ID NO: 1462026 - DNA, 15 bp, Homo sapiens
gcaaactgcacaatg

SEQ ID NO: 1462027 - DNA, 15 bp, Homo sapiens
agcaaactgcacaat

SEQ ID NO: 1462028 - DNA, 15 bp, Homo sapiens
aagcaaactgcacaa

SEQ ID NO: 1462029 - DNA, 15 bp, Homo sapiens
taagcaaactgcaca

SEQ ID NO: 1462030 - DNA, 15 bp, Homo sapiens
ctaagcaaactgcac

SEQ ID NO: 1462031 - DNA, 15 bp, Homo sapiens
tctaagcaaactgca

SEQ ID NO: 1462032 - DNA, 15 bp, Homo sapiens
gtctaagcaaactgc

SEQ ID NO: 1462033 - DNA, 15 bp, Homo sapiens
tgtctaagcaaactg

SEQ ID NO: 1462034 - DNA, 15 bp, Homo sapiens
ttgtctaagcaaact

SEQ ID NO: 1462035 - DNA, 15 bp, Homo sapiens
tttgtctaagcaaac

SEQ ID NO: 1462036 - DNA, 15 bp, Homo sapiens
gtttgtctaagcaaa

SEQ ID NO: 1462037 - DNA, 15 bp, Homo sapiens
ggtttgtctaagcaa

SEQ ID NO: 1462038 - DNA, 15 bp, Homo sapiens
aggtttgtctaagca

SEQ ID NO: 1462039 - DNA, 15 bp, Homo sapiens
caggtttgtctaagc

SEQ ID NO: 1462040 - DNA, 15 bp, Homo sapiens
ccaggtttgtctaag

SEQ ID NO: 1462041 - DNA, 15 bp, Homo sapiens
tccaggtttgtctaa

SEQ ID NO: 1462042 - DNA, 15 bp, Homo sapiens
ctccaggtttgtcta

SEQ ID NO: 1462043 - DNA, 15 bp, Homo sapiens
tctccaggtttgtct

SEQ ID NO: 1462044 - DNA, 15 bp, Homo sapiens
atctccaggtttgtc

SEQ ID NO: 1462045 - DNA, 15 bp, Homo sapiens
catctccaggtttgt

SEQ ID NO: 1462046 - DNA, 15 bp, Homo sapiens
gcatctccaggtttg

SEQ ID NO: 1462047 - DNA, 15 bp, Homo sapiens
tgcatctccaggttt

SEQ ID NO: 1462048 - DNA, 15 bp, Homo sapiens
ttgcatctccaggtt

SEQ ID NO: 1462049 - DNA, 15 bp, Homo sapiens
gttgcatctccaggt

SEQ ID NO: 1462050 - DNA, 15 bp, Homo sapiens
ggttgcatctccagg

SEQ ID NO: 1462051 - DNA, 15 bp, Homo sapiens
gggttgcatctccag

SEQ ID NO: 1462052 - DNA, 15 bp, Homo sapiens
tgggttgcatctcca

SEQ ID NO: 1462053 - DNA, 15 bp, Homo sapiens
ctgggttgcatctcc

SEQ ID NO: 1462054 - DNA, 15 bp, Homo sapiens
gctgggttgcatctc

SEQ ID NO: 1462055 - DNA, 15 bp, Homo sapiens
agctgggttgcatct

SEQ ID NO: 1462056 - DNA, 15 bp, Homo sapiens
gagctgggttgcatc

SEQ ID NO: 1462057 - DNA, 15 bp, Homo sapiens
tgagctgggttgcat

SEQ ID NO: 1462058 - DNA, 15 bp, Homo sapiens
gtgagctgggttgca

SEQ ID NO: 1462059 - DNA, 15 bp, Homo sapiens
tgtgagctgggttgc

SEQ ID NO: 1462060 - DNA, 15 bp, Homo sapiens
atgtgagctgggttg

SEQ ID NO: 1462061 - DNA, 15 bp, Homo sapiens
gatgtgagctgggtt

SEQ ID NO: 1462062 - DNA, 15 bp, Homo sapiens
tgatgtgagctgggt

SEQ ID NO: 1462063 - DNA, 15 bp, Homo sapiens
atgatgtgagctggg

SEQ ID NO: 1462064 - DNA, 15 bp, Homo sapiens
aatgatgtgagctgg

SEQ ID NO: 1462065 - DNA, 15 bp, Homo sapiens
caatgatgtgagctg

SEQ ID NO: 1462066 - DNA, 15 bp, Homo sapiens
gcaatgatgtgagct

SEQ ID NO: 1462067 - DNA, 15 bp, Homo sapiens
agcaatgatgtgagc

SEQ ID NO: 1462068 - DNA, 15 bp, Homo sapiens
tagcaatgatgtgag

SEQ ID NO: 1462069 - DNA, 15 bp, Homo sapiens
gtagcaatgatgtga

SEQ ID NO: 1462070 - DNA, 15 bp, Homo sapiens
agtagcaatgatgtg

SEQ ID NO: 1462071 - DNA, 15 bp, Homo sapiens
cagtagcaatgatgt

SEQ ID NO: 1462072 - DNA, 15 bp, Homo sapiens
tcagtagcaatgatg

SEQ ID NO: 1462073 - DNA, 15 bp, Homo sapiens
atcagtagcaatgat

SEQ ID NO: 1462074 - DNA, 15 bp, Homo sapiens
catcagtagcaatga

SEQ ID NO: 1462075 - DNA, 15 bp, Homo sapiens
tcatcagtagcaatg

SEQ ID NO: 1462076 - DNA, 15 bp, Homo sapiens
ctcatcagtagcaat

SEQ ID NO: 1462077 - DNA, 15 bp, Homo sapiens
gctcatcagtagcaa

SEQ ID NO: 1462078 - DNA, 15 bp, Homo sapiens
agctcatcagtagca

SEQ ID NO: 1462079 - DNA, 15 bp, Homo sapiens
aagctcatcagtagc

SEQ ID NO: 1462080 - DNA, 15 bp, Homo sapiens
aaagctcatcagtag

SEQ ID NO: 1462081 - DNA, 15 bp, Homo sapiens
gaaagctcatcagta

SEQ ID NO: 1462082 - DNA, 15 bp, Homo sapiens
agaaagctcatcagt

SEQ ID NO: 1462083 - DNA, 15 bp, Homo sapiens
cagaaagctcatcag

SEQ ID NO: 1462084 - DNA, 15 bp, Homo sapiens
acagaaagctcatca

SEQ ID NO: 1462085 - DNA, 15 bp, Homo sapiens
cacagaaagctcatc

SEQ ID NO: 1462086 - DNA, 15 bp, Homo sapiens
gcacagaaagctcat

SEQ ID NO: 1462087 - DNA, 15 bp, Homo sapiens
ggcacagaaagctca

SEQ ID NO: 1462088 - DNA, 15 bp, Homo sapiens
aggcacagaaagctc

SEQ ID NO: 1462089 - DNA, 15 bp, Homo sapiens
aaggcacagaaagct

SEQ ID NO: 1462090 - DNA, 15 bp, Homo sapiens
aaaggcacagaaagc

SEQ ID NO: 1462091 - DNA, 15 bp, Homo sapiens
taaaggcacagaaag

SEQ ID NO: 1462092 - DNA, 15 bp, Homo sapiens
ataaaggcacagaaa

SEQ ID NO: 1462093 - DNA, 15 bp, Homo sapiens
gataaaggcacagaa

SEQ ID NO: 1462094 - DNA, 15 bp, Homo sapiens
tgataaaggcacaga

SEQ ID NO: 1462095 - DNA, 15 bp, Homo sapiens
ttgataaaggcacag

SEQ ID NO: 1462096 - DNA, 15 bp, Homo sapiens
tttgataaaggcaca

SEQ ID NO: 1462097 - DNA, 15 bp, Homo sapiens
ttttgataaaggcac

SEQ ID NO: 1462098 - DNA, 15 bp, Homo sapiens
cttttgataaaggca

SEQ ID NO: 1462099 - DNA, 15 bp, Homo sapiens
acttttgataaaggc

SEQ ID NO: 1462100 - DNA, 15 bp, Homo sapiens
aacttttgataaagg

SEQ ID NO: 1462101 - DNA, 15 bp, Homo sapiens
caacttttgataaag

SEQ ID NO: 1462102 - DNA, 15 bp, Homo sapiens
tcaacttttgataaa

SEQ ID NO: 1462103 - DNA, 15 bp, Homo sapiens
atcaacttttgataa

SEQ ID NO: 1462104 - DNA, 15 bp, Homo sapiens
aatcaacttttgata

SEQ ID NO: 1462105 - DNA, 15 bp, Homo sapiens
caatcaacttttgat

SEQ ID NO: 1462106 - DNA, 15 bp, Homo sapiens
tcaatcaacttttga

SEQ ID NO: 1462107 - DNA, 15 bp, Homo sapiens
ctcaatcaacttttg

SEQ ID NO: 1462108 - DNA, 15 bp, Homo sapiens
tctcaatcaactttt

SEQ ID NO: 1462109 - DNA, 15 bp, Homo sapiens
ttctcaatcaacttt

SEQ ID NO: 1462110 - DNA, 15 bp, Homo sapiens
cttctcaatcaactt

SEQ ID NO: 1462111 - DNA, 15 bp, Homo sapiens
tcttctcaatcaact

SEQ ID NO: 1462112 - DNA, 15 bp, Homo sapiens
gtcttctcaatcaac

SEQ ID NO: 1462113 - DNA, 15 bp, Homo sapiens
ggtcttctcaatcaa

SEQ ID NO: 1462114 - DNA, 15 bp, Homo sapiens
tggtcttctcaatca

SEQ ID NO: 1462115 - DNA, 15 bp, Homo sapiens
atggtcttctcaatc

SEQ ID NO: 1462116 - DNA, 15 bp, Homo sapiens
tatggtcttctcaat

SEQ ID NO: 1462117 - DNA, 15 bp, Homo sapiens
atatggtcttctcaa

SEQ ID NO: 1462118 - DNA, 15 bp, Homo sapiens
aatatggtcttctca

SEQ ID NO: 1462119 - DNA, 15 bp, Homo sapiens
aaatatggtcttctc

SEQ ID NO: 1462120 - DNA, 15 bp, Homo sapiens
gaaatatggtcttct

SEQ ID NO: 1462121 - DNA, 15 bp, Homo sapiens
agaaatatggtcttc

SEQ ID NO: 1462122 - DNA, 15 bp, Homo sapiens
aagaaatatggtctt

SEQ ID NO: 1462123 - DNA, 15 bp, Homo sapiens
aaagaaatatggtct

SEQ ID NO: 1462124 - DNA, 15 bp, Homo sapiens
caaagaaatatggtc

SEQ ID NO: 1462125 - DNA, 15 bp, Homo sapiens
acaaagaaatatggt

SEQ ID NO: 1462126 - DNA, 15 bp, Homo sapiens
tacaaagaaatatgg

SEQ ID NO: 1462127 - DNA, 15 bp, Homo sapiens
atacaaagaaatatg

SEQ ID NO: 1462128 - DNA, 15 bp, Homo sapiens
gatacaaagaaatat

SEQ ID NO: 1462129 - DNA, 15 bp, Homo sapiens
agatacaaagaaata

SEQ ID NO: 1462130 - DNA, 15 bp, Homo sapiens
aagatacaaagaaat

SEQ ID NO: 1462131 - DNA, 15 bp, Homo sapiens
aaagatacaaagaaa

SEQ ID NO: 1462132 - DNA, 15 bp, Homo sapiens
aaaagatacaaagaa

SEQ ID NO: 1462133 - DNA, 15 bp, Homo sapiens
aaaaagatacaaaga

SEQ ID NO: 1462134 - DNA, 15 bp, Homo sapiens
taaaaagatacaaag

SEQ ID NO: 1462135 - DNA, 15 bp, Homo sapiens
ataaaaagatacaaa

SEQ ID NO: 1462136 - DNA, 15 bp, Homo sapiens
tataaaaagatacaa

SEQ ID NO: 1462137 - DNA, 15 bp, Homo sapiens
ttataaaaagataca

SEQ ID NO: 1462138 - DNA, 15 bp, Homo sapiens
tttataaaaagatac

SEQ ID NO: 1462139 - DNA, 15 bp, Homo sapiens
gtttataaaaagata

SEQ ID NO: 1462140 - DNA, 15 bp, Homo sapiens
agtttataaaaagat

SEQ ID NO: 1462141 - DNA, 15 bp, Homo sapiens
gagtttataaaaaga

SEQ ID NO: 1462142 - DNA, 15 bp, Homo sapiens
tgagtttataaaaag

SEQ ID NO: 1462143 - DNA, 15 bp, Homo sapiens
ttgagtttataaaaa

SEQ ID NO: 1462144 - DNA, 15 bp, Homo sapiens
tttgagtttataaaa

SEQ ID NO: 1462145 - DNA, 15 bp, Homo sapiens
atttgagtttataaa

SEQ ID NO: 1462146 - DNA, 15 bp, Homo sapiens
aatttgagtttataa

SEQ ID NO: 1462147 - DNA, 15 bp, Homo sapiens
gaatttgagtttata

SEQ ID NO: 1462148 - DNA, 15 bp, Homo sapiens
ggaatttgagtttat

SEQ ID NO: 1462149 - DNA, 15 bp, Homo sapiens
tggaatttgagttta

SEQ ID NO: 1462150 - DNA, 15 bp, Homo sapiens
ttggaatttgagttt

SEQ ID NO: 1462151 - DNA, 15 bp, Homo sapiens
cttggaatttgagtt

SEQ ID NO: 1462152 - DNA, 15 bp, Homo sapiens
acttggaatttgagt

SEQ ID NO: 1462153 - DNA, 15 bp, Homo sapiens
tacttggaatttgag

SEQ ID NO: 1462154 - DNA, 15 bp, Homo sapiens
atacttggaatttga

SEQ ID NO: 1462155 - DNA, 15 bp, Homo sapiens
gatacttggaatttg

SEQ ID NO: 1462156 - DNA, 15 bp, Homo sapiens
tgatacttggaattt

SEQ ID NO: 1462157 - DNA, 15 bp, Homo sapiens
ttgatacttggaatt

SEQ ID NO: 1462158 - DNA, 15 bp, Homo sapiens
tttgatacttggaat

SEQ ID NO: 1462159 - DNA, 15 bp, Homo sapiens
atttgatacttggaa

SEQ ID NO: 1462160 - DNA, 15 bp, Homo sapiens
gatttgatacttgga

SEQ ID NO: 1462161 - DNA, 15 bp, Homo sapiens
cgatttgatacttgg

SEQ ID NO: 1462162 - DNA, 15 bp, Homo sapiens
gcgatttgatacttg

SEQ ID NO: 1462163 - DNA, 15 bp, Homo sapiens
tgcgatttgatactt

SEQ ID NO: 1462164 - DNA, 15 bp, Homo sapiens
ctgcgatttgatact

SEQ ID NO: 1462165 - DNA, 15 bp, Homo sapiens
cctgcgatttgatac

SEQ ID NO: 1462166 - DNA, 15 bp, Homo sapiens
acctgcgatttgata

SEQ ID NO: 1462167 - DNA, 15 bp, Homo sapiens
gacctgcgatttgat

SEQ ID NO: 1462168 - DNA, 15 bp, Homo sapiens
agacctgcgatttga

SEQ ID NO: 1462169 - DNA, 15 bp, Homo sapiens
gagacctgcgatttg

SEQ ID NO: 1462170 - DNA, 15 bp, Homo sapiens
tgagacctgcgattt

SEQ ID NO: 1462171 - DNA, 15 bp, Homo sapiens
ctgagacctgcgatt

SEQ ID NO: 1462172 - DNA, 15 bp, Homo sapiens
actgagacctgcgat

SEQ ID NO: 1462173 - DNA, 15 bp, Homo sapiens
cactgagacctgcga

SEQ ID NO: 1462174 - DNA, 15 bp, Homo sapiens
tcactgagacctgcg

SEQ ID NO: 1462175 - DNA, 15 bp, Homo sapiens
ttcactgagacctgc

SEQ ID NO: 1462176 - DNA, 15 bp, Homo sapiens
gttcactgagacctg

SEQ ID NO: 1462177 - DNA, 15 bp, Homo sapiens
tgttcactgagacct

SEQ ID NO: 1462178 - DNA, 15 bp, Homo sapiens
atgttcactgagacc

SEQ ID NO: 1462179 - DNA, 15 bp, Homo sapiens
gatgttcactgagac

SEQ ID NO: 1462180 - DNA, 15 bp, Homo sapiens
tgatgttcactgaga

SEQ ID NO: 1462181 - DNA, 15 bp, Homo sapiens
ttgatgttcactgag

SEQ ID NO: 1462182 - DNA, 15 bp, Homo sapiens
tttgatgttcactga

SEQ ID NO: 1462183 - DNA, 15 bp, Homo sapiens
gtttgatgttcactg

SEQ ID NO: 1462184 - DNA, 15 bp, Homo sapiens
ggtttgatgttcact

SEQ ID NO: 1462185 - DNA, 15 bp, Homo sapiens
aggtttgatgttcac

SEQ ID NO: 1462186 - DNA, 15 bp, Homo sapiens
taggtttgatgttca

SEQ ID NO: 1462187 - DNA, 15 bp, Homo sapiens
ataggtttgatgttc

SEQ ID NO: 1462188 - DNA, 15 bp, Homo sapiens
aataggtttgatgtt

SEQ ID NO: 1462189 - DNA, 15 bp, Homo sapiens
aaataggtttgatgt

SEQ ID NO: 1462190 - DNA, 15 bp, Homo sapiens
taaataggtttgatg

SEQ ID NO: 1462191 - DNA, 15 bp, Homo sapiens
gtaaataggtttgat

SEQ ID NO: 1462192 - DNA, 15 bp, Homo sapiens
agtaaataggtttga

SEQ ID NO: 1462193 - DNA, 15 bp, Homo sapiens
tagtaaataggtttg

SEQ ID NO: 1462194 - DNA, 15 bp, Homo sapiens
gtagtaaataggttt

SEQ ID NO: 1462195 - DNA, 15 bp, Homo sapiens
tgtagtaaataggtt

SEQ ID NO: 1462196 - DNA, 15 bp, Homo sapiens
atgtagtaaataggt

SEQ ID NO: 1462197 - DNA, 15 bp, Homo sapiens
tatgtagtaaatagg

SEQ ID NO: 1462198 - DNA, 15 bp, Homo sapiens
ctatgtagtaaatag

SEQ ID NO: 1462199 - DNA, 15 bp, Homo sapiens
tctatgtagtaaata

SEQ ID NO: 1462200 - DNA, 15 bp, Homo sapiens
ttctatgtagtaaat

SEQ ID NO: 1462201 - DNA, 15 bp, Homo sapiens
attctatgtagtaaa

SEQ ID NO: 1462202 - DNA, 15 bp, Homo sapiens
gattctatgtagtaa

SEQ ID NO: 1462203 - DNA, 15 bp, Homo sapiens
tgattctatgtagta

SEQ ID NO: 1462204 - DNA, 15 bp, Homo sapiens
ttgattctatgtagt

SEQ ID NO: 1462205 - DNA, 15 bp, Homo sapiens
tttgattctatgtag

SEQ ID NO: 1462206 - DNA, 15 bp, Homo sapiens
gtttgattctatgta

SEQ ID NO: 1462207 - DNA, 15 bp, Homo sapiens
ggtttgattctatgt

SEQ ID NO: 1462208 - DNA, 15 bp, Homo sapiens
aggtttgattctatg

SEQ ID NO: 1462209 - DNA, 15 bp, Homo sapiens
aaggtttgattctat

SEQ ID NO: 1462210 - DNA, 15 bp, Homo sapiens
aaaggtttgattcta

SEQ ID NO: 1462211 - DNA, 15 bp, Homo sapiens
caaaggtttgattct

SEQ ID NO: 1462212 - DNA, 15 bp, Homo sapiens
acaaaggtttgattc

SEQ ID NO: 1462213 - DNA, 15 bp, Homo sapiens
aacaaaggtttgatt

SEQ ID NO: 1462214 - DNA, 15 bp, Homo sapiens
aaacaaaggtttgat

SEQ ID NO: 1462215 - DNA, 15 bp, Homo sapiens
taaacaaaggtttga

SEQ ID NO: 1462216 - DNA, 15 bp, Homo sapiens
ctaaacaaaggtttg

SEQ ID NO: 1462217 - DNA, 15 bp, Homo sapiens
cctaaacaaaggttt

SEQ ID NO: 1462218 - DNA, 15 bp, Homo sapiens
acctaaacaaaggtt

SEQ ID NO: 1462219 - DNA, 15 bp, Homo sapiens
cacctaaacaaaggt

SEQ ID NO: 1462220 - DNA, 15 bp, Homo sapiens
tcacctaaacaaagg

SEQ ID NO: 1462221 - DNA, 15 bp, Homo sapiens
ctcacctaaacaaag

SEQ ID NO: 1462222 - DNA, 15 bp, Homo sapiens
tctcacctaaacaaa

SEQ ID NO: 1462223 - DNA, 15 bp, Homo sapiens
atctcacctaaacaa

SEQ ID NO: 1462224 - DNA, 15 bp, Homo sapiens
catctcacctaaaca

SEQ ID NO: 1462225 - DNA, 15 bp, Homo sapiens
acatctcacctaaac

SEQ ID NO: 1462226 - DNA, 15 bp, Homo sapiens
tacatctcacctaaa

SEQ ID NO: 1462227 - DNA, 15 bp, Homo sapiens
gtacatctcacctaa

SEQ ID NO: 1462228 - DNA, 15 bp, Homo sapiens
tgtacatctcaccta

SEQ ID NO: 1462229 - DNA, 15 bp, Homo sapiens
atgtacatctcacct

SEQ ID NO: 1462230 - DNA, 15 bp, Homo sapiens
gatgtacatctcacc

SEQ ID NO: 1462231 - DNA, 15 bp, Homo sapiens
cgatgtacatctcac

SEQ ID NO: 1462232 - DNA, 15 bp, Homo sapiens
acgatgtacatctca

SEQ ID NO: 1462233 - DNA, 15 bp, Homo sapiens
aacgatgtacatctc

SEQ ID NO: 1462234 - DNA, 15 bp, Homo sapiens
taacgatgtacatct

SEQ ID NO: 1462235 - DNA, 15 bp, Homo sapiens
ctaacgatgtacatc

SEQ ID NO: 1462236 - DNA, 15 bp, Homo sapiens
actaacgatgtacat

SEQ ID NO: 1462237 - DNA, 15 bp, Homo sapiens
cactaacgatgtaca

SEQ ID NO: 1462238 - DNA, 15 bp, Homo sapiens
ccactaacgatgtac

SEQ ID NO: 1462239 - DNA, 15 bp, Homo sapiens
tccactaacgatgta

SEQ ID NO: 1462240 - DNA, 15 bp, Homo sapiens
ctccactaacgatgt

SEQ ID NO: 1462241 - DNA, 15 bp, Homo sapiens
cctccactaacgatg

SEQ ID NO: 1462242 - DNA, 15 bp, Homo sapiens
tcctccactaacgat

SEQ ID NO: 1462243 - DNA, 15 bp, Homo sapiens
ttcctccactaacga

SEQ ID NO: 1462244 - DNA, 15 bp, Homo sapiens
tttcctccactaacg

SEQ ID NO: 1462245 - DNA, 15 bp, Homo sapiens
ttttcctccactaac

SEQ ID NO: 1462246 - DNA, 15 bp, Homo sapiens
tttttcctccactaa

SEQ ID NO: 1462247 - DNA, 15 bp, Homo sapiens
gtttttcctccacta

SEQ ID NO: 1462248 - DNA, 15 bp, Homo sapiens
agtttttcctccact

SEQ ID NO: 1462249 - DNA, 15 bp, Homo sapiens
cagtttttcctccac

SEQ ID NO: 1462250 - DNA, 15 bp, Homo sapiens
tcagtttttcctcca

SEQ ID NO: 1462251 - DNA, 15 bp, Homo sapiens
gtcagtttttcctcc

SEQ ID NO: 1462252 - DNA, 15 bp, Homo sapiens
tgtcagtttttcctc

SEQ ID NO: 1462253 - DNA, 15 bp, Homo sapiens
ttgtcagtttttcct

SEQ ID NO: 1462254 - DNA, 15 bp, Homo sapiens
gttgtcagtttttcc

SEQ ID NO: 1462255 - DNA, 15 bp, Homo sapiens
ggttgtcagtttttc

SEQ ID NO: 1462256 - DNA, 15 bp, Homo sapiens
aggttgtcagttttt

SEQ ID NO: 1462257 - DNA, 15 bp, Homo sapiens
taggttgtcagtttt

SEQ ID NO: 1462258 - DNA, 15 bp, Homo sapiens
ttaggttgtcagttt

SEQ ID NO: 1462259 - DNA, 15 bp, Homo sapiens
attaggttgtcagtt

SEQ ID NO: 1462260 - DNA, 15 bp, Homo sapiens
aattaggttgtcagt

SEQ ID NO: 1462261 - DNA, 15 bp, Homo sapiens
aaattaggttgtcag

SEQ ID NO: 1462262 - DNA, 15 bp, Homo sapiens
gaaattaggttgtca

SEQ ID NO: 1462263 - DNA, 15 bp, Homo sapiens
tgaaattaggttgtc

SEQ ID NO: 1462264 - DNA, 15 bp, Homo sapiens
atgaaattaggttgt

SEQ ID NO: 1462265 - DNA, 15 bp, Homo sapiens
aatgaaattaggttg

SEQ ID NO: 1462266 - DNA, 15 bp, Homo sapiens
aaatgaaattaggtt

SEQ ID NO: 1462267 - DNA, 15 bp, Homo sapiens
caaatgaaattaggt

SEQ ID NO: 1462268 - DNA, 15 bp, Homo sapiens
acaaatgaaattagg

SEQ ID NO: 1462269 - DNA, 15 bp, Homo sapiens
aacaaatgaaattag

SEQ ID NO: 1462270 - DNA, 15 bp, Homo sapiens
gaaaacaaatgaaat

SEQ ID NO: 1462271 - DNA, 15 bp, Homo sapiens
agaaaacaaatgaaa

SEQ ID NO: 1462272 - DNA, 15 bp, Homo sapiens
aagaaaacaaatgaa

SEQ ID NO: 1462273 - DNA, 15 bp, Homo sapiens
gaagaaaacaaatga

SEQ ID NO: 1462274 - DNA, 15 bp, Homo sapiens
agaagaaaacaaatg

SEQ ID NO: 1462275 - DNA, 15 bp, Homo sapiens
cagaagaaaacaaat

SEQ ID NO: 1462276 - DNA, 15 bp, Homo sapiens
tcagaagaaaacaaa

SEQ ID NO: 1462277 - DNA, 15 bp, Homo sapiens
atcagaagaaaacaa

SEQ ID NO: 1462278 - DNA, 15 bp, Homo sapiens
tatcagaagaaaaca

SEQ ID NO: 1462279 - DNA, 15 bp, Homo sapiens
gtatcagaagaaaac

SEQ ID NO: 1462280 - DNA, 15 bp, Homo sapiens
agtatcagaagaaaa

SEQ ID NO: 1462281 - DNA, 15 bp, Homo sapiens
gagtatcagaagaaa

SEQ ID NO: 1462282 - DNA, 15 bp, Homo sapiens
agagtatcagaagaa

SEQ ID NO: 1462283 - DNA, 15 bp, Homo sapiens
aagagtatcagaaga

SEQ ID NO: 1462284 - DNA, 15 bp, Homo sapiens
gaagagtatcagaag

SEQ ID NO: 1462285 - DNA, 15 bp, Homo sapiens
tgaagagtatcagaa

SEQ ID NO: 1462286 - DNA, 15 bp, Homo sapiens
ctgaagagtatcaga

SEQ ID NO: 1462287 - DNA, 15 bp, Homo sapiens
tctgaagagtatcag

SEQ ID NO: 1462288 - DNA, 15 bp, Homo sapiens
gtctgaagagtatca

SEQ ID NO: 1462289 - DNA, 15 bp, Homo sapiens
tgtctgaagagtatc

SEQ ID NO: 1462290 - DNA, 15 bp, Homo sapiens
atgtctgaagagtat

SEQ ID NO: 1462291 - DNA, 15 bp, Homo sapiens
catgtctgaagagta

SEQ ID NO: 1462292 - DNA, 15 bp, Homo sapiens
gcatgtctgaagagt

SEQ ID NO: 1462293 - DNA, 15 bp, Homo sapiens
ggcatgtctgaagag

SEQ ID NO: 1462294 - DNA, 15 bp, Homo sapiens
aggcatgtctgaaga

SEQ ID NO: 1462295 - DNA, 15 bp, Homo sapiens
gaggcatgtctgaag

SEQ ID NO: 1462296 - DNA, 15 bp, Homo sapiens
agaggcatgtctgaa

SEQ ID NO: 1462297 - DNA, 15 bp, Homo sapiens
tagaggcatgtctga

SEQ ID NO: 1462298 - DNA, 15 bp, Homo sapiens
atagaggcatgtctg

SEQ ID NO: 1462299 - DNA, 15 bp, Homo sapiens
aatagaggcatgtct

SEQ ID NO: 1462300 - DNA, 15 bp, Homo sapiens
taatagaggcatgtc

SEQ ID NO: 1462301 - DNA, 15 bp, Homo sapiens
ctaatagaggcatgt

SEQ ID NO: 1462302 - DNA, 15 bp, Homo sapiens
tctaatagaggcatg

SEQ ID NO: 1462303 - DNA, 15 bp, Homo sapiens
ttctaatagaggcat

SEQ ID NO: 1462304 - DNA, 15 bp, Homo sapiens
attctaatagaggca

SEQ ID NO: 1462305 - DNA, 15 bp, Homo sapiens
tattctaatagaggc

SEQ ID NO: 1462306 - DNA, 15 bp, Homo sapiens
ttattctaatagagg

SEQ ID NO: 1462307 - DNA, 15 bp, Homo sapiens
tttattctaatagag

SEQ ID NO: 1462308 - DNA, 15 bp, Homo sapiens
ctttattctaataga

SEQ ID NO: 1462309 - DNA, 15 bp, Homo sapiens
cctttattctaatag

SEQ ID NO: 1462310 - DNA, 15 bp, Homo sapiens
acctttattctaata

SEQ ID NO: 1462311 - DNA, 15 bp, Homo sapiens
tacctttattctaat

SEQ ID NO: 1462312 - DNA, 15 bp, Homo sapiens
ttacctttattctaa

SEQ ID NO: 1462313 - DNA, 15 bp, Homo sapiens
tttacctttattcta

SEQ ID NO: 1462314 - DNA, 15 bp, Homo sapiens
gtttacctttattct

SEQ ID NO: 1462315 - DNA, 15 bp, Homo sapiens
agtttacctttattc

SEQ ID NO: 1462316 - DNA, 15 bp, Homo sapiens
cagtttacctttatt

SEQ ID NO: 1462317 - DNA, 15 bp, Homo sapiens
ccagtttacctttat

SEQ ID NO: 1462318 - DNA, 15 bp, Homo sapiens
tccagtttaccttta

SEQ ID NO: 1462319 - DNA, 15 bp, Homo sapiens
ttccagtttaccttt

SEQ ID NO: 1462320 - DNA, 15 bp, Homo sapiens
attccagtttacctt

SEQ ID NO: 1462321 - DNA, 15 bp, Homo sapiens
aattccagtttacct

SEQ ID NO: 1462322 - DNA, 15 bp, Homo sapiens
aaattccagtttacc

SEQ ID NO: 1462323 - DNA, 15 bp, Homo sapiens
taaattccagtttac

SEQ ID NO: 1462324 - DNA, 15 bp, Homo sapiens
ttaaattccagttta

SEQ ID NO: 1462325 - DNA, 15 bp, Homo sapiens
tttaaattccagttt

SEQ ID NO: 1462326 - DNA, 15 bp, Homo sapiens
ctttaaattccagtt

SEQ ID NO: 1462327 - DNA, 15 bp, Homo sapiens
tctttaaattccagt

SEQ ID NO: 1462328 - DNA, 15 bp, Homo sapiens
gtctttaaattccag

SEQ ID NO: 1462329 - DNA, 15 bp, Homo sapiens
tgtctttaaattcca

SEQ ID NO: 1462330 - DNA, 15 bp, Homo sapiens
ttgtctttaaattcc

SEQ ID NO: 1462331 - DNA, 15 bp, Homo sapiens
cttgtctttaaattc

SEQ ID NO: 1462332 - DNA, 15 bp, Homo sapiens
acttgtctttaaatt

SEQ ID NO: 1462333 - DNA, 15 bp, Homo sapiens
aacttgtctttaaat

SEQ ID NO: 1462334 - DNA, 15 bp, Homo sapiens
gaacttgtctttaaa

SEQ ID NO: 1462335 - DNA, 15 bp, Homo sapiens
ggaacttgtctttaa

SEQ ID NO: 1462336 - DNA, 15 bp, Homo sapiens
gggaacttgtcttta

SEQ ID NO: 1462337 - DNA, 15 bp, Homo sapiens
ggggaacttgtcttt

SEQ ID NO: 1462338 - DNA, 15 bp, Homo sapiens
aggggaacttgtctt

SEQ ID NO: 1462339 - DNA, 15 bp, Homo sapiens
gaggggaacttgtct

SEQ ID NO: 1462340 - DNA, 15 bp, Homo sapiens
tgaggggaacttgtc

SEQ ID NO: 1462341 - DNA, 15 bp, Homo sapiens
ctgaggggaacttgt

SEQ ID NO: 1462342 - DNA, 15 bp, Homo sapiens
actgaggggaacttg

SEQ ID NO: 1462343 - DNA, 15 bp, Homo sapiens
aactgaggggaactt

SEQ ID NO: 1462344 - DNA, 15 bp, Homo sapiens
taactgaggggaact

SEQ ID NO: 1462345 - DNA, 15 bp, Homo sapiens
ataactgaggggaac

SEQ ID NO: 1462346 - DNA, 15 bp, Homo sapiens
aataactgaggggaa

SEQ ID NO: 1462347 - DNA, 15 bp, Homo sapiens
aaataactgagggga

SEQ ID NO: 1462348 - DNA, 15 bp, Homo sapiens
gaaataactgagggg

SEQ ID NO: 1462349 - DNA, 15 bp, Homo sapiens
ggaaataactgaggg

SEQ ID NO: 1462350 - DNA, 15 bp, Homo sapiens
tggaaataactgagg

SEQ ID NO: 1462351 - DNA, 15 bp, Homo sapiens
atggaaataactgag

SEQ ID NO: 1462352 - DNA, 15 bp, Homo sapiens
catggaaataactga

SEQ ID NO: 1462353 - DNA, 15 bp, Homo sapiens
ccatggaaataactg

SEQ ID NO: 1462354 - DNA, 15 bp, Homo sapiens
tccatggaaataact

SEQ ID NO: 1462355 - DNA, 15 bp, Homo sapiens
ctccatggaaataac

SEQ ID NO: 1462356 - DNA, 15 bp, Homo sapiens
gctccatggaaataa

SEQ ID NO: 1462357 - DNA, 15 bp, Homo sapiens
agctccatggaaata

SEQ ID NO: 1462358 - DNA, 15 bp, Homo sapiens
cagctccatggaaat

SEQ ID NO: 1462359 - DNA, 15 bp, Homo sapiens
acagctccatggaaa

SEQ ID NO: 1462360 - DNA, 15 bp, Homo sapiens
tacagctccatggaa

SEQ ID NO: 1462361 - DNA, 15 bp, Homo sapiens
ttacagctccatgga

SEQ ID NO: 1462362 - DNA, 15 bp, Homo sapiens
attacagctccatgg

SEQ ID NO: 1462363 - DNA, 15 bp, Homo sapiens
tattacagctccatg

SEQ ID NO: 1462364 - DNA, 15 bp, Homo sapiens
atattacagctccat

SEQ ID NO: 1462365 - DNA, 15 bp, Homo sapiens
catattacagctcca

SEQ ID NO: 1462366 - DNA, 15 bp, Homo sapiens
acatattacagctcc

SEQ ID NO: 1462367 - DNA, 15 bp, Homo sapiens
tacatattacagctc

SEQ ID NO: 1462368 - DNA, 15 bp, Homo sapiens
atacatattacagct

SEQ ID NO: 1462369 - DNA, 15 bp, Homo sapiens
tatacatattacagc

SEQ ID NO: 1462370 - DNA, 15 bp, Homo sapiens
atatacatattacag

SEQ ID NO: 1462371 - DNA, 15 bp, Homo sapiens
tatatacatattaca

SEQ ID NO: 1462372 - DNA, 15 bp, Homo sapiens
atatatacatattac

SEQ ID NO: 1462373 - DNA, 15 bp, Homo sapiens
catatatacatatta

SEQ ID NO: 1462374 - DNA, 15 bp, Homo sapiens
ccatatatacatatt

SEQ ID NO: 1462375 - DNA, 15 bp, Homo sapiens
tccatatatacatat

SEQ ID NO: 1462376 - DNA, 15 bp, Homo sapiens
ctccatatatacata

SEQ ID NO: 1462377 - DNA, 15 bp, Homo sapiens
actccatatatacat

SEQ ID NO: 1462378 - DNA, 15 bp, Homo sapiens
cactccatatataca

SEQ ID NO: 1462379 - DNA, 15 bp, Homo sapiens
tcactccatatatac

SEQ ID NO: 1462380 - DNA, 15 bp, Homo sapiens
atcactccatatata

SEQ ID NO: 1462381 - DNA, 15 bp, Homo sapiens
catcactccatatat

SEQ ID NO: 1462382 - DNA, 15 bp, Homo sapiens
ccatcactccatata

SEQ ID NO: 1462383 - DNA, 15 bp, Homo sapiens
accatcactccatat

SEQ ID NO: 1462384 - DNA, 15 bp, Homo sapiens
aaccatcactccata

SEQ ID NO: 1462385 - DNA, 15 bp, Homo sapiens
aaaccatcactccat

SEQ ID NO: 1462386 - DNA, 15 bp, Homo sapiens
gaaaccatcactcca

SEQ ID NO: 1462387 - DNA, 15 bp, Homo sapiens
ggaaaccatcactcc

SEQ ID NO: 1462388 - DNA, 15 bp, Homo sapiens
aggaaaccatcactc

SEQ ID NO: 1462389 - DNA, 15 bp, Homo sapiens
caggaaaccatcact

SEQ ID NO: 1462390 - DNA, 15 bp, Homo sapiens
tcaggaaaccatcac

SEQ ID NO: 1462391 - DNA, 15 bp, Homo sapiens
gtcaggaaaccatca

SEQ ID NO: 1462392 - DNA, 15 bp, Homo sapiens
ggtcaggaaaccatc

SEQ ID NO: 1462393 - DNA, 15 bp, Homo sapiens
aggtcaggaaaccat

SEQ ID NO: 1462394 - DNA, 15 bp, Homo sapiens
aaggtcaggaaacca

SEQ ID NO: 1462395 - DNA, 15 bp, Homo sapiens
aaaggtcaggaaacc

SEQ ID NO: 1462396 - DNA, 15 bp, Homo sapiens
taaaggtcaggaaac

SEQ ID NO: 1462397 - DNA, 15 bp, Homo sapiens
ctaaaggtcaggaaa

SEQ ID NO: 1462398 - DNA, 15 bp, Homo sapiens
actaaaggtcaggaa

SEQ ID NO: 1462399 - DNA, 15 bp, Homo sapiens
gactaaaggtcagga

SEQ ID NO: 1462400 - DNA, 15 bp, Homo sapiens
ggactaaaggtcagg

SEQ ID NO: 1462401 - DNA, 15 bp, Homo sapiens
tggactaaaggtcag

SEQ ID NO: 1462402 - DNA, 15 bp, Homo sapiens
gtggactaaaggtca

SEQ ID NO: 1462403 - DNA, 15 bp, Homo sapiens
tgtggactaaaggtc

SEQ ID NO: 1462404 - DNA, 15 bp, Homo sapiens
atgtggactaaaggt

SEQ ID NO: 1462405 - DNA, 15 bp, Homo sapiens
tatgtggactaaagg

SEQ ID NO: 1462406 - DNA, 15 bp, Homo sapiens
gtatgtggactaaag

SEQ ID NO: 1462407 - DNA, 15 bp, Homo sapiens
ggtatgtggactaaa

SEQ ID NO: 1462408 - DNA, 15 bp, Homo sapiens
tggtatgtggactaa

SEQ ID NO: 1462409 - DNA, 15 bp, Homo sapiens
ttggtatgtggacta

SEQ ID NO: 1462410 - DNA, 15 bp, Homo sapiens
attggtatgtggact

SEQ ID NO: 1462411 - DNA, 15 bp, Homo sapiens
cattggtatgtggac

SEQ ID NO: 1462412 - DNA, 15 bp, Homo sapiens
acattggtatgtgga

SEQ ID NO: 1462413 - DNA, 15 bp, Homo sapiens
aacattggtatgtgg

SEQ ID NO: 1462414 - DNA, 15 bp, Homo sapiens
aaacattggtatgtg

SEQ ID NO: 1462415 - DNA, 15 bp, Homo sapiens
aaaacattggtatgt

SEQ ID NO: 1462416 - DNA, 15 bp, Homo sapiens
gaaaacattggtatg

SEQ ID NO: 1462417 - DNA, 15 bp, Homo sapiens
agaaaacattggtat

SEQ ID NO: 1462418 - DNA, 15 bp, Homo sapiens
aagaaaacattggta

SEQ ID NO: 1462419 - DNA, 15 bp, Homo sapiens
aaagaaaacattggt

SEQ ID NO: 1462420 - DNA, 15 bp, Homo sapiens
aaaagaaaacattgg

SEQ ID NO: 1462421 - DNA, 15 bp, Homo sapiens
aaaaagaaaacattg

SEQ ID NO: 1462422 - DNA, 15 bp, Homo sapiens
aaaaaagaaaacatt

SEQ ID NO: 1462423 - DNA, 15 bp, Homo sapiens
gaaaaaagaaaacat

SEQ ID NO: 1462424 - DNA, 15 bp, Homo sapiens
agaaaaaagaaaaca

SEQ ID NO: 1462425 - DNA, 15 bp, Homo sapiens
aagaaaaaagaaaac

SEQ ID NO: 1462426 - DNA, 15 bp, Homo sapiens
accatctcaaaaaaa

SEQ ID NO: 1462427 - DNA, 15 bp, Homo sapiens
caccatctcaaaaaa

SEQ ID NO: 1462428 - DNA, 15 bp, Homo sapiens
acaccatctcaaaaa

SEQ ID NO: 1462429 - DNA, 15 bp, Homo sapiens
gacaccatctcaaaa

SEQ ID NO: 1462430 - DNA, 15 bp, Homo sapiens
agacaccatctcaaa

SEQ ID NO: 1462431 - DNA, 15 bp, Homo sapiens
gagacaccatctcaa

SEQ ID NO: 1462432 - DNA, 15 bp, Homo sapiens
tgagacaccatctca

SEQ ID NO: 1462433 - DNA, 15 bp, Homo sapiens
gtgagacaccatctc

SEQ ID NO: 1462434 - DNA, 15 bp, Homo sapiens
agtgagacaccatct

SEQ ID NO: 1462435 - DNA, 15 bp, Homo sapiens
gagtgagacaccatc

SEQ ID NO: 1462436 - DNA, 15 bp, Homo sapiens
agagtgagacaccat

SEQ ID NO: 1462437 - DNA, 15 bp, Homo sapiens
cagagtgagacacca

SEQ ID NO: 1462438 - DNA, 15 bp, Homo sapiens
acagagtgagacacc

SEQ ID NO: 1462439 - DNA, 15 bp, Homo sapiens
aacagagtgagacac

SEQ ID NO: 1462440 - DNA, 15 bp, Homo sapiens
caacagagtgagaca

SEQ ID NO: 1462441 - DNA, 15 bp, Homo sapiens
tggcaacagagtgag

SEQ ID NO: 1462442 - DNA, 15 bp, Homo sapiens
ctggcaacagagtga

SEQ ID NO: 1462443 - DNA, 15 bp, Homo sapiens
cctggcaacagagtg

SEQ ID NO: 1462444 - DNA, 15 bp, Homo sapiens
gcctggcaacagagt

SEQ ID NO: 1462445 - DNA, 15 bp, Homo sapiens
agcctggcaacagag

SEQ ID NO: 1462446 - DNA, 15 bp, Homo sapiens
cagcctggcaacaga

SEQ ID NO: 1462447 - DNA, 15 bp, Homo sapiens
ccagcctggcaacag

SEQ ID NO: 1462448 - DNA, 15 bp, Homo sapiens
ctgtagtgagccgag

SEQ ID NO: 1462449 - DNA, 15 bp, Homo sapiens
actgtagtgagccga

SEQ ID NO: 1462450 - DNA, 15 bp, Homo sapiens
gactgtagtgagccg

SEQ ID NO: 1462451 - DNA, 15 bp, Homo sapiens
agactgtagtgagcc

SEQ ID NO: 1462452 - DNA, 15 bp, Homo sapiens
gagactgtagtgagc

SEQ ID NO: 1462453 - DNA, 15 bp, Homo sapiens
ggagactgtagtgag

SEQ ID NO: 1462454 - DNA, 15 bp, Homo sapiens
tggagactgtagtga

SEQ ID NO: 1462455 - DNA, 15 bp, Homo sapiens
gtggagactgtagtg

SEQ ID NO: 1462456 - DNA, 15 bp, Homo sapiens
ggtggagactgtagt

SEQ ID NO: 1462457 - DNA, 15 bp, Homo sapiens
aggtggagactgtag

SEQ ID NO: 1462458 - DNA, 15 bp, Homo sapiens
gaggtggagactgta

SEQ ID NO: 1462459 - DNA, 15 bp, Homo sapiens
ggaggtggagactgt

SEQ ID NO: 1462460 - DNA, 15 bp, Homo sapiens
aggaggtggagactg

SEQ ID NO: 1462461 - DNA, 15 bp, Homo sapiens
caggaggtggagact

SEQ ID NO: 1462462 - DNA, 15 bp, Homo sapiens
ccaggaggtggagac

SEQ ID NO: 1462463 - DNA, 15 bp, Homo sapiens
cccaggaggtggaga

SEQ ID NO: 1462464 - DNA, 15 bp, Homo sapiens
gacttgaacccagga

SEQ ID NO: 1462465 - DNA, 15 bp, Homo sapiens
tgacttgaacccagg

SEQ ID NO: 1462466 - DNA, 15 bp, Homo sapiens
atgacttgaacccag

SEQ ID NO: 1462467 - DNA, 15 bp, Homo sapiens
aatgacttgaaccca

SEQ ID NO: 1462468 - DNA, 15 bp, Homo sapiens
gaatgacttgaaccc

SEQ ID NO: 1462469 - DNA, 15 bp, Homo sapiens
ggaatgacttgaacc

SEQ ID NO: 1462470 - DNA, 15 bp, Homo sapiens
aggaatgacttgaac

SEQ ID NO: 1462471 - DNA, 15 bp, Homo sapiens
gaggaatgacttgaa

SEQ ID NO: 1462472 - DNA, 15 bp, Homo sapiens
agaggaatgacttga

SEQ ID NO: 1462473 - DNA, 15 bp, Homo sapiens
cagaggaatgacttg

SEQ ID NO: 1462474 - DNA, 15 bp, Homo sapiens
gcagaggaatgactt

SEQ ID NO: 1462475 - DNA, 15 bp, Homo sapiens
ggcagaggaatgact

SEQ ID NO: 1462476 - DNA, 15 bp, Homo sapiens
aggcagaggaatgac

SEQ ID NO: 1462477 - DNA, 15 bp, Homo sapiens
gaggcagaggaatga

SEQ ID NO: 1462478 - DNA, 15 bp, Homo sapiens
tgaggcagaggaatg

SEQ ID NO: 1462479 - DNA, 15 bp, Homo sapiens
ctgaggcagaggaat

SEQ ID NO: 1462480 - DNA, 15 bp, Homo sapiens
gctgaggcagaggaa

SEQ ID NO: 1462481 - DNA, 15 bp, Homo sapiens
ggctgaggcagagga

SEQ ID NO: 1462482 - DNA, 15 bp, Homo sapiens
aggctgaggcagagg

SEQ ID NO: 1462483 - DNA, 15 bp, Homo sapiens
gaggctgaggcagag

SEQ ID NO: 1462484 - DNA, 15 bp, Homo sapiens
tgcgtgcctgtagtc

SEQ ID NO: 1462485 - DNA, 15 bp, Homo sapiens
gtgcgtgcctgtagt

SEQ ID NO: 1462486 - DNA, 15 bp, Homo sapiens
ggtgcgtgcctgtag

SEQ ID NO: 1462487 - DNA, 15 bp, Homo sapiens
aaggtcaggagattg

SEQ ID NO: 1462488 - DNA, 15 bp, Homo sapiens
caaggtcaggagatt

SEQ ID NO: 1462489 - DNA, 15 bp, Homo sapiens
agtgggcagatcaca

SEQ ID NO: 1462490 - DNA, 15 bp, Homo sapiens
gaagtgggcagatca

SEQ ID NO: 1462491 - DNA, 15 bp, Homo sapiens
tgaagtgggcagatc

SEQ ID NO: 1462492 - DNA, 15 bp, Homo sapiens
gtgaagtgggcagat

SEQ ID NO: 1462493 - DNA, 15 bp, Homo sapiens
ggtgaagtgggcaga

SEQ ID NO: 1462494 - DNA, 15 bp, Homo sapiens
aggtgaagtgggcag

SEQ ID NO: 1462495 - DNA, 15 bp, Homo sapiens
gaggtgaagtgggca

SEQ ID NO: 1462496 - DNA, 15 bp, Homo sapiens
ggaggtgaagtgggc

SEQ ID NO: 1462497 - DNA, 15 bp, Homo sapiens
gggaggtgaagtggg

SEQ ID NO: 1462498 - DNA, 15 bp, Homo sapiens
tgggaggtgaagtgg

SEQ ID NO: 1462499 - DNA, 15 bp, Homo sapiens
ttgggaggtgaagtg

SEQ ID NO: 1462500 - DNA, 15 bp, Homo sapiens
tttgggaggtgaagt

SEQ ID NO: 1462501 - DNA, 15 bp, Homo sapiens
ctttgggaggtgaag

SEQ ID NO: 1462502 - DNA, 15 bp, Homo sapiens
actttgggaggtgaa

SEQ ID NO: 1462503 - DNA, 15 bp, Homo sapiens
cactttgggaggtga

SEQ ID NO: 1462504 - DNA, 15 bp, Homo sapiens
ggcctgtaatcccag

SEQ ID NO: 1462505 - DNA, 15 bp, Homo sapiens
tggcctgtaatccca

SEQ ID NO: 1462506 - DNA, 15 bp, Homo sapiens
ttggcctgtaatccc

SEQ ID NO: 1462507 - DNA, 15 bp, Homo sapiens
attggcctgtaatcc

SEQ ID NO: 1462508 - DNA, 15 bp, Homo sapiens
cattggcctgtaatc

SEQ ID NO: 1462509 - DNA, 15 bp, Homo sapiens
acattggcctgtaat

SEQ ID NO: 1462510 - DNA, 15 bp, Homo sapiens
aacattggcctgtaa

SEQ ID NO: 1462511 - DNA, 15 bp, Homo sapiens
aaacattggcctgta

SEQ ID NO: 1462512 - DNA, 15 bp, Homo sapiens
aaaacattggcctgt

SEQ ID NO: 1462513 - DNA, 15 bp, Homo sapiens
gaaaacattggcctg

SEQ ID NO: 1462514 - DNA, 15 bp, Homo sapiens
agaaaacattggcct

SEQ ID NO: 1462515 - DNA, 15 bp, Homo sapiens
aagaaaacattggcc

SEQ ID NO: 1462516 - DNA, 15 bp, Homo sapiens
taagaaaacattggc

SEQ ID NO: 1462517 - DNA, 15 bp, Homo sapiens
ttaagaaaacattgg

SEQ ID NO: 1462518 - DNA, 15 bp, Homo sapiens
attaagaaaacattg

SEQ ID NO: 1462519 - DNA, 15 bp, Homo sapiens
gattaagaaaacatt

SEQ ID NO: 1462520 - DNA, 15 bp, Homo sapiens
agattaagaaaacat

SEQ ID NO: 1462521 - DNA, 15 bp, Homo sapiens
aagattaagaaaaca

SEQ ID NO: 1462522 - DNA, 15 bp, Homo sapiens
taagattaagaaaac

SEQ ID NO: 1462523 - DNA, 15 bp, Homo sapiens
ctaagattaagaaaa

SEQ ID NO: 1462524 - DNA, 15 bp, Homo sapiens
tctaagattaagaaa

SEQ ID NO: 1462525 - DNA, 15 bp, Homo sapiens
ttctaagattaagaa

SEQ ID NO: 1462526 - DNA, 15 bp, Homo sapiens
attctaagattaaga

SEQ ID NO: 1462527 - DNA, 15 bp, Homo sapiens
cattctaagattaag

SEQ ID NO: 1462528 - DNA, 15 bp, Homo sapiens
acattctaagattaa

SEQ ID NO: 1462529 - DNA, 15 bp, Homo sapiens
cacattctaagatta

SEQ ID NO: 1462530 - DNA, 15 bp, Homo sapiens
tcacattctaagatt

SEQ ID NO: 1462531 - DNA, 15 bp, Homo sapiens
ttcacattctaagat

SEQ ID NO: 1462532 - DNA, 15 bp, Homo sapiens
attcacattctaaga

SEQ ID NO: 1462533 - DNA, 15 bp, Homo sapiens
tattcacattctaag

SEQ ID NO: 1462534 - DNA, 15 bp, Homo sapiens
ttattcacattctaa

SEQ ID NO: 1462535 - DNA, 15 bp, Homo sapiens
gttattcacattcta

SEQ ID NO: 1462536 - DNA, 15 bp, Homo sapiens
agttattcacattct

SEQ ID NO: 1462537 - DNA, 15 bp, Homo sapiens
cagttattcacattc

SEQ ID NO: 1462538 - DNA, 15 bp, Homo sapiens
tcagttattcacatt

SEQ ID NO: 1462539 - DNA, 15 bp, Homo sapiens
ttcagttattcacat

SEQ ID NO: 1462540 - DNA, 15 bp, Homo sapiens
tttcagttattcaca

SEQ ID NO: 1462541 - DNA, 15 bp, Homo sapiens
ttttcagttattcac

SEQ ID NO: 1462542 - DNA, 15 bp, Homo sapiens
attttcagttattca

SEQ ID NO: 1462543 - DNA, 15 bp, Homo sapiens
gattttcagttattc

SEQ ID NO: 1462544 - DNA, 15 bp, Homo sapiens
tgattttcagttatt

SEQ ID NO: 1462545 - DNA, 15 bp, Homo sapiens
atgattttcagttat

SEQ ID NO: 1462546 - DNA, 15 bp, Homo sapiens
tatgattttcagtta

SEQ ID NO: 1462547 - DNA, 15 bp, Homo sapiens
ctatgattttcagtt

SEQ ID NO: 1462548 - DNA, 15 bp, Homo sapiens
actatgattttcagt

SEQ ID NO: 1462549 - DNA, 15 bp, Homo sapiens
gactatgattttcag

SEQ ID NO: 1462550 - DNA, 15 bp, Homo sapiens
agactatgattttca

SEQ ID NO: 1462551 - DNA, 15 bp, Homo sapiens
cagactatgattttc

SEQ ID NO: 1462552 - DNA, 15 bp, Homo sapiens
acagactatgatttt

SEQ ID NO: 1462553 - DNA, 15 bp, Homo sapiens
cacagactatgattt

SEQ ID NO: 1462554 - DNA, 15 bp, Homo sapiens
ccacagactatgatt

SEQ ID NO: 1462555 - DNA, 15 bp, Homo sapiens
tccacagactatgat

SEQ ID NO: 1462556 - DNA, 15 bp, Homo sapiens
ttccacagactatga

SEQ ID NO: 1462557 - DNA, 15 bp, Homo sapiens
tttccacagactatg

SEQ ID NO: 1462558 - DNA, 15 bp, Homo sapiens
ctttccacagactat

SEQ ID NO: 1462559 - DNA, 15 bp, Homo sapiens
cctttccacagacta

SEQ ID NO: 1462560 - DNA, 15 bp, Homo sapiens
acctttccacagact

SEQ ID NO: 1462561 - DNA, 15 bp, Homo sapiens
cacctttccacagac

SEQ ID NO: 1462562 - DNA, 15 bp, Homo sapiens
acacctttccacaga

SEQ ID NO: 1462563 - DNA, 15 bp, Homo sapiens
aacacctttccacag

SEQ ID NO: 1462564 - DNA, 15 bp, Homo sapiens
caacacctttccaca

SEQ ID NO: 1462565 - DNA, 15 bp, Homo sapiens
tcaacacctttccac

SEQ ID NO: 1462566 - DNA, 15 bp, Homo sapiens
ttcaacacctttcca

SEQ ID NO: 1462567 - DNA, 15 bp, Homo sapiens
attcaacacctttcc

SEQ ID NO: 1462568 - DNA, 15 bp, Homo sapiens
aattcaacacctttc

SEQ ID NO: 1462569 - DNA, 15 bp, Homo sapiens
caattcaacaccttt

SEQ ID NO: 1462570 - DNA, 15 bp, Homo sapiens
tcaattcaacacctt

SEQ ID NO: 1462571 - DNA, 15 bp, Homo sapiens
ctcaattcaacacct

SEQ ID NO: 1462572 - DNA, 15 bp, Homo sapiens
actcaattcaacacc

SEQ ID NO: 1462573 - DNA, 15 bp, Homo sapiens
tactcaattcaacac

SEQ ID NO: 1462574 - DNA, 15 bp, Homo sapiens
atactcaattcaaca

SEQ ID NO: 1462575 - DNA, 15 bp, Homo sapiens
tatactcaattcaac

SEQ ID NO: 1462576 - DNA, 15 bp, Homo sapiens
ttatactcaattcaa

SEQ ID NO: 1462577 - DNA, 15 bp, Homo sapiens
attatactcaattca

SEQ ID NO: 1462578 - DNA, 15 bp, Homo sapiens
gattatactcaattc

SEQ ID NO: 1462579 - DNA, 15 bp, Homo sapiens
agattatactcaatt

SEQ ID NO: 1462580 - DNA, 15 bp, Homo sapiens
aagattatactcaat

SEQ ID NO: 1462581 - DNA, 15 bp, Homo sapiens
gaagattatactcaa

SEQ ID NO: 1462582 - DNA, 15 bp, Homo sapiens
agaagattatactca

SEQ ID NO: 1462583 - DNA, 15 bp, Homo sapiens
aagaagattatactc

SEQ ID NO: 1462584 - DNA, 15 bp, Homo sapiens
gaagaagattatact

SEQ ID NO: 1462585 - DNA, 15 bp, Homo sapiens
agaagaagattatac

SEQ ID NO: 1462586 - DNA, 15 bp, Homo sapiens
cagaagaagattata

SEQ ID NO: 1462587 - DNA, 15 bp, Homo sapiens
acagaagaagattat

SEQ ID NO: 1462588 - DNA, 15 bp, Homo sapiens
aacagaagaagatta

SEQ ID NO: 1462589 - DNA, 15 bp, Homo sapiens
aaacagaagaagatt

SEQ ID NO: 1462590 - DNA, 15 bp, Homo sapiens
taaacagaagaagat

SEQ ID NO: 1462591 - DNA, 15 bp, Homo sapiens
ataaacagaagaaga

SEQ ID NO: 1462592 - DNA, 15 bp, Homo sapiens
aataaacagaagaag

SEQ ID NO: 1462593 - DNA, 15 bp, Homo sapiens
aaataaacagaagaa

SEQ ID NO: 1462594 - DNA, 15 bp, Homo sapiens
aaaataaacagaaga

SEQ ID NO: 1462595 - DNA, 15 bp, Homo sapiens
aaaaataaacagaag

SEQ ID NO: 1462596 - DNA, 15 bp, Homo sapiens
caaaaataaacagaa

SEQ ID NO: 1462597 - DNA, 15 bp, Homo sapiens
acaaaaataaacaga

SEQ ID NO: 1462598 - DNA, 15 bp, Homo sapiens
cacaaaaataaacag

SEQ ID NO: 1462599 - DNA, 15 bp, Homo sapiens
acacaaaaataaaca

SEQ ID NO: 1462600 - DNA, 15 bp, Homo sapiens
aacacaaaaataaac

SEQ ID NO: 1462601 - DNA, 15 bp, Homo sapiens
aaacacaaaaataaa

SEQ ID NO: 1462602 - DNA, 15 bp, Homo sapiens
aaaacacaaaaataa

SEQ ID NO: 1462603 - DNA, 15 bp, Homo sapiens
caaaacacaaaaata

SEQ ID NO: 1462604 - DNA, 15 bp, Homo sapiens
acaaaacacaaaaat

SEQ ID NO: 1462605 - DNA, 15 bp, Homo sapiens
aacaaaacacaaaaa

SEQ ID NO: 1462606 - DNA, 15 bp, Homo sapiens
aaacaaaacacaaaa

SEQ ID NO: 1462607 - DNA, 15 bp, Homo sapiens
aaaacaaaacacaaa

SEQ ID NO: 1462608 - DNA, 15 bp, Homo sapiens
aaaaacaaaacacaa

SEQ ID NO: 1462609 - DNA, 15 bp, Homo sapiens
aaaaaacaaaacaca

SEQ ID NO: 1462610 - DNA, 15 bp, Homo sapiens
taaaaaacaaaacac

SEQ ID NO: 1462611 - DNA, 15 bp, Homo sapiens
ttaaaaaacaaaaca

SEQ ID NO: 1462612 - DNA, 15 bp, Homo sapiens
gttaaaaaacaaaac

SEQ ID NO: 1462613 - DNA, 15 bp, Homo sapiens
tgttaaaaaacaaaa

SEQ ID NO: 1462614 - DNA, 15 bp, Homo sapiens
ctgttaaaaaacaaa

SEQ ID NO: 1462615 - DNA, 15 bp, Homo sapiens
tctgttaaaaaacaa

SEQ ID NO: 1462616 - DNA, 15 bp, Homo sapiens
atctgttaaaaaaca

SEQ ID NO: 1462617 - DNA, 15 bp, Homo sapiens
catctgttaaaaaac

SEQ ID NO: 1462618 - DNA, 15 bp, Homo sapiens
ccatctgttaaaaaa

SEQ ID NO: 1462619 - DNA, 15 bp, Homo sapiens
cccatctgttaaaaa

SEQ ID NO: 1462620 - DNA, 15 bp, Homo sapiens
acccatctgttaaaa

SEQ ID NO: 1462621 - DNA, 15 bp, Homo sapiens
tacccatctgttaaa

SEQ ID NO: 1462622 - DNA, 15 bp, Homo sapiens
atacccatctgttaa

SEQ ID NO: 1462623 - DNA, 15 bp, Homo sapiens
gatacccatctgtta

SEQ ID NO: 1462624 - DNA, 15 bp, Homo sapiens
agatacccatctgtt

SEQ ID NO: 1462625 - DNA, 15 bp, Homo sapiens
aagatacccatctgt

SEQ ID NO: 1462626 - DNA, 15 bp, Homo sapiens
caagatacccatctg

SEQ ID NO: 1462627 - DNA, 15 bp, Homo sapiens
gcaagatacccatct

SEQ ID NO: 1462628 - DNA, 15 bp, Homo sapiens
agcaagatacccatc

SEQ ID NO: 1462629 - DNA, 15 bp, Homo sapiens
tagcaagatacccat

SEQ ID NO: 1462630 - DNA, 15 bp, Homo sapiens
atagcaagataccca

SEQ ID NO: 1462631 - DNA, 15 bp, Homo sapiens
catagcaagataccc

SEQ ID NO: 1462632 - DNA, 15 bp, Homo sapiens
acatagcaagatacc

SEQ ID NO: 1462633 - DNA, 15 bp, Homo sapiens
aacatagcaagatac

SEQ ID NO: 1462634 - DNA, 15 bp, Homo sapiens
caacatagcaagata

SEQ ID NO: 1462635 - DNA, 15 bp, Homo sapiens
tgggcaacatagcaa

SEQ ID NO: 1462636 - DNA, 15 bp, Homo sapiens
ctgggcaacatagca

SEQ ID NO: 1462637 - DNA, 15 bp, Homo sapiens
tcctgggcaacatag

SEQ ID NO: 1462638 - DNA, 15 bp, Homo sapiens
atcctgggcaacata

SEQ ID NO: 1462639 - DNA, 15 bp, Homo sapiens
catcctgggcaacat

SEQ ID NO: 1462640 - DNA, 15 bp, Homo sapiens
ccatcctgggcaaca

SEQ ID NO: 1462641 - DNA, 15 bp, Homo sapiens
tccatcctgggcaac

SEQ ID NO: 1462642 - DNA, 15 bp, Homo sapiens
ctccatcctgggcaa

SEQ ID NO: 1462643 - DNA, 15 bp, Homo sapiens
actccatcctgggca

SEQ ID NO: 1462644 - DNA, 15 bp, Homo sapiens
cactccatcctgggc

SEQ ID NO: 1462645 - DNA, 15 bp, Homo sapiens
gcactccatcctggg

SEQ ID NO: 1462646 - DNA, 15 bp, Homo sapiens
tgcactccatcctgg

SEQ ID NO: 1462647 - DNA, 15 bp, Homo sapiens
ctgcactccatcctg

SEQ ID NO: 1462648 - DNA, 15 bp, Homo sapiens
actgcactccatcct

SEQ ID NO: 1462649 - DNA, 15 bp, Homo sapiens
tactgcactccatcc

SEQ ID NO: 1462650 - DNA, 15 bp, Homo sapiens
ctactgcactccatc

SEQ ID NO: 1462651 - DNA, 15 bp, Homo sapiens
gctactgcactccat

SEQ ID NO: 1462652 - DNA, 15 bp, Homo sapiens
tagctactgcactcc

SEQ ID NO: 1462653 - DNA, 15 bp, Homo sapiens
atagctactgcactc

SEQ ID NO: 1462654 - DNA, 15 bp, Homo sapiens
aatagctactgcact

SEQ ID NO: 1462655 - DNA, 15 bp, Homo sapiens
gaatagctactgcac

SEQ ID NO: 1462656 - DNA, 15 bp, Homo sapiens
tgaatagctactgca

SEQ ID NO: 1462657 - DNA, 15 bp, Homo sapiens
gtgaatagctactgc

SEQ ID NO: 1462658 - DNA, 15 bp, Homo sapiens
tgtgaatagctactg

SEQ ID NO: 1462659 - DNA, 15 bp, Homo sapiens
ctgtgaatagctact

SEQ ID NO: 1462660 - DNA, 15 bp, Homo sapiens
cctgtgaatagctac

SEQ ID NO: 1462661 - DNA, 15 bp, Homo sapiens
acctgtgaatagcta

SEQ ID NO: 1462662 - DNA, 15 bp, Homo sapiens
tacctgtgaatagct

SEQ ID NO: 1462663 - DNA, 15 bp, Homo sapiens
atacctgtgaatagc

SEQ ID NO: 1462664 - DNA, 15 bp, Homo sapiens
catacctgtgaatag

SEQ ID NO: 1462665 - DNA, 15 bp, Homo sapiens
tcatacctgtgaata

SEQ ID NO: 1462666 - DNA, 15 bp, Homo sapiens
atcatacctgtgaat

SEQ ID NO: 1462667 - DNA, 15 bp, Homo sapiens
gatcatacctgtgaa

SEQ ID NO: 1462668 - DNA, 15 bp, Homo sapiens
tgatcatacctgtga

SEQ ID NO: 1462669 - DNA, 15 bp, Homo sapiens
atgatcatacctgtg

SEQ ID NO: 1462670 - DNA, 15 bp, Homo sapiens
tatgatcatacctgt

SEQ ID NO: 1462671 - DNA, 15 bp, Homo sapiens
ctatgatcatacctg

SEQ ID NO: 1462672 - DNA, 15 bp, Homo sapiens
gctatgatcatacct

SEQ ID NO: 1462673 - DNA, 15 bp, Homo sapiens
tgctatgatcatacc

SEQ ID NO: 1462674 - DNA, 15 bp, Homo sapiens
gtgctatgatcatac

SEQ ID NO: 1462675 - DNA, 15 bp, Homo sapiens
tgtgctatgatcata

SEQ ID NO: 1462676 - DNA, 15 bp, Homo sapiens
gtgtgctatgatcat

SEQ ID NO: 1462677 - DNA, 15 bp, Homo sapiens
agtgtgctatgatca

SEQ ID NO: 1462678 - DNA, 15 bp, Homo sapiens
cagtgtgctatgatc

SEQ ID NO: 1462679 - DNA, 15 bp, Homo sapiens
gcagtgtgctatgat

SEQ ID NO: 1462680 - DNA, 15 bp, Homo sapiens
tgcagtgtgctatga

SEQ ID NO: 1462681 - DNA, 15 bp, Homo sapiens
ctgcagtgtgctatg

SEQ ID NO: 1462682 - DNA, 15 bp, Homo sapiens
gctgcagtgtgctat

SEQ ID NO: 1462683 - DNA, 15 bp, Homo sapiens
ggctgcagtgtgcta

SEQ ID NO: 1462684 - DNA, 15 bp, Homo sapiens
aggctgcagtgtgct

SEQ ID NO: 1462685 - DNA, 15 bp, Homo sapiens
gaggctgcagtgtgc

SEQ ID NO: 1462686 - DNA, 15 bp, Homo sapiens
tgaggctgcagtgtg

SEQ ID NO: 1462687 - DNA, 15 bp, Homo sapiens
ttgaggctgcagtgt

SEQ ID NO: 1462688 - DNA, 15 bp, Homo sapiens
cttgaggctgcagtg

SEQ ID NO: 1462689 - DNA, 15 bp, Homo sapiens
gcttgaggctgcagt

SEQ ID NO: 1462690 - DNA, 15 bp, Homo sapiens
agcttgaggctgcag

SEQ ID NO: 1462691 - DNA, 15 bp, Homo sapiens
gagcttgaggctgca

SEQ ID NO: 1462692 - DNA, 15 bp, Homo sapiens
ggagcttgaggctgc

SEQ ID NO: 1462693 - DNA, 15 bp, Homo sapiens
aggagcttgaggctg

SEQ ID NO: 1462694 - DNA, 15 bp, Homo sapiens
caggagcttgaggct

SEQ ID NO: 1462695 - DNA, 15 bp, Homo sapiens
ccaggagcttgaggc

SEQ ID NO: 1462696 - DNA, 15 bp, Homo sapiens
cccaggagcttgagg

SEQ ID NO: 1462697 - DNA, 15 bp, Homo sapiens
gcccaggagcttgag

SEQ ID NO: 1462698 - DNA, 15 bp, Homo sapiens
cccacaggctcagaa

SEQ ID NO: 1462699 - DNA, 15 bp, Homo sapiens
gcccacaggctcaga

SEQ ID NO: 1462700 - DNA, 15 bp, Homo sapiens
agcccacaggctcag

SEQ ID NO: 1462701 - DNA, 15 bp, Homo sapiens
tagcccacaggctca

SEQ ID NO: 1462702 - DNA, 15 bp, Homo sapiens
ctagcccacaggctc

SEQ ID NO: 1462703 - DNA, 15 bp, Homo sapiens
cctagcccacaggct

SEQ ID NO: 1462704 - DNA, 15 bp, Homo sapiens
gcctagcccacaggc

SEQ ID NO: 1462705 - DNA, 15 bp, Homo sapiens
tgcctagcccacagg

SEQ ID NO: 1462706 - DNA, 15 bp, Homo sapiens
ctgcctagcccacag

SEQ ID NO: 1462707 - DNA, 15 bp, Homo sapiens
actgcctagcccaca

SEQ ID NO: 1462708 - DNA, 15 bp, Homo sapiens
cactgcctagcccac

SEQ ID NO: 1462709 - DNA, 15 bp, Homo sapiens
gcactgcctagccca

SEQ ID NO: 1462710 - DNA, 15 bp, Homo sapiens
agcactgcctagccc

SEQ ID NO: 1462711 - DNA, 15 bp, Homo sapiens
aagcactgcctagcc

SEQ ID NO: 1462712 - DNA, 15 bp, Homo sapiens
taagcactgcctagc

SEQ ID NO: 1462713 - DNA, 15 bp, Homo sapiens
ctaagcactgcctag

SEQ ID NO: 1462714 - DNA, 15 bp, Homo sapiens
actaagcactgccta

SEQ ID NO: 1462715 - DNA, 15 bp, Homo sapiens
aactaagcactgcct

SEQ ID NO: 1462716 - DNA, 15 bp, Homo sapiens
taactaagcactgcc

SEQ ID NO: 1462717 - DNA, 15 bp, Homo sapiens
ctaactaagcactgc

SEQ ID NO: 1462718 - DNA, 15 bp, Homo sapiens
tctaactaagcactg

SEQ ID NO: 1462719 - DNA, 15 bp, Homo sapiens
ttctaactaagcact

SEQ ID NO: 1462720 - DNA, 15 bp, Homo sapiens
attctaactaagcac

SEQ ID NO: 1462721 - DNA, 15 bp, Homo sapiens
gattctaactaagca

SEQ ID NO: 1462722 - DNA, 15 bp, Homo sapiens
agattctaactaagc

SEQ ID NO: 1462723 - DNA, 15 bp, Homo sapiens
gagattctaactaag

SEQ ID NO: 1462724 - DNA, 15 bp, Homo sapiens
tgagattctaactaa

SEQ ID NO: 1462725 - DNA, 15 bp, Homo sapiens
ctgagattctaacta

SEQ ID NO: 1462726 - DNA, 15 bp, Homo sapiens
tctgagattctaact

SEQ ID NO: 1462727 - DNA, 15 bp, Homo sapiens
gtctgagattctaac

SEQ ID NO: 1462728 - DNA, 15 bp, Homo sapiens
ggtctgagattctaa

SEQ ID NO: 1462729 - DNA, 15 bp, Homo sapiens
gggtctgagattcta

SEQ ID NO: 1462730 - DNA, 15 bp, Homo sapiens
agggtctgagattct

SEQ ID NO: 1462731 - DNA, 15 bp, Homo sapiens
cagggtctgagattc

SEQ ID NO: 1462732 - DNA, 15 bp, Homo sapiens
tcagggtctgagatt

SEQ ID NO: 1462733 - DNA, 15 bp, Homo sapiens
atcagggtctgagat

SEQ ID NO: 1462734 - DNA, 15 bp, Homo sapiens
gatcagggtctgaga

SEQ ID NO: 1462735 - DNA, 15 bp, Homo sapiens
ggatcagggtctgag

SEQ ID NO: 1462736 - DNA, 15 bp, Homo sapiens
aggatcagggtctga

SEQ ID NO: 1462737 - DNA, 15 bp, Homo sapiens
gaggatcagggtctg

SEQ ID NO: 1462738 - DNA, 15 bp, Homo sapiens
ggaggatcagggtct

SEQ ID NO: 1462739 - DNA, 15 bp, Homo sapiens
gggaggatcagggtc

SEQ ID NO: 1462740 - DNA, 15 bp, Homo sapiens
tgggaggatcagggt

SEQ ID NO: 1462741 - DNA, 15 bp, Homo sapiens
ctgggaggatcaggg

SEQ ID NO: 1462742 - DNA, 15 bp, Homo sapiens
gctgggaggatcagg

SEQ ID NO: 1462743 - DNA, 15 bp, Homo sapiens
agctgggaggatcag

SEQ ID NO: 1462744 - DNA, 15 bp, Homo sapiens
gagctgggaggatca

SEQ ID NO: 1462745 - DNA, 15 bp, Homo sapiens
tgagctgggaggatc

SEQ ID NO: 1462746 - DNA, 15 bp, Homo sapiens
gtgagctgggaggat

SEQ ID NO: 1462747 - DNA, 15 bp, Homo sapiens
agtgagctgggagga

SEQ ID NO: 1462748 - DNA, 15 bp, Homo sapiens
gagtgagctgggagg

SEQ ID NO: 1462749 - DNA, 15 bp, Homo sapiens
agagtgagctgggag

SEQ ID NO: 1462750 - DNA, 15 bp, Homo sapiens
tagagtgagctggga

SEQ ID NO: 1462751 - DNA, 15 bp, Homo sapiens
gtagagtgagctggg

SEQ ID NO: 1462752 - DNA, 15 bp, Homo sapiens
ggtagagtgagctgg

SEQ ID NO: 1462753 - DNA, 15 bp, Homo sapiens
gggtagagtgagctg

SEQ ID NO: 1462754 - DNA, 15 bp, Homo sapiens
tgggtagagtgagct

SEQ ID NO: 1462755 - DNA, 15 bp, Homo sapiens
gtgggtagagtgagc

SEQ ID NO: 1462756 - DNA, 15 bp, Homo sapiens
tgtgggtagagtgag

SEQ ID NO: 1462757 - DNA, 15 bp, Homo sapiens
ttgtgggtagagtga

SEQ ID NO: 1462758 - DNA, 15 bp, Homo sapiens
tttgtgggtagagtg

SEQ ID NO: 1462759 - DNA, 15 bp, Homo sapiens
ctttgtgggtagagt

SEQ ID NO: 1462760 - DNA, 15 bp, Homo sapiens
tctttgtgggtagag

SEQ ID NO: 1462761 - DNA, 15 bp, Homo sapiens
ttctttgtgggtaga

SEQ ID NO: 1462762 - DNA, 15 bp, Homo sapiens
gttctttgtgggtag

SEQ ID NO: 1462763 - DNA, 15 bp, Homo sapiens
tgttctttgtgggta

SEQ ID NO: 1462764 - DNA, 15 bp, Homo sapiens
ttgttctttgtgggt

SEQ ID NO: 1462765 - DNA, 15 bp, Homo sapiens
gttgttctttgtggg

SEQ ID NO: 1462766 - DNA, 15 bp, Homo sapiens
tgttgttctttgtgg

SEQ ID NO: 1462767 - DNA, 15 bp, Homo sapiens
atgttgttctttgtg

SEQ ID NO: 1462768 - DNA, 15 bp, Homo sapiens
tatgttgttctttgt

SEQ ID NO: 1462769 - DNA, 15 bp, Homo sapiens
atatgttgttctttg

SEQ ID NO: 1462770 - DNA, 15 bp, Homo sapiens
tatatgttgttcttt

SEQ ID NO: 1462771 - DNA, 15 bp, Homo sapiens
gtatatgttgttctt

SEQ ID NO: 1462772 - DNA, 15 bp, Homo sapiens
tgtatatgttgttct

SEQ ID NO: 1462773 - DNA, 15 bp, Homo sapiens
atgtatatgttgttc

SEQ ID NO: 1462774 - DNA, 15 bp, Homo sapiens
tatgtatatgttgtt

SEQ ID NO: 1462775 - DNA, 15 bp, Homo sapiens
atatgtatatgttgt

SEQ ID NO: 1462776 - DNA, 15 bp, Homo sapiens
aatatgtatatgttg

SEQ ID NO: 1462777 - DNA, 15 bp, Homo sapiens
aaatatgtatatgtt

SEQ ID NO: 1462778 - DNA, 15 bp, Homo sapiens
taaatatgtatatgt

SEQ ID NO: 1462779 - DNA, 15 bp, Homo sapiens
ataaatatgtatatg

SEQ ID NO: 1462780 - DNA, 15 bp, Homo sapiens
aataaatatgtatat

SEQ ID NO: 1462781 - DNA, 15 bp, Homo sapiens
gaataaatatgtata

SEQ ID NO: 1462782 - DNA, 15 bp, Homo sapiens
agaataaatatgtat

SEQ ID NO: 1462783 - DNA, 15 bp, Homo sapiens
aagaataaatatgta

SEQ ID NO: 1462784 - DNA, 15 bp, Homo sapiens
gaagaataaatatgt

SEQ ID NO: 1462785 - DNA, 15 bp, Homo sapiens
agaagaataaatatg

SEQ ID NO: 1462786 - DNA, 15 bp, Homo sapiens
cagaagaataaatat

SEQ ID NO: 1462787 - DNA, 15 bp, Homo sapiens
gcagaagaataaata

SEQ ID NO: 1462788 - DNA, 15 bp, Homo sapiens
ggcagaagaataaat

SEQ ID NO: 1462789 - DNA, 15 bp, Homo sapiens
tggcagaagaataaa

SEQ ID NO: 1462790 - DNA, 15 bp, Homo sapiens
ctggcagaagaataa

SEQ ID NO: 1462791 - DNA, 15 bp, Homo sapiens
actggcagaagaata

SEQ ID NO: 1462792 - DNA, 15 bp, Homo sapiens
cactggcagaagaat

SEQ ID NO: 1462793 - DNA, 15 bp, Homo sapiens
gcactggcagaagaa

SEQ ID NO: 1462794 - DNA, 15 bp, Homo sapiens
agcactggcagaaga

SEQ ID NO: 1462795 - DNA, 15 bp, Homo sapiens
aagcactggcagaag

SEQ ID NO: 1462796 - DNA, 15 bp, Homo sapiens
caagcactggcagaa

SEQ ID NO: 1462797 - DNA, 15 bp, Homo sapiens
tcaagcactggcaga

SEQ ID NO: 1462798 - DNA, 15 bp, Homo sapiens
ttcaagcactggcag

SEQ ID NO: 1462799 - DNA, 15 bp, Homo sapiens
tttcaagcactggca

SEQ ID NO: 1462800 - DNA, 15 bp, Homo sapiens
atttcaagcactggc

SEQ ID NO: 1462801 - DNA, 15 bp, Homo sapiens
gatttcaagcactgg

SEQ ID NO: 1462802 - DNA, 15 bp, Homo sapiens
tgatttcaagcactg

SEQ ID NO: 1462803 - DNA, 15 bp, Homo sapiens
ttgatttcaagcact

SEQ ID NO: 1462804 - DNA, 15 bp, Homo sapiens
cttgatttcaagcac

SEQ ID NO: 1462805 - DNA, 15 bp, Homo sapiens
gcttgatttcaagca

SEQ ID NO: 1462806 - DNA, 15 bp, Homo sapiens
agcttgatttcaagc

SEQ ID NO: 1462807 - DNA, 15 bp, Homo sapiens
aagcttgatttcaag

SEQ ID NO: 1462808 - DNA, 15 bp, Homo sapiens
caagcttgatttcaa

SEQ ID NO: 1462809 - DNA, 15 bp, Homo sapiens
tcaagcttgatttca

SEQ ID NO: 1462810 - DNA, 15 bp, Homo sapiens
atcaagcttgatttc

SEQ ID NO: 1462811 - DNA, 15 bp, Homo sapiens
gatcaagcttgattt

SEQ ID NO: 1462812 - DNA, 15 bp, Homo sapiens
tgatcaagcttgatt

SEQ ID NO: 1462813 - DNA, 15 bp, Homo sapiens
ctgatcaagcttgat

SEQ ID NO: 1462814 - DNA, 15 bp, Homo sapiens
gctgatcaagcttga

SEQ ID NO: 1462815 - DNA, 15 bp, Homo sapiens
ggctgatcaagcttg

SEQ ID NO: 1462816 - DNA, 15 bp, Homo sapiens
tggctgatcaagctt

SEQ ID NO: 1462817 - DNA, 15 bp, Homo sapiens
atggctgatcaagct

SEQ ID NO: 1462818 - DNA, 15 bp, Homo sapiens
catggctgatcaagc

SEQ ID NO: 1462819 - DNA, 15 bp, Homo sapiens
ccatggctgatcaag

SEQ ID NO: 1462820 - DNA, 15 bp, Homo sapiens
gccatggctgatcaa

SEQ ID NO: 1462821 - DNA, 15 bp, Homo sapiens
tgccatggctgatca

SEQ ID NO: 1462822 - DNA, 15 bp, Homo sapiens
ctgccatggctgatc

SEQ ID NO: 1462823 - DNA, 15 bp, Homo sapiens
actgccatggctgat

SEQ ID NO: 1462824 - DNA, 15 bp, Homo sapiens
tactgccatggctga

SEQ ID NO: 1462825 - DNA, 15 bp, Homo sapiens
ctactgccatggctg

SEQ ID NO: 1462826 - DNA, 15 bp, Homo sapiens
cctactgccatggct

SEQ ID NO: 1462827 - DNA, 15 bp, Homo sapiens
tcctactgccatggc

SEQ ID NO: 1462828 - DNA, 15 bp, Homo sapiens
atcctactgccatgg

SEQ ID NO: 1462829 - DNA, 15 bp, Homo sapiens
catcctactgccatg

SEQ ID NO: 1462830 - DNA, 15 bp, Homo sapiens
ccatcctactgccat

SEQ ID NO: 1462831 - DNA, 15 bp, Homo sapiens
cccatcctactgcca

SEQ ID NO: 1462832 - DNA, 15 bp, Homo sapiens
tcccatcctactgcc

SEQ ID NO: 1462833 - DNA, 15 bp, Homo sapiens
ctcccatcctactgc

SEQ ID NO: 1462834 - DNA, 15 bp, Homo sapiens
cctcccatcctactg

SEQ ID NO: 1462835 - DNA, 15 bp, Homo sapiens
acctcccatcctact

SEQ ID NO: 1462836 - DNA, 15 bp, Homo sapiens
cacctcccatcctac

SEQ ID NO: 1462837 - DNA, 15 bp, Homo sapiens
tcacctcccatccta

SEQ ID NO: 1462838 - DNA, 15 bp, Homo sapiens
gtcacctcccatcct

SEQ ID NO: 1462839 - DNA, 15 bp, Homo sapiens
ggtcacctcccatcc

SEQ ID NO: 1462840 - DNA, 15 bp, Homo sapiens
aggtcacctcccatc

SEQ ID NO: 1462841 - DNA, 15 bp, Homo sapiens
taggtcacctcccat

SEQ ID NO: 1462842 - DNA, 15 bp, Homo sapiens
ctaggtcacctccca

SEQ ID NO: 1462843 - DNA, 15 bp, Homo sapiens
tctaggtcacctccc

SEQ ID NO: 1462844 - DNA, 15 bp, Homo sapiens
ttctaggtcacctcc

SEQ ID NO: 1462845 - DNA, 15 bp, Homo sapiens
gttctaggtcacctc

SEQ ID NO: 1462846 - DNA, 15 bp, Homo sapiens
tgttctaggtcacct

SEQ ID NO: 1462847 - DNA, 15 bp, Homo sapiens
ctgttctaggtcacc

SEQ ID NO: 1462848 - DNA, 15 bp, Homo sapiens
tctgttctaggtcac

SEQ ID NO: 1462849 - DNA, 15 bp, Homo sapiens
gtctgttctaggtca

SEQ ID NO: 1462850 - DNA, 15 bp, Homo sapiens
agtctgttctaggtc

SEQ ID NO: 1462851 - DNA, 15 bp, Homo sapiens
tagtctgttctaggt

SEQ ID NO: 1462852 - DNA, 15 bp, Homo sapiens
atagtctgttctagg

SEQ ID NO: 1462853 - DNA, 15 bp, Homo sapiens
catagtctgttctag

SEQ ID NO: 1462854 - DNA, 15 bp, Homo sapiens
ccatagtctgttcta

SEQ ID NO: 1462855 - DNA, 15 bp, Homo sapiens
cccatagtctgttct

SEQ ID NO: 1462856 - DNA, 15 bp, Homo sapiens
tcccatagtctgttc

SEQ ID NO: 1462857 - DNA, 15 bp, Homo sapiens
ttcccatagtctgtt

SEQ ID NO: 1462858 - DNA, 15 bp, Homo sapiens
tttcccatagtctgt

SEQ ID NO: 1462859 - DNA, 15 bp, Homo sapiens
ctttcccatagtctg

SEQ ID NO: 1462860 - DNA, 15 bp, Homo sapiens
actttcccatagtct

SEQ ID NO: 1462861 - DNA, 15 bp, Homo sapiens
cactttcccatagtc

SEQ ID NO: 1462862 - DNA, 15 bp, Homo sapiens
tcactttcccatagt

SEQ ID NO: 1462863 - DNA, 15 bp, Homo sapiens
ctcactttcccatag

SEQ ID NO: 1462864 - DNA, 15 bp, Homo sapiens
tctcactttcccata

SEQ ID NO: 1462865 - DNA, 15 bp, Homo sapiens
ttctcactttcccat

SEQ ID NO: 1462866 - DNA, 15 bp, Homo sapiens
cttctcactttccca

SEQ ID NO: 1462867 - DNA, 15 bp, Homo sapiens
tcttctcactttccc

SEQ ID NO: 1462868 - DNA, 15 bp, Homo sapiens
ctcttctcactttcc

SEQ ID NO: 1462869 - DNA, 15 bp, Homo sapiens
tctcttctcactttc

SEQ ID NO: 1462870 - DNA, 15 bp, Homo sapiens
ctctcttctcacttt

SEQ ID NO: 1462871 - DNA, 15 bp, Homo sapiens
actctcttctcactt

SEQ ID NO: 1462872 - DNA, 15 bp, Homo sapiens
gactctcttctcact

SEQ ID NO: 1462873 - DNA, 15 bp, Homo sapiens
agactctcttctcac

SEQ ID NO: 1462874 - DNA, 15 bp, Homo sapiens
gagactctcttctca

SEQ ID NO: 1462875 - DNA, 15 bp, Homo sapiens
agagactctcttctc

SEQ ID NO: 1462876 - DNA, 15 bp, Homo sapiens
cagagactctcttct

SEQ ID NO: 1462877 - DNA, 15 bp, Homo sapiens
tcagagactctcttc

SEQ ID NO: 1462878 - DNA, 15 bp, Homo sapiens
gtcagagactctctt

SEQ ID NO: 1462879 - DNA, 15 bp, Homo sapiens
agtcagagactctct

SEQ ID NO: 1462880 - DNA, 15 bp, Homo sapiens
cagtcagagactctc

SEQ ID NO: 1462881 - DNA, 15 bp, Homo sapiens
ccagtcagagactct

SEQ ID NO: 1462882 - DNA, 15 bp, Homo sapiens
cccagtcagagactc

SEQ ID NO: 1462883 - DNA, 15 bp, Homo sapiens
tcccagtcagagact

SEQ ID NO: 1462884 - DNA, 15 bp, Homo sapiens
atcccagtcagagac

SEQ ID NO: 1462885 - DNA, 15 bp, Homo sapiens
catcccagtcagaga

SEQ ID NO: 1462886 - DNA, 15 bp, Homo sapiens
tcatcccagtcagag

SEQ ID NO: 1462887 - DNA, 15 bp, Homo sapiens
atcatcccagtcaga

SEQ ID NO: 1462888 - DNA, 15 bp, Homo sapiens
catcatcccagtcag

SEQ ID NO: 1462889 - DNA, 15 bp, Homo sapiens
acatcatcccagtca

SEQ ID NO: 1462890 - DNA, 15 bp, Homo sapiens
aacatcatcccagtc

SEQ ID NO: 1462891 - DNA, 15 bp, Homo sapiens
caacatcatcccagt

SEQ ID NO: 1462892 - DNA, 15 bp, Homo sapiens
tcaacatcatcccag

SEQ ID NO: 1462893 - DNA, 15 bp, Homo sapiens
atcaacatcatccca

SEQ ID NO: 1462894 - DNA, 15 bp, Homo sapiens
catcaacatcatccc

SEQ ID NO: 1462895 - DNA, 15 bp, Homo sapiens
acatcaacatcatcc

SEQ ID NO: 1462896 - DNA, 15 bp, Homo sapiens
cacatcaacatcatc

SEQ ID NO: 1462897 - DNA, 15 bp, Homo sapiens
acacatcaacatcat

SEQ ID NO: 1462898 - DNA, 15 bp, Homo sapiens
aacacatcaacatca

SEQ ID NO: 1462899 - DNA, 15 bp, Homo sapiens
gaacacatcaacatc

SEQ ID NO: 1462900 - DNA, 15 bp, Homo sapiens
agaacacatcaacat

SEQ ID NO: 1462901 - DNA, 15 bp, Homo sapiens
aagaacacatcaaca

SEQ ID NO: 1462902 - DNA, 15 bp, Homo sapiens
caagaacacatcaac

SEQ ID NO: 1462903 - DNA, 15 bp, Homo sapiens
tcaagaacacatcaa

SEQ ID NO: 1462904 - DNA, 15 bp, Homo sapiens
ctcaagaacacatca

SEQ ID NO: 1462905 - DNA, 15 bp, Homo sapiens
cctcaagaacacatc

SEQ ID NO: 1462906 - DNA, 15 bp, Homo sapiens
tcctcaagaacacat

SEQ ID NO: 1462907 - DNA, 15 bp, Homo sapiens
atcctcaagaacaca

SEQ ID NO: 1462908 - DNA, 15 bp, Homo sapiens
catcctcaagaacac

SEQ ID NO: 1462909 - DNA, 15 bp, Homo sapiens
acatcctcaagaaca

SEQ ID NO: 1462910 - DNA, 15 bp, Homo sapiens
gacatcctcaagaac

SEQ ID NO: 1462911 - DNA, 15 bp, Homo sapiens
agacatcctcaagaa

SEQ ID NO: 1462912 - DNA, 15 bp, Homo sapiens
aagacatcctcaaga

SEQ ID NO: 1462913 - DNA, 15 bp, Homo sapiens
aaagacatcctcaag

SEQ ID NO: 1462914 - DNA, 15 bp, Homo sapiens
gaaagacatcctcaa

SEQ ID NO: 1462915 - DNA, 15 bp, Homo sapiens
agaaagacatcctca

SEQ ID NO: 1462916 - DNA, 15 bp, Homo sapiens
cagaaagacatcctc

SEQ ID NO: 1462917 - DNA, 15 bp, Homo sapiens
gcagaaagacatcct

SEQ ID NO: 1462918 - DNA, 15 bp, Homo sapiens
tgcagaaagacatcc

SEQ ID NO: 1462919 - DNA, 15 bp, Homo sapiens
atgcagaaagacatc

SEQ ID NO: 1462920 - DNA, 15 bp, Homo sapiens
tatgcagaaagacat

SEQ ID NO: 1462921 - DNA, 15 bp, Homo sapiens
gtatgcagaaagaca

SEQ ID NO: 1462922 - DNA, 15 bp, Homo sapiens
tgtatgcagaaagac

SEQ ID NO: 1462923 - DNA, 15 bp, Homo sapiens
gtgtatgcagaaaga

SEQ ID NO: 1462924 - DNA, 15 bp, Homo sapiens
ggtgtatgcagaaag

SEQ ID NO: 1462925 - DNA, 15 bp, Homo sapiens
aggtgtatgcagaaa

SEQ ID NO: 1462926 - DNA, 15 bp, Homo sapiens
taggtgtatgcagaa

SEQ ID NO: 1462927 - DNA, 15 bp, Homo sapiens
ctaggtgtatgcaga

SEQ ID NO: 1462928 - DNA, 15 bp, Homo sapiens
gctaggtgtatgcag

SEQ ID NO: 1462929 - DNA, 15 bp, Homo sapiens
agctaggtgtatgca

SEQ ID NO: 1462930 - DNA, 15 bp, Homo sapiens
cagctaggtgtatgc

SEQ ID NO: 1462931 - DNA, 15 bp, Homo sapiens
acagctaggtgtatg

SEQ ID NO: 1462932 - DNA, 15 bp, Homo sapiens
gacagctaggtgtat

SEQ ID NO: 1462933 - DNA, 15 bp, Homo sapiens
agacagctaggtgta

SEQ ID NO: 1462934 - DNA, 15 bp, Homo sapiens
cagacagctaggtgt

SEQ ID NO: 1462935 - DNA, 15 bp, Homo sapiens
gcagacagctaggtg

SEQ ID NO: 1462936 - DNA, 15 bp, Homo sapiens
tgcagacagctaggt

SEQ ID NO: 1462937 - DNA, 15 bp, Homo sapiens
ttgcagacagctagg

SEQ ID NO: 1462938 - DNA, 15 bp, Homo sapiens
attgcagacagctag

SEQ ID NO: 1462939 - DNA, 15 bp, Homo sapiens
aattgcagacagcta

SEQ ID NO: 1462940 - DNA, 15 bp, Homo sapiens
taattgcagacagct

SEQ ID NO: 1462941 - DNA, 15 bp, Homo sapiens
ataattgcagacagc

SEQ ID NO: 1462942 - DNA, 15 bp, Homo sapiens
gataattgcagacag

SEQ ID NO: 1462943 - DNA, 15 bp, Homo sapiens
tgataattgcagaca

SEQ ID NO: 1462944 - DNA, 15 bp, Homo sapiens
gtgataattgcagac

SEQ ID NO: 1462945 - DNA, 15 bp, Homo sapiens
agtgataattgcaga

SEQ ID NO: 1462946 - DNA, 15 bp, Homo sapiens
tagtgataattgcag

SEQ ID NO: 1462947 - DNA, 15 bp, Homo sapiens
ttagtgataattgca

SEQ ID NO: 1462948 - DNA, 15 bp, Homo sapiens
cttagtgataattgc

SEQ ID NO: 1462949 - DNA, 15 bp, Homo sapiens
ccttagtgataattg

SEQ ID NO: 1462950 - DNA, 15 bp, Homo sapiens
accttagtgataatt

SEQ ID NO: 1462951 - DNA, 15 bp, Homo sapiens
caccttagtgataat

SEQ ID NO: 1462952 - DNA, 15 bp, Homo sapiens
tcaccttagtgataa

SEQ ID NO: 1462953 - DNA, 15 bp, Homo sapiens
gtcaccttagtgata

SEQ ID NO: 1462954 - DNA, 15 bp, Homo sapiens
ggtcaccttagtgat

SEQ ID NO: 1462955 - DNA, 15 bp, Homo sapiens
aggtcaccttagtga

SEQ ID NO: 1462956 - DNA, 15 bp, Homo sapiens
taggtcaccttagtg

SEQ ID NO: 1462957 - DNA, 15 bp, Homo sapiens
ctaggtcaccttagt

SEQ ID NO: 1462958 - DNA, 15 bp, Homo sapiens
tctaggtcaccttag

SEQ ID NO: 1462959 - DNA, 15 bp, Homo sapiens
ttctaggtcacctta

SEQ ID NO: 1462960 - DNA, 15 bp, Homo sapiens
tttctaggtcacctt

SEQ ID NO: 1462961 - DNA, 15 bp, Homo sapiens
ttttctaggtcacct

SEQ ID NO: 1462962 - DNA, 15 bp, Homo sapiens
attttctaggtcacc

SEQ ID NO: 1462963 - DNA, 15 bp, Homo sapiens
tattttctaggtcac

SEQ ID NO: 1462964 - DNA, 15 bp, Homo sapiens
gtattttctaggtca

SEQ ID NO: 1462965 - DNA, 15 bp, Homo sapiens
tgtattttctaggtc

SEQ ID NO: 1462966 - DNA, 15 bp, Homo sapiens
ctgtattttctaggt

SEQ ID NO: 1462967 - DNA, 15 bp, Homo sapiens
gctgtattttctagg

SEQ ID NO: 1462968 - DNA, 15 bp, Homo sapiens
ggctgtattttctag

SEQ ID NO: 1462969 - DNA, 15 bp, Homo sapiens
tggctgtattttcta

SEQ ID NO: 1462970 - DNA, 15 bp, Homo sapiens
ttggctgtattttct

SEQ ID NO: 1462971 - DNA, 15 bp, Homo sapiens
tttggctgtattttc

SEQ ID NO: 1462972 - DNA, 15 bp, Homo sapiens
ctttggctgtatttt

SEQ ID NO: 1462973 - DNA, 15 bp, Homo sapiens
tctttggctgtattt

SEQ ID NO: 1462974 - DNA, 15 bp, Homo sapiens
ttctttggctgtatt

SEQ ID NO: 1462975 - DNA, 15 bp, Homo sapiens
tttctttggctgtat

SEQ ID NO: 1462976 - DNA, 15 bp, Homo sapiens
gtttctttggctgta

SEQ ID NO: 1462977 - DNA, 15 bp, Homo sapiens
tgtttctttggctgt

SEQ ID NO: 1462978 - DNA, 15 bp, Homo sapiens
atgtttctttggctg

SEQ ID NO: 1462979 - DNA, 15 bp, Homo sapiens
tatgtttctttggct

SEQ ID NO: 1462980 - DNA, 15 bp, Homo sapiens
atatgtttctttggc

SEQ ID NO: 1462981 - DNA, 15 bp, Homo sapiens
tatatgtttctttgg

SEQ ID NO: 1462982 - DNA, 15 bp, Homo sapiens
gtatatgtttctttg

SEQ ID NO: 1462983 - DNA, 15 bp, Homo sapiens
agtatatgtttcttt

SEQ ID NO: 1462984 - DNA, 15 bp, Homo sapiens
cagtatatgtttctt

SEQ ID NO: 1462985 - DNA, 15 bp, Homo sapiens
tcagtatatgtttct

SEQ ID NO: 1462986 - DNA, 15 bp, Homo sapiens
ttcagtatatgtttc

SEQ ID NO: 1462987 - DNA, 15 bp, Homo sapiens
attcagtatatgttt

SEQ ID NO: 1462988 - DNA, 15 bp, Homo sapiens
tattcagtatatgtt

SEQ ID NO: 1462989 - DNA, 15 bp, Homo sapiens
ttattcagtatatgt

SEQ ID NO: 1462990 - DNA, 15 bp, Homo sapiens
attattcagtatatg

SEQ ID NO: 1462991 - DNA, 15 bp, Homo sapiens
aattattcagtatat

SEQ ID NO: 1462992 - DNA, 15 bp, Homo sapiens
caattattcagtata

SEQ ID NO: 1462993 - DNA, 15 bp, Homo sapiens
acaattattcagtat

SEQ ID NO: 1462994 - DNA, 15 bp, Homo sapiens
cacaattattcagta

SEQ ID NO: 1462995 - DNA, 15 bp, Homo sapiens
ccacaattattcagt

SEQ ID NO: 1462996 - DNA, 15 bp, Homo sapiens
cccacaattattcag

SEQ ID NO: 1462997 - DNA, 15 bp, Homo sapiens
ccccacaattattca

SEQ ID NO: 1462998 - DNA, 15 bp, Homo sapiens
accccacaattattc

SEQ ID NO: 1462999 - DNA, 15 bp, Homo sapiens
taccccacaattatt

SEQ ID NO: 1463000 - DNA, 15 bp, Homo sapiens
ataccccacaattat

SEQ ID NO: 1463001 - DNA, 15 bp, Homo sapiens
tataccccacaatta

SEQ ID NO: 1463002 - DNA, 15 bp, Homo sapiens
ctataccccacaatt

SEQ ID NO: 1463003 - DNA, 15 bp, Homo sapiens
actataccccacaat

SEQ ID NO: 1463004 - DNA, 15 bp, Homo sapiens
tactataccccacaa

SEQ ID NO: 1463005 - DNA, 15 bp, Homo sapiens
gtactataccccaca

SEQ ID NO: 1463006 - DNA, 15 bp, Homo sapiens
agtactataccccac

SEQ ID NO: 1463007 - DNA, 15 bp, Homo sapiens
tagtactatacccca

SEQ ID NO: 1463008 - DNA, 15 bp, Homo sapiens
atagtactatacccc

SEQ ID NO: 1463009 - DNA, 15 bp, Homo sapiens
gatagtactataccc

SEQ ID NO: 1463010 - DNA, 15 bp, Homo sapiens
ggatagtactatacc

SEQ ID NO: 1463011 - DNA, 15 bp, Homo sapiens
aggatagtactatac

SEQ ID NO: 1463012 - DNA, 15 bp, Homo sapiens
caggatagtactata

SEQ ID NO: 1463013 - DNA, 15 bp, Homo sapiens
acaggatagtactat

SEQ ID NO: 1463014 - DNA, 15 bp, Homo sapiens
aacaggatagtacta

SEQ ID NO: 1463015 - DNA, 15 bp, Homo sapiens
taacaggatagtact

SEQ ID NO: 1463016 - DNA, 15 bp, Homo sapiens
ataacaggatagtac

SEQ ID NO: 1463017 - DNA, 15 bp, Homo sapiens
gataacaggatagta

SEQ ID NO: 1463018 - DNA, 15 bp, Homo sapiens
agataacaggatagt

SEQ ID NO: 1463019 - DNA, 15 bp, Homo sapiens
cagataacaggatag

SEQ ID NO: 1463020 - DNA, 15 bp, Homo sapiens
ccagataacaggata

SEQ ID NO: 1463021 - DNA, 15 bp, Homo sapiens
accagataacaggat

SEQ ID NO: 1463022 - DNA, 15 bp, Homo sapiens
taccagataacagga

SEQ ID NO: 1463023 - DNA, 15 bp, Homo sapiens
ttaccagataacagg

SEQ ID NO: 1463024 - DNA, 15 bp, Homo sapiens
tttaccagataacag

SEQ ID NO: 1463025 - DNA, 15 bp, Homo sapiens
atttaccagataaca

SEQ ID NO: 1463026 - DNA, 15 bp, Homo sapiens
tatttaccagataac

SEQ ID NO: 1463027 - DNA, 15 bp, Homo sapiens
atatttaccagataa

SEQ ID NO: 1463028 - DNA, 15 bp, Homo sapiens
aatatttaccagata

SEQ ID NO: 1463029 - DNA, 15 bp, Homo sapiens
taatatttaccagat

SEQ ID NO: 1463030 - DNA, 15 bp, Homo sapiens
ctaatatttaccaga

SEQ ID NO: 1463031 - DNA, 15 bp, Homo sapiens
tctaatatttaccag

SEQ ID NO: 1463032 - DNA, 15 bp, Homo sapiens
atctaatatttacca

SEQ ID NO: 1463033 - DNA, 15 bp, Homo sapiens
tatctaatatttacc

SEQ ID NO: 1463034 - DNA, 15 bp, Homo sapiens
atatctaatatttac

SEQ ID NO: 1463035 - DNA, 15 bp, Homo sapiens
tatatctaatattta

SEQ ID NO: 1463036 - DNA, 15 bp, Homo sapiens
atatatctaatattt

SEQ ID NO: 1463037 - DNA, 15 bp, Homo sapiens
aatatatctaatatt

SEQ ID NO: 1463038 - DNA, 15 bp, Homo sapiens
aaatatatctaatat

SEQ ID NO: 1463039 - DNA, 15 bp, Homo sapiens
gaaatatatctaata

SEQ ID NO: 1463040 - DNA, 15 bp, Homo sapiens
agaaatatatctaat

SEQ ID NO: 1463041 - DNA, 15 bp, Homo sapiens
aagaaatatatctaa

SEQ ID NO: 1463042 - DNA, 15 bp, Homo sapiens
gaagaaatatatcta

SEQ ID NO: 1463043 - DNA, 15 bp, Homo sapiens
agaagaaatatatct

SEQ ID NO: 1463044 - DNA, 15 bp, Homo sapiens
gagaagaaatatatc

SEQ ID NO: 1463045 - DNA, 15 bp, Homo sapiens
agagaagaaatatat

SEQ ID NO: 1463046 - DNA, 15 bp, Homo sapiens
tagagaagaaatata

SEQ ID NO: 1463047 - DNA, 15 bp, Homo sapiens
atagagaagaaatat

SEQ ID NO: 1463048 - DNA, 15 bp, Homo sapiens
tatagagaagaaata

SEQ ID NO: 1463049 - DNA, 15 bp, Homo sapiens
ctatagagaagaaat

SEQ ID NO: 1463050 - DNA, 15 bp, Homo sapiens
cctatagagaagaaa

SEQ ID NO: 1463051 - DNA, 15 bp, Homo sapiens
tcctatagagaagaa

SEQ ID NO: 1463052 - DNA, 15 bp, Homo sapiens
atcctatagagaaga

SEQ ID NO: 1463053 - DNA, 15 bp, Homo sapiens
aatcctatagagaag

SEQ ID NO: 1463054 - DNA, 15 bp, Homo sapiens
aaatcctatagagaa

SEQ ID NO: 1463055 - DNA, 15 bp, Homo sapiens
aaaatcctatagaga

SEQ ID NO: 1463056 - DNA, 15 bp, Homo sapiens
gaaaatcctatagag

SEQ ID NO: 1463057 - DNA, 15 bp, Homo sapiens
ggaaaatcctataga

SEQ ID NO: 1463058 - DNA, 15 bp, Homo sapiens
cggaaaatcctatag

SEQ ID NO: 1463059 - DNA, 15 bp, Homo sapiens
acggaaaatcctata

SEQ ID NO: 1463060 - DNA, 15 bp, Homo sapiens
tacggaaaatcctat

SEQ ID NO: 1463061 - DNA, 15 bp, Homo sapiens
gtacggaaaatccta

SEQ ID NO: 1463062 - DNA, 15 bp, Homo sapiens
tgtacggaaaatcct

SEQ ID NO: 1463063 - DNA, 15 bp, Homo sapiens
atgtacggaaaatcc

SEQ ID NO: 1463064 - DNA, 15 bp, Homo sapiens
aatgtacggaaaatc

SEQ ID NO: 1463065 - DNA, 15 bp, Homo sapiens
taatgtacggaaaat

SEQ ID NO: 1463066 - DNA, 15 bp, Homo sapiens
gtaatgtacggaaaa

SEQ ID NO: 1463067 - DNA, 15 bp, Homo sapiens
ggtaatgtacggaaa

SEQ ID NO: 1463068 - DNA, 15 bp, Homo sapiens
tggtaatgtacggaa

SEQ ID NO: 1463069 - DNA, 15 bp, Homo sapiens
atggtaatgtacgga

SEQ ID NO: 1463070 - DNA, 15 bp, Homo sapiens
tatggtaatgtacgg

SEQ ID NO: 1463071 - DNA, 15 bp, Homo sapiens
ttatggtaatgtacg

SEQ ID NO: 1463072 - DNA, 15 bp, Homo sapiens
attatggtaatgtac

SEQ ID NO: 1463073 - DNA, 15 bp, Homo sapiens
cattatggtaatgta

SEQ ID NO: 1463074 - DNA, 15 bp, Homo sapiens
ccattatggtaatgt

SEQ ID NO: 1463075 - DNA, 15 bp, Homo sapiens
tccattatggtaatg

SEQ ID NO: 1463076 - DNA, 15 bp, Homo sapiens
atccattatggtaat

SEQ ID NO: 1463077 - DNA, 15 bp, Homo sapiens
catccattatggtaa

SEQ ID NO: 1463078 - DNA, 15 bp, Homo sapiens
tcatccattatggta

SEQ ID NO: 1463079 - DNA, 15 bp, Homo sapiens
ctcatccattatggt

SEQ ID NO: 1463080 - DNA, 15 bp, Homo sapiens
tctcatccattatgg

SEQ ID NO: 1463081 - DNA, 15 bp, Homo sapiens
gtctcatccattatg

SEQ ID NO: 1463082 - DNA, 15 bp, Homo sapiens
ggtctcatccattat

SEQ ID NO: 1463083 - DNA, 15 bp, Homo sapiens
gggtctcatccatta

SEQ ID NO: 1463084 - DNA, 15 bp, Homo sapiens
tgggtctcatccatt

SEQ ID NO: 1463085 - DNA, 15 bp, Homo sapiens
atgggtctcatccat

SEQ ID NO: 1463086 - DNA, 15 bp, Homo sapiens
gatgggtctcatcca

SEQ ID NO: 1463087 - DNA, 15 bp, Homo sapiens
ggatgggtctcatcc

SEQ ID NO: 1463088 - DNA, 15 bp, Homo sapiens
tggatgggtctcatc

SEQ ID NO: 1463089 - DNA, 15 bp, Homo sapiens
atggatgggtctcat

SEQ ID NO: 1463090 - DNA, 15 bp, Homo sapiens
aatggatgggtctca

SEQ ID NO: 1463091 - DNA, 15 bp, Homo sapiens
gaatggatgggtctc

SEQ ID NO: 1463092 - DNA, 15 bp, Homo sapiens
ggaatggatgggtct

SEQ ID NO: 1463093 - DNA, 15 bp, Homo sapiens
gggaatggatgggtc

SEQ ID NO: 1463094 - DNA, 15 bp, Homo sapiens
agggaatggatgggt

SEQ ID NO: 1463095 - DNA, 15 bp, Homo sapiens
tagggaatggatggg

SEQ ID NO: 1463096 - DNA, 15 bp, Homo sapiens
ctagggaatggatgg

SEQ ID NO: 1463097 - DNA, 15 bp, Homo sapiens
gctagggaatggatg

SEQ ID NO: 1463098 - DNA, 15 bp, Homo sapiens
agctagggaatggat

SEQ ID NO: 1463099 - DNA, 15 bp, Homo sapiens
aagctagggaatgga

SEQ ID NO: 1463100 - DNA, 15 bp, Homo sapiens
aaagctagggaatgg

SEQ ID NO: 1463101 - DNA, 15 bp, Homo sapiens
aaaagctagggaatg

SEQ ID NO: 1463102 - DNA, 15 bp, Homo sapiens
gaaaagctagggaat

SEQ ID NO: 1463103 - DNA, 15 bp, Homo sapiens
agaaaagctagggaa

SEQ ID NO: 1463104 - DNA, 15 bp, Homo sapiens
cagaaaagctaggga

SEQ ID NO: 1463105 - DNA, 15 bp, Homo sapiens
acagaaaagctaggg

SEQ ID NO: 1463106 - DNA, 15 bp, Homo sapiens
cacagaaaagctagg

SEQ ID NO: 1463107 - DNA, 15 bp, Homo sapiens
tcacagaaaagctag

SEQ ID NO: 1463108 - DNA, 15 bp, Homo sapiens
atcacagaaaagcta

SEQ ID NO: 1463109 - DNA, 15 bp, Homo sapiens
gatcacagaaaagct

SEQ ID NO: 1463110 - DNA, 15 bp, Homo sapiens
agatcacagaaaagc

SEQ ID NO: 1463111 - DNA, 15 bp, Homo sapiens
gagatcacagaaaag

SEQ ID NO: 1463112 - DNA, 15 bp, Homo sapiens
tgagatcacagaaaa

SEQ ID NO: 1463113 - DNA, 15 bp, Homo sapiens
ctgagatcacagaaa

SEQ ID NO: 1463114 - DNA, 15 bp, Homo sapiens
gctgagatcacagaa

SEQ ID NO: 1463115 - DNA, 15 bp, Homo sapiens
agctgagatcacaga

SEQ ID NO: 1463116 - DNA, 15 bp, Homo sapiens
cagctgagatcacag

SEQ ID NO: 1463117 - DNA, 15 bp, Homo sapiens
acagctgagatcaca

SEQ ID NO: 1463118 - DNA, 15 bp, Homo sapiens
cacagctgagatcac

SEQ ID NO: 1463119 - DNA, 15 bp, Homo sapiens
tcacagctgagatca

SEQ ID NO: 1463120 - DNA, 15 bp, Homo sapiens
atcacagctgagatc

SEQ ID NO: 1463121 - DNA, 15 bp, Homo sapiens
aatcacagctgagat

SEQ ID NO: 1463122 - DNA, 15 bp, Homo sapiens
taatcacagctgaga

SEQ ID NO: 1463123 - DNA, 15 bp, Homo sapiens
gtaatcacagctgag

SEQ ID NO: 1463124 - DNA, 15 bp, Homo sapiens
ggtaatcacagctga

SEQ ID NO: 1463125 - DNA, 15 bp, Homo sapiens
tggtaatcacagctg

SEQ ID NO: 1463126 - DNA, 15 bp, Homo sapiens
ctggtaatcacagct

SEQ ID NO: 1463127 - DNA, 15 bp, Homo sapiens
tctggtaatcacagc

SEQ ID NO: 1463128 - DNA, 15 bp, Homo sapiens
atctggtaatcacag

SEQ ID NO: 1463129 - DNA, 15 bp, Homo sapiens
aatctggtaatcaca

SEQ ID NO: 1463130 - DNA, 15 bp, Homo sapiens
taatctggtaatcac

SEQ ID NO: 1463131 - DNA, 15 bp, Homo sapiens
ataatctggtaatca

SEQ ID NO: 1463132 - DNA, 15 bp, Homo sapiens
aataatctggtaatc

SEQ ID NO: 1463133 - DNA, 15 bp, Homo sapiens
taataatctggtaat

SEQ ID NO: 1463134 - DNA, 15 bp, Homo sapiens
ataataatctggtaa

SEQ ID NO: 1463135 - DNA, 15 bp, Homo sapiens
gataataatctggta

SEQ ID NO: 1463136 - DNA, 15 bp, Homo sapiens
agataataatctggt

SEQ ID NO: 1463137 - DNA, 15 bp, Homo sapiens
gagataataatctgg

SEQ ID NO: 1463138 - DNA, 15 bp, Homo sapiens
agagataataatctg

SEQ ID NO: 1463139 - DNA, 15 bp, Homo sapiens
aagagataataatct

SEQ ID NO: 1463140 - DNA, 15 bp, Homo sapiens
caagagataataatc

SEQ ID NO: 1463141 - DNA, 15 bp, Homo sapiens
acaagagataataat

SEQ ID NO: 1463142 - DNA, 15 bp, Homo sapiens
gacaagagataataa

SEQ ID NO: 1463143 - DNA, 15 bp, Homo sapiens
ggacaagagataata

SEQ ID NO: 1463144 - DNA, 15 bp, Homo sapiens
gggacaagagataat

SEQ ID NO: 1463145 - DNA, 15 bp, Homo sapiens
ggggacaagagataa

SEQ ID NO: 1463146 - DNA, 15 bp, Homo sapiens
aggggacaagagata

SEQ ID NO: 1463147 - DNA, 15 bp, Homo sapiens
caggggacaagagat

SEQ ID NO: 1463148 - DNA, 15 bp, Homo sapiens
acaggggacaagaga

SEQ ID NO: 1463149 - DNA, 15 bp, Homo sapiens
aacaggggacaagag

SEQ ID NO: 1463150 - DNA, 15 bp, Homo sapiens
aaacaggggacaaga

SEQ ID NO: 1463151 - DNA, 15 bp, Homo sapiens
gaaacaggggacaag

SEQ ID NO: 1463152 - DNA, 15 bp, Homo sapiens
tgaaacaggggacaa

SEQ ID NO: 1463153 - DNA, 15 bp, Homo sapiens
ttgaaacaggggaca

SEQ ID NO: 1463154 - DNA, 15 bp, Homo sapiens
cttgaaacaggggac

SEQ ID NO: 1463155 - DNA, 15 bp, Homo sapiens
gcttgaaacagggga

SEQ ID NO: 1463156 - DNA, 15 bp, Homo sapiens
agcttgaaacagggg

SEQ ID NO: 1463157 - DNA, 15 bp, Homo sapiens
gagcttgaaacaggg

SEQ ID NO: 1463158 - DNA, 15 bp, Homo sapiens
agagcttgaaacagg

SEQ ID NO: 1463159 - DNA, 15 bp, Homo sapiens
cagagcttgaaacag

SEQ ID NO: 1463160 - DNA, 15 bp, Homo sapiens
ccagagcttgaaaca

SEQ ID NO: 1463161 - DNA, 15 bp, Homo sapiens
tccagagcttgaaac

SEQ ID NO: 1463162 - DNA, 15 bp, Homo sapiens
atccagagcttgaaa

SEQ ID NO: 1463163 - DNA, 15 bp, Homo sapiens
catccagagcttgaa

SEQ ID NO: 1463164 - DNA, 15 bp, Homo sapiens
acatccagagcttga

SEQ ID NO: 1463165 - DNA, 15 bp, Homo sapiens
tacatccagagcttg

SEQ ID NO: 1463166 - DNA, 15 bp, Homo sapiens
atacatccagagctt

SEQ ID NO: 1463167 - DNA, 15 bp, Homo sapiens
tatacatccagagct

SEQ ID NO: 1463168 - DNA, 15 bp, Homo sapiens
atatacatccagagc

SEQ ID NO: 1463169 - DNA, 15 bp, Homo sapiens
gatatacatccagag

SEQ ID NO: 1463170 - DNA, 15 bp, Homo sapiens
tgatatacatccaga

SEQ ID NO: 1463171 - DNA, 15 bp, Homo sapiens
gtgatatacatccag

SEQ ID NO: 1463172 - DNA, 15 bp, Homo sapiens
tgtgatatacatcca

SEQ ID NO: 1463173 - DNA, 15 bp, Homo sapiens
ttgtgatatacatcc

SEQ ID NO: 1463174 - DNA, 15 bp, Homo sapiens
attgtgatatacatc

SEQ ID NO: 1463175 - DNA, 15 bp, Homo sapiens
tattgtgatatacat

SEQ ID NO: 1463176 - DNA, 15 bp, Homo sapiens
ctattgtgatataca

SEQ ID NO: 1463177 - DNA, 15 bp, Homo sapiens
gctattgtgatatac

SEQ ID NO: 1463178 - DNA, 15 bp, Homo sapiens
agctattgtgatata

SEQ ID NO: 1463179 - DNA, 15 bp, Homo sapiens
gagctattgtgatat

SEQ ID NO: 1463180 - DNA, 15 bp, Homo sapiens
tgagctattgtgata

SEQ ID NO: 1463181 - DNA, 15 bp, Homo sapiens
ctgagctattgtgat

SEQ ID NO: 1463182 - DNA, 15 bp, Homo sapiens
tctgagctattgtga

SEQ ID NO: 1463183 - DNA, 15 bp, Homo sapiens
atctgagctattgtg

SEQ ID NO: 1463184 - DNA, 15 bp, Homo sapiens
catctgagctattgt

SEQ ID NO: 1463185 - DNA, 15 bp, Homo sapiens
gcatctgagctattg

SEQ ID NO: 1463186 - DNA, 15 bp, Homo sapiens
tgcatctgagctatt

SEQ ID NO: 1463187 - DNA, 15 bp, Homo sapiens
atgcatctgagctat

SEQ ID NO: 1463188 - DNA, 15 bp, Homo sapiens
aatgcatctgagcta

SEQ ID NO: 1463189 - DNA, 15 bp, Homo sapiens
gaatgcatctgagct

SEQ ID NO: 1463190 - DNA, 15 bp, Homo sapiens
agaatgcatctgagc

SEQ ID NO: 1463191 - DNA, 15 bp, Homo sapiens
aagaatgcatctgag

SEQ ID NO: 1463192 - DNA, 15 bp, Homo sapiens
taagaatgcatctga

SEQ ID NO: 1463193 - DNA, 15 bp, Homo sapiens
ataagaatgcatctg

SEQ ID NO: 1463194 - DNA, 15 bp, Homo sapiens
cataagaatgcatct

SEQ ID NO: 1463195 - DNA, 15 bp, Homo sapiens
acataagaatgcatc

SEQ ID NO: 1463196 - DNA, 15 bp, Homo sapiens
gacataagaatgcat

SEQ ID NO: 1463197 - DNA, 15 bp, Homo sapiens
agacataagaatgca

SEQ ID NO: 1463198 - DNA, 15 bp, Homo sapiens
gagacataagaatgc

SEQ ID NO: 1463199 - DNA, 15 bp, Homo sapiens
agagacataagaatg

SEQ ID NO: 1463200 - DNA, 15 bp, Homo sapiens
cagagacataagaat

SEQ ID NO: 1463201 - DNA, 15 bp, Homo sapiens
acagagacataagaa

SEQ ID NO: 1463202 - DNA, 15 bp, Homo sapiens
gacagagacataaga

SEQ ID NO: 1463203 - DNA, 15 bp, Homo sapiens
agacagagacataag

SEQ ID NO: 1463204 - DNA, 15 bp, Homo sapiens
gagacagagacataa

SEQ ID NO: 1463205 - DNA, 15 bp, Homo sapiens
tgagacagagacata

SEQ ID NO: 1463206 - DNA, 15 bp, Homo sapiens
ttgagacagagacat

SEQ ID NO: 1463207 - DNA, 15 bp, Homo sapiens
cttgagacagagaca

SEQ ID NO: 1463208 - DNA, 15 bp, Homo sapiens
gcttgagacagagac

SEQ ID NO: 1463209 - DNA, 15 bp, Homo sapiens
agcttgagacagaga

SEQ ID NO: 1463210 - DNA, 15 bp, Homo sapiens
aagcttgagacagag

SEQ ID NO: 1463211 - DNA, 15 bp, Homo sapiens
taagcttgagacaga

SEQ ID NO: 1463212 - DNA, 15 bp, Homo sapiens
gtaagcttgagacag

SEQ ID NO: 1463213 - DNA, 15 bp, Homo sapiens
agtaagcttgagaca

SEQ ID NO: 1463214 - DNA, 15 bp, Homo sapiens
cagtaagcttgagac

SEQ ID NO: 1463215 - DNA, 15 bp, Homo sapiens
tcagtaagcttgaga

SEQ ID NO: 1463216 - DNA, 15 bp, Homo sapiens
atcagtaagcttgag

SEQ ID NO: 1463217 - DNA, 15 bp, Homo sapiens
catcagtaagcttga

SEQ ID NO: 1463218 - DNA, 15 bp, Homo sapiens
ccatcagtaagcttg

SEQ ID NO: 1463219 - DNA, 15 bp, Homo sapiens
tccatcagtaagctt

SEQ ID NO: 1463220 - DNA, 15 bp, Homo sapiens
gtccatcagtaagct

SEQ ID NO: 1463221 - DNA, 15 bp, Homo sapiens
cgtccatcagtaagc

SEQ ID NO: 1463222 - DNA, 15 bp, Homo sapiens
ccgtccatcagtaag

SEQ ID NO: 1463223 - DNA, 15 bp, Homo sapiens
tccgtccatcagtaa

SEQ ID NO: 1463224 - DNA, 15 bp, Homo sapiens
ttccgtccatcagta

SEQ ID NO: 1463225 - DNA, 15 bp, Homo sapiens
tttccgtccatcagt

SEQ ID NO: 1463226 - DNA, 15 bp, Homo sapiens
atttccgtccatcag

SEQ ID NO: 1463227 - DNA, 15 bp, Homo sapiens
aatttccgtccatca

SEQ ID NO: 1463228 - DNA, 15 bp, Homo sapiens
taatttccgtccatc

SEQ ID NO: 1463229 - DNA, 15 bp, Homo sapiens
gtaatttccgtccat

SEQ ID NO: 1463230 - DNA, 15 bp, Homo sapiens
tgtaatttccgtcca

SEQ ID NO: 1463231 - DNA, 15 bp, Homo sapiens
ttgtaatttccgtcc

SEQ ID NO: 1463232 - DNA, 15 bp, Homo sapiens
attgtaatttccgtc

SEQ ID NO: 1463233 - DNA, 15 bp, Homo sapiens
tattgtaatttccgt

SEQ ID NO: 1463234 - DNA, 15 bp, Homo sapiens
ttattgtaatttccg

SEQ ID NO: 1463235 - DNA, 15 bp, Homo sapiens
gttattgtaatttcc

SEQ ID NO: 1463236 - DNA, 15 bp, Homo sapiens
tgttattgtaatttc

SEQ ID NO: 1463237 - DNA, 15 bp, Homo sapiens
ctgttattgtaattt

SEQ ID NO: 1463238 - DNA, 15 bp, Homo sapiens
tctgttattgtaatt

SEQ ID NO: 1463239 - DNA, 15 bp, Homo sapiens
ctctgttattgtaat

SEQ ID NO: 1463240 - DNA, 15 bp, Homo sapiens
actctgttattgtaa

SEQ ID NO: 1463241 - DNA, 15 bp, Homo sapiens
tactctgttattgta

SEQ ID NO: 1463242 - DNA, 15 bp, Homo sapiens
ttactctgttattgt

SEQ ID NO: 1463243 - DNA, 15 bp, Homo sapiens
attactctgttattg

SEQ ID NO: 1463244 - DNA, 15 bp, Homo sapiens
cattactctgttatt

SEQ ID NO: 1463245 - DNA, 15 bp, Homo sapiens
ccattactctgttat

SEQ ID NO: 1463246 - DNA, 15 bp, Homo sapiens
cccattactctgtta

SEQ ID NO: 1463247 - DNA, 15 bp, Homo sapiens
tcccattactctgtt

SEQ ID NO: 1463248 - DNA, 15 bp, Homo sapiens
gtcccattactctgt

SEQ ID NO: 1463249 - DNA, 15 bp, Homo sapiens
tgtcccattactctg

SEQ ID NO: 1463250 - DNA, 15 bp, Homo sapiens
ttgtcccattactct

SEQ ID NO: 1463251 - DNA, 15 bp, Homo sapiens
tttgtcccattactc

SEQ ID NO: 1463252 - DNA, 15 bp, Homo sapiens
ttttgtcccattact

SEQ ID NO: 1463253 - DNA, 15 bp, Homo sapiens
attttgtcccattac

SEQ ID NO: 1463254 - DNA, 15 bp, Homo sapiens
tattttgtcccatta

SEQ ID NO: 1463255 - DNA, 15 bp, Homo sapiens
atattttgtcccatt

SEQ ID NO: 1463256 - DNA, 15 bp, Homo sapiens
aatattttgtcccat

SEQ ID NO: 1463257 - DNA, 15 bp, Homo sapiens
gaatattttgtccca

SEQ ID NO: 1463258 - DNA, 15 bp, Homo sapiens
agaatattttgtccc

SEQ ID NO: 1463259 - DNA, 15 bp, Homo sapiens
gagaatattttgtcc

SEQ ID NO: 1463260 - DNA, 15 bp, Homo sapiens
tgagaatattttgtc

SEQ ID NO: 1463261 - DNA, 15 bp, Homo sapiens
ctgagaatattttgt

SEQ ID NO: 1463262 - DNA, 15 bp, Homo sapiens
tctgagaatattttg

SEQ ID NO: 1463263 - DNA, 15 bp, Homo sapiens
gtctgagaatatttt

SEQ ID NO: 1463264 - DNA, 15 bp, Homo sapiens
tgtctgagaatattt

SEQ ID NO: 1463265 - DNA, 15 bp, Homo sapiens
ttgtctgagaatatt

SEQ ID NO: 1463266 - DNA, 15 bp, Homo sapiens
gttgtctgagaatat

SEQ ID NO: 1463267 - DNA, 15 bp, Homo sapiens
tgttgtctgagaata

SEQ ID NO: 1463268 - DNA, 15 bp, Homo sapiens
atgttgtctgagaat

SEQ ID NO: 1463269 - DNA, 15 bp, Homo sapiens
catgttgtctgagaa

SEQ ID NO: 1463270 - DNA, 15 bp, Homo sapiens
ccatgttgtctgaga

SEQ ID NO: 1463271 - DNA, 15 bp, Homo sapiens
tccatgttgtctgag

SEQ ID NO: 1463272 - DNA, 15 bp, Homo sapiens
atccatgttgtctga

SEQ ID NO: 1463273 - DNA, 15 bp, Homo sapiens
tatccatgttgtctg

SEQ ID NO: 1463274 - DNA, 15 bp, Homo sapiens
ctatccatgttgtct

SEQ ID NO: 1463275 - DNA, 15 bp, Homo sapiens
cctatccatgttgtc

SEQ ID NO: 1463276 - DNA, 15 bp, Homo sapiens
ccctatccatgttgt

SEQ ID NO: 1463277 - DNA, 15 bp, Homo sapiens
tccctatccatgttg

SEQ ID NO: 1463278 - DNA, 15 bp, Homo sapiens
ctccctatccatgtt

SEQ ID NO: 1463279 - DNA, 15 bp, Homo sapiens
gctccctatccatgt

SEQ ID NO: 1463280 - DNA, 15 bp, Homo sapiens
ggctccctatccatg

SEQ ID NO: 1463281 - DNA, 15 bp, Homo sapiens
tggctccctatccat

SEQ ID NO: 1463282 - DNA, 15 bp, Homo sapiens
atggctccctatcca

SEQ ID NO: 1463283 - DNA, 15 bp, Homo sapiens
aatggctccctatcc

SEQ ID NO: 1463284 - DNA, 15 bp, Homo sapiens
aaatggctccctatc

SEQ ID NO: 1463285 - DNA, 15 bp, Homo sapiens
caaatggctccctat

SEQ ID NO: 1463286 - DNA, 15 bp, Homo sapiens
gcaaatggctcccta

SEQ ID NO: 1463287 - DNA, 15 bp, Homo sapiens
ggcaaatggctccct

SEQ ID NO: 1463288 - DNA, 15 bp, Homo sapiens
aggcaaatggctccc

SEQ ID NO: 1463289 - DNA, 15 bp, Homo sapiens
caggcaaatggctcc

SEQ ID NO: 1463290 - DNA, 15 bp, Homo sapiens
ccaggcaaatggctc

SEQ ID NO: 1463291 - DNA, 15 bp, Homo sapiens
gccaggcaaatggct

SEQ ID NO: 1463292 - DNA, 15 bp, Homo sapiens
agccaggcaaatggc

SEQ ID NO: 1463293 - DNA, 15 bp, Homo sapiens
gagccaggcaaatgg

SEQ ID NO: 1463294 - DNA, 15 bp, Homo sapiens
tgagccaggcaaatg

SEQ ID NO: 1463295 - DNA, 15 bp, Homo sapiens
ctgagccaggcaaat

SEQ ID NO: 1463296 - DNA, 15 bp, Homo sapiens
tctgagccaggcaaa

SEQ ID NO: 1463297 - DNA, 15 bp, Homo sapiens
atctgagccaggcaa

SEQ ID NO: 1463298 - DNA, 15 bp, Homo sapiens
tatctgagccaggca

SEQ ID NO: 1463299 - DNA, 15 bp, Homo sapiens
ttatctgagccaggc

SEQ ID NO: 1463300 - DNA, 15 bp, Homo sapiens
attatctgagccagg

SEQ ID NO: 1463301 - DNA, 15 bp, Homo sapiens
cattatctgagccag

SEQ ID NO: 1463302 - DNA, 15 bp, Homo sapiens
acattatctgagcca

SEQ ID NO: 1463303 - DNA, 15 bp, Homo sapiens
cacattatctgagcc

SEQ ID NO: 1463304 - DNA, 15 bp, Homo sapiens
acacattatctgagc

SEQ ID NO: 1463305 - DNA, 15 bp, Homo sapiens
gacacattatctgag

SEQ ID NO: 1463306 - DNA, 15 bp, Homo sapiens
ggacacattatctga

SEQ ID NO: 1463307 - DNA, 15 bp, Homo sapiens
aggacacattatctg

SEQ ID NO: 1463308 - DNA, 15 bp, Homo sapiens
aaggacacattatct

SEQ ID NO: 1463309 - DNA, 15 bp, Homo sapiens
gaaggacacattatc

SEQ ID NO: 1463310 - DNA, 15 bp, Homo sapiens
agaaggacacattat

SEQ ID NO: 1463311 - DNA, 15 bp, Homo sapiens
cagaaggacacatta

SEQ ID NO: 1463312 - DNA, 15 bp, Homo sapiens
tcagaaggacacatt

SEQ ID NO: 1463313 - DNA, 15 bp, Homo sapiens
ttcagaaggacacat

SEQ ID NO: 1463314 - DNA, 15 bp, Homo sapiens
tttcagaaggacaca

SEQ ID NO: 1463315 - DNA, 15 bp, Homo sapiens
ttttcagaaggacac

SEQ ID NO: 1463316 - DNA, 15 bp, Homo sapiens
cttttcagaaggaca

SEQ ID NO: 1463317 - DNA, 15 bp, Homo sapiens
acttttcagaaggac

SEQ ID NO: 1463318 - DNA, 15 bp, Homo sapiens
aacttttcagaagga

SEQ ID NO: 1463319 - DNA, 15 bp, Homo sapiens
taacttttcagaagg

SEQ ID NO: 1463320 - DNA, 15 bp, Homo sapiens
gtaacttttcagaag

SEQ ID NO: 1463321 - DNA, 15 bp, Homo sapiens
ggtaacttttcagaa

SEQ ID NO: 1463322 - DNA, 15 bp, Homo sapiens
tggtaacttttcaga

SEQ ID NO: 1463323 - DNA, 15 bp, Homo sapiens
atggtaacttttcag

SEQ ID NO: 1463324 - DNA, 15 bp, Homo sapiens
tatggtaacttttca

SEQ ID NO: 1463325 - DNA, 15 bp, Homo sapiens
atatggtaacttttc

SEQ ID NO: 1463326 - DNA, 15 bp, Homo sapiens
gatatggtaactttt

SEQ ID NO: 1463327 - DNA, 15 bp, Homo sapiens
tgatatggtaacttt

SEQ ID NO: 1463328 - DNA, 15 bp, Homo sapiens
ttgatatggtaactt

SEQ ID NO: 1463329 - DNA, 15 bp, Homo sapiens
tttgatatggtaact

SEQ ID NO: 1463330 - DNA, 15 bp, Homo sapiens
gtttgatatggtaac

SEQ ID NO: 1463331 - DNA, 15 bp, Homo sapiens
ggtttgatatggtaa

SEQ ID NO: 1463332 - DNA, 15 bp, Homo sapiens
tggtttgatatggta

SEQ ID NO: 1463333 - DNA, 15 bp, Homo sapiens
atggtttgatatggt

SEQ ID NO: 1463334 - DNA, 15 bp, Homo sapiens
tatggtttgatatgg

SEQ ID NO: 1463335 - DNA, 15 bp, Homo sapiens
atatggtttgatatg

SEQ ID NO: 1463336 - DNA, 15 bp, Homo sapiens
tatatggtttgatat

SEQ ID NO: 1463337 - DNA, 15 bp, Homo sapiens
ttatatggtttgata

SEQ ID NO: 1463338 - DNA, 15 bp, Homo sapiens
gttatatggtttgat

SEQ ID NO: 1463339 - DNA, 15 bp, Homo sapiens
tgttatatggtttga

SEQ ID NO: 1463340 - DNA, 15 bp, Homo sapiens
ttgttatatggtttg

SEQ ID NO: 1463341 - DNA, 15 bp, Homo sapiens
gttgttatatggttt

SEQ ID NO: 1463342 - DNA, 15 bp, Homo sapiens
ggttgttatatggtt

SEQ ID NO: 1463343 - DNA, 15 bp, Homo sapiens
aggttgttatatggt

SEQ ID NO: 1463344 - DNA, 15 bp, Homo sapiens
aaggttgttatatgg

SEQ ID NO: 1463345 - DNA, 15 bp, Homo sapiens
aaaggttgttatatg

SEQ ID NO: 1463346 - DNA, 15 bp, Homo sapiens
aaaaggttgttatat

SEQ ID NO: 1463347 - DNA, 15 bp, Homo sapiens
gaaaaggttgttata

SEQ ID NO: 1463348 - DNA, 15 bp, Homo sapiens
ggaaaaggttgttat

SEQ ID NO: 1463349 - DNA, 15 bp, Homo sapiens
aggaaaaggttgtta

SEQ ID NO: 1463350 - DNA, 15 bp, Homo sapiens
taggaaaaggttgtt

SEQ ID NO: 1463351 - DNA, 15 bp, Homo sapiens
ttaggaaaaggttgt

SEQ ID NO: 1463352 - DNA, 15 bp, Homo sapiens
attaggaaaaggttg

SEQ ID NO: 1463353 - DNA, 15 bp, Homo sapiens
tattaggaaaaggtt

SEQ ID NO: 1463354 - DNA, 15 bp, Homo sapiens
gtattaggaaaaggt

SEQ ID NO: 1463355 - DNA, 15 bp, Homo sapiens
ggtattaggaaaagg

SEQ ID NO: 1463356 - DNA, 15 bp, Homo sapiens
aggtattaggaaaag

SEQ ID NO: 1463357 - DNA, 15 bp, Homo sapiens
gaggtattaggaaaa

SEQ ID NO: 1463358 - DNA, 15 bp, Homo sapiens
tgaggtattaggaaa

SEQ ID NO: 1463359 - DNA, 15 bp, Homo sapiens
ttgaggtattaggaa

SEQ ID NO: 1463360 - DNA, 15 bp, Homo sapiens
gttgaggtattagga

SEQ ID NO: 1463361 - DNA, 15 bp, Homo sapiens
tgttgaggtattagg

SEQ ID NO: 1463362 - DNA, 15 bp, Homo sapiens
atgttgaggtattag

SEQ ID NO: 1463363 - DNA, 15 bp, Homo sapiens
aatgttgaggtatta

SEQ ID NO: 1463364 - DNA, 15 bp, Homo sapiens
aaatgttgaggtatt

SEQ ID NO: 1463365 - DNA, 15 bp, Homo sapiens
aaaatgttgaggtat

SEQ ID NO: 1463366 - DNA, 15 bp, Homo sapiens
gaaaatgttgaggta

SEQ ID NO: 1463367 - DNA, 15 bp, Homo sapiens
tgaaaatgttgaggt

SEQ ID NO: 1463368 - DNA, 15 bp, Homo sapiens
atgaaaatgttgagg

SEQ ID NO: 1463369 - DNA, 15 bp, Homo sapiens
aatgaaaatgttgag

SEQ ID NO: 1463370 - DNA, 15 bp, Homo sapiens
taatgaaaatgttga

SEQ ID NO: 1463371 - DNA, 15 bp, Homo sapiens
gtaatgaaaatgttg

SEQ ID NO: 1463372 - DNA, 15 bp, Homo sapiens
tgtaatgaaaatgtt

SEQ ID NO: 1463373 - DNA, 15 bp, Homo sapiens
gtgtaatgaaaatgt

SEQ ID NO: 1463374 - DNA, 15 bp, Homo sapiens
cgtgtaatgaaaatg

SEQ ID NO: 1463375 - DNA, 15 bp, Homo sapiens
gcgtgtaatgaaaat

SEQ ID NO: 1463376 - DNA, 15 bp, Homo sapiens
agcgtgtaatgaaaa

SEQ ID NO: 1463377 - DNA, 15 bp, Homo sapiens
gagcgtgtaatgaaa

SEQ ID NO: 1463378 - DNA, 15 bp, Homo sapiens
agagcgtgtaatgaa

SEQ ID NO: 1463379 - DNA, 15 bp, Homo sapiens
cagagcgtgtaatga

SEQ ID NO: 1463380 - DNA, 15 bp, Homo sapiens
gcagagcgtgtaatg

SEQ ID NO: 1463381 - DNA, 15 bp, Homo sapiens
tgcagagcgtgtaat

SEQ ID NO: 1463382 - DNA, 15 bp, Homo sapiens
ctgcagagcgtgtaa

SEQ ID NO: 1463383 - DNA, 15 bp, Homo sapiens
actgcagagcgtgta

SEQ ID NO: 1463384 - DNA, 15 bp, Homo sapiens
aactgcagagcgtgt

SEQ ID NO: 1463385 - DNA, 15 bp, Homo sapiens
gaactgcagagcgtg

SEQ ID NO: 1463386 - DNA, 15 bp, Homo sapiens
tgaactgcagagcgt

SEQ ID NO: 1463387 - DNA, 15 bp, Homo sapiens
ctgaactgcagagcg

SEQ ID NO: 1463388 - DNA, 15 bp, Homo sapiens
actgaactgcagagc

SEQ ID NO: 1463389 - DNA, 15 bp, Homo sapiens
aactgaactgcagag

SEQ ID NO: 1463390 - DNA, 15 bp, Homo sapiens
caactgaactgcaga

SEQ ID NO: 1463391 - DNA, 15 bp, Homo sapiens
gcaactgaactgcag

SEQ ID NO: 1463392 - DNA, 15 bp, Homo sapiens
tgcaactgaactgca

SEQ ID NO: 1463393 - DNA, 15 bp, Homo sapiens
gtgcaactgaactgc

SEQ ID NO: 1463394 - DNA, 15 bp, Homo sapiens
agtgcaactgaactg

SEQ ID NO: 1463395 - DNA, 15 bp, Homo sapiens
cagtgcaactgaact

SEQ ID NO: 1463396 - DNA, 15 bp, Homo sapiens
acagtgcaactgaac

SEQ ID NO: 1463397 - DNA, 15 bp, Homo sapiens
tacagtgcaactgaa

SEQ ID NO: 1463398 - DNA, 15 bp, Homo sapiens
gtacagtgcaactga

SEQ ID NO: 1463399 - DNA, 15 bp, Homo sapiens
agtacagtgcaactg

SEQ ID NO: 1463400 - DNA, 15 bp, Homo sapiens
aagtacagtgcaact

SEQ ID NO: 1463401 - DNA, 15 bp, Homo sapiens
aaagtacagtgcaac

SEQ ID NO: 1463402 - DNA, 15 bp, Homo sapiens
gaaaagtacagtgca

SEQ ID NO: 1463403 - DNA, 15 bp, Homo sapiens
agaaaagtacagtgc

SEQ ID NO: 1463404 - DNA, 15 bp, Homo sapiens
gagaaaagtacagtg

SEQ ID NO: 1463405 - DNA, 15 bp, Homo sapiens
tgagaaaagtacagt

SEQ ID NO: 1463406 - DNA, 15 bp, Homo sapiens
ctgagaaaagtacag

SEQ ID NO: 1463407 - DNA, 15 bp, Homo sapiens
cctgagaaaagtaca

SEQ ID NO: 1463408 - DNA, 15 bp, Homo sapiens
tcctgagaaaagtac

SEQ ID NO: 1463409 - DNA, 15 bp, Homo sapiens
gtcctgagaaaagta

SEQ ID NO: 1463410 - DNA, 15 bp, Homo sapiens
ggtcctgagaaaagt

SEQ ID NO: 1463411 - DNA, 15 bp, Homo sapiens
aggtcctgagaaaag

SEQ ID NO: 1463412 - DNA, 15 bp, Homo sapiens
aaggtcctgagaaaa

SEQ ID NO: 1463413 - DNA, 15 bp, Homo sapiens
caaggtcctgagaaa

SEQ ID NO: 1463414 - DNA, 15 bp, Homo sapiens
tcaaggtcctgagaa

SEQ ID NO: 1463415 - DNA, 15 bp, Homo sapiens
ctcaaggtcctgaga

SEQ ID NO: 1463416 - DNA, 15 bp, Homo sapiens
gctcaaggtcctgag

SEQ ID NO: 1463417 - DNA, 15 bp, Homo sapiens
ggctcaaggtcctga

SEQ ID NO: 1463418 - DNA, 15 bp, Homo sapiens
aggctcaaggtcctg

SEQ ID NO: 1463419 - DNA, 15 bp, Homo sapiens
gaggctcaaggtcct

SEQ ID NO: 1463420 - DNA, 15 bp, Homo sapiens
agaggctcaaggtcc

SEQ ID NO: 1463421 - DNA, 15 bp, Homo sapiens
gagaggctcaaggtc

SEQ ID NO: 1463422 - DNA, 15 bp, Homo sapiens
agagaggctcaaggt

SEQ ID NO: 1463423 - DNA, 15 bp, Homo sapiens
aagagaggctcaagg

SEQ ID NO: 1463424 - DNA, 15 bp, Homo sapiens
gaagagaggctcaag

SEQ ID NO: 1463425 - DNA, 15 bp, Homo sapiens
agaagagaggctcaa

SEQ ID NO: 1463426 - DNA, 15 bp, Homo sapiens
gagaagagaggctca

SEQ ID NO: 1463427 - DNA, 15 bp, Homo sapiens
tgagaagagaggctc

SEQ ID NO: 1463428 - DNA, 15 bp, Homo sapiens
atgagaagagaggct

SEQ ID NO: 1463429 - DNA, 15 bp, Homo sapiens
gatgagaagagaggc

SEQ ID NO: 1463430 - DNA, 15 bp, Homo sapiens
tgatgagaagagagg

SEQ ID NO: 1463431 - DNA, 15 bp, Homo sapiens
atgatgagaagagag

SEQ ID NO: 1463432 - DNA, 15 bp, Homo sapiens
catgatgagaagaga

SEQ ID NO: 1463433 - DNA, 15 bp, Homo sapiens
acatgatgagaagag

SEQ ID NO: 1463434 - DNA, 15 bp, Homo sapiens
aacatgatgagaaga

SEQ ID NO: 1463435 - DNA, 15 bp, Homo sapiens
aaacatgatgagaag

SEQ ID NO: 1463436 - DNA, 15 bp, Homo sapiens
gaaacatgatgagaa

SEQ ID NO: 1463437 - DNA, 15 bp, Homo sapiens
tgaaacatgatgaga

SEQ ID NO: 1463438 - DNA, 15 bp, Homo sapiens
ttgaaacatgatgag

SEQ ID NO: 1463439 - DNA, 15 bp, Homo sapiens
attgaaacatgatga

SEQ ID NO: 1463440 - DNA, 15 bp, Homo sapiens
tattgaaacatgatg

SEQ ID NO: 1463441 - DNA, 15 bp, Homo sapiens
atattgaaacatgat

SEQ ID NO: 1463442 - DNA, 15 bp, Homo sapiens
gatattgaaacatga

SEQ ID NO: 1463443 - DNA, 15 bp, Homo sapiens
agatattgaaacatg

SEQ ID NO: 1463444 - DNA, 15 bp, Homo sapiens
cagatattgaaacat

SEQ ID NO: 1463445 - DNA, 15 bp, Homo sapiens
ccagatattgaaaca

SEQ ID NO: 1463446 - DNA, 15 bp, Homo sapiens
accagatattgaaac

SEQ ID NO: 1463447 - DNA, 15 bp, Homo sapiens
aaccagatattgaaa

SEQ ID NO: 1463448 - DNA, 15 bp, Homo sapiens
gaaccagatattgaa

SEQ ID NO: 1463449 - DNA, 15 bp, Homo sapiens
agaaccagatattga

SEQ ID NO: 1463450 - DNA, 15 bp, Homo sapiens
aagaaccagatattg

SEQ ID NO: 1463451 - DNA, 15 bp, Homo sapiens
gaagaaccagatatt

SEQ ID NO: 1463452 - DNA, 15 bp, Homo sapiens
agaagaaccagatat

SEQ ID NO: 1463453 - DNA, 15 bp, Homo sapiens
cagaagaaccagata

SEQ ID NO: 1463454 - DNA, 15 bp, Homo sapiens
tcagaagaaccagat

SEQ ID NO: 1463455 - DNA, 15 bp, Homo sapiens
atcagaagaaccaga

SEQ ID NO: 1463456 - DNA, 15 bp, Homo sapiens
gatcagaagaaccag

SEQ ID NO: 1463457 - DNA, 15 bp, Homo sapiens
ggatcagaagaacca

SEQ ID NO: 1463458 - DNA, 15 bp, Homo sapiens
tggatcagaagaacc

SEQ ID NO: 1463459 - DNA, 15 bp, Homo sapiens
atggatcagaagaac

SEQ ID NO: 1463460 - DNA, 15 bp, Homo sapiens
gatggatcagaagaa

SEQ ID NO: 1463461 - DNA, 15 bp, Homo sapiens
tgatggatcagaaga

SEQ ID NO: 1463462 - DNA, 15 bp, Homo sapiens
ctgatggatcagaag

SEQ ID NO: 1463463 - DNA, 15 bp, Homo sapiens
cctgatggatcagaa

SEQ ID NO: 1463464 - DNA, 15 bp, Homo sapiens
acctgatggatcaga

SEQ ID NO: 1463465 - DNA, 15 bp, Homo sapiens
gacctgatggatcag

SEQ ID NO: 1463466 - DNA, 15 bp, Homo sapiens
agacctgatggatca

SEQ ID NO: 1463467 - DNA, 15 bp, Homo sapiens
tagacctgatggatc

SEQ ID NO: 1463468 - DNA, 15 bp, Homo sapiens
ttagacctgatggat

SEQ ID NO: 1463469 - DNA, 15 bp, Homo sapiens
cttagacctgatgga

SEQ ID NO: 1463470 - DNA, 15 bp, Homo sapiens
gcttagacctgatgg

SEQ ID NO: 1463471 - DNA, 15 bp, Homo sapiens
agcttagacctgatg

SEQ ID NO: 1463472 - DNA, 15 bp, Homo sapiens
aagcttagacctgat

SEQ ID NO: 1463473 - DNA, 15 bp, Homo sapiens
taagcttagacctga

SEQ ID NO: 1463474 - DNA, 15 bp, Homo sapiens
ttaagcttagacctg

SEQ ID NO: 1463475 - DNA, 15 bp, Homo sapiens
tttaagcttagacct

SEQ ID NO: 1463476 - DNA, 15 bp, Homo sapiens
atttaagcttagacc

SEQ ID NO: 1463477 - DNA, 15 bp, Homo sapiens
tatttaagcttagac

SEQ ID NO: 1463478 - DNA, 15 bp, Homo sapiens
atatttaagcttaga

SEQ ID NO: 1463479 - DNA, 15 bp, Homo sapiens
aatatttaagcttag

SEQ ID NO: 1463480 - DNA, 15 bp, Homo sapiens
caatatttaagctta

SEQ ID NO: 1463481 - DNA, 15 bp, Homo sapiens
tcaatatttaagctt

SEQ ID NO: 1463482 - DNA, 15 bp, Homo sapiens
gtcaatatttaagct

SEQ ID NO: 1463483 - DNA, 15 bp, Homo sapiens
agtcaatatttaagc

SEQ ID NO: 1463484 - DNA, 15 bp, Homo sapiens
gagtcaatatttaag

SEQ ID NO: 1463485 - DNA, 15 bp, Homo sapiens
agagtcaatatttaa

SEQ ID NO: 1463486 - DNA, 15 bp, Homo sapiens
aagagtcaatattta

SEQ ID NO: 1463487 - DNA, 15 bp, Homo sapiens
aaagagtcaatattt

SEQ ID NO: 1463488 - DNA, 15 bp, Homo sapiens
gaaagagtcaatatt

SEQ ID NO: 1463489 - DNA, 15 bp, Homo sapiens
ggaaagagtcaatat

SEQ ID NO: 1463490 - DNA, 15 bp, Homo sapiens
aggaaagagtcaata

SEQ ID NO: 1463491 - DNA, 15 bp, Homo sapiens
caggaaagagtcaat

SEQ ID NO: 1463492 - DNA, 15 bp, Homo sapiens
tcaggaaagagtcaa

SEQ ID NO: 1463493 - DNA, 15 bp, Homo sapiens
ttcaggaaagagtca

SEQ ID NO: 1463494 - DNA, 15 bp, Homo sapiens
cttcaggaaagagtc

SEQ ID NO: 1463495 - DNA, 15 bp, Homo sapiens
acttcaggaaagagt

SEQ ID NO: 1463496 - DNA, 15 bp, Homo sapiens
gacttcaggaaagag

SEQ ID NO: 1463497 - DNA, 15 bp, Homo sapiens
ggacttcaggaaaga

SEQ ID NO: 1463498 - DNA, 15 bp, Homo sapiens
aggacttcaggaaag

SEQ ID NO: 1463499 - DNA, 15 bp, Homo sapiens
aaggacttcaggaaa

SEQ ID NO: 1463500 - DNA, 15 bp, Homo sapiens
aaaggacttcaggaa

SEQ ID NO: 1463501 - DNA, 15 bp, Homo sapiens
caaaggacttcagga

SEQ ID NO: 1463502 - DNA, 15 bp, Homo sapiens
acaaaggacttcagg

SEQ ID NO: 1463503 - DNA, 15 bp, Homo sapiens
tacaaaggacttcag

SEQ ID NO: 1463504 - DNA, 15 bp, Homo sapiens
atacaaaggacttca

SEQ ID NO: 1463505 - DNA, 15 bp, Homo sapiens
catacaaaggacttc

SEQ ID NO: 1463506 - DNA, 15 bp, Homo sapiens
acatacaaaggactt

SEQ ID NO: 1463507 - DNA, 15 bp, Homo sapiens
tacatacaaaggact

SEQ ID NO: 1463508 - DNA, 15 bp, Homo sapiens
atacatacaaaggac

SEQ ID NO: 1463509 - DNA, 15 bp, Homo sapiens
catacatacaaagga

SEQ ID NO: 1463510 - DNA, 15 bp, Homo sapiens
ccatacatacaaagg

SEQ ID NO: 1463511 - DNA, 15 bp, Homo sapiens
accatacatacaaag

SEQ ID NO: 1463512 - DNA, 15 bp, Homo sapiens
caccatacatacaaa

SEQ ID NO: 1463513 - DNA, 15 bp, Homo sapiens
tcaccatacatacaa

SEQ ID NO: 1463514 - DNA, 15 bp, Homo sapiens
atcaccatacataca

SEQ ID NO: 1463515 - DNA, 15 bp, Homo sapiens
gatcaccatacatac

SEQ ID NO: 1463516 - DNA, 15 bp, Homo sapiens
agatcaccatacata

SEQ ID NO: 1463517 - DNA, 15 bp, Homo sapiens
aagatcaccatacat

SEQ ID NO: 1463518 - DNA, 15 bp, Homo sapiens
taagatcaccataca

SEQ ID NO: 1463519 - DNA, 15 bp, Homo sapiens
ataagatcaccatac

SEQ ID NO: 1463520 - DNA, 15 bp, Homo sapiens
cataagatcaccata

SEQ ID NO: 1463521 - DNA, 15 bp, Homo sapiens
acataagatcaccat

SEQ ID NO: 1463522 - DNA, 15 bp, Homo sapiens
tacataagatcacca

SEQ ID NO: 1463523 - DNA, 15 bp, Homo sapiens
ttacataagatcacc

SEQ ID NO: 1463524 - DNA, 15 bp, Homo sapiens
cttacataagatcac

SEQ ID NO: 1463525 - DNA, 15 bp, Homo sapiens
gcttacataagatca

SEQ ID NO: 1463526 - DNA, 15 bp, Homo sapiens
tgcttacataagatc

SEQ ID NO: 1463527 - DNA, 15 bp, Homo sapiens
ctgcttacataagat

SEQ ID NO: 1463528 - DNA, 15 bp, Homo sapiens
tctgcttacataaga

SEQ ID NO: 1463529 - DNA, 15 bp, Homo sapiens
atctgcttacataag

SEQ ID NO: 1463530 - DNA, 15 bp, Homo sapiens
aatctgcttacataa

SEQ ID NO: 1463531 - DNA, 15 bp, Homo sapiens
aaatctgcttacata

SEQ ID NO: 1463532 - DNA, 15 bp, Homo sapiens
gaaatctgcttacat

SEQ ID NO: 1463533 - DNA, 15 bp, Homo sapiens
agaaatctgcttaca

SEQ ID NO: 1463534 - DNA, 15 bp, Homo sapiens
gagaaatctgcttac

SEQ ID NO: 1463535 - DNA, 15 bp, Homo sapiens
ggagaaatctgctta

SEQ ID NO: 1463536 - DNA, 15 bp, Homo sapiens
aggagaaatctgctt

SEQ ID NO: 1463537 - DNA, 15 bp, Homo sapiens
caggagaaatctgct

SEQ ID NO: 1463538 - DNA, 15 bp, Homo sapiens
acaggagaaatctgc

SEQ ID NO: 1463539 - DNA, 15 bp, Homo sapiens
gacaggagaaatctg

SEQ ID NO: 1463540 - DNA, 15 bp, Homo sapiens
tgacaggagaaatct

SEQ ID NO: 1463541 - DNA, 15 bp, Homo sapiens
atgacaggagaaatc

SEQ ID NO: 1463542 - DNA, 15 bp, Homo sapiens
aatgacaggagaaat

SEQ ID NO: 1463543 - DNA, 15 bp, Homo sapiens
gaatgacaggagaaa

SEQ ID NO: 1463544 - DNA, 15 bp, Homo sapiens
agaatgacaggagaa

SEQ ID NO: 1463545 - DNA, 15 bp, Homo sapiens
gagaatgacaggaga

SEQ ID NO: 1463546 - DNA, 15 bp, Homo sapiens
agagaatgacaggag

SEQ ID NO: 1463547 - DNA, 15 bp, Homo sapiens
gagagaatgacagga

SEQ ID NO: 1463548 - DNA, 15 bp, Homo sapiens
ggagagaatgacagg

SEQ ID NO: 1463549 - DNA, 15 bp, Homo sapiens
aggagagaatgacag

SEQ ID NO: 1463550 - DNA, 15 bp, Homo sapiens
gaggagagaatgaca

SEQ ID NO: 1463551 - DNA, 15 bp, Homo sapiens
agaggagagaatgac

SEQ ID NO: 1463552 - DNA, 15 bp, Homo sapiens
aagaggagagaatga

SEQ ID NO: 1463553 - DNA, 15 bp, Homo sapiens
gaagaggagagaatg

SEQ ID NO: 1463554 - DNA, 15 bp, Homo sapiens
tgaagaggagagaat

SEQ ID NO: 1463555 - DNA, 15 bp, Homo sapiens
atgaagaggagagaa

SEQ ID NO: 1463556 - DNA, 15 bp, Homo sapiens
catgaagaggagaga

SEQ ID NO: 1463557 - DNA, 15 bp, Homo sapiens
gcatgaagaggagag

SEQ ID NO: 1463558 - DNA, 15 bp, Homo sapiens
ggcatgaagaggaga

SEQ ID NO: 1463559 - DNA, 15 bp, Homo sapiens
cggcatgaagaggag

SEQ ID NO: 1463560 - DNA, 15 bp, Homo sapiens
gcggcatgaagagga

SEQ ID NO: 1463561 - DNA, 15 bp, Homo sapiens
agcggcatgaagagg

SEQ ID NO: 1463562 - DNA, 15 bp, Homo sapiens
aagcggcatgaagag

SEQ ID NO: 1463563 - DNA, 15 bp, Homo sapiens
aaagcggcatgaaga

SEQ ID NO: 1463564 - DNA, 15 bp, Homo sapiens
gaaagcggcatgaag

SEQ ID NO: 1463565 - DNA, 15 bp, Homo sapiens
agaaagcggcatgaa

SEQ ID NO: 1463566 - DNA, 15 bp, Homo sapiens
aagaaagcggcatga

SEQ ID NO: 1463567 - DNA, 15 bp, Homo sapiens
gaagaaagcggcatg

SEQ ID NO: 1463568 - DNA, 15 bp, Homo sapiens
agaagaaagcggcat

SEQ ID NO: 1463569 - DNA, 15 bp, Homo sapiens
aagaagaaagcggca

SEQ ID NO: 1463570 - DNA, 15 bp, Homo sapiens
aaagaagaaagcggc

SEQ ID NO: 1463571 - DNA, 15 bp, Homo sapiens
aaaagaagaaagcgg

SEQ ID NO: 1463572 - DNA, 15 bp, Homo sapiens
gaaaagaagaaagcg

SEQ ID NO: 1463573 - DNA, 15 bp, Homo sapiens
agaaaagaagaaagc

SEQ ID NO: 1463574 - DNA, 15 bp, Homo sapiens
ctagaaaagaagaaa

SEQ ID NO: 1463575 - DNA, 15 bp, Homo sapiens
actagaaaagaagaa

SEQ ID NO: 1463576 - DNA, 15 bp, Homo sapiens
tactagaaaagaaga

SEQ ID NO: 1463577 - DNA, 15 bp, Homo sapiens
gtactagaaaagaag

SEQ ID NO: 1463578 - DNA, 15 bp, Homo sapiens
agtactagaaaagaa

SEQ ID NO: 1463579 - DNA, 15 bp, Homo sapiens
aagtactagaaaaga

SEQ ID NO: 1463580 - DNA, 15 bp, Homo sapiens
aaagtactagaaaag

SEQ ID NO: 1463581 - DNA, 15 bp, Homo sapiens
aaaagtactagaaaa

SEQ ID NO: 1463582 - DNA, 15 bp, Homo sapiens
taaaagtactagaaa

SEQ ID NO: 1463583 - DNA, 15 bp, Homo sapiens
ttaaaagtactagaa

SEQ ID NO: 1463584 - DNA, 15 bp, Homo sapiens
attaaaagtactaga

SEQ ID NO: 1463585 - DNA, 15 bp, Homo sapiens
aattaaaagtactag

SEQ ID NO: 1463586 - DNA, 15 bp, Homo sapiens
caattaaaagtacta

SEQ ID NO: 1463587 - DNA, 15 bp, Homo sapiens
gcaattaaaagtact

SEQ ID NO: 1463588 - DNA, 15 bp, Homo sapiens
agcaattaaaagtac

SEQ ID NO: 1463589 - DNA, 15 bp, Homo sapiens
aagcaattaaaagta

SEQ ID NO: 1463590 - DNA, 15 bp, Homo sapiens
aaagcaattaaaagt

SEQ ID NO: 1463591 - DNA, 15 bp, Homo sapiens
taaagcaattaaaag

SEQ ID NO: 1463592 - DNA, 15 bp, Homo sapiens
ataaagcaattaaaa

SEQ ID NO: 1463593 - DNA, 15 bp, Homo sapiens
aataaagcaattaaa

SEQ ID NO: 1463594 - DNA, 15 bp, Homo sapiens
aaataaagcaattaa

SEQ ID NO: 1463595 - DNA, 15 bp, Homo sapiens
taaataaagcaatta

SEQ ID NO: 1463596 - DNA, 15 bp, Homo sapiens
ataaataaagcaatt

SEQ ID NO: 1463597 - DNA, 15 bp, Homo sapiens
aataaataaagcaat

SEQ ID NO: 1463598 - DNA, 15 bp, Homo sapiens
aaataaataaagcaa

SEQ ID NO: 1463599 - DNA, 15 bp, Homo sapiens
taaataaataaagca

SEQ ID NO: 1463600 - DNA, 15 bp, Homo sapiens
ataaataaataaagc

SEQ ID NO: 1463601 - DNA, 15 bp, Homo sapiens
caaataaataaataa

SEQ ID NO: 1463602 - DNA, 15 bp, Homo sapiens
acaaataaataaata

SEQ ID NO: 1463603 - DNA, 15 bp, Homo sapiens
cacaaataaataaat

SEQ ID NO: 1463604 - DNA, 15 bp, Homo sapiens
acacaaataaataaa

SEQ ID NO: 1463605 - DNA, 15 bp, Homo sapiens
tacacaaataaataa

SEQ ID NO: 1463606 - DNA, 15 bp, Homo sapiens
gtacacaaataaata

SEQ ID NO: 1463607 - DNA, 15 bp, Homo sapiens
agtacacaaataaat

SEQ ID NO: 1463608 - DNA, 15 bp, Homo sapiens
aagtacacaaataaa

SEQ ID NO: 1463609 - DNA, 15 bp, Homo sapiens
caagtacacaaataa

SEQ ID NO: 1463610 - DNA, 15 bp, Homo sapiens
acaagtacacaaata

SEQ ID NO: 1463611 - DNA, 15 bp, Homo sapiens
gacaagtacacaaat

SEQ ID NO: 1463612 - DNA, 15 bp, Homo sapiens
ggacaagtacacaaa

SEQ ID NO: 1463613 - DNA, 15 bp, Homo sapiens
tggacaagtacacaa

SEQ ID NO: 1463614 - DNA, 15 bp, Homo sapiens
atggacaagtacaca

SEQ ID NO: 1463615 - DNA, 15 bp, Homo sapiens
aatggacaagtacac

SEQ ID NO: 1463616 - DNA, 15 bp, Homo sapiens
taatggacaagtaca

SEQ ID NO: 1463617 - DNA, 15 bp, Homo sapiens
gtaatggacaagtac

SEQ ID NO: 1463618 - DNA, 15 bp, Homo sapiens
agtaatggacaagta

SEQ ID NO: 1463619 - DNA, 15 bp, Homo sapiens
aagtaatggacaagt

SEQ ID NO: 1463620 - DNA, 15 bp, Homo sapiens
taagtaatggacaag

SEQ ID NO: 1463621 - DNA, 15 bp, Homo sapiens
ataagtaatggacaa

SEQ ID NO: 1463622 - DNA, 15 bp, Homo sapiens
gataagtaatggaca

SEQ ID NO: 1463623 - DNA, 15 bp, Homo sapiens
agataagtaatggac

SEQ ID NO: 1463624 - DNA, 15 bp, Homo sapiens
gagataagtaatgga

SEQ ID NO: 1463625 - DNA, 15 bp, Homo sapiens
agagataagtaatgg

SEQ ID NO: 1463626 - DNA, 15 bp, Homo sapiens
gagagataagtaatg

SEQ ID NO: 1463627 - DNA, 15 bp, Homo sapiens
agagagataagtaat

SEQ ID NO: 1463628 - DNA, 15 bp, Homo sapiens
aagagagataagtaa

SEQ ID NO: 1463629 - DNA, 15 bp, Homo sapiens
gaagagagataagta

SEQ ID NO: 1463630 - DNA, 15 bp, Homo sapiens
ggaagagagataagt

SEQ ID NO: 1463631 - DNA, 15 bp, Homo sapiens
aggaagagagataag

SEQ ID NO: 1463632 - DNA, 15 bp, Homo sapiens
taggaagagagataa

SEQ ID NO: 1463633 - DNA, 15 bp, Homo sapiens
ctaggaagagagata

SEQ ID NO: 1463634 - DNA, 15 bp, Homo sapiens
actaggaagagagat

SEQ ID NO: 1463635 - DNA, 15 bp, Homo sapiens
aactaggaagagaga

SEQ ID NO: 1463636 - DNA, 15 bp, Homo sapiens
gaactaggaagagag

SEQ ID NO: 1463637 - DNA, 15 bp, Homo sapiens
agaactaggaagaga

SEQ ID NO: 1463638 - DNA, 15 bp, Homo sapiens
tagaactaggaagag

SEQ ID NO: 1463639 - DNA, 15 bp, Homo sapiens
ttagaactaggaaga

SEQ ID NO: 1463640 - DNA, 15 bp, Homo sapiens
cttagaactaggaag

SEQ ID NO: 1463641 - DNA, 15 bp, Homo sapiens
tcttagaactaggaa

SEQ ID NO: 1463642 - DNA, 15 bp, Homo sapiens
atcttagaactagga

SEQ ID NO: 1463643 - DNA, 15 bp, Homo sapiens
aatcttagaactagg

SEQ ID NO: 1463644 - DNA, 15 bp, Homo sapiens
gaatcttagaactag

SEQ ID NO: 1463645 - DNA, 15 bp, Homo sapiens
tgaatcttagaacta

SEQ ID NO: 1463646 - DNA, 15 bp, Homo sapiens
atgaatcttagaact

SEQ ID NO: 1463647 - DNA, 15 bp, Homo sapiens
catgaatcttagaac

SEQ ID NO: 1463648 - DNA, 15 bp, Homo sapiens
tcatgaatcttagaa

SEQ ID NO: 1463649 - DNA, 15 bp, Homo sapiens
ttcatgaatcttaga

SEQ ID NO: 1463650 - DNA, 15 bp, Homo sapiens
cttcatgaatcttag

SEQ ID NO: 1463651 - DNA, 15 bp, Homo sapiens
ccttcatgaatctta

SEQ ID NO: 1463652 - DNA, 15 bp, Homo sapiens
accttcatgaatctt

SEQ ID NO: 1463653 - DNA, 15 bp, Homo sapiens
taccttcatgaatct

SEQ ID NO: 1463654 - DNA, 15 bp, Homo sapiens
ctaccttcatgaatc

SEQ ID NO: 1463655 - DNA, 15 bp, Homo sapiens
tctaccttcatgaat

SEQ ID NO: 1463656 - DNA, 15 bp, Homo sapiens
ttctaccttcatgaa

SEQ ID NO: 1463657 - DNA, 15 bp, Homo sapiens
gttctaccttcatga

SEQ ID NO: 1463658 - DNA, 15 bp, Homo sapiens
tgttctaccttcatg

SEQ ID NO: 1463659 - DNA, 15 bp, Homo sapiens
ttgttctaccttcat

SEQ ID NO: 1463660 - DNA, 15 bp, Homo sapiens
attgttctaccttca

SEQ ID NO: 1463661 - DNA, 15 bp, Homo sapiens
cattgttctaccttc

SEQ ID NO: 1463662 - DNA, 15 bp, Homo sapiens
acattgttctacctt

SEQ ID NO: 1463663 - DNA, 15 bp, Homo sapiens
aacattgttctacct

SEQ ID NO: 1463664 - DNA, 15 bp, Homo sapiens
caacattgttctacc

SEQ ID NO: 1463665 - DNA, 15 bp, Homo sapiens
tcaacattgttctac

SEQ ID NO: 1463666 - DNA, 15 bp, Homo sapiens
atcaacattgttcta

SEQ ID NO: 1463667 - DNA, 15 bp, Homo sapiens
catcaacattgttct

SEQ ID NO: 1463668 - DNA, 15 bp, Homo sapiens
ccatcaacattgttc

SEQ ID NO: 1463669 - DNA, 15 bp, Homo sapiens
cccatcaacattgtt

SEQ ID NO: 1463670 - DNA, 15 bp, Homo sapiens
gcccatcaacattgt

SEQ ID NO: 1463671 - DNA, 15 bp, Homo sapiens
agcccatcaacattg

SEQ ID NO: 1463672 - DNA, 15 bp, Homo sapiens
aagcccatcaacatt

SEQ ID NO: 1463673 - DNA, 15 bp, Homo sapiens
aaagcccatcaacat

SEQ ID NO: 1463674 - DNA, 15 bp, Homo sapiens
aaaagcccatcaaca

SEQ ID NO: 1463675 - DNA, 15 bp, Homo sapiens
aaaaagcccatcaac

SEQ ID NO: 1463676 - DNA, 15 bp, Homo sapiens
aaaaaagcccatcaa

SEQ ID NO: 1463677 - DNA, 15 bp, Homo sapiens
aaaaaaagcccatca

SEQ ID NO: 1463678 - DNA, 15 bp, Homo sapiens
aaaaaaaagcccatc

SEQ ID NO: 1463679 - DNA, 15 bp, Homo sapiens
gaaaaaaaagcccat

SEQ ID NO: 1463680 - DNA, 15 bp, Homo sapiens
ggaaaaaaaagccca

SEQ ID NO: 1463681 - DNA, 15 bp, Homo sapiens
tggaaaaaaaagccc

SEQ ID NO: 1463682 - DNA, 15 bp, Homo sapiens
gtggaaaaaaaagcc

SEQ ID NO: 1463683 - DNA, 15 bp, Homo sapiens
ggtggaaaaaaaagc

SEQ ID NO: 1463684 - DNA, 15 bp, Homo sapiens
tggtggaaaaaaaag

SEQ ID NO: 1463685 - DNA, 15 bp, Homo sapiens
gtggtggaaaaaaaa

SEQ ID NO: 1463686 - DNA, 15 bp, Homo sapiens
agtggtggaaaaaaa

SEQ ID NO: 1463687 - DNA, 15 bp, Homo sapiens
cagtggtggaaaaaa

SEQ ID NO: 1463688 - DNA, 15 bp, Homo sapiens
tcagtggtggaaaaa

SEQ ID NO: 1463689 - DNA, 15 bp, Homo sapiens
gtcagtggtggaaaa

SEQ ID NO: 1463690 - DNA, 15 bp, Homo sapiens
tgtcagtggtggaaa

SEQ ID NO: 1463691 - DNA, 15 bp, Homo sapiens
gtgtcagtggtggaa

SEQ ID NO: 1463692 - DNA, 15 bp, Homo sapiens
tgtgtcagtggtgga

SEQ ID NO: 1463693 - DNA, 15 bp, Homo sapiens
ctgtgtcagtggtgg

SEQ ID NO: 1463694 - DNA, 15 bp, Homo sapiens
actgtgtcagtggtg

SEQ ID NO: 1463695 - DNA, 15 bp, Homo sapiens
cactgtgtcagtggt

SEQ ID NO: 1463696 - DNA, 15 bp, Homo sapiens
gcactgtgtcagtgg

SEQ ID NO: 1463697 - DNA, 15 bp, Homo sapiens
ggcactgtgtcagtg

SEQ ID NO: 1463698 - DNA, 15 bp, Homo sapiens
tggcactgtgtcagt

SEQ ID NO: 1463699 - DNA, 15 bp, Homo sapiens
atggcactgtgtcag

SEQ ID NO: 1463700 - DNA, 15 bp, Homo sapiens
tatggcactgtgtca

SEQ ID NO: 1463701 - DNA, 15 bp, Homo sapiens
atatggcactgtgtc

SEQ ID NO: 1463702 - DNA, 15 bp, Homo sapiens
aatatggcactgtgt

SEQ ID NO: 1463703 - DNA, 15 bp, Homo sapiens
aaatatggcactgtg

SEQ ID NO: 1463704 - DNA, 15 bp, Homo sapiens
taaatatggcactgt

SEQ ID NO: 1463705 - DNA, 15 bp, Homo sapiens
ataaatatggcactg

SEQ ID NO: 1463706 - DNA, 15 bp, Homo sapiens
cataaatatggcact

SEQ ID NO: 1463707 - DNA, 15 bp, Homo sapiens
ccataaatatggcac

SEQ ID NO: 1463708 - DNA, 15 bp, Homo sapiens
tccataaatatggca

SEQ ID NO: 1463709 - DNA, 15 bp, Homo sapiens
ttccataaatatggc

SEQ ID NO: 1463710 - DNA, 15 bp, Homo sapiens
attccataaatatgg

SEQ ID NO: 1463711 - DNA, 15 bp, Homo sapiens
cattccataaatatg

SEQ ID NO: 1463712 - DNA, 15 bp, Homo sapiens
tcattcattccataa

SEQ ID NO: 1463713 - DNA, 15 bp, Homo sapiens
ttcattcattccata

SEQ ID NO: 1463714 - DNA, 15 bp, Homo sapiens
attcattcattccat

SEQ ID NO: 1463715 - DNA, 15 bp, Homo sapiens
cattcattcattcca

SEQ ID NO: 1463716 - DNA, 15 bp, Homo sapiens
acattcattcattcc

SEQ ID NO: 1463717 - DNA, 15 bp, Homo sapiens
gacattcattcattc

SEQ ID NO: 1463718 - DNA, 15 bp, Homo sapiens
ggacattcattcatt

SEQ ID NO: 1463719 - DNA, 15 bp, Homo sapiens
aggacattcattcat

SEQ ID NO: 1463720 - DNA, 15 bp, Homo sapiens
aaggacattcattca

SEQ ID NO: 1463721 - DNA, 15 bp, Homo sapiens
gaaggacattcattc

SEQ ID NO: 1463722 - DNA, 15 bp, Homo sapiens
ggaaggacattcatt

SEQ ID NO: 1463723 - DNA, 15 bp, Homo sapiens
gggaaggacattcat

SEQ ID NO: 1463724 - DNA, 15 bp, Homo sapiens
agggaaggacattca

SEQ ID NO: 1463725 - DNA, 15 bp, Homo sapiens
cagggaaggacattc

SEQ ID NO: 1463726 - DNA, 15 bp, Homo sapiens
gcagggaaggacatt

SEQ ID NO: 1463727 - DNA, 15 bp, Homo sapiens
ggcagggaaggacat

SEQ ID NO: 1463728 - DNA, 15 bp, Homo sapiens
aaggcagggaaggac

SEQ ID NO: 1463729 - DNA, 15 bp, Homo sapiens
caaggcagggaagga

SEQ ID NO: 1463730 - DNA, 15 bp, Homo sapiens
ccaaggcagggaagg

SEQ ID NO: 1463731 - DNA, 15 bp, Homo sapiens
cccaaggcagggaag

SEQ ID NO: 1463732 - DNA, 15 bp, Homo sapiens
tcccaaggcagggaa

SEQ ID NO: 1463733 - DNA, 15 bp, Homo sapiens
ttcccaaggcaggga

SEQ ID NO: 1463734 - DNA, 15 bp, Homo sapiens
tttcccaaggcaggg

SEQ ID NO: 1463735 - DNA, 15 bp, Homo sapiens
atttcccaaggcagg

SEQ ID NO: 1463736 - DNA, 15 bp, Homo sapiens
aatttcccaaggcag

SEQ ID NO: 1463737 - DNA, 15 bp, Homo sapiens
aaatttcccaaggca

SEQ ID NO: 1463738 - DNA, 15 bp, Homo sapiens
aaaatttcccaaggc

SEQ ID NO: 1463739 - DNA, 15 bp, Homo sapiens
taaaatttcccaagg

SEQ ID NO: 1463740 - DNA, 15 bp, Homo sapiens
ataaaatttcccaag

SEQ ID NO: 1463741 - DNA, 15 bp, Homo sapiens
aataaaatttcccaa

SEQ ID NO: 1463742 - DNA, 15 bp, Homo sapiens
gaataaaatttccca

SEQ ID NO: 1463743 - DNA, 15 bp, Homo sapiens
ggaataaaatttccc

SEQ ID NO: 1463744 - DNA, 15 bp, Homo sapiens
tggaataaaatttcc

SEQ ID NO: 1463745 - DNA, 15 bp, Homo sapiens
gtggaataaaatttc

SEQ ID NO: 1463746 - DNA, 15 bp, Homo sapiens
agtggaataaaattt

SEQ ID NO: 1463747 - DNA, 15 bp, Homo sapiens
aagtggaataaaatt

SEQ ID NO: 1463748 - DNA, 15 bp, Homo sapiens
aaagtggaataaaat

SEQ ID NO: 1463749 - DNA, 15 bp, Homo sapiens
gaaagtggaataaaa

SEQ ID NO: 1463750 - DNA, 15 bp, Homo sapiens
tgaaagtggaataaa

SEQ ID NO: 1463751 - DNA, 15 bp, Homo sapiens
ttgaaagtggaataa

SEQ ID NO: 1463752 - DNA, 15 bp, Homo sapiens
cttgaaagtggaata

SEQ ID NO: 1463753 - DNA, 15 bp, Homo sapiens
ccttgaaagtggaat

SEQ ID NO: 1463754 - DNA, 15 bp, Homo sapiens
gccttgaaagtggaa

SEQ ID NO: 1463755 - DNA, 15 bp, Homo sapiens
ggccttgaaagtgga

SEQ ID NO: 1463756 - DNA, 15 bp, Homo sapiens
gggccttgaaagtgg

SEQ ID NO: 1463757 - DNA, 15 bp, Homo sapiens
tgggccttgaaagtg

SEQ ID NO: 1463758 - DNA, 15 bp, Homo sapiens
ttgggccttgaaagt

SEQ ID NO: 1463759 - DNA, 15 bp, Homo sapiens
gttgggccttgaaag

SEQ ID NO: 1463760 - DNA, 15 bp, Homo sapiens
ggttgggccttgaaa

SEQ ID NO: 1463761 - DNA, 15 bp, Homo sapiens
aggttgggccttgaa

SEQ ID NO: 1463762 - DNA, 15 bp, Homo sapiens
gaggttgggccttga

SEQ ID NO: 1463763 - DNA, 15 bp, Homo sapiens
tgaggttgggccttg

SEQ ID NO: 1463764 - DNA, 15 bp, Homo sapiens
atgaggttgggcctt

SEQ ID NO: 1463765 - DNA, 15 bp, Homo sapiens
gatgaggttgggcct

SEQ ID NO: 1463766 - DNA, 15 bp, Homo sapiens
ggatgaggttgggcc

SEQ ID NO: 1463767 - DNA, 15 bp, Homo sapiens
gggatgaggttgggc

SEQ ID NO: 1463768 - DNA, 15 bp, Homo sapiens
agggatgaggttggg

SEQ ID NO: 1463769 - DNA, 15 bp, Homo sapiens
aagggatgaggttgg

SEQ ID NO: 1463770 - DNA, 15 bp, Homo sapiens
aaagggatgaggttg

SEQ ID NO: 1463771 - DNA, 15 bp, Homo sapiens
taaagggatgaggtt

SEQ ID NO: 1463772 - DNA, 15 bp, Homo sapiens
ataaagggatgaggt

SEQ ID NO: 1463773 - DNA, 15 bp, Homo sapiens
cataaagggatgagg

SEQ ID NO: 1463774 - DNA, 15 bp, Homo sapiens
gcataaagggatgag

SEQ ID NO: 1463775 - DNA, 15 bp, Homo sapiens
agcataaagggatga

SEQ ID NO: 1463776 - DNA, 15 bp, Homo sapiens
aagcataaagggatg

SEQ ID NO: 1463777 - DNA, 15 bp, Homo sapiens
gaagcataaagggat

SEQ ID NO: 1463778 - DNA, 15 bp, Homo sapiens
ggaagcataaaggga

SEQ ID NO: 1463779 - DNA, 15 bp, Homo sapiens
gggaagcataaaggg

SEQ ID NO: 1463780 - DNA, 15 bp, Homo sapiens
ggggaagcataaagg

SEQ ID NO: 1463781 - DNA, 15 bp, Homo sapiens
cggggaagcataaag

SEQ ID NO: 1463782 - DNA, 15 bp, Homo sapiens
tcggggaagcataaa

SEQ ID NO: 1463783 - DNA, 15 bp, Homo sapiens
ttcggggaagcataa

SEQ ID NO: 1463784 - DNA, 15 bp, Homo sapiens
cttcggggaagcata

SEQ ID NO: 1463785 - DNA, 15 bp, Homo sapiens
tcttcggggaagcat

SEQ ID NO: 1463786 - DNA, 15 bp, Homo sapiens
ttcttcggggaagca

SEQ ID NO: 1463787 - DNA, 15 bp, Homo sapiens
attcttcggggaagc

SEQ ID NO: 1463788 - DNA, 15 bp, Homo sapiens
aattcttcggggaag

SEQ ID NO: 1463789 - DNA, 15 bp, Homo sapiens
taattcttcggggaa

SEQ ID NO: 1463790 - DNA, 15 bp, Homo sapiens
ttaattcttcgggga

SEQ ID NO: 1463791 - DNA, 15 bp, Homo sapiens
attaattcttcgggg

SEQ ID NO: 1463792 - DNA, 15 bp, Homo sapiens
gattaattcttcggg

SEQ ID NO: 1463793 - DNA, 15 bp, Homo sapiens
tgattaattcttcgg

SEQ ID NO: 1463794 - DNA, 15 bp, Homo sapiens
gtgattaattcttcg

SEQ ID NO: 1463795 - DNA, 15 bp, Homo sapiens
agtgattaattcttc

SEQ ID NO: 1463796 - DNA, 15 bp, Homo sapiens
aagtgattaattctt

SEQ ID NO: 1463797 - DNA, 15 bp, Homo sapiens
gaagtgattaattct

SEQ ID NO: 1463798 - DNA, 15 bp, Homo sapiens
agaagtgattaattc

SEQ ID NO: 1463799 - DNA, 15 bp, Homo sapiens
aagaagtgattaatt

SEQ ID NO: 1463800 - DNA, 15 bp, Homo sapiens
gaagaagtgattaat

SEQ ID NO: 1463801 - DNA, 15 bp, Homo sapiens
ggaagaagtgattaa

SEQ ID NO: 1463802 - DNA, 15 bp, Homo sapiens
aggaagaagtgatta

SEQ ID NO: 1463803 - DNA, 15 bp, Homo sapiens
gaggaagaagtgatt

SEQ ID NO: 1463804 - DNA, 15 bp, Homo sapiens
agaggaagaagtgat

SEQ ID NO: 1463805 - DNA, 15 bp, Homo sapiens
cagaggaagaagtga

SEQ ID NO: 1463806 - DNA, 15 bp, Homo sapiens
acagaggaagaagtg

SEQ ID NO: 1463807 - DNA, 15 bp, Homo sapiens
cacagaggaagaagt

SEQ ID NO: 1463808 - DNA, 15 bp, Homo sapiens
tcacagaggaagaag

SEQ ID NO: 1463809 - DNA, 15 bp, Homo sapiens
atcacagaggaagaa

SEQ ID NO: 1463810 - DNA, 15 bp, Homo sapiens
gatcacagaggaaga

SEQ ID NO: 1463811 - DNA, 15 bp, Homo sapiens
ggatcacagaggaag

SEQ ID NO: 1463812 - DNA, 15 bp, Homo sapiens
gggatcacagaggaa

SEQ ID NO: 1463813 - DNA, 15 bp, Homo sapiens
tgggatcacagagga

SEQ ID NO: 1463814 - DNA, 15 bp, Homo sapiens
gtgggatcacagagg

SEQ ID NO: 1463815 - DNA, 15 bp, Homo sapiens
tgtgggatcacagag

SEQ ID NO: 1463816 - DNA, 15 bp, Homo sapiens
ttgtgggatcacaga

SEQ ID NO: 1463817 - DNA, 15 bp, Homo sapiens
tttgtgggatcacag

SEQ ID NO: 1463818 - DNA, 15 bp, Homo sapiens
ttttgtgggatcaca

SEQ ID NO: 1463819 - DNA, 15 bp, Homo sapiens
tttttgtgggatcac

SEQ ID NO: 1463820 - DNA, 15 bp, Homo sapiens
atttttgtgggatca

SEQ ID NO: 1463821 - DNA, 15 bp, Homo sapiens
catttttgtgggatc

SEQ ID NO: 1463822 - DNA, 15 bp, Homo sapiens
acatttttgtgggat

SEQ ID NO: 1463823 - DNA, 15 bp, Homo sapiens
cacatttttgtggga

SEQ ID NO: 1463824 - DNA, 15 bp, Homo sapiens
acacatttttgtggg

SEQ ID NO: 1463825 - DNA, 15 bp, Homo sapiens
tacacatttttgtgg

SEQ ID NO: 1463826 - DNA, 15 bp, Homo sapiens
gtacacatttttgtg

SEQ ID NO: 1463827 - DNA, 15 bp, Homo sapiens
tgtacacatttttgt

SEQ ID NO: 1463828 - DNA, 15 bp, Homo sapiens
atgtacacatttttg

SEQ ID NO: 1463829 - DNA, 15 bp, Homo sapiens
tatgtacacattttt

SEQ ID NO: 1463830 - DNA, 15 bp, Homo sapiens
gtatgtacacatttt

SEQ ID NO: 1463831 - DNA, 15 bp, Homo sapiens
tgtatgtacacattt

SEQ ID NO: 1463832 - DNA, 15 bp, Homo sapiens
atgtatgtacacatt

SEQ ID NO: 1463833 - DNA, 15 bp, Homo sapiens
gatgtatgtacacat

SEQ ID NO: 1463834 - DNA, 15 bp, Homo sapiens
agatgtatgtacaca

SEQ ID NO: 1463835 - DNA, 15 bp, Homo sapiens
tagatgtatgtacac

SEQ ID NO: 1463836 - DNA, 15 bp, Homo sapiens
atagatgtatgtaca

SEQ ID NO: 1463837 - DNA, 15 bp, Homo sapiens
gatagatgtatgtac

SEQ ID NO: 1463838 - DNA, 15 bp, Homo sapiens
tgatagatgtatgta

SEQ ID NO: 1463839 - DNA, 15 bp, Homo sapiens
atgatagatgtatgt

SEQ ID NO: 1463840 - DNA, 15 bp, Homo sapiens
aatgatagatgtatg

SEQ ID NO: 1463841 - DNA, 15 bp, Homo sapiens
aaatgatagatgtat

SEQ ID NO: 1463842 - DNA, 15 bp, Homo sapiens
aaaatgatagatgta

SEQ ID NO: 1463843 - DNA, 15 bp, Homo sapiens
taaaatgatagatgt

SEQ ID NO: 1463844 - DNA, 15 bp, Homo sapiens
ttaaaatgatagatg

SEQ ID NO: 1463845 - DNA, 15 bp, Homo sapiens
cttaaaatgatagat

SEQ ID NO: 1463846 - DNA, 15 bp, Homo sapiens
tcttaaaatgataga

SEQ ID NO: 1463847 - DNA, 15 bp, Homo sapiens
ttcttaaaatgatag

SEQ ID NO: 1463848 - DNA, 15 bp, Homo sapiens
attcttaaaatgata

SEQ ID NO: 1463849 - DNA, 15 bp, Homo sapiens
aattcttaaaatgat

SEQ ID NO: 1463850 - DNA, 15 bp, Homo sapiens
aaattcttaaaatga

SEQ ID NO: 1463851 - DNA, 15 bp, Homo sapiens
taaattcttaaaatg

SEQ ID NO: 1463852 - DNA, 15 bp, Homo sapiens
ctaaattcttaaaat

SEQ ID NO: 1463853 - DNA, 15 bp, Homo sapiens
gctaaattcttaaaa

SEQ ID NO: 1463854 - DNA, 15 bp, Homo sapiens
tgctaaattcttaaa

SEQ ID NO: 1463855 - DNA, 15 bp, Homo sapiens
atgctaaattcttaa

SEQ ID NO: 1463856 - DNA, 15 bp, Homo sapiens
catgctaaattctta

SEQ ID NO: 1463857 - DNA, 15 bp, Homo sapiens
acatgctaaattctt

SEQ ID NO: 1463858 - DNA, 15 bp, Homo sapiens
tacatgctaaattct

SEQ ID NO: 1463859 - DNA, 15 bp, Homo sapiens
atacatgctaaattc

SEQ ID NO: 1463860 - DNA, 15 bp, Homo sapiens
aatacatgctaaatt

SEQ ID NO: 1463861 - DNA, 15 bp, Homo sapiens
taatacatgctaaat

SEQ ID NO: 1463862 - DNA, 15 bp, Homo sapiens
gtaatacatgctaaa

SEQ ID NO: 1463863 - DNA, 15 bp, Homo sapiens
tgtaatacatgctaa

SEQ ID NO: 1463864 - DNA, 15 bp, Homo sapiens
ttgtaatacatgcta

SEQ ID NO: 1463865 - DNA, 15 bp, Homo sapiens
attgtaatacatgct

SEQ ID NO: 1463866 - DNA, 15 bp, Homo sapiens
tattgtaatacatgc

SEQ ID NO: 1463867 - DNA, 15 bp, Homo sapiens
ttattgtaatacatg

SEQ ID NO: 1463868 - DNA, 15 bp, Homo sapiens
attattgtaatacat

SEQ ID NO: 1463869 - DNA, 15 bp, Homo sapiens
aattattgtaataca

SEQ ID NO: 1463870 - DNA, 15 bp, Homo sapiens
aaattattgtaatac

SEQ ID NO: 1463871 - DNA, 15 bp, Homo sapiens
taaattattgtaata

SEQ ID NO: 1463872 - DNA, 15 bp, Homo sapiens
ataaattattgtaat

SEQ ID NO: 1463873 - DNA, 15 bp, Homo sapiens
gataaattattgtaa

SEQ ID NO: 1463874 - DNA, 15 bp, Homo sapiens
agataaattattgta

SEQ ID NO: 1463875 - DNA, 15 bp, Homo sapiens
aagataaattattgt

SEQ ID NO: 1463876 - DNA, 15 bp, Homo sapiens
caagataaattattg

SEQ ID NO: 1463877 - DNA, 15 bp, Homo sapiens
acaagataaattatt

SEQ ID NO: 1463878 - DNA, 15 bp, Homo sapiens
cacaagataaattat

SEQ ID NO: 1463879 - DNA, 15 bp, Homo sapiens
acacaagataaatta

SEQ ID NO: 1463880 - DNA, 15 bp, Homo sapiens
aacacaagataaatt

SEQ ID NO: 1463881 - DNA, 15 bp, Homo sapiens
taacacaagataaat

SEQ ID NO: 1463882 - DNA, 15 bp, Homo sapiens
ataacacaagataaa

SEQ ID NO: 1463883 - DNA, 15 bp, Homo sapiens
tataacacaagataa

SEQ ID NO: 1463884 - DNA, 15 bp, Homo sapiens
atataacacaagata

SEQ ID NO: 1463885 - DNA, 15 bp, Homo sapiens
catataacacaagat

SEQ ID NO: 1463886 - DNA, 15 bp, Homo sapiens
ccatataacacaaga

SEQ ID NO: 1463887 - DNA, 15 bp, Homo sapiens
gccatataacacaag

SEQ ID NO: 1463888 - DNA, 15 bp, Homo sapiens
agccatataacacaa

SEQ ID NO: 1463889 - DNA, 15 bp, Homo sapiens
cagccatataacaca

SEQ ID NO: 1463890 - DNA, 15 bp, Homo sapiens
acagccatataacac

SEQ ID NO: 1463891 - DNA, 15 bp, Homo sapiens
aacagccatataaca

SEQ ID NO: 1463892 - DNA, 15 bp, Homo sapiens
taacagccatataac

SEQ ID NO: 1463893 - DNA, 15 bp, Homo sapiens
ttaacagccatataa

SEQ ID NO: 1463894 - DNA, 15 bp, Homo sapiens
attaacagccatata

SEQ ID NO: 1463895 - DNA, 15 bp, Homo sapiens
aattaacagccatat

SEQ ID NO: 1463896 - DNA, 15 bp, Homo sapiens
gaattaacagccata

SEQ ID NO: 1463897 - DNA, 15 bp, Homo sapiens
tgaattaacagccat

SEQ ID NO: 1463898 - DNA, 15 bp, Homo sapiens
gtgaattaacagcca

SEQ ID NO: 1463899 - DNA, 15 bp, Homo sapiens
agtgaattaacagcc

SEQ ID NO: 1463900 - DNA, 15 bp, Homo sapiens
cagtgaattaacagc

SEQ ID NO: 1463901 - DNA, 15 bp, Homo sapiens
tcagtgaattaacag

SEQ ID NO: 1463902 - DNA, 15 bp, Homo sapiens
atcagtgaattaaca

SEQ ID NO: 1463903 - DNA, 15 bp, Homo sapiens
aatcagtgaattaac

SEQ ID NO: 1463904 - DNA, 15 bp, Homo sapiens
gaatcagtgaattaa

SEQ ID NO: 1463905 - DNA, 15 bp, Homo sapiens
agaatcagtgaatta

SEQ ID NO: 1463906 - DNA, 15 bp, Homo sapiens
aagaatcagtgaatt

SEQ ID NO: 1463907 - DNA, 15 bp, Homo sapiens
aaagaatcagtgaat

SEQ ID NO: 1463908 - DNA, 15 bp, Homo sapiens
gaaagaatcagtgaa

SEQ ID NO: 1463909 - DNA, 15 bp, Homo sapiens
agaaagaatcagtga

SEQ ID NO: 1463910 - DNA, 15 bp, Homo sapiens
aagaaagaatcagtg

SEQ ID NO: 1463911 - DNA, 15 bp, Homo sapiens
taagaaagaatcagt

SEQ ID NO: 1463912 - DNA, 15 bp, Homo sapiens
gtaagaaagaatcag

SEQ ID NO: 1463913 - DNA, 15 bp, Homo sapiens
ggtaagaaagaatca

SEQ ID NO: 1463914 - DNA, 15 bp, Homo sapiens
aggtaagaaagaatc

SEQ ID NO: 1463915 - DNA, 15 bp, Homo sapiens
gaggtaagaaagaat

SEQ ID NO: 1463916 - DNA, 15 bp, Homo sapiens
agaggtaagaaagaa

SEQ ID NO: 1463917 - DNA, 15 bp, Homo sapiens
gagaggtaagaaaga

SEQ ID NO: 1463918 - DNA, 15 bp, Homo sapiens
ggagaggtaagaaag

SEQ ID NO: 1463919 - DNA, 15 bp, Homo sapiens
tggagaggtaagaaa

SEQ ID NO: 1463920 - DNA, 15 bp, Homo sapiens
gtggagaggtaagaa

SEQ ID NO: 1463921 - DNA, 15 bp, Homo sapiens
ggtggagaggtaaga

SEQ ID NO: 1463922 - DNA, 15 bp, Homo sapiens
aggtggagaggtaag

SEQ ID NO: 1463923 - DNA, 15 bp, Homo sapiens
aaggtggagaggtaa

SEQ ID NO: 1463924 - DNA, 15 bp, Homo sapiens
caaggtggagaggta

SEQ ID NO: 1463925 - DNA, 15 bp, Homo sapiens
acaaggtggagaggt

SEQ ID NO: 1463926 - DNA, 15 bp, Homo sapiens
cacaaggtggagagg

SEQ ID NO: 1463927 - DNA, 15 bp, Homo sapiens
tcacaaggtggagag

SEQ ID NO: 1463928 - DNA, 15 bp, Homo sapiens
ctcacaaggtggaga

SEQ ID NO: 1463929 - DNA, 15 bp, Homo sapiens
tctcacaaggtggag

SEQ ID NO: 1463930 - DNA, 15 bp, Homo sapiens
gtctcacaaggtgga

SEQ ID NO: 1463931 - DNA, 15 bp, Homo sapiens
tgtctcacaaggtgg

SEQ ID NO: 1463932 - DNA, 15 bp, Homo sapiens
ttgtctcacaaggtg

SEQ ID NO: 1463933 - DNA, 15 bp, Homo sapiens
tttgtctcacaaggt

SEQ ID NO: 1463934 - DNA, 15 bp, Homo sapiens
ttttgtctcacaagg

SEQ ID NO: 1463935 - DNA, 15 bp, Homo sapiens
tttttgtctcacaag

SEQ ID NO: 1463936 - DNA, 15 bp, Homo sapiens
ttttttgtctcacaa

SEQ ID NO: 1463937 - DNA, 15 bp, Homo sapiens
gttttttgtctcaca

SEQ ID NO: 1463938 - DNA, 15 bp, Homo sapiens
tgttttttgtctcac

SEQ ID NO: 1463939 - DNA, 15 bp, Homo sapiens
atgttttttgtctca

SEQ ID NO: 1463940 - DNA, 15 bp, Homo sapiens
tatgttttttgtctc

SEQ ID NO: 1463941 - DNA, 15 bp, Homo sapiens
ttatgttttttgtct

SEQ ID NO: 1463942 - DNA, 15 bp, Homo sapiens
attatgttttttgtc

SEQ ID NO: 1463943 - DNA, 15 bp, Homo sapiens
aattatgttttttgt

SEQ ID NO: 1463944 - DNA, 15 bp, Homo sapiens
aaattatgttttttg

SEQ ID NO: 1463945 - DNA, 15 bp, Homo sapiens
taaattatgtttttt

SEQ ID NO: 1463946 - DNA, 15 bp, Homo sapiens
ataaattatgttttt

SEQ ID NO: 1463947 - DNA, 15 bp, Homo sapiens
aataaattatgtttt

SEQ ID NO: 1463948 - DNA, 15 bp, Homo sapiens
caataaattatgttt

SEQ ID NO: 1463949 - DNA, 15 bp, Homo sapiens
tcaataaattatgtt

SEQ ID NO: 1463950 - DNA, 15 bp, Homo sapiens
gtcaataaattatgt

SEQ ID NO: 1463951 - DNA, 15 bp, Homo sapiens
ggtcaataaattatg

SEQ ID NO: 1463952 - DNA, 15 bp, Homo sapiens
aggtcaataaattat

SEQ ID NO: 1463953 - DNA, 15 bp, Homo sapiens
aaggtcaataaatta

SEQ ID NO: 1463954 - DNA, 15 bp, Homo sapiens
aaaggtcaataaatt

SEQ ID NO: 1463955 - DNA, 15 bp, Homo sapiens
aaaaggtcaataaat

SEQ ID NO: 1463956 - DNA, 15 bp, Homo sapiens
aaaaaggtcaataaa

SEQ ID NO: 1463957 - DNA, 15 bp, Homo sapiens
taaaaaggtcaataa

SEQ ID NO: 1463958 - DNA, 15 bp, Homo sapiens
ataaaaaggtcaata

SEQ ID NO: 1463959 - DNA, 15 bp, Homo sapiens
gataaaaaggtcaat

SEQ ID NO: 1463960 - DNA, 15 bp, Homo sapiens
ggataaaaaggtcaa

SEQ ID NO: 1463961 - DNA, 15 bp, Homo sapiens
tggataaaaaggtca

SEQ ID NO: 1463962 - DNA, 15 bp, Homo sapiens
atggataaaaaggtc

SEQ ID NO: 1463963 - DNA, 15 bp, Homo sapiens
tatggataaaaaggt

SEQ ID NO: 1463964 - DNA, 15 bp, Homo sapiens
atatggataaaaagg

SEQ ID NO: 1463965 - DNA, 15 bp, Homo sapiens
catatggataaaaag

SEQ ID NO: 1463966 - DNA, 15 bp, Homo sapiens
tcatatggataaaaa

SEQ ID NO: 1463967 - DNA, 15 bp, Homo sapiens
atcatatggataaaa

SEQ ID NO: 1463968 - DNA, 15 bp, Homo sapiens
tatcatatggataaa

SEQ ID NO: 1463969 - DNA, 15 bp, Homo sapiens
ttatcatatggataa

SEQ ID NO: 1463970 - DNA, 15 bp, Homo sapiens
attatcatatggata

SEQ ID NO: 1463971 - DNA, 15 bp, Homo sapiens
tattatcatatggat

SEQ ID NO: 1463972 - DNA, 15 bp, Homo sapiens
ttattatcatatgga

SEQ ID NO: 1463973 - DNA, 15 bp, Homo sapiens
attattatcatatgg

SEQ ID NO: 1463974 - DNA, 15 bp, Homo sapiens
tattattatcatatg

SEQ ID NO: 1463975 - DNA, 15 bp, Homo sapiens
ttattattatcatat

SEQ ID NO: 1463976 - DNA, 15 bp, Homo sapiens
attattattatcata

SEQ ID NO: 1463977 - DNA, 15 bp, Homo sapiens
tattattattatcat

SEQ ID NO: 1463978 - DNA, 15 bp, Homo sapiens
attattattattatc

SEQ ID NO: 1463979 - DNA, 15 bp, Homo sapiens
aattattattattat

SEQ ID NO: 1463980 - DNA, 15 bp, Homo sapiens
gaattattattatta

SEQ ID NO: 1463981 - DNA, 15 bp, Homo sapiens
ggaattattattatt

SEQ ID NO: 1463982 - DNA, 15 bp, Homo sapiens
gggaattattattat

SEQ ID NO: 1463983 - DNA, 15 bp, Homo sapiens
tgggaattattatta

SEQ ID NO: 1463984 - DNA, 15 bp, Homo sapiens
ttgggaattattatt

SEQ ID NO: 1463985 - DNA, 15 bp, Homo sapiens
gttgggaattattat

SEQ ID NO: 1463986 - DNA, 15 bp, Homo sapiens
agttgggaattatta

SEQ ID NO: 1463987 - DNA, 15 bp, Homo sapiens
gagttgggaattatt

SEQ ID NO: 1463988 - DNA, 15 bp, Homo sapiens
agagttgggaattat

SEQ ID NO: 1463989 - DNA, 15 bp, Homo sapiens
aagagttgggaatta

SEQ ID NO: 1463990 - DNA, 15 bp, Homo sapiens
taagagttgggaatt

SEQ ID NO: 1463991 - DNA, 15 bp, Homo sapiens
ataagagttgggaat

SEQ ID NO: 1463992 - DNA, 15 bp, Homo sapiens
aataagagttgggaa

SEQ ID NO: 1463993 - DNA, 15 bp, Homo sapiens
taataagagttggga

SEQ ID NO: 1463994 - DNA, 15 bp, Homo sapiens
ttaataagagttggg

SEQ ID NO: 1463995 - DNA, 15 bp, Homo sapiens
cttaataagagttgg

SEQ ID NO: 1463996 - DNA, 15 bp, Homo sapiens
acttaataagagttg

SEQ ID NO: 1463997 - DNA, 15 bp, Homo sapiens
cacttaataagagtt

SEQ ID NO: 1463998 - DNA, 15 bp, Homo sapiens
gcacttaataagagt

SEQ ID NO: 1463999 - DNA, 15 bp, Homo sapiens
agcacttaataagag

SEQ ID NO: 1464000 - DNA, 15 bp, Homo sapiens
aagcacttaataaga

SEQ ID NO: 1464001 - DNA, 15 bp, Homo sapiens
aaagcacttaataag

SEQ ID NO: 1464002 - DNA, 15 bp, Homo sapiens
gaaagcacttaataa

SEQ ID NO: 1464003 - DNA, 15 bp, Homo sapiens
agaaagcacttaata

SEQ ID NO: 1464004 - DNA, 15 bp, Homo sapiens
cagaaagcacttaat

SEQ ID NO: 1464005 - DNA, 15 bp, Homo sapiens
acagaaagcacttaa

SEQ ID NO: 1464006 - DNA, 15 bp, Homo sapiens
cacagaaagcactta

SEQ ID NO: 1464007 - DNA, 15 bp, Homo sapiens
acacagaaagcactt

SEQ ID NO: 1464008 - DNA, 15 bp, Homo sapiens
cacacagaaagcact

SEQ ID NO: 1464009 - DNA, 15 bp, Homo sapiens
gcacacagaaagcac

SEQ ID NO: 1464010 - DNA, 15 bp, Homo sapiens
tgcacacagaaagca

SEQ ID NO: 1464011 - DNA, 15 bp, Homo sapiens
atgcacacagaaagc

SEQ ID NO: 1464012 - DNA, 15 bp, Homo sapiens
aatgcacacagaaag

SEQ ID NO: 1464013 - DNA, 15 bp, Homo sapiens
aaatgcacacagaaa

SEQ ID NO: 1464014 - DNA, 15 bp, Homo sapiens
taaatgcacacagaa

SEQ ID NO: 1464015 - DNA, 15 bp, Homo sapiens
ttaaatgcacacaga

SEQ ID NO: 1464016 - DNA, 15 bp, Homo sapiens
cttaaatgcacacag

SEQ ID NO: 1464017 - DNA, 15 bp, Homo sapiens
acttaaatgcacaca

SEQ ID NO: 1464018 - DNA, 15 bp, Homo sapiens
aacttaaatgcacac

SEQ ID NO: 1464019 - DNA, 15 bp, Homo sapiens
aaacttaaatgcaca

SEQ ID NO: 1464020 - DNA, 15 bp, Homo sapiens
aaaacttaaatgcac

SEQ ID NO: 1464021 - DNA, 15 bp, Homo sapiens
aaaaacttaaatgca

SEQ ID NO: 1464022 - DNA, 15 bp, Homo sapiens
aaaaaaaacttaaat

SEQ ID NO: 1464023 - DNA, 15 bp, Homo sapiens
taaaaaaaacttaaa

SEQ ID NO: 1464024 - DNA, 15 bp, Homo sapiens
ataaaaaaaacttaa

SEQ ID NO: 1464025 - DNA, 15 bp, Homo sapiens
gataaaaaaaactta

SEQ ID NO: 1464026 - DNA, 15 bp, Homo sapiens
tgataaaaaaaactt

SEQ ID NO: 1464027 - DNA, 15 bp, Homo sapiens
ttgataaaaaaaact

SEQ ID NO: 1464028 - DNA, 15 bp, Homo sapiens
tttgataaaaaaaac

SEQ ID NO: 1464029 - DNA, 15 bp, Homo sapiens
gtttgataaaaaaaa

SEQ ID NO: 1464030 - DNA, 15 bp, Homo sapiens
tgtttgataaaaaaa

SEQ ID NO: 1464031 - DNA, 15 bp, Homo sapiens
atgtttgataaaaaa

SEQ ID NO: 1464032 - DNA, 15 bp, Homo sapiens
gatgtttgataaaaa

SEQ ID NO: 1464033 - DNA, 15 bp, Homo sapiens
tgatgtttgataaaa

SEQ ID NO: 1464034 - DNA, 15 bp, Homo sapiens
atgatgtttgataaa

SEQ ID NO: 1464035 - DNA, 15 bp, Homo sapiens
aatgatgtttgataa

SEQ ID NO: 1464036 - DNA, 15 bp, Homo sapiens
gaatgatgtttgata

SEQ ID NO: 1464037 - DNA, 15 bp, Homo sapiens
agaatgatgtttgat

SEQ ID NO: 1464038 - DNA, 15 bp, Homo sapiens
tagaatgatgtttga

SEQ ID NO: 1464039 - DNA, 15 bp, Homo sapiens
ttagaatgatgtttg

SEQ ID NO: 1464040 - DNA, 15 bp, Homo sapiens
tttagaatgatgttt

SEQ ID NO: 1464041 - DNA, 15 bp, Homo sapiens
gtttagaatgatgtt

SEQ ID NO: 1464042 - DNA, 15 bp, Homo sapiens
agtttagaatgatgt

SEQ ID NO: 1464043 - DNA, 15 bp, Homo sapiens
gagtttagaatgatg

SEQ ID NO: 1464044 - DNA, 15 bp, Homo sapiens
agagtttagaatgat

SEQ ID NO: 1464045 - DNA, 15 bp, Homo sapiens
aagagtttagaatga

SEQ ID NO: 1464046 - DNA, 15 bp, Homo sapiens
gaagagtttagaatg

SEQ ID NO: 1464047 - DNA, 15 bp, Homo sapiens
tgaagagtttagaat

SEQ ID NO: 1464048 - DNA, 15 bp, Homo sapiens
atgaagagtttagaa

SEQ ID NO: 1464049 - DNA, 15 bp, Homo sapiens
aatgaagagtttaga

SEQ ID NO: 1464050 - DNA, 15 bp, Homo sapiens
taatgaagagtttag

SEQ ID NO: 1464051 - DNA, 15 bp, Homo sapiens
ttaatgaagagttta

SEQ ID NO: 1464052 - DNA, 15 bp, Homo sapiens
tttaatgaagagttt

SEQ ID NO: 1464053 - DNA, 15 bp, Homo sapiens
ctttaatgaagagtt

SEQ ID NO: 1464054 - DNA, 15 bp, Homo sapiens
cctttaatgaagagt

SEQ ID NO: 1464055 - DNA, 15 bp, Homo sapiens
acctttaatgaagag

SEQ ID NO: 1464056 - DNA, 15 bp, Homo sapiens
aacctttaatgaaga

SEQ ID NO: 1464057 - DNA, 15 bp, Homo sapiens
caacctttaatgaag

SEQ ID NO: 1464058 - DNA, 15 bp, Homo sapiens
ccaacctttaatgaa

SEQ ID NO: 1464059 - DNA, 15 bp, Homo sapiens
gccaacctttaatga

SEQ ID NO: 1464060 - DNA, 15 bp, Homo sapiens
tgccaacctttaatg

SEQ ID NO: 1464061 - DNA, 15 bp, Homo sapiens
ctgccaacctttaat

SEQ ID NO: 1464062 - DNA, 15 bp, Homo sapiens
tctgccaacctttaa

SEQ ID NO: 1464063 - DNA, 15 bp, Homo sapiens
ttctgccaaccttta

SEQ ID NO: 1464064 - DNA, 15 bp, Homo sapiens
attctgccaaccttt

SEQ ID NO: 1464065 - DNA, 15 bp, Homo sapiens
cattctgccaacctt

SEQ ID NO: 1464066 - DNA, 15 bp, Homo sapiens
tcattctgccaacct

SEQ ID NO: 1464067 - DNA, 15 bp, Homo sapiens
ctcattctgccaacc

SEQ ID NO: 1464068 - DNA, 15 bp, Homo sapiens
tctcattctgccaac

SEQ ID NO: 1464069 - DNA, 15 bp, Homo sapiens
gtctcattctgccaa

SEQ ID NO: 1464070 - DNA, 15 bp, Homo sapiens
tgtctcattctgcca

SEQ ID NO: 1464071 - DNA, 15 bp, Homo sapiens
atgtctcattctgcc

SEQ ID NO: 1464072 - DNA, 15 bp, Homo sapiens
aatgtctcattctgc

SEQ ID NO: 1464073 - DNA, 15 bp, Homo sapiens
taatgtctcattctg

SEQ ID NO: 1464074 - DNA, 15 bp, Homo sapiens
ttaatgtctcattct

SEQ ID NO: 1464075 - DNA, 15 bp, Homo sapiens
cttaatgtctcattc

SEQ ID NO: 1464076 - DNA, 15 bp, Homo sapiens
gcttaatgtctcatt

SEQ ID NO: 1464077 - DNA, 15 bp, Homo sapiens
tgcttaatgtctcat

SEQ ID NO: 1464078 - DNA, 15 bp, Homo sapiens
atgcttaatgtctca

SEQ ID NO: 1464079 - DNA, 15 bp, Homo sapiens
tatgcttaatgtctc

SEQ ID NO: 1464080 - DNA, 15 bp, Homo sapiens
gtatgcttaatgtct

SEQ ID NO: 1464081 - DNA, 15 bp, Homo sapiens
agtatgcttaatgtc

SEQ ID NO: 1464082 - DNA, 15 bp, Homo sapiens
tagtatgcttaatgt

SEQ ID NO: 1464083 - DNA, 15 bp, Homo sapiens
gtagtatgcttaatg

SEQ ID NO: 1464084 - DNA, 15 bp, Homo sapiens
ggtagtatgcttaat

SEQ ID NO: 1464085 - DNA, 15 bp, Homo sapiens
aggtagtatgcttaa

SEQ ID NO: 1464086 - DNA, 15 bp, Homo sapiens
taggtagtatgctta

SEQ ID NO: 1464087 - DNA, 15 bp, Homo sapiens
ctaggtagtatgctt

SEQ ID NO: 1464088 - DNA, 15 bp, Homo sapiens
cctaggtagtatgct

SEQ ID NO: 1464089 - DNA, 15 bp, Homo sapiens
ccctaggtagtatgc

SEQ ID NO: 1464090 - DNA, 15 bp, Homo sapiens
gccctaggtagtatg

SEQ ID NO: 1464091 - DNA, 15 bp, Homo sapiens
tgccctaggtagtat

SEQ ID NO: 1464092 - DNA, 15 bp, Homo sapiens
atgccctaggtagta

SEQ ID NO: 1464093 - DNA, 15 bp, Homo sapiens
tatgccctaggtagt

SEQ ID NO: 1464094 - DNA, 15 bp, Homo sapiens
ctatgccctaggtag

SEQ ID NO: 1464095 - DNA, 15 bp, Homo sapiens
actatgccctaggta

SEQ ID NO: 1464096 - DNA, 15 bp, Homo sapiens
aactatgccctaggt

SEQ ID NO: 1464097 - DNA, 15 bp, Homo sapiens
taactatgccctagg

SEQ ID NO: 1464098 - DNA, 15 bp, Homo sapiens
ttaactatgccctag

SEQ ID NO: 1464099 - DNA, 15 bp, Homo sapiens
gttaactatgcccta

SEQ ID NO: 1464100 - DNA, 15 bp, Homo sapiens
ggttaactatgccct

SEQ ID NO: 1464101 - DNA, 15 bp, Homo sapiens
gggttaactatgccc

SEQ ID NO: 1464102 - DNA, 15 bp, Homo sapiens
agggttaactatgcc

SEQ ID NO: 1464103 - DNA, 15 bp, Homo sapiens
cagggttaactatgc

SEQ ID NO: 1464104 - DNA, 15 bp, Homo sapiens
acagggttaactatg

SEQ ID NO: 1464105 - DNA, 15 bp, Homo sapiens
tacagggttaactat

SEQ ID NO: 1464106 - DNA, 15 bp, Homo sapiens
ttacagggttaacta

SEQ ID NO: 1464107 - DNA, 15 bp, Homo sapiens
tttacagggttaact

SEQ ID NO: 1464108 - DNA, 15 bp, Homo sapiens
ttttacagggttaac

SEQ ID NO: 1464109 - DNA, 15 bp, Homo sapiens
attttacagggttaa

SEQ ID NO: 1464110 - DNA, 15 bp, Homo sapiens
cattttacagggtta

SEQ ID NO: 1464111 - DNA, 15 bp, Homo sapiens
acattttacagggtt

SEQ ID NO: 1464112 - DNA, 15 bp, Homo sapiens
tacattttacagggt

SEQ ID NO: 1464113 - DNA, 15 bp, Homo sapiens
ttacattttacaggg

SEQ ID NO: 1464114 - DNA, 15 bp, Homo sapiens
tttacattttacagg

SEQ ID NO: 1464115 - DNA, 15 bp, Homo sapiens
atttacattttacag

SEQ ID NO: 1464116 - DNA, 15 bp, Homo sapiens
catttacattttaca

SEQ ID NO: 1464117 - DNA, 15 bp, Homo sapiens
tcatttacattttac

SEQ ID NO: 1464118 - DNA, 15 bp, Homo sapiens
ttcatttacatttta

SEQ ID NO: 1464119 - DNA, 15 bp, Homo sapiens
attcatttacatttt

SEQ ID NO: 1464120 - DNA, 15 bp, Homo sapiens
cattcatttacattt

SEQ ID NO: 1464121 - DNA, 15 bp, Homo sapiens
tcattcatttacatt

SEQ ID NO: 1464122 - DNA, 15 bp, Homo sapiens
ttcattcatttacat

SEQ ID NO: 1464123 - DNA, 15 bp, Homo sapiens
attcattcatttaca

SEQ ID NO: 1464124 - DNA, 15 bp, Homo sapiens
tattcattcatttac

SEQ ID NO: 1464125 - DNA, 15 bp, Homo sapiens
ttattattcattcat

SEQ ID NO: 1464126 - DNA, 15 bp, Homo sapiens
atatttattattcat

SEQ ID NO: 1464127 - DNA, 15 bp, Homo sapiens
gatatttattattca

SEQ ID NO: 1464128 - DNA, 15 bp, Homo sapiens
agatatttattattc

SEQ ID NO: 1464129 - DNA, 15 bp, Homo sapiens
tagatatttattatt

SEQ ID NO: 1464130 - DNA, 15 bp, Homo sapiens
atagatatttattat

SEQ ID NO: 1464131 - DNA, 15 bp, Homo sapiens
aatagatatttatta

SEQ ID NO: 1464132 - DNA, 15 bp, Homo sapiens
gaatagatatttatt

SEQ ID NO: 1464133 - DNA, 15 bp, Homo sapiens
ggaatagatatttat

SEQ ID NO: 1464134 - DNA, 15 bp, Homo sapiens
tggaatagatattta

SEQ ID NO: 1464135 - DNA, 15 bp, Homo sapiens
ttggaatagatattt

SEQ ID NO: 1464136 - DNA, 15 bp, Homo sapiens
attggaatagatatt

SEQ ID NO: 1464137 - DNA, 15 bp, Homo sapiens
gattggaatagatat

SEQ ID NO: 1464138 - DNA, 15 bp, Homo sapiens
agattggaatagata

SEQ ID NO: 1464139 - DNA, 15 bp, Homo sapiens
aagattggaatagat

SEQ ID NO: 1464140 - DNA, 15 bp, Homo sapiens
caagattggaataga

SEQ ID NO: 1464141 - DNA, 15 bp, Homo sapiens
ccaagattggaatag

SEQ ID NO: 1464142 - DNA, 15 bp, Homo sapiens
accaagattggaata

SEQ ID NO: 1464143 - DNA, 15 bp, Homo sapiens
gaccaagattggaat

SEQ ID NO: 1464144 - DNA, 15 bp, Homo sapiens
agaccaagattggaa

SEQ ID NO: 1464145 - DNA, 15 bp, Homo sapiens
aagaccaagattgga

SEQ ID NO: 1464146 - DNA, 15 bp, Homo sapiens
taagaccaagattgg

SEQ ID NO: 1464147 - DNA, 15 bp, Homo sapiens
ttaagaccaagattg

SEQ ID NO: 1464148 - DNA, 15 bp, Homo sapiens
tttaagaccaagatt

SEQ ID NO: 1464149 - DNA, 15 bp, Homo sapiens
ttttaagaccaagat

SEQ ID NO: 1464150 - DNA, 15 bp, Homo sapiens
tttttaagaccaaga

SEQ ID NO: 1464151 - DNA, 15 bp, Homo sapiens
gtttttaagaccaag

SEQ ID NO: 1464152 - DNA, 15 bp, Homo sapiens
agtttttaagaccaa

SEQ ID NO: 1464153 - DNA, 15 bp, Homo sapiens
aagtttttaagacca

SEQ ID NO: 1464154 - DNA, 15 bp, Homo sapiens
taagtttttaagacc

SEQ ID NO: 1464155 - DNA, 15 bp, Homo sapiens
ataagtttttaagac

SEQ ID NO: 1464156 - DNA, 15 bp, Homo sapiens
cataagtttttaaga

SEQ ID NO: 1464157 - DNA, 15 bp, Homo sapiens
tcataagtttttaag

SEQ ID NO: 1464158 - DNA, 15 bp, Homo sapiens
atcataagtttttaa

SEQ ID NO: 1464159 - DNA, 15 bp, Homo sapiens
catcataagttttta

SEQ ID NO: 1464160 - DNA, 15 bp, Homo sapiens
tcatcataagttttt

SEQ ID NO: 1464161 - DNA, 15 bp, Homo sapiens
ttcatcataagtttt

SEQ ID NO: 1464162 - DNA, 15 bp, Homo sapiens
cttcatcataagttt

SEQ ID NO: 1464163 - DNA, 15 bp, Homo sapiens
tcttcatcataagtt

SEQ ID NO: 1464164 - DNA, 15 bp, Homo sapiens
atcttcatcataagt

SEQ ID NO: 1464165 - DNA, 15 bp, Homo sapiens
tatcttcatcataag

SEQ ID NO: 1464166 - DNA, 15 bp, Homo sapiens
ttatcttcatcataa

SEQ ID NO: 1464167 - DNA, 15 bp, Homo sapiens
cttatcttcatcata

SEQ ID NO: 1464168 - DNA, 15 bp, Homo sapiens
ccttatcttcatcat

SEQ ID NO: 1464169 - DNA, 15 bp, Homo sapiens
accttatcttcatca

SEQ ID NO: 1464170 - DNA, 15 bp, Homo sapiens
taccttatcttcatc

SEQ ID NO: 1464171 - DNA, 15 bp, Homo sapiens
ttaccttatcttcat

SEQ ID NO: 1464172 - DNA, 15 bp, Homo sapiens
attaccttatcttca

SEQ ID NO: 1464173 - DNA, 15 bp, Homo sapiens
cattaccttatcttc

SEQ ID NO: 1464174 - DNA, 15 bp, Homo sapiens
acattaccttatctt

SEQ ID NO: 1464175 - DNA, 15 bp, Homo sapiens
tacattaccttatct

SEQ ID NO: 1464176 - DNA, 15 bp, Homo sapiens
gtacattaccttatc

SEQ ID NO: 1464177 - DNA, 15 bp, Homo sapiens
agtacattaccttat

SEQ ID NO: 1464178 - DNA, 15 bp, Homo sapiens
aagtacattacctta

SEQ ID NO: 1464179 - DNA, 15 bp, Homo sapiens
taagtacattacctt

SEQ ID NO: 1464180 - DNA, 15 bp, Homo sapiens
ttaagtacattacct

SEQ ID NO: 1464181 - DNA, 15 bp, Homo sapiens
tttaagtacattacc

SEQ ID NO: 1464182 - DNA, 15 bp, Homo sapiens
atttaagtacattac

SEQ ID NO: 1464183 - DNA, 15 bp, Homo sapiens
tatttaagtacatta

SEQ ID NO: 1464184 - DNA, 15 bp, Homo sapiens
atatttaagtacatt

SEQ ID NO: 1464185 - DNA, 15 bp, Homo sapiens
aatatttaagtacat

SEQ ID NO: 1464186 - DNA, 15 bp, Homo sapiens
taatatttaagtaca

SEQ ID NO: 1464187 - DNA, 15 bp, Homo sapiens
ataatatttaagtac

SEQ ID NO: 1464188 - DNA, 15 bp, Homo sapiens
tataatatttaagta

SEQ ID NO: 1464189 - DNA, 15 bp, Homo sapiens
atataatatttaagt

SEQ ID NO: 1464190 - DNA, 15 bp, Homo sapiens
tatataatatttaag

SEQ ID NO: 1464191 - DNA, 15 bp, Homo sapiens
gtatataatatttaa

SEQ ID NO: 1464192 - DNA, 15 bp, Homo sapiens
agtatataatattta

SEQ ID NO: 1464193 - DNA, 15 bp, Homo sapiens
tagtatataatattt

SEQ ID NO: 1464194 - DNA, 15 bp, Homo sapiens
gtagtatataatatt

SEQ ID NO: 1464195 - DNA, 15 bp, Homo sapiens
agtagtatataatat

SEQ ID NO: 1464196 - DNA, 15 bp, Homo sapiens
gagtagtatataata

SEQ ID NO: 1464197 - DNA, 15 bp, Homo sapiens
agagtagtatataat

SEQ ID NO: 1464198 - DNA, 15 bp, Homo sapiens
aagagtagtatataa

SEQ ID NO: 1464199 - DNA, 15 bp, Homo sapiens
aaagagtagtatata

SEQ ID NO: 1464200 - DNA, 15 bp, Homo sapiens
taaagagtagtatat

SEQ ID NO: 1464201 - DNA, 15 bp, Homo sapiens
ttaaagagtagtata

SEQ ID NO: 1464202 - DNA, 15 bp, Homo sapiens
tttaaagagtagtat

SEQ ID NO: 1464203 - DNA, 15 bp, Homo sapiens
gtttaaagagtagta

SEQ ID NO: 1464204 - DNA, 15 bp, Homo sapiens
tgtttaaagagtagt

SEQ ID NO: 1464205 - DNA, 15 bp, Homo sapiens
ctgtttaaagagtag

SEQ ID NO: 1464206 - DNA, 15 bp, Homo sapiens
tctgtttaaagagta

SEQ ID NO: 1464207 - DNA, 15 bp, Homo sapiens
atctgtttaaagagt

SEQ ID NO: 1464208 - DNA, 15 bp, Homo sapiens
tatctgtttaaagag

SEQ ID NO: 1464209 - DNA, 15 bp, Homo sapiens
ctatctgtttaaaga

SEQ ID NO: 1464210 - DNA, 15 bp, Homo sapiens
tctatctgtttaaag

SEQ ID NO: 1464211 - DNA, 15 bp, Homo sapiens
gtctatctgtttaaa

SEQ ID NO: 1464212 - DNA, 15 bp, Homo sapiens
tgtctatctgtttaa

SEQ ID NO: 1464213 - DNA, 15 bp, Homo sapiens
ctgtctatctgttta

SEQ ID NO: 1464214 - DNA, 15 bp, Homo sapiens
gctgtctatctgttt

SEQ ID NO: 1464215 - DNA, 15 bp, Homo sapiens
tgctgtctatctgtt

SEQ ID NO: 1464216 - DNA, 15 bp, Homo sapiens
ctgctgtctatctgt

SEQ ID NO: 1464217 - DNA, 15 bp, Homo sapiens
tctgctgtctatctg

SEQ ID NO: 1464218 - DNA, 15 bp, Homo sapiens
ttctgctgtctatct

SEQ ID NO: 1464219 - DNA, 15 bp, Homo sapiens
tttctgctgtctatc

SEQ ID NO: 1464220 - DNA, 15 bp, Homo sapiens
ttttctgctgtctat

SEQ ID NO: 1464221 - DNA, 15 bp, Homo sapiens
tttttctgctgtcta

SEQ ID NO: 1464222 - DNA, 15 bp, Homo sapiens
atttttctgctgtct

SEQ ID NO: 1464223 - DNA, 15 bp, Homo sapiens
aatttttctgctgtc

SEQ ID NO: 1464224 - DNA, 15 bp, Homo sapiens
taatttttctgctgt

SEQ ID NO: 1464225 - DNA, 15 bp, Homo sapiens
gtaatttttctgctg

SEQ ID NO: 1464226 - DNA, 15 bp, Homo sapiens
agtaatttttctgct

SEQ ID NO: 1464227 - DNA, 15 bp, Homo sapiens
cagtaatttttctgc

SEQ ID NO: 1464228 - DNA, 15 bp, Homo sapiens
acagtaatttttctg

SEQ ID NO: 1464229 - DNA, 15 bp, Homo sapiens
cacagtaatttttct

SEQ ID NO: 1464230 - DNA, 15 bp, Homo sapiens
acacagtaatttttc

SEQ ID NO: 1464231 - DNA, 15 bp, Homo sapiens
aacacagtaattttt

SEQ ID NO: 1464232 - DNA, 15 bp, Homo sapiens
gaacacagtaatttt

SEQ ID NO: 1464233 - DNA, 15 bp, Homo sapiens
tgaacacagtaattt

SEQ ID NO: 1464234 - DNA, 15 bp, Homo sapiens
gtgaacacagtaatt

SEQ ID NO: 1464235 - DNA, 15 bp, Homo sapiens
agtgaacacagtaat

SEQ ID NO: 1464236 - DNA, 15 bp, Homo sapiens
tagtgaacacagtaa

SEQ ID NO: 1464237 - DNA, 15 bp, Homo sapiens
atagtgaacacagta

SEQ ID NO: 1464238 - DNA, 15 bp, Homo sapiens
gatagtgaacacagt

SEQ ID NO: 1464239 - DNA, 15 bp, Homo sapiens
tgatagtgaacacag

SEQ ID NO: 1464240 - DNA, 15 bp, Homo sapiens
ttgatagtgaacaca

SEQ ID NO: 1464241 - DNA, 15 bp, Homo sapiens
tttgatagtgaacac

SEQ ID NO: 1464242 - DNA, 15 bp, Homo sapiens
atttgatagtgaaca

SEQ ID NO: 1464243 - DNA, 15 bp, Homo sapiens
aatttgatagtgaac

SEQ ID NO: 1464244 - DNA, 15 bp, Homo sapiens
taatttgatagtgaa

SEQ ID NO: 1464245 - DNA, 15 bp, Homo sapiens
gtaatttgatagtga

SEQ ID NO: 1464246 - DNA, 15 bp, Homo sapiens
ggtaatttgatagtg

SEQ ID NO: 1464247 - DNA, 15 bp, Homo sapiens
gggtaatttgatagt

SEQ ID NO: 1464248 - DNA, 15 bp, Homo sapiens
agggtaatttgatag

SEQ ID NO: 1464249 - DNA, 15 bp, Homo sapiens
tagggtaatttgata

SEQ ID NO: 1464250 - DNA, 15 bp, Homo sapiens
ttagggtaatttgat

SEQ ID NO: 1464251 - DNA, 15 bp, Homo sapiens
tttagggtaatttga

SEQ ID NO: 1464252 - DNA, 15 bp, Homo sapiens
ttttagggtaatttg

SEQ ID NO: 1464253 - DNA, 15 bp, Homo sapiens
gttttagggtaattt

SEQ ID NO: 1464254 - DNA, 15 bp, Homo sapiens
tgttttagggtaatt

SEQ ID NO: 1464255 - DNA, 15 bp, Homo sapiens
atgttttagggtaat

SEQ ID NO: 1464256 - DNA, 15 bp, Homo sapiens
tatgttttagggtaa

SEQ ID NO: 1464257 - DNA, 15 bp, Homo sapiens
ctatgttttagggta

SEQ ID NO: 1464258 - DNA, 15 bp, Homo sapiens
gctatgttttagggt

SEQ ID NO: 1464259 - DNA, 15 bp, Homo sapiens
tgctatgttttaggg

SEQ ID NO: 1464260 - DNA, 15 bp, Homo sapiens
ttgctatgttttagg

SEQ ID NO: 1464261 - DNA, 15 bp, Homo sapiens
gttgctatgttttag

SEQ ID NO: 1464262 - DNA, 15 bp, Homo sapiens
agttgctatgtttta

SEQ ID NO: 1464263 - DNA, 15 bp, Homo sapiens
aagttgctatgtttt

SEQ ID NO: 1464264 - DNA, 15 bp, Homo sapiens
taagttgctatgttt

SEQ ID NO: 1464265 - DNA, 15 bp, Homo sapiens
ttaagttgctatgtt

SEQ ID NO: 1464266 - DNA, 15 bp, Homo sapiens
tttaagttgctatgt

SEQ ID NO: 1464267 - DNA, 15 bp, Homo sapiens
ttttaagttgctatg

SEQ ID NO: 1464268 - DNA, 15 bp, Homo sapiens
gttttaagttgctat

SEQ ID NO: 1464269 - DNA, 15 bp, Homo sapiens
tgttttaagttgcta

SEQ ID NO: 1464270 - DNA, 15 bp, Homo sapiens
ttgttttaagttgct

SEQ ID NO: 1464271 - DNA, 15 bp, Homo sapiens
gttgttttaagttgc

SEQ ID NO: 1464272 - DNA, 15 bp, Homo sapiens
tgttgttttaagttg

SEQ ID NO: 1464273 - DNA, 15 bp, Homo sapiens
ctgttgttttaagtt

SEQ ID NO: 1464274 - DNA, 15 bp, Homo sapiens
tctgttgttttaagt

SEQ ID NO: 1464275 - DNA, 15 bp, Homo sapiens
gtctgttgttttaag

SEQ ID NO: 1464276 - DNA, 15 bp, Homo sapiens
cgtctgttgttttaa

SEQ ID NO: 1464277 - DNA, 15 bp, Homo sapiens
acgtctgttgtttta

SEQ ID NO: 1464278 - DNA, 15 bp, Homo sapiens
aacgtctgttgtttt

SEQ ID NO: 1464279 - DNA, 15 bp, Homo sapiens
aaacgtctgttgttt

SEQ ID NO: 1464280 - DNA, 15 bp, Homo sapiens
aaaacgtctgttgtt

SEQ ID NO: 1464281 - DNA, 15 bp, Homo sapiens
aaaaacgtctgttgt

SEQ ID NO: 1464282 - DNA, 15 bp, Homo sapiens
aaaaaacgtctgttg

SEQ ID NO: 1464283 - DNA, 15 bp, Homo sapiens
taaaaaacgtctgtt

SEQ ID NO: 1464284 - DNA, 15 bp, Homo sapiens
ataaaaaacgtctgt

SEQ ID NO: 1464285 - DNA, 15 bp, Homo sapiens
gataaaaaacgtctg

SEQ ID NO: 1464286 - DNA, 15 bp, Homo sapiens
agataaaaaacgtct

SEQ ID NO: 1464287 - DNA, 15 bp, Homo sapiens
gagataaaaaacgtc

SEQ ID NO: 1464288 - DNA, 15 bp, Homo sapiens
tgagataaaaaacgt

SEQ ID NO: 1464289 - DNA, 15 bp, Homo sapiens
gtgagataaaaaacg

SEQ ID NO: 1464290 - DNA, 15 bp, Homo sapiens
tgtgagataaaaaac

SEQ ID NO: 1464291 - DNA, 15 bp, Homo sapiens
gtgtgagataaaaaa

SEQ ID NO: 1464292 - DNA, 15 bp, Homo sapiens
tgtgtgagataaaaa

SEQ ID NO: 1464293 - DNA, 15 bp, Homo sapiens
ctgtgtgagataaaa

SEQ ID NO: 1464294 - DNA, 15 bp, Homo sapiens
actgtgtgagataaa

SEQ ID NO: 1464295 - DNA, 15 bp, Homo sapiens
aactgtgtgagataa

SEQ ID NO: 1464296 - DNA, 15 bp, Homo sapiens
aaactgtgtgagata

SEQ ID NO: 1464297 - DNA, 15 bp, Homo sapiens
gaaactgtgtgagat

SEQ ID NO: 1464298 - DNA, 15 bp, Homo sapiens
agaaactgtgtgaga

SEQ ID NO: 1464299 - DNA, 15 bp, Homo sapiens
cagaaactgtgtgag

SEQ ID NO: 1464300 - DNA, 15 bp, Homo sapiens
tcagaaactgtgtga

SEQ ID NO: 1464301 - DNA, 15 bp, Homo sapiens
ttcagaaactgtgtg

SEQ ID NO: 1464302 - DNA, 15 bp, Homo sapiens
attcagaaactgtgt

SEQ ID NO: 1464303 - DNA, 15 bp, Homo sapiens
aattcagaaactgtg

SEQ ID NO: 1464304 - DNA, 15 bp, Homo sapiens
taattcagaaactgt

SEQ ID NO: 1464305 - DNA, 15 bp, Homo sapiens
ctaattcagaaactg

SEQ ID NO: 1464306 - DNA, 15 bp, Homo sapiens
cctaattcagaaact

SEQ ID NO: 1464307 - DNA, 15 bp, Homo sapiens
tcctaattcagaaac

SEQ ID NO: 1464308 - DNA, 15 bp, Homo sapiens
ttcctaattcagaaa

SEQ ID NO: 1464309 - DNA, 15 bp, Homo sapiens
cttcctaattcagaa

SEQ ID NO: 1464310 - DNA, 15 bp, Homo sapiens
acttcctaattcaga

SEQ ID NO: 1464311 - DNA, 15 bp, Homo sapiens
tacttcctaattcag

SEQ ID NO: 1464312 - DNA, 15 bp, Homo sapiens
ttacttcctaattca

SEQ ID NO: 1464313 - DNA, 15 bp, Homo sapiens
cttacttcctaattc

SEQ ID NO: 1464314 - DNA, 15 bp, Homo sapiens
ccttacttcctaatt

SEQ ID NO: 1464315 - DNA, 15 bp, Homo sapiens
tccttacttcctaat

SEQ ID NO: 1464316 - DNA, 15 bp, Homo sapiens
ttccttacttcctaa

SEQ ID NO: 1464317 - DNA, 15 bp, Homo sapiens
attccttacttccta

SEQ ID NO: 1464318 - DNA, 15 bp, Homo sapiens
gattccttacttcct

SEQ ID NO: 1464319 - DNA, 15 bp, Homo sapiens
agattccttacttcc

SEQ ID NO: 1464320 - DNA, 15 bp, Homo sapiens
cagattccttacttc

SEQ ID NO: 1464321 - DNA, 15 bp, Homo sapiens
ccagattccttactt

SEQ ID NO: 1464322 - DNA, 15 bp, Homo sapiens
tccagattccttact

SEQ ID NO: 1464323 - DNA, 15 bp, Homo sapiens
ttccagattccttac

SEQ ID NO: 1464324 - DNA, 15 bp, Homo sapiens
cttccagattcctta

SEQ ID NO: 1464325 - DNA, 15 bp, Homo sapiens
acttccagattcctt

SEQ ID NO: 1464326 - DNA, 15 bp, Homo sapiens
tacttccagattcct

SEQ ID NO: 1464327 - DNA, 15 bp, Homo sapiens
ctacttccagattcc

SEQ ID NO: 1464328 - DNA, 15 bp, Homo sapiens
gctacttccagattc

SEQ ID NO: 1464329 - DNA, 15 bp, Homo sapiens
agctacttccagatt

SEQ ID NO: 1464330 - DNA, 15 bp, Homo sapiens
aagctacttccagat

SEQ ID NO: 1464331 - DNA, 15 bp, Homo sapiens
taagctacttccaga

SEQ ID NO: 1464332 - DNA, 15 bp, Homo sapiens
ctaagctacttccag

SEQ ID NO: 1464333 - DNA, 15 bp, Homo sapiens
gctaagctacttcca

SEQ ID NO: 1464334 - DNA, 15 bp, Homo sapiens
agctaagctacttcc

SEQ ID NO: 1464335 - DNA, 15 bp, Homo sapiens
cagctaagctacttc

SEQ ID NO: 1464336 - DNA, 15 bp, Homo sapiens
acagctaagctactt

SEQ ID NO: 1464337 - DNA, 15 bp, Homo sapiens
tacagctaagctact

SEQ ID NO: 1464338 - DNA, 15 bp, Homo sapiens
ttacagctaagctac

SEQ ID NO: 1464339 - DNA, 15 bp, Homo sapiens
attacagctaagcta

SEQ ID NO: 1464340 - DNA, 15 bp, Homo sapiens
aattacagctaagct

SEQ ID NO: 1464341 - DNA, 15 bp, Homo sapiens
gaattacagctaagc

SEQ ID NO: 1464342 - DNA, 15 bp, Homo sapiens
agaattacagctaag

SEQ ID NO: 1464343 - DNA, 15 bp, Homo sapiens
tagaattacagctaa

SEQ ID NO: 1464344 - DNA, 15 bp, Homo sapiens
ttagaattacagcta

SEQ ID NO: 1464345 - DNA, 15 bp, Homo sapiens
tttagaattacagct

SEQ ID NO: 1464346 - DNA, 15 bp, Homo sapiens
atttagaattacagc

SEQ ID NO: 1464347 - DNA, 15 bp, Homo sapiens
aatttagaattacag

SEQ ID NO: 1464348 - DNA, 15 bp, Homo sapiens
taatttagaattaca

SEQ ID NO: 1464349 - DNA, 15 bp, Homo sapiens
ataatttagaattac

SEQ ID NO: 1464350 - DNA, 15 bp, Homo sapiens
aataatttagaatta

SEQ ID NO: 1464351 - DNA, 15 bp, Homo sapiens
aaataatttagaatt

SEQ ID NO: 1464352 - DNA, 15 bp, Homo sapiens
aaaataatttagaat

SEQ ID NO: 1464353 - DNA, 15 bp, Homo sapiens
aaaaataatttagaa

SEQ ID NO: 1464354 - DNA, 15 bp, Homo sapiens
caaaaataatttaga

SEQ ID NO: 1464355 - DNA, 15 bp, Homo sapiens
ccaaaaataatttag

SEQ ID NO: 1464356 - DNA, 15 bp, Homo sapiens
accaaaaataattta

SEQ ID NO: 1464357 - DNA, 15 bp, Homo sapiens
taccaaaaataattt

SEQ ID NO: 1464358 - DNA, 15 bp, Homo sapiens
ttaccaaaaataatt

SEQ ID NO: 1464359 - DNA, 15 bp, Homo sapiens
tttaccaaaaataat

SEQ ID NO: 1464360 - DNA, 15 bp, Homo sapiens
ttttaccaaaaataa

SEQ ID NO: 1464361 - DNA, 15 bp, Homo sapiens
attttaccaaaaata

SEQ ID NO: 1464362 - DNA, 15 bp, Homo sapiens
aattttaccaaaaat

SEQ ID NO: 1464363 - DNA, 15 bp, Homo sapiens
taattttaccaaaaa

SEQ ID NO: 1464364 - DNA, 15 bp, Homo sapiens
ataattttaccaaaa

SEQ ID NO: 1464365 - DNA, 15 bp, Homo sapiens
cataattttaccaaa

SEQ ID NO: 1464366 - DNA, 15 bp, Homo sapiens
gcataattttaccaa

SEQ ID NO: 1464367 - DNA, 15 bp, Homo sapiens
ggcataattttacca

SEQ ID NO: 1464368 - DNA, 15 bp, Homo sapiens
tggcataattttacc

SEQ ID NO: 1464369 - DNA, 15 bp, Homo sapiens
gtggcataattttac

SEQ ID NO: 1464370 - DNA, 15 bp, Homo sapiens
agtggcataatttta

SEQ ID NO: 1464371 - DNA, 15 bp, Homo sapiens
aagtggcataatttt

SEQ ID NO: 1464372 - DNA, 15 bp, Homo sapiens
taagtggcataattt

SEQ ID NO: 1464373 - DNA, 15 bp, Homo sapiens
ctaagtggcataatt

SEQ ID NO: 1464374 - DNA, 15 bp, Homo sapiens
tctaagtggcataat

SEQ ID NO: 1464375 - DNA, 15 bp, Homo sapiens
ttctaagtggcataa

SEQ ID NO: 1464376 - DNA, 15 bp, Homo sapiens
tttctaagtggcata

SEQ ID NO: 1464377 - DNA, 15 bp, Homo sapiens
ctttctaagtggcat

SEQ ID NO: 1464378 - DNA, 15 bp, Homo sapiens
tctttctaagtggca

SEQ ID NO: 1464379 - DNA, 15 bp, Homo sapiens
atctttctaagtggc

SEQ ID NO: 1464380 - DNA, 15 bp, Homo sapiens
tatctttctaagtgg

SEQ ID NO: 1464381 - DNA, 15 bp, Homo sapiens
ttatctttctaagtg

SEQ ID NO: 1464382 - DNA, 15 bp, Homo sapiens
cttatctttctaagt

SEQ ID NO: 1464383 - DNA, 15 bp, Homo sapiens
acttatctttctaag

SEQ ID NO: 1464384 - DNA, 15 bp, Homo sapiens
gacttatctttctaa

SEQ ID NO: 1464385 - DNA, 15 bp, Homo sapiens
agacttatctttcta

SEQ ID NO: 1464386 - DNA, 15 bp, Homo sapiens
tagacttatctttct

SEQ ID NO: 1464387 - DNA, 15 bp, Homo sapiens
atagacttatctttc

SEQ ID NO: 1464388 - DNA, 15 bp, Homo sapiens
tatagacttatcttt

SEQ ID NO: 1464389 - DNA, 15 bp, Homo sapiens
ctatagacttatctt

SEQ ID NO: 1464390 - DNA, 15 bp, Homo sapiens
tctatagacttatct

SEQ ID NO: 1464391 - DNA, 15 bp, Homo sapiens
atctatagacttatc

SEQ ID NO: 1464392 - DNA, 15 bp, Homo sapiens
aatctatagacttat

SEQ ID NO: 1464393 - DNA, 15 bp, Homo sapiens
taatctatagactta

SEQ ID NO: 1464394 - DNA, 15 bp, Homo sapiens
ctaatctatagactt

SEQ ID NO: 1464395 - DNA, 15 bp, Homo sapiens
cctaatctatagact

SEQ ID NO: 1464396 - DNA, 15 bp, Homo sapiens
ccctaatctatagac

SEQ ID NO: 1464397 - DNA, 15 bp, Homo sapiens
accctaatctataga

SEQ ID NO: 1464398 - DNA, 15 bp, Homo sapiens
aaccctaatctatag

SEQ ID NO: 1464399 - DNA, 15 bp, Homo sapiens
taaccctaatctata

SEQ ID NO: 1464400 - DNA, 15 bp, Homo sapiens
ataaccctaatctat

SEQ ID NO: 1464401 - DNA, 15 bp, Homo sapiens
tataaccctaatcta

SEQ ID NO: 1464402 - DNA, 15 bp, Homo sapiens
ctataaccctaatct

SEQ ID NO: 1464403 - DNA, 15 bp, Homo sapiens
actataaccctaatc

SEQ ID NO: 1464404 - DNA, 15 bp, Homo sapiens
cactataaccctaat

SEQ ID NO: 1464405 - DNA, 15 bp, Homo sapiens
ccactataaccctaa

SEQ ID NO: 1464406 - DNA, 15 bp, Homo sapiens
tccactataacccta

SEQ ID NO: 1464407 - DNA, 15 bp, Homo sapiens
ttccactataaccct

SEQ ID NO: 1464408 - DNA, 15 bp, Homo sapiens
attccactataaccc

SEQ ID NO: 1464409 - DNA, 15 bp, Homo sapiens
tattccactataacc

SEQ ID NO: 1464410 - DNA, 15 bp, Homo sapiens
ttattccactataac

SEQ ID NO: 1464411 - DNA, 15 bp, Homo sapiens
tttattccactataa

SEQ ID NO: 1464412 - DNA, 15 bp, Homo sapiens
gtttattccactata

SEQ ID NO: 1464413 - DNA, 15 bp, Homo sapiens
tgtttattccactat

SEQ ID NO: 1464414 - DNA, 15 bp, Homo sapiens
atgtttattccacta

SEQ ID NO: 1464415 - DNA, 15 bp, Homo sapiens
aatgtttattccact

SEQ ID NO: 1464416 - DNA, 15 bp, Homo sapiens
taatgtttattccac

SEQ ID NO: 1464417 - DNA, 15 bp, Homo sapiens
ctaatgtttattcca

SEQ ID NO: 1464418 - DNA, 15 bp, Homo sapiens
gctaatgtttattcc

SEQ ID NO: 1464419 - DNA, 15 bp, Homo sapiens
agctaatgtttattc

SEQ ID NO: 1464420 - DNA, 15 bp, Homo sapiens
gagctaatgtttatt

SEQ ID NO: 1464421 - DNA, 15 bp, Homo sapiens
cgagctaatgtttat

SEQ ID NO: 1464422 - DNA, 15 bp, Homo sapiens
acgagctaatgttta

SEQ ID NO: 1464423 - DNA, 15 bp, Homo sapiens
aacgagctaatgttt

SEQ ID NO: 1464424 - DNA, 15 bp, Homo sapiens
taacgagctaatgtt

SEQ ID NO: 1464425 - DNA, 15 bp, Homo sapiens
ctaacgagctaatgt

SEQ ID NO: 1464426 - DNA, 15 bp, Homo sapiens
gctaacgagctaatg

SEQ ID NO: 1464427 - DNA, 15 bp, Homo sapiens
tgctaacgagctaat

SEQ ID NO: 1464428 - DNA, 15 bp, Homo sapiens
ctgctaacgagctaa

SEQ ID NO: 1464429 - DNA, 15 bp, Homo sapiens
cctgctaacgagcta

SEQ ID NO: 1464430 - DNA, 15 bp, Homo sapiens
tcctgctaacgagct

SEQ ID NO: 1464431 - DNA, 15 bp, Homo sapiens
ttcctgctaacgagc

SEQ ID NO: 1464432 - DNA, 15 bp, Homo sapiens
gttcctgctaacgag

SEQ ID NO: 1464433 - DNA, 15 bp, Homo sapiens
ggttcctgctaacga

SEQ ID NO: 1464434 - DNA, 15 bp, Homo sapiens
gggttcctgctaacg

SEQ ID NO: 1464435 - DNA, 15 bp, Homo sapiens
agggttcctgctaac

SEQ ID NO: 1464436 - DNA, 15 bp, Homo sapiens
cagggttcctgctaa

SEQ ID NO: 1464437 - DNA, 15 bp, Homo sapiens
gcagggttcctgcta

SEQ ID NO: 1464438 - DNA, 15 bp, Homo sapiens
tgcagggttcctgct

SEQ ID NO: 1464439 - DNA, 15 bp, Homo sapiens
ctgcagggttcctgc

SEQ ID NO: 1464440 - DNA, 15 bp, Homo sapiens
tctgcagggttcctg

SEQ ID NO: 1464441 - DNA, 15 bp, Homo sapiens
ttctgcagggttcct

SEQ ID NO: 1464442 - DNA, 15 bp, Homo sapiens
attctgcagggttcc

SEQ ID NO: 1464443 - DNA, 15 bp, Homo sapiens
aattctgcagggttc

SEQ ID NO: 1464444 - DNA, 15 bp, Homo sapiens
taattctgcagggtt

SEQ ID NO: 1464445 - DNA, 15 bp, Homo sapiens
ataattctgcagggt

SEQ ID NO: 1464446 - DNA, 15 bp, Homo sapiens
tataattctgcaggg

SEQ ID NO: 1464447 - DNA, 15 bp, Homo sapiens
ctataattctgcagg

SEQ ID NO: 1464448 - DNA, 15 bp, Homo sapiens
actataattctgcag

SEQ ID NO: 1464449 - DNA, 15 bp, Homo sapiens
cactataattctgca

SEQ ID NO: 1464450 - DNA, 15 bp, Homo sapiens
ccactataattctgc

SEQ ID NO: 1464451 - DNA, 15 bp, Homo sapiens
cccactataattctg

SEQ ID NO: 1464452 - DNA, 15 bp, Homo sapiens
ccccactataattct

SEQ ID NO: 1464453 - DNA, 15 bp, Homo sapiens
tccccactataattc

SEQ ID NO: 1464454 - DNA, 15 bp, Homo sapiens
ttccccactataatt

SEQ ID NO: 1464455 - DNA, 15 bp, Homo sapiens
gttccccactataat

SEQ ID NO: 1464456 - DNA, 15 bp, Homo sapiens
agttccccactataa

SEQ ID NO: 1464457 - DNA, 15 bp, Homo sapiens
aagttccccactata

SEQ ID NO: 1464458 - DNA, 15 bp, Homo sapiens
aaagttccccactat

SEQ ID NO: 1464459 - DNA, 15 bp, Homo sapiens
aaaagttccccacta

SEQ ID NO: 1464460 - DNA, 15 bp, Homo sapiens
aaaaagttccccact

SEQ ID NO: 1464461 - DNA, 15 bp, Homo sapiens
taaaaagttccccac

SEQ ID NO: 1464462 - DNA, 15 bp, Homo sapiens
ataaaaagttcccca

SEQ ID NO: 1464463 - DNA, 15 bp, Homo sapiens
tataaaaagttcccc

SEQ ID NO: 1464464 - DNA, 15 bp, Homo sapiens
ttataaaaagttccc

SEQ ID NO: 1464465 - DNA, 15 bp, Homo sapiens
cttataaaaagttcc

SEQ ID NO: 1464466 - DNA, 15 bp, Homo sapiens
tcttataaaaagttc

SEQ ID NO: 1464467 - DNA, 15 bp, Homo sapiens
ttcttataaaaagtt

SEQ ID NO: 1464468 - DNA, 15 bp, Homo sapiens
attcttataaaaagt

SEQ ID NO: 1464469 - DNA, 15 bp, Homo sapiens
tattcttataaaaag

SEQ ID NO: 1464470 - DNA, 15 bp, Homo sapiens
gtattcttataaaaa

SEQ ID NO: 1464471 - DNA, 15 bp, Homo sapiens
agtattcttataaaa

SEQ ID NO: 1464472 - DNA, 15 bp, Homo sapiens
cagtattcttataaa

SEQ ID NO: 1464473 - DNA, 15 bp, Homo sapiens
ccagtattcttataa

SEQ ID NO: 1464474 - DNA, 15 bp, Homo sapiens
cccagtattcttata

SEQ ID NO: 1464475 - DNA, 15 bp, Homo sapiens
tcccagtattcttat

SEQ ID NO: 1464476 - DNA, 15 bp, Homo sapiens
atcccagtattctta

SEQ ID NO: 1464477 - DNA, 15 bp, Homo sapiens
aatcccagtattctt

SEQ ID NO: 1464478 - DNA, 15 bp, Homo sapiens
aaatcccagtattct

SEQ ID NO: 1464479 - DNA, 15 bp, Homo sapiens
caaatcccagtattc

SEQ ID NO: 1464480 - DNA, 15 bp, Homo sapiens
tcaaatcccagtatt

SEQ ID NO: 1464481 - DNA, 15 bp, Homo sapiens
atcaaatcccagtat

SEQ ID NO: 1464482 - DNA, 15 bp, Homo sapiens
tatcaaatcccagta

SEQ ID NO: 1464483 - DNA, 15 bp, Homo sapiens
atatcaaatcccagt

SEQ ID NO: 1464484 - DNA, 15 bp, Homo sapiens
tatatcaaatcccag

SEQ ID NO: 1464485 - DNA, 15 bp, Homo sapiens
atatatcaaatccca

SEQ ID NO: 1464486 - DNA, 15 bp, Homo sapiens
aatatatcaaatccc

SEQ ID NO: 1464487 - DNA, 15 bp, Homo sapiens
aaatatatcaaatcc

SEQ ID NO: 1464488 - DNA, 15 bp, Homo sapiens
caaatatatcaaatc

SEQ ID NO: 1464489 - DNA, 15 bp, Homo sapiens
tcaaatatatcaaat

SEQ ID NO: 1464490 - DNA, 15 bp, Homo sapiens
atcaaatatatcaaa

SEQ ID NO: 1464491 - DNA, 15 bp, Homo sapiens
tatcaaatatatcaa

SEQ ID NO: 1464492 - DNA, 15 bp, Homo sapiens
ttatcaaatatatca

SEQ ID NO: 1464493 - DNA, 15 bp, Homo sapiens
cttatcaaatatatc

SEQ ID NO: 1464494 - DNA, 15 bp, Homo sapiens
tcttatcaaatatat

SEQ ID NO: 1464495 - DNA, 15 bp, Homo sapiens
ttcttatcaaatata

SEQ ID NO: 1464496 - DNA, 15 bp, Homo sapiens
attcttatcaaatat

SEQ ID NO: 1464497 - DNA, 15 bp, Homo sapiens
tattcttatcaaata

SEQ ID NO: 1464498 - DNA, 15 bp, Homo sapiens
ctattcttatcaaat

SEQ ID NO: 1464499 - DNA, 15 bp, Homo sapiens
actattcttatcaaa

SEQ ID NO: 1464500 - DNA, 15 bp, Homo sapiens
cactattcttatcaa

SEQ ID NO: 1464501 - DNA, 15 bp, Homo sapiens
acactattcttatca

SEQ ID NO: 1464502 - DNA, 15 bp, Homo sapiens
tacactattcttatc

SEQ ID NO: 1464503 - DNA, 15 bp, Homo sapiens
atacactattcttat

SEQ ID NO: 1464504 - DNA, 15 bp, Homo sapiens
aatacactattctta

SEQ ID NO: 1464505 - DNA, 15 bp, Homo sapiens
aaatacactattctt

SEQ ID NO: 1464506 - DNA, 15 bp, Homo sapiens
caaatacactattct

SEQ ID NO: 1464507 - DNA, 15 bp, Homo sapiens
tcaaatacactattc

SEQ ID NO: 1464508 - DNA, 15 bp, Homo sapiens
gtcaaatacactatt

SEQ ID NO: 1464509 - DNA, 15 bp, Homo sapiens
tgtcaaatacactat

SEQ ID NO: 1464510 - DNA, 15 bp, Homo sapiens
ctgtcaaatacacta

SEQ ID NO: 1464511 - DNA, 15 bp, Homo sapiens
tctgtcaaatacact

SEQ ID NO: 1464512 - DNA, 15 bp, Homo sapiens
gtctgtcaaatacac

SEQ ID NO: 1464513 - DNA, 15 bp, Homo sapiens
tgtctgtcaaataca

SEQ ID NO: 1464514 - DNA, 15 bp, Homo sapiens
atgtctgtcaaatac

SEQ ID NO: 1464515 - DNA, 15 bp, Homo sapiens
gatgtctgtcaaata

SEQ ID NO: 1464516 - DNA, 15 bp, Homo sapiens
agatgtctgtcaaat

SEQ ID NO: 1464517 - DNA, 15 bp, Homo sapiens
aagatgtctgtcaaa

SEQ ID NO: 1464518 - DNA, 15 bp, Homo sapiens
taagatgtctgtcaa

SEQ ID NO: 1464519 - DNA, 15 bp, Homo sapiens
gtaagatgtctgtca

SEQ ID NO: 1464520 - DNA, 15 bp, Homo sapiens
tgtaagatgtctgtc

SEQ ID NO: 1464521 - DNA, 15 bp, Homo sapiens
ttgtaagatgtctgt

SEQ ID NO: 1464522 - DNA, 15 bp, Homo sapiens
gttgtaagatgtctg

SEQ ID NO: 1464523 - DNA, 15 bp, Homo sapiens
tgttgtaagatgtct

SEQ ID NO: 1464524 - DNA, 15 bp, Homo sapiens
ttgttgtaagatgtc

SEQ ID NO: 1464525 - DNA, 15 bp, Homo sapiens
tttgttgtaagatgt

SEQ ID NO: 1464526 - DNA, 15 bp, Homo sapiens
ttttgttgtaagatg

SEQ ID NO: 1464527 - DNA, 15 bp, Homo sapiens
tttttgttgtaagat

SEQ ID NO: 1464528 - DNA, 15 bp, Homo sapiens
ctttttgttgtaaga

SEQ ID NO: 1464529 - DNA, 15 bp, Homo sapiens
actttttgttgtaag

SEQ ID NO: 1464530 - DNA, 15 bp, Homo sapiens
cactttttgttgtaa

SEQ ID NO: 1464531 - DNA, 15 bp, Homo sapiens
tcactttttgttgta

SEQ ID NO: 1464532 - DNA, 15 bp, Homo sapiens
ctcactttttgttgt

SEQ ID NO: 1464533 - DNA, 15 bp, Homo sapiens
gctcactttttgttg

SEQ ID NO: 1464534 - DNA, 15 bp, Homo sapiens
tgctcactttttgtt

SEQ ID NO: 1464535 - DNA, 15 bp, Homo sapiens
ttgctcactttttgt

SEQ ID NO: 1464536 - DNA, 15 bp, Homo sapiens
tttgctcactttttg

SEQ ID NO: 1464537 - DNA, 15 bp, Homo sapiens
ctttgctcacttttt

SEQ ID NO: 1464538 - DNA, 15 bp, Homo sapiens
actttgctcactttt

SEQ ID NO: 1464539 - DNA, 15 bp, Homo sapiens
gactttgctcacttt

SEQ ID NO: 1464540 - DNA, 15 bp, Homo sapiens
ggactttgctcactt

SEQ ID NO: 1464541 - DNA, 15 bp, Homo sapiens
tggactttgctcact

SEQ ID NO: 1464542 - DNA, 15 bp, Homo sapiens
ttggactttgctcac

SEQ ID NO: 1464543 - DNA, 15 bp, Homo sapiens
cttggactttgctca

SEQ ID NO: 1464544 - DNA, 15 bp, Homo sapiens
acttggactttgctc

SEQ ID NO: 1464545 - DNA, 15 bp, Homo sapiens
cacttggactttgct

SEQ ID NO: 1464546 - DNA, 15 bp, Homo sapiens
acacttggactttgc

SEQ ID NO: 1464547 - DNA, 15 bp, Homo sapiens
gacacttggactttg

SEQ ID NO: 1464548 - DNA, 15 bp, Homo sapiens
agacacttggacttt

SEQ ID NO: 1464549 - DNA, 15 bp, Homo sapiens
cagacacttggactt

SEQ ID NO: 1464550 - DNA, 15 bp, Homo sapiens
gcagacacttggact

SEQ ID NO: 1464551 - DNA, 15 bp, Homo sapiens
agcagacacttggac

SEQ ID NO: 1464552 - DNA, 15 bp, Homo sapiens
aagcagacacttgga

SEQ ID NO: 1464553 - DNA, 15 bp, Homo sapiens
aaagcagacacttgg

SEQ ID NO: 1464554 - DNA, 15 bp, Homo sapiens
gaaagcagacacttg

SEQ ID NO: 1464555 - DNA, 15 bp, Homo sapiens
agaaagcagacactt

SEQ ID NO: 1464556 - DNA, 15 bp, Homo sapiens
aagaaagcagacact

SEQ ID NO: 1464557 - DNA, 15 bp, Homo sapiens
aaagaaagcagacac

SEQ ID NO: 1464558 - DNA, 15 bp, Homo sapiens
caaagaaagcagaca

SEQ ID NO: 1464559 - DNA, 15 bp, Homo sapiens
ccaaagaaagcagac

SEQ ID NO: 1464560 - DNA, 15 bp, Homo sapiens
cccaaagaaagcaga

SEQ ID NO: 1464561 - DNA, 15 bp, Homo sapiens
ccccaaagaaagcag

SEQ ID NO: 1464562 - DNA, 15 bp, Homo sapiens
tccccaaagaaagca

SEQ ID NO: 1464563 - DNA, 15 bp, Homo sapiens
ctccccaaagaaagc

SEQ ID NO: 1464564 - DNA, 15 bp, Homo sapiens
cctccccaaagaaag

SEQ ID NO: 1464565 - DNA, 15 bp, Homo sapiens
ccctccccaaagaaa

SEQ ID NO: 1464566 - DNA, 15 bp, Homo sapiens
cccctccccaaagaa

SEQ ID NO: 1464567 - DNA, 15 bp, Homo sapiens
tcccctccccaaaga

SEQ ID NO: 1464568 - DNA, 15 bp, Homo sapiens
ttcccctccccaaag

SEQ ID NO: 1464569 - DNA, 15 bp, Homo sapiens
attcccctccccaaa

SEQ ID NO: 1464570 - DNA, 15 bp, Homo sapiens
cattcccctccccaa

SEQ ID NO: 1464571 - DNA, 15 bp, Homo sapiens
tcattcccctcccca

SEQ ID NO: 1464572 - DNA, 15 bp, Homo sapiens
ttcattcccctcccc

SEQ ID NO: 1464573 - DNA, 15 bp, Homo sapiens
cttcattcccctccc

SEQ ID NO: 1464574 - DNA, 15 bp, Homo sapiens
tcttcattcccctcc

SEQ ID NO: 1464575 - DNA, 15 bp, Homo sapiens
ctcttcattcccctc

SEQ ID NO: 1464576 - DNA, 15 bp, Homo sapiens
actcttcattcccct

SEQ ID NO: 1464577 - DNA, 15 bp, Homo sapiens
gactcttcattcccc

SEQ ID NO: 1464578 - DNA, 15 bp, Homo sapiens
agactcttcattccc

SEQ ID NO: 1464579 - DNA, 15 bp, Homo sapiens
aagactcttcattcc

SEQ ID NO: 1464580 - DNA, 15 bp, Homo sapiens
gaagactcttcattc

SEQ ID NO: 1464581 - DNA, 15 bp, Homo sapiens
ggaagactcttcatt

SEQ ID NO: 1464582 - DNA, 15 bp, Homo sapiens
tggaagactcttcat

SEQ ID NO: 1464583 - DNA, 15 bp, Homo sapiens
ttggaagactcttca

SEQ ID NO: 1464584 - DNA, 15 bp, Homo sapiens
tttggaagactcttc

SEQ ID NO: 1464585 - DNA, 15 bp, Homo sapiens
ttttggaagactctt

SEQ ID NO: 1464586 - DNA, 15 bp, Homo sapiens
cttttggaagactct

SEQ ID NO: 1464587 - DNA, 15 bp, Homo sapiens
tcttttggaagactc

SEQ ID NO: 1464588 - DNA, 15 bp, Homo sapiens
ttcttttggaagact

SEQ ID NO: 1464589 - DNA, 15 bp, Homo sapiens
cttcttttggaagac

SEQ ID NO: 1464590 - DNA, 15 bp, Homo sapiens
acttcttttggaaga

SEQ ID NO: 1464591 - DNA, 15 bp, Homo sapiens
tacttcttttggaag

SEQ ID NO: 1464592 - DNA, 15 bp, Homo sapiens
ttacttcttttggaa

SEQ ID NO: 1464593 - DNA, 15 bp, Homo sapiens
gttacttcttttgga

SEQ ID NO: 1464594 - DNA, 15 bp, Homo sapiens
agttacttcttttgg

SEQ ID NO: 1464595 - DNA, 15 bp, Homo sapiens
cagttacttcttttg

SEQ ID NO: 1464596 - DNA, 15 bp, Homo sapiens
ccagttacttctttt

SEQ ID NO: 1464597 - DNA, 15 bp, Homo sapiens
tccagttacttcttt

SEQ ID NO: 1464598 - DNA, 15 bp, Homo sapiens
ctccagttacttctt

SEQ ID NO: 1464599 - DNA, 15 bp, Homo sapiens
tctccagttacttct

SEQ ID NO: 1464600 - DNA, 15 bp, Homo sapiens
gtctccagttacttc

SEQ ID NO: 1464601 - DNA, 15 bp, Homo sapiens
cgtctccagttactt

SEQ ID NO: 1464602 - DNA, 15 bp, Homo sapiens
acgtctccagttact

SEQ ID NO: 1464603 - DNA, 15 bp, Homo sapiens
gacgtctccagttac

SEQ ID NO: 1464604 - DNA, 15 bp, Homo sapiens
tgacgtctccagtta

SEQ ID NO: 1464605 - DNA, 15 bp, Homo sapiens
ctgacgtctccagtt

SEQ ID NO: 1464606 - DNA, 15 bp, Homo sapiens
cctgacgtctccagt

SEQ ID NO: 1464607 - DNA, 15 bp, Homo sapiens
ccctgacgtctccag

SEQ ID NO: 1464608 - DNA, 15 bp, Homo sapiens
tccctgacgtctcca

SEQ ID NO: 1464609 - DNA, 15 bp, Homo sapiens
atccctgacgtctcc

SEQ ID NO: 1464610 - DNA, 15 bp, Homo sapiens
tatccctgacgtctc

SEQ ID NO: 1464611 - DNA, 15 bp, Homo sapiens
ctatccctgacgtct

SEQ ID NO: 1464612 - DNA, 15 bp, Homo sapiens
actatccctgacgtc

SEQ ID NO: 1464613 - DNA, 15 bp, Homo sapiens
gactatccctgacgt

SEQ ID NO: 1464614 - DNA, 15 bp, Homo sapiens
agactatccctgacg

SEQ ID NO: 1464615 - DNA, 15 bp, Homo sapiens
aagactatccctgac

SEQ ID NO: 1464616 - DNA, 15 bp, Homo sapiens
aaagactatccctga

SEQ ID NO: 1464617 - DNA, 15 bp, Homo sapiens
aaaagactatccctg

SEQ ID NO: 1464618 - DNA, 15 bp, Homo sapiens
aaaaagactatccct

SEQ ID NO: 1464619 - DNA, 15 bp, Homo sapiens
taaaaagactatccc

SEQ ID NO: 1464620 - DNA, 15 bp, Homo sapiens
ttaaaaagactatcc

SEQ ID NO: 1464621 - DNA, 15 bp, Homo sapiens
attaaaaagactatc

SEQ ID NO: 1464622 - DNA, 15 bp, Homo sapiens
tattaaaaagactat

SEQ ID NO: 1464623 - DNA, 15 bp, Homo sapiens
ttattaaaaagacta

SEQ ID NO: 1464624 - DNA, 15 bp, Homo sapiens
gttattaaaaagact

SEQ ID NO: 1464625 - DNA, 15 bp, Homo sapiens
agttattaaaaagac

SEQ ID NO: 1464626 - DNA, 15 bp, Homo sapiens
aagttattaaaaaga

SEQ ID NO: 1464627 - DNA, 15 bp, Homo sapiens
gaagttattaaaaag

SEQ ID NO: 1464628 - DNA, 15 bp, Homo sapiens
tgaagttattaaaaa

SEQ ID NO: 1464629 - DNA, 15 bp, Homo sapiens
ctgaagttattaaaa

SEQ ID NO: 1464630 - DNA, 15 bp, Homo sapiens
tctgaagttattaaa

SEQ ID NO: 1464631 - DNA, 15 bp, Homo sapiens
atctgaagttattaa

SEQ ID NO: 1464632 - DNA, 15 bp, Homo sapiens
tatctgaagttatta

SEQ ID NO: 1464633 - DNA, 15 bp, Homo sapiens
ctatctgaagttatt

SEQ ID NO: 1464634 - DNA, 15 bp, Homo sapiens
gctatctgaagttat

SEQ ID NO: 1464635 - DNA, 15 bp, Homo sapiens
agctatctgaagtta

SEQ ID NO: 1464636 - DNA, 15 bp, Homo sapiens
aagctatctgaagtt

SEQ ID NO: 1464637 - DNA, 15 bp, Homo sapiens
aaagctatctgaagt

SEQ ID NO: 1464638 - DNA, 15 bp, Homo sapiens
gaaagctatctgaag

SEQ ID NO: 1464639 - DNA, 15 bp, Homo sapiens
tgaaagctatctgaa

SEQ ID NO: 1464640 - DNA, 15 bp, Homo sapiens
ttgaaagctatctga

SEQ ID NO: 1464641 - DNA, 15 bp, Homo sapiens
cttgaaagctatctg

SEQ ID NO: 1464642 - DNA, 15 bp, Homo sapiens
tcttgaaagctatct

SEQ ID NO: 1464643 - DNA, 15 bp, Homo sapiens
ctcttgaaagctatc

SEQ ID NO: 1464644 - DNA, 15 bp, Homo sapiens
actcttgaaagctat

SEQ ID NO: 1464645 - DNA, 15 bp, Homo sapiens
tactcttgaaagcta

SEQ ID NO: 1464646 - DNA, 15 bp, Homo sapiens
ctactcttgaaagct

SEQ ID NO: 1464647 - DNA, 15 bp, Homo sapiens
tctactcttgaaagc

SEQ ID NO: 1464648 - DNA, 15 bp, Homo sapiens
atctactcttgaaag

SEQ ID NO: 1464649 - DNA, 15 bp, Homo sapiens
tatctactcttgaaa

SEQ ID NO: 1464650 - DNA, 15 bp, Homo sapiens
gtatctactcttgaa

SEQ ID NO: 1464651 - DNA, 15 bp, Homo sapiens
agtatctactcttga

SEQ ID NO: 1464652 - DNA, 15 bp, Homo sapiens
cagtatctactcttg

SEQ ID NO: 1464653 - DNA, 15 bp, Homo sapiens
tcagtatctactctt

SEQ ID NO: 1464654 - DNA, 15 bp, Homo sapiens
ttcagtatctactct

SEQ ID NO: 1464655 - DNA, 15 bp, Homo sapiens
tttcagtatctactc

SEQ ID NO: 1464656 - DNA, 15 bp, Homo sapiens
gtttcagtatctact

SEQ ID NO: 1464657 - DNA, 15 bp, Homo sapiens
tgtttcagtatctac

SEQ ID NO: 1464658 - DNA, 15 bp, Homo sapiens
atgtttcagtatcta

SEQ ID NO: 1464659 - DNA, 15 bp, Homo sapiens
tatgtttcagtatct

SEQ ID NO: 1464660 - DNA, 15 bp, Homo sapiens
gtatgtttcagtatc

SEQ ID NO: 1464661 - DNA, 15 bp, Homo sapiens
tgtatgtttcagtat

SEQ ID NO: 1464662 - DNA, 15 bp, Homo sapiens
atgtatgtttcagta

SEQ ID NO: 1464663 - DNA, 15 bp, Homo sapiens
catgtatgtttcagt

SEQ ID NO: 1464664 - DNA, 15 bp, Homo sapiens
tcatgtatgtttcag

SEQ ID NO: 1464665 - DNA, 15 bp, Homo sapiens
gtcatgtatgtttca

SEQ ID NO: 1464666 - DNA, 15 bp, Homo sapiens
ggtcatgtatgtttc

SEQ ID NO: 1464667 - DNA, 15 bp, Homo sapiens
gggtcatgtatgttt

SEQ ID NO: 1464668 - DNA, 15 bp, Homo sapiens
agggtcatgtatgtt

SEQ ID NO: 1464669 - DNA, 15 bp, Homo sapiens
aagggtcatgtatgt

SEQ ID NO: 1464670 - DNA, 15 bp, Homo sapiens
taagggtcatgtatg

SEQ ID NO: 1464671 - DNA, 15 bp, Homo sapiens
ttaagggtcatgtat

SEQ ID NO: 1464672 - DNA, 15 bp, Homo sapiens
cttaagggtcatgta

SEQ ID NO: 1464673 - DNA, 15 bp, Homo sapiens
gcttaagggtcatgt

SEQ ID NO: 1464674 - DNA, 15 bp, Homo sapiens
agcttaagggtcatg

SEQ ID NO: 1464675 - DNA, 15 bp, Homo sapiens
aagcttaagggtcat

SEQ ID NO: 1464676 - DNA, 15 bp, Homo sapiens
aaagcttaagggtca

SEQ ID NO: 1464677 - DNA, 15 bp, Homo sapiens
gaaagcttaagggtc

SEQ ID NO: 1464678 - DNA, 15 bp, Homo sapiens
ggaaagcttaagggt

SEQ ID NO: 1464679 - DNA, 15 bp, Homo sapiens
aggaaagcttaaggg

SEQ ID NO: 1464680 - DNA, 15 bp, Homo sapiens
gaggaaagcttaagg

SEQ ID NO: 1464681 - DNA, 15 bp, Homo sapiens
tgaggaaagcttaag

SEQ ID NO: 1464682 - DNA, 15 bp, Homo sapiens
gtgaggaaagcttaa

SEQ ID NO: 1464683 - DNA, 15 bp, Homo sapiens
agtgaggaaagctta

SEQ ID NO: 1464684 - DNA, 15 bp, Homo sapiens
aagtgaggaaagctt

SEQ ID NO: 1464685 - DNA, 15 bp, Homo sapiens
aaagtgaggaaagct

SEQ ID NO: 1464686 - DNA, 15 bp, Homo sapiens
aaaagtgaggaaagc

SEQ ID NO: 1464687 - DNA, 15 bp, Homo sapiens
aaaaagtgaggaaag

SEQ ID NO: 1464688 - DNA, 15 bp, Homo sapiens
caaaaagtgaggaaa

SEQ ID NO: 1464689 - DNA, 15 bp, Homo sapiens
acaaaaagtgaggaa

SEQ ID NO: 1464690 - DNA, 15 bp, Homo sapiens
cacaaaaagtgagga

SEQ ID NO: 1464691 - DNA, 15 bp, Homo sapiens
tcacaaaaagtgagg

SEQ ID NO: 1464692 - DNA, 15 bp, Homo sapiens
ttcacaaaaagtgag

SEQ ID NO: 1464693 - DNA, 15 bp, Homo sapiens
gttcacaaaaagtga

SEQ ID NO: 1464694 - DNA, 15 bp, Homo sapiens
tgttcacaaaaagtg

SEQ ID NO: 1464695 - DNA, 15 bp, Homo sapiens
ctgttcacaaaaagt

SEQ ID NO: 1464696 - DNA, 15 bp, Homo sapiens
gctgttcacaaaaag

SEQ ID NO: 1464697 - DNA, 15 bp, Homo sapiens
ggctgttcacaaaaa

SEQ ID NO: 1464698 - DNA, 15 bp, Homo sapiens
aggctgttcacaaaa

SEQ ID NO: 1464699 - DNA, 15 bp, Homo sapiens
aaggctgttcacaaa

SEQ ID NO: 1464700 - DNA, 15 bp, Homo sapiens
taaggctgttcacaa

SEQ ID NO: 1464701 - DNA, 15 bp, Homo sapiens
ttaaggctgttcaca

SEQ ID NO: 1464702 - DNA, 15 bp, Homo sapiens
cttaaggctgttcac

SEQ ID NO: 1464703 - DNA, 15 bp, Homo sapiens
gcttaaggctgttca

SEQ ID NO: 1464704 - DNA, 15 bp, Homo sapiens
ggcttaaggctgttc

SEQ ID NO: 1464705 - DNA, 15 bp, Homo sapiens
tggcttaaggctgtt

SEQ ID NO: 1464706 - DNA, 15 bp, Homo sapiens
ctggcttaaggctgt

SEQ ID NO: 1464707 - DNA, 15 bp, Homo sapiens
tctggcttaaggctg

SEQ ID NO: 1464708 - DNA, 15 bp, Homo sapiens
ttctggcttaaggct

SEQ ID NO: 1464709 - DNA, 15 bp, Homo sapiens
tttctggcttaaggc

SEQ ID NO: 1464710 - DNA, 15 bp, Homo sapiens
atttctggcttaagg

SEQ ID NO: 1464711 - DNA, 15 bp, Homo sapiens
tatttctggcttaag

SEQ ID NO: 1464712 - DNA, 15 bp, Homo sapiens
ctatttctggcttaa

SEQ ID NO: 1464713 - DNA, 15 bp, Homo sapiens
cctatttctggctta

SEQ ID NO: 1464714 - DNA, 15 bp, Homo sapiens
ccctatttctggctt

SEQ ID NO: 1464715 - DNA, 15 bp, Homo sapiens
gccctatttctggct

SEQ ID NO: 1464716 - DNA, 15 bp, Homo sapiens
agccctatttctggc

SEQ ID NO: 1464717 - DNA, 15 bp, Homo sapiens
aagccctatttctgg

SEQ ID NO: 1464718 - DNA, 15 bp, Homo sapiens
taagccctatttctg

SEQ ID NO: 1464719 - DNA, 15 bp, Homo sapiens
ttaagccctatttct

SEQ ID NO: 1464720 - DNA, 15 bp, Homo sapiens
gttaagccctatttc

SEQ ID NO: 1464721 - DNA, 15 bp, Homo sapiens
tgttaagccctattt

SEQ ID NO: 1464722 - DNA, 15 bp, Homo sapiens
gtgttaagccctatt

SEQ ID NO: 1464723 - DNA, 15 bp, Homo sapiens
agtgttaagccctat

SEQ ID NO: 1464724 - DNA, 15 bp, Homo sapiens
cagtgttaagcccta

SEQ ID NO: 1464725 - DNA, 15 bp, Homo sapiens
gcagtgttaagccct

SEQ ID NO: 1464726 - DNA, 15 bp, Homo sapiens
ggcagtgttaagccc

SEQ ID NO: 1464727 - DNA, 15 bp, Homo sapiens
aggcagtgttaagcc

SEQ ID NO: 1464728 - DNA, 15 bp, Homo sapiens
aaggcagtgttaagc

SEQ ID NO: 1464729 - DNA, 15 bp, Homo sapiens
gaaggcagtgttaag

SEQ ID NO: 1464730 - DNA, 15 bp, Homo sapiens
ggaaggcagtgttaa

SEQ ID NO: 1464731 - DNA, 15 bp, Homo sapiens
gggaaggcagtgtta

SEQ ID NO: 1464732 - DNA, 15 bp, Homo sapiens
ggggaaggcagtgtt

SEQ ID NO: 1464733 - DNA, 15 bp, Homo sapiens
tggggaaggcagtgt

SEQ ID NO: 1464734 - DNA, 15 bp, Homo sapiens
atggggaaggcagtg

SEQ ID NO: 1464735 - DNA, 15 bp, Homo sapiens
catggggaaggcagt

SEQ ID NO: 1464736 - DNA, 15 bp, Homo sapiens
ccatggggaaggcag

SEQ ID NO: 1464737 - DNA, 15 bp, Homo sapiens
tccatggggaaggca

SEQ ID NO: 1464738 - DNA, 15 bp, Homo sapiens
ttccatggggaaggc

SEQ ID NO: 1464739 - DNA, 15 bp, Homo sapiens
tttccatggggaagg

SEQ ID NO: 1464740 - DNA, 15 bp, Homo sapiens
gtttccatggggaag

SEQ ID NO: 1464741 - DNA, 15 bp, Homo sapiens
tgtttccatggggaa

SEQ ID NO: 1464742 - DNA, 15 bp, Homo sapiens
gtgtttccatgggga

SEQ ID NO: 1464743 - DNA, 15 bp, Homo sapiens
agtgtttccatgggg

SEQ ID NO: 1464744 - DNA, 15 bp, Homo sapiens
cagtgtttccatggg

SEQ ID NO: 1464745 - DNA, 15 bp, Homo sapiens
tcagtgtttccatgg

SEQ ID NO: 1464746 - DNA, 15 bp, Homo sapiens
ttcagtgtttccatg

SEQ ID NO: 1464747 - DNA, 15 bp, Homo sapiens
tttcagtgtttccat

SEQ ID NO: 1464748 - DNA, 15 bp, Homo sapiens
atttcagtgtttcca

SEQ ID NO: 1464749 - DNA, 15 bp, Homo sapiens
aatttcagtgtttcc

SEQ ID NO: 1464750 - DNA, 15 bp, Homo sapiens
caatttcagtgtttc

SEQ ID NO: 1464751 - DNA, 15 bp, Homo sapiens
ccaatttcagtgttt

SEQ ID NO: 1464752 - DNA, 15 bp, Homo sapiens
cccaatttcagtgtt

SEQ ID NO: 1464753 - DNA, 15 bp, Homo sapiens
ttcccaatttcagtg

SEQ ID NO: 1464754 - DNA, 15 bp, Homo sapiens
attcccaatttcagt

SEQ ID NO: 1464755 - DNA, 15 bp, Homo sapiens
tattcccaatttcag

SEQ ID NO: 1464756 - DNA, 15 bp, Homo sapiens
ctattcccaatttca

SEQ ID NO: 1464757 - DNA, 15 bp, Homo sapiens
gctattcccaatttc

SEQ ID NO: 1464758 - DNA, 15 bp, Homo sapiens
ggctattcccaattt

SEQ ID NO: 1464759 - DNA, 15 bp, Homo sapiens
gggctattcccaatt

SEQ ID NO: 1464760 - DNA, 15 bp, Homo sapiens
agggctattcccaat

SEQ ID NO: 1464761 - DNA, 15 bp, Homo sapiens
tagggctattcccaa

SEQ ID NO: 1464762 - DNA, 15 bp, Homo sapiens
atagggctattccca

SEQ ID NO: 1464763 - DNA, 15 bp, Homo sapiens
catagggctattccc

SEQ ID NO: 1464764 - DNA, 15 bp, Homo sapiens
ccatagggctattcc

SEQ ID NO: 1464765 - DNA, 15 bp, Homo sapiens
gccatagggctattc

SEQ ID NO: 1464766 - DNA, 15 bp, Homo sapiens
ggccatagggctatt

SEQ ID NO: 1464767 - DNA, 15 bp, Homo sapiens
tggccatagggctat

SEQ ID NO: 1464768 - DNA, 15 bp, Homo sapiens
ctggccatagggcta

SEQ ID NO: 1464769 - DNA, 15 bp, Homo sapiens
tctggccatagggct

SEQ ID NO: 1464770 - DNA, 15 bp, Homo sapiens
atctggccatagggc

SEQ ID NO: 1464771 - DNA, 15 bp, Homo sapiens
gatctggccataggg

SEQ ID NO: 1464772 - DNA, 15 bp, Homo sapiens
agatctggccatagg

SEQ ID NO: 1464773 - DNA, 15 bp, Homo sapiens
aagatctggccatag

SEQ ID NO: 1464774 - DNA, 15 bp, Homo sapiens
aaagatctggccata

SEQ ID NO: 1464775 - DNA, 15 bp, Homo sapiens
taaagatctggccat

SEQ ID NO: 1464776 - DNA, 15 bp, Homo sapiens
ttaaagatctggcca

SEQ ID NO: 1464777 - DNA, 15 bp, Homo sapiens
gttaaagatctggcc

SEQ ID NO: 1464778 - DNA, 15 bp, Homo sapiens
tgttaaagatctggc

SEQ ID NO: 1464779 - DNA, 15 bp, Homo sapiens
gtgttaaagatctgg

SEQ ID NO: 1464780 - DNA, 15 bp, Homo sapiens
ggtgttaaagatctg

SEQ ID NO: 1464781 - DNA, 15 bp, Homo sapiens
aggtgttaaagatct

SEQ ID NO: 1464782 - DNA, 15 bp, Homo sapiens
taggtgttaaagatc

SEQ ID NO: 1464783 - DNA, 15 bp, Homo sapiens
ttaggtgttaaagat

SEQ ID NO: 1464784 - DNA, 15 bp, Homo sapiens
gttaggtgttaaaga

SEQ ID NO: 1464785 - DNA, 15 bp, Homo sapiens
agttaggtgttaaag

SEQ ID NO: 1464786 - DNA, 15 bp, Homo sapiens
cagttaggtgttaaa

SEQ ID NO: 1464787 - DNA, 15 bp, Homo sapiens
tcagttaggtgttaa

SEQ ID NO: 1464788 - DNA, 15 bp, Homo sapiens
ttcagttaggtgtta

SEQ ID NO: 1464789 - DNA, 15 bp, Homo sapiens
tttcagttaggtgtt

SEQ ID NO: 1464790 - DNA, 15 bp, Homo sapiens
atttcagttaggtgt

SEQ ID NO: 1464791 - DNA, 15 bp, Homo sapiens
aatttcagttaggtg

SEQ ID NO: 1464792 - DNA, 15 bp, Homo sapiens
aaatttcagttaggt

SEQ ID NO: 1464793 - DNA, 15 bp, Homo sapiens
aaaatttcagttagg

SEQ ID NO: 1464794 - DNA, 15 bp, Homo sapiens
aaaaatttcagttag

SEQ ID NO: 1464795 - DNA, 15 bp, Homo sapiens
caaaaatttcagtta

SEQ ID NO: 1464796 - DNA, 15 bp, Homo sapiens
tcaaaaatttcagtt

SEQ ID NO: 1464797 - DNA, 15 bp, Homo sapiens
ttcaaaaatttcagt

SEQ ID NO: 1464798 - DNA, 15 bp, Homo sapiens
tttcaaaaatttcag

SEQ ID NO: 1464799 - DNA, 15 bp, Homo sapiens
ctttcaaaaatttca

SEQ ID NO: 1464800 - DNA, 15 bp, Homo sapiens
tctttcaaaaatttc

SEQ ID NO: 1464801 - DNA, 15 bp, Homo sapiens
ctctttcaaaaattt

SEQ ID NO: 1464802 - DNA, 15 bp, Homo sapiens
cctctttcaaaaatt

SEQ ID NO: 1464803 - DNA, 15 bp, Homo sapiens
gcctctttcaaaaat

SEQ ID NO: 1464804 - DNA, 15 bp, Homo sapiens
ggcctctttcaaaaa

SEQ ID NO: 1464805 - DNA, 15 bp, Homo sapiens
aggcctctttcaaaa

SEQ ID NO: 1464806 - DNA, 15 bp, Homo sapiens
taggcctctttcaaa

SEQ ID NO: 1464807 - DNA, 15 bp, Homo sapiens
ctaggcctctttcaa

SEQ ID NO: 1464808 - DNA, 15 bp, Homo sapiens
tctaggcctctttca

SEQ ID NO: 1464809 - DNA, 15 bp, Homo sapiens
gtctaggcctctttc

SEQ ID NO: 1464810 - DNA, 15 bp, Homo sapiens
tgtctaggcctcttt

SEQ ID NO: 1464811 - DNA, 15 bp, Homo sapiens
gtgtctaggcctctt

SEQ ID NO: 1464812 - DNA, 15 bp, Homo sapiens
agtgtctaggcctct

SEQ ID NO: 1464813 - DNA, 15 bp, Homo sapiens
cagtgtctaggcctc

SEQ ID NO: 1464814 - DNA, 15 bp, Homo sapiens
ccagtgtctaggcct

SEQ ID NO: 1464815 - DNA, 15 bp, Homo sapiens
cccagtgtctaggcc

SEQ ID NO: 1464816 - DNA, 15 bp, Homo sapiens
gcccagtgtctaggc

SEQ ID NO: 1464817 - DNA, 15 bp, Homo sapiens
cgcccagtgtctagg

SEQ ID NO: 1464818 - DNA, 15 bp, Homo sapiens
gcgcccagtgtctag

SEQ ID NO: 1464819 - DNA, 15 bp, Homo sapiens
cgcgcccagtgtcta

SEQ ID NO: 1464820 - DNA, 15 bp, Homo sapiens
ccgcgcccagtgtct

SEQ ID NO: 1464821 - DNA, 15 bp, Homo sapiens
accgcgcccagtgtc

SEQ ID NO: 1464822 - DNA, 15 bp, Homo sapiens
caccgcgcccagtgt

SEQ ID NO: 1464823 - DNA, 15 bp, Homo sapiens
ccaccgcgcccagtg

SEQ ID NO: 1464824 - DNA, 15 bp, Homo sapiens
gccaccgcgcccagt

SEQ ID NO: 1464825 - DNA, 15 bp, Homo sapiens
ttccacccacctcag

SEQ ID NO: 1464826 - DNA, 15 bp, Homo sapiens
gttccacccacctca

SEQ ID NO: 1464827 - DNA, 15 bp, Homo sapiens
tgttccacccacctc

SEQ ID NO: 1464828 - DNA, 15 bp, Homo sapiens
gtgttccacccacct

SEQ ID NO: 1464829 - DNA, 15 bp, Homo sapiens
cgtgttccacccacc

SEQ ID NO: 1464830 - DNA, 15 bp, Homo sapiens
ccgtgttccacccac

SEQ ID NO: 1464831 - DNA, 15 bp, Homo sapiens
cccgtgttccaccca

SEQ ID NO: 1464832 - DNA, 15 bp, Homo sapiens
tcccgtgttccaccc

SEQ ID NO: 1464833 - DNA, 15 bp, Homo sapiens
ctcccgtgttccacc

SEQ ID NO: 1464834 - DNA, 15 bp, Homo sapiens
cctcccgtgttccac

SEQ ID NO: 1464835 - DNA, 15 bp, Homo sapiens
acctcccgtgttcca

SEQ ID NO: 1464836 - DNA, 15 bp, Homo sapiens
gacctcccgtgttcc

SEQ ID NO: 1464837 - DNA, 15 bp, Homo sapiens
ggacctcccgtgttc

SEQ ID NO: 1464838 - DNA, 15 bp, Homo sapiens
tggacctcccgtgtt

SEQ ID NO: 1464839 - DNA, 15 bp, Homo sapiens
ctggacctcccgtgt

SEQ ID NO: 1464840 - DNA, 15 bp, Homo sapiens
actggacctcccgtg

SEQ ID NO: 1464841 - DNA, 15 bp, Homo sapiens
gactggacctcccgt

SEQ ID NO: 1464842 - DNA, 15 bp, Homo sapiens
ggactggacctcccg

SEQ ID NO: 1464843 - DNA, 15 bp, Homo sapiens
cggactggacctccc

SEQ ID NO: 1464844 - DNA, 15 bp, Homo sapiens
tcggactggacctcc

SEQ ID NO: 1464845 - DNA, 15 bp, Homo sapiens
ctcggactggacctc

SEQ ID NO: 1464846 - DNA, 15 bp, Homo sapiens
tctcggactggacct

SEQ ID NO: 1464847 - DNA, 15 bp, Homo sapiens
gtctcggactggacc

SEQ ID NO: 1464848 - DNA, 15 bp, Homo sapiens
ggtctcggactggac

SEQ ID NO: 1464849 - DNA, 15 bp, Homo sapiens
tggtctcggactgga

SEQ ID NO: 1464850 - DNA, 15 bp, Homo sapiens
ttggtctcggactgg

SEQ ID NO: 1464851 - DNA, 15 bp, Homo sapiens
gttggtctcggactg

SEQ ID NO: 1464852 - DNA, 15 bp, Homo sapiens
ggttggtctcggact

SEQ ID NO: 1464853 - DNA, 15 bp, Homo sapiens
aggttggtctcggac

SEQ ID NO: 1464854 - DNA, 15 bp, Homo sapiens
caggttggtctcgga

SEQ ID NO: 1464855 - DNA, 15 bp, Homo sapiens
tcaggttggtctcgg

SEQ ID NO: 1464856 - DNA, 15 bp, Homo sapiens
gtcaggttggtctcg

SEQ ID NO: 1464857 - DNA, 15 bp, Homo sapiens
ggtcaggttggtctc

SEQ ID NO: 1464858 - DNA, 15 bp, Homo sapiens
tggtcaggttggtct

SEQ ID NO: 1464859 - DNA, 15 bp, Homo sapiens
ttggtcaggttggtc

SEQ ID NO: 1464860 - DNA, 15 bp, Homo sapiens
gttggtcaggttggt

SEQ ID NO: 1464861 - DNA, 15 bp, Homo sapiens
tgttggtcaggttgg

SEQ ID NO: 1464862 - DNA, 15 bp, Homo sapiens
atgttggtcaggttg

SEQ ID NO: 1464863 - DNA, 15 bp, Homo sapiens
catgttggtcaggtt

SEQ ID NO: 1464864 - DNA, 15 bp, Homo sapiens
ccatgttggtcaggt

SEQ ID NO: 1464865 - DNA, 15 bp, Homo sapiens
aacggggtttctcca

SEQ ID NO: 1464866 - DNA, 15 bp, Homo sapiens
aaacggggtttctcc

SEQ ID NO: 1464867 - DNA, 15 bp, Homo sapiens
gaaacggggtttctc

SEQ ID NO: 1464868 - DNA, 15 bp, Homo sapiens
agaaacggggtttct

SEQ ID NO: 1464869 - DNA, 15 bp, Homo sapiens
tccggctaattttgt

SEQ ID NO: 1464870 - DNA, 15 bp, Homo sapiens
gtccggctaattttg

SEQ ID NO: 1464871 - DNA, 15 bp, Homo sapiens
accaccatgtccggc

SEQ ID NO: 1464872 - DNA, 15 bp, Homo sapiens
caccaccatgtccgg

SEQ ID NO: 1464873 - DNA, 15 bp, Homo sapiens
gcaccaccatgtccg

SEQ ID NO: 1464874 - DNA, 15 bp, Homo sapiens
atgcaccaccatgtc

SEQ ID NO: 1464875 - DNA, 15 bp, Homo sapiens
catgcaccaccatgt

SEQ ID NO: 1464876 - DNA, 15 bp, Homo sapiens
tcaggcatgcaccac

SEQ ID NO: 1464877 - DNA, 15 bp, Homo sapiens
ttcaggcatgcacca

SEQ ID NO: 1464878 - DNA, 15 bp, Homo sapiens
tttcaggcatgcacc

SEQ ID NO: 1464879 - DNA, 15 bp, Homo sapiens
atttcaggcatgcac

SEQ ID NO: 1464880 - DNA, 15 bp, Homo sapiens
gatttcaggcatgca

SEQ ID NO: 1464881 - DNA, 15 bp, Homo sapiens
ggatttcaggcatgc

SEQ ID NO: 1464882 - DNA, 15 bp, Homo sapiens
agctgggatttcagg

SEQ ID NO: 1464883 - DNA, 15 bp, Homo sapiens
tagctgggatttcag

SEQ ID NO: 1464884 - DNA, 15 bp, Homo sapiens
gtagctgggatttca

SEQ ID NO: 1464885 - DNA, 15 bp, Homo sapiens
agtagctgggatttc

SEQ ID NO: 1464886 - DNA, 15 bp, Homo sapiens
gagtagctgggattt

SEQ ID NO: 1464887 - DNA, 15 bp, Homo sapiens
gactctcctgcctca

SEQ ID NO: 1464888 - DNA, 15 bp, Homo sapiens
cgactctcctgcctc

SEQ ID NO: 1464889 - DNA, 15 bp, Homo sapiens
gcgactctcctgcct

SEQ ID NO: 1464890 - DNA, 15 bp, Homo sapiens
agcgactctcctgcc

SEQ ID NO: 1464891 - DNA, 15 bp, Homo sapiens
aagcgactctcctgc

SEQ ID NO: 1464892 - DNA, 15 bp, Homo sapiens
caagcgactctcctg

SEQ ID NO: 1464893 - DNA, 15 bp, Homo sapiens
tcaagcgactctcct

SEQ ID NO: 1464894 - DNA, 15 bp, Homo sapiens
ttcaagcgactctcc

SEQ ID NO: 1464895 - DNA, 15 bp, Homo sapiens
gttcaagcgactctc

SEQ ID NO: 1464896 - DNA, 15 bp, Homo sapiens
ggttcaagcgactct

SEQ ID NO: 1464897 - DNA, 15 bp, Homo sapiens
aggttcaagcgactc

SEQ ID NO: 1464898 - DNA, 15 bp, Homo sapiens
caggttcaagcgact

SEQ ID NO: 1464899 - DNA, 15 bp, Homo sapiens
ccaggttcaagcgac

SEQ ID NO: 1464900 - DNA, 15 bp, Homo sapiens
atggcgtgatctcgg

SEQ ID NO: 1464901 - DNA, 15 bp, Homo sapiens
aatggcgtgatctcg

SEQ ID NO: 1464902 - DNA, 15 bp, Homo sapiens
caatggcgtgatctc

SEQ ID NO: 1464903 - DNA, 15 bp, Homo sapiens
gcaatggcgtgatct

SEQ ID NO: 1464904 - DNA, 15 bp, Homo sapiens
tgcaatggcgtgatc

SEQ ID NO: 1464905 - DNA, 15 bp, Homo sapiens
gtgcaatggcgtgat

SEQ ID NO: 1464906 - DNA, 15 bp, Homo sapiens
agtgcaatggcgtga

SEQ ID NO: 1464907 - DNA, 15 bp, Homo sapiens
gagtgcaatggcgtg

SEQ ID NO: 1464908 - DNA, 15 bp, Homo sapiens
ggagtgcaatggcgt

SEQ ID NO: 1464909 - DNA, 15 bp, Homo sapiens
cggagtttcactctt

SEQ ID NO: 1464910 - DNA, 15 bp, Homo sapiens
acggagtttcactct

SEQ ID NO: 1464911 - DNA, 15 bp, Homo sapiens
gacggagtttcactc

SEQ ID NO: 1464912 - DNA, 15 bp, Homo sapiens
agacggagtttcact

SEQ ID NO: 1464913 - DNA, 15 bp, Homo sapiens
tagacggagtttcac

SEQ ID NO: 1464914 - DNA, 15 bp, Homo sapiens
ttagacggagtttca

SEQ ID NO: 1464915 - DNA, 15 bp, Homo sapiens
tttagacggagtttc

SEQ ID NO: 1464916 - DNA, 15 bp, Homo sapiens
ttttagacggagttt

SEQ ID NO: 1464917 - DNA, 15 bp, Homo sapiens
tttttagacggagtt

SEQ ID NO: 1464918 - DNA, 15 bp, Homo sapiens
gtttttagacggagt

SEQ ID NO: 1464919 - DNA, 15 bp, Homo sapiens
tgtttttagacggag

SEQ ID NO: 1464920 - DNA, 15 bp, Homo sapiens
ttgtttttagacgga

SEQ ID NO: 1464921 - DNA, 15 bp, Homo sapiens
tttgtttttagacgg

SEQ ID NO: 1464922 - DNA, 15 bp, Homo sapiens
gtttgtttttagacg

SEQ ID NO: 1464923 - DNA, 15 bp, Homo sapiens
tgtttgtttttagac

SEQ ID NO: 1464924 - DNA, 15 bp, Homo sapiens
ctttgtttgtttgtt

SEQ ID NO: 1464925 - DNA, 15 bp, Homo sapiens
cctttgtttgtttgt

SEQ ID NO: 1464926 - DNA, 15 bp, Homo sapiens
ccctttgtttgtttg

SEQ ID NO: 1464927 - DNA, 15 bp, Homo sapiens
gccctttgtttgttt

SEQ ID NO: 1464928 - DNA, 15 bp, Homo sapiens
ggccctttgtttgtt

SEQ ID NO: 1464929 - DNA, 15 bp, Homo sapiens
aggccctttgtttgt

SEQ ID NO: 1464930 - DNA, 15 bp, Homo sapiens
taggccctttgtttg

SEQ ID NO: 1464931 - DNA, 15 bp, Homo sapiens
ctaggccctttgttt

SEQ ID NO: 1464932 - DNA, 15 bp, Homo sapiens
tctaggccctttgtt

SEQ ID NO: 1464933 - DNA, 15 bp, Homo sapiens
ctctaggccctttgt

SEQ ID NO: 1464934 - DNA, 15 bp, Homo sapiens
gctctaggccctttg

SEQ ID NO: 1464935 - DNA, 15 bp, Homo sapiens
ggctctaggcccttt

SEQ ID NO: 1464936 - DNA, 15 bp, Homo sapiens
gggctctaggccctt

SEQ ID NO: 1464937 - DNA, 15 bp, Homo sapiens
agggctctaggccct

SEQ ID NO: 1464938 - DNA, 15 bp, Homo sapiens
gagggctctaggccc

SEQ ID NO: 1464939 - DNA, 15 bp, Homo sapiens
tgagggctctaggcc

SEQ ID NO: 1464940 - DNA, 15 bp, Homo sapiens
ctgagggctctaggc

SEQ ID NO: 1464941 - DNA, 15 bp, Homo sapiens
tctgagggctctagg

SEQ ID NO: 1464942 - DNA, 15 bp, Homo sapiens
gtctgagggctctag

SEQ ID NO: 1464943 - DNA, 15 bp, Homo sapiens
ggtctgagggctcta

SEQ ID NO: 1464944 - DNA, 15 bp, Homo sapiens
aggtctgagggctct

SEQ ID NO: 1464945 - DNA, 15 bp, Homo sapiens
taggtctgagggctc

SEQ ID NO: 1464946 - DNA, 15 bp, Homo sapiens
ctaggtctgagggct

SEQ ID NO: 1464947 - DNA, 15 bp, Homo sapiens
tctaggtctgagggc

SEQ ID NO: 1464948 - DNA, 15 bp, Homo sapiens
ttctaggtctgaggg

SEQ ID NO: 1464949 - DNA, 15 bp, Homo sapiens
attctaggtctgagg

SEQ ID NO: 1464950 - DNA, 15 bp, Homo sapiens
tattctaggtctgag

SEQ ID NO: 1464951 - DNA, 15 bp, Homo sapiens
ttattctaggtctga

SEQ ID NO: 1464952 - DNA, 15 bp, Homo sapiens
tttattctaggtctg

SEQ ID NO: 1464953 - DNA, 15 bp, Homo sapiens
gtttattctaggtct

SEQ ID NO: 1464954 - DNA, 15 bp, Homo sapiens
agtttattctaggtc

SEQ ID NO: 1464955 - DNA, 15 bp, Homo sapiens
aagtttattctaggt

SEQ ID NO: 1464956 - DNA, 15 bp, Homo sapiens
taagtttattctagg

SEQ ID NO: 1464957 - DNA, 15 bp, Homo sapiens
ataagtttattctag

SEQ ID NO: 1464958 - DNA, 15 bp, Homo sapiens
cataagtttattcta

SEQ ID NO: 1464959 - DNA, 15 bp, Homo sapiens
gcataagtttattct

SEQ ID NO: 1464960 - DNA, 15 bp, Homo sapiens
ggcataagtttattc

SEQ ID NO: 1464961 - DNA, 15 bp, Homo sapiens
aggcataagtttatt

SEQ ID NO: 1464962 - DNA, 15 bp, Homo sapiens
aaggcataagtttat

SEQ ID NO: 1464963 - DNA, 15 bp, Homo sapiens
aaaggcataagttta

SEQ ID NO: 1464964 - DNA, 15 bp, Homo sapiens
taaaggcataagttt

SEQ ID NO: 1464965 - DNA, 15 bp, Homo sapiens
gtaaaggcataagtt

SEQ ID NO: 1464966 - DNA, 15 bp, Homo sapiens
tgtaaaggcataagt

SEQ ID NO: 1464967 - DNA, 15 bp, Homo sapiens
ctgtaaaggcataag

SEQ ID NO: 1464968 - DNA, 15 bp, Homo sapiens
tctgtaaaggcataa

SEQ ID NO: 1464969 - DNA, 15 bp, Homo sapiens
atctgtaaaggcata

SEQ ID NO: 1464970 - DNA, 15 bp, Homo sapiens
tatctgtaaaggcat

SEQ ID NO: 1464971 - DNA, 15 bp, Homo sapiens
ttatctgtaaaggca

SEQ ID NO: 1464972 - DNA, 15 bp, Homo sapiens
tttatctgtaaaggc

SEQ ID NO: 1464973 - DNA, 15 bp, Homo sapiens
ttttatctgtaaagg

SEQ ID NO: 1464974 - DNA, 15 bp, Homo sapiens
tttttatctgtaaag

SEQ ID NO: 1464975 - DNA, 15 bp, Homo sapiens
gtttttatctgtaaa

SEQ ID NO: 1464976 - DNA, 15 bp, Homo sapiens
agtttttatctgtaa

SEQ ID NO: 1464977 - DNA, 15 bp, Homo sapiens
tagtttttatctgta

SEQ ID NO: 1464978 - DNA, 15 bp, Homo sapiens
ttagtttttatctgt

SEQ ID NO: 1464979 - DNA, 15 bp, Homo sapiens
attagtttttatctg

SEQ ID NO: 1464980 - DNA, 15 bp, Homo sapiens
tattagtttttatct

SEQ ID NO: 1464981 - DNA, 15 bp, Homo sapiens
ttattagtttttatc

SEQ ID NO: 1464982 - DNA, 15 bp, Homo sapiens
tttattagtttttat

SEQ ID NO: 1464983 - DNA, 15 bp, Homo sapiens
ttttattagttttta

SEQ ID NO: 1464984 - DNA, 15 bp, Homo sapiens
cttttattagttttt

SEQ ID NO: 1464985 - DNA, 15 bp, Homo sapiens
gcttttattagtttt

SEQ ID NO: 1464986 - DNA, 15 bp, Homo sapiens
tgcttttattagttt

SEQ ID NO: 1464987 - DNA, 15 bp, Homo sapiens
atgcttttattagtt

SEQ ID NO: 1464988 - DNA, 15 bp, Homo sapiens
gatgcttttattagt

SEQ ID NO: 1464989 - DNA, 15 bp, Homo sapiens
ggatgcttttattag

SEQ ID NO: 1464990 - DNA, 15 bp, Homo sapiens
tggatgcttttatta

SEQ ID NO: 1464991 - DNA, 15 bp, Homo sapiens
ctggatgcttttatt

SEQ ID NO: 1464992 - DNA, 15 bp, Homo sapiens
cctggatgcttttat

SEQ ID NO: 1464993 - DNA, 15 bp, Homo sapiens
ccctggatgctttta

SEQ ID NO: 1464994 - DNA, 15 bp, Homo sapiens
tccctggatgctttt

SEQ ID NO: 1464995 - DNA, 15 bp, Homo sapiens
ttccctggatgcttt

SEQ ID NO: 1464996 - DNA, 15 bp, Homo sapiens
tttccctggatgctt

SEQ ID NO: 1464997 - DNA, 15 bp, Homo sapiens
ctttccctggatgct

SEQ ID NO: 1464998 - DNA, 15 bp, Homo sapiens
tctttccctggatgc

SEQ ID NO: 1464999 - DNA, 15 bp, Homo sapiens
ttctttccctggatg

SEQ ID NO: 1465000 - DNA, 15 bp, Homo sapiens
cttctttccctggat

SEQ ID NO: 1465001 - DNA, 15 bp, Homo sapiens
tcttctttccctgga

SEQ ID NO: 1465002 - DNA, 15 bp, Homo sapiens
gtcttctttccctgg

SEQ ID NO: 1465003 - DNA, 15 bp, Homo sapiens
ggtcttctttccctg

SEQ ID NO: 1465004 - DNA, 15 bp, Homo sapiens
gggtcttctttccct

SEQ ID NO: 1465005 - DNA, 15 bp, Homo sapiens
agggtcttctttccc

SEQ ID NO: 1465006 - DNA, 15 bp, Homo sapiens
aagggtcttctttcc

SEQ ID NO: 1465007 - DNA, 15 bp, Homo sapiens
caagggtcttctttc

SEQ ID NO: 1465008 - DNA, 15 bp, Homo sapiens
tcaagggtcttcttt

SEQ ID NO: 1465009 - DNA, 15 bp, Homo sapiens
atcaagggtcttctt

SEQ ID NO: 1465010 - DNA, 15 bp, Homo sapiens
tatcaagggtcttct

SEQ ID NO: 1465011 - DNA, 15 bp, Homo sapiens
ttatcaagggtcttc

SEQ ID NO: 1465012 - DNA, 15 bp, Homo sapiens
tttatcaagggtctt

SEQ ID NO: 1465013 - DNA, 15 bp, Homo sapiens
ctttatcaagggtct

SEQ ID NO: 1465014 - DNA, 15 bp, Homo sapiens
tctttatcaagggtc

SEQ ID NO: 1465015 - DNA, 15 bp, Homo sapiens
ttctttatcaagggt

SEQ ID NO: 1465016 - DNA, 15 bp, Homo sapiens
cttctttatcaaggg

SEQ ID NO: 1465017 - DNA, 15 bp, Homo sapiens
acttctttatcaagg

SEQ ID NO: 1465018 - DNA, 15 bp, Homo sapiens
tacttctttatcaag

SEQ ID NO: 1465019 - DNA, 15 bp, Homo sapiens
atacttctttatcaa

SEQ ID NO: 1465020 - DNA, 15 bp, Homo sapiens
catacttctttatca

SEQ ID NO: 1465021 - DNA, 15 bp, Homo sapiens
acatacttctttatc

SEQ ID NO: 1465022 - DNA, 15 bp, Homo sapiens
tacatacttctttat

SEQ ID NO: 1465023 - DNA, 15 bp, Homo sapiens
ttacatacttcttta

SEQ ID NO: 1465024 - DNA, 15 bp, Homo sapiens
tttacatacttcttt

SEQ ID NO: 1465025 - DNA, 15 bp, Homo sapiens
atttacatacttctt

SEQ ID NO: 1465026 - DNA, 15 bp, Homo sapiens
tatttacatacttct

SEQ ID NO: 1465027 - DNA, 15 bp, Homo sapiens
gtatttacatacttc

SEQ ID NO: 1465028 - DNA, 15 bp, Homo sapiens
agtatttacatactt

SEQ ID NO: 1465029 - DNA, 15 bp, Homo sapiens
cagtatttacatact

SEQ ID NO: 1465030 - DNA, 15 bp, Homo sapiens
acagtatttacatac

SEQ ID NO: 1465031 - DNA, 15 bp, Homo sapiens
tacagtatttacata

SEQ ID NO: 1465032 - DNA, 15 bp, Homo sapiens
ttacagtatttacat

SEQ ID NO: 1465033 - DNA, 15 bp, Homo sapiens
tttacagtatttaca

SEQ ID NO: 1465034 - DNA, 15 bp, Homo sapiens
gtttacagtatttac

SEQ ID NO: 1465035 - DNA, 15 bp, Homo sapiens
tgtttacagtattta

SEQ ID NO: 1465036 - DNA, 15 bp, Homo sapiens
ctgtttacagtattt

SEQ ID NO: 1465037 - DNA, 15 bp, Homo sapiens
tctgtttacagtatt

SEQ ID NO: 1465038 - DNA, 15 bp, Homo sapiens
ttctgtttacagtat

SEQ ID NO: 1465039 - DNA, 15 bp, Homo sapiens
tttctgtttacagta

SEQ ID NO: 1465040 - DNA, 15 bp, Homo sapiens
ttttctgtttacagt

SEQ ID NO: 1465041 - DNA, 15 bp, Homo sapiens
cttttctgtttacag

SEQ ID NO: 1465042 - DNA, 15 bp, Homo sapiens
tcttttctgtttaca

SEQ ID NO: 1465043 - DNA, 15 bp, Homo sapiens
atcttttctgtttac

SEQ ID NO: 1465044 - DNA, 15 bp, Homo sapiens
tatcttttctgttta

SEQ ID NO: 1465045 - DNA, 15 bp, Homo sapiens
atatcttttctgttt

SEQ ID NO: 1465046 - DNA, 15 bp, Homo sapiens
aatatcttttctgtt

SEQ ID NO: 1465047 - DNA, 15 bp, Homo sapiens
caatatcttttctgt

SEQ ID NO: 1465048 - DNA, 15 bp, Homo sapiens
ccaatatcttttctg

SEQ ID NO: 1465049 - DNA, 15 bp, Homo sapiens
tccaatatcttttct

SEQ ID NO: 1465050 - DNA, 15 bp, Homo sapiens
ttccaatatcttttc

SEQ ID NO: 1465051 - DNA, 15 bp, Homo sapiens
tttccaatatctttt

SEQ ID NO: 1465052 - DNA, 15 bp, Homo sapiens
ttttccaatatcttt

SEQ ID NO: 1465053 - DNA, 15 bp, Homo sapiens
tttttccaatatctt

SEQ ID NO: 1465054 - DNA, 15 bp, Homo sapiens
gtttttccaatatct

SEQ ID NO: 1465055 - DNA, 15 bp, Homo sapiens
tgtttttccaatatc

SEQ ID NO: 1465056 - DNA, 15 bp, Homo sapiens
ttgtttttccaatat

SEQ ID NO: 1465057 - DNA, 15 bp, Homo sapiens
attgtttttccaata

SEQ ID NO: 1465058 - DNA, 15 bp, Homo sapiens
aattgtttttccaat

SEQ ID NO: 1465059 - DNA, 15 bp, Homo sapiens
caattgtttttccaa

SEQ ID NO: 1465060 - DNA, 15 bp, Homo sapiens
acaattgtttttcca

SEQ ID NO: 1465061 - DNA, 15 bp, Homo sapiens
cacaattgtttttcc

SEQ ID NO: 1465062 - DNA, 15 bp, Homo sapiens
gcacaattgtttttc

SEQ ID NO: 1465063 - DNA, 15 bp, Homo sapiens
agcacaattgttttt

SEQ ID NO: 1465064 - DNA, 15 bp, Homo sapiens
tagcacaattgtttt

SEQ ID NO: 1465065 - DNA, 15 bp, Homo sapiens
ctagcacaattgttt

SEQ ID NO: 1465066 - DNA, 15 bp, Homo sapiens
actagcacaattgtt

SEQ ID NO: 1465067 - DNA, 15 bp, Homo sapiens
aactagcacaattgt

SEQ ID NO: 1465068 - DNA, 15 bp, Homo sapiens
taactagcacaattg

SEQ ID NO: 1465069 - DNA, 15 bp, Homo sapiens
ttaactagcacaatt

SEQ ID NO: 1465070 - DNA, 15 bp, Homo sapiens
gttaactagcacaat

SEQ ID NO: 1465071 - DNA, 15 bp, Homo sapiens
tgttaactagcacaa

SEQ ID NO: 1465072 - DNA, 15 bp, Homo sapiens
ttgttaactagcaca

SEQ ID NO: 1465073 - DNA, 15 bp, Homo sapiens
tttgttaactagcac

SEQ ID NO: 1465074 - DNA, 15 bp, Homo sapiens
gtttgttaactagca

SEQ ID NO: 1465075 - DNA, 15 bp, Homo sapiens
agtttgttaactagc

SEQ ID NO: 1465076 - DNA, 15 bp, Homo sapiens
cagtttgttaactag

SEQ ID NO: 1465077 - DNA, 15 bp, Homo sapiens
tcagtttgttaacta

SEQ ID NO: 1465078 - DNA, 15 bp, Homo sapiens
cttcagtttgttaac

SEQ ID NO: 1465079 - DNA, 15 bp, Homo sapiens
ccttcagtttgttaa

SEQ ID NO: 1465080 - DNA, 15 bp, Homo sapiens
cccttcagtttgtta

SEQ ID NO: 1465081 - DNA, 15 bp, Homo sapiens
ccccttcagtttgtt

SEQ ID NO: 1465082 - DNA, 15 bp, Homo sapiens
cccccttcagtttgt

SEQ ID NO: 1465083 - DNA, 15 bp, Homo sapiens
ccccccttcagtttg

SEQ ID NO: 1465084 - DNA, 15 bp, Homo sapiens
tccccccttcagttt

SEQ ID NO: 1465085 - DNA, 15 bp, Homo sapiens
ttccccccttcagtt

SEQ ID NO: 1465086 - DNA, 15 bp, Homo sapiens
tttccccccttcagt

SEQ ID NO: 1465087 - DNA, 15 bp, Homo sapiens
ttttccccccttcag

SEQ ID NO: 1465088 - DNA, 15 bp, Homo sapiens
cttttccccccttca

SEQ ID NO: 1465089 - DNA, 15 bp, Homo sapiens
ccttttccccccttc

SEQ ID NO: 1465090 - DNA, 15 bp, Homo sapiens
accttttcccccctt

SEQ ID NO: 1465091 - DNA, 15 bp, Homo sapiens
gaccttttcccccct

SEQ ID NO: 1465092 - DNA, 15 bp, Homo sapiens
tgaccttttcccccc

SEQ ID NO: 1465093 - DNA, 15 bp, Homo sapiens
ctgaccttttccccc

SEQ ID NO: 1465094 - DNA, 15 bp, Homo sapiens
actgaccttttcccc

SEQ ID NO: 1465095 - DNA, 15 bp, Homo sapiens
tactgaccttttccc

SEQ ID NO: 1465096 - DNA, 15 bp, Homo sapiens
ttactgaccttttcc

SEQ ID NO: 1465097 - DNA, 15 bp, Homo sapiens
tttactgaccttttc

SEQ ID NO: 1465098 - DNA, 15 bp, Homo sapiens
ttttactgacctttt

SEQ ID NO: 1465099 - DNA, 15 bp, Homo sapiens
tttttactgaccttt

SEQ ID NO: 1465100 - DNA, 15 bp, Homo sapiens
ttttttactgacctt

SEQ ID NO: 1465101 - DNA, 15 bp, Homo sapiens
attttttactgacct

SEQ ID NO: 1465102 - DNA, 15 bp, Homo sapiens
tattttttactgacc

SEQ ID NO: 1465103 - DNA, 15 bp, Homo sapiens
ttattttttactgac

SEQ ID NO: 1465104 - DNA, 15 bp, Homo sapiens
tttattttttactga

SEQ ID NO: 1465105 - DNA, 15 bp, Homo sapiens
ctttattttttactg

SEQ ID NO: 1465106 - DNA, 15 bp, Homo sapiens
actttattttttact

SEQ ID NO: 1465107 - DNA, 15 bp, Homo sapiens
aactttattttttac

SEQ ID NO: 1465108 - DNA, 15 bp, Homo sapiens
gcaactttatttttt

SEQ ID NO: 1465109 - DNA, 15 bp, Homo sapiens
agcaactttattttt

SEQ ID NO: 1465110 - DNA, 15 bp, Homo sapiens
gagcaactttatttt

SEQ ID NO: 1465111 - DNA, 15 bp, Homo sapiens
agagcaactttattt

SEQ ID NO: 1465112 - DNA, 15 bp, Homo sapiens
tagagcaactttatt

SEQ ID NO: 1465113 - DNA, 15 bp, Homo sapiens
ttagagcaactttat

SEQ ID NO: 1465114 - DNA, 15 bp, Homo sapiens
cttagagcaacttta

SEQ ID NO: 1465115 - DNA, 15 bp, Homo sapiens
ccttagagcaacttt

SEQ ID NO: 1465116 - DNA, 15 bp, Homo sapiens
cccttagagcaactt

SEQ ID NO: 1465117 - DNA, 15 bp, Homo sapiens
ccccttagagcaact

SEQ ID NO: 1465118 - DNA, 15 bp, Homo sapiens
cccccttagagcaac

SEQ ID NO: 1465119 - DNA, 15 bp, Homo sapiens
tcccccttagagcaa

SEQ ID NO: 1465120 - DNA, 15 bp, Homo sapiens
gtcccccttagagca

SEQ ID NO: 1465121 - DNA, 15 bp, Homo sapiens
agtcccccttagagc

SEQ ID NO: 1465122 - DNA, 15 bp, Homo sapiens
gagtcccccttagag

SEQ ID NO: 1465123 - DNA, 15 bp, Homo sapiens
tgagtcccccttaga

SEQ ID NO: 1465124 - DNA, 15 bp, Homo sapiens
ttgagtcccccttag

SEQ ID NO: 1465125 - DNA, 15 bp, Homo sapiens
cttgagtccccctta

SEQ ID NO: 1465126 - DNA, 15 bp, Homo sapiens
acttgagtccccctt

SEQ ID NO: 1465127 - DNA, 15 bp, Homo sapiens
tacttgagtccccct

SEQ ID NO: 1465128 - DNA, 15 bp, Homo sapiens
gtacttgagtccccc

SEQ ID NO: 1465129 - DNA, 15 bp, Homo sapiens
ggtacttgagtcccc

SEQ ID NO: 1465130 - DNA, 15 bp, Homo sapiens
gggtacttgagtccc

SEQ ID NO: 1465131 - DNA, 15 bp, Homo sapiens
tgggtacttgagtcc

SEQ ID NO: 1465132 - DNA, 15 bp, Homo sapiens
ttgggtacttgagtc

SEQ ID NO: 1465133 - DNA, 15 bp, Homo sapiens
attgggtacttgagt

SEQ ID NO: 1465134 - DNA, 15 bp, Homo sapiens
aattgggtacttgag

SEQ ID NO: 1465135 - DNA, 15 bp, Homo sapiens
taattgggtacttga

SEQ ID NO: 1465136 - DNA, 15 bp, Homo sapiens
ttaattgggtacttg

SEQ ID NO: 1465137 - DNA, 15 bp, Homo sapiens
gttaattgggtactt

SEQ ID NO: 1465138 - DNA, 15 bp, Homo sapiens
ggttaattgggtact

SEQ ID NO: 1465139 - DNA, 15 bp, Homo sapiens
tggttaattgggtac

SEQ ID NO: 1465140 - DNA, 15 bp, Homo sapiens
atggttaattgggta

SEQ ID NO: 1465141 - DNA, 15 bp, Homo sapiens
aatggttaattgggt

SEQ ID NO: 1465142 - DNA, 15 bp, Homo sapiens
aaatggttaattggg

SEQ ID NO: 1465143 - DNA, 15 bp, Homo sapiens
aaaatggttaattgg

SEQ ID NO: 1465144 - DNA, 15 bp, Homo sapiens
taaaatggttaattg

SEQ ID NO: 1465145 - DNA, 15 bp, Homo sapiens
ataaaatggttaatt

SEQ ID NO: 1465146 - DNA, 15 bp, Homo sapiens
aataaaatggttaat

SEQ ID NO: 1465147 - DNA, 15 bp, Homo sapiens
aaataaaatggttaa

SEQ ID NO: 1465148 - DNA, 15 bp, Homo sapiens
aaaataaaatggtta

SEQ ID NO: 1465149 - DNA, 15 bp, Homo sapiens
aaaaataaaatggtt

SEQ ID NO: 1465150 - DNA, 15 bp, Homo sapiens
taaaaataaaatggt

SEQ ID NO: 1465151 - DNA, 15 bp, Homo sapiens
ataaaaataaaatgg

SEQ ID NO: 1465152 - DNA, 15 bp, Homo sapiens
aataaaaataaaatg

SEQ ID NO: 1465153 - DNA, 15 bp, Homo sapiens
aaataaaaataaaat

SEQ ID NO: 1465154 - DNA, 15 bp, Homo sapiens
gaaaaaaaataaaaa

SEQ ID NO: 1465155 - DNA, 15 bp, Homo sapiens
agaaaaaaaataaaa

SEQ ID NO: 1465156 - DNA, 15 bp, Homo sapiens
cagaaaaaaaataaa

SEQ ID NO: 1465157 - DNA, 15 bp, Homo sapiens
tcagaaaaaaaataa

SEQ ID NO: 1465158 - DNA, 15 bp, Homo sapiens
ctcagaaaaaaaata

SEQ ID NO: 1465159 - DNA, 15 bp, Homo sapiens
tctcagaaaaaaaat

SEQ ID NO: 1465160 - DNA, 15 bp, Homo sapiens
cgtctcagaaaaaaa

SEQ ID NO: 1465161 - DNA, 15 bp, Homo sapiens
aaggcggagcttgca

SEQ ID NO: 1465162 - DNA, 15 bp, Homo sapiens
gaaggcggagcttgc

SEQ ID NO: 1465163 - DNA, 15 bp, Homo sapiens
ggaaggcggagcttg

SEQ ID NO: 1465164 - DNA, 15 bp, Homo sapiens
cggaaggcggagctt

SEQ ID NO: 1465165 - DNA, 15 bp, Homo sapiens
ccggaaggcggagct

SEQ ID NO: 1465166 - DNA, 15 bp, Homo sapiens
cccggaaggcggagc

SEQ ID NO: 1465167 - DNA, 15 bp, Homo sapiens
acccggaaggcggag

SEQ ID NO: 1465168 - DNA, 15 bp, Homo sapiens
aacccggaaggcgga

SEQ ID NO: 1465169 - DNA, 15 bp, Homo sapiens
gaacccggaaggcgg

SEQ ID NO: 1465170 - DNA, 15 bp, Homo sapiens
tgaacccggaaggcg

SEQ ID NO: 1465171 - DNA, 15 bp, Homo sapiens
gtgaacccggaaggc

SEQ ID NO: 1465172 - DNA, 15 bp, Homo sapiens
acctgtagtctcagc

SEQ ID NO: 1465173 - DNA, 15 bp, Homo sapiens
cacctgtagtctcag

SEQ ID NO: 1465174 - DNA, 15 bp, Homo sapiens
gcacctgtagtctca

SEQ ID NO: 1465175 - DNA, 15 bp, Homo sapiens
ggcacctgtagtctc

SEQ ID NO: 1465176 - DNA, 15 bp, Homo sapiens
aggcacctgtagtct

SEQ ID NO: 1465177 - DNA, 15 bp, Homo sapiens
cgggtgtggtggcag

SEQ ID NO: 1465178 - DNA, 15 bp, Homo sapiens
acgggtgtggtggca

SEQ ID NO: 1465179 - DNA, 15 bp, Homo sapiens
gacgggtgtggtggc

SEQ ID NO: 1465180 - DNA, 15 bp, Homo sapiens
agacgggtgtggtgg

SEQ ID NO: 1465181 - DNA, 15 bp, Homo sapiens
tagacgggtgtggtg

SEQ ID NO: 1465182 - DNA, 15 bp, Homo sapiens
ttagacgggtgtggt

SEQ ID NO: 1465183 - DNA, 15 bp, Homo sapiens
attagacgggtgtgg

SEQ ID NO: 1465184 - DNA, 15 bp, Homo sapiens
aattagacgggtgtg

SEQ ID NO: 1465185 - DNA, 15 bp, Homo sapiens
aaattagacgggtgt

SEQ ID NO: 1465186 - DNA, 15 bp, Homo sapiens
aaaattagacgggtg

SEQ ID NO: 1465187 - DNA, 15 bp, Homo sapiens
aaaaattagacgggt

SEQ ID NO: 1465188 - DNA, 15 bp, Homo sapiens
caaaaaattagacgg

SEQ ID NO: 1465189 - DNA, 15 bp, Homo sapiens
acaaaaaattagacg

SEQ ID NO: 1465190 - DNA, 15 bp, Homo sapiens
tacaaaaaattagac

SEQ ID NO: 1465191 - DNA, 15 bp, Homo sapiens
gaaaatacaaaaaat

SEQ ID NO: 1465192 - DNA, 15 bp, Homo sapiens
cctgaaaatacaaaa

SEQ ID NO: 1465193 - DNA, 15 bp, Homo sapiens
tcctgaaaatacaaa

SEQ ID NO: 1465194 - DNA, 15 bp, Homo sapiens
ctcctgaaaatacaa

SEQ ID NO: 1465195 - DNA, 15 bp, Homo sapiens
tctcctgaaaataca

SEQ ID NO: 1465196 - DNA, 15 bp, Homo sapiens
ctctcctgaaaatac

SEQ ID NO: 1465197 - DNA, 15 bp, Homo sapiens
tctctcctgaaaata

SEQ ID NO: 1465198 - DNA, 15 bp, Homo sapiens
atctctcctgaaaat

SEQ ID NO: 1465199 - DNA, 15 bp, Homo sapiens
catctctcctgaaaa

SEQ ID NO: 1465200 - DNA, 15 bp, Homo sapiens
ccatctctcctgaaa

SEQ ID NO: 1465201 - DNA, 15 bp, Homo sapiens
cccatctctcctgaa

SEQ ID NO: 1465202 - DNA, 15 bp, Homo sapiens
ccccatctctcctga

SEQ ID NO: 1465203 - DNA, 15 bp, Homo sapiens
accccatctctcctg

SEQ ID NO: 1465204 - DNA, 15 bp, Homo sapiens
aaccccatctctcct

SEQ ID NO: 1465205 - DNA, 15 bp, Homo sapiens
aaaccccatctctcc

SEQ ID NO: 1465206 - DNA, 15 bp, Homo sapiens
gaaaccccatctctc

SEQ ID NO: 1465207 - DNA, 15 bp, Homo sapiens
cagtgaaaccccatc

SEQ ID NO: 1465208 - DNA, 15 bp, Homo sapiens
acagtgaaaccccat

SEQ ID NO: 1465209 - DNA, 15 bp, Homo sapiens
cacagtgaaacccca

SEQ ID NO: 1465210 - DNA, 15 bp, Homo sapiens
ggaccatcctggcta

SEQ ID NO: 1465211 - DNA, 15 bp, Homo sapiens
gggaccatcctggct

SEQ ID NO: 1465212 - DNA, 15 bp, Homo sapiens
cgggaccatcctggc

SEQ ID NO: 1465213 - DNA, 15 bp, Homo sapiens
tcgggaccatcctgg

SEQ ID NO: 1465214 - DNA, 15 bp, Homo sapiens
atcgggaccatcctg

SEQ ID NO: 1465215 - DNA, 15 bp, Homo sapiens
gatcgggaccatcct

SEQ ID NO: 1465216 - DNA, 15 bp, Homo sapiens
agatcgggaccatcc

SEQ ID NO: 1465217 - DNA, 15 bp, Homo sapiens
gagatcgggaccatc

SEQ ID NO: 1465218 - DNA, 15 bp, Homo sapiens
ggagatcgggaccat

SEQ ID NO: 1465219 - DNA, 15 bp, Homo sapiens
aggagatcgggacca

SEQ ID NO: 1465220 - DNA, 15 bp, Homo sapiens
caggagatcgggacc

SEQ ID NO: 1465221 - DNA, 15 bp, Homo sapiens
tcaggagatcgggac

SEQ ID NO: 1465222 - DNA, 15 bp, Homo sapiens
gtcaggagatcggga

SEQ ID NO: 1465223 - DNA, 15 bp, Homo sapiens
ggtcaggagatcggg

SEQ ID NO: 1465224 - DNA, 15 bp, Homo sapiens
aggtcaggagatcgg

SEQ ID NO: 1465225 - DNA, 15 bp, Homo sapiens
tgggcggatcacaag

SEQ ID NO: 1465226 - DNA, 15 bp, Homo sapiens
gtgggcggatcacaa

SEQ ID NO: 1465227 - DNA, 15 bp, Homo sapiens
ggtgggcggatcaca

SEQ ID NO: 1465228 - DNA, 15 bp, Homo sapiens
cgaggtgggcggatc

SEQ ID NO: 1465229 - DNA, 15 bp, Homo sapiens
ccgaggtgggcggat

SEQ ID NO: 1465230 - DNA, 15 bp, Homo sapiens
gccgaggtgggcgga

SEQ ID NO: 1465231 - DNA, 15 bp, Homo sapiens
ggccgaggtgggcgg

SEQ ID NO: 1465232 - DNA, 15 bp, Homo sapiens
aggccgaggtgggcg

SEQ ID NO: 1465233 - DNA, 15 bp, Homo sapiens
ttcacacctgtaatc

SEQ ID NO: 1465234 - DNA, 15 bp, Homo sapiens
gttcacacctgtaat

SEQ ID NO: 1465235 - DNA, 15 bp, Homo sapiens
ggttcacacctgtaa

SEQ ID NO: 1465236 - DNA, 15 bp, Homo sapiens
tggttcacacctgta

SEQ ID NO: 1465237 - DNA, 15 bp, Homo sapiens
gtggttcacacctgt

SEQ ID NO: 1465238 - DNA, 15 bp, Homo sapiens
agtggttcacacctg

SEQ ID NO: 1465239 - DNA, 15 bp, Homo sapiens
cagtggttcacacct

SEQ ID NO: 1465240 - DNA, 15 bp, Homo sapiens
gcagtggttcacacc

SEQ ID NO: 1465241 - DNA, 15 bp, Homo sapiens
cgcagtggttcacac

SEQ ID NO: 1465242 - DNA, 15 bp, Homo sapiens
gcgcagtggttcaca

SEQ ID NO: 1465243 - DNA, 15 bp, Homo sapiens
ggcgcagtggttcac

SEQ ID NO: 1465244 - DNA, 15 bp, Homo sapiens
gggcgcagtggttca

SEQ ID NO: 1465245 - DNA, 15 bp, Homo sapiens
cgggcgcagtggttc

SEQ ID NO: 1465246 - DNA, 15 bp, Homo sapiens
ccgggcgcagtggtt

SEQ ID NO: 1465247 - DNA, 15 bp, Homo sapiens
gccgggcgcagtggt

SEQ ID NO: 1465248 - DNA, 15 bp, Homo sapiens
agcggccgggcgcag

SEQ ID NO: 1465249 - DNA, 15 bp, Homo sapiens
aagcggccgggcgca

SEQ ID NO: 1465250 - DNA, 15 bp, Homo sapiens
aaagcggccgggcgc

SEQ ID NO: 1465251 - DNA, 15 bp, Homo sapiens
taaagcggccgggcg

SEQ ID NO: 1465252 - DNA, 15 bp, Homo sapiens
gtaaagcggccgggc

SEQ ID NO: 1465253 - DNA, 15 bp, Homo sapiens
agtaaagcggccggg

SEQ ID NO: 1465254 - DNA, 15 bp, Homo sapiens
gagtaaagcggccgg

SEQ ID NO: 1465255 - DNA, 15 bp, Homo sapiens
agagtaaagcggccg

SEQ ID NO: 1465256 - DNA, 15 bp, Homo sapiens
aagagtaaagcggcc

SEQ ID NO: 1465257 - DNA, 15 bp, Homo sapiens
taagagtaaagcggc

SEQ ID NO: 1465258 - DNA, 15 bp, Homo sapiens
ttaagagtaaagcgg

SEQ ID NO: 1465259 - DNA, 15 bp, Homo sapiens
cttaagagtaaagcg

SEQ ID NO: 1465260 - DNA, 15 bp, Homo sapiens
acttaagagtaaagc

SEQ ID NO: 1465261 - DNA, 15 bp, Homo sapiens
gtgaacttaagagta

SEQ ID NO: 1465262 - DNA, 15 bp, Homo sapiens
cgtgaacttaagagt

SEQ ID NO: 1465263 - DNA, 15 bp, Homo sapiens
tcgtgaacttaagag

SEQ ID NO: 1465264 - DNA, 15 bp, Homo sapiens
ctcgtgaacttaaga

SEQ ID NO: 1465265 - DNA, 15 bp, Homo sapiens
tctcgtgaacttaag

SEQ ID NO: 1465266 - DNA, 15 bp, Homo sapiens
ttctcgtgaacttaa

SEQ ID NO: 1465267 - DNA, 15 bp, Homo sapiens
tttctcgtgaactta

SEQ ID NO: 1465268 - DNA, 15 bp, Homo sapiens
ttttctcgtgaactt

SEQ ID NO: 1465269 - DNA, 15 bp, Homo sapiens
tttttctcgtgaact

SEQ ID NO: 1465270 - DNA, 15 bp, Homo sapiens
atttttctcgtgaac

SEQ ID NO: 1465271 - DNA, 15 bp, Homo sapiens
aatttttctcgtgaa

SEQ ID NO: 1465272 - DNA, 15 bp, Homo sapiens
aaatttttctcgtga

SEQ ID NO: 1465273 - DNA, 15 bp, Homo sapiens
taaatttttctcgtg

SEQ ID NO: 1465274 - DNA, 15 bp, Homo sapiens
ataaatttttctcgt

SEQ ID NO: 1465275 - DNA, 15 bp, Homo sapiens
cataaatttttctcg

SEQ ID NO: 1465276 - DNA, 15 bp, Homo sapiens
acataaatttttctc

SEQ ID NO: 1465277 - DNA, 15 bp, Homo sapiens
gacataaatttttct

SEQ ID NO: 1465278 - DNA, 15 bp, Homo sapiens
tgacataaatttttc

SEQ ID NO: 1465279 - DNA, 15 bp, Homo sapiens
ttgacataaattttt

SEQ ID NO: 1465280 - DNA, 15 bp, Homo sapiens
attgacataaatttt

SEQ ID NO: 1465281 - DNA, 15 bp, Homo sapiens
cattgacataaattt

SEQ ID NO: 1465282 - DNA, 15 bp, Homo sapiens
acattgacataaatt

SEQ ID NO: 1465283 - DNA, 15 bp, Homo sapiens
aacattgacataaat

SEQ ID NO: 1465284 - DNA, 15 bp, Homo sapiens
taacattgacataaa

SEQ ID NO: 1465285 - DNA, 15 bp, Homo sapiens
ataacattgacataa

SEQ ID NO: 1465286 - DNA, 15 bp, Homo sapiens
tataacattgacata

SEQ ID NO: 1465287 - DNA, 15 bp, Homo sapiens
ctataacattgacat

SEQ ID NO: 1465288 - DNA, 15 bp, Homo sapiens
tctataacattgaca

SEQ ID NO: 1465289 - DNA, 15 bp, Homo sapiens
ttctataacattgac

SEQ ID NO: 1465290 - DNA, 15 bp, Homo sapiens
gttctataacattga

SEQ ID NO: 1465291 - DNA, 15 bp, Homo sapiens
tgttctataacattg

SEQ ID NO: 1465292 - DNA, 15 bp, Homo sapiens
ctgttctataacatt

SEQ ID NO: 1465293 - DNA, 15 bp, Homo sapiens
actgttctataacat

SEQ ID NO: 1465294 - DNA, 15 bp, Homo sapiens
gactgttctataaca

SEQ ID NO: 1465295 - DNA, 15 bp, Homo sapiens
agactgttctataac

SEQ ID NO: 1465296 - DNA, 15 bp, Homo sapiens
aagactgttctataa

SEQ ID NO: 1465297 - DNA, 15 bp, Homo sapiens
caagactgttctata

SEQ ID NO: 1465298 - DNA, 15 bp, Homo sapiens
tcaagactgttctat

SEQ ID NO: 1465299 - DNA, 15 bp, Homo sapiens
ttcaagactgttcta

SEQ ID NO: 1465300 - DNA, 15 bp, Homo sapiens
tttcaagactgttct

SEQ ID NO: 1465301 - DNA, 15 bp, Homo sapiens
ttttcaagactgttc

SEQ ID NO: 1465302 - DNA, 15 bp, Homo sapiens
attttcaagactgtt

SEQ ID NO: 1465303 - DNA, 15 bp, Homo sapiens
cattttcaagactgt

SEQ ID NO: 1465304 - DNA, 15 bp, Homo sapiens
acattttcaagactg

SEQ ID NO: 1465305 - DNA, 15 bp, Homo sapiens
aacattttcaagact

SEQ ID NO: 1465306 - DNA, 15 bp, Homo sapiens
aaacattttcaagac

SEQ ID NO: 1465307 - DNA, 15 bp, Homo sapiens
aaaacattttcaaga

SEQ ID NO: 1465308 - DNA, 15 bp, Homo sapiens
aaaaacattttcaag

SEQ ID NO: 1465309 - DNA, 15 bp, Homo sapiens
aaaaaacattttcaa

SEQ ID NO: 1465310 - DNA, 15 bp, Homo sapiens
aaaaaaacattttca

SEQ ID NO: 1465311 - DNA, 15 bp, Homo sapiens
caaaaaaacattttc

SEQ ID NO: 1465312 - DNA, 15 bp, Homo sapiens
tcaaaaaaacatttt

SEQ ID NO: 1465313 - DNA, 15 bp, Homo sapiens
atcaaaaaaacattt

SEQ ID NO: 1465314 - DNA, 15 bp, Homo sapiens
catcaaaaaaacatt

SEQ ID NO: 1465315 - DNA, 15 bp, Homo sapiens
tcatcaaaaaaacat

SEQ ID NO: 1465316 - DNA, 15 bp, Homo sapiens
atcatcaaaaaaaca

SEQ ID NO: 1465317 - DNA, 15 bp, Homo sapiens
catcatcaaaaaaac

SEQ ID NO: 1465318 - DNA, 15 bp, Homo sapiens
tcatcatcaaaaaaa

SEQ ID NO: 1465319 - DNA, 15 bp, Homo sapiens
ctcatcatcaaaaaa

SEQ ID NO: 1465320 - DNA, 15 bp, Homo sapiens
actcatcatcaaaaa

SEQ ID NO: 1465321 - DNA, 15 bp, Homo sapiens
tactcatcatcaaaa

SEQ ID NO: 1465322 - DNA, 15 bp, Homo sapiens
atactcatcatcaaa

SEQ ID NO: 1465323 - DNA, 15 bp, Homo sapiens
aatactcatcatcaa

SEQ ID NO: 1465324 - DNA, 15 bp, Homo sapiens
taatactcatcatca

SEQ ID NO: 1465325 - DNA, 15 bp, Homo sapiens
ctaatactcatcatc

SEQ ID NO: 1465326 - DNA, 15 bp, Homo sapiens
tctaatactcatcat

SEQ ID NO: 1465327 - DNA, 15 bp, Homo sapiens
ttctaatactcatca

SEQ ID NO: 1465328 - DNA, 15 bp, Homo sapiens
attctaatactcatc

SEQ ID NO: 1465329 - DNA, 15 bp, Homo sapiens
tattctaatactcat

SEQ ID NO: 1465330 - DNA, 15 bp, Homo sapiens
gtattctaatactca

SEQ ID NO: 1465331 - DNA, 15 bp, Homo sapiens
ggtattctaatactc

SEQ ID NO: 1465332 - DNA, 15 bp, Homo sapiens
aggtattctaatact

SEQ ID NO: 1465333 - DNA, 15 bp, Homo sapiens
gaggtattctaatac

SEQ ID NO: 1465334 - DNA, 15 bp, Homo sapiens
ggaggtattctaata

SEQ ID NO: 1465335 - DNA, 15 bp, Homo sapiens
gggaggtattctaat

SEQ ID NO: 1465336 - DNA, 15 bp, Homo sapiens
agggaggtattctaa

SEQ ID NO: 1465337 - DNA, 15 bp, Homo sapiens
aagggaggtattcta

SEQ ID NO: 1465338 - DNA, 15 bp, Homo sapiens
aaagggaggtattct

SEQ ID NO: 1465339 - DNA, 15 bp, Homo sapiens
taaagggaggtattc

SEQ ID NO: 1465340 - DNA, 15 bp, Homo sapiens
ttaaagggaggtatt

SEQ ID NO: 1465341 - DNA, 15 bp, Homo sapiens
gttaaagggaggtat

SEQ ID NO: 1465342 - DNA, 15 bp, Homo sapiens
agttaaagggaggta

SEQ ID NO: 1465343 - DNA, 15 bp, Homo sapiens
gagttaaagggaggt

SEQ ID NO: 1465344 - DNA, 15 bp, Homo sapiens
tgagttaaagggagg

SEQ ID NO: 1465345 - DNA, 15 bp, Homo sapiens
ctgagttaaagggag

SEQ ID NO: 1465346 - DNA, 15 bp, Homo sapiens
cctgagttaaaggga

SEQ ID NO: 1465347 - DNA, 15 bp, Homo sapiens
acctgagttaaaggg

SEQ ID NO: 1465348 - DNA, 15 bp, Homo sapiens
cacctgagttaaagg

SEQ ID NO: 1465349 - DNA, 15 bp, Homo sapiens
gcacctgagttaaag

SEQ ID NO: 1465350 - DNA, 15 bp, Homo sapiens
agcacctgagttaaa

SEQ ID NO: 1465351 - DNA, 15 bp, Homo sapiens
cagcacctgagttaa

SEQ ID NO: 1465352 - DNA, 15 bp, Homo sapiens
tcagcacctgagtta

SEQ ID NO: 1465353 - DNA, 15 bp, Homo sapiens
ctcagcacctgagtt

SEQ ID NO: 1465354 - DNA, 15 bp, Homo sapiens
tctcagcacctgagt

SEQ ID NO: 1465355 - DNA, 15 bp, Homo sapiens
atctcagcacctgag

SEQ ID NO: 1465356 - DNA, 15 bp, Homo sapiens
tatctcagcacctga

SEQ ID NO: 1465357 - DNA, 15 bp, Homo sapiens
atatctcagcacctg

SEQ ID NO: 1465358 - DNA, 15 bp, Homo sapiens
gatatctcagcacct

SEQ ID NO: 1465359 - DNA, 15 bp, Homo sapiens
tgatatctcagcacc

SEQ ID NO: 1465360 - DNA, 15 bp, Homo sapiens
gtgatatctcagcac

SEQ ID NO: 1465361 - DNA, 15 bp, Homo sapiens
tgtgatatctcagca

SEQ ID NO: 1465362 - DNA, 15 bp, Homo sapiens
atgtgatatctcagc

SEQ ID NO: 1465363 - DNA, 15 bp, Homo sapiens
gatgtgatatctcag

SEQ ID NO: 1465364 - DNA, 15 bp, Homo sapiens
agatgtgatatctca

SEQ ID NO: 1465365 - DNA, 15 bp, Homo sapiens
gagatgtgatatctc

SEQ ID NO: 1465366 - DNA, 15 bp, Homo sapiens
ggagatgtgatatct

SEQ ID NO: 1465367 - DNA, 15 bp, Homo sapiens
gggagatgtgatatc

SEQ ID NO: 1465368 - DNA, 15 bp, Homo sapiens
tgggagatgtgatat

SEQ ID NO: 1465369 - DNA, 15 bp, Homo sapiens
ctgggagatgtgata

SEQ ID NO: 1465370 - DNA, 15 bp, Homo sapiens
tctgggagatgtgat

SEQ ID NO: 1465371 - DNA, 15 bp, Homo sapiens
ttctgggagatgtga

SEQ ID NO: 1465372 - DNA, 15 bp, Homo sapiens
ccttctgggagatgt

SEQ ID NO: 1465373 - DNA, 15 bp, Homo sapiens
accttctgggagatg

SEQ ID NO: 1465374 - DNA, 15 bp, Homo sapiens
gaccttctgggagat

SEQ ID NO: 1465375 - DNA, 15 bp, Homo sapiens
tgaccttctgggaga

SEQ ID NO: 1465376 - DNA, 15 bp, Homo sapiens
ttgaccttctgggag

SEQ ID NO: 1465377 - DNA, 15 bp, Homo sapiens
gttgaccttctggga

SEQ ID NO: 1465378 - DNA, 15 bp, Homo sapiens
tgttgaccttctggg

SEQ ID NO: 1465379 - DNA, 15 bp, Homo sapiens
ttgttgaccttctgg

SEQ ID NO: 1465380 - DNA, 15 bp, Homo sapiens
tttgttgaccttctg

SEQ ID NO: 1465381 - DNA, 15 bp, Homo sapiens
gtttgttgaccttct

SEQ ID NO: 1465382 - DNA, 15 bp, Homo sapiens
agtttgttgaccttc

SEQ ID NO: 1465383 - DNA, 15 bp, Homo sapiens
tagtttgttgacctt

SEQ ID NO: 1465384 - DNA, 15 bp, Homo sapiens
gtagtttgttgacct

SEQ ID NO: 1465385 - DNA, 15 bp, Homo sapiens
agtagtttgttgacc

SEQ ID NO: 1465386 - DNA, 15 bp, Homo sapiens
gagtagtttgttgac

SEQ ID NO: 1465387 - DNA, 15 bp, Homo sapiens
tgagtagtttgttga

SEQ ID NO: 1465388 - DNA, 15 bp, Homo sapiens
ctgagtagtttgttg

SEQ ID NO: 1465389 - DNA, 15 bp, Homo sapiens
cctgagtagtttgtt

SEQ ID NO: 1465390 - DNA, 15 bp, Homo sapiens
acctgagtagtttgt

SEQ ID NO: 1465391 - DNA, 15 bp, Homo sapiens
cacctgagtagtttg

SEQ ID NO: 1465392 - DNA, 15 bp, Homo sapiens
ccacctgagtagttt

SEQ ID NO: 1465393 - DNA, 15 bp, Homo sapiens
accacctgagtagtt

SEQ ID NO: 1465394 - DNA, 15 bp, Homo sapiens
caccacctgagtagt

SEQ ID NO: 1465395 - DNA, 15 bp, Homo sapiens
ccaccacctgagtag

SEQ ID NO: 1465396 - DNA, 15 bp, Homo sapiens
cccaccacctgagta

SEQ ID NO: 1465397 - DNA, 15 bp, Homo sapiens
tcccaccacctgagt

SEQ ID NO: 1465398 - DNA, 15 bp, Homo sapiens
atcccaccacctgag

SEQ ID NO: 1465399 - DNA, 15 bp, Homo sapiens
gatcccaccacctga

SEQ ID NO: 1465400 - DNA, 15 bp, Homo sapiens
agatcccaccacctg

SEQ ID NO: 1465401 - DNA, 15 bp, Homo sapiens
tagatcccaccacct

SEQ ID NO: 1465402 - DNA, 15 bp, Homo sapiens
atagatcccaccacc

SEQ ID NO: 1465403 - DNA, 15 bp, Homo sapiens
aatagatcccaccac

SEQ ID NO: 1465404 - DNA, 15 bp, Homo sapiens
caatagatcccacca

SEQ ID NO: 1465405 - DNA, 15 bp, Homo sapiens
acaatagatcccacc

SEQ ID NO: 1465406 - DNA, 15 bp, Homo sapiens
cacaatagatcccac

SEQ ID NO: 1465407 - DNA, 15 bp, Homo sapiens
acacaatagatccca

SEQ ID NO: 1465408 - DNA, 15 bp, Homo sapiens
tacacaatagatccc

SEQ ID NO: 1465409 - DNA, 15 bp, Homo sapiens
ttacacaatagatcc

SEQ ID NO: 1465410 - DNA, 15 bp, Homo sapiens
tttacacaatagatc

SEQ ID NO: 1465411 - DNA, 15 bp, Homo sapiens
atttacacaatagat

SEQ ID NO: 1465412 - DNA, 15 bp, Homo sapiens
catttacacaataga

SEQ ID NO: 1465413 - DNA, 15 bp, Homo sapiens
tcatttacacaatag

SEQ ID NO: 1465414 - DNA, 15 bp, Homo sapiens
ttcatttacacaata

SEQ ID NO: 1465415 - DNA, 15 bp, Homo sapiens
attcatttacacaat

SEQ ID NO: 1465416 - DNA, 15 bp, Homo sapiens
gattcatttacacaa

SEQ ID NO: 1465417 - DNA, 15 bp, Homo sapiens
agattcatttacaca

SEQ ID NO: 1465418 - DNA, 15 bp, Homo sapiens
cagattcatttacac

SEQ ID NO: 1465419 - DNA, 15 bp, Homo sapiens
gcagattcatttaca

SEQ ID NO: 1465420 - DNA, 15 bp, Homo sapiens
ggcagattcatttac

SEQ ID NO: 1465421 - DNA, 15 bp, Homo sapiens
tggcagattcattta

SEQ ID NO: 1465422 - DNA, 15 bp, Homo sapiens
ctggcagattcattt

SEQ ID NO: 1465423 - DNA, 15 bp, Homo sapiens
tctggcagattcatt

SEQ ID NO: 1465424 - DNA, 15 bp, Homo sapiens
atctggcagattcat

SEQ ID NO: 1465425 - DNA, 15 bp, Homo sapiens
aatctggcagattca

SEQ ID NO: 1465426 - DNA, 15 bp, Homo sapiens
taatctggcagattc

SEQ ID NO: 1465427 - DNA, 15 bp, Homo sapiens
ttaatctggcagatt

SEQ ID NO: 1465428 - DNA, 15 bp, Homo sapiens
gttaatctggcagat

SEQ ID NO: 1465429 - DNA, 15 bp, Homo sapiens
agttaatctggcaga

SEQ ID NO: 1465430 - DNA, 15 bp, Homo sapiens
cagttaatctggcag

SEQ ID NO: 1465431 - DNA, 15 bp, Homo sapiens
gcagttaatctggca

SEQ ID NO: 1465432 - DNA, 15 bp, Homo sapiens
agcagttaatctggc

SEQ ID NO: 1465433 - DNA, 15 bp, Homo sapiens
gagcagttaatctgg

SEQ ID NO: 1465434 - DNA, 15 bp, Homo sapiens
ggagcagttaatctg

SEQ ID NO: 1465435 - DNA, 15 bp, Homo sapiens
tggagcagttaatct

SEQ ID NO: 1465436 - DNA, 15 bp, Homo sapiens
gtggagcagttaatc

SEQ ID NO: 1465437 - DNA, 15 bp, Homo sapiens
agtggagcagttaat

SEQ ID NO: 1465438 - DNA, 15 bp, Homo sapiens
tagtggagcagttaa

SEQ ID NO: 1465439 - DNA, 15 bp, Homo sapiens
ttagtggagcagtta

SEQ ID NO: 1465440 - DNA, 15 bp, Homo sapiens
tttagtggagcagtt

SEQ ID NO: 1465441 - DNA, 15 bp, Homo sapiens
gtttagtggagcagt

SEQ ID NO: 1465442 - DNA, 15 bp, Homo sapiens
tgtttagtggagcag

SEQ ID NO: 1465443 - DNA, 15 bp, Homo sapiens
gtgtttagtggagca

SEQ ID NO: 1465444 - DNA, 15 bp, Homo sapiens
ggtgtttagtggagc

SEQ ID NO: 1465445 - DNA, 15 bp, Homo sapiens
aggtgtttagtggag

SEQ ID NO: 1465446 - DNA, 15 bp, Homo sapiens
gaggtgtttagtgga

SEQ ID NO: 1465447 - DNA, 15 bp, Homo sapiens
agaggtgtttagtgg

SEQ ID NO: 1465448 - DNA, 15 bp, Homo sapiens
aagaggtgtttagtg

SEQ ID NO: 1465449 - DNA, 15 bp, Homo sapiens
gaagaggtgtttagt

SEQ ID NO: 1465450 - DNA, 15 bp, Homo sapiens
agaagaggtgtttag

SEQ ID NO: 1465451 - DNA, 15 bp, Homo sapiens
aagaagaggtgttta

SEQ ID NO: 1465452 - DNA, 15 bp, Homo sapiens
aaagaagaggtgttt

SEQ ID NO: 1465453 - DNA, 15 bp, Homo sapiens
caaagaagaggtgtt

SEQ ID NO: 1465454 - DNA, 15 bp, Homo sapiens
tcaaagaagaggtgt

SEQ ID NO: 1465455 - DNA, 15 bp, Homo sapiens
ctcaaagaagaggtg

SEQ ID NO: 1465456 - DNA, 15 bp, Homo sapiens
tctcaaagaagaggt

SEQ ID NO: 1465457 - DNA, 15 bp, Homo sapiens
atctcaaagaagagg

SEQ ID NO: 1465458 - DNA, 15 bp, Homo sapiens
gatctcaaagaagag

SEQ ID NO: 1465459 - DNA, 15 bp, Homo sapiens
ggatctcaaagaaga

SEQ ID NO: 1465460 - DNA, 15 bp, Homo sapiens
tggatctcaaagaag

SEQ ID NO: 1465461 - DNA, 15 bp, Homo sapiens
atggatctcaaagaa

SEQ ID NO: 1465462 - DNA, 15 bp, Homo sapiens
tatggatctcaaaga

SEQ ID NO: 1465463 - DNA, 15 bp, Homo sapiens
ctatggatctcaaag

SEQ ID NO: 1465464 - DNA, 15 bp, Homo sapiens
cctatggatctcaaa

SEQ ID NO: 1465465 - DNA, 15 bp, Homo sapiens
ccctatggatctcaa

SEQ ID NO: 1465466 - DNA, 15 bp, Homo sapiens
tccctatggatctca

SEQ ID NO: 1465467 - DNA, 15 bp, Homo sapiens
gtccctatggatctc

SEQ ID NO: 1465468 - DNA, 15 bp, Homo sapiens
agtccctatggatct

SEQ ID NO: 1465469 - DNA, 15 bp, Homo sapiens
aagtccctatggatc

SEQ ID NO: 1465470 - DNA, 15 bp, Homo sapiens
gaagtccctatggat

SEQ ID NO: 1465471 - DNA, 15 bp, Homo sapiens
ggaagtccctatgga

SEQ ID NO: 1465472 - DNA, 15 bp, Homo sapiens
gggaagtccctatgg

SEQ ID NO: 1465473 - DNA, 15 bp, Homo sapiens
agggaagtccctatg

SEQ ID NO: 1465474 - DNA, 15 bp, Homo sapiens
tagggaagtccctat

SEQ ID NO: 1465475 - DNA, 15 bp, Homo sapiens
atagggaagtcccta

SEQ ID NO: 1465476 - DNA, 15 bp, Homo sapiens
aatagggaagtccct

SEQ ID NO: 1465477 - DNA, 15 bp, Homo sapiens
taatagggaagtccc

SEQ ID NO: 1465478 - DNA, 15 bp, Homo sapiens
ttaatagggaagtcc

SEQ ID NO: 1465479 - DNA, 15 bp, Homo sapiens
tttaatagggaagtc

SEQ ID NO: 1465480 - DNA, 15 bp, Homo sapiens
ttttaatagggaagt

SEQ ID NO: 1465481 - DNA, 15 bp, Homo sapiens
gttttaatagggaag

SEQ ID NO: 1465482 - DNA, 15 bp, Homo sapiens
tgttttaatagggaa

SEQ ID NO: 1465483 - DNA, 15 bp, Homo sapiens
gtgttttaataggga

SEQ ID NO: 1465484 - DNA, 15 bp, Homo sapiens
tgtgttttaataggg

SEQ ID NO: 1465485 - DNA, 15 bp, Homo sapiens
ctgtgttttaatagg

SEQ ID NO: 1465486 - DNA, 15 bp, Homo sapiens
cctgtgttttaatag

SEQ ID NO: 1465487 - DNA, 15 bp, Homo sapiens
gcctgtgttttaata

SEQ ID NO: 1465488 - DNA, 15 bp, Homo sapiens
ggcctgtgttttaat

SEQ ID NO: 1465489 - DNA, 15 bp, Homo sapiens
tggcctgtgttttaa

SEQ ID NO: 1465490 - DNA, 15 bp, Homo sapiens
ttggcctgtgtttta

SEQ ID NO: 1465491 - DNA, 15 bp, Homo sapiens
cttggcctgtgtttt

SEQ ID NO: 1465492 - DNA, 15 bp, Homo sapiens
ccttggcctgtgttt

SEQ ID NO: 1465493 - DNA, 15 bp, Homo sapiens
gccttggcctgtgtt

SEQ ID NO: 1465494 - DNA, 15 bp, Homo sapiens
agccttggcctgtgt

SEQ ID NO: 1465495 - DNA, 15 bp, Homo sapiens
tagccttggcctgtg

SEQ ID NO: 1465496 - DNA, 15 bp, Homo sapiens
ctagccttggcctgt

SEQ ID NO: 1465497 - DNA, 15 bp, Homo sapiens
actagccttggcctg

SEQ ID NO: 1465498 - DNA, 15 bp, Homo sapiens
aactagccttggcct

SEQ ID NO: 1465499 - DNA, 15 bp, Homo sapiens
aaactagccttggcc

SEQ ID NO: 1465500 - DNA, 15 bp, Homo sapiens
caaactagccttggc

SEQ ID NO: 1465501 - DNA, 15 bp, Homo sapiens
tcaaactagccttgg

SEQ ID NO: 1465502 - DNA, 15 bp, Homo sapiens
ttcaaactagccttg

SEQ ID NO: 1465503 - DNA, 15 bp, Homo sapiens
tttcaaactagcctt

SEQ ID NO: 1465504 - DNA, 15 bp, Homo sapiens
ttttcaaactagcct

SEQ ID NO: 1465505 - DNA, 15 bp, Homo sapiens
attttcaaactagcc

SEQ ID NO: 1465506 - DNA, 15 bp, Homo sapiens
cattttcaaactagc

SEQ ID NO: 1465507 - DNA, 15 bp, Homo sapiens
acattttcaaactag

SEQ ID NO: 1465508 - DNA, 15 bp, Homo sapiens
tacattttcaaacta

SEQ ID NO: 1465509 - DNA, 15 bp, Homo sapiens
gtacattttcaaact

SEQ ID NO: 1465510 - DNA, 15 bp, Homo sapiens
agtacattttcaaac

SEQ ID NO: 1465511 - DNA, 15 bp, Homo sapiens
cagtacattttcaaa

SEQ ID NO: 1465512 - DNA, 15 bp, Homo sapiens
ccagtacattttcaa

SEQ ID NO: 1465513 - DNA, 15 bp, Homo sapiens
accagtacattttca

SEQ ID NO: 1465514 - DNA, 15 bp, Homo sapiens
taccagtacattttc

SEQ ID NO: 1465515 - DNA, 15 bp, Homo sapiens
ataccagtacatttt

SEQ ID NO: 1465516 - DNA, 15 bp, Homo sapiens
gataccagtacattt

SEQ ID NO: 1465517 - DNA, 15 bp, Homo sapiens
ggataccagtacatt

SEQ ID NO: 1465518 - DNA, 15 bp, Homo sapiens
aggataccagtacat

SEQ ID NO: 1465519 - DNA, 15 bp, Homo sapiens
aaggataccagtaca

SEQ ID NO: 1465520 - DNA, 15 bp, Homo sapiens
caaggataccagtac

SEQ ID NO: 1465521 - DNA, 15 bp, Homo sapiens
acaaggataccagta

SEQ ID NO: 1465522 - DNA, 15 bp, Homo sapiens
cacaaggataccagt

SEQ ID NO: 1465523 - DNA, 15 bp, Homo sapiens
gcacaaggataccag

SEQ ID NO: 1465524 - DNA, 15 bp, Homo sapiens
ggcacaaggatacca

SEQ ID NO: 1465525 - DNA, 15 bp, Homo sapiens
aggcacaaggatacc

SEQ ID NO: 1465526 - DNA, 15 bp, Homo sapiens
taggcacaaggatac

SEQ ID NO: 1465527 - DNA, 15 bp, Homo sapiens
ttaggcacaaggata

SEQ ID NO: 1465528 - DNA, 15 bp, Homo sapiens
tttaggcacaaggat

SEQ ID NO: 1465529 - DNA, 15 bp, Homo sapiens
atttaggcacaagga

SEQ ID NO: 1465530 - DNA, 15 bp, Homo sapiens
gatttaggcacaagg

SEQ ID NO: 1465531 - DNA, 15 bp, Homo sapiens
tgatttaggcacaag

SEQ ID NO: 1465532 - DNA, 15 bp, Homo sapiens
ttgatttaggcacaa

SEQ ID NO: 1465533 - DNA, 15 bp, Homo sapiens
cttgatttaggcaca

SEQ ID NO: 1465534 - DNA, 15 bp, Homo sapiens
gcttgatttaggcac

SEQ ID NO: 1465535 - DNA, 15 bp, Homo sapiens
agcttgatttaggca

SEQ ID NO: 1465536 - DNA, 15 bp, Homo sapiens
gagcttgatttaggc

SEQ ID NO: 1465537 - DNA, 15 bp, Homo sapiens
tgagcttgatttagg

SEQ ID NO: 1465538 - DNA, 15 bp, Homo sapiens
gtgagcttgatttag

SEQ ID NO: 1465539 - DNA, 15 bp, Homo sapiens
tgtgagcttgattta

SEQ ID NO: 1465540 - DNA, 15 bp, Homo sapiens
atgtgagcttgattt

SEQ ID NO: 1465541 - DNA, 15 bp, Homo sapiens
aatgtgagcttgatt

SEQ ID NO: 1465542 - DNA, 15 bp, Homo sapiens
caatgtgagcttgat

SEQ ID NO: 1465543 - DNA, 15 bp, Homo sapiens
tcaatgtgagcttga

SEQ ID NO: 1465544 - DNA, 15 bp, Homo sapiens
ttcaatgtgagcttg

SEQ ID NO: 1465545 - DNA, 15 bp, Homo sapiens
cttcaatgtgagctt

SEQ ID NO: 1465546 - DNA, 15 bp, Homo sapiens
ccttcaatgtgagct

SEQ ID NO: 1465547 - DNA, 15 bp, Homo sapiens
accttcaatgtgagc

SEQ ID NO: 1465548 - DNA, 15 bp, Homo sapiens
gaccttcaatgtgag

SEQ ID NO: 1465549 - DNA, 15 bp, Homo sapiens
agaccttcaatgtga

SEQ ID NO: 1465550 - DNA, 15 bp, Homo sapiens
gagaccttcaatgtg

SEQ ID NO: 1465551 - DNA, 15 bp, Homo sapiens
agagaccttcaatgt

SEQ ID NO: 1465552 - DNA, 15 bp, Homo sapiens
tagagaccttcaatg

SEQ ID NO: 1465553 - DNA, 15 bp, Homo sapiens
atagagaccttcaat

SEQ ID NO: 1465554 - DNA, 15 bp, Homo sapiens
tatagagaccttcaa

SEQ ID NO: 1465555 - DNA, 15 bp, Homo sapiens
ttatagagaccttca

SEQ ID NO: 1465556 - DNA, 15 bp, Homo sapiens
attatagagaccttc

SEQ ID NO: 1465557 - DNA, 15 bp, Homo sapiens
cattatagagacctt

SEQ ID NO: 1465558 - DNA, 15 bp, Homo sapiens
acattatagagacct

SEQ ID NO: 1465559 - DNA, 15 bp, Homo sapiens
gacattatagagacc

SEQ ID NO: 1465560 - DNA, 15 bp, Homo sapiens
ggacattatagagac

SEQ ID NO: 1465561 - DNA, 15 bp, Homo sapiens
aggacattatagaga

SEQ ID NO: 1465562 - DNA, 15 bp, Homo sapiens
caggacattatagag

SEQ ID NO: 1465563 - DNA, 15 bp, Homo sapiens
acaggacattataga

SEQ ID NO: 1465564 - DNA, 15 bp, Homo sapiens
tacaggacattatag

SEQ ID NO: 1465565 - DNA, 15 bp, Homo sapiens
gtacaggacattata

SEQ ID NO: 1465566 - DNA, 15 bp, Homo sapiens
agtacaggacattat

SEQ ID NO: 1465567 - DNA, 15 bp, Homo sapiens
cagtacaggacatta

SEQ ID NO: 1465568 - DNA, 15 bp, Homo sapiens
ccagtacaggacatt

SEQ ID NO: 1465569 - DNA, 15 bp, Homo sapiens
gccagtacaggacat

SEQ ID NO: 1465570 - DNA, 15 bp, Homo sapiens
ggccagtacaggaca

SEQ ID NO: 1465571 - DNA, 15 bp, Homo sapiens
aggccagtacaggac

SEQ ID NO: 1465572 - DNA, 15 bp, Homo sapiens
gaggccagtacagga

SEQ ID NO: 1465573 - DNA, 15 bp, Homo sapiens
ggaggccagtacagg

SEQ ID NO: 1465574 - DNA, 15 bp, Homo sapiens
aggaggccagtacag

SEQ ID NO: 1465575 - DNA, 15 bp, Homo sapiens
aaggaggccagtaca

SEQ ID NO: 1465576 - DNA, 15 bp, Homo sapiens
taaggaggccagtac

SEQ ID NO: 1465577 - DNA, 15 bp, Homo sapiens
ataaggaggccagta

SEQ ID NO: 1465578 - DNA, 15 bp, Homo sapiens
cataaggaggccagt

SEQ ID NO: 1465579 - DNA, 15 bp, Homo sapiens
ccataaggaggccag

SEQ ID NO: 1465580 - DNA, 15 bp, Homo sapiens
tccataaggaggcca

SEQ ID NO: 1465581 - DNA, 15 bp, Homo sapiens
gtccataaggaggcc

SEQ ID NO: 1465582 - DNA, 15 bp, Homo sapiens
agtccataaggaggc

SEQ ID NO: 1465583 - DNA, 15 bp, Homo sapiens
aagtccataaggagg

SEQ ID NO: 1465584 - DNA, 15 bp, Homo sapiens
taagtccataaggag

SEQ ID NO: 1465585 - DNA, 15 bp, Homo sapiens
ttaagtccataagga

SEQ ID NO: 1465586 - DNA, 15 bp, Homo sapiens
tttaagtccataagg

SEQ ID NO: 1465587 - DNA, 15 bp, Homo sapiens
ctttaagtccataag

SEQ ID NO: 1465588 - DNA, 15 bp, Homo sapiens
actttaagtccataa

SEQ ID NO: 1465589 - DNA, 15 bp, Homo sapiens
aactttaagtccata

SEQ ID NO: 1465590 - DNA, 15 bp, Homo sapiens
gaactttaagtccat

SEQ ID NO: 1465591 - DNA, 15 bp, Homo sapiens
agaactttaagtcca

SEQ ID NO: 1465592 - DNA, 15 bp, Homo sapiens
tagaactttaagtcc

SEQ ID NO: 1465593 - DNA, 15 bp, Homo sapiens
gtagaactttaagtc

SEQ ID NO: 1465594 - DNA, 15 bp, Homo sapiens
agtagaactttaagt

SEQ ID NO: 1465595 - DNA, 15 bp, Homo sapiens
cagtagaactttaag

SEQ ID NO: 1465596 - DNA, 15 bp, Homo sapiens
tcagtagaactttaa

SEQ ID NO: 1465597 - DNA, 15 bp, Homo sapiens
atcagtagaacttta

SEQ ID NO: 1465598 - DNA, 15 bp, Homo sapiens
tatcagtagaacttt

SEQ ID NO: 1465599 - DNA, 15 bp, Homo sapiens
atatcagtagaactt

SEQ ID NO: 1465600 - DNA, 15 bp, Homo sapiens
tatatcagtagaact

SEQ ID NO: 1465601 - DNA, 15 bp, Homo sapiens
gtatatcagtagaac

SEQ ID NO: 1465602 - DNA, 15 bp, Homo sapiens
cgtatatcagtagaa

SEQ ID NO: 1465603 - DNA, 15 bp, Homo sapiens
acgtatatcagtaga

SEQ ID NO: 1465604 - DNA, 15 bp, Homo sapiens
tacgtatatcagtag

SEQ ID NO: 1465605 - DNA, 15 bp, Homo sapiens
ctacgtatatcagta

SEQ ID NO: 1465606 - DNA, 15 bp, Homo sapiens
actacgtatatcagt

SEQ ID NO: 1465607 - DNA, 15 bp, Homo sapiens
cactacgtatatcag

SEQ ID NO: 1465608 - DNA, 15 bp, Homo sapiens
acactacgtatatca

SEQ ID NO: 1465609 - DNA, 15 bp, Homo sapiens
tacactacgtatatc

SEQ ID NO: 1465610 - DNA, 15 bp, Homo sapiens
ctacactacgtatat

SEQ ID NO: 1465611 - DNA, 15 bp, Homo sapiens
cctacactacgtata

SEQ ID NO: 1465612 - DNA, 15 bp, Homo sapiens
ccctacactacgtat

SEQ ID NO: 1465613 - DNA, 15 bp, Homo sapiens
cccctacactacgta

SEQ ID NO: 1465614 - DNA, 15 bp, Homo sapiens
tcccctacactacgt

SEQ ID NO: 1465615 - DNA, 15 bp, Homo sapiens
ctcccctacactacg

SEQ ID NO: 1465616 - DNA, 15 bp, Homo sapiens
cctcccctacactac

SEQ ID NO: 1465617 - DNA, 15 bp, Homo sapiens
tcctcccctacacta

SEQ ID NO: 1465618 - DNA, 15 bp, Homo sapiens
ttcctcccctacact

SEQ ID NO: 1465619 - DNA, 15 bp, Homo sapiens
tttcctcccctacac

SEQ ID NO: 1465620 - DNA, 15 bp, Homo sapiens
ttttcctcccctaca

SEQ ID NO: 1465621 - DNA, 15 bp, Homo sapiens
tttttcctcccctac

SEQ ID NO: 1465622 - DNA, 15 bp, Homo sapiens
gtttttcctccccta

SEQ ID NO: 1465623 - DNA, 15 bp, Homo sapiens
agtttttcctcccct

SEQ ID NO: 1465624 - DNA, 15 bp, Homo sapiens
aagtttttcctcccc

SEQ ID NO: 1465625 - DNA, 15 bp, Homo sapiens
aaagtttttcctccc

SEQ ID NO: 1465626 - DNA, 15 bp, Homo sapiens
aaaagtttttcctcc

SEQ ID NO: 1465627 - DNA, 15 bp, Homo sapiens
gaaaagtttttcctc

SEQ ID NO: 1465628 - DNA, 15 bp, Homo sapiens
agaaaagtttttcct

SEQ ID NO: 1465629 - DNA, 15 bp, Homo sapiens
aagaaaagtttttcc

SEQ ID NO: 1465630 - DNA, 15 bp, Homo sapiens
gaagaaaagtttttc

SEQ ID NO: 1465631 - DNA, 15 bp, Homo sapiens
tgaagaaaagttttt

SEQ ID NO: 1465632 - DNA, 15 bp, Homo sapiens
ttgaagaaaagtttt

SEQ ID NO: 1465633 - DNA, 15 bp, Homo sapiens
gttgaagaaaagttt

SEQ ID NO: 1465634 - DNA, 15 bp, Homo sapiens
ggttgaagaaaagtt

SEQ ID NO: 1465635 - DNA, 15 bp, Homo sapiens
gggttgaagaaaagt

SEQ ID NO: 1465636 - DNA, 15 bp, Homo sapiens
agggttgaagaaaag

SEQ ID NO: 1465637 - DNA, 15 bp, Homo sapiens
gagggttgaagaaaa

SEQ ID NO: 1465638 - DNA, 15 bp, Homo sapiens
cgagggttgaagaaa

SEQ ID NO: 1465639 - DNA, 15 bp, Homo sapiens
acgagggttgaagaa

SEQ ID NO: 1465640 - DNA, 15 bp, Homo sapiens
aacgagggttgaaga

SEQ ID NO: 1465641 - DNA, 15 bp, Homo sapiens
caacgagggttgaag

SEQ ID NO: 1465642 - DNA, 15 bp, Homo sapiens
ccaacgagggttgaa

SEQ ID NO: 1465643 - DNA, 15 bp, Homo sapiens
accaacgagggttga

SEQ ID NO: 1465644 - DNA, 15 bp, Homo sapiens
aaccaacgagggttg

SEQ ID NO: 1465645 - DNA, 15 bp, Homo sapiens
gaaccaacgagggtt

SEQ ID NO: 1465646 - DNA, 15 bp, Homo sapiens
tgaaccaacgagggt

SEQ ID NO: 1465647 - DNA, 15 bp, Homo sapiens
ctgaaccaacgaggg

SEQ ID NO: 1465648 - DNA, 15 bp, Homo sapiens
actgaaccaacgagg

SEQ ID NO: 1465649 - DNA, 15 bp, Homo sapiens
tactgaaccaacgag

SEQ ID NO: 1465650 - DNA, 15 bp, Homo sapiens
ttactgaaccaacga

SEQ ID NO: 1465651 - DNA, 15 bp, Homo sapiens
gttactgaaccaacg

SEQ ID NO: 1465652 - DNA, 15 bp, Homo sapiens
agttactgaaccaac

SEQ ID NO: 1465653 - DNA, 15 bp, Homo sapiens
cagttactgaaccaa

SEQ ID NO: 1465654 - DNA, 15 bp, Homo sapiens
ccagttactgaacca

SEQ ID NO: 1465655 - DNA, 15 bp, Homo sapiens
cccagttactgaacc

SEQ ID NO: 1465656 - DNA, 15 bp, Homo sapiens
ccccagttactgaac

SEQ ID NO: 1465657 - DNA, 15 bp, Homo sapiens
gccccagttactgaa

SEQ ID NO: 1465658 - DNA, 15 bp, Homo sapiens
ggccccagttactga

SEQ ID NO: 1465659 - DNA, 15 bp, Homo sapiens
gggccccagttactg

SEQ ID NO: 1465660 - DNA, 15 bp, Homo sapiens
agggccccagttact

SEQ ID NO: 1465661 - DNA, 15 bp, Homo sapiens
cagggccccagttac

SEQ ID NO: 1465662 - DNA, 15 bp, Homo sapiens
gcagggccccagtta

SEQ ID NO: 1465663 - DNA, 15 bp, Homo sapiens
tgcagggccccagtt

SEQ ID NO: 1465664 - DNA, 15 bp, Homo sapiens
ttgcagggccccagt

SEQ ID NO: 1465665 - DNA, 15 bp, Homo sapiens
tttgcagggccccag

SEQ ID NO: 1465666 - DNA, 15 bp, Homo sapiens
atttgcagggcccca

SEQ ID NO: 1465667 - DNA, 15 bp, Homo sapiens
aatttgcagggcccc

SEQ ID NO: 1465668 - DNA, 15 bp, Homo sapiens
taatttgcagggccc

SEQ ID NO: 1465669 - DNA, 15 bp, Homo sapiens
ttaatttgcagggcc

SEQ ID NO: 1465670 - DNA, 15 bp, Homo sapiens
tttaatttgcagggc

SEQ ID NO: 1465671 - DNA, 15 bp, Homo sapiens
gtttaatttgcaggg

SEQ ID NO: 1465672 - DNA, 15 bp, Homo sapiens
agtttaatttgcagg

SEQ ID NO: 1465673 - DNA, 15 bp, Homo sapiens
cagtttaatttgcag

SEQ ID NO: 1465674 - DNA, 15 bp, Homo sapiens
tcagtttaatttgca

SEQ ID NO: 1465675 - DNA, 15 bp, Homo sapiens
gtcagtttaatttgc

SEQ ID NO: 1465676 - DNA, 15 bp, Homo sapiens
ggtcagtttaatttg

SEQ ID NO: 1465677 - DNA, 15 bp, Homo sapiens
tggtcagtttaattt

SEQ ID NO: 1465678 - DNA, 15 bp, Homo sapiens
ttggtcagtttaatt

SEQ ID NO: 1465679 - DNA, 15 bp, Homo sapiens
tttggtcagtttaat

SEQ ID NO: 1465680 - DNA, 15 bp, Homo sapiens
ttttggtcagtttaa

SEQ ID NO: 1465681 - DNA, 15 bp, Homo sapiens
tttttggtcagttta

SEQ ID NO: 1465682 - DNA, 15 bp, Homo sapiens
atttttggtcagttt

SEQ ID NO: 1465683 - DNA, 15 bp, Homo sapiens
tatttttggtcagtt

SEQ ID NO: 1465684 - DNA, 15 bp, Homo sapiens
ctatttttggtcagt

SEQ ID NO: 1465685 - DNA, 15 bp, Homo sapiens
cctatttttggtcag

SEQ ID NO: 1465686 - DNA, 15 bp, Homo sapiens
gcctatttttggtca

SEQ ID NO: 1465687 - DNA, 15 bp, Homo sapiens
agcctatttttggtc

SEQ ID NO: 1465688 - DNA, 15 bp, Homo sapiens
tagcctatttttggt

SEQ ID NO: 1465689 - DNA, 15 bp, Homo sapiens
ctagcctatttttgg

SEQ ID NO: 1465690 - DNA, 15 bp, Homo sapiens
gctagcctatttttg

SEQ ID NO: 1465691 - DNA, 15 bp, Homo sapiens
tgctagcctattttt

SEQ ID NO: 1465692 - DNA, 15 bp, Homo sapiens
ctgctagcctatttt

SEQ ID NO: 1465693 - DNA, 15 bp, Homo sapiens
cctgctagcctattt

SEQ ID NO: 1465694 - DNA, 15 bp, Homo sapiens
tcctgctagcctatt

SEQ ID NO: 1465695 - DNA, 15 bp, Homo sapiens
atcctgctagcctat

SEQ ID NO: 1465696 - DNA, 15 bp, Homo sapiens
tatcctgctagccta

SEQ ID NO: 1465697 - DNA, 15 bp, Homo sapiens
ttatcctgctagcct

SEQ ID NO: 1465698 - DNA, 15 bp, Homo sapiens
tttatcctgctagcc

SEQ ID NO: 1465699 - DNA, 15 bp, Homo sapiens
atttatcctgctagc

SEQ ID NO: 1465700 - DNA, 15 bp, Homo sapiens
tatttatcctgctag

SEQ ID NO: 1465701 - DNA, 15 bp, Homo sapiens
ctatttatcctgcta

SEQ ID NO: 1465702 - DNA, 15 bp, Homo sapiens
actatttatcctgct

SEQ ID NO: 1465703 - DNA, 15 bp, Homo sapiens
aactatttatcctgc

SEQ ID NO: 1465704 - DNA, 15 bp, Homo sapiens
taactatttatcctg

SEQ ID NO: 1465705 - DNA, 15 bp, Homo sapiens
ataactatttatcct

SEQ ID NO: 1465706 - DNA, 15 bp, Homo sapiens
cataactatttatcc

SEQ ID NO: 1465707 - DNA, 15 bp, Homo sapiens
acataactatttatc

SEQ ID NO: 1465708 - DNA, 15 bp, Homo sapiens
tacataactatttat

SEQ ID NO: 1465709 - DNA, 15 bp, Homo sapiens
atacataactattta

SEQ ID NO: 1465710 - DNA, 15 bp, Homo sapiens
catacataactattt

SEQ ID NO: 1465711 - DNA, 15 bp, Homo sapiens
gcatacataactatt

SEQ ID NO: 1465712 - DNA, 15 bp, Homo sapiens
tgcatacataactat

SEQ ID NO: 1465713 - DNA, 15 bp, Homo sapiens
gtgcatacataacta

SEQ ID NO: 1465714 - DNA, 15 bp, Homo sapiens
ggtgcatacataact

SEQ ID NO: 1465715 - DNA, 15 bp, Homo sapiens
gggtgcatacataac

SEQ ID NO: 1465716 - DNA, 15 bp, Homo sapiens
tgggtgcatacataa

SEQ ID NO: 1465717 - DNA, 15 bp, Homo sapiens
ctgggtgcatacata

SEQ ID NO: 1465718 - DNA, 15 bp, Homo sapiens
tctgggtgcatacat

SEQ ID NO: 1465719 - DNA, 15 bp, Homo sapiens
ctctgggtgcataca

SEQ ID NO: 1465720 - DNA, 15 bp, Homo sapiens
cctctgggtgcatac

SEQ ID NO: 1465721 - DNA, 15 bp, Homo sapiens
gcctctgggtgcata

SEQ ID NO: 1465722 - DNA, 15 bp, Homo sapiens
tgcctctgggtgcat

SEQ ID NO: 1465723 - DNA, 15 bp, Homo sapiens
atgcctctgggtgca

SEQ ID NO: 1465724 - DNA, 15 bp, Homo sapiens
gatgcctctgggtgc

SEQ ID NO: 1465725 - DNA, 15 bp, Homo sapiens
ggatgcctctgggtg

SEQ ID NO: 1465726 - DNA, 15 bp, Homo sapiens
tggatgcctctgggt

SEQ ID NO: 1465727 - DNA, 15 bp, Homo sapiens
gtggatgcctctggg

SEQ ID NO: 1465728 - DNA, 15 bp, Homo sapiens
tgtggatgcctctgg

SEQ ID NO: 1465729 - DNA, 15 bp, Homo sapiens
ctgtggatgcctctg

SEQ ID NO: 1465730 - DNA, 15 bp, Homo sapiens
tctgtggatgcctct

SEQ ID NO: 1465731 - DNA, 15 bp, Homo sapiens
ttctgtggatgcctc

SEQ ID NO: 1465732 - DNA, 15 bp, Homo sapiens
tttctgtggatgcct

SEQ ID NO: 1465733 - DNA, 15 bp, Homo sapiens
gtttctgtggatgcc

SEQ ID NO: 1465734 - DNA, 15 bp, Homo sapiens
tgtttctgtggatgc

SEQ ID NO: 1465735 - DNA, 15 bp, Homo sapiens
ttgtttctgtggatg

SEQ ID NO: 1465736 - DNA, 15 bp, Homo sapiens
ttttgtttctgtgga

SEQ ID NO: 1465737 - DNA, 15 bp, Homo sapiens
attttgtttctgtgg

SEQ ID NO: 1465738 - DNA, 15 bp, Homo sapiens
cattttgtttctgtg

SEQ ID NO: 1465739 - DNA, 15 bp, Homo sapiens
tcattttgtttctgt

SEQ ID NO: 1465740 - DNA, 15 bp, Homo sapiens
ttcattttgtttctg

SEQ ID NO: 1465741 - DNA, 15 bp, Homo sapiens
cttcattttgtttct

SEQ ID NO: 1465742 - DNA, 15 bp, Homo sapiens
tcttcattttgtttc

SEQ ID NO: 1465743 - DNA, 15 bp, Homo sapiens
gtcttcattttgttt

SEQ ID NO: 1465744 - DNA, 15 bp, Homo sapiens
tgtcttcattttgtt

SEQ ID NO: 1465745 - DNA, 15 bp, Homo sapiens
ttgtcttcattttgt

SEQ ID NO: 1465746 - DNA, 15 bp, Homo sapiens
tttgtcttcattttg

SEQ ID NO: 1465747 - DNA, 15 bp, Homo sapiens
ctttgtcttcatttt

SEQ ID NO: 1465748 - DNA, 15 bp, Homo sapiens
tctttgtcttcattt

SEQ ID NO: 1465749 - DNA, 15 bp, Homo sapiens
ttctttgtcttcatt

SEQ ID NO: 1465750 - DNA, 15 bp, Homo sapiens
tttctttgtcttcat

SEQ ID NO: 1465751 - DNA, 15 bp, Homo sapiens
gtttctttgtcttca

SEQ ID NO: 1465752 - DNA, 15 bp, Homo sapiens
tgtttctttgtcttc

SEQ ID NO: 1465753 - DNA, 15 bp, Homo sapiens
ctgtttctttgtctt

SEQ ID NO: 1465754 - DNA, 15 bp, Homo sapiens
tctgtttctttgtct

SEQ ID NO: 1465755 - DNA, 15 bp, Homo sapiens
gtctgtttctttgtc

SEQ ID NO: 1465756 - DNA, 15 bp, Homo sapiens
agtctgtttctttgt

SEQ ID NO: 1465757 - DNA, 15 bp, Homo sapiens
aagtctgtttctttg

SEQ ID NO: 1465758 - DNA, 15 bp, Homo sapiens
caagtctgtttcttt

SEQ ID NO: 1465759 - DNA, 15 bp, Homo sapiens
ccaagtctgtttctt

SEQ ID NO: 1465760 - DNA, 15 bp, Homo sapiens
tccaagtctgtttct

SEQ ID NO: 1465761 - DNA, 15 bp, Homo sapiens
ctccaagtctgtttc

SEQ ID NO: 1465762 - DNA, 15 bp, Homo sapiens
cctccaagtctgttt

SEQ ID NO: 1465763 - DNA, 15 bp, Homo sapiens
gcctccaagtctgtt

SEQ ID NO: 1465764 - DNA, 15 bp, Homo sapiens
agcctccaagtctgt

SEQ ID NO: 1465765 - DNA, 15 bp, Homo sapiens
aagcctccaagtctg

SEQ ID NO: 1465766 - DNA, 15 bp, Homo sapiens
aaagcctccaagtct

SEQ ID NO: 1465767 - DNA, 15 bp, Homo sapiens
taaagcctccaagtc

SEQ ID NO: 1465768 - DNA, 15 bp, Homo sapiens
ataaagcctccaagt

SEQ ID NO: 1465769 - DNA, 15 bp, Homo sapiens
tataaagcctccaag

SEQ ID NO: 1465770 - DNA, 15 bp, Homo sapiens
atataaagcctccaa

SEQ ID NO: 1465771 - DNA, 15 bp, Homo sapiens
tatataaagcctcca

SEQ ID NO: 1465772 - DNA, 15 bp, Homo sapiens
gtatataaagcctcc

SEQ ID NO: 1465773 - DNA, 15 bp, Homo sapiens
ggtatataaagcctc

SEQ ID NO: 1465774 - DNA, 15 bp, Homo sapiens
tggtatataaagcct

SEQ ID NO: 1465775 - DNA, 15 bp, Homo sapiens
atggtatataaagcc

SEQ ID NO: 1465776 - DNA, 15 bp, Homo sapiens
aatggtatataaagc

SEQ ID NO: 1465777 - DNA, 15 bp, Homo sapiens
aaatggtatataaag

SEQ ID NO: 1465778 - DNA, 15 bp, Homo sapiens
aaaatggtatataaa

SEQ ID NO: 1465779 - DNA, 15 bp, Homo sapiens
taaaatggtatataa

SEQ ID NO: 1465780 - DNA, 15 bp, Homo sapiens
ttaaaatggtatata

SEQ ID NO: 1465781 - DNA, 15 bp, Homo sapiens
gttaaaatggtatat

SEQ ID NO: 1465782 - DNA, 15 bp, Homo sapiens
tgttaaaatggtata

SEQ ID NO: 1465783 - DNA, 15 bp, Homo sapiens
ttgttaaaatggtat

SEQ ID NO: 1465784 - DNA, 15 bp, Homo sapiens
tttgttaaaatggta

SEQ ID NO: 1465785 - DNA, 15 bp, Homo sapiens
gtttgttaaaatggt

SEQ ID NO: 1465786 - DNA, 15 bp, Homo sapiens
tgtttgttaaaatgg

SEQ ID NO: 1465787 - DNA, 15 bp, Homo sapiens
ctgtttgttaaaatg

SEQ ID NO: 1465788 - DNA, 15 bp, Homo sapiens
gctgtttgttaaaat

SEQ ID NO: 1465789 - DNA, 15 bp, Homo sapiens
tgctgtttgttaaaa

SEQ ID NO: 1465790 - DNA, 15 bp, Homo sapiens
ctgctgtttgttaaa

SEQ ID NO: 1465791 - DNA, 15 bp, Homo sapiens
actgctgtttgttaa

SEQ ID NO: 1465792 - DNA, 15 bp, Homo sapiens
tactgctgtttgtta

SEQ ID NO: 1465793 - DNA, 15 bp, Homo sapiens
atactgctgtttgtt

SEQ ID NO: 1465794 - DNA, 15 bp, Homo sapiens
tatactgctgtttgt

SEQ ID NO: 1465795 - DNA, 15 bp, Homo sapiens
ttatactgctgtttg

SEQ ID NO: 1465796 - DNA, 15 bp, Homo sapiens
tttatactgctgttt

SEQ ID NO: 1465797 - DNA, 15 bp, Homo sapiens
ctttatactgctgtt

SEQ ID NO: 1465798 - DNA, 15 bp, Homo sapiens
tctttatactgctgt

SEQ ID NO: 1465799 - DNA, 15 bp, Homo sapiens
ttctttatactgctg

SEQ ID NO: 1465800 - DNA, 15 bp, Homo sapiens
cttctttatactgct

SEQ ID NO: 1465801 - DNA, 15 bp, Homo sapiens
acttctttatactgc

SEQ ID NO: 1465802 - DNA, 15 bp, Homo sapiens
cacttctttatactg

SEQ ID NO: 1465803 - DNA, 15 bp, Homo sapiens
ccacttctttatact

SEQ ID NO: 1465804 - DNA, 15 bp, Homo sapiens
gccacttctttatac

SEQ ID NO: 1465805 - DNA, 15 bp, Homo sapiens
tgccacttctttata

SEQ ID NO: 1465806 - DNA, 15 bp, Homo sapiens
ttgccacttctttat

SEQ ID NO: 1465807 - DNA, 15 bp, Homo sapiens
cttgccacttcttta

SEQ ID NO: 1465808 - DNA, 15 bp, Homo sapiens
tcttgccacttcttt

SEQ ID NO: 1465809 - DNA, 15 bp, Homo sapiens
gtcttgccacttctt

SEQ ID NO: 1465810 - DNA, 15 bp, Homo sapiens
tgtcttgccacttct

SEQ ID NO: 1465811 - DNA, 15 bp, Homo sapiens
ttgtcttgccacttc

SEQ ID NO: 1465812 - DNA, 15 bp, Homo sapiens
tttgtcttgccactt

SEQ ID NO: 1465813 - DNA, 15 bp, Homo sapiens
ctttgtcttgccact

SEQ ID NO: 1465814 - DNA, 15 bp, Homo sapiens
cctttgtcttgccac

SEQ ID NO: 1465815 - DNA, 15 bp, Homo sapiens
tcctttgtcttgcca

SEQ ID NO: 1465816 - DNA, 15 bp, Homo sapiens
ttcctttgtcttgcc

SEQ ID NO: 1465817 - DNA, 15 bp, Homo sapiens
tttcctttgtcttgc

SEQ ID NO: 1465818 - DNA, 15 bp, Homo sapiens
ctttcctttgtcttg

SEQ ID NO: 1465819 - DNA, 15 bp, Homo sapiens
cctttcctttgtctt

SEQ ID NO: 1465820 - DNA, 15 bp, Homo sapiens
ccctttcctttgtct

SEQ ID NO: 1465821 - DNA, 15 bp, Homo sapiens
tccctttcctttgtc

SEQ ID NO: 1465822 - DNA, 15 bp, Homo sapiens
ctccctttcctttgt

SEQ ID NO: 1465823 - DNA, 15 bp, Homo sapiens
actccctttcctttg

SEQ ID NO: 1465824 - DNA, 15 bp, Homo sapiens
aactccctttccttt

SEQ ID NO: 1465825 - DNA, 15 bp, Homo sapiens
gaactccctttcctt

SEQ ID NO: 1465826 - DNA, 15 bp, Homo sapiens
tgaactccctttcct

SEQ ID NO: 1465827 - DNA, 15 bp, Homo sapiens
ctgaactccctttcc

SEQ ID NO: 1465828 - DNA, 15 bp, Homo sapiens
gctgaactccctttc

SEQ ID NO: 1465829 - DNA, 15 bp, Homo sapiens
ggctgaactcccttt

SEQ ID NO: 1465830 - DNA, 15 bp, Homo sapiens
aggctgaactccctt

SEQ ID NO: 1465831 - DNA, 15 bp, Homo sapiens
aaggctgaactccct

SEQ ID NO: 1465832 - DNA, 15 bp, Homo sapiens
caaggctgaactccc

SEQ ID NO: 1465833 - DNA, 15 bp, Homo sapiens
acaaggctgaactcc

SEQ ID NO: 1465834 - DNA, 15 bp, Homo sapiens
tacaaggctgaactc

SEQ ID NO: 1465835 - DNA, 15 bp, Homo sapiens
ctacaaggctgaact

SEQ ID NO: 1465836 - DNA, 15 bp, Homo sapiens
cctacaaggctgaac

SEQ ID NO: 1465837 - DNA, 15 bp, Homo sapiens
ccctacaaggctgaa

SEQ ID NO: 1465838 - DNA, 15 bp, Homo sapiens
cccctacaaggctga

SEQ ID NO: 1465839 - DNA, 15 bp, Homo sapiens
acccctacaaggctg

SEQ ID NO: 1465840 - DNA, 15 bp, Homo sapiens
cacccctacaaggct

SEQ ID NO: 1465841 - DNA, 15 bp, Homo sapiens
ccacccctacaaggc

SEQ ID NO: 1465842 - DNA, 15 bp, Homo sapiens
accacccctacaagg

SEQ ID NO: 1465843 - DNA, 15 bp, Homo sapiens
taccacccctacaag

SEQ ID NO: 1465844 - DNA, 15 bp, Homo sapiens
ttaccacccctacaa

SEQ ID NO: 1465845 - DNA, 15 bp, Homo sapiens
tttaccacccctaca

SEQ ID NO: 1465846 - DNA, 15 bp, Homo sapiens
atttaccacccctac

SEQ ID NO: 1465847 - DNA, 15 bp, Homo sapiens
aatttaccaccccta

SEQ ID NO: 1465848 - DNA, 15 bp, Homo sapiens
caatttaccacccct

SEQ ID NO: 1465849 - DNA, 15 bp, Homo sapiens
acaatttaccacccc

SEQ ID NO: 1465850 - DNA, 15 bp, Homo sapiens
cacaatttaccaccc

SEQ ID NO: 1465851 - DNA, 15 bp, Homo sapiens
ccacaatttaccacc

SEQ ID NO: 1465852 - DNA, 15 bp, Homo sapiens
tccacaatttaccac

SEQ ID NO: 1465853 - DNA, 15 bp, Homo sapiens
atccacaatttacca

SEQ ID NO: 1465854 - DNA, 15 bp, Homo sapiens
aatccacaatttacc

SEQ ID NO: 1465855 - DNA, 15 bp, Homo sapiens
aaatccacaatttac

SEQ ID NO: 1465856 - DNA, 15 bp, Homo sapiens
aaaatccacaattta

SEQ ID NO: 1465857 - DNA, 15 bp, Homo sapiens
gaaaatccacaattt

SEQ ID NO: 1465858 - DNA, 15 bp, Homo sapiens
ggaaaatccacaatt

SEQ ID NO: 1465859 - DNA, 15 bp, Homo sapiens
aggaaaatccacaat

SEQ ID NO: 1465860 - DNA, 15 bp, Homo sapiens
caggaaaatccacaa

SEQ ID NO: 1465861 - DNA, 15 bp, Homo sapiens
ccaggaaaatccaca

SEQ ID NO: 1465862 - DNA, 15 bp, Homo sapiens
accaggaaaatccac

SEQ ID NO: 1465863 - DNA, 15 bp, Homo sapiens
taccaggaaaatcca

SEQ ID NO: 1465864 - DNA, 15 bp, Homo sapiens
ataccaggaaaatcc

SEQ ID NO: 1465865 - DNA, 15 bp, Homo sapiens
cataccaggaaaatc

SEQ ID NO: 1465866 - DNA, 15 bp, Homo sapiens
tcataccaggaaaat

SEQ ID NO: 1465867 - DNA, 15 bp, Homo sapiens
ttcataccaggaaaa

SEQ ID NO: 1465868 - DNA, 15 bp, Homo sapiens
tttcataccaggaaa

SEQ ID NO: 1465869 - DNA, 15 bp, Homo sapiens
ctttcataccaggaa

SEQ ID NO: 1465870 - DNA, 15 bp, Homo sapiens
tctttcataccagga

SEQ ID NO: 1465871 - DNA, 15 bp, Homo sapiens
ctctttcataccagg

SEQ ID NO: 1465872 - DNA, 15 bp, Homo sapiens
actctttcataccag

SEQ ID NO: 1465873 - DNA, 15 bp, Homo sapiens
cactctttcatacca

SEQ ID NO: 1465874 - DNA, 15 bp, Homo sapiens
tcactctttcatacc

SEQ ID NO: 1465875 - DNA, 15 bp, Homo sapiens
ttcactctttcatac

SEQ ID NO: 1465876 - DNA, 15 bp, Homo sapiens
cttcactctttcata

SEQ ID NO: 1465877 - DNA, 15 bp, Homo sapiens
ccttcactctttcat

SEQ ID NO: 1465878 - DNA, 15 bp, Homo sapiens
cccttcactctttca

SEQ ID NO: 1465879 - DNA, 15 bp, Homo sapiens
tcccttcactctttc

SEQ ID NO: 1465880 - DNA, 15 bp, Homo sapiens
ctcccttcactcttt

SEQ ID NO: 1465881 - DNA, 15 bp, Homo sapiens
cctcccttcactctt

SEQ ID NO: 1465882 - DNA, 15 bp, Homo sapiens
tcctcccttcactct

SEQ ID NO: 1465883 - DNA, 15 bp, Homo sapiens
gtcctcccttcactc

SEQ ID NO: 1465884 - DNA, 15 bp, Homo sapiens
cgtcctcccttcact

SEQ ID NO: 1465885 - DNA, 15 bp, Homo sapiens
acgtcctcccttcac

SEQ ID NO: 1465886 - DNA, 15 bp, Homo sapiens
aacgtcctcccttca

SEQ ID NO: 1465887 - DNA, 15 bp, Homo sapiens
aaacgtcctcccttc

SEQ ID NO: 1465888 - DNA, 15 bp, Homo sapiens
aaaacgtcctccctt

SEQ ID NO: 1465889 - DNA, 15 bp, Homo sapiens
gaaaacgtcctccct

SEQ ID NO: 1465890 - DNA, 15 bp, Homo sapiens
agaaaacgtcctccc

SEQ ID NO: 1465891 - DNA, 15 bp, Homo sapiens
aagaaaacgtcctcc

SEQ ID NO: 1465892 - DNA, 15 bp, Homo sapiens
taagaaaacgtcctc

SEQ ID NO: 1465893 - DNA, 15 bp, Homo sapiens
ttaagaaaacgtcct

SEQ ID NO: 1465894 - DNA, 15 bp, Homo sapiens
tttaagaaaacgtcc

SEQ ID NO: 1465895 - DNA, 15 bp, Homo sapiens
gtttaagaaaacgtc

SEQ ID NO: 1465896 - DNA, 15 bp, Homo sapiens
tgtttaagaaaacgt

SEQ ID NO: 1465897 - DNA, 15 bp, Homo sapiens
ttgtttaagaaaacg

SEQ ID NO: 1465898 - DNA, 15 bp, Homo sapiens
tttgtttaagaaaac

SEQ ID NO: 1465899 - DNA, 15 bp, Homo sapiens
tttttgtttaagaaa

SEQ ID NO: 1465900 - DNA, 15 bp, Homo sapiens
atttttgtttaagaa

SEQ ID NO: 1465901 - DNA, 15 bp, Homo sapiens
aatttttgtttaaga

SEQ ID NO: 1465902 - DNA, 15 bp, Homo sapiens
aaatttttgtttaag

SEQ ID NO: 1465903 - DNA, 15 bp, Homo sapiens
taaatttttgtttaa

SEQ ID NO: 1465904 - DNA, 15 bp, Homo sapiens
ataaatttttgttta

SEQ ID NO: 1465905 - DNA, 15 bp, Homo sapiens
cataaatttttgttt

SEQ ID NO: 1465906 - DNA, 15 bp, Homo sapiens
gcataaatttttgtt

SEQ ID NO: 1465907 - DNA, 15 bp, Homo sapiens
ggcataaatttttgt

SEQ ID NO: 1465908 - DNA, 15 bp, Homo sapiens
gggcataaatttttg

SEQ ID NO: 1465909 - DNA, 15 bp, Homo sapiens
agggcataaattttt

SEQ ID NO: 1465910 - DNA, 15 bp, Homo sapiens
cagggcataaatttt

SEQ ID NO: 1465911 - DNA, 15 bp, Homo sapiens
gcagggcataaattt

SEQ ID NO: 1465912 - DNA, 15 bp, Homo sapiens
agcagggcataaatt

SEQ ID NO: 1465913 - DNA, 15 bp, Homo sapiens
aagcagggcataaat

SEQ ID NO: 1465914 - DNA, 15 bp, Homo sapiens
aaagcagggcataaa

SEQ ID NO: 1465915 - DNA, 15 bp, Homo sapiens
gaaagcagggcataa

SEQ ID NO: 1465916 - DNA, 15 bp, Homo sapiens
tgaaagcagggcata

SEQ ID NO: 1465917 - DNA, 15 bp, Homo sapiens
ttgaaagcagggcat

SEQ ID NO: 1465918 - DNA, 15 bp, Homo sapiens
cttgaaagcagggca

SEQ ID NO: 1465919 - DNA, 15 bp, Homo sapiens
gcttgaaagcagggc

SEQ ID NO: 1465920 - DNA, 15 bp, Homo sapiens
tgcttgaaagcaggg

SEQ ID NO: 1465921 - DNA, 15 bp, Homo sapiens
ttgcttgaaagcagg

SEQ ID NO: 1465922 - DNA, 15 bp, Homo sapiens
cttgcttgaaagcag

SEQ ID NO: 1465923 - DNA, 15 bp, Homo sapiens
acttgcttgaaagca

SEQ ID NO: 1465924 - DNA, 15 bp, Homo sapiens
tacttgcttgaaagc

SEQ ID NO: 1465925 - DNA, 15 bp, Homo sapiens
ctacttgcttgaaag

SEQ ID NO: 1465926 - DNA, 15 bp, Homo sapiens
cctacttgcttgaaa

SEQ ID NO: 1465927 - DNA, 15 bp, Homo sapiens
ccctacttgcttgaa

SEQ ID NO: 1465928 - DNA, 15 bp, Homo sapiens
cccctacttgcttga

SEQ ID NO: 1465929 - DNA, 15 bp, Homo sapiens
ccccctacttgcttg

SEQ ID NO: 1465930 - DNA, 15 bp, Homo sapiens
tccccctacttgctt

SEQ ID NO: 1465931 - DNA, 15 bp, Homo sapiens
ctccccctacttgct

SEQ ID NO: 1465932 - DNA, 15 bp, Homo sapiens
cctccccctacttgc

SEQ ID NO: 1465933 - DNA, 15 bp, Homo sapiens
ccctccccctacttg

SEQ ID NO: 1465934 - DNA, 15 bp, Homo sapiens
gccctccccctactt

SEQ ID NO: 1465935 - DNA, 15 bp, Homo sapiens
tgccctccccctact

SEQ ID NO: 1465936 - DNA, 15 bp, Homo sapiens
gtgccctccccctac

SEQ ID NO: 1465937 - DNA, 15 bp, Homo sapiens
tgtgccctcccccta

SEQ ID NO: 1465938 - DNA, 15 bp, Homo sapiens
ctgtgccctccccct

SEQ ID NO: 1465939 - DNA, 15 bp, Homo sapiens
tctgtgccctccccc

SEQ ID NO: 1465940 - DNA, 15 bp, Homo sapiens
ctctgtgccctcccc

SEQ ID NO: 1465941 - DNA, 15 bp, Homo sapiens
gctctgtgccctccc

SEQ ID NO: 1465942 - DNA, 15 bp, Homo sapiens
agctctgtgccctcc

SEQ ID NO: 1465943 - DNA, 15 bp, Homo sapiens
aagctctgtgccctc

SEQ ID NO: 1465944 - DNA, 15 bp, Homo sapiens
aaagctctgtgccct

SEQ ID NO: 1465945 - DNA, 15 bp, Homo sapiens
aaaagctctgtgccc

SEQ ID NO: 1465946 - DNA, 15 bp, Homo sapiens
gaaaagctctgtgcc

SEQ ID NO: 1465947 - DNA, 15 bp, Homo sapiens
agaaaagctctgtgc

SEQ ID NO: 1465948 - DNA, 15 bp, Homo sapiens
cagaaaagctctgtg

SEQ ID NO: 1465949 - DNA, 15 bp, Homo sapiens
acagaaaagctctgt

SEQ ID NO: 1465950 - DNA, 15 bp, Homo sapiens
cacagaaaagctctg

SEQ ID NO: 1465951 - DNA, 15 bp, Homo sapiens
gcacagaaaagctct

SEQ ID NO: 1465952 - DNA, 15 bp, Homo sapiens
ggcacagaaaagctc

SEQ ID NO: 1465953 - DNA, 15 bp, Homo sapiens
aggcacagaaaagct

SEQ ID NO: 1465954 - DNA, 15 bp, Homo sapiens
caggcacagaaaagc

SEQ ID NO: 1465955 - DNA, 15 bp, Homo sapiens
gcaggcacagaaaag

SEQ ID NO: 1465956 - DNA, 15 bp, Homo sapiens
agcaggcacagaaaa

SEQ ID NO: 1465957 - DNA, 15 bp, Homo sapiens
tagcaggcacagaaa

SEQ ID NO: 1465958 - DNA, 15 bp, Homo sapiens
atagcaggcacagaa

SEQ ID NO: 1465959 - DNA, 15 bp, Homo sapiens
aatagcaggcacaga

SEQ ID NO: 1465960 - DNA, 15 bp, Homo sapiens
aaatagcaggcacag

SEQ ID NO: 1465961 - DNA, 15 bp, Homo sapiens
gaaatagcaggcaca

SEQ ID NO: 1465962 - DNA, 15 bp, Homo sapiens
agaaatagcaggcac

SEQ ID NO: 1465963 - DNA, 15 bp, Homo sapiens
aagaaatagcaggca

SEQ ID NO: 1465964 - DNA, 15 bp, Homo sapiens
caagaaatagcaggc

SEQ ID NO: 1465965 - DNA, 15 bp, Homo sapiens
tcaagaaatagcagg

SEQ ID NO: 1465966 - DNA, 15 bp, Homo sapiens
atcaagaaatagcag

SEQ ID NO: 1465967 - DNA, 15 bp, Homo sapiens
aatcaagaaatagca

SEQ ID NO: 1465968 - DNA, 15 bp, Homo sapiens
caatcaagaaatagc

SEQ ID NO: 1465969 - DNA, 15 bp, Homo sapiens
gcaatcaagaaatag

SEQ ID NO: 1465970 - DNA, 15 bp, Homo sapiens
ggcaatcaagaaata

SEQ ID NO: 1465971 - DNA, 15 bp, Homo sapiens
aggcaatcaagaaat

SEQ ID NO: 1465972 - DNA, 15 bp, Homo sapiens
aaggcaatcaagaaa

SEQ ID NO: 1465973 - DNA, 15 bp, Homo sapiens
gaaggcaatcaagaa

SEQ ID NO: 1465974 - DNA, 15 bp, Homo sapiens
tgaaggcaatcaaga

SEQ ID NO: 1465975 - DNA, 15 bp, Homo sapiens
ctgaaggcaatcaag

SEQ ID NO: 1465976 - DNA, 15 bp, Homo sapiens
gctgaaggcaatcaa

SEQ ID NO: 1465977 - DNA, 15 bp, Homo sapiens
agctgaaggcaatca

SEQ ID NO: 1465978 - DNA, 15 bp, Homo sapiens
aagctgaaggcaatc

SEQ ID NO: 1465979 - DNA, 15 bp, Homo sapiens
taagctgaaggcaat

SEQ ID NO: 1465980 - DNA, 15 bp, Homo sapiens
ttaagctgaaggcaa

SEQ ID NO: 1465981 - DNA, 15 bp, Homo sapiens
tttaagctgaaggca

SEQ ID NO: 1465982 - DNA, 15 bp, Homo sapiens
ttttaagctgaaggc

SEQ ID NO: 1465983 - DNA, 15 bp, Homo sapiens
attttaagctgaagg

SEQ ID NO: 1465984 - DNA, 15 bp, Homo sapiens
tattttaagctgaag

SEQ ID NO: 1465985 - DNA, 15 bp, Homo sapiens
ttattttaagctgaa

SEQ ID NO: 1465986 - DNA, 15 bp, Homo sapiens
attattttaagctga

SEQ ID NO: 1465987 - DNA, 15 bp, Homo sapiens
aattattttaagctg

SEQ ID NO: 1465988 - DNA, 15 bp, Homo sapiens
gaattattttaagct

SEQ ID NO: 1465989 - DNA, 15 bp, Homo sapiens
agaattattttaagc

SEQ ID NO: 1465990 - DNA, 15 bp, Homo sapiens
aagaattattttaag

SEQ ID NO: 1465991 - DNA, 15 bp, Homo sapiens
taagaattattttaa

SEQ ID NO: 1465992 - DNA, 15 bp, Homo sapiens
ataagaattatttta

SEQ ID NO: 1465993 - DNA, 15 bp, Homo sapiens
cataagaattatttt

SEQ ID NO: 1465994 - DNA, 15 bp, Homo sapiens
acataagaattattt

SEQ ID NO: 1465995 - DNA, 15 bp, Homo sapiens
gacataagaattatt

SEQ ID NO: 1465996 - DNA, 15 bp, Homo sapiens
tgacataagaattat

SEQ ID NO: 1465997 - DNA, 15 bp, Homo sapiens
ttgacataagaatta

SEQ ID NO: 1465998 - DNA, 15 bp, Homo sapiens
tttgacataagaatt

SEQ ID NO: 1465999 - DNA, 15 bp, Homo sapiens
ctttgacataagaat

SEQ ID NO: 1466000 - DNA, 15 bp, Homo sapiens
tctttgacataagaa

SEQ ID NO: 1466001 - DNA, 15 bp, Homo sapiens
ctctttgacataaga

SEQ ID NO: 1466002 - DNA, 15 bp, Homo sapiens
cctctttgacataag

SEQ ID NO: 1466003 - DNA, 15 bp, Homo sapiens
tcctctttgacataa

SEQ ID NO: 1466004 - DNA, 15 bp, Homo sapiens
ttcctctttgacata

SEQ ID NO: 1466005 - DNA, 15 bp, Homo sapiens
tttcctctttgacat

SEQ ID NO: 1466006 - DNA, 15 bp, Homo sapiens
ttttcctctttgaca

SEQ ID NO: 1466007 - DNA, 15 bp, Homo sapiens
attttcctctttgac

SEQ ID NO: 1466008 - DNA, 15 bp, Homo sapiens
aattttcctctttga

SEQ ID NO: 1466009 - DNA, 15 bp, Homo sapiens
aaattttcctctttg

SEQ ID NO: 1466010 - DNA, 15 bp, Homo sapiens
aaaattttcctcttt

SEQ ID NO: 1466011 - DNA, 15 bp, Homo sapiens
caaaattttcctctt

SEQ ID NO: 1466012 - DNA, 15 bp, Homo sapiens
ccaaaattttcctct

SEQ ID NO: 1466013 - DNA, 15 bp, Homo sapiens
cccaaaattttcctc

SEQ ID NO: 1466014 - DNA, 15 bp, Homo sapiens
ccccaaaattttcct

SEQ ID NO: 1466015 - DNA, 15 bp, Homo sapiens
accccaaaattttcc

SEQ ID NO: 1466016 - DNA, 15 bp, Homo sapiens
caccccaaaattttc

SEQ ID NO: 1466017 - DNA, 15 bp, Homo sapiens
ccaccccaaaatttt

SEQ ID NO: 1466018 - DNA, 15 bp, Homo sapiens
gccaccccaaaattt

SEQ ID NO: 1466019 - DNA, 15 bp, Homo sapiens
tgccaccccaaaatt

SEQ ID NO: 1466020 - DNA, 15 bp, Homo sapiens
atgccaccccaaaat

SEQ ID NO: 1466021 - DNA, 15 bp, Homo sapiens
tatgccaccccaaaa

SEQ ID NO: 1466022 - DNA, 15 bp, Homo sapiens
gtatgccaccccaaa

SEQ ID NO: 1466023 - DNA, 15 bp, Homo sapiens
agtatgccaccccaa

SEQ ID NO: 1466024 - DNA, 15 bp, Homo sapiens
gagtatgccacccca

SEQ ID NO: 1466025 - DNA, 15 bp, Homo sapiens
agagtatgccacccc

SEQ ID NO: 1466026 - DNA, 15 bp, Homo sapiens
cagagtatgccaccc

SEQ ID NO: 1466027 - DNA, 15 bp, Homo sapiens
tcagagtatgccacc

SEQ ID NO: 1466028 - DNA, 15 bp, Homo sapiens
atcagagtatgccac

SEQ ID NO: 1466029 - DNA, 15 bp, Homo sapiens
gatcagagtatgcca

SEQ ID NO: 1466030 - DNA, 15 bp, Homo sapiens
agatcagagtatgcc

SEQ ID NO: 1466031 - DNA, 15 bp, Homo sapiens
cagatcagagtatgc

SEQ ID NO: 1466032 - DNA, 15 bp, Homo sapiens
acagatcagagtatg

SEQ ID NO: 1466033 - DNA, 15 bp, Homo sapiens
tacagatcagagtat

SEQ ID NO: 1466034 - DNA, 15 bp, Homo sapiens
ctacagatcagagta

SEQ ID NO: 1466035 - DNA, 15 bp, Homo sapiens
tctacagatcagagt

SEQ ID NO: 1466036 - DNA, 15 bp, Homo sapiens
ttctacagatcagag

SEQ ID NO: 1466037 - DNA, 15 bp, Homo sapiens
attctacagatcaga

SEQ ID NO: 1466038 - DNA, 15 bp, Homo sapiens
aattctacagatcag

SEQ ID NO: 1466039 - DNA, 15 bp, Homo sapiens
gaattctacagatca

SEQ ID NO: 1466040 - DNA, 15 bp, Homo sapiens
tgaattctacagatc

SEQ ID NO: 1466041 - DNA, 15 bp, Homo sapiens
ctgaattctacagat

SEQ ID NO: 1466042 - DNA, 15 bp, Homo sapiens
actgaattctacaga

SEQ ID NO: 1466043 - DNA, 15 bp, Homo sapiens
tactgaattctacag

SEQ ID NO: 1466044 - DNA, 15 bp, Homo sapiens
ctactgaattctaca

SEQ ID NO: 1466045 - DNA, 15 bp, Homo sapiens
tctactgaattctac

SEQ ID NO: 1466046 - DNA, 15 bp, Homo sapiens
ttctactgaattcta

SEQ ID NO: 1466047 - DNA, 15 bp, Homo sapiens
attctactgaattct

SEQ ID NO: 1466048 - DNA, 15 bp, Homo sapiens
aattctactgaattc

SEQ ID NO: 1466049 - DNA, 15 bp, Homo sapiens
aaattctactgaatt

SEQ ID NO: 1466050 - DNA, 15 bp, Homo sapiens
aaaattctactgaat

SEQ ID NO: 1466051 - DNA, 15 bp, Homo sapiens
aaaaattctactgaa

SEQ ID NO: 1466052 - DNA, 15 bp, Homo sapiens
taaaaattctactga

SEQ ID NO: 1466053 - DNA, 15 bp, Homo sapiens
ctaaaaattctactg

SEQ ID NO: 1466054 - DNA, 15 bp, Homo sapiens
cctaaaaattctact

SEQ ID NO: 1466055 - DNA, 15 bp, Homo sapiens
ccctaaaaattctac

SEQ ID NO: 1466056 - DNA, 15 bp, Homo sapiens
gccctaaaaattcta

SEQ ID NO: 1466057 - DNA, 15 bp, Homo sapiens
agccctaaaaattct

SEQ ID NO: 1466058 - DNA, 15 bp, Homo sapiens
cagccctaaaaattc

SEQ ID NO: 1466059 - DNA, 15 bp, Homo sapiens
tcagccctaaaaatt

SEQ ID NO: 1466060 - DNA, 15 bp, Homo sapiens
ttcagccctaaaaat

SEQ ID NO: 1466061 - DNA, 15 bp, Homo sapiens
attcagccctaaaaa

SEQ ID NO: 1466062 - DNA, 15 bp, Homo sapiens
gattcagccctaaaa

SEQ ID NO: 1466063 - DNA, 15 bp, Homo sapiens
agattcagccctaaa

SEQ ID NO: 1466064 - DNA, 15 bp, Homo sapiens
tagattcagccctaa

SEQ ID NO: 1466065 - DNA, 15 bp, Homo sapiens
atagattcagcccta

SEQ ID NO: 1466066 - DNA, 15 bp, Homo sapiens
gatagattcagccct

SEQ ID NO: 1466067 - DNA, 15 bp, Homo sapiens
tgatagattcagccc

SEQ ID NO: 1466068 - DNA, 15 bp, Homo sapiens
ttgatagattcagcc

SEQ ID NO: 1466069 - DNA, 15 bp, Homo sapiens
cttgatagattcagc

SEQ ID NO: 1466070 - DNA, 15 bp, Homo sapiens
ccttgatagattcag

SEQ ID NO: 1466071 - DNA, 15 bp, Homo sapiens
accttgatagattca

SEQ ID NO: 1466072 - DNA, 15 bp, Homo sapiens
aaccttgatagattc

SEQ ID NO: 1466073 - DNA, 15 bp, Homo sapiens
taaccttgatagatt

SEQ ID NO: 1466074 - DNA, 15 bp, Homo sapiens
ataaccttgatagat

SEQ ID NO: 1466075 - DNA, 15 bp, Homo sapiens
cataaccttgataga

SEQ ID NO: 1466076 - DNA, 15 bp, Homo sapiens
acataaccttgatag

SEQ ID NO: 1466077 - DNA, 15 bp, Homo sapiens
aacataaccttgata

SEQ ID NO: 1466078 - DNA, 15 bp, Homo sapiens
caacataaccttgat

SEQ ID NO: 1466079 - DNA, 15 bp, Homo sapiens
tcaacataaccttga

SEQ ID NO: 1466080 - DNA, 15 bp, Homo sapiens
gtcaacataaccttg

SEQ ID NO: 1466081 - DNA, 15 bp, Homo sapiens
tgtcaacataacctt

SEQ ID NO: 1466082 - DNA, 15 bp, Homo sapiens
gtgtcaacataacct

SEQ ID NO: 1466083 - DNA, 15 bp, Homo sapiens
tgtgtcaacataacc

SEQ ID NO: 1466084 - DNA, 15 bp, Homo sapiens
atgtgtcaacataac

SEQ ID NO: 1466085 - DNA, 15 bp, Homo sapiens
aatgtgtcaacataa

SEQ ID NO: 1466086 - DNA, 15 bp, Homo sapiens
gaatgtgtcaacata

SEQ ID NO: 1466087 - DNA, 15 bp, Homo sapiens
tgaatgtgtcaacat

SEQ ID NO: 1466088 - DNA, 15 bp, Homo sapiens
ttgaatgtgtcaaca

SEQ ID NO: 1466089 - DNA, 15 bp, Homo sapiens
tttgaatgtgtcaac

SEQ ID NO: 1466090 - DNA, 15 bp, Homo sapiens
ttttgaatgtgtcaa

SEQ ID NO: 1466091 - DNA, 15 bp, Homo sapiens
gttttgaatgtgtca

SEQ ID NO: 1466092 - DNA, 15 bp, Homo sapiens
tgttttgaatgtgtc

SEQ ID NO: 1466093 - DNA, 15 bp, Homo sapiens
atgttttgaatgtgt

SEQ ID NO: 1466094 - DNA, 15 bp, Homo sapiens
tatgttttgaatgtg

SEQ ID NO: 1466095 - DNA, 15 bp, Homo sapiens
atatgttttgaatgt

SEQ ID NO: 1466096 - DNA, 15 bp, Homo sapiens
aatatgttttgaatg

SEQ ID NO: 1466097 - DNA, 15 bp, Homo sapiens
gaatatgttttgaat

SEQ ID NO: 1466098 - DNA, 15 bp, Homo sapiens
tgaatatgttttgaa

SEQ ID NO: 1466099 - DNA, 15 bp, Homo sapiens
ttgaatatgttttga

SEQ ID NO: 1466100 - DNA, 15 bp, Homo sapiens
cttgaatatgttttg

SEQ ID NO: 1466101 - DNA, 15 bp, Homo sapiens
gcttgaatatgtttt

SEQ ID NO: 1466102 - DNA, 15 bp, Homo sapiens
agcttgaatatgttt

SEQ ID NO: 1466103 - DNA, 15 bp, Homo sapiens
aagcttgaatatgtt

SEQ ID NO: 1466104 - DNA, 15 bp, Homo sapiens
caagcttgaatatgt

SEQ ID NO: 1466105 - DNA, 15 bp, Homo sapiens
gcaagcttgaatatg

SEQ ID NO: 1466106 - DNA, 15 bp, Homo sapiens
tgcaagcttgaatat

SEQ ID NO: 1466107 - DNA, 15 bp, Homo sapiens
gtgcaagcttgaata

SEQ ID NO: 1466108 - DNA, 15 bp, Homo sapiens
tgtgcaagcttgaat

SEQ ID NO: 1466109 - DNA, 15 bp, Homo sapiens
ttgtgcaagcttgaa

SEQ ID NO: 1466110 - DNA, 15 bp, Homo sapiens
attgtgcaagcttga

SEQ ID NO: 1466111 - DNA, 15 bp, Homo sapiens
tattgtgcaagcttg

SEQ ID NO: 1466112 - DNA, 15 bp, Homo sapiens
ttattgtgcaagctt

SEQ ID NO: 1466113 - DNA, 15 bp, Homo sapiens
gttattgtgcaagct

SEQ ID NO: 1466114 - DNA, 15 bp, Homo sapiens
agttattgtgcaagc

SEQ ID NO: 1466115 - DNA, 15 bp, Homo sapiens
aagttattgtgcaag

SEQ ID NO: 1466116 - DNA, 15 bp, Homo sapiens
gaagttattgtgcaa

SEQ ID NO: 1466117 - DNA, 15 bp, Homo sapiens
agaagttattgtgca

SEQ ID NO: 1466118 - DNA, 15 bp, Homo sapiens
tagaagttattgtgc

SEQ ID NO: 1466119 - DNA, 15 bp, Homo sapiens
ttagaagttattgtg

SEQ ID NO: 1466120 - DNA, 15 bp, Homo sapiens
tttagaagttattgt

SEQ ID NO: 1466121 - DNA, 15 bp, Homo sapiens
ttttagaagttattg

SEQ ID NO: 1466122 - DNA, 15 bp, Homo sapiens
tttttagaagttatt

SEQ ID NO: 1466123 - DNA, 15 bp, Homo sapiens
gtttttagaagttat

SEQ ID NO: 1466124 - DNA, 15 bp, Homo sapiens
tgtttttagaagtta

SEQ ID NO: 1466125 - DNA, 15 bp, Homo sapiens
ctgtttttagaagtt

SEQ ID NO: 1466126 - DNA, 15 bp, Homo sapiens
actgtttttagaagt

SEQ ID NO: 1466127 - DNA, 15 bp, Homo sapiens
tactgtttttagaag

SEQ ID NO: 1466128 - DNA, 15 bp, Homo sapiens
ctactgtttttagaa

SEQ ID NO: 1466129 - DNA, 15 bp, Homo sapiens
tctactgtttttaga

SEQ ID NO: 1466130 - DNA, 15 bp, Homo sapiens
atctactgtttttag

SEQ ID NO: 1466131 - DNA, 15 bp, Homo sapiens
tatctactgttttta

SEQ ID NO: 1466132 - DNA, 15 bp, Homo sapiens
ttatctactgttttt

SEQ ID NO: 1466133 - DNA, 15 bp, Homo sapiens
tttatctactgtttt

SEQ ID NO: 1466134 - DNA, 15 bp, Homo sapiens
ctttatctactgttt

SEQ ID NO: 1466135 - DNA, 15 bp, Homo sapiens
tctttatctactgtt

SEQ ID NO: 1466136 - DNA, 15 bp, Homo sapiens
ttctttatctactgt

SEQ ID NO: 1466137 - DNA, 15 bp, Homo sapiens
gttctttatctactg

SEQ ID NO: 1466138 - DNA, 15 bp, Homo sapiens
agttctttatctact

SEQ ID NO: 1466139 - DNA, 15 bp, Homo sapiens
tagttctttatctac

SEQ ID NO: 1466140 - DNA, 15 bp, Homo sapiens
ttagttctttatcta

SEQ ID NO: 1466141 - DNA, 15 bp, Homo sapiens
tttagttctttatct

SEQ ID NO: 1466142 - DNA, 15 bp, Homo sapiens
ttttagttctttatc

SEQ ID NO: 1466143 - DNA, 15 bp, Homo sapiens
attttagttctttat

SEQ ID NO: 1466144 - DNA, 15 bp, Homo sapiens
gattttagttcttta

SEQ ID NO: 1466145 - DNA, 15 bp, Homo sapiens
tgattttagttcttt

SEQ ID NO: 1466146 - DNA, 15 bp, Homo sapiens
ttgattttagttctt

SEQ ID NO: 1466147 - DNA, 15 bp, Homo sapiens
attgattttagttct

SEQ ID NO: 1466148 - DNA, 15 bp, Homo sapiens
tattgattttagttc

SEQ ID NO: 1466149 - DNA, 15 bp, Homo sapiens
ctattgattttagtt

SEQ ID NO: 1466150 - DNA, 15 bp, Homo sapiens
actattgattttagt

SEQ ID NO: 1466151 - DNA, 15 bp, Homo sapiens
aactattgattttag

SEQ ID NO: 1466152 - DNA, 15 bp, Homo sapiens
caactattgatttta

SEQ ID NO: 1466153 - DNA, 15 bp, Homo sapiens
tcaactattgatttt

SEQ ID NO: 1466154 - DNA, 15 bp, Homo sapiens
ttcaactattgattt

SEQ ID NO: 1466155 - DNA, 15 bp, Homo sapiens
tttcaactattgatt

SEQ ID NO: 1466156 - DNA, 15 bp, Homo sapiens
ctttcaactattgat

SEQ ID NO: 1466157 - DNA, 15 bp, Homo sapiens
gctttcaactattga

SEQ ID NO: 1466158 - DNA, 15 bp, Homo sapiens
ggctttcaactattg

SEQ ID NO: 1466159 - DNA, 15 bp, Homo sapiens
aggctttcaactatt

SEQ ID NO: 1466160 - DNA, 15 bp, Homo sapiens
taggctttcaactat

SEQ ID NO: 1466161 - DNA, 15 bp, Homo sapiens
ttaggctttcaacta

SEQ ID NO: 1466162 - DNA, 15 bp, Homo sapiens
attaggctttcaact

SEQ ID NO: 1466163 - DNA, 15 bp, Homo sapiens
aattaggctttcaac

SEQ ID NO: 1466164 - DNA, 15 bp, Homo sapiens
aaattaggctttcaa

SEQ ID NO: 1466165 - DNA, 15 bp, Homo sapiens
taaattaggctttca

SEQ ID NO: 1466166 - DNA, 15 bp, Homo sapiens
ttaaattaggctttc

SEQ ID NO: 1466167 - DNA, 15 bp, Homo sapiens
tttaaattaggcttt

SEQ ID NO: 1466168 - DNA, 15 bp, Homo sapiens
ttttaaattaggctt

SEQ ID NO: 1466169 - DNA, 15 bp, Homo sapiens
tttttaaattaggct

SEQ ID NO: 1466170 - DNA, 15 bp, Homo sapiens
ttttttaaattaggc

SEQ ID NO: 1466171 - DNA, 15 bp, Homo sapiens
tttttttaaattagg

SEQ ID NO: 1466172 - DNA, 15 bp, Homo sapiens
ttttttttaaattag

SEQ ID NO: 1466173 - DNA, 15 bp, Homo sapiens
cttttttttaaatta

SEQ ID NO: 1466174 - DNA, 15 bp, Homo sapiens
gtcttttttttaaat

SEQ ID NO: 1466175 - DNA, 15 bp, Homo sapiens
agtcttttttttaaa

SEQ ID NO: 1466176 - DNA, 15 bp, Homo sapiens
gagtcttttttttaa

SEQ ID NO: 1466177 - DNA, 15 bp, Homo sapiens
agagtctttttttta

SEQ ID NO: 1466178 - DNA, 15 bp, Homo sapiens
gagagtctttttttt

SEQ ID NO: 1466179 - DNA, 15 bp, Homo sapiens
agagagtcttttttt

SEQ ID NO: 1466180 - DNA, 15 bp, Homo sapiens
cagagagtctttttt

SEQ ID NO: 1466181 - DNA, 15 bp, Homo sapiens
ccagagagtcttttt

SEQ ID NO: 1466182 - DNA, 15 bp, Homo sapiens
gccagagagtctttt

SEQ ID NO: 1466183 - DNA, 15 bp, Homo sapiens
agccagagagtcttt

SEQ ID NO: 1466184 - DNA, 15 bp, Homo sapiens
cagccagagagtctt

SEQ ID NO: 1466185 - DNA, 15 bp, Homo sapiens
ccagccagagagtct

SEQ ID NO: 1466186 - DNA, 15 bp, Homo sapiens
cccagccagagagtc

SEQ ID NO: 1466187 - DNA, 15 bp, Homo sapiens
gcccagccagagagt

SEQ ID NO: 1466188 - DNA, 15 bp, Homo sapiens
cgcccagccagagag

SEQ ID NO: 1466189 - DNA, 15 bp, Homo sapiens
acgcccagccagaga

SEQ ID NO: 1466190 - DNA, 15 bp, Homo sapiens
cacgcccagccagag

SEQ ID NO: 1466191 - DNA, 15 bp, Homo sapiens
ccacgcccagccaga

SEQ ID NO: 1466192 - DNA, 15 bp, Homo sapiens
accacgcccagccag

SEQ ID NO: 1466193 - DNA, 15 bp, Homo sapiens
caccacgcccagcca

SEQ ID NO: 1466194 - DNA, 15 bp, Homo sapiens
tcgtgagccaccacg

SEQ ID NO: 1466195 - DNA, 15 bp, Homo sapiens
gtcgtgagccaccac

SEQ ID NO: 1466196 - DNA, 15 bp, Homo sapiens
agtcgtgagccacca

SEQ ID NO: 1466197 - DNA, 15 bp, Homo sapiens
cagtcgtgagccacc

SEQ ID NO: 1466198 - DNA, 15 bp, Homo sapiens
acagtcgtgagccac

SEQ ID NO: 1466199 - DNA, 15 bp, Homo sapiens
tacagtcgtgagcca

SEQ ID NO: 1466200 - DNA, 15 bp, Homo sapiens
ttacagtcgtgagcc

SEQ ID NO: 1466201 - DNA, 15 bp, Homo sapiens
attacagtcgtgagc

SEQ ID NO: 1466202 - DNA, 15 bp, Homo sapiens
gattacagtcgtgag

SEQ ID NO: 1466203 - DNA, 15 bp, Homo sapiens
ggattacagtcgtga

SEQ ID NO: 1466204 - DNA, 15 bp, Homo sapiens
gggattacagtcgtg

SEQ ID NO: 1466205 - DNA, 15 bp, Homo sapiens
tgggattacagtcgt

SEQ ID NO: 1466206 - DNA, 15 bp, Homo sapiens
ctgggattacagtcg

SEQ ID NO: 1466207 - DNA, 15 bp, Homo sapiens
gatctgcctgcctcg

SEQ ID NO: 1466208 - DNA, 15 bp, Homo sapiens
ggtgatctgcctgcc

SEQ ID NO: 1466209 - DNA, 15 bp, Homo sapiens
aggtgatctgcctgc

SEQ ID NO: 1466210 - DNA, 15 bp, Homo sapiens
caggtgatctgcctg

SEQ ID NO: 1466211 - DNA, 15 bp, Homo sapiens
tcaggtgatctgcct

SEQ ID NO: 1466212 - DNA, 15 bp, Homo sapiens
ctcaggtgatctgcc

SEQ ID NO: 1466213 - DNA, 15 bp, Homo sapiens
aacctcaggtgatct

SEQ ID NO: 1466214 - DNA, 15 bp, Homo sapiens
tccaacctcaggtga

SEQ ID NO: 1466215 - DNA, 15 bp, Homo sapiens
ttccaacctcaggtg

SEQ ID NO: 1466216 - DNA, 15 bp, Homo sapiens
cttccaacctcaggt

SEQ ID NO: 1466217 - DNA, 15 bp, Homo sapiens
acttccaacctcagg

SEQ ID NO: 1466218 - DNA, 15 bp, Homo sapiens
aacttccaacctcag

SEQ ID NO: 1466219 - DNA, 15 bp, Homo sapiens
aaacttccaacctca

SEQ ID NO: 1466220 - DNA, 15 bp, Homo sapiens
aaaacttccaacctc

SEQ ID NO: 1466221 - DNA, 15 bp, Homo sapiens
caaaacttccaacct

SEQ ID NO: 1466222 - DNA, 15 bp, Homo sapiens
tcaaaacttccaacc

SEQ ID NO: 1466223 - DNA, 15 bp, Homo sapiens
ctcaaaacttccaac

SEQ ID NO: 1466224 - DNA, 15 bp, Homo sapiens
tctcaaaacttccaa

SEQ ID NO: 1466225 - DNA, 15 bp, Homo sapiens
gtctcaaaacttcca

SEQ ID NO: 1466226 - DNA, 15 bp, Homo sapiens
ggtctcaaaacttcc

SEQ ID NO: 1466227 - DNA, 15 bp, Homo sapiens
tggtctcaaaacttc

SEQ ID NO: 1466228 - DNA, 15 bp, Homo sapiens
ctggtctcaaaactt

SEQ ID NO: 1466229 - DNA, 15 bp, Homo sapiens
gctggtctcaaaact

SEQ ID NO: 1466230 - DNA, 15 bp, Homo sapiens
cgctggtctcaaaac

SEQ ID NO: 1466231 - DNA, 15 bp, Homo sapiens
acgctggtctcaaaa

SEQ ID NO: 1466232 - DNA, 15 bp, Homo sapiens
cacgctggtctcaaa

SEQ ID NO: 1466233 - DNA, 15 bp, Homo sapiens
tcacgctggtctcaa

SEQ ID NO: 1466234 - DNA, 15 bp, Homo sapiens
gtcacgctggtctca

SEQ ID NO: 1466235 - DNA, 15 bp, Homo sapiens
tgtcacgctggtctc

SEQ ID NO: 1466236 - DNA, 15 bp, Homo sapiens
ttgtcacgctggtct

SEQ ID NO: 1466237 - DNA, 15 bp, Homo sapiens
tttgtcacgctggtc

SEQ ID NO: 1466238 - DNA, 15 bp, Homo sapiens
gtttgtcacgctggt

SEQ ID NO: 1466239 - DNA, 15 bp, Homo sapiens
tgtttgtcacgctgg

SEQ ID NO: 1466240 - DNA, 15 bp, Homo sapiens
atgtttgtcacgctg

SEQ ID NO: 1466241 - DNA, 15 bp, Homo sapiens
catgtttgtcacgct

SEQ ID NO: 1466242 - DNA, 15 bp, Homo sapiens
ccatgtttgtcacgc

SEQ ID NO: 1466243 - DNA, 15 bp, Homo sapiens
tccatgtttgtcacg

SEQ ID NO: 1466244 - DNA, 15 bp, Homo sapiens
ctccatgtttgtcac

SEQ ID NO: 1466245 - DNA, 15 bp, Homo sapiens
tctccatgtttgtca

SEQ ID NO: 1466246 - DNA, 15 bp, Homo sapiens
ttctccatgtttgtc

SEQ ID NO: 1466247 - DNA, 15 bp, Homo sapiens
tttctccatgtttgt

SEQ ID NO: 1466248 - DNA, 15 bp, Homo sapiens
gtttctccatgtttg

SEQ ID NO: 1466249 - DNA, 15 bp, Homo sapiens
ggtttctccatgttt

SEQ ID NO: 1466250 - DNA, 15 bp, Homo sapiens
tggggtttctccatg

SEQ ID NO: 1466251 - DNA, 15 bp, Homo sapiens
atggggtttctccat

SEQ ID NO: 1466252 - DNA, 15 bp, Homo sapiens
gatggggtttctcca

SEQ ID NO: 1466253 - DNA, 15 bp, Homo sapiens
agatggggtttctcc

SEQ ID NO: 1466254 - DNA, 15 bp, Homo sapiens
gagatggggtttctc

SEQ ID NO: 1466255 - DNA, 15 bp, Homo sapiens
agagatggggtttct

SEQ ID NO: 1466256 - DNA, 15 bp, Homo sapiens
agcccggctaatttt

SEQ ID NO: 1466257 - DNA, 15 bp, Homo sapiens
aagcccggctaattt

SEQ ID NO: 1466258 - DNA, 15 bp, Homo sapiens
caagcccggctaatt

SEQ ID NO: 1466259 - DNA, 15 bp, Homo sapiens
ccaagcccggctaat

SEQ ID NO: 1466260 - DNA, 15 bp, Homo sapiens
accaagcccggctaa

SEQ ID NO: 1466261 - DNA, 15 bp, Homo sapiens
caccaagcccggcta

SEQ ID NO: 1466262 - DNA, 15 bp, Homo sapiens
ccaccaagcccggct

SEQ ID NO: 1466263 - DNA, 15 bp, Homo sapiens
accaccaagcccggc

SEQ ID NO: 1466264 - DNA, 15 bp, Homo sapiens
aaccaccaagcccgg

SEQ ID NO: 1466265 - DNA, 15 bp, Homo sapiens
caaccaccaagcccg

SEQ ID NO: 1466266 - DNA, 15 bp, Homo sapiens
gcaaccaccaagccc

SEQ ID NO: 1466267 - DNA, 15 bp, Homo sapiens
tgcaaccaccaagcc

SEQ ID NO: 1466268 - DNA, 15 bp, Homo sapiens
atgcaaccaccaagc

SEQ ID NO: 1466269 - DNA, 15 bp, Homo sapiens
catgcaaccaccaag

SEQ ID NO: 1466270 - DNA, 15 bp, Homo sapiens
gcatgcaaccaccaa

SEQ ID NO: 1466271 - DNA, 15 bp, Homo sapiens
ggcatgcaaccacca

SEQ ID NO: 1466272 - DNA, 15 bp, Homo sapiens
aggcatgcaaccacc

SEQ ID NO: 1466273 - DNA, 15 bp, Homo sapiens
taggcatgcaaccac

SEQ ID NO: 1466274 - DNA, 15 bp, Homo sapiens
ataggcatgcaacca

SEQ ID NO: 1466275 - DNA, 15 bp, Homo sapiens
tataggcatgcaacc

SEQ ID NO: 1466276 - DNA, 15 bp, Homo sapiens
ttataggcatgcaac

SEQ ID NO: 1466277 - DNA, 15 bp, Homo sapiens
attataggcatgcaa

SEQ ID NO: 1466278 - DNA, 15 bp, Homo sapiens
gattataggcatgca

SEQ ID NO: 1466279 - DNA, 15 bp, Homo sapiens
ggattataggcatgc

SEQ ID NO: 1466280 - DNA, 15 bp, Homo sapiens
catagctgggattat

SEQ ID NO: 1466281 - DNA, 15 bp, Homo sapiens
gcatagctgggatta

SEQ ID NO: 1466282 - DNA, 15 bp, Homo sapiens
tgcatagctgggatt

SEQ ID NO: 1466283 - DNA, 15 bp, Homo sapiens
ctgcatagctgggat

SEQ ID NO: 1466284 - DNA, 15 bp, Homo sapiens
cctgcatagctggga

SEQ ID NO: 1466285 - DNA, 15 bp, Homo sapiens
tcctgcatagctggg

SEQ ID NO: 1466286 - DNA, 15 bp, Homo sapiens
ctcctgcatagctgg

SEQ ID NO: 1466287 - DNA, 15 bp, Homo sapiens
cctcctgcatagctg

SEQ ID NO: 1466288 - DNA, 15 bp, Homo sapiens
gcctcctgcatagct

SEQ ID NO: 1466289 - DNA, 15 bp, Homo sapiens
agcctcctgcatagc

SEQ ID NO: 1466290 - DNA, 15 bp, Homo sapiens
cagcctcctgcatag

SEQ ID NO: 1466291 - DNA, 15 bp, Homo sapiens
tcagcctcctgcata

SEQ ID NO: 1466292 - DNA, 15 bp, Homo sapiens
ctcagcctcctgcat

SEQ ID NO: 1466293 - DNA, 15 bp, Homo sapiens
cctcagcctcctgca

SEQ ID NO: 1466294 - DNA, 15 bp, Homo sapiens
gcctcagcctcctgc

SEQ ID NO: 1466295 - DNA, 15 bp, Homo sapiens
acaatctcggctcac

SEQ ID NO: 1466296 - DNA, 15 bp, Homo sapiens
cacaatctcggctca

SEQ ID NO: 1466297 - DNA, 15 bp, Homo sapiens
gcacaatctcggctc

SEQ ID NO: 1466298 - DNA, 15 bp, Homo sapiens
ggcacaatctcggct

SEQ ID NO: 1466299 - DNA, 15 bp, Homo sapiens
tggcacaatctcggc

SEQ ID NO: 1466300 - DNA, 15 bp, Homo sapiens
atggcacaatctcgg

SEQ ID NO: 1466301 - DNA, 15 bp, Homo sapiens
aatggcacaatctcg

SEQ ID NO: 1466302 - DNA, 15 bp, Homo sapiens
caatggcacaatctc

SEQ ID NO: 1466303 - DNA, 15 bp, Homo sapiens
ttgcaatggcacaat

SEQ ID NO: 1466304 - DNA, 15 bp, Homo sapiens
attgcaatggcacaa

SEQ ID NO: 1466305 - DNA, 15 bp, Homo sapiens
gattgcaatggcaca

SEQ ID NO: 1466306 - DNA, 15 bp, Homo sapiens
ggattgcaatggcac

SEQ ID NO: 1466307 - DNA, 15 bp, Homo sapiens
tggattgcaatggca

SEQ ID NO: 1466308 - DNA, 15 bp, Homo sapiens
ctggattgcaatggc

SEQ ID NO: 1466309 - DNA, 15 bp, Homo sapiens
gctggattgcaatgg

SEQ ID NO: 1466310 - DNA, 15 bp, Homo sapiens
ggctggattgcaatg

SEQ ID NO: 1466311 - DNA, 15 bp, Homo sapiens
aggctggattgcaat

SEQ ID NO: 1466312 - DNA, 15 bp, Homo sapiens
caggctggattgcaa

SEQ ID NO: 1466313 - DNA, 15 bp, Homo sapiens
ccaggctggattgca

SEQ ID NO: 1466314 - DNA, 15 bp, Homo sapiens
cccaggctggattgc

SEQ ID NO: 1466315 - DNA, 15 bp, Homo sapiens
gcccaggctggattg

SEQ ID NO: 1466316 - DNA, 15 bp, Homo sapiens
tgcccaggctggatt

SEQ ID NO: 1466317 - DNA, 15 bp, Homo sapiens
ttgcccaggctggat

SEQ ID NO: 1466318 - DNA, 15 bp, Homo sapiens
cggagtttcgctctt

SEQ ID NO: 1466319 - DNA, 15 bp, Homo sapiens
acggagtttcgctct

SEQ ID NO: 1466320 - DNA, 15 bp, Homo sapiens
gacggagtttcgctc

SEQ ID NO: 1466321 - DNA, 15 bp, Homo sapiens
agacggagtttcgct

SEQ ID NO: 1466322 - DNA, 15 bp, Homo sapiens
gagacggagtttcgc

SEQ ID NO: 1466323 - DNA, 15 bp, Homo sapiens
tgagacggagtttcg

SEQ ID NO: 1466324 - DNA, 15 bp, Homo sapiens
ctgagacggagtttc

SEQ ID NO: 1466325 - DNA, 15 bp, Homo sapiens
tctgagacggagttt

SEQ ID NO: 1466326 - DNA, 15 bp, Homo sapiens
ttctgagacggagtt

SEQ ID NO: 1466327 - DNA, 15 bp, Homo sapiens
tttctgagacggagt

SEQ ID NO: 1466328 - DNA, 15 bp, Homo sapiens
ttttctgagacggag

SEQ ID NO: 1466329 - DNA, 15 bp, Homo sapiens
tttttctgagacgga

SEQ ID NO: 1466330 - DNA, 15 bp, Homo sapiens
ttttttctgagacgg

SEQ ID NO: 1466331 - DNA, 15 bp, Homo sapiens
tttttttctgagacg

SEQ ID NO: 1466332 - DNA, 15 bp, Homo sapiens
ttttttttctgagac

SEQ ID NO: 1466333 - DNA, 15 bp, Homo sapiens
gagtctttttttttt

SEQ ID NO: 1466334 - DNA, 15 bp, Homo sapiens
tgagtcttttttttt

SEQ ID NO: 1466335 - DNA, 15 bp, Homo sapiens
gtgagtctttttttt

SEQ ID NO: 1466336 - DNA, 15 bp, Homo sapiens
ggtgagtcttttttt

SEQ ID NO: 1466337 - DNA, 15 bp, Homo sapiens
tggtgagtctttttt

SEQ ID NO: 1466338 - DNA, 15 bp, Homo sapiens
atggtgagtcttttt

SEQ ID NO: 1466339 - DNA, 15 bp, Homo sapiens
tatggtgagtctttt

SEQ ID NO: 1466340 - DNA, 15 bp, Homo sapiens
ttatggtgagtcttt

SEQ ID NO: 1466341 - DNA, 15 bp, Homo sapiens
gttatggtgagtctt

SEQ ID NO: 1466342 - DNA, 15 bp, Homo sapiens
agttatggtgagtct

SEQ ID NO: 1466343 - DNA, 15 bp, Homo sapiens
aagttatggtgagtc

SEQ ID NO: 1466344 - DNA, 15 bp, Homo sapiens
caagttatggtgagt

SEQ ID NO: 1466345 - DNA, 15 bp, Homo sapiens
acaagttatggtgag

SEQ ID NO: 1466346 - DNA, 15 bp, Homo sapiens
tacaagttatggtga

SEQ ID NO: 1466347 - DNA, 15 bp, Homo sapiens
gtacaagttatggtg

SEQ ID NO: 1466348 - DNA, 15 bp, Homo sapiens
agtacaagttatggt

SEQ ID NO: 1466349 - DNA, 15 bp, Homo sapiens
cagtacaagttatgg

SEQ ID NO: 1466350 - DNA, 15 bp, Homo sapiens
ccagtacaagttatg

SEQ ID NO: 1466351 - DNA, 15 bp, Homo sapiens
accagtacaagttat

SEQ ID NO: 1466352 - DNA, 15 bp, Homo sapiens
gaccagtacaagtta

SEQ ID NO: 1466353 - DNA, 15 bp, Homo sapiens
ggaccagtacaagtt

SEQ ID NO: 1466354 - DNA, 15 bp, Homo sapiens
aggaccagtacaagt

SEQ ID NO: 1466355 - DNA, 15 bp, Homo sapiens
aaggaccagtacaag

SEQ ID NO: 1466356 - DNA, 15 bp, Homo sapiens
taaggaccagtacaa

SEQ ID NO: 1466357 - DNA, 15 bp, Homo sapiens
gtaaggaccagtaca

SEQ ID NO: 1466358 - DNA, 15 bp, Homo sapiens
cgtaaggaccagtac

SEQ ID NO: 1466359 - DNA, 15 bp, Homo sapiens
acgtaaggaccagta

SEQ ID NO: 1466360 - DNA, 15 bp, Homo sapiens
gacgtaaggaccagt

SEQ ID NO: 1466361 - DNA, 15 bp, Homo sapiens
tgacgtaaggaccag

SEQ ID NO: 1466362 - DNA, 15 bp, Homo sapiens
ttgacgtaaggacca

SEQ ID NO: 1466363 - DNA, 15 bp, Homo sapiens
tttgacgtaaggacc

SEQ ID NO: 1466364 - DNA, 15 bp, Homo sapiens
atttgacgtaaggac

SEQ ID NO: 1466365 - DNA, 15 bp, Homo sapiens
tatttgacgtaagga

SEQ ID NO: 1466366 - DNA, 15 bp, Homo sapiens
ttatttgacgtaagg

SEQ ID NO: 1466367 - DNA, 15 bp, Homo sapiens
gttatttgacgtaag

SEQ ID NO: 1466368 - DNA, 15 bp, Homo sapiens
tgttatttgacgtaa

SEQ ID NO: 1466369 - DNA, 15 bp, Homo sapiens
gtgttatttgacgta

SEQ ID NO: 1466370 - DNA, 15 bp, Homo sapiens
tgtgttatttgacgt

SEQ ID NO: 1466371 - DNA, 15 bp, Homo sapiens
ttgtgttatttgacg

SEQ ID NO: 1466372 - DNA, 15 bp, Homo sapiens
attgtgttatttgac

SEQ ID NO: 1466373 - DNA, 15 bp, Homo sapiens
gattgtgttatttga

SEQ ID NO: 1466374 - DNA, 15 bp, Homo sapiens
agattgtgttatttg

SEQ ID NO: 1466375 - DNA, 15 bp, Homo sapiens
cagattgtgttattt

SEQ ID NO: 1466376 - DNA, 15 bp, Homo sapiens
gcagattgtgttatt

SEQ ID NO: 1466377 - DNA, 15 bp, Homo sapiens
tgcagattgtgttat

SEQ ID NO: 1466378 - DNA, 15 bp, Homo sapiens
ttgcagattgtgtta

SEQ ID NO: 1466379 - DNA, 15 bp, Homo sapiens
attgcagattgtgtt

SEQ ID NO: 1466380 - DNA, 15 bp, Homo sapiens
cattgcagattgtgt

SEQ ID NO: 1466381 - DNA, 15 bp, Homo sapiens
tcattgcagattgtg

SEQ ID NO: 1466382 - DNA, 15 bp, Homo sapiens
atcattgcagattgt

SEQ ID NO: 1466383 - DNA, 15 bp, Homo sapiens
tatcattgcagattg

SEQ ID NO: 1466384 - DNA, 15 bp, Homo sapiens
atatcattgcagatt

SEQ ID NO: 1466385 - DNA, 15 bp, Homo sapiens
tatatcattgcagat

SEQ ID NO: 1466386 - DNA, 15 bp, Homo sapiens
atatatcattgcaga

SEQ ID NO: 1466387 - DNA, 15 bp, Homo sapiens
tatatatcattgcag

SEQ ID NO: 1466388 - DNA, 15 bp, Homo sapiens
atatatatcattgca

SEQ ID NO: 1466389 - DNA, 15 bp, Homo sapiens
aatatatatcattgc

SEQ ID NO: 1466390 - DNA, 15 bp, Homo sapiens
taatatatatcattg

SEQ ID NO: 1466391 - DNA, 15 bp, Homo sapiens
ctaatatatatcatt

SEQ ID NO: 1466392 - DNA, 15 bp, Homo sapiens
actaatatatatcat

SEQ ID NO: 1466393 - DNA, 15 bp, Homo sapiens
aactaatatatatca

SEQ ID NO: 1466394 - DNA, 15 bp, Homo sapiens
aaactaatatatatc

SEQ ID NO: 1466395 - DNA, 15 bp, Homo sapiens
taaactaatatatat

SEQ ID NO: 1466396 - DNA, 15 bp, Homo sapiens
ctaaactaatatata

SEQ ID NO: 1466397 - DNA, 15 bp, Homo sapiens
cctaaactaatatat

SEQ ID NO: 1466398 - DNA, 15 bp, Homo sapiens
tcctaaactaatata

SEQ ID NO: 1466399 - DNA, 15 bp, Homo sapiens
gtcctaaactaatat

SEQ ID NO: 1466400 - DNA, 15 bp, Homo sapiens
ggtcctaaactaata

SEQ ID NO: 1466401 - DNA, 15 bp, Homo sapiens
aggtcctaaactaat

SEQ ID NO: 1466402 - DNA, 15 bp, Homo sapiens
gaggtcctaaactaa

SEQ ID NO: 1466403 - DNA, 15 bp, Homo sapiens
tgaggtcctaaacta

SEQ ID NO: 1466404 - DNA, 15 bp, Homo sapiens
ctgaggtcctaaact

SEQ ID NO: 1466405 - DNA, 15 bp, Homo sapiens
cctgaggtcctaaac

SEQ ID NO: 1466406 - DNA, 15 bp, Homo sapiens
ccctgaggtcctaaa

SEQ ID NO: 1466407 - DNA, 15 bp, Homo sapiens
accctgaggtcctaa

SEQ ID NO: 1466408 - DNA, 15 bp, Homo sapiens
gaccctgaggtccta

SEQ ID NO: 1466409 - DNA, 15 bp, Homo sapiens
tgaccctgaggtcct

SEQ ID NO: 1466410 - DNA, 15 bp, Homo sapiens
atgaccctgaggtcc

SEQ ID NO: 1466411 - DNA, 15 bp, Homo sapiens
tatgaccctgaggtc

SEQ ID NO: 1466412 - DNA, 15 bp, Homo sapiens
ttatgaccctgaggt

SEQ ID NO: 1466413 - DNA, 15 bp, Homo sapiens
tttatgaccctgagg

SEQ ID NO: 1466414 - DNA, 15 bp, Homo sapiens
gtttatgaccctgag

SEQ ID NO: 1466415 - DNA, 15 bp, Homo sapiens
tgtttatgaccctga

SEQ ID NO: 1466416 - DNA, 15 bp, Homo sapiens
ttgtttatgaccctg

SEQ ID NO: 1466417 - DNA, 15 bp, Homo sapiens
tttgtttatgaccct

SEQ ID NO: 1466418 - DNA, 15 bp, Homo sapiens
ttttgtttatgaccc

SEQ ID NO: 1466419 - DNA, 15 bp, Homo sapiens
gttttgtttatgacc

SEQ ID NO: 1466420 - DNA, 15 bp, Homo sapiens
agttttgtttatgac

SEQ ID NO: 1466421 - DNA, 15 bp, Homo sapiens
cagttttgtttatga

SEQ ID NO: 1466422 - DNA, 15 bp, Homo sapiens
gcagttttgtttatg

SEQ ID NO: 1466423 - DNA, 15 bp, Homo sapiens
ggcagttttgtttat

SEQ ID NO: 1466424 - DNA, 15 bp, Homo sapiens
tggcagttttgttta

SEQ ID NO: 1466425 - DNA, 15 bp, Homo sapiens
atggcagttttgttt

SEQ ID NO: 1466426 - DNA, 15 bp, Homo sapiens
aatggcagttttgtt

SEQ ID NO: 1466427 - DNA, 15 bp, Homo sapiens
gaatggcagttttgt

SEQ ID NO: 1466428 - DNA, 15 bp, Homo sapiens
ggaatggcagttttg

SEQ ID NO: 1466429 - DNA, 15 bp, Homo sapiens
aggaatggcagtttt

SEQ ID NO: 1466430 - DNA, 15 bp, Homo sapiens
caggaatggcagttt

SEQ ID NO: 1466431 - DNA, 15 bp, Homo sapiens
tcaggaatggcagtt

SEQ ID NO: 1466432 - DNA, 15 bp, Homo sapiens
ttcaggaatggcagt

SEQ ID NO: 1466433 - DNA, 15 bp, Homo sapiens
gttcaggaatggcag

SEQ ID NO: 1466434 - DNA, 15 bp, Homo sapiens
agttcaggaatggca

SEQ ID NO: 1466435 - DNA, 15 bp, Homo sapiens
aagttcaggaatggc

SEQ ID NO: 1466436 - DNA, 15 bp, Homo sapiens
aaagttcaggaatgg

SEQ ID NO: 1466437 - DNA, 15 bp, Homo sapiens
gaaagttcaggaatg

SEQ ID NO: 1466438 - DNA, 15 bp, Homo sapiens
agaaagttcaggaat

SEQ ID NO: 1466439 - DNA, 15 bp, Homo sapiens
cagaaagttcaggaa

SEQ ID NO: 1466440 - DNA, 15 bp, Homo sapiens
acagaaagttcagga

SEQ ID NO: 1466441 - DNA, 15 bp, Homo sapiens
tacagaaagttcagg

SEQ ID NO: 1466442 - DNA, 15 bp, Homo sapiens
atacagaaagttcag

SEQ ID NO: 1466443 - DNA, 15 bp, Homo sapiens
tatacagaaagttca

SEQ ID NO: 1466444 - DNA, 15 bp, Homo sapiens
gtatacagaaagttc

SEQ ID NO: 1466445 - DNA, 15 bp, Homo sapiens
agtatacagaaagtt

SEQ ID NO: 1466446 - DNA, 15 bp, Homo sapiens
cagtatacagaaagt

SEQ ID NO: 1466447 - DNA, 15 bp, Homo sapiens
tcagtatacagaaag

SEQ ID NO: 1466448 - DNA, 15 bp, Homo sapiens
ctcagtatacagaaa

SEQ ID NO: 1466449 - DNA, 15 bp, Homo sapiens
gctcagtatacagaa

SEQ ID NO: 1466450 - DNA, 15 bp, Homo sapiens
agctcagtatacaga

SEQ ID NO: 1466451 - DNA, 15 bp, Homo sapiens
gagctcagtatacag

SEQ ID NO: 1466452 - DNA, 15 bp, Homo sapiens
agagctcagtataca

SEQ ID NO: 1466453 - DNA, 15 bp, Homo sapiens
tagagctcagtatac

SEQ ID NO: 1466454 - DNA, 15 bp, Homo sapiens
ttagagctcagtata

SEQ ID NO: 1466455 - DNA, 15 bp, Homo sapiens
attagagctcagtat

SEQ ID NO: 1466456 - DNA, 15 bp, Homo sapiens
tattagagctcagta

SEQ ID NO: 1466457 - DNA, 15 bp, Homo sapiens
gtattagagctcagt

SEQ ID NO: 1466458 - DNA, 15 bp, Homo sapiens
agtattagagctcag

SEQ ID NO: 1466459 - DNA, 15 bp, Homo sapiens
tagtattagagctca

SEQ ID NO: 1466460 - DNA, 15 bp, Homo sapiens
atagtattagagctc

SEQ ID NO: 1466461 - DNA, 15 bp, Homo sapiens
aatagtattagagct

SEQ ID NO: 1466462 - DNA, 15 bp, Homo sapiens
aaatagtattagagc

SEQ ID NO: 1466463 - DNA, 15 bp, Homo sapiens
aaaatagtattagag

SEQ ID NO: 1466464 - DNA, 15 bp, Homo sapiens
gaaaatagtattaga

SEQ ID NO: 1466465 - DNA, 15 bp, Homo sapiens
agaaaatagtattag

SEQ ID NO: 1466466 - DNA, 15 bp, Homo sapiens
aagaaaatagtatta

SEQ ID NO: 1466467 - DNA, 15 bp, Homo sapiens
caagaaaatagtatt

SEQ ID NO: 1466468 - DNA, 15 bp, Homo sapiens
acaagaaaatagtat

SEQ ID NO: 1466469 - DNA, 15 bp, Homo sapiens
cacaagaaaatagta

SEQ ID NO: 1466470 - DNA, 15 bp, Homo sapiens
ccacaagaaaatagt

SEQ ID NO: 1466471 - DNA, 15 bp, Homo sapiens
cccacaagaaaatag

SEQ ID NO: 1466472 - DNA, 15 bp, Homo sapiens
ccccacaagaaaata

SEQ ID NO: 1466473 - DNA, 15 bp, Homo sapiens
accccacaagaaaat

SEQ ID NO: 1466474 - DNA, 15 bp, Homo sapiens
aaccccacaagaaaa

SEQ ID NO: 1466475 - DNA, 15 bp, Homo sapiens
taaccccacaagaaa

SEQ ID NO: 1466476 - DNA, 15 bp, Homo sapiens
gtaaccccacaagaa

SEQ ID NO: 1466477 - DNA, 15 bp, Homo sapiens
tgtaaccccacaaga

SEQ ID NO: 1466478 - DNA, 15 bp, Homo sapiens
atgtaaccccacaag

SEQ ID NO: 1466479 - DNA, 15 bp, Homo sapiens
tatgtaaccccacaa

SEQ ID NO: 1466480 - DNA, 15 bp, Homo sapiens
atatgtaaccccaca

SEQ ID NO: 1466481 - DNA, 15 bp, Homo sapiens
aatatgtaaccccac

SEQ ID NO: 1466482 - DNA, 15 bp, Homo sapiens
gaatatgtaacccca

SEQ ID NO: 1466483 - DNA, 15 bp, Homo sapiens
agaatatgtaacccc

SEQ ID NO: 1466484 - DNA, 15 bp, Homo sapiens
cagaatatgtaaccc

SEQ ID NO: 1466485 - DNA, 15 bp, Homo sapiens
ccagaatatgtaacc

SEQ ID NO: 1466486 - DNA, 15 bp, Homo sapiens
tccagaatatgtaac

SEQ ID NO: 1466487 - DNA, 15 bp, Homo sapiens
gtccagaatatgtaa

SEQ ID NO: 1466488 - DNA, 15 bp, Homo sapiens
aagtccagaatatgt

SEQ ID NO: 1466489 - DNA, 15 bp, Homo sapiens
taagtccagaatatg

SEQ ID NO: 1466490 - DNA, 15 bp, Homo sapiens
ctaagtccagaatat

SEQ ID NO: 1466491 - DNA, 15 bp, Homo sapiens
tctaagtccagaata

SEQ ID NO: 1466492 - DNA, 15 bp, Homo sapiens
ttctaagtccagaat

SEQ ID NO: 1466493 - DNA, 15 bp, Homo sapiens
tttctaagtccagaa

SEQ ID NO: 1466494 - DNA, 15 bp, Homo sapiens
atttctaagtccaga

SEQ ID NO: 1466495 - DNA, 15 bp, Homo sapiens
gatttctaagtccag

SEQ ID NO: 1466496 - DNA, 15 bp, Homo sapiens
agatttctaagtcca

SEQ ID NO: 1466497 - DNA, 15 bp, Homo sapiens
cagatttctaagtcc

SEQ ID NO: 1466498 - DNA, 15 bp, Homo sapiens
acagatttctaagtc

SEQ ID NO: 1466499 - DNA, 15 bp, Homo sapiens
cacagatttctaagt

SEQ ID NO: 1466500 - DNA, 15 bp, Homo sapiens
gcacagatttctaag

SEQ ID NO: 1466501 - DNA, 15 bp, Homo sapiens
agcacagatttctaa

SEQ ID NO: 1466502 - DNA, 15 bp, Homo sapiens
tagcacagatttcta

SEQ ID NO: 1466503 - DNA, 15 bp, Homo sapiens
atagcacagatttct

SEQ ID NO: 1466504 - DNA, 15 bp, Homo sapiens
catagcacagatttc

SEQ ID NO: 1466505 - DNA, 15 bp, Homo sapiens
gcatagcacagattt

SEQ ID NO: 1466506 - DNA, 15 bp, Homo sapiens
ggcatagcacagatt

SEQ ID NO: 1466507 - DNA, 15 bp, Homo sapiens
gggcatagcacagat

SEQ ID NO: 1466508 - DNA, 15 bp, Homo sapiens
agggcatagcacaga

SEQ ID NO: 1466509 - DNA, 15 bp, Homo sapiens
gagggcatagcacag

SEQ ID NO: 1466510 - DNA, 15 bp, Homo sapiens
agagggcatagcaca

SEQ ID NO: 1466511 - DNA, 15 bp, Homo sapiens
aagagggcatagcac

SEQ ID NO: 1466512 - DNA, 15 bp, Homo sapiens
aaagagggcatagca

SEQ ID NO: 1466513 - DNA, 15 bp, Homo sapiens
taaagagggcatagc

SEQ ID NO: 1466514 - DNA, 15 bp, Homo sapiens
ctaaagagggcatag

SEQ ID NO: 1466515 - DNA, 15 bp, Homo sapiens
actaaagagggcata

SEQ ID NO: 1466516 - DNA, 15 bp, Homo sapiens
cactaaagagggcat

SEQ ID NO: 1466517 - DNA, 15 bp, Homo sapiens
ccactaaagagggca

SEQ ID NO: 1466518 - DNA, 15 bp, Homo sapiens
accactaaagagggc

SEQ ID NO: 1466519 - DNA, 15 bp, Homo sapiens
aaccactaaagaggg

SEQ ID NO: 1466520 - DNA, 15 bp, Homo sapiens
gaaccactaaagagg

SEQ ID NO: 1466521 - DNA, 15 bp, Homo sapiens
ggaaccactaaagag

SEQ ID NO: 1466522 - DNA, 15 bp, Homo sapiens
aggaaccactaaaga

SEQ ID NO: 1466523 - DNA, 15 bp, Homo sapiens
aaggaaccactaaag

SEQ ID NO: 1466524 - DNA, 15 bp, Homo sapiens
taaggaaccactaaa

SEQ ID NO: 1466525 - DNA, 15 bp, Homo sapiens
ctaaggaaccactaa

SEQ ID NO: 1466526 - DNA, 15 bp, Homo sapiens
cctaaggaaccacta

SEQ ID NO: 1466527 - DNA, 15 bp, Homo sapiens
ccctaaggaaccact

SEQ ID NO: 1466528 - DNA, 15 bp, Homo sapiens
accctaaggaaccac

SEQ ID NO: 1466529 - DNA, 15 bp, Homo sapiens
taccctaaggaacca

SEQ ID NO: 1466530 - DNA, 15 bp, Homo sapiens
ctaccctaaggaacc

SEQ ID NO: 1466531 - DNA, 15 bp, Homo sapiens
tctaccctaaggaac

SEQ ID NO: 1466532 - DNA, 15 bp, Homo sapiens
atctaccctaaggaa

SEQ ID NO: 1466533 - DNA, 15 bp, Homo sapiens
aatctaccctaagga

SEQ ID NO: 1466534 - DNA, 15 bp, Homo sapiens
caatctaccctaagg

SEQ ID NO: 1466535 - DNA, 15 bp, Homo sapiens
tcaatctaccctaag

SEQ ID NO: 1466536 - DNA, 15 bp, Homo sapiens
ttcaatctaccctaa

SEQ ID NO: 1466537 - DNA, 15 bp, Homo sapiens
tttcaatctacccta

SEQ ID NO: 1466538 - DNA, 15 bp, Homo sapiens
atttcaatctaccct

SEQ ID NO: 1466539 - DNA, 15 bp, Homo sapiens
tatttcaatctaccc

SEQ ID NO: 1466540 - DNA, 15 bp, Homo sapiens
ctatttcaatctacc

SEQ ID NO: 1466541 - DNA, 15 bp, Homo sapiens
actatttcaatctac

SEQ ID NO: 1466542 - DNA, 15 bp, Homo sapiens
aactatttcaatcta

SEQ ID NO: 1466543 - DNA, 15 bp, Homo sapiens
taactatttcaatct

SEQ ID NO: 1466544 - DNA, 15 bp, Homo sapiens
ttaactatttcaatc

SEQ ID NO: 1466545 - DNA, 15 bp, Homo sapiens
attaactatttcaat

SEQ ID NO: 1466546 - DNA, 15 bp, Homo sapiens
gattaactatttcaa

SEQ ID NO: 1466547 - DNA, 15 bp, Homo sapiens
cgattaactatttca

SEQ ID NO: 1466548 - DNA, 15 bp, Homo sapiens
acgattaactatttc

SEQ ID NO: 1466549 - DNA, 15 bp, Homo sapiens
cacgattaactattt

SEQ ID NO: 1466550 - DNA, 15 bp, Homo sapiens
gcacgattaactatt

SEQ ID NO: 1466551 - DNA, 15 bp, Homo sapiens
agcacgattaactat

SEQ ID NO: 1466552 - DNA, 15 bp, Homo sapiens
gagcacgattaacta

SEQ ID NO: 1466553 - DNA, 15 bp, Homo sapiens
tgagcacgattaact

SEQ ID NO: 1466554 - DNA, 15 bp, Homo sapiens
gtgagcacgattaac

SEQ ID NO: 1466555 - DNA, 15 bp, Homo sapiens
agtgagcacgattaa

SEQ ID NO: 1466556 - DNA, 15 bp, Homo sapiens
aagtgagcacgatta

SEQ ID NO: 1466557 - DNA, 15 bp, Homo sapiens
aaagtgagcacgatt

SEQ ID NO: 1466558 - DNA, 15 bp, Homo sapiens
aaaagtgagcacgat

SEQ ID NO: 1466559 - DNA, 15 bp, Homo sapiens
aaaaagtgagcacga

SEQ ID NO: 1466560 - DNA, 15 bp, Homo sapiens
gaaaaagtgagcacg

SEQ ID NO: 1466561 - DNA, 15 bp, Homo sapiens
ggaaaaagtgagcac

SEQ ID NO: 1466562 - DNA, 15 bp, Homo sapiens
aggaaaaagtgagca

SEQ ID NO: 1466563 - DNA, 15 bp, Homo sapiens
caggaaaaagtgagc

SEQ ID NO: 1466564 - DNA, 15 bp, Homo sapiens
ccaggaaaaagtgag

SEQ ID NO: 1466565 - DNA, 15 bp, Homo sapiens
accaggaaaaagtga

SEQ ID NO: 1466566 - DNA, 15 bp, Homo sapiens
taccaggaaaaagtg

SEQ ID NO: 1466567 - DNA, 15 bp, Homo sapiens
ttaccaggaaaaagt

SEQ ID NO: 1466568 - DNA, 15 bp, Homo sapiens
tttaccaggaaaaag

SEQ ID NO: 1466569 - DNA, 15 bp, Homo sapiens
ctttaccaggaaaaa

SEQ ID NO: 1466570 - DNA, 15 bp, Homo sapiens
actttaccaggaaaa

SEQ ID NO: 1466571 - DNA, 15 bp, Homo sapiens
gactttaccaggaaa

SEQ ID NO: 1466572 - DNA, 15 bp, Homo sapiens
tgactttaccaggaa

SEQ ID NO: 1466573 - DNA, 15 bp, Homo sapiens
ttgactttaccagga

SEQ ID NO: 1466574 - DNA, 15 bp, Homo sapiens
gttgactttaccagg

SEQ ID NO: 1466575 - DNA, 15 bp, Homo sapiens
cgttgactttaccag

SEQ ID NO: 1466576 - DNA, 15 bp, Homo sapiens
tcgttgactttacca

SEQ ID NO: 1466577 - DNA, 15 bp, Homo sapiens
atcgttgactttacc

SEQ ID NO: 1466578 - DNA, 15 bp, Homo sapiens
tatcgttgactttac

SEQ ID NO: 1466579 - DNA, 15 bp, Homo sapiens
atatcgttgacttta

SEQ ID NO: 1466580 - DNA, 15 bp, Homo sapiens
catatcgttgacttt

SEQ ID NO: 1466581 - DNA, 15 bp, Homo sapiens
gcatatcgttgactt

SEQ ID NO: 1466582 - DNA, 15 bp, Homo sapiens
agcatatcgttgact

SEQ ID NO: 1466583 - DNA, 15 bp, Homo sapiens
aagcatatcgttgac

SEQ ID NO: 1466584 - DNA, 15 bp, Homo sapiens
aaagcatatcgttga

SEQ ID NO: 1466585 - DNA, 15 bp, Homo sapiens
caaagcatatcgttg

SEQ ID NO: 1466586 - DNA, 15 bp, Homo sapiens
tcaaagcatatcgtt

SEQ ID NO: 1466587 - DNA, 15 bp, Homo sapiens
gtcaaagcatatcgt

SEQ ID NO: 1466588 - DNA, 15 bp, Homo sapiens
tgtcaaagcatatcg

SEQ ID NO: 1466589 - DNA, 15 bp, Homo sapiens
ctgtcaaagcatatc

SEQ ID NO: 1466590 - DNA, 15 bp, Homo sapiens
actgtcaaagcatat

SEQ ID NO: 1466591 - DNA, 15 bp, Homo sapiens
aactgtcaaagcata

SEQ ID NO: 1466592 - DNA, 15 bp, Homo sapiens
taactgtcaaagcat

SEQ ID NO: 1466593 - DNA, 15 bp, Homo sapiens
ataactgtcaaagca

SEQ ID NO: 1466594 - DNA, 15 bp, Homo sapiens
cataactgtcaaagc

SEQ ID NO: 1466595 - DNA, 15 bp, Homo sapiens
gcataactgtcaaag

SEQ ID NO: 1466596 - DNA, 15 bp, Homo sapiens
agcataactgtcaaa

SEQ ID NO: 1466597 - DNA, 15 bp, Homo sapiens
aagcataactgtcaa

SEQ ID NO: 1466598 - DNA, 15 bp, Homo sapiens
aaagcataactgtca

SEQ ID NO: 1466599 - DNA, 15 bp, Homo sapiens
taaagcataactgtc

SEQ ID NO: 1466600 - DNA, 15 bp, Homo sapiens
ctaaagcataactgt

SEQ ID NO: 1466601 - DNA, 15 bp, Homo sapiens
actaaagcataactg

SEQ ID NO: 1466602 - DNA, 15 bp, Homo sapiens
cactaaagcataact

SEQ ID NO: 1466603 - DNA, 15 bp, Homo sapiens
tcactaaagcataac

SEQ ID NO: 1466604 - DNA, 15 bp, Homo sapiens
atcactaaagcataa

SEQ ID NO: 1466605 - DNA, 15 bp, Homo sapiens
aatcactaaagcata

SEQ ID NO: 1466606 - DNA, 15 bp, Homo sapiens
aaatcactaaagcat

SEQ ID NO: 1466607 - DNA, 15 bp, Homo sapiens
taaatcactaaagca

SEQ ID NO: 1466608 - DNA, 15 bp, Homo sapiens
gtaaatcactaaagc

SEQ ID NO: 1466609 - DNA, 15 bp, Homo sapiens
ggtaaatcactaaag

SEQ ID NO: 1466610 - DNA, 15 bp, Homo sapiens
aggtaaatcactaaa

SEQ ID NO: 1466611 - DNA, 15 bp, Homo sapiens
aaggtaaatcactaa

SEQ ID NO: 1466612 - DNA, 15 bp, Homo sapiens
aaaggtaaatcacta

SEQ ID NO: 1466613 - DNA, 15 bp, Homo sapiens
aaaaggtaaatcact

SEQ ID NO: 1466614 - DNA, 15 bp, Homo sapiens
aaaaaggtaaatcac

SEQ ID NO: 1466615 - DNA, 15 bp, Homo sapiens
aaaaaaggtaaatca

SEQ ID NO: 1466616 - DNA, 15 bp, Homo sapiens
aaaaaaaggtaaatc

SEQ ID NO: 1466617 - DNA, 15 bp, Homo sapiens
gaaaaaaaggtaaat

SEQ ID NO: 1466618 - DNA, 15 bp, Homo sapiens
tgaaaaaaaggtaaa

SEQ ID NO: 1466619 - DNA, 15 bp, Homo sapiens
gtgaaaaaaaggtaa

SEQ ID NO: 1466620 - DNA, 15 bp, Homo sapiens
tgtgaaaaaaaggta

SEQ ID NO: 1466621 - DNA, 15 bp, Homo sapiens
ttgtgaaaaaaaggt

SEQ ID NO: 1466622 - DNA, 15 bp, Homo sapiens
cttgtgaaaaaaagg

SEQ ID NO: 1466623 - DNA, 15 bp, Homo sapiens
acttgtgaaaaaaag

SEQ ID NO: 1466624 - DNA, 15 bp, Homo sapiens
aacttgtgaaaaaaa

SEQ ID NO: 1466625 - DNA, 15 bp, Homo sapiens
gaacttgtgaaaaaa

SEQ ID NO: 1466626 - DNA, 15 bp, Homo sapiens
tgaacttgtgaaaaa

SEQ ID NO: 1466627 - DNA, 15 bp, Homo sapiens
atgaacttgtgaaaa

SEQ ID NO: 1466628 - DNA, 15 bp, Homo sapiens
catgaacttgtgaaa

SEQ ID NO: 1466629 - DNA, 15 bp, Homo sapiens
tcatgaacttgtgaa

SEQ ID NO: 1466630 - DNA, 15 bp, Homo sapiens
atcatgaacttgtga

SEQ ID NO: 1466631 - DNA, 15 bp, Homo sapiens
aatcatgaacttgtg

SEQ ID NO: 1466632 - DNA, 15 bp, Homo sapiens
taatcatgaacttgt

SEQ ID NO: 1466633 - DNA, 15 bp, Homo sapiens
ctaatcatgaacttg

SEQ ID NO: 1466634 - DNA, 15 bp, Homo sapiens
cctaatcatgaactt

SEQ ID NO: 1466635 - DNA, 15 bp, Homo sapiens
tcctaatcatgaact

SEQ ID NO: 1466636 - DNA, 15 bp, Homo sapiens
gtcctaatcatgaac

SEQ ID NO: 1466637 - DNA, 15 bp, Homo sapiens
ggtcctaatcatgaa

SEQ ID NO: 1466638 - DNA, 15 bp, Homo sapiens
aggtcctaatcatga

SEQ ID NO: 1466639 - DNA, 15 bp, Homo sapiens
aaggtcctaatcatg

SEQ ID NO: 1466640 - DNA, 15 bp, Homo sapiens
gaaggtcctaatcat

SEQ ID NO: 1466641 - DNA, 15 bp, Homo sapiens
agaaggtcctaatca

SEQ ID NO: 1466642 - DNA, 15 bp, Homo sapiens
cagaaggtcctaatc

SEQ ID NO: 1466643 - DNA, 15 bp, Homo sapiens
tcagaaggtcctaat

SEQ ID NO: 1466644 - DNA, 15 bp, Homo sapiens
ttcagaaggtcctaa

SEQ ID NO: 1466645 - DNA, 15 bp, Homo sapiens
gttcagaaggtccta

SEQ ID NO: 1466646 - DNA, 15 bp, Homo sapiens
ggttcagaaggtcct

SEQ ID NO: 1466647 - DNA, 15 bp, Homo sapiens
aggttcagaaggtcc

SEQ ID NO: 1466648 - DNA, 15 bp, Homo sapiens
aaggttcagaaggtc

SEQ ID NO: 1466649 - DNA, 15 bp, Homo sapiens
taaggttcagaaggt

SEQ ID NO: 1466650 - DNA, 15 bp, Homo sapiens
ttaaggttcagaagg

SEQ ID NO: 1466651 - DNA, 15 bp, Homo sapiens
tttaaggttcagaag

SEQ ID NO: 1466652 - DNA, 15 bp, Homo sapiens
atttaaggttcagaa

SEQ ID NO: 1466653 - DNA, 15 bp, Homo sapiens
aatttaaggttcaga

SEQ ID NO: 1466654 - DNA, 15 bp, Homo sapiens
aaatttaaggttcag

SEQ ID NO: 1466655 - DNA, 15 bp, Homo sapiens
gaaatttaaggttca

SEQ ID NO: 1466656 - DNA, 15 bp, Homo sapiens
ggaaatttaaggttc

SEQ ID NO: 1466657 - DNA, 15 bp, Homo sapiens
aggaaatttaaggtt

SEQ ID NO: 1466658 - DNA, 15 bp, Homo sapiens
aaggaaatttaaggt

SEQ ID NO: 1466659 - DNA, 15 bp, Homo sapiens
caaggaaatttaagg

SEQ ID NO: 1466660 - DNA, 15 bp, Homo sapiens
tcaaggaaatttaag

SEQ ID NO: 1466661 - DNA, 15 bp, Homo sapiens
ttcaaggaaatttaa

SEQ ID NO: 1466662 - DNA, 15 bp, Homo sapiens
tttcaaggaaattta

SEQ ID NO: 1466663 - DNA, 15 bp, Homo sapiens
gtttcaaggaaattt

SEQ ID NO: 1466664 - DNA, 15 bp, Homo sapiens
agtttcaaggaaatt

SEQ ID NO: 1466665 - DNA, 15 bp, Homo sapiens
gagtttcaaggaaat

SEQ ID NO: 1466666 - DNA, 15 bp, Homo sapiens
agagtttcaaggaaa

SEQ ID NO: 1466667 - DNA, 15 bp, Homo sapiens
tagagtttcaaggaa

SEQ ID NO: 1466668 - DNA, 15 bp, Homo sapiens
gtagagtttcaagga

SEQ ID NO: 1466669 - DNA, 15 bp, Homo sapiens
agtagagtttcaagg

SEQ ID NO: 1466670 - DNA, 15 bp, Homo sapiens
aagtagagtttcaag

SEQ ID NO: 1466671 - DNA, 15 bp, Homo sapiens
caagtagagtttcaa

SEQ ID NO: 1466672 - DNA, 15 bp, Homo sapiens
acaagtagagtttca

SEQ ID NO: 1466673 - DNA, 15 bp, Homo sapiens
tacaagtagagtttc

SEQ ID NO: 1466674 - DNA, 15 bp, Homo sapiens
atacaagtagagttt

SEQ ID NO: 1466675 - DNA, 15 bp, Homo sapiens
gatacaagtagagtt

SEQ ID NO: 1466676 - DNA, 15 bp, Homo sapiens
ggatacaagtagagt

SEQ ID NO: 1466677 - DNA, 15 bp, Homo sapiens
gggatacaagtagag

SEQ ID NO: 1466678 - DNA, 15 bp, Homo sapiens
tgggatacaagtaga

SEQ ID NO: 1466679 - DNA, 15 bp, Homo sapiens
atgggatacaagtag

SEQ ID NO: 1466680 - DNA, 15 bp, Homo sapiens
tatgggatacaagta

SEQ ID NO: 1466681 - DNA, 15 bp, Homo sapiens
atatgggatacaagt

SEQ ID NO: 1466682 - DNA, 15 bp, Homo sapiens
catatgggatacaag

SEQ ID NO: 1466683 - DNA, 15 bp, Homo sapiens
acatatgggatacaa

SEQ ID NO: 1466684 - DNA, 15 bp, Homo sapiens
tacatatgggataca

SEQ ID NO: 1466685 - DNA, 15 bp, Homo sapiens
ctacatatgggatac

SEQ ID NO: 1466686 - DNA, 15 bp, Homo sapiens
tctacatatgggata

SEQ ID NO: 1466687 - DNA, 15 bp, Homo sapiens
atctacatatgggat

SEQ ID NO: 1466688 - DNA, 15 bp, Homo sapiens
catctacatatggga

SEQ ID NO: 1466689 - DNA, 15 bp, Homo sapiens
tcatctacatatggg

SEQ ID NO: 1466690 - DNA, 15 bp, Homo sapiens
gtcatctacatatgg

SEQ ID NO: 1466691 - DNA, 15 bp, Homo sapiens
ggtcatctacatatg

SEQ ID NO: 1466692 - DNA, 15 bp, Homo sapiens
tggtcatctacatat

SEQ ID NO: 1466693 - DNA, 15 bp, Homo sapiens
gtggtcatctacata

SEQ ID NO: 1466694 - DNA, 15 bp, Homo sapiens
agtggtcatctacat

SEQ ID NO: 1466695 - DNA, 15 bp, Homo sapiens
aagtggtcatctaca

SEQ ID NO: 1466696 - DNA, 15 bp, Homo sapiens
caagtggtcatctac

SEQ ID NO: 1466697 - DNA, 15 bp, Homo sapiens
acaagtggtcatcta

SEQ ID NO: 1466698 - DNA, 15 bp, Homo sapiens
aacaagtggtcatct

SEQ ID NO: 1466699 - DNA, 15 bp, Homo sapiens
taacaagtggtcatc

SEQ ID NO: 1466700 - DNA, 15 bp, Homo sapiens
ataacaagtggtcat

SEQ ID NO: 1466701 - DNA, 15 bp, Homo sapiens
tataacaagtggtca

SEQ ID NO: 1466702 - DNA, 15 bp, Homo sapiens
atataacaagtggtc

SEQ ID NO: 1466703 - DNA, 15 bp, Homo sapiens
aatataacaagtggt

SEQ ID NO: 1466704 - DNA, 15 bp, Homo sapiens
gaatataacaagtgg

SEQ ID NO: 1466705 - DNA, 15 bp, Homo sapiens
agaatataacaagtg

SEQ ID NO: 1466706 - DNA, 15 bp, Homo sapiens
tagaatataacaagt

SEQ ID NO: 1466707 - DNA, 15 bp, Homo sapiens
ttagaatataacaag

SEQ ID NO: 1466708 - DNA, 15 bp, Homo sapiens
tttagaatataacaa

SEQ ID NO: 1466709 - DNA, 15 bp, Homo sapiens
ttttagaatataaca

SEQ ID NO: 1466710 - DNA, 15 bp, Homo sapiens
tttttagaatataac

SEQ ID NO: 1466711 - DNA, 15 bp, Homo sapiens
atttttagaatataa

SEQ ID NO: 1466712 - DNA, 15 bp, Homo sapiens
catttttagaatata

SEQ ID NO: 1466713 - DNA, 15 bp, Homo sapiens
tcatttttagaatat

SEQ ID NO: 1466714 - DNA, 15 bp, Homo sapiens
ctcatttttagaata

SEQ ID NO: 1466715 - DNA, 15 bp, Homo sapiens
actcatttttagaat

SEQ ID NO: 1466716 - DNA, 15 bp, Homo sapiens
aactcatttttagaa

SEQ ID NO: 1466717 - DNA, 15 bp, Homo sapiens
caactcatttttaga

SEQ ID NO: 1466718 - DNA, 15 bp, Homo sapiens
tcaactcatttttag

SEQ ID NO: 1466719 - DNA, 15 bp, Homo sapiens
ctcaactcattttta

SEQ ID NO: 1466720 - DNA, 15 bp, Homo sapiens
gctcaactcattttt

SEQ ID NO: 1466721 - DNA, 15 bp, Homo sapiens
agctcaactcatttt

SEQ ID NO: 1466722 - DNA, 15 bp, Homo sapiens
gagctcaactcattt

SEQ ID NO: 1466723 - DNA, 15 bp, Homo sapiens
agagctcaactcatt

SEQ ID NO: 1466724 - DNA, 15 bp, Homo sapiens
gagagctcaactcat

SEQ ID NO: 1466725 - DNA, 15 bp, Homo sapiens
agagagctcaactca

SEQ ID NO: 1466726 - DNA, 15 bp, Homo sapiens
aagagagctcaactc

SEQ ID NO: 1466727 - DNA, 15 bp, Homo sapiens
taagagagctcaact

SEQ ID NO: 1466728 - DNA, 15 bp, Homo sapiens
ctaagagagctcaac

SEQ ID NO: 1466729 - DNA, 15 bp, Homo sapiens
actaagagagctcaa

SEQ ID NO: 1466730 - DNA, 15 bp, Homo sapiens
gactaagagagctca

SEQ ID NO: 1466731 - DNA, 15 bp, Homo sapiens
tgactaagagagctc

SEQ ID NO: 1466732 - DNA, 15 bp, Homo sapiens
atgactaagagagct

SEQ ID NO: 1466733 - DNA, 15 bp, Homo sapiens
aatgactaagagagc

SEQ ID NO: 1466734 - DNA, 15 bp, Homo sapiens
aaatgactaagagag

SEQ ID NO: 1466735 - DNA, 15 bp, Homo sapiens
taaatgactaagaga

SEQ ID NO: 1466736 - DNA, 15 bp, Homo sapiens
ataaatgactaagag

SEQ ID NO: 1466737 - DNA, 15 bp, Homo sapiens
cataaatgactaaga

SEQ ID NO: 1466738 - DNA, 15 bp, Homo sapiens
acataaatgactaag

SEQ ID NO: 1466739 - DNA, 15 bp, Homo sapiens
aacataaatgactaa

SEQ ID NO: 1466740 - DNA, 15 bp, Homo sapiens
gaacataaatgacta

SEQ ID NO: 1466741 - DNA, 15 bp, Homo sapiens
agaacataaatgact

SEQ ID NO: 1466742 - DNA, 15 bp, Homo sapiens
aagaacataaatgac

SEQ ID NO: 1466743 - DNA, 15 bp, Homo sapiens
taagaacataaatga

SEQ ID NO: 1466744 - DNA, 15 bp, Homo sapiens
gtaagaacataaatg

SEQ ID NO: 1466745 - DNA, 15 bp, Homo sapiens
tgtaagaacataaat

SEQ ID NO: 1466746 - DNA, 15 bp, Homo sapiens
ctgtaagaacataaa

SEQ ID NO: 1466747 - DNA, 15 bp, Homo sapiens
actgtaagaacataa

SEQ ID NO: 1466748 - DNA, 15 bp, Homo sapiens
aactgtaagaacata

SEQ ID NO: 1466749 - DNA, 15 bp, Homo sapiens
aaactgtaagaacat

SEQ ID NO: 1466750 - DNA, 15 bp, Homo sapiens
aaaactgtaagaaca

SEQ ID NO: 1466751 - DNA, 15 bp, Homo sapiens
taaaactgtaagaac

SEQ ID NO: 1466752 - DNA, 15 bp, Homo sapiens
ttaaaactgtaagaa

SEQ ID NO: 1466753 - DNA, 15 bp, Homo sapiens
gttaaaactgtaaga

SEQ ID NO: 1466754 - DNA, 15 bp, Homo sapiens
agttaaaactgtaag

SEQ ID NO: 1466755 - DNA, 15 bp, Homo sapiens
gagttaaaactgtaa

SEQ ID NO: 1466756 - DNA, 15 bp, Homo sapiens
tgagttaaaactgta

SEQ ID NO: 1466757 - DNA, 15 bp, Homo sapiens
ctgagttaaaactgt

SEQ ID NO: 1466758 - DNA, 15 bp, Homo sapiens
tctgagttaaaactg

SEQ ID NO: 1466759 - DNA, 15 bp, Homo sapiens
ttctgagttaaaact

SEQ ID NO: 1466760 - DNA, 15 bp, Homo sapiens
tttctgagttaaaac

SEQ ID NO: 1466761 - DNA, 15 bp, Homo sapiens
ctttctgagttaaaa

SEQ ID NO: 1466762 - DNA, 15 bp, Homo sapiens
cctttctgagttaaa

SEQ ID NO: 1466763 - DNA, 15 bp, Homo sapiens
tcctttctgagttaa

SEQ ID NO: 1466764 - DNA, 15 bp, Homo sapiens
gtcctttctgagtta

SEQ ID NO: 1466765 - DNA, 15 bp, Homo sapiens
agtcctttctgagtt

SEQ ID NO: 1466766 - DNA, 15 bp, Homo sapiens
aagtcctttctgagt

SEQ ID NO: 1466767 - DNA, 15 bp, Homo sapiens
ttaagtcctttctga

SEQ ID NO: 1466768 - DNA, 15 bp, Homo sapiens
tttaagtcctttctg

SEQ ID NO: 1466769 - DNA, 15 bp, Homo sapiens
ctttaagtcctttct

SEQ ID NO: 1466770 - DNA, 15 bp, Homo sapiens
actttaagtcctttc

SEQ ID NO: 1466771 - DNA, 15 bp, Homo sapiens
aactttaagtccttt

SEQ ID NO: 1466772 - DNA, 15 bp, Homo sapiens
taactttaagtcctt

SEQ ID NO: 1466773 - DNA, 15 bp, Homo sapiens
ctaactttaagtcct

SEQ ID NO: 1466774 - DNA, 15 bp, Homo sapiens
tctaactttaagtcc

SEQ ID NO: 1466775 - DNA, 15 bp, Homo sapiens
ttctaactttaagtc

SEQ ID NO: 1466776 - DNA, 15 bp, Homo sapiens
cttctaactttaagt

SEQ ID NO: 1466777 - DNA, 15 bp, Homo sapiens
ccttctaactttaag

SEQ ID NO: 1466778 - DNA, 15 bp, Homo sapiens
tccttctaactttaa

SEQ ID NO: 1466779 - DNA, 15 bp, Homo sapiens
ttccttctaacttta

SEQ ID NO: 1466780 - DNA, 15 bp, Homo sapiens
tttccttctaacttt

SEQ ID NO: 1466781 - DNA, 15 bp, Homo sapiens
ctttccttctaactt

SEQ ID NO: 1466782 - DNA, 15 bp, Homo sapiens
actttccttctaact

SEQ ID NO: 1466783 - DNA, 15 bp, Homo sapiens
aactttccttctaac

SEQ ID NO: 1466784 - DNA, 15 bp, Homo sapiens
taactttccttctaa

SEQ ID NO: 1466785 - DNA, 15 bp, Homo sapiens
gtaactttccttcta

SEQ ID NO: 1466786 - DNA, 15 bp, Homo sapiens
tgtaactttccttct

SEQ ID NO: 1466787 - DNA, 15 bp, Homo sapiens
ttgtaactttccttc

SEQ ID NO: 1466788 - DNA, 15 bp, Homo sapiens
attgtaactttcctt

SEQ ID NO: 1466789 - DNA, 15 bp, Homo sapiens
aattgtaactttcct

SEQ ID NO: 1466790 - DNA, 15 bp, Homo sapiens
aaattgtaactttcc

SEQ ID NO: 1466791 - DNA, 15 bp, Homo sapiens
aaaattgtaactttc

SEQ ID NO: 1466792 - DNA, 15 bp, Homo sapiens
gaaaattgtaacttt

SEQ ID NO: 1466793 - DNA, 15 bp, Homo sapiens
agaaaattgtaactt

SEQ ID NO: 1466794 - DNA, 15 bp, Homo sapiens
gagaaaattgtaact

SEQ ID NO: 1466795 - DNA, 15 bp, Homo sapiens
tgagaaaattgtaac

SEQ ID NO: 1466796 - DNA, 15 bp, Homo sapiens
ttgagaaaattgtaa

SEQ ID NO: 1466797 - DNA, 15 bp, Homo sapiens
tttgagaaaattgta

SEQ ID NO: 1466798 - DNA, 15 bp, Homo sapiens
ttttgagaaaattgt

SEQ ID NO: 1466799 - DNA, 15 bp, Homo sapiens
gttttgagaaaattg

SEQ ID NO: 1466800 - DNA, 15 bp, Homo sapiens
tgttttgagaaaatt

SEQ ID NO: 1466801 - DNA, 15 bp, Homo sapiens
ctgttttgagaaaat

SEQ ID NO: 1466802 - DNA, 15 bp, Homo sapiens
tctgttttgagaaaa

SEQ ID NO: 1466803 - DNA, 15 bp, Homo sapiens
atctgttttgagaaa

SEQ ID NO: 1466804 - DNA, 15 bp, Homo sapiens
aatctgttttgagaa

SEQ ID NO: 1466805 - DNA, 15 bp, Homo sapiens
caatctgttttgaga

SEQ ID NO: 1466806 - DNA, 15 bp, Homo sapiens
acaatctgttttgag

SEQ ID NO: 1466807 - DNA, 15 bp, Homo sapiens
cacaatctgttttga

SEQ ID NO: 1466808 - DNA, 15 bp, Homo sapiens
acacaatctgttttg

SEQ ID NO: 1466809 - DNA, 15 bp, Homo sapiens
cacacaatctgtttt

SEQ ID NO: 1466810 - DNA, 15 bp, Homo sapiens
tcacacaatctgttt

SEQ ID NO: 1466811 - DNA, 15 bp, Homo sapiens
gtcacacaatctgtt

SEQ ID NO: 1466812 - DNA, 15 bp, Homo sapiens
agtcacacaatctgt

SEQ ID NO: 1466813 - DNA, 15 bp, Homo sapiens
aagtcacacaatctg

SEQ ID NO: 1466814 - DNA, 15 bp, Homo sapiens
taagtcacacaatct

SEQ ID NO: 1466815 - DNA, 15 bp, Homo sapiens
ctaagtcacacaatc

SEQ ID NO: 1466816 - DNA, 15 bp, Homo sapiens
tctaagtcacacaat

SEQ ID NO: 1466817 - DNA, 15 bp, Homo sapiens
atctaagtcacacaa

SEQ ID NO: 1466818 - DNA, 15 bp, Homo sapiens
gatctaagtcacaca

SEQ ID NO: 1466819 - DNA, 15 bp, Homo sapiens
tgatctaagtcacac

SEQ ID NO: 1466820 - DNA, 15 bp, Homo sapiens
ttgatctaagtcaca

SEQ ID NO: 1466821 - DNA, 15 bp, Homo sapiens
cttgatctaagtcac

SEQ ID NO: 1466822 - DNA, 15 bp, Homo sapiens
tcttgatctaagtca

SEQ ID NO: 1466823 - DNA, 15 bp, Homo sapiens
atcttgatctaagtc

SEQ ID NO: 1466824 - DNA, 15 bp, Homo sapiens
aatcttgatctaagt

SEQ ID NO: 1466825 - DNA, 15 bp, Homo sapiens
aaatcttgatctaag

SEQ ID NO: 1466826 - DNA, 15 bp, Homo sapiens
taaatcttgatctaa

SEQ ID NO: 1466827 - DNA, 15 bp, Homo sapiens
ataaatcttgatcta

SEQ ID NO: 1466828 - DNA, 15 bp, Homo sapiens
aataaatcttgatct

SEQ ID NO: 1466829 - DNA, 15 bp, Homo sapiens
gaataaatcttgatc

SEQ ID NO: 1466830 - DNA, 15 bp, Homo sapiens
tgaataaatcttgat

SEQ ID NO: 1466831 - DNA, 15 bp, Homo sapiens
ttgaataaatcttga

SEQ ID NO: 1466832 - DNA, 15 bp, Homo sapiens
cttgaataaatcttg

SEQ ID NO: 1466833 - DNA, 15 bp, Homo sapiens
tcttgaataaatctt

SEQ ID NO: 1466834 - DNA, 15 bp, Homo sapiens
ctcttgaataaatct

SEQ ID NO: 1466835 - DNA, 15 bp, Homo sapiens
actcttgaataaatc

SEQ ID NO: 1466836 - DNA, 15 bp, Homo sapiens
tactcttgaataaat

SEQ ID NO: 1466837 - DNA, 15 bp, Homo sapiens
ttactcttgaataaa

SEQ ID NO: 1466838 - DNA, 15 bp, Homo sapiens
tttactcttgaataa

SEQ ID NO: 1466839 - DNA, 15 bp, Homo sapiens
atttactcttgaata

SEQ ID NO: 1466840 - DNA, 15 bp, Homo sapiens
tatttactcttgaat

SEQ ID NO: 1466841 - DNA, 15 bp, Homo sapiens
gtatttactcttgaa

SEQ ID NO: 1466842 - DNA, 15 bp, Homo sapiens
ggtatttactcttga

SEQ ID NO: 1466843 - DNA, 15 bp, Homo sapiens
gggtatttactcttg

SEQ ID NO: 1466844 - DNA, 15 bp, Homo sapiens
ggggtatttactctt

SEQ ID NO: 1466845 - DNA, 15 bp, Homo sapiens
tggggtatttactct

SEQ ID NO: 1466846 - DNA, 15 bp, Homo sapiens
gtggggtatttactc

SEQ ID NO: 1466847 - DNA, 15 bp, Homo sapiens
agtggggtatttact

SEQ ID NO: 1466848 - DNA, 15 bp, Homo sapiens
aagtggggtatttac

SEQ ID NO: 1466849 - DNA, 15 bp, Homo sapiens
taagtggggtattta

SEQ ID NO: 1466850 - DNA, 15 bp, Homo sapiens
ctaagtggggtattt

SEQ ID NO: 1466851 - DNA, 15 bp, Homo sapiens
cctaagtggggtatt

SEQ ID NO: 1466852 - DNA, 15 bp, Homo sapiens
tcctaagtggggtat

SEQ ID NO: 1466853 - DNA, 15 bp, Homo sapiens
gtcctaagtggggta

SEQ ID NO: 1466854 - DNA, 15 bp, Homo sapiens
tgtcctaagtggggt

SEQ ID NO: 1466855 - DNA, 15 bp, Homo sapiens
ctgtcctaagtgggg

SEQ ID NO: 1466856 - DNA, 15 bp, Homo sapiens
tctgtcctaagtggg

SEQ ID NO: 1466857 - DNA, 15 bp, Homo sapiens
ctctgtcctaagtgg

SEQ ID NO: 1466858 - DNA, 15 bp, Homo sapiens
cctctgtcctaagtg

SEQ ID NO: 1466859 - DNA, 15 bp, Homo sapiens
tcctctgtcctaagt

SEQ ID NO: 1466860 - DNA, 15 bp, Homo sapiens
ttcctctgtcctaag

SEQ ID NO: 1466861 - DNA, 15 bp, Homo sapiens
tttcctctgtcctaa

SEQ ID NO: 1466862 - DNA, 15 bp, Homo sapiens
ttttcctctgtccta

SEQ ID NO: 1466863 - DNA, 15 bp, Homo sapiens
cttttcctctgtcct

SEQ ID NO: 1466864 - DNA, 15 bp, Homo sapiens
gcttttcctctgtcc

SEQ ID NO: 1466865 - DNA, 15 bp, Homo sapiens
ggcttttcctctgtc

SEQ ID NO: 1466866 - DNA, 15 bp, Homo sapiens
tggcttttcctctgt

SEQ ID NO: 1466867 - DNA, 15 bp, Homo sapiens
atggcttttcctctg

SEQ ID NO: 1466868 - DNA, 15 bp, Homo sapiens
aatggcttttcctct

SEQ ID NO: 1466869 - DNA, 15 bp, Homo sapiens
gaatggcttttcctc

SEQ ID NO: 1466870 - DNA, 15 bp, Homo sapiens
tgaatggcttttcct

SEQ ID NO: 1466871 - DNA, 15 bp, Homo sapiens
ttgaatggcttttcc

SEQ ID NO: 1466872 - DNA, 15 bp, Homo sapiens
gttgaatggcttttc

SEQ ID NO: 1466873 - DNA, 15 bp, Homo sapiens
cgttgaatggctttt

SEQ ID NO: 1466874 - DNA, 15 bp, Homo sapiens
ccgttgaatggcttt

SEQ ID NO: 1466875 - DNA, 15 bp, Homo sapiens
accgttgaatggctt

SEQ ID NO: 1466876 - DNA, 15 bp, Homo sapiens
aaccgttgaatggct

SEQ ID NO: 1466877 - DNA, 15 bp, Homo sapiens
aaaccgttgaatggc

SEQ ID NO: 1466878 - DNA, 15 bp, Homo sapiens
aaaaccgttgaatgg

SEQ ID NO: 1466879 - DNA, 15 bp, Homo sapiens
gaaaaccgttgaatg

SEQ ID NO: 1466880 - DNA, 15 bp, Homo sapiens
ggaaaaccgttgaat

SEQ ID NO: 1466881 - DNA, 15 bp, Homo sapiens
tggaaaaccgttgaa

SEQ ID NO: 1466882 - DNA, 15 bp, Homo sapiens
ctggaaaaccgttga

SEQ ID NO: 1466883 - DNA, 15 bp, Homo sapiens
cctggaaaaccgttg

SEQ ID NO: 1466884 - DNA, 15 bp, Homo sapiens
gcctggaaaaccgtt

SEQ ID NO: 1466885 - DNA, 15 bp, Homo sapiens
ggcctggaaaaccgt

SEQ ID NO: 1466886 - DNA, 15 bp, Homo sapiens
tggcctggaaaaccg

SEQ ID NO: 1466887 - DNA, 15 bp, Homo sapiens
ttggcctggaaaacc

SEQ ID NO: 1466888 - DNA, 15 bp, Homo sapiens
tttggcctggaaaac

SEQ ID NO: 1466889 - DNA, 15 bp, Homo sapiens
ctttggcctggaaaa

SEQ ID NO: 1466890 - DNA, 15 bp, Homo sapiens
gctttggcctggaaa

SEQ ID NO: 1466891 - DNA, 15 bp, Homo sapiens
agctttggcctggaa

SEQ ID NO: 1466892 - DNA, 15 bp, Homo sapiens
tagctttggcctgga

SEQ ID NO: 1466893 - DNA, 15 bp, Homo sapiens
gtagctttggcctgg

SEQ ID NO: 1466894 - DNA, 15 bp, Homo sapiens
tgtagctttggcctg

SEQ ID NO: 1466895 - DNA, 15 bp, Homo sapiens
gtgtagctttggcct

SEQ ID NO: 1466896 - DNA, 15 bp, Homo sapiens
tgtgtagctttggcc

SEQ ID NO: 1466897 - DNA, 15 bp, Homo sapiens
gtgtgtagctttggc

SEQ ID NO: 1466898 - DNA, 15 bp, Homo sapiens
ggtgtgtagctttgg

SEQ ID NO: 1466899 - DNA, 15 bp, Homo sapiens
tggtgtgtagctttg

SEQ ID NO: 1466900 - DNA, 15 bp, Homo sapiens
atggtgtgtagcttt

SEQ ID NO: 1466901 - DNA, 15 bp, Homo sapiens
catggtgtgtagctt

SEQ ID NO: 1466902 - DNA, 15 bp, Homo sapiens
tcatggtgtgtagct

SEQ ID NO: 1466903 - DNA, 15 bp, Homo sapiens
atcatggtgtgtagc

SEQ ID NO: 1466904 - DNA, 15 bp, Homo sapiens
tatcatggtgtgtag

SEQ ID NO: 1466905 - DNA, 15 bp, Homo sapiens
atatcatggtgtgta

SEQ ID NO: 1466906 - DNA, 15 bp, Homo sapiens
tatatcatggtgtgt

SEQ ID NO: 1466907 - DNA, 15 bp, Homo sapiens
gtatatcatggtgtg

SEQ ID NO: 1466908 - DNA, 15 bp, Homo sapiens
tgtatatcatggtgt

SEQ ID NO: 1466909 - DNA, 15 bp, Homo sapiens
gtgtatatcatggtg

SEQ ID NO: 1466910 - DNA, 15 bp, Homo sapiens
ggtgtatatcatggt

SEQ ID NO: 1466911 - DNA, 15 bp, Homo sapiens
aggtgtatatcatgg

SEQ ID NO: 1466912 - DNA, 15 bp, Homo sapiens
caggtgtatatcatg

SEQ ID NO: 1466913 - DNA, 15 bp, Homo sapiens
acaggtgtatatcat

SEQ ID NO: 1466914 - DNA, 15 bp, Homo sapiens
tacaggtgtatatca

SEQ ID NO: 1466915 - DNA, 15 bp, Homo sapiens
ctacaggtgtatatc

SEQ ID NO: 1466916 - DNA, 15 bp, Homo sapiens
actacaggtgtatat

SEQ ID NO: 1466917 - DNA, 15 bp, Homo sapiens
gactacaggtgtata

SEQ ID NO: 1466918 - DNA, 15 bp, Homo sapiens
ggactacaggtgtat

SEQ ID NO: 1466919 - DNA, 15 bp, Homo sapiens
aggactacaggtgta

SEQ ID NO: 1466920 - DNA, 15 bp, Homo sapiens
taggactacaggtgt

SEQ ID NO: 1466921 - DNA, 15 bp, Homo sapiens
ctaggactacaggtg

SEQ ID NO: 1466922 - DNA, 15 bp, Homo sapiens
gctaggactacaggt

SEQ ID NO: 1466923 - DNA, 15 bp, Homo sapiens
aagctaggactacag

SEQ ID NO: 1466924 - DNA, 15 bp, Homo sapiens
gaagctaggactaca

SEQ ID NO: 1466925 - DNA, 15 bp, Homo sapiens
agaagctaggactac

SEQ ID NO: 1466926 - DNA, 15 bp, Homo sapiens
gagaagctaggacta

SEQ ID NO: 1466927 - DNA, 15 bp, Homo sapiens
tgagaagctaggact

SEQ ID NO: 1466928 - DNA, 15 bp, Homo sapiens
ctgagaagctaggac

SEQ ID NO: 1466929 - DNA, 15 bp, Homo sapiens
cctgagaagctagga

SEQ ID NO: 1466930 - DNA, 15 bp, Homo sapiens
tcctgagaagctagg

SEQ ID NO: 1466931 - DNA, 15 bp, Homo sapiens
ctcctgagaagctag

SEQ ID NO: 1466932 - DNA, 15 bp, Homo sapiens
cctcctgagaagcta

SEQ ID NO: 1466933 - DNA, 15 bp, Homo sapiens
gcctcctgagaagct

SEQ ID NO: 1466934 - DNA, 15 bp, Homo sapiens
agcctcctgagaagc

SEQ ID NO: 1466935 - DNA, 15 bp, Homo sapiens
cagcctcctgagaag

SEQ ID NO: 1466936 - DNA, 15 bp, Homo sapiens
tcagcctcctgagaa

SEQ ID NO: 1466937 - DNA, 15 bp, Homo sapiens
ctcagcctcctgaga

SEQ ID NO: 1466938 - DNA, 15 bp, Homo sapiens
gctcctgcctcagcc

SEQ ID NO: 1466939 - DNA, 15 bp, Homo sapiens
tgctcctgcctcagc

SEQ ID NO: 1466940 - DNA, 15 bp, Homo sapiens
ctgctcctgcctcag

SEQ ID NO: 1466941 - DNA, 15 bp, Homo sapiens
cctgctcctgcctca

SEQ ID NO: 1466942 - DNA, 15 bp, Homo sapiens
tcctgctcctgcctc

SEQ ID NO: 1466943 - DNA, 15 bp, Homo sapiens
ctcctgctcctgcct

SEQ ID NO: 1466944 - DNA, 15 bp, Homo sapiens
cctcctgctcctgcc

SEQ ID NO: 1466945 - DNA, 15 bp, Homo sapiens
tcctcctgctcctgc

SEQ ID NO: 1466946 - DNA, 15 bp, Homo sapiens
atcctcctgctcctg

SEQ ID NO: 1466947 - DNA, 15 bp, Homo sapiens
gatcctcctgctcct

SEQ ID NO: 1466948 - DNA, 15 bp, Homo sapiens
agatcctcctgctcc

SEQ ID NO: 1466949 - DNA, 15 bp, Homo sapiens
gagatcctcctgctc

SEQ ID NO: 1466950 - DNA, 15 bp, Homo sapiens
agagatcctcctgct

SEQ ID NO: 1466951 - DNA, 15 bp, Homo sapiens
aagagatcctcctgc

SEQ ID NO: 1466952 - DNA, 15 bp, Homo sapiens
caagagatcctcctg

SEQ ID NO: 1466953 - DNA, 15 bp, Homo sapiens
tcaagagatcctcct

SEQ ID NO: 1466954 - DNA, 15 bp, Homo sapiens
ctcaagagatcctcc

SEQ ID NO: 1466955 - DNA, 15 bp, Homo sapiens
gctcaagagatcctc

SEQ ID NO: 1466956 - DNA, 15 bp, Homo sapiens
ggctcaagagatcct

SEQ ID NO: 1466957 - DNA, 15 bp, Homo sapiens
gggctcaagagatcc

SEQ ID NO: 1466958 - DNA, 15 bp, Homo sapiens
tgggctcaagagatc

SEQ ID NO: 1466959 - DNA, 15 bp, Homo sapiens
ctgggctcaagagat

SEQ ID NO: 1466960 - DNA, 15 bp, Homo sapiens
cctgggctcaagaga

SEQ ID NO: 1466961 - DNA, 15 bp, Homo sapiens
tcctgggctcaagag

SEQ ID NO: 1466962 - DNA, 15 bp, Homo sapiens
ttcctgggctcaaga

SEQ ID NO: 1466963 - DNA, 15 bp, Homo sapiens
attcctgggctcaag

SEQ ID NO: 1466964 - DNA, 15 bp, Homo sapiens
aattcctgggctcaa

SEQ ID NO: 1466965 - DNA, 15 bp, Homo sapiens
aaattcctgggctca

SEQ ID NO: 1466966 - DNA, 15 bp, Homo sapiens
gaaattcctgggctc

SEQ ID NO: 1466967 - DNA, 15 bp, Homo sapiens
tgaaattcctgggct

SEQ ID NO: 1466968 - DNA, 15 bp, Homo sapiens
ctgaaattcctgggc

SEQ ID NO: 1466969 - DNA, 15 bp, Homo sapiens
gctgaaattcctggg

SEQ ID NO: 1466970 - DNA, 15 bp, Homo sapiens
ggctgaaattcctgg

SEQ ID NO: 1466971 - DNA, 15 bp, Homo sapiens
aggctgaaattcctg

SEQ ID NO: 1466972 - DNA, 15 bp, Homo sapiens
caggctgaaattcct

SEQ ID NO: 1466973 - DNA, 15 bp, Homo sapiens
acaggctgaaattcc

SEQ ID NO: 1466974 - DNA, 15 bp, Homo sapiens
gacaggctgaaattc

SEQ ID NO: 1466975 - DNA, 15 bp, Homo sapiens
agacaggctgaaatt

SEQ ID NO: 1466976 - DNA, 15 bp, Homo sapiens
tagacaggctgaaat

SEQ ID NO: 1466977 - DNA, 15 bp, Homo sapiens
ctagacaggctgaaa

SEQ ID NO: 1466978 - DNA, 15 bp, Homo sapiens
cctagacaggctgaa

SEQ ID NO: 1466979 - DNA, 15 bp, Homo sapiens
tcctagacaggctga

SEQ ID NO: 1466980 - DNA, 15 bp, Homo sapiens
atcctagacaggctg

SEQ ID NO: 1466981 - DNA, 15 bp, Homo sapiens
aatcctagacaggct

SEQ ID NO: 1466982 - DNA, 15 bp, Homo sapiens
caatcctagacaggc

SEQ ID NO: 1466983 - DNA, 15 bp, Homo sapiens
gcaatcctagacagg

SEQ ID NO: 1466984 - DNA, 15 bp, Homo sapiens
agcaatcctagacag

SEQ ID NO: 1466985 - DNA, 15 bp, Homo sapiens
gagcaatcctagaca

SEQ ID NO: 1466986 - DNA, 15 bp, Homo sapiens
ggagcaatcctagac

SEQ ID NO: 1466987 - DNA, 15 bp, Homo sapiens
tggagcaatcctaga

SEQ ID NO: 1466988 - DNA, 15 bp, Homo sapiens
ctggagcaatcctag

SEQ ID NO: 1466989 - DNA, 15 bp, Homo sapiens
actggagcaatccta

SEQ ID NO: 1466990 - DNA, 15 bp, Homo sapiens
cactggagcaatcct

SEQ ID NO: 1466991 - DNA, 15 bp, Homo sapiens
tcactggagcaatcc

SEQ ID NO: 1466992 - DNA, 15 bp, Homo sapiens
ttcactggagcaatc

SEQ ID NO: 1466993 - DNA, 15 bp, Homo sapiens
attcactggagcaat

SEQ ID NO: 1466994 - DNA, 15 bp, Homo sapiens
tattcactggagcaa

SEQ ID NO: 1466995 - DNA, 15 bp, Homo sapiens
ctattcactggagca

SEQ ID NO: 1466996 - DNA, 15 bp, Homo sapiens
gctattcactggagc

SEQ ID NO: 1466997 - DNA, 15 bp, Homo sapiens
tgctattcactggag

SEQ ID NO: 1466998 - DNA, 15 bp, Homo sapiens
ttgctattcactgga

SEQ ID NO: 1466999 - DNA, 15 bp, Homo sapiens
gttgctattcactgg

SEQ ID NO: 1467000 - DNA, 15 bp, Homo sapiens
agttgctattcactg

SEQ ID NO: 1467001 - DNA, 15 bp, Homo sapiens
cagttgctattcact

SEQ ID NO: 1467002 - DNA, 15 bp, Homo sapiens
acagttgctattcac

SEQ ID NO: 1467003 - DNA, 15 bp, Homo sapiens
tacagttgctattca

SEQ ID NO: 1467004 - DNA, 15 bp, Homo sapiens
gtacagttgctattc

SEQ ID NO: 1467005 - DNA, 15 bp, Homo sapiens
agtacagttgctatt

SEQ ID NO: 1467006 - DNA, 15 bp, Homo sapiens
gagtacagttgctat

SEQ ID NO: 1467007 - DNA, 15 bp, Homo sapiens
ggagtacagttgcta

SEQ ID NO: 1467008 - DNA, 15 bp, Homo sapiens
tggagtacagttgct

SEQ ID NO: 1467009 - DNA, 15 bp, Homo sapiens
ctggagtacagttgc

SEQ ID NO: 1467010 - DNA, 15 bp, Homo sapiens
gctggagtacagttg

SEQ ID NO: 1467011 - DNA, 15 bp, Homo sapiens
ggctggagtacagtt

SEQ ID NO: 1467012 - DNA, 15 bp, Homo sapiens
gttttttgcccaggc

SEQ ID NO: 1467013 - DNA, 15 bp, Homo sapiens
ggttttttgcccagg

SEQ ID NO: 1467014 - DNA, 15 bp, Homo sapiens
tggttttttgcccag

SEQ ID NO: 1467015 - DNA, 15 bp, Homo sapiens
ttggttttttgccca

SEQ ID NO: 1467016 - DNA, 15 bp, Homo sapiens
cttggttttttgccc

SEQ ID NO: 1467017 - DNA, 15 bp, Homo sapiens
tcttggttttttgcc

SEQ ID NO: 1467018 - DNA, 15 bp, Homo sapiens
atcttggttttttgc

SEQ ID NO: 1467019 - DNA, 15 bp, Homo sapiens
gatcttggttttttg

SEQ ID NO: 1467020 - DNA, 15 bp, Homo sapiens
ggatcttggtttttt

SEQ ID NO: 1467021 - DNA, 15 bp, Homo sapiens
gggatcttggttttt

SEQ ID NO: 1467022 - DNA, 15 bp, Homo sapiens
tgggatcttggtttt

SEQ ID NO: 1467023 - DNA, 15 bp, Homo sapiens
atgggatcttggttt

SEQ ID NO: 1467024 - DNA, 15 bp, Homo sapiens
gatgggatcttggtt

SEQ ID NO: 1467025 - DNA, 15 bp, Homo sapiens
agatgggatcttggt

SEQ ID NO: 1467026 - DNA, 15 bp, Homo sapiens
gagatgggatcttgg

SEQ ID NO: 1467027 - DNA, 15 bp, Homo sapiens
gttttagagatggga

SEQ ID NO: 1467028 - DNA, 15 bp, Homo sapiens
tgttttagagatggg

SEQ ID NO: 1467029 - DNA, 15 bp, Homo sapiens
ttgttttagagatgg

SEQ ID NO: 1467030 - DNA, 15 bp, Homo sapiens
tttgttttagagatg

SEQ ID NO: 1467031 - DNA, 15 bp, Homo sapiens
ttttgttttagagat

SEQ ID NO: 1467032 - DNA, 15 bp, Homo sapiens
tttttgttttagaga

SEQ ID NO: 1467033 - DNA, 15 bp, Homo sapiens
gtttttgttttagag

SEQ ID NO: 1467034 - DNA, 15 bp, Homo sapiens
tgtttttgttttaga

SEQ ID NO: 1467035 - DNA, 15 bp, Homo sapiens
ttgtttttgttttag

SEQ ID NO: 1467036 - DNA, 15 bp, Homo sapiens
gtttgtttttgtttt

SEQ ID NO: 1467037 - DNA, 15 bp, Homo sapiens
gtgtttgtttttgtt

SEQ ID NO: 1467038 - DNA, 15 bp, Homo sapiens
tgtgtttgtttttgt

SEQ ID NO: 1467039 - DNA, 15 bp, Homo sapiens
ttgtgtttgtttttg

SEQ ID NO: 1467040 - DNA, 15 bp, Homo sapiens
tttgtgtttgttttt

SEQ ID NO: 1467041 - DNA, 15 bp, Homo sapiens
gtttgtgtttgtttt

SEQ ID NO: 1467042 - DNA, 15 bp, Homo sapiens
tgtttgtgtttgttt

SEQ ID NO: 1467043 - DNA, 15 bp, Homo sapiens
ttgtttgtgtttgtt

SEQ ID NO: 1467044 - DNA, 15 bp, Homo sapiens
tttgtttgtgtttgt

SEQ ID NO: 1467045 - DNA, 15 bp, Homo sapiens
gtttgtttgtgtttg

SEQ ID NO: 1467046 - DNA, 15 bp, Homo sapiens
agtttgtttgtgttt

SEQ ID NO: 1467047 - DNA, 15 bp, Homo sapiens
aagtttgtttgtgtt

SEQ ID NO: 1467048 - DNA, 15 bp, Homo sapiens
aaagtttgtttgtgt

SEQ ID NO: 1467049 - DNA, 15 bp, Homo sapiens
aaaagtttgtttgtg

SEQ ID NO: 1467050 - DNA, 15 bp, Homo sapiens
gaaaagtttgtttgt

SEQ ID NO: 1467051 - DNA, 15 bp, Homo sapiens
agaaaagtttgtttg

SEQ ID NO: 1467052 - DNA, 15 bp, Homo sapiens
cagaaaagtttgttt

SEQ ID NO: 1467053 - DNA, 15 bp, Homo sapiens
ccagaaaagtttgtt

SEQ ID NO: 1467054 - DNA, 15 bp, Homo sapiens
cccagaaaagtttgt

SEQ ID NO: 1467055 - DNA, 15 bp, Homo sapiens
gcccagaaaagtttg

SEQ ID NO: 1467056 - DNA, 15 bp, Homo sapiens
ggcccagaaaagttt

SEQ ID NO: 1467057 - DNA, 15 bp, Homo sapiens
tggcccagaaaagtt

SEQ ID NO: 1467058 - DNA, 15 bp, Homo sapiens
ctggcccagaaaagt

SEQ ID NO: 1467059 - DNA, 15 bp, Homo sapiens
actggcccagaaaag

SEQ ID NO: 1467060 - DNA, 15 bp, Homo sapiens
aactggcccagaaaa

SEQ ID NO: 1467061 - DNA, 15 bp, Homo sapiens
taactggcccagaaa

SEQ ID NO: 1467062 - DNA, 15 bp, Homo sapiens
ataactggcccagaa

SEQ ID NO: 1467063 - DNA, 15 bp, Homo sapiens
aataactggcccaga

SEQ ID NO: 1467064 - DNA, 15 bp, Homo sapiens
gaataactggcccag

SEQ ID NO: 1467065 - DNA, 15 bp, Homo sapiens
tgaataactggccca

SEQ ID NO: 1467066 - DNA, 15 bp, Homo sapiens
ctgaataactggccc

SEQ ID NO: 1467067 - DNA, 15 bp, Homo sapiens
tctgaataactggcc

SEQ ID NO: 1467068 - DNA, 15 bp, Homo sapiens
ctctgaataactggc

SEQ ID NO: 1467069 - DNA, 15 bp, Homo sapiens
actctgaataactgg

SEQ ID NO: 1467070 - DNA, 15 bp, Homo sapiens
gactctgaataactg

SEQ ID NO: 1467071 - DNA, 15 bp, Homo sapiens
tgactctgaataact

SEQ ID NO: 1467072 - DNA, 15 bp, Homo sapiens
ttgactctgaataac

SEQ ID NO: 1467073 - DNA, 15 bp, Homo sapiens
attgactctgaataa

SEQ ID NO: 1467074 - DNA, 15 bp, Homo sapiens
aattgactctgaata

SEQ ID NO: 1467075 - DNA, 15 bp, Homo sapiens
taattgactctgaat

SEQ ID NO: 1467076 - DNA, 15 bp, Homo sapiens
ttaattgactctgaa

SEQ ID NO: 1467077 - DNA, 15 bp, Homo sapiens
cttaattgactctga

SEQ ID NO: 1467078 - DNA, 15 bp, Homo sapiens
tcttaattgactctg

SEQ ID NO: 1467079 - DNA, 15 bp, Homo sapiens
ctcttaattgactct

SEQ ID NO: 1467080 - DNA, 15 bp, Homo sapiens
cctcttaattgactc

SEQ ID NO: 1467081 - DNA, 15 bp, Homo sapiens
tcctcttaattgact

SEQ ID NO: 1467082 - DNA, 15 bp, Homo sapiens
atcctcttaattgac

SEQ ID NO: 1467083 - DNA, 15 bp, Homo sapiens
aatcctcttaattga

SEQ ID NO: 1467084 - DNA, 15 bp, Homo sapiens
gaatcctcttaattg

SEQ ID NO: 1467085 - DNA, 15 bp, Homo sapiens
ggaatcctcttaatt

SEQ ID NO: 1467086 - DNA, 15 bp, Homo sapiens
tggaatcctcttaat

SEQ ID NO: 1467087 - DNA, 15 bp, Homo sapiens
ttggaatcctcttaa

SEQ ID NO: 1467088 - DNA, 15 bp, Homo sapiens
gttggaatcctctta

SEQ ID NO: 1467089 - DNA, 15 bp, Homo sapiens
agttggaatcctctt

SEQ ID NO: 1467090 - DNA, 15 bp, Homo sapiens
cagttggaatcctct

SEQ ID NO: 1467091 - DNA, 15 bp, Homo sapiens
acagttggaatcctc

SEQ ID NO: 1467092 - DNA, 15 bp, Homo sapiens
gacagttggaatcct

SEQ ID NO: 1467093 - DNA, 15 bp, Homo sapiens
ggacagttggaatcc

SEQ ID NO: 1467094 - DNA, 15 bp, Homo sapiens
aggacagttggaatc

SEQ ID NO: 1467095 - DNA, 15 bp, Homo sapiens
taggacagttggaat

SEQ ID NO: 1467096 - DNA, 15 bp, Homo sapiens
ttaggacagttggaa

SEQ ID NO: 1467097 - DNA, 15 bp, Homo sapiens
tttaggacagttgga

SEQ ID NO: 1467098 - DNA, 15 bp, Homo sapiens
ttttaggacagttgg

SEQ ID NO: 1467099 - DNA, 15 bp, Homo sapiens
attttaggacagttg

SEQ ID NO: 1467100 - DNA, 15 bp, Homo sapiens
gattttaggacagtt

SEQ ID NO: 1467101 - DNA, 15 bp, Homo sapiens
tgattttaggacagt

SEQ ID NO: 1467102 - DNA, 15 bp, Homo sapiens
atgattttaggacag

SEQ ID NO: 1467103 - DNA, 15 bp, Homo sapiens
gatgattttaggaca

SEQ ID NO: 1467104 - DNA, 15 bp, Homo sapiens
tgatgattttaggac

SEQ ID NO: 1467105 - DNA, 15 bp, Homo sapiens
atgatgattttagga

SEQ ID NO: 1467106 - DNA, 15 bp, Homo sapiens
catgatgattttagg

SEQ ID NO: 1467107 - DNA, 15 bp, Homo sapiens
tcatgatgattttag

SEQ ID NO: 1467108 - DNA, 15 bp, Homo sapiens
gtcatgatgatttta

SEQ ID NO: 1467109 - DNA, 15 bp, Homo sapiens
agtcatgatgatttt

SEQ ID NO: 1467110 - DNA, 15 bp, Homo sapiens
gagtcatgatgattt

SEQ ID NO: 1467111 - DNA, 15 bp, Homo sapiens
agagtcatgatgatt

SEQ ID NO: 1467112 - DNA, 15 bp, Homo sapiens
tagagtcatgatgat

SEQ ID NO: 1467113 - DNA, 15 bp, Homo sapiens
atagagtcatgatga

SEQ ID NO: 1467114 - DNA, 15 bp, Homo sapiens
gatagagtcatgatg

SEQ ID NO: 1467115 - DNA, 15 bp, Homo sapiens
agatagagtcatgat

SEQ ID NO: 1467116 - DNA, 15 bp, Homo sapiens
cagatagagtcatga

SEQ ID NO: 1467117 - DNA, 15 bp, Homo sapiens
tcagatagagtcatg

SEQ ID NO: 1467118 - DNA, 15 bp, Homo sapiens
atcagatagagtcat

SEQ ID NO: 1467119 - DNA, 15 bp, Homo sapiens
aatcagatagagtca

SEQ ID NO: 1467120 - DNA, 15 bp, Homo sapiens
aaatcagatagagtc

SEQ ID NO: 1467121 - DNA, 15 bp, Homo sapiens
taaatcagatagagt

SEQ ID NO: 1467122 - DNA, 15 bp, Homo sapiens
ttaaatcagatagag

SEQ ID NO: 1467123 - DNA, 15 bp, Homo sapiens
tttaaatcagataga

SEQ ID NO: 1467124 - DNA, 15 bp, Homo sapiens
gtttaaatcagatag

SEQ ID NO: 1467125 - DNA, 15 bp, Homo sapiens
tgtttaaatcagata

SEQ ID NO: 1467126 - DNA, 15 bp, Homo sapiens
ttgtttaaatcagat

SEQ ID NO: 1467127 - DNA, 15 bp, Homo sapiens
cttgtttaaatcaga

SEQ ID NO: 1467128 - DNA, 15 bp, Homo sapiens
acttgtttaaatcag

SEQ ID NO: 1467129 - DNA, 15 bp, Homo sapiens
aacttgtttaaatca

SEQ ID NO: 1467130 - DNA, 15 bp, Homo sapiens
aaacttgtttaaatc

SEQ ID NO: 1467131 - DNA, 15 bp, Homo sapiens
aaaacttgtttaaat

SEQ ID NO: 1467132 - DNA, 15 bp, Homo sapiens
taaaacttgtttaaa

SEQ ID NO: 1467133 - DNA, 15 bp, Homo sapiens
ttaaaacttgtttaa

SEQ ID NO: 1467134 - DNA, 15 bp, Homo sapiens
tttaaaacttgttta

SEQ ID NO: 1467135 - DNA, 15 bp, Homo sapiens
atttaaaacttgttt

SEQ ID NO: 1467136 - DNA, 15 bp, Homo sapiens
tatttaaaacttgtt

SEQ ID NO: 1467137 - DNA, 15 bp, Homo sapiens
attatttaaaacttg

SEQ ID NO: 1467138 - DNA, 15 bp, Homo sapiens
gattatttaaaactt

SEQ ID NO: 1467139 - DNA, 15 bp, Homo sapiens
tgattatttaaaact

SEQ ID NO: 1467140 - DNA, 15 bp, Homo sapiens
ttgattatttaaaac

SEQ ID NO: 1467141 - DNA, 15 bp, Homo sapiens
tttgattatttaaaa

SEQ ID NO: 1467142 - DNA, 15 bp, Homo sapiens
ttttgattatttaaa

SEQ ID NO: 1467143 - DNA, 15 bp, Homo sapiens
gttttgattatttaa

SEQ ID NO: 1467144 - DNA, 15 bp, Homo sapiens
agttttgattattta

SEQ ID NO: 1467145 - DNA, 15 bp, Homo sapiens
gagttttgattattt

SEQ ID NO: 1467146 - DNA, 15 bp, Homo sapiens
agagttttgattatt

SEQ ID NO: 1467147 - DNA, 15 bp, Homo sapiens
aagagttttgattat

SEQ ID NO: 1467148 - DNA, 15 bp, Homo sapiens
gaagagttttgatta

SEQ ID NO: 1467149 - DNA, 15 bp, Homo sapiens
ggaagagttttgatt

SEQ ID NO: 1467150 - DNA, 15 bp, Homo sapiens
aggaagagttttgat

SEQ ID NO: 1467151 - DNA, 15 bp, Homo sapiens
aaggaagagttttga

SEQ ID NO: 1467152 - DNA, 15 bp, Homo sapiens
caaggaagagttttg

SEQ ID NO: 1467153 - DNA, 15 bp, Homo sapiens
cccaaggaagagttt

SEQ ID NO: 1467154 - DNA, 15 bp, Homo sapiens
tcccaaggaagagtt

SEQ ID NO: 1467155 - DNA, 15 bp, Homo sapiens
ctcccaaggaagagt

SEQ ID NO: 1467156 - DNA, 15 bp, Homo sapiens
gctcccaaggaagag

SEQ ID NO: 1467157 - DNA, 15 bp, Homo sapiens
ggctcccaaggaaga

SEQ ID NO: 1467158 - DNA, 15 bp, Homo sapiens
aggctcccaaggaag

SEQ ID NO: 1467159 - DNA, 15 bp, Homo sapiens
taggctcccaaggaa

SEQ ID NO: 1467160 - DNA, 15 bp, Homo sapiens
ctaggctcccaagga

SEQ ID NO: 1467161 - DNA, 15 bp, Homo sapiens
tctaggctcccaagg

SEQ ID NO: 1467162 - DNA, 15 bp, Homo sapiens
atctaggctcccaag

SEQ ID NO: 1467163 - DNA, 15 bp, Homo sapiens
tatctaggctcccaa

SEQ ID NO: 1467164 - DNA, 15 bp, Homo sapiens
atatctaggctccca

SEQ ID NO: 1467165 - DNA, 15 bp, Homo sapiens
catatctaggctccc

SEQ ID NO: 1467166 - DNA, 15 bp, Homo sapiens
tcatatctaggctcc

SEQ ID NO: 1467167 - DNA, 15 bp, Homo sapiens
ctcatatctaggctc

SEQ ID NO: 1467168 - DNA, 15 bp, Homo sapiens
gctcatatctaggct

SEQ ID NO: 1467169 - DNA, 15 bp, Homo sapiens
ggctcatatctaggc

SEQ ID NO: 1467170 - DNA, 15 bp, Homo sapiens
tggctcatatctagg

SEQ ID NO: 1467171 - DNA, 15 bp, Homo sapiens
ctggctcatatctag

SEQ ID NO: 1467172 - DNA, 15 bp, Homo sapiens
gctggctcatatcta

SEQ ID NO: 1467173 - DNA, 15 bp, Homo sapiens
tgctggctcatatct

SEQ ID NO: 1467174 - DNA, 15 bp, Homo sapiens
atgctggctcatatc

SEQ ID NO: 1467175 - DNA, 15 bp, Homo sapiens
aatgctggctcatat

SEQ ID NO: 1467176 - DNA, 15 bp, Homo sapiens
aaatgctggctcata

SEQ ID NO: 1467177 - DNA, 15 bp, Homo sapiens
aaaatgctggctcat

SEQ ID NO: 1467178 - DNA, 15 bp, Homo sapiens
taaaatgctggctca

SEQ ID NO: 1467179 - DNA, 15 bp, Homo sapiens
ataaaatgctggctc

SEQ ID NO: 1467180 - DNA, 15 bp, Homo sapiens
cataaaatgctggct

SEQ ID NO: 1467181 - DNA, 15 bp, Homo sapiens
tcataaaatgctggc

SEQ ID NO: 1467182 - DNA, 15 bp, Homo sapiens
atcataaaatgctgg

SEQ ID NO: 1467183 - DNA, 15 bp, Homo sapiens
aatcataaaatgctg

SEQ ID NO: 1467184 - DNA, 15 bp, Homo sapiens
aaatcataaaatgct

SEQ ID NO: 1467185 - DNA, 15 bp, Homo sapiens
taaatcataaaatgc

SEQ ID NO: 1467186 - DNA, 15 bp, Homo sapiens
ttaaatcataaaatg

SEQ ID NO: 1467187 - DNA, 15 bp, Homo sapiens
tttaaatcataaaat

SEQ ID NO: 1467188 - DNA, 15 bp, Homo sapiens
ttttaaatcataaaa

SEQ ID NO: 1467189 - DNA, 15 bp, Homo sapiens
attttaaatcataaa

SEQ ID NO: 1467190 - DNA, 15 bp, Homo sapiens
cattttaaatcataa

SEQ ID NO: 1467191 - DNA, 15 bp, Homo sapiens
tcattttaaatcata

SEQ ID NO: 1467192 - DNA, 15 bp, Homo sapiens
ctcattttaaatcat

SEQ ID NO: 1467193 - DNA, 15 bp, Homo sapiens
tctcattttaaatca

SEQ ID NO: 1467194 - DNA, 15 bp, Homo sapiens
atctcattttaaatc

SEQ ID NO: 1467195 - DNA, 15 bp, Homo sapiens
aaaaatctcatttta

SEQ ID NO: 1467196 - DNA, 15 bp, Homo sapiens
taaaaatctcatttt

SEQ ID NO: 1467197 - DNA, 15 bp, Homo sapiens
ttaaaaatctcattt

SEQ ID NO: 1467198 - DNA, 15 bp, Homo sapiens
gttaaaaatctcatt

SEQ ID NO: 1467199 - DNA, 15 bp, Homo sapiens
tgttaaaaatctcat

SEQ ID NO: 1467200 - DNA, 15 bp, Homo sapiens
atgttaaaaatctca

SEQ ID NO: 1467201 - DNA, 15 bp, Homo sapiens
gatgttaaaaatctc

SEQ ID NO: 1467202 - DNA, 15 bp, Homo sapiens
agatgttaaaaatct

SEQ ID NO: 1467203 - DNA, 15 bp, Homo sapiens
aagatgttaaaaatc

SEQ ID NO: 1467204 - DNA, 15 bp, Homo sapiens
gaagatgttaaaaat

SEQ ID NO: 1467205 - DNA, 15 bp, Homo sapiens
tgaagatgttaaaaa

SEQ ID NO: 1467206 - DNA, 15 bp, Homo sapiens
atgaagatgttaaaa

SEQ ID NO: 1467207 - DNA, 15 bp, Homo sapiens
tatgaagatgttaaa

SEQ ID NO: 1467208 - DNA, 15 bp, Homo sapiens
atatgaagatgttaa

SEQ ID NO: 1467209 - DNA, 15 bp, Homo sapiens
catatgaagatgtta

SEQ ID NO: 1467210 - DNA, 15 bp, Homo sapiens
gcatatgaagatgtt

SEQ ID NO: 1467211 - DNA, 15 bp, Homo sapiens
agcatatgaagatgt

SEQ ID NO: 1467212 - DNA, 15 bp, Homo sapiens
cagcatatgaagatg

SEQ ID NO: 1467213 - DNA, 15 bp, Homo sapiens
tcagcatatgaagat

SEQ ID NO: 1467214 - DNA, 15 bp, Homo sapiens
ctcagcatatgaaga

SEQ ID NO: 1467215 - DNA, 15 bp, Homo sapiens
actcagcatatgaag

SEQ ID NO: 1467216 - DNA, 15 bp, Homo sapiens
gactcagcatatgaa

SEQ ID NO: 1467217 - DNA, 15 bp, Homo sapiens
tgactcagcatatga

SEQ ID NO: 1467218 - DNA, 15 bp, Homo sapiens
atgactcagcatatg

SEQ ID NO: 1467219 - DNA, 15 bp, Homo sapiens
gatgactcagcatat

SEQ ID NO: 1467220 - DNA, 15 bp, Homo sapiens
agatgactcagcata

SEQ ID NO: 1467221 - DNA, 15 bp, Homo sapiens
aagatgactcagcat

SEQ ID NO: 1467222 - DNA, 15 bp, Homo sapiens
taagatgactcagca

SEQ ID NO: 1467223 - DNA, 15 bp, Homo sapiens
ttaagatgactcagc

SEQ ID NO: 1467224 - DNA, 15 bp, Homo sapiens
cttaagatgactcag

SEQ ID NO: 1467225 - DNA, 15 bp, Homo sapiens
acttaagatgactca

SEQ ID NO: 1467226 - DNA, 15 bp, Homo sapiens
tacttaagatgactc

SEQ ID NO: 1467227 - DNA, 15 bp, Homo sapiens
atacttaagatgact

SEQ ID NO: 1467228 - DNA, 15 bp, Homo sapiens
aatacttaagatgac

SEQ ID NO: 1467229 - DNA, 15 bp, Homo sapiens
aaatacttaagatga

SEQ ID NO: 1467230 - DNA, 15 bp, Homo sapiens
aaaatacttaagatg

SEQ ID NO: 1467231 - DNA, 15 bp, Homo sapiens
taaaatacttaagat

SEQ ID NO: 1467232 - DNA, 15 bp, Homo sapiens
ttaaaatacttaaga

SEQ ID NO: 1467233 - DNA, 15 bp, Homo sapiens
tttaaaatacttaag

SEQ ID NO: 1467234 - DNA, 15 bp, Homo sapiens
gtttaaaatacttaa

SEQ ID NO: 1467235 - DNA, 15 bp, Homo sapiens
ggtttaaaatactta

SEQ ID NO: 1467236 - DNA, 15 bp, Homo sapiens
tggtttaaaatactt

SEQ ID NO: 1467237 - DNA, 15 bp, Homo sapiens
gtggtttaaaatact

SEQ ID NO: 1467238 - DNA, 15 bp, Homo sapiens
agtggtttaaaatac

SEQ ID NO: 1467239 - DNA, 15 bp, Homo sapiens
aagtggtttaaaata

SEQ ID NO: 1467240 - DNA, 15 bp, Homo sapiens
aaagtggtttaaaat

SEQ ID NO: 1467241 - DNA, 15 bp, Homo sapiens
taaagtggtttaaaa

SEQ ID NO: 1467242 - DNA, 15 bp, Homo sapiens
gtaaagtggtttaaa

SEQ ID NO: 1467243 - DNA, 15 bp, Homo sapiens
ggtaaagtggtttaa

SEQ ID NO: 1467244 - DNA, 15 bp, Homo sapiens
aggtaaagtggttta

SEQ ID NO: 1467245 - DNA, 15 bp, Homo sapiens
taggtaaagtggttt

SEQ ID NO: 1467246 - DNA, 15 bp, Homo sapiens
ataggtaaagtggtt

SEQ ID NO: 1467247 - DNA, 15 bp, Homo sapiens
aataggtaaagtggt

SEQ ID NO: 1467248 - DNA, 15 bp, Homo sapiens
aaataggtaaagtgg

SEQ ID NO: 1467249 - DNA, 15 bp, Homo sapiens
caaataggtaaagtg

SEQ ID NO: 1467250 - DNA, 15 bp, Homo sapiens
gcaaataggtaaagt

SEQ ID NO: 1467251 - DNA, 15 bp, Homo sapiens
tgcaaataggtaaag

SEQ ID NO: 1467252 - DNA, 15 bp, Homo sapiens
atgcaaataggtaaa

SEQ ID NO: 1467253 - DNA, 15 bp, Homo sapiens
tatgcaaataggtaa

SEQ ID NO: 1467254 - DNA, 15 bp, Homo sapiens
atatgcaaataggta

SEQ ID NO: 1467255 - DNA, 15 bp, Homo sapiens
tatatgcaaataggt

SEQ ID NO: 1467256 - DNA, 15 bp, Homo sapiens
ttatatgcaaatagg

SEQ ID NO: 1467257 - DNA, 15 bp, Homo sapiens
cttatatgcaaatag

SEQ ID NO: 1467258 - DNA, 15 bp, Homo sapiens
gcttatatgcaaata

SEQ ID NO: 1467259 - DNA, 15 bp, Homo sapiens
tgcttatatgcaaat

SEQ ID NO: 1467260 - DNA, 15 bp, Homo sapiens
ttgcttatatgcaaa

SEQ ID NO: 1467261 - DNA, 15 bp, Homo sapiens
attgcttatatgcaa

SEQ ID NO: 1467262 - DNA, 15 bp, Homo sapiens
cattgcttatatgca

SEQ ID NO: 1467263 - DNA, 15 bp, Homo sapiens
tcattgcttatatgc

SEQ ID NO: 1467264 - DNA, 15 bp, Homo sapiens
atcattgcttatatg

SEQ ID NO: 1467265 - DNA, 15 bp, Homo sapiens
catcattgcttatat

SEQ ID NO: 1467266 - DNA, 15 bp, Homo sapiens
ccatcattgcttata

SEQ ID NO: 1467267 - DNA, 15 bp, Homo sapiens
tccatcattgcttat

SEQ ID NO: 1467268 - DNA, 15 bp, Homo sapiens
gtccatcattgctta

SEQ ID NO: 1467269 - DNA, 15 bp, Homo sapiens
tgtccatcattgctt

SEQ ID NO: 1467270 - DNA, 15 bp, Homo sapiens
ttgtccatcattgct

SEQ ID NO: 1467271 - DNA, 15 bp, Homo sapiens
cttgtccatcattgc

SEQ ID NO: 1467272 - DNA, 15 bp, Homo sapiens
gcttgtccatcattg

SEQ ID NO: 1467273 - DNA, 15 bp, Homo sapiens
ggcttgtccatcatt

SEQ ID NO: 1467274 - DNA, 15 bp, Homo sapiens
gggcttgtccatcat

SEQ ID NO: 1467275 - DNA, 15 bp, Homo sapiens
agggcttgtccatca

SEQ ID NO: 1467276 - DNA, 15 bp, Homo sapiens
aagggcttgtccatc

SEQ ID NO: 1467277 - DNA, 15 bp, Homo sapiens
taagggcttgtccat

SEQ ID NO: 1467278 - DNA, 15 bp, Homo sapiens
ctaagggcttgtcca

SEQ ID NO: 1467279 - DNA, 15 bp, Homo sapiens
actaagggcttgtcc

SEQ ID NO: 1467280 - DNA, 15 bp, Homo sapiens
tactaagggcttgtc

SEQ ID NO: 1467281 - DNA, 15 bp, Homo sapiens
atactaagggcttgt

SEQ ID NO: 1467282 - DNA, 15 bp, Homo sapiens
aatactaagggcttg

SEQ ID NO: 1467283 - DNA, 15 bp, Homo sapiens
gaatactaagggctt

SEQ ID NO: 1467284 - DNA, 15 bp, Homo sapiens
agaatactaagggct

SEQ ID NO: 1467285 - DNA, 15 bp, Homo sapiens
cagaatactaagggc

SEQ ID NO: 1467286 - DNA, 15 bp, Homo sapiens
tcagaatactaaggg

SEQ ID NO: 1467287 - DNA, 15 bp, Homo sapiens
gtcagaatactaagg

SEQ ID NO: 1467288 - DNA, 15 bp, Homo sapiens
agtcagaatactaag

SEQ ID NO: 1467289 - DNA, 15 bp, Homo sapiens
gagtcagaatactaa

SEQ ID NO: 1467290 - DNA, 15 bp, Homo sapiens
tgagtcagaatacta

SEQ ID NO: 1467291 - DNA, 15 bp, Homo sapiens
ctgagtcagaatact

SEQ ID NO: 1467292 - DNA, 15 bp, Homo sapiens
gctgagtcagaatac

SEQ ID NO: 1467293 - DNA, 15 bp, Homo sapiens
agctgagtcagaata

SEQ ID NO: 1467294 - DNA, 15 bp, Homo sapiens
aagctgagtcagaat

SEQ ID NO: 1467295 - DNA, 15 bp, Homo sapiens
aaagctgagtcagaa

SEQ ID NO: 1467296 - DNA, 15 bp, Homo sapiens
taaagctgagtcaga

SEQ ID NO: 1467297 - DNA, 15 bp, Homo sapiens
ataaagctgagtcag

SEQ ID NO: 1467298 - DNA, 15 bp, Homo sapiens
tataaagctgagtca

SEQ ID NO: 1467299 - DNA, 15 bp, Homo sapiens
ctataaagctgagtc

SEQ ID NO: 1467300 - DNA, 15 bp, Homo sapiens
gctataaagctgagt

SEQ ID NO: 1467301 - DNA, 15 bp, Homo sapiens
tgctataaagctgag

SEQ ID NO: 1467302 - DNA, 15 bp, Homo sapiens
atgctataaagctga

SEQ ID NO: 1467303 - DNA, 15 bp, Homo sapiens
aatgctataaagctg

SEQ ID NO: 1467304 - DNA, 15 bp, Homo sapiens
aaatgctataaagct

SEQ ID NO: 1467305 - DNA, 15 bp, Homo sapiens
taaatgctataaagc

SEQ ID NO: 1467306 - DNA, 15 bp, Homo sapiens
ataaatgctataaag

SEQ ID NO: 1467307 - DNA, 15 bp, Homo sapiens
gataaatgctataaa

SEQ ID NO: 1467308 - DNA, 15 bp, Homo sapiens
tgataaatgctataa

SEQ ID NO: 1467309 - DNA, 15 bp, Homo sapiens
ctgataaatgctata

SEQ ID NO: 1467310 - DNA, 15 bp, Homo sapiens
tctgataaatgctat

SEQ ID NO: 1467311 - DNA, 15 bp, Homo sapiens
ctctgataaatgcta

SEQ ID NO: 1467312 - DNA, 15 bp, Homo sapiens
tctctgataaatgct

SEQ ID NO: 1467313 - DNA, 15 bp, Homo sapiens
gtctctgataaatgc

SEQ ID NO: 1467314 - DNA, 15 bp, Homo sapiens
agtctctgataaatg

SEQ ID NO: 1467315 - DNA, 15 bp, Homo sapiens
aagtctctgataaat

SEQ ID NO: 1467316 - DNA, 15 bp, Homo sapiens
caagtctctgataaa

SEQ ID NO: 1467317 - DNA, 15 bp, Homo sapiens
gcaagtctctgataa

SEQ ID NO: 1467318 - DNA, 15 bp, Homo sapiens
agcaagtctctgata

SEQ ID NO: 1467319 - DNA, 15 bp, Homo sapiens
tagcaagtctctgat

SEQ ID NO: 1467320 - DNA, 15 bp, Homo sapiens
gtagcaagtctctga

SEQ ID NO: 1467321 - DNA, 15 bp, Homo sapiens
tgtagcaagtctctg

SEQ ID NO: 1467322 - DNA, 15 bp, Homo sapiens
ctgtagcaagtctct

SEQ ID NO: 1467323 - DNA, 15 bp, Homo sapiens
gctgtagcaagtctc

SEQ ID NO: 1467324 - DNA, 15 bp, Homo sapiens
agctgtagcaagtct

SEQ ID NO: 1467325 - DNA, 15 bp, Homo sapiens
aagctgtagcaagtc

SEQ ID NO: 1467326 - DNA, 15 bp, Homo sapiens
aaagctgtagcaagt

SEQ ID NO: 1467327 - DNA, 15 bp, Homo sapiens
gaaagctgtagcaag

SEQ ID NO: 1467328 - DNA, 15 bp, Homo sapiens
ggaaagctgtagcaa

SEQ ID NO: 1467329 - DNA, 15 bp, Homo sapiens
aggaaagctgtagca

SEQ ID NO: 1467330 - DNA, 15 bp, Homo sapiens
gaggaaagctgtagc

SEQ ID NO: 1467331 - DNA, 15 bp, Homo sapiens
agaggaaagctgtag

SEQ ID NO: 1467332 - DNA, 15 bp, Homo sapiens
aagaggaaagctgta

SEQ ID NO: 1467333 - DNA, 15 bp, Homo sapiens
caagaggaaagctgt

SEQ ID NO: 1467334 - DNA, 15 bp, Homo sapiens
tcaagaggaaagctg

SEQ ID NO: 1467335 - DNA, 15 bp, Homo sapiens
gtcaagaggaaagct

SEQ ID NO: 1467336 - DNA, 15 bp, Homo sapiens
ggtcaagaggaaagc

SEQ ID NO: 1467337 - DNA, 15 bp, Homo sapiens
gggtcaagaggaaag

SEQ ID NO: 1467338 - DNA, 15 bp, Homo sapiens
tgggtcaagaggaaa

SEQ ID NO: 1467339 - DNA, 15 bp, Homo sapiens
ttgggtcaagaggaa

SEQ ID NO: 1467340 - DNA, 15 bp, Homo sapiens
attgggtcaagagga

SEQ ID NO: 1467341 - DNA, 15 bp, Homo sapiens
cattgggtcaagagg

SEQ ID NO: 1467342 - DNA, 15 bp, Homo sapiens
ccattgggtcaagag

SEQ ID NO: 1467343 - DNA, 15 bp, Homo sapiens
gccattgggtcaaga

SEQ ID NO: 1467344 - DNA, 15 bp, Homo sapiens
tgccattgggtcaag

SEQ ID NO: 1467345 - DNA, 15 bp, Homo sapiens
ttgccattgggtcaa

SEQ ID NO: 1467346 - DNA, 15 bp, Homo sapiens
tttgccattgggtca

SEQ ID NO: 1467347 - DNA, 15 bp, Homo sapiens
ttttgccattgggtc

SEQ ID NO: 1467348 - DNA, 15 bp, Homo sapiens
cttttgccattgggt

SEQ ID NO: 1467349 - DNA, 15 bp, Homo sapiens
acttttgccattggg

SEQ ID NO: 1467350 - DNA, 15 bp, Homo sapiens
cacttttgccattgg

SEQ ID NO: 1467351 - DNA, 15 bp, Homo sapiens
gcacttttgccattg

SEQ ID NO: 1467352 - DNA, 15 bp, Homo sapiens
tgcacttttgccatt

SEQ ID NO: 1467353 - DNA, 15 bp, Homo sapiens
gtgcacttttgccat

SEQ ID NO: 1467354 - DNA, 15 bp, Homo sapiens
ggtgcacttttgcca

SEQ ID NO: 1467355 - DNA, 15 bp, Homo sapiens
aggtgcacttttgcc

SEQ ID NO: 1467356 - DNA, 15 bp, Homo sapiens
aaggtgcacttttgc

SEQ ID NO: 1467357 - DNA, 15 bp, Homo sapiens
gaaggtgcacttttg

SEQ ID NO: 1467358 - DNA, 15 bp, Homo sapiens
ggaaggtgcactttt

SEQ ID NO: 1467359 - DNA, 15 bp, Homo sapiens
aggaaggtgcacttt

SEQ ID NO: 1467360 - DNA, 15 bp, Homo sapiens
aaggaaggtgcactt

SEQ ID NO: 1467361 - DNA, 15 bp, Homo sapiens
caaggaaggtgcact

SEQ ID NO: 1467362 - DNA, 15 bp, Homo sapiens
acaaggaaggtgcac

SEQ ID NO: 1467363 - DNA, 15 bp, Homo sapiens
gacaaggaaggtgca

SEQ ID NO: 1467364 - DNA, 15 bp, Homo sapiens
agacaaggaaggtgc

SEQ ID NO: 1467365 - DNA, 15 bp, Homo sapiens
gagacaaggaaggtg

SEQ ID NO: 1467366 - DNA, 15 bp, Homo sapiens
tgagacaaggaaggt

SEQ ID NO: 1467367 - DNA, 15 bp, Homo sapiens
ctgagacaaggaagg

SEQ ID NO: 1467368 - DNA, 15 bp, Homo sapiens
cctgagacaaggaag

SEQ ID NO: 1467369 - DNA, 15 bp, Homo sapiens
ccctgagacaaggaa

SEQ ID NO: 1467370 - DNA, 15 bp, Homo sapiens
gccctgagacaagga

SEQ ID NO: 1467371 - DNA, 15 bp, Homo sapiens
tgccctgagacaagg

SEQ ID NO: 1467372 - DNA, 15 bp, Homo sapiens
ttgccctgagacaag

SEQ ID NO: 1467373 - DNA, 15 bp, Homo sapiens
attgccctgagacaa

SEQ ID NO: 1467374 - DNA, 15 bp, Homo sapiens
tattgccctgagaca

SEQ ID NO: 1467375 - DNA, 15 bp, Homo sapiens
ctattgccctgagac

SEQ ID NO: 1467376 - DNA, 15 bp, Homo sapiens
gctattgccctgaga

SEQ ID NO: 1467377 - DNA, 15 bp, Homo sapiens
tgctattgccctgag

SEQ ID NO: 1467378 - DNA, 15 bp, Homo sapiens
ttgctattgccctga

SEQ ID NO: 1467379 - DNA, 15 bp, Homo sapiens
gttgctattgccctg

SEQ ID NO: 1467380 - DNA, 15 bp, Homo sapiens
agttgctattgccct

SEQ ID NO: 1467381 - DNA, 15 bp, Homo sapiens
gagttgctattgccc

SEQ ID NO: 1467382 - DNA, 15 bp, Homo sapiens
tgagttgctattgcc

SEQ ID NO: 1467383 - DNA, 15 bp, Homo sapiens
ctgagttgctattgc

SEQ ID NO: 1467384 - DNA, 15 bp, Homo sapiens
gctgagttgctattg

SEQ ID NO: 1467385 - DNA, 15 bp, Homo sapiens
agctgagttgctatt

SEQ ID NO: 1467386 - DNA, 15 bp, Homo sapiens
tagctgagttgctat

SEQ ID NO: 1467387 - DNA, 15 bp, Homo sapiens
ttagctgagttgcta

SEQ ID NO: 1467388 - DNA, 15 bp, Homo sapiens
tttagctgagttgct

SEQ ID NO: 1467389 - DNA, 15 bp, Homo sapiens
atttagctgagttgc

SEQ ID NO: 1467390 - DNA, 15 bp, Homo sapiens
aatttagctgagttg

SEQ ID NO: 1467391 - DNA, 15 bp, Homo sapiens
taatttagctgagtt

SEQ ID NO: 1467392 - DNA, 15 bp, Homo sapiens
ctaatttagctgagt

SEQ ID NO: 1467393 - DNA, 15 bp, Homo sapiens
actaatttagctgag

SEQ ID NO: 1467394 - DNA, 15 bp, Homo sapiens
cactaatttagctga

SEQ ID NO: 1467395 - DNA, 15 bp, Homo sapiens
tcactaatttagctg

SEQ ID NO: 1467396 - DNA, 15 bp, Homo sapiens
ttcactaatttagct

SEQ ID NO: 1467397 - DNA, 15 bp, Homo sapiens
cttcactaatttagc

SEQ ID NO: 1467398 - DNA, 15 bp, Homo sapiens
ccttcactaatttag

SEQ ID NO: 1467399 - DNA, 15 bp, Homo sapiens
gccttcactaattta

SEQ ID NO: 1467400 - DNA, 15 bp, Homo sapiens
agccttcactaattt

SEQ ID NO: 1467401 - DNA, 15 bp, Homo sapiens
tagccttcactaatt

SEQ ID NO: 1467402 - DNA, 15 bp, Homo sapiens
gtagccttcactaat

SEQ ID NO: 1467403 - DNA, 15 bp, Homo sapiens
agtagccttcactaa

SEQ ID NO: 1467404 - DNA, 15 bp, Homo sapiens
cagtagccttcacta

SEQ ID NO: 1467405 - DNA, 15 bp, Homo sapiens
gcagtagccttcact

SEQ ID NO: 1467406 - DNA, 15 bp, Homo sapiens
agcagtagccttcac

SEQ ID NO: 1467407 - DNA, 15 bp, Homo sapiens
tagcagtagccttca

SEQ ID NO: 1467408 - DNA, 15 bp, Homo sapiens
ttagcagtagccttc

SEQ ID NO: 1467409 - DNA, 15 bp, Homo sapiens
gttagcagtagcctt

SEQ ID NO: 1467410 - DNA, 15 bp, Homo sapiens
agttagcagtagcct

SEQ ID NO: 1467411 - DNA, 15 bp, Homo sapiens
gagttagcagtagcc

SEQ ID NO: 1467412 - DNA, 15 bp, Homo sapiens
tgagttagcagtagc

SEQ ID NO: 1467413 - DNA, 15 bp, Homo sapiens
gtgagttagcagtag

SEQ ID NO: 1467414 - DNA, 15 bp, Homo sapiens
agtgagttagcagta

SEQ ID NO: 1467415 - DNA, 15 bp, Homo sapiens
gagtgagttagcagt

SEQ ID NO: 1467416 - DNA, 15 bp, Homo sapiens
cgagtgagttagcag

SEQ ID NO: 1467417 - DNA, 15 bp, Homo sapiens
acgagtgagttagca

SEQ ID NO: 1467418 - DNA, 15 bp, Homo sapiens
tacgagtgagttagc

SEQ ID NO: 1467419 - DNA, 15 bp, Homo sapiens
ctacgagtgagttag

SEQ ID NO: 1467420 - DNA, 15 bp, Homo sapiens
cctacgagtgagtta

SEQ ID NO: 1467421 - DNA, 15 bp, Homo sapiens
ccctacgagtgagtt

SEQ ID NO: 1467422 - DNA, 15 bp, Homo sapiens
accctacgagtgagt

SEQ ID NO: 1467423 - DNA, 15 bp, Homo sapiens
gaccctacgagtgag

SEQ ID NO: 1467424 - DNA, 15 bp, Homo sapiens
agaccctacgagtga

SEQ ID NO: 1467425 - DNA, 15 bp, Homo sapiens
gagaccctacgagtg

SEQ ID NO: 1467426 - DNA, 15 bp, Homo sapiens
ggagaccctacgagt

SEQ ID NO: 1467427 - DNA, 15 bp, Homo sapiens
gggagaccctacgag

SEQ ID NO: 1467428 - DNA, 15 bp, Homo sapiens
agggagaccctacga

SEQ ID NO: 1467429 - DNA, 15 bp, Homo sapiens
aagggagaccctacg

SEQ ID NO: 1467430 - DNA, 15 bp, Homo sapiens
taagggagaccctac

SEQ ID NO: 1467431 - DNA, 15 bp, Homo sapiens
ctaagggagacccta

SEQ ID NO: 1467432 - DNA, 15 bp, Homo sapiens
tctaagggagaccct

SEQ ID NO: 1467433 - DNA, 15 bp, Homo sapiens
gtctaagggagaccc

SEQ ID NO: 1467434 - DNA, 15 bp, Homo sapiens
agtctaagggagacc

SEQ ID NO: 1467435 - DNA, 15 bp, Homo sapiens
gagtctaagggagac

SEQ ID NO: 1467436 - DNA, 15 bp, Homo sapiens
tgagtctaagggaga

SEQ ID NO: 1467437 - DNA, 15 bp, Homo sapiens
ttgagtctaagggag

SEQ ID NO: 1467438 - DNA, 15 bp, Homo sapiens
attgagtctaaggga

SEQ ID NO: 1467439 - DNA, 15 bp, Homo sapiens
cattgagtctaaggg

SEQ ID NO: 1467440 - DNA, 15 bp, Homo sapiens
ccattgagtctaagg

SEQ ID NO: 1467441 - DNA, 15 bp, Homo sapiens
tccattgagtctaag

SEQ ID NO: 1467442 - DNA, 15 bp, Homo sapiens
gtccattgagtctaa

SEQ ID NO: 1467443 - DNA, 15 bp, Homo sapiens
ggtccattgagtcta

SEQ ID NO: 1467444 - DNA, 15 bp, Homo sapiens
gggtccattgagtct

SEQ ID NO: 1467445 - DNA, 15 bp, Homo sapiens
agggtccattgagtc

SEQ ID NO: 1467446 - DNA, 15 bp, Homo sapiens
gagggtccattgagt

SEQ ID NO: 1467447 - DNA, 15 bp, Homo sapiens
tgagggtccattgag

SEQ ID NO: 1467448 - DNA, 15 bp, Homo sapiens
atgagggtccattga

SEQ ID NO: 1467449 - DNA, 15 bp, Homo sapiens
gatgagggtccattg

SEQ ID NO: 1467450 - DNA, 15 bp, Homo sapiens
tgatgagggtccatt

SEQ ID NO: 1467451 - DNA, 15 bp, Homo sapiens
atgatgagggtccat

SEQ ID NO: 1467452 - DNA, 15 bp, Homo sapiens
catgatgagggtcca

SEQ ID NO: 1467453 - DNA, 15 bp, Homo sapiens
acatgatgagggtcc

SEQ ID NO: 1467454 - DNA, 15 bp, Homo sapiens
tacatgatgagggtc

SEQ ID NO: 1467455 - DNA, 15 bp, Homo sapiens
gtacatgatgagggt

SEQ ID NO: 1467456 - DNA, 15 bp, Homo sapiens
tgtacatgatgaggg

SEQ ID NO: 1467457 - DNA, 15 bp, Homo sapiens
ttgtacatgatgagg

SEQ ID NO: 1467458 - DNA, 15 bp, Homo sapiens
attgtacatgatgag

SEQ ID NO: 1467459 - DNA, 15 bp, Homo sapiens
tattgtacatgatga

SEQ ID NO: 1467460 - DNA, 15 bp, Homo sapiens
ctattgtacatgatg

SEQ ID NO: 1467461 - DNA, 15 bp, Homo sapiens
actattgtacatgat

SEQ ID NO: 1467462 - DNA, 15 bp, Homo sapiens
aactattgtacatga

SEQ ID NO: 1467463 - DNA, 15 bp, Homo sapiens
caactattgtacatg

SEQ ID NO: 1467464 - DNA, 15 bp, Homo sapiens
gcaactattgtacat

SEQ ID NO: 1467465 - DNA, 15 bp, Homo sapiens
tgcaactattgtaca

SEQ ID NO: 1467466 - DNA, 15 bp, Homo sapiens
atgcaactattgtac

SEQ ID NO: 1467467 - DNA, 15 bp, Homo sapiens
catgcaactattgta

SEQ ID NO: 1467468 - DNA, 15 bp, Homo sapiens
gcatgcaactattgt

SEQ ID NO: 1467469 - DNA, 15 bp, Homo sapiens
agcatgcaactattg

SEQ ID NO: 1467470 - DNA, 15 bp, Homo sapiens
tagcatgcaactatt

SEQ ID NO: 1467471 - DNA, 15 bp, Homo sapiens
ttagcatgcaactat

SEQ ID NO: 1467472 - DNA, 15 bp, Homo sapiens
tttagcatgcaacta

SEQ ID NO: 1467473 - DNA, 15 bp, Homo sapiens
ttttagcatgcaact

SEQ ID NO: 1467474 - DNA, 15 bp, Homo sapiens
tttttagcatgcaac

SEQ ID NO: 1467475 - DNA, 15 bp, Homo sapiens
atttttagcatgcaa

SEQ ID NO: 1467476 - DNA, 15 bp, Homo sapiens
aatttttagcatgca

SEQ ID NO: 1467477 - DNA, 15 bp, Homo sapiens
gaatttttagcatgc

SEQ ID NO: 1467478 - DNA, 15 bp, Homo sapiens
tgaatttttagcatg

SEQ ID NO: 1467479 - DNA, 15 bp, Homo sapiens
gtgaatttttagcat

SEQ ID NO: 1467480 - DNA, 15 bp, Homo sapiens
agtgaatttttagca

SEQ ID NO: 1467481 - DNA, 15 bp, Homo sapiens
tagtgaatttttagc

SEQ ID NO: 1467482 - DNA, 15 bp, Homo sapiens
atagtgaatttttag

SEQ ID NO: 1467483 - DNA, 15 bp, Homo sapiens
tatagtgaattttta

SEQ ID NO: 1467484 - DNA, 15 bp, Homo sapiens
atatagtgaattttt

SEQ ID NO: 1467485 - DNA, 15 bp, Homo sapiens
aatatagtgaatttt

SEQ ID NO: 1467486 - DNA, 15 bp, Homo sapiens
aaatatagtgaattt

SEQ ID NO: 1467487 - DNA, 15 bp, Homo sapiens
gaaatatagtgaatt

SEQ ID NO: 1467488 - DNA, 15 bp, Homo sapiens
agaaatatagtgaat

SEQ ID NO: 1467489 - DNA, 15 bp, Homo sapiens
aagaaatatagtgaa

SEQ ID NO: 1467490 - DNA, 15 bp, Homo sapiens
aaagaaatatagtga

SEQ ID NO: 1467491 - DNA, 15 bp, Homo sapiens
gaaagaaatatagtg

SEQ ID NO: 1467492 - DNA, 15 bp, Homo sapiens
agaaagaaatatagt

SEQ ID NO: 1467493 - DNA, 15 bp, Homo sapiens
aagaaagaaatatag

SEQ ID NO: 1467494 - DNA, 15 bp, Homo sapiens
aaagaaagaaatata

SEQ ID NO: 1467495 - DNA, 15 bp, Homo sapiens
aaaagaaagaaatat

SEQ ID NO: 1467496 - DNA, 15 bp, Homo sapiens
aaaaagaaagaaata

SEQ ID NO: 1467497 - DNA, 15 bp, Homo sapiens
taaaaaaagaaagaa

SEQ ID NO: 1467498 - DNA, 15 bp, Homo sapiens
gtaaaaaaagaaaga

SEQ ID NO: 1467499 - DNA, 15 bp, Homo sapiens
agtaaaaaaagaaag

SEQ ID NO: 1467500 - DNA, 15 bp, Homo sapiens
aagtaaaaaaagaaa

SEQ ID NO: 1467501 - DNA, 15 bp, Homo sapiens
aaagtaaaaaaagaa

SEQ ID NO: 1467502 - DNA, 15 bp, Homo sapiens
taaagtaaaaaaaga

SEQ ID NO: 1467503 - DNA, 15 bp, Homo sapiens
ataaagtaaaaaaag

SEQ ID NO: 1467504 - DNA, 15 bp, Homo sapiens
aataaagtaaaaaaa

SEQ ID NO: 1467505 - DNA, 15 bp, Homo sapiens
gaataaagtaaaaaa

SEQ ID NO: 1467506 - DNA, 15 bp, Homo sapiens
tgaataaagtaaaaa

SEQ ID NO: 1467507 - DNA, 15 bp, Homo sapiens
ttgaataaagtaaaa

SEQ ID NO: 1467508 - DNA, 15 bp, Homo sapiens
attgaataaagtaaa

SEQ ID NO: 1467509 - DNA, 15 bp, Homo sapiens
gattgaataaagtaa

SEQ ID NO: 1467510 - DNA, 15 bp, Homo sapiens
agattgaataaagta

SEQ ID NO: 1467511 - DNA, 15 bp, Homo sapiens
cagattgaataaagt

SEQ ID NO: 1467512 - DNA, 15 bp, Homo sapiens
acagattgaataaag

SEQ ID NO: 1467513 - DNA, 15 bp, Homo sapiens
tacagattgaataaa

SEQ ID NO: 1467514 - DNA, 15 bp, Homo sapiens
ctacagattgaataa

SEQ ID NO: 1467515 - DNA, 15 bp, Homo sapiens
tctacagattgaata

SEQ ID NO: 1467516 - DNA, 15 bp, Homo sapiens
ctctacagattgaat

SEQ ID NO: 1467517 - DNA, 15 bp, Homo sapiens
tctctacagattgaa

SEQ ID NO: 1467518 - DNA, 15 bp, Homo sapiens
atctctacagattga

SEQ ID NO: 1467519 - DNA, 15 bp, Homo sapiens
aatctctacagattg

SEQ ID NO: 1467520 - DNA, 15 bp, Homo sapiens
caatctctacagatt

SEQ ID NO: 1467521 - DNA, 15 bp, Homo sapiens
acaatctctacagat

SEQ ID NO: 1467522 - DNA, 15 bp, Homo sapiens
gacaatctctacaga

SEQ ID NO: 1467523 - DNA, 15 bp, Homo sapiens
tgacaatctctacag

SEQ ID NO: 1467524 - DNA, 15 bp, Homo sapiens
ttgacaatctctaca

SEQ ID NO: 1467525 - DNA, 15 bp, Homo sapiens
tttgacaatctctac

SEQ ID NO: 1467526 - DNA, 15 bp, Homo sapiens
ttttgacaatctcta

SEQ ID NO: 1467527 - DNA, 15 bp, Homo sapiens
attttgacaatctct

SEQ ID NO: 1467528 - DNA, 15 bp, Homo sapiens
aattttgacaatctc

SEQ ID NO: 1467529 - DNA, 15 bp, Homo sapiens
aaattttgacaatct

SEQ ID NO: 1467530 - DNA, 15 bp, Homo sapiens
aaaattttgacaatc

SEQ ID NO: 1467531 - DNA, 15 bp, Homo sapiens
gaaaattttgacaat

SEQ ID NO: 1467532 - DNA, 15 bp, Homo sapiens
ggaaaattttgacaa

SEQ ID NO: 1467533 - DNA, 15 bp, Homo sapiens
cggaaaattttgaca

SEQ ID NO: 1467534 - DNA, 15 bp, Homo sapiens
tcggaaaattttgac

SEQ ID NO: 1467535 - DNA, 15 bp, Homo sapiens
atcggaaaattttga

SEQ ID NO: 1467536 - DNA, 15 bp, Homo sapiens
catcggaaaattttg

SEQ ID NO: 1467537 - DNA, 15 bp, Homo sapiens
gcatcggaaaatttt

SEQ ID NO: 1467538 - DNA, 15 bp, Homo sapiens
ggcatcggaaaattt

SEQ ID NO: 1467539 - DNA, 15 bp, Homo sapiens
tggcatcggaaaatt

SEQ ID NO: 1467540 - DNA, 15 bp, Homo sapiens
ttggcatcggaaaat

SEQ ID NO: 1467541 - DNA, 15 bp, Homo sapiens
gttggcatcggaaaa

SEQ ID NO: 1467542 - DNA, 15 bp, Homo sapiens
agttggcatcggaaa

SEQ ID NO: 1467543 - DNA, 15 bp, Homo sapiens
cagttggcatcggaa

SEQ ID NO: 1467544 - DNA, 15 bp, Homo sapiens
acagttggcatcgga

SEQ ID NO: 1467545 - DNA, 15 bp, Homo sapiens
tacagttggcatcgg

SEQ ID NO: 1467546 - DNA, 15 bp, Homo sapiens
atacagttggcatcg

SEQ ID NO: 1467547 - DNA, 15 bp, Homo sapiens
aatacagttggcatc

SEQ ID NO: 1467548 - DNA, 15 bp, Homo sapiens
caatacagttggcat

SEQ ID NO: 1467549 - DNA, 15 bp, Homo sapiens
gcaatacagttggca

SEQ ID NO: 1467550 - DNA, 15 bp, Homo sapiens
tgcaatacagttggc

SEQ ID NO: 1467551 - DNA, 15 bp, Homo sapiens
ttgcaatacagttgg

SEQ ID NO: 1467552 - DNA, 15 bp, Homo sapiens
tttgcaatacagttg

SEQ ID NO: 1467553 - DNA, 15 bp, Homo sapiens
atttgcaatacagtt

SEQ ID NO: 1467554 - DNA, 15 bp, Homo sapiens
gatttgcaatacagt

SEQ ID NO: 1467555 - DNA, 15 bp, Homo sapiens
tgatttgcaatacag

SEQ ID NO: 1467556 - DNA, 15 bp, Homo sapiens
atgatttgcaataca

SEQ ID NO: 1467557 - DNA, 15 bp, Homo sapiens
gatgatttgcaatac

SEQ ID NO: 1467558 - DNA, 15 bp, Homo sapiens
tgatgatttgcaata

SEQ ID NO: 1467559 - DNA, 15 bp, Homo sapiens
gtgatgatttgcaat

SEQ ID NO: 1467560 - DNA, 15 bp, Homo sapiens
ggtgatgatttgcaa

SEQ ID NO: 1467561 - DNA, 15 bp, Homo sapiens
tggtgatgatttgca

SEQ ID NO: 1467562 - DNA, 15 bp, Homo sapiens
gtggtgatgatttgc

SEQ ID NO: 1467563 - DNA, 15 bp, Homo sapiens
ggtggtgatgatttg

SEQ ID NO: 1467564 - DNA, 15 bp, Homo sapiens
cggtggtgatgattt

SEQ ID NO: 1467565 - DNA, 15 bp, Homo sapiens
ccggtggtgatgatt

SEQ ID NO: 1467566 - DNA, 15 bp, Homo sapiens
cccggtggtgatgat

SEQ ID NO: 1467567 - DNA, 15 bp, Homo sapiens
acccggtggtgatga

SEQ ID NO: 1467568 - DNA, 15 bp, Homo sapiens
tacccggtggtgatg

SEQ ID NO: 1467569 - DNA, 15 bp, Homo sapiens
atacccggtggtgat

SEQ ID NO: 1467570 - DNA, 15 bp, Homo sapiens
aatacccggtggtga

SEQ ID NO: 1467571 - DNA, 15 bp, Homo sapiens
caatacccggtggtg

SEQ ID NO: 1467572 - DNA, 15 bp, Homo sapiens
ccaatacccggtggt

SEQ ID NO: 1467573 - DNA, 15 bp, Homo sapiens
cccaatacccggtgg

SEQ ID NO: 1467574 - DNA, 15 bp, Homo sapiens
tcccaatacccggtg

SEQ ID NO: 1467575 - DNA, 15 bp, Homo sapiens
ttcccaatacccggt

SEQ ID NO: 1467576 - DNA, 15 bp, Homo sapiens
cttcccaatacccgg

SEQ ID NO: 1467577 - DNA, 15 bp, Homo sapiens
acttcccaatacccg

SEQ ID NO: 1467578 - DNA, 15 bp, Homo sapiens
aacttcccaataccc

SEQ ID NO: 1467579 - DNA, 15 bp, Homo sapiens
aaacttcccaatacc

SEQ ID NO: 1467580 - DNA, 15 bp, Homo sapiens
aaaacttcccaatac

SEQ ID NO: 1467581 - DNA, 15 bp, Homo sapiens
gaaaacttcccaata

SEQ ID NO: 1467582 - DNA, 15 bp, Homo sapiens
tgaaaacttcccaat

SEQ ID NO: 1467583 - DNA, 15 bp, Homo sapiens
ttgaaaacttcccaa

SEQ ID NO: 1467584 - DNA, 15 bp, Homo sapiens
attgaaaacttccca

SEQ ID NO: 1467585 - DNA, 15 bp, Homo sapiens
aattgaaaacttccc

SEQ ID NO: 1467586 - DNA, 15 bp, Homo sapiens
taattgaaaacttcc

SEQ ID NO: 1467587 - DNA, 15 bp, Homo sapiens
ctaattgaaaacttc

SEQ ID NO: 1467588 - DNA, 15 bp, Homo sapiens
gctaattgaaaactt

SEQ ID NO: 1467589 - DNA, 15 bp, Homo sapiens
tgctaattgaaaact

SEQ ID NO: 1467590 - DNA, 15 bp, Homo sapiens
ttgctaattgaaaac

SEQ ID NO: 1467591 - DNA, 15 bp, Homo sapiens
attgctaattgaaaa

SEQ ID NO: 1467592 - DNA, 15 bp, Homo sapiens
tattgctaattgaaa

SEQ ID NO: 1467593 - DNA, 15 bp, Homo sapiens
ttattgctaattgaa

SEQ ID NO: 1467594 - DNA, 15 bp, Homo sapiens
attattgctaattga

SEQ ID NO: 1467595 - DNA, 15 bp, Homo sapiens
gattattgctaattg

SEQ ID NO: 1467596 - DNA, 15 bp, Homo sapiens
tgattattgctaatt

SEQ ID NO: 1467597 - DNA, 15 bp, Homo sapiens
gtgattattgctaat

SEQ ID NO: 1467598 - DNA, 15 bp, Homo sapiens
tgtgattattgctaa

SEQ ID NO: 1467599 - DNA, 15 bp, Homo sapiens
gtgtgattattgcta

SEQ ID NO: 1467600 - DNA, 15 bp, Homo sapiens
ggtgtgattattgct

SEQ ID NO: 1467601 - DNA, 15 bp, Homo sapiens
aggtgtgattattgc

SEQ ID NO: 1467602 - DNA, 15 bp, Homo sapiens
gaggtgtgattattg

SEQ ID NO: 1467603 - DNA, 15 bp, Homo sapiens
tgaggtgtgattatt

SEQ ID NO: 1467604 - DNA, 15 bp, Homo sapiens
ctgaggtgtgattat

SEQ ID NO: 1467605 - DNA, 15 bp, Homo sapiens
tctgaggtgtgatta

SEQ ID NO: 1467606 - DNA, 15 bp, Homo sapiens
ttctgaggtgtgatt

SEQ ID NO: 1467607 - DNA, 15 bp, Homo sapiens
tttctgaggtgtgat

SEQ ID NO: 1467608 - DNA, 15 bp, Homo sapiens
ttttctgaggtgtga

SEQ ID NO: 1467609 - DNA, 15 bp, Homo sapiens
tttttctgaggtgtg

SEQ ID NO: 1467610 - DNA, 15 bp, Homo sapiens
gtttttctgaggtgt

SEQ ID NO: 1467611 - DNA, 15 bp, Homo sapiens
ggtttttctgaggtg

SEQ ID NO: 1467612 - DNA, 15 bp, Homo sapiens
aggtttttctgaggt

SEQ ID NO: 1467613 - DNA, 15 bp, Homo sapiens
gaggtttttctgagg

SEQ ID NO: 1467614 - DNA, 15 bp, Homo sapiens
tgaggtttttctgag

SEQ ID NO: 1467615 - DNA, 15 bp, Homo sapiens
gtgaggtttttctga

SEQ ID NO: 1467616 - DNA, 15 bp, Homo sapiens
agtgaggtttttctg

SEQ ID NO: 1467617 - DNA, 15 bp, Homo sapiens
cagtgaggtttttct

SEQ ID NO: 1467618 - DNA, 15 bp, Homo sapiens
ccagtgaggtttttc

SEQ ID NO: 1467619 - DNA, 15 bp, Homo sapiens
gccagtgaggttttt

SEQ ID NO: 1467620 - DNA, 15 bp, Homo sapiens
agccagtgaggtttt

SEQ ID NO: 1467621 - DNA, 15 bp, Homo sapiens
cagccagtgaggttt

SEQ ID NO: 1467622 - DNA, 15 bp, Homo sapiens
gcagccagtgaggtt

SEQ ID NO: 1467623 - DNA, 15 bp, Homo sapiens
tgcagccagtgaggt

SEQ ID NO: 1467624 - DNA, 15 bp, Homo sapiens
atgcagccagtgagg

SEQ ID NO: 1467625 - DNA, 15 bp, Homo sapiens
catgcagccagtgag

SEQ ID NO: 1467626 - DNA, 15 bp, Homo sapiens
tcatgcagccagtga

SEQ ID NO: 1467627 - DNA, 15 bp, Homo sapiens
ttcatgcagccagtg

SEQ ID NO: 1467628 - DNA, 15 bp, Homo sapiens
cttcatgcagccagt

SEQ ID NO: 1467629 - DNA, 15 bp, Homo sapiens
gcttcatgcagccag

SEQ ID NO: 1467630 - DNA, 15 bp, Homo sapiens
agcttcatgcagcca

SEQ ID NO: 1467631 - DNA, 15 bp, Homo sapiens
cagcttcatgcagcc

SEQ ID NO: 1467632 - DNA, 15 bp, Homo sapiens
tcagcttcatgcagc

SEQ ID NO: 1467633 - DNA, 15 bp, Homo sapiens
ttcagcttcatgcag

SEQ ID NO: 1467634 - DNA, 15 bp, Homo sapiens
tttcagcttcatgca

SEQ ID NO: 1467635 - DNA, 15 bp, Homo sapiens
ttttcagcttcatgc

SEQ ID NO: 1467636 - DNA, 15 bp, Homo sapiens
attttcagcttcatg

SEQ ID NO: 1467637 - DNA, 15 bp, Homo sapiens
cattttcagcttcat

SEQ ID NO: 1467638 - DNA, 15 bp, Homo sapiens
acattttcagcttca

SEQ ID NO: 1467639 - DNA, 15 bp, Homo sapiens
tacattttcagcttc

SEQ ID NO: 1467640 - DNA, 15 bp, Homo sapiens
gtacattttcagctt

SEQ ID NO: 1467641 - DNA, 15 bp, Homo sapiens
agtacattttcagct

SEQ ID NO: 1467642 - DNA, 15 bp, Homo sapiens
aagtacattttcagc

SEQ ID NO: 1467643 - DNA, 15 bp, Homo sapiens
taagtacattttcag

SEQ ID NO: 1467644 - DNA, 15 bp, Homo sapiens
ttaagtacattttca

SEQ ID NO: 1467645 - DNA, 15 bp, Homo sapiens
tttaagtacattttc

SEQ ID NO: 1467646 - DNA, 15 bp, Homo sapiens
ctttaagtacatttt

SEQ ID NO: 1467647 - DNA, 15 bp, Homo sapiens
cctttaagtacattt

SEQ ID NO: 1467648 - DNA, 15 bp, Homo sapiens
tcctttaagtacatt

SEQ ID NO: 1467649 - DNA, 15 bp, Homo sapiens
atcctttaagtacat

SEQ ID NO: 1467650 - DNA, 15 bp, Homo sapiens
tatcctttaagtaca

SEQ ID NO: 1467651 - DNA, 15 bp, Homo sapiens
atatcctttaagtac

SEQ ID NO: 1467652 - DNA, 15 bp, Homo sapiens
catatcctttaagta

SEQ ID NO: 1467653 - DNA, 15 bp, Homo sapiens
gcatatcctttaagt

SEQ ID NO: 1467654 - DNA, 15 bp, Homo sapiens
agcatatcctttaag

SEQ ID NO: 1467655 - DNA, 15 bp, Homo sapiens
aagcatatcctttaa

SEQ ID NO: 1467656 - DNA, 15 bp, Homo sapiens
taagcatatccttta

SEQ ID NO: 1467657 - DNA, 15 bp, Homo sapiens
gtaagcatatccttt

SEQ ID NO: 1467658 - DNA, 15 bp, Homo sapiens
agtaagcatatcctt

SEQ ID NO: 1467659 - DNA, 15 bp, Homo sapiens
tagtaagcatatcct

SEQ ID NO: 1467660 - DNA, 15 bp, Homo sapiens
atagtaagcatatcc

SEQ ID NO: 1467661 - DNA, 15 bp, Homo sapiens
aatagtaagcatatc

SEQ ID NO: 1467662 - DNA, 15 bp, Homo sapiens
gaatagtaagcatat

SEQ ID NO: 1467663 - DNA, 15 bp, Homo sapiens
tgaatagtaagcata

SEQ ID NO: 1467664 - DNA, 15 bp, Homo sapiens
atgaatagtaagcat

SEQ ID NO: 1467665 - DNA, 15 bp, Homo sapiens
catgaatagtaagca

SEQ ID NO: 1467666 - DNA, 15 bp, Homo sapiens
tcatgaatagtaagc

SEQ ID NO: 1467667 - DNA, 15 bp, Homo sapiens
ttcatgaatagtaag

SEQ ID NO: 1467668 - DNA, 15 bp, Homo sapiens
tttcatgaatagtaa

SEQ ID NO: 1467669 - DNA, 15 bp, Homo sapiens
atttcatgaatagta

SEQ ID NO: 1467670 - DNA, 15 bp, Homo sapiens
aatttcatgaatagt

SEQ ID NO: 1467671 - DNA, 15 bp, Homo sapiens
aaatttcatgaatag

SEQ ID NO: 1467672 - DNA, 15 bp, Homo sapiens
aaaatttcatgaata

SEQ ID NO: 1467673 - DNA, 15 bp, Homo sapiens
taaaatttcatgaat

SEQ ID NO: 1467674 - DNA, 15 bp, Homo sapiens
ataaaatttcatgaa

SEQ ID NO: 1467675 - DNA, 15 bp, Homo sapiens
aataaaatttcatga

SEQ ID NO: 1467676 - DNA, 15 bp, Homo sapiens
caataaaatttcatg

SEQ ID NO: 1467677 - DNA, 15 bp, Homo sapiens
gcaataaaatttcat

SEQ ID NO: 1467678 - DNA, 15 bp, Homo sapiens
agcaataaaatttca

SEQ ID NO: 1467679 - DNA, 15 bp, Homo sapiens
aagcaataaaatttc

SEQ ID NO: 1467680 - DNA, 15 bp, Homo sapiens
aaagcaataaaattt

SEQ ID NO: 1467681 - DNA, 15 bp, Homo sapiens
gaaagcaataaaatt

SEQ ID NO: 1467682 - DNA, 15 bp, Homo sapiens
agaaagcaataaaat

SEQ ID NO: 1467683 - DNA, 15 bp, Homo sapiens
gagaaagcaataaaa

SEQ ID NO: 1467684 - DNA, 15 bp, Homo sapiens
tgagaaagcaataaa

SEQ ID NO: 1467685 - DNA, 15 bp, Homo sapiens
gtgagaaagcaataa

SEQ ID NO: 1467686 - DNA, 15 bp, Homo sapiens
agtgagaaagcaata

SEQ ID NO: 1467687 - DNA, 15 bp, Homo sapiens
aagtgagaaagcaat

SEQ ID NO: 1467688 - DNA, 15 bp, Homo sapiens
taagtgagaaagcaa

SEQ ID NO: 1467689 - DNA, 15 bp, Homo sapiens
gtaagtgagaaagca

SEQ ID NO: 1467690 - DNA, 15 bp, Homo sapiens
cgtaagtgagaaagc

SEQ ID NO: 1467691 - DNA, 15 bp, Homo sapiens
acgtaagtgagaaag

SEQ ID NO: 1467692 - DNA, 15 bp, Homo sapiens
aacgtaagtgagaaa

SEQ ID NO: 1467693 - DNA, 15 bp, Homo sapiens
aaacgtaagtgagaa

SEQ ID NO: 1467694 - DNA, 15 bp, Homo sapiens
gaaacgtaagtgaga

SEQ ID NO: 1467695 - DNA, 15 bp, Homo sapiens
ggaaacgtaagtgag

SEQ ID NO: 1467696 - DNA, 15 bp, Homo sapiens
aggaaacgtaagtga

SEQ ID NO: 1467697 - DNA, 15 bp, Homo sapiens
aaggaaacgtaagtg

SEQ ID NO: 1467698 - DNA, 15 bp, Homo sapiens
gaaggaaacgtaagt

SEQ ID NO: 1467699 - DNA, 15 bp, Homo sapiens
ggaaggaaacgtaag

SEQ ID NO: 1467700 - DNA, 15 bp, Homo sapiens
gggaaggaaacgtaa

SEQ ID NO: 1467701 - DNA, 15 bp, Homo sapiens
agggaaggaaacgta

SEQ ID NO: 1467702 - DNA, 15 bp, Homo sapiens
cagggaaggaaacgt

SEQ ID NO: 1467703 - DNA, 15 bp, Homo sapiens
ccagggaaggaaacg

SEQ ID NO: 1467704 - DNA, 15 bp, Homo sapiens
accagggaaggaaac

SEQ ID NO: 1467705 - DNA, 15 bp, Homo sapiens
taccagggaaggaaa

SEQ ID NO: 1467706 - DNA, 15 bp, Homo sapiens
ctaccagggaaggaa

SEQ ID NO: 1467707 - DNA, 15 bp, Homo sapiens
actaccagggaagga

SEQ ID NO: 1467708 - DNA, 15 bp, Homo sapiens
tactaccagggaagg

SEQ ID NO: 1467709 - DNA, 15 bp, Homo sapiens
gtactaccagggaag

SEQ ID NO: 1467710 - DNA, 15 bp, Homo sapiens
ggtactaccagggaa

SEQ ID NO: 1467711 - DNA, 15 bp, Homo sapiens
tggtactaccaggga

SEQ ID NO: 1467712 - DNA, 15 bp, Homo sapiens
atggtactaccaggg

SEQ ID NO: 1467713 - DNA, 15 bp, Homo sapiens
tatggtactaccagg

SEQ ID NO: 1467714 - DNA, 15 bp, Homo sapiens
ttatggtactaccag

SEQ ID NO: 1467715 - DNA, 15 bp, Homo sapiens
attatggtactacca

SEQ ID NO: 1467716 - DNA, 15 bp, Homo sapiens
tattatggtactacc

SEQ ID NO: 1467717 - DNA, 15 bp, Homo sapiens
atattatggtactac

SEQ ID NO: 1467718 - DNA, 15 bp, Homo sapiens
tatattatggtacta

SEQ ID NO: 1467719 - DNA, 15 bp, Homo sapiens
atatattatggtact

SEQ ID NO: 1467720 - DNA, 15 bp, Homo sapiens
catatattatggtac

SEQ ID NO: 1467721 - DNA, 15 bp, Homo sapiens
acatatattatggta

SEQ ID NO: 1467722 - DNA, 15 bp, Homo sapiens
tacatatattatggt

SEQ ID NO: 1467723 - DNA, 15 bp, Homo sapiens
gtacatatattatgg

SEQ ID NO: 1467724 - DNA, 15 bp, Homo sapiens
agtacatatattatg

SEQ ID NO: 1467725 - DNA, 15 bp, Homo sapiens
cagtacatatattat

SEQ ID NO: 1467726 - DNA, 15 bp, Homo sapiens
acagtacatatatta

SEQ ID NO: 1467727 - DNA, 15 bp, Homo sapiens
aacagtacatatatt

SEQ ID NO: 1467728 - DNA, 15 bp, Homo sapiens
caacagtacatatat

SEQ ID NO: 1467729 - DNA, 15 bp, Homo sapiens
gcaacagtacatata

SEQ ID NO: 1467730 - DNA, 15 bp, Homo sapiens
agcaacagtacatat

SEQ ID NO: 1467731 - DNA, 15 bp, Homo sapiens
aagcaacagtacata

SEQ ID NO: 1467732 - DNA, 15 bp, Homo sapiens
aaagcaacagtacat

SEQ ID NO: 1467733 - DNA, 15 bp, Homo sapiens
gaaagcaacagtaca

SEQ ID NO: 1467734 - DNA, 15 bp, Homo sapiens
ggaaagcaacagtac

SEQ ID NO: 1467735 - DNA, 15 bp, Homo sapiens
aggaaagcaacagta

SEQ ID NO: 1467736 - DNA, 15 bp, Homo sapiens
aaggaaagcaacagt

SEQ ID NO: 1467737 - DNA, 15 bp, Homo sapiens
gaaggaaagcaacag

SEQ ID NO: 1467738 - DNA, 15 bp, Homo sapiens
agaaggaaagcaaca

SEQ ID NO: 1467739 - DNA, 15 bp, Homo sapiens
aagaaggaaagcaac

SEQ ID NO: 1467740 - DNA, 15 bp, Homo sapiens
aaagaaggaaagcaa

SEQ ID NO: 1467741 - DNA, 15 bp, Homo sapiens
aaaagaaggaaagca

SEQ ID NO: 1467742 - DNA, 15 bp, Homo sapiens
taaaagaaggaaagc

SEQ ID NO: 1467743 - DNA, 15 bp, Homo sapiens
gtaaaagaaggaaag

SEQ ID NO: 1467744 - DNA, 15 bp, Homo sapiens
ggtaaaagaaggaaa

SEQ ID NO: 1467745 - DNA, 15 bp, Homo sapiens
tggtaaaagaaggaa

SEQ ID NO: 1467746 - DNA, 15 bp, Homo sapiens
ctggtaaaagaagga

SEQ ID NO: 1467747 - DNA, 15 bp, Homo sapiens
tctggtaaaagaagg

SEQ ID NO: 1467748 - DNA, 15 bp, Homo sapiens
ttctggtaaaagaag

SEQ ID NO: 1467749 - DNA, 15 bp, Homo sapiens
cttctggtaaaagaa

SEQ ID NO: 1467750 - DNA, 15 bp, Homo sapiens
tcttctggtaaaaga

SEQ ID NO: 1467751 - DNA, 15 bp, Homo sapiens
ttcttctggtaaaag

SEQ ID NO: 1467752 - DNA, 15 bp, Homo sapiens
cttcttctggtaaaa

SEQ ID NO: 1467753 - DNA, 15 bp, Homo sapiens
ccttcttctggtaaa

SEQ ID NO: 1467754 - DNA, 15 bp, Homo sapiens
cccttcttctggtaa

SEQ ID NO: 1467755 - DNA, 15 bp, Homo sapiens
ccccttcttctggta

SEQ ID NO: 1467756 - DNA, 15 bp, Homo sapiens
accccttcttctggt

SEQ ID NO: 1467757 - DNA, 15 bp, Homo sapiens
taccccttcttctgg

SEQ ID NO: 1467758 - DNA, 15 bp, Homo sapiens
ttaccccttcttctg

SEQ ID NO: 1467759 - DNA, 15 bp, Homo sapiens
tttaccccttcttct

SEQ ID NO: 1467760 - DNA, 15 bp, Homo sapiens
atttaccccttcttc

SEQ ID NO: 1467761 - DNA, 15 bp, Homo sapiens
gatttaccccttctt

SEQ ID NO: 1467762 - DNA, 15 bp, Homo sapiens
tgatttaccccttct

SEQ ID NO: 1467763 - DNA, 15 bp, Homo sapiens
atgatttaccccttc

SEQ ID NO: 1467764 - DNA, 15 bp, Homo sapiens
catgatttacccctt

SEQ ID NO: 1467765 - DNA, 15 bp, Homo sapiens
tcatgatttacccct

SEQ ID NO: 1467766 - DNA, 15 bp, Homo sapiens
gtcatgatttacccc

SEQ ID NO: 1467767 - DNA, 15 bp, Homo sapiens
agtcatgatttaccc

SEQ ID NO: 1467768 - DNA, 15 bp, Homo sapiens
cagtcatgatttacc

SEQ ID NO: 1467769 - DNA, 15 bp, Homo sapiens
gcagtcatgatttac

SEQ ID NO: 1467770 - DNA, 15 bp, Homo sapiens
ggcagtcatgattta

SEQ ID NO: 1467771 - DNA, 15 bp, Homo sapiens
aggcagtcatgattt

SEQ ID NO: 1467772 - DNA, 15 bp, Homo sapiens
taggcagtcatgatt

SEQ ID NO: 1467773 - DNA, 15 bp, Homo sapiens
ttaggcagtcatgat

SEQ ID NO: 1467774 - DNA, 15 bp, Homo sapiens
gttaggcagtcatga

SEQ ID NO: 1467775 - DNA, 15 bp, Homo sapiens
ggttaggcagtcatg

SEQ ID NO: 1467776 - DNA, 15 bp, Homo sapiens
aggttaggcagtcat

SEQ ID NO: 1467777 - DNA, 15 bp, Homo sapiens
gaggttaggcagtca

SEQ ID NO: 1467778 - DNA, 15 bp, Homo sapiens
agaggttaggcagtc

SEQ ID NO: 1467779 - DNA, 15 bp, Homo sapiens
cagaggttaggcagt

SEQ ID NO: 1467780 - DNA, 15 bp, Homo sapiens
ccagaggttaggcag

SEQ ID NO: 1467781 - DNA, 15 bp, Homo sapiens
gccagaggttaggca

SEQ ID NO: 1467782 - DNA, 15 bp, Homo sapiens
ggccagaggttaggc

SEQ ID NO: 1467783 - DNA, 15 bp, Homo sapiens
tggccagaggttagg

SEQ ID NO: 1467784 - DNA, 15 bp, Homo sapiens
ttggccagaggttag

SEQ ID NO: 1467785 - DNA, 15 bp, Homo sapiens
cttggccagaggtta

SEQ ID NO: 1467786 - DNA, 15 bp, Homo sapiens
tcttggccagaggtt

SEQ ID NO: 1467787 - DNA, 15 bp, Homo sapiens
ttcttggccagaggt

SEQ ID NO: 1467788 - DNA, 15 bp, Homo sapiens
gttcttggccagagg

SEQ ID NO: 1467789 - DNA, 15 bp, Homo sapiens
tgttcttggccagag

SEQ ID NO: 1467790 - DNA, 15 bp, Homo sapiens
ctgttcttggccaga

SEQ ID NO: 1467791 - DNA, 15 bp, Homo sapiens
actgttcttggccag

SEQ ID NO: 1467792 - DNA, 15 bp, Homo sapiens
gactgttcttggcca

SEQ ID NO: 1467793 - DNA, 15 bp, Homo sapiens
ggactgttcttggcc

SEQ ID NO: 1467794 - DNA, 15 bp, Homo sapiens
tggactgttcttggc

SEQ ID NO: 1467795 - DNA, 15 bp, Homo sapiens
atggactgttcttgg

SEQ ID NO: 1467796 - DNA, 15 bp, Homo sapiens
catggactgttcttg

SEQ ID NO: 1467797 - DNA, 15 bp, Homo sapiens
gcatggactgttctt

SEQ ID NO: 1467798 - DNA, 15 bp, Homo sapiens
ggcatggactgttct

SEQ ID NO: 1467799 - DNA, 15 bp, Homo sapiens
gggcatggactgttc

SEQ ID NO: 1467800 - DNA, 15 bp, Homo sapiens
agggcatggactgtt

SEQ ID NO: 1467801 - DNA, 15 bp, Homo sapiens
tagggcatggactgt

SEQ ID NO: 1467802 - DNA, 15 bp, Homo sapiens
ttagggcatggactg

SEQ ID NO: 1467803 - DNA, 15 bp, Homo sapiens
tttagggcatggact

SEQ ID NO: 1467804 - DNA, 15 bp, Homo sapiens
gtttagggcatggac

SEQ ID NO: 1467805 - DNA, 15 bp, Homo sapiens
tgtttagggcatgga

SEQ ID NO: 1467806 - DNA, 15 bp, Homo sapiens
ctgtttagggcatgg

SEQ ID NO: 1467807 - DNA, 15 bp, Homo sapiens
tctgtttagggcatg

SEQ ID NO: 1467808 - DNA, 15 bp, Homo sapiens
atctgtttagggcat

SEQ ID NO: 1467809 - DNA, 15 bp, Homo sapiens
aatctgtttagggca

SEQ ID NO: 1467810 - DNA, 15 bp, Homo sapiens
taatctgtttagggc

SEQ ID NO: 1467811 - DNA, 15 bp, Homo sapiens
ctaatctgtttaggg

SEQ ID NO: 1467812 - DNA, 15 bp, Homo sapiens
tctaatctgtttagg

SEQ ID NO: 1467813 - DNA, 15 bp, Homo sapiens
ttctaatctgtttag

SEQ ID NO: 1467814 - DNA, 15 bp, Homo sapiens
tttctaatctgttta

SEQ ID NO: 1467815 - DNA, 15 bp, Homo sapiens
gtttctaatctgttt

SEQ ID NO: 1467816 - DNA, 15 bp, Homo sapiens
agtttctaatctgtt

SEQ ID NO: 1467817 - DNA, 15 bp, Homo sapiens
gagtttctaatctgt

SEQ ID NO: 1467818 - DNA, 15 bp, Homo sapiens
agagtttctaatctg

SEQ ID NO: 1467819 - DNA, 15 bp, Homo sapiens
aagagtttctaatct

SEQ ID NO: 1467820 - DNA, 15 bp, Homo sapiens
gaagagtttctaatc

SEQ ID NO: 1467821 - DNA, 15 bp, Homo sapiens
ggaagagtttctaat

SEQ ID NO: 1467822 - DNA, 15 bp, Homo sapiens
tggaagagtttctaa

SEQ ID NO: 1467823 - DNA, 15 bp, Homo sapiens
ctggaagagtttcta

SEQ ID NO: 1467824 - DNA, 15 bp, Homo sapiens
tctggaagagtttct

SEQ ID NO: 1467825 - DNA, 15 bp, Homo sapiens
ttctggaagagtttc

SEQ ID NO: 1467826 - DNA, 15 bp, Homo sapiens
tttctggaagagttt

SEQ ID NO: 1467827 - DNA, 15 bp, Homo sapiens
ttttctggaagagtt

SEQ ID NO: 1467828 - DNA, 15 bp, Homo sapiens
attttctggaagagt

SEQ ID NO: 1467829 - DNA, 15 bp, Homo sapiens
aattttctggaagag

SEQ ID NO: 1467830 - DNA, 15 bp, Homo sapiens
caattttctggaaga

SEQ ID NO: 1467831 - DNA, 15 bp, Homo sapiens
tcaattttctggaag

SEQ ID NO: 1467832 - DNA, 15 bp, Homo sapiens
ctcaattttctggaa

SEQ ID NO: 1467833 - DNA, 15 bp, Homo sapiens
tctcaattttctgga

SEQ ID NO: 1467834 - DNA, 15 bp, Homo sapiens
ctctcaattttctgg

SEQ ID NO: 1467835 - DNA, 15 bp, Homo sapiens
actctcaattttctg

SEQ ID NO: 1467836 - DNA, 15 bp, Homo sapiens
aactctcaattttct

SEQ ID NO: 1467837 - DNA, 15 bp, Homo sapiens
taactctcaattttc

SEQ ID NO: 1467838 - DNA, 15 bp, Homo sapiens
ctaactctcaatttt

SEQ ID NO: 1467839 - DNA, 15 bp, Homo sapiens
gctaactctcaattt

SEQ ID NO: 1467840 - DNA, 15 bp, Homo sapiens
ggctaactctcaatt

SEQ ID NO: 1467841 - DNA, 15 bp, Homo sapiens
aggctaactctcaat

SEQ ID NO: 1467842 - DNA, 15 bp, Homo sapiens
aaggctaactctcaa

SEQ ID NO: 1467843 - DNA, 15 bp, Homo sapiens
caaggctaactctca

SEQ ID NO: 1467844 - DNA, 15 bp, Homo sapiens
acaaggctaactctc

SEQ ID NO: 1467845 - DNA, 15 bp, Homo sapiens
aacaaggctaactct

SEQ ID NO: 1467846 - DNA, 15 bp, Homo sapiens
aaacaaggctaactc

SEQ ID NO: 1467847 - DNA, 15 bp, Homo sapiens
caaacaaggctaact

SEQ ID NO: 1467848 - DNA, 15 bp, Homo sapiens
acaaacaaggctaac

SEQ ID NO: 1467849 - DNA, 15 bp, Homo sapiens
aacaaacaaggctaa

SEQ ID NO: 1467850 - DNA, 15 bp, Homo sapiens
gaacaaacaaggcta

SEQ ID NO: 1467851 - DNA, 15 bp, Homo sapiens
tgaacaaacaaggct

SEQ ID NO: 1467852 - DNA, 15 bp, Homo sapiens
atgaacaaacaaggc

SEQ ID NO: 1467853 - DNA, 15 bp, Homo sapiens
catgaacaaacaagg

SEQ ID NO: 1467854 - DNA, 15 bp, Homo sapiens
ccatgaacaaacaag

SEQ ID NO: 1467855 - DNA, 15 bp, Homo sapiens
gccatgaacaaacaa

SEQ ID NO: 1467856 - DNA, 15 bp, Homo sapiens
cgccatgaacaaaca

SEQ ID NO: 1467857 - DNA, 15 bp, Homo sapiens
tcgccatgaacaaac

SEQ ID NO: 1467858 - DNA, 15 bp, Homo sapiens
atcgccatgaacaaa

SEQ ID NO: 1467859 - DNA, 15 bp, Homo sapiens
tatcgccatgaacaa

SEQ ID NO: 1467860 - DNA, 15 bp, Homo sapiens
gtatcgccatgaaca

SEQ ID NO: 1467861 - DNA, 15 bp, Homo sapiens
agtatcgccatgaac

SEQ ID NO: 1467862 - DNA, 15 bp, Homo sapiens
cagtatcgccatgaa

SEQ ID NO: 1467863 - DNA, 15 bp, Homo sapiens
acagtatcgccatga

SEQ ID NO: 1467864 - DNA, 15 bp, Homo sapiens
aacagtatcgccatg

SEQ ID NO: 1467865 - DNA, 15 bp, Homo sapiens
aaacagtatcgccat

SEQ ID NO: 1467866 - DNA, 15 bp, Homo sapiens
caaacagtatcgcca

SEQ ID NO: 1467867 - DNA, 15 bp, Homo sapiens
ccaaacagtatcgcc

SEQ ID NO: 1467868 - DNA, 15 bp, Homo sapiens
tccaaacagtatcgc

SEQ ID NO: 1467869 - DNA, 15 bp, Homo sapiens
atccaaacagtatcg

SEQ ID NO: 1467870 - DNA, 15 bp, Homo sapiens
aatccaaacagtatc

SEQ ID NO: 1467871 - DNA, 15 bp, Homo sapiens
aaatccaaacagtat

SEQ ID NO: 1467872 - DNA, 15 bp, Homo sapiens
caaatccaaacagta

SEQ ID NO: 1467873 - DNA, 15 bp, Homo sapiens
acaaatccaaacagt

SEQ ID NO: 1467874 - DNA, 15 bp, Homo sapiens
cacaaatccaaacag

SEQ ID NO: 1467875 - DNA, 15 bp, Homo sapiens
acacaaatccaaaca

SEQ ID NO: 1467876 - DNA, 15 bp, Homo sapiens
aacacaaatccaaac

SEQ ID NO: 1467877 - DNA, 15 bp, Homo sapiens
gaacacaaatccaaa

SEQ ID NO: 1467878 - DNA, 15 bp, Homo sapiens
ggaacacaaatccaa

SEQ ID NO: 1467879 - DNA, 15 bp, Homo sapiens
aggaacacaaatcca

SEQ ID NO: 1467880 - DNA, 15 bp, Homo sapiens
caggaacacaaatcc

SEQ ID NO: 1467881 - DNA, 15 bp, Homo sapiens
gcaggaacacaaatc

SEQ ID NO: 1467882 - DNA, 15 bp, Homo sapiens
ggcaggaacacaaat

SEQ ID NO: 1467883 - DNA, 15 bp, Homo sapiens
gggcaggaacacaaa

SEQ ID NO: 1467884 - DNA, 15 bp, Homo sapiens
tgggcaggaacacaa

SEQ ID NO: 1467885 - DNA, 15 bp, Homo sapiens
ttgggcaggaacaca

SEQ ID NO: 1467886 - DNA, 15 bp, Homo sapiens
tttgggcaggaacac

SEQ ID NO: 1467887 - DNA, 15 bp, Homo sapiens
atttgggcaggaaca

SEQ ID NO: 1467888 - DNA, 15 bp, Homo sapiens
gatttgggcaggaac

SEQ ID NO: 1467889 - DNA, 15 bp, Homo sapiens
agatttgggcaggaa

SEQ ID NO: 1467890 - DNA, 15 bp, Homo sapiens
gagatttgggcagga

SEQ ID NO: 1467891 - DNA, 15 bp, Homo sapiens
tgagatttgggcagg

SEQ ID NO: 1467892 - DNA, 15 bp, Homo sapiens
atgagatttgggcag

SEQ ID NO: 1467893 - DNA, 15 bp, Homo sapiens
catgagatttgggca

SEQ ID NO: 1467894 - DNA, 15 bp, Homo sapiens
acatgagatttgggc

SEQ ID NO: 1467895 - DNA, 15 bp, Homo sapiens
gacatgagatttggg

SEQ ID NO: 1467896 - DNA, 15 bp, Homo sapiens
tgacatgagatttgg

SEQ ID NO: 1467897 - DNA, 15 bp, Homo sapiens
ttgacatgagatttg

SEQ ID NO: 1467898 - DNA, 15 bp, Homo sapiens
tttgacatgagattt

SEQ ID NO: 1467899 - DNA, 15 bp, Homo sapiens
atttgacatgagatt

SEQ ID NO: 1467900 - DNA, 15 bp, Homo sapiens
aatttgacatgagat

SEQ ID NO: 1467901 - DNA, 15 bp, Homo sapiens
caatttgacatgaga

SEQ ID NO: 1467902 - DNA, 15 bp, Homo sapiens
acaatttgacatgag

SEQ ID NO: 1467903 - DNA, 15 bp, Homo sapiens
cacaatttgacatga

SEQ ID NO: 1467904 - DNA, 15 bp, Homo sapiens
tcacaatttgacatg

SEQ ID NO: 1467905 - DNA, 15 bp, Homo sapiens
atcacaatttgacat

SEQ ID NO: 1467906 - DNA, 15 bp, Homo sapiens
gatcacaatttgaca

SEQ ID NO: 1467907 - DNA, 15 bp, Homo sapiens
ggatcacaatttgac

SEQ ID NO: 1467908 - DNA, 15 bp, Homo sapiens
aggatcacaatttga

SEQ ID NO: 1467909 - DNA, 15 bp, Homo sapiens
gaggatcacaatttg

SEQ ID NO: 1467910 - DNA, 15 bp, Homo sapiens
tgaggatcacaattt

SEQ ID NO: 1467911 - DNA, 15 bp, Homo sapiens
ctgaggatcacaatt

SEQ ID NO: 1467912 - DNA, 15 bp, Homo sapiens
actgaggatcacaat

SEQ ID NO: 1467913 - DNA, 15 bp, Homo sapiens
cactgaggatcacaa

SEQ ID NO: 1467914 - DNA, 15 bp, Homo sapiens
acactgaggatcaca

SEQ ID NO: 1467915 - DNA, 15 bp, Homo sapiens
aacactgaggatcac

SEQ ID NO: 1467916 - DNA, 15 bp, Homo sapiens
caacactgaggatca

SEQ ID NO: 1467917 - DNA, 15 bp, Homo sapiens
tcaacactgaggatc

SEQ ID NO: 1467918 - DNA, 15 bp, Homo sapiens
ttcaacactgaggat

SEQ ID NO: 1467919 - DNA, 15 bp, Homo sapiens
cttcaacactgagga

SEQ ID NO: 1467920 - DNA, 15 bp, Homo sapiens
ccttcaacactgagg

SEQ ID NO: 1467921 - DNA, 15 bp, Homo sapiens
tccttcaacactgag

SEQ ID NO: 1467922 - DNA, 15 bp, Homo sapiens
ctccttcaacactga

SEQ ID NO: 1467923 - DNA, 15 bp, Homo sapiens
cctccttcaacactg

SEQ ID NO: 1467924 - DNA, 15 bp, Homo sapiens
ccctccttcaacact

SEQ ID NO: 1467925 - DNA, 15 bp, Homo sapiens
cccctccttcaacac

SEQ ID NO: 1467926 - DNA, 15 bp, Homo sapiens
gcccctccttcaaca

SEQ ID NO: 1467927 - DNA, 15 bp, Homo sapiens
ggcccctccttcaac

SEQ ID NO: 1467928 - DNA, 15 bp, Homo sapiens
aggcccctccttcaa

SEQ ID NO: 1467929 - DNA, 15 bp, Homo sapiens
caggcccctccttca

SEQ ID NO: 1467930 - DNA, 15 bp, Homo sapiens
tcaggcccctccttc

SEQ ID NO: 1467931 - DNA, 15 bp, Homo sapiens
ttcaggcccctcctt

SEQ ID NO: 1467932 - DNA, 15 bp, Homo sapiens
cttcaggcccctcct

SEQ ID NO: 1467933 - DNA, 15 bp, Homo sapiens
ccttcaggcccctcc

SEQ ID NO: 1467934 - DNA, 15 bp, Homo sapiens
cccttcaggcccctc

SEQ ID NO: 1467935 - DNA, 15 bp, Homo sapiens
tcccttcaggcccct

SEQ ID NO: 1467936 - DNA, 15 bp, Homo sapiens
ctcccttcaggcccc

SEQ ID NO: 1467937 - DNA, 15 bp, Homo sapiens
cctcccttcaggccc

SEQ ID NO: 1467938 - DNA, 15 bp, Homo sapiens
acctcccttcaggcc

SEQ ID NO: 1467939 - DNA, 15 bp, Homo sapiens
cacctcccttcaggc

SEQ ID NO: 1467940 - DNA, 15 bp, Homo sapiens
tcacctcccttcagg

SEQ ID NO: 1467941 - DNA, 15 bp, Homo sapiens
gtcacctcccttcag

SEQ ID NO: 1467942 - DNA, 15 bp, Homo sapiens
agtcacctcccttca

SEQ ID NO: 1467943 - DNA, 15 bp, Homo sapiens
cagtcacctcccttc

SEQ ID NO: 1467944 - DNA, 15 bp, Homo sapiens
ccagtcacctccctt

SEQ ID NO: 1467945 - DNA, 15 bp, Homo sapiens
tccagtcacctccct

SEQ ID NO: 1467946 - DNA, 15 bp, Homo sapiens
atccagtcacctccc

SEQ ID NO: 1467947 - DNA, 15 bp, Homo sapiens
gatccagtcacctcc

SEQ ID NO: 1467948 - DNA, 15 bp, Homo sapiens
tgatccagtcacctc

SEQ ID NO: 1467949 - DNA, 15 bp, Homo sapiens
atgatccagtcacct

SEQ ID NO: 1467950 - DNA, 15 bp, Homo sapiens
catgatccagtcacc

SEQ ID NO: 1467951 - DNA, 15 bp, Homo sapiens
ccatgatccagtcac

SEQ ID NO: 1467952 - DNA, 15 bp, Homo sapiens
cccatgatccagtca

SEQ ID NO: 1467953 - DNA, 15 bp, Homo sapiens
ccccatgatccagtc

SEQ ID NO: 1467954 - DNA, 15 bp, Homo sapiens
cccccatgatccagt

SEQ ID NO: 1467955 - DNA, 15 bp, Homo sapiens
gcccccatgatccag

SEQ ID NO: 1467956 - DNA, 15 bp, Homo sapiens
tgcccccatgatcca

SEQ ID NO: 1467957 - DNA, 15 bp, Homo sapiens
ctgcccccatgatcc

SEQ ID NO: 1467958 - DNA, 15 bp, Homo sapiens
tctgcccccatgatc

SEQ ID NO: 1467959 - DNA, 15 bp, Homo sapiens
atctgcccccatgat

SEQ ID NO: 1467960 - DNA, 15 bp, Homo sapiens
aatctgcccccatga

SEQ ID NO: 1467961 - DNA, 15 bp, Homo sapiens
aaatctgcccccatg

SEQ ID NO: 1467962 - DNA, 15 bp, Homo sapiens
aaaatctgcccccat

SEQ ID NO: 1467963 - DNA, 15 bp, Homo sapiens
aaaaatctgccccca

SEQ ID NO: 1467964 - DNA, 15 bp, Homo sapiens
aaaaaatctgccccc

SEQ ID NO: 1467965 - DNA, 15 bp, Homo sapiens
gaaaaaatctgcccc

SEQ ID NO: 1467966 - DNA, 15 bp, Homo sapiens
ggaaaaaatctgccc

SEQ ID NO: 1467967 - DNA, 15 bp, Homo sapiens
gggaaaaaatctgcc

SEQ ID NO: 1467968 - DNA, 15 bp, Homo sapiens
agggaaaaaatctgc

SEQ ID NO: 1467969 - DNA, 15 bp, Homo sapiens
aagggaaaaaatctg

SEQ ID NO: 1467970 - DNA, 15 bp, Homo sapiens
caagggaaaaaatct

SEQ ID NO: 1467971 - DNA, 15 bp, Homo sapiens
gcaagggaaaaaatc

SEQ ID NO: 1467972 - DNA, 15 bp, Homo sapiens
agcaagggaaaaaat

SEQ ID NO: 1467973 - DNA, 15 bp, Homo sapiens
tagcaagggaaaaaa

SEQ ID NO: 1467974 - DNA, 15 bp, Homo sapiens
atagcaagggaaaaa

SEQ ID NO: 1467975 - DNA, 15 bp, Homo sapiens
aatagcaagggaaaa

SEQ ID NO: 1467976 - DNA, 15 bp, Homo sapiens
gaatagcaagggaaa

SEQ ID NO: 1467977 - DNA, 15 bp, Homo sapiens
agaatagcaagggaa

SEQ ID NO: 1467978 - DNA, 15 bp, Homo sapiens
gagaatagcaaggga

SEQ ID NO: 1467979 - DNA, 15 bp, Homo sapiens
tgagaatagcaaggg

SEQ ID NO: 1467980 - DNA, 15 bp, Homo sapiens
atgagaatagcaagg

SEQ ID NO: 1467981 - DNA, 15 bp, Homo sapiens
catgagaatagcaag

SEQ ID NO: 1467982 - DNA, 15 bp, Homo sapiens
tcatgagaatagcaa

SEQ ID NO: 1467983 - DNA, 15 bp, Homo sapiens
atcatgagaatagca

SEQ ID NO: 1467984 - DNA, 15 bp, Homo sapiens
tatcatgagaatagc

SEQ ID NO: 1467985 - DNA, 15 bp, Homo sapiens
ctatcatgagaatag

SEQ ID NO: 1467986 - DNA, 15 bp, Homo sapiens
actatcatgagaata

SEQ ID NO: 1467987 - DNA, 15 bp, Homo sapiens
cactatcatgagaat

SEQ ID NO: 1467988 - DNA, 15 bp, Homo sapiens
tcactatcatgagaa

SEQ ID NO: 1467989 - DNA, 15 bp, Homo sapiens
ttcactatcatgaga

SEQ ID NO: 1467990 - DNA, 15 bp, Homo sapiens
attcactatcatgag

SEQ ID NO: 1467991 - DNA, 15 bp, Homo sapiens
aattcactatcatga

SEQ ID NO: 1467992 - DNA, 15 bp, Homo sapiens
taattcactatcatg

SEQ ID NO: 1467993 - DNA, 15 bp, Homo sapiens
ataattcactatcat

SEQ ID NO: 1467994 - DNA, 15 bp, Homo sapiens
gataattcactatca

SEQ ID NO: 1467995 - DNA, 15 bp, Homo sapiens
cgataattcactatc

SEQ ID NO: 1467996 - DNA, 15 bp, Homo sapiens
acgataattcactat

SEQ ID NO: 1467997 - DNA, 15 bp, Homo sapiens
cacgataattcacta

SEQ ID NO: 1467998 - DNA, 15 bp, Homo sapiens
tcacgataattcact

SEQ ID NO: 1467999 - DNA, 15 bp, Homo sapiens
ctcacgataattcac

SEQ ID NO: 1468000 - DNA, 15 bp, Homo sapiens
tctcacgataattca

SEQ ID NO: 1468001 - DNA, 15 bp, Homo sapiens
atctcacgataattc

SEQ ID NO: 1468002 - DNA, 15 bp, Homo sapiens
gatctcacgataatt

SEQ ID NO: 1468003 - DNA, 15 bp, Homo sapiens
agatctcacgataat

SEQ ID NO: 1468004 - DNA, 15 bp, Homo sapiens
cagatctcacgataa

SEQ ID NO: 1468005 - DNA, 15 bp, Homo sapiens
ccagatctcacgata

SEQ ID NO: 1468006 - DNA, 15 bp, Homo sapiens
gccagatctcacgat

SEQ ID NO: 1468007 - DNA, 15 bp, Homo sapiens
agccagatctcacga

SEQ ID NO: 1468008 - DNA, 15 bp, Homo sapiens
cagccagatctcacg

SEQ ID NO: 1468009 - DNA, 15 bp, Homo sapiens
acagccagatctcac

SEQ ID NO: 1468010 - DNA, 15 bp, Homo sapiens
aacagccagatctca

SEQ ID NO: 1468011 - DNA, 15 bp, Homo sapiens
aaacagccagatctc

SEQ ID NO: 1468012 - DNA, 15 bp, Homo sapiens
gaaacagccagatct

SEQ ID NO: 1468013 - DNA, 15 bp, Homo sapiens
tgaaacagccagatc

SEQ ID NO: 1468014 - DNA, 15 bp, Homo sapiens
ttgaaacagccagat

SEQ ID NO: 1468015 - DNA, 15 bp, Homo sapiens
tttgaaacagccaga

SEQ ID NO: 1468016 - DNA, 15 bp, Homo sapiens
ctttgaaacagccag

SEQ ID NO: 1468017 - DNA, 15 bp, Homo sapiens
actttgaaacagcca

SEQ ID NO: 1468018 - DNA, 15 bp, Homo sapiens
cactttgaaacagcc

SEQ ID NO: 1468019 - DNA, 15 bp, Homo sapiens
acactttgaaacagc

SEQ ID NO: 1468020 - DNA, 15 bp, Homo sapiens
cacactttgaaacag

SEQ ID NO: 1468021 - DNA, 15 bp, Homo sapiens
acacactttgaaaca

SEQ ID NO: 1468022 - DNA, 15 bp, Homo sapiens
tacacactttgaaac

SEQ ID NO: 1468023 - DNA, 15 bp, Homo sapiens
ctacacactttgaaa

SEQ ID NO: 1468024 - DNA, 15 bp, Homo sapiens
gctacacactttgaa

SEQ ID NO: 1468025 - DNA, 15 bp, Homo sapiens
tgctacacactttga

SEQ ID NO: 1468026 - DNA, 15 bp, Homo sapiens
gtgctacacactttg

SEQ ID NO: 1468027 - DNA, 15 bp, Homo sapiens
ggtgctacacacttt

SEQ ID NO: 1468028 - DNA, 15 bp, Homo sapiens
aggtgctacacactt

SEQ ID NO: 1468029 - DNA, 15 bp, Homo sapiens
aaggtgctacacact

SEQ ID NO: 1468030 - DNA, 15 bp, Homo sapiens
aaaggtgctacacac

SEQ ID NO: 1468031 - DNA, 15 bp, Homo sapiens
gaaaggtgctacaca

SEQ ID NO: 1468032 - DNA, 15 bp, Homo sapiens
ggaaaggtgctacac

SEQ ID NO: 1468033 - DNA, 15 bp, Homo sapiens
gggaaaggtgctaca

SEQ ID NO: 1468034 - DNA, 15 bp, Homo sapiens
agggaaaggtgctac

SEQ ID NO: 1468035 - DNA, 15 bp, Homo sapiens
aagggaaaggtgcta

SEQ ID NO: 1468036 - DNA, 15 bp, Homo sapiens
aaagggaaaggtgct

SEQ ID NO: 1468037 - DNA, 15 bp, Homo sapiens
caaagggaaaggtgc

SEQ ID NO: 1468038 - DNA, 15 bp, Homo sapiens
gcaaagggaaaggtg

SEQ ID NO: 1468039 - DNA, 15 bp, Homo sapiens
agcaaagggaaaggt

SEQ ID NO: 1468040 - DNA, 15 bp, Homo sapiens
gagcaaagggaaagg

SEQ ID NO: 1468041 - DNA, 15 bp, Homo sapiens
agagcaaagggaaag

SEQ ID NO: 1468042 - DNA, 15 bp, Homo sapiens
gagagcaaagggaaa

SEQ ID NO: 1468043 - DNA, 15 bp, Homo sapiens
agagagcaaagggaa

SEQ ID NO: 1468044 - DNA, 15 bp, Homo sapiens
aagagagcaaaggga

SEQ ID NO: 1468045 - DNA, 15 bp, Homo sapiens
gaagagagcaaaggg

SEQ ID NO: 1468046 - DNA, 15 bp, Homo sapiens
ggaagagagcaaagg

SEQ ID NO: 1468047 - DNA, 15 bp, Homo sapiens
aggaagagagcaaag

SEQ ID NO: 1468048 - DNA, 15 bp, Homo sapiens
aaggaagagagcaaa

SEQ ID NO: 1468049 - DNA, 15 bp, Homo sapiens
gaaggaagagagcaa

SEQ ID NO: 1468050 - DNA, 15 bp, Homo sapiens
agaaggaagagagca

SEQ ID NO: 1468051 - DNA, 15 bp, Homo sapiens
cagaaggaagagagc

SEQ ID NO: 1468052 - DNA, 15 bp, Homo sapiens
gcagaaggaagagag

SEQ ID NO: 1468053 - DNA, 15 bp, Homo sapiens
agcagaaggaagaga

SEQ ID NO: 1468054 - DNA, 15 bp, Homo sapiens
cagcagaaggaagag

SEQ ID NO: 1468055 - DNA, 15 bp, Homo sapiens
tcagcagaaggaaga

SEQ ID NO: 1468056 - DNA, 15 bp, Homo sapiens
ttcagcagaaggaag

SEQ ID NO: 1468057 - DNA, 15 bp, Homo sapiens
cttcagcagaaggaa

SEQ ID NO: 1468058 - DNA, 15 bp, Homo sapiens
gcttcagcagaagga

SEQ ID NO: 1468059 - DNA, 15 bp, Homo sapiens
ggcttcagcagaagg

SEQ ID NO: 1468060 - DNA, 15 bp, Homo sapiens
tggcttcagcagaag

SEQ ID NO: 1468061 - DNA, 15 bp, Homo sapiens
atggcttcagcagaa

SEQ ID NO: 1468062 - DNA, 15 bp, Homo sapiens
catggcttcagcaga

SEQ ID NO: 1468063 - DNA, 15 bp, Homo sapiens
acatggcttcagcag

SEQ ID NO: 1468064 - DNA, 15 bp, Homo sapiens
tacatggcttcagca

SEQ ID NO: 1468065 - DNA, 15 bp, Homo sapiens
ctacatggcttcagc

SEQ ID NO: 1468066 - DNA, 15 bp, Homo sapiens
cctacatggcttcag

SEQ ID NO: 1468067 - DNA, 15 bp, Homo sapiens
gtcctacatggcttc

SEQ ID NO: 1468068 - DNA, 15 bp, Homo sapiens
tgtcctacatggctt

SEQ ID NO: 1468069 - DNA, 15 bp, Homo sapiens
atgtcctacatggct

SEQ ID NO: 1468070 - DNA, 15 bp, Homo sapiens
catgtcctacatggc

SEQ ID NO: 1468071 - DNA, 15 bp, Homo sapiens
gcatgtcctacatgg

SEQ ID NO: 1468072 - DNA, 15 bp, Homo sapiens
ggcatgtcctacatg

SEQ ID NO: 1468073 - DNA, 15 bp, Homo sapiens
aggcatgtcctacat

SEQ ID NO: 1468074 - DNA, 15 bp, Homo sapiens
caggcatgtcctaca

SEQ ID NO: 1468075 - DNA, 15 bp, Homo sapiens
gcaggcatgtcctac

SEQ ID NO: 1468076 - DNA, 15 bp, Homo sapiens
agcaggcatgtccta

SEQ ID NO: 1468077 - DNA, 15 bp, Homo sapiens
aagcaggcatgtcct

SEQ ID NO: 1468078 - DNA, 15 bp, Homo sapiens
gaagcaggcatgtcc

SEQ ID NO: 1468079 - DNA, 15 bp, Homo sapiens
agaagcaggcatgtc

SEQ ID NO: 1468080 - DNA, 15 bp, Homo sapiens
tagaagcaggcatgt

SEQ ID NO: 1468081 - DNA, 15 bp, Homo sapiens
gtagaagcaggcatg

SEQ ID NO: 1468082 - DNA, 15 bp, Homo sapiens
agtagaagcaggcat

SEQ ID NO: 1468083 - DNA, 15 bp, Homo sapiens
aagtagaagcaggca

SEQ ID NO: 1468084 - DNA, 15 bp, Homo sapiens
gaagtagaagcaggc

SEQ ID NO: 1468085 - DNA, 15 bp, Homo sapiens
tgaagtagaagcagg

SEQ ID NO: 1468086 - DNA, 15 bp, Homo sapiens
gtgaagtagaagcag

SEQ ID NO: 1468087 - DNA, 15 bp, Homo sapiens
ggtgaagtagaagca

SEQ ID NO: 1468088 - DNA, 15 bp, Homo sapiens
aggtgaagtagaagc

SEQ ID NO: 1468089 - DNA, 15 bp, Homo sapiens
aaggtgaagtagaag

SEQ ID NO: 1468090 - DNA, 15 bp, Homo sapiens
gaaggtgaagtagaa

SEQ ID NO: 1468091 - DNA, 15 bp, Homo sapiens
agaaggtgaagtaga

SEQ ID NO: 1468092 - DNA, 15 bp, Homo sapiens
cagaaggtgaagtag

SEQ ID NO: 1468093 - DNA, 15 bp, Homo sapiens
gcagaaggtgaagta

SEQ ID NO: 1468094 - DNA, 15 bp, Homo sapiens
ggcagaaggtgaagt

SEQ ID NO: 1468095 - DNA, 15 bp, Homo sapiens
tggcagaaggtgaag

SEQ ID NO: 1468096 - DNA, 15 bp, Homo sapiens
tatggcagaaggtga

SEQ ID NO: 1468097 - DNA, 15 bp, Homo sapiens
ttatggcagaaggtg

SEQ ID NO: 1468098 - DNA, 15 bp, Homo sapiens
attatggcagaaggt

SEQ ID NO: 1468099 - DNA, 15 bp, Homo sapiens
aattatggcagaagg

SEQ ID NO: 1468100 - DNA, 15 bp, Homo sapiens
caattatggcagaag

SEQ ID NO: 1468101 - DNA, 15 bp, Homo sapiens
ccaattatggcagaa

SEQ ID NO: 1468102 - DNA, 15 bp, Homo sapiens
tccaattatggcaga

SEQ ID NO: 1468103 - DNA, 15 bp, Homo sapiens
ttccaattatggcag

SEQ ID NO: 1468104 - DNA, 15 bp, Homo sapiens
cttccaattatggca

SEQ ID NO: 1468105 - DNA, 15 bp, Homo sapiens
acttccaattatggc

SEQ ID NO: 1468106 - DNA, 15 bp, Homo sapiens
aacttccaattatgg

SEQ ID NO: 1468107 - DNA, 15 bp, Homo sapiens
aaacttccaattatg

SEQ ID NO: 1468108 - DNA, 15 bp, Homo sapiens
gaaacttccaattat

SEQ ID NO: 1468109 - DNA, 15 bp, Homo sapiens
ggaaacttccaatta

SEQ ID NO: 1468110 - DNA, 15 bp, Homo sapiens
aggaaacttccaatt

SEQ ID NO: 1468111 - DNA, 15 bp, Homo sapiens
caggaaacttccaat

SEQ ID NO: 1468112 - DNA, 15 bp, Homo sapiens
tcaggaaacttccaa

SEQ ID NO: 1468113 - DNA, 15 bp, Homo sapiens
ctcaggaaacttcca

SEQ ID NO: 1468114 - DNA, 15 bp, Homo sapiens
tctcaggaaacttcc

SEQ ID NO: 1468115 - DNA, 15 bp, Homo sapiens
gtctcaggaaacttc

SEQ ID NO: 1468116 - DNA, 15 bp, Homo sapiens
ggtctcaggaaactt

SEQ ID NO: 1468117 - DNA, 15 bp, Homo sapiens
aggtctcaggaaact

SEQ ID NO: 1468118 - DNA, 15 bp, Homo sapiens
gaggtctcaggaaac

SEQ ID NO: 1468119 - DNA, 15 bp, Homo sapiens
ggaggtctcaggaaa

SEQ ID NO: 1468120 - DNA, 15 bp, Homo sapiens
gggaggtctcaggaa

SEQ ID NO: 1468121 - DNA, 15 bp, Homo sapiens
agggaggtctcagga

SEQ ID NO: 1468122 - DNA, 15 bp, Homo sapiens
tagggaggtctcagg

SEQ ID NO: 1468123 - DNA, 15 bp, Homo sapiens
ctagggaggtctcag

SEQ ID NO: 1468124 - DNA, 15 bp, Homo sapiens
gctagggaggtctca

SEQ ID NO: 1468125 - DNA, 15 bp, Homo sapiens
ggctagggaggtctc

SEQ ID NO: 1468126 - DNA, 15 bp, Homo sapiens
tggctagggaggtct

SEQ ID NO: 1468127 - DNA, 15 bp, Homo sapiens
atggctagggaggtc

SEQ ID NO: 1468128 - DNA, 15 bp, Homo sapiens
gatggctagggaggt

SEQ ID NO: 1468129 - DNA, 15 bp, Homo sapiens
ggatggctagggagg

SEQ ID NO: 1468130 - DNA, 15 bp, Homo sapiens
aggatggctagggag

SEQ ID NO: 1468131 - DNA, 15 bp, Homo sapiens
aaggatggctaggga

SEQ ID NO: 1468132 - DNA, 15 bp, Homo sapiens
gaaggatggctaggg

SEQ ID NO: 1468133 - DNA, 15 bp, Homo sapiens
ggaaggatggctagg

SEQ ID NO: 1468134 - DNA, 15 bp, Homo sapiens
aggaaggatggctag

SEQ ID NO: 1468135 - DNA, 15 bp, Homo sapiens
caggaaggatggcta

SEQ ID NO: 1468136 - DNA, 15 bp, Homo sapiens
acaggaaggatggct

SEQ ID NO: 1468137 - DNA, 15 bp, Homo sapiens
tacaggaaggatggc

SEQ ID NO: 1468138 - DNA, 15 bp, Homo sapiens
gtacaggaaggatgg

SEQ ID NO: 1468139 - DNA, 15 bp, Homo sapiens
tgtacaggaaggatg

SEQ ID NO: 1468140 - DNA, 15 bp, Homo sapiens
gttctgcaggctgta

SEQ ID NO: 1468141 - DNA, 15 bp, Homo sapiens
ggttctgcaggctgt

SEQ ID NO: 1468142 - DNA, 15 bp, Homo sapiens
gggttctgcaggctg

SEQ ID NO: 1468143 - DNA, 15 bp, Homo sapiens
tgggttctgcaggct

SEQ ID NO: 1468144 - DNA, 15 bp, Homo sapiens
atgggttctgcaggc

SEQ ID NO: 1468145 - DNA, 15 bp, Homo sapiens
catgggttctgcagg

SEQ ID NO: 1468146 - DNA, 15 bp, Homo sapiens
tcatgggttctgcag

SEQ ID NO: 1468147 - DNA, 15 bp, Homo sapiens
ctcatgggttctgca

SEQ ID NO: 1468148 - DNA, 15 bp, Homo sapiens
gctcatgggttctgc

SEQ ID NO: 1468149 - DNA, 15 bp, Homo sapiens
ggctcatgggttctg

SEQ ID NO: 1468150 - DNA, 15 bp, Homo sapiens
tggctcatgggttct

SEQ ID NO: 1468151 - DNA, 15 bp, Homo sapiens
ttggctcatgggttc

SEQ ID NO: 1468152 - DNA, 15 bp, Homo sapiens
attggctcatgggtt

SEQ ID NO: 1468153 - DNA, 15 bp, Homo sapiens
aattggctcatgggt

SEQ ID NO: 1468154 - DNA, 15 bp, Homo sapiens
taattggctcatggg

SEQ ID NO: 1468155 - DNA, 15 bp, Homo sapiens
ttaattggctcatgg

SEQ ID NO: 1468156 - DNA, 15 bp, Homo sapiens
tttaattggctcatg

SEQ ID NO: 1468157 - DNA, 15 bp, Homo sapiens
gtttaattggctcat

SEQ ID NO: 1468158 - DNA, 15 bp, Homo sapiens
ggtttaattggctca

SEQ ID NO: 1468159 - DNA, 15 bp, Homo sapiens
aggtttaattggctc

SEQ ID NO: 1468160 - DNA, 15 bp, Homo sapiens
gaggtttaattggct

SEQ ID NO: 1468161 - DNA, 15 bp, Homo sapiens
agaggtttaattggc

SEQ ID NO: 1468162 - DNA, 15 bp, Homo sapiens
aagaggtttaattgg

SEQ ID NO: 1468163 - DNA, 15 bp, Homo sapiens
aaaagaggtttaatt

SEQ ID NO: 1468164 - DNA, 15 bp, Homo sapiens
gaaaagaggtttaat

SEQ ID NO: 1468165 - DNA, 15 bp, Homo sapiens
agaaaagaggtttaa

SEQ ID NO: 1468166 - DNA, 15 bp, Homo sapiens
tttataaagaaaaga

SEQ ID NO: 1468167 - DNA, 15 bp, Homo sapiens
atttataaagaaaag

SEQ ID NO: 1468168 - DNA, 15 bp, Homo sapiens
aatttataaagaaaa

SEQ ID NO: 1468169 - DNA, 15 bp, Homo sapiens
ctacctgagactggg

SEQ ID NO: 1468170 - DNA, 15 bp, Homo sapiens
actacctgagactgg

SEQ ID NO: 1468171 - DNA, 15 bp, Homo sapiens
aactacctgagactg

SEQ ID NO: 1468172 - DNA, 15 bp, Homo sapiens
gaactacctgagact

SEQ ID NO: 1468173 - DNA, 15 bp, Homo sapiens
agaactacctgagac

SEQ ID NO: 1468174 - DNA, 15 bp, Homo sapiens
aagaactacctgaga

SEQ ID NO: 1468175 - DNA, 15 bp, Homo sapiens
aaagaactacctgag

SEQ ID NO: 1468176 - DNA, 15 bp, Homo sapiens
taaagaactacctga

SEQ ID NO: 1468177 - DNA, 15 bp, Homo sapiens
ataaagaactacctg

SEQ ID NO: 1468178 - DNA, 15 bp, Homo sapiens
tataaagaactacct

SEQ ID NO: 1468179 - DNA, 15 bp, Homo sapiens
ttataaagaactacc

SEQ ID NO: 1468180 - DNA, 15 bp, Homo sapiens
gttataaagaactac

SEQ ID NO: 1468181 - DNA, 15 bp, Homo sapiens
tgttataaagaacta

SEQ ID NO: 1468182 - DNA, 15 bp, Homo sapiens
ttgttataaagaact

SEQ ID NO: 1468183 - DNA, 15 bp, Homo sapiens
attgttataaagaac

SEQ ID NO: 1468184 - DNA, 15 bp, Homo sapiens
cattgttataaagaa

SEQ ID NO: 1468185 - DNA, 15 bp, Homo sapiens
gcattgttataaaga

SEQ ID NO: 1468186 - DNA, 15 bp, Homo sapiens
tgcattgttataaag

SEQ ID NO: 1468187 - DNA, 15 bp, Homo sapiens
ttgcattgttataaa

SEQ ID NO: 1468188 - DNA, 15 bp, Homo sapiens
cttgcattgttataa

SEQ ID NO: 1468189 - DNA, 15 bp, Homo sapiens
tcttgcattgttata

SEQ ID NO: 1468190 - DNA, 15 bp, Homo sapiens
ttcttgcattgttat

SEQ ID NO: 1468191 - DNA, 15 bp, Homo sapiens
attcttgcattgtta

SEQ ID NO: 1468192 - DNA, 15 bp, Homo sapiens
cattcttgcattgtt

SEQ ID NO: 1468193 - DNA, 15 bp, Homo sapiens
ccattcttgcattgt

SEQ ID NO: 1468194 - DNA, 15 bp, Homo sapiens
tccattcttgcattg

SEQ ID NO: 1468195 - DNA, 15 bp, Homo sapiens
gtccattcttgcatt

SEQ ID NO: 1468196 - DNA, 15 bp, Homo sapiens
agtccattcttgcat

SEQ ID NO: 1468197 - DNA, 15 bp, Homo sapiens
tagtccattcttgca

SEQ ID NO: 1468198 - DNA, 15 bp, Homo sapiens
ttagtccattcttgc

SEQ ID NO: 1468199 - DNA, 15 bp, Homo sapiens
attagtccattcttg

SEQ ID NO: 1468200 - DNA, 15 bp, Homo sapiens
tattagtccattctt

SEQ ID NO: 1468201 - DNA, 15 bp, Homo sapiens
tctgtattagtccat

SEQ ID NO: 1468202 - DNA, 15 bp, Homo sapiens
ttctgtattagtcca

SEQ ID NO: 1468203 - DNA, 15 bp, Homo sapiens
tttctgtattagtcc

SEQ ID NO: 1468204 - DNA, 15 bp, Homo sapiens
ttttctgtattagtc

SEQ ID NO: 1468205 - DNA, 15 bp, Homo sapiens
attttctgtattagt

SEQ ID NO: 1468206 - DNA, 15 bp, Homo sapiens
aattttctgtattag

SEQ ID NO: 1468207 - DNA, 15 bp, Homo sapiens
caattttctgtatta

SEQ ID NO: 1468208 - DNA, 15 bp, Homo sapiens
ccaattttctgtatt

SEQ ID NO: 1468209 - DNA, 15 bp, Homo sapiens
accaattttctgtat

SEQ ID NO: 1468210 - DNA, 15 bp, Homo sapiens
taccaattttctgta

SEQ ID NO: 1468211 - DNA, 15 bp, Homo sapiens
gtaccaattttctgt

SEQ ID NO: 1468212 - DNA, 15 bp, Homo sapiens
ggtaccaattttctg

SEQ ID NO: 1468213 - DNA, 15 bp, Homo sapiens
tggtaccaattttct

SEQ ID NO: 1468214 - DNA, 15 bp, Homo sapiens
ctggtaccaattttc

SEQ ID NO: 1468215 - DNA, 15 bp, Homo sapiens
cctggtaccaatttt

SEQ ID NO: 1468216 - DNA, 15 bp, Homo sapiens
tcctggtaccaattt

SEQ ID NO: 1468217 - DNA, 15 bp, Homo sapiens
ctcctggtaccaatt

SEQ ID NO: 1468218 - DNA, 15 bp, Homo sapiens
actcctggtaccaat

SEQ ID NO: 1468219 - DNA, 15 bp, Homo sapiens
cactcctggtaccaa

SEQ ID NO: 1468220 - DNA, 15 bp, Homo sapiens
tcactcctggtacca

SEQ ID NO: 1468221 - DNA, 15 bp, Homo sapiens
ctcactcctggtacc

SEQ ID NO: 1468222 - DNA, 15 bp, Homo sapiens
cctcactcctggtac

SEQ ID NO: 1468223 - DNA, 15 bp, Homo sapiens
gcctcactcctggta

SEQ ID NO: 1468224 - DNA, 15 bp, Homo sapiens
tgcctcactcctggt

SEQ ID NO: 1468225 - DNA, 15 bp, Homo sapiens
gtgcctcactcctgg

SEQ ID NO: 1468226 - DNA, 15 bp, Homo sapiens
agtgcctcactcctg

SEQ ID NO: 1468227 - DNA, 15 bp, Homo sapiens
cagtgcctcactcct

SEQ ID NO: 1468228 - DNA, 15 bp, Homo sapiens
gcagtgcctcactcc

SEQ ID NO: 1468229 - DNA, 15 bp, Homo sapiens
agcagtgcctcactc

SEQ ID NO: 1468230 - DNA, 15 bp, Homo sapiens
cagcagtgcctcact

SEQ ID NO: 1468231 - DNA, 15 bp, Homo sapiens
acagcagtgcctcac

SEQ ID NO: 1468232 - DNA, 15 bp, Homo sapiens
tacagcagtgcctca

SEQ ID NO: 1468233 - DNA, 15 bp, Homo sapiens
ttacagcagtgcctc

SEQ ID NO: 1468234 - DNA, 15 bp, Homo sapiens
tttacagcagtgcct

SEQ ID NO: 1468235 - DNA, 15 bp, Homo sapiens
atttacagcagtgcc

SEQ ID NO: 1468236 - DNA, 15 bp, Homo sapiens
tatttacagcagtgc

SEQ ID NO: 1468237 - DNA, 15 bp, Homo sapiens
atatttacagcagtg

SEQ ID NO: 1468238 - DNA, 15 bp, Homo sapiens
tatatttacagcagt

SEQ ID NO: 1468239 - DNA, 15 bp, Homo sapiens
gtatatttacagcag

SEQ ID NO: 1468240 - DNA, 15 bp, Homo sapiens
ggtatatttacagca

SEQ ID NO: 1468241 - DNA, 15 bp, Homo sapiens
aggtatatttacagc

SEQ ID NO: 1468242 - DNA, 15 bp, Homo sapiens
caggtatatttacag

SEQ ID NO: 1468243 - DNA, 15 bp, Homo sapiens
tcaggtatatttaca

SEQ ID NO: 1468244 - DNA, 15 bp, Homo sapiens
ttcaggtatatttac

SEQ ID NO: 1468245 - DNA, 15 bp, Homo sapiens
tttcaggtatattta

SEQ ID NO: 1468246 - DNA, 15 bp, Homo sapiens
ttttcaggtatattt

SEQ ID NO: 1468247 - DNA, 15 bp, Homo sapiens
attttcaggtatatt

SEQ ID NO: 1468248 - DNA, 15 bp, Homo sapiens
cattttcaggtatat

SEQ ID NO: 1468249 - DNA, 15 bp, Homo sapiens
acattttcaggtata

SEQ ID NO: 1468250 - DNA, 15 bp, Homo sapiens
cacattttcaggtat

SEQ ID NO: 1468251 - DNA, 15 bp, Homo sapiens
ccacattttcaggta

SEQ ID NO: 1468252 - DNA, 15 bp, Homo sapiens
tccacattttcaggt

SEQ ID NO: 1468253 - DNA, 15 bp, Homo sapiens
ttccacattttcagg

SEQ ID NO: 1468254 - DNA, 15 bp, Homo sapiens
cttccacattttcag

SEQ ID NO: 1468255 - DNA, 15 bp, Homo sapiens
gcttccacattttca

SEQ ID NO: 1468256 - DNA, 15 bp, Homo sapiens
tgcttccacattttc

SEQ ID NO: 1468257 - DNA, 15 bp, Homo sapiens
ctgcttccacatttt

SEQ ID NO: 1468258 - DNA, 15 bp, Homo sapiens
gctgcttccacattt

SEQ ID NO: 1468259 - DNA, 15 bp, Homo sapiens
agctgcttccacatt

SEQ ID NO: 1468260 - DNA, 15 bp, Homo sapiens
aagctgcttccacat

SEQ ID NO: 1468261 - DNA, 15 bp, Homo sapiens
aaagctgcttccaca

SEQ ID NO: 1468262 - DNA, 15 bp, Homo sapiens
caaagctgcttccac

SEQ ID NO: 1468263 - DNA, 15 bp, Homo sapiens
ccaaagctgcttcca

SEQ ID NO: 1468264 - DNA, 15 bp, Homo sapiens
tccaaagctgcttcc

SEQ ID NO: 1468265 - DNA, 15 bp, Homo sapiens
ttccaaagctgcttc

SEQ ID NO: 1468266 - DNA, 15 bp, Homo sapiens
gttccaaagctgctt

SEQ ID NO: 1468267 - DNA, 15 bp, Homo sapiens
agttccaaagctgct

SEQ ID NO: 1468268 - DNA, 15 bp, Homo sapiens
cagttccaaagctgc

SEQ ID NO: 1468269 - DNA, 15 bp, Homo sapiens
ccagttccaaagctg

SEQ ID NO: 1468270 - DNA, 15 bp, Homo sapiens
cccagttccaaagct

SEQ ID NO: 1468271 - DNA, 15 bp, Homo sapiens
acccagttccaaagc

SEQ ID NO: 1468272 - DNA, 15 bp, Homo sapiens
attacccagttccaa

SEQ ID NO: 1468273 - DNA, 15 bp, Homo sapiens
cattacccagttcca

SEQ ID NO: 1468274 - DNA, 15 bp, Homo sapiens
ccattacccagttcc

SEQ ID NO: 1468275 - DNA, 15 bp, Homo sapiens
cccattacccagttc

SEQ ID NO: 1468276 - DNA, 15 bp, Homo sapiens
gcccattacccagtt

SEQ ID NO: 1468277 - DNA, 15 bp, Homo sapiens
tgcccattacccagt

SEQ ID NO: 1468278 - DNA, 15 bp, Homo sapiens
ctgcccattacccag

SEQ ID NO: 1468279 - DNA, 15 bp, Homo sapiens
tctgcccattaccca

SEQ ID NO: 1468280 - DNA, 15 bp, Homo sapiens
ctctgcccattaccc

SEQ ID NO: 1468281 - DNA, 15 bp, Homo sapiens
cctctgcccattacc

SEQ ID NO: 1468282 - DNA, 15 bp, Homo sapiens
acctctgcccattac

SEQ ID NO: 1468283 - DNA, 15 bp, Homo sapiens
aacctctgcccatta

SEQ ID NO: 1468284 - DNA, 15 bp, Homo sapiens
caacctctgcccatt

SEQ ID NO: 1468285 - DNA, 15 bp, Homo sapiens
ccaacctctgcccat

SEQ ID NO: 1468286 - DNA, 15 bp, Homo sapiens
tccaacctctgccca

SEQ ID NO: 1468287 - DNA, 15 bp, Homo sapiens
ttccaacctctgccc

SEQ ID NO: 1468288 - DNA, 15 bp, Homo sapiens
gttccaacctctgcc

SEQ ID NO: 1468289 - DNA, 15 bp, Homo sapiens
tgttccaacctctgc

SEQ ID NO: 1468290 - DNA, 15 bp, Homo sapiens
ctgttccaacctctg

SEQ ID NO: 1468291 - DNA, 15 bp, Homo sapiens
actgttccaacctct

SEQ ID NO: 1468292 - DNA, 15 bp, Homo sapiens
aactgttccaacctc

SEQ ID NO: 1468293 - DNA, 15 bp, Homo sapiens
aaactgttccaacct

SEQ ID NO: 1468294 - DNA, 15 bp, Homo sapiens
caaactgttccaacc

SEQ ID NO: 1468295 - DNA, 15 bp, Homo sapiens
ccaaactgttccaac

SEQ ID NO: 1468296 - DNA, 15 bp, Homo sapiens
tccaaactgttccaa

SEQ ID NO: 1468297 - DNA, 15 bp, Homo sapiens
ctccaaactgttcca

SEQ ID NO: 1468298 - DNA, 15 bp, Homo sapiens
cctccaaactgttcc

SEQ ID NO: 1468299 - DNA, 15 bp, Homo sapiens
ccctccaaactgttc

SEQ ID NO: 1468300 - DNA, 15 bp, Homo sapiens
gccctccaaactgtt

SEQ ID NO: 1468301 - DNA, 15 bp, Homo sapiens
agccctccaaactgt

SEQ ID NO: 1468302 - DNA, 15 bp, Homo sapiens
gagccctccaaactg

SEQ ID NO: 1468303 - DNA, 15 bp, Homo sapiens
tgagccctccaaact

SEQ ID NO: 1468304 - DNA, 15 bp, Homo sapiens
ctgagccctccaaac

SEQ ID NO: 1468305 - DNA, 15 bp, Homo sapiens
tctgagccctccaaa

SEQ ID NO: 1468306 - DNA, 15 bp, Homo sapiens
ttcttctgagccctc

SEQ ID NO: 1468307 - DNA, 15 bp, Homo sapiens
cttcttctgagccct

SEQ ID NO: 1468308 - DNA, 15 bp, Homo sapiens
tcttcttctgagccc

SEQ ID NO: 1468309 - DNA, 15 bp, Homo sapiens
gtcttcttctgagcc

SEQ ID NO: 1468310 - DNA, 15 bp, Homo sapiens
tgtcttcttctgagc

SEQ ID NO: 1468311 - DNA, 15 bp, Homo sapiens
ctgtcttcttctgag

SEQ ID NO: 1468312 - DNA, 15 bp, Homo sapiens
cctgtcttcttctga

SEQ ID NO: 1468313 - DNA, 15 bp, Homo sapiens
tcctgtcttcttctg

SEQ ID NO: 1468314 - DNA, 15 bp, Homo sapiens
ttcctgtcttcttct

SEQ ID NO: 1468315 - DNA, 15 bp, Homo sapiens
cttcctgtcttcttc

SEQ ID NO: 1468316 - DNA, 15 bp, Homo sapiens
ccttcctgtcttctt

SEQ ID NO: 1468317 - DNA, 15 bp, Homo sapiens
accttcctgtcttct

SEQ ID NO: 1468318 - DNA, 15 bp, Homo sapiens
caccttcctgtcttc

SEQ ID NO: 1468319 - DNA, 15 bp, Homo sapiens
tcaccttcctgtctt

SEQ ID NO: 1468320 - DNA, 15 bp, Homo sapiens
ctcaccttcctgtct

SEQ ID NO: 1468321 - DNA, 15 bp, Homo sapiens
cctcaccttcctgtc

SEQ ID NO: 1468322 - DNA, 15 bp, Homo sapiens
ccctcaccttcctgt

SEQ ID NO: 1468323 - DNA, 15 bp, Homo sapiens
gccctcaccttcctg

SEQ ID NO: 1468324 - DNA, 15 bp, Homo sapiens
tgccctcaccttcct

SEQ ID NO: 1468325 - DNA, 15 bp, Homo sapiens
ttgccctcaccttcc

SEQ ID NO: 1468326 - DNA, 15 bp, Homo sapiens
cttgccctcaccttc

SEQ ID NO: 1468327 - DNA, 15 bp, Homo sapiens
acttgccctcacctt

SEQ ID NO: 1468328 - DNA, 15 bp, Homo sapiens
aacttgccctcacct

SEQ ID NO: 1468329 - DNA, 15 bp, Homo sapiens
aaacttgccctcacc

SEQ ID NO: 1468330 - DNA, 15 bp, Homo sapiens
caaacttgccctcac

SEQ ID NO: 1468331 - DNA, 15 bp, Homo sapiens
ccaaacttgccctca

SEQ ID NO: 1468332 - DNA, 15 bp, Homo sapiens
tccaaacttgccctc

SEQ ID NO: 1468333 - DNA, 15 bp, Homo sapiens
ttccaaacttgccct

SEQ ID NO: 1468334 - DNA, 15 bp, Homo sapiens
gttccaaacttgccc

SEQ ID NO: 1468335 - DNA, 15 bp, Homo sapiens
agttccaaacttgcc

SEQ ID NO: 1468336 - DNA, 15 bp, Homo sapiens
aagttccaaacttgc

SEQ ID NO: 1468337 - DNA, 15 bp, Homo sapiens
gaagttccaaacttg

SEQ ID NO: 1468338 - DNA, 15 bp, Homo sapiens
ggaagttccaaactt

SEQ ID NO: 1468339 - DNA, 15 bp, Homo sapiens
aggaagttccaaact

SEQ ID NO: 1468340 - DNA, 15 bp, Homo sapiens
taggaagttccaaac

SEQ ID NO: 1468341 - DNA, 15 bp, Homo sapiens
ctaggaagttccaaa

SEQ ID NO: 1468342 - DNA, 15 bp, Homo sapiens
tctaggaagttccaa

SEQ ID NO: 1468343 - DNA, 15 bp, Homo sapiens
ctctaggaagttcca

SEQ ID NO: 1468344 - DNA, 15 bp, Homo sapiens
tctctaggaagttcc

SEQ ID NO: 1468345 - DNA, 15 bp, Homo sapiens
gtctctaggaagttc

SEQ ID NO: 1468346 - DNA, 15 bp, Homo sapiens
agtctctaggaagtt

SEQ ID NO: 1468347 - DNA, 15 bp, Homo sapiens
aagtctctaggaagt

SEQ ID NO: 1468348 - DNA, 15 bp, Homo sapiens
caagtctctaggaag

SEQ ID NO: 1468349 - DNA, 15 bp, Homo sapiens
acaagtctctaggaa

SEQ ID NO: 1468350 - DNA, 15 bp, Homo sapiens
aacaagtctctagga

SEQ ID NO: 1468351 - DNA, 15 bp, Homo sapiens
taacaagtctctagg

SEQ ID NO: 1468352 - DNA, 15 bp, Homo sapiens
ttaacaagtctctag

SEQ ID NO: 1468353 - DNA, 15 bp, Homo sapiens
tttaacaagtctcta

SEQ ID NO: 1468354 - DNA, 15 bp, Homo sapiens
atttaacaagtctct

SEQ ID NO: 1468355 - DNA, 15 bp, Homo sapiens
catttaacaagtctc

SEQ ID NO: 1468356 - DNA, 15 bp, Homo sapiens
ccatttaacaagtct

SEQ ID NO: 1468357 - DNA, 15 bp, Homo sapiens
gccatttaacaagtc

SEQ ID NO: 1468358 - DNA, 15 bp, Homo sapiens
agccatttaacaagt

SEQ ID NO: 1468359 - DNA, 15 bp, Homo sapiens
cagccatttaacaag

SEQ ID NO: 1468360 - DNA, 15 bp, Homo sapiens
acagccatttaacaa

SEQ ID NO: 1468361 - DNA, 15 bp, Homo sapiens
cacagccatttaaca

SEQ ID NO: 1468362 - DNA, 15 bp, Homo sapiens
tcacagccatttaac

SEQ ID NO: 1468363 - DNA, 15 bp, Homo sapiens
gtcacagccatttaa

SEQ ID NO: 1468364 - DNA, 15 bp, Homo sapiens
ggtcacagccattta

SEQ ID NO: 1468365 - DNA, 15 bp, Homo sapiens
tggtcacagccattt

SEQ ID NO: 1468366 - DNA, 15 bp, Homo sapiens
ttggtcacagccatt

SEQ ID NO: 1468367 - DNA, 15 bp, Homo sapiens
tttggtcacagccat

SEQ ID NO: 1468368 - DNA, 15 bp, Homo sapiens
ttttggtcacagcca

SEQ ID NO: 1468369 - DNA, 15 bp, Homo sapiens
attttggtcacagcc

SEQ ID NO: 1468370 - DNA, 15 bp, Homo sapiens
cattttggtcacagc

SEQ ID NO: 1468371 - DNA, 15 bp, Homo sapiens
gcattttggtcacag

SEQ ID NO: 1468372 - DNA, 15 bp, Homo sapiens
agcattttggtcaca

SEQ ID NO: 1468373 - DNA, 15 bp, Homo sapiens
cagcattttggtcac

SEQ ID NO: 1468374 - DNA, 15 bp, Homo sapiens
tcagcattttggtca

SEQ ID NO: 1468375 - DNA, 15 bp, Homo sapiens
atcagcattttggtc

SEQ ID NO: 1468376 - DNA, 15 bp, Homo sapiens
tatcagcattttggt

SEQ ID NO: 1468377 - DNA, 15 bp, Homo sapiens
ctatcagcattttgg

SEQ ID NO: 1468378 - DNA, 15 bp, Homo sapiens
actatcagcattttg

SEQ ID NO: 1468379 - DNA, 15 bp, Homo sapiens
cactatcagcatttt

SEQ ID NO: 1468380 - DNA, 15 bp, Homo sapiens
tcactatcagcattt

SEQ ID NO: 1468381 - DNA, 15 bp, Homo sapiens
atcactatcagcatt

SEQ ID NO: 1468382 - DNA, 15 bp, Homo sapiens
tatcactatcagcat

SEQ ID NO: 1468383 - DNA, 15 bp, Homo sapiens
atatcactatcagca

SEQ ID NO: 1468384 - DNA, 15 bp, Homo sapiens
gatatcactatcagc

SEQ ID NO: 1468385 - DNA, 15 bp, Homo sapiens
cgatatcactatcag

SEQ ID NO: 1468386 - DNA, 15 bp, Homo sapiens
tcgatatcactatca

SEQ ID NO: 1468387 - DNA, 15 bp, Homo sapiens
gtcgatatcactatc

SEQ ID NO: 1468388 - DNA, 15 bp, Homo sapiens
tgtcgatatcactat

SEQ ID NO: 1468389 - DNA, 15 bp, Homo sapiens
ctgtcgatatcacta

SEQ ID NO: 1468390 - DNA, 15 bp, Homo sapiens
actgtcgatatcact

SEQ ID NO: 1468391 - DNA, 15 bp, Homo sapiens
cactgtcgatatcac

SEQ ID NO: 1468392 - DNA, 15 bp, Homo sapiens
tcactgtcgatatca

SEQ ID NO: 1468393 - DNA, 15 bp, Homo sapiens
gtcactgtcgatatc

SEQ ID NO: 1468394 - DNA, 15 bp, Homo sapiens
cgtcactgtcgatat

SEQ ID NO: 1468395 - DNA, 15 bp, Homo sapiens
acgtcactgtcgata

SEQ ID NO: 1468396 - DNA, 15 bp, Homo sapiens
gacgtcactgtcgat

SEQ ID NO: 1468397 - DNA, 15 bp, Homo sapiens
ggacgtcactgtcga

SEQ ID NO: 1468398 - DNA, 15 bp, Homo sapiens
tggacgtcactgtcg

SEQ ID NO: 1468399 - DNA, 15 bp, Homo sapiens
ctggacgtcactgtc

SEQ ID NO: 1468400 - DNA, 15 bp, Homo sapiens
cctggacgtcactgt

SEQ ID NO: 1468401 - DNA, 15 bp, Homo sapiens
gcctggacgtcactg

SEQ ID NO: 1468402 - DNA, 15 bp, Homo sapiens
agcctggacgtcact

SEQ ID NO: 1468403 - DNA, 15 bp, Homo sapiens
cagcctggacgtcac

SEQ ID NO: 1468404 - DNA, 15 bp, Homo sapiens
tcagcctggacgtca

SEQ ID NO: 1468405 - DNA, 15 bp, Homo sapiens
ctcagcctggacgtc

SEQ ID NO: 1468406 - DNA, 15 bp, Homo sapiens
cctcagcctggacgt

SEQ ID NO: 1468407 - DNA, 15 bp, Homo sapiens
tcctcagcctggacg

SEQ ID NO: 1468408 - DNA, 15 bp, Homo sapiens
ctcctcagcctggac

SEQ ID NO: 1468409 - DNA, 15 bp, Homo sapiens
cctcctcagcctgga

SEQ ID NO: 1468410 - DNA, 15 bp, Homo sapiens
acctcctcagcctgg

SEQ ID NO: 1468411 - DNA, 15 bp, Homo sapiens
gacctcctcagcctg

SEQ ID NO: 1468412 - DNA, 15 bp, Homo sapiens
agacctcctcagcct

SEQ ID NO: 1468413 - DNA, 15 bp, Homo sapiens
gagacctcctcagcc

SEQ ID NO: 1468414 - DNA, 15 bp, Homo sapiens
tgagacctcctcagc

SEQ ID NO: 1468415 - DNA, 15 bp, Homo sapiens
ctgagacctcctcag

SEQ ID NO: 1468416 - DNA, 15 bp, Homo sapiens
tctgagacctcctca

SEQ ID NO: 1468417 - DNA, 15 bp, Homo sapiens
atctgagacctcctc

SEQ ID NO: 1468418 - DNA, 15 bp, Homo sapiens
tccatctgagacctc

SEQ ID NO: 1468419 - DNA, 15 bp, Homo sapiens
ttccatctgagacct

SEQ ID NO: 1468420 - DNA, 15 bp, Homo sapiens
tttccatctgagacc

SEQ ID NO: 1468421 - DNA, 15 bp, Homo sapiens
atttccatctgagac

SEQ ID NO: 1468422 - DNA, 15 bp, Homo sapiens
cctcatttccatctg

SEQ ID NO: 1468423 - DNA, 15 bp, Homo sapiens
tcctcatttccatct

SEQ ID NO: 1468424 - DNA, 15 bp, Homo sapiens
ttcctcatttccatc

SEQ ID NO: 1468425 - DNA, 15 bp, Homo sapiens
gttcctcatttccat

SEQ ID NO: 1468426 - DNA, 15 bp, Homo sapiens
agttcctcatttcca

SEQ ID NO: 1468427 - DNA, 15 bp, Homo sapiens
aagttcctcatttcc

SEQ ID NO: 1468428 - DNA, 15 bp, Homo sapiens
taagttcctcatttc

SEQ ID NO: 1468429 - DNA, 15 bp, Homo sapiens
ataagttcctcattt

SEQ ID NO: 1468430 - DNA, 15 bp, Homo sapiens
aataagttcctcatt

SEQ ID NO: 1468431 - DNA, 15 bp, Homo sapiens
caataagttcctcat

SEQ ID NO: 1468432 - DNA, 15 bp, Homo sapiens
ccaataagttcctca

SEQ ID NO: 1468433 - DNA, 15 bp, Homo sapiens
cccaataagttcctc

SEQ ID NO: 1468434 - DNA, 15 bp, Homo sapiens
tcccaataagttcct

SEQ ID NO: 1468435 - DNA, 15 bp, Homo sapiens
ttcccaataagttcc

SEQ ID NO: 1468436 - DNA, 15 bp, Homo sapiens
gttcccaataagttc

SEQ ID NO: 1468437 - DNA, 15 bp, Homo sapiens
agttcccaataagtt

SEQ ID NO: 1468438 - DNA, 15 bp, Homo sapiens
cagttcccaataagt

SEQ ID NO: 1468439 - DNA, 15 bp, Homo sapiens
ccagttcccaataag

SEQ ID NO: 1468440 - DNA, 15 bp, Homo sapiens
tccagttcccaataa

SEQ ID NO: 1468441 - DNA, 15 bp, Homo sapiens
ctccagttcccaata

SEQ ID NO: 1468442 - DNA, 15 bp, Homo sapiens
actccagttcccaat

SEQ ID NO: 1468443 - DNA, 15 bp, Homo sapiens
tactccagttcccaa

SEQ ID NO: 1468444 - DNA, 15 bp, Homo sapiens
ttactccagttccca

SEQ ID NO: 1468445 - DNA, 15 bp, Homo sapiens
tttactccagttccc

SEQ ID NO: 1468446 - DNA, 15 bp, Homo sapiens
tacctttactccagt

SEQ ID NO: 1468447 - DNA, 15 bp, Homo sapiens
ttacctttactccag

SEQ ID NO: 1468448 - DNA, 15 bp, Homo sapiens
gttacctttactcca

SEQ ID NO: 1468449 - DNA, 15 bp, Homo sapiens
agttacctttactcc

SEQ ID NO: 1468450 - DNA, 15 bp, Homo sapiens
gagttacctttactc

SEQ ID NO: 1468451 - DNA, 15 bp, Homo sapiens
agagttacctttact

SEQ ID NO: 1468452 - DNA, 15 bp, Homo sapiens
aagagttacctttac

SEQ ID NO: 1468453 - DNA, 15 bp, Homo sapiens
caagagttaccttta

SEQ ID NO: 1468454 - DNA, 15 bp, Homo sapiens
tcaagagttaccttt

SEQ ID NO: 1468455 - DNA, 15 bp, Homo sapiens
atcaagagttacctt

SEQ ID NO: 1468456 - DNA, 15 bp, Homo sapiens
tatcaagagttacct

SEQ ID NO: 1468457 - DNA, 15 bp, Homo sapiens
atatcaagagttacc

SEQ ID NO: 1468458 - DNA, 15 bp, Homo sapiens
catatcaagagttac

SEQ ID NO: 1468459 - DNA, 15 bp, Homo sapiens
gcatatcaagagtta

SEQ ID NO: 1468460 - DNA, 15 bp, Homo sapiens
agcatatcaagagtt

SEQ ID NO: 1468461 - DNA, 15 bp, Homo sapiens
aagcatatcaagagt

SEQ ID NO: 1468462 - DNA, 15 bp, Homo sapiens
aaagcatatcaagag

SEQ ID NO: 1468463 - DNA, 15 bp, Homo sapiens
taaagcatatcaaga

SEQ ID NO: 1468464 - DNA, 15 bp, Homo sapiens
ctaaagcatatcaag

SEQ ID NO: 1468465 - DNA, 15 bp, Homo sapiens
gctaaagcatatcaa

SEQ ID NO: 1468466 - DNA, 15 bp, Homo sapiens
tgctaaagcatatca

SEQ ID NO: 1468467 - DNA, 15 bp, Homo sapiens
ttgctaaagcatatc

SEQ ID NO: 1468468 - DNA, 15 bp, Homo sapiens
tttgctaaagcatat

SEQ ID NO: 1468469 - DNA, 15 bp, Homo sapiens
ctttgctaaagcata

SEQ ID NO: 1468470 - DNA, 15 bp, Homo sapiens
tctttgctaaagcat

SEQ ID NO: 1468471 - DNA, 15 bp, Homo sapiens
ctctttgctaaagca

SEQ ID NO: 1468472 - DNA, 15 bp, Homo sapiens
tctctttgctaaagc

SEQ ID NO: 1468473 - DNA, 15 bp, Homo sapiens
atctctttgctaaag

SEQ ID NO: 1468474 - DNA, 15 bp, Homo sapiens
catctctttgctaaa

SEQ ID NO: 1468475 - DNA, 15 bp, Homo sapiens
ccatctctttgctaa

SEQ ID NO: 1468476 - DNA, 15 bp, Homo sapiens
gccatctctttgcta

SEQ ID NO: 1468477 - DNA, 15 bp, Homo sapiens
tgccatctctttgct

SEQ ID NO: 1468478 - DNA, 15 bp, Homo sapiens
ctgccatctctttgc

SEQ ID NO: 1468479 - DNA, 15 bp, Homo sapiens
gctgccatctctttg

SEQ ID NO: 1468480 - DNA, 15 bp, Homo sapiens
tgctgccatctcttt

SEQ ID NO: 1468481 - DNA, 15 bp, Homo sapiens
atgctgccatctctt

SEQ ID NO: 1468482 - DNA, 15 bp, Homo sapiens
aatgctgccatctct

SEQ ID NO: 1468483 - DNA, 15 bp, Homo sapiens
caatgctgccatctc

SEQ ID NO: 1468484 - DNA, 15 bp, Homo sapiens
acaatgctgccatct

SEQ ID NO: 1468485 - DNA, 15 bp, Homo sapiens
cacaatgctgccatc

SEQ ID NO: 1468486 - DNA, 15 bp, Homo sapiens
gcacaatgctgccat

SEQ ID NO: 1468487 - DNA, 15 bp, Homo sapiens
ggcacaatgctgcca

SEQ ID NO: 1468488 - DNA, 15 bp, Homo sapiens
gggcacaatgctgcc

SEQ ID NO: 1468489 - DNA, 15 bp, Homo sapiens
ggggcacaatgctgc

SEQ ID NO: 1468490 - DNA, 15 bp, Homo sapiens
aggggcacaatgctg

SEQ ID NO: 1468491 - DNA, 15 bp, Homo sapiens
caggggcacaatgct

SEQ ID NO: 1468492 - DNA, 15 bp, Homo sapiens
gcaggggcacaatgc

SEQ ID NO: 1468493 - DNA, 15 bp, Homo sapiens
agcaggggcacaatg

SEQ ID NO: 1468494 - DNA, 15 bp, Homo sapiens
gagcaggggcacaat

SEQ ID NO: 1468495 - DNA, 15 bp, Homo sapiens
agagcaggggcacaa

SEQ ID NO: 1468496 - DNA, 15 bp, Homo sapiens
tagagcaggggcaca

SEQ ID NO: 1468497 - DNA, 15 bp, Homo sapiens
ctagagcaggggcac

SEQ ID NO: 1468498 - DNA, 15 bp, Homo sapiens
cctagagcaggggca

SEQ ID NO: 1468499 - DNA, 15 bp, Homo sapiens
ccctagagcaggggc

SEQ ID NO: 1468500 - DNA, 15 bp, Homo sapiens
tccctagagcagggg

SEQ ID NO: 1468501 - DNA, 15 bp, Homo sapiens
atccctagagcaggg

SEQ ID NO: 1468502 - DNA, 15 bp, Homo sapiens
gatccctagagcagg

SEQ ID NO: 1468503 - DNA, 15 bp, Homo sapiens
agatccctagagcag

SEQ ID NO: 1468504 - DNA, 15 bp, Homo sapiens
cagatccctagagca

SEQ ID NO: 1468505 - DNA, 15 bp, Homo sapiens
acagatccctagagc

SEQ ID NO: 1468506 - DNA, 15 bp, Homo sapiens
cacagatccctagag

SEQ ID NO: 1468507 - DNA, 15 bp, Homo sapiens
ccacagatccctaga

SEQ ID NO: 1468508 - DNA, 15 bp, Homo sapiens
tccacagatccctag

SEQ ID NO: 1468509 - DNA, 15 bp, Homo sapiens
ttccacagatcccta

SEQ ID NO: 1468510 - DNA, 15 bp, Homo sapiens
gttccacagatccct

SEQ ID NO: 1468511 - DNA, 15 bp, Homo sapiens
agttccacagatccc

SEQ ID NO: 1468512 - DNA, 15 bp, Homo sapiens
aagttccacagatcc

SEQ ID NO: 1468513 - DNA, 15 bp, Homo sapiens
aaagttccacagatc

SEQ ID NO: 1468514 - DNA, 15 bp, Homo sapiens
caaagttccacagat

SEQ ID NO: 1468515 - DNA, 15 bp, Homo sapiens
tcaaagttccacaga

SEQ ID NO: 1468516 - DNA, 15 bp, Homo sapiens
ttcaaagttccacag

SEQ ID NO: 1468517 - DNA, 15 bp, Homo sapiens
gttcaaagttccaca

SEQ ID NO: 1468518 - DNA, 15 bp, Homo sapiens
agttcaaagttccac

SEQ ID NO: 1468519 - DNA, 15 bp, Homo sapiens
aagttcaaagttcca

SEQ ID NO: 1468520 - DNA, 15 bp, Homo sapiens
caagttcaaagttcc

SEQ ID NO: 1468521 - DNA, 15 bp, Homo sapiens
tcaagttcaaagttc

SEQ ID NO: 1468522 - DNA, 15 bp, Homo sapiens
actctcaagttcaaa

SEQ ID NO: 1468523 - DNA, 15 bp, Homo sapiens
cactctcaagttcaa

SEQ ID NO: 1468524 - DNA, 15 bp, Homo sapiens
tcactctcaagttca

SEQ ID NO: 1468525 - DNA, 15 bp, Homo sapiens
atcactctcaagttc

SEQ ID NO: 1468526 - DNA, 15 bp, Homo sapiens
catcactctcaagtt

SEQ ID NO: 1468527 - DNA, 15 bp, Homo sapiens
tcatcactctcaagt

SEQ ID NO: 1468528 - DNA, 15 bp, Homo sapiens
atcatcactctcaag

SEQ ID NO: 1468529 - DNA, 15 bp, Homo sapiens
aatcatcactctcaa

SEQ ID NO: 1468530 - DNA, 15 bp, Homo sapiens
aaatcatcactctca

SEQ ID NO: 1468531 - DNA, 15 bp, Homo sapiens
taaatcatcactctc

SEQ ID NO: 1468532 - DNA, 15 bp, Homo sapiens
ctaaatcatcactct

SEQ ID NO: 1468533 - DNA, 15 bp, Homo sapiens
tctaaatcatcactc

SEQ ID NO: 1468534 - DNA, 15 bp, Homo sapiens
ttctaaatcatcact

SEQ ID NO: 1468535 - DNA, 15 bp, Homo sapiens
tttctaaatcatcac

SEQ ID NO: 1468536 - DNA, 15 bp, Homo sapiens
ttttctaaatcatca

SEQ ID NO: 1468537 - DNA, 15 bp, Homo sapiens
tttttctaaatcatc

SEQ ID NO: 1468538 - DNA, 15 bp, Homo sapiens
ttttttctaaatcat

SEQ ID NO: 1468539 - DNA, 15 bp, Homo sapiens
attttttctaaatca

SEQ ID NO: 1468540 - DNA, 15 bp, Homo sapiens
cattttttctaaatc

SEQ ID NO: 1468541 - DNA, 15 bp, Homo sapiens
ccattttttctaaat

SEQ ID NO: 1468542 - DNA, 15 bp, Homo sapiens
gccattttttctaaa

SEQ ID NO: 1468543 - DNA, 15 bp, Homo sapiens
tgccattttttctaa

SEQ ID NO: 1468544 - DNA, 15 bp, Homo sapiens
ctgccattttttcta

SEQ ID NO: 1468545 - DNA, 15 bp, Homo sapiens
tctgccattttttct

SEQ ID NO: 1468546 - DNA, 15 bp, Homo sapiens
atctgccattttttc

SEQ ID NO: 1468547 - DNA, 15 bp, Homo sapiens
catctgccatttttt

SEQ ID NO: 1468548 - DNA, 15 bp, Homo sapiens
tcatctgccattttt

SEQ ID NO: 1468549 - DNA, 15 bp, Homo sapiens
ttcatctgccatttt

SEQ ID NO: 1468550 - DNA, 15 bp, Homo sapiens
tttcatctgccattt

SEQ ID NO: 1468551 - DNA, 15 bp, Homo sapiens
atttcatctgccatt

SEQ ID NO: 1468552 - DNA, 15 bp, Homo sapiens
aatttcatctgccat

SEQ ID NO: 1468553 - DNA, 15 bp, Homo sapiens
aaatttcatctgcca

SEQ ID NO: 1468554 - DNA, 15 bp, Homo sapiens
gaaatttcatctgcc

SEQ ID NO: 1468555 - DNA, 15 bp, Homo sapiens
agaaatttcatctgc

SEQ ID NO: 1468556 - DNA, 15 bp, Homo sapiens
tagaaatttcatctg

SEQ ID NO: 1468557 - DNA, 15 bp, Homo sapiens
ttagaaatttcatct

SEQ ID NO: 1468558 - DNA, 15 bp, Homo sapiens
cttagaaatttcatc

SEQ ID NO: 1468559 - DNA, 15 bp, Homo sapiens
acttagaaatttcat

SEQ ID NO: 1468560 - DNA, 15 bp, Homo sapiens
cacttagaaatttca

SEQ ID NO: 1468561 - DNA, 15 bp, Homo sapiens
gcacttagaaatttc

SEQ ID NO: 1468562 - DNA, 15 bp, Homo sapiens
tgcacttagaaattt

SEQ ID NO: 1468563 - DNA, 15 bp, Homo sapiens
ctgcacttagaaatt

SEQ ID NO: 1468564 - DNA, 15 bp, Homo sapiens
gctgcacttagaaat

SEQ ID NO: 1468565 - DNA, 15 bp, Homo sapiens
agctgcacttagaaa

SEQ ID NO: 1468566 - DNA, 15 bp, Homo sapiens
aagctgcacttagaa

SEQ ID NO: 1468567 - DNA, 15 bp, Homo sapiens
caagctgcacttaga

SEQ ID NO: 1468568 - DNA, 15 bp, Homo sapiens
gcaagctgcacttag

SEQ ID NO: 1468569 - DNA, 15 bp, Homo sapiens
agcaagctgcactta

SEQ ID NO: 1468570 - DNA, 15 bp, Homo sapiens
gagcaagctgcactt

SEQ ID NO: 1468571 - DNA, 15 bp, Homo sapiens
agagcaagctgcact

SEQ ID NO: 1468572 - DNA, 15 bp, Homo sapiens
aagagcaagctgcac

SEQ ID NO: 1468573 - DNA, 15 bp, Homo sapiens
gaagagcaagctgca

SEQ ID NO: 1468574 - DNA, 15 bp, Homo sapiens
tgaagagcaagctgc

SEQ ID NO: 1468575 - DNA, 15 bp, Homo sapiens
ctgaagagcaagctg

SEQ ID NO: 1468576 - DNA, 15 bp, Homo sapiens
cactgaagagcaagc

SEQ ID NO: 1468577 - DNA, 15 bp, Homo sapiens
tcactgaagagcaag

SEQ ID NO: 1468578 - DNA, 15 bp, Homo sapiens
ttcactgaagagcaa

SEQ ID NO: 1468579 - DNA, 15 bp, Homo sapiens
gttcactgaagagca

SEQ ID NO: 1468580 - DNA, 15 bp, Homo sapiens
tgttcactgaagagc

SEQ ID NO: 1468581 - DNA, 15 bp, Homo sapiens
gtgttcactgaagag

SEQ ID NO: 1468582 - DNA, 15 bp, Homo sapiens
ggtgttcactgaaga

SEQ ID NO: 1468583 - DNA, 15 bp, Homo sapiens
tggtgttcactgaag

SEQ ID NO: 1468584 - DNA, 15 bp, Homo sapiens
ttggtgttcactgaa

SEQ ID NO: 1468585 - DNA, 15 bp, Homo sapiens
attggtgttcactga

SEQ ID NO: 1468586 - DNA, 15 bp, Homo sapiens
tattggtgttcactg

SEQ ID NO: 1468587 - DNA, 15 bp, Homo sapiens
ttattggtgttcact

SEQ ID NO: 1468588 - DNA, 15 bp, Homo sapiens
tttattggtgttcac

SEQ ID NO: 1468589 - DNA, 15 bp, Homo sapiens
atttattggtgttca

SEQ ID NO: 1468590 - DNA, 15 bp, Homo sapiens
tatttattggtgttc

SEQ ID NO: 1468591 - DNA, 15 bp, Homo sapiens
ttatttattggtgtt

SEQ ID NO: 1468592 - DNA, 15 bp, Homo sapiens
cttatttattggtgt

SEQ ID NO: 1468593 - DNA, 15 bp, Homo sapiens
acttatttattggtg

SEQ ID NO: 1468594 - DNA, 15 bp, Homo sapiens
tacttatttattggt

SEQ ID NO: 1468595 - DNA, 15 bp, Homo sapiens
atacttatttattgg

SEQ ID NO: 1468596 - DNA, 15 bp, Homo sapiens
aatacttatttattg

SEQ ID NO: 1468597 - DNA, 15 bp, Homo sapiens
gaatacttatttatt

SEQ ID NO: 1468598 - DNA, 15 bp, Homo sapiens
tgaatacttatttat

SEQ ID NO: 1468599 - DNA, 15 bp, Homo sapiens
ctgaatacttattta

SEQ ID NO: 1468600 - DNA, 15 bp, Homo sapiens
tctgaatacttattt

SEQ ID NO: 1468601 - DNA, 15 bp, Homo sapiens
gtctgaatacttatt

SEQ ID NO: 1468602 - DNA, 15 bp, Homo sapiens
tgtctgaatacttat

SEQ ID NO: 1468603 - DNA, 15 bp, Homo sapiens
ctgtctgaatactta

SEQ ID NO: 1468604 - DNA, 15 bp, Homo sapiens
actgtctgaatactt

SEQ ID NO: 1468605 - DNA, 15 bp, Homo sapiens
aactgtctgaatact

SEQ ID NO: 1468606 - DNA, 15 bp, Homo sapiens
taactgtctgaatac

SEQ ID NO: 1468607 - DNA, 15 bp, Homo sapiens
gtaactgtctgaata

SEQ ID NO: 1468608 - DNA, 15 bp, Homo sapiens
tgtaactgtctgaat

SEQ ID NO: 1468609 - DNA, 15 bp, Homo sapiens
ctgtaactgtctgaa

SEQ ID NO: 1468610 - DNA, 15 bp, Homo sapiens
gctgtaactgtctga

SEQ ID NO: 1468611 - DNA, 15 bp, Homo sapiens
agctgtaactgtctg

SEQ ID NO: 1468612 - DNA, 15 bp, Homo sapiens
cagctgtaactgtct

SEQ ID NO: 1468613 - DNA, 15 bp, Homo sapiens
tcagctgtaactgtc

SEQ ID NO: 1468614 - DNA, 15 bp, Homo sapiens
ttcagctgtaactgt

SEQ ID NO: 1468615 - DNA, 15 bp, Homo sapiens
gttcagctgtaactg

SEQ ID NO: 1468616 - DNA, 15 bp, Homo sapiens
tgttcagctgtaact

SEQ ID NO: 1468617 - DNA, 15 bp, Homo sapiens
ctgttcagctgtaac

SEQ ID NO: 1468618 - DNA, 15 bp, Homo sapiens
cctgttcagctgtaa

SEQ ID NO: 1468619 - DNA, 15 bp, Homo sapiens
ccctgttcagctgta

SEQ ID NO: 1468620 - DNA, 15 bp, Homo sapiens
gccctgttcagctgt

SEQ ID NO: 1468621 - DNA, 15 bp, Homo sapiens
cgccctgttcagctg

SEQ ID NO: 1468622 - DNA, 15 bp, Homo sapiens
ccgccctgttcagct

SEQ ID NO: 1468623 - DNA, 15 bp, Homo sapiens
cccgccctgttcagc

SEQ ID NO: 1468624 - DNA, 15 bp, Homo sapiens
ccccgccctgttcag

SEQ ID NO: 1468625 - DNA, 15 bp, Homo sapiens
tccccgccctgttca

SEQ ID NO: 1468626 - DNA, 15 bp, Homo sapiens
ctccccgccctgttc

SEQ ID NO: 1468627 - DNA, 15 bp, Homo sapiens
gctccccgccctgtt

SEQ ID NO: 1468628 - DNA, 15 bp, Homo sapiens
tgctccccgccctgt

SEQ ID NO: 1468629 - DNA, 15 bp, Homo sapiens
ctgctccccgccctg

SEQ ID NO: 1468630 - DNA, 15 bp, Homo sapiens
gctgctccccgccct

SEQ ID NO: 1468631 - DNA, 15 bp, Homo sapiens
agctgctccccgccc

SEQ ID NO: 1468632 - DNA, 15 bp, Homo sapiens
gagctgctccccgcc

SEQ ID NO: 1468633 - DNA, 15 bp, Homo sapiens
ggagctgctccccgc

SEQ ID NO: 1468634 - DNA, 15 bp, Homo sapiens
aggagctgctccccg

SEQ ID NO: 1468635 - DNA, 15 bp, Homo sapiens
gaggagctgctcccc

SEQ ID NO: 1468636 - DNA, 15 bp, Homo sapiens
ggaggagctgctccc

SEQ ID NO: 1468637 - DNA, 15 bp, Homo sapiens
tggaggagctgctcc

SEQ ID NO: 1468638 - DNA, 15 bp, Homo sapiens
ttggaggagctgctc

SEQ ID NO: 1468639 - DNA, 15 bp, Homo sapiens
cttggaggagctgct

SEQ ID NO: 1468640 - DNA, 15 bp, Homo sapiens
ccttggaggagctgc

SEQ ID NO: 1468641 - DNA, 15 bp, Homo sapiens
cccttggaggagctg

SEQ ID NO: 1468642 - DNA, 15 bp, Homo sapiens
tcccttggaggagct

SEQ ID NO: 1468643 - DNA, 15 bp, Homo sapiens
ctcccttggaggagc

SEQ ID NO: 1468644 - DNA, 15 bp, Homo sapiens
actcccttggaggag

SEQ ID NO: 1468645 - DNA, 15 bp, Homo sapiens
cactcccttggagga

SEQ ID NO: 1468646 - DNA, 15 bp, Homo sapiens
gcactcccttggagg

SEQ ID NO: 1468647 - DNA, 15 bp, Homo sapiens
agcactcccttggag

SEQ ID NO: 1468648 - DNA, 15 bp, Homo sapiens
cagcactcccttgga

SEQ ID NO: 1468649 - DNA, 15 bp, Homo sapiens
gcagcactcccttgg

SEQ ID NO: 1468650 - DNA, 15 bp, Homo sapiens
agcagcactcccttg

SEQ ID NO: 1468651 - DNA, 15 bp, Homo sapiens
aagcagcactccctt

SEQ ID NO: 1468652 - DNA, 15 bp, Homo sapiens
aaagcagcactccct

SEQ ID NO: 1468653 - DNA, 15 bp, Homo sapiens
taaagcagcactccc

SEQ ID NO: 1468654 - DNA, 15 bp, Homo sapiens
ttaaagcagcactcc

SEQ ID NO: 1468655 - DNA, 15 bp, Homo sapiens
cttaaagcagcactc

SEQ ID NO: 1468656 - DNA, 15 bp, Homo sapiens
tcttaaagcagcact

SEQ ID NO: 1468657 - DNA, 15 bp, Homo sapiens
atcttaaagcagcac

SEQ ID NO: 1468658 - DNA, 15 bp, Homo sapiens
gatcttaaagcagca

SEQ ID NO: 1468659 - DNA, 15 bp, Homo sapiens
agatcttaaagcagc

SEQ ID NO: 1468660 - DNA, 15 bp, Homo sapiens
cagatcttaaagcag

SEQ ID NO: 1468661 - DNA, 15 bp, Homo sapiens
acagatcttaaagca

SEQ ID NO: 1468662 - DNA, 15 bp, Homo sapiens
gacagatcttaaagc

SEQ ID NO: 1468663 - DNA, 15 bp, Homo sapiens
agacagatcttaaag

SEQ ID NO: 1468664 - DNA, 15 bp, Homo sapiens
cagacagatcttaaa

SEQ ID NO: 1468665 - DNA, 15 bp, Homo sapiens
gcagacagatcttaa

SEQ ID NO: 1468666 - DNA, 15 bp, Homo sapiens
ggcagacagatctta

SEQ ID NO: 1468667 - DNA, 15 bp, Homo sapiens
tggcagacagatctt

SEQ ID NO: 1468668 - DNA, 15 bp, Homo sapiens
ctggcagacagatct

SEQ ID NO: 1468669 - DNA, 15 bp, Homo sapiens
cctggcagacagatc

SEQ ID NO: 1468670 - DNA, 15 bp, Homo sapiens
acctggcagacagat

SEQ ID NO: 1468671 - DNA, 15 bp, Homo sapiens
tacctggcagacaga

SEQ ID NO: 1468672 - DNA, 15 bp, Homo sapiens
atacctggcagacag

SEQ ID NO: 1468673 - DNA, 15 bp, Homo sapiens
aatacctggcagaca

SEQ ID NO: 1468674 - DNA, 15 bp, Homo sapiens
aaatacctggcagac

SEQ ID NO: 1468675 - DNA, 15 bp, Homo sapiens
taaatacctggcaga

SEQ ID NO: 1468676 - DNA, 15 bp, Homo sapiens
gtaaatacctggcag

SEQ ID NO: 1468677 - DNA, 15 bp, Homo sapiens
agtaaatacctggca

SEQ ID NO: 1468678 - DNA, 15 bp, Homo sapiens
cagtaaatacctggc

SEQ ID NO: 1468679 - DNA, 15 bp, Homo sapiens
tcagtaaatacctgg

SEQ ID NO: 1468680 - DNA, 15 bp, Homo sapiens
ctcagtaaatacctg

SEQ ID NO: 1468681 - DNA, 15 bp, Homo sapiens
tctcagtaaatacct

SEQ ID NO: 1468682 - DNA, 15 bp, Homo sapiens
ttctcagtaaatacc

SEQ ID NO: 1468683 - DNA, 15 bp, Homo sapiens
cttctcagtaaatac

SEQ ID NO: 1468684 - DNA, 15 bp, Homo sapiens
ccttctcagtaaata

SEQ ID NO: 1468685 - DNA, 15 bp, Homo sapiens
gccttctcagtaaat

SEQ ID NO: 1468686 - DNA, 15 bp, Homo sapiens
agccttctcagtaaa

SEQ ID NO: 1468687 - DNA, 15 bp, Homo sapiens
aagccttctcagtaa

SEQ ID NO: 1468688 - DNA, 15 bp, Homo sapiens
caagccttctcagta

SEQ ID NO: 1468689 - DNA, 15 bp, Homo sapiens
acaagccttctcagt

SEQ ID NO: 1468690 - DNA, 15 bp, Homo sapiens
aacaagccttctcag

SEQ ID NO: 1468691 - DNA, 15 bp, Homo sapiens
taacaagccttctca

SEQ ID NO: 1468692 - DNA, 15 bp, Homo sapiens
ttaacaagccttctc

SEQ ID NO: 1468693 - DNA, 15 bp, Homo sapiens
tttaacaagccttct

SEQ ID NO: 1468694 - DNA, 15 bp, Homo sapiens
gtttaacaagccttc

SEQ ID NO: 1468695 - DNA, 15 bp, Homo sapiens
agtttaacaagcctt

SEQ ID NO: 1468696 - DNA, 15 bp, Homo sapiens
tagtttaacaagcct

SEQ ID NO: 1468697 - DNA, 15 bp, Homo sapiens
gtagtttaacaagcc

SEQ ID NO: 1468698 - DNA, 15 bp, Homo sapiens
tgtagtttaacaagc

SEQ ID NO: 1468699 - DNA, 15 bp, Homo sapiens
ctgtagtttaacaag

SEQ ID NO: 1468700 - DNA, 15 bp, Homo sapiens
actgtagtttaacaa

SEQ ID NO: 1468701 - DNA, 15 bp, Homo sapiens
aactgtagtttaaca

SEQ ID NO: 1468702 - DNA, 15 bp, Homo sapiens
aaactgtagtttaac

SEQ ID NO: 1468703 - DNA, 15 bp, Homo sapiens
taaactgtagtttaa

SEQ ID NO: 1468704 - DNA, 15 bp, Homo sapiens
ctaaactgtagttta

SEQ ID NO: 1468705 - DNA, 15 bp, Homo sapiens
tctaaactgtagttt

SEQ ID NO: 1468706 - DNA, 15 bp, Homo sapiens
gtctaaactgtagtt

SEQ ID NO: 1468707 - DNA, 15 bp, Homo sapiens
tgtctaaactgtagt

SEQ ID NO: 1468708 - DNA, 15 bp, Homo sapiens
ttgtctaaactgtag

SEQ ID NO: 1468709 - DNA, 15 bp, Homo sapiens
tttgtctaaactgta

SEQ ID NO: 1468710 - DNA, 15 bp, Homo sapiens
atttgtctaaactgt

SEQ ID NO: 1468711 - DNA, 15 bp, Homo sapiens
tatttgtctaaactg

SEQ ID NO: 1468712 - DNA, 15 bp, Homo sapiens
ttatttgtctaaact

SEQ ID NO: 1468713 - DNA, 15 bp, Homo sapiens
cttatttgtctaaac

SEQ ID NO: 1468714 - DNA, 15 bp, Homo sapiens
tcttatttgtctaaa

SEQ ID NO: 1468715 - DNA, 15 bp, Homo sapiens
ttcttatttgtctaa

SEQ ID NO: 1468716 - DNA, 15 bp, Homo sapiens
tttcttatttgtcta

SEQ ID NO: 1468717 - DNA, 15 bp, Homo sapiens
gtttcttatttgtct

SEQ ID NO: 1468718 - DNA, 15 bp, Homo sapiens
tgtttcttatttgtc

SEQ ID NO: 1468719 - DNA, 15 bp, Homo sapiens
atgtttcttatttgt

SEQ ID NO: 1468720 - DNA, 15 bp, Homo sapiens
gatgtttcttatttg

SEQ ID NO: 1468721 - DNA, 15 bp, Homo sapiens
ggatgtttcttattt

SEQ ID NO: 1468722 - DNA, 15 bp, Homo sapiens
tggatgtttcttatt

SEQ ID NO: 1468723 - DNA, 15 bp, Homo sapiens
gtggatgtttcttat

SEQ ID NO: 1468724 - DNA, 15 bp, Homo sapiens
ggtggatgtttctta

SEQ ID NO: 1468725 - DNA, 15 bp, Homo sapiens
tggtggatgtttctt

SEQ ID NO: 1468726 - DNA, 15 bp, Homo sapiens
ctggtggatgtttct

SEQ ID NO: 1468727 - DNA, 15 bp, Homo sapiens
cctggtggatgtttc

SEQ ID NO: 1468728 - DNA, 15 bp, Homo sapiens
acctggtggatgttt

SEQ ID NO: 1468729 - DNA, 15 bp, Homo sapiens
cacctggtggatgtt

SEQ ID NO: 1468730 - DNA, 15 bp, Homo sapiens
ccacctggtggatgt

SEQ ID NO: 1468731 - DNA, 15 bp, Homo sapiens
gccacctggtggatg

SEQ ID NO: 1468732 - DNA, 15 bp, Homo sapiens
agccacctggtggat

SEQ ID NO: 1468733 - DNA, 15 bp, Homo sapiens
tagccacctggtgga

SEQ ID NO: 1468734 - DNA, 15 bp, Homo sapiens
atagccacctggtgg

SEQ ID NO: 1468735 - DNA, 15 bp, Homo sapiens
aatagccacctggtg

SEQ ID NO: 1468736 - DNA, 15 bp, Homo sapiens
aaatagccacctggt

SEQ ID NO: 1468737 - DNA, 15 bp, Homo sapiens
caaatagccacctgg

SEQ ID NO: 1468738 - DNA, 15 bp, Homo sapiens
ccaaatagccacctg

SEQ ID NO: 1468739 - DNA, 15 bp, Homo sapiens
cccaaatagccacct

SEQ ID NO: 1468740 - DNA, 15 bp, Homo sapiens
ccccaaatagccacc

SEQ ID NO: 1468741 - DNA, 15 bp, Homo sapiens
accccaaatagccac

SEQ ID NO: 1468742 - DNA, 15 bp, Homo sapiens
gaccccaaatagcca

SEQ ID NO: 1468743 - DNA, 15 bp, Homo sapiens
cgaccccaaatagcc

SEQ ID NO: 1468744 - DNA, 15 bp, Homo sapiens
ccgaccccaaatagc

SEQ ID NO: 1468745 - DNA, 15 bp, Homo sapiens
cccgaccccaaatag

SEQ ID NO: 1468746 - DNA, 15 bp, Homo sapiens
acccgaccccaaata

SEQ ID NO: 1468747 - DNA, 15 bp, Homo sapiens
gacccgaccccaaat

SEQ ID NO: 1468748 - DNA, 15 bp, Homo sapiens
tgacccgaccccaaa

SEQ ID NO: 1468749 - DNA, 15 bp, Homo sapiens
atgacccgaccccaa

SEQ ID NO: 1468750 - DNA, 15 bp, Homo sapiens
catgacccgacccca

SEQ ID NO: 1468751 - DNA, 15 bp, Homo sapiens
tcatgacccgacccc

SEQ ID NO: 1468752 - DNA, 15 bp, Homo sapiens
ctcatgacccgaccc

SEQ ID NO: 1468753 - DNA, 15 bp, Homo sapiens
cctcatgacccgacc

SEQ ID NO: 1468754 - DNA, 15 bp, Homo sapiens
acctcatgacccgac

SEQ ID NO: 1468755 - DNA, 15 bp, Homo sapiens
cacctcatgacccga

SEQ ID NO: 1468756 - DNA, 15 bp, Homo sapiens
gcacctcatgacccg

SEQ ID NO: 1468757 - DNA, 15 bp, Homo sapiens
tgcacctcatgaccc

SEQ ID NO: 1468758 - DNA, 15 bp, Homo sapiens
atgcacctcatgacc

SEQ ID NO: 1468759 - DNA, 15 bp, Homo sapiens
tatgcacctcatgac

SEQ ID NO: 1468760 - DNA, 15 bp, Homo sapiens
atatgcacctcatga

SEQ ID NO: 1468761 - DNA, 15 bp, Homo sapiens
catatgcacctcatg

SEQ ID NO: 1468762 - DNA, 15 bp, Homo sapiens
ccatatgcacctcat

SEQ ID NO: 1468763 - DNA, 15 bp, Homo sapiens
gccatatgcacctca

SEQ ID NO: 1468764 - DNA, 15 bp, Homo sapiens
ggccatatgcacctc

SEQ ID NO: 1468765 - DNA, 15 bp, Homo sapiens
aggccatatgcacct

SEQ ID NO: 1468766 - DNA, 15 bp, Homo sapiens
gaggccatatgcacc

SEQ ID NO: 1468767 - DNA, 15 bp, Homo sapiens
agaggccatatgcac

SEQ ID NO: 1468768 - DNA, 15 bp, Homo sapiens
cagaggccatatgca

SEQ ID NO: 1468769 - DNA, 15 bp, Homo sapiens
acagaggccatatgc

SEQ ID NO: 1468770 - DNA, 15 bp, Homo sapiens
aacagaggccatatg

SEQ ID NO: 1468771 - DNA, 15 bp, Homo sapiens
aaacagaggccatat

SEQ ID NO: 1468772 - DNA, 15 bp, Homo sapiens
taaacagaggccata

SEQ ID NO: 1468773 - DNA, 15 bp, Homo sapiens
ataaacagaggccat

SEQ ID NO: 1468774 - DNA, 15 bp, Homo sapiens
aataaacagaggcca

SEQ ID NO: 1468775 - DNA, 15 bp, Homo sapiens
taataaacagaggcc

SEQ ID NO: 1468776 - DNA, 15 bp, Homo sapiens
gtaataaacagaggc

SEQ ID NO: 1468777 - DNA, 15 bp, Homo sapiens
cgtaataaacagagg

SEQ ID NO: 1468778 - DNA, 15 bp, Homo sapiens
acgtaataaacagag

SEQ ID NO: 1468779 - DNA, 15 bp, Homo sapiens
gacgtaataaacaga

SEQ ID NO: 1468780 - DNA, 15 bp, Homo sapiens
agacgtaataaacag

SEQ ID NO: 1468781 - DNA, 15 bp, Homo sapiens
cagacgtaataaaca

SEQ ID NO: 1468782 - DNA, 15 bp, Homo sapiens
tcagacgtaataaac

SEQ ID NO: 1468783 - DNA, 15 bp, Homo sapiens
ttcagacgtaataaa

SEQ ID NO: 1468784 - DNA, 15 bp, Homo sapiens
tttcagacgtaataa

SEQ ID NO: 1468785 - DNA, 15 bp, Homo sapiens
ctttcagacgtaata

SEQ ID NO: 1468786 - DNA, 15 bp, Homo sapiens
gctttcagacgtaat

SEQ ID NO: 1468787 - DNA, 15 bp, Homo sapiens
tgctttcagacgtaa

SEQ ID NO: 1468788 - DNA, 15 bp, Homo sapiens
gtgctttcagacgta

SEQ ID NO: 1468789 - DNA, 15 bp, Homo sapiens
agtgctttcagacgt

SEQ ID NO: 1468790 - DNA, 15 bp, Homo sapiens
gagtgctttcagacg

SEQ ID NO: 1468791 - DNA, 15 bp, Homo sapiens
tgagtgctttcagac

SEQ ID NO: 1468792 - DNA, 15 bp, Homo sapiens
ttgagtgctttcaga

SEQ ID NO: 1468793 - DNA, 15 bp, Homo sapiens
tttgagtgctttcag

SEQ ID NO: 1468794 - DNA, 15 bp, Homo sapiens
gtttgagtgctttca

SEQ ID NO: 1468795 - DNA, 15 bp, Homo sapiens
ggtttgagtgctttc

SEQ ID NO: 1468796 - DNA, 15 bp, Homo sapiens
tggtttgagtgcttt

SEQ ID NO: 1468797 - DNA, 15 bp, Homo sapiens
gtggtttgagtgctt

SEQ ID NO: 1468798 - DNA, 15 bp, Homo sapiens
tgtggtttgagtgct

SEQ ID NO: 1468799 - DNA, 15 bp, Homo sapiens
atgtggtttgagtgc

SEQ ID NO: 1468800 - DNA, 15 bp, Homo sapiens
aatgtggtttgagtg

SEQ ID NO: 1468801 - DNA, 15 bp, Homo sapiens
gaatgtggtttgagt

SEQ ID NO: 1468802 - DNA, 15 bp, Homo sapiens
agaatgtggtttgag

SEQ ID NO: 1468803 - DNA, 15 bp, Homo sapiens
aagaatgtggtttga

SEQ ID NO: 1468804 - DNA, 15 bp, Homo sapiens
taagaatgtggtttg

SEQ ID NO: 1468805 - DNA, 15 bp, Homo sapiens
ctaagaatgtggttt

SEQ ID NO: 1468806 - DNA, 15 bp, Homo sapiens
cctaagaatgtggtt

SEQ ID NO: 1468807 - DNA, 15 bp, Homo sapiens
tcctaagaatgtggt

SEQ ID NO: 1468808 - DNA, 15 bp, Homo sapiens
ctcctaagaatgtgg

SEQ ID NO: 1468809 - DNA, 15 bp, Homo sapiens
cctcctaagaatgtg

SEQ ID NO: 1468810 - DNA, 15 bp, Homo sapiens
gcctcctaagaatgt

SEQ ID NO: 1468811 - DNA, 15 bp, Homo sapiens
agcctcctaagaatg

SEQ ID NO: 1468812 - DNA, 15 bp, Homo sapiens
cagcctcctaagaat

SEQ ID NO: 1468813 - DNA, 15 bp, Homo sapiens
acagcctcctaagaa

SEQ ID NO: 1468814 - DNA, 15 bp, Homo sapiens
cacagcctcctaaga

SEQ ID NO: 1468815 - DNA, 15 bp, Homo sapiens
acacagcctcctaag

SEQ ID NO: 1468816 - DNA, 15 bp, Homo sapiens
aacacagcctcctaa

SEQ ID NO: 1468817 - DNA, 15 bp, Homo sapiens
gaacacagcctccta

SEQ ID NO: 1468818 - DNA, 15 bp, Homo sapiens
tgaacacagcctcct

SEQ ID NO: 1468819 - DNA, 15 bp, Homo sapiens
ctgaacacagcctcc

SEQ ID NO: 1468820 - DNA, 15 bp, Homo sapiens
gctgaacacagcctc

SEQ ID NO: 1468821 - DNA, 15 bp, Homo sapiens
tgctgaacacagcct

SEQ ID NO: 1468822 - DNA, 15 bp, Homo sapiens
gtgctgaacacagcc

SEQ ID NO: 1468823 - DNA, 15 bp, Homo sapiens
agtgctgaacacagc

SEQ ID NO: 1468824 - DNA, 15 bp, Homo sapiens
gagtgctgaacacag

SEQ ID NO: 1468825 - DNA, 15 bp, Homo sapiens
ggagtgctgaacaca

SEQ ID NO: 1468826 - DNA, 15 bp, Homo sapiens
aggagtgctgaacac

SEQ ID NO: 1468827 - DNA, 15 bp, Homo sapiens
aaggagtgctgaaca

SEQ ID NO: 1468828 - DNA, 15 bp, Homo sapiens
taaggagtgctgaac

SEQ ID NO: 1468829 - DNA, 15 bp, Homo sapiens
ataaggagtgctgaa

SEQ ID NO: 1468830 - DNA, 15 bp, Homo sapiens
gataaggagtgctga

SEQ ID NO: 1468831 - DNA, 15 bp, Homo sapiens
tgataaggagtgctg

SEQ ID NO: 1468832 - DNA, 15 bp, Homo sapiens
gtgataaggagtgct

SEQ ID NO: 1468833 - DNA, 15 bp, Homo sapiens
tgtgataaggagtgc

SEQ ID NO: 1468834 - DNA, 15 bp, Homo sapiens
gtgtgataaggagtg

SEQ ID NO: 1468835 - DNA, 15 bp, Homo sapiens
tgtgtgataaggagt

SEQ ID NO: 1468836 - DNA, 15 bp, Homo sapiens
atgtgtgataaggag

SEQ ID NO: 1468837 - DNA, 15 bp, Homo sapiens
gatgtgtgataagga

SEQ ID NO: 1468838 - DNA, 15 bp, Homo sapiens
ggatgtgtgataagg

SEQ ID NO: 1468839 - DNA, 15 bp, Homo sapiens
aggatgtgtgataag

SEQ ID NO: 1468840 - DNA, 15 bp, Homo sapiens
caggatgtgtgataa

SEQ ID NO: 1468841 - DNA, 15 bp, Homo sapiens
acaggatgtgtgata

SEQ ID NO: 1468842 - DNA, 15 bp, Homo sapiens
aacaggatgtgtgat

SEQ ID NO: 1468843 - DNA, 15 bp, Homo sapiens
gaacaggatgtgtga

SEQ ID NO: 1468844 - DNA, 15 bp, Homo sapiens
ggaacaggatgtgtg

SEQ ID NO: 1468845 - DNA, 15 bp, Homo sapiens
aggaacaggatgtgt

SEQ ID NO: 1468846 - DNA, 15 bp, Homo sapiens
aaggaacaggatgtg

SEQ ID NO: 1468847 - DNA, 15 bp, Homo sapiens
caaggaacaggatgt

SEQ ID NO: 1468848 - DNA, 15 bp, Homo sapiens
acaaggaacaggatg

SEQ ID NO: 1468849 - DNA, 15 bp, Homo sapiens
gacaaggaacaggat

SEQ ID NO: 1468850 - DNA, 15 bp, Homo sapiens
agacaaggaacagga

SEQ ID NO: 1468851 - DNA, 15 bp, Homo sapiens
aagacaaggaacagg

SEQ ID NO: 1468852 - DNA, 15 bp, Homo sapiens
caagacaaggaacag

SEQ ID NO: 1468853 - DNA, 15 bp, Homo sapiens
acaagacaaggaaca

SEQ ID NO: 1468854 - DNA, 15 bp, Homo sapiens
aacaagacaaggaac

SEQ ID NO: 1468855 - DNA, 15 bp, Homo sapiens
aaacaagacaaggaa

SEQ ID NO: 1468856 - DNA, 15 bp, Homo sapiens
aaaacaagacaagga

SEQ ID NO: 1468857 - DNA, 15 bp, Homo sapiens
gaaaacaagacaagg

SEQ ID NO: 1468858 - DNA, 15 bp, Homo sapiens
tgaaaacaagacaag

SEQ ID NO: 1468859 - DNA, 15 bp, Homo sapiens
ctgaaaacaagacaa

SEQ ID NO: 1468860 - DNA, 15 bp, Homo sapiens
cctgaaaacaagaca

SEQ ID NO: 1468861 - DNA, 15 bp, Homo sapiens
ccctgaaaacaagac

SEQ ID NO: 1468862 - DNA, 15 bp, Homo sapiens
accctgaaaacaaga

SEQ ID NO: 1468863 - DNA, 15 bp, Homo sapiens
gaccctgaaaacaag

SEQ ID NO: 1468864 - DNA, 15 bp, Homo sapiens
tgaccctgaaaacaa

SEQ ID NO: 1468865 - DNA, 15 bp, Homo sapiens
ttgaccctgaaaaca

SEQ ID NO: 1468866 - DNA, 15 bp, Homo sapiens
cttgaccctgaaaac

SEQ ID NO: 1468867 - DNA, 15 bp, Homo sapiens
ccttgaccctgaaaa

SEQ ID NO: 1468868 - DNA, 15 bp, Homo sapiens
tccttgaccctgaaa

SEQ ID NO: 1468869 - DNA, 15 bp, Homo sapiens
ctccttgaccctgaa

SEQ ID NO: 1468870 - DNA, 15 bp, Homo sapiens
actccttgaccctga

SEQ ID NO: 1468871 - DNA, 15 bp, Homo sapiens
aactccttgaccctg

SEQ ID NO: 1468872 - DNA, 15 bp, Homo sapiens
taactccttgaccct

SEQ ID NO: 1468873 - DNA, 15 bp, Homo sapiens
gtaactccttgaccc

SEQ ID NO: 1468874 - DNA, 15 bp, Homo sapiens
tgtaactccttgacc

SEQ ID NO: 1468875 - DNA, 15 bp, Homo sapiens
ctgtaactccttgac

SEQ ID NO: 1468876 - DNA, 15 bp, Homo sapiens
actgtaactccttga

SEQ ID NO: 1468877 - DNA, 15 bp, Homo sapiens
gactgtaactccttg

SEQ ID NO: 1468878 - DNA, 15 bp, Homo sapiens
agactgtaactcctt

SEQ ID NO: 1468879 - DNA, 15 bp, Homo sapiens
gagactgtaactcct

SEQ ID NO: 1468880 - DNA, 15 bp, Homo sapiens
tgagactgtaactcc

SEQ ID NO: 1468881 - DNA, 15 bp, Homo sapiens
atgagactgtaactc

SEQ ID NO: 1468882 - DNA, 15 bp, Homo sapiens
catgagactgtaact

SEQ ID NO: 1468883 - DNA, 15 bp, Homo sapiens
gcatgagactgtaac

SEQ ID NO: 1468884 - DNA, 15 bp, Homo sapiens
tgcatgagactgtaa

SEQ ID NO: 1468885 - DNA, 15 bp, Homo sapiens
gtgcatgagactgta

SEQ ID NO: 1468886 - DNA, 15 bp, Homo sapiens
tgtgcatgagactgt

SEQ ID NO: 1468887 - DNA, 15 bp, Homo sapiens
ttgtgcatgagactg

SEQ ID NO: 1468888 - DNA, 15 bp, Homo sapiens
tttgtgcatgagact

SEQ ID NO: 1468889 - DNA, 15 bp, Homo sapiens
gtttgtgcatgagac

SEQ ID NO: 1468890 - DNA, 15 bp, Homo sapiens
tgtttgtgcatgaga

SEQ ID NO: 1468891 - DNA, 15 bp, Homo sapiens
ttgtttgtgcatgag

SEQ ID NO: 1468892 - DNA, 15 bp, Homo sapiens
gttgtttgtgcatga

SEQ ID NO: 1468893 - DNA, 15 bp, Homo sapiens
tgttgtttgtgcatg

SEQ ID NO: 1468894 - DNA, 15 bp, Homo sapiens
atgttgtttgtgcat

SEQ ID NO: 1468895 - DNA, 15 bp, Homo sapiens
tatgttgtttgtgca

SEQ ID NO: 1468896 - DNA, 15 bp, Homo sapiens
gtatgttgtttgtgc

SEQ ID NO: 1468897 - DNA, 15 bp, Homo sapiens
tgtatgttgtttgtg

SEQ ID NO: 1468898 - DNA, 15 bp, Homo sapiens
gtgtatgttgtttgt

SEQ ID NO: 1468899 - DNA, 15 bp, Homo sapiens
tgtgtatgttgtttg

SEQ ID NO: 1468900 - DNA, 15 bp, Homo sapiens
gtgtgtatgttgttt

SEQ ID NO: 1468901 - DNA, 15 bp, Homo sapiens
tgtgtgtatgttgtt

SEQ ID NO: 1468902 - DNA, 15 bp, Homo sapiens
ctgtgtgtatgttgt

SEQ ID NO: 1468903 - DNA, 15 bp, Homo sapiens
actgtgtgtatgttg

SEQ ID NO: 1468904 - DNA, 15 bp, Homo sapiens
cactgtgtgtatgtt

SEQ ID NO: 1468905 - DNA, 15 bp, Homo sapiens
gcactgtgtgtatgt

SEQ ID NO: 1468906 - DNA, 15 bp, Homo sapiens
ggcactgtgtgtatg

SEQ ID NO: 1468907 - DNA, 15 bp, Homo sapiens
aggcactgtgtgtat

SEQ ID NO: 1468908 - DNA, 15 bp, Homo sapiens
gaggcactgtgtgta

SEQ ID NO: 1468909 - DNA, 15 bp, Homo sapiens
tgaggcactgtgtgt

SEQ ID NO: 1468910 - DNA, 15 bp, Homo sapiens
ctgaggcactgtgtg

SEQ ID NO: 1468911 - DNA, 15 bp, Homo sapiens
actgaggcactgtgt

SEQ ID NO: 1468912 - DNA, 15 bp, Homo sapiens
tactgaggcactgtg

SEQ ID NO: 1468913 - DNA, 15 bp, Homo sapiens
atactgaggcactgt

SEQ ID NO: 1468914 - DNA, 15 bp, Homo sapiens
aatactgaggcactg

SEQ ID NO: 1468915 - DNA, 15 bp, Homo sapiens
aaatactgaggcact

SEQ ID NO: 1468916 - DNA, 15 bp, Homo sapiens
aaaatactgaggcac

SEQ ID NO: 1468917 - DNA, 15 bp, Homo sapiens
aaaaatactgaggca

SEQ ID NO: 1468918 - DNA, 15 bp, Homo sapiens
gaaaaatactgaggc

SEQ ID NO: 1468919 - DNA, 15 bp, Homo sapiens
ggaaaaatactgagg

SEQ ID NO: 1468920 - DNA, 15 bp, Homo sapiens
tggaaaaatactgag

SEQ ID NO: 1468921 - DNA, 15 bp, Homo sapiens
atggaaaaatactga

SEQ ID NO: 1468922 - DNA, 15 bp, Homo sapiens
catggaaaaatactg

SEQ ID NO: 1468923 - DNA, 15 bp, Homo sapiens
agcatggaaaaatac

SEQ ID NO: 1468924 - DNA, 15 bp, Homo sapiens
aagcatggaaaaata

SEQ ID NO: 1468925 - DNA, 15 bp, Homo sapiens
gaagcatggaaaaat

SEQ ID NO: 1468926 - DNA, 15 bp, Homo sapiens
cgaagcatggaaaaa

SEQ ID NO: 1468927 - DNA, 15 bp, Homo sapiens
tcgaagcatggaaaa

SEQ ID NO: 1468928 - DNA, 15 bp, Homo sapiens
atcgaagcatggaaa

SEQ ID NO: 1468929 - DNA, 15 bp, Homo sapiens
gatcgaagcatggaa

SEQ ID NO: 1468930 - DNA, 15 bp, Homo sapiens
agatcgaagcatgga

SEQ ID NO: 1468931 - DNA, 15 bp, Homo sapiens
gagatcgaagcatgg

SEQ ID NO: 1468932 - DNA, 15 bp, Homo sapiens
tgagatcgaagcatg

SEQ ID NO: 1468933 - DNA, 15 bp, Homo sapiens
ttgagatcgaagcat

SEQ ID NO: 1468934 - DNA, 15 bp, Homo sapiens
tttgagatcgaagca

SEQ ID NO: 1468935 - DNA, 15 bp, Homo sapiens
atttgagatcgaagc

SEQ ID NO: 1468936 - DNA, 15 bp, Homo sapiens
catttgagatcgaag

SEQ ID NO: 1468937 - DNA, 15 bp, Homo sapiens
gcatttgagatcgaa

SEQ ID NO: 1468938 - DNA, 15 bp, Homo sapiens
ggcatttgagatcga

SEQ ID NO: 1468939 - DNA, 15 bp, Homo sapiens
aggcatttgagatcg

SEQ ID NO: 1468940 - DNA, 15 bp, Homo sapiens
aaggcatttgagatc

SEQ ID NO: 1468941 - DNA, 15 bp, Homo sapiens
caaggcatttgagat

SEQ ID NO: 1468942 - DNA, 15 bp, Homo sapiens
acaaggcatttgaga

SEQ ID NO: 1468943 - DNA, 15 bp, Homo sapiens
tacaaggcatttgag

SEQ ID NO: 1468944 - DNA, 15 bp, Homo sapiens
gtacaaggcatttga

SEQ ID NO: 1468945 - DNA, 15 bp, Homo sapiens
tgtacaaggcatttg

SEQ ID NO: 1468946 - DNA, 15 bp, Homo sapiens
atgtacaaggcattt

SEQ ID NO: 1468947 - DNA, 15 bp, Homo sapiens
tatgtacaaggcatt

SEQ ID NO: 1468948 - DNA, 15 bp, Homo sapiens
ttatgtacaaggcat

SEQ ID NO: 1468949 - DNA, 15 bp, Homo sapiens
cttatgtacaaggca

SEQ ID NO: 1468950 - DNA, 15 bp, Homo sapiens
gcttatgtacaaggc

SEQ ID NO: 1468951 - DNA, 15 bp, Homo sapiens
agcttatgtacaagg

SEQ ID NO: 1468952 - DNA, 15 bp, Homo sapiens
aagcttatgtacaag

SEQ ID NO: 1468953 - DNA, 15 bp, Homo sapiens
caagcttatgtacaa

SEQ ID NO: 1468954 - DNA, 15 bp, Homo sapiens
tcaagcttatgtaca

SEQ ID NO: 1468955 - DNA, 15 bp, Homo sapiens
gtcaagcttatgtac

SEQ ID NO: 1468956 - DNA, 15 bp, Homo sapiens
agtcaagcttatgta

SEQ ID NO: 1468957 - DNA, 15 bp, Homo sapiens
cagtcaagcttatgt

SEQ ID NO: 1468958 - DNA, 15 bp, Homo sapiens
acagtcaagcttatg

SEQ ID NO: 1468959 - DNA, 15 bp, Homo sapiens
tacagtcaagcttat

SEQ ID NO: 1468960 - DNA, 15 bp, Homo sapiens
atacagtcaagctta

SEQ ID NO: 1468961 - DNA, 15 bp, Homo sapiens
aatacagtcaagctt

SEQ ID NO: 1468962 - DNA, 15 bp, Homo sapiens
caatacagtcaagct

SEQ ID NO: 1468963 - DNA, 15 bp, Homo sapiens
acaatacagtcaagc

SEQ ID NO: 1468964 - DNA, 15 bp, Homo sapiens
aacaatacagtcaag

SEQ ID NO: 1468965 - DNA, 15 bp, Homo sapiens
caacaatacagtcaa

SEQ ID NO: 1468966 - DNA, 15 bp, Homo sapiens
acaacaatacagtca

SEQ ID NO: 1468967 - DNA, 15 bp, Homo sapiens
tacaacaatacagtc

SEQ ID NO: 1468968 - DNA, 15 bp, Homo sapiens
gtacaacaatacagt

SEQ ID NO: 1468969 - DNA, 15 bp, Homo sapiens
tgtacaacaatacag

SEQ ID NO: 1468970 - DNA, 15 bp, Homo sapiens
gtgtacaacaataca

SEQ ID NO: 1468971 - DNA, 15 bp, Homo sapiens
ggtgtacaacaatac

SEQ ID NO: 1468972 - DNA, 15 bp, Homo sapiens
gggtgtacaacaata

SEQ ID NO: 1468973 - DNA, 15 bp, Homo sapiens
ggggtgtacaacaat

SEQ ID NO: 1468974 - DNA, 15 bp, Homo sapiens
gggggtgtacaacaa

SEQ ID NO: 1468975 - DNA, 15 bp, Homo sapiens
ggggggtgtacaaca

SEQ ID NO: 1468976 - DNA, 15 bp, Homo sapiens
gggggggtgtacaac

SEQ ID NO: 1468977 - DNA, 15 bp, Homo sapiens
tgggggggtgtacaa

SEQ ID NO: 1468978 - DNA, 15 bp, Homo sapiens
atgggggggtgtaca

SEQ ID NO: 1468979 - DNA, 15 bp, Homo sapiens
tatgggggggtgtac

SEQ ID NO: 1468980 - DNA, 15 bp, Homo sapiens
atatgggggggtgta

SEQ ID NO: 1468981 - DNA, 15 bp, Homo sapiens
gatatgggggggtgt

SEQ ID NO: 1468982 - DNA, 15 bp, Homo sapiens
cgatatgggggggtg

SEQ ID NO: 1468983 - DNA, 15 bp, Homo sapiens
gcgatatgggggggt

SEQ ID NO: 1468984 - DNA, 15 bp, Homo sapiens
ggcgatatggggggg

SEQ ID NO: 1468985 - DNA, 15 bp, Homo sapiens
gggcgatatgggggg

SEQ ID NO: 1468986 - DNA, 15 bp, Homo sapiens
ggggcgatatggggg

SEQ ID NO: 1468987 - DNA, 15 bp, Homo sapiens
gggggcgatatgggg

SEQ ID NO: 1468988 - DNA, 15 bp, Homo sapiens
agggggcgatatggg

SEQ ID NO: 1468989 - DNA, 15 bp, Homo sapiens
aagggggcgatatgg

SEQ ID NO: 1468990 - DNA, 15 bp, Homo sapiens
aaagggggcgatatg

SEQ ID NO: 1468991 - DNA, 15 bp, Homo sapiens
aaaagggggcgatat

SEQ ID NO: 1468992 - DNA, 15 bp, Homo sapiens
aaaaagggggcgata

SEQ ID NO: 1468993 - DNA, 15 bp, Homo sapiens
aaaaaagggggcgat

SEQ ID NO: 1468994 - DNA, 15 bp, Homo sapiens
caaaaaagggggcga

SEQ ID NO: 1468995 - DNA, 15 bp, Homo sapiens
acaaaaaagggggcg

SEQ ID NO: 1468996 - DNA, 15 bp, Homo sapiens
aacaaaaaagggggc

SEQ ID NO: 1468997 - DNA, 15 bp, Homo sapiens
aaacaaaaaaggggg

SEQ ID NO: 1468998 - DNA, 15 bp, Homo sapiens
taaacaaaaaagggg

SEQ ID NO: 1468999 - DNA, 15 bp, Homo sapiens
ataaacaaaaaaggg

SEQ ID NO: 1469000 - DNA, 15 bp, Homo sapiens
aataaacaaaaaagg

SEQ ID NO: 1469001 - DNA, 15 bp, Homo sapiens
taataaacaaaaaag

SEQ ID NO: 1469002 - DNA, 15 bp, Homo sapiens
ttaataaacaaaaaa

SEQ ID NO: 1469003 - DNA, 15 bp, Homo sapiens
attaataaacaaaaa

SEQ ID NO: 1469004 - DNA, 15 bp, Homo sapiens
tattaataaacaaaa

SEQ ID NO: 1469005 - DNA, 15 bp, Homo sapiens
atattaataaacaaa

SEQ ID NO: 1469006 - DNA, 15 bp, Homo sapiens
tatattaataaacaa

SEQ ID NO: 1469007 - DNA, 15 bp, Homo sapiens
atatattaataaaca

SEQ ID NO: 1469008 - DNA, 15 bp, Homo sapiens
tatatattaataaac

SEQ ID NO: 1469009 - DNA, 15 bp, Homo sapiens
gtatatattaataaa

SEQ ID NO: 1469010 - DNA, 15 bp, Homo sapiens
agtatatattaataa

SEQ ID NO: 1469011 - DNA, 15 bp, Homo sapiens
aagtatatattaata

SEQ ID NO: 1469012 - DNA, 15 bp, Homo sapiens
aaagtatatattaat

SEQ ID NO: 1469013 - DNA, 15 bp, Homo sapiens
taaagtatatattaa

SEQ ID NO: 1469014 - DNA, 15 bp, Homo sapiens
ttaaagtatatatta

SEQ ID NO: 1469015 - DNA, 15 bp, Homo sapiens
cttaaagtatatatt

SEQ ID NO: 1469016 - DNA, 15 bp, Homo sapiens
tcttaaagtatatat

SEQ ID NO: 1469017 - DNA, 15 bp, Homo sapiens
ctcttaaagtatata

SEQ ID NO: 1469018 - DNA, 15 bp, Homo sapiens
actcttaaagtatat

SEQ ID NO: 1469019 - DNA, 15 bp, Homo sapiens
aactcttaaagtata

SEQ ID NO: 1469020 - DNA, 15 bp, Homo sapiens
gaactcttaaagtat

SEQ ID NO: 1469021 - DNA, 15 bp, Homo sapiens
cgaactcttaaagta

SEQ ID NO: 1469022 - DNA, 15 bp, Homo sapiens
tcgaactcttaaagt

SEQ ID NO: 1469023 - DNA, 15 bp, Homo sapiens
atcgaactcttaaag

SEQ ID NO: 1469024 - DNA, 15 bp, Homo sapiens
catcgaactcttaaa

SEQ ID NO: 1469025 - DNA, 15 bp, Homo sapiens
tcatcgaactcttaa

SEQ ID NO: 1469026 - DNA, 15 bp, Homo sapiens
ctcatcgaactctta

SEQ ID NO: 1469027 - DNA, 15 bp, Homo sapiens
gctcatcgaactctt

SEQ ID NO: 1469028 - DNA, 15 bp, Homo sapiens
agctcatcgaactct

SEQ ID NO: 1469029 - DNA, 15 bp, Homo sapiens
aagctcatcgaactc

SEQ ID NO: 1469030 - DNA, 15 bp, Homo sapiens
caagctcatcgaact

SEQ ID NO: 1469031 - DNA, 15 bp, Homo sapiens
acaagctcatcgaac

SEQ ID NO: 1469032 - DNA, 15 bp, Homo sapiens
aacaagctcatcgaa

SEQ ID NO: 1469033 - DNA, 15 bp, Homo sapiens
gaacaagctcatcga

SEQ ID NO: 1469034 - DNA, 15 bp, Homo sapiens
tgaacaagctcatcg

SEQ ID NO: 1469035 - DNA, 15 bp, Homo sapiens
ttgaacaagctcatc

SEQ ID NO: 1469036 - DNA, 15 bp, Homo sapiens
gttgaacaagctcat

SEQ ID NO: 1469037 - DNA, 15 bp, Homo sapiens
tgttgaacaagctca

SEQ ID NO: 1469038 - DNA, 15 bp, Homo sapiens
ttgttgaacaagctc

SEQ ID NO: 1469039 - DNA, 15 bp, Homo sapiens
attgttgaacaagct

SEQ ID NO: 1469040 - DNA, 15 bp, Homo sapiens
cattgttgaacaagc

SEQ ID NO: 1469041 - DNA, 15 bp, Homo sapiens
ccattgttgaacaag

SEQ ID NO: 1469042 - DNA, 15 bp, Homo sapiens
gccattgttgaacaa

SEQ ID NO: 1469043 - DNA, 15 bp, Homo sapiens
ggccattgttgaaca

SEQ ID NO: 1469044 - DNA, 15 bp, Homo sapiens
aggccattgttgaac

SEQ ID NO: 1469045 - DNA, 15 bp, Homo sapiens
caggccattgttgaa

SEQ ID NO: 1469046 - DNA, 15 bp, Homo sapiens
tcaggccattgttga

SEQ ID NO: 1469047 - DNA, 15 bp, Homo sapiens
gtcaggccattgttg

SEQ ID NO: 1469048 - DNA, 15 bp, Homo sapiens
ggtcaggccattgtt

SEQ ID NO: 1469049 - DNA, 15 bp, Homo sapiens
tggtcaggccattgt

SEQ ID NO: 1469050 - DNA, 15 bp, Homo sapiens
ctggtcaggccattg

SEQ ID NO: 1469051 - DNA, 15 bp, Homo sapiens
actggtcaggccatt

SEQ ID NO: 1469052 - DNA, 15 bp, Homo sapiens
aactggtcaggccat

SEQ ID NO: 1469053 - DNA, 15 bp, Homo sapiens
caactggtcaggcca

SEQ ID NO: 1469054 - DNA, 15 bp, Homo sapiens
tcaactggtcaggcc

SEQ ID NO: 1469055 - DNA, 15 bp, Homo sapiens
ctcaactggtcaggc

SEQ ID NO: 1469056 - DNA, 15 bp, Homo sapiens
actcaactggtcagg

SEQ ID NO: 1469057 - DNA, 15 bp, Homo sapiens
aactcaactggtcag

SEQ ID NO: 1469058 - DNA, 15 bp, Homo sapiens
taactcaactggtca

SEQ ID NO: 1469059 - DNA, 15 bp, Homo sapiens
ataactcaactggtc

SEQ ID NO: 1469060 - DNA, 15 bp, Homo sapiens
tataactcaactggt

SEQ ID NO: 1469061 - DNA, 15 bp, Homo sapiens
ttataactcaactgg

SEQ ID NO: 1469062 - DNA, 15 bp, Homo sapiens
cttataactcaactg

SEQ ID NO: 1469063 - DNA, 15 bp, Homo sapiens
ccttataactcaact

SEQ ID NO: 1469064 - DNA, 15 bp, Homo sapiens
tccttataactcaac

SEQ ID NO: 1469065 - DNA, 15 bp, Homo sapiens
ttccttataactcaa

SEQ ID NO: 1469066 - DNA, 15 bp, Homo sapiens
attccttataactca

SEQ ID NO: 1469067 - DNA, 15 bp, Homo sapiens
tattccttataactc

SEQ ID NO: 1469068 - DNA, 15 bp, Homo sapiens
gtattccttataact

SEQ ID NO: 1469069 - DNA, 15 bp, Homo sapiens
ggtattccttataac

SEQ ID NO: 1469070 - DNA, 15 bp, Homo sapiens
tggtattccttataa

SEQ ID NO: 1469071 - DNA, 15 bp, Homo sapiens
ctggtattccttata

SEQ ID NO: 1469072 - DNA, 15 bp, Homo sapiens
actggtattccttat

SEQ ID NO: 1469073 - DNA, 15 bp, Homo sapiens
aactggtattcctta

SEQ ID NO: 1469074 - DNA, 15 bp, Homo sapiens
aaactggtattcctt

SEQ ID NO: 1469075 - DNA, 15 bp, Homo sapiens
aaaactggtattcct

SEQ ID NO: 1469076 - DNA, 15 bp, Homo sapiens
taaaactggtattcc

SEQ ID NO: 1469077 - DNA, 15 bp, Homo sapiens
ataaaactggtattc

SEQ ID NO: 1469078 - DNA, 15 bp, Homo sapiens
cataaaactggtatt

SEQ ID NO: 1469079 - DNA, 15 bp, Homo sapiens
acataaaactggtat

SEQ ID NO: 1469080 - DNA, 15 bp, Homo sapiens
aacataaaactggta

SEQ ID NO: 1469081 - DNA, 15 bp, Homo sapiens
caacataaaactggt

SEQ ID NO: 1469082 - DNA, 15 bp, Homo sapiens
acaacataaaactgg

SEQ ID NO: 1469083 - DNA, 15 bp, Homo sapiens
tacaacataaaactg

SEQ ID NO: 1469084 - DNA, 15 bp, Homo sapiens
atacaacataaaact

SEQ ID NO: 1469085 - DNA, 15 bp, Homo sapiens
catacaacataaaac

SEQ ID NO: 1469086 - DNA, 15 bp, Homo sapiens
acatacaacataaaa

SEQ ID NO: 1469087 - DNA, 15 bp, Homo sapiens
cacatacaacataaa

SEQ ID NO: 1469088 - DNA, 15 bp, Homo sapiens
gcacatacaacataa

SEQ ID NO: 1469089 - DNA, 15 bp, Homo sapiens
ggcacatacaacata

SEQ ID NO: 1469090 - DNA, 15 bp, Homo sapiens
tggcacatacaacat

SEQ ID NO: 1469091 - DNA, 15 bp, Homo sapiens
ttggcacatacaaca

SEQ ID NO: 1469092 - DNA, 15 bp, Homo sapiens
attggcacatacaac

SEQ ID NO: 1469093 - DNA, 15 bp, Homo sapiens
cattggcacatacaa

SEQ ID NO: 1469094 - DNA, 15 bp, Homo sapiens
acattggcacataca

SEQ ID NO: 1469095 - DNA, 15 bp, Homo sapiens
aacattggcacatac

SEQ ID NO: 1469096 - DNA, 15 bp, Homo sapiens
aaacattggcacata

SEQ ID NO: 1469097 - DNA, 15 bp, Homo sapiens
gaaacattggcacat

SEQ ID NO: 1469098 - DNA, 15 bp, Homo sapiens
tgaaacattggcaca

SEQ ID NO: 1469099 - DNA, 15 bp, Homo sapiens
ttgaaacattggcac

SEQ ID NO: 1469100 - DNA, 15 bp, Homo sapiens
attgaaacattggca

SEQ ID NO: 1469101 - DNA, 15 bp, Homo sapiens
cattgaaacattggc

SEQ ID NO: 1469102 - DNA, 15 bp, Homo sapiens
gcattgaaacattgg

SEQ ID NO: 1469103 - DNA, 15 bp, Homo sapiens
tgcattgaaacattg

SEQ ID NO: 1469104 - DNA, 15 bp, Homo sapiens
atgcattgaaacatt

SEQ ID NO: 1469105 - DNA, 15 bp, Homo sapiens
tatgcattgaaacat

SEQ ID NO: 1469106 - DNA, 15 bp, Homo sapiens
atatgcattgaaaca

SEQ ID NO: 1469107 - DNA, 15 bp, Homo sapiens
catatgcattgaaac

SEQ ID NO: 1469108 - DNA, 15 bp, Homo sapiens
gcatatgcattgaaa

SEQ ID NO: 1469109 - DNA, 15 bp, Homo sapiens
tgcatatgcattgaa

SEQ ID NO: 1469110 - DNA, 15 bp, Homo sapiens
ttgcatatgcattga

SEQ ID NO: 1469111 - DNA, 15 bp, Homo sapiens
tttgcatatgcattg

SEQ ID NO: 1469112 - DNA, 15 bp, Homo sapiens
atttgcatatgcatt

SEQ ID NO: 1469113 - DNA, 15 bp, Homo sapiens
gatttgcatatgcat

SEQ ID NO: 1469114 - DNA, 15 bp, Homo sapiens
cgatttgcatatgca

SEQ ID NO: 1469115 - DNA, 15 bp, Homo sapiens
tcgatttgcatatgc

SEQ ID NO: 1469116 - DNA, 15 bp, Homo sapiens
ctcgatttgcatatg

SEQ ID NO: 1469117 - DNA, 15 bp, Homo sapiens
gctcgatttgcatat

SEQ ID NO: 1469118 - DNA, 15 bp, Homo sapiens
cgctcgatttgcata

SEQ ID NO: 1469119 - DNA, 15 bp, Homo sapiens
gcgctcgatttgcat

SEQ ID NO: 1469120 - DNA, 15 bp, Homo sapiens
agcgctcgatttgca

SEQ ID NO: 1469121 - DNA, 15 bp, Homo sapiens
tagcgctcgatttgc

SEQ ID NO: 1469122 - DNA, 15 bp, Homo sapiens
ttagcgctcgatttg

SEQ ID NO: 1469123 - DNA, 15 bp, Homo sapiens
cttagcgctcgattt

SEQ ID NO: 1469124 - DNA, 15 bp, Homo sapiens
tcttagcgctcgatt

SEQ ID NO: 1469125 - DNA, 15 bp, Homo sapiens
atcttagcgctcgat

SEQ ID NO: 1469126 - DNA, 15 bp, Homo sapiens
tatcttagcgctcga

SEQ ID NO: 1469127 - DNA, 15 bp, Homo sapiens
ctatcttagcgctcg

SEQ ID NO: 1469128 - DNA, 15 bp, Homo sapiens
gctatcttagcgctc

SEQ ID NO: 1469129 - DNA, 15 bp, Homo sapiens
cgctatcttagcgct

SEQ ID NO: 1469130 - DNA, 15 bp, Homo sapiens
tcgctatcttagcgc

SEQ ID NO: 1469131 - DNA, 15 bp, Homo sapiens
ctcgctatcttagcg

SEQ ID NO: 1469132 - DNA, 15 bp, Homo sapiens
cctcgctatcttagc

SEQ ID NO: 1469133 - DNA, 15 bp, Homo sapiens
tcctcgctatcttag

SEQ ID NO: 1469134 - DNA, 15 bp, Homo sapiens
gtcctcgctatctta

SEQ ID NO: 1469135 - DNA, 15 bp, Homo sapiens
ggtcctcgctatctt

SEQ ID NO: 1469136 - DNA, 15 bp, Homo sapiens
tggtcctcgctatct

SEQ ID NO: 1469137 - DNA, 15 bp, Homo sapiens
atggtcctcgctatc

SEQ ID NO: 1469138 - DNA, 15 bp, Homo sapiens
aatggtcctcgctat

SEQ ID NO: 1469139 - DNA, 15 bp, Homo sapiens
taatggtcctcgcta

SEQ ID NO: 1469140 - DNA, 15 bp, Homo sapiens
ataatggtcctcgct

SEQ ID NO: 1469141 - DNA, 15 bp, Homo sapiens
gataatggtcctcgc

SEQ ID NO: 1469142 - DNA, 15 bp, Homo sapiens
tgataatggtcctcg

SEQ ID NO: 1469143 - DNA, 15 bp, Homo sapiens
ctgataatggtcctc

SEQ ID NO: 1469144 - DNA, 15 bp, Homo sapiens
actgataatggtcct

SEQ ID NO: 1469145 - DNA, 15 bp, Homo sapiens
aactgataatggtcc

SEQ ID NO: 1469146 - DNA, 15 bp, Homo sapiens
aaactgataatggtc

SEQ ID NO: 1469147 - DNA, 15 bp, Homo sapiens
aaaactgataatggt

SEQ ID NO: 1469148 - DNA, 15 bp, Homo sapiens
aaaaactgataatgg

SEQ ID NO: 1469149 - DNA, 15 bp, Homo sapiens
taaaaactgataatg

SEQ ID NO: 1469150 - DNA, 15 bp, Homo sapiens
ataaaaactgataat

SEQ ID NO: 1469151 - DNA, 15 bp, Homo sapiens
tataaaaactgataa

SEQ ID NO: 1469152 - DNA, 15 bp, Homo sapiens
ctataaaaactgata

SEQ ID NO: 1469153 - DNA, 15 bp, Homo sapiens
actataaaaactgat

SEQ ID NO: 1469154 - DNA, 15 bp, Homo sapiens
aactataaaaactga

SEQ ID NO: 1469155 - DNA, 15 bp, Homo sapiens
aaactataaaaactg

SEQ ID NO: 1469156 - DNA, 15 bp, Homo sapiens
aaaactataaaaact

SEQ ID NO: 1469157 - DNA, 15 bp, Homo sapiens
aaaaactataaaaac

SEQ ID NO: 1469158 - DNA, 15 bp, Homo sapiens
caaaaactataaaaa

SEQ ID NO: 1469159 - DNA, 15 bp, Homo sapiens
ccaaaaactataaaa

SEQ ID NO: 1469160 - DNA, 15 bp, Homo sapiens
tccaaaaactataaa

SEQ ID NO: 1469161 - DNA, 15 bp, Homo sapiens
ttccaaaaactataa

SEQ ID NO: 1469162 - DNA, 15 bp, Homo sapiens
cttccaaaaactata

SEQ ID NO: 1469163 - DNA, 15 bp, Homo sapiens
ccttccaaaaactat

SEQ ID NO: 1469164 - DNA, 15 bp, Homo sapiens
gccttccaaaaacta

SEQ ID NO: 1469165 - DNA, 15 bp, Homo sapiens
ggccttccaaaaact

SEQ ID NO: 1469166 - DNA, 15 bp, Homo sapiens
aggccttccaaaaac

SEQ ID NO: 1469167 - DNA, 15 bp, Homo sapiens
taggccttccaaaaa

SEQ ID NO: 1469168 - DNA, 15 bp, Homo sapiens
ttaggccttccaaaa

SEQ ID NO: 1469169 - DNA, 15 bp, Homo sapiens
cttaggccttccaaa

SEQ ID NO: 1469170 - DNA, 15 bp, Homo sapiens
ccttaggccttccaa

SEQ ID NO: 1469171 - DNA, 15 bp, Homo sapiens
accttaggccttcca

SEQ ID NO: 1469172 - DNA, 15 bp, Homo sapiens
gaccttaggccttcc

SEQ ID NO: 1469173 - DNA, 15 bp, Homo sapiens
tgaccttaggccttc

SEQ ID NO: 1469174 - DNA, 15 bp, Homo sapiens
atgaccttaggcctt

SEQ ID NO: 1469175 - DNA, 15 bp, Homo sapiens
tatgaccttaggcct

SEQ ID NO: 1469176 - DNA, 15 bp, Homo sapiens
ttatgaccttaggcc

SEQ ID NO: 1469177 - DNA, 15 bp, Homo sapiens
attatgaccttaggc

SEQ ID NO: 1469178 - DNA, 15 bp, Homo sapiens
tattatgaccttagg

SEQ ID NO: 1469179 - DNA, 15 bp, Homo sapiens
ctattatgaccttag

SEQ ID NO: 1469180 - DNA, 15 bp, Homo sapiens
tctattatgacctta

SEQ ID NO: 1469181 - DNA, 15 bp, Homo sapiens
atctattatgacctt

SEQ ID NO: 1469182 - DNA, 15 bp, Homo sapiens
aatctattatgacct

SEQ ID NO: 1469183 - DNA, 15 bp, Homo sapiens
aaatctattatgacc

SEQ ID NO: 1469184 - DNA, 15 bp, Homo sapiens
aaaatctattatgac

SEQ ID NO: 1469185 - DNA, 15 bp, Homo sapiens
taaaatctattatga

SEQ ID NO: 1469186 - DNA, 15 bp, Homo sapiens
ttaaaatctattatg

SEQ ID NO: 1469187 - DNA, 15 bp, Homo sapiens
tttaaaatctattat

SEQ ID NO: 1469188 - DNA, 15 bp, Homo sapiens
ttttaaaatctatta

SEQ ID NO: 1469189 - DNA, 15 bp, Homo sapiens
cttttaaaatctatt

SEQ ID NO: 1469190 - DNA, 15 bp, Homo sapiens
tcttttaaaatctat

SEQ ID NO: 1469191 - DNA, 15 bp, Homo sapiens
atcttttaaaatcta

SEQ ID NO: 1469192 - DNA, 15 bp, Homo sapiens
catcttttaaaatct

SEQ ID NO: 1469193 - DNA, 15 bp, Homo sapiens
tcatcttttaaaatc

SEQ ID NO: 1469194 - DNA, 15 bp, Homo sapiens
ctcatcttttaaaat

SEQ ID NO: 1469195 - DNA, 15 bp, Homo sapiens
gctcatcttttaaaa

SEQ ID NO: 1469196 - DNA, 15 bp, Homo sapiens
tgctcatcttttaaa

SEQ ID NO: 1469197 - DNA, 15 bp, Homo sapiens
ttgctcatcttttaa

SEQ ID NO: 1469198 - DNA, 15 bp, Homo sapiens
attgctcatctttta

SEQ ID NO: 1469199 - DNA, 15 bp, Homo sapiens
aattgctcatctttt

SEQ ID NO: 1469200 - DNA, 15 bp, Homo sapiens
caattgctcatcttt

SEQ ID NO: 1469201 - DNA, 15 bp, Homo sapiens
gcaattgctcatctt

SEQ ID NO: 1469202 - DNA, 15 bp, Homo sapiens
agcaattgctcatct

SEQ ID NO: 1469203 - DNA, 15 bp, Homo sapiens
gagcaattgctcatc

SEQ ID NO: 1469204 - DNA, 15 bp, Homo sapiens
agagcaattgctcat

SEQ ID NO: 1469205 - DNA, 15 bp, Homo sapiens
aagagcaattgctca

SEQ ID NO: 1469206 - DNA, 15 bp, Homo sapiens
aaagagcaattgctc

SEQ ID NO: 1469207 - DNA, 15 bp, Homo sapiens
taaagagcaattgct

SEQ ID NO: 1469208 - DNA, 15 bp, Homo sapiens
ctaaagagcaattgc

SEQ ID NO: 1469209 - DNA, 15 bp, Homo sapiens
actaaagagcaattg

SEQ ID NO: 1469210 - DNA, 15 bp, Homo sapiens
aactaaagagcaatt

SEQ ID NO: 1469211 - DNA, 15 bp, Homo sapiens
aaactaaagagcaat

SEQ ID NO: 1469212 - DNA, 15 bp, Homo sapiens
aaaactaaagagcaa

SEQ ID NO: 1469213 - DNA, 15 bp, Homo sapiens
aaaaactaaagagca

SEQ ID NO: 1469214 - DNA, 15 bp, Homo sapiens
aaaaaactaaagagc

SEQ ID NO: 1469215 - DNA, 15 bp, Homo sapiens
caaaaaactaaagag

SEQ ID NO: 1469216 - DNA, 15 bp, Homo sapiens
acaaaaaactaaaga

SEQ ID NO: 1469217 - DNA, 15 bp, Homo sapiens
gacaaaaaactaaag

SEQ ID NO: 1469218 - DNA, 15 bp, Homo sapiens
ggacaaaaaactaaa

SEQ ID NO: 1469219 - DNA, 15 bp, Homo sapiens
tggacaaaaaactaa

SEQ ID NO: 1469220 - DNA, 15 bp, Homo sapiens
ctggacaaaaaacta

SEQ ID NO: 1469221 - DNA, 15 bp, Homo sapiens
actggacaaaaaact

SEQ ID NO: 1469222 - DNA, 15 bp, Homo sapiens
gactggacaaaaaac

SEQ ID NO: 1469223 - DNA, 15 bp, Homo sapiens
ggactggacaaaaaa

SEQ ID NO: 1469224 - DNA, 15 bp, Homo sapiens
tggactggacaaaaa

SEQ ID NO: 1469225 - DNA, 15 bp, Homo sapiens
ctggactggacaaaa

SEQ ID NO: 1469226 - DNA, 15 bp, Homo sapiens
cctggactggacaaa

SEQ ID NO: 1469227 - DNA, 15 bp, Homo sapiens
ccctggactggacaa

SEQ ID NO: 1469228 - DNA, 15 bp, Homo sapiens
tccctggactggaca

SEQ ID NO: 1469229 - DNA, 15 bp, Homo sapiens
ctccctggactggac

SEQ ID NO: 1469230 - DNA, 15 bp, Homo sapiens
actccctggactgga

SEQ ID NO: 1469231 - DNA, 15 bp, Homo sapiens
tactccctggactgg

SEQ ID NO: 1469232 - DNA, 15 bp, Homo sapiens
ctactccctggactg

SEQ ID NO: 1469233 - DNA, 15 bp, Homo sapiens
gctactccctggact

SEQ ID NO: 1469234 - DNA, 15 bp, Homo sapiens
tgctactccctggac

SEQ ID NO: 1469235 - DNA, 15 bp, Homo sapiens
atgctactccctgga

SEQ ID NO: 1469236 - DNA, 15 bp, Homo sapiens
catgctactccctgg

SEQ ID NO: 1469237 - DNA, 15 bp, Homo sapiens
acatgctactccctg

SEQ ID NO: 1469238 - DNA, 15 bp, Homo sapiens
aacatgctactccct

SEQ ID NO: 1469239 - DNA, 15 bp, Homo sapiens
aaacatgctactccc

SEQ ID NO: 1469240 - DNA, 15 bp, Homo sapiens
gaaacatgctactcc

SEQ ID NO: 1469241 - DNA, 15 bp, Homo sapiens
tgaaacatgctactc

SEQ ID NO: 1469242 - DNA, 15 bp, Homo sapiens
ctgaaacatgctact

SEQ ID NO: 1469243 - DNA, 15 bp, Homo sapiens
cctgaaacatgctac

SEQ ID NO: 1469244 - DNA, 15 bp, Homo sapiens
gcctgaaacatgcta

SEQ ID NO: 1469245 - DNA, 15 bp, Homo sapiens
ggcctgaaacatgct

SEQ ID NO: 1469246 - DNA, 15 bp, Homo sapiens
gggcctgaaacatgc

SEQ ID NO: 1469247 - DNA, 15 bp, Homo sapiens
cgggcctgaaacatg

SEQ ID NO: 1469248 - DNA, 15 bp, Homo sapiens
acgggcctgaaacat

SEQ ID NO: 1469249 - DNA, 15 bp, Homo sapiens
tacgggcctgaaaca

SEQ ID NO: 1469250 - DNA, 15 bp, Homo sapiens
atacgggcctgaaac

SEQ ID NO: 1469251 - DNA, 15 bp, Homo sapiens
tatacgggcctgaaa

SEQ ID NO: 1469252 - DNA, 15 bp, Homo sapiens
ttatacgggcctgaa

SEQ ID NO: 1469253 - DNA, 15 bp, Homo sapiens
cttatacgggcctga

SEQ ID NO: 1469254 - DNA, 15 bp, Homo sapiens
acttatacgggcctg

SEQ ID NO: 1469255 - DNA, 15 bp, Homo sapiens
cacttatacgggcct

SEQ ID NO: 1469256 - DNA, 15 bp, Homo sapiens
acacttatacgggcc

SEQ ID NO: 1469257 - DNA, 15 bp, Homo sapiens
gacacttatacgggc

SEQ ID NO: 1469258 - DNA, 15 bp, Homo sapiens
ggacacttatacggg

SEQ ID NO: 1469259 - DNA, 15 bp, Homo sapiens
tggacacttatacgg

SEQ ID NO: 1469260 - DNA, 15 bp, Homo sapiens
gtggacacttatacg

SEQ ID NO: 1469261 - DNA, 15 bp, Homo sapiens
tgtggacacttatac

SEQ ID NO: 1469262 - DNA, 15 bp, Homo sapiens
ctgtggacacttata

SEQ ID NO: 1469263 - DNA, 15 bp, Homo sapiens
actgtggacacttat

SEQ ID NO: 1469264 - DNA, 15 bp, Homo sapiens
tactgtggacactta

SEQ ID NO: 1469265 - DNA, 15 bp, Homo sapiens
ttactgtggacactt

SEQ ID NO: 1469266 - DNA, 15 bp, Homo sapiens
gttactgtggacact

SEQ ID NO: 1469267 - DNA, 15 bp, Homo sapiens
cgttactgtggacac

SEQ ID NO: 1469268 - DNA, 15 bp, Homo sapiens
acgttactgtggaca

SEQ ID NO: 1469269 - DNA, 15 bp, Homo sapiens
cacgttactgtggac

SEQ ID NO: 1469270 - DNA, 15 bp, Homo sapiens
ccacgttactgtgga

SEQ ID NO: 1469271 - DNA, 15 bp, Homo sapiens
tccacgttactgtgg

SEQ ID NO: 1469272 - DNA, 15 bp, Homo sapiens
ctccacgttactgtg

SEQ ID NO: 1469273 - DNA, 15 bp, Homo sapiens
tctccacgttactgt

SEQ ID NO: 1469274 - DNA, 15 bp, Homo sapiens
ttctccacgttactg

SEQ ID NO: 1469275 - DNA, 15 bp, Homo sapiens
tttctccacgttact

SEQ ID NO: 1469276 - DNA, 15 bp, Homo sapiens
atttctccacgttac

SEQ ID NO: 1469277 - DNA, 15 bp, Homo sapiens
aatttctccacgtta

SEQ ID NO: 1469278 - DNA, 15 bp, Homo sapiens
aaatttctccacgtt

SEQ ID NO: 1469279 - DNA, 15 bp, Homo sapiens
taaatttctccacgt

SEQ ID NO: 1469280 - DNA, 15 bp, Homo sapiens
ttaaatttctccacg

SEQ ID NO: 1469281 - DNA, 15 bp, Homo sapiens
tttaaatttctccac

SEQ ID NO: 1469282 - DNA, 15 bp, Homo sapiens
ctttaaatttctcca

SEQ ID NO: 1469283 - DNA, 15 bp, Homo sapiens
gctttaaatttctcc

SEQ ID NO: 1469284 - DNA, 15 bp, Homo sapiens
tgctttaaatttctc

SEQ ID NO: 1469285 - DNA, 15 bp, Homo sapiens
tgaatgctttaaatt

SEQ ID NO: 1469286 - DNA, 15 bp, Homo sapiens
ttgaatgctttaaat

SEQ ID NO: 1469287 - DNA, 15 bp, Homo sapiens
tttgaatgctttaaa

SEQ ID NO: 1469288 - DNA, 15 bp, Homo sapiens
ctttgaatgctttaa

SEQ ID NO: 1469289 - DNA, 15 bp, Homo sapiens
cctttgaatgcttta

SEQ ID NO: 1469290 - DNA, 15 bp, Homo sapiens
acctttgaatgcttt

SEQ ID NO: 1469291 - DNA, 15 bp, Homo sapiens
tacctttgaatgctt

SEQ ID NO: 1469292 - DNA, 15 bp, Homo sapiens
ctacctttgaatgct

SEQ ID NO: 1469293 - DNA, 15 bp, Homo sapiens
tctacctttgaatgc

SEQ ID NO: 1469294 - DNA, 15 bp, Homo sapiens
atctacctttgaatg

SEQ ID NO: 1469295 - DNA, 15 bp, Homo sapiens
catctacctttgaat

SEQ ID NO: 1469296 - DNA, 15 bp, Homo sapiens
gcatctacctttgaa

SEQ ID NO: 1469297 - DNA, 15 bp, Homo sapiens
agcatctacctttga

SEQ ID NO: 1469298 - DNA, 15 bp, Homo sapiens
cagcatctacctttg

SEQ ID NO: 1469299 - DNA, 15 bp, Homo sapiens
tcagcatctaccttt

SEQ ID NO: 1469300 - DNA, 15 bp, Homo sapiens
ctcagcatctacctt

SEQ ID NO: 1469301 - DNA, 15 bp, Homo sapiens
actcagcatctacct

SEQ ID NO: 1469302 - DNA, 15 bp, Homo sapiens
tactcagcatctacc

SEQ ID NO: 1469303 - DNA, 15 bp, Homo sapiens
ttactcagcatctac

SEQ ID NO: 1469304 - DNA, 15 bp, Homo sapiens
attactcagcatcta

SEQ ID NO: 1469305 - DNA, 15 bp, Homo sapiens
tattactcagcatct

SEQ ID NO: 1469306 - DNA, 15 bp, Homo sapiens
atattactcagcatc

SEQ ID NO: 1469307 - DNA, 15 bp, Homo sapiens
gatattactcagcat

SEQ ID NO: 1469308 - DNA, 15 bp, Homo sapiens
tgatattactcagca

SEQ ID NO: 1469309 - DNA, 15 bp, Homo sapiens
ctgatattactcagc

SEQ ID NO: 1469310 - DNA, 15 bp, Homo sapiens
actgatattactcag

SEQ ID NO: 1469311 - DNA, 15 bp, Homo sapiens
cactgatattactca

SEQ ID NO: 1469312 - DNA, 15 bp, Homo sapiens
acactgatattactc

SEQ ID NO: 1469313 - DNA, 15 bp, Homo sapiens
tacactgatattact

SEQ ID NO: 1469314 - DNA, 15 bp, Homo sapiens
gtacactgatattac

SEQ ID NO: 1469315 - DNA, 15 bp, Homo sapiens
ggtacactgatatta

SEQ ID NO: 1469316 - DNA, 15 bp, Homo sapiens
tggtacactgatatt

SEQ ID NO: 1469317 - DNA, 15 bp, Homo sapiens
ctggtacactgatat

SEQ ID NO: 1469318 - DNA, 15 bp, Homo sapiens
tctggtacactgata

SEQ ID NO: 1469319 - DNA, 15 bp, Homo sapiens
atctggtacactgat

SEQ ID NO: 1469320 - DNA, 15 bp, Homo sapiens
tatctggtacactga

SEQ ID NO: 1469321 - DNA, 15 bp, Homo sapiens
ctatctggtacactg

SEQ ID NO: 1469322 - DNA, 15 bp, Homo sapiens
gctatctggtacact

SEQ ID NO: 1469323 - DNA, 15 bp, Homo sapiens
tgctatctggtacac

SEQ ID NO: 1469324 - DNA, 15 bp, Homo sapiens
atgctatctggtaca

SEQ ID NO: 1469325 - DNA, 15 bp, Homo sapiens
aatgctatctggtac

SEQ ID NO: 1469326 - DNA, 15 bp, Homo sapiens
taatgctatctggta

SEQ ID NO: 1469327 - DNA, 15 bp, Homo sapiens
ctaatgctatctggt

SEQ ID NO: 1469328 - DNA, 15 bp, Homo sapiens
cctaatgctatctgg

SEQ ID NO: 1469329 - DNA, 15 bp, Homo sapiens
acctaatgctatctg

SEQ ID NO: 1469330 - DNA, 15 bp, Homo sapiens
tacctaatgctatct

SEQ ID NO: 1469331 - DNA, 15 bp, Homo sapiens
gtacctaatgctatc

SEQ ID NO: 1469332 - DNA, 15 bp, Homo sapiens
ggtacctaatgctat

SEQ ID NO: 1469333 - DNA, 15 bp, Homo sapiens
tggtacctaatgcta

SEQ ID NO: 1469334 - DNA, 15 bp, Homo sapiens
ctggtacctaatgct

SEQ ID NO: 1469335 - DNA, 15 bp, Homo sapiens
tctggtacctaatgc

SEQ ID NO: 1469336 - DNA, 15 bp, Homo sapiens
gtctggtacctaatg

SEQ ID NO: 1469337 - DNA, 15 bp, Homo sapiens
ggtctggtacctaat

SEQ ID NO: 1469338 - DNA, 15 bp, Homo sapiens
aggtctggtacctaa

SEQ ID NO: 1469339 - DNA, 15 bp, Homo sapiens
gaggtctggtaccta

SEQ ID NO: 1469340 - DNA, 15 bp, Homo sapiens
tgaggtctggtacct

SEQ ID NO: 1469341 - DNA, 15 bp, Homo sapiens
atgaggtctggtacc

SEQ ID NO: 1469342 - DNA, 15 bp, Homo sapiens
catgaggtctggtac

SEQ ID NO: 1469343 - DNA, 15 bp, Homo sapiens
ccatgaggtctggta

SEQ ID NO: 1469344 - DNA, 15 bp, Homo sapiens
cccatgaggtctggt

SEQ ID NO: 1469345 - DNA, 15 bp, Homo sapiens
acccatgaggtctgg

SEQ ID NO: 1469346 - DNA, 15 bp, Homo sapiens
aacccatgaggtctg

SEQ ID NO: 1469347 - DNA, 15 bp, Homo sapiens
caacccatgaggtct

SEQ ID NO: 1469348 - DNA, 15 bp, Homo sapiens
ccaacccatgaggtc

SEQ ID NO: 1469349 - DNA, 15 bp, Homo sapiens
gccaacccatgaggt

SEQ ID NO: 1469350 - DNA, 15 bp, Homo sapiens
tgccaacccatgagg

SEQ ID NO: 1469351 - DNA, 15 bp, Homo sapiens
gtgccaacccatgag

SEQ ID NO: 1469352 - DNA, 15 bp, Homo sapiens
ggtgccaacccatga

SEQ ID NO: 1469353 - DNA, 15 bp, Homo sapiens
tggtgccaacccatg

SEQ ID NO: 1469354 - DNA, 15 bp, Homo sapiens
ttggtgccaacccat

SEQ ID NO: 1469355 - DNA, 15 bp, Homo sapiens
cttggtgccaaccca

SEQ ID NO: 1469356 - DNA, 15 bp, Homo sapiens
acttggtgccaaccc

SEQ ID NO: 1469357 - DNA, 15 bp, Homo sapiens
aacttggtgccaacc

SEQ ID NO: 1469358 - DNA, 15 bp, Homo sapiens
gaacttggtgccaac

SEQ ID NO: 1469359 - DNA, 15 bp, Homo sapiens
ggaacttggtgccaa

SEQ ID NO: 1469360 - DNA, 15 bp, Homo sapiens
tggaacttggtgcca

SEQ ID NO: 1469361 - DNA, 15 bp, Homo sapiens
ttggaacttggtgcc

SEQ ID NO: 1469362 - DNA, 15 bp, Homo sapiens
attggaacttggtgc

SEQ ID NO: 1469363 - DNA, 15 bp, Homo sapiens
cattggaacttggtg

SEQ ID NO: 1469364 - DNA, 15 bp, Homo sapiens
tcattggaacttggt

SEQ ID NO: 1469365 - DNA, 15 bp, Homo sapiens
ttcattggaacttgg

SEQ ID NO: 1469366 - DNA, 15 bp, Homo sapiens
tttcattggaacttg

SEQ ID NO: 1469367 - DNA, 15 bp, Homo sapiens
ttttcattggaactt

SEQ ID NO: 1469368 - DNA, 15 bp, Homo sapiens
tttttcattggaact

SEQ ID NO: 1469369 - DNA, 15 bp, Homo sapiens
ctttttcattggaac

SEQ ID NO: 1469370 - DNA, 15 bp, Homo sapiens
cctttttcattggaa

SEQ ID NO: 1469371 - DNA, 15 bp, Homo sapiens
ccctttttcattgga

SEQ ID NO: 1469372 - DNA, 15 bp, Homo sapiens
cccctttttcattgg

SEQ ID NO: 1469373 - DNA, 15 bp, Homo sapiens
tcccctttttcattg

SEQ ID NO: 1469374 - DNA, 15 bp, Homo sapiens
ctcccctttttcatt

SEQ ID NO: 1469375 - DNA, 15 bp, Homo sapiens
tctcccctttttcat

SEQ ID NO: 1469376 - DNA, 15 bp, Homo sapiens
ctctcccctttttca

SEQ ID NO: 1469377 - DNA, 15 bp, Homo sapiens
tctctcccctttttc

SEQ ID NO: 1469378 - DNA, 15 bp, Homo sapiens
ctctctccccttttt

SEQ ID NO: 1469379 - DNA, 15 bp, Homo sapiens
tctctctcccctttt

SEQ ID NO: 1469380 - DNA, 15 bp, Homo sapiens
ttctctctccccttt

SEQ ID NO: 1469381 - DNA, 15 bp, Homo sapiens
attctctctcccctt

SEQ ID NO: 1469382 - DNA, 15 bp, Homo sapiens
cattctctctcccct

SEQ ID NO: 1469383 - DNA, 15 bp, Homo sapiens
gcattctctctcccc

SEQ ID NO: 1469384 - DNA, 15 bp, Homo sapiens
ggcattctctctccc

SEQ ID NO: 1469385 - DNA, 15 bp, Homo sapiens
gggcattctctctcc

SEQ ID NO: 1469386 - DNA, 15 bp, Homo sapiens
agggcattctctctc

SEQ ID NO: 1469387 - DNA, 15 bp, Homo sapiens
aagggcattctctct

SEQ ID NO: 1469388 - DNA, 15 bp, Homo sapiens
caagggcattctctc

SEQ ID NO: 1469389 - DNA, 15 bp, Homo sapiens
ccaagggcattctct

SEQ ID NO: 1469390 - DNA, 15 bp, Homo sapiens
gccaagggcattctc

SEQ ID NO: 1469391 - DNA, 15 bp, Homo sapiens
tgccaagggcattct

SEQ ID NO: 1469392 - DNA, 15 bp, Homo sapiens
ttgccaagggcattc

SEQ ID NO: 1469393 - DNA, 15 bp, Homo sapiens
attgccaagggcatt

SEQ ID NO: 1469394 - DNA, 15 bp, Homo sapiens
gattgccaagggcat

SEQ ID NO: 1469395 - DNA, 15 bp, Homo sapiens
tgattgccaagggca

SEQ ID NO: 1469396 - DNA, 15 bp, Homo sapiens
ctgattgccaagggc

SEQ ID NO: 1469397 - DNA, 15 bp, Homo sapiens
cctgattgccaaggg

SEQ ID NO: 1469398 - DNA, 15 bp, Homo sapiens
tcctgattgccaagg

SEQ ID NO: 1469399 - DNA, 15 bp, Homo sapiens
gtcctgattgccaag

SEQ ID NO: 1469400 - DNA, 15 bp, Homo sapiens
tgtcctgattgccaa

SEQ ID NO: 1469401 - DNA, 15 bp, Homo sapiens
ttgtcctgattgcca

SEQ ID NO: 1469402 - DNA, 15 bp, Homo sapiens
cttgtcctgattgcc

SEQ ID NO: 1469403 - DNA, 15 bp, Homo sapiens
acttgtcctgattgc

SEQ ID NO: 1469404 - DNA, 15 bp, Homo sapiens
aacttgtcctgattg

SEQ ID NO: 1469405 - DNA, 15 bp, Homo sapiens
aaacttgtcctgatt

SEQ ID NO: 1469406 - DNA, 15 bp, Homo sapiens
aaaacttgtcctgat

SEQ ID NO: 1469407 - DNA, 15 bp, Homo sapiens
taaaacttgtcctga

SEQ ID NO: 1469408 - DNA, 15 bp, Homo sapiens
ttaaaacttgtcctg

SEQ ID NO: 1469409 - DNA, 15 bp, Homo sapiens
attaaaacttgtcct

SEQ ID NO: 1469410 - DNA, 15 bp, Homo sapiens
tattaaaacttgtcc

SEQ ID NO: 1469411 - DNA, 15 bp, Homo sapiens
ttattaaaacttgtc

SEQ ID NO: 1469412 - DNA, 15 bp, Homo sapiens
attattaaaacttgt

SEQ ID NO: 1469413 - DNA, 15 bp, Homo sapiens
gattattaaaacttg

SEQ ID NO: 1469414 - DNA, 15 bp, Homo sapiens
tgattattaaaactt

SEQ ID NO: 1469415 - DNA, 15 bp, Homo sapiens
atgattattaaaact

SEQ ID NO: 1469416 - DNA, 15 bp, Homo sapiens
catgattattaaaac

SEQ ID NO: 1469417 - DNA, 15 bp, Homo sapiens
gcatgattattaaaa

SEQ ID NO: 1469418 - DNA, 15 bp, Homo sapiens
cgcatgattattaaa

SEQ ID NO: 1469419 - DNA, 15 bp, Homo sapiens
tcgcatgattattaa

SEQ ID NO: 1469420 - DNA, 15 bp, Homo sapiens
ctcgcatgattatta

SEQ ID NO: 1469421 - DNA, 15 bp, Homo sapiens
gctcgcatgattatt

SEQ ID NO: 1469422 - DNA, 15 bp, Homo sapiens
agctcgcatgattat

SEQ ID NO: 1469423 - DNA, 15 bp, Homo sapiens
aagctcgcatgatta

SEQ ID NO: 1469424 - DNA, 15 bp, Homo sapiens
caagctcgcatgatt

SEQ ID NO: 1469425 - DNA, 15 bp, Homo sapiens
tcaagctcgcatgat

SEQ ID NO: 1469426 - DNA, 15 bp, Homo sapiens
ctcaagctcgcatga

SEQ ID NO: 1469427 - DNA, 15 bp, Homo sapiens
gctcaagctcgcatg

SEQ ID NO: 1469428 - DNA, 15 bp, Homo sapiens
tgctcaagctcgcat

SEQ ID NO: 1469429 - DNA, 15 bp, Homo sapiens
ttgctcaagctcgca

SEQ ID NO: 1469430 - DNA, 15 bp, Homo sapiens
cttgctcaagctcgc

SEQ ID NO: 1469431 - DNA, 15 bp, Homo sapiens
gcttgctcaagctcg

SEQ ID NO: 1469432 - DNA, 15 bp, Homo sapiens
cgcttgctcaagctc

SEQ ID NO: 1469433 - DNA, 15 bp, Homo sapiens
acgcttgctcaagct

SEQ ID NO: 1469434 - DNA, 15 bp, Homo sapiens
aacgcttgctcaagc

SEQ ID NO: 1469435 - DNA, 15 bp, Homo sapiens
taacgcttgctcaag

SEQ ID NO: 1469436 - DNA, 15 bp, Homo sapiens
ttaacgcttgctcaa

SEQ ID NO: 1469437 - DNA, 15 bp, Homo sapiens
tttaacgcttgctca

SEQ ID NO: 1469438 - DNA, 15 bp, Homo sapiens
atttaacgcttgctc

SEQ ID NO: 1469439 - DNA, 15 bp, Homo sapiens
catttaacgcttgct

SEQ ID NO: 1469440 - DNA, 15 bp, Homo sapiens
tcatttaacgcttgc

SEQ ID NO: 1469441 - DNA, 15 bp, Homo sapiens
ttcatttaacgcttg

SEQ ID NO: 1469442 - DNA, 15 bp, Homo sapiens
tttcatttaacgctt

SEQ ID NO: 1469443 - DNA, 15 bp, Homo sapiens
gtttcatttaacgct

SEQ ID NO: 1469444 - DNA, 15 bp, Homo sapiens
agtttcatttaacgc

SEQ ID NO: 1469445 - DNA, 15 bp, Homo sapiens
cagtttcatttaacg

SEQ ID NO: 1469446 - DNA, 15 bp, Homo sapiens
acagtttcatttaac

SEQ ID NO: 1469447 - DNA, 15 bp, Homo sapiens
aacagtttcatttaa

SEQ ID NO: 1469448 - DNA, 15 bp, Homo sapiens
caacagtttcattta

SEQ ID NO: 1469449 - DNA, 15 bp, Homo sapiens
acaacagtttcattt

SEQ ID NO: 1469450 - DNA, 15 bp, Homo sapiens
cacaacagtttcatt

SEQ ID NO: 1469451 - DNA, 15 bp, Homo sapiens
acacaacagtttcat

SEQ ID NO: 1469452 - DNA, 15 bp, Homo sapiens
tacacaacagtttca

SEQ ID NO: 1469453 - DNA, 15 bp, Homo sapiens
ttacacaacagtttc

SEQ ID NO: 1469454 - DNA, 15 bp, Homo sapiens
cttacacaacagttt

SEQ ID NO: 1469455 - DNA, 15 bp, Homo sapiens
tcttacacaacagtt

SEQ ID NO: 1469456 - DNA, 15 bp, Homo sapiens
gtcttacacaacagt

SEQ ID NO: 1469457 - DNA, 15 bp, Homo sapiens
agtcttacacaacag

SEQ ID NO: 1469458 - DNA, 15 bp, Homo sapiens
cagtcttacacaaca

SEQ ID NO: 1469459 - DNA, 15 bp, Homo sapiens
gcagtcttacacaac

SEQ ID NO: 1469460 - DNA, 15 bp, Homo sapiens
cgcagtcttacacaa

SEQ ID NO: 1469461 - DNA, 15 bp, Homo sapiens
ccgcagtcttacaca

SEQ ID NO: 1469462 - DNA, 15 bp, Homo sapiens
cccgcagtcttacac

SEQ ID NO: 1469463 - DNA, 15 bp, Homo sapiens
gcccgcagtcttaca

SEQ ID NO: 1469464 - DNA, 15 bp, Homo sapiens
cgcccgcagtcttac

SEQ ID NO: 1469465 - DNA, 15 bp, Homo sapiens
acgcccgcagtctta

SEQ ID NO: 1469466 - DNA, 15 bp, Homo sapiens
aacgcccgcagtctt

SEQ ID NO: 1469467 - DNA, 15 bp, Homo sapiens
gaacgcccgcagtct

SEQ ID NO: 1469468 - DNA, 15 bp, Homo sapiens
agaacgcccgcagtc

SEQ ID NO: 1469469 - DNA, 15 bp, Homo sapiens
cagaacgcccgcagt

SEQ ID NO: 1469470 - DNA, 15 bp, Homo sapiens
tcagaacgcccgcag

SEQ ID NO: 1469471 - DNA, 15 bp, Homo sapiens
atcagaacgcccgca

SEQ ID NO: 1469472 - DNA, 15 bp, Homo sapiens
catcagaacgcccgc

SEQ ID NO: 1469473 - DNA, 15 bp, Homo sapiens
tcatcagaacgcccg

SEQ ID NO: 1469474 - DNA, 15 bp, Homo sapiens
ttcatcagaacgccc

SEQ ID NO: 1469475 - DNA, 15 bp, Homo sapiens
tttcatcagaacgcc

SEQ ID NO: 1469476 - DNA, 15 bp, Homo sapiens
ttttcatcagaacgc

SEQ ID NO: 1469477 - DNA, 15 bp, Homo sapiens
tttttcatcagaacg

SEQ ID NO: 1469478 - DNA, 15 bp, Homo sapiens
ttttttcatcagaac

SEQ ID NO: 1469479 - DNA, 15 bp, Homo sapiens
tttttttcatcagaa

SEQ ID NO: 1469480 - DNA, 15 bp, Homo sapiens
ctttttttcatcaga

SEQ ID NO: 1469481 - DNA, 15 bp, Homo sapiens
cctttttttcatcag

SEQ ID NO: 1469482 - DNA, 15 bp, Homo sapiens
tcctttttttcatca

SEQ ID NO: 1469483 - DNA, 15 bp, Homo sapiens
ttcctttttttcatc

SEQ ID NO: 1469484 - DNA, 15 bp, Homo sapiens
attcctttttttcat

SEQ ID NO: 1469485 - DNA, 15 bp, Homo sapiens
cattcctttttttca

SEQ ID NO: 1469486 - DNA, 15 bp, Homo sapiens
tcattcctttttttc

SEQ ID NO: 1469487 - DNA, 15 bp, Homo sapiens
atcattccttttttt

SEQ ID NO: 1469488 - DNA, 15 bp, Homo sapiens
gatcattcctttttt

SEQ ID NO: 1469489 - DNA, 15 bp, Homo sapiens
tgatcattccttttt

SEQ ID NO: 1469490 - DNA, 15 bp, Homo sapiens
ctgatcattcctttt

SEQ ID NO: 1469491 - DNA, 15 bp, Homo sapiens
gctgatcattccttt

SEQ ID NO: 1469492 - DNA, 15 bp, Homo sapiens
agctgatcattcctt

SEQ ID NO: 1469493 - DNA, 15 bp, Homo sapiens
aagctgatcattcct

SEQ ID NO: 1469494 - DNA, 15 bp, Homo sapiens
caagctgatcattcc

SEQ ID NO: 1469495 - DNA, 15 bp, Homo sapiens
tcaagctgatcattc

SEQ ID NO: 1469496 - DNA, 15 bp, Homo sapiens
ctcaagctgatcatt

SEQ ID NO: 1469497 - DNA, 15 bp, Homo sapiens
gctcaagctgatcat

SEQ ID NO: 1469498 - DNA, 15 bp, Homo sapiens
agctcaagctgatca

SEQ ID NO: 1469499 - DNA, 15 bp, Homo sapiens
gagctcaagctgatc

SEQ ID NO: 1469500 - DNA, 15 bp, Homo sapiens
tgagctcaagctgat

SEQ ID NO: 1469501 - DNA, 15 bp, Homo sapiens
gtgagctcaagctga

SEQ ID NO: 1469502 - DNA, 15 bp, Homo sapiens
tgtgagctcaagctg

SEQ ID NO: 1469503 - DNA, 15 bp, Homo sapiens
ttgtgagctcaagct

SEQ ID NO: 1469504 - DNA, 15 bp, Homo sapiens
tttgtgagctcaagc

SEQ ID NO: 1469505 - DNA, 15 bp, Homo sapiens
ttttgtgagctcaag

SEQ ID NO: 1469506 - DNA, 15 bp, Homo sapiens
tttttgtgagctcaa

SEQ ID NO: 1469507 - DNA, 15 bp, Homo sapiens
ttttttgtgagctca

SEQ ID NO: 1469508 - DNA, 15 bp, Homo sapiens
cttttttgtgagctc

SEQ ID NO: 1469509 - DNA, 15 bp, Homo sapiens
gcttttttgtgagct

SEQ ID NO: 1469510 - DNA, 15 bp, Homo sapiens
tgcttttttgtgagc

SEQ ID NO: 1469511 - DNA, 15 bp, Homo sapiens
ttgcttttttgtgag

SEQ ID NO: 1469512 - DNA, 15 bp, Homo sapiens
cttgcttttttgtga

SEQ ID NO: 1469513 - DNA, 15 bp, Homo sapiens
tcttgcttttttgtg

SEQ ID NO: 1469514 - DNA, 15 bp, Homo sapiens
ctcttgcttttttgt

SEQ ID NO: 1469515 - DNA, 15 bp, Homo sapiens
tctcttgcttttttg

SEQ ID NO: 1469516 - DNA, 15 bp, Homo sapiens
ctctcttgctttttt

SEQ ID NO: 1469517 - DNA, 15 bp, Homo sapiens
actctcttgcttttt

SEQ ID NO: 1469518 - DNA, 15 bp, Homo sapiens
gactctcttgctttt

SEQ ID NO: 1469519 - DNA, 15 bp, Homo sapiens
agactctcttgcttt

SEQ ID NO: 1469520 - DNA, 15 bp, Homo sapiens
cagactctcttgctt

SEQ ID NO: 1469521 - DNA, 15 bp, Homo sapiens
tcagactctcttgct

SEQ ID NO: 1469522 - DNA, 15 bp, Homo sapiens
ttcagactctcttgc

SEQ ID NO: 1469523 - DNA, 15 bp, Homo sapiens
tttcagactctcttg

SEQ ID NO: 1469524 - DNA, 15 bp, Homo sapiens
ttttcagactctctt

SEQ ID NO: 1469525 - DNA, 15 bp, Homo sapiens
gttttcagactctct

SEQ ID NO: 1469526 - DNA, 15 bp, Homo sapiens
ggttttcagactctc

SEQ ID NO: 1469527 - DNA, 15 bp, Homo sapiens
tggttttcagactct

SEQ ID NO: 1469528 - DNA, 15 bp, Homo sapiens
gtggttttcagactc

SEQ ID NO: 1469529 - DNA, 15 bp, Homo sapiens
tgtggttttcagact

SEQ ID NO: 1469530 - DNA, 15 bp, Homo sapiens
atgtggttttcagac

SEQ ID NO: 1469531 - DNA, 15 bp, Homo sapiens
gatgtggttttcaga

SEQ ID NO: 1469532 - DNA, 15 bp, Homo sapiens
agatgtggttttcag

SEQ ID NO: 1469533 - DNA, 15 bp, Homo sapiens
cagatgtggttttca

SEQ ID NO: 1469534 - DNA, 15 bp, Homo sapiens
acagatgtggttttc

SEQ ID NO: 1469535 - DNA, 15 bp, Homo sapiens
cacagatgtggtttt

SEQ ID NO: 1469536 - DNA, 15 bp, Homo sapiens
ccacagatgtggttt

SEQ ID NO: 1469537 - DNA, 15 bp, Homo sapiens
accacagatgtggtt

SEQ ID NO: 1469538 - DNA, 15 bp, Homo sapiens
aaccacagatgtggt

SEQ ID NO: 1469539 - DNA, 15 bp, Homo sapiens
caaccacagatgtgg

SEQ ID NO: 1469540 - DNA, 15 bp, Homo sapiens
acaaccacagatgtg

SEQ ID NO: 1469541 - DNA, 15 bp, Homo sapiens
tacaaccacagatgt

SEQ ID NO: 1469542 - DNA, 15 bp, Homo sapiens
gtacaaccacagatg

SEQ ID NO: 1469543 - DNA, 15 bp, Homo sapiens
ggtacaaccacagat

SEQ ID NO: 1469544 - DNA, 15 bp, Homo sapiens
tggtacaaccacaga

SEQ ID NO: 1469545 - DNA, 15 bp, Homo sapiens
ctggtacaaccacag

SEQ ID NO: 1469546 - DNA, 15 bp, Homo sapiens
tctggtacaaccaca

SEQ ID NO: 1469547 - DNA, 15 bp, Homo sapiens
ctctggtacaaccac

SEQ ID NO: 1469548 - DNA, 15 bp, Homo sapiens
gctctggtacaacca

SEQ ID NO: 1469549 - DNA, 15 bp, Homo sapiens
tgctctggtacaacc

SEQ ID NO: 1469550 - DNA, 15 bp, Homo sapiens
atgctctggtacaac

SEQ ID NO: 1469551 - DNA, 15 bp, Homo sapiens
gatgctctggtacaa

SEQ ID NO: 1469552 - DNA, 15 bp, Homo sapiens
tgatgctctggtaca

SEQ ID NO: 1469553 - DNA, 15 bp, Homo sapiens
ttgatgctctggtac

SEQ ID NO: 1469554 - DNA, 15 bp, Homo sapiens
gttgatgctctggta

SEQ ID NO: 1469555 - DNA, 15 bp, Homo sapiens
agttgatgctctggt

SEQ ID NO: 1469556 - DNA, 15 bp, Homo sapiens
gagttgatgctctgg

SEQ ID NO: 1469557 - DNA, 15 bp, Homo sapiens
tgagttgatgctctg

SEQ ID NO: 1469558 - DNA, 15 bp, Homo sapiens
ttgagttgatgctct

SEQ ID NO: 1469559 - DNA, 15 bp, Homo sapiens
tttgagttgatgctc

SEQ ID NO: 1469560 - DNA, 15 bp, Homo sapiens
gtttgagttgatgct

SEQ ID NO: 1469561 - DNA, 15 bp, Homo sapiens
tgtttgagttgatgc

SEQ ID NO: 1469562 - DNA, 15 bp, Homo sapiens
atgtttgagttgatg

SEQ ID NO: 1469563 - DNA, 15 bp, Homo sapiens
aatgtttgagttgat

SEQ ID NO: 1469564 - DNA, 15 bp, Homo sapiens
gaatgtttgagttga

SEQ ID NO: 1469565 - DNA, 15 bp, Homo sapiens
ggaatgtttgagttg

SEQ ID NO: 1469566 - DNA, 15 bp, Homo sapiens
gggaatgtttgagtt

SEQ ID NO: 1469567 - DNA, 15 bp, Homo sapiens
agggaatgtttgagt

SEQ ID NO: 1469568 - DNA, 15 bp, Homo sapiens
aagggaatgtttgag

SEQ ID NO: 1469569 - DNA, 15 bp, Homo sapiens
gaagggaatgtttga

SEQ ID NO: 1469570 - DNA, 15 bp, Homo sapiens
agaagggaatgtttg

SEQ ID NO: 1469571 - DNA, 15 bp, Homo sapiens
cagaagggaatgttt

SEQ ID NO: 1469572 - DNA, 15 bp, Homo sapiens
tcagaagggaatgtt

SEQ ID NO: 1469573 - DNA, 15 bp, Homo sapiens
gtcagaagggaatgt

SEQ ID NO: 1469574 - DNA, 15 bp, Homo sapiens
tgtcagaagggaatg

SEQ ID NO: 1469575 - DNA, 15 bp, Homo sapiens
ctgtcagaagggaat

SEQ ID NO: 1469576 - DNA, 15 bp, Homo sapiens
cctgtcagaagggaa

SEQ ID NO: 1469577 - DNA, 15 bp, Homo sapiens
ccctgtcagaaggga

SEQ ID NO: 1469578 - DNA, 15 bp, Homo sapiens
tccctgtcagaaggg

SEQ ID NO: 1469579 - DNA, 15 bp, Homo sapiens
gtccctgtcagaagg

SEQ ID NO: 1469580 - DNA, 15 bp, Homo sapiens
ggtccctgtcagaag

SEQ ID NO: 1469581 - DNA, 15 bp, Homo sapiens
tggtccctgtcagaa

SEQ ID NO: 1469582 - DNA, 15 bp, Homo sapiens
ctggtccctgtcaga

SEQ ID NO: 1469583 - DNA, 15 bp, Homo sapiens
cctggtccctgtcag

SEQ ID NO: 1469584 - DNA, 15 bp, Homo sapiens
acctggtccctgtca

SEQ ID NO: 1469585 - DNA, 15 bp, Homo sapiens
tacctggtccctgtc

SEQ ID NO: 1469586 - DNA, 15 bp, Homo sapiens
ctacctggtccctgt

SEQ ID NO: 1469587 - DNA, 15 bp, Homo sapiens
gctacctggtccctg

SEQ ID NO: 1469588 - DNA, 15 bp, Homo sapiens
ggctacctggtccct

SEQ ID NO: 1469589 - DNA, 15 bp, Homo sapiens
gggctacctggtccc

SEQ ID NO: 1469590 - DNA, 15 bp, Homo sapiens
tgggctacctggtcc

SEQ ID NO: 1469591 - DNA, 15 bp, Homo sapiens
ctgggctacctggtc

SEQ ID NO: 1469592 - DNA, 15 bp, Homo sapiens
tctgggctacctggt

SEQ ID NO: 1469593 - DNA, 15 bp, Homo sapiens
ttctgggctacctgg

SEQ ID NO: 1469594 - DNA, 15 bp, Homo sapiens
attctgggctacctg

SEQ ID NO: 1469595 - DNA, 15 bp, Homo sapiens
cattctgggctacct

SEQ ID NO: 1469596 - DNA, 15 bp, Homo sapiens
tcattctgggctacc

SEQ ID NO: 1469597 - DNA, 15 bp, Homo sapiens
ctcattctgggctac

SEQ ID NO: 1469598 - DNA, 15 bp, Homo sapiens
tctcattctgggcta

SEQ ID NO: 1469599 - DNA, 15 bp, Homo sapiens
ctctcattctgggct

SEQ ID NO: 1469600 - DNA, 15 bp, Homo sapiens
gctctcattctgggc

SEQ ID NO: 1469601 - DNA, 15 bp, Homo sapiens
cgctctcattctggg

SEQ ID NO: 1469602 - DNA, 15 bp, Homo sapiens
tcgctctcattctgg

SEQ ID NO: 1469603 - DNA, 15 bp, Homo sapiens
ttcgctctcattctg

SEQ ID NO: 1469604 - DNA, 15 bp, Homo sapiens
attcgctctcattct

SEQ ID NO: 1469605 - DNA, 15 bp, Homo sapiens
tattcgctctcattc

SEQ ID NO: 1469606 - DNA, 15 bp, Homo sapiens
atattcgctctcatt

SEQ ID NO: 1469607 - DNA, 15 bp, Homo sapiens
catattcgctctcat

SEQ ID NO: 1469608 - DNA, 15 bp, Homo sapiens
acatattcgctctca

SEQ ID NO: 1469609 - DNA, 15 bp, Homo sapiens
cacatattcgctctc

SEQ ID NO: 1469610 - DNA, 15 bp, Homo sapiens
acacatattcgctct

SEQ ID NO: 1469611 - DNA, 15 bp, Homo sapiens
cacacatattcgctc

SEQ ID NO: 1469612 - DNA, 15 bp, Homo sapiens
tcacacatattcgct

SEQ ID NO: 1469613 - DNA, 15 bp, Homo sapiens
atcacacatattcgc

SEQ ID NO: 1469614 - DNA, 15 bp, Homo sapiens
tatcacacatattcg

SEQ ID NO: 1469615 - DNA, 15 bp, Homo sapiens
atatcacacatattc

SEQ ID NO: 1469616 - DNA, 15 bp, Homo sapiens
tatatcacacatatt

SEQ ID NO: 1469617 - DNA, 15 bp, Homo sapiens
ttatatcacacatat

SEQ ID NO: 1469618 - DNA, 15 bp, Homo sapiens
tttatatcacacata

SEQ ID NO: 1469619 - DNA, 15 bp, Homo sapiens
ctttatatcacacat

SEQ ID NO: 1469620 - DNA, 15 bp, Homo sapiens
cctttatatcacaca

SEQ ID NO: 1469621 - DNA, 15 bp, Homo sapiens
ccctttatatcacac

SEQ ID NO: 1469622 - DNA, 15 bp, Homo sapiens
cccctttatatcaca

SEQ ID NO: 1469623 - DNA, 15 bp, Homo sapiens
ccccctttatatcac

SEQ ID NO: 1469624 - DNA, 15 bp, Homo sapiens
accccctttatatca

SEQ ID NO: 1469625 - DNA, 15 bp, Homo sapiens
caccccctttatatc

SEQ ID NO: 1469626 - DNA, 15 bp, Homo sapiens
tcaccccctttatat

SEQ ID NO: 1469627 - DNA, 15 bp, Homo sapiens
atcaccccctttata

SEQ ID NO: 1469628 - DNA, 15 bp, Homo sapiens
catcaccccctttat

SEQ ID NO: 1469629 - DNA, 15 bp, Homo sapiens
tcatcacccccttta

SEQ ID NO: 1469630 - DNA, 15 bp, Homo sapiens
gtcatcacccccttt

SEQ ID NO: 1469631 - DNA, 15 bp, Homo sapiens
cgtcatcaccccctt

SEQ ID NO: 1469632 - DNA, 15 bp, Homo sapiens
ccgtcatcaccccct

SEQ ID NO: 1469633 - DNA, 15 bp, Homo sapiens
cccgtcatcaccccc

SEQ ID NO: 1469634 - DNA, 15 bp, Homo sapiens
gcccgtcatcacccc

SEQ ID NO: 1469635 - DNA, 15 bp, Homo sapiens
tgcccgtcatcaccc

SEQ ID NO: 1469636 - DNA, 15 bp, Homo sapiens
gtgcccgtcatcacc

SEQ ID NO: 1469637 - DNA, 15 bp, Homo sapiens
tgtgcccgtcatcac

SEQ ID NO: 1469638 - DNA, 15 bp, Homo sapiens
ctgtgcccgtcatca

SEQ ID NO: 1469639 - DNA, 15 bp, Homo sapiens
tctgtgcccgtcatc

SEQ ID NO: 1469640 - DNA, 15 bp, Homo sapiens
ctctgtgcccgtcat

SEQ ID NO: 1469641 - DNA, 15 bp, Homo sapiens
cctctgtgcccgtca

SEQ ID NO: 1469642 - DNA, 15 bp, Homo sapiens
tcctctgtgcccgtc

SEQ ID NO: 1469643 - DNA, 15 bp, Homo sapiens
ctcctctgtgcccgt

SEQ ID NO: 1469644 - DNA, 15 bp, Homo sapiens
gctcctctgtgcccg

SEQ ID NO: 1469645 - DNA, 15 bp, Homo sapiens
agctcctctgtgccc

SEQ ID NO: 1469646 - DNA, 15 bp, Homo sapiens
gagctcctctgtgcc

SEQ ID NO: 1469647 - DNA, 15 bp, Homo sapiens
ggagctcctctgtgc

SEQ ID NO: 1469648 - DNA, 15 bp, Homo sapiens
aggagctcctctgtg

SEQ ID NO: 1469649 - DNA, 15 bp, Homo sapiens
caggagctcctctgt

SEQ ID NO: 1469650 - DNA, 15 bp, Homo sapiens
gcaggagctcctctg

SEQ ID NO: 1469651 - DNA, 15 bp, Homo sapiens
tgcaggagctcctct

SEQ ID NO: 1469652 - DNA, 15 bp, Homo sapiens
gtgcaggagctcctc

SEQ ID NO: 1469653 - DNA, 15 bp, Homo sapiens
agtgcaggagctcct

SEQ ID NO: 1469654 - DNA, 15 bp, Homo sapiens
cagtgcaggagctcc

SEQ ID NO: 1469655 - DNA, 15 bp, Homo sapiens
acagtgcaggagctc

SEQ ID NO: 1469656 - DNA, 15 bp, Homo sapiens
cacagtgcaggagct

SEQ ID NO: 1469657 - DNA, 15 bp, Homo sapiens
tcacagtgcaggagc

SEQ ID NO: 1469658 - DNA, 15 bp, Homo sapiens
ctcacagtgcaggag

SEQ ID NO: 1469659 - DNA, 15 bp, Homo sapiens
tctcacagtgcagga

SEQ ID NO: 1469660 - DNA, 15 bp, Homo sapiens
ttctcacagtgcagg

SEQ ID NO: 1469661 - DNA, 15 bp, Homo sapiens
cttctcacagtgcag

SEQ ID NO: 1469662 - DNA, 15 bp, Homo sapiens
acttctcacagtgca

SEQ ID NO: 1469663 - DNA, 15 bp, Homo sapiens
tacttctcacagtgc

SEQ ID NO: 1469664 - DNA, 15 bp, Homo sapiens
ctacttctcacagtg

SEQ ID NO: 1469665 - DNA, 15 bp, Homo sapiens
cctacttctcacagt

SEQ ID NO: 1469666 - DNA, 15 bp, Homo sapiens
ccctacttctcacag

SEQ ID NO: 1469667 - DNA, 15 bp, Homo sapiens
accctacttctcaca

SEQ ID NO: 1469668 - DNA, 15 bp, Homo sapiens
aaccctacttctcac

SEQ ID NO: 1469669 - DNA, 15 bp, Homo sapiens
taaccctacttctca

SEQ ID NO: 1469670 - DNA, 15 bp, Homo sapiens
ctaaccctacttctc

SEQ ID NO: 1469671 - DNA, 15 bp, Homo sapiens
actaaccctacttct

SEQ ID NO: 1469672 - DNA, 15 bp, Homo sapiens
tactaaccctacttc

SEQ ID NO: 1469673 - DNA, 15 bp, Homo sapiens
ctactaaccctactt

SEQ ID NO: 1469674 - DNA, 15 bp, Homo sapiens
cctactaaccctact

SEQ ID NO: 1469675 - DNA, 15 bp, Homo sapiens
ccctactaaccctac

SEQ ID NO: 1469676 - DNA, 15 bp, Homo sapiens
cccctactaacccta

SEQ ID NO: 1469677 - DNA, 15 bp, Homo sapiens
acccctactaaccct

SEQ ID NO: 1469678 - DNA, 15 bp, Homo sapiens
aacccctactaaccc

SEQ ID NO: 1469679 - DNA, 15 bp, Homo sapiens
gaacccctactaacc

SEQ ID NO: 1469680 - DNA, 15 bp, Homo sapiens
tgaacccctactaac

SEQ ID NO: 1469681 - DNA, 15 bp, Homo sapiens
atgaacccctactaa

SEQ ID NO: 1469682 - DNA, 15 bp, Homo sapiens
aatgaacccctacta

SEQ ID NO: 1469683 - DNA, 15 bp, Homo sapiens
taatgaacccctact

SEQ ID NO: 1469684 - DNA, 15 bp, Homo sapiens
ctaatgaacccctac

SEQ ID NO: 1469685 - DNA, 15 bp, Homo sapiens
actaatgaaccccta

SEQ ID NO: 1469686 - DNA, 15 bp, Homo sapiens
tactaatgaacccct

SEQ ID NO: 1469687 - DNA, 15 bp, Homo sapiens
ctactaatgaacccc

SEQ ID NO: 1469688 - DNA, 15 bp, Homo sapiens
actactaatgaaccc

SEQ ID NO: 1469689 - DNA, 15 bp, Homo sapiens
cactactaatgaacc

SEQ ID NO: 1469690 - DNA, 15 bp, Homo sapiens
gcactactaatgaac

SEQ ID NO: 1469691 - DNA, 15 bp, Homo sapiens
ggcactactaatgaa

SEQ ID NO: 1469692 - DNA, 15 bp, Homo sapiens
aggcactactaatga

SEQ ID NO: 1469693 - DNA, 15 bp, Homo sapiens
aaggcactactaatg

SEQ ID NO: 1469694 - DNA, 15 bp, Homo sapiens
aaaggcactactaat

SEQ ID NO: 1469695 - DNA, 15 bp, Homo sapiens
gaaaggcactactaa

SEQ ID NO: 1469696 - DNA, 15 bp, Homo sapiens
tgaaaggcactacta

SEQ ID NO: 1469697 - DNA, 15 bp, Homo sapiens
ctgaaaggcactact

SEQ ID NO: 1469698 - DNA, 15 bp, Homo sapiens
tctgaaaggcactac

SEQ ID NO: 1469699 - DNA, 15 bp, Homo sapiens
atctgaaaggcacta

SEQ ID NO: 1469700 - DNA, 15 bp, Homo sapiens
catctgaaaggcact

SEQ ID NO: 1469701 - DNA, 15 bp, Homo sapiens
acatctgaaaggcac

SEQ ID NO: 1469702 - DNA, 15 bp, Homo sapiens
cacatctgaaaggca

SEQ ID NO: 1469703 - DNA, 15 bp, Homo sapiens
gcacatctgaaaggc

SEQ ID NO: 1469704 - DNA, 15 bp, Homo sapiens
cgcacatctgaaagg

SEQ ID NO: 1469705 - DNA, 15 bp, Homo sapiens
tcgcacatctgaaag

SEQ ID NO: 1469706 - DNA, 15 bp, Homo sapiens
ctcgcacatctgaaa

SEQ ID NO: 1469707 - DNA, 15 bp, Homo sapiens
tctcgcacatctgaa

SEQ ID NO: 1469708 - DNA, 15 bp, Homo sapiens
atctcgcacatctga

SEQ ID NO: 1469709 - DNA, 15 bp, Homo sapiens
gatctcgcacatctg

SEQ ID NO: 1469710 - DNA, 15 bp, Homo sapiens
agatctcgcacatct

SEQ ID NO: 1469711 - DNA, 15 bp, Homo sapiens
tagatctcgcacatc

SEQ ID NO: 1469712 - DNA, 15 bp, Homo sapiens
ttagatctcgcacat

SEQ ID NO: 1469713 - DNA, 15 bp, Homo sapiens
tttagatctcgcaca

SEQ ID NO: 1469714 - DNA, 15 bp, Homo sapiens
atttagatctcgcac

SEQ ID NO: 1469715 - DNA, 15 bp, Homo sapiens
catttagatctcgca

SEQ ID NO: 1469716 - DNA, 15 bp, Homo sapiens
tcatttagatctcgc

SEQ ID NO: 1469717 - DNA, 15 bp, Homo sapiens
ctcatttagatctcg

SEQ ID NO: 1469718 - DNA, 15 bp, Homo sapiens
actcatttagatctc

SEQ ID NO: 1469719 - DNA, 15 bp, Homo sapiens
tactcatttagatct

SEQ ID NO: 1469720 - DNA, 15 bp, Homo sapiens
ttactcatttagatc

SEQ ID NO: 1469721 - DNA, 15 bp, Homo sapiens
attactcatttagat

SEQ ID NO: 1469722 - DNA, 15 bp, Homo sapiens
tattactcatttaga

SEQ ID NO: 1469723 - DNA, 15 bp, Homo sapiens
gtattactcatttag

SEQ ID NO: 1469724 - DNA, 15 bp, Homo sapiens
agtattactcattta

SEQ ID NO: 1469725 - DNA, 15 bp, Homo sapiens
tagtattactcattt

SEQ ID NO: 1469726 - DNA, 15 bp, Homo sapiens
gtagtattactcatt

SEQ ID NO: 1469727 - DNA, 15 bp, Homo sapiens
tgtagtattactcat

SEQ ID NO: 1469728 - DNA, 15 bp, Homo sapiens
gtgtagtattactca

SEQ ID NO: 1469729 - DNA, 15 bp, Homo sapiens
tgtgtagtattactc

SEQ ID NO: 1469730 - DNA, 15 bp, Homo sapiens
gtgtgtagtattact

SEQ ID NO: 1469731 - DNA, 15 bp, Homo sapiens
ggtgtgtagtattac

SEQ ID NO: 1469732 - DNA, 15 bp, Homo sapiens
cggtgtgtagtatta

SEQ ID NO: 1469733 - DNA, 15 bp, Homo sapiens
gcggtgtgtagtatt

SEQ ID NO: 1469734 - DNA, 15 bp, Homo sapiens
tgcggtgtgtagtat

SEQ ID NO: 1469735 - DNA, 15 bp, Homo sapiens
atgcggtgtgtagta

SEQ ID NO: 1469736 - DNA, 15 bp, Homo sapiens
tatgcggtgtgtagt

SEQ ID NO: 1469737 - DNA, 15 bp, Homo sapiens
ttatgcggtgtgtag

SEQ ID NO: 1469738 - DNA, 15 bp, Homo sapiens
cttatgcggtgtgta

SEQ ID NO: 1469739 - DNA, 15 bp, Homo sapiens
tcttatgcggtgtgt

SEQ ID NO: 1469740 - DNA, 15 bp, Homo sapiens
ctcttatgcggtgtg

SEQ ID NO: 1469741 - DNA, 15 bp, Homo sapiens
cctcttatgcggtgt

SEQ ID NO: 1469742 - DNA, 15 bp, Homo sapiens
tcctcttatgcggtg

SEQ ID NO: 1469743 - DNA, 15 bp, Homo sapiens
ttcctcttatgcggt

SEQ ID NO: 1469744 - DNA, 15 bp, Homo sapiens
attcctcttatgcgg

SEQ ID NO: 1469745 - DNA, 15 bp, Homo sapiens
gattcctcttatgcg

SEQ ID NO: 1469746 - DNA, 15 bp, Homo sapiens
tgattcctcttatgc

SEQ ID NO: 1469747 - DNA, 15 bp, Homo sapiens
gtgattcctcttatg

SEQ ID NO: 1469748 - DNA, 15 bp, Homo sapiens
agtgattcctcttat

SEQ ID NO: 1469749 - DNA, 15 bp, Homo sapiens
tagtgattcctctta

SEQ ID NO: 1469750 - DNA, 15 bp, Homo sapiens
ttagtgattcctctt

SEQ ID NO: 1469751 - DNA, 15 bp, Homo sapiens
attagtgattcctct

SEQ ID NO: 1469752 - DNA, 15 bp, Homo sapiens
aattagtgattcctc

SEQ ID NO: 1469753 - DNA, 15 bp, Homo sapiens
taattagtgattcct

SEQ ID NO: 1469754 - DNA, 15 bp, Homo sapiens
ataattagtgattcc

SEQ ID NO: 1469755 - DNA, 15 bp, Homo sapiens
tataattagtgattc

SEQ ID NO: 1469756 - DNA, 15 bp, Homo sapiens
atataattagtgatt

SEQ ID NO: 1469757 - DNA, 15 bp, Homo sapiens
aatataattagtgat

SEQ ID NO: 1469758 - DNA, 15 bp, Homo sapiens
ataaatataattagt

SEQ ID NO: 1469759 - DNA, 15 bp, Homo sapiens
cataaatataattag

SEQ ID NO: 1469760 - DNA, 15 bp, Homo sapiens
acataaatataatta

SEQ ID NO: 1469761 - DNA, 15 bp, Homo sapiens
gacataaatataatt

SEQ ID NO: 1469762 - DNA, 15 bp, Homo sapiens
agacataaatataat

SEQ ID NO: 1469763 - DNA, 15 bp, Homo sapiens
aagacataaatataa

SEQ ID NO: 1469764 - DNA, 15 bp, Homo sapiens
caagacataaatata

SEQ ID NO: 1469765 - DNA, 15 bp, Homo sapiens
ccaagacataaatat

SEQ ID NO: 1469766 - DNA, 15 bp, Homo sapiens
accaagacataaata

SEQ ID NO: 1469767 - DNA, 15 bp, Homo sapiens
caccaagacataaat

SEQ ID NO: 1469768 - DNA, 15 bp, Homo sapiens
tcaccaagacataaa

SEQ ID NO: 1469769 - DNA, 15 bp, Homo sapiens
ctcaccaagacataa

SEQ ID NO: 1469770 - DNA, 15 bp, Homo sapiens
cctcaccaagacata

SEQ ID NO: 1469771 - DNA, 15 bp, Homo sapiens
tcctcaccaagacat

SEQ ID NO: 1469772 - DNA, 15 bp, Homo sapiens
ttcctcaccaagaca

SEQ ID NO: 1469773 - DNA, 15 bp, Homo sapiens
tttcctcaccaagac

SEQ ID NO: 1469774 - DNA, 15 bp, Homo sapiens
ttttcctcaccaaga

SEQ ID NO: 1469775 - DNA, 15 bp, Homo sapiens
cttttcctcaccaag

SEQ ID NO: 1469776 - DNA, 15 bp, Homo sapiens
acttttcctcaccaa

SEQ ID NO: 1469777 - DNA, 15 bp, Homo sapiens
aacttttcctcacca

SEQ ID NO: 1469778 - DNA, 15 bp, Homo sapiens
aaacttttcctcacc

SEQ ID NO: 1469779 - DNA, 15 bp, Homo sapiens
caaacttttcctcac

SEQ ID NO: 1469780 - DNA, 15 bp, Homo sapiens
acaaacttttcctca

SEQ ID NO: 1469781 - DNA, 15 bp, Homo sapiens
tacaaacttttcctc

SEQ ID NO: 1469782 - DNA, 15 bp, Homo sapiens
ttacaaacttttcct

SEQ ID NO: 1469783 - DNA, 15 bp, Homo sapiens
cttacaaacttttcc

SEQ ID NO: 1469784 - DNA, 15 bp, Homo sapiens
ccttacaaacttttc

SEQ ID NO: 1469785 - DNA, 15 bp, Homo sapiens
gccttacaaactttt

SEQ ID NO: 1469786 - DNA, 15 bp, Homo sapiens
ggccttacaaacttt

SEQ ID NO: 1469787 - DNA, 15 bp, Homo sapiens
tggccttacaaactt

SEQ ID NO: 1469788 - DNA, 15 bp, Homo sapiens
ctggccttacaaact

SEQ ID NO: 1469789 - DNA, 15 bp, Homo sapiens
gctggccttacaaac

SEQ ID NO: 1469790 - DNA, 15 bp, Homo sapiens
tgctggccttacaaa

SEQ ID NO: 1469791 - DNA, 15 bp, Homo sapiens
atgctggccttacaa

SEQ ID NO: 1469792 - DNA, 15 bp, Homo sapiens
aatgctggccttaca

SEQ ID NO: 1469793 - DNA, 15 bp, Homo sapiens
taatgctggccttac

SEQ ID NO: 1469794 - DNA, 15 bp, Homo sapiens
ctaatgctggcctta

SEQ ID NO: 1469795 - DNA, 15 bp, Homo sapiens
cctaatgctggcctt

SEQ ID NO: 1469796 - DNA, 15 bp, Homo sapiens
ccctaatgctggcct

SEQ ID NO: 1469797 - DNA, 15 bp, Homo sapiens
gccctaatgctggcc

SEQ ID NO: 1469798 - DNA, 15 bp, Homo sapiens
tgccctaatgctggc

SEQ ID NO: 1469799 - DNA, 15 bp, Homo sapiens
gtgccctaatgctgg

SEQ ID NO: 1469800 - DNA, 15 bp, Homo sapiens
ggtgccctaatgctg

SEQ ID NO: 1469801 - DNA, 15 bp, Homo sapiens
aggtgccctaatgct

SEQ ID NO: 1469802 - DNA, 15 bp, Homo sapiens
taggtgccctaatgc

SEQ ID NO: 1469803 - DNA, 15 bp, Homo sapiens
ttaggtgccctaatg

SEQ ID NO: 1469804 - DNA, 15 bp, Homo sapiens
gttaggtgccctaat

SEQ ID NO: 1469805 - DNA, 15 bp, Homo sapiens
agttaggtgccctaa

SEQ ID NO: 1469806 - DNA, 15 bp, Homo sapiens
aagttaggtgcccta

SEQ ID NO: 1469807 - DNA, 15 bp, Homo sapiens
aaagttaggtgccct

SEQ ID NO: 1469808 - DNA, 15 bp, Homo sapiens
caaagttaggtgccc

SEQ ID NO: 1469809 - DNA, 15 bp, Homo sapiens
gcaaagttaggtgcc

SEQ ID NO: 1469810 - DNA, 15 bp, Homo sapiens
ggcaaagttaggtgc

SEQ ID NO: 1469811 - DNA, 15 bp, Homo sapiens
aggcaaagttaggtg

SEQ ID NO: 1469812 - DNA, 15 bp, Homo sapiens
caggcaaagttaggt

SEQ ID NO: 1469813 - DNA, 15 bp, Homo sapiens
acaggcaaagttagg

SEQ ID NO: 1469814 - DNA, 15 bp, Homo sapiens
aacaggcaaagttag

SEQ ID NO: 1469815 - DNA, 15 bp, Homo sapiens
caacaggcaaagtta

SEQ ID NO: 1469816 - DNA, 15 bp, Homo sapiens
gcaacaggcaaagtt

SEQ ID NO: 1469817 - DNA, 15 bp, Homo sapiens
tgcaacaggcaaagt

SEQ ID NO: 1469818 - DNA, 15 bp, Homo sapiens
atgcaacaggcaaag

SEQ ID NO: 1469819 - DNA, 15 bp, Homo sapiens
tatgcaacaggcaaa

SEQ ID NO: 1469820 - DNA, 15 bp, Homo sapiens
ctatgcaacaggcaa

SEQ ID NO: 1469821 - DNA, 15 bp, Homo sapiens
actatgcaacaggca

SEQ ID NO: 1469822 - DNA, 15 bp, Homo sapiens
aactatgcaacaggc

SEQ ID NO: 1469823 - DNA, 15 bp, Homo sapiens
aaactatgcaacagg

SEQ ID NO: 1469824 - DNA, 15 bp, Homo sapiens
aaaactatgcaacag

SEQ ID NO: 1469825 - DNA, 15 bp, Homo sapiens
caaaactatgcaaca

SEQ ID NO: 1469826 - DNA, 15 bp, Homo sapiens
tcaaaactatgcaac

SEQ ID NO: 1469827 - DNA, 15 bp, Homo sapiens
ttcaaaactatgcaa

SEQ ID NO: 1469828 - DNA, 15 bp, Homo sapiens
tttcaaaactatgca

SEQ ID NO: 1469829 - DNA, 15 bp, Homo sapiens
atttcaaaactatgc

SEQ ID NO: 1469830 - DNA, 15 bp, Homo sapiens
catttcaaaactatg

SEQ ID NO: 1469831 - DNA, 15 bp, Homo sapiens
acatttcaaaactat

SEQ ID NO: 1469832 - DNA, 15 bp, Homo sapiens
aacatttcaaaacta

SEQ ID NO: 1469833 - DNA, 15 bp, Homo sapiens
gaacatttcaaaact

SEQ ID NO: 1469834 - DNA, 15 bp, Homo sapiens
ggaacatttcaaaac

SEQ ID NO: 1469835 - DNA, 15 bp, Homo sapiens
aggaacatttcaaaa

SEQ ID NO: 1469836 - DNA, 15 bp, Homo sapiens
caggaacatttcaaa

SEQ ID NO: 1469837 - DNA, 15 bp, Homo sapiens
ccaggaacatttcaa

SEQ ID NO: 1469838 - DNA, 15 bp, Homo sapiens
tccaggaacatttca

SEQ ID NO: 1469839 - DNA, 15 bp, Homo sapiens
atccaggaacatttc

SEQ ID NO: 1469840 - DNA, 15 bp, Homo sapiens
aatccaggaacattt

SEQ ID NO: 1469841 - DNA, 15 bp, Homo sapiens
aaatccaggaacatt

SEQ ID NO: 1469842 - DNA, 15 bp, Homo sapiens
aaaatccaggaacat

SEQ ID NO: 1469843 - DNA, 15 bp, Homo sapiens
caaaatccaggaaca

SEQ ID NO: 1469844 - DNA, 15 bp, Homo sapiens
acaaaatccaggaac

SEQ ID NO: 1469845 - DNA, 15 bp, Homo sapiens
cacaaaatccaggaa

SEQ ID NO: 1469846 - DNA, 15 bp, Homo sapiens
gcacaaaatccagga

SEQ ID NO: 1469847 - DNA, 15 bp, Homo sapiens
agcacaaaatccagg

SEQ ID NO: 1469848 - DNA, 15 bp, Homo sapiens
cagcacaaaatccag

SEQ ID NO: 1469849 - DNA, 15 bp, Homo sapiens
gcagcacaaaatcca

SEQ ID NO: 1469850 - DNA, 15 bp, Homo sapiens
ggcagcacaaaatcc

SEQ ID NO: 1469851 - DNA, 15 bp, Homo sapiens
tggcagcacaaaatc

SEQ ID NO: 1469852 - DNA, 15 bp, Homo sapiens
ctggcagcacaaaat

SEQ ID NO: 1469853 - DNA, 15 bp, Homo sapiens
actggcagcacaaaa

SEQ ID NO: 1469854 - DNA, 15 bp, Homo sapiens
aactggcagcacaaa

SEQ ID NO: 1469855 - DNA, 15 bp, Homo sapiens
aaactggcagcacaa

SEQ ID NO: 1469856 - DNA, 15 bp, Homo sapiens
aaaactggcagcaca

SEQ ID NO: 1469857 - DNA, 15 bp, Homo sapiens
caaaactggcagcac

SEQ ID NO: 1469858 - DNA, 15 bp, Homo sapiens
gcaaaactggcagca

SEQ ID NO: 1469859 - DNA, 15 bp, Homo sapiens
tgcaaaactggcagc

SEQ ID NO: 1469860 - DNA, 15 bp, Homo sapiens
atgcaaaactggcag

SEQ ID NO: 1469861 - DNA, 15 bp, Homo sapiens
catgcaaaactggca

SEQ ID NO: 1469862 - DNA, 15 bp, Homo sapiens
ccatgcaaaactggc

SEQ ID NO: 1469863 - DNA, 15 bp, Homo sapiens
gccatgcaaaactgg

SEQ ID NO: 1469864 - DNA, 15 bp, Homo sapiens
tgccatgcaaaactg

SEQ ID NO: 1469865 - DNA, 15 bp, Homo sapiens
atgccatgcaaaact

SEQ ID NO: 1469866 - DNA, 15 bp, Homo sapiens
gatgccatgcaaaac

SEQ ID NO: 1469867 - DNA, 15 bp, Homo sapiens
agatgccatgcaaaa

SEQ ID NO: 1469868 - DNA, 15 bp, Homo sapiens
aagatgccatgcaaa

SEQ ID NO: 1469869 - DNA, 15 bp, Homo sapiens
caagatgccatgcaa

SEQ ID NO: 1469870 - DNA, 15 bp, Homo sapiens
gcaagatgccatgca

SEQ ID NO: 1469871 - DNA, 15 bp, Homo sapiens
tgcaagatgccatgc

SEQ ID NO: 1469872 - DNA, 15 bp, Homo sapiens
gtgcaagatgccatg

SEQ ID NO: 1469873 - DNA, 15 bp, Homo sapiens
tgtgcaagatgccat

SEQ ID NO: 1469874 - DNA, 15 bp, Homo sapiens
gtgtgcaagatgcca

SEQ ID NO: 1469875 - DNA, 15 bp, Homo sapiens
agtgtgcaagatgcc

SEQ ID NO: 1469876 - DNA, 15 bp, Homo sapiens
tagtgtgcaagatgc

SEQ ID NO: 1469877 - DNA, 15 bp, Homo sapiens
atagtgtgcaagatg

SEQ ID NO: 1469878 - DNA, 15 bp, Homo sapiens
tatagtgtgcaagat

SEQ ID NO: 1469879 - DNA, 15 bp, Homo sapiens
gtatagtgtgcaaga

SEQ ID NO: 1469880 - DNA, 15 bp, Homo sapiens
ggtatagtgtgcaag

SEQ ID NO: 1469881 - DNA, 15 bp, Homo sapiens
aggtatagtgtgcaa

SEQ ID NO: 1469882 - DNA, 15 bp, Homo sapiens
caggtatagtgtgca

SEQ ID NO: 1469883 - DNA, 15 bp, Homo sapiens
gcaggtatagtgtgc

SEQ ID NO: 1469884 - DNA, 15 bp, Homo sapiens
ggcaggtatagtgtg

SEQ ID NO: 1469885 - DNA, 15 bp, Homo sapiens
aggcaggtatagtgt

SEQ ID NO: 1469886 - DNA, 15 bp, Homo sapiens
aaggcaggtatagtg

SEQ ID NO: 1469887 - DNA, 15 bp, Homo sapiens
aaaggcaggtatagt

SEQ ID NO: 1469888 - DNA, 15 bp, Homo sapiens
aaaaggcaggtatag

SEQ ID NO: 1469889 - DNA, 15 bp, Homo sapiens
aaaaaggcaggtata

SEQ ID NO: 1469890 - DNA, 15 bp, Homo sapiens
aaaaaaggcaggtat

SEQ ID NO: 1469891 - DNA, 15 bp, Homo sapiens
caaaaaaggcaggta

SEQ ID NO: 1469892 - DNA, 15 bp, Homo sapiens
acaaaaaaggcaggt

SEQ ID NO: 1469893 - DNA, 15 bp, Homo sapiens
aacaaaaaaggcagg

SEQ ID NO: 1469894 - DNA, 15 bp, Homo sapiens
aaacaaaaaaggcag

SEQ ID NO: 1469895 - DNA, 15 bp, Homo sapiens
aaaacaaaaaaggca

SEQ ID NO: 1469896 - DNA, 15 bp, Homo sapiens
aaaaacaaaaaaggc

SEQ ID NO: 1469897 - DNA, 15 bp, Homo sapiens
gaaaaacaaaaaagg

SEQ ID NO: 1469898 - DNA, 15 bp, Homo sapiens
ggaaaaacaaaaaag

SEQ ID NO: 1469899 - DNA, 15 bp, Homo sapiens
aggaaaaacaaaaaa

SEQ ID NO: 1469900 - DNA, 15 bp, Homo sapiens
caggaaaaacaaaaa

SEQ ID NO: 1469901 - DNA, 15 bp, Homo sapiens
tcaggaaaaacaaaa

SEQ ID NO: 1469902 - DNA, 15 bp, Homo sapiens
ttcaggaaaaacaaa

SEQ ID NO: 1469903 - DNA, 15 bp, Homo sapiens
attcaggaaaaacaa

SEQ ID NO: 1469904 - DNA, 15 bp, Homo sapiens
gattcaggaaaaaca

SEQ ID NO: 1469905 - DNA, 15 bp, Homo sapiens
tgattcaggaaaaac

SEQ ID NO: 1469906 - DNA, 15 bp, Homo sapiens
atgattcaggaaaaa

SEQ ID NO: 1469907 - DNA, 15 bp, Homo sapiens
gatgattcaggaaaa

SEQ ID NO: 1469908 - DNA, 15 bp, Homo sapiens
agatgattcaggaaa

SEQ ID NO: 1469909 - DNA, 15 bp, Homo sapiens
cagatgattcaggaa

SEQ ID NO: 1469910 - DNA, 15 bp, Homo sapiens
acagatgattcagga

SEQ ID NO: 1469911 - DNA, 15 bp, Homo sapiens
tacagatgattcagg

SEQ ID NO: 1469912 - DNA, 15 bp, Homo sapiens
ttacagatgattcag

SEQ ID NO: 1469913 - DNA, 15 bp, Homo sapiens
tttacagatgattca

SEQ ID NO: 1469914 - DNA, 15 bp, Homo sapiens
ctttacagatgattc

SEQ ID NO: 1469915 - DNA, 15 bp, Homo sapiens
tctttacagatgatt

SEQ ID NO: 1469916 - DNA, 15 bp, Homo sapiens
gtctttacagatgat

SEQ ID NO: 1469917 - DNA, 15 bp, Homo sapiens
tgtctttacagatga

SEQ ID NO: 1469918 - DNA, 15 bp, Homo sapiens
ctgtctttacagatg

SEQ ID NO: 1469919 - DNA, 15 bp, Homo sapiens
actgtctttacagat

SEQ ID NO: 1469920 - DNA, 15 bp, Homo sapiens
tactgtctttacaga

SEQ ID NO: 1469921 - DNA, 15 bp, Homo sapiens
ctactgtctttacag

SEQ ID NO: 1469922 - DNA, 15 bp, Homo sapiens
actactgtctttaca

SEQ ID NO: 1469923 - DNA, 15 bp, Homo sapiens
cactactgtctttac

SEQ ID NO: 1469924 - DNA, 15 bp, Homo sapiens
ccactactgtcttta

SEQ ID NO: 1469925 - DNA, 15 bp, Homo sapiens
gccactactgtcttt

SEQ ID NO: 1469926 - DNA, 15 bp, Homo sapiens
cgccactactgtctt

SEQ ID NO: 1469927 - DNA, 15 bp, Homo sapiens
acgccactactgtct

SEQ ID NO: 1469928 - DNA, 15 bp, Homo sapiens
cacgccactactgtc

SEQ ID NO: 1469929 - DNA, 15 bp, Homo sapiens
tcacgccactactgt

SEQ ID NO: 1469930 - DNA, 15 bp, Homo sapiens
ctcacgccactactg

SEQ ID NO: 1469931 - DNA, 15 bp, Homo sapiens
cctcacgccactact

SEQ ID NO: 1469932 - DNA, 15 bp, Homo sapiens
gcctcacgccactac

SEQ ID NO: 1469933 - DNA, 15 bp, Homo sapiens
tgcctcacgccacta

SEQ ID NO: 1469934 - DNA, 15 bp, Homo sapiens
ttgcctcacgccact

SEQ ID NO: 1469935 - DNA, 15 bp, Homo sapiens
cttgcctcacgccac

SEQ ID NO: 1469936 - DNA, 15 bp, Homo sapiens
ccttgcctcacgcca

SEQ ID NO: 1469937 - DNA, 15 bp, Homo sapiens
cccttgcctcacgcc

SEQ ID NO: 1469938 - DNA, 15 bp, Homo sapiens
gcccttgcctcacgc

SEQ ID NO: 1469939 - DNA, 15 bp, Homo sapiens
agcccttgcctcacg

SEQ ID NO: 1469940 - DNA, 15 bp, Homo sapiens
gagcccttgcctcac

SEQ ID NO: 1469941 - DNA, 15 bp, Homo sapiens
tgagcccttgcctca

SEQ ID NO: 1469942 - DNA, 15 bp, Homo sapiens
ctgagcccttgcctc

SEQ ID NO: 1469943 - DNA, 15 bp, Homo sapiens
tctgagcccttgcct

SEQ ID NO: 1469944 - DNA, 15 bp, Homo sapiens
ttctgagcccttgcc

SEQ ID NO: 1469945 - DNA, 15 bp, Homo sapiens
tttctgagcccttgc

SEQ ID NO: 1469946 - DNA, 15 bp, Homo sapiens
gtttctgagcccttg

SEQ ID NO: 1469947 - DNA, 15 bp, Homo sapiens
tgtttctgagccctt

SEQ ID NO: 1469948 - DNA, 15 bp, Homo sapiens
ttgtttctgagccct

SEQ ID NO: 1469949 - DNA, 15 bp, Homo sapiens
gttgtttctgagccc

SEQ ID NO: 1469950 - DNA, 15 bp, Homo sapiens
tgttgtttctgagcc

SEQ ID NO: 1469951 - DNA, 15 bp, Homo sapiens
ttgttgtttctgagc

SEQ ID NO: 1469952 - DNA, 15 bp, Homo sapiens
attgttgtttctgag

SEQ ID NO: 1469953 - DNA, 15 bp, Homo sapiens
tattgttgtttctga

SEQ ID NO: 1469954 - DNA, 15 bp, Homo sapiens
ctattgttgtttctg

SEQ ID NO: 1469955 - DNA, 15 bp, Homo sapiens
tctattgttgtttct

SEQ ID NO: 1469956 - DNA, 15 bp, Homo sapiens
gggagttcagcacaa

SEQ ID NO: 1469957 - DNA, 15 bp, Homo sapiens
tgggagttcagcaca

SEQ ID NO: 1469958 - DNA, 15 bp, Homo sapiens
ttgggagttcagcac

SEQ ID NO: 1469959 - DNA, 15 bp, Homo sapiens
tttgggagttcagca

SEQ ID NO: 1469960 - DNA, 15 bp, Homo sapiens
ttttgggagttcagc

SEQ ID NO: 1469961 - DNA, 15 bp, Homo sapiens
attttgggagttcag

SEQ ID NO: 1469962 - DNA, 15 bp, Homo sapiens
cattttgggagttca

SEQ ID NO: 1469963 - DNA, 15 bp, Homo sapiens
acattttgggagttc

SEQ ID NO: 1469964 - DNA, 15 bp, Homo sapiens
tacattttgggagtt

SEQ ID NO: 1469965 - DNA, 15 bp, Homo sapiens
ctacattttgggagt

SEQ ID NO: 1469966 - DNA, 15 bp, Homo sapiens
gctacattttgggag

SEQ ID NO: 1469967 - DNA, 15 bp, Homo sapiens
tgctacattttggga

SEQ ID NO: 1469968 - DNA, 15 bp, Homo sapiens
ttgctacattttggg

SEQ ID NO: 1469969 - DNA, 15 bp, Homo sapiens
cttgctacattttgg

SEQ ID NO: 1469970 - DNA, 15 bp, Homo sapiens
acttgctacattttg

SEQ ID NO: 1469971 - DNA, 15 bp, Homo sapiens
gacttgctacatttt

SEQ ID NO: 1469972 - DNA, 15 bp, Homo sapiens
ggacttgctacattt

SEQ ID NO: 1469973 - DNA, 15 bp, Homo sapiens
tggacttgctacatt

SEQ ID NO: 1469974 - DNA, 15 bp, Homo sapiens
ctggacttgctacat

SEQ ID NO: 1469975 - DNA, 15 bp, Homo sapiens
gctggacttgctaca

SEQ ID NO: 1469976 - DNA, 15 bp, Homo sapiens
ggctggacttgctac

SEQ ID NO: 1469977 - DNA, 15 bp, Homo sapiens
gggctggacttgcta

SEQ ID NO: 1469978 - DNA, 15 bp, Homo sapiens
ggggctggacttgct

SEQ ID NO: 1469979 - DNA, 15 bp, Homo sapiens
aggggctggacttgc

SEQ ID NO: 1469980 - DNA, 15 bp, Homo sapiens
caggggctggacttg

SEQ ID NO: 1469981 - DNA, 15 bp, Homo sapiens
gcaggggctggactt

SEQ ID NO: 1469982 - DNA, 15 bp, Homo sapiens
ggcaggggctggact

SEQ ID NO: 1469983 - DNA, 15 bp, Homo sapiens
tggcaggggctggac

SEQ ID NO: 1469984 - DNA, 15 bp, Homo sapiens
atggcaggggctgga

SEQ ID NO: 1469985 - DNA, 15 bp, Homo sapiens
tatggcaggggctgg

SEQ ID NO: 1469986 - DNA, 15 bp, Homo sapiens
ctatggcaggggctg

SEQ ID NO: 1469987 - DNA, 15 bp, Homo sapiens
cctatggcaggggct

SEQ ID NO: 1469988 - DNA, 15 bp, Homo sapiens
gcctatggcaggggc

SEQ ID NO: 1469989 - DNA, 15 bp, Homo sapiens
ggcctatggcagggg

SEQ ID NO: 1469990 - DNA, 15 bp, Homo sapiens
gggcctatggcaggg

SEQ ID NO: 1469991 - DNA, 15 bp, Homo sapiens
tgggcctatggcagg

SEQ ID NO: 1469992 - DNA, 15 bp, Homo sapiens
ctgggcctatggcag

SEQ ID NO: 1469993 - DNA, 15 bp, Homo sapiens
cctgggcctatggca

SEQ ID NO: 1469994 - DNA, 15 bp, Homo sapiens
gcctgggcctatggc

SEQ ID NO: 1469995 - DNA, 15 bp, Homo sapiens
agcctgggcctatgg

SEQ ID NO: 1469996 - DNA, 15 bp, Homo sapiens
aagcctgggcctatg

SEQ ID NO: 1469997 - DNA, 15 bp, Homo sapiens
gaagcctgggcctat

SEQ ID NO: 1469998 - DNA, 15 bp, Homo sapiens
cgaagcctgggccta

SEQ ID NO: 1469999 - DNA, 15 bp, Homo sapiens
acgaagcctgggcct

SEQ ID NO: 1470000 - DNA, 15 bp, Homo sapiens
cacgaagcctgggcc

SEQ ID NO: 1470001 - DNA, 15 bp, Homo sapiens
gcacgaagcctgggc

SEQ ID NO: 1470002 - DNA, 15 bp, Homo sapiens
agcacgaagcctggg

SEQ ID NO: 1470003 - DNA, 15 bp, Homo sapiens
gagcacgaagcctgg

SEQ ID NO: 1470004 - DNA, 15 bp, Homo sapiens
ggagcacgaagcctg

SEQ ID NO: 1470005 - DNA, 15 bp, Homo sapiens
gggagcacgaagcct

SEQ ID NO: 1470006 - DNA, 15 bp, Homo sapiens
ggggagcacgaagcc

SEQ ID NO: 1470007 - DNA, 15 bp, Homo sapiens
tggggagcacgaagc

SEQ ID NO: 1470008 - DNA, 15 bp, Homo sapiens
gtggggagcacgaag

SEQ ID NO: 1470009 - DNA, 15 bp, Homo sapiens
ggtggggagcacgaa

SEQ ID NO: 1470010 - DNA, 15 bp, Homo sapiens
gggtggggagcacga

SEQ ID NO: 1470011 - DNA, 15 bp, Homo sapiens
agggtggggagcacg

SEQ ID NO: 1470012 - DNA, 15 bp, Homo sapiens
aagggtggggagcac

SEQ ID NO: 1470013 - DNA, 15 bp, Homo sapiens
caagggtggggagca

SEQ ID NO: 1470014 - DNA, 15 bp, Homo sapiens
ccaagggtggggagc

SEQ ID NO: 1470015 - DNA, 15 bp, Homo sapiens
gccaagggtggggag

SEQ ID NO: 1470016 - DNA, 15 bp, Homo sapiens
tgccaagggtgggga

SEQ ID NO: 1470017 - DNA, 15 bp, Homo sapiens
ttgccaagggtgggg

SEQ ID NO: 1470018 - DNA, 15 bp, Homo sapiens
cttgccaagggtggg

SEQ ID NO: 1470019 - DNA, 15 bp, Homo sapiens
acttgccaagggtgg

SEQ ID NO: 1470020 - DNA, 15 bp, Homo sapiens
aacttgccaagggtg

SEQ ID NO: 1470021 - DNA, 15 bp, Homo sapiens
gaacttgccaagggt

SEQ ID NO: 1470022 - DNA, 15 bp, Homo sapiens
agaacttgccaaggg

SEQ ID NO: 1470023 - DNA, 15 bp, Homo sapiens
gagaacttgccaagg

SEQ ID NO: 1470024 - DNA, 15 bp, Homo sapiens
ggagaacttgccaag

SEQ ID NO: 1470025 - DNA, 15 bp, Homo sapiens
gggagaacttgccaa

SEQ ID NO: 1470026 - DNA, 15 bp, Homo sapiens
ggggagaacttgcca

SEQ ID NO: 1470027 - DNA, 15 bp, Homo sapiens
tggggagaacttgcc

SEQ ID NO: 1470028 - DNA, 15 bp, Homo sapiens
gtggggagaacttgc

SEQ ID NO: 1470029 - DNA, 15 bp, Homo sapiens
ggtggggagaacttg

SEQ ID NO: 1470030 - DNA, 15 bp, Homo sapiens
gggtggggagaactt

SEQ ID NO: 1470031 - DNA, 15 bp, Homo sapiens
ggggtggggagaact

SEQ ID NO: 1470032 - DNA, 15 bp, Homo sapiens
gggggtggggagaac

SEQ ID NO: 1470033 - DNA, 15 bp, Homo sapiens
tgggggtggggagaa

SEQ ID NO: 1470034 - DNA, 15 bp, Homo sapiens
ctgggggtggggaga

SEQ ID NO: 1470035 - DNA, 15 bp, Homo sapiens
gctgggggtggggag

SEQ ID NO: 1470036 - DNA, 15 bp, Homo sapiens
ggctgggggtgggga

SEQ ID NO: 1470037 - DNA, 15 bp, Homo sapiens
gggctgggggtgggg

SEQ ID NO: 1470038 - DNA, 15 bp, Homo sapiens
ggggctgggggtggg

SEQ ID NO: 1470039 - DNA, 15 bp, Homo sapiens
tggggctgggggtgg

SEQ ID NO: 1470040 - DNA, 15 bp, Homo sapiens
gtggggctgggggtg

SEQ ID NO: 1470041 - DNA, 15 bp, Homo sapiens
tgtggggctgggggt

SEQ ID NO: 1470042 - DNA, 15 bp, Homo sapiens
ctgtggggctggggg

SEQ ID NO: 1470043 - DNA, 15 bp, Homo sapiens
actgtggggctgggg

SEQ ID NO: 1470044 - DNA, 15 bp, Homo sapiens
aactgtggggctggg

SEQ ID NO: 1470045 - DNA, 15 bp, Homo sapiens
aaactgtggggctgg

SEQ ID NO: 1470046 - DNA, 15 bp, Homo sapiens
taaactgtggggctg

SEQ ID NO: 1470047 - DNA, 15 bp, Homo sapiens
ataaactgtggggct

SEQ ID NO: 1470048 - DNA, 15 bp, Homo sapiens
aataaactgtggggc

SEQ ID NO: 1470049 - DNA, 15 bp, Homo sapiens
taataaactgtgggg

SEQ ID NO: 1470050 - DNA, 15 bp, Homo sapiens
ttaataaactgtggg

SEQ ID NO: 1470051 - DNA, 15 bp, Homo sapiens
tttaataaactgtgg

SEQ ID NO: 1470052 - DNA, 15 bp, Homo sapiens
atttaataaactgtg

SEQ ID NO: 1470053 - DNA, 15 bp, Homo sapiens
catttaataaactgt

SEQ ID NO: 1470054 - DNA, 15 bp, Homo sapiens
acatttaataaactg

SEQ ID NO: 1470055 - DNA, 15 bp, Homo sapiens
aacatttaataaact

SEQ ID NO: 1470056 - DNA, 15 bp, Homo sapiens
aaacatttaataaac

SEQ ID NO: 1470057 - DNA, 15 bp, Homo sapiens
caaacatttaataaa

SEQ ID NO: 1470058 - DNA, 15 bp, Homo sapiens
tcaaacatttaataa

SEQ ID NO: 1470059 - DNA, 15 bp, Homo sapiens
atcaaacatttaata

SEQ ID NO: 1470060 - DNA, 15 bp, Homo sapiens
aatcaaacatttaat

SEQ ID NO: 1470061 - DNA, 15 bp, Homo sapiens
aaatcaaacatttaa

SEQ ID NO: 1470062 - DNA, 15 bp, Homo sapiens
aaaatcaaacattta

SEQ ID NO: 1470063 - DNA, 15 bp, Homo sapiens
gaaaatcaaacattt

SEQ ID NO: 1470064 - DNA, 15 bp, Homo sapiens
tgaaaatcaaacatt

SEQ ID NO: 1470065 - DNA, 15 bp, Homo sapiens
ttgaaaatcaaacat

SEQ ID NO: 1470066 - DNA, 15 bp, Homo sapiens
gttgaaaatcaaaca

SEQ ID NO: 1470067 - DNA, 15 bp, Homo sapiens
ggttgaaaatcaaac

SEQ ID NO: 1470068 - DNA, 15 bp, Homo sapiens
aggttgaaaatcaaa

SEQ ID NO: 1470069 - DNA, 15 bp, Homo sapiens
caggttgaaaatcaa

SEQ ID NO: 1470070 - DNA, 15 bp, Homo sapiens
ccaggttgaaaatca

SEQ ID NO: 1470071 - DNA, 15 bp, Homo sapiens
gccaggttgaaaatc

SEQ ID NO: 1470072 - DNA, 15 bp, Homo sapiens
ggccaggttgaaaat

SEQ ID NO: 1470073 - DNA, 15 bp, Homo sapiens
tggccaggttgaaaa

SEQ ID NO: 1470074 - DNA, 15 bp, Homo sapiens
gtggccaggttgaaa

SEQ ID NO: 1470075 - DNA, 15 bp, Homo sapiens
cgtggccaggttgaa

SEQ ID NO: 1470076 - DNA, 15 bp, Homo sapiens
gcgtggccaggttga

SEQ ID NO: 1470077 - DNA, 15 bp, Homo sapiens
agcgtggccaggttg

SEQ ID NO: 1470078 - DNA, 15 bp, Homo sapiens
aagcgtggccaggtt

SEQ ID NO: 1470079 - DNA, 15 bp, Homo sapiens
gaagcgtggccaggt

SEQ ID NO: 1470080 - DNA, 15 bp, Homo sapiens
ggaagcgtggccagg

SEQ ID NO: 1470081 - DNA, 15 bp, Homo sapiens
aggaagcgtggccag

SEQ ID NO: 1470082 - DNA, 15 bp, Homo sapiens
aaggaagcgtggcca

SEQ ID NO: 1470083 - DNA, 15 bp, Homo sapiens
caaggaagcgtggcc

SEQ ID NO: 1470084 - DNA, 15 bp, Homo sapiens
gcaaggaagcgtggc

SEQ ID NO: 1470085 - DNA, 15 bp, Homo sapiens
ggcaaggaagcgtgg

SEQ ID NO: 1470086 - DNA, 15 bp, Homo sapiens
tggcaaggaagcgtg

SEQ ID NO: 1470087 - DNA, 15 bp, Homo sapiens
gtggcaaggaagcgt

SEQ ID NO: 1470088 - DNA, 15 bp, Homo sapiens
tgtggcaaggaagcg

SEQ ID NO: 1470089 - DNA, 15 bp, Homo sapiens
ctgtggcaaggaagc

SEQ ID NO: 1470090 - DNA, 15 bp, Homo sapiens
tctgtggcaaggaag

SEQ ID NO: 1470091 - DNA, 15 bp, Homo sapiens
ctctgtggcaaggaa

SEQ ID NO: 1470092 - DNA, 15 bp, Homo sapiens
cctctgtggcaagga

SEQ ID NO: 1470093 - DNA, 15 bp, Homo sapiens
gcctctgtggcaagg

SEQ ID NO: 1470094 - DNA, 15 bp, Homo sapiens
agcctctgtggcaag

SEQ ID NO: 1470095 - DNA, 15 bp, Homo sapiens
cagcctctgtggcaa

SEQ ID NO: 1470096 - DNA, 15 bp, Homo sapiens
tcagcctctgtggca

SEQ ID NO: 1470097 - DNA, 15 bp, Homo sapiens
ttcagcctctgtggc

SEQ ID NO: 1470098 - DNA, 15 bp, Homo sapiens
tttcagcctctgtgg

SEQ ID NO: 1470099 - DNA, 15 bp, Homo sapiens
ctttcagcctctgtg

SEQ ID NO: 1470100 - DNA, 15 bp, Homo sapiens
gctttcagcctctgt

SEQ ID NO: 1470101 - DNA, 15 bp, Homo sapiens
tgctttcagcctctg

SEQ ID NO: 1470102 - DNA, 15 bp, Homo sapiens
gtgctttcagcctct

SEQ ID NO: 1470103 - DNA, 15 bp, Homo sapiens
ggtgctttcagcctc

SEQ ID NO: 1470104 - DNA, 15 bp, Homo sapiens
gggtgctttcagcct

SEQ ID NO: 1470105 - DNA, 15 bp, Homo sapiens
ggggtgctttcagcc

SEQ ID NO: 1470106 - DNA, 15 bp, Homo sapiens
aggggtgctttcagc

SEQ ID NO: 1470107 - DNA, 15 bp, Homo sapiens
caggggtgctttcag

SEQ ID NO: 1470108 - DNA, 15 bp, Homo sapiens
tcaggggtgctttca

SEQ ID NO: 1470109 - DNA, 15 bp, Homo sapiens
ctcaggggtgctttc

SEQ ID NO: 1470110 - DNA, 15 bp, Homo sapiens
gctcaggggtgcttt

SEQ ID NO: 1470111 - DNA, 15 bp, Homo sapiens
agctcaggggtgctt

SEQ ID NO: 1470112 - DNA, 15 bp, Homo sapiens
gagctcaggggtgct

SEQ ID NO: 1470113 - DNA, 15 bp, Homo sapiens
ggagctcaggggtgc

SEQ ID NO: 1470114 - DNA, 15 bp, Homo sapiens
tggagctcaggggtg

SEQ ID NO: 1470115 - DNA, 15 bp, Homo sapiens
ttggagctcaggggt

SEQ ID NO: 1470116 - DNA, 15 bp, Homo sapiens
cttggagctcagggg

SEQ ID NO: 1470117 - DNA, 15 bp, Homo sapiens
ccttggagctcaggg

SEQ ID NO: 1470118 - DNA, 15 bp, Homo sapiens
tccttggagctcagg

SEQ ID NO: 1470119 - DNA, 15 bp, Homo sapiens
ttccttggagctcag

SEQ ID NO: 1470120 - DNA, 15 bp, Homo sapiens
tttccttggagctca

SEQ ID NO: 1470121 - DNA, 15 bp, Homo sapiens
gtttccttggagctc

SEQ ID NO: 1470122 - DNA, 15 bp, Homo sapiens
tgtttccttggagct

SEQ ID NO: 1470123 - DNA, 15 bp, Homo sapiens
gtgtttccttggagc

SEQ ID NO: 1470124 - DNA, 15 bp, Homo sapiens
tgtgtttccttggag

SEQ ID NO: 1470125 - DNA, 15 bp, Homo sapiens
ctgtgtttccttgga

SEQ ID NO: 1470126 - DNA, 15 bp, Homo sapiens
gctgtgtttccttgg

SEQ ID NO: 1470127 - DNA, 15 bp, Homo sapiens
tgctgtgtttccttg

SEQ ID NO: 1470128 - DNA, 15 bp, Homo sapiens
ttgctgtgtttcctt

SEQ ID NO: 1470129 - DNA, 15 bp, Homo sapiens
cttgctgtgtttcct

SEQ ID NO: 1470130 - DNA, 15 bp, Homo sapiens
gcttgctgtgtttcc

SEQ ID NO: 1470131 - DNA, 15 bp, Homo sapiens
ggcttgctgtgtttc

SEQ ID NO: 1470132 - DNA, 15 bp, Homo sapiens
gggcttgctgtgttt

SEQ ID NO: 1470133 - DNA, 15 bp, Homo sapiens
agggcttgctgtgtt

SEQ ID NO: 1470134 - DNA, 15 bp, Homo sapiens
aagggcttgctgtgt

SEQ ID NO: 1470135 - DNA, 15 bp, Homo sapiens
aaagggcttgctgtg

SEQ ID NO: 1470136 - DNA, 15 bp, Homo sapiens
gaaagggcttgctgt

SEQ ID NO: 1470137 - DNA, 15 bp, Homo sapiens
agaaagggcttgctg

SEQ ID NO: 1470138 - DNA, 15 bp, Homo sapiens
aagaaagggcttgct

SEQ ID NO: 1470139 - DNA, 15 bp, Homo sapiens
taagaaagggcttgc

SEQ ID NO: 1470140 - DNA, 15 bp, Homo sapiens
gtaagaaagggcttg

SEQ ID NO: 1470141 - DNA, 15 bp, Homo sapiens
ggtaagaaagggctt

SEQ ID NO: 1470142 - DNA, 15 bp, Homo sapiens
gggtaagaaagggct

SEQ ID NO: 1470143 - DNA, 15 bp, Homo sapiens
agggtaagaaagggc

SEQ ID NO: 1470144 - DNA, 15 bp, Homo sapiens
gagggtaagaaaggg

SEQ ID NO: 1470145 - DNA, 15 bp, Homo sapiens
cgagggtaagaaagg

SEQ ID NO: 1470146 - DNA, 15 bp, Homo sapiens
ccgagggtaagaaag

SEQ ID NO: 1470147 - DNA, 15 bp, Homo sapiens
cccgagggtaagaaa

SEQ ID NO: 1470148 - DNA, 15 bp, Homo sapiens
tcccgagggtaagaa

SEQ ID NO: 1470149 - DNA, 15 bp, Homo sapiens
ctcccgagggtaaga

SEQ ID NO: 1470150 - DNA, 15 bp, Homo sapiens
cctcccgagggtaag

SEQ ID NO: 1470151 - DNA, 15 bp, Homo sapiens
ccctcccgagggtaa

SEQ ID NO: 1470152 - DNA, 15 bp, Homo sapiens
tccctcccgagggta

SEQ ID NO: 1470153 - DNA, 15 bp, Homo sapiens
atccctcccgagggt

SEQ ID NO: 1470154 - DNA, 15 bp, Homo sapiens
tatccctcccgaggg

SEQ ID NO: 1470155 - DNA, 15 bp, Homo sapiens
ctatccctcccgagg

SEQ ID NO: 1470156 - DNA, 15 bp, Homo sapiens
cctatccctcccgag

SEQ ID NO: 1470157 - DNA, 15 bp, Homo sapiens
tcctatccctcccga

SEQ ID NO: 1470158 - DNA, 15 bp, Homo sapiens
ctcctatccctcccg

SEQ ID NO: 1470159 - DNA, 15 bp, Homo sapiens
cctcctatccctccc

SEQ ID NO: 1470160 - DNA, 15 bp, Homo sapiens
ccctcctatccctcc

SEQ ID NO: 1470161 - DNA, 15 bp, Homo sapiens
tccctcctatccctc

SEQ ID NO: 1470162 - DNA, 15 bp, Homo sapiens
gtccctcctatccct

SEQ ID NO: 1470163 - DNA, 15 bp, Homo sapiens
tgtccctcctatccc

SEQ ID NO: 1470164 - DNA, 15 bp, Homo sapiens
ctgtccctcctatcc

SEQ ID NO: 1470165 - DNA, 15 bp, Homo sapiens
gctgtccctcctatc

SEQ ID NO: 1470166 - DNA, 15 bp, Homo sapiens
tgctgtccctcctat

SEQ ID NO: 1470167 - DNA, 15 bp, Homo sapiens
gtgctgtccctccta

SEQ ID NO: 1470168 - DNA, 15 bp, Homo sapiens
tgtgctgtccctcct

SEQ ID NO: 1470169 - DNA, 15 bp, Homo sapiens
atgtgctgtccctcc

SEQ ID NO: 1470170 - DNA, 15 bp, Homo sapiens
gatgtgctgtccctc

SEQ ID NO: 1470171 - DNA, 15 bp, Homo sapiens
cgatgtgctgtccct

SEQ ID NO: 1470172 - DNA, 15 bp, Homo sapiens
ccgatgtgctgtccc

SEQ ID NO: 1470173 - DNA, 15 bp, Homo sapiens
tccgatgtgctgtcc

SEQ ID NO: 1470174 - DNA, 15 bp, Homo sapiens
ttccgatgtgctgtc

SEQ ID NO: 1470175 - DNA, 15 bp, Homo sapiens
cttccgatgtgctgt

SEQ ID NO: 1470176 - DNA, 15 bp, Homo sapiens
tcttccgatgtgctg

SEQ ID NO: 1470177 - DNA, 15 bp, Homo sapiens
ctcttccgatgtgct

SEQ ID NO: 1470178 - DNA, 15 bp, Homo sapiens
gctcttccgatgtgc

SEQ ID NO: 1470179 - DNA, 15 bp, Homo sapiens
tgctcttccgatgtg

SEQ ID NO: 1470180 - DNA, 15 bp, Homo sapiens
ctgctcttccgatgt

SEQ ID NO: 1470181 - DNA, 15 bp, Homo sapiens
actgctcttccgatg

SEQ ID NO: 1470182 - DNA, 15 bp, Homo sapiens
gactgctcttccgat

SEQ ID NO: 1470183 - DNA, 15 bp, Homo sapiens
tgactgctcttccga

SEQ ID NO: 1470184 - DNA, 15 bp, Homo sapiens
gtgactgctcttccg

SEQ ID NO: 1470185 - DNA, 15 bp, Homo sapiens
agtgactgctcttcc

SEQ ID NO: 1470186 - DNA, 15 bp, Homo sapiens
aagtgactgctcttc

SEQ ID NO: 1470187 - DNA, 15 bp, Homo sapiens
caagtgactgctctt

SEQ ID NO: 1470188 - DNA, 15 bp, Homo sapiens
gcaagtgactgctct

SEQ ID NO: 1470189 - DNA, 15 bp, Homo sapiens
ggcaagtgactgctc

SEQ ID NO: 1470190 - DNA, 15 bp, Homo sapiens
aggcaagtgactgct

SEQ ID NO: 1470191 - DNA, 15 bp, Homo sapiens
gaggcaagtgactgc

SEQ ID NO: 1470192 - DNA, 15 bp, Homo sapiens
tgaggcaagtgactg

SEQ ID NO: 1470193 - DNA, 15 bp, Homo sapiens
ctgaggcaagtgact

SEQ ID NO: 1470194 - DNA, 15 bp, Homo sapiens
gctgaggcaagtgac

SEQ ID NO: 1470195 - DNA, 15 bp, Homo sapiens
agctgaggcaagtga

SEQ ID NO: 1470196 - DNA, 15 bp, Homo sapiens
cagctgaggcaagtg

SEQ ID NO: 1470197 - DNA, 15 bp, Homo sapiens
tcagctgaggcaagt

SEQ ID NO: 1470198 - DNA, 15 bp, Homo sapiens
gtcagctgaggcaag

SEQ ID NO: 1470199 - DNA, 15 bp, Homo sapiens
ggtcagctgaggcaa

SEQ ID NO: 1470200 - DNA, 15 bp, Homo sapiens
aggtcagctgaggca

SEQ ID NO: 1470201 - DNA, 15 bp, Homo sapiens
gaggtcagctgaggc

SEQ ID NO: 1470202 - DNA, 15 bp, Homo sapiens
agaggtcagctgagg

SEQ ID NO: 1470203 - DNA, 15 bp, Homo sapiens
cagaggtcagctgag

SEQ ID NO: 1470204 - DNA, 15 bp, Homo sapiens
gcagaggtcagctga

SEQ ID NO: 1470205 - DNA, 15 bp, Homo sapiens
ggcagaggtcagctg

SEQ ID NO: 1470206 - DNA, 15 bp, Homo sapiens
gggcagaggtcagct

SEQ ID NO: 1470207 - DNA, 15 bp, Homo sapiens
tgggcagaggtcagc

SEQ ID NO: 1470208 - DNA, 15 bp, Homo sapiens
atgggcagaggtcag

SEQ ID NO: 1470209 - DNA, 15 bp, Homo sapiens
gatgggcagaggtca

SEQ ID NO: 1470210 - DNA, 15 bp, Homo sapiens
agatgggcagaggtc

SEQ ID NO: 1470211 - DNA, 15 bp, Homo sapiens
cagatgggcagaggt

SEQ ID NO: 1470212 - DNA, 15 bp, Homo sapiens
tcagatgggcagagg

SEQ ID NO: 1470213 - DNA, 15 bp, Homo sapiens
ttcagatgggcagag

SEQ ID NO: 1470214 - DNA, 15 bp, Homo sapiens
cttcagatgggcaga

SEQ ID NO: 1470215 - DNA, 15 bp, Homo sapiens
gcttcagatgggcag

SEQ ID NO: 1470216 - DNA, 15 bp, Homo sapiens
ggcttcagatgggca

SEQ ID NO: 1470217 - DNA, 15 bp, Homo sapiens
cggcttcagatgggc

SEQ ID NO: 1470218 - DNA, 15 bp, Homo sapiens
gcggcttcagatggg

SEQ ID NO: 1470219 - DNA, 15 bp, Homo sapiens
ggcggcttcagatgg

SEQ ID NO: 1470220 - DNA, 15 bp, Homo sapiens
aggcggcttcagatg

SEQ ID NO: 1470221 - DNA, 15 bp, Homo sapiens
gaggcggcttcagat

SEQ ID NO: 1470222 - DNA, 15 bp, Homo sapiens
agaggcggcttcaga

SEQ ID NO: 1470223 - DNA, 15 bp, Homo sapiens
gagaggcggcttcag

SEQ ID NO: 1470224 - DNA, 15 bp, Homo sapiens
ggagaggcggcttca

SEQ ID NO: 1470225 - DNA, 15 bp, Homo sapiens
gggagaggcggcttc

SEQ ID NO: 1470226 - DNA, 15 bp, Homo sapiens
tgggagaggcggctt

SEQ ID NO: 1470227 - DNA, 15 bp, Homo sapiens
ctgggagaggcggct

SEQ ID NO: 1470228 - DNA, 15 bp, Homo sapiens
tctgggagaggcggc

SEQ ID NO: 1470229 - DNA, 15 bp, Homo sapiens
ctctgggagaggcgg

SEQ ID NO: 1470230 - DNA, 15 bp, Homo sapiens
tctctgggagaggcg

SEQ ID NO: 1470231 - DNA, 15 bp, Homo sapiens
ttctctgggagaggc

SEQ ID NO: 1470232 - DNA, 15 bp, Homo sapiens
attctctgggagagg

SEQ ID NO: 1470233 - DNA, 15 bp, Homo sapiens
gattctctgggagag

SEQ ID NO: 1470234 - DNA, 15 bp, Homo sapiens
ggattctctgggaga

SEQ ID NO: 1470235 - DNA, 15 bp, Homo sapiens
gggattctctgggag

SEQ ID NO: 1470236 - DNA, 15 bp, Homo sapiens
tgggattctctggga

SEQ ID NO: 1470237 - DNA, 15 bp, Homo sapiens
gtgggattctctggg

SEQ ID NO: 1470238 - DNA, 15 bp, Homo sapiens
tgtgggattctctgg

SEQ ID NO: 1470239 - DNA, 15 bp, Homo sapiens
gtgtgggattctctg

SEQ ID NO: 1470240 - DNA, 15 bp, Homo sapiens
ggtgtgggattctct

SEQ ID NO: 1470241 - DNA, 15 bp, Homo sapiens
gggtgtgggattctc

SEQ ID NO: 1470242 - DNA, 15 bp, Homo sapiens
ggggtgtgggattct

SEQ ID NO: 1470243 - DNA, 15 bp, Homo sapiens
tggggtgtgggattc

SEQ ID NO: 1470244 - DNA, 15 bp, Homo sapiens
atggggtgtgggatt

SEQ ID NO: 1470245 - DNA, 15 bp, Homo sapiens
catggggtgtgggat

SEQ ID NO: 1470246 - DNA, 15 bp, Homo sapiens
gcatggggtgtggga

SEQ ID NO: 1470247 - DNA, 15 bp, Homo sapiens
agggcatggggtgtg

SEQ ID NO: 1470248 - DNA, 15 bp, Homo sapiens
cagggcatggggtgt

SEQ ID NO: 1470249 - DNA, 15 bp, Homo sapiens
ccagggcatggggtg

SEQ ID NO: 1470250 - DNA, 15 bp, Homo sapiens
accagggcatggggt

SEQ ID NO: 1470251 - DNA, 15 bp, Homo sapiens
caccagggcatgggg

SEQ ID NO: 1470252 - DNA, 15 bp, Homo sapiens
acaccagggcatggg

SEQ ID NO: 1470253 - DNA, 15 bp, Homo sapiens
gacaccagggcatgg

SEQ ID NO: 1470254 - DNA, 15 bp, Homo sapiens
agacaccagggcatg

SEQ ID NO: 1470255 - DNA, 15 bp, Homo sapiens
gagacaccagggcat

SEQ ID NO: 1470256 - DNA, 15 bp, Homo sapiens
tgagacaccagggca

SEQ ID NO: 1470257 - DNA, 15 bp, Homo sapiens
atgagacaccagggc

SEQ ID NO: 1470258 - DNA, 15 bp, Homo sapiens
gatgagacaccaggg

SEQ ID NO: 1470259 - DNA, 15 bp, Homo sapiens
ggatgagacaccagg

SEQ ID NO: 1470260 - DNA, 15 bp, Homo sapiens
aggatgagacaccag

SEQ ID NO: 1470261 - DNA, 15 bp, Homo sapiens
aaggatgagacacca

SEQ ID NO: 1470262 - DNA, 15 bp, Homo sapiens
aaaggatgagacacc

SEQ ID NO: 1470263 - DNA, 15 bp, Homo sapiens
caaaggatgagacac

SEQ ID NO: 1470264 - DNA, 15 bp, Homo sapiens
gcaaaggatgagaca

SEQ ID NO: 1470265 - DNA, 15 bp, Homo sapiens
agcaaaggatgagac

SEQ ID NO: 1470266 - DNA, 15 bp, Homo sapiens
gagcaaaggatgaga

SEQ ID NO: 1470267 - DNA, 15 bp, Homo sapiens
ggagcaaaggatgag

SEQ ID NO: 1470268 - DNA, 15 bp, Homo sapiens
aggagcaaaggatga

SEQ ID NO: 1470269 - DNA, 15 bp, Homo sapiens
gaggagcaaaggatg

SEQ ID NO: 1470270 - DNA, 15 bp, Homo sapiens
ggaggagcaaaggat

SEQ ID NO: 1470271 - DNA, 15 bp, Homo sapiens
gggaggagcaaagga

SEQ ID NO: 1470272 - DNA, 15 bp, Homo sapiens
ggggaggagcaaagg

SEQ ID NO: 1470273 - DNA, 15 bp, Homo sapiens
tggggaggagcaaag

SEQ ID NO: 1470274 - DNA, 15 bp, Homo sapiens
ctggggaggagcaaa

SEQ ID NO: 1470275 - DNA, 15 bp, Homo sapiens
gctggggaggagcaa

SEQ ID NO: 1470276 - DNA, 15 bp, Homo sapiens
agctggggaggagca

SEQ ID NO: 1470277 - DNA, 15 bp, Homo sapiens
gagctggggaggagc

SEQ ID NO: 1470278 - DNA, 15 bp, Homo sapiens
ggagctggggaggag

SEQ ID NO: 1470279 - DNA, 15 bp, Homo sapiens
aggagctggggagga

SEQ ID NO: 1470280 - DNA, 15 bp, Homo sapiens
aaggagctggggagg

SEQ ID NO: 1470281 - DNA, 15 bp, Homo sapiens
caaggagctggggag

SEQ ID NO: 1470282 - DNA, 15 bp, Homo sapiens
tcaaggagctgggga

SEQ ID NO: 1470283 - DNA, 15 bp, Homo sapiens
ttcaaggagctgggg

SEQ ID NO: 1470284 - DNA, 15 bp, Homo sapiens
cttcaaggagctggg

SEQ ID NO: 1470285 - DNA, 15 bp, Homo sapiens
gcttcaaggagctgg

SEQ ID NO: 1470286 - DNA, 15 bp, Homo sapiens
tgcttcaaggagctg

SEQ ID NO: 1470287 - DNA, 15 bp, Homo sapiens
ctgcttcaaggagct

SEQ ID NO: 1470288 - DNA, 15 bp, Homo sapiens
tctgcttcaaggagc

SEQ ID NO: 1470289 - DNA, 15 bp, Homo sapiens
ttctgcttcaaggag

SEQ ID NO: 1470290 - DNA, 15 bp, Homo sapiens
cttctgcttcaagga

SEQ ID NO: 1470291 - DNA, 15 bp, Homo sapiens
ccttctgcttcaagg

SEQ ID NO: 1470292 - DNA, 15 bp, Homo sapiens
gccttctgcttcaag

SEQ ID NO: 1470293 - DNA, 15 bp, Homo sapiens
tgccttctgcttcaa

SEQ ID NO: 1470294 - DNA, 15 bp, Homo sapiens
ctgccttctgcttca

SEQ ID NO: 1470295 - DNA, 15 bp, Homo sapiens
tctgccttctgcttc

SEQ ID NO: 1470296 - DNA, 15 bp, Homo sapiens
atctgccttctgctt

SEQ ID NO: 1470297 - DNA, 15 bp, Homo sapiens
aatctgccttctgct

SEQ ID NO: 1470298 - DNA, 15 bp, Homo sapiens
caatctgccttctgc

SEQ ID NO: 1470299 - DNA, 15 bp, Homo sapiens
acaatctgccttctg

SEQ ID NO: 1470300 - DNA, 15 bp, Homo sapiens
tacaatctgccttct

SEQ ID NO: 1470301 - DNA, 15 bp, Homo sapiens
ctacaatctgccttc

SEQ ID NO: 1470302 - DNA, 15 bp, Homo sapiens
gctacaatctgcctt

SEQ ID NO: 1470303 - DNA, 15 bp, Homo sapiens
ggctacaatctgcct

SEQ ID NO: 1470304 - DNA, 15 bp, Homo sapiens
aggctacaatctgcc

SEQ ID NO: 1470305 - DNA, 15 bp, Homo sapiens
gaggctacaatctgc

SEQ ID NO: 1470306 - DNA, 15 bp, Homo sapiens
ggaggctacaatctg

SEQ ID NO: 1470307 - DNA, 15 bp, Homo sapiens
aggaggctacaatct

SEQ ID NO: 1470308 - DNA, 15 bp, Homo sapiens
aaggaggctacaatc

SEQ ID NO: 1470309 - DNA, 15 bp, Homo sapiens
aaaggaggctacaat

SEQ ID NO: 1470310 - DNA, 15 bp, Homo sapiens
aaaaggaggctacaa

SEQ ID NO: 1470311 - DNA, 15 bp, Homo sapiens
aaaaaggaggctaca

SEQ ID NO: 1470312 - DNA, 15 bp, Homo sapiens
taaaaaggaggctac

SEQ ID NO: 1470313 - DNA, 15 bp, Homo sapiens
ctaaaaaggaggcta

SEQ ID NO: 1470314 - DNA, 15 bp, Homo sapiens
tctaaaaaggaggct

SEQ ID NO: 1470315 - DNA, 15 bp, Homo sapiens
ctctaaaaaggaggc

SEQ ID NO: 1470316 - DNA, 15 bp, Homo sapiens
gctctaaaaaggagg

SEQ ID NO: 1470317 - DNA, 15 bp, Homo sapiens
ggctctaaaaaggag

SEQ ID NO: 1470318 - DNA, 15 bp, Homo sapiens
tggctctaaaaagga

SEQ ID NO: 1470319 - DNA, 15 bp, Homo sapiens
ttggctctaaaaagg

SEQ ID NO: 1470320 - DNA, 15 bp, Homo sapiens
attggctctaaaaag

SEQ ID NO: 1470321 - DNA, 15 bp, Homo sapiens
aattggctctaaaaa

SEQ ID NO: 1470322 - DNA, 15 bp, Homo sapiens
gaattggctctaaaa

SEQ ID NO: 1470323 - DNA, 15 bp, Homo sapiens
agaattggctctaaa

SEQ ID NO: 1470324 - DNA, 15 bp, Homo sapiens
cagaattggctctaa

SEQ ID NO: 1470325 - DNA, 15 bp, Homo sapiens
acagaattggctcta

SEQ ID NO: 1470326 - DNA, 15 bp, Homo sapiens
aacagaattggctct

SEQ ID NO: 1470327 - DNA, 15 bp, Homo sapiens
aaacagaattggctc

SEQ ID NO: 1470328 - DNA, 15 bp, Homo sapiens
taaacagaattggct

SEQ ID NO: 1470329 - DNA, 15 bp, Homo sapiens
gtaaacagaattggc

SEQ ID NO: 1470330 - DNA, 15 bp, Homo sapiens
agtaaacagaattgg

SEQ ID NO: 1470331 - DNA, 15 bp, Homo sapiens
aagtaaacagaattg

SEQ ID NO: 1470332 - DNA, 15 bp, Homo sapiens
gaagtaaacagaatt

SEQ ID NO: 1470333 - DNA, 15 bp, Homo sapiens
ggaagtaaacagaat

SEQ ID NO: 1470334 - DNA, 15 bp, Homo sapiens
aggaagtaaacagaa

SEQ ID NO: 1470335 - DNA, 15 bp, Homo sapiens
taggaagtaaacaga

SEQ ID NO: 1470336 - DNA, 15 bp, Homo sapiens
ttaggaagtaaacag

SEQ ID NO: 1470337 - DNA, 15 bp, Homo sapiens
tttaggaagtaaaca

SEQ ID NO: 1470338 - DNA, 15 bp, Homo sapiens
ctttaggaagtaaac

SEQ ID NO: 1470339 - DNA, 15 bp, Homo sapiens
actttaggaagtaaa

SEQ ID NO: 1470340 - DNA, 15 bp, Homo sapiens
tactttaggaagtaa

SEQ ID NO: 1470341 - DNA, 15 bp, Homo sapiens
gtactttaggaagta

SEQ ID NO: 1470342 - DNA, 15 bp, Homo sapiens
tgtactttaggaagt

SEQ ID NO: 1470343 - DNA, 15 bp, Homo sapiens
ttgtactttaggaag

SEQ ID NO: 1470344 - DNA, 15 bp, Homo sapiens
tttgtactttaggaa

SEQ ID NO: 1470345 - DNA, 15 bp, Homo sapiens
gtttgtactttagga

SEQ ID NO: 1470346 - DNA, 15 bp, Homo sapiens
ggtttgtactttagg

SEQ ID NO: 1470347 - DNA, 15 bp, Homo sapiens
aggtttgtactttag

SEQ ID NO: 1470348 - DNA, 15 bp, Homo sapiens
taggtttgtacttta

SEQ ID NO: 1470349 - DNA, 15 bp, Homo sapiens
ataggtttgtacttt

SEQ ID NO: 1470350 - DNA, 15 bp, Homo sapiens
aataggtttgtactt

SEQ ID NO: 1470351 - DNA, 15 bp, Homo sapiens
aaataggtttgtact

SEQ ID NO: 1470352 - DNA, 15 bp, Homo sapiens
aaaataggtttgtac

SEQ ID NO: 1470353 - DNA, 15 bp, Homo sapiens
aaaaataggtttgta

SEQ ID NO: 1470354 - DNA, 15 bp, Homo sapiens
aaaaaataggtttgt

SEQ ID NO: 1470355 - DNA, 15 bp, Homo sapiens
aaaaaaataggtttg

SEQ ID NO: 1470356 - DNA, 15 bp, Homo sapiens
aaaaaaaataggttt

SEQ ID NO: 1470357 - DNA, 15 bp, Homo sapiens
taaaaaaaataggtt

SEQ ID NO: 1470358 - DNA, 15 bp, Homo sapiens
ttaaaaaaaataggt

SEQ ID NO: 1470359 - DNA, 15 bp, Homo sapiens
tttaaaaaaaatagg

SEQ ID NO: 1470360 - DNA, 15 bp, Homo sapiens
atttaaaaaaaatag

SEQ ID NO: 1470361 - DNA, 15 bp, Homo sapiens
tatttaaaaaaaata

SEQ ID NO: 1470362 - DNA, 15 bp, Homo sapiens
atatttaaaaaaaat

SEQ ID NO: 1470363 - DNA, 15 bp, Homo sapiens
tatatttaaaaaaaa

SEQ ID NO: 1470364 - DNA, 15 bp, Homo sapiens
ctatatttaaaaaaa

SEQ ID NO: 1470365 - DNA, 15 bp, Homo sapiens
tctatatttaaaaaa

SEQ ID NO: 1470366 - DNA, 15 bp, Homo sapiens
atctatatttaaaaa

SEQ ID NO: 1470367 - DNA, 15 bp, Homo sapiens
tatctatatttaaaa

SEQ ID NO: 1470368 - DNA, 15 bp, Homo sapiens
ctatctatatttaaa

SEQ ID NO: 1470369 - DNA, 15 bp, Homo sapiens
cctatctatatttaa

SEQ ID NO: 1470370 - DNA, 15 bp, Homo sapiens
ccctatctatattta

SEQ ID NO: 1470371 - DNA, 15 bp, Homo sapiens
accctatctatattt

SEQ ID NO: 1470372 - DNA, 15 bp, Homo sapiens
gaccctatctatatt

SEQ ID NO: 1470373 - DNA, 15 bp, Homo sapiens
agaccctatctatat

SEQ ID NO: 1470374 - DNA, 15 bp, Homo sapiens
gagaccctatctata

SEQ ID NO: 1470375 - DNA, 15 bp, Homo sapiens
tgagaccctatctat

SEQ ID NO: 1470376 - DNA, 15 bp, Homo sapiens
gtgagaccctatcta

SEQ ID NO: 1470377 - DNA, 15 bp, Homo sapiens
agtgagaccctatct

SEQ ID NO: 1470378 - DNA, 15 bp, Homo sapiens
gagtgagaccctatc

SEQ ID NO: 1470379 - DNA, 15 bp, Homo sapiens
agagtgagaccctat

SEQ ID NO: 1470380 - DNA, 15 bp, Homo sapiens
cagagtgagacccta

SEQ ID NO: 1470381 - DNA, 15 bp, Homo sapiens
ccccactgcactcca

SEQ ID NO: 1470382 - DNA, 15 bp, Homo sapiens
accccactgcactcc

SEQ ID NO: 1470383 - DNA, 15 bp, Homo sapiens
caccccactgcactc

SEQ ID NO: 1470384 - DNA, 15 bp, Homo sapiens
tcaccccactgcact

SEQ ID NO: 1470385 - DNA, 15 bp, Homo sapiens
atcaccccactgcac

SEQ ID NO: 1470386 - DNA, 15 bp, Homo sapiens
gatcaccccactgca

SEQ ID NO: 1470387 - DNA, 15 bp, Homo sapiens
tgatcaccccactgc

SEQ ID NO: 1470388 - DNA, 15 bp, Homo sapiens
atgatcaccccactg

SEQ ID NO: 1470389 - DNA, 15 bp, Homo sapiens
tatgatcaccccact

SEQ ID NO: 1470390 - DNA, 15 bp, Homo sapiens
ctatgatcaccccac

SEQ ID NO: 1470391 - DNA, 15 bp, Homo sapiens
gctatgatcacccca

SEQ ID NO: 1470392 - DNA, 15 bp, Homo sapiens
agctatgatcacccc

SEQ ID NO: 1470393 - DNA, 15 bp, Homo sapiens
gagctatgatcaccc

SEQ ID NO: 1470394 - DNA, 15 bp, Homo sapiens
tgagctatgatcacc

SEQ ID NO: 1470395 - DNA, 15 bp, Homo sapiens
atgagctatgatcac

SEQ ID NO: 1470396 - DNA, 15 bp, Homo sapiens
gatgagctatgatca

SEQ ID NO: 1470397 - DNA, 15 bp, Homo sapiens
tgatgagctatgatc

SEQ ID NO: 1470398 - DNA, 15 bp, Homo sapiens
atgatgagctatgat

SEQ ID NO: 1470399 - DNA, 15 bp, Homo sapiens
tatgatgagctatga

SEQ ID NO: 1470400 - DNA, 15 bp, Homo sapiens
ttatgatgagctatg

SEQ ID NO: 1470401 - DNA, 15 bp, Homo sapiens
gttatgatgagctat

SEQ ID NO: 1470402 - DNA, 15 bp, Homo sapiens
agttatgatgagcta

SEQ ID NO: 1470403 - DNA, 15 bp, Homo sapiens
aagttatgatgagct

SEQ ID NO: 1470404 - DNA, 15 bp, Homo sapiens
gaagttatgatgagc

SEQ ID NO: 1470405 - DNA, 15 bp, Homo sapiens
agaagttatgatgag

SEQ ID NO: 1470406 - DNA, 15 bp, Homo sapiens
tagaagttatgatga

SEQ ID NO: 1470407 - DNA, 15 bp, Homo sapiens
ttagaagttatgatg

SEQ ID NO: 1470408 - DNA, 15 bp, Homo sapiens
gttagaagttatgat

SEQ ID NO: 1470409 - DNA, 15 bp, Homo sapiens
agttagaagttatga

SEQ ID NO: 1470410 - DNA, 15 bp, Homo sapiens
gagttagaagttatg

SEQ ID NO: 1470411 - DNA, 15 bp, Homo sapiens
ggagttagaagttat

SEQ ID NO: 1470412 - DNA, 15 bp, Homo sapiens
aggagttagaagtta

SEQ ID NO: 1470413 - DNA, 15 bp, Homo sapiens
caggagttagaagtt

SEQ ID NO: 1470414 - DNA, 15 bp, Homo sapiens
ccaggagttagaagt

SEQ ID NO: 1470415 - DNA, 15 bp, Homo sapiens
cccaggagttagaag

SEQ ID NO: 1470416 - DNA, 15 bp, Homo sapiens
gcccaggagttagaa

SEQ ID NO: 1470417 - DNA, 15 bp, Homo sapiens
agcccaggagttaga

SEQ ID NO: 1470418 - DNA, 15 bp, Homo sapiens
gagcccaggagttag

SEQ ID NO: 1470419 - DNA, 15 bp, Homo sapiens
tgagcccaggagtta

SEQ ID NO: 1470420 - DNA, 15 bp, Homo sapiens
taaggcaggaggatt

SEQ ID NO: 1470421 - DNA, 15 bp, Homo sapiens
ctaaggcaggaggat

SEQ ID NO: 1470422 - DNA, 15 bp, Homo sapiens
gctaaggcaggagga

SEQ ID NO: 1470423 - DNA, 15 bp, Homo sapiens
ggctaaggcaggagg

SEQ ID NO: 1470424 - DNA, 15 bp, Homo sapiens
gctttgggaggctaa

SEQ ID NO: 1470425 - DNA, 15 bp, Homo sapiens
cgctttgggaggcta

SEQ ID NO: 1470426 - DNA, 15 bp, Homo sapiens
gcgctttgggaggct

SEQ ID NO: 1470427 - DNA, 15 bp, Homo sapiens
agcgctttgggaggc

SEQ ID NO: 1470428 - DNA, 15 bp, Homo sapiens
cagcgctttgggagg

SEQ ID NO: 1470429 - DNA, 15 bp, Homo sapiens
ccagcgctttgggag

SEQ ID NO: 1470430 - DNA, 15 bp, Homo sapiens
cccagcgctttggga

SEQ ID NO: 1470431 - DNA, 15 bp, Homo sapiens
tcccagcgctttggg

SEQ ID NO: 1470432 - DNA, 15 bp, Homo sapiens
atcccagcgctttgg

SEQ ID NO: 1470433 - DNA, 15 bp, Homo sapiens
aatcccagcgctttg

SEQ ID NO: 1470434 - DNA, 15 bp, Homo sapiens
taatcccagcgcttt

SEQ ID NO: 1470435 - DNA, 15 bp, Homo sapiens
gtaatcccagcgctt

SEQ ID NO: 1470436 - DNA, 15 bp, Homo sapiens
tgtaatcccagcgct

SEQ ID NO: 1470437 - DNA, 15 bp, Homo sapiens
ctgtaatcccagcgc

SEQ ID NO: 1470438 - DNA, 15 bp, Homo sapiens
cctgtaatcccagcg

SEQ ID NO: 1470439 - DNA, 15 bp, Homo sapiens
cggcgcagtggctca

SEQ ID NO: 1470440 - DNA, 15 bp, Homo sapiens
tcggcgcagtggctc

SEQ ID NO: 1470441 - DNA, 15 bp, Homo sapiens
ctcggcgcagtggct

SEQ ID NO: 1470442 - DNA, 15 bp, Homo sapiens
gctcggcgcagtggc

SEQ ID NO: 1470443 - DNA, 15 bp, Homo sapiens
ggctcggcgcagtgg

SEQ ID NO: 1470444 - DNA, 15 bp, Homo sapiens
gggctcggcgcagtg

SEQ ID NO: 1470445 - DNA, 15 bp, Homo sapiens
ggggctcggcgcagt

SEQ ID NO: 1470446 - DNA, 15 bp, Homo sapiens
aggggctcggcgcag

SEQ ID NO: 1470447 - DNA, 15 bp, Homo sapiens
taggggctcggcgca

SEQ ID NO: 1470448 - DNA, 15 bp, Homo sapiens
ttaggggctcggcgc

SEQ ID NO: 1470449 - DNA, 15 bp, Homo sapiens
tttaggggctcggcg

SEQ ID NO: 1470450 - DNA, 15 bp, Homo sapiens
ctttaggggctcggc

SEQ ID NO: 1470451 - DNA, 15 bp, Homo sapiens
gctttaggggctcgg

SEQ ID NO: 1470452 - DNA, 15 bp, Homo sapiens
tgctttaggggctcg

SEQ ID NO: 1470453 - DNA, 15 bp, Homo sapiens
gtgctttaggggctc

SEQ ID NO: 1470454 - DNA, 15 bp, Homo sapiens
ggtgctttaggggct

SEQ ID NO: 1470455 - DNA, 15 bp, Homo sapiens
tggtgctttaggggc

SEQ ID NO: 1470456 - DNA, 15 bp, Homo sapiens
ttggtgctttagggg

SEQ ID NO: 1470457 - DNA, 15 bp, Homo sapiens
tttggtgctttaggg

SEQ ID NO: 1470458 - DNA, 15 bp, Homo sapiens
atttggtgctttagg

SEQ ID NO: 1470459 - DNA, 15 bp, Homo sapiens
gatttggtgctttag

SEQ ID NO: 1470460 - DNA, 15 bp, Homo sapiens
agatttggtgcttta

SEQ ID NO: 1470461 - DNA, 15 bp, Homo sapiens
cagatttggtgcttt

SEQ ID NO: 1470462 - DNA, 15 bp, Homo sapiens
tcagatttggtgctt

SEQ ID NO: 1470463 - DNA, 15 bp, Homo sapiens
gtcagatttggtgct

SEQ ID NO: 1470464 - DNA, 15 bp, Homo sapiens
agtcagatttggtgc

SEQ ID NO: 1470465 - DNA, 15 bp, Homo sapiens
gagtcagatttggtg

SEQ ID NO: 1470466 - DNA, 15 bp, Homo sapiens
tgagtcagatttggt

SEQ ID NO: 1470467 - DNA, 15 bp, Homo sapiens
atgagtcagatttgg

SEQ ID NO: 1470468 - DNA, 15 bp, Homo sapiens
gatgagtcagatttg

SEQ ID NO: 1470469 - DNA, 15 bp, Homo sapiens
ggatgagtcagattt

SEQ ID NO: 1470470 - DNA, 15 bp, Homo sapiens
gggatgagtcagatt

SEQ ID NO: 1470471 - DNA, 15 bp, Homo sapiens
agggatgagtcagat

SEQ ID NO: 1470472 - DNA, 15 bp, Homo sapiens
aagggatgagtcaga

SEQ ID NO: 1470473 - DNA, 15 bp, Homo sapiens
gaagggatgagtcag

SEQ ID NO: 1470474 - DNA, 15 bp, Homo sapiens
agaagggatgagtca

SEQ ID NO: 1470475 - DNA, 15 bp, Homo sapiens
gagaagggatgagtc

SEQ ID NO: 1470476 - DNA, 15 bp, Homo sapiens
agagaagggatgagt

SEQ ID NO: 1470477 - DNA, 15 bp, Homo sapiens
cagagaagggatgag

SEQ ID NO: 1470478 - DNA, 15 bp, Homo sapiens
gcagagaagggatga

SEQ ID NO: 1470479 - DNA, 15 bp, Homo sapiens
tgcagagaagggatg

SEQ ID NO: 1470480 - DNA, 15 bp, Homo sapiens
atgcagagaagggat

SEQ ID NO: 1470481 - DNA, 15 bp, Homo sapiens
tatgcagagaaggga

SEQ ID NO: 1470482 - DNA, 15 bp, Homo sapiens
ttatgcagagaaggg

SEQ ID NO: 1470483 - DNA, 15 bp, Homo sapiens
tttatgcagagaagg

SEQ ID NO: 1470484 - DNA, 15 bp, Homo sapiens
ttttatgcagagaag

SEQ ID NO: 1470485 - DNA, 15 bp, Homo sapiens
gttttatgcagagaa

SEQ ID NO: 1470486 - DNA, 15 bp, Homo sapiens
ggttttatgcagaga

SEQ ID NO: 1470487 - DNA, 15 bp, Homo sapiens
tggttttatgcagag

SEQ ID NO: 1470488 - DNA, 15 bp, Homo sapiens
atggttttatgcaga

SEQ ID NO: 1470489 - DNA, 15 bp, Homo sapiens
gatggttttatgcag

SEQ ID NO: 1470490 - DNA, 15 bp, Homo sapiens
agatggttttatgca

SEQ ID NO: 1470491 - DNA, 15 bp, Homo sapiens
gagatggttttatgc

SEQ ID NO: 1470492 - DNA, 15 bp, Homo sapiens
tgagatggttttatg

SEQ ID NO: 1470493 - DNA, 15 bp, Homo sapiens
atgagatggttttat

SEQ ID NO: 1470494 - DNA, 15 bp, Homo sapiens
catgagatggtttta

SEQ ID NO: 1470495 - DNA, 15 bp, Homo sapiens
ccatgagatggtttt

SEQ ID NO: 1470496 - DNA, 15 bp, Homo sapiens
gccatgagatggttt

SEQ ID NO: 1470497 - DNA, 15 bp, Homo sapiens
cgccatgagatggtt

SEQ ID NO: 1470498 - DNA, 15 bp, Homo sapiens
gcgccatgagatggt

SEQ ID NO: 1470499 - DNA, 15 bp, Homo sapiens
ggcgccatgagatgg

SEQ ID NO: 1470500 - DNA, 15 bp, Homo sapiens
gggcgccatgagatg

SEQ ID NO: 1470501 - DNA, 15 bp, Homo sapiens
cgggcgccatgagat

SEQ ID NO: 1470502 - DNA, 15 bp, Homo sapiens
gcgggcgccatgaga

SEQ ID NO: 1470503 - DNA, 15 bp, Homo sapiens
agcgggcgccatgag

SEQ ID NO: 1470504 - DNA, 15 bp, Homo sapiens
cagcgggcgccatga

SEQ ID NO: 1470505 - DNA, 15 bp, Homo sapiens
gcagcgggcgccatg

SEQ ID NO: 1470506 - DNA, 15 bp, Homo sapiens
agcagcgggcgccat

SEQ ID NO: 1470507 - DNA, 15 bp, Homo sapiens
aagcagcgggcgcca

SEQ ID NO: 1470508 - DNA, 15 bp, Homo sapiens
caagcagcgggcgcc

SEQ ID NO: 1470509 - DNA, 15 bp, Homo sapiens
acaagcagcgggcgc

SEQ ID NO: 1470510 - DNA, 15 bp, Homo sapiens
gacaagcagcgggcg

SEQ ID NO: 1470511 - DNA, 15 bp, Homo sapiens
ggacaagcagcgggc

SEQ ID NO: 1470512 - DNA, 15 bp, Homo sapiens
aggacaagcagcggg

SEQ ID NO: 1470513 - DNA, 15 bp, Homo sapiens
gaggacaagcagcgg

SEQ ID NO: 1470514 - DNA, 15 bp, Homo sapiens
tgaggacaagcagcg

SEQ ID NO: 1470515 - DNA, 15 bp, Homo sapiens
ctgaggacaagcagc

SEQ ID NO: 1470516 - DNA, 15 bp, Homo sapiens
cctgaggacaagcag

SEQ ID NO: 1470517 - DNA, 15 bp, Homo sapiens
ccctgaggacaagca

SEQ ID NO: 1470518 - DNA, 15 bp, Homo sapiens
accctgaggacaagc

SEQ ID NO: 1470519 - DNA, 15 bp, Homo sapiens
gaccctgaggacaag

SEQ ID NO: 1470520 - DNA, 15 bp, Homo sapiens
tgaccctgaggacaa

SEQ ID NO: 1470521 - DNA, 15 bp, Homo sapiens
atgaccctgaggaca

SEQ ID NO: 1470522 - DNA, 15 bp, Homo sapiens
aatgaccctgaggac

SEQ ID NO: 1470523 - DNA, 15 bp, Homo sapiens
gaatgaccctgagga

SEQ ID NO: 1470524 - DNA, 15 bp, Homo sapiens
agaatgaccctgagg

SEQ ID NO: 1470525 - DNA, 15 bp, Homo sapiens
gagaatgaccctgag

SEQ ID NO: 1470526 - DNA, 15 bp, Homo sapiens
tgagaatgaccctga

SEQ ID NO: 1470527 - DNA, 15 bp, Homo sapiens
gtgagaatgaccctg

SEQ ID NO: 1470528 - DNA, 15 bp, Homo sapiens
tgtgagaatgaccct

SEQ ID NO: 1470529 - DNA, 15 bp, Homo sapiens
atgtgagaatgaccc

SEQ ID NO: 1470530 - DNA, 15 bp, Homo sapiens
aatgtgagaatgacc

SEQ ID NO: 1470531 - DNA, 15 bp, Homo sapiens
aaatgtgagaatgac

SEQ ID NO: 1470532 - DNA, 15 bp, Homo sapiens
caaatgtgagaatga

SEQ ID NO: 1470533 - DNA, 15 bp, Homo sapiens
acaaatgtgagaatg

SEQ ID NO: 1470534 - DNA, 15 bp, Homo sapiens
tacaaatgtgagaat

SEQ ID NO: 1470535 - DNA, 15 bp, Homo sapiens
ctacaaatgtgagaa

SEQ ID NO: 1470536 - DNA, 15 bp, Homo sapiens
cctacaaatgtgaga

SEQ ID NO: 1470537 - DNA, 15 bp, Homo sapiens
tcctacaaatgtgag

SEQ ID NO: 1470538 - DNA, 15 bp, Homo sapiens
atcctacaaatgtga

SEQ ID NO: 1470539 - DNA, 15 bp, Homo sapiens
gatcctacaaatgtg

SEQ ID NO: 1470540 - DNA, 15 bp, Homo sapiens
ggatcctacaaatgt

SEQ ID NO: 1470541 - DNA, 15 bp, Homo sapiens
gggatcctacaaatg

SEQ ID NO: 1470542 - DNA, 15 bp, Homo sapiens
ggggatcctacaaat

SEQ ID NO: 1470543 - DNA, 15 bp, Homo sapiens
gggggatcctacaaa

SEQ ID NO: 1470544 - DNA, 15 bp, Homo sapiens
ggggggatcctacaa

SEQ ID NO: 1470545 - DNA, 15 bp, Homo sapiens
tggggggatcctaca

SEQ ID NO: 1470546 - DNA, 15 bp, Homo sapiens
gtggggggatcctac

SEQ ID NO: 1470547 - DNA, 15 bp, Homo sapiens
ggtggggggatccta

SEQ ID NO: 1470548 - DNA, 15 bp, Homo sapiens
gggtggggggatcct

SEQ ID NO: 1470549 - DNA, 15 bp, Homo sapiens
ggggtggggggatcc

SEQ ID NO: 1470550 - DNA, 15 bp, Homo sapiens
gggggtggggggatc

SEQ ID NO: 1470551 - DNA, 15 bp, Homo sapiens
ggggggtggggggat

SEQ ID NO: 1470552 - DNA, 15 bp, Homo sapiens
tggggggtgggggga

SEQ ID NO: 1470553 - DNA, 15 bp, Homo sapiens
ctggggggtgggggg

SEQ ID NO: 1470554 - DNA, 15 bp, Homo sapiens
tctggggggtggggg

SEQ ID NO: 1470555 - DNA, 15 bp, Homo sapiens
atctggggggtgggg

SEQ ID NO: 1470556 - DNA, 15 bp, Homo sapiens
catctggggggtggg

SEQ ID NO: 1470557 - DNA, 15 bp, Homo sapiens
gcatctggggggtgg

SEQ ID NO: 1470558 - DNA, 15 bp, Homo sapiens
ggcatctggggggtg

SEQ ID NO: 1470559 - DNA, 15 bp, Homo sapiens
tggcatctggggggt

SEQ ID NO: 1470560 - DNA, 15 bp, Homo sapiens
ctggcatctgggggg

SEQ ID NO: 1470561 - DNA, 15 bp, Homo sapiens
tctggcatctggggg

SEQ ID NO: 1470562 - DNA, 15 bp, Homo sapiens
atctggcatctgggg

SEQ ID NO: 1470563 - DNA, 15 bp, Homo sapiens
tatctggcatctggg

SEQ ID NO: 1470564 - DNA, 15 bp, Homo sapiens
ctatctggcatctgg

SEQ ID NO: 1470565 - DNA, 15 bp, Homo sapiens
tctatctggcatctg

SEQ ID NO: 1470566 - DNA, 15 bp, Homo sapiens
ctctatctggcatct

SEQ ID NO: 1470567 - DNA, 15 bp, Homo sapiens
tctctatctggcatc

SEQ ID NO: 1470568 - DNA, 15 bp, Homo sapiens
gtctctatctggcat

SEQ ID NO: 1470569 - DNA, 15 bp, Homo sapiens
tgtctctatctggca

SEQ ID NO: 1470570 - DNA, 15 bp, Homo sapiens
ttgtctctatctggc

SEQ ID NO: 1470571 - DNA, 15 bp, Homo sapiens
cttgtctctatctgg

SEQ ID NO: 1470572 - DNA, 15 bp, Homo sapiens
tcttgtctctatctg

SEQ ID NO: 1470573 - DNA, 15 bp, Homo sapiens
atcttgtctctatct

SEQ ID NO: 1470574 - DNA, 15 bp, Homo sapiens
gatcttgtctctatc

SEQ ID NO: 1470575 - DNA, 15 bp, Homo sapiens
agatcttgtctctat

SEQ ID NO: 1470576 - DNA, 15 bp, Homo sapiens
cagatcttgtctcta

SEQ ID NO: 1470577 - DNA, 15 bp, Homo sapiens
ccagatcttgtctct

SEQ ID NO: 1470578 - DNA, 15 bp, Homo sapiens
cccagatcttgtctc

SEQ ID NO: 1470579 - DNA, 15 bp, Homo sapiens
ccccagatcttgtct

SEQ ID NO: 1470580 - DNA, 15 bp, Homo sapiens
accccagatcttgtc

SEQ ID NO: 1470581 - DNA, 15 bp, Homo sapiens
aaccccagatcttgt

SEQ ID NO: 1470582 - DNA, 15 bp, Homo sapiens
caaccccagatcttg

SEQ ID NO: 1470583 - DNA, 15 bp, Homo sapiens
gcaaccccagatctt

SEQ ID NO: 1470584 - DNA, 15 bp, Homo sapiens
tgcaaccccagatct

SEQ ID NO: 1470585 - DNA, 15 bp, Homo sapiens
ttgcaaccccagatc

SEQ ID NO: 1470586 - DNA, 15 bp, Homo sapiens
cttgcaaccccagat

SEQ ID NO: 1470587 - DNA, 15 bp, Homo sapiens
ccttgcaaccccaga

SEQ ID NO: 1470588 - DNA, 15 bp, Homo sapiens
accttgcaaccccag

SEQ ID NO: 1470589 - DNA, 15 bp, Homo sapiens
caccttgcaacccca

SEQ ID NO: 1470590 - DNA, 15 bp, Homo sapiens
gcaccttgcaacccc

SEQ ID NO: 1470591 - DNA, 15 bp, Homo sapiens
cgcaccttgcaaccc

SEQ ID NO: 1470592 - DNA, 15 bp, Homo sapiens
gcgcaccttgcaacc

SEQ ID NO: 1470593 - DNA, 15 bp, Homo sapiens
tgcgcaccttgcaac

SEQ ID NO: 1470594 - DNA, 15 bp, Homo sapiens
ctgcgcaccttgcaa

SEQ ID NO: 1470595 - DNA, 15 bp, Homo sapiens
cctgcgcaccttgca

SEQ ID NO: 1470596 - DNA, 15 bp, Homo sapiens
ccctgcgcaccttgc

SEQ ID NO: 1470597 - DNA, 15 bp, Homo sapiens
tccctgcgcaccttg

SEQ ID NO: 1470598 - DNA, 15 bp, Homo sapiens
ttccctgcgcacctt

SEQ ID NO: 1470599 - DNA, 15 bp, Homo sapiens
cttccctgcgcacct

SEQ ID NO: 1470600 - DNA, 15 bp, Homo sapiens
ccttccctgcgcacc

SEQ ID NO: 1470601 - DNA, 15 bp, Homo sapiens
gccttccctgcgcac

SEQ ID NO: 1470602 - DNA, 15 bp, Homo sapiens
tgccttccctgcgca

SEQ ID NO: 1470603 - DNA, 15 bp, Homo sapiens
gtgccttccctgcgc

SEQ ID NO: 1470604 - DNA, 15 bp, Homo sapiens
ggtgccttccctgcg

SEQ ID NO: 1470605 - DNA, 15 bp, Homo sapiens
gggtgccttccctgc

SEQ ID NO: 1470606 - DNA, 15 bp, Homo sapiens
ggggtgccttccctg

SEQ ID NO: 1470607 - DNA, 15 bp, Homo sapiens
aggggtgccttccct

SEQ ID NO: 1470608 - DNA, 15 bp, Homo sapiens
gaggggtgccttccc

SEQ ID NO: 1470609 - DNA, 15 bp, Homo sapiens
ggaggggtgccttcc

SEQ ID NO: 1470610 - DNA, 15 bp, Homo sapiens
aggaggggtgccttc

SEQ ID NO: 1470611 - DNA, 15 bp, Homo sapiens
caggaggggtgcctt

SEQ ID NO: 1470612 - DNA, 15 bp, Homo sapiens
gcaggaggggtgcct

SEQ ID NO: 1470613 - DNA, 15 bp, Homo sapiens
tgcaggaggggtgcc

SEQ ID NO: 1470614 - DNA, 15 bp, Homo sapiens
atgcaggaggggtgc

SEQ ID NO: 1470615 - DNA, 15 bp, Homo sapiens
aatgcaggaggggtg

SEQ ID NO: 1470616 - DNA, 15 bp, Homo sapiens
aaatgcaggaggggt

SEQ ID NO: 1470617 - DNA, 15 bp, Homo sapiens
caaatgcaggagggg

SEQ ID NO: 1470618 - DNA, 15 bp, Homo sapiens
gcaaatgcaggaggg

SEQ ID NO: 1470619 - DNA, 15 bp, Homo sapiens
agcaaatgcaggagg

SEQ ID NO: 1470620 - DNA, 15 bp, Homo sapiens
cagcaaatgcaggag

SEQ ID NO: 1470621 - DNA, 15 bp, Homo sapiens
acagcaaatgcagga

SEQ ID NO: 1470622 - DNA, 15 bp, Homo sapiens
aacagcaaatgcagg

SEQ ID NO: 1470623 - DNA, 15 bp, Homo sapiens
gaacagcaaatgcag

SEQ ID NO: 1470624 - DNA, 15 bp, Homo sapiens
agaacagcaaatgca

SEQ ID NO: 1470625 - DNA, 15 bp, Homo sapiens
gagaacagcaaatgc

SEQ ID NO: 1470626 - DNA, 15 bp, Homo sapiens
agagaacagcaaatg

SEQ ID NO: 1470627 - DNA, 15 bp, Homo sapiens
gagagaacagcaaat

SEQ ID NO: 1470628 - DNA, 15 bp, Homo sapiens
agagagaacagcaaa

SEQ ID NO: 1470629 - DNA, 15 bp, Homo sapiens
cagagagaacagcaa

SEQ ID NO: 1470630 - DNA, 15 bp, Homo sapiens
acagagagaacagca

SEQ ID NO: 1470631 - DNA, 15 bp, Homo sapiens
gacagagagaacagc

SEQ ID NO: 1470632 - DNA, 15 bp, Homo sapiens
agacagagagaacag

SEQ ID NO: 1470633 - DNA, 15 bp, Homo sapiens
cagacagagagaaca

SEQ ID NO: 1470634 - DNA, 15 bp, Homo sapiens
ccagacagagagaac

SEQ ID NO: 1470635 - DNA, 15 bp, Homo sapiens
tccagacagagagaa

SEQ ID NO: 1470636 - DNA, 15 bp, Homo sapiens
ttccagacagagaga

SEQ ID NO: 1470637 - DNA, 15 bp, Homo sapiens
cttccagacagagag

SEQ ID NO: 1470638 - DNA, 15 bp, Homo sapiens
gcttccagacagaga

SEQ ID NO: 1470639 - DNA, 15 bp, Homo sapiens
tgcttccagacagag

SEQ ID NO: 1470640 - DNA, 15 bp, Homo sapiens
atgcttccagacaga

SEQ ID NO: 1470641 - DNA, 15 bp, Homo sapiens
gatgcttccagacag

SEQ ID NO: 1470642 - DNA, 15 bp, Homo sapiens
agatgcttccagaca

SEQ ID NO: 1470643 - DNA, 15 bp, Homo sapiens
gagatgcttccagac

SEQ ID NO: 1470644 - DNA, 15 bp, Homo sapiens
agagatgcttccaga

SEQ ID NO: 1470645 - DNA, 15 bp, Homo sapiens
cagagatgcttccag

SEQ ID NO: 1470646 - DNA, 15 bp, Homo sapiens
gcagagatgcttcca

SEQ ID NO: 1470647 - DNA, 15 bp, Homo sapiens
ggcagagatgcttcc

SEQ ID NO: 1470648 - DNA, 15 bp, Homo sapiens
gggcagagatgcttc

SEQ ID NO: 1470649 - DNA, 15 bp, Homo sapiens
cgggcagagatgctt

SEQ ID NO: 1470650 - DNA, 15 bp, Homo sapiens
ccgggcagagatgct

SEQ ID NO: 1470651 - DNA, 15 bp, Homo sapiens
cccgggcagagatgc

SEQ ID NO: 1470652 - DNA, 15 bp, Homo sapiens
ccccgggcagagatg

SEQ ID NO: 1470653 - DNA, 15 bp, Homo sapiens
cccccgggcagagat

SEQ ID NO: 1470654 - DNA, 15 bp, Homo sapiens
ccccccgggcagaga

SEQ ID NO: 1470655 - DNA, 15 bp, Homo sapiens
accccccgggcagag

SEQ ID NO: 1470656 - DNA, 15 bp, Homo sapiens
gaccccccgggcaga

SEQ ID NO: 1470657 - DNA, 15 bp, Homo sapiens
ggaccccccgggcag

SEQ ID NO: 1470658 - DNA, 15 bp, Homo sapiens
aggaccccccgggca

SEQ ID NO: 1470659 - DNA, 15 bp, Homo sapiens
gaggaccccccgggc

SEQ ID NO: 1470660 - DNA, 15 bp, Homo sapiens
tgaggaccccccggg

SEQ ID NO: 1470661 - DNA, 15 bp, Homo sapiens
atgaggaccccccgg

SEQ ID NO: 1470662 - DNA, 15 bp, Homo sapiens
tatgaggaccccccg

SEQ ID NO: 1470663 - DNA, 15 bp, Homo sapiens
gtatgaggacccccc

SEQ ID NO: 1470664 - DNA, 15 bp, Homo sapiens
ggtatgaggaccccc

SEQ ID NO: 1470665 - DNA, 15 bp, Homo sapiens
aggtatgaggacccc

SEQ ID NO: 1470666 - DNA, 15 bp, Homo sapiens
gaggtatgaggaccc

SEQ ID NO: 1470667 - DNA, 15 bp, Homo sapiens
ggaggtatgaggacc

SEQ ID NO: 1470668 - DNA, 15 bp, Homo sapiens
gggaggtatgaggac

SEQ ID NO: 1470669 - DNA, 15 bp, Homo sapiens
agggaggtatgagga

SEQ ID NO: 1470670 - DNA, 15 bp, Homo sapiens
gagggaggtatgagg

SEQ ID NO: 1470671 - DNA, 15 bp, Homo sapiens
agagggaggtatgag

SEQ ID NO: 1470672 - DNA, 15 bp, Homo sapiens
tagagggaggtatga

SEQ ID NO: 1470673 - DNA, 15 bp, Homo sapiens
atagagggaggtatg

SEQ ID NO: 1470674 - DNA, 15 bp, Homo sapiens
aatagagggaggtat

SEQ ID NO: 1470675 - DNA, 15 bp, Homo sapiens
aaatagagggaggta

SEQ ID NO: 1470676 - DNA, 15 bp, Homo sapiens
gaaatagagggaggt

SEQ ID NO: 1470677 - DNA, 15 bp, Homo sapiens
agaaatagagggagg

SEQ ID NO: 1470678 - DNA, 15 bp, Homo sapiens
tagaaatagagggag

SEQ ID NO: 1470679 - DNA, 15 bp, Homo sapiens
gtagaaatagaggga

SEQ ID NO: 1470680 - DNA, 15 bp, Homo sapiens
tgtagaaatagaggg

SEQ ID NO: 1470681 - DNA, 15 bp, Homo sapiens
atgtagaaatagagg

SEQ ID NO: 1470682 - DNA, 15 bp, Homo sapiens
tatgtagaaatagag

SEQ ID NO: 1470683 - DNA, 15 bp, Homo sapiens
ctatgtagaaataga

SEQ ID NO: 1470684 - DNA, 15 bp, Homo sapiens
gctatgtagaaatag

SEQ ID NO: 1470685 - DNA, 15 bp, Homo sapiens
cgctatgtagaaata

SEQ ID NO: 1470686 - DNA, 15 bp, Homo sapiens
gcgctatgtagaaat

SEQ ID NO: 1470687 - DNA, 15 bp, Homo sapiens
tgcgctatgtagaaa

SEQ ID NO: 1470688 - DNA, 15 bp, Homo sapiens
atgcgctatgtagaa

SEQ ID NO: 1470689 - DNA, 15 bp, Homo sapiens
catgcgctatgtaga

SEQ ID NO: 1470690 - DNA, 15 bp, Homo sapiens
gcatgcgctatgtag

SEQ ID NO: 1470691 - DNA, 15 bp, Homo sapiens
agcatgcgctatgta

SEQ ID NO: 1470692 - DNA, 15 bp, Homo sapiens
cagcatgcgctatgt

SEQ ID NO: 1470693 - DNA, 15 bp, Homo sapiens
ccagcatgcgctatg

SEQ ID NO: 1470694 - DNA, 15 bp, Homo sapiens
cccagcatgcgctat

SEQ ID NO: 1470695 - DNA, 15 bp, Homo sapiens
acccagcatgcgcta

SEQ ID NO: 1470696 - DNA, 15 bp, Homo sapiens
aacccagcatgcgct

SEQ ID NO: 1470697 - DNA, 15 bp, Homo sapiens
aaacccagcatgcgc

SEQ ID NO: 1470698 - DNA, 15 bp, Homo sapiens
caaacccagcatgcg

SEQ ID NO: 1470699 - DNA, 15 bp, Homo sapiens
gcaaacccagcatgc

SEQ ID NO: 1470700 - DNA, 15 bp, Homo sapiens
tgcaaacccagcatg

SEQ ID NO: 1470701 - DNA, 15 bp, Homo sapiens
gtgcaaacccagcat

SEQ ID NO: 1470702 - DNA, 15 bp, Homo sapiens
agtgcaaacccagca

SEQ ID NO: 1470703 - DNA, 15 bp, Homo sapiens
aagtgcaaacccagc

SEQ ID NO: 1470704 - DNA, 15 bp, Homo sapiens
aaagtgcaaacccag

SEQ ID NO: 1470705 - DNA, 15 bp, Homo sapiens
aaaagtgcaaaccca

SEQ ID NO: 1470706 - DNA, 15 bp, Homo sapiens
aaaaagtgcaaaccc

SEQ ID NO: 1470707 - DNA, 15 bp, Homo sapiens
aaaaaagtgcaaacc

SEQ ID NO: 1470708 - DNA, 15 bp, Homo sapiens
aaaaaaagtgcaaac

SEQ ID NO: 1470709 - DNA, 15 bp, Homo sapiens
aaaaaaaagtgcaaa

SEQ ID NO: 1470710 - DNA, 15 bp, Homo sapiens
aaaaaaaaagtgcaa

SEQ ID NO: 1470711 - DNA, 15 bp, Homo sapiens
atacttaaaaaaaaa

SEQ ID NO: 1470712 - DNA, 15 bp, Homo sapiens
gatacttaaaaaaaa

SEQ ID NO: 1470713 - DNA, 15 bp, Homo sapiens
agatacttaaaaaaa

SEQ ID NO: 1470714 - DNA, 15 bp, Homo sapiens
aagatacttaaaaaa

SEQ ID NO: 1470715 - DNA, 15 bp, Homo sapiens
aaagatacttaaaaa

SEQ ID NO: 1470716 - DNA, 15 bp, Homo sapiens
aaaagatacttaaaa

SEQ ID NO: 1470717 - DNA, 15 bp, Homo sapiens
aaaaagatacttaaa

SEQ ID NO: 1470718 - DNA, 15 bp, Homo sapiens
gaaaaagatacttaa

SEQ ID NO: 1470719 - DNA, 15 bp, Homo sapiens
ggaaaaagatactta

SEQ ID NO: 1470720 - DNA, 15 bp, Homo sapiens
tggaaaaagatactt

SEQ ID NO: 1470721 - DNA, 15 bp, Homo sapiens
gtggaaaaagatact

SEQ ID NO: 1470722 - DNA, 15 bp, Homo sapiens
tgtggaaaaagatac

SEQ ID NO: 1470723 - DNA, 15 bp, Homo sapiens
atgtggaaaaagata

SEQ ID NO: 1470724 - DNA, 15 bp, Homo sapiens
gatgtggaaaaagat

SEQ ID NO: 1470725 - DNA, 15 bp, Homo sapiens
agatgtggaaaaaga

SEQ ID NO: 1470726 - DNA, 15 bp, Homo sapiens
cagatgtggaaaaag

SEQ ID NO: 1470727 - DNA, 15 bp, Homo sapiens
acagatgtggaaaaa

SEQ ID NO: 1470728 - DNA, 15 bp, Homo sapiens
gacagatgtggaaaa

SEQ ID NO: 1470729 - DNA, 15 bp, Homo sapiens
agacagatgtggaaa

SEQ ID NO: 1470730 - DNA, 15 bp, Homo sapiens
aagacagatgtggaa

SEQ ID NO: 1470731 - DNA, 15 bp, Homo sapiens
gaagacagatgtgga

SEQ ID NO: 1470732 - DNA, 15 bp, Homo sapiens
ggaagacagatgtgg

SEQ ID NO: 1470733 - DNA, 15 bp, Homo sapiens
gggaagacagatgtg

SEQ ID NO: 1470734 - DNA, 15 bp, Homo sapiens
tgggaagacagatgt

SEQ ID NO: 1470735 - DNA, 15 bp, Homo sapiens
gtgggaagacagatg

SEQ ID NO: 1470736 - DNA, 15 bp, Homo sapiens
ggtgggaagacagat

SEQ ID NO: 1470737 - DNA, 15 bp, Homo sapiens
tggtgggaagacaga

SEQ ID NO: 1470738 - DNA, 15 bp, Homo sapiens
ttggtgggaagacag

SEQ ID NO: 1470739 - DNA, 15 bp, Homo sapiens
cttggtgggaagaca

SEQ ID NO: 1470740 - DNA, 15 bp, Homo sapiens
gcttggtgggaagac

SEQ ID NO: 1470741 - DNA, 15 bp, Homo sapiens
tgcttggtgggaaga

SEQ ID NO: 1470742 - DNA, 15 bp, Homo sapiens
ttgcttggtgggaag

SEQ ID NO: 1470743 - DNA, 15 bp, Homo sapiens
cttgcttggtgggaa

SEQ ID NO: 1470744 - DNA, 15 bp, Homo sapiens
ccttgcttggtggga

SEQ ID NO: 1470745 - DNA, 15 bp, Homo sapiens
cccttgcttggtggg

SEQ ID NO: 1470746 - DNA, 15 bp, Homo sapiens
ccccttgcttggtgg

SEQ ID NO: 1470747 - DNA, 15 bp, Homo sapiens
accccttgcttggtg

SEQ ID NO: 1470748 - DNA, 15 bp, Homo sapiens
aaccccttgcttggt

SEQ ID NO: 1470749 - DNA, 15 bp, Homo sapiens
gaaccccttgcttgg

SEQ ID NO: 1470750 - DNA, 15 bp, Homo sapiens
agaaccccttgcttg

SEQ ID NO: 1470751 - DNA, 15 bp, Homo sapiens
cagaaccccttgctt

SEQ ID NO: 1470752 - DNA, 15 bp, Homo sapiens
ccagaaccccttgct

SEQ ID NO: 1470753 - DNA, 15 bp, Homo sapiens
tccagaaccccttgc

SEQ ID NO: 1470754 - DNA, 15 bp, Homo sapiens
gtccagaaccccttg

SEQ ID NO: 1470755 - DNA, 15 bp, Homo sapiens
ggtccagaacccctt

SEQ ID NO: 1470756 - DNA, 15 bp, Homo sapiens
gggtccagaacccct

SEQ ID NO: 1470757 - DNA, 15 bp, Homo sapiens
ggggtccagaacccc

SEQ ID NO: 1470758 - DNA, 15 bp, Homo sapiens
gggggtccagaaccc

SEQ ID NO: 1470759 - DNA, 15 bp, Homo sapiens
tgggggtccagaacc

SEQ ID NO: 1470760 - DNA, 15 bp, Homo sapiens
atgggggtccagaac

SEQ ID NO: 1470761 - DNA, 15 bp, Homo sapiens
catgggggtccagaa

SEQ ID NO: 1470762 - DNA, 15 bp, Homo sapiens
acatgggggtccaga

SEQ ID NO: 1470763 - DNA, 15 bp, Homo sapiens
tacatgggggtccag

SEQ ID NO: 1470764 - DNA, 15 bp, Homo sapiens
ttacatgggggtcca

SEQ ID NO: 1470765 - DNA, 15 bp, Homo sapiens
tttacatgggggtcc

SEQ ID NO: 1470766 - DNA, 15 bp, Homo sapiens
atttacatgggggtc

SEQ ID NO: 1470767 - DNA, 15 bp, Homo sapiens
gatttacatgggggt

SEQ ID NO: 1470768 - DNA, 15 bp, Homo sapiens
tgatttacatggggg

SEQ ID NO: 1470769 - DNA, 15 bp, Homo sapiens
gtgatttacatgggg

SEQ ID NO: 1470770 - DNA, 15 bp, Homo sapiens
ggtgatttacatggg

SEQ ID NO: 1470771 - DNA, 15 bp, Homo sapiens
tggtgatttacatgg

SEQ ID NO: 1470772 - DNA, 15 bp, Homo sapiens
atggtgatttacatg

SEQ ID NO: 1470773 - DNA, 15 bp, Homo sapiens
gatggtgatttacat

SEQ ID NO: 1470774 - DNA, 15 bp, Homo sapiens
tgatggtgatttaca

SEQ ID NO: 1470775 - DNA, 15 bp, Homo sapiens
ctgatggtgatttac

SEQ ID NO: 1470776 - DNA, 15 bp, Homo sapiens
actgatggtgattta

SEQ ID NO: 1470777 - DNA, 15 bp, Homo sapiens
aactgatggtgattt

SEQ ID NO: 1470778 - DNA, 15 bp, Homo sapiens
taactgatggtgatt

SEQ ID NO: 1470779 - DNA, 15 bp, Homo sapiens
gtaactgatggtgat

SEQ ID NO: 1470780 - DNA, 15 bp, Homo sapiens
tgtaactgatggtga

SEQ ID NO: 1470781 - DNA, 15 bp, Homo sapiens
ctgtaactgatggtg

SEQ ID NO: 1470782 - DNA, 15 bp, Homo sapiens
cctgtaactgatggt

SEQ ID NO: 1470783 - DNA, 15 bp, Homo sapiens
ccctgtaactgatgg

SEQ ID NO: 1470784 - DNA, 15 bp, Homo sapiens
accctgtaactgatg

SEQ ID NO: 1470785 - DNA, 15 bp, Homo sapiens
caccctgtaactgat

SEQ ID NO: 1470786 - DNA, 15 bp, Homo sapiens
gcaccctgtaactga

SEQ ID NO: 1470787 - DNA, 15 bp, Homo sapiens
tgcaccctgtaactg

SEQ ID NO: 1470788 - DNA, 15 bp, Homo sapiens
ttgcaccctgtaact

SEQ ID NO: 1470789 - DNA, 15 bp, Homo sapiens
tttgcaccctgtaac

SEQ ID NO: 1470790 - DNA, 15 bp, Homo sapiens
gtttgcaccctgtaa

SEQ ID NO: 1470791 - DNA, 15 bp, Homo sapiens
tgtttgcaccctgta

SEQ ID NO: 1470792 - DNA, 15 bp, Homo sapiens
gtgtttgcaccctgt

SEQ ID NO: 1470793 - DNA, 15 bp, Homo sapiens
ggtgtttgcaccctg

SEQ ID NO: 1470794 - DNA, 15 bp, Homo sapiens
cggtgtttgcaccct

SEQ ID NO: 1470795 - DNA, 15 bp, Homo sapiens
acggtgtttgcaccc

SEQ ID NO: 1470796 - DNA, 15 bp, Homo sapiens
gacggtgtttgcacc

SEQ ID NO: 1470797 - DNA, 15 bp, Homo sapiens
tgacggtgtttgcac

SEQ ID NO: 1470798 - DNA, 15 bp, Homo sapiens
atgacggtgtttgca

SEQ ID NO: 1470799 - DNA, 15 bp, Homo sapiens
gatgacggtgtttgc

SEQ ID NO: 1470800 - DNA, 15 bp, Homo sapiens
agatgacggtgtttg

SEQ ID NO: 1470801 - DNA, 15 bp, Homo sapiens
cagatgacggtgttt

SEQ ID NO: 1470802 - DNA, 15 bp, Homo sapiens
tcagatgacggtgtt

SEQ ID NO: 1470803 - DNA, 15 bp, Homo sapiens
ttcagatgacggtgt

SEQ ID NO: 1470804 - DNA, 15 bp, Homo sapiens
cttcagatgacggtg

SEQ ID NO: 1470805 - DNA, 15 bp, Homo sapiens
tcttcagatgacggt

SEQ ID NO: 1470806 - DNA, 15 bp, Homo sapiens
atcttcagatgacgg

SEQ ID NO: 1470807 - DNA, 15 bp, Homo sapiens
catcttcagatgacg

SEQ ID NO: 1470808 - DNA, 15 bp, Homo sapiens
tcatcttcagatgac

SEQ ID NO: 1470809 - DNA, 15 bp, Homo sapiens
gtcatcttcagatga

SEQ ID NO: 1470810 - DNA, 15 bp, Homo sapiens
agtcatcttcagatg

SEQ ID NO: 1470811 - DNA, 15 bp, Homo sapiens
aagtcatcttcagat

SEQ ID NO: 1470812 - DNA, 15 bp, Homo sapiens
aaagtcatcttcaga

SEQ ID NO: 1470813 - DNA, 15 bp, Homo sapiens
aaaagtcatcttcag

SEQ ID NO: 1470814 - DNA, 15 bp, Homo sapiens
caaaagtcatcttca

SEQ ID NO: 1470815 - DNA, 15 bp, Homo sapiens
acaaaagtcatcttc

SEQ ID NO: 1470816 - DNA, 15 bp, Homo sapiens
gacaaaagtcatctt

SEQ ID NO: 1470817 - DNA, 15 bp, Homo sapiens
agacaaaagtcatct

SEQ ID NO: 1470818 - DNA, 15 bp, Homo sapiens
gagacaaaagtcatc

SEQ ID NO: 1470819 - DNA, 15 bp, Homo sapiens
agagacaaaagtcat

SEQ ID NO: 1470820 - DNA, 15 bp, Homo sapiens
aagagacaaaagtca

SEQ ID NO: 1470821 - DNA, 15 bp, Homo sapiens
taagagacaaaagtc

SEQ ID NO: 1470822 - DNA, 15 bp, Homo sapiens
ttaagagacaaaagt

SEQ ID NO: 1470823 - DNA, 15 bp, Homo sapiens
gttaagagacaaaag

SEQ ID NO: 1470824 - DNA, 15 bp, Homo sapiens
tgttaagagacaaaa

SEQ ID NO: 1470825 - DNA, 15 bp, Homo sapiens
ttgttaagagacaaa

SEQ ID NO: 1470826 - DNA, 15 bp, Homo sapiens
tttgttaagagacaa

SEQ ID NO: 1470827 - DNA, 15 bp, Homo sapiens
ttttgttaagagaca

SEQ ID NO: 1470828 - DNA, 15 bp, Homo sapiens
attttgttaagagac

SEQ ID NO: 1470829 - DNA, 15 bp, Homo sapiens
cattttgttaagaga

SEQ ID NO: 1470830 - DNA, 15 bp, Homo sapiens
ccattttgttaagag

SEQ ID NO: 1470831 - DNA, 15 bp, Homo sapiens
tccattttgttaaga

SEQ ID NO: 1470832 - DNA, 15 bp, Homo sapiens
ctccattttgttaag

SEQ ID NO: 1470833 - DNA, 15 bp, Homo sapiens
gctccattttgttaa

SEQ ID NO: 1470834 - DNA, 15 bp, Homo sapiens
cgctccattttgtta

SEQ ID NO: 1470835 - DNA, 15 bp, Homo sapiens
acgctccattttgtt

SEQ ID NO: 1470836 - DNA, 15 bp, Homo sapiens
aacgctccattttgt

SEQ ID NO: 1470837 - DNA, 15 bp, Homo sapiens
caacgctccattttg

SEQ ID NO: 1470838 - DNA, 15 bp, Homo sapiens
tcaacgctccatttt

SEQ ID NO: 1470839 - DNA, 15 bp, Homo sapiens
atcaacgctccattt

SEQ ID NO: 1470840 - DNA, 15 bp, Homo sapiens
aatcaacgctccatt

SEQ ID NO: 1470841 - DNA, 15 bp, Homo sapiens
gaatcaacgctccat

SEQ ID NO: 1470842 - DNA, 15 bp, Homo sapiens
ggaatcaacgctcca

SEQ ID NO: 1470843 - DNA, 15 bp, Homo sapiens
aggaatcaacgctcc

SEQ ID NO: 1470844 - DNA, 15 bp, Homo sapiens
caggaatcaacgctc

SEQ ID NO: 1470845 - DNA, 15 bp, Homo sapiens
gcaggaatcaacgct

SEQ ID NO: 1470846 - DNA, 15 bp, Homo sapiens
cgcaggaatcaacgc

SEQ ID NO: 1470847 - DNA, 15 bp, Homo sapiens
acgcaggaatcaacg

SEQ ID NO: 1470848 - DNA, 15 bp, Homo sapiens
cacgcaggaatcaac

SEQ ID NO: 1470849 - DNA, 15 bp, Homo sapiens
acacgcaggaatcaa

SEQ ID NO: 1470850 - DNA, 15 bp, Homo sapiens
tacacgcaggaatca

SEQ ID NO: 1470851 - DNA, 15 bp, Homo sapiens
ctacacgcaggaatc

SEQ ID NO: 1470852 - DNA, 15 bp, Homo sapiens
gctacacgcaggaat

SEQ ID NO: 1470853 - DNA, 15 bp, Homo sapiens
agctacacgcaggaa

SEQ ID NO: 1470854 - DNA, 15 bp, Homo sapiens
aagctacacgcagga

SEQ ID NO: 1470855 - DNA, 15 bp, Homo sapiens
gaagctacacgcagg

SEQ ID NO: 1470856 - DNA, 15 bp, Homo sapiens
cgaagctacacgcag

SEQ ID NO: 1470857 - DNA, 15 bp, Homo sapiens
gcgaagctacacgca

SEQ ID NO: 1470858 - DNA, 15 bp, Homo sapiens
agcgaagctacacgc

SEQ ID NO: 1470859 - DNA, 15 bp, Homo sapiens
gagcgaagctacacg

SEQ ID NO: 1470860 - DNA, 15 bp, Homo sapiens
tgagcgaagctacac

SEQ ID NO: 1470861 - DNA, 15 bp, Homo sapiens
gtgagcgaagctaca

SEQ ID NO: 1470862 - DNA, 15 bp, Homo sapiens
agtgagcgaagctac

SEQ ID NO: 1470863 - DNA, 15 bp, Homo sapiens
gagtgagcgaagcta

SEQ ID NO: 1470864 - DNA, 15 bp, Homo sapiens
ggagtgagcgaagct

SEQ ID NO: 1470865 - DNA, 15 bp, Homo sapiens
gggagtgagcgaagc

SEQ ID NO: 1470866 - DNA, 15 bp, Homo sapiens
agggagtgagcgaag

SEQ ID NO: 1470867 - DNA, 15 bp, Homo sapiens
aagggagtgagcgaa

SEQ ID NO: 1470868 - DNA, 15 bp, Homo sapiens
caagggagtgagcga

SEQ ID NO: 1470869 - DNA, 15 bp, Homo sapiens
gcaagggagtgagcg

SEQ ID NO: 1470870 - DNA, 15 bp, Homo sapiens
cgcaagggagtgagc

SEQ ID NO: 1470871 - DNA, 15 bp, Homo sapiens
acgcaagggagtgag

SEQ ID NO: 1470872 - DNA, 15 bp, Homo sapiens
gacgcaagggagtga

SEQ ID NO: 1470873 - DNA, 15 bp, Homo sapiens
ggacgcaagggagtg

SEQ ID NO: 1470874 - DNA, 15 bp, Homo sapiens
tggacgcaagggagt

SEQ ID NO: 1470875 - DNA, 15 bp, Homo sapiens
gtggacgcaagggag

SEQ ID NO: 1470876 - DNA, 15 bp, Homo sapiens
ggtggacgcaaggga

SEQ ID NO: 1470877 - DNA, 15 bp, Homo sapiens
tggtggacgcaaggg

SEQ ID NO: 1470878 - DNA, 15 bp, Homo sapiens
ctggtggacgcaagg

SEQ ID NO: 1470879 - DNA, 15 bp, Homo sapiens
gctggtggacgcaag

SEQ ID NO: 1470880 - DNA, 15 bp, Homo sapiens
ggctggtggacgcaa

SEQ ID NO: 1470881 - DNA, 15 bp, Homo sapiens
aggctggtggacgca

SEQ ID NO: 1470882 - DNA, 15 bp, Homo sapiens
caggctggtggacgc

SEQ ID NO: 1470883 - DNA, 15 bp, Homo sapiens
gcaggctggtggacg

SEQ ID NO: 1470884 - DNA, 15 bp, Homo sapiens
agcaggctggtggac

SEQ ID NO: 1470885 - DNA, 15 bp, Homo sapiens
tagcaggctggtgga

SEQ ID NO: 1470886 - DNA, 15 bp, Homo sapiens
ctagcaggctggtgg

SEQ ID NO: 1470887 - DNA, 15 bp, Homo sapiens
cctagcaggctggtg

SEQ ID NO: 1470888 - DNA, 15 bp, Homo sapiens
tcctagcaggctggt

SEQ ID NO: 1470889 - DNA, 15 bp, Homo sapiens
ctcctagcaggctgg

SEQ ID NO: 1470890 - DNA, 15 bp, Homo sapiens
actcctagcaggctg

SEQ ID NO: 1470891 - DNA, 15 bp, Homo sapiens
gactcctagcaggct

SEQ ID NO: 1470892 - DNA, 15 bp, Homo sapiens
cgactcctagcaggc

SEQ ID NO: 1470893 - DNA, 15 bp, Homo sapiens
ccgactcctagcagg

SEQ ID NO: 1470894 - DNA, 15 bp, Homo sapiens
cccgactcctagcag

SEQ ID NO: 1470895 - DNA, 15 bp, Homo sapiens
gcccgactcctagca

SEQ ID NO: 1470896 - DNA, 15 bp, Homo sapiens
ggcccgactcctagc

SEQ ID NO: 1470897 - DNA, 15 bp, Homo sapiens
aggcccgactcctag

SEQ ID NO: 1470898 - DNA, 15 bp, Homo sapiens
gaggcccgactccta

SEQ ID NO: 1470899 - DNA, 15 bp, Homo sapiens
tgaggcccgactcct

SEQ ID NO: 1470900 - DNA, 15 bp, Homo sapiens
gtgaggcccgactcc

SEQ ID NO: 1470901 - DNA, 15 bp, Homo sapiens
ggtgaggcccgactc

SEQ ID NO: 1470902 - DNA, 15 bp, Homo sapiens
gggtgaggcccgact

SEQ ID NO: 1470903 - DNA, 15 bp, Homo sapiens
ggggtgaggcccgac

SEQ ID NO: 1470904 - DNA, 15 bp, Homo sapiens
aggggtgaggcccga

SEQ ID NO: 1470905 - DNA, 15 bp, Homo sapiens
caggggtgaggcccg

SEQ ID NO: 1470906 - DNA, 15 bp, Homo sapiens
ccaggggtgaggccc

SEQ ID NO: 1470907 - DNA, 15 bp, Homo sapiens
cccaggggtgaggcc

SEQ ID NO: 1470908 - DNA, 15 bp, Homo sapiens
gcccaggggtgaggc

SEQ ID NO: 1470909 - DNA, 15 bp, Homo sapiens
agcccaggggtgagg

SEQ ID NO: 1470910 - DNA, 15 bp, Homo sapiens
cagcccaggggtgag

SEQ ID NO: 1470911 - DNA, 15 bp, Homo sapiens
gcagcccaggggtga

SEQ ID NO: 1470912 - DNA, 15 bp, Homo sapiens
ggcagcccaggggtg

SEQ ID NO: 1470913 - DNA, 15 bp, Homo sapiens
aggcagcccaggggt

SEQ ID NO: 1470914 - DNA, 15 bp, Homo sapiens
aaggcagcccagggg

SEQ ID NO: 1470915 - DNA, 15 bp, Homo sapiens
gaaggcagcccaggg

SEQ ID NO: 1470916 - DNA, 15 bp, Homo sapiens
cgaaggcagcccagg

SEQ ID NO: 1470917 - DNA, 15 bp, Homo sapiens
ccgaaggcagcccag

SEQ ID NO: 1470918 - DNA, 15 bp, Homo sapiens
tccgaaggcagccca

SEQ ID NO: 1470919 - DNA, 15 bp, Homo sapiens
ctccgaaggcagccc

SEQ ID NO: 1470920 - DNA, 15 bp, Homo sapiens
gctccgaaggcagcc

SEQ ID NO: 1470921 - DNA, 15 bp, Homo sapiens
agctccgaaggcagc

SEQ ID NO: 1470922 - DNA, 15 bp, Homo sapiens
aagctccgaaggcag

SEQ ID NO: 1470923 - DNA, 15 bp, Homo sapiens
taagctccgaaggca

SEQ ID NO: 1470924 - DNA, 15 bp, Homo sapiens
gtaagctccgaaggc

SEQ ID NO: 1470925 - DNA, 15 bp, Homo sapiens
ggtaagctccgaagg

SEQ ID NO: 1470926 - DNA, 15 bp, Homo sapiens
aggtaagctccgaag

SEQ ID NO: 1470927 - DNA, 15 bp, Homo sapiens
caggtaagctccgaa

SEQ ID NO: 1470928 - DNA, 15 bp, Homo sapiens
acaggtaagctccga

SEQ ID NO: 1470929 - DNA, 15 bp, Homo sapiens
gacaggtaagctccg

SEQ ID NO: 1470930 - DNA, 15 bp, Homo sapiens
agacaggtaagctcc

SEQ ID NO: 1470931 - DNA, 15 bp, Homo sapiens
gagacaggtaagctc

SEQ ID NO: 1470932 - DNA, 15 bp, Homo sapiens
tgagacaggtaagct

SEQ ID NO: 1470933 - DNA, 15 bp, Homo sapiens
ctgagacaggtaagc

SEQ ID NO: 1470934 - DNA, 15 bp, Homo sapiens
cctgagacaggtaag

SEQ ID NO: 1470935 - DNA, 15 bp, Homo sapiens
tcctgagacaggtaa

SEQ ID NO: 1470936 - DNA, 15 bp, Homo sapiens
ttcctgagacaggta

SEQ ID NO: 1470937 - DNA, 15 bp, Homo sapiens
gttcctgagacaggt

SEQ ID NO: 1470938 - DNA, 15 bp, Homo sapiens
tgttcctgagacagg

SEQ ID NO: 1470939 - DNA, 15 bp, Homo sapiens
atgttcctgagacag

SEQ ID NO: 1470940 - DNA, 15 bp, Homo sapiens
gatgttcctgagaca

SEQ ID NO: 1470941 - DNA, 15 bp, Homo sapiens
ggatgttcctgagac

SEQ ID NO: 1470942 - DNA, 15 bp, Homo sapiens
gggatgttcctgaga

SEQ ID NO: 1470943 - DNA, 15 bp, Homo sapiens
agggatgttcctgag

SEQ ID NO: 1470944 - DNA, 15 bp, Homo sapiens
gagggatgttcctga

SEQ ID NO: 1470945 - DNA, 15 bp, Homo sapiens
ggagggatgttcctg

SEQ ID NO: 1470946 - DNA, 15 bp, Homo sapiens
aggagggatgttcct

SEQ ID NO: 1470947 - DNA, 15 bp, Homo sapiens
gaggagggatgttcc

SEQ ID NO: 1470948 - DNA, 15 bp, Homo sapiens
ggaggagggatgttc

SEQ ID NO: 1470949 - DNA, 15 bp, Homo sapiens
gggaggagggatgtt

SEQ ID NO: 1470950 - DNA, 15 bp, Homo sapiens
cgggaggagggatgt

SEQ ID NO: 1470951 - DNA, 15 bp, Homo sapiens
tcgggaggagggatg

SEQ ID NO: 1470952 - DNA, 15 bp, Homo sapiens
ctcgggaggagggat

SEQ ID NO: 1470953 - DNA, 15 bp, Homo sapiens
gctcgggaggaggga

SEQ ID NO: 1470954 - DNA, 15 bp, Homo sapiens
tgctcgggaggaggg

SEQ ID NO: 1470955 - DNA, 15 bp, Homo sapiens
atgctcgggaggagg

SEQ ID NO: 1470956 - DNA, 15 bp, Homo sapiens
catgctcgggaggag

SEQ ID NO: 1470957 - DNA, 15 bp, Homo sapiens
acatgctcgggagga

SEQ ID NO: 1470958 - DNA, 15 bp, Homo sapiens
cacatgctcgggagg

SEQ ID NO: 1470959 - DNA, 15 bp, Homo sapiens
ccacatgctcgggag

SEQ ID NO: 1470960 - DNA, 15 bp, Homo sapiens
cccacatgctcggga

SEQ ID NO: 1470961 - DNA, 15 bp, Homo sapiens
tcccacatgctcggg

SEQ ID NO: 1470962 - DNA, 15 bp, Homo sapiens
ctcccacatgctcgg

SEQ ID NO: 1470963 - DNA, 15 bp, Homo sapiens
tctcccacatgctcg

SEQ ID NO: 1470964 - DNA, 15 bp, Homo sapiens
ttctcccacatgctc

SEQ ID NO: 1470965 - DNA, 15 bp, Homo sapiens
tttctcccacatgct

SEQ ID NO: 1470966 - DNA, 15 bp, Homo sapiens
ctttctcccacatgc

SEQ ID NO: 1470967 - DNA, 15 bp, Homo sapiens
tctttctcccacatg

SEQ ID NO: 1470968 - DNA, 15 bp, Homo sapiens
ctctttctcccacat

SEQ ID NO: 1470969 - DNA, 15 bp, Homo sapiens
gctctttctcccaca

SEQ ID NO: 1470970 - DNA, 15 bp, Homo sapiens
agctctttctcccac

SEQ ID NO: 1470971 - DNA, 15 bp, Homo sapiens
cagctctttctccca

SEQ ID NO: 1470972 - DNA, 15 bp, Homo sapiens
ccagctctttctccc

SEQ ID NO: 1470973 - DNA, 15 bp, Homo sapiens
cccagctctttctcc

SEQ ID NO: 1470974 - DNA, 15 bp, Homo sapiens
tcccagctctttctc

SEQ ID NO: 1470975 - DNA, 15 bp, Homo sapiens
ctcccagctctttct

SEQ ID NO: 1470976 - DNA, 15 bp, Homo sapiens
gctcccagctctttc

SEQ ID NO: 1470977 - DNA, 15 bp, Homo sapiens
ggctcccagctcttt

SEQ ID NO: 1470978 - DNA, 15 bp, Homo sapiens
gggctcccagctctt

SEQ ID NO: 1470979 - DNA, 15 bp, Homo sapiens
ggggctcccagctct

SEQ ID NO: 1470980 - DNA, 15 bp, Homo sapiens
aggggctcccagctc

SEQ ID NO: 1470981 - DNA, 15 bp, Homo sapiens
gaggggctcccagct

SEQ ID NO: 1470982 - DNA, 15 bp, Homo sapiens
cgaggggctcccagc

SEQ ID NO: 1470983 - DNA, 15 bp, Homo sapiens
gcgaggggctcccag

SEQ ID NO: 1470984 - DNA, 15 bp, Homo sapiens
tgcgaggggctccca

SEQ ID NO: 1470985 - DNA, 15 bp, Homo sapiens
ttgcgaggggctccc

SEQ ID NO: 1470986 - DNA, 15 bp, Homo sapiens
cttgcgaggggctcc

SEQ ID NO: 1470987 - DNA, 15 bp, Homo sapiens
ccttgcgaggggctc

SEQ ID NO: 1470988 - DNA, 15 bp, Homo sapiens
gccttgcgaggggct

SEQ ID NO: 1470989 - DNA, 15 bp, Homo sapiens
ggccttgcgaggggc

SEQ ID NO: 1470990 - DNA, 15 bp, Homo sapiens
aggccttgcgagggg

SEQ ID NO: 1470991 - DNA, 15 bp, Homo sapiens
caggccttgcgaggg

SEQ ID NO: 1470992 - DNA, 15 bp, Homo sapiens
tcaggccttgcgagg

SEQ ID NO: 1470993 - DNA, 15 bp, Homo sapiens
atcaggccttgcgag

SEQ ID NO: 1470994 - DNA, 15 bp, Homo sapiens
catcaggccttgcga

SEQ ID NO: 1470995 - DNA, 15 bp, Homo sapiens
ccatcaggccttgcg

SEQ ID NO: 1470996 - DNA, 15 bp, Homo sapiens
cccatcaggccttgc

SEQ ID NO: 1470997 - DNA, 15 bp, Homo sapiens
ccccatcaggccttg

SEQ ID NO: 1470998 - DNA, 15 bp, Homo sapiens
gccccatcaggcctt

SEQ ID NO: 1470999 - DNA, 15 bp, Homo sapiens
ggccccatcaggcct

SEQ ID NO: 1471000 - DNA, 15 bp, Homo sapiens
aggccccatcaggcc

SEQ ID NO: 1471001 - DNA, 15 bp, Homo sapiens
gaggccccatcaggc

SEQ ID NO: 1471002 - DNA, 15 bp, Homo sapiens
agaggccccatcagg

SEQ ID NO: 1471003 - DNA, 15 bp, Homo sapiens
cagaggccccatcag

SEQ ID NO: 1471004 - DNA, 15 bp, Homo sapiens
acagaggccccatca

SEQ ID NO: 1471005 - DNA, 15 bp, Homo sapiens
cacagaggccccatc

SEQ ID NO: 1471006 - DNA, 15 bp, Homo sapiens
acacagaggccccat

SEQ ID NO: 1471007 - DNA, 15 bp, Homo sapiens
cacacagaggcccca

SEQ ID NO: 1471008 - DNA, 15 bp, Homo sapiens
gcacacagaggcccc

SEQ ID NO: 1471009 - DNA, 15 bp, Homo sapiens
agcacacagaggccc

SEQ ID NO: 1471010 - DNA, 15 bp, Homo sapiens
cagcacacagaggcc

SEQ ID NO: 1471011 - DNA, 15 bp, Homo sapiens
gcagcacacagaggc

SEQ ID NO: 1471012 - DNA, 15 bp, Homo sapiens
tgcagcacacagagg

SEQ ID NO: 1471013 - DNA, 15 bp, Homo sapiens
atgcagcacacagag

SEQ ID NO: 1471014 - DNA, 15 bp, Homo sapiens
catgcagcacacaga

SEQ ID NO: 1471015 - DNA, 15 bp, Homo sapiens
tcatgcagcacacag

SEQ ID NO: 1471016 - DNA, 15 bp, Homo sapiens
ttcatgcagcacaca

SEQ ID NO: 1471017 - DNA, 15 bp, Homo sapiens
cttcatgcagcacac

SEQ ID NO: 1471018 - DNA, 15 bp, Homo sapiens
gcttcatgcagcaca

SEQ ID NO: 1471019 - DNA, 15 bp, Homo sapiens
tgcttcatgcagcac

SEQ ID NO: 1471020 - DNA, 15 bp, Homo sapiens
gtgcttcatgcagca

SEQ ID NO: 1471021 - DNA, 15 bp, Homo sapiens
agtgcttcatgcagc

SEQ ID NO: 1471022 - DNA, 15 bp, Homo sapiens
aagtgcttcatgcag

SEQ ID NO: 1471023 - DNA, 15 bp, Homo sapiens
gaagtgcttcatgca

SEQ ID NO: 1471024 - DNA, 15 bp, Homo sapiens
tgaagtgcttcatgc

SEQ ID NO: 1471025 - DNA, 15 bp, Homo sapiens
gtgaagtgcttcatg

SEQ ID NO: 1471026 - DNA, 15 bp, Homo sapiens
agtgaagtgcttcat

SEQ ID NO: 1471027 - DNA, 15 bp, Homo sapiens
aagtgaagtgcttca

SEQ ID NO: 1471028 - DNA, 15 bp, Homo sapiens
gaagtgaagtgcttc

SEQ ID NO: 1471029 - DNA, 15 bp, Homo sapiens
ggaagtgaagtgctt

SEQ ID NO: 1471030 - DNA, 15 bp, Homo sapiens
tggaagtgaagtgct

SEQ ID NO: 1471031 - DNA, 15 bp, Homo sapiens
gtggaagtgaagtgc

SEQ ID NO: 1471032 - DNA, 15 bp, Homo sapiens
tgtggaagtgaagtg

SEQ ID NO: 1471033 - DNA, 15 bp, Homo sapiens
ctgtggaagtgaagt

SEQ ID NO: 1471034 - DNA, 15 bp, Homo sapiens
actgtggaagtgaag

SEQ ID NO: 1471035 - DNA, 15 bp, Homo sapiens
gactgtggaagtgaa

SEQ ID NO: 1471036 - DNA, 15 bp, Homo sapiens
ggactgtggaagtga

SEQ ID NO: 1471037 - DNA, 15 bp, Homo sapiens
gggactgtggaagtg

SEQ ID NO: 1471038 - DNA, 15 bp, Homo sapiens
ggggactgtggaagt

SEQ ID NO: 1471039 - DNA, 15 bp, Homo sapiens
tggggactgtggaag

SEQ ID NO: 1471040 - DNA, 15 bp, Homo sapiens
atggggactgtggaa

SEQ ID NO: 1471041 - DNA, 15 bp, Homo sapiens
catggggactgtgga

SEQ ID NO: 1471042 - DNA, 15 bp, Homo sapiens
acatggggactgtgg

SEQ ID NO: 1471043 - DNA, 15 bp, Homo sapiens
cacatggggactgtg

SEQ ID NO: 1471044 - DNA, 15 bp, Homo sapiens
tcacatggggactgt

SEQ ID NO: 1471045 - DNA, 15 bp, Homo sapiens
ctcacatggggactg

SEQ ID NO: 1471046 - DNA, 15 bp, Homo sapiens
actcacatggggact

SEQ ID NO: 1471047 - DNA, 15 bp, Homo sapiens
tactcacatggggac

SEQ ID NO: 1471048 - DNA, 15 bp, Homo sapiens
ttactcacatgggga

SEQ ID NO: 1471049 - DNA, 15 bp, Homo sapiens
gttactcacatgggg

SEQ ID NO: 1471050 - DNA, 15 bp, Homo sapiens
agttactcacatggg

SEQ ID NO: 1471051 - DNA, 15 bp, Homo sapiens
gagttactcacatgg

SEQ ID NO: 1471052 - DNA, 15 bp, Homo sapiens
ggagttactcacatg

SEQ ID NO: 1471053 - DNA, 15 bp, Homo sapiens
tggagttactcacat

SEQ ID NO: 1471054 - DNA, 15 bp, Homo sapiens
ctggagttactcaca

SEQ ID NO: 1471055 - DNA, 15 bp, Homo sapiens
tctggagttactcac

SEQ ID NO: 1471056 - DNA, 15 bp, Homo sapiens
atctggagttactca

SEQ ID NO: 1471057 - DNA, 15 bp, Homo sapiens
catctggagttactc

SEQ ID NO: 1471058 - DNA, 15 bp, Homo sapiens
tcatctggagttact

SEQ ID NO: 1471059 - DNA, 15 bp, Homo sapiens
ctcatctggagttac

SEQ ID NO: 1471060 - DNA, 15 bp, Homo sapiens
cctcatctggagtta

SEQ ID NO: 1471061 - DNA, 15 bp, Homo sapiens
ccctcatctggagtt

SEQ ID NO: 1471062 - DNA, 15 bp, Homo sapiens
tccctcatctggagt

SEQ ID NO: 1471063 - DNA, 15 bp, Homo sapiens
gtccctcatctggag

SEQ ID NO: 1471064 - DNA, 15 bp, Homo sapiens
tgtccctcatctgga

SEQ ID NO: 1471065 - DNA, 15 bp, Homo sapiens
ctgtccctcatctgg

SEQ ID NO: 1471066 - DNA, 15 bp, Homo sapiens
tctgtccctcatctg

SEQ ID NO: 1471067 - DNA, 15 bp, Homo sapiens
ctctgtccctcatct

SEQ ID NO: 1471068 - DNA, 15 bp, Homo sapiens
cctctgtccctcatc

SEQ ID NO: 1471069 - DNA, 15 bp, Homo sapiens
ccctctgtccctcat

SEQ ID NO: 1471070 - DNA, 15 bp, Homo sapiens
cccctctgtccctca

SEQ ID NO: 1471071 - DNA, 15 bp, Homo sapiens
acccctctgtccctc

SEQ ID NO: 1471072 - DNA, 15 bp, Homo sapiens
tacccctctgtccct

SEQ ID NO: 1471073 - DNA, 15 bp, Homo sapiens
ttacccctctgtccc

SEQ ID NO: 1471074 - DNA, 15 bp, Homo sapiens
cttacccctctgtcc

SEQ ID NO: 1471075 - DNA, 15 bp, Homo sapiens
ccttacccctctgtc

SEQ ID NO: 1471076 - DNA, 15 bp, Homo sapiens
gccttacccctctgt

SEQ ID NO: 1471077 - DNA, 15 bp, Homo sapiens
agccttacccctctg

SEQ ID NO: 1471078 - DNA, 15 bp, Homo sapiens
gagccttacccctct

SEQ ID NO: 1471079 - DNA, 15 bp, Homo sapiens
cgagccttacccctc

SEQ ID NO: 1471080 - DNA, 15 bp, Homo sapiens
gcgagccttacccct

SEQ ID NO: 1471081 - DNA, 15 bp, Homo sapiens
ggcgagccttacccc

SEQ ID NO: 1471082 - DNA, 15 bp, Homo sapiens
gggcgagccttaccc

SEQ ID NO: 1471083 - DNA, 15 bp, Homo sapiens
ggggcgagccttacc

SEQ ID NO: 1471084 - DNA, 15 bp, Homo sapiens
tggggcgagccttac

SEQ ID NO: 1471085 - DNA, 15 bp, Homo sapiens
ctggggcgagcctta

SEQ ID NO: 1471086 - DNA, 15 bp, Homo sapiens
cctggggcgagcctt

SEQ ID NO: 1471087 - DNA, 15 bp, Homo sapiens
acctggggcgagcct

SEQ ID NO: 1471088 - DNA, 15 bp, Homo sapiens
gacctggggcgagcc

SEQ ID NO: 1471089 - DNA, 15 bp, Homo sapiens
tgacctggggcgagc

SEQ ID NO: 1471090 - DNA, 15 bp, Homo sapiens
gtgacctggggcgag

SEQ ID NO: 1471091 - DNA, 15 bp, Homo sapiens
tgtgacctggggcga

SEQ ID NO: 1471092 - DNA, 15 bp, Homo sapiens
gtgtgacctggggcg

SEQ ID NO: 1471093 - DNA, 15 bp, Homo sapiens
agtgtgacctggggc

SEQ ID NO: 1471094 - DNA, 15 bp, Homo sapiens
cagtgtgacctgggg

SEQ ID NO: 1471095 - DNA, 15 bp, Homo sapiens
acagtgtgacctggg

SEQ ID NO: 1471096 - DNA, 15 bp, Homo sapiens
gacagtgtgacctgg

SEQ ID NO: 1471097 - DNA, 15 bp, Homo sapiens
tgacagtgtgacctg

SEQ ID NO: 1471098 - DNA, 15 bp, Homo sapiens
gtgacagtgtgacct

SEQ ID NO: 1471099 - DNA, 15 bp, Homo sapiens
agtgacagtgtgacc

SEQ ID NO: 1471100 - DNA, 15 bp, Homo sapiens
aagtgacagtgtgac

SEQ ID NO: 1471101 - DNA, 15 bp, Homo sapiens
taagtgacagtgtga

SEQ ID NO: 1471102 - DNA, 15 bp, Homo sapiens
ctaagtgacagtgtg

SEQ ID NO: 1471103 - DNA, 15 bp, Homo sapiens
actaagtgacagtgt

SEQ ID NO: 1471104 - DNA, 15 bp, Homo sapiens
cactaagtgacagtg

SEQ ID NO: 1471105 - DNA, 15 bp, Homo sapiens
tcactaagtgacagt

SEQ ID NO: 1471106 - DNA, 15 bp, Homo sapiens
atcactaagtgacag

SEQ ID NO: 1471107 - DNA, 15 bp, Homo sapiens
tatcactaagtgaca

SEQ ID NO: 1471108 - DNA, 15 bp, Homo sapiens
ctatcactaagtgac

SEQ ID NO: 1471109 - DNA, 15 bp, Homo sapiens
cctatcactaagtga

SEQ ID NO: 1471110 - DNA, 15 bp, Homo sapiens
acctatcactaagtg

SEQ ID NO: 1471111 - DNA, 15 bp, Homo sapiens
cacctatcactaagt

SEQ ID NO: 1471112 - DNA, 15 bp, Homo sapiens
ccacctatcactaag

SEQ ID NO: 1471113 - DNA, 15 bp, Homo sapiens
tccacctatcactaa

SEQ ID NO: 1471114 - DNA, 15 bp, Homo sapiens
ctccacctatcacta

SEQ ID NO: 1471115 - DNA, 15 bp, Homo sapiens
actccacctatcact

SEQ ID NO: 1471116 - DNA, 15 bp, Homo sapiens
aactccacctatcac

SEQ ID NO: 1471117 - DNA, 15 bp, Homo sapiens
caactccacctatca

SEQ ID NO: 1471118 - DNA, 15 bp, Homo sapiens
ccaactccacctatc

SEQ ID NO: 1471119 - DNA, 15 bp, Homo sapiens
tccaactccacctat

SEQ ID NO: 1471120 - DNA, 15 bp, Homo sapiens
gtccaactccaccta

SEQ ID NO: 1471121 - DNA, 15 bp, Homo sapiens
agtccaactccacct

SEQ ID NO: 1471122 - DNA, 15 bp, Homo sapiens
gagtccaactccacc

SEQ ID NO: 1471123 - DNA, 15 bp, Homo sapiens
tgagtccaactccac

SEQ ID NO: 1471124 - DNA, 15 bp, Homo sapiens
ctgagtccaactcca

SEQ ID NO: 1471125 - DNA, 15 bp, Homo sapiens
tctgagtccaactcc

SEQ ID NO: 1471126 - DNA, 15 bp, Homo sapiens
gtctgagtccaactc

SEQ ID NO: 1471127 - DNA, 15 bp, Homo sapiens
ggtctgagtccaact

SEQ ID NO: 1471128 - DNA, 15 bp, Homo sapiens
aggtctgagtccaac

SEQ ID NO: 1471129 - DNA, 15 bp, Homo sapiens
caggtctgagtccaa

SEQ ID NO: 1471130 - DNA, 15 bp, Homo sapiens
acaggtctgagtcca

SEQ ID NO: 1471131 - DNA, 15 bp, Homo sapiens
gacaggtctgagtcc

SEQ ID NO: 1471132 - DNA, 15 bp, Homo sapiens
ggacaggtctgagtc

SEQ ID NO: 1471133 - DNA, 15 bp, Homo sapiens
gggacaggtctgagt

SEQ ID NO: 1471134 - DNA, 15 bp, Homo sapiens
ggggacaggtctgag

SEQ ID NO: 1471135 - DNA, 15 bp, Homo sapiens
cggggacaggtctga

SEQ ID NO: 1471136 - DNA, 15 bp, Homo sapiens
acggggacaggtctg

SEQ ID NO: 1471137 - DNA, 15 bp, Homo sapiens
gacggggacaggtct

SEQ ID NO: 1471138 - DNA, 15 bp, Homo sapiens
ggacggggacaggtc

SEQ ID NO: 1471139 - DNA, 15 bp, Homo sapiens
gggacggggacaggt

SEQ ID NO: 1471140 - DNA, 15 bp, Homo sapiens
tgggacggggacagg

SEQ ID NO: 1471141 - DNA, 15 bp, Homo sapiens
gtgggacggggacag

SEQ ID NO: 1471142 - DNA, 15 bp, Homo sapiens
ggtgggacggggaca

SEQ ID NO: 1471143 - DNA, 15 bp, Homo sapiens
aggtgggacggggac

SEQ ID NO: 1471144 - DNA, 15 bp, Homo sapiens
gaggtgggacgggga

SEQ ID NO: 1471145 - DNA, 15 bp, Homo sapiens
ggaggtgggacgggg

SEQ ID NO: 1471146 - DNA, 15 bp, Homo sapiens
gggaggtgggacggg

SEQ ID NO: 1471147 - DNA, 15 bp, Homo sapiens
agggaggtgggacgg

SEQ ID NO: 1471148 - DNA, 15 bp, Homo sapiens
cagggaggtgggacg

SEQ ID NO: 1471149 - DNA, 15 bp, Homo sapiens
acagggaggtgggac

SEQ ID NO: 1471150 - DNA, 15 bp, Homo sapiens
tacagggaggtggga

SEQ ID NO: 1471151 - DNA, 15 bp, Homo sapiens
gtacagggaggtggg

SEQ ID NO: 1471152 - DNA, 15 bp, Homo sapiens
ggtacagggaggtgg

SEQ ID NO: 1471153 - DNA, 15 bp, Homo sapiens
gggtacagggaggtg

SEQ ID NO: 1471154 - DNA, 15 bp, Homo sapiens
ggggtacagggaggt

SEQ ID NO: 1471155 - DNA, 15 bp, Homo sapiens
gggggtacagggagg

SEQ ID NO: 1471156 - DNA, 15 bp, Homo sapiens
agggggtacagggag

SEQ ID NO: 1471157 - DNA, 15 bp, Homo sapiens
gagggggtacaggga

SEQ ID NO: 1471158 - DNA, 15 bp, Homo sapiens
ggagggggtacaggg

SEQ ID NO: 1471159 - DNA, 15 bp, Homo sapiens
gggagggggtacagg

SEQ ID NO: 1471160 - DNA, 15 bp, Homo sapiens
ggggagggggtacag

SEQ ID NO: 1471161 - DNA, 15 bp, Homo sapiens
tggggagggggtaca

SEQ ID NO: 1471162 - DNA, 15 bp, Homo sapiens
ctggggagggggtac

SEQ ID NO: 1471163 - DNA, 15 bp, Homo sapiens
tctggggagggggta

SEQ ID NO: 1471164 - DNA, 15 bp, Homo sapiens
gtctggggagggggt

SEQ ID NO: 1471165 - DNA, 15 bp, Homo sapiens
tgtctggggaggggg

SEQ ID NO: 1471166 - DNA, 15 bp, Homo sapiens
gtgtctggggagggg

SEQ ID NO: 1471167 - DNA, 15 bp, Homo sapiens
agtgtctggggaggg

SEQ ID NO: 1471168 - DNA, 15 bp, Homo sapiens
cagtgtctggggagg

SEQ ID NO: 1471169 - DNA, 15 bp, Homo sapiens
tcagtgtctggggag

SEQ ID NO: 1471170 - DNA, 15 bp, Homo sapiens
ctcagtgtctgggga

SEQ ID NO: 1471171 - DNA, 15 bp, Homo sapiens
cctcagtgtctgggg

SEQ ID NO: 1471172 - DNA, 15 bp, Homo sapiens
gcctcagtgtctggg

SEQ ID NO: 1471173 - DNA, 15 bp, Homo sapiens
ggcctcagtgtctgg

SEQ ID NO: 1471174 - DNA, 15 bp, Homo sapiens
aggcctcagtgtctg

SEQ ID NO: 1471175 - DNA, 15 bp, Homo sapiens
gaggcctcagtgtct

SEQ ID NO: 1471176 - DNA, 15 bp, Homo sapiens
tgaggcctcagtgtc

SEQ ID NO: 1471177 - DNA, 15 bp, Homo sapiens
ctgaggcctcagtgt

SEQ ID NO: 1471178 - DNA, 15 bp, Homo sapiens
tcactgaggcctcag

SEQ ID NO: 1471179 - DNA, 15 bp, Homo sapiens
ctcactgaggcctca

SEQ ID NO: 1471180 - DNA, 15 bp, Homo sapiens
gctcactgaggcctc

SEQ ID NO: 1471181 - DNA, 15 bp, Homo sapiens
ggctcactgaggcct

SEQ ID NO: 1471182 - DNA, 15 bp, Homo sapiens
gggctcactgaggcc

SEQ ID NO: 1471183 - DNA, 15 bp, Homo sapiens
agggctcactgaggc

SEQ ID NO: 1471184 - DNA, 15 bp, Homo sapiens
gagggctcactgagg

SEQ ID NO: 1471185 - DNA, 15 bp, Homo sapiens
agagggctcactgag

SEQ ID NO: 1471186 - DNA, 15 bp, Homo sapiens
cagagggctcactga

SEQ ID NO: 1471187 - DNA, 15 bp, Homo sapiens
tcagagggctcactg

SEQ ID NO: 1471188 - DNA, 15 bp, Homo sapiens
ctcagagggctcact

SEQ ID NO: 1471189 - DNA, 15 bp, Homo sapiens
acctcagagggctca

SEQ ID NO: 1471190 - DNA, 15 bp, Homo sapiens
gacctcagagggctc

SEQ ID NO: 1471191 - DNA, 15 bp, Homo sapiens
ggacctcagagggct

SEQ ID NO: 1471192 - DNA, 15 bp, Homo sapiens
tggacctcagagggc

SEQ ID NO: 1471193 - DNA, 15 bp, Homo sapiens
ctggacctcagaggg

SEQ ID NO: 1471194 - DNA, 15 bp, Homo sapiens
gctggacctcagagg

SEQ ID NO: 1471195 - DNA, 15 bp, Homo sapiens
agctggacctcagag

SEQ ID NO: 1471196 - DNA, 15 bp, Homo sapiens
gagctggacctcaga

SEQ ID NO: 1471197 - DNA, 15 bp, Homo sapiens
ggagctggacctcag

SEQ ID NO: 1471198 - DNA, 15 bp, Homo sapiens
aggagctggacctca

SEQ ID NO: 1471199 - DNA, 15 bp, Homo sapiens
taggagctggacctc

SEQ ID NO: 1471200 - DNA, 15 bp, Homo sapiens
gtaggagctggacct

SEQ ID NO: 1471201 - DNA, 15 bp, Homo sapiens
ggtaggagctggacc

SEQ ID NO: 1471202 - DNA, 15 bp, Homo sapiens
aggtaggagctggac

SEQ ID NO: 1471203 - DNA, 15 bp, Homo sapiens
aaggtaggagctgga

SEQ ID NO: 1471204 - DNA, 15 bp, Homo sapiens
gaaggtaggagctgg

SEQ ID NO: 1471205 - DNA, 15 bp, Homo sapiens
cgaaggtaggagctg

SEQ ID NO: 1471206 - DNA, 15 bp, Homo sapiens
acgaaggtaggagct

SEQ ID NO: 1471207 - DNA, 15 bp, Homo sapiens
tacgaaggtaggagc

SEQ ID NO: 1471208 - DNA, 15 bp, Homo sapiens
ctacgaaggtaggag

SEQ ID NO: 1471209 - DNA, 15 bp, Homo sapiens
cctacgaaggtagga

SEQ ID NO: 1471210 - DNA, 15 bp, Homo sapiens
acctacgaaggtagg

SEQ ID NO: 1471211 - DNA, 15 bp, Homo sapiens
cacctacgaaggtag

SEQ ID NO: 1471212 - DNA, 15 bp, Homo sapiens
acacctacgaaggta

SEQ ID NO: 1471213 - DNA, 15 bp, Homo sapiens
aacacctacgaaggt

SEQ ID NO: 1471214 - DNA, 15 bp, Homo sapiens
gaacacctacgaagg

SEQ ID NO: 1471215 - DNA, 15 bp, Homo sapiens
tgaacacctacgaag

SEQ ID NO: 1471216 - DNA, 15 bp, Homo sapiens
gtgaacacctacgaa

SEQ ID NO: 1471217 - DNA, 15 bp, Homo sapiens
cgtgaacacctacga

SEQ ID NO: 1471218 - DNA, 15 bp, Homo sapiens
ccgtgaacacctacg

SEQ ID NO: 1471219 - DNA, 15 bp, Homo sapiens
gccgtgaacacctac

SEQ ID NO: 1471220 - DNA, 15 bp, Homo sapiens
ggccgtgaacaccta

SEQ ID NO: 1471221 - DNA, 15 bp, Homo sapiens
aggccgtgaacacct

SEQ ID NO: 1471222 - DNA, 15 bp, Homo sapiens
gaggccgtgaacacc

SEQ ID NO: 1471223 - DNA, 15 bp, Homo sapiens
ggaggccgtgaacac

SEQ ID NO: 1471224 - DNA, 15 bp, Homo sapiens
tggaggccgtgaaca

SEQ ID NO: 1471225 - DNA, 15 bp, Homo sapiens
ctggaggccgtgaac

SEQ ID NO: 1471226 - DNA, 15 bp, Homo sapiens
cctggaggccgtgaa

SEQ ID NO: 1471227 - DNA, 15 bp, Homo sapiens
acctggaggccgtga

SEQ ID NO: 1471228 - DNA, 15 bp, Homo sapiens
aacctggaggccgtg

SEQ ID NO: 1471229 - DNA, 15 bp, Homo sapiens
gaacctggaggccgt

SEQ ID NO: 1471230 - DNA, 15 bp, Homo sapiens
tgaacctggaggccg

SEQ ID NO: 1471231 - DNA, 15 bp, Homo sapiens
atgaacctggaggcc

SEQ ID NO: 1471232 - DNA, 15 bp, Homo sapiens
catgaacctggaggc

SEQ ID NO: 1471233 - DNA, 15 bp, Homo sapiens
ccatgaacctggagg

SEQ ID NO: 1471234 - DNA, 15 bp, Homo sapiens
gccatgaacctggag

SEQ ID NO: 1471235 - DNA, 15 bp, Homo sapiens
cgccatgaacctgga

SEQ ID NO: 1471236 - DNA, 15 bp, Homo sapiens
acgccatgaacctgg

SEQ ID NO: 1471237 - DNA, 15 bp, Homo sapiens
cacgccatgaacctg

SEQ ID NO: 1471238 - DNA, 15 bp, Homo sapiens
gcacgccatgaacct

SEQ ID NO: 1471239 - DNA, 15 bp, Homo sapiens
ggcacgccatgaacc

SEQ ID NO: 1471240 - DNA, 15 bp, Homo sapiens
cggcacgccatgaac

SEQ ID NO: 1471241 - DNA, 15 bp, Homo sapiens
ccggcacgccatgaa

SEQ ID NO: 1471242 - DNA, 15 bp, Homo sapiens
tccggcacgccatga

SEQ ID NO: 1471243 - DNA, 15 bp, Homo sapiens
atccggcacgccatg

SEQ ID NO: 1471244 - DNA, 15 bp, Homo sapiens
gatccggcacgccat

SEQ ID NO: 1471245 - DNA, 15 bp, Homo sapiens
tgatccggcacgcca

SEQ ID NO: 1471246 - DNA, 15 bp, Homo sapiens
gtgatccggcacgcc

SEQ ID NO: 1471247 - DNA, 15 bp, Homo sapiens
cgtgatccggcacgc

SEQ ID NO: 1471248 - DNA, 15 bp, Homo sapiens
acgtgatccggcacg

SEQ ID NO: 1471249 - DNA, 15 bp, Homo sapiens
cacgtgatccggcac

SEQ ID NO: 1471250 - DNA, 15 bp, Homo sapiens
tcacgtgatccggca

SEQ ID NO: 1471251 - DNA, 15 bp, Homo sapiens
atcacgtgatccggc

SEQ ID NO: 1471252 - DNA, 15 bp, Homo sapiens
tatcacgtgatccgg

SEQ ID NO: 1471253 - DNA, 15 bp, Homo sapiens
gtatcacgtgatccg

SEQ ID NO: 1471254 - DNA, 15 bp, Homo sapiens
agtatcacgtgatcc

SEQ ID NO: 1471255 - DNA, 15 bp, Homo sapiens
gagtatcacgtgatc

SEQ ID NO: 1471256 - DNA, 15 bp, Homo sapiens
cgagtatcacgtgat

SEQ ID NO: 1471257 - DNA, 15 bp, Homo sapiens
acgagtatcacgtga

SEQ ID NO: 1471258 - DNA, 15 bp, Homo sapiens
gacgagtatcacgtg

SEQ ID NO: 1471259 - DNA, 15 bp, Homo sapiens
tgacgagtatcacgt

SEQ ID NO: 1471260 - DNA, 15 bp, Homo sapiens
ctgacgagtatcacg

SEQ ID NO: 1471261 - DNA, 15 bp, Homo sapiens
tctgacgagtatcac

SEQ ID NO: 1471262 - DNA, 15 bp, Homo sapiens
ttctgacgagtatca

SEQ ID NO: 1471263 - DNA, 15 bp, Homo sapiens
tttctgacgagtatc

SEQ ID NO: 1471264 - DNA, 15 bp, Homo sapiens
atttctgacgagtat

SEQ ID NO: 1471265 - DNA, 15 bp, Homo sapiens
gatttctgacgagta

SEQ ID NO: 1471266 - DNA, 15 bp, Homo sapiens
ggatttctgacgagt

SEQ ID NO: 1471267 - DNA, 15 bp, Homo sapiens
gggatttctgacgag

SEQ ID NO: 1471268 - DNA, 15 bp, Homo sapiens
tgggatttctgacga

SEQ ID NO: 1471269 - DNA, 15 bp, Homo sapiens
atgggatttctgacg

SEQ ID NO: 1471270 - DNA, 15 bp, Homo sapiens
aatgggatttctgac

SEQ ID NO: 1471271 - DNA, 15 bp, Homo sapiens
gaatgggatttctga

SEQ ID NO: 1471272 - DNA, 15 bp, Homo sapiens
ggaatgggatttctg

SEQ ID NO: 1471273 - DNA, 15 bp, Homo sapiens
gggaatgggatttct

SEQ ID NO: 1471274 - DNA, 15 bp, Homo sapiens
ggggaatgggatttc

SEQ ID NO: 1471275 - DNA, 15 bp, Homo sapiens
gggggaatgggattt

SEQ ID NO: 1471276 - DNA, 15 bp, Homo sapiens
ggggggaatgggatt

SEQ ID NO: 1471277 - DNA, 15 bp, Homo sapiens
gggggggaatgggat

SEQ ID NO: 1471278 - DNA, 15 bp, Homo sapiens
tgggggggaatggga

SEQ ID NO: 1471279 - DNA, 15 bp, Homo sapiens
ctgggggggaatggg

SEQ ID NO: 1471280 - DNA, 15 bp, Homo sapiens
gctgggggggaatgg

SEQ ID NO: 1471281 - DNA, 15 bp, Homo sapiens
tgctgggggggaatg

SEQ ID NO: 1471282 - DNA, 15 bp, Homo sapiens
atgctgggggggaat

SEQ ID NO: 1471283 - DNA, 15 bp, Homo sapiens
catgctgggggggaa

SEQ ID NO: 1471284 - DNA, 15 bp, Homo sapiens
acatgctggggggga

SEQ ID NO: 1471285 - DNA, 15 bp, Homo sapiens
gacatgctggggggg

SEQ ID NO: 1471286 - DNA, 15 bp, Homo sapiens
agacatgctgggggg

SEQ ID NO: 1471287 - DNA, 15 bp, Homo sapiens
gagacatgctggggg

SEQ ID NO: 1471288 - DNA, 15 bp, Homo sapiens
cgagacatgctgggg

SEQ ID NO: 1471289 - DNA, 15 bp, Homo sapiens
ccgagacatgctggg

SEQ ID NO: 1471290 - DNA, 15 bp, Homo sapiens
cccgagacatgctgg

SEQ ID NO: 1471291 - DNA, 15 bp, Homo sapiens
gcccgagacatgctg

SEQ ID NO: 1471292 - DNA, 15 bp, Homo sapiens
ggcccgagacatgct

SEQ ID NO: 1471293 - DNA, 15 bp, Homo sapiens
aggcccgagacatgc

SEQ ID NO: 1471294 - DNA, 15 bp, Homo sapiens
caggcccgagacatg

SEQ ID NO: 1471295 - DNA, 15 bp, Homo sapiens
ccaggcccgagacat

SEQ ID NO: 1471296 - DNA, 15 bp, Homo sapiens
gccaggcccgagaca

SEQ ID NO: 1471297 - DNA, 15 bp, Homo sapiens
cgccaggcccgagac

SEQ ID NO: 1471298 - DNA, 15 bp, Homo sapiens
ccgccaggcccgaga

SEQ ID NO: 1471299 - DNA, 15 bp, Homo sapiens
cccgccaggcccgag

SEQ ID NO: 1471300 - DNA, 15 bp, Homo sapiens
gcccgccaggcccga

SEQ ID NO: 1471301 - DNA, 15 bp, Homo sapiens
cgcccgccaggcccg

SEQ ID NO: 1471302 - DNA, 15 bp, Homo sapiens
tcgcccgccaggccc

SEQ ID NO: 1471303 - DNA, 15 bp, Homo sapiens
atcgcccgccaggcc

SEQ ID NO: 1471304 - DNA, 15 bp, Homo sapiens
catcgcccgccaggc

SEQ ID NO: 1471305 - DNA, 15 bp, Homo sapiens
acatcgcccgccagg

SEQ ID NO: 1471306 - DNA, 15 bp, Homo sapiens
gacatcgcccgccag

SEQ ID NO: 1471307 - DNA, 15 bp, Homo sapiens
ggacatcgcccgcca

SEQ ID NO: 1471308 - DNA, 15 bp, Homo sapiens
tggacatcgcccgcc

SEQ ID NO: 1471309 - DNA, 15 bp, Homo sapiens
ctggacatcgcccgc

SEQ ID NO: 1471310 - DNA, 15 bp, Homo sapiens
cctggacatcgcccg

SEQ ID NO: 1471311 - DNA, 15 bp, Homo sapiens
ccctggacatcgccc

SEQ ID NO: 1471312 - DNA, 15 bp, Homo sapiens
gccctggacatcgcc

SEQ ID NO: 1471313 - DNA, 15 bp, Homo sapiens
agccctggacatcgc

SEQ ID NO: 1471314 - DNA, 15 bp, Homo sapiens
aagccctggacatcg

SEQ ID NO: 1471315 - DNA, 15 bp, Homo sapiens
aaagccctggacatc

SEQ ID NO: 1471316 - DNA, 15 bp, Homo sapiens
gaaagccctggacat

SEQ ID NO: 1471317 - DNA, 15 bp, Homo sapiens
ggaaagccctggaca

SEQ ID NO: 1471318 - DNA, 15 bp, Homo sapiens
gggaaagccctggac

SEQ ID NO: 1471319 - DNA, 15 bp, Homo sapiens
tgggaaagccctgga

SEQ ID NO: 1471320 - DNA, 15 bp, Homo sapiens
gtgggaaagccctgg

SEQ ID NO: 1471321 - DNA, 15 bp, Homo sapiens
tgtgggaaagccctg

SEQ ID NO: 1471322 - DNA, 15 bp, Homo sapiens
ctgtgggaaagccct

SEQ ID NO: 1471323 - DNA, 15 bp, Homo sapiens
actgtgggaaagccc

SEQ ID NO: 1471324 - DNA, 15 bp, Homo sapiens
aactgtgggaaagcc

SEQ ID NO: 1471325 - DNA, 15 bp, Homo sapiens
taactgtgggaaagc

SEQ ID NO: 1471326 - DNA, 15 bp, Homo sapiens
ataactgtgggaaag

SEQ ID NO: 1471327 - DNA, 15 bp, Homo sapiens
aataactgtgggaaa

SEQ ID NO: 1471328 - DNA, 15 bp, Homo sapiens
gaataactgtgggaa

SEQ ID NO: 1471329 - DNA, 15 bp, Homo sapiens
ggaataactgtggga

SEQ ID NO: 1471330 - DNA, 15 bp, Homo sapiens
aggaataactgtggg

SEQ ID NO: 1471331 - DNA, 15 bp, Homo sapiens
gaggaataactgtgg

SEQ ID NO: 1471332 - DNA, 15 bp, Homo sapiens
agaggaataactgtg

SEQ ID NO: 1471333 - DNA, 15 bp, Homo sapiens
aagaggaataactgt

SEQ ID NO: 1471334 - DNA, 15 bp, Homo sapiens
gaagaggaataactg

SEQ ID NO: 1471335 - DNA, 15 bp, Homo sapiens
tgaagaggaataact

SEQ ID NO: 1471336 - DNA, 15 bp, Homo sapiens
ctgaagaggaataac

SEQ ID NO: 1471337 - DNA, 15 bp, Homo sapiens
gctgaagaggaataa

SEQ ID NO: 1471338 - DNA, 15 bp, Homo sapiens
tgctgaagaggaata

SEQ ID NO: 1471339 - DNA, 15 bp, Homo sapiens
ctgctgaagaggaat

SEQ ID NO: 1471340 - DNA, 15 bp, Homo sapiens
tctgctgaagaggaa

SEQ ID NO: 1471341 - DNA, 15 bp, Homo sapiens
ctctgctgaagagga

SEQ ID NO: 1471342 - DNA, 15 bp, Homo sapiens
tctctgctgaagagg

SEQ ID NO: 1471343 - DNA, 15 bp, Homo sapiens
ttctctgctgaagag

SEQ ID NO: 1471344 - DNA, 15 bp, Homo sapiens
tttctctgctgaaga

SEQ ID NO: 1471345 - DNA, 15 bp, Homo sapiens
gtttctctgctgaag

SEQ ID NO: 1471346 - DNA, 15 bp, Homo sapiens
ggtttctctgctgaa

SEQ ID NO: 1471347 - DNA, 15 bp, Homo sapiens
tggtttctctgctga

SEQ ID NO: 1471348 - DNA, 15 bp, Homo sapiens
atggtttctctgctg

SEQ ID NO: 1471349 - DNA, 15 bp, Homo sapiens
gatggtttctctgct

SEQ ID NO: 1471350 - DNA, 15 bp, Homo sapiens
agatggtttctctgc

SEQ ID NO: 1471351 - DNA, 15 bp, Homo sapiens
gagatggtttctctg

SEQ ID NO: 1471352 - DNA, 15 bp, Homo sapiens
cgagatggtttctct

SEQ ID NO: 1471353 - DNA, 15 bp, Homo sapiens
ccgagatggtttctc

SEQ ID NO: 1471354 - DNA, 15 bp, Homo sapiens
cccgagatggtttct

SEQ ID NO: 1471355 - DNA, 15 bp, Homo sapiens
ccccgagatggtttc

SEQ ID NO: 1471356 - DNA, 15 bp, Homo sapiens
cccccgagatggttt

SEQ ID NO: 1471357 - DNA, 15 bp, Homo sapiens
gcccccgagatggtt

SEQ ID NO: 1471358 - DNA, 15 bp, Homo sapiens
tgcccccgagatggt

SEQ ID NO: 1471359 - DNA, 15 bp, Homo sapiens
ctgcccccgagatgg

SEQ ID NO: 1471360 - DNA, 15 bp, Homo sapiens
gctgcccccgagatg

SEQ ID NO: 1471361 - DNA, 15 bp, Homo sapiens
ggctgcccccgagat

SEQ ID NO: 1471362 - DNA, 15 bp, Homo sapiens
gggctgcccccgaga

SEQ ID NO: 1471363 - DNA, 15 bp, Homo sapiens
agggctgcccccgag

SEQ ID NO: 1471364 - DNA, 15 bp, Homo sapiens
cagggctgcccccga

SEQ ID NO: 1471365 - DNA, 15 bp, Homo sapiens
ccagggctgcccccg

SEQ ID NO: 1471366 - DNA, 15 bp, Homo sapiens
cccagggctgccccc

SEQ ID NO: 1471367 - DNA, 15 bp, Homo sapiens
tcccagggctgcccc

SEQ ID NO: 1471368 - DNA, 15 bp, Homo sapiens
ctcccagggctgccc

SEQ ID NO: 1471369 - DNA, 15 bp, Homo sapiens
actcccagggctgcc

SEQ ID NO: 1471370 - DNA, 15 bp, Homo sapiens
cactcccagggctgc

SEQ ID NO: 1471371 - DNA, 15 bp, Homo sapiens
ccactcccagggctg

SEQ ID NO: 1471372 - DNA, 15 bp, Homo sapiens
gccactcccagggct

SEQ ID NO: 1471373 - DNA, 15 bp, Homo sapiens
tgccactcccagggc

SEQ ID NO: 1471374 - DNA, 15 bp, Homo sapiens
gtgccactcccaggg

SEQ ID NO: 1471375 - DNA, 15 bp, Homo sapiens
tgtgccactcccagg

SEQ ID NO: 1471376 - DNA, 15 bp, Homo sapiens
atgtgccactcccag

SEQ ID NO: 1471377 - DNA, 15 bp, Homo sapiens
catgtgccactccca

SEQ ID NO: 1471378 - DNA, 15 bp, Homo sapiens
tcatgtgccactccc

SEQ ID NO: 1471379 - DNA, 15 bp, Homo sapiens
ctcatgtgccactcc

SEQ ID NO: 1471380 - DNA, 15 bp, Homo sapiens
cctcatgtgccactc

SEQ ID NO: 1471381 - DNA, 15 bp, Homo sapiens
ccctcatgtgccact

SEQ ID NO: 1471382 - DNA, 15 bp, Homo sapiens
accctcatgtgccac

SEQ ID NO: 1471383 - DNA, 15 bp, Homo sapiens
taccctcatgtgcca

SEQ ID NO: 1471384 - DNA, 15 bp, Homo sapiens
ttaccctcatgtgcc

SEQ ID NO: 1471385 - DNA, 15 bp, Homo sapiens
gttaccctcatgtgc

SEQ ID NO: 1471386 - DNA, 15 bp, Homo sapiens
tgttaccctcatgtg

SEQ ID NO: 1471387 - DNA, 15 bp, Homo sapiens
ttgttaccctcatgt

SEQ ID NO: 1471388 - DNA, 15 bp, Homo sapiens
cttgttaccctcatg

SEQ ID NO: 1471389 - DNA, 15 bp, Homo sapiens
ccttgttaccctcat

SEQ ID NO: 1471390 - DNA, 15 bp, Homo sapiens
tccttgttaccctca

SEQ ID NO: 1471391 - DNA, 15 bp, Homo sapiens
gtccttgttaccctc

SEQ ID NO: 1471392 - DNA, 15 bp, Homo sapiens
agtccttgttaccct

SEQ ID NO: 1471393 - DNA, 15 bp, Homo sapiens
cagtccttgttaccc

SEQ ID NO: 1471394 - DNA, 15 bp, Homo sapiens
ccagtccttgttacc

SEQ ID NO: 1471395 - DNA, 15 bp, Homo sapiens
cccagtccttgttac

SEQ ID NO: 1471396 - DNA, 15 bp, Homo sapiens
ccccagtccttgtta

SEQ ID NO: 1471397 - DNA, 15 bp, Homo sapiens
tccccagtccttgtt

SEQ ID NO: 1471398 - DNA, 15 bp, Homo sapiens
atccccagtccttgt

SEQ ID NO: 1471399 - DNA, 15 bp, Homo sapiens
gatccccagtccttg

SEQ ID NO: 1471400 - DNA, 15 bp, Homo sapiens
ggatccccagtcctt

SEQ ID NO: 1471401 - DNA, 15 bp, Homo sapiens
aggatccccagtcct

SEQ ID NO: 1471402 - DNA, 15 bp, Homo sapiens
caggatccccagtcc

SEQ ID NO: 1471403 - DNA, 15 bp, Homo sapiens
ccaggatccccagtc

SEQ ID NO: 1471404 - DNA, 15 bp, Homo sapiens
gccaggatccccagt

SEQ ID NO: 1471405 - DNA, 15 bp, Homo sapiens
tgccaggatccccag

SEQ ID NO: 1471406 - DNA, 15 bp, Homo sapiens
atgccaggatcccca

SEQ ID NO: 1471407 - DNA, 15 bp, Homo sapiens
gatgccaggatcccc

SEQ ID NO: 1471408 - DNA, 15 bp, Homo sapiens
ggatgccaggatccc

SEQ ID NO: 1471409 - DNA, 15 bp, Homo sapiens
gggatgccaggatcc

SEQ ID NO: 1471410 - DNA, 15 bp, Homo sapiens
cgggatgccaggatc

SEQ ID NO: 1471411 - DNA, 15 bp, Homo sapiens
tcgggatgccaggat

SEQ ID NO: 1471412 - DNA, 15 bp, Homo sapiens
atcgggatgccagga

SEQ ID NO: 1471413 - DNA, 15 bp, Homo sapiens
catcgggatgccagg

SEQ ID NO: 1471414 - DNA, 15 bp, Homo sapiens
gcatcgggatgccag

SEQ ID NO: 1471415 - DNA, 15 bp, Homo sapiens
agcatcgggatgcca

SEQ ID NO: 1471416 - DNA, 15 bp, Homo sapiens
gagcatcgggatgcc

SEQ ID NO: 1471417 - DNA, 15 bp, Homo sapiens
ggagcatcgggatgc

SEQ ID NO: 1471418 - DNA, 15 bp, Homo sapiens
tggagcatcgggatg

SEQ ID NO: 1471419 - DNA, 15 bp, Homo sapiens
ttggagcatcgggat

SEQ ID NO: 1471420 - DNA, 15 bp, Homo sapiens
cttggagcatcggga

SEQ ID NO: 1471421 - DNA, 15 bp, Homo sapiens
gcttggagcatcggg

SEQ ID NO: 1471422 - DNA, 15 bp, Homo sapiens
tgcttggagcatcgg

SEQ ID NO: 1471423 - DNA, 15 bp, Homo sapiens
ttgcttggagcatcg

SEQ ID NO: 1471424 - DNA, 15 bp, Homo sapiens
tttgcttggagcatc

SEQ ID NO: 1471425 - DNA, 15 bp, Homo sapiens
gtttgcttggagcat

SEQ ID NO: 1471426 - DNA, 15 bp, Homo sapiens
ggtttgcttggagca

SEQ ID NO: 1471427 - DNA, 15 bp, Homo sapiens
aggtttgcttggagc

SEQ ID NO: 1471428 - DNA, 15 bp, Homo sapiens
taggtttgcttggag

SEQ ID NO: 1471429 - DNA, 15 bp, Homo sapiens
ctaggtttgcttgga

SEQ ID NO: 1471430 - DNA, 15 bp, Homo sapiens
gctaggtttgcttgg

SEQ ID NO: 1471431 - DNA, 15 bp, Homo sapiens
ggctaggtttgcttg

SEQ ID NO: 1471432 - DNA, 15 bp, Homo sapiens
gggctaggtttgctt

SEQ ID NO: 1471433 - DNA, 15 bp, Homo sapiens
cgggctaggtttgct

SEQ ID NO: 1471434 - DNA, 15 bp, Homo sapiens
ccgggctaggtttgc

SEQ ID NO: 1471435 - DNA, 15 bp, Homo sapiens
cccgggctaggtttg

SEQ ID NO: 1471436 - DNA, 15 bp, Homo sapiens
ccccgggctaggttt

SEQ ID NO: 1471437 - DNA, 15 bp, Homo sapiens
accccgggctaggtt

SEQ ID NO: 1471438 - DNA, 15 bp, Homo sapiens
caccccgggctaggt

SEQ ID NO: 1471439 - DNA, 15 bp, Homo sapiens
ccaccccgggctagg

SEQ ID NO: 1471440 - DNA, 15 bp, Homo sapiens
cccaccccgggctag

SEQ ID NO: 1471441 - DNA, 15 bp, Homo sapiens
ccccaccccgggcta

SEQ ID NO: 1471442 - DNA, 15 bp, Homo sapiens
tccccaccccgggct

SEQ ID NO: 1471443 - DNA, 15 bp, Homo sapiens
atccccaccccgggc

SEQ ID NO: 1471444 - DNA, 15 bp, Homo sapiens
aatccccaccccggg

SEQ ID NO: 1471445 - DNA, 15 bp, Homo sapiens
gaatccccaccccgg

SEQ ID NO: 1471446 - DNA, 15 bp, Homo sapiens
ggaatccccaccccg

SEQ ID NO: 1471447 - DNA, 15 bp, Homo sapiens
gggaatccccacccc

SEQ ID NO: 1471448 - DNA, 15 bp, Homo sapiens
agggaatccccaccc

SEQ ID NO: 1471449 - DNA, 15 bp, Homo sapiens
cagggaatccccacc

SEQ ID NO: 1471450 - DNA, 15 bp, Homo sapiens
tcagggaatccccac

SEQ ID NO: 1471451 - DNA, 15 bp, Homo sapiens
atcagggaatcccca

SEQ ID NO: 1471452 - DNA, 15 bp, Homo sapiens
catcagggaatcccc

SEQ ID NO: 1471453 - DNA, 15 bp, Homo sapiens
gcatcagggaatccc

SEQ ID NO: 1471454 - DNA, 15 bp, Homo sapiens
tgcatcagggaatcc

SEQ ID NO: 1471455 - DNA, 15 bp, Homo sapiens
ctgcatcagggaatc

SEQ ID NO: 1471456 - DNA, 15 bp, Homo sapiens
gctgcatcagggaat

SEQ ID NO: 1471457 - DNA, 15 bp, Homo sapiens
ggctgcatcagggaa

SEQ ID NO: 1471458 - DNA, 15 bp, Homo sapiens
tggctgcatcaggga

SEQ ID NO: 1471459 - DNA, 15 bp, Homo sapiens
ttggctgcatcaggg

SEQ ID NO: 1471460 - DNA, 15 bp, Homo sapiens
cttggctgcatcagg

SEQ ID NO: 1471461 - DNA, 15 bp, Homo sapiens
gcttggctgcatcag

SEQ ID NO: 1471462 - DNA, 15 bp, Homo sapiens
agcttggctgcatca

SEQ ID NO: 1471463 - DNA, 15 bp, Homo sapiens
gagcttggctgcatc

SEQ ID NO: 1471464 - DNA, 15 bp, Homo sapiens
ggagcttggctgcat

SEQ ID NO: 1471465 - DNA, 15 bp, Homo sapiens
gggagcttggctgca

SEQ ID NO: 1471466 - DNA, 15 bp, Homo sapiens
tgggagcttggctgc

SEQ ID NO: 1471467 - DNA, 15 bp, Homo sapiens
ttgggagcttggctg

SEQ ID NO: 1471468 - DNA, 15 bp, Homo sapiens
attgggagcttggct

SEQ ID NO: 1471469 - DNA, 15 bp, Homo sapiens
cattgggagcttggc

SEQ ID NO: 1471470 - DNA, 15 bp, Homo sapiens
tcattgggagcttgg

SEQ ID NO: 1471471 - DNA, 15 bp, Homo sapiens
ctcattgggagcttg

SEQ ID NO: 1471472 - DNA, 15 bp, Homo sapiens
cctcattgggagctt

SEQ ID NO: 1471473 - DNA, 15 bp, Homo sapiens
ccctcattgggagct

SEQ ID NO: 1471474 - DNA, 15 bp, Homo sapiens
tccctcattgggagc

SEQ ID NO: 1471475 - DNA, 15 bp, Homo sapiens
gtccctcattgggag

SEQ ID NO: 1471476 - DNA, 15 bp, Homo sapiens
ggtccctcattggga

SEQ ID NO: 1471477 - DNA, 15 bp, Homo sapiens
tggtccctcattggg

SEQ ID NO: 1471478 - DNA, 15 bp, Homo sapiens
ctggtccctcattgg

SEQ ID NO: 1471479 - DNA, 15 bp, Homo sapiens
actggtccctcattg

SEQ ID NO: 1471480 - DNA, 15 bp, Homo sapiens
cactggtccctcatt

SEQ ID NO: 1471481 - DNA, 15 bp, Homo sapiens
ccactggtccctcat

SEQ ID NO: 1471482 - DNA, 15 bp, Homo sapiens
cccactggtccctca

SEQ ID NO: 1471483 - DNA, 15 bp, Homo sapiens
ccccactggtccctc

SEQ ID NO: 1471484 - DNA, 15 bp, Homo sapiens
gccccactggtccct

SEQ ID NO: 1471485 - DNA, 15 bp, Homo sapiens
agccccactggtccc

SEQ ID NO: 1471486 - DNA, 15 bp, Homo sapiens
cagccccactggtcc

SEQ ID NO: 1471487 - DNA, 15 bp, Homo sapiens
acagccccactggtc

SEQ ID NO: 1471488 - DNA, 15 bp, Homo sapiens
gacagccccactggt

SEQ ID NO: 1471489 - DNA, 15 bp, Homo sapiens
ggacagccccactgg

SEQ ID NO: 1471490 - DNA, 15 bp, Homo sapiens
aggacagccccactg

SEQ ID NO: 1471491 - DNA, 15 bp, Homo sapiens
gaggacagccccact

SEQ ID NO: 1471492 - DNA, 15 bp, Homo sapiens
tgaggacagccccac

SEQ ID NO: 1471493 - DNA, 15 bp, Homo sapiens
ctgaggacagcccca

SEQ ID NO: 1471494 - DNA, 15 bp, Homo sapiens
gctgaggacagcccc

SEQ ID NO: 1471495 - DNA, 15 bp, Homo sapiens
ggctgaggacagccc

SEQ ID NO: 1471496 - DNA, 15 bp, Homo sapiens
gggctgaggacagcc

SEQ ID NO: 1471497 - DNA, 15 bp, Homo sapiens
tgggctgaggacagc

SEQ ID NO: 1471498 - DNA, 15 bp, Homo sapiens
ctgggctgaggacag

SEQ ID NO: 1471499 - DNA, 15 bp, Homo sapiens
gctgggctgaggaca

SEQ ID NO: 1471500 - DNA, 15 bp, Homo sapiens
ggctgggctgaggac

SEQ ID NO: 1471501 - DNA, 15 bp, Homo sapiens
gggctgggctgagga

SEQ ID NO: 1471502 - DNA, 15 bp, Homo sapiens
tgggctgggctgagg

SEQ ID NO: 1471503 - DNA, 15 bp, Homo sapiens
atgggctgggctgag

SEQ ID NO: 1471504 - DNA, 15 bp, Homo sapiens
gatgggctgggctga

SEQ ID NO: 1471505 - DNA, 15 bp, Homo sapiens
tgatgggctgggctg

SEQ ID NO: 1471506 - DNA, 15 bp, Homo sapiens
ttgatgggctgggct

SEQ ID NO: 1471507 - DNA, 15 bp, Homo sapiens
cttgatgggctgggc

SEQ ID NO: 1471508 - DNA, 15 bp, Homo sapiens
ccttgatgggctggg

SEQ ID NO: 1471509 - DNA, 15 bp, Homo sapiens
tccttgatgggctgg

SEQ ID NO: 1471510 - DNA, 15 bp, Homo sapiens
gtccttgatgggctg

SEQ ID NO: 1471511 - DNA, 15 bp, Homo sapiens
tgtccttgatgggct

SEQ ID NO: 1471512 - DNA, 15 bp, Homo sapiens
ttgtccttgatgggc

SEQ ID NO: 1471513 - DNA, 15 bp, Homo sapiens
cttgtccttgatggg

SEQ ID NO: 1471514 - DNA, 15 bp, Homo sapiens
tcttgtccttgatgg

SEQ ID NO: 1471515 - DNA, 15 bp, Homo sapiens
ctcttgtccttgatg

SEQ ID NO: 1471516 - DNA, 15 bp, Homo sapiens
cctcttgtccttgat

SEQ ID NO: 1471517 - DNA, 15 bp, Homo sapiens
ccctcttgtccttga

SEQ ID NO: 1471518 - DNA, 15 bp, Homo sapiens
tccctcttgtccttg

SEQ ID NO: 1471519 - DNA, 15 bp, Homo sapiens
gtccctcttgtcctt

SEQ ID NO: 1471520 - DNA, 15 bp, Homo sapiens
tgtccctcttgtcct

SEQ ID NO: 1471521 - DNA, 15 bp, Homo sapiens
ctgtccctcttgtcc

SEQ ID NO: 1471522 - DNA, 15 bp, Homo sapiens
gctgtccctcttgtc

SEQ ID NO: 1471523 - DNA, 15 bp, Homo sapiens
tgctgtccctcttgt

SEQ ID NO: 1471524 - DNA, 15 bp, Homo sapiens
ctgctgtccctcttg

SEQ ID NO: 1471525 - DNA, 15 bp, Homo sapiens
tctgctgtccctctt

SEQ ID NO: 1471526 - DNA, 15 bp, Homo sapiens
ttctgctgtccctct

SEQ ID NO: 1471527 - DNA, 15 bp, Homo sapiens
cttctgctgtccctc

SEQ ID NO: 1471528 - DNA, 15 bp, Homo sapiens
ccttctgctgtccct

SEQ ID NO: 1471529 - DNA, 15 bp, Homo sapiens
accttctgctgtccc

SEQ ID NO: 1471530 - DNA, 15 bp, Homo sapiens
aaccttctgctgtcc

SEQ ID NO: 1471531 - DNA, 15 bp, Homo sapiens
gaaccttctgctgtc

SEQ ID NO: 1471532 - DNA, 15 bp, Homo sapiens
tgaaccttctgctgt

SEQ ID NO: 1471533 - DNA, 15 bp, Homo sapiens
ctgaaccttctgctg

SEQ ID NO: 1471534 - DNA, 15 bp, Homo sapiens
cctgaaccttctgct

SEQ ID NO: 1471535 - DNA, 15 bp, Homo sapiens
acctgaaccttctgc

SEQ ID NO: 1471536 - DNA, 15 bp, Homo sapiens
gacctgaaccttctg

SEQ ID NO: 1471537 - DNA, 15 bp, Homo sapiens
ggacctgaaccttct

SEQ ID NO: 1471538 - DNA, 15 bp, Homo sapiens
gggacctgaaccttc

SEQ ID NO: 1471539 - DNA, 15 bp, Homo sapiens
ggggacctgaacctt

SEQ ID NO: 1471540 - DNA, 15 bp, Homo sapiens
tggggacctgaacct

SEQ ID NO: 1471541 - DNA, 15 bp, Homo sapiens
ctggggacctgaacc

SEQ ID NO: 1471542 - DNA, 15 bp, Homo sapiens
cctggggacctgaac

SEQ ID NO: 1471543 - DNA, 15 bp, Homo sapiens
ccctggggacctgaa

SEQ ID NO: 1471544 - DNA, 15 bp, Homo sapiens
gccctggggacctga

SEQ ID NO: 1471545 - DNA, 15 bp, Homo sapiens
ggccctggggacctg

SEQ ID NO: 1471546 - DNA, 15 bp, Homo sapiens
tggccctggggacct

SEQ ID NO: 1471547 - DNA, 15 bp, Homo sapiens
gtggccctggggacc

SEQ ID NO: 1471548 - DNA, 15 bp, Homo sapiens
ggtggccctggggac

SEQ ID NO: 1471549 - DNA, 15 bp, Homo sapiens
tggtggccctgggga

SEQ ID NO: 1471550 - DNA, 15 bp, Homo sapiens
ctggtggccctgggg

SEQ ID NO: 1471551 - DNA, 15 bp, Homo sapiens
cctggtggccctggg

SEQ ID NO: 1471552 - DNA, 15 bp, Homo sapiens
gcctggtggccctgg

SEQ ID NO: 1471553 - DNA, 15 bp, Homo sapiens
tgcctggtggccctg

SEQ ID NO: 1471554 - DNA, 15 bp, Homo sapiens
ctgcctggtggccct

SEQ ID NO: 1471555 - DNA, 15 bp, Homo sapiens
cctgcctggtggccc

SEQ ID NO: 1471556 - DNA, 15 bp, Homo sapiens
tcctgcctggtggcc

SEQ ID NO: 1471557 - DNA, 15 bp, Homo sapiens
ttcctgcctggtggc

SEQ ID NO: 1471558 - DNA, 15 bp, Homo sapiens
cttcctgcctggtgg

SEQ ID NO: 1471559 - DNA, 15 bp, Homo sapiens
ccttcctgcctggtg

SEQ ID NO: 1471560 - DNA, 15 bp, Homo sapiens
tccttcctgcctggt

SEQ ID NO: 1471561 - DNA, 15 bp, Homo sapiens
gtccttcctgcctgg

SEQ ID NO: 1471562 - DNA, 15 bp, Homo sapiens
ggtccttcctgcctg

SEQ ID NO: 1471563 - DNA, 15 bp, Homo sapiens
aggtccttcctgcct

SEQ ID NO: 1471564 - DNA, 15 bp, Homo sapiens
aaggtccttcctgcc

SEQ ID NO: 1471565 - DNA, 15 bp, Homo sapiens
aaaggtccttcctgc

SEQ ID NO: 1471566 - DNA, 15 bp, Homo sapiens
gaaaggtccttcctg

SEQ ID NO: 1471567 - DNA, 15 bp, Homo sapiens
agaaaggtccttcct

SEQ ID NO: 1471568 - DNA, 15 bp, Homo sapiens
gagaaaggtccttcc

SEQ ID NO: 1471569 - DNA, 15 bp, Homo sapiens
agagaaaggtccttc

SEQ ID NO: 1471570 - DNA, 15 bp, Homo sapiens
gagagaaaggtcctt

SEQ ID NO: 1471571 - DNA, 15 bp, Homo sapiens
ggagagaaaggtcct

SEQ ID NO: 1471572 - DNA, 15 bp, Homo sapiens
tggagagaaaggtcc

SEQ ID NO: 1471573 - DNA, 15 bp, Homo sapiens
ctggagagaaaggtc

SEQ ID NO: 1471574 - DNA, 15 bp, Homo sapiens
cctggagagaaaggt

SEQ ID NO: 1471575 - DNA, 15 bp, Homo sapiens
tcctggagagaaagg

SEQ ID NO: 1471576 - DNA, 15 bp, Homo sapiens
ttcctggagagaaag

SEQ ID NO: 1471577 - DNA, 15 bp, Homo sapiens
cttcctggagagaaa

SEQ ID NO: 1471578 - DNA, 15 bp, Homo sapiens
ccttcctggagagaa

SEQ ID NO: 1471579 - DNA, 15 bp, Homo sapiens
tccttcctggagaga

SEQ ID NO: 1471580 - DNA, 15 bp, Homo sapiens
gtccttcctggagag

SEQ ID NO: 1471581 - DNA, 15 bp, Homo sapiens
tgtccttcctggaga

SEQ ID NO: 1471582 - DNA, 15 bp, Homo sapiens
gtgtccttcctggag

SEQ ID NO: 1471583 - DNA, 15 bp, Homo sapiens
tgtgtccttcctgga

SEQ ID NO: 1471584 - DNA, 15 bp, Homo sapiens
ttgtgtccttcctgg

SEQ ID NO: 1471585 - DNA, 15 bp, Homo sapiens
cttgtgtccttcctg

SEQ ID NO: 1471586 - DNA, 15 bp, Homo sapiens
ccttgtgtccttcct

SEQ ID NO: 1471587 - DNA, 15 bp, Homo sapiens
accttgtgtccttcc

SEQ ID NO: 1471588 - DNA, 15 bp, Homo sapiens
gaccttgtgtccttc

SEQ ID NO: 1471589 - DNA, 15 bp, Homo sapiens
ggaccttgtgtcctt

SEQ ID NO: 1471590 - DNA, 15 bp, Homo sapiens
aggaccttgtgtcct

SEQ ID NO: 1471591 - DNA, 15 bp, Homo sapiens
gaggaccttgtgtcc

SEQ ID NO: 1471592 - DNA, 15 bp, Homo sapiens
ggaggaccttgtgtc

SEQ ID NO: 1471593 - DNA, 15 bp, Homo sapiens
tggaggaccttgtgt

SEQ ID NO: 1471594 - DNA, 15 bp, Homo sapiens
ctggaggaccttgtg

SEQ ID NO: 1471595 - DNA, 15 bp, Homo sapiens
gctggaggaccttgt

SEQ ID NO: 1471596 - DNA, 15 bp, Homo sapiens
ggctggaggaccttg

SEQ ID NO: 1471597 - DNA, 15 bp, Homo sapiens
tggctggaggacctt

SEQ ID NO: 1471598 - DNA, 15 bp, Homo sapiens
gtggctggaggacct

SEQ ID NO: 1471599 - DNA, 15 bp, Homo sapiens
ggtggctggaggacc

SEQ ID NO: 1471600 - DNA, 15 bp, Homo sapiens
cggtggctggaggac

SEQ ID NO: 1471601 - DNA, 15 bp, Homo sapiens
gcggtggctggagga

SEQ ID NO: 1471602 - DNA, 15 bp, Homo sapiens
agcggtggctggagg

SEQ ID NO: 1471603 - DNA, 15 bp, Homo sapiens
cagcggtggctggag

SEQ ID NO: 1471604 - DNA, 15 bp, Homo sapiens
gcagcggtggctgga

SEQ ID NO: 1471605 - DNA, 15 bp, Homo sapiens
ggcagcggtggctgg

SEQ ID NO: 1471606 - DNA, 15 bp, Homo sapiens
tggcagcggtggctg

SEQ ID NO: 1471607 - DNA, 15 bp, Homo sapiens
atggcagcggtggct

SEQ ID NO: 1471608 - DNA, 15 bp, Homo sapiens
gatggcagcggtggc

SEQ ID NO: 1471609 - DNA, 15 bp, Homo sapiens
ggatggcagcggtgg

SEQ ID NO: 1471610 - DNA, 15 bp, Homo sapiens
gggatggcagcggtg

SEQ ID NO: 1471611 - DNA, 15 bp, Homo sapiens
ggggatggcagcggt

SEQ ID NO: 1471612 - DNA, 15 bp, Homo sapiens
gggggatggcagcgg

SEQ ID NO: 1471613 - DNA, 15 bp, Homo sapiens
ggggggatggcagcg

SEQ ID NO: 1471614 - DNA, 15 bp, Homo sapiens
cggggggatggcagc

SEQ ID NO: 1471615 - DNA, 15 bp, Homo sapiens
gcggggggatggcag

SEQ ID NO: 1471616 - DNA, 15 bp, Homo sapiens
ggcggggggatggca

SEQ ID NO: 1471617 - DNA, 15 bp, Homo sapiens
gggcggggggatggc

SEQ ID NO: 1471618 - DNA, 15 bp, Homo sapiens
ggggcggggggatgg

SEQ ID NO: 1471619 - DNA, 15 bp, Homo sapiens
gggggcggggggatg

SEQ ID NO: 1471620 - DNA, 15 bp, Homo sapiens
tgggggcggggggat

SEQ ID NO: 1471621 - DNA, 15 bp, Homo sapiens
tggtgggggcggggg

SEQ ID NO: 1471622 - DNA, 15 bp, Homo sapiens
gtggtgggggcgggg

SEQ ID NO: 1471623 - DNA, 15 bp, Homo sapiens
tgtggtgggggcggg

SEQ ID NO: 1471624 - DNA, 15 bp, Homo sapiens
gtgtggtgggggcgg

SEQ ID NO: 1471625 - DNA, 15 bp, Homo sapiens
tgtgtggtgggggcg

SEQ ID NO: 1471626 - DNA, 15 bp, Homo sapiens
ctgtgtggtgggggc

SEQ ID NO: 1471627 - DNA, 15 bp, Homo sapiens
gctgtgtggtggggg

SEQ ID NO: 1471628 - DNA, 15 bp, Homo sapiens
ggctgtgtggtgggg

SEQ ID NO: 1471629 - DNA, 15 bp, Homo sapiens
gggctgtgtggtggg

SEQ ID NO: 1471630 - DNA, 15 bp, Homo sapiens
ggggctgtgtggtgg

SEQ ID NO: 1471631 - DNA, 15 bp, Homo sapiens
aggggctgtgtggtg

SEQ ID NO: 1471632 - DNA, 15 bp, Homo sapiens
taggggctgtgtggt

SEQ ID NO: 1471633 - DNA, 15 bp, Homo sapiens
gtaggggctgtgtgg

SEQ ID NO: 1471634 - DNA, 15 bp, Homo sapiens
agtaggggctgtgtg

SEQ ID NO: 1471635 - DNA, 15 bp, Homo sapiens
aagtaggggctgtgt

SEQ ID NO: 1471636 - DNA, 15 bp, Homo sapiens
caagtaggggctgtg

SEQ ID NO: 1471637 - DNA, 15 bp, Homo sapiens
acaagtaggggctgt

SEQ ID NO: 1471638 - DNA, 15 bp, Homo sapiens
gacaagtaggggctg

SEQ ID NO: 1471639 - DNA, 15 bp, Homo sapiens
ggacaagtaggggct

SEQ ID NO: 1471640 - DNA, 15 bp, Homo sapiens
aggacaagtaggggc

SEQ ID NO: 1471641 - DNA, 15 bp, Homo sapiens
caggacaagtagggg

SEQ ID NO: 1471642 - DNA, 15 bp, Homo sapiens
ccaggacaagtaggg

SEQ ID NO: 1471643 - DNA, 15 bp, Homo sapiens
accaggacaagtagg

SEQ ID NO: 1471644 - DNA, 15 bp, Homo sapiens
gaccaggacaagtag

SEQ ID NO: 1471645 - DNA, 15 bp, Homo sapiens
ggaccaggacaagta

SEQ ID NO: 1471646 - DNA, 15 bp, Homo sapiens
aggaccaggacaagt

SEQ ID NO: 1471647 - DNA, 15 bp, Homo sapiens
aaggaccaggacaag

SEQ ID NO: 1471648 - DNA, 15 bp, Homo sapiens
gcttgaaggaccagg

SEQ ID NO: 1471649 - DNA, 15 bp, Homo sapiens
cgcttgaaggaccag

SEQ ID NO: 1471650 - DNA, 15 bp, Homo sapiens
ccgcttgaaggacca

SEQ ID NO: 1471651 - DNA, 15 bp, Homo sapiens
gccgcttgaaggacc

SEQ ID NO: 1471652 - DNA, 15 bp, Homo sapiens
ggccgcttgaaggac

SEQ ID NO: 1471653 - DNA, 15 bp, Homo sapiens
cggccgcttgaagga

SEQ ID NO: 1471654 - DNA, 15 bp, Homo sapiens
tcggccgcttgaagg

SEQ ID NO: 1471655 - DNA, 15 bp, Homo sapiens
ctcggccgcttgaag

SEQ ID NO: 1471656 - DNA, 15 bp, Homo sapiens
gctcggccgcttgaa

SEQ ID NO: 1471657 - DNA, 15 bp, Homo sapiens
agctcggccgcttga

SEQ ID NO: 1471658 - DNA, 15 bp, Homo sapiens
cagctcggccgcttg

SEQ ID NO: 1471659 - DNA, 15 bp, Homo sapiens
gcagctcggccgctt

SEQ ID NO: 1471660 - DNA, 15 bp, Homo sapiens
tgcagctcggccgct

SEQ ID NO: 1471661 - DNA, 15 bp, Homo sapiens
ctgcagctcggccgc

SEQ ID NO: 1471662 - DNA, 15 bp, Homo sapiens
cctgcagctcggccg

SEQ ID NO: 1471663 - DNA, 15 bp, Homo sapiens
gcctgcagctcggcc

SEQ ID NO: 1471664 - DNA, 15 bp, Homo sapiens
tgcctgcagctcggc

SEQ ID NO: 1471665 - DNA, 15 bp, Homo sapiens
ctgcctgcagctcgg

SEQ ID NO: 1471666 - DNA, 15 bp, Homo sapiens
cctgcctgcagctcg

SEQ ID NO: 1471667 - DNA, 15 bp, Homo sapiens
gcctgcctgcagctc

SEQ ID NO: 1471668 - DNA, 15 bp, Homo sapiens
cgcctgcctgcagct

SEQ ID NO: 1471669 - DNA, 15 bp, Homo sapiens
acgcctgcctgcagc

SEQ ID NO: 1471670 - DNA, 15 bp, Homo sapiens
cacgcctgcctgcag

SEQ ID NO: 1471671 - DNA, 15 bp, Homo sapiens
tcacgcctgcctgca

SEQ ID NO: 1471672 - DNA, 15 bp, Homo sapiens
ttcacgcctgcctgc

SEQ ID NO: 1471673 - DNA, 15 bp, Homo sapiens
cttcacgcctgcctg

SEQ ID NO: 1471674 - DNA, 15 bp, Homo sapiens
ccttcacgcctgcct

SEQ ID NO: 1471675 - DNA, 15 bp, Homo sapiens
gccttcacgcctgcc

SEQ ID NO: 1471676 - DNA, 15 bp, Homo sapiens
ggccttcacgcctgc

SEQ ID NO: 1471677 - DNA, 15 bp, Homo sapiens
gggccttcacgcctg

SEQ ID NO: 1471678 - DNA, 15 bp, Homo sapiens
tgggccttcacgcct

SEQ ID NO: 1471679 - DNA, 15 bp, Homo sapiens
ctgggccttcacgcc

SEQ ID NO: 1471680 - DNA, 15 bp, Homo sapiens
cctgggccttcacgc

SEQ ID NO: 1471681 - DNA, 15 bp, Homo sapiens
ccctgggccttcacg

SEQ ID NO: 1471682 - DNA, 15 bp, Homo sapiens
accctgggccttcac

SEQ ID NO: 1471683 - DNA, 15 bp, Homo sapiens
taccctgggccttca

SEQ ID NO: 1471684 - DNA, 15 bp, Homo sapiens
ttaccctgggccttc

SEQ ID NO: 1471685 - DNA, 15 bp, Homo sapiens
attaccctgggcctt

SEQ ID NO: 1471686 - DNA, 15 bp, Homo sapiens
gattaccctgggcct

SEQ ID NO: 1471687 - DNA, 15 bp, Homo sapiens
agattaccctgggcc

SEQ ID NO: 1471688 - DNA, 15 bp, Homo sapiens
gagattaccctgggc

SEQ ID NO: 1471689 - DNA, 15 bp, Homo sapiens
tgagattaccctggg

SEQ ID NO: 1471690 - DNA, 15 bp, Homo sapiens
ctgagattaccctgg

SEQ ID NO: 1471691 - DNA, 15 bp, Homo sapiens
actgagattaccctg

SEQ ID NO: 1471692 - DNA, 15 bp, Homo sapiens
cactgagattaccct

SEQ ID NO: 1471693 - DNA, 15 bp, Homo sapiens
tcactgagattaccc

SEQ ID NO: 1471694 - DNA, 15 bp, Homo sapiens
ctcactgagattacc

SEQ ID NO: 1471695 - DNA, 15 bp, Homo sapiens
gctcactgagattac

SEQ ID NO: 1471696 - DNA, 15 bp, Homo sapiens
tgctcactgagatta

SEQ ID NO: 1471697 - DNA, 15 bp, Homo sapiens
atgctcactgagatt

SEQ ID NO: 1471698 - DNA, 15 bp, Homo sapiens
catgctcactgagat

SEQ ID NO: 1471699 - DNA, 15 bp, Homo sapiens
acatgctcactgaga

SEQ ID NO: 1471700 - DNA, 15 bp, Homo sapiens
gacatgctcactgag

SEQ ID NO: 1471701 - DNA, 15 bp, Homo sapiens
agacatgctcactga

SEQ ID NO: 1471702 - DNA, 15 bp, Homo sapiens
cagacatgctcactg

SEQ ID NO: 1471703 - DNA, 15 bp, Homo sapiens
gcagacatgctcact

SEQ ID NO: 1471704 - DNA, 15 bp, Homo sapiens
ggcagacatgctcac

SEQ ID NO: 1471705 - DNA, 15 bp, Homo sapiens
tggcagacatgctca

SEQ ID NO: 1471706 - DNA, 15 bp, Homo sapiens
ctggcagacatgctc

SEQ ID NO: 1471707 - DNA, 15 bp, Homo sapiens
gctggcagacatgct

SEQ ID NO: 1471708 - DNA, 15 bp, Homo sapiens
agctggcagacatgc

SEQ ID NO: 1471709 - DNA, 15 bp, Homo sapiens
aagctggcagacatg

SEQ ID NO: 1471710 - DNA, 15 bp, Homo sapiens
gaagctggcagacat

SEQ ID NO: 1471711 - DNA, 15 bp, Homo sapiens
agaagctggcagaca

SEQ ID NO: 1471712 - DNA, 15 bp, Homo sapiens
aagaagctggcagac

SEQ ID NO: 1471713 - DNA, 15 bp, Homo sapiens
gaagaagctggcaga

SEQ ID NO: 1471714 - DNA, 15 bp, Homo sapiens
agaagaagctggcag

SEQ ID NO: 1471715 - DNA, 15 bp, Homo sapiens
cagaagaagctggca

SEQ ID NO: 1471716 - DNA, 15 bp, Homo sapiens
tcagaagaagctggc

SEQ ID NO: 1471717 - DNA, 15 bp, Homo sapiens
ttcagaagaagctgg

SEQ ID NO: 1471718 - DNA, 15 bp, Homo sapiens
gattcagaagaagct

SEQ ID NO: 1471719 - DNA, 15 bp, Homo sapiens
tgattcagaagaagc

SEQ ID NO: 1471720 - DNA, 15 bp, Homo sapiens
ctgattcagaagaag

SEQ ID NO: 1471721 - DNA, 15 bp, Homo sapiens
gctgattcagaagaa

SEQ ID NO: 1471722 - DNA, 15 bp, Homo sapiens
agctgattcagaaga

SEQ ID NO: 1471723 - DNA, 15 bp, Homo sapiens
cagctgattcagaag

SEQ ID NO: 1471724 - DNA, 15 bp, Homo sapiens
ccagctgattcagaa

SEQ ID NO: 1471725 - DNA, 15 bp, Homo sapiens
accagctgattcaga

SEQ ID NO: 1471726 - DNA, 15 bp, Homo sapiens
aaccagctgattcag

SEQ ID NO: 1471727 - DNA, 15 bp, Homo sapiens
gaaccagctgattca

SEQ ID NO: 1471728 - DNA, 15 bp, Homo sapiens
ggaaccagctgattc

SEQ ID NO: 1471729 - DNA, 15 bp, Homo sapiens
aggaaccagctgatt

SEQ ID NO: 1471730 - DNA, 15 bp, Homo sapiens
caggaaccagctgat

SEQ ID NO: 1471731 - DNA, 15 bp, Homo sapiens
ccaggaaccagctga

SEQ ID NO: 1471732 - DNA, 15 bp, Homo sapiens
gccaggaaccagctg

SEQ ID NO: 1471733 - DNA, 15 bp, Homo sapiens
ggccaggaaccagct

SEQ ID NO: 1471734 - DNA, 15 bp, Homo sapiens
tggccaggaaccagc

SEQ ID NO: 1471735 - DNA, 15 bp, Homo sapiens
ctggccaggaaccag

SEQ ID NO: 1471736 - DNA, 15 bp, Homo sapiens
actggccaggaacca

SEQ ID NO: 1471737 - DNA, 15 bp, Homo sapiens
cactggccaggaacc

SEQ ID NO: 1471738 - DNA, 15 bp, Homo sapiens
ccactggccaggaac

SEQ ID NO: 1471739 - DNA, 15 bp, Homo sapiens
cccactggccaggaa

SEQ ID NO: 1471740 - DNA, 15 bp, Homo sapiens
tcccactggccagga

SEQ ID NO: 1471741 - DNA, 15 bp, Homo sapiens
gtcccactggccagg

SEQ ID NO: 1471742 - DNA, 15 bp, Homo sapiens
tgtcccactggccag

SEQ ID NO: 1471743 - DNA, 15 bp, Homo sapiens
gtgtcccactggcca

SEQ ID NO: 1471744 - DNA, 15 bp, Homo sapiens
ggtgtcccactggcc

SEQ ID NO: 1471745 - DNA, 15 bp, Homo sapiens
tggtgtcccactggc

SEQ ID NO: 1471746 - DNA, 15 bp, Homo sapiens
ttggtgtcccactgg

SEQ ID NO: 1471747 - DNA, 15 bp, Homo sapiens
tttggtgtcccactg

SEQ ID NO: 1471748 - DNA, 15 bp, Homo sapiens
gtttggtgtcccact

SEQ ID NO: 1471749 - DNA, 15 bp, Homo sapiens
agtttggtgtcccac

SEQ ID NO: 1471750 - DNA, 15 bp, Homo sapiens
cagtttggtgtccca

SEQ ID NO: 1471751 - DNA, 15 bp, Homo sapiens
gcagtttggtgtccc

SEQ ID NO: 1471752 - DNA, 15 bp, Homo sapiens
tgcagtttggtgtcc

SEQ ID NO: 1471753 - DNA, 15 bp, Homo sapiens
atgcagtttggtgtc

SEQ ID NO: 1471754 - DNA, 15 bp, Homo sapiens
gatgcagtttggtgt

SEQ ID NO: 1471755 - DNA, 15 bp, Homo sapiens
ggatgcagtttggtg

SEQ ID NO: 1471756 - DNA, 15 bp, Homo sapiens
aggatgcagtttggt

SEQ ID NO: 1471757 - DNA, 15 bp, Homo sapiens
taggatgcagtttgg

SEQ ID NO: 1471758 - DNA, 15 bp, Homo sapiens
gtaggatgcagtttg

SEQ ID NO: 1471759 - DNA, 15 bp, Homo sapiens
tgtaggatgcagttt

SEQ ID NO: 1471760 - DNA, 15 bp, Homo sapiens
atgtaggatgcagtt

SEQ ID NO: 1471761 - DNA, 15 bp, Homo sapiens
catgtaggatgcagt

SEQ ID NO: 1471762 - DNA, 15 bp, Homo sapiens
ccatgtaggatgcag

SEQ ID NO: 1471763 - DNA, 15 bp, Homo sapiens
cccatgtaggatgca

SEQ ID NO: 1471764 - DNA, 15 bp, Homo sapiens
gcccatgtaggatgc

SEQ ID NO: 1471765 - DNA, 15 bp, Homo sapiens
tgcccatgtaggatg

SEQ ID NO: 1471766 - DNA, 15 bp, Homo sapiens
ttgcccatgtaggat

SEQ ID NO: 1471767 - DNA, 15 bp, Homo sapiens
attgcccatgtagga

SEQ ID NO: 1471768 - DNA, 15 bp, Homo sapiens
cattgcccatgtagg

SEQ ID NO: 1471769 - DNA, 15 bp, Homo sapiens
ccattgcccatgtag

SEQ ID NO: 1471770 - DNA, 15 bp, Homo sapiens
gccattgcccatgta

SEQ ID NO: 1471771 - DNA, 15 bp, Homo sapiens
tgccattgcccatgt

SEQ ID NO: 1471772 - DNA, 15 bp, Homo sapiens
ctgccattgcccatg

SEQ ID NO: 1471773 - DNA, 15 bp, Homo sapiens
cctgccattgcccat

SEQ ID NO: 1471774 - DNA, 15 bp, Homo sapiens
ccctgccattgccca

SEQ ID NO: 1471775 - DNA, 15 bp, Homo sapiens
accctgccattgccc

SEQ ID NO: 1471776 - DNA, 15 bp, Homo sapiens
taccctgccattgcc

SEQ ID NO: 1471777 - DNA, 15 bp, Homo sapiens
ttaccctgccattgc

SEQ ID NO: 1471778 - DNA, 15 bp, Homo sapiens
cttaccctgccattg

SEQ ID NO: 1471779 - DNA, 15 bp, Homo sapiens
tcttaccctgccatt

SEQ ID NO: 1471780 - DNA, 15 bp, Homo sapiens
ctcttaccctgccat

SEQ ID NO: 1471781 - DNA, 15 bp, Homo sapiens
gctcttaccctgcca

SEQ ID NO: 1471782 - DNA, 15 bp, Homo sapiens
cgctcttaccctgcc

SEQ ID NO: 1471783 - DNA, 15 bp, Homo sapiens
tcgctcttaccctgc

SEQ ID NO: 1471784 - DNA, 15 bp, Homo sapiens
ctcgctcttaccctg

SEQ ID NO: 1471785 - DNA, 15 bp, Homo sapiens
cctcgctcttaccct

SEQ ID NO: 1471786 - DNA, 15 bp, Homo sapiens
ccctcgctcttaccc

SEQ ID NO: 1471787 - DNA, 15 bp, Homo sapiens
cccctcgctcttacc

SEQ ID NO: 1471788 - DNA, 15 bp, Homo sapiens
tcccctcgctcttac

SEQ ID NO: 1471789 - DNA, 15 bp, Homo sapiens
ctcccctcgctctta

SEQ ID NO: 1471790 - DNA, 15 bp, Homo sapiens
cctcccctcgctctt

SEQ ID NO: 1471791 - DNA, 15 bp, Homo sapiens
gcctcccctcgctct

SEQ ID NO: 1471792 - DNA, 15 bp, Homo sapiens
ggcctcccctcgctc

SEQ ID NO: 1471793 - DNA, 15 bp, Homo sapiens
gggcctcccctcgct

SEQ ID NO: 1471794 - DNA, 15 bp, Homo sapiens
tgggcctcccctcgc

SEQ ID NO: 1471795 - DNA, 15 bp, Homo sapiens
gtgggcctcccctcg

SEQ ID NO: 1471796 - DNA, 15 bp, Homo sapiens
agtgggcctcccctc

SEQ ID NO: 1471797 - DNA, 15 bp, Homo sapiens
gagtgggcctcccct

SEQ ID NO: 1471798 - DNA, 15 bp, Homo sapiens
agagtgggcctcccc

SEQ ID NO: 1471799 - DNA, 15 bp, Homo sapiens
gagagtgggcctccc

SEQ ID NO: 1471800 - DNA, 15 bp, Homo sapiens
ggagagtgggcctcc

SEQ ID NO: 1471801 - DNA, 15 bp, Homo sapiens
gggagagtgggcctc

SEQ ID NO: 1471802 - DNA, 15 bp, Homo sapiens
tgggagagtgggcct

SEQ ID NO: 1471803 - DNA, 15 bp, Homo sapiens
gtgggagagtgggcc

SEQ ID NO: 1471804 - DNA, 15 bp, Homo sapiens
ggtgggagagtgggc

SEQ ID NO: 1471805 - DNA, 15 bp, Homo sapiens
gggtgggagagtggg

SEQ ID NO: 1471806 - DNA, 15 bp, Homo sapiens
ggggtgggagagtgg

SEQ ID NO: 1471807 - DNA, 15 bp, Homo sapiens
cggggtgggagagtg

SEQ ID NO: 1471808 - DNA, 15 bp, Homo sapiens
acggggtgggagagt

SEQ ID NO: 1471809 - DNA, 15 bp, Homo sapiens
gacggggtgggagag

SEQ ID NO: 1471810 - DNA, 15 bp, Homo sapiens
ggacggggtgggaga

SEQ ID NO: 1471811 - DNA, 15 bp, Homo sapiens
gggacggggtgggag

SEQ ID NO: 1471812 - DNA, 15 bp, Homo sapiens
agggacggggtggga

SEQ ID NO: 1471813 - DNA, 15 bp, Homo sapiens
cagggacggggtggg

SEQ ID NO: 1471814 - DNA, 15 bp, Homo sapiens
acagggacggggtgg

SEQ ID NO: 1471815 - DNA, 15 bp, Homo sapiens
gacagggacggggtg

SEQ ID NO: 1471816 - DNA, 15 bp, Homo sapiens
ggacagggacggggt

SEQ ID NO: 1471817 - DNA, 15 bp, Homo sapiens
aggacagggacgggg

SEQ ID NO: 1471818 - DNA, 15 bp, Homo sapiens
caggacagggacggg

SEQ ID NO: 1471819 - DNA, 15 bp, Homo sapiens
ccaggacagggacgg

SEQ ID NO: 1471820 - DNA, 15 bp, Homo sapiens
cccaggacagggacg

SEQ ID NO: 1471821 - DNA, 15 bp, Homo sapiens
ccccaggacagggac

SEQ ID NO: 1471822 - DNA, 15 bp, Homo sapiens
gccccaggacaggga

SEQ ID NO: 1471823 - DNA, 15 bp, Homo sapiens
ggccccaggacaggg

SEQ ID NO: 1471824 - DNA, 15 bp, Homo sapiens
gggccccaggacagg

SEQ ID NO: 1471825 - DNA, 15 bp, Homo sapiens
ggggccccaggacag

SEQ ID NO: 1471826 - DNA, 15 bp, Homo sapiens
gggggccccaggaca

SEQ ID NO: 1471827 - DNA, 15 bp, Homo sapiens
agggggccccaggac

SEQ ID NO: 1471828 - DNA, 15 bp, Homo sapiens
cagggggccccagga

SEQ ID NO: 1471829 - DNA, 15 bp, Homo sapiens
gcagggggccccagg

SEQ ID NO: 1471830 - DNA, 15 bp, Homo sapiens
agcagggggccccag

SEQ ID NO: 1471831 - DNA, 15 bp, Homo sapiens
gagcagggggcccca

SEQ ID NO: 1471832 - DNA, 15 bp, Homo sapiens
ggagcagggggcccc

SEQ ID NO: 1471833 - DNA, 15 bp, Homo sapiens
tggagcagggggccc

SEQ ID NO: 1471834 - DNA, 15 bp, Homo sapiens
ctggagcagggggcc

SEQ ID NO: 1471835 - DNA, 15 bp, Homo sapiens
cctggagcagggggc

SEQ ID NO: 1471836 - DNA, 15 bp, Homo sapiens
tcctggagcaggggg

SEQ ID NO: 1471837 - DNA, 15 bp, Homo sapiens
gtcctggagcagggg

SEQ ID NO: 1471838 - DNA, 15 bp, Homo sapiens
cgtcctggagcaggg

SEQ ID NO: 1471839 - DNA, 15 bp, Homo sapiens
gcgtcctggagcagg

SEQ ID NO: 1471840 - DNA, 15 bp, Homo sapiens
ggcgtcctggagcag

SEQ ID NO: 1471841 - DNA, 15 bp, Homo sapiens
aggcgtcctggagca

SEQ ID NO: 1471842 - DNA, 15 bp, Homo sapiens
aaggcgtcctggagc

SEQ ID NO: 1471843 - DNA, 15 bp, Homo sapiens
gaaggcgtcctggag

SEQ ID NO: 1471844 - DNA, 15 bp, Homo sapiens
ggaaggcgtcctgga

SEQ ID NO: 1471845 - DNA, 15 bp, Homo sapiens
gggaaggcgtcctgg

SEQ ID NO: 1471846 - DNA, 15 bp, Homo sapiens
tgggaaggcgtcctg

SEQ ID NO: 1471847 - DNA, 15 bp, Homo sapiens
ctgggaaggcgtcct

SEQ ID NO: 1471848 - DNA, 15 bp, Homo sapiens
cctgggaaggcgtcc

SEQ ID NO: 1471849 - DNA, 15 bp, Homo sapiens
gcctgggaaggcgtc

SEQ ID NO: 1471850 - DNA, 15 bp, Homo sapiens
agcctgggaaggcgt

SEQ ID NO: 1471851 - DNA, 15 bp, Homo sapiens
cagcctgggaaggcg

SEQ ID NO: 1471852 - DNA, 15 bp, Homo sapiens
gcagcctgggaaggc

SEQ ID NO: 1471853 - DNA, 15 bp, Homo sapiens
ggcagcctgggaagg

SEQ ID NO: 1471854 - DNA, 15 bp, Homo sapiens
aggcagcctgggaag

SEQ ID NO: 1471855 - DNA, 15 bp, Homo sapiens
gaggcagcctgggaa

SEQ ID NO: 1471856 - DNA, 15 bp, Homo sapiens
tgaggcagcctggga

SEQ ID NO: 1471857 - DNA, 15 bp, Homo sapiens
ctgaggcagcctggg

SEQ ID NO: 1471858 - DNA, 15 bp, Homo sapiens
actgaggcagcctgg

SEQ ID NO: 1471859 - DNA, 15 bp, Homo sapiens
cactgaggcagcctg

SEQ ID NO: 1471860 - DNA, 15 bp, Homo sapiens
gcactgaggcagcct

SEQ ID NO: 1471861 - DNA, 15 bp, Homo sapiens
ggcactgaggcagcc

SEQ ID NO: 1471862 - DNA, 15 bp, Homo sapiens
gggcactgaggcagc

SEQ ID NO: 1471863 - DNA, 15 bp, Homo sapiens
ggggcactgaggcag

SEQ ID NO: 1471864 - DNA, 15 bp, Homo sapiens
gggggcactgaggca

SEQ ID NO: 1471865 - DNA, 15 bp, Homo sapiens
tgggggcactgaggc

SEQ ID NO: 1471866 - DNA, 15 bp, Homo sapiens
ttgggggcactgagg

SEQ ID NO: 1471867 - DNA, 15 bp, Homo sapiens
cttgggggcactgag

SEQ ID NO: 1471868 - DNA, 15 bp, Homo sapiens
gcttgggggcactga

SEQ ID NO: 1471869 - DNA, 15 bp, Homo sapiens
agcttgggggcactg

SEQ ID NO: 1471870 - DNA, 15 bp, Homo sapiens
aagcttgggggcact

SEQ ID NO: 1471871 - DNA, 15 bp, Homo sapiens
caagcttgggggcac

SEQ ID NO: 1471872 - DNA, 15 bp, Homo sapiens
gcaagcttgggggca

SEQ ID NO: 1471873 - DNA, 15 bp, Homo sapiens
ggcaagcttgggggc

SEQ ID NO: 1471874 - DNA, 15 bp, Homo sapiens
gggcaagcttggggg

SEQ ID NO: 1471875 - DNA, 15 bp, Homo sapiens
agggcaagcttgggg

SEQ ID NO: 1471876 - DNA, 15 bp, Homo sapiens
cagggcaagcttggg

SEQ ID NO: 1471877 - DNA, 15 bp, Homo sapiens
ccagggcaagcttgg

SEQ ID NO: 1471878 - DNA, 15 bp, Homo sapiens
gccagggcaagcttg

SEQ ID NO: 1471879 - DNA, 15 bp, Homo sapiens
ggccagggcaagctt

SEQ ID NO: 1471880 - DNA, 15 bp, Homo sapiens
gggccagggcaagct

SEQ ID NO: 1471881 - DNA, 15 bp, Homo sapiens
agggccagggcaagc

SEQ ID NO: 1471882 - DNA, 15 bp, Homo sapiens
cagggccagggcaag

SEQ ID NO: 1471883 - DNA, 15 bp, Homo sapiens
gcagggccagggcaa

SEQ ID NO: 1471884 - DNA, 15 bp, Homo sapiens
ggcagggccagggca

SEQ ID NO: 1471885 - DNA, 15 bp, Homo sapiens
cggcagggccagggc

SEQ ID NO: 1471886 - DNA, 15 bp, Homo sapiens
acggcagggccaggg

SEQ ID NO: 1471887 - DNA, 15 bp, Homo sapiens
aacggcagggccagg

SEQ ID NO: 1471888 - DNA, 15 bp, Homo sapiens
caacggcagggccag

SEQ ID NO: 1471889 - DNA, 15 bp, Homo sapiens
tcaacggcagggcca

SEQ ID NO: 1471890 - DNA, 15 bp, Homo sapiens
gtcaacggcagggcc

SEQ ID NO: 1471891 - DNA, 15 bp, Homo sapiens
agtcaacggcagggc

SEQ ID NO: 1471892 - DNA, 15 bp, Homo sapiens
gagtcaacggcaggg

SEQ ID NO: 1471893 - DNA, 15 bp, Homo sapiens
tgagtcaacggcagg

SEQ ID NO: 1471894 - DNA, 15 bp, Homo sapiens
ctgagtcaacggcag

SEQ ID NO: 1471895 - DNA, 15 bp, Homo sapiens
gctgagtcaacggca

SEQ ID NO: 1471896 - DNA, 15 bp, Homo sapiens
ggctgagtcaacggc

SEQ ID NO: 1471897 - DNA, 15 bp, Homo sapiens
gggctgagtcaacgg

SEQ ID NO: 1471898 - DNA, 15 bp, Homo sapiens
tgggctgagtcaacg

SEQ ID NO: 1471899 - DNA, 15 bp, Homo sapiens
gtgggctgagtcaac

SEQ ID NO: 1471900 - DNA, 15 bp, Homo sapiens
tgtgggctgagtcaa

SEQ ID NO: 1471901 - DNA, 15 bp, Homo sapiens
ctgtgggctgagtca

SEQ ID NO: 1471902 - DNA, 15 bp, Homo sapiens
gctgtgggctgagtc

SEQ ID NO: 1471903 - DNA, 15 bp, Homo sapiens
agctgtgggctgagt

SEQ ID NO: 1471904 - DNA, 15 bp, Homo sapiens
cagctgtgggctgag

SEQ ID NO: 1471905 - DNA, 15 bp, Homo sapiens
gcagctgtgggctga

SEQ ID NO: 1471906 - DNA, 15 bp, Homo sapiens
agcagctgtgggctg

SEQ ID NO: 1471907 - DNA, 15 bp, Homo sapiens
tgagcagctgtgggc

SEQ ID NO: 1471908 - DNA, 15 bp, Homo sapiens
ctgagcagctgtggg

SEQ ID NO: 1471909 - DNA, 15 bp, Homo sapiens
tctgagcagctgtgg

SEQ ID NO: 1471910 - DNA, 15 bp, Homo sapiens
ttctgagcagctgtg

SEQ ID NO: 1471911 - DNA, 15 bp, Homo sapiens
cttctgagcagctgt

SEQ ID NO: 1471912 - DNA, 15 bp, Homo sapiens
ccttctgagcagctg

SEQ ID NO: 1471913 - DNA, 15 bp, Homo sapiens
tccttctgagcagct

SEQ ID NO: 1471914 - DNA, 15 bp, Homo sapiens
gtccttctgagcagc

SEQ ID NO: 1471915 - DNA, 15 bp, Homo sapiens
cgtccttctgagcag

SEQ ID NO: 1471916 - DNA, 15 bp, Homo sapiens
acgtccttctgagca

SEQ ID NO: 1471917 - DNA, 15 bp, Homo sapiens
gacgtccttctgagc

SEQ ID NO: 1471918 - DNA, 15 bp, Homo sapiens
tgacgtccttctgag

SEQ ID NO: 1471919 - DNA, 15 bp, Homo sapiens
gtgacgtccttctga

SEQ ID NO: 1471920 - DNA, 15 bp, Homo sapiens
agtgacgtccttctg

SEQ ID NO: 1471921 - DNA, 15 bp, Homo sapiens
cagtgacgtccttct

SEQ ID NO: 1471922 - DNA, 15 bp, Homo sapiens
ccagtgacgtccttc

SEQ ID NO: 1471923 - DNA, 15 bp, Homo sapiens
accagtgacgtcctt

SEQ ID NO: 1471924 - DNA, 15 bp, Homo sapiens
gaccagtgacgtcct

SEQ ID NO: 1471925 - DNA, 15 bp, Homo sapiens
tgaccagtgacgtcc

SEQ ID NO: 1471926 - DNA, 15 bp, Homo sapiens
atgaccagtgacgtc

SEQ ID NO: 1471927 - DNA, 15 bp, Homo sapiens
aatgaccagtgacgt

SEQ ID NO: 1471928 - DNA, 15 bp, Homo sapiens
gaatgaccagtgacg

SEQ ID NO: 1471929 - DNA, 15 bp, Homo sapiens
ggaatgaccagtgac

SEQ ID NO: 1471930 - DNA, 15 bp, Homo sapiens
tggaatgaccagtga

SEQ ID NO: 1471931 - DNA, 15 bp, Homo sapiens
ctggaatgaccagtg

SEQ ID NO: 1471932 - DNA, 15 bp, Homo sapiens
tctggaatgaccagt

SEQ ID NO: 1471933 - DNA, 15 bp, Homo sapiens
ctctggaatgaccag

SEQ ID NO: 1471934 - DNA, 15 bp, Homo sapiens
gctctggaatgacca

SEQ ID NO: 1471935 - DNA, 15 bp, Homo sapiens
tgctctggaatgacc

SEQ ID NO: 1471936 - DNA, 15 bp, Homo sapiens
ttgctctggaatgac

SEQ ID NO: 1471937 - DNA, 15 bp, Homo sapiens
cttgctctggaatga

SEQ ID NO: 1471938 - DNA, 15 bp, Homo sapiens
ccttgctctggaatg

SEQ ID NO: 1471939 - DNA, 15 bp, Homo sapiens
tccttgctctggaat

SEQ ID NO: 1471940 - DNA, 15 bp, Homo sapiens
ttccttgctctggaa

SEQ ID NO: 1471941 - DNA, 15 bp, Homo sapiens
gttccttgctctgga

SEQ ID NO: 1471942 - DNA, 15 bp, Homo sapiens
agttccttgctctgg

SEQ ID NO: 1471943 - DNA, 15 bp, Homo sapiens
gagttccttgctctg

SEQ ID NO: 1471944 - DNA, 15 bp, Homo sapiens
tgagttccttgctct

SEQ ID NO: 1471945 - DNA, 15 bp, Homo sapiens
ctgagttccttgctc

SEQ ID NO: 1471946 - DNA, 15 bp, Homo sapiens
cctgagttccttgct

SEQ ID NO: 1471947 - DNA, 15 bp, Homo sapiens
gcctgagttccttgc

SEQ ID NO: 1471948 - DNA, 15 bp, Homo sapiens
ggcctgagttccttg

SEQ ID NO: 1471949 - DNA, 15 bp, Homo sapiens
aggcctgagttcctt

SEQ ID NO: 1471950 - DNA, 15 bp, Homo sapiens
caggcctgagttcct

SEQ ID NO: 1471951 - DNA, 15 bp, Homo sapiens
ccaggcctgagttcc

SEQ ID NO: 1471952 - DNA, 15 bp, Homo sapiens
accaggcctgagttc

SEQ ID NO: 1471953 - DNA, 15 bp, Homo sapiens
caccaggcctgagtt

SEQ ID NO: 1471954 - DNA, 15 bp, Homo sapiens
ccaccaggcctgagt

SEQ ID NO: 1471955 - DNA, 15 bp, Homo sapiens
cccaccaggcctgag

SEQ ID NO: 1471956 - DNA, 15 bp, Homo sapiens
acccaccaggcctga

SEQ ID NO: 1471957 - DNA, 15 bp, Homo sapiens
cacccaccaggcctg

SEQ ID NO: 1471958 - DNA, 15 bp, Homo sapiens
ccacccaccaggcct

SEQ ID NO: 1471959 - DNA, 15 bp, Homo sapiens
cccacccaccaggcc

SEQ ID NO: 1471960 - DNA, 15 bp, Homo sapiens
ccccacccaccaggc

SEQ ID NO: 1471961 - DNA, 15 bp, Homo sapiens
cccccacccaccagg

SEQ ID NO: 1471962 - DNA, 15 bp, Homo sapiens
gcccccacccaccag

SEQ ID NO: 1471963 - DNA, 15 bp, Homo sapiens
tgcaaaccgagtgag

SEQ ID NO: 1471964 - DNA, 15 bp, Homo sapiens
gtgcaaaccgagtga

SEQ ID NO: 1471965 - DNA, 15 bp, Homo sapiens
tgtgcaaaccgagtg

SEQ ID NO: 1471966 - DNA, 15 bp, Homo sapiens
gtgtgcaaaccgagt

SEQ ID NO: 1471967 - DNA, 15 bp, Homo sapiens
tgtgtgcaaaccgag

SEQ ID NO: 1471968 - DNA, 15 bp, Homo sapiens
ctgtgtgcaaaccga

SEQ ID NO: 1471969 - DNA, 15 bp, Homo sapiens
actgtgtgcaaaccg

SEQ ID NO: 1471970 - DNA, 15 bp, Homo sapiens
gactgtgtgcaaacc

SEQ ID NO: 1471971 - DNA, 15 bp, Homo sapiens
ggactgtgtgcaaac

SEQ ID NO: 1471972 - DNA, 15 bp, Homo sapiens
gggactgtgtgcaaa

SEQ ID NO: 1471973 - DNA, 15 bp, Homo sapiens
tgggactgtgtgcaa

SEQ ID NO: 1471974 - DNA, 15 bp, Homo sapiens
gtgggactgtgtgca

SEQ ID NO: 1471975 - DNA, 15 bp, Homo sapiens
ggtgggactgtgtgc

SEQ ID NO: 1471976 - DNA, 15 bp, Homo sapiens
gggtgggactgtgtg

SEQ ID NO: 1471977 - DNA, 15 bp, Homo sapiens
tgggtgggactgtgt

SEQ ID NO: 1471978 - DNA, 15 bp, Homo sapiens
ctgggtgggactgtg

SEQ ID NO: 1471979 - DNA, 15 bp, Homo sapiens
gctgggtgggactgt

SEQ ID NO: 1471980 - DNA, 15 bp, Homo sapiens
ggctgggtgggactg

SEQ ID NO: 1471981 - DNA, 15 bp, Homo sapiens
aggctgggtgggact

SEQ ID NO: 1471982 - DNA, 15 bp, Homo sapiens
caggctgggtgggac

SEQ ID NO: 1471983 - DNA, 15 bp, Homo sapiens
ccaggctgggtggga

SEQ ID NO: 1471984 - DNA, 15 bp, Homo sapiens
gccaggctgggtggg

SEQ ID NO: 1471985 - DNA, 15 bp, Homo sapiens
tgccaggctgggtgg

SEQ ID NO: 1471986 - DNA, 15 bp, Homo sapiens
atgccaggctgggtg

SEQ ID NO: 1471987 - DNA, 15 bp, Homo sapiens
gatgccaggctgggt

SEQ ID NO: 1471988 - DNA, 15 bp, Homo sapiens
agatgccaggctggg

SEQ ID NO: 1471989 - DNA, 15 bp, Homo sapiens
cagatgccaggctgg

SEQ ID NO: 1471990 - DNA, 15 bp, Homo sapiens
ccagatgccaggctg

SEQ ID NO: 1471991 - DNA, 15 bp, Homo sapiens
cccagatgccaggct

SEQ ID NO: 1471992 - DNA, 15 bp, Homo sapiens
acccagatgccaggc

SEQ ID NO: 1471993 - DNA, 15 bp, Homo sapiens
aacccagatgccagg

SEQ ID NO: 1471994 - DNA, 15 bp, Homo sapiens
gaacccagatgccag

SEQ ID NO: 1471995 - DNA, 15 bp, Homo sapiens
cgaacccagatgcca

SEQ ID NO: 1471996 - DNA, 15 bp, Homo sapiens
tcgaacccagatgcc

SEQ ID NO: 1471997 - DNA, 15 bp, Homo sapiens
atcgaacccagatgc

SEQ ID NO: 1471998 - DNA, 15 bp, Homo sapiens
catcgaacccagatg

SEQ ID NO: 1471999 - DNA, 15 bp, Homo sapiens
gcatcgaacccagat

SEQ ID NO: 1472000 - DNA, 15 bp, Homo sapiens
agcatcgaacccaga

SEQ ID NO: 1472001 - DNA, 15 bp, Homo sapiens
gagcatcgaacccag

SEQ ID NO: 1472002 - DNA, 15 bp, Homo sapiens
tgagcatcgaaccca

SEQ ID NO: 1472003 - DNA, 15 bp, Homo sapiens
ctgagcatcgaaccc

SEQ ID NO: 1472004 - DNA, 15 bp, Homo sapiens
tctgagcatcgaacc

SEQ ID NO: 1472005 - DNA, 15 bp, Homo sapiens
ctctgagcatcgaac

SEQ ID NO: 1472006 - DNA, 15 bp, Homo sapiens
gctctgagcatcgaa

SEQ ID NO: 1472007 - DNA, 15 bp, Homo sapiens
ggctctgagcatcga

SEQ ID NO: 1472008 - DNA, 15 bp, Homo sapiens
tggctctgagcatcg

SEQ ID NO: 1472009 - DNA, 15 bp, Homo sapiens
ctggctctgagcatc

SEQ ID NO: 1472010 - DNA, 15 bp, Homo sapiens
cctggctctgagcat

SEQ ID NO: 1472011 - DNA, 15 bp, Homo sapiens
tcctggctctgagca

SEQ ID NO: 1472012 - DNA, 15 bp, Homo sapiens
ctcctggctctgagc

SEQ ID NO: 1472013 - DNA, 15 bp, Homo sapiens
cctcctggctctgag

SEQ ID NO: 1472014 - DNA, 15 bp, Homo sapiens
gcctcctggctctga

SEQ ID NO: 1472015 - DNA, 15 bp, Homo sapiens
agcctcctggctctg

SEQ ID NO: 1472016 - DNA, 15 bp, Homo sapiens
cagcctcctggctct

SEQ ID NO: 1472017 - DNA, 15 bp, Homo sapiens
tcagcctcctggctc

SEQ ID NO: 1472018 - DNA, 15 bp, Homo sapiens
gtcagcctcctggct

SEQ ID NO: 1472019 - DNA, 15 bp, Homo sapiens
cgtcagcctcctggc

SEQ ID NO: 1472020 - DNA, 15 bp, Homo sapiens
ccgtcagcctcctgg

SEQ ID NO: 1472021 - DNA, 15 bp, Homo sapiens
tccgtcagcctcctg

SEQ ID NO: 1472022 - DNA, 15 bp, Homo sapiens
atccgtcagcctcct

SEQ ID NO: 1472023 - DNA, 15 bp, Homo sapiens
catccgtcagcctcc

SEQ ID NO: 1472024 - DNA, 15 bp, Homo sapiens
gcatccgtcagcctc

SEQ ID NO: 1472025 - DNA, 15 bp, Homo sapiens
ggcatccgtcagcct

SEQ ID NO: 1472026 - DNA, 15 bp, Homo sapiens
tggcatccgtcagcc

SEQ ID NO: 1472027 - DNA, 15 bp, Homo sapiens
ctggcatccgtcagc

SEQ ID NO: 1472028 - DNA, 15 bp, Homo sapiens
tctggcatccgtcag

SEQ ID NO: 1472029 - DNA, 15 bp, Homo sapiens
ttctggcatccgtca

SEQ ID NO: 1472030 - DNA, 15 bp, Homo sapiens
cttctggcatccgtc

SEQ ID NO: 1472031 - DNA, 15 bp, Homo sapiens
tcttctggcatccgt

SEQ ID NO: 1472032 - DNA, 15 bp, Homo sapiens
atcttctggcatccg

SEQ ID NO: 1472033 - DNA, 15 bp, Homo sapiens
catcttctggcatcc

SEQ ID NO: 1472034 - DNA, 15 bp, Homo sapiens
gcatcttctggcatc

SEQ ID NO: 1472035 - DNA, 15 bp, Homo sapiens
tgcatcttctggcat

SEQ ID NO: 1472036 - DNA, 15 bp, Homo sapiens
gtgcatcttctggca

SEQ ID NO: 1472037 - DNA, 15 bp, Homo sapiens
agtgcatcttctggc

SEQ ID NO: 1472038 - DNA, 15 bp, Homo sapiens
cagtgcatcttctgg

SEQ ID NO: 1472039 - DNA, 15 bp, Homo sapiens
acagtgcatcttctg

SEQ ID NO: 1472040 - DNA, 15 bp, Homo sapiens
cacagtgcatcttct

SEQ ID NO: 1472041 - DNA, 15 bp, Homo sapiens
tcacagtgcatcttc

SEQ ID NO: 1472042 - DNA, 15 bp, Homo sapiens
ctcacagtgcatctt

SEQ ID NO: 1472043 - DNA, 15 bp, Homo sapiens
actcacagtgcatct

SEQ ID NO: 1472044 - DNA, 15 bp, Homo sapiens
gactcacagtgcatc

SEQ ID NO: 1472045 - DNA, 15 bp, Homo sapiens
tgactcacagtgcat

SEQ ID NO: 1472046 - DNA, 15 bp, Homo sapiens
ttgactcacagtgca

SEQ ID NO: 1472047 - DNA, 15 bp, Homo sapiens
tttgactcacagtgc

SEQ ID NO: 1472048 - DNA, 15 bp, Homo sapiens
atttgactcacagtg

SEQ ID NO: 1472049 - DNA, 15 bp, Homo sapiens
catttgactcacagt

SEQ ID NO: 1472050 - DNA, 15 bp, Homo sapiens
tcatttgactcacag

SEQ ID NO: 1472051 - DNA, 15 bp, Homo sapiens
gtcatttgactcaca

SEQ ID NO: 1472052 - DNA, 15 bp, Homo sapiens
agtcatttgactcac

SEQ ID NO: 1472053 - DNA, 15 bp, Homo sapiens
cagtcatttgactca

SEQ ID NO: 1472054 - DNA, 15 bp, Homo sapiens
tcagtcatttgactc

SEQ ID NO: 1472055 - DNA, 15 bp, Homo sapiens
ctcagtcatttgact

SEQ ID NO: 1472056 - DNA, 15 bp, Homo sapiens
gctcagtcatttgac

SEQ ID NO: 1472057 - DNA, 15 bp, Homo sapiens
agctcagtcatttga

SEQ ID NO: 1472058 - DNA, 15 bp, Homo sapiens
cagctcagtcatttg

SEQ ID NO: 1472059 - DNA, 15 bp, Homo sapiens
ccagctcagtcattt

SEQ ID NO: 1472060 - DNA, 15 bp, Homo sapiens
accagctcagtcatt

SEQ ID NO: 1472061 - DNA, 15 bp, Homo sapiens
aaccagctcagtcat

SEQ ID NO: 1472062 - DNA, 15 bp, Homo sapiens
gaaccagctcagtca

SEQ ID NO: 1472063 - DNA, 15 bp, Homo sapiens
tgaaccagctcagtc

SEQ ID NO: 1472064 - DNA, 15 bp, Homo sapiens
ctgaaccagctcagt

SEQ ID NO: 1472065 - DNA, 15 bp, Homo sapiens
cctgaaccagctcag

SEQ ID NO: 1472066 - DNA, 15 bp, Homo sapiens
gcctgaaccagctca

SEQ ID NO: 1472067 - DNA, 15 bp, Homo sapiens
ggcctgaaccagctc

SEQ ID NO: 1472068 - DNA, 15 bp, Homo sapiens
gggcctgaaccagct

SEQ ID NO: 1472069 - DNA, 15 bp, Homo sapiens
tgggcctgaaccagc

SEQ ID NO: 1472070 - DNA, 15 bp, Homo sapiens
atgggcctgaaccag

SEQ ID NO: 1472071 - DNA, 15 bp, Homo sapiens
catgggcctgaacca

SEQ ID NO: 1472072 - DNA, 15 bp, Homo sapiens
acatgggcctgaacc

SEQ ID NO: 1472073 - DNA, 15 bp, Homo sapiens
cacatgggcctgaac

SEQ ID NO: 1472074 - DNA, 15 bp, Homo sapiens
acacatgggcctgaa

SEQ ID NO: 1472075 - DNA, 15 bp, Homo sapiens
gacacatgggcctga

SEQ ID NO: 1472076 - DNA, 15 bp, Homo sapiens
ggacacatgggcctg

SEQ ID NO: 1472077 - DNA, 15 bp, Homo sapiens
gggacacatgggcct

SEQ ID NO: 1472078 - DNA, 15 bp, Homo sapiens
cgggacacatgggcc

SEQ ID NO: 1472079 - DNA, 15 bp, Homo sapiens
ccgggacacatgggc

SEQ ID NO: 1472080 - DNA, 15 bp, Homo sapiens
cccgggacacatggg

SEQ ID NO: 1472081 - DNA, 15 bp, Homo sapiens
gcccgggacacatgg

SEQ ID NO: 1472082 - DNA, 15 bp, Homo sapiens
tgcccgggacacatg

SEQ ID NO: 1472083 - DNA, 15 bp, Homo sapiens
ctgcccgggacacat

SEQ ID NO: 1472084 - DNA, 15 bp, Homo sapiens
tctgcccgggacaca

SEQ ID NO: 1472085 - DNA, 15 bp, Homo sapiens
ctctgcccgggacac

SEQ ID NO: 1472086 - DNA, 15 bp, Homo sapiens
gctctgcccgggaca

SEQ ID NO: 1472087 - DNA, 15 bp, Homo sapiens
ggctctgcccgggac

SEQ ID NO: 1472088 - DNA, 15 bp, Homo sapiens
cggctctgcccggga

SEQ ID NO: 1472089 - DNA, 15 bp, Homo sapiens
ccggctctgcccggg

SEQ ID NO: 1472090 - DNA, 15 bp, Homo sapiens
cccggctctgcccgg

SEQ ID NO: 1472091 - DNA, 15 bp, Homo sapiens
tcccggctctgcccg

SEQ ID NO: 1472092 - DNA, 15 bp, Homo sapiens
atcccggctctgccc

SEQ ID NO: 1472093 - DNA, 15 bp, Homo sapiens
catcccggctctgcc

SEQ ID NO: 1472094 - DNA, 15 bp, Homo sapiens
tcatcccggctctgc

SEQ ID NO: 1472095 - DNA, 15 bp, Homo sapiens
ctcatcccggctctg

SEQ ID NO: 1472096 - DNA, 15 bp, Homo sapiens
gctcatcccggctct

SEQ ID NO: 1472097 - DNA, 15 bp, Homo sapiens
cgctcatcccggctc

SEQ ID NO: 1472098 - DNA, 15 bp, Homo sapiens
tcgctcatcccggct

SEQ ID NO: 1472099 - DNA, 15 bp, Homo sapiens
ctcgctcatcccggc

SEQ ID NO: 1472100 - DNA, 15 bp, Homo sapiens
tctcgctcatcccgg

SEQ ID NO: 1472101 - DNA, 15 bp, Homo sapiens
gtctcgctcatcccg

SEQ ID NO: 1472102 - DNA, 15 bp, Homo sapiens
cgtctcgctcatccc

SEQ ID NO: 1472103 - DNA, 15 bp, Homo sapiens
ccgtctcgctcatcc

SEQ ID NO: 1472104 - DNA, 15 bp, Homo sapiens
accgtctcgctcatc

SEQ ID NO: 1472105 - DNA, 15 bp, Homo sapiens
gaccgtctcgctcat

SEQ ID NO: 1472106 - DNA, 15 bp, Homo sapiens
tgaccgtctcgctca

SEQ ID NO: 1472107 - DNA, 15 bp, Homo sapiens
gtgaccgtctcgctc

SEQ ID NO: 1472108 - DNA, 15 bp, Homo sapiens
ggtgaccgtctcgct

SEQ ID NO: 1472109 - DNA, 15 bp, Homo sapiens
tggtgaccgtctcgc

SEQ ID NO: 1472110 - DNA, 15 bp, Homo sapiens
ttggtgaccgtctcg

SEQ ID NO: 1472111 - DNA, 15 bp, Homo sapiens
tttggtgaccgtctc

SEQ ID NO: 1472112 - DNA, 15 bp, Homo sapiens
atttggtgaccgtct

SEQ ID NO: 1472113 - DNA, 15 bp, Homo sapiens
catttggtgaccgtc

SEQ ID NO: 1472114 - DNA, 15 bp, Homo sapiens
ccatttggtgaccgt

SEQ ID NO: 1472115 - DNA, 15 bp, Homo sapiens
cccatttggtgaccg

SEQ ID NO: 1472116 - DNA, 15 bp, Homo sapiens
ccccatttggtgacc

SEQ ID NO: 1472117 - DNA, 15 bp, Homo sapiens
cccccatttggtgac

SEQ ID NO: 1472118 - DNA, 15 bp, Homo sapiens
gcccccatttggtga

SEQ ID NO: 1472119 - DNA, 15 bp, Homo sapiens
tgcccccatttggtg

SEQ ID NO: 1472120 - DNA, 15 bp, Homo sapiens
ctgcccccatttggt

SEQ ID NO: 1472121 - DNA, 15 bp, Homo sapiens
actgcccccatttgg

SEQ ID NO: 1472122 - DNA, 15 bp, Homo sapiens
aactgcccccatttg

SEQ ID NO: 1472123 - DNA, 15 bp, Homo sapiens
aaactgcccccattt

SEQ ID NO: 1472124 - DNA, 15 bp, Homo sapiens
aaaactgcccccatt

SEQ ID NO: 1472125 - DNA, 15 bp, Homo sapiens
gaaaactgcccccat

SEQ ID NO: 1472126 - DNA, 15 bp, Homo sapiens
tgaaaactgccccca

SEQ ID NO: 1472127 - DNA, 15 bp, Homo sapiens
ctgaaaactgccccc

SEQ ID NO: 1472128 - DNA, 15 bp, Homo sapiens
gctgaaaactgcccc

SEQ ID NO: 1472129 - DNA, 15 bp, Homo sapiens
tgctgaaaactgccc

SEQ ID NO: 1472130 - DNA, 15 bp, Homo sapiens
gtgctgaaaactgcc

SEQ ID NO: 1472131 - DNA, 15 bp, Homo sapiens
cgtgctgaaaactgc

SEQ ID NO: 1472132 - DNA, 15 bp, Homo sapiens
acgtgctgaaaactg

SEQ ID NO: 1472133 - DNA, 15 bp, Homo sapiens
gacgtgctgaaaact

SEQ ID NO: 1472134 - DNA, 15 bp, Homo sapiens
tgacgtgctgaaaac

SEQ ID NO: 1472135 - DNA, 15 bp, Homo sapiens
ctgacgtgctgaaaa

SEQ ID NO: 1472136 - DNA, 15 bp, Homo sapiens
gctgacgtgctgaaa

SEQ ID NO: 1472137 - DNA, 15 bp, Homo sapiens
cgctgacgtgctgaa

SEQ ID NO: 1472138 - DNA, 15 bp, Homo sapiens
tcgctgacgtgctga

SEQ ID NO: 1472139 - DNA, 15 bp, Homo sapiens
ctcgctgacgtgctg

SEQ ID NO: 1472140 - DNA, 15 bp, Homo sapiens
actcgctgacgtgct

SEQ ID NO: 1472141 - DNA, 15 bp, Homo sapiens
gactcgctgacgtgc

SEQ ID NO: 1472142 - DNA, 15 bp, Homo sapiens
ggactcgctgacgtg

SEQ ID NO: 1472143 - DNA, 15 bp, Homo sapiens
cggactcgctgacgt

SEQ ID NO: 1472144 - DNA, 15 bp, Homo sapiens
ccggactcgctgacg

SEQ ID NO: 1472145 - DNA, 15 bp, Homo sapiens
gccggactcgctgac

SEQ ID NO: 1472146 - DNA, 15 bp, Homo sapiens
agccggactcgctga

SEQ ID NO: 1472147 - DNA, 15 bp, Homo sapiens
cagccggactcgctg

SEQ ID NO: 1472148 - DNA, 15 bp, Homo sapiens
tcagccggactcgct

SEQ ID NO: 1472149 - DNA, 15 bp, Homo sapiens
ctcagccggactcgc

SEQ ID NO: 1472150 - DNA, 15 bp, Homo sapiens
actcagccggactcg

SEQ ID NO: 1472151 - DNA, 15 bp, Homo sapiens
tactcagccggactc

SEQ ID NO: 1472152 - DNA, 15 bp, Homo sapiens
ttactcagccggact

SEQ ID NO: 1472153 - DNA, 15 bp, Homo sapiens
cttactcagccggac

SEQ ID NO: 1472154 - DNA, 15 bp, Homo sapiens
tcttactcagccgga

SEQ ID NO: 1472155 - DNA, 15 bp, Homo sapiens
ttcttactcagccgg

SEQ ID NO: 1472156 - DNA, 15 bp, Homo sapiens
attcttactcagccg

SEQ ID NO: 1472157 - DNA, 15 bp, Homo sapiens
gattcttactcagcc

SEQ ID NO: 1472158 - DNA, 15 bp, Homo sapiens
tgattcttactcagc

SEQ ID NO: 1472159 - DNA, 15 bp, Homo sapiens
gtgattcttactcag

SEQ ID NO: 1472160 - DNA, 15 bp, Homo sapiens
ggtgattcttactca

SEQ ID NO: 1472161 - DNA, 15 bp, Homo sapiens
tggtgattcttactc

SEQ ID NO: 1472162 - DNA, 15 bp, Homo sapiens
gtggtgattcttact

SEQ ID NO: 1472163 - DNA, 15 bp, Homo sapiens
agtggtgattcttac

SEQ ID NO: 1472164 - DNA, 15 bp, Homo sapiens
cagtggtgattctta

SEQ ID NO: 1472165 - DNA, 15 bp, Homo sapiens
acagtggtgattctt

SEQ ID NO: 1472166 - DNA, 15 bp, Homo sapiens
cacagtggtgattct

SEQ ID NO: 1472167 - DNA, 15 bp, Homo sapiens
acacagtggtgattc

SEQ ID NO: 1472168 - DNA, 15 bp, Homo sapiens
cacacagtggtgatt

SEQ ID NO: 1472169 - DNA, 15 bp, Homo sapiens
ccacacagtggtgat

SEQ ID NO: 1472170 - DNA, 15 bp, Homo sapiens
cccacacagtggtga

SEQ ID NO: 1472171 - DNA, 15 bp, Homo sapiens
gcccacacagtggtg

SEQ ID NO: 1472172 - DNA, 15 bp, Homo sapiens
agcccacacagtggt

SEQ ID NO: 1472173 - DNA, 15 bp, Homo sapiens
gagcccacacagtgg

SEQ ID NO: 1472174 - DNA, 15 bp, Homo sapiens
ggagcccacacagtg

SEQ ID NO: 1472175 - DNA, 15 bp, Homo sapiens
tggagcccacacagt

SEQ ID NO: 1472176 - DNA, 15 bp, Homo sapiens
gtggagcccacacag

SEQ ID NO: 1472177 - DNA, 15 bp, Homo sapiens
tgtggagcccacaca

SEQ ID NO: 1472178 - DNA, 15 bp, Homo sapiens
ctgtggagcccacac

SEQ ID NO: 1472179 - DNA, 15 bp, Homo sapiens
cctgtggagcccaca

SEQ ID NO: 1472180 - DNA, 15 bp, Homo sapiens
gcctgtggagcccac

SEQ ID NO: 1472181 - DNA, 15 bp, Homo sapiens
tgcctgtggagccca

SEQ ID NO: 1472182 - DNA, 15 bp, Homo sapiens
gtgcctgtggagccc

SEQ ID NO: 1472183 - DNA, 15 bp, Homo sapiens
tgtgcctgtggagcc

SEQ ID NO: 1472184 - DNA, 15 bp, Homo sapiens
ctgtgcctgtggagc

SEQ ID NO: 1472185 - DNA, 15 bp, Homo sapiens
cctgtgcctgtggag

SEQ ID NO: 1472186 - DNA, 15 bp, Homo sapiens
ccctgtgcctgtgga

SEQ ID NO: 1472187 - DNA, 15 bp, Homo sapiens
tccctgtgcctgtgg

SEQ ID NO: 1472188 - DNA, 15 bp, Homo sapiens
ctccctgtgcctgtg

SEQ ID NO: 1472189 - DNA, 15 bp, Homo sapiens
gctccctgtgcctgt

SEQ ID NO: 1472190 - DNA, 15 bp, Homo sapiens
ggctccctgtgcctg

SEQ ID NO: 1472191 - DNA, 15 bp, Homo sapiens
cggctccctgtgcct

SEQ ID NO: 1472192 - DNA, 15 bp, Homo sapiens
gcggctccctgtgcc

SEQ ID NO: 1472193 - DNA, 15 bp, Homo sapiens
cgcggctccctgtgc

SEQ ID NO: 1472194 - DNA, 15 bp, Homo sapiens
acgcggctccctgtg

SEQ ID NO: 1472195 - DNA, 15 bp, Homo sapiens
gacgcggctccctgt

SEQ ID NO: 1472196 - DNA, 15 bp, Homo sapiens
ggacgcggctccctg

SEQ ID NO: 1472197 - DNA, 15 bp, Homo sapiens
gggacgcggctccct

SEQ ID NO: 1472198 - DNA, 15 bp, Homo sapiens
ggggacgcggctccc

SEQ ID NO: 1472199 - DNA, 15 bp, Homo sapiens
tggggacgcggctcc

SEQ ID NO: 1472200 - DNA, 15 bp, Homo sapiens
ctggggacgcggctc

SEQ ID NO: 1472201 - DNA, 15 bp, Homo sapiens
gctggggacgcggct

SEQ ID NO: 1472202 - DNA, 15 bp, Homo sapiens
tgctggggacgcggc

SEQ ID NO: 1472203 - DNA, 15 bp, Homo sapiens
gtgctggggacgcgg

SEQ ID NO: 1472204 - DNA, 15 bp, Homo sapiens
cgtgctggggacgcg

SEQ ID NO: 1472205 - DNA, 15 bp, Homo sapiens
ccgtgctggggacgc

SEQ ID NO: 1472206 - DNA, 15 bp, Homo sapiens
tccgtgctggggacg

SEQ ID NO: 1472207 - DNA, 15 bp, Homo sapiens
ctccgtgctggggac

SEQ ID NO: 1472208 - DNA, 15 bp, Homo sapiens
gctccgtgctgggga

SEQ ID NO: 1472209 - DNA, 15 bp, Homo sapiens
ggctccgtgctgggg

SEQ ID NO: 1472210 - DNA, 15 bp, Homo sapiens
aggctccgtgctggg

SEQ ID NO: 1472211 - DNA, 15 bp, Homo sapiens
caggctccgtgctgg

SEQ ID NO: 1472212 - DNA, 15 bp, Homo sapiens
gcaggctccgtgctg

SEQ ID NO: 1472213 - DNA, 15 bp, Homo sapiens
ggcaggctccgtgct

SEQ ID NO: 1472214 - DNA, 15 bp, Homo sapiens
aggcaggctccgtgc

SEQ ID NO: 1472215 - DNA, 15 bp, Homo sapiens
caggcaggctccgtg

SEQ ID NO: 1472216 - DNA, 15 bp, Homo sapiens
tcaggcaggctccgt

SEQ ID NO: 1472217 - DNA, 15 bp, Homo sapiens
gtcaggcaggctccg

SEQ ID NO: 1472218 - DNA, 15 bp, Homo sapiens
tgtcaggcaggctcc

SEQ ID NO: 1472219 - DNA, 15 bp, Homo sapiens
ttgtcaggcaggctc

SEQ ID NO: 1472220 - DNA, 15 bp, Homo sapiens
tttgtcaggcaggct

SEQ ID NO: 1472221 - DNA, 15 bp, Homo sapiens
ctttgtcaggcaggc

SEQ ID NO: 1472222 - DNA, 15 bp, Homo sapiens
gctttgtcaggcagg

SEQ ID NO: 1472223 - DNA, 15 bp, Homo sapiens
ggctttgtcaggcag

SEQ ID NO: 1472224 - DNA, 15 bp, Homo sapiens
cggctttgtcaggca

SEQ ID NO: 1472225 - DNA, 15 bp, Homo sapiens
gcggctttgtcaggc

SEQ ID NO: 1472226 - DNA, 15 bp, Homo sapiens
tgcggctttgtcagg

SEQ ID NO: 1472227 - DNA, 15 bp, Homo sapiens
atgcggctttgtcag

SEQ ID NO: 1472228 - DNA, 15 bp, Homo sapiens
gatgcggctttgtca

SEQ ID NO: 1472229 - DNA, 15 bp, Homo sapiens
ggatgcggctttgtc

SEQ ID NO: 1472230 - DNA, 15 bp, Homo sapiens
cggatgcggctttgt

SEQ ID NO: 1472231 - DNA, 15 bp, Homo sapiens
gcggatgcggctttg

SEQ ID NO: 1472232 - DNA, 15 bp, Homo sapiens
tgcggatgcggcttt

SEQ ID NO: 1472233 - DNA, 15 bp, Homo sapiens
ctgcggatgcggctt

SEQ ID NO: 1472234 - DNA, 15 bp, Homo sapiens
cctgcggatgcggct

SEQ ID NO: 1472235 - DNA, 15 bp, Homo sapiens
acctgcggatgcggc

SEQ ID NO: 1472236 - DNA, 15 bp, Homo sapiens
cacctgcggatgcgg

SEQ ID NO: 1472237 - DNA, 15 bp, Homo sapiens
tcacctgcggatgcg

SEQ ID NO: 1472238 - DNA, 15 bp, Homo sapiens
gtcacctgcggatgc

SEQ ID NO: 1472239 - DNA, 15 bp, Homo sapiens
ggtcacctgcggatg

SEQ ID NO: 1472240 - DNA, 15 bp, Homo sapiens
gggtcacctgcggat

SEQ ID NO: 1472241 - DNA, 15 bp, Homo sapiens
tgggtcacctgcgga

SEQ ID NO: 1472242 - DNA, 15 bp, Homo sapiens
ttgggtcacctgcgg

SEQ ID NO: 1472243 - DNA, 15 bp, Homo sapiens
gttgggtcacctgcg

SEQ ID NO: 1472244 - DNA, 15 bp, Homo sapiens
tgttgggtcacctgc

SEQ ID NO: 1472245 - DNA, 15 bp, Homo sapiens
gtgttgggtcacctg

SEQ ID NO: 1472246 - DNA, 15 bp, Homo sapiens
ggtgttgggtcacct

SEQ ID NO: 1472247 - DNA, 15 bp, Homo sapiens
gggtgttgggtcacc

SEQ ID NO: 1472248 - DNA, 15 bp, Homo sapiens
tgggtgttgggtcac

SEQ ID NO: 1472249 - DNA, 15 bp, Homo sapiens
atgggtgttgggtca

SEQ ID NO: 1472250 - DNA, 15 bp, Homo sapiens
aatgggtgttgggtc

SEQ ID NO: 1472251 - DNA, 15 bp, Homo sapiens
gaatgggtgttgggt

SEQ ID NO: 1472252 - DNA, 15 bp, Homo sapiens
ggaatgggtgttggg

SEQ ID NO: 1472253 - DNA, 15 bp, Homo sapiens
gggaatgggtgttgg

SEQ ID NO: 1472254 - DNA, 15 bp, Homo sapiens
tgggaatgggtgttg

SEQ ID NO: 1472255 - DNA, 15 bp, Homo sapiens
ttgggaatgggtgtt

SEQ ID NO: 1472256 - DNA, 15 bp, Homo sapiens
tttgggaatgggtgt

SEQ ID NO: 1472257 - DNA, 15 bp, Homo sapiens
ctttgggaatgggtg

SEQ ID NO: 1472258 - DNA, 15 bp, Homo sapiens
actttgggaatgggt

SEQ ID NO: 1472259 - DNA, 15 bp, Homo sapiens
cactttgggaatggg

SEQ ID NO: 1472260 - DNA, 15 bp, Homo sapiens
ccactttgggaatgg

SEQ ID NO: 1472261 - DNA, 15 bp, Homo sapiens
gccactttgggaatg

SEQ ID NO: 1472262 - DNA, 15 bp, Homo sapiens
agccactttgggaat

SEQ ID NO: 1472263 - DNA, 15 bp, Homo sapiens
cagccactttgggaa

SEQ ID NO: 1472264 - DNA, 15 bp, Homo sapiens
gcagccactttggga

SEQ ID NO: 1472265 - DNA, 15 bp, Homo sapiens
ggcagccactttggg

SEQ ID NO: 1472266 - DNA, 15 bp, Homo sapiens
tggcagccactttgg

SEQ ID NO: 1472267 - DNA, 15 bp, Homo sapiens
gtggcagccactttg

SEQ ID NO: 1472268 - DNA, 15 bp, Homo sapiens
agtggcagccacttt

SEQ ID NO: 1472269 - DNA, 15 bp, Homo sapiens
aagtggcagccactt

SEQ ID NO: 1472270 - DNA, 15 bp, Homo sapiens
taagtggcagccact

SEQ ID NO: 1472271 - DNA, 15 bp, Homo sapiens
gtaagtggcagccac

SEQ ID NO: 1472272 - DNA, 15 bp, Homo sapiens
ggtaagtggcagcca

SEQ ID NO: 1472273 - DNA, 15 bp, Homo sapiens
gggtaagtggcagcc

SEQ ID NO: 1472274 - DNA, 15 bp, Homo sapiens
ggggtaagtggcagc

SEQ ID NO: 1472275 - DNA, 15 bp, Homo sapiens
gggggtaagtggcag

SEQ ID NO: 1472276 - DNA, 15 bp, Homo sapiens
tgggggtaagtggca

SEQ ID NO: 1472277 - DNA, 15 bp, Homo sapiens
ctgggggtaagtggc

SEQ ID NO: 1472278 - DNA, 15 bp, Homo sapiens
cctgggggtaagtgg

SEQ ID NO: 1472279 - DNA, 15 bp, Homo sapiens
gcctgggggtaagtg

SEQ ID NO: 1472280 - DNA, 15 bp, Homo sapiens
agcctgggggtaagt

SEQ ID NO: 1472281 - DNA, 15 bp, Homo sapiens
cagcctgggggtaag

SEQ ID NO: 1472282 - DNA, 15 bp, Homo sapiens
ccagcctgggggtaa

SEQ ID NO: 1472283 - DNA, 15 bp, Homo sapiens
tccagcctgggggta

SEQ ID NO: 1472284 - DNA, 15 bp, Homo sapiens
atccagcctgggggt

SEQ ID NO: 1472285 - DNA, 15 bp, Homo sapiens
catccagcctggggg

SEQ ID NO: 1472286 - DNA, 15 bp, Homo sapiens
gcatccagcctgggg

SEQ ID NO: 1472287 - DNA, 15 bp, Homo sapiens
tgcatccagcctggg

SEQ ID NO: 1472288 - DNA, 15 bp, Homo sapiens
gtgcatccagcctgg

SEQ ID NO: 1472289 - DNA, 15 bp, Homo sapiens
ggtgcatccagcctg

SEQ ID NO: 1472290 - DNA, 15 bp, Homo sapiens
tggtgcatccagcct

SEQ ID NO: 1472291 - DNA, 15 bp, Homo sapiens
ctggtgcatccagcc

SEQ ID NO: 1472292 - DNA, 15 bp, Homo sapiens
cctggtgcatccagc

SEQ ID NO: 1472293 - DNA, 15 bp, Homo sapiens
ccctggtgcatccag

SEQ ID NO: 1472294 - DNA, 15 bp, Homo sapiens
tccctggtgcatcca

SEQ ID NO: 1472295 - DNA, 15 bp, Homo sapiens
ctccctggtgcatcc

SEQ ID NO: 1472296 - DNA, 15 bp, Homo sapiens
gctccctggtgcatc

SEQ ID NO: 1472297 - DNA, 15 bp, Homo sapiens
tgctccctggtgcat

SEQ ID NO: 1472298 - DNA, 15 bp, Homo sapiens
gtgctccctggtgca

SEQ ID NO: 1472299 - DNA, 15 bp, Homo sapiens
tgtgctccctggtgc

SEQ ID NO: 1472300 - DNA, 15 bp, Homo sapiens
atgtgctccctggtg

SEQ ID NO: 1472301 - DNA, 15 bp, Homo sapiens
aatgtgctccctggt

SEQ ID NO: 1472302 - DNA, 15 bp, Homo sapiens
gaatgtgctccctgg

SEQ ID NO: 1472303 - DNA, 15 bp, Homo sapiens
agaatgtgctccctg

SEQ ID NO: 1472304 - DNA, 15 bp, Homo sapiens
gagaatgtgctccct

SEQ ID NO: 1472305 - DNA, 15 bp, Homo sapiens
ggagaatgtgctccc

SEQ ID NO: 1472306 - DNA, 15 bp, Homo sapiens
aggagaatgtgctcc

SEQ ID NO: 1472307 - DNA, 15 bp, Homo sapiens
gaggagaatgtgctc

SEQ ID NO: 1472308 - DNA, 15 bp, Homo sapiens
agaggagaatgtgct

SEQ ID NO: 1472309 - DNA, 15 bp, Homo sapiens
cagaggagaatgtgc

SEQ ID NO: 1472310 - DNA, 15 bp, Homo sapiens
ccagaggagaatgtg

SEQ ID NO: 1472311 - DNA, 15 bp, Homo sapiens
gccagaggagaatgt

SEQ ID NO: 1472312 - DNA, 15 bp, Homo sapiens
tgccagaggagaatg

SEQ ID NO: 1472313 - DNA, 15 bp, Homo sapiens
gtgccagaggagaat

SEQ ID NO: 1472314 - DNA, 15 bp, Homo sapiens
ggtgccagaggagaa

SEQ ID NO: 1472315 - DNA, 15 bp, Homo sapiens
aggtgccagaggaga

SEQ ID NO: 1472316 - DNA, 15 bp, Homo sapiens
gaggtgccagaggag

SEQ ID NO: 1472317 - DNA, 15 bp, Homo sapiens
ggaggtgccagagga

SEQ ID NO: 1472318 - DNA, 15 bp, Homo sapiens
tggaggtgccagagg

SEQ ID NO: 1472319 - DNA, 15 bp, Homo sapiens
gtggaggtgccagag

SEQ ID NO: 1472320 - DNA, 15 bp, Homo sapiens
tgtggaggtgccaga

SEQ ID NO: 1472321 - DNA, 15 bp, Homo sapiens
gtgtggaggtgccag

SEQ ID NO: 1472322 - DNA, 15 bp, Homo sapiens
ggtgtggaggtgcca

SEQ ID NO: 1472323 - DNA, 15 bp, Homo sapiens
cggtgtggaggtgcc

SEQ ID NO: 1472324 - DNA, 15 bp, Homo sapiens
acggtgtggaggtgc

SEQ ID NO: 1472325 - DNA, 15 bp, Homo sapiens
gacggtgtggaggtg

SEQ ID NO: 1472326 - DNA, 15 bp, Homo sapiens
ggacggtgtggaggt

SEQ ID NO: 1472327 - DNA, 15 bp, Homo sapiens
tggacggtgtggagg

SEQ ID NO: 1472328 - DNA, 15 bp, Homo sapiens
atggacggtgtggag

SEQ ID NO: 1472329 - DNA, 15 bp, Homo sapiens
catggacggtgtgga

SEQ ID NO: 1472330 - DNA, 15 bp, Homo sapiens
tcatggacggtgtgg

SEQ ID NO: 1472331 - DNA, 15 bp, Homo sapiens
atcatggacggtgtg

SEQ ID NO: 1472332 - DNA, 15 bp, Homo sapiens
catcatggacggtgt

SEQ ID NO: 1472333 - DNA, 15 bp, Homo sapiens
tcatcatggacggtg

SEQ ID NO: 1472334 - DNA, 15 bp, Homo sapiens
atcatcatggacggt

SEQ ID NO: 1472335 - DNA, 15 bp, Homo sapiens
gatcatcatggacgg

SEQ ID NO: 1472336 - DNA, 15 bp, Homo sapiens
tgatcatcatggacg

SEQ ID NO: 1472337 - DNA, 15 bp, Homo sapiens
atgatcatcatggac

SEQ ID NO: 1472338 - DNA, 15 bp, Homo sapiens
catgatcatcatgga

SEQ ID NO: 1472339 - DNA, 15 bp, Homo sapiens
gcatgatcatcatgg

SEQ ID NO: 1472340 - DNA, 15 bp, Homo sapiens
ggcatgatcatcatg

SEQ ID NO: 1472341 - DNA, 15 bp, Homo sapiens
aggcatgatcatcat

SEQ ID NO: 1472342 - DNA, 15 bp, Homo sapiens
caggcatgatcatca

SEQ ID NO: 1472343 - DNA, 15 bp, Homo sapiens
acaggcatgatcatc

SEQ ID NO: 1472344 - DNA, 15 bp, Homo sapiens
cacaggcatgatcat

SEQ ID NO: 1472345 - DNA, 15 bp, Homo sapiens
ccacaggcatgatca

SEQ ID NO: 1472346 - DNA, 15 bp, Homo sapiens
gccacaggcatgatc

SEQ ID NO: 1472347 - DNA, 15 bp, Homo sapiens
agccacaggcatgat

SEQ ID NO: 1472348 - DNA, 15 bp, Homo sapiens
cagccacaggcatga

SEQ ID NO: 1472349 - DNA, 15 bp, Homo sapiens
tcagccacaggcatg

SEQ ID NO: 1472350 - DNA, 15 bp, Homo sapiens
ctcagccacaggcat

SEQ ID NO: 1472351 - DNA, 15 bp, Homo sapiens
cctcagccacaggca

SEQ ID NO: 1472352 - DNA, 15 bp, Homo sapiens
gcctcagccacaggc

SEQ ID NO: 1472353 - DNA, 15 bp, Homo sapiens
ggcctcagccacagg

SEQ ID NO: 1472354 - DNA, 15 bp, Homo sapiens
gggcctcagccacag

SEQ ID NO: 1472355 - DNA, 15 bp, Homo sapiens
cgggcctcagccaca

SEQ ID NO: 1472356 - DNA, 15 bp, Homo sapiens
gcgggcctcagccac

SEQ ID NO: 1472357 - DNA, 15 bp, Homo sapiens
tgcgggcctcagcca

SEQ ID NO: 1472358 - DNA, 15 bp, Homo sapiens
ctgcgggcctcagcc

SEQ ID NO: 1472359 - DNA, 15 bp, Homo sapiens
gctgcgggcctcagc

SEQ ID NO: 1472360 - DNA, 15 bp, Homo sapiens
cgctgcgggcctcag

SEQ ID NO: 1472361 - DNA, 15 bp, Homo sapiens
tcgctgcgggcctca

SEQ ID NO: 1472362 - DNA, 15 bp, Homo sapiens
ctcgctgcgggcctc

SEQ ID NO: 1472363 - DNA, 15 bp, Homo sapiens
tctcgctgcgggcct

SEQ ID NO: 1472364 - DNA, 15 bp, Homo sapiens
ttctcgctgcgggcc

SEQ ID NO: 1472365 - DNA, 15 bp, Homo sapiens
gttctcgctgcgggc

SEQ ID NO: 1472366 - DNA, 15 bp, Homo sapiens
agttctcgctgcggg

SEQ ID NO: 1472367 - DNA, 15 bp, Homo sapiens
aagttctcgctgcgg

SEQ ID NO: 1472368 - DNA, 15 bp, Homo sapiens
caagttctcgctgcg

SEQ ID NO: 1472369 - DNA, 15 bp, Homo sapiens
gcaagttctcgctgc

SEQ ID NO: 1472370 - DNA, 15 bp, Homo sapiens
ggcaagttctcgctg

SEQ ID NO: 1472371 - DNA, 15 bp, Homo sapiens
gggcaagttctcgct

SEQ ID NO: 1472372 - DNA, 15 bp, Homo sapiens
agggcaagttctcgc

SEQ ID NO: 1472373 - DNA, 15 bp, Homo sapiens
cagggcaagttctcg

SEQ ID NO: 1472374 - DNA, 15 bp, Homo sapiens
ccagggcaagttctc

SEQ ID NO: 1472375 - DNA, 15 bp, Homo sapiens
tccagggcaagttct

SEQ ID NO: 1472376 - DNA, 15 bp, Homo sapiens
atccagggcaagttc

SEQ ID NO: 1472377 - DNA, 15 bp, Homo sapiens
gatccagggcaagtt

SEQ ID NO: 1472378 - DNA, 15 bp, Homo sapiens
ggatccagggcaagt

SEQ ID NO: 1472379 - DNA, 15 bp, Homo sapiens
aggatccagggcaag

SEQ ID NO: 1472380 - DNA, 15 bp, Homo sapiens
caggatccagggcaa

SEQ ID NO: 1472381 - DNA, 15 bp, Homo sapiens
ccaggatccagggca

SEQ ID NO: 1472382 - DNA, 15 bp, Homo sapiens
cccaggatccagggc

SEQ ID NO: 1472383 - DNA, 15 bp, Homo sapiens
ccccaggatccaggg

SEQ ID NO: 1472384 - DNA, 15 bp, Homo sapiens
cccccaggatccagg

SEQ ID NO: 1472385 - DNA, 15 bp, Homo sapiens
gcccccaggatccag

SEQ ID NO: 1472386 - DNA, 15 bp, Homo sapiens
ggcccccaggatcca

SEQ ID NO: 1472387 - DNA, 15 bp, Homo sapiens
cggcccccaggatcc

SEQ ID NO: 1472388 - DNA, 15 bp, Homo sapiens
tcggcccccaggatc

SEQ ID NO: 1472389 - DNA, 15 bp, Homo sapiens
ctcggcccccaggat

SEQ ID NO: 1472390 - DNA, 15 bp, Homo sapiens
tctcggcccccagga

SEQ ID NO: 1472391 - DNA, 15 bp, Homo sapiens
ctctcggcccccagg

SEQ ID NO: 1472392 - DNA, 15 bp, Homo sapiens
tctctcggcccccag

SEQ ID NO: 1472393 - DNA, 15 bp, Homo sapiens
gtctctcggccccca

SEQ ID NO: 1472394 - DNA, 15 bp, Homo sapiens
ggtctctcggccccc

SEQ ID NO: 1472395 - DNA, 15 bp, Homo sapiens
gggtctctcggcccc

SEQ ID NO: 1472396 - DNA, 15 bp, Homo sapiens
ggggtctctcggccc

SEQ ID NO: 1472397 - DNA, 15 bp, Homo sapiens
cggggtctctcggcc

SEQ ID NO: 1472398 - DNA, 15 bp, Homo sapiens
gcggggtctctcggc

SEQ ID NO: 1472399 - DNA, 15 bp, Homo sapiens
tgcggggtctctcgg

SEQ ID NO: 1472400 - DNA, 15 bp, Homo sapiens
atgcggggtctctcg

SEQ ID NO: 1472401 - DNA, 15 bp, Homo sapiens
gatgcggggtctctc

SEQ ID NO: 1472402 - DNA, 15 bp, Homo sapiens
ggatgcggggtctct

SEQ ID NO: 1472403 - DNA, 15 bp, Homo sapiens
gggatgcggggtctc

SEQ ID NO: 1472404 - DNA, 15 bp, Homo sapiens
ggggatgcggggtct

SEQ ID NO: 1472405 - DNA, 15 bp, Homo sapiens
aggggatgcggggtc

SEQ ID NO: 1472406 - DNA, 15 bp, Homo sapiens
aaggggatgcggggt

SEQ ID NO: 1472407 - DNA, 15 bp, Homo sapiens
gaaggggatgcgggg

SEQ ID NO: 1472408 - DNA, 15 bp, Homo sapiens
agaaggggatgcggg

SEQ ID NO: 1472409 - DNA, 15 bp, Homo sapiens
gagaaggggatgcgg

SEQ ID NO: 1472410 - DNA, 15 bp, Homo sapiens
ggagaaggggatgcg

SEQ ID NO: 1472411 - DNA, 15 bp, Homo sapiens
tggagaaggggatgc

SEQ ID NO: 1472412 - DNA, 15 bp, Homo sapiens
ctggagaaggggatg

SEQ ID NO: 1472413 - DNA, 15 bp, Homo sapiens
gctggagaaggggat

SEQ ID NO: 1472414 - DNA, 15 bp, Homo sapiens
tgctggagaagggga

SEQ ID NO: 1472415 - DNA, 15 bp, Homo sapiens
ctgctggagaagggg

SEQ ID NO: 1472416 - DNA, 15 bp, Homo sapiens
cctgctggagaaggg

SEQ ID NO: 1472417 - DNA, 15 bp, Homo sapiens
tcctgctggagaagg

SEQ ID NO: 1472418 - DNA, 15 bp, Homo sapiens
ttcctgctggagaag

SEQ ID NO: 1472419 - DNA, 15 bp, Homo sapiens
cttcctgctggagaa

SEQ ID NO: 1472420 - DNA, 15 bp, Homo sapiens
gcttcctgctggaga

SEQ ID NO: 1472421 - DNA, 15 bp, Homo sapiens
ggcttcctgctggag

SEQ ID NO: 1472422 - DNA, 15 bp, Homo sapiens
gggcttcctgctgga

SEQ ID NO: 1472423 - DNA, 15 bp, Homo sapiens
ggggcttcctgctgg

SEQ ID NO: 1472424 - DNA, 15 bp, Homo sapiens
cggggcttcctgctg

SEQ ID NO: 1472425 - DNA, 15 bp, Homo sapiens
tcggggcttcctgct

SEQ ID NO: 1472426 - DNA, 15 bp, Homo sapiens
ttcggggcttcctgc

SEQ ID NO: 1472427 - DNA, 15 bp, Homo sapiens
attcggggcttcctg

SEQ ID NO: 1472428 - DNA, 15 bp, Homo sapiens
cattcggggcttcct

SEQ ID NO: 1472429 - DNA, 15 bp, Homo sapiens
gcattcggggcttcc

SEQ ID NO: 1472430 - DNA, 15 bp, Homo sapiens
tgcattcggggcttc

SEQ ID NO: 1472431 - DNA, 15 bp, Homo sapiens
ctgcattcggggctt

SEQ ID NO: 1472432 - DNA, 15 bp, Homo sapiens
gctgcattcggggct

SEQ ID NO: 1472433 - DNA, 15 bp, Homo sapiens
ggctgcattcggggc

SEQ ID NO: 1472434 - DNA, 15 bp, Homo sapiens
tggctgcattcgggg

SEQ ID NO: 1472435 - DNA, 15 bp, Homo sapiens
atggctgcattcggg

SEQ ID NO: 1472436 - DNA, 15 bp, Homo sapiens
gatggctgcattcgg

SEQ ID NO: 1472437 - DNA, 15 bp, Homo sapiens
agatggctgcattcg

SEQ ID NO: 1472438 - DNA, 15 bp, Homo sapiens
aagatggctgcattc

SEQ ID NO: 1472439 - DNA, 15 bp, Homo sapiens
gaagatggctgcatt

SEQ ID NO: 1472440 - DNA, 15 bp, Homo sapiens
tgaagatggctgcat

SEQ ID NO: 1472441 - DNA, 15 bp, Homo sapiens
gtgaagatggctgca

SEQ ID NO: 1472442 - DNA, 15 bp, Homo sapiens
tgtgaagatggctgc

SEQ ID NO: 1472443 - DNA, 15 bp, Homo sapiens
gtgtgaagatggctg

SEQ ID NO: 1472444 - DNA, 15 bp, Homo sapiens
ggtgtgaagatggct

SEQ ID NO: 1472445 - DNA, 15 bp, Homo sapiens
cggtgtgaagatggc

SEQ ID NO: 1472446 - DNA, 15 bp, Homo sapiens
tcggtgtgaagatgg

SEQ ID NO: 1472447 - DNA, 15 bp, Homo sapiens
ctcggtgtgaagatg

SEQ ID NO: 1472448 - DNA, 15 bp, Homo sapiens
gctcggtgtgaagat

SEQ ID NO: 1472449 - DNA, 15 bp, Homo sapiens
ggctcggtgtgaaga

SEQ ID NO: 1472450 - DNA, 15 bp, Homo sapiens
gggctcggtgtgaag

SEQ ID NO: 1472451 - DNA, 15 bp, Homo sapiens
tgggctcggtgtgaa

SEQ ID NO: 1472452 - DNA, 15 bp, Homo sapiens
gtgggctcggtgtga

SEQ ID NO: 1472453 - DNA, 15 bp, Homo sapiens
tgtgggctcggtgtg

SEQ ID NO: 1472454 - DNA, 15 bp, Homo sapiens
gtgtgggctcggtgt

SEQ ID NO: 1472455 - DNA, 15 bp, Homo sapiens
agtgtgggctcggtg

SEQ ID NO: 1472456 - DNA, 15 bp, Homo sapiens
tagtgtgggctcggt

SEQ ID NO: 1472457 - DNA, 15 bp, Homo sapiens
gtagtgtgggctcgg

SEQ ID NO: 1472458 - DNA, 15 bp, Homo sapiens
tgtagtgtgggctcg

SEQ ID NO: 1472459 - DNA, 15 bp, Homo sapiens
ttgtagtgtgggctc

SEQ ID NO: 1472460 - DNA, 15 bp, Homo sapiens
tttgtagtgtgggct

SEQ ID NO: 1472461 - DNA, 15 bp, Homo sapiens
gtttgtagtgtgggc

SEQ ID NO: 1472462 - DNA, 15 bp, Homo sapiens
tgtttgtagtgtggg

SEQ ID NO: 1472463 - DNA, 15 bp, Homo sapiens
ctgtttgtagtgtgg

SEQ ID NO: 1472464 - DNA, 15 bp, Homo sapiens
tctgtttgtagtgtg

SEQ ID NO: 1472465 - DNA, 15 bp, Homo sapiens
atctgtttgtagtgt

SEQ ID NO: 1472466 - DNA, 15 bp, Homo sapiens
gatctgtttgtagtg

SEQ ID NO: 1472467 - DNA, 15 bp, Homo sapiens
cgatctgtttgtagt

SEQ ID NO: 1472468 - DNA, 15 bp, Homo sapiens
ccgatctgtttgtag

SEQ ID NO: 1472469 - DNA, 15 bp, Homo sapiens
gccgatctgtttgta

SEQ ID NO: 1472470 - DNA, 15 bp, Homo sapiens
ggccgatctgtttgt

SEQ ID NO: 1472471 - DNA, 15 bp, Homo sapiens
tggccgatctgtttg

SEQ ID NO: 1472472 - DNA, 15 bp, Homo sapiens
atggccgatctgttt

SEQ ID NO: 1472473 - DNA, 15 bp, Homo sapiens
tatggccgatctgtt

SEQ ID NO: 1472474 - DNA, 15 bp, Homo sapiens
ctatggccgatctgt

SEQ ID NO: 1472475 - DNA, 15 bp, Homo sapiens
cctatggccgatctg

SEQ ID NO: 1472476 - DNA, 15 bp, Homo sapiens
gcctatggccgatct

SEQ ID NO: 1472477 - DNA, 15 bp, Homo sapiens
cgcctatggccgatc

SEQ ID NO: 1472478 - DNA, 15 bp, Homo sapiens
tcgcctatggccgat

SEQ ID NO: 1472479 - DNA, 15 bp, Homo sapiens
ctcgcctatggccga

SEQ ID NO: 1472480 - DNA, 15 bp, Homo sapiens
actcgcctatggccg

SEQ ID NO: 1472481 - DNA, 15 bp, Homo sapiens
aactcgcctatggcc

SEQ ID NO: 1472482 - DNA, 15 bp, Homo sapiens
gaactcgcctatggc

SEQ ID NO: 1472483 - DNA, 15 bp, Homo sapiens
cgaactcgcctatgg

SEQ ID NO: 1472484 - DNA, 15 bp, Homo sapiens
acgaactcgcctatg

SEQ ID NO: 1472485 - DNA, 15 bp, Homo sapiens
cacgaactcgcctat

SEQ ID NO: 1472486 - DNA, 15 bp, Homo sapiens
tcacgaactcgccta

SEQ ID NO: 1472487 - DNA, 15 bp, Homo sapiens
atcacgaactcgcct

SEQ ID NO: 1472488 - DNA, 15 bp, Homo sapiens
gatcacgaactcgcc

SEQ ID NO: 1472489 - DNA, 15 bp, Homo sapiens
ggatcacgaactcgc

SEQ ID NO: 1472490 - DNA, 15 bp, Homo sapiens
aggatcacgaactcg

SEQ ID NO: 1472491 - DNA, 15 bp, Homo sapiens
caggatcacgaactc

SEQ ID NO: 1472492 - DNA, 15 bp, Homo sapiens
ccaggatcacgaact

SEQ ID NO: 1472493 - DNA, 15 bp, Homo sapiens
cccaggatcacgaac

SEQ ID NO: 1472494 - DNA, 15 bp, Homo sapiens
ccccaggatcacgaa

SEQ ID NO: 1472495 - DNA, 15 bp, Homo sapiens
tccccaggatcacga

SEQ ID NO: 1472496 - DNA, 15 bp, Homo sapiens
atccccaggatcacg

SEQ ID NO: 1472497 - DNA, 15 bp, Homo sapiens
catccccaggatcac

SEQ ID NO: 1472498 - DNA, 15 bp, Homo sapiens
ccatccccaggatca

SEQ ID NO: 1472499 - DNA, 15 bp, Homo sapiens
tccatccccaggatc

SEQ ID NO: 1472500 - DNA, 15 bp, Homo sapiens
ttccatccccaggat

SEQ ID NO: 1472501 - DNA, 15 bp, Homo sapiens
gttccatccccagga

SEQ ID NO: 1472502 - DNA, 15 bp, Homo sapiens
tgttccatccccagg

SEQ ID NO: 1472503 - DNA, 15 bp, Homo sapiens
ctgttccatccccag

SEQ ID NO: 1472504 - DNA, 15 bp, Homo sapiens
actgttccatcccca

SEQ ID NO: 1472505 - DNA, 15 bp, Homo sapiens
gactgttccatcccc

SEQ ID NO: 1472506 - DNA, 15 bp, Homo sapiens
cgactgttccatccc

SEQ ID NO: 1472507 - DNA, 15 bp, Homo sapiens
ccgactgttccatcc

SEQ ID NO: 1472508 - DNA, 15 bp, Homo sapiens
accgactgttccatc

SEQ ID NO: 1472509 - DNA, 15 bp, Homo sapiens
caccgactgttccat

SEQ ID NO: 1472510 - DNA, 15 bp, Homo sapiens
tcaccgactgttcca

SEQ ID NO: 1472511 - DNA, 15 bp, Homo sapiens
ctcaccgactgttcc

SEQ ID NO: 1472512 - DNA, 15 bp, Homo sapiens
cctcaccgactgttc

SEQ ID NO: 1472513 - DNA, 15 bp, Homo sapiens
ccctcaccgactgtt

SEQ ID NO: 1472514 - DNA, 15 bp, Homo sapiens
cccctcaccgactgt

SEQ ID NO: 1472515 - DNA, 15 bp, Homo sapiens
acccctcaccgactg

SEQ ID NO: 1472516 - DNA, 15 bp, Homo sapiens
gacccctcaccgact

SEQ ID NO: 1472517 - DNA, 15 bp, Homo sapiens
agacccctcaccgac

SEQ ID NO: 1472518 - DNA, 15 bp, Homo sapiens
cagacccctcaccga

SEQ ID NO: 1472519 - DNA, 15 bp, Homo sapiens
tcagacccctcaccg

SEQ ID NO: 1472520 - DNA, 15 bp, Homo sapiens
gtcagacccctcacc

SEQ ID NO: 1472521 - DNA, 15 bp, Homo sapiens
ggtcagacccctcac

SEQ ID NO: 1472522 - DNA, 15 bp, Homo sapiens
tggtcagacccctca

SEQ ID NO: 1472523 - DNA, 15 bp, Homo sapiens
ctggtcagacccctc

SEQ ID NO: 1472524 - DNA, 15 bp, Homo sapiens
actggtcagacccct

SEQ ID NO: 1472525 - DNA, 15 bp, Homo sapiens
cactggtcagacccc

SEQ ID NO: 1472526 - DNA, 15 bp, Homo sapiens
gcactggtcagaccc

SEQ ID NO: 1472527 - DNA, 15 bp, Homo sapiens
ggcactggtcagacc

SEQ ID NO: 1472528 - DNA, 15 bp, Homo sapiens
gggcactggtcagac

SEQ ID NO: 1472529 - DNA, 15 bp, Homo sapiens
ggggcactggtcaga

SEQ ID NO: 1472530 - DNA, 15 bp, Homo sapiens
aggggcactggtcag

SEQ ID NO: 1472531 - DNA, 15 bp, Homo sapiens
aaggggcactggtca

SEQ ID NO: 1472532 - DNA, 15 bp, Homo sapiens
aaaggggcactggtc

SEQ ID NO: 1472533 - DNA, 15 bp, Homo sapiens
caaaggggcactggt

SEQ ID NO: 1472534 - DNA, 15 bp, Homo sapiens
gcaaaggggcactgg

SEQ ID NO: 1472535 - DNA, 15 bp, Homo sapiens
ggcaaaggggcactg

SEQ ID NO: 1472536 - DNA, 15 bp, Homo sapiens
gggcaaaggggcact

SEQ ID NO: 1472537 - DNA, 15 bp, Homo sapiens
ggggcaaaggggcac

SEQ ID NO: 1472538 - DNA, 15 bp, Homo sapiens
aggggcaaaggggca

SEQ ID NO: 1472539 - DNA, 15 bp, Homo sapiens
caggggcaaaggggc

SEQ ID NO: 1472540 - DNA, 15 bp, Homo sapiens
acaggggcaaagggg

SEQ ID NO: 1472541 - DNA, 15 bp, Homo sapiens
aacaggggcaaaggg

SEQ ID NO: 1472542 - DNA, 15 bp, Homo sapiens
gaacaggggcaaagg

SEQ ID NO: 1472543 - DNA, 15 bp, Homo sapiens
tgaacaggggcaaag

SEQ ID NO: 1472544 - DNA, 15 bp, Homo sapiens
gtgaacaggggcaaa

SEQ ID NO: 1472545 - DNA, 15 bp, Homo sapiens
ggtgaacaggggcaa

SEQ ID NO: 1472546 - DNA, 15 bp, Homo sapiens
tggtgaacaggggca

SEQ ID NO: 1472547 - DNA, 15 bp, Homo sapiens
gtggtgaacaggggc

SEQ ID NO: 1472548 - DNA, 15 bp, Homo sapiens
ggtggtgaacagggg

SEQ ID NO: 1472549 - DNA, 15 bp, Homo sapiens
aggtggtgaacaggg

SEQ ID NO: 1472550 - DNA, 15 bp, Homo sapiens
caggtggtgaacagg

SEQ ID NO: 1472551 - DNA, 15 bp, Homo sapiens
gcaggtggtgaacag

SEQ ID NO: 1472552 - DNA, 15 bp, Homo sapiens
gtgggcaggtggtga

SEQ ID NO: 1472553 - DNA, 15 bp, Homo sapiens
ggtgggcaggtggtg

SEQ ID NO: 1472554 - DNA, 15 bp, Homo sapiens
tggtgggcaggtggt

SEQ ID NO: 1472555 - DNA, 15 bp, Homo sapiens
gtggtgggcaggtgg

SEQ ID NO: 1472556 - DNA, 15 bp, Homo sapiens
ggtggtgggcaggtg

SEQ ID NO: 1472557 - DNA, 15 bp, Homo sapiens
gggtggtgggcaggt

SEQ ID NO: 1472558 - DNA, 15 bp, Homo sapiens
tgggtggtgggcagg

SEQ ID NO: 1472559 - DNA, 15 bp, Homo sapiens
ctgggtggtgggcag

SEQ ID NO: 1472560 - DNA, 15 bp, Homo sapiens
tctgggtggtgggca

SEQ ID NO: 1472561 - DNA, 15 bp, Homo sapiens
ttctgggtggtgggc

SEQ ID NO: 1472562 - DNA, 15 bp, Homo sapiens
gttctgggtggtggg

SEQ ID NO: 1472563 - DNA, 15 bp, Homo sapiens
ggttctgggtggtgg

SEQ ID NO: 1472564 - DNA, 15 bp, Homo sapiens
gggttctgggtggtg

SEQ ID NO: 1472565 - DNA, 15 bp, Homo sapiens
agggttctgggtggt

SEQ ID NO: 1472566 - DNA, 15 bp, Homo sapiens
aagggttctgggtgg

SEQ ID NO: 1472567 - DNA, 15 bp, Homo sapiens
taagggttctgggtg

SEQ ID NO: 1472568 - DNA, 15 bp, Homo sapiens
gtaagggttctgggt

SEQ ID NO: 1472569 - DNA, 15 bp, Homo sapiens
ggtaagggttctggg

SEQ ID NO: 1472570 - DNA, 15 bp, Homo sapiens
tggtaagggttctgg

SEQ ID NO: 1472571 - DNA, 15 bp, Homo sapiens
ctggtaagggttctg

SEQ ID NO: 1472572 - DNA, 15 bp, Homo sapiens
cctggtaagggttct

SEQ ID NO: 1472573 - DNA, 15 bp, Homo sapiens
acctggtaagggttc

SEQ ID NO: 1472574 - DNA, 15 bp, Homo sapiens
gacctggtaagggtt

SEQ ID NO: 1472575 - DNA, 15 bp, Homo sapiens
agacctggtaagggt

SEQ ID NO: 1472576 - DNA, 15 bp, Homo sapiens
aagacctggtaaggg

SEQ ID NO: 1472577 - DNA, 15 bp, Homo sapiens
caagacctggtaagg

SEQ ID NO: 1472578 - DNA, 15 bp, Homo sapiens
ccaagacctggtaag

SEQ ID NO: 1472579 - DNA, 15 bp, Homo sapiens
accaagacctggtaa

SEQ ID NO: 1472580 - DNA, 15 bp, Homo sapiens
gaccaagacctggta

SEQ ID NO: 1472581 - DNA, 15 bp, Homo sapiens
ggaccaagacctggt

SEQ ID NO: 1472582 - DNA, 15 bp, Homo sapiens
gggaccaagacctgg

SEQ ID NO: 1472583 - DNA, 15 bp, Homo sapiens
tgggaccaagacctg

SEQ ID NO: 1472584 - DNA, 15 bp, Homo sapiens
atgggaccaagacct

SEQ ID NO: 1472585 - DNA, 15 bp, Homo sapiens
aatgggaccaagacc

SEQ ID NO: 1472586 - DNA, 15 bp, Homo sapiens
caatgggaccaagac

SEQ ID NO: 1472587 - DNA, 15 bp, Homo sapiens
tcaatgggaccaaga

SEQ ID NO: 1472588 - DNA, 15 bp, Homo sapiens
ctcaatgggaccaag

SEQ ID NO: 1472589 - DNA, 15 bp, Homo sapiens
cctcaatgggaccaa

SEQ ID NO: 1472590 - DNA, 15 bp, Homo sapiens
ccctcaatgggacca

SEQ ID NO: 1472591 - DNA, 15 bp, Homo sapiens
accctcaatgggacc

SEQ ID NO: 1472592 - DNA, 15 bp, Homo sapiens
caccctcaatgggac

SEQ ID NO: 1472593 - DNA, 15 bp, Homo sapiens
acaccctcaatggga

SEQ ID NO: 1472594 - DNA, 15 bp, Homo sapiens
tacaccctcaatggg

SEQ ID NO: 1472595 - DNA, 15 bp, Homo sapiens
ctacaccctcaatgg

SEQ ID NO: 1472596 - DNA, 15 bp, Homo sapiens
gctacaccctcaatg

SEQ ID NO: 1472597 - DNA, 15 bp, Homo sapiens
agctacaccctcaat

SEQ ID NO: 1472598 - DNA, 15 bp, Homo sapiens
gagctacaccctcaa

SEQ ID NO: 1472599 - DNA, 15 bp, Homo sapiens
agagctacaccctca

SEQ ID NO: 1472600 - DNA, 15 bp, Homo sapiens
aagagctacaccctc

SEQ ID NO: 1472601 - DNA, 15 bp, Homo sapiens
caagagctacaccct

SEQ ID NO: 1472602 - DNA, 15 bp, Homo sapiens
acaagagctacaccc

SEQ ID NO: 1472603 - DNA, 15 bp, Homo sapiens
aacaagagctacacc

SEQ ID NO: 1472604 - DNA, 15 bp, Homo sapiens
caacaagagctacac

SEQ ID NO: 1472605 - DNA, 15 bp, Homo sapiens
ccaacaagagctaca

SEQ ID NO: 1472606 - DNA, 15 bp, Homo sapiens
tccaacaagagctac

SEQ ID NO: 1472607 - DNA, 15 bp, Homo sapiens
atccaacaagagcta

SEQ ID NO: 1472608 - DNA, 15 bp, Homo sapiens
catccaacaagagct

SEQ ID NO: 1472609 - DNA, 15 bp, Homo sapiens
tcatccaacaagagc

SEQ ID NO: 1472610 - DNA, 15 bp, Homo sapiens
ctcatccaacaagag

SEQ ID NO: 1472611 - DNA, 15 bp, Homo sapiens
actcatccaacaaga

SEQ ID NO: 1472612 - DNA, 15 bp, Homo sapiens
aactcatccaacaag

SEQ ID NO: 1472613 - DNA, 15 bp, Homo sapiens
caactcatccaacaa

SEQ ID NO: 1472614 - DNA, 15 bp, Homo sapiens
acaactcatccaaca

SEQ ID NO: 1472615 - DNA, 15 bp, Homo sapiens
tacaactcatccaac

SEQ ID NO: 1472616 - DNA, 15 bp, Homo sapiens
ctacaactcatccaa

SEQ ID NO: 1472617 - DNA, 15 bp, Homo sapiens
actacaactcatcca

SEQ ID NO: 1472618 - DNA, 15 bp, Homo sapiens
cactacaactcatcc

SEQ ID NO: 1472619 - DNA, 15 bp, Homo sapiens
ccactacaactcatc

SEQ ID NO: 1472620 - DNA, 15 bp, Homo sapiens
cccactacaactcat

SEQ ID NO: 1472621 - DNA, 15 bp, Homo sapiens
gcccactacaactca

SEQ ID NO: 1472622 - DNA, 15 bp, Homo sapiens
agcccactacaactc

SEQ ID NO: 1472623 - DNA, 15 bp, Homo sapiens
gagcccactacaact

SEQ ID NO: 1472624 - DNA, 15 bp, Homo sapiens
agagcccactacaac

SEQ ID NO: 1472625 - DNA, 15 bp, Homo sapiens
cagagcccactacaa

SEQ ID NO: 1472626 - DNA, 15 bp, Homo sapiens
ccagagcccactaca

SEQ ID NO: 1472627 - DNA, 15 bp, Homo sapiens
accagagcccactac

SEQ ID NO: 1472628 - DNA, 15 bp, Homo sapiens
gaccagagcccacta

SEQ ID NO: 1472629 - DNA, 15 bp, Homo sapiens
agaccagagcccact

SEQ ID NO: 1472630 - DNA, 15 bp, Homo sapiens
gagaccagagcccac

SEQ ID NO: 1472631 - DNA, 15 bp, Homo sapiens
ggagaccagagccca

SEQ ID NO: 1472632 - DNA, 15 bp, Homo sapiens
tggagaccagagccc

SEQ ID NO: 1472633 - DNA, 15 bp, Homo sapiens
atggagaccagagcc

SEQ ID NO: 1472634 - DNA, 15 bp, Homo sapiens
catggagaccagagc

SEQ ID NO: 1472635 - DNA, 15 bp, Homo sapiens
gcatggagaccagag

SEQ ID NO: 1472636 - DNA, 15 bp, Homo sapiens
agcatggagaccaga

SEQ ID NO: 1472637 - DNA, 15 bp, Homo sapiens
cagcatggagaccag

SEQ ID NO: 1472638 - DNA, 15 bp, Homo sapiens
gcagcatggagacca

SEQ ID NO: 1472639 - DNA, 15 bp, Homo sapiens
agcagcatggagacc

SEQ ID NO: 1472640 - DNA, 15 bp, Homo sapiens
cagcagcatggagac

SEQ ID NO: 1472641 - DNA, 15 bp, Homo sapiens
ccagcagcatggaga

SEQ ID NO: 1472642 - DNA, 15 bp, Homo sapiens
cccagcagcatggag

SEQ ID NO: 1472643 - DNA, 15 bp, Homo sapiens
ccccagcagcatgga

SEQ ID NO: 1472644 - DNA, 15 bp, Homo sapiens
accccagcagcatgg

SEQ ID NO: 1472645 - DNA, 15 bp, Homo sapiens
gaccccagcagcatg

SEQ ID NO: 1472646 - DNA, 15 bp, Homo sapiens
tgaccccagcagcat

SEQ ID NO: 1472647 - DNA, 15 bp, Homo sapiens
gtgaccccagcagca

SEQ ID NO: 1472648 - DNA, 15 bp, Homo sapiens
agtgaccccagcagc

SEQ ID NO: 1472649 - DNA, 15 bp, Homo sapiens
aagtgaccccagcag

SEQ ID NO: 1472650 - DNA, 15 bp, Homo sapiens
gaagtgaccccagca

SEQ ID NO: 1472651 - DNA, 15 bp, Homo sapiens
ggaagtgaccccagc

SEQ ID NO: 1472652 - DNA, 15 bp, Homo sapiens
cggaagtgaccccag

SEQ ID NO: 1472653 - DNA, 15 bp, Homo sapiens
gcggaagtgacccca

SEQ ID NO: 1472654 - DNA, 15 bp, Homo sapiens
agcggaagtgacccc

SEQ ID NO: 1472655 - DNA, 15 bp, Homo sapiens
cagcggaagtgaccc

SEQ ID NO: 1472656 - DNA, 15 bp, Homo sapiens
acagcggaagtgacc

SEQ ID NO: 1472657 - DNA, 15 bp, Homo sapiens
aacagcggaagtgac

SEQ ID NO: 1472658 - DNA, 15 bp, Homo sapiens
caacagcggaagtga

SEQ ID NO: 1472659 - DNA, 15 bp, Homo sapiens
ccaacagcggaagtg

SEQ ID NO: 1472660 - DNA, 15 bp, Homo sapiens
cccaacagcggaagt

SEQ ID NO: 1472661 - DNA, 15 bp, Homo sapiens
gcccaacagcggaag

SEQ ID NO: 1472662 - DNA, 15 bp, Homo sapiens
agcccaacagcggaa

SEQ ID NO: 1472663 - DNA, 15 bp, Homo sapiens
gagcccaacagcgga

SEQ ID NO: 1472664 - DNA, 15 bp, Homo sapiens
agagcccaacagcgg

SEQ ID NO: 1472665 - DNA, 15 bp, Homo sapiens
cagagcccaacagcg

SEQ ID NO: 1472666 - DNA, 15 bp, Homo sapiens
acagagcccaacagc

SEQ ID NO: 1472667 - DNA, 15 bp, Homo sapiens
cacagagcccaacag

SEQ ID NO: 1472668 - DNA, 15 bp, Homo sapiens
tcacagagcccaaca

SEQ ID NO: 1472669 - DNA, 15 bp, Homo sapiens
ctcacagagcccaac

SEQ ID NO: 1472670 - DNA, 15 bp, Homo sapiens
gctcacagagcccaa

SEQ ID NO: 1472671 - DNA, 15 bp, Homo sapiens
ggctcacagagccca

SEQ ID NO: 1472672 - DNA, 15 bp, Homo sapiens
gggctcacagagccc

SEQ ID NO: 1472673 - DNA, 15 bp, Homo sapiens
cgggctcacagagcc

SEQ ID NO: 1472674 - DNA, 15 bp, Homo sapiens
tcgggctcacagagc

SEQ ID NO: 1472675 - DNA, 15 bp, Homo sapiens
ttcgggctcacagag

SEQ ID NO: 1472676 - DNA, 15 bp, Homo sapiens
cttcgggctcacaga

SEQ ID NO: 1472677 - DNA, 15 bp, Homo sapiens
gcttcgggctcacag

SEQ ID NO: 1472678 - DNA, 15 bp, Homo sapiens
tgcttcgggctcaca

SEQ ID NO: 1472679 - DNA, 15 bp, Homo sapiens
ctgcttcgggctcac

SEQ ID NO: 1472680 - DNA, 15 bp, Homo sapiens
gctgcttcgggctca

SEQ ID NO: 1472681 - DNA, 15 bp, Homo sapiens
ggctgcttcgggctc

SEQ ID NO: 1472682 - DNA, 15 bp, Homo sapiens
gggctgcttcgggct

SEQ ID NO: 1472683 - DNA, 15 bp, Homo sapiens
tgggctgcttcgggc

SEQ ID NO: 1472684 - DNA, 15 bp, Homo sapiens
ctgggctgcttcggg

SEQ ID NO: 1472685 - DNA, 15 bp, Homo sapiens
cctgggctgcttcgg

SEQ ID NO: 1472686 - DNA, 15 bp, Homo sapiens
tcctgggctgcttcg

SEQ ID NO: 1472687 - DNA, 15 bp, Homo sapiens
ctcctgggctgcttc

SEQ ID NO: 1472688 - DNA, 15 bp, Homo sapiens
gctcctgggctgctt

SEQ ID NO: 1472689 - DNA, 15 bp, Homo sapiens
agctcctgggctgct

SEQ ID NO: 1472690 - DNA, 15 bp, Homo sapiens
gagctcctgggctgc

SEQ ID NO: 1472691 - DNA, 15 bp, Homo sapiens
ggagctcctgggctg

SEQ ID NO: 1472692 - DNA, 15 bp, Homo sapiens
gggagctcctgggct

SEQ ID NO: 1472693 - DNA, 15 bp, Homo sapiens
ggggagctcctgggc

SEQ ID NO: 1472694 - DNA, 15 bp, Homo sapiens
gggggagctcctggg

SEQ ID NO: 1472695 - DNA, 15 bp, Homo sapiens
agggggagctcctgg

SEQ ID NO: 1472696 - DNA, 15 bp, Homo sapiens
aagggggagctcctg

SEQ ID NO: 1472697 - DNA, 15 bp, Homo sapiens
caagggggagctcct

SEQ ID NO: 1472698 - DNA, 15 bp, Homo sapiens
ccaagggggagctcc

SEQ ID NO: 1472699 - DNA, 15 bp, Homo sapiens
gccaagggggagctc

SEQ ID NO: 1472700 - DNA, 15 bp, Homo sapiens
agccaagggggagct

SEQ ID NO: 1472701 - DNA, 15 bp, Homo sapiens
cagccaagggggagc

SEQ ID NO: 1472702 - DNA, 15 bp, Homo sapiens
gcagccaagggggag

SEQ ID NO: 1472703 - DNA, 15 bp, Homo sapiens
tgcagccaaggggga

SEQ ID NO: 1472704 - DNA, 15 bp, Homo sapiens
ctgcagccaaggggg

SEQ ID NO: 1472705 - DNA, 15 bp, Homo sapiens
cctgcagccaagggg

SEQ ID NO: 1472706 - DNA, 15 bp, Homo sapiens
gcctgcagccaaggg

SEQ ID NO: 1472707 - DNA, 15 bp, Homo sapiens
tgcctgcagccaagg

SEQ ID NO: 1472708 - DNA, 15 bp, Homo sapiens
gtgcctgcagccaag

SEQ ID NO: 1472709 - DNA, 15 bp, Homo sapiens
tgtgcctgcagccaa

SEQ ID NO: 1472710 - DNA, 15 bp, Homo sapiens
ttgtgcctgcagcca

SEQ ID NO: 1472711 - DNA, 15 bp, Homo sapiens
cttgtgcctgcagcc

SEQ ID NO: 1472712 - DNA, 15 bp, Homo sapiens
tcttgtgcctgcagc

SEQ ID NO: 1472713 - DNA, 15 bp, Homo sapiens
gtcttgtgcctgcag

SEQ ID NO: 1472714 - DNA, 15 bp, Homo sapiens
tgtcttgtgcctgca

SEQ ID NO: 1472715 - DNA, 15 bp, Homo sapiens
ttgtcttgtgcctgc

SEQ ID NO: 1472716 - DNA, 15 bp, Homo sapiens
tttgtcttgtgcctg

SEQ ID NO: 1472717 - DNA, 15 bp, Homo sapiens
ctttgtcttgtgcct

SEQ ID NO: 1472718 - DNA, 15 bp, Homo sapiens
actttgtcttgtgcc

SEQ ID NO: 1472719 - DNA, 15 bp, Homo sapiens
gactttgtcttgtgc

SEQ ID NO: 1472720 - DNA, 15 bp, Homo sapiens
tgactttgtcttgtg

SEQ ID NO: 1472721 - DNA, 15 bp, Homo sapiens
gtgactttgtcttgt

SEQ ID NO: 1472722 - DNA, 15 bp, Homo sapiens
tgtgactttgtcttg

SEQ ID NO: 1472723 - DNA, 15 bp, Homo sapiens
ttgtgactttgtctt

SEQ ID NO: 1472724 - DNA, 15 bp, Homo sapiens
cttgtgactttgtct

SEQ ID NO: 1472725 - DNA, 15 bp, Homo sapiens
ccttgtgactttgtc

SEQ ID NO: 1472726 - DNA, 15 bp, Homo sapiens
gccttgtgactttgt

SEQ ID NO: 1472727 - DNA, 15 bp, Homo sapiens
agccttgtgactttg

SEQ ID NO: 1472728 - DNA, 15 bp, Homo sapiens
cagccttgtgacttt

SEQ ID NO: 1472729 - DNA, 15 bp, Homo sapiens
gcagccttgtgactt

SEQ ID NO: 1472730 - DNA, 15 bp, Homo sapiens
ggcagccttgtgact

SEQ ID NO: 1472731 - DNA, 15 bp, Homo sapiens
aggcagccttgtgac

SEQ ID NO: 1472732 - DNA, 15 bp, Homo sapiens
caggcagccttgtga

SEQ ID NO: 1472733 - DNA, 15 bp, Homo sapiens
ccaggcagccttgtg

SEQ ID NO: 1472734 - DNA, 15 bp, Homo sapiens
accaggcagccttgt

SEQ ID NO: 1472735 - DNA, 15 bp, Homo sapiens
gaccaggcagccttg

SEQ ID NO: 1472736 - DNA, 15 bp, Homo sapiens
ggaccaggcagcctt

SEQ ID NO: 1472737 - DNA, 15 bp, Homo sapiens
gggaccaggcagcct

SEQ ID NO: 1472738 - DNA, 15 bp, Homo sapiens
agggaccaggcagcc

SEQ ID NO: 1472739 - DNA, 15 bp, Homo sapiens
cagggaccaggcagc

SEQ ID NO: 1472740 - DNA, 15 bp, Homo sapiens
tcagggaccaggcag

SEQ ID NO: 1472741 - DNA, 15 bp, Homo sapiens
atcagggaccaggca

SEQ ID NO: 1472742 - DNA, 15 bp, Homo sapiens
tatcagggaccaggc

SEQ ID NO: 1472743 - DNA, 15 bp, Homo sapiens
gtatcagggaccagg

SEQ ID NO: 1472744 - DNA, 15 bp, Homo sapiens
tgtatcagggaccag

SEQ ID NO: 1472745 - DNA, 15 bp, Homo sapiens
atgtatcagggacca

SEQ ID NO: 1472746 - DNA, 15 bp, Homo sapiens
gatgtatcagggacc

SEQ ID NO: 1472747 - DNA, 15 bp, Homo sapiens
ggatgtatcagggac

SEQ ID NO: 1472748 - DNA, 15 bp, Homo sapiens
gggatgtatcaggga

SEQ ID NO: 1472749 - DNA, 15 bp, Homo sapiens
ggggatgtatcaggg

SEQ ID NO: 1472750 - DNA, 15 bp, Homo sapiens
aggggatgtatcagg

SEQ ID NO: 1472751 - DNA, 15 bp, Homo sapiens
aaggggatgtatcag

SEQ ID NO: 1472752 - DNA, 15 bp, Homo sapiens
taaggggatgtatca

SEQ ID NO: 1472753 - DNA, 15 bp, Homo sapiens
gtaaggggatgtatc

SEQ ID NO: 1472754 - DNA, 15 bp, Homo sapiens
agtaaggggatgtat

SEQ ID NO: 1472755 - DNA, 15 bp, Homo sapiens
gagtaaggggatgta

SEQ ID NO: 1472756 - DNA, 15 bp, Homo sapiens
tgagtaaggggatgt

SEQ ID NO: 1472757 - DNA, 15 bp, Homo sapiens
ttgagtaaggggatg

SEQ ID NO: 1472758 - DNA, 15 bp, Homo sapiens
tttgagtaaggggat

SEQ ID NO: 1472759 - DNA, 15 bp, Homo sapiens
ttttgagtaagggga

SEQ ID NO: 1472760 - DNA, 15 bp, Homo sapiens
tttttgagtaagggg

SEQ ID NO: 1472761 - DNA, 15 bp, Homo sapiens
atttttgagtaaggg

SEQ ID NO: 1472762 - DNA, 15 bp, Homo sapiens
aatttttgagtaagg

SEQ ID NO: 1472763 - DNA, 15 bp, Homo sapiens
taatttttgagtaag

SEQ ID NO: 1472764 - DNA, 15 bp, Homo sapiens
ataatttttgagtaa

SEQ ID NO: 1472765 - DNA, 15 bp, Homo sapiens
gataatttttgagta

SEQ ID NO: 1472766 - DNA, 15 bp, Homo sapiens
ggataatttttgagt

SEQ ID NO: 1472767 - DNA, 15 bp, Homo sapiens
aggataatttttgag

SEQ ID NO: 1472768 - DNA, 15 bp, Homo sapiens
gaggataatttttga

SEQ ID NO: 1472769 - DNA, 15 bp, Homo sapiens
cgaggataatttttg

SEQ ID NO: 1472770 - DNA, 15 bp, Homo sapiens
acgaggataattttt

SEQ ID NO: 1472771 - DNA, 15 bp, Homo sapiens
cacgaggataatttt

SEQ ID NO: 1472772 - DNA, 15 bp, Homo sapiens
ccacgaggataattt

SEQ ID NO: 1472773 - DNA, 15 bp, Homo sapiens
gccacgaggataatt

SEQ ID NO: 1472774 - DNA, 15 bp, Homo sapiens
cgccacgaggataat

SEQ ID NO: 1472775 - DNA, 15 bp, Homo sapiens
ccgccacgaggataa

SEQ ID NO: 1472776 - DNA, 15 bp, Homo sapiens
cccgccacgaggata

SEQ ID NO: 1472777 - DNA, 15 bp, Homo sapiens
ccccgccacgaggat

SEQ ID NO: 1472778 - DNA, 15 bp, Homo sapiens
accccgccacgagga

SEQ ID NO: 1472779 - DNA, 15 bp, Homo sapiens
caccccgccacgagg

SEQ ID NO: 1472780 - DNA, 15 bp, Homo sapiens
gcaccccgccacgag

SEQ ID NO: 1472781 - DNA, 15 bp, Homo sapiens
tgcaccccgccacga

SEQ ID NO: 1472782 - DNA, 15 bp, Homo sapiens
ctgcaccccgccacg

SEQ ID NO: 1472783 - DNA, 15 bp, Homo sapiens
actgcaccccgccac

SEQ ID NO: 1472784 - DNA, 15 bp, Homo sapiens
cactgcaccccgcca

SEQ ID NO: 1472785 - DNA, 15 bp, Homo sapiens
ccactgcaccccgcc

SEQ ID NO: 1472786 - DNA, 15 bp, Homo sapiens
gccactgcaccccgc

SEQ ID NO: 1472787 - DNA, 15 bp, Homo sapiens
agccactgcaccccg

SEQ ID NO: 1472788 - DNA, 15 bp, Homo sapiens
gagccactgcacccc

SEQ ID NO: 1472789 - DNA, 15 bp, Homo sapiens
cgtgagccactgcac

SEQ ID NO: 1472790 - DNA, 15 bp, Homo sapiens
gcgtgagccactgca

SEQ ID NO: 1472791 - DNA, 15 bp, Homo sapiens
ggcgtgagccactgc

SEQ ID NO: 1472792 - DNA, 15 bp, Homo sapiens
aggcgtgagccactg

SEQ ID NO: 1472793 - DNA, 15 bp, Homo sapiens
gacaggcgtgagcca

SEQ ID NO: 1472794 - DNA, 15 bp, Homo sapiens
tgacaggcgtgagcc

SEQ ID NO: 1472795 - DNA, 15 bp, Homo sapiens
atgacaggcgtgagc

SEQ ID NO: 1472796 - DNA, 15 bp, Homo sapiens
gatgacaggcgtgag

SEQ ID NO: 1472797 - DNA, 15 bp, Homo sapiens
ggatgacaggcgtga

SEQ ID NO: 1472798 - DNA, 15 bp, Homo sapiens
gggatgacaggcgtg

SEQ ID NO: 1472799 - DNA, 15 bp, Homo sapiens
tgggatgacaggcgt

SEQ ID NO: 1472800 - DNA, 15 bp, Homo sapiens
ctgggatgacaggcg

SEQ ID NO: 1472801 - DNA, 15 bp, Homo sapiens
tgctgggatgacagg

SEQ ID NO: 1472802 - DNA, 15 bp, Homo sapiens
gtgctgggatgacag

SEQ ID NO: 1472803 - DNA, 15 bp, Homo sapiens
agtgctgggatgaca

SEQ ID NO: 1472804 - DNA, 15 bp, Homo sapiens
aagtgctgggatgac

SEQ ID NO: 1472805 - DNA, 15 bp, Homo sapiens
aaagtgctgggatga

SEQ ID NO: 1472806 - DNA, 15 bp, Homo sapiens
taaagtgctgggatg

SEQ ID NO: 1472807 - DNA, 15 bp, Homo sapiens
tggcctcctaaagtg

SEQ ID NO: 1472808 - DNA, 15 bp, Homo sapiens
ttggcctcctaaagt

SEQ ID NO: 1472809 - DNA, 15 bp, Homo sapiens
cttggcctcctaaag

SEQ ID NO: 1472810 - DNA, 15 bp, Homo sapiens
ccttggcctcctaaa

SEQ ID NO: 1472811 - DNA, 15 bp, Homo sapiens
gccttggcctcctaa

SEQ ID NO: 1472812 - DNA, 15 bp, Homo sapiens
tgccttggcctccta

SEQ ID NO: 1472813 - DNA, 15 bp, Homo sapiens
ctgccttggcctcct

SEQ ID NO: 1472814 - DNA, 15 bp, Homo sapiens
acctgccttggcctc

SEQ ID NO: 1472815 - DNA, 15 bp, Homo sapiens
cacctgccttggcct

SEQ ID NO: 1472816 - DNA, 15 bp, Homo sapiens
ccacctgccttggcc

SEQ ID NO: 1472817 - DNA, 15 bp, Homo sapiens
tccacctgccttggc

SEQ ID NO: 1472818 - DNA, 15 bp, Homo sapiens
atccacctgccttgg

SEQ ID NO: 1472819 - DNA, 15 bp, Homo sapiens
gatccacctgccttg

SEQ ID NO: 1472820 - DNA, 15 bp, Homo sapiens
tgatccacctgcctt

SEQ ID NO: 1472821 - DNA, 15 bp, Homo sapiens
ttgatccacctgcct

SEQ ID NO: 1472822 - DNA, 15 bp, Homo sapiens
attgatccacctgcc

SEQ ID NO: 1472823 - DNA, 15 bp, Homo sapiens
aattgatccacctgc

SEQ ID NO: 1472824 - DNA, 15 bp, Homo sapiens
caattgatccacctg

SEQ ID NO: 1472825 - DNA, 15 bp, Homo sapiens
tcaattgatccacct

SEQ ID NO: 1472826 - DNA, 15 bp, Homo sapiens
ctcaattgatccacc

SEQ ID NO: 1472827 - DNA, 15 bp, Homo sapiens
cctcaattgatccac

SEQ ID NO: 1472828 - DNA, 15 bp, Homo sapiens
acctcaattgatcca

SEQ ID NO: 1472829 - DNA, 15 bp, Homo sapiens
gacctcaattgatcc

SEQ ID NO: 1472830 - DNA, 15 bp, Homo sapiens
tgacctcaattgatc

SEQ ID NO: 1472831 - DNA, 15 bp, Homo sapiens
ctgacctcaattgat

SEQ ID NO: 1472832 - DNA, 15 bp, Homo sapiens
cctgacctcaattga

SEQ ID NO: 1472833 - DNA, 15 bp, Homo sapiens
tcctgacctcaattg

SEQ ID NO: 1472834 - DNA, 15 bp, Homo sapiens
ctcctgacctcaatt

SEQ ID NO: 1472835 - DNA, 15 bp, Homo sapiens
actcctgacctcaat

SEQ ID NO: 1472836 - DNA, 15 bp, Homo sapiens
ttttttttaagtaga

SEQ ID NO: 1472837 - DNA, 15 bp, Homo sapiens
tttttttttaagtag

SEQ ID NO: 1472838 - DNA, 15 bp, Homo sapiens
gctattttttttttt

SEQ ID NO: 1472839 - DNA, 15 bp, Homo sapiens
ggctatttttttttt

SEQ ID NO: 1472840 - DNA, 15 bp, Homo sapiens
tggctattttttttt

SEQ ID NO: 1472841 - DNA, 15 bp, Homo sapiens
ctggctatttttttt

SEQ ID NO: 1472842 - DNA, 15 bp, Homo sapiens
tctggctattttttt

SEQ ID NO: 1472843 - DNA, 15 bp, Homo sapiens
atctggctatttttt

SEQ ID NO: 1472844 - DNA, 15 bp, Homo sapiens
catctggctattttt

SEQ ID NO: 1472845 - DNA, 15 bp, Homo sapiens
acatctggctatttt

SEQ ID NO: 1472846 - DNA, 15 bp, Homo sapiens
cacatctggctattt

SEQ ID NO: 1472847 - DNA, 15 bp, Homo sapiens
ccacatctggctatt

SEQ ID NO: 1472848 - DNA, 15 bp, Homo sapiens
accacatctggctat

SEQ ID NO: 1472849 - DNA, 15 bp, Homo sapiens
caccacatctggcta

SEQ ID NO: 1472850 - DNA, 15 bp, Homo sapiens
ccaccacatctggct

SEQ ID NO: 1472851 - DNA, 15 bp, Homo sapiens
accaccacatctggc

SEQ ID NO: 1472852 - DNA, 15 bp, Homo sapiens
caccaccacatctgg

SEQ ID NO: 1472853 - DNA, 15 bp, Homo sapiens
ccaccaccacatctg

SEQ ID NO: 1472854 - DNA, 15 bp, Homo sapiens
cccaccaccacatct

SEQ ID NO: 1472855 - DNA, 15 bp, Homo sapiens
acccaccaccacatc

SEQ ID NO: 1472856 - DNA, 15 bp, Homo sapiens
cacccaccaccacat

SEQ ID NO: 1472857 - DNA, 15 bp, Homo sapiens
cctgcctcagtctcc

SEQ ID NO: 1472858 - DNA, 15 bp, Homo sapiens
tcctgcctcagtctc

SEQ ID NO: 1472859 - DNA, 15 bp, Homo sapiens
tctcctgcctcagtc

SEQ ID NO: 1472860 - DNA, 15 bp, Homo sapiens
ttctcctgcctcagt

SEQ ID NO: 1472861 - DNA, 15 bp, Homo sapiens
gcccgggttcaagcg

SEQ ID NO: 1472862 - DNA, 15 bp, Homo sapiens
tgcccgggttcaagc

SEQ ID NO: 1472863 - DNA, 15 bp, Homo sapiens
ctgcccgggttcaag

SEQ ID NO: 1472864 - DNA, 15 bp, Homo sapiens
cctgcccgggttcaa

SEQ ID NO: 1472865 - DNA, 15 bp, Homo sapiens
tcctgcccgggttca

SEQ ID NO: 1472866 - DNA, 15 bp, Homo sapiens
ctcctgcccgggttc

SEQ ID NO: 1472867 - DNA, 15 bp, Homo sapiens
tctcctgcccgggtt

SEQ ID NO: 1472868 - DNA, 15 bp, Homo sapiens
ctctcctgcccgggt

SEQ ID NO: 1472869 - DNA, 15 bp, Homo sapiens
cctctcctgcccggg

SEQ ID NO: 1472870 - DNA, 15 bp, Homo sapiens
acctctcctgcccgg

SEQ ID NO: 1472871 - DNA, 15 bp, Homo sapiens
aacctctcctgcccg

SEQ ID NO: 1472872 - DNA, 15 bp, Homo sapiens
caacctctcctgccc

SEQ ID NO: 1472873 - DNA, 15 bp, Homo sapiens
gcaacctctcctgcc

SEQ ID NO: 1472874 - DNA, 15 bp, Homo sapiens
tgcaacctctcctgc

SEQ ID NO: 1472875 - DNA, 15 bp, Homo sapiens
ctgcaacctctcctg

SEQ ID NO: 1472876 - DNA, 15 bp, Homo sapiens
actgcaacctctcct

SEQ ID NO: 1472877 - DNA, 15 bp, Homo sapiens
cactgcaacctctcc

SEQ ID NO: 1472878 - DNA, 15 bp, Homo sapiens
tcactgcaacctctc

SEQ ID NO: 1472879 - DNA, 15 bp, Homo sapiens
tagtgcagtggcatg

SEQ ID NO: 1472880 - DNA, 15 bp, Homo sapiens
gtagtgcagtggcat

SEQ ID NO: 1472881 - DNA, 15 bp, Homo sapiens
tgtagtgcagtggca

SEQ ID NO: 1472882 - DNA, 15 bp, Homo sapiens
ctgtagtgcagtggc

SEQ ID NO: 1472883 - DNA, 15 bp, Homo sapiens
gctgtagtgcagtgg

SEQ ID NO: 1472884 - DNA, 15 bp, Homo sapiens
ggctgtagtgcagtg

SEQ ID NO: 1472885 - DNA, 15 bp, Homo sapiens
aggctgtagtgcagt

SEQ ID NO: 1472886 - DNA, 15 bp, Homo sapiens
caggctgtagtgcag

SEQ ID NO: 1472887 - DNA, 15 bp, Homo sapiens
ccaggctgtagtgca

SEQ ID NO: 1472888 - DNA, 15 bp, Homo sapiens
cccaggctgtagtgc

SEQ ID NO: 1472889 - DNA, 15 bp, Homo sapiens
gcccaggctgtagtg

SEQ ID NO: 1472890 - DNA, 15 bp, Homo sapiens
tgcccaggctgtagt

SEQ ID NO: 1472891 - DNA, 15 bp, Homo sapiens
ttgcccaggctgtag

SEQ ID NO: 1472892 - DNA, 15 bp, Homo sapiens
gttgcccaggctgta

SEQ ID NO: 1472893 - DNA, 15 bp, Homo sapiens
tgttgcccaggctgt

SEQ ID NO: 1472894 - DNA, 15 bp, Homo sapiens
tggagtcttgctctg

SEQ ID NO: 1472895 - DNA, 15 bp, Homo sapiens
cttttttgagatgga

SEQ ID NO: 1472896 - DNA, 15 bp, Homo sapiens
tcttttttgagatgg

SEQ ID NO: 1472897 - DNA, 15 bp, Homo sapiens
ttcttttttgagatg

SEQ ID NO: 1472898 - DNA, 15 bp, Homo sapiens
tttcttttttgagat

SEQ ID NO: 1472899 - DNA, 15 bp, Homo sapiens
ttttttcttttttga

SEQ ID NO: 1472900 - DNA, 15 bp, Homo sapiens
attttttttcttttt

SEQ ID NO: 1472901 - DNA, 15 bp, Homo sapiens
gattttttttctttt

SEQ ID NO: 1472902 - DNA, 15 bp, Homo sapiens
ctggattttttttct

SEQ ID NO: 1472903 - DNA, 15 bp, Homo sapiens
gctggattttttttc

SEQ ID NO: 1472904 - DNA, 15 bp, Homo sapiens
ggctggatttttttt

SEQ ID NO: 1472905 - DNA, 15 bp, Homo sapiens
aggctggattttttt

SEQ ID NO: 1472906 - DNA, 15 bp, Homo sapiens
caggctggatttttt

SEQ ID NO: 1472907 - DNA, 15 bp, Homo sapiens
tcaggctggattttt

SEQ ID NO: 1472908 - DNA, 15 bp, Homo sapiens
gtcaggctggatttt

SEQ ID NO: 1472909 - DNA, 15 bp, Homo sapiens
ggtcaggctggattt

SEQ ID NO: 1472910 - DNA, 15 bp, Homo sapiens
tggtcaggctggatt

SEQ ID NO: 1472911 - DNA, 15 bp, Homo sapiens
ttggtcaggctggat

SEQ ID NO: 1472912 - DNA, 15 bp, Homo sapiens
attggtcaggctgga

SEQ ID NO: 1472913 - DNA, 15 bp, Homo sapiens
tattggtcaggctgg

SEQ ID NO: 1472914 - DNA, 15 bp, Homo sapiens
atattggtcaggctg

SEQ ID NO: 1472915 - DNA, 15 bp, Homo sapiens
catattggtcaggct

SEQ ID NO: 1472916 - DNA, 15 bp, Homo sapiens
ccatattggtcaggc

SEQ ID NO: 1472917 - DNA, 15 bp, Homo sapiens
accatattggtcagg

SEQ ID NO: 1472918 - DNA, 15 bp, Homo sapiens
caccatattggtcag

SEQ ID NO: 1472919 - DNA, 15 bp, Homo sapiens
tcaccatattggtca

SEQ ID NO: 1472920 - DNA, 15 bp, Homo sapiens
ttcaccatattggtc

SEQ ID NO: 1472921 - DNA, 15 bp, Homo sapiens
tttcaccatattggt

SEQ ID NO: 1472922 - DNA, 15 bp, Homo sapiens
gtttcaccatattgg

SEQ ID NO: 1472923 - DNA, 15 bp, Homo sapiens
tggggtttcaccata

SEQ ID NO: 1472924 - DNA, 15 bp, Homo sapiens
cctaattttttgtat

SEQ ID NO: 1472925 - DNA, 15 bp, Homo sapiens
gcctaattttttgta

SEQ ID NO: 1472926 - DNA, 15 bp, Homo sapiens
ggcctaattttttgt

SEQ ID NO: 1472927 - DNA, 15 bp, Homo sapiens
tggcctaattttttg

SEQ ID NO: 1472928 - DNA, 15 bp, Homo sapiens
ctggcctaatttttt

SEQ ID NO: 1472929 - DNA, 15 bp, Homo sapiens
actggcctaattttt

SEQ ID NO: 1472930 - DNA, 15 bp, Homo sapiens
gactggcctaatttt

SEQ ID NO: 1472931 - DNA, 15 bp, Homo sapiens
cgactggcctaattt

SEQ ID NO: 1472932 - DNA, 15 bp, Homo sapiens
tcgactggcctaatt

SEQ ID NO: 1472933 - DNA, 15 bp, Homo sapiens
ctcgactggcctaat

SEQ ID NO: 1472934 - DNA, 15 bp, Homo sapiens
cctcgactggcctaa

SEQ ID NO: 1472935 - DNA, 15 bp, Homo sapiens
acctcgactggccta

SEQ ID NO: 1472936 - DNA, 15 bp, Homo sapiens
cacctcgactggcct

SEQ ID NO: 1472937 - DNA, 15 bp, Homo sapiens
ccacctcgactggcc

SEQ ID NO: 1472938 - DNA, 15 bp, Homo sapiens
gccacctcgactggc

SEQ ID NO: 1472939 - DNA, 15 bp, Homo sapiens
agccacctcgactgg

SEQ ID NO: 1472940 - DNA, 15 bp, Homo sapiens
gagccacctcgactg

SEQ ID NO: 1472941 - DNA, 15 bp, Homo sapiens
tgagccacctcgact

SEQ ID NO: 1472942 - DNA, 15 bp, Homo sapiens
gtgagccacctcgac

SEQ ID NO: 1472943 - DNA, 15 bp, Homo sapiens
tgtgagccacctcga

SEQ ID NO: 1472944 - DNA, 15 bp, Homo sapiens
gtgtgagccacctcg

SEQ ID NO: 1472945 - DNA, 15 bp, Homo sapiens
tgtgtgagccacctc

SEQ ID NO: 1472946 - DNA, 15 bp, Homo sapiens
atgtgtgagccacct

SEQ ID NO: 1472947 - DNA, 15 bp, Homo sapiens
catgtgtgagccacc

SEQ ID NO: 1472948 - DNA, 15 bp, Homo sapiens
acatgtgtgagccac

SEQ ID NO: 1472949 - DNA, 15 bp, Homo sapiens
tacatgtgtgagcca

SEQ ID NO: 1472950 - DNA, 15 bp, Homo sapiens
ttacatgtgtgagcc

SEQ ID NO: 1472951 - DNA, 15 bp, Homo sapiens
attacatgtgtgagc

SEQ ID NO: 1472952 - DNA, 15 bp, Homo sapiens
gattacatgtgtgag

SEQ ID NO: 1472953 - DNA, 15 bp, Homo sapiens
agattacatgtgtga

SEQ ID NO: 1472954 - DNA, 15 bp, Homo sapiens
gagattacatgtgtg

SEQ ID NO: 1472955 - DNA, 15 bp, Homo sapiens
tgagattacatgtgt

SEQ ID NO: 1472956 - DNA, 15 bp, Homo sapiens
ctgagattacatgtg

SEQ ID NO: 1472957 - DNA, 15 bp, Homo sapiens
gctgagattacatgt

SEQ ID NO: 1472958 - DNA, 15 bp, Homo sapiens
tgctgagattacatg

SEQ ID NO: 1472959 - DNA, 15 bp, Homo sapiens
gtgctgagattacat

SEQ ID NO: 1472960 - DNA, 15 bp, Homo sapiens
tctgccttggcctcc

SEQ ID NO: 1472961 - DNA, 15 bp, Homo sapiens
atctgccttggcctc

SEQ ID NO: 1472962 - DNA, 15 bp, Homo sapiens
catctgccttggcct

SEQ ID NO: 1472963 - DNA, 15 bp, Homo sapiens
ccatctgccttggcc

SEQ ID NO: 1472964 - DNA, 15 bp, Homo sapiens
tccatctgccttggc

SEQ ID NO: 1472965 - DNA, 15 bp, Homo sapiens
atccatctgccttgg

SEQ ID NO: 1472966 - DNA, 15 bp, Homo sapiens
gatccatctgccttg

SEQ ID NO: 1472967 - DNA, 15 bp, Homo sapiens
tgatccatctgcctt

SEQ ID NO: 1472968 - DNA, 15 bp, Homo sapiens
gtgatccatctgcct

SEQ ID NO: 1472969 - DNA, 15 bp, Homo sapiens
agtgatccatctgcc

SEQ ID NO: 1472970 - DNA, 15 bp, Homo sapiens
aagtgatccatctgc

SEQ ID NO: 1472971 - DNA, 15 bp, Homo sapiens
caagtgatccatctg

SEQ ID NO: 1472972 - DNA, 15 bp, Homo sapiens
tcaagtgatccatct

SEQ ID NO: 1472973 - DNA, 15 bp, Homo sapiens
ctcaagtgatccatc

SEQ ID NO: 1472974 - DNA, 15 bp, Homo sapiens
cctcaagtgatccat

SEQ ID NO: 1472975 - DNA, 15 bp, Homo sapiens
agacctcaagtgatc

SEQ ID NO: 1472976 - DNA, 15 bp, Homo sapiens
cagacctcaagtgat

SEQ ID NO: 1472977 - DNA, 15 bp, Homo sapiens
ccagacctcaagtga

SEQ ID NO: 1472978 - DNA, 15 bp, Homo sapiens
tccagacctcaagtg

SEQ ID NO: 1472979 - DNA, 15 bp, Homo sapiens
ctccagacctcaagt

SEQ ID NO: 1472980 - DNA, 15 bp, Homo sapiens
actccagacctcaag

SEQ ID NO: 1472981 - DNA, 15 bp, Homo sapiens
aactccagacctcaa

SEQ ID NO: 1472982 - DNA, 15 bp, Homo sapiens
gaactccagacctca

SEQ ID NO: 1472983 - DNA, 15 bp, Homo sapiens
cgaactccagacctc

SEQ ID NO: 1472984 - DNA, 15 bp, Homo sapiens
tcgaactccagacct

SEQ ID NO: 1472985 - DNA, 15 bp, Homo sapiens
ctcgaactccagacc

SEQ ID NO: 1472986 - DNA, 15 bp, Homo sapiens
tctcgaactccagac

SEQ ID NO: 1472987 - DNA, 15 bp, Homo sapiens
gtctcgaactccaga

SEQ ID NO: 1472988 - DNA, 15 bp, Homo sapiens
ggtctcgaactccag

SEQ ID NO: 1472989 - DNA, 15 bp, Homo sapiens
tggtctcgaactcca

SEQ ID NO: 1472990 - DNA, 15 bp, Homo sapiens
actatgttggccagg

SEQ ID NO: 1472991 - DNA, 15 bp, Homo sapiens
tgtttcactatgttg

SEQ ID NO: 1472992 - DNA, 15 bp, Homo sapiens
gtgtttcactatgtt

SEQ ID NO: 1472993 - DNA, 15 bp, Homo sapiens
ggtgtttcactatgt

SEQ ID NO: 1472994 - DNA, 15 bp, Homo sapiens
tggtgtttcactatg

SEQ ID NO: 1472995 - DNA, 15 bp, Homo sapiens
atggtgtttcactat

SEQ ID NO: 1472996 - DNA, 15 bp, Homo sapiens
gatggtgtttcacta

SEQ ID NO: 1472997 - DNA, 15 bp, Homo sapiens
agatggtgtttcact

SEQ ID NO: 1472998 - DNA, 15 bp, Homo sapiens
gagatggtgtttcac

SEQ ID NO: 1472999 - DNA, 15 bp, Homo sapiens
agagatggtgtttca

SEQ ID NO: 1473000 - DNA, 15 bp, Homo sapiens
tagagatggtgtttc

SEQ ID NO: 1473001 - DNA, 15 bp, Homo sapiens
gtagagatggtgttt

SEQ ID NO: 1473002 - DNA, 15 bp, Homo sapiens
agtagagatggtgtt

SEQ ID NO: 1473003 - DNA, 15 bp, Homo sapiens
tagtagagatggtgt

SEQ ID NO: 1473004 - DNA, 15 bp, Homo sapiens
ttagtagagatggtg

SEQ ID NO: 1473005 - DNA, 15 bp, Homo sapiens
tttagtagagatggt

SEQ ID NO: 1473006 - DNA, 15 bp, Homo sapiens
gtgcctggctaattt

SEQ ID NO: 1473007 - DNA, 15 bp, Homo sapiens
cgtgcctggctaatt

SEQ ID NO: 1473008 - DNA, 15 bp, Homo sapiens
ccgtgcctggctaat

SEQ ID NO: 1473009 - DNA, 15 bp, Homo sapiens
cccgtgcctggctaa

SEQ ID NO: 1473010 - DNA, 15 bp, Homo sapiens
acccgtgcctggcta

SEQ ID NO: 1473011 - DNA, 15 bp, Homo sapiens
tacccgtgcctggct

SEQ ID NO: 1473012 - DNA, 15 bp, Homo sapiens
ctacccgtgcctggc

SEQ ID NO: 1473013 - DNA, 15 bp, Homo sapiens
gctacccgtgcctgg

SEQ ID NO: 1473014 - DNA, 15 bp, Homo sapiens
tgctacccgtgcctg

SEQ ID NO: 1473015 - DNA, 15 bp, Homo sapiens
ttgctacccgtgcct

SEQ ID NO: 1473016 - DNA, 15 bp, Homo sapiens
cttgctacccgtgcc

SEQ ID NO: 1473017 - DNA, 15 bp, Homo sapiens
gcttgctacccgtgc

SEQ ID NO: 1473018 - DNA, 15 bp, Homo sapiens
tgcttgctacccgtg

SEQ ID NO: 1473019 - DNA, 15 bp, Homo sapiens
gtgcttgctacccgt

SEQ ID NO: 1473020 - DNA, 15 bp, Homo sapiens
ggtgcttgctacccg

SEQ ID NO: 1473021 - DNA, 15 bp, Homo sapiens
aggtgcttgctaccc

SEQ ID NO: 1473022 - DNA, 15 bp, Homo sapiens
caggtgcttgctacc

SEQ ID NO: 1473023 - DNA, 15 bp, Homo sapiens
gcaggtgcttgctac

SEQ ID NO: 1473024 - DNA, 15 bp, Homo sapiens
tgcaggtgcttgcta

SEQ ID NO: 1473025 - DNA, 15 bp, Homo sapiens
ttgcaggtgcttgct

SEQ ID NO: 1473026 - DNA, 15 bp, Homo sapiens
attgcaggtgcttgc

SEQ ID NO: 1473027 - DNA, 15 bp, Homo sapiens
gattgcaggtgcttg

SEQ ID NO: 1473028 - DNA, 15 bp, Homo sapiens
ggattgcaggtgctt

SEQ ID NO: 1473029 - DNA, 15 bp, Homo sapiens
gggattgcaggtgct

SEQ ID NO: 1473030 - DNA, 15 bp, Homo sapiens
tgggattgcaggtgc

SEQ ID NO: 1473031 - DNA, 15 bp, Homo sapiens
ctgggattgcaggtg

SEQ ID NO: 1473032 - DNA, 15 bp, Homo sapiens
gctgggattgcaggt

SEQ ID NO: 1473033 - DNA, 15 bp, Homo sapiens
agctgggattgcagg

SEQ ID NO: 1473034 - DNA, 15 bp, Homo sapiens
tagctgggattgcag

SEQ ID NO: 1473035 - DNA, 15 bp, Homo sapiens
ttagctgggattgca

SEQ ID NO: 1473036 - DNA, 15 bp, Homo sapiens
attagctgggattgc

SEQ ID NO: 1473037 - DNA, 15 bp, Homo sapiens
aattagctgggattg

SEQ ID NO: 1473038 - DNA, 15 bp, Homo sapiens
caattagctgggatt

SEQ ID NO: 1473039 - DNA, 15 bp, Homo sapiens
ccaattagctgggat

SEQ ID NO: 1473040 - DNA, 15 bp, Homo sapiens
cccaattagctggga

SEQ ID NO: 1473041 - DNA, 15 bp, Homo sapiens
tcccaattagctggg

SEQ ID NO: 1473042 - DNA, 15 bp, Homo sapiens
ctcccaattagctgg

SEQ ID NO: 1473043 - DNA, 15 bp, Homo sapiens
cctcccaattagctg

SEQ ID NO: 1473044 - DNA, 15 bp, Homo sapiens
gcctcccaattagct

SEQ ID NO: 1473045 - DNA, 15 bp, Homo sapiens
ggcctcccaattagc

SEQ ID NO: 1473046 - DNA, 15 bp, Homo sapiens
cggcctcccaattag

SEQ ID NO: 1473047 - DNA, 15 bp, Homo sapiens
tcggcctcccaatta

SEQ ID NO: 1473048 - DNA, 15 bp, Homo sapiens
ctcggcctcccaatt

SEQ ID NO: 1473049 - DNA, 15 bp, Homo sapiens
cctcggcctcccaat

SEQ ID NO: 1473050 - DNA, 15 bp, Homo sapiens
gtgcctcggcctccc

SEQ ID NO: 1473051 - DNA, 15 bp, Homo sapiens
tgtgcctcggcctcc

SEQ ID NO: 1473052 - DNA, 15 bp, Homo sapiens
ctgtgcctcggcctc

SEQ ID NO: 1473053 - DNA, 15 bp, Homo sapiens
cctgtgcctcggcct

SEQ ID NO: 1473054 - DNA, 15 bp, Homo sapiens
tcctgtgcctcggcc

SEQ ID NO: 1473055 - DNA, 15 bp, Homo sapiens
ttcctgtgcctcggc

SEQ ID NO: 1473056 - DNA, 15 bp, Homo sapiens
attcctgtgcctcgg

SEQ ID NO: 1473057 - DNA, 15 bp, Homo sapiens
aattcctgtgcctcg

SEQ ID NO: 1473058 - DNA, 15 bp, Homo sapiens
caattcctgtgcctc

SEQ ID NO: 1473059 - DNA, 15 bp, Homo sapiens
gcaattcctgtgcct

SEQ ID NO: 1473060 - DNA, 15 bp, Homo sapiens
agcaattcctgtgcc

SEQ ID NO: 1473061 - DNA, 15 bp, Homo sapiens
aagcaattcctgtgc

SEQ ID NO: 1473062 - DNA, 15 bp, Homo sapiens
caagcaattcctgtg

SEQ ID NO: 1473063 - DNA, 15 bp, Homo sapiens
tcaagcaattcctgt

SEQ ID NO: 1473064 - DNA, 15 bp, Homo sapiens
ttcaagcaattcctg

SEQ ID NO: 1473065 - DNA, 15 bp, Homo sapiens
gttcaagcaattcct

SEQ ID NO: 1473066 - DNA, 15 bp, Homo sapiens
agttcaagcaattcc

SEQ ID NO: 1473067 - DNA, 15 bp, Homo sapiens
cagttcaagcaattc

SEQ ID NO: 1473068 - DNA, 15 bp, Homo sapiens
ccagttcaagcaatt

SEQ ID NO: 1473069 - DNA, 15 bp, Homo sapiens
cccagttcaagcaat

SEQ ID NO: 1473070 - DNA, 15 bp, Homo sapiens
ccccagttcaagcaa

SEQ ID NO: 1473071 - DNA, 15 bp, Homo sapiens
tccccagttcaagca

SEQ ID NO: 1473072 - DNA, 15 bp, Homo sapiens
ttccccagttcaagc

SEQ ID NO: 1473073 - DNA, 15 bp, Homo sapiens
gttccccagttcaag

SEQ ID NO: 1473074 - DNA, 15 bp, Homo sapiens
ggttccccagttcaa

SEQ ID NO: 1473075 - DNA, 15 bp, Homo sapiens
cggttccccagttca

SEQ ID NO: 1473076 - DNA, 15 bp, Homo sapiens
gcggttccccagttc

SEQ ID NO: 1473077 - DNA, 15 bp, Homo sapiens
tgcggttccccagtt

SEQ ID NO: 1473078 - DNA, 15 bp, Homo sapiens
ctgcggttccccagt

SEQ ID NO: 1473079 - DNA, 15 bp, Homo sapiens
cctgcggttccccag

SEQ ID NO: 1473080 - DNA, 15 bp, Homo sapiens
acctgcggttcccca

SEQ ID NO: 1473081 - DNA, 15 bp, Homo sapiens
aacctgcggttcccc

SEQ ID NO: 1473082 - DNA, 15 bp, Homo sapiens
caacctgcggttccc

SEQ ID NO: 1473083 - DNA, 15 bp, Homo sapiens
gcaacctgcggttcc

SEQ ID NO: 1473084 - DNA, 15 bp, Homo sapiens
tgcaacctgcggttc

SEQ ID NO: 1473085 - DNA, 15 bp, Homo sapiens
ctgcaacctgcggtt

SEQ ID NO: 1473086 - DNA, 15 bp, Homo sapiens
actgcaacctgcggt

SEQ ID NO: 1473087 - DNA, 15 bp, Homo sapiens
cactgcaacctgcgg

SEQ ID NO: 1473088 - DNA, 15 bp, Homo sapiens
tcactgcaacctgcg

SEQ ID NO: 1473089 - DNA, 15 bp, Homo sapiens
ctcactgcaacctgc

SEQ ID NO: 1473090 - DNA, 15 bp, Homo sapiens
gctcactgcaacctg

SEQ ID NO: 1473091 - DNA, 15 bp, Homo sapiens
tacaatcttggctca

SEQ ID NO: 1473092 - DNA, 15 bp, Homo sapiens
gtacaatcttggctc

SEQ ID NO: 1473093 - DNA, 15 bp, Homo sapiens
ggtacaatcttggct

SEQ ID NO: 1473094 - DNA, 15 bp, Homo sapiens
tggtacaatcttggc

SEQ ID NO: 1473095 - DNA, 15 bp, Homo sapiens
gtggtacaatcttgg

SEQ ID NO: 1473096 - DNA, 15 bp, Homo sapiens
agtggtacaatcttg

SEQ ID NO: 1473097 - DNA, 15 bp, Homo sapiens
cagtggtacaatctt

SEQ ID NO: 1473098 - DNA, 15 bp, Homo sapiens
gcagtggtacaatct

SEQ ID NO: 1473099 - DNA, 15 bp, Homo sapiens
tgcagtggtacaatc

SEQ ID NO: 1473100 - DNA, 15 bp, Homo sapiens
gtgcagtggtacaat

SEQ ID NO: 1473101 - DNA, 15 bp, Homo sapiens
agtgcagtggtacaa

SEQ ID NO: 1473102 - DNA, 15 bp, Homo sapiens
aagtgcagtggtaca

SEQ ID NO: 1473103 - DNA, 15 bp, Homo sapiens
gaagtgcagtggtac

SEQ ID NO: 1473104 - DNA, 15 bp, Homo sapiens
tgaagtgcagtggta

SEQ ID NO: 1473105 - DNA, 15 bp, Homo sapiens
ctgaagtgcagtggt

SEQ ID NO: 1473106 - DNA, 15 bp, Homo sapiens
ccccaggctgaagtg

SEQ ID NO: 1473107 - DNA, 15 bp, Homo sapiens
cccccaggctgaagt

SEQ ID NO: 1473108 - DNA, 15 bp, Homo sapiens
tcccccaggctgaag

SEQ ID NO: 1473109 - DNA, 15 bp, Homo sapiens
gtcccccaggctgaa

SEQ ID NO: 1473110 - DNA, 15 bp, Homo sapiens
cgtcccccaggctga

SEQ ID NO: 1473111 - DNA, 15 bp, Homo sapiens
ccgtcccccaggctg

SEQ ID NO: 1473112 - DNA, 15 bp, Homo sapiens
tccgtcccccaggct

SEQ ID NO: 1473113 - DNA, 15 bp, Homo sapiens
ctccgtcccccaggc

SEQ ID NO: 1473114 - DNA, 15 bp, Homo sapiens
gctccgtcccccagg

SEQ ID NO: 1473115 - DNA, 15 bp, Homo sapiens
cgctccgtcccccag

SEQ ID NO: 1473116 - DNA, 15 bp, Homo sapiens
ccgctccgtccccca

SEQ ID NO: 1473117 - DNA, 15 bp, Homo sapiens
cccgctccgtccccc

SEQ ID NO: 1473118 - DNA, 15 bp, Homo sapiens
tcccgctccgtcccc

SEQ ID NO: 1473119 - DNA, 15 bp, Homo sapiens
gtcccgctccgtccc

SEQ ID NO: 1473120 - DNA, 15 bp, Homo sapiens
agtcccgctccgtcc

SEQ ID NO: 1473121 - DNA, 15 bp, Homo sapiens
aagtcccgctccgtc

SEQ ID NO: 1473122 - DNA, 15 bp, Homo sapiens
aaagtcccgctccgt

SEQ ID NO: 1473123 - DNA, 15 bp, Homo sapiens
caaagtcccgctccg

SEQ ID NO: 1473124 - DNA, 15 bp, Homo sapiens
acaaagtcccgctcc

SEQ ID NO: 1473125 - DNA, 15 bp, Homo sapiens
gacaaagtcccgctc

SEQ ID NO: 1473126 - DNA, 15 bp, Homo sapiens
agacaaagtcccgct

SEQ ID NO: 1473127 - DNA, 15 bp, Homo sapiens
gagacaaagtcccgc

SEQ ID NO: 1473128 - DNA, 15 bp, Homo sapiens
tgagacaaagtcccg

SEQ ID NO: 1473129 - DNA, 15 bp, Homo sapiens
ttgagacaaagtccc

SEQ ID NO: 1473130 - DNA, 15 bp, Homo sapiens
tttgagacaaagtcc

SEQ ID NO: 1473131 - DNA, 15 bp, Homo sapiens
ttttgagacaaagtc

SEQ ID NO: 1473132 - DNA, 15 bp, Homo sapiens
tttttgagacaaagt

SEQ ID NO: 1473133 - DNA, 15 bp, Homo sapiens
ttttttgagacaaag

SEQ ID NO: 1473134 - DNA, 15 bp, Homo sapiens
tttttttgagacaaa

SEQ ID NO: 1473135 - DNA, 15 bp, Homo sapiens
ctttttttgagacaa

SEQ ID NO: 1473136 - DNA, 15 bp, Homo sapiens
attttttttttcttt

SEQ ID NO: 1473137 - DNA, 15 bp, Homo sapiens
aattttttttttctt

SEQ ID NO: 1473138 - DNA, 15 bp, Homo sapiens
taattttttttttct

SEQ ID NO: 1473139 - DNA, 15 bp, Homo sapiens
ggtaatttttttttt

SEQ ID NO: 1473140 - DNA, 15 bp, Homo sapiens
gggtaattttttttt

SEQ ID NO: 1473141 - DNA, 15 bp, Homo sapiens
agggtaatttttttt

SEQ ID NO: 1473142 - DNA, 15 bp, Homo sapiens
gagggtaattttttt

SEQ ID NO: 1473143 - DNA, 15 bp, Homo sapiens
cgagggtaatttttt

SEQ ID NO: 1473144 - DNA, 15 bp, Homo sapiens
gcgagggtaattttt

SEQ ID NO: 1473145 - DNA, 15 bp, Homo sapiens
ggcgagggtaatttt

SEQ ID NO: 1473146 - DNA, 15 bp, Homo sapiens
gggcgagggtaattt

SEQ ID NO: 1473147 - DNA, 15 bp, Homo sapiens
ggggcgagggtaatt

SEQ ID NO: 1473148 - DNA, 15 bp, Homo sapiens
aggggcgagggtaat

SEQ ID NO: 1473149 - DNA, 15 bp, Homo sapiens
caggggcgagggtaa

SEQ ID NO: 1473150 - DNA, 15 bp, Homo sapiens
tcaggggcgagggta

SEQ ID NO: 1473151 - DNA, 15 bp, Homo sapiens
ctcaggggcgagggt

SEQ ID NO: 1473152 - DNA, 15 bp, Homo sapiens
actcaggggcgaggg

SEQ ID NO: 1473153 - DNA, 15 bp, Homo sapiens
gactcaggggcgagg

SEQ ID NO: 1473154 - DNA, 15 bp, Homo sapiens
tgactcaggggcgag

SEQ ID NO: 1473155 - DNA, 15 bp, Homo sapiens
ctgactcaggggcga

SEQ ID NO: 1473156 - DNA, 15 bp, Homo sapiens
tctgactcaggggcg

SEQ ID NO: 1473157 - DNA, 15 bp, Homo sapiens
gtctgactcaggggc

SEQ ID NO: 1473158 - DNA, 15 bp, Homo sapiens
ggtctgactcagggg

SEQ ID NO: 1473159 - DNA, 15 bp, Homo sapiens
aggtctgactcaggg

SEQ ID NO: 1473160 - DNA, 15 bp, Homo sapiens
gaggtctgactcagg

SEQ ID NO: 1473161 - DNA, 15 bp, Homo sapiens
tgaggtctgactcag

SEQ ID NO: 1473162 - DNA, 15 bp, Homo sapiens
atgaggtctgactca

SEQ ID NO: 1473163 - DNA, 15 bp, Homo sapiens
tatgaggtctgactc

SEQ ID NO: 1473164 - DNA, 15 bp, Homo sapiens
ttatgaggtctgact

SEQ ID NO: 1473165 - DNA, 15 bp, Homo sapiens
gttatgaggtctgac

SEQ ID NO: 1473166 - DNA, 15 bp, Homo sapiens
agttatgaggtctga

SEQ ID NO: 1473167 - DNA, 15 bp, Homo sapiens
tagttatgaggtctg

SEQ ID NO: 1473168 - DNA, 15 bp, Homo sapiens
ttagttatgaggtct

SEQ ID NO: 1473169 - DNA, 15 bp, Homo sapiens
cttagttatgaggtc

SEQ ID NO: 1473170 - DNA, 15 bp, Homo sapiens
acttagttatgaggt

SEQ ID NO: 1473171 - DNA, 15 bp, Homo sapiens
aacttagttatgagg

SEQ ID NO: 1473172 - DNA, 15 bp, Homo sapiens
taacttagttatgag

SEQ ID NO: 1473173 - DNA, 15 bp, Homo sapiens
ctaacttagttatga

SEQ ID NO: 1473174 - DNA, 15 bp, Homo sapiens
tctaacttagttatg

SEQ ID NO: 1473175 - DNA, 15 bp, Homo sapiens
atctaacttagttat

SEQ ID NO: 1473176 - DNA, 15 bp, Homo sapiens
gatctaacttagtta

SEQ ID NO: 1473177 - DNA, 15 bp, Homo sapiens
agatctaacttagtt

SEQ ID NO: 1473178 - DNA, 15 bp, Homo sapiens
cagatctaacttagt

SEQ ID NO: 1473179 - DNA, 15 bp, Homo sapiens
ccagatctaacttag

SEQ ID NO: 1473180 - DNA, 15 bp, Homo sapiens
gccagatctaactta

SEQ ID NO: 1473181 - DNA, 15 bp, Homo sapiens
ggccagatctaactt

SEQ ID NO: 1473182 - DNA, 15 bp, Homo sapiens
gggccagatctaact

SEQ ID NO: 1473183 - DNA, 15 bp, Homo sapiens
agggccagatctaac

SEQ ID NO: 1473184 - DNA, 15 bp, Homo sapiens
cagggccagatctaa

SEQ ID NO: 1473185 - DNA, 15 bp, Homo sapiens
gcagggccagatcta

SEQ ID NO: 1473186 - DNA, 15 bp, Homo sapiens
agcagggccagatct

SEQ ID NO: 1473187 - DNA, 15 bp, Homo sapiens
aagcagggccagatc

SEQ ID NO: 1473188 - DNA, 15 bp, Homo sapiens
aaagcagggccagat

SEQ ID NO: 1473189 - DNA, 15 bp, Homo sapiens
gaaagcagggccaga

SEQ ID NO: 1473190 - DNA, 15 bp, Homo sapiens
tgaaagcagggccag

SEQ ID NO: 1473191 - DNA, 15 bp, Homo sapiens
ttgaaagcagggcca

SEQ ID NO: 1473192 - DNA, 15 bp, Homo sapiens
cttgaaagcagggcc

SEQ ID NO: 1473193 - DNA, 15 bp, Homo sapiens
tcttgaaagcagggc

SEQ ID NO: 1473194 - DNA, 15 bp, Homo sapiens
ctcttgaaagcaggg

SEQ ID NO: 1473195 - DNA, 15 bp, Homo sapiens
tctcttgaaagcagg

SEQ ID NO: 1473196 - DNA, 15 bp, Homo sapiens
gtctcttgaaagcag

SEQ ID NO: 1473197 - DNA, 15 bp, Homo sapiens
tgtctcttgaaagca

SEQ ID NO: 1473198 - DNA, 15 bp, Homo sapiens
ctgtctcttgaaagc

SEQ ID NO: 1473199 - DNA, 15 bp, Homo sapiens
cctgtctcttgaaag

SEQ ID NO: 1473200 - DNA, 15 bp, Homo sapiens
acctgtctcttgaaa

SEQ ID NO: 1473201 - DNA, 15 bp, Homo sapiens
aacctgtctcttgaa

SEQ ID NO: 1473202 - DNA, 15 bp, Homo sapiens
taacctgtctcttga

SEQ ID NO: 1473203 - DNA, 15 bp, Homo sapiens
gtaacctgtctcttg

SEQ ID NO: 1473204 - DNA, 15 bp, Homo sapiens
ggtaacctgtctctt

SEQ ID NO: 1473205 - DNA, 15 bp, Homo sapiens
gggtaacctgtctct

SEQ ID NO: 1473206 - DNA, 15 bp, Homo sapiens
ggggtaacctgtctc

SEQ ID NO: 1473207 - DNA, 15 bp, Homo sapiens
tggggtaacctgtct

SEQ ID NO: 1473208 - DNA, 15 bp, Homo sapiens
ttggggtaacctgtc

SEQ ID NO: 1473209 - DNA, 15 bp, Homo sapiens
tttggggtaacctgt

SEQ ID NO: 1473210 - DNA, 15 bp, Homo sapiens
ctttggggtaacctg

SEQ ID NO: 1473211 - DNA, 15 bp, Homo sapiens
actttggggtaacct

SEQ ID NO: 1473212 - DNA, 15 bp, Homo sapiens
gactttggggtaacc

SEQ ID NO: 1473213 - DNA, 15 bp, Homo sapiens
tgactttggggtaac

SEQ ID NO: 1473214 - DNA, 15 bp, Homo sapiens
atgactttggggtaa

SEQ ID NO: 1473215 - DNA, 15 bp, Homo sapiens
catgactttggggta

SEQ ID NO: 1473216 - DNA, 15 bp, Homo sapiens
tcatgactttggggt

SEQ ID NO: 1473217 - DNA, 15 bp, Homo sapiens
atcatgactttgggg

SEQ ID NO: 1473218 - DNA, 15 bp, Homo sapiens
gatcatgactttggg

SEQ ID NO: 1473219 - DNA, 15 bp, Homo sapiens
tgatcatgactttgg

SEQ ID NO: 1473220 - DNA, 15 bp, Homo sapiens
gtgatcatgactttg

SEQ ID NO: 1473221 - DNA, 15 bp, Homo sapiens
tgtgatcatgacttt

SEQ ID NO: 1473222 - DNA, 15 bp, Homo sapiens
ttgtgatcatgactt

SEQ ID NO: 1473223 - DNA, 15 bp, Homo sapiens
attgtgatcatgact

SEQ ID NO: 1473224 - DNA, 15 bp, Homo sapiens
cattgtgatcatgac

SEQ ID NO: 1473225 - DNA, 15 bp, Homo sapiens
gcattgtgatcatga

SEQ ID NO: 1473226 - DNA, 15 bp, Homo sapiens
ggcattgtgatcatg

SEQ ID NO: 1473227 - DNA, 15 bp, Homo sapiens
tggcattgtgatcat

SEQ ID NO: 1473228 - DNA, 15 bp, Homo sapiens
ttggcattgtgatca

SEQ ID NO: 1473229 - DNA, 15 bp, Homo sapiens
cttggcattgtgatc

SEQ ID NO: 1473230 - DNA, 15 bp, Homo sapiens
tcttggcattgtgat

SEQ ID NO: 1473231 - DNA, 15 bp, Homo sapiens
atcttggcattgtga

SEQ ID NO: 1473232 - DNA, 15 bp, Homo sapiens
catcttggcattgtg

SEQ ID NO: 1473233 - DNA, 15 bp, Homo sapiens
ccatcttggcattgt

SEQ ID NO: 1473234 - DNA, 15 bp, Homo sapiens
cccatcttggcattg

SEQ ID NO: 1473235 - DNA, 15 bp, Homo sapiens
ccccatcttggcatt

SEQ ID NO: 1473236 - DNA, 15 bp, Homo sapiens
tccccatcttggcat

SEQ ID NO: 1473237 - DNA, 15 bp, Homo sapiens
ctccccatcttggca

SEQ ID NO: 1473238 - DNA, 15 bp, Homo sapiens
cctccccatcttggc

SEQ ID NO: 1473239 - DNA, 15 bp, Homo sapiens
ccctccccatcttgg

SEQ ID NO: 1473240 - DNA, 15 bp, Homo sapiens
cccctccccatcttg

SEQ ID NO: 1473241 - DNA, 15 bp, Homo sapiens
ccccctccccatctt

SEQ ID NO: 1473242 - DNA, 15 bp, Homo sapiens
tccccctccccatct

SEQ ID NO: 1473243 - DNA, 15 bp, Homo sapiens
gtccccctccccatc

SEQ ID NO: 1473244 - DNA, 15 bp, Homo sapiens
ggtccccctccccat

SEQ ID NO: 1473245 - DNA, 15 bp, Homo sapiens
gggtccccctcccca

SEQ ID NO: 1473246 - DNA, 15 bp, Homo sapiens
tgggtccccctcccc

SEQ ID NO: 1473247 - DNA, 15 bp, Homo sapiens
ctgggtccccctccc

SEQ ID NO: 1473248 - DNA, 15 bp, Homo sapiens
cctgggtccccctcc

SEQ ID NO: 1473249 - DNA, 15 bp, Homo sapiens
ccctgggtccccctc

SEQ ID NO: 1473250 - DNA, 15 bp, Homo sapiens
tccctgggtccccct

SEQ ID NO: 1473251 - DNA, 15 bp, Homo sapiens
ttccctgggtccccc

SEQ ID NO: 1473252 - DNA, 15 bp, Homo sapiens
attccctgggtcccc

SEQ ID NO: 1473253 - DNA, 15 bp, Homo sapiens
gattccctgggtccc

SEQ ID NO: 1473254 - DNA, 15 bp, Homo sapiens
tgattccctgggtcc

SEQ ID NO: 1473255 - DNA, 15 bp, Homo sapiens
ctgattccctgggtc

SEQ ID NO: 1473256 - DNA, 15 bp, Homo sapiens
cctgattccctgggt

SEQ ID NO: 1473257 - DNA, 15 bp, Homo sapiens
tcctgattccctggg

SEQ ID NO: 1473258 - DNA, 15 bp, Homo sapiens
ttcctgattccctgg

SEQ ID NO: 1473259 - DNA, 15 bp, Homo sapiens
cttcctgattccctg

SEQ ID NO: 1473260 - DNA, 15 bp, Homo sapiens
ccttcctgattccct

SEQ ID NO: 1473261 - DNA, 15 bp, Homo sapiens
tccttcctgattccc

SEQ ID NO: 1473262 - DNA, 15 bp, Homo sapiens
ctccttcctgattcc

SEQ ID NO: 1473263 - DNA, 15 bp, Homo sapiens
actccttcctgattc

SEQ ID NO: 1473264 - DNA, 15 bp, Homo sapiens
aactccttcctgatt

SEQ ID NO: 1473265 - DNA, 15 bp, Homo sapiens
caactccttcctgat

SEQ ID NO: 1473266 - DNA, 15 bp, Homo sapiens
ccaactccttcctga

SEQ ID NO: 1473267 - DNA, 15 bp, Homo sapiens
gccaactccttcctg

SEQ ID NO: 1473268 - DNA, 15 bp, Homo sapiens
ggccaactccttcct

SEQ ID NO: 1473269 - DNA, 15 bp, Homo sapiens
tggccaactccttcc

SEQ ID NO: 1473270 - DNA, 15 bp, Homo sapiens
ttggccaactccttc

SEQ ID NO: 1473271 - DNA, 15 bp, Homo sapiens
tttggccaactcctt

SEQ ID NO: 1473272 - DNA, 15 bp, Homo sapiens
gtttggccaactcct

SEQ ID NO: 1473273 - DNA, 15 bp, Homo sapiens
agtttggccaactcc

SEQ ID NO: 1473274 - DNA, 15 bp, Homo sapiens
cagtttggccaactc

SEQ ID NO: 1473275 - DNA, 15 bp, Homo sapiens
ccagtttggccaact

SEQ ID NO: 1473276 - DNA, 15 bp, Homo sapiens
tccagtttggccaac

SEQ ID NO: 1473277 - DNA, 15 bp, Homo sapiens
ttccagtttggccaa

SEQ ID NO: 1473278 - DNA, 15 bp, Homo sapiens
cttccagtttggcca

SEQ ID NO: 1473279 - DNA, 15 bp, Homo sapiens
ccttccagtttggcc

SEQ ID NO: 1473280 - DNA, 15 bp, Homo sapiens
cccttccagtttggc

SEQ ID NO: 1473281 - DNA, 15 bp, Homo sapiens
acccttccagtttgg

SEQ ID NO: 1473282 - DNA, 15 bp, Homo sapiens
cacccttccagtttg

SEQ ID NO: 1473283 - DNA, 15 bp, Homo sapiens
acacccttccagttt

SEQ ID NO: 1473284 - DNA, 15 bp, Homo sapiens
cacacccttccagtt

SEQ ID NO: 1473285 - DNA, 15 bp, Homo sapiens
tcacacccttccagt

SEQ ID NO: 1473286 - DNA, 15 bp, Homo sapiens
ctcacacccttccag

SEQ ID NO: 1473287 - DNA, 15 bp, Homo sapiens
cctcacacccttcca

SEQ ID NO: 1473288 - DNA, 15 bp, Homo sapiens
tcctcacacccttcc

SEQ ID NO: 1473289 - DNA, 15 bp, Homo sapiens
ctcctcacacccttc

SEQ ID NO: 1473290 - DNA, 15 bp, Homo sapiens
actcctcacaccctt

SEQ ID NO: 1473291 - DNA, 15 bp, Homo sapiens
aactcctcacaccct

SEQ ID NO: 1473292 - DNA, 15 bp, Homo sapiens
taactcctcacaccc

SEQ ID NO: 1473293 - DNA, 15 bp, Homo sapiens
ttaactcctcacacc

SEQ ID NO: 1473294 - DNA, 15 bp, Homo sapiens
cttaactcctcacac

SEQ ID NO: 1473295 - DNA, 15 bp, Homo sapiens
gcttaactcctcaca

SEQ ID NO: 1473296 - DNA, 15 bp, Homo sapiens
tgcttaactcctcac

SEQ ID NO: 1473297 - DNA, 15 bp, Homo sapiens
ctgcttaactcctca

SEQ ID NO: 1473298 - DNA, 15 bp, Homo sapiens
cctgcttaactcctc

SEQ ID NO: 1473299 - DNA, 15 bp, Homo sapiens
tcctgcttaactcct

SEQ ID NO: 1473300 - DNA, 15 bp, Homo sapiens
ctcctgcttaactcc

SEQ ID NO: 1473301 - DNA, 15 bp, Homo sapiens
cctcctgcttaactc

SEQ ID NO: 1473302 - DNA, 15 bp, Homo sapiens
tcctcctgcttaact

SEQ ID NO: 1473303 - DNA, 15 bp, Homo sapiens
ctcctcctgcttaac

SEQ ID NO: 1473304 - DNA, 15 bp, Homo sapiens
cctcctcctgcttaa

SEQ ID NO: 1473305 - DNA, 15 bp, Homo sapiens
gcctcctcctgctta

SEQ ID NO: 1473306 - DNA, 15 bp, Homo sapiens
agcctcctcctgctt

SEQ ID NO: 1473307 - DNA, 15 bp, Homo sapiens
cagcctcctcctgct

SEQ ID NO: 1473308 - DNA, 15 bp, Homo sapiens
acagcctcctcctgc

SEQ ID NO: 1473309 - DNA, 15 bp, Homo sapiens
cacagcctcctcctg

SEQ ID NO: 1473310 - DNA, 15 bp, Homo sapiens
ccacagcctcctcct

SEQ ID NO: 1473311 - DNA, 15 bp, Homo sapiens
cccacagcctcctcc

SEQ ID NO: 1473312 - DNA, 15 bp, Homo sapiens
ccccacagcctcctc

SEQ ID NO: 1473313 - DNA, 15 bp, Homo sapiens
tccccacagcctcct

SEQ ID NO: 1473314 - DNA, 15 bp, Homo sapiens
ttccccacagcctcc

SEQ ID NO: 1473315 - DNA, 15 bp, Homo sapiens
cttccccacagcctc

SEQ ID NO: 1473316 - DNA, 15 bp, Homo sapiens
tcttccccacagcct

SEQ ID NO: 1473317 - DNA, 15 bp, Homo sapiens
ctcttccccacagcc

SEQ ID NO: 1473318 - DNA, 15 bp, Homo sapiens
gctcttccccacagc

SEQ ID NO: 1473319 - DNA, 15 bp, Homo sapiens
tgctcttccccacag

SEQ ID NO: 1473320 - DNA, 15 bp, Homo sapiens
ctgctcttccccaca

SEQ ID NO: 1473321 - DNA, 15 bp, Homo sapiens
actgctcttccccac

SEQ ID NO: 1473322 - DNA, 15 bp, Homo sapiens
cactgctcttcccca

SEQ ID NO: 1473323 - DNA, 15 bp, Homo sapiens
gcactgctcttcccc

SEQ ID NO: 1473324 - DNA, 15 bp, Homo sapiens
agcactgctcttccc

SEQ ID NO: 1473325 - DNA, 15 bp, Homo sapiens
cagcactgctcttcc

SEQ ID NO: 1473326 - DNA, 15 bp, Homo sapiens
ccagcactgctcttc

SEQ ID NO: 1473327 - DNA, 15 bp, Homo sapiens
cccagcactgctctt

SEQ ID NO: 1473328 - DNA, 15 bp, Homo sapiens
tcccagcactgctct

SEQ ID NO: 1473329 - DNA, 15 bp, Homo sapiens
ctcccagcactgctc

SEQ ID NO: 1473330 - DNA, 15 bp, Homo sapiens
tctcccagcactgct

SEQ ID NO: 1473331 - DNA, 15 bp, Homo sapiens
ctctcccagcactgc

SEQ ID NO: 1473332 - DNA, 15 bp, Homo sapiens
cctctcccagcactg

SEQ ID NO: 1473333 - DNA, 15 bp, Homo sapiens
ccctctcccagcact

SEQ ID NO: 1473334 - DNA, 15 bp, Homo sapiens
tccctctcccagcac

SEQ ID NO: 1473335 - DNA, 15 bp, Homo sapiens
ttccctctcccagca

SEQ ID NO: 1473336 - DNA, 15 bp, Homo sapiens
gttccctctcccagc

SEQ ID NO: 1473337 - DNA, 15 bp, Homo sapiens
tgttccctctcccag

SEQ ID NO: 1473338 - DNA, 15 bp, Homo sapiens
ctgttccctctccca

SEQ ID NO: 1473339 - DNA, 15 bp, Homo sapiens
tctgttccctctccc

SEQ ID NO: 1473340 - DNA, 15 bp, Homo sapiens
atctgttccctctcc

SEQ ID NO: 1473341 - DNA, 15 bp, Homo sapiens
catctgttccctctc

SEQ ID NO: 1473342 - DNA, 15 bp, Homo sapiens
acatctgttccctct

SEQ ID NO: 1473343 - DNA, 15 bp, Homo sapiens
cacatctgttccctc

SEQ ID NO: 1473344 - DNA, 15 bp, Homo sapiens
acacatctgttccct

SEQ ID NO: 1473345 - DNA, 15 bp, Homo sapiens
tacacatctgttccc

SEQ ID NO: 1473346 - DNA, 15 bp, Homo sapiens
ttacacatctgttcc

SEQ ID NO: 1473347 - DNA, 15 bp, Homo sapiens
tttacacatctgttc

SEQ ID NO: 1473348 - DNA, 15 bp, Homo sapiens
ctttacacatctgtt

SEQ ID NO: 1473349 - DNA, 15 bp, Homo sapiens
tctttacacatctgt

SEQ ID NO: 1473350 - DNA, 15 bp, Homo sapiens
ttctttacacatctg

SEQ ID NO: 1473351 - DNA, 15 bp, Homo sapiens
gttctttacacatct

SEQ ID NO: 1473352 - DNA, 15 bp, Homo sapiens
agttctttacacatc

SEQ ID NO: 1473353 - DNA, 15 bp, Homo sapiens
cagttctttacacat

SEQ ID NO: 1473354 - DNA, 15 bp, Homo sapiens
ccagttctttacaca

SEQ ID NO: 1473355 - DNA, 15 bp, Homo sapiens
accagttctttacac

SEQ ID NO: 1473356 - DNA, 15 bp, Homo sapiens
caccagttctttaca

SEQ ID NO: 1473357 - DNA, 15 bp, Homo sapiens
ccaccagttctttac

SEQ ID NO: 1473358 - DNA, 15 bp, Homo sapiens
accaccagttcttta

SEQ ID NO: 1473359 - DNA, 15 bp, Homo sapiens
taccaccagttcttt

SEQ ID NO: 1473360 - DNA, 15 bp, Homo sapiens
gtaccaccagttctt

SEQ ID NO: 1473361 - DNA, 15 bp, Homo sapiens
agtaccaccagttct

SEQ ID NO: 1473362 - DNA, 15 bp, Homo sapiens
aagtaccaccagttc

SEQ ID NO: 1473363 - DNA, 15 bp, Homo sapiens
gaagtaccaccagtt

SEQ ID NO: 1473364 - DNA, 15 bp, Homo sapiens
agaagtaccaccagt

SEQ ID NO: 1473365 - DNA, 15 bp, Homo sapiens
cagaagtaccaccag

SEQ ID NO: 1473366 - DNA, 15 bp, Homo sapiens
ccagaagtaccacca

SEQ ID NO: 1473367 - DNA, 15 bp, Homo sapiens
tccagaagtaccacc

SEQ ID NO: 1473368 - DNA, 15 bp, Homo sapiens
ctccagaagtaccac

SEQ ID NO: 1473369 - DNA, 15 bp, Homo sapiens
tctccagaagtacca

SEQ ID NO: 1473370 - DNA, 15 bp, Homo sapiens
ttctccagaagtacc

SEQ ID NO: 1473371 - DNA, 15 bp, Homo sapiens
attctccagaagtac

SEQ ID NO: 1473372 - DNA, 15 bp, Homo sapiens
aattctccagaagta

SEQ ID NO: 1473373 - DNA, 15 bp, Homo sapiens
aaattctccagaagt

SEQ ID NO: 1473374 - DNA, 15 bp, Homo sapiens
gaaattctccagaag

SEQ ID NO: 1473375 - DNA, 15 bp, Homo sapiens
tgaaattctccagaa

SEQ ID NO: 1473376 - DNA, 15 bp, Homo sapiens
ttgaaattctccaga

SEQ ID NO: 1473377 - DNA, 15 bp, Homo sapiens
cttgaaattctccag

SEQ ID NO: 1473378 - DNA, 15 bp, Homo sapiens
acttgaaattctcca

SEQ ID NO: 1473379 - DNA, 15 bp, Homo sapiens
tacttgaaattctcc

SEQ ID NO: 1473380 - DNA, 15 bp, Homo sapiens
ctacttgaaattctc

SEQ ID NO: 1473381 - DNA, 15 bp, Homo sapiens
gctacttgaaattct

SEQ ID NO: 1473382 - DNA, 15 bp, Homo sapiens
agctacttgaaattc

SEQ ID NO: 1473383 - DNA, 15 bp, Homo sapiens
tagctacttgaaatt

SEQ ID NO: 1473384 - DNA, 15 bp, Homo sapiens
ttagctacttgaaat

SEQ ID NO: 1473385 - DNA, 15 bp, Homo sapiens
cttagctacttgaaa

SEQ ID NO: 1473386 - DNA, 15 bp, Homo sapiens
acttagctacttgaa

SEQ ID NO: 1473387 - DNA, 15 bp, Homo sapiens
gacttagctacttga

SEQ ID NO: 1473388 - DNA, 15 bp, Homo sapiens
agacttagctacttg

SEQ ID NO: 1473389 - DNA, 15 bp, Homo sapiens
cagacttagctactt

SEQ ID NO: 1473390 - DNA, 15 bp, Homo sapiens
ccagacttagctact

SEQ ID NO: 1473391 - DNA, 15 bp, Homo sapiens
gccagacttagctac

SEQ ID NO: 1473392 - DNA, 15 bp, Homo sapiens
agccagacttagcta

SEQ ID NO: 1473393 - DNA, 15 bp, Homo sapiens
cagccagacttagct

SEQ ID NO: 1473394 - DNA, 15 bp, Homo sapiens
ccagccagacttagc

SEQ ID NO: 1473395 - DNA, 15 bp, Homo sapiens
cccagccagacttag

SEQ ID NO: 1473396 - DNA, 15 bp, Homo sapiens
tcccagccagactta

SEQ ID NO: 1473397 - DNA, 15 bp, Homo sapiens
ctcccagccagactt

SEQ ID NO: 1473398 - DNA, 15 bp, Homo sapiens
cctcccagccagact

SEQ ID NO: 1473399 - DNA, 15 bp, Homo sapiens
tcctcccagccagac

SEQ ID NO: 1473400 - DNA, 15 bp, Homo sapiens
atcctcccagccaga

SEQ ID NO: 1473401 - DNA, 15 bp, Homo sapiens
gatcctcccagccag

SEQ ID NO: 1473402 - DNA, 15 bp, Homo sapiens
tgatcctcccagcca

SEQ ID NO: 1473403 - DNA, 15 bp, Homo sapiens
gtgatcctcccagcc

SEQ ID NO: 1473404 - DNA, 15 bp, Homo sapiens
tgtgatcctcccagc

SEQ ID NO: 1473405 - DNA, 15 bp, Homo sapiens
atgtgatcctcccag

SEQ ID NO: 1473406 - DNA, 15 bp, Homo sapiens
catgtgatcctccca

SEQ ID NO: 1473407 - DNA, 15 bp, Homo sapiens
tcatgtgatcctccc

SEQ ID NO: 1473408 - DNA, 15 bp, Homo sapiens
ctcatgtgatcctcc

SEQ ID NO: 1473409 - DNA, 15 bp, Homo sapiens
actcatgtgatcctc

SEQ ID NO: 1473410 - DNA, 15 bp, Homo sapiens
cactcatgtgatcct

SEQ ID NO: 1473411 - DNA, 15 bp, Homo sapiens
ccactcatgtgatcc

SEQ ID NO: 1473412 - DNA, 15 bp, Homo sapiens
gccactcatgtgatc

SEQ ID NO: 1473413 - DNA, 15 bp, Homo sapiens
ggccactcatgtgat

SEQ ID NO: 1473414 - DNA, 15 bp, Homo sapiens
tggccactcatgtga

SEQ ID NO: 1473415 - DNA, 15 bp, Homo sapiens
ctggccactcatgtg

SEQ ID NO: 1473416 - DNA, 15 bp, Homo sapiens
tctggccactcatgt

SEQ ID NO: 1473417 - DNA, 15 bp, Homo sapiens
ctctggccactcatg

SEQ ID NO: 1473418 - DNA, 15 bp, Homo sapiens
tctctggccactcat

SEQ ID NO: 1473419 - DNA, 15 bp, Homo sapiens
atctctggccactca

SEQ ID NO: 1473420 - DNA, 15 bp, Homo sapiens
catctctggccactc

SEQ ID NO: 1473421 - DNA, 15 bp, Homo sapiens
tcatctctggccact

SEQ ID NO: 1473422 - DNA, 15 bp, Homo sapiens
ctcatctctggccac

SEQ ID NO: 1473423 - DNA, 15 bp, Homo sapiens
cctcatctctggcca

SEQ ID NO: 1473424 - DNA, 15 bp, Homo sapiens
acctcatctctggcc

SEQ ID NO: 1473425 - DNA, 15 bp, Homo sapiens
cacctcatctctggc

SEQ ID NO: 1473426 - DNA, 15 bp, Homo sapiens
ccacctcatctctgg

SEQ ID NO: 1473427 - DNA, 15 bp, Homo sapiens
tccacctcatctctg

SEQ ID NO: 1473428 - DNA, 15 bp, Homo sapiens
ttccacctcatctct

SEQ ID NO: 1473429 - DNA, 15 bp, Homo sapiens
tttccacctcatctc

SEQ ID NO: 1473430 - DNA, 15 bp, Homo sapiens
ctttccacctcatct

SEQ ID NO: 1473431 - DNA, 15 bp, Homo sapiens
cctttccacctcatc

SEQ ID NO: 1473432 - DNA, 15 bp, Homo sapiens
acctttccacctcat

SEQ ID NO: 1473433 - DNA, 15 bp, Homo sapiens
gacctttccacctca

SEQ ID NO: 1473434 - DNA, 15 bp, Homo sapiens
tgacctttccacctc

SEQ ID NO: 1473435 - DNA, 15 bp, Homo sapiens
ctgacctttccacct

SEQ ID NO: 1473436 - DNA, 15 bp, Homo sapiens
gctgacctttccacc

SEQ ID NO: 1473437 - DNA, 15 bp, Homo sapiens
tgctgacctttccac

SEQ ID NO: 1473438 - DNA, 15 bp, Homo sapiens
ctgctgacctttcca

SEQ ID NO: 1473439 - DNA, 15 bp, Homo sapiens
tctgctgacctttcc

SEQ ID NO: 1473440 - DNA, 15 bp, Homo sapiens
ctctgctgacctttc

SEQ ID NO: 1473441 - DNA, 15 bp, Homo sapiens
cctctgctgaccttt

SEQ ID NO: 1473442 - DNA, 15 bp, Homo sapiens
gcctctgctgacctt

SEQ ID NO: 1473443 - DNA, 15 bp, Homo sapiens
ggcctctgctgacct

SEQ ID NO: 1473444 - DNA, 15 bp, Homo sapiens
aggcctctgctgacc

SEQ ID NO: 1473445 - DNA, 15 bp, Homo sapiens
caggcctctgctgac

SEQ ID NO: 1473446 - DNA, 15 bp, Homo sapiens
ccaggcctctgctga

SEQ ID NO: 1473447 - DNA, 15 bp, Homo sapiens
accaggcctctgctg

SEQ ID NO: 1473448 - DNA, 15 bp, Homo sapiens
gaccaggcctctgct

SEQ ID NO: 1473449 - DNA, 15 bp, Homo sapiens
tgaccaggcctctgc

SEQ ID NO: 1473450 - DNA, 15 bp, Homo sapiens
gtgaccaggcctctg

SEQ ID NO: 1473451 - DNA, 15 bp, Homo sapiens
tgtgaccaggcctct

SEQ ID NO: 1473452 - DNA, 15 bp, Homo sapiens
gtgtgaccaggcctc

SEQ ID NO: 1473453 - DNA, 15 bp, Homo sapiens
tgtgtgaccaggcct

SEQ ID NO: 1473454 - DNA, 15 bp, Homo sapiens
ctgtgtgaccaggcc

SEQ ID NO: 1473455 - DNA, 15 bp, Homo sapiens
cctgtgtgaccaggc

SEQ ID NO: 1473456 - DNA, 15 bp, Homo sapiens
ccctgtgtgaccagg

SEQ ID NO: 1473457 - DNA, 15 bp, Homo sapiens
gccctgtgtgaccag

SEQ ID NO: 1473458 - DNA, 15 bp, Homo sapiens
ggccctgtgtgacca

SEQ ID NO: 1473459 - DNA, 15 bp, Homo sapiens
aggccctgtgtgacc

SEQ ID NO: 1473460 - DNA, 15 bp, Homo sapiens
aaggccctgtgtgac

SEQ ID NO: 1473461 - DNA, 15 bp, Homo sapiens
caaggccctgtgtga

SEQ ID NO: 1473462 - DNA, 15 bp, Homo sapiens
acaaggccctgtgtg

SEQ ID NO: 1473463 - DNA, 15 bp, Homo sapiens
cacaaggccctgtgt

SEQ ID NO: 1473464 - DNA, 15 bp, Homo sapiens
ccacaaggccctgtg

SEQ ID NO: 1473465 - DNA, 15 bp, Homo sapiens
cccacaaggccctgt

SEQ ID NO: 1473466 - DNA, 15 bp, Homo sapiens
acccacaaggccctg

SEQ ID NO: 1473467 - DNA, 15 bp, Homo sapiens
aacccacaaggccct

SEQ ID NO: 1473468 - DNA, 15 bp, Homo sapiens
aaacccacaaggccc

SEQ ID NO: 1473469 - DNA, 15 bp, Homo sapiens
aaaacccacaaggcc

SEQ ID NO: 1473470 - DNA, 15 bp, Homo sapiens
aaaaacccacaaggc

SEQ ID NO: 1473471 - DNA, 15 bp, Homo sapiens
aaaaaacccacaagg

SEQ ID NO: 1473472 - DNA, 15 bp, Homo sapiens
aaaaaaacccacaag

SEQ ID NO: 1473473 - DNA, 15 bp, Homo sapiens
aaaaaaaaaaaaccc

SEQ ID NO: 1473474 - DNA, 15 bp, Homo sapiens
cgcaaaaaaaaaaaa

SEQ ID NO: 1473475 - DNA, 15 bp, Homo sapiens
tcgcaaaaaaaaaaa

SEQ ID NO: 1473476 - DNA, 15 bp, Homo sapiens
ttcgcaaaaaaaaaa

SEQ ID NO: 1473477 - DNA, 15 bp, Homo sapiens
attcgcaaaaaaaaa

SEQ ID NO: 1473478 - DNA, 15 bp, Homo sapiens
gattcgcaaaaaaaa

SEQ ID NO: 1473479 - DNA, 15 bp, Homo sapiens
agattcgcaaaaaaa

SEQ ID NO: 1473480 - DNA, 15 bp, Homo sapiens
cagattcgcaaaaaa

SEQ ID NO: 1473481 - DNA, 15 bp, Homo sapiens
tcagattcgcaaaaa

SEQ ID NO: 1473482 - DNA, 15 bp, Homo sapiens
atcagattcgcaaaa

SEQ ID NO: 1473483 - DNA, 15 bp, Homo sapiens
gatcagattcgcaaa

SEQ ID NO: 1473484 - DNA, 15 bp, Homo sapiens
agatcagattcgcaa

SEQ ID NO: 1473485 - DNA, 15 bp, Homo sapiens
aagatcagattcgca

SEQ ID NO: 1473486 - DNA, 15 bp, Homo sapiens
taagatcagattcgc

SEQ ID NO: 1473487 - DNA, 15 bp, Homo sapiens
ataagatcagattcg

SEQ ID NO: 1473488 - DNA, 15 bp, Homo sapiens
aataagatcagattc

SEQ ID NO: 1473489 - DNA, 15 bp, Homo sapiens
aaataagatcagatt

SEQ ID NO: 1473490 - DNA, 15 bp, Homo sapiens
caaataagatcagat

SEQ ID NO: 1473491 - DNA, 15 bp, Homo sapiens
acaaataagatcaga

SEQ ID NO: 1473492 - DNA, 15 bp, Homo sapiens
aacaaataagatcag

SEQ ID NO: 1473493 - DNA, 15 bp, Homo sapiens
taacaaataagatca

SEQ ID NO: 1473494 - DNA, 15 bp, Homo sapiens
gtaacaaataagatc

SEQ ID NO: 1473495 - DNA, 15 bp, Homo sapiens
agtaacaaataagat

SEQ ID NO: 1473496 - DNA, 15 bp, Homo sapiens
gagtaacaaataaga

SEQ ID NO: 1473497 - DNA, 15 bp, Homo sapiens
tgagtaacaaataag

SEQ ID NO: 1473498 - DNA, 15 bp, Homo sapiens
ttgagtaacaaataa

SEQ ID NO: 1473499 - DNA, 15 bp, Homo sapiens
tttgagtaacaaata

SEQ ID NO: 1473500 - DNA, 15 bp, Homo sapiens
ttttgagtaacaaat

SEQ ID NO: 1473501 - DNA, 15 bp, Homo sapiens
tttttgagtaacaaa

SEQ ID NO: 1473502 - DNA, 15 bp, Homo sapiens
ttttttgagtaacaa

SEQ ID NO: 1473503 - DNA, 15 bp, Homo sapiens
attttttgagtaaca

SEQ ID NO: 1473504 - DNA, 15 bp, Homo sapiens
gattttttgagtaac

SEQ ID NO: 1473505 - DNA, 15 bp, Homo sapiens
agattttttgagtaa

SEQ ID NO: 1473506 - DNA, 15 bp, Homo sapiens
aagattttttgagta

SEQ ID NO: 1473507 - DNA, 15 bp, Homo sapiens
taagattttttgagt

SEQ ID NO: 1473508 - DNA, 15 bp, Homo sapiens
ataagattttttgag

SEQ ID NO: 1473509 - DNA, 15 bp, Homo sapiens
aataagattttttga

SEQ ID NO: 1473510 - DNA, 15 bp, Homo sapiens
aaataagattttttg

SEQ ID NO: 1473511 - DNA, 15 bp, Homo sapiens
gaaataagatttttt

SEQ ID NO: 1473512 - DNA, 15 bp, Homo sapiens
agaaataagattttt

SEQ ID NO: 1473513 - DNA, 15 bp, Homo sapiens
cagaaataagatttt

SEQ ID NO: 1473514 - DNA, 15 bp, Homo sapiens
tcagaaataagattt

SEQ ID NO: 1473515 - DNA, 15 bp, Homo sapiens
gtcagaaataagatt

SEQ ID NO: 1473516 - DNA, 15 bp, Homo sapiens
agtcagaaataagat

SEQ ID NO: 1473517 - DNA, 15 bp, Homo sapiens
cagtcagaaataaga

SEQ ID NO: 1473518 - DNA, 15 bp, Homo sapiens
ccagtcagaaataag

SEQ ID NO: 1473519 - DNA, 15 bp, Homo sapiens
tccagtcagaaataa

SEQ ID NO: 1473520 - DNA, 15 bp, Homo sapiens
atccagtcagaaata

SEQ ID NO: 1473521 - DNA, 15 bp, Homo sapiens
aatccagtcagaaat

SEQ ID NO: 1473522 - DNA, 15 bp, Homo sapiens
gaatccagtcagaaa

SEQ ID NO: 1473523 - DNA, 15 bp, Homo sapiens
tgaatccagtcagaa

SEQ ID NO: 1473524 - DNA, 15 bp, Homo sapiens
ctgaatccagtcaga

SEQ ID NO: 1473525 - DNA, 15 bp, Homo sapiens
tctgaatccagtcag

SEQ ID NO: 1473526 - DNA, 15 bp, Homo sapiens
gtctgaatccagtca

SEQ ID NO: 1473527 - DNA, 15 bp, Homo sapiens
agtctgaatccagtc

SEQ ID NO: 1473528 - DNA, 15 bp, Homo sapiens
aagtctgaatccagt

SEQ ID NO: 1473529 - DNA, 15 bp, Homo sapiens
taagtctgaatccag

SEQ ID NO: 1473530 - DNA, 15 bp, Homo sapiens
ctaagtctgaatcca

SEQ ID NO: 1473531 - DNA, 15 bp, Homo sapiens
tctaagtctgaatcc

SEQ ID NO: 1473532 - DNA, 15 bp, Homo sapiens
ttctaagtctgaatc

SEQ ID NO: 1473533 - DNA, 15 bp, Homo sapiens
cttctaagtctgaat

SEQ ID NO: 1473534 - DNA, 15 bp, Homo sapiens
acttctaagtctgaa

SEQ ID NO: 1473535 - DNA, 15 bp, Homo sapiens
cacttctaagtctga

SEQ ID NO: 1473536 - DNA, 15 bp, Homo sapiens
ccacttctaagtctg

SEQ ID NO: 1473537 - DNA, 15 bp, Homo sapiens
tccacttctaagtct

SEQ ID NO: 1473538 - DNA, 15 bp, Homo sapiens
ttccacttctaagtc

SEQ ID NO: 1473539 - DNA, 15 bp, Homo sapiens
cttccacttctaagt

SEQ ID NO: 1473540 - DNA, 15 bp, Homo sapiens
gcttccacttctaag

SEQ ID NO: 1473541 - DNA, 15 bp, Homo sapiens
agcttccacttctaa

SEQ ID NO: 1473542 - DNA, 15 bp, Homo sapiens
gagcttccacttcta

SEQ ID NO: 1473543 - DNA, 15 bp, Homo sapiens
cgagcttccacttct

SEQ ID NO: 1473544 - DNA, 15 bp, Homo sapiens
gcgagcttccacttc

SEQ ID NO: 1473545 - DNA, 15 bp, Homo sapiens
tgcgagcttccactt

SEQ ID NO: 1473546 - DNA, 15 bp, Homo sapiens
ctgcgagcttccact

SEQ ID NO: 1473547 - DNA, 15 bp, Homo sapiens
tctgcgagcttccac

SEQ ID NO: 1473548 - DNA, 15 bp, Homo sapiens
ctctgcgagcttcca

SEQ ID NO: 1473549 - DNA, 15 bp, Homo sapiens
tctctgcgagcttcc

SEQ ID NO: 1473550 - DNA, 15 bp, Homo sapiens
ctctctgcgagcttc

SEQ ID NO: 1473551 - DNA, 15 bp, Homo sapiens
cctctctgcgagctt

SEQ ID NO: 1473552 - DNA, 15 bp, Homo sapiens
tcctctctgcgagct

SEQ ID NO: 1473553 - DNA, 15 bp, Homo sapiens
gtcctctctgcgagc

SEQ ID NO: 1473554 - DNA, 15 bp, Homo sapiens
tgtcctctctgcgag

SEQ ID NO: 1473555 - DNA, 15 bp, Homo sapiens
ctgtcctctctgcga

SEQ ID NO: 1473556 - DNA, 15 bp, Homo sapiens
actgtcctctctgcg

SEQ ID NO: 1473557 - DNA, 15 bp, Homo sapiens
gactgtcctctctgc

SEQ ID NO: 1473558 - DNA, 15 bp, Homo sapiens
agactgtcctctctg

SEQ ID NO: 1473559 - DNA, 15 bp, Homo sapiens
cagactgtcctctct

SEQ ID NO: 1473560 - DNA, 15 bp, Homo sapiens
gcagactgtcctctc

SEQ ID NO: 1473561 - DNA, 15 bp, Homo sapiens
cgcagactgtcctct

SEQ ID NO: 1473562 - DNA, 15 bp, Homo sapiens
acgcagactgtcctc

SEQ ID NO: 1473563 - DNA, 15 bp, Homo sapiens
gacgcagactgtcct

SEQ ID NO: 1473564 - DNA, 15 bp, Homo sapiens
agacgcagactgtcc

SEQ ID NO: 1473565 - DNA, 15 bp, Homo sapiens
gagacgcagactgtc

SEQ ID NO: 1473566 - DNA, 15 bp, Homo sapiens
agagacgcagactgt

SEQ ID NO: 1473567 - DNA, 15 bp, Homo sapiens
aagagacgcagactg

SEQ ID NO: 1473568 - DNA, 15 bp, Homo sapiens
gaagagacgcagact

SEQ ID NO: 1473569 - DNA, 15 bp, Homo sapiens
tgaagagacgcagac

SEQ ID NO: 1473570 - DNA, 15 bp, Homo sapiens
gtgaagagacgcaga

SEQ ID NO: 1473571 - DNA, 15 bp, Homo sapiens
cgtgaagagacgcag

SEQ ID NO: 1473572 - DNA, 15 bp, Homo sapiens
tcgtgaagagacgca

SEQ ID NO: 1473573 - DNA, 15 bp, Homo sapiens
atcgtgaagagacgc

SEQ ID NO: 1473574 - DNA, 15 bp, Homo sapiens
aatcgtgaagagacg

SEQ ID NO: 1473575 - DNA, 15 bp, Homo sapiens
aaatcgtgaagagac

SEQ ID NO: 1473576 - DNA, 15 bp, Homo sapiens
caaatcgtgaagaga

SEQ ID NO: 1473577 - DNA, 15 bp, Homo sapiens
acaaatcgtgaagag

SEQ ID NO: 1473578 - DNA, 15 bp, Homo sapiens
gacaaatcgtgaaga

SEQ ID NO: 1473579 - DNA, 15 bp, Homo sapiens
ggacaaatcgtgaag

SEQ ID NO: 1473580 - DNA, 15 bp, Homo sapiens
gggacaaatcgtgaa

SEQ ID NO: 1473581 - DNA, 15 bp, Homo sapiens
agggacaaatcgtga

SEQ ID NO: 1473582 - DNA, 15 bp, Homo sapiens
cagggacaaatcgtg

SEQ ID NO: 1473583 - DNA, 15 bp, Homo sapiens
ccagggacaaatcgt

SEQ ID NO: 1473584 - DNA, 15 bp, Homo sapiens
accagggacaaatcg

SEQ ID NO: 1473585 - DNA, 15 bp, Homo sapiens
caccagggacaaatc

SEQ ID NO: 1473586 - DNA, 15 bp, Homo sapiens
gcaccagggacaaat

SEQ ID NO: 1473587 - DNA, 15 bp, Homo sapiens
agcaccagggacaaa

SEQ ID NO: 1473588 - DNA, 15 bp, Homo sapiens
aagcaccagggacaa

SEQ ID NO: 1473589 - DNA, 15 bp, Homo sapiens
gaagcaccagggaca

SEQ ID NO: 1473590 - DNA, 15 bp, Homo sapiens
agaagcaccagggac

SEQ ID NO: 1473591 - DNA, 15 bp, Homo sapiens
aagaagcaccaggga

SEQ ID NO: 1473592 - DNA, 15 bp, Homo sapiens
taagaagcaccaggg

SEQ ID NO: 1473593 - DNA, 15 bp, Homo sapiens
ctaagaagcaccagg

SEQ ID NO: 1473594 - DNA, 15 bp, Homo sapiens
gctaagaagcaccag

SEQ ID NO: 1473595 - DNA, 15 bp, Homo sapiens
ggctaagaagcacca

SEQ ID NO: 1473596 - DNA, 15 bp, Homo sapiens
aggctaagaagcacc

SEQ ID NO: 1473597 - DNA, 15 bp, Homo sapiens
gaggctaagaagcac

SEQ ID NO: 1473598 - DNA, 15 bp, Homo sapiens
ggaggctaagaagca

SEQ ID NO: 1473599 - DNA, 15 bp, Homo sapiens
aggaggctaagaagc

SEQ ID NO: 1473600 - DNA, 15 bp, Homo sapiens
aaggaggctaagaag

SEQ ID NO: 1473601 - DNA, 15 bp, Homo sapiens
gaaggaggctaagaa

SEQ ID NO: 1473602 - DNA, 15 bp, Homo sapiens
tgaaggaggctaaga

SEQ ID NO: 1473603 - DNA, 15 bp, Homo sapiens
atgaaggaggctaag

SEQ ID NO: 1473604 - DNA, 15 bp, Homo sapiens
aatgaaggaggctaa

SEQ ID NO: 1473605 - DNA, 15 bp, Homo sapiens
gaatgaaggaggcta

SEQ ID NO: 1473606 - DNA, 15 bp, Homo sapiens
agaatgaaggaggct

SEQ ID NO: 1473607 - DNA, 15 bp, Homo sapiens
gagaatgaaggaggc

SEQ ID NO: 1473608 - DNA, 15 bp, Homo sapiens
agagaatgaaggagg

SEQ ID NO: 1473609 - DNA, 15 bp, Homo sapiens
aagagaatgaaggag

SEQ ID NO: 1473610 - DNA, 15 bp, Homo sapiens
caagagaatgaagga

SEQ ID NO: 1473611 - DNA, 15 bp, Homo sapiens
ccaagagaatgaagg

SEQ ID NO: 1473612 - DNA, 15 bp, Homo sapiens
gccaagagaatgaag

SEQ ID NO: 1473613 - DNA, 15 bp, Homo sapiens
ggccaagagaatgaa

SEQ ID NO: 1473614 - DNA, 15 bp, Homo sapiens
tggccaagagaatga

SEQ ID NO: 1473615 - DNA, 15 bp, Homo sapiens
ttggccaagagaatg

SEQ ID NO: 1473616 - DNA, 15 bp, Homo sapiens
tttggccaagagaat

SEQ ID NO: 1473617 - DNA, 15 bp, Homo sapiens
ttttggccaagagaa

SEQ ID NO: 1473618 - DNA, 15 bp, Homo sapiens
cttttggccaagaga

SEQ ID NO: 1473619 - DNA, 15 bp, Homo sapiens
acttttggccaagag

SEQ ID NO: 1473620 - DNA, 15 bp, Homo sapiens
aacttttggccaaga

SEQ ID NO: 1473621 - DNA, 15 bp, Homo sapiens
aaacttttggccaag

SEQ ID NO: 1473622 - DNA, 15 bp, Homo sapiens
taaacttttggccaa

SEQ ID NO: 1473623 - DNA, 15 bp, Homo sapiens
ctaaacttttggcca

SEQ ID NO: 1473624 - DNA, 15 bp, Homo sapiens
gctaaacttttggcc

SEQ ID NO: 1473625 - DNA, 15 bp, Homo sapiens
tgctaaacttttggc

SEQ ID NO: 1473626 - DNA, 15 bp, Homo sapiens
atgctaaacttttgg

SEQ ID NO: 1473627 - DNA, 15 bp, Homo sapiens
tatgctaaacttttg

SEQ ID NO: 1473628 - DNA, 15 bp, Homo sapiens
atatgctaaactttt

SEQ ID NO: 1473629 - DNA, 15 bp, Homo sapiens
aatatgctaaacttt

SEQ ID NO: 1473630 - DNA, 15 bp, Homo sapiens
gaatatgctaaactt

SEQ ID NO: 1473631 - DNA, 15 bp, Homo sapiens
agaatatgctaaact

SEQ ID NO: 1473632 - DNA, 15 bp, Homo sapiens
cagaatatgctaaac

SEQ ID NO: 1473633 - DNA, 15 bp, Homo sapiens
gcagaatatgctaaa

SEQ ID NO: 1473634 - DNA, 15 bp, Homo sapiens
tgcagaatatgctaa

SEQ ID NO: 1473635 - DNA, 15 bp, Homo sapiens
ctgcagaatatgcta

SEQ ID NO: 1473636 - DNA, 15 bp, Homo sapiens
gctgcagaatatgct

SEQ ID NO: 1473637 - DNA, 15 bp, Homo sapiens
ggctgcagaatatgc

SEQ ID NO: 1473638 - DNA, 15 bp, Homo sapiens
aggctgcagaatatg

SEQ ID NO: 1473639 - DNA, 15 bp, Homo sapiens
gaggctgcagaatat

SEQ ID NO: 1473640 - DNA, 15 bp, Homo sapiens
agaggctgcagaata

SEQ ID NO: 1473641 - DNA, 15 bp, Homo sapiens
aagaggctgcagaat

SEQ ID NO: 1473642 - DNA, 15 bp, Homo sapiens
gaagaggctgcagaa

SEQ ID NO: 1473643 - DNA, 15 bp, Homo sapiens
agaagaggctgcaga

SEQ ID NO: 1473644 - DNA, 15 bp, Homo sapiens
aagaagaggctgcag

SEQ ID NO: 1473645 - DNA, 15 bp, Homo sapiens
aaagaagaggctgca

SEQ ID NO: 1473646 - DNA, 15 bp, Homo sapiens
taaagaagaggctgc

SEQ ID NO: 1473647 - DNA, 15 bp, Homo sapiens
ataaagaagaggctg

SEQ ID NO: 1473648 - DNA, 15 bp, Homo sapiens
aataaagaagaggct

SEQ ID NO: 1473649 - DNA, 15 bp, Homo sapiens
aaataaagaagaggc

SEQ ID NO: 1473650 - DNA, 15 bp, Homo sapiens
aaaataaagaagagg

SEQ ID NO: 1473651 - DNA, 15 bp, Homo sapiens
aaaaataaagaagag

SEQ ID NO: 1473652 - DNA, 15 bp, Homo sapiens
agaaaaataaagaag

SEQ ID NO: 1473653 - DNA, 15 bp, Homo sapiens
aagaaaaataaagaa

SEQ ID NO: 1473654 - DNA, 15 bp, Homo sapiens
taagaaaaataaaga

SEQ ID NO: 1473655 - DNA, 15 bp, Homo sapiens
ttaagaaaaataaag

SEQ ID NO: 1473656 - DNA, 15 bp, Homo sapiens
attaagaaaaataaa

SEQ ID NO: 1473657 - DNA, 15 bp, Homo sapiens
tattaagaaaaataa

SEQ ID NO: 1473658 - DNA, 15 bp, Homo sapiens
atattaagaaaaata

SEQ ID NO: 1473659 - DNA, 15 bp, Homo sapiens
catattaagaaaaat

SEQ ID NO: 1473660 - DNA, 15 bp, Homo sapiens
gcatattaagaaaaa

SEQ ID NO: 1473661 - DNA, 15 bp, Homo sapiens
cgcatattaagaaaa

SEQ ID NO: 1473662 - DNA, 15 bp, Homo sapiens
ccgcatattaagaaa

SEQ ID NO: 1473663 - DNA, 15 bp, Homo sapiens
gccgcatattaagaa

SEQ ID NO: 1473664 - DNA, 15 bp, Homo sapiens
agccgcatattaaga

SEQ ID NO: 1473665 - DNA, 15 bp, Homo sapiens
cagccgcatattaag

SEQ ID NO: 1473666 - DNA, 15 bp, Homo sapiens
gcagccgcatattaa

SEQ ID NO: 1473667 - DNA, 15 bp, Homo sapiens
agcagccgcatatta

SEQ ID NO: 1473668 - DNA, 15 bp, Homo sapiens
aagcagccgcatatt

SEQ ID NO: 1473669 - DNA, 15 bp, Homo sapiens
gaagcagccgcatat

SEQ ID NO: 1473670 - DNA, 15 bp, Homo sapiens
tgaagcagccgcata

SEQ ID NO: 1473671 - DNA, 15 bp, Homo sapiens
ctgaagcagccgcat

SEQ ID NO: 1473672 - DNA, 15 bp, Homo sapiens
tctgaagcagccgca

SEQ ID NO: 1473673 - DNA, 15 bp, Homo sapiens
ctctgaagcagccgc

SEQ ID NO: 1473674 - DNA, 15 bp, Homo sapiens
gctctgaagcagccg

SEQ ID NO: 1473675 - DNA, 15 bp, Homo sapiens
tgctctgaagcagcc

SEQ ID NO: 1473676 - DNA, 15 bp, Homo sapiens
ttgctctgaagcagc

SEQ ID NO: 1473677 - DNA, 15 bp, Homo sapiens
attgctctgaagcag

SEQ ID NO: 1473678 - DNA, 15 bp, Homo sapiens
tattgctctgaagca

SEQ ID NO: 1473679 - DNA, 15 bp, Homo sapiens
gtattgctctgaagc

SEQ ID NO: 1473680 - DNA, 15 bp, Homo sapiens
cgtattgctctgaag

SEQ ID NO: 1473681 - DNA, 15 bp, Homo sapiens
gcgtattgctctgaa

SEQ ID NO: 1473682 - DNA, 15 bp, Homo sapiens
ggcgtattgctctga

SEQ ID NO: 1473683 - DNA, 15 bp, Homo sapiens
cggcgtattgctctg

SEQ ID NO: 1473684 - DNA, 15 bp, Homo sapiens
gcggcgtattgctct

SEQ ID NO: 1473685 - DNA, 15 bp, Homo sapiens
agcggcgtattgctc

SEQ ID NO: 1473686 - DNA, 15 bp, Homo sapiens
cagcggcgtattgct

SEQ ID NO: 1473687 - DNA, 15 bp, Homo sapiens
acagcggcgtattgc

SEQ ID NO: 1473688 - DNA, 15 bp, Homo sapiens
aacagcggcgtattg

SEQ ID NO: 1473689 - DNA, 15 bp, Homo sapiens
aaacagcggcgtatt

SEQ ID NO: 1473690 - DNA, 15 bp, Homo sapiens
caaacagcggcgtat

SEQ ID NO: 1473691 - DNA, 15 bp, Homo sapiens
acaaacagcggcgta

SEQ ID NO: 1473692 - DNA, 15 bp, Homo sapiens
cacaaacagcggcgt

SEQ ID NO: 1473693 - DNA, 15 bp, Homo sapiens
gcacaaacagcggcg

SEQ ID NO: 1473694 - DNA, 15 bp, Homo sapiens
agcacaaacagcggc

SEQ ID NO: 1473695 - DNA, 15 bp, Homo sapiens
cagcacaaacagcgg

SEQ ID NO: 1473696 - DNA, 15 bp, Homo sapiens
gcagcacaaacagcg

SEQ ID NO: 1473697 - DNA, 15 bp, Homo sapiens
tgcagcacaaacagc

SEQ ID NO: 1473698 - DNA, 15 bp, Homo sapiens
ctgcagcacaaacag

SEQ ID NO: 1473699 - DNA, 15 bp, Homo sapiens
cctgcagcacaaaca

SEQ ID NO: 1473700 - DNA, 15 bp, Homo sapiens
tcctgcagcacaaac

SEQ ID NO: 1473701 - DNA, 15 bp, Homo sapiens
gtcctgcagcacaaa

SEQ ID NO: 1473702 - DNA, 15 bp, Homo sapiens
tgtcctgcagcacaa

SEQ ID NO: 1473703 - DNA, 15 bp, Homo sapiens
atgtcctgcagcaca

SEQ ID NO: 1473704 - DNA, 15 bp, Homo sapiens
catgtcctgcagcac

SEQ ID NO: 1473705 - DNA, 15 bp, Homo sapiens
acatgtcctgcagca

SEQ ID NO: 1473706 - DNA, 15 bp, Homo sapiens
cacatgtcctgcagc

SEQ ID NO: 1473707 - DNA, 15 bp, Homo sapiens
ccacatgtcctgcag

SEQ ID NO: 1473708 - DNA, 15 bp, Homo sapiens
tccacatgtcctgca

SEQ ID NO: 1473709 - DNA, 15 bp, Homo sapiens
ctccacatgtcctgc

SEQ ID NO: 1473710 - DNA, 15 bp, Homo sapiens
actccacatgtcctg

SEQ ID NO: 1473711 - DNA, 15 bp, Homo sapiens
cactccacatgtcct

SEQ ID NO: 1473712 - DNA, 15 bp, Homo sapiens
tcactccacatgtcc

SEQ ID NO: 1473713 - DNA, 15 bp, Homo sapiens
gtcactccacatgtc

SEQ ID NO: 1473714 - DNA, 15 bp, Homo sapiens
tgtcactccacatgt

SEQ ID NO: 1473715 - DNA, 15 bp, Homo sapiens
ttgtcactccacatg

SEQ ID NO: 1473716 - DNA, 15 bp, Homo sapiens
cttgtcactccacat

SEQ ID NO: 1473717 - DNA, 15 bp, Homo sapiens
ccttgtcactccaca

SEQ ID NO: 1473718 - DNA, 15 bp, Homo sapiens
gccttgtcactccac

SEQ ID NO: 1473719 - DNA, 15 bp, Homo sapiens
cgccttgtcactcca

SEQ ID NO: 1473720 - DNA, 15 bp, Homo sapiens
gcgccttgtcactcc

SEQ ID NO: 1473721 - DNA, 15 bp, Homo sapiens
agcgccttgtcactc

SEQ ID NO: 1473722 - DNA, 15 bp, Homo sapiens
cagcgccttgtcact

SEQ ID NO: 1473723 - DNA, 15 bp, Homo sapiens
tcagcgccttgtcac

SEQ ID NO: 1473724 - DNA, 15 bp, Homo sapiens
ttcagcgccttgtca

SEQ ID NO: 1473725 - DNA, 15 bp, Homo sapiens
attcagcgccttgtc

SEQ ID NO: 1473726 - DNA, 15 bp, Homo sapiens
gattcagcgccttgt

SEQ ID NO: 1473727 - DNA, 15 bp, Homo sapiens
agattcagcgccttg

SEQ ID NO: 1473728 - DNA, 15 bp, Homo sapiens
aagattcagcgcctt

SEQ ID NO: 1473729 - DNA, 15 bp, Homo sapiens
caagattcagcgcct

SEQ ID NO: 1473730 - DNA, 15 bp, Homo sapiens
ccaagattcagcgcc

SEQ ID NO: 1473731 - DNA, 15 bp, Homo sapiens
cccaagattcagcgc

SEQ ID NO: 1473732 - DNA, 15 bp, Homo sapiens
acccaagattcagcg

SEQ ID NO: 1473733 - DNA, 15 bp, Homo sapiens
cacccaagattcagc

SEQ ID NO: 1473734 - DNA, 15 bp, Homo sapiens
gcacccaagattcag

SEQ ID NO: 1473735 - DNA, 15 bp, Homo sapiens
agcacccaagattca

SEQ ID NO: 1473736 - DNA, 15 bp, Homo sapiens
aagcacccaagattc

SEQ ID NO: 1473737 - DNA, 15 bp, Homo sapiens
aaagcacccaagatt

SEQ ID NO: 1473738 - DNA, 15 bp, Homo sapiens
caaagcacccaagat

SEQ ID NO: 1473739 - DNA, 15 bp, Homo sapiens
ccaaagcacccaaga

SEQ ID NO: 1473740 - DNA, 15 bp, Homo sapiens
accaaagcacccaag

SEQ ID NO: 1473741 - DNA, 15 bp, Homo sapiens
gaccaaagcacccaa

SEQ ID NO: 1473742 - DNA, 15 bp, Homo sapiens
ggaccaaagcaccca

SEQ ID NO: 1473743 - DNA, 15 bp, Homo sapiens
aggaccaaagcaccc

SEQ ID NO: 1473744 - DNA, 15 bp, Homo sapiens
taggaccaaagcacc

SEQ ID NO: 1473745 - DNA, 15 bp, Homo sapiens
ctaggaccaaagcac

SEQ ID NO: 1473746 - DNA, 15 bp, Homo sapiens
cctaggaccaaagca

SEQ ID NO: 1473747 - DNA, 15 bp, Homo sapiens
acctaggaccaaagc

SEQ ID NO: 1473748 - DNA, 15 bp, Homo sapiens
aacctaggaccaaag

SEQ ID NO: 1473749 - DNA, 15 bp, Homo sapiens
aaacctaggaccaaa

SEQ ID NO: 1473750 - DNA, 15 bp, Homo sapiens
gaaacctaggaccaa

SEQ ID NO: 1473751 - DNA, 15 bp, Homo sapiens
agaaacctaggacca

SEQ ID NO: 1473752 - DNA, 15 bp, Homo sapiens
aagaaacctaggacc

SEQ ID NO: 1473753 - DNA, 15 bp, Homo sapiens
taagaaacctaggac

SEQ ID NO: 1473754 - DNA, 15 bp, Homo sapiens
gtaagaaacctagga

SEQ ID NO: 1473755 - DNA, 15 bp, Homo sapiens
ggtaagaaacctagg

SEQ ID NO: 1473756 - DNA, 15 bp, Homo sapiens
aggtaagaaacctag

SEQ ID NO: 1473757 - DNA, 15 bp, Homo sapiens
aaggtaagaaaccta

SEQ ID NO: 1473758 - DNA, 15 bp, Homo sapiens
gaaggtaagaaacct

SEQ ID NO: 1473759 - DNA, 15 bp, Homo sapiens
agaaggtaagaaacc

SEQ ID NO: 1473760 - DNA, 15 bp, Homo sapiens
aagaaggtaagaaac

SEQ ID NO: 1473761 - DNA, 15 bp, Homo sapiens
aaagaaggtaagaaa

SEQ ID NO: 1473762 - DNA, 15 bp, Homo sapiens
caaagaaggtaagaa

SEQ ID NO: 1473763 - DNA, 15 bp, Homo sapiens
aaagcccttaaacaa

SEQ ID NO: 1473764 - DNA, 15 bp, Homo sapiens
aaaagcccttaaaca

SEQ ID NO: 1473765 - DNA, 15 bp, Homo sapiens
aaaaagcccttaaac

SEQ ID NO: 1473766 - DNA, 15 bp, Homo sapiens
aaaaaagcccttaaa

SEQ ID NO: 1473767 - DNA, 15 bp, Homo sapiens
taaaaaagcccttaa

SEQ ID NO: 1473768 - DNA, 15 bp, Homo sapiens
gtaaaaaagccctta

SEQ ID NO: 1473769 - DNA, 15 bp, Homo sapiens
tgtaaaaaagccctt

SEQ ID NO: 1473770 - DNA, 15 bp, Homo sapiens
ttgtaaaaaagccct

SEQ ID NO: 1473771 - DNA, 15 bp, Homo sapiens
gttgtaaaaaagccc

SEQ ID NO: 1473772 - DNA, 15 bp, Homo sapiens
tgttgtaaaaaagcc

SEQ ID NO: 1473773 - DNA, 15 bp, Homo sapiens
atgttgtaaaaaagc

SEQ ID NO: 1473774 - DNA, 15 bp, Homo sapiens
tatgttgtaaaaaag

SEQ ID NO: 1473775 - DNA, 15 bp, Homo sapiens
gtatgttgtaaaaaa

SEQ ID NO: 1473776 - DNA, 15 bp, Homo sapiens
agtatgttgtaaaaa

SEQ ID NO: 1473777 - DNA, 15 bp, Homo sapiens
cagtatgttgtaaaa

SEQ ID NO: 1473778 - DNA, 15 bp, Homo sapiens
ccagtatgttgtaaa

SEQ ID NO: 1473779 - DNA, 15 bp, Homo sapiens
gccagtatgttgtaa

SEQ ID NO: 1473780 - DNA, 15 bp, Homo sapiens
tgccagtatgttgta

SEQ ID NO: 1473781 - DNA, 15 bp, Homo sapiens
ctgccagtatgttgt

SEQ ID NO: 1473782 - DNA, 15 bp, Homo sapiens
tctgccagtatgttg

SEQ ID NO: 1473783 - DNA, 15 bp, Homo sapiens
gtctgccagtatgtt

SEQ ID NO: 1473784 - DNA, 15 bp, Homo sapiens
tgtctgccagtatgt

SEQ ID NO: 1473785 - DNA, 15 bp, Homo sapiens
atgtctgccagtatg

SEQ ID NO: 1473786 - DNA, 15 bp, Homo sapiens
gatgtctgccagtat

SEQ ID NO: 1473787 - DNA, 15 bp, Homo sapiens
tgatgtctgccagta

SEQ ID NO: 1473788 - DNA, 15 bp, Homo sapiens
atgatgtctgccagt

SEQ ID NO: 1473789 - DNA, 15 bp, Homo sapiens
aatgatgtctgccag

SEQ ID NO: 1473790 - DNA, 15 bp, Homo sapiens
aaatgatgtctgcca

SEQ ID NO: 1473791 - DNA, 15 bp, Homo sapiens
aaaatgatgtctgcc

SEQ ID NO: 1473792 - DNA, 15 bp, Homo sapiens
gaaaatgatgtctgc

SEQ ID NO: 1473793 - DNA, 15 bp, Homo sapiens
agaaaatgatgtctg

SEQ ID NO: 1473794 - DNA, 15 bp, Homo sapiens
aagaaaatgatgtct

SEQ ID NO: 1473795 - DNA, 15 bp, Homo sapiens
aaagaaaatgatgtc

SEQ ID NO: 1473796 - DNA, 15 bp, Homo sapiens
taaagaaaatgatgt

SEQ ID NO: 1473797 - DNA, 15 bp, Homo sapiens
ctaaagaaaatgatg

SEQ ID NO: 1473798 - DNA, 15 bp, Homo sapiens
tctaaagaaaatgat

SEQ ID NO: 1473799 - DNA, 15 bp, Homo sapiens
ctctaaagaaaatga

SEQ ID NO: 1473800 - DNA, 15 bp, Homo sapiens
tctctaaagaaaatg

SEQ ID NO: 1473801 - DNA, 15 bp, Homo sapiens
ctctctaaagaaaat

SEQ ID NO: 1473802 - DNA, 15 bp, Homo sapiens
tctctctaaagaaaa

SEQ ID NO: 1473803 - DNA, 15 bp, Homo sapiens
gtctctctaaagaaa

SEQ ID NO: 1473804 - DNA, 15 bp, Homo sapiens
agtctctctaaagaa

SEQ ID NO: 1473805 - DNA, 15 bp, Homo sapiens
cagtctctctaaaga

SEQ ID NO: 1473806 - DNA, 15 bp, Homo sapiens
tcagtctctctaaag

SEQ ID NO: 1473807 - DNA, 15 bp, Homo sapiens
ttcagtctctctaaa

SEQ ID NO: 1473808 - DNA, 15 bp, Homo sapiens
tttcagtctctctaa

SEQ ID NO: 1473809 - DNA, 15 bp, Homo sapiens
ttttcagtctctcta

SEQ ID NO: 1473810 - DNA, 15 bp, Homo sapiens
cttttcagtctctct

SEQ ID NO: 1473811 - DNA, 15 bp, Homo sapiens
ttattgtaaaaaaaa

SEQ ID NO: 1473812 - DNA, 15 bp, Homo sapiens
gttattgtaaaaaaa

SEQ ID NO: 1473813 - DNA, 15 bp, Homo sapiens
ggttattgtaaaaaa

SEQ ID NO: 1473814 - DNA, 15 bp, Homo sapiens
tggttattgtaaaaa

SEQ ID NO: 1473815 - DNA, 15 bp, Homo sapiens
ttggttattgtaaaa

SEQ ID NO: 1473816 - DNA, 15 bp, Homo sapiens
cttggttattgtaaa

SEQ ID NO: 1473817 - DNA, 15 bp, Homo sapiens
acttggttattgtaa

SEQ ID NO: 1473818 - DNA, 15 bp, Homo sapiens
aacttggttattgta

SEQ ID NO: 1473819 - DNA, 15 bp, Homo sapiens
caacttggttattgt

SEQ ID NO: 1473820 - DNA, 15 bp, Homo sapiens
tcaacttggttattg

SEQ ID NO: 1473821 - DNA, 15 bp, Homo sapiens
ctcaacttggttatt

SEQ ID NO: 1473822 - DNA, 15 bp, Homo sapiens
tctcaacttggttat

SEQ ID NO: 1473823 - DNA, 15 bp, Homo sapiens
ttctcaacttggtta

SEQ ID NO: 1473824 - DNA, 15 bp, Homo sapiens
gttctcaacttggtt

SEQ ID NO: 1473825 - DNA, 15 bp, Homo sapiens
tgttctcaacttggt

SEQ ID NO: 1473826 - DNA, 15 bp, Homo sapiens
gtgttctcaacttgg

SEQ ID NO: 1473827 - DNA, 15 bp, Homo sapiens
agtgttctcaacttg

SEQ ID NO: 1473828 - DNA, 15 bp, Homo sapiens
gagtgttctcaactt

SEQ ID NO: 1473829 - DNA, 15 bp, Homo sapiens
tgagtgttctcaact

SEQ ID NO: 1473830 - DNA, 15 bp, Homo sapiens
ctgagtgttctcaac

SEQ ID NO: 1473831 - DNA, 15 bp, Homo sapiens
tctgagtgttctcaa

SEQ ID NO: 1473832 - DNA, 15 bp, Homo sapiens
atctgagtgttctca

SEQ ID NO: 1473833 - DNA, 15 bp, Homo sapiens
aatctgagtgttctc

SEQ ID NO: 1473834 - DNA, 15 bp, Homo sapiens
caatctgagtgttct

SEQ ID NO: 1473835 - DNA, 15 bp, Homo sapiens
ccaatctgagtgttc

SEQ ID NO: 1473836 - DNA, 15 bp, Homo sapiens
gccaatctgagtgtt

SEQ ID NO: 1473837 - DNA, 15 bp, Homo sapiens
tgccaatctgagtgt

SEQ ID NO: 1473838 - DNA, 15 bp, Homo sapiens
atgccaatctgagtg

SEQ ID NO: 1473839 - DNA, 15 bp, Homo sapiens
gatgccaatctgagt

SEQ ID NO: 1473840 - DNA, 15 bp, Homo sapiens
ggatgccaatctgag

SEQ ID NO: 1473841 - DNA, 15 bp, Homo sapiens
tggatgccaatctga

SEQ ID NO: 1473842 - DNA, 15 bp, Homo sapiens
gtggatgccaatctg

SEQ ID NO: 1473843 - DNA, 15 bp, Homo sapiens
cgtggatgccaatct

SEQ ID NO: 1473844 - DNA, 15 bp, Homo sapiens
tcgtggatgccaatc

SEQ ID NO: 1473845 - DNA, 15 bp, Homo sapiens
atcgtggatgccaat

SEQ ID NO: 1473846 - DNA, 15 bp, Homo sapiens
catcgtggatgccaa

SEQ ID NO: 1473847 - DNA, 15 bp, Homo sapiens
gcatcgtggatgcca

SEQ ID NO: 1473848 - DNA, 15 bp, Homo sapiens
tgcatcgtggatgcc

SEQ ID NO: 1473849 - DNA, 15 bp, Homo sapiens
ttgcatcgtggatgc

SEQ ID NO: 1473850 - DNA, 15 bp, Homo sapiens
gttgcatcgtggatg

SEQ ID NO: 1473851 - DNA, 15 bp, Homo sapiens
ggttgcatcgtggat

SEQ ID NO: 1473852 - DNA, 15 bp, Homo sapiens
tggttgcatcgtgga

SEQ ID NO: 1473853 - DNA, 15 bp, Homo sapiens
atggttgcatcgtgg

SEQ ID NO: 1473854 - DNA, 15 bp, Homo sapiens
catggttgcatcgtg

SEQ ID NO: 1473855 - DNA, 15 bp, Homo sapiens
tcatggttgcatcgt

SEQ ID NO: 1473856 - DNA, 15 bp, Homo sapiens
ttcatggttgcatcg

SEQ ID NO: 1473857 - DNA, 15 bp, Homo sapiens
gttcatggttgcatc

SEQ ID NO: 1473858 - DNA, 15 bp, Homo sapiens
agttcatggttgcat

SEQ ID NO: 1473859 - DNA, 15 bp, Homo sapiens
cagttcatggttgca

SEQ ID NO: 1473860 - DNA, 15 bp, Homo sapiens
tcagttcatggttgc

SEQ ID NO: 1473861 - DNA, 15 bp, Homo sapiens
atcagttcatggttg

SEQ ID NO: 1473862 - DNA, 15 bp, Homo sapiens
gatcagttcatggtt

SEQ ID NO: 1473863 - DNA, 15 bp, Homo sapiens
agatcagttcatggt

SEQ ID NO: 1473864 - DNA, 15 bp, Homo sapiens
aagatcagttcatgg

SEQ ID NO: 1473865 - DNA, 15 bp, Homo sapiens
gaagatcagttcatg

SEQ ID NO: 1473866 - DNA, 15 bp, Homo sapiens
agaagatcagttcat

SEQ ID NO: 1473867 - DNA, 15 bp, Homo sapiens
gagaagatcagttca

SEQ ID NO: 1473868 - DNA, 15 bp, Homo sapiens
agagaagatcagttc

SEQ ID NO: 1473869 - DNA, 15 bp, Homo sapiens
aagagaagatcagtt

SEQ ID NO: 1473870 - DNA, 15 bp, Homo sapiens
aaagagaagatcagt

SEQ ID NO: 1473871 - DNA, 15 bp, Homo sapiens
gaaagagaagatcag

SEQ ID NO: 1473872 - DNA, 15 bp, Homo sapiens
agaaagagaagatca

SEQ ID NO: 1473873 - DNA, 15 bp, Homo sapiens
aagaaagagaagatc

SEQ ID NO: 1473874 - DNA, 15 bp, Homo sapiens
aaagaaagagaagat

SEQ ID NO: 1473875 - DNA, 15 bp, Homo sapiens
gaaagaaagagaaga

SEQ ID NO: 1473876 - DNA, 15 bp, Homo sapiens
agaaagaaagagaag

SEQ ID NO: 1473877 - DNA, 15 bp, Homo sapiens
gagaaagaaagagaa

SEQ ID NO: 1473878 - DNA, 15 bp, Homo sapiens
ggagaaagaaagaga

SEQ ID NO: 1473879 - DNA, 15 bp, Homo sapiens
tggagaaagaaagag

SEQ ID NO: 1473880 - DNA, 15 bp, Homo sapiens
ctggagaaagaaaga

SEQ ID NO: 1473881 - DNA, 15 bp, Homo sapiens
actggagaaagaaag

SEQ ID NO: 1473882 - DNA, 15 bp, Homo sapiens
aactggagaaagaaa

SEQ ID NO: 1473883 - DNA, 15 bp, Homo sapiens
gaactggagaaagaa

SEQ ID NO: 1473884 - DNA, 15 bp, Homo sapiens
agaactggagaaaga

SEQ ID NO: 1473885 - DNA, 15 bp, Homo sapiens
gagaactggagaaag

SEQ ID NO: 1473886 - DNA, 15 bp, Homo sapiens
ggagaactggagaaa

SEQ ID NO: 1473887 - DNA, 15 bp, Homo sapiens
aggagaactggagaa

SEQ ID NO: 1473888 - DNA, 15 bp, Homo sapiens
aaggagaactggaga

SEQ ID NO: 1473889 - DNA, 15 bp, Homo sapiens
caaggagaactggag

SEQ ID NO: 1473890 - DNA, 15 bp, Homo sapiens
ccaaggagaactgga

SEQ ID NO: 1473891 - DNA, 15 bp, Homo sapiens
accaaggagaactgg

SEQ ID NO: 1473892 - DNA, 15 bp, Homo sapiens
gaccaaggagaactg

SEQ ID NO: 1473893 - DNA, 15 bp, Homo sapiens
agaccaaggagaact

SEQ ID NO: 1473894 - DNA, 15 bp, Homo sapiens
cagaccaaggagaac

SEQ ID NO: 1473895 - DNA, 15 bp, Homo sapiens
acagaccaaggagaa

SEQ ID NO: 1473896 - DNA, 15 bp, Homo sapiens
tacagaccaaggaga

SEQ ID NO: 1473897 - DNA, 15 bp, Homo sapiens
ttacagaccaaggag

SEQ ID NO: 1473898 - DNA, 15 bp, Homo sapiens
attacagaccaagga

SEQ ID NO: 1473899 - DNA, 15 bp, Homo sapiens
tattacagaccaagg

SEQ ID NO: 1473900 - DNA, 15 bp, Homo sapiens
ctattacagaccaag

SEQ ID NO: 1473901 - DNA, 15 bp, Homo sapiens
cctattacagaccaa

SEQ ID NO: 1473902 - DNA, 15 bp, Homo sapiens
tcctattacagacca

SEQ ID NO: 1473903 - DNA, 15 bp, Homo sapiens
ttcctattacagacc

SEQ ID NO: 1473904 - DNA, 15 bp, Homo sapiens
attcctattacagac

SEQ ID NO: 1473905 - DNA, 15 bp, Homo sapiens
cattcctattacaga

SEQ ID NO: 1473906 - DNA, 15 bp, Homo sapiens
gcattcctattacag

SEQ ID NO: 1473907 - DNA, 15 bp, Homo sapiens
ggcattcctattaca

SEQ ID NO: 1473908 - DNA, 15 bp, Homo sapiens
gggcattcctattac

SEQ ID NO: 1473909 - DNA, 15 bp, Homo sapiens
ggggcattcctatta

SEQ ID NO: 1473910 - DNA, 15 bp, Homo sapiens
aggggcattcctatt

SEQ ID NO: 1473911 - DNA, 15 bp, Homo sapiens
aaggggcattcctat

SEQ ID NO: 1473912 - DNA, 15 bp, Homo sapiens
taaggggcattccta

SEQ ID NO: 1473913 - DNA, 15 bp, Homo sapiens
gtaaggggcattcct

SEQ ID NO: 1473914 - DNA, 15 bp, Homo sapiens
agtaaggggcattcc

SEQ ID NO: 1473915 - DNA, 15 bp, Homo sapiens
gagtaaggggcattc

SEQ ID NO: 1473916 - DNA, 15 bp, Homo sapiens
tgagtaaggggcatt

SEQ ID NO: 1473917 - DNA, 15 bp, Homo sapiens
ctgagtaaggggcat

SEQ ID NO: 1473918 - DNA, 15 bp, Homo sapiens
actgagtaaggggca

SEQ ID NO: 1473919 - DNA, 15 bp, Homo sapiens
tactgagtaaggggc

SEQ ID NO: 1473920 - DNA, 15 bp, Homo sapiens
ctactgagtaagggg

SEQ ID NO: 1473921 - DNA, 15 bp, Homo sapiens
gctactgagtaaggg

SEQ ID NO: 1473922 - DNA, 15 bp, Homo sapiens
tgctactgagtaagg

SEQ ID NO: 1473923 - DNA, 15 bp, Homo sapiens
ttgctactgagtaag

SEQ ID NO: 1473924 - DNA, 15 bp, Homo sapiens
cttgctactgagtaa

SEQ ID NO: 1473925 - DNA, 15 bp, Homo sapiens
acttgctactgagta

SEQ ID NO: 1473926 - DNA, 15 bp, Homo sapiens
cacttgctactgagt

SEQ ID NO: 1473927 - DNA, 15 bp, Homo sapiens
ccacttgctactgag

SEQ ID NO: 1473928 - DNA, 15 bp, Homo sapiens
tccacttgctactga

SEQ ID NO: 1473929 - DNA, 15 bp, Homo sapiens
gtccacttgctactg

SEQ ID NO: 1473930 - DNA, 15 bp, Homo sapiens
tgtccacttgctact

SEQ ID NO: 1473931 - DNA, 15 bp, Homo sapiens
gtgtccacttgctac

SEQ ID NO: 1473932 - DNA, 15 bp, Homo sapiens
cgtgtccacttgcta

SEQ ID NO: 1473933 - DNA, 15 bp, Homo sapiens
ccgtgtccacttgct

SEQ ID NO: 1473934 - DNA, 15 bp, Homo sapiens
gccgtgtccacttgc

SEQ ID NO: 1473935 - DNA, 15 bp, Homo sapiens
ggccgtgtccacttg

SEQ ID NO: 1473936 - DNA, 15 bp, Homo sapiens
tggccgtgtccactt

SEQ ID NO: 1473937 - DNA, 15 bp, Homo sapiens
atggccgtgtccact

SEQ ID NO: 1473938 - DNA, 15 bp, Homo sapiens
catggccgtgtccac

SEQ ID NO: 1473939 - DNA, 15 bp, Homo sapiens
ccatggccgtgtcca

SEQ ID NO: 1473940 - DNA, 15 bp, Homo sapiens
cccatggccgtgtcc

SEQ ID NO: 1473941 - DNA, 15 bp, Homo sapiens
acccatggccgtgtc

SEQ ID NO: 1473942 - DNA, 15 bp, Homo sapiens
gacccatggccgtgt

SEQ ID NO: 1473943 - DNA, 15 bp, Homo sapiens
tgacccatggccgtg

SEQ ID NO: 1473944 - DNA, 15 bp, Homo sapiens
ttgacccatggccgt

SEQ ID NO: 1473945 - DNA, 15 bp, Homo sapiens
cttgacccatggccg

SEQ ID NO: 1473946 - DNA, 15 bp, Homo sapiens
tcttgacccatggcc

SEQ ID NO: 1473947 - DNA, 15 bp, Homo sapiens
gtcttgacccatggc

SEQ ID NO: 1473948 - DNA, 15 bp, Homo sapiens
tgtcttgacccatgg

SEQ ID NO: 1473949 - DNA, 15 bp, Homo sapiens
gtgtcttgacccatg

SEQ ID NO: 1473950 - DNA, 15 bp, Homo sapiens
ggtgtcttgacccat

SEQ ID NO: 1473951 - DNA, 15 bp, Homo sapiens
gggtgtcttgaccca

SEQ ID NO: 1473952 - DNA, 15 bp, Homo sapiens
agggtgtcttgaccc

SEQ ID NO: 1473953 - DNA, 15 bp, Homo sapiens
cagggtgtcttgacc

SEQ ID NO: 1473954 - DNA, 15 bp, Homo sapiens
ggaagggttacgtgg

SEQ ID NO: 1473955 - DNA, 15 bp, Homo sapiens
tggaagggttacgtg

SEQ ID NO: 1473956 - DNA, 15 bp, Homo sapiens
atggaagggttacgt

SEQ ID NO: 1473957 - DNA, 15 bp, Homo sapiens
aatggaagggttacg

SEQ ID NO: 1473958 - DNA, 15 bp, Homo sapiens
gaatggaagggttac

SEQ ID NO: 1473959 - DNA, 15 bp, Homo sapiens
agaatggaagggtta

SEQ ID NO: 1473960 - DNA, 15 bp, Homo sapiens
aagaatggaagggtt

SEQ ID NO: 1473961 - DNA, 15 bp, Homo sapiens
gaagaatggaagggt

SEQ ID NO: 1473962 - DNA, 15 bp, Homo sapiens
tgaagaatggaaggg

SEQ ID NO: 1473963 - DNA, 15 bp, Homo sapiens
gtgaagaatggaagg

SEQ ID NO: 1473964 - DNA, 15 bp, Homo sapiens
ggtgaagaatggaag

SEQ ID NO: 1473965 - DNA, 15 bp, Homo sapiens
gggtgaagaatggaa

SEQ ID NO: 1473966 - DNA, 15 bp, Homo sapiens
tgggtgaagaatgga

SEQ ID NO: 1473967 - DNA, 15 bp, Homo sapiens
ctgggtgaagaatgg

SEQ ID NO: 1473968 - DNA, 15 bp, Homo sapiens
tctgggtgaagaatg

SEQ ID NO: 1473969 - DNA, 15 bp, Homo sapiens
ctctgggtgaagaat

SEQ ID NO: 1473970 - DNA, 15 bp, Homo sapiens
gctctgggtgaagaa

SEQ ID NO: 1473971 - DNA, 15 bp, Homo sapiens
cgctctgggtgaaga

SEQ ID NO: 1473972 - DNA, 15 bp, Homo sapiens
acgctctgggtgaag

SEQ ID NO: 1473973 - DNA, 15 bp, Homo sapiens
gacgctctgggtgaa

SEQ ID NO: 1473974 - DNA, 15 bp, Homo sapiens
tgacgctctgggtga

SEQ ID NO: 1473975 - DNA, 15 bp, Homo sapiens
ttgacgctctgggtg

SEQ ID NO: 1473976 - DNA, 15 bp, Homo sapiens
gttgacgctctgggt

SEQ ID NO: 1473977 - DNA, 15 bp, Homo sapiens
tgttgacgctctggg

SEQ ID NO: 1473978 - DNA, 15 bp, Homo sapiens
ctgttgacgctctgg

SEQ ID NO: 1473979 - DNA, 15 bp, Homo sapiens
gctgttgacgctctg

SEQ ID NO: 1473980 - DNA, 15 bp, Homo sapiens
tgctgttgacgctct

SEQ ID NO: 1473981 - DNA, 15 bp, Homo sapiens
ttgctgttgacgctc

SEQ ID NO: 1473982 - DNA, 15 bp, Homo sapiens
gttgctgttgacgct

SEQ ID NO: 1473983 - DNA, 15 bp, Homo sapiens
agttgctgttgacgc

SEQ ID NO: 1473984 - DNA, 15 bp, Homo sapiens
aagttgctgttgacg

SEQ ID NO: 1473985 - DNA, 15 bp, Homo sapiens
gaagttgctgttgac

SEQ ID NO: 1473986 - DNA, 15 bp, Homo sapiens
agaagttgctgttga

SEQ ID NO: 1473987 - DNA, 15 bp, Homo sapiens
cagaagttgctgttg

SEQ ID NO: 1473988 - DNA, 15 bp, Homo sapiens
acagaagttgctgtt

SEQ ID NO: 1473989 - DNA, 15 bp, Homo sapiens
cacagaagttgctgt

SEQ ID NO: 1473990 - DNA, 15 bp, Homo sapiens
ccacagaagttgctg

SEQ ID NO: 1473991 - DNA, 15 bp, Homo sapiens
gccacagaagttgct

SEQ ID NO: 1473992 - DNA, 15 bp, Homo sapiens
ggccacagaagttgc

SEQ ID NO: 1473993 - DNA, 15 bp, Homo sapiens
tggccacagaagttg

SEQ ID NO: 1473994 - DNA, 15 bp, Homo sapiens
atggccacagaagtt

SEQ ID NO: 1473995 - DNA, 15 bp, Homo sapiens
tatggccacagaagt

SEQ ID NO: 1473996 - DNA, 15 bp, Homo sapiens
gtatggccacagaag

SEQ ID NO: 1473997 - DNA, 15 bp, Homo sapiens
cgtatggccacagaa

SEQ ID NO: 1473998 - DNA, 15 bp, Homo sapiens
gcgtatggccacaga

SEQ ID NO: 1473999 - DNA, 15 bp, Homo sapiens
agcgtatggccacag

SEQ ID NO: 1474000 - DNA, 15 bp, Homo sapiens
aagcgtatggccaca

SEQ ID NO: 1474001 - DNA, 15 bp, Homo sapiens
gaagcgtatggccac

SEQ ID NO: 1474002 - DNA, 15 bp, Homo sapiens
agaagcgtatggcca

SEQ ID NO: 1474003 - DNA, 15 bp, Homo sapiens
gagaagcgtatggcc

SEQ ID NO: 1474004 - DNA, 15 bp, Homo sapiens
tgagaagcgtatggc

SEQ ID NO: 1474005 - DNA, 15 bp, Homo sapiens
atgagaagcgtatgg

SEQ ID NO: 1474006 - DNA, 15 bp, Homo sapiens
tatgagaagcgtatg

SEQ ID NO: 1474007 - DNA, 15 bp, Homo sapiens
ttatgagaagcgtat

SEQ ID NO: 1474008 - DNA, 15 bp, Homo sapiens
tttatgagaagcgta

SEQ ID NO: 1474009 - DNA, 15 bp, Homo sapiens
ttttatgagaagcgt

SEQ ID NO: 1474010 - DNA, 15 bp, Homo sapiens
tttttatgagaagcg

SEQ ID NO: 1474011 - DNA, 15 bp, Homo sapiens
ctttttatgagaagc

SEQ ID NO: 1474012 - DNA, 15 bp, Homo sapiens
actttttatgagaag

SEQ ID NO: 1474013 - DNA, 15 bp, Homo sapiens
tactttttatgagaa

SEQ ID NO: 1474014 - DNA, 15 bp, Homo sapiens
gtactttttatgaga

SEQ ID NO: 1474015 - DNA, 15 bp, Homo sapiens
tgtactttttatgag

SEQ ID NO: 1474016 - DNA, 15 bp, Homo sapiens
ttgtactttttatga

SEQ ID NO: 1474017 - DNA, 15 bp, Homo sapiens
tttgtactttttatg

SEQ ID NO: 1474018 - DNA, 15 bp, Homo sapiens
ctttgtactttttat

SEQ ID NO: 1474019 - DNA, 15 bp, Homo sapiens
actttgtacttttta

SEQ ID NO: 1474020 - DNA, 15 bp, Homo sapiens
aactttgtacttttt

SEQ ID NO: 1474021 - DNA, 15 bp, Homo sapiens
aaactttgtactttt

SEQ ID NO: 1474022 - DNA, 15 bp, Homo sapiens
caaactttgtacttt

SEQ ID NO: 1474023 - DNA, 15 bp, Homo sapiens
gcaaactttgtactt

SEQ ID NO: 1474024 - DNA, 15 bp, Homo sapiens
cgcaaactttgtact

SEQ ID NO: 1474025 - DNA, 15 bp, Homo sapiens
acgcaaactttgtac

SEQ ID NO: 1474026 - DNA, 15 bp, Homo sapiens
aacgcaaactttgta

SEQ ID NO: 1474027 - DNA, 15 bp, Homo sapiens
gaacgcaaactttgt

SEQ ID NO: 1474028 - DNA, 15 bp, Homo sapiens
tgaacgcaaactttg

SEQ ID NO: 1474029 - DNA, 15 bp, Homo sapiens
atgaacgcaaacttt

SEQ ID NO: 1474030 - DNA, 15 bp, Homo sapiens
gatgaacgcaaactt

SEQ ID NO: 1474031 - DNA, 15 bp, Homo sapiens
cgatgaacgcaaact

SEQ ID NO: 1474032 - DNA, 15 bp, Homo sapiens
acgatgaacgcaaac

SEQ ID NO: 1474033 - DNA, 15 bp, Homo sapiens
gacgatgaacgcaaa

SEQ ID NO: 1474034 - DNA, 15 bp, Homo sapiens
ggacgatgaacgcaa

SEQ ID NO: 1474035 - DNA, 15 bp, Homo sapiens
tggacgatgaacgca

SEQ ID NO: 1474036 - DNA, 15 bp, Homo sapiens
gtggacgatgaacgc

SEQ ID NO: 1474037 - DNA, 15 bp, Homo sapiens
agtggacgatgaacg

SEQ ID NO: 1474038 - DNA, 15 bp, Homo sapiens
aagtggacgatgaac

SEQ ID NO: 1474039 - DNA, 15 bp, Homo sapiens
gaagtggacgatgaa

SEQ ID NO: 1474040 - DNA, 15 bp, Homo sapiens
tgaagtggacgatga

SEQ ID NO: 1474041 - DNA, 15 bp, Homo sapiens
ttgaagtggacgatg

SEQ ID NO: 1474042 - DNA, 15 bp, Homo sapiens
attgaagtggacgat

SEQ ID NO: 1474043 - DNA, 15 bp, Homo sapiens
cattgaagtggacga

SEQ ID NO: 1474044 - DNA, 15 bp, Homo sapiens
tcattgaagtggacg

SEQ ID NO: 1474045 - DNA, 15 bp, Homo sapiens
ctcattgaagtggac

SEQ ID NO: 1474046 - DNA, 15 bp, Homo sapiens
actcattgaagtgga

SEQ ID NO: 1474047 - DNA, 15 bp, Homo sapiens
aactcattgaagtgg

SEQ ID NO: 1474048 - DNA, 15 bp, Homo sapiens
aaactcattgaagtg

SEQ ID NO: 1474049 - DNA, 15 bp, Homo sapiens
gaaactcattgaagt

SEQ ID NO: 1474050 - DNA, 15 bp, Homo sapiens
agaaactcattgaag

SEQ ID NO: 1474051 - DNA, 15 bp, Homo sapiens
cagaaactcattgaa

SEQ ID NO: 1474052 - DNA, 15 bp, Homo sapiens
ccagaaactcattga

SEQ ID NO: 1474053 - DNA, 15 bp, Homo sapiens
gccagaaactcattg

SEQ ID NO: 1474054 - DNA, 15 bp, Homo sapiens
tgccagaaactcatt

SEQ ID NO: 1474055 - DNA, 15 bp, Homo sapiens
ctgccagaaactcat

SEQ ID NO: 1474056 - DNA, 15 bp, Homo sapiens
gctgccagaaactca

SEQ ID NO: 1474057 - DNA, 15 bp, Homo sapiens
ggctgccagaaactc

SEQ ID NO: 1474058 - DNA, 15 bp, Homo sapiens
tggctgccagaaact

SEQ ID NO: 1474059 - DNA, 15 bp, Homo sapiens
ctggctgccagaaac

SEQ ID NO: 1474060 - DNA, 15 bp, Homo sapiens
actggctgccagaaa

SEQ ID NO: 1474061 - DNA, 15 bp, Homo sapiens
cactggctgccagaa

SEQ ID NO: 1474062 - DNA, 15 bp, Homo sapiens
ccactggctgccaga

SEQ ID NO: 1474063 - DNA, 15 bp, Homo sapiens
gccactggctgccag

SEQ ID NO: 1474064 - DNA, 15 bp, Homo sapiens
agccactggctgcca

SEQ ID NO: 1474065 - DNA, 15 bp, Homo sapiens
cagccactggctgcc

SEQ ID NO: 1474066 - DNA, 15 bp, Homo sapiens
ccagccactggctgc

SEQ ID NO: 1474067 - DNA, 15 bp, Homo sapiens
cccagccactggctg

SEQ ID NO: 1474068 - DNA, 15 bp, Homo sapiens
tcccagccactggct

SEQ ID NO: 1474069 - DNA, 15 bp, Homo sapiens
ttcccagccactggc

SEQ ID NO: 1474070 - DNA, 15 bp, Homo sapiens
cttcccagccactgg

SEQ ID NO: 1474071 - DNA, 15 bp, Homo sapiens
ccttcccagccactg

SEQ ID NO: 1474072 - DNA, 15 bp, Homo sapiens
tccttcccagccact

SEQ ID NO: 1474073 - DNA, 15 bp, Homo sapiens
ctccttcccagccac

SEQ ID NO: 1474074 - DNA, 15 bp, Homo sapiens
tctccttcccagcca

SEQ ID NO: 1474075 - DNA, 15 bp, Homo sapiens
atctccttcccagcc

SEQ ID NO: 1474076 - DNA, 15 bp, Homo sapiens
catctccttcccagc

SEQ ID NO: 1474077 - DNA, 15 bp, Homo sapiens
acatctccttcccag

SEQ ID NO: 1474078 - DNA, 15 bp, Homo sapiens
aacatctccttccca

SEQ ID NO: 1474079 - DNA, 15 bp, Homo sapiens
gaacatctccttccc

SEQ ID NO: 1474080 - DNA, 15 bp, Homo sapiens
tgaacatctccttcc

SEQ ID NO: 1474081 - DNA, 15 bp, Homo sapiens
ctgaacatctccttc

SEQ ID NO: 1474082 - DNA, 15 bp, Homo sapiens
gctgaacatctcctt

SEQ ID NO: 1474083 - DNA, 15 bp, Homo sapiens
agctgaacatctcct

SEQ ID NO: 1474084 - DNA, 15 bp, Homo sapiens
aagctgaacatctcc

SEQ ID NO: 1474085 - DNA, 15 bp, Homo sapiens
gaagctgaacatctc

SEQ ID NO: 1474086 - DNA, 15 bp, Homo sapiens
tgaagctgaacatct

SEQ ID NO: 1474087 - DNA, 15 bp, Homo sapiens
atgaagctgaacatc

SEQ ID NO: 1474088 - DNA, 15 bp, Homo sapiens
gatgaagctgaacat

SEQ ID NO: 1474089 - DNA, 15 bp, Homo sapiens
agatgaagctgaaca

SEQ ID NO: 1474090 - DNA, 15 bp, Homo sapiens
aagatgaagctgaac

SEQ ID NO: 1474091 - DNA, 15 bp, Homo sapiens
caagatgaagctgaa

SEQ ID NO: 1474092 - DNA, 15 bp, Homo sapiens
tcaagatgaagctga

SEQ ID NO: 1474093 - DNA, 15 bp, Homo sapiens
ttcaagatgaagctg

SEQ ID NO: 1474094 - DNA, 15 bp, Homo sapiens
cttcaagatgaagct

SEQ ID NO: 1474095 - DNA, 15 bp, Homo sapiens
gcttcaagatgaagc

SEQ ID NO: 1474096 - DNA, 15 bp, Homo sapiens
tgcttcaagatgaag

SEQ ID NO: 1474097 - DNA, 15 bp, Homo sapiens
ctgcttcaagatgaa

SEQ ID NO: 1474098 - DNA, 15 bp, Homo sapiens
gctgcttcaagatga

SEQ ID NO: 1474099 - DNA, 15 bp, Homo sapiens
agctgcttcaagatg

SEQ ID NO: 1474100 - DNA, 15 bp, Homo sapiens
cagctgcttcaagat

SEQ ID NO: 1474101 - DNA, 15 bp, Homo sapiens
tcagctgcttcaaga

SEQ ID NO: 1474102 - DNA, 15 bp, Homo sapiens
ttcagctgcttcaag

SEQ ID NO: 1474103 - DNA, 15 bp, Homo sapiens
gttcagctgcttcaa

SEQ ID NO: 1474104 - DNA, 15 bp, Homo sapiens
tgttcagctgcttca

SEQ ID NO: 1474105 - DNA, 15 bp, Homo sapiens
gtgttcagctgcttc

SEQ ID NO: 1474106 - DNA, 15 bp, Homo sapiens
ggtgttcagctgctt

SEQ ID NO: 1474107 - DNA, 15 bp, Homo sapiens
aggtgttcagctgct

SEQ ID NO: 1474108 - DNA, 15 bp, Homo sapiens
gaggtgttcagctgc

SEQ ID NO: 1474109 - DNA, 15 bp, Homo sapiens
ggaggtgttcagctg

SEQ ID NO: 1474110 - DNA, 15 bp, Homo sapiens
cggaggtgttcagct

SEQ ID NO: 1474111 - DNA, 15 bp, Homo sapiens
tcggaggtgttcagc

SEQ ID NO: 1474112 - DNA, 15 bp, Homo sapiens
ctcggaggtgttcag

SEQ ID NO: 1474113 - DNA, 15 bp, Homo sapiens
tctcggaggtgttca

SEQ ID NO: 1474114 - DNA, 15 bp, Homo sapiens
gtctcggaggtgttc

SEQ ID NO: 1474115 - DNA, 15 bp, Homo sapiens
tgtctcggaggtgtt

SEQ ID NO: 1474116 - DNA, 15 bp, Homo sapiens
gtgtctcggaggtgt

SEQ ID NO: 1474117 - DNA, 15 bp, Homo sapiens
ggtgtctcggaggtg

SEQ ID NO: 1474118 - DNA, 15 bp, Homo sapiens
tggtgtctcggaggt

SEQ ID NO: 1474119 - DNA, 15 bp, Homo sapiens
gtggtgtctcggagg

SEQ ID NO: 1474120 - DNA, 15 bp, Homo sapiens
cgtggtgtctcggag

SEQ ID NO: 1474121 - DNA, 15 bp, Homo sapiens
ccgtggtgtctcgga

SEQ ID NO: 1474122 - DNA, 15 bp, Homo sapiens
tccgtggtgtctcgg

SEQ ID NO: 1474123 - DNA, 15 bp, Homo sapiens
ttccgtggtgtctcg

SEQ ID NO: 1474124 - DNA, 15 bp, Homo sapiens
cttccgtggtgtctc

SEQ ID NO: 1474125 - DNA, 15 bp, Homo sapiens
tcttccgtggtgtct

SEQ ID NO: 1474126 - DNA, 15 bp, Homo sapiens
ctcttccgtggtgtc

SEQ ID NO: 1474127 - DNA, 15 bp, Homo sapiens
cctcttccgtggtgt

SEQ ID NO: 1474128 - DNA, 15 bp, Homo sapiens
ccctcttccgtggtg

SEQ ID NO: 1474129 - DNA, 15 bp, Homo sapiens
gccctcttccgtggt

SEQ ID NO: 1474130 - DNA, 15 bp, Homo sapiens
ggccctcttccgtgg

SEQ ID NO: 1474131 - DNA, 15 bp, Homo sapiens
tggccctcttccgtg

SEQ ID NO: 1474132 - DNA, 15 bp, Homo sapiens
ttggccctcttccgt

SEQ ID NO: 1474133 - DNA, 15 bp, Homo sapiens
gttggccctcttccg

SEQ ID NO: 1474134 - DNA, 15 bp, Homo sapiens
cgttggccctcttcc

SEQ ID NO: 1474135 - DNA, 15 bp, Homo sapiens
acgttggccctcttc

SEQ ID NO: 1474136 - DNA, 15 bp, Homo sapiens
gacgttggccctctt

SEQ ID NO: 1474137 - DNA, 15 bp, Homo sapiens
ggacgttggccctct

SEQ ID NO: 1474138 - DNA, 15 bp, Homo sapiens
tggacgttggccctc

SEQ ID NO: 1474139 - DNA, 15 bp, Homo sapiens
gtggacgttggccct

SEQ ID NO: 1474140 - DNA, 15 bp, Homo sapiens
agtggacgttggccc

SEQ ID NO: 1474141 - DNA, 15 bp, Homo sapiens
aagtggacgttggcc

SEQ ID NO: 1474142 - DNA, 15 bp, Homo sapiens
taagtggacgttggc

SEQ ID NO: 1474143 - DNA, 15 bp, Homo sapiens
ctaagtggacgttgg

SEQ ID NO: 1474144 - DNA, 15 bp, Homo sapiens
gctaagtggacgttg

SEQ ID NO: 1474145 - DNA, 15 bp, Homo sapiens
cgctaagtggacgtt

SEQ ID NO: 1474146 - DNA, 15 bp, Homo sapiens
gcgctaagtggacgt

SEQ ID NO: 1474147 - DNA, 15 bp, Homo sapiens
tgcgctaagtggacg

SEQ ID NO: 1474148 - DNA, 15 bp, Homo sapiens
ctgcgctaagtggac

SEQ ID NO: 1474149 - DNA, 15 bp, Homo sapiens
cctgcgctaagtgga

SEQ ID NO: 1474150 - DNA, 15 bp, Homo sapiens
acctgcgctaagtgg

SEQ ID NO: 1474151 - DNA, 15 bp, Homo sapiens
gacctgcgctaagtg

SEQ ID NO: 1474152 - DNA, 15 bp, Homo sapiens
tgacctgcgctaagt

SEQ ID NO: 1474153 - DNA, 15 bp, Homo sapiens
gtgacctgcgctaag

SEQ ID NO: 1474154 - DNA, 15 bp, Homo sapiens
tgtgacctgcgctaa

SEQ ID NO: 1474155 - DNA, 15 bp, Homo sapiens
atgtgacctgcgcta

SEQ ID NO: 1474156 - DNA, 15 bp, Homo sapiens
tatgtgacctgcgct

SEQ ID NO: 1474157 - DNA, 15 bp, Homo sapiens
ctatgtgacctgcgc

SEQ ID NO: 1474158 - DNA, 15 bp, Homo sapiens
cctatgtgacctgcg

SEQ ID NO: 1474159 - DNA, 15 bp, Homo sapiens
gcctatgtgacctgc

SEQ ID NO: 1474160 - DNA, 15 bp, Homo sapiens
agcctatgtgacctg

SEQ ID NO: 1474161 - DNA, 15 bp, Homo sapiens
gagcctatgtgacct

SEQ ID NO: 1474162 - DNA, 15 bp, Homo sapiens
agagcctatgtgacc

SEQ ID NO: 1474163 - DNA, 15 bp, Homo sapiens
aagagcctatgtgac

SEQ ID NO: 1474164 - DNA, 15 bp, Homo sapiens
aaagagcctatgtga

SEQ ID NO: 1474165 - DNA, 15 bp, Homo sapiens
gaaagagcctatgtg

SEQ ID NO: 1474166 - DNA, 15 bp, Homo sapiens
ggaaagagcctatgt

SEQ ID NO: 1474167 - DNA, 15 bp, Homo sapiens
aggaaagagcctatg

SEQ ID NO: 1474168 - DNA, 15 bp, Homo sapiens
aaggaaagagcctat

SEQ ID NO: 1474169 - DNA, 15 bp, Homo sapiens
aaaggaaagagccta

SEQ ID NO: 1474170 - DNA, 15 bp, Homo sapiens
aaaaggaaagagcct

SEQ ID NO: 1474171 - DNA, 15 bp, Homo sapiens
aaaaaggaaagagcc

SEQ ID NO: 1474172 - DNA, 15 bp, Homo sapiens
aaaaaaggaaagagc

SEQ ID NO: 1474173 - DNA, 15 bp, Homo sapiens
aaaaaaaggaaagag

SEQ ID NO: 1474174 - DNA, 15 bp, Homo sapiens
caaaaaaaggaaaga

SEQ ID NO: 1474175 - DNA, 15 bp, Homo sapiens
acaaaaaaaggaaag

SEQ ID NO: 1474176 - DNA, 15 bp, Homo sapiens
aacaaaaaaaggaaa

SEQ ID NO: 1474177 - DNA, 15 bp, Homo sapiens
aaacaaaaaaaggaa

SEQ ID NO: 1474178 - DNA, 15 bp, Homo sapiens
aaaacaaaaaaagga

SEQ ID NO: 1474179 - DNA, 15 bp, Homo sapiens
aaaaacaaaaaaagg

SEQ ID NO: 1474180 - DNA, 15 bp, Homo sapiens
gaaaaacaaaaaaag

SEQ ID NO: 1474181 - DNA, 15 bp, Homo sapiens
agaaaaacaaaaaaa

SEQ ID NO: 1474182 - DNA, 15 bp, Homo sapiens
tagaaaaacaaaaaa

SEQ ID NO: 1474183 - DNA, 15 bp, Homo sapiens
ttagaaaaacaaaaa

SEQ ID NO: 1474184 - DNA, 15 bp, Homo sapiens
attagaaaaacaaaa

SEQ ID NO: 1474185 - DNA, 15 bp, Homo sapiens
tattagaaaaacaaa

SEQ ID NO: 1474186 - DNA, 15 bp, Homo sapiens
ctattagaaaaacaa

SEQ ID NO: 1474187 - DNA, 15 bp, Homo sapiens
tctattagaaaaaca

SEQ ID NO: 1474188 - DNA, 15 bp, Homo sapiens
gtctattagaaaaac

SEQ ID NO: 1474189 - DNA, 15 bp, Homo sapiens
tgtctattagaaaaa

SEQ ID NO: 1474190 - DNA, 15 bp, Homo sapiens
atgtctattagaaaa

SEQ ID NO: 1474191 - DNA, 15 bp, Homo sapiens
catgtctattagaaa

SEQ ID NO: 1474192 - DNA, 15 bp, Homo sapiens
ccatgtctattagaa

SEQ ID NO: 1474193 - DNA, 15 bp, Homo sapiens
cccatgtctattaga

SEQ ID NO: 1474194 - DNA, 15 bp, Homo sapiens
ccccatgtctattag

SEQ ID NO: 1474195 - DNA, 15 bp, Homo sapiens
accccatgtctatta

SEQ ID NO: 1474196 - DNA, 15 bp, Homo sapiens
gaccccatgtctatt

SEQ ID NO: 1474197 - DNA, 15 bp, Homo sapiens
agaccccatgtctat

SEQ ID NO: 1474198 - DNA, 15 bp, Homo sapiens
gagaccccatgtcta

SEQ ID NO: 1474199 - DNA, 15 bp, Homo sapiens
ggagaccccatgtct

SEQ ID NO: 1474200 - DNA, 15 bp, Homo sapiens
aggagaccccatgtc

SEQ ID NO: 1474201 - DNA, 15 bp, Homo sapiens
aaggagaccccatgt

SEQ ID NO: 1474202 - DNA, 15 bp, Homo sapiens
taaggagaccccatg

SEQ ID NO: 1474203 - DNA, 15 bp, Homo sapiens
gtaaggagaccccat

SEQ ID NO: 1474204 - DNA, 15 bp, Homo sapiens
cgtaaggagacccca

SEQ ID NO: 1474205 - DNA, 15 bp, Homo sapiens
acgtaaggagacccc

SEQ ID NO: 1474206 - DNA, 15 bp, Homo sapiens
aacgtaaggagaccc

SEQ ID NO: 1474207 - DNA, 15 bp, Homo sapiens
caacgtaaggagacc

SEQ ID NO: 1474208 - DNA, 15 bp, Homo sapiens
gcaacgtaaggagac

SEQ ID NO: 1474209 - DNA, 15 bp, Homo sapiens
ggcaacgtaaggaga

SEQ ID NO: 1474210 - DNA, 15 bp, Homo sapiens
gggcaacgtaaggag

SEQ ID NO: 1474211 - DNA, 15 bp, Homo sapiens
tgggcaacgtaagga

SEQ ID NO: 1474212 - DNA, 15 bp, Homo sapiens
ctgggcaacgtaagg

SEQ ID NO: 1474213 - DNA, 15 bp, Homo sapiens
cctgggcaacgtaag

SEQ ID NO: 1474214 - DNA, 15 bp, Homo sapiens
gcctgggcaacgtaa

SEQ ID NO: 1474215 - DNA, 15 bp, Homo sapiens
agcctgggcaacgta

SEQ ID NO: 1474216 - DNA, 15 bp, Homo sapiens
aaccagcctgggcaa

SEQ ID NO: 1474217 - DNA, 15 bp, Homo sapiens
aaaccagcctgggca

SEQ ID NO: 1474218 - DNA, 15 bp, Homo sapiens
gaaaccagcctgggc

SEQ ID NO: 1474219 - DNA, 15 bp, Homo sapiens
cgaaaccagcctggg

SEQ ID NO: 1474220 - DNA, 15 bp, Homo sapiens
agagttcgaaaccag

SEQ ID NO: 1474221 - DNA, 15 bp, Homo sapiens
aagagttcgaaacca

SEQ ID NO: 1474222 - DNA, 15 bp, Homo sapiens
caagagttcgaaacc

SEQ ID NO: 1474223 - DNA, 15 bp, Homo sapiens
ccaagagttcgaaac

SEQ ID NO: 1474224 - DNA, 15 bp, Homo sapiens
cccaagagttcgaaa

SEQ ID NO: 1474225 - DNA, 15 bp, Homo sapiens
gcccaagagttcgaa

SEQ ID NO: 1474226 - DNA, 15 bp, Homo sapiens
agcccaagagttcga

SEQ ID NO: 1474227 - DNA, 15 bp, Homo sapiens
gagcccaagagttcg

SEQ ID NO: 1474228 - DNA, 15 bp, Homo sapiens
tgagcccaagagttc

SEQ ID NO: 1474229 - DNA, 15 bp, Homo sapiens
ttgagcccaagagtt

SEQ ID NO: 1474230 - DNA, 15 bp, Homo sapiens
cttgagcccaagagt

SEQ ID NO: 1474231 - DNA, 15 bp, Homo sapiens
ccttgagcccaagag

SEQ ID NO: 1474232 - DNA, 15 bp, Homo sapiens
cccttgagcccaaga

SEQ ID NO: 1474233 - DNA, 15 bp, Homo sapiens
tcccttgagcccaag

SEQ ID NO: 1474234 - DNA, 15 bp, Homo sapiens
atcccttgagcccaa

SEQ ID NO: 1474235 - DNA, 15 bp, Homo sapiens
agatcccttgagccc

SEQ ID NO: 1474236 - DNA, 15 bp, Homo sapiens
aagatcccttgagcc

SEQ ID NO: 1474237 - DNA, 15 bp, Homo sapiens
gaagatcccttgagc

SEQ ID NO: 1474238 - DNA, 15 bp, Homo sapiens
agaagatcccttgag

SEQ ID NO: 1474239 - DNA, 15 bp, Homo sapiens
gagaagatcccttga

SEQ ID NO: 1474240 - DNA, 15 bp, Homo sapiens
tgagaagatcccttg

SEQ ID NO: 1474241 - DNA, 15 bp, Homo sapiens
gtgagaagatccctt

SEQ ID NO: 1474242 - DNA, 15 bp, Homo sapiens
agtgagaagatccct

SEQ ID NO: 1474243 - DNA, 15 bp, Homo sapiens
aagtgagaagatccc

SEQ ID NO: 1474244 - DNA, 15 bp, Homo sapiens
gaagtgagaagatcc

SEQ ID NO: 1474245 - DNA, 15 bp, Homo sapiens
tgaagtgagaagatc

SEQ ID NO: 1474246 - DNA, 15 bp, Homo sapiens
gtgaagtgagaagat

SEQ ID NO: 1474247 - DNA, 15 bp, Homo sapiens
ggtgaagtgagaaga

SEQ ID NO: 1474248 - DNA, 15 bp, Homo sapiens
gggtgaagtgagaag

SEQ ID NO: 1474249 - DNA, 15 bp, Homo sapiens
agggtgaagtgagaa

SEQ ID NO: 1474250 - DNA, 15 bp, Homo sapiens
gagggtgaagtgaga

SEQ ID NO: 1474251 - DNA, 15 bp, Homo sapiens
ggagggtgaagtgag

SEQ ID NO: 1474252 - DNA, 15 bp, Homo sapiens
gggagggtgaagtga

SEQ ID NO: 1474253 - DNA, 15 bp, Homo sapiens
tgggagggtgaagtg

SEQ ID NO: 1474254 - DNA, 15 bp, Homo sapiens
ttgggagggtgaagt

SEQ ID NO: 1474255 - DNA, 15 bp, Homo sapiens
tttgggagggtgaag

SEQ ID NO: 1474256 - DNA, 15 bp, Homo sapiens
ctttgggagggtgaa

SEQ ID NO: 1474257 - DNA, 15 bp, Homo sapiens
agtggctcacaccta

SEQ ID NO: 1474258 - DNA, 15 bp, Homo sapiens
ttgcagtggctcaca

SEQ ID NO: 1474259 - DNA, 15 bp, Homo sapiens
tttgcagtggctcac

SEQ ID NO: 1474260 - DNA, 15 bp, Homo sapiens
atttgcagtggctca

SEQ ID NO: 1474261 - DNA, 15 bp, Homo sapiens
catttgcagtggctc

SEQ ID NO: 1474262 - DNA, 15 bp, Homo sapiens
ccatttgcagtggct

SEQ ID NO: 1474263 - DNA, 15 bp, Homo sapiens
gccatttgcagtggc

SEQ ID NO: 1474264 - DNA, 15 bp, Homo sapiens
ggccatttgcagtgg

SEQ ID NO: 1474265 - DNA, 15 bp, Homo sapiens
tggccatttgcagtg

SEQ ID NO: 1474266 - DNA, 15 bp, Homo sapiens
ctggccatttgcagt

SEQ ID NO: 1474267 - DNA, 15 bp, Homo sapiens
gctggccatttgcag

SEQ ID NO: 1474268 - DNA, 15 bp, Homo sapiens
tgctggccatttgca

SEQ ID NO: 1474269 - DNA, 15 bp, Homo sapiens
ctgctggccatttgc

SEQ ID NO: 1474270 - DNA, 15 bp, Homo sapiens
cctgctggccatttg

SEQ ID NO: 1474271 - DNA, 15 bp, Homo sapiens
tcctgctggccattt

SEQ ID NO: 1474272 - DNA, 15 bp, Homo sapiens
ttcctgctggccatt

SEQ ID NO: 1474273 - DNA, 15 bp, Homo sapiens
gttcctgctggccat

SEQ ID NO: 1474274 - DNA, 15 bp, Homo sapiens
ggttcctgctggcca

SEQ ID NO: 1474275 - DNA, 15 bp, Homo sapiens
aggttcctgctggcc

SEQ ID NO: 1474276 - DNA, 15 bp, Homo sapiens
caggttcctgctggc

SEQ ID NO: 1474277 - DNA, 15 bp, Homo sapiens
ccaggttcctgctgg

SEQ ID NO: 1474278 - DNA, 15 bp, Homo sapiens
accaggttcctgctg

SEQ ID NO: 1474279 - DNA, 15 bp, Homo sapiens
caccaggttcctgct

SEQ ID NO: 1474280 - DNA, 15 bp, Homo sapiens
ccaccaggttcctgc

SEQ ID NO: 1474281 - DNA, 15 bp, Homo sapiens
tccaccaggttcctg

SEQ ID NO: 1474282 - DNA, 15 bp, Homo sapiens
gtccaccaggttcct

SEQ ID NO: 1474283 - DNA, 15 bp, Homo sapiens
agtccaccaggttcc

SEQ ID NO: 1474284 - DNA, 15 bp, Homo sapiens
aagtccaccaggttc

SEQ ID NO: 1474285 - DNA, 15 bp, Homo sapiens
aaagtccaccaggtt

SEQ ID NO: 1474286 - DNA, 15 bp, Homo sapiens
taaagtccaccaggt

SEQ ID NO: 1474287 - DNA, 15 bp, Homo sapiens
ttaaagtccaccagg

SEQ ID NO: 1474288 - DNA, 15 bp, Homo sapiens
tttaaagtccaccag

SEQ ID NO: 1474289 - DNA, 15 bp, Homo sapiens
gtttaaagtccacca

SEQ ID NO: 1474290 - DNA, 15 bp, Homo sapiens
agtttaaagtccacc

SEQ ID NO: 1474291 - DNA, 15 bp, Homo sapiens
aagtttaaagtccac

SEQ ID NO: 1474292 - DNA, 15 bp, Homo sapiens
aaagtttaaagtcca

SEQ ID NO: 1474293 - DNA, 15 bp, Homo sapiens
caaagtttaaagtcc

SEQ ID NO: 1474294 - DNA, 15 bp, Homo sapiens
ccaaagtttaaagtc

SEQ ID NO: 1474295 - DNA, 15 bp, Homo sapiens
cccaaagtttaaagt

SEQ ID NO: 1474296 - DNA, 15 bp, Homo sapiens
gcccaaagtttaaag

SEQ ID NO: 1474297 - DNA, 15 bp, Homo sapiens
agcccaaagtttaaa

SEQ ID NO: 1474298 - DNA, 15 bp, Homo sapiens
cagcccaaagtttaa

SEQ ID NO: 1474299 - DNA, 15 bp, Homo sapiens
ccagcccaaagttta

SEQ ID NO: 1474300 - DNA, 15 bp, Homo sapiens
tccagcccaaagttt

SEQ ID NO: 1474301 - DNA, 15 bp, Homo sapiens
gtccagcccaaagtt

SEQ ID NO: 1474302 - DNA, 15 bp, Homo sapiens
agtccagcccaaagt

SEQ ID NO: 1474303 - DNA, 15 bp, Homo sapiens
cagtccagcccaaag

SEQ ID NO: 1474304 - DNA, 15 bp, Homo sapiens
ccagtccagcccaaa

SEQ ID NO: 1474305 - DNA, 15 bp, Homo sapiens
cccagtccagcccaa

SEQ ID NO: 1474306 - DNA, 15 bp, Homo sapiens
ccccagtccagccca

SEQ ID NO: 1474307 - DNA, 15 bp, Homo sapiens
tccccagtccagccc

SEQ ID NO: 1474308 - DNA, 15 bp, Homo sapiens
ttccccagtccagcc

SEQ ID NO: 1474309 - DNA, 15 bp, Homo sapiens
gttccccagtccagc

SEQ ID NO: 1474310 - DNA, 15 bp, Homo sapiens
tgttccccagtccag

SEQ ID NO: 1474311 - DNA, 15 bp, Homo sapiens
gtgttccccagtcca

SEQ ID NO: 1474312 - DNA, 15 bp, Homo sapiens
tgtgttccccagtcc

SEQ ID NO: 1474313 - DNA, 15 bp, Homo sapiens
ctgtgttccccagtc

SEQ ID NO: 1474314 - DNA, 15 bp, Homo sapiens
tctgtgttccccagt

SEQ ID NO: 1474315 - DNA, 15 bp, Homo sapiens
ttctgtgttccccag

SEQ ID NO: 1474316 - DNA, 15 bp, Homo sapiens
tttctgtgttcccca

SEQ ID NO: 1474317 - DNA, 15 bp, Homo sapiens
ctttctgtgttcccc

SEQ ID NO: 1474318 - DNA, 15 bp, Homo sapiens
gctttctgtgttccc

SEQ ID NO: 1474319 - DNA, 15 bp, Homo sapiens
tgctttctgtgttcc

SEQ ID NO: 1474320 - DNA, 15 bp, Homo sapiens
atgctttctgtgttc

SEQ ID NO: 1474321 - DNA, 15 bp, Homo sapiens
tatgctttctgtgtt

SEQ ID NO: 1474322 - DNA, 15 bp, Homo sapiens
ctatgctttctgtgt

SEQ ID NO: 1474323 - DNA, 15 bp, Homo sapiens
cctatgctttctgtg

SEQ ID NO: 1474324 - DNA, 15 bp, Homo sapiens
ccctatgctttctgt

SEQ ID NO: 1474325 - DNA, 15 bp, Homo sapiens
tccctatgctttctg

SEQ ID NO: 1474326 - DNA, 15 bp, Homo sapiens
ctccctatgctttct

SEQ ID NO: 1474327 - DNA, 15 bp, Homo sapiens
tctccctatgctttc

SEQ ID NO: 1474328 - DNA, 15 bp, Homo sapiens
atctccctatgcttt

SEQ ID NO: 1474329 - DNA, 15 bp, Homo sapiens
catctccctatgctt

SEQ ID NO: 1474330 - DNA, 15 bp, Homo sapiens
tcatctccctatgct

SEQ ID NO: 1474331 - DNA, 15 bp, Homo sapiens
gtcatctccctatgc

SEQ ID NO: 1474332 - DNA, 15 bp, Homo sapiens
cgtcatctccctatg

SEQ ID NO: 1474333 - DNA, 15 bp, Homo sapiens
ccgtcatctccctat

SEQ ID NO: 1474334 - DNA, 15 bp, Homo sapiens
accgtcatctcccta

SEQ ID NO: 1474335 - DNA, 15 bp, Homo sapiens
caccgtcatctccct

SEQ ID NO: 1474336 - DNA, 15 bp, Homo sapiens
ccaccgtcatctccc

SEQ ID NO: 1474337 - DNA, 15 bp, Homo sapiens
accaccgtcatctcc

SEQ ID NO: 1474338 - DNA, 15 bp, Homo sapiens
gaccaccgtcatctc

SEQ ID NO: 1474339 - DNA, 15 bp, Homo sapiens
tgaccaccgtcatct

SEQ ID NO: 1474340 - DNA, 15 bp, Homo sapiens
gtgaccaccgtcatc

SEQ ID NO: 1474341 - DNA, 15 bp, Homo sapiens
tgtgaccaccgtcat

SEQ ID NO: 1474342 - DNA, 15 bp, Homo sapiens
ctgtgaccaccgtca

SEQ ID NO: 1474343 - DNA, 15 bp, Homo sapiens
tctgtgaccaccgtc

SEQ ID NO: 1474344 - DNA, 15 bp, Homo sapiens
ctctgtgaccaccgt

SEQ ID NO: 1474345 - DNA, 15 bp, Homo sapiens
cctctgtgaccaccg

SEQ ID NO: 1474346 - DNA, 15 bp, Homo sapiens
ccctctgtgaccacc

SEQ ID NO: 1474347 - DNA, 15 bp, Homo sapiens
cccctctgtgaccac

SEQ ID NO: 1474348 - DNA, 15 bp, Homo sapiens
ccccctctgtgacca

SEQ ID NO: 1474349 - DNA, 15 bp, Homo sapiens
tccccctctgtgacc

SEQ ID NO: 1474350 - DNA, 15 bp, Homo sapiens
gtccccctctgtgac

SEQ ID NO: 1474351 - DNA, 15 bp, Homo sapiens
tgtccccctctgtga

SEQ ID NO: 1474352 - DNA, 15 bp, Homo sapiens
ctgtccccctctgtg

SEQ ID NO: 1474353 - DNA, 15 bp, Homo sapiens
actgtccccctctgt

SEQ ID NO: 1474354 - DNA, 15 bp, Homo sapiens
gactgtccccctctg

SEQ ID NO: 1474355 - DNA, 15 bp, Homo sapiens
tgactgtccccctct

SEQ ID NO: 1474356 - DNA, 15 bp, Homo sapiens
ctgactgtccccctc

SEQ ID NO: 1474357 - DNA, 15 bp, Homo sapiens
cctgactgtccccct

SEQ ID NO: 1474358 - DNA, 15 bp, Homo sapiens
gcctgactgtccccc

SEQ ID NO: 1474359 - DNA, 15 bp, Homo sapiens
agcctgactgtcccc

SEQ ID NO: 1474360 - DNA, 15 bp, Homo sapiens
cagcctgactgtccc

SEQ ID NO: 1474361 - DNA, 15 bp, Homo sapiens
ccagcctgactgtcc

SEQ ID NO: 1474362 - DNA, 15 bp, Homo sapiens
gccagcctgactgtc

SEQ ID NO: 1474363 - DNA, 15 bp, Homo sapiens
ggccagcctgactgt

SEQ ID NO: 1474364 - DNA, 15 bp, Homo sapiens
tggccagcctgactg

SEQ ID NO: 1474365 - DNA, 15 bp, Homo sapiens
ctggccagcctgact

SEQ ID NO: 1474366 - DNA, 15 bp, Homo sapiens
cctggccagcctgac

SEQ ID NO: 1474367 - DNA, 15 bp, Homo sapiens
ccctggccagcctga

SEQ ID NO: 1474368 - DNA, 15 bp, Homo sapiens
tccctggccagcctg

SEQ ID NO: 1474369 - DNA, 15 bp, Homo sapiens
atccctggccagcct

SEQ ID NO: 1474370 - DNA, 15 bp, Homo sapiens
gatccctggccagcc

SEQ ID NO: 1474371 - DNA, 15 bp, Homo sapiens
tgatccctggccagc

SEQ ID NO: 1474372 - DNA, 15 bp, Homo sapiens
ctgatccctggccag

SEQ ID NO: 1474373 - DNA, 15 bp, Homo sapiens
tctgatccctggcca

SEQ ID NO: 1474374 - DNA, 15 bp, Homo sapiens
atctgatccctggcc

SEQ ID NO: 1474375 - DNA, 15 bp, Homo sapiens
gatctgatccctggc

SEQ ID NO: 1474376 - DNA, 15 bp, Homo sapiens
agatctgatccctgg

SEQ ID NO: 1474377 - DNA, 15 bp, Homo sapiens
gagatctgatccctg

SEQ ID NO: 1474378 - DNA, 15 bp, Homo sapiens
ggagatctgatccct

SEQ ID NO: 1474379 - DNA, 15 bp, Homo sapiens
tggagatctgatccc

SEQ ID NO: 1474380 - DNA, 15 bp, Homo sapiens
ctggagatctgatcc

SEQ ID NO: 1474381 - DNA, 15 bp, Homo sapiens
cctggagatctgatc

SEQ ID NO: 1474382 - DNA, 15 bp, Homo sapiens
acctggagatctgat

SEQ ID NO: 1474383 - DNA, 15 bp, Homo sapiens
cacctggagatctga

SEQ ID NO: 1474384 - DNA, 15 bp, Homo sapiens
tcacctggagatctg

SEQ ID NO: 1474385 - DNA, 15 bp, Homo sapiens
ttcacctggagatct

SEQ ID NO: 1474386 - DNA, 15 bp, Homo sapiens
cttcacctggagatc

SEQ ID NO: 1474387 - DNA, 15 bp, Homo sapiens
gcttcacctggagat

SEQ ID NO: 1474388 - DNA, 15 bp, Homo sapiens
ggcttcacctggaga

SEQ ID NO: 1474389 - DNA, 15 bp, Homo sapiens
gggcttcacctggag

SEQ ID NO: 1474390 - DNA, 15 bp, Homo sapiens
tgggcttcacctgga

SEQ ID NO: 1474391 - DNA, 15 bp, Homo sapiens
ctgggcttcacctgg

SEQ ID NO: 1474392 - DNA, 15 bp, Homo sapiens
cctgggcttcacctg

SEQ ID NO: 1474393 - DNA, 15 bp, Homo sapiens
ccctgggcttcacct

SEQ ID NO: 1474394 - DNA, 15 bp, Homo sapiens
accctgggcttcacc

SEQ ID NO: 1474395 - DNA, 15 bp, Homo sapiens
gaccctgggcttcac

SEQ ID NO: 1474396 - DNA, 15 bp, Homo sapiens
agaccctgggcttca

SEQ ID NO: 1474397 - DNA, 15 bp, Homo sapiens
cagaccctgggcttc

SEQ ID NO: 1474398 - DNA, 15 bp, Homo sapiens
ccagaccctgggctt

SEQ ID NO: 1474399 - DNA, 15 bp, Homo sapiens
gccagaccctgggct

SEQ ID NO: 1474400 - DNA, 15 bp, Homo sapiens
cgccagaccctgggc

SEQ ID NO: 1474401 - DNA, 15 bp, Homo sapiens
ccgccagaccctggg

SEQ ID NO: 1474402 - DNA, 15 bp, Homo sapiens
cccgccagaccctgg

SEQ ID NO: 1474403 - DNA, 15 bp, Homo sapiens
ccccgccagaccctg

SEQ ID NO: 1474404 - DNA, 15 bp, Homo sapiens
cccccgccagaccct

SEQ ID NO: 1474405 - DNA, 15 bp, Homo sapiens
acccccgccagaccc

SEQ ID NO: 1474406 - DNA, 15 bp, Homo sapiens
gacccccgccagacc

SEQ ID NO: 1474407 - DNA, 15 bp, Homo sapiens
ggacccccgccagac

SEQ ID NO: 1474408 - DNA, 15 bp, Homo sapiens
tggacccccgccaga

SEQ ID NO: 1474409 - DNA, 15 bp, Homo sapiens
ctggacccccgccag

SEQ ID NO: 1474410 - DNA, 15 bp, Homo sapiens
cctggacccccgcca

SEQ ID NO: 1474411 - DNA, 15 bp, Homo sapiens
acctggacccccgcc

SEQ ID NO: 1474412 - DNA, 15 bp, Homo sapiens
cacctggacccccgc

SEQ ID NO: 1474413 - DNA, 15 bp, Homo sapiens
ccacctggacccccg

SEQ ID NO: 1474414 - DNA, 15 bp, Homo sapiens
gccacctggaccccc

SEQ ID NO: 1474415 - DNA, 15 bp, Homo sapiens
ggccacctggacccc

SEQ ID NO: 1474416 - DNA, 15 bp, Homo sapiens
tggccacctggaccc

SEQ ID NO: 1474417 - DNA, 15 bp, Homo sapiens
gtggccacctggacc

SEQ ID NO: 1474418 - DNA, 15 bp, Homo sapiens
agtggccacctggac

SEQ ID NO: 1474419 - DNA, 15 bp, Homo sapiens
aagtggccacctgga

SEQ ID NO: 1474420 - DNA, 15 bp, Homo sapiens
taagtggccacctgg

SEQ ID NO: 1474421 - DNA, 15 bp, Homo sapiens
ataagtggccacctg

SEQ ID NO: 1474422 - DNA, 15 bp, Homo sapiens
cataagtggccacct

SEQ ID NO: 1474423 - DNA, 15 bp, Homo sapiens
gcataagtggccacc

SEQ ID NO: 1474424 - DNA, 15 bp, Homo sapiens
agcataagtggccac

SEQ ID NO: 1474425 - DNA, 15 bp, Homo sapiens
tagcataagtggcca

SEQ ID NO: 1474426 - DNA, 15 bp, Homo sapiens
atagcataagtggcc

SEQ ID NO: 1474427 - DNA, 15 bp, Homo sapiens
gatagcataagtggc

SEQ ID NO: 1474428 - DNA, 15 bp, Homo sapiens
agatagcataagtgg

SEQ ID NO: 1474429 - DNA, 15 bp, Homo sapiens
aagatagcataagtg

SEQ ID NO: 1474430 - DNA, 15 bp, Homo sapiens
aaagatagcataagt

SEQ ID NO: 1474431 - DNA, 15 bp, Homo sapiens
caaagatagcataag

SEQ ID NO: 1474432 - DNA, 15 bp, Homo sapiens
tcaaagatagcataa

SEQ ID NO: 1474433 - DNA, 15 bp, Homo sapiens
ctcaaagatagcata

SEQ ID NO: 1474434 - DNA, 15 bp, Homo sapiens
tctcaaagatagcat

SEQ ID NO: 1474435 - DNA, 15 bp, Homo sapiens
atctcaaagatagca

SEQ ID NO: 1474436 - DNA, 15 bp, Homo sapiens
tatctcaaagatagc

SEQ ID NO: 1474437 - DNA, 15 bp, Homo sapiens
ctatctcaaagatag

SEQ ID NO: 1474438 - DNA, 15 bp, Homo sapiens
cctatctcaaagata

SEQ ID NO: 1474439 - DNA, 15 bp, Homo sapiens
ccctatctcaaagat

SEQ ID NO: 1474440 - DNA, 15 bp, Homo sapiens
tccctatctcaaaga

SEQ ID NO: 1474441 - DNA, 15 bp, Homo sapiens
gtccctatctcaaag

SEQ ID NO: 1474442 - DNA, 15 bp, Homo sapiens
tgtccctatctcaaa

SEQ ID NO: 1474443 - DNA, 15 bp, Homo sapiens
ctgtccctatctcaa

SEQ ID NO: 1474444 - DNA, 15 bp, Homo sapiens
tctgtccctatctca

SEQ ID NO: 1474445 - DNA, 15 bp, Homo sapiens
ttctgtccctatctc

SEQ ID NO: 1474446 - DNA, 15 bp, Homo sapiens
attctgtccctatct

SEQ ID NO: 1474447 - DNA, 15 bp, Homo sapiens
tattctgtccctatc

SEQ ID NO: 1474448 - DNA, 15 bp, Homo sapiens
ctattctgtccctat

SEQ ID NO: 1474449 - DNA, 15 bp, Homo sapiens
cctattctgtcccta

SEQ ID NO: 1474450 - DNA, 15 bp, Homo sapiens
gcctattctgtccct

SEQ ID NO: 1474451 - DNA, 15 bp, Homo sapiens
agcctattctgtccc

SEQ ID NO: 1474452 - DNA, 15 bp, Homo sapiens
gagcctattctgtcc

SEQ ID NO: 1474453 - DNA, 15 bp, Homo sapiens
tgagcctattctgtc

SEQ ID NO: 1474454 - DNA, 15 bp, Homo sapiens
ctgagcctattctgt

SEQ ID NO: 1474455 - DNA, 15 bp, Homo sapiens
cctgagcctattctg

SEQ ID NO: 1474456 - DNA, 15 bp, Homo sapiens
ccctgagcctattct

SEQ ID NO: 1474457 - DNA, 15 bp, Homo sapiens
cccctgagcctattc

SEQ ID NO: 1474458 - DNA, 15 bp, Homo sapiens
tcccctgagcctatt

SEQ ID NO: 1474459 - DNA, 15 bp, Homo sapiens
gtcccctgagcctat

SEQ ID NO: 1474460 - DNA, 15 bp, Homo sapiens
tgtcccctgagccta

SEQ ID NO: 1474461 - DNA, 15 bp, Homo sapiens
ctgtcccctgagcct

SEQ ID NO: 1474462 - DNA, 15 bp, Homo sapiens
gctgtcccctgagcc

SEQ ID NO: 1474463 - DNA, 15 bp, Homo sapiens
ggctgtcccctgagc

SEQ ID NO: 1474464 - DNA, 15 bp, Homo sapiens
gggctgtcccctgag

SEQ ID NO: 1474465 - DNA, 15 bp, Homo sapiens
ggggctgtcccctga

SEQ ID NO: 1474466 - DNA, 15 bp, Homo sapiens
tggggctgtcccctg

SEQ ID NO: 1474467 - DNA, 15 bp, Homo sapiens
gtggggctgtcccct

SEQ ID NO: 1474468 - DNA, 15 bp, Homo sapiens
ggtggggctgtcccc

SEQ ID NO: 1474469 - DNA, 15 bp, Homo sapiens
gggtggggctgtccc

SEQ ID NO: 1474470 - DNA, 15 bp, Homo sapiens
agggtggggctgtcc

SEQ ID NO: 1474471 - DNA, 15 bp, Homo sapiens
aagggtggggctgtc

SEQ ID NO: 1474472 - DNA, 15 bp, Homo sapiens
caagggtggggctgt

SEQ ID NO: 1474473 - DNA, 15 bp, Homo sapiens
tcaagggtggggctg

SEQ ID NO: 1474474 - DNA, 15 bp, Homo sapiens
ctcaagggtggggct

SEQ ID NO: 1474475 - DNA, 15 bp, Homo sapiens
actcaagggtggggc

SEQ ID NO: 1474476 - DNA, 15 bp, Homo sapiens
aactcaagggtgggg

SEQ ID NO: 1474477 - DNA, 15 bp, Homo sapiens
gaactcaagggtggg

SEQ ID NO: 1474478 - DNA, 15 bp, Homo sapiens
ggaactcaagggtgg

SEQ ID NO: 1474479 - DNA, 15 bp, Homo sapiens
tggaactcaagggtg

SEQ ID NO: 1474480 - DNA, 15 bp, Homo sapiens
ctggaactcaagggt

SEQ ID NO: 1474481 - DNA, 15 bp, Homo sapiens
tctggaactcaaggg

SEQ ID NO: 1474482 - DNA, 15 bp, Homo sapiens
gtctggaactcaagg

SEQ ID NO: 1474483 - DNA, 15 bp, Homo sapiens
ggtctggaactcaag

SEQ ID NO: 1474484 - DNA, 15 bp, Homo sapiens
aggtctggaactcaa

SEQ ID NO: 1474485 - DNA, 15 bp, Homo sapiens
gaggtctggaactca

SEQ ID NO: 1474486 - DNA, 15 bp, Homo sapiens
tgaggtctggaactc

SEQ ID NO: 1474487 - DNA, 15 bp, Homo sapiens
ctgaggtctggaact

SEQ ID NO: 1474488 - DNA, 15 bp, Homo sapiens
tctgaggtctggaac

SEQ ID NO: 1474489 - DNA, 15 bp, Homo sapiens
ctctgaggtctggaa

SEQ ID NO: 1474490 - DNA, 15 bp, Homo sapiens
tctctgaggtctgga

SEQ ID NO: 1474491 - DNA, 15 bp, Homo sapiens
gtctctgaggtctgg

SEQ ID NO: 1474492 - DNA, 15 bp, Homo sapiens
agtctctgaggtctg

SEQ ID NO: 1474493 - DNA, 15 bp, Homo sapiens
cagtctctgaggtct

SEQ ID NO: 1474494 - DNA, 15 bp, Homo sapiens
acagtctctgaggtc

SEQ ID NO: 1474495 - DNA, 15 bp, Homo sapiens
gacagtctctgaggt

SEQ ID NO: 1474496 - DNA, 15 bp, Homo sapiens
agacagtctctgagg

SEQ ID NO: 1474497 - DNA, 15 bp, Homo sapiens
aagacagtctctgag

SEQ ID NO: 1474498 - DNA, 15 bp, Homo sapiens
gaagacagtctctga

SEQ ID NO: 1474499 - DNA, 15 bp, Homo sapiens
ggaagacagtctctg

SEQ ID NO: 1474500 - DNA, 15 bp, Homo sapiens
aggaagacagtctct

SEQ ID NO: 1474501 - DNA, 15 bp, Homo sapiens
aaggaagacagtctc

SEQ ID NO: 1474502 - DNA, 15 bp, Homo sapiens
gaaggaagacagtct

SEQ ID NO: 1474503 - DNA, 15 bp, Homo sapiens
ggaaggaagacagtc

SEQ ID NO: 1474504 - DNA, 15 bp, Homo sapiens
tggaaggaagacagt

SEQ ID NO: 1474505 - DNA, 15 bp, Homo sapiens
gtggaaggaagacag

SEQ ID NO: 1474506 - DNA, 15 bp, Homo sapiens
ggtggaaggaagaca

SEQ ID NO: 1474507 - DNA, 15 bp, Homo sapiens
tggtggaaggaagac

SEQ ID NO: 1474508 - DNA, 15 bp, Homo sapiens
ctggtggaaggaaga

SEQ ID NO: 1474509 - DNA, 15 bp, Homo sapiens
cctggtggaaggaag

SEQ ID NO: 1474510 - DNA, 15 bp, Homo sapiens
gcctggtggaaggaa

SEQ ID NO: 1474511 - DNA, 15 bp, Homo sapiens
ggcctggtggaagga

SEQ ID NO: 1474512 - DNA, 15 bp, Homo sapiens
gggcctggtggaagg

SEQ ID NO: 1474513 - DNA, 15 bp, Homo sapiens
ggggcctggtggaag

SEQ ID NO: 1474514 - DNA, 15 bp, Homo sapiens
tggggcctggtggaa

SEQ ID NO: 1474515 - DNA, 15 bp, Homo sapiens
atggggcctggtgga

SEQ ID NO: 1474516 - DNA, 15 bp, Homo sapiens
catggggcctggtgg

SEQ ID NO: 1474517 - DNA, 15 bp, Homo sapiens
ccatggggcctggtg

SEQ ID NO: 1474518 - DNA, 15 bp, Homo sapiens
cccatggggcctggt

SEQ ID NO: 1474519 - DNA, 15 bp, Homo sapiens
gcccatggggcctgg

SEQ ID NO: 1474520 - DNA, 15 bp, Homo sapiens
tgcccatggggcctg

SEQ ID NO: 1474521 - DNA, 15 bp, Homo sapiens
ctgcccatggggcct

SEQ ID NO: 1474522 - DNA, 15 bp, Homo sapiens
gctgcccatggggcc

SEQ ID NO: 1474523 - DNA, 15 bp, Homo sapiens
ggctgcccatggggc

SEQ ID NO: 1474524 - DNA, 15 bp, Homo sapiens
tggctgcccatgggg

SEQ ID NO: 1474525 - DNA, 15 bp, Homo sapiens
gtggctgcccatggg

SEQ ID NO: 1474526 - DNA, 15 bp, Homo sapiens
agtggctgcccatgg

SEQ ID NO: 1474527 - DNA, 15 bp, Homo sapiens
gagtggctgcccatg

SEQ ID NO: 1474528 - DNA, 15 bp, Homo sapiens
tgagtggctgcccat

SEQ ID NO: 1474529 - DNA, 15 bp, Homo sapiens
gtgagtggctgccca

SEQ ID NO: 1474530 - DNA, 15 bp, Homo sapiens
ggtgagtggctgccc

SEQ ID NO: 1474531 - DNA, 15 bp, Homo sapiens
gggtgagtggctgcc

SEQ ID NO: 1474532 - DNA, 15 bp, Homo sapiens
tgggtgagtggctgc

SEQ ID NO: 1474533 - DNA, 15 bp, Homo sapiens
ctgggtgagtggctg

SEQ ID NO: 1474534 - DNA, 15 bp, Homo sapiens
gctgggtgagtggct

SEQ ID NO: 1474535 - DNA, 15 bp, Homo sapiens
agctgggtgagtggc

SEQ ID NO: 1474536 - DNA, 15 bp, Homo sapiens
cagctgggtgagtgg

SEQ ID NO: 1474537 - DNA, 15 bp, Homo sapiens
ccagctgggtgagtg

SEQ ID NO: 1474538 - DNA, 15 bp, Homo sapiens
cccagctgggtgagt

SEQ ID NO: 1474539 - DNA, 15 bp, Homo sapiens
ccccagctgggtgag

SEQ ID NO: 1474540 - DNA, 15 bp, Homo sapiens
gccccagctgggtga

SEQ ID NO: 1474541 - DNA, 15 bp, Homo sapiens
tgccccagctgggtg

SEQ ID NO: 1474542 - DNA, 15 bp, Homo sapiens
ctgccccagctgggt

SEQ ID NO: 1474543 - DNA, 15 bp, Homo sapiens
cctgccccagctggg

SEQ ID NO: 1474544 - DNA, 15 bp, Homo sapiens
acctgccccagctgg

SEQ ID NO: 1474545 - DNA, 15 bp, Homo sapiens
tacctgccccagctg

SEQ ID NO: 1474546 - DNA, 15 bp, Homo sapiens
gtacctgccccagct

SEQ ID NO: 1474547 - DNA, 15 bp, Homo sapiens
agtacctgccccagc

SEQ ID NO: 1474548 - DNA, 15 bp, Homo sapiens
aagtacctgccccag

SEQ ID NO: 1474549 - DNA, 15 bp, Homo sapiens
gaagtacctgcccca

SEQ ID NO: 1474550 - DNA, 15 bp, Homo sapiens
agaagtacctgcccc

SEQ ID NO: 1474551 - DNA, 15 bp, Homo sapiens
cagaagtacctgccc

SEQ ID NO: 1474552 - DNA, 15 bp, Homo sapiens
gcagaagtacctgcc

SEQ ID NO: 1474553 - DNA, 15 bp, Homo sapiens
ggcagaagtacctgc

SEQ ID NO: 1474554 - DNA, 15 bp, Homo sapiens
cggcagaagtacctg

SEQ ID NO: 1474555 - DNA, 15 bp, Homo sapiens
gcggcagaagtacct

SEQ ID NO: 1474556 - DNA, 15 bp, Homo sapiens
agcggcagaagtacc

SEQ ID NO: 1474557 - DNA, 15 bp, Homo sapiens
cagcggcagaagtac

SEQ ID NO: 1474558 - DNA, 15 bp, Homo sapiens
acagcggcagaagta

SEQ ID NO: 1474559 - DNA, 15 bp, Homo sapiens
aacagcggcagaagt

SEQ ID NO: 1474560 - DNA, 15 bp, Homo sapiens
gaacagcggcagaag

SEQ ID NO: 1474561 - DNA, 15 bp, Homo sapiens
ggaacagcggcagaa

SEQ ID NO: 1474562 - DNA, 15 bp, Homo sapiens
aggaacagcggcaga

SEQ ID NO: 1474563 - DNA, 15 bp, Homo sapiens
gaggaacagcggcag

SEQ ID NO: 1474564 - DNA, 15 bp, Homo sapiens
cgaggaacagcggca

SEQ ID NO: 1474565 - DNA, 15 bp, Homo sapiens
gcgaggaacagcggc

SEQ ID NO: 1474566 - DNA, 15 bp, Homo sapiens
tggctacaggtcggc

SEQ ID NO: 1474567 - DNA, 15 bp, Homo sapiens
gtggctacaggtcgg

SEQ ID NO: 1474568 - DNA, 15 bp, Homo sapiens
agtggctacaggtcg

SEQ ID NO: 1474569 - DNA, 15 bp, Homo sapiens
cagtggctacaggtc

SEQ ID NO: 1474570 - DNA, 15 bp, Homo sapiens
acagtggctacaggt

SEQ ID NO: 1474571 - DNA, 15 bp, Homo sapiens
gacagtggctacagg

SEQ ID NO: 1474572 - DNA, 15 bp, Homo sapiens
ggacagtggctacag

SEQ ID NO: 1474573 - DNA, 15 bp, Homo sapiens
tggacagtggctaca

SEQ ID NO: 1474574 - DNA, 15 bp, Homo sapiens
gtggacagtggctac

SEQ ID NO: 1474575 - DNA, 15 bp, Homo sapiens
ggtggacagtggcta

SEQ ID NO: 1474576 - DNA, 15 bp, Homo sapiens
gggtggacagtggct

SEQ ID NO: 1474577 - DNA, 15 bp, Homo sapiens
cgggtggacagtggc

SEQ ID NO: 1474578 - DNA, 15 bp, Homo sapiens
gcgggtggacagtgg

SEQ ID NO: 1474579 - DNA, 15 bp, Homo sapiens
agcgggtggacagtg

SEQ ID NO: 1474580 - DNA, 15 bp, Homo sapiens
gagcgggtggacagt

SEQ ID NO: 1474581 - DNA, 15 bp, Homo sapiens
ggagcgggtggacag

SEQ ID NO: 1474582 - DNA, 15 bp, Homo sapiens
tggagcgggtggaca

SEQ ID NO: 1474583 - DNA, 15 bp, Homo sapiens
ctggagcgggtggac

SEQ ID NO: 1474584 - DNA, 15 bp, Homo sapiens
gctggagcgggtgga

SEQ ID NO: 1474585 - DNA, 15 bp, Homo sapiens
agctggagcgggtgg

SEQ ID NO: 1474586 - DNA, 15 bp, Homo sapiens
gagctggagcgggtg

SEQ ID NO: 1474587 - DNA, 15 bp, Homo sapiens
agagctggagcgggt

SEQ ID NO: 1474588 - DNA, 15 bp, Homo sapiens
gagagctggagcggg

SEQ ID NO: 1474589 - DNA, 15 bp, Homo sapiens
cgagagctggagcgg

SEQ ID NO: 1474590 - DNA, 15 bp, Homo sapiens
ccgagagctggagcg

SEQ ID NO: 1474591 - DNA, 15 bp, Homo sapiens
cccgagagctggagc

SEQ ID NO: 1474592 - DNA, 15 bp, Homo sapiens
gcccgagagctggag

SEQ ID NO: 1474593 - DNA, 15 bp, Homo sapiens
ggcccgagagctgga

SEQ ID NO: 1474594 - DNA, 15 bp, Homo sapiens
tggcccgagagctgg

SEQ ID NO: 1474595 - DNA, 15 bp, Homo sapiens
ctggcccgagagctg

SEQ ID NO: 1474596 - DNA, 15 bp, Homo sapiens
cctggcccgagagct

SEQ ID NO: 1474597 - DNA, 15 bp, Homo sapiens
tcctggcccgagagc

SEQ ID NO: 1474598 - DNA, 15 bp, Homo sapiens
ctcctggcccgagag

SEQ ID NO: 1474599 - DNA, 15 bp, Homo sapiens
gctcctggcccgaga

SEQ ID NO: 1474600 - DNA, 15 bp, Homo sapiens
ggctcctggcccgag

SEQ ID NO: 1474601 - DNA, 15 bp, Homo sapiens
gggctcctggcccga

SEQ ID NO: 1474602 - DNA, 15 bp, Homo sapiens
tgggctcctggcccg

SEQ ID NO: 1474603 - DNA, 15 bp, Homo sapiens
atgggctcctggccc

SEQ ID NO: 1474604 - DNA, 15 bp, Homo sapiens
tatgggctcctggcc

SEQ ID NO: 1474605 - DNA, 15 bp, Homo sapiens
ctatgggctcctggc

SEQ ID NO: 1474606 - DNA, 15 bp, Homo sapiens
cctatgggctcctgg

SEQ ID NO: 1474607 - DNA, 15 bp, Homo sapiens
gcctatgggctcctg

SEQ ID NO: 1474608 - DNA, 15 bp, Homo sapiens
ggcctatgggctcct

SEQ ID NO: 1474609 - DNA, 15 bp, Homo sapiens
tggcctatgggctcc

SEQ ID NO: 1474610 - DNA, 15 bp, Homo sapiens
gtggcctatgggctc

SEQ ID NO: 1474611 - DNA, 15 bp, Homo sapiens
tgtggcctatgggct

SEQ ID NO: 1474612 - DNA, 15 bp, Homo sapiens
ctgtggcctatgggc

SEQ ID NO: 1474613 - DNA, 15 bp, Homo sapiens
tctgtggcctatggg

SEQ ID NO: 1474614 - DNA, 15 bp, Homo sapiens
gtctgtggcctatgg

SEQ ID NO: 1474615 - DNA, 15 bp, Homo sapiens
cgtctgtggcctatg

SEQ ID NO: 1474616 - DNA, 15 bp, Homo sapiens
tcgtctgtggcctat

SEQ ID NO: 1474617 - DNA, 15 bp, Homo sapiens
ttcgtctgtggccta

SEQ ID NO: 1474618 - DNA, 15 bp, Homo sapiens
tttcgtctgtggcct

SEQ ID NO: 1474619 - DNA, 15 bp, Homo sapiens
gtttcgtctgtggcc

SEQ ID NO: 1474620 - DNA, 15 bp, Homo sapiens
ggtttcgtctgtggc

SEQ ID NO: 1474621 - DNA, 15 bp, Homo sapiens
gggtttcgtctgtgg

SEQ ID NO: 1474622 - DNA, 15 bp, Homo sapiens
ggggtttcgtctgtg

SEQ ID NO: 1474623 - DNA, 15 bp, Homo sapiens
tggggtttcgtctgt

SEQ ID NO: 1474624 - DNA, 15 bp, Homo sapiens
ctggggtttcgtctg

SEQ ID NO: 1474625 - DNA, 15 bp, Homo sapiens
gctggggtttcgtct

SEQ ID NO: 1474626 - DNA, 15 bp, Homo sapiens
tgctggggtttcgtc

SEQ ID NO: 1474627 - DNA, 15 bp, Homo sapiens
gtgctggggtttcgt

SEQ ID NO: 1474628 - DNA, 15 bp, Homo sapiens
tgtgctggggtttcg

SEQ ID NO: 1474629 - DNA, 15 bp, Homo sapiens
ctgtgctggggtttc

SEQ ID NO: 1474630 - DNA, 15 bp, Homo sapiens
gctgtgctggggttt

SEQ ID NO: 1474631 - DNA, 15 bp, Homo sapiens
ggctgtgctggggtt

SEQ ID NO: 1474632 - DNA, 15 bp, Homo sapiens
tggctgtgctggggt

SEQ ID NO: 1474633 - DNA, 15 bp, Homo sapiens
atggctgtgctgggg

SEQ ID NO: 1474634 - DNA, 15 bp, Homo sapiens
tatggctgtgctggg

SEQ ID NO: 1474635 - DNA, 15 bp, Homo sapiens
atatggctgtgctgg

SEQ ID NO: 1474636 - DNA, 15 bp, Homo sapiens
gatatggctgtgctg

SEQ ID NO: 1474637 - DNA, 15 bp, Homo sapiens
ggatatggctgtgct

SEQ ID NO: 1474638 - DNA, 15 bp, Homo sapiens
aggatatggctgtgc

SEQ ID NO: 1474639 - DNA, 15 bp, Homo sapiens
caggatatggctgtg

SEQ ID NO: 1474640 - DNA, 15 bp, Homo sapiens
ccaggatatggctgt

SEQ ID NO: 1474641 - DNA, 15 bp, Homo sapiens
accaggatatggctg

SEQ ID NO: 1474642 - DNA, 15 bp, Homo sapiens
caccaggatatggct

SEQ ID NO: 1474643 - DNA, 15 bp, Homo sapiens
ccaccaggatatggc

SEQ ID NO: 1474644 - DNA, 15 bp, Homo sapiens
accaccaggatatgg

SEQ ID NO: 1474645 - DNA, 15 bp, Homo sapiens
taccaccaggatatg

SEQ ID NO: 1474646 - DNA, 15 bp, Homo sapiens
ctaccaccaggatat

SEQ ID NO: 1474647 - DNA, 15 bp, Homo sapiens
actaccaccaggata

SEQ ID NO: 1474648 - DNA, 15 bp, Homo sapiens
tactaccaccaggat

SEQ ID NO: 1474649 - DNA, 15 bp, Homo sapiens
ctactaccaccagga

SEQ ID NO: 1474650 - DNA, 15 bp, Homo sapiens
cctactaccaccagg

SEQ ID NO: 1474651 - DNA, 15 bp, Homo sapiens
tcctactaccaccag

SEQ ID NO: 1474652 - DNA, 15 bp, Homo sapiens
ctcctactaccacca

SEQ ID NO: 1474653 - DNA, 15 bp, Homo sapiens
cctcctactaccacc

SEQ ID NO: 1474654 - DNA, 15 bp, Homo sapiens
ccctcctactaccac

SEQ ID NO: 1474655 - DNA, 15 bp, Homo sapiens
cccctcctactacca

SEQ ID NO: 1474656 - DNA, 15 bp, Homo sapiens
tcccctcctactacc

SEQ ID NO: 1474657 - DNA, 15 bp, Homo sapiens
ttcccctcctactac

SEQ ID NO: 1474658 - DNA, 15 bp, Homo sapiens
tttcccctcctacta

SEQ ID NO: 1474659 - DNA, 15 bp, Homo sapiens
ctttcccctcctact

SEQ ID NO: 1474660 - DNA, 15 bp, Homo sapiens
gctttcccctcctac

SEQ ID NO: 1474661 - DNA, 15 bp, Homo sapiens
tgctttcccctccta

SEQ ID NO: 1474662 - DNA, 15 bp, Homo sapiens
ctgctttcccctcct

SEQ ID NO: 1474663 - DNA, 15 bp, Homo sapiens
cctgctttcccctcc

SEQ ID NO: 1474664 - DNA, 15 bp, Homo sapiens
tcctgctttcccctc

SEQ ID NO: 1474665 - DNA, 15 bp, Homo sapiens
gtcctgctttcccct

SEQ ID NO: 1474666 - DNA, 15 bp, Homo sapiens
tgtcctgctttcccc

SEQ ID NO: 1474667 - DNA, 15 bp, Homo sapiens
ttgtcctgctttccc

SEQ ID NO: 1474668 - DNA, 15 bp, Homo sapiens
attgtcctgctttcc

SEQ ID NO: 1474669 - DNA, 15 bp, Homo sapiens
tattgtcctgctttc

SEQ ID NO: 1474670 - DNA, 15 bp, Homo sapiens
ctattgtcctgcttt

SEQ ID NO: 1474671 - DNA, 15 bp, Homo sapiens
tctattgtcctgctt

SEQ ID NO: 1474672 - DNA, 15 bp, Homo sapiens
ctctattgtcctgct

SEQ ID NO: 1474673 - DNA, 15 bp, Homo sapiens
tctctattgtcctgc

SEQ ID NO: 1474674 - DNA, 15 bp, Homo sapiens
ttctctattgtcctg

SEQ ID NO: 1474675 - DNA, 15 bp, Homo sapiens
gttctctattgtcct

SEQ ID NO: 1474676 - DNA, 15 bp, Homo sapiens
tgttctctattgtcc

SEQ ID NO: 1474677 - DNA, 15 bp, Homo sapiens
ctgttctctattgtc

SEQ ID NO: 1474678 - DNA, 15 bp, Homo sapiens
cctgttctctattgt

SEQ ID NO: 1474679 - DNA, 15 bp, Homo sapiens
ccctgttctctattg

SEQ ID NO: 1474680 - DNA, 15 bp, Homo sapiens
gccctgttctctatt

SEQ ID NO: 1474681 - DNA, 15 bp, Homo sapiens
ggccctgttctctat

SEQ ID NO: 1474682 - DNA, 15 bp, Homo sapiens
gggccctgttctcta

SEQ ID NO: 1474683 - DNA, 15 bp, Homo sapiens
agggccctgttctct

SEQ ID NO: 1474684 - DNA, 15 bp, Homo sapiens
cagggccctgttctc

SEQ ID NO: 1474685 - DNA, 15 bp, Homo sapiens
gcagggccctgttct

SEQ ID NO: 1474686 - DNA, 15 bp, Homo sapiens
ggcagggccctgttc

SEQ ID NO: 1474687 - DNA, 15 bp, Homo sapiens
gggcagggccctgtt

SEQ ID NO: 1474688 - DNA, 15 bp, Homo sapiens
tgggcagggccctgt

SEQ ID NO: 1474689 - DNA, 15 bp, Homo sapiens
ctgggcagggccctg

SEQ ID NO: 1474690 - DNA, 15 bp, Homo sapiens
gctgggcagggccct

SEQ ID NO: 1474691 - DNA, 15 bp, Homo sapiens
agctgggcagggccc

SEQ ID NO: 1474692 - DNA, 15 bp, Homo sapiens
tagctgggcagggcc

SEQ ID NO: 1474693 - DNA, 15 bp, Homo sapiens
ttagctgggcagggc

SEQ ID NO: 1474694 - DNA, 15 bp, Homo sapiens
cttagctgggcaggg

SEQ ID NO: 1474695 - DNA, 15 bp, Homo sapiens
tcttagctgggcagg

SEQ ID NO: 1474696 - DNA, 15 bp, Homo sapiens
gtcttagctgggcag

SEQ ID NO: 1474697 - DNA, 15 bp, Homo sapiens
ggtcttagctgggca

SEQ ID NO: 1474698 - DNA, 15 bp, Homo sapiens
gggtcttagctgggc

SEQ ID NO: 1474699 - DNA, 15 bp, Homo sapiens
tgggtcttagctggg

SEQ ID NO: 1474700 - DNA, 15 bp, Homo sapiens
ttgggtcttagctgg

SEQ ID NO: 1474701 - DNA, 15 bp, Homo sapiens
cttgggtcttagctg

SEQ ID NO: 1474702 - DNA, 15 bp, Homo sapiens
tcttgggtcttagct

SEQ ID NO: 1474703 - DNA, 15 bp, Homo sapiens
ctcttgggtcttagc

SEQ ID NO: 1474704 - DNA, 15 bp, Homo sapiens
tctcttgggtcttag

SEQ ID NO: 1474705 - DNA, 15 bp, Homo sapiens
gtctcttgggtctta

SEQ ID NO: 1474706 - DNA, 15 bp, Homo sapiens
tgtctcttgggtctt

SEQ ID NO: 1474707 - DNA, 15 bp, Homo sapiens
ctgtctcttgggtct

SEQ ID NO: 1474708 - DNA, 15 bp, Homo sapiens
cctgtctcttgggtc

SEQ ID NO: 1474709 - DNA, 15 bp, Homo sapiens
ccctgtctcttgggt

SEQ ID NO: 1474710 - DNA, 15 bp, Homo sapiens
gccctgtctcttggg

SEQ ID NO: 1474711 - DNA, 15 bp, Homo sapiens
agccctgtctcttgg

SEQ ID NO: 1474712 - DNA, 15 bp, Homo sapiens
cagccctgtctcttg

SEQ ID NO: 1474713 - DNA, 15 bp, Homo sapiens
tcagccctgtctctt

SEQ ID NO: 1474714 - DNA, 15 bp, Homo sapiens
ttcagccctgtctct

SEQ ID NO: 1474715 - DNA, 15 bp, Homo sapiens
attcagccctgtctc

SEQ ID NO: 1474716 - DNA, 15 bp, Homo sapiens
tattcagccctgtct

SEQ ID NO: 1474717 - DNA, 15 bp, Homo sapiens
ttattcagccctgtc

SEQ ID NO: 1474718 - DNA, 15 bp, Homo sapiens
cttattcagccctgt

SEQ ID NO: 1474719 - DNA, 15 bp, Homo sapiens
ccttattcagccctg

SEQ ID NO: 1474720 - DNA, 15 bp, Homo sapiens
tccttattcagccct

SEQ ID NO: 1474721 - DNA, 15 bp, Homo sapiens
gtccttattcagccc

SEQ ID NO: 1474722 - DNA, 15 bp, Homo sapiens
tgtccttattcagcc

SEQ ID NO: 1474723 - DNA, 15 bp, Homo sapiens
gtgtccttattcagc

SEQ ID NO: 1474724 - DNA, 15 bp, Homo sapiens
tgtgtccttattcag

SEQ ID NO: 1474725 - DNA, 15 bp, Homo sapiens
gtgtgtccttattca

SEQ ID NO: 1474726 - DNA, 15 bp, Homo sapiens
tgtgtgtccttattc

SEQ ID NO: 1474727 - DNA, 15 bp, Homo sapiens
ttgtgtgtccttatt

SEQ ID NO: 1474728 - DNA, 15 bp, Homo sapiens
cttgtgtgtccttat

SEQ ID NO: 1474729 - DNA, 15 bp, Homo sapiens
ccttgtgtgtcctta

SEQ ID NO: 1474730 - DNA, 15 bp, Homo sapiens
tccttgtgtgtcctt

SEQ ID NO: 1474731 - DNA, 15 bp, Homo sapiens
ctccttgtgtgtcct

SEQ ID NO: 1474732 - DNA, 15 bp, Homo sapiens
cctccttgtgtgtcc

SEQ ID NO: 1474733 - DNA, 15 bp, Homo sapiens
gcctccttgtgtgtc

SEQ ID NO: 1474734 - DNA, 15 bp, Homo sapiens
tgcctccttgtgtgt

SEQ ID NO: 1474735 - DNA, 15 bp, Homo sapiens
ctgcctccttgtgtg

SEQ ID NO: 1474736 - DNA, 15 bp, Homo sapiens
cctgcctccttgtgt

SEQ ID NO: 1474737 - DNA, 15 bp, Homo sapiens
gcctgcctccttgtg

SEQ ID NO: 1474738 - DNA, 15 bp, Homo sapiens
tgcctgcctccttgt

SEQ ID NO: 1474739 - DNA, 15 bp, Homo sapiens
gtgcctgcctccttg

SEQ ID NO: 1474740 - DNA, 15 bp, Homo sapiens
ggtgcctgcctcctt

SEQ ID NO: 1474741 - DNA, 15 bp, Homo sapiens
tggtgcctgcctcct

SEQ ID NO: 1474742 - DNA, 15 bp, Homo sapiens
ttggtgcctgcctcc

SEQ ID NO: 1474743 - DNA, 15 bp, Homo sapiens
cttggtgcctgcctc

SEQ ID NO: 1474744 - DNA, 15 bp, Homo sapiens
gcttggtgcctgcct

SEQ ID NO: 1474745 - DNA, 15 bp, Homo sapiens
agcttggtgcctgcc

SEQ ID NO: 1474746 - DNA, 15 bp, Homo sapiens
cagcttggtgcctgc

SEQ ID NO: 1474747 - DNA, 15 bp, Homo sapiens
ccagcttggtgcctg

SEQ ID NO: 1474748 - DNA, 15 bp, Homo sapiens
gccagcttggtgcct

SEQ ID NO: 1474749 - DNA, 15 bp, Homo sapiens
ggccagcttggtgcc

SEQ ID NO: 1474750 - DNA, 15 bp, Homo sapiens
gggccagcttggtgc

SEQ ID NO: 1474751 - DNA, 15 bp, Homo sapiens
agggccagcttggtg

SEQ ID NO: 1474752 - DNA, 15 bp, Homo sapiens
tagggccagcttggt

SEQ ID NO: 1474753 - DNA, 15 bp, Homo sapiens
ctagggccagcttgg

SEQ ID NO: 1474754 - DNA, 15 bp, Homo sapiens
gctagggccagcttg

SEQ ID NO: 1474755 - DNA, 15 bp, Homo sapiens
agctagggccagctt

SEQ ID NO: 1474756 - DNA, 15 bp, Homo sapiens
cagctagggccagct

SEQ ID NO: 1474757 - DNA, 15 bp, Homo sapiens
tcagctagggccagc

SEQ ID NO: 1474758 - DNA, 15 bp, Homo sapiens
ctcagctagggccag

SEQ ID NO: 1474759 - DNA, 15 bp, Homo sapiens
cctcagctagggcca

SEQ ID NO: 1474760 - DNA, 15 bp, Homo sapiens
acctcagctagggcc

SEQ ID NO: 1474761 - DNA, 15 bp, Homo sapiens
aacctcagctagggc

SEQ ID NO: 1474762 - DNA, 15 bp, Homo sapiens
aaacctcagctaggg

SEQ ID NO: 1474763 - DNA, 15 bp, Homo sapiens
taaacctcagctagg

SEQ ID NO: 1474764 - DNA, 15 bp, Homo sapiens
ataaacctcagctag

SEQ ID NO: 1474765 - DNA, 15 bp, Homo sapiens
aataaacctcagcta

SEQ ID NO: 1474766 - DNA, 15 bp, Homo sapiens
gaataaacctcagct

SEQ ID NO: 1474767 - DNA, 15 bp, Homo sapiens
tgaataaacctcagc

SEQ ID NO: 1474768 - DNA, 15 bp, Homo sapiens
atgaataaacctcag

SEQ ID NO: 1474769 - DNA, 15 bp, Homo sapiens
aatgaataaacctca

SEQ ID NO: 1474770 - DNA, 15 bp, Homo sapiens
aaatgaataaacctc

SEQ ID NO: 1474771 - DNA, 15 bp, Homo sapiens
gaaatgaataaacct

SEQ ID NO: 1474772 - DNA, 15 bp, Homo sapiens
tgaaatgaataaacc

SEQ ID NO: 1474773 - DNA, 15 bp, Homo sapiens
atgaaatgaataaac

SEQ ID NO: 1474774 - DNA, 15 bp, Homo sapiens
gatgaaatgaataaa

SEQ ID NO: 1474775 - DNA, 15 bp, Homo sapiens
agatgaaatgaataa

SEQ ID NO: 1474776 - DNA, 15 bp, Homo sapiens
gagatgaaatgaata

SEQ ID NO: 1474777 - DNA, 15 bp, Homo sapiens
ggagatgaaatgaat

SEQ ID NO: 1474778 - DNA, 15 bp, Homo sapiens
tggagatgaaatgaa

SEQ ID NO: 1474779 - DNA, 15 bp, Homo sapiens
gtggagatgaaatga

SEQ ID NO: 1474780 - DNA, 15 bp, Homo sapiens
tgtggagatgaaatg

SEQ ID NO: 1474781 - DNA, 15 bp, Homo sapiens
ctgtggagatgaaat

SEQ ID NO: 1474782 - DNA, 15 bp, Homo sapiens
gctgtggagatgaaa

SEQ ID NO: 1474783 - DNA, 15 bp, Homo sapiens
ggctgtggagatgaa

SEQ ID NO: 1474784 - DNA, 15 bp, Homo sapiens
tggctgtggagatga

SEQ ID NO: 1474785 - DNA, 15 bp, Homo sapiens
gtggctgtggagatg

SEQ ID NO: 1474786 - DNA, 15 bp, Homo sapiens
agtggctgtggagat

SEQ ID NO: 1474787 - DNA, 15 bp, Homo sapiens
aagtggctgtggaga

SEQ ID NO: 1474788 - DNA, 15 bp, Homo sapiens
aaagtggctgtggag

SEQ ID NO: 1474789 - DNA, 15 bp, Homo sapiens
gaaagtggctgtgga

SEQ ID NO: 1474790 - DNA, 15 bp, Homo sapiens
tgaaagtggctgtgg

SEQ ID NO: 1474791 - DNA, 15 bp, Homo sapiens
ctgaaagtggctgtg

SEQ ID NO: 1474792 - DNA, 15 bp, Homo sapiens
tctgaaagtggctgt

SEQ ID NO: 1474793 - DNA, 15 bp, Homo sapiens
ctctgaaagtggctg

SEQ ID NO: 1474794 - DNA, 15 bp, Homo sapiens
cctctgaaagtggct

SEQ ID NO: 1474795 - DNA, 15 bp, Homo sapiens
ccctctgaaagtggc

SEQ ID NO: 1474796 - DNA, 15 bp, Homo sapiens
accctctgaaagtgg

SEQ ID NO: 1474797 - DNA, 15 bp, Homo sapiens
caccctctgaaagtg

SEQ ID NO: 1474798 - DNA, 15 bp, Homo sapiens
ccaccctctgaaagt

SEQ ID NO: 1474799 - DNA, 15 bp, Homo sapiens
cccaccctctgaaag

SEQ ID NO: 1474800 - DNA, 15 bp, Homo sapiens
tcccaccctctgaaa

SEQ ID NO: 1474801 - DNA, 15 bp, Homo sapiens
gtcccaccctctgaa

SEQ ID NO: 1474802 - DNA, 15 bp, Homo sapiens
tgtcccaccctctga

SEQ ID NO: 1474803 - DNA, 15 bp, Homo sapiens
ttgtcccaccctctg

SEQ ID NO: 1474804 - DNA, 15 bp, Homo sapiens
gttgtcccaccctct

SEQ ID NO: 1474805 - DNA, 15 bp, Homo sapiens
tgttgtcccaccctc

SEQ ID NO: 1474806 - DNA, 15 bp, Homo sapiens
ctgttgtcccaccct

SEQ ID NO: 1474807 - DNA, 15 bp, Homo sapiens
gctgttgtcccaccc

SEQ ID NO: 1474808 - DNA, 15 bp, Homo sapiens
ggctgttgtcccacc

SEQ ID NO: 1474809 - DNA, 15 bp, Homo sapiens
gggctgttgtcccac

SEQ ID NO: 1474810 - DNA, 15 bp, Homo sapiens
ggggctgttgtccca

SEQ ID NO: 1474811 - DNA, 15 bp, Homo sapiens
tggggctgttgtccc

SEQ ID NO: 1474812 - DNA, 15 bp, Homo sapiens
gtggggctgttgtcc

SEQ ID NO: 1474813 - DNA, 15 bp, Homo sapiens
agtggggctgttgtc

SEQ ID NO: 1474814 - DNA, 15 bp, Homo sapiens
aagtggggctgttgt

SEQ ID NO: 1474815 - DNA, 15 bp, Homo sapiens
aaagtggggctgttg

SEQ ID NO: 1474816 - DNA, 15 bp, Homo sapiens
taaagtggggctgtt

SEQ ID NO: 1474817 - DNA, 15 bp, Homo sapiens
gtaaagtggggctgt

SEQ ID NO: 1474818 - DNA, 15 bp, Homo sapiens
tgtaaagtggggctg

SEQ ID NO: 1474819 - DNA, 15 bp, Homo sapiens
ctgtaaagtggggct

SEQ ID NO: 1474820 - DNA, 15 bp, Homo sapiens
tctgtaaagtggggc

SEQ ID NO: 1474821 - DNA, 15 bp, Homo sapiens
gtctgtaaagtgggg

SEQ ID NO: 1474822 - DNA, 15 bp, Homo sapiens
agtctgtaaagtggg

SEQ ID NO: 1474823 - DNA, 15 bp, Homo sapiens
cagtctgtaaagtgg

SEQ ID NO: 1474824 - DNA, 15 bp, Homo sapiens
ccagtctgtaaagtg

SEQ ID NO: 1474825 - DNA, 15 bp, Homo sapiens
cccagtctgtaaagt

SEQ ID NO: 1474826 - DNA, 15 bp, Homo sapiens
tcccagtctgtaaag

SEQ ID NO: 1474827 - DNA, 15 bp, Homo sapiens
ttcccagtctgtaaa

SEQ ID NO: 1474828 - DNA, 15 bp, Homo sapiens
tttcccagtctgtaa

SEQ ID NO: 1474829 - DNA, 15 bp, Homo sapiens
atttcccagtctgta

SEQ ID NO: 1474830 - DNA, 15 bp, Homo sapiens
aatttcccagtctgt

SEQ ID NO: 1474831 - DNA, 15 bp, Homo sapiens
caatttcccagtctg

SEQ ID NO: 1474832 - DNA, 15 bp, Homo sapiens
acaatttcccagtct

SEQ ID NO: 1474833 - DNA, 15 bp, Homo sapiens
cacaatttcccagtc

SEQ ID NO: 1474834 - DNA, 15 bp, Homo sapiens
ccacaatttcccagt

SEQ ID NO: 1474835 - DNA, 15 bp, Homo sapiens
gccacaatttcccag

SEQ ID NO: 1474836 - DNA, 15 bp, Homo sapiens
agccacaatttccca

SEQ ID NO: 1474837 - DNA, 15 bp, Homo sapiens
aagccacaatttccc

SEQ ID NO: 1474838 - DNA, 15 bp, Homo sapiens
taagccacaatttcc

SEQ ID NO: 1474839 - DNA, 15 bp, Homo sapiens
ctaagccacaatttc

SEQ ID NO: 1474840 - DNA, 15 bp, Homo sapiens
cctaagccacaattt

SEQ ID NO: 1474841 - DNA, 15 bp, Homo sapiens
ccctaagccacaatt

SEQ ID NO: 1474842 - DNA, 15 bp, Homo sapiens
tccctaagccacaat

SEQ ID NO: 1474843 - DNA, 15 bp, Homo sapiens
ttccctaagccacaa

SEQ ID NO: 1474844 - DNA, 15 bp, Homo sapiens
tttccctaagccaca

SEQ ID NO: 1474845 - DNA, 15 bp, Homo sapiens
ctttccctaagccac

SEQ ID NO: 1474846 - DNA, 15 bp, Homo sapiens
tctttccctaagcca

SEQ ID NO: 1474847 - DNA, 15 bp, Homo sapiens
ttctttccctaagcc

SEQ ID NO: 1474848 - DNA, 15 bp, Homo sapiens
cttctttccctaagc

SEQ ID NO: 1474849 - DNA, 15 bp, Homo sapiens
ccttctttccctaag

SEQ ID NO: 1474850 - DNA, 15 bp, Homo sapiens
cccttctttccctaa

SEQ ID NO: 1474851 - DNA, 15 bp, Homo sapiens
ccccttctttcccta

SEQ ID NO: 1474852 - DNA, 15 bp, Homo sapiens
cccccttctttccct

SEQ ID NO: 1474853 - DNA, 15 bp, Homo sapiens
gcccccttctttccc

SEQ ID NO: 1474854 - DNA, 15 bp, Homo sapiens
agcccccttctttcc

SEQ ID NO: 1474855 - DNA, 15 bp, Homo sapiens
aagcccccttctttc

SEQ ID NO: 1474856 - DNA, 15 bp, Homo sapiens
aaagcccccttcttt

SEQ ID NO: 1474857 - DNA, 15 bp, Homo sapiens
gaaagcccccttctt

SEQ ID NO: 1474858 - DNA, 15 bp, Homo sapiens
tgaaagcccccttct

SEQ ID NO: 1474859 - DNA, 15 bp, Homo sapiens
ctgaaagcccccttc

SEQ ID NO: 1474860 - DNA, 15 bp, Homo sapiens
actgaaagccccctt

SEQ ID NO: 1474861 - DNA, 15 bp, Homo sapiens
tactgaaagccccct

SEQ ID NO: 1474862 - DNA, 15 bp, Homo sapiens
ttactgaaagccccc

SEQ ID NO: 1474863 - DNA, 15 bp, Homo sapiens
cttactgaaagcccc

SEQ ID NO: 1474864 - DNA, 15 bp, Homo sapiens
ccttactgaaagccc

SEQ ID NO: 1474865 - DNA, 15 bp, Homo sapiens
gccttactgaaagcc

SEQ ID NO: 1474866 - DNA, 15 bp, Homo sapiens
tgccttactgaaagc

SEQ ID NO: 1474867 - DNA, 15 bp, Homo sapiens
ttgccttactgaaag

SEQ ID NO: 1474868 - DNA, 15 bp, Homo sapiens
cttgccttactgaaa

SEQ ID NO: 1474869 - DNA, 15 bp, Homo sapiens
tcttgccttactgaa

SEQ ID NO: 1474870 - DNA, 15 bp, Homo sapiens
ctcttgccttactga

SEQ ID NO: 1474871 - DNA, 15 bp, Homo sapiens
cctcttgccttactg

SEQ ID NO: 1474872 - DNA, 15 bp, Homo sapiens
tcctcttgccttact

SEQ ID NO: 1474873 - DNA, 15 bp, Homo sapiens
atcctcttgccttac

SEQ ID NO: 1474874 - DNA, 15 bp, Homo sapiens
gatcctcttgcctta

SEQ ID NO: 1474875 - DNA, 15 bp, Homo sapiens
tgatcctcttgcctt

SEQ ID NO: 1474876 - DNA, 15 bp, Homo sapiens
gtgatcctcttgcct

SEQ ID NO: 1474877 - DNA, 15 bp, Homo sapiens
agtgatcctcttgcc

SEQ ID NO: 1474878 - DNA, 15 bp, Homo sapiens
aagtgatcctcttgc

SEQ ID NO: 1474879 - DNA, 15 bp, Homo sapiens
caagtgatcctcttg

SEQ ID NO: 1474880 - DNA, 15 bp, Homo sapiens
tctcaagtgatcctc

SEQ ID NO: 1474881 - DNA, 15 bp, Homo sapiens
ttctcaagtgatcct

SEQ ID NO: 1474882 - DNA, 15 bp, Homo sapiens
gttctcaagtgatcc

SEQ ID NO: 1474883 - DNA, 15 bp, Homo sapiens
tgttctcaagtgatc

SEQ ID NO: 1474884 - DNA, 15 bp, Homo sapiens
ctgttctcaagtgat

SEQ ID NO: 1474885 - DNA, 15 bp, Homo sapiens
gctgttctcaagtga

SEQ ID NO: 1474886 - DNA, 15 bp, Homo sapiens
ggctgttctcaagtg

SEQ ID NO: 1474887 - DNA, 15 bp, Homo sapiens
aggctgttctcaagt

SEQ ID NO: 1474888 - DNA, 15 bp, Homo sapiens
caggctgttctcaag

SEQ ID NO: 1474889 - DNA, 15 bp, Homo sapiens
ccaggctgttctcaa

SEQ ID NO: 1474890 - DNA, 15 bp, Homo sapiens
cccaggctgttctca

SEQ ID NO: 1474891 - DNA, 15 bp, Homo sapiens
gcccaggctgttctc

SEQ ID NO: 1474892 - DNA, 15 bp, Homo sapiens
tgcccaggctgttct

SEQ ID NO: 1474893 - DNA, 15 bp, Homo sapiens
ttgcccaggctgttc

SEQ ID NO: 1474894 - DNA, 15 bp, Homo sapiens
gttgcccaggctgtt

SEQ ID NO: 1474895 - DNA, 15 bp, Homo sapiens
cactgtgttgcccag

SEQ ID NO: 1474896 - DNA, 15 bp, Homo sapiens
tctcactgtgttgcc

SEQ ID NO: 1474897 - DNA, 15 bp, Homo sapiens
gtctcactgtgttgc

SEQ ID NO: 1474898 - DNA, 15 bp, Homo sapiens
ggtctcactgtgttg

SEQ ID NO: 1474899 - DNA, 15 bp, Homo sapiens
gggtctcactgtgtt

SEQ ID NO: 1474900 - DNA, 15 bp, Homo sapiens
agggtctcactgtgt

SEQ ID NO: 1474901 - DNA, 15 bp, Homo sapiens
cagggtctcactgtg

SEQ ID NO: 1474902 - DNA, 15 bp, Homo sapiens
acagggtctcactgt

SEQ ID NO: 1474903 - DNA, 15 bp, Homo sapiens
gacagggtctcactg

SEQ ID NO: 1474904 - DNA, 15 bp, Homo sapiens
tttttttagagacag

SEQ ID NO: 1474905 - DNA, 15 bp, Homo sapiens
ctttttttagagaca

SEQ ID NO: 1474906 - DNA, 15 bp, Homo sapiens
tctttttttagagac

SEQ ID NO: 1474907 - DNA, 15 bp, Homo sapiens
ttctttttttagaga

SEQ ID NO: 1474908 - DNA, 15 bp, Homo sapiens
tttctttttttagag

SEQ ID NO: 1474909 - DNA, 15 bp, Homo sapiens
gtttctttttttaga

SEQ ID NO: 1474910 - DNA, 15 bp, Homo sapiens
tgtttctttttttag

SEQ ID NO: 1474911 - DNA, 15 bp, Homo sapiens
ttgtttcttttttta

SEQ ID NO: 1474912 - DNA, 15 bp, Homo sapiens
tttgtttcttttttt

SEQ ID NO: 1474913 - DNA, 15 bp, Homo sapiens
ctttgtttctttttt

SEQ ID NO: 1474914 - DNA, 15 bp, Homo sapiens
cctttgtttcttttt

SEQ ID NO: 1474915 - DNA, 15 bp, Homo sapiens
ccctttgtttctttt

SEQ ID NO: 1474916 - DNA, 15 bp, Homo sapiens
cccctttgtttcttt

SEQ ID NO: 1474917 - DNA, 15 bp, Homo sapiens
gcccctttgtttctt

SEQ ID NO: 1474918 - DNA, 15 bp, Homo sapiens
ggcccctttgtttct

SEQ ID NO: 1474919 - DNA, 15 bp, Homo sapiens
tggcccctttgtttc

SEQ ID NO: 1474920 - DNA, 15 bp, Homo sapiens
ctggcccctttgttt

SEQ ID NO: 1474921 - DNA, 15 bp, Homo sapiens
cctggcccctttgtt

SEQ ID NO: 1474922 - DNA, 15 bp, Homo sapiens
gcctggcccctttgt

SEQ ID NO: 1474923 - DNA, 15 bp, Homo sapiens
tgcctggcccctttg

SEQ ID NO: 1474924 - DNA, 15 bp, Homo sapiens
gtgcctggccccttt

SEQ ID NO: 1474925 - DNA, 15 bp, Homo sapiens
cgtgcctggcccctt

SEQ ID NO: 1474926 - DNA, 15 bp, Homo sapiens
ccgtgcctggcccct

SEQ ID NO: 1474927 - DNA, 15 bp, Homo sapiens
accgtgcctggcccc

SEQ ID NO: 1474928 - DNA, 15 bp, Homo sapiens
caccgtgcctggccc

SEQ ID NO: 1474929 - DNA, 15 bp, Homo sapiens
acgtgagccaccgtg

SEQ ID NO: 1474930 - DNA, 15 bp, Homo sapiens
aacgtgagccaccgt

SEQ ID NO: 1474931 - DNA, 15 bp, Homo sapiens
aaacgtgagccaccg

SEQ ID NO: 1474932 - DNA, 15 bp, Homo sapiens
taaacgtgagccacc

SEQ ID NO: 1474933 - DNA, 15 bp, Homo sapiens
ataaacgtgagccac

SEQ ID NO: 1474934 - DNA, 15 bp, Homo sapiens
tataaacgtgagcca

SEQ ID NO: 1474935 - DNA, 15 bp, Homo sapiens
ttataaacgtgagcc

SEQ ID NO: 1474936 - DNA, 15 bp, Homo sapiens
attataaacgtgagc

SEQ ID NO: 1474937 - DNA, 15 bp, Homo sapiens
gattataaacgtgag

SEQ ID NO: 1474938 - DNA, 15 bp, Homo sapiens
ggattataaacgtga

SEQ ID NO: 1474939 - DNA, 15 bp, Homo sapiens
gggattataaacgtg

SEQ ID NO: 1474940 - DNA, 15 bp, Homo sapiens
tgggattataaacgt

SEQ ID NO: 1474941 - DNA, 15 bp, Homo sapiens
ctgggattataaacg

SEQ ID NO: 1474942 - DNA, 15 bp, Homo sapiens
gctgggattataaac

SEQ ID NO: 1474943 - DNA, 15 bp, Homo sapiens
tgctgggattataaa

SEQ ID NO: 1474944 - DNA, 15 bp, Homo sapiens
gggatttcaccatgt

SEQ ID NO: 1474945 - DNA, 15 bp, Homo sapiens
tgggatttcaccatg

SEQ ID NO: 1474946 - DNA, 15 bp, Homo sapiens
atgggatttcaccat

SEQ ID NO: 1474947 - DNA, 15 bp, Homo sapiens
aatgggatttcacca

SEQ ID NO: 1474948 - DNA, 15 bp, Homo sapiens
aaatgggatttcacc

SEQ ID NO: 1474949 - DNA, 15 bp, Homo sapiens
gaaatgggatttcac

SEQ ID NO: 1474950 - DNA, 15 bp, Homo sapiens
agaaatgggatttca

SEQ ID NO: 1474951 - DNA, 15 bp, Homo sapiens
tagaaatgggatttc

SEQ ID NO: 1474952 - DNA, 15 bp, Homo sapiens
gtagaaatgggattt

SEQ ID NO: 1474953 - DNA, 15 bp, Homo sapiens
agtagaaatgggatt

SEQ ID NO: 1474954 - DNA, 15 bp, Homo sapiens
tagtagaaatgggat

SEQ ID NO: 1474955 - DNA, 15 bp, Homo sapiens
ttagtagaaatggga

SEQ ID NO: 1474956 - DNA, 15 bp, Homo sapiens
ttttttagtagaaat

SEQ ID NO: 1474957 - DNA, 15 bp, Homo sapiens
attttttagtagaaa

SEQ ID NO: 1474958 - DNA, 15 bp, Homo sapiens
tattttttagtagaa

SEQ ID NO: 1474959 - DNA, 15 bp, Homo sapiens
gtattttttagtaga

SEQ ID NO: 1474960 - DNA, 15 bp, Homo sapiens
tgtattttttagtag

SEQ ID NO: 1474961 - DNA, 15 bp, Homo sapiens
ttgtattttttagta

SEQ ID NO: 1474962 - DNA, 15 bp, Homo sapiens
tttgtattttttagt

SEQ ID NO: 1474963 - DNA, 15 bp, Homo sapiens
ttttgtattttttag

SEQ ID NO: 1474964 - DNA, 15 bp, Homo sapiens
gtgcaccaccacgcc

SEQ ID NO: 1474965 - DNA, 15 bp, Homo sapiens
ggtgcaccaccacgc

SEQ ID NO: 1474966 - DNA, 15 bp, Homo sapiens
gggtgcaccaccacg

SEQ ID NO: 1474967 - DNA, 15 bp, Homo sapiens
ggggtgcaccaccac

SEQ ID NO: 1474968 - DNA, 15 bp, Homo sapiens
aggggtgcaccacca

SEQ ID NO: 1474969 - DNA, 15 bp, Homo sapiens
caggggtgcaccacc

SEQ ID NO: 1474970 - DNA, 15 bp, Homo sapiens
acaggggtgcaccac

SEQ ID NO: 1474971 - DNA, 15 bp, Homo sapiens
tacaggggtgcacca

SEQ ID NO: 1474972 - DNA, 15 bp, Homo sapiens
ttacaggggtgcacc

SEQ ID NO: 1474973 - DNA, 15 bp, Homo sapiens
attacaggggtgcac

SEQ ID NO: 1474974 - DNA, 15 bp, Homo sapiens
gattacaggggtgca

SEQ ID NO: 1474975 - DNA, 15 bp, Homo sapiens
ggattacaggggtgc

SEQ ID NO: 1474976 - DNA, 15 bp, Homo sapiens
gccacctcagccttc

SEQ ID NO: 1474977 - DNA, 15 bp, Homo sapiens
tgccacctcagcctt

SEQ ID NO: 1474978 - DNA, 15 bp, Homo sapiens
ctgccacctcagcct

SEQ ID NO: 1474979 - DNA, 15 bp, Homo sapiens
tctgccacctcagcc

SEQ ID NO: 1474980 - DNA, 15 bp, Homo sapiens
ttctgccacctcagc

SEQ ID NO: 1474981 - DNA, 15 bp, Homo sapiens
attctgccacctcag

SEQ ID NO: 1474982 - DNA, 15 bp, Homo sapiens
aattctgccacctca

SEQ ID NO: 1474983 - DNA, 15 bp, Homo sapiens
caattctgccacctc

SEQ ID NO: 1474984 - DNA, 15 bp, Homo sapiens
gcaattctgccacct

SEQ ID NO: 1474985 - DNA, 15 bp, Homo sapiens
agcaattctgccacc

SEQ ID NO: 1474986 - DNA, 15 bp, Homo sapiens
aagcaattctgccac

SEQ ID NO: 1474987 - DNA, 15 bp, Homo sapiens
caagcaattctgcca

SEQ ID NO: 1474988 - DNA, 15 bp, Homo sapiens
tcaagcaattctgcc

SEQ ID NO: 1474989 - DNA, 15 bp, Homo sapiens
ttcaagcaattctgc

SEQ ID NO: 1474990 - DNA, 15 bp, Homo sapiens
gttcaagcaattctg

SEQ ID NO: 1474991 - DNA, 15 bp, Homo sapiens
taggttcaagcaatt

SEQ ID NO: 1474992 - DNA, 15 bp, Homo sapiens
ctaggttcaagcaat

SEQ ID NO: 1474993 - DNA, 15 bp, Homo sapiens
cctaggttcaagcaa

SEQ ID NO: 1474994 - DNA, 15 bp, Homo sapiens
tcctaggttcaagca

SEQ ID NO: 1474995 - DNA, 15 bp, Homo sapiens
ctcctaggttcaagc

SEQ ID NO: 1474996 - DNA, 15 bp, Homo sapiens
cctcctaggttcaag

SEQ ID NO: 1474997 - DNA, 15 bp, Homo sapiens
tcctcctaggttcaa

SEQ ID NO: 1474998 - DNA, 15 bp, Homo sapiens
ctcctcctaggttca

SEQ ID NO: 1474999 - DNA, 15 bp, Homo sapiens
cctcctcctaggttc

SEQ ID NO: 1475000 - DNA, 15 bp, Homo sapiens
tcctcctcctaggtt

SEQ ID NO: 1475001 - DNA, 15 bp, Homo sapiens
ttcctcctcctaggt

SEQ ID NO: 1475002 - DNA, 15 bp, Homo sapiens
tttcctcctcctagg

SEQ ID NO: 1475003 - DNA, 15 bp, Homo sapiens
gtttcctcctcctag

SEQ ID NO: 1475004 - DNA, 15 bp, Homo sapiens
agtttcctcctccta

SEQ ID NO: 1475005 - DNA, 15 bp, Homo sapiens
cagtttcctcctcct

SEQ ID NO: 1475006 - DNA, 15 bp, Homo sapiens
gcagtttcctcctcc

SEQ ID NO: 1475007 - DNA, 15 bp, Homo sapiens
tgcagtttcctcctc

SEQ ID NO: 1475008 - DNA, 15 bp, Homo sapiens
ctgcagtttcctcct

SEQ ID NO: 1475009 - DNA, 15 bp, Homo sapiens
actgcagtttcctcc

SEQ ID NO: 1475010 - DNA, 15 bp, Homo sapiens
cactgcagtttcctc

SEQ ID NO: 1475011 - DNA, 15 bp, Homo sapiens
tcactgcagtttcct

SEQ ID NO: 1475012 - DNA, 15 bp, Homo sapiens
ctcactgcagtttcc

SEQ ID NO: 1475013 - DNA, 15 bp, Homo sapiens
gctcactgcagtttc

SEQ ID NO: 1475014 - DNA, 15 bp, Homo sapiens
ggctcactgcagttt

SEQ ID NO: 1475015 - DNA, 15 bp, Homo sapiens
tggctcactgcagtt

SEQ ID NO: 1475016 - DNA, 15 bp, Homo sapiens
ctggctcactgcagt

SEQ ID NO: 1475017 - DNA, 15 bp, Homo sapiens
cctggctcactgcag

SEQ ID NO: 1475018 - DNA, 15 bp, Homo sapiens
tcctggctcactgca

SEQ ID NO: 1475019 - DNA, 15 bp, Homo sapiens
atcctggctcactgc

SEQ ID NO: 1475020 - DNA, 15 bp, Homo sapiens
gatcctggctcactg

SEQ ID NO: 1475021 - DNA, 15 bp, Homo sapiens
cgatcctggctcact

SEQ ID NO: 1475022 - DNA, 15 bp, Homo sapiens
gcgatcctggctcac

SEQ ID NO: 1475023 - DNA, 15 bp, Homo sapiens
tgcgatcctggctca

SEQ ID NO: 1475024 - DNA, 15 bp, Homo sapiens
gtgcgatcctggctc

SEQ ID NO: 1475025 - DNA, 15 bp, Homo sapiens
ggtgcgatcctggct

SEQ ID NO: 1475026 - DNA, 15 bp, Homo sapiens
tggtgcgatcctggc

SEQ ID NO: 1475027 - DNA, 15 bp, Homo sapiens
gtggtgcgatcctgg

SEQ ID NO: 1475028 - DNA, 15 bp, Homo sapiens
agtggtgcgatcctg

SEQ ID NO: 1475029 - DNA, 15 bp, Homo sapiens
cagtggtgcgatcct

SEQ ID NO: 1475030 - DNA, 15 bp, Homo sapiens
acagtggtgcgatcc

SEQ ID NO: 1475031 - DNA, 15 bp, Homo sapiens
tacagtggtgcgatc

SEQ ID NO: 1475032 - DNA, 15 bp, Homo sapiens
ttacagtggtgcgat

SEQ ID NO: 1475033 - DNA, 15 bp, Homo sapiens
attacagtggtgcga

SEQ ID NO: 1475034 - DNA, 15 bp, Homo sapiens
gattacagtggtgcg

SEQ ID NO: 1475035 - DNA, 15 bp, Homo sapiens
ggattacagtggtgc

SEQ ID NO: 1475036 - DNA, 15 bp, Homo sapiens
tggattacagtggtg

SEQ ID NO: 1475037 - DNA, 15 bp, Homo sapiens
ctggattacagtggt

SEQ ID NO: 1475038 - DNA, 15 bp, Homo sapiens
actggattacagtgg

SEQ ID NO: 1475039 - DNA, 15 bp, Homo sapiens
tactggattacagtg

SEQ ID NO: 1475040 - DNA, 15 bp, Homo sapiens
ttactggattacagt

SEQ ID NO: 1475041 - DNA, 15 bp, Homo sapiens
attactggattacag

SEQ ID NO: 1475042 - DNA, 15 bp, Homo sapiens
gattactggattaca

SEQ ID NO: 1475043 - DNA, 15 bp, Homo sapiens
ggattactggattac

SEQ ID NO: 1475044 - DNA, 15 bp, Homo sapiens
tggattactggatta

SEQ ID NO: 1475045 - DNA, 15 bp, Homo sapiens
ctggattactggatt

SEQ ID NO: 1475046 - DNA, 15 bp, Homo sapiens
cctggattactggat

SEQ ID NO: 1475047 - DNA, 15 bp, Homo sapiens
gcctggattactgga

SEQ ID NO: 1475048 - DNA, 15 bp, Homo sapiens
agcctggattactgg

SEQ ID NO: 1475049 - DNA, 15 bp, Homo sapiens
cagcctggattactg

SEQ ID NO: 1475050 - DNA, 15 bp, Homo sapiens
ccagcctggattact

SEQ ID NO: 1475051 - DNA, 15 bp, Homo sapiens
cccagcctggattac

SEQ ID NO: 1475052 - DNA, 15 bp, Homo sapiens
acccagcctggatta

SEQ ID NO: 1475053 - DNA, 15 bp, Homo sapiens
cacccagcctggatt

SEQ ID NO: 1475054 - DNA, 15 bp, Homo sapiens
tcacccagcctggat

SEQ ID NO: 1475055 - DNA, 15 bp, Homo sapiens
gtcacccagcctgga

SEQ ID NO: 1475056 - DNA, 15 bp, Homo sapiens
tgtcacccagcctgg

SEQ ID NO: 1475057 - DNA, 15 bp, Homo sapiens
ctgtcacccagcctg

SEQ ID NO: 1475058 - DNA, 15 bp, Homo sapiens
tctgtcacccagcct

SEQ ID NO: 1475059 - DNA, 15 bp, Homo sapiens
ctctgtcacccagcc

SEQ ID NO: 1475060 - DNA, 15 bp, Homo sapiens
gctctgtcacccagc

SEQ ID NO: 1475061 - DNA, 15 bp, Homo sapiens
ttcgctctgtcaccc

SEQ ID NO: 1475062 - DNA, 15 bp, Homo sapiens
ccttttctttttttt

SEQ ID NO: 1475063 - DNA, 15 bp, Homo sapiens
cccttttcttttttt

SEQ ID NO: 1475064 - DNA, 15 bp, Homo sapiens
gcccttttctttttt

SEQ ID NO: 1475065 - DNA, 15 bp, Homo sapiens
ggcccttttcttttt

SEQ ID NO: 1475066 - DNA, 15 bp, Homo sapiens
cggcccttttctttt

SEQ ID NO: 1475067 - DNA, 15 bp, Homo sapiens
ccggcccttttcttt

SEQ ID NO: 1475068 - DNA, 15 bp, Homo sapiens
cccggcccttttctt

SEQ ID NO: 1475069 - DNA, 15 bp, Homo sapiens
gcccggcccttttct

SEQ ID NO: 1475070 - DNA, 15 bp, Homo sapiens
tgcccggcccttttc

SEQ ID NO: 1475071 - DNA, 15 bp, Homo sapiens
ttgcccggccctttt

SEQ ID NO: 1475072 - DNA, 15 bp, Homo sapiens
gttgcccggcccttt

SEQ ID NO: 1475073 - DNA, 15 bp, Homo sapiens
cgttgcccggccctt

SEQ ID NO: 1475074 - DNA, 15 bp, Homo sapiens
ccgttgcccggccct

SEQ ID NO: 1475075 - DNA, 15 bp, Homo sapiens
accgttgcccggccc

SEQ ID NO: 1475076 - DNA, 15 bp, Homo sapiens
caccgttgcccggcc

SEQ ID NO: 1475077 - DNA, 15 bp, Homo sapiens
ccaccgttgcccggc

SEQ ID NO: 1475078 - DNA, 15 bp, Homo sapiens
gccaccgttgcccgg

SEQ ID NO: 1475079 - DNA, 15 bp, Homo sapiens
agccaccgttgcccg

SEQ ID NO: 1475080 - DNA, 15 bp, Homo sapiens
gagccaccgttgccc

SEQ ID NO: 1475081 - DNA, 15 bp, Homo sapiens
tgagccaccgttgcc

SEQ ID NO: 1475082 - DNA, 15 bp, Homo sapiens
gtgagccaccgttgc

SEQ ID NO: 1475083 - DNA, 15 bp, Homo sapiens
tgtgagccaccgttg

SEQ ID NO: 1475084 - DNA, 15 bp, Homo sapiens
gtgtgagccaccgtt

SEQ ID NO: 1475085 - DNA, 15 bp, Homo sapiens
tgattacaggtgtga

SEQ ID NO: 1475086 - DNA, 15 bp, Homo sapiens
ctgattacaggtgtg

SEQ ID NO: 1475087 - DNA, 15 bp, Homo sapiens
cctgattacaggtgt

SEQ ID NO: 1475088 - DNA, 15 bp, Homo sapiens
tcctgattacaggtg

SEQ ID NO: 1475089 - DNA, 15 bp, Homo sapiens
ctcctgattacaggt

SEQ ID NO: 1475090 - DNA, 15 bp, Homo sapiens
cctcctgattacagg

SEQ ID NO: 1475091 - DNA, 15 bp, Homo sapiens
gcctcctgattacag

SEQ ID NO: 1475092 - DNA, 15 bp, Homo sapiens
agcctcctgattaca

SEQ ID NO: 1475093 - DNA, 15 bp, Homo sapiens
cagcctcctgattac

SEQ ID NO: 1475094 - DNA, 15 bp, Homo sapiens
tcagcctcctgatta

SEQ ID NO: 1475095 - DNA, 15 bp, Homo sapiens
ctcagcctcctgatt

SEQ ID NO: 1475096 - DNA, 15 bp, Homo sapiens
cctcagcctcctgat

SEQ ID NO: 1475097 - DNA, 15 bp, Homo sapiens
acccgcctcagcctc

SEQ ID NO: 1475098 - DNA, 15 bp, Homo sapiens
cacccgcctcagcct

SEQ ID NO: 1475099 - DNA, 15 bp, Homo sapiens
ccacccgcctcagcc

SEQ ID NO: 1475100 - DNA, 15 bp, Homo sapiens
tccacccgcctcagc

SEQ ID NO: 1475101 - DNA, 15 bp, Homo sapiens
atccacccgcctcag

SEQ ID NO: 1475102 - DNA, 15 bp, Homo sapiens
gatccacccgcctca

SEQ ID NO: 1475103 - DNA, 15 bp, Homo sapiens
ccaggctagtctcga

SEQ ID NO: 1475104 - DNA, 15 bp, Homo sapiens
gccaggctagtctcg

SEQ ID NO: 1475105 - DNA, 15 bp, Homo sapiens
gtgttggccaggcta

SEQ ID NO: 1475106 - DNA, 15 bp, Homo sapiens
cgtgttggccaggct

SEQ ID NO: 1475107 - DNA, 15 bp, Homo sapiens
ccgtgttggccaggc

SEQ ID NO: 1475108 - DNA, 15 bp, Homo sapiens
accgtgttggccagg

SEQ ID NO: 1475109 - DNA, 15 bp, Homo sapiens
caccgtgttggccag

SEQ ID NO: 1475110 - DNA, 15 bp, Homo sapiens
tcaccgtgttggcca

SEQ ID NO: 1475111 - DNA, 15 bp, Homo sapiens
ttcaccgtgttggcc

SEQ ID NO: 1475112 - DNA, 15 bp, Homo sapiens
tttcaccgtgttggc

SEQ ID NO: 1475113 - DNA, 15 bp, Homo sapiens
tggggtttcaccgtg

SEQ ID NO: 1475114 - DNA, 15 bp, Homo sapiens
gtggggtttcaccgt

SEQ ID NO: 1475115 - DNA, 15 bp, Homo sapiens
ggtggggtttcaccg

SEQ ID NO: 1475116 - DNA, 15 bp, Homo sapiens
agaggtggggtttca

SEQ ID NO: 1475117 - DNA, 15 bp, Homo sapiens
tagaggtggggtttc

SEQ ID NO: 1475118 - DNA, 15 bp, Homo sapiens
gtagaggtggggttt

SEQ ID NO: 1475119 - DNA, 15 bp, Homo sapiens
agtagaggtggggtt

SEQ ID NO: 1475120 - DNA, 15 bp, Homo sapiens
tagtagaggtggggt

SEQ ID NO: 1475121 - DNA, 15 bp, Homo sapiens
ttagtagaggtgggg

SEQ ID NO: 1475122 - DNA, 15 bp, Homo sapiens
tttagtagaggtggg

SEQ ID NO: 1475123 - DNA, 15 bp, Homo sapiens
ttttagtagaggtgg

SEQ ID NO: 1475124 - DNA, 15 bp, Homo sapiens
tttttagtagaggtg

SEQ ID NO: 1475125 - DNA, 15 bp, Homo sapiens
atttttagtagaggt

SEQ ID NO: 1475126 - DNA, 15 bp, Homo sapiens
tccgccaccacgcct

SEQ ID NO: 1475127 - DNA, 15 bp, Homo sapiens
gtccgccaccacgcc

SEQ ID NO: 1475128 - DNA, 15 bp, Homo sapiens
cgtccgccaccacgc

SEQ ID NO: 1475129 - DNA, 15 bp, Homo sapiens
gcgtccgccaccacg

SEQ ID NO: 1475130 - DNA, 15 bp, Homo sapiens
ggcgtccgccaccac

SEQ ID NO: 1475131 - DNA, 15 bp, Homo sapiens
aggcgtccgccacca

SEQ ID NO: 1475132 - DNA, 15 bp, Homo sapiens
caggcgtccgccacc

SEQ ID NO: 1475133 - DNA, 15 bp, Homo sapiens
acaggcgtccgccac

SEQ ID NO: 1475134 - DNA, 15 bp, Homo sapiens
tacaggcgtccgcca

SEQ ID NO: 1475135 - DNA, 15 bp, Homo sapiens
ttacaggcgtccgcc

SEQ ID NO: 1475136 - DNA, 15 bp, Homo sapiens
attacaggcgtccgc

SEQ ID NO: 1475137 - DNA, 15 bp, Homo sapiens
gattacaggcgtccg

SEQ ID NO: 1475138 - DNA, 15 bp, Homo sapiens
ggattacaggcgtcc

SEQ ID NO: 1475139 - DNA, 15 bp, Homo sapiens
gggattacaggcgtc

SEQ ID NO: 1475140 - DNA, 15 bp, Homo sapiens
atcctgcctcaggct

SEQ ID NO: 1475141 - DNA, 15 bp, Homo sapiens
tatcctgcctcaggc

SEQ ID NO: 1475142 - DNA, 15 bp, Homo sapiens
ttatcctgcctcagg

SEQ ID NO: 1475143 - DNA, 15 bp, Homo sapiens
gattatcctgcctca

SEQ ID NO: 1475144 - DNA, 15 bp, Homo sapiens
tgattatcctgcctc

SEQ ID NO: 1475145 - DNA, 15 bp, Homo sapiens
gtgattatcctgcct

SEQ ID NO: 1475146 - DNA, 15 bp, Homo sapiens
agtgattatcctgcc

SEQ ID NO: 1475147 - DNA, 15 bp, Homo sapiens
aagtgattatcctgc

SEQ ID NO: 1475148 - DNA, 15 bp, Homo sapiens
taagtgattatcctg

SEQ ID NO: 1475149 - DNA, 15 bp, Homo sapiens
ttaagtgattatcct

SEQ ID NO: 1475150 - DNA, 15 bp, Homo sapiens
tttaagtgattatcc

SEQ ID NO: 1475151 - DNA, 15 bp, Homo sapiens
gtttaagtgattatc

SEQ ID NO: 1475152 - DNA, 15 bp, Homo sapiens
ggtttaagtgattat

SEQ ID NO: 1475153 - DNA, 15 bp, Homo sapiens
gggtttaagtgatta

SEQ ID NO: 1475154 - DNA, 15 bp, Homo sapiens
cgggtttaagtgatt

SEQ ID NO: 1475155 - DNA, 15 bp, Homo sapiens
ccgggtttaagtgat

SEQ ID NO: 1475156 - DNA, 15 bp, Homo sapiens
cccgggtttaagtga

SEQ ID NO: 1475157 - DNA, 15 bp, Homo sapiens
tcccgggtttaagtg

SEQ ID NO: 1475158 - DNA, 15 bp, Homo sapiens
ctcccgggtttaagt

SEQ ID NO: 1475159 - DNA, 15 bp, Homo sapiens
acctcccgggtttaa

SEQ ID NO: 1475160 - DNA, 15 bp, Homo sapiens
cacctcccgggttta

SEQ ID NO: 1475161 - DNA, 15 bp, Homo sapiens
ccacctcccgggttt

SEQ ID NO: 1475162 - DNA, 15 bp, Homo sapiens
gcaatcttggctcac

SEQ ID NO: 1475163 - DNA, 15 bp, Homo sapiens
tgcaatcttggctca

SEQ ID NO: 1475164 - DNA, 15 bp, Homo sapiens
atgcaatcttggctc

SEQ ID NO: 1475165 - DNA, 15 bp, Homo sapiens
gatgcaatcttggct

SEQ ID NO: 1475166 - DNA, 15 bp, Homo sapiens
tgatgcaatcttggc

SEQ ID NO: 1475167 - DNA, 15 bp, Homo sapiens
gtgatgcaatcttgg

SEQ ID NO: 1475168 - DNA, 15 bp, Homo sapiens
agtgatgcaatcttg

SEQ ID NO: 1475169 - DNA, 15 bp, Homo sapiens
cagtgatgcaatctt

SEQ ID NO: 1475170 - DNA, 15 bp, Homo sapiens
gcagtgatgcaatct

SEQ ID NO: 1475171 - DNA, 15 bp, Homo sapiens
tgcagtgatgcaatc

SEQ ID NO: 1475172 - DNA, 15 bp, Homo sapiens
gtgcagtgatgcaat

SEQ ID NO: 1475173 - DNA, 15 bp, Homo sapiens
agtgcagtgatgcaa

SEQ ID NO: 1475174 - DNA, 15 bp, Homo sapiens
gagtgcagtgatgca

SEQ ID NO: 1475175 - DNA, 15 bp, Homo sapiens
ggagtgcagtgatgc

SEQ ID NO: 1475176 - DNA, 15 bp, Homo sapiens
tggagtgcagtgatg

SEQ ID NO: 1475177 - DNA, 15 bp, Homo sapiens
ctggagtgcagtgat

SEQ ID NO: 1475178 - DNA, 15 bp, Homo sapiens
ttgttgtccaggctg

SEQ ID NO: 1475179 - DNA, 15 bp, Homo sapiens
cttgttgtccaggct

SEQ ID NO: 1475180 - DNA, 15 bp, Homo sapiens
tcttgttgtccaggc

SEQ ID NO: 1475181 - DNA, 15 bp, Homo sapiens
ctcttgttgtccagg

SEQ ID NO: 1475182 - DNA, 15 bp, Homo sapiens
gctcttgttgtccag

SEQ ID NO: 1475183 - DNA, 15 bp, Homo sapiens
cgctcttgttgtcca

SEQ ID NO: 1475184 - DNA, 15 bp, Homo sapiens
tcgctcttgttgtcc

SEQ ID NO: 1475185 - DNA, 15 bp, Homo sapiens
ttcgctcttgttgtc

SEQ ID NO: 1475186 - DNA, 15 bp, Homo sapiens
tttcgctcttgttgt

SEQ ID NO: 1475187 - DNA, 15 bp, Homo sapiens
tctttttgagatgga

SEQ ID NO: 1475188 - DNA, 15 bp, Homo sapiens
ttctttttgagatgg

SEQ ID NO: 1475189 - DNA, 15 bp, Homo sapiens
cttctttttgagatg

SEQ ID NO: 1475190 - DNA, 15 bp, Homo sapiens
ccttctttttgagat

SEQ ID NO: 1475191 - DNA, 15 bp, Homo sapiens
gccttctttttgaga

SEQ ID NO: 1475192 - DNA, 15 bp, Homo sapiens
agccttctttttgag

SEQ ID NO: 1475193 - DNA, 15 bp, Homo sapiens
cagccttctttttga

SEQ ID NO: 1475194 - DNA, 15 bp, Homo sapiens
tcagccttctttttg

SEQ ID NO: 1475195 - DNA, 15 bp, Homo sapiens
ttcagccttcttttt

SEQ ID NO: 1475196 - DNA, 15 bp, Homo sapiens
gttcagccttctttt

SEQ ID NO: 1475197 - DNA, 15 bp, Homo sapiens
cgttcagccttcttt

SEQ ID NO: 1475198 - DNA, 15 bp, Homo sapiens
acgttcagccttctt

SEQ ID NO: 1475199 - DNA, 15 bp, Homo sapiens
cacgttcagccttct

SEQ ID NO: 1475200 - DNA, 15 bp, Homo sapiens
ccacgttcagccttc

SEQ ID NO: 1475201 - DNA, 15 bp, Homo sapiens
accacgttcagcctt

SEQ ID NO: 1475202 - DNA, 15 bp, Homo sapiens
caccacgttcagcct

SEQ ID NO: 1475203 - DNA, 15 bp, Homo sapiens
ccaccacgttcagcc

SEQ ID NO: 1475204 - DNA, 15 bp, Homo sapiens
gccaccacgttcagc

SEQ ID NO: 1475205 - DNA, 15 bp, Homo sapiens
agccaccacgttcag

SEQ ID NO: 1475206 - DNA, 15 bp, Homo sapiens
gagccaccacgttca

SEQ ID NO: 1475207 - DNA, 15 bp, Homo sapiens
tgagccaccacgttc

SEQ ID NO: 1475208 - DNA, 15 bp, Homo sapiens
atgagccaccacgtt

SEQ ID NO: 1475209 - DNA, 15 bp, Homo sapiens
catgagccaccacgt

SEQ ID NO: 1475210 - DNA, 15 bp, Homo sapiens
gcatgagccaccacg

SEQ ID NO: 1475211 - DNA, 15 bp, Homo sapiens
cgcccacctcagcct

SEQ ID NO: 1475212 - DNA, 15 bp, Homo sapiens
ccgcccacctcagcc

SEQ ID NO: 1475213 - DNA, 15 bp, Homo sapiens
tccgcccacctcagc

SEQ ID NO: 1475214 - DNA, 15 bp, Homo sapiens
atccgcccacctcag

SEQ ID NO: 1475215 - DNA, 15 bp, Homo sapiens
gtgttggccaggctg

SEQ ID NO: 1475216 - DNA, 15 bp, Homo sapiens
tgtgttggccaggct

SEQ ID NO: 1475217 - DNA, 15 bp, Homo sapiens
ctgtgttggccaggc

SEQ ID NO: 1475218 - DNA, 15 bp, Homo sapiens
actgtgttggccagg

SEQ ID NO: 1475219 - DNA, 15 bp, Homo sapiens
cactgtgttggccag

SEQ ID NO: 1475220 - DNA, 15 bp, Homo sapiens
tcactgtgttggcca

SEQ ID NO: 1475221 - DNA, 15 bp, Homo sapiens
ttcactgtgttggcc

SEQ ID NO: 1475222 - DNA, 15 bp, Homo sapiens
tttcactgtgttggc

SEQ ID NO: 1475223 - DNA, 15 bp, Homo sapiens
gtttcactgtgttgg

SEQ ID NO: 1475224 - DNA, 15 bp, Homo sapiens
ggtttcactgtgttg

SEQ ID NO: 1475225 - DNA, 15 bp, Homo sapiens
agggtttcactgtgt

SEQ ID NO: 1475226 - DNA, 15 bp, Homo sapiens
cagggtttcactgtg

SEQ ID NO: 1475227 - DNA, 15 bp, Homo sapiens
acagggtttcactgt

SEQ ID NO: 1475228 - DNA, 15 bp, Homo sapiens
gacagggtttcactg

SEQ ID NO: 1475229 - DNA, 15 bp, Homo sapiens
gtgccaccatgcctg

SEQ ID NO: 1475230 - DNA, 15 bp, Homo sapiens
tatgtgccaccatgc

SEQ ID NO: 1475231 - DNA, 15 bp, Homo sapiens
gtatgtgccaccatg

SEQ ID NO: 1475232 - DNA, 15 bp, Homo sapiens
ggtatgtgccaccat

SEQ ID NO: 1475233 - DNA, 15 bp, Homo sapiens
aggtatgtgccacca

SEQ ID NO: 1475234 - DNA, 15 bp, Homo sapiens
caggtatgtgccacc

SEQ ID NO: 1475235 - DNA, 15 bp, Homo sapiens
acaggtatgtgccac

SEQ ID NO: 1475236 - DNA, 15 bp, Homo sapiens
tacaggtatgtgcca

SEQ ID NO: 1475237 - DNA, 15 bp, Homo sapiens
ttacaggtatgtgcc

SEQ ID NO: 1475238 - DNA, 15 bp, Homo sapiens
attacaggtatgtgc

SEQ ID NO: 1475239 - DNA, 15 bp, Homo sapiens
gattacaggtatgtg

SEQ ID NO: 1475240 - DNA, 15 bp, Homo sapiens
ggattacaggtatgt

SEQ ID NO: 1475241 - DNA, 15 bp, Homo sapiens
gggattacaggtatg

SEQ ID NO: 1475242 - DNA, 15 bp, Homo sapiens
tgggattacaggtat

SEQ ID NO: 1475243 - DNA, 15 bp, Homo sapiens
ctgggattacaggta

SEQ ID NO: 1475244 - DNA, 15 bp, Homo sapiens
tagtagctgggatta

SEQ ID NO: 1475245 - DNA, 15 bp, Homo sapiens
ctagtagctgggatt

SEQ ID NO: 1475246 - DNA, 15 bp, Homo sapiens
tctagtagctgggat

SEQ ID NO: 1475247 - DNA, 15 bp, Homo sapiens
ctctagtagctggga

SEQ ID NO: 1475248 - DNA, 15 bp, Homo sapiens
cctctagtagctggg

SEQ ID NO: 1475249 - DNA, 15 bp, Homo sapiens
ccctctagtagctgg

SEQ ID NO: 1475250 - DNA, 15 bp, Homo sapiens
cccctctagtagctg

SEQ ID NO: 1475251 - DNA, 15 bp, Homo sapiens
acccctctagtagct

SEQ ID NO: 1475252 - DNA, 15 bp, Homo sapiens
cacccctctagtagc

SEQ ID NO: 1475253 - DNA, 15 bp, Homo sapiens
ccacccctctagtag

SEQ ID NO: 1475254 - DNA, 15 bp, Homo sapiens
tccacccctctagta

SEQ ID NO: 1475255 - DNA, 15 bp, Homo sapiens
ctccacccctctagt

SEQ ID NO: 1475256 - DNA, 15 bp, Homo sapiens
cctccacccctctag

SEQ ID NO: 1475257 - DNA, 15 bp, Homo sapiens
gcctccacccctcta

SEQ ID NO: 1475258 - DNA, 15 bp, Homo sapiens
tgcctccacccctct

SEQ ID NO: 1475259 - DNA, 15 bp, Homo sapiens
ctgcctccacccctc

SEQ ID NO: 1475260 - DNA, 15 bp, Homo sapiens
cctgcctccacccct

SEQ ID NO: 1475261 - DNA, 15 bp, Homo sapiens
tcctgcctccacccc

SEQ ID NO: 1475262 - DNA, 15 bp, Homo sapiens
ctcctgcctccaccc

SEQ ID NO: 1475263 - DNA, 15 bp, Homo sapiens
tctcctgcctccacc

SEQ ID NO: 1475264 - DNA, 15 bp, Homo sapiens
ttctcctgcctccac

SEQ ID NO: 1475265 - DNA, 15 bp, Homo sapiens
attctcctgcctcca

SEQ ID NO: 1475266 - DNA, 15 bp, Homo sapiens
gattctcctgcctcc

SEQ ID NO: 1475267 - DNA, 15 bp, Homo sapiens
gctcaagcgattctc

SEQ ID NO: 1475268 - DNA, 15 bp, Homo sapiens
ggctcaagcgattct

SEQ ID NO: 1475269 - DNA, 15 bp, Homo sapiens
aggctcaagcgattc

SEQ ID NO: 1475270 - DNA, 15 bp, Homo sapiens
ttctgcctcccaggc

SEQ ID NO: 1475271 - DNA, 15 bp, Homo sapiens
attctgcctcccagg

SEQ ID NO: 1475272 - DNA, 15 bp, Homo sapiens
aattctgcctcccag

SEQ ID NO: 1475273 - DNA, 15 bp, Homo sapiens
aaattctgcctccca

SEQ ID NO: 1475274 - DNA, 15 bp, Homo sapiens
caaattctgcctccc

SEQ ID NO: 1475275 - DNA, 15 bp, Homo sapiens
gcaaattctgcctcc

SEQ ID NO: 1475276 - DNA, 15 bp, Homo sapiens
tgcaaattctgcctc

SEQ ID NO: 1475277 - DNA, 15 bp, Homo sapiens
ctgcaaattctgcct

SEQ ID NO: 1475278 - DNA, 15 bp, Homo sapiens
actgcaaattctgcc

SEQ ID NO: 1475279 - DNA, 15 bp, Homo sapiens
cactgcaaattctgc

SEQ ID NO: 1475280 - DNA, 15 bp, Homo sapiens
tcactgcaaattctg

SEQ ID NO: 1475281 - DNA, 15 bp, Homo sapiens
ctcactgcaaattct

SEQ ID NO: 1475282 - DNA, 15 bp, Homo sapiens
gctcactgcaaattc

SEQ ID NO: 1475283 - DNA, 15 bp, Homo sapiens
ggctcactgcaaatt

SEQ ID NO: 1475284 - DNA, 15 bp, Homo sapiens
tggctcactgcaaat

SEQ ID NO: 1475285 - DNA, 15 bp, Homo sapiens
ttggctcactgcaaa

SEQ ID NO: 1475286 - DNA, 15 bp, Homo sapiens
ggctctgttgcccag

SEQ ID NO: 1475287 - DNA, 15 bp, Homo sapiens
tggctctgttgccca

SEQ ID NO: 1475288 - DNA, 15 bp, Homo sapiens
ctggctctgttgccc

SEQ ID NO: 1475289 - DNA, 15 bp, Homo sapiens
tctggctctgttgcc

SEQ ID NO: 1475290 - DNA, 15 bp, Homo sapiens
gtctggctctgttgc

SEQ ID NO: 1475291 - DNA, 15 bp, Homo sapiens
agtctggctctgttg

SEQ ID NO: 1475292 - DNA, 15 bp, Homo sapiens
gagtctggctctgtt

SEQ ID NO: 1475293 - DNA, 15 bp, Homo sapiens
agagtctggctctgt

SEQ ID NO: 1475294 - DNA, 15 bp, Homo sapiens
cagagtctggctctg

SEQ ID NO: 1475295 - DNA, 15 bp, Homo sapiens
acagagtctggctct

SEQ ID NO: 1475296 - DNA, 15 bp, Homo sapiens
aacagagtctggctc

SEQ ID NO: 1475297 - DNA, 15 bp, Homo sapiens
caacagagtctggct

SEQ ID NO: 1475298 - DNA, 15 bp, Homo sapiens
ccaacagagtctggc

SEQ ID NO: 1475299 - DNA, 15 bp, Homo sapiens
cccaacagagtctgg

SEQ ID NO: 1475300 - DNA, 15 bp, Homo sapiens
ccccaacagagtctg

SEQ ID NO: 1475301 - DNA, 15 bp, Homo sapiens
cccccaacagagtct

SEQ ID NO: 1475302 - DNA, 15 bp, Homo sapiens
ccccccaacagagtc

SEQ ID NO: 1475303 - DNA, 15 bp, Homo sapiens
cccccccaacagagt

SEQ ID NO: 1475304 - DNA, 15 bp, Homo sapiens
tcccccccaacagag

SEQ ID NO: 1475305 - DNA, 15 bp, Homo sapiens
ttcccccccaacaga

SEQ ID NO: 1475306 - DNA, 15 bp, Homo sapiens
cttcccccccaacag

SEQ ID NO: 1475307 - DNA, 15 bp, Homo sapiens
tcttcccccccaaca

SEQ ID NO: 1475308 - DNA, 15 bp, Homo sapiens
ttcttcccccccaac

SEQ ID NO: 1475309 - DNA, 15 bp, Homo sapiens
cttcttcccccccaa

SEQ ID NO: 1475310 - DNA, 15 bp, Homo sapiens
tcttcttccccccca

SEQ ID NO: 1475311 - DNA, 15 bp, Homo sapiens
ttcttcttccccccc

SEQ ID NO: 1475312 - DNA, 15 bp, Homo sapiens
tttcttcttcccccc

SEQ ID NO: 1475313 - DNA, 15 bp, Homo sapiens
ctttcttcttccccc

SEQ ID NO: 1475314 - DNA, 15 bp, Homo sapiens
cctttcttcttcccc

SEQ ID NO: 1475315 - DNA, 15 bp, Homo sapiens
ctttcctttcttctt

SEQ ID NO: 1475316 - DNA, 15 bp, Homo sapiens
tctttcctttcttct

SEQ ID NO: 1475317 - DNA, 15 bp, Homo sapiens
ttctttcctttcttc

SEQ ID NO: 1475318 - DNA, 15 bp, Homo sapiens
tttctttcctttctt

SEQ ID NO: 1475319 - DNA, 15 bp, Homo sapiens
ttttctttcctttct

SEQ ID NO: 1475320 - DNA, 15 bp, Homo sapiens
cttttctttcctttc

SEQ ID NO: 1475321 - DNA, 15 bp, Homo sapiens
ccttttctttccttt

SEQ ID NO: 1475322 - DNA, 15 bp, Homo sapiens
tccttttctttcctt

SEQ ID NO: 1475323 - DNA, 15 bp, Homo sapiens
ttccttttctttcct

SEQ ID NO: 1475324 - DNA, 15 bp, Homo sapiens
tttccttttctttcc

SEQ ID NO: 1475325 - DNA, 15 bp, Homo sapiens
ttttccttttctttc

SEQ ID NO: 1475326 - DNA, 15 bp, Homo sapiens
cttttccttttcttt

SEQ ID NO: 1475327 - DNA, 15 bp, Homo sapiens
tcttttccttttctt

SEQ ID NO: 1475328 - DNA, 15 bp, Homo sapiens
ttcttttccttttct

SEQ ID NO: 1475329 - DNA, 15 bp, Homo sapiens
tttcttttccttttc

SEQ ID NO: 1475330 - DNA, 15 bp, Homo sapiens
ttttcttttcctttt

SEQ ID NO: 1475331 - DNA, 15 bp, Homo sapiens
cttttcttttccttt

SEQ ID NO: 1475332 - DNA, 15 bp, Homo sapiens
tcttttcttttcctt

SEQ ID NO: 1475333 - DNA, 15 bp, Homo sapiens
ttcttttcttttcct

SEQ ID NO: 1475334 - DNA, 15 bp, Homo sapiens
ctttcttttcttttc

SEQ ID NO: 1475335 - DNA, 15 bp, Homo sapiens
ctctttcttttcttt

SEQ ID NO: 1475336 - DNA, 15 bp, Homo sapiens
tctctttcttttctt

SEQ ID NO: 1475337 - DNA, 15 bp, Homo sapiens
ttctctttcttttct

SEQ ID NO: 1475338 - DNA, 15 bp, Homo sapiens
cttctctttcttttc

SEQ ID NO: 1475339 - DNA, 15 bp, Homo sapiens
ccttctctttctttt

SEQ ID NO: 1475340 - DNA, 15 bp, Homo sapiens
tccttctctttcttt

SEQ ID NO: 1475341 - DNA, 15 bp, Homo sapiens
ttccttctctttctt

SEQ ID NO: 1475342 - DNA, 15 bp, Homo sapiens
cttccttctctttct

SEQ ID NO: 1475343 - DNA, 15 bp, Homo sapiens
ccttccttctctttc

SEQ ID NO: 1475344 - DNA, 15 bp, Homo sapiens
tccttccttctcttt

SEQ ID NO: 1475345 - DNA, 15 bp, Homo sapiens
ttccttccttctctt

SEQ ID NO: 1475346 - DNA, 15 bp, Homo sapiens
cttccttccttctct

SEQ ID NO: 1475347 - DNA, 15 bp, Homo sapiens
tcttccttccttctc

SEQ ID NO: 1475348 - DNA, 15 bp, Homo sapiens
ttcttccttccttct

SEQ ID NO: 1475349 - DNA, 15 bp, Homo sapiens
tttcttccttccttc

SEQ ID NO: 1475350 - DNA, 15 bp, Homo sapiens
ctttcttccttcctt

SEQ ID NO: 1475351 - DNA, 15 bp, Homo sapiens
cctttcttccttcct

SEQ ID NO: 1475352 - DNA, 15 bp, Homo sapiens
ccctttcttccttcc

SEQ ID NO: 1475353 - DNA, 15 bp, Homo sapiens
tccctttcttccttc

SEQ ID NO: 1475354 - DNA, 15 bp, Homo sapiens
ctccctttcttcctt

SEQ ID NO: 1475355 - DNA, 15 bp, Homo sapiens
cctccctttcttcct

SEQ ID NO: 1475356 - DNA, 15 bp, Homo sapiens
ccctccctttcttcc

SEQ ID NO: 1475357 - DNA, 15 bp, Homo sapiens
tccctccctttcttc

SEQ ID NO: 1475358 - DNA, 15 bp, Homo sapiens
ctccctccctttctt

SEQ ID NO: 1475359 - DNA, 15 bp, Homo sapiens
cctccctccctttct

SEQ ID NO: 1475360 - DNA, 15 bp, Homo sapiens
ccctccctccctttc

SEQ ID NO: 1475361 - DNA, 15 bp, Homo sapiens
tccctccctcccttt

SEQ ID NO: 1475362 - DNA, 15 bp, Homo sapiens
ttccctccctccctt

SEQ ID NO: 1475363 - DNA, 15 bp, Homo sapiens
ctccttccctccctc

SEQ ID NO: 1475364 - DNA, 15 bp, Homo sapiens
cctccttccctccct

SEQ ID NO: 1475365 - DNA, 15 bp, Homo sapiens
tcctccttccctccc

SEQ ID NO: 1475366 - DNA, 15 bp, Homo sapiens
ttcctccttccctcc

SEQ ID NO: 1475367 - DNA, 15 bp, Homo sapiens
cttcctccttccctc

SEQ ID NO: 1475368 - DNA, 15 bp, Homo sapiens
tcttcctccttccct

SEQ ID NO: 1475369 - DNA, 15 bp, Homo sapiens
ctcttcctccttccc

SEQ ID NO: 1475370 - DNA, 15 bp, Homo sapiens
cctcttcctccttcc

SEQ ID NO: 1475371 - DNA, 15 bp, Homo sapiens
gcctcttcctccttc

SEQ ID NO: 1475372 - DNA, 15 bp, Homo sapiens
agcctcttcctcctt

SEQ ID NO: 1475373 - DNA, 15 bp, Homo sapiens
aagcctcttcctcct

SEQ ID NO: 1475374 - DNA, 15 bp, Homo sapiens
aaagcctcttcctcc

SEQ ID NO: 1475375 - DNA, 15 bp, Homo sapiens
gaaagcctcttcctc

SEQ ID NO: 1475376 - DNA, 15 bp, Homo sapiens
tgaaagcctcttcct

SEQ ID NO: 1475377 - DNA, 15 bp, Homo sapiens
ctgaaagcctcttcc

SEQ ID NO: 1475378 - DNA, 15 bp, Homo sapiens
tctgaaagcctcttc

SEQ ID NO: 1475379 - DNA, 15 bp, Homo sapiens
ttctgaaagcctctt

SEQ ID NO: 1475380 - DNA, 15 bp, Homo sapiens
attctgaaagcctct

SEQ ID NO: 1475381 - DNA, 15 bp, Homo sapiens
tattctgaaagcctc

SEQ ID NO: 1475382 - DNA, 15 bp, Homo sapiens
gtattctgaaagcct

SEQ ID NO: 1475383 - DNA, 15 bp, Homo sapiens
tgtattctgaaagcc

SEQ ID NO: 1475384 - DNA, 15 bp, Homo sapiens
ctgtattctgaaagc

SEQ ID NO: 1475385 - DNA, 15 bp, Homo sapiens
tctgtattctgaaag

SEQ ID NO: 1475386 - DNA, 15 bp, Homo sapiens
ctctgtattctgaaa

SEQ ID NO: 1475387 - DNA, 15 bp, Homo sapiens
cctctgtattctgaa

SEQ ID NO: 1475388 - DNA, 15 bp, Homo sapiens
ccctctgtattctga

SEQ ID NO: 1475389 - DNA, 15 bp, Homo sapiens
accctctgtattctg

SEQ ID NO: 1475390 - DNA, 15 bp, Homo sapiens
aaccctctgtattct

SEQ ID NO: 1475391 - DNA, 15 bp, Homo sapiens
gaaccctctgtattc

SEQ ID NO: 1475392 - DNA, 15 bp, Homo sapiens
agaaccctctgtatt

SEQ ID NO: 1475393 - DNA, 15 bp, Homo sapiens
cagaaccctctgtat

SEQ ID NO: 1475394 - DNA, 15 bp, Homo sapiens
gcagaaccctctgta

SEQ ID NO: 1475395 - DNA, 15 bp, Homo sapiens
tgcagaaccctctgt

SEQ ID NO: 1475396 - DNA, 15 bp, Homo sapiens
ctgcagaaccctctg

SEQ ID NO: 1475397 - DNA, 15 bp, Homo sapiens
actgcagaaccctct

SEQ ID NO: 1475398 - DNA, 15 bp, Homo sapiens
cactgcagaaccctc

SEQ ID NO: 1475399 - DNA, 15 bp, Homo sapiens
acactgcagaaccct

SEQ ID NO: 1475400 - DNA, 15 bp, Homo sapiens
cacactgcagaaccc

SEQ ID NO: 1475401 - DNA, 15 bp, Homo sapiens
acacactgcagaacc

SEQ ID NO: 1475402 - DNA, 15 bp, Homo sapiens
cacacactgcagaac

SEQ ID NO: 1475403 - DNA, 15 bp, Homo sapiens
ccacacactgcagaa

SEQ ID NO: 1475404 - DNA, 15 bp, Homo sapiens
tccacacactgcaga

SEQ ID NO: 1475405 - DNA, 15 bp, Homo sapiens
ctccacacactgcag

SEQ ID NO: 1475406 - DNA, 15 bp, Homo sapiens
tctccacacactgca

SEQ ID NO: 1475407 - DNA, 15 bp, Homo sapiens
ctctccacacactgc

SEQ ID NO: 1475408 - DNA, 15 bp, Homo sapiens
tctctccacacactg

SEQ ID NO: 1475409 - DNA, 15 bp, Homo sapiens
atctctccacacact

SEQ ID NO: 1475410 - DNA, 15 bp, Homo sapiens
tatctctccacacac

SEQ ID NO: 1475411 - DNA, 15 bp, Homo sapiens
gtatctctccacaca

SEQ ID NO: 1475412 - DNA, 15 bp, Homo sapiens
agtatctctccacac

SEQ ID NO: 1475413 - DNA, 15 bp, Homo sapiens
aagtatctctccaca

SEQ ID NO: 1475414 - DNA, 15 bp, Homo sapiens
caagtatctctccac

SEQ ID NO: 1475415 - DNA, 15 bp, Homo sapiens
acaagtatctctcca

SEQ ID NO: 1475416 - DNA, 15 bp, Homo sapiens
aacaagtatctctcc

SEQ ID NO: 1475417 - DNA, 15 bp, Homo sapiens
gaacaagtatctctc

SEQ ID NO: 1475418 - DNA, 15 bp, Homo sapiens
ggaacaagtatctct

SEQ ID NO: 1475419 - DNA, 15 bp, Homo sapiens
aggaacaagtatctc

SEQ ID NO: 1475420 - DNA, 15 bp, Homo sapiens
taggaacaagtatct

SEQ ID NO: 1475421 - DNA, 15 bp, Homo sapiens
gtaggaacaagtatc

SEQ ID NO: 1475422 - DNA, 15 bp, Homo sapiens
ggtaggaacaagtat

SEQ ID NO: 1475423 - DNA, 15 bp, Homo sapiens
aggtaggaacaagta

SEQ ID NO: 1475424 - DNA, 15 bp, Homo sapiens
aaggtaggaacaagt

SEQ ID NO: 1475425 - DNA, 15 bp, Homo sapiens
aaaggtaggaacaag

SEQ ID NO: 1475426 - DNA, 15 bp, Homo sapiens
caaaggtaggaacaa

SEQ ID NO: 1475427 - DNA, 15 bp, Homo sapiens
tcaaaggtaggaaca

SEQ ID NO: 1475428 - DNA, 15 bp, Homo sapiens
atcaaaggtaggaac

SEQ ID NO: 1475429 - DNA, 15 bp, Homo sapiens
catcaaaggtaggaa

SEQ ID NO: 1475430 - DNA, 15 bp, Homo sapiens
ccatcaaaggtagga

SEQ ID NO: 1475431 - DNA, 15 bp, Homo sapiens
accatcaaaggtagg

SEQ ID NO: 1475432 - DNA, 15 bp, Homo sapiens
caccatcaaaggtag

SEQ ID NO: 1475433 - DNA, 15 bp, Homo sapiens
ccaccatcaaaggta

SEQ ID NO: 1475434 - DNA, 15 bp, Homo sapiens
cccaccatcaaaggt

SEQ ID NO: 1475435 - DNA, 15 bp, Homo sapiens
ccccaccatcaaagg

SEQ ID NO: 1475436 - DNA, 15 bp, Homo sapiens
gccccaccatcaaag

SEQ ID NO: 1475437 - DNA, 15 bp, Homo sapiens
ggccccaccatcaaa

SEQ ID NO: 1475438 - DNA, 15 bp, Homo sapiens
gggccccaccatcaa

SEQ ID NO: 1475439 - DNA, 15 bp, Homo sapiens
tgggccccaccatca

SEQ ID NO: 1475440 - DNA, 15 bp, Homo sapiens
ctgggccccaccatc

SEQ ID NO: 1475441 - DNA, 15 bp, Homo sapiens
gctgggccccaccat

SEQ ID NO: 1475442 - DNA, 15 bp, Homo sapiens
tgctgggccccacca

SEQ ID NO: 1475443 - DNA, 15 bp, Homo sapiens
gtgctgggccccacc

SEQ ID NO: 1475444 - DNA, 15 bp, Homo sapiens
tgtgctgggccccac

SEQ ID NO: 1475445 - DNA, 15 bp, Homo sapiens
gtgtgctgggcccca

SEQ ID NO: 1475446 - DNA, 15 bp, Homo sapiens
ggtgtgctgggcccc

SEQ ID NO: 1475447 - DNA, 15 bp, Homo sapiens
ttgggtgtgctgggc

SEQ ID NO: 1475448 - DNA, 15 bp, Homo sapiens
gttgggtgtgctggg

SEQ ID NO: 1475449 - DNA, 15 bp, Homo sapiens
agttgggtgtgctgg

SEQ ID NO: 1475450 - DNA, 15 bp, Homo sapiens
gagttgggtgtgctg

SEQ ID NO: 1475451 - DNA, 15 bp, Homo sapiens
ggagttgggtgtgct

SEQ ID NO: 1475452 - DNA, 15 bp, Homo sapiens
gggagttgggtgtgc

SEQ ID NO: 1475453 - DNA, 15 bp, Homo sapiens
ggggagttgggtgtg

SEQ ID NO: 1475454 - DNA, 15 bp, Homo sapiens
gggggagttgggtgt

SEQ ID NO: 1475455 - DNA, 15 bp, Homo sapiens
tgggggagttgggtg

SEQ ID NO: 1475456 - DNA, 15 bp, Homo sapiens
atgggggagttgggt

SEQ ID NO: 1475457 - DNA, 15 bp, Homo sapiens
gatgggggagttggg

SEQ ID NO: 1475458 - DNA, 15 bp, Homo sapiens
agatgggggagttgg

SEQ ID NO: 1475459 - DNA, 15 bp, Homo sapiens
gagatgggggagttg

SEQ ID NO: 1475460 - DNA, 15 bp, Homo sapiens
ggagatgggggagtt

SEQ ID NO: 1475461 - DNA, 15 bp, Homo sapiens
cggagatgggggagt

SEQ ID NO: 1475462 - DNA, 15 bp, Homo sapiens
tcggagatgggggag

SEQ ID NO: 1475463 - DNA, 15 bp, Homo sapiens
ttcggagatggggga

SEQ ID NO: 1475464 - DNA, 15 bp, Homo sapiens
tttcggagatggggg

SEQ ID NO: 1475465 - DNA, 15 bp, Homo sapiens
atttcggagatgggg

SEQ ID NO: 1475466 - DNA, 15 bp, Homo sapiens
catttcggagatggg

SEQ ID NO: 1475467 - DNA, 15 bp, Homo sapiens
tcatttcggagatgg

SEQ ID NO: 1475468 - DNA, 15 bp, Homo sapiens
atcatttcggagatg

SEQ ID NO: 1475469 - DNA, 15 bp, Homo sapiens
gatcatttcggagat

SEQ ID NO: 1475470 - DNA, 15 bp, Homo sapiens
agatcatttcggaga

SEQ ID NO: 1475471 - DNA, 15 bp, Homo sapiens
gagatcatttcggag

SEQ ID NO: 1475472 - DNA, 15 bp, Homo sapiens
ggagatcatttcgga

SEQ ID NO: 1475473 - DNA, 15 bp, Homo sapiens
gggagatcatttcgg

SEQ ID NO: 1475474 - DNA, 15 bp, Homo sapiens
cgggagatcatttcg

SEQ ID NO: 1475475 - DNA, 15 bp, Homo sapiens
tcgggagatcatttc

SEQ ID NO: 1475476 - DNA, 15 bp, Homo sapiens
atcgggagatcattt

SEQ ID NO: 1475477 - DNA, 15 bp, Homo sapiens
catcgggagatcatt

SEQ ID NO: 1475478 - DNA, 15 bp, Homo sapiens
tcatcgggagatcat

SEQ ID NO: 1475479 - DNA, 15 bp, Homo sapiens
ttcatcgggagatca

SEQ ID NO: 1475480 - DNA, 15 bp, Homo sapiens
tttcatcgggagatc

SEQ ID NO: 1475481 - DNA, 15 bp, Homo sapiens
ttttcatcgggagat

SEQ ID NO: 1475482 - DNA, 15 bp, Homo sapiens
tttttcatcgggaga

SEQ ID NO: 1475483 - DNA, 15 bp, Homo sapiens
gtttttcatcgggag

SEQ ID NO: 1475484 - DNA, 15 bp, Homo sapiens
agtttttcatcggga

SEQ ID NO: 1475485 - DNA, 15 bp, Homo sapiens
cagtttttcatcggg

SEQ ID NO: 1475486 - DNA, 15 bp, Homo sapiens
gcagtttttcatcgg

SEQ ID NO: 1475487 - DNA, 15 bp, Homo sapiens
tgcagtttttcatcg

SEQ ID NO: 1475488 - DNA, 15 bp, Homo sapiens
ttgcagtttttcatc

SEQ ID NO: 1475489 - DNA, 15 bp, Homo sapiens
tttgcagtttttcat

SEQ ID NO: 1475490 - DNA, 15 bp, Homo sapiens
ctttgcagtttttca

SEQ ID NO: 1475491 - DNA, 15 bp, Homo sapiens
cctttgcagtttttc

SEQ ID NO: 1475492 - DNA, 15 bp, Homo sapiens
ccctttgcagttttt

SEQ ID NO: 1475493 - DNA, 15 bp, Homo sapiens
tccctttgcagtttt

SEQ ID NO: 1475494 - DNA, 15 bp, Homo sapiens
gtccctttgcagttt

SEQ ID NO: 1475495 - DNA, 15 bp, Homo sapiens
ggtccctttgcagtt

SEQ ID NO: 1475496 - DNA, 15 bp, Homo sapiens
tggtccctttgcagt

SEQ ID NO: 1475497 - DNA, 15 bp, Homo sapiens
ctggtccctttgcag

SEQ ID NO: 1475498 - DNA, 15 bp, Homo sapiens
actggtccctttgca

SEQ ID NO: 1475499 - DNA, 15 bp, Homo sapiens
cactggtccctttgc

SEQ ID NO: 1475500 - DNA, 15 bp, Homo sapiens
gcactggtccctttg

SEQ ID NO: 1475501 - DNA, 15 bp, Homo sapiens
ggcactggtcccttt

SEQ ID NO: 1475502 - DNA, 15 bp, Homo sapiens
gggcactggtccctt

SEQ ID NO: 1475503 - DNA, 15 bp, Homo sapiens
tgggcactggtccct

SEQ ID NO: 1475504 - DNA, 15 bp, Homo sapiens
ttgggcactggtccc

SEQ ID NO: 1475505 - DNA, 15 bp, Homo sapiens
tttgggcactggtcc

SEQ ID NO: 1475506 - DNA, 15 bp, Homo sapiens
atttgggcactggtc

SEQ ID NO: 1475507 - DNA, 15 bp, Homo sapiens
aatttgggcactggt

SEQ ID NO: 1475508 - DNA, 15 bp, Homo sapiens
gaatttgggcactgg

SEQ ID NO: 1475509 - DNA, 15 bp, Homo sapiens
tgaatttgggcactg

SEQ ID NO: 1475510 - DNA, 15 bp, Homo sapiens
ctgaatttgggcact

SEQ ID NO: 1475511 - DNA, 15 bp, Homo sapiens
cctgaatttgggcac

SEQ ID NO: 1475512 - DNA, 15 bp, Homo sapiens
gcctgaatttgggca

SEQ ID NO: 1475513 - DNA, 15 bp, Homo sapiens
ggcctgaatttgggc

SEQ ID NO: 1475514 - DNA, 15 bp, Homo sapiens
gggcctgaatttggg

SEQ ID NO: 1475515 - DNA, 15 bp, Homo sapiens
tgggcctgaatttgg

SEQ ID NO: 1475516 - DNA, 15 bp, Homo sapiens
ctgggcctgaatttg

SEQ ID NO: 1475517 - DNA, 15 bp, Homo sapiens
cctgggcctgaattt

SEQ ID NO: 1475518 - DNA, 15 bp, Homo sapiens
gcctgggcctgaatt

SEQ ID NO: 1475519 - DNA, 15 bp, Homo sapiens
ggcctgggcctgaat

SEQ ID NO: 1475520 - DNA, 15 bp, Homo sapiens
aggcctgggcctgaa

SEQ ID NO: 1475521 - DNA, 15 bp, Homo sapiens
taggcctgggcctga

SEQ ID NO: 1475522 - DNA, 15 bp, Homo sapiens
ctaggcctgggcctg

SEQ ID NO: 1475523 - DNA, 15 bp, Homo sapiens
cctaggcctgggcct

SEQ ID NO: 1475524 - DNA, 15 bp, Homo sapiens
gcctaggcctgggcc

SEQ ID NO: 1475525 - DNA, 15 bp, Homo sapiens
ggcctaggcctgggc

SEQ ID NO: 1475526 - DNA, 15 bp, Homo sapiens
tggcctaggcctggg

SEQ ID NO: 1475527 - DNA, 15 bp, Homo sapiens
gtggcctaggcctgg

SEQ ID NO: 1475528 - DNA, 15 bp, Homo sapiens
tgtggcctaggcctg

SEQ ID NO: 1475529 - DNA, 15 bp, Homo sapiens
ctgtggcctaggcct

SEQ ID NO: 1475530 - DNA, 15 bp, Homo sapiens
cctgtggcctaggcc

SEQ ID NO: 1475531 - DNA, 15 bp, Homo sapiens
tcctgtggcctaggc

SEQ ID NO: 1475532 - DNA, 15 bp, Homo sapiens
ttcctgtggcctagg

SEQ ID NO: 1475533 - DNA, 15 bp, Homo sapiens
cttcctgtggcctag

SEQ ID NO: 1475534 - DNA, 15 bp, Homo sapiens
gcttcctgtggccta

SEQ ID NO: 1475535 - DNA, 15 bp, Homo sapiens
ggcttcctgtggcct

SEQ ID NO: 1475536 - DNA, 15 bp, Homo sapiens
gggcttcctgtggcc

SEQ ID NO: 1475537 - DNA, 15 bp, Homo sapiens
ggggcttcctgtggc

SEQ ID NO: 1475538 - DNA, 15 bp, Homo sapiens
tggggcttcctgtgg

SEQ ID NO: 1475539 - DNA, 15 bp, Homo sapiens
ctggggcttcctgtg

SEQ ID NO: 1475540 - DNA, 15 bp, Homo sapiens
gctggggcttcctgt

SEQ ID NO: 1475541 - DNA, 15 bp, Homo sapiens
ggctggggcttcctg

SEQ ID NO: 1475542 - DNA, 15 bp, Homo sapiens
gggctggggcttcct

SEQ ID NO: 1475543 - DNA, 15 bp, Homo sapiens
ggggctggggcttcc

SEQ ID NO: 1475544 - DNA, 15 bp, Homo sapiens
tggggctggggcttc

SEQ ID NO: 1475545 - DNA, 15 bp, Homo sapiens
ttggggctggggctt

SEQ ID NO: 1475546 - DNA, 15 bp, Homo sapiens
cttggggctggggct

SEQ ID NO: 1475547 - DNA, 15 bp, Homo sapiens
ccttggggctggggc

SEQ ID NO: 1475548 - DNA, 15 bp, Homo sapiens
tccttggggctgggg

SEQ ID NO: 1475549 - DNA, 15 bp, Homo sapiens
gtccttggggctggg

SEQ ID NO: 1475550 - DNA, 15 bp, Homo sapiens
tgtccttggggctgg

SEQ ID NO: 1475551 - DNA, 15 bp, Homo sapiens
ctgtccttggggctg

SEQ ID NO: 1475552 - DNA, 15 bp, Homo sapiens
tctgtccttggggct

SEQ ID NO: 1475553 - DNA, 15 bp, Homo sapiens
ctctgtccttggggc

SEQ ID NO: 1475554 - DNA, 15 bp, Homo sapiens
cctctgtccttgggg

SEQ ID NO: 1475555 - DNA, 15 bp, Homo sapiens
ccctctgtccttggg

SEQ ID NO: 1475556 - DNA, 15 bp, Homo sapiens
cccctctgtccttgg

SEQ ID NO: 1475557 - DNA, 15 bp, Homo sapiens
gcccctctgtccttg

SEQ ID NO: 1475558 - DNA, 15 bp, Homo sapiens
ggcccctctgtcctt

SEQ ID NO: 1475559 - DNA, 15 bp, Homo sapiens
aggcccctctgtcct

SEQ ID NO: 1475560 - DNA, 15 bp, Homo sapiens
aaggcccctctgtcc

SEQ ID NO: 1475561 - DNA, 15 bp, Homo sapiens
caaggcccctctgtc

SEQ ID NO: 1475562 - DNA, 15 bp, Homo sapiens
tcaaggcccctctgt

SEQ ID NO: 1475563 - DNA, 15 bp, Homo sapiens
ctcaaggcccctctg

SEQ ID NO: 1475564 - DNA, 15 bp, Homo sapiens
cctcaaggcccctct

SEQ ID NO: 1475565 - DNA, 15 bp, Homo sapiens
acctcaaggcccctc

SEQ ID NO: 1475566 - DNA, 15 bp, Homo sapiens
cacctcaaggcccct

SEQ ID NO: 1475567 - DNA, 15 bp, Homo sapiens
ccacctcaaggcccc

SEQ ID NO: 1475568 - DNA, 15 bp, Homo sapiens
cccacctcaaggccc

SEQ ID NO: 1475569 - DNA, 15 bp, Homo sapiens
ccccacctcaaggcc

SEQ ID NO: 1475570 - DNA, 15 bp, Homo sapiens
accccacctcaaggc

SEQ ID NO: 1475571 - DNA, 15 bp, Homo sapiens
caccccacctcaagg

SEQ ID NO: 1475572 - DNA, 15 bp, Homo sapiens
ccaccccacctcaag

SEQ ID NO: 1475573 - DNA, 15 bp, Homo sapiens
gccaccccacctcaa

SEQ ID NO: 1475574 - DNA, 15 bp, Homo sapiens
agccaccccacctca

SEQ ID NO: 1475575 - DNA, 15 bp, Homo sapiens
tagccaccccacctc

SEQ ID NO: 1475576 - DNA, 15 bp, Homo sapiens
atagccaccccacct

SEQ ID NO: 1475577 - DNA, 15 bp, Homo sapiens
catagccaccccacc

SEQ ID NO: 1475578 - DNA, 15 bp, Homo sapiens
ccatagccaccccac

SEQ ID NO: 1475579 - DNA, 15 bp, Homo sapiens
gccatagccacccca

SEQ ID NO: 1475580 - DNA, 15 bp, Homo sapiens
agccatagccacccc

SEQ ID NO: 1475581 - DNA, 15 bp, Homo sapiens
gagccatagccaccc

SEQ ID NO: 1475582 - DNA, 15 bp, Homo sapiens
ggagccatagccacc

SEQ ID NO: 1475583 - DNA, 15 bp, Homo sapiens
tggagccatagccac

SEQ ID NO: 1475584 - DNA, 15 bp, Homo sapiens
ctggagccatagcca

SEQ ID NO: 1475585 - DNA, 15 bp, Homo sapiens
cctggagccatagcc

SEQ ID NO: 1475586 - DNA, 15 bp, Homo sapiens
gcctggagccatagc

SEQ ID NO: 1475587 - DNA, 15 bp, Homo sapiens
cgcctggagccatag

SEQ ID NO: 1475588 - DNA, 15 bp, Homo sapiens
ccgcctggagccata

SEQ ID NO: 1475589 - DNA, 15 bp, Homo sapiens
tccgcctggagccat

SEQ ID NO: 1475590 - DNA, 15 bp, Homo sapiens
ctccgcctggagcca

SEQ ID NO: 1475591 - DNA, 15 bp, Homo sapiens
cctccgcctggagcc

SEQ ID NO: 1475592 - DNA, 15 bp, Homo sapiens
tcctccgcctggagc

SEQ ID NO: 1475593 - DNA, 15 bp, Homo sapiens
ctcctccgcctggag

SEQ ID NO: 1475594 - DNA, 15 bp, Homo sapiens
gctcctccgcctgga

SEQ ID NO: 1475595 - DNA, 15 bp, Homo sapiens
tgctcctccgcctgg

SEQ ID NO: 1475596 - DNA, 15 bp, Homo sapiens
ctgctcctccgcctg

SEQ ID NO: 1475597 - DNA, 15 bp, Homo sapiens
actgctcctccgcct

SEQ ID NO: 1475598 - DNA, 15 bp, Homo sapiens
gactgctcctccgcc

SEQ ID NO: 1475599 - DNA, 15 bp, Homo sapiens
agactgctcctccgc

SEQ ID NO: 1475600 - DNA, 15 bp, Homo sapiens
gagactgctcctccg

SEQ ID NO: 1475601 - DNA, 15 bp, Homo sapiens
tgagactgctcctcc

SEQ ID NO: 1475602 - DNA, 15 bp, Homo sapiens
ctgagactgctcctc

SEQ ID NO: 1475603 - DNA, 15 bp, Homo sapiens
cctgagactgctcct

SEQ ID NO: 1475604 - DNA, 15 bp, Homo sapiens
ccctgagactgctcc

SEQ ID NO: 1475605 - DNA, 15 bp, Homo sapiens
gccctgagactgctc

SEQ ID NO: 1475606 - DNA, 15 bp, Homo sapiens
tgccctgagactgct

SEQ ID NO: 1475607 - DNA, 15 bp, Homo sapiens
gtgccctgagactgc

SEQ ID NO: 1475608 - DNA, 15 bp, Homo sapiens
ggtgccctgagactg

SEQ ID NO: 1475609 - DNA, 15 bp, Homo sapiens
gggtgccctgagact

SEQ ID NO: 1475610 - DNA, 15 bp, Homo sapiens
tgggtgccctgagac

SEQ ID NO: 1475611 - DNA, 15 bp, Homo sapiens
gtgggtgccctgaga

SEQ ID NO: 1475612 - DNA, 15 bp, Homo sapiens
ggtgggtgccctgag

SEQ ID NO: 1475613 - DNA, 15 bp, Homo sapiens
tggtgggtgccctga

SEQ ID NO: 1475614 - DNA, 15 bp, Homo sapiens
ctggtgggtgccctg

SEQ ID NO: 1475615 - DNA, 15 bp, Homo sapiens
gctggtgggtgccct

SEQ ID NO: 1475616 - DNA, 15 bp, Homo sapiens
ggctggtgggtgccc

SEQ ID NO: 1475617 - DNA, 15 bp, Homo sapiens
gggctggtgggtgcc

SEQ ID NO: 1475618 - DNA, 15 bp, Homo sapiens
cgggctggtgggtgc

SEQ ID NO: 1475619 - DNA, 15 bp, Homo sapiens
gcgggctggtgggtg

SEQ ID NO: 1475620 - DNA, 15 bp, Homo sapiens
ggcgggctggtgggt

SEQ ID NO: 1475621 - DNA, 15 bp, Homo sapiens
gggcgggctggtggg

SEQ ID NO: 1475622 - DNA, 15 bp, Homo sapiens
tgggcgggctggtgg

SEQ ID NO: 1475623 - DNA, 15 bp, Homo sapiens
gtgggcgggctggtg

SEQ ID NO: 1475624 - DNA, 15 bp, Homo sapiens
ggtgggcgggctggt

SEQ ID NO: 1475625 - DNA, 15 bp, Homo sapiens
aggtgggcgggctgg

SEQ ID NO: 1475626 - DNA, 15 bp, Homo sapiens
aaggtgggcgggctg

SEQ ID NO: 1475627 - DNA, 15 bp, Homo sapiens
gaaggtgggcgggct

SEQ ID NO: 1475628 - DNA, 15 bp, Homo sapiens
cgaaggtgggcgggc

SEQ ID NO: 1475629 - DNA, 15 bp, Homo sapiens
acgaaggtgggcggg

SEQ ID NO: 1475630 - DNA, 15 bp, Homo sapiens
aacgaaggtgggcgg

SEQ ID NO: 1475631 - DNA, 15 bp, Homo sapiens
caacgaaggtgggcg

SEQ ID NO: 1475632 - DNA, 15 bp, Homo sapiens
gcaacgaaggtgggc

SEQ ID NO: 1475633 - DNA, 15 bp, Homo sapiens
cgcaacgaaggtggg

SEQ ID NO: 1475634 - DNA, 15 bp, Homo sapiens
tcgcaacgaaggtgg

SEQ ID NO: 1475635 - DNA, 15 bp, Homo sapiens
atcgcaacgaaggtg

SEQ ID NO: 1475636 - DNA, 15 bp, Homo sapiens
aatcgcaacgaaggt

SEQ ID NO: 1475637 - DNA, 15 bp, Homo sapiens
caatcgcaacgaagg

SEQ ID NO: 1475638 - DNA, 15 bp, Homo sapiens
ccaatcgcaacgaag

SEQ ID NO: 1475639 - DNA, 15 bp, Homo sapiens
gccaatcgcaacgaa

SEQ ID NO: 1475640 - DNA, 15 bp, Homo sapiens
ggccaatcgcaacga

SEQ ID NO: 1475641 - DNA, 15 bp, Homo sapiens
tggccaatcgcaacg

SEQ ID NO: 1475642 - DNA, 15 bp, Homo sapiens
ttggccaatcgcaac

SEQ ID NO: 1475643 - DNA, 15 bp, Homo sapiens
gttggccaatcgcaa

SEQ ID NO: 1475644 - DNA, 15 bp, Homo sapiens
tgttggccaatcgca

SEQ ID NO: 1475645 - DNA, 15 bp, Homo sapiens
ctgttggccaatcgc

SEQ ID NO: 1475646 - DNA, 15 bp, Homo sapiens
cctgttggccaatcg

SEQ ID NO: 1475647 - DNA, 15 bp, Homo sapiens
tcctgttggccaatc

SEQ ID NO: 1475648 - DNA, 15 bp, Homo sapiens
atcctgttggccaat

SEQ ID NO: 1475649 - DNA, 15 bp, Homo sapiens
catcctgttggccaa

SEQ ID NO: 1475650 - DNA, 15 bp, Homo sapiens
gcatcctgttggcca

SEQ ID NO: 1475651 - DNA, 15 bp, Homo sapiens
cgcatcctgttggcc

SEQ ID NO: 1475652 - DNA, 15 bp, Homo sapiens
tcgcatcctgttggc

SEQ ID NO: 1475653 - DNA, 15 bp, Homo sapiens
ctcgcatcctgttgg

SEQ ID NO: 1475654 - DNA, 15 bp, Homo sapiens
cctcgcatcctgttg

SEQ ID NO: 1475655 - DNA, 15 bp, Homo sapiens
gcctcgcatcctgtt

SEQ ID NO: 1475656 - DNA, 15 bp, Homo sapiens
tgcctcgcatcctgt

SEQ ID NO: 1475657 - DNA, 15 bp, Homo sapiens
atgcctcgcatcctg

SEQ ID NO: 1475658 - DNA, 15 bp, Homo sapiens
catgcctcgcatcct

SEQ ID NO: 1475659 - DNA, 15 bp, Homo sapiens
tcatgcctcgcatcc

SEQ ID NO: 1475660 - DNA, 15 bp, Homo sapiens
ctcatgcctcgcatc

SEQ ID NO: 1475661 - DNA, 15 bp, Homo sapiens
actcatgcctcgcat

SEQ ID NO: 1475662 - DNA, 15 bp, Homo sapiens
gactcatgcctcgca

SEQ ID NO: 1475663 - DNA, 15 bp, Homo sapiens
agactcatgcctcgc

SEQ ID NO: 1475664 - DNA, 15 bp, Homo sapiens
gagactcatgcctcg

SEQ ID NO: 1475665 - DNA, 15 bp, Homo sapiens
agagactcatgcctc

SEQ ID NO: 1475666 - DNA, 15 bp, Homo sapiens
gagagactcatgcct

SEQ ID NO: 1475667 - DNA, 15 bp, Homo sapiens
ggagagactcatgcc

SEQ ID NO: 1475668 - DNA, 15 bp, Homo sapiens
aggagagactcatgc

SEQ ID NO: 1475669 - DNA, 15 bp, Homo sapiens
caggagagactcatg

SEQ ID NO: 1475670 - DNA, 15 bp, Homo sapiens
ccaggagagactcat

SEQ ID NO: 1475671 - DNA, 15 bp, Homo sapiens
gccaggagagactca

SEQ ID NO: 1475672 - DNA, 15 bp, Homo sapiens
tgccaggagagactc

SEQ ID NO: 1475673 - DNA, 15 bp, Homo sapiens
ctgccaggagagact

SEQ ID NO: 1475674 - DNA, 15 bp, Homo sapiens
actgccaggagagac

SEQ ID NO: 1475675 - DNA, 15 bp, Homo sapiens
tactgccaggagaga

SEQ ID NO: 1475676 - DNA, 15 bp, Homo sapiens
ctactgccaggagag

SEQ ID NO: 1475677 - DNA, 15 bp, Homo sapiens
cctactgccaggaga

SEQ ID NO: 1475678 - DNA, 15 bp, Homo sapiens
acctactgccaggag

SEQ ID NO: 1475679 - DNA, 15 bp, Homo sapiens
cacctactgccagga

SEQ ID NO: 1475680 - DNA, 15 bp, Homo sapiens
gcacctactgccagg

SEQ ID NO: 1475681 - DNA, 15 bp, Homo sapiens
cgcacctactgccag

SEQ ID NO: 1475682 - DNA, 15 bp, Homo sapiens
ccgcacctactgcca

SEQ ID NO: 1475683 - DNA, 15 bp, Homo sapiens
tccgcacctactgcc

SEQ ID NO: 1475684 - DNA, 15 bp, Homo sapiens
ttccgcacctactgc

SEQ ID NO: 1475685 - DNA, 15 bp, Homo sapiens
cttccgcacctactg

SEQ ID NO: 1475686 - DNA, 15 bp, Homo sapiens
ccttccgcacctact

SEQ ID NO: 1475687 - DNA, 15 bp, Homo sapiens
accttccgcacctac

SEQ ID NO: 1475688 - DNA, 15 bp, Homo sapiens
caccttccgcaccta

SEQ ID NO: 1475689 - DNA, 15 bp, Homo sapiens
acaccttccgcacct

SEQ ID NO: 1475690 - DNA, 15 bp, Homo sapiens
gacaccttccgcacc

SEQ ID NO: 1475691 - DNA, 15 bp, Homo sapiens
ggacaccttccgcac

SEQ ID NO: 1475692 - DNA, 15 bp, Homo sapiens
gggacaccttccgca

SEQ ID NO: 1475693 - DNA, 15 bp, Homo sapiens
agggacaccttccgc

SEQ ID NO: 1475694 - DNA, 15 bp, Homo sapiens
cagggacaccttccg

SEQ ID NO: 1475695 - DNA, 15 bp, Homo sapiens
tcagggacaccttcc

SEQ ID NO: 1475696 - DNA, 15 bp, Homo sapiens
atcagggacaccttc

SEQ ID NO: 1475697 - DNA, 15 bp, Homo sapiens
catcagggacacctt

SEQ ID NO: 1475698 - DNA, 15 bp, Homo sapiens
tcatcagggacacct

SEQ ID NO: 1475699 - DNA, 15 bp, Homo sapiens
ctcatcagggacacc

SEQ ID NO: 1475700 - DNA, 15 bp, Homo sapiens
cctcatcagggacac

SEQ ID NO: 1475701 - DNA, 15 bp, Homo sapiens
tcctcatcagggaca

SEQ ID NO: 1475702 - DNA, 15 bp, Homo sapiens
atcctcatcagggac

SEQ ID NO: 1475703 - DNA, 15 bp, Homo sapiens
gatcctcatcaggga

SEQ ID NO: 1475704 - DNA, 15 bp, Homo sapiens
agatcctcatcaggg

SEQ ID NO: 1475705 - DNA, 15 bp, Homo sapiens
gagatcctcatcagg

SEQ ID NO: 1475706 - DNA, 15 bp, Homo sapiens
tgagatcctcatcag

SEQ ID NO: 1475707 - DNA, 15 bp, Homo sapiens
atgagatcctcatca

SEQ ID NO: 1475708 - DNA, 15 bp, Homo sapiens
gatgagatcctcatc

SEQ ID NO: 1475709 - DNA, 15 bp, Homo sapiens
agatgagatcctcat

SEQ ID NO: 1475710 - DNA, 15 bp, Homo sapiens
cagatgagatcctca

SEQ ID NO: 1475711 - DNA, 15 bp, Homo sapiens
acagatgagatcctc

SEQ ID NO: 1475712 - DNA, 15 bp, Homo sapiens
cacagatgagatcct

SEQ ID NO: 1475713 - DNA, 15 bp, Homo sapiens
ccacagatgagatcc

SEQ ID NO: 1475714 - DNA, 15 bp, Homo sapiens
accacagatgagatc

SEQ ID NO: 1475715 - DNA, 15 bp, Homo sapiens
gaccacagatgagat

SEQ ID NO: 1475716 - DNA, 15 bp, Homo sapiens
tgaccacagatgaga

SEQ ID NO: 1475717 - DNA, 15 bp, Homo sapiens
ctgaccacagatgag

SEQ ID NO: 1475718 - DNA, 15 bp, Homo sapiens
gctgaccacagatga

SEQ ID NO: 1475719 - DNA, 15 bp, Homo sapiens
agctgaccacagatg

SEQ ID NO: 1475720 - DNA, 15 bp, Homo sapiens
cagctgaccacagat

SEQ ID NO: 1475721 - DNA, 15 bp, Homo sapiens
gcagctgaccacaga

SEQ ID NO: 1475722 - DNA, 15 bp, Homo sapiens
agcagctgaccacag

SEQ ID NO: 1475723 - DNA, 15 bp, Homo sapiens
gagcagctgaccaca

SEQ ID NO: 1475724 - DNA, 15 bp, Homo sapiens
ggagcagctgaccac

SEQ ID NO: 1475725 - DNA, 15 bp, Homo sapiens
aggagcagctgacca

SEQ ID NO: 1475726 - DNA, 15 bp, Homo sapiens
gaggagcagctgacc

SEQ ID NO: 1475727 - DNA, 15 bp, Homo sapiens
ggaggagcagctgac

SEQ ID NO: 1475728 - DNA, 15 bp, Homo sapiens
tggaggagcagctga

SEQ ID NO: 1475729 - DNA, 15 bp, Homo sapiens
ctggaggagcagctg

SEQ ID NO: 1475730 - DNA, 15 bp, Homo sapiens
gctggaggagcagct

SEQ ID NO: 1475731 - DNA, 15 bp, Homo sapiens
tgctggaggagcagc

SEQ ID NO: 1475732 - DNA, 15 bp, Homo sapiens
gtgctggaggagcag

SEQ ID NO: 1475733 - DNA, 15 bp, Homo sapiens
ggtgctggaggagca

SEQ ID NO: 1475734 - DNA, 15 bp, Homo sapiens
tggtgctggaggagc

SEQ ID NO: 1475735 - DNA, 15 bp, Homo sapiens
ctggtgctggaggag

SEQ ID NO: 1475736 - DNA, 15 bp, Homo sapiens
gctggtgctggagga

SEQ ID NO: 1475737 - DNA, 15 bp, Homo sapiens
cgctggtgctggagg

SEQ ID NO: 1475738 - DNA, 15 bp, Homo sapiens
ccgctggtgctggag

SEQ ID NO: 1475739 - DNA, 15 bp, Homo sapiens
cccgctggtgctgga

SEQ ID NO: 1475740 - DNA, 15 bp, Homo sapiens
acccgctggtgctgg

SEQ ID NO: 1475741 - DNA, 15 bp, Homo sapiens
gacccgctggtgctg

SEQ ID NO: 1475742 - DNA, 15 bp, Homo sapiens
ggacccgctggtgct

SEQ ID NO: 1475743 - DNA, 15 bp, Homo sapiens
aggacccgctggtgc

SEQ ID NO: 1475744 - DNA, 15 bp, Homo sapiens
caggacccgctggtg

SEQ ID NO: 1475745 - DNA, 15 bp, Homo sapiens
gcaggacccgctggt

SEQ ID NO: 1475746 - DNA, 15 bp, Homo sapiens
ggcaggacccgctgg

SEQ ID NO: 1475747 - DNA, 15 bp, Homo sapiens
tggcaggacccgctg

SEQ ID NO: 1475748 - DNA, 15 bp, Homo sapiens
ctggcaggacccgct

SEQ ID NO: 1475749 - DNA, 15 bp, Homo sapiens
actggcaggacccgc

SEQ ID NO: 1475750 - DNA, 15 bp, Homo sapiens
gactggcaggacccg

SEQ ID NO: 1475751 - DNA, 15 bp, Homo sapiens
tgactggcaggaccc

SEQ ID NO: 1475752 - DNA, 15 bp, Homo sapiens
ttgactggcaggacc

SEQ ID NO: 1475753 - DNA, 15 bp, Homo sapiens
tttgactggcaggac

SEQ ID NO: 1475754 - DNA, 15 bp, Homo sapiens
gtttgactggcagga

SEQ ID NO: 1475755 - DNA, 15 bp, Homo sapiens
agtttgactggcagg

SEQ ID NO: 1475756 - DNA, 15 bp, Homo sapiens
gagtttgactggcag

SEQ ID NO: 1475757 - DNA, 15 bp, Homo sapiens
cgagtttgactggca

SEQ ID NO: 1475758 - DNA, 15 bp, Homo sapiens
ccgagtttgactggc

SEQ ID NO: 1475759 - DNA, 15 bp, Homo sapiens
cccgagtttgactgg

SEQ ID NO: 1475760 - DNA, 15 bp, Homo sapiens
tcccgagtttgactg

SEQ ID NO: 1475761 - DNA, 15 bp, Homo sapiens
gtcccgagtttgact

SEQ ID NO: 1475762 - DNA, 15 bp, Homo sapiens
cgtcccgagtttgac

SEQ ID NO: 1475763 - DNA, 15 bp, Homo sapiens
gcgtcccgagtttga

SEQ ID NO: 1475764 - DNA, 15 bp, Homo sapiens
cgcgtcccgagtttg

SEQ ID NO: 1475765 - DNA, 15 bp, Homo sapiens
tcgcgtcccgagttt

SEQ ID NO: 1475766 - DNA, 15 bp, Homo sapiens
ctcgcgtcccgagtt

SEQ ID NO: 1475767 - DNA, 15 bp, Homo sapiens
cctcgcgtcccgagt

SEQ ID NO: 1475768 - DNA, 15 bp, Homo sapiens
gcctcgcgtcccgag

SEQ ID NO: 1475769 - DNA, 15 bp, Homo sapiens
agcctcgcgtcccga

SEQ ID NO: 1475770 - DNA, 15 bp, Homo sapiens
cagcctcgcgtcccg

SEQ ID NO: 1475771 - DNA, 15 bp, Homo sapiens
ccagcctcgcgtccc

SEQ ID NO: 1475772 - DNA, 15 bp, Homo sapiens
cccagcctcgcgtcc

SEQ ID NO: 1475773 - DNA, 15 bp, Homo sapiens
tcccagcctcgcgtc

SEQ ID NO: 1475774 - DNA, 15 bp, Homo sapiens
ttcccagcctcgcgt

SEQ ID NO: 1475775 - DNA, 15 bp, Homo sapiens
cttcccagcctcgcg

SEQ ID NO: 1475776 - DNA, 15 bp, Homo sapiens
ccttcccagcctcgc

SEQ ID NO: 1475777 - DNA, 15 bp, Homo sapiens
cccttcccagcctcg

SEQ ID NO: 1475778 - DNA, 15 bp, Homo sapiens
ccccttcccagcctc

SEQ ID NO: 1475779 - DNA, 15 bp, Homo sapiens
tccccttcccagcct

SEQ ID NO: 1475780 - DNA, 15 bp, Homo sapiens
ttccccttcccagcc

SEQ ID NO: 1475781 - DNA, 15 bp, Homo sapiens
attccccttcccagc

SEQ ID NO: 1475782 - DNA, 15 bp, Homo sapiens
aattccccttcccag

SEQ ID NO: 1475783 - DNA, 15 bp, Homo sapiens
gaattccccttccca

SEQ ID NO: 1475784 - DNA, 15 bp, Homo sapiens
cgaattccccttccc

SEQ ID NO: 1475785 - DNA, 15 bp, Homo sapiens
gcgaattccccttcc

SEQ ID NO: 1475786 - DNA, 15 bp, Homo sapiens
ggcgaattccccttc

SEQ ID NO: 1475787 - DNA, 15 bp, Homo sapiens
aggcgaattcccctt

SEQ ID NO: 1475788 - DNA, 15 bp, Homo sapiens
gaggcgaattcccct

SEQ ID NO: 1475789 - DNA, 15 bp, Homo sapiens
cgaggcgaattcccc

SEQ ID NO: 1475790 - DNA, 15 bp, Homo sapiens
ccgaggcgaattccc

SEQ ID NO: 1475791 - DNA, 15 bp, Homo sapiens
accgaggcgaattcc

SEQ ID NO: 1475792 - DNA, 15 bp, Homo sapiens
gaccgaggcgaattc

SEQ ID NO: 1475793 - DNA, 15 bp, Homo sapiens
ggaccgaggcgaatt

SEQ ID NO: 1475794 - DNA, 15 bp, Homo sapiens
tggaccgaggcgaat

SEQ ID NO: 1475795 - DNA, 15 bp, Homo sapiens
ctggaccgaggcgaa

SEQ ID NO: 1475796 - DNA, 15 bp, Homo sapiens
actggaccgaggcga

SEQ ID NO: 1475797 - DNA, 15 bp, Homo sapiens
gactggaccgaggcg

SEQ ID NO: 1475798 - DNA, 15 bp, Homo sapiens
ggactggaccgaggc

SEQ ID NO: 1475799 - DNA, 15 bp, Homo sapiens
cggactggaccgagg

SEQ ID NO: 1475800 - DNA, 15 bp, Homo sapiens
gcggactggaccgag

SEQ ID NO: 1475801 - DNA, 15 bp, Homo sapiens
tgcggactggaccga

SEQ ID NO: 1475802 - DNA, 15 bp, Homo sapiens
ttgcggactggaccg

SEQ ID NO: 1475803 - DNA, 15 bp, Homo sapiens
cttgcggactggacc

SEQ ID NO: 1475804 - DNA, 15 bp, Homo sapiens
tcttgcggactggac

SEQ ID NO: 1475805 - DNA, 15 bp, Homo sapiens
atcttgcggactgga

SEQ ID NO: 1475806 - DNA, 15 bp, Homo sapiens
gatcttgcggactgg

SEQ ID NO: 1475807 - DNA, 15 bp, Homo sapiens
tgatcttgcggactg

SEQ ID NO: 1475808 - DNA, 15 bp, Homo sapiens
gtgatcttgcggact

SEQ ID NO: 1475809 - DNA, 15 bp, Homo sapiens
agtgatcttgcggac

SEQ ID NO: 1475810 - DNA, 15 bp, Homo sapiens
cagtgatcttgcgga

SEQ ID NO: 1475811 - DNA, 15 bp, Homo sapiens
acagtgatcttgcgg

SEQ ID NO: 1475812 - DNA, 15 bp, Homo sapiens
cacagtgatcttgcg

SEQ ID NO: 1475813 - DNA, 15 bp, Homo sapiens
gcacagtgatcttgc

SEQ ID NO: 1475814 - DNA, 15 bp, Homo sapiens
ggcacagtgatcttg

SEQ ID NO: 1475815 - DNA, 15 bp, Homo sapiens
gggcacagtgatctt

SEQ ID NO: 1475816 - DNA, 15 bp, Homo sapiens
agggcacagtgatct

SEQ ID NO: 1475817 - DNA, 15 bp, Homo sapiens
gagggcacagtgatc

SEQ ID NO: 1475818 - DNA, 15 bp, Homo sapiens
ggagggcacagtgat

SEQ ID NO: 1475819 - DNA, 15 bp, Homo sapiens
agggagggcacagtg

SEQ ID NO: 1475820 - DNA, 15 bp, Homo sapiens
aagggagggcacagt

SEQ ID NO: 1475821 - DNA, 15 bp, Homo sapiens
gaagggagggcacag

SEQ ID NO: 1475822 - DNA, 15 bp, Homo sapiens
agaagggagggcaca

SEQ ID NO: 1475823 - DNA, 15 bp, Homo sapiens
gagaagggagggcac

SEQ ID NO: 1475824 - DNA, 15 bp, Homo sapiens
cgagaagggagggca

SEQ ID NO: 1475825 - DNA, 15 bp, Homo sapiens
ccgagaagggagggc

SEQ ID NO: 1475826 - DNA, 15 bp, Homo sapiens
tccgagaagggaggg

SEQ ID NO: 1475827 - DNA, 15 bp, Homo sapiens
gtccgagaagggagg

SEQ ID NO: 1475828 - DNA, 15 bp, Homo sapiens
ggtccgagaagggag

SEQ ID NO: 1475829 - DNA, 15 bp, Homo sapiens
gggtccgagaaggga

SEQ ID NO: 1475830 - DNA, 15 bp, Homo sapiens
agggtccgagaaggg

SEQ ID NO: 1475831 - DNA, 15 bp, Homo sapiens
gagggtccgagaagg

SEQ ID NO: 1475832 - DNA, 15 bp, Homo sapiens
tgagggtccgagaag

SEQ ID NO: 1475833 - DNA, 15 bp, Homo sapiens
atgagggtccgagaa

SEQ ID NO: 1475834 - DNA, 15 bp, Homo sapiens
gatgagggtccgaga

SEQ ID NO: 1475835 - DNA, 15 bp, Homo sapiens
tgatgagggtccgag

SEQ ID NO: 1475836 - DNA, 15 bp, Homo sapiens
ctgatgagggtccga

SEQ ID NO: 1475837 - DNA, 15 bp, Homo sapiens
gctgatgagggtccg

SEQ ID NO: 1475838 - DNA, 15 bp, Homo sapiens
ggctgatgagggtcc

SEQ ID NO: 1475839 - DNA, 15 bp, Homo sapiens
gggctgatgagggtc

SEQ ID NO: 1475840 - DNA, 15 bp, Homo sapiens
agggctgatgagggt

SEQ ID NO: 1475841 - DNA, 15 bp, Homo sapiens
tagggctgatgaggg

SEQ ID NO: 1475842 - DNA, 15 bp, Homo sapiens
gtagggctgatgagg

SEQ ID NO: 1475843 - DNA, 15 bp, Homo sapiens
ggtagggctgatgag

SEQ ID NO: 1475844 - DNA, 15 bp, Homo sapiens
gggtagggctgatga

SEQ ID NO: 1475845 - DNA, 15 bp, Homo sapiens
ggggtagggctgatg

SEQ ID NO: 1475846 - DNA, 15 bp, Homo sapiens
gggggtagggctgat

SEQ ID NO: 1475847 - DNA, 15 bp, Homo sapiens
ggggggtagggctga

SEQ ID NO: 1475848 - DNA, 15 bp, Homo sapiens
tggggggtagggctg

SEQ ID NO: 1475849 - DNA, 15 bp, Homo sapiens
ttggggggtagggct

SEQ ID NO: 1475850 - DNA, 15 bp, Homo sapiens
gttggggggtagggc

SEQ ID NO: 1475851 - DNA, 15 bp, Homo sapiens
tgttggggggtaggg

SEQ ID NO: 1475852 - DNA, 15 bp, Homo sapiens
gtgttggggggtagg

SEQ ID NO: 1475853 - DNA, 15 bp, Homo sapiens
ggtgttggggggtag

SEQ ID NO: 1475854 - DNA, 15 bp, Homo sapiens
gggtgttggggggta

SEQ ID NO: 1475855 - DNA, 15 bp, Homo sapiens
tgggtgttggggggt

SEQ ID NO: 1475856 - DNA, 15 bp, Homo sapiens
atgggtgttgggggg

SEQ ID NO: 1475857 - DNA, 15 bp, Homo sapiens
catgggtgttggggg

SEQ ID NO: 1475858 - DNA, 15 bp, Homo sapiens
acatgggtgttgggg

SEQ ID NO: 1475859 - DNA, 15 bp, Homo sapiens
gacatgggtgttggg

SEQ ID NO: 1475860 - DNA, 15 bp, Homo sapiens
cgacatgggtgttgg

SEQ ID NO: 1475861 - DNA, 15 bp, Homo sapiens
gcgacatgggtgttg

SEQ ID NO: 1475862 - DNA, 15 bp, Homo sapiens
ggcgacatgggtgtt

SEQ ID NO: 1475863 - DNA, 15 bp, Homo sapiens
gggcgacatgggtgt

SEQ ID NO: 1475864 - DNA, 15 bp, Homo sapiens
ggggcgacatgggtg

SEQ ID NO: 1475865 - DNA, 15 bp, Homo sapiens
gggggcgacatgggt

SEQ ID NO: 1475866 - DNA, 15 bp, Homo sapiens
ggggggcgacatggg

SEQ ID NO: 1475867 - DNA, 15 bp, Homo sapiens
cggggggcgacatgg

SEQ ID NO: 1475868 - DNA, 15 bp, Homo sapiens
ccggggggcgacatg

SEQ ID NO: 1475869 - DNA, 15 bp, Homo sapiens
gccggggggcgacat

SEQ ID NO: 1475870 - DNA, 15 bp, Homo sapiens
agccggggggcgaca

SEQ ID NO: 1475871 - DNA, 15 bp, Homo sapiens
tagccggggggcgac

SEQ ID NO: 1475872 - DNA, 15 bp, Homo sapiens
ctagccggggggcga

SEQ ID NO: 1475873 - DNA, 15 bp, Homo sapiens
actagccggggggcg

SEQ ID NO: 1475874 - DNA, 15 bp, Homo sapiens
cactagccggggggc

SEQ ID NO: 1475875 - DNA, 15 bp, Homo sapiens
gcactagccgggggg

SEQ ID NO: 1475876 - DNA, 15 bp, Homo sapiens
cgcactagccggggg

SEQ ID NO: 1475877 - DNA, 15 bp, Homo sapiens
tcgcactagccgggg

SEQ ID NO: 1475878 - DNA, 15 bp, Homo sapiens
ctcgcactagccggg

SEQ ID NO: 1475879 - DNA, 15 bp, Homo sapiens
gctcgcactagccgg

SEQ ID NO: 1475880 - DNA, 15 bp, Homo sapiens
agctcgcactagccg

SEQ ID NO: 1475881 - DNA, 15 bp, Homo sapiens
cagctcgcactagcc

SEQ ID NO: 1475882 - DNA, 15 bp, Homo sapiens
gcagctcgcactagc

SEQ ID NO: 1475883 - DNA, 15 bp, Homo sapiens
tgcagctcgcactag

SEQ ID NO: 1475884 - DNA, 15 bp, Homo sapiens
ttgcagctcgcacta

SEQ ID NO: 1475885 - DNA, 15 bp, Homo sapiens
cttgcagctcgcact

SEQ ID NO: 1475886 - DNA, 15 bp, Homo sapiens
gcttgcagctcgcac

SEQ ID NO: 1475887 - DNA, 15 bp, Homo sapiens
cgcttgcagctcgca

SEQ ID NO: 1475888 - DNA, 15 bp, Homo sapiens
tcgcttgcagctcgc

SEQ ID NO: 1475889 - DNA, 15 bp, Homo sapiens
ctcgcttgcagctcg

SEQ ID NO: 1475890 - DNA, 15 bp, Homo sapiens
tctcgcttgcagctc

SEQ ID NO: 1475891 - DNA, 15 bp, Homo sapiens
gtctcgcttgcagct

SEQ ID NO: 1475892 - DNA, 15 bp, Homo sapiens
agtctcgcttgcagc

SEQ ID NO: 1475893 - DNA, 15 bp, Homo sapiens
cagtctcgcttgcag

SEQ ID NO: 1475894 - DNA, 15 bp, Homo sapiens
tcagtctcgcttgca

SEQ ID NO: 1475895 - DNA, 15 bp, Homo sapiens
atcagtctcgcttgc

SEQ ID NO: 1475896 - DNA, 15 bp, Homo sapiens
gatcagtctcgcttg

SEQ ID NO: 1475897 - DNA, 15 bp, Homo sapiens
tgatcagtctcgctt

SEQ ID NO: 1475898 - DNA, 15 bp, Homo sapiens
ctgatcagtctcgct

SEQ ID NO: 1475899 - DNA, 15 bp, Homo sapiens
cctgatcagtctcgc

SEQ ID NO: 1475900 - DNA, 15 bp, Homo sapiens
acctgatcagtctcg

SEQ ID NO: 1475901 - DNA, 15 bp, Homo sapiens
cacctgatcagtctc

SEQ ID NO: 1475902 - DNA, 15 bp, Homo sapiens
tcacctgatcagtct

SEQ ID NO: 1475903 - DNA, 15 bp, Homo sapiens
gtcacctgatcagtc

SEQ ID NO: 1475904 - DNA, 15 bp, Homo sapiens
agtcacctgatcagt

SEQ ID NO: 1475905 - DNA, 15 bp, Homo sapiens
aagtcacctgatcag

SEQ ID NO: 1475906 - DNA, 15 bp, Homo sapiens
aaagtcacctgatca

SEQ ID NO: 1475907 - DNA, 15 bp, Homo sapiens
aaaagtcacctgatc

SEQ ID NO: 1475908 - DNA, 15 bp, Homo sapiens
gaaaagtcacctgat

SEQ ID NO: 1475909 - DNA, 15 bp, Homo sapiens
agaaaagtcacctga

SEQ ID NO: 1475910 - DNA, 15 bp, Homo sapiens
gagaaaagtcacctg

SEQ ID NO: 1475911 - DNA, 15 bp, Homo sapiens
ggagaaaagtcacct

SEQ ID NO: 1475912 - DNA, 15 bp, Homo sapiens
cggagaaaagtcacc

SEQ ID NO: 1475913 - DNA, 15 bp, Homo sapiens
ccggagaaaagtcac

SEQ ID NO: 1475914 - DNA, 15 bp, Homo sapiens
gccggagaaaagtca

SEQ ID NO: 1475915 - DNA, 15 bp, Homo sapiens
ggccggagaaaagtc

SEQ ID NO: 1475916 - DNA, 15 bp, Homo sapiens
gggccggagaaaagt

SEQ ID NO: 1475917 - DNA, 15 bp, Homo sapiens
ggggccggagaaaag

SEQ ID NO: 1475918 - DNA, 15 bp, Homo sapiens
cggggccggagaaaa

SEQ ID NO: 1475919 - DNA, 15 bp, Homo sapiens
gcggggccggagaaa

SEQ ID NO: 1475920 - DNA, 15 bp, Homo sapiens
tgcggggccggagaa

SEQ ID NO: 1475921 - DNA, 15 bp, Homo sapiens
ctgcggggccggaga

SEQ ID NO: 1475922 - DNA, 15 bp, Homo sapiens
cctgcggggccggag

SEQ ID NO: 1475923 - DNA, 15 bp, Homo sapiens
gcctgcggggccgga

SEQ ID NO: 1475924 - DNA, 15 bp, Homo sapiens
tgcctgcggggccgg

SEQ ID NO: 1475925 - DNA, 15 bp, Homo sapiens
gtgcctgcggggccg

SEQ ID NO: 1475926 - DNA, 15 bp, Homo sapiens
tgtgcctgcggggcc

SEQ ID NO: 1475927 - DNA, 15 bp, Homo sapiens
ctgtgcctgcggggc

SEQ ID NO: 1475928 - DNA, 15 bp, Homo sapiens
gctgtgcctgcgggg

SEQ ID NO: 1475929 - DNA, 15 bp, Homo sapiens
cgctgtgcctgcggg

SEQ ID NO: 1475930 - DNA, 15 bp, Homo sapiens
gcgctgtgcctgcgg

SEQ ID NO: 1475931 - DNA, 15 bp, Homo sapiens
tgcgctgtgcctgcg

SEQ ID NO: 1475932 - DNA, 15 bp, Homo sapiens
gtgcgctgtgcctgc

SEQ ID NO: 1475933 - DNA, 15 bp, Homo sapiens
agtgcgctgtgcctg

SEQ ID NO: 1475934 - DNA, 15 bp, Homo sapiens
gagtgcgctgtgcct

SEQ ID NO: 1475935 - DNA, 15 bp, Homo sapiens
tgagtgcgctgtgcc

SEQ ID NO: 1475936 - DNA, 15 bp, Homo sapiens
gtgagtgcgctgtgc

SEQ ID NO: 1475937 - DNA, 15 bp, Homo sapiens
agtgagtgcgctgtg

SEQ ID NO: 1475938 - DNA, 15 bp, Homo sapiens
cagtgagtgcgctgt

SEQ ID NO: 1475939 - DNA, 15 bp, Homo sapiens
gcagtgagtgcgctg

SEQ ID NO: 1475940 - DNA, 15 bp, Homo sapiens
ggcagtgagtgcgct

SEQ ID NO: 1475941 - DNA, 15 bp, Homo sapiens
aggcagtgagtgcgc

SEQ ID NO: 1475942 - DNA, 15 bp, Homo sapiens
aaggcagtgagtgcg

SEQ ID NO: 1475943 - DNA, 15 bp, Homo sapiens
taaggcagtgagtgc

SEQ ID NO: 1475944 - DNA, 15 bp, Homo sapiens
ctaaggcagtgagtg

SEQ ID NO: 1475945 - DNA, 15 bp, Homo sapiens
actaaggcagtgagt

SEQ ID NO: 1475946 - DNA, 15 bp, Homo sapiens
cactaaggcagtgag

SEQ ID NO: 1475947 - DNA, 15 bp, Homo sapiens
gcactaaggcagtga

SEQ ID NO: 1475948 - DNA, 15 bp, Homo sapiens
ggcactaaggcagtg

SEQ ID NO: 1475949 - DNA, 15 bp, Homo sapiens
aggcactaaggcagt

SEQ ID NO: 1475950 - DNA, 15 bp, Homo sapiens
gaggcactaaggcag

SEQ ID NO: 1475951 - DNA, 15 bp, Homo sapiens
agaggcactaaggca

SEQ ID NO: 1475952 - DNA, 15 bp, Homo sapiens
cagaggcactaaggc

SEQ ID NO: 1475953 - DNA, 15 bp, Homo sapiens
tcagaggcactaagg

SEQ ID NO: 1475954 - DNA, 15 bp, Homo sapiens
gtcagaggcactaag

SEQ ID NO: 1475955 - DNA, 15 bp, Homo sapiens
ggtcagaggcactaa

SEQ ID NO: 1475956 - DNA, 15 bp, Homo sapiens
gggtcagaggcacta

SEQ ID NO: 1475957 - DNA, 15 bp, Homo sapiens
agggtcagaggcact

SEQ ID NO: 1475958 - DNA, 15 bp, Homo sapiens
cagggtcagaggcac

SEQ ID NO: 1475959 - DNA, 15 bp, Homo sapiens
ccagggtcagaggca

SEQ ID NO: 1475960 - DNA, 15 bp, Homo sapiens
gccagggtcagaggc

SEQ ID NO: 1475961 - DNA, 15 bp, Homo sapiens
ggccagggtcagagg

SEQ ID NO: 1475962 - DNA, 15 bp, Homo sapiens
tggccagggtcagag

SEQ ID NO: 1475963 - DNA, 15 bp, Homo sapiens
gtggccagggtcaga

SEQ ID NO: 1475964 - DNA, 15 bp, Homo sapiens
cgtggccagggtcag

SEQ ID NO: 1475965 - DNA, 15 bp, Homo sapiens
tcgtggccagggtca

SEQ ID NO: 1475966 - DNA, 15 bp, Homo sapiens
gtcgtggccagggtc

SEQ ID NO: 1475967 - DNA, 15 bp, Homo sapiens
ggtcgtggccagggt

SEQ ID NO: 1475968 - DNA, 15 bp, Homo sapiens
gggtcgtggccaggg

SEQ ID NO: 1475969 - DNA, 15 bp, Homo sapiens
agggtcgtggccagg

SEQ ID NO: 1475970 - DNA, 15 bp, Homo sapiens
cagggtcgtggccag

SEQ ID NO: 1475971 - DNA, 15 bp, Homo sapiens
gcagggtcgtggcca

SEQ ID NO: 1475972 - DNA, 15 bp, Homo sapiens
ggcagggtcgtggcc

SEQ ID NO: 1475973 - DNA, 15 bp, Homo sapiens
tggcagggtcgtggc

SEQ ID NO: 1475974 - DNA, 15 bp, Homo sapiens
gtggcagggtcgtgg

SEQ ID NO: 1475975 - DNA, 15 bp, Homo sapiens
ggtggcagggtcgtg

SEQ ID NO: 1475976 - DNA, 15 bp, Homo sapiens
gggtggcagggtcgt

SEQ ID NO: 1475977 - DNA, 15 bp, Homo sapiens
ggggtggcagggtcg

SEQ ID NO: 1475978 - DNA, 15 bp, Homo sapiens
cggggtggcagggtc

SEQ ID NO: 1475979 - DNA, 15 bp, Homo sapiens
gcggggtggcagggt

SEQ ID NO: 1475980 - DNA, 15 bp, Homo sapiens
agcggggtggcaggg

SEQ ID NO: 1475981 - DNA, 15 bp, Homo sapiens
gagcggggtggcagg

SEQ ID NO: 1475982 - DNA, 15 bp, Homo sapiens
cgagcggggtggcag

SEQ ID NO: 1475983 - DNA, 15 bp, Homo sapiens
ccgagcggggtggca

SEQ ID NO: 1475984 - DNA, 15 bp, Homo sapiens
cccgagcggggtggc

SEQ ID NO: 1475985 - DNA, 15 bp, Homo sapiens
gcccgagcggggtgg

SEQ ID NO: 1475986 - DNA, 15 bp, Homo sapiens
tgcccgagcggggtg

SEQ ID NO: 1475987 - DNA, 15 bp, Homo sapiens
ctgcccgagcggggt

SEQ ID NO: 1475988 - DNA, 15 bp, Homo sapiens
gctgcccgagcgggg

SEQ ID NO: 1475989 - DNA, 15 bp, Homo sapiens
agctgcccgagcggg

SEQ ID NO: 1475990 - DNA, 15 bp, Homo sapiens
gagctgcccgagcgg

SEQ ID NO: 1475991 - DNA, 15 bp, Homo sapiens
agagctgcccgagcg

SEQ ID NO: 1475992 - DNA, 15 bp, Homo sapiens
gagagctgcccgagc

SEQ ID NO: 1475993 - DNA, 15 bp, Homo sapiens
cgagagctgcccgag

SEQ ID NO: 1475994 - DNA, 15 bp, Homo sapiens
ccgagagctgcccga

SEQ ID NO: 1475995 - DNA, 15 bp, Homo sapiens
tccgagagctgcccg

SEQ ID NO: 1475996 - DNA, 15 bp, Homo sapiens
atccgagagctgccc

SEQ ID NO: 1475997 - DNA, 15 bp, Homo sapiens
aatccgagagctgcc

SEQ ID NO: 1475998 - DNA, 15 bp, Homo sapiens
gaatccgagagctgc

SEQ ID NO: 1475999 - DNA, 15 bp, Homo sapiens
agaatccgagagctg

SEQ ID NO: 1476000 - DNA, 15 bp, Homo sapiens
cagaatccgagagct

SEQ ID NO: 1476001 - DNA, 15 bp, Homo sapiens
ccagaatccgagagc

SEQ ID NO: 1476002 - DNA, 15 bp, Homo sapiens
cccagaatccgagag

SEQ ID NO: 1476003 - DNA, 15 bp, Homo sapiens
tcccagaatccgaga

SEQ ID NO: 1476004 - DNA, 15 bp, Homo sapiens
gtcccagaatccgag

SEQ ID NO: 1476005 - DNA, 15 bp, Homo sapiens
tgtcccagaatccga

SEQ ID NO: 1476006 - DNA, 15 bp, Homo sapiens
ctgtcccagaatccg

SEQ ID NO: 1476007 - DNA, 15 bp, Homo sapiens
tctgtcccagaatcc

SEQ ID NO: 1476008 - DNA, 15 bp, Homo sapiens
ctctgtcccagaatc

SEQ ID NO: 1476009 - DNA, 15 bp, Homo sapiens
actctgtcccagaat

SEQ ID NO: 1476010 - DNA, 15 bp, Homo sapiens
gactctgtcccagaa

SEQ ID NO: 1476011 - DNA, 15 bp, Homo sapiens
ggactctgtcccaga

SEQ ID NO: 1476012 - DNA, 15 bp, Homo sapiens
tggactctgtcccag

SEQ ID NO: 1476013 - DNA, 15 bp, Homo sapiens
gtggactctgtccca

SEQ ID NO: 1476014 - DNA, 15 bp, Homo sapiens
ggtggactctgtccc

SEQ ID NO: 1476015 - DNA, 15 bp, Homo sapiens
aggtggactctgtcc

SEQ ID NO: 1476016 - DNA, 15 bp, Homo sapiens
caggtggactctgtc

SEQ ID NO: 1476017 - DNA, 15 bp, Homo sapiens
gcaggtggactctgt

SEQ ID NO: 1476018 - DNA, 15 bp, Homo sapiens
cgcaggtggactctg

SEQ ID NO: 1476019 - DNA, 15 bp, Homo sapiens
ccgcaggtggactct

SEQ ID NO: 1476020 - DNA, 15 bp, Homo sapiens
gccgcaggtggactc

SEQ ID NO: 1476021 - DNA, 15 bp, Homo sapiens
tgccgcaggtggact

SEQ ID NO: 1476022 - DNA, 15 bp, Homo sapiens
ctgccgcaggtggac

SEQ ID NO: 1476023 - DNA, 15 bp, Homo sapiens
tctgccgcaggtgga

SEQ ID NO: 1476024 - DNA, 15 bp, Homo sapiens
gtctgccgcaggtgg

SEQ ID NO: 1476025 - DNA, 15 bp, Homo sapiens
tgtctgccgcaggtg

SEQ ID NO: 1476026 - DNA, 15 bp, Homo sapiens
ctgtctgccgcaggt

SEQ ID NO: 1476027 - DNA, 15 bp, Homo sapiens
tctgtctgccgcagg

SEQ ID NO: 1476028 - DNA, 15 bp, Homo sapiens
gtctgtctgccgcag

SEQ ID NO: 1476029 - DNA, 15 bp, Homo sapiens
tgtctgtctgccgca

SEQ ID NO: 1476030 - DNA, 15 bp, Homo sapiens
ctgtctgtctgccgc

SEQ ID NO: 1476031 - DNA, 15 bp, Homo sapiens
gctgtctgtctgccg

SEQ ID NO: 1476032 - DNA, 15 bp, Homo sapiens
agctgtctgtctgcc

SEQ ID NO: 1476033 - DNA, 15 bp, Homo sapiens
cagctgtctgtctgc

SEQ ID NO: 1476034 - DNA, 15 bp, Homo sapiens
tcagctgtctgtctg

SEQ ID NO: 1476035 - DNA, 15 bp, Homo sapiens
ttcagctgtctgtct

SEQ ID NO: 1476036 - DNA, 15 bp, Homo sapiens
gttcagctgtctgtc

SEQ ID NO: 1476037 - DNA, 15 bp, Homo sapiens
tgttcagctgtctgt

SEQ ID NO: 1476038 - DNA, 15 bp, Homo sapiens
ctgttcagctgtctg

SEQ ID NO: 1476039 - DNA, 15 bp, Homo sapiens
cctgttcagctgtct

SEQ ID NO: 1476040 - DNA, 15 bp, Homo sapiens
gtcgctggaaaaaaa

SEQ ID NO: 1476041 - DNA, 15 bp, Homo sapiens
tgtcgctggaaaaaa

SEQ ID NO: 1476042 - DNA, 15 bp, Homo sapiens
ctgtcgctggaaaaa

SEQ ID NO: 1476043 - DNA, 15 bp, Homo sapiens
tctgtcgctggaaaa

SEQ ID NO: 1476044 - DNA, 15 bp, Homo sapiens
ctctgtcgctggaaa

SEQ ID NO: 1476045 - DNA, 15 bp, Homo sapiens
actctgtcgctggaa

SEQ ID NO: 1476046 - DNA, 15 bp, Homo sapiens
gactctgtcgctgga

SEQ ID NO: 1476047 - DNA, 15 bp, Homo sapiens
agactctgtcgctgg

SEQ ID NO: 1476048 - DNA, 15 bp, Homo sapiens
aagactctgtcgctg

SEQ ID NO: 1476049 - DNA, 15 bp, Homo sapiens
caagactctgtcgct

SEQ ID NO: 1476050 - DNA, 15 bp, Homo sapiens
gcaagactctgtcgc

SEQ ID NO: 1476051 - DNA, 15 bp, Homo sapiens
agcaagactctgtcg

SEQ ID NO: 1476052 - DNA, 15 bp, Homo sapiens
aagcaagactctgtc

SEQ ID NO: 1476053 - DNA, 15 bp, Homo sapiens
aaagcaagactctgt

SEQ ID NO: 1476054 - DNA, 15 bp, Homo sapiens
gaaagcaagactctg

SEQ ID NO: 1476055 - DNA, 15 bp, Homo sapiens
agaaagcaagactct

SEQ ID NO: 1476056 - DNA, 15 bp, Homo sapiens
cagaaagcaagactc

SEQ ID NO: 1476057 - DNA, 15 bp, Homo sapiens
acagaaagcaagact

SEQ ID NO: 1476058 - DNA, 15 bp, Homo sapiens
cacagaaagcaagac

SEQ ID NO: 1476059 - DNA, 15 bp, Homo sapiens
gcacagaaagcaaga

SEQ ID NO: 1476060 - DNA, 15 bp, Homo sapiens
ggcacagaaagcaag

SEQ ID NO: 1476061 - DNA, 15 bp, Homo sapiens
gggcacagaaagcaa

SEQ ID NO: 1476062 - DNA, 15 bp, Homo sapiens
ggggcacagaaagca

SEQ ID NO: 1476063 - DNA, 15 bp, Homo sapiens
tggggcacagaaagc

SEQ ID NO: 1476064 - DNA, 15 bp, Homo sapiens
ctggggcacagaaag

SEQ ID NO: 1476065 - DNA, 15 bp, Homo sapiens
cctggggcacagaaa

SEQ ID NO: 1476066 - DNA, 15 bp, Homo sapiens
gcctggggcacagaa

SEQ ID NO: 1476067 - DNA, 15 bp, Homo sapiens
agcctggggcacaga

SEQ ID NO: 1476068 - DNA, 15 bp, Homo sapiens
cagcctggggcacag

SEQ ID NO: 1476069 - DNA, 15 bp, Homo sapiens
ccagcctggggcaca

SEQ ID NO: 1476070 - DNA, 15 bp, Homo sapiens
tccagcctggggcac

SEQ ID NO: 1476071 - DNA, 15 bp, Homo sapiens
gtccagcctggggca

SEQ ID NO: 1476072 - DNA, 15 bp, Homo sapiens
agtccagcctggggc

SEQ ID NO: 1476073 - DNA, 15 bp, Homo sapiens
cagtccagcctgggg

SEQ ID NO: 1476074 - DNA, 15 bp, Homo sapiens
gcagtccagcctggg

SEQ ID NO: 1476075 - DNA, 15 bp, Homo sapiens
tgcagtccagcctgg

SEQ ID NO: 1476076 - DNA, 15 bp, Homo sapiens
ctgcagtccagcctg

SEQ ID NO: 1476077 - DNA, 15 bp, Homo sapiens
actgcagtccagcct

SEQ ID NO: 1476078 - DNA, 15 bp, Homo sapiens
cactgcagtccagcc

SEQ ID NO: 1476079 - DNA, 15 bp, Homo sapiens
ccactgcagtccagc

SEQ ID NO: 1476080 - DNA, 15 bp, Homo sapiens
accactgcagtccag

SEQ ID NO: 1476081 - DNA, 15 bp, Homo sapiens
caccactgcagtcca

SEQ ID NO: 1476082 - DNA, 15 bp, Homo sapiens
acaccactgcagtcc

SEQ ID NO: 1476083 - DNA, 15 bp, Homo sapiens
cacaccactgcagtc

SEQ ID NO: 1476084 - DNA, 15 bp, Homo sapiens
tcacaccactgcagt

SEQ ID NO: 1476085 - DNA, 15 bp, Homo sapiens
atcacaccactgcag

SEQ ID NO: 1476086 - DNA, 15 bp, Homo sapiens
aatcacaccactgca

SEQ ID NO: 1476087 - DNA, 15 bp, Homo sapiens
taatcacaccactgc

SEQ ID NO: 1476088 - DNA, 15 bp, Homo sapiens
ataatcacaccactg

SEQ ID NO: 1476089 - DNA, 15 bp, Homo sapiens
tataatcacaccact

SEQ ID NO: 1476090 - DNA, 15 bp, Homo sapiens
ctataatcacaccac

SEQ ID NO: 1476091 - DNA, 15 bp, Homo sapiens
actataatcacacca

SEQ ID NO: 1476092 - DNA, 15 bp, Homo sapiens
aactataatcacacc

SEQ ID NO: 1476093 - DNA, 15 bp, Homo sapiens
gaactataatcacac

SEQ ID NO: 1476094 - DNA, 15 bp, Homo sapiens
tgaactataatcaca

SEQ ID NO: 1476095 - DNA, 15 bp, Homo sapiens
ctgaactataatcac

SEQ ID NO: 1476096 - DNA, 15 bp, Homo sapiens
actgaactataatca

SEQ ID NO: 1476097 - DNA, 15 bp, Homo sapiens
cactgaactataatc

SEQ ID NO: 1476098 - DNA, 15 bp, Homo sapiens
gcactgaactataat

SEQ ID NO: 1476099 - DNA, 15 bp, Homo sapiens
tgcactgaactataa

SEQ ID NO: 1476100 - DNA, 15 bp, Homo sapiens
ctgcactgaactata

SEQ ID NO: 1476101 - DNA, 15 bp, Homo sapiens
actgcactgaactat

SEQ ID NO: 1476102 - DNA, 15 bp, Homo sapiens
gactgcactgaacta

SEQ ID NO: 1476103 - DNA, 15 bp, Homo sapiens
ggactgcactgaact

SEQ ID NO: 1476104 - DNA, 15 bp, Homo sapiens
gggactgcactgaac

SEQ ID NO: 1476105 - DNA, 15 bp, Homo sapiens
cgggactgcactgaa

SEQ ID NO: 1476106 - DNA, 15 bp, Homo sapiens
tcgggactgcactga

SEQ ID NO: 1476107 - DNA, 15 bp, Homo sapiens
gtcgggactgcactg

SEQ ID NO: 1476108 - DNA, 15 bp, Homo sapiens
ggtcgggactgcact

SEQ ID NO: 1476109 - DNA, 15 bp, Homo sapiens
aggtcgggactgcac

SEQ ID NO: 1476110 - DNA, 15 bp, Homo sapiens
gaggtcgggactgca

SEQ ID NO: 1476111 - DNA, 15 bp, Homo sapiens
ggaggtcgggactgc

SEQ ID NO: 1476112 - DNA, 15 bp, Homo sapiens
aggaggtcgggactg

SEQ ID NO: 1476113 - DNA, 15 bp, Homo sapiens
caggaggtcgggact

SEQ ID NO: 1476114 - DNA, 15 bp, Homo sapiens
ccaggaggtcgggac

SEQ ID NO: 1476115 - DNA, 15 bp, Homo sapiens
cccaggaggtcggga

SEQ ID NO: 1476116 - DNA, 15 bp, Homo sapiens
gcccaggaggtcggg

SEQ ID NO: 1476117 - DNA, 15 bp, Homo sapiens
agcccaggaggtcgg

SEQ ID NO: 1476118 - DNA, 15 bp, Homo sapiens
gagcccaggaggtcg

SEQ ID NO: 1476119 - DNA, 15 bp, Homo sapiens
tgagcccaggaggtc

SEQ ID NO: 1476120 - DNA, 15 bp, Homo sapiens
ctgagcccaggaggt

SEQ ID NO: 1476121 - DNA, 15 bp, Homo sapiens
cctgagcccaggagg

SEQ ID NO: 1476122 - DNA, 15 bp, Homo sapiens
gcctgagcccaggag

SEQ ID NO: 1476123 - DNA, 15 bp, Homo sapiens
tgcctgagcccagga

SEQ ID NO: 1476124 - DNA, 15 bp, Homo sapiens
ttgcctgagcccagg

SEQ ID NO: 1476125 - DNA, 15 bp, Homo sapiens
attgcctgagcccag

SEQ ID NO: 1476126 - DNA, 15 bp, Homo sapiens
gattgcctgagccca

SEQ ID NO: 1476127 - DNA, 15 bp, Homo sapiens
ggattgcctgagccc

SEQ ID NO: 1476128 - DNA, 15 bp, Homo sapiens
aggattgcctgagcc

SEQ ID NO: 1476129 - DNA, 15 bp, Homo sapiens
gaggattgcctgagc

SEQ ID NO: 1476130 - DNA, 15 bp, Homo sapiens
ggaggattgcctgag

SEQ ID NO: 1476131 - DNA, 15 bp, Homo sapiens
gggaggattgcctga

SEQ ID NO: 1476132 - DNA, 15 bp, Homo sapiens
tgggaggattgcctg

SEQ ID NO: 1476133 - DNA, 15 bp, Homo sapiens
gtgggaggattgcct

SEQ ID NO: 1476134 - DNA, 15 bp, Homo sapiens
ggtgggaggattgcc

SEQ ID NO: 1476135 - DNA, 15 bp, Homo sapiens
caggaggctgaggtg

SEQ ID NO: 1476136 - DNA, 15 bp, Homo sapiens
tcaggaggctgaggt

SEQ ID NO: 1476137 - DNA, 15 bp, Homo sapiens
catagtcccagctac

SEQ ID NO: 1476138 - DNA, 15 bp, Homo sapiens
ccatagtcccagcta

SEQ ID NO: 1476139 - DNA, 15 bp, Homo sapiens
cccatagtcccagct

SEQ ID NO: 1476140 - DNA, 15 bp, Homo sapiens
gcccatagtcccagc

SEQ ID NO: 1476141 - DNA, 15 bp, Homo sapiens
tgcccatagtcccag

SEQ ID NO: 1476142 - DNA, 15 bp, Homo sapiens
atgcccatagtccca

SEQ ID NO: 1476143 - DNA, 15 bp, Homo sapiens
catgcccatagtccc

SEQ ID NO: 1476144 - DNA, 15 bp, Homo sapiens
gcatgcccatagtcc

SEQ ID NO: 1476145 - DNA, 15 bp, Homo sapiens
tgcatgcccatagtc

SEQ ID NO: 1476146 - DNA, 15 bp, Homo sapiens
gtgcatgcccatagt

SEQ ID NO: 1476147 - DNA, 15 bp, Homo sapiens
ggtgcatgcccatag

SEQ ID NO: 1476148 - DNA, 15 bp, Homo sapiens
tggtgcatgcccata

SEQ ID NO: 1476149 - DNA, 15 bp, Homo sapiens
gtggtgcatgcccat

SEQ ID NO: 1476150 - DNA, 15 bp, Homo sapiens
ggtggtgcatgccca

SEQ ID NO: 1476151 - DNA, 15 bp, Homo sapiens
tggtggtgcatgccc

SEQ ID NO: 1476152 - DNA, 15 bp, Homo sapiens
gtggtggtgcatgcc

SEQ ID NO: 1476153 - DNA, 15 bp, Homo sapiens
agtggtggtgcatgc

SEQ ID NO: 1476154 - DNA, 15 bp, Homo sapiens
gagtggtggtgcatg

SEQ ID NO: 1476155 - DNA, 15 bp, Homo sapiens
tgagtggtggtgcat

SEQ ID NO: 1476156 - DNA, 15 bp, Homo sapiens
gtgagtggtggtgca

SEQ ID NO: 1476157 - DNA, 15 bp, Homo sapiens
tgtgagtggtggtgc

SEQ ID NO: 1476158 - DNA, 15 bp, Homo sapiens
ctgtgagtggtggtg

SEQ ID NO: 1476159 - DNA, 15 bp, Homo sapiens
gctgtgagtggtggt

SEQ ID NO: 1476160 - DNA, 15 bp, Homo sapiens
agctgtgagtggtgg

SEQ ID NO: 1476161 - DNA, 15 bp, Homo sapiens
aagctgtgagtggtg

SEQ ID NO: 1476162 - DNA, 15 bp, Homo sapiens
aaagctgtgagtggt

SEQ ID NO: 1476163 - DNA, 15 bp, Homo sapiens
aaaagctgtgagtgg

SEQ ID NO: 1476164 - DNA, 15 bp, Homo sapiens
aaaaagctgtgagtg

SEQ ID NO: 1476165 - DNA, 15 bp, Homo sapiens
caaaaagctgtgagt

SEQ ID NO: 1476166 - DNA, 15 bp, Homo sapiens
acaaaaagctgtgag

SEQ ID NO: 1476167 - DNA, 15 bp, Homo sapiens
aacaaaaagctgtga

SEQ ID NO: 1476168 - DNA, 15 bp, Homo sapiens
caacaaaaagctgtg

SEQ ID NO: 1476169 - DNA, 15 bp, Homo sapiens
ccaacaaaaagctgt

SEQ ID NO: 1476170 - DNA, 15 bp, Homo sapiens
tccaacaaaaagctg

SEQ ID NO: 1476171 - DNA, 15 bp, Homo sapiens
ctccaacaaaaagct

SEQ ID NO: 1476172 - DNA, 15 bp, Homo sapiens
tctccaacaaaaagc

SEQ ID NO: 1476173 - DNA, 15 bp, Homo sapiens
ctctccaacaaaaag

SEQ ID NO: 1476174 - DNA, 15 bp, Homo sapiens
tctctccaacaaaaa

SEQ ID NO: 1476175 - DNA, 15 bp, Homo sapiens
atctctccaacaaaa

SEQ ID NO: 1476176 - DNA, 15 bp, Homo sapiens
tatctctccaacaaa

SEQ ID NO: 1476177 - DNA, 15 bp, Homo sapiens
ctatctctccaacaa

SEQ ID NO: 1476178 - DNA, 15 bp, Homo sapiens
cctatctctccaaca

SEQ ID NO: 1476179 - DNA, 15 bp, Homo sapiens
acctatctctccaac

SEQ ID NO: 1476180 - DNA, 15 bp, Homo sapiens
aacctatctctccaa

SEQ ID NO: 1476181 - DNA, 15 bp, Homo sapiens
aaacctatctctcca

SEQ ID NO: 1476182 - DNA, 15 bp, Homo sapiens
aaaacctatctctcc

SEQ ID NO: 1476183 - DNA, 15 bp, Homo sapiens
taaaacctatctctc

SEQ ID NO: 1476184 - DNA, 15 bp, Homo sapiens
ataaaacctatctct

SEQ ID NO: 1476185 - DNA, 15 bp, Homo sapiens
cataaaacctatctc

SEQ ID NO: 1476186 - DNA, 15 bp, Homo sapiens
acataaaacctatct

SEQ ID NO: 1476187 - DNA, 15 bp, Homo sapiens
aacataaaacctatc

SEQ ID NO: 1476188 - DNA, 15 bp, Homo sapiens
caacataaaacctat

SEQ ID NO: 1476189 - DNA, 15 bp, Homo sapiens
gcaacataaaaccta

SEQ ID NO: 1476190 - DNA, 15 bp, Homo sapiens
ggcaacataaaacct

SEQ ID NO: 1476191 - DNA, 15 bp, Homo sapiens
gggcaacataaaacc

SEQ ID NO: 1476192 - DNA, 15 bp, Homo sapiens
tgggcaacataaaac

SEQ ID NO: 1476193 - DNA, 15 bp, Homo sapiens
ctgggcaacataaaa

SEQ ID NO: 1476194 - DNA, 15 bp, Homo sapiens
cctgggcaacataaa

SEQ ID NO: 1476195 - DNA, 15 bp, Homo sapiens
gcctgggcaacataa

SEQ ID NO: 1476196 - DNA, 15 bp, Homo sapiens
tttcaagaccagcct

SEQ ID NO: 1476197 - DNA, 15 bp, Homo sapiens
atttcaagaccagcc

SEQ ID NO: 1476198 - DNA, 15 bp, Homo sapiens
gatttcaagaccagc

SEQ ID NO: 1476199 - DNA, 15 bp, Homo sapiens
ggatttcaagaccag

SEQ ID NO: 1476200 - DNA, 15 bp, Homo sapiens
aggatttcaagacca

SEQ ID NO: 1476201 - DNA, 15 bp, Homo sapiens
caggatttcaagacc

SEQ ID NO: 1476202 - DNA, 15 bp, Homo sapiens
ccaggatttcaagac

SEQ ID NO: 1476203 - DNA, 15 bp, Homo sapiens
accaggatttcaaga

SEQ ID NO: 1476204 - DNA, 15 bp, Homo sapiens
caccaggatttcaag

SEQ ID NO: 1476205 - DNA, 15 bp, Homo sapiens
acaccaggatttcaa

SEQ ID NO: 1476206 - DNA, 15 bp, Homo sapiens
gacaccaggatttca

SEQ ID NO: 1476207 - DNA, 15 bp, Homo sapiens
tgacaccaggatttc

SEQ ID NO: 1476208 - DNA, 15 bp, Homo sapiens
ttgacaccaggattt

SEQ ID NO: 1476209 - DNA, 15 bp, Homo sapiens
cttgacaccaggatt

SEQ ID NO: 1476210 - DNA, 15 bp, Homo sapiens
acttgacaccaggat

SEQ ID NO: 1476211 - DNA, 15 bp, Homo sapiens
cacttgacaccagga

SEQ ID NO: 1476212 - DNA, 15 bp, Homo sapiens
tcacttgacaccagg

SEQ ID NO: 1476213 - DNA, 15 bp, Homo sapiens
atcacttgacaccag

SEQ ID NO: 1476214 - DNA, 15 bp, Homo sapiens
gatcacttgacacca

SEQ ID NO: 1476215 - DNA, 15 bp, Homo sapiens
ggatcacttgacacc

SEQ ID NO: 1476216 - DNA, 15 bp, Homo sapiens
aggatcacttgacac

SEQ ID NO: 1476217 - DNA, 15 bp, Homo sapiens
gaggatcacttgaca

SEQ ID NO: 1476218 - DNA, 15 bp, Homo sapiens
ggaggatcacttgac

SEQ ID NO: 1476219 - DNA, 15 bp, Homo sapiens
gactgaggcaggagg

SEQ ID NO: 1476220 - DNA, 15 bp, Homo sapiens
aagactgaggcagga

SEQ ID NO: 1476221 - DNA, 15 bp, Homo sapiens
gaagactgaggcagg

SEQ ID NO: 1476222 - DNA, 15 bp, Homo sapiens
ggaagactgaggcag

SEQ ID NO: 1476223 - DNA, 15 bp, Homo sapiens
tggaagactgaggca

SEQ ID NO: 1476224 - DNA, 15 bp, Homo sapiens
ttggaagactgaggc

SEQ ID NO: 1476225 - DNA, 15 bp, Homo sapiens
attggaagactgagg

SEQ ID NO: 1476226 - DNA, 15 bp, Homo sapiens
cattggaagactgag

SEQ ID NO: 1476227 - DNA, 15 bp, Homo sapiens
tcattggaagactga

SEQ ID NO: 1476228 - DNA, 15 bp, Homo sapiens
ctcattggaagactg

SEQ ID NO: 1476229 - DNA, 15 bp, Homo sapiens
actcattggaagact

SEQ ID NO: 1476230 - DNA, 15 bp, Homo sapiens
cactcattggaagac

SEQ ID NO: 1476231 - DNA, 15 bp, Homo sapiens
tcactcattggaaga

SEQ ID NO: 1476232 - DNA, 15 bp, Homo sapiens
gtcactcattggaag

SEQ ID NO: 1476233 - DNA, 15 bp, Homo sapiens
agtcactcattggaa

SEQ ID NO: 1476234 - DNA, 15 bp, Homo sapiens
tagtcactcattgga

SEQ ID NO: 1476235 - DNA, 15 bp, Homo sapiens
atagtcactcattgg

SEQ ID NO: 1476236 - DNA, 15 bp, Homo sapiens
catagtcactcattg

SEQ ID NO: 1476237 - DNA, 15 bp, Homo sapiens
tcatagtcactcatt

SEQ ID NO: 1476238 - DNA, 15 bp, Homo sapiens
ctcatagtcactcat

SEQ ID NO: 1476239 - DNA, 15 bp, Homo sapiens
actcatagtcactca

SEQ ID NO: 1476240 - DNA, 15 bp, Homo sapiens
aactcatagtcactc

SEQ ID NO: 1476241 - DNA, 15 bp, Homo sapiens
taactcatagtcact

SEQ ID NO: 1476242 - DNA, 15 bp, Homo sapiens
ataactcatagtcac

SEQ ID NO: 1476243 - DNA, 15 bp, Homo sapiens
cataactcatagtca

SEQ ID NO: 1476244 - DNA, 15 bp, Homo sapiens
acataactcatagtc

SEQ ID NO: 1476245 - DNA, 15 bp, Homo sapiens
cacataactcatagt

SEQ ID NO: 1476246 - DNA, 15 bp, Homo sapiens
acacataactcatag

SEQ ID NO: 1476247 - DNA, 15 bp, Homo sapiens
gacacataactcata

SEQ ID NO: 1476248 - DNA, 15 bp, Homo sapiens
agacacataactcat

SEQ ID NO: 1476249 - DNA, 15 bp, Homo sapiens
cagacacataactca

SEQ ID NO: 1476250 - DNA, 15 bp, Homo sapiens
acagacacataactc

SEQ ID NO: 1476251 - DNA, 15 bp, Homo sapiens
tacagacacataact

SEQ ID NO: 1476252 - DNA, 15 bp, Homo sapiens
ttacagacacataac

SEQ ID NO: 1476253 - DNA, 15 bp, Homo sapiens
attacagacacataa

SEQ ID NO: 1476254 - DNA, 15 bp, Homo sapiens
tattacagacacata

SEQ ID NO: 1476255 - DNA, 15 bp, Homo sapiens
gtattacagacacat

SEQ ID NO: 1476256 - DNA, 15 bp, Homo sapiens
cgtattacagacaca

SEQ ID NO: 1476257 - DNA, 15 bp, Homo sapiens
acgtattacagacac

SEQ ID NO: 1476258 - DNA, 15 bp, Homo sapiens
tacgtattacagaca

SEQ ID NO: 1476259 - DNA, 15 bp, Homo sapiens
atacgtattacagac

SEQ ID NO: 1476260 - DNA, 15 bp, Homo sapiens
gatacgtattacaga

SEQ ID NO: 1476261 - DNA, 15 bp, Homo sapiens
ggatacgtattacag

SEQ ID NO: 1476262 - DNA, 15 bp, Homo sapiens
tggatacgtattaca

SEQ ID NO: 1476263 - DNA, 15 bp, Homo sapiens
atggatacgtattac

SEQ ID NO: 1476264 - DNA, 15 bp, Homo sapiens
catggatacgtatta

SEQ ID NO: 1476265 - DNA, 15 bp, Homo sapiens
acatggatacgtatt

SEQ ID NO: 1476266 - DNA, 15 bp, Homo sapiens
gacatggatacgtat

SEQ ID NO: 1476267 - DNA, 15 bp, Homo sapiens
ggacatggatacgta

SEQ ID NO: 1476268 - DNA, 15 bp, Homo sapiens
gggacatggatacgt

SEQ ID NO: 1476269 - DNA, 15 bp, Homo sapiens
ggggacatggatacg

SEQ ID NO: 1476270 - DNA, 15 bp, Homo sapiens
aggggacatggatac

SEQ ID NO: 1476271 - DNA, 15 bp, Homo sapiens
aaggggacatggata

SEQ ID NO: 1476272 - DNA, 15 bp, Homo sapiens
gaaggggacatggat

SEQ ID NO: 1476273 - DNA, 15 bp, Homo sapiens
ggaaggggacatgga

SEQ ID NO: 1476274 - DNA, 15 bp, Homo sapiens
gggaaggggacatgg

SEQ ID NO: 1476275 - DNA, 15 bp, Homo sapiens
tgggaaggggacatg

SEQ ID NO: 1476276 - DNA, 15 bp, Homo sapiens
ctgggaaggggacat

SEQ ID NO: 1476277 - DNA, 15 bp, Homo sapiens
cctgggaaggggaca

SEQ ID NO: 1476278 - DNA, 15 bp, Homo sapiens
gcctgggaaggggac

SEQ ID NO: 1476279 - DNA, 15 bp, Homo sapiens
agcctgggaagggga

SEQ ID NO: 1476280 - DNA, 15 bp, Homo sapiens
gagcctgggaagggg

SEQ ID NO: 1476281 - DNA, 15 bp, Homo sapiens
ggagcctgggaaggg

SEQ ID NO: 1476282 - DNA, 15 bp, Homo sapiens
gggagcctgggaagg

SEQ ID NO: 1476283 - DNA, 15 bp, Homo sapiens
tgggagcctgggaag

SEQ ID NO: 1476284 - DNA, 15 bp, Homo sapiens
ctgggagcctgggaa

SEQ ID NO: 1476285 - DNA, 15 bp, Homo sapiens
cctgggagcctggga

SEQ ID NO: 1476286 - DNA, 15 bp, Homo sapiens
ccctgggagcctggg

SEQ ID NO: 1476287 - DNA, 15 bp, Homo sapiens
gccctgggagcctgg

SEQ ID NO: 1476288 - DNA, 15 bp, Homo sapiens
tgccctgggagcctg

SEQ ID NO: 1476289 - DNA, 15 bp, Homo sapiens
gtgccctgggagcct

SEQ ID NO: 1476290 - DNA, 15 bp, Homo sapiens
ggtgccctgggagcc

SEQ ID NO: 1476291 - DNA, 15 bp, Homo sapiens
tggtgccctgggagc

SEQ ID NO: 1476292 - DNA, 15 bp, Homo sapiens
ctggtgccctgggag

SEQ ID NO: 1476293 - DNA, 15 bp, Homo sapiens
tctggtgccctggga

SEQ ID NO: 1476294 - DNA, 15 bp, Homo sapiens
ctctggtgccctggg

SEQ ID NO: 1476295 - DNA, 15 bp, Homo sapiens
actctggtgccctgg

SEQ ID NO: 1476296 - DNA, 15 bp, Homo sapiens
cactctggtgccctg

SEQ ID NO: 1476297 - DNA, 15 bp, Homo sapiens
ccactctggtgccct

SEQ ID NO: 1476298 - DNA, 15 bp, Homo sapiens
tccactctggtgccc

SEQ ID NO: 1476299 - DNA, 15 bp, Homo sapiens
ctccactctggtgcc

SEQ ID NO: 1476300 - DNA, 15 bp, Homo sapiens
cctccactctggtgc

SEQ ID NO: 1476301 - DNA, 15 bp, Homo sapiens
acctccactctggtg

SEQ ID NO: 1476302 - DNA, 15 bp, Homo sapiens
aacctccactctggt

SEQ ID NO: 1476303 - DNA, 15 bp, Homo sapiens
gaacctccactctgg

SEQ ID NO: 1476304 - DNA, 15 bp, Homo sapiens
ggaacctccactctg

SEQ ID NO: 1476305 - DNA, 15 bp, Homo sapiens
aggaacctccactct

SEQ ID NO: 1476306 - DNA, 15 bp, Homo sapiens
caggaacctccactc

SEQ ID NO: 1476307 - DNA, 15 bp, Homo sapiens
acaggaacctccact

SEQ ID NO: 1476308 - DNA, 15 bp, Homo sapiens
aacaggaacctccac

SEQ ID NO: 1476309 - DNA, 15 bp, Homo sapiens
caacaggaacctcca

SEQ ID NO: 1476310 - DNA, 15 bp, Homo sapiens
acaacaggaacctcc

SEQ ID NO: 1476311 - DNA, 15 bp, Homo sapiens
tacaacaggaacctc

SEQ ID NO: 1476312 - DNA, 15 bp, Homo sapiens
ctacaacaggaacct

SEQ ID NO: 1476313 - DNA, 15 bp, Homo sapiens
tctacaacaggaacc

SEQ ID NO: 1476314 - DNA, 15 bp, Homo sapiens
ttctacaacaggaac

SEQ ID NO: 1476315 - DNA, 15 bp, Homo sapiens
tttctacaacaggaa

SEQ ID NO: 1476316 - DNA, 15 bp, Homo sapiens
gtttctacaacagga

SEQ ID NO: 1476317 - DNA, 15 bp, Homo sapiens
agtttctacaacagg

SEQ ID NO: 1476318 - DNA, 15 bp, Homo sapiens
gagtttctacaacag

SEQ ID NO: 1476319 - DNA, 15 bp, Homo sapiens
tgagtttctacaaca

SEQ ID NO: 1476320 - DNA, 15 bp, Homo sapiens
ctgagtttctacaac

SEQ ID NO: 1476321 - DNA, 15 bp, Homo sapiens
tctgagtttctacaa

SEQ ID NO: 1476322 - DNA, 15 bp, Homo sapiens
atctgagtttctaca

SEQ ID NO: 1476323 - DNA, 15 bp, Homo sapiens
gatctgagtttctac

SEQ ID NO: 1476324 - DNA, 15 bp, Homo sapiens
ggatctgagtttcta

SEQ ID NO: 1476325 - DNA, 15 bp, Homo sapiens
aggatctgagtttct

SEQ ID NO: 1476326 - DNA, 15 bp, Homo sapiens
gaggatctgagtttc

SEQ ID NO: 1476327 - DNA, 15 bp, Homo sapiens
agaggatctgagttt

SEQ ID NO: 1476328 - DNA, 15 bp, Homo sapiens
gagaggatctgagtt

SEQ ID NO: 1476329 - DNA, 15 bp, Homo sapiens
ggagaggatctgagt

SEQ ID NO: 1476330 - DNA, 15 bp, Homo sapiens
aggagaggatctgag

SEQ ID NO: 1476331 - DNA, 15 bp, Homo sapiens
gaggagaggatctga

SEQ ID NO: 1476332 - DNA, 15 bp, Homo sapiens
tgaggagaggatctg

SEQ ID NO: 1476333 - DNA, 15 bp, Homo sapiens
atgaggagaggatct

SEQ ID NO: 1476334 - DNA, 15 bp, Homo sapiens
catgaggagaggatc

SEQ ID NO: 1476335 - DNA, 15 bp, Homo sapiens
acatgaggagaggat

SEQ ID NO: 1476336 - DNA, 15 bp, Homo sapiens
aacatgaggagagga

SEQ ID NO: 1476337 - DNA, 15 bp, Homo sapiens
caacatgaggagagg

SEQ ID NO: 1476338 - DNA, 15 bp, Homo sapiens
ccaacatgaggagag

SEQ ID NO: 1476339 - DNA, 15 bp, Homo sapiens
cccaacatgaggaga

SEQ ID NO: 1476340 - DNA, 15 bp, Homo sapiens
gcccaacatgaggag

SEQ ID NO: 1476341 - DNA, 15 bp, Homo sapiens
tgcccaacatgagga

SEQ ID NO: 1476342 - DNA, 15 bp, Homo sapiens
ctgcccaacatgagg

SEQ ID NO: 1476343 - DNA, 15 bp, Homo sapiens
tctgcccaacatgag

SEQ ID NO: 1476344 - DNA, 15 bp, Homo sapiens
ttctgcccaacatga

SEQ ID NO: 1476345 - DNA, 15 bp, Homo sapiens
attctgcccaacatg

SEQ ID NO: 1476346 - DNA, 15 bp, Homo sapiens
gattctgcccaacat

SEQ ID NO: 1476347 - DNA, 15 bp, Homo sapiens
tgattctgcccaaca

SEQ ID NO: 1476348 - DNA, 15 bp, Homo sapiens
ttgattctgcccaac

SEQ ID NO: 1476349 - DNA, 15 bp, Homo sapiens
cttgattctgcccaa

SEQ ID NO: 1476350 - DNA, 15 bp, Homo sapiens
ccttgattctgccca

SEQ ID NO: 1476351 - DNA, 15 bp, Homo sapiens
tccttgattctgccc

SEQ ID NO: 1476352 - DNA, 15 bp, Homo sapiens
ctccttgattctgcc

SEQ ID NO: 1476353 - DNA, 15 bp, Homo sapiens
gctccttgattctgc

SEQ ID NO: 1476354 - DNA, 15 bp, Homo sapiens
tgctccttgattctg

SEQ ID NO: 1476355 - DNA, 15 bp, Homo sapiens
ctgctccttgattct

SEQ ID NO: 1476356 - DNA, 15 bp, Homo sapiens
gctgctccttgattc

SEQ ID NO: 1476357 - DNA, 15 bp, Homo sapiens
ggctgctccttgatt

SEQ ID NO: 1476358 - DNA, 15 bp, Homo sapiens
tggctgctccttgat

SEQ ID NO: 1476359 - DNA, 15 bp, Homo sapiens
ctggctgctccttga

SEQ ID NO: 1476360 - DNA, 15 bp, Homo sapiens
cctggctgctccttg

SEQ ID NO: 1476361 - DNA, 15 bp, Homo sapiens
gcctggctgctcctt

SEQ ID NO: 1476362 - DNA, 15 bp, Homo sapiens
ggcctggctgctcct

SEQ ID NO: 1476363 - DNA, 15 bp, Homo sapiens
gggcctggctgctcc

SEQ ID NO: 1476364 - DNA, 15 bp, Homo sapiens
tgggcctggctgctc

SEQ ID NO: 1476365 - DNA, 15 bp, Homo sapiens
ctgggcctggctgct

SEQ ID NO: 1476366 - DNA, 15 bp, Homo sapiens
tctgggcctggctgc

SEQ ID NO: 1476367 - DNA, 15 bp, Homo sapiens
ctctgggcctggctg

SEQ ID NO: 1476368 - DNA, 15 bp, Homo sapiens
gctctgggcctggct

SEQ ID NO: 1476369 - DNA, 15 bp, Homo sapiens
ggctctgggcctggc

SEQ ID NO: 1476370 - DNA, 15 bp, Homo sapiens
tggctctgggcctgg

SEQ ID NO: 1476371 - DNA, 15 bp, Homo sapiens
ctggctctgggcctg

SEQ ID NO: 1476372 - DNA, 15 bp, Homo sapiens
cctggctctgggcct

SEQ ID NO: 1476373 - DNA, 15 bp, Homo sapiens
ccctggctctgggcc

SEQ ID NO: 1476374 - DNA, 15 bp, Homo sapiens
gccctggctctgggc

SEQ ID NO: 1476375 - DNA, 15 bp, Homo sapiens
tgccctggctctggg

SEQ ID NO: 1476376 - DNA, 15 bp, Homo sapiens
gtgccctggctctgg

SEQ ID NO: 1476377 - DNA, 15 bp, Homo sapiens
agtgccctggctctg

SEQ ID NO: 1476378 - DNA, 15 bp, Homo sapiens
cagtgccctggctct

SEQ ID NO: 1476379 - DNA, 15 bp, Homo sapiens
ccagtgccctggctc

SEQ ID NO: 1476380 - DNA, 15 bp, Homo sapiens
accagtgccctggct

SEQ ID NO: 1476381 - DNA, 15 bp, Homo sapiens
gaccagtgccctggc

SEQ ID NO: 1476382 - DNA, 15 bp, Homo sapiens
agaccagtgccctgg

SEQ ID NO: 1476383 - DNA, 15 bp, Homo sapiens
gagaccagtgccctg

SEQ ID NO: 1476384 - DNA, 15 bp, Homo sapiens
ggagaccagtgccct

SEQ ID NO: 1476385 - DNA, 15 bp, Homo sapiens
aggagaccagtgccc

SEQ ID NO: 1476386 - DNA, 15 bp, Homo sapiens
caggagaccagtgcc

SEQ ID NO: 1476387 - DNA, 15 bp, Homo sapiens
gcaggagaccagtgc

SEQ ID NO: 1476388 - DNA, 15 bp, Homo sapiens
tgcaggagaccagtg

SEQ ID NO: 1476389 - DNA, 15 bp, Homo sapiens
ctgcaggagaccagt

SEQ ID NO: 1476390 - DNA, 15 bp, Homo sapiens
cctgcaggagaccag

SEQ ID NO: 1476391 - DNA, 15 bp, Homo sapiens
acctgcaggagacca

SEQ ID NO: 1476392 - DNA, 15 bp, Homo sapiens
gacctgcaggagacc

SEQ ID NO: 1476393 - DNA, 15 bp, Homo sapiens
tgacctgcaggagac

SEQ ID NO: 1476394 - DNA, 15 bp, Homo sapiens
ctgacctgcaggaga

SEQ ID NO: 1476395 - DNA, 15 bp, Homo sapiens
cctgacctgcaggag

SEQ ID NO: 1476396 - DNA, 15 bp, Homo sapiens
acctgacctgcagga

SEQ ID NO: 1476397 - DNA, 15 bp, Homo sapiens
tacctgacctgcagg

SEQ ID NO: 1476398 - DNA, 15 bp, Homo sapiens
gtacctgacctgcag

SEQ ID NO: 1476399 - DNA, 15 bp, Homo sapiens
agtacctgacctgca

SEQ ID NO: 1476400 - DNA, 15 bp, Homo sapiens
cagtacctgacctgc

SEQ ID NO: 1476401 - DNA, 15 bp, Homo sapiens
gcagtacctgacctg

SEQ ID NO: 1476402 - DNA, 15 bp, Homo sapiens
ggcagtacctgacct

SEQ ID NO: 1476403 - DNA, 15 bp, Homo sapiens
aggcagtacctgacc

SEQ ID NO: 1476404 - DNA, 15 bp, Homo sapiens
caggcagtacctgac

SEQ ID NO: 1476405 - DNA, 15 bp, Homo sapiens
acaggcagtacctga

SEQ ID NO: 1476406 - DNA, 15 bp, Homo sapiens
cacaggcagtacctg

SEQ ID NO: 1476407 - DNA, 15 bp, Homo sapiens
ccacaggcagtacct

SEQ ID NO: 1476408 - DNA, 15 bp, Homo sapiens
gccacaggcagtacc

SEQ ID NO: 1476409 - DNA, 15 bp, Homo sapiens
agccacaggcagtac

SEQ ID NO: 1476410 - DNA, 15 bp, Homo sapiens
aagccacaggcagta

SEQ ID NO: 1476411 - DNA, 15 bp, Homo sapiens
caagccacaggcagt

SEQ ID NO: 1476412 - DNA, 15 bp, Homo sapiens
tcaagccacaggcag

SEQ ID NO: 1476413 - DNA, 15 bp, Homo sapiens
atcaagccacaggca

SEQ ID NO: 1476414 - DNA, 15 bp, Homo sapiens
gatcaagccacaggc

SEQ ID NO: 1476415 - DNA, 15 bp, Homo sapiens
ggatcaagccacagg

SEQ ID NO: 1476416 - DNA, 15 bp, Homo sapiens
tggatcaagccacag

SEQ ID NO: 1476417 - DNA, 15 bp, Homo sapiens
ttggatcaagccaca

SEQ ID NO: 1476418 - DNA, 15 bp, Homo sapiens
gttggatcaagccac

SEQ ID NO: 1476419 - DNA, 15 bp, Homo sapiens
cgttggatcaagcca

SEQ ID NO: 1476420 - DNA, 15 bp, Homo sapiens
ccgttggatcaagcc

SEQ ID NO: 1476421 - DNA, 15 bp, Homo sapiens
accgttggatcaagc

SEQ ID NO: 1476422 - DNA, 15 bp, Homo sapiens
gaccgttggatcaag

SEQ ID NO: 1476423 - DNA, 15 bp, Homo sapiens
ggaccgttggatcaa

SEQ ID NO: 1476424 - DNA, 15 bp, Homo sapiens
aggaccgttggatca

SEQ ID NO: 1476425 - DNA, 15 bp, Homo sapiens
taggaccgttggatc

SEQ ID NO: 1476426 - DNA, 15 bp, Homo sapiens
ataggaccgttggat

SEQ ID NO: 1476427 - DNA, 15 bp, Homo sapiens
gataggaccgttgga

SEQ ID NO: 1476428 - DNA, 15 bp, Homo sapiens
ggataggaccgttgg

SEQ ID NO: 1476429 - DNA, 15 bp, Homo sapiens
gggataggaccgttg

SEQ ID NO: 1476430 - DNA, 15 bp, Homo sapiens
tgggataggaccgtt

SEQ ID NO: 1476431 - DNA, 15 bp, Homo sapiens
gtgggataggaccgt

SEQ ID NO: 1476432 - DNA, 15 bp, Homo sapiens
ggtgggataggaccg

SEQ ID NO: 1476433 - DNA, 15 bp, Homo sapiens
gggtgggataggacc

SEQ ID NO: 1476434 - DNA, 15 bp, Homo sapiens
tgggtgggataggac

SEQ ID NO: 1476435 - DNA, 15 bp, Homo sapiens
ctgggtgggatagga

SEQ ID NO: 1476436 - DNA, 15 bp, Homo sapiens
cctgggtgggatagg

SEQ ID NO: 1476437 - DNA, 15 bp, Homo sapiens
tcctgggtgggatag

SEQ ID NO: 1476438 - DNA, 15 bp, Homo sapiens
ctcctgggtgggata

SEQ ID NO: 1476439 - DNA, 15 bp, Homo sapiens
cctcctgggtgggat

SEQ ID NO: 1476440 - DNA, 15 bp, Homo sapiens
tcctcctgggtggga

SEQ ID NO: 1476441 - DNA, 15 bp, Homo sapiens
ctcctcctgggtggg

SEQ ID NO: 1476442 - DNA, 15 bp, Homo sapiens
tctcctcctgggtgg

SEQ ID NO: 1476443 - DNA, 15 bp, Homo sapiens
ctctcctcctgggtg

SEQ ID NO: 1476444 - DNA, 15 bp, Homo sapiens
tctctcctcctgggt

SEQ ID NO: 1476445 - DNA, 15 bp, Homo sapiens
ctctctcctcctggg

SEQ ID NO: 1476446 - DNA, 15 bp, Homo sapiens
cctctctcctcctgg

SEQ ID NO: 1476447 - DNA, 15 bp, Homo sapiens
ccctctctcctcctg

SEQ ID NO: 1476448 - DNA, 15 bp, Homo sapiens
accctctctcctcct

SEQ ID NO: 1476449 - DNA, 15 bp, Homo sapiens
gaccctctctcctcc

SEQ ID NO: 1476450 - DNA, 15 bp, Homo sapiens
tgaccctctctcctc

SEQ ID NO: 1476451 - DNA, 15 bp, Homo sapiens
gtgaccctctctcct

SEQ ID NO: 1476452 - DNA, 15 bp, Homo sapiens
agtgaccctctctcc

SEQ ID NO: 1476453 - DNA, 15 bp, Homo sapiens
aagtgaccctctctc

SEQ ID NO: 1476454 - DNA, 15 bp, Homo sapiens
aaagtgaccctctct

SEQ ID NO: 1476455 - DNA, 15 bp, Homo sapiens
aaaagtgaccctctc

SEQ ID NO: 1476456 - DNA, 15 bp, Homo sapiens
gaaaagtgaccctct

SEQ ID NO: 1476457 - DNA, 15 bp, Homo sapiens
ggaaaagtgaccctc

SEQ ID NO: 1476458 - DNA, 15 bp, Homo sapiens
gggaaaagtgaccct

SEQ ID NO: 1476459 - DNA, 15 bp, Homo sapiens
agggaaaagtgaccc

SEQ ID NO: 1476460 - DNA, 15 bp, Homo sapiens
aagggaaaagtgacc

SEQ ID NO: 1476461 - DNA, 15 bp, Homo sapiens
caagggaaaagtgac

SEQ ID NO: 1476462 - DNA, 15 bp, Homo sapiens
ccaagggaaaagtga

SEQ ID NO: 1476463 - DNA, 15 bp, Homo sapiens
gccaagggaaaagtg

SEQ ID NO: 1476464 - DNA, 15 bp, Homo sapiens
agccaagggaaaagt

SEQ ID NO: 1476465 - DNA, 15 bp, Homo sapiens
cagccaagggaaaag

SEQ ID NO: 1476466 - DNA, 15 bp, Homo sapiens
gcagccaagggaaaa

SEQ ID NO: 1476467 - DNA, 15 bp, Homo sapiens
ggcagccaagggaaa

SEQ ID NO: 1476468 - DNA, 15 bp, Homo sapiens
gggcagccaagggaa

SEQ ID NO: 1476469 - DNA, 15 bp, Homo sapiens
ggggcagccaaggga

SEQ ID NO: 1476470 - DNA, 15 bp, Homo sapiens
gggggcagccaaggg

SEQ ID NO: 1476471 - DNA, 15 bp, Homo sapiens
tgggggcagccaagg

SEQ ID NO: 1476472 - DNA, 15 bp, Homo sapiens
atgggggcagccaag

SEQ ID NO: 1476473 - DNA, 15 bp, Homo sapiens
gatgggggcagccaa

SEQ ID NO: 1476474 - DNA, 15 bp, Homo sapiens
cgatgggggcagcca

SEQ ID NO: 1476475 - DNA, 15 bp, Homo sapiens
gcgatgggggcagcc

SEQ ID NO: 1476476 - DNA, 15 bp, Homo sapiens
tgcgatgggggcagc

SEQ ID NO: 1476477 - DNA, 15 bp, Homo sapiens
gtgcgatgggggcag

SEQ ID NO: 1476478 - DNA, 15 bp, Homo sapiens
agtgcgatgggggca

SEQ ID NO: 1476479 - DNA, 15 bp, Homo sapiens
tagtgcgatgggggc

SEQ ID NO: 1476480 - DNA, 15 bp, Homo sapiens
ttagtgcgatggggg

SEQ ID NO: 1476481 - DNA, 15 bp, Homo sapiens
tttagtgcgatgggg

SEQ ID NO: 1476482 - DNA, 15 bp, Homo sapiens
ctttagtgcgatggg

SEQ ID NO: 1476483 - DNA, 15 bp, Homo sapiens
gctttagtgcgatgg

SEQ ID NO: 1476484 - DNA, 15 bp, Homo sapiens
tgctttagtgcgatg

SEQ ID NO: 1476485 - DNA, 15 bp, Homo sapiens
ctgctttagtgcgat

SEQ ID NO: 1476486 - DNA, 15 bp, Homo sapiens
gctgctttagtgcga

SEQ ID NO: 1476487 - DNA, 15 bp, Homo sapiens
agctgctttagtgcg

SEQ ID NO: 1476488 - DNA, 15 bp, Homo sapiens
cagctgctttagtgc

SEQ ID NO: 1476489 - DNA, 15 bp, Homo sapiens
ccagctgctttagtg

SEQ ID NO: 1476490 - DNA, 15 bp, Homo sapiens
gccagctgctttagt

SEQ ID NO: 1476491 - DNA, 15 bp, Homo sapiens
tgccagctgctttag

SEQ ID NO: 1476492 - DNA, 15 bp, Homo sapiens
gtgccagctgcttta

SEQ ID NO: 1476493 - DNA, 15 bp, Homo sapiens
agtgccagctgcttt

SEQ ID NO: 1476494 - DNA, 15 bp, Homo sapiens
cagtgccagctgctt

SEQ ID NO: 1476495 - DNA, 15 bp, Homo sapiens
tcagtgccagctgct

SEQ ID NO: 1476496 - DNA, 15 bp, Homo sapiens
ttcagtgccagctgc

SEQ ID NO: 1476497 - DNA, 15 bp, Homo sapiens
gttcagtgccagctg

SEQ ID NO: 1476498 - DNA, 15 bp, Homo sapiens
ggttcagtgccagct

SEQ ID NO: 1476499 - DNA, 15 bp, Homo sapiens
tggttcagtgccagc

SEQ ID NO: 1476500 - DNA, 15 bp, Homo sapiens
ctggttcagtgccag

SEQ ID NO: 1476501 - DNA, 15 bp, Homo sapiens
gctggttcagtgcca

SEQ ID NO: 1476502 - DNA, 15 bp, Homo sapiens
ggctggttcagtgcc

SEQ ID NO: 1476503 - DNA, 15 bp, Homo sapiens
aggctggttcagtgc

SEQ ID NO: 1476504 - DNA, 15 bp, Homo sapiens
gaggctggttcagtg

SEQ ID NO: 1476505 - DNA, 15 bp, Homo sapiens
ggaggctggttcagt

SEQ ID NO: 1476506 - DNA, 15 bp, Homo sapiens
tggaggctggttcag

SEQ ID NO: 1476507 - DNA, 15 bp, Homo sapiens
atggaggctggttca

SEQ ID NO: 1476508 - DNA, 15 bp, Homo sapiens
catggaggctggttc

SEQ ID NO: 1476509 - DNA, 15 bp, Homo sapiens
gcatggaggctggtt

SEQ ID NO: 1476510 - DNA, 15 bp, Homo sapiens
tgcatggaggctggt

SEQ ID NO: 1476511 - DNA, 15 bp, Homo sapiens
ctgcatggaggctgg

SEQ ID NO: 1476512 - DNA, 15 bp, Homo sapiens
actgcatggaggctg

SEQ ID NO: 1476513 - DNA, 15 bp, Homo sapiens
gactgcatggaggct

SEQ ID NO: 1476514 - DNA, 15 bp, Homo sapiens
ggactgcatggaggc

SEQ ID NO: 1476515 - DNA, 15 bp, Homo sapiens
gggactgcatggagg

SEQ ID NO: 1476516 - DNA, 15 bp, Homo sapiens
tgggactgcatggag

SEQ ID NO: 1476517 - DNA, 15 bp, Homo sapiens
atgggactgcatgga

SEQ ID NO: 1476518 - DNA, 15 bp, Homo sapiens
catgggactgcatgg

SEQ ID NO: 1476519 - DNA, 15 bp, Homo sapiens
gcatgggactgcatg

SEQ ID NO: 1476520 - DNA, 15 bp, Homo sapiens
tgcatgggactgcat

SEQ ID NO: 1476521 - DNA, 15 bp, Homo sapiens
ctgcatgggactgca

SEQ ID NO: 1476522 - DNA, 15 bp, Homo sapiens
actgcatgggactgc

SEQ ID NO: 1476523 - DNA, 15 bp, Homo sapiens
cactgcatgggactg

SEQ ID NO: 1476524 - DNA, 15 bp, Homo sapiens
gcactgcatgggact

SEQ ID NO: 1476525 - DNA, 15 bp, Homo sapiens
ggcactgcatgggac

SEQ ID NO: 1476526 - DNA, 15 bp, Homo sapiens
tggcactgcatggga

SEQ ID NO: 1476527 - DNA, 15 bp, Homo sapiens
gtggcactgcatggg

SEQ ID NO: 1476528 - DNA, 15 bp, Homo sapiens
ggtggcactgcatgg

SEQ ID NO: 1476529 - DNA, 15 bp, Homo sapiens
gggtggcactgcatg

SEQ ID NO: 1476530 - DNA, 15 bp, Homo sapiens
ttgggtggcactgca

SEQ ID NO: 1476531 - DNA, 15 bp, Homo sapiens
cttgggtggcactgc

SEQ ID NO: 1476532 - DNA, 15 bp, Homo sapiens
ccttgggtggcactg

SEQ ID NO: 1476533 - DNA, 15 bp, Homo sapiens
cccttgggtggcact

SEQ ID NO: 1476534 - DNA, 15 bp, Homo sapiens
acccttgggtggcac

SEQ ID NO: 1476535 - DNA, 15 bp, Homo sapiens
gacccttgggtggca

SEQ ID NO: 1476536 - DNA, 15 bp, Homo sapiens
ggacccttgggtggc

SEQ ID NO: 1476537 - DNA, 15 bp, Homo sapiens
gggacccttgggtgg

SEQ ID NO: 1476538 - DNA, 15 bp, Homo sapiens
ggggacccttgggtg

SEQ ID NO: 1476539 - DNA, 15 bp, Homo sapiens
tggggacccttgggt

SEQ ID NO: 1476540 - DNA, 15 bp, Homo sapiens
ctggggacccttggg

SEQ ID NO: 1476541 - DNA, 15 bp, Homo sapiens
actggggacccttgg

SEQ ID NO: 1476542 - DNA, 15 bp, Homo sapiens
tactggggacccttg

SEQ ID NO: 1476543 - DNA, 15 bp, Homo sapiens
ctactggggaccctt

SEQ ID NO: 1476544 - DNA, 15 bp, Homo sapiens
tctactggggaccct

SEQ ID NO: 1476545 - DNA, 15 bp, Homo sapiens
gtctactggggaccc

SEQ ID NO: 1476546 - DNA, 15 bp, Homo sapiens
tgtctactggggacc

SEQ ID NO: 1476547 - DNA, 15 bp, Homo sapiens
ttgtctactggggac

SEQ ID NO: 1476548 - DNA, 15 bp, Homo sapiens
attgtctactgggga

SEQ ID NO: 1476549 - DNA, 15 bp, Homo sapiens
cattgtctactgggg

SEQ ID NO: 1476550 - DNA, 15 bp, Homo sapiens
ccattgtctactggg

SEQ ID NO: 1476551 - DNA, 15 bp, Homo sapiens
accattgtctactgg

SEQ ID NO: 1476552 - DNA, 15 bp, Homo sapiens
caccattgtctactg

SEQ ID NO: 1476553 - DNA, 15 bp, Homo sapiens
ccaccattgtctact

SEQ ID NO: 1476554 - DNA, 15 bp, Homo sapiens
cccaccattgtctac

SEQ ID NO: 1476555 - DNA, 15 bp, Homo sapiens
gcccaccattgtcta

SEQ ID NO: 1476556 - DNA, 15 bp, Homo sapiens
ggcccaccattgtct

SEQ ID NO: 1476557 - DNA, 15 bp, Homo sapiens
tggcccaccattgtc

SEQ ID NO: 1476558 - DNA, 15 bp, Homo sapiens
ctggcccaccattgt

SEQ ID NO: 1476559 - DNA, 15 bp, Homo sapiens
actggcccaccattg

SEQ ID NO: 1476560 - DNA, 15 bp, Homo sapiens
aactggcccaccatt

SEQ ID NO: 1476561 - DNA, 15 bp, Homo sapiens
caactggcccaccat

SEQ ID NO: 1476562 - DNA, 15 bp, Homo sapiens
acaactggcccacca

SEQ ID NO: 1476563 - DNA, 15 bp, Homo sapiens
gacaactggcccacc

SEQ ID NO: 1476564 - DNA, 15 bp, Homo sapiens
tgacaactggcccac

SEQ ID NO: 1476565 - DNA, 15 bp, Homo sapiens
ctgacaactggccca

SEQ ID NO: 1476566 - DNA, 15 bp, Homo sapiens
cctgacaactggccc

SEQ ID NO: 1476567 - DNA, 15 bp, Homo sapiens
ccctgacaactggcc

SEQ ID NO: 1476568 - DNA, 15 bp, Homo sapiens
cccctgacaactggc

SEQ ID NO: 1476569 - DNA, 15 bp, Homo sapiens
gcccctgacaactgg

SEQ ID NO: 1476570 - DNA, 15 bp, Homo sapiens
agcccctgacaactg

SEQ ID NO: 1476571 - DNA, 15 bp, Homo sapiens
aagcccctgacaact

SEQ ID NO: 1476572 - DNA, 15 bp, Homo sapiens
gaagcccctgacaac

SEQ ID NO: 1476573 - DNA, 15 bp, Homo sapiens
ggaagcccctgacaa

SEQ ID NO: 1476574 - DNA, 15 bp, Homo sapiens
aggaagcccctgaca

SEQ ID NO: 1476575 - DNA, 15 bp, Homo sapiens
gaggaagcccctgac

SEQ ID NO: 1476576 - DNA, 15 bp, Homo sapiens
ggaggaagcccctga

SEQ ID NO: 1476577 - DNA, 15 bp, Homo sapiens
aggaggaagcccctg

SEQ ID NO: 1476578 - DNA, 15 bp, Homo sapiens
caggaggaagcccct

SEQ ID NO: 1476579 - DNA, 15 bp, Homo sapiens
gcaggaggaagcccc

SEQ ID NO: 1476580 - DNA, 15 bp, Homo sapiens
agcaggaggaagccc

SEQ ID NO: 1476581 - DNA, 15 bp, Homo sapiens
cagcaggaggaagcc

SEQ ID NO: 1476582 - DNA, 15 bp, Homo sapiens
gcagcaggaggaagc

SEQ ID NO: 1476583 - DNA, 15 bp, Homo sapiens
tgcagcaggaggaag

SEQ ID NO: 1476584 - DNA, 15 bp, Homo sapiens
ctgcagcaggaggaa

SEQ ID NO: 1476585 - DNA, 15 bp, Homo sapiens
cctgcagcaggagga

SEQ ID NO: 1476586 - DNA, 15 bp, Homo sapiens
ccctgcagcaggagg

SEQ ID NO: 1476587 - DNA, 15 bp, Homo sapiens
gccctgcagcaggag

SEQ ID NO: 1476588 - DNA, 15 bp, Homo sapiens
agccctgcagcagga

SEQ ID NO: 1476589 - DNA, 15 bp, Homo sapiens
cagccctgcagcagg

SEQ ID NO: 1476590 - DNA, 15 bp, Homo sapiens
tcagccctgcagcag

SEQ ID NO: 1476591 - DNA, 15 bp, Homo sapiens
ctcagccctgcagca

SEQ ID NO: 1476592 - DNA, 15 bp, Homo sapiens
tctcagccctgcagc

SEQ ID NO: 1476593 - DNA, 15 bp, Homo sapiens
gtctcagccctgcag

SEQ ID NO: 1476594 - DNA, 15 bp, Homo sapiens
ggtctcagccctgca

SEQ ID NO: 1476595 - DNA, 15 bp, Homo sapiens
gggtctcagccctgc

SEQ ID NO: 1476596 - DNA, 15 bp, Homo sapiens
agggtctcagccctg

SEQ ID NO: 1476597 - DNA, 15 bp, Homo sapiens
cagggtctcagccct

SEQ ID NO: 1476598 - DNA, 15 bp, Homo sapiens
ccagggtctcagccc

SEQ ID NO: 1476599 - DNA, 15 bp, Homo sapiens
cccagggtctcagcc

SEQ ID NO: 1476600 - DNA, 15 bp, Homo sapiens
tcccagggtctcagc

SEQ ID NO: 1476601 - DNA, 15 bp, Homo sapiens
ctcccagggtctcag

SEQ ID NO: 1476602 - DNA, 15 bp, Homo sapiens
cctcccagggtctca

SEQ ID NO: 1476603 - DNA, 15 bp, Homo sapiens
acctcccagggtctc

SEQ ID NO: 1476604 - DNA, 15 bp, Homo sapiens
gacctcccagggtct

SEQ ID NO: 1476605 - DNA, 15 bp, Homo sapiens
ggacctcccagggtc

SEQ ID NO: 1476606 - DNA, 15 bp, Homo sapiens
gggacctcccagggt

SEQ ID NO: 1476607 - DNA, 15 bp, Homo sapiens
tgggacctcccaggg

SEQ ID NO: 1476608 - DNA, 15 bp, Homo sapiens
ttgggacctcccagg

SEQ ID NO: 1476609 - DNA, 15 bp, Homo sapiens
gttgggacctcccag

SEQ ID NO: 1476610 - DNA, 15 bp, Homo sapiens
ggttgggacctccca

SEQ ID NO: 1476611 - DNA, 15 bp, Homo sapiens
gggttgggacctccc

SEQ ID NO: 1476612 - DNA, 15 bp, Homo sapiens
tgggttgggacctcc

SEQ ID NO: 1476613 - DNA, 15 bp, Homo sapiens
ctgggttgggacctc

SEQ ID NO: 1476614 - DNA, 15 bp, Homo sapiens
cctgggttgggacct

SEQ ID NO: 1476615 - DNA, 15 bp, Homo sapiens
gcctgggttgggacc

SEQ ID NO: 1476616 - DNA, 15 bp, Homo sapiens
tgcctgggttgggac

SEQ ID NO: 1476617 - DNA, 15 bp, Homo sapiens
ttgcctgggttggga

SEQ ID NO: 1476618 - DNA, 15 bp, Homo sapiens
tttgcctgggttggg

SEQ ID NO: 1476619 - DNA, 15 bp, Homo sapiens
atttgcctgggttgg

SEQ ID NO: 1476620 - DNA, 15 bp, Homo sapiens
aatttgcctgggttg

SEQ ID NO: 1476621 - DNA, 15 bp, Homo sapiens
caatttgcctgggtt

SEQ ID NO: 1476622 - DNA, 15 bp, Homo sapiens
tcaatttgcctgggt

SEQ ID NO: 1476623 - DNA, 15 bp, Homo sapiens
ttcaatttgcctggg

SEQ ID NO: 1476624 - DNA, 15 bp, Homo sapiens
gttcaatttgcctgg

SEQ ID NO: 1476625 - DNA, 15 bp, Homo sapiens
cgttcaatttgcctg

SEQ ID NO: 1476626 - DNA, 15 bp, Homo sapiens
gcgttcaatttgcct

SEQ ID NO: 1476627 - DNA, 15 bp, Homo sapiens
ggcgttcaatttgcc

SEQ ID NO: 1476628 - DNA, 15 bp, Homo sapiens
tggcgttcaatttgc

SEQ ID NO: 1476629 - DNA, 15 bp, Homo sapiens
ctggcgttcaatttg

SEQ ID NO: 1476630 - DNA, 15 bp, Homo sapiens
cctggcgttcaattt

SEQ ID NO: 1476631 - DNA, 15 bp, Homo sapiens
gcctggcgttcaatt

SEQ ID NO: 1476632 - DNA, 15 bp, Homo sapiens
agcctggcgttcaat

SEQ ID NO: 1476633 - DNA, 15 bp, Homo sapiens
tagcctggcgttcaa

SEQ ID NO: 1476634 - DNA, 15 bp, Homo sapiens
ttagcctggcgttca

SEQ ID NO: 1476635 - DNA, 15 bp, Homo sapiens
attagcctggcgttc

SEQ ID NO: 1476636 - DNA, 15 bp, Homo sapiens
aattagcctggcgtt

SEQ ID NO: 1476637 - DNA, 15 bp, Homo sapiens
aaattagcctggcgt

SEQ ID NO: 1476638 - DNA, 15 bp, Homo sapiens
caaattagcctggcg

SEQ ID NO: 1476639 - DNA, 15 bp, Homo sapiens
tcaaattagcctggc

SEQ ID NO: 1476640 - DNA, 15 bp, Homo sapiens
ttcaaattagcctgg

SEQ ID NO: 1476641 - DNA, 15 bp, Homo sapiens
cttcaaattagcctg

SEQ ID NO: 1476642 - DNA, 15 bp, Homo sapiens
tcttcaaattagcct

SEQ ID NO: 1476643 - DNA, 15 bp, Homo sapiens
gtcttcaaattagcc

SEQ ID NO: 1476644 - DNA, 15 bp, Homo sapiens
ggtcttcaaattagc

SEQ ID NO: 1476645 - DNA, 15 bp, Homo sapiens
gggtcttcaaattag

SEQ ID NO: 1476646 - DNA, 15 bp, Homo sapiens
tgggtcttcaaatta

SEQ ID NO: 1476647 - DNA, 15 bp, Homo sapiens
ttgggtcttcaaatt

SEQ ID NO: 1476648 - DNA, 15 bp, Homo sapiens
gttgggtcttcaaat

SEQ ID NO: 1476649 - DNA, 15 bp, Homo sapiens
agttgggtcttcaaa

SEQ ID NO: 1476650 - DNA, 15 bp, Homo sapiens
gagttgggtcttcaa

SEQ ID NO: 1476651 - DNA, 15 bp, Homo sapiens
ggagttgggtcttca

SEQ ID NO: 1476652 - DNA, 15 bp, Homo sapiens
gggagttgggtcttc

SEQ ID NO: 1476653 - DNA, 15 bp, Homo sapiens
tgggagttgggtctt

SEQ ID NO: 1476654 - DNA, 15 bp, Homo sapiens
ctgggagttgggtct

SEQ ID NO: 1476655 - DNA, 15 bp, Homo sapiens
gctgggagttgggtc

SEQ ID NO: 1476656 - DNA, 15 bp, Homo sapiens
ggctgggagttgggt

SEQ ID NO: 1476657 - DNA, 15 bp, Homo sapiens
gggctgggagttggg

SEQ ID NO: 1476658 - DNA, 15 bp, Homo sapiens
agggctgggagttgg

SEQ ID NO: 1476659 - DNA, 15 bp, Homo sapiens
gagggctgggagttg

SEQ ID NO: 1476660 - DNA, 15 bp, Homo sapiens
ggagggctgggagtt

SEQ ID NO: 1476661 - DNA, 15 bp, Homo sapiens
gggagggctgggagt

SEQ ID NO: 1476662 - DNA, 15 bp, Homo sapiens
ggggagggctgggag

SEQ ID NO: 1476663 - DNA, 15 bp, Homo sapiens
aggggagggctggga

SEQ ID NO: 1476664 - DNA, 15 bp, Homo sapiens
aaggggagggctggg

SEQ ID NO: 1476665 - DNA, 15 bp, Homo sapiens
gaaggggagggctgg

SEQ ID NO: 1476666 - DNA, 15 bp, Homo sapiens
tgaaggggagggctg

SEQ ID NO: 1476667 - DNA, 15 bp, Homo sapiens
gtgaaggggagggct

SEQ ID NO: 1476668 - DNA, 15 bp, Homo sapiens
ggtgaaggggagggc

SEQ ID NO: 1476669 - DNA, 15 bp, Homo sapiens
cggtgaaggggaggg

SEQ ID NO: 1476670 - DNA, 15 bp, Homo sapiens
ccggtgaaggggagg

SEQ ID NO: 1476671 - DNA, 15 bp, Homo sapiens
tccggtgaaggggag

SEQ ID NO: 1476672 - DNA, 15 bp, Homo sapiens
ctccggtgaagggga

SEQ ID NO: 1476673 - DNA, 15 bp, Homo sapiens
cctccggtgaagggg

SEQ ID NO: 1476674 - DNA, 15 bp, Homo sapiens
tcctccggtgaaggg

SEQ ID NO: 1476675 - DNA, 15 bp, Homo sapiens
gtcctccggtgaagg

SEQ ID NO: 1476676 - DNA, 15 bp, Homo sapiens
tgtcctccggtgaag

SEQ ID NO: 1476677 - DNA, 15 bp, Homo sapiens
ctgtcctccggtgaa

SEQ ID NO: 1476678 - DNA, 15 bp, Homo sapiens
tctgtcctccggtga

SEQ ID NO: 1476679 - DNA, 15 bp, Homo sapiens
ctctgtcctccggtg

SEQ ID NO: 1476680 - DNA, 15 bp, Homo sapiens
gctctgtcctccggt

SEQ ID NO: 1476681 - DNA, 15 bp, Homo sapiens
agctctgtcctccgg

SEQ ID NO: 1476682 - DNA, 15 bp, Homo sapiens
gagctctgtcctccg

SEQ ID NO: 1476683 - DNA, 15 bp, Homo sapiens
agagctctgtcctcc

SEQ ID NO: 1476684 - DNA, 15 bp, Homo sapiens
tagagctctgtcctc

SEQ ID NO: 1476685 - DNA, 15 bp, Homo sapiens
ctagagctctgtcct

SEQ ID NO: 1476686 - DNA, 15 bp, Homo sapiens
gctagagctctgtcc

SEQ ID NO: 1476687 - DNA, 15 bp, Homo sapiens
agctagagctctgtc

SEQ ID NO: 1476688 - DNA, 15 bp, Homo sapiens
cagctagagctctgt

SEQ ID NO: 1476689 - DNA, 15 bp, Homo sapiens
ccagctagagctctg

SEQ ID NO: 1476690 - DNA, 15 bp, Homo sapiens
gccagctagagctct

SEQ ID NO: 1476691 - DNA, 15 bp, Homo sapiens
ggccagctagagctc

SEQ ID NO: 1476692 - DNA, 15 bp, Homo sapiens
aggccagctagagct

SEQ ID NO: 1476693 - DNA, 15 bp, Homo sapiens
caggccagctagagc

SEQ ID NO: 1476694 - DNA, 15 bp, Homo sapiens
ccaggccagctagag

SEQ ID NO: 1476695 - DNA, 15 bp, Homo sapiens
cccaggccagctaga

SEQ ID NO: 1476696 - DNA, 15 bp, Homo sapiens
gcccaggccagctag

SEQ ID NO: 1476697 - DNA, 15 bp, Homo sapiens
ggcccaggccagcta

SEQ ID NO: 1476698 - DNA, 15 bp, Homo sapiens
gggcccaggccagct

SEQ ID NO: 1476699 - DNA, 15 bp, Homo sapiens
ggggcccaggccagc

SEQ ID NO: 1476700 - DNA, 15 bp, Homo sapiens
gggggcccaggccag

SEQ ID NO: 1476701 - DNA, 15 bp, Homo sapiens
tgggggcccaggcca

SEQ ID NO: 1476702 - DNA, 15 bp, Homo sapiens
gtgggggcccaggcc

SEQ ID NO: 1476703 - DNA, 15 bp, Homo sapiens
ggtgggggcccaggc

SEQ ID NO: 1476704 - DNA, 15 bp, Homo sapiens
aggtgggggcccagg

SEQ ID NO: 1476705 - DNA, 15 bp, Homo sapiens
caggtgggggcccag

SEQ ID NO: 1476706 - DNA, 15 bp, Homo sapiens
atcaggtgggggccc

SEQ ID NO: 1476707 - DNA, 15 bp, Homo sapiens
tatcaggtgggggcc

SEQ ID NO: 1476708 - DNA, 15 bp, Homo sapiens
ctatcaggtgggggc

SEQ ID NO: 1476709 - DNA, 15 bp, Homo sapiens
gctatcaggtggggg

SEQ ID NO: 1476710 - DNA, 15 bp, Homo sapiens
tgctatcaggtgggg

SEQ ID NO: 1476711 - DNA, 15 bp, Homo sapiens
ctgctatcaggtggg

SEQ ID NO: 1476712 - DNA, 15 bp, Homo sapiens
gctgctatcaggtgg

SEQ ID NO: 1476713 - DNA, 15 bp, Homo sapiens
ggctgctatcaggtg

SEQ ID NO: 1476714 - DNA, 15 bp, Homo sapiens
aggctgctatcaggt

SEQ ID NO: 1476715 - DNA, 15 bp, Homo sapiens
gaggctgctatcagg

SEQ ID NO: 1476716 - DNA, 15 bp, Homo sapiens
ggaggctgctatcag

SEQ ID NO: 1476717 - DNA, 15 bp, Homo sapiens
tggaggctgctatca

SEQ ID NO: 1476718 - DNA, 15 bp, Homo sapiens
ttggaggctgctatc

SEQ ID NO: 1476719 - DNA, 15 bp, Homo sapiens
gttggaggctgctat

SEQ ID NO: 1476720 - DNA, 15 bp, Homo sapiens
cgttggaggctgcta

SEQ ID NO: 1476721 - DNA, 15 bp, Homo sapiens
acgttggaggctgct

SEQ ID NO: 1476722 - DNA, 15 bp, Homo sapiens
gacgttggaggctgc

SEQ ID NO: 1476723 - DNA, 15 bp, Homo sapiens
agacgttggaggctg

SEQ ID NO: 1476724 - DNA, 15 bp, Homo sapiens
cagacgttggaggct

SEQ ID NO: 1476725 - DNA, 15 bp, Homo sapiens
ccagacgttggaggc

SEQ ID NO: 1476726 - DNA, 15 bp, Homo sapiens
cccagacgttggagg

SEQ ID NO: 1476727 - DNA, 15 bp, Homo sapiens
ccccagacgttggag

SEQ ID NO: 1476728 - DNA, 15 bp, Homo sapiens
accccagacgttgga

SEQ ID NO: 1476729 - DNA, 15 bp, Homo sapiens
caccccagacgttgg

SEQ ID NO: 1476730 - DNA, 15 bp, Homo sapiens
acaccccagacgttg

SEQ ID NO: 1476731 - DNA, 15 bp, Homo sapiens
gacaccccagacgtt

SEQ ID NO: 1476732 - DNA, 15 bp, Homo sapiens
agacaccccagacgt

SEQ ID NO: 1476733 - DNA, 15 bp, Homo sapiens
cagacaccccagacg

SEQ ID NO: 1476734 - DNA, 15 bp, Homo sapiens
tcagacaccccagac

SEQ ID NO: 1476735 - DNA, 15 bp, Homo sapiens
atcagacaccccaga

SEQ ID NO: 1476736 - DNA, 15 bp, Homo sapiens
tatcagacaccccag

SEQ ID NO: 1476737 - DNA, 15 bp, Homo sapiens
ttatcagacacccca

SEQ ID NO: 1476738 - DNA, 15 bp, Homo sapiens
attatcagacacccc

SEQ ID NO: 1476739 - DNA, 15 bp, Homo sapiens
cattatcagacaccc

SEQ ID NO: 1476740 - DNA, 15 bp, Homo sapiens
gcattatcagacacc

SEQ ID NO: 1476741 - DNA, 15 bp, Homo sapiens
agcattatcagacac

SEQ ID NO: 1476742 - DNA, 15 bp, Homo sapiens
aagcattatcagaca

SEQ ID NO: 1476743 - DNA, 15 bp, Homo sapiens
caagcattatcagac

SEQ ID NO: 1476744 - DNA, 15 bp, Homo sapiens
ccaagcattatcaga

SEQ ID NO: 1476745 - DNA, 15 bp, Homo sapiens
gccaagcattatcag

SEQ ID NO: 1476746 - DNA, 15 bp, Homo sapiens
cgccaagcattatca

SEQ ID NO: 1476747 - DNA, 15 bp, Homo sapiens
ccgccaagcattatc

SEQ ID NO: 1476748 - DNA, 15 bp, Homo sapiens
cccgccaagcattat

SEQ ID NO: 1476749 - DNA, 15 bp, Homo sapiens
ccccgccaagcatta

SEQ ID NO: 1476750 - DNA, 15 bp, Homo sapiens
tccccgccaagcatt

SEQ ID NO: 1476751 - DNA, 15 bp, Homo sapiens
ctccccgccaagcat

SEQ ID NO: 1476752 - DNA, 15 bp, Homo sapiens
gctccccgccaagca

SEQ ID NO: 1476753 - DNA, 15 bp, Homo sapiens
agctccccgccaagc

SEQ ID NO: 1476754 - DNA, 15 bp, Homo sapiens
gagctccccgccaag

SEQ ID NO: 1476755 - DNA, 15 bp, Homo sapiens
cgagctccccgccaa

SEQ ID NO: 1476756 - DNA, 15 bp, Homo sapiens
acgagctccccgcca

SEQ ID NO: 1476757 - DNA, 15 bp, Homo sapiens
cacgagctccccgcc

SEQ ID NO: 1476758 - DNA, 15 bp, Homo sapiens
gcacgagctccccgc

SEQ ID NO: 1476759 - DNA, 15 bp, Homo sapiens
ggcacgagctccccg

SEQ ID NO: 1476760 - DNA, 15 bp, Homo sapiens
tggcacgagctcccc

SEQ ID NO: 1476761 - DNA, 15 bp, Homo sapiens
ttggcacgagctccc

SEQ ID NO: 1476762 - DNA, 15 bp, Homo sapiens
cttggcacgagctcc

SEQ ID NO: 1476763 - DNA, 15 bp, Homo sapiens
acttggcacgagctc

SEQ ID NO: 1476764 - DNA, 15 bp, Homo sapiens
gacttggcacgagct

SEQ ID NO: 1476765 - DNA, 15 bp, Homo sapiens
ggacttggcacgagc

SEQ ID NO: 1476766 - DNA, 15 bp, Homo sapiens
gggacttggcacgag

SEQ ID NO: 1476767 - DNA, 15 bp, Homo sapiens
cgggacttggcacga

SEQ ID NO: 1476768 - DNA, 15 bp, Homo sapiens
gcgggacttggcacg

SEQ ID NO: 1476769 - DNA, 15 bp, Homo sapiens
ggcgggacttggcac

SEQ ID NO: 1476770 - DNA, 15 bp, Homo sapiens
tggcgggacttggca

SEQ ID NO: 1476771 - DNA, 15 bp, Homo sapiens
atggcgggacttggc

SEQ ID NO: 1476772 - DNA, 15 bp, Homo sapiens
gatggcgggacttgg

SEQ ID NO: 1476773 - DNA, 15 bp, Homo sapiens
tgatggcgggacttg

SEQ ID NO: 1476774 - DNA, 15 bp, Homo sapiens
ctgatggcgggactt

SEQ ID NO: 1476775 - DNA, 15 bp, Homo sapiens
gctgatggcgggact

SEQ ID NO: 1476776 - DNA, 15 bp, Homo sapiens
tgctgatggcgggac

SEQ ID NO: 1476777 - DNA, 15 bp, Homo sapiens
gtgctgatggcggga

SEQ ID NO: 1476778 - DNA, 15 bp, Homo sapiens
cgtgctgatggcggg

SEQ ID NO: 1476779 - DNA, 15 bp, Homo sapiens
ccgtgctgatggcgg

SEQ ID NO: 1476780 - DNA, 15 bp, Homo sapiens
accgtgctgatggcg

SEQ ID NO: 1476781 - DNA, 15 bp, Homo sapiens
aaccgtgctgatggc

SEQ ID NO: 1476782 - DNA, 15 bp, Homo sapiens
caaccgtgctgatgg

SEQ ID NO: 1476783 - DNA, 15 bp, Homo sapiens
acaaccgtgctgatg

SEQ ID NO: 1476784 - DNA, 15 bp, Homo sapiens
aacaaccgtgctgat

SEQ ID NO: 1476785 - DNA, 15 bp, Homo sapiens
caacaaccgtgctga

SEQ ID NO: 1476786 - DNA, 15 bp, Homo sapiens
gcaacaaccgtgctg

SEQ ID NO: 1476787 - DNA, 15 bp, Homo sapiens
agcaacaaccgtgct

SEQ ID NO: 1476788 - DNA, 15 bp, Homo sapiens
cagcaacaaccgtgc

SEQ ID NO: 1476789 - DNA, 15 bp, Homo sapiens
acagcaacaaccgtg

SEQ ID NO: 1476790 - DNA, 15 bp, Homo sapiens
aacagcaacaaccgt

SEQ ID NO: 1476791 - DNA, 15 bp, Homo sapiens
aaacagcaacaaccg

SEQ ID NO: 1476792 - DNA, 15 bp, Homo sapiens
taaacagcaacaacc

SEQ ID NO: 1476793 - DNA, 15 bp, Homo sapiens
gtaaacagcaacaac

SEQ ID NO: 1476794 - DNA, 15 bp, Homo sapiens
agtaaacagcaacaa

SEQ ID NO: 1476795 - DNA, 15 bp, Homo sapiens
cagtaaacagcaaca

SEQ ID NO: 1476796 - DNA, 15 bp, Homo sapiens
ccagtaaacagcaac

SEQ ID NO: 1476797 - DNA, 15 bp, Homo sapiens
cccagtaaacagcaa

SEQ ID NO: 1476798 - DNA, 15 bp, Homo sapiens
ccccagtaaacagca

SEQ ID NO: 1476799 - DNA, 15 bp, Homo sapiens
tccccagtaaacagc

SEQ ID NO: 1476800 - DNA, 15 bp, Homo sapiens
ctccccagtaaacag

SEQ ID NO: 1476801 - DNA, 15 bp, Homo sapiens
cctccccagtaaaca

SEQ ID NO: 1476802 - DNA, 15 bp, Homo sapiens
ccctccccagtaaac

SEQ ID NO: 1476803 - DNA, 15 bp, Homo sapiens
cccctccccagtaaa

SEQ ID NO: 1476804 - DNA, 15 bp, Homo sapiens
ccccctccccagtaa

SEQ ID NO: 1476805 - DNA, 15 bp, Homo sapiens
tccccctccccagta

SEQ ID NO: 1476806 - DNA, 15 bp, Homo sapiens
ctccccctccccagt

SEQ ID NO: 1476807 - DNA, 15 bp, Homo sapiens
cctccccctccccag

SEQ ID NO: 1476808 - DNA, 15 bp, Homo sapiens
ccctccccctcccca

SEQ ID NO: 1476809 - DNA, 15 bp, Homo sapiens
gccctccccctcccc

SEQ ID NO: 1476810 - DNA, 15 bp, Homo sapiens
agccctccccctccc

SEQ ID NO: 1476811 - DNA, 15 bp, Homo sapiens
cagccctccccctcc

SEQ ID NO: 1476812 - DNA, 15 bp, Homo sapiens
acagccctccccctc

SEQ ID NO: 1476813 - DNA, 15 bp, Homo sapiens
cacagccctccccct

SEQ ID NO: 1476814 - DNA, 15 bp, Homo sapiens
ccacagccctccccc

SEQ ID NO: 1476815 - DNA, 15 bp, Homo sapiens
tccacagccctcccc

SEQ ID NO: 1476816 - DNA, 15 bp, Homo sapiens
ctccacagccctccc

SEQ ID NO: 1476817 - DNA, 15 bp, Homo sapiens
gctccacagccctcc

SEQ ID NO: 1476818 - DNA, 15 bp, Homo sapiens
ggctccacagccctc

SEQ ID NO: 1476819 - DNA, 15 bp, Homo sapiens
aggctccacagccct

SEQ ID NO: 1476820 - DNA, 15 bp, Homo sapiens
gaggctccacagccc

SEQ ID NO: 1476821 - DNA, 15 bp, Homo sapiens
tgaggctccacagcc

SEQ ID NO: 1476822 - DNA, 15 bp, Homo sapiens
ttgaggctccacagc

SEQ ID NO: 1476823 - DNA, 15 bp, Homo sapiens
attgaggctccacag

SEQ ID NO: 1476824 - DNA, 15 bp, Homo sapiens
gattgaggctccaca

SEQ ID NO: 1476825 - DNA, 15 bp, Homo sapiens
tgattgaggctccac

SEQ ID NO: 1476826 - DNA, 15 bp, Homo sapiens
ctgattgaggctcca

SEQ ID NO: 1476827 - DNA, 15 bp, Homo sapiens
cctgattgaggctcc

SEQ ID NO: 1476828 - DNA, 15 bp, Homo sapiens
ccctgattgaggctc

SEQ ID NO: 1476829 - DNA, 15 bp, Homo sapiens
cccctgattgaggct

SEQ ID NO: 1476830 - DNA, 15 bp, Homo sapiens
ccccctgattgaggc

SEQ ID NO: 1476831 - DNA, 15 bp, Homo sapiens
tccccctgattgagg

SEQ ID NO: 1476832 - DNA, 15 bp, Homo sapiens
gtccccctgattgag

SEQ ID NO: 1476833 - DNA, 15 bp, Homo sapiens
tgtccccctgattga

SEQ ID NO: 1476834 - DNA, 15 bp, Homo sapiens
ctgtccccctgattg

SEQ ID NO: 1476835 - DNA, 15 bp, Homo sapiens
cctgtccccctgatt

SEQ ID NO: 1476836 - DNA, 15 bp, Homo sapiens
ccctgtccccctgat

SEQ ID NO: 1476837 - DNA, 15 bp, Homo sapiens
cccctgtccccctga

SEQ ID NO: 1476838 - DNA, 15 bp, Homo sapiens
ccccctgtccccctg

SEQ ID NO: 1476839 - DNA, 15 bp, Homo sapiens
accccctgtccccct

SEQ ID NO: 1476840 - DNA, 15 bp, Homo sapiens
gaccccctgtccccc

SEQ ID NO: 1476841 - DNA, 15 bp, Homo sapiens
ggaccccctgtcccc

SEQ ID NO: 1476842 - DNA, 15 bp, Homo sapiens
gggaccccctgtccc

SEQ ID NO: 1476843 - DNA, 15 bp, Homo sapiens
tgggaccccctgtcc

SEQ ID NO: 1476844 - DNA, 15 bp, Homo sapiens
gtgggaccccctgtc

SEQ ID NO: 1476845 - DNA, 15 bp, Homo sapiens
tgtgggaccccctgt

SEQ ID NO: 1476846 - DNA, 15 bp, Homo sapiens
ctgtgggaccccctg

SEQ ID NO: 1476847 - DNA, 15 bp, Homo sapiens
gctgtgggaccccct

SEQ ID NO: 1476848 - DNA, 15 bp, Homo sapiens
agctgtgggaccccc

SEQ ID NO: 1476849 - DNA, 15 bp, Homo sapiens
aagctgtgggacccc

SEQ ID NO: 1476850 - DNA, 15 bp, Homo sapiens
gaagctgtgggaccc

SEQ ID NO: 1476851 - DNA, 15 bp, Homo sapiens
agaagctgtgggacc

SEQ ID NO: 1476852 - DNA, 15 bp, Homo sapiens
aagaagctgtgggac

SEQ ID NO: 1476853 - DNA, 15 bp, Homo sapiens
gaagaagctgtggga

SEQ ID NO: 1476854 - DNA, 15 bp, Homo sapiens
ggaagaagctgtggg

SEQ ID NO: 1476855 - DNA, 15 bp, Homo sapiens
gggaagaagctgtgg

SEQ ID NO: 1476856 - DNA, 15 bp, Homo sapiens
tgggaagaagctgtg

SEQ ID NO: 1476857 - DNA, 15 bp, Homo sapiens
ctgggaagaagctgt

SEQ ID NO: 1476858 - DNA, 15 bp, Homo sapiens
tctgggaagaagctg

SEQ ID NO: 1476859 - DNA, 15 bp, Homo sapiens
ttctgggaagaagct

SEQ ID NO: 1476860 - DNA, 15 bp, Homo sapiens
attctgggaagaagc

SEQ ID NO: 1476861 - DNA, 15 bp, Homo sapiens
tattctgggaagaag

SEQ ID NO: 1476862 - DNA, 15 bp, Homo sapiens
gtattctgggaagaa

SEQ ID NO: 1476863 - DNA, 15 bp, Homo sapiens
ggtattctgggaaga

SEQ ID NO: 1476864 - DNA, 15 bp, Homo sapiens
gggtattctgggaag

SEQ ID NO: 1476865 - DNA, 15 bp, Homo sapiens
agggtattctgggaa

SEQ ID NO: 1476866 - DNA, 15 bp, Homo sapiens
aagggtattctggga

SEQ ID NO: 1476867 - DNA, 15 bp, Homo sapiens
aaagggtattctggg

SEQ ID NO: 1476868 - DNA, 15 bp, Homo sapiens
gaaagggtattctgg

SEQ ID NO: 1476869 - DNA, 15 bp, Homo sapiens
agaaagggtattctg

SEQ ID NO: 1476870 - DNA, 15 bp, Homo sapiens
cagaaagggtattct

SEQ ID NO: 1476871 - DNA, 15 bp, Homo sapiens
gcagaaagggtattc

SEQ ID NO: 1476872 - DNA, 15 bp, Homo sapiens
ggcagaaagggtatt

SEQ ID NO: 1476873 - DNA, 15 bp, Homo sapiens
aggcagaaagggtat

SEQ ID NO: 1476874 - DNA, 15 bp, Homo sapiens
aaggcagaaagggta

SEQ ID NO: 1476875 - DNA, 15 bp, Homo sapiens
aaaggcagaaagggt

SEQ ID NO: 1476876 - DNA, 15 bp, Homo sapiens
aaaaggcagaaaggg

SEQ ID NO: 1476877 - DNA, 15 bp, Homo sapiens
gaaaaggcagaaagg

SEQ ID NO: 1476878 - DNA, 15 bp, Homo sapiens
ggaaaaggcagaaag

SEQ ID NO: 1476879 - DNA, 15 bp, Homo sapiens
tggaaaaggcagaaa

SEQ ID NO: 1476880 - DNA, 15 bp, Homo sapiens
ctggaaaaggcagaa

SEQ ID NO: 1476881 - DNA, 15 bp, Homo sapiens
cctggaaaaggcaga

SEQ ID NO: 1476882 - DNA, 15 bp, Homo sapiens
tcctggaaaaggcag

SEQ ID NO: 1476883 - DNA, 15 bp, Homo sapiens
ttcctggaaaaggca

SEQ ID NO: 1476884 - DNA, 15 bp, Homo sapiens
tttcctggaaaaggc

SEQ ID NO: 1476885 - DNA, 15 bp, Homo sapiens
ctttcctggaaaagg

SEQ ID NO: 1476886 - DNA, 15 bp, Homo sapiens
actttcctggaaaag

SEQ ID NO: 1476887 - DNA, 15 bp, Homo sapiens
aactttcctggaaaa

SEQ ID NO: 1476888 - DNA, 15 bp, Homo sapiens
taactttcctggaaa

SEQ ID NO: 1476889 - DNA, 15 bp, Homo sapiens
ttaactttcctggaa

SEQ ID NO: 1476890 - DNA, 15 bp, Homo sapiens
gttaactttcctgga

SEQ ID NO: 1476891 - DNA, 15 bp, Homo sapiens
agttaactttcctgg

SEQ ID NO: 1476892 - DNA, 15 bp, Homo sapiens
cagttaactttcctg

SEQ ID NO: 1476893 - DNA, 15 bp, Homo sapiens
tcagttaactttcct

SEQ ID NO: 1476894 - DNA, 15 bp, Homo sapiens
ctcagttaactttcc

SEQ ID NO: 1476895 - DNA, 15 bp, Homo sapiens
cctcagttaactttc

SEQ ID NO: 1476896 - DNA, 15 bp, Homo sapiens
ccctcagttaacttt

SEQ ID NO: 1476897 - DNA, 15 bp, Homo sapiens
tccctcagttaactt

SEQ ID NO: 1476898 - DNA, 15 bp, Homo sapiens
ttccctcagttaact

SEQ ID NO: 1476899 - DNA, 15 bp, Homo sapiens
cttccctcagttaac

SEQ ID NO: 1476900 - DNA, 15 bp, Homo sapiens
tcttccctcagttaa

SEQ ID NO: 1476901 - DNA, 15 bp, Homo sapiens
gtcttccctcagtta

SEQ ID NO: 1476902 - DNA, 15 bp, Homo sapiens
ggtcttccctcagtt

SEQ ID NO: 1476903 - DNA, 15 bp, Homo sapiens
gggtcttccctcagt

SEQ ID NO: 1476904 - DNA, 15 bp, Homo sapiens
ggggtcttccctcag

SEQ ID NO: 1476905 - DNA, 15 bp, Homo sapiens
gggggtcttccctca

SEQ ID NO: 1476906 - DNA, 15 bp, Homo sapiens
tgggggtcttccctc

SEQ ID NO: 1476907 - DNA, 15 bp, Homo sapiens
ttgggggtcttccct

SEQ ID NO: 1476908 - DNA, 15 bp, Homo sapiens
cttgggggtcttccc

SEQ ID NO: 1476909 - DNA, 15 bp, Homo sapiens
acttgggggtcttcc

SEQ ID NO: 1476910 - DNA, 15 bp, Homo sapiens
gacttgggggtcttc

SEQ ID NO: 1476911 - DNA, 15 bp, Homo sapiens
agacttgggggtctt

SEQ ID NO: 1476912 - DNA, 15 bp, Homo sapiens
gagacttgggggtct

SEQ ID NO: 1476913 - DNA, 15 bp, Homo sapiens
agagacttgggggtc

SEQ ID NO: 1476914 - DNA, 15 bp, Homo sapiens
gagagacttgggggt

SEQ ID NO: 1476915 - DNA, 15 bp, Homo sapiens
ggagagacttggggg

SEQ ID NO: 1476916 - DNA, 15 bp, Homo sapiens
aggagagacttgggg

SEQ ID NO: 1476917 - DNA, 15 bp, Homo sapiens
aaggagagacttggg

SEQ ID NO: 1476918 - DNA, 15 bp, Homo sapiens
gaaggagagacttgg

SEQ ID NO: 1476919 - DNA, 15 bp, Homo sapiens
agaaggagagacttg

SEQ ID NO: 1476920 - DNA, 15 bp, Homo sapiens
aagaaggagagactt

SEQ ID NO: 1476921 - DNA, 15 bp, Homo sapiens
aaagaaggagagact

SEQ ID NO: 1476922 - DNA, 15 bp, Homo sapiens
caaagaaggagagac

SEQ ID NO: 1476923 - DNA, 15 bp, Homo sapiens
ccaaagaaggagaga

SEQ ID NO: 1476924 - DNA, 15 bp, Homo sapiens
tccaaagaaggagag

SEQ ID NO: 1476925 - DNA, 15 bp, Homo sapiens
ctccaaagaaggaga

SEQ ID NO: 1476926 - DNA, 15 bp, Homo sapiens
tctccaaagaaggag

SEQ ID NO: 1476927 - DNA, 15 bp, Homo sapiens
gtctccaaagaagga

SEQ ID NO: 1476928 - DNA, 15 bp, Homo sapiens
ggtctccaaagaagg

SEQ ID NO: 1476929 - DNA, 15 bp, Homo sapiens
gggtctccaaagaag

SEQ ID NO: 1476930 - DNA, 15 bp, Homo sapiens
tgggtctccaaagaa

SEQ ID NO: 1476931 - DNA, 15 bp, Homo sapiens
ttgggtctccaaaga

SEQ ID NO: 1476932 - DNA, 15 bp, Homo sapiens
attgggtctccaaag

SEQ ID NO: 1476933 - DNA, 15 bp, Homo sapiens
cattgggtctccaaa

SEQ ID NO: 1476934 - DNA, 15 bp, Homo sapiens
acattgggtctccaa

SEQ ID NO: 1476935 - DNA, 15 bp, Homo sapiens
gacattgggtctcca

SEQ ID NO: 1476936 - DNA, 15 bp, Homo sapiens
agacattgggtctcc

SEQ ID NO: 1476937 - DNA, 15 bp, Homo sapiens
cagacattgggtctc

SEQ ID NO: 1476938 - DNA, 15 bp, Homo sapiens
acagacattgggtct

SEQ ID NO: 1476939 - DNA, 15 bp, Homo sapiens
aacagacattgggtc

SEQ ID NO: 1476940 - DNA, 15 bp, Homo sapiens
aaacagacattgggt

SEQ ID NO: 1476941 - DNA, 15 bp, Homo sapiens
aaaacagacattggg

SEQ ID NO: 1476942 - DNA, 15 bp, Homo sapiens
aaaaacagacattgg

SEQ ID NO: 1476943 - DNA, 15 bp, Homo sapiens
taaaaacagacattg

SEQ ID NO: 1476944 - DNA, 15 bp, Homo sapiens
gtaaaaacagacatt

SEQ ID NO: 1476945 - DNA, 15 bp, Homo sapiens
ggtaaaaacagacat

SEQ ID NO: 1476946 - DNA, 15 bp, Homo sapiens
gggtaaaaacagaca

SEQ ID NO: 1476947 - DNA, 15 bp, Homo sapiens
tgggtaaaaacagac

SEQ ID NO: 1476948 - DNA, 15 bp, Homo sapiens
ctgggtaaaaacaga

SEQ ID NO: 1476949 - DNA, 15 bp, Homo sapiens
gctgggtaaaaacag

SEQ ID NO: 1476950 - DNA, 15 bp, Homo sapiens
tgctgggtaaaaaca

SEQ ID NO: 1476951 - DNA, 15 bp, Homo sapiens
gtgctgggtaaaaac

SEQ ID NO: 1476952 - DNA, 15 bp, Homo sapiens
ggtgctgggtaaaaa

SEQ ID NO: 1476953 - DNA, 15 bp, Homo sapiens
aggtgctgggtaaaa

SEQ ID NO: 1476954 - DNA, 15 bp, Homo sapiens
caggtgctgggtaaa

SEQ ID NO: 1476955 - DNA, 15 bp, Homo sapiens
ccaggtgctgggtaa

SEQ ID NO: 1476956 - DNA, 15 bp, Homo sapiens
tccaggtgctgggta

SEQ ID NO: 1476957 - DNA, 15 bp, Homo sapiens
gtccaggtgctgggt

SEQ ID NO: 1476958 - DNA, 15 bp, Homo sapiens
ggtccaggtgctggg

SEQ ID NO: 1476959 - DNA, 15 bp, Homo sapiens
gggtccaggtgctgg

SEQ ID NO: 1476960 - DNA, 15 bp, Homo sapiens
agggtccaggtgctg

SEQ ID NO: 1476961 - DNA, 15 bp, Homo sapiens
gagggtccaggtgct

SEQ ID NO: 1476962 - DNA, 15 bp, Homo sapiens
tgagggtccaggtgc

SEQ ID NO: 1476963 - DNA, 15 bp, Homo sapiens
ttgagggtccaggtg

SEQ ID NO: 1476964 - DNA, 15 bp, Homo sapiens
tttgagggtccaggt

SEQ ID NO: 1476965 - DNA, 15 bp, Homo sapiens
gtttgagggtccagg

SEQ ID NO: 1476966 - DNA, 15 bp, Homo sapiens
ggtttgagggtccag

SEQ ID NO: 1476967 - DNA, 15 bp, Homo sapiens
gggtttgagggtcca

SEQ ID NO: 1476968 - DNA, 15 bp, Homo sapiens
agggtttgagggtcc

SEQ ID NO: 1476969 - DNA, 15 bp, Homo sapiens
cagggtttgagggtc

SEQ ID NO: 1476970 - DNA, 15 bp, Homo sapiens
tcagggtttgagggt

SEQ ID NO: 1476971 - DNA, 15 bp, Homo sapiens
ttcagggtttgaggg

SEQ ID NO: 1476972 - DNA, 15 bp, Homo sapiens
gttcagggtttgagg

SEQ ID NO: 1476973 - DNA, 15 bp, Homo sapiens
ggttcagggtttgag

SEQ ID NO: 1476974 - DNA, 15 bp, Homo sapiens
gggttcagggtttga

SEQ ID NO: 1476975 - DNA, 15 bp, Homo sapiens
ggggttcagggtttg

SEQ ID NO: 1476976 - DNA, 15 bp, Homo sapiens
gggggttcagggttt

SEQ ID NO: 1476977 - DNA, 15 bp, Homo sapiens
ggggggttcagggtt

SEQ ID NO: 1476978 - DNA, 15 bp, Homo sapiens
tggggggttcagggt

SEQ ID NO: 1476979 - DNA, 15 bp, Homo sapiens
ttggggggttcaggg

SEQ ID NO: 1476980 - DNA, 15 bp, Homo sapiens
gttggggggttcagg

SEQ ID NO: 1476981 - DNA, 15 bp, Homo sapiens
ggttggggggttcag

SEQ ID NO: 1476982 - DNA, 15 bp, Homo sapiens
gggttggggggttca

SEQ ID NO: 1476983 - DNA, 15 bp, Homo sapiens
agggttggggggttc

SEQ ID NO: 1476984 - DNA, 15 bp, Homo sapiens
aagggttggggggtt

SEQ ID NO: 1476985 - DNA, 15 bp, Homo sapiens
caagggttggggggt

SEQ ID NO: 1476986 - DNA, 15 bp, Homo sapiens
tcaagggttgggggg

SEQ ID NO: 1476987 - DNA, 15 bp, Homo sapiens
atcaagggttggggg

SEQ ID NO: 1476988 - DNA, 15 bp, Homo sapiens
tatcaagggttgggg

SEQ ID NO: 1476989 - DNA, 15 bp, Homo sapiens
atatcaagggttggg

SEQ ID NO: 1476990 - DNA, 15 bp, Homo sapiens
aatatcaagggttgg

SEQ ID NO: 1476991 - DNA, 15 bp, Homo sapiens
aaatatcaagggttg

SEQ ID NO: 1476992 - DNA, 15 bp, Homo sapiens
caaatatcaagggtt

SEQ ID NO: 1476993 - DNA, 15 bp, Homo sapiens
tcaaatatcaagggt

SEQ ID NO: 1476994 - DNA, 15 bp, Homo sapiens
gtcaaatatcaaggg

SEQ ID NO: 1476995 - DNA, 15 bp, Homo sapiens
agtcaaatatcaagg

SEQ ID NO: 1476996 - DNA, 15 bp, Homo sapiens
aagtcaaatatcaag

SEQ ID NO: 1476997 - DNA, 15 bp, Homo sapiens
caagtcaaatatcaa

SEQ ID NO: 1476998 - DNA, 15 bp, Homo sapiens
ccaagtcaaatatca

SEQ ID NO: 1476999 - DNA, 15 bp, Homo sapiens
gccaagtcaaatatc

SEQ ID NO: 1477000 - DNA, 15 bp, Homo sapiens
agccaagtcaaatat

SEQ ID NO: 1477001 - DNA, 15 bp, Homo sapiens
aagccaagtcaaata

SEQ ID NO: 1477002 - DNA, 15 bp, Homo sapiens
aaagccaagtcaaat

SEQ ID NO: 1477003 - DNA, 15 bp, Homo sapiens
caaagccaagtcaaa

SEQ ID NO: 1477004 - DNA, 15 bp, Homo sapiens
ccaaagccaagtcaa

SEQ ID NO: 1477005 - DNA, 15 bp, Homo sapiens
tccaaagccaagtca

SEQ ID NO: 1477006 - DNA, 15 bp, Homo sapiens
gtccaaagccaagtc

SEQ ID NO: 1477007 - DNA, 15 bp, Homo sapiens
tgtccaaagccaagt

SEQ ID NO: 1477008 - DNA, 15 bp, Homo sapiens
gtgtccaaagccaag

SEQ ID NO: 1477009 - DNA, 15 bp, Homo sapiens
tgtgtccaaagccaa

SEQ ID NO: 1477010 - DNA, 15 bp, Homo sapiens
ctgtgtccaaagcca

SEQ ID NO: 1477011 - DNA, 15 bp, Homo sapiens
cctgtgtccaaagcc

SEQ ID NO: 1477012 - DNA, 15 bp, Homo sapiens
ccctgtgtccaaagc

SEQ ID NO: 1477013 - DNA, 15 bp, Homo sapiens
accctgtgtccaaag

SEQ ID NO: 1477014 - DNA, 15 bp, Homo sapiens
aaccctgtgtccaaa

SEQ ID NO: 1477015 - DNA, 15 bp, Homo sapiens
taaccctgtgtccaa

SEQ ID NO: 1477016 - DNA, 15 bp, Homo sapiens
ctaaccctgtgtcca

SEQ ID NO: 1477017 - DNA, 15 bp, Homo sapiens
actaaccctgtgtcc

SEQ ID NO: 1477018 - DNA, 15 bp, Homo sapiens
gactaaccctgtgtc

SEQ ID NO: 1477019 - DNA, 15 bp, Homo sapiens
agactaaccctgtgt

SEQ ID NO: 1477020 - DNA, 15 bp, Homo sapiens
aagactaaccctgtg

SEQ ID NO: 1477021 - DNA, 15 bp, Homo sapiens
aaagactaaccctgt

SEQ ID NO: 1477022 - DNA, 15 bp, Homo sapiens
taaagactaaccctg

SEQ ID NO: 1477023 - DNA, 15 bp, Homo sapiens
ttaaagactaaccct

SEQ ID NO: 1477024 - DNA, 15 bp, Homo sapiens
gttaaagactaaccc

SEQ ID NO: 1477025 - DNA, 15 bp, Homo sapiens
ggttaaagactaacc

SEQ ID NO: 1477026 - DNA, 15 bp, Homo sapiens
gggttaaagactaac

SEQ ID NO: 1477027 - DNA, 15 bp, Homo sapiens
ggggttaaagactaa

SEQ ID NO: 1477028 - DNA, 15 bp, Homo sapiens
tggggttaaagacta

SEQ ID NO: 1477029 - DNA, 15 bp, Homo sapiens
ctggggttaaagact

SEQ ID NO: 1477030 - DNA, 15 bp, Homo sapiens
gctggggttaaagac

SEQ ID NO: 1477031 - DNA, 15 bp, Homo sapiens
ggctggggttaaaga

SEQ ID NO: 1477032 - DNA, 15 bp, Homo sapiens
gggctggggttaaag

SEQ ID NO: 1477033 - DNA, 15 bp, Homo sapiens
ggggctggggttaaa

SEQ ID NO: 1477034 - DNA, 15 bp, Homo sapiens
tggggctggggttaa

SEQ ID NO: 1477035 - DNA, 15 bp, Homo sapiens
ctggggctggggtta

SEQ ID NO: 1477036 - DNA, 15 bp, Homo sapiens
tctggggctggggtt

SEQ ID NO: 1477037 - DNA, 15 bp, Homo sapiens
gtctggggctggggt

SEQ ID NO: 1477038 - DNA, 15 bp, Homo sapiens
tgtctggggctgggg

SEQ ID NO: 1477039 - DNA, 15 bp, Homo sapiens
ctgtctggggctggg

SEQ ID NO: 1477040 - DNA, 15 bp, Homo sapiens
cctgtctggggctgg

SEQ ID NO: 1477041 - DNA, 15 bp, Homo sapiens
gcctgtctggggctg

SEQ ID NO: 1477042 - DNA, 15 bp, Homo sapiens
ggcctgtctggggct

SEQ ID NO: 1477043 - DNA, 15 bp, Homo sapiens
tggcctgtctggggc

SEQ ID NO: 1477044 - DNA, 15 bp, Homo sapiens
ttggcctgtctgggg

SEQ ID NO: 1477045 - DNA, 15 bp, Homo sapiens
gttggcctgtctggg

SEQ ID NO: 1477046 - DNA, 15 bp, Homo sapiens
cgttggcctgtctgg

SEQ ID NO: 1477047 - DNA, 15 bp, Homo sapiens
acgttggcctgtctg

SEQ ID NO: 1477048 - DNA, 15 bp, Homo sapiens
cacgttggcctgtct

SEQ ID NO: 1477049 - DNA, 15 bp, Homo sapiens
tcacgttggcctgtc

SEQ ID NO: 1477050 - DNA, 15 bp, Homo sapiens
ttcacgttggcctgt

SEQ ID NO: 1477051 - DNA, 15 bp, Homo sapiens
cttcacgttggcctg

SEQ ID NO: 1477052 - DNA, 15 bp, Homo sapiens
acttcacgttggcct

SEQ ID NO: 1477053 - DNA, 15 bp, Homo sapiens
aacttcacgttggcc

SEQ ID NO: 1477054 - DNA, 15 bp, Homo sapiens
aaacttcacgttggc

SEQ ID NO: 1477055 - DNA, 15 bp, Homo sapiens
caaacttcacgttgg

SEQ ID NO: 1477056 - DNA, 15 bp, Homo sapiens
acaaacttcacgttg

SEQ ID NO: 1477057 - DNA, 15 bp, Homo sapiens
cacaaacttcacgtt

SEQ ID NO: 1477058 - DNA, 15 bp, Homo sapiens
gcacaaacttcacgt

SEQ ID NO: 1477059 - DNA, 15 bp, Homo sapiens
ggcacaaacttcacg

SEQ ID NO: 1477060 - DNA, 15 bp, Homo sapiens
gggcacaaacttcac

SEQ ID NO: 1477061 - DNA, 15 bp, Homo sapiens
ggggcacaaacttca

SEQ ID NO: 1477062 - DNA, 15 bp, Homo sapiens
tggggcacaaacttc

SEQ ID NO: 1477063 - DNA, 15 bp, Homo sapiens
ctggggcacaaactt

SEQ ID NO: 1477064 - DNA, 15 bp, Homo sapiens
tctggggcacaaact

SEQ ID NO: 1477065 - DNA, 15 bp, Homo sapiens
ttctggggcacaaac

SEQ ID NO: 1477066 - DNA, 15 bp, Homo sapiens
tttctggggcacaaa

SEQ ID NO: 1477067 - DNA, 15 bp, Homo sapiens
gtttctggggcacaa

SEQ ID NO: 1477068 - DNA, 15 bp, Homo sapiens
tgtttctggggcaca

SEQ ID NO: 1477069 - DNA, 15 bp, Homo sapiens
ctgtttctggggcac

SEQ ID NO: 1477070 - DNA, 15 bp, Homo sapiens
actgtttctggggca

SEQ ID NO: 1477071 - DNA, 15 bp, Homo sapiens
cactgtttctggggc

SEQ ID NO: 1477072 - DNA, 15 bp, Homo sapiens
gcactgtttctgggg

SEQ ID NO: 1477073 - DNA, 15 bp, Homo sapiens
ggcactgtttctggg

SEQ ID NO: 1477074 - DNA, 15 bp, Homo sapiens
gggcactgtttctgg

SEQ ID NO: 1477075 - DNA, 15 bp, Homo sapiens
ggggcactgtttctg

SEQ ID NO: 1477076 - DNA, 15 bp, Homo sapiens
gggggcactgtttct

SEQ ID NO: 1477077 - DNA, 15 bp, Homo sapiens
ggggggcactgtttc

SEQ ID NO: 1477078 - DNA, 15 bp, Homo sapiens
gggggggcactgttt

SEQ ID NO: 1477079 - DNA, 15 bp, Homo sapiens
cgggggggcactgtt

SEQ ID NO: 1477080 - DNA, 15 bp, Homo sapiens
gcgggggggcactgt

SEQ ID NO: 1477081 - DNA, 15 bp, Homo sapiens
ggcgggggggcactg

SEQ ID NO: 1477082 - DNA, 15 bp, Homo sapiens
cggcgggggggcact

SEQ ID NO: 1477083 - DNA, 15 bp, Homo sapiens
gcggcgggggggcac

SEQ ID NO: 1477084 - DNA, 15 bp, Homo sapiens
ggcggcgggggggca

SEQ ID NO: 1477085 - DNA, 15 bp, Homo sapiens
aggcggcgggggggc

SEQ ID NO: 1477086 - DNA, 15 bp, Homo sapiens
aaggcggcggggggg

SEQ ID NO: 1477087 - DNA, 15 bp, Homo sapiens
caaggcggcgggggg

SEQ ID NO: 1477088 - DNA, 15 bp, Homo sapiens
gcaaggcggcggggg

SEQ ID NO: 1477089 - DNA, 15 bp, Homo sapiens
ggcaaggcggcgggg

SEQ ID NO: 1477090 - DNA, 15 bp, Homo sapiens
aggcaaggcggcggg

SEQ ID NO: 1477091 - DNA, 15 bp, Homo sapiens
aaggcaaggcggcgg

SEQ ID NO: 1477092 - DNA, 15 bp, Homo sapiens
caaggcaaggcggcg

SEQ ID NO: 1477093 - DNA, 15 bp, Homo sapiens
gcaaggcaaggcggc

SEQ ID NO: 1477094 - DNA, 15 bp, Homo sapiens
agcaaggcaaggcgg

SEQ ID NO: 1477095 - DNA, 15 bp, Homo sapiens
aagcaaggcaaggcg

SEQ ID NO: 1477096 - DNA, 15 bp, Homo sapiens
aaagcaaggcaaggc

SEQ ID NO: 1477097 - DNA, 15 bp, Homo sapiens
caaagcaaggcaagg

SEQ ID NO: 1477098 - DNA, 15 bp, Homo sapiens
gcaaagcaaggcaag

SEQ ID NO: 1477099 - DNA, 15 bp, Homo sapiens
ggcaaagcaaggcaa

SEQ ID NO: 1477100 - DNA, 15 bp, Homo sapiens
aggcaaagcaaggca

SEQ ID NO: 1477101 - DNA, 15 bp, Homo sapiens
aaggcaaagcaaggc

SEQ ID NO: 1477102 - DNA, 15 bp, Homo sapiens
taaggcaaagcaagg

SEQ ID NO: 1477103 - DNA, 15 bp, Homo sapiens
ataaggcaaagcaag

SEQ ID NO: 1477104 - DNA, 15 bp, Homo sapiens
gataaggcaaagcaa

SEQ ID NO: 1477105 - DNA, 15 bp, Homo sapiens
tgataaggcaaagca

SEQ ID NO: 1477106 - DNA, 15 bp, Homo sapiens
ctgataaggcaaagc

SEQ ID NO: 1477107 - DNA, 15 bp, Homo sapiens
tctgataaggcaaag

SEQ ID NO: 1477108 - DNA, 15 bp, Homo sapiens
ctctgataaggcaaa

SEQ ID NO: 1477109 - DNA, 15 bp, Homo sapiens
cctctgataaggcaa

SEQ ID NO: 1477110 - DNA, 15 bp, Homo sapiens
gcctctgataaggca

SEQ ID NO: 1477111 - DNA, 15 bp, Homo sapiens
agcctctgataaggc

SEQ ID NO: 1477112 - DNA, 15 bp, Homo sapiens
cagcctctgataagg

SEQ ID NO: 1477113 - DNA, 15 bp, Homo sapiens
gcagcctctgataag

SEQ ID NO: 1477114 - DNA, 15 bp, Homo sapiens
tgcagcctctgataa

SEQ ID NO: 1477115 - DNA, 15 bp, Homo sapiens
ctgcagcctctgata

SEQ ID NO: 1477116 - DNA, 15 bp, Homo sapiens
gctgcagcctctgat

SEQ ID NO: 1477117 - DNA, 15 bp, Homo sapiens
ggctgcagcctctga

SEQ ID NO: 1477118 - DNA, 15 bp, Homo sapiens
tggctgcagcctctg

SEQ ID NO: 1477119 - DNA, 15 bp, Homo sapiens
ttggctgcagcctct

SEQ ID NO: 1477120 - DNA, 15 bp, Homo sapiens
attggctgcagcctc

SEQ ID NO: 1477121 - DNA, 15 bp, Homo sapiens
gattggctgcagcct

SEQ ID NO: 1477122 - DNA, 15 bp, Homo sapiens
tgattggctgcagcc

SEQ ID NO: 1477123 - DNA, 15 bp, Homo sapiens
ctgattggctgcagc

SEQ ID NO: 1477124 - DNA, 15 bp, Homo sapiens
gctgattggctgcag

SEQ ID NO: 1477125 - DNA, 15 bp, Homo sapiens
agctgattggctgca

SEQ ID NO: 1477126 - DNA, 15 bp, Homo sapiens
tagctgattggctgc

SEQ ID NO: 1477127 - DNA, 15 bp, Homo sapiens
ttagctgattggctg

SEQ ID NO: 1477128 - DNA, 15 bp, Homo sapiens
cttagctgattggct

SEQ ID NO: 1477129 - DNA, 15 bp, Homo sapiens
ccttagctgattggc

SEQ ID NO: 1477130 - DNA, 15 bp, Homo sapiens
tccttagctgattgg

SEQ ID NO: 1477131 - DNA, 15 bp, Homo sapiens
gtccttagctgattg

SEQ ID NO: 1477132 - DNA, 15 bp, Homo sapiens
tgtccttagctgatt

SEQ ID NO: 1477133 - DNA, 15 bp, Homo sapiens
ctgtccttagctgat

SEQ ID NO: 1477134 - DNA, 15 bp, Homo sapiens
tctgtccttagctga

SEQ ID NO: 1477135 - DNA, 15 bp, Homo sapiens
ctctgtccttagctg

SEQ ID NO: 1477136 - DNA, 15 bp, Homo sapiens
tctctgtccttagct

SEQ ID NO: 1477137 - DNA, 15 bp, Homo sapiens
ctctctgtccttagc

SEQ ID NO: 1477138 - DNA, 15 bp, Homo sapiens
cctctctgtccttag

SEQ ID NO: 1477139 - DNA, 15 bp, Homo sapiens
tcctctctgtcctta

SEQ ID NO: 1477140 - DNA, 15 bp, Homo sapiens
ctcctctctgtcctt

SEQ ID NO: 1477141 - DNA, 15 bp, Homo sapiens
gctcctctctgtcct

SEQ ID NO: 1477142 - DNA, 15 bp, Homo sapiens
ggctcctctctgtcc

SEQ ID NO: 1477143 - DNA, 15 bp, Homo sapiens
gggctcctctctgtc

SEQ ID NO: 1477144 - DNA, 15 bp, Homo sapiens
agggctcctctctgt

SEQ ID NO: 1477145 - DNA, 15 bp, Homo sapiens
gagggctcctctctg

SEQ ID NO: 1477146 - DNA, 15 bp, Homo sapiens
cgagggctcctctct

SEQ ID NO: 1477147 - DNA, 15 bp, Homo sapiens
tcgagggctcctctc

SEQ ID NO: 1477148 - DNA, 15 bp, Homo sapiens
ttcgagggctcctct

SEQ ID NO: 1477149 - DNA, 15 bp, Homo sapiens
cttcgagggctcctc

SEQ ID NO: 1477150 - DNA, 15 bp, Homo sapiens
ccttcgagggctcct

SEQ ID NO: 1477151 - DNA, 15 bp, Homo sapiens
cccttcgagggctcc

SEQ ID NO: 1477152 - DNA, 15 bp, Homo sapiens
ccccttcgagggctc

SEQ ID NO: 1477153 - DNA, 15 bp, Homo sapiens
gccccttcgagggct

SEQ ID NO: 1477154 - DNA, 15 bp, Homo sapiens
agccccttcgagggc

SEQ ID NO: 1477155 - DNA, 15 bp, Homo sapiens
tagccccttcgaggg

SEQ ID NO: 1477156 - DNA, 15 bp, Homo sapiens
atagccccttcgagg

SEQ ID NO: 1477157 - DNA, 15 bp, Homo sapiens
gatagccccttcgag

SEQ ID NO: 1477158 - DNA, 15 bp, Homo sapiens
tgatagccccttcga

SEQ ID NO: 1477159 - DNA, 15 bp, Homo sapiens
gtgatagccccttcg

SEQ ID NO: 1477160 - DNA, 15 bp, Homo sapiens
tgtgatagccccttc

SEQ ID NO: 1477161 - DNA, 15 bp, Homo sapiens
ctgtgatagcccctt

SEQ ID NO: 1477162 - DNA, 15 bp, Homo sapiens
gctgtgatagcccct

SEQ ID NO: 1477163 - DNA, 15 bp, Homo sapiens
ggctgtgatagcccc

SEQ ID NO: 1477164 - DNA, 15 bp, Homo sapiens
aggctgtgatagccc

SEQ ID NO: 1477165 - DNA, 15 bp, Homo sapiens
gaggctgtgatagcc

SEQ ID NO: 1477166 - DNA, 15 bp, Homo sapiens
tgaggctgtgatagc

SEQ ID NO: 1477167 - DNA, 15 bp, Homo sapiens
ctgaggctgtgatag

SEQ ID NO: 1477168 - DNA, 15 bp, Homo sapiens
tctgaggctgtgata

SEQ ID NO: 1477169 - DNA, 15 bp, Homo sapiens
ctctgaggctgtgat

SEQ ID NO: 1477170 - DNA, 15 bp, Homo sapiens
actctgaggctgtga

SEQ ID NO: 1477171 - DNA, 15 bp, Homo sapiens
aactctgaggctgtg

SEQ ID NO: 1477172 - DNA, 15 bp, Homo sapiens
gaactctgaggctgt

SEQ ID NO: 1477173 - DNA, 15 bp, Homo sapiens
tgaactctgaggctg

SEQ ID NO: 1477174 - DNA, 15 bp, Homo sapiens
gtgaactctgaggct

SEQ ID NO: 1477175 - DNA, 15 bp, Homo sapiens
cgtgaactctgaggc

SEQ ID NO: 1477176 - DNA, 15 bp, Homo sapiens
tcgtgaactctgagg

SEQ ID NO: 1477177 - DNA, 15 bp, Homo sapiens
ctcgtgaactctgag

SEQ ID NO: 1477178 - DNA, 15 bp, Homo sapiens
cctcgtgaactctga

SEQ ID NO: 1477179 - DNA, 15 bp, Homo sapiens
gcctcgtgaactctg

SEQ ID NO: 1477180 - DNA, 15 bp, Homo sapiens
tgcctcgtgaactct

SEQ ID NO: 1477181 - DNA, 15 bp, Homo sapiens
ctgcctcgtgaactc

SEQ ID NO: 1477182 - DNA, 15 bp, Homo sapiens
gctgcctcgtgaact

SEQ ID NO: 1477183 - DNA, 15 bp, Homo sapiens
ggctgcctcgtgaac

SEQ ID NO: 1477184 - DNA, 15 bp, Homo sapiens
cggctgcctcgtgaa

SEQ ID NO: 1477185 - DNA, 15 bp, Homo sapiens
tcggctgcctcgtga

SEQ ID NO: 1477186 - DNA, 15 bp, Homo sapiens
ctcggctgcctcgtg

SEQ ID NO: 1477187 - DNA, 15 bp, Homo sapiens
cctcggctgcctcgt

SEQ ID NO: 1477188 - DNA, 15 bp, Homo sapiens
tcctcggctgcctcg

SEQ ID NO: 1477189 - DNA, 15 bp, Homo sapiens
ttcctcggctgcctc

SEQ ID NO: 1477190 - DNA, 15 bp, Homo sapiens
cttcctcggctgcct

SEQ ID NO: 1477191 - DNA, 15 bp, Homo sapiens
tcttcctcggctgcc

SEQ ID NO: 1477192 - DNA, 15 bp, Homo sapiens
ctcttcctcggctgc

SEQ ID NO: 1477193 - DNA, 15 bp, Homo sapiens
cctcttcctcggctg

SEQ ID NO: 1477194 - DNA, 15 bp, Homo sapiens
tcctcttcctcggct

SEQ ID NO: 1477195 - DNA, 15 bp, Homo sapiens
ctcctcttcctcggc

SEQ ID NO: 1477196 - DNA, 15 bp, Homo sapiens
cctcctcttcctcgg

SEQ ID NO: 1477197 - DNA, 15 bp, Homo sapiens
gcctcctcttcctcg

SEQ ID NO: 1477198 - DNA, 15 bp, Homo sapiens
agcctcctcttcctc

SEQ ID NO: 1477199 - DNA, 15 bp, Homo sapiens
aagcctcctcttcct

SEQ ID NO: 1477200 - DNA, 15 bp, Homo sapiens
caagcctcctcttcc

SEQ ID NO: 1477201 - DNA, 15 bp, Homo sapiens
tcaagcctcctcttc

SEQ ID NO: 1477202 - DNA, 15 bp, Homo sapiens
ctcaagcctcctctt

SEQ ID NO: 1477203 - DNA, 15 bp, Homo sapiens
cctcaagcctcctct

SEQ ID NO: 1477204 - DNA, 15 bp, Homo sapiens
gcctcaagcctcctc

SEQ ID NO: 1477205 - DNA, 15 bp, Homo sapiens
ggcctcaagcctcct

SEQ ID NO: 1477206 - DNA, 15 bp, Homo sapiens
gggcctcaagcctcc

SEQ ID NO: 1477207 - DNA, 15 bp, Homo sapiens
tgggcctcaagcctc

SEQ ID NO: 1477208 - DNA, 15 bp, Homo sapiens
ctgggcctcaagcct

SEQ ID NO: 1477209 - DNA, 15 bp, Homo sapiens
cctgggcctcaagcc

SEQ ID NO: 1477210 - DNA, 15 bp, Homo sapiens
ccctgggcctcaagc

SEQ ID NO: 1477211 - DNA, 15 bp, Homo sapiens
accctgggcctcaag

SEQ ID NO: 1477212 - DNA, 15 bp, Homo sapiens
caccctgggcctcaa

SEQ ID NO: 1477213 - DNA, 15 bp, Homo sapiens
ccaccctgggcctca

SEQ ID NO: 1477214 - DNA, 15 bp, Homo sapiens
cccaccctgggcctc

SEQ ID NO: 1477215 - DNA, 15 bp, Homo sapiens
gcccaccctgggcct

SEQ ID NO: 1477216 - DNA, 15 bp, Homo sapiens
tgcccaccctgggcc

SEQ ID NO: 1477217 - DNA, 15 bp, Homo sapiens
gtgcccaccctgggc

SEQ ID NO: 1477218 - DNA, 15 bp, Homo sapiens
ggtgcccaccctggg

SEQ ID NO: 1477219 - DNA, 15 bp, Homo sapiens
tggtgcccaccctgg

SEQ ID NO: 1477220 - DNA, 15 bp, Homo sapiens
ctggtgcccaccctg

SEQ ID NO: 1477221 - DNA, 15 bp, Homo sapiens
gctggtgcccaccct

SEQ ID NO: 1477222 - DNA, 15 bp, Homo sapiens
ggctggtgcccaccc

SEQ ID NO: 1477223 - DNA, 15 bp, Homo sapiens
tggctggtgcccacc

SEQ ID NO: 1477224 - DNA, 15 bp, Homo sapiens
ctggctggtgcccac

SEQ ID NO: 1477225 - DNA, 15 bp, Homo sapiens
gctggctggtgccca

SEQ ID NO: 1477226 - DNA, 15 bp, Homo sapiens
ggctggctggtgccc

SEQ ID NO: 1477227 - DNA, 15 bp, Homo sapiens
tggctggctggtgcc

SEQ ID NO: 1477228 - DNA, 15 bp, Homo sapiens
atggctggctggtgc

SEQ ID NO: 1477229 - DNA, 15 bp, Homo sapiens
catggctggctggtg

SEQ ID NO: 1477230 - DNA, 15 bp, Homo sapiens
ccatggctggctggt

SEQ ID NO: 1477231 - DNA, 15 bp, Homo sapiens
gccatggctggctgg

SEQ ID NO: 1477232 - DNA, 15 bp, Homo sapiens
ggccatggctggctg

SEQ ID NO: 1477233 - DNA, 15 bp, Homo sapiens
tggccatggctggct

SEQ ID NO: 1477234 - DNA, 15 bp, Homo sapiens
gtggccatggctggc

SEQ ID NO: 1477235 - DNA, 15 bp, Homo sapiens
tgtggccatggctgg

SEQ ID NO: 1477236 - DNA, 15 bp, Homo sapiens
ctgtggccatggctg

SEQ ID NO: 1477237 - DNA, 15 bp, Homo sapiens
gctgtggccatggct

SEQ ID NO: 1477238 - DNA, 15 bp, Homo sapiens
ggctgtggccatggc

SEQ ID NO: 1477239 - DNA, 15 bp, Homo sapiens
cggctgtggccatgg

SEQ ID NO: 1477240 - DNA, 15 bp, Homo sapiens
tcggctgtggccatg

SEQ ID NO: 1477241 - DNA, 15 bp, Homo sapiens
ctcggctgtggccat

SEQ ID NO: 1477242 - DNA, 15 bp, Homo sapiens
tctcggctgtggcca

SEQ ID NO: 1477243 - DNA, 15 bp, Homo sapiens
gtctcggctgtggcc

SEQ ID NO: 1477244 - DNA, 15 bp, Homo sapiens
ggtctcggctgtggc

SEQ ID NO: 1477245 - DNA, 15 bp, Homo sapiens
cggtctcggctgtgg

SEQ ID NO: 1477246 - DNA, 15 bp, Homo sapiens
gcggtctcggctgtg

SEQ ID NO: 1477247 - DNA, 15 bp, Homo sapiens
ggcggtctcggctgt

SEQ ID NO: 1477248 - DNA, 15 bp, Homo sapiens
aggcggtctcggctg

SEQ ID NO: 1477249 - DNA, 15 bp, Homo sapiens
aaggcggtctcggct

SEQ ID NO: 1477250 - DNA, 15 bp, Homo sapiens
caaggcggtctcggc

SEQ ID NO: 1477251 - DNA, 15 bp, Homo sapiens
gcaaggcggtctcgg

SEQ ID NO: 1477252 - DNA, 15 bp, Homo sapiens
ggcaaggcggtctcg

SEQ ID NO: 1477253 - DNA, 15 bp, Homo sapiens
gggcaaggcggtctc

SEQ ID NO: 1477254 - DNA, 15 bp, Homo sapiens
agggcaaggcggtct

SEQ ID NO: 1477255 - DNA, 15 bp, Homo sapiens
gagggcaaggcggtc

SEQ ID NO: 1477256 - DNA, 15 bp, Homo sapiens
ggagggcaaggcggt

SEQ ID NO: 1477257 - DNA, 15 bp, Homo sapiens
tggagggcaaggcgg

SEQ ID NO: 1477258 - DNA, 15 bp, Homo sapiens
atggagggcaaggcg

SEQ ID NO: 1477259 - DNA, 15 bp, Homo sapiens
gatggagggcaaggc

SEQ ID NO: 1477260 - DNA, 15 bp, Homo sapiens
tgatggagggcaagg

SEQ ID NO: 1477261 - DNA, 15 bp, Homo sapiens
ctgatggagggcaag

SEQ ID NO: 1477262 - DNA, 15 bp, Homo sapiens
gctgatggagggcaa

SEQ ID NO: 1477263 - DNA, 15 bp, Homo sapiens
tgctgatggagggca

SEQ ID NO: 1477264 - DNA, 15 bp, Homo sapiens
gtgctgatggagggc

SEQ ID NO: 1477265 - DNA, 15 bp, Homo sapiens
tgtgctgatggaggg

SEQ ID NO: 1477266 - DNA, 15 bp, Homo sapiens
gtgtgctgatggagg

SEQ ID NO: 1477267 - DNA, 15 bp, Homo sapiens
agtgtgctgatggag

SEQ ID NO: 1477268 - DNA, 15 bp, Homo sapiens
cagtgtgctgatgga

SEQ ID NO: 1477269 - DNA, 15 bp, Homo sapiens
tcagtgtgctgatgg

SEQ ID NO: 1477270 - DNA, 15 bp, Homo sapiens
gtcagtgtgctgatg

SEQ ID NO: 1477271 - DNA, 15 bp, Homo sapiens
ggtcagtgtgctgat

SEQ ID NO: 1477272 - DNA, 15 bp, Homo sapiens
cggtcagtgtgctga

SEQ ID NO: 1477273 - DNA, 15 bp, Homo sapiens
gcggtcagtgtgctg

SEQ ID NO: 1477274 - DNA, 15 bp, Homo sapiens
ggcggtcagtgtgct

SEQ ID NO: 1477275 - DNA, 15 bp, Homo sapiens
gggcggtcagtgtgc

SEQ ID NO: 1477276 - DNA, 15 bp, Homo sapiens
agggcggtcagtgtg

SEQ ID NO: 1477277 - DNA, 15 bp, Homo sapiens
cagggcggtcagtgt

SEQ ID NO: 1477278 - DNA, 15 bp, Homo sapiens
ccagggcggtcagtg

SEQ ID NO: 1477279 - DNA, 15 bp, Homo sapiens
cccagggcggtcagt

SEQ ID NO: 1477280 - DNA, 15 bp, Homo sapiens
gcccagggcggtcag

SEQ ID NO: 1477281 - DNA, 15 bp, Homo sapiens
ggcccagggcggtca

SEQ ID NO: 1477282 - DNA, 15 bp, Homo sapiens
gggcccagggcggtc

SEQ ID NO: 1477283 - DNA, 15 bp, Homo sapiens
ggggcccagggcggt

SEQ ID NO: 1477284 - DNA, 15 bp, Homo sapiens
aggggcccagggcgg

SEQ ID NO: 1477285 - DNA, 15 bp, Homo sapiens
aaggggcccagggcg

SEQ ID NO: 1477286 - DNA, 15 bp, Homo sapiens
gaaggggcccagggc

SEQ ID NO: 1477287 - DNA, 15 bp, Homo sapiens
ggaaggggcccaggg

SEQ ID NO: 1477288 - DNA, 15 bp, Homo sapiens
gggaaggggcccagg

SEQ ID NO: 1477289 - DNA, 15 bp, Homo sapiens
cgggaaggggcccag

SEQ ID NO: 1477290 - DNA, 15 bp, Homo sapiens
ccgggaaggggccca

SEQ ID NO: 1477291 - DNA, 15 bp, Homo sapiens
tccgggaaggggccc

SEQ ID NO: 1477292 - DNA, 15 bp, Homo sapiens
gtccgggaaggggcc

SEQ ID NO: 1477293 - DNA, 15 bp, Homo sapiens
tgtccgggaaggggc

SEQ ID NO: 1477294 - DNA, 15 bp, Homo sapiens
gtgtccgggaagggg

SEQ ID NO: 1477295 - DNA, 15 bp, Homo sapiens
tgtgtccgggaaggg

SEQ ID NO: 1477296 - DNA, 15 bp, Homo sapiens
gtgtgtccgggaagg

SEQ ID NO: 1477297 - DNA, 15 bp, Homo sapiens
tgtgtgtccgggaag

SEQ ID NO: 1477298 - DNA, 15 bp, Homo sapiens
ctgtgtgtccgggaa

SEQ ID NO: 1477299 - DNA, 15 bp, Homo sapiens
cctgtgtgtccggga

SEQ ID NO: 1477300 - DNA, 15 bp, Homo sapiens
tcctgtgtgtccggg

SEQ ID NO: 1477301 - DNA, 15 bp, Homo sapiens
atcctgtgtgtccgg

SEQ ID NO: 1477302 - DNA, 15 bp, Homo sapiens
catcctgtgtgtccg

SEQ ID NO: 1477303 - DNA, 15 bp, Homo sapiens
tcatcctgtgtgtcc

SEQ ID NO: 1477304 - DNA, 15 bp, Homo sapiens
gtcatcctgtgtgtc

SEQ ID NO: 1477305 - DNA, 15 bp, Homo sapiens
agtcatcctgtgtgt

SEQ ID NO: 1477306 - DNA, 15 bp, Homo sapiens
aagtcatcctgtgtg

SEQ ID NO: 1477307 - DNA, 15 bp, Homo sapiens
gaagtcatcctgtgt

SEQ ID NO: 1477308 - DNA, 15 bp, Homo sapiens
ggaagtcatcctgtg

SEQ ID NO: 1477309 - DNA, 15 bp, Homo sapiens
aggaagtcatcctgt

SEQ ID NO: 1477310 - DNA, 15 bp, Homo sapiens
gaggaagtcatcctg

SEQ ID NO: 1477311 - DNA, 15 bp, Homo sapiens
tgaggaagtcatcct

SEQ ID NO: 1477312 - DNA, 15 bp, Homo sapiens
ttgaggaagtcatcc

SEQ ID NO: 1477313 - DNA, 15 bp, Homo sapiens
cttgaggaagtcatc

SEQ ID NO: 1477314 - DNA, 15 bp, Homo sapiens
ccttgaggaagtcat

SEQ ID NO: 1477315 - DNA, 15 bp, Homo sapiens
accttgaggaagtca

SEQ ID NO: 1477316 - DNA, 15 bp, Homo sapiens
caccttgaggaagtc

SEQ ID NO: 1477317 - DNA, 15 bp, Homo sapiens
ccaccttgaggaagt

SEQ ID NO: 1477318 - DNA, 15 bp, Homo sapiens
cccaccttgaggaag

SEQ ID NO: 1477319 - DNA, 15 bp, Homo sapiens
ccccaccttgaggaa

SEQ ID NO: 1477320 - DNA, 15 bp, Homo sapiens
gccccaccttgagga

SEQ ID NO: 1477321 - DNA, 15 bp, Homo sapiens
ggccccaccttgagg

SEQ ID NO: 1477322 - DNA, 15 bp, Homo sapiens
aggccccaccttgag

SEQ ID NO: 1477323 - DNA, 15 bp, Homo sapiens
taggccccaccttga

SEQ ID NO: 1477324 - DNA, 15 bp, Homo sapiens
ctaggccccaccttg

SEQ ID NO: 1477325 - DNA, 15 bp, Homo sapiens
tctaggccccacctt

SEQ ID NO: 1477326 - DNA, 15 bp, Homo sapiens
ttctaggccccacct

SEQ ID NO: 1477327 - DNA, 15 bp, Homo sapiens
cttctaggccccacc

SEQ ID NO: 1477328 - DNA, 15 bp, Homo sapiens
ccttctaggccccac

SEQ ID NO: 1477329 - DNA, 15 bp, Homo sapiens
accttctaggcccca

SEQ ID NO: 1477330 - DNA, 15 bp, Homo sapiens
caccttctaggcccc

SEQ ID NO: 1477331 - DNA, 15 bp, Homo sapiens
ccaccttctaggccc

SEQ ID NO: 1477332 - DNA, 15 bp, Homo sapiens
cccaccttctaggcc

SEQ ID NO: 1477333 - DNA, 15 bp, Homo sapiens
ccccaccttctaggc

SEQ ID NO: 1477334 - DNA, 15 bp, Homo sapiens
accccaccttctagg

SEQ ID NO: 1477335 - DNA, 15 bp, Homo sapiens
gaccccaccttctag

SEQ ID NO: 1477336 - DNA, 15 bp, Homo sapiens
agaccccaccttcta

SEQ ID NO: 1477337 - DNA, 15 bp, Homo sapiens
tagaccccaccttct

SEQ ID NO: 1477338 - DNA, 15 bp, Homo sapiens
ctagaccccaccttc

SEQ ID NO: 1477339 - DNA, 15 bp, Homo sapiens
cctagaccccacctt

SEQ ID NO: 1477340 - DNA, 15 bp, Homo sapiens
acctagaccccacct

SEQ ID NO: 1477341 - DNA, 15 bp, Homo sapiens
cacctagaccccacc

SEQ ID NO: 1477342 - DNA, 15 bp, Homo sapiens
ccacctagaccccac

SEQ ID NO: 1477343 - DNA, 15 bp, Homo sapiens
cccacctagacccca

SEQ ID NO: 1477344 - DNA, 15 bp, Homo sapiens
gcccacctagacccc

SEQ ID NO: 1477345 - DNA, 15 bp, Homo sapiens
agcccacctagaccc

SEQ ID NO: 1477346 - DNA, 15 bp, Homo sapiens
cagcccacctagacc

SEQ ID NO: 1477347 - DNA, 15 bp, Homo sapiens
ccagcccacctagac

SEQ ID NO: 1477348 - DNA, 15 bp, Homo sapiens
gccagcccacctaga

SEQ ID NO: 1477349 - DNA, 15 bp, Homo sapiens
agccagcccacctag

SEQ ID NO: 1477350 - DNA, 15 bp, Homo sapiens
cagccagcccaccta

SEQ ID NO: 1477351 - DNA, 15 bp, Homo sapiens
ccagccagcccacct

SEQ ID NO: 1477352 - DNA, 15 bp, Homo sapiens
tccagccagcccacc

SEQ ID NO: 1477353 - DNA, 15 bp, Homo sapiens
ttccagccagcccac

SEQ ID NO: 1477354 - DNA, 15 bp, Homo sapiens
attccagccagccca

SEQ ID NO: 1477355 - DNA, 15 bp, Homo sapiens
gattccagccagccc

SEQ ID NO: 1477356 - DNA, 15 bp, Homo sapiens
ggattccagccagcc

SEQ ID NO: 1477357 - DNA, 15 bp, Homo sapiens
tggattccagccagc

SEQ ID NO: 1477358 - DNA, 15 bp, Homo sapiens
ctggattccagccag

SEQ ID NO: 1477359 - DNA, 15 bp, Homo sapiens
cctggattccagcca

SEQ ID NO: 1477360 - DNA, 15 bp, Homo sapiens
ccctggattccagcc

SEQ ID NO: 1477361 - DNA, 15 bp, Homo sapiens
gccctggattccagc

SEQ ID NO: 1477362 - DNA, 15 bp, Homo sapiens
ggccctggattccag

SEQ ID NO: 1477363 - DNA, 15 bp, Homo sapiens
tggccctggattcca

SEQ ID NO: 1477364 - DNA, 15 bp, Homo sapiens
gtggccctggattcc

SEQ ID NO: 1477365 - DNA, 15 bp, Homo sapiens
tgtggccctggattc

SEQ ID NO: 1477366 - DNA, 15 bp, Homo sapiens
ctgtggccctggatt

SEQ ID NO: 1477367 - DNA, 15 bp, Homo sapiens
actgtggccctggat

SEQ ID NO: 1477368 - DNA, 15 bp, Homo sapiens
gactgtggccctgga

SEQ ID NO: 1477369 - DNA, 15 bp, Homo sapiens
tgactgtggccctgg

SEQ ID NO: 1477370 - DNA, 15 bp, Homo sapiens
gtgactgtggccctg

SEQ ID NO: 1477371 - DNA, 15 bp, Homo sapiens
tgtgactgtggccct

SEQ ID NO: 1477372 - DNA, 15 bp, Homo sapiens
ctgtgactgtggccc

SEQ ID NO: 1477373 - DNA, 15 bp, Homo sapiens
tctgtgactgtggcc

SEQ ID NO: 1477374 - DNA, 15 bp, Homo sapiens
atctgtgactgtggc

SEQ ID NO: 1477375 - DNA, 15 bp, Homo sapiens
gatctgtgactgtgg

SEQ ID NO: 1477376 - DNA, 15 bp, Homo sapiens
agatctgtgactgtg

SEQ ID NO: 1477377 - DNA, 15 bp, Homo sapiens
aagatctgtgactgt

SEQ ID NO: 1477378 - DNA, 15 bp, Homo sapiens
caagatctgtgactg

SEQ ID NO: 1477379 - DNA, 15 bp, Homo sapiens
ccaagatctgtgact

SEQ ID NO: 1477380 - DNA, 15 bp, Homo sapiens
cccaagatctgtgac

SEQ ID NO: 1477381 - DNA, 15 bp, Homo sapiens
ccccaagatctgtga

SEQ ID NO: 1477382 - DNA, 15 bp, Homo sapiens
accccaagatctgtg

SEQ ID NO: 1477383 - DNA, 15 bp, Homo sapiens
gaccccaagatctgt

SEQ ID NO: 1477384 - DNA, 15 bp, Homo sapiens
ggaccccaagatctg

SEQ ID NO: 1477385 - DNA, 15 bp, Homo sapiens
tggaccccaagatct

SEQ ID NO: 1477386 - DNA, 15 bp, Homo sapiens
ctggaccccaagatc

SEQ ID NO: 1477387 - DNA, 15 bp, Homo sapiens
tctggaccccaagat

SEQ ID NO: 1477388 - DNA, 15 bp, Homo sapiens
gtctggaccccaaga

SEQ ID NO: 1477389 - DNA, 15 bp, Homo sapiens
ggtctggaccccaag

SEQ ID NO: 1477390 - DNA, 15 bp, Homo sapiens
aggtctggaccccaa

SEQ ID NO: 1477391 - DNA, 15 bp, Homo sapiens
caggtctggacccca

SEQ ID NO: 1477392 - DNA, 15 bp, Homo sapiens
gcaggtctggacccc

SEQ ID NO: 1477393 - DNA, 15 bp, Homo sapiens
tgcaggtctggaccc

SEQ ID NO: 1477394 - DNA, 15 bp, Homo sapiens
atgcaggtctggacc

SEQ ID NO: 1477395 - DNA, 15 bp, Homo sapiens
gatgcaggtctggac

SEQ ID NO: 1477396 - DNA, 15 bp, Homo sapiens
agatgcaggtctgga

SEQ ID NO: 1477397 - DNA, 15 bp, Homo sapiens
aagatgcaggtctgg

SEQ ID NO: 1477398 - DNA, 15 bp, Homo sapiens
caagatgcaggtctg

SEQ ID NO: 1477399 - DNA, 15 bp, Homo sapiens
tcaagatgcaggtct

SEQ ID NO: 1477400 - DNA, 15 bp, Homo sapiens
gtcaagatgcaggtc

SEQ ID NO: 1477401 - DNA, 15 bp, Homo sapiens
ggtcaagatgcaggt

SEQ ID NO: 1477402 - DNA, 15 bp, Homo sapiens
aggtcaagatgcagg

SEQ ID NO: 1477403 - DNA, 15 bp, Homo sapiens
caggtcaagatgcag

SEQ ID NO: 1477404 - DNA, 15 bp, Homo sapiens
tcaggtcaagatgca

SEQ ID NO: 1477405 - DNA, 15 bp, Homo sapiens
ttcaggtcaagatgc

SEQ ID NO: 1477406 - DNA, 15 bp, Homo sapiens
tttcaggtcaagatg

SEQ ID NO: 1477407 - DNA, 15 bp, Homo sapiens
atttcaggtcaagat

SEQ ID NO: 1477408 - DNA, 15 bp, Homo sapiens
gatttcaggtcaaga

SEQ ID NO: 1477409 - DNA, 15 bp, Homo sapiens
tgatttcaggtcaag

SEQ ID NO: 1477410 - DNA, 15 bp, Homo sapiens
ttgatttcaggtcaa

SEQ ID NO: 1477411 - DNA, 15 bp, Homo sapiens
cttgatttcaggtca

SEQ ID NO: 1477412 - DNA, 15 bp, Homo sapiens
tcttgatttcaggtc

SEQ ID NO: 1477413 - DNA, 15 bp, Homo sapiens
ctcttgatttcaggt

SEQ ID NO: 1477414 - DNA, 15 bp, Homo sapiens
tctcttgatttcagg

SEQ ID NO: 1477415 - DNA, 15 bp, Homo sapiens
gtctcttgatttcag

SEQ ID NO: 1477416 - DNA, 15 bp, Homo sapiens
agtctcttgatttca

SEQ ID NO: 1477417 - DNA, 15 bp, Homo sapiens
aagtctcttgatttc

SEQ ID NO: 1477418 - DNA, 15 bp, Homo sapiens
taagtctcttgattt

SEQ ID NO: 1477419 - DNA, 15 bp, Homo sapiens
ttaagtctcttgatt

SEQ ID NO: 1477420 - DNA, 15 bp, Homo sapiens
gttaagtctcttgat

SEQ ID NO: 1477421 - DNA, 15 bp, Homo sapiens
ggttaagtctcttga

SEQ ID NO: 1477422 - DNA, 15 bp, Homo sapiens
tggttaagtctcttg

SEQ ID NO: 1477423 - DNA, 15 bp, Homo sapiens
ctggttaagtctctt

SEQ ID NO: 1477424 - DNA, 15 bp, Homo sapiens
cctggttaagtctct

SEQ ID NO: 1477425 - DNA, 15 bp, Homo sapiens
tcctggttaagtctc

SEQ ID NO: 1477426 - DNA, 15 bp, Homo sapiens
gtcctggttaagtct

SEQ ID NO: 1477427 - DNA, 15 bp, Homo sapiens
agtcctggttaagtc

SEQ ID NO: 1477428 - DNA, 15 bp, Homo sapiens
cagtcctggttaagt

SEQ ID NO: 1477429 - DNA, 15 bp, Homo sapiens
tcagtcctggttaag

SEQ ID NO: 1477430 - DNA, 15 bp, Homo sapiens
ctcagtcctggttaa

SEQ ID NO: 1477431 - DNA, 15 bp, Homo sapiens
cctcagtcctggtta

SEQ ID NO: 1477432 - DNA, 15 bp, Homo sapiens
acctcagtcctggtt

SEQ ID NO: 1477433 - DNA, 15 bp, Homo sapiens
tacctcagtcctggt

SEQ ID NO: 1477434 - DNA, 15 bp, Homo sapiens
gtacctcagtcctgg

SEQ ID NO: 1477435 - DNA, 15 bp, Homo sapiens
cgtacctcagtcctg

SEQ ID NO: 1477436 - DNA, 15 bp, Homo sapiens
gcgtacctcagtcct

SEQ ID NO: 1477437 - DNA, 15 bp, Homo sapiens
agcgtacctcagtcc

SEQ ID NO: 1477438 - DNA, 15 bp, Homo sapiens
gagcgtacctcagtc

SEQ ID NO: 1477439 - DNA, 15 bp, Homo sapiens
tgagcgtacctcagt

SEQ ID NO: 1477440 - DNA, 15 bp, Homo sapiens
ctgagcgtacctcag

SEQ ID NO: 1477441 - DNA, 15 bp, Homo sapiens
actgagcgtacctca

SEQ ID NO: 1477442 - DNA, 15 bp, Homo sapiens
gactgagcgtacctc

SEQ ID NO: 1477443 - DNA, 15 bp, Homo sapiens
ggactgagcgtacct

SEQ ID NO: 1477444 - DNA, 15 bp, Homo sapiens
tggactgagcgtacc

SEQ ID NO: 1477445 - DNA, 15 bp, Homo sapiens
ctggactgagcgtac

SEQ ID NO: 1477446 - DNA, 15 bp, Homo sapiens
cctggactgagcgta

SEQ ID NO: 1477447 - DNA, 15 bp, Homo sapiens
tcctggactgagcgt

SEQ ID NO: 1477448 - DNA, 15 bp, Homo sapiens
ctcctggactgagcg

SEQ ID NO: 1477449 - DNA, 15 bp, Homo sapiens
tctcctggactgagc

SEQ ID NO: 1477450 - DNA, 15 bp, Homo sapiens
ctctcctggactgag

SEQ ID NO: 1477451 - DNA, 15 bp, Homo sapiens
cctctcctggactga

SEQ ID NO: 1477452 - DNA, 15 bp, Homo sapiens
tcctctcctggactg

SEQ ID NO: 1477453 - DNA, 15 bp, Homo sapiens
ctcctctcctggact

SEQ ID NO: 1477454 - DNA, 15 bp, Homo sapiens
tctcctctcctggac

SEQ ID NO: 1477455 - DNA, 15 bp, Homo sapiens
atctcctctcctgga

SEQ ID NO: 1477456 - DNA, 15 bp, Homo sapiens
gatctcctctcctgg

SEQ ID NO: 1477457 - DNA, 15 bp, Homo sapiens
agatctcctctcctg

SEQ ID NO: 1477458 - DNA, 15 bp, Homo sapiens
gagatctcctctcct

SEQ ID NO: 1477459 - DNA, 15 bp, Homo sapiens
tgagatctcctctcc

SEQ ID NO: 1477460 - DNA, 15 bp, Homo sapiens
ctgagatctcctctc

SEQ ID NO: 1477461 - DNA, 15 bp, Homo sapiens
gctgagatctcctct

SEQ ID NO: 1477462 - DNA, 15 bp, Homo sapiens
agctgagatctcctc

SEQ ID NO: 1477463 - DNA, 15 bp, Homo sapiens
aagctgagatctcct

SEQ ID NO: 1477464 - DNA, 15 bp, Homo sapiens
taagctgagatctcc

SEQ ID NO: 1477465 - DNA, 15 bp, Homo sapiens
ctaagctgagatctc

SEQ ID NO: 1477466 - DNA, 15 bp, Homo sapiens
actaagctgagatct

SEQ ID NO: 1477467 - DNA, 15 bp, Homo sapiens
gactaagctgagatc

SEQ ID NO: 1477468 - DNA, 15 bp, Homo sapiens
agactaagctgagat

SEQ ID NO: 1477469 - DNA, 15 bp, Homo sapiens
cagactaagctgaga

SEQ ID NO: 1477470 - DNA, 15 bp, Homo sapiens
ccagactaagctgag

SEQ ID NO: 1477471 - DNA, 15 bp, Homo sapiens
gccagactaagctga

SEQ ID NO: 1477472 - DNA, 15 bp, Homo sapiens
tgccagactaagctg

SEQ ID NO: 1477473 - DNA, 15 bp, Homo sapiens
ctgccagactaagct

SEQ ID NO: 1477474 - DNA, 15 bp, Homo sapiens
cctgccagactaagc

SEQ ID NO: 1477475 - DNA, 15 bp, Homo sapiens
ccctgccagactaag

SEQ ID NO: 1477476 - DNA, 15 bp, Homo sapiens
cccctgccagactaa

SEQ ID NO: 1477477 - DNA, 15 bp, Homo sapiens
ccccctgccagacta

SEQ ID NO: 1477478 - DNA, 15 bp, Homo sapiens
accccctgccagact

SEQ ID NO: 1477479 - DNA, 15 bp, Homo sapiens
caccccctgccagac

SEQ ID NO: 1477480 - DNA, 15 bp, Homo sapiens
tcaccccctgccaga

SEQ ID NO: 1477481 - DNA, 15 bp, Homo sapiens
ctcaccccctgccag

SEQ ID NO: 1477482 - DNA, 15 bp, Homo sapiens
cctcaccccctgcca

SEQ ID NO: 1477483 - DNA, 15 bp, Homo sapiens
tcctcaccccctgcc

SEQ ID NO: 1477484 - DNA, 15 bp, Homo sapiens
ctcctcaccccctgc

SEQ ID NO: 1477485 - DNA, 15 bp, Homo sapiens
cctcctcaccccctg

SEQ ID NO: 1477486 - DNA, 15 bp, Homo sapiens
ccctcctcaccccct

SEQ ID NO: 1477487 - DNA, 15 bp, Homo sapiens
accctcctcaccccc

SEQ ID NO: 1477488 - DNA, 15 bp, Homo sapiens
caccctcctcacccc

SEQ ID NO: 1477489 - DNA, 15 bp, Homo sapiens
ccaccctcctcaccc

SEQ ID NO: 1477490 - DNA, 15 bp, Homo sapiens
accaccctcctcacc

SEQ ID NO: 1477491 - DNA, 15 bp, Homo sapiens
gaccaccctcctcac

SEQ ID NO: 1477492 - DNA, 15 bp, Homo sapiens
agaccaccctcctca

SEQ ID NO: 1477493 - DNA, 15 bp, Homo sapiens
tagaccaccctcctc

SEQ ID NO: 1477494 - DNA, 15 bp, Homo sapiens
ctagaccaccctcct

SEQ ID NO: 1477495 - DNA, 15 bp, Homo sapiens
cctagaccaccctcc

SEQ ID NO: 1477496 - DNA, 15 bp, Homo sapiens
ccctagaccaccctc

SEQ ID NO: 1477497 - DNA, 15 bp, Homo sapiens
cccctagaccaccct

SEQ ID NO: 1477498 - DNA, 15 bp, Homo sapiens
acccctagaccaccc

SEQ ID NO: 1477499 - DNA, 15 bp, Homo sapiens
aacccctagaccacc

SEQ ID NO: 1477500 - DNA, 15 bp, Homo sapiens
aaacccctagaccac

SEQ ID NO: 1477501 - DNA, 15 bp, Homo sapiens
caaacccctagacca

SEQ ID NO: 1477502 - DNA, 15 bp, Homo sapiens
tcaaacccctagacc

SEQ ID NO: 1477503 - DNA, 15 bp, Homo sapiens
ctcaaacccctagac

SEQ ID NO: 1477504 - DNA, 15 bp, Homo sapiens
cctcaaacccctaga

SEQ ID NO: 1477505 - DNA, 15 bp, Homo sapiens
acctcaaacccctag

SEQ ID NO: 1477506 - DNA, 15 bp, Homo sapiens
aacctcaaaccccta

SEQ ID NO: 1477507 - DNA, 15 bp, Homo sapiens
gaacctcaaacccct

SEQ ID NO: 1477508 - DNA, 15 bp, Homo sapiens
agaacctcaaacccc

SEQ ID NO: 1477509 - DNA, 15 bp, Homo sapiens
tagaacctcaaaccc

SEQ ID NO: 1477510 - DNA, 15 bp, Homo sapiens
ttagaacctcaaacc

SEQ ID NO: 1477511 - DNA, 15 bp, Homo sapiens
cttagaacctcaaac

SEQ ID NO: 1477512 - DNA, 15 bp, Homo sapiens
acttagaacctcaaa

SEQ ID NO: 1477513 - DNA, 15 bp, Homo sapiens
cacttagaacctcaa

SEQ ID NO: 1477514 - DNA, 15 bp, Homo sapiens
acacttagaacctca

SEQ ID NO: 1477515 - DNA, 15 bp, Homo sapiens
cacacttagaacctc

SEQ ID NO: 1477516 - DNA, 15 bp, Homo sapiens
tcacacttagaacct

SEQ ID NO: 1477517 - DNA, 15 bp, Homo sapiens
atcacacttagaacc

SEQ ID NO: 1477518 - DNA, 15 bp, Homo sapiens
gatcacacttagaac

SEQ ID NO: 1477519 - DNA, 15 bp, Homo sapiens
agatcacacttagaa

SEQ ID NO: 1477520 - DNA, 15 bp, Homo sapiens
tagatcacacttaga

SEQ ID NO: 1477521 - DNA, 15 bp, Homo sapiens
atagatcacacttag

SEQ ID NO: 1477522 - DNA, 15 bp, Homo sapiens
aatagatcacactta

SEQ ID NO: 1477523 - DNA, 15 bp, Homo sapiens
aaatagatcacactt

SEQ ID NO: 1477524 - DNA, 15 bp, Homo sapiens
gaaatagatcacact

SEQ ID NO: 1477525 - DNA, 15 bp, Homo sapiens
cgaaatagatcacac

SEQ ID NO: 1477526 - DNA, 15 bp, Homo sapiens
ccgaaatagatcaca

SEQ ID NO: 1477527 - DNA, 15 bp, Homo sapiens
accgaaatagatcac

SEQ ID NO: 1477528 - DNA, 15 bp, Homo sapiens
taccgaaatagatca

SEQ ID NO: 1477529 - DNA, 15 bp, Homo sapiens
ttaccgaaatagatc

SEQ ID NO: 1477530 - DNA, 15 bp, Homo sapiens
attaccgaaatagat

SEQ ID NO: 1477531 - DNA, 15 bp, Homo sapiens
tattaccgaaataga

SEQ ID NO: 1477532 - DNA, 15 bp, Homo sapiens
ctattaccgaaatag

SEQ ID NO: 1477533 - DNA, 15 bp, Homo sapiens
tctattaccgaaata

SEQ ID NO: 1477534 - DNA, 15 bp, Homo sapiens
ttctattaccgaaat

SEQ ID NO: 1477535 - DNA, 15 bp, Homo sapiens
tttctattaccgaaa

SEQ ID NO: 1477536 - DNA, 15 bp, Homo sapiens
ttttctattaccgaa

SEQ ID NO: 1477537 - DNA, 15 bp, Homo sapiens
gttttctattaccga

SEQ ID NO: 1477538 - DNA, 15 bp, Homo sapiens
cgttttctattaccg

SEQ ID NO: 1477539 - DNA, 15 bp, Homo sapiens
tcgttttctattacc

SEQ ID NO: 1477540 - DNA, 15 bp, Homo sapiens
ttcgttttctattac

SEQ ID NO: 1477541 - DNA, 15 bp, Homo sapiens
cttcgttttctatta

SEQ ID NO: 1477542 - DNA, 15 bp, Homo sapiens
ccttcgttttctatt

SEQ ID NO: 1477543 - DNA, 15 bp, Homo sapiens
accttcgttttctat

SEQ ID NO: 1477544 - DNA, 15 bp, Homo sapiens
taccttcgttttcta

SEQ ID NO: 1477545 - DNA, 15 bp, Homo sapiens
ctaccttcgttttct

SEQ ID NO: 1477546 - DNA, 15 bp, Homo sapiens
gctaccttcgttttc

SEQ ID NO: 1477547 - DNA, 15 bp, Homo sapiens
ggctaccttcgtttt

SEQ ID NO: 1477548 - DNA, 15 bp, Homo sapiens
aggctaccttcgttt

SEQ ID NO: 1477549 - DNA, 15 bp, Homo sapiens
caggctaccttcgtt

SEQ ID NO: 1477550 - DNA, 15 bp, Homo sapiens
ccaggctaccttcgt

SEQ ID NO: 1477551 - DNA, 15 bp, Homo sapiens
cccaggctaccttcg

SEQ ID NO: 1477552 - DNA, 15 bp, Homo sapiens
gcccaggctaccttc

SEQ ID NO: 1477553 - DNA, 15 bp, Homo sapiens
tgcccaggctacctt

SEQ ID NO: 1477554 - DNA, 15 bp, Homo sapiens
ttgcccaggctacct

SEQ ID NO: 1477555 - DNA, 15 bp, Homo sapiens
gttgcccaggctacc

SEQ ID NO: 1477556 - DNA, 15 bp, Homo sapiens
tgttgcccaggctac

SEQ ID NO: 1477557 - DNA, 15 bp, Homo sapiens
atgttgcccaggcta

SEQ ID NO: 1477558 - DNA, 15 bp, Homo sapiens
tagggtttcaccatg

SEQ ID NO: 1477559 - DNA, 15 bp, Homo sapiens
atagggtttcaccat

SEQ ID NO: 1477560 - DNA, 15 bp, Homo sapiens
gatagggtttcacca

SEQ ID NO: 1477561 - DNA, 15 bp, Homo sapiens
agatagggtttcacc

SEQ ID NO: 1477562 - DNA, 15 bp, Homo sapiens
gagatagggtttcac

SEQ ID NO: 1477563 - DNA, 15 bp, Homo sapiens
agagatagggtttca

SEQ ID NO: 1477564 - DNA, 15 bp, Homo sapiens
tagagatagggtttc

SEQ ID NO: 1477565 - DNA, 15 bp, Homo sapiens
gtagagatagggttt

SEQ ID NO: 1477566 - DNA, 15 bp, Homo sapiens
tgtagagatagggtt

SEQ ID NO: 1477567 - DNA, 15 bp, Homo sapiens
ttgtagagatagggt

SEQ ID NO: 1477568 - DNA, 15 bp, Homo sapiens
tttgtagagataggg

SEQ ID NO: 1477569 - DNA, 15 bp, Homo sapiens
gtattttttgtagag

SEQ ID NO: 1477570 - DNA, 15 bp, Homo sapiens
ggtattttttgtaga

SEQ ID NO: 1477571 - DNA, 15 bp, Homo sapiens
tggtattttttgtag

SEQ ID NO: 1477572 - DNA, 15 bp, Homo sapiens
ttggtattttttgta

SEQ ID NO: 1477573 - DNA, 15 bp, Homo sapiens
tttggtattttttgt

SEQ ID NO: 1477574 - DNA, 15 bp, Homo sapiens
ttttggtattttttg

SEQ ID NO: 1477575 - DNA, 15 bp, Homo sapiens
tttttggtatttttt

SEQ ID NO: 1477576 - DNA, 15 bp, Homo sapiens
gtttttggtattttt

SEQ ID NO: 1477577 - DNA, 15 bp, Homo sapiens
tgtttttggtatttt

SEQ ID NO: 1477578 - DNA, 15 bp, Homo sapiens
atgtttttggtattt

SEQ ID NO: 1477579 - DNA, 15 bp, Homo sapiens
aatgtttttggtatt

SEQ ID NO: 1477580 - DNA, 15 bp, Homo sapiens
taatgtttttggtat

SEQ ID NO: 1477581 - DNA, 15 bp, Homo sapiens
ctaatgtttttggta

SEQ ID NO: 1477582 - DNA, 15 bp, Homo sapiens
cctaatgtttttggt

SEQ ID NO: 1477583 - DNA, 15 bp, Homo sapiens
gcctaatgtttttgg

SEQ ID NO: 1477584 - DNA, 15 bp, Homo sapiens
ggcctaatgtttttg

SEQ ID NO: 1477585 - DNA, 15 bp, Homo sapiens
tggcctaatgttttt

SEQ ID NO: 1477586 - DNA, 15 bp, Homo sapiens
ctggcctaatgtttt

SEQ ID NO: 1477587 - DNA, 15 bp, Homo sapiens
cctggcctaatgttt

SEQ ID NO: 1477588 - DNA, 15 bp, Homo sapiens
gcctggcctaatgtt

SEQ ID NO: 1477589 - DNA, 15 bp, Homo sapiens
tgcctggcctaatgt

SEQ ID NO: 1477590 - DNA, 15 bp, Homo sapiens
atgcctggcctaatg

SEQ ID NO: 1477591 - DNA, 15 bp, Homo sapiens
catgcctggcctaat

SEQ ID NO: 1477592 - DNA, 15 bp, Homo sapiens
ccatgcctggcctaa

SEQ ID NO: 1477593 - DNA, 15 bp, Homo sapiens
cccatgcctggccta

SEQ ID NO: 1477594 - DNA, 15 bp, Homo sapiens
ccccatgcctggcct

SEQ ID NO: 1477595 - DNA, 15 bp, Homo sapiens
cccccatgcctggcc

SEQ ID NO: 1477596 - DNA, 15 bp, Homo sapiens
gcccccatgcctggc

SEQ ID NO: 1477597 - DNA, 15 bp, Homo sapiens
cgcccccatgcctgg

SEQ ID NO: 1477598 - DNA, 15 bp, Homo sapiens
acgcccccatgcctg

SEQ ID NO: 1477599 - DNA, 15 bp, Homo sapiens
cacgcccccatgcct

SEQ ID NO: 1477600 - DNA, 15 bp, Homo sapiens
acacgcccccatgcc

SEQ ID NO: 1477601 - DNA, 15 bp, Homo sapiens
cacacgcccccatgc

SEQ ID NO: 1477602 - DNA, 15 bp, Homo sapiens
gcacacgcccccatg

SEQ ID NO: 1477603 - DNA, 15 bp, Homo sapiens
ggcacacgcccccat

SEQ ID NO: 1477604 - DNA, 15 bp, Homo sapiens
aggcacacgccccca

SEQ ID NO: 1477605 - DNA, 15 bp, Homo sapiens
caggcacacgccccc

SEQ ID NO: 1477606 - DNA, 15 bp, Homo sapiens
acaggcacacgcccc

SEQ ID NO: 1477607 - DNA, 15 bp, Homo sapiens
tacaggcacacgccc

SEQ ID NO: 1477608 - DNA, 15 bp, Homo sapiens
ctacaggcacacgcc

SEQ ID NO: 1477609 - DNA, 15 bp, Homo sapiens
actacaggcacacgc

SEQ ID NO: 1477610 - DNA, 15 bp, Homo sapiens
gactacaggcacacg

SEQ ID NO: 1477611 - DNA, 15 bp, Homo sapiens
cctgggactacaggc

SEQ ID NO: 1477612 - DNA, 15 bp, Homo sapiens
acctgggactacagg

SEQ ID NO: 1477613 - DNA, 15 bp, Homo sapiens
tacctgggactacag

SEQ ID NO: 1477614 - DNA, 15 bp, Homo sapiens
gtacctgggactaca

SEQ ID NO: 1477615 - DNA, 15 bp, Homo sapiens
agtacctgggactac

SEQ ID NO: 1477616 - DNA, 15 bp, Homo sapiens
gagtacctgggacta

SEQ ID NO: 1477617 - DNA, 15 bp, Homo sapiens
ggagtacctgggact

SEQ ID NO: 1477618 - DNA, 15 bp, Homo sapiens
cggagtacctgggac

SEQ ID NO: 1477619 - DNA, 15 bp, Homo sapiens
acggagtacctggga

SEQ ID NO: 1477620 - DNA, 15 bp, Homo sapiens
tacggagtacctggg

SEQ ID NO: 1477621 - DNA, 15 bp, Homo sapiens
ctacggagtacctgg

SEQ ID NO: 1477622 - DNA, 15 bp, Homo sapiens
cctacggagtacctg

SEQ ID NO: 1477623 - DNA, 15 bp, Homo sapiens
gcctacggagtacct

SEQ ID NO: 1477624 - DNA, 15 bp, Homo sapiens
agcctacggagtacc

SEQ ID NO: 1477625 - DNA, 15 bp, Homo sapiens
cagcctacggagtac

SEQ ID NO: 1477626 - DNA, 15 bp, Homo sapiens
tcagcctacggagta

SEQ ID NO: 1477627 - DNA, 15 bp, Homo sapiens
atcagcctacggagt

SEQ ID NO: 1477628 - DNA, 15 bp, Homo sapiens
catcagcctacggag

SEQ ID NO: 1477629 - DNA, 15 bp, Homo sapiens
gcatcagcctacgga

SEQ ID NO: 1477630 - DNA, 15 bp, Homo sapiens
tgcatcagcctacgg

SEQ ID NO: 1477631 - DNA, 15 bp, Homo sapiens
ctgcatcagcctacg

SEQ ID NO: 1477632 - DNA, 15 bp, Homo sapiens
cctgcatcagcctac

SEQ ID NO: 1477633 - DNA, 15 bp, Homo sapiens
tcctgcatcagccta

SEQ ID NO: 1477634 - DNA, 15 bp, Homo sapiens
atgatcctcctgcat

SEQ ID NO: 1477635 - DNA, 15 bp, Homo sapiens
aatgatcctcctgca

SEQ ID NO: 1477636 - DNA, 15 bp, Homo sapiens
taatgatcctcctgc

SEQ ID NO: 1477637 - DNA, 15 bp, Homo sapiens
ctaatgatcctcctg

SEQ ID NO: 1477638 - DNA, 15 bp, Homo sapiens
tctaatgatcctcct

SEQ ID NO: 1477639 - DNA, 15 bp, Homo sapiens
ctctaatgatcctcc

SEQ ID NO: 1477640 - DNA, 15 bp, Homo sapiens
gctctaatgatcctc

SEQ ID NO: 1477641 - DNA, 15 bp, Homo sapiens
ggctctaatgatcct

SEQ ID NO: 1477642 - DNA, 15 bp, Homo sapiens
gggctctaatgatcc

SEQ ID NO: 1477643 - DNA, 15 bp, Homo sapiens
tgggctctaatgatc

SEQ ID NO: 1477644 - DNA, 15 bp, Homo sapiens
ctgggctctaatgat

SEQ ID NO: 1477645 - DNA, 15 bp, Homo sapiens
cctgggctctaatga

SEQ ID NO: 1477646 - DNA, 15 bp, Homo sapiens
tcctgggctctaatg

SEQ ID NO: 1477647 - DNA, 15 bp, Homo sapiens
ctcctgggctctaat

SEQ ID NO: 1477648 - DNA, 15 bp, Homo sapiens
tctcctgggctctaa

SEQ ID NO: 1477649 - DNA, 15 bp, Homo sapiens
atctcctgggctcta

SEQ ID NO: 1477650 - DNA, 15 bp, Homo sapiens
aatctcctgggctct

SEQ ID NO: 1477651 - DNA, 15 bp, Homo sapiens
taatctcctgggctc

SEQ ID NO: 1477652 - DNA, 15 bp, Homo sapiens
ttaatctcctgggct

SEQ ID NO: 1477653 - DNA, 15 bp, Homo sapiens
cttaatctcctgggc

SEQ ID NO: 1477654 - DNA, 15 bp, Homo sapiens
ccttaatctcctggg

SEQ ID NO: 1477655 - DNA, 15 bp, Homo sapiens
tccttaatctcctgg

SEQ ID NO: 1477656 - DNA, 15 bp, Homo sapiens
atccttaatctcctg

SEQ ID NO: 1477657 - DNA, 15 bp, Homo sapiens
tatccttaatctcct

SEQ ID NO: 1477658 - DNA, 15 bp, Homo sapiens
gtatccttaatctcc

SEQ ID NO: 1477659 - DNA, 15 bp, Homo sapiens
tgtatccttaatctc

SEQ ID NO: 1477660 - DNA, 15 bp, Homo sapiens
ctgtatccttaatct

SEQ ID NO: 1477661 - DNA, 15 bp, Homo sapiens
actgtatccttaatc

SEQ ID NO: 1477662 - DNA, 15 bp, Homo sapiens
cactgtatccttaat

SEQ ID NO: 1477663 - DNA, 15 bp, Homo sapiens
tcactgtatccttaa

SEQ ID NO: 1477664 - DNA, 15 bp, Homo sapiens
ctcactgtatcctta

SEQ ID NO: 1477665 - DNA, 15 bp, Homo sapiens
gctcactgtatcctt

SEQ ID NO: 1477666 - DNA, 15 bp, Homo sapiens
agctcactgtatcct

SEQ ID NO: 1477667 - DNA, 15 bp, Homo sapiens
cagctcactgtatcc

SEQ ID NO: 1477668 - DNA, 15 bp, Homo sapiens
gcagctcactgtatc

SEQ ID NO: 1477669 - DNA, 15 bp, Homo sapiens
tgcagctcactgtat

SEQ ID NO: 1477670 - DNA, 15 bp, Homo sapiens
gtgcagctcactgta

SEQ ID NO: 1477671 - DNA, 15 bp, Homo sapiens
ggtgcagctcactgt

SEQ ID NO: 1477672 - DNA, 15 bp, Homo sapiens
tggtgcagctcactg

SEQ ID NO: 1477673 - DNA, 15 bp, Homo sapiens
gtggtgcagctcact

SEQ ID NO: 1477674 - DNA, 15 bp, Homo sapiens
agtggtgcagctcac

SEQ ID NO: 1477675 - DNA, 15 bp, Homo sapiens
cagtggtgcagctca

SEQ ID NO: 1477676 - DNA, 15 bp, Homo sapiens
gcagtggtgcagctc

SEQ ID NO: 1477677 - DNA, 15 bp, Homo sapiens
tgcagtggtgcagct

SEQ ID NO: 1477678 - DNA, 15 bp, Homo sapiens
gtgcagtggtgcagc

SEQ ID NO: 1477679 - DNA, 15 bp, Homo sapiens
agtgcagtggtgcag

SEQ ID NO: 1477680 - DNA, 15 bp, Homo sapiens
cttttgcccaggctg

SEQ ID NO: 1477681 - DNA, 15 bp, Homo sapiens
tcttttgcccaggct

SEQ ID NO: 1477682 - DNA, 15 bp, Homo sapiens
ctcttttgcccaggc

SEQ ID NO: 1477683 - DNA, 15 bp, Homo sapiens
actcttttgcccagg

SEQ ID NO: 1477684 - DNA, 15 bp, Homo sapiens
tactcttttgcccag

SEQ ID NO: 1477685 - DNA, 15 bp, Homo sapiens
ttactcttttgccca

SEQ ID NO: 1477686 - DNA, 15 bp, Homo sapiens
cttactcttttgccc

SEQ ID NO: 1477687 - DNA, 15 bp, Homo sapiens
tcttactcttttgcc

SEQ ID NO: 1477688 - DNA, 15 bp, Homo sapiens
gtcttactcttttgc

SEQ ID NO: 1477689 - DNA, 15 bp, Homo sapiens
ggtcttactcttttg

SEQ ID NO: 1477690 - DNA, 15 bp, Homo sapiens
gggtcttactctttt

SEQ ID NO: 1477691 - DNA, 15 bp, Homo sapiens
agggtcttactcttt

SEQ ID NO: 1477692 - DNA, 15 bp, Homo sapiens
tagggtcttactctt

SEQ ID NO: 1477693 - DNA, 15 bp, Homo sapiens
atagggtcttactct

SEQ ID NO: 1477694 - DNA, 15 bp, Homo sapiens
gatagggtcttactc

SEQ ID NO: 1477695 - DNA, 15 bp, Homo sapiens
agatagggtcttact

SEQ ID NO: 1477696 - DNA, 15 bp, Homo sapiens
gagatagggtcttac

SEQ ID NO: 1477697 - DNA, 15 bp, Homo sapiens
tgagatagggtctta

SEQ ID NO: 1477698 - DNA, 15 bp, Homo sapiens
ttgagatagggtctt

SEQ ID NO: 1477699 - DNA, 15 bp, Homo sapiens
cttgagatagggtct

SEQ ID NO: 1477700 - DNA, 15 bp, Homo sapiens
tcttgagatagggtc

SEQ ID NO: 1477701 - DNA, 15 bp, Homo sapiens
ttcttgagatagggt

SEQ ID NO: 1477702 - DNA, 15 bp, Homo sapiens
tttcttgagataggg

SEQ ID NO: 1477703 - DNA, 15 bp, Homo sapiens
ttttcttgagatagg

SEQ ID NO: 1477704 - DNA, 15 bp, Homo sapiens
tttttcttgagatag

SEQ ID NO: 1477705 - DNA, 15 bp, Homo sapiens
ttttttcttgagata

SEQ ID NO: 1477706 - DNA, 15 bp, Homo sapiens
tttttttttttcttg

SEQ ID NO: 1477707 - DNA, 15 bp, Homo sapiens
cgttccttttttttt

SEQ ID NO: 1477708 - DNA, 15 bp, Homo sapiens
tcgttcctttttttt

SEQ ID NO: 1477709 - DNA, 15 bp, Homo sapiens
ctcgttccttttttt

SEQ ID NO: 1477710 - DNA, 15 bp, Homo sapiens
tctcgttcctttttt

SEQ ID NO: 1477711 - DNA, 15 bp, Homo sapiens
atctcgttccttttt

SEQ ID NO: 1477712 - DNA, 15 bp, Homo sapiens
gatctcgttcctttt

SEQ ID NO: 1477713 - DNA, 15 bp, Homo sapiens
agatctcgttccttt

SEQ ID NO: 1477714 - DNA, 15 bp, Homo sapiens
tagatctcgttcctt

SEQ ID NO: 1477715 - DNA, 15 bp, Homo sapiens
ctagatctcgttcct

SEQ ID NO: 1477716 - DNA, 15 bp, Homo sapiens
cctagatctcgttcc

SEQ ID NO: 1477717 - DNA, 15 bp, Homo sapiens
gcctagatctcgttc

SEQ ID NO: 1477718 - DNA, 15 bp, Homo sapiens
agcctagatctcgtt

SEQ ID NO: 1477719 - DNA, 15 bp, Homo sapiens
gagcctagatctcgt

SEQ ID NO: 1477720 - DNA, 15 bp, Homo sapiens
tgagcctagatctcg

SEQ ID NO: 1477721 - DNA, 15 bp, Homo sapiens
gtgagcctagatctc

SEQ ID NO: 1477722 - DNA, 15 bp, Homo sapiens
tgtgagcctagatct

SEQ ID NO: 1477723 - DNA, 15 bp, Homo sapiens
ctgtgagcctagatc

SEQ ID NO: 1477724 - DNA, 15 bp, Homo sapiens
tctgtgagcctagat

SEQ ID NO: 1477725 - DNA, 15 bp, Homo sapiens
gtctgtgagcctaga

SEQ ID NO: 1477726 - DNA, 15 bp, Homo sapiens
tgtctgtgagcctag

SEQ ID NO: 1477727 - DNA, 15 bp, Homo sapiens
ttgtctgtgagccta

SEQ ID NO: 1477728 - DNA, 15 bp, Homo sapiens
attgtctgtgagcct

SEQ ID NO: 1477729 - DNA, 15 bp, Homo sapiens
gattgtctgtgagcc

SEQ ID NO: 1477730 - DNA, 15 bp, Homo sapiens
agattgtctgtgagc

SEQ ID NO: 1477731 - DNA, 15 bp, Homo sapiens
aagattgtctgtgag

SEQ ID NO: 1477732 - DNA, 15 bp, Homo sapiens
gaagattgtctgtga

SEQ ID NO: 1477733 - DNA, 15 bp, Homo sapiens
ggaagattgtctgtg

SEQ ID NO: 1477734 - DNA, 15 bp, Homo sapiens
tggaagattgtctgt

SEQ ID NO: 1477735 - DNA, 15 bp, Homo sapiens
ctggaagattgtctg

SEQ ID NO: 1477736 - DNA, 15 bp, Homo sapiens
tctggaagattgtct

SEQ ID NO: 1477737 - DNA, 15 bp, Homo sapiens
atctggaagattgtc

SEQ ID NO: 1477738 - DNA, 15 bp, Homo sapiens
tatctggaagattgt

SEQ ID NO: 1477739 - DNA, 15 bp, Homo sapiens
atatctggaagattg

SEQ ID NO: 1477740 - DNA, 15 bp, Homo sapiens
gatatctggaagatt

SEQ ID NO: 1477741 - DNA, 15 bp, Homo sapiens
tgatatctggaagat

SEQ ID NO: 1477742 - DNA, 15 bp, Homo sapiens
ctgatatctggaaga

SEQ ID NO: 1477743 - DNA, 15 bp, Homo sapiens
gctgatatctggaag

SEQ ID NO: 1477744 - DNA, 15 bp, Homo sapiens
cgctgatatctggaa

SEQ ID NO: 1477745 - DNA, 15 bp, Homo sapiens
ccgctgatatctgga

SEQ ID NO: 1477746 - DNA, 15 bp, Homo sapiens
cccgctgatatctgg

SEQ ID NO: 1477747 - DNA, 15 bp, Homo sapiens
tcccgctgatatctg

SEQ ID NO: 1477748 - DNA, 15 bp, Homo sapiens
ttcccgctgatatct

SEQ ID NO: 1477749 - DNA, 15 bp, Homo sapiens
tttcccgctgatatc

SEQ ID NO: 1477750 - DNA, 15 bp, Homo sapiens
atttcccgctgatat

SEQ ID NO: 1477751 - DNA, 15 bp, Homo sapiens
catttcccgctgata

SEQ ID NO: 1477752 - DNA, 15 bp, Homo sapiens
tcatttcccgctgat

SEQ ID NO: 1477753 - DNA, 15 bp, Homo sapiens
atcatttcccgctga

SEQ ID NO: 1477754 - DNA, 15 bp, Homo sapiens
catcatttcccgctg

SEQ ID NO: 1477755 - DNA, 15 bp, Homo sapiens
tcatcatttcccgct

SEQ ID NO: 1477756 - DNA, 15 bp, Homo sapiens
ctcatcatttcccgc

SEQ ID NO: 1477757 - DNA, 15 bp, Homo sapiens
actcatcatttcccg

SEQ ID NO: 1477758 - DNA, 15 bp, Homo sapiens
cactcatcatttccc

SEQ ID NO: 1477759 - DNA, 15 bp, Homo sapiens
acactcatcatttcc

SEQ ID NO: 1477760 - DNA, 15 bp, Homo sapiens
cacactcatcatttc

SEQ ID NO: 1477761 - DNA, 15 bp, Homo sapiens
acacactcatcattt

SEQ ID NO: 1477762 - DNA, 15 bp, Homo sapiens
gacacactcatcatt

SEQ ID NO: 1477763 - DNA, 15 bp, Homo sapiens
agacacactcatcat

SEQ ID NO: 1477764 - DNA, 15 bp, Homo sapiens
cagacacactcatca

SEQ ID NO: 1477765 - DNA, 15 bp, Homo sapiens
ccagacacactcatc

SEQ ID NO: 1477766 - DNA, 15 bp, Homo sapiens
cccagacacactcat

SEQ ID NO: 1477767 - DNA, 15 bp, Homo sapiens
ccccagacacactca

SEQ ID NO: 1477768 - DNA, 15 bp, Homo sapiens
cccccagacacactc

SEQ ID NO: 1477769 - DNA, 15 bp, Homo sapiens
tcccccagacacact

SEQ ID NO: 1477770 - DNA, 15 bp, Homo sapiens
gtcccccagacacac

SEQ ID NO: 1477771 - DNA, 15 bp, Homo sapiens
tgtcccccagacaca

SEQ ID NO: 1477772 - DNA, 15 bp, Homo sapiens
atgtcccccagacac

SEQ ID NO: 1477773 - DNA, 15 bp, Homo sapiens
gatgtcccccagaca

SEQ ID NO: 1477774 - DNA, 15 bp, Homo sapiens
ggatgtcccccagac

SEQ ID NO: 1477775 - DNA, 15 bp, Homo sapiens
tggatgtcccccaga

SEQ ID NO: 1477776 - DNA, 15 bp, Homo sapiens
ttggatgtcccccag

SEQ ID NO: 1477777 - DNA, 15 bp, Homo sapiens
tttggatgtccccca

SEQ ID NO: 1477778 - DNA, 15 bp, Homo sapiens
ttttggatgtccccc

SEQ ID NO: 1477779 - DNA, 15 bp, Homo sapiens
attttggatgtcccc

SEQ ID NO: 1477780 - DNA, 15 bp, Homo sapiens
aattttggatgtccc

SEQ ID NO: 1477781 - DNA, 15 bp, Homo sapiens
aaattttggatgtcc

SEQ ID NO: 1477782 - DNA, 15 bp, Homo sapiens
gaaattttggatgtc

SEQ ID NO: 1477783 - DNA, 15 bp, Homo sapiens
cgaaattttggatgt

SEQ ID NO: 1477784 - DNA, 15 bp, Homo sapiens
ccgaaattttggatg

SEQ ID NO: 1477785 - DNA, 15 bp, Homo sapiens
tccgaaattttggat

SEQ ID NO: 1477786 - DNA, 15 bp, Homo sapiens
ttccgaaattttgga

SEQ ID NO: 1477787 - DNA, 15 bp, Homo sapiens
attccgaaattttgg

SEQ ID NO: 1477788 - DNA, 15 bp, Homo sapiens
aattccgaaattttg

SEQ ID NO: 1477789 - DNA, 15 bp, Homo sapiens
taattccgaaatttt

SEQ ID NO: 1477790 - DNA, 15 bp, Homo sapiens
ttaattccgaaattt

SEQ ID NO: 1477791 - DNA, 15 bp, Homo sapiens
attaattccgaaatt

SEQ ID NO: 1477792 - DNA, 15 bp, Homo sapiens
gattaattccgaaat

SEQ ID NO: 1477793 - DNA, 15 bp, Homo sapiens
agattaattccgaaa

SEQ ID NO: 1477794 - DNA, 15 bp, Homo sapiens
aagattaattccgaa

SEQ ID NO: 1477795 - DNA, 15 bp, Homo sapiens
caagattaattccga

SEQ ID NO: 1477796 - DNA, 15 bp, Homo sapiens
acaagattaattccg

SEQ ID NO: 1477797 - DNA, 15 bp, Homo sapiens
aacaagattaattcc

SEQ ID NO: 1477798 - DNA, 15 bp, Homo sapiens
aaacaagattaattc

SEQ ID NO: 1477799 - DNA, 15 bp, Homo sapiens
aaaacaagattaatt

SEQ ID NO: 1477800 - DNA, 15 bp, Homo sapiens
caaaacaagattaat

SEQ ID NO: 1477801 - DNA, 15 bp, Homo sapiens
ccaaaacaagattaa

SEQ ID NO: 1477802 - DNA, 15 bp, Homo sapiens
cccaaaacaagatta

SEQ ID NO: 1477803 - DNA, 15 bp, Homo sapiens
tcccaaaacaagatt

SEQ ID NO: 1477804 - DNA, 15 bp, Homo sapiens
ctcccaaaacaagat

SEQ ID NO: 1477805 - DNA, 15 bp, Homo sapiens
tctcccaaaacaaga

SEQ ID NO: 1477806 - DNA, 15 bp, Homo sapiens
gtctcccaaaacaag

SEQ ID NO: 1477807 - DNA, 15 bp, Homo sapiens
tgtctcccaaaacaa

SEQ ID NO: 1477808 - DNA, 15 bp, Homo sapiens
ctgtctcccaaaaca

SEQ ID NO: 1477809 - DNA, 15 bp, Homo sapiens
cctgtctcccaaaac

SEQ ID NO: 1477810 - DNA, 15 bp, Homo sapiens
ccctgtctcccaaaa

SEQ ID NO: 1477811 - DNA, 15 bp, Homo sapiens
tccctgtctcccaaa

SEQ ID NO: 1477812 - DNA, 15 bp, Homo sapiens
ttccctgtctcccaa

SEQ ID NO: 1477813 - DNA, 15 bp, Homo sapiens
cttccctgtctccca

SEQ ID NO: 1477814 - DNA, 15 bp, Homo sapiens
ccttccctgtctccc

SEQ ID NO: 1477815 - DNA, 15 bp, Homo sapiens
tccttccctgtctcc

SEQ ID NO: 1477816 - DNA, 15 bp, Homo sapiens
ctccttccctgtctc

SEQ ID NO: 1477817 - DNA, 15 bp, Homo sapiens
tctccttccctgtct

SEQ ID NO: 1477818 - DNA, 15 bp, Homo sapiens
ctctccttccctgtc

SEQ ID NO: 1477819 - DNA, 15 bp, Homo sapiens
cctctccttccctgt

SEQ ID NO: 1477820 - DNA, 15 bp, Homo sapiens
ccctctccttccctg

SEQ ID NO: 1477821 - DNA, 15 bp, Homo sapiens
tccctctccttccct

SEQ ID NO: 1477822 - DNA, 15 bp, Homo sapiens
atccctctccttccc

SEQ ID NO: 1477823 - DNA, 15 bp, Homo sapiens
catccctctccttcc

SEQ ID NO: 1477824 - DNA, 15 bp, Homo sapiens
acatccctctccttc

SEQ ID NO: 1477825 - DNA, 15 bp, Homo sapiens
aacatccctctcctt

SEQ ID NO: 1477826 - DNA, 15 bp, Homo sapiens
gaacatccctctcct

SEQ ID NO: 1477827 - DNA, 15 bp, Homo sapiens
agaacatccctctcc

SEQ ID NO: 1477828 - DNA, 15 bp, Homo sapiens
cagaacatccctctc

SEQ ID NO: 1477829 - DNA, 15 bp, Homo sapiens
ccagaacatccctct

SEQ ID NO: 1477830 - DNA, 15 bp, Homo sapiens
cccagaacatccctc

SEQ ID NO: 1477831 - DNA, 15 bp, Homo sapiens
ccccagaacatccct

SEQ ID NO: 1477832 - DNA, 15 bp, Homo sapiens
cccccagaacatccc

SEQ ID NO: 1477833 - DNA, 15 bp, Homo sapiens
tcccccagaacatcc

SEQ ID NO: 1477834 - DNA, 15 bp, Homo sapiens
ttcccccagaacatc

SEQ ID NO: 1477835 - DNA, 15 bp, Homo sapiens
tttcccccagaacat

SEQ ID NO: 1477836 - DNA, 15 bp, Homo sapiens
ttttcccccagaaca

SEQ ID NO: 1477837 - DNA, 15 bp, Homo sapiens
gttttcccccagaac

SEQ ID NO: 1477838 - DNA, 15 bp, Homo sapiens
agttttcccccagaa

SEQ ID NO: 1477839 - DNA, 15 bp, Homo sapiens
tagttttcccccaga

SEQ ID NO: 1477840 - DNA, 15 bp, Homo sapiens
ttagttttcccccag

SEQ ID NO: 1477841 - DNA, 15 bp, Homo sapiens
cttagttttccccca

SEQ ID NO: 1477842 - DNA, 15 bp, Homo sapiens
acttagttttccccc

SEQ ID NO: 1477843 - DNA, 15 bp, Homo sapiens
gacttagttttcccc

SEQ ID NO: 1477844 - DNA, 15 bp, Homo sapiens
tgacttagttttccc

SEQ ID NO: 1477845 - DNA, 15 bp, Homo sapiens
ttgacttagttttcc

SEQ ID NO: 1477846 - DNA, 15 bp, Homo sapiens
cttgacttagttttc

SEQ ID NO: 1477847 - DNA, 15 bp, Homo sapiens
ccttgacttagtttt

SEQ ID NO: 1477848 - DNA, 15 bp, Homo sapiens
gccttgacttagttt

SEQ ID NO: 1477849 - DNA, 15 bp, Homo sapiens
agccttgacttagtt

SEQ ID NO: 1477850 - DNA, 15 bp, Homo sapiens
cagccttgacttagt

SEQ ID NO: 1477851 - DNA, 15 bp, Homo sapiens
ccagccttgacttag

SEQ ID NO: 1477852 - DNA, 15 bp, Homo sapiens
gccagccttgactta

SEQ ID NO: 1477853 - DNA, 15 bp, Homo sapiens
tgccagccttgactt

SEQ ID NO: 1477854 - DNA, 15 bp, Homo sapiens
atgccagccttgact

SEQ ID NO: 1477855 - DNA, 15 bp, Homo sapiens
gatgccagccttgac

SEQ ID NO: 1477856 - DNA, 15 bp, Homo sapiens
ggatgccagccttga

SEQ ID NO: 1477857 - DNA, 15 bp, Homo sapiens
aggatgccagccttg

SEQ ID NO: 1477858 - DNA, 15 bp, Homo sapiens
gaggatgccagcctt

SEQ ID NO: 1477859 - DNA, 15 bp, Homo sapiens
agaggatgccagcct

SEQ ID NO: 1477860 - DNA, 15 bp, Homo sapiens
gagaggatgccagcc

SEQ ID NO: 1477861 - DNA, 15 bp, Homo sapiens
ggagaggatgccagc

SEQ ID NO: 1477862 - DNA, 15 bp, Homo sapiens
gggcccatgtcctgc

SEQ ID NO: 1477863 - DNA, 15 bp, Homo sapiens
cgggcccatgtcctg

SEQ ID NO: 1477864 - DNA, 15 bp, Homo sapiens
ccgggcccatgtcct

SEQ ID NO: 1477865 - DNA, 15 bp, Homo sapiens
cccgggcccatgtcc

SEQ ID NO: 1477866 - DNA, 15 bp, Homo sapiens
acccgggcccatgtc

SEQ ID NO: 1477867 - DNA, 15 bp, Homo sapiens
gacccgggcccatgt

SEQ ID NO: 1477868 - DNA, 15 bp, Homo sapiens
ggacccgggcccatg

SEQ ID NO: 1477869 - DNA, 15 bp, Homo sapiens
aggacccgggcccat

SEQ ID NO: 1477870 - DNA, 15 bp, Homo sapiens
gaggacccgggccca

SEQ ID NO: 1477871 - DNA, 15 bp, Homo sapiens
ggaggacccgggccc

SEQ ID NO: 1477872 - DNA, 15 bp, Homo sapiens
aggaggacccgggcc

SEQ ID NO: 1477873 - DNA, 15 bp, Homo sapiens
caggaggacccgggc

SEQ ID NO: 1477874 - DNA, 15 bp, Homo sapiens
tcaggaggacccggg

SEQ ID NO: 1477875 - DNA, 15 bp, Homo sapiens
gtcaggaggacccgg

SEQ ID NO: 1477876 - DNA, 15 bp, Homo sapiens
ggtcaggaggacccg

SEQ ID NO: 1477877 - DNA, 15 bp, Homo sapiens
gggtcaggaggaccc

SEQ ID NO: 1477878 - DNA, 15 bp, Homo sapiens
ggggtcaggaggacc

SEQ ID NO: 1477879 - DNA, 15 bp, Homo sapiens
tggggtcaggaggac

SEQ ID NO: 1477880 - DNA, 15 bp, Homo sapiens
gtggggtcaggagga

SEQ ID NO: 1477881 - DNA, 15 bp, Homo sapiens
cgtggggtcaggagg

SEQ ID NO: 1477882 - DNA, 15 bp, Homo sapiens
ccgtggggtcaggag

SEQ ID NO: 1477883 - DNA, 15 bp, Homo sapiens
tccgtggggtcagga

SEQ ID NO: 1477884 - DNA, 15 bp, Homo sapiens
ctccgtggggtcagg

SEQ ID NO: 1477885 - DNA, 15 bp, Homo sapiens
gctccgtggggtcag

SEQ ID NO: 1477886 - DNA, 15 bp, Homo sapiens
ggctccgtggggtca

SEQ ID NO: 1477887 - DNA, 15 bp, Homo sapiens
cggctccgtggggtc

SEQ ID NO: 1477888 - DNA, 15 bp, Homo sapiens
gcggctccgtggggt

SEQ ID NO: 1477889 - DNA, 15 bp, Homo sapiens
ggcggctccgtgggg

SEQ ID NO: 1477890 - DNA, 15 bp, Homo sapiens
gggcggctccgtggg

SEQ ID NO: 1477891 - DNA, 15 bp, Homo sapiens
ggggcggctccgtgg

SEQ ID NO: 1477892 - DNA, 15 bp, Homo sapiens
aggggcggctccgtg

SEQ ID NO: 1477893 - DNA, 15 bp, Homo sapiens
gaggggcggctccgt

SEQ ID NO: 1477894 - DNA, 15 bp, Homo sapiens
ggaggggcggctccg

SEQ ID NO: 1477895 - DNA, 15 bp, Homo sapiens
tggaggggcggctcc

SEQ ID NO: 1477896 - DNA, 15 bp, Homo sapiens
gtggaggggcggctc

SEQ ID NO: 1477897 - DNA, 15 bp, Homo sapiens
cgtggaggggcggct

SEQ ID NO: 1477898 - DNA, 15 bp, Homo sapiens
acgtggaggggcggc

SEQ ID NO: 1477899 - DNA, 15 bp, Homo sapiens
cacgtggaggggcgg

SEQ ID NO: 1477900 - DNA, 15 bp, Homo sapiens
tcacgtggaggggcg

SEQ ID NO: 1477901 - DNA, 15 bp, Homo sapiens
ttcacgtggaggggc

SEQ ID NO: 1477902 - DNA, 15 bp, Homo sapiens
cttcacgtggagggg

SEQ ID NO: 1477903 - DNA, 15 bp, Homo sapiens
acttcacgtggaggg

SEQ ID NO: 1477904 - DNA, 15 bp, Homo sapiens
gacttcacgtggagg

SEQ ID NO: 1477905 - DNA, 15 bp, Homo sapiens
agacttcacgtggag

SEQ ID NO: 1477906 - DNA, 15 bp, Homo sapiens
cagacttcacgtgga

SEQ ID NO: 1477907 - DNA, 15 bp, Homo sapiens
tcagacttcacgtgg

SEQ ID NO: 1477908 - DNA, 15 bp, Homo sapiens
ctcagacttcacgtg

SEQ ID NO: 1477909 - DNA, 15 bp, Homo sapiens
cctcagacttcacgt

SEQ ID NO: 1477910 - DNA, 15 bp, Homo sapiens
tcctcagacttcacg

SEQ ID NO: 1477911 - DNA, 15 bp, Homo sapiens
gtcctcagacttcac

SEQ ID NO: 1477912 - DNA, 15 bp, Homo sapiens
ggtcctcagacttca

SEQ ID NO: 1477913 - DNA, 15 bp, Homo sapiens
tggtcctcagacttc

SEQ ID NO: 1477914 - DNA, 15 bp, Homo sapiens
ctggtcctcagactt

SEQ ID NO: 1477915 - DNA, 15 bp, Homo sapiens
gctggtcctcagact

SEQ ID NO: 1477916 - DNA, 15 bp, Homo sapiens
ggctggtcctcagac

SEQ ID NO: 1477917 - DNA, 15 bp, Homo sapiens
gggctggtcctcaga

SEQ ID NO: 1477918 - DNA, 15 bp, Homo sapiens
cgggctggtcctcag

SEQ ID NO: 1477919 - DNA, 15 bp, Homo sapiens
ccgggctggtcctca

SEQ ID NO: 1477920 - DNA, 15 bp, Homo sapiens
cccgggctggtcctc

SEQ ID NO: 1477921 - DNA, 15 bp, Homo sapiens
ccccgggctggtcct

SEQ ID NO: 1477922 - DNA, 15 bp, Homo sapiens
tccccgggctggtcc

SEQ ID NO: 1477923 - DNA, 15 bp, Homo sapiens
ctccccgggctggtc

SEQ ID NO: 1477924 - DNA, 15 bp, Homo sapiens
cctccccgggctggt

SEQ ID NO: 1477925 - DNA, 15 bp, Homo sapiens
tcctccccgggctgg

SEQ ID NO: 1477926 - DNA, 15 bp, Homo sapiens
ttcctccccgggctg

SEQ ID NO: 1477927 - DNA, 15 bp, Homo sapiens
cttcctccccgggct

SEQ ID NO: 1477928 - DNA, 15 bp, Homo sapiens
tcttcctccccgggc

SEQ ID NO: 1477929 - DNA, 15 bp, Homo sapiens
ctcttcctccccggg

SEQ ID NO: 1477930 - DNA, 15 bp, Homo sapiens
cctcttcctccccgg

SEQ ID NO: 1477931 - DNA, 15 bp, Homo sapiens
tcctcttcctccccg

SEQ ID NO: 1477932 - DNA, 15 bp, Homo sapiens
gtcctcttcctcccc

SEQ ID NO: 1477933 - DNA, 15 bp, Homo sapiens
cgtcctcttcctccc

SEQ ID NO: 1477934 - DNA, 15 bp, Homo sapiens
tcgtcctcttcctcc

SEQ ID NO: 1477935 - DNA, 15 bp, Homo sapiens
atcgtcctcttcctc

SEQ ID NO: 1477936 - DNA, 15 bp, Homo sapiens
catcgtcctcttcct

SEQ ID NO: 1477937 - DNA, 15 bp, Homo sapiens
tcatcgtcctcttcc

SEQ ID NO: 1477938 - DNA, 15 bp, Homo sapiens
ctcatcgtcctcttc

SEQ ID NO: 1477939 - DNA, 15 bp, Homo sapiens
tctcatcgtcctctt

SEQ ID NO: 1477940 - DNA, 15 bp, Homo sapiens
ctctcatcgtcctct

SEQ ID NO: 1477941 - DNA, 15 bp, Homo sapiens
cctctcatcgtcctc

SEQ ID NO: 1477942 - DNA, 15 bp, Homo sapiens
ccctctcatcgtcct

SEQ ID NO: 1477943 - DNA, 15 bp, Homo sapiens
cccctctcatcgtcc

SEQ ID NO: 1477944 - DNA, 15 bp, Homo sapiens
gcccctctcatcgtc

SEQ ID NO: 1477945 - DNA, 15 bp, Homo sapiens
cgcccctctcatcgt

SEQ ID NO: 1477946 - DNA, 15 bp, Homo sapiens
gcgcccctctcatcg

SEQ ID NO: 1477947 - DNA, 15 bp, Homo sapiens
cgcgcccctctcatc

SEQ ID NO: 1477948 - DNA, 15 bp, Homo sapiens
ccgcgcccctctcat

SEQ ID NO: 1477949 - DNA, 15 bp, Homo sapiens
tccgcgcccctctca

SEQ ID NO: 1477950 - DNA, 15 bp, Homo sapiens
gtccgcgcccctctc

SEQ ID NO: 1477951 - DNA, 15 bp, Homo sapiens
cgtccgcgcccctct

SEQ ID NO: 1477952 - DNA, 15 bp, Homo sapiens
gcgtccgcgcccctc

SEQ ID NO: 1477953 - DNA, 15 bp, Homo sapiens
ggcgtccgcgcccct

SEQ ID NO: 1477954 - DNA, 15 bp, Homo sapiens
tggcgtccgcgcccc

SEQ ID NO: 1477955 - DNA, 15 bp, Homo sapiens
gtggcgtccgcgccc

SEQ ID NO: 1477956 - DNA, 15 bp, Homo sapiens
ggtggcgtccgcgcc

SEQ ID NO: 1477957 - DNA, 15 bp, Homo sapiens
aggtggcgtccgcgc

SEQ ID NO: 1477958 - DNA, 15 bp, Homo sapiens
caggtggcgtccgcg

SEQ ID NO: 1477959 - DNA, 15 bp, Homo sapiens
ccaggtggcgtccgc

SEQ ID NO: 1477960 - DNA, 15 bp, Homo sapiens
cccaggtggcgtccg

SEQ ID NO: 1477961 - DNA, 15 bp, Homo sapiens
tcccaggtggcgtcc

SEQ ID NO: 1477962 - DNA, 15 bp, Homo sapiens
gtcccaggtggcgtc

SEQ ID NO: 1477963 - DNA, 15 bp, Homo sapiens
ggtcccaggtggcgt

SEQ ID NO: 1477964 - DNA, 15 bp, Homo sapiens
aggtcccaggtggcg

SEQ ID NO: 1477965 - DNA, 15 bp, Homo sapiens
caggtcccaggtggc

SEQ ID NO: 1477966 - DNA, 15 bp, Homo sapiens
ccaggtcccaggtgg

SEQ ID NO: 1477967 - DNA, 15 bp, Homo sapiens
tccaggtcccaggtg

SEQ ID NO: 1477968 - DNA, 15 bp, Homo sapiens
atccaggtcccaggt

SEQ ID NO: 1477969 - DNA, 15 bp, Homo sapiens
gatccaggtcccagg

SEQ ID NO: 1477970 - DNA, 15 bp, Homo sapiens
agatccaggtcccag

SEQ ID NO: 1477971 - DNA, 15 bp, Homo sapiens
gagatccaggtccca

SEQ ID NO: 1477972 - DNA, 15 bp, Homo sapiens
ggagatccaggtccc

SEQ ID NO: 1477973 - DNA, 15 bp, Homo sapiens
aggagatccaggtcc

SEQ ID NO: 1477974 - DNA, 15 bp, Homo sapiens
gaggagatccaggtc

SEQ ID NO: 1477975 - DNA, 15 bp, Homo sapiens
ggaggagatccaggt

SEQ ID NO: 1477976 - DNA, 15 bp, Homo sapiens
aggaggagatccagg

SEQ ID NO: 1477977 - DNA, 15 bp, Homo sapiens
gaggaggagatccag

SEQ ID NO: 1477978 - DNA, 15 bp, Homo sapiens
tgaggaggagatcca

SEQ ID NO: 1477979 - DNA, 15 bp, Homo sapiens
gtgaggaggagatcc

SEQ ID NO: 1477980 - DNA, 15 bp, Homo sapiens
ggtgaggaggagatc

SEQ ID NO: 1477981 - DNA, 15 bp, Homo sapiens
tggtgaggaggagat

SEQ ID NO: 1477982 - DNA, 15 bp, Homo sapiens
ttggtgaggaggaga

SEQ ID NO: 1477983 - DNA, 15 bp, Homo sapiens
gttggtgaggaggag

SEQ ID NO: 1477984 - DNA, 15 bp, Homo sapiens
agttggtgaggagga

SEQ ID NO: 1477985 - DNA, 15 bp, Homo sapiens
aagttggtgaggagg

SEQ ID NO: 1477986 - DNA, 15 bp, Homo sapiens
gaagttggtgaggag

SEQ ID NO: 1477987 - DNA, 15 bp, Homo sapiens
agaagttggtgagga

SEQ ID NO: 1477988 - DNA, 15 bp, Homo sapiens
gagaagttggtgagg

SEQ ID NO: 1477989 - DNA, 15 bp, Homo sapiens
cgagaagttggtgag

SEQ ID NO: 1477990 - DNA, 15 bp, Homo sapiens
ccgagaagttggtga

SEQ ID NO: 1477991 - DNA, 15 bp, Homo sapiens
cccgagaagttggtg

SEQ ID NO: 1477992 - DNA, 15 bp, Homo sapiens
gcccgagaagttggt

SEQ ID NO: 1477993 - DNA, 15 bp, Homo sapiens
ggcccgagaagttgg

SEQ ID NO: 1477994 - DNA, 15 bp, Homo sapiens
gggcccgagaagttg

SEQ ID NO: 1477995 - DNA, 15 bp, Homo sapiens
cgggcccgagaagtt

SEQ ID NO: 1477996 - DNA, 15 bp, Homo sapiens
ccgggcccgagaagt

SEQ ID NO: 1477997 - DNA, 15 bp, Homo sapiens
tccgggcccgagaag

SEQ ID NO: 1477998 - DNA, 15 bp, Homo sapiens
ctccgggcccgagaa

SEQ ID NO: 1477999 - DNA, 15 bp, Homo sapiens
gctccgggcccgaga

SEQ ID NO: 1478000 - DNA, 15 bp, Homo sapiens
ggctccgggcccgag

SEQ ID NO: 1478001 - DNA, 15 bp, Homo sapiens
gggctccgggcccga

SEQ ID NO: 1478002 - DNA, 15 bp, Homo sapiens
cgggctccgggcccg

SEQ ID NO: 1478003 - DNA, 15 bp, Homo sapiens
ccgggctccgggccc

SEQ ID NO: 1478004 - DNA, 15 bp, Homo sapiens
accgggctccgggcc

SEQ ID NO: 1478005 - DNA, 15 bp, Homo sapiens
caccgggctccgggc

SEQ ID NO: 1478006 - DNA, 15 bp, Homo sapiens
ccaccgggctccggg

SEQ ID NO: 1478007 - DNA, 15 bp, Homo sapiens
gccaccgggctccgg

SEQ ID NO: 1478008 - DNA, 15 bp, Homo sapiens
cgccaccgggctccg

SEQ ID NO: 1478009 - DNA, 15 bp, Homo sapiens
gcgccaccgggctcc

SEQ ID NO: 1478010 - DNA, 15 bp, Homo sapiens
cgcgccaccgggctc

SEQ ID NO: 1478011 - DNA, 15 bp, Homo sapiens
gcgcgccaccgggct

SEQ ID NO: 1478012 - DNA, 15 bp, Homo sapiens
ggcgcgccaccgggc

SEQ ID NO: 1478013 - DNA, 15 bp, Homo sapiens
gggcgcgccaccggg

SEQ ID NO: 1478014 - DNA, 15 bp, Homo sapiens
ggggcgcgccaccgg

SEQ ID NO: 1478015 - DNA, 15 bp, Homo sapiens
tggggcgcgccaccg

SEQ ID NO: 1478016 - DNA, 15 bp, Homo sapiens
ctggggcgcgccacc

SEQ ID NO: 1478017 - DNA, 15 bp, Homo sapiens
tctggggcgcgccac

SEQ ID NO: 1478018 - DNA, 15 bp, Homo sapiens
gtctggggcgcgcca

SEQ ID NO: 1478019 - DNA, 15 bp, Homo sapiens
ggtctggggcgcgcc

SEQ ID NO: 1478020 - DNA, 15 bp, Homo sapiens
aggtctggggcgcgc

SEQ ID NO: 1478021 - DNA, 15 bp, Homo sapiens
caggtctggggcgcg

SEQ ID NO: 1478022 - DNA, 15 bp, Homo sapiens
gcaggtctggggcgc

SEQ ID NO: 1478023 - DNA, 15 bp, Homo sapiens
cgcaggtctggggcg

SEQ ID NO: 1478024 - DNA, 15 bp, Homo sapiens
gcgcaggtctggggc

SEQ ID NO: 1478025 - DNA, 15 bp, Homo sapiens
agcgcaggtctgggg

SEQ ID NO: 1478026 - DNA, 15 bp, Homo sapiens
gagcgcaggtctggg

SEQ ID NO: 1478027 - DNA, 15 bp, Homo sapiens
agagcgcaggtctgg

SEQ ID NO: 1478028 - DNA, 15 bp, Homo sapiens
cagagcgcaggtctg

SEQ ID NO: 1478029 - DNA, 15 bp, Homo sapiens
ccagagcgcaggtct

SEQ ID NO: 1478030 - DNA, 15 bp, Homo sapiens
gccagagcgcaggtc

SEQ ID NO: 1478031 - DNA, 15 bp, Homo sapiens
cgccagagcgcaggt

SEQ ID NO: 1478032 - DNA, 15 bp, Homo sapiens
gcgccagagcgcagg

SEQ ID NO: 1478033 - DNA, 15 bp, Homo sapiens
ggcgccagagcgcag

SEQ ID NO: 1478034 - DNA, 15 bp, Homo sapiens
gggcgccagagcgca

SEQ ID NO: 1478035 - DNA, 15 bp, Homo sapiens
tgggcgccagagcgc

SEQ ID NO: 1478036 - DNA, 15 bp, Homo sapiens
ctgggcgccagagcg

SEQ ID NO: 1478037 - DNA, 15 bp, Homo sapiens
gctgggcgccagagc

SEQ ID NO: 1478038 - DNA, 15 bp, Homo sapiens
cgctgggcgccagag

SEQ ID NO: 1478039 - DNA, 15 bp, Homo sapiens
tcgctgggcgccaga

SEQ ID NO: 1478040 - DNA, 15 bp, Homo sapiens
ctcgctgggcgccag

SEQ ID NO: 1478041 - DNA, 15 bp, Homo sapiens
cctcgctgggcgcca

SEQ ID NO: 1478042 - DNA, 15 bp, Homo sapiens
gcctcgctgggcgcc

SEQ ID NO: 1478043 - DNA, 15 bp, Homo sapiens
ggcctcgctgggcgc

SEQ ID NO: 1478044 - DNA, 15 bp, Homo sapiens
aggcctcgctgggcg

SEQ ID NO: 1478045 - DNA, 15 bp, Homo sapiens
gaggcctcgctgggc

SEQ ID NO: 1478046 - DNA, 15 bp, Homo sapiens
ggaggcctcgctggg

SEQ ID NO: 1478047 - DNA, 15 bp, Homo sapiens
cggaggcctcgctgg

SEQ ID NO: 1478048 - DNA, 15 bp, Homo sapiens
ccggaggcctcgctg

SEQ ID NO: 1478049 - DNA, 15 bp, Homo sapiens
cccggaggcctcgct

SEQ ID NO: 1478050 - DNA, 15 bp, Homo sapiens
ccccggaggcctcgc

SEQ ID NO: 1478051 - DNA, 15 bp, Homo sapiens
gccccggaggcctcg

SEQ ID NO: 1478052 - DNA, 15 bp, Homo sapiens
cgccccggaggcctc

SEQ ID NO: 1478053 - DNA, 15 bp, Homo sapiens
gcgccccggaggcct

SEQ ID NO: 1478054 - DNA, 15 bp, Homo sapiens
tgcgccccggaggcc

SEQ ID NO: 1478055 - DNA, 15 bp, Homo sapiens
ttgcgccccggaggc

SEQ ID NO: 1478056 - DNA, 15 bp, Homo sapiens
attgcgccccggagg

SEQ ID NO: 1478057 - DNA, 15 bp, Homo sapiens
tattgcgccccggag

SEQ ID NO: 1478058 - DNA, 15 bp, Homo sapiens
atattgcgccccgga

SEQ ID NO: 1478059 - DNA, 15 bp, Homo sapiens
gatattgcgccccgg

SEQ ID NO: 1478060 - DNA, 15 bp, Homo sapiens
ggatattgcgccccg

SEQ ID NO: 1478061 - DNA, 15 bp, Homo sapiens
cggatattgcgcccc

SEQ ID NO: 1478062 - DNA, 15 bp, Homo sapiens
gcggatattgcgccc

SEQ ID NO: 1478063 - DNA, 15 bp, Homo sapiens
ggcggatattgcgcc

SEQ ID NO: 1478064 - DNA, 15 bp, Homo sapiens
cggcggatattgcgc

SEQ ID NO: 1478065 - DNA, 15 bp, Homo sapiens
gcggcggatattgcg

SEQ ID NO: 1478066 - DNA, 15 bp, Homo sapiens
ggcggcggatattgc

SEQ ID NO: 1478067 - DNA, 15 bp, Homo sapiens
cggcggcggatattg

SEQ ID NO: 1478068 - DNA, 15 bp, Homo sapiens
gcggcggcggatatt

SEQ ID NO: 1478069 - DNA, 15 bp, Homo sapiens
ggcggcggcggatat

SEQ ID NO: 1478070 - DNA, 15 bp, Homo sapiens
gggcggcggcggata

SEQ ID NO: 1478071 - DNA, 15 bp, Homo sapiens
cgggcggcggcggat

SEQ ID NO: 1478072 - DNA, 15 bp, Homo sapiens
tcgggcggcggcgga

SEQ ID NO: 1478073 - DNA, 15 bp, Homo sapiens
ctcgggcggcggcgg

SEQ ID NO: 1478074 - DNA, 15 bp, Homo sapiens
tctcgggcggcggcg

SEQ ID NO: 1478075 - DNA, 15 bp, Homo sapiens
gtctcgggcggcggc

SEQ ID NO: 1478076 - DNA, 15 bp, Homo sapiens
agtctcgggcggcgg

SEQ ID NO: 1478077 - DNA, 15 bp, Homo sapiens
gagtctcgggcggcg

SEQ ID NO: 1478078 - DNA, 15 bp, Homo sapiens
agagtctcgggcggc

SEQ ID NO: 1478079 - DNA, 15 bp, Homo sapiens
cagagtctcgggcgg

SEQ ID NO: 1478080 - DNA, 15 bp, Homo sapiens
ccagagtctcgggcg

SEQ ID NO: 1478081 - DNA, 15 bp, Homo sapiens
cccagagtctcgggc

SEQ ID NO: 1478082 - DNA, 15 bp, Homo sapiens
gcccagagtctcggg

SEQ ID NO: 1478083 - DNA, 15 bp, Homo sapiens
cgcccagagtctcgg

SEQ ID NO: 1478084 - DNA, 15 bp, Homo sapiens
gcgcccagagtctcg

SEQ ID NO: 1478085 - DNA, 15 bp, Homo sapiens
tgcgcccagagtctc

SEQ ID NO: 1478086 - DNA, 15 bp, Homo sapiens
atgcgcccagagtct

SEQ ID NO: 1478087 - DNA, 15 bp, Homo sapiens
tatgcgcccagagtc

SEQ ID NO: 1478088 - DNA, 15 bp, Homo sapiens
atatgcgcccagagt

SEQ ID NO: 1478089 - DNA, 15 bp, Homo sapiens
catatgcgcccagag

SEQ ID NO: 1478090 - DNA, 15 bp, Homo sapiens
gcatatgcgcccaga

SEQ ID NO: 1478091 - DNA, 15 bp, Homo sapiens
agcatatgcgcccag

SEQ ID NO: 1478092 - DNA, 15 bp, Homo sapiens
cagcatatgcgccca

SEQ ID NO: 1478093 - DNA, 15 bp, Homo sapiens
ccagcatatgcgccc

SEQ ID NO: 1478094 - DNA, 15 bp, Homo sapiens
gccagcatatgcgcc

SEQ ID NO: 1478095 - DNA, 15 bp, Homo sapiens
cgccagcatatgcgc

SEQ ID NO: 1478096 - DNA, 15 bp, Homo sapiens
ccgccagcatatgcg

SEQ ID NO: 1478097 - DNA, 15 bp, Homo sapiens
gccgccagcatatgc

SEQ ID NO: 1478098 - DNA, 15 bp, Homo sapiens
ggccgccagcatatg

SEQ ID NO: 1478099 - DNA, 15 bp, Homo sapiens
gggccgccagcatat

SEQ ID NO: 1478100 - DNA, 15 bp, Homo sapiens
cgggccgccagcata

SEQ ID NO: 1478101 - DNA, 15 bp, Homo sapiens
ccgggccgccagcat

SEQ ID NO: 1478102 - DNA, 15 bp, Homo sapiens
cccgggccgccagca

SEQ ID NO: 1478103 - DNA, 15 bp, Homo sapiens
ccccgggccgccagc

SEQ ID NO: 1478104 - DNA, 15 bp, Homo sapiens
gccccgggccgccag

SEQ ID NO: 1478105 - DNA, 15 bp, Homo sapiens
agccccgggccgcca

SEQ ID NO: 1478106 - DNA, 15 bp, Homo sapiens
cagccccgggccgcc

SEQ ID NO: 1478107 - DNA, 15 bp, Homo sapiens
ccagccccgggccgc

SEQ ID NO: 1478108 - DNA, 15 bp, Homo sapiens
accagccccgggccg

SEQ ID NO: 1478109 - DNA, 15 bp, Homo sapiens
caccagccccgggcc

SEQ ID NO: 1478110 - DNA, 15 bp, Homo sapiens
ccaccagccccgggc

SEQ ID NO: 1478111 - DNA, 15 bp, Homo sapiens
gccaccagccccggg

SEQ ID NO: 1478112 - DNA, 15 bp, Homo sapiens
agccaccagccccgg

SEQ ID NO: 1478113 - DNA, 15 bp, Homo sapiens
cagccaccagccccg

SEQ ID NO: 1478114 - DNA, 15 bp, Homo sapiens
ccagccaccagcccc

SEQ ID NO: 1478115 - DNA, 15 bp, Homo sapiens
cccagccaccagccc

SEQ ID NO: 1478116 - DNA, 15 bp, Homo sapiens
gcccagccaccagcc

SEQ ID NO: 1478117 - DNA, 15 bp, Homo sapiens
agcccagccaccagc

SEQ ID NO: 1478118 - DNA, 15 bp, Homo sapiens
aagcccagccaccag

SEQ ID NO: 1478119 - DNA, 15 bp, Homo sapiens
aaagcccagccacca

SEQ ID NO: 1478120 - DNA, 15 bp, Homo sapiens
aaaagcccagccacc

SEQ ID NO: 1478121 - DNA, 15 bp, Homo sapiens
caaaagcccagccac

SEQ ID NO: 1478122 - DNA, 15 bp, Homo sapiens
ccaaaagcccagcca

SEQ ID NO: 1478123 - DNA, 15 bp, Homo sapiens
cccaaaagcccagcc

SEQ ID NO: 1478124 - DNA, 15 bp, Homo sapiens
acccaaaagcccagc

SEQ ID NO: 1478125 - DNA, 15 bp, Homo sapiens
aacccaaaagcccag

SEQ ID NO: 1478126 - DNA, 15 bp, Homo sapiens
gaacccaaaagccca

SEQ ID NO: 1478127 - DNA, 15 bp, Homo sapiens
cgaacccaaaagccc

SEQ ID NO: 1478128 - DNA, 15 bp, Homo sapiens
ccgaacccaaaagcc

SEQ ID NO: 1478129 - DNA, 15 bp, Homo sapiens
tccgaacccaaaagc

SEQ ID NO: 1478130 - DNA, 15 bp, Homo sapiens
ctccgaacccaaaag

SEQ ID NO: 1478131 - DNA, 15 bp, Homo sapiens
cctccgaacccaaaa

SEQ ID NO: 1478132 - DNA, 15 bp, Homo sapiens
tcctccgaacccaaa

SEQ ID NO: 1478133 - DNA, 15 bp, Homo sapiens
atcctccgaacccaa

SEQ ID NO: 1478134 - DNA, 15 bp, Homo sapiens
gatcctccgaaccca

SEQ ID NO: 1478135 - DNA, 15 bp, Homo sapiens
tgatcctccgaaccc

SEQ ID NO: 1478136 - DNA, 15 bp, Homo sapiens
gtgatcctccgaacc

SEQ ID NO: 1478137 - DNA, 15 bp, Homo sapiens
agtgatcctccgaac

SEQ ID NO: 1478138 - DNA, 15 bp, Homo sapiens
gagtgatcctccgaa

SEQ ID NO: 1478139 - DNA, 15 bp, Homo sapiens
cgagtgatcctccga

SEQ ID NO: 1478140 - DNA, 15 bp, Homo sapiens
ccgagtgatcctccg

SEQ ID NO: 1478141 - DNA, 15 bp, Homo sapiens
cccgagtgatcctcc

SEQ ID NO: 1478142 - DNA, 15 bp, Homo sapiens
acccgagtgatcctc

SEQ ID NO: 1478143 - DNA, 15 bp, Homo sapiens
aacccgagtgatcct

SEQ ID NO: 1478144 - DNA, 15 bp, Homo sapiens
caacccgagtgatcc

SEQ ID NO: 1478145 - DNA, 15 bp, Homo sapiens
ccaacccgagtgatc

SEQ ID NO: 1478146 - DNA, 15 bp, Homo sapiens
cccaacccgagtgat

SEQ ID NO: 1478147 - DNA, 15 bp, Homo sapiens
acccaacccgagtga

SEQ ID NO: 1478148 - DNA, 15 bp, Homo sapiens
cacccaacccgagtg

SEQ ID NO: 1478149 - DNA, 15 bp, Homo sapiens
gcacccaacccgagt

SEQ ID NO: 1478150 - DNA, 15 bp, Homo sapiens
cgcacccaacccgag

SEQ ID NO: 1478151 - DNA, 15 bp, Homo sapiens
gcgcacccaacccga

SEQ ID NO: 1478152 - DNA, 15 bp, Homo sapiens
ggcgcacccaacccg

SEQ ID NO: 1478153 - DNA, 15 bp, Homo sapiens
gggcgcacccaaccc

SEQ ID NO: 1478154 - DNA, 15 bp, Homo sapiens
agggcgcacccaacc

SEQ ID NO: 1478155 - DNA, 15 bp, Homo sapiens
cagggcgcacccaac

SEQ ID NO: 1478156 - DNA, 15 bp, Homo sapiens
gcagggcgcacccaa

SEQ ID NO: 1478157 - DNA, 15 bp, Homo sapiens
ggcagggcgcaccca

SEQ ID NO: 1478158 - DNA, 15 bp, Homo sapiens
gggcagggcgcaccc

SEQ ID NO: 1478159 - DNA, 15 bp, Homo sapiens
agggcagggcgcacc

SEQ ID NO: 1478160 - DNA, 15 bp, Homo sapiens
cagggcagggcgcac

SEQ ID NO: 1478161 - DNA, 15 bp, Homo sapiens
gcagggcagggcgca

SEQ ID NO: 1478162 - DNA, 15 bp, Homo sapiens
cgcagggcagggcgc

SEQ ID NO: 1478163 - DNA, 15 bp, Homo sapiens
tcgcagggcagggcg

SEQ ID NO: 1478164 - DNA, 15 bp, Homo sapiens
ctcgcagggcagggc

SEQ ID NO: 1478165 - DNA, 15 bp, Homo sapiens
gctcgcagggcaggg

SEQ ID NO: 1478166 - DNA, 15 bp, Homo sapiens
ggctcgcagggcagg

SEQ ID NO: 1478167 - DNA, 15 bp, Homo sapiens
gggctcgcagggcag

SEQ ID NO: 1478168 - DNA, 15 bp, Homo sapiens
cgggctcgcagggca

SEQ ID NO: 1478169 - DNA, 15 bp, Homo sapiens
ccgggctcgcagggc

SEQ ID NO: 1478170 - DNA, 15 bp, Homo sapiens
cccgggctcgcaggg

SEQ ID NO: 1478171 - DNA, 15 bp, Homo sapiens
gcccgggctcgcagg

SEQ ID NO: 1478172 - DNA, 15 bp, Homo sapiens
agcccgggctcgcag

SEQ ID NO: 1478173 - DNA, 15 bp, Homo sapiens
gagcccgggctcgca

SEQ ID NO: 1478174 - DNA, 15 bp, Homo sapiens
ggagcccgggctcgc

SEQ ID NO: 1478175 - DNA, 15 bp, Homo sapiens
gggagcccgggctcg

SEQ ID NO: 1478176 - DNA, 15 bp, Homo sapiens
cgggagcccgggctc

SEQ ID NO: 1478177 - DNA, 15 bp, Homo sapiens
tcgggagcccgggct

SEQ ID NO: 1478178 - DNA, 15 bp, Homo sapiens
gtcgggagcccgggc

SEQ ID NO: 1478179 - DNA, 15 bp, Homo sapiens
cgtcgggagcccggg

SEQ ID NO: 1478180 - DNA, 15 bp, Homo sapiens
gcgtcgggagcccgg

SEQ ID NO: 1478181 - DNA, 15 bp, Homo sapiens
ggcgtcgggagcccg

SEQ ID NO: 1478182 - DNA, 15 bp, Homo sapiens
aggcgtcgggagccc

SEQ ID NO: 1478183 - DNA, 15 bp, Homo sapiens
aaggcgtcgggagcc

SEQ ID NO: 1478184 - DNA, 15 bp, Homo sapiens
gaaggcgtcgggagc

SEQ ID NO: 1478185 - DNA, 15 bp, Homo sapiens
cgaaggcgtcgggag

SEQ ID NO: 1478186 - DNA, 15 bp, Homo sapiens
acgaaggcgtcggga

SEQ ID NO: 1478187 - DNA, 15 bp, Homo sapiens
cacgaaggcgtcggg

SEQ ID NO: 1478188 - DNA, 15 bp, Homo sapiens
ccacgaaggcgtcgg

SEQ ID NO: 1478189 - DNA, 15 bp, Homo sapiens
cccacgaaggcgtcg

SEQ ID NO: 1478190 - DNA, 15 bp, Homo sapiens
gcccacgaaggcgtc

SEQ ID NO: 1478191 - DNA, 15 bp, Homo sapiens
ggcccacgaaggcgt

SEQ ID NO: 1478192 - DNA, 15 bp, Homo sapiens
gggcccacgaaggcg

SEQ ID NO: 1478193 - DNA, 15 bp, Homo sapiens
tgggcccacgaaggc

SEQ ID NO: 1478194 - DNA, 15 bp, Homo sapiens
ctgggcccacgaagg

SEQ ID NO: 1478195 - DNA, 15 bp, Homo sapiens
gctgggcccacgaag

SEQ ID NO: 1478196 - DNA, 15 bp, Homo sapiens
ggctgggcccacgaa

SEQ ID NO: 1478197 - DNA, 15 bp, Homo sapiens
gggctgggcccacga

SEQ ID NO: 1478198 - DNA, 15 bp, Homo sapiens
agggctgggcccacg

SEQ ID NO: 1478199 - DNA, 15 bp, Homo sapiens
cagggctgggcccac

SEQ ID NO: 1478200 - DNA, 15 bp, Homo sapiens
ccagggctgggccca

SEQ ID NO: 1478201 - DNA, 15 bp, Homo sapiens
gccagggctgggccc

SEQ ID NO: 1478202 - DNA, 15 bp, Homo sapiens
agccagggctgggcc

SEQ ID NO: 1478203 - DNA, 15 bp, Homo sapiens
gagccagggctgggc

SEQ ID NO: 1478204 - DNA, 15 bp, Homo sapiens
ggagccagggctggg

SEQ ID NO: 1478205 - DNA, 15 bp, Homo sapiens
tggagccagggctgg

SEQ ID NO: 1478206 - DNA, 15 bp, Homo sapiens
ctggagccagggctg

SEQ ID NO: 1478207 - DNA, 15 bp, Homo sapiens
gctggagccagggct

SEQ ID NO: 1478208 - DNA, 15 bp, Homo sapiens
ggctggagccagggc

SEQ ID NO: 1478209 - DNA, 15 bp, Homo sapiens
gggctggagccaggg

SEQ ID NO: 1478210 - DNA, 15 bp, Homo sapiens
ggggctggagccagg

SEQ ID NO: 1478211 - DNA, 15 bp, Homo sapiens
cggggctggagccag

SEQ ID NO: 1478212 - DNA, 15 bp, Homo sapiens
ccggggctggagcca

SEQ ID NO: 1478213 - DNA, 15 bp, Homo sapiens
gccggggctggagcc

SEQ ID NO: 1478214 - DNA, 15 bp, Homo sapiens
ggccggggctggagc

SEQ ID NO: 1478215 - DNA, 15 bp, Homo sapiens
gggccggggctggag

SEQ ID NO: 1478216 - DNA, 15 bp, Homo sapiens
ggggccggggctgga

SEQ ID NO: 1478217 - DNA, 15 bp, Homo sapiens
gggggccggggctgg

SEQ ID NO: 1478218 - DNA, 15 bp, Homo sapiens
cgggggccggggctg

SEQ ID NO: 1478219 - DNA, 15 bp, Homo sapiens
tcgggggccggggct

SEQ ID NO: 1478220 - DNA, 15 bp, Homo sapiens
ctcgggggccggggc

SEQ ID NO: 1478221 - DNA, 15 bp, Homo sapiens
gctcgggggccgggg

SEQ ID NO: 1478222 - DNA, 15 bp, Homo sapiens
ggctcgggggccggg

SEQ ID NO: 1478223 - DNA, 15 bp, Homo sapiens
gggctcgggggccgg

SEQ ID NO: 1478224 - DNA, 15 bp, Homo sapiens
tgggctcgggggccg

SEQ ID NO: 1478225 - DNA, 15 bp, Homo sapiens
ttgggctcgggggcc

SEQ ID NO: 1478226 - DNA, 15 bp, Homo sapiens
cttgggctcgggggc

SEQ ID NO: 1478227 - DNA, 15 bp, Homo sapiens
ccttgggctcggggg

SEQ ID NO: 1478228 - DNA, 15 bp, Homo sapiens
gccttgggctcgggg

SEQ ID NO: 1478229 - DNA, 15 bp, Homo sapiens
cgccttgggctcggg

SEQ ID NO: 1478230 - DNA, 15 bp, Homo sapiens
gcgccttgggctcgg

SEQ ID NO: 1478231 - DNA, 15 bp, Homo sapiens
agcgccttgggctcg

SEQ ID NO: 1478232 - DNA, 15 bp, Homo sapiens
cagcgccttgggctc

SEQ ID NO: 1478233 - DNA, 15 bp, Homo sapiens
ccagcgccttgggct

SEQ ID NO: 1478234 - DNA, 15 bp, Homo sapiens
gccagcgccttgggc

SEQ ID NO: 1478235 - DNA, 15 bp, Homo sapiens
cgccagcgccttggg

SEQ ID NO: 1478236 - DNA, 15 bp, Homo sapiens
gcgccagcgccttgg

SEQ ID NO: 1478237 - DNA, 15 bp, Homo sapiens
agcgccagcgccttg

SEQ ID NO: 1478238 - DNA, 15 bp, Homo sapiens
cagcgccagcgcctt

SEQ ID NO: 1478239 - DNA, 15 bp, Homo sapiens
gcagcgccagcgcct

SEQ ID NO: 1478240 - DNA, 15 bp, Homo sapiens
tgcagcgccagcgcc

SEQ ID NO: 1478241 - DNA, 15 bp, Homo sapiens
ttgcagcgccagcgc

SEQ ID NO: 1478242 - DNA, 15 bp, Homo sapiens
gttgcagcgccagcg

SEQ ID NO: 1478243 - DNA, 15 bp, Homo sapiens
ggttgcagcgccagc

SEQ ID NO: 1478244 - DNA, 15 bp, Homo sapiens
cggttgcagcgccag

SEQ ID NO: 1478245 - DNA, 15 bp, Homo sapiens
ccggttgcagcgcca

SEQ ID NO: 1478246 - DNA, 15 bp, Homo sapiens
accggttgcagcgcc

SEQ ID NO: 1478247 - DNA, 15 bp, Homo sapiens
caccggttgcagcgc

SEQ ID NO: 1478248 - DNA, 15 bp, Homo sapiens
acaccggttgcagcg

SEQ ID NO: 1478249 - DNA, 15 bp, Homo sapiens
tacaccggttgcagc

SEQ ID NO: 1478250 - DNA, 15 bp, Homo sapiens
gtacaccggttgcag

SEQ ID NO: 1478251 - DNA, 15 bp, Homo sapiens
ggtacaccggttgca

SEQ ID NO: 1478252 - DNA, 15 bp, Homo sapiens
gggtacaccggttgc

SEQ ID NO: 1478253 - DNA, 15 bp, Homo sapiens
cgggtacaccggttg

SEQ ID NO: 1478254 - DNA, 15 bp, Homo sapiens
ccgggtacaccggtt

SEQ ID NO: 1478255 - DNA, 15 bp, Homo sapiens
cccgggtacaccggt

SEQ ID NO: 1478256 - DNA, 15 bp, Homo sapiens
ccccgggtacaccgg

SEQ ID NO: 1478257 - DNA, 15 bp, Homo sapiens
gccccgggtacaccg

SEQ ID NO: 1478258 - DNA, 15 bp, Homo sapiens
ggccccgggtacacc

SEQ ID NO: 1478259 - DNA, 15 bp, Homo sapiens
gggccccgggtacac

SEQ ID NO: 1478260 - DNA, 15 bp, Homo sapiens
cgggccccgggtaca

SEQ ID NO: 1478261 - DNA, 15 bp, Homo sapiens
ccgggccccgggtac

SEQ ID NO: 1478262 - DNA, 15 bp, Homo sapiens
gccgggccccgggta

SEQ ID NO: 1478263 - DNA, 15 bp, Homo sapiens
cgccgggccccgggt

SEQ ID NO: 1478264 - DNA, 15 bp, Homo sapiens
gcgccgggccccggg

SEQ ID NO: 1478265 - DNA, 15 bp, Homo sapiens
ggcgccgggccccgg

SEQ ID NO: 1478266 - DNA, 15 bp, Homo sapiens
cggcgccgggccccg

SEQ ID NO: 1478267 - DNA, 15 bp, Homo sapiens
ccggcgccgggcccc

SEQ ID NO: 1478268 - DNA, 15 bp, Homo sapiens
gccggcgccgggccc

SEQ ID NO: 1478269 - DNA, 15 bp, Homo sapiens
agccggcgccgggcc

SEQ ID NO: 1478270 - DNA, 15 bp, Homo sapiens
gagccggcgccgggc

SEQ ID NO: 1478271 - DNA, 15 bp, Homo sapiens
ggagccggcgccggg

SEQ ID NO: 1478272 - DNA, 15 bp, Homo sapiens
aggagccggcgccgg

SEQ ID NO: 1478273 - DNA, 15 bp, Homo sapiens
gaggagccggcgccg

SEQ ID NO: 1478274 - DNA, 15 bp, Homo sapiens
cgaggagccggcgcc

SEQ ID NO: 1478275 - DNA, 15 bp, Homo sapiens
ccgaggagccggcgc

SEQ ID NO: 1478276 - DNA, 15 bp, Homo sapiens
cccgaggagccggcg

SEQ ID NO: 1478277 - DNA, 15 bp, Homo sapiens
acccgaggagccggc

SEQ ID NO: 1478278 - DNA, 15 bp, Homo sapiens
cacccgaggagccgg

SEQ ID NO: 1478279 - DNA, 15 bp, Homo sapiens
ccacccgaggagccg

SEQ ID NO: 1478280 - DNA, 15 bp, Homo sapiens
gccacccgaggagcc

SEQ ID NO: 1478281 - DNA, 15 bp, Homo sapiens
agccacccgaggagc

SEQ ID NO: 1478282 - DNA, 15 bp, Homo sapiens
tagccacccgaggag

SEQ ID NO: 1478283 - DNA, 15 bp, Homo sapiens
gtagccacccgagga

SEQ ID NO: 1478284 - DNA, 15 bp, Homo sapiens
agtagccacccgagg

SEQ ID NO: 1478285 - DNA, 15 bp, Homo sapiens
aagtagccacccgag

SEQ ID NO: 1478286 - DNA, 15 bp, Homo sapiens
gaagtagccacccga

SEQ ID NO: 1478287 - DNA, 15 bp, Homo sapiens
ggaagtagccacccg

SEQ ID NO: 1478288 - DNA, 15 bp, Homo sapiens
gggaagtagccaccc

SEQ ID NO: 1478289 - DNA, 15 bp, Homo sapiens
cgggaagtagccacc

SEQ ID NO: 1478290 - DNA, 15 bp, Homo sapiens
gcgggaagtagccac

SEQ ID NO: 1478291 - DNA, 15 bp, Homo sapiens
cgcgggaagtagcca

SEQ ID NO: 1478292 - DNA, 15 bp, Homo sapiens
ccgcgggaagtagcc

SEQ ID NO: 1478293 - DNA, 15 bp, Homo sapiens
tccgcgggaagtagc

SEQ ID NO: 1478294 - DNA, 15 bp, Homo sapiens
gtccgcgggaagtag

SEQ ID NO: 1478295 - DNA, 15 bp, Homo sapiens
ggtccgcgggaagta

SEQ ID NO: 1478296 - DNA, 15 bp, Homo sapiens
cggtccgcgggaagt

SEQ ID NO: 1478297 - DNA, 15 bp, Homo sapiens
ccggtccgcgggaag

SEQ ID NO: 1478298 - DNA, 15 bp, Homo sapiens
cccggtccgcgggaa

SEQ ID NO: 1478299 - DNA, 15 bp, Homo sapiens
gcccggtccgcggga

SEQ ID NO: 1478300 - DNA, 15 bp, Homo sapiens
agcccggtccgcggg

SEQ ID NO: 1478301 - DNA, 15 bp, Homo sapiens
aagcccggtccgcgg

SEQ ID NO: 1478302 - DNA, 15 bp, Homo sapiens
aaagcccggtccgcg

SEQ ID NO: 1478303 - DNA, 15 bp, Homo sapiens
gaaagcccggtccgc

SEQ ID NO: 1478304 - DNA, 15 bp, Homo sapiens
tgaaagcccggtccg

SEQ ID NO: 1478305 - DNA, 15 bp, Homo sapiens
ctgaaagcccggtcc

SEQ ID NO: 1478306 - DNA, 15 bp, Homo sapiens
actgaaagcccggtc

SEQ ID NO: 1478307 - DNA, 15 bp, Homo sapiens
cactgaaagcccggt

SEQ ID NO: 1478308 - DNA, 15 bp, Homo sapiens
gcactgaaagcccgg

SEQ ID NO: 1478309 - DNA, 15 bp, Homo sapiens
ggcactgaaagcccg

SEQ ID NO: 1478310 - DNA, 15 bp, Homo sapiens
aggcactgaaagccc

SEQ ID NO: 1478311 - DNA, 15 bp, Homo sapiens
caggcactgaaagcc

SEQ ID NO: 1478312 - DNA, 15 bp, Homo sapiens
gcaggcactgaaagc

SEQ ID NO: 1478313 - DNA, 15 bp, Homo sapiens
cgcaggcactgaaag

SEQ ID NO: 1478314 - DNA, 15 bp, Homo sapiens
ccgcaggcactgaaa

SEQ ID NO: 1478315 - DNA, 15 bp, Homo sapiens
gccgcaggcactgaa

SEQ ID NO: 1478316 - DNA, 15 bp, Homo sapiens
cgccgcaggcactga

SEQ ID NO: 1478317 - DNA, 15 bp, Homo sapiens
acgccgcaggcactg

SEQ ID NO: 1478318 - DNA, 15 bp, Homo sapiens
gacgccgcaggcact

SEQ ID NO: 1478319 - DNA, 15 bp, Homo sapiens
cgacgccgcaggcac

SEQ ID NO: 1478320 - DNA, 15 bp, Homo sapiens
ccgacgccgcaggca

SEQ ID NO: 1478321 - DNA, 15 bp, Homo sapiens
cccgacgccgcaggc

SEQ ID NO: 1478322 - DNA, 15 bp, Homo sapiens
gcccgacgccgcagg

SEQ ID NO: 1478323 - DNA, 15 bp, Homo sapiens
cgcccgacgccgcag

SEQ ID NO: 1478324 - DNA, 15 bp, Homo sapiens
gcgcccgacgccgca

SEQ ID NO: 1478325 - DNA, 15 bp, Homo sapiens
ggcgcccgacgccgc

SEQ ID NO: 1478326 - DNA, 15 bp, Homo sapiens
gggcgcccgacgccg

SEQ ID NO: 1478327 - DNA, 15 bp, Homo sapiens
ggggcgcccgacgcc

SEQ ID NO: 1478328 - DNA, 15 bp, Homo sapiens
gggggcgcccgacgc

SEQ ID NO: 1478329 - DNA, 15 bp, Homo sapiens
agggggcgcccgacg

SEQ ID NO: 1478330 - DNA, 15 bp, Homo sapiens
tagggggcgcccgac

SEQ ID NO: 1478331 - DNA, 15 bp, Homo sapiens
gtagggggcgcccga

SEQ ID NO: 1478332 - DNA, 15 bp, Homo sapiens
cgtagggggcgcccg

SEQ ID NO: 1478333 - DNA, 15 bp, Homo sapiens
ccgtagggggcgccc

SEQ ID NO: 1478334 - DNA, 15 bp, Homo sapiens
cccgtagggggcgcc

SEQ ID NO: 1478335 - DNA, 15 bp, Homo sapiens
gcccgtagggggcgc

SEQ ID NO: 1478336 - DNA, 15 bp, Homo sapiens
agcccgtagggggcg

SEQ ID NO: 1478337 - DNA, 15 bp, Homo sapiens
tagcccgtagggggc

SEQ ID NO: 1478338 - DNA, 15 bp, Homo sapiens
gtagcccgtaggggg

SEQ ID NO: 1478339 - DNA, 15 bp, Homo sapiens
agtagcccgtagggg

SEQ ID NO: 1478340 - DNA, 15 bp, Homo sapiens
cagtagcccgtaggg

SEQ ID NO: 1478341 - DNA, 15 bp, Homo sapiens
acagtagcccgtagg

SEQ ID NO: 1478342 - DNA, 15 bp, Homo sapiens
gacagtagcccgtag

SEQ ID NO: 1478343 - DNA, 15 bp, Homo sapiens
ggacagtagcccgta

SEQ ID NO: 1478344 - DNA, 15 bp, Homo sapiens
cggacagtagcccgt

SEQ ID NO: 1478345 - DNA, 15 bp, Homo sapiens
ccggacagtagcccg

SEQ ID NO: 1478346 - DNA, 15 bp, Homo sapiens
cccggacagtagccc

SEQ ID NO: 1478347 - DNA, 15 bp, Homo sapiens
acccggacagtagcc

SEQ ID NO: 1478348 - DNA, 15 bp, Homo sapiens
tacccggacagtagc

SEQ ID NO: 1478349 - DNA, 15 bp, Homo sapiens
gtacccggacagtag

SEQ ID NO: 1478350 - DNA, 15 bp, Homo sapiens
ggtacccggacagta

SEQ ID NO: 1478351 - DNA, 15 bp, Homo sapiens
gggtacccggacagt

SEQ ID NO: 1478352 - DNA, 15 bp, Homo sapiens
ggggtacccggacag

SEQ ID NO: 1478353 - DNA, 15 bp, Homo sapiens
cggggtacccggaca

SEQ ID NO: 1478354 - DNA, 15 bp, Homo sapiens
gcggggtacccggac

SEQ ID NO: 1478355 - DNA, 15 bp, Homo sapiens
cgcggggtacccgga

SEQ ID NO: 1478356 - DNA, 15 bp, Homo sapiens
tcgcggggtacccgg

SEQ ID NO: 1478357 - DNA, 15 bp, Homo sapiens
atcgcggggtacccg

SEQ ID NO: 1478358 - DNA, 15 bp, Homo sapiens
catcgcggggtaccc

SEQ ID NO: 1478359 - DNA, 15 bp, Homo sapiens
acatcgcggggtacc

SEQ ID NO: 1478360 - DNA, 15 bp, Homo sapiens
tacatcgcggggtac

SEQ ID NO: 1478361 - DNA, 15 bp, Homo sapiens
gtacatcgcggggta

SEQ ID NO: 1478362 - DNA, 15 bp, Homo sapiens
ggtacatcgcggggt

SEQ ID NO: 1478363 - DNA, 15 bp, Homo sapiens
gggtacatcgcgggg

SEQ ID NO: 1478364 - DNA, 15 bp, Homo sapiens
cgggtacatcgcggg

SEQ ID NO: 1478365 - DNA, 15 bp, Homo sapiens
ccgggtacatcgcgg

SEQ ID NO: 1478366 - DNA, 15 bp, Homo sapiens
gccgggtacatcgcg

SEQ ID NO: 1478367 - DNA, 15 bp, Homo sapiens
cgccgggtacatcgc

SEQ ID NO: 1478368 - DNA, 15 bp, Homo sapiens
gcgccgggtacatcg

SEQ ID NO: 1478369 - DNA, 15 bp, Homo sapiens
ggcgccgggtacatc

SEQ ID NO: 1478370 - DNA, 15 bp, Homo sapiens
aggcgccgggtacat

SEQ ID NO: 1478371 - DNA, 15 bp, Homo sapiens
gaggcgccgggtaca

SEQ ID NO: 1478372 - DNA, 15 bp, Homo sapiens
tgaggcgccgggtac

SEQ ID NO: 1478373 - DNA, 15 bp, Homo sapiens
ctgaggcgccgggta

SEQ ID NO: 1478374 - DNA, 15 bp, Homo sapiens
actgaggcgccgggt

SEQ ID NO: 1478375 - DNA, 15 bp, Homo sapiens
tactgaggcgccggg

SEQ ID NO: 1478376 - DNA, 15 bp, Homo sapiens
gtactgaggcgccgg

SEQ ID NO: 1478377 - DNA, 15 bp, Homo sapiens
ggtactgaggcgccg

SEQ ID NO: 1478378 - DNA, 15 bp, Homo sapiens
tggtactgaggcgcc

SEQ ID NO: 1478379 - DNA, 15 bp, Homo sapiens
ttggtactgaggcgc

SEQ ID NO: 1478380 - DNA, 15 bp, Homo sapiens
cttggtactgaggcg

SEQ ID NO: 1478381 - DNA, 15 bp, Homo sapiens
ccttggtactgaggc

SEQ ID NO: 1478382 - DNA, 15 bp, Homo sapiens
cccttggtactgagg

SEQ ID NO: 1478383 - DNA, 15 bp, Homo sapiens
gcccttggtactgag

SEQ ID NO: 1478384 - DNA, 15 bp, Homo sapiens
tgcccttggtactga

SEQ ID NO: 1478385 - DNA, 15 bp, Homo sapiens
gtgcccttggtactg

SEQ ID NO: 1478386 - DNA, 15 bp, Homo sapiens
agtgcccttggtact

SEQ ID NO: 1478387 - DNA, 15 bp, Homo sapiens
aagtgcccttggtac

SEQ ID NO: 1478388 - DNA, 15 bp, Homo sapiens
gaagtgcccttggta

SEQ ID NO: 1478389 - DNA, 15 bp, Homo sapiens
ggaagtgcccttggt

SEQ ID NO: 1478390 - DNA, 15 bp, Homo sapiens
tggaagtgcccttgg

SEQ ID NO: 1478391 - DNA, 15 bp, Homo sapiens
ctggaagtgcccttg

SEQ ID NO: 1478392 - DNA, 15 bp, Homo sapiens
gctggaagtgccctt

SEQ ID NO: 1478393 - DNA, 15 bp, Homo sapiens
agctggaagtgccct

SEQ ID NO: 1478394 - DNA, 15 bp, Homo sapiens
gagctggaagtgccc

SEQ ID NO: 1478395 - DNA, 15 bp, Homo sapiens
agagctggaagtgcc

SEQ ID NO: 1478396 - DNA, 15 bp, Homo sapiens
aagagctggaagtgc

SEQ ID NO: 1478397 - DNA, 15 bp, Homo sapiens
gaagagctggaagtg

SEQ ID NO: 1478398 - DNA, 15 bp, Homo sapiens
ggaagagctggaagt

SEQ ID NO: 1478399 - DNA, 15 bp, Homo sapiens
cggaagagctggaag

SEQ ID NO: 1478400 - DNA, 15 bp, Homo sapiens
gcggaagagctggaa

SEQ ID NO: 1478401 - DNA, 15 bp, Homo sapiens
cgcggaagagctgga

SEQ ID NO: 1478402 - DNA, 15 bp, Homo sapiens
ccgcggaagagctgg

SEQ ID NO: 1478403 - DNA, 15 bp, Homo sapiens
cccgcggaagagctg

SEQ ID NO: 1478404 - DNA, 15 bp, Homo sapiens
gcccgcggaagagct

SEQ ID NO: 1478405 - DNA, 15 bp, Homo sapiens
agcccgcggaagagc

SEQ ID NO: 1478406 - DNA, 15 bp, Homo sapiens
gagcccgcggaagag

SEQ ID NO: 1478407 - DNA, 15 bp, Homo sapiens
ggagcccgcggaaga

SEQ ID NO: 1478408 - DNA, 15 bp, Homo sapiens
tggagcccgcggaag

SEQ ID NO: 1478409 - DNA, 15 bp, Homo sapiens
ctggagcccgcggaa

SEQ ID NO: 1478410 - DNA, 15 bp, Homo sapiens
cctggagcccgcgga

SEQ ID NO: 1478411 - DNA, 15 bp, Homo sapiens
ccctggagcccgcgg

SEQ ID NO: 1478412 - DNA, 15 bp, Homo sapiens
tccctggagcccgcg

SEQ ID NO: 1478413 - DNA, 15 bp, Homo sapiens
gtccctggagcccgc

SEQ ID NO: 1478414 - DNA, 15 bp, Homo sapiens
ggtccctggagcccg

SEQ ID NO: 1478415 - DNA, 15 bp, Homo sapiens
gggtccctggagccc

SEQ ID NO: 1478416 - DNA, 15 bp, Homo sapiens
cgggtccctggagcc

SEQ ID NO: 1478417 - DNA, 15 bp, Homo sapiens
gcgggtccctggagc

SEQ ID NO: 1478418 - DNA, 15 bp, Homo sapiens
cgcgggtccctggag

SEQ ID NO: 1478419 - DNA, 15 bp, Homo sapiens
gcgcgggtccctgga

SEQ ID NO: 1478420 - DNA, 15 bp, Homo sapiens
ggcgcgggtccctgg

SEQ ID NO: 1478421 - DNA, 15 bp, Homo sapiens
gggcgcgggtccctg

SEQ ID NO: 1478422 - DNA, 15 bp, Homo sapiens
cgggcgcgggtccct

SEQ ID NO: 1478423 - DNA, 15 bp, Homo sapiens
ccgggcgcgggtccc

SEQ ID NO: 1478424 - DNA, 15 bp, Homo sapiens
accgggcgcgggtcc

SEQ ID NO: 1478425 - DNA, 15 bp, Homo sapiens
gaccgggcgcgggtc

SEQ ID NO: 1478426 - DNA, 15 bp, Homo sapiens
ggaccgggcgcgggt

SEQ ID NO: 1478427 - DNA, 15 bp, Homo sapiens
gggaccgggcgcggg

SEQ ID NO: 1478428 - DNA, 15 bp, Homo sapiens
cgggaccgggcgcgg

SEQ ID NO: 1478429 - DNA, 15 bp, Homo sapiens
gcgggaccgggcgcg

SEQ ID NO: 1478430 - DNA, 15 bp, Homo sapiens
ggcgggaccgggcgc

SEQ ID NO: 1478431 - DNA, 15 bp, Homo sapiens
tggcgggaccgggcg

SEQ ID NO: 1478432 - DNA, 15 bp, Homo sapiens
gtggcgggaccgggc

SEQ ID NO: 1478433 - DNA, 15 bp, Homo sapiens
cgtggcgggaccggg

SEQ ID NO: 1478434 - DNA, 15 bp, Homo sapiens
acgtggcgggaccgg

SEQ ID NO: 1478435 - DNA, 15 bp, Homo sapiens
gacgtggcgggaccg

SEQ ID NO: 1478436 - DNA, 15 bp, Homo sapiens
ggacgtggcgggacc

SEQ ID NO: 1478437 - DNA, 15 bp, Homo sapiens
gggacgtggcgggac

SEQ ID NO: 1478438 - DNA, 15 bp, Homo sapiens
ggggacgtggcggga

SEQ ID NO: 1478439 - DNA, 15 bp, Homo sapiens
gggggacgtggcggg

SEQ ID NO: 1478440 - DNA, 15 bp, Homo sapiens
agggggacgtggcgg

SEQ ID NO: 1478441 - DNA, 15 bp, Homo sapiens
gagggggacgtggcg

SEQ ID NO: 1478442 - DNA, 15 bp, Homo sapiens
ggagggggacgtggc

SEQ ID NO: 1478443 - DNA, 15 bp, Homo sapiens
aggagggggacgtgg

SEQ ID NO: 1478444 - DNA, 15 bp, Homo sapiens
aaggagggggacgtg

SEQ ID NO: 1478445 - DNA, 15 bp, Homo sapiens
gaaggagggggacgt

SEQ ID NO: 1478446 - DNA, 15 bp, Homo sapiens
ggaaggagggggacg

SEQ ID NO: 1478447 - DNA, 15 bp, Homo sapiens
aggaaggagggggac

SEQ ID NO: 1478448 - DNA, 15 bp, Homo sapiens
caggaaggaggggga

SEQ ID NO: 1478449 - DNA, 15 bp, Homo sapiens
tcaggaaggaggggg

SEQ ID NO: 1478450 - DNA, 15 bp, Homo sapiens
ctcaggaaggagggg

SEQ ID NO: 1478451 - DNA, 15 bp, Homo sapiens
actcaggaaggaggg

SEQ ID NO: 1478452 - DNA, 15 bp, Homo sapiens
aactcaggaaggagg

SEQ ID NO: 1478453 - DNA, 15 bp, Homo sapiens
caactcaggaaggag

SEQ ID NO: 1478454 - DNA, 15 bp, Homo sapiens
acaactcaggaagga

SEQ ID NO: 1478455 - DNA, 15 bp, Homo sapiens
aacaactcaggaagg

SEQ ID NO: 1478456 - DNA, 15 bp, Homo sapiens
aaacaactcaggaag

SEQ ID NO: 1478457 - DNA, 15 bp, Homo sapiens
caaacaactcaggaa

SEQ ID NO: 1478458 - DNA, 15 bp, Homo sapiens
ccaaacaactcagga

SEQ ID NO: 1478459 - DNA, 15 bp, Homo sapiens
cccaaacaactcagg

SEQ ID NO: 1478460 - DNA, 15 bp, Homo sapiens
tcccaaacaactcag

SEQ ID NO: 1478461 - DNA, 15 bp, Homo sapiens
gtcccaaacaactca

SEQ ID NO: 1478462 - DNA, 15 bp, Homo sapiens
ggtcccaaacaactc

SEQ ID NO: 1478463 - DNA, 15 bp, Homo sapiens
gggtcccaaacaact

SEQ ID NO: 1478464 - DNA, 15 bp, Homo sapiens
cgggtcccaaacaac

SEQ ID NO: 1478465 - DNA, 15 bp, Homo sapiens
ccgggtcccaaacaa

SEQ ID NO: 1478466 - DNA, 15 bp, Homo sapiens
cccgggtcccaaaca

SEQ ID NO: 1478467 - DNA, 15 bp, Homo sapiens
tcccgggtcccaaac

SEQ ID NO: 1478468 - DNA, 15 bp, Homo sapiens
gtcccgggtcccaaa

SEQ ID NO: 1478469 - DNA, 15 bp, Homo sapiens
cgtcccgggtcccaa

SEQ ID NO: 1478470 - DNA, 15 bp, Homo sapiens
ccgtcccgggtccca

SEQ ID NO: 1478471 - DNA, 15 bp, Homo sapiens
accgtcccgggtccc

SEQ ID NO: 1478472 - DNA, 15 bp, Homo sapiens
caccgtcccgggtcc

SEQ ID NO: 1478473 - DNA, 15 bp, Homo sapiens
ccaccgtcccgggtc

SEQ ID NO: 1478474 - DNA, 15 bp, Homo sapiens
cccaccgtcccgggt

SEQ ID NO: 1478475 - DNA, 15 bp, Homo sapiens
gcccaccgtcccggg

SEQ ID NO: 1478476 - DNA, 15 bp, Homo sapiens
tgcccaccgtcccgg

SEQ ID NO: 1478477 - DNA, 15 bp, Homo sapiens
gtgcccaccgtcccg

SEQ ID NO: 1478478 - DNA, 15 bp, Homo sapiens
agtgcccaccgtccc

SEQ ID NO: 1478479 - DNA, 15 bp, Homo sapiens
cagtgcccaccgtcc

SEQ ID NO: 1478480 - DNA, 15 bp, Homo sapiens
ccagtgcccaccgtc

SEQ ID NO: 1478481 - DNA, 15 bp, Homo sapiens
tccagtgcccaccgt

SEQ ID NO: 1478482 - DNA, 15 bp, Homo sapiens
gtccagtgcccaccg

SEQ ID NO: 1478483 - DNA, 15 bp, Homo sapiens
agtccagtgcccacc

SEQ ID NO: 1478484 - DNA, 15 bp, Homo sapiens
gagtccagtgcccac

SEQ ID NO: 1478485 - DNA, 15 bp, Homo sapiens
cgagtccagtgccca

SEQ ID NO: 1478486 - DNA, 15 bp, Homo sapiens
ccgagtccagtgccc

SEQ ID NO: 1478487 - DNA, 15 bp, Homo sapiens
cccgagtccagtgcc

SEQ ID NO: 1478488 - DNA, 15 bp, Homo sapiens
ccccgagtccagtgc

SEQ ID NO: 1478489 - DNA, 15 bp, Homo sapiens
cccccgagtccagtg

SEQ ID NO: 1478490 - DNA, 15 bp, Homo sapiens
ccccccgagtccagt

SEQ ID NO: 1478491 - DNA, 15 bp, Homo sapiens
tccccccgagtccag

SEQ ID NO: 1478492 - DNA, 15 bp, Homo sapiens
gtccccccgagtcca

SEQ ID NO: 1478493 - DNA, 15 bp, Homo sapiens
agtccccccgagtcc

SEQ ID NO: 1478494 - DNA, 15 bp, Homo sapiens
cagtccccccgagtc

SEQ ID NO: 1478495 - DNA, 15 bp, Homo sapiens
gcagtccccccgagt

SEQ ID NO: 1478496 - DNA, 15 bp, Homo sapiens
tgcagtccccccgag

SEQ ID NO: 1478497 - DNA, 15 bp, Homo sapiens
ctgcagtccccccga

SEQ ID NO: 1478498 - DNA, 15 bp, Homo sapiens
tctgcagtccccccg

SEQ ID NO: 1478499 - DNA, 15 bp, Homo sapiens
ctctgcagtcccccc

SEQ ID NO: 1478500 - DNA, 15 bp, Homo sapiens
cctctgcagtccccc

SEQ ID NO: 1478501 - DNA, 15 bp, Homo sapiens
tcctctgcagtcccc

SEQ ID NO: 1478502 - DNA, 15 bp, Homo sapiens
atcctctgcagtccc

SEQ ID NO: 1478503 - DNA, 15 bp, Homo sapiens
gatcctctgcagtcc

SEQ ID NO: 1478504 - DNA, 15 bp, Homo sapiens
ggatcctctgcagtc

SEQ ID NO: 1478505 - DNA, 15 bp, Homo sapiens
tggatcctctgcagt

SEQ ID NO: 1478506 - DNA, 15 bp, Homo sapiens
ctggatcctctgcag

SEQ ID NO: 1478507 - DNA, 15 bp, Homo sapiens
cctggatcctctgca

SEQ ID NO: 1478508 - DNA, 15 bp, Homo sapiens
acctggatcctctgc

SEQ ID NO: 1478509 - DNA, 15 bp, Homo sapiens
cacctggatcctctg

SEQ ID NO: 1478510 - DNA, 15 bp, Homo sapiens
acacctggatcctct

SEQ ID NO: 1478511 - DNA, 15 bp, Homo sapiens
cacacctggatcctc

SEQ ID NO: 1478512 - DNA, 15 bp, Homo sapiens
tcacacctggatcct

SEQ ID NO: 1478513 - DNA, 15 bp, Homo sapiens
atcacacctggatcc

SEQ ID NO: 1478514 - DNA, 15 bp, Homo sapiens
tatcacacctggatc

SEQ ID NO: 1478515 - DNA, 15 bp, Homo sapiens
ctatcacacctggat

SEQ ID NO: 1478516 - DNA, 15 bp, Homo sapiens
gctatcacacctgga

SEQ ID NO: 1478517 - DNA, 15 bp, Homo sapiens
ggctatcacacctgg

SEQ ID NO: 1478518 - DNA, 15 bp, Homo sapiens
cggctatcacacctg

SEQ ID NO: 1478519 - DNA, 15 bp, Homo sapiens
tcggctatcacacct

SEQ ID NO: 1478520 - DNA, 15 bp, Homo sapiens
ctcggctatcacacc

SEQ ID NO: 1478521 - DNA, 15 bp, Homo sapiens
tctcggctatcacac

SEQ ID NO: 1478522 - DNA, 15 bp, Homo sapiens
gtctcggctatcaca

SEQ ID NO: 1478523 - DNA, 15 bp, Homo sapiens
ggtctcggctatcac

SEQ ID NO: 1478524 - DNA, 15 bp, Homo sapiens
cggtctcggctatca

SEQ ID NO: 1478525 - DNA, 15 bp, Homo sapiens
gcggtctcggctatc

SEQ ID NO: 1478526 - DNA, 15 bp, Homo sapiens
cgcggtctcggctat

SEQ ID NO: 1478527 - DNA, 15 bp, Homo sapiens
gcgcggtctcggcta

SEQ ID NO: 1478528 - DNA, 15 bp, Homo sapiens
ggcgcggtctcggct

SEQ ID NO: 1478529 - DNA, 15 bp, Homo sapiens
tggcgcggtctcggc

SEQ ID NO: 1478530 - DNA, 15 bp, Homo sapiens
atggcgcggtctcgg

SEQ ID NO: 1478531 - DNA, 15 bp, Homo sapiens
gatggcgcggtctcg

SEQ ID NO: 1478532 - DNA, 15 bp, Homo sapiens
ggatggcgcggtctc

SEQ ID NO: 1478533 - DNA, 15 bp, Homo sapiens
tggatggcgcggtct

SEQ ID NO: 1478534 - DNA, 15 bp, Homo sapiens
ttggatggcgcggtc

SEQ ID NO: 1478535 - DNA, 15 bp, Homo sapiens
cttggatggcgcggt

SEQ ID NO: 1478536 - DNA, 15 bp, Homo sapiens
gcttggatggcgcgg

SEQ ID NO: 1478537 - DNA, 15 bp, Homo sapiens
cgcttggatggcgcg

SEQ ID NO: 1478538 - DNA, 15 bp, Homo sapiens
tcgcttggatggcgc

SEQ ID NO: 1478539 - DNA, 15 bp, Homo sapiens
ctcgcttggatggcg

SEQ ID NO: 1478540 - DNA, 15 bp, Homo sapiens
cctcgcttggatggc

SEQ ID NO: 1478541 - DNA, 15 bp, Homo sapiens
gcctcgcttggatgg

SEQ ID NO: 1478542 - DNA, 15 bp, Homo sapiens
ggcctcgcttggatg

SEQ ID NO: 1478543 - DNA, 15 bp, Homo sapiens
cggcctcgcttggat

SEQ ID NO: 1478544 - DNA, 15 bp, Homo sapiens
tcggcctcgcttgga

SEQ ID NO: 1478545 - DNA, 15 bp, Homo sapiens
gtcggcctcgcttgg

SEQ ID NO: 1478546 - DNA, 15 bp, Homo sapiens
cgtcggcctcgcttg

SEQ ID NO: 1478547 - DNA, 15 bp, Homo sapiens
acgtcggcctcgctt

SEQ ID NO: 1478548 - DNA, 15 bp, Homo sapiens
aacgtcggcctcgct

SEQ ID NO: 1478549 - DNA, 15 bp, Homo sapiens
gaacgtcggcctcgc

SEQ ID NO: 1478550 - DNA, 15 bp, Homo sapiens
cgaacgtcggcctcg

SEQ ID NO: 1478551 - DNA, 15 bp, Homo sapiens
acgaacgtcggcctc

SEQ ID NO: 1478552 - DNA, 15 bp, Homo sapiens
cacgaacgtcggcct

SEQ ID NO: 1478553 - DNA, 15 bp, Homo sapiens
ccacgaacgtcggcc

SEQ ID NO: 1478554 - DNA, 15 bp, Homo sapiens
cccacgaacgtcggc

SEQ ID NO: 1478555 - DNA, 15 bp, Homo sapiens
gcccacgaacgtcgg

SEQ ID NO: 1478556 - DNA, 15 bp, Homo sapiens
cgcccacgaacgtcg

SEQ ID NO: 1478557 - DNA, 15 bp, Homo sapiens
gcgcccacgaacgtc

SEQ ID NO: 1478558 - DNA, 15 bp, Homo sapiens
cgcgcccacgaacgt

SEQ ID NO: 1478559 - DNA, 15 bp, Homo sapiens
gcgcgcccacgaacg

SEQ ID NO: 1478560 - DNA, 15 bp, Homo sapiens
tgcgcgcccacgaac

SEQ ID NO: 1478561 - DNA, 15 bp, Homo sapiens
ttgcgcgcccacgaa

SEQ ID NO: 1478562 - DNA, 15 bp, Homo sapiens
cttgcgcgcccacga

SEQ ID NO: 1478563 - DNA, 15 bp, Homo sapiens
tcttgcgcgcccacg

SEQ ID NO: 1478564 - DNA, 15 bp, Homo sapiens
ctcttgcgcgcccac

SEQ ID NO: 1478565 - DNA, 15 bp, Homo sapiens
cctcttgcgcgccca

SEQ ID NO: 1478566 - DNA, 15 bp, Homo sapiens
gcctcttgcgcgccc

SEQ ID NO: 1478567 - DNA, 15 bp, Homo sapiens
tgcctcttgcgcgcc

SEQ ID NO: 1478568 - DNA, 15 bp, Homo sapiens
ctgcctcttgcgcgc

SEQ ID NO: 1478569 - DNA, 15 bp, Homo sapiens
cctgcctcttgcgcg

SEQ ID NO: 1478570 - DNA, 15 bp, Homo sapiens
gcctgcctcttgcgc

SEQ ID NO: 1478571 - DNA, 15 bp, Homo sapiens
tgcctgcctcttgcg

SEQ ID NO: 1478572 - DNA, 15 bp, Homo sapiens
ctgcctgcctcttgc

SEQ ID NO: 1478573 - DNA, 15 bp, Homo sapiens
gctgcctgcctcttg

SEQ ID NO: 1478574 - DNA, 15 bp, Homo sapiens
cgctgcctgcctctt

SEQ ID NO: 1478575 - DNA, 15 bp, Homo sapiens
gcgctgcctgcctct

SEQ ID NO: 1478576 - DNA, 15 bp, Homo sapiens
tgcgctgcctgcctc

SEQ ID NO: 1478577 - DNA, 15 bp, Homo sapiens
gtgcgctgcctgcct

SEQ ID NO: 1478578 - DNA, 15 bp, Homo sapiens
tgtgcgctgcctgcc

SEQ ID NO: 1478579 - DNA, 15 bp, Homo sapiens
gtgtgcgctgcctgc

SEQ ID NO: 1478580 - DNA, 15 bp, Homo sapiens
cgtgtgcgctgcctg

SEQ ID NO: 1478581 - DNA, 15 bp, Homo sapiens
acgtgtgcgctgcct

SEQ ID NO: 1478582 - DNA, 15 bp, Homo sapiens
cacgtgtgcgctgcc

SEQ ID NO: 1478583 - DNA, 15 bp, Homo sapiens
gcacgtgtgcgctgc

SEQ ID NO: 1478584 - DNA, 15 bp, Homo sapiens
cgcacgtgtgcgctg

SEQ ID NO: 1478585 - DNA, 15 bp, Homo sapiens
gcgcacgtgtgcgct

SEQ ID NO: 1478586 - DNA, 15 bp, Homo sapiens
cgcgcacgtgtgcgc

SEQ ID NO: 1478587 - DNA, 15 bp, Homo sapiens
gcgcgcacgtgtgcg

SEQ ID NO: 1478588 - DNA, 15 bp, Homo sapiens
tgcgcgcacgtgtgc

SEQ ID NO: 1478589 - DNA, 15 bp, Homo sapiens
gtgcgcgcacgtgtg

SEQ ID NO: 1478590 - DNA, 15 bp, Homo sapiens
ggtgcgcgcacgtgt

SEQ ID NO: 1478591 - DNA, 15 bp, Homo sapiens
gggtgcgcgcacgtg

SEQ ID NO: 1478592 - DNA, 15 bp, Homo sapiens
cgggtgcgcgcacgt

SEQ ID NO: 1478593 - DNA, 15 bp, Homo sapiens
ccgggtgcgcgcacg

SEQ ID NO: 1478594 - DNA, 15 bp, Homo sapiens
cccgggtgcgcgcac

SEQ ID NO: 1478595 - DNA, 15 bp, Homo sapiens
acccgggtgcgcgca

SEQ ID NO: 1478596 - DNA, 15 bp, Homo sapiens
aacccgggtgcgcgc

SEQ ID NO: 1478597 - DNA, 15 bp, Homo sapiens
caacccgggtgcgcg

SEQ ID NO: 1478598 - DNA, 15 bp, Homo sapiens
gcaacccgggtgcgc

SEQ ID NO: 1478599 - DNA, 15 bp, Homo sapiens
cgcaacccgggtgcg

SEQ ID NO: 1478600 - DNA, 15 bp, Homo sapiens
ccgcaacccgggtgc

SEQ ID NO: 1478601 - DNA, 15 bp, Homo sapiens
gccgcaacccgggtg

SEQ ID NO: 1478602 - DNA, 15 bp, Homo sapiens
tgccgcaacccgggt

SEQ ID NO: 1478603 - DNA, 15 bp, Homo sapiens
ttgccgcaacccggg

SEQ ID NO: 1478604 - DNA, 15 bp, Homo sapiens
cttgccgcaacccgg

SEQ ID NO: 1478605 - DNA, 15 bp, Homo sapiens
tcttgccgcaacccg

SEQ ID NO: 1478606 - DNA, 15 bp, Homo sapiens
ctcttgccgcaaccc

SEQ ID NO: 1478607 - DNA, 15 bp, Homo sapiens
gctcttgccgcaacc

SEQ ID NO: 1478608 - DNA, 15 bp, Homo sapiens
agctcttgccgcaac

SEQ ID NO: 1478609 - DNA, 15 bp, Homo sapiens
tagctcttgccgcaa

SEQ ID NO: 1478610 - DNA, 15 bp, Homo sapiens
gtagctcttgccgca

SEQ ID NO: 1478611 - DNA, 15 bp, Homo sapiens
tgtagctcttgccgc

SEQ ID NO: 1478612 - DNA, 15 bp, Homo sapiens
gtgtagctcttgccg

SEQ ID NO: 1478613 - DNA, 15 bp, Homo sapiens
ggtgtagctcttgcc

SEQ ID NO: 1478614 - DNA, 15 bp, Homo sapiens
tggtgtagctcttgc

SEQ ID NO: 1478615 - DNA, 15 bp, Homo sapiens
ttggtgtagctcttg

SEQ ID NO: 1478616 - DNA, 15 bp, Homo sapiens
cttggtgtagctctt

SEQ ID NO: 1478617 - DNA, 15 bp, Homo sapiens
tcttggtgtagctct

SEQ ID NO: 1478618 - DNA, 15 bp, Homo sapiens
ctcttggtgtagctc

SEQ ID NO: 1478619 - DNA, 15 bp, Homo sapiens
gctcttggtgtagct

SEQ ID NO: 1478620 - DNA, 15 bp, Homo sapiens
agctcttggtgtagc

SEQ ID NO: 1478621 - DNA, 15 bp, Homo sapiens
gagctcttggtgtag

SEQ ID NO: 1478622 - DNA, 15 bp, Homo sapiens
ggagctcttggtgta

SEQ ID NO: 1478623 - DNA, 15 bp, Homo sapiens
gggagctcttggtgt

SEQ ID NO: 1478624 - DNA, 15 bp, Homo sapiens
tgggagctcttggtg

SEQ ID NO: 1478625 - DNA, 15 bp, Homo sapiens
gtgggagctcttggt

SEQ ID NO: 1478626 - DNA, 15 bp, Homo sapiens
ggtgggagctcttgg

SEQ ID NO: 1478627 - DNA, 15 bp, Homo sapiens
aggtgggagctcttg

SEQ ID NO: 1478628 - DNA, 15 bp, Homo sapiens
caggtgggagctctt

SEQ ID NO: 1478629 - DNA, 15 bp, Homo sapiens
tcaggtgggagctct

SEQ ID NO: 1478630 - DNA, 15 bp, Homo sapiens
ttcaggtgggagctc

SEQ ID NO: 1478631 - DNA, 15 bp, Homo sapiens
cttcaggtgggagct

SEQ ID NO: 1478632 - DNA, 15 bp, Homo sapiens
ccttcaggtgggagc

SEQ ID NO: 1478633 - DNA, 15 bp, Homo sapiens
gccttcaggtgggag

SEQ ID NO: 1478634 - DNA, 15 bp, Homo sapiens
cgccttcaggtggga

SEQ ID NO: 1478635 - DNA, 15 bp, Homo sapiens
gcgccttcaggtggg

SEQ ID NO: 1478636 - DNA, 15 bp, Homo sapiens
tgcgccttcaggtgg

SEQ ID NO: 1478637 - DNA, 15 bp, Homo sapiens
atgcgccttcaggtg

SEQ ID NO: 1478638 - DNA, 15 bp, Homo sapiens
gatgcgccttcaggt

SEQ ID NO: 1478639 - DNA, 15 bp, Homo sapiens
agatgcgccttcagg

SEQ ID NO: 1478640 - DNA, 15 bp, Homo sapiens
cagatgcgccttcag

SEQ ID NO: 1478641 - DNA, 15 bp, Homo sapiens
gcagatgcgccttca

SEQ ID NO: 1478642 - DNA, 15 bp, Homo sapiens
cgcagatgcgccttc

SEQ ID NO: 1478643 - DNA, 15 bp, Homo sapiens
gcgcagatgcgcctt

SEQ ID NO: 1478644 - DNA, 15 bp, Homo sapiens
tgcgcagatgcgcct

SEQ ID NO: 1478645 - DNA, 15 bp, Homo sapiens
gtgcgcagatgcgcc

SEQ ID NO: 1478646 - DNA, 15 bp, Homo sapiens
cgtgcgcagatgcgc

SEQ ID NO: 1478647 - DNA, 15 bp, Homo sapiens
gcgtgcgcagatgcg

SEQ ID NO: 1478648 - DNA, 15 bp, Homo sapiens
tgcgtgcgcagatgc

SEQ ID NO: 1478649 - DNA, 15 bp, Homo sapiens
gtgcgtgcgcagatg

SEQ ID NO: 1478650 - DNA, 15 bp, Homo sapiens
tgtgcgtgcgcagat

SEQ ID NO: 1478651 - DNA, 15 bp, Homo sapiens
gtgtgcgtgcgcaga

SEQ ID NO: 1478652 - DNA, 15 bp, Homo sapiens
tgtgtgcgtgcgcag

SEQ ID NO: 1478653 - DNA, 15 bp, Homo sapiens
ctgtgtgcgtgcgca

SEQ ID NO: 1478654 - DNA, 15 bp, Homo sapiens
cctgtgtgcgtgcgc

SEQ ID NO: 1478655 - DNA, 15 bp, Homo sapiens
acctgtgtgcgtgcg

SEQ ID NO: 1478656 - DNA, 15 bp, Homo sapiens
cacctgtgtgcgtgc

SEQ ID NO: 1478657 - DNA, 15 bp, Homo sapiens
tcacctgtgtgcgtg

SEQ ID NO: 1478658 - DNA, 15 bp, Homo sapiens
ctcacctgtgtgcgt

SEQ ID NO: 1478659 - DNA, 15 bp, Homo sapiens
cctcacctgtgtgcg

SEQ ID NO: 1478660 - DNA, 15 bp, Homo sapiens
ccctcacctgtgtgc

SEQ ID NO: 1478661 - DNA, 15 bp, Homo sapiens
cccctcacctgtgtg

SEQ ID NO: 1478662 - DNA, 15 bp, Homo sapiens
ccccctcacctgtgt

SEQ ID NO: 1478663 - DNA, 15 bp, Homo sapiens
gccccctcacctgtg

SEQ ID NO: 1478664 - DNA, 15 bp, Homo sapiens
cgccccctcacctgt

SEQ ID NO: 1478665 - DNA, 15 bp, Homo sapiens
ccgccccctcacctg

SEQ ID NO: 1478666 - DNA, 15 bp, Homo sapiens
cccgccccctcacct

SEQ ID NO: 1478667 - DNA, 15 bp, Homo sapiens
ccccgccccctcacc

SEQ ID NO: 1478668 - DNA, 15 bp, Homo sapiens
gccccgccccctcac

SEQ ID NO: 1478669 - DNA, 15 bp, Homo sapiens
ggccccgccccctca

SEQ ID NO: 1478670 - DNA, 15 bp, Homo sapiens
gggccccgccccctc

SEQ ID NO: 1478671 - DNA, 15 bp, Homo sapiens
ggggccccgccccct

SEQ ID NO: 1478672 - DNA, 15 bp, Homo sapiens
cggggccccgccccc

SEQ ID NO: 1478673 - DNA, 15 bp, Homo sapiens
ccggggccccgcccc

SEQ ID NO: 1478674 - DNA, 15 bp, Homo sapiens
tccggggccccgccc

SEQ ID NO: 1478675 - DNA, 15 bp, Homo sapiens
gtccggggccccgcc

SEQ ID NO: 1478676 - DNA, 15 bp, Homo sapiens
tgtccggggccccgc

SEQ ID NO: 1478677 - DNA, 15 bp, Homo sapiens
atgtccggggccccg

SEQ ID NO: 1478678 - DNA, 15 bp, Homo sapiens
catgtccggggcccc

SEQ ID NO: 1478679 - DNA, 15 bp, Homo sapiens
tcatgtccggggccc

SEQ ID NO: 1478680 - DNA, 15 bp, Homo sapiens
ctcatgtccggggcc

SEQ ID NO: 1478681 - DNA, 15 bp, Homo sapiens
tctcatgtccggggc

SEQ ID NO: 1478682 - DNA, 15 bp, Homo sapiens
ttctcatgtccgggg

SEQ ID NO: 1478683 - DNA, 15 bp, Homo sapiens
tttctcatgtccggg

SEQ ID NO: 1478684 - DNA, 15 bp, Homo sapiens
ctttctcatgtccgg

SEQ ID NO: 1478685 - DNA, 15 bp, Homo sapiens
cctttctcatgtccg

SEQ ID NO: 1478686 - DNA, 15 bp, Homo sapiens
gccctttctcatgtc

SEQ ID NO: 1478687 - DNA, 15 bp, Homo sapiens
cgccctttctcatgt

SEQ ID NO: 1478688 - DNA, 15 bp, Homo sapiens
gcgccctttctcatg

SEQ ID NO: 1478689 - DNA, 15 bp, Homo sapiens
cgcgccctttctcat

SEQ ID NO: 1478690 - DNA, 15 bp, Homo sapiens
ccgcgccctttctca

SEQ ID NO: 1478691 - DNA, 15 bp, Homo sapiens
gccgcgccctttctc

SEQ ID NO: 1478692 - DNA, 15 bp, Homo sapiens
cgccgcgccctttct

SEQ ID NO: 1478693 - DNA, 15 bp, Homo sapiens
gcgccgcgccctttc

SEQ ID NO: 1478694 - DNA, 15 bp, Homo sapiens
ggcgccgcgcccttt

SEQ ID NO: 1478695 - DNA, 15 bp, Homo sapiens
gggcgccgcgccctt

SEQ ID NO: 1478696 - DNA, 15 bp, Homo sapiens
cgggcgccgcgccct

SEQ ID NO: 1478697 - DNA, 15 bp, Homo sapiens
gcgggcgccgcgccc

SEQ ID NO: 1478698 - DNA, 15 bp, Homo sapiens
agcgggcgccgcgcc

SEQ ID NO: 1478699 - DNA, 15 bp, Homo sapiens
cagcgggcgccgcgc

SEQ ID NO: 1478700 - DNA, 15 bp, Homo sapiens
acagcgggcgccgcg

SEQ ID NO: 1478701 - DNA, 15 bp, Homo sapiens
tacagcgggcgccgc

SEQ ID NO: 1478702 - DNA, 15 bp, Homo sapiens
ctacagcgggcgccg

SEQ ID NO: 1478703 - DNA, 15 bp, Homo sapiens
actacagcgggcgcc

SEQ ID NO: 1478704 - DNA, 15 bp, Homo sapiens
aactacagcgggcgc

SEQ ID NO: 1478705 - DNA, 15 bp, Homo sapiens
taactacagcgggcg

SEQ ID NO: 1478706 - DNA, 15 bp, Homo sapiens
gtaactacagcgggc

SEQ ID NO: 1478707 - DNA, 15 bp, Homo sapiens
tgtaactacagcggg

SEQ ID NO: 1478708 - DNA, 15 bp, Homo sapiens
ctgtaactacagcgg

SEQ ID NO: 1478709 - DNA, 15 bp, Homo sapiens
cctgtaactacagcg

SEQ ID NO: 1478710 - DNA, 15 bp, Homo sapiens
ccctgtaactacagc

SEQ ID NO: 1478711 - DNA, 15 bp, Homo sapiens
cccctgtaactacag

SEQ ID NO: 1478712 - DNA, 15 bp, Homo sapiens
tcccctgtaactaca

SEQ ID NO: 1478713 - DNA, 15 bp, Homo sapiens
ttcccctgtaactac

SEQ ID NO: 1478714 - DNA, 15 bp, Homo sapiens
cttcccctgtaacta

SEQ ID NO: 1478715 - DNA, 15 bp, Homo sapiens
tcttcccctgtaact

SEQ ID NO: 1478716 - DNA, 15 bp, Homo sapiens
ttcttcccctgtaac

SEQ ID NO: 1478717 - DNA, 15 bp, Homo sapiens
cttcttcccctgtaa

SEQ ID NO: 1478718 - DNA, 15 bp, Homo sapiens
ccttcttcccctgta

SEQ ID NO: 1478719 - DNA, 15 bp, Homo sapiens
cccttcttcccctgt

SEQ ID NO: 1478720 - DNA, 15 bp, Homo sapiens
acccttcttcccctg

SEQ ID NO: 1478721 - DNA, 15 bp, Homo sapiens
aacccttcttcccct

SEQ ID NO: 1478722 - DNA, 15 bp, Homo sapiens
caacccttcttcccc

SEQ ID NO: 1478723 - DNA, 15 bp, Homo sapiens
gcaacccttcttccc

SEQ ID NO: 1478724 - DNA, 15 bp, Homo sapiens
tgcaacccttcttcc

SEQ ID NO: 1478725 - DNA, 15 bp, Homo sapiens
ctgcaacccttcttc

SEQ ID NO: 1478726 - DNA, 15 bp, Homo sapiens
tctgcaacccttctt

SEQ ID NO: 1478727 - DNA, 15 bp, Homo sapiens
ctctgcaacccttct

SEQ ID NO: 1478728 - DNA, 15 bp, Homo sapiens
cctctgcaacccttc

SEQ ID NO: 1478729 - DNA, 15 bp, Homo sapiens
ccctctgcaaccctt

SEQ ID NO: 1478730 - DNA, 15 bp, Homo sapiens
gccctctgcaaccct

SEQ ID NO: 1478731 - DNA, 15 bp, Homo sapiens
cgccctctgcaaccc

SEQ ID NO: 1478732 - DNA, 15 bp, Homo sapiens
ccgccctctgcaacc

SEQ ID NO: 1478733 - DNA, 15 bp, Homo sapiens
cccgccctctgcaac

SEQ ID NO: 1478734 - DNA, 15 bp, Homo sapiens
tcccgccctctgcaa

SEQ ID NO: 1478735 - DNA, 15 bp, Homo sapiens
gtcccgccctctgca

SEQ ID NO: 1478736 - DNA, 15 bp, Homo sapiens
agtcccgccctctgc

SEQ ID NO: 1478737 - DNA, 15 bp, Homo sapiens
aagtcccgccctctg

SEQ ID NO: 1478738 - DNA, 15 bp, Homo sapiens
caagtcccgccctct

SEQ ID NO: 1478739 - DNA, 15 bp, Homo sapiens
ccaagtcccgccctc

SEQ ID NO: 1478740 - DNA, 15 bp, Homo sapiens
tccaagtcccgccct

SEQ ID NO: 1478741 - DNA, 15 bp, Homo sapiens
gtccaagtcccgccc

SEQ ID NO: 1478742 - DNA, 15 bp, Homo sapiens
agtccaagtcccgcc

SEQ ID NO: 1478743 - DNA, 15 bp, Homo sapiens
aagtccaagtcccgc

SEQ ID NO: 1478744 - DNA, 15 bp, Homo sapiens
caagtccaagtcccg

SEQ ID NO: 1478745 - DNA, 15 bp, Homo sapiens
ccaagtccaagtccc

SEQ ID NO: 1478746 - DNA, 15 bp, Homo sapiens
gccaagtccaagtcc

SEQ ID NO: 1478747 - DNA, 15 bp, Homo sapiens
agccaagtccaagtc

SEQ ID NO: 1478748 - DNA, 15 bp, Homo sapiens
cagccaagtccaagt

SEQ ID NO: 1478749 - DNA, 15 bp, Homo sapiens
ccagccaagtccaag

SEQ ID NO: 1478750 - DNA, 15 bp, Homo sapiens
gccagccaagtccaa

SEQ ID NO: 1478751 - DNA, 15 bp, Homo sapiens
ggccagccaagtcca

SEQ ID NO: 1478752 - DNA, 15 bp, Homo sapiens
aggccagccaagtcc

SEQ ID NO: 1478753 - DNA, 15 bp, Homo sapiens
gaggccagccaagtc

SEQ ID NO: 1478754 - DNA, 15 bp, Homo sapiens
agaggccagccaagt

SEQ ID NO: 1478755 - DNA, 15 bp, Homo sapiens
cagaggccagccaag

SEQ ID NO: 1478756 - DNA, 15 bp, Homo sapiens
tcagaggccagccaa

SEQ ID NO: 1478757 - DNA, 15 bp, Homo sapiens
ctcagaggccagcca

SEQ ID NO: 1478758 - DNA, 15 bp, Homo sapiens
tctcagaggccagcc

SEQ ID NO: 1478759 - DNA, 15 bp, Homo sapiens
ctctcagaggccagc

SEQ ID NO: 1478760 - DNA, 15 bp, Homo sapiens
actctcagaggccag

SEQ ID NO: 1478761 - DNA, 15 bp, Homo sapiens
cactctcagaggcca

SEQ ID NO: 1478762 - DNA, 15 bp, Homo sapiens
tcactctcagaggcc

SEQ ID NO: 1478763 - DNA, 15 bp, Homo sapiens
ctcactctcagaggc

SEQ ID NO: 1478764 - DNA, 15 bp, Homo sapiens
actcactctcagagg

SEQ ID NO: 1478765 - DNA, 15 bp, Homo sapiens
cactcactctcagag

SEQ ID NO: 1478766 - DNA, 15 bp, Homo sapiens
gcactcactctcaga

SEQ ID NO: 1478767 - DNA, 15 bp, Homo sapiens
ggcactcactctcag

SEQ ID NO: 1478768 - DNA, 15 bp, Homo sapiens
aggcactcactctca

SEQ ID NO: 1478769 - DNA, 15 bp, Homo sapiens
gaggcactcactctc

SEQ ID NO: 1478770 - DNA, 15 bp, Homo sapiens
ggaggcactcactct

SEQ ID NO: 1478771 - DNA, 15 bp, Homo sapiens
aggaggcactcactc

SEQ ID NO: 1478772 - DNA, 15 bp, Homo sapiens
aaggaggcactcact

SEQ ID NO: 1478773 - DNA, 15 bp, Homo sapiens
taaggaggcactcac

SEQ ID NO: 1478774 - DNA, 15 bp, Homo sapiens
ttaaggaggcactca

SEQ ID NO: 1478775 - DNA, 15 bp, Homo sapiens
tttaaggaggcactc

SEQ ID NO: 1478776 - DNA, 15 bp, Homo sapiens
atttaaggaggcact

SEQ ID NO: 1478777 - DNA, 15 bp, Homo sapiens
aatttaaggaggcac

SEQ ID NO: 1478778 - DNA, 15 bp, Homo sapiens
aaatttaaggaggca

SEQ ID NO: 1478779 - DNA, 15 bp, Homo sapiens
aaaatttaaggaggc

SEQ ID NO: 1478780 - DNA, 15 bp, Homo sapiens
caaaatttaaggagg

SEQ ID NO: 1478781 - DNA, 15 bp, Homo sapiens
acaaaatttaaggag

SEQ ID NO: 1478782 - DNA, 15 bp, Homo sapiens
cacaaaatttaagga

SEQ ID NO: 1478783 - DNA, 15 bp, Homo sapiens
gcacaaaatttaagg

SEQ ID NO: 1478784 - DNA, 15 bp, Homo sapiens
ggcacaaaatttaag

SEQ ID NO: 1478785 - DNA, 15 bp, Homo sapiens
gggcacaaaatttaa

SEQ ID NO: 1478786 - DNA, 15 bp, Homo sapiens
agggcacaaaattta

SEQ ID NO: 1478787 - DNA, 15 bp, Homo sapiens
tagggcacaaaattt

SEQ ID NO: 1478788 - DNA, 15 bp, Homo sapiens
ctagggcacaaaatt

SEQ ID NO: 1478789 - DNA, 15 bp, Homo sapiens
cctagggcacaaaat

SEQ ID NO: 1478790 - DNA, 15 bp, Homo sapiens
ccctagggcacaaaa

SEQ ID NO: 1478791 - DNA, 15 bp, Homo sapiens
cccctagggcacaaa

SEQ ID NO: 1478792 - DNA, 15 bp, Homo sapiens
gcccctagggcacaa

SEQ ID NO: 1478793 - DNA, 15 bp, Homo sapiens
ggcccctagggcaca

SEQ ID NO: 1478794 - DNA, 15 bp, Homo sapiens
aggcccctagggcac

SEQ ID NO: 1478795 - DNA, 15 bp, Homo sapiens
gaggcccctagggca

SEQ ID NO: 1478796 - DNA, 15 bp, Homo sapiens
tgaggcccctagggc

SEQ ID NO: 1478797 - DNA, 15 bp, Homo sapiens
gtgaggcccctaggg

SEQ ID NO: 1478798 - DNA, 15 bp, Homo sapiens
agtgaggcccctagg

SEQ ID NO: 1478799 - DNA, 15 bp, Homo sapiens
aagtgaggcccctag

SEQ ID NO: 1478800 - DNA, 15 bp, Homo sapiens
aaagtgaggccccta

SEQ ID NO: 1478801 - DNA, 15 bp, Homo sapiens
caaagtgaggcccct

SEQ ID NO: 1478802 - DNA, 15 bp, Homo sapiens
acaaagtgaggcccc

SEQ ID NO: 1478803 - DNA, 15 bp, Homo sapiens
aacaaagtgaggccc

SEQ ID NO: 1478804 - DNA, 15 bp, Homo sapiens
gaacaaagtgaggcc

SEQ ID NO: 1478805 - DNA, 15 bp, Homo sapiens
tgaacaaagtgaggc

SEQ ID NO: 1478806 - DNA, 15 bp, Homo sapiens
atgaacaaagtgagg

SEQ ID NO: 1478807 - DNA, 15 bp, Homo sapiens
gatgaacaaagtgag

SEQ ID NO: 1478808 - DNA, 15 bp, Homo sapiens
ggatgaacaaagtga

SEQ ID NO: 1478809 - DNA, 15 bp, Homo sapiens
aggatgaacaaagtg

SEQ ID NO: 1478810 - DNA, 15 bp, Homo sapiens
taggatgaacaaagt

SEQ ID NO: 1478811 - DNA, 15 bp, Homo sapiens
ctaggatgaacaaag

SEQ ID NO: 1478812 - DNA, 15 bp, Homo sapiens
actaggatgaacaaa

SEQ ID NO: 1478813 - DNA, 15 bp, Homo sapiens
gactaggatgaacaa

SEQ ID NO: 1478814 - DNA, 15 bp, Homo sapiens
ggactaggatgaaca

SEQ ID NO: 1478815 - DNA, 15 bp, Homo sapiens
gggactaggatgaac

SEQ ID NO: 1478816 - DNA, 15 bp, Homo sapiens
tgggactaggatgaa

SEQ ID NO: 1478817 - DNA, 15 bp, Homo sapiens
ctgggactaggatga

SEQ ID NO: 1478818 - DNA, 15 bp, Homo sapiens
gctgggactaggatg

SEQ ID NO: 1478819 - DNA, 15 bp, Homo sapiens
ggctgggactaggat

SEQ ID NO: 1478820 - DNA, 15 bp, Homo sapiens
gggctgggactagga

SEQ ID NO: 1478821 - DNA, 15 bp, Homo sapiens
tgggctgggactagg

SEQ ID NO: 1478822 - DNA, 15 bp, Homo sapiens
ctgggctgggactag

SEQ ID NO: 1478823 - DNA, 15 bp, Homo sapiens
cctgggctgggacta

SEQ ID NO: 1478824 - DNA, 15 bp, Homo sapiens
gcctgggctgggact

SEQ ID NO: 1478825 - DNA, 15 bp, Homo sapiens
agcctgggctgggac

SEQ ID NO: 1478826 - DNA, 15 bp, Homo sapiens
cagcctgggctggga

SEQ ID NO: 1478827 - DNA, 15 bp, Homo sapiens
tcagcctgggctggg

SEQ ID NO: 1478828 - DNA, 15 bp, Homo sapiens
ctcagcctgggctgg

SEQ ID NO: 1478829 - DNA, 15 bp, Homo sapiens
actcagcctgggctg

SEQ ID NO: 1478830 - DNA, 15 bp, Homo sapiens
tactcagcctgggct

SEQ ID NO: 1478831 - DNA, 15 bp, Homo sapiens
ttactcagcctgggc

SEQ ID NO: 1478832 - DNA, 15 bp, Homo sapiens
tttactcagcctggg

SEQ ID NO: 1478833 - DNA, 15 bp, Homo sapiens
ctttactcagcctgg

SEQ ID NO: 1478834 - DNA, 15 bp, Homo sapiens
cctttactcagcctg

SEQ ID NO: 1478835 - DNA, 15 bp, Homo sapiens
ccctttactcagcct

SEQ ID NO: 1478836 - DNA, 15 bp, Homo sapiens
cccctttactcagcc

SEQ ID NO: 1478837 - DNA, 15 bp, Homo sapiens
acccctttactcagc

SEQ ID NO: 1478838 - DNA, 15 bp, Homo sapiens
cacccctttactcag

SEQ ID NO: 1478839 - DNA, 15 bp, Homo sapiens
acacccctttactca

SEQ ID NO: 1478840 - DNA, 15 bp, Homo sapiens
cacacccctttactc

SEQ ID NO: 1478841 - DNA, 15 bp, Homo sapiens
ccacacccctttact

SEQ ID NO: 1478842 - DNA, 15 bp, Homo sapiens
gccacacccctttac

SEQ ID NO: 1478843 - DNA, 15 bp, Homo sapiens
ggccacaccccttta

SEQ ID NO: 1478844 - DNA, 15 bp, Homo sapiens
tggccacaccccttt

SEQ ID NO: 1478845 - DNA, 15 bp, Homo sapiens
ctggccacacccctt

SEQ ID NO: 1478846 - DNA, 15 bp, Homo sapiens
tctggccacacccct

SEQ ID NO: 1478847 - DNA, 15 bp, Homo sapiens
atctggccacacccc

SEQ ID NO: 1478848 - DNA, 15 bp, Homo sapiens
catctggccacaccc

SEQ ID NO: 1478849 - DNA, 15 bp, Homo sapiens
gcatctggccacacc

SEQ ID NO: 1478850 - DNA, 15 bp, Homo sapiens
tgcatctggccacac

SEQ ID NO: 1478851 - DNA, 15 bp, Homo sapiens
ctgcatctggccaca

SEQ ID NO: 1478852 - DNA, 15 bp, Homo sapiens
cctgcatctggccac

SEQ ID NO: 1478853 - DNA, 15 bp, Homo sapiens
ccctgcatctggcca

SEQ ID NO: 1478854 - DNA, 15 bp, Homo sapiens
cccctgcatctggcc

SEQ ID NO: 1478855 - DNA, 15 bp, Homo sapiens
tcccctgcatctggc

SEQ ID NO: 1478856 - DNA, 15 bp, Homo sapiens
gtcccctgcatctgg

SEQ ID NO: 1478857 - DNA, 15 bp, Homo sapiens
ggtcccctgcatctg

SEQ ID NO: 1478858 - DNA, 15 bp, Homo sapiens
gggtcccctgcatct

SEQ ID NO: 1478859 - DNA, 15 bp, Homo sapiens
cgggtcccctgcatc

SEQ ID NO: 1478860 - DNA, 15 bp, Homo sapiens
ccgggtcccctgcat

SEQ ID NO: 1478861 - DNA, 15 bp, Homo sapiens
cccgggtcccctgca

SEQ ID NO: 1478862 - DNA, 15 bp, Homo sapiens
ccccgggtcccctgc

SEQ ID NO: 1478863 - DNA, 15 bp, Homo sapiens
tccccgggtcccctg

SEQ ID NO: 1478864 - DNA, 15 bp, Homo sapiens
gtccccgggtcccct

SEQ ID NO: 1478865 - DNA, 15 bp, Homo sapiens
tgtccccgggtcccc

SEQ ID NO: 1478866 - DNA, 15 bp, Homo sapiens
atgtccccgggtccc

SEQ ID NO: 1478867 - DNA, 15 bp, Homo sapiens
catgtccccgggtcc

SEQ ID NO: 1478868 - DNA, 15 bp, Homo sapiens
tcatgtccccgggtc

SEQ ID NO: 1478869 - DNA, 15 bp, Homo sapiens
gtcatgtccccgggt

SEQ ID NO: 1478870 - DNA, 15 bp, Homo sapiens
agtcatgtccccggg

SEQ ID NO: 1478871 - DNA, 15 bp, Homo sapiens
cagtcatgtccccgg

SEQ ID NO: 1478872 - DNA, 15 bp, Homo sapiens
ccagtcatgtccccg

SEQ ID NO: 1478873 - DNA, 15 bp, Homo sapiens
cccagtcatgtcccc

SEQ ID NO: 1478874 - DNA, 15 bp, Homo sapiens
gcccagtcatgtccc

SEQ ID NO: 1478875 - DNA, 15 bp, Homo sapiens
tgcccagtcatgtcc

SEQ ID NO: 1478876 - DNA, 15 bp, Homo sapiens
ctgcccagtcatgtc

SEQ ID NO: 1478877 - DNA, 15 bp, Homo sapiens
tctgcccagtcatgt

SEQ ID NO: 1478878 - DNA, 15 bp, Homo sapiens
gtctgcccagtcatg

SEQ ID NO: 1478879 - DNA, 15 bp, Homo sapiens
tgtctgcccagtcat

SEQ ID NO: 1478880 - DNA, 15 bp, Homo sapiens
ctgtctgcccagtca

SEQ ID NO: 1478881 - DNA, 15 bp, Homo sapiens
actgtctgcccagtc

SEQ ID NO: 1478882 - DNA, 15 bp, Homo sapiens
cactgtctgcccagt

SEQ ID NO: 1478883 - DNA, 15 bp, Homo sapiens
ccactgtctgcccag

SEQ ID NO: 1478884 - DNA, 15 bp, Homo sapiens
gccactgtctgccca

SEQ ID NO: 1478885 - DNA, 15 bp, Homo sapiens
cgccactgtctgccc

SEQ ID NO: 1478886 - DNA, 15 bp, Homo sapiens
gcgccactgtctgcc

SEQ ID NO: 1478887 - DNA, 15 bp, Homo sapiens
agcgccactgtctgc

SEQ ID NO: 1478888 - DNA, 15 bp, Homo sapiens
aagcgccactgtctg

SEQ ID NO: 1478889 - DNA, 15 bp, Homo sapiens
taagcgccactgtct

SEQ ID NO: 1478890 - DNA, 15 bp, Homo sapiens
ataagcgccactgtc

SEQ ID NO: 1478891 - DNA, 15 bp, Homo sapiens
cataagcgccactgt

SEQ ID NO: 1478892 - DNA, 15 bp, Homo sapiens
ccataagcgccactg

SEQ ID NO: 1478893 - DNA, 15 bp, Homo sapiens
gccataagcgccact

SEQ ID NO: 1478894 - DNA, 15 bp, Homo sapiens
agccataagcgccac

SEQ ID NO: 1478895 - DNA, 15 bp, Homo sapiens
aagccataagcgcca

SEQ ID NO: 1478896 - DNA, 15 bp, Homo sapiens
gaagccataagcgcc

SEQ ID NO: 1478897 - DNA, 15 bp, Homo sapiens
ggaagccataagcgc

SEQ ID NO: 1478898 - DNA, 15 bp, Homo sapiens
aggaagccataagcg

SEQ ID NO: 1478899 - DNA, 15 bp, Homo sapiens
aaggaagccataagc

SEQ ID NO: 1478900 - DNA, 15 bp, Homo sapiens
caaggaagccataag

SEQ ID NO: 1478901 - DNA, 15 bp, Homo sapiens
acaaggaagccataa

SEQ ID NO: 1478902 - DNA, 15 bp, Homo sapiens
gacaaggaagccata

SEQ ID NO: 1478903 - DNA, 15 bp, Homo sapiens
ggacaaggaagccat

SEQ ID NO: 1478904 - DNA, 15 bp, Homo sapiens
gggacaaggaagcca

SEQ ID NO: 1478905 - DNA, 15 bp, Homo sapiens
ggggacaaggaagcc

SEQ ID NO: 1478906 - DNA, 15 bp, Homo sapiens
aggggacaaggaagc

SEQ ID NO: 1478907 - DNA, 15 bp, Homo sapiens
taggggacaaggaag

SEQ ID NO: 1478908 - DNA, 15 bp, Homo sapiens
ctaggggacaaggaa

SEQ ID NO: 1478909 - DNA, 15 bp, Homo sapiens
cctaggggacaagga

SEQ ID NO: 1478910 - DNA, 15 bp, Homo sapiens
ccctaggggacaagg

SEQ ID NO: 1478911 - DNA, 15 bp, Homo sapiens
cccctaggggacaag

SEQ ID NO: 1478912 - DNA, 15 bp, Homo sapiens
tcccctaggggacaa

SEQ ID NO: 1478913 - DNA, 15 bp, Homo sapiens
ctcccctaggggaca

SEQ ID NO: 1478914 - DNA, 15 bp, Homo sapiens
tctcccctaggggac

SEQ ID NO: 1478915 - DNA, 15 bp, Homo sapiens
ttctcccctagggga

SEQ ID NO: 1478916 - DNA, 15 bp, Homo sapiens
cttctcccctagggg

SEQ ID NO: 1478917 - DNA, 15 bp, Homo sapiens
gcttctcccctaggg

SEQ ID NO: 1478918 - DNA, 15 bp, Homo sapiens
ggcttctcccctagg

SEQ ID NO: 1478919 - DNA, 15 bp, Homo sapiens
tggcttctcccctag

SEQ ID NO: 1478920 - DNA, 15 bp, Homo sapiens
atggcttctccccta

SEQ ID NO: 1478921 - DNA, 15 bp, Homo sapiens
tatggcttctcccct

SEQ ID NO: 1478922 - DNA, 15 bp, Homo sapiens
gtatggcttctcccc

SEQ ID NO: 1478923 - DNA, 15 bp, Homo sapiens
cgtatggcttctccc

SEQ ID NO: 1478924 - DNA, 15 bp, Homo sapiens
gcgtatggcttctcc

SEQ ID NO: 1478925 - DNA, 15 bp, Homo sapiens
ggcgtatggcttctc

SEQ ID NO: 1478926 - DNA, 15 bp, Homo sapiens
aggcgtatggcttct

SEQ ID NO: 1478927 - DNA, 15 bp, Homo sapiens
caggcgtatggcttc

SEQ ID NO: 1478928 - DNA, 15 bp, Homo sapiens
gcaggcgtatggctt

SEQ ID NO: 1478929 - DNA, 15 bp, Homo sapiens
tgcaggcgtatggct

SEQ ID NO: 1478930 - DNA, 15 bp, Homo sapiens
gtgcaggcgtatggc

SEQ ID NO: 1478931 - DNA, 15 bp, Homo sapiens
cgtgcaggcgtatgg

SEQ ID NO: 1478932 - DNA, 15 bp, Homo sapiens
acgtgcaggcgtatg

SEQ ID NO: 1478933 - DNA, 15 bp, Homo sapiens
cacgtgcaggcgtat

SEQ ID NO: 1478934 - DNA, 15 bp, Homo sapiens
ccacgtgcaggcgta

SEQ ID NO: 1478935 - DNA, 15 bp, Homo sapiens
cccacgtgcaggcgt

SEQ ID NO: 1478936 - DNA, 15 bp, Homo sapiens
tcccacgtgcaggcg

SEQ ID NO: 1478937 - DNA, 15 bp, Homo sapiens
ttcccacgtgcaggc

SEQ ID NO: 1478938 - DNA, 15 bp, Homo sapiens
cttcccacgtgcagg

SEQ ID NO: 1478939 - DNA, 15 bp, Homo sapiens
ccttcccacgtgcag

SEQ ID NO: 1478940 - DNA, 15 bp, Homo sapiens
gccttcccacgtgca

SEQ ID NO: 1478941 - DNA, 15 bp, Homo sapiens
agccttcccacgtgc

SEQ ID NO: 1478942 - DNA, 15 bp, Homo sapiens
cagccttcccacgtg

SEQ ID NO: 1478943 - DNA, 15 bp, Homo sapiens
gcagccttcccacgt

SEQ ID NO: 1478944 - DNA, 15 bp, Homo sapiens
cgcagccttcccacg

SEQ ID NO: 1478945 - DNA, 15 bp, Homo sapiens
ccgcagccttcccac

SEQ ID NO: 1478946 - DNA, 15 bp, Homo sapiens
gccgcagccttccca

SEQ ID NO: 1478947 - DNA, 15 bp, Homo sapiens
agccgcagccttccc

SEQ ID NO: 1478948 - DNA, 15 bp, Homo sapiens
cagccgcagccttcc

SEQ ID NO: 1478949 - DNA, 15 bp, Homo sapiens
ccagccgcagccttc

SEQ ID NO: 1478950 - DNA, 15 bp, Homo sapiens
tccagccgcagcctt

SEQ ID NO: 1478951 - DNA, 15 bp, Homo sapiens
ctccagccgcagcct

SEQ ID NO: 1478952 - DNA, 15 bp, Homo sapiens
tctccagccgcagcc

SEQ ID NO: 1478953 - DNA, 15 bp, Homo sapiens
atctccagccgcagc

SEQ ID NO: 1478954 - DNA, 15 bp, Homo sapiens
aatctccagccgcag

SEQ ID NO: 1478955 - DNA, 15 bp, Homo sapiens
gaatctccagccgca

SEQ ID NO: 1478956 - DNA, 15 bp, Homo sapiens
cgaatctccagccgc

SEQ ID NO: 1478957 - DNA, 15 bp, Homo sapiens
gcgaatctccagccg

SEQ ID NO: 1478958 - DNA, 15 bp, Homo sapiens
cgcgaatctccagcc

SEQ ID NO: 1478959 - DNA, 15 bp, Homo sapiens
gcgcgaatctccagc

SEQ ID NO: 1478960 - DNA, 15 bp, Homo sapiens
cgcgcgaatctccag

SEQ ID NO: 1478961 - DNA, 15 bp, Homo sapiens
gcgcgcgaatctcca

SEQ ID NO: 1478962 - DNA, 15 bp, Homo sapiens
agcgcgcgaatctcc

SEQ ID NO: 1478963 - DNA, 15 bp, Homo sapiens
gagcgcgcgaatctc

SEQ ID NO: 1478964 - DNA, 15 bp, Homo sapiens
cgagcgcgcgaatct

SEQ ID NO: 1478965 - DNA, 15 bp, Homo sapiens
ccgagcgcgcgaatc

SEQ ID NO: 1478966 - DNA, 15 bp, Homo sapiens
tccgagcgcgcgaat

SEQ ID NO: 1478967 - DNA, 15 bp, Homo sapiens
gtccgagcgcgcgaa

SEQ ID NO: 1478968 - DNA, 15 bp, Homo sapiens
cgtccgagcgcgcga

SEQ ID NO: 1478969 - DNA, 15 bp, Homo sapiens
tcgtccgagcgcgcg

SEQ ID NO: 1478970 - DNA, 15 bp, Homo sapiens
ctcgtccgagcgcgc

SEQ ID NO: 1478971 - DNA, 15 bp, Homo sapiens
gctcgtccgagcgcg

SEQ ID NO: 1478972 - DNA, 15 bp, Homo sapiens
agctcgtccgagcgc

SEQ ID NO: 1478973 - DNA, 15 bp, Homo sapiens
cagctcgtccgagcg

SEQ ID NO: 1478974 - DNA, 15 bp, Homo sapiens
tcagctcgtccgagc

SEQ ID NO: 1478975 - DNA, 15 bp, Homo sapiens
gtcagctcgtccgag

SEQ ID NO: 1478976 - DNA, 15 bp, Homo sapiens
ggtcagctcgtccga

SEQ ID NO: 1478977 - DNA, 15 bp, Homo sapiens
gggtcagctcgtccg

SEQ ID NO: 1478978 - DNA, 15 bp, Homo sapiens
cgggtcagctcgtcc

SEQ ID NO: 1478979 - DNA, 15 bp, Homo sapiens
gcgggtcagctcgtc

SEQ ID NO: 1478980 - DNA, 15 bp, Homo sapiens
ggcgggtcagctcgt

SEQ ID NO: 1478981 - DNA, 15 bp, Homo sapiens
tggcgggtcagctcg

SEQ ID NO: 1478982 - DNA, 15 bp, Homo sapiens
gtggcgggtcagctc

SEQ ID NO: 1478983 - DNA, 15 bp, Homo sapiens
agtggcgggtcagct

SEQ ID NO: 1478984 - DNA, 15 bp, Homo sapiens
tagtggcgggtcagc

SEQ ID NO: 1478985 - DNA, 15 bp, Homo sapiens
gtagtggcgggtcag

SEQ ID NO: 1478986 - DNA, 15 bp, Homo sapiens
ggtagtggcgggtca

SEQ ID NO: 1478987 - DNA, 15 bp, Homo sapiens
cggtagtggcgggtc

SEQ ID NO: 1478988 - DNA, 15 bp, Homo sapiens
ccggtagtggcgggt

SEQ ID NO: 1478989 - DNA, 15 bp, Homo sapiens
tccggtagtggcggg

SEQ ID NO: 1478990 - DNA, 15 bp, Homo sapiens
ttccggtagtggcgg

SEQ ID NO: 1478991 - DNA, 15 bp, Homo sapiens
tttccggtagtggcg

SEQ ID NO: 1478992 - DNA, 15 bp, Homo sapiens
gtttccggtagtggc

SEQ ID NO: 1478993 - DNA, 15 bp, Homo sapiens
tgtttccggtagtgg

SEQ ID NO: 1478994 - DNA, 15 bp, Homo sapiens
gtgtttccggtagtg

SEQ ID NO: 1478995 - DNA, 15 bp, Homo sapiens
tgtgtttccggtagt

SEQ ID NO: 1478996 - DNA, 15 bp, Homo sapiens
gtgtgtttccggtag

SEQ ID NO: 1478997 - DNA, 15 bp, Homo sapiens
cgtgtgtttccggta

SEQ ID NO: 1478998 - DNA, 15 bp, Homo sapiens
ccgtgtgtttccggt

SEQ ID NO: 1478999 - DNA, 15 bp, Homo sapiens
cccgtgtgtttccgg

SEQ ID NO: 1479000 - DNA, 15 bp, Homo sapiens
ccccgtgtgtttccg

SEQ ID NO: 1479001 - DNA, 15 bp, Homo sapiens
gccccgtgtgtttcc

SEQ ID NO: 1479002 - DNA, 15 bp, Homo sapiens
tgccccgtgtgtttc

SEQ ID NO: 1479003 - DNA, 15 bp, Homo sapiens
ctgccccgtgtgttt

SEQ ID NO: 1479004 - DNA, 15 bp, Homo sapiens
gctgccccgtgtgtt

SEQ ID NO: 1479005 - DNA, 15 bp, Homo sapiens
cgctgccccgtgtgt

SEQ ID NO: 1479006 - DNA, 15 bp, Homo sapiens
gcgctgccccgtgtg

SEQ ID NO: 1479007 - DNA, 15 bp, Homo sapiens
ggcgctgccccgtgt

SEQ ID NO: 1479008 - DNA, 15 bp, Homo sapiens
gggcgctgccccgtg

SEQ ID NO: 1479009 - DNA, 15 bp, Homo sapiens
ggggcgctgccccgt

SEQ ID NO: 1479010 - DNA, 15 bp, Homo sapiens
aggggcgctgccccg

SEQ ID NO: 1479011 - DNA, 15 bp, Homo sapiens
aaggggcgctgcccc

SEQ ID NO: 1479012 - DNA, 15 bp, Homo sapiens
gaaggggcgctgccc

SEQ ID NO: 1479013 - DNA, 15 bp, Homo sapiens
ggaaggggcgctgcc

SEQ ID NO: 1479014 - DNA, 15 bp, Homo sapiens
cggaaggggcgctgc

SEQ ID NO: 1479015 - DNA, 15 bp, Homo sapiens
gcggaaggggcgctg

SEQ ID NO: 1479016 - DNA, 15 bp, Homo sapiens
agcggaaggggcgct

SEQ ID NO: 1479017 - DNA, 15 bp, Homo sapiens
cagcggaaggggcgc

SEQ ID NO: 1479018 - DNA, 15 bp, Homo sapiens
gcagcggaaggggcg

SEQ ID NO: 1479019 - DNA, 15 bp, Homo sapiens
ggcagcggaaggggc

SEQ ID NO: 1479020 - DNA, 15 bp, Homo sapiens
tggcagcggaagggg

SEQ ID NO: 1479021 - DNA, 15 bp, Homo sapiens
ctggcagcggaaggg

SEQ ID NO: 1479022 - DNA, 15 bp, Homo sapiens
gctggcagcggaagg

SEQ ID NO: 1479023 - DNA, 15 bp, Homo sapiens
agctggcagcggaag

SEQ ID NO: 1479024 - DNA, 15 bp, Homo sapiens
gagctggcagcggaa

SEQ ID NO: 1479025 - DNA, 15 bp, Homo sapiens
agagctggcagcgga

SEQ ID NO: 1479026 - DNA, 15 bp, Homo sapiens
cagagctggcagcgg

SEQ ID NO: 1479027 - DNA, 15 bp, Homo sapiens
gcagagctggcagcg

SEQ ID NO: 1479028 - DNA, 15 bp, Homo sapiens
ggcagagctggcagc

SEQ ID NO: 1479029 - DNA, 15 bp, Homo sapiens
gggcagagctggcag

SEQ ID NO: 1479030 - DNA, 15 bp, Homo sapiens
tgggcagagctggca

SEQ ID NO: 1479031 - DNA, 15 bp, Homo sapiens
gtgggcagagctggc

SEQ ID NO: 1479032 - DNA, 15 bp, Homo sapiens
cgtgggcagagctgg

SEQ ID NO: 1479033 - DNA, 15 bp, Homo sapiens
acgtgggcagagctg

SEQ ID NO: 1479034 - DNA, 15 bp, Homo sapiens
cacgtgggcagagct

SEQ ID NO: 1479035 - DNA, 15 bp, Homo sapiens
gcacgtgggcagagc

SEQ ID NO: 1479036 - DNA, 15 bp, Homo sapiens
agcacgtgggcagag

SEQ ID NO: 1479037 - DNA, 15 bp, Homo sapiens
aagcacgtgggcaga

SEQ ID NO: 1479038 - DNA, 15 bp, Homo sapiens
aaagcacgtgggcag

SEQ ID NO: 1479039 - DNA, 15 bp, Homo sapiens
aaaagcacgtgggca

SEQ ID NO: 1479040 - DNA, 15 bp, Homo sapiens
aaaaagcacgtgggc

SEQ ID NO: 1479041 - DNA, 15 bp, Homo sapiens
gaaaaagcacgtggg

SEQ ID NO: 1479042 - DNA, 15 bp, Homo sapiens
cgaaaaagcacgtgg

SEQ ID NO: 1479043 - DNA, 15 bp, Homo sapiens
gcgaaaaagcacgtg

SEQ ID NO: 1479044 - DNA, 15 bp, Homo sapiens
cgcgaaaaagcacgt

SEQ ID NO: 1479045 - DNA, 15 bp, Homo sapiens
gcgcgaaaaagcacg

SEQ ID NO: 1479046 - DNA, 15 bp, Homo sapiens
agcgcgaaaaagcac

SEQ ID NO: 1479047 - DNA, 15 bp, Homo sapiens
gagcgcgaaaaagca

SEQ ID NO: 1479048 - DNA, 15 bp, Homo sapiens
agagcgcgaaaaagc

SEQ ID NO: 1479049 - DNA, 15 bp, Homo sapiens
cagagcgcgaaaaag

SEQ ID NO: 1479050 - DNA, 15 bp, Homo sapiens
tcagagcgcgaaaaa

SEQ ID NO: 1479051 - DNA, 15 bp, Homo sapiens
gtcagagcgcgaaaa

SEQ ID NO: 1479052 - DNA, 15 bp, Homo sapiens
ggtcagagcgcgaaa

SEQ ID NO: 1479053 - DNA, 15 bp, Homo sapiens
tggtcagagcgcgaa

SEQ ID NO: 1479054 - DNA, 15 bp, Homo sapiens
gtggtcagagcgcga

SEQ ID NO: 1479055 - DNA, 15 bp, Homo sapiens
ggtggtcagagcgcg

SEQ ID NO: 1479056 - DNA, 15 bp, Homo sapiens
aggtggtcagagcgc

SEQ ID NO: 1479057 - DNA, 15 bp, Homo sapiens
caggtggtcagagcg

SEQ ID NO: 1479058 - DNA, 15 bp, Homo sapiens
ccaggtggtcagagc

SEQ ID NO: 1479059 - DNA, 15 bp, Homo sapiens
gccaggtggtcagag

SEQ ID NO: 1479060 - DNA, 15 bp, Homo sapiens
ggccaggtggtcaga

SEQ ID NO: 1479061 - DNA, 15 bp, Homo sapiens
aggccaggtggtcag

SEQ ID NO: 1479062 - DNA, 15 bp, Homo sapiens
aaggccaggtggtca

SEQ ID NO: 1479063 - DNA, 15 bp, Homo sapiens
caaggccaggtggtc

SEQ ID NO: 1479064 - DNA, 15 bp, Homo sapiens
gcaaggccaggtggt

SEQ ID NO: 1479065 - DNA, 15 bp, Homo sapiens
tgcaaggccaggtgg

SEQ ID NO: 1479066 - DNA, 15 bp, Homo sapiens
gtgcaaggccaggtg

SEQ ID NO: 1479067 - DNA, 15 bp, Homo sapiens
tgtgcaaggccaggt

SEQ ID NO: 1479068 - DNA, 15 bp, Homo sapiens
atgtgcaaggccagg

SEQ ID NO: 1479069 - DNA, 15 bp, Homo sapiens
catgtgcaaggccag

SEQ ID NO: 1479070 - DNA, 15 bp, Homo sapiens
tcatgtgcaaggcca

SEQ ID NO: 1479071 - DNA, 15 bp, Homo sapiens
ttcatgtgcaaggcc

SEQ ID NO: 1479072 - DNA, 15 bp, Homo sapiens
cttcatgtgcaaggc

SEQ ID NO: 1479073 - DNA, 15 bp, Homo sapiens
gcttcatgtgcaagg

SEQ ID NO: 1479074 - DNA, 15 bp, Homo sapiens
cgcttcatgtgcaag

SEQ ID NO: 1479075 - DNA, 15 bp, Homo sapiens
gcgcttcatgtgcaa

SEQ ID NO: 1479076 - DNA, 15 bp, Homo sapiens
ggcgcttcatgtgca

SEQ ID NO: 1479077 - DNA, 15 bp, Homo sapiens
tggcgcttcatgtgc

SEQ ID NO: 1479078 - DNA, 15 bp, Homo sapiens
gtggcgcttcatgtg

SEQ ID NO: 1479079 - DNA, 15 bp, Homo sapiens
ggtggcgcttcatgt

SEQ ID NO: 1479080 - DNA, 15 bp, Homo sapiens
aggtggcgcttcatg

SEQ ID NO: 1479081 - DNA, 15 bp, Homo sapiens
aaggtggcgcttcat

SEQ ID NO: 1479082 - DNA, 15 bp, Homo sapiens
aaaggtggcgcttca

SEQ ID NO: 1479083 - DNA, 15 bp, Homo sapiens
caaaggtggcgcttc

SEQ ID NO: 1479084 - DNA, 15 bp, Homo sapiens
tcaaaggtggcgctt

SEQ ID NO: 1479085 - DNA, 15 bp, Homo sapiens
ctcaaaggtggcgct

SEQ ID NO: 1479086 - DNA, 15 bp, Homo sapiens
gctcaaaggtggcgc

SEQ ID NO: 1479087 - DNA, 15 bp, Homo sapiens
ggctcaaaggtggcg

SEQ ID NO: 1479088 - DNA, 15 bp, Homo sapiens
gggctcaaaggtggc

SEQ ID NO: 1479089 - DNA, 15 bp, Homo sapiens
agggctcaaaggtgg

SEQ ID NO: 1479090 - DNA, 15 bp, Homo sapiens
cagggctcaaaggtg

SEQ ID NO: 1479091 - DNA, 15 bp, Homo sapiens
gcagggctcaaaggt

SEQ ID NO: 1479092 - DNA, 15 bp, Homo sapiens
ggcagggctcaaagg

SEQ ID NO: 1479093 - DNA, 15 bp, Homo sapiens
gggcagggctcaaag

SEQ ID NO: 1479094 - DNA, 15 bp, Homo sapiens
agggcagggctcaaa

SEQ ID NO: 1479095 - DNA, 15 bp, Homo sapiens
cagggcagggctcaa

SEQ ID NO: 1479096 - DNA, 15 bp, Homo sapiens
ccagggcagggctca

SEQ ID NO: 1479097 - DNA, 15 bp, Homo sapiens
gccagggcagggctc

SEQ ID NO: 1479098 - DNA, 15 bp, Homo sapiens
tgccagggcagggct

SEQ ID NO: 1479099 - DNA, 15 bp, Homo sapiens
gtgccagggcagggc

SEQ ID NO: 1479100 - DNA, 15 bp, Homo sapiens
agtgccagggcaggg

SEQ ID NO: 1479101 - DNA, 15 bp, Homo sapiens
aagtgccagggcagg

SEQ ID NO: 1479102 - DNA, 15 bp, Homo sapiens
caagtgccagggcag

SEQ ID NO: 1479103 - DNA, 15 bp, Homo sapiens
ccaagtgccagggca

SEQ ID NO: 1479104 - DNA, 15 bp, Homo sapiens
tccaagtgccagggc

SEQ ID NO: 1479105 - DNA, 15 bp, Homo sapiens
gtccaagtgccaggg

SEQ ID NO: 1479106 - DNA, 15 bp, Homo sapiens
agtccaagtgccagg

SEQ ID NO: 1479107 - DNA, 15 bp, Homo sapiens
gagtccaagtgccag

SEQ ID NO: 1479108 - DNA, 15 bp, Homo sapiens
agagtccaagtgcca

SEQ ID NO: 1479109 - DNA, 15 bp, Homo sapiens
gagagtccaagtgcc

SEQ ID NO: 1479110 - DNA, 15 bp, Homo sapiens
ggagagtccaagtgc

SEQ ID NO: 1479111 - DNA, 15 bp, Homo sapiens
aggagagtccaagtg

SEQ ID NO: 1479112 - DNA, 15 bp, Homo sapiens
taggagagtccaagt

SEQ ID NO: 1479113 - DNA, 15 bp, Homo sapiens
ctaggagagtccaag

SEQ ID NO: 1479114 - DNA, 15 bp, Homo sapiens
actaggagagtccaa

SEQ ID NO: 1479115 - DNA, 15 bp, Homo sapiens
cactaggagagtcca

SEQ ID NO: 1479116 - DNA, 15 bp, Homo sapiens
tcactaggagagtcc

SEQ ID NO: 1479117 - DNA, 15 bp, Homo sapiens
gtcactaggagagtc

SEQ ID NO: 1479118 - DNA, 15 bp, Homo sapiens
agtcactaggagagt

SEQ ID NO: 1479119 - DNA, 15 bp, Homo sapiens
cagtcactaggagag

SEQ ID NO: 1479120 - DNA, 15 bp, Homo sapiens
ccagtcactaggaga

SEQ ID NO: 1479121 - DNA, 15 bp, Homo sapiens
cccagtcactaggag

SEQ ID NO: 1479122 - DNA, 15 bp, Homo sapiens
ccccagtcactagga

SEQ ID NO: 1479123 - DNA, 15 bp, Homo sapiens
tccccagtcactagg

SEQ ID NO: 1479124 - DNA, 15 bp, Homo sapiens
atccccagtcactag

SEQ ID NO: 1479125 - DNA, 15 bp, Homo sapiens
catccccagtcacta

SEQ ID NO: 1479126 - DNA, 15 bp, Homo sapiens
ccatccccagtcact

SEQ ID NO: 1479127 - DNA, 15 bp, Homo sapiens
cccatccccagtcac

SEQ ID NO: 1479128 - DNA, 15 bp, Homo sapiens
tcccatccccagtca

SEQ ID NO: 1479129 - DNA, 15 bp, Homo sapiens
gtcccatccccagtc

SEQ ID NO: 1479130 - DNA, 15 bp, Homo sapiens
tgtcccatccccagt

SEQ ID NO: 1479131 - DNA, 15 bp, Homo sapiens
ttgtcccatccccag

SEQ ID NO: 1479132 - DNA, 15 bp, Homo sapiens
cttgtcccatcccca

SEQ ID NO: 1479133 - DNA, 15 bp, Homo sapiens
tcttgtcccatcccc

SEQ ID NO: 1479134 - DNA, 15 bp, Homo sapiens
ttcttgtcccatccc

SEQ ID NO: 1479135 - DNA, 15 bp, Homo sapiens
cttcttgtcccatcc

SEQ ID NO: 1479136 - DNA, 15 bp, Homo sapiens
gcttcttgtcccatc

SEQ ID NO: 1479137 - DNA, 15 bp, Homo sapiens
ggcttcttgtcccat

SEQ ID NO: 1479138 - DNA, 15 bp, Homo sapiens
aggcttcttgtccca

SEQ ID NO: 1479139 - DNA, 15 bp, Homo sapiens
caggcttcttgtccc

SEQ ID NO: 1479140 - DNA, 15 bp, Homo sapiens
acaggcttcttgtcc

SEQ ID NO: 1479141 - DNA, 15 bp, Homo sapiens
aacaggcttcttgtc

SEQ ID NO: 1479142 - DNA, 15 bp, Homo sapiens
aaacaggcttcttgt

SEQ ID NO: 1479143 - DNA, 15 bp, Homo sapiens
caaacaggcttcttg

SEQ ID NO: 1479144 - DNA, 15 bp, Homo sapiens
ccaaacaggcttctt

SEQ ID NO: 1479145 - DNA, 15 bp, Homo sapiens
accaaacaggcttct

SEQ ID NO: 1479146 - DNA, 15 bp, Homo sapiens
caccaaacaggcttc

SEQ ID NO: 1479147 - DNA, 15 bp, Homo sapiens
ccaccaaacaggctt

SEQ ID NO: 1479148 - DNA, 15 bp, Homo sapiens
accaccaaacaggct

SEQ ID NO: 1479149 - DNA, 15 bp, Homo sapiens
gaccaccaaacaggc

SEQ ID NO: 1479150 - DNA, 15 bp, Homo sapiens
agaccaccaaacagg

SEQ ID NO: 1479151 - DNA, 15 bp, Homo sapiens
gagaccaccaaacag

SEQ ID NO: 1479152 - DNA, 15 bp, Homo sapiens
agagaccaccaaaca

SEQ ID NO: 1479153 - DNA, 15 bp, Homo sapiens
aagagaccaccaaac

SEQ ID NO: 1479154 - DNA, 15 bp, Homo sapiens
gaagagaccaccaaa

SEQ ID NO: 1479155 - DNA, 15 bp, Homo sapiens
tgaagagaccaccaa

SEQ ID NO: 1479156 - DNA, 15 bp, Homo sapiens
gtgaagagaccacca

SEQ ID NO: 1479157 - DNA, 15 bp, Homo sapiens
tgtgaagagaccacc

SEQ ID NO: 1479158 - DNA, 15 bp, Homo sapiens
gtgtgaagagaccac

SEQ ID NO: 1479159 - DNA, 15 bp, Homo sapiens
cgtgtgaagagacca

SEQ ID NO: 1479160 - DNA, 15 bp, Homo sapiens
ccgtgtgaagagacc

SEQ ID NO: 1479161 - DNA, 15 bp, Homo sapiens
tccgtgtgaagagac

SEQ ID NO: 1479162 - DNA, 15 bp, Homo sapiens
gtccgtgtgaagaga

SEQ ID NO: 1479163 - DNA, 15 bp, Homo sapiens
cgtccgtgtgaagag

SEQ ID NO: 1479164 - DNA, 15 bp, Homo sapiens
gcgtccgtgtgaaga

SEQ ID NO: 1479165 - DNA, 15 bp, Homo sapiens
cgcgtccgtgtgaag

SEQ ID NO: 1479166 - DNA, 15 bp, Homo sapiens
gcgcgtccgtgtgaa

SEQ ID NO: 1479167 - DNA, 15 bp, Homo sapiens
cgcgcgtccgtgtga

SEQ ID NO: 1479168 - DNA, 15 bp, Homo sapiens
acgcgcgtccgtgtg

SEQ ID NO: 1479169 - DNA, 15 bp, Homo sapiens
cacgcgcgtccgtgt

SEQ ID NO: 1479170 - DNA, 15 bp, Homo sapiens
tcacgcgcgtccgtg

SEQ ID NO: 1479171 - DNA, 15 bp, Homo sapiens
gtcacgcgcgtccgt

SEQ ID NO: 1479172 - DNA, 15 bp, Homo sapiens
tgtcacgcgcgtccg

SEQ ID NO: 1479173 - DNA, 15 bp, Homo sapiens
gtgtcacgcgcgtcc

SEQ ID NO: 1479174 - DNA, 15 bp, Homo sapiens
tgtgtcacgcgcgtc

SEQ ID NO: 1479175 - DNA, 15 bp, Homo sapiens
ttgtgtcacgcgcgt

SEQ ID NO: 1479176 - DNA, 15 bp, Homo sapiens
attgtgtcacgcgcg

SEQ ID NO: 1479177 - DNA, 15 bp, Homo sapiens
cattgtgtcacgcgc

SEQ ID NO: 1479178 - DNA, 15 bp, Homo sapiens
gcattgtgtcacgcg

SEQ ID NO: 1479179 - DNA, 15 bp, Homo sapiens
agcattgtgtcacgc

SEQ ID NO: 1479180 - DNA, 15 bp, Homo sapiens
cagcattgtgtcacg

SEQ ID NO: 1479181 - DNA, 15 bp, Homo sapiens
ccagcattgtgtcac

SEQ ID NO: 1479182 - DNA, 15 bp, Homo sapiens
cccagcattgtgtca

SEQ ID NO: 1479183 - DNA, 15 bp, Homo sapiens
acccagcattgtgtc

SEQ ID NO: 1479184 - DNA, 15 bp, Homo sapiens
cacccagcattgtgt

SEQ ID NO: 1479185 - DNA, 15 bp, Homo sapiens
ccacccagcattgtg

SEQ ID NO: 1479186 - DNA, 15 bp, Homo sapiens
accacccagcattgt

SEQ ID NO: 1479187 - DNA, 15 bp, Homo sapiens
aaccacccagcattg

SEQ ID NO: 1479188 - DNA, 15 bp, Homo sapiens
aaaccacccagcatt

SEQ ID NO: 1479189 - DNA, 15 bp, Homo sapiens
aaaaccacccagcat

SEQ ID NO: 1479190 - DNA, 15 bp, Homo sapiens
gaaaaccacccagca

SEQ ID NO: 1479191 - DNA, 15 bp, Homo sapiens
ggaaaaccacccagc

SEQ ID NO: 1479192 - DNA, 15 bp, Homo sapiens
gggaaaaccacccag

SEQ ID NO: 1479193 - DNA, 15 bp, Homo sapiens
tgggaaaaccaccca

SEQ ID NO: 1479194 - DNA, 15 bp, Homo sapiens
gtgggaaaaccaccc

SEQ ID NO: 1479195 - DNA, 15 bp, Homo sapiens
cgtgggaaaaccacc

SEQ ID NO: 1479196 - DNA, 15 bp, Homo sapiens
tcgtgggaaaaccac

SEQ ID NO: 1479197 - DNA, 15 bp, Homo sapiens
ttcgtgggaaaacca

SEQ ID NO: 1479198 - DNA, 15 bp, Homo sapiens
attcgtgggaaaacc

SEQ ID NO: 1479199 - DNA, 15 bp, Homo sapiens
cattcgtgggaaaac

SEQ ID NO: 1479200 - DNA, 15 bp, Homo sapiens
ccattcgtgggaaaa

SEQ ID NO: 1479201 - DNA, 15 bp, Homo sapiens
tccattcgtgggaaa

SEQ ID NO: 1479202 - DNA, 15 bp, Homo sapiens
gtccattcgtgggaa

SEQ ID NO: 1479203 - DNA, 15 bp, Homo sapiens
ggtccattcgtggga

SEQ ID NO: 1479204 - DNA, 15 bp, Homo sapiens
gggtccattcgtggg

SEQ ID NO: 1479205 - DNA, 15 bp, Homo sapiens
agggtccattcgtgg

SEQ ID NO: 1479206 - DNA, 15 bp, Homo sapiens
gagggtccattcgtg

SEQ ID NO: 1479207 - DNA, 15 bp, Homo sapiens
agagggtccattcgt

SEQ ID NO: 1479208 - DNA, 15 bp, Homo sapiens
gagagggtccattcg

SEQ ID NO: 1479209 - DNA, 15 bp, Homo sapiens
ggagagggtccattc

SEQ ID NO: 1479210 - DNA, 15 bp, Homo sapiens
aggagagggtccatt

SEQ ID NO: 1479211 - DNA, 15 bp, Homo sapiens
caggagagggtccat

SEQ ID NO: 1479212 - DNA, 15 bp, Homo sapiens
ccaggagagggtcca

SEQ ID NO: 1479213 - DNA, 15 bp, Homo sapiens
tccaggagagggtcc

SEQ ID NO: 1479214 - DNA, 15 bp, Homo sapiens
gtccaggagagggtc

SEQ ID NO: 1479215 - DNA, 15 bp, Homo sapiens
agtccaggagagggt

SEQ ID NO: 1479216 - DNA, 15 bp, Homo sapiens
gagtccaggagaggg

SEQ ID NO: 1479217 - DNA, 15 bp, Homo sapiens
cgagtccaggagagg

SEQ ID NO: 1479218 - DNA, 15 bp, Homo sapiens
gcgagtccaggagag

SEQ ID NO: 1479219 - DNA, 15 bp, Homo sapiens
cgcgagtccaggaga

SEQ ID NO: 1479220 - DNA, 15 bp, Homo sapiens
acgcgagtccaggag

SEQ ID NO: 1479221 - DNA, 15 bp, Homo sapiens
aacgcgagtccagga

SEQ ID NO: 1479222 - DNA, 15 bp, Homo sapiens
gaacgcgagtccagg

SEQ ID NO: 1479223 - DNA, 15 bp, Homo sapiens
ggaacgcgagtccag

SEQ ID NO: 1479224 - DNA, 15 bp, Homo sapiens
gggaacgcgagtcca

SEQ ID NO: 1479225 - DNA, 15 bp, Homo sapiens
tgggaacgcgagtcc

SEQ ID NO: 1479226 - DNA, 15 bp, Homo sapiens
ttgggaacgcgagtc

SEQ ID NO: 1479227 - DNA, 15 bp, Homo sapiens
tttgggaacgcgagt

SEQ ID NO: 1479228 - DNA, 15 bp, Homo sapiens
ctttgggaacgcgag

SEQ ID NO: 1479229 - DNA, 15 bp, Homo sapiens
tctttgggaacgcga

SEQ ID NO: 1479230 - DNA, 15 bp, Homo sapiens
atctttgggaacgcg

SEQ ID NO: 1479231 - DNA, 15 bp, Homo sapiens
gatctttgggaacgc

SEQ ID NO: 1479232 - DNA, 15 bp, Homo sapiens
ggatctttgggaacg

SEQ ID NO: 1479233 - DNA, 15 bp, Homo sapiens
tggatctttgggaac

SEQ ID NO: 1479234 - DNA, 15 bp, Homo sapiens
gtggatctttgggaa

SEQ ID NO: 1479235 - DNA, 15 bp, Homo sapiens
ggtggatctttggga

SEQ ID NO: 1479236 - DNA, 15 bp, Homo sapiens
gggtggatctttggg

SEQ ID NO: 1479237 - DNA, 15 bp, Homo sapiens
tgggtggatctttgg

SEQ ID NO: 1479238 - DNA, 15 bp, Homo sapiens
ttgggtggatctttg

SEQ ID NO: 1479239 - DNA, 15 bp, Homo sapiens
tttgggtggatcttt

SEQ ID NO: 1479240 - DNA, 15 bp, Homo sapiens
atttgggtggatctt

SEQ ID NO: 1479241 - DNA, 15 bp, Homo sapiens
tatttgggtggatct

SEQ ID NO: 1479242 - DNA, 15 bp, Homo sapiens
atatttgggtggatc

SEQ ID NO: 1479243 - DNA, 15 bp, Homo sapiens
gatatttgggtggat

SEQ ID NO: 1479244 - DNA, 15 bp, Homo sapiens
tgatatttgggtgga

SEQ ID NO: 1479245 - DNA, 15 bp, Homo sapiens
ttgatatttgggtgg

SEQ ID NO: 1479246 - DNA, 15 bp, Homo sapiens
tttgatatttgggtg

SEQ ID NO: 1479247 - DNA, 15 bp, Homo sapiens
gtttgatatttgggt

SEQ ID NO: 1479248 - DNA, 15 bp, Homo sapiens
tgtttgatatttggg

SEQ ID NO: 1479249 - DNA, 15 bp, Homo sapiens
gtgtttgatatttgg

SEQ ID NO: 1479250 - DNA, 15 bp, Homo sapiens
cgtgtttgatatttg

SEQ ID NO: 1479251 - DNA, 15 bp, Homo sapiens
ccgtgtttgatattt

SEQ ID NO: 1479252 - DNA, 15 bp, Homo sapiens
tccgtgtttgatatt

SEQ ID NO: 1479253 - DNA, 15 bp, Homo sapiens
gtccgtgtttgatat

SEQ ID NO: 1479254 - DNA, 15 bp, Homo sapiens
ggtccgtgtttgata

SEQ ID NO: 1479255 - DNA, 15 bp, Homo sapiens
gggtccgtgtttgat

SEQ ID NO: 1479256 - DNA, 15 bp, Homo sapiens
tgggtccgtgtttga

SEQ ID NO: 1479257 - DNA, 15 bp, Homo sapiens
atgggtccgtgtttg

SEQ ID NO: 1479258 - DNA, 15 bp, Homo sapiens
tatgggtccgtgttt

SEQ ID NO: 1479259 - DNA, 15 bp, Homo sapiens
ctatgggtccgtgtt

SEQ ID NO: 1479260 - DNA, 15 bp, Homo sapiens
tctatgggtccgtgt

SEQ ID NO: 1479261 - DNA, 15 bp, Homo sapiens
gtctatgggtccgtg

SEQ ID NO: 1479262 - DNA, 15 bp, Homo sapiens
tgtctatgggtccgt

SEQ ID NO: 1479263 - DNA, 15 bp, Homo sapiens
ctgtctatgggtccg

SEQ ID NO: 1479264 - DNA, 15 bp, Homo sapiens
gctgtctatgggtcc

SEQ ID NO: 1479265 - DNA, 15 bp, Homo sapiens
ggctgtctatgggtc

SEQ ID NO: 1479266 - DNA, 15 bp, Homo sapiens
gggctgtctatgggt

SEQ ID NO: 1479267 - DNA, 15 bp, Homo sapiens
agggctgtctatggg

SEQ ID NO: 1479268 - DNA, 15 bp, Homo sapiens
cagggctgtctatgg

SEQ ID NO: 1479269 - DNA, 15 bp, Homo sapiens
ccagggctgtctatg

SEQ ID NO: 1479270 - DNA, 15 bp, Homo sapiens
cccagggctgtctat

SEQ ID NO: 1479271 - DNA, 15 bp, Homo sapiens
ccccagggctgtcta

SEQ ID NO: 1479272 - DNA, 15 bp, Homo sapiens
cccccagggctgtct

SEQ ID NO: 1479273 - DNA, 15 bp, Homo sapiens
tcccccagggctgtc

SEQ ID NO: 1479274 - DNA, 15 bp, Homo sapiens
ctcccccagggctgt

SEQ ID NO: 1479275 - DNA, 15 bp, Homo sapiens
gctcccccagggctg

SEQ ID NO: 1479276 - DNA, 15 bp, Homo sapiens
ggctcccccagggct

SEQ ID NO: 1479277 - DNA, 15 bp, Homo sapiens
aggctcccccagggc

SEQ ID NO: 1479278 - DNA, 15 bp, Homo sapiens
gaggctcccccaggg

SEQ ID NO: 1479279 - DNA, 15 bp, Homo sapiens
agaggctcccccagg

SEQ ID NO: 1479280 - DNA, 15 bp, Homo sapiens
aagaggctcccccag

SEQ ID NO: 1479281 - DNA, 15 bp, Homo sapiens
taagaggctccccca

SEQ ID NO: 1479282 - DNA, 15 bp, Homo sapiens
gtaagaggctccccc

SEQ ID NO: 1479283 - DNA, 15 bp, Homo sapiens
cgtaagaggctcccc

SEQ ID NO: 1479284 - DNA, 15 bp, Homo sapiens
ccgtaagaggctccc

SEQ ID NO: 1479285 - DNA, 15 bp, Homo sapiens
tccgtaagaggctcc

SEQ ID NO: 1479286 - DNA, 15 bp, Homo sapiens
ttccgtaagaggctc

SEQ ID NO: 1479287 - DNA, 15 bp, Homo sapiens
tttccgtaagaggct

SEQ ID NO: 1479288 - DNA, 15 bp, Homo sapiens
ttttccgtaagaggc

SEQ ID NO: 1479289 - DNA, 15 bp, Homo sapiens
attttccgtaagagg

SEQ ID NO: 1479290 - DNA, 15 bp, Homo sapiens
gattttccgtaagag

SEQ ID NO: 1479291 - DNA, 15 bp, Homo sapiens
ggattttccgtaaga

SEQ ID NO: 1479292 - DNA, 15 bp, Homo sapiens
cggattttccgtaag

SEQ ID NO: 1479293 - DNA, 15 bp, Homo sapiens
tcggattttccgtaa

SEQ ID NO: 1479294 - DNA, 15 bp, Homo sapiens
gtcggattttccgta

SEQ ID NO: 1479295 - DNA, 15 bp, Homo sapiens
tgtcggattttccgt

SEQ ID NO: 1479296 - DNA, 15 bp, Homo sapiens
ttgtcggattttccg

SEQ ID NO: 1479297 - DNA, 15 bp, Homo sapiens
cttgtcggattttcc

SEQ ID NO: 1479298 - DNA, 15 bp, Homo sapiens
gcttgtcggattttc

SEQ ID NO: 1479299 - DNA, 15 bp, Homo sapiens
ggcttgtcggatttt

SEQ ID NO: 1479300 - DNA, 15 bp, Homo sapiens
aggcttgtcggattt

SEQ ID NO: 1479301 - DNA, 15 bp, Homo sapiens
aaggcttgtcggatt

SEQ ID NO: 1479302 - DNA, 15 bp, Homo sapiens
gaaggcttgtcggat

SEQ ID NO: 1479303 - DNA, 15 bp, Homo sapiens
tgaaggcttgtcgga

SEQ ID NO: 1479304 - DNA, 15 bp, Homo sapiens
ctgaaggcttgtcgg

SEQ ID NO: 1479305 - DNA, 15 bp, Homo sapiens
gctgaaggcttgtcg

SEQ ID NO: 1479306 - DNA, 15 bp, Homo sapiens
ggctgaaggcttgtc

SEQ ID NO: 1479307 - DNA, 15 bp, Homo sapiens
tggctgaaggcttgt

SEQ ID NO: 1479308 - DNA, 15 bp, Homo sapiens
gtggctgaaggcttg

SEQ ID NO: 1479309 - DNA, 15 bp, Homo sapiens
tgtggctgaaggctt

SEQ ID NO: 1479310 - DNA, 15 bp, Homo sapiens
ctgtggctgaaggct

SEQ ID NO: 1479311 - DNA, 15 bp, Homo sapiens
cctgtggctgaaggc

SEQ ID NO: 1479312 - DNA, 15 bp, Homo sapiens
ccctgtggctgaagg

SEQ ID NO: 1479313 - DNA, 15 bp, Homo sapiens
tccctgtggctgaag

SEQ ID NO: 1479314 - DNA, 15 bp, Homo sapiens
ctccctgtggctgaa

SEQ ID NO: 1479315 - DNA, 15 bp, Homo sapiens
gctccctgtggctga

SEQ ID NO: 1479316 - DNA, 15 bp, Homo sapiens
ggctccctgtggctg

SEQ ID NO: 1479317 - DNA, 15 bp, Homo sapiens
tggctccctgtggct

SEQ ID NO: 1479318 - DNA, 15 bp, Homo sapiens
gtggctccctgtggc

SEQ ID NO: 1479319 - DNA, 15 bp, Homo sapiens
tgtggctccctgtgg

SEQ ID NO: 1479320 - DNA, 15 bp, Homo sapiens
gtgtggctccctgtg

SEQ ID NO: 1479321 - DNA, 15 bp, Homo sapiens
tgtgtggctccctgt

SEQ ID NO: 1479322 - DNA, 15 bp, Homo sapiens
ctgtgtggctccctg

SEQ ID NO: 1479323 - DNA, 15 bp, Homo sapiens
tctgtgtggctccct

SEQ ID NO: 1479324 - DNA, 15 bp, Homo sapiens
ctctgtgtggctccc

SEQ ID NO: 1479325 - DNA, 15 bp, Homo sapiens
tctctgtgtggctcc

SEQ ID NO: 1479326 - DNA, 15 bp, Homo sapiens
atctctgtgtggctc

SEQ ID NO: 1479327 - DNA, 15 bp, Homo sapiens
catctctgtgtggct

SEQ ID NO: 1479328 - DNA, 15 bp, Homo sapiens
acatctctgtgtggc

SEQ ID NO: 1479329 - DNA, 15 bp, Homo sapiens
gacatctctgtgtgg

SEQ ID NO: 1479330 - DNA, 15 bp, Homo sapiens
ggacatctctgtgtg

SEQ ID NO: 1479331 - DNA, 15 bp, Homo sapiens
tggacatctctgtgt

SEQ ID NO: 1479332 - DNA, 15 bp, Homo sapiens
ttggacatctctgtg

SEQ ID NO: 1479333 - DNA, 15 bp, Homo sapiens
tttggacatctctgt

SEQ ID NO: 1479334 - DNA, 15 bp, Homo sapiens
gtttggacatctctg

SEQ ID NO: 1479335 - DNA, 15 bp, Homo sapiens
agtttggacatctct

SEQ ID NO: 1479336 - DNA, 15 bp, Homo sapiens
cagtttggacatctc

SEQ ID NO: 1479337 - DNA, 15 bp, Homo sapiens
acagtttggacatct

SEQ ID NO: 1479338 - DNA, 15 bp, Homo sapiens
gacagtttggacatc

SEQ ID NO: 1479339 - DNA, 15 bp, Homo sapiens
cgacagtttggacat

SEQ ID NO: 1479340 - DNA, 15 bp, Homo sapiens
acgacagtttggaca

SEQ ID NO: 1479341 - DNA, 15 bp, Homo sapiens
cacgacagtttggac

SEQ ID NO: 1479342 - DNA, 15 bp, Homo sapiens
gcacgacagtttgga

SEQ ID NO: 1479343 - DNA, 15 bp, Homo sapiens
tgcacgacagtttgg

SEQ ID NO: 1479344 - DNA, 15 bp, Homo sapiens
ttgcacgacagtttg

SEQ ID NO: 1479345 - DNA, 15 bp, Homo sapiens
tttgcacgacagttt

SEQ ID NO: 1479346 - DNA, 15 bp, Homo sapiens
gtttgcacgacagtt

SEQ ID NO: 1479347 - DNA, 15 bp, Homo sapiens
ggtttgcacgacagt

SEQ ID NO: 1479348 - DNA, 15 bp, Homo sapiens
gggtttgcacgacag

SEQ ID NO: 1479349 - DNA, 15 bp, Homo sapiens
tgggtttgcacgaca

SEQ ID NO: 1479350 - DNA, 15 bp, Homo sapiens
ctgggtttgcacgac

SEQ ID NO: 1479351 - DNA, 15 bp, Homo sapiens
actgggtttgcacga

SEQ ID NO: 1479352 - DNA, 15 bp, Homo sapiens
cactgggtttgcacg

SEQ ID NO: 1479353 - DNA, 15 bp, Homo sapiens
tcactgggtttgcac

SEQ ID NO: 1479354 - DNA, 15 bp, Homo sapiens
ctcactgggtttgca

SEQ ID NO: 1479355 - DNA, 15 bp, Homo sapiens
tctcactgggtttgc

SEQ ID NO: 1479356 - DNA, 15 bp, Homo sapiens
gtctcactgggtttg

SEQ ID NO: 1479357 - DNA, 15 bp, Homo sapiens
tgtctcactgggttt

SEQ ID NO: 1479358 - DNA, 15 bp, Homo sapiens
ctgtctcactgggtt

SEQ ID NO: 1479359 - DNA, 15 bp, Homo sapiens
tctgtctcactgggt

SEQ ID NO: 1479360 - DNA, 15 bp, Homo sapiens
gtctgtctcactggg

SEQ ID NO: 1479361 - DNA, 15 bp, Homo sapiens
ggtctgtctcactgg

SEQ ID NO: 1479362 - DNA, 15 bp, Homo sapiens
cggtctgtctcactg

SEQ ID NO: 1479363 - DNA, 15 bp, Homo sapiens
gcggtctgtctcact

SEQ ID NO: 1479364 - DNA, 15 bp, Homo sapiens
ggcggtctgtctcac

SEQ ID NO: 1479365 - DNA, 15 bp, Homo sapiens
tggcggtctgtctca

SEQ ID NO: 1479366 - DNA, 15 bp, Homo sapiens
ttggcggtctgtctc

SEQ ID NO: 1479367 - DNA, 15 bp, Homo sapiens
tttggcggtctgtct

SEQ ID NO: 1479368 - DNA, 15 bp, Homo sapiens
atttggcggtctgtc

SEQ ID NO: 1479369 - DNA, 15 bp, Homo sapiens
tatttggcggtctgt

SEQ ID NO: 1479370 - DNA, 15 bp, Homo sapiens
ttatttggcggtctg

SEQ ID NO: 1479371 - DNA, 15 bp, Homo sapiens
tttatttggcggtct

SEQ ID NO: 1479372 - DNA, 15 bp, Homo sapiens
gtttatttggcggtc

SEQ ID NO: 1479373 - DNA, 15 bp, Homo sapiens
cgtttatttggcggt

SEQ ID NO: 1479374 - DNA, 15 bp, Homo sapiens
ccgtttatttggcgg

SEQ ID NO: 1479375 - DNA, 15 bp, Homo sapiens
tccgtttatttggcg

SEQ ID NO: 1479376 - DNA, 15 bp, Homo sapiens
gtccgtttatttggc

SEQ ID NO: 1479377 - DNA, 15 bp, Homo sapiens
agtccgtttatttgg

SEQ ID NO: 1479378 - DNA, 15 bp, Homo sapiens
gagtccgtttatttg

SEQ ID NO: 1479379 - DNA, 15 bp, Homo sapiens
tgagtccgtttattt

SEQ ID NO: 1479380 - DNA, 15 bp, Homo sapiens
ctgagtccgtttatt

SEQ ID NO: 1479381 - DNA, 15 bp, Homo sapiens
actgagtccgtttat

SEQ ID NO: 1479382 - DNA, 15 bp, Homo sapiens
cactgagtccgttta

SEQ ID NO: 1479383 - DNA, 15 bp, Homo sapiens
ccactgagtccgttt

SEQ ID NO: 1479384 - DNA, 15 bp, Homo sapiens
tccactgagtccgtt

SEQ ID NO: 1479385 - DNA, 15 bp, Homo sapiens
gtccactgagtccgt

SEQ ID NO: 1479386 - DNA, 15 bp, Homo sapiens
tgtccactgagtccg

SEQ ID NO: 1479387 - DNA, 15 bp, Homo sapiens
gtgtccactgagtcc

SEQ ID NO: 1479388 - DNA, 15 bp, Homo sapiens
agtgtccactgagtc

SEQ ID NO: 1479389 - DNA, 15 bp, Homo sapiens
gagtgtccactgagt

SEQ ID NO: 1479390 - DNA, 15 bp, Homo sapiens
tgagtgtccactgag

SEQ ID NO: 1479391 - DNA, 15 bp, Homo sapiens
ctgagtgtccactga

SEQ ID NO: 1479392 - DNA, 15 bp, Homo sapiens
tctgagtgtccactg

SEQ ID NO: 1479393 - DNA, 15 bp, Homo sapiens
gtctgagtgtccact

SEQ ID NO: 1479394 - DNA, 15 bp, Homo sapiens
ggtctgagtgtccac

SEQ ID NO: 1479395 - DNA, 15 bp, Homo sapiens
tggtctgagtgtcca

SEQ ID NO: 1479396 - DNA, 15 bp, Homo sapiens
ctggtctgagtgtcc

SEQ ID NO: 1479397 - DNA, 15 bp, Homo sapiens
gctggtctgagtgtc

SEQ ID NO: 1479398 - DNA, 15 bp, Homo sapiens
agctggtctgagtgt

SEQ ID NO: 1479399 - DNA, 15 bp, Homo sapiens
gagctggtctgagtg

SEQ ID NO: 1479400 - DNA, 15 bp, Homo sapiens
ggagctggtctgagt

SEQ ID NO: 1479401 - DNA, 15 bp, Homo sapiens
gggagctggtctgag

SEQ ID NO: 1479402 - DNA, 15 bp, Homo sapiens
tgggagctggtctga

SEQ ID NO: 1479403 - DNA, 15 bp, Homo sapiens
ctgggagctggtctg

SEQ ID NO: 1479404 - DNA, 15 bp, Homo sapiens
tctgggagctggtct

SEQ ID NO: 1479405 - DNA, 15 bp, Homo sapiens
atctgggagctggtc

SEQ ID NO: 1479406 - DNA, 15 bp, Homo sapiens
catctgggagctggt

SEQ ID NO: 1479407 - DNA, 15 bp, Homo sapiens
ccatctgggagctgg

SEQ ID NO: 1479408 - DNA, 15 bp, Homo sapiens
gccatctgggagctg

SEQ ID NO: 1479409 - DNA, 15 bp, Homo sapiens
ggccatctgggagct

SEQ ID NO: 1479410 - DNA, 15 bp, Homo sapiens
gggccatctgggagc

SEQ ID NO: 1479411 - DNA, 15 bp, Homo sapiens
agggccatctgggag

SEQ ID NO: 1479412 - DNA, 15 bp, Homo sapiens
cagggccatctggga

SEQ ID NO: 1479413 - DNA, 15 bp, Homo sapiens
ccagggccatctggg

SEQ ID NO: 1479414 - DNA, 15 bp, Homo sapiens
tccagggccatctgg

SEQ ID NO: 1479415 - DNA, 15 bp, Homo sapiens
gtccagggccatctg

SEQ ID NO: 1479416 - DNA, 15 bp, Homo sapiens
tgtccagggccatct

SEQ ID NO: 1479417 - DNA, 15 bp, Homo sapiens
ctgtccagggccatc

SEQ ID NO: 1479418 - DNA, 15 bp, Homo sapiens
gctgtccagggccat

SEQ ID NO: 1479419 - DNA, 15 bp, Homo sapiens
tgctgtccagggcca

SEQ ID NO: 1479420 - DNA, 15 bp, Homo sapiens
ctgctgtccagggcc

SEQ ID NO: 1479421 - DNA, 15 bp, Homo sapiens
cctgctgtccagggc

SEQ ID NO: 1479422 - DNA, 15 bp, Homo sapiens
tcctgctgtccaggg

SEQ ID NO: 1479423 - DNA, 15 bp, Homo sapiens
ctcctgctgtccagg

SEQ ID NO: 1479424 - DNA, 15 bp, Homo sapiens
tctcctgctgtccag

SEQ ID NO: 1479425 - DNA, 15 bp, Homo sapiens
ctctcctgctgtcca

SEQ ID NO: 1479426 - DNA, 15 bp, Homo sapiens
cctctcctgctgtcc

SEQ ID NO: 1479427 - DNA, 15 bp, Homo sapiens
ccctctcctgctgtc

SEQ ID NO: 1479428 - DNA, 15 bp, Homo sapiens
accctctcctgctgt

SEQ ID NO: 1479429 - DNA, 15 bp, Homo sapiens
caccctctcctgctg

SEQ ID NO: 1479430 - DNA, 15 bp, Homo sapiens
acaccctctcctgct

SEQ ID NO: 1479431 - DNA, 15 bp, Homo sapiens
cacaccctctcctgc

SEQ ID NO: 1479432 - DNA, 15 bp, Homo sapiens
ccacaccctctcctg

SEQ ID NO: 1479433 - DNA, 15 bp, Homo sapiens
cccacaccctctcct

SEQ ID NO: 1479434 - DNA, 15 bp, Homo sapiens
tcccacaccctctcc

SEQ ID NO: 1479435 - DNA, 15 bp, Homo sapiens
atcccacaccctctc

SEQ ID NO: 1479436 - DNA, 15 bp, Homo sapiens
catcccacaccctct

SEQ ID NO: 1479437 - DNA, 15 bp, Homo sapiens
tcatcccacaccctc

SEQ ID NO: 1479438 - DNA, 15 bp, Homo sapiens
ctcatcccacaccct

SEQ ID NO: 1479439 - DNA, 15 bp, Homo sapiens
cctcatcccacaccc

SEQ ID NO: 1479440 - DNA, 15 bp, Homo sapiens
gcctcatcccacacc

SEQ ID NO: 1479441 - DNA, 15 bp, Homo sapiens
agcctcatcccacac

SEQ ID NO: 1479442 - DNA, 15 bp, Homo sapiens
aagcctcatcccaca

SEQ ID NO: 1479443 - DNA, 15 bp, Homo sapiens
gaagcctcatcccac

SEQ ID NO: 1479444 - DNA, 15 bp, Homo sapiens
ggaagcctcatccca

SEQ ID NO: 1479445 - DNA, 15 bp, Homo sapiens
gggaagcctcatccc

SEQ ID NO: 1479446 - DNA, 15 bp, Homo sapiens
tgggaagcctcatcc

SEQ ID NO: 1479447 - DNA, 15 bp, Homo sapiens
ctgggaagcctcatc

SEQ ID NO: 1479448 - DNA, 15 bp, Homo sapiens
tctgggaagcctcat

SEQ ID NO: 1479449 - DNA, 15 bp, Homo sapiens
ctctgggaagcctca

SEQ ID NO: 1479450 - DNA, 15 bp, Homo sapiens
tctctgggaagcctc

SEQ ID NO: 1479451 - DNA, 15 bp, Homo sapiens
gtctctgggaagcct

SEQ ID NO: 1479452 - DNA, 15 bp, Homo sapiens
ggtctctgggaagcc

SEQ ID NO: 1479453 - DNA, 15 bp, Homo sapiens
gggtctctgggaagc

SEQ ID NO: 1479454 - DNA, 15 bp, Homo sapiens
agggtctctgggaag

SEQ ID NO: 1479455 - DNA, 15 bp, Homo sapiens
cagggtctctgggaa

SEQ ID NO: 1479456 - DNA, 15 bp, Homo sapiens
ccagggtctctggga

SEQ ID NO: 1479457 - DNA, 15 bp, Homo sapiens
cccagggtctctggg

SEQ ID NO: 1479458 - DNA, 15 bp, Homo sapiens
acccagggtctctgg

SEQ ID NO: 1479459 - DNA, 15 bp, Homo sapiens
gacccagggtctctg

SEQ ID NO: 1479460 - DNA, 15 bp, Homo sapiens
agacccagggtctct

SEQ ID NO: 1479461 - DNA, 15 bp, Homo sapiens
tagacccagggtctc

SEQ ID NO: 1479462 - DNA, 15 bp, Homo sapiens
ctagacccagggtct

SEQ ID NO: 1479463 - DNA, 15 bp, Homo sapiens
tctagacccagggtc

SEQ ID NO: 1479464 - DNA, 15 bp, Homo sapiens
ttctagacccagggt

SEQ ID NO: 1479465 - DNA, 15 bp, Homo sapiens
tttctagacccaggg

SEQ ID NO: 1479466 - DNA, 15 bp, Homo sapiens
ctttctagacccagg

SEQ ID NO: 1479467 - DNA, 15 bp, Homo sapiens
gctttctagacccag

SEQ ID NO: 1479468 - DNA, 15 bp, Homo sapiens
cgctttctagaccca

SEQ ID NO: 1479469 - DNA, 15 bp, Homo sapiens
ccgctttctagaccc

SEQ ID NO: 1479470 - DNA, 15 bp, Homo sapiens
gccgctttctagacc

SEQ ID NO: 1479471 - DNA, 15 bp, Homo sapiens
agccgctttctagac

SEQ ID NO: 1479472 - DNA, 15 bp, Homo sapiens
gagccgctttctaga

SEQ ID NO: 1479473 - DNA, 15 bp, Homo sapiens
ggagccgctttctag

SEQ ID NO: 1479474 - DNA, 15 bp, Homo sapiens
aggagccgctttcta

SEQ ID NO: 1479475 - DNA, 15 bp, Homo sapiens
caggagccgctttct

SEQ ID NO: 1479476 - DNA, 15 bp, Homo sapiens
tcaggagccgctttc

SEQ ID NO: 1479477 - DNA, 15 bp, Homo sapiens
ttcaggagccgcttt

SEQ ID NO: 1479478 - DNA, 15 bp, Homo sapiens
cttcaggagccgctt

SEQ ID NO: 1479479 - DNA, 15 bp, Homo sapiens
ccttcaggagccgct

SEQ ID NO: 1479480 - DNA, 15 bp, Homo sapiens
accttcaggagccgc

SEQ ID NO: 1479481 - DNA, 15 bp, Homo sapiens
gaccttcaggagccg

SEQ ID NO: 1479482 - DNA, 15 bp, Homo sapiens
ggaccttcaggagcc

SEQ ID NO: 1479483 - DNA, 15 bp, Homo sapiens
gggaccttcaggagc

SEQ ID NO: 1479484 - DNA, 15 bp, Homo sapiens
agggaccttcaggag

SEQ ID NO: 1479485 - DNA, 15 bp, Homo sapiens
aagggaccttcagga

SEQ ID NO: 1479486 - DNA, 15 bp, Homo sapiens
taagggaccttcagg

SEQ ID NO: 1479487 - DNA, 15 bp, Homo sapiens
ataagggaccttcag

SEQ ID NO: 1479488 - DNA, 15 bp, Homo sapiens
aataagggaccttca

SEQ ID NO: 1479489 - DNA, 15 bp, Homo sapiens
caataagggaccttc

SEQ ID NO: 1479490 - DNA, 15 bp, Homo sapiens
acaataagggacctt

SEQ ID NO: 1479491 - DNA, 15 bp, Homo sapiens
cacaataagggacct

SEQ ID NO: 1479492 - DNA, 15 bp, Homo sapiens
ccacaataagggacc

SEQ ID NO: 1479493 - DNA, 15 bp, Homo sapiens
gccacaataagggac

SEQ ID NO: 1479494 - DNA, 15 bp, Homo sapiens
agccacaataaggga

SEQ ID NO: 1479495 - DNA, 15 bp, Homo sapiens
cagccacaataaggg

SEQ ID NO: 1479496 - DNA, 15 bp, Homo sapiens
tcagccacaataagg

SEQ ID NO: 1479497 - DNA, 15 bp, Homo sapiens
atcagccacaataag

SEQ ID NO: 1479498 - DNA, 15 bp, Homo sapiens
tatcagccacaataa

SEQ ID NO: 1479499 - DNA, 15 bp, Homo sapiens
atatcagccacaata

SEQ ID NO: 1479500 - DNA, 15 bp, Homo sapiens
aatatcagccacaat

SEQ ID NO: 1479501 - DNA, 15 bp, Homo sapiens
taatatcagccacaa

SEQ ID NO: 1479502 - DNA, 15 bp, Homo sapiens
ttaatatcagccaca

SEQ ID NO: 1479503 - DNA, 15 bp, Homo sapiens
gttaatatcagccac

SEQ ID NO: 1479504 - DNA, 15 bp, Homo sapiens
agttaatatcagcca

SEQ ID NO: 1479505 - DNA, 15 bp, Homo sapiens
cagttaatatcagcc

SEQ ID NO: 1479506 - DNA, 15 bp, Homo sapiens
acagttaatatcagc

SEQ ID NO: 1479507 - DNA, 15 bp, Homo sapiens
gacagttaatatcag

SEQ ID NO: 1479508 - DNA, 15 bp, Homo sapiens
tgacagttaatatca

SEQ ID NO: 1479509 - DNA, 15 bp, Homo sapiens
ttgacagttaatatc

SEQ ID NO: 1479510 - DNA, 15 bp, Homo sapiens
attgacagttaatat

SEQ ID NO: 1479511 - DNA, 15 bp, Homo sapiens
cattgacagttaata

SEQ ID NO: 1479512 - DNA, 15 bp, Homo sapiens
ccattgacagttaat

SEQ ID NO: 1479513 - DNA, 15 bp, Homo sapiens
accattgacagttaa

SEQ ID NO: 1479514 - DNA, 15 bp, Homo sapiens
aaccattgacagtta

SEQ ID NO: 1479515 - DNA, 15 bp, Homo sapiens
taaccattgacagtt

SEQ ID NO: 1479516 - DNA, 15 bp, Homo sapiens
ataaccattgacagt

SEQ ID NO: 1479517 - DNA, 15 bp, Homo sapiens
cataaccattgacag

SEQ ID NO: 1479518 - DNA, 15 bp, Homo sapiens
ccataaccattgaca

SEQ ID NO: 1479519 - DNA, 15 bp, Homo sapiens
cccataaccattgac

SEQ ID NO: 1479520 - DNA, 15 bp, Homo sapiens
acccataaccattga

SEQ ID NO: 1479521 - DNA, 15 bp, Homo sapiens
gacccataaccattg

SEQ ID NO: 1479522 - DNA, 15 bp, Homo sapiens
ggacccataaccatt

SEQ ID NO: 1479523 - DNA, 15 bp, Homo sapiens
aggacccataaccat

SEQ ID NO: 1479524 - DNA, 15 bp, Homo sapiens
taggacccataacca

SEQ ID NO: 1479525 - DNA, 15 bp, Homo sapiens
ataggacccataacc

SEQ ID NO: 1479526 - DNA, 15 bp, Homo sapiens
tataggacccataac

SEQ ID NO: 1479527 - DNA, 15 bp, Homo sapiens
ttataggacccataa

SEQ ID NO: 1479528 - DNA, 15 bp, Homo sapiens
tttataggacccata

SEQ ID NO: 1479529 - DNA, 15 bp, Homo sapiens
ttttataggacccat

SEQ ID NO: 1479530 - DNA, 15 bp, Homo sapiens
tttttataggaccca

SEQ ID NO: 1479531 - DNA, 15 bp, Homo sapiens
atttttataggaccc

SEQ ID NO: 1479532 - DNA, 15 bp, Homo sapiens
catttttataggacc

SEQ ID NO: 1479533 - DNA, 15 bp, Homo sapiens
gcatttttataggac

SEQ ID NO: 1479534 - DNA, 15 bp, Homo sapiens
ggcatttttatagga

SEQ ID NO: 1479535 - DNA, 15 bp, Homo sapiens
gggcatttttatagg

SEQ ID NO: 1479536 - DNA, 15 bp, Homo sapiens
ggggcatttttatag

SEQ ID NO: 1479537 - DNA, 15 bp, Homo sapiens
aggggcatttttata

SEQ ID NO: 1479538 - DNA, 15 bp, Homo sapiens
gaggggcatttttat

SEQ ID NO: 1479539 - DNA, 15 bp, Homo sapiens
ggaggggcattttta

SEQ ID NO: 1479540 - DNA, 15 bp, Homo sapiens
gggaggggcattttt

SEQ ID NO: 1479541 - DNA, 15 bp, Homo sapiens
tgggaggggcatttt

SEQ ID NO: 1479542 - DNA, 15 bp, Homo sapiens
ctgggaggggcattt

SEQ ID NO: 1479543 - DNA, 15 bp, Homo sapiens
tctgggaggggcatt

SEQ ID NO: 1479544 - DNA, 15 bp, Homo sapiens
atctgggaggggcat

SEQ ID NO: 1479545 - DNA, 15 bp, Homo sapiens
tatctgggaggggca

SEQ ID NO: 1479546 - DNA, 15 bp, Homo sapiens
ttatctgggaggggc

SEQ ID NO: 1479547 - DNA, 15 bp, Homo sapiens
tttatctgggagggg

SEQ ID NO: 1479548 - DNA, 15 bp, Homo sapiens
ctttatctgggaggg

SEQ ID NO: 1479549 - DNA, 15 bp, Homo sapiens
gctttatctgggagg

SEQ ID NO: 1479550 - DNA, 15 bp, Homo sapiens
agctttatctgggag

SEQ ID NO: 1479551 - DNA, 15 bp, Homo sapiens
aagctttatctggga

SEQ ID NO: 1479552 - DNA, 15 bp, Homo sapiens
gaagctttatctggg

SEQ ID NO: 1479553 - DNA, 15 bp, Homo sapiens
tgaagctttatctgg

SEQ ID NO: 1479554 - DNA, 15 bp, Homo sapiens
ctgaagctttatctg

SEQ ID NO: 1479555 - DNA, 15 bp, Homo sapiens
gctgaagctttatct

SEQ ID NO: 1479556 - DNA, 15 bp, Homo sapiens
cgctgaagctttatc

SEQ ID NO: 1479557 - DNA, 15 bp, Homo sapiens
acgctgaagctttat

SEQ ID NO: 1479558 - DNA, 15 bp, Homo sapiens
aacgctgaagcttta

SEQ ID NO: 1479559 - DNA, 15 bp, Homo sapiens
caacgctgaagcttt

SEQ ID NO: 1479560 - DNA, 15 bp, Homo sapiens
ccaacgctgaagctt

SEQ ID NO: 1479561 - DNA, 15 bp, Homo sapiens
gccaacgctgaagct

SEQ ID NO: 1479562 - DNA, 15 bp, Homo sapiens
ggccaacgctgaagc

SEQ ID NO: 1479563 - DNA, 15 bp, Homo sapiens
aggccaacgctgaag

SEQ ID NO: 1479564 - DNA, 15 bp, Homo sapiens
caggccaacgctgaa

SEQ ID NO: 1479565 - DNA, 15 bp, Homo sapiens
tcaggccaacgctga

SEQ ID NO: 1479566 - DNA, 15 bp, Homo sapiens
ttcaggccaacgctg

SEQ ID NO: 1479567 - DNA, 15 bp, Homo sapiens
attcaggccaacgct

SEQ ID NO: 1479568 - DNA, 15 bp, Homo sapiens
aattcaggccaacgc

SEQ ID NO: 1479569 - DNA, 15 bp, Homo sapiens
aaattcaggccaacg

SEQ ID NO: 1479570 - DNA, 15 bp, Homo sapiens
aaaattcaggccaac

SEQ ID NO: 1479571 - DNA, 15 bp, Homo sapiens
aaaaattcaggccaa

SEQ ID NO: 1479572 - DNA, 15 bp, Homo sapiens
caaaaattcaggcca

SEQ ID NO: 1479573 - DNA, 15 bp, Homo sapiens
ccaaaaattcaggcc

SEQ ID NO: 1479574 - DNA, 15 bp, Homo sapiens
cccaaaaattcaggc

SEQ ID NO: 1479575 - DNA, 15 bp, Homo sapiens
acccaaaaattcagg

SEQ ID NO: 1479576 - DNA, 15 bp, Homo sapiens
aacccaaaaattcag

SEQ ID NO: 1479577 - DNA, 15 bp, Homo sapiens
aaacccaaaaattca

SEQ ID NO: 1479578 - DNA, 15 bp, Homo sapiens
aaaacccaaaaattc

SEQ ID NO: 1479579 - DNA, 15 bp, Homo sapiens
caaaacccaaaaatt

SEQ ID NO: 1479580 - DNA, 15 bp, Homo sapiens
ccaaaacccaaaaat

SEQ ID NO: 1479581 - DNA, 15 bp, Homo sapiens
tccaaaacccaaaaa

SEQ ID NO: 1479582 - DNA, 15 bp, Homo sapiens
ctccaaaacccaaaa

SEQ ID NO: 1479583 - DNA, 15 bp, Homo sapiens
cctccaaaacccaaa

SEQ ID NO: 1479584 - DNA, 15 bp, Homo sapiens
gcctccaaaacccaa

SEQ ID NO: 1479585 - DNA, 15 bp, Homo sapiens
agcctccaaaaccca

SEQ ID NO: 1479586 - DNA, 15 bp, Homo sapiens
cagcctccaaaaccc

SEQ ID NO: 1479587 - DNA, 15 bp, Homo sapiens
ccagcctccaaaacc

SEQ ID NO: 1479588 - DNA, 15 bp, Homo sapiens
tccagcctccaaaac

SEQ ID NO: 1479589 - DNA, 15 bp, Homo sapiens
ttccagcctccaaaa

SEQ ID NO: 1479590 - DNA, 15 bp, Homo sapiens
cttccagcctccaaa

SEQ ID NO: 1479591 - DNA, 15 bp, Homo sapiens
tcttccagcctccaa

SEQ ID NO: 1479592 - DNA, 15 bp, Homo sapiens
atcttccagcctcca

SEQ ID NO: 1479593 - DNA, 15 bp, Homo sapiens
catcttccagcctcc

SEQ ID NO: 1479594 - DNA, 15 bp, Homo sapiens
ccatcttccagcctc

SEQ ID NO: 1479595 - DNA, 15 bp, Homo sapiens
gccatcttccagcct

SEQ ID NO: 1479596 - DNA, 15 bp, Homo sapiens
tgccatcttccagcc

SEQ ID NO: 1479597 - DNA, 15 bp, Homo sapiens
ctgccatcttccagc

SEQ ID NO: 1479598 - DNA, 15 bp, Homo sapiens
cctgccatcttccag

SEQ ID NO: 1479599 - DNA, 15 bp, Homo sapiens
tcctgccatcttcca

SEQ ID NO: 1479600 - DNA, 15 bp, Homo sapiens
ctcctgccatcttcc

SEQ ID NO: 1479601 - DNA, 15 bp, Homo sapiens
cctcctgccatcttc

SEQ ID NO: 1479602 - DNA, 15 bp, Homo sapiens
gcctcctgccatctt

SEQ ID NO: 1479603 - DNA, 15 bp, Homo sapiens
agcctcctgccatct

SEQ ID NO: 1479604 - DNA, 15 bp, Homo sapiens
cagcctcctgccatc

SEQ ID NO: 1479605 - DNA, 15 bp, Homo sapiens
acagcctcctgccat

SEQ ID NO: 1479606 - DNA, 15 bp, Homo sapiens
tacagcctcctgcca

SEQ ID NO: 1479607 - DNA, 15 bp, Homo sapiens
ttacagcctcctgcc

SEQ ID NO: 1479608 - DNA, 15 bp, Homo sapiens
tttacagcctcctgc

SEQ ID NO: 1479609 - DNA, 15 bp, Homo sapiens
gtttacagcctcctg

SEQ ID NO: 1479610 - DNA, 15 bp, Homo sapiens
ggtttacagcctcct

SEQ ID NO: 1479611 - DNA, 15 bp, Homo sapiens
aggtttacagcctcc

SEQ ID NO: 1479612 - DNA, 15 bp, Homo sapiens
taggtttacagcctc

SEQ ID NO: 1479613 - DNA, 15 bp, Homo sapiens
ctaggtttacagcct

SEQ ID NO: 1479614 - DNA, 15 bp, Homo sapiens
tctaggtttacagcc

SEQ ID NO: 1479615 - DNA, 15 bp, Homo sapiens
ctctaggtttacagc

SEQ ID NO: 1479616 - DNA, 15 bp, Homo sapiens
cctctaggtttacag

SEQ ID NO: 1479617 - DNA, 15 bp, Homo sapiens
acctctaggtttaca

SEQ ID NO: 1479618 - DNA, 15 bp, Homo sapiens
gacctctaggtttac

SEQ ID NO: 1479619 - DNA, 15 bp, Homo sapiens
tgacctctaggttta

SEQ ID NO: 1479620 - DNA, 15 bp, Homo sapiens
atgacctctaggttt

SEQ ID NO: 1479621 - DNA, 15 bp, Homo sapiens
tatgacctctaggtt

SEQ ID NO: 1479622 - DNA, 15 bp, Homo sapiens
atatgacctctaggt

SEQ ID NO: 1479623 - DNA, 15 bp, Homo sapiens
aatatgacctctagg

SEQ ID NO: 1479624 - DNA, 15 bp, Homo sapiens
taatatgacctctag

SEQ ID NO: 1479625 - DNA, 15 bp, Homo sapiens
ctaatatgacctcta

SEQ ID NO: 1479626 - DNA, 15 bp, Homo sapiens
tctaatatgacctct

SEQ ID NO: 1479627 - DNA, 15 bp, Homo sapiens
ctctaatatgacctc

SEQ ID NO: 1479628 - DNA, 15 bp, Homo sapiens
cctctaatatgacct

SEQ ID NO: 1479629 - DNA, 15 bp, Homo sapiens
ccctctaatatgacc

SEQ ID NO: 1479630 - DNA, 15 bp, Homo sapiens
gccctctaatatgac

SEQ ID NO: 1479631 - DNA, 15 bp, Homo sapiens
ggccctctaatatga

SEQ ID NO: 1479632 - DNA, 15 bp, Homo sapiens
aggccctctaatatg

SEQ ID NO: 1479633 - DNA, 15 bp, Homo sapiens
aaggccctctaatat

SEQ ID NO: 1479634 - DNA, 15 bp, Homo sapiens
taaggccctctaata

SEQ ID NO: 1479635 - DNA, 15 bp, Homo sapiens
gtaaggccctctaat

SEQ ID NO: 1479636 - DNA, 15 bp, Homo sapiens
tgtaaggccctctaa

SEQ ID NO: 1479637 - DNA, 15 bp, Homo sapiens
gtgtaaggccctcta

SEQ ID NO: 1479638 - DNA, 15 bp, Homo sapiens
tgtgtaaggccctct

SEQ ID NO: 1479639 - DNA, 15 bp, Homo sapiens
gtgtgtaaggccctc

SEQ ID NO: 1479640 - DNA, 15 bp, Homo sapiens
ggtgtgtaaggccct

SEQ ID NO: 1479641 - DNA, 15 bp, Homo sapiens
gggtgtgtaaggccc

SEQ ID NO: 1479642 - DNA, 15 bp, Homo sapiens
agggtgtgtaaggcc

SEQ ID NO: 1479643 - DNA, 15 bp, Homo sapiens
gagggtgtgtaaggc

SEQ ID NO: 1479644 - DNA, 15 bp, Homo sapiens
tgagggtgtgtaagg

SEQ ID NO: 1479645 - DNA, 15 bp, Homo sapiens
atgagggtgtgtaag

SEQ ID NO: 1479646 - DNA, 15 bp, Homo sapiens
gatgagggtgtgtaa

SEQ ID NO: 1479647 - DNA, 15 bp, Homo sapiens
agatgagggtgtgta

SEQ ID NO: 1479648 - DNA, 15 bp, Homo sapiens
gagatgagggtgtgt

SEQ ID NO: 1479649 - DNA, 15 bp, Homo sapiens
ggagatgagggtgtg

SEQ ID NO: 1479650 - DNA, 15 bp, Homo sapiens
aggagatgagggtgt

SEQ ID NO: 1479651 - DNA, 15 bp, Homo sapiens
taggagatgagggtg

SEQ ID NO: 1479652 - DNA, 15 bp, Homo sapiens
ttaggagatgagggt

SEQ ID NO: 1479653 - DNA, 15 bp, Homo sapiens
tttaggagatgaggg

SEQ ID NO: 1479654 - DNA, 15 bp, Homo sapiens
gtttaggagatgagg

SEQ ID NO: 1479655 - DNA, 15 bp, Homo sapiens
agtttaggagatgag

SEQ ID NO: 1479656 - DNA, 15 bp, Homo sapiens
tagtttaggagatga

SEQ ID NO: 1479657 - DNA, 15 bp, Homo sapiens
gtagtttaggagatg

SEQ ID NO: 1479658 - DNA, 15 bp, Homo sapiens
tgtagtttaggagat

SEQ ID NO: 1479659 - DNA, 15 bp, Homo sapiens
ctgtagtttaggaga

SEQ ID NO: 1479660 - DNA, 15 bp, Homo sapiens
actgtagtttaggag

SEQ ID NO: 1479661 - DNA, 15 bp, Homo sapiens
cactgtagtttagga

SEQ ID NO: 1479662 - DNA, 15 bp, Homo sapiens
tcactgtagtttagg

SEQ ID NO: 1479663 - DNA, 15 bp, Homo sapiens
gtcactgtagtttag

SEQ ID NO: 1479664 - DNA, 15 bp, Homo sapiens
acatgcccagctaat

SEQ ID NO: 1479665 - DNA, 15 bp, Homo sapiens
cacatgcccagctaa

SEQ ID NO: 1479666 - DNA, 15 bp, Homo sapiens
ccacatgcccagcta

SEQ ID NO: 1479667 - DNA, 15 bp, Homo sapiens
gccacatgcccagct

SEQ ID NO: 1479668 - DNA, 15 bp, Homo sapiens
cgccacatgcccagc

SEQ ID NO: 1479669 - DNA, 15 bp, Homo sapiens
gcgccacatgcccag

SEQ ID NO: 1479670 - DNA, 15 bp, Homo sapiens
tgcgccacatgccca

SEQ ID NO: 1479671 - DNA, 15 bp, Homo sapiens
atgcgccacatgccc

SEQ ID NO: 1479672 - DNA, 15 bp, Homo sapiens
catgcgccacatgcc

SEQ ID NO: 1479673 - DNA, 15 bp, Homo sapiens
gcatgcgccacatgc

SEQ ID NO: 1479674 - DNA, 15 bp, Homo sapiens
ggcatgcgccacatg

SEQ ID NO: 1479675 - DNA, 15 bp, Homo sapiens
aggcatgcgccacat

SEQ ID NO: 1479676 - DNA, 15 bp, Homo sapiens
caggcatgcgccaca

SEQ ID NO: 1479677 - DNA, 15 bp, Homo sapiens
ttcctgagtagctgg

SEQ ID NO: 1479678 - DNA, 15 bp, Homo sapiens
cttcctgagtagctg

SEQ ID NO: 1479679 - DNA, 15 bp, Homo sapiens
gcttcctgagtagct

SEQ ID NO: 1479680 - DNA, 15 bp, Homo sapiens
agcttcctgagtagc

SEQ ID NO: 1479681 - DNA, 15 bp, Homo sapiens
cagcttcctgagtag

SEQ ID NO: 1479682 - DNA, 15 bp, Homo sapiens
tcagcttcctgagta

SEQ ID NO: 1479683 - DNA, 15 bp, Homo sapiens
ctcagcttcctgagt

SEQ ID NO: 1479684 - DNA, 15 bp, Homo sapiens
cctcagcttcctgag

SEQ ID NO: 1479685 - DNA, 15 bp, Homo sapiens
gcctcagcttcctga

SEQ ID NO: 1479686 - DNA, 15 bp, Homo sapiens
tgcctcagcttcctg

SEQ ID NO: 1479687 - DNA, 15 bp, Homo sapiens
ctgcctcagcttcct

SEQ ID NO: 1479688 - DNA, 15 bp, Homo sapiens
ctcctgcctcagctt

SEQ ID NO: 1479689 - DNA, 15 bp, Homo sapiens
gttcaagcaatcctc

SEQ ID NO: 1479690 - DNA, 15 bp, Homo sapiens
ggttcaagcaatcct

SEQ ID NO: 1479691 - DNA, 15 bp, Homo sapiens
aggttcaagcaatcc

SEQ ID NO: 1479692 - DNA, 15 bp, Homo sapiens
taggttcaagcaatc

SEQ ID NO: 1479693 - DNA, 15 bp, Homo sapiens
gcctcctaggttcaa

SEQ ID NO: 1479694 - DNA, 15 bp, Homo sapiens
cgcctcctaggttca

SEQ ID NO: 1479695 - DNA, 15 bp, Homo sapiens
ccgcctcctaggttc

SEQ ID NO: 1479696 - DNA, 15 bp, Homo sapiens
tccgcctcctaggtt

SEQ ID NO: 1479697 - DNA, 15 bp, Homo sapiens
atccgcctcctaggt

SEQ ID NO: 1479698 - DNA, 15 bp, Homo sapiens
catccgcctcctagg

SEQ ID NO: 1479699 - DNA, 15 bp, Homo sapiens
acatccgcctcctag

SEQ ID NO: 1479700 - DNA, 15 bp, Homo sapiens
aacatccgcctccta

SEQ ID NO: 1479701 - DNA, 15 bp, Homo sapiens
caacatccgcctcct

SEQ ID NO: 1479702 - DNA, 15 bp, Homo sapiens
gcaacatccgcctcc

SEQ ID NO: 1479703 - DNA, 15 bp, Homo sapiens
tgcaacatccgcctc

SEQ ID NO: 1479704 - DNA, 15 bp, Homo sapiens
ctgcaacatccgcct

SEQ ID NO: 1479705 - DNA, 15 bp, Homo sapiens
actgcaacatccgcc

SEQ ID NO: 1479706 - DNA, 15 bp, Homo sapiens
cactgcaacatccgc

SEQ ID NO: 1479707 - DNA, 15 bp, Homo sapiens
tcactgcaacatccg

SEQ ID NO: 1479708 - DNA, 15 bp, Homo sapiens
ctcactgcaacatcc

SEQ ID NO: 1479709 - DNA, 15 bp, Homo sapiens
gctcactgcaacatc

SEQ ID NO: 1479710 - DNA, 15 bp, Homo sapiens
agctcactgcaacat

SEQ ID NO: 1479711 - DNA, 15 bp, Homo sapiens
cagctcactgcaaca

SEQ ID NO: 1479712 - DNA, 15 bp, Homo sapiens
ccagtggtgtgatct

SEQ ID NO: 1479713 - DNA, 15 bp, Homo sapiens
tccagtggtgtgatc

SEQ ID NO: 1479714 - DNA, 15 bp, Homo sapiens
gtccagtggtgtgat

SEQ ID NO: 1479715 - DNA, 15 bp, Homo sapiens
agtccagtggtgtga

SEQ ID NO: 1479716 - DNA, 15 bp, Homo sapiens
gagtccagtggtgtg

SEQ ID NO: 1479717 - DNA, 15 bp, Homo sapiens
ggagtccagtggtgt

SEQ ID NO: 1479718 - DNA, 15 bp, Homo sapiens
tggagtccagtggtg

SEQ ID NO: 1479719 - DNA, 15 bp, Homo sapiens
ctggagtccagtggt

SEQ ID NO: 1479720 - DNA, 15 bp, Homo sapiens
gctggagtccagtgg

SEQ ID NO: 1479721 - DNA, 15 bp, Homo sapiens
ggctggagtccagtg

SEQ ID NO: 1479722 - DNA, 15 bp, Homo sapiens
aggctggagtccagt

SEQ ID NO: 1479723 - DNA, 15 bp, Homo sapiens
caggctggagtccag

SEQ ID NO: 1479724 - DNA, 15 bp, Homo sapiens
ccaggctggagtcca

SEQ ID NO: 1479725 - DNA, 15 bp, Homo sapiens
cccaggctggagtcc

SEQ ID NO: 1479726 - DNA, 15 bp, Homo sapiens
gcccaggctggagtc

SEQ ID NO: 1479727 - DNA, 15 bp, Homo sapiens
tgtctcactctgtcg

SEQ ID NO: 1479728 - DNA, 15 bp, Homo sapiens
ttgtctcactctgtc

SEQ ID NO: 1479729 - DNA, 15 bp, Homo sapiens
gttgtctcactctgt

SEQ ID NO: 1479730 - DNA, 15 bp, Homo sapiens
cgttgtctcactctg

SEQ ID NO: 1479731 - DNA, 15 bp, Homo sapiens
acgttgtctcactct

SEQ ID NO: 1479732 - DNA, 15 bp, Homo sapiens
cacgttgtctcactc

SEQ ID NO: 1479733 - DNA, 15 bp, Homo sapiens
acacgttgtctcact

SEQ ID NO: 1479734 - DNA, 15 bp, Homo sapiens
gacacgttgtctcac

SEQ ID NO: 1479735 - DNA, 15 bp, Homo sapiens
tgacacgttgtctca

SEQ ID NO: 1479736 - DNA, 15 bp, Homo sapiens
ttgacacgttgtctc

SEQ ID NO: 1479737 - DNA, 15 bp, Homo sapiens
tttgacacgttgtct

SEQ ID NO: 1479738 - DNA, 15 bp, Homo sapiens
ttttgacacgttgtc

SEQ ID NO: 1479739 - DNA, 15 bp, Homo sapiens
tttttgacacgttgt

SEQ ID NO: 1479740 - DNA, 15 bp, Homo sapiens
ttttttgacacgttg

SEQ ID NO: 1479741 - DNA, 15 bp, Homo sapiens
tttttttgacacgtt

SEQ ID NO: 1479742 - DNA, 15 bp, Homo sapiens
ttttttttgacacgt

SEQ ID NO: 1479743 - DNA, 15 bp, Homo sapiens
tttttttttgacacg

SEQ ID NO: 1479744 - DNA, 15 bp, Homo sapiens
ttttttttttgacac

SEQ ID NO: 1479745 - DNA, 15 bp, Homo sapiens
tttttttttttgaca

SEQ ID NO: 1479746 - DNA, 15 bp, Homo sapiens
ttttttttttttgac

SEQ ID NO: 1479747 - DNA, 15 bp, Homo sapiens
ctaactttttttttt

SEQ ID NO: 1479748 - DNA, 15 bp, Homo sapiens
gctaacttttttttt

SEQ ID NO: 1479749 - DNA, 15 bp, Homo sapiens
agctaactttttttt

SEQ ID NO: 1479750 - DNA, 15 bp, Homo sapiens
aagctaacttttttt

SEQ ID NO: 1479751 - DNA, 15 bp, Homo sapiens
caagctaactttttt

SEQ ID NO: 1479752 - DNA, 15 bp, Homo sapiens
tcaagctaacttttt

SEQ ID NO: 1479753 - DNA, 15 bp, Homo sapiens
gtcaagctaactttt

SEQ ID NO: 1479754 - DNA, 15 bp, Homo sapiens
ggtcaagctaacttt

SEQ ID NO: 1479755 - DNA, 15 bp, Homo sapiens
gggtcaagctaactt

SEQ ID NO: 1479756 - DNA, 15 bp, Homo sapiens
ggggtcaagctaact

SEQ ID NO: 1479757 - DNA, 15 bp, Homo sapiens
tggggtcaagctaac

SEQ ID NO: 1479758 - DNA, 15 bp, Homo sapiens
gtggggtcaagctaa

SEQ ID NO: 1479759 - DNA, 15 bp, Homo sapiens
agtggggtcaagcta

SEQ ID NO: 1479760 - DNA, 15 bp, Homo sapiens
gagtggggtcaagct

SEQ ID NO: 1479761 - DNA, 15 bp, Homo sapiens
ggagtggggtcaagc

SEQ ID NO: 1479762 - DNA, 15 bp, Homo sapiens
tggagtggggtcaag

SEQ ID NO: 1479763 - DNA, 15 bp, Homo sapiens
ctggagtggggtcaa

SEQ ID NO: 1479764 - DNA, 15 bp, Homo sapiens
cctggagtggggtca

SEQ ID NO: 1479765 - DNA, 15 bp, Homo sapiens
tcctggagtggggtc

SEQ ID NO: 1479766 - DNA, 15 bp, Homo sapiens
ttcctggagtggggt

SEQ ID NO: 1479767 - DNA, 15 bp, Homo sapiens
attcctggagtgggg

SEQ ID NO: 1479768 - DNA, 15 bp, Homo sapiens
cattcctggagtggg

SEQ ID NO: 1479769 - DNA, 15 bp, Homo sapiens
tcattcctggagtgg

SEQ ID NO: 1479770 - DNA, 15 bp, Homo sapiens
gtcattcctggagtg

SEQ ID NO: 1479771 - DNA, 15 bp, Homo sapiens
ggtcattcctggagt

SEQ ID NO: 1479772 - DNA, 15 bp, Homo sapiens
tggtcattcctggag

SEQ ID NO: 1479773 - DNA, 15 bp, Homo sapiens
ttggtcattcctgga

SEQ ID NO: 1479774 - DNA, 15 bp, Homo sapiens
cttggtcattcctgg

SEQ ID NO: 1479775 - DNA, 15 bp, Homo sapiens
gcttggtcattcctg

SEQ ID NO: 1479776 - DNA, 15 bp, Homo sapiens
tgcttggtcattcct

SEQ ID NO: 1479777 - DNA, 15 bp, Homo sapiens
ttgcttggtcattcc

SEQ ID NO: 1479778 - DNA, 15 bp, Homo sapiens
cttgcttggtcattc

SEQ ID NO: 1479779 - DNA, 15 bp, Homo sapiens
ccttgcttggtcatt

SEQ ID NO: 1479780 - DNA, 15 bp, Homo sapiens
cccttgcttggtcat

SEQ ID NO: 1479781 - DNA, 15 bp, Homo sapiens
gcccttgcttggtca

SEQ ID NO: 1479782 - DNA, 15 bp, Homo sapiens
tgcccttgcttggtc

SEQ ID NO: 1479783 - DNA, 15 bp, Homo sapiens
ctgcccttgcttggt

SEQ ID NO: 1479784 - DNA, 15 bp, Homo sapiens
actgcccttgcttgg

SEQ ID NO: 1479785 - DNA, 15 bp, Homo sapiens
aactgcccttgcttg

SEQ ID NO: 1479786 - DNA, 15 bp, Homo sapiens
aaactgcccttgctt

SEQ ID NO: 1479787 - DNA, 15 bp, Homo sapiens
caaactgcccttgct

SEQ ID NO: 1479788 - DNA, 15 bp, Homo sapiens
ccaaactgcccttgc

SEQ ID NO: 1479789 - DNA, 15 bp, Homo sapiens
tccaaactgcccttg

SEQ ID NO: 1479790 - DNA, 15 bp, Homo sapiens
ctccaaactgccctt

SEQ ID NO: 1479791 - DNA, 15 bp, Homo sapiens
tctccaaactgccct

SEQ ID NO: 1479792 - DNA, 15 bp, Homo sapiens
atctccaaactgccc

SEQ ID NO: 1479793 - DNA, 15 bp, Homo sapiens
aatctccaaactgcc

SEQ ID NO: 1479794 - DNA, 15 bp, Homo sapiens
taatctccaaactgc

SEQ ID NO: 1479795 - DNA, 15 bp, Homo sapiens
ttaatctccaaactg

SEQ ID NO: 1479796 - DNA, 15 bp, Homo sapiens
tttaatctccaaact

SEQ ID NO: 1479797 - DNA, 15 bp, Homo sapiens
ctttaatctccaaac

SEQ ID NO: 1479798 - DNA, 15 bp, Homo sapiens
cctttaatctccaaa

SEQ ID NO: 1479799 - DNA, 15 bp, Homo sapiens
gcctttaatctccaa

SEQ ID NO: 1479800 - DNA, 15 bp, Homo sapiens
tgcctttaatctcca

SEQ ID NO: 1479801 - DNA, 15 bp, Homo sapiens
ttgcctttaatctcc

SEQ ID NO: 1479802 - DNA, 15 bp, Homo sapiens
cttgcctttaatctc

SEQ ID NO: 1479803 - DNA, 15 bp, Homo sapiens
tcttgcctttaatct

SEQ ID NO: 1479804 - DNA, 15 bp, Homo sapiens
atcttgcctttaatc

SEQ ID NO: 1479805 - DNA, 15 bp, Homo sapiens
catcttgcctttaat

SEQ ID NO: 1479806 - DNA, 15 bp, Homo sapiens
ccatcttgcctttaa

SEQ ID NO: 1479807 - DNA, 15 bp, Homo sapiens
tccatcttgccttta

SEQ ID NO: 1479808 - DNA, 15 bp, Homo sapiens
ctccatcttgccttt

SEQ ID NO: 1479809 - DNA, 15 bp, Homo sapiens
actccatcttgcctt

SEQ ID NO: 1479810 - DNA, 15 bp, Homo sapiens
aactccatcttgcct

SEQ ID NO: 1479811 - DNA, 15 bp, Homo sapiens
caactccatcttgcc

SEQ ID NO: 1479812 - DNA, 15 bp, Homo sapiens
ccaactccatcttgc

SEQ ID NO: 1479813 - DNA, 15 bp, Homo sapiens
accaactccatcttg

SEQ ID NO: 1479814 - DNA, 15 bp, Homo sapiens
aaccaactccatctt

SEQ ID NO: 1479815 - DNA, 15 bp, Homo sapiens
taaccaactccatct

SEQ ID NO: 1479816 - DNA, 15 bp, Homo sapiens
ctaaccaactccatc

SEQ ID NO: 1479817 - DNA, 15 bp, Homo sapiens
cctaaccaactccat

SEQ ID NO: 1479818 - DNA, 15 bp, Homo sapiens
acctaaccaactcca

SEQ ID NO: 1479819 - DNA, 15 bp, Homo sapiens
gacctaaccaactcc

SEQ ID NO: 1479820 - DNA, 15 bp, Homo sapiens
tgacctaaccaactc

SEQ ID NO: 1479821 - DNA, 15 bp, Homo sapiens
ctgacctaaccaact

SEQ ID NO: 1479822 - DNA, 15 bp, Homo sapiens
tctgacctaaccaac

SEQ ID NO: 1479823 - DNA, 15 bp, Homo sapiens
ctctgacctaaccaa

SEQ ID NO: 1479824 - DNA, 15 bp, Homo sapiens
gctctgacctaacca

SEQ ID NO: 1479825 - DNA, 15 bp, Homo sapiens
agctctgacctaacc

SEQ ID NO: 1479826 - DNA, 15 bp, Homo sapiens
gagctctgacctaac

SEQ ID NO: 1479827 - DNA, 15 bp, Homo sapiens
agagctctgacctaa

SEQ ID NO: 1479828 - DNA, 15 bp, Homo sapiens
aagagctctgaccta

SEQ ID NO: 1479829 - DNA, 15 bp, Homo sapiens
aaagagctctgacct

SEQ ID NO: 1479830 - DNA, 15 bp, Homo sapiens
gaaagagctctgacc

SEQ ID NO: 1479831 - DNA, 15 bp, Homo sapiens
tgaaagagctctgac

SEQ ID NO: 1479832 - DNA, 15 bp, Homo sapiens
gtgaaagagctctga

SEQ ID NO: 1479833 - DNA, 15 bp, Homo sapiens
agtgaaagagctctg

SEQ ID NO: 1479834 - DNA, 15 bp, Homo sapiens
cagtgaaagagctct

SEQ ID NO: 1479835 - DNA, 15 bp, Homo sapiens
tcagtgaaagagctc

SEQ ID NO: 1479836 - DNA, 15 bp, Homo sapiens
gtcagtgaaagagct

SEQ ID NO: 1479837 - DNA, 15 bp, Homo sapiens
tgtcagtgaaagagc

SEQ ID NO: 1479838 - DNA, 15 bp, Homo sapiens
atgtcagtgaaagag

SEQ ID NO: 1479839 - DNA, 15 bp, Homo sapiens
tatgtcagtgaaaga

SEQ ID NO: 1479840 - DNA, 15 bp, Homo sapiens
ttatgtcagtgaaag

SEQ ID NO: 1479841 - DNA, 15 bp, Homo sapiens
attatgtcagtgaaa

SEQ ID NO: 1479842 - DNA, 15 bp, Homo sapiens
aattatgtcagtgaa

SEQ ID NO: 1479843 - DNA, 15 bp, Homo sapiens
aaattatgtcagtga

SEQ ID NO: 1479844 - DNA, 15 bp, Homo sapiens
aaaattatgtcagtg

SEQ ID NO: 1479845 - DNA, 15 bp, Homo sapiens
gaaaattatgtcagt

SEQ ID NO: 1479846 - DNA, 15 bp, Homo sapiens
agaaaattatgtcag

SEQ ID NO: 1479847 - DNA, 15 bp, Homo sapiens
cagaaaattatgtca

SEQ ID NO: 1479848 - DNA, 15 bp, Homo sapiens
acagaaaattatgtc

SEQ ID NO: 1479849 - DNA, 15 bp, Homo sapiens
gacagaaaattatgt

SEQ ID NO: 1479850 - DNA, 15 bp, Homo sapiens
tgacagaaaattatg

SEQ ID NO: 1479851 - DNA, 15 bp, Homo sapiens
atgacagaaaattat

SEQ ID NO: 1479852 - DNA, 15 bp, Homo sapiens
tatgacagaaaatta

SEQ ID NO: 1479853 - DNA, 15 bp, Homo sapiens
ttatgacagaaaatt

SEQ ID NO: 1479854 - DNA, 15 bp, Homo sapiens
attatgacagaaaat

SEQ ID NO: 1479855 - DNA, 15 bp, Homo sapiens
aattatgacagaaaa

SEQ ID NO: 1479856 - DNA, 15 bp, Homo sapiens
aaattatgacagaaa

SEQ ID NO: 1479857 - DNA, 15 bp, Homo sapiens
aaaattatgacagaa

SEQ ID NO: 1479858 - DNA, 15 bp, Homo sapiens
aaaaattatgacaga

SEQ ID NO: 1479859 - DNA, 15 bp, Homo sapiens
caaaaattatgacag

SEQ ID NO: 1479860 - DNA, 15 bp, Homo sapiens
gcaaaaattatgaca

SEQ ID NO: 1479861 - DNA, 15 bp, Homo sapiens
tgcaaaaattatgac

SEQ ID NO: 1479862 - DNA, 15 bp, Homo sapiens
ttgcaaaaattatga

SEQ ID NO: 1479863 - DNA, 15 bp, Homo sapiens
tttgcaaaaattatg

SEQ ID NO: 1479864 - DNA, 15 bp, Homo sapiens
ctttgcaaaaattat

SEQ ID NO: 1479865 - DNA, 15 bp, Homo sapiens
cctttgcaaaaatta

SEQ ID NO: 1479866 - DNA, 15 bp, Homo sapiens
gcctttgcaaaaatt

SEQ ID NO: 1479867 - DNA, 15 bp, Homo sapiens
tgcctttgcaaaaat

SEQ ID NO: 1479868 - DNA, 15 bp, Homo sapiens
ctgcctttgcaaaaa

SEQ ID NO: 1479869 - DNA, 15 bp, Homo sapiens
actgcctttgcaaaa

SEQ ID NO: 1479870 - DNA, 15 bp, Homo sapiens
aactgcctttgcaaa

SEQ ID NO: 1479871 - DNA, 15 bp, Homo sapiens
aaactgcctttgcaa

SEQ ID NO: 1479872 - DNA, 15 bp, Homo sapiens
gaaactgcctttgca

SEQ ID NO: 1479873 - DNA, 15 bp, Homo sapiens
tgaaactgcctttgc

SEQ ID NO: 1479874 - DNA, 15 bp, Homo sapiens
ttgaaactgcctttg

SEQ ID NO: 1479875 - DNA, 15 bp, Homo sapiens
cttgaaactgccttt

SEQ ID NO: 1479876 - DNA, 15 bp, Homo sapiens
gcttgaaactgcctt

SEQ ID NO: 1479877 - DNA, 15 bp, Homo sapiens
ggcttgaaactgcct

SEQ ID NO: 1479878 - DNA, 15 bp, Homo sapiens
tggcttgaaactgcc

SEQ ID NO: 1479879 - DNA, 15 bp, Homo sapiens
ctggcttgaaactgc

SEQ ID NO: 1479880 - DNA, 15 bp, Homo sapiens
actggcttgaaactg

SEQ ID NO: 1479881 - DNA, 15 bp, Homo sapiens
tactggcttgaaact

SEQ ID NO: 1479882 - DNA, 15 bp, Homo sapiens
gtactggcttgaaac

SEQ ID NO: 1479883 - DNA, 15 bp, Homo sapiens
agtactggcttgaaa

SEQ ID NO: 1479884 - DNA, 15 bp, Homo sapiens
gagtactggcttgaa

SEQ ID NO: 1479885 - DNA, 15 bp, Homo sapiens
tgagtactggcttga

SEQ ID NO: 1479886 - DNA, 15 bp, Homo sapiens
ctgagtactggcttg

SEQ ID NO: 1479887 - DNA, 15 bp, Homo sapiens
tctgagtactggctt

SEQ ID NO: 1479888 - DNA, 15 bp, Homo sapiens
atctgagtactggct

SEQ ID NO: 1479889 - DNA, 15 bp, Homo sapiens
aatctgagtactggc

SEQ ID NO: 1479890 - DNA, 15 bp, Homo sapiens
gaatctgagtactgg

SEQ ID NO: 1479891 - DNA, 15 bp, Homo sapiens
ggaatctgagtactg

SEQ ID NO: 1479892 - DNA, 15 bp, Homo sapiens
gggaatctgagtact

SEQ ID NO: 1479893 - DNA, 15 bp, Homo sapiens
tgggaatctgagtac

SEQ ID NO: 1479894 - DNA, 15 bp, Homo sapiens
atgggaatctgagta

SEQ ID NO: 1479895 - DNA, 15 bp, Homo sapiens
tatgggaatctgagt

SEQ ID NO: 1479896 - DNA, 15 bp, Homo sapiens
ctatgggaatctgag

SEQ ID NO: 1479897 - DNA, 15 bp, Homo sapiens
gctatgggaatctga

SEQ ID NO: 1479898 - DNA, 15 bp, Homo sapiens
ggctatgggaatctg

SEQ ID NO: 1479899 - DNA, 15 bp, Homo sapiens
gggctatgggaatct

SEQ ID NO: 1479900 - DNA, 15 bp, Homo sapiens
agggctatgggaatc

SEQ ID NO: 1479901 - DNA, 15 bp, Homo sapiens
aagggctatgggaat

SEQ ID NO: 1479902 - DNA, 15 bp, Homo sapiens
aaagggctatgggaa

SEQ ID NO: 1479903 - DNA, 15 bp, Homo sapiens
caaagggctatggga

SEQ ID NO: 1479904 - DNA, 15 bp, Homo sapiens
gcaaagggctatggg

SEQ ID NO: 1479905 - DNA, 15 bp, Homo sapiens
ggcaaagggctatgg

SEQ ID NO: 1479906 - DNA, 15 bp, Homo sapiens
gggcaaagggctatg

SEQ ID NO: 1479907 - DNA, 15 bp, Homo sapiens
agggcaaagggctat

SEQ ID NO: 1479908 - DNA, 15 bp, Homo sapiens
cagggcaaagggcta

SEQ ID NO: 1479909 - DNA, 15 bp, Homo sapiens
gcagggcaaagggct

SEQ ID NO: 1479910 - DNA, 15 bp, Homo sapiens
ggcagggcaaagggc

SEQ ID NO: 1479911 - DNA, 15 bp, Homo sapiens
tggcagggcaaaggg

SEQ ID NO: 1479912 - DNA, 15 bp, Homo sapiens
atggcagggcaaagg

SEQ ID NO: 1479913 - DNA, 15 bp, Homo sapiens
catggcagggcaaag

SEQ ID NO: 1479914 - DNA, 15 bp, Homo sapiens
tcatggcagggcaaa

SEQ ID NO: 1479915 - DNA, 15 bp, Homo sapiens
atcatggcagggcaa

SEQ ID NO: 1479916 - DNA, 15 bp, Homo sapiens
gatcatggcagggca

SEQ ID NO: 1479917 - DNA, 15 bp, Homo sapiens
ggatcatggcagggc

SEQ ID NO: 1479918 - DNA, 15 bp, Homo sapiens
aggatcatggcaggg

SEQ ID NO: 1479919 - DNA, 15 bp, Homo sapiens
aaggatcatggcagg

SEQ ID NO: 1479920 - DNA, 15 bp, Homo sapiens
aaaggatcatggcag

SEQ ID NO: 1479921 - DNA, 15 bp, Homo sapiens
caaaggatcatggca

SEQ ID NO: 1479922 - DNA, 15 bp, Homo sapiens
tcaaaggatcatggc

SEQ ID NO: 1479923 - DNA, 15 bp, Homo sapiens
ctcaaaggatcatgg

SEQ ID NO: 1479924 - DNA, 15 bp, Homo sapiens
cctcaaaggatcatg

SEQ ID NO: 1479925 - DNA, 15 bp, Homo sapiens
gcctcaaaggatcat

SEQ ID NO: 1479926 - DNA, 15 bp, Homo sapiens
agcctcaaaggatca

SEQ ID NO: 1479927 - DNA, 15 bp, Homo sapiens
cagcctcaaaggatc

SEQ ID NO: 1479928 - DNA, 15 bp, Homo sapiens
tcagcctcaaaggat

SEQ ID NO: 1479929 - DNA, 15 bp, Homo sapiens
ctcagcctcaaagga

SEQ ID NO: 1479930 - DNA, 15 bp, Homo sapiens
cctcagcctcaaagg

SEQ ID NO: 1479931 - DNA, 15 bp, Homo sapiens
acctcagcctcaaag

SEQ ID NO: 1479932 - DNA, 15 bp, Homo sapiens
cacctcagcctcaaa

SEQ ID NO: 1479933 - DNA, 15 bp, Homo sapiens
ccacctcagcctcaa

SEQ ID NO: 1479934 - DNA, 15 bp, Homo sapiens
cccacctcagcctca

SEQ ID NO: 1479935 - DNA, 15 bp, Homo sapiens
ggggttcaagtgatt

SEQ ID NO: 1479936 - DNA, 15 bp, Homo sapiens
cggggttcaagtgat

SEQ ID NO: 1479937 - DNA, 15 bp, Homo sapiens
ccggggttcaagtga

SEQ ID NO: 1479938 - DNA, 15 bp, Homo sapiens
tccggggttcaagtg

SEQ ID NO: 1479939 - DNA, 15 bp, Homo sapiens
ctccggggttcaagt

SEQ ID NO: 1479940 - DNA, 15 bp, Homo sapiens
actccggggttcaag

SEQ ID NO: 1479941 - DNA, 15 bp, Homo sapiens
aactccggggttcaa

SEQ ID NO: 1479942 - DNA, 15 bp, Homo sapiens
gaactccggggttca

SEQ ID NO: 1479943 - DNA, 15 bp, Homo sapiens
ggaactccggggttc

SEQ ID NO: 1479944 - DNA, 15 bp, Homo sapiens
tggaactccggggtt

SEQ ID NO: 1479945 - DNA, 15 bp, Homo sapiens
ctggaactccggggt

SEQ ID NO: 1479946 - DNA, 15 bp, Homo sapiens
tctggaactccgggg

SEQ ID NO: 1479947 - DNA, 15 bp, Homo sapiens
ctctggaactccggg

SEQ ID NO: 1479948 - DNA, 15 bp, Homo sapiens
gctctggaactccgg

SEQ ID NO: 1479949 - DNA, 15 bp, Homo sapiens
tgctctggaactccg

SEQ ID NO: 1479950 - DNA, 15 bp, Homo sapiens
gctgctctggaactc

SEQ ID NO: 1479951 - DNA, 15 bp, Homo sapiens
ggctgctctggaact

SEQ ID NO: 1479952 - DNA, 15 bp, Homo sapiens
aggctgctctggaac

SEQ ID NO: 1479953 - DNA, 15 bp, Homo sapiens
caggctgctctggaa

SEQ ID NO: 1479954 - DNA, 15 bp, Homo sapiens
ccaggctgctctgga

SEQ ID NO: 1479955 - DNA, 15 bp, Homo sapiens
cccaggctgctctgg

SEQ ID NO: 1479956 - DNA, 15 bp, Homo sapiens
gcccaggctgctctg

SEQ ID NO: 1479957 - DNA, 15 bp, Homo sapiens
tgcccaggctgctct

SEQ ID NO: 1479958 - DNA, 15 bp, Homo sapiens
ttgcccaggctgctc

SEQ ID NO: 1479959 - DNA, 15 bp, Homo sapiens
gttgcccaggctgct

SEQ ID NO: 1479960 - DNA, 15 bp, Homo sapiens
tgttgcccaggctgc

SEQ ID NO: 1479961 - DNA, 15 bp, Homo sapiens
gagggtctcactatg

SEQ ID NO: 1479962 - DNA, 15 bp, Homo sapiens
tgagggtctcactat

SEQ ID NO: 1479963 - DNA, 15 bp, Homo sapiens
atgagggtctcacta

SEQ ID NO: 1479964 - DNA, 15 bp, Homo sapiens
gatgagggtctcact

SEQ ID NO: 1479965 - DNA, 15 bp, Homo sapiens
agatgagggtctcac

SEQ ID NO: 1479966 - DNA, 15 bp, Homo sapiens
gagatgagggtctca

SEQ ID NO: 1479967 - DNA, 15 bp, Homo sapiens
agagatgagggtctc

SEQ ID NO: 1479968 - DNA, 15 bp, Homo sapiens
cagagatgagggtct

SEQ ID NO: 1479969 - DNA, 15 bp, Homo sapiens
gcagagatgagggtc

SEQ ID NO: 1479970 - DNA, 15 bp, Homo sapiens
tgcagagatgagggt

SEQ ID NO: 1479971 - DNA, 15 bp, Homo sapiens
ttgcagagatgaggg

SEQ ID NO: 1479972 - DNA, 15 bp, Homo sapiens
attgcagagatgagg

SEQ ID NO: 1479973 - DNA, 15 bp, Homo sapiens
cattgcagagatgag

SEQ ID NO: 1479974 - DNA, 15 bp, Homo sapiens
tcattgcagagatga

SEQ ID NO: 1479975 - DNA, 15 bp, Homo sapiens
ttcattgcagagatg

SEQ ID NO: 1479976 - DNA, 15 bp, Homo sapiens
gttcattgcagagat

SEQ ID NO: 1479977 - DNA, 15 bp, Homo sapiens
tgttcattgcagaga

SEQ ID NO: 1479978 - DNA, 15 bp, Homo sapiens
ttgttcattgcagag

SEQ ID NO: 1479979 - DNA, 15 bp, Homo sapiens
attgttcattgcaga

SEQ ID NO: 1479980 - DNA, 15 bp, Homo sapiens
aattgttcattgcag

SEQ ID NO: 1479981 - DNA, 15 bp, Homo sapiens
taattgttcattgca

SEQ ID NO: 1479982 - DNA, 15 bp, Homo sapiens
ataattgttcattgc

SEQ ID NO: 1479983 - DNA, 15 bp, Homo sapiens
gataattgttcattg

SEQ ID NO: 1479984 - DNA, 15 bp, Homo sapiens
agataattgttcatt

SEQ ID NO: 1479985 - DNA, 15 bp, Homo sapiens
cagataattgttcat

SEQ ID NO: 1479986 - DNA, 15 bp, Homo sapiens
ccagataattgttca

SEQ ID NO: 1479987 - DNA, 15 bp, Homo sapiens
cccagataattgttc

SEQ ID NO: 1479988 - DNA, 15 bp, Homo sapiens
acccagataattgtt

SEQ ID NO: 1479989 - DNA, 15 bp, Homo sapiens
cacccagataattgt

SEQ ID NO: 1479990 - DNA, 15 bp, Homo sapiens
acacccagataattg

SEQ ID NO: 1479991 - DNA, 15 bp, Homo sapiens
cacacccagataatt

SEQ ID NO: 1479992 - DNA, 15 bp, Homo sapiens
ccacacccagataat

SEQ ID NO: 1479993 - DNA, 15 bp, Homo sapiens
accacacccagataa

SEQ ID NO: 1479994 - DNA, 15 bp, Homo sapiens
caccacacccagata

SEQ ID NO: 1479995 - DNA, 15 bp, Homo sapiens
ccaccacacccagat

SEQ ID NO: 1479996 - DNA, 15 bp, Homo sapiens
gccaccacacccaga

SEQ ID NO: 1479997 - DNA, 15 bp, Homo sapiens
ctgtgccaccacacc

SEQ ID NO: 1479998 - DNA, 15 bp, Homo sapiens
cctgtgccaccacac

SEQ ID NO: 1479999 - DNA, 15 bp, Homo sapiens
gcctgtgccaccaca

SEQ ID NO: 1480000 - DNA, 15 bp, Homo sapiens
ggcctgtgccaccac

SEQ ID NO: 1480001 - DNA, 15 bp, Homo sapiens
aggcctgtgccacca

SEQ ID NO: 1480002 - DNA, 15 bp, Homo sapiens
caggcctgtgccacc

SEQ ID NO: 1480003 - DNA, 15 bp, Homo sapiens
acaggcctgtgccac

SEQ ID NO: 1480004 - DNA, 15 bp, Homo sapiens
tacaggcctgtgcca

SEQ ID NO: 1480005 - DNA, 15 bp, Homo sapiens
ctacaggcctgtgcc

SEQ ID NO: 1480006 - DNA, 15 bp, Homo sapiens
actacaggcctgtgc

SEQ ID NO: 1480007 - DNA, 15 bp, Homo sapiens
tactacaggcctgtg

SEQ ID NO: 1480008 - DNA, 15 bp, Homo sapiens
gtactacaggcctgt

SEQ ID NO: 1480009 - DNA, 15 bp, Homo sapiens
ggtactacaggcctg

SEQ ID NO: 1480010 - DNA, 15 bp, Homo sapiens
tggtactacaggcct

SEQ ID NO: 1480011 - DNA, 15 bp, Homo sapiens
ctggtactacaggcc

SEQ ID NO: 1480012 - DNA, 15 bp, Homo sapiens
gctggtactacaggc

SEQ ID NO: 1480013 - DNA, 15 bp, Homo sapiens
agctggtactacagg

SEQ ID NO: 1480014 - DNA, 15 bp, Homo sapiens
tagctggtactacag

SEQ ID NO: 1480015 - DNA, 15 bp, Homo sapiens
gtagctggtactaca

SEQ ID NO: 1480016 - DNA, 15 bp, Homo sapiens
ggtagctggtactac

SEQ ID NO: 1480017 - DNA, 15 bp, Homo sapiens
aggtagctggtacta

SEQ ID NO: 1480018 - DNA, 15 bp, Homo sapiens
caggtagctggtact

SEQ ID NO: 1480019 - DNA, 15 bp, Homo sapiens
ccaggtagctggtac

SEQ ID NO: 1480020 - DNA, 15 bp, Homo sapiens
cccaggtagctggta

SEQ ID NO: 1480021 - DNA, 15 bp, Homo sapiens
tcccaggtagctggt

SEQ ID NO: 1480022 - DNA, 15 bp, Homo sapiens
ttcccaggtagctgg

SEQ ID NO: 1480023 - DNA, 15 bp, Homo sapiens
cttcccaggtagctg

SEQ ID NO: 1480024 - DNA, 15 bp, Homo sapiens
tcttcccaggtagct

SEQ ID NO: 1480025 - DNA, 15 bp, Homo sapiens
atcttcccaggtagc

SEQ ID NO: 1480026 - DNA, 15 bp, Homo sapiens
gatcttcccaggtag

SEQ ID NO: 1480027 - DNA, 15 bp, Homo sapiens
agatcttcccaggta

SEQ ID NO: 1480028 - DNA, 15 bp, Homo sapiens
gagatcttcccaggt

SEQ ID NO: 1480029 - DNA, 15 bp, Homo sapiens
agagatcttcccagg

SEQ ID NO: 1480030 - DNA, 15 bp, Homo sapiens
aagagatcttcccag

SEQ ID NO: 1480031 - DNA, 15 bp, Homo sapiens
caagagatcttccca

SEQ ID NO: 1480032 - DNA, 15 bp, Homo sapiens
tcaagagatcttccc

SEQ ID NO: 1480033 - DNA, 15 bp, Homo sapiens
ctcaagagatcttcc

SEQ ID NO: 1480034 - DNA, 15 bp, Homo sapiens
gctcaagagatcttc

SEQ ID NO: 1480035 - DNA, 15 bp, Homo sapiens
ggctcaagagatctt

SEQ ID NO: 1480036 - DNA, 15 bp, Homo sapiens
gggctcaagagatct

SEQ ID NO: 1480037 - DNA, 15 bp, Homo sapiens
tgggctcaagagatc

SEQ ID NO: 1480038 - DNA, 15 bp, Homo sapiens
ctgggctcaagagat

SEQ ID NO: 1480039 - DNA, 15 bp, Homo sapiens
actgggctcaagaga

SEQ ID NO: 1480040 - DNA, 15 bp, Homo sapiens
tactgggctcaagag

SEQ ID NO: 1480041 - DNA, 15 bp, Homo sapiens
ctactgggctcaaga

SEQ ID NO: 1480042 - DNA, 15 bp, Homo sapiens
cctactgggctcaag

SEQ ID NO: 1480043 - DNA, 15 bp, Homo sapiens
acctactgggctcaa

SEQ ID NO: 1480044 - DNA, 15 bp, Homo sapiens
aacctactgggctca

SEQ ID NO: 1480045 - DNA, 15 bp, Homo sapiens
caacctactgggctc

SEQ ID NO: 1480046 - DNA, 15 bp, Homo sapiens
tcaacctactgggct

SEQ ID NO: 1480047 - DNA, 15 bp, Homo sapiens
ctcaacctactgggc

SEQ ID NO: 1480048 - DNA, 15 bp, Homo sapiens
cctcaacctactggg

SEQ ID NO: 1480049 - DNA, 15 bp, Homo sapiens
gcctcaacctactgg

SEQ ID NO: 1480050 - DNA, 15 bp, Homo sapiens
agcctcaacctactg

SEQ ID NO: 1480051 - DNA, 15 bp, Homo sapiens
cagcctcaacctact

SEQ ID NO: 1480052 - DNA, 15 bp, Homo sapiens
gcagcctcaacctac

SEQ ID NO: 1480053 - DNA, 15 bp, Homo sapiens
tgcagcctcaaccta

SEQ ID NO: 1480054 - DNA, 15 bp, Homo sapiens
ttcactgcagcctca

SEQ ID NO: 1480055 - DNA, 15 bp, Homo sapiens
gttcactgcagcctc

SEQ ID NO: 1480056 - DNA, 15 bp, Homo sapiens
agttcactgcagcct

SEQ ID NO: 1480057 - DNA, 15 bp, Homo sapiens
cagttcactgcagcc

SEQ ID NO: 1480058 - DNA, 15 bp, Homo sapiens
acagttcactgcagc

SEQ ID NO: 1480059 - DNA, 15 bp, Homo sapiens
cacagttcactgcag

SEQ ID NO: 1480060 - DNA, 15 bp, Homo sapiens
tcacagttcactgca

SEQ ID NO: 1480061 - DNA, 15 bp, Homo sapiens
atcacagttcactgc

SEQ ID NO: 1480062 - DNA, 15 bp, Homo sapiens
catcacagttcactg

SEQ ID NO: 1480063 - DNA, 15 bp, Homo sapiens
ccatcacagttcact

SEQ ID NO: 1480064 - DNA, 15 bp, Homo sapiens
tccatcacagttcac

SEQ ID NO: 1480065 - DNA, 15 bp, Homo sapiens
ctccatcacagttca

SEQ ID NO: 1480066 - DNA, 15 bp, Homo sapiens
actccatcacagttc

SEQ ID NO: 1480067 - DNA, 15 bp, Homo sapiens
gactccatcacagtt

SEQ ID NO: 1480068 - DNA, 15 bp, Homo sapiens
tgactccatcacagt

SEQ ID NO: 1480069 - DNA, 15 bp, Homo sapiens
gtgactccatcacag

SEQ ID NO: 1480070 - DNA, 15 bp, Homo sapiens
agtgactccatcaca

SEQ ID NO: 1480071 - DNA, 15 bp, Homo sapiens
cagtgactccatcac

SEQ ID NO: 1480072 - DNA, 15 bp, Homo sapiens
gcagtgactccatca

SEQ ID NO: 1480073 - DNA, 15 bp, Homo sapiens
tgcagtgactccatc

SEQ ID NO: 1480074 - DNA, 15 bp, Homo sapiens
atgcagtgactccat

SEQ ID NO: 1480075 - DNA, 15 bp, Homo sapiens
aatgcagtgactcca

SEQ ID NO: 1480076 - DNA, 15 bp, Homo sapiens
gaatgcagtgactcc

SEQ ID NO: 1480077 - DNA, 15 bp, Homo sapiens
agaatgcagtgactc

SEQ ID NO: 1480078 - DNA, 15 bp, Homo sapiens
tagaatgcagtgact

SEQ ID NO: 1480079 - DNA, 15 bp, Homo sapiens
ctagaatgcagtgac

SEQ ID NO: 1480080 - DNA, 15 bp, Homo sapiens
gctagaatgcagtga

SEQ ID NO: 1480081 - DNA, 15 bp, Homo sapiens
ggctagaatgcagtg

SEQ ID NO: 1480082 - DNA, 15 bp, Homo sapiens
aggctagaatgcagt

SEQ ID NO: 1480083 - DNA, 15 bp, Homo sapiens
caggctagaatgcag

SEQ ID NO: 1480084 - DNA, 15 bp, Homo sapiens
ccaggctagaatgca

SEQ ID NO: 1480085 - DNA, 15 bp, Homo sapiens
cccaggctagaatgc

SEQ ID NO: 1480086 - DNA, 15 bp, Homo sapiens
acccaggctagaatg

SEQ ID NO: 1480087 - DNA, 15 bp, Homo sapiens
cacccaggctagaat

SEQ ID NO: 1480088 - DNA, 15 bp, Homo sapiens
tcacccaggctagaa

SEQ ID NO: 1480089 - DNA, 15 bp, Homo sapiens
ctcacccaggctaga

SEQ ID NO: 1480090 - DNA, 15 bp, Homo sapiens
tctcacccaggctag

SEQ ID NO: 1480091 - DNA, 15 bp, Homo sapiens
ttctcacccaggcta

SEQ ID NO: 1480092 - DNA, 15 bp, Homo sapiens
tttctcacccaggct

SEQ ID NO: 1480093 - DNA, 15 bp, Homo sapiens
gtttctcacccaggc

SEQ ID NO: 1480094 - DNA, 15 bp, Homo sapiens
ggtttctcacccagg

SEQ ID NO: 1480095 - DNA, 15 bp, Homo sapiens
tggtttctcacccag

SEQ ID NO: 1480096 - DNA, 15 bp, Homo sapiens
atggtttctcaccca

SEQ ID NO: 1480097 - DNA, 15 bp, Homo sapiens
aatggtttctcaccc

SEQ ID NO: 1480098 - DNA, 15 bp, Homo sapiens
taatggtttctcacc

SEQ ID NO: 1480099 - DNA, 15 bp, Homo sapiens
ataatggtttctcac

SEQ ID NO: 1480100 - DNA, 15 bp, Homo sapiens
gataatggtttctca

SEQ ID NO: 1480101 - DNA, 15 bp, Homo sapiens
ggataatggtttctc

SEQ ID NO: 1480102 - DNA, 15 bp, Homo sapiens
aggataatggtttct

SEQ ID NO: 1480103 - DNA, 15 bp, Homo sapiens
caggataatggtttc

SEQ ID NO: 1480104 - DNA, 15 bp, Homo sapiens
acaggataatggttt

SEQ ID NO: 1480105 - DNA, 15 bp, Homo sapiens
gacaggataatggtt

SEQ ID NO: 1480106 - DNA, 15 bp, Homo sapiens
agacaggataatggt

SEQ ID NO: 1480107 - DNA, 15 bp, Homo sapiens
gagacaggataatgg

SEQ ID NO: 1480108 - DNA, 15 bp, Homo sapiens
tgagacaggataatg

SEQ ID NO: 1480109 - DNA, 15 bp, Homo sapiens
ttgagacaggataat

SEQ ID NO: 1480110 - DNA, 15 bp, Homo sapiens
tttgagacaggataa

SEQ ID NO: 1480111 - DNA, 15 bp, Homo sapiens
ttttgagacaggata

SEQ ID NO: 1480112 - DNA, 15 bp, Homo sapiens
gttttgagacaggat

SEQ ID NO: 1480113 - DNA, 15 bp, Homo sapiens
cgttttgagacagga

SEQ ID NO: 1480114 - DNA, 15 bp, Homo sapiens
tcgttttgagacagg

SEQ ID NO: 1480115 - DNA, 15 bp, Homo sapiens
gtcgttttgagacag

SEQ ID NO: 1480116 - DNA, 15 bp, Homo sapiens
tgtcgttttgagaca

SEQ ID NO: 1480117 - DNA, 15 bp, Homo sapiens
ttgtcgttttgagac

SEQ ID NO: 1480118 - DNA, 15 bp, Homo sapiens
tttgtcgttttgaga

SEQ ID NO: 1480119 - DNA, 15 bp, Homo sapiens
ttttgtcgttttgag

SEQ ID NO: 1480120 - DNA, 15 bp, Homo sapiens
tttttgtcgttttga

SEQ ID NO: 1480121 - DNA, 15 bp, Homo sapiens
ttttttgtcgttttg

SEQ ID NO: 1480122 - DNA, 15 bp, Homo sapiens
gttttttgtcgtttt

SEQ ID NO: 1480123 - DNA, 15 bp, Homo sapiens
tgttttttgtcgttt

SEQ ID NO: 1480124 - DNA, 15 bp, Homo sapiens
ttgttttttgtcgtt

SEQ ID NO: 1480125 - DNA, 15 bp, Homo sapiens
tttgttttttgtcgt

SEQ ID NO: 1480126 - DNA, 15 bp, Homo sapiens
gtttgttttttgtcg

SEQ ID NO: 1480127 - DNA, 15 bp, Homo sapiens
tgtttgttttttgtc

SEQ ID NO: 1480128 - DNA, 15 bp, Homo sapiens
atgtttgttttttgt

SEQ ID NO: 1480129 - DNA, 15 bp, Homo sapiens
tatgtttgttttttg

SEQ ID NO: 1480130 - DNA, 15 bp, Homo sapiens
gtatgtttgtttttt

SEQ ID NO: 1480131 - DNA, 15 bp, Homo sapiens
tgtatgtttgttttt

SEQ ID NO: 1480132 - DNA, 15 bp, Homo sapiens
ctgtatgtttgtttt

SEQ ID NO: 1480133 - DNA, 15 bp, Homo sapiens
actgtatgtttgttt

SEQ ID NO: 1480134 - DNA, 15 bp, Homo sapiens
gactgtatgtttgtt

SEQ ID NO: 1480135 - DNA, 15 bp, Homo sapiens
tgactgtatgtttgt

SEQ ID NO: 1480136 - DNA, 15 bp, Homo sapiens
gtgactgtatgtttg

SEQ ID NO: 1480137 - DNA, 15 bp, Homo sapiens
ggtgactgtatgttt

SEQ ID NO: 1480138 - DNA, 15 bp, Homo sapiens
aggtgactgtatgtt

SEQ ID NO: 1480139 - DNA, 15 bp, Homo sapiens
gaggtgactgtatgt

SEQ ID NO: 1480140 - DNA, 15 bp, Homo sapiens
agaggtgactgtatg

SEQ ID NO: 1480141 - DNA, 15 bp, Homo sapiens
aagaggtgactgtat

SEQ ID NO: 1480142 - DNA, 15 bp, Homo sapiens
aaagaggtgactgta

SEQ ID NO: 1480143 - DNA, 15 bp, Homo sapiens
caaagaggtgactgt

SEQ ID NO: 1480144 - DNA, 15 bp, Homo sapiens
gcaaagaggtgactg

SEQ ID NO: 1480145 - DNA, 15 bp, Homo sapiens
agcaaagaggtgact

SEQ ID NO: 1480146 - DNA, 15 bp, Homo sapiens
tagcaaagaggtgac

SEQ ID NO: 1480147 - DNA, 15 bp, Homo sapiens
ctagcaaagaggtga

SEQ ID NO: 1480148 - DNA, 15 bp, Homo sapiens
gctagcaaagaggtg

SEQ ID NO: 1480149 - DNA, 15 bp, Homo sapiens
agctagcaaagaggt

SEQ ID NO: 1480150 - DNA, 15 bp, Homo sapiens
gagctagcaaagagg

SEQ ID NO: 1480151 - DNA, 15 bp, Homo sapiens
tgagctagcaaagag

SEQ ID NO: 1480152 - DNA, 15 bp, Homo sapiens
ctgagctagcaaaga

SEQ ID NO: 1480153 - DNA, 15 bp, Homo sapiens
cctgagctagcaaag

SEQ ID NO: 1480154 - DNA, 15 bp, Homo sapiens
ccctgagctagcaaa

SEQ ID NO: 1480155 - DNA, 15 bp, Homo sapiens
cccctgagctagcaa

SEQ ID NO: 1480156 - DNA, 15 bp, Homo sapiens
tcccctgagctagca

SEQ ID NO: 1480157 - DNA, 15 bp, Homo sapiens
atcccctgagctagc

SEQ ID NO: 1480158 - DNA, 15 bp, Homo sapiens
gatcccctgagctag

SEQ ID NO: 1480159 - DNA, 15 bp, Homo sapiens
ggatcccctgagcta

SEQ ID NO: 1480160 - DNA, 15 bp, Homo sapiens
aggatcccctgagct

SEQ ID NO: 1480161 - DNA, 15 bp, Homo sapiens
caggatcccctgagc

SEQ ID NO: 1480162 - DNA, 15 bp, Homo sapiens
ccaggatcccctgag

SEQ ID NO: 1480163 - DNA, 15 bp, Homo sapiens
tccaggatcccctga

SEQ ID NO: 1480164 - DNA, 15 bp, Homo sapiens
ctccaggatcccctg

SEQ ID NO: 1480165 - DNA, 15 bp, Homo sapiens
tctccaggatcccct

SEQ ID NO: 1480166 - DNA, 15 bp, Homo sapiens
ttctccaggatcccc

SEQ ID NO: 1480167 - DNA, 15 bp, Homo sapiens
tttctccaggatccc

SEQ ID NO: 1480168 - DNA, 15 bp, Homo sapiens
ttttctccaggatcc

SEQ ID NO: 1480169 - DNA, 15 bp, Homo sapiens
gttttctccaggatc

SEQ ID NO: 1480170 - DNA, 15 bp, Homo sapiens
cgttttctccaggat

SEQ ID NO: 1480171 - DNA, 15 bp, Homo sapiens
acgttttctccagga

SEQ ID NO: 1480172 - DNA, 15 bp, Homo sapiens
cacgttttctccagg

SEQ ID NO: 1480173 - DNA, 15 bp, Homo sapiens
gcacgttttctccag

SEQ ID NO: 1480174 - DNA, 15 bp, Homo sapiens
tgcacgttttctcca

SEQ ID NO: 1480175 - DNA, 15 bp, Homo sapiens
ctgcacgttttctcc

SEQ ID NO: 1480176 - DNA, 15 bp, Homo sapiens
tctgcacgttttctc

SEQ ID NO: 1480177 - DNA, 15 bp, Homo sapiens
ttctgcacgttttct

SEQ ID NO: 1480178 - DNA, 15 bp, Homo sapiens
attctgcacgttttc

SEQ ID NO: 1480179 - DNA, 15 bp, Homo sapiens
cattctgcacgtttt

SEQ ID NO: 1480180 - DNA, 15 bp, Homo sapiens
tcattctgcacgttt

SEQ ID NO: 1480181 - DNA, 15 bp, Homo sapiens
ttcattctgcacgtt

SEQ ID NO: 1480182 - DNA, 15 bp, Homo sapiens
tttcattctgcacgt

SEQ ID NO: 1480183 - DNA, 15 bp, Homo sapiens
ttttcattctgcacg

SEQ ID NO: 1480184 - DNA, 15 bp, Homo sapiens
tttttcattctgcac

SEQ ID NO: 1480185 - DNA, 15 bp, Homo sapiens
ctttttcattctgca

SEQ ID NO: 1480186 - DNA, 15 bp, Homo sapiens
cctttttcattctgc

SEQ ID NO: 1480187 - DNA, 15 bp, Homo sapiens
tcctttttcattctg

SEQ ID NO: 1480188 - DNA, 15 bp, Homo sapiens
ctcctttttcattct

SEQ ID NO: 1480189 - DNA, 15 bp, Homo sapiens
tctcctttttcattc

SEQ ID NO: 1480190 - DNA, 15 bp, Homo sapiens
ctctcctttttcatt

SEQ ID NO: 1480191 - DNA, 15 bp, Homo sapiens
actctcctttttcat

SEQ ID NO: 1480192 - DNA, 15 bp, Homo sapiens
gactctcctttttca

SEQ ID NO: 1480193 - DNA, 15 bp, Homo sapiens
agactctcctttttc

SEQ ID NO: 1480194 - DNA, 15 bp, Homo sapiens
cagactctccttttt

SEQ ID NO: 1480195 - DNA, 15 bp, Homo sapiens
ccagactctcctttt

SEQ ID NO: 1480196 - DNA, 15 bp, Homo sapiens
cccagactctccttt

SEQ ID NO: 1480197 - DNA, 15 bp, Homo sapiens
acccagactctcctt

SEQ ID NO: 1480198 - DNA, 15 bp, Homo sapiens
cacccagactctcct

SEQ ID NO: 1480199 - DNA, 15 bp, Homo sapiens
ccacccagactctcc

SEQ ID NO: 1480200 - DNA, 15 bp, Homo sapiens
gccacccagactctc

SEQ ID NO: 1480201 - DNA, 15 bp, Homo sapiens
cgccacccagactct

SEQ ID NO: 1480202 - DNA, 15 bp, Homo sapiens
acgccacccagactc

SEQ ID NO: 1480203 - DNA, 15 bp, Homo sapiens
cacgccacccagact

SEQ ID NO: 1480204 - DNA, 15 bp, Homo sapiens
ccacgccacccagac

SEQ ID NO: 1480205 - DNA, 15 bp, Homo sapiens
tccacgccacccaga

SEQ ID NO: 1480206 - DNA, 15 bp, Homo sapiens
atccacgccacccag

SEQ ID NO: 1480207 - DNA, 15 bp, Homo sapiens
aatccacgccaccca

SEQ ID NO: 1480208 - DNA, 15 bp, Homo sapiens
taatccacgccaccc

SEQ ID NO: 1480209 - DNA, 15 bp, Homo sapiens
gtaatccacgccacc

SEQ ID NO: 1480210 - DNA, 15 bp, Homo sapiens
tgtaatccacgccac

SEQ ID NO: 1480211 - DNA, 15 bp, Homo sapiens
atgtaatccacgcca

SEQ ID NO: 1480212 - DNA, 15 bp, Homo sapiens
catgtaatccacgcc

SEQ ID NO: 1480213 - DNA, 15 bp, Homo sapiens
gcatgtaatccacgc

SEQ ID NO: 1480214 - DNA, 15 bp, Homo sapiens
ggcatgtaatccacg

SEQ ID NO: 1480215 - DNA, 15 bp, Homo sapiens
aggcatgtaatccac

SEQ ID NO: 1480216 - DNA, 15 bp, Homo sapiens
caggcatgtaatcca

SEQ ID NO: 1480217 - DNA, 15 bp, Homo sapiens
acaggcatgtaatcc

SEQ ID NO: 1480218 - DNA, 15 bp, Homo sapiens
tacaggcatgtaatc

SEQ ID NO: 1480219 - DNA, 15 bp, Homo sapiens
ttacaggcatgtaat

SEQ ID NO: 1480220 - DNA, 15 bp, Homo sapiens
attacaggcatgtaa

SEQ ID NO: 1480221 - DNA, 15 bp, Homo sapiens
gattacaggcatgta

SEQ ID NO: 1480222 - DNA, 15 bp, Homo sapiens
tgcctcccaaagtgc

SEQ ID NO: 1480223 - DNA, 15 bp, Homo sapiens
ttgcctcccaaagtg

SEQ ID NO: 1480224 - DNA, 15 bp, Homo sapiens
cttgcctcccaaagt

SEQ ID NO: 1480225 - DNA, 15 bp, Homo sapiens
tcttgcctcccaaag

SEQ ID NO: 1480226 - DNA, 15 bp, Homo sapiens
gtcttgcctcccaaa

SEQ ID NO: 1480227 - DNA, 15 bp, Homo sapiens
tgtcttgcctcccaa

SEQ ID NO: 1480228 - DNA, 15 bp, Homo sapiens
ctgtcttgcctccca

SEQ ID NO: 1480229 - DNA, 15 bp, Homo sapiens
cctgtcttgcctccc

SEQ ID NO: 1480230 - DNA, 15 bp, Homo sapiens
acctgtcttgcctcc

SEQ ID NO: 1480231 - DNA, 15 bp, Homo sapiens
cacctgtcttgcctc

SEQ ID NO: 1480232 - DNA, 15 bp, Homo sapiens
ccacctgtcttgcct

SEQ ID NO: 1480233 - DNA, 15 bp, Homo sapiens
tccacctgtcttgcc

SEQ ID NO: 1480234 - DNA, 15 bp, Homo sapiens
atccacctgtcttgc

SEQ ID NO: 1480235 - DNA, 15 bp, Homo sapiens
gatccacctgtcttg

SEQ ID NO: 1480236 - DNA, 15 bp, Homo sapiens
ggatccacctgtctt

SEQ ID NO: 1480237 - DNA, 15 bp, Homo sapiens
gggatccacctgtct

SEQ ID NO: 1480238 - DNA, 15 bp, Homo sapiens
agggatccacctgtc

SEQ ID NO: 1480239 - DNA, 15 bp, Homo sapiens
aagggatccacctgt

SEQ ID NO: 1480240 - DNA, 15 bp, Homo sapiens
caagggatccacctg

SEQ ID NO: 1480241 - DNA, 15 bp, Homo sapiens
tcaagggatccacct

SEQ ID NO: 1480242 - DNA, 15 bp, Homo sapiens
ctcaagggatccacc

SEQ ID NO: 1480243 - DNA, 15 bp, Homo sapiens
gctcaagggatccac

SEQ ID NO: 1480244 - DNA, 15 bp, Homo sapiens
agctcaagggatcca

SEQ ID NO: 1480245 - DNA, 15 bp, Homo sapiens
gagctcaagggatcc

SEQ ID NO: 1480246 - DNA, 15 bp, Homo sapiens
tgagctcaagggatc

SEQ ID NO: 1480247 - DNA, 15 bp, Homo sapiens
ctgagctcaagggat

SEQ ID NO: 1480248 - DNA, 15 bp, Homo sapiens
cctgagctcaaggga

SEQ ID NO: 1480249 - DNA, 15 bp, Homo sapiens
tcctgagctcaaggg

SEQ ID NO: 1480250 - DNA, 15 bp, Homo sapiens
ctcctgagctcaagg

SEQ ID NO: 1480251 - DNA, 15 bp, Homo sapiens
ctgaactcctgagct

SEQ ID NO: 1480252 - DNA, 15 bp, Homo sapiens
gctgaactcctgagc

SEQ ID NO: 1480253 - DNA, 15 bp, Homo sapiens
ggctgaactcctgag

SEQ ID NO: 1480254 - DNA, 15 bp, Homo sapiens
aggctgaactcctga

SEQ ID NO: 1480255 - DNA, 15 bp, Homo sapiens
caggctgaactcctg

SEQ ID NO: 1480256 - DNA, 15 bp, Homo sapiens
tcaggctgaactcct

SEQ ID NO: 1480257 - DNA, 15 bp, Homo sapiens
ctcaggctgaactcc

SEQ ID NO: 1480258 - DNA, 15 bp, Homo sapiens
gctcaggctgaactc

SEQ ID NO: 1480259 - DNA, 15 bp, Homo sapiens
ggctcaggctgaact

SEQ ID NO: 1480260 - DNA, 15 bp, Homo sapiens
tggctcaggctgaac

SEQ ID NO: 1480261 - DNA, 15 bp, Homo sapiens
gtggctcaggctgaa

SEQ ID NO: 1480262 - DNA, 15 bp, Homo sapiens
tgtggctcaggctga

SEQ ID NO: 1480263 - DNA, 15 bp, Homo sapiens
atgtggctcaggctg

SEQ ID NO: 1480264 - DNA, 15 bp, Homo sapiens
catgtggctcaggct

SEQ ID NO: 1480265 - DNA, 15 bp, Homo sapiens
ccatgtggctcaggc

SEQ ID NO: 1480266 - DNA, 15 bp, Homo sapiens
accatgtggctcagg

SEQ ID NO: 1480267 - DNA, 15 bp, Homo sapiens
caccatgtggctcag

SEQ ID NO: 1480268 - DNA, 15 bp, Homo sapiens
tcaccatgtggctca

SEQ ID NO: 1480269 - DNA, 15 bp, Homo sapiens
ttcaccatgtggctc

SEQ ID NO: 1480270 - DNA, 15 bp, Homo sapiens
tttcaccatgtggct

SEQ ID NO: 1480271 - DNA, 15 bp, Homo sapiens
gtttcaccatgtggc

SEQ ID NO: 1480272 - DNA, 15 bp, Homo sapiens
cggtttcaccatgtg

SEQ ID NO: 1480273 - DNA, 15 bp, Homo sapiens
acggtttcaccatgt

SEQ ID NO: 1480274 - DNA, 15 bp, Homo sapiens
cacggtttcaccatg

SEQ ID NO: 1480275 - DNA, 15 bp, Homo sapiens
acacggtttcaccat

SEQ ID NO: 1480276 - DNA, 15 bp, Homo sapiens
aacacggtttcacca

SEQ ID NO: 1480277 - DNA, 15 bp, Homo sapiens
aaacacggtttcacc

SEQ ID NO: 1480278 - DNA, 15 bp, Homo sapiens
gaaacacggtttcac

SEQ ID NO: 1480279 - DNA, 15 bp, Homo sapiens
tgaaacacggtttca

SEQ ID NO: 1480280 - DNA, 15 bp, Homo sapiens
ttgaaacacggtttc

SEQ ID NO: 1480281 - DNA, 15 bp, Homo sapiens
tttgaaacacggttt

SEQ ID NO: 1480282 - DNA, 15 bp, Homo sapiens
ttttgaaacacggtt

SEQ ID NO: 1480283 - DNA, 15 bp, Homo sapiens
tttttgaaacacggt

SEQ ID NO: 1480284 - DNA, 15 bp, Homo sapiens
ttttttgaaacacgg

SEQ ID NO: 1480285 - DNA, 15 bp, Homo sapiens
tttttttgaaacacg

SEQ ID NO: 1480286 - DNA, 15 bp, Homo sapiens
ttttttttgaaacac

SEQ ID NO: 1480287 - DNA, 15 bp, Homo sapiens
tttttttttgaaaca

SEQ ID NO: 1480288 - DNA, 15 bp, Homo sapiens
gttttttttttgaaa

SEQ ID NO: 1480289 - DNA, 15 bp, Homo sapiens
agttttttttttgaa

SEQ ID NO: 1480290 - DNA, 15 bp, Homo sapiens
tagttttttttttga

SEQ ID NO: 1480291 - DNA, 15 bp, Homo sapiens
gtagttttttttttg

SEQ ID NO: 1480292 - DNA, 15 bp, Homo sapiens
tgtagtttttttttt

SEQ ID NO: 1480293 - DNA, 15 bp, Homo sapiens
ttgtagttttttttt

SEQ ID NO: 1480294 - DNA, 15 bp, Homo sapiens
tttgtagtttttttt

SEQ ID NO: 1480295 - DNA, 15 bp, Homo sapiens
ttttgtagttttttt

SEQ ID NO: 1480296 - DNA, 15 bp, Homo sapiens
tttttgtagtttttt

SEQ ID NO: 1480297 - DNA, 15 bp, Homo sapiens
atttttgtagttttt

SEQ ID NO: 1480298 - DNA, 15 bp, Homo sapiens
aatttttgtagtttt

SEQ ID NO: 1480299 - DNA, 15 bp, Homo sapiens
taatttttgtagttt

SEQ ID NO: 1480300 - DNA, 15 bp, Homo sapiens
ctaatttttgtagtt

SEQ ID NO: 1480301 - DNA, 15 bp, Homo sapiens
gctaatttttgtagt

SEQ ID NO: 1480302 - DNA, 15 bp, Homo sapiens
agctaatttttgtag

SEQ ID NO: 1480303 - DNA, 15 bp, Homo sapiens
tatgcccagctaatt

SEQ ID NO: 1480304 - DNA, 15 bp, Homo sapiens
ctatgcccagctaat

SEQ ID NO: 1480305 - DNA, 15 bp, Homo sapiens
tgccactatgcccag

SEQ ID NO: 1480306 - DNA, 15 bp, Homo sapiens
atgccactatgccca

SEQ ID NO: 1480307 - DNA, 15 bp, Homo sapiens
catgccactatgccc

SEQ ID NO: 1480308 - DNA, 15 bp, Homo sapiens
acatgccactatgcc

SEQ ID NO: 1480309 - DNA, 15 bp, Homo sapiens
cacatgccactatgc

SEQ ID NO: 1480310 - DNA, 15 bp, Homo sapiens
gcacatgccactatg

SEQ ID NO: 1480311 - DNA, 15 bp, Homo sapiens
ggcacatgccactat

SEQ ID NO: 1480312 - DNA, 15 bp, Homo sapiens
gggcacatgccacta

SEQ ID NO: 1480313 - DNA, 15 bp, Homo sapiens
cgggcacatgccact

SEQ ID NO: 1480314 - DNA, 15 bp, Homo sapiens
acgggcacatgccac

SEQ ID NO: 1480315 - DNA, 15 bp, Homo sapiens
cacgggcacatgcca

SEQ ID NO: 1480316 - DNA, 15 bp, Homo sapiens
tcacgggcacatgcc

SEQ ID NO: 1480317 - DNA, 15 bp, Homo sapiens
atcacgggcacatgc

SEQ ID NO: 1480318 - DNA, 15 bp, Homo sapiens
gatcacgggcacatg

SEQ ID NO: 1480319 - DNA, 15 bp, Homo sapiens
ggatcacgggcacat

SEQ ID NO: 1480320 - DNA, 15 bp, Homo sapiens
gggatcacgggcaca

SEQ ID NO: 1480321 - DNA, 15 bp, Homo sapiens
tgggatcacgggcac

SEQ ID NO: 1480322 - DNA, 15 bp, Homo sapiens
ctgggatcacgggca

SEQ ID NO: 1480323 - DNA, 15 bp, Homo sapiens
gctgggatcacgggc

SEQ ID NO: 1480324 - DNA, 15 bp, Homo sapiens
agctgggatcacggg

SEQ ID NO: 1480325 - DNA, 15 bp, Homo sapiens
tagctgggatcacgg

SEQ ID NO: 1480326 - DNA, 15 bp, Homo sapiens
gtagctgggatcacg

SEQ ID NO: 1480327 - DNA, 15 bp, Homo sapiens
agtagctgggatcac

SEQ ID NO: 1480328 - DNA, 15 bp, Homo sapiens
gagtagctgggatca

SEQ ID NO: 1480329 - DNA, 15 bp, Homo sapiens
cgagtagctgggatc

SEQ ID NO: 1480330 - DNA, 15 bp, Homo sapiens
acctcagcctcccga

SEQ ID NO: 1480331 - DNA, 15 bp, Homo sapiens
cacctcagcctcccg

SEQ ID NO: 1480332 - DNA, 15 bp, Homo sapiens
tgatcctctcacctc

SEQ ID NO: 1480333 - DNA, 15 bp, Homo sapiens
gtgatcctctcacct

SEQ ID NO: 1480334 - DNA, 15 bp, Homo sapiens
agtgatcctctcacc

SEQ ID NO: 1480335 - DNA, 15 bp, Homo sapiens
aagtgatcctctcac

SEQ ID NO: 1480336 - DNA, 15 bp, Homo sapiens
cagctcaagtgatcc

SEQ ID NO: 1480337 - DNA, 15 bp, Homo sapiens
ccagctcaagtgatc

SEQ ID NO: 1480338 - DNA, 15 bp, Homo sapiens
cccagctcaagtgat

SEQ ID NO: 1480339 - DNA, 15 bp, Homo sapiens
ccccagctcaagtga

SEQ ID NO: 1480340 - DNA, 15 bp, Homo sapiens
tccccagctcaagtg

SEQ ID NO: 1480341 - DNA, 15 bp, Homo sapiens
ctccccagctcaagt

SEQ ID NO: 1480342 - DNA, 15 bp, Homo sapiens
cctccccagctcaag

SEQ ID NO: 1480343 - DNA, 15 bp, Homo sapiens
gcctccccagctcaa

SEQ ID NO: 1480344 - DNA, 15 bp, Homo sapiens
tgcctccccagctca

SEQ ID NO: 1480345 - DNA, 15 bp, Homo sapiens
ctgcctccccagctc

SEQ ID NO: 1480346 - DNA, 15 bp, Homo sapiens
tctgcctccccagct

SEQ ID NO: 1480347 - DNA, 15 bp, Homo sapiens
ctctgcctccccagc

SEQ ID NO: 1480348 - DNA, 15 bp, Homo sapiens
cctctgcctccccag

SEQ ID NO: 1480349 - DNA, 15 bp, Homo sapiens
acctctgcctcccca

SEQ ID NO: 1480350 - DNA, 15 bp, Homo sapiens
aacctctgcctcccc

SEQ ID NO: 1480351 - DNA, 15 bp, Homo sapiens
cgcaatcttggctca

SEQ ID NO: 1480352 - DNA, 15 bp, Homo sapiens
gcgcaatcttggctc

SEQ ID NO: 1480353 - DNA, 15 bp, Homo sapiens
ggcgcaatcttggct

SEQ ID NO: 1480354 - DNA, 15 bp, Homo sapiens
tggcgcaatcttggc

SEQ ID NO: 1480355 - DNA, 15 bp, Homo sapiens
gtggcgcaatcttgg

SEQ ID NO: 1480356 - DNA, 15 bp, Homo sapiens
agtggcgcaatcttg

SEQ ID NO: 1480357 - DNA, 15 bp, Homo sapiens
cagtggcgcaatctt

SEQ ID NO: 1480358 - DNA, 15 bp, Homo sapiens
cggagtgcagtggcg

SEQ ID NO: 1480359 - DNA, 15 bp, Homo sapiens
ccggagtgcagtggc

SEQ ID NO: 1480360 - DNA, 15 bp, Homo sapiens
gccggagtgcagtgg

SEQ ID NO: 1480361 - DNA, 15 bp, Homo sapiens
ggccggagtgcagtg

SEQ ID NO: 1480362 - DNA, 15 bp, Homo sapiens
aggccggagtgcagt

SEQ ID NO: 1480363 - DNA, 15 bp, Homo sapiens
caggccggagtgcag

SEQ ID NO: 1480364 - DNA, 15 bp, Homo sapiens
ccaggccggagtgca

SEQ ID NO: 1480365 - DNA, 15 bp, Homo sapiens
cccaggccggagtgc

SEQ ID NO: 1480366 - DNA, 15 bp, Homo sapiens
gcccaggccggagtg

SEQ ID NO: 1480367 - DNA, 15 bp, Homo sapiens
tgcccaggccggagt

SEQ ID NO: 1480368 - DNA, 15 bp, Homo sapiens
ttgcccaggccggag

SEQ ID NO: 1480369 - DNA, 15 bp, Homo sapiens
gttgcccaggccgga

SEQ ID NO: 1480370 - DNA, 15 bp, Homo sapiens
tgttgcccaggccgg

SEQ ID NO: 1480371 - DNA, 15 bp, Homo sapiens
ctgttgcccaggccg

SEQ ID NO: 1480372 - DNA, 15 bp, Homo sapiens
tctgttgcccaggcc

SEQ ID NO: 1480373 - DNA, 15 bp, Homo sapiens
cgctctgttgcccag

SEQ ID NO: 1480374 - DNA, 15 bp, Homo sapiens
tctcgctctgttgcc

SEQ ID NO: 1480375 - DNA, 15 bp, Homo sapiens
tatctcgctctgttg

SEQ ID NO: 1480376 - DNA, 15 bp, Homo sapiens
atatctcgctctgtt

SEQ ID NO: 1480377 - DNA, 15 bp, Homo sapiens
aatatctcgctctgt

SEQ ID NO: 1480378 - DNA, 15 bp, Homo sapiens
caatatctcgctctg

SEQ ID NO: 1480379 - DNA, 15 bp, Homo sapiens
acaatatctcgctct

SEQ ID NO: 1480380 - DNA, 15 bp, Homo sapiens
gacaatatctcgctc

SEQ ID NO: 1480381 - DNA, 15 bp, Homo sapiens
ggacaatatctcgct

SEQ ID NO: 1480382 - DNA, 15 bp, Homo sapiens
cggacaatatctcgc

SEQ ID NO: 1480383 - DNA, 15 bp, Homo sapiens
ccggacaatatctcg

SEQ ID NO: 1480384 - DNA, 15 bp, Homo sapiens
cccggacaatatctc

SEQ ID NO: 1480385 - DNA, 15 bp, Homo sapiens
tcccggacaatatct

SEQ ID NO: 1480386 - DNA, 15 bp, Homo sapiens
ttcccggacaatatc

SEQ ID NO: 1480387 - DNA, 15 bp, Homo sapiens
tttcccggacaatat

SEQ ID NO: 1480388 - DNA, 15 bp, Homo sapiens
ttttcccggacaata

SEQ ID NO: 1480389 - DNA, 15 bp, Homo sapiens
tttttcccggacaat

SEQ ID NO: 1480390 - DNA, 15 bp, Homo sapiens
ttttttcccggacaa

SEQ ID NO: 1480391 - DNA, 15 bp, Homo sapiens
tttttttcccggaca

SEQ ID NO: 1480392 - DNA, 15 bp, Homo sapiens
ttttttttcccggac

SEQ ID NO: 1480393 - DNA, 15 bp, Homo sapiens
tttttttttcccgga

SEQ ID NO: 1480394 - DNA, 15 bp, Homo sapiens
ttttttttttcccgg

SEQ ID NO: 1480395 - DNA, 15 bp, Homo sapiens
tttttttttttcccg

SEQ ID NO: 1480396 - DNA, 15 bp, Homo sapiens
tccttcctttttttt

SEQ ID NO: 1480397 - DNA, 15 bp, Homo sapiens
ttccttccttttttt

SEQ ID NO: 1480398 - DNA, 15 bp, Homo sapiens
tttccttcctttttt

SEQ ID NO: 1480399 - DNA, 15 bp, Homo sapiens
ttttccttccttttt

SEQ ID NO: 1480400 - DNA, 15 bp, Homo sapiens
ttttttttccttcct

SEQ ID NO: 1480401 - DNA, 15 bp, Homo sapiens
tttttttttccttcc

SEQ ID NO: 1480402 - DNA, 15 bp, Homo sapiens
ctttttttttttcct

SEQ ID NO: 1480403 - DNA, 15 bp, Homo sapiens
tctttttttttttcc

SEQ ID NO: 1480404 - DNA, 15 bp, Homo sapiens
ccctttttctttctt

SEQ ID NO: 1480405 - DNA, 15 bp, Homo sapiens
cccctttttctttct

SEQ ID NO: 1480406 - DNA, 15 bp, Homo sapiens
tcccctttttctttc

SEQ ID NO: 1480407 - DNA, 15 bp, Homo sapiens
ttcccctttttcttt

SEQ ID NO: 1480408 - DNA, 15 bp, Homo sapiens
cttcccctttttctt

SEQ ID NO: 1480409 - DNA, 15 bp, Homo sapiens
tcttcccctttttct

SEQ ID NO: 1480410 - DNA, 15 bp, Homo sapiens
atcttcccctttttc

SEQ ID NO: 1480411 - DNA, 15 bp, Homo sapiens
tatcttccccttttt

SEQ ID NO: 1480412 - DNA, 15 bp, Homo sapiens
gtatcttcccctttt

SEQ ID NO: 1480413 - DNA, 15 bp, Homo sapiens
tgtatcttccccttt

SEQ ID NO: 1480414 - DNA, 15 bp, Homo sapiens
gtgtatcttcccctt

SEQ ID NO: 1480415 - DNA, 15 bp, Homo sapiens
agtgtatcttcccct

SEQ ID NO: 1480416 - DNA, 15 bp, Homo sapiens
cagtgtatcttcccc

SEQ ID NO: 1480417 - DNA, 15 bp, Homo sapiens
ccagtgtatcttccc

SEQ ID NO: 1480418 - DNA, 15 bp, Homo sapiens
tccagtgtatcttcc

SEQ ID NO: 1480419 - DNA, 15 bp, Homo sapiens
ttccagtgtatcttc

SEQ ID NO: 1480420 - DNA, 15 bp, Homo sapiens
gttccagtgtatctt

SEQ ID NO: 1480421 - DNA, 15 bp, Homo sapiens
tgttccagtgtatct

SEQ ID NO: 1480422 - DNA, 15 bp, Homo sapiens
gtgttccagtgtatc

SEQ ID NO: 1480423 - DNA, 15 bp, Homo sapiens
tgtgttccagtgtat

SEQ ID NO: 1480424 - DNA, 15 bp, Homo sapiens
ttgtgttccagtgta

SEQ ID NO: 1480425 - DNA, 15 bp, Homo sapiens
tttgtgttccagtgt

SEQ ID NO: 1480426 - DNA, 15 bp, Homo sapiens
atttgtgttccagtg

SEQ ID NO: 1480427 - DNA, 15 bp, Homo sapiens
catttgtgttccagt

SEQ ID NO: 1480428 - DNA, 15 bp, Homo sapiens
gcatttgtgttccag

SEQ ID NO: 1480429 - DNA, 15 bp, Homo sapiens
agcatttgtgttcca

SEQ ID NO: 1480430 - DNA, 15 bp, Homo sapiens
aagcatttgtgttcc

SEQ ID NO: 1480431 - DNA, 15 bp, Homo sapiens
gaagcatttgtgttc

SEQ ID NO: 1480432 - DNA, 15 bp, Homo sapiens
agaagcatttgtgtt

SEQ ID NO: 1480433 - DNA, 15 bp, Homo sapiens
aagaagcatttgtgt

SEQ ID NO: 1480434 - DNA, 15 bp, Homo sapiens
taagaagcatttgtg

SEQ ID NO: 1480435 - DNA, 15 bp, Homo sapiens
ttaagaagcatttgt

SEQ ID NO: 1480436 - DNA, 15 bp, Homo sapiens
cttaagaagcatttg

SEQ ID NO: 1480437 - DNA, 15 bp, Homo sapiens
ccttaagaagcattt

SEQ ID NO: 1480438 - DNA, 15 bp, Homo sapiens
cccttaagaagcatt

SEQ ID NO: 1480439 - DNA, 15 bp, Homo sapiens
ccccttaagaagcat

SEQ ID NO: 1480440 - DNA, 15 bp, Homo sapiens
gccccttaagaagca

SEQ ID NO: 1480441 - DNA, 15 bp, Homo sapiens
cgccccttaagaagc

SEQ ID NO: 1480442 - DNA, 15 bp, Homo sapiens
gcgccccttaagaag

SEQ ID NO: 1480443 - DNA, 15 bp, Homo sapiens
tgcgccccttaagaa

SEQ ID NO: 1480444 - DNA, 15 bp, Homo sapiens
ctgcgccccttaaga

SEQ ID NO: 1480445 - DNA, 15 bp, Homo sapiens
actgcgccccttaag

SEQ ID NO: 1480446 - DNA, 15 bp, Homo sapiens
cactgcgccccttaa

SEQ ID NO: 1480447 - DNA, 15 bp, Homo sapiens
ccactgcgcccctta

SEQ ID NO: 1480448 - DNA, 15 bp, Homo sapiens
gccactgcgcccctt

SEQ ID NO: 1480449 - DNA, 15 bp, Homo sapiens
agccactgcgcccct

SEQ ID NO: 1480450 - DNA, 15 bp, Homo sapiens
gagccactgcgcccc

SEQ ID NO: 1480451 - DNA, 15 bp, Homo sapiens
gtgagccactgcgcc

SEQ ID NO: 1480452 - DNA, 15 bp, Homo sapiens
agtgagccactgcgc

SEQ ID NO: 1480453 - DNA, 15 bp, Homo sapiens
aagtgagccactgcg

SEQ ID NO: 1480454 - DNA, 15 bp, Homo sapiens
gaagtgagccactgc

SEQ ID NO: 1480455 - DNA, 15 bp, Homo sapiens
agaagtgagccactg

SEQ ID NO: 1480456 - DNA, 15 bp, Homo sapiens
cagaagtgagccact

SEQ ID NO: 1480457 - DNA, 15 bp, Homo sapiens
gcagaagtgagccac

SEQ ID NO: 1480458 - DNA, 15 bp, Homo sapiens
tgcagaagtgagcca

SEQ ID NO: 1480459 - DNA, 15 bp, Homo sapiens
ttgcagaagtgagcc

SEQ ID NO: 1480460 - DNA, 15 bp, Homo sapiens
attgcagaagtgagc

SEQ ID NO: 1480461 - DNA, 15 bp, Homo sapiens
gattgcagaagtgag

SEQ ID NO: 1480462 - DNA, 15 bp, Homo sapiens
agattgcagaagtga

SEQ ID NO: 1480463 - DNA, 15 bp, Homo sapiens
aagattgcagaagtg

SEQ ID NO: 1480464 - DNA, 15 bp, Homo sapiens
caagattgcagaagt

SEQ ID NO: 1480465 - DNA, 15 bp, Homo sapiens
ccaagattgcagaag

SEQ ID NO: 1480466 - DNA, 15 bp, Homo sapiens
gccaagattgcagaa

SEQ ID NO: 1480467 - DNA, 15 bp, Homo sapiens
tgccaagattgcaga

SEQ ID NO: 1480468 - DNA, 15 bp, Homo sapiens
gtgccaagattgcag

SEQ ID NO: 1480469 - DNA, 15 bp, Homo sapiens
agtgccaagattgca

SEQ ID NO: 1480470 - DNA, 15 bp, Homo sapiens
aagtgccaagattgc

SEQ ID NO: 1480471 - DNA, 15 bp, Homo sapiens
aaagtgccaagattg

SEQ ID NO: 1480472 - DNA, 15 bp, Homo sapiens
gaaagtgccaagatt

SEQ ID NO: 1480473 - DNA, 15 bp, Homo sapiens
cgaaagtgccaagat

SEQ ID NO: 1480474 - DNA, 15 bp, Homo sapiens
ccgaaagtgccaaga

SEQ ID NO: 1480475 - DNA, 15 bp, Homo sapiens
cccgaaagtgccaag

SEQ ID NO: 1480476 - DNA, 15 bp, Homo sapiens
ccccgaaagtgccaa

SEQ ID NO: 1480477 - DNA, 15 bp, Homo sapiens
cccccgaaagtgcca

SEQ ID NO: 1480478 - DNA, 15 bp, Homo sapiens
gcccccgaaagtgcc

SEQ ID NO: 1480479 - DNA, 15 bp, Homo sapiens
ggcccccgaaagtgc

SEQ ID NO: 1480480 - DNA, 15 bp, Homo sapiens
cggcccccgaaagtg

SEQ ID NO: 1480481 - DNA, 15 bp, Homo sapiens
tcggcccccgaaagt

SEQ ID NO: 1480482 - DNA, 15 bp, Homo sapiens
ctcggcccccgaaag

SEQ ID NO: 1480483 - DNA, 15 bp, Homo sapiens
cctcggcccccgaaa

SEQ ID NO: 1480484 - DNA, 15 bp, Homo sapiens
gcctcggcccccgaa

SEQ ID NO: 1480485 - DNA, 15 bp, Homo sapiens
agcctcggcccccga

SEQ ID NO: 1480486 - DNA, 15 bp, Homo sapiens
cagcctcggcccccg

SEQ ID NO: 1480487 - DNA, 15 bp, Homo sapiens
ccagcctcggccccc

SEQ ID NO: 1480488 - DNA, 15 bp, Homo sapiens
accagcctcggcccc

SEQ ID NO: 1480489 - DNA, 15 bp, Homo sapiens
caccagcctcggccc

SEQ ID NO: 1480490 - DNA, 15 bp, Homo sapiens
ccaccagcctcggcc

SEQ ID NO: 1480491 - DNA, 15 bp, Homo sapiens
tccaccagcctcggc

SEQ ID NO: 1480492 - DNA, 15 bp, Homo sapiens
atccaccagcctcgg

SEQ ID NO: 1480493 - DNA, 15 bp, Homo sapiens
gatccaccagcctcg

SEQ ID NO: 1480494 - DNA, 15 bp, Homo sapiens
tgatccaccagcctc

SEQ ID NO: 1480495 - DNA, 15 bp, Homo sapiens
cgtgatccaccagcc

SEQ ID NO: 1480496 - DNA, 15 bp, Homo sapiens
tcgtgatccaccagc

SEQ ID NO: 1480497 - DNA, 15 bp, Homo sapiens
ctcgtgatccaccag

SEQ ID NO: 1480498 - DNA, 15 bp, Homo sapiens
cctcgtgatccacca

SEQ ID NO: 1480499 - DNA, 15 bp, Homo sapiens
ctaggctggtctcga

SEQ ID NO: 1480500 - DNA, 15 bp, Homo sapiens
actaggctggtctcg

SEQ ID NO: 1480501 - DNA, 15 bp, Homo sapiens
gactaggctggtctc

SEQ ID NO: 1480502 - DNA, 15 bp, Homo sapiens
tgactaggctggtct

SEQ ID NO: 1480503 - DNA, 15 bp, Homo sapiens
ttgactaggctggtc

SEQ ID NO: 1480504 - DNA, 15 bp, Homo sapiens
gttgactaggctggt

SEQ ID NO: 1480505 - DNA, 15 bp, Homo sapiens
tgttgactaggctgg

SEQ ID NO: 1480506 - DNA, 15 bp, Homo sapiens
atgttgactaggctg

SEQ ID NO: 1480507 - DNA, 15 bp, Homo sapiens
catgttgactaggct

SEQ ID NO: 1480508 - DNA, 15 bp, Homo sapiens
ccatgttgactaggc

SEQ ID NO: 1480509 - DNA, 15 bp, Homo sapiens
tccatgttgactagg

SEQ ID NO: 1480510 - DNA, 15 bp, Homo sapiens
ttccatgttgactag

SEQ ID NO: 1480511 - DNA, 15 bp, Homo sapiens
tttccatgttgacta

SEQ ID NO: 1480512 - DNA, 15 bp, Homo sapiens
ttttccatgttgact

SEQ ID NO: 1480513 - DNA, 15 bp, Homo sapiens
tttttccatgttgac

SEQ ID NO: 1480514 - DNA, 15 bp, Homo sapiens
gtttttccatgttga

SEQ ID NO: 1480515 - DNA, 15 bp, Homo sapiens
ggtttttccatgttg

SEQ ID NO: 1480516 - DNA, 15 bp, Homo sapiens
gggtttttccatgtt

SEQ ID NO: 1480517 - DNA, 15 bp, Homo sapiens
ggggtttttccatgt

SEQ ID NO: 1480518 - DNA, 15 bp, Homo sapiens
cggggtttttccatg

SEQ ID NO: 1480519 - DNA, 15 bp, Homo sapiens
acggggtttttccat

SEQ ID NO: 1480520 - DNA, 15 bp, Homo sapiens
gacggggtttttcca

SEQ ID NO: 1480521 - DNA, 15 bp, Homo sapiens
agacggggtttttcc

SEQ ID NO: 1480522 - DNA, 15 bp, Homo sapiens
gagacggggtttttc

SEQ ID NO: 1480523 - DNA, 15 bp, Homo sapiens
agagacggggttttt

SEQ ID NO: 1480524 - DNA, 15 bp, Homo sapiens
gttttagtagagacg

SEQ ID NO: 1480525 - DNA, 15 bp, Homo sapiens
agttttagtagagac

SEQ ID NO: 1480526 - DNA, 15 bp, Homo sapiens
tagttttagtagaga

SEQ ID NO: 1480527 - DNA, 15 bp, Homo sapiens
gtagttttagtagag

SEQ ID NO: 1480528 - DNA, 15 bp, Homo sapiens
tgtagttttagtaga

SEQ ID NO: 1480529 - DNA, 15 bp, Homo sapiens
ttgtagttttagtag

SEQ ID NO: 1480530 - DNA, 15 bp, Homo sapiens
tttgtagttttagta

SEQ ID NO: 1480531 - DNA, 15 bp, Homo sapiens
ttttgtagttttagt

SEQ ID NO: 1480532 - DNA, 15 bp, Homo sapiens
tttttgtagttttag

SEQ ID NO: 1480533 - DNA, 15 bp, Homo sapiens
atttttgtagtttta

SEQ ID NO: 1480534 - DNA, 15 bp, Homo sapiens
acaccacgcccggct

SEQ ID NO: 1480535 - DNA, 15 bp, Homo sapiens
gacaccacgcccggc

SEQ ID NO: 1480536 - DNA, 15 bp, Homo sapiens
cgacaccacgcccgg

SEQ ID NO: 1480537 - DNA, 15 bp, Homo sapiens
ccgacaccacgcccg

SEQ ID NO: 1480538 - DNA, 15 bp, Homo sapiens
cccgacaccacgccc

SEQ ID NO: 1480539 - DNA, 15 bp, Homo sapiens
gcccgacaccacgcc

SEQ ID NO: 1480540 - DNA, 15 bp, Homo sapiens
cgcccgacaccacgc

SEQ ID NO: 1480541 - DNA, 15 bp, Homo sapiens
gcgcccgacaccacg

SEQ ID NO: 1480542 - DNA, 15 bp, Homo sapiens
ggcgcccgacaccac

SEQ ID NO: 1480543 - DNA, 15 bp, Homo sapiens
aggcgcccgacacca

SEQ ID NO: 1480544 - DNA, 15 bp, Homo sapiens
caggcgcccgacacc

SEQ ID NO: 1480545 - DNA, 15 bp, Homo sapiens
acaggcgcccgacac

SEQ ID NO: 1480546 - DNA, 15 bp, Homo sapiens
tacaggcgcccgaca

SEQ ID NO: 1480547 - DNA, 15 bp, Homo sapiens
ttacaggcgcccgac

SEQ ID NO: 1480548 - DNA, 15 bp, Homo sapiens
attacaggcgcccga

SEQ ID NO: 1480549 - DNA, 15 bp, Homo sapiens
cgattatcctgcctc

SEQ ID NO: 1480550 - DNA, 15 bp, Homo sapiens
gcgattatcctgcct

SEQ ID NO: 1480551 - DNA, 15 bp, Homo sapiens
agcgattatcctgcc

SEQ ID NO: 1480552 - DNA, 15 bp, Homo sapiens
aagcgattatcctgc

SEQ ID NO: 1480553 - DNA, 15 bp, Homo sapiens
aaagcgattatcctg

SEQ ID NO: 1480554 - DNA, 15 bp, Homo sapiens
taaagcgattatcct

SEQ ID NO: 1480555 - DNA, 15 bp, Homo sapiens
ttaaagcgattatcc

SEQ ID NO: 1480556 - DNA, 15 bp, Homo sapiens
attaaagcgattatc

SEQ ID NO: 1480557 - DNA, 15 bp, Homo sapiens
gattaaagcgattat

SEQ ID NO: 1480558 - DNA, 15 bp, Homo sapiens
tgattaaagcgatta

SEQ ID NO: 1480559 - DNA, 15 bp, Homo sapiens
ctgattaaagcgatt

SEQ ID NO: 1480560 - DNA, 15 bp, Homo sapiens
cctgattaaagcgat

SEQ ID NO: 1480561 - DNA, 15 bp, Homo sapiens
tcctgattaaagcga

SEQ ID NO: 1480562 - DNA, 15 bp, Homo sapiens
ttcctgattaaagcg

SEQ ID NO: 1480563 - DNA, 15 bp, Homo sapiens
cttcctgattaaagc

SEQ ID NO: 1480564 - DNA, 15 bp, Homo sapiens
ccttcctgattaaag

SEQ ID NO: 1480565 - DNA, 15 bp, Homo sapiens
gccttcctgattaaa

SEQ ID NO: 1480566 - DNA, 15 bp, Homo sapiens
cgccttcctgattaa

SEQ ID NO: 1480567 - DNA, 15 bp, Homo sapiens
ccgccttcctgatta

SEQ ID NO: 1480568 - DNA, 15 bp, Homo sapiens
tccgccttcctgatt

SEQ ID NO: 1480569 - DNA, 15 bp, Homo sapiens
ctccgccttcctgat

SEQ ID NO: 1480570 - DNA, 15 bp, Homo sapiens
cctccgccttcctga

SEQ ID NO: 1480571 - DNA, 15 bp, Homo sapiens
acctccgccttcctg

SEQ ID NO: 1480572 - DNA, 15 bp, Homo sapiens
aacctccgccttcct

SEQ ID NO: 1480573 - DNA, 15 bp, Homo sapiens
caacctccgccttcc

SEQ ID NO: 1480574 - DNA, 15 bp, Homo sapiens
gcaacctccgccttc

SEQ ID NO: 1480575 - DNA, 15 bp, Homo sapiens
tgcaacctccgcctt

SEQ ID NO: 1480576 - DNA, 15 bp, Homo sapiens
acgatctcggttcac

SEQ ID NO: 1480577 - DNA, 15 bp, Homo sapiens
cacgatctcggttca

SEQ ID NO: 1480578 - DNA, 15 bp, Homo sapiens
gcacgatctcggttc

SEQ ID NO: 1480579 - DNA, 15 bp, Homo sapiens
ggcacgatctcggtt

SEQ ID NO: 1480580 - DNA, 15 bp, Homo sapiens
tggcacgatctcggt

SEQ ID NO: 1480581 - DNA, 15 bp, Homo sapiens
actcttgtcgcccag

SEQ ID NO: 1480582 - DNA, 15 bp, Homo sapiens
cactcttgtcgccca

SEQ ID NO: 1480583 - DNA, 15 bp, Homo sapiens
tcactcttgtcgccc

SEQ ID NO: 1480584 - DNA, 15 bp, Homo sapiens
ttcactcttgtcgcc

SEQ ID NO: 1480585 - DNA, 15 bp, Homo sapiens
tttcactcttgtcgc

SEQ ID NO: 1480586 - DNA, 15 bp, Homo sapiens
gtttcactcttgtcg

SEQ ID NO: 1480587 - DNA, 15 bp, Homo sapiens
agtttcactcttgtc

SEQ ID NO: 1480588 - DNA, 15 bp, Homo sapiens
cggagtttcactctt

SEQ ID NO: 1480589 - DNA, 15 bp, Homo sapiens
acggagtttcactct

SEQ ID NO: 1480590 - DNA, 15 bp, Homo sapiens
gacggagtttcactc

SEQ ID NO: 1480591 - DNA, 15 bp, Homo sapiens
agacggagtttcact

SEQ ID NO: 1480592 - DNA, 15 bp, Homo sapiens
tgagacggagtttca

SEQ ID NO: 1480593 - DNA, 15 bp, Homo sapiens
cttcctctttttttt

SEQ ID NO: 1480594 - DNA, 15 bp, Homo sapiens
tcttcctcttttttt

SEQ ID NO: 1480595 - DNA, 15 bp, Homo sapiens
ttcttcctctttttt

SEQ ID NO: 1480596 - DNA, 15 bp, Homo sapiens
gttcttcctcttttt

SEQ ID NO: 1480597 - DNA, 15 bp, Homo sapiens
tgttcttcctctttt

SEQ ID NO: 1480598 - DNA, 15 bp, Homo sapiens
ttgttcttcctcttt

SEQ ID NO: 1480599 - DNA, 15 bp, Homo sapiens
tttgttcttcctctt

SEQ ID NO: 1480600 - DNA, 15 bp, Homo sapiens
ctttgttcttcctct

SEQ ID NO: 1480601 - DNA, 15 bp, Homo sapiens
cctttgttcttcctc

SEQ ID NO: 1480602 - DNA, 15 bp, Homo sapiens
acctttgttcttcct

SEQ ID NO: 1480603 - DNA, 15 bp, Homo sapiens
gacctttgttcttcc

SEQ ID NO: 1480604 - DNA, 15 bp, Homo sapiens
ggacctttgttcttc

SEQ ID NO: 1480605 - DNA, 15 bp, Homo sapiens
gggacctttgttctt

SEQ ID NO: 1480606 - DNA, 15 bp, Homo sapiens
tgggacctttgttct

SEQ ID NO: 1480607 - DNA, 15 bp, Homo sapiens
ttgggacctttgttc

SEQ ID NO: 1480608 - DNA, 15 bp, Homo sapiens
cttgggacctttgtt

SEQ ID NO: 1480609 - DNA, 15 bp, Homo sapiens
tcttgggacctttgt

SEQ ID NO: 1480610 - DNA, 15 bp, Homo sapiens
ctcttgggacctttg

SEQ ID NO: 1480611 - DNA, 15 bp, Homo sapiens
actcttgggaccttt

SEQ ID NO: 1480612 - DNA, 15 bp, Homo sapiens
aactcttgggacctt

SEQ ID NO: 1480613 - DNA, 15 bp, Homo sapiens
caactcttgggacct

SEQ ID NO: 1480614 - DNA, 15 bp, Homo sapiens
ccaactcttgggacc

SEQ ID NO: 1480615 - DNA, 15 bp, Homo sapiens
tccaactcttgggac

SEQ ID NO: 1480616 - DNA, 15 bp, Homo sapiens
gtccaactcttggga

SEQ ID NO: 1480617 - DNA, 15 bp, Homo sapiens
ggtccaactcttggg

SEQ ID NO: 1480618 - DNA, 15 bp, Homo sapiens
gggtccaactcttgg

SEQ ID NO: 1480619 - DNA, 15 bp, Homo sapiens
tgggtccaactcttg

SEQ ID NO: 1480620 - DNA, 15 bp, Homo sapiens
ctgggtccaactctt

SEQ ID NO: 1480621 - DNA, 15 bp, Homo sapiens
cctgggtccaactct

SEQ ID NO: 1480622 - DNA, 15 bp, Homo sapiens
acctgggtccaactc

SEQ ID NO: 1480623 - DNA, 15 bp, Homo sapiens
aacctgggtccaact

SEQ ID NO: 1480624 - DNA, 15 bp, Homo sapiens
caacctgggtccaac

SEQ ID NO: 1480625 - DNA, 15 bp, Homo sapiens
acaacctgggtccaa

SEQ ID NO: 1480626 - DNA, 15 bp, Homo sapiens
tacaacctgggtcca

SEQ ID NO: 1480627 - DNA, 15 bp, Homo sapiens
ctacaacctgggtcc

SEQ ID NO: 1480628 - DNA, 15 bp, Homo sapiens
cctacaacctgggtc

SEQ ID NO: 1480629 - DNA, 15 bp, Homo sapiens
ccctacaacctgggt

SEQ ID NO: 1480630 - DNA, 15 bp, Homo sapiens
gccctacaacctggg

SEQ ID NO: 1480631 - DNA, 15 bp, Homo sapiens
agccctacaacctgg

SEQ ID NO: 1480632 - DNA, 15 bp, Homo sapiens
cagccctacaacctg

SEQ ID NO: 1480633 - DNA, 15 bp, Homo sapiens
ccagccctacaacct

SEQ ID NO: 1480634 - DNA, 15 bp, Homo sapiens
tccagccctacaacc

SEQ ID NO: 1480635 - DNA, 15 bp, Homo sapiens
ttccagccctacaac

SEQ ID NO: 1480636 - DNA, 15 bp, Homo sapiens
attccagccctacaa

SEQ ID NO: 1480637 - DNA, 15 bp, Homo sapiens
tattccagccctaca

SEQ ID NO: 1480638 - DNA, 15 bp, Homo sapiens
ttattccagccctac

SEQ ID NO: 1480639 - DNA, 15 bp, Homo sapiens
tttattccagcccta

SEQ ID NO: 1480640 - DNA, 15 bp, Homo sapiens
ttttattccagccct

SEQ ID NO: 1480641 - DNA, 15 bp, Homo sapiens
tttttattccagccc

SEQ ID NO: 1480642 - DNA, 15 bp, Homo sapiens
ttttttattccagcc

SEQ ID NO: 1480643 - DNA, 15 bp, Homo sapiens
attttttattccagc

SEQ ID NO: 1480644 - DNA, 15 bp, Homo sapiens
tattttttattccag

SEQ ID NO: 1480645 - DNA, 15 bp, Homo sapiens
ttattttttattcca

SEQ ID NO: 1480646 - DNA, 15 bp, Homo sapiens
tttattttttattcc

SEQ ID NO: 1480647 - DNA, 15 bp, Homo sapiens
ttttattttttattc

SEQ ID NO: 1480648 - DNA, 15 bp, Homo sapiens
gtattttatttttta

SEQ ID NO: 1480649 - DNA, 15 bp, Homo sapiens
tgtattttatttttt

SEQ ID NO: 1480650 - DNA, 15 bp, Homo sapiens
ttgtattttattttt

SEQ ID NO: 1480651 - DNA, 15 bp, Homo sapiens
tttgtattttatttt

SEQ ID NO: 1480652 - DNA, 15 bp, Homo sapiens
gtttgtattttattt

SEQ ID NO: 1480653 - DNA, 15 bp, Homo sapiens
agtttgtattttatt

SEQ ID NO: 1480654 - DNA, 15 bp, Homo sapiens
aagtttgtattttat

SEQ ID NO: 1480655 - DNA, 15 bp, Homo sapiens
caagtttgtatttta

SEQ ID NO: 1480656 - DNA, 15 bp, Homo sapiens
acaagtttgtatttt

SEQ ID NO: 1480657 - DNA, 15 bp, Homo sapiens
cacaagtttgtattt

SEQ ID NO: 1480658 - DNA, 15 bp, Homo sapiens
gcacaagtttgtatt

SEQ ID NO: 1480659 - DNA, 15 bp, Homo sapiens
ggcacaagtttgtat

SEQ ID NO: 1480660 - DNA, 15 bp, Homo sapiens
aggcacaagtttgta

SEQ ID NO: 1480661 - DNA, 15 bp, Homo sapiens
caggcacaagtttgt

SEQ ID NO: 1480662 - DNA, 15 bp, Homo sapiens
tcaggcacaagtttg

SEQ ID NO: 1480663 - DNA, 15 bp, Homo sapiens
atcaggcacaagttt

SEQ ID NO: 1480664 - DNA, 15 bp, Homo sapiens
gatcaggcacaagtt

SEQ ID NO: 1480665 - DNA, 15 bp, Homo sapiens
ggatcaggcacaagt

SEQ ID NO: 1480666 - DNA, 15 bp, Homo sapiens
tggatcaggcacaag

SEQ ID NO: 1480667 - DNA, 15 bp, Homo sapiens
ctggatcaggcacaa

SEQ ID NO: 1480668 - DNA, 15 bp, Homo sapiens
tctggatcaggcaca

SEQ ID NO: 1480669 - DNA, 15 bp, Homo sapiens
ttctggatcaggcac

SEQ ID NO: 1480670 - DNA, 15 bp, Homo sapiens
tttctggatcaggca

SEQ ID NO: 1480671 - DNA, 15 bp, Homo sapiens
gtttctggatcaggc

SEQ ID NO: 1480672 - DNA, 15 bp, Homo sapiens
ggtttctggatcagg

SEQ ID NO: 1480673 - DNA, 15 bp, Homo sapiens
gggtttctggatcag

SEQ ID NO: 1480674 - DNA, 15 bp, Homo sapiens
cgggtttctggatca

SEQ ID NO: 1480675 - DNA, 15 bp, Homo sapiens
ccgggtttctggatc

SEQ ID NO: 1480676 - DNA, 15 bp, Homo sapiens
cccgggtttctggat

SEQ ID NO: 1480677 - DNA, 15 bp, Homo sapiens
gcccgggtttctgga

SEQ ID NO: 1480678 - DNA, 15 bp, Homo sapiens
cgcccgggtttctgg

SEQ ID NO: 1480679 - DNA, 15 bp, Homo sapiens
ccgcccgggtttctg

SEQ ID NO: 1480680 - DNA, 15 bp, Homo sapiens
cccgcccgggtttct

SEQ ID NO: 1480681 - DNA, 15 bp, Homo sapiens
tcccgcccgggtttc

SEQ ID NO: 1480682 - DNA, 15 bp, Homo sapiens
ctcccgcccgggttt

SEQ ID NO: 1480683 - DNA, 15 bp, Homo sapiens
actcccgcccgggtt

SEQ ID NO: 1480684 - DNA, 15 bp, Homo sapiens
aactcccgcccgggt

SEQ ID NO: 1480685 - DNA, 15 bp, Homo sapiens
caactcccgcccggg

SEQ ID NO: 1480686 - DNA, 15 bp, Homo sapiens
ccaactcccgcccgg

SEQ ID NO: 1480687 - DNA, 15 bp, Homo sapiens
cccaactcccgcccg

SEQ ID NO: 1480688 - DNA, 15 bp, Homo sapiens
acccaactcccgccc

SEQ ID NO: 1480689 - DNA, 15 bp, Homo sapiens
gacccaactcccgcc

SEQ ID NO: 1480690 - DNA, 15 bp, Homo sapiens
tgacccaactcccgc

SEQ ID NO: 1480691 - DNA, 15 bp, Homo sapiens
ctgacccaactcccg

SEQ ID NO: 1480692 - DNA, 15 bp, Homo sapiens
tctgacccaactccc

SEQ ID NO: 1480693 - DNA, 15 bp, Homo sapiens
gtctgacccaactcc

SEQ ID NO: 1480694 - DNA, 15 bp, Homo sapiens
tgtctgacccaactc

SEQ ID NO: 1480695 - DNA, 15 bp, Homo sapiens
ctgtctgacccaact

SEQ ID NO: 1480696 - DNA, 15 bp, Homo sapiens
tctgtctgacccaac

SEQ ID NO: 1480697 - DNA, 15 bp, Homo sapiens
ttctgtctgacccaa

SEQ ID NO: 1480698 - DNA, 15 bp, Homo sapiens
cttctgtctgaccca

SEQ ID NO: 1480699 - DNA, 15 bp, Homo sapiens
tcttctgtctgaccc

SEQ ID NO: 1480700 - DNA, 15 bp, Homo sapiens
ctcttctgtctgacc

SEQ ID NO: 1480701 - DNA, 15 bp, Homo sapiens
cgctcttctgtctga

SEQ ID NO: 1480702 - DNA, 15 bp, Homo sapiens
acgctcttctgtctg

SEQ ID NO: 1480703 - DNA, 15 bp, Homo sapiens
cacgctcttctgtct

SEQ ID NO: 1480704 - DNA, 15 bp, Homo sapiens
ccacgctcttctgtc

SEQ ID NO: 1480705 - DNA, 15 bp, Homo sapiens
cccacgctcttctgt

SEQ ID NO: 1480706 - DNA, 15 bp, Homo sapiens
gcccacgctcttctg

SEQ ID NO: 1480707 - DNA, 15 bp, Homo sapiens
agcccacgctcttct

SEQ ID NO: 1480708 - DNA, 15 bp, Homo sapiens
cagcccacgctcttc

SEQ ID NO: 1480709 - DNA, 15 bp, Homo sapiens
ccagcccacgctctt

SEQ ID NO: 1480710 - DNA, 15 bp, Homo sapiens
cccagcccacgctct

SEQ ID NO: 1480711 - DNA, 15 bp, Homo sapiens
tcccagcccacgctc

SEQ ID NO: 1480712 - DNA, 15 bp, Homo sapiens
atcccagcccacgct

SEQ ID NO: 1480713 - DNA, 15 bp, Homo sapiens
aatcccagcccacgc

SEQ ID NO: 1480714 - DNA, 15 bp, Homo sapiens
taatcccagcccacg

SEQ ID NO: 1480715 - DNA, 15 bp, Homo sapiens
ctaatcccagcccac

SEQ ID NO: 1480716 - DNA, 15 bp, Homo sapiens
gctaatcccagccca

SEQ ID NO: 1480717 - DNA, 15 bp, Homo sapiens
agctaatcccagccc

SEQ ID NO: 1480718 - DNA, 15 bp, Homo sapiens
tagctaatcccagcc

SEQ ID NO: 1480719 - DNA, 15 bp, Homo sapiens
gtagctaatcccagc

SEQ ID NO: 1480720 - DNA, 15 bp, Homo sapiens
ggtagctaatcccag

SEQ ID NO: 1480721 - DNA, 15 bp, Homo sapiens
tggtagctaatccca

SEQ ID NO: 1480722 - DNA, 15 bp, Homo sapiens
gtggtagctaatccc

SEQ ID NO: 1480723 - DNA, 15 bp, Homo sapiens
cgtggtagctaatcc

SEQ ID NO: 1480724 - DNA, 15 bp, Homo sapiens
tcgtggtagctaatc

SEQ ID NO: 1480725 - DNA, 15 bp, Homo sapiens
ttcgtggtagctaat

SEQ ID NO: 1480726 - DNA, 15 bp, Homo sapiens
tttcgtggtagctaa

SEQ ID NO: 1480727 - DNA, 15 bp, Homo sapiens
ttttcgtggtagcta

SEQ ID NO: 1480728 - DNA, 15 bp, Homo sapiens
cttttcgtggtagct

SEQ ID NO: 1480729 - DNA, 15 bp, Homo sapiens
ccttttcgtggtagc

SEQ ID NO: 1480730 - DNA, 15 bp, Homo sapiens
tccttttcgtggtag

SEQ ID NO: 1480731 - DNA, 15 bp, Homo sapiens
ttccttttcgtggta

SEQ ID NO: 1480732 - DNA, 15 bp, Homo sapiens
gttccttttcgtggt

SEQ ID NO: 1480733 - DNA, 15 bp, Homo sapiens
cgttccttttcgtgg

SEQ ID NO: 1480734 - DNA, 15 bp, Homo sapiens
ccgttccttttcgtg

SEQ ID NO: 1480735 - DNA, 15 bp, Homo sapiens
accgttccttttcgt

SEQ ID NO: 1480736 - DNA, 15 bp, Homo sapiens
caccgttccttttcg

SEQ ID NO: 1480737 - DNA, 15 bp, Homo sapiens
ccaccgttccttttc

SEQ ID NO: 1480738 - DNA, 15 bp, Homo sapiens
gccaccgttcctttt

SEQ ID NO: 1480739 - DNA, 15 bp, Homo sapiens
ggccaccgttccttt

SEQ ID NO: 1480740 - DNA, 15 bp, Homo sapiens
tggccaccgttcctt

SEQ ID NO: 1480741 - DNA, 15 bp, Homo sapiens
ctggccaccgttcct

SEQ ID NO: 1480742 - DNA, 15 bp, Homo sapiens
cctggccaccgttcc

SEQ ID NO: 1480743 - DNA, 15 bp, Homo sapiens
gcctggccaccgttc

SEQ ID NO: 1480744 - DNA, 15 bp, Homo sapiens
agcctggccaccgtt

SEQ ID NO: 1480745 - DNA, 15 bp, Homo sapiens
gagcctggccaccgt

SEQ ID NO: 1480746 - DNA, 15 bp, Homo sapiens
ggagcctggccaccg

SEQ ID NO: 1480747 - DNA, 15 bp, Homo sapiens
tggagcctggccacc

SEQ ID NO: 1480748 - DNA, 15 bp, Homo sapiens
ctggagcctggccac

SEQ ID NO: 1480749 - DNA, 15 bp, Homo sapiens
cctggagcctggcca

SEQ ID NO: 1480750 - DNA, 15 bp, Homo sapiens
tcctggagcctggcc

SEQ ID NO: 1480751 - DNA, 15 bp, Homo sapiens
ctcctggagcctggc

SEQ ID NO: 1480752 - DNA, 15 bp, Homo sapiens
tctcctggagcctgg

SEQ ID NO: 1480753 - DNA, 15 bp, Homo sapiens
gtctcctggagcctg

SEQ ID NO: 1480754 - DNA, 15 bp, Homo sapiens
cgtctcctggagcct

SEQ ID NO: 1480755 - DNA, 15 bp, Homo sapiens
gcgtctcctggagcc

SEQ ID NO: 1480756 - DNA, 15 bp, Homo sapiens
agcgtctcctggagc

SEQ ID NO: 1480757 - DNA, 15 bp, Homo sapiens
cagcgtctcctggag

SEQ ID NO: 1480758 - DNA, 15 bp, Homo sapiens
ccagcgtctcctgga

SEQ ID NO: 1480759 - DNA, 15 bp, Homo sapiens
tccagcgtctcctgg

SEQ ID NO: 1480760 - DNA, 15 bp, Homo sapiens
ctccagcgtctcctg

SEQ ID NO: 1480761 - DNA, 15 bp, Homo sapiens
gctccagcgtctcct

SEQ ID NO: 1480762 - DNA, 15 bp, Homo sapiens
cgctccagcgtctcc

SEQ ID NO: 1480763 - DNA, 15 bp, Homo sapiens
gcgctccagcgtctc

SEQ ID NO: 1480764 - DNA, 15 bp, Homo sapiens
ggcgctccagcgtct

SEQ ID NO: 1480765 - DNA, 15 bp, Homo sapiens
cggcgctccagcgtc

SEQ ID NO: 1480766 - DNA, 15 bp, Homo sapiens
ccggcgctccagcgt

SEQ ID NO: 1480767 - DNA, 15 bp, Homo sapiens
cccggcgctccagcg

SEQ ID NO: 1480768 - DNA, 15 bp, Homo sapiens
gcccggcgctccagc

SEQ ID NO: 1480769 - DNA, 15 bp, Homo sapiens
ggcccggcgctccag

SEQ ID NO: 1480770 - DNA, 15 bp, Homo sapiens
gggcccggcgctcca

SEQ ID NO: 1480771 - DNA, 15 bp, Homo sapiens
cgggcccggcgctcc

SEQ ID NO: 1480772 - DNA, 15 bp, Homo sapiens
acgggcccggcgctc

SEQ ID NO: 1480773 - DNA, 15 bp, Homo sapiens
gacgggcccggcgct

SEQ ID NO: 1480774 - DNA, 15 bp, Homo sapiens
cgacgggcccggcgc

SEQ ID NO: 1480775 - DNA, 15 bp, Homo sapiens
acgacgggcccggcg

SEQ ID NO: 1480776 - DNA, 15 bp, Homo sapiens
cacgacgggcccggc

SEQ ID NO: 1480777 - DNA, 15 bp, Homo sapiens
ccacgacgggcccgg

SEQ ID NO: 1480778 - DNA, 15 bp, Homo sapiens
cccacgacgggcccg

SEQ ID NO: 1480779 - DNA, 15 bp, Homo sapiens
gcccacgacgggccc

SEQ ID NO: 1480780 - DNA, 15 bp, Homo sapiens
cgcccacgacgggcc

SEQ ID NO: 1480781 - DNA, 15 bp, Homo sapiens
acgcccacgacgggc

SEQ ID NO: 1480782 - DNA, 15 bp, Homo sapiens
cacgcccacgacggg

SEQ ID NO: 1480783 - DNA, 15 bp, Homo sapiens
ccacgcccacgacgg

SEQ ID NO: 1480784 - DNA, 15 bp, Homo sapiens
accacgcccacgacg

SEQ ID NO: 1480785 - DNA, 15 bp, Homo sapiens
gaccacgcccacgac

SEQ ID NO: 1480786 - DNA, 15 bp, Homo sapiens
agaccacgcccacga

SEQ ID NO: 1480787 - DNA, 15 bp, Homo sapiens
cagaccacgcccacg

SEQ ID NO: 1480788 - DNA, 15 bp, Homo sapiens
ccagaccacgcccac

SEQ ID NO: 1480789 - DNA, 15 bp, Homo sapiens
cccagaccacgccca

SEQ ID NO: 1480790 - DNA, 15 bp, Homo sapiens
gcccagaccacgccc

SEQ ID NO: 1480791 - DNA, 15 bp, Homo sapiens
tgcccagaccacgcc

SEQ ID NO: 1480792 - DNA, 15 bp, Homo sapiens
ctgcccagaccacgc

SEQ ID NO: 1480793 - DNA, 15 bp, Homo sapiens
tctgcccagaccacg

SEQ ID NO: 1480794 - DNA, 15 bp, Homo sapiens
gtctgcccagaccac

SEQ ID NO: 1480795 - DNA, 15 bp, Homo sapiens
agtctgcccagacca

SEQ ID NO: 1480796 - DNA, 15 bp, Homo sapiens
gagtctgcccagacc

SEQ ID NO: 1480797 - DNA, 15 bp, Homo sapiens
tgagtctgcccagac

SEQ ID NO: 1480798 - DNA, 15 bp, Homo sapiens
ctgagtctgcccaga

SEQ ID NO: 1480799 - DNA, 15 bp, Homo sapiens
gctgagtctgcccag

SEQ ID NO: 1480800 - DNA, 15 bp, Homo sapiens
cgctgagtctgccca

SEQ ID NO: 1480801 - DNA, 15 bp, Homo sapiens
acgctgagtctgccc

SEQ ID NO: 1480802 - DNA, 15 bp, Homo sapiens
aacgctgagtctgcc

SEQ ID NO: 1480803 - DNA, 15 bp, Homo sapiens
caacgctgagtctgc

SEQ ID NO: 1480804 - DNA, 15 bp, Homo sapiens
gcaacgctgagtctg

SEQ ID NO: 1480805 - DNA, 15 bp, Homo sapiens
ggcaacgctgagtct

SEQ ID NO: 1480806 - DNA, 15 bp, Homo sapiens
aggcaacgctgagtc

SEQ ID NO: 1480807 - DNA, 15 bp, Homo sapiens
aaggcaacgctgagt

SEQ ID NO: 1480808 - DNA, 15 bp, Homo sapiens
aaaggcaacgctgag

SEQ ID NO: 1480809 - DNA, 15 bp, Homo sapiens
aaaaggcaacgctga

SEQ ID NO: 1480810 - DNA, 15 bp, Homo sapiens
caaaaggcaacgctg

SEQ ID NO: 1480811 - DNA, 15 bp, Homo sapiens
gcaaaaggcaacgct

SEQ ID NO: 1480812 - DNA, 15 bp, Homo sapiens
ggcaaaaggcaacgc

SEQ ID NO: 1480813 - DNA, 15 bp, Homo sapiens
aggcaaaaggcaacg

SEQ ID NO: 1480814 - DNA, 15 bp, Homo sapiens
gaggcaaaaggcaac

SEQ ID NO: 1480815 - DNA, 15 bp, Homo sapiens
agaggcaaaaggcaa

SEQ ID NO: 1480816 - DNA, 15 bp, Homo sapiens
gagaggcaaaaggca

SEQ ID NO: 1480817 - DNA, 15 bp, Homo sapiens
ggagaggcaaaaggc

SEQ ID NO: 1480818 - DNA, 15 bp, Homo sapiens
tggagaggcaaaagg

SEQ ID NO: 1480819 - DNA, 15 bp, Homo sapiens
ttggagaggcaaaag

SEQ ID NO: 1480820 - DNA, 15 bp, Homo sapiens
tttggagaggcaaaa

SEQ ID NO: 1480821 - DNA, 15 bp, Homo sapiens
ttttggagaggcaaa

SEQ ID NO: 1480822 - DNA, 15 bp, Homo sapiens
gttttggagaggcaa

SEQ ID NO: 1480823 - DNA, 15 bp, Homo sapiens
cgttttggagaggca

SEQ ID NO: 1480824 - DNA, 15 bp, Homo sapiens
gcgttttggagaggc

SEQ ID NO: 1480825 - DNA, 15 bp, Homo sapiens
tgcgttttggagagg

SEQ ID NO: 1480826 - DNA, 15 bp, Homo sapiens
ctgcgttttggagag

SEQ ID NO: 1480827 - DNA, 15 bp, Homo sapiens
gctgcgttttggaga

SEQ ID NO: 1480828 - DNA, 15 bp, Homo sapiens
tgctgcgttttggag

SEQ ID NO: 1480829 - DNA, 15 bp, Homo sapiens
atgctgcgttttgga

SEQ ID NO: 1480830 - DNA, 15 bp, Homo sapiens
gatgctgcgttttgg

SEQ ID NO: 1480831 - DNA, 15 bp, Homo sapiens
cgatgctgcgttttg

SEQ ID NO: 1480832 - DNA, 15 bp, Homo sapiens
gcgatgctgcgtttt

SEQ ID NO: 1480833 - DNA, 15 bp, Homo sapiens
cgcgatgctgcgttt

SEQ ID NO: 1480834 - DNA, 15 bp, Homo sapiens
acgcgatgctgcgtt

SEQ ID NO: 1480835 - DNA, 15 bp, Homo sapiens
gacgcgatgctgcgt

SEQ ID NO: 1480836 - DNA, 15 bp, Homo sapiens
agacgcgatgctgcg

SEQ ID NO: 1480837 - DNA, 15 bp, Homo sapiens
gagacgcgatgctgc

SEQ ID NO: 1480838 - DNA, 15 bp, Homo sapiens
cgagacgcgatgctg

SEQ ID NO: 1480839 - DNA, 15 bp, Homo sapiens
ccgagacgcgatgct

SEQ ID NO: 1480840 - DNA, 15 bp, Homo sapiens
cccgagacgcgatgc

SEQ ID NO: 1480841 - DNA, 15 bp, Homo sapiens
ccccgagacgcgatg

SEQ ID NO: 1480842 - DNA, 15 bp, Homo sapiens
cccccgagacgcgat

SEQ ID NO: 1480843 - DNA, 15 bp, Homo sapiens
tcccccgagacgcga

SEQ ID NO: 1480844 - DNA, 15 bp, Homo sapiens
ctcccccgagacgcg

SEQ ID NO: 1480845 - DNA, 15 bp, Homo sapiens
cctcccccgagacgc

SEQ ID NO: 1480846 - DNA, 15 bp, Homo sapiens
tcctcccccgagacg

SEQ ID NO: 1480847 - DNA, 15 bp, Homo sapiens
ctcctcccccgagac

SEQ ID NO: 1480848 - DNA, 15 bp, Homo sapiens
actcctcccccgaga

SEQ ID NO: 1480849 - DNA, 15 bp, Homo sapiens
gactcctcccccgag

SEQ ID NO: 1480850 - DNA, 15 bp, Homo sapiens
agactcctcccccga

SEQ ID NO: 1480851 - DNA, 15 bp, Homo sapiens
cagactcctcccccg

SEQ ID NO: 1480852 - DNA, 15 bp, Homo sapiens
acagactcctccccc

SEQ ID NO: 1480853 - DNA, 15 bp, Homo sapiens
tacagactcctcccc

SEQ ID NO: 1480854 - DNA, 15 bp, Homo sapiens
gtacagactcctccc

SEQ ID NO: 1480855 - DNA, 15 bp, Homo sapiens
ggtacagactcctcc

SEQ ID NO: 1480856 - DNA, 15 bp, Homo sapiens
gggtacagactcctc

SEQ ID NO: 1480857 - DNA, 15 bp, Homo sapiens
agggtacagactcct

SEQ ID NO: 1480858 - DNA, 15 bp, Homo sapiens
gagggtacagactcc

SEQ ID NO: 1480859 - DNA, 15 bp, Homo sapiens
cgagggtacagactc

SEQ ID NO: 1480860 - DNA, 15 bp, Homo sapiens
acgagggtacagact

SEQ ID NO: 1480861 - DNA, 15 bp, Homo sapiens
cacgagggtacagac

SEQ ID NO: 1480862 - DNA, 15 bp, Homo sapiens
tcacgagggtacaga

SEQ ID NO: 1480863 - DNA, 15 bp, Homo sapiens
atcacgagggtacag

SEQ ID NO: 1480864 - DNA, 15 bp, Homo sapiens
catcacgagggtaca

SEQ ID NO: 1480865 - DNA, 15 bp, Homo sapiens
acatcacgagggtac

SEQ ID NO: 1480866 - DNA, 15 bp, Homo sapiens
gacatcacgagggta

SEQ ID NO: 1480867 - DNA, 15 bp, Homo sapiens
ggacatcacgagggt

SEQ ID NO: 1480868 - DNA, 15 bp, Homo sapiens
gggacatcacgaggg

SEQ ID NO: 1480869 - DNA, 15 bp, Homo sapiens
ggggacatcacgagg

SEQ ID NO: 1480870 - DNA, 15 bp, Homo sapiens
cggggacatcacgag

SEQ ID NO: 1480871 - DNA, 15 bp, Homo sapiens
gcggggacatcacga

SEQ ID NO: 1480872 - DNA, 15 bp, Homo sapiens
ggcggggacatcacg

SEQ ID NO: 1480873 - DNA, 15 bp, Homo sapiens
gggcggggacatcac

SEQ ID NO: 1480874 - DNA, 15 bp, Homo sapiens
ggggcggggacatca

SEQ ID NO: 1480875 - DNA, 15 bp, Homo sapiens
cggggcggggacatc

SEQ ID NO: 1480876 - DNA, 15 bp, Homo sapiens
ccggggcggggacat

SEQ ID NO: 1480877 - DNA, 15 bp, Homo sapiens
accggggcggggaca

SEQ ID NO: 1480878 - DNA, 15 bp, Homo sapiens
aaccggggcggggac

SEQ ID NO: 1480879 - DNA, 15 bp, Homo sapiens
gaaccggggcgggga

SEQ ID NO: 1480880 - DNA, 15 bp, Homo sapiens
ggaaccggggcgggg

SEQ ID NO: 1480881 - DNA, 15 bp, Homo sapiens
gggaaccggggcggg

SEQ ID NO: 1480882 - DNA, 15 bp, Homo sapiens
tgggaaccggggcgg

SEQ ID NO: 1480883 - DNA, 15 bp, Homo sapiens
ctgggaaccggggcg

SEQ ID NO: 1480884 - DNA, 15 bp, Homo sapiens
cctgggaaccggggc

SEQ ID NO: 1480885 - DNA, 15 bp, Homo sapiens
gcctgggaaccgggg

SEQ ID NO: 1480886 - DNA, 15 bp, Homo sapiens
tgcctgggaaccggg

SEQ ID NO: 1480887 - DNA, 15 bp, Homo sapiens
ttgcctgggaaccgg

SEQ ID NO: 1480888 - DNA, 15 bp, Homo sapiens
cttgcctgggaaccg

SEQ ID NO: 1480889 - DNA, 15 bp, Homo sapiens
acttgcctgggaacc

SEQ ID NO: 1480890 - DNA, 15 bp, Homo sapiens
aacttgcctgggaac

SEQ ID NO: 1480891 - DNA, 15 bp, Homo sapiens
aaacttgcctgggaa

SEQ ID NO: 1480892 - DNA, 15 bp, Homo sapiens
taaacttgcctggga

SEQ ID NO: 1480893 - DNA, 15 bp, Homo sapiens
ctaaacttgcctggg

SEQ ID NO: 1480894 - DNA, 15 bp, Homo sapiens
cctaaacttgcctgg

SEQ ID NO: 1480895 - DNA, 15 bp, Homo sapiens
ccctaaacttgcctg

SEQ ID NO: 1480896 - DNA, 15 bp, Homo sapiens
tccctaaacttgcct

SEQ ID NO: 1480897 - DNA, 15 bp, Homo sapiens
ttccctaaacttgcc

SEQ ID NO: 1480898 - DNA, 15 bp, Homo sapiens
cttccctaaacttgc

SEQ ID NO: 1480899 - DNA, 15 bp, Homo sapiens
acttccctaaacttg

SEQ ID NO: 1480900 - DNA, 15 bp, Homo sapiens
cacttccctaaactt

SEQ ID NO: 1480901 - DNA, 15 bp, Homo sapiens
tcacttccctaaact

SEQ ID NO: 1480902 - DNA, 15 bp, Homo sapiens
ttcacttccctaaac

SEQ ID NO: 1480903 - DNA, 15 bp, Homo sapiens
tttcacttccctaaa

SEQ ID NO: 1480904 - DNA, 15 bp, Homo sapiens
ctttcacttccctaa

SEQ ID NO: 1480905 - DNA, 15 bp, Homo sapiens
cctttcacttcccta

SEQ ID NO: 1480906 - DNA, 15 bp, Homo sapiens
gcctttcacttccct

SEQ ID NO: 1480907 - DNA, 15 bp, Homo sapiens
cgcctttcacttccc

SEQ ID NO: 1480908 - DNA, 15 bp, Homo sapiens
gcgcctttcacttcc

SEQ ID NO: 1480909 - DNA, 15 bp, Homo sapiens
ggcgcctttcacttc

SEQ ID NO: 1480910 - DNA, 15 bp, Homo sapiens
tggcgcctttcactt

SEQ ID NO: 1480911 - DNA, 15 bp, Homo sapiens
ctggcgcctttcact

SEQ ID NO: 1480912 - DNA, 15 bp, Homo sapiens
cctggcgcctttcac

SEQ ID NO: 1480913 - DNA, 15 bp, Homo sapiens
acctggcgcctttca

SEQ ID NO: 1480914 - DNA, 15 bp, Homo sapiens
cacctggcgcctttc

SEQ ID NO: 1480915 - DNA, 15 bp, Homo sapiens
gcacctggcgccttt

SEQ ID NO: 1480916 - DNA, 15 bp, Homo sapiens
ggcacctggcgcctt

SEQ ID NO: 1480917 - DNA, 15 bp, Homo sapiens
tggcacctggcgcct

SEQ ID NO: 1480918 - DNA, 15 bp, Homo sapiens
ctggcacctggcgcc

SEQ ID NO: 1480919 - DNA, 15 bp, Homo sapiens
actggcacctggcgc

SEQ ID NO: 1480920 - DNA, 15 bp, Homo sapiens
gactggcacctggcg

SEQ ID NO: 1480921 - DNA, 15 bp, Homo sapiens
ggactggcacctggc

SEQ ID NO: 1480922 - DNA, 15 bp, Homo sapiens
aggactggcacctgg

SEQ ID NO: 1480923 - DNA, 15 bp, Homo sapiens
caggactggcacctg

SEQ ID NO: 1480924 - DNA, 15 bp, Homo sapiens
ccaggactggcacct

SEQ ID NO: 1480925 - DNA, 15 bp, Homo sapiens
gccaggactggcacc

SEQ ID NO: 1480926 - DNA, 15 bp, Homo sapiens
ggccaggactggcac

SEQ ID NO: 1480927 - DNA, 15 bp, Homo sapiens
aggccaggactggca

SEQ ID NO: 1480928 - DNA, 15 bp, Homo sapiens
gaggccaggactggc

SEQ ID NO: 1480929 - DNA, 15 bp, Homo sapiens
agaggccaggactgg

SEQ ID NO: 1480930 - DNA, 15 bp, Homo sapiens
cagaggccaggactg

SEQ ID NO: 1480931 - DNA, 15 bp, Homo sapiens
tcagaggccaggact

SEQ ID NO: 1480932 - DNA, 15 bp, Homo sapiens
atcagaggccaggac

SEQ ID NO: 1480933 - DNA, 15 bp, Homo sapiens
catcagaggccagga

SEQ ID NO: 1480934 - DNA, 15 bp, Homo sapiens
acatcagaggccagg

SEQ ID NO: 1480935 - DNA, 15 bp, Homo sapiens
tacatcagaggccag

SEQ ID NO: 1480936 - DNA, 15 bp, Homo sapiens
ttacatcagaggcca

SEQ ID NO: 1480937 - DNA, 15 bp, Homo sapiens
gttacatcagaggcc

SEQ ID NO: 1480938 - DNA, 15 bp, Homo sapiens
ggttacatcagaggc

SEQ ID NO: 1480939 - DNA, 15 bp, Homo sapiens
gggttacatcagagg

SEQ ID NO: 1480940 - DNA, 15 bp, Homo sapiens
tgggttacatcagag

SEQ ID NO: 1480941 - DNA, 15 bp, Homo sapiens
ctgggttacatcaga

SEQ ID NO: 1480942 - DNA, 15 bp, Homo sapiens
gctgggttacatcag

SEQ ID NO: 1480943 - DNA, 15 bp, Homo sapiens
cgctgggttacatca

SEQ ID NO: 1480944 - DNA, 15 bp, Homo sapiens
gcgctgggttacatc

SEQ ID NO: 1480945 - DNA, 15 bp, Homo sapiens
ggcgctgggttacat

SEQ ID NO: 1480946 - DNA, 15 bp, Homo sapiens
gggcgctgggttaca

SEQ ID NO: 1480947 - DNA, 15 bp, Homo sapiens
ggggcgctgggttac

SEQ ID NO: 1480948 - DNA, 15 bp, Homo sapiens
cggggcgctgggtta

SEQ ID NO: 1480949 - DNA, 15 bp, Homo sapiens
gcggggcgctgggtt

SEQ ID NO: 1480950 - DNA, 15 bp, Homo sapiens
tgcggggcgctgggt

SEQ ID NO: 1480951 - DNA, 15 bp, Homo sapiens
ctgcggggcgctggg

SEQ ID NO: 1480952 - DNA, 15 bp, Homo sapiens
actgcggggcgctgg

SEQ ID NO: 1480953 - DNA, 15 bp, Homo sapiens
gactgcggggcgctg

SEQ ID NO: 1480954 - DNA, 15 bp, Homo sapiens
ggactgcggggcgct

SEQ ID NO: 1480955 - DNA, 15 bp, Homo sapiens
gggactgcggggcgc

SEQ ID NO: 1480956 - DNA, 15 bp, Homo sapiens
cgggactgcggggcg

SEQ ID NO: 1480957 - DNA, 15 bp, Homo sapiens
tcgggactgcggggc

SEQ ID NO: 1480958 - DNA, 15 bp, Homo sapiens
gtcgggactgcgggg

SEQ ID NO: 1480959 - DNA, 15 bp, Homo sapiens
tgtcgggactgcggg

SEQ ID NO: 1480960 - DNA, 15 bp, Homo sapiens
gtgtcgggactgcgg

SEQ ID NO: 1480961 - DNA, 15 bp, Homo sapiens
tgtgtcgggactgcg

SEQ ID NO: 1480962 - DNA, 15 bp, Homo sapiens
ctgtgtcgggactgc

SEQ ID NO: 1480963 - DNA, 15 bp, Homo sapiens
tctgtgtcgggactg

SEQ ID NO: 1480964 - DNA, 15 bp, Homo sapiens
atctgtgtcgggact

SEQ ID NO: 1480965 - DNA, 15 bp, Homo sapiens
aatctgtgtcgggac

SEQ ID NO: 1480966 - DNA, 15 bp, Homo sapiens
gaatctgtgtcggga

SEQ ID NO: 1480967 - DNA, 15 bp, Homo sapiens
ggaatctgtgtcggg

SEQ ID NO: 1480968 - DNA, 15 bp, Homo sapiens
aggaatctgtgtcgg

SEQ ID NO: 1480969 - DNA, 15 bp, Homo sapiens
caggaatctgtgtcg

SEQ ID NO: 1480970 - DNA, 15 bp, Homo sapiens
ccaggaatctgtgtc

SEQ ID NO: 1480971 - DNA, 15 bp, Homo sapiens
tccaggaatctgtgt

SEQ ID NO: 1480972 - DNA, 15 bp, Homo sapiens
atccaggaatctgtg

SEQ ID NO: 1480973 - DNA, 15 bp, Homo sapiens
gatccaggaatctgt

SEQ ID NO: 1480974 - DNA, 15 bp, Homo sapiens
agatccaggaatctg

SEQ ID NO: 1480975 - DNA, 15 bp, Homo sapiens
gagatccaggaatct

SEQ ID NO: 1480976 - DNA, 15 bp, Homo sapiens
tgagatccaggaatc

SEQ ID NO: 1480977 - DNA, 15 bp, Homo sapiens
ctgagatccaggaat

SEQ ID NO: 1480978 - DNA, 15 bp, Homo sapiens
gctgagatccaggaa

SEQ ID NO: 1480979 - DNA, 15 bp, Homo sapiens
ggctgagatccagga

SEQ ID NO: 1480980 - DNA, 15 bp, Homo sapiens
gggctgagatccagg

SEQ ID NO: 1480981 - DNA, 15 bp, Homo sapiens
ggggctgagatccag

SEQ ID NO: 1480982 - DNA, 15 bp, Homo sapiens
tggggctgagatcca

SEQ ID NO: 1480983 - DNA, 15 bp, Homo sapiens
atggggctgagatcc

SEQ ID NO: 1480984 - DNA, 15 bp, Homo sapiens
tatggggctgagatc

SEQ ID NO: 1480985 - DNA, 15 bp, Homo sapiens
ctatggggctgagat

SEQ ID NO: 1480986 - DNA, 15 bp, Homo sapiens
gctatggggctgaga

SEQ ID NO: 1480987 - DNA, 15 bp, Homo sapiens
tgctatggggctgag

SEQ ID NO: 1480988 - DNA, 15 bp, Homo sapiens
ctgctatggggctga

SEQ ID NO: 1480989 - DNA, 15 bp, Homo sapiens
gctgctatggggctg

SEQ ID NO: 1480990 - DNA, 15 bp, Homo sapiens
agctgctatggggct

SEQ ID NO: 1480991 - DNA, 15 bp, Homo sapiens
tagctgctatggggc

SEQ ID NO: 1480992 - DNA, 15 bp, Homo sapiens
atagctgctatgggg

SEQ ID NO: 1480993 - DNA, 15 bp, Homo sapiens
catagctgctatggg

SEQ ID NO: 1480994 - DNA, 15 bp, Homo sapiens
tcatagctgctatgg

SEQ ID NO: 1480995 - DNA, 15 bp, Homo sapiens
atcatagctgctatg

SEQ ID NO: 1480996 - DNA, 15 bp, Homo sapiens
gatcatagctgctat

SEQ ID NO: 1480997 - DNA, 15 bp, Homo sapiens
ggatcatagctgcta

SEQ ID NO: 1480998 - DNA, 15 bp, Homo sapiens
gggatcatagctgct

SEQ ID NO: 1480999 - DNA, 15 bp, Homo sapiens
cgggatcatagctgc

SEQ ID NO: 1481000 - DNA, 15 bp, Homo sapiens
gcgggatcatagctg

SEQ ID NO: 1481001 - DNA, 15 bp, Homo sapiens
agcgggatcatagct

SEQ ID NO: 1481002 - DNA, 15 bp, Homo sapiens
cagcgggatcatagc

SEQ ID NO: 1481003 - DNA, 15 bp, Homo sapiens
gcagcgggatcatag

SEQ ID NO: 1481004 - DNA, 15 bp, Homo sapiens
agcagcgggatcata

SEQ ID NO: 1481005 - DNA, 15 bp, Homo sapiens
cagcagcgggatcat

SEQ ID NO: 1481006 - DNA, 15 bp, Homo sapiens
gcagcagcgggatca

SEQ ID NO: 1481007 - DNA, 15 bp, Homo sapiens
agcagcagcgggatc

SEQ ID NO: 1481008 - DNA, 15 bp, Homo sapiens
cagcagcagcgggat

SEQ ID NO: 1481009 - DNA, 15 bp, Homo sapiens
ccagcagcagcggga

SEQ ID NO: 1481010 - DNA, 15 bp, Homo sapiens
gccagcagcagcggg

SEQ ID NO: 1481011 - DNA, 15 bp, Homo sapiens
tgccagcagcagcgg

SEQ ID NO: 1481012 - DNA, 15 bp, Homo sapiens
ctgccagcagcagcg

SEQ ID NO: 1481013 - DNA, 15 bp, Homo sapiens
gctgccagcagcagc

SEQ ID NO: 1481014 - DNA, 15 bp, Homo sapiens
cgctgccagcagcag

SEQ ID NO: 1481015 - DNA, 15 bp, Homo sapiens
gcgctgccagcagca

SEQ ID NO: 1481016 - DNA, 15 bp, Homo sapiens
agcgctgccagcagc

SEQ ID NO: 1481017 - DNA, 15 bp, Homo sapiens
cagcgctgccagcag

SEQ ID NO: 1481018 - DNA, 15 bp, Homo sapiens
gcagcgctgccagca

SEQ ID NO: 1481019 - DNA, 15 bp, Homo sapiens
agcagcgctgccagc

SEQ ID NO: 1481020 - DNA, 15 bp, Homo sapiens
cagcagcgctgccag

SEQ ID NO: 1481021 - DNA, 15 bp, Homo sapiens
acagcagcgctgcca

SEQ ID NO: 1481022 - DNA, 15 bp, Homo sapiens
cacagcagcgctgcc

SEQ ID NO: 1481023 - DNA, 15 bp, Homo sapiens
gcacagcagcgctgc

SEQ ID NO: 1481024 - DNA, 15 bp, Homo sapiens
cgcacagcagcgctg

SEQ ID NO: 1481025 - DNA, 15 bp, Homo sapiens
acgcacagcagcgct

SEQ ID NO: 1481026 - DNA, 15 bp, Homo sapiens
gacgcacagcagcgc

SEQ ID NO: 1481027 - DNA, 15 bp, Homo sapiens
ggacgcacagcagcg

SEQ ID NO: 1481028 - DNA, 15 bp, Homo sapiens
gggacgcacagcagc

SEQ ID NO: 1481029 - DNA, 15 bp, Homo sapiens
ggggacgcacagcag

SEQ ID NO: 1481030 - DNA, 15 bp, Homo sapiens
cggggacgcacagca

SEQ ID NO: 1481031 - DNA, 15 bp, Homo sapiens
gcggggacgcacagc

SEQ ID NO: 1481032 - DNA, 15 bp, Homo sapiens
ggcggggacgcacag

SEQ ID NO: 1481033 - DNA, 15 bp, Homo sapiens
cggcggggacgcaca

SEQ ID NO: 1481034 - DNA, 15 bp, Homo sapiens
ccggcggggacgcac

SEQ ID NO: 1481035 - DNA, 15 bp, Homo sapiens
cccggcggggacgca

SEQ ID NO: 1481036 - DNA, 15 bp, Homo sapiens
ccccggcggggacgc

SEQ ID NO: 1481037 - DNA, 15 bp, Homo sapiens
gccccggcggggacg

SEQ ID NO: 1481038 - DNA, 15 bp, Homo sapiens
ggccccggcggggac

SEQ ID NO: 1481039 - DNA, 15 bp, Homo sapiens
gggccccggcgggga

SEQ ID NO: 1481040 - DNA, 15 bp, Homo sapiens
cagggccccggcggg

SEQ ID NO: 1481041 - DNA, 15 bp, Homo sapiens
tcagggccccggcgg

SEQ ID NO: 1481042 - DNA, 15 bp, Homo sapiens
gtcagggccccggcg

SEQ ID NO: 1481043 - DNA, 15 bp, Homo sapiens
ggtcagggccccggc

SEQ ID NO: 1481044 - DNA, 15 bp, Homo sapiens
aggtcagggccccgg

SEQ ID NO: 1481045 - DNA, 15 bp, Homo sapiens
caggtcagggccccg

SEQ ID NO: 1481046 - DNA, 15 bp, Homo sapiens
gcaggtcagggcccc

SEQ ID NO: 1481047 - DNA, 15 bp, Homo sapiens
agcaggtcagggccc

SEQ ID NO: 1481048 - DNA, 15 bp, Homo sapiens
tagcaggtcagggcc

SEQ ID NO: 1481049 - DNA, 15 bp, Homo sapiens
gtagcaggtcagggc

SEQ ID NO: 1481050 - DNA, 15 bp, Homo sapiens
cgtagcaggtcaggg

SEQ ID NO: 1481051 - DNA, 15 bp, Homo sapiens
ccgtagcaggtcagg

SEQ ID NO: 1481052 - DNA, 15 bp, Homo sapiens
cccgtagcaggtcag

SEQ ID NO: 1481053 - DNA, 15 bp, Homo sapiens
ccccgtagcaggtca

SEQ ID NO: 1481054 - DNA, 15 bp, Homo sapiens
tccccgtagcaggtc

SEQ ID NO: 1481055 - DNA, 15 bp, Homo sapiens
gtccccgtagcaggt

SEQ ID NO: 1481056 - DNA, 15 bp, Homo sapiens
agtccccgtagcagg

SEQ ID NO: 1481057 - DNA, 15 bp, Homo sapiens
gagtccccgtagcag

SEQ ID NO: 1481058 - DNA, 15 bp, Homo sapiens
ggagtccccgtagca

SEQ ID NO: 1481059 - DNA, 15 bp, Homo sapiens
cggagtccccgtagc

SEQ ID NO: 1481060 - DNA, 15 bp, Homo sapiens
ccggagtccccgtag

SEQ ID NO: 1481061 - DNA, 15 bp, Homo sapiens
cccggagtccccgta

SEQ ID NO: 1481062 - DNA, 15 bp, Homo sapiens
gcccggagtccccgt

SEQ ID NO: 1481063 - DNA, 15 bp, Homo sapiens
ctgcccggagtcccc

SEQ ID NO: 1481064 - DNA, 15 bp, Homo sapiens
gctgcccggagtccc

SEQ ID NO: 1481065 - DNA, 15 bp, Homo sapiens
ggctgcccggagtcc

SEQ ID NO: 1481066 - DNA, 15 bp, Homo sapiens
aggctgcccggagtc

SEQ ID NO: 1481067 - DNA, 15 bp, Homo sapiens
caggctgcccggagt

SEQ ID NO: 1481068 - DNA, 15 bp, Homo sapiens
acaggctgcccggag

SEQ ID NO: 1481069 - DNA, 15 bp, Homo sapiens
tacaggctgcccgga

SEQ ID NO: 1481070 - DNA, 15 bp, Homo sapiens
ctacaggctgcccgg

SEQ ID NO: 1481071 - DNA, 15 bp, Homo sapiens
tctacaggctgcccg

SEQ ID NO: 1481072 - DNA, 15 bp, Homo sapiens
gtctacaggctgccc

SEQ ID NO: 1481073 - DNA, 15 bp, Homo sapiens
agtctacaggctgcc

SEQ ID NO: 1481074 - DNA, 15 bp, Homo sapiens
cagtctacaggctgc

SEQ ID NO: 1481075 - DNA, 15 bp, Homo sapiens
ccagtctacaggctg

SEQ ID NO: 1481076 - DNA, 15 bp, Homo sapiens
accagtctacaggct

SEQ ID NO: 1481077 - DNA, 15 bp, Homo sapiens
caccagtctacaggc

SEQ ID NO: 1481078 - DNA, 15 bp, Homo sapiens
tcaccagtctacagg

SEQ ID NO: 1481079 - DNA, 15 bp, Homo sapiens
ctcaccagtctacag

SEQ ID NO: 1481080 - DNA, 15 bp, Homo sapiens
actcaccagtctaca

SEQ ID NO: 1481081 - DNA, 15 bp, Homo sapiens
cactcaccagtctac

SEQ ID NO: 1481082 - DNA, 15 bp, Homo sapiens
gcactcaccagtcta

SEQ ID NO: 1481083 - DNA, 15 bp, Homo sapiens
cgcactcaccagtct

SEQ ID NO: 1481084 - DNA, 15 bp, Homo sapiens
gcgcactcaccagtc

SEQ ID NO: 1481085 - DNA, 15 bp, Homo sapiens
tgcgcactcaccagt

SEQ ID NO: 1481086 - DNA, 15 bp, Homo sapiens
ctgcgcactcaccag

SEQ ID NO: 1481087 - DNA, 15 bp, Homo sapiens
gctgcgcactcacca

SEQ ID NO: 1481088 - DNA, 15 bp, Homo sapiens
cgctgcgcactcacc

SEQ ID NO: 1481089 - DNA, 15 bp, Homo sapiens
ccgctgcgcactcac

SEQ ID NO: 1481090 - DNA, 15 bp, Homo sapiens
cccgctgcgcactca

SEQ ID NO: 1481091 - DNA, 15 bp, Homo sapiens
ccccgctgcgcactc

SEQ ID NO: 1481092 - DNA, 15 bp, Homo sapiens
cccccgctgcgcact

SEQ ID NO: 1481093 - DNA, 15 bp, Homo sapiens
ccccccgctgcgcac

SEQ ID NO: 1481094 - DNA, 15 bp, Homo sapiens
gccccccgctgcgca

SEQ ID NO: 1481095 - DNA, 15 bp, Homo sapiens
ggccccccgctgcgc

SEQ ID NO: 1481096 - DNA, 15 bp, Homo sapiens
aggccccccgctgcg

SEQ ID NO: 1481097 - DNA, 15 bp, Homo sapiens
taggccccccgctgc

SEQ ID NO: 1481098 - DNA, 15 bp, Homo sapiens
gtaggccccccgctg

SEQ ID NO: 1481099 - DNA, 15 bp, Homo sapiens
ggtaggccccccgct

SEQ ID NO: 1481100 - DNA, 15 bp, Homo sapiens
tggtaggccccccgc

SEQ ID NO: 1481101 - DNA, 15 bp, Homo sapiens
atggtaggccccccg

SEQ ID NO: 1481102 - DNA, 15 bp, Homo sapiens
gatggtaggcccccc

SEQ ID NO: 1481103 - DNA, 15 bp, Homo sapiens
cgatggtaggccccc

SEQ ID NO: 1481104 - DNA, 15 bp, Homo sapiens
gcgatggtaggcccc

SEQ ID NO: 1481105 - DNA, 15 bp, Homo sapiens
ggcgatggtaggccc

SEQ ID NO: 1481106 - DNA, 15 bp, Homo sapiens
gggcgatggtaggcc

SEQ ID NO: 1481107 - DNA, 15 bp, Homo sapiens
ggggcgatggtaggc

SEQ ID NO: 1481108 - DNA, 15 bp, Homo sapiens
cggggcgatggtagg

SEQ ID NO: 1481109 - DNA, 15 bp, Homo sapiens
ccggggcgatggtag

SEQ ID NO: 1481110 - DNA, 15 bp, Homo sapiens
cccggggcgatggta

SEQ ID NO: 1481111 - DNA, 15 bp, Homo sapiens
ccccggggcgatggt

SEQ ID NO: 1481112 - DNA, 15 bp, Homo sapiens
accccggggcgatgg

SEQ ID NO: 1481113 - DNA, 15 bp, Homo sapiens
gaccccggggcgatg

SEQ ID NO: 1481114 - DNA, 15 bp, Homo sapiens
ggaccccggggcgat

SEQ ID NO: 1481115 - DNA, 15 bp, Homo sapiens
cggaccccggggcga

SEQ ID NO: 1481116 - DNA, 15 bp, Homo sapiens
ccggaccccggggcg

SEQ ID NO: 1481117 - DNA, 15 bp, Homo sapiens
gccggaccccggggc

SEQ ID NO: 1481118 - DNA, 15 bp, Homo sapiens
agccggaccccgggg

SEQ ID NO: 1481119 - DNA, 15 bp, Homo sapiens
cagccggaccccggg

SEQ ID NO: 1481120 - DNA, 15 bp, Homo sapiens
gcagccggaccccgg

SEQ ID NO: 1481121 - DNA, 15 bp, Homo sapiens
cgcagccggaccccg

SEQ ID NO: 1481122 - DNA, 15 bp, Homo sapiens
ccgcagccggacccc

SEQ ID NO: 1481123 - DNA, 15 bp, Homo sapiens
accgcagccggaccc

SEQ ID NO: 1481124 - DNA, 15 bp, Homo sapiens
gaccgcagccggacc

SEQ ID NO: 1481125 - DNA, 15 bp, Homo sapiens
tgaccgcagccggac

SEQ ID NO: 1481126 - DNA, 15 bp, Homo sapiens
gtgaccgcagccgga

SEQ ID NO: 1481127 - DNA, 15 bp, Homo sapiens
agtgaccgcagccgg

SEQ ID NO: 1481128 - DNA, 15 bp, Homo sapiens
gagtgaccgcagccg

SEQ ID NO: 1481129 - DNA, 15 bp, Homo sapiens
tgagtgaccgcagcc

SEQ ID NO: 1481130 - DNA, 15 bp, Homo sapiens
ttgagtgaccgcagc

SEQ ID NO: 1481131 - DNA, 15 bp, Homo sapiens
gttgagtgaccgcag

SEQ ID NO: 1481132 - DNA, 15 bp, Homo sapiens
ggttgagtgaccgca

SEQ ID NO: 1481133 - DNA, 15 bp, Homo sapiens
cggttgagtgaccgc

SEQ ID NO: 1481134 - DNA, 15 bp, Homo sapiens
ccggttgagtgaccg

SEQ ID NO: 1481135 - DNA, 15 bp, Homo sapiens
cccggttgagtgacc

SEQ ID NO: 1481136 - DNA, 15 bp, Homo sapiens
tcccggttgagtgac

SEQ ID NO: 1481137 - DNA, 15 bp, Homo sapiens
atcccggttgagtga

SEQ ID NO: 1481138 - DNA, 15 bp, Homo sapiens
catcccggttgagtg

SEQ ID NO: 1481139 - DNA, 15 bp, Homo sapiens
ccatcccggttgagt

SEQ ID NO: 1481140 - DNA, 15 bp, Homo sapiens
gccatcccggttgag

SEQ ID NO: 1481141 - DNA, 15 bp, Homo sapiens
agccatcccggttga

SEQ ID NO: 1481142 - DNA, 15 bp, Homo sapiens
tagccatcccggttg

SEQ ID NO: 1481143 - DNA, 15 bp, Homo sapiens
gtagccatcccggtt

SEQ ID NO: 1481144 - DNA, 15 bp, Homo sapiens
ggtagccatcccggt

SEQ ID NO: 1481145 - DNA, 15 bp, Homo sapiens
aggtagccatcccgg

SEQ ID NO: 1481146 - DNA, 15 bp, Homo sapiens
gaggtagccatcccg

SEQ ID NO: 1481147 - DNA, 15 bp, Homo sapiens
ggaggtagccatccc

SEQ ID NO: 1481148 - DNA, 15 bp, Homo sapiens
aggaggtagccatcc

SEQ ID NO: 1481149 - DNA, 15 bp, Homo sapiens
gaggaggtagccatc

SEQ ID NO: 1481150 - DNA, 15 bp, Homo sapiens
cgaggaggtagccat

SEQ ID NO: 1481151 - DNA, 15 bp, Homo sapiens
ccgaggaggtagcca

SEQ ID NO: 1481152 - DNA, 15 bp, Homo sapiens
cccgaggaggtagcc

SEQ ID NO: 1481153 - DNA, 15 bp, Homo sapiens
ccccgaggaggtagc

SEQ ID NO: 1481154 - DNA, 15 bp, Homo sapiens
tccccgaggaggtag

SEQ ID NO: 1481155 - DNA, 15 bp, Homo sapiens
ttccccgaggaggta

SEQ ID NO: 1481156 - DNA, 15 bp, Homo sapiens
gttccccgaggaggt

SEQ ID NO: 1481157 - DNA, 15 bp, Homo sapiens
ggttccccgaggagg

SEQ ID NO: 1481158 - DNA, 15 bp, Homo sapiens
gggttccccgaggag

SEQ ID NO: 1481159 - DNA, 15 bp, Homo sapiens
agggttccccgagga

SEQ ID NO: 1481160 - DNA, 15 bp, Homo sapiens
cagggttccccgagg

SEQ ID NO: 1481161 - DNA, 15 bp, Homo sapiens
ccagggttccccgag

SEQ ID NO: 1481162 - DNA, 15 bp, Homo sapiens
cccagggttccccga

SEQ ID NO: 1481163 - DNA, 15 bp, Homo sapiens
ccccagggttccccg

SEQ ID NO: 1481164 - DNA, 15 bp, Homo sapiens
accccagggttcccc

SEQ ID NO: 1481165 - DNA, 15 bp, Homo sapiens
caccccagggttccc

SEQ ID NO: 1481166 - DNA, 15 bp, Homo sapiens
gcaccccagggttcc

SEQ ID NO: 1481167 - DNA, 15 bp, Homo sapiens
ggcaccccagggttc

SEQ ID NO: 1481168 - DNA, 15 bp, Homo sapiens
aggcaccccagggtt

SEQ ID NO: 1481169 - DNA, 15 bp, Homo sapiens
aaggcaccccagggt

SEQ ID NO: 1481170 - DNA, 15 bp, Homo sapiens
gaaggcaccccaggg

SEQ ID NO: 1481171 - DNA, 15 bp, Homo sapiens
agaaggcaccccagg

SEQ ID NO: 1481172 - DNA, 15 bp, Homo sapiens
gagaaggcaccccag

SEQ ID NO: 1481173 - DNA, 15 bp, Homo sapiens
agagaaggcacccca

SEQ ID NO: 1481174 - DNA, 15 bp, Homo sapiens
aagagaaggcacccc

SEQ ID NO: 1481175 - DNA, 15 bp, Homo sapiens
gaagagaaggcaccc

SEQ ID NO: 1481176 - DNA, 15 bp, Homo sapiens
ggaagagaaggcacc

SEQ ID NO: 1481177 - DNA, 15 bp, Homo sapiens
gggaagagaaggcac

SEQ ID NO: 1481178 - DNA, 15 bp, Homo sapiens
agggaagagaaggca

SEQ ID NO: 1481179 - DNA, 15 bp, Homo sapiens
gagggaagagaaggc

SEQ ID NO: 1481180 - DNA, 15 bp, Homo sapiens
agagggaagagaagg

SEQ ID NO: 1481181 - DNA, 15 bp, Homo sapiens
gagagggaagagaag

SEQ ID NO: 1481182 - DNA, 15 bp, Homo sapiens
agagagggaagagaa

SEQ ID NO: 1481183 - DNA, 15 bp, Homo sapiens
gagagagggaagaga

SEQ ID NO: 1481184 - DNA, 15 bp, Homo sapiens
ggagagagggaagag

SEQ ID NO: 1481185 - DNA, 15 bp, Homo sapiens
aggagagagggaaga

SEQ ID NO: 1481186 - DNA, 15 bp, Homo sapiens
taggagagagggaag

SEQ ID NO: 1481187 - DNA, 15 bp, Homo sapiens
ataggagagagggaa

SEQ ID NO: 1481188 - DNA, 15 bp, Homo sapiens
aataggagagaggga

SEQ ID NO: 1481189 - DNA, 15 bp, Homo sapiens
aaataggagagaggg

SEQ ID NO: 1481190 - DNA, 15 bp, Homo sapiens
gaaataggagagagg

SEQ ID NO: 1481191 - DNA, 15 bp, Homo sapiens
agaaataggagagag

SEQ ID NO: 1481192 - DNA, 15 bp, Homo sapiens
cagaaataggagaga

SEQ ID NO: 1481193 - DNA, 15 bp, Homo sapiens
acagaaataggagag

SEQ ID NO: 1481194 - DNA, 15 bp, Homo sapiens
cacagaaataggaga

SEQ ID NO: 1481195 - DNA, 15 bp, Homo sapiens
gcacagaaataggag

SEQ ID NO: 1481196 - DNA, 15 bp, Homo sapiens
tgcacagaaatagga

SEQ ID NO: 1481197 - DNA, 15 bp, Homo sapiens
atgcacagaaatagg

SEQ ID NO: 1481198 - DNA, 15 bp, Homo sapiens
aatgcacagaaatag

SEQ ID NO: 1481199 - DNA, 15 bp, Homo sapiens
gaatgcacagaaata

SEQ ID NO: 1481200 - DNA, 15 bp, Homo sapiens
agaatgcacagaaat

SEQ ID NO: 1481201 - DNA, 15 bp, Homo sapiens
gagaatgcacagaaa

SEQ ID NO: 1481202 - DNA, 15 bp, Homo sapiens
ggagaatgcacagaa

SEQ ID NO: 1481203 - DNA, 15 bp, Homo sapiens
cggagaatgcacaga

SEQ ID NO: 1481204 - DNA, 15 bp, Homo sapiens
tcggagaatgcacag

SEQ ID NO: 1481205 - DNA, 15 bp, Homo sapiens
gtcggagaatgcaca

SEQ ID NO: 1481206 - DNA, 15 bp, Homo sapiens
ggtcggagaatgcac

SEQ ID NO: 1481207 - DNA, 15 bp, Homo sapiens
aggtcggagaatgca

SEQ ID NO: 1481208 - DNA, 15 bp, Homo sapiens
gaggtcggagaatgc

SEQ ID NO: 1481209 - DNA, 15 bp, Homo sapiens
ggaggtcggagaatg

SEQ ID NO: 1481210 - DNA, 15 bp, Homo sapiens
tggaggtcggagaat

SEQ ID NO: 1481211 - DNA, 15 bp, Homo sapiens
ctggaggtcggagaa

SEQ ID NO: 1481212 - DNA, 15 bp, Homo sapiens
cctggaggtcggaga

SEQ ID NO: 1481213 - DNA, 15 bp, Homo sapiens
acctggaggtcggag

SEQ ID NO: 1481214 - DNA, 15 bp, Homo sapiens
aacctggaggtcgga

SEQ ID NO: 1481215 - DNA, 15 bp, Homo sapiens
gaacctggaggtcgg

SEQ ID NO: 1481216 - DNA, 15 bp, Homo sapiens
cgaacctggaggtcg

SEQ ID NO: 1481217 - DNA, 15 bp, Homo sapiens
acgaacctggaggtc

SEQ ID NO: 1481218 - DNA, 15 bp, Homo sapiens
cacgaacctggaggt

SEQ ID NO: 1481219 - DNA, 15 bp, Homo sapiens
ccacgaacctggagg

SEQ ID NO: 1481220 - DNA, 15 bp, Homo sapiens
accacgaacctggag

SEQ ID NO: 1481221 - DNA, 15 bp, Homo sapiens
gaccacgaacctgga

SEQ ID NO: 1481222 - DNA, 15 bp, Homo sapiens
agaccacgaacctgg

SEQ ID NO: 1481223 - DNA, 15 bp, Homo sapiens
tagaccacgaacctg

SEQ ID NO: 1481224 - DNA, 15 bp, Homo sapiens
gtagaccacgaacct

SEQ ID NO: 1481225 - DNA, 15 bp, Homo sapiens
tgtagaccacgaacc

SEQ ID NO: 1481226 - DNA, 15 bp, Homo sapiens
ttgtagaccacgaac

SEQ ID NO: 1481227 - DNA, 15 bp, Homo sapiens
cttgtagaccacgaa

SEQ ID NO: 1481228 - DNA, 15 bp, Homo sapiens
gcttgtagaccacga

SEQ ID NO: 1481229 - DNA, 15 bp, Homo sapiens
agcttgtagaccacg

SEQ ID NO: 1481230 - DNA, 15 bp, Homo sapiens
cagcttgtagaccac

SEQ ID NO: 1481231 - DNA, 15 bp, Homo sapiens
gcagcttgtagacca

SEQ ID NO: 1481232 - DNA, 15 bp, Homo sapiens
ggcagcttgtagacc

SEQ ID NO: 1481233 - DNA, 15 bp, Homo sapiens
tggcagcttgtagac

SEQ ID NO: 1481234 - DNA, 15 bp, Homo sapiens
ctggcagcttgtaga

SEQ ID NO: 1481235 - DNA, 15 bp, Homo sapiens
gctggcagcttgtag

SEQ ID NO: 1481236 - DNA, 15 bp, Homo sapiens
agctggcagcttgta

SEQ ID NO: 1481237 - DNA, 15 bp, Homo sapiens
gagctggcagcttgt

SEQ ID NO: 1481238 - DNA, 15 bp, Homo sapiens
agagctggcagcttg

SEQ ID NO: 1481239 - DNA, 15 bp, Homo sapiens
aagagctggcagctt

SEQ ID NO: 1481240 - DNA, 15 bp, Homo sapiens
taagagctggcagct

SEQ ID NO: 1481241 - DNA, 15 bp, Homo sapiens
ctaagagctggcagc

SEQ ID NO: 1481242 - DNA, 15 bp, Homo sapiens
tctaagagctggcag

SEQ ID NO: 1481243 - DNA, 15 bp, Homo sapiens
ctctaagagctggca

SEQ ID NO: 1481244 - DNA, 15 bp, Homo sapiens
cctctaagagctggc

SEQ ID NO: 1481245 - DNA, 15 bp, Homo sapiens
ccctctaagagctgg

SEQ ID NO: 1481246 - DNA, 15 bp, Homo sapiens
accctctaagagctg

SEQ ID NO: 1481247 - DNA, 15 bp, Homo sapiens
gaccctctaagagct

SEQ ID NO: 1481248 - DNA, 15 bp, Homo sapiens
ggaccctctaagagc

SEQ ID NO: 1481249 - DNA, 15 bp, Homo sapiens
cggaccctctaagag

SEQ ID NO: 1481250 - DNA, 15 bp, Homo sapiens
ccggaccctctaaga

SEQ ID NO: 1481251 - DNA, 15 bp, Homo sapiens
cccggaccctctaag

SEQ ID NO: 1481252 - DNA, 15 bp, Homo sapiens
ccccggaccctctaa

SEQ ID NO: 1481253 - DNA, 15 bp, Homo sapiens
tccccggaccctcta

SEQ ID NO: 1481254 - DNA, 15 bp, Homo sapiens
atgtgagccactgca

SEQ ID NO: 1481255 - DNA, 15 bp, Homo sapiens
gatgtgagccactgc

SEQ ID NO: 1481256 - DNA, 15 bp, Homo sapiens
agatgtgagccactg

SEQ ID NO: 1481257 - DNA, 15 bp, Homo sapiens
cagatgtgagccact

SEQ ID NO: 1481258 - DNA, 15 bp, Homo sapiens
gttacagatgtgagc

SEQ ID NO: 1481259 - DNA, 15 bp, Homo sapiens
ggttacagatgtgag

SEQ ID NO: 1481260 - DNA, 15 bp, Homo sapiens
gggttacagatgtga

SEQ ID NO: 1481261 - DNA, 15 bp, Homo sapiens
ggggttacagatgtg

SEQ ID NO: 1481262 - DNA, 15 bp, Homo sapiens
tggggttacagatgt

SEQ ID NO: 1481263 - DNA, 15 bp, Homo sapiens
ctggggttacagatg

SEQ ID NO: 1481264 - DNA, 15 bp, Homo sapiens
gctggggttacagat

SEQ ID NO: 1481265 - DNA, 15 bp, Homo sapiens
tgctggggttacaga

SEQ ID NO: 1481266 - DNA, 15 bp, Homo sapiens
tctcagcctcccaaa

SEQ ID NO: 1481267 - DNA, 15 bp, Homo sapiens
gcccatctcagcctc

SEQ ID NO: 1481268 - DNA, 15 bp, Homo sapiens
tgcccatctcagcct

SEQ ID NO: 1481269 - DNA, 15 bp, Homo sapiens
ctgcccatctcagcc

SEQ ID NO: 1481270 - DNA, 15 bp, Homo sapiens
tctgcccatctcagc

SEQ ID NO: 1481271 - DNA, 15 bp, Homo sapiens
atctgcccatctcag

SEQ ID NO: 1481272 - DNA, 15 bp, Homo sapiens
gatctgcccatctca

SEQ ID NO: 1481273 - DNA, 15 bp, Homo sapiens
tgatctgcccatctc

SEQ ID NO: 1481274 - DNA, 15 bp, Homo sapiens
gtgatctgcccatct

SEQ ID NO: 1481275 - DNA, 15 bp, Homo sapiens
agtgatctgcccatc

SEQ ID NO: 1481276 - DNA, 15 bp, Homo sapiens
aagtgatctgcccat

SEQ ID NO: 1481277 - DNA, 15 bp, Homo sapiens
tatggggtttcacca

SEQ ID NO: 1481278 - DNA, 15 bp, Homo sapiens
atatggggtttcacc

SEQ ID NO: 1481279 - DNA, 15 bp, Homo sapiens
gatatggggtttcac

SEQ ID NO: 1481280 - DNA, 15 bp, Homo sapiens
ggatatggggtttca

SEQ ID NO: 1481281 - DNA, 15 bp, Homo sapiens
tggatatggggtttc

SEQ ID NO: 1481282 - DNA, 15 bp, Homo sapiens
atggatatggggttt

SEQ ID NO: 1481283 - DNA, 15 bp, Homo sapiens
aatggatatggggtt

SEQ ID NO: 1481284 - DNA, 15 bp, Homo sapiens
taatggatatggggt

SEQ ID NO: 1481285 - DNA, 15 bp, Homo sapiens
ttaatggatatgggg

SEQ ID NO: 1481286 - DNA, 15 bp, Homo sapiens
tttaatggatatggg

SEQ ID NO: 1481287 - DNA, 15 bp, Homo sapiens
ttttaatggatatgg

SEQ ID NO: 1481288 - DNA, 15 bp, Homo sapiens
tttttaatggatatg

SEQ ID NO: 1481289 - DNA, 15 bp, Homo sapiens
atttttaatggatat

SEQ ID NO: 1481290 - DNA, 15 bp, Homo sapiens
tatttttaatggata

SEQ ID NO: 1481291 - DNA, 15 bp, Homo sapiens
atatttttaatggat

SEQ ID NO: 1481292 - DNA, 15 bp, Homo sapiens
aatatttttaatgga

SEQ ID NO: 1481293 - DNA, 15 bp, Homo sapiens
aaatatttttaatgg

SEQ ID NO: 1481294 - DNA, 15 bp, Homo sapiens
taaatatttttaatg

SEQ ID NO: 1481295 - DNA, 15 bp, Homo sapiens
ttaaatatttttaat

SEQ ID NO: 1481296 - DNA, 15 bp, Homo sapiens
tttaaatatttttaa

SEQ ID NO: 1481297 - DNA, 15 bp, Homo sapiens
ttttaaatattttta

SEQ ID NO: 1481298 - DNA, 15 bp, Homo sapiens
tttttaaatattttt

SEQ ID NO: 1481299 - DNA, 15 bp, Homo sapiens
atttttaaatatttt

SEQ ID NO: 1481300 - DNA, 15 bp, Homo sapiens
aatttttaaatattt

SEQ ID NO: 1481301 - DNA, 15 bp, Homo sapiens
taatttttaaatatt

SEQ ID NO: 1481302 - DNA, 15 bp, Homo sapiens
ctaatttttaaatat

SEQ ID NO: 1481303 - DNA, 15 bp, Homo sapiens
gctaatttttaaata

SEQ ID NO: 1481304 - DNA, 15 bp, Homo sapiens
ggctaatttttaaat

SEQ ID NO: 1481305 - DNA, 15 bp, Homo sapiens
tggctaatttttaaa

SEQ ID NO: 1481306 - DNA, 15 bp, Homo sapiens
ctggctaatttttaa

SEQ ID NO: 1481307 - DNA, 15 bp, Homo sapiens
tctggctaattttta

SEQ ID NO: 1481308 - DNA, 15 bp, Homo sapiens
gtctggctaattttt

SEQ ID NO: 1481309 - DNA, 15 bp, Homo sapiens
tgtctggctaatttt

SEQ ID NO: 1481310 - DNA, 15 bp, Homo sapiens
atgtctggctaattt

SEQ ID NO: 1481311 - DNA, 15 bp, Homo sapiens
catgtctggctaatt

SEQ ID NO: 1481312 - DNA, 15 bp, Homo sapiens
ccatgtctggctaat

SEQ ID NO: 1481313 - DNA, 15 bp, Homo sapiens
accatgtctggctaa

SEQ ID NO: 1481314 - DNA, 15 bp, Homo sapiens
caccatgtctggcta

SEQ ID NO: 1481315 - DNA, 15 bp, Homo sapiens
ccaccatgtctggct

SEQ ID NO: 1481316 - DNA, 15 bp, Homo sapiens
gccaccatgtctggc

SEQ ID NO: 1481317 - DNA, 15 bp, Homo sapiens
tgccaccatgtctgg

SEQ ID NO: 1481318 - DNA, 15 bp, Homo sapiens
gtgccaccatgtctg

SEQ ID NO: 1481319 - DNA, 15 bp, Homo sapiens
cgtgccaccatgtct

SEQ ID NO: 1481320 - DNA, 15 bp, Homo sapiens
gcgtgccaccatgtc

SEQ ID NO: 1481321 - DNA, 15 bp, Homo sapiens
cgcgtgccaccatgt

SEQ ID NO: 1481322 - DNA, 15 bp, Homo sapiens
acgcgtgccaccatg

SEQ ID NO: 1481323 - DNA, 15 bp, Homo sapiens
gacgcgtgccaccat

SEQ ID NO: 1481324 - DNA, 15 bp, Homo sapiens
agacgcgtgccacca

SEQ ID NO: 1481325 - DNA, 15 bp, Homo sapiens
cagacgcgtgccacc

SEQ ID NO: 1481326 - DNA, 15 bp, Homo sapiens
acagacgcgtgccac

SEQ ID NO: 1481327 - DNA, 15 bp, Homo sapiens
cacagacgcgtgcca

SEQ ID NO: 1481328 - DNA, 15 bp, Homo sapiens
ccacagacgcgtgcc

SEQ ID NO: 1481329 - DNA, 15 bp, Homo sapiens
accacagacgcgtgc

SEQ ID NO: 1481330 - DNA, 15 bp, Homo sapiens
gaccacagacgcgtg

SEQ ID NO: 1481331 - DNA, 15 bp, Homo sapiens
ggaccacagacgcgt

SEQ ID NO: 1481332 - DNA, 15 bp, Homo sapiens
aggaccacagacgcg

SEQ ID NO: 1481333 - DNA, 15 bp, Homo sapiens
taggaccacagacgc

SEQ ID NO: 1481334 - DNA, 15 bp, Homo sapiens
ctaggaccacagacg

SEQ ID NO: 1481335 - DNA, 15 bp, Homo sapiens
gctaggaccacagac

SEQ ID NO: 1481336 - DNA, 15 bp, Homo sapiens
agctaggaccacaga

SEQ ID NO: 1481337 - DNA, 15 bp, Homo sapiens
gagctaggaccacag

SEQ ID NO: 1481338 - DNA, 15 bp, Homo sapiens
ggagctaggaccaca

SEQ ID NO: 1481339 - DNA, 15 bp, Homo sapiens
aggagctaggaccac

SEQ ID NO: 1481340 - DNA, 15 bp, Homo sapiens
gaggagctaggacca

SEQ ID NO: 1481341 - DNA, 15 bp, Homo sapiens
cgaggagctaggacc

SEQ ID NO: 1481342 - DNA, 15 bp, Homo sapiens
ccgaggagctaggac

SEQ ID NO: 1481343 - DNA, 15 bp, Homo sapiens
cccgaggagctagga

SEQ ID NO: 1481344 - DNA, 15 bp, Homo sapiens
tcccgaggagctagg

SEQ ID NO: 1481345 - DNA, 15 bp, Homo sapiens
ctcccgaggagctag

SEQ ID NO: 1481346 - DNA, 15 bp, Homo sapiens
cctcccgaggagcta

SEQ ID NO: 1481347 - DNA, 15 bp, Homo sapiens
gcctcccgaggagct

SEQ ID NO: 1481348 - DNA, 15 bp, Homo sapiens
agcctcccgaggagc

SEQ ID NO: 1481349 - DNA, 15 bp, Homo sapiens
cagcctcccgaggag

SEQ ID NO: 1481350 - DNA, 15 bp, Homo sapiens
tcagcctcccgagga

SEQ ID NO: 1481351 - DNA, 15 bp, Homo sapiens
ctcagcctcccgagg

SEQ ID NO: 1481352 - DNA, 15 bp, Homo sapiens
agttcaagcgattct

SEQ ID NO: 1481353 - DNA, 15 bp, Homo sapiens
gagttcaagcgattc

SEQ ID NO: 1481354 - DNA, 15 bp, Homo sapiens
cgagttcaagcgatt

SEQ ID NO: 1481355 - DNA, 15 bp, Homo sapiens
ccgagttcaagcgat

SEQ ID NO: 1481356 - DNA, 15 bp, Homo sapiens
cccgagttcaagcga

SEQ ID NO: 1481357 - DNA, 15 bp, Homo sapiens
tcccgagttcaagcg

SEQ ID NO: 1481358 - DNA, 15 bp, Homo sapiens
gcctcccgagttcaa

SEQ ID NO: 1481359 - DNA, 15 bp, Homo sapiens
tgcctcccgagttca

SEQ ID NO: 1481360 - DNA, 15 bp, Homo sapiens
ctgcctcccgagttc

SEQ ID NO: 1481361 - DNA, 15 bp, Homo sapiens
tctgcctcccgagtt

SEQ ID NO: 1481362 - DNA, 15 bp, Homo sapiens
ctctgcctcccgagt

SEQ ID NO: 1481363 - DNA, 15 bp, Homo sapiens
cctctgcctcccgag

SEQ ID NO: 1481364 - DNA, 15 bp, Homo sapiens
acctctgcctcccga

SEQ ID NO: 1481365 - DNA, 15 bp, Homo sapiens
acaacctctgcctcc

SEQ ID NO: 1481366 - DNA, 15 bp, Homo sapiens
gacaacctctgcctc

SEQ ID NO: 1481367 - DNA, 15 bp, Homo sapiens
tgacaacctctgcct

SEQ ID NO: 1481368 - DNA, 15 bp, Homo sapiens
atgacaacctctgcc

SEQ ID NO: 1481369 - DNA, 15 bp, Homo sapiens
catgacaacctctgc

SEQ ID NO: 1481370 - DNA, 15 bp, Homo sapiens
tcatgacaacctctg

SEQ ID NO: 1481371 - DNA, 15 bp, Homo sapiens
ctcatgacaacctct

SEQ ID NO: 1481372 - DNA, 15 bp, Homo sapiens
gctcatgacaacctc

SEQ ID NO: 1481373 - DNA, 15 bp, Homo sapiens
agctcatgacaacct

SEQ ID NO: 1481374 - DNA, 15 bp, Homo sapiens
cagctcatgacaacc

SEQ ID NO: 1481375 - DNA, 15 bp, Homo sapiens
tcagctcatgacaac

SEQ ID NO: 1481376 - DNA, 15 bp, Homo sapiens
ctcagctcatgacaa

SEQ ID NO: 1481377 - DNA, 15 bp, Homo sapiens
gctcagctcatgaca

SEQ ID NO: 1481378 - DNA, 15 bp, Homo sapiens
agctcagctcatgac

SEQ ID NO: 1481379 - DNA, 15 bp, Homo sapiens
tagctcagctcatga

SEQ ID NO: 1481380 - DNA, 15 bp, Homo sapiens
ttagctcagctcatg

SEQ ID NO: 1481381 - DNA, 15 bp, Homo sapiens
gttagctcagctcat

SEQ ID NO: 1481382 - DNA, 15 bp, Homo sapiens
tgttagctcagctca

SEQ ID NO: 1481383 - DNA, 15 bp, Homo sapiens
gtgttagctcagctc

SEQ ID NO: 1481384 - DNA, 15 bp, Homo sapiens
ggtgttagctcagct

SEQ ID NO: 1481385 - DNA, 15 bp, Homo sapiens
tggtgttagctcagc

SEQ ID NO: 1481386 - DNA, 15 bp, Homo sapiens
gtggtgttagctcag

SEQ ID NO: 1481387 - DNA, 15 bp, Homo sapiens
cgtggtgttagctca

SEQ ID NO: 1481388 - DNA, 15 bp, Homo sapiens
ccgtggtgttagctc

SEQ ID NO: 1481389 - DNA, 15 bp, Homo sapiens
gccgtggtgttagct

SEQ ID NO: 1481390 - DNA, 15 bp, Homo sapiens
tgccgtggtgttagc

SEQ ID NO: 1481391 - DNA, 15 bp, Homo sapiens
gtgccgtggtgttag

SEQ ID NO: 1481392 - DNA, 15 bp, Homo sapiens
agtgccgtggtgtta

SEQ ID NO: 1481393 - DNA, 15 bp, Homo sapiens
aagtgccgtggtgtt

SEQ ID NO: 1481394 - DNA, 15 bp, Homo sapiens
gaagtgccgtggtgt

SEQ ID NO: 1481395 - DNA, 15 bp, Homo sapiens
tgaagtgccgtggtg

SEQ ID NO: 1481396 - DNA, 15 bp, Homo sapiens
ctgaagtgccgtggt

SEQ ID NO: 1481397 - DNA, 15 bp, Homo sapiens
gctgaagtgccgtgg

SEQ ID NO: 1481398 - DNA, 15 bp, Homo sapiens
ggctgaagtgccgtg

SEQ ID NO: 1481399 - DNA, 15 bp, Homo sapiens
aggctgaagtgccgt

SEQ ID NO: 1481400 - DNA, 15 bp, Homo sapiens
caggctgaagtgccg

SEQ ID NO: 1481401 - DNA, 15 bp, Homo sapiens
ccaggctgaagtgcc

SEQ ID NO: 1481402 - DNA, 15 bp, Homo sapiens
gtcacccaggctgaa

SEQ ID NO: 1481403 - DNA, 15 bp, Homo sapiens
tgtcacccaggctga

SEQ ID NO: 1481404 - DNA, 15 bp, Homo sapiens
agtctcattctgtca

SEQ ID NO: 1481405 - DNA, 15 bp, Homo sapiens
gagtctcattctgtc

SEQ ID NO: 1481406 - DNA, 15 bp, Homo sapiens
agagtctcattctgt

SEQ ID NO: 1481407 - DNA, 15 bp, Homo sapiens
cagagtctcattctg

SEQ ID NO: 1481408 - DNA, 15 bp, Homo sapiens
acagagtctcattct

SEQ ID NO: 1481409 - DNA, 15 bp, Homo sapiens
cacagagtctcattc

SEQ ID NO: 1481410 - DNA, 15 bp, Homo sapiens
acacagagtctcatt

SEQ ID NO: 1481411 - DNA, 15 bp, Homo sapiens
gacacagagtctcat

SEQ ID NO: 1481412 - DNA, 15 bp, Homo sapiens
tttttttgacacaga

SEQ ID NO: 1481413 - DNA, 15 bp, Homo sapiens
atttttttgacacag

SEQ ID NO: 1481414 - DNA, 15 bp, Homo sapiens
tatttttttgacaca

SEQ ID NO: 1481415 - DNA, 15 bp, Homo sapiens
ttatttttttgacac

SEQ ID NO: 1481416 - DNA, 15 bp, Homo sapiens
tttatttttttgaca

SEQ ID NO: 1481417 - DNA, 15 bp, Homo sapiens
ttttatttttttgac

SEQ ID NO: 1481418 - DNA, 15 bp, Homo sapiens
tttttatttttttga

SEQ ID NO: 1481419 - DNA, 15 bp, Homo sapiens
ttttttatttttttg

SEQ ID NO: 1481420 - DNA, 15 bp, Homo sapiens
gattttttatttttt

SEQ ID NO: 1481421 - DNA, 15 bp, Homo sapiens
agattttttattttt

SEQ ID NO: 1481422 - DNA, 15 bp, Homo sapiens
tagattttttatttt

SEQ ID NO: 1481423 - DNA, 15 bp, Homo sapiens
ttagattttttattt

SEQ ID NO: 1481424 - DNA, 15 bp, Homo sapiens
cttagattttttatt

SEQ ID NO: 1481425 - DNA, 15 bp, Homo sapiens
ccttagattttttat

SEQ ID NO: 1481426 - DNA, 15 bp, Homo sapiens
cccttagatttttta

SEQ ID NO: 1481427 - DNA, 15 bp, Homo sapiens
gcccttagatttttt

SEQ ID NO: 1481428 - DNA, 15 bp, Homo sapiens
agcccttagattttt

SEQ ID NO: 1481429 - DNA, 15 bp, Homo sapiens
gagcccttagatttt

SEQ ID NO: 1481430 - DNA, 15 bp, Homo sapiens
tgagcccttagattt

SEQ ID NO: 1481431 - DNA, 15 bp, Homo sapiens
ctgagcccttagatt

SEQ ID NO: 1481432 - DNA, 15 bp, Homo sapiens
cctgagcccttagat

SEQ ID NO: 1481433 - DNA, 15 bp, Homo sapiens
tcctgagcccttaga

SEQ ID NO: 1481434 - DNA, 15 bp, Homo sapiens
ttcctgagcccttag

SEQ ID NO: 1481435 - DNA, 15 bp, Homo sapiens
gttcctgagccctta

SEQ ID NO: 1481436 - DNA, 15 bp, Homo sapiens
ggttcctgagccctt

SEQ ID NO: 1481437 - DNA, 15 bp, Homo sapiens
tggttcctgagccct

SEQ ID NO: 1481438 - DNA, 15 bp, Homo sapiens
ctggttcctgagccc

SEQ ID NO: 1481439 - DNA, 15 bp, Homo sapiens
actggttcctgagcc

SEQ ID NO: 1481440 - DNA, 15 bp, Homo sapiens
aactggttcctgagc

SEQ ID NO: 1481441 - DNA, 15 bp, Homo sapiens
aaactggttcctgag

SEQ ID NO: 1481442 - DNA, 15 bp, Homo sapiens
caaactggttcctga

SEQ ID NO: 1481443 - DNA, 15 bp, Homo sapiens
ccaaactggttcctg

SEQ ID NO: 1481444 - DNA, 15 bp, Homo sapiens
tccaaactggttcct

SEQ ID NO: 1481445 - DNA, 15 bp, Homo sapiens
gtccaaactggttcc

SEQ ID NO: 1481446 - DNA, 15 bp, Homo sapiens
agtccaaactggttc

SEQ ID NO: 1481447 - DNA, 15 bp, Homo sapiens
aagtccaaactggtt

SEQ ID NO: 1481448 - DNA, 15 bp, Homo sapiens
caagtccaaactggt

SEQ ID NO: 1481449 - DNA, 15 bp, Homo sapiens
tcaagtccaaactgg

SEQ ID NO: 1481450 - DNA, 15 bp, Homo sapiens
atcaagtccaaactg

SEQ ID NO: 1481451 - DNA, 15 bp, Homo sapiens
aatcaagtccaaact

SEQ ID NO: 1481452 - DNA, 15 bp, Homo sapiens
aaatcaagtccaaac

SEQ ID NO: 1481453 - DNA, 15 bp, Homo sapiens
aaaatcaagtccaaa

SEQ ID NO: 1481454 - DNA, 15 bp, Homo sapiens
caaaatcaagtccaa

SEQ ID NO: 1481455 - DNA, 15 bp, Homo sapiens
tcaaaatcaagtcca

SEQ ID NO: 1481456 - DNA, 15 bp, Homo sapiens
ttcaaaatcaagtcc

SEQ ID NO: 1481457 - DNA, 15 bp, Homo sapiens
attcaaaatcaagtc

SEQ ID NO: 1481458 - DNA, 15 bp, Homo sapiens
gattcaaaatcaagt

SEQ ID NO: 1481459 - DNA, 15 bp, Homo sapiens
ggattcaaaatcaag

SEQ ID NO: 1481460 - DNA, 15 bp, Homo sapiens
gggattcaaaatcaa

SEQ ID NO: 1481461 - DNA, 15 bp, Homo sapiens
tgggattcaaaatca

SEQ ID NO: 1481462 - DNA, 15 bp, Homo sapiens
ctgggattcaaaatc

SEQ ID NO: 1481463 - DNA, 15 bp, Homo sapiens
actgggattcaaaat

SEQ ID NO: 1481464 - DNA, 15 bp, Homo sapiens
aactgggattcaaaa

SEQ ID NO: 1481465 - DNA, 15 bp, Homo sapiens
tgaactgggattcaa

SEQ ID NO: 1481466 - DNA, 15 bp, Homo sapiens
atgaactgggattca

SEQ ID NO: 1481467 - DNA, 15 bp, Homo sapiens
gatgaactgggattc

SEQ ID NO: 1481468 - DNA, 15 bp, Homo sapiens
ggatgaactgggatt

SEQ ID NO: 1481469 - DNA, 15 bp, Homo sapiens
gggatgaactgggat

SEQ ID NO: 1481470 - DNA, 15 bp, Homo sapiens
ggggatgaactggga

SEQ ID NO: 1481471 - DNA, 15 bp, Homo sapiens
aggggatgaactggg

SEQ ID NO: 1481472 - DNA, 15 bp, Homo sapiens
aaggggatgaactgg

SEQ ID NO: 1481473 - DNA, 15 bp, Homo sapiens
gaaggggatgaactg

SEQ ID NO: 1481474 - DNA, 15 bp, Homo sapiens
ggaaggggatgaact

SEQ ID NO: 1481475 - DNA, 15 bp, Homo sapiens
aggaaggggatgaac

SEQ ID NO: 1481476 - DNA, 15 bp, Homo sapiens
taggaaggggatgaa

SEQ ID NO: 1481477 - DNA, 15 bp, Homo sapiens
ctaggaaggggatga

SEQ ID NO: 1481478 - DNA, 15 bp, Homo sapiens
gctaggaaggggatg

SEQ ID NO: 1481479 - DNA, 15 bp, Homo sapiens
agctaggaaggggat

SEQ ID NO: 1481480 - DNA, 15 bp, Homo sapiens
cagctaggaagggga

SEQ ID NO: 1481481 - DNA, 15 bp, Homo sapiens
acagctaggaagggg

SEQ ID NO: 1481482 - DNA, 15 bp, Homo sapiens
tacagctaggaaggg

SEQ ID NO: 1481483 - DNA, 15 bp, Homo sapiens
atacagctaggaagg

SEQ ID NO: 1481484 - DNA, 15 bp, Homo sapiens
catacagctaggaag

SEQ ID NO: 1481485 - DNA, 15 bp, Homo sapiens
tcatacagctaggaa

SEQ ID NO: 1481486 - DNA, 15 bp, Homo sapiens
gtcatacagctagga

SEQ ID NO: 1481487 - DNA, 15 bp, Homo sapiens
ggtcatacagctagg

SEQ ID NO: 1481488 - DNA, 15 bp, Homo sapiens
aggtcatacagctag

SEQ ID NO: 1481489 - DNA, 15 bp, Homo sapiens
aaggtcatacagcta

SEQ ID NO: 1481490 - DNA, 15 bp, Homo sapiens
caaggtcatacagct

SEQ ID NO: 1481491 - DNA, 15 bp, Homo sapiens
tcaaggtcatacagc

SEQ ID NO: 1481492 - DNA, 15 bp, Homo sapiens
atcaaggtcatacag

SEQ ID NO: 1481493 - DNA, 15 bp, Homo sapiens
aatcaaggtcataca

SEQ ID NO: 1481494 - DNA, 15 bp, Homo sapiens
caatcaaggtcatac

SEQ ID NO: 1481495 - DNA, 15 bp, Homo sapiens
acaatcaaggtcata

SEQ ID NO: 1481496 - DNA, 15 bp, Homo sapiens
cacaatcaaggtcat

SEQ ID NO: 1481497 - DNA, 15 bp, Homo sapiens
acacaatcaaggtca

SEQ ID NO: 1481498 - DNA, 15 bp, Homo sapiens
cacacaatcaaggtc

SEQ ID NO: 1481499 - DNA, 15 bp, Homo sapiens
gcacacaatcaaggt

SEQ ID NO: 1481500 - DNA, 15 bp, Homo sapiens
ggcacacaatcaagg

SEQ ID NO: 1481501 - DNA, 15 bp, Homo sapiens
aggcacacaatcaag

SEQ ID NO: 1481502 - DNA, 15 bp, Homo sapiens
aaggcacacaatcaa

SEQ ID NO: 1481503 - DNA, 15 bp, Homo sapiens
taaggcacacaatca

SEQ ID NO: 1481504 - DNA, 15 bp, Homo sapiens
ttaaggcacacaatc

SEQ ID NO: 1481505 - DNA, 15 bp, Homo sapiens
gttaaggcacacaat

SEQ ID NO: 1481506 - DNA, 15 bp, Homo sapiens
ggttaaggcacacaa

SEQ ID NO: 1481507 - DNA, 15 bp, Homo sapiens
cggttaaggcacaca

SEQ ID NO: 1481508 - DNA, 15 bp, Homo sapiens
gcggttaaggcacac

SEQ ID NO: 1481509 - DNA, 15 bp, Homo sapiens
agcggttaaggcaca

SEQ ID NO: 1481510 - DNA, 15 bp, Homo sapiens
gagcggttaaggcac

SEQ ID NO: 1481511 - DNA, 15 bp, Homo sapiens
agagcggttaaggca

SEQ ID NO: 1481512 - DNA, 15 bp, Homo sapiens
cagagcggttaaggc

SEQ ID NO: 1481513 - DNA, 15 bp, Homo sapiens
acagagcggttaagg

SEQ ID NO: 1481514 - DNA, 15 bp, Homo sapiens
cacagagcggttaag

SEQ ID NO: 1481515 - DNA, 15 bp, Homo sapiens
tcacagagcggttaa

SEQ ID NO: 1481516 - DNA, 15 bp, Homo sapiens
gtcacagagcggtta

SEQ ID NO: 1481517 - DNA, 15 bp, Homo sapiens
tgtcacagagcggtt

SEQ ID NO: 1481518 - DNA, 15 bp, Homo sapiens
gtgtcacagagcggt

SEQ ID NO: 1481519 - DNA, 15 bp, Homo sapiens
tgtgtcacagagcgg

SEQ ID NO: 1481520 - DNA, 15 bp, Homo sapiens
ctgtgtcacagagcg

SEQ ID NO: 1481521 - DNA, 15 bp, Homo sapiens
actgtgtcacagagc

SEQ ID NO: 1481522 - DNA, 15 bp, Homo sapiens
gactgtgtcacagag

SEQ ID NO: 1481523 - DNA, 15 bp, Homo sapiens
agactgtgtcacaga

SEQ ID NO: 1481524 - DNA, 15 bp, Homo sapiens
tagactgtgtcacag

SEQ ID NO: 1481525 - DNA, 15 bp, Homo sapiens
gtagactgtgtcaca

SEQ ID NO: 1481526 - DNA, 15 bp, Homo sapiens
ggtagactgtgtcac

SEQ ID NO: 1481527 - DNA, 15 bp, Homo sapiens
aggtagactgtgtca

SEQ ID NO: 1481528 - DNA, 15 bp, Homo sapiens
caggtagactgtgtc

SEQ ID NO: 1481529 - DNA, 15 bp, Homo sapiens
acaggtagactgtgt

SEQ ID NO: 1481530 - DNA, 15 bp, Homo sapiens
gacaggtagactgtg

SEQ ID NO: 1481531 - DNA, 15 bp, Homo sapiens
agacaggtagactgt

SEQ ID NO: 1481532 - DNA, 15 bp, Homo sapiens
cagacaggtagactg

SEQ ID NO: 1481533 - DNA, 15 bp, Homo sapiens
gcagacaggtagact

SEQ ID NO: 1481534 - DNA, 15 bp, Homo sapiens
tgcagacaggtagac

SEQ ID NO: 1481535 - DNA, 15 bp, Homo sapiens
ttgcagacaggtaga

SEQ ID NO: 1481536 - DNA, 15 bp, Homo sapiens
tttgcagacaggtag

SEQ ID NO: 1481537 - DNA, 15 bp, Homo sapiens
ttttgcagacaggta

SEQ ID NO: 1481538 - DNA, 15 bp, Homo sapiens
attttgcagacaggt

SEQ ID NO: 1481539 - DNA, 15 bp, Homo sapiens
cattttgcagacagg

SEQ ID NO: 1481540 - DNA, 15 bp, Homo sapiens
ccattttgcagacag

SEQ ID NO: 1481541 - DNA, 15 bp, Homo sapiens
cccattttgcagaca

SEQ ID NO: 1481542 - DNA, 15 bp, Homo sapiens
tcccattttgcagac

SEQ ID NO: 1481543 - DNA, 15 bp, Homo sapiens
ttcccattttgcaga

SEQ ID NO: 1481544 - DNA, 15 bp, Homo sapiens
tttcccattttgcag

SEQ ID NO: 1481545 - DNA, 15 bp, Homo sapiens
gtttcccattttgca

SEQ ID NO: 1481546 - DNA, 15 bp, Homo sapiens
tgtttcccattttgc

SEQ ID NO: 1481547 - DNA, 15 bp, Homo sapiens
atgtttcccattttg

SEQ ID NO: 1481548 - DNA, 15 bp, Homo sapiens
tatgtttcccatttt

SEQ ID NO: 1481549 - DNA, 15 bp, Homo sapiens
ttatgtttcccattt

SEQ ID NO: 1481550 - DNA, 15 bp, Homo sapiens
attatgtttcccatt

SEQ ID NO: 1481551 - DNA, 15 bp, Homo sapiens
tattatgtttcccat

SEQ ID NO: 1481552 - DNA, 15 bp, Homo sapiens
gtattatgtttccca

SEQ ID NO: 1481553 - DNA, 15 bp, Homo sapiens
ggtattatgtttccc

SEQ ID NO: 1481554 - DNA, 15 bp, Homo sapiens
aggtattatgtttcc

SEQ ID NO: 1481555 - DNA, 15 bp, Homo sapiens
caggtattatgtttc

SEQ ID NO: 1481556 - DNA, 15 bp, Homo sapiens
gcaggtattatgttt

SEQ ID NO: 1481557 - DNA, 15 bp, Homo sapiens
ggcaggtattatgtt

SEQ ID NO: 1481558 - DNA, 15 bp, Homo sapiens
tggcaggtattatgt

SEQ ID NO: 1481559 - DNA, 15 bp, Homo sapiens
atggcaggtattatg

SEQ ID NO: 1481560 - DNA, 15 bp, Homo sapiens
gatggcaggtattat

SEQ ID NO: 1481561 - DNA, 15 bp, Homo sapiens
tgatggcaggtatta

SEQ ID NO: 1481562 - DNA, 15 bp, Homo sapiens
ctgatggcaggtatt

SEQ ID NO: 1481563 - DNA, 15 bp, Homo sapiens
cctgatggcaggtat

SEQ ID NO: 1481564 - DNA, 15 bp, Homo sapiens
tcctgatggcaggta

SEQ ID NO: 1481565 - DNA, 15 bp, Homo sapiens
atcctgatggcaggt

SEQ ID NO: 1481566 - DNA, 15 bp, Homo sapiens
aatcctgatggcagg

SEQ ID NO: 1481567 - DNA, 15 bp, Homo sapiens
caatcctgatggcag

SEQ ID NO: 1481568 - DNA, 15 bp, Homo sapiens
acaatcctgatggca

SEQ ID NO: 1481569 - DNA, 15 bp, Homo sapiens
aacaatcctgatggc

SEQ ID NO: 1481570 - DNA, 15 bp, Homo sapiens
caacaatcctgatgg

SEQ ID NO: 1481571 - DNA, 15 bp, Homo sapiens
tcaacaatcctgatg

SEQ ID NO: 1481572 - DNA, 15 bp, Homo sapiens
ctcaacaatcctgat

SEQ ID NO: 1481573 - DNA, 15 bp, Homo sapiens
cctcaacaatcctga

SEQ ID NO: 1481574 - DNA, 15 bp, Homo sapiens
tcctcaacaatcctg

SEQ ID NO: 1481575 - DNA, 15 bp, Homo sapiens
ctcctcaacaatcct

SEQ ID NO: 1481576 - DNA, 15 bp, Homo sapiens
actcctcaacaatcc

SEQ ID NO: 1481577 - DNA, 15 bp, Homo sapiens
tactcctcaacaatc

SEQ ID NO: 1481578 - DNA, 15 bp, Homo sapiens
ttactcctcaacaat

SEQ ID NO: 1481579 - DNA, 15 bp, Homo sapiens
tttactcctcaacaa

SEQ ID NO: 1481580 - DNA, 15 bp, Homo sapiens
atttactcctcaaca

SEQ ID NO: 1481581 - DNA, 15 bp, Homo sapiens
tatttactcctcaac

SEQ ID NO: 1481582 - DNA, 15 bp, Homo sapiens
ttatttactcctcaa

SEQ ID NO: 1481583 - DNA, 15 bp, Homo sapiens
tttatttactcctca

SEQ ID NO: 1481584 - DNA, 15 bp, Homo sapiens
atttatttactcctc

SEQ ID NO: 1481585 - DNA, 15 bp, Homo sapiens
catttatttactcct

SEQ ID NO: 1481586 - DNA, 15 bp, Homo sapiens
ccatttatttactcc

SEQ ID NO: 1481587 - DNA, 15 bp, Homo sapiens
tccatttatttactc

SEQ ID NO: 1481588 - DNA, 15 bp, Homo sapiens
ttccatttatttact

SEQ ID NO: 1481589 - DNA, 15 bp, Homo sapiens
tttccatttatttac

SEQ ID NO: 1481590 - DNA, 15 bp, Homo sapiens
atttccatttattta

SEQ ID NO: 1481591 - DNA, 15 bp, Homo sapiens
aatttccatttattt

SEQ ID NO: 1481592 - DNA, 15 bp, Homo sapiens
caatttccatttatt

SEQ ID NO: 1481593 - DNA, 15 bp, Homo sapiens
ccaatttccatttat

SEQ ID NO: 1481594 - DNA, 15 bp, Homo sapiens
accaatttccattta

SEQ ID NO: 1481595 - DNA, 15 bp, Homo sapiens
caccaatttccattt

SEQ ID NO: 1481596 - DNA, 15 bp, Homo sapiens
ccaccaatttccatt

SEQ ID NO: 1481597 - DNA, 15 bp, Homo sapiens
tccaccaatttccat

SEQ ID NO: 1481598 - DNA, 15 bp, Homo sapiens
gtccaccaatttcca

SEQ ID NO: 1481599 - DNA, 15 bp, Homo sapiens
cgtccaccaatttcc

SEQ ID NO: 1481600 - DNA, 15 bp, Homo sapiens
tcgtccaccaatttc

SEQ ID NO: 1481601 - DNA, 15 bp, Homo sapiens
ctcgtccaccaattt

SEQ ID NO: 1481602 - DNA, 15 bp, Homo sapiens
cctcgtccaccaatt

SEQ ID NO: 1481603 - DNA, 15 bp, Homo sapiens
gcctcgtccaccaat

SEQ ID NO: 1481604 - DNA, 15 bp, Homo sapiens
agcctcgtccaccaa

SEQ ID NO: 1481605 - DNA, 15 bp, Homo sapiens
cagcctcgtccacca

SEQ ID NO: 1481606 - DNA, 15 bp, Homo sapiens
acagcctcgtccacc

SEQ ID NO: 1481607 - DNA, 15 bp, Homo sapiens
aacagcctcgtccac

SEQ ID NO: 1481608 - DNA, 15 bp, Homo sapiens
taacagcctcgtcca

SEQ ID NO: 1481609 - DNA, 15 bp, Homo sapiens
ttaacagcctcgtcc

SEQ ID NO: 1481610 - DNA, 15 bp, Homo sapiens
gttaacagcctcgtc

SEQ ID NO: 1481611 - DNA, 15 bp, Homo sapiens
ggttaacagcctcgt

SEQ ID NO: 1481612 - DNA, 15 bp, Homo sapiens
aggttaacagcctcg

SEQ ID NO: 1481613 - DNA, 15 bp, Homo sapiens
aaggttaacagcctc

SEQ ID NO: 1481614 - DNA, 15 bp, Homo sapiens
gaaggttaacagcct

SEQ ID NO: 1481615 - DNA, 15 bp, Homo sapiens
agaaggttaacagcc

SEQ ID NO: 1481616 - DNA, 15 bp, Homo sapiens
gagaaggttaacagc

SEQ ID NO: 1481617 - DNA, 15 bp, Homo sapiens
agagaaggttaacag

SEQ ID NO: 1481618 - DNA, 15 bp, Homo sapiens
aagagaaggttaaca

SEQ ID NO: 1481619 - DNA, 15 bp, Homo sapiens
gaagagaaggttaac

SEQ ID NO: 1481620 - DNA, 15 bp, Homo sapiens
tgaagagaaggttaa

SEQ ID NO: 1481621 - DNA, 15 bp, Homo sapiens
ctgaagagaaggtta

SEQ ID NO: 1481622 - DNA, 15 bp, Homo sapiens
cctgaagagaaggtt

SEQ ID NO: 1481623 - DNA, 15 bp, Homo sapiens
acctgaagagaaggt

SEQ ID NO: 1481624 - DNA, 15 bp, Homo sapiens
cacctgaagagaagg

SEQ ID NO: 1481625 - DNA, 15 bp, Homo sapiens
ccacctgaagagaag

SEQ ID NO: 1481626 - DNA, 15 bp, Homo sapiens
cccacctgaagagaa

SEQ ID NO: 1481627 - DNA, 15 bp, Homo sapiens
gcccacctgaagaga

SEQ ID NO: 1481628 - DNA, 15 bp, Homo sapiens
cgcccacctgaagag

SEQ ID NO: 1481629 - DNA, 15 bp, Homo sapiens
gcgcccacctgaaga

SEQ ID NO: 1481630 - DNA, 15 bp, Homo sapiens
agcgcccacctgaag

SEQ ID NO: 1481631 - DNA, 15 bp, Homo sapiens
cagcgcccacctgaa

SEQ ID NO: 1481632 - DNA, 15 bp, Homo sapiens
ccagcgcccacctga

SEQ ID NO: 1481633 - DNA, 15 bp, Homo sapiens
cccagcgcccacctg

SEQ ID NO: 1481634 - DNA, 15 bp, Homo sapiens
tcccagcgcccacct

SEQ ID NO: 1481635 - DNA, 15 bp, Homo sapiens
gtcccagcgcccacc

SEQ ID NO: 1481636 - DNA, 15 bp, Homo sapiens
tgtcccagcgcccac

SEQ ID NO: 1481637 - DNA, 15 bp, Homo sapiens
gtgtcccagcgccca

SEQ ID NO: 1481638 - DNA, 15 bp, Homo sapiens
tgtgtcccagcgccc

SEQ ID NO: 1481639 - DNA, 15 bp, Homo sapiens
ttgtgtcccagcgcc

SEQ ID NO: 1481640 - DNA, 15 bp, Homo sapiens
cttgtgtcccagcgc

SEQ ID NO: 1481641 - DNA, 15 bp, Homo sapiens
tcttgtgtcccagcg

SEQ ID NO: 1481642 - DNA, 15 bp, Homo sapiens
ctcttgtgtcccagc

SEQ ID NO: 1481643 - DNA, 15 bp, Homo sapiens
gctcttgtgtcccag

SEQ ID NO: 1481644 - DNA, 15 bp, Homo sapiens
tgctcttgtgtccca

SEQ ID NO: 1481645 - DNA, 15 bp, Homo sapiens
atgctcttgtgtccc

SEQ ID NO: 1481646 - DNA, 15 bp, Homo sapiens
gatgctcttgtgtcc

SEQ ID NO: 1481647 - DNA, 15 bp, Homo sapiens
cgatgctcttgtgtc

SEQ ID NO: 1481648 - DNA, 15 bp, Homo sapiens
gcgatgctcttgtgt

SEQ ID NO: 1481649 - DNA, 15 bp, Homo sapiens
tgcgatgctcttgtg

SEQ ID NO: 1481650 - DNA, 15 bp, Homo sapiens
ctgcgatgctcttgt

SEQ ID NO: 1481651 - DNA, 15 bp, Homo sapiens
gctgcgatgctcttg

SEQ ID NO: 1481652 - DNA, 15 bp, Homo sapiens
agctgcgatgctctt

SEQ ID NO: 1481653 - DNA, 15 bp, Homo sapiens
aagctgcgatgctct

SEQ ID NO: 1481654 - DNA, 15 bp, Homo sapiens
gaagctgcgatgctc

SEQ ID NO: 1481655 - DNA, 15 bp, Homo sapiens
tgaagctgcgatgct

SEQ ID NO: 1481656 - DNA, 15 bp, Homo sapiens
ttgaagctgcgatgc

SEQ ID NO: 1481657 - DNA, 15 bp, Homo sapiens
attgaagctgcgatg

SEQ ID NO: 1481658 - DNA, 15 bp, Homo sapiens
aattgaagctgcgat

SEQ ID NO: 1481659 - DNA, 15 bp, Homo sapiens
gaattgaagctgcga

SEQ ID NO: 1481660 - DNA, 15 bp, Homo sapiens
agaattgaagctgcg

SEQ ID NO: 1481661 - DNA, 15 bp, Homo sapiens
gagaattgaagctgc

SEQ ID NO: 1481662 - DNA, 15 bp, Homo sapiens
ggagaattgaagctg

SEQ ID NO: 1481663 - DNA, 15 bp, Homo sapiens
gggagaattgaagct

SEQ ID NO: 1481664 - DNA, 15 bp, Homo sapiens
ggggagaattgaagc

SEQ ID NO: 1481665 - DNA, 15 bp, Homo sapiens
gggggagaattgaag

SEQ ID NO: 1481666 - DNA, 15 bp, Homo sapiens
agggggagaattgaa

SEQ ID NO: 1481667 - DNA, 15 bp, Homo sapiens
tagggggagaattga

SEQ ID NO: 1481668 - DNA, 15 bp, Homo sapiens
ttagggggagaattg

SEQ ID NO: 1481669 - DNA, 15 bp, Homo sapiens
tttagggggagaatt

SEQ ID NO: 1481670 - DNA, 15 bp, Homo sapiens
ctttagggggagaat

SEQ ID NO: 1481671 - DNA, 15 bp, Homo sapiens
cctttagggggagaa

SEQ ID NO: 1481672 - DNA, 15 bp, Homo sapiens
acctttagggggaga

SEQ ID NO: 1481673 - DNA, 15 bp, Homo sapiens
aacctttagggggag

SEQ ID NO: 1481674 - DNA, 15 bp, Homo sapiens
aaacctttaggggga

SEQ ID NO: 1481675 - DNA, 15 bp, Homo sapiens
caaacctttaggggg

SEQ ID NO: 1481676 - DNA, 15 bp, Homo sapiens
ccaaacctttagggg

SEQ ID NO: 1481677 - DNA, 15 bp, Homo sapiens
cccaaacctttaggg

SEQ ID NO: 1481678 - DNA, 15 bp, Homo sapiens
ccccaaacctttagg

SEQ ID NO: 1481679 - DNA, 15 bp, Homo sapiens
cccccaaacctttag

SEQ ID NO: 1481680 - DNA, 15 bp, Homo sapiens
gcccccaaaccttta

SEQ ID NO: 1481681 - DNA, 15 bp, Homo sapiens
tgcccccaaaccttt

SEQ ID NO: 1481682 - DNA, 15 bp, Homo sapiens
ctgcccccaaacctt

SEQ ID NO: 1481683 - DNA, 15 bp, Homo sapiens
actgcccccaaacct

SEQ ID NO: 1481684 - DNA, 15 bp, Homo sapiens
aactgcccccaaacc

SEQ ID NO: 1481685 - DNA, 15 bp, Homo sapiens
caactgcccccaaac

SEQ ID NO: 1481686 - DNA, 15 bp, Homo sapiens
ccaactgcccccaaa

SEQ ID NO: 1481687 - DNA, 15 bp, Homo sapiens
accaactgcccccaa

SEQ ID NO: 1481688 - DNA, 15 bp, Homo sapiens
caccaactgccccca

SEQ ID NO: 1481689 - DNA, 15 bp, Homo sapiens
gcaccaactgccccc

SEQ ID NO: 1481690 - DNA, 15 bp, Homo sapiens
tgcaccaactgcccc

SEQ ID NO: 1481691 - DNA, 15 bp, Homo sapiens
ctgcaccaactgccc

SEQ ID NO: 1481692 - DNA, 15 bp, Homo sapiens
tctgcaccaactgcc

SEQ ID NO: 1481693 - DNA, 15 bp, Homo sapiens
ctctgcaccaactgc

SEQ ID NO: 1481694 - DNA, 15 bp, Homo sapiens
cctctgcaccaactg

SEQ ID NO: 1481695 - DNA, 15 bp, Homo sapiens
acctctgcaccaact

SEQ ID NO: 1481696 - DNA, 15 bp, Homo sapiens
cacctctgcaccaac

SEQ ID NO: 1481697 - DNA, 15 bp, Homo sapiens
tcacctctgcaccaa

SEQ ID NO: 1481698 - DNA, 15 bp, Homo sapiens
ctcacctctgcacca

SEQ ID NO: 1481699 - DNA, 15 bp, Homo sapiens
tctcacctctgcacc

SEQ ID NO: 1481700 - DNA, 15 bp, Homo sapiens
gtctcacctctgcac

SEQ ID NO: 1481701 - DNA, 15 bp, Homo sapiens
ggtctcacctctgca

SEQ ID NO: 1481702 - DNA, 15 bp, Homo sapiens
tggtctcacctctgc

SEQ ID NO: 1481703 - DNA, 15 bp, Homo sapiens
ctggtctcacctctg

SEQ ID NO: 1481704 - DNA, 15 bp, Homo sapiens
tctggtctcacctct

SEQ ID NO: 1481705 - DNA, 15 bp, Homo sapiens
ttctggtctcacctc

SEQ ID NO: 1481706 - DNA, 15 bp, Homo sapiens
cttctggtctcacct

SEQ ID NO: 1481707 - DNA, 15 bp, Homo sapiens
acttctggtctcacc

SEQ ID NO: 1481708 - DNA, 15 bp, Homo sapiens
cacttctggtctcac

SEQ ID NO: 1481709 - DNA, 15 bp, Homo sapiens
ccacttctggtctca

SEQ ID NO: 1481710 - DNA, 15 bp, Homo sapiens
cccacttctggtctc

SEQ ID NO: 1481711 - DNA, 15 bp, Homo sapiens
tcccacttctggtct

SEQ ID NO: 1481712 - DNA, 15 bp, Homo sapiens
gtcccacttctggtc

SEQ ID NO: 1481713 - DNA, 15 bp, Homo sapiens
ggtcccacttctggt

SEQ ID NO: 1481714 - DNA, 15 bp, Homo sapiens
tggtcccacttctgg

SEQ ID NO: 1481715 - DNA, 15 bp, Homo sapiens
gtggtcccacttctg

SEQ ID NO: 1481716 - DNA, 15 bp, Homo sapiens
tgtggtcccacttct

SEQ ID NO: 1481717 - DNA, 15 bp, Homo sapiens
ctgtggtcccacttc

SEQ ID NO: 1481718 - DNA, 15 bp, Homo sapiens
cctgtggtcccactt

SEQ ID NO: 1481719 - DNA, 15 bp, Homo sapiens
tcctgtggtcccact

SEQ ID NO: 1481720 - DNA, 15 bp, Homo sapiens
ctcctgtggtcccac

SEQ ID NO: 1481721 - DNA, 15 bp, Homo sapiens
cctcctgtggtccca

SEQ ID NO: 1481722 - DNA, 15 bp, Homo sapiens
acctcctgtggtccc

SEQ ID NO: 1481723 - DNA, 15 bp, Homo sapiens
cacctcctgtggtcc

SEQ ID NO: 1481724 - DNA, 15 bp, Homo sapiens
acacctcctgtggtc

SEQ ID NO: 1481725 - DNA, 15 bp, Homo sapiens
gacacctcctgtggt

SEQ ID NO: 1481726 - DNA, 15 bp, Homo sapiens
agacacctcctgtgg

SEQ ID NO: 1481727 - DNA, 15 bp, Homo sapiens
tagacacctcctgtg

SEQ ID NO: 1481728 - DNA, 15 bp, Homo sapiens
atagacacctcctgt

SEQ ID NO: 1481729 - DNA, 15 bp, Homo sapiens
gatagacacctcctg

SEQ ID NO: 1481730 - DNA, 15 bp, Homo sapiens
ggatagacacctcct

SEQ ID NO: 1481731 - DNA, 15 bp, Homo sapiens
tggatagacacctcc

SEQ ID NO: 1481732 - DNA, 15 bp, Homo sapiens
ttggatagacacctc

SEQ ID NO: 1481733 - DNA, 15 bp, Homo sapiens
tttggatagacacct

SEQ ID NO: 1481734 - DNA, 15 bp, Homo sapiens
ttttggatagacacc

SEQ ID NO: 1481735 - DNA, 15 bp, Homo sapiens
attttggatagacac

SEQ ID NO: 1481736 - DNA, 15 bp, Homo sapiens
aattttggatagaca

SEQ ID NO: 1481737 - DNA, 15 bp, Homo sapiens
gaattttggatagac

SEQ ID NO: 1481738 - DNA, 15 bp, Homo sapiens
ggaattttggataga

SEQ ID NO: 1481739 - DNA, 15 bp, Homo sapiens
gggaattttggatag

SEQ ID NO: 1481740 - DNA, 15 bp, Homo sapiens
agggaattttggata

SEQ ID NO: 1481741 - DNA, 15 bp, Homo sapiens
gagggaattttggat

SEQ ID NO: 1481742 - DNA, 15 bp, Homo sapiens
ggagggaattttgga

SEQ ID NO: 1481743 - DNA, 15 bp, Homo sapiens
tggagggaattttgg

SEQ ID NO: 1481744 - DNA, 15 bp, Homo sapiens
gtggagggaattttg

SEQ ID NO: 1481745 - DNA, 15 bp, Homo sapiens
agtggagggaatttt

SEQ ID NO: 1481746 - DNA, 15 bp, Homo sapiens
gagtggagggaattt

SEQ ID NO: 1481747 - DNA, 15 bp, Homo sapiens
agagtggagggaatt

SEQ ID NO: 1481748 - DNA, 15 bp, Homo sapiens
gagagtggagggaat

SEQ ID NO: 1481749 - DNA, 15 bp, Homo sapiens
ggagagtggagggaa

SEQ ID NO: 1481750 - DNA, 15 bp, Homo sapiens
tggagagtggaggga

SEQ ID NO: 1481751 - DNA, 15 bp, Homo sapiens
atggagagtggaggg

SEQ ID NO: 1481752 - DNA, 15 bp, Homo sapiens
catggagagtggagg

SEQ ID NO: 1481753 - DNA, 15 bp, Homo sapiens
ccatggagagtggag

SEQ ID NO: 1481754 - DNA, 15 bp, Homo sapiens
accatggagagtgga

SEQ ID NO: 1481755 - DNA, 15 bp, Homo sapiens
taccatggagagtgg

SEQ ID NO: 1481756 - DNA, 15 bp, Homo sapiens
ttaccatggagagtg

SEQ ID NO: 1481757 - DNA, 15 bp, Homo sapiens
gttaccatggagagt

SEQ ID NO: 1481758 - DNA, 15 bp, Homo sapiens
ggttaccatggagag

SEQ ID NO: 1481759 - DNA, 15 bp, Homo sapiens
tggttaccatggaga

SEQ ID NO: 1481760 - DNA, 15 bp, Homo sapiens
ctggttaccatggag

SEQ ID NO: 1481761 - DNA, 15 bp, Homo sapiens
tctggttaccatgga

SEQ ID NO: 1481762 - DNA, 15 bp, Homo sapiens
ttctggttaccatgg

SEQ ID NO: 1481763 - DNA, 15 bp, Homo sapiens
gttctggttaccatg

SEQ ID NO: 1481764 - DNA, 15 bp, Homo sapiens
agttctggttaccat

SEQ ID NO: 1481765 - DNA, 15 bp, Homo sapiens
cagttctggttacca

SEQ ID NO: 1481766 - DNA, 15 bp, Homo sapiens
ccagttctggttacc

SEQ ID NO: 1481767 - DNA, 15 bp, Homo sapiens
tccagttctggttac

SEQ ID NO: 1481768 - DNA, 15 bp, Homo sapiens
ctccagttctggtta

SEQ ID NO: 1481769 - DNA, 15 bp, Homo sapiens
actccagttctggtt

SEQ ID NO: 1481770 - DNA, 15 bp, Homo sapiens
gactccagttctggt

SEQ ID NO: 1481771 - DNA, 15 bp, Homo sapiens
ggactccagttctgg

SEQ ID NO: 1481772 - DNA, 15 bp, Homo sapiens
gggactccagttctg

SEQ ID NO: 1481773 - DNA, 15 bp, Homo sapiens
tgggactccagttct

SEQ ID NO: 1481774 - DNA, 15 bp, Homo sapiens
gtgggactccagttc

SEQ ID NO: 1481775 - DNA, 15 bp, Homo sapiens
ggtgggactccagtt

SEQ ID NO: 1481776 - DNA, 15 bp, Homo sapiens
aggtgggactccagt

SEQ ID NO: 1481777 - DNA, 15 bp, Homo sapiens
gaggtgggactccag

SEQ ID NO: 1481778 - DNA, 15 bp, Homo sapiens
ggaggtgggactcca

SEQ ID NO: 1481779 - DNA, 15 bp, Homo sapiens
gggaggtgggactcc

SEQ ID NO: 1481780 - DNA, 15 bp, Homo sapiens
tgggaggtgggactc

SEQ ID NO: 1481781 - DNA, 15 bp, Homo sapiens
ttgggaggtgggact

SEQ ID NO: 1481782 - DNA, 15 bp, Homo sapiens
tttgggaggtgggac

SEQ ID NO: 1481783 - DNA, 15 bp, Homo sapiens
ttttgggaggtggga

SEQ ID NO: 1481784 - DNA, 15 bp, Homo sapiens
tttttgggaggtggg

SEQ ID NO: 1481785 - DNA, 15 bp, Homo sapiens
ctttttgggaggtgg

SEQ ID NO: 1481786 - DNA, 15 bp, Homo sapiens
gctttttgggaggtg

SEQ ID NO: 1481787 - DNA, 15 bp, Homo sapiens
tgctttttgggaggt

SEQ ID NO: 1481788 - DNA, 15 bp, Homo sapiens
gtgctttttgggagg

SEQ ID NO: 1481789 - DNA, 15 bp, Homo sapiens
ggtgctttttgggag

SEQ ID NO: 1481790 - DNA, 15 bp, Homo sapiens
aggtgctttttggga

SEQ ID NO: 1481791 - DNA, 15 bp, Homo sapiens
caggtgctttttggg

SEQ ID NO: 1481792 - DNA, 15 bp, Homo sapiens
ccaggtgctttttgg

SEQ ID NO: 1481793 - DNA, 15 bp, Homo sapiens
cccaggtgctttttg

SEQ ID NO: 1481794 - DNA, 15 bp, Homo sapiens
gcccaggtgcttttt

SEQ ID NO: 1481795 - DNA, 15 bp, Homo sapiens
tgcccaggtgctttt

SEQ ID NO: 1481796 - DNA, 15 bp, Homo sapiens
atgcccaggtgcttt

SEQ ID NO: 1481797 - DNA, 15 bp, Homo sapiens
catgcccaggtgctt

SEQ ID NO: 1481798 - DNA, 15 bp, Homo sapiens
ccatgcccaggtgct

SEQ ID NO: 1481799 - DNA, 15 bp, Homo sapiens
cccatgcccaggtgc

SEQ ID NO: 1481800 - DNA, 15 bp, Homo sapiens
ccccatgcccaggtg

SEQ ID NO: 1481801 - DNA, 15 bp, Homo sapiens
cccccatgcccaggt

SEQ ID NO: 1481802 - DNA, 15 bp, Homo sapiens
acccccatgcccagg

SEQ ID NO: 1481803 - DNA, 15 bp, Homo sapiens
cacccccatgcccag

SEQ ID NO: 1481804 - DNA, 15 bp, Homo sapiens
ccacccccatgccca

SEQ ID NO: 1481805 - DNA, 15 bp, Homo sapiens
cccacccccatgccc

SEQ ID NO: 1481806 - DNA, 15 bp, Homo sapiens
ccccacccccatgcc

SEQ ID NO: 1481807 - DNA, 15 bp, Homo sapiens
accccacccccatgc

SEQ ID NO: 1481808 - DNA, 15 bp, Homo sapiens
gaccccacccccatg

SEQ ID NO: 1481809 - DNA, 15 bp, Homo sapiens
cgaccccacccccat

SEQ ID NO: 1481810 - DNA, 15 bp, Homo sapiens
acgaccccaccccca

SEQ ID NO: 1481811 - DNA, 15 bp, Homo sapiens
cacgaccccaccccc

SEQ ID NO: 1481812 - DNA, 15 bp, Homo sapiens
acacgaccccacccc

SEQ ID NO: 1481813 - DNA, 15 bp, Homo sapiens
cacacgaccccaccc

SEQ ID NO: 1481814 - DNA, 15 bp, Homo sapiens
tcacacgaccccacc

SEQ ID NO: 1481815 - DNA, 15 bp, Homo sapiens
atcacacgaccccac

SEQ ID NO: 1481816 - DNA, 15 bp, Homo sapiens
catcacacgacccca

SEQ ID NO: 1481817 - DNA, 15 bp, Homo sapiens
tgagcggtcctcgct

SEQ ID NO: 1481818 - DNA, 15 bp, Homo sapiens
ctgagcggtcctcgc

SEQ ID NO: 1481819 - DNA, 15 bp, Homo sapiens
gctgagcggtcctcg

SEQ ID NO: 1481820 - DNA, 15 bp, Homo sapiens
cgctgagcggtcctc

SEQ ID NO: 1481821 - DNA, 15 bp, Homo sapiens
acgctgagcggtcct

SEQ ID NO: 1481822 - DNA, 15 bp, Homo sapiens
cacgctgagcggtcc

SEQ ID NO: 1481823 - DNA, 15 bp, Homo sapiens
ccacgctgagcggtc

SEQ ID NO: 1481824 - DNA, 15 bp, Homo sapiens
accacgctgagcggt

SEQ ID NO: 1481825 - DNA, 15 bp, Homo sapiens
caccacgctgagcgg

SEQ ID NO: 1481826 - DNA, 15 bp, Homo sapiens
gcaccacgctgagcg

SEQ ID NO: 1481827 - DNA, 15 bp, Homo sapiens
cgcaccacgctgagc

SEQ ID NO: 1481828 - DNA, 15 bp, Homo sapiens
gcgcaccacgctgag

SEQ ID NO: 1481829 - DNA, 15 bp, Homo sapiens
agcgcaccacgctga

SEQ ID NO: 1481830 - DNA, 15 bp, Homo sapiens
gagcgcaccacgctg

SEQ ID NO: 1481831 - DNA, 15 bp, Homo sapiens
ggagcgcaccacgct

SEQ ID NO: 1481832 - DNA, 15 bp, Homo sapiens
aggagcgcaccacgc

SEQ ID NO: 1481833 - DNA, 15 bp, Homo sapiens
gaggagcgcaccacg

SEQ ID NO: 1481834 - DNA, 15 bp, Homo sapiens
ggaggagcgcaccac

SEQ ID NO: 1481835 - DNA, 15 bp, Homo sapiens
tggaggagcgcacca

SEQ ID NO: 1481836 - DNA, 15 bp, Homo sapiens
gtggaggagcgcacc

SEQ ID NO: 1481837 - DNA, 15 bp, Homo sapiens
ggtggaggagcgcac

SEQ ID NO: 1481838 - DNA, 15 bp, Homo sapiens
tggtggaggagcgca

SEQ ID NO: 1481839 - DNA, 15 bp, Homo sapiens
gtggtggaggagcgc

SEQ ID NO: 1481840 - DNA, 15 bp, Homo sapiens
ggtggtggaggagcg

SEQ ID NO: 1481841 - DNA, 15 bp, Homo sapiens
aggtggtggaggagc

SEQ ID NO: 1481842 - DNA, 15 bp, Homo sapiens
gaggtggtggaggag

SEQ ID NO: 1481843 - DNA, 15 bp, Homo sapiens
ggaggtggtggagga

SEQ ID NO: 1481844 - DNA, 15 bp, Homo sapiens
tggaggtggtggagg

SEQ ID NO: 1481845 - DNA, 15 bp, Homo sapiens
ttggaggtggtggag

SEQ ID NO: 1481846 - DNA, 15 bp, Homo sapiens
gttggaggtggtgga

SEQ ID NO: 1481847 - DNA, 15 bp, Homo sapiens
tgttggaggtggtgg

SEQ ID NO: 1481848 - DNA, 15 bp, Homo sapiens
gtgttggaggtggtg

SEQ ID NO: 1481849 - DNA, 15 bp, Homo sapiens
ggtgttggaggtggt

SEQ ID NO: 1481850 - DNA, 15 bp, Homo sapiens
gggtgttggaggtgg

SEQ ID NO: 1481851 - DNA, 15 bp, Homo sapiens
tgggtgttggaggtg

SEQ ID NO: 1481852 - DNA, 15 bp, Homo sapiens
ctgggtgttggaggt

SEQ ID NO: 1481853 - DNA, 15 bp, Homo sapiens
gctgggtgttggagg

SEQ ID NO: 1481854 - DNA, 15 bp, Homo sapiens
cgctgggtgttggag

SEQ ID NO: 1481855 - DNA, 15 bp, Homo sapiens
gcgctgggtgttgga

SEQ ID NO: 1481856 - DNA, 15 bp, Homo sapiens
agcgctgggtgttgg

SEQ ID NO: 1481857 - DNA, 15 bp, Homo sapiens
gagcgctgggtgttg

SEQ ID NO: 1481858 - DNA, 15 bp, Homo sapiens
ggagcgctgggtgtt

SEQ ID NO: 1481859 - DNA, 15 bp, Homo sapiens
gggagcgctgggtgt

SEQ ID NO: 1481860 - DNA, 15 bp, Homo sapiens
cgggagcgctgggtg

SEQ ID NO: 1481861 - DNA, 15 bp, Homo sapiens
ccgggagcgctgggt

SEQ ID NO: 1481862 - DNA, 15 bp, Homo sapiens
gccgggagcgctggg

SEQ ID NO: 1481863 - DNA, 15 bp, Homo sapiens
ggccgggagcgctgg

SEQ ID NO: 1481864 - DNA, 15 bp, Homo sapiens
gggccgggagcgctg

SEQ ID NO: 1481865 - DNA, 15 bp, Homo sapiens
ggggccgggagcgct

SEQ ID NO: 1481866 - DNA, 15 bp, Homo sapiens
cggggccgggagcgc

SEQ ID NO: 1481867 - DNA, 15 bp, Homo sapiens
ccggggccgggagcg

SEQ ID NO: 1481868 - DNA, 15 bp, Homo sapiens
cccggggccgggagc

SEQ ID NO: 1481869 - DNA, 15 bp, Homo sapiens
ccccggggccgggag

SEQ ID NO: 1481870 - DNA, 15 bp, Homo sapiens
cccccggggccggga

SEQ ID NO: 1481871 - DNA, 15 bp, Homo sapiens
ccccccggggccggg

SEQ ID NO: 1481872 - DNA, 15 bp, Homo sapiens
gccccccggggccgg

SEQ ID NO: 1481873 - DNA, 15 bp, Homo sapiens
ggccccccggggccg

SEQ ID NO: 1481874 - DNA, 15 bp, Homo sapiens
aggccccccggggcc

SEQ ID NO: 1481875 - DNA, 15 bp, Homo sapiens
gaggccccccggggc

SEQ ID NO: 1481876 - DNA, 15 bp, Homo sapiens
cgaggccccccgggg

SEQ ID NO: 1481877 - DNA, 15 bp, Homo sapiens
ccgaggccccccggg

SEQ ID NO: 1481878 - DNA, 15 bp, Homo sapiens
cccgaggccccccgg

SEQ ID NO: 1481879 - DNA, 15 bp, Homo sapiens
gcccgaggccccccg

SEQ ID NO: 1481880 - DNA, 15 bp, Homo sapiens
tgcccgaggcccccc

SEQ ID NO: 1481881 - DNA, 15 bp, Homo sapiens
gtgcccgaggccccc

SEQ ID NO: 1481882 - DNA, 15 bp, Homo sapiens
cgtgcccgaggcccc

SEQ ID NO: 1481883 - DNA, 15 bp, Homo sapiens
ccgtgcccgaggccc

SEQ ID NO: 1481884 - DNA, 15 bp, Homo sapiens
tccgtgcccgaggcc

SEQ ID NO: 1481885 - DNA, 15 bp, Homo sapiens
ttccgtgcccgaggc

SEQ ID NO: 1481886 - DNA, 15 bp, Homo sapiens
cttccgtgcccgagg

SEQ ID NO: 1481887 - DNA, 15 bp, Homo sapiens
ccttccgtgcccgag

SEQ ID NO: 1481888 - DNA, 15 bp, Homo sapiens
gccttccgtgcccga

SEQ ID NO: 1481889 - DNA, 15 bp, Homo sapiens
cgccttccgtgcccg

SEQ ID NO: 1481890 - DNA, 15 bp, Homo sapiens
gcgccttccgtgccc

SEQ ID NO: 1481891 - DNA, 15 bp, Homo sapiens
ggcgccttccgtgcc

SEQ ID NO: 1481892 - DNA, 15 bp, Homo sapiens
tggcgccttccgtgc

SEQ ID NO: 1481893 - DNA, 15 bp, Homo sapiens
ctggcgccttccgtg

SEQ ID NO: 1481894 - DNA, 15 bp, Homo sapiens
cctggcgccttccgt

SEQ ID NO: 1481895 - DNA, 15 bp, Homo sapiens
ccctggcgccttccg

SEQ ID NO: 1481896 - DNA, 15 bp, Homo sapiens
cccctggcgccttcc

SEQ ID NO: 1481897 - DNA, 15 bp, Homo sapiens
acccctggcgccttc

SEQ ID NO: 1481898 - DNA, 15 bp, Homo sapiens
cacccctggcgcctt

SEQ ID NO: 1481899 - DNA, 15 bp, Homo sapiens
gcacccctggcgcct

SEQ ID NO: 1481900 - DNA, 15 bp, Homo sapiens
cgcacccctggcgcc

SEQ ID NO: 1481901 - DNA, 15 bp, Homo sapiens
ccgcacccctggcgc

SEQ ID NO: 1481902 - DNA, 15 bp, Homo sapiens
cccgcacccctggcg

SEQ ID NO: 1481903 - DNA, 15 bp, Homo sapiens
acccgcacccctggc

SEQ ID NO: 1481904 - DNA, 15 bp, Homo sapiens
aacccgcacccctgg

SEQ ID NO: 1481905 - DNA, 15 bp, Homo sapiens
gaacccgcacccctg

SEQ ID NO: 1481906 - DNA, 15 bp, Homo sapiens
ggaacccgcacccct

SEQ ID NO: 1481907 - DNA, 15 bp, Homo sapiens
aggaacccgcacccc

SEQ ID NO: 1481908 - DNA, 15 bp, Homo sapiens
caggaacccgcaccc

SEQ ID NO: 1481909 - DNA, 15 bp, Homo sapiens
gcaggaacccgcacc

SEQ ID NO: 1481910 - DNA, 15 bp, Homo sapiens
tgcaggaacccgcac

SEQ ID NO: 1481911 - DNA, 15 bp, Homo sapiens
ttgcaggaacccgca

SEQ ID NO: 1481912 - DNA, 15 bp, Homo sapiens
gttgcaggaacccgc

SEQ ID NO: 1481913 - DNA, 15 bp, Homo sapiens
ggttgcaggaacccg

SEQ ID NO: 1481914 - DNA, 15 bp, Homo sapiens
gggttgcaggaaccc

SEQ ID NO: 1481915 - DNA, 15 bp, Homo sapiens
ggggttgcaggaacc

SEQ ID NO: 1481916 - DNA, 15 bp, Homo sapiens
aggggttgcaggaac

SEQ ID NO: 1481917 - DNA, 15 bp, Homo sapiens
aaggggttgcaggaa

SEQ ID NO: 1481918 - DNA, 15 bp, Homo sapiens
caaggggttgcagga

SEQ ID NO: 1481919 - DNA, 15 bp, Homo sapiens
ccaaggggttgcagg

SEQ ID NO: 1481920 - DNA, 15 bp, Homo sapiens
tccaaggggttgcag

SEQ ID NO: 1481921 - DNA, 15 bp, Homo sapiens
ctccaaggggttgca

SEQ ID NO: 1481922 - DNA, 15 bp, Homo sapiens
actccaaggggttgc

SEQ ID NO: 1481923 - DNA, 15 bp, Homo sapiens
gactccaaggggttg

SEQ ID NO: 1481924 - DNA, 15 bp, Homo sapiens
ggactccaaggggtt

SEQ ID NO: 1481925 - DNA, 15 bp, Homo sapiens
cggactccaaggggt

SEQ ID NO: 1481926 - DNA, 15 bp, Homo sapiens
gcggactccaagggg

SEQ ID NO: 1481927 - DNA, 15 bp, Homo sapiens
cgcggactccaaggg

SEQ ID NO: 1481928 - DNA, 15 bp, Homo sapiens
gcgcggactccaagg

SEQ ID NO: 1481929 - DNA, 15 bp, Homo sapiens
ggcgcggactccaag

SEQ ID NO: 1481930 - DNA, 15 bp, Homo sapiens
gggcgcggactccaa

SEQ ID NO: 1481931 - DNA, 15 bp, Homo sapiens
tgggcgcggactcca

SEQ ID NO: 1481932 - DNA, 15 bp, Homo sapiens
ctgggcgcggactcc

SEQ ID NO: 1481933 - DNA, 15 bp, Homo sapiens
tctgggcgcggactc

SEQ ID NO: 1481934 - DNA, 15 bp, Homo sapiens
ctctgggcgcggact

SEQ ID NO: 1481935 - DNA, 15 bp, Homo sapiens
cctctgggcgcggac

SEQ ID NO: 1481936 - DNA, 15 bp, Homo sapiens
gcctctgggcgcgga

SEQ ID NO: 1481937 - DNA, 15 bp, Homo sapiens
agcctctgggcgcgg

SEQ ID NO: 1481938 - DNA, 15 bp, Homo sapiens
cagcctctgggcgcg

SEQ ID NO: 1481939 - DNA, 15 bp, Homo sapiens
tcagcctctgggcgc

SEQ ID NO: 1481940 - DNA, 15 bp, Homo sapiens
ctcagcctctgggcg

SEQ ID NO: 1481941 - DNA, 15 bp, Homo sapiens
cctcagcctctgggc

SEQ ID NO: 1481942 - DNA, 15 bp, Homo sapiens
gcctcagcctctggg

SEQ ID NO: 1481943 - DNA, 15 bp, Homo sapiens
tgcctcagcctctgg

SEQ ID NO: 1481944 - DNA, 15 bp, Homo sapiens
gtgcctcagcctctg

SEQ ID NO: 1481945 - DNA, 15 bp, Homo sapiens
ggtgcctcagcctct

SEQ ID NO: 1481946 - DNA, 15 bp, Homo sapiens
tggtgcctcagcctc

SEQ ID NO: 1481947 - DNA, 15 bp, Homo sapiens
gtggtgcctcagcct

SEQ ID NO: 1481948 - DNA, 15 bp, Homo sapiens
tgtggtgcctcagcc

SEQ ID NO: 1481949 - DNA, 15 bp, Homo sapiens
ctgtggtgcctcagc

SEQ ID NO: 1481950 - DNA, 15 bp, Homo sapiens
gctgtggtgcctcag

SEQ ID NO: 1481951 - DNA, 15 bp, Homo sapiens
ggctgtggtgcctca

SEQ ID NO: 1481952 - DNA, 15 bp, Homo sapiens
aggctgtggtgcctc

SEQ ID NO: 1481953 - DNA, 15 bp, Homo sapiens
aaggctgtggtgcct

SEQ ID NO: 1481954 - DNA, 15 bp, Homo sapiens
taaggctgtggtgcc

SEQ ID NO: 1481955 - DNA, 15 bp, Homo sapiens
ctaaggctgtggtgc

SEQ ID NO: 1481956 - DNA, 15 bp, Homo sapiens
gctaaggctgtggtg

SEQ ID NO: 1481957 - DNA, 15 bp, Homo sapiens
ggctaaggctgtggt

SEQ ID NO: 1481958 - DNA, 15 bp, Homo sapiens
gggctaaggctgtgg

SEQ ID NO: 1481959 - DNA, 15 bp, Homo sapiens
ggggctaaggctgtg

SEQ ID NO: 1481960 - DNA, 15 bp, Homo sapiens
cggggctaaggctgt

SEQ ID NO: 1481961 - DNA, 15 bp, Homo sapiens
ccggggctaaggctg

SEQ ID NO: 1481962 - DNA, 15 bp, Homo sapiens
cccggggctaaggct

SEQ ID NO: 1481963 - DNA, 15 bp, Homo sapiens
gcccggggctaaggc

SEQ ID NO: 1481964 - DNA, 15 bp, Homo sapiens
ggcccggggctaagg

SEQ ID NO: 1481965 - DNA, 15 bp, Homo sapiens
cggcccggggctaag

SEQ ID NO: 1481966 - DNA, 15 bp, Homo sapiens
gcggcccggggctaa

SEQ ID NO: 1481967 - DNA, 15 bp, Homo sapiens
cgcggcccggggcta

SEQ ID NO: 1481968 - DNA, 15 bp, Homo sapiens
gcgcggcccggggct

SEQ ID NO: 1481969 - DNA, 15 bp, Homo sapiens
tgcgcggcccggggc

SEQ ID NO: 1481970 - DNA, 15 bp, Homo sapiens
ctgcgcggcccgggg

SEQ ID NO: 1481971 - DNA, 15 bp, Homo sapiens
cctgcgcggcccggg

SEQ ID NO: 1481972 - DNA, 15 bp, Homo sapiens
gcctgcgcggcccgg

SEQ ID NO: 1481973 - DNA, 15 bp, Homo sapiens
agcctgcgcggcccg

SEQ ID NO: 1481974 - DNA, 15 bp, Homo sapiens
gagcctgcgcggccc

SEQ ID NO: 1481975 - DNA, 15 bp, Homo sapiens
agagcctgcgcggcc

SEQ ID NO: 1481976 - DNA, 15 bp, Homo sapiens
tagagcctgcgcggc

SEQ ID NO: 1481977 - DNA, 15 bp, Homo sapiens
gtagagcctgcgcgg

SEQ ID NO: 1481978 - DNA, 15 bp, Homo sapiens
cgtagagcctgcgcg

SEQ ID NO: 1481979 - DNA, 15 bp, Homo sapiens
tcgtagagcctgcgc

SEQ ID NO: 1481980 - DNA, 15 bp, Homo sapiens
gtcgtagagcctgcg

SEQ ID NO: 1481981 - DNA, 15 bp, Homo sapiens
tgtcgtagagcctgc

SEQ ID NO: 1481982 - DNA, 15 bp, Homo sapiens
ttgtcgtagagcctg

SEQ ID NO: 1481983 - DNA, 15 bp, Homo sapiens
attgtcgtagagcct

SEQ ID NO: 1481984 - DNA, 15 bp, Homo sapiens
cattgtcgtagagcc

SEQ ID NO: 1481985 - DNA, 15 bp, Homo sapiens
ccattgtcgtagagc

SEQ ID NO: 1481986 - DNA, 15 bp, Homo sapiens
cccattgtcgtagag

SEQ ID NO: 1481987 - DNA, 15 bp, Homo sapiens
acccattgtcgtaga

SEQ ID NO: 1481988 - DNA, 15 bp, Homo sapiens
tacccattgtcgtag

SEQ ID NO: 1481989 - DNA, 15 bp, Homo sapiens
gtacccattgtcgta

SEQ ID NO: 1481990 - DNA, 15 bp, Homo sapiens
ggtacccattgtcgt

SEQ ID NO: 1481991 - DNA, 15 bp, Homo sapiens
tggtacccattgtcg

SEQ ID NO: 1481992 - DNA, 15 bp, Homo sapiens
ctggtacccattgtc

SEQ ID NO: 1481993 - DNA, 15 bp, Homo sapiens
cctggtacccattgt

SEQ ID NO: 1481994 - DNA, 15 bp, Homo sapiens
ccctggtacccattg

SEQ ID NO: 1481995 - DNA, 15 bp, Homo sapiens
cccctggtacccatt

SEQ ID NO: 1481996 - DNA, 15 bp, Homo sapiens
acccctggtacccat

SEQ ID NO: 1481997 - DNA, 15 bp, Homo sapiens
cacccctggtaccca

SEQ ID NO: 1481998 - DNA, 15 bp, Homo sapiens
acacccctggtaccc

SEQ ID NO: 1481999 - DNA, 15 bp, Homo sapiens
cacacccctggtacc

SEQ ID NO: 1482000 - DNA, 15 bp, Homo sapiens
gcacacccctggtac

SEQ ID NO: 1482001 - DNA, 15 bp, Homo sapiens
ggcacacccctggta

SEQ ID NO: 1482002 - DNA, 15 bp, Homo sapiens
gggcacacccctggt

SEQ ID NO: 1482003 - DNA, 15 bp, Homo sapiens
cgggcacacccctgg

SEQ ID NO: 1482004 - DNA, 15 bp, Homo sapiens
gcgggcacacccctg

SEQ ID NO: 1482005 - DNA, 15 bp, Homo sapiens
ggcgggcacacccct

SEQ ID NO: 1482006 - DNA, 15 bp, Homo sapiens
aggcgggcacacccc

SEQ ID NO: 1482007 - DNA, 15 bp, Homo sapiens
gaggcgggcacaccc

SEQ ID NO: 1482008 - DNA, 15 bp, Homo sapiens
cgaggcgggcacacc

SEQ ID NO: 1482009 - DNA, 15 bp, Homo sapiens
gcgaggcgggcacac

SEQ ID NO: 1482010 - DNA, 15 bp, Homo sapiens
ggcgaggcgggcaca

SEQ ID NO: 1482011 - DNA, 15 bp, Homo sapiens
tggcgaggcgggcac

SEQ ID NO: 1482012 - DNA, 15 bp, Homo sapiens
ctggcgaggcgggca

SEQ ID NO: 1482013 - DNA, 15 bp, Homo sapiens
tctggcgaggcgggc

SEQ ID NO: 1482014 - DNA, 15 bp, Homo sapiens
ctctggcgaggcggg

SEQ ID NO: 1482015 - DNA, 15 bp, Homo sapiens
gctctggcgaggcgg

SEQ ID NO: 1482016 - DNA, 15 bp, Homo sapiens
agctctggcgaggcg

SEQ ID NO: 1482017 - DNA, 15 bp, Homo sapiens
cagctctggcgaggc

SEQ ID NO: 1482018 - DNA, 15 bp, Homo sapiens
gcagctctggcgagg

SEQ ID NO: 1482019 - DNA, 15 bp, Homo sapiens
agcagctctggcgag

SEQ ID NO: 1482020 - DNA, 15 bp, Homo sapiens
cagcagctctggcga

SEQ ID NO: 1482021 - DNA, 15 bp, Homo sapiens
gcagcagctctggcg

SEQ ID NO: 1482022 - DNA, 15 bp, Homo sapiens
cgcagcagctctggc

SEQ ID NO: 1482023 - DNA, 15 bp, Homo sapiens
gcgcagcagctctgg

SEQ ID NO: 1482024 - DNA, 15 bp, Homo sapiens
ggcgcagcagctctg

SEQ ID NO: 1482025 - DNA, 15 bp, Homo sapiens
cggcgcagcagctct

SEQ ID NO: 1482026 - DNA, 15 bp, Homo sapiens
ccggcgcagcagctc

SEQ ID NO: 1482027 - DNA, 15 bp, Homo sapiens
gccggcgcagcagct

SEQ ID NO: 1482028 - DNA, 15 bp, Homo sapiens
ggccggcgcagcagc

SEQ ID NO: 1482029 - DNA, 15 bp, Homo sapiens
aggccggcgcagcag

SEQ ID NO: 1482030 - DNA, 15 bp, Homo sapiens
caggccggcgcagca

SEQ ID NO: 1482031 - DNA, 15 bp, Homo sapiens
acaggccggcgcagc

SEQ ID NO: 1482032 - DNA, 15 bp, Homo sapiens
gacaggccggcgcag

SEQ ID NO: 1482033 - DNA, 15 bp, Homo sapiens
agacaggccggcgca

SEQ ID NO: 1482034 - DNA, 15 bp, Homo sapiens
gagacaggccggcgc

SEQ ID NO: 1482035 - DNA, 15 bp, Homo sapiens
cgagacaggccggcg

SEQ ID NO: 1482036 - DNA, 15 bp, Homo sapiens
acgagacaggccggc

SEQ ID NO: 1482037 - DNA, 15 bp, Homo sapiens
cacgagacaggccgg

SEQ ID NO: 1482038 - DNA, 15 bp, Homo sapiens
acacgagacaggccg

SEQ ID NO: 1482039 - DNA, 15 bp, Homo sapiens
aacacgagacaggcc

SEQ ID NO: 1482040 - DNA, 15 bp, Homo sapiens
gaacacgagacaggc

SEQ ID NO: 1482041 - DNA, 15 bp, Homo sapiens
ggaacacgagacagg

SEQ ID NO: 1482042 - DNA, 15 bp, Homo sapiens
aggaacacgagacag

SEQ ID NO: 1482043 - DNA, 15 bp, Homo sapiens
caggaacacgagaca

SEQ ID NO: 1482044 - DNA, 15 bp, Homo sapiens
gcaggaacacgagac

SEQ ID NO: 1482045 - DNA, 15 bp, Homo sapiens
tgcaggaacacgaga

SEQ ID NO: 1482046 - DNA, 15 bp, Homo sapiens
gtgcaggaacacgag

SEQ ID NO: 1482047 - DNA, 15 bp, Homo sapiens
ggtgcaggaacacga

SEQ ID NO: 1482048 - DNA, 15 bp, Homo sapiens
cggtgcaggaacacg

SEQ ID NO: 1482049 - DNA, 15 bp, Homo sapiens
ccggtgcaggaacac

SEQ ID NO: 1482050 - DNA, 15 bp, Homo sapiens
cccggtgcaggaaca

SEQ ID NO: 1482051 - DNA, 15 bp, Homo sapiens
gcccggtgcaggaac

SEQ ID NO: 1482052 - DNA, 15 bp, Homo sapiens
agcccggtgcaggaa

SEQ ID NO: 1482053 - DNA, 15 bp, Homo sapiens
gagcccggtgcagga

SEQ ID NO: 1482054 - DNA, 15 bp, Homo sapiens
tgagcccggtgcagg

SEQ ID NO: 1482055 - DNA, 15 bp, Homo sapiens
ctgagcccggtgcag

SEQ ID NO: 1482056 - DNA, 15 bp, Homo sapiens
gctgagcccggtgca

SEQ ID NO: 1482057 - DNA, 15 bp, Homo sapiens
cgctgagcccggtgc

SEQ ID NO: 1482058 - DNA, 15 bp, Homo sapiens
gcgctgagcccggtg

SEQ ID NO: 1482059 - DNA, 15 bp, Homo sapiens
ggcgctgagcccggt

SEQ ID NO: 1482060 - DNA, 15 bp, Homo sapiens
cggcgctgagcccgg

SEQ ID NO: 1482061 - DNA, 15 bp, Homo sapiens
gcggcgctgagcccg

SEQ ID NO: 1482062 - DNA, 15 bp, Homo sapiens
ggcggcgctgagccc

SEQ ID NO: 1482063 - DNA, 15 bp, Homo sapiens
aggcggcgctgagcc

SEQ ID NO: 1482064 - DNA, 15 bp, Homo sapiens
aaggcggcgctgagc

SEQ ID NO: 1482065 - DNA, 15 bp, Homo sapiens
caaggcggcgctgag

SEQ ID NO: 1482066 - DNA, 15 bp, Homo sapiens
ccaaggcggcgctga

SEQ ID NO: 1482067 - DNA, 15 bp, Homo sapiens
gccaaggcggcgctg

SEQ ID NO: 1482068 - DNA, 15 bp, Homo sapiens
ggccaaggcggcgct

SEQ ID NO: 1482069 - DNA, 15 bp, Homo sapiens
tggccaaggcggcgc

SEQ ID NO: 1482070 - DNA, 15 bp, Homo sapiens
gtggccaaggcggcg

SEQ ID NO: 1482071 - DNA, 15 bp, Homo sapiens
tgtggccaaggcggc

SEQ ID NO: 1482072 - DNA, 15 bp, Homo sapiens
ctgtggccaaggcgg

SEQ ID NO: 1482073 - DNA, 15 bp, Homo sapiens
gctgtggccaaggcg

SEQ ID NO: 1482074 - DNA, 15 bp, Homo sapiens
ggctgtggccaaggc

SEQ ID NO: 1482075 - DNA, 15 bp, Homo sapiens
gggctgtggccaagg

SEQ ID NO: 1482076 - DNA, 15 bp, Homo sapiens
agggctgtggccaag

SEQ ID NO: 1482077 - DNA, 15 bp, Homo sapiens
cagggctgtggccaa

SEQ ID NO: 1482078 - DNA, 15 bp, Homo sapiens
ccagggctgtggcca

SEQ ID NO: 1482079 - DNA, 15 bp, Homo sapiens
gccagggctgtggcc

SEQ ID NO: 1482080 - DNA, 15 bp, Homo sapiens
ggccagggctgtggc

SEQ ID NO: 1482081 - DNA, 15 bp, Homo sapiens
tggccagggctgtgg

SEQ ID NO: 1482082 - DNA, 15 bp, Homo sapiens
atggccagggctgtg

SEQ ID NO: 1482083 - DNA, 15 bp, Homo sapiens
gatggccagggctgt

SEQ ID NO: 1482084 - DNA, 15 bp, Homo sapiens
ggatggccagggctg

SEQ ID NO: 1482085 - DNA, 15 bp, Homo sapiens
gggatggccagggct

SEQ ID NO: 1482086 - DNA, 15 bp, Homo sapiens
cgggatggccagggc

SEQ ID NO: 1482087 - DNA, 15 bp, Homo sapiens
gcgggatggccaggg

SEQ ID NO: 1482088 - DNA, 15 bp, Homo sapiens
ggcgggatggccagg

SEQ ID NO: 1482089 - DNA, 15 bp, Homo sapiens
tggcgggatggccag

SEQ ID NO: 1482090 - DNA, 15 bp, Homo sapiens
ctggcgggatggcca

SEQ ID NO: 1482091 - DNA, 15 bp, Homo sapiens
actggcgggatggcc

SEQ ID NO: 1482092 - DNA, 15 bp, Homo sapiens
cactggcgggatggc

SEQ ID NO: 1482093 - DNA, 15 bp, Homo sapiens
gcactggcgggatgg

SEQ ID NO: 1482094 - DNA, 15 bp, Homo sapiens
ggcactggcgggatg

SEQ ID NO: 1482095 - DNA, 15 bp, Homo sapiens
tggcactggcgggat

SEQ ID NO: 1482096 - DNA, 15 bp, Homo sapiens
atggcactggcggga

SEQ ID NO: 1482097 - DNA, 15 bp, Homo sapiens
gatggcactggcggg

SEQ ID NO: 1482098 - DNA, 15 bp, Homo sapiens
ggatggcactggcgg

SEQ ID NO: 1482099 - DNA, 15 bp, Homo sapiens
aggatggcactggcg

SEQ ID NO: 1482100 - DNA, 15 bp, Homo sapiens
gaggatggcactggc

SEQ ID NO: 1482101 - DNA, 15 bp, Homo sapiens
ggaggatggcactgg

SEQ ID NO: 1482102 - DNA, 15 bp, Homo sapiens
cggaggatggcactg

SEQ ID NO: 1482103 - DNA, 15 bp, Homo sapiens
acggaggatggcact

SEQ ID NO: 1482104 - DNA, 15 bp, Homo sapiens
gacggaggatggcac

SEQ ID NO: 1482105 - DNA, 15 bp, Homo sapiens
agacggaggatggca

SEQ ID NO: 1482106 - DNA, 15 bp, Homo sapiens
cagacggaggatggc

SEQ ID NO: 1482107 - DNA, 15 bp, Homo sapiens
gcagacggaggatgg

SEQ ID NO: 1482108 - DNA, 15 bp, Homo sapiens
tgcagacggaggatg

SEQ ID NO: 1482109 - DNA, 15 bp, Homo sapiens
gtgcagacggaggat

SEQ ID NO: 1482110 - DNA, 15 bp, Homo sapiens
cgtgcagacggagga

SEQ ID NO: 1482111 - DNA, 15 bp, Homo sapiens
gcgtgcagacggagg

SEQ ID NO: 1482112 - DNA, 15 bp, Homo sapiens
agcgtgcagacggag

SEQ ID NO: 1482113 - DNA, 15 bp, Homo sapiens
gagcgtgcagacgga

SEQ ID NO: 1482114 - DNA, 15 bp, Homo sapiens
agagcgtgcagacgg

SEQ ID NO: 1482115 - DNA, 15 bp, Homo sapiens
cagagcgtgcagacg

SEQ ID NO: 1482116 - DNA, 15 bp, Homo sapiens
tcagagcgtgcagac

SEQ ID NO: 1482117 - DNA, 15 bp, Homo sapiens
atcagagcgtgcaga

SEQ ID NO: 1482118 - DNA, 15 bp, Homo sapiens
catcagagcgtgcag

SEQ ID NO: 1482119 - DNA, 15 bp, Homo sapiens
gcatcagagcgtgca

SEQ ID NO: 1482120 - DNA, 15 bp, Homo sapiens
ggcatcagagcgtgc

SEQ ID NO: 1482121 - DNA, 15 bp, Homo sapiens
cggcatcagagcgtg

SEQ ID NO: 1482122 - DNA, 15 bp, Homo sapiens
gcggcatcagagcgt

SEQ ID NO: 1482123 - DNA, 15 bp, Homo sapiens
cgcggcatcagagcg

SEQ ID NO: 1482124 - DNA, 15 bp, Homo sapiens
acgcggcatcagagc

SEQ ID NO: 1482125 - DNA, 15 bp, Homo sapiens
cacgcggcatcagag

SEQ ID NO: 1482126 - DNA, 15 bp, Homo sapiens
gcacgcggcatcaga

SEQ ID NO: 1482127 - DNA, 15 bp, Homo sapiens
tgcacgcggcatcag

SEQ ID NO: 1482128 - DNA, 15 bp, Homo sapiens
ctgcacgcggcatca

SEQ ID NO: 1482129 - DNA, 15 bp, Homo sapiens
gctgcacgcggcatc

SEQ ID NO: 1482130 - DNA, 15 bp, Homo sapiens
ggctgcacgcggcat

SEQ ID NO: 1482131 - DNA, 15 bp, Homo sapiens
cggctgcacgcggca

SEQ ID NO: 1482132 - DNA, 15 bp, Homo sapiens
tcggctgcacgcggc

SEQ ID NO: 1482133 - DNA, 15 bp, Homo sapiens
gtcggctgcacgcgg

SEQ ID NO: 1482134 - DNA, 15 bp, Homo sapiens
cgtcggctgcacgcg

SEQ ID NO: 1482135 - DNA, 15 bp, Homo sapiens
acgtcggctgcacgc

SEQ ID NO: 1482136 - DNA, 15 bp, Homo sapiens
gacgtcggctgcacg

SEQ ID NO: 1482137 - DNA, 15 bp, Homo sapiens
ggacgtcggctgcac

SEQ ID NO: 1482138 - DNA, 15 bp, Homo sapiens
gggacgtcggctgca

SEQ ID NO: 1482139 - DNA, 15 bp, Homo sapiens
cgggacgtcggctgc

SEQ ID NO: 1482140 - DNA, 15 bp, Homo sapiens
gcgggacgtcggctg

SEQ ID NO: 1482141 - DNA, 15 bp, Homo sapiens
agcgggacgtcggct

SEQ ID NO: 1482142 - DNA, 15 bp, Homo sapiens
gagcgggacgtcggc

SEQ ID NO: 1482143 - DNA, 15 bp, Homo sapiens
ggagcgggacgtcgg

SEQ ID NO: 1482144 - DNA, 15 bp, Homo sapiens
tggagcgggacgtcg

SEQ ID NO: 1482145 - DNA, 15 bp, Homo sapiens
ctggagcgggacgtc

SEQ ID NO: 1482146 - DNA, 15 bp, Homo sapiens
cctggagcgggacgt

SEQ ID NO: 1482147 - DNA, 15 bp, Homo sapiens
ccctggagcgggacg

SEQ ID NO: 1482148 - DNA, 15 bp, Homo sapiens
accctggagcgggac

SEQ ID NO: 1482149 - DNA, 15 bp, Homo sapiens
gaccctggagcggga

SEQ ID NO: 1482150 - DNA, 15 bp, Homo sapiens
ggaccctggagcggg

SEQ ID NO: 1482151 - DNA, 15 bp, Homo sapiens
cggaccctggagcgg

SEQ ID NO: 1482152 - DNA, 15 bp, Homo sapiens
ccggaccctggagcg

SEQ ID NO: 1482153 - DNA, 15 bp, Homo sapiens
gccggaccctggagc

SEQ ID NO: 1482154 - DNA, 15 bp, Homo sapiens
ggccggaccctggag

SEQ ID NO: 1482155 - DNA, 15 bp, Homo sapiens
tggccggaccctgga

SEQ ID NO: 1482156 - DNA, 15 bp, Homo sapiens
gtggccggaccctgg

SEQ ID NO: 1482157 - DNA, 15 bp, Homo sapiens
ggtggccggaccctg

SEQ ID NO: 1482158 - DNA, 15 bp, Homo sapiens
cggtggccggaccct

SEQ ID NO: 1482159 - DNA, 15 bp, Homo sapiens
ccggtggccggaccc

SEQ ID NO: 1482160 - DNA, 15 bp, Homo sapiens
cccggtggccggacc

SEQ ID NO: 1482161 - DNA, 15 bp, Homo sapiens
ccccggtggccggac

SEQ ID NO: 1482162 - DNA, 15 bp, Homo sapiens
cccccggtggccgga

SEQ ID NO: 1482163 - DNA, 15 bp, Homo sapiens
acccccggtggccgg

SEQ ID NO: 1482164 - DNA, 15 bp, Homo sapiens
gacccccggtggccg

SEQ ID NO: 1482165 - DNA, 15 bp, Homo sapiens
cgacccccggtggcc

SEQ ID NO: 1482166 - DNA, 15 bp, Homo sapiens
acgacccccggtggc

SEQ ID NO: 1482167 - DNA, 15 bp, Homo sapiens
gacgacccccggtgg

SEQ ID NO: 1482168 - DNA, 15 bp, Homo sapiens
cgacgacccccggtg

SEQ ID NO: 1482169 - DNA, 15 bp, Homo sapiens
gcgacgacccccggt

SEQ ID NO: 1482170 - DNA, 15 bp, Homo sapiens
cgcgacgacccccgg

SEQ ID NO: 1482171 - DNA, 15 bp, Homo sapiens
gcgcgacgacccccg

SEQ ID NO: 1482172 - DNA, 15 bp, Homo sapiens
cgcgcgacgaccccc

SEQ ID NO: 1482173 - DNA, 15 bp, Homo sapiens
ccgcgcgacgacccc

SEQ ID NO: 1482174 - DNA, 15 bp, Homo sapiens
cccgcgcgacgaccc

SEQ ID NO: 1482175 - DNA, 15 bp, Homo sapiens
ccccgcgcgacgacc

SEQ ID NO: 1482176 - DNA, 15 bp, Homo sapiens
accccgcgcgacgac

SEQ ID NO: 1482177 - DNA, 15 bp, Homo sapiens
caccccgcgcgacga

SEQ ID NO: 1482178 - DNA, 15 bp, Homo sapiens
ccaccccgcgcgacg

SEQ ID NO: 1482179 - DNA, 15 bp, Homo sapiens
cccaccccgcgcgac

SEQ ID NO: 1482180 - DNA, 15 bp, Homo sapiens
ccccaccccgcgcga

SEQ ID NO: 1482181 - DNA, 15 bp, Homo sapiens
accccaccccgcgcg

SEQ ID NO: 1482182 - DNA, 15 bp, Homo sapiens
caccccaccccgcgc

SEQ ID NO: 1482183 - DNA, 15 bp, Homo sapiens
gcaccccaccccgcg

SEQ ID NO: 1482184 - DNA, 15 bp, Homo sapiens
tgcaccccaccccgc

SEQ ID NO: 1482185 - DNA, 15 bp, Homo sapiens
gtgcaccccaccccg

SEQ ID NO: 1482186 - DNA, 15 bp, Homo sapiens
cgtgcaccccacccc

SEQ ID NO: 1482187 - DNA, 15 bp, Homo sapiens
gcgtgcaccccaccc

SEQ ID NO: 1482188 - DNA, 15 bp, Homo sapiens
ggcgtgcaccccacc

SEQ ID NO: 1482189 - DNA, 15 bp, Homo sapiens
aggcgtgcaccccac

SEQ ID NO: 1482190 - DNA, 15 bp, Homo sapiens
gaggcgtgcacccca

SEQ ID NO: 1482191 - DNA, 15 bp, Homo sapiens
cgaggcgtgcacccc

SEQ ID NO: 1482192 - DNA, 15 bp, Homo sapiens
ccgaggcgtgcaccc

SEQ ID NO: 1482193 - DNA, 15 bp, Homo sapiens
gccgaggcgtgcacc

SEQ ID NO: 1482194 - DNA, 15 bp, Homo sapiens
cgccgaggcgtgcac

SEQ ID NO: 1482195 - DNA, 15 bp, Homo sapiens
gcgccgaggcgtgca

SEQ ID NO: 1482196 - DNA, 15 bp, Homo sapiens
ggcgccgaggcgtgc

SEQ ID NO: 1482197 - DNA, 15 bp, Homo sapiens
gggcgccgaggcgtg

SEQ ID NO: 1482198 - DNA, 15 bp, Homo sapiens
ggggcgccgaggcgt

SEQ ID NO: 1482199 - DNA, 15 bp, Homo sapiens
gggggcgccgaggcg

SEQ ID NO: 1482200 - DNA, 15 bp, Homo sapiens
ggggggcgccgaggc

SEQ ID NO: 1482201 - DNA, 15 bp, Homo sapiens
cggggggcgccgagg

SEQ ID NO: 1482202 - DNA, 15 bp, Homo sapiens
ccggggggcgccgag

SEQ ID NO: 1482203 - DNA, 15 bp, Homo sapiens
cccggggggcgccga

SEQ ID NO: 1482204 - DNA, 15 bp, Homo sapiens
ccccggggggcgccg

SEQ ID NO: 1482205 - DNA, 15 bp, Homo sapiens
tccccggggggcgcc

SEQ ID NO: 1482206 - DNA, 15 bp, Homo sapiens
atccccggggggcgc

SEQ ID NO: 1482207 - DNA, 15 bp, Homo sapiens
aatccccggggggcg

SEQ ID NO: 1482208 - DNA, 15 bp, Homo sapiens
gaatccccggggggc

SEQ ID NO: 1482209 - DNA, 15 bp, Homo sapiens
ggaatccccgggggg

SEQ ID NO: 1482210 - DNA, 15 bp, Homo sapiens
aggaatccccggggg

SEQ ID NO: 1482211 - DNA, 15 bp, Homo sapiens
aaggaatccccgggg

SEQ ID NO: 1482212 - DNA, 15 bp, Homo sapiens
gaaggaatccccggg

SEQ ID NO: 1482213 - DNA, 15 bp, Homo sapiens
agaaggaatccccgg

SEQ ID NO: 1482214 - DNA, 15 bp, Homo sapiens
gagaaggaatccccg

SEQ ID NO: 1482215 - DNA, 15 bp, Homo sapiens
ggagaaggaatcccc

SEQ ID NO: 1482216 - DNA, 15 bp, Homo sapiens
aggagaaggaatccc

SEQ ID NO: 1482217 - DNA, 15 bp, Homo sapiens
aaggagaaggaatcc

SEQ ID NO: 1482218 - DNA, 15 bp, Homo sapiens
caaggagaaggaatc

SEQ ID NO: 1482219 - DNA, 15 bp, Homo sapiens
gcaaggagaaggaat

SEQ ID NO: 1482220 - DNA, 15 bp, Homo sapiens
agcaaggagaaggaa

SEQ ID NO: 1482221 - DNA, 15 bp, Homo sapiens
gagcaaggagaagga

SEQ ID NO: 1482222 - DNA, 15 bp, Homo sapiens
cgagcaaggagaagg

SEQ ID NO: 1482223 - DNA, 15 bp, Homo sapiens
tcgagcaaggagaag

SEQ ID NO: 1482224 - DNA, 15 bp, Homo sapiens
gtcgagcaaggagaa

SEQ ID NO: 1482225 - DNA, 15 bp, Homo sapiens
tgtcgagcaaggaga

SEQ ID NO: 1482226 - DNA, 15 bp, Homo sapiens
gtgtcgagcaaggag

SEQ ID NO: 1482227 - DNA, 15 bp, Homo sapiens
agtgtcgagcaagga

SEQ ID NO: 1482228 - DNA, 15 bp, Homo sapiens
cagtgtcgagcaagg

SEQ ID NO: 1482229 - DNA, 15 bp, Homo sapiens
ccagtgtcgagcaag

SEQ ID NO: 1482230 - DNA, 15 bp, Homo sapiens
accagtgtcgagcaa

SEQ ID NO: 1482231 - DNA, 15 bp, Homo sapiens
caccagtgtcgagca

SEQ ID NO: 1482232 - DNA, 15 bp, Homo sapiens
ccaccagtgtcgagc

SEQ ID NO: 1482233 - DNA, 15 bp, Homo sapiens
gccaccagtgtcgag

SEQ ID NO: 1482234 - DNA, 15 bp, Homo sapiens
ggccaccagtgtcga

SEQ ID NO: 1482235 - DNA, 15 bp, Homo sapiens
aggccaccagtgtcg

SEQ ID NO: 1482236 - DNA, 15 bp, Homo sapiens
caggccaccagtgtc

SEQ ID NO: 1482237 - DNA, 15 bp, Homo sapiens
ccaggccaccagtgt

SEQ ID NO: 1482238 - DNA, 15 bp, Homo sapiens
tccaggccaccagtg

SEQ ID NO: 1482239 - DNA, 15 bp, Homo sapiens
ctccaggccaccagt

SEQ ID NO: 1482240 - DNA, 15 bp, Homo sapiens
cctccaggccaccag

SEQ ID NO: 1482241 - DNA, 15 bp, Homo sapiens
gcctccaggccacca

SEQ ID NO: 1482242 - DNA, 15 bp, Homo sapiens
tgcctccaggccacc

SEQ ID NO: 1482243 - DNA, 15 bp, Homo sapiens
gtgcctccaggccac

SEQ ID NO: 1482244 - DNA, 15 bp, Homo sapiens
ggtgcctccaggcca

SEQ ID NO: 1482245 - DNA, 15 bp, Homo sapiens
gggtgcctccaggcc

SEQ ID NO: 1482246 - DNA, 15 bp, Homo sapiens
agggtgcctccaggc

SEQ ID NO: 1482247 - DNA, 15 bp, Homo sapiens
gagggtgcctccagg

SEQ ID NO: 1482248 - DNA, 15 bp, Homo sapiens
cgagggtgcctccag

SEQ ID NO: 1482249 - DNA, 15 bp, Homo sapiens
ccgagggtgcctcca

SEQ ID NO: 1482250 - DNA, 15 bp, Homo sapiens
cccgagggtgcctcc

SEQ ID NO: 1482251 - DNA, 15 bp, Homo sapiens
gcccgagggtgcctc

SEQ ID NO: 1482252 - DNA, 15 bp, Homo sapiens
tgcccgagggtgcct

SEQ ID NO: 1482253 - DNA, 15 bp, Homo sapiens
ctgcccgagggtgcc

SEQ ID NO: 1482254 - DNA, 15 bp, Homo sapiens
gctgcccgagggtgc

SEQ ID NO: 1482255 - DNA, 15 bp, Homo sapiens
tgctgcccgagggtg

SEQ ID NO: 1482256 - DNA, 15 bp, Homo sapiens
ttgctgcccgagggt

SEQ ID NO: 1482257 - DNA, 15 bp, Homo sapiens
gttgctgcccgaggg

SEQ ID NO: 1482258 - DNA, 15 bp, Homo sapiens
cgttgctgcccgagg

SEQ ID NO: 1482259 - DNA, 15 bp, Homo sapiens
ccgttgctgcccgag

SEQ ID NO: 1482260 - DNA, 15 bp, Homo sapiens
cccgttgctgcccga

SEQ ID NO: 1482261 - DNA, 15 bp, Homo sapiens
acccgttgctgcccg

SEQ ID NO: 1482262 - DNA, 15 bp, Homo sapiens
gacccgttgctgccc

SEQ ID NO: 1482263 - DNA, 15 bp, Homo sapiens
ggacccgttgctgcc

SEQ ID NO: 1482264 - DNA, 15 bp, Homo sapiens
cggacccgttgctgc

SEQ ID NO: 1482265 - DNA, 15 bp, Homo sapiens
gcggacccgttgctg

SEQ ID NO: 1482266 - DNA, 15 bp, Homo sapiens
cgcggacccgttgct

SEQ ID NO: 1482267 - DNA, 15 bp, Homo sapiens
gcgcggacccgttgc

SEQ ID NO: 1482268 - DNA, 15 bp, Homo sapiens
ggcgcggacccgttg

SEQ ID NO: 1482269 - DNA, 15 bp, Homo sapiens
gggcgcggacccgtt

SEQ ID NO: 1482270 - DNA, 15 bp, Homo sapiens
tgggcgcggacccgt

SEQ ID NO: 1482271 - DNA, 15 bp, Homo sapiens
ctgggcgcggacccg

SEQ ID NO: 1482272 - DNA, 15 bp, Homo sapiens
cctgggcgcggaccc

SEQ ID NO: 1482273 - DNA, 15 bp, Homo sapiens
gcctgggcgcggacc

SEQ ID NO: 1482274 - DNA, 15 bp, Homo sapiens
agcctgggcgcggac

SEQ ID NO: 1482275 - DNA, 15 bp, Homo sapiens
gagcctgggcgcgga

SEQ ID NO: 1482276 - DNA, 15 bp, Homo sapiens
tgagcctgggcgcgg

SEQ ID NO: 1482277 - DNA, 15 bp, Homo sapiens
ttgagcctgggcgcg

SEQ ID NO: 1482278 - DNA, 15 bp, Homo sapiens
tttgagcctgggcgc

SEQ ID NO: 1482279 - DNA, 15 bp, Homo sapiens
ctttgagcctgggcg

SEQ ID NO: 1482280 - DNA, 15 bp, Homo sapiens
cctttgagcctgggc

SEQ ID NO: 1482281 - DNA, 15 bp, Homo sapiens
acctttgagcctggg

SEQ ID NO: 1482282 - DNA, 15 bp, Homo sapiens
cacctttgagcctgg

SEQ ID NO: 1482283 - DNA, 15 bp, Homo sapiens
tcacctttgagcctg

SEQ ID NO: 1482284 - DNA, 15 bp, Homo sapiens
gtcacctttgagcct

SEQ ID NO: 1482285 - DNA, 15 bp, Homo sapiens
agtcacctttgagcc

SEQ ID NO: 1482286 - DNA, 15 bp, Homo sapiens
gagtcacctttgagc

SEQ ID NO: 1482287 - DNA, 15 bp, Homo sapiens
ggagtcacctttgag

SEQ ID NO: 1482288 - DNA, 15 bp, Homo sapiens
aggagtcacctttga

SEQ ID NO: 1482289 - DNA, 15 bp, Homo sapiens
caggagtcacctttg

SEQ ID NO: 1482290 - DNA, 15 bp, Homo sapiens
acaggagtcaccttt

SEQ ID NO: 1482291 - DNA, 15 bp, Homo sapiens
gacaggagtcacctt

SEQ ID NO: 1482292 - DNA, 15 bp, Homo sapiens
cgacaggagtcacct

SEQ ID NO: 1482293 - DNA, 15 bp, Homo sapiens
ccgacaggagtcacc

SEQ ID NO: 1482294 - DNA, 15 bp, Homo sapiens
gccgacaggagtcac

SEQ ID NO: 1482295 - DNA, 15 bp, Homo sapiens
ggccgacaggagtca

SEQ ID NO: 1482296 - DNA, 15 bp, Homo sapiens
gggccgacaggagtc

SEQ ID NO: 1482297 - DNA, 15 bp, Homo sapiens
tgggccgacaggagt

SEQ ID NO: 1482298 - DNA, 15 bp, Homo sapiens
ctgggccgacaggag

SEQ ID NO: 1482299 - DNA, 15 bp, Homo sapiens
cctgggccgacagga

SEQ ID NO: 1482300 - DNA, 15 bp, Homo sapiens
gcctgggccgacagg

SEQ ID NO: 1482301 - DNA, 15 bp, Homo sapiens
cgcctgggccgacag

SEQ ID NO: 1482302 - DNA, 15 bp, Homo sapiens
ccgcctgggccgaca

SEQ ID NO: 1482303 - DNA, 15 bp, Homo sapiens
gccgcctgggccgac

SEQ ID NO: 1482304 - DNA, 15 bp, Homo sapiens
cgccgcctgggccga

SEQ ID NO: 1482305 - DNA, 15 bp, Homo sapiens
ccgccgcctgggccg

SEQ ID NO: 1482306 - DNA, 15 bp, Homo sapiens
tccgccgcctgggcc

SEQ ID NO: 1482307 - DNA, 15 bp, Homo sapiens
gtccgccgcctgggc

SEQ ID NO: 1482308 - DNA, 15 bp, Homo sapiens
cgtccgccgcctggg

SEQ ID NO: 1482309 - DNA, 15 bp, Homo sapiens
ccgtccgccgcctgg

SEQ ID NO: 1482310 - DNA, 15 bp, Homo sapiens
gccgtccgccgcctg

SEQ ID NO: 1482311 - DNA, 15 bp, Homo sapiens
cgccgtccgccgcct

SEQ ID NO: 1482312 - DNA, 15 bp, Homo sapiens
tcgccgtccgccgcc

SEQ ID NO: 1482313 - DNA, 15 bp, Homo sapiens
gtcgccgtccgccgc

SEQ ID NO: 1482314 - DNA, 15 bp, Homo sapiens
ggtcgccgtccgccg

SEQ ID NO: 1482315 - DNA, 15 bp, Homo sapiens
aggtcgccgtccgcc

SEQ ID NO: 1482316 - DNA, 15 bp, Homo sapiens
caggtcgccgtccgc

SEQ ID NO: 1482317 - DNA, 15 bp, Homo sapiens
gcaggtcgccgtccg

SEQ ID NO: 1482318 - DNA, 15 bp, Homo sapiens
ggcaggtcgccgtcc

SEQ ID NO: 1482319 - DNA, 15 bp, Homo sapiens
cggcaggtcgccgtc

SEQ ID NO: 1482320 - DNA, 15 bp, Homo sapiens
ccggcaggtcgccgt

SEQ ID NO: 1482321 - DNA, 15 bp, Homo sapiens
cccggcaggtcgccg

SEQ ID NO: 1482322 - DNA, 15 bp, Homo sapiens
ccccggcaggtcgcc

SEQ ID NO: 1482323 - DNA, 15 bp, Homo sapiens
gccccggcaggtcgc

SEQ ID NO: 1482324 - DNA, 15 bp, Homo sapiens
cgccccggcaggtcg

SEQ ID NO: 1482325 - DNA, 15 bp, Homo sapiens
gcgccccggcaggtc

SEQ ID NO: 1482326 - DNA, 15 bp, Homo sapiens
cgcgccccggcaggt

SEQ ID NO: 1482327 - DNA, 15 bp, Homo sapiens
gcgcgccccggcagg

SEQ ID NO: 1482328 - DNA, 15 bp, Homo sapiens
ggcgcgccccggcag

SEQ ID NO: 1482329 - DNA, 15 bp, Homo sapiens
tggcgcgccccggca

SEQ ID NO: 1482330 - DNA, 15 bp, Homo sapiens
ttggcgcgccccggc

SEQ ID NO: 1482331 - DNA, 15 bp, Homo sapiens
cttggcgcgccccgg

SEQ ID NO: 1482332 - DNA, 15 bp, Homo sapiens
ccttggcgcgccccg

SEQ ID NO: 1482333 - DNA, 15 bp, Homo sapiens
gccttggcgcgcccc

SEQ ID NO: 1482334 - DNA, 15 bp, Homo sapiens
ggccttggcgcgccc

SEQ ID NO: 1482335 - DNA, 15 bp, Homo sapiens
gggccttggcgcgcc

SEQ ID NO: 1482336 - DNA, 15 bp, Homo sapiens
agggccttggcgcgc

SEQ ID NO: 1482337 - DNA, 15 bp, Homo sapiens
gagggccttggcgcg

SEQ ID NO: 1482338 - DNA, 15 bp, Homo sapiens
cgagggccttggcgc

SEQ ID NO: 1482339 - DNA, 15 bp, Homo sapiens
tcgagggccttggcg

SEQ ID NO: 1482340 - DNA, 15 bp, Homo sapiens
gtcgagggccttggc

SEQ ID NO: 1482341 - DNA, 15 bp, Homo sapiens
agtcgagggccttgg

SEQ ID NO: 1482342 - DNA, 15 bp, Homo sapiens
cagtcgagggccttg

SEQ ID NO: 1482343 - DNA, 15 bp, Homo sapiens
ccagtcgagggcctt

SEQ ID NO: 1482344 - DNA, 15 bp, Homo sapiens
cccagtcgagggcct

SEQ ID NO: 1482345 - DNA, 15 bp, Homo sapiens
ccccagtcgagggcc

SEQ ID NO: 1482346 - DNA, 15 bp, Homo sapiens
cccccagtcgagggc

SEQ ID NO: 1482347 - DNA, 15 bp, Homo sapiens
gcccccagtcgaggg

SEQ ID NO: 1482348 - DNA, 15 bp, Homo sapiens
cgcccccagtcgagg

SEQ ID NO: 1482349 - DNA, 15 bp, Homo sapiens
acgcccccagtcgag

SEQ ID NO: 1482350 - DNA, 15 bp, Homo sapiens
gacgcccccagtcga

SEQ ID NO: 1482351 - DNA, 15 bp, Homo sapiens
agacgcccccagtcg

SEQ ID NO: 1482352 - DNA, 15 bp, Homo sapiens
gagacgcccccagtc

SEQ ID NO: 1482353 - DNA, 15 bp, Homo sapiens
tgagacgcccccagt

SEQ ID NO: 1482354 - DNA, 15 bp, Homo sapiens
gtgagacgcccccag

SEQ ID NO: 1482355 - DNA, 15 bp, Homo sapiens
ggtgagacgccccca

SEQ ID NO: 1482356 - DNA, 15 bp, Homo sapiens
cggtgagacgccccc

SEQ ID NO: 1482357 - DNA, 15 bp, Homo sapiens
acggtgagacgcccc

SEQ ID NO: 1482358 - DNA, 15 bp, Homo sapiens
gacggtgagacgccc

SEQ ID NO: 1482359 - DNA, 15 bp, Homo sapiens
cgacggtgagacgcc

SEQ ID NO: 1482360 - DNA, 15 bp, Homo sapiens
ccgacggtgagacgc

SEQ ID NO: 1482361 - DNA, 15 bp, Homo sapiens
tccgacggtgagacg

SEQ ID NO: 1482362 - DNA, 15 bp, Homo sapiens
gtccgacggtgagac

SEQ ID NO: 1482363 - DNA, 15 bp, Homo sapiens
agtccgacggtgaga

SEQ ID NO: 1482364 - DNA, 15 bp, Homo sapiens
gagtccgacggtgag

SEQ ID NO: 1482365 - DNA, 15 bp, Homo sapiens
cgagtccgacggtga

SEQ ID NO: 1482366 - DNA, 15 bp, Homo sapiens
ccgagtccgacggtg

SEQ ID NO: 1482367 - DNA, 15 bp, Homo sapiens
gccgagtccgacggt

SEQ ID NO: 1482368 - DNA, 15 bp, Homo sapiens
tgccgagtccgacgg

SEQ ID NO: 1482369 - DNA, 15 bp, Homo sapiens
ttgccgagtccgacg

SEQ ID NO: 1482370 - DNA, 15 bp, Homo sapiens
cttgccgagtccgac

SEQ ID NO: 1482371 - DNA, 15 bp, Homo sapiens
ccttgccgagtccga

SEQ ID NO: 1482372 - DNA, 15 bp, Homo sapiens
gccttgccgagtccg

SEQ ID NO: 1482373 - DNA, 15 bp, Homo sapiens
agccttgccgagtcc

SEQ ID NO: 1482374 - DNA, 15 bp, Homo sapiens
tagccttgccgagtc

SEQ ID NO: 1482375 - DNA, 15 bp, Homo sapiens
atagccttgccgagt

SEQ ID NO: 1482376 - DNA, 15 bp, Homo sapiens
catagccttgccgag

SEQ ID NO: 1482377 - DNA, 15 bp, Homo sapiens
gcatagccttgccga

SEQ ID NO: 1482378 - DNA, 15 bp, Homo sapiens
tgcatagccttgccg

SEQ ID NO: 1482379 - DNA, 15 bp, Homo sapiens
ctgcatagccttgcc

SEQ ID NO: 1482380 - DNA, 15 bp, Homo sapiens
gctgcatagccttgc

SEQ ID NO: 1482381 - DNA, 15 bp, Homo sapiens
cgctgcatagccttg

SEQ ID NO: 1482382 - DNA, 15 bp, Homo sapiens
gcgctgcatagcctt

SEQ ID NO: 1482383 - DNA, 15 bp, Homo sapiens
ggcgctgcatagcct

SEQ ID NO: 1482384 - DNA, 15 bp, Homo sapiens
tggcgctgcatagcc

SEQ ID NO: 1482385 - DNA, 15 bp, Homo sapiens
ctggcgctgcatagc

SEQ ID NO: 1482386 - DNA, 15 bp, Homo sapiens
gctggcgctgcatag

SEQ ID NO: 1482387 - DNA, 15 bp, Homo sapiens
agctggcgctgcata

SEQ ID NO: 1482388 - DNA, 15 bp, Homo sapiens
gagctggcgctgcat

SEQ ID NO: 1482389 - DNA, 15 bp, Homo sapiens
cgagctggcgctgca

SEQ ID NO: 1482390 - DNA, 15 bp, Homo sapiens
gcgagctggcgctgc

SEQ ID NO: 1482391 - DNA, 15 bp, Homo sapiens
ggcgagctggcgctg

SEQ ID NO: 1482392 - DNA, 15 bp, Homo sapiens
tggcgagctggcgct

SEQ ID NO: 1482393 - DNA, 15 bp, Homo sapiens
atggcgagctggcgc

SEQ ID NO: 1482394 - DNA, 15 bp, Homo sapiens
catggcgagctggcg

SEQ ID NO: 1482395 - DNA, 15 bp, Homo sapiens
ccatggcgagctggc

SEQ ID NO: 1482396 - DNA, 15 bp, Homo sapiens
tccatggcgagctgg

SEQ ID NO: 1482397 - DNA, 15 bp, Homo sapiens
ttccatggcgagctg

SEQ ID NO: 1482398 - DNA, 15 bp, Homo sapiens
cttccatggcgagct

SEQ ID NO: 1482399 - DNA, 15 bp, Homo sapiens
acttccatggcgagc

SEQ ID NO: 1482400 - DNA, 15 bp, Homo sapiens
gacttccatggcgag

SEQ ID NO: 1482401 - DNA, 15 bp, Homo sapiens
ggacttccatggcga

SEQ ID NO: 1482402 - DNA, 15 bp, Homo sapiens
aggacttccatggcg

SEQ ID NO: 1482403 - DNA, 15 bp, Homo sapiens
aaggacttccatggc

SEQ ID NO: 1482404 - DNA, 15 bp, Homo sapiens
caaggacttccatgg

SEQ ID NO: 1482405 - DNA, 15 bp, Homo sapiens
gcaaggacttccatg

SEQ ID NO: 1482406 - DNA, 15 bp, Homo sapiens
cgcaaggacttccat

SEQ ID NO: 1482407 - DNA, 15 bp, Homo sapiens
ccgcaaggacttcca

SEQ ID NO: 1482408 - DNA, 15 bp, Homo sapiens
tccgcaaggacttcc

SEQ ID NO: 1482409 - DNA, 15 bp, Homo sapiens
ttccgcaaggacttc

SEQ ID NO: 1482410 - DNA, 15 bp, Homo sapiens
tttccgcaaggactt

SEQ ID NO: 1482411 - DNA, 15 bp, Homo sapiens
atttccgcaaggact

SEQ ID NO: 1482412 - DNA, 15 bp, Homo sapiens
gatttccgcaaggac

SEQ ID NO: 1482413 - DNA, 15 bp, Homo sapiens
ggatttccgcaagga

SEQ ID NO: 1482414 - DNA, 15 bp, Homo sapiens
cggatttccgcaagg

SEQ ID NO: 1482415 - DNA, 15 bp, Homo sapiens
ccggatttccgcaag

SEQ ID NO: 1482416 - DNA, 15 bp, Homo sapiens
cccggatttccgcaa

SEQ ID NO: 1482417 - DNA, 15 bp, Homo sapiens
acccggatttccgca

SEQ ID NO: 1482418 - DNA, 15 bp, Homo sapiens
cacccggatttccgc

SEQ ID NO: 1482419 - DNA, 15 bp, Homo sapiens
ccacccggatttccg

SEQ ID NO: 1482420 - DNA, 15 bp, Homo sapiens
gccacccggatttcc

SEQ ID NO: 1482421 - DNA, 15 bp, Homo sapiens
ggccacccggatttc

SEQ ID NO: 1482422 - DNA, 15 bp, Homo sapiens
gggccacccggattt

SEQ ID NO: 1482423 - DNA, 15 bp, Homo sapiens
tgggccacccggatt

SEQ ID NO: 1482424 - DNA, 15 bp, Homo sapiens
gtgggccacccggat

SEQ ID NO: 1482425 - DNA, 15 bp, Homo sapiens
ggtgggccacccgga

SEQ ID NO: 1482426 - DNA, 15 bp, Homo sapiens
aggtgggccacccgg

SEQ ID NO: 1482427 - DNA, 15 bp, Homo sapiens
gaggtgggccacccg

SEQ ID NO: 1482428 - DNA, 15 bp, Homo sapiens
cgaggtgggccaccc

SEQ ID NO: 1482429 - DNA, 15 bp, Homo sapiens
tcgaggtgggccacc

SEQ ID NO: 1482430 - DNA, 15 bp, Homo sapiens
ctcgaggtgggccac

SEQ ID NO: 1482431 - DNA, 15 bp, Homo sapiens
cctcgaggtgggcca

SEQ ID NO: 1482432 - DNA, 15 bp, Homo sapiens
gcctcgaggtgggcc

SEQ ID NO: 1482433 - DNA, 15 bp, Homo sapiens
agcctcgaggtgggc

SEQ ID NO: 1482434 - DNA, 15 bp, Homo sapiens
cagcctcgaggtggg

SEQ ID NO: 1482435 - DNA, 15 bp, Homo sapiens
acagcctcgaggtgg

SEQ ID NO: 1482436 - DNA, 15 bp, Homo sapiens
cacagcctcgaggtg

SEQ ID NO: 1482437 - DNA, 15 bp, Homo sapiens
acacagcctcgaggt

SEQ ID NO: 1482438 - DNA, 15 bp, Homo sapiens
aacacagcctcgagg

SEQ ID NO: 1482439 - DNA, 15 bp, Homo sapiens
aaacacagcctcgag

SEQ ID NO: 1482440 - DNA, 15 bp, Homo sapiens
caaacacagcctcga

SEQ ID NO: 1482441 - DNA, 15 bp, Homo sapiens
gcaaacacagcctcg

SEQ ID NO: 1482442 - DNA, 15 bp, Homo sapiens
cgcaaacacagcctc

SEQ ID NO: 1482443 - DNA, 15 bp, Homo sapiens
gcgcaaacacagcct

SEQ ID NO: 1482444 - DNA, 15 bp, Homo sapiens
tgcgcaaacacagcc

SEQ ID NO: 1482445 - DNA, 15 bp, Homo sapiens
ctgcgcaaacacagc

SEQ ID NO: 1482446 - DNA, 15 bp, Homo sapiens
gctgcgcaaacacag

SEQ ID NO: 1482447 - DNA, 15 bp, Homo sapiens
cgctgcgcaaacaca

SEQ ID NO: 1482448 - DNA, 15 bp, Homo sapiens
gcgctgcgcaaacac

SEQ ID NO: 1482449 - DNA, 15 bp, Homo sapiens
cgcgctgcgcaaaca

SEQ ID NO: 1482450 - DNA, 15 bp, Homo sapiens
gcgcgctgcgcaaac

SEQ ID NO: 1482451 - DNA, 15 bp, Homo sapiens
ggcgcgctgcgcaaa

SEQ ID NO: 1482452 - DNA, 15 bp, Homo sapiens
gggcgcgctgcgcaa

SEQ ID NO: 1482453 - DNA, 15 bp, Homo sapiens
agggcgcgctgcgca

SEQ ID NO: 1482454 - DNA, 15 bp, Homo sapiens
aagggcgcgctgcgc

SEQ ID NO: 1482455 - DNA, 15 bp, Homo sapiens
gaagggcgcgctgcg

SEQ ID NO: 1482456 - DNA, 15 bp, Homo sapiens
agaagggcgcgctgc

SEQ ID NO: 1482457 - DNA, 15 bp, Homo sapiens
aagaagggcgcgctg

SEQ ID NO: 1482458 - DNA, 15 bp, Homo sapiens
caagaagggcgcgct

SEQ ID NO: 1482459 - DNA, 15 bp, Homo sapiens
acaagaagggcgcgc

SEQ ID NO: 1482460 - DNA, 15 bp, Homo sapiens
gacaagaagggcgcg

SEQ ID NO: 1482461 - DNA, 15 bp, Homo sapiens
ggacaagaagggcgc

SEQ ID NO: 1482462 - DNA, 15 bp, Homo sapiens
cggacaagaagggcg

SEQ ID NO: 1482463 - DNA, 15 bp, Homo sapiens
gcggacaagaagggc

SEQ ID NO: 1482464 - DNA, 15 bp, Homo sapiens
tgcggacaagaaggg

SEQ ID NO: 1482465 - DNA, 15 bp, Homo sapiens
gtgcggacaagaagg

SEQ ID NO: 1482466 - DNA, 15 bp, Homo sapiens
agtgcggacaagaag

SEQ ID NO: 1482467 - DNA, 15 bp, Homo sapiens
gagtgcggacaagaa

SEQ ID NO: 1482468 - DNA, 15 bp, Homo sapiens
tgagtgcggacaaga

SEQ ID NO: 1482469 - DNA, 15 bp, Homo sapiens
ttgagtgcggacaag

SEQ ID NO: 1482470 - DNA, 15 bp, Homo sapiens
tttgagtgcggacaa

SEQ ID NO: 1482471 - DNA, 15 bp, Homo sapiens
ctttgagtgcggaca

SEQ ID NO: 1482472 - DNA, 15 bp, Homo sapiens
tctttgagtgcggac

SEQ ID NO: 1482473 - DNA, 15 bp, Homo sapiens
ctctttgagtgcgga

SEQ ID NO: 1482474 - DNA, 15 bp, Homo sapiens
cctctttgagtgcgg

SEQ ID NO: 1482475 - DNA, 15 bp, Homo sapiens
gcctctttgagtgcg

SEQ ID NO: 1482476 - DNA, 15 bp, Homo sapiens
agcctctttgagtgc

SEQ ID NO: 1482477 - DNA, 15 bp, Homo sapiens
gagcctctttgagtg

SEQ ID NO: 1482478 - DNA, 15 bp, Homo sapiens
ggagcctctttgagt

SEQ ID NO: 1482479 - DNA, 15 bp, Homo sapiens
gggagcctctttgag

SEQ ID NO: 1482480 - DNA, 15 bp, Homo sapiens
tgggagcctctttga

SEQ ID NO: 1482481 - DNA, 15 bp, Homo sapiens
ctgggagcctctttg

SEQ ID NO: 1482482 - DNA, 15 bp, Homo sapiens
gctgggagcctcttt

SEQ ID NO: 1482483 - DNA, 15 bp, Homo sapiens
agctgggagcctctt

SEQ ID NO: 1482484 - DNA, 15 bp, Homo sapiens
aagctgggagcctct

SEQ ID NO: 1482485 - DNA, 15 bp, Homo sapiens
gaagctgggagcctc

SEQ ID NO: 1482486 - DNA, 15 bp, Homo sapiens
agaagctgggagcct

SEQ ID NO: 1482487 - DNA, 15 bp, Homo sapiens
gagaagctgggagcc

SEQ ID NO: 1482488 - DNA, 15 bp, Homo sapiens
cgagaagctgggagc

SEQ ID NO: 1482489 - DNA, 15 bp, Homo sapiens
ccgagaagctgggag

SEQ ID NO: 1482490 - DNA, 15 bp, Homo sapiens
gccgagaagctggga

SEQ ID NO: 1482491 - DNA, 15 bp, Homo sapiens
ggccgagaagctggg

SEQ ID NO: 1482492 - DNA, 15 bp, Homo sapiens
cggccgagaagctgg

SEQ ID NO: 1482493 - DNA, 15 bp, Homo sapiens
tcggccgagaagctg

SEQ ID NO: 1482494 - DNA, 15 bp, Homo sapiens
gtcggccgagaagct

SEQ ID NO: 1482495 - DNA, 15 bp, Homo sapiens
agtcggccgagaagc

SEQ ID NO: 1482496 - DNA, 15 bp, Homo sapiens
cagtcggccgagaag

SEQ ID NO: 1482497 - DNA, 15 bp, Homo sapiens
gcagtcggccgagaa

SEQ ID NO: 1482498 - DNA, 15 bp, Homo sapiens
tgcagtcggccgaga

SEQ ID NO: 1482499 - DNA, 15 bp, Homo sapiens
gtgcagtcggccgag

SEQ ID NO: 1482500 - DNA, 15 bp, Homo sapiens
cgtgcagtcggccga

SEQ ID NO: 1482501 - DNA, 15 bp, Homo sapiens
gcgtgcagtcggccg

SEQ ID NO: 1482502 - DNA, 15 bp, Homo sapiens
cgcgtgcagtcggcc

SEQ ID NO: 1482503 - DNA, 15 bp, Homo sapiens
gcgcgtgcagtcggc

SEQ ID NO: 1482504 - DNA, 15 bp, Homo sapiens
agcgcgtgcagtcgg

SEQ ID NO: 1482505 - DNA, 15 bp, Homo sapiens
aagcgcgtgcagtcg

SEQ ID NO: 1482506 - DNA, 15 bp, Homo sapiens
caagcgcgtgcagtc

SEQ ID NO: 1482507 - DNA, 15 bp, Homo sapiens
tcaagcgcgtgcagt

SEQ ID NO: 1482508 - DNA, 15 bp, Homo sapiens
ctcaagcgcgtgcag

SEQ ID NO: 1482509 - DNA, 15 bp, Homo sapiens
cctcaagcgcgtgca

SEQ ID NO: 1482510 - DNA, 15 bp, Homo sapiens
tcctcaagcgcgtgc

SEQ ID NO: 1482511 - DNA, 15 bp, Homo sapiens
ctcctcaagcgcgtg

SEQ ID NO: 1482512 - DNA, 15 bp, Homo sapiens
gctcctcaagcgcgt

SEQ ID NO: 1482513 - DNA, 15 bp, Homo sapiens
cgctcctcaagcgcg

SEQ ID NO: 1482514 - DNA, 15 bp, Homo sapiens
ccgctcctcaagcgc

SEQ ID NO: 1482515 - DNA, 15 bp, Homo sapiens
gccgctcctcaagcg

SEQ ID NO: 1482516 - DNA, 15 bp, Homo sapiens
cgccgctcctcaagc

SEQ ID NO: 1482517 - DNA, 15 bp, Homo sapiens
tcgccgctcctcaag

SEQ ID NO: 1482518 - DNA, 15 bp, Homo sapiens
ctcgccgctcctcaa

SEQ ID NO: 1482519 - DNA, 15 bp, Homo sapiens
gctcgccgctcctca

SEQ ID NO: 1482520 - DNA, 15 bp, Homo sapiens
cgctcgccgctcctc

SEQ ID NO: 1482521 - DNA, 15 bp, Homo sapiens
tcgctcgccgctcct

SEQ ID NO: 1482522 - DNA, 15 bp, Homo sapiens
ctcgctcgccgctcc

SEQ ID NO: 1482523 - DNA, 15 bp, Homo sapiens
cctcgctcgccgctc

SEQ ID NO: 1482524 - DNA, 15 bp, Homo sapiens
ccctcgctcgccgct

SEQ ID NO: 1482525 - DNA, 15 bp, Homo sapiens
cccctcgctcgccgc

SEQ ID NO: 1482526 - DNA, 15 bp, Homo sapiens
ccccctcgctcgccg

SEQ ID NO: 1482527 - DNA, 15 bp, Homo sapiens
gccccctcgctcgcc

SEQ ID NO: 1482528 - DNA, 15 bp, Homo sapiens
agccccctcgctcgc

SEQ ID NO: 1482529 - DNA, 15 bp, Homo sapiens
gagccccctcgctcg

SEQ ID NO: 1482530 - DNA, 15 bp, Homo sapiens
cgagccccctcgctc

SEQ ID NO: 1482531 - DNA, 15 bp, Homo sapiens
ccgagccccctcgct

SEQ ID NO: 1482532 - DNA, 15 bp, Homo sapiens
gccgagccccctcgc

SEQ ID NO: 1482533 - DNA, 15 bp, Homo sapiens
tgccgagccccctcg

SEQ ID NO: 1482534 - DNA, 15 bp, Homo sapiens
gtgccgagccccctc

SEQ ID NO: 1482535 - DNA, 15 bp, Homo sapiens
agtgccgagccccct

SEQ ID NO: 1482536 - DNA, 15 bp, Homo sapiens
gagtgccgagccccc

SEQ ID NO: 1482537 - DNA, 15 bp, Homo sapiens
agagtgccgagcccc

SEQ ID NO: 1482538 - DNA, 15 bp, Homo sapiens
aagagtgccgagccc

SEQ ID NO: 1482539 - DNA, 15 bp, Homo sapiens
caagagtgccgagcc

SEQ ID NO: 1482540 - DNA, 15 bp, Homo sapiens
ccaagagtgccgagc

SEQ ID NO: 1482541 - DNA, 15 bp, Homo sapiens
cccaagagtgccgag

SEQ ID NO: 1482542 - DNA, 15 bp, Homo sapiens
ccccaagagtgccga

SEQ ID NO: 1482543 - DNA, 15 bp, Homo sapiens
gccccaagagtgccg

SEQ ID NO: 1482544 - DNA, 15 bp, Homo sapiens
cgccccaagagtgcc

SEQ ID NO: 1482545 - DNA, 15 bp, Homo sapiens
gcgccccaagagtgc

SEQ ID NO: 1482546 - DNA, 15 bp, Homo sapiens
cgcgccccaagagtg

SEQ ID NO: 1482547 - DNA, 15 bp, Homo sapiens
ccgcgccccaagagt

SEQ ID NO: 1482548 - DNA, 15 bp, Homo sapiens
cccgcgccccaagag

SEQ ID NO: 1482549 - DNA, 15 bp, Homo sapiens
gcccgcgccccaaga

SEQ ID NO: 1482550 - DNA, 15 bp, Homo sapiens
cgcccgcgccccaag

SEQ ID NO: 1482551 - DNA, 15 bp, Homo sapiens
gcgcccgcgccccaa

SEQ ID NO: 1482552 - DNA, 15 bp, Homo sapiens
tgcgcccgcgcccca

SEQ ID NO: 1482553 - DNA, 15 bp, Homo sapiens
gtgcgcccgcgcccc

SEQ ID NO: 1482554 - DNA, 15 bp, Homo sapiens
cgtgcgcccgcgccc

SEQ ID NO: 1482555 - DNA, 15 bp, Homo sapiens
tcgtgcgcccgcgcc

SEQ ID NO: 1482556 - DNA, 15 bp, Homo sapiens
gtcgtgcgcccgcgc

SEQ ID NO: 1482557 - DNA, 15 bp, Homo sapiens
cgtcgtgcgcccgcg

SEQ ID NO: 1482558 - DNA, 15 bp, Homo sapiens
ccgtcgtgcgcccgc

SEQ ID NO: 1482559 - DNA, 15 bp, Homo sapiens
cccgtcgtgcgcccg

SEQ ID NO: 1482560 - DNA, 15 bp, Homo sapiens
tcccgtcgtgcgccc

SEQ ID NO: 1482561 - DNA, 15 bp, Homo sapiens
ctcccgtcgtgcgcc

SEQ ID NO: 1482562 - DNA, 15 bp, Homo sapiens
cctcccgtcgtgcgc

SEQ ID NO: 1482563 - DNA, 15 bp, Homo sapiens
gcctcccgtcgtgcg

SEQ ID NO: 1482564 - DNA, 15 bp, Homo sapiens
cgcctcccgtcgtgc

SEQ ID NO: 1482565 - DNA, 15 bp, Homo sapiens
tcgcctcccgtcgtg

SEQ ID NO: 1482566 - DNA, 15 bp, Homo sapiens
atcgcctcccgtcgt

SEQ ID NO: 1482567 - DNA, 15 bp, Homo sapiens
catcgcctcccgtcg

SEQ ID NO: 1482568 - DNA, 15 bp, Homo sapiens
tcatcgcctcccgtc

SEQ ID NO: 1482569 - DNA, 15 bp, Homo sapiens
ctcatcgcctcccgt

SEQ ID NO: 1482570 - DNA, 15 bp, Homo sapiens
actcatcgcctcccg

SEQ ID NO: 1482571 - DNA, 15 bp, Homo sapiens
cactcatcgcctccc

SEQ ID NO: 1482572 - DNA, 15 bp, Homo sapiens
gcactcatcgcctcc

SEQ ID NO: 1482573 - DNA, 15 bp, Homo sapiens
tgcactcatcgcctc

SEQ ID NO: 1482574 - DNA, 15 bp, Homo sapiens
ctgcactcatcgcct

SEQ ID NO: 1482575 - DNA, 15 bp, Homo sapiens
actgcactcatcgcc

SEQ ID NO: 1482576 - DNA, 15 bp, Homo sapiens
aactgcactcatcgc

SEQ ID NO: 1482577 - DNA, 15 bp, Homo sapiens
aaactgcactcatcg

SEQ ID NO: 1482578 - DNA, 15 bp, Homo sapiens
caaactgcactcatc

SEQ ID NO: 1482579 - DNA, 15 bp, Homo sapiens
ccaaactgcactcat

SEQ ID NO: 1482580 - DNA, 15 bp, Homo sapiens
gccaaactgcactca

SEQ ID NO: 1482581 - DNA, 15 bp, Homo sapiens
ggccaaactgcactc

SEQ ID NO: 1482582 - DNA, 15 bp, Homo sapiens
cggccaaactgcact

SEQ ID NO: 1482583 - DNA, 15 bp, Homo sapiens
ccggccaaactgcac

SEQ ID NO: 1482584 - DNA, 15 bp, Homo sapiens
cccggccaaactgca

SEQ ID NO: 1482585 - DNA, 15 bp, Homo sapiens
tcccggccaaactgc

SEQ ID NO: 1482586 - DNA, 15 bp, Homo sapiens
ttcccggccaaactg

SEQ ID NO: 1482587 - DNA, 15 bp, Homo sapiens
cttcccggccaaact

SEQ ID NO: 1482588 - DNA, 15 bp, Homo sapiens
gcttcccggccaaac

SEQ ID NO: 1482589 - DNA, 15 bp, Homo sapiens
agcttcccggccaaa

SEQ ID NO: 1482590 - DNA, 15 bp, Homo sapiens
gagcttcccggccaa

SEQ ID NO: 1482591 - DNA, 15 bp, Homo sapiens
agagcttcccggcca

SEQ ID NO: 1482592 - DNA, 15 bp, Homo sapiens
cagagcttcccggcc

SEQ ID NO: 1482593 - DNA, 15 bp, Homo sapiens
tcagagcttcccggc

SEQ ID NO: 1482594 - DNA, 15 bp, Homo sapiens
ctcagagcttcccgg

SEQ ID NO: 1482595 - DNA, 15 bp, Homo sapiens
actcagagcttcccg

SEQ ID NO: 1482596 - DNA, 15 bp, Homo sapiens
tactcagagcttccc

SEQ ID NO: 1482597 - DNA, 15 bp, Homo sapiens
ctactcagagcttcc

SEQ ID NO: 1482598 - DNA, 15 bp, Homo sapiens
actactcagagcttc

SEQ ID NO: 1482599 - DNA, 15 bp, Homo sapiens
cactactcagagctt

SEQ ID NO: 1482600 - DNA, 15 bp, Homo sapiens
acactactcagagct

SEQ ID NO: 1482601 - DNA, 15 bp, Homo sapiens
cacactactcagagc

SEQ ID NO: 1482602 - DNA, 15 bp, Homo sapiens
gcacactactcagag

SEQ ID NO: 1482603 - DNA, 15 bp, Homo sapiens
cgcacactactcaga

SEQ ID NO: 1482604 - DNA, 15 bp, Homo sapiens
tcgcacactactcag

SEQ ID NO: 1482605 - DNA, 15 bp, Homo sapiens
ctcgcacactactca

SEQ ID NO: 1482606 - DNA, 15 bp, Homo sapiens
gctcgcacactactc

SEQ ID NO: 1482607 - DNA, 15 bp, Homo sapiens
agctcgcacactact

SEQ ID NO: 1482608 - DNA, 15 bp, Homo sapiens
cagctcgcacactac

SEQ ID NO: 1482609 - DNA, 15 bp, Homo sapiens
gcagctcgcacacta

SEQ ID NO: 1482610 - DNA, 15 bp, Homo sapiens
ggcagctcgcacact

SEQ ID NO: 1482611 - DNA, 15 bp, Homo sapiens
gggcagctcgcacac

SEQ ID NO: 1482612 - DNA, 15 bp, Homo sapiens
tgggcagctcgcaca

SEQ ID NO: 1482613 - DNA, 15 bp, Homo sapiens
gtgggcagctcgcac

SEQ ID NO: 1482614 - DNA, 15 bp, Homo sapiens
ggtgggcagctcgca

SEQ ID NO: 1482615 - DNA, 15 bp, Homo sapiens
cggtgggcagctcgc

SEQ ID NO: 1482616 - DNA, 15 bp, Homo sapiens
acggtgggcagctcg

SEQ ID NO: 1482617 - DNA, 15 bp, Homo sapiens
cacggtgggcagctc

SEQ ID NO: 1482618 - DNA, 15 bp, Homo sapiens
acacggtgggcagct

SEQ ID NO: 1482619 - DNA, 15 bp, Homo sapiens
cacacggtgggcagc

SEQ ID NO: 1482620 - DNA, 15 bp, Homo sapiens
ccacacggtgggcag

SEQ ID NO: 1482621 - DNA, 15 bp, Homo sapiens
gccacacggtgggca

SEQ ID NO: 1482622 - DNA, 15 bp, Homo sapiens
ggccacacggtgggc

SEQ ID NO: 1482623 - DNA, 15 bp, Homo sapiens
gggccacacggtggg

SEQ ID NO: 1482624 - DNA, 15 bp, Homo sapiens
cgggccacacggtgg

SEQ ID NO: 1482625 - DNA, 15 bp, Homo sapiens
ccgggccacacggtg

SEQ ID NO: 1482626 - DNA, 15 bp, Homo sapiens
gccgggccacacggt

SEQ ID NO: 1482627 - DNA, 15 bp, Homo sapiens
tgccgggccacacgg

SEQ ID NO: 1482628 - DNA, 15 bp, Homo sapiens
ctgccgggccacacg

SEQ ID NO: 1482629 - DNA, 15 bp, Homo sapiens
actgccgggccacac

SEQ ID NO: 1482630 - DNA, 15 bp, Homo sapiens
cactgccgggccaca

SEQ ID NO: 1482631 - DNA, 15 bp, Homo sapiens
ccactgccgggccac

SEQ ID NO: 1482632 - DNA, 15 bp, Homo sapiens
gccactgccgggcca

SEQ ID NO: 1482633 - DNA, 15 bp, Homo sapiens
cgccactgccgggcc

SEQ ID NO: 1482634 - DNA, 15 bp, Homo sapiens
ccgccactgccgggc

SEQ ID NO: 1482635 - DNA, 15 bp, Homo sapiens
gccgccactgccggg

SEQ ID NO: 1482636 - DNA, 15 bp, Homo sapiens
cgccgccactgccgg

SEQ ID NO: 1482637 - DNA, 15 bp, Homo sapiens
ccgccgccactgccg

SEQ ID NO: 1482638 - DNA, 15 bp, Homo sapiens
accgccgccactgcc

SEQ ID NO: 1482639 - DNA, 15 bp, Homo sapiens
caccgccgccactgc

SEQ ID NO: 1482640 - DNA, 15 bp, Homo sapiens
tcaccgccgccactg

SEQ ID NO: 1482641 - DNA, 15 bp, Homo sapiens
gtcaccgccgccact

SEQ ID NO: 1482642 - DNA, 15 bp, Homo sapiens
cgtcaccgccgccac

SEQ ID NO: 1482643 - DNA, 15 bp, Homo sapiens
gcgtcaccgccgcca

SEQ ID NO: 1482644 - DNA, 15 bp, Homo sapiens
ggcgtcaccgccgcc

SEQ ID NO: 1482645 - DNA, 15 bp, Homo sapiens
aggcgtcaccgccgc

SEQ ID NO: 1482646 - DNA, 15 bp, Homo sapiens
caggcgtcaccgccg

SEQ ID NO: 1482647 - DNA, 15 bp, Homo sapiens
gcaggcgtcaccgcc

SEQ ID NO: 1482648 - DNA, 15 bp, Homo sapiens
cgcaggcgtcaccgc

SEQ ID NO: 1482649 - DNA, 15 bp, Homo sapiens
acgcaggcgtcaccg

SEQ ID NO: 1482650 - DNA, 15 bp, Homo sapiens
cacgcaggcgtcacc

SEQ ID NO: 1482651 - DNA, 15 bp, Homo sapiens
ccacgcaggcgtcac

SEQ ID NO: 1482652 - DNA, 15 bp, Homo sapiens
cccacgcaggcgtca

SEQ ID NO: 1482653 - DNA, 15 bp, Homo sapiens
ccccacgcaggcgtc

SEQ ID NO: 1482654 - DNA, 15 bp, Homo sapiens
cccccacgcaggcgt

SEQ ID NO: 1482655 - DNA, 15 bp, Homo sapiens
tcccccacgcaggcg

SEQ ID NO: 1482656 - DNA, 15 bp, Homo sapiens
gtcccccacgcaggc

SEQ ID NO: 1482657 - DNA, 15 bp, Homo sapiens
cgtcccccacgcagg

SEQ ID NO: 1482658 - DNA, 15 bp, Homo sapiens
ccgtcccccacgcag

SEQ ID NO: 1482659 - DNA, 15 bp, Homo sapiens
gccgtcccccacgca

SEQ ID NO: 1482660 - DNA, 15 bp, Homo sapiens
cgccgtcccccacgc

SEQ ID NO: 1482661 - DNA, 15 bp, Homo sapiens
acgccgtcccccacg

SEQ ID NO: 1482662 - DNA, 15 bp, Homo sapiens
cacgccgtcccccac

SEQ ID NO: 1482663 - DNA, 15 bp, Homo sapiens
acacgccgtccccca

SEQ ID NO: 1482664 - DNA, 15 bp, Homo sapiens
cacacgccgtccccc

SEQ ID NO: 1482665 - DNA, 15 bp, Homo sapiens
acacacgccgtcccc

SEQ ID NO: 1482666 - DNA, 15 bp, Homo sapiens
cacacacgccgtccc

SEQ ID NO: 1482667 - DNA, 15 bp, Homo sapiens
gcacacacgccgtcc

SEQ ID NO: 1482668 - DNA, 15 bp, Homo sapiens
ggcacacacgccgtc

SEQ ID NO: 1482669 - DNA, 15 bp, Homo sapiens
tggcacacacgccgt

SEQ ID NO: 1482670 - DNA, 15 bp, Homo sapiens
ctggcacacacgccg

SEQ ID NO: 1482671 - DNA, 15 bp, Homo sapiens
gctggcacacacgcc

SEQ ID NO: 1482672 - DNA, 15 bp, Homo sapiens
cgctggcacacacgc

SEQ ID NO: 1482673 - DNA, 15 bp, Homo sapiens
ccgctggcacacacg

SEQ ID NO: 1482674 - DNA, 15 bp, Homo sapiens
gccgctggcacacac

SEQ ID NO: 1482675 - DNA, 15 bp, Homo sapiens
cgccgctggcacaca

SEQ ID NO: 1482676 - DNA, 15 bp, Homo sapiens
tcgccgctggcacac

SEQ ID NO: 1482677 - DNA, 15 bp, Homo sapiens
atcgccgctggcaca

SEQ ID NO: 1482678 - DNA, 15 bp, Homo sapiens
tatcgccgctggcac

SEQ ID NO: 1482679 - DNA, 15 bp, Homo sapiens
ctatcgccgctggca

SEQ ID NO: 1482680 - DNA, 15 bp, Homo sapiens
tctatcgccgctggc

SEQ ID NO: 1482681 - DNA, 15 bp, Homo sapiens
ctctatcgccgctgg

SEQ ID NO: 1482682 - DNA, 15 bp, Homo sapiens
cctctatcgccgctg

SEQ ID NO: 1482683 - DNA, 15 bp, Homo sapiens
ccctctatcgccgct

SEQ ID NO: 1482684 - DNA, 15 bp, Homo sapiens
tccctctatcgccgc

SEQ ID NO: 1482685 - DNA, 15 bp, Homo sapiens
atccctctatcgccg

SEQ ID NO: 1482686 - DNA, 15 bp, Homo sapiens
catccctctatcgcc

SEQ ID NO: 1482687 - DNA, 15 bp, Homo sapiens
acatccctctatcgc

SEQ ID NO: 1482688 - DNA, 15 bp, Homo sapiens
aacatccctctatcg

SEQ ID NO: 1482689 - DNA, 15 bp, Homo sapiens
caacatccctctatc

SEQ ID NO: 1482690 - DNA, 15 bp, Homo sapiens
gcaacatccctctat

SEQ ID NO: 1482691 - DNA, 15 bp, Homo sapiens
ggcaacatccctcta

SEQ ID NO: 1482692 - DNA, 15 bp, Homo sapiens
cggcaacatccctct

SEQ ID NO: 1482693 - DNA, 15 bp, Homo sapiens
ccggcaacatccctc

SEQ ID NO: 1482694 - DNA, 15 bp, Homo sapiens
gccggcaacatccct

SEQ ID NO: 1482695 - DNA, 15 bp, Homo sapiens
ggccggcaacatccc

SEQ ID NO: 1482696 - DNA, 15 bp, Homo sapiens
cggccggcaacatcc

SEQ ID NO: 1482697 - DNA, 15 bp, Homo sapiens
tcggccggcaacatc

SEQ ID NO: 1482698 - DNA, 15 bp, Homo sapiens
gtcggccggcaacat

SEQ ID NO: 1482699 - DNA, 15 bp, Homo sapiens
agtcggccggcaaca

SEQ ID NO: 1482700 - DNA, 15 bp, Homo sapiens
aagtcggccggcaac

SEQ ID NO: 1482701 - DNA, 15 bp, Homo sapiens
caagtcggccggcaa

SEQ ID NO: 1482702 - DNA, 15 bp, Homo sapiens
gcaagtcggccggca

SEQ ID NO: 1482703 - DNA, 15 bp, Homo sapiens
tgcaagtcggccggc

SEQ ID NO: 1482704 - DNA, 15 bp, Homo sapiens
atgcaagtcggccgg

SEQ ID NO: 1482705 - DNA, 15 bp, Homo sapiens
gatgcaagtcggccg

SEQ ID NO: 1482706 - DNA, 15 bp, Homo sapiens
cgatgcaagtcggcc

SEQ ID NO: 1482707 - DNA, 15 bp, Homo sapiens
gcgatgcaagtcggc

SEQ ID NO: 1482708 - DNA, 15 bp, Homo sapiens
cgcgatgcaagtcgg

SEQ ID NO: 1482709 - DNA, 15 bp, Homo sapiens
gcgcgatgcaagtcg

SEQ ID NO: 1482710 - DNA, 15 bp, Homo sapiens
tgcgcgatgcaagtc

SEQ ID NO: 1482711 - DNA, 15 bp, Homo sapiens
ctgcgcgatgcaagt

SEQ ID NO: 1482712 - DNA, 15 bp, Homo sapiens
tctgcgcgatgcaag

SEQ ID NO: 1482713 - DNA, 15 bp, Homo sapiens
ctctgcgcgatgcaa

SEQ ID NO: 1482714 - DNA, 15 bp, Homo sapiens
gctctgcgcgatgca

SEQ ID NO: 1482715 - DNA, 15 bp, Homo sapiens
cgctctgcgcgatgc

SEQ ID NO: 1482716 - DNA, 15 bp, Homo sapiens
ccgctctgcgcgatg

SEQ ID NO: 1482717 - DNA, 15 bp, Homo sapiens
accgctctgcgcgat

SEQ ID NO: 1482718 - DNA, 15 bp, Homo sapiens
taccgctctgcgcga

SEQ ID NO: 1482719 - DNA, 15 bp, Homo sapiens
gtaccgctctgcgcg

SEQ ID NO: 1482720 - DNA, 15 bp, Homo sapiens
agtaccgctctgcgc

SEQ ID NO: 1482721 - DNA, 15 bp, Homo sapiens
cagtaccgctctgcg

SEQ ID NO: 1482722 - DNA, 15 bp, Homo sapiens
ccagtaccgctctgc

SEQ ID NO: 1482723 - DNA, 15 bp, Homo sapiens
gccagtaccgctctg

SEQ ID NO: 1482724 - DNA, 15 bp, Homo sapiens
cgccagtaccgctct

SEQ ID NO: 1482725 - DNA, 15 bp, Homo sapiens
tcgccagtaccgctc

SEQ ID NO: 1482726 - DNA, 15 bp, Homo sapiens
atcgccagtaccgct

SEQ ID NO: 1482727 - DNA, 15 bp, Homo sapiens
catcgccagtaccgc

SEQ ID NO: 1482728 - DNA, 15 bp, Homo sapiens
ccatcgccagtaccg

SEQ ID NO: 1482729 - DNA, 15 bp, Homo sapiens
tccatcgccagtacc

SEQ ID NO: 1482730 - DNA, 15 bp, Homo sapiens
ctccatcgccagtac

SEQ ID NO: 1482731 - DNA, 15 bp, Homo sapiens
gctccatcgccagta

SEQ ID NO: 1482732 - DNA, 15 bp, Homo sapiens
agctccatcgccagt

SEQ ID NO: 1482733 - DNA, 15 bp, Homo sapiens
aagctccatcgccag

SEQ ID NO: 1482734 - DNA, 15 bp, Homo sapiens
aaagctccatcgcca

SEQ ID NO: 1482735 - DNA, 15 bp, Homo sapiens
caaagctccatcgcc

SEQ ID NO: 1482736 - DNA, 15 bp, Homo sapiens
ccaaagctccatcgc

SEQ ID NO: 1482737 - DNA, 15 bp, Homo sapiens
gccaaagctccatcg

SEQ ID NO: 1482738 - DNA, 15 bp, Homo sapiens
cgccaaagctccatc

SEQ ID NO: 1482739 - DNA, 15 bp, Homo sapiens
tcgccaaagctccat

SEQ ID NO: 1482740 - DNA, 15 bp, Homo sapiens
gtcgccaaagctcca

SEQ ID NO: 1482741 - DNA, 15 bp, Homo sapiens
tgtcgccaaagctcc

SEQ ID NO: 1482742 - DNA, 15 bp, Homo sapiens
ctgtcgccaaagctc

SEQ ID NO: 1482743 - DNA, 15 bp, Homo sapiens
actgtcgccaaagct

SEQ ID NO: 1482744 - DNA, 15 bp, Homo sapiens
gactgtcgccaaagc

SEQ ID NO: 1482745 - DNA, 15 bp, Homo sapiens
ggactgtcgccaaag

SEQ ID NO: 1482746 - DNA, 15 bp, Homo sapiens
cggactgtcgccaaa

SEQ ID NO: 1482747 - DNA, 15 bp, Homo sapiens
acggactgtcgccaa

SEQ ID NO: 1482748 - DNA, 15 bp, Homo sapiens
cacggactgtcgcca

SEQ ID NO: 1482749 - DNA, 15 bp, Homo sapiens
gcacggactgtcgcc

SEQ ID NO: 1482750 - DNA, 15 bp, Homo sapiens
tgcacggactgtcgc

SEQ ID NO: 1482751 - DNA, 15 bp, Homo sapiens
ctgcacggactgtcg

SEQ ID NO: 1482752 - DNA, 15 bp, Homo sapiens
gctgcacggactgtc

SEQ ID NO: 1482753 - DNA, 15 bp, Homo sapiens
cgctgcacggactgt

SEQ ID NO: 1482754 - DNA, 15 bp, Homo sapiens
acgctgcacggactg

SEQ ID NO: 1482755 - DNA, 15 bp, Homo sapiens
cacgctgcacggact

SEQ ID NO: 1482756 - DNA, 15 bp, Homo sapiens
gcacgctgcacggac

SEQ ID NO: 1482757 - DNA, 15 bp, Homo sapiens
agcacgctgcacgga

SEQ ID NO: 1482758 - DNA, 15 bp, Homo sapiens
cagcacgctgcacgg

SEQ ID NO: 1482759 - DNA, 15 bp, Homo sapiens
ccagcacgctgcacg

SEQ ID NO: 1482760 - DNA, 15 bp, Homo sapiens
cccagcacgctgcac

SEQ ID NO: 1482761 - DNA, 15 bp, Homo sapiens
gcccagcacgctgca

SEQ ID NO: 1482762 - DNA, 15 bp, Homo sapiens
ggcccagcacgctgc

SEQ ID NO: 1482763 - DNA, 15 bp, Homo sapiens
cggcccagcacgctg

SEQ ID NO: 1482764 - DNA, 15 bp, Homo sapiens
tcggcccagcacgct

SEQ ID NO: 1482765 - DNA, 15 bp, Homo sapiens
ttcggcccagcacgc

SEQ ID NO: 1482766 - DNA, 15 bp, Homo sapiens
attcggcccagcacg

SEQ ID NO: 1482767 - DNA, 15 bp, Homo sapiens
cattcggcccagcac

SEQ ID NO: 1482768 - DNA, 15 bp, Homo sapiens
acattcggcccagca

SEQ ID NO: 1482769 - DNA, 15 bp, Homo sapiens
cacattcggcccagc

SEQ ID NO: 1482770 - DNA, 15 bp, Homo sapiens
ccacattcggcccag

SEQ ID NO: 1482771 - DNA, 15 bp, Homo sapiens
accacattcggccca

SEQ ID NO: 1482772 - DNA, 15 bp, Homo sapiens
caccacattcggccc

SEQ ID NO: 1482773 - DNA, 15 bp, Homo sapiens
gcaccacattcggcc

SEQ ID NO: 1482774 - DNA, 15 bp, Homo sapiens
cgcaccacattcggc

SEQ ID NO: 1482775 - DNA, 15 bp, Homo sapiens
tcgcaccacattcgg

SEQ ID NO: 1482776 - DNA, 15 bp, Homo sapiens
gtcgcaccacattcg

SEQ ID NO: 1482777 - DNA, 15 bp, Homo sapiens
cgtcgcaccacattc

SEQ ID NO: 1482778 - DNA, 15 bp, Homo sapiens
gcgtcgcaccacatt

SEQ ID NO: 1482779 - DNA, 15 bp, Homo sapiens
ggcgtcgcaccacat

SEQ ID NO: 1482780 - DNA, 15 bp, Homo sapiens
cggcgtcgcaccaca

SEQ ID NO: 1482781 - DNA, 15 bp, Homo sapiens
tcggcgtcgcaccac

SEQ ID NO: 1482782 - DNA, 15 bp, Homo sapiens
gtcggcgtcgcacca

SEQ ID NO: 1482783 - DNA, 15 bp, Homo sapiens
cgtcggcgtcgcacc

SEQ ID NO: 1482784 - DNA, 15 bp, Homo sapiens
tcgtcggcgtcgcac

SEQ ID NO: 1482785 - DNA, 15 bp, Homo sapiens
gtcgtcggcgtcgca

SEQ ID NO: 1482786 - DNA, 15 bp, Homo sapiens
cgtcgtcggcgtcgc

SEQ ID NO: 1482787 - DNA, 15 bp, Homo sapiens
gcgtcgtcggcgtcg

SEQ ID NO: 1482788 - DNA, 15 bp, Homo sapiens
tgcgtcgtcggcgtc

SEQ ID NO: 1482789 - DNA, 15 bp, Homo sapiens
ctgcgtcgtcggcgt

SEQ ID NO: 1482790 - DNA, 15 bp, Homo sapiens
cctgcgtcgtcggcg

SEQ ID NO: 1482791 - DNA, 15 bp, Homo sapiens
gcctgcgtcgtcggc

SEQ ID NO: 1482792 - DNA, 15 bp, Homo sapiens
cgcctgcgtcgtcgg

SEQ ID NO: 1482793 - DNA, 15 bp, Homo sapiens
tcgcctgcgtcgtcg

SEQ ID NO: 1482794 - DNA, 15 bp, Homo sapiens
ctcgcctgcgtcgtc

SEQ ID NO: 1482795 - DNA, 15 bp, Homo sapiens
actcgcctgcgtcgt

SEQ ID NO: 1482796 - DNA, 15 bp, Homo sapiens
aactcgcctgcgtcg

SEQ ID NO: 1482797 - DNA, 15 bp, Homo sapiens
caactcgcctgcgtc

SEQ ID NO: 1482798 - DNA, 15 bp, Homo sapiens
ccaactcgcctgcgt

SEQ ID NO: 1482799 - DNA, 15 bp, Homo sapiens
cccaactcgcctgcg

SEQ ID NO: 1482800 - DNA, 15 bp, Homo sapiens
gcccaactcgcctgc

SEQ ID NO: 1482801 - DNA, 15 bp, Homo sapiens
cgcccaactcgcctg

SEQ ID NO: 1482802 - DNA, 15 bp, Homo sapiens
acgcccaactcgcct

SEQ ID NO: 1482803 - DNA, 15 bp, Homo sapiens
cacgcccaactcgcc

SEQ ID NO: 1482804 - DNA, 15 bp, Homo sapiens
gcacgcccaactcgc

SEQ ID NO: 1482805 - DNA, 15 bp, Homo sapiens
agcacgcccaactcg

SEQ ID NO: 1482806 - DNA, 15 bp, Homo sapiens
gagcacgcccaactc

SEQ ID NO: 1482807 - DNA, 15 bp, Homo sapiens
cgagcacgcccaact

SEQ ID NO: 1482808 - DNA, 15 bp, Homo sapiens
tcgagcacgcccaac

SEQ ID NO: 1482809 - DNA, 15 bp, Homo sapiens
ctcgagcacgcccaa

SEQ ID NO: 1482810 - DNA, 15 bp, Homo sapiens
cctcgagcacgccca

SEQ ID NO: 1482811 - DNA, 15 bp, Homo sapiens
gcctcgagcacgccc

SEQ ID NO: 1482812 - DNA, 15 bp, Homo sapiens
agcctcgagcacgcc

SEQ ID NO: 1482813 - DNA, 15 bp, Homo sapiens
cagcctcgagcacgc

SEQ ID NO: 1482814 - DNA, 15 bp, Homo sapiens
ccagcctcgagcacg

SEQ ID NO: 1482815 - DNA, 15 bp, Homo sapiens
cccagcctcgagcac

SEQ ID NO: 1482816 - DNA, 15 bp, Homo sapiens
ccccagcctcgagca

SEQ ID NO: 1482817 - DNA, 15 bp, Homo sapiens
tccccagcctcgagc

SEQ ID NO: 1482818 - DNA, 15 bp, Homo sapiens
ctccccagcctcgag

SEQ ID NO: 1482819 - DNA, 15 bp, Homo sapiens
gctccccagcctcga

SEQ ID NO: 1482820 - DNA, 15 bp, Homo sapiens
agctccccagcctcg

SEQ ID NO: 1482821 - DNA, 15 bp, Homo sapiens
cagctccccagcctc

SEQ ID NO: 1482822 - DNA, 15 bp, Homo sapiens
gcagctccccagcct

SEQ ID NO: 1482823 - DNA, 15 bp, Homo sapiens
agcagctccccagcc

SEQ ID NO: 1482824 - DNA, 15 bp, Homo sapiens
gagcagctccccagc

SEQ ID NO: 1482825 - DNA, 15 bp, Homo sapiens
agagcagctccccag

SEQ ID NO: 1482826 - DNA, 15 bp, Homo sapiens
cagagcagctcccca

SEQ ID NO: 1482827 - DNA, 15 bp, Homo sapiens
ccagagcagctcccc

SEQ ID NO: 1482828 - DNA, 15 bp, Homo sapiens
cccagagcagctccc

SEQ ID NO: 1482829 - DNA, 15 bp, Homo sapiens
tcccagagcagctcc

SEQ ID NO: 1482830 - DNA, 15 bp, Homo sapiens
atcccagagcagctc

SEQ ID NO: 1482831 - DNA, 15 bp, Homo sapiens
catcccagagcagct

SEQ ID NO: 1482832 - DNA, 15 bp, Homo sapiens
tcatcccagagcagc

SEQ ID NO: 1482833 - DNA, 15 bp, Homo sapiens
ctcatcccagagcag

SEQ ID NO: 1482834 - DNA, 15 bp, Homo sapiens
cctcatcccagagca

SEQ ID NO: 1482835 - DNA, 15 bp, Homo sapiens
gcctcatcccagagc

SEQ ID NO: 1482836 - DNA, 15 bp, Homo sapiens
cgcctcatcccagag

SEQ ID NO: 1482837 - DNA, 15 bp, Homo sapiens
gcgcctcatcccaga

SEQ ID NO: 1482838 - DNA, 15 bp, Homo sapiens
ggcgcctcatcccag

SEQ ID NO: 1482839 - DNA, 15 bp, Homo sapiens
aggcgcctcatccca

SEQ ID NO: 1482840 - DNA, 15 bp, Homo sapiens
caggcgcctcatccc

SEQ ID NO: 1482841 - DNA, 15 bp, Homo sapiens
gcaggcgcctcatcc

SEQ ID NO: 1482842 - DNA, 15 bp, Homo sapiens
cgcaggcgcctcatc

SEQ ID NO: 1482843 - DNA, 15 bp, Homo sapiens
ccgcaggcgcctcat

SEQ ID NO: 1482844 - DNA, 15 bp, Homo sapiens
cccgcaggcgcctca

SEQ ID NO: 1482845 - DNA, 15 bp, Homo sapiens
tcccgcaggcgcctc

SEQ ID NO: 1482846 - DNA, 15 bp, Homo sapiens
ctcccgcaggcgcct

SEQ ID NO: 1482847 - DNA, 15 bp, Homo sapiens
tctcccgcaggcgcc

SEQ ID NO: 1482848 - DNA, 15 bp, Homo sapiens
gtctcccgcaggcgc

SEQ ID NO: 1482849 - DNA, 15 bp, Homo sapiens
tgtctcccgcaggcg

SEQ ID NO: 1482850 - DNA, 15 bp, Homo sapiens
ctgtctcccgcaggc

SEQ ID NO: 1482851 - DNA, 15 bp, Homo sapiens
cctgtctcccgcagg

SEQ ID NO: 1482852 - DNA, 15 bp, Homo sapiens
tcctgtctcccgcag

SEQ ID NO: 1482853 - DNA, 15 bp, Homo sapiens
ctcctgtctcccgca

SEQ ID NO: 1482854 - DNA, 15 bp, Homo sapiens
cctcctgtctcccgc

SEQ ID NO: 1482855 - DNA, 15 bp, Homo sapiens
acctcctgtctcccg

SEQ ID NO: 1482856 - DNA, 15 bp, Homo sapiens
cacctcctgtctccc

SEQ ID NO: 1482857 - DNA, 15 bp, Homo sapiens
tcacctcctgtctcc

SEQ ID NO: 1482858 - DNA, 15 bp, Homo sapiens
ttcacctcctgtctc

SEQ ID NO: 1482859 - DNA, 15 bp, Homo sapiens
cttcacctcctgtct

SEQ ID NO: 1482860 - DNA, 15 bp, Homo sapiens
gcttcacctcctgtc

SEQ ID NO: 1482861 - DNA, 15 bp, Homo sapiens
cgcttcacctcctgt

SEQ ID NO: 1482862 - DNA, 15 bp, Homo sapiens
tcgcttcacctcctg

SEQ ID NO: 1482863 - DNA, 15 bp, Homo sapiens
ctcgcttcacctcct

SEQ ID NO: 1482864 - DNA, 15 bp, Homo sapiens
actcgcttcacctcc

SEQ ID NO: 1482865 - DNA, 15 bp, Homo sapiens
cactcgcttcacctc

SEQ ID NO: 1482866 - DNA, 15 bp, Homo sapiens
tcactcgcttcacct

SEQ ID NO: 1482867 - DNA, 15 bp, Homo sapiens
ctcactcgcttcacc

SEQ ID NO: 1482868 - DNA, 15 bp, Homo sapiens
actcactcgcttcac

SEQ ID NO: 1482869 - DNA, 15 bp, Homo sapiens
tactcactcgcttca

SEQ ID NO: 1482870 - DNA, 15 bp, Homo sapiens
gtactcactcgcttc

SEQ ID NO: 1482871 - DNA, 15 bp, Homo sapiens
tgtactcactcgctt

SEQ ID NO: 1482872 - DNA, 15 bp, Homo sapiens
ctgtactcactcgct

SEQ ID NO: 1482873 - DNA, 15 bp, Homo sapiens
gctgtactcactcgc

SEQ ID NO: 1482874 - DNA, 15 bp, Homo sapiens
ggctgtactcactcg

SEQ ID NO: 1482875 - DNA, 15 bp, Homo sapiens
gggctgtactcactc

SEQ ID NO: 1482876 - DNA, 15 bp, Homo sapiens
tgggctgtactcact

SEQ ID NO: 1482877 - DNA, 15 bp, Homo sapiens
ttgggctgtactcac

SEQ ID NO: 1482878 - DNA, 15 bp, Homo sapiens
cttgggctgtactca

SEQ ID NO: 1482879 - DNA, 15 bp, Homo sapiens
gcttgggctgtactc

SEQ ID NO: 1482880 - DNA, 15 bp, Homo sapiens
tgcttgggctgtact

SEQ ID NO: 1482881 - DNA, 15 bp, Homo sapiens
gtgcttgggctgtac

SEQ ID NO: 1482882 - DNA, 15 bp, Homo sapiens
ggtgcttgggctgta

SEQ ID NO: 1482883 - DNA, 15 bp, Homo sapiens
tggtgcttgggctgt

SEQ ID NO: 1482884 - DNA, 15 bp, Homo sapiens
ctggtgcttgggctg

SEQ ID NO: 1482885 - DNA, 15 bp, Homo sapiens
gctggtgcttgggct

SEQ ID NO: 1482886 - DNA, 15 bp, Homo sapiens
ggctggtgcttgggc

SEQ ID NO: 1482887 - DNA, 15 bp, Homo sapiens
tggctggtgcttggg

SEQ ID NO: 1482888 - DNA, 15 bp, Homo sapiens
ctggctggtgcttgg

SEQ ID NO: 1482889 - DNA, 15 bp, Homo sapiens
cctggctggtgcttg

SEQ ID NO: 1482890 - DNA, 15 bp, Homo sapiens
gcctggctggtgctt

SEQ ID NO: 1482891 - DNA, 15 bp, Homo sapiens
ggcctggctggtgct

SEQ ID NO: 1482892 - DNA, 15 bp, Homo sapiens
tggcctggctggtgc

SEQ ID NO: 1482893 - DNA, 15 bp, Homo sapiens
gtggcctggctggtg

SEQ ID NO: 1482894 - DNA, 15 bp, Homo sapiens
ggtggcctggctggt

SEQ ID NO: 1482895 - DNA, 15 bp, Homo sapiens
gggtggcctggctgg

SEQ ID NO: 1482896 - DNA, 15 bp, Homo sapiens
ggggtggcctggctg

SEQ ID NO: 1482897 - DNA, 15 bp, Homo sapiens
cggggtggcctggct

SEQ ID NO: 1482898 - DNA, 15 bp, Homo sapiens
gcggggtggcctggc

SEQ ID NO: 1482899 - DNA, 15 bp, Homo sapiens
cgcggggtggcctgg

SEQ ID NO: 1482900 - DNA, 15 bp, Homo sapiens
gcgcggggtggcctg

SEQ ID NO: 1482901 - DNA, 15 bp, Homo sapiens
agcgcggggtggcct

SEQ ID NO: 1482902 - DNA, 15 bp, Homo sapiens
cagcgcggggtggcc

SEQ ID NO: 1482903 - DNA, 15 bp, Homo sapiens
gcagcgcggggtggc

SEQ ID NO: 1482904 - DNA, 15 bp, Homo sapiens
agcagcgcggggtgg

SEQ ID NO: 1482905 - DNA, 15 bp, Homo sapiens
gagcagcgcggggtg

SEQ ID NO: 1482906 - DNA, 15 bp, Homo sapiens
cgagcagcgcggggt

SEQ ID NO: 1482907 - DNA, 15 bp, Homo sapiens
ccgagcagcgcgggg

SEQ ID NO: 1482908 - DNA, 15 bp, Homo sapiens
accgagcagcgcggg

SEQ ID NO: 1482909 - DNA, 15 bp, Homo sapiens
gaccgagcagcgcgg

SEQ ID NO: 1482910 - DNA, 15 bp, Homo sapiens
ggaccgagcagcgcg

SEQ ID NO: 1482911 - DNA, 15 bp, Homo sapiens
gggaccgagcagcgc

SEQ ID NO: 1482912 - DNA, 15 bp, Homo sapiens
ggggaccgagcagcg

SEQ ID NO: 1482913 - DNA, 15 bp, Homo sapiens
cggggaccgagcagc

SEQ ID NO: 1482914 - DNA, 15 bp, Homo sapiens
gcggggaccgagcag

SEQ ID NO: 1482915 - DNA, 15 bp, Homo sapiens
cgcggggaccgagca

SEQ ID NO: 1482916 - DNA, 15 bp, Homo sapiens
gcgcggggaccgagc

SEQ ID NO: 1482917 - DNA, 15 bp, Homo sapiens
tgcgcggggaccgag

SEQ ID NO: 1482918 - DNA, 15 bp, Homo sapiens
ctgcgcggggaccga

SEQ ID NO: 1482919 - DNA, 15 bp, Homo sapiens
cctgcgcggggaccg

SEQ ID NO: 1482920 - DNA, 15 bp, Homo sapiens
acctgcgcggggacc

SEQ ID NO: 1482921 - DNA, 15 bp, Homo sapiens
cacctgcgcggggac

SEQ ID NO: 1482922 - DNA, 15 bp, Homo sapiens
gcacctgcgcgggga

SEQ ID NO: 1482923 - DNA, 15 bp, Homo sapiens
tgcacctgcgcgggg

SEQ ID NO: 1482924 - DNA, 15 bp, Homo sapiens
ctgcacctgcgcggg

SEQ ID NO: 1482925 - DNA, 15 bp, Homo sapiens
cctgcacctgcgcgg

SEQ ID NO: 1482926 - DNA, 15 bp, Homo sapiens
tcctgcacctgcgcg

SEQ ID NO: 1482927 - DNA, 15 bp, Homo sapiens
ctcctgcacctgcgc

SEQ ID NO: 1482928 - DNA, 15 bp, Homo sapiens
cctcctgcacctgcg

SEQ ID NO: 1482929 - DNA, 15 bp, Homo sapiens
acctcctgcacctgc

SEQ ID NO: 1482930 - DNA, 15 bp, Homo sapiens
tacctcctgcacctg

SEQ ID NO: 1482931 - DNA, 15 bp, Homo sapiens
ttacctcctgcacct

SEQ ID NO: 1482932 - DNA, 15 bp, Homo sapiens
attacctcctgcacc

SEQ ID NO: 1482933 - DNA, 15 bp, Homo sapiens
tattacctcctgcac

SEQ ID NO: 1482934 - DNA, 15 bp, Homo sapiens
gtattacctcctgca

SEQ ID NO: 1482935 - DNA, 15 bp, Homo sapiens
ggtattacctcctgc

SEQ ID NO: 1482936 - DNA, 15 bp, Homo sapiens
aggtattacctcctg

SEQ ID NO: 1482937 - DNA, 15 bp, Homo sapiens
taggtattacctcct

SEQ ID NO: 1482938 - DNA, 15 bp, Homo sapiens
ctaggtattacctcc

SEQ ID NO: 1482939 - DNA, 15 bp, Homo sapiens
cctaggtattacctc

SEQ ID NO: 1482940 - DNA, 15 bp, Homo sapiens
acctaggtattacct

SEQ ID NO: 1482941 - DNA, 15 bp, Homo sapiens
tacctaggtattacc

SEQ ID NO: 1482942 - DNA, 15 bp, Homo sapiens
ctacctaggtattac

SEQ ID NO: 1482943 - DNA, 15 bp, Homo sapiens
cctacctaggtatta

SEQ ID NO: 1482944 - DNA, 15 bp, Homo sapiens
gcctacctaggtatt

SEQ ID NO: 1482945 - DNA, 15 bp, Homo sapiens
cgcctacctaggtat

SEQ ID NO: 1482946 - DNA, 15 bp, Homo sapiens
ccgcctacctaggta

SEQ ID NO: 1482947 - DNA, 15 bp, Homo sapiens
tccgcctacctaggt

SEQ ID NO: 1482948 - DNA, 15 bp, Homo sapiens
ctccgcctacctagg

SEQ ID NO: 1482949 - DNA, 15 bp, Homo sapiens
actccgcctacctag

SEQ ID NO: 1482950 - DNA, 15 bp, Homo sapiens
gactccgcctaccta

SEQ ID NO: 1482951 - DNA, 15 bp, Homo sapiens
tgactccgcctacct

SEQ ID NO: 1482952 - DNA, 15 bp, Homo sapiens
ctgactccgcctacc

SEQ ID NO: 1482953 - DNA, 15 bp, Homo sapiens
cctgactccgcctac

SEQ ID NO: 1482954 - DNA, 15 bp, Homo sapiens
gcctgactccgccta

SEQ ID NO: 1482955 - DNA, 15 bp, Homo sapiens
cgcctgactccgcct

SEQ ID NO: 1482956 - DNA, 15 bp, Homo sapiens
acgcctgactccgcc

SEQ ID NO: 1482957 - DNA, 15 bp, Homo sapiens
cacgcctgactccgc

SEQ ID NO: 1482958 - DNA, 15 bp, Homo sapiens
ccacgcctgactccg

SEQ ID NO: 1482959 - DNA, 15 bp, Homo sapiens
tccacgcctgactcc

SEQ ID NO: 1482960 - DNA, 15 bp, Homo sapiens
ctccacgcctgactc

SEQ ID NO: 1482961 - DNA, 15 bp, Homo sapiens
gctccacgcctgact

SEQ ID NO: 1482962 - DNA, 15 bp, Homo sapiens
cgctccacgcctgac

SEQ ID NO: 1482963 - DNA, 15 bp, Homo sapiens
ccgctccacgcctga

SEQ ID NO: 1482964 - DNA, 15 bp, Homo sapiens
accgctccacgcctg

SEQ ID NO: 1482965 - DNA, 15 bp, Homo sapiens
taccgctccacgcct

SEQ ID NO: 1482966 - DNA, 15 bp, Homo sapiens
ctaccgctccacgcc

SEQ ID NO: 1482967 - DNA, 15 bp, Homo sapiens
gctaccgctccacgc

SEQ ID NO: 1482968 - DNA, 15 bp, Homo sapiens
agctaccgctccacg

SEQ ID NO: 1482969 - DNA, 15 bp, Homo sapiens
cagctaccgctccac

SEQ ID NO: 1482970 - DNA, 15 bp, Homo sapiens
acagctaccgctcca

SEQ ID NO: 1482971 - DNA, 15 bp, Homo sapiens
cacagctaccgctcc

SEQ ID NO: 1482972 - DNA, 15 bp, Homo sapiens
gcacagctaccgctc

SEQ ID NO: 1482973 - DNA, 15 bp, Homo sapiens
cgcacagctaccgct

SEQ ID NO: 1482974 - DNA, 15 bp, Homo sapiens
acgcacagctaccgc

SEQ ID NO: 1482975 - DNA, 15 bp, Homo sapiens
cacgcacagctaccg

SEQ ID NO: 1482976 - DNA, 15 bp, Homo sapiens
ccacgcacagctacc

SEQ ID NO: 1482977 - DNA, 15 bp, Homo sapiens
cccacgcacagctac

SEQ ID NO: 1482978 - DNA, 15 bp, Homo sapiens
gcccacgcacagcta

SEQ ID NO: 1482979 - DNA, 15 bp, Homo sapiens
cgcccacgcacagct

SEQ ID NO: 1482980 - DNA, 15 bp, Homo sapiens
tcgcccacgcacagc

SEQ ID NO: 1482981 - DNA, 15 bp, Homo sapiens
ctcgcccacgcacag

SEQ ID NO: 1482982 - DNA, 15 bp, Homo sapiens
gctcgcccacgcaca

SEQ ID NO: 1482983 - DNA, 15 bp, Homo sapiens
cgctcgcccacgcac

SEQ ID NO: 1482984 - DNA, 15 bp, Homo sapiens
gcgctcgcccacgca

SEQ ID NO: 1482985 - DNA, 15 bp, Homo sapiens
cgcgctcgcccacgc

SEQ ID NO: 1482986 - DNA, 15 bp, Homo sapiens
gcgcgctcgcccacg

SEQ ID NO: 1482987 - DNA, 15 bp, Homo sapiens
ggcgcgctcgcccac

SEQ ID NO: 1482988 - DNA, 15 bp, Homo sapiens
cggcgcgctcgccca

SEQ ID NO: 1482989 - DNA, 15 bp, Homo sapiens
ccggcgcgctcgccc

SEQ ID NO: 1482990 - DNA, 15 bp, Homo sapiens
gccggcgcgctcgcc

SEQ ID NO: 1482991 - DNA, 15 bp, Homo sapiens
tgccggcgcgctcgc

SEQ ID NO: 1482992 - DNA, 15 bp, Homo sapiens
ctgccggcgcgctcg

SEQ ID NO: 1482993 - DNA, 15 bp, Homo sapiens
gctgccggcgcgctc

SEQ ID NO: 1482994 - DNA, 15 bp, Homo sapiens
ggctgccggcgcgct

SEQ ID NO: 1482995 - DNA, 15 bp, Homo sapiens
gggctgccggcgcgc

SEQ ID NO: 1482996 - DNA, 15 bp, Homo sapiens
cgggctgccggcgcg

SEQ ID NO: 1482997 - DNA, 15 bp, Homo sapiens
acgggctgccggcgc

SEQ ID NO: 1482998 - DNA, 15 bp, Homo sapiens
cacgggctgccggcg

SEQ ID NO: 1482999 - DNA, 15 bp, Homo sapiens
gcacgggctgccggc

SEQ ID NO: 1483000 - DNA, 15 bp, Homo sapiens
cgcacgggctgccgg

SEQ ID NO: 1483001 - DNA, 15 bp, Homo sapiens
acgcacgggctgccg

SEQ ID NO: 1483002 - DNA, 15 bp, Homo sapiens
tacgcacgggctgcc

SEQ ID NO: 1483003 - DNA, 15 bp, Homo sapiens
ctacgcacgggctgc

SEQ ID NO: 1483004 - DNA, 15 bp, Homo sapiens
cctacgcacgggctg

SEQ ID NO: 1483005 - DNA, 15 bp, Homo sapiens
gcctacgcacgggct

SEQ ID NO: 1483006 - DNA, 15 bp, Homo sapiens
cgcctacgcacgggc

SEQ ID NO: 1483007 - DNA, 15 bp, Homo sapiens
tcgcctacgcacggg

SEQ ID NO: 1483008 - DNA, 15 bp, Homo sapiens
ctcgcctacgcacgg

SEQ ID NO: 1483009 - DNA, 15 bp, Homo sapiens
gctcgcctacgcacg

SEQ ID NO: 1483010 - DNA, 15 bp, Homo sapiens
ggctcgcctacgcac

SEQ ID NO: 1483011 - DNA, 15 bp, Homo sapiens
gggctcgcctacgca

SEQ ID NO: 1483012 - DNA, 15 bp, Homo sapiens
cgggctcgcctacgc

SEQ ID NO: 1483013 - DNA, 15 bp, Homo sapiens
ccgggctcgcctacg

SEQ ID NO: 1483014 - DNA, 15 bp, Homo sapiens
cccgggctcgcctac

SEQ ID NO: 1483015 - DNA, 15 bp, Homo sapiens
tcccgggctcgccta

SEQ ID NO: 1483016 - DNA, 15 bp, Homo sapiens
ctcccgggctcgcct

SEQ ID NO: 1483017 - DNA, 15 bp, Homo sapiens
tctcccgggctcgcc

SEQ ID NO: 1483018 - DNA, 15 bp, Homo sapiens
gtctcccgggctcgc

SEQ ID NO: 1483019 - DNA, 15 bp, Homo sapiens
agtctcccgggctcg

SEQ ID NO: 1483020 - DNA, 15 bp, Homo sapiens
tagtctcccgggctc

SEQ ID NO: 1483021 - DNA, 15 bp, Homo sapiens
atagtctcccgggct

SEQ ID NO: 1483022 - DNA, 15 bp, Homo sapiens
gatagtctcccgggc

SEQ ID NO: 1483023 - DNA, 15 bp, Homo sapiens
cgatagtctcccggg

SEQ ID NO: 1483024 - DNA, 15 bp, Homo sapiens
gcgatagtctcccgg

SEQ ID NO: 1483025 - DNA, 15 bp, Homo sapiens
agcgatagtctcccg

SEQ ID NO: 1483026 - DNA, 15 bp, Homo sapiens
cagcgatagtctccc

SEQ ID NO: 1483027 - DNA, 15 bp, Homo sapiens
ccagcgatagtctcc

SEQ ID NO: 1483028 - DNA, 15 bp, Homo sapiens
tccagcgatagtctc

SEQ ID NO: 1483029 - DNA, 15 bp, Homo sapiens
atccagcgatagtct

SEQ ID NO: 1483030 - DNA, 15 bp, Homo sapiens
catccagcgatagtc

SEQ ID NO: 1483031 - DNA, 15 bp, Homo sapiens
tcatccagcgatagt

SEQ ID NO: 1483032 - DNA, 15 bp, Homo sapiens
gtcatccagcgatag

SEQ ID NO: 1483033 - DNA, 15 bp, Homo sapiens
tgtcatccagcgata

SEQ ID NO: 1483034 - DNA, 15 bp, Homo sapiens
ctgtcatccagcgat

SEQ ID NO: 1483035 - DNA, 15 bp, Homo sapiens
gctgtcatccagcga

SEQ ID NO: 1483036 - DNA, 15 bp, Homo sapiens
cgctgtcatccagcg

SEQ ID NO: 1483037 - DNA, 15 bp, Homo sapiens
tcgctgtcatccagc

SEQ ID NO: 1483038 - DNA, 15 bp, Homo sapiens
ctcgctgtcatccag

SEQ ID NO: 1483039 - DNA, 15 bp, Homo sapiens
gctcgctgtcatcca

SEQ ID NO: 1483040 - DNA, 15 bp, Homo sapiens
cgctcgctgtcatcc

SEQ ID NO: 1483041 - DNA, 15 bp, Homo sapiens
ccgctcgctgtcatc

SEQ ID NO: 1483042 - DNA, 15 bp, Homo sapiens
accgctcgctgtcat

SEQ ID NO: 1483043 - DNA, 15 bp, Homo sapiens
aaccgctcgctgtca

SEQ ID NO: 1483044 - DNA, 15 bp, Homo sapiens
gaaccgctcgctgtc

SEQ ID NO: 1483045 - DNA, 15 bp, Homo sapiens
tgaaccgctcgctgt

SEQ ID NO: 1483046 - DNA, 15 bp, Homo sapiens
ctgaaccgctcgctg

SEQ ID NO: 1483047 - DNA, 15 bp, Homo sapiens
gctgaaccgctcgct

SEQ ID NO: 1483048 - DNA, 15 bp, Homo sapiens
cgctgaaccgctcgc

SEQ ID NO: 1483049 - DNA, 15 bp, Homo sapiens
tcgctgaaccgctcg

SEQ ID NO: 1483050 - DNA, 15 bp, Homo sapiens
gtcgctgaaccgctc

SEQ ID NO: 1483051 - DNA, 15 bp, Homo sapiens
cgtcgctgaaccgct

SEQ ID NO: 1483052 - DNA, 15 bp, Homo sapiens
tcgtcgctgaaccgc

SEQ ID NO: 1483053 - DNA, 15 bp, Homo sapiens
gtcgtcgctgaaccg

SEQ ID NO: 1483054 - DNA, 15 bp, Homo sapiens
tgtcgtcgctgaacc

SEQ ID NO: 1483055 - DNA, 15 bp, Homo sapiens
ctgtcgtcgctgaac

SEQ ID NO: 1483056 - DNA, 15 bp, Homo sapiens
gctgtcgtcgctgaa

SEQ ID NO: 1483057 - DNA, 15 bp, Homo sapiens
cgctgtcgtcgctga

SEQ ID NO: 1483058 - DNA, 15 bp, Homo sapiens
tcgctgtcgtcgctg

SEQ ID NO: 1483059 - DNA, 15 bp, Homo sapiens
ctcgctgtcgtcgct

SEQ ID NO: 1483060 - DNA, 15 bp, Homo sapiens
gctcgctgtcgtcgc

SEQ ID NO: 1483061 - DNA, 15 bp, Homo sapiens
cgctcgctgtcgtcg

SEQ ID NO: 1483062 - DNA, 15 bp, Homo sapiens
ccgctcgctgtcgtc

SEQ ID NO: 1483063 - DNA, 15 bp, Homo sapiens
gccgctcgctgtcgt

SEQ ID NO: 1483064 - DNA, 15 bp, Homo sapiens
agccgctcgctgtcg

SEQ ID NO: 1483065 - DNA, 15 bp, Homo sapiens
tagccgctcgctgtc

SEQ ID NO: 1483066 - DNA, 15 bp, Homo sapiens
ctagccgctcgctgt

SEQ ID NO: 1483067 - DNA, 15 bp, Homo sapiens
actagccgctcgctg

SEQ ID NO: 1483068 - DNA, 15 bp, Homo sapiens
tactagccgctcgct

SEQ ID NO: 1483069 - DNA, 15 bp, Homo sapiens
atactagccgctcgc

SEQ ID NO: 1483070 - DNA, 15 bp, Homo sapiens
catactagccgctcg

SEQ ID NO: 1483071 - DNA, 15 bp, Homo sapiens
gcatactagccgctc

SEQ ID NO: 1483072 - DNA, 15 bp, Homo sapiens
tgcatactagccgct

SEQ ID NO: 1483073 - DNA, 15 bp, Homo sapiens
ctgcatactagccgc

SEQ ID NO: 1483074 - DNA, 15 bp, Homo sapiens
gctgcatactagccg

SEQ ID NO: 1483075 - DNA, 15 bp, Homo sapiens
tgctgcatactagcc

SEQ ID NO: 1483076 - DNA, 15 bp, Homo sapiens
ctgctgcatactagc

SEQ ID NO: 1483077 - DNA, 15 bp, Homo sapiens
cctgctgcatactag

SEQ ID NO: 1483078 - DNA, 15 bp, Homo sapiens
acctgctgcatacta

SEQ ID NO: 1483079 - DNA, 15 bp, Homo sapiens
aacctgctgcatact

SEQ ID NO: 1483080 - DNA, 15 bp, Homo sapiens
gaacctgctgcatac

SEQ ID NO: 1483081 - DNA, 15 bp, Homo sapiens
cgaacctgctgcata

SEQ ID NO: 1483082 - DNA, 15 bp, Homo sapiens
tcgaacctgctgcat

SEQ ID NO: 1483083 - DNA, 15 bp, Homo sapiens
gtcgaacctgctgca

SEQ ID NO: 1483084 - DNA, 15 bp, Homo sapiens
agtcgaacctgctgc

SEQ ID NO: 1483085 - DNA, 15 bp, Homo sapiens
cagtcgaacctgctg

SEQ ID NO: 1483086 - DNA, 15 bp, Homo sapiens
gcagtcgaacctgct

SEQ ID NO: 1483087 - DNA, 15 bp, Homo sapiens
agcagtcgaacctgc

SEQ ID NO: 1483088 - DNA, 15 bp, Homo sapiens
aagcagtcgaacctg

SEQ ID NO: 1483089 - DNA, 15 bp, Homo sapiens
gaagcagtcgaacct

SEQ ID NO: 1483090 - DNA, 15 bp, Homo sapiens
cgaagcagtcgaacc

SEQ ID NO: 1483091 - DNA, 15 bp, Homo sapiens
acgaagcagtcgaac

SEQ ID NO: 1483092 - DNA, 15 bp, Homo sapiens
cacgaagcagtcgaa

SEQ ID NO: 1483093 - DNA, 15 bp, Homo sapiens
tcacgaagcagtcga

SEQ ID NO: 1483094 - DNA, 15 bp, Homo sapiens
atcacgaagcagtcg

SEQ ID NO: 1483095 - DNA, 15 bp, Homo sapiens
gatcacgaagcagtc

SEQ ID NO: 1483096 - DNA, 15 bp, Homo sapiens
agatcacgaagcagt

SEQ ID NO: 1483097 - DNA, 15 bp, Homo sapiens
aagatcacgaagcag

SEQ ID NO: 1483098 - DNA, 15 bp, Homo sapiens
gaagatcacgaagca

SEQ ID NO: 1483099 - DNA, 15 bp, Homo sapiens
ggaagatcacgaagc

SEQ ID NO: 1483100 - DNA, 15 bp, Homo sapiens
cggaagatcacgaag

SEQ ID NO: 1483101 - DNA, 15 bp, Homo sapiens
ccggaagatcacgaa

SEQ ID NO: 1483102 - DNA, 15 bp, Homo sapiens
tccggaagatcacga

SEQ ID NO: 1483103 - DNA, 15 bp, Homo sapiens
ttccggaagatcacg

SEQ ID NO: 1483104 - DNA, 15 bp, Homo sapiens
cttccggaagatcac

SEQ ID NO: 1483105 - DNA, 15 bp, Homo sapiens
tcttccggaagatca

SEQ ID NO: 1483106 - DNA, 15 bp, Homo sapiens
ctcttccggaagatc

SEQ ID NO: 1483107 - DNA, 15 bp, Homo sapiens
cctcttccggaagat

SEQ ID NO: 1483108 - DNA, 15 bp, Homo sapiens
ccctcttccggaaga

SEQ ID NO: 1483109 - DNA, 15 bp, Homo sapiens
tccctcttccggaag

SEQ ID NO: 1483110 - DNA, 15 bp, Homo sapiens
ctccctcttccggaa

SEQ ID NO: 1483111 - DNA, 15 bp, Homo sapiens
gctccctcttccgga

SEQ ID NO: 1483112 - DNA, 15 bp, Homo sapiens
agctccctcttccgg

SEQ ID NO: 1483113 - DNA, 15 bp, Homo sapiens
cagctccctcttccg

SEQ ID NO: 1483114 - DNA, 15 bp, Homo sapiens
gcagctccctcttcc

SEQ ID NO: 1483115 - DNA, 15 bp, Homo sapiens
cgcagctccctcttc

SEQ ID NO: 1483116 - DNA, 15 bp, Homo sapiens
gcgcagctccctctt

SEQ ID NO: 1483117 - DNA, 15 bp, Homo sapiens
agcgcagctccctct

SEQ ID NO: 1483118 - DNA, 15 bp, Homo sapiens
aagcgcagctccctc

SEQ ID NO: 1483119 - DNA, 15 bp, Homo sapiens
gaagcgcagctccct

SEQ ID NO: 1483120 - DNA, 15 bp, Homo sapiens
agaagcgcagctccc

SEQ ID NO: 1483121 - DNA, 15 bp, Homo sapiens
aagaagcgcagctcc

SEQ ID NO: 1483122 - DNA, 15 bp, Homo sapiens
caagaagcgcagctc

SEQ ID NO: 1483123 - DNA, 15 bp, Homo sapiens
gcaagaagcgcagct

SEQ ID NO: 1483124 - DNA, 15 bp, Homo sapiens
agcaagaagcgcagc

SEQ ID NO: 1483125 - DNA, 15 bp, Homo sapiens
cagcaagaagcgcag

SEQ ID NO: 1483126 - DNA, 15 bp, Homo sapiens
gcagcaagaagcgca

SEQ ID NO: 1483127 - DNA, 15 bp, Homo sapiens
cgcagcaagaagcgc

SEQ ID NO: 1483128 - DNA, 15 bp, Homo sapiens
ccgcagcaagaagcg

SEQ ID NO: 1483129 - DNA, 15 bp, Homo sapiens
cccgcagcaagaagc

SEQ ID NO: 1483130 - DNA, 15 bp, Homo sapiens
tcccgcagcaagaag

SEQ ID NO: 1483131 - DNA, 15 bp, Homo sapiens
gtcccgcagcaagaa

SEQ ID NO: 1483132 - DNA, 15 bp, Homo sapiens
tgtcccgcagcaaga

SEQ ID NO: 1483133 - DNA, 15 bp, Homo sapiens
ctgtcccgcagcaag

SEQ ID NO: 1483134 - DNA, 15 bp, Homo sapiens
cctgtcccgcagcaa

SEQ ID NO: 1483135 - DNA, 15 bp, Homo sapiens
ccctgtcccgcagca

SEQ ID NO: 1483136 - DNA, 15 bp, Homo sapiens
tccctgtcccgcagc

SEQ ID NO: 1483137 - DNA, 15 bp, Homo sapiens
ctccctgtcccgcag

SEQ ID NO: 1483138 - DNA, 15 bp, Homo sapiens
cctccctgtcccgca

SEQ ID NO: 1483139 - DNA, 15 bp, Homo sapiens
ccctccctgtcccgc

SEQ ID NO: 1483140 - DNA, 15 bp, Homo sapiens
cccctccctgtcccg

SEQ ID NO: 1483141 - DNA, 15 bp, Homo sapiens
ccccctccctgtccc

SEQ ID NO: 1483142 - DNA, 15 bp, Homo sapiens
gccccctccctgtcc

SEQ ID NO: 1483143 - DNA, 15 bp, Homo sapiens
ggccccctccctgtc

SEQ ID NO: 1483144 - DNA, 15 bp, Homo sapiens
tggccccctccctgt

SEQ ID NO: 1483145 - DNA, 15 bp, Homo sapiens
ttggccccctccctg

SEQ ID NO: 1483146 - DNA, 15 bp, Homo sapiens
cttggccccctccct

SEQ ID NO: 1483147 - DNA, 15 bp, Homo sapiens
gcttggccccctccc

SEQ ID NO: 1483148 - DNA, 15 bp, Homo sapiens
cgcttggccccctcc

SEQ ID NO: 1483149 - DNA, 15 bp, Homo sapiens
acgcttggccccctc

SEQ ID NO: 1483150 - DNA, 15 bp, Homo sapiens
gacgcttggccccct

SEQ ID NO: 1483151 - DNA, 15 bp, Homo sapiens
ggacgcttggccccc

SEQ ID NO: 1483152 - DNA, 15 bp, Homo sapiens
aggacgcttggcccc

SEQ ID NO: 1483153 - DNA, 15 bp, Homo sapiens
aaggacgcttggccc

SEQ ID NO: 1483154 - DNA, 15 bp, Homo sapiens
caaggacgcttggcc

SEQ ID NO: 1483155 - DNA, 15 bp, Homo sapiens
tcaaggacgcttggc

SEQ ID NO: 1483156 - DNA, 15 bp, Homo sapiens
gtcaaggacgcttgg

SEQ ID NO: 1483157 - DNA, 15 bp, Homo sapiens
ggtcaaggacgcttg

SEQ ID NO: 1483158 - DNA, 15 bp, Homo sapiens
aggtcaaggacgctt

SEQ ID NO: 1483159 - DNA, 15 bp, Homo sapiens
caggtcaaggacgct

SEQ ID NO: 1483160 - DNA, 15 bp, Homo sapiens
ccaggtcaaggacgc

SEQ ID NO: 1483161 - DNA, 15 bp, Homo sapiens
tccaggtcaaggacg

SEQ ID NO: 1483162 - DNA, 15 bp, Homo sapiens
gtccaggtcaaggac

SEQ ID NO: 1483163 - DNA, 15 bp, Homo sapiens
cgtccaggtcaagga

SEQ ID NO: 1483164 - DNA, 15 bp, Homo sapiens
gcgtccaggtcaagg

SEQ ID NO: 1483165 - DNA, 15 bp, Homo sapiens
ggcgtccaggtcaag

SEQ ID NO: 1483166 - DNA, 15 bp, Homo sapiens
tggcgtccaggtcaa

SEQ ID NO: 1483167 - DNA, 15 bp, Homo sapiens
ctggcgtccaggtca

SEQ ID NO: 1483168 - DNA, 15 bp, Homo sapiens
tctggcgtccaggtc

SEQ ID NO: 1483169 - DNA, 15 bp, Homo sapiens
ctctggcgtccaggt

SEQ ID NO: 1483170 - DNA, 15 bp, Homo sapiens
gctctggcgtccagg

SEQ ID NO: 1483171 - DNA, 15 bp, Homo sapiens
agctctggcgtccag

SEQ ID NO: 1483172 - DNA, 15 bp, Homo sapiens
gagctctggcgtcca

SEQ ID NO: 1483173 - DNA, 15 bp, Homo sapiens
tgagctctggcgtcc

SEQ ID NO: 1483174 - DNA, 15 bp, Homo sapiens
ctgagctctggcgtc

SEQ ID NO: 1483175 - DNA, 15 bp, Homo sapiens
cctgagctctggcgt

SEQ ID NO: 1483176 - DNA, 15 bp, Homo sapiens
ccctgagctctggcg

SEQ ID NO: 1483177 - DNA, 15 bp, Homo sapiens
gccctgagctctggc

SEQ ID NO: 1483178 - DNA, 15 bp, Homo sapiens
agccctgagctctgg

SEQ ID NO: 1483179 - DNA, 15 bp, Homo sapiens
gagccctgagctctg

SEQ ID NO: 1483180 - DNA, 15 bp, Homo sapiens
ggagccctgagctct

SEQ ID NO: 1483181 - DNA, 15 bp, Homo sapiens
aggagccctgagctc

SEQ ID NO: 1483182 - DNA, 15 bp, Homo sapiens
gaggagccctgagct

SEQ ID NO: 1483183 - DNA, 15 bp, Homo sapiens
ggaggagccctgagc

SEQ ID NO: 1483184 - DNA, 15 bp, Homo sapiens
gggaggagccctgag

SEQ ID NO: 1483185 - DNA, 15 bp, Homo sapiens
tgggaggagccctga

SEQ ID NO: 1483186 - DNA, 15 bp, Homo sapiens
atgggaggagccctg

SEQ ID NO: 1483187 - DNA, 15 bp, Homo sapiens
aatgggaggagccct

SEQ ID NO: 1483188 - DNA, 15 bp, Homo sapiens
aaatgggaggagccc

SEQ ID NO: 1483189 - DNA, 15 bp, Homo sapiens
gaaatgggaggagcc

SEQ ID NO: 1483190 - DNA, 15 bp, Homo sapiens
tgaaatgggaggagc

SEQ ID NO: 1483191 - DNA, 15 bp, Homo sapiens
gtgaaatgggaggag

SEQ ID NO: 1483192 - DNA, 15 bp, Homo sapiens
cgtgaaatgggagga

SEQ ID NO: 1483193 - DNA, 15 bp, Homo sapiens
ccgtgaaatgggagg

SEQ ID NO: 1483194 - DNA, 15 bp, Homo sapiens
gccgtgaaatgggag

SEQ ID NO: 1483195 - DNA, 15 bp, Homo sapiens
ggccgtgaaatggga

SEQ ID NO: 1483196 - DNA, 15 bp, Homo sapiens
aggccgtgaaatggg

SEQ ID NO: 1483197 - DNA, 15 bp, Homo sapiens
gaggccgtgaaatgg

SEQ ID NO: 1483198 - DNA, 15 bp, Homo sapiens
tgaggccgtgaaatg

SEQ ID NO: 1483199 - DNA, 15 bp, Homo sapiens
gtgaggccgtgaaat

SEQ ID NO: 1483200 - DNA, 15 bp, Homo sapiens
tgtgaggccgtgaaa

SEQ ID NO: 1483201 - DNA, 15 bp, Homo sapiens
ttgtgaggccgtgaa

SEQ ID NO: 1483202 - DNA, 15 bp, Homo sapiens
gttgtgaggccgtga

SEQ ID NO: 1483203 - DNA, 15 bp, Homo sapiens
cgttgtgaggccgtg

SEQ ID NO: 1483204 - DNA, 15 bp, Homo sapiens
ccgttgtgaggccgt

SEQ ID NO: 1483205 - DNA, 15 bp, Homo sapiens
accgttgtgaggccg

SEQ ID NO: 1483206 - DNA, 15 bp, Homo sapiens
taccgttgtgaggcc

SEQ ID NO: 1483207 - DNA, 15 bp, Homo sapiens
ttaccgttgtgaggc

SEQ ID NO: 1483208 - DNA, 15 bp, Homo sapiens
gttaccgttgtgagg

SEQ ID NO: 1483209 - DNA, 15 bp, Homo sapiens
ggttaccgttgtgag

SEQ ID NO: 1483210 - DNA, 15 bp, Homo sapiens
tggttaccgttgtga

SEQ ID NO: 1483211 - DNA, 15 bp, Homo sapiens
gtggttaccgttgtg

SEQ ID NO: 1483212 - DNA, 15 bp, Homo sapiens
ggtggttaccgttgt

SEQ ID NO: 1483213 - DNA, 15 bp, Homo sapiens
gggtggttaccgttg

SEQ ID NO: 1483214 - DNA, 15 bp, Homo sapiens
tgggtggttaccgtt

SEQ ID NO: 1483215 - DNA, 15 bp, Homo sapiens
gtgggtggttaccgt

SEQ ID NO: 1483216 - DNA, 15 bp, Homo sapiens
ggtgggtggttaccg

SEQ ID NO: 1483217 - DNA, 15 bp, Homo sapiens
gggtgggtggttacc

SEQ ID NO: 1483218 - DNA, 15 bp, Homo sapiens
ggggtgggtggttac

SEQ ID NO: 1483219 - DNA, 15 bp, Homo sapiens
aggggtgggtggtta

SEQ ID NO: 1483220 - DNA, 15 bp, Homo sapiens
aaggggtgggtggtt

SEQ ID NO: 1483221 - DNA, 15 bp, Homo sapiens
gaaggggtgggtggt

SEQ ID NO: 1483222 - DNA, 15 bp, Homo sapiens
agaaggggtgggtgg

SEQ ID NO: 1483223 - DNA, 15 bp, Homo sapiens
cagaaggggtgggtg

SEQ ID NO: 1483224 - DNA, 15 bp, Homo sapiens
ccagaaggggtgggt

SEQ ID NO: 1483225 - DNA, 15 bp, Homo sapiens
gccagaaggggtggg

SEQ ID NO: 1483226 - DNA, 15 bp, Homo sapiens
ggccagaaggggtgg

SEQ ID NO: 1483227 - DNA, 15 bp, Homo sapiens
gggccagaaggggtg

SEQ ID NO: 1483228 - DNA, 15 bp, Homo sapiens
agggccagaaggggt

SEQ ID NO: 1483229 - DNA, 15 bp, Homo sapiens
aagggccagaagggg

SEQ ID NO: 1483230 - DNA, 15 bp, Homo sapiens
gaagggccagaaggg

SEQ ID NO: 1483231 - DNA, 15 bp, Homo sapiens
ggaagggccagaagg

SEQ ID NO: 1483232 - DNA, 15 bp, Homo sapiens
gggaagggccagaag

SEQ ID NO: 1483233 - DNA, 15 bp, Homo sapiens
agggaagggccagaa

SEQ ID NO: 1483234 - DNA, 15 bp, Homo sapiens
gagggaagggccaga

SEQ ID NO: 1483235 - DNA, 15 bp, Homo sapiens
agagggaagggccag

SEQ ID NO: 1483236 - DNA, 15 bp, Homo sapiens
gagagggaagggcca

SEQ ID NO: 1483237 - DNA, 15 bp, Homo sapiens
ggagagggaagggcc

SEQ ID NO: 1483238 - DNA, 15 bp, Homo sapiens
tggagagggaagggc

SEQ ID NO: 1483239 - DNA, 15 bp, Homo sapiens
ctggagagggaaggg

SEQ ID NO: 1483240 - DNA, 15 bp, Homo sapiens
gctggagagggaagg

SEQ ID NO: 1483241 - DNA, 15 bp, Homo sapiens
agctggagagggaag

SEQ ID NO: 1483242 - DNA, 15 bp, Homo sapiens
tagctggagagggaa

SEQ ID NO: 1483243 - DNA, 15 bp, Homo sapiens
gtagctggagaggga

SEQ ID NO: 1483244 - DNA, 15 bp, Homo sapiens
tgtagctggagaggg

SEQ ID NO: 1483245 - DNA, 15 bp, Homo sapiens
ttgtagctggagagg

SEQ ID NO: 1483246 - DNA, 15 bp, Homo sapiens
gttgtagctggagag

SEQ ID NO: 1483247 - DNA, 15 bp, Homo sapiens
ggttgtagctggaga

SEQ ID NO: 1483248 - DNA, 15 bp, Homo sapiens
gggttgtagctggag

SEQ ID NO: 1483249 - DNA, 15 bp, Homo sapiens
tgggttgtagctgga

SEQ ID NO: 1483250 - DNA, 15 bp, Homo sapiens
gtgggttgtagctgg

SEQ ID NO: 1483251 - DNA, 15 bp, Homo sapiens
ggtgggttgtagctg

SEQ ID NO: 1483252 - DNA, 15 bp, Homo sapiens
aggtgggttgtagct

SEQ ID NO: 1483253 - DNA, 15 bp, Homo sapiens
taggtgggttgtagc

SEQ ID NO: 1483254 - DNA, 15 bp, Homo sapiens
ataggtgggttgtag

SEQ ID NO: 1483255 - DNA, 15 bp, Homo sapiens
gataggtgggttgta

SEQ ID NO: 1483256 - DNA, 15 bp, Homo sapiens
tgataggtgggttgt

SEQ ID NO: 1483257 - DNA, 15 bp, Homo sapiens
ttgataggtgggttg

SEQ ID NO: 1483258 - DNA, 15 bp, Homo sapiens
cttgataggtgggtt

SEQ ID NO: 1483259 - DNA, 15 bp, Homo sapiens
tcttgataggtgggt

SEQ ID NO: 1483260 - DNA, 15 bp, Homo sapiens
atcttgataggtggg

SEQ ID NO: 1483261 - DNA, 15 bp, Homo sapiens
tatcttgataggtgg

SEQ ID NO: 1483262 - DNA, 15 bp, Homo sapiens
ttatcttgataggtg

SEQ ID NO: 1483263 - DNA, 15 bp, Homo sapiens
tttatcttgataggt

SEQ ID NO: 1483264 - DNA, 15 bp, Homo sapiens
ctttatcttgatagg

SEQ ID NO: 1483265 - DNA, 15 bp, Homo sapiens
tctttatcttgatag

SEQ ID NO: 1483266 - DNA, 15 bp, Homo sapiens
ttctttatcttgata

SEQ ID NO: 1483267 - DNA, 15 bp, Homo sapiens
gttctttatcttgat

SEQ ID NO: 1483268 - DNA, 15 bp, Homo sapiens
agttctttatcttga

SEQ ID NO: 1483269 - DNA, 15 bp, Homo sapiens
aagttctttatcttg

SEQ ID NO: 1483270 - DNA, 15 bp, Homo sapiens
gaagttctttatctt

SEQ ID NO: 1483271 - DNA, 15 bp, Homo sapiens
ggaagttctttatct

SEQ ID NO: 1483272 - DNA, 15 bp, Homo sapiens
aggaagttctttatc

SEQ ID NO: 1483273 - DNA, 15 bp, Homo sapiens
aaggaagttctttat

SEQ ID NO: 1483274 - DNA, 15 bp, Homo sapiens
aaaggaagttcttta

SEQ ID NO: 1483275 - DNA, 15 bp, Homo sapiens
taaaggaagttcttt

SEQ ID NO: 1483276 - DNA, 15 bp, Homo sapiens
ctaaaggaagttctt

SEQ ID NO: 1483277 - DNA, 15 bp, Homo sapiens
gctaaaggaagttct

SEQ ID NO: 1483278 - DNA, 15 bp, Homo sapiens
agctaaaggaagttc

SEQ ID NO: 1483279 - DNA, 15 bp, Homo sapiens
gagctaaaggaagtt

SEQ ID NO: 1483280 - DNA, 15 bp, Homo sapiens
tgagctaaaggaagt

SEQ ID NO: 1483281 - DNA, 15 bp, Homo sapiens
ctgagctaaaggaag

SEQ ID NO: 1483282 - DNA, 15 bp, Homo sapiens
actgagctaaaggaa

SEQ ID NO: 1483283 - DNA, 15 bp, Homo sapiens
cactgagctaaagga

SEQ ID NO: 1483284 - DNA, 15 bp, Homo sapiens
gcactgagctaaagg

SEQ ID NO: 1483285 - DNA, 15 bp, Homo sapiens
agcactgagctaaag

SEQ ID NO: 1483286 - DNA, 15 bp, Homo sapiens
cagcactgagctaaa

SEQ ID NO: 1483287 - DNA, 15 bp, Homo sapiens
gcagcactgagctaa

SEQ ID NO: 1483288 - DNA, 15 bp, Homo sapiens
agcagcactgagcta

SEQ ID NO: 1483289 - DNA, 15 bp, Homo sapiens
aagcagcactgagct

SEQ ID NO: 1483290 - DNA, 15 bp, Homo sapiens
caagcagcactgagc

SEQ ID NO: 1483291 - DNA, 15 bp, Homo sapiens
ccaagcagcactgag

SEQ ID NO: 1483292 - DNA, 15 bp, Homo sapiens
gccaagcagcactga

SEQ ID NO: 1483293 - DNA, 15 bp, Homo sapiens
agccaagcagcactg

SEQ ID NO: 1483294 - DNA, 15 bp, Homo sapiens
gagccaagcagcact

SEQ ID NO: 1483295 - DNA, 15 bp, Homo sapiens
ggagccaagcagcac

SEQ ID NO: 1483296 - DNA, 15 bp, Homo sapiens
aggagccaagcagca

SEQ ID NO: 1483297 - DNA, 15 bp, Homo sapiens
gaggagccaagcagc

SEQ ID NO: 1483298 - DNA, 15 bp, Homo sapiens
ggaggagccaagcag

SEQ ID NO: 1483299 - DNA, 15 bp, Homo sapiens
gggaggagccaagca

SEQ ID NO: 1483300 - DNA, 15 bp, Homo sapiens
tgggaggagccaagc

SEQ ID NO: 1483301 - DNA, 15 bp, Homo sapiens
gtgggaggagccaag

SEQ ID NO: 1483302 - DNA, 15 bp, Homo sapiens
agtgggaggagccaa

SEQ ID NO: 1483303 - DNA, 15 bp, Homo sapiens
aagtgggaggagcca

SEQ ID NO: 1483304 - DNA, 15 bp, Homo sapiens
gaagtgggaggagcc

SEQ ID NO: 1483305 - DNA, 15 bp, Homo sapiens
tgaagtgggaggagc

SEQ ID NO: 1483306 - DNA, 15 bp, Homo sapiens
ctgaagtgggaggag

SEQ ID NO: 1483307 - DNA, 15 bp, Homo sapiens
actgaagtgggagga

SEQ ID NO: 1483308 - DNA, 15 bp, Homo sapiens
gactgaagtgggagg

SEQ ID NO: 1483309 - DNA, 15 bp, Homo sapiens
ggactgaagtgggag

SEQ ID NO: 1483310 - DNA, 15 bp, Homo sapiens
gggactgaagtggga

SEQ ID NO: 1483311 - DNA, 15 bp, Homo sapiens
ggggactgaagtggg

SEQ ID NO: 1483312 - DNA, 15 bp, Homo sapiens
tggggactgaagtgg

SEQ ID NO: 1483313 - DNA, 15 bp, Homo sapiens
gtggggactgaagtg

SEQ ID NO: 1483314 - DNA, 15 bp, Homo sapiens
ggtggggactgaagt

SEQ ID NO: 1483315 - DNA, 15 bp, Homo sapiens
gggtggggactgaag

SEQ ID NO: 1483316 - DNA, 15 bp, Homo sapiens
tgggtggggactgaa

SEQ ID NO: 1483317 - DNA, 15 bp, Homo sapiens
gtgggtggggactga

SEQ ID NO: 1483318 - DNA, 15 bp, Homo sapiens
ggtgggtggggactg

SEQ ID NO: 1483319 - DNA, 15 bp, Homo sapiens
gggtgggtggggact

SEQ ID NO: 1483320 - DNA, 15 bp, Homo sapiens
ggggtgggtggggac

SEQ ID NO: 1483321 - DNA, 15 bp, Homo sapiens
gggggtgggtgggga

SEQ ID NO: 1483322 - DNA, 15 bp, Homo sapiens
agggggtgggtgggg

SEQ ID NO: 1483323 - DNA, 15 bp, Homo sapiens
aagggggtgggtggg

SEQ ID NO: 1483324 - DNA, 15 bp, Homo sapiens
aaagggggtgggtgg

SEQ ID NO: 1483325 - DNA, 15 bp, Homo sapiens
caaagggggtgggtg

SEQ ID NO: 1483326 - DNA, 15 bp, Homo sapiens
ccaaagggggtgggt

SEQ ID NO: 1483327 - DNA, 15 bp, Homo sapiens
gccaaagggggtggg

SEQ ID NO: 1483328 - DNA, 15 bp, Homo sapiens
ggccaaagggggtgg

SEQ ID NO: 1483329 - DNA, 15 bp, Homo sapiens
tggccaaagggggtg

SEQ ID NO: 1483330 - DNA, 15 bp, Homo sapiens
gtggccaaagggggt

SEQ ID NO: 1483331 - DNA, 15 bp, Homo sapiens
agtggccaaaggggg

SEQ ID NO: 1483332 - DNA, 15 bp, Homo sapiens
gagtggccaaagggg

SEQ ID NO: 1483333 - DNA, 15 bp, Homo sapiens
ggagtggccaaaggg

SEQ ID NO: 1483334 - DNA, 15 bp, Homo sapiens
aggagtggccaaagg

SEQ ID NO: 1483335 - DNA, 15 bp, Homo sapiens
taggagtggccaaag

SEQ ID NO: 1483336 - DNA, 15 bp, Homo sapiens
ctaggagtggccaaa

SEQ ID NO: 1483337 - DNA, 15 bp, Homo sapiens
actaggagtggccaa

SEQ ID NO: 1483338 - DNA, 15 bp, Homo sapiens
gactaggagtggcca

SEQ ID NO: 1483339 - DNA, 15 bp, Homo sapiens
ggactaggagtggcc

SEQ ID NO: 1483340 - DNA, 15 bp, Homo sapiens
tggactaggagtggc

SEQ ID NO: 1483341 - DNA, 15 bp, Homo sapiens
ttggactaggagtgg

SEQ ID NO: 1483342 - DNA, 15 bp, Homo sapiens
cttggactaggagtg

SEQ ID NO: 1483343 - DNA, 15 bp, Homo sapiens
gcttggactaggagt

SEQ ID NO: 1483344 - DNA, 15 bp, Homo sapiens
agcttggactaggag

SEQ ID NO: 1483345 - DNA, 15 bp, Homo sapiens
tagcttggactagga

SEQ ID NO: 1483346 - DNA, 15 bp, Homo sapiens
ctagcttggactagg

SEQ ID NO: 1483347 - DNA, 15 bp, Homo sapiens
tctagcttggactag

SEQ ID NO: 1483348 - DNA, 15 bp, Homo sapiens
ttctagcttggacta

SEQ ID NO: 1483349 - DNA, 15 bp, Homo sapiens
tttctagcttggact

SEQ ID NO: 1483350 - DNA, 15 bp, Homo sapiens
gtttctagcttggac

SEQ ID NO: 1483351 - DNA, 15 bp, Homo sapiens
tgtttctagcttgga

SEQ ID NO: 1483352 - DNA, 15 bp, Homo sapiens
ttgtttctagcttgg

SEQ ID NO: 1483353 - DNA, 15 bp, Homo sapiens
cttgtttctagcttg

SEQ ID NO: 1483354 - DNA, 15 bp, Homo sapiens
gcttgtttctagctt

SEQ ID NO: 1483355 - DNA, 15 bp, Homo sapiens
tgcttgtttctagct

SEQ ID NO: 1483356 - DNA, 15 bp, Homo sapiens
atgcttgtttctagc

SEQ ID NO: 1483357 - DNA, 15 bp, Homo sapiens
gatgcttgtttctag

SEQ ID NO: 1483358 - DNA, 15 bp, Homo sapiens
ggatgcttgtttcta

SEQ ID NO: 1483359 - DNA, 15 bp, Homo sapiens
tggatgcttgtttct

SEQ ID NO: 1483360 - DNA, 15 bp, Homo sapiens
ttggatgcttgtttc

SEQ ID NO: 1483361 - DNA, 15 bp, Homo sapiens
tttggatgcttgttt

SEQ ID NO: 1483362 - DNA, 15 bp, Homo sapiens
gtttggatgcttgtt

SEQ ID NO: 1483363 - DNA, 15 bp, Homo sapiens
tgtttggatgcttgt

SEQ ID NO: 1483364 - DNA, 15 bp, Homo sapiens
ttgtttggatgcttg

SEQ ID NO: 1483365 - DNA, 15 bp, Homo sapiens
tttgtttggatgctt

SEQ ID NO: 1483366 - DNA, 15 bp, Homo sapiens
ttttgtttggatgct

SEQ ID NO: 1483367 - DNA, 15 bp, Homo sapiens
gttttgtttggatgc

SEQ ID NO: 1483368 - DNA, 15 bp, Homo sapiens
ggttttgtttggatg

SEQ ID NO: 1483369 - DNA, 15 bp, Homo sapiens
tggttttgtttggat

SEQ ID NO: 1483370 - DNA, 15 bp, Homo sapiens
ttggttttgtttgga

SEQ ID NO: 1483371 - DNA, 15 bp, Homo sapiens
gttggttttgtttgg

SEQ ID NO: 1483372 - DNA, 15 bp, Homo sapiens
ggttggttttgtttg

SEQ ID NO: 1483373 - DNA, 15 bp, Homo sapiens
aggttggttttgttt

SEQ ID NO: 1483374 - DNA, 15 bp, Homo sapiens
caggttggttttgtt

SEQ ID NO: 1483375 - DNA, 15 bp, Homo sapiens
acaggttggttttgt

SEQ ID NO: 1483376 - DNA, 15 bp, Homo sapiens
aacaggttggttttg

SEQ ID NO: 1483377 - DNA, 15 bp, Homo sapiens
gaacaggttggtttt

SEQ ID NO: 1483378 - DNA, 15 bp, Homo sapiens
agaacaggttggttt

SEQ ID NO: 1483379 - DNA, 15 bp, Homo sapiens
cagaacaggttggtt

SEQ ID NO: 1483380 - DNA, 15 bp, Homo sapiens
gcagaacaggttggt

SEQ ID NO: 1483381 - DNA, 15 bp, Homo sapiens
ggcagaacaggttgg

SEQ ID NO: 1483382 - DNA, 15 bp, Homo sapiens
gggcagaacaggttg

SEQ ID NO: 1483383 - DNA, 15 bp, Homo sapiens
ggggcagaacaggtt

SEQ ID NO: 1483384 - DNA, 15 bp, Homo sapiens
cggggcagaacaggt

SEQ ID NO: 1483385 - DNA, 15 bp, Homo sapiens
gcggggcagaacagg

SEQ ID NO: 1483386 - DNA, 15 bp, Homo sapiens
ggcggggcagaacag

SEQ ID NO: 1483387 - DNA, 15 bp, Homo sapiens
gggcggggcagaaca

SEQ ID NO: 1483388 - DNA, 15 bp, Homo sapiens
tgggcggggcagaac

SEQ ID NO: 1483389 - DNA, 15 bp, Homo sapiens
gtgggcggggcagaa

SEQ ID NO: 1483390 - DNA, 15 bp, Homo sapiens
ggtgggcggggcaga

SEQ ID NO: 1483391 - DNA, 15 bp, Homo sapiens
aggtgggcggggcag

SEQ ID NO: 1483392 - DNA, 15 bp, Homo sapiens
gaggtgggcggggca

SEQ ID NO: 1483393 - DNA, 15 bp, Homo sapiens
agaggtgggcggggc

SEQ ID NO: 1483394 - DNA, 15 bp, Homo sapiens
gagaggtgggcgggg

SEQ ID NO: 1483395 - DNA, 15 bp, Homo sapiens
agagaggtgggcggg

SEQ ID NO: 1483396 - DNA, 15 bp, Homo sapiens
tagagaggtgggcgg

SEQ ID NO: 1483397 - DNA, 15 bp, Homo sapiens
ctagagaggtgggcg

SEQ ID NO: 1483398 - DNA, 15 bp, Homo sapiens
gctagagaggtgggc

SEQ ID NO: 1483399 - DNA, 15 bp, Homo sapiens
agctagagaggtggg

SEQ ID NO: 1483400 - DNA, 15 bp, Homo sapiens
gagctagagaggtgg

SEQ ID NO: 1483401 - DNA, 15 bp, Homo sapiens
ggagctagagaggtg

SEQ ID NO: 1483402 - DNA, 15 bp, Homo sapiens
aggagctagagaggt

SEQ ID NO: 1483403 - DNA, 15 bp, Homo sapiens
gaggagctagagagg

SEQ ID NO: 1483404 - DNA, 15 bp, Homo sapiens
ggaggagctagagag

SEQ ID NO: 1483405 - DNA, 15 bp, Homo sapiens
gggaggagctagaga

SEQ ID NO: 1483406 - DNA, 15 bp, Homo sapiens
agggaggagctagag

SEQ ID NO: 1483407 - DNA, 15 bp, Homo sapiens
gagggaggagctaga

SEQ ID NO: 1483408 - DNA, 15 bp, Homo sapiens
agagggaggagctag

SEQ ID NO: 1483409 - DNA, 15 bp, Homo sapiens
aagagggaggagcta

SEQ ID NO: 1483410 - DNA, 15 bp, Homo sapiens
gaagagggaggagct

SEQ ID NO: 1483411 - DNA, 15 bp, Homo sapiens
ggaagagggaggagc

SEQ ID NO: 1483412 - DNA, 15 bp, Homo sapiens
tggaagagggaggag

SEQ ID NO: 1483413 - DNA, 15 bp, Homo sapiens
gtggaagagggagga

SEQ ID NO: 1483414 - DNA, 15 bp, Homo sapiens
agtggaagagggagg

SEQ ID NO: 1483415 - DNA, 15 bp, Homo sapiens
tagtggaagagggag

SEQ ID NO: 1483416 - DNA, 15 bp, Homo sapiens
gtagtggaagaggga

SEQ ID NO: 1483417 - DNA, 15 bp, Homo sapiens
tgtagtggaagaggg

SEQ ID NO: 1483418 - DNA, 15 bp, Homo sapiens
ttgtagtggaagagg

SEQ ID NO: 1483419 - DNA, 15 bp, Homo sapiens
attgtagtggaagag

SEQ ID NO: 1483420 - DNA, 15 bp, Homo sapiens
gattgtagtggaaga

SEQ ID NO: 1483421 - DNA, 15 bp, Homo sapiens
ggattgtagtggaag

SEQ ID NO: 1483422 - DNA, 15 bp, Homo sapiens
tggattgtagtggaa

SEQ ID NO: 1483423 - DNA, 15 bp, Homo sapiens
gtggattgtagtgga

SEQ ID NO: 1483424 - DNA, 15 bp, Homo sapiens
ggtggattgtagtgg

SEQ ID NO: 1483425 - DNA, 15 bp, Homo sapiens
aggtggattgtagtg

SEQ ID NO: 1483426 - DNA, 15 bp, Homo sapiens
taggtggattgtagt

SEQ ID NO: 1483427 - DNA, 15 bp, Homo sapiens
ataggtggattgtag

SEQ ID NO: 1483428 - DNA, 15 bp, Homo sapiens
gataggtggattgta

SEQ ID NO: 1483429 - DNA, 15 bp, Homo sapiens
tgataggtggattgt

SEQ ID NO: 1483430 - DNA, 15 bp, Homo sapiens
ttgataggtggattg

SEQ ID NO: 1483431 - DNA, 15 bp, Homo sapiens
cttgataggtggatt

SEQ ID NO: 1483432 - DNA, 15 bp, Homo sapiens
tcttgataggtggat

SEQ ID NO: 1483433 - DNA, 15 bp, Homo sapiens
atcttgataggtgga

SEQ ID NO: 1483434 - DNA, 15 bp, Homo sapiens
ctatcttgataggtg

SEQ ID NO: 1483435 - DNA, 15 bp, Homo sapiens
tctatcttgataggt

SEQ ID NO: 1483436 - DNA, 15 bp, Homo sapiens
ttctatcttgatagg

SEQ ID NO: 1483437 - DNA, 15 bp, Homo sapiens
gttctatcttgatag

SEQ ID NO: 1483438 - DNA, 15 bp, Homo sapiens
agttctatcttgata

SEQ ID NO: 1483439 - DNA, 15 bp, Homo sapiens
aagttctatcttgat

SEQ ID NO: 1483440 - DNA, 15 bp, Homo sapiens
gaagttctatcttga

SEQ ID NO: 1483441 - DNA, 15 bp, Homo sapiens
ggaagttctatcttg

SEQ ID NO: 1483442 - DNA, 15 bp, Homo sapiens
aggaagttctatctt

SEQ ID NO: 1483443 - DNA, 15 bp, Homo sapiens
aaggaagttctatct

SEQ ID NO: 1483444 - DNA, 15 bp, Homo sapiens
aaaggaagttctatc

SEQ ID NO: 1483445 - DNA, 15 bp, Homo sapiens
taaaggaagttctat

SEQ ID NO: 1483446 - DNA, 15 bp, Homo sapiens
ctaaaggaagttcta

SEQ ID NO: 1483447 - DNA, 15 bp, Homo sapiens
ggagctaaaggaagt

SEQ ID NO: 1483448 - DNA, 15 bp, Homo sapiens
aggagctaaaggaag

SEQ ID NO: 1483449 - DNA, 15 bp, Homo sapiens
gaggagctaaaggaa

SEQ ID NO: 1483450 - DNA, 15 bp, Homo sapiens
ggaggagctaaagga

SEQ ID NO: 1483451 - DNA, 15 bp, Homo sapiens
aggaggagctaaagg

SEQ ID NO: 1483452 - DNA, 15 bp, Homo sapiens
taggaggagctaaag

SEQ ID NO: 1483453 - DNA, 15 bp, Homo sapiens
gtaggaggagctaaa

SEQ ID NO: 1483454 - DNA, 15 bp, Homo sapiens
agtaggaggagctaa

SEQ ID NO: 1483455 - DNA, 15 bp, Homo sapiens
aagtaggaggagcta

SEQ ID NO: 1483456 - DNA, 15 bp, Homo sapiens
gaagtaggaggagct

SEQ ID NO: 1483457 - DNA, 15 bp, Homo sapiens
tgaagtaggaggagc

SEQ ID NO: 1483458 - DNA, 15 bp, Homo sapiens
ctgaagtaggaggag

SEQ ID NO: 1483459 - DNA, 15 bp, Homo sapiens
cctgaagtaggagga

SEQ ID NO: 1483460 - DNA, 15 bp, Homo sapiens
gcctgaagtaggagg

SEQ ID NO: 1483461 - DNA, 15 bp, Homo sapiens
ggcctgaagtaggag

SEQ ID NO: 1483462 - DNA, 15 bp, Homo sapiens
gggcctgaagtagga

SEQ ID NO: 1483463 - DNA, 15 bp, Homo sapiens
ggggcctgaagtagg

SEQ ID NO: 1483464 - DNA, 15 bp, Homo sapiens
cggggcctgaagtag

SEQ ID NO: 1483465 - DNA, 15 bp, Homo sapiens
gcggggcctgaagta

SEQ ID NO: 1483466 - DNA, 15 bp, Homo sapiens
ggcggggcctgaagt

SEQ ID NO: 1483467 - DNA, 15 bp, Homo sapiens
gggcggggcctgaag

SEQ ID NO: 1483468 - DNA, 15 bp, Homo sapiens
tgggcggggcctgaa

SEQ ID NO: 1483469 - DNA, 15 bp, Homo sapiens
ttgggcggggcctga

SEQ ID NO: 1483470 - DNA, 15 bp, Homo sapiens
gttgggcggggcctg

SEQ ID NO: 1483471 - DNA, 15 bp, Homo sapiens
agttgggcggggcct

SEQ ID NO: 1483472 - DNA, 15 bp, Homo sapiens
aagttgggcggggcc

SEQ ID NO: 1483473 - DNA, 15 bp, Homo sapiens
aaagttgggcggggc

SEQ ID NO: 1483474 - DNA, 15 bp, Homo sapiens
taaagttgggcgggg

SEQ ID NO: 1483475 - DNA, 15 bp, Homo sapiens
ctaaagttgggcggg

SEQ ID NO: 1483476 - DNA, 15 bp, Homo sapiens
cctaaagttgggcgg

SEQ ID NO: 1483477 - DNA, 15 bp, Homo sapiens
gcctaaagttgggcg

SEQ ID NO: 1483478 - DNA, 15 bp, Homo sapiens
ggcctaaagttgggc

SEQ ID NO: 1483479 - DNA, 15 bp, Homo sapiens
tggcctaaagttggg

SEQ ID NO: 1483480 - DNA, 15 bp, Homo sapiens
gtggcctaaagttgg

SEQ ID NO: 1483481 - DNA, 15 bp, Homo sapiens
agtggcctaaagttg

SEQ ID NO: 1483482 - DNA, 15 bp, Homo sapiens
gagtggcctaaagtt

SEQ ID NO: 1483483 - DNA, 15 bp, Homo sapiens
ggagtggcctaaagt

SEQ ID NO: 1483484 - DNA, 15 bp, Homo sapiens
gggagtggcctaaag

SEQ ID NO: 1483485 - DNA, 15 bp, Homo sapiens
tgggagtggcctaaa

SEQ ID NO: 1483486 - DNA, 15 bp, Homo sapiens
ttgggagtggcctaa

SEQ ID NO: 1483487 - DNA, 15 bp, Homo sapiens
attgggagtggccta

SEQ ID NO: 1483488 - DNA, 15 bp, Homo sapiens
aattgggagtggcct

SEQ ID NO: 1483489 - DNA, 15 bp, Homo sapiens
gaattgggagtggcc

SEQ ID NO: 1483490 - DNA, 15 bp, Homo sapiens
agaattgggagtggc

SEQ ID NO: 1483491 - DNA, 15 bp, Homo sapiens
cagaattgggagtgg

SEQ ID NO: 1483492 - DNA, 15 bp, Homo sapiens
ccagaattgggagtg

SEQ ID NO: 1483493 - DNA, 15 bp, Homo sapiens
gccagaattgggagt

SEQ ID NO: 1483494 - DNA, 15 bp, Homo sapiens
agccagaattgggag

SEQ ID NO: 1483495 - DNA, 15 bp, Homo sapiens
tagccagaattggga

SEQ ID NO: 1483496 - DNA, 15 bp, Homo sapiens
gtagccagaattggg

SEQ ID NO: 1483497 - DNA, 15 bp, Homo sapiens
tgtagccagaattgg

SEQ ID NO: 1483498 - DNA, 15 bp, Homo sapiens
ttgtagccagaattg

SEQ ID NO: 1483499 - DNA, 15 bp, Homo sapiens
tttgtagccagaatt

SEQ ID NO: 1483500 - DNA, 15 bp, Homo sapiens
gtttgtagccagaat

SEQ ID NO: 1483501 - DNA, 15 bp, Homo sapiens
tgtttgtagccagaa

SEQ ID NO: 1483502 - DNA, 15 bp, Homo sapiens
gtgtttgtagccaga

SEQ ID NO: 1483503 - DNA, 15 bp, Homo sapiens
agtgtttgtagccag

SEQ ID NO: 1483504 - DNA, 15 bp, Homo sapiens
gagtgtttgtagcca

SEQ ID NO: 1483505 - DNA, 15 bp, Homo sapiens
tgagtgtttgtagcc

SEQ ID NO: 1483506 - DNA, 15 bp, Homo sapiens
atgagtgtttgtagc

SEQ ID NO: 1483507 - DNA, 15 bp, Homo sapiens
gatgagtgtttgtag

SEQ ID NO: 1483508 - DNA, 15 bp, Homo sapiens
ggatgagtgtttgta

SEQ ID NO: 1483509 - DNA, 15 bp, Homo sapiens
tggatgagtgtttgt

SEQ ID NO: 1483510 - DNA, 15 bp, Homo sapiens
ttggatgagtgtttg

SEQ ID NO: 1483511 - DNA, 15 bp, Homo sapiens
tttggatgagtgttt

SEQ ID NO: 1483512 - DNA, 15 bp, Homo sapiens
gtttggatgagtgtt

SEQ ID NO: 1483513 - DNA, 15 bp, Homo sapiens
tgtttggatgagtgt

SEQ ID NO: 1483514 - DNA, 15 bp, Homo sapiens
ttgtttggatgagtg

SEQ ID NO: 1483515 - DNA, 15 bp, Homo sapiens
tttgtttggatgagt

SEQ ID NO: 1483516 - DNA, 15 bp, Homo sapiens
ttttgtttggatgag

SEQ ID NO: 1483517 - DNA, 15 bp, Homo sapiens
gttttgtttggatga

SEQ ID NO: 1483518 - DNA, 15 bp, Homo sapiens
atggttttgtttgga

SEQ ID NO: 1483519 - DNA, 15 bp, Homo sapiens
aatggttttgtttgg

SEQ ID NO: 1483520 - DNA, 15 bp, Homo sapiens
aaatggttttgtttg

SEQ ID NO: 1483521 - DNA, 15 bp, Homo sapiens
aaaatggttttgttt

SEQ ID NO: 1483522 - DNA, 15 bp, Homo sapiens
aaaaatggttttgtt

SEQ ID NO: 1483523 - DNA, 15 bp, Homo sapiens
aaaaaatggttttgt

SEQ ID NO: 1483524 - DNA, 15 bp, Homo sapiens
aaaaaaatggttttg

SEQ ID NO: 1483525 - DNA, 15 bp, Homo sapiens
aaaaaaaatggtttt

SEQ ID NO: 1483526 - DNA, 15 bp, Homo sapiens
aaaaaaaaatggttt

SEQ ID NO: 1483527 - DNA, 15 bp, Homo sapiens
aaaaaaaaaatggtt

SEQ ID NO: 1483528 - DNA, 15 bp, Homo sapiens
aaaaaaaaaaatggt

SEQ ID NO: 1483529 - DNA, 15 bp, Homo sapiens
aaaaaaaaaaaatgg

SEQ ID NO: 1483530 - DNA, 15 bp, Homo sapiens
aaaaaaaaaaaaatg

SEQ ID NO: 1483531 - DNA, 15 bp, Homo sapiens
tcgtctcaaaaaaaa

SEQ ID NO: 1483532 - DNA, 15 bp, Homo sapiens
ttcgtctcaaaaaaa

SEQ ID NO: 1483533 - DNA, 15 bp, Homo sapiens
cttcgtctcaaaaaa

SEQ ID NO: 1483534 - DNA, 15 bp, Homo sapiens
acttcgtctcaaaaa

SEQ ID NO: 1483535 - DNA, 15 bp, Homo sapiens
aacttcgtctcaaaa

SEQ ID NO: 1483536 - DNA, 15 bp, Homo sapiens
aaacttcgtctcaaa

SEQ ID NO: 1483537 - DNA, 15 bp, Homo sapiens
gaaacttcgtctcaa

SEQ ID NO: 1483538 - DNA, 15 bp, Homo sapiens
cgaaacttcgtctca

SEQ ID NO: 1483539 - DNA, 15 bp, Homo sapiens
gcgaaacttcgtctc

SEQ ID NO: 1483540 - DNA, 15 bp, Homo sapiens
agcgaaacttcgtct

SEQ ID NO: 1483541 - DNA, 15 bp, Homo sapiens
gagcgaaacttcgtc

SEQ ID NO: 1483542 - DNA, 15 bp, Homo sapiens
agagcgaaacttcgt

SEQ ID NO: 1483543 - DNA, 15 bp, Homo sapiens
aagagcgaaacttcg

SEQ ID NO: 1483544 - DNA, 15 bp, Homo sapiens
caagagcgaaacttc

SEQ ID NO: 1483545 - DNA, 15 bp, Homo sapiens
acaagagcgaaactt

SEQ ID NO: 1483546 - DNA, 15 bp, Homo sapiens
cgacaagagcgaaac

SEQ ID NO: 1483547 - DNA, 15 bp, Homo sapiens
gccattgcactccag

SEQ ID NO: 1483548 - DNA, 15 bp, Homo sapiens
tagaggttgcagtga

SEQ ID NO: 1483549 - DNA, 15 bp, Homo sapiens
gtagaggttgcagtg

SEQ ID NO: 1483550 - DNA, 15 bp, Homo sapiens
ggtagaggttgcagt

SEQ ID NO: 1483551 - DNA, 15 bp, Homo sapiens
aggtagaggttgcag

SEQ ID NO: 1483552 - DNA, 15 bp, Homo sapiens
gaggtagaggttgca

SEQ ID NO: 1483553 - DNA, 15 bp, Homo sapiens
ggaggtagaggttgc

SEQ ID NO: 1483554 - DNA, 15 bp, Homo sapiens
gggaggtagaggttg

SEQ ID NO: 1483555 - DNA, 15 bp, Homo sapiens
cgggaggtagaggtt

SEQ ID NO: 1483556 - DNA, 15 bp, Homo sapiens
ccgggaggtagaggt

SEQ ID NO: 1483557 - DNA, 15 bp, Homo sapiens
cccgggaggtagagg

SEQ ID NO: 1483558 - DNA, 15 bp, Homo sapiens
acccgggaggtagag

SEQ ID NO: 1483559 - DNA, 15 bp, Homo sapiens
aacccgggaggtaga

SEQ ID NO: 1483560 - DNA, 15 bp, Homo sapiens
gaacccgggaggtag

SEQ ID NO: 1483561 - DNA, 15 bp, Homo sapiens
tgaacccgggaggta

SEQ ID NO: 1483562 - DNA, 15 bp, Homo sapiens
taatcgcttgaaccc

SEQ ID NO: 1483563 - DNA, 15 bp, Homo sapiens
gtaatcgcttgaacc

SEQ ID NO: 1483564 - DNA, 15 bp, Homo sapiens
ggtaatcgcttgaac

SEQ ID NO: 1483565 - DNA, 15 bp, Homo sapiens
cggtaatcgcttgaa

SEQ ID NO: 1483566 - DNA, 15 bp, Homo sapiens
acggtaatcgcttga

SEQ ID NO: 1483567 - DNA, 15 bp, Homo sapiens
cacggtaatcgcttg

SEQ ID NO: 1483568 - DNA, 15 bp, Homo sapiens
gcacggtaatcgctt

SEQ ID NO: 1483569 - DNA, 15 bp, Homo sapiens
agcacggtaatcgct

SEQ ID NO: 1483570 - DNA, 15 bp, Homo sapiens
aagcacggtaatcgc

SEQ ID NO: 1483571 - DNA, 15 bp, Homo sapiens
gaagcacggtaatcg

SEQ ID NO: 1483572 - DNA, 15 bp, Homo sapiens
tgaagcacggtaatc

SEQ ID NO: 1483573 - DNA, 15 bp, Homo sapiens
ctgaagcacggtaat

SEQ ID NO: 1483574 - DNA, 15 bp, Homo sapiens
gctgaagcacggtaa

SEQ ID NO: 1483575 - DNA, 15 bp, Homo sapiens
agctgaagcacggta

SEQ ID NO: 1483576 - DNA, 15 bp, Homo sapiens
aagctgaagcacggt

SEQ ID NO: 1483577 - DNA, 15 bp, Homo sapiens
gaagctgaagcacgg

SEQ ID NO: 1483578 - DNA, 15 bp, Homo sapiens
cgaagctgaagcacg

SEQ ID NO: 1483579 - DNA, 15 bp, Homo sapiens
acgaagctgaagcac

SEQ ID NO: 1483580 - DNA, 15 bp, Homo sapiens
cacgaagctgaagca

SEQ ID NO: 1483581 - DNA, 15 bp, Homo sapiens
tcacgaagctgaagc

SEQ ID NO: 1483582 - DNA, 15 bp, Homo sapiens
ctcacgaagctgaag

SEQ ID NO: 1483583 - DNA, 15 bp, Homo sapiens
actcacgaagctgaa

SEQ ID NO: 1483584 - DNA, 15 bp, Homo sapiens
tactcacgaagctga

SEQ ID NO: 1483585 - DNA, 15 bp, Homo sapiens
ctactcacgaagctg

SEQ ID NO: 1483586 - DNA, 15 bp, Homo sapiens
gctactcacgaagct

SEQ ID NO: 1483587 - DNA, 15 bp, Homo sapiens
ggctactcacgaagc

SEQ ID NO: 1483588 - DNA, 15 bp, Homo sapiens
aggctactcacgaag

SEQ ID NO: 1483589 - DNA, 15 bp, Homo sapiens
gaggctactcacgaa

SEQ ID NO: 1483590 - DNA, 15 bp, Homo sapiens
ggaggctactcacga

SEQ ID NO: 1483591 - DNA, 15 bp, Homo sapiens
aggaggctactcacg

SEQ ID NO: 1483592 - DNA, 15 bp, Homo sapiens
caggaggctactcac

SEQ ID NO: 1483593 - DNA, 15 bp, Homo sapiens
tcaggaggctactca

SEQ ID NO: 1483594 - DNA, 15 bp, Homo sapiens
ctcaggaggctactc

SEQ ID NO: 1483595 - DNA, 15 bp, Homo sapiens
actcaggaggctact

SEQ ID NO: 1483596 - DNA, 15 bp, Homo sapiens
tactcaggaggctac

SEQ ID NO: 1483597 - DNA, 15 bp, Homo sapiens
acctactcaggaggc

SEQ ID NO: 1483598 - DNA, 15 bp, Homo sapiens
cacctactcaggagg

SEQ ID NO: 1483599 - DNA, 15 bp, Homo sapiens
ccacctactcaggag

SEQ ID NO: 1483600 - DNA, 15 bp, Homo sapiens
cccacctactcagga

SEQ ID NO: 1483601 - DNA, 15 bp, Homo sapiens
tcccacctactcagg

SEQ ID NO: 1483602 - DNA, 15 bp, Homo sapiens
gtcccacctactcag

SEQ ID NO: 1483603 - DNA, 15 bp, Homo sapiens
agtcccacctactca

SEQ ID NO: 1483604 - DNA, 15 bp, Homo sapiens
tagtcccacctactc

SEQ ID NO: 1483605 - DNA, 15 bp, Homo sapiens
tcctgtagtcccacc

SEQ ID NO: 1483606 - DNA, 15 bp, Homo sapiens
ctcctgtagtcccac

SEQ ID NO: 1483607 - DNA, 15 bp, Homo sapiens
actcctgtagtccca

SEQ ID NO: 1483608 - DNA, 15 bp, Homo sapiens
cactcctgtagtccc

SEQ ID NO: 1483609 - DNA, 15 bp, Homo sapiens
tcactcctgtagtcc

SEQ ID NO: 1483610 - DNA, 15 bp, Homo sapiens
ctcactcctgtagtc

SEQ ID NO: 1483611 - DNA, 15 bp, Homo sapiens
gctcactcctgtagt

SEQ ID NO: 1483612 - DNA, 15 bp, Homo sapiens
ggctcactcctgtag

SEQ ID NO: 1483613 - DNA, 15 bp, Homo sapiens
agtggtggctcactc

SEQ ID NO: 1483614 - DNA, 15 bp, Homo sapiens
gagtggtggctcact

SEQ ID NO: 1483615 - DNA, 15 bp, Homo sapiens
ggagtggtggctcac

SEQ ID NO: 1483616 - DNA, 15 bp, Homo sapiens
gggagtggtggctca

SEQ ID NO: 1483617 - DNA, 15 bp, Homo sapiens
tgggagtggtggctc

SEQ ID NO: 1483618 - DNA, 15 bp, Homo sapiens
ctgggagtggtggct

SEQ ID NO: 1483619 - DNA, 15 bp, Homo sapiens
gctgggagtggtggc

SEQ ID NO: 1483620 - DNA, 15 bp, Homo sapiens
agctgggagtggtgg

SEQ ID NO: 1483621 - DNA, 15 bp, Homo sapiens
tagctgggagtggtg

SEQ ID NO: 1483622 - DNA, 15 bp, Homo sapiens
ttagctgggagtggt

SEQ ID NO: 1483623 - DNA, 15 bp, Homo sapiens
attagctgggagtgg

SEQ ID NO: 1483624 - DNA, 15 bp, Homo sapiens
aattagctgggagtg

SEQ ID NO: 1483625 - DNA, 15 bp, Homo sapiens
aaattagctgggagt

SEQ ID NO: 1483626 - DNA, 15 bp, Homo sapiens
ttcacacctgtaatc

SEQ ID NO: 1483627 - DNA, 15 bp, Homo sapiens
gttcacacctgtaat

SEQ ID NO: 1483628 - DNA, 15 bp, Homo sapiens
aggtggttcacacct

SEQ ID NO: 1483629 - DNA, 15 bp, Homo sapiens
gaggtggttcacacc

SEQ ID NO: 1483630 - DNA, 15 bp, Homo sapiens
cgaggtggttcacac

SEQ ID NO: 1483631 - DNA, 15 bp, Homo sapiens
gcgaggtggttcaca

SEQ ID NO: 1483632 - DNA, 15 bp, Homo sapiens
ggcgaggtggttcac

SEQ ID NO: 1483633 - DNA, 15 bp, Homo sapiens
gggcgaggtggttca

SEQ ID NO: 1483634 - DNA, 15 bp, Homo sapiens
cgggcgaggtggttc

SEQ ID NO: 1483635 - DNA, 15 bp, Homo sapiens
ccgggcgaggtggtt

SEQ ID NO: 1483636 - DNA, 15 bp, Homo sapiens
gccgggcgaggtggt

SEQ ID NO: 1483637 - DNA, 15 bp, Homo sapiens
ggccgggcgaggtgg

SEQ ID NO: 1483638 - DNA, 15 bp, Homo sapiens
tggccgggcgaggtg

SEQ ID NO: 1483639 - DNA, 15 bp, Homo sapiens
ttggccgggcgaggt

SEQ ID NO: 1483640 - DNA, 15 bp, Homo sapiens
tttggccgggcgagg

SEQ ID NO: 1483641 - DNA, 15 bp, Homo sapiens
ttttggccgggcgag

SEQ ID NO: 1483642 - DNA, 15 bp, Homo sapiens
tttttggccgggcga

SEQ ID NO: 1483643 - DNA, 15 bp, Homo sapiens
gtttttggccgggcg

SEQ ID NO: 1483644 - DNA, 15 bp, Homo sapiens
tgtttttggccgggc

SEQ ID NO: 1483645 - DNA, 15 bp, Homo sapiens
ttgtttttggccggg

SEQ ID NO: 1483646 - DNA, 15 bp, Homo sapiens
gttgtttttggccgg

SEQ ID NO: 1483647 - DNA, 15 bp, Homo sapiens
ggttgtttttggccg

SEQ ID NO: 1483648 - DNA, 15 bp, Homo sapiens
aggttgtttttggcc

SEQ ID NO: 1483649 - DNA, 15 bp, Homo sapiens
gaggttgtttttggc

SEQ ID NO: 1483650 - DNA, 15 bp, Homo sapiens
agaggttgtttttgg

SEQ ID NO: 1483651 - DNA, 15 bp, Homo sapiens
aagaggttgtttttg

SEQ ID NO: 1483652 - DNA, 15 bp, Homo sapiens
gaagaggttgttttt

SEQ ID NO: 1483653 - DNA, 15 bp, Homo sapiens
agaagaggttgtttt

SEQ ID NO: 1483654 - DNA, 15 bp, Homo sapiens
tagaagaggttgttt

SEQ ID NO: 1483655 - DNA, 15 bp, Homo sapiens
ctagaagaggttgtt

SEQ ID NO: 1483656 - DNA, 15 bp, Homo sapiens
actagaagaggttgt

SEQ ID NO: 1483657 - DNA, 15 bp, Homo sapiens
gactagaagaggttg

SEQ ID NO: 1483658 - DNA, 15 bp, Homo sapiens
ggactagaagaggtt

SEQ ID NO: 1483659 - DNA, 15 bp, Homo sapiens
aggactagaagaggt

SEQ ID NO: 1483660 - DNA, 15 bp, Homo sapiens
caggactagaagagg

SEQ ID NO: 1483661 - DNA, 15 bp, Homo sapiens
gcaggactagaagag

SEQ ID NO: 1483662 - DNA, 15 bp, Homo sapiens
ggcaggactagaaga

SEQ ID NO: 1483663 - DNA, 15 bp, Homo sapiens
gggcaggactagaag

SEQ ID NO: 1483664 - DNA, 15 bp, Homo sapiens
tgggcaggactagaa

SEQ ID NO: 1483665 - DNA, 15 bp, Homo sapiens
gtgggcaggactaga

SEQ ID NO: 1483666 - DNA, 15 bp, Homo sapiens
ggtgggcaggactag

SEQ ID NO: 1483667 - DNA, 15 bp, Homo sapiens
gggtgggcaggacta

SEQ ID NO: 1483668 - DNA, 15 bp, Homo sapiens
ggggtgggcaggact

SEQ ID NO: 1483669 - DNA, 15 bp, Homo sapiens
aggggtgggcaggac

SEQ ID NO: 1483670 - DNA, 15 bp, Homo sapiens
gaggggtgggcagga

SEQ ID NO: 1483671 - DNA, 15 bp, Homo sapiens
agaggggtgggcagg

SEQ ID NO: 1483672 - DNA, 15 bp, Homo sapiens
tagaggggtgggcag

SEQ ID NO: 1483673 - DNA, 15 bp, Homo sapiens
ctagaggggtgggca

SEQ ID NO: 1483674 - DNA, 15 bp, Homo sapiens
actagaggggtgggc

SEQ ID NO: 1483675 - DNA, 15 bp, Homo sapiens
gactagaggggtggg

SEQ ID NO: 1483676 - DNA, 15 bp, Homo sapiens
ggactagaggggtgg

SEQ ID NO: 1483677 - DNA, 15 bp, Homo sapiens
gggactagaggggtg

SEQ ID NO: 1483678 - DNA, 15 bp, Homo sapiens
agggactagaggggt

SEQ ID NO: 1483679 - DNA, 15 bp, Homo sapiens
gagggactagagggg

SEQ ID NO: 1483680 - DNA, 15 bp, Homo sapiens
ggagggactagaggg

SEQ ID NO: 1483681 - DNA, 15 bp, Homo sapiens
cggagggactagagg

SEQ ID NO: 1483682 - DNA, 15 bp, Homo sapiens
acggagggactagag

SEQ ID NO: 1483683 - DNA, 15 bp, Homo sapiens
gacggagggactaga

SEQ ID NO: 1483684 - DNA, 15 bp, Homo sapiens
agacggagggactag

SEQ ID NO: 1483685 - DNA, 15 bp, Homo sapiens
aagacggagggacta

SEQ ID NO: 1483686 - DNA, 15 bp, Homo sapiens
aaagacggagggact

SEQ ID NO: 1483687 - DNA, 15 bp, Homo sapiens
gaaagacggagggac

SEQ ID NO: 1483688 - DNA, 15 bp, Homo sapiens
tgaaagacggaggga

SEQ ID NO: 1483689 - DNA, 15 bp, Homo sapiens
gtgaaagacggaggg

SEQ ID NO: 1483690 - DNA, 15 bp, Homo sapiens
agtgaaagacggagg

SEQ ID NO: 1483691 - DNA, 15 bp, Homo sapiens
tagtgaaagacggag

SEQ ID NO: 1483692 - DNA, 15 bp, Homo sapiens
gtagtgaaagacgga

SEQ ID NO: 1483693 - DNA, 15 bp, Homo sapiens
tgtagtgaaagacgg

SEQ ID NO: 1483694 - DNA, 15 bp, Homo sapiens
ttgtagtgaaagacg

SEQ ID NO: 1483695 - DNA, 15 bp, Homo sapiens
gttgtagtgaaagac

SEQ ID NO: 1483696 - DNA, 15 bp, Homo sapiens
ggttgtagtgaaaga

SEQ ID NO: 1483697 - DNA, 15 bp, Homo sapiens
gggttgtagtgaaag

SEQ ID NO: 1483698 - DNA, 15 bp, Homo sapiens
tgggttgtagtgaaa

SEQ ID NO: 1483699 - DNA, 15 bp, Homo sapiens
gtgggttgtagtgaa

SEQ ID NO: 1483700 - DNA, 15 bp, Homo sapiens
ggtgggttgtagtga

SEQ ID NO: 1483701 - DNA, 15 bp, Homo sapiens
aggtgggttgtagtg

SEQ ID NO: 1483702 - DNA, 15 bp, Homo sapiens
taggtgggttgtagt

SEQ ID NO: 1483703 - DNA, 15 bp, Homo sapiens
gtcttgataggtggg

SEQ ID NO: 1483704 - DNA, 15 bp, Homo sapiens
tgtcttgataggtgg

SEQ ID NO: 1483705 - DNA, 15 bp, Homo sapiens
ctgtcttgataggtg

SEQ ID NO: 1483706 - DNA, 15 bp, Homo sapiens
tctgtcttgataggt

SEQ ID NO: 1483707 - DNA, 15 bp, Homo sapiens
ttctgtcttgatagg

SEQ ID NO: 1483708 - DNA, 15 bp, Homo sapiens
gttctgtcttgatag

SEQ ID NO: 1483709 - DNA, 15 bp, Homo sapiens
agttctgtcttgata

SEQ ID NO: 1483710 - DNA, 15 bp, Homo sapiens
aagttctgtcttgat

SEQ ID NO: 1483711 - DNA, 15 bp, Homo sapiens
gaagttctgtcttga

SEQ ID NO: 1483712 - DNA, 15 bp, Homo sapiens
ggaagttctgtcttg

SEQ ID NO: 1483713 - DNA, 15 bp, Homo sapiens
gggaagttctgtctt

SEQ ID NO: 1483714 - DNA, 15 bp, Homo sapiens
agggaagttctgtct

SEQ ID NO: 1483715 - DNA, 15 bp, Homo sapiens
aagggaagttctgtc

SEQ ID NO: 1483716 - DNA, 15 bp, Homo sapiens
taagggaagttctgt

SEQ ID NO: 1483717 - DNA, 15 bp, Homo sapiens
ttaagggaagttctg

SEQ ID NO: 1483718 - DNA, 15 bp, Homo sapiens
gttaagggaagttct

SEQ ID NO: 1483719 - DNA, 15 bp, Homo sapiens
agttaagggaagttc

SEQ ID NO: 1483720 - DNA, 15 bp, Homo sapiens
gagttaagggaagtt

SEQ ID NO: 1483721 - DNA, 15 bp, Homo sapiens
tgagttaagggaagt

SEQ ID NO: 1483722 - DNA, 15 bp, Homo sapiens
ctgagttaagggaag

SEQ ID NO: 1483723 - DNA, 15 bp, Homo sapiens
actgagttaagggaa

SEQ ID NO: 1483724 - DNA, 15 bp, Homo sapiens
cactgagttaaggga

SEQ ID NO: 1483725 - DNA, 15 bp, Homo sapiens
gcactgagttaaggg

SEQ ID NO: 1483726 - DNA, 15 bp, Homo sapiens
agcactgagttaagg

SEQ ID NO: 1483727 - DNA, 15 bp, Homo sapiens
cagcactgagttaag

SEQ ID NO: 1483728 - DNA, 15 bp, Homo sapiens
gcagcactgagttaa

SEQ ID NO: 1483729 - DNA, 15 bp, Homo sapiens
agcagcactgagtta

SEQ ID NO: 1483730 - DNA, 15 bp, Homo sapiens
aagcagcactgagtt

SEQ ID NO: 1483731 - DNA, 15 bp, Homo sapiens
caagcagcactgagt

SEQ ID NO: 1483732 - DNA, 15 bp, Homo sapiens
agggaggagccaagc

SEQ ID NO: 1483733 - DNA, 15 bp, Homo sapiens
gagggaggagccaag

SEQ ID NO: 1483734 - DNA, 15 bp, Homo sapiens
ggagggaggagccaa

SEQ ID NO: 1483735 - DNA, 15 bp, Homo sapiens
aggagggaggagcca

SEQ ID NO: 1483736 - DNA, 15 bp, Homo sapiens
gaggagggaggagcc

SEQ ID NO: 1483737 - DNA, 15 bp, Homo sapiens
ggaggagggaggagc

SEQ ID NO: 1483738 - DNA, 15 bp, Homo sapiens
gggaggagggaggag

SEQ ID NO: 1483739 - DNA, 15 bp, Homo sapiens
tgggaggagggagga

SEQ ID NO: 1483740 - DNA, 15 bp, Homo sapiens
gtgggaggagggagg

SEQ ID NO: 1483741 - DNA, 15 bp, Homo sapiens
agtgggaggagggag

SEQ ID NO: 1483742 - DNA, 15 bp, Homo sapiens
aagtgggaggaggga

SEQ ID NO: 1483743 - DNA, 15 bp, Homo sapiens
gaagtgggaggaggg

SEQ ID NO: 1483744 - DNA, 15 bp, Homo sapiens
tgaagtgggaggagg

SEQ ID NO: 1483745 - DNA, 15 bp, Homo sapiens
cctgaagtgggagga

SEQ ID NO: 1483746 - DNA, 15 bp, Homo sapiens
acctgaagtgggagg

SEQ ID NO: 1483747 - DNA, 15 bp, Homo sapiens
gacctgaagtgggag

SEQ ID NO: 1483748 - DNA, 15 bp, Homo sapiens
ggacctgaagtggga

SEQ ID NO: 1483749 - DNA, 15 bp, Homo sapiens
aggacctgaagtggg

SEQ ID NO: 1483750 - DNA, 15 bp, Homo sapiens
caggacctgaagtgg

SEQ ID NO: 1483751 - DNA, 15 bp, Homo sapiens
gcaggacctgaagtg

SEQ ID NO: 1483752 - DNA, 15 bp, Homo sapiens
ggcaggacctgaagt

SEQ ID NO: 1483753 - DNA, 15 bp, Homo sapiens
gggcaggacctgaag

SEQ ID NO: 1483754 - DNA, 15 bp, Homo sapiens
tgggcaggacctgaa

SEQ ID NO: 1483755 - DNA, 15 bp, Homo sapiens
ttgggcaggacctga

SEQ ID NO: 1483756 - DNA, 15 bp, Homo sapiens
gttgggcaggacctg

SEQ ID NO: 1483757 - DNA, 15 bp, Homo sapiens
ggttgggcaggacct

SEQ ID NO: 1483758 - DNA, 15 bp, Homo sapiens
aggttgggcaggacc

SEQ ID NO: 1483759 - DNA, 15 bp, Homo sapiens
aaggttgggcaggac

SEQ ID NO: 1483760 - DNA, 15 bp, Homo sapiens
aaaggttgggcagga

SEQ ID NO: 1483761 - DNA, 15 bp, Homo sapiens
aaaaggttgggcagg

SEQ ID NO: 1483762 - DNA, 15 bp, Homo sapiens
caaaaggttgggcag

SEQ ID NO: 1483763 - DNA, 15 bp, Homo sapiens
ccaaaaggttgggca

SEQ ID NO: 1483764 - DNA, 15 bp, Homo sapiens
gccaaaaggttgggc

SEQ ID NO: 1483765 - DNA, 15 bp, Homo sapiens
ggccaaaaggttggg

SEQ ID NO: 1483766 - DNA, 15 bp, Homo sapiens
tggccaaaaggttgg

SEQ ID NO: 1483767 - DNA, 15 bp, Homo sapiens
gtggccaaaaggttg

SEQ ID NO: 1483768 - DNA, 15 bp, Homo sapiens
agtggccaaaaggtt

SEQ ID NO: 1483769 - DNA, 15 bp, Homo sapiens
gagtggccaaaaggt

SEQ ID NO: 1483770 - DNA, 15 bp, Homo sapiens
ggagtggccaaaagg

SEQ ID NO: 1483771 - DNA, 15 bp, Homo sapiens
gggagtggccaaaag

SEQ ID NO: 1483772 - DNA, 15 bp, Homo sapiens
tgggagtggccaaaa

SEQ ID NO: 1483773 - DNA, 15 bp, Homo sapiens
ctgggagtggccaaa

SEQ ID NO: 1483774 - DNA, 15 bp, Homo sapiens
actgggagtggccaa

SEQ ID NO: 1483775 - DNA, 15 bp, Homo sapiens
gactgggagtggcca

SEQ ID NO: 1483776 - DNA, 15 bp, Homo sapiens
ggactgggagtggcc

SEQ ID NO: 1483777 - DNA, 15 bp, Homo sapiens
tggactgggagtggc

SEQ ID NO: 1483778 - DNA, 15 bp, Homo sapiens
ctggactgggagtgg

SEQ ID NO: 1483779 - DNA, 15 bp, Homo sapiens
cctggactgggagtg

SEQ ID NO: 1483780 - DNA, 15 bp, Homo sapiens
gcctggactgggagt

SEQ ID NO: 1483781 - DNA, 15 bp, Homo sapiens
agcctggactgggag

SEQ ID NO: 1483782 - DNA, 15 bp, Homo sapiens
tagcctggactggga

SEQ ID NO: 1483783 - DNA, 15 bp, Homo sapiens
ctagcctggactggg

SEQ ID NO: 1483784 - DNA, 15 bp, Homo sapiens
tctagcctggactgg

SEQ ID NO: 1483785 - DNA, 15 bp, Homo sapiens
ttctagcctggactg

SEQ ID NO: 1483786 - DNA, 15 bp, Homo sapiens
tttctagcctggact

SEQ ID NO: 1483787 - DNA, 15 bp, Homo sapiens
gtttctagcctggac

SEQ ID NO: 1483788 - DNA, 15 bp, Homo sapiens
tgtttctagcctgga

SEQ ID NO: 1483789 - DNA, 15 bp, Homo sapiens
gtgtttctagcctgg

SEQ ID NO: 1483790 - DNA, 15 bp, Homo sapiens
tgtgtttctagcctg

SEQ ID NO: 1483791 - DNA, 15 bp, Homo sapiens
atgtgtttctagcct

SEQ ID NO: 1483792 - DNA, 15 bp, Homo sapiens
gatgtgtttctagcc

SEQ ID NO: 1483793 - DNA, 15 bp, Homo sapiens
ggatgtgtttctagc

SEQ ID NO: 1483794 - DNA, 15 bp, Homo sapiens
tggatgtgtttctag

SEQ ID NO: 1483795 - DNA, 15 bp, Homo sapiens
ttggatgtgtttcta

SEQ ID NO: 1483796 - DNA, 15 bp, Homo sapiens
tttggatgtgtttct

SEQ ID NO: 1483797 - DNA, 15 bp, Homo sapiens
gtttggatgtgtttc

SEQ ID NO: 1483798 - DNA, 15 bp, Homo sapiens
tgtttggatgtgttt

SEQ ID NO: 1483799 - DNA, 15 bp, Homo sapiens
ttgtttggatgtgtt

SEQ ID NO: 1483800 - DNA, 15 bp, Homo sapiens
tttgtttggatgtgt

SEQ ID NO: 1483801 - DNA, 15 bp, Homo sapiens
ttttgtttggatgtg

SEQ ID NO: 1483802 - DNA, 15 bp, Homo sapiens
gttttgtttggatgt

SEQ ID NO: 1483803 - DNA, 15 bp, Homo sapiens
agttggttttgtttg

SEQ ID NO: 1483804 - DNA, 15 bp, Homo sapiens
aagttggttttgttt

SEQ ID NO: 1483805 - DNA, 15 bp, Homo sapiens
aggcgtccttgccca

SEQ ID NO: 1483806 - DNA, 15 bp, Homo sapiens
caggcgtccttgccc

SEQ ID NO: 1483807 - DNA, 15 bp, Homo sapiens
gcaggcgtccttgcc

SEQ ID NO: 1483808 - DNA, 15 bp, Homo sapiens
cgcaggcgtccttgc

SEQ ID NO: 1483809 - DNA, 15 bp, Homo sapiens
ccgcaggcgtccttg

SEQ ID NO: 1483810 - DNA, 15 bp, Homo sapiens
gccgcaggcgtcctt

SEQ ID NO: 1483811 - DNA, 15 bp, Homo sapiens
cgccgcaggcgtcct

SEQ ID NO: 1483812 - DNA, 15 bp, Homo sapiens
ccgccgcaggcgtcc

SEQ ID NO: 1483813 - DNA, 15 bp, Homo sapiens
cccgccgcaggcgtc

SEQ ID NO: 1483814 - DNA, 15 bp, Homo sapiens
gcccgccgcaggcgt

SEQ ID NO: 1483815 - DNA, 15 bp, Homo sapiens
agcccgccgcaggcg

SEQ ID NO: 1483816 - DNA, 15 bp, Homo sapiens
gagcccgccgcaggc

SEQ ID NO: 1483817 - DNA, 15 bp, Homo sapiens
cgagcccgccgcagg

SEQ ID NO: 1483818 - DNA, 15 bp, Homo sapiens
ccgagcccgccgcag

SEQ ID NO: 1483819 - DNA, 15 bp, Homo sapiens
accgagcccgccgca

SEQ ID NO: 1483820 - DNA, 15 bp, Homo sapiens
caccgagcccgccgc

SEQ ID NO: 1483821 - DNA, 15 bp, Homo sapiens
acaccgagcccgccg

SEQ ID NO: 1483822 - DNA, 15 bp, Homo sapiens
cacaccgagcccgcc

SEQ ID NO: 1483823 - DNA, 15 bp, Homo sapiens
gcacaccgagcccgc

SEQ ID NO: 1483824 - DNA, 15 bp, Homo sapiens
tgcacaccgagcccg

SEQ ID NO: 1483825 - DNA, 15 bp, Homo sapiens
gtgcacaccgagccc

SEQ ID NO: 1483826 - DNA, 15 bp, Homo sapiens
agtgcacaccgagcc

SEQ ID NO: 1483827 - DNA, 15 bp, Homo sapiens
aagtgcacaccgagc

SEQ ID NO: 1483828 - DNA, 15 bp, Homo sapiens
aaagtgcacaccgag

SEQ ID NO: 1483829 - DNA, 15 bp, Homo sapiens
aaaagtgcacaccga

SEQ ID NO: 1483830 - DNA, 15 bp, Homo sapiens
aaaaagtgcacaccg

SEQ ID NO: 1483831 - DNA, 15 bp, Homo sapiens
caaaaagtgcacacc

SEQ ID NO: 1483832 - DNA, 15 bp, Homo sapiens
tcaaaaagtgcacac

SEQ ID NO: 1483833 - DNA, 15 bp, Homo sapiens
ctcaaaaagtgcaca

SEQ ID NO: 1483834 - DNA, 15 bp, Homo sapiens
tctcaaaaagtgcac

SEQ ID NO: 1483835 - DNA, 15 bp, Homo sapiens
ctctcaaaaagtgca

SEQ ID NO: 1483836 - DNA, 15 bp, Homo sapiens
gctctcaaaaagtgc

SEQ ID NO: 1483837 - DNA, 15 bp, Homo sapiens
agctctcaaaaagtg

SEQ ID NO: 1483838 - DNA, 15 bp, Homo sapiens
tagctctcaaaaagt

SEQ ID NO: 1483839 - DNA, 15 bp, Homo sapiens
ctagctctcaaaaag

SEQ ID NO: 1483840 - DNA, 15 bp, Homo sapiens
cctagctctcaaaaa

SEQ ID NO: 1483841 - DNA, 15 bp, Homo sapiens
tcctagctctcaaaa

SEQ ID NO: 1483842 - DNA, 15 bp, Homo sapiens
atcctagctctcaaa

SEQ ID NO: 1483843 - DNA, 15 bp, Homo sapiens
gatcctagctctcaa

SEQ ID NO: 1483844 - DNA, 15 bp, Homo sapiens
ggatcctagctctca

SEQ ID NO: 1483845 - DNA, 15 bp, Homo sapiens
gggatcctagctctc

SEQ ID NO: 1483846 - DNA, 15 bp, Homo sapiens
tgggatcctagctct

SEQ ID NO: 1483847 - DNA, 15 bp, Homo sapiens
gtgggatcctagctc

SEQ ID NO: 1483848 - DNA, 15 bp, Homo sapiens
ggtgggatcctagct

SEQ ID NO: 1483849 - DNA, 15 bp, Homo sapiens
cggtgggatcctagc

SEQ ID NO: 1483850 - DNA, 15 bp, Homo sapiens
gcggtgggatcctag

SEQ ID NO: 1483851 - DNA, 15 bp, Homo sapiens
tgcggtgggatccta

SEQ ID NO: 1483852 - DNA, 15 bp, Homo sapiens
atgcggtgggatcct

SEQ ID NO: 1483853 - DNA, 15 bp, Homo sapiens
gatgcggtgggatcc

SEQ ID NO: 1483854 - DNA, 15 bp, Homo sapiens
cgatgcggtgggatc

SEQ ID NO: 1483855 - DNA, 15 bp, Homo sapiens
gcgatgcggtgggat

SEQ ID NO: 1483856 - DNA, 15 bp, Homo sapiens
agcgatgcggtggga

SEQ ID NO: 1483857 - DNA, 15 bp, Homo sapiens
gagcgatgcggtggg

SEQ ID NO: 1483858 - DNA, 15 bp, Homo sapiens
ggagcgatgcggtgg

SEQ ID NO: 1483859 - DNA, 15 bp, Homo sapiens
tggagcgatgcggtg

SEQ ID NO: 1483860 - DNA, 15 bp, Homo sapiens
gtggagcgatgcggt

SEQ ID NO: 1483861 - DNA, 15 bp, Homo sapiens
agtggagcgatgcgg

SEQ ID NO: 1483862 - DNA, 15 bp, Homo sapiens
aagtggagcgatgcg

SEQ ID NO: 1483863 - DNA, 15 bp, Homo sapiens
gaagtggagcgatgc

SEQ ID NO: 1483864 - DNA, 15 bp, Homo sapiens
ggaagtggagcgatg

SEQ ID NO: 1483865 - DNA, 15 bp, Homo sapiens
aggaagtggagcgat

SEQ ID NO: 1483866 - DNA, 15 bp, Homo sapiens
caggaagtggagcga

SEQ ID NO: 1483867 - DNA, 15 bp, Homo sapiens
ccaggaagtggagcg

SEQ ID NO: 1483868 - DNA, 15 bp, Homo sapiens
gccaggaagtggagc

SEQ ID NO: 1483869 - DNA, 15 bp, Homo sapiens
tgccaggaagtggag

SEQ ID NO: 1483870 - DNA, 15 bp, Homo sapiens
gtgccaggaagtgga

SEQ ID NO: 1483871 - DNA, 15 bp, Homo sapiens
tgtgccaggaagtgg

SEQ ID NO: 1483872 - DNA, 15 bp, Homo sapiens
atgtgccaggaagtg

SEQ ID NO: 1483873 - DNA, 15 bp, Homo sapiens
catgtgccaggaagt

SEQ ID NO: 1483874 - DNA, 15 bp, Homo sapiens
ccatgtgccaggaag

SEQ ID NO: 1483875 - DNA, 15 bp, Homo sapiens
accatgtgccaggaa

SEQ ID NO: 1483876 - DNA, 15 bp, Homo sapiens
gaccatgtgccagga

SEQ ID NO: 1483877 - DNA, 15 bp, Homo sapiens
tgaccatgtgccagg

SEQ ID NO: 1483878 - DNA, 15 bp, Homo sapiens
gtgaccatgtgccag

SEQ ID NO: 1483879 - DNA, 15 bp, Homo sapiens
agtgaccatgtgcca

SEQ ID NO: 1483880 - DNA, 15 bp, Homo sapiens
aagtgaccatgtgcc

SEQ ID NO: 1483881 - DNA, 15 bp, Homo sapiens
gaagtgaccatgtgc

SEQ ID NO: 1483882 - DNA, 15 bp, Homo sapiens
ggaagtgaccatgtg

SEQ ID NO: 1483883 - DNA, 15 bp, Homo sapiens
gggaagtgaccatgt

SEQ ID NO: 1483884 - DNA, 15 bp, Homo sapiens
tgggaagtgaccatg

SEQ ID NO: 1483885 - DNA, 15 bp, Homo sapiens
ctgggaagtgaccat

SEQ ID NO: 1483886 - DNA, 15 bp, Homo sapiens
cctgggaagtgacca

SEQ ID NO: 1483887 - DNA, 15 bp, Homo sapiens
ccctgggaagtgacc

SEQ ID NO: 1483888 - DNA, 15 bp, Homo sapiens
tccctgggaagtgac

SEQ ID NO: 1483889 - DNA, 15 bp, Homo sapiens
ttccctgggaagtga

SEQ ID NO: 1483890 - DNA, 15 bp, Homo sapiens
cttccctgggaagtg

SEQ ID NO: 1483891 - DNA, 15 bp, Homo sapiens
acttccctgggaagt

SEQ ID NO: 1483892 - DNA, 15 bp, Homo sapiens
gacttccctgggaag

SEQ ID NO: 1483893 - DNA, 15 bp, Homo sapiens
ggacttccctgggaa

SEQ ID NO: 1483894 - DNA, 15 bp, Homo sapiens
gggacttccctggga

SEQ ID NO: 1483895 - DNA, 15 bp, Homo sapiens
agggacttccctggg

SEQ ID NO: 1483896 - DNA, 15 bp, Homo sapiens
aagggacttccctgg

SEQ ID NO: 1483897 - DNA, 15 bp, Homo sapiens
aaagggacttccctg

SEQ ID NO: 1483898 - DNA, 15 bp, Homo sapiens
taaagggacttccct

SEQ ID NO: 1483899 - DNA, 15 bp, Homo sapiens
ctaaagggacttccc

SEQ ID NO: 1483900 - DNA, 15 bp, Homo sapiens
cctaaagggacttcc

SEQ ID NO: 1483901 - DNA, 15 bp, Homo sapiens
ccctaaagggacttc

SEQ ID NO: 1483902 - DNA, 15 bp, Homo sapiens
cccctaaagggactt

SEQ ID NO: 1483903 - DNA, 15 bp, Homo sapiens
ccccctaaagggact

SEQ ID NO: 1483904 - DNA, 15 bp, Homo sapiens
cccccctaaagggac

SEQ ID NO: 1483905 - DNA, 15 bp, Homo sapiens
gcccccctaaaggga

SEQ ID NO: 1483906 - DNA, 15 bp, Homo sapiens
ggcccccctaaaggg

SEQ ID NO: 1483907 - DNA, 15 bp, Homo sapiens
aggcccccctaaagg

SEQ ID NO: 1483908 - DNA, 15 bp, Homo sapiens
caggcccccctaaag

SEQ ID NO: 1483909 - DNA, 15 bp, Homo sapiens
tcaggcccccctaaa

SEQ ID NO: 1483910 - DNA, 15 bp, Homo sapiens
gtcaggcccccctaa

SEQ ID NO: 1483911 - DNA, 15 bp, Homo sapiens
ggtcaggccccccta

SEQ ID NO: 1483912 - DNA, 15 bp, Homo sapiens
aggtcaggcccccct

SEQ ID NO: 1483913 - DNA, 15 bp, Homo sapiens
taggtcaggcccccc

SEQ ID NO: 1483914 - DNA, 15 bp, Homo sapiens
gtaggtcaggccccc

SEQ ID NO: 1483915 - DNA, 15 bp, Homo sapiens
ggtaggtcaggcccc

SEQ ID NO: 1483916 - DNA, 15 bp, Homo sapiens
gggtaggtcaggccc

SEQ ID NO: 1483917 - DNA, 15 bp, Homo sapiens
cgggtaggtcaggcc

SEQ ID NO: 1483918 - DNA, 15 bp, Homo sapiens
ccgggtaggtcaggc

SEQ ID NO: 1483919 - DNA, 15 bp, Homo sapiens
tccgggtaggtcagg

SEQ ID NO: 1483920 - DNA, 15 bp, Homo sapiens
ctccgggtaggtcag

SEQ ID NO: 1483921 - DNA, 15 bp, Homo sapiens
gctccgggtaggtca

SEQ ID NO: 1483922 - DNA, 15 bp, Homo sapiens
ggctccgggtaggtc

SEQ ID NO: 1483923 - DNA, 15 bp, Homo sapiens
aggctccgggtaggt

SEQ ID NO: 1483924 - DNA, 15 bp, Homo sapiens
caggctccgggtagg

SEQ ID NO: 1483925 - DNA, 15 bp, Homo sapiens
tcaggctccgggtag

SEQ ID NO: 1483926 - DNA, 15 bp, Homo sapiens
ctcaggctccgggta

SEQ ID NO: 1483927 - DNA, 15 bp, Homo sapiens
gctcaggctccgggt

SEQ ID NO: 1483928 - DNA, 15 bp, Homo sapiens
ggctcaggctccggg

SEQ ID NO: 1483929 - DNA, 15 bp, Homo sapiens
cggctcaggctccgg

SEQ ID NO: 1483930 - DNA, 15 bp, Homo sapiens
tcggctcaggctccg

SEQ ID NO: 1483931 - DNA, 15 bp, Homo sapiens
ttcggctcaggctcc

SEQ ID NO: 1483932 - DNA, 15 bp, Homo sapiens
cttcggctcaggctc

SEQ ID NO: 1483933 - DNA, 15 bp, Homo sapiens
ccttcggctcaggct

SEQ ID NO: 1483934 - DNA, 15 bp, Homo sapiens
tccttcggctcaggc

SEQ ID NO: 1483935 - DNA, 15 bp, Homo sapiens
ttccttcggctcagg

SEQ ID NO: 1483936 - DNA, 15 bp, Homo sapiens
gttccttcggctcag

SEQ ID NO: 1483937 - DNA, 15 bp, Homo sapiens
cgttccttcggctca

SEQ ID NO: 1483938 - DNA, 15 bp, Homo sapiens
tcgttccttcggctc

SEQ ID NO: 1483939 - DNA, 15 bp, Homo sapiens
ctcgttccttcggct

SEQ ID NO: 1483940 - DNA, 15 bp, Homo sapiens
actcgttccttcggc

SEQ ID NO: 1483941 - DNA, 15 bp, Homo sapiens
aactcgttccttcgg

SEQ ID NO: 1483942 - DNA, 15 bp, Homo sapiens
caactcgttccttcg

SEQ ID NO: 1483943 - DNA, 15 bp, Homo sapiens
acaactcgttccttc

SEQ ID NO: 1483944 - DNA, 15 bp, Homo sapiens
gacaactcgttcctt

SEQ ID NO: 1483945 - DNA, 15 bp, Homo sapiens
ggacaactcgttcct

SEQ ID NO: 1483946 - DNA, 15 bp, Homo sapiens
aggacaactcgttcc

SEQ ID NO: 1483947 - DNA, 15 bp, Homo sapiens
aaggacaactcgttc

SEQ ID NO: 1483948 - DNA, 15 bp, Homo sapiens
aaaggacaactcgtt

SEQ ID NO: 1483949 - DNA, 15 bp, Homo sapiens
caaaggacaactcgt

SEQ ID NO: 1483950 - DNA, 15 bp, Homo sapiens
tcaaaggacaactcg

SEQ ID NO: 1483951 - DNA, 15 bp, Homo sapiens
gtcaaaggacaactc

SEQ ID NO: 1483952 - DNA, 15 bp, Homo sapiens
ggtcaaaggacaact

SEQ ID NO: 1483953 - DNA, 15 bp, Homo sapiens
aggtcaaaggacaac

SEQ ID NO: 1483954 - DNA, 15 bp, Homo sapiens
aaggtcaaaggacaa

SEQ ID NO: 1483955 - DNA, 15 bp, Homo sapiens
aaaggtcaaaggaca

SEQ ID NO: 1483956 - DNA, 15 bp, Homo sapiens
taaaggtcaaaggac

SEQ ID NO: 1483957 - DNA, 15 bp, Homo sapiens
gtaaaggtcaaagga

SEQ ID NO: 1483958 - DNA, 15 bp, Homo sapiens
agtaaaggtcaaagg

SEQ ID NO: 1483959 - DNA, 15 bp, Homo sapiens
cagtaaaggtcaaag

SEQ ID NO: 1483960 - DNA, 15 bp, Homo sapiens
ccagtaaaggtcaaa

SEQ ID NO: 1483961 - DNA, 15 bp, Homo sapiens
gccagtaaaggtcaa

SEQ ID NO: 1483962 - DNA, 15 bp, Homo sapiens
ggccagtaaaggtca

SEQ ID NO: 1483963 - DNA, 15 bp, Homo sapiens
tggccagtaaaggtc

SEQ ID NO: 1483964 - DNA, 15 bp, Homo sapiens
atggccagtaaaggt

SEQ ID NO: 1483965 - DNA, 15 bp, Homo sapiens
aatggccagtaaagg

SEQ ID NO: 1483966 - DNA, 15 bp, Homo sapiens
aaatggccagtaaag

SEQ ID NO: 1483967 - DNA, 15 bp, Homo sapiens
gaaatggccagtaaa

SEQ ID NO: 1483968 - DNA, 15 bp, Homo sapiens
tgaaatggccagtaa

SEQ ID NO: 1483969 - DNA, 15 bp, Homo sapiens
gtgaaatggccagta

SEQ ID NO: 1483970 - DNA, 15 bp, Homo sapiens
ggtgaaatggccagt

SEQ ID NO: 1483971 - DNA, 15 bp, Homo sapiens
aggtgaaatggccag

SEQ ID NO: 1483972 - DNA, 15 bp, Homo sapiens
gaggtgaaatggcca

SEQ ID NO: 1483973 - DNA, 15 bp, Homo sapiens
agaggtgaaatggcc

SEQ ID NO: 1483974 - DNA, 15 bp, Homo sapiens
aagaggtgaaatggc

SEQ ID NO: 1483975 - DNA, 15 bp, Homo sapiens
aaagaggtgaaatgg

SEQ ID NO: 1483976 - DNA, 15 bp, Homo sapiens
taaagaggtgaaatg

SEQ ID NO: 1483977 - DNA, 15 bp, Homo sapiens
ataaagaggtgaaat

SEQ ID NO: 1483978 - DNA, 15 bp, Homo sapiens
cataaagaggtgaaa

SEQ ID NO: 1483979 - DNA, 15 bp, Homo sapiens
tcataaagaggtgaa

SEQ ID NO: 1483980 - DNA, 15 bp, Homo sapiens
gtcataaagaggtga

SEQ ID NO: 1483981 - DNA, 15 bp, Homo sapiens
agtcataaagaggtg

SEQ ID NO: 1483982 - DNA, 15 bp, Homo sapiens
gagtcataaagaggt

SEQ ID NO: 1483983 - DNA, 15 bp, Homo sapiens
tgagtcataaagagg

SEQ ID NO: 1483984 - DNA, 15 bp, Homo sapiens
ttgagtcataaagag

SEQ ID NO: 1483985 - DNA, 15 bp, Homo sapiens
attgagtcataaaga

SEQ ID NO: 1483986 - DNA, 15 bp, Homo sapiens
aattgagtcataaag

SEQ ID NO: 1483987 - DNA, 15 bp, Homo sapiens
aaattgagtcataaa

SEQ ID NO: 1483988 - DNA, 15 bp, Homo sapiens
gaaattgagtcataa

SEQ ID NO: 1483989 - DNA, 15 bp, Homo sapiens
agaaattgagtcata

SEQ ID NO: 1483990 - DNA, 15 bp, Homo sapiens
gagaaattgagtcat

SEQ ID NO: 1483991 - DNA, 15 bp, Homo sapiens
tgagaaattgagtca

SEQ ID NO: 1483992 - DNA, 15 bp, Homo sapiens
atgagaaattgagtc

SEQ ID NO: 1483993 - DNA, 15 bp, Homo sapiens
gatgagaaattgagt

SEQ ID NO: 1483994 - DNA, 15 bp, Homo sapiens
ggatgagaaattgag

SEQ ID NO: 1483995 - DNA, 15 bp, Homo sapiens
tggatgagaaattga

SEQ ID NO: 1483996 - DNA, 15 bp, Homo sapiens
atggatgagaaattg

SEQ ID NO: 1483997 - DNA, 15 bp, Homo sapiens
tatggatgagaaatt

SEQ ID NO: 1483998 - DNA, 15 bp, Homo sapiens
ttatggatgagaaat

SEQ ID NO: 1483999 - DNA, 15 bp, Homo sapiens
tttatggatgagaaa

SEQ ID NO: 1484000 - DNA, 15 bp, Homo sapiens
ctttatggatgagaa

SEQ ID NO: 1484001 - DNA, 15 bp, Homo sapiens
actttatggatgaga

SEQ ID NO: 1484002 - DNA, 15 bp, Homo sapiens
cactttatggatgag

SEQ ID NO: 1484003 - DNA, 15 bp, Homo sapiens
ccactttatggatga

SEQ ID NO: 1484004 - DNA, 15 bp, Homo sapiens
tccactttatggatg

SEQ ID NO: 1484005 - DNA, 15 bp, Homo sapiens
ttccactttatggat

SEQ ID NO: 1484006 - DNA, 15 bp, Homo sapiens
tttccactttatgga

SEQ ID NO: 1484007 - DNA, 15 bp, Homo sapiens
ctttccactttatgg

SEQ ID NO: 1484008 - DNA, 15 bp, Homo sapiens
cctttccactttatg

SEQ ID NO: 1484009 - DNA, 15 bp, Homo sapiens
tcctttccactttat

SEQ ID NO: 1484010 - DNA, 15 bp, Homo sapiens
ctcctttccacttta

SEQ ID NO: 1484011 - DNA, 15 bp, Homo sapiens
tctcctttccacttt

SEQ ID NO: 1484012 - DNA, 15 bp, Homo sapiens
ctctcctttccactt

SEQ ID NO: 1484013 - DNA, 15 bp, Homo sapiens
actctcctttccact

SEQ ID NO: 1484014 - DNA, 15 bp, Homo sapiens
cactctcctttccac

SEQ ID NO: 1484015 - DNA, 15 bp, Homo sapiens
gcactctcctttcca

SEQ ID NO: 1484016 - DNA, 15 bp, Homo sapiens
cgcactctcctttcc

SEQ ID NO: 1484017 - DNA, 15 bp, Homo sapiens
acgcactctcctttc

SEQ ID NO: 1484018 - DNA, 15 bp, Homo sapiens
cacgcactctccttt

SEQ ID NO: 1484019 - DNA, 15 bp, Homo sapiens
ccacgcactctcctt

SEQ ID NO: 1484020 - DNA, 15 bp, Homo sapiens
gccacgcactctcct

SEQ ID NO: 1484021 - DNA, 15 bp, Homo sapiens
agccacgcactctcc

SEQ ID NO: 1484022 - DNA, 15 bp, Homo sapiens
aagccacgcactctc

SEQ ID NO: 1484023 - DNA, 15 bp, Homo sapiens
caagccacgcactct

SEQ ID NO: 1484024 - DNA, 15 bp, Homo sapiens
tcaagccacgcactc

SEQ ID NO: 1484025 - DNA, 15 bp, Homo sapiens
ttcaagccacgcact

SEQ ID NO: 1484026 - DNA, 15 bp, Homo sapiens
tttcaagccacgcac

SEQ ID NO: 1484027 - DNA, 15 bp, Homo sapiens
ttttcaagccacgca

SEQ ID NO: 1484028 - DNA, 15 bp, Homo sapiens
cttttcaagccacgc

SEQ ID NO: 1484029 - DNA, 15 bp, Homo sapiens
acttttcaagccacg

SEQ ID NO: 1484030 - DNA, 15 bp, Homo sapiens
gacttttcaagccac

SEQ ID NO: 1484031 - DNA, 15 bp, Homo sapiens
tgacttttcaagcca

SEQ ID NO: 1484032 - DNA, 15 bp, Homo sapiens
atgacttttcaagcc

SEQ ID NO: 1484033 - DNA, 15 bp, Homo sapiens
gatgacttttcaagc

SEQ ID NO: 1484034 - DNA, 15 bp, Homo sapiens
tgatgacttttcaag

SEQ ID NO: 1484035 - DNA, 15 bp, Homo sapiens
ctgatgacttttcaa

SEQ ID NO: 1484036 - DNA, 15 bp, Homo sapiens
actgatgacttttca

SEQ ID NO: 1484037 - DNA, 15 bp, Homo sapiens
cactgatgacttttc

SEQ ID NO: 1484038 - DNA, 15 bp, Homo sapiens
tcactgatgactttt

SEQ ID NO: 1484039 - DNA, 15 bp, Homo sapiens
ctcactgatgacttt

SEQ ID NO: 1484040 - DNA, 15 bp, Homo sapiens
actcactgatgactt

SEQ ID NO: 1484041 - DNA, 15 bp, Homo sapiens
cactcactgatgact

SEQ ID NO: 1484042 - DNA, 15 bp, Homo sapiens
acactcactgatgac

SEQ ID NO: 1484043 - DNA, 15 bp, Homo sapiens
aacactcactgatga

SEQ ID NO: 1484044 - DNA, 15 bp, Homo sapiens
aaacactcactgatg

SEQ ID NO: 1484045 - DNA, 15 bp, Homo sapiens
taaacactcactgat

SEQ ID NO: 1484046 - DNA, 15 bp, Homo sapiens
ttaaacactcactga

SEQ ID NO: 1484047 - DNA, 15 bp, Homo sapiens
attaaacactcactg

SEQ ID NO: 1484048 - DNA, 15 bp, Homo sapiens
aattaaacactcact

SEQ ID NO: 1484049 - DNA, 15 bp, Homo sapiens
gaattaaacactcac

SEQ ID NO: 1484050 - DNA, 15 bp, Homo sapiens
agaattaaacactca

SEQ ID NO: 1484051 - DNA, 15 bp, Homo sapiens
aagaattaaacactc

SEQ ID NO: 1484052 - DNA, 15 bp, Homo sapiens
gaagaattaaacact

SEQ ID NO: 1484053 - DNA, 15 bp, Homo sapiens
agaagaattaaacac

SEQ ID NO: 1484054 - DNA, 15 bp, Homo sapiens
aagaagaattaaaca

SEQ ID NO: 1484055 - DNA, 15 bp, Homo sapiens
aaagaagaattaaac

SEQ ID NO: 1484056 - DNA, 15 bp, Homo sapiens
taaagaagaattaaa

SEQ ID NO: 1484057 - DNA, 15 bp, Homo sapiens
ttaaagaagaattaa

SEQ ID NO: 1484058 - DNA, 15 bp, Homo sapiens
attaaagaagaatta

SEQ ID NO: 1484059 - DNA, 15 bp, Homo sapiens
cattaaagaagaatt

SEQ ID NO: 1484060 - DNA, 15 bp, Homo sapiens
ccattaaagaagaat

SEQ ID NO: 1484061 - DNA, 15 bp, Homo sapiens
cccattaaagaagaa

SEQ ID NO: 1484062 - DNA, 15 bp, Homo sapiens
acccattaaagaaga

SEQ ID NO: 1484063 - DNA, 15 bp, Homo sapiens
cacccattaaagaag

SEQ ID NO: 1484064 - DNA, 15 bp, Homo sapiens
acacccattaaagaa

SEQ ID NO: 1484065 - DNA, 15 bp, Homo sapiens
gacacccattaaaga

SEQ ID NO: 1484066 - DNA, 15 bp, Homo sapiens
agacacccattaaag

SEQ ID NO: 1484067 - DNA, 15 bp, Homo sapiens
aagacacccattaaa

SEQ ID NO: 1484068 - DNA, 15 bp, Homo sapiens
gaagacacccattaa

SEQ ID NO: 1484069 - DNA, 15 bp, Homo sapiens
agaagacacccatta

SEQ ID NO: 1484070 - DNA, 15 bp, Homo sapiens
tagaagacacccatt

SEQ ID NO: 1484071 - DNA, 15 bp, Homo sapiens
atagaagacacccat

SEQ ID NO: 1484072 - DNA, 15 bp, Homo sapiens
aatagaagacaccca

SEQ ID NO: 1484073 - DNA, 15 bp, Homo sapiens
taataataataatag

SEQ ID NO: 1484074 - DNA, 15 bp, Homo sapiens
gaataataataataa

SEQ ID NO: 1484075 - DNA, 15 bp, Homo sapiens
atttgatgactaaat

SEQ ID NO: 1484076 - DNA, 15 bp, Homo sapiens
tatttgatgactaaa

SEQ ID NO: 1484077 - DNA, 15 bp, Homo sapiens
atatttgatgactaa

SEQ ID NO: 1484078 - DNA, 15 bp, Homo sapiens
aatatttgatgacta

SEQ ID NO: 1484079 - DNA, 15 bp, Homo sapiens
taatatttgatgact

SEQ ID NO: 1484080 - DNA, 15 bp, Homo sapiens
gtaatatttgatgac

SEQ ID NO: 1484081 - DNA, 15 bp, Homo sapiens
tgtaatatttgatga

SEQ ID NO: 1484082 - DNA, 15 bp, Homo sapiens
ctgtaatatttgatg

SEQ ID NO: 1484083 - DNA, 15 bp, Homo sapiens
cctgtaatatttgat

SEQ ID NO: 1484084 - DNA, 15 bp, Homo sapiens
gcctgtaatatttga

SEQ ID NO: 1484085 - DNA, 15 bp, Homo sapiens
tgcctgtaatatttg

SEQ ID NO: 1484086 - DNA, 15 bp, Homo sapiens
ctgcctgtaatattt

SEQ ID NO: 1484087 - DNA, 15 bp, Homo sapiens
actgcctgtaatatt

SEQ ID NO: 1484088 - DNA, 15 bp, Homo sapiens
cactgcctgtaatat

SEQ ID NO: 1484089 - DNA, 15 bp, Homo sapiens
ccactgcctgtaata

SEQ ID NO: 1484090 - DNA, 15 bp, Homo sapiens
gccactgcctgtaat

SEQ ID NO: 1484091 - DNA, 15 bp, Homo sapiens
agccactgcctgtaa

SEQ ID NO: 1484092 - DNA, 15 bp, Homo sapiens
gagccactgcctgta

SEQ ID NO: 1484093 - DNA, 15 bp, Homo sapiens
tgagccactgcctgt

SEQ ID NO: 1484094 - DNA, 15 bp, Homo sapiens
gtgagccactgcctg

SEQ ID NO: 1484095 - DNA, 15 bp, Homo sapiens
cgtgagccactgcct

SEQ ID NO: 1484096 - DNA, 15 bp, Homo sapiens
gcgtgagccactgcc

SEQ ID NO: 1484097 - DNA, 15 bp, Homo sapiens
ggcgtgagccactgc

SEQ ID NO: 1484098 - DNA, 15 bp, Homo sapiens
gaagtgctgggatta

SEQ ID NO: 1484099 - DNA, 15 bp, Homo sapiens
cgaagtgctgggatt

SEQ ID NO: 1484100 - DNA, 15 bp, Homo sapiens
ccgaagtgctgggat

SEQ ID NO: 1484101 - DNA, 15 bp, Homo sapiens
cccgaagtgctggga

SEQ ID NO: 1484102 - DNA, 15 bp, Homo sapiens
tcccgaagtgctggg

SEQ ID NO: 1484103 - DNA, 15 bp, Homo sapiens
ctcccgaagtgctgg

SEQ ID NO: 1484104 - DNA, 15 bp, Homo sapiens
cctcccgaagtgctg

SEQ ID NO: 1484105 - DNA, 15 bp, Homo sapiens
gcctcccgaagtgct

SEQ ID NO: 1484106 - DNA, 15 bp, Homo sapiens
ggcctcccgaagtgc

SEQ ID NO: 1484107 - DNA, 15 bp, Homo sapiens
cggcctcccgaagtg

SEQ ID NO: 1484108 - DNA, 15 bp, Homo sapiens
tcggcctcccgaagt

SEQ ID NO: 1484109 - DNA, 15 bp, Homo sapiens
ctcggcctcccgaag

SEQ ID NO: 1484110 - DNA, 15 bp, Homo sapiens
cctcggcctcccgaa

SEQ ID NO: 1484111 - DNA, 15 bp, Homo sapiens
agcctgcctcggcct

SEQ ID NO: 1484112 - DNA, 15 bp, Homo sapiens
cagcctgcctcggcc

SEQ ID NO: 1484113 - DNA, 15 bp, Homo sapiens
tcagcctgcctcggc

SEQ ID NO: 1484114 - DNA, 15 bp, Homo sapiens
atcagcctgcctcgg

SEQ ID NO: 1484115 - DNA, 15 bp, Homo sapiens
gatcagcctgcctcg

SEQ ID NO: 1484116 - DNA, 15 bp, Homo sapiens
tgatcagcctgcctc

SEQ ID NO: 1484117 - DNA, 15 bp, Homo sapiens
gtgatcagcctgcct

SEQ ID NO: 1484118 - DNA, 15 bp, Homo sapiens
agtgatcagcctgcc

SEQ ID NO: 1484119 - DNA, 15 bp, Homo sapiens
aagtgatcagcctgc

SEQ ID NO: 1484120 - DNA, 15 bp, Homo sapiens
caagtgatcagcctg

SEQ ID NO: 1484121 - DNA, 15 bp, Homo sapiens
tcaagtgatcagcct

SEQ ID NO: 1484122 - DNA, 15 bp, Homo sapiens
ctcaagtgatcagcc

SEQ ID NO: 1484123 - DNA, 15 bp, Homo sapiens
cctcaagtgatcagc

SEQ ID NO: 1484124 - DNA, 15 bp, Homo sapiens
cgaacacctgacctc

SEQ ID NO: 1484125 - DNA, 15 bp, Homo sapiens
tcgaacacctgacct

SEQ ID NO: 1484126 - DNA, 15 bp, Homo sapiens
ctcgaacacctgacc

SEQ ID NO: 1484127 - DNA, 15 bp, Homo sapiens
tctcgaacacctgac

SEQ ID NO: 1484128 - DNA, 15 bp, Homo sapiens
gtctcgaacacctga

SEQ ID NO: 1484129 - DNA, 15 bp, Homo sapiens
ggtctcgaacacctg

SEQ ID NO: 1484130 - DNA, 15 bp, Homo sapiens
aggtctcgaacacct

SEQ ID NO: 1484131 - DNA, 15 bp, Homo sapiens
caggtctcgaacacc

SEQ ID NO: 1484132 - DNA, 15 bp, Homo sapiens
gcaggtctcgaacac

SEQ ID NO: 1484133 - DNA, 15 bp, Homo sapiens
ggcaggtctcgaaca

SEQ ID NO: 1484134 - DNA, 15 bp, Homo sapiens
aggcaggtctcgaac

SEQ ID NO: 1484135 - DNA, 15 bp, Homo sapiens
caggcaggtctcgaa

SEQ ID NO: 1484136 - DNA, 15 bp, Homo sapiens
ccaggcaggtctcga

SEQ ID NO: 1484137 - DNA, 15 bp, Homo sapiens
gccaggcaggtctcg

SEQ ID NO: 1484138 - DNA, 15 bp, Homo sapiens
ggagacggggtttca

SEQ ID NO: 1484139 - DNA, 15 bp, Homo sapiens
tggagacggggtttc

SEQ ID NO: 1484140 - DNA, 15 bp, Homo sapiens
gtggagacggggttt

SEQ ID NO: 1484141 - DNA, 15 bp, Homo sapiens
cgtggagacggggtt

SEQ ID NO: 1484142 - DNA, 15 bp, Homo sapiens
tcgtggagacggggt

SEQ ID NO: 1484143 - DNA, 15 bp, Homo sapiens
ttcgtggagacgggg

SEQ ID NO: 1484144 - DNA, 15 bp, Homo sapiens
tttcgtggagacggg

SEQ ID NO: 1484145 - DNA, 15 bp, Homo sapiens
ttttcgtggagacgg

SEQ ID NO: 1484146 - DNA, 15 bp, Homo sapiens
tttttcgtggagacg

SEQ ID NO: 1484147 - DNA, 15 bp, Homo sapiens
atttttcgtggagac

SEQ ID NO: 1484148 - DNA, 15 bp, Homo sapiens
tatttttcgtggaga

SEQ ID NO: 1484149 - DNA, 15 bp, Homo sapiens
gtatttttcgtggag

SEQ ID NO: 1484150 - DNA, 15 bp, Homo sapiens
tgtatttttcgtgga

SEQ ID NO: 1484151 - DNA, 15 bp, Homo sapiens
ttgtatttttcgtgg

SEQ ID NO: 1484152 - DNA, 15 bp, Homo sapiens
tttgtatttttcgtg

SEQ ID NO: 1484153 - DNA, 15 bp, Homo sapiens
atttttgtatttttc

SEQ ID NO: 1484154 - DNA, 15 bp, Homo sapiens
gccggctaatttttg

SEQ ID NO: 1484155 - DNA, 15 bp, Homo sapiens
cgccggctaattttt

SEQ ID NO: 1484156 - DNA, 15 bp, Homo sapiens
acgccggctaatttt

SEQ ID NO: 1484157 - DNA, 15 bp, Homo sapiens
gacgccggctaattt

SEQ ID NO: 1484158 - DNA, 15 bp, Homo sapiens
cgacgccggctaatt

SEQ ID NO: 1484159 - DNA, 15 bp, Homo sapiens
acgacgccggctaat

SEQ ID NO: 1484160 - DNA, 15 bp, Homo sapiens
cacgacgccggctaa

SEQ ID NO: 1484161 - DNA, 15 bp, Homo sapiens
ccacgacgccggcta

SEQ ID NO: 1484162 - DNA, 15 bp, Homo sapiens
gccacgacgccggct

SEQ ID NO: 1484163 - DNA, 15 bp, Homo sapiens
cgccacgacgccggc

SEQ ID NO: 1484164 - DNA, 15 bp, Homo sapiens
gcgccacgacgccgg

SEQ ID NO: 1484165 - DNA, 15 bp, Homo sapiens
tgcgccacgacgccg

SEQ ID NO: 1484166 - DNA, 15 bp, Homo sapiens
gtgcgccacgacgcc

SEQ ID NO: 1484167 - DNA, 15 bp, Homo sapiens
cgtgcgccacgacgc

SEQ ID NO: 1484168 - DNA, 15 bp, Homo sapiens
gcgtgcgccacgacg

SEQ ID NO: 1484169 - DNA, 15 bp, Homo sapiens
ggcgtgcgccacgac

SEQ ID NO: 1484170 - DNA, 15 bp, Homo sapiens
aggcgtgcgccacga

SEQ ID NO: 1484171 - DNA, 15 bp, Homo sapiens
caggcgtgcgccacg

SEQ ID NO: 1484172 - DNA, 15 bp, Homo sapiens
acaggcgtgcgccac

SEQ ID NO: 1484173 - DNA, 15 bp, Homo sapiens
tacaggcgtgcgcca

SEQ ID NO: 1484174 - DNA, 15 bp, Homo sapiens
ttacaggcgtgcgcc

SEQ ID NO: 1484175 - DNA, 15 bp, Homo sapiens
attacaggcgtgcgc

SEQ ID NO: 1484176 - DNA, 15 bp, Homo sapiens
gattacaggcgtgcg

SEQ ID NO: 1484177 - DNA, 15 bp, Homo sapiens
ggggattacaggcgt

SEQ ID NO: 1484178 - DNA, 15 bp, Homo sapiens
cggggattacaggcg

SEQ ID NO: 1484179 - DNA, 15 bp, Homo sapiens
gcggggattacaggc

SEQ ID NO: 1484180 - DNA, 15 bp, Homo sapiens
agcggggattacagg

SEQ ID NO: 1484181 - DNA, 15 bp, Homo sapiens
tagcggggattacag

SEQ ID NO: 1484182 - DNA, 15 bp, Homo sapiens
gtagcggggattaca

SEQ ID NO: 1484183 - DNA, 15 bp, Homo sapiens
agtagcggggattac

SEQ ID NO: 1484184 - DNA, 15 bp, Homo sapiens
gagtagcggggatta

SEQ ID NO: 1484185 - DNA, 15 bp, Homo sapiens
cgagtagcggggatt

SEQ ID NO: 1484186 - DNA, 15 bp, Homo sapiens
ccgagtagcggggat

SEQ ID NO: 1484187 - DNA, 15 bp, Homo sapiens
cccgagtagcgggga

SEQ ID NO: 1484188 - DNA, 15 bp, Homo sapiens
tcccgagtagcgggg

SEQ ID NO: 1484189 - DNA, 15 bp, Homo sapiens
ctcccgagtagcggg

SEQ ID NO: 1484190 - DNA, 15 bp, Homo sapiens
cctcccgagtagcgg

SEQ ID NO: 1484191 - DNA, 15 bp, Homo sapiens
gtcagcctcccgagt

SEQ ID NO: 1484192 - DNA, 15 bp, Homo sapiens
cgtcagcctcccgag

SEQ ID NO: 1484193 - DNA, 15 bp, Homo sapiens
gcgtcagcctcccga

SEQ ID NO: 1484194 - DNA, 15 bp, Homo sapiens
tgcgtcagcctcccg

SEQ ID NO: 1484195 - DNA, 15 bp, Homo sapiens
ctgcgtcagcctccc

SEQ ID NO: 1484196 - DNA, 15 bp, Homo sapiens
cctgcgtcagcctcc

SEQ ID NO: 1484197 - DNA, 15 bp, Homo sapiens
tcctgcgtcagcctc

SEQ ID NO: 1484198 - DNA, 15 bp, Homo sapiens
ctcctgcgtcagcct

SEQ ID NO: 1484199 - DNA, 15 bp, Homo sapiens
tctcctgcgtcagcc

SEQ ID NO: 1484200 - DNA, 15 bp, Homo sapiens
ttctcctgcgtcagc

SEQ ID NO: 1484201 - DNA, 15 bp, Homo sapiens
attctcctgcgtcag

SEQ ID NO: 1484202 - DNA, 15 bp, Homo sapiens
gattctcctgcgtca

SEQ ID NO: 1484203 - DNA, 15 bp, Homo sapiens
cgattctcctgcgtc

SEQ ID NO: 1484204 - DNA, 15 bp, Homo sapiens
gcgattctcctgcgt

SEQ ID NO: 1484205 - DNA, 15 bp, Homo sapiens
agcgattctcctgcg

SEQ ID NO: 1484206 - DNA, 15 bp, Homo sapiens
ccaagcgattctcct

SEQ ID NO: 1484207 - DNA, 15 bp, Homo sapiens
tccaagcgattctcc

SEQ ID NO: 1484208 - DNA, 15 bp, Homo sapiens
gtccaagcgattctc

SEQ ID NO: 1484209 - DNA, 15 bp, Homo sapiens
cgtccaagcgattct

SEQ ID NO: 1484210 - DNA, 15 bp, Homo sapiens
gcgtccaagcgattc

SEQ ID NO: 1484211 - DNA, 15 bp, Homo sapiens
tgcgtccaagcgatt

SEQ ID NO: 1484212 - DNA, 15 bp, Homo sapiens
ctgcgtccaagcgat

SEQ ID NO: 1484213 - DNA, 15 bp, Homo sapiens
cctgcgtccaagcga

SEQ ID NO: 1484214 - DNA, 15 bp, Homo sapiens
tcctgcgtccaagcg

SEQ ID NO: 1484215 - DNA, 15 bp, Homo sapiens
ctcctgcgtccaagc

SEQ ID NO: 1484216 - DNA, 15 bp, Homo sapiens
cctcctgcgtccaag

SEQ ID NO: 1484217 - DNA, 15 bp, Homo sapiens
gcctcctgcgtccaa

SEQ ID NO: 1484218 - DNA, 15 bp, Homo sapiens
cgcctcctgcgtcca

SEQ ID NO: 1484219 - DNA, 15 bp, Homo sapiens
ccgcctcctgcgtcc

SEQ ID NO: 1484220 - DNA, 15 bp, Homo sapiens
tccgcctcctgcgtc

SEQ ID NO: 1484221 - DNA, 15 bp, Homo sapiens
ctccgcctcctgcgt

SEQ ID NO: 1484222 - DNA, 15 bp, Homo sapiens
cctccgcctcctgcg

SEQ ID NO: 1484223 - DNA, 15 bp, Homo sapiens
acctccgcctcctgc

SEQ ID NO: 1484224 - DNA, 15 bp, Homo sapiens
gtgcaacctccgcct

SEQ ID NO: 1484225 - DNA, 15 bp, Homo sapiens
agtgcaacctccgcc

SEQ ID NO: 1484226 - DNA, 15 bp, Homo sapiens
cagtgcaacctccgc

SEQ ID NO: 1484227 - DNA, 15 bp, Homo sapiens
tcagtgcaacctccg

SEQ ID NO: 1484228 - DNA, 15 bp, Homo sapiens
ctcagtgcaacctcc

SEQ ID NO: 1484229 - DNA, 15 bp, Homo sapiens
gctcagtgcaacctc

SEQ ID NO: 1484230 - DNA, 15 bp, Homo sapiens
agctcagtgcaacct

SEQ ID NO: 1484231 - DNA, 15 bp, Homo sapiens
cagctcagtgcaacc

SEQ ID NO: 1484232 - DNA, 15 bp, Homo sapiens
tcagctcagtgcaac

SEQ ID NO: 1484233 - DNA, 15 bp, Homo sapiens
ctcagctcagtgcaa

SEQ ID NO: 1484234 - DNA, 15 bp, Homo sapiens
tctcagctcagtgca

SEQ ID NO: 1484235 - DNA, 15 bp, Homo sapiens
atctcagctcagtgc

SEQ ID NO: 1484236 - DNA, 15 bp, Homo sapiens
gatctcagctcagtg

SEQ ID NO: 1484237 - DNA, 15 bp, Homo sapiens
cgatctcagctcagt

SEQ ID NO: 1484238 - DNA, 15 bp, Homo sapiens
acgatctcagctcag

SEQ ID NO: 1484239 - DNA, 15 bp, Homo sapiens
cacgatctcagctca

SEQ ID NO: 1484240 - DNA, 15 bp, Homo sapiens
gcacgatctcagctc

SEQ ID NO: 1484241 - DNA, 15 bp, Homo sapiens
ggcacgatctcagct

SEQ ID NO: 1484242 - DNA, 15 bp, Homo sapiens
tggcacgatctcagc

SEQ ID NO: 1484243 - DNA, 15 bp, Homo sapiens
gtggcacgatctcag

SEQ ID NO: 1484244 - DNA, 15 bp, Homo sapiens
agtggcacgatctca

SEQ ID NO: 1484245 - DNA, 15 bp, Homo sapiens
atgcagtggcacgat

SEQ ID NO: 1484246 - DNA, 15 bp, Homo sapiens
aatgcagtggcacga

SEQ ID NO: 1484247 - DNA, 15 bp, Homo sapiens
gaatgcagtggcacg

SEQ ID NO: 1484248 - DNA, 15 bp, Homo sapiens
agctggaatgcagtg

SEQ ID NO: 1484249 - DNA, 15 bp, Homo sapiens
aagctggaatgcagt

SEQ ID NO: 1484250 - DNA, 15 bp, Homo sapiens
caagctggaatgcag

SEQ ID NO: 1484251 - DNA, 15 bp, Homo sapiens
ccaagctggaatgca

SEQ ID NO: 1484252 - DNA, 15 bp, Homo sapiens
cccaagctggaatgc

SEQ ID NO: 1484253 - DNA, 15 bp, Homo sapiens
gcccaagctggaatg

SEQ ID NO: 1484254 - DNA, 15 bp, Homo sapiens
cgcccaagctggaat

SEQ ID NO: 1484255 - DNA, 15 bp, Homo sapiens
tcgcccaagctggaa

SEQ ID NO: 1484256 - DNA, 15 bp, Homo sapiens
gtcgcccaagctgga

SEQ ID NO: 1484257 - DNA, 15 bp, Homo sapiens
tgtcgcccaagctgg

SEQ ID NO: 1484258 - DNA, 15 bp, Homo sapiens
gtgtcgcccaagctg

SEQ ID NO: 1484259 - DNA, 15 bp, Homo sapiens
tgtgtcgcccaagct

SEQ ID NO: 1484260 - DNA, 15 bp, Homo sapiens
ctgtgtcgcccaagc

SEQ ID NO: 1484261 - DNA, 15 bp, Homo sapiens
gctgtgtcgcccaag

SEQ ID NO: 1484262 - DNA, 15 bp, Homo sapiens
cgctgtgtcgcccaa

SEQ ID NO: 1484263 - DNA, 15 bp, Homo sapiens
tcgctgtgtcgccca

SEQ ID NO: 1484264 - DNA, 15 bp, Homo sapiens
ctcgctgtgtcgccc

SEQ ID NO: 1484265 - DNA, 15 bp, Homo sapiens
tctcgctgtgtcgcc

SEQ ID NO: 1484266 - DNA, 15 bp, Homo sapiens
gtctcgctgtgtcgc

SEQ ID NO: 1484267 - DNA, 15 bp, Homo sapiens
agtctcgctgtgtcg

SEQ ID NO: 1484268 - DNA, 15 bp, Homo sapiens
gagtctcgctgtgtc

SEQ ID NO: 1484269 - DNA, 15 bp, Homo sapiens
agagtctcgctgtgt

SEQ ID NO: 1484270 - DNA, 15 bp, Homo sapiens
cagagtctcgctgtg

SEQ ID NO: 1484271 - DNA, 15 bp, Homo sapiens
acagagtctcgctgt

SEQ ID NO: 1484272 - DNA, 15 bp, Homo sapiens
gacagagtctcgctg

SEQ ID NO: 1484273 - DNA, 15 bp, Homo sapiens
gtgagacagagtctc

SEQ ID NO: 1484274 - DNA, 15 bp, Homo sapiens
tgtgagacagagtct

SEQ ID NO: 1484275 - DNA, 15 bp, Homo sapiens
ttgtgagacagagtc

SEQ ID NO: 1484276 - DNA, 15 bp, Homo sapiens
tttgtgagacagagt

SEQ ID NO: 1484277 - DNA, 15 bp, Homo sapiens
ttttgtgagacagag

SEQ ID NO: 1484278 - DNA, 15 bp, Homo sapiens
tttttgtgagacaga

SEQ ID NO: 1484279 - DNA, 15 bp, Homo sapiens
ttttttgtgagacag

SEQ ID NO: 1484280 - DNA, 15 bp, Homo sapiens
tttttttgtgagaca

SEQ ID NO: 1484281 - DNA, 15 bp, Homo sapiens
ttttttttgtgagac

SEQ ID NO: 1484282 - DNA, 15 bp, Homo sapiens
tttttttttgtgaga

SEQ ID NO: 1484283 - DNA, 15 bp, Homo sapiens
ttttttttttgtgag

SEQ ID NO: 1484284 - DNA, 15 bp, Homo sapiens
tttttttttttgtga

SEQ ID NO: 1484285 - DNA, 15 bp, Homo sapiens
ttttttttttttgtg

SEQ ID NO: 1484286 - DNA, 15 bp, Homo sapiens
ccctttccttttttt

SEQ ID NO: 1484287 - DNA, 15 bp, Homo sapiens
gccctttcctttttt

SEQ ID NO: 1484288 - DNA, 15 bp, Homo sapiens
agccctttccttttt

SEQ ID NO: 1484289 - DNA, 15 bp, Homo sapiens
aagccctttcctttt

SEQ ID NO: 1484290 - DNA, 15 bp, Homo sapiens
gaagccctttccttt

SEQ ID NO: 1484291 - DNA, 15 bp, Homo sapiens
cgaagccctttcctt

SEQ ID NO: 1484292 - DNA, 15 bp, Homo sapiens
tcgaagccctttcct

SEQ ID NO: 1484293 - DNA, 15 bp, Homo sapiens
ctcgaagccctttcc

SEQ ID NO: 1484294 - DNA, 15 bp, Homo sapiens
tctcgaagccctttc

SEQ ID NO: 1484295 - DNA, 15 bp, Homo sapiens
atctcgaagcccttt

SEQ ID NO: 1484296 - DNA, 15 bp, Homo sapiens
catctcgaagccctt

SEQ ID NO: 1484297 - DNA, 15 bp, Homo sapiens
ccatctcgaagccct

SEQ ID NO: 1484298 - DNA, 15 bp, Homo sapiens
gccatctcgaagccc

SEQ ID NO: 1484299 - DNA, 15 bp, Homo sapiens
agccatctcgaagcc

SEQ ID NO: 1484300 - DNA, 15 bp, Homo sapiens
cagccatctcgaagc

SEQ ID NO: 1484301 - DNA, 15 bp, Homo sapiens
ccagccatctcgaag

SEQ ID NO: 1484302 - DNA, 15 bp, Homo sapiens
accagccatctcgaa

SEQ ID NO: 1484303 - DNA, 15 bp, Homo sapiens
aaccagccatctcga

SEQ ID NO: 1484304 - DNA, 15 bp, Homo sapiens
caaccagccatctcg

SEQ ID NO: 1484305 - DNA, 15 bp, Homo sapiens
tcaaccagccatctc

SEQ ID NO: 1484306 - DNA, 15 bp, Homo sapiens
ttcaaccagccatct

SEQ ID NO: 1484307 - DNA, 15 bp, Homo sapiens
tttcaaccagccatc

SEQ ID NO: 1484308 - DNA, 15 bp, Homo sapiens
ttttcaaccagccat

SEQ ID NO: 1484309 - DNA, 15 bp, Homo sapiens
gttttcaaccagcca

SEQ ID NO: 1484310 - DNA, 15 bp, Homo sapiens
agttttcaaccagcc

SEQ ID NO: 1484311 - DNA, 15 bp, Homo sapiens
cagttttcaaccagc

SEQ ID NO: 1484312 - DNA, 15 bp, Homo sapiens
acagttttcaaccag

SEQ ID NO: 1484313 - DNA, 15 bp, Homo sapiens
gacagttttcaacca

SEQ ID NO: 1484314 - DNA, 15 bp, Homo sapiens
agacagttttcaacc

SEQ ID NO: 1484315 - DNA, 15 bp, Homo sapiens
gagacagttttcaac

SEQ ID NO: 1484316 - DNA, 15 bp, Homo sapiens
ggagacagttttcaa

SEQ ID NO: 1484317 - DNA, 15 bp, Homo sapiens
cggagacagttttca

SEQ ID NO: 1484318 - DNA, 15 bp, Homo sapiens
gcggagacagttttc

SEQ ID NO: 1484319 - DNA, 15 bp, Homo sapiens
cgcggagacagtttt

SEQ ID NO: 1484320 - DNA, 15 bp, Homo sapiens
gcgcggagacagttt

SEQ ID NO: 1484321 - DNA, 15 bp, Homo sapiens
ggcgcggagacagtt

SEQ ID NO: 1484322 - DNA, 15 bp, Homo sapiens
aggcgcggagacagt

SEQ ID NO: 1484323 - DNA, 15 bp, Homo sapiens
gaggcgcggagacag

SEQ ID NO: 1484324 - DNA, 15 bp, Homo sapiens
tgaggcgcggagaca

SEQ ID NO: 1484325 - DNA, 15 bp, Homo sapiens
gtgaggcgcggagac

SEQ ID NO: 1484326 - DNA, 15 bp, Homo sapiens
tgtgaggcgcggaga

SEQ ID NO: 1484327 - DNA, 15 bp, Homo sapiens
ctgtgaggcgcggag

SEQ ID NO: 1484328 - DNA, 15 bp, Homo sapiens
actgtgaggcgcgga

SEQ ID NO: 1484329 - DNA, 15 bp, Homo sapiens
gactgtgaggcgcgg

SEQ ID NO: 1484330 - DNA, 15 bp, Homo sapiens
ggactgtgaggcgcg

SEQ ID NO: 1484331 - DNA, 15 bp, Homo sapiens
gggactgtgaggcgc

SEQ ID NO: 1484332 - DNA, 15 bp, Homo sapiens
agggactgtgaggcg

SEQ ID NO: 1484333 - DNA, 15 bp, Homo sapiens
gagggactgtgaggc

SEQ ID NO: 1484334 - DNA, 15 bp, Homo sapiens
agagggactgtgagg

SEQ ID NO: 1484335 - DNA, 15 bp, Homo sapiens
aagagggactgtgag

SEQ ID NO: 1484336 - DNA, 15 bp, Homo sapiens
gaagagggactgtga

SEQ ID NO: 1484337 - DNA, 15 bp, Homo sapiens
agaagagggactgtg

SEQ ID NO: 1484338 - DNA, 15 bp, Homo sapiens
gagaagagggactgt

SEQ ID NO: 1484339 - DNA, 15 bp, Homo sapiens
agagaagagggactg

SEQ ID NO: 1484340 - DNA, 15 bp, Homo sapiens
gagagaagagggact

SEQ ID NO: 1484341 - DNA, 15 bp, Homo sapiens
ggagagaagagggac

SEQ ID NO: 1484342 - DNA, 15 bp, Homo sapiens
gggagagaagaggga

SEQ ID NO: 1484343 - DNA, 15 bp, Homo sapiens
agggagagaagaggg

SEQ ID NO: 1484344 - DNA, 15 bp, Homo sapiens
aagggagagaagagg

SEQ ID NO: 1484345 - DNA, 15 bp, Homo sapiens
taagggagagaagag

SEQ ID NO: 1484346 - DNA, 15 bp, Homo sapiens
ataagggagagaaga

SEQ ID NO: 1484347 - DNA, 15 bp, Homo sapiens
cataagggagagaag

SEQ ID NO: 1484348 - DNA, 15 bp, Homo sapiens
gcataagggagagaa

SEQ ID NO: 1484349 - DNA, 15 bp, Homo sapiens
ggcataagggagaga

SEQ ID NO: 1484350 - DNA, 15 bp, Homo sapiens
aggcataagggagag

SEQ ID NO: 1484351 - DNA, 15 bp, Homo sapiens
gaggcataagggaga

SEQ ID NO: 1484352 - DNA, 15 bp, Homo sapiens
agaggcataagggag

SEQ ID NO: 1484353 - DNA, 15 bp, Homo sapiens
cagaggcataaggga

SEQ ID NO: 1484354 - DNA, 15 bp, Homo sapiens
tcagaggcataaggg

SEQ ID NO: 1484355 - DNA, 15 bp, Homo sapiens
ctcagaggcataagg

SEQ ID NO: 1484356 - DNA, 15 bp, Homo sapiens
actcagaggcataag

SEQ ID NO: 1484357 - DNA, 15 bp, Homo sapiens
tactcagaggcataa

SEQ ID NO: 1484358 - DNA, 15 bp, Homo sapiens
ttactcagaggcata

SEQ ID NO: 1484359 - DNA, 15 bp, Homo sapiens
tttactcagaggcat

SEQ ID NO: 1484360 - DNA, 15 bp, Homo sapiens
atttactcagaggca

SEQ ID NO: 1484361 - DNA, 15 bp, Homo sapiens
gatttactcagaggc

SEQ ID NO: 1484362 - DNA, 15 bp, Homo sapiens
agatttactcagagg

SEQ ID NO: 1484363 - DNA, 15 bp, Homo sapiens
aagatttactcagag

SEQ ID NO: 1484364 - DNA, 15 bp, Homo sapiens
caagatttactcaga

SEQ ID NO: 1484365 - DNA, 15 bp, Homo sapiens
tcaagatttactcag

SEQ ID NO: 1484366 - DNA, 15 bp, Homo sapiens
ctcaagatttactca

SEQ ID NO: 1484367 - DNA, 15 bp, Homo sapiens
gctcaagatttactc

SEQ ID NO: 1484368 - DNA, 15 bp, Homo sapiens
ggctcaagatttact

SEQ ID NO: 1484369 - DNA, 15 bp, Homo sapiens
gggctcaagatttac

SEQ ID NO: 1484370 - DNA, 15 bp, Homo sapiens
agggctcaagattta

SEQ ID NO: 1484371 - DNA, 15 bp, Homo sapiens
aagggctcaagattt

SEQ ID NO: 1484372 - DNA, 15 bp, Homo sapiens
aaagggctcaagatt

SEQ ID NO: 1484373 - DNA, 15 bp, Homo sapiens
gaaagggctcaagat

SEQ ID NO: 1484374 - DNA, 15 bp, Homo sapiens
tgaaagggctcaaga

SEQ ID NO: 1484375 - DNA, 15 bp, Homo sapiens
gtgaaagggctcaag

SEQ ID NO: 1484376 - DNA, 15 bp, Homo sapiens
agtgaaagggctcaa

SEQ ID NO: 1484377 - DNA, 15 bp, Homo sapiens
gagtgaaagggctca

SEQ ID NO: 1484378 - DNA, 15 bp, Homo sapiens
ggagtgaaagggctc

SEQ ID NO: 1484379 - DNA, 15 bp, Homo sapiens
gggagtgaaagggct

SEQ ID NO: 1484380 - DNA, 15 bp, Homo sapiens
agggagtgaaagggc

SEQ ID NO: 1484381 - DNA, 15 bp, Homo sapiens
aagggagtgaaaggg

SEQ ID NO: 1484382 - DNA, 15 bp, Homo sapiens
aaagggagtgaaagg

SEQ ID NO: 1484383 - DNA, 15 bp, Homo sapiens
gaaagggagtgaaag

SEQ ID NO: 1484384 - DNA, 15 bp, Homo sapiens
agaaagggagtgaaa

SEQ ID NO: 1484385 - DNA, 15 bp, Homo sapiens
gagaaagggagtgaa

SEQ ID NO: 1484386 - DNA, 15 bp, Homo sapiens
cgagaaagggagtga

SEQ ID NO: 1484387 - DNA, 15 bp, Homo sapiens
gcgagaaagggagtg

SEQ ID NO: 1484388 - DNA, 15 bp, Homo sapiens
agcgagaaagggagt

SEQ ID NO: 1484389 - DNA, 15 bp, Homo sapiens
tagcgagaaagggag

SEQ ID NO: 1484390 - DNA, 15 bp, Homo sapiens
atagcgagaaaggga

SEQ ID NO: 1484391 - DNA, 15 bp, Homo sapiens
aatagcgagaaaggg

SEQ ID NO: 1484392 - DNA, 15 bp, Homo sapiens
aaatagcgagaaagg

SEQ ID NO: 1484393 - DNA, 15 bp, Homo sapiens
taaatagcgagaaag

SEQ ID NO: 1484394 - DNA, 15 bp, Homo sapiens
ttaaatagcgagaaa

SEQ ID NO: 1484395 - DNA, 15 bp, Homo sapiens
tttaaatagcgagaa

SEQ ID NO: 1484396 - DNA, 15 bp, Homo sapiens
ctttaaatagcgaga

SEQ ID NO: 1484397 - DNA, 15 bp, Homo sapiens
actttaaatagcgag

SEQ ID NO: 1484398 - DNA, 15 bp, Homo sapiens
tactttaaatagcga

SEQ ID NO: 1484399 - DNA, 15 bp, Homo sapiens
atactttaaatagcg

SEQ ID NO: 1484400 - DNA, 15 bp, Homo sapiens
gatactttaaatagc

SEQ ID NO: 1484401 - DNA, 15 bp, Homo sapiens
tgatactttaaatag

SEQ ID NO: 1484402 - DNA, 15 bp, Homo sapiens
ttgatactttaaata

SEQ ID NO: 1484403 - DNA, 15 bp, Homo sapiens
tttgatactttaaat

SEQ ID NO: 1484404 - DNA, 15 bp, Homo sapiens
ttttgatactttaaa

SEQ ID NO: 1484405 - DNA, 15 bp, Homo sapiens
gttttgatactttaa

SEQ ID NO: 1484406 - DNA, 15 bp, Homo sapiens
ggttttgatacttta

SEQ ID NO: 1484407 - DNA, 15 bp, Homo sapiens
tggttttgatacttt

SEQ ID NO: 1484408 - DNA, 15 bp, Homo sapiens
atggttttgatactt

SEQ ID NO: 1484409 - DNA, 15 bp, Homo sapiens
tatggttttgatact

SEQ ID NO: 1484410 - DNA, 15 bp, Homo sapiens
ttatggttttgatac

SEQ ID NO: 1484411 - DNA, 15 bp, Homo sapiens
gttatggttttgata

SEQ ID NO: 1484412 - DNA, 15 bp, Homo sapiens
agttatggttttgat

SEQ ID NO: 1484413 - DNA, 15 bp, Homo sapiens
gagttatggttttga

SEQ ID NO: 1484414 - DNA, 15 bp, Homo sapiens
ggagttatggttttg

SEQ ID NO: 1484415 - DNA, 15 bp, Homo sapiens
gggagttatggtttt

SEQ ID NO: 1484416 - DNA, 15 bp, Homo sapiens
ggggagttatggttt

SEQ ID NO: 1484417 - DNA, 15 bp, Homo sapiens
tggggagttatggtt

SEQ ID NO: 1484418 - DNA, 15 bp, Homo sapiens
atggggagttatggt

SEQ ID NO: 1484419 - DNA, 15 bp, Homo sapiens
aatggggagttatgg

SEQ ID NO: 1484420 - DNA, 15 bp, Homo sapiens
gaatggggagttatg

SEQ ID NO: 1484421 - DNA, 15 bp, Homo sapiens
cgaatggggagttat

SEQ ID NO: 1484422 - DNA, 15 bp, Homo sapiens
acgaatggggagtta

SEQ ID NO: 1484423 - DNA, 15 bp, Homo sapiens
cacgaatggggagtt

SEQ ID NO: 1484424 - DNA, 15 bp, Homo sapiens
gcacgaatggggagt

SEQ ID NO: 1484425 - DNA, 15 bp, Homo sapiens
ggcacgaatggggag

SEQ ID NO: 1484426 - DNA, 15 bp, Homo sapiens
aggcacgaatgggga

SEQ ID NO: 1484427 - DNA, 15 bp, Homo sapiens
gaggcacgaatgggg

SEQ ID NO: 1484428 - DNA, 15 bp, Homo sapiens
agaggcacgaatggg

SEQ ID NO: 1484429 - DNA, 15 bp, Homo sapiens
aagaggcacgaatgg

SEQ ID NO: 1484430 - DNA, 15 bp, Homo sapiens
aaagaggcacgaatg

SEQ ID NO: 1484431 - DNA, 15 bp, Homo sapiens
gaaagaggcacgaat

SEQ ID NO: 1484432 - DNA, 15 bp, Homo sapiens
ggaaagaggcacgaa

SEQ ID NO: 1484433 - DNA, 15 bp, Homo sapiens
cggaaagaggcacga

SEQ ID NO: 1484434 - DNA, 15 bp, Homo sapiens
gcggaaagaggcacg

SEQ ID NO: 1484435 - DNA, 15 bp, Homo sapiens
ggcggaaagaggcac

SEQ ID NO: 1484436 - DNA, 15 bp, Homo sapiens
aggcggaaagaggca

SEQ ID NO: 1484437 - DNA, 15 bp, Homo sapiens
caggcggaaagaggc

SEQ ID NO: 1484438 - DNA, 15 bp, Homo sapiens
acaggcggaaagagg

SEQ ID NO: 1484439 - DNA, 15 bp, Homo sapiens
aacaggcggaaagag

SEQ ID NO: 1484440 - DNA, 15 bp, Homo sapiens
gaacaggcggaaaga

SEQ ID NO: 1484441 - DNA, 15 bp, Homo sapiens
ggaacaggcggaaag

SEQ ID NO: 1484442 - DNA, 15 bp, Homo sapiens
gggaacaggcggaaa

SEQ ID NO: 1484443 - DNA, 15 bp, Homo sapiens
cgggaacaggcggaa

SEQ ID NO: 1484444 - DNA, 15 bp, Homo sapiens
ccgggaacaggcgga

SEQ ID NO: 1484445 - DNA, 15 bp, Homo sapiens
gccgggaacaggcgg

SEQ ID NO: 1484446 - DNA, 15 bp, Homo sapiens
cgccgggaacaggcg

SEQ ID NO: 1484447 - DNA, 15 bp, Homo sapiens
ccgccgggaacaggc

SEQ ID NO: 1484448 - DNA, 15 bp, Homo sapiens
tccgccgggaacagg

SEQ ID NO: 1484449 - DNA, 15 bp, Homo sapiens
ttccgccgggaacag

SEQ ID NO: 1484450 - DNA, 15 bp, Homo sapiens
gttccgccgggaaca

SEQ ID NO: 1484451 - DNA, 15 bp, Homo sapiens
tgttccgccgggaac

SEQ ID NO: 1484452 - DNA, 15 bp, Homo sapiens
gtgttccgccgggaa

SEQ ID NO: 1484453 - DNA, 15 bp, Homo sapiens
agtgttccgccggga

SEQ ID NO: 1484454 - DNA, 15 bp, Homo sapiens
gagtgttccgccggg

SEQ ID NO: 1484455 - DNA, 15 bp, Homo sapiens
ggagtgttccgccgg

SEQ ID NO: 1484456 - DNA, 15 bp, Homo sapiens
aggagtgttccgccg

SEQ ID NO: 1484457 - DNA, 15 bp, Homo sapiens
gaggagtgttccgcc

SEQ ID NO: 1484458 - DNA, 15 bp, Homo sapiens
agaggagtgttccgc

SEQ ID NO: 1484459 - DNA, 15 bp, Homo sapiens
cagaggagtgttccg

SEQ ID NO: 1484460 - DNA, 15 bp, Homo sapiens
ccagaggagtgttcc

SEQ ID NO: 1484461 - DNA, 15 bp, Homo sapiens
gccagaggagtgttc

SEQ ID NO: 1484462 - DNA, 15 bp, Homo sapiens
ggccagaggagtgtt

SEQ ID NO: 1484463 - DNA, 15 bp, Homo sapiens
aggccagaggagtgt

SEQ ID NO: 1484464 - DNA, 15 bp, Homo sapiens
aaggccagaggagtg

SEQ ID NO: 1484465 - DNA, 15 bp, Homo sapiens
gaaggccagaggagt

SEQ ID NO: 1484466 - DNA, 15 bp, Homo sapiens
agaaggccagaggag

SEQ ID NO: 1484467 - DNA, 15 bp, Homo sapiens
gagaaggccagagga

SEQ ID NO: 1484468 - DNA, 15 bp, Homo sapiens
agagaaggccagagg

SEQ ID NO: 1484469 - DNA, 15 bp, Homo sapiens
aagagaaggccagag

SEQ ID NO: 1484470 - DNA, 15 bp, Homo sapiens
caagagaaggccaga

SEQ ID NO: 1484471 - DNA, 15 bp, Homo sapiens
tcaagagaaggccag

SEQ ID NO: 1484472 - DNA, 15 bp, Homo sapiens
ctcaagagaaggcca

SEQ ID NO: 1484473 - DNA, 15 bp, Homo sapiens
cctcaagagaaggcc

SEQ ID NO: 1484474 - DNA, 15 bp, Homo sapiens
gcctcaagagaaggc

SEQ ID NO: 1484475 - DNA, 15 bp, Homo sapiens
agcctcaagagaagg

SEQ ID NO: 1484476 - DNA, 15 bp, Homo sapiens
gagcctcaagagaag

SEQ ID NO: 1484477 - DNA, 15 bp, Homo sapiens
ggagcctcaagagaa

SEQ ID NO: 1484478 - DNA, 15 bp, Homo sapiens
gggagcctcaagaga

SEQ ID NO: 1484479 - DNA, 15 bp, Homo sapiens
tgggagcctcaagag

SEQ ID NO: 1484480 - DNA, 15 bp, Homo sapiens
ctgggagcctcaaga

SEQ ID NO: 1484481 - DNA, 15 bp, Homo sapiens
actgggagcctcaag

SEQ ID NO: 1484482 - DNA, 15 bp, Homo sapiens
aactgggagcctcaa

SEQ ID NO: 1484483 - DNA, 15 bp, Homo sapiens
gaactgggagcctca

SEQ ID NO: 1484484 - DNA, 15 bp, Homo sapiens
tgaactgggagcctc

SEQ ID NO: 1484485 - DNA, 15 bp, Homo sapiens
gtgaactgggagcct

SEQ ID NO: 1484486 - DNA, 15 bp, Homo sapiens
cgtgaactgggagcc

SEQ ID NO: 1484487 - DNA, 15 bp, Homo sapiens
gcgtgaactgggagc

SEQ ID NO: 1484488 - DNA, 15 bp, Homo sapiens
agcgtgaactgggag

SEQ ID NO: 1484489 - DNA, 15 bp, Homo sapiens
cagcgtgaactggga

SEQ ID NO: 1484490 - DNA, 15 bp, Homo sapiens
gcagcgtgaactggg

SEQ ID NO: 1484491 - DNA, 15 bp, Homo sapiens
tgcagcgtgaactgg

SEQ ID NO: 1484492 - DNA, 15 bp, Homo sapiens
gtgcagcgtgaactg

SEQ ID NO: 1484493 - DNA, 15 bp, Homo sapiens
tgtgcagcgtgaact

SEQ ID NO: 1484494 - DNA, 15 bp, Homo sapiens
ctgtgcagcgtgaac

SEQ ID NO: 1484495 - DNA, 15 bp, Homo sapiens
actgtgcagcgtgaa

SEQ ID NO: 1484496 - DNA, 15 bp, Homo sapiens
cactgtgcagcgtga

SEQ ID NO: 1484497 - DNA, 15 bp, Homo sapiens
gcactgtgcagcgtg

SEQ ID NO: 1484498 - DNA, 15 bp, Homo sapiens
agcactgtgcagcgt

SEQ ID NO: 1484499 - DNA, 15 bp, Homo sapiens
cagcactgtgcagcg

SEQ ID NO: 1484500 - DNA, 15 bp, Homo sapiens
ccagcactgtgcagc

SEQ ID NO: 1484501 - DNA, 15 bp, Homo sapiens
cccagcactgtgcag

SEQ ID NO: 1484502 - DNA, 15 bp, Homo sapiens
gcccagcactgtgca

SEQ ID NO: 1484503 - DNA, 15 bp, Homo sapiens
tgcccagcactgtgc

SEQ ID NO: 1484504 - DNA, 15 bp, Homo sapiens
gtgcccagcactgtg

SEQ ID NO: 1484505 - DNA, 15 bp, Homo sapiens
agtgcccagcactgt

SEQ ID NO: 1484506 - DNA, 15 bp, Homo sapiens
cagtgcccagcactg

SEQ ID NO: 1484507 - DNA, 15 bp, Homo sapiens
gcagtgcccagcact

SEQ ID NO: 1484508 - DNA, 15 bp, Homo sapiens
ggcagtgcccagcac

SEQ ID NO: 1484509 - DNA, 15 bp, Homo sapiens
aggcagtgcccagca

SEQ ID NO: 1484510 - DNA, 15 bp, Homo sapiens
gaggcagtgcccagc

SEQ ID NO: 1484511 - DNA, 15 bp, Homo sapiens
ggaggcagtgcccag

SEQ ID NO: 1484512 - DNA, 15 bp, Homo sapiens
aggaggcagtgccca

SEQ ID NO: 1484513 - DNA, 15 bp, Homo sapiens
gaggaggcagtgccc

SEQ ID NO: 1484514 - DNA, 15 bp, Homo sapiens
agaggaggcagtgcc

SEQ ID NO: 1484515 - DNA, 15 bp, Homo sapiens
gagaggaggcagtgc

SEQ ID NO: 1484516 - DNA, 15 bp, Homo sapiens
ggagaggaggcagtg

SEQ ID NO: 1484517 - DNA, 15 bp, Homo sapiens
tggagaggaggcagt

SEQ ID NO: 1484518 - DNA, 15 bp, Homo sapiens
gtggagaggaggcag

SEQ ID NO: 1484519 - DNA, 15 bp, Homo sapiens
tgtggagaggaggca

SEQ ID NO: 1484520 - DNA, 15 bp, Homo sapiens
gtgtggagaggaggc

SEQ ID NO: 1484521 - DNA, 15 bp, Homo sapiens
ggtgtggagaggagg

SEQ ID NO: 1484522 - DNA, 15 bp, Homo sapiens
gggtgtggagaggag

SEQ ID NO: 1484523 - DNA, 15 bp, Homo sapiens
ggggtgtggagagga

SEQ ID NO: 1484524 - DNA, 15 bp, Homo sapiens
aggggtgtggagagg

SEQ ID NO: 1484525 - DNA, 15 bp, Homo sapiens
taggggtgtggagag

SEQ ID NO: 1484526 - DNA, 15 bp, Homo sapiens
ctaggggtgtggaga

SEQ ID NO: 1484527 - DNA, 15 bp, Homo sapiens
gctaggggtgtggag

SEQ ID NO: 1484528 - DNA, 15 bp, Homo sapiens
cgctaggggtgtgga

SEQ ID NO: 1484529 - DNA, 15 bp, Homo sapiens
gcgctaggggtgtgg

SEQ ID NO: 1484530 - DNA, 15 bp, Homo sapiens
ggcgctaggggtgtg

SEQ ID NO: 1484531 - DNA, 15 bp, Homo sapiens
gggcgctaggggtgt

SEQ ID NO: 1484532 - DNA, 15 bp, Homo sapiens
ggggcgctaggggtg

SEQ ID NO: 1484533 - DNA, 15 bp, Homo sapiens
gggggcgctaggggt

SEQ ID NO: 1484534 - DNA, 15 bp, Homo sapiens
ggggggcgctagggg

SEQ ID NO: 1484535 - DNA, 15 bp, Homo sapiens
tggggggcgctaggg

SEQ ID NO: 1484536 - DNA, 15 bp, Homo sapiens
gtggggggcgctagg

SEQ ID NO: 1484537 - DNA, 15 bp, Homo sapiens
ggtggggggcgctag

SEQ ID NO: 1484538 - DNA, 15 bp, Homo sapiens
gggtggggggcgcta

SEQ ID NO: 1484539 - DNA, 15 bp, Homo sapiens
ggggtggggggcgct

SEQ ID NO: 1484540 - DNA, 15 bp, Homo sapiens
aggggtggggggcgc

SEQ ID NO: 1484541 - DNA, 15 bp, Homo sapiens
gaggggtggggggcg

SEQ ID NO: 1484542 - DNA, 15 bp, Homo sapiens
tgaggggtggggggc

SEQ ID NO: 1484543 - DNA, 15 bp, Homo sapiens
ctgaggggtgggggg

SEQ ID NO: 1484544 - DNA, 15 bp, Homo sapiens
gctgaggggtggggg

SEQ ID NO: 1484545 - DNA, 15 bp, Homo sapiens
tgctgaggggtgggg

SEQ ID NO: 1484546 - DNA, 15 bp, Homo sapiens
ctgctgaggggtggg

SEQ ID NO: 1484547 - DNA, 15 bp, Homo sapiens
tctgctgaggggtgg

SEQ ID NO: 1484548 - DNA, 15 bp, Homo sapiens
ttctgctgaggggtg

SEQ ID NO: 1484549 - DNA, 15 bp, Homo sapiens
cttctgctgaggggt

SEQ ID NO: 1484550 - DNA, 15 bp, Homo sapiens
ccttctgctgagggg

SEQ ID NO: 1484551 - DNA, 15 bp, Homo sapiens
cccttctgctgaggg

SEQ ID NO: 1484552 - DNA, 15 bp, Homo sapiens
gcccttctgctgagg

SEQ ID NO: 1484553 - DNA, 15 bp, Homo sapiens
ggcccttctgctgag

SEQ ID NO: 1484554 - DNA, 15 bp, Homo sapiens
gggcccttctgctga

SEQ ID NO: 1484555 - DNA, 15 bp, Homo sapiens
cgggcccttctgctg

SEQ ID NO: 1484556 - DNA, 15 bp, Homo sapiens
gcgggcccttctgct

SEQ ID NO: 1484557 - DNA, 15 bp, Homo sapiens
cgcgggcccttctgc

SEQ ID NO: 1484558 - DNA, 15 bp, Homo sapiens
tcgcgggcccttctg

SEQ ID NO: 1484559 - DNA, 15 bp, Homo sapiens
ctcgcgggcccttct

SEQ ID NO: 1484560 - DNA, 15 bp, Homo sapiens
cctcgcgggcccttc

SEQ ID NO: 1484561 - DNA, 15 bp, Homo sapiens
tcctcgcgggccctt

SEQ ID NO: 1484562 - DNA, 15 bp, Homo sapiens
ttcctcgcgggccct

SEQ ID NO: 1484563 - DNA, 15 bp, Homo sapiens
gttcctcgcgggccc

SEQ ID NO: 1484564 - DNA, 15 bp, Homo sapiens
ggttcctcgcgggcc

SEQ ID NO: 1484565 - DNA, 15 bp, Homo sapiens
cggttcctcgcgggc

SEQ ID NO: 1484566 - DNA, 15 bp, Homo sapiens
acggttcctcgcggg

SEQ ID NO: 1484567 - DNA, 15 bp, Homo sapiens
cacggttcctcgcgg

SEQ ID NO: 1484568 - DNA, 15 bp, Homo sapiens
gcacggttcctcgcg

SEQ ID NO: 1484569 - DNA, 15 bp, Homo sapiens
cgcacggttcctcgc

SEQ ID NO: 1484570 - DNA, 15 bp, Homo sapiens
tcgcacggttcctcg

SEQ ID NO: 1484571 - DNA, 15 bp, Homo sapiens
ctcgcacggttcctc

SEQ ID NO: 1484572 - DNA, 15 bp, Homo sapiens
cctcgcacggttcct

SEQ ID NO: 1484573 - DNA, 15 bp, Homo sapiens
acctcgcacggttcc

SEQ ID NO: 1484574 - DNA, 15 bp, Homo sapiens
gacctcgcacggttc

SEQ ID NO: 1484575 - DNA, 15 bp, Homo sapiens
tgacctcgcacggtt

SEQ ID NO: 1484576 - DNA, 15 bp, Homo sapiens
ctgacctcgcacggt

SEQ ID NO: 1484577 - DNA, 15 bp, Homo sapiens
cctgacctcgcacgg

SEQ ID NO: 1484578 - DNA, 15 bp, Homo sapiens
gcctgacctcgcacg

SEQ ID NO: 1484579 - DNA, 15 bp, Homo sapiens
ggcctgacctcgcac

SEQ ID NO: 1484580 - DNA, 15 bp, Homo sapiens
cggcctgacctcgca

SEQ ID NO: 1484581 - DNA, 15 bp, Homo sapiens
tcggcctgacctcgc

SEQ ID NO: 1484582 - DNA, 15 bp, Homo sapiens
ctcggcctgacctcg

SEQ ID NO: 1484583 - DNA, 15 bp, Homo sapiens
gctcggcctgacctc

SEQ ID NO: 1484584 - DNA, 15 bp, Homo sapiens
cgctcggcctgacct

SEQ ID NO: 1484585 - DNA, 15 bp, Homo sapiens
gcgctcggcctgacc

SEQ ID NO: 1484586 - DNA, 15 bp, Homo sapiens
ggcgctcggcctgac

SEQ ID NO: 1484587 - DNA, 15 bp, Homo sapiens
cggcgctcggcctga

SEQ ID NO: 1484588 - DNA, 15 bp, Homo sapiens
ccggcgctcggcctg

SEQ ID NO: 1484589 - DNA, 15 bp, Homo sapiens
gccggcgctcggcct

SEQ ID NO: 1484590 - DNA, 15 bp, Homo sapiens
tgccggcgctcggcc

SEQ ID NO: 1484591 - DNA, 15 bp, Homo sapiens
gtgccggcgctcggc

SEQ ID NO: 1484592 - DNA, 15 bp, Homo sapiens
ggtgccggcgctcgg

SEQ ID NO: 1484593 - DNA, 15 bp, Homo sapiens
cggtgccggcgctcg

SEQ ID NO: 1484594 - DNA, 15 bp, Homo sapiens
gcggtgccggcgctc

SEQ ID NO: 1484595 - DNA, 15 bp, Homo sapiens
ggcggtgccggcgct

SEQ ID NO: 1484596 - DNA, 15 bp, Homo sapiens
tggcggtgccggcgc

SEQ ID NO: 1484597 - DNA, 15 bp, Homo sapiens
gtggcggtgccggcg

SEQ ID NO: 1484598 - DNA, 15 bp, Homo sapiens
ggtggcggtgccggc

SEQ ID NO: 1484599 - DNA, 15 bp, Homo sapiens
cggtggcggtgccgg

SEQ ID NO: 1484600 - DNA, 15 bp, Homo sapiens
ccggtggcggtgccg

SEQ ID NO: 1484601 - DNA, 15 bp, Homo sapiens
gccggtggcggtgcc

SEQ ID NO: 1484602 - DNA, 15 bp, Homo sapiens
tgccggtggcggtgc

SEQ ID NO: 1484603 - DNA, 15 bp, Homo sapiens
gtgccggtggcggtg

SEQ ID NO: 1484604 - DNA, 15 bp, Homo sapiens
agtgccggtggcggt

SEQ ID NO: 1484605 - DNA, 15 bp, Homo sapiens
cagtgccggtggcgg

SEQ ID NO: 1484606 - DNA, 15 bp, Homo sapiens
ccagtgccggtggcg

SEQ ID NO: 1484607 - DNA, 15 bp, Homo sapiens
gccagtgccggtggc

SEQ ID NO: 1484608 - DNA, 15 bp, Homo sapiens
cgccagtgccggtgg

SEQ ID NO: 1484609 - DNA, 15 bp, Homo sapiens
gcgccagtgccggtg

SEQ ID NO: 1484610 - DNA, 15 bp, Homo sapiens
agcgccagtgccggt

SEQ ID NO: 1484611 - DNA, 15 bp, Homo sapiens
cagcgccagtgccgg

SEQ ID NO: 1484612 - DNA, 15 bp, Homo sapiens
tcagcgccagtgccg

SEQ ID NO: 1484613 - DNA, 15 bp, Homo sapiens
ctcagcgccagtgcc

SEQ ID NO: 1484614 - DNA, 15 bp, Homo sapiens
gctcagcgccagtgc

SEQ ID NO: 1484615 - DNA, 15 bp, Homo sapiens
cgctcagcgccagtg

SEQ ID NO: 1484616 - DNA, 15 bp, Homo sapiens
tcgctcagcgccagt

SEQ ID NO: 1484617 - DNA, 15 bp, Homo sapiens
gtcgctcagcgccag

SEQ ID NO: 1484618 - DNA, 15 bp, Homo sapiens
cgtcgctcagcgcca

SEQ ID NO: 1484619 - DNA, 15 bp, Homo sapiens
tcgtcgctcagcgcc

SEQ ID NO: 1484620 - DNA, 15 bp, Homo sapiens
ctcgtcgctcagcgc

SEQ ID NO: 1484621 - DNA, 15 bp, Homo sapiens
tctcgtcgctcagcg

SEQ ID NO: 1484622 - DNA, 15 bp, Homo sapiens
ctctcgtcgctcagc

SEQ ID NO: 1484623 - DNA, 15 bp, Homo sapiens
gctctcgtcgctcag

SEQ ID NO: 1484624 - DNA, 15 bp, Homo sapiens
cgctctcgtcgctca

SEQ ID NO: 1484625 - DNA, 15 bp, Homo sapiens
ccgctctcgtcgctc

SEQ ID NO: 1484626 - DNA, 15 bp, Homo sapiens
tccgctctcgtcgct

SEQ ID NO: 1484627 - DNA, 15 bp, Homo sapiens
gtccgctctcgtcgc

SEQ ID NO: 1484628 - DNA, 15 bp, Homo sapiens
agtccgctctcgtcg

SEQ ID NO: 1484629 - DNA, 15 bp, Homo sapiens
gagtccgctctcgtc

SEQ ID NO: 1484630 - DNA, 15 bp, Homo sapiens
ggagtccgctctcgt

SEQ ID NO: 1484631 - DNA, 15 bp, Homo sapiens
aggagtccgctctcg

SEQ ID NO: 1484632 - DNA, 15 bp, Homo sapiens
caggagtccgctctc

SEQ ID NO: 1484633 - DNA, 15 bp, Homo sapiens
gcaggagtccgctct

SEQ ID NO: 1484634 - DNA, 15 bp, Homo sapiens
cgcaggagtccgctc

SEQ ID NO: 1484635 - DNA, 15 bp, Homo sapiens
tcgcaggagtccgct

SEQ ID NO: 1484636 - DNA, 15 bp, Homo sapiens
ctcgcaggagtccgc

SEQ ID NO: 1484637 - DNA, 15 bp, Homo sapiens
gctcgcaggagtccg

SEQ ID NO: 1484638 - DNA, 15 bp, Homo sapiens
cgctcgcaggagtcc

SEQ ID NO: 1484639 - DNA, 15 bp, Homo sapiens
gcgctcgcaggagtc

SEQ ID NO: 1484640 - DNA, 15 bp, Homo sapiens
tgcgctcgcaggagt

SEQ ID NO: 1484641 - DNA, 15 bp, Homo sapiens
ctgcgctcgcaggag

SEQ ID NO: 1484642 - DNA, 15 bp, Homo sapiens
tctgcgctcgcagga

SEQ ID NO: 1484643 - DNA, 15 bp, Homo sapiens
ctctgcgctcgcagg

SEQ ID NO: 1484644 - DNA, 15 bp, Homo sapiens
tctctgcgctcgcag

SEQ ID NO: 1484645 - DNA, 15 bp, Homo sapiens
ctctctgcgctcgca

SEQ ID NO: 1484646 - DNA, 15 bp, Homo sapiens
cctctctgcgctcgc

SEQ ID NO: 1484647 - DNA, 15 bp, Homo sapiens
ccctctctgcgctcg

SEQ ID NO: 1484648 - DNA, 15 bp, Homo sapiens
tccctctctgcgctc

SEQ ID NO: 1484649 - DNA, 15 bp, Homo sapiens
ctccctctctgcgct

SEQ ID NO: 1484650 - DNA, 15 bp, Homo sapiens
cctccctctctgcgc

SEQ ID NO: 1484651 - DNA, 15 bp, Homo sapiens
ccctccctctctgcg

SEQ ID NO: 1484652 - DNA, 15 bp, Homo sapiens
cccctccctctctgc

SEQ ID NO: 1484653 - DNA, 15 bp, Homo sapiens
ccccctccctctctg

SEQ ID NO: 1484654 - DNA, 15 bp, Homo sapiens
tccccctccctctct

SEQ ID NO: 1484655 - DNA, 15 bp, Homo sapiens
ctccccctccctctc

SEQ ID NO: 1484656 - DNA, 15 bp, Homo sapiens
tctccccctccctct

SEQ ID NO: 1484657 - DNA, 15 bp, Homo sapiens
atctccccctccctc

SEQ ID NO: 1484658 - DNA, 15 bp, Homo sapiens
catctccccctccct

SEQ ID NO: 1484659 - DNA, 15 bp, Homo sapiens
ccatctccccctccc

SEQ ID NO: 1484660 - DNA, 15 bp, Homo sapiens
tccatctccccctcc

SEQ ID NO: 1484661 - DNA, 15 bp, Homo sapiens
ctccatctccccctc

SEQ ID NO: 1484662 - DNA, 15 bp, Homo sapiens
cctccatctccccct

SEQ ID NO: 1484663 - DNA, 15 bp, Homo sapiens
ccctccatctccccc

SEQ ID NO: 1484664 - DNA, 15 bp, Homo sapiens
gccctccatctcccc

SEQ ID NO: 1484665 - DNA, 15 bp, Homo sapiens
agccctccatctccc

SEQ ID NO: 1484666 - DNA, 15 bp, Homo sapiens
cagccctccatctcc

SEQ ID NO: 1484667 - DNA, 15 bp, Homo sapiens
ccagccctccatctc

SEQ ID NO: 1484668 - DNA, 15 bp, Homo sapiens
tccagccctccatct

SEQ ID NO: 1484669 - DNA, 15 bp, Homo sapiens
atccagccctccatc

SEQ ID NO: 1484670 - DNA, 15 bp, Homo sapiens
catccagccctccat

SEQ ID NO: 1484671 - DNA, 15 bp, Homo sapiens
tcatccagccctcca

SEQ ID NO: 1484672 - DNA, 15 bp, Homo sapiens
ctcatccagccctcc

SEQ ID NO: 1484673 - DNA, 15 bp, Homo sapiens
actcatccagccctc

SEQ ID NO: 1484674 - DNA, 15 bp, Homo sapiens
gactcatccagccct

SEQ ID NO: 1484675 - DNA, 15 bp, Homo sapiens
tgactcatccagccc

SEQ ID NO: 1484676 - DNA, 15 bp, Homo sapiens
gtgactcatccagcc

SEQ ID NO: 1484677 - DNA, 15 bp, Homo sapiens
cgtgactcatccagc

SEQ ID NO: 1484678 - DNA, 15 bp, Homo sapiens
gcgtgactcatccag

SEQ ID NO: 1484679 - DNA, 15 bp, Homo sapiens
cgcgtgactcatcca

SEQ ID NO: 1484680 - DNA, 15 bp, Homo sapiens
ccgcgtgactcatcc

SEQ ID NO: 1484681 - DNA, 15 bp, Homo sapiens
tccgcgtgactcatc

SEQ ID NO: 1484682 - DNA, 15 bp, Homo sapiens
atccgcgtgactcat

SEQ ID NO: 1484683 - DNA, 15 bp, Homo sapiens
tatccgcgtgactca

SEQ ID NO: 1484684 - DNA, 15 bp, Homo sapiens
ttatccgcgtgactc

SEQ ID NO: 1484685 - DNA, 15 bp, Homo sapiens
attatccgcgtgact

SEQ ID NO: 1484686 - DNA, 15 bp, Homo sapiens
gattatccgcgtgac

SEQ ID NO: 1484687 - DNA, 15 bp, Homo sapiens
cgattatccgcgtga

SEQ ID NO: 1484688 - DNA, 15 bp, Homo sapiens
gcgattatccgcgtg

SEQ ID NO: 1484689 - DNA, 15 bp, Homo sapiens
cgcgattatccgcgt

SEQ ID NO: 1484690 - DNA, 15 bp, Homo sapiens
gcgcgattatccgcg

SEQ ID NO: 1484691 - DNA, 15 bp, Homo sapiens
agcgcgattatccgc

SEQ ID NO: 1484692 - DNA, 15 bp, Homo sapiens
gagcgcgattatccg

SEQ ID NO: 1484693 - DNA, 15 bp, Homo sapiens
agagcgcgattatcc

SEQ ID NO: 1484694 - DNA, 15 bp, Homo sapiens
aagagcgcgattatc

SEQ ID NO: 1484695 - DNA, 15 bp, Homo sapiens
gaagagcgcgattat

SEQ ID NO: 1484696 - DNA, 15 bp, Homo sapiens
agaagagcgcgatta

SEQ ID NO: 1484697 - DNA, 15 bp, Homo sapiens
gagaagagcgcgatt

SEQ ID NO: 1484698 - DNA, 15 bp, Homo sapiens
ggagaagagcgcgat

SEQ ID NO: 1484699 - DNA, 15 bp, Homo sapiens
tggagaagagcgcga

SEQ ID NO: 1484700 - DNA, 15 bp, Homo sapiens
ctggagaagagcgcg

SEQ ID NO: 1484701 - DNA, 15 bp, Homo sapiens
gctggagaagagcgc

SEQ ID NO: 1484702 - DNA, 15 bp, Homo sapiens
cgctggagaagagcg

SEQ ID NO: 1484703 - DNA, 15 bp, Homo sapiens
gcgctggagaagagc

SEQ ID NO: 1484704 - DNA, 15 bp, Homo sapiens
cgcgctggagaagag

SEQ ID NO: 1484705 - DNA, 15 bp, Homo sapiens
gcgcgctggagaaga

SEQ ID NO: 1484706 - DNA, 15 bp, Homo sapiens
tgcgcgctggagaag

SEQ ID NO: 1484707 - DNA, 15 bp, Homo sapiens
ctgcgcgctggagaa

SEQ ID NO: 1484708 - DNA, 15 bp, Homo sapiens
tctgcgcgctggaga

SEQ ID NO: 1484709 - DNA, 15 bp, Homo sapiens
gtctgcgcgctggag

SEQ ID NO: 1484710 - DNA, 15 bp, Homo sapiens
tgtctgcgcgctgga

SEQ ID NO: 1484711 - DNA, 15 bp, Homo sapiens
ctgtctgcgcgctgg

SEQ ID NO: 1484712 - DNA, 15 bp, Homo sapiens
gctgtctgcgcgctg

SEQ ID NO: 1484713 - DNA, 15 bp, Homo sapiens
cgctgtctgcgcgct

SEQ ID NO: 1484714 - DNA, 15 bp, Homo sapiens
gcgctgtctgcgcgc

SEQ ID NO: 1484715 - DNA, 15 bp, Homo sapiens
cgcgctgtctgcgcg

SEQ ID NO: 1484716 - DNA, 15 bp, Homo sapiens
ccgcgctgtctgcgc

SEQ ID NO: 1484717 - DNA, 15 bp, Homo sapiens
gccgcgctgtctgcg

SEQ ID NO: 1484718 - DNA, 15 bp, Homo sapiens
tgccgcgctgtctgc

SEQ ID NO: 1484719 - DNA, 15 bp, Homo sapiens
ttgccgcgctgtctg

SEQ ID NO: 1484720 - DNA, 15 bp, Homo sapiens
cttgccgcgctgtct

SEQ ID NO: 1484721 - DNA, 15 bp, Homo sapiens
gcttgccgcgctgtc

SEQ ID NO: 1484722 - DNA, 15 bp, Homo sapiens
cgcttgccgcgctgt

SEQ ID NO: 1484723 - DNA, 15 bp, Homo sapiens
gcgcttgccgcgctg

SEQ ID NO: 1484724 - DNA, 15 bp, Homo sapiens
cgcgcttgccgcgct

SEQ ID NO: 1484725 - DNA, 15 bp, Homo sapiens
acgcgcttgccgcgc

SEQ ID NO: 1484726 - DNA, 15 bp, Homo sapiens
tacgcgcttgccgcg

SEQ ID NO: 1484727 - DNA, 15 bp, Homo sapiens
atacgcgcttgccgc

SEQ ID NO: 1484728 - DNA, 15 bp, Homo sapiens
catacgcgcttgccg

SEQ ID NO: 1484729 - DNA, 15 bp, Homo sapiens
gcatacgcgcttgcc

SEQ ID NO: 1484730 - DNA, 15 bp, Homo sapiens
agcatacgcgcttgc

SEQ ID NO: 1484731 - DNA, 15 bp, Homo sapiens
tagcatacgcgcttg

SEQ ID NO: 1484732 - DNA, 15 bp, Homo sapiens
ctagcatacgcgctt

SEQ ID NO: 1484733 - DNA, 15 bp, Homo sapiens
gctagcatacgcgct

SEQ ID NO: 1484734 - DNA, 15 bp, Homo sapiens
tgctagcatacgcgc

SEQ ID NO: 1484735 - DNA, 15 bp, Homo sapiens
ctgctagcatacgcg

SEQ ID NO: 1484736 - DNA, 15 bp, Homo sapiens
cctgctagcatacgc

SEQ ID NO: 1484737 - DNA, 15 bp, Homo sapiens
ccctgctagcatacg

SEQ ID NO: 1484738 - DNA, 15 bp, Homo sapiens
cccctgctagcatac

SEQ ID NO: 1484739 - DNA, 15 bp, Homo sapiens
acccctgctagcata

SEQ ID NO: 1484740 - DNA, 15 bp, Homo sapiens
cacccctgctagcat

SEQ ID NO: 1484741 - DNA, 15 bp, Homo sapiens
gcacccctgctagca

SEQ ID NO: 1484742 - DNA, 15 bp, Homo sapiens
cgcacccctgctagc

SEQ ID NO: 1484743 - DNA, 15 bp, Homo sapiens
ccgcacccctgctag

SEQ ID NO: 1484744 - DNA, 15 bp, Homo sapiens
tccgcacccctgcta

SEQ ID NO: 1484745 - DNA, 15 bp, Homo sapiens
gtccgcacccctgct

SEQ ID NO: 1484746 - DNA, 15 bp, Homo sapiens
cgtccgcacccctgc

SEQ ID NO: 1484747 - DNA, 15 bp, Homo sapiens
gcgtccgcacccctg

SEQ ID NO: 1484748 - DNA, 15 bp, Homo sapiens
cgcgtccgcacccct

SEQ ID NO: 1484749 - DNA, 15 bp, Homo sapiens
acgcgtccgcacccc

SEQ ID NO: 1484750 - DNA, 15 bp, Homo sapiens
cacgcgtccgcaccc

SEQ ID NO: 1484751 - DNA, 15 bp, Homo sapiens
tcacgcgtccgcacc

SEQ ID NO: 1484752 - DNA, 15 bp, Homo sapiens
gtcacgcgtccgcac

SEQ ID NO: 1484753 - DNA, 15 bp, Homo sapiens
ggtcacgcgtccgca

SEQ ID NO: 1484754 - DNA, 15 bp, Homo sapiens
cggtcacgcgtccgc

SEQ ID NO: 1484755 - DNA, 15 bp, Homo sapiens
acggtcacgcgtccg

SEQ ID NO: 1484756 - DNA, 15 bp, Homo sapiens
cacggtcacgcgtcc

SEQ ID NO: 1484757 - DNA, 15 bp, Homo sapiens
gcacggtcacgcgtc

SEQ ID NO: 1484758 - DNA, 15 bp, Homo sapiens
ggcacggtcacgcgt

SEQ ID NO: 1484759 - DNA, 15 bp, Homo sapiens
cggcacggtcacgcg

SEQ ID NO: 1484760 - DNA, 15 bp, Homo sapiens
gcggcacggtcacgc

SEQ ID NO: 1484761 - DNA, 15 bp, Homo sapiens
ggcggcacggtcacg

SEQ ID NO: 1484762 - DNA, 15 bp, Homo sapiens
gggcggcacggtcac

SEQ ID NO: 1484763 - DNA, 15 bp, Homo sapiens
cgggcggcacggtca

SEQ ID NO: 1484764 - DNA, 15 bp, Homo sapiens
gcgggcggcacggtc

SEQ ID NO: 1484765 - DNA, 15 bp, Homo sapiens
agcgggcggcacggt

SEQ ID NO: 1484766 - DNA, 15 bp, Homo sapiens
cagcgggcggcacgg

SEQ ID NO: 1484767 - DNA, 15 bp, Homo sapiens
tcagcgggcggcacg

SEQ ID NO: 1484768 - DNA, 15 bp, Homo sapiens
gtcagcgggcggcac

SEQ ID NO: 1484769 - DNA, 15 bp, Homo sapiens
ggtcagcgggcggca

SEQ ID NO: 1484770 - DNA, 15 bp, Homo sapiens
gggtcagcgggcggc

SEQ ID NO: 1484771 - DNA, 15 bp, Homo sapiens
ggggtcagcgggcgg

SEQ ID NO: 1484772 - DNA, 15 bp, Homo sapiens
tggggtcagcgggcg

SEQ ID NO: 1484773 - DNA, 15 bp, Homo sapiens
gtggggtcagcgggc

SEQ ID NO: 1484774 - DNA, 15 bp, Homo sapiens
ggtggggtcagcggg

SEQ ID NO: 1484775 - DNA, 15 bp, Homo sapiens
tggtggggtcagcgg

SEQ ID NO: 1484776 - DNA, 15 bp, Homo sapiens
ctggtggggtcagcg

SEQ ID NO: 1484777 - DNA, 15 bp, Homo sapiens
actggtggggtcagc

SEQ ID NO: 1484778 - DNA, 15 bp, Homo sapiens
gactggtggggtcag

SEQ ID NO: 1484779 - DNA, 15 bp, Homo sapiens
agactggtggggtca

SEQ ID NO: 1484780 - DNA, 15 bp, Homo sapiens
aagactggtggggtc

SEQ ID NO: 1484781 - DNA, 15 bp, Homo sapiens
gaagactggtggggt

SEQ ID NO: 1484782 - DNA, 15 bp, Homo sapiens
cgaagactggtgggg

SEQ ID NO: 1484783 - DNA, 15 bp, Homo sapiens
gcgaagactggtggg

SEQ ID NO: 1484784 - DNA, 15 bp, Homo sapiens
cgcgaagactggtgg

SEQ ID NO: 1484785 - DNA, 15 bp, Homo sapiens
ccgcgaagactggtg

SEQ ID NO: 1484786 - DNA, 15 bp, Homo sapiens
cccgcgaagactggt

SEQ ID NO: 1484787 - DNA, 15 bp, Homo sapiens
gcccgcgaagactgg

SEQ ID NO: 1484788 - DNA, 15 bp, Homo sapiens
agcccgcgaagactg

SEQ ID NO: 1484789 - DNA, 15 bp, Homo sapiens
aagcccgcgaagact

SEQ ID NO: 1484790 - DNA, 15 bp, Homo sapiens
gaagcccgcgaagac

SEQ ID NO: 1484791 - DNA, 15 bp, Homo sapiens
cgaagcccgcgaaga

SEQ ID NO: 1484792 - DNA, 15 bp, Homo sapiens
tcgaagcccgcgaag

SEQ ID NO: 1484793 - DNA, 15 bp, Homo sapiens
ttcgaagcccgcgaa

SEQ ID NO: 1484794 - DNA, 15 bp, Homo sapiens
gttcgaagcccgcga

SEQ ID NO: 1484795 - DNA, 15 bp, Homo sapiens
ggttcgaagcccgcg

SEQ ID NO: 1484796 - DNA, 15 bp, Homo sapiens
gggttcgaagcccgc

SEQ ID NO: 1484797 - DNA, 15 bp, Homo sapiens
tgggttcgaagcccg

SEQ ID NO: 1484798 - DNA, 15 bp, Homo sapiens
ctgggttcgaagccc

SEQ ID NO: 1484799 - DNA, 15 bp, Homo sapiens
cctgggttcgaagcc

SEQ ID NO: 1484800 - DNA, 15 bp, Homo sapiens
ccctgggttcgaagc

SEQ ID NO: 1484801 - DNA, 15 bp, Homo sapiens
tccctgggttcgaag

SEQ ID NO: 1484802 - DNA, 15 bp, Homo sapiens
ctccctgggttcgaa

SEQ ID NO: 1484803 - DNA, 15 bp, Homo sapiens
gctccctgggttcga

SEQ ID NO: 1484804 - DNA, 15 bp, Homo sapiens
ggctccctgggttcg

SEQ ID NO: 1484805 - DNA, 15 bp, Homo sapiens
cggctccctgggttc

SEQ ID NO: 1484806 - DNA, 15 bp, Homo sapiens
tcggctccctgggtt

SEQ ID NO: 1484807 - DNA, 15 bp, Homo sapiens
gtcggctccctgggt

SEQ ID NO: 1484808 - DNA, 15 bp, Homo sapiens
tgtcggctccctggg

SEQ ID NO: 1484809 - DNA, 15 bp, Homo sapiens
ttgtcggctccctgg

SEQ ID NO: 1484810 - DNA, 15 bp, Homo sapiens
attgtcggctccctg

SEQ ID NO: 1484811 - DNA, 15 bp, Homo sapiens
cattgtcggctccct

SEQ ID NO: 1484812 - DNA, 15 bp, Homo sapiens
ccattgtcggctccc

SEQ ID NO: 1484813 - DNA, 15 bp, Homo sapiens
gccattgtcggctcc

SEQ ID NO: 1484814 - DNA, 15 bp, Homo sapiens
cgccattgtcggctc

SEQ ID NO: 1484815 - DNA, 15 bp, Homo sapiens
ccgccattgtcggct

SEQ ID NO: 1484816 - DNA, 15 bp, Homo sapiens
accgccattgtcggc

SEQ ID NO: 1484817 - DNA, 15 bp, Homo sapiens
caccgccattgtcgg

SEQ ID NO: 1484818 - DNA, 15 bp, Homo sapiens
tcaccgccattgtcg

SEQ ID NO: 1484819 - DNA, 15 bp, Homo sapiens
ctcaccgccattgtc

SEQ ID NO: 1484820 - DNA, 15 bp, Homo sapiens
actcaccgccattgt

SEQ ID NO: 1484821 - DNA, 15 bp, Homo sapiens
tactcaccgccattg

SEQ ID NO: 1484822 - DNA, 15 bp, Homo sapiens
gtactcaccgccatt

SEQ ID NO: 1484823 - DNA, 15 bp, Homo sapiens
cgtactcaccgccat

SEQ ID NO: 1484824 - DNA, 15 bp, Homo sapiens
ccgtactcaccgcca

SEQ ID NO: 1484825 - DNA, 15 bp, Homo sapiens
gccgtactcaccgcc

SEQ ID NO: 1484826 - DNA, 15 bp, Homo sapiens
ggccgtactcaccgc

SEQ ID NO: 1484827 - DNA, 15 bp, Homo sapiens
gggccgtactcaccg

SEQ ID NO: 1484828 - DNA, 15 bp, Homo sapiens
agggccgtactcacc

SEQ ID NO: 1484829 - DNA, 15 bp, Homo sapiens
cagggccgtactcac

SEQ ID NO: 1484830 - DNA, 15 bp, Homo sapiens
ccagggccgtactca

SEQ ID NO: 1484831 - DNA, 15 bp, Homo sapiens
accagggccgtactc

SEQ ID NO: 1484832 - DNA, 15 bp, Homo sapiens
gaccagggccgtact

SEQ ID NO: 1484833 - DNA, 15 bp, Homo sapiens
cgaccagggccgtac

SEQ ID NO: 1484834 - DNA, 15 bp, Homo sapiens
gcgaccagggccgta

SEQ ID NO: 1484835 - DNA, 15 bp, Homo sapiens
cgcgaccagggccgt

SEQ ID NO: 1484836 - DNA, 15 bp, Homo sapiens
gcgcgaccagggccg

SEQ ID NO: 1484837 - DNA, 15 bp, Homo sapiens
tgcgcgaccagggcc

SEQ ID NO: 1484838 - DNA, 15 bp, Homo sapiens
ctgcgcgaccagggc

SEQ ID NO: 1484839 - DNA, 15 bp, Homo sapiens
gctgcgcgaccaggg

SEQ ID NO: 1484840 - DNA, 15 bp, Homo sapiens
cgctgcgcgaccagg

SEQ ID NO: 1484841 - DNA, 15 bp, Homo sapiens
tcgctgcgcgaccag

SEQ ID NO: 1484842 - DNA, 15 bp, Homo sapiens
gtcgctgcgcgacca

SEQ ID NO: 1484843 - DNA, 15 bp, Homo sapiens
ggtcgctgcgcgacc

SEQ ID NO: 1484844 - DNA, 15 bp, Homo sapiens
cggtcgctgcgcgac

SEQ ID NO: 1484845 - DNA, 15 bp, Homo sapiens
tcggtcgctgcgcga

SEQ ID NO: 1484846 - DNA, 15 bp, Homo sapiens
ttcggtcgctgcgcg

SEQ ID NO: 1484847 - DNA, 15 bp, Homo sapiens
gttcggtcgctgcgc

SEQ ID NO: 1484848 - DNA, 15 bp, Homo sapiens
ggttcggtcgctgcg

SEQ ID NO: 1484849 - DNA, 15 bp, Homo sapiens
aggttcggtcgctgc

SEQ ID NO: 1484850 - DNA, 15 bp, Homo sapiens
caggttcggtcgctg

SEQ ID NO: 1484851 - DNA, 15 bp, Homo sapiens
gcaggttcggtcgct

SEQ ID NO: 1484852 - DNA, 15 bp, Homo sapiens
cgcaggttcggtcgc

SEQ ID NO: 1484853 - DNA, 15 bp, Homo sapiens
gcgcaggttcggtcg

SEQ ID NO: 1484854 - DNA, 15 bp, Homo sapiens
ggcgcaggttcggtc

SEQ ID NO: 1484855 - DNA, 15 bp, Homo sapiens
gggcgcaggttcggt

SEQ ID NO: 1484856 - DNA, 15 bp, Homo sapiens
cgggcgcaggttcgg

SEQ ID NO: 1484857 - DNA, 15 bp, Homo sapiens
ccgggcgcaggttcg

SEQ ID NO: 1484858 - DNA, 15 bp, Homo sapiens
accgggcgcaggttc

SEQ ID NO: 1484859 - DNA, 15 bp, Homo sapiens
aaccgggcgcaggtt

SEQ ID NO: 1484860 - DNA, 15 bp, Homo sapiens
gaaccgggcgcaggt

SEQ ID NO: 1484861 - DNA, 15 bp, Homo sapiens
ggaaccgggcgcagg

SEQ ID NO: 1484862 - DNA, 15 bp, Homo sapiens
aggaaccgggcgcag

SEQ ID NO: 1484863 - DNA, 15 bp, Homo sapiens
gaggaaccgggcgca

SEQ ID NO: 1484864 - DNA, 15 bp, Homo sapiens
cgaggaaccgggcgc

SEQ ID NO: 1484865 - DNA, 15 bp, Homo sapiens
gcgaggaaccgggcg

SEQ ID NO: 1484866 - DNA, 15 bp, Homo sapiens
cgcgaggaaccgggc

SEQ ID NO: 1484867 - DNA, 15 bp, Homo sapiens
gcgcgaggaaccggg

SEQ ID NO: 1484868 - DNA, 15 bp, Homo sapiens
ggcgcgaggaaccgg

SEQ ID NO: 1484869 - DNA, 15 bp, Homo sapiens
gggcgcgaggaaccg

SEQ ID NO: 1484870 - DNA, 15 bp, Homo sapiens
ggggcgcgaggaacc

SEQ ID NO: 1484871 - DNA, 15 bp, Homo sapiens
cggggcgcgaggaac

SEQ ID NO: 1484872 - DNA, 15 bp, Homo sapiens
gcggggcgcgaggaa

SEQ ID NO: 1484873 - DNA, 15 bp, Homo sapiens
cgcggggcgcgagga

SEQ ID NO: 1484874 - DNA, 15 bp, Homo sapiens
gcgcggggcgcgagg

SEQ ID NO: 1484875 - DNA, 15 bp, Homo sapiens
agcgcggggcgcgag

SEQ ID NO: 1484876 - DNA, 15 bp, Homo sapiens
cagcgcggggcgcga

SEQ ID NO: 1484877 - DNA, 15 bp, Homo sapiens
ccagcgcggggcgcg

SEQ ID NO: 1484878 - DNA, 15 bp, Homo sapiens
cccagcgcggggcgc

SEQ ID NO: 1484879 - DNA, 15 bp, Homo sapiens
ccccagcgcggggcg

SEQ ID NO: 1484880 - DNA, 15 bp, Homo sapiens
gccccagcgcggggc

SEQ ID NO: 1484881 - DNA, 15 bp, Homo sapiens
cgccccagcgcgggg

SEQ ID NO: 1484882 - DNA, 15 bp, Homo sapiens
ccgccccagcgcggg

SEQ ID NO: 1484883 - DNA, 15 bp, Homo sapiens
tccgccccagcgcgg

SEQ ID NO: 1484884 - DNA, 15 bp, Homo sapiens
gtccgccccagcgcg

SEQ ID NO: 1484885 - DNA, 15 bp, Homo sapiens
cgtccgccccagcgc

SEQ ID NO: 1484886 - DNA, 15 bp, Homo sapiens
gcgtccgccccagcg

SEQ ID NO: 1484887 - DNA, 15 bp, Homo sapiens
ggcgtccgccccagc

SEQ ID NO: 1484888 - DNA, 15 bp, Homo sapiens
cggcgtccgccccag

SEQ ID NO: 1484889 - DNA, 15 bp, Homo sapiens
gcggcgtccgcccca

SEQ ID NO: 1484890 - DNA, 15 bp, Homo sapiens
ggcggcgtccgcccc

SEQ ID NO: 1484891 - DNA, 15 bp, Homo sapiens
cggcggcgtccgccc

SEQ ID NO: 1484892 - DNA, 15 bp, Homo sapiens
gcggcggcgtccgcc

SEQ ID NO: 1484893 - DNA, 15 bp, Homo sapiens
ggcggcggcgtccgc

SEQ ID NO: 1484894 - DNA, 15 bp, Homo sapiens
cggcggcggcgtccg

SEQ ID NO: 1484895 - DNA, 15 bp, Homo sapiens
gcggcggcggcgtcc

SEQ ID NO: 1484896 - DNA, 15 bp, Homo sapiens
ggcggcggcggcgtc

SEQ ID NO: 1484897 - DNA, 15 bp, Homo sapiens
cggcggcggcggcgt

SEQ ID NO: 1484898 - DNA, 15 bp, Homo sapiens
tcggcggcggcggcg

SEQ ID NO: 1484899 - DNA, 15 bp, Homo sapiens
gtcggcggcggcggc

SEQ ID NO: 1484900 - DNA, 15 bp, Homo sapiens
tgtcggcggcggcgg

SEQ ID NO: 1484901 - DNA, 15 bp, Homo sapiens
gtgtcggcggcggcg

SEQ ID NO: 1484902 - DNA, 15 bp, Homo sapiens
ggtgtcggcggcggc

SEQ ID NO: 1484903 - DNA, 15 bp, Homo sapiens
tggtgtcggcggcgg

SEQ ID NO: 1484904 - DNA, 15 bp, Homo sapiens
gtggtgtcggcggcg

SEQ ID NO: 1484905 - DNA, 15 bp, Homo sapiens
agtggtgtcggcggc

SEQ ID NO: 1484906 - DNA, 15 bp, Homo sapiens
cagtggtgtcggcgg

SEQ ID NO: 1484907 - DNA, 15 bp, Homo sapiens
gcagtggtgtcggcg

SEQ ID NO: 1484908 - DNA, 15 bp, Homo sapiens
ggcagtggtgtcggc

SEQ ID NO: 1484909 - DNA, 15 bp, Homo sapiens
cggcagtggtgtcgg

SEQ ID NO: 1484910 - DNA, 15 bp, Homo sapiens
gcggcagtggtgtcg

SEQ ID NO: 1484911 - DNA, 15 bp, Homo sapiens
ggcggcagtggtgtc

SEQ ID NO: 1484912 - DNA, 15 bp, Homo sapiens
cggcggcagtggtgt

SEQ ID NO: 1484913 - DNA, 15 bp, Homo sapiens
ccggcggcagtggtg

SEQ ID NO: 1484914 - DNA, 15 bp, Homo sapiens
gccggcggcagtggt

SEQ ID NO: 1484915 - DNA, 15 bp, Homo sapiens
cgccggcggcagtgg

SEQ ID NO: 1484916 - DNA, 15 bp, Homo sapiens
acgccggcggcagtg

SEQ ID NO: 1484917 - DNA, 15 bp, Homo sapiens
gacgccggcggcagt

SEQ ID NO: 1484918 - DNA, 15 bp, Homo sapiens
tgacgccggcggcag

SEQ ID NO: 1484919 - DNA, 15 bp, Homo sapiens
ctgacgccggcggca

SEQ ID NO: 1484920 - DNA, 15 bp, Homo sapiens
gctgacgccggcggc

SEQ ID NO: 1484921 - DNA, 15 bp, Homo sapiens
agctgacgccggcgg

SEQ ID NO: 1484922 - DNA, 15 bp, Homo sapiens
gagctgacgccggcg

SEQ ID NO: 1484923 - DNA, 15 bp, Homo sapiens
cgagctgacgccggc

SEQ ID NO: 1484924 - DNA, 15 bp, Homo sapiens
ccgagctgacgccgg

SEQ ID NO: 1484925 - DNA, 15 bp, Homo sapiens
gccgagctgacgccg

SEQ ID NO: 1484926 - DNA, 15 bp, Homo sapiens
agccgagctgacgcc

SEQ ID NO: 1484927 - DNA, 15 bp, Homo sapiens
gagccgagctgacgc

SEQ ID NO: 1484928 - DNA, 15 bp, Homo sapiens
ggagccgagctgacg

SEQ ID NO: 1484929 - DNA, 15 bp, Homo sapiens
tggagccgagctgac

SEQ ID NO: 1484930 - DNA, 15 bp, Homo sapiens
ctggagccgagctga

SEQ ID NO: 1484931 - DNA, 15 bp, Homo sapiens
gctggagccgagctg

SEQ ID NO: 1484932 - DNA, 15 bp, Homo sapiens
ggctggagccgagct

SEQ ID NO: 1484933 - DNA, 15 bp, Homo sapiens
gggctggagccgagc

SEQ ID NO: 1484934 - DNA, 15 bp, Homo sapiens
cgggctggagccgag

SEQ ID NO: 1484935 - DNA, 15 bp, Homo sapiens
gcgggctggagccga

SEQ ID NO: 1484936 - DNA, 15 bp, Homo sapiens
ggcgggctggagccg

SEQ ID NO: 1484937 - DNA, 15 bp, Homo sapiens
tggcgggctggagcc

SEQ ID NO: 1484938 - DNA, 15 bp, Homo sapiens
ctggcgggctggagc

SEQ ID NO: 1484939 - DNA, 15 bp, Homo sapiens
gctggcgggctggag

SEQ ID NO: 1484940 - DNA, 15 bp, Homo sapiens
agctggcgggctgga

SEQ ID NO: 1484941 - DNA, 15 bp, Homo sapiens
cagctggcgggctgg

SEQ ID NO: 1484942 - DNA, 15 bp, Homo sapiens
gcagctggcgggctg

SEQ ID NO: 1484943 - DNA, 15 bp, Homo sapiens
ggcagctggcgggct

SEQ ID NO: 1484944 - DNA, 15 bp, Homo sapiens
aggcagctggcgggc

SEQ ID NO: 1484945 - DNA, 15 bp, Homo sapiens
caggcagctggcggg

SEQ ID NO: 1484946 - DNA, 15 bp, Homo sapiens
ccaggcagctggcgg

SEQ ID NO: 1484947 - DNA, 15 bp, Homo sapiens
gccaggcagctggcg

SEQ ID NO: 1484948 - DNA, 15 bp, Homo sapiens
agccaggcagctggc

SEQ ID NO: 1484949 - DNA, 15 bp, Homo sapiens
cagccaggcagctgg

SEQ ID NO: 1484950 - DNA, 15 bp, Homo sapiens
ccagccaggcagctg

SEQ ID NO: 1484951 - DNA, 15 bp, Homo sapiens
gccagccaggcagct

SEQ ID NO: 1484952 - DNA, 15 bp, Homo sapiens
cgccagccaggcagc

SEQ ID NO: 1484953 - DNA, 15 bp, Homo sapiens
acgccagccaggcag

SEQ ID NO: 1484954 - DNA, 15 bp, Homo sapiens
gacgccagccaggca

SEQ ID NO: 1484955 - DNA, 15 bp, Homo sapiens
tgacgccagccaggc

SEQ ID NO: 1484956 - DNA, 15 bp, Homo sapiens
gtgacgccagccagg

SEQ ID NO: 1484957 - DNA, 15 bp, Homo sapiens
cgtgacgccagccag

SEQ ID NO: 1484958 - DNA, 15 bp, Homo sapiens
ccgtgacgccagcca

SEQ ID NO: 1484959 - DNA, 15 bp, Homo sapiens
gccgtgacgccagcc

SEQ ID NO: 1484960 - DNA, 15 bp, Homo sapiens
ggccgtgacgccagc

SEQ ID NO: 1484961 - DNA, 15 bp, Homo sapiens
gggccgtgacgccag

SEQ ID NO: 1484962 - DNA, 15 bp, Homo sapiens
cgggccgtgacgcca

SEQ ID NO: 1484963 - DNA, 15 bp, Homo sapiens
ccgggccgtgacgcc

SEQ ID NO: 1484964 - DNA, 15 bp, Homo sapiens
gccgggccgtgacgc

SEQ ID NO: 1484965 - DNA, 15 bp, Homo sapiens
ggccgggccgtgacg

SEQ ID NO: 1484966 - DNA, 15 bp, Homo sapiens
gggccgggccgtgac

SEQ ID NO: 1484967 - DNA, 15 bp, Homo sapiens
tgggccgggccgtga

SEQ ID NO: 1484968 - DNA, 15 bp, Homo sapiens
ctgggccgggccgtg

SEQ ID NO: 1484969 - DNA, 15 bp, Homo sapiens
gctgggccgggccgt

SEQ ID NO: 1484970 - DNA, 15 bp, Homo sapiens
ggctgggccgggccg

SEQ ID NO: 1484971 - DNA, 15 bp, Homo sapiens
gggctgggccgggcc

SEQ ID NO: 1484972 - DNA, 15 bp, Homo sapiens
ggggctgggccgggc

SEQ ID NO: 1484973 - DNA, 15 bp, Homo sapiens
cggggctgggccggg

SEQ ID NO: 1484974 - DNA, 15 bp, Homo sapiens
gcggggctgggccgg

SEQ ID NO: 1484975 - DNA, 15 bp, Homo sapiens
ggcggggctgggccg

SEQ ID NO: 1484976 - DNA, 15 bp, Homo sapiens
gggcggggctgggcc

SEQ ID NO: 1484977 - DNA, 15 bp, Homo sapiens
cgggcggggctgggc

SEQ ID NO: 1484978 - DNA, 15 bp, Homo sapiens
gcgggcggggctggg

SEQ ID NO: 1484979 - DNA, 15 bp, Homo sapiens
cgcgggcggggctgg

SEQ ID NO: 1484980 - DNA, 15 bp, Homo sapiens
gcgcgggcggggctg

SEQ ID NO: 1484981 - DNA, 15 bp, Homo sapiens
ggcgcgggcggggct

SEQ ID NO: 1484982 - DNA, 15 bp, Homo sapiens
gggcgcgggcggggc

SEQ ID NO: 1484983 - DNA, 15 bp, Homo sapiens
ggggcgcgggcgggg

SEQ ID NO: 1484984 - DNA, 15 bp, Homo sapiens
aggggcgcgggcggg

SEQ ID NO: 1484985 - DNA, 15 bp, Homo sapiens
gaggggcgcgggcgg

SEQ ID NO: 1484986 - DNA, 15 bp, Homo sapiens
ggaggggcgcgggcg

SEQ ID NO: 1484987 - DNA, 15 bp, Homo sapiens
aggaggggcgcgggc

SEQ ID NO: 1484988 - DNA, 15 bp, Homo sapiens
aaggaggggcgcggg

SEQ ID NO: 1484989 - DNA, 15 bp, Homo sapiens
gaaggaggggcgcgg

SEQ ID NO: 1484990 - DNA, 15 bp, Homo sapiens
ggaaggaggggcgcg

SEQ ID NO: 1484991 - DNA, 15 bp, Homo sapiens
gggaaggaggggcgc

SEQ ID NO: 1484992 - DNA, 15 bp, Homo sapiens
ggggaaggaggggcg

SEQ ID NO: 1484993 - DNA, 15 bp, Homo sapiens
aggggaaggaggggc

SEQ ID NO: 1484994 - DNA, 15 bp, Homo sapiens
gaggggaaggagggg

SEQ ID NO: 1484995 - DNA, 15 bp, Homo sapiens
ggaggggaaggaggg

SEQ ID NO: 1484996 - DNA, 15 bp, Homo sapiens
gggaggggaaggagg

SEQ ID NO: 1484997 - DNA, 15 bp, Homo sapiens
ggggaggggaaggag

SEQ ID NO: 1484998 - DNA, 15 bp, Homo sapiens
gggggaggggaagga

SEQ ID NO: 1484999 - DNA, 15 bp, Homo sapiens
cgggggaggggaagg

SEQ ID NO: 1485000 - DNA, 15 bp, Homo sapiens
gcgggggaggggaag

SEQ ID NO: 1485001 - DNA, 15 bp, Homo sapiens
ggcgggggaggggaa

SEQ ID NO: 1485002 - DNA, 15 bp, Homo sapiens
gggcgggggagggga

SEQ ID NO: 1485003 - DNA, 15 bp, Homo sapiens
ggggcgggggagggg

SEQ ID NO: 1485004 - DNA, 15 bp, Homo sapiens
gggggcgggggaggg

SEQ ID NO: 1485005 - DNA, 15 bp, Homo sapiens
tgggggcgggggagg

SEQ ID NO: 1485006 - DNA, 15 bp, Homo sapiens
gtgggggcgggggag

SEQ ID NO: 1485007 - DNA, 15 bp, Homo sapiens
cgtgggggcggggga

SEQ ID NO: 1485008 - DNA, 15 bp, Homo sapiens
acgtgggggcggggg

SEQ ID NO: 1485009 - DNA, 15 bp, Homo sapiens
cacgtgggggcgggg

SEQ ID NO: 1485010 - DNA, 15 bp, Homo sapiens
gcacgtgggggcggg

SEQ ID NO: 1485011 - DNA, 15 bp, Homo sapiens
cgcacgtgggggcgg

SEQ ID NO: 1485012 - DNA, 15 bp, Homo sapiens
gcgcacgtgggggcg

SEQ ID NO: 1485013 - DNA, 15 bp, Homo sapiens
ggcgcacgtgggggc

SEQ ID NO: 1485014 - DNA, 15 bp, Homo sapiens
cggcgcacgtggggg

SEQ ID NO: 1485015 - DNA, 15 bp, Homo sapiens
tcggcgcacgtgggg

SEQ ID NO: 1485016 - DNA, 15 bp, Homo sapiens
ctcggcgcacgtggg

SEQ ID NO: 1485017 - DNA, 15 bp, Homo sapiens
actcggcgcacgtgg

SEQ ID NO: 1485018 - DNA, 15 bp, Homo sapiens
aactcggcgcacgtg

SEQ ID NO: 1485019 - DNA, 15 bp, Homo sapiens
aaactcggcgcacgt

SEQ ID NO: 1485020 - DNA, 15 bp, Homo sapiens
caaactcggcgcacg

SEQ ID NO: 1485021 - DNA, 15 bp, Homo sapiens
acaaactcggcgcac

SEQ ID NO: 1485022 - DNA, 15 bp, Homo sapiens
aacaaactcggcgca

SEQ ID NO: 1485023 - DNA, 15 bp, Homo sapiens
caacaaactcggcgc

SEQ ID NO: 1485024 - DNA, 15 bp, Homo sapiens
tcaacaaactcggcg

SEQ ID NO: 1485025 - DNA, 15 bp, Homo sapiens
atcaacaaactcggc

SEQ ID NO: 1485026 - DNA, 15 bp, Homo sapiens
aatcaacaaactcgg

SEQ ID NO: 1485027 - DNA, 15 bp, Homo sapiens
aaatcaacaaactcg

SEQ ID NO: 1485028 - DNA, 15 bp, Homo sapiens
taaatcaacaaactc

SEQ ID NO: 1485029 - DNA, 15 bp, Homo sapiens
ctaaatcaacaaact

SEQ ID NO: 1485030 - DNA, 15 bp, Homo sapiens
gctaaatcaacaaac

SEQ ID NO: 1485031 - DNA, 15 bp, Homo sapiens
agctaaatcaacaaa

SEQ ID NO: 1485032 - DNA, 15 bp, Homo sapiens
cagctaaatcaacaa

SEQ ID NO: 1485033 - DNA, 15 bp, Homo sapiens
gcagctaaatcaaca

SEQ ID NO: 1485034 - DNA, 15 bp, Homo sapiens
ggcagctaaatcaac

SEQ ID NO: 1485035 - DNA, 15 bp, Homo sapiens
tggcagctaaatcaa

SEQ ID NO: 1485036 - DNA, 15 bp, Homo sapiens
atggcagctaaatca

SEQ ID NO: 1485037 - DNA, 15 bp, Homo sapiens
tatggcagctaaatc

SEQ ID NO: 1485038 - DNA, 15 bp, Homo sapiens
ctatggcagctaaat

SEQ ID NO: 1485039 - DNA, 15 bp, Homo sapiens
gctatggcagctaaa

SEQ ID NO: 1485040 - DNA, 15 bp, Homo sapiens
tgctatggcagctaa

SEQ ID NO: 1485041 - DNA, 15 bp, Homo sapiens
ttgctatggcagcta

SEQ ID NO: 1485042 - DNA, 15 bp, Homo sapiens
gttgctatggcagct

SEQ ID NO: 1485043 - DNA, 15 bp, Homo sapiens
cgttgctatggcagc

SEQ ID NO: 1485044 - DNA, 15 bp, Homo sapiens
tcgttgctatggcag

SEQ ID NO: 1485045 - DNA, 15 bp, Homo sapiens
atcgttgctatggca

SEQ ID NO: 1485046 - DNA, 15 bp, Homo sapiens
catcgttgctatggc

SEQ ID NO: 1485047 - DNA, 15 bp, Homo sapiens
ccatcgttgctatgg

SEQ ID NO: 1485048 - DNA, 15 bp, Homo sapiens
tccatcgttgctatg

SEQ ID NO: 1485049 - DNA, 15 bp, Homo sapiens
ttccatcgttgctat

SEQ ID NO: 1485050 - DNA, 15 bp, Homo sapiens
cttccatcgttgcta

SEQ ID NO: 1485051 - DNA, 15 bp, Homo sapiens
ccttccatcgttgct

SEQ ID NO: 1485052 - DNA, 15 bp, Homo sapiens
cccttccatcgttgc

SEQ ID NO: 1485053 - DNA, 15 bp, Homo sapiens
tcccttccatcgttg

SEQ ID NO: 1485054 - DNA, 15 bp, Homo sapiens
ctcccttccatcgtt

SEQ ID NO: 1485055 - DNA, 15 bp, Homo sapiens
gctcccttccatcgt

SEQ ID NO: 1485056 - DNA, 15 bp, Homo sapiens
ggctcccttccatcg

SEQ ID NO: 1485057 - DNA, 15 bp, Homo sapiens
aggctcccttccatc

SEQ ID NO: 1485058 - DNA, 15 bp, Homo sapiens
gaggctcccttccat

SEQ ID NO: 1485059 - DNA, 15 bp, Homo sapiens
cgaggctcccttcca

SEQ ID NO: 1485060 - DNA, 15 bp, Homo sapiens
ccgaggctcccttcc

SEQ ID NO: 1485061 - DNA, 15 bp, Homo sapiens
cccgaggctcccttc

SEQ ID NO: 1485062 - DNA, 15 bp, Homo sapiens
ccccgaggctccctt

SEQ ID NO: 1485063 - DNA, 15 bp, Homo sapiens
cccccgaggctccct

SEQ ID NO: 1485064 - DNA, 15 bp, Homo sapiens
ccccccgaggctccc

SEQ ID NO: 1485065 - DNA, 15 bp, Homo sapiens
cccccccgaggctcc

SEQ ID NO: 1485066 - DNA, 15 bp, Homo sapiens
ccccccccgaggctc

SEQ ID NO: 1485067 - DNA, 15 bp, Homo sapiens
gccccccccgaggct

SEQ ID NO: 1485068 - DNA, 15 bp, Homo sapiens
cgccccccccgaggc

SEQ ID NO: 1485069 - DNA, 15 bp, Homo sapiens
ccgccccccccgagg

SEQ ID NO: 1485070 - DNA, 15 bp, Homo sapiens
tccgccccccccgag

SEQ ID NO: 1485071 - DNA, 15 bp, Homo sapiens
ctccgccccccccga

SEQ ID NO: 1485072 - DNA, 15 bp, Homo sapiens
tctccgccccccccg

SEQ ID NO: 1485073 - DNA, 15 bp, Homo sapiens
ctctccgcccccccc

SEQ ID NO: 1485074 - DNA, 15 bp, Homo sapiens
tctctccgccccccc

SEQ ID NO: 1485075 - DNA, 15 bp, Homo sapiens
ttctctccgcccccc

SEQ ID NO: 1485076 - DNA, 15 bp, Homo sapiens
cttctctccgccccc

SEQ ID NO: 1485077 - DNA, 15 bp, Homo sapiens
tcttctctccgcccc

SEQ ID NO: 1485078 - DNA, 15 bp, Homo sapiens
ttcttctctccgccc

SEQ ID NO: 1485079 - DNA, 15 bp, Homo sapiens
tttcttctctccgcc

SEQ ID NO: 1485080 - DNA, 15 bp, Homo sapiens
ctttcttctctccgc

SEQ ID NO: 1485081 - DNA, 15 bp, Homo sapiens
cctttcttctctccg

SEQ ID NO: 1485082 - DNA, 15 bp, Homo sapiens
ccctttcttctctcc

SEQ ID NO: 1485083 - DNA, 15 bp, Homo sapiens
tccctttcttctctc

SEQ ID NO: 1485084 - DNA, 15 bp, Homo sapiens
ctccctttcttctct

SEQ ID NO: 1485085 - DNA, 15 bp, Homo sapiens
cctccctttcttctc

SEQ ID NO: 1485086 - DNA, 15 bp, Homo sapiens
ccctccctttcttct

SEQ ID NO: 1485087 - DNA, 15 bp, Homo sapiens
cccctccctttcttc

SEQ ID NO: 1485088 - DNA, 15 bp, Homo sapiens
gcccctccctttctt

SEQ ID NO: 1485089 - DNA, 15 bp, Homo sapiens
cgcccctccctttct

SEQ ID NO: 1485090 - DNA, 15 bp, Homo sapiens
ccgcccctccctttc

SEQ ID NO: 1485091 - DNA, 15 bp, Homo sapiens
cccgcccctcccttt

SEQ ID NO: 1485092 - DNA, 15 bp, Homo sapiens
ccccgcccctccctt

SEQ ID NO: 1485093 - DNA, 15 bp, Homo sapiens
gccccgcccctccct

SEQ ID NO: 1485094 - DNA, 15 bp, Homo sapiens
tgccccgcccctccc

SEQ ID NO: 1485095 - DNA, 15 bp, Homo sapiens
atgccccgcccctcc

SEQ ID NO: 1485096 - DNA, 15 bp, Homo sapiens
catgccccgcccctc

SEQ ID NO: 1485097 - DNA, 15 bp, Homo sapiens
ccatgccccgcccct

SEQ ID NO: 1485098 - DNA, 15 bp, Homo sapiens
cccatgccccgcccc

SEQ ID NO: 1485099 - DNA, 15 bp, Homo sapiens
tcccatgccccgccc

SEQ ID NO: 1485100 - DNA, 15 bp, Homo sapiens
ctcccatgccccgcc

SEQ ID NO: 1485101 - DNA, 15 bp, Homo sapiens
tctcccatgccccgc

SEQ ID NO: 1485102 - DNA, 15 bp, Homo sapiens
ttctcccatgccccg

SEQ ID NO: 1485103 - DNA, 15 bp, Homo sapiens
cttctcccatgcccc

SEQ ID NO: 1485104 - DNA, 15 bp, Homo sapiens
ccttctcccatgccc

SEQ ID NO: 1485105 - DNA, 15 bp, Homo sapiens
gccttctcccatgcc

SEQ ID NO: 1485106 - DNA, 15 bp, Homo sapiens
cgccttctcccatgc

SEQ ID NO: 1485107 - DNA, 15 bp, Homo sapiens
ccgccttctcccatg

SEQ ID NO: 1485108 - DNA, 15 bp, Homo sapiens
tccgccttctcccat

SEQ ID NO: 1485109 - DNA, 15 bp, Homo sapiens
ctccgccttctccca

SEQ ID NO: 1485110 - DNA, 15 bp, Homo sapiens
cctccgccttctccc

SEQ ID NO: 1485111 - DNA, 15 bp, Homo sapiens
tcctccgccttctcc

SEQ ID NO: 1485112 - DNA, 15 bp, Homo sapiens
ttcctccgccttctc

SEQ ID NO: 1485113 - DNA, 15 bp, Homo sapiens
tttcctccgccttct

SEQ ID NO: 1485114 - DNA, 15 bp, Homo sapiens
ttttcctccgccttc

SEQ ID NO: 1485115 - DNA, 15 bp, Homo sapiens
cttttcctccgcctt

SEQ ID NO: 1485116 - DNA, 15 bp, Homo sapiens
ccttttcctccgcct

SEQ ID NO: 1485117 - DNA, 15 bp, Homo sapiens
gccttttcctccgcc

SEQ ID NO: 1485118 - DNA, 15 bp, Homo sapiens
agccttttcctccgc

SEQ ID NO: 1485119 - DNA, 15 bp, Homo sapiens
cagccttttcctccg

SEQ ID NO: 1485120 - DNA, 15 bp, Homo sapiens
acagccttttcctcc

SEQ ID NO: 1485121 - DNA, 15 bp, Homo sapiens
tacagccttttcctc

SEQ ID NO: 1485122 - DNA, 15 bp, Homo sapiens
ctacagccttttcct

SEQ ID NO: 1485123 - DNA, 15 bp, Homo sapiens
gctacagccttttcc

SEQ ID NO: 1485124 - DNA, 15 bp, Homo sapiens
cgctacagccttttc

SEQ ID NO: 1485125 - DNA, 15 bp, Homo sapiens
tcgctacagcctttt

SEQ ID NO: 1485126 - DNA, 15 bp, Homo sapiens
ttcgctacagccttt

SEQ ID NO: 1485127 - DNA, 15 bp, Homo sapiens
cttcgctacagcctt

SEQ ID NO: 1485128 - DNA, 15 bp, Homo sapiens
ccttcgctacagcct

SEQ ID NO: 1485129 - DNA, 15 bp, Homo sapiens
tccttcgctacagcc

SEQ ID NO: 1485130 - DNA, 15 bp, Homo sapiens
ttccttcgctacagc

SEQ ID NO: 1485131 - DNA, 15 bp, Homo sapiens
cttccttcgctacag

SEQ ID NO: 1485132 - DNA, 15 bp, Homo sapiens
acttccttcgctaca

SEQ ID NO: 1485133 - DNA, 15 bp, Homo sapiens
aacttccttcgctac

SEQ ID NO: 1485134 - DNA, 15 bp, Homo sapiens
taacttccttcgcta

SEQ ID NO: 1485135 - DNA, 15 bp, Homo sapiens
ataacttccttcgct

SEQ ID NO: 1485136 - DNA, 15 bp, Homo sapiens
tataacttccttcgc

SEQ ID NO: 1485137 - DNA, 15 bp, Homo sapiens
ttataacttccttcg

SEQ ID NO: 1485138 - DNA, 15 bp, Homo sapiens
cttataacttccttc

SEQ ID NO: 1485139 - DNA, 15 bp, Homo sapiens
acttataacttcctt

SEQ ID NO: 1485140 - DNA, 15 bp, Homo sapiens
tacttataacttcct

SEQ ID NO: 1485141 - DNA, 15 bp, Homo sapiens
ttacttataacttcc

SEQ ID NO: 1485142 - DNA, 15 bp, Homo sapiens
cttacttataacttc

SEQ ID NO: 1485143 - DNA, 15 bp, Homo sapiens
ccttacttataactt

SEQ ID NO: 1485144 - DNA, 15 bp, Homo sapiens
tccttacttataact

SEQ ID NO: 1485145 - DNA, 15 bp, Homo sapiens
ttccttacttataac

SEQ ID NO: 1485146 - DNA, 15 bp, Homo sapiens
gttccttacttataa

SEQ ID NO: 1485147 - DNA, 15 bp, Homo sapiens
cgttccttacttata

SEQ ID NO: 1485148 - DNA, 15 bp, Homo sapiens
gcgttccttacttat

SEQ ID NO: 1485149 - DNA, 15 bp, Homo sapiens
cgcgttccttactta

SEQ ID NO: 1485150 - DNA, 15 bp, Homo sapiens
gcgcgttccttactt

SEQ ID NO: 1485151 - DNA, 15 bp, Homo sapiens
cgcgcgttccttact

SEQ ID NO: 1485152 - DNA, 15 bp, Homo sapiens
gcgcgcgttccttac

SEQ ID NO: 1485153 - DNA, 15 bp, Homo sapiens
ggcgcgcgttcctta

SEQ ID NO: 1485154 - DNA, 15 bp, Homo sapiens
cggcgcgcgttcctt

SEQ ID NO: 1485155 - DNA, 15 bp, Homo sapiens
ccggcgcgcgttcct

SEQ ID NO: 1485156 - DNA, 15 bp, Homo sapiens
gccggcgcgcgttcc

SEQ ID NO: 1485157 - DNA, 15 bp, Homo sapiens
cgccggcgcgcgttc

SEQ ID NO: 1485158 - DNA, 15 bp, Homo sapiens
ccgccggcgcgcgtt

SEQ ID NO: 1485159 - DNA, 15 bp, Homo sapiens
gccgccggcgcgcgt

SEQ ID NO: 1485160 - DNA, 15 bp, Homo sapiens
ggccgccggcgcgcg

SEQ ID NO: 1485161 - DNA, 15 bp, Homo sapiens
cggccgccggcgcgc

SEQ ID NO: 1485162 - DNA, 15 bp, Homo sapiens
ccggccgccggcgcg

SEQ ID NO: 1485163 - DNA, 15 bp, Homo sapiens
gccggccgccggcgc

SEQ ID NO: 1485164 - DNA, 15 bp, Homo sapiens
tgccggccgccggcg

SEQ ID NO: 1485165 - DNA, 15 bp, Homo sapiens
ctgccggccgccggc

SEQ ID NO: 1485166 - DNA, 15 bp, Homo sapiens
actgccggccgccgg

SEQ ID NO: 1485167 - DNA, 15 bp, Homo sapiens
aactgccggccgccg

SEQ ID NO: 1485168 - DNA, 15 bp, Homo sapiens
aaactgccggccgcc

SEQ ID NO: 1485169 - DNA, 15 bp, Homo sapiens
gaaactgccggccgc

SEQ ID NO: 1485170 - DNA, 15 bp, Homo sapiens
ggaaactgccggccg

SEQ ID NO: 1485171 - DNA, 15 bp, Homo sapiens
gggaaactgccggcc

SEQ ID NO: 1485172 - DNA, 15 bp, Homo sapiens
cgggaaactgccggc

SEQ ID NO: 1485173 - DNA, 15 bp, Homo sapiens
tcgggaaactgccgg

SEQ ID NO: 1485174 - DNA, 15 bp, Homo sapiens
gtcgggaaactgccg

SEQ ID NO: 1485175 - DNA, 15 bp, Homo sapiens
ggtcgggaaactgcc

SEQ ID NO: 1485176 - DNA, 15 bp, Homo sapiens
tggtcgggaaactgc

SEQ ID NO: 1485177 - DNA, 15 bp, Homo sapiens
ctggtcgggaaactg

SEQ ID NO: 1485178 - DNA, 15 bp, Homo sapiens
tctggtcgggaaact

SEQ ID NO: 1485179 - DNA, 15 bp, Homo sapiens
ctctggtcgggaaac

SEQ ID NO: 1485180 - DNA, 15 bp, Homo sapiens
tctctggtcgggaaa

SEQ ID NO: 1485181 - DNA, 15 bp, Homo sapiens
ctctctggtcgggaa

SEQ ID NO: 1485182 - DNA, 15 bp, Homo sapiens
tctctctggtcggga

SEQ ID NO: 1485183 - DNA, 15 bp, Homo sapiens
ttctctctggtcggg

SEQ ID NO: 1485184 - DNA, 15 bp, Homo sapiens
gttctctctggtcgg

SEQ ID NO: 1485185 - DNA, 15 bp, Homo sapiens
cgttctctctggtcg

SEQ ID NO: 1485186 - DNA, 15 bp, Homo sapiens
tcgttctctctggtc

SEQ ID NO: 1485187 - DNA, 15 bp, Homo sapiens
ttcgttctctctggt

SEQ ID NO: 1485188 - DNA, 15 bp, Homo sapiens
gttcgttctctctgg

SEQ ID NO: 1485189 - DNA, 15 bp, Homo sapiens
cgttcgttctctctg

SEQ ID NO: 1485190 - DNA, 15 bp, Homo sapiens
acgttcgttctctct

SEQ ID NO: 1485191 - DNA, 15 bp, Homo sapiens
cacgttcgttctctc

SEQ ID NO: 1485192 - DNA, 15 bp, Homo sapiens
acacgttcgttctct

SEQ ID NO: 1485193 - DNA, 15 bp, Homo sapiens
gacacgttcgttctc

SEQ ID NO: 1485194 - DNA, 15 bp, Homo sapiens
agacacgttcgttct

SEQ ID NO: 1485195 - DNA, 15 bp, Homo sapiens
cagacacgttcgttc

SEQ ID NO: 1485196 - DNA, 15 bp, Homo sapiens
gcagacacgttcgtt

SEQ ID NO: 1485197 - DNA, 15 bp, Homo sapiens
cgcagacacgttcgt

SEQ ID NO: 1485198 - DNA, 15 bp, Homo sapiens
ccgcagacacgttcg

SEQ ID NO: 1485199 - DNA, 15 bp, Homo sapiens
cccgcagacacgttc

SEQ ID NO: 1485200 - DNA, 15 bp, Homo sapiens
gcccgcagacacgtt

SEQ ID NO: 1485201 - DNA, 15 bp, Homo sapiens
cgcccgcagacacgt

SEQ ID NO: 1485202 - DNA, 15 bp, Homo sapiens
gcgcccgcagacacg

SEQ ID NO: 1485203 - DNA, 15 bp, Homo sapiens
cgcgcccgcagacac

SEQ ID NO: 1485204 - DNA, 15 bp, Homo sapiens
gcgcgcccgcagaca

SEQ ID NO: 1485205 - DNA, 15 bp, Homo sapiens
cgcgcgcccgcagac

SEQ ID NO: 1485206 - DNA, 15 bp, Homo sapiens
ccgcgcgcccgcaga

SEQ ID NO: 1485207 - DNA, 15 bp, Homo sapiens
cccgcgcgcccgcag

SEQ ID NO: 1485208 - DNA, 15 bp, Homo sapiens
ccccgcgcgcccgca

SEQ ID NO: 1485209 - DNA, 15 bp, Homo sapiens
tccccgcgcgcccgc

SEQ ID NO: 1485210 - DNA, 15 bp, Homo sapiens
ctccccgcgcgcccg

SEQ ID NO: 1485211 - DNA, 15 bp, Homo sapiens
gctccccgcgcgccc

SEQ ID NO: 1485212 - DNA, 15 bp, Homo sapiens
tgctccccgcgcgcc

SEQ ID NO: 1485213 - DNA, 15 bp, Homo sapiens
ctgctccccgcgcgc

SEQ ID NO: 1485214 - DNA, 15 bp, Homo sapiens
tctgctccccgcgcg

SEQ ID NO: 1485215 - DNA, 15 bp, Homo sapiens
ctctgctccccgcgc

SEQ ID NO: 1485216 - DNA, 15 bp, Homo sapiens
cctctgctccccgcg

SEQ ID NO: 1485217 - DNA, 15 bp, Homo sapiens
gcctctgctccccgc

SEQ ID NO: 1485218 - DNA, 15 bp, Homo sapiens
cgcctctgctccccg

SEQ ID NO: 1485219 - DNA, 15 bp, Homo sapiens
ccgcctctgctcccc

SEQ ID NO: 1485220 - DNA, 15 bp, Homo sapiens
accgcctctgctccc

SEQ ID NO: 1485221 - DNA, 15 bp, Homo sapiens
caccgcctctgctcc

SEQ ID NO: 1485222 - DNA, 15 bp, Homo sapiens
ccaccgcctctgctc

SEQ ID NO: 1485223 - DNA, 15 bp, Homo sapiens
gccaccgcctctgct

SEQ ID NO: 1485224 - DNA, 15 bp, Homo sapiens
cgccaccgcctctgc

SEQ ID NO: 1485225 - DNA, 15 bp, Homo sapiens
ccgccaccgcctctg

SEQ ID NO: 1485226 - DNA, 15 bp, Homo sapiens
cccgccaccgcctct

SEQ ID NO: 1485227 - DNA, 15 bp, Homo sapiens
gcccgccaccgcctc

SEQ ID NO: 1485228 - DNA, 15 bp, Homo sapiens
cgcccgccaccgcct

SEQ ID NO: 1485229 - DNA, 15 bp, Homo sapiens
ccgcccgccaccgcc

SEQ ID NO: 1485230 - DNA, 15 bp, Homo sapiens
gccgcccgccaccgc

SEQ ID NO: 1485231 - DNA, 15 bp, Homo sapiens
cgccgcccgccaccg

SEQ ID NO: 1485232 - DNA, 15 bp, Homo sapiens
ccgccgcccgccacc

SEQ ID NO: 1485233 - DNA, 15 bp, Homo sapiens
gccgccgcccgccac

SEQ ID NO: 1485234 - DNA, 15 bp, Homo sapiens
cgccgccgcccgcca

SEQ ID NO: 1485235 - DNA, 15 bp, Homo sapiens
ccgccgccgcccgcc

SEQ ID NO: 1485236 - DNA, 15 bp, Homo sapiens
gccgccgccgcccgc

SEQ ID NO: 1485237 - DNA, 15 bp, Homo sapiens
tgccgccgccgcccg

SEQ ID NO: 1485238 - DNA, 15 bp, Homo sapiens
gtgccgccgccgccc

SEQ ID NO: 1485239 - DNA, 15 bp, Homo sapiens
ggtgccgccgccgcc

SEQ ID NO: 1485240 - DNA, 15 bp, Homo sapiens
cggtgccgccgccgc

SEQ ID NO: 1485241 - DNA, 15 bp, Homo sapiens
ccggtgccgccgccg

SEQ ID NO: 1485242 - DNA, 15 bp, Homo sapiens
cccggtgccgccgcc

SEQ ID NO: 1485243 - DNA, 15 bp, Homo sapiens
tcccggtgccgccgc

SEQ ID NO: 1485244 - DNA, 15 bp, Homo sapiens
ctcccggtgccgccg

SEQ ID NO: 1485245 - DNA, 15 bp, Homo sapiens
gctcccggtgccgcc

SEQ ID NO: 1485246 - DNA, 15 bp, Homo sapiens
ggctcccggtgccgc

SEQ ID NO: 1485247 - DNA, 15 bp, Homo sapiens
cggctcccggtgccg

SEQ ID NO: 1485248 - DNA, 15 bp, Homo sapiens
gcggctcccggtgcc

SEQ ID NO: 1485249 - DNA, 15 bp, Homo sapiens
ggcggctcccggtgc

SEQ ID NO: 1485250 - DNA, 15 bp, Homo sapiens
cggcggctcccggtg

SEQ ID NO: 1485251 - DNA, 15 bp, Homo sapiens
tcggcggctcccggt

SEQ ID NO: 1485252 - DNA, 15 bp, Homo sapiens
ctcggcggctcccgg

SEQ ID NO: 1485253 - DNA, 15 bp, Homo sapiens
actcggcggctcccg

SEQ ID NO: 1485254 - DNA, 15 bp, Homo sapiens
cactcggcggctccc

SEQ ID NO: 1485255 - DNA, 15 bp, Homo sapiens
tcactcggcggctcc

SEQ ID NO: 1485256 - DNA, 15 bp, Homo sapiens
gtcactcggcggctc

SEQ ID NO: 1485257 - DNA, 15 bp, Homo sapiens
ggtcactcggcggct

SEQ ID NO: 1485258 - DNA, 15 bp, Homo sapiens
gggtcactcggcggc

SEQ ID NO: 1485259 - DNA, 15 bp, Homo sapiens
agggtcactcggcgg

SEQ ID NO: 1485260 - DNA, 15 bp, Homo sapiens
gagggtcactcggcg

SEQ ID NO: 1485261 - DNA, 15 bp, Homo sapiens
ggagggtcactcggc

SEQ ID NO: 1485262 - DNA, 15 bp, Homo sapiens
gggagggtcactcgg

SEQ ID NO: 1485263 - DNA, 15 bp, Homo sapiens
ggggagggtcactcg

SEQ ID NO: 1485264 - DNA, 15 bp, Homo sapiens
gggggagggtcactc

SEQ ID NO: 1485265 - DNA, 15 bp, Homo sapiens
cgggggagggtcact

SEQ ID NO: 1485266 - DNA, 15 bp, Homo sapiens
gcgggggagggtcac

SEQ ID NO: 1485267 - DNA, 15 bp, Homo sapiens
ggcgggggagggtca

SEQ ID NO: 1485268 - DNA, 15 bp, Homo sapiens
gggcgggggagggtc

SEQ ID NO: 1485269 - DNA, 15 bp, Homo sapiens
ggggcgggggagggt

SEQ ID NO: 1485270 - DNA, 15 bp, Homo sapiens
aggggcgggggaggg

SEQ ID NO: 1485271 - DNA, 15 bp, Homo sapiens
gaggggcgggggagg

SEQ ID NO: 1485272 - DNA, 15 bp, Homo sapiens
agaggggcgggggag

SEQ ID NO: 1485273 - DNA, 15 bp, Homo sapiens
cagaggggcggggga

SEQ ID NO: 1485274 - DNA, 15 bp, Homo sapiens
ccagaggggcggggg

SEQ ID NO: 1485275 - DNA, 15 bp, Homo sapiens
gccagaggggcgggg

SEQ ID NO: 1485276 - DNA, 15 bp, Homo sapiens
ggccagaggggcggg

SEQ ID NO: 1485277 - DNA, 15 bp, Homo sapiens
gggccagaggggcgg

SEQ ID NO: 1485278 - DNA, 15 bp, Homo sapiens
ggggccagaggggcg

SEQ ID NO: 1485279 - DNA, 15 bp, Homo sapiens
gggggccagaggggc

SEQ ID NO: 1485280 - DNA, 15 bp, Homo sapiens
ggggggccagagggg

SEQ ID NO: 1485281 - DNA, 15 bp, Homo sapiens
tggggggccagaggg

SEQ ID NO: 1485282 - DNA, 15 bp, Homo sapiens
gtggggggccagagg

SEQ ID NO: 1485283 - DNA, 15 bp, Homo sapiens
ggtggggggccagag

SEQ ID NO: 1485284 - DNA, 15 bp, Homo sapiens
gggtggggggccaga

SEQ ID NO: 1485285 - DNA, 15 bp, Homo sapiens
agggtggggggccag

SEQ ID NO: 1485286 - DNA, 15 bp, Homo sapiens
gagggtggggggcca

SEQ ID NO: 1485287 - DNA, 15 bp, Homo sapiens
ggagggtggggggcc

SEQ ID NO: 1485288 - DNA, 15 bp, Homo sapiens
gggagggtggggggc

SEQ ID NO: 1485289 - DNA, 15 bp, Homo sapiens
tgggagggtgggggg

SEQ ID NO: 1485290 - DNA, 15 bp, Homo sapiens
gtgggagggtggggg

SEQ ID NO: 1485291 - DNA, 15 bp, Homo sapiens
ggtgggagggtgggg

SEQ ID NO: 1485292 - DNA, 15 bp, Homo sapiens
gggtgggagggtggg

SEQ ID NO: 1485293 - DNA, 15 bp, Homo sapiens
cgggtgggagggtgg

SEQ ID NO: 1485294 - DNA, 15 bp, Homo sapiens
gcgggtgggagggtg

SEQ ID NO: 1485295 - DNA, 15 bp, Homo sapiens
ggcgggtgggagggt

SEQ ID NO: 1485296 - DNA, 15 bp, Homo sapiens
gggcgggtgggaggg

SEQ ID NO: 1485297 - DNA, 15 bp, Homo sapiens
cgggcgggtgggagg

SEQ ID NO: 1485298 - DNA, 15 bp, Homo sapiens
acgggcgggtgggag

SEQ ID NO: 1485299 - DNA, 15 bp, Homo sapiens
cacgggcgggtggga

SEQ ID NO: 1485300 - DNA, 15 bp, Homo sapiens
ccacgggcgggtggg

SEQ ID NO: 1485301 - DNA, 15 bp, Homo sapiens
gccacgggcgggtgg

SEQ ID NO: 1485302 - DNA, 15 bp, Homo sapiens
ggccacgggcgggtg

SEQ ID NO: 1485303 - DNA, 15 bp, Homo sapiens
gggccacgggcgggt

SEQ ID NO: 1485304 - DNA, 15 bp, Homo sapiens
cgggccacgggcggg

SEQ ID NO: 1485305 - DNA, 15 bp, Homo sapiens
gcgggccacgggcgg

SEQ ID NO: 1485306 - DNA, 15 bp, Homo sapiens
cgcgggccacgggcg

SEQ ID NO: 1485307 - DNA, 15 bp, Homo sapiens
gcgcgggccacgggc

SEQ ID NO: 1485308 - DNA, 15 bp, Homo sapiens
ggcgcgggccacggg

SEQ ID NO: 1485309 - DNA, 15 bp, Homo sapiens
gggcgcgggccacgg

SEQ ID NO: 1485310 - DNA, 15 bp, Homo sapiens
tgggcgcgggccacg

SEQ ID NO: 1485311 - DNA, 15 bp, Homo sapiens
atgggcgcgggccac

SEQ ID NO: 1485312 - DNA, 15 bp, Homo sapiens
catgggcgcgggcca

SEQ ID NO: 1485313 - DNA, 15 bp, Homo sapiens
ccatgggcgcgggcc

SEQ ID NO: 1485314 - DNA, 15 bp, Homo sapiens
gccatgggcgcgggc

SEQ ID NO: 1485315 - DNA, 15 bp, Homo sapiens
ggccatgggcgcggg

SEQ ID NO: 1485316 - DNA, 15 bp, Homo sapiens
cggccatgggcgcgg

SEQ ID NO: 1485317 - DNA, 15 bp, Homo sapiens
gcggccatgggcgcg

SEQ ID NO: 1485318 - DNA, 15 bp, Homo sapiens
cgcggccatgggcgc

SEQ ID NO: 1485319 - DNA, 15 bp, Homo sapiens
gcgcggccatgggcg

SEQ ID NO: 1485320 - DNA, 15 bp, Homo sapiens
cgcgcggccatgggc

SEQ ID NO: 1485321 - DNA, 15 bp, Homo sapiens
gcgcgcggccatggg

SEQ ID NO: 1485322 - DNA, 15 bp, Homo sapiens
cgcgcgcggccatgg

SEQ ID NO: 1485323 - DNA, 15 bp, Homo sapiens
gcgcgcgcggccatg

SEQ ID NO: 1485324 - DNA, 15 bp, Homo sapiens
agcgcgcgcggccat

SEQ ID NO: 1485325 - DNA, 15 bp, Homo sapiens
gagcgcgcgcggcca

SEQ ID NO: 1485326 - DNA, 15 bp, Homo sapiens
ggagcgcgcgcggcc

SEQ ID NO: 1485327 - DNA, 15 bp, Homo sapiens
tggagcgcgcgcggc

SEQ ID NO: 1485328 - DNA, 15 bp, Homo sapiens
gtggagcgcgcgcgg

SEQ ID NO: 1485329 - DNA, 15 bp, Homo sapiens
tgtggagcgcgcgcg

SEQ ID NO: 1485330 - DNA, 15 bp, Homo sapiens
gtgtggagcgcgcgc

SEQ ID NO: 1485331 - DNA, 15 bp, Homo sapiens
tgtgtggagcgcgcg

SEQ ID NO: 1485332 - DNA, 15 bp, Homo sapiens
ttgtgtggagcgcgc

SEQ ID NO: 1485333 - DNA, 15 bp, Homo sapiens
gttgtgtggagcgcg

SEQ ID NO: 1485334 - DNA, 15 bp, Homo sapiens
agttgtgtggagcgc

SEQ ID NO: 1485335 - DNA, 15 bp, Homo sapiens
gagttgtgtggagcg

SEQ ID NO: 1485336 - DNA, 15 bp, Homo sapiens
tgagttgtgtggagc

SEQ ID NO: 1485337 - DNA, 15 bp, Homo sapiens
gtgagttgtgtggag

SEQ ID NO: 1485338 - DNA, 15 bp, Homo sapiens
ggtgagttgtgtgga

SEQ ID NO: 1485339 - DNA, 15 bp, Homo sapiens
cggtgagttgtgtgg

SEQ ID NO: 1485340 - DNA, 15 bp, Homo sapiens
ccggtgagttgtgtg

SEQ ID NO: 1485341 - DNA, 15 bp, Homo sapiens
tccggtgagttgtgt

SEQ ID NO: 1485342 - DNA, 15 bp, Homo sapiens
ctccggtgagttgtg

SEQ ID NO: 1485343 - DNA, 15 bp, Homo sapiens
actccggtgagttgt

SEQ ID NO: 1485344 - DNA, 15 bp, Homo sapiens
gactccggtgagttg

SEQ ID NO: 1485345 - DNA, 15 bp, Homo sapiens
ggactccggtgagtt

SEQ ID NO: 1485346 - DNA, 15 bp, Homo sapiens
cggactccggtgagt

SEQ ID NO: 1485347 - DNA, 15 bp, Homo sapiens
gcggactccggtgag

SEQ ID NO: 1485348 - DNA, 15 bp, Homo sapiens
cgcggactccggtga

SEQ ID NO: 1485349 - DNA, 15 bp, Homo sapiens
gcgcggactccggtg

SEQ ID NO: 1485350 - DNA, 15 bp, Homo sapiens
ggcgcggactccggt

SEQ ID NO: 1485351 - DNA, 15 bp, Homo sapiens
aggcgcggactccgg

SEQ ID NO: 1485352 - DNA, 15 bp, Homo sapiens
aaggcgcggactccg

SEQ ID NO: 1485353 - DNA, 15 bp, Homo sapiens
caaggcgcggactcc

SEQ ID NO: 1485354 - DNA, 15 bp, Homo sapiens
gcaaggcgcggactc

SEQ ID NO: 1485355 - DNA, 15 bp, Homo sapiens
cgcaaggcgcggact

SEQ ID NO: 1485356 - DNA, 15 bp, Homo sapiens
gcgcaaggcgcggac

SEQ ID NO: 1485357 - DNA, 15 bp, Homo sapiens
ggcgcaaggcgcgga

SEQ ID NO: 1485358 - DNA, 15 bp, Homo sapiens
cggcgcaaggcgcgg

SEQ ID NO: 1485359 - DNA, 15 bp, Homo sapiens
gcggcgcaaggcgcg

SEQ ID NO: 1485360 - DNA, 15 bp, Homo sapiens
ggcggcgcaaggcgc

SEQ ID NO: 1485361 - DNA, 15 bp, Homo sapiens
cggcggcgcaaggcg

SEQ ID NO: 1485362 - DNA, 15 bp, Homo sapiens
tcggcggcgcaaggc

SEQ ID NO: 1485363 - DNA, 15 bp, Homo sapiens
gtcggcggcgcaagg

SEQ ID NO: 1485364 - DNA, 15 bp, Homo sapiens
ggtcggcggcgcaag

SEQ ID NO: 1485365 - DNA, 15 bp, Homo sapiens
tggtcggcggcgcaa

SEQ ID NO: 1485366 - DNA, 15 bp, Homo sapiens
ctggtcggcggcgca

SEQ ID NO: 1485367 - DNA, 15 bp, Homo sapiens
actggtcggcggcgc

SEQ ID NO: 1485368 - DNA, 15 bp, Homo sapiens
aactggtcggcggcg

SEQ ID NO: 1485369 - DNA, 15 bp, Homo sapiens
gaactggtcggcggc

SEQ ID NO: 1485370 - DNA, 15 bp, Homo sapiens
cgaactggtcggcgg

SEQ ID NO: 1485371 - DNA, 15 bp, Homo sapiens
gcgaactggtcggcg

SEQ ID NO: 1485372 - DNA, 15 bp, Homo sapiens
tgcgaactggtcggc

SEQ ID NO: 1485373 - DNA, 15 bp, Homo sapiens
ctgcgaactggtcgg

SEQ ID NO: 1485374 - DNA, 15 bp, Homo sapiens
gctgcgaactggtcg

SEQ ID NO: 1485375 - DNA, 15 bp, Homo sapiens
agctgcgaactggtc

SEQ ID NO: 1485376 - DNA, 15 bp, Homo sapiens
gagctgcgaactggt

SEQ ID NO: 1485377 - DNA, 15 bp, Homo sapiens
ggagctgcgaactgg

SEQ ID NO: 1485378 - DNA, 15 bp, Homo sapiens
cggagctgcgaactg

SEQ ID NO: 1485379 - DNA, 15 bp, Homo sapiens
gcggagctgcgaact

SEQ ID NO: 1485380 - DNA, 15 bp, Homo sapiens
cgcggagctgcgaac

SEQ ID NO: 1485381 - DNA, 15 bp, Homo sapiens
gcgcggagctgcgaa

SEQ ID NO: 1485382 - DNA, 15 bp, Homo sapiens
ggcgcggagctgcga

SEQ ID NO: 1485383 - DNA, 15 bp, Homo sapiens
tggcgcggagctgcg

SEQ ID NO: 1485384 - DNA, 15 bp, Homo sapiens
gtggcgcggagctgc

SEQ ID NO: 1485385 - DNA, 15 bp, Homo sapiens
cgtggcgcggagctg

SEQ ID NO: 1485386 - DNA, 15 bp, Homo sapiens
ccgtggcgcggagct

SEQ ID NO: 1485387 - DNA, 15 bp, Homo sapiens
gccgtggcgcggagc

SEQ ID NO: 1485388 - DNA, 15 bp, Homo sapiens
tgccgtggcgcggag

SEQ ID NO: 1485389 - DNA, 15 bp, Homo sapiens
ctgccgtggcgcgga

SEQ ID NO: 1485390 - DNA, 15 bp, Homo sapiens
gctgccgtggcgcgg

SEQ ID NO: 1485391 - DNA, 15 bp, Homo sapiens
ggctgccgtggcgcg

SEQ ID NO: 1485392 - DNA, 15 bp, Homo sapiens
tggctgccgtggcgc

SEQ ID NO: 1485393 - DNA, 15 bp, Homo sapiens
ctggctgccgtggcg

SEQ ID NO: 1485394 - DNA, 15 bp, Homo sapiens
actggctgccgtggc

SEQ ID NO: 1485395 - DNA, 15 bp, Homo sapiens
gactggctgccgtgg

SEQ ID NO: 1485396 - DNA, 15 bp, Homo sapiens
agactggctgccgtg

SEQ ID NO: 1485397 - DNA, 15 bp, Homo sapiens
gagactggctgccgt

SEQ ID NO: 1485398 - DNA, 15 bp, Homo sapiens
tgagactggctgccg

SEQ ID NO: 1485399 - DNA, 15 bp, Homo sapiens
gtgagactggctgcc

SEQ ID NO: 1485400 - DNA, 15 bp, Homo sapiens
ggtgagactggctgc

SEQ ID NO: 1485401 - DNA, 15 bp, Homo sapiens
aggtgagactggctg

SEQ ID NO: 1485402 - DNA, 15 bp, Homo sapiens
caggtgagactggct

SEQ ID NO: 1485403 - DNA, 15 bp, Homo sapiens
ccaggtgagactggc

SEQ ID NO: 1485404 - DNA, 15 bp, Homo sapiens
gccaggtgagactgg

SEQ ID NO: 1485405 - DNA, 15 bp, Homo sapiens
cgccaggtgagactg

SEQ ID NO: 1485406 - DNA, 15 bp, Homo sapiens
ccgccaggtgagact

SEQ ID NO: 1485407 - DNA, 15 bp, Homo sapiens
gccgccaggtgagac

SEQ ID NO: 1485408 - DNA, 15 bp, Homo sapiens
tgccgccaggtgaga

SEQ ID NO: 1485409 - DNA, 15 bp, Homo sapiens
gtgccgccaggtgag

SEQ ID NO: 1485410 - DNA, 15 bp, Homo sapiens
ggtgccgccaggtga

SEQ ID NO: 1485411 - DNA, 15 bp, Homo sapiens
cggtgccgccaggtg

SEQ ID NO: 1485412 - DNA, 15 bp, Homo sapiens
gcggtgccgccaggt

SEQ ID NO: 1485413 - DNA, 15 bp, Homo sapiens
ggcggtgccgccagg

SEQ ID NO: 1485414 - DNA, 15 bp, Homo sapiens
gggcggtgccgccag

SEQ ID NO: 1485415 - DNA, 15 bp, Homo sapiens
cgggcggtgccgcca

SEQ ID NO: 1485416 - DNA, 15 bp, Homo sapiens
gcgggcggtgccgcc

SEQ ID NO: 1485417 - DNA, 15 bp, Homo sapiens
ggcgggcggtgccgc

SEQ ID NO: 1485418 - DNA, 15 bp, Homo sapiens
gggcgggcggtgccg

SEQ ID NO: 1485419 - DNA, 15 bp, Homo sapiens
tgggcgggcggtgcc

SEQ ID NO: 1485420 - DNA, 15 bp, Homo sapiens
gtgggcgggcggtgc

SEQ ID NO: 1485421 - DNA, 15 bp, Homo sapiens
ggtgggcgggcggtg

SEQ ID NO: 1485422 - DNA, 15 bp, Homo sapiens
cggtgggcgggcggt

SEQ ID NO: 1485423 - DNA, 15 bp, Homo sapiens
gcggtgggcgggcgg

SEQ ID NO: 1485424 - DNA, 15 bp, Homo sapiens
ggcggtgggcgggcg

SEQ ID NO: 1485425 - DNA, 15 bp, Homo sapiens
gggcggtgggcgggc

SEQ ID NO: 1485426 - DNA, 15 bp, Homo sapiens
ggggcggtgggcggg

SEQ ID NO: 1485427 - DNA, 15 bp, Homo sapiens
cggggcggtgggcgg

SEQ ID NO: 1485428 - DNA, 15 bp, Homo sapiens
ccggggcggtgggcg

SEQ ID NO: 1485429 - DNA, 15 bp, Homo sapiens
gccggggcggtgggc

SEQ ID NO: 1485430 - DNA, 15 bp, Homo sapiens
ggccggggcggtggg

SEQ ID NO: 1485431 - DNA, 15 bp, Homo sapiens
tggccggggcggtgg

SEQ ID NO: 1485432 - DNA, 15 bp, Homo sapiens
gtggccggggcggtg

SEQ ID NO: 1485433 - DNA, 15 bp, Homo sapiens
tgtggccggggcggt

SEQ ID NO: 1485434 - DNA, 15 bp, Homo sapiens
ctgtggccggggcgg

SEQ ID NO: 1485435 - DNA, 15 bp, Homo sapiens
gctgtggccggggcg

SEQ ID NO: 1485436 - DNA, 15 bp, Homo sapiens
ggctgtggccggggc

SEQ ID NO: 1485437 - DNA, 15 bp, Homo sapiens
gggctgtggccgggg

SEQ ID NO: 1485438 - DNA, 15 bp, Homo sapiens
ggggctgtggccggg

SEQ ID NO: 1485439 - DNA, 15 bp, Homo sapiens
aggggctgtggccgg

SEQ ID NO: 1485440 - DNA, 15 bp, Homo sapiens
caggggctgtggccg

SEQ ID NO: 1485441 - DNA, 15 bp, Homo sapiens
gcaggggctgtggcc

SEQ ID NO: 1485442 - DNA, 15 bp, Homo sapiens
cgcaggggctgtggc

SEQ ID NO: 1485443 - DNA, 15 bp, Homo sapiens
gcgcaggggctgtgg

SEQ ID NO: 1485444 - DNA, 15 bp, Homo sapiens
ggcgcaggggctgtg

SEQ ID NO: 1485445 - DNA, 15 bp, Homo sapiens
gggcgcaggggctgt

SEQ ID NO: 1485446 - DNA, 15 bp, Homo sapiens
tgggcgcaggggctg

SEQ ID NO: 1485447 - DNA, 15 bp, Homo sapiens
gtgggcgcaggggct

SEQ ID NO: 1485448 - DNA, 15 bp, Homo sapiens
cgtgggcgcaggggc

SEQ ID NO: 1485449 - DNA, 15 bp, Homo sapiens
ccgtgggcgcagggg

SEQ ID NO: 1485450 - DNA, 15 bp, Homo sapiens
gccgtgggcgcaggg

SEQ ID NO: 1485451 - DNA, 15 bp, Homo sapiens
tgccgtgggcgcagg

SEQ ID NO: 1485452 - DNA, 15 bp, Homo sapiens
ctgccgtgggcgcag

SEQ ID NO: 1485453 - DNA, 15 bp, Homo sapiens
gctgccgtgggcgca

SEQ ID NO: 1485454 - DNA, 15 bp, Homo sapiens
tgctgccgtgggcgc

SEQ ID NO: 1485455 - DNA, 15 bp, Homo sapiens
gtgctgccgtgggcg

SEQ ID NO: 1485456 - DNA, 15 bp, Homo sapiens
agtgctgccgtgggc

SEQ ID NO: 1485457 - DNA, 15 bp, Homo sapiens
gagtgctgccgtggg

SEQ ID NO: 1485458 - DNA, 15 bp, Homo sapiens
cgagtgctgccgtgg

SEQ ID NO: 1485459 - DNA, 15 bp, Homo sapiens
tcgagtgctgccgtg

SEQ ID NO: 1485460 - DNA, 15 bp, Homo sapiens
ctcgagtgctgccgt

SEQ ID NO: 1485461 - DNA, 15 bp, Homo sapiens
cctcgagtgctgccg

SEQ ID NO: 1485462 - DNA, 15 bp, Homo sapiens
gcctcgagtgctgcc

SEQ ID NO: 1485463 - DNA, 15 bp, Homo sapiens
cgcctcgagtgctgc

SEQ ID NO: 1485464 - DNA, 15 bp, Homo sapiens
tcgcctcgagtgctg

SEQ ID NO: 1485465 - DNA, 15 bp, Homo sapiens
gtcgcctcgagtgct

SEQ ID NO: 1485466 - DNA, 15 bp, Homo sapiens
ggtcgcctcgagtgc

SEQ ID NO: 1485467 - DNA, 15 bp, Homo sapiens
cggtcgcctcgagtg

SEQ ID NO: 1485468 - DNA, 15 bp, Homo sapiens
gcggtcgcctcgagt

SEQ ID NO: 1485469 - DNA, 15 bp, Homo sapiens
cgcggtcgcctcgag

SEQ ID NO: 1485470 - DNA, 15 bp, Homo sapiens
tcgcggtcgcctcga

SEQ ID NO: 1485471 - DNA, 15 bp, Homo sapiens
gtcgcggtcgcctcg

SEQ ID NO: 1485472 - DNA, 15 bp, Homo sapiens
tgtcgcggtcgcctc

SEQ ID NO: 1485473 - DNA, 15 bp, Homo sapiens
ctgtcgcggtcgcct

SEQ ID NO: 1485474 - DNA, 15 bp, Homo sapiens
actgtcgcggtcgcc

SEQ ID NO: 1485475 - DNA, 15 bp, Homo sapiens
cactgtcgcggtcgc

SEQ ID NO: 1485476 - DNA, 15 bp, Homo sapiens
ccactgtcgcggtcg

SEQ ID NO: 1485477 - DNA, 15 bp, Homo sapiens
accactgtcgcggtc

SEQ ID NO: 1485478 - DNA, 15 bp, Homo sapiens
caccactgtcgcggt

SEQ ID NO: 1485479 - DNA, 15 bp, Homo sapiens
ccaccactgtcgcgg

SEQ ID NO: 1485480 - DNA, 15 bp, Homo sapiens
cccaccactgtcgcg

SEQ ID NO: 1485481 - DNA, 15 bp, Homo sapiens
ccccaccactgtcgc

SEQ ID NO: 1485482 - DNA, 15 bp, Homo sapiens
cccccaccactgtcg

SEQ ID NO: 1485483 - DNA, 15 bp, Homo sapiens
tcccccaccactgtc

SEQ ID NO: 1485484 - DNA, 15 bp, Homo sapiens
gtcccccaccactgt

SEQ ID NO: 1485485 - DNA, 15 bp, Homo sapiens
cgtcccccaccactg

SEQ ID NO: 1485486 - DNA, 15 bp, Homo sapiens
gcgtcccccaccact

SEQ ID NO: 1485487 - DNA, 15 bp, Homo sapiens
agcgtcccccaccac

SEQ ID NO: 1485488 - DNA, 15 bp, Homo sapiens
cagcgtcccccacca

SEQ ID NO: 1485489 - DNA, 15 bp, Homo sapiens
gcagcgtcccccacc

SEQ ID NO: 1485490 - DNA, 15 bp, Homo sapiens
agcagcgtcccccac

SEQ ID NO: 1485491 - DNA, 15 bp, Homo sapiens
cagcagcgtccccca

SEQ ID NO: 1485492 - DNA, 15 bp, Homo sapiens
tcagcagcgtccccc

SEQ ID NO: 1485493 - DNA, 15 bp, Homo sapiens
ctcagcagcgtcccc

SEQ ID NO: 1485494 - DNA, 15 bp, Homo sapiens
actcagcagcgtccc

SEQ ID NO: 1485495 - DNA, 15 bp, Homo sapiens
cactcagcagcgtcc

SEQ ID NO: 1485496 - DNA, 15 bp, Homo sapiens
ccactcagcagcgtc

SEQ ID NO: 1485497 - DNA, 15 bp, Homo sapiens
tccactcagcagcgt

SEQ ID NO: 1485498 - DNA, 15 bp, Homo sapiens
ttccactcagcagcg

SEQ ID NO: 1485499 - DNA, 15 bp, Homo sapiens
cttccactcagcagc

SEQ ID NO: 1485500 - DNA, 15 bp, Homo sapiens
tcttccactcagcag

SEQ ID NO: 1485501 - DNA, 15 bp, Homo sapiens
ctcttccactcagca

SEQ ID NO: 1485502 - DNA, 15 bp, Homo sapiens
tctcttccactcagc

SEQ ID NO: 1485503 - DNA, 15 bp, Homo sapiens
ctctcttccactcag

SEQ ID NO: 1485504 - DNA, 15 bp, Homo sapiens
gctctcttccactca

SEQ ID NO: 1485505 - DNA, 15 bp, Homo sapiens
cgctctcttccactc

SEQ ID NO: 1485506 - DNA, 15 bp, Homo sapiens
gcgctctcttccact

SEQ ID NO: 1485507 - DNA, 15 bp, Homo sapiens
tgcgctctcttccac

SEQ ID NO: 1485508 - DNA, 15 bp, Homo sapiens
ctgcgctctcttcca

SEQ ID NO: 1485509 - DNA, 15 bp, Homo sapiens
gctgcgctctcttcc

SEQ ID NO: 1485510 - DNA, 15 bp, Homo sapiens
ggctgcgctctcttc

SEQ ID NO: 1485511 - DNA, 15 bp, Homo sapiens
gggctgcgctctctt

SEQ ID NO: 1485512 - DNA, 15 bp, Homo sapiens
cgggctgcgctctct

SEQ ID NO: 1485513 - DNA, 15 bp, Homo sapiens
ccgggctgcgctctc

SEQ ID NO: 1485514 - DNA, 15 bp, Homo sapiens
gccgggctgcgctct

SEQ ID NO: 1485515 - DNA, 15 bp, Homo sapiens
ggccgggctgcgctc

SEQ ID NO: 1485516 - DNA, 15 bp, Homo sapiens
tggccgggctgcgct

SEQ ID NO: 1485517 - DNA, 15 bp, Homo sapiens
gtggccgggctgcgc

SEQ ID NO: 1485518 - DNA, 15 bp, Homo sapiens
ggtggccgggctgcg

SEQ ID NO: 1485519 - DNA, 15 bp, Homo sapiens
cggtggccgggctgc

SEQ ID NO: 1485520 - DNA, 15 bp, Homo sapiens
ccggtggccgggctg

SEQ ID NO: 1485521 - DNA, 15 bp, Homo sapiens
tccggtggccgggct

SEQ ID NO: 1485522 - DNA, 15 bp, Homo sapiens
gtccggtggccgggc

SEQ ID NO: 1485523 - DNA, 15 bp, Homo sapiens
ggtccggtggccggg

SEQ ID NO: 1485524 - DNA, 15 bp, Homo sapiens
aggtccggtggccgg

SEQ ID NO: 1485525 - DNA, 15 bp, Homo sapiens
taggtccggtggccg

SEQ ID NO: 1485526 - DNA, 15 bp, Homo sapiens
gtaggtccggtggcc

SEQ ID NO: 1485527 - DNA, 15 bp, Homo sapiens
agtaggtccggtggc

SEQ ID NO: 1485528 - DNA, 15 bp, Homo sapiens
aagtaggtccggtgg

SEQ ID NO: 1485529 - DNA, 15 bp, Homo sapiens
taagtaggtccggtg

SEQ ID NO: 1485530 - DNA, 15 bp, Homo sapiens
gtaagtaggtccggt

SEQ ID NO: 1485531 - DNA, 15 bp, Homo sapiens
agtaagtaggtccgg

SEQ ID NO: 1485532 - DNA, 15 bp, Homo sapiens
gagtaagtaggtccg

SEQ ID NO: 1485533 - DNA, 15 bp, Homo sapiens
cgagtaagtaggtcc

SEQ ID NO: 1485534 - DNA, 15 bp, Homo sapiens
gcgagtaagtaggtc

SEQ ID NO: 1485535 - DNA, 15 bp, Homo sapiens
ggcgagtaagtaggt

SEQ ID NO: 1485536 - DNA, 15 bp, Homo sapiens
aggcgagtaagtagg

SEQ ID NO: 1485537 - DNA, 15 bp, Homo sapiens
aaggcgagtaagtag

SEQ ID NO: 1485538 - DNA, 15 bp, Homo sapiens
caaggcgagtaagta

SEQ ID NO: 1485539 - DNA, 15 bp, Homo sapiens
gcaaggcgagtaagt

SEQ ID NO: 1485540 - DNA, 15 bp, Homo sapiens
agcaaggcgagtaag

SEQ ID NO: 1485541 - DNA, 15 bp, Homo sapiens
cagcaaggcgagtaa

SEQ ID NO: 1485542 - DNA, 15 bp, Homo sapiens
tcagcaaggcgagta

SEQ ID NO: 1485543 - DNA, 15 bp, Homo sapiens
atcagcaaggcgagt

SEQ ID NO: 1485544 - DNA, 15 bp, Homo sapiens
aatcagcaaggcgag

SEQ ID NO: 1485545 - DNA, 15 bp, Homo sapiens
caatcagcaaggcga

SEQ ID NO: 1485546 - DNA, 15 bp, Homo sapiens
acaatcagcaaggcg

SEQ ID NO: 1485547 - DNA, 15 bp, Homo sapiens
gacaatcagcaaggc

SEQ ID NO: 1485548 - DNA, 15 bp, Homo sapiens
agacaatcagcaagg

SEQ ID NO: 1485549 - DNA, 15 bp, Homo sapiens
tagacaatcagcaag

SEQ ID NO: 1485550 - DNA, 15 bp, Homo sapiens
atagacaatcagcaa

SEQ ID NO: 1485551 - DNA, 15 bp, Homo sapiens
aatagacaatcagca

SEQ ID NO: 1485552 - DNA, 15 bp, Homo sapiens
aaatagacaatcagc

SEQ ID NO: 1485553 - DNA, 15 bp, Homo sapiens
aaaatagacaatcag

SEQ ID NO: 1485554 - DNA, 15 bp, Homo sapiens
aaaaatagacaatca

SEQ ID NO: 1485555 - DNA, 15 bp, Homo sapiens
caaaaatagacaatc

SEQ ID NO: 1485556 - DNA, 15 bp, Homo sapiens
gcaaaaatagacaat

SEQ ID NO: 1485557 - DNA, 15 bp, Homo sapiens
cgcaaaaatagacaa

SEQ ID NO: 1485558 - DNA, 15 bp, Homo sapiens
acgcaaaaatagaca

SEQ ID NO: 1485559 - DNA, 15 bp, Homo sapiens
aacgcaaaaatagac

SEQ ID NO: 1485560 - DNA, 15 bp, Homo sapiens
aaacgcaaaaataga

SEQ ID NO: 1485561 - DNA, 15 bp, Homo sapiens
taaacgcaaaaatag

SEQ ID NO: 1485562 - DNA, 15 bp, Homo sapiens
gtaaacgcaaaaata

SEQ ID NO: 1485563 - DNA, 15 bp, Homo sapiens
tgtaaacgcaaaaat

SEQ ID NO: 1485564 - DNA, 15 bp, Homo sapiens
ttgtaaacgcaaaaa

SEQ ID NO: 1485565 - DNA, 15 bp, Homo sapiens
gttgtaaacgcaaaa

SEQ ID NO: 1485566 - DNA, 15 bp, Homo sapiens
agttgtaaacgcaaa

SEQ ID NO: 1485567 - DNA, 15 bp, Homo sapiens
aagttgtaaacgcaa

SEQ ID NO: 1485568 - DNA, 15 bp, Homo sapiens
aaagttgtaaacgca

SEQ ID NO: 1485569 - DNA, 15 bp, Homo sapiens
aaaagttgtaaacgc

SEQ ID NO: 1485570 - DNA, 15 bp, Homo sapiens
gaaaagttgtaaacg

SEQ ID NO: 1485571 - DNA, 15 bp, Homo sapiens
agaaaagttgtaaac

SEQ ID NO: 1485572 - DNA, 15 bp, Homo sapiens
tagaaaagttgtaaa

SEQ ID NO: 1485573 - DNA, 15 bp, Homo sapiens
ttagaaaagttgtaa

SEQ ID NO: 1485574 - DNA, 15 bp, Homo sapiens
cttagaaaagttgta

SEQ ID NO: 1485575 - DNA, 15 bp, Homo sapiens
tcttagaaaagttgt

SEQ ID NO: 1485576 - DNA, 15 bp, Homo sapiens
ttcttagaaaagttg

SEQ ID NO: 1485577 - DNA, 15 bp, Homo sapiens
gttcttagaaaagtt

SEQ ID NO: 1485578 - DNA, 15 bp, Homo sapiens
agttcttagaaaagt

SEQ ID NO: 1485579 - DNA, 15 bp, Homo sapiens
aagttcttagaaaag

SEQ ID NO: 1485580 - DNA, 15 bp, Homo sapiens
aaagttcttagaaaa

SEQ ID NO: 1485581 - DNA, 15 bp, Homo sapiens
aaaagttcttagaaa

SEQ ID NO: 1485582 - DNA, 15 bp, Homo sapiens
caaaagttcttagaa

SEQ ID NO: 1485583 - DNA, 15 bp, Homo sapiens
acaaaagttcttaga

SEQ ID NO: 1485584 - DNA, 15 bp, Homo sapiens
tacaaaagttcttag

SEQ ID NO: 1485585 - DNA, 15 bp, Homo sapiens
atacaaaagttctta

SEQ ID NO: 1485586 - DNA, 15 bp, Homo sapiens
tatacaaaagttctt

SEQ ID NO: 1485587 - DNA, 15 bp, Homo sapiens
gtatacaaaagttct

SEQ ID NO: 1485588 - DNA, 15 bp, Homo sapiens
tgtatacaaaagttc

SEQ ID NO: 1485589 - DNA, 15 bp, Homo sapiens
ttgtatacaaaagtt

SEQ ID NO: 1485590 - DNA, 15 bp, Homo sapiens
tttgtatacaaaagt

SEQ ID NO: 1485591 - DNA, 15 bp, Homo sapiens
ctttgtatacaaaag

SEQ ID NO: 1485592 - DNA, 15 bp, Homo sapiens
cctttgtatacaaaa

SEQ ID NO: 1485593 - DNA, 15 bp, Homo sapiens
tcctttgtatacaaa

SEQ ID NO: 1485594 - DNA, 15 bp, Homo sapiens
ttcctttgtatacaa

SEQ ID NO: 1485595 - DNA, 15 bp, Homo sapiens
gttcctttgtataca

SEQ ID NO: 1485596 - DNA, 15 bp, Homo sapiens
agttcctttgtatac

SEQ ID NO: 1485597 - DNA, 15 bp, Homo sapiens
aagttcctttgtata

SEQ ID NO: 1485598 - DNA, 15 bp, Homo sapiens
aaagttcctttgtat

SEQ ID NO: 1485599 - DNA, 15 bp, Homo sapiens
aaaagttcctttgta

SEQ ID NO: 1485600 - DNA, 15 bp, Homo sapiens
aaaaagttcctttgt

SEQ ID NO: 1485601 - DNA, 15 bp, Homo sapiens
taaaaagttcctttg

SEQ ID NO: 1485602 - DNA, 15 bp, Homo sapiens
ttaaaaagttccttt

SEQ ID NO: 1485603 - DNA, 15 bp, Homo sapiens
tttaaaaagttcctt

SEQ ID NO: 1485604 - DNA, 15 bp, Homo sapiens
ttttaaaaagttcct

SEQ ID NO: 1485605 - DNA, 15 bp, Homo sapiens
tttttaaaaagttcc

SEQ ID NO: 1485606 - DNA, 15 bp, Homo sapiens
ttttttaaaaagttc

SEQ ID NO: 1485607 - DNA, 15 bp, Homo sapiens
cttttttaaaaagtt

SEQ ID NO: 1485608 - DNA, 15 bp, Homo sapiens
tcttttttaaaaagt

SEQ ID NO: 1485609 - DNA, 15 bp, Homo sapiens
gtcttttttaaaaag

SEQ ID NO: 1485610 - DNA, 15 bp, Homo sapiens
cgtcttttttaaaaa

SEQ ID NO: 1485611 - DNA, 15 bp, Homo sapiens
gcgtcttttttaaaa

SEQ ID NO: 1485612 - DNA, 15 bp, Homo sapiens
agcgtcttttttaaa

SEQ ID NO: 1485613 - DNA, 15 bp, Homo sapiens
aagcgtcttttttaa

SEQ ID NO: 1485614 - DNA, 15 bp, Homo sapiens
gaagcgtctttttta

SEQ ID NO: 1485615 - DNA, 15 bp, Homo sapiens
ggaagcgtctttttt

SEQ ID NO: 1485616 - DNA, 15 bp, Homo sapiens
tggaagcgtcttttt

SEQ ID NO: 1485617 - DNA, 15 bp, Homo sapiens
ttggaagcgtctttt

SEQ ID NO: 1485618 - DNA, 15 bp, Homo sapiens
cttggaagcgtcttt

SEQ ID NO: 1485619 - DNA, 15 bp, Homo sapiens
acttggaagcgtctt

SEQ ID NO: 1485620 - DNA, 15 bp, Homo sapiens
aacttggaagcgtct

SEQ ID NO: 1485621 - DNA, 15 bp, Homo sapiens
taacttggaagcgtc

SEQ ID NO: 1485622 - DNA, 15 bp, Homo sapiens
ataacttggaagcgt

SEQ ID NO: 1485623 - DNA, 15 bp, Homo sapiens
tataacttggaagcg

SEQ ID NO: 1485624 - DNA, 15 bp, Homo sapiens
atataacttggaagc

SEQ ID NO: 1485625 - DNA, 15 bp, Homo sapiens
aatataacttggaag

SEQ ID NO: 1485626 - DNA, 15 bp, Homo sapiens
aaatataacttggaa

SEQ ID NO: 1485627 - DNA, 15 bp, Homo sapiens
taaatataacttgga

SEQ ID NO: 1485628 - DNA, 15 bp, Homo sapiens
ttaaatataacttgg

SEQ ID NO: 1485629 - DNA, 15 bp, Homo sapiens
attaaatataacttg

SEQ ID NO: 1485630 - DNA, 15 bp, Homo sapiens
gattaaatataactt

SEQ ID NO: 1485631 - DNA, 15 bp, Homo sapiens
ggattaaatataact

SEQ ID NO: 1485632 - DNA, 15 bp, Homo sapiens
tggattaaatataac

SEQ ID NO: 1485633 - DNA, 15 bp, Homo sapiens
ttggattaaatataa

SEQ ID NO: 1485634 - DNA, 15 bp, Homo sapiens
tttggattaaatata

SEQ ID NO: 1485635 - DNA, 15 bp, Homo sapiens
ctttggattaaatat

SEQ ID NO: 1485636 - DNA, 15 bp, Homo sapiens
tctttggattaaata

SEQ ID NO: 1485637 - DNA, 15 bp, Homo sapiens
ttctttggattaaat

SEQ ID NO: 1485638 - DNA, 15 bp, Homo sapiens
cttctttggattaaa

SEQ ID NO: 1485639 - DNA, 15 bp, Homo sapiens
tcttctttggattaa

SEQ ID NO: 1485640 - DNA, 15 bp, Homo sapiens
ttcttctttggatta

SEQ ID NO: 1485641 - DNA, 15 bp, Homo sapiens
cttcttctttggatt

SEQ ID NO: 1485642 - DNA, 15 bp, Homo sapiens
ccttcttctttggat

SEQ ID NO: 1485643 - DNA, 15 bp, Homo sapiens
tccttcttctttgga

SEQ ID NO: 1485644 - DNA, 15 bp, Homo sapiens
atccttcttctttgg

SEQ ID NO: 1485645 - DNA, 15 bp, Homo sapiens
gatccttcttctttg

SEQ ID NO: 1485646 - DNA, 15 bp, Homo sapiens
agatccttcttcttt

SEQ ID NO: 1485647 - DNA, 15 bp, Homo sapiens
gagatccttcttctt

SEQ ID NO: 1485648 - DNA, 15 bp, Homo sapiens
cgagatccttcttct

SEQ ID NO: 1485649 - DNA, 15 bp, Homo sapiens
ccgagatccttcttc

SEQ ID NO: 1485650 - DNA, 15 bp, Homo sapiens
gccgagatccttctt

SEQ ID NO: 1485651 - DNA, 15 bp, Homo sapiens
ggccgagatccttct

SEQ ID NO: 1485652 - DNA, 15 bp, Homo sapiens
tggccgagatccttc

SEQ ID NO: 1485653 - DNA, 15 bp, Homo sapiens
ttggccgagatcctt

SEQ ID NO: 1485654 - DNA, 15 bp, Homo sapiens
attggccgagatcct

SEQ ID NO: 1485655 - DNA, 15 bp, Homo sapiens
aattggccgagatcc

SEQ ID NO: 1485656 - DNA, 15 bp, Homo sapiens
aaattggccgagatc

SEQ ID NO: 1485657 - DNA, 15 bp, Homo sapiens
caaattggccgagat

SEQ ID NO: 1485658 - DNA, 15 bp, Homo sapiens
ccaaattggccgaga

SEQ ID NO: 1485659 - DNA, 15 bp, Homo sapiens
cccaaattggccgag

SEQ ID NO: 1485660 - DNA, 15 bp, Homo sapiens
ccccaaattggccga

SEQ ID NO: 1485661 - DNA, 15 bp, Homo sapiens
accccaaattggccg

SEQ ID NO: 1485662 - DNA, 15 bp, Homo sapiens
aaccccaaattggcc

SEQ ID NO: 1485663 - DNA, 15 bp, Homo sapiens
aaaccccaaattggc

SEQ ID NO: 1485664 - DNA, 15 bp, Homo sapiens
aaaaccccaaattgg

SEQ ID NO: 1485665 - DNA, 15 bp, Homo sapiens
caaaaccccaaattg

SEQ ID NO: 1485666 - DNA, 15 bp, Homo sapiens
ccaaaaccccaaatt

SEQ ID NO: 1485667 - DNA, 15 bp, Homo sapiens
cccaaaaccccaaat

SEQ ID NO: 1485668 - DNA, 15 bp, Homo sapiens
acccaaaaccccaaa

SEQ ID NO: 1485669 - DNA, 15 bp, Homo sapiens
aacccaaaaccccaa

SEQ ID NO: 1485670 - DNA, 15 bp, Homo sapiens
aaacccaaaacccca

SEQ ID NO: 1485671 - DNA, 15 bp, Homo sapiens
aaaacccaaaacccc

SEQ ID NO: 1485672 - DNA, 15 bp, Homo sapiens
caaaacccaaaaccc

SEQ ID NO: 1485673 - DNA, 15 bp, Homo sapiens
ccaaaacccaaaacc

SEQ ID NO: 1485674 - DNA, 15 bp, Homo sapiens
gccaaaacccaaaac

SEQ ID NO: 1485675 - DNA, 15 bp, Homo sapiens
actccggaggatggg

SEQ ID NO: 1485676 - DNA, 15 bp, Homo sapiens
gactccggaggatgg

SEQ ID NO: 1485677 - DNA, 15 bp, Homo sapiens
tgactccggaggatg

SEQ ID NO: 1485678 - DNA, 15 bp, Homo sapiens
ctgactccggaggat

SEQ ID NO: 1485679 - DNA, 15 bp, Homo sapiens
actgactccggagga

SEQ ID NO: 1485680 - DNA, 15 bp, Homo sapiens
cactgactccggagg

SEQ ID NO: 1485681 - DNA, 15 bp, Homo sapiens
ccactgactccggag

SEQ ID NO: 1485682 - DNA, 15 bp, Homo sapiens
gccactgactccgga

SEQ ID NO: 1485683 - DNA, 15 bp, Homo sapiens
ggccactgactccgg

SEQ ID NO: 1485684 - DNA, 15 bp, Homo sapiens
cggccactgactccg

SEQ ID NO: 1485685 - DNA, 15 bp, Homo sapiens
gcggccactgactcc

SEQ ID NO: 1485686 - DNA, 15 bp, Homo sapiens
ggcggccactgactc

SEQ ID NO: 1485687 - DNA, 15 bp, Homo sapiens
tggcggccactgact

SEQ ID NO: 1485688 - DNA, 15 bp, Homo sapiens
gtggcggccactgac

SEQ ID NO: 1485689 - DNA, 15 bp, Homo sapiens
ggtggcggccactga

SEQ ID NO: 1485690 - DNA, 15 bp, Homo sapiens
cggtggcggccactg

SEQ ID NO: 1485691 - DNA, 15 bp, Homo sapiens
acggtggcggccact

SEQ ID NO: 1485692 - DNA, 15 bp, Homo sapiens
cacggtggcggccac

SEQ ID NO: 1485693 - DNA, 15 bp, Homo sapiens
acacggtggcggcca

SEQ ID NO: 1485694 - DNA, 15 bp, Homo sapiens
gacacggtggcggcc

SEQ ID NO: 1485695 - DNA, 15 bp, Homo sapiens
ggacacggtggcggc

SEQ ID NO: 1485696 - DNA, 15 bp, Homo sapiens
aggacacggtggcgg

SEQ ID NO: 1485697 - DNA, 15 bp, Homo sapiens
gaggacacggtggcg

SEQ ID NO: 1485698 - DNA, 15 bp, Homo sapiens
cgaggacacggtggc

SEQ ID NO: 1485699 - DNA, 15 bp, Homo sapiens
acgaggacacggtgg

SEQ ID NO: 1485700 - DNA, 15 bp, Homo sapiens
gacgaggacacggtg

SEQ ID NO: 1485701 - DNA, 15 bp, Homo sapiens
tgacgaggacacggt

SEQ ID NO: 1485702 - DNA, 15 bp, Homo sapiens
ctgacgaggacacgg

SEQ ID NO: 1485703 - DNA, 15 bp, Homo sapiens
gctgacgaggacacg

SEQ ID NO: 1485704 - DNA, 15 bp, Homo sapiens
cgctgacgaggacac

SEQ ID NO: 1485705 - DNA, 15 bp, Homo sapiens
acgctgacgaggaca

SEQ ID NO: 1485706 - DNA, 15 bp, Homo sapiens
gacgctgacgaggac

SEQ ID NO: 1485707 - DNA, 15 bp, Homo sapiens
tgacgctgacgagga

SEQ ID NO: 1485708 - DNA, 15 bp, Homo sapiens
ctgacgctgacgagg

SEQ ID NO: 1485709 - DNA, 15 bp, Homo sapiens
gctgacgctgacgag

SEQ ID NO: 1485710 - DNA, 15 bp, Homo sapiens
ggctgacgctgacga

SEQ ID NO: 1485711 - DNA, 15 bp, Homo sapiens
aggctgacgctgacg

SEQ ID NO: 1485712 - DNA, 15 bp, Homo sapiens
gaggctgacgctgac

SEQ ID NO: 1485713 - DNA, 15 bp, Homo sapiens
ggaggctgacgctga

SEQ ID NO: 1485714 - DNA, 15 bp, Homo sapiens
aggaggctgacgctg

SEQ ID NO: 1485715 - DNA, 15 bp, Homo sapiens
gaggaggctgacgct

SEQ ID NO: 1485716 - DNA, 15 bp, Homo sapiens
agaggaggctgacgc

SEQ ID NO: 1485717 - DNA, 15 bp, Homo sapiens
aagaggaggctgacg

SEQ ID NO: 1485718 - DNA, 15 bp, Homo sapiens
gaagaggaggctgac

SEQ ID NO: 1485719 - DNA, 15 bp, Homo sapiens
cgaagaggaggctga

SEQ ID NO: 1485720 - DNA, 15 bp, Homo sapiens
acgaagaggaggctg

SEQ ID NO: 1485721 - DNA, 15 bp, Homo sapiens
gacgaagaggaggct

SEQ ID NO: 1485722 - DNA, 15 bp, Homo sapiens
cgacgaagaggaggc

SEQ ID NO: 1485723 - DNA, 15 bp, Homo sapiens
acgacgaagaggagg

SEQ ID NO: 1485724 - DNA, 15 bp, Homo sapiens
gacgacgaagaggag

SEQ ID NO: 1485725 - DNA, 15 bp, Homo sapiens
cgacgacgaagagga

SEQ ID NO: 1485726 - DNA, 15 bp, Homo sapiens
gcgacgacgaagagg

SEQ ID NO: 1485727 - DNA, 15 bp, Homo sapiens
ggcgacgacgaagag

SEQ ID NO: 1485728 - DNA, 15 bp, Homo sapiens
cggcgacgacgaaga

SEQ ID NO: 1485729 - DNA, 15 bp, Homo sapiens
acggcgacgacgaag

SEQ ID NO: 1485730 - DNA, 15 bp, Homo sapiens
gacggcgacgacgaa

SEQ ID NO: 1485731 - DNA, 15 bp, Homo sapiens
cgacggcgacgacga

SEQ ID NO: 1485732 - DNA, 15 bp, Homo sapiens
tcgacggcgacgacg

SEQ ID NO: 1485733 - DNA, 15 bp, Homo sapiens
ctcgacggcgacgac

SEQ ID NO: 1485734 - DNA, 15 bp, Homo sapiens
gctcgacggcgacga

SEQ ID NO: 1485735 - DNA, 15 bp, Homo sapiens
tgctcgacggcgacg

SEQ ID NO: 1485736 - DNA, 15 bp, Homo sapiens
ctgctcgacggcgac

SEQ ID NO: 1485737 - DNA, 15 bp, Homo sapiens
gctgctcgacggcga

SEQ ID NO: 1485738 - DNA, 15 bp, Homo sapiens
cgctgctcgacggcg

SEQ ID NO: 1485739 - DNA, 15 bp, Homo sapiens
ccgctgctcgacggc

SEQ ID NO: 1485740 - DNA, 15 bp, Homo sapiens
gccgctgctcgacgg

SEQ ID NO: 1485741 - DNA, 15 bp, Homo sapiens
ggccgctgctcgacg

SEQ ID NO: 1485742 - DNA, 15 bp, Homo sapiens
gggccgctgctcgac

SEQ ID NO: 1485743 - DNA, 15 bp, Homo sapiens
agggccgctgctcga

SEQ ID NO: 1485744 - DNA, 15 bp, Homo sapiens
cagggccgctgctcg

SEQ ID NO: 1485745 - DNA, 15 bp, Homo sapiens
gcagggccgctgctc

SEQ ID NO: 1485746 - DNA, 15 bp, Homo sapiens
ggcagggccgctgct

SEQ ID NO: 1485747 - DNA, 15 bp, Homo sapiens
tggcagggccgctgc

SEQ ID NO: 1485748 - DNA, 15 bp, Homo sapiens
ctggcagggccgctg

SEQ ID NO: 1485749 - DNA, 15 bp, Homo sapiens
gctggcagggccgct

SEQ ID NO: 1485750 - DNA, 15 bp, Homo sapiens
cgctggcagggccgc

SEQ ID NO: 1485751 - DNA, 15 bp, Homo sapiens
gcgctggcagggccg

SEQ ID NO: 1485752 - DNA, 15 bp, Homo sapiens
cgcgctggcagggcc

SEQ ID NO: 1485753 - DNA, 15 bp, Homo sapiens
gcgcgctggcagggc

SEQ ID NO: 1485754 - DNA, 15 bp, Homo sapiens
ggcgcgctggcaggg

SEQ ID NO: 1485755 - DNA, 15 bp, Homo sapiens
gggcgcgctggcagg

SEQ ID NO: 1485756 - DNA, 15 bp, Homo sapiens
agggcgcgctggcag

SEQ ID NO: 1485757 - DNA, 15 bp, Homo sapiens
gagggcgcgctggca

SEQ ID NO: 1485758 - DNA, 15 bp, Homo sapiens
ggagggcgcgctggc

SEQ ID NO: 1485759 - DNA, 15 bp, Homo sapiens
tggagggcgcgctgg

SEQ ID NO: 1485760 - DNA, 15 bp, Homo sapiens
gtggagggcgcgctg

SEQ ID NO: 1485761 - DNA, 15 bp, Homo sapiens
ggtggagggcgcgct

SEQ ID NO: 1485762 - DNA, 15 bp, Homo sapiens
aggtggagggcgcgc

SEQ ID NO: 1485763 - DNA, 15 bp, Homo sapiens
caggtggagggcgcg

SEQ ID NO: 1485764 - DNA, 15 bp, Homo sapiens
gcaggtggagggcgc

SEQ ID NO: 1485765 - DNA, 15 bp, Homo sapiens
tgcaggtggagggcg

SEQ ID NO: 1485766 - DNA, 15 bp, Homo sapiens
ctgcaggtggagggc

SEQ ID NO: 1485767 - DNA, 15 bp, Homo sapiens
gctgcaggtggaggg

SEQ ID NO: 1485768 - DNA, 15 bp, Homo sapiens
agctgcaggtggagg

SEQ ID NO: 1485769 - DNA, 15 bp, Homo sapiens
aagctgcaggtggag

SEQ ID NO: 1485770 - DNA, 15 bp, Homo sapiens
gaagctgcaggtgga

SEQ ID NO: 1485771 - DNA, 15 bp, Homo sapiens
tgaagctgcaggtgg

SEQ ID NO: 1485772 - DNA, 15 bp, Homo sapiens
gtgaagctgcaggtg

SEQ ID NO: 1485773 - DNA, 15 bp, Homo sapiens
ggtgaagctgcaggt

SEQ ID NO: 1485774 - DNA, 15 bp, Homo sapiens
aggtgaagctgcagg

SEQ ID NO: 1485775 - DNA, 15 bp, Homo sapiens
taggtgaagctgcag

SEQ ID NO: 1485776 - DNA, 15 bp, Homo sapiens
ataggtgaagctgca

SEQ ID NO: 1485777 - DNA, 15 bp, Homo sapiens
gataggtgaagctgc

SEQ ID NO: 1485778 - DNA, 15 bp, Homo sapiens
ggataggtgaagctg

SEQ ID NO: 1485779 - DNA, 15 bp, Homo sapiens
cggataggtgaagct

SEQ ID NO: 1485780 - DNA, 15 bp, Homo sapiens
tcggataggtgaagc

SEQ ID NO: 1485781 - DNA, 15 bp, Homo sapiens
atcggataggtgaag

SEQ ID NO: 1485782 - DNA, 15 bp, Homo sapiens
gatcggataggtgaa

SEQ ID NO: 1485783 - DNA, 15 bp, Homo sapiens
ggatcggataggtga

SEQ ID NO: 1485784 - DNA, 15 bp, Homo sapiens
cggatcggataggtg

SEQ ID NO: 1485785 - DNA, 15 bp, Homo sapiens
ccggatcggataggt

SEQ ID NO: 1485786 - DNA, 15 bp, Homo sapiens
cccggatcggatagg

SEQ ID NO: 1485787 - DNA, 15 bp, Homo sapiens
gcccggatcggatag

SEQ ID NO: 1485788 - DNA, 15 bp, Homo sapiens
ggcccggatcggata

SEQ ID NO: 1485789 - DNA, 15 bp, Homo sapiens
cggcccggatcggat

SEQ ID NO: 1485790 - DNA, 15 bp, Homo sapiens
ccggcccggatcgga

SEQ ID NO: 1485791 - DNA, 15 bp, Homo sapiens
cccggcccggatcgg

SEQ ID NO: 1485792 - DNA, 15 bp, Homo sapiens
tcccggcccggatcg

SEQ ID NO: 1485793 - DNA, 15 bp, Homo sapiens
ttcccggcccggatc

SEQ ID NO: 1485794 - DNA, 15 bp, Homo sapiens
gttcccggcccggat

SEQ ID NO: 1485795 - DNA, 15 bp, Homo sapiens
cgttcccggcccgga

SEQ ID NO: 1485796 - DNA, 15 bp, Homo sapiens
tcgttcccggcccgg

SEQ ID NO: 1485797 - DNA, 15 bp, Homo sapiens
gtcgttcccggcccg

SEQ ID NO: 1485798 - DNA, 15 bp, Homo sapiens
ggtcgttcccggccc

SEQ ID NO: 1485799 - DNA, 15 bp, Homo sapiens
gggtcgttcccggcc

SEQ ID NO: 1485800 - DNA, 15 bp, Homo sapiens
cgggtcgttcccggc

SEQ ID NO: 1485801 - DNA, 15 bp, Homo sapiens
ccgggtcgttcccgg

SEQ ID NO: 1485802 - DNA, 15 bp, Homo sapiens
cccgggtcgttcccg

SEQ ID NO: 1485803 - DNA, 15 bp, Homo sapiens
gcccgggtcgttccc

SEQ ID NO: 1485804 - DNA, 15 bp, Homo sapiens
cgcccgggtcgttcc

SEQ ID NO: 1485805 - DNA, 15 bp, Homo sapiens
acgcccgggtcgttc

SEQ ID NO: 1485806 - DNA, 15 bp, Homo sapiens
cacgcccgggtcgtt

SEQ ID NO: 1485807 - DNA, 15 bp, Homo sapiens
ccacgcccgggtcgt

SEQ ID NO: 1485808 - DNA, 15 bp, Homo sapiens
gccacgcccgggtcg

SEQ ID NO: 1485809 - DNA, 15 bp, Homo sapiens
cgccacgcccgggtc

SEQ ID NO: 1485810 - DNA, 15 bp, Homo sapiens
gcgccacgcccgggt

SEQ ID NO: 1485811 - DNA, 15 bp, Homo sapiens
ggcgccacgcccggg

SEQ ID NO: 1485812 - DNA, 15 bp, Homo sapiens
cggcgccacgcccgg

SEQ ID NO: 1485813 - DNA, 15 bp, Homo sapiens
ccggcgccacgcccg

SEQ ID NO: 1485814 - DNA, 15 bp, Homo sapiens
cccggcgccacgccc

SEQ ID NO: 1485815 - DNA, 15 bp, Homo sapiens
gcccggcgccacgcc

SEQ ID NO: 1485816 - DNA, 15 bp, Homo sapiens
cgcccggcgccacgc

SEQ ID NO: 1485817 - DNA, 15 bp, Homo sapiens
ccgcccggcgccacg

SEQ ID NO: 1485818 - DNA, 15 bp, Homo sapiens
gccgcccggcgccac

SEQ ID NO: 1485819 - DNA, 15 bp, Homo sapiens
tgccgcccggcgcca

SEQ ID NO: 1485820 - DNA, 15 bp, Homo sapiens
gtgccgcccggcgcc

SEQ ID NO: 1485821 - DNA, 15 bp, Homo sapiens
cgtgccgcccggcgc

SEQ ID NO: 1485822 - DNA, 15 bp, Homo sapiens
ccgtgccgcccggcg

SEQ ID NO: 1485823 - DNA, 15 bp, Homo sapiens
cccgtgccgcccggc

SEQ ID NO: 1485824 - DNA, 15 bp, Homo sapiens
gcccgtgccgcccgg

SEQ ID NO: 1485825 - DNA, 15 bp, Homo sapiens
cgcccgtgccgcccg

SEQ ID NO: 1485826 - DNA, 15 bp, Homo sapiens
ccgcccgtgccgccc

SEQ ID NO: 1485827 - DNA, 15 bp, Homo sapiens
tccgcccgtgccgcc

SEQ ID NO: 1485828 - DNA, 15 bp, Homo sapiens
ctccgcccgtgccgc

SEQ ID NO: 1485829 - DNA, 15 bp, Homo sapiens
cctccgcccgtgccg

SEQ ID NO: 1485830 - DNA, 15 bp, Homo sapiens
gcctccgcccgtgcc

SEQ ID NO: 1485831 - DNA, 15 bp, Homo sapiens
ggcctccgcccgtgc

SEQ ID NO: 1485832 - DNA, 15 bp, Homo sapiens
aggcctccgcccgtg

SEQ ID NO: 1485833 - DNA, 15 bp, Homo sapiens
gaggcctccgcccgt

SEQ ID NO: 1485834 - DNA, 15 bp, Homo sapiens
ggaggcctccgcccg

SEQ ID NO: 1485835 - DNA, 15 bp, Homo sapiens
aggaggcctccgccc

SEQ ID NO: 1485836 - DNA, 15 bp, Homo sapiens
gaggaggcctccgcc

SEQ ID NO: 1485837 - DNA, 15 bp, Homo sapiens
agaggaggcctccgc

SEQ ID NO: 1485838 - DNA, 15 bp, Homo sapiens
tagaggaggcctccg

SEQ ID NO: 1485839 - DNA, 15 bp, Homo sapiens
atagaggaggcctcc

SEQ ID NO: 1485840 - DNA, 15 bp, Homo sapiens
catagaggaggcctc

SEQ ID NO: 1485841 - DNA, 15 bp, Homo sapiens
ccatagaggaggcct

SEQ ID NO: 1485842 - DNA, 15 bp, Homo sapiens
gccatagaggaggcc

SEQ ID NO: 1485843 - DNA, 15 bp, Homo sapiens
tgccatagaggaggc

SEQ ID NO: 1485844 - DNA, 15 bp, Homo sapiens
ctgccatagaggagg

SEQ ID NO: 1485845 - DNA, 15 bp, Homo sapiens
cctgccatagaggag

SEQ ID NO: 1485846 - DNA, 15 bp, Homo sapiens
ccctgccatagagga

SEQ ID NO: 1485847 - DNA, 15 bp, Homo sapiens
tccctgccatagagg

SEQ ID NO: 1485848 - DNA, 15 bp, Homo sapiens
ctccctgccatagag

SEQ ID NO: 1485849 - DNA, 15 bp, Homo sapiens
actccctgccataga

SEQ ID NO: 1485850 - DNA, 15 bp, Homo sapiens
gactccctgccatag

SEQ ID NO: 1485851 - DNA, 15 bp, Homo sapiens
ggactccctgccata

SEQ ID NO: 1485852 - DNA, 15 bp, Homo sapiens
cggactccctgccat

SEQ ID NO: 1485853 - DNA, 15 bp, Homo sapiens
gcggactccctgcca

SEQ ID NO: 1485854 - DNA, 15 bp, Homo sapiens
agcggactccctgcc

SEQ ID NO: 1485855 - DNA, 15 bp, Homo sapiens
gagcggactccctgc

SEQ ID NO: 1485856 - DNA, 15 bp, Homo sapiens
ggagcggactccctg

SEQ ID NO: 1485857 - DNA, 15 bp, Homo sapiens
gggagcggactccct

SEQ ID NO: 1485858 - DNA, 15 bp, Homo sapiens
ggggagcggactccc

SEQ ID NO: 1485859 - DNA, 15 bp, Homo sapiens
gggggagcggactcc

SEQ ID NO: 1485860 - DNA, 15 bp, Homo sapiens
agggggagcggactc

SEQ ID NO: 1485861 - DNA, 15 bp, Homo sapiens
gagggggagcggact

SEQ ID NO: 1485862 - DNA, 15 bp, Homo sapiens
ggagggggagcggac

SEQ ID NO: 1485863 - DNA, 15 bp, Homo sapiens
cggagggggagcgga

SEQ ID NO: 1485864 - DNA, 15 bp, Homo sapiens
tcggagggggagcgg

SEQ ID NO: 1485865 - DNA, 15 bp, Homo sapiens
gtcggagggggagcg

SEQ ID NO: 1485866 - DNA, 15 bp, Homo sapiens
gtactcgctgccagg

SEQ ID NO: 1485867 - DNA, 15 bp, Homo sapiens
cgtactcgctgccag

SEQ ID NO: 1485868 - DNA, 15 bp, Homo sapiens
ccgtactcgctgcca

SEQ ID NO: 1485869 - DNA, 15 bp, Homo sapiens
gccgtactcgctgcc

SEQ ID NO: 1485870 - DNA, 15 bp, Homo sapiens
tgccgtactcgctgc

SEQ ID NO: 1485871 - DNA, 15 bp, Homo sapiens
ctgccgtactcgctg

SEQ ID NO: 1485872 - DNA, 15 bp, Homo sapiens
gctgccgtactcgct

SEQ ID NO: 1485873 - DNA, 15 bp, Homo sapiens
ggctgccgtactcgc

SEQ ID NO: 1485874 - DNA, 15 bp, Homo sapiens
gggctgccgtactcg

SEQ ID NO: 1485875 - DNA, 15 bp, Homo sapiens
cgggctgccgtactc

SEQ ID NO: 1485876 - DNA, 15 bp, Homo sapiens
acgggctgccgtact

SEQ ID NO: 1485877 - DNA, 15 bp, Homo sapiens
gacgggctgccgtac

SEQ ID NO: 1485878 - DNA, 15 bp, Homo sapiens
cgacgggctgccgta

SEQ ID NO: 1485879 - DNA, 15 bp, Homo sapiens
ccgacgggctgccgt

SEQ ID NO: 1485880 - DNA, 15 bp, Homo sapiens
accgacgggctgccg

SEQ ID NO: 1485881 - DNA, 15 bp, Homo sapiens
gaccgacgggctgcc

SEQ ID NO: 1485882 - DNA, 15 bp, Homo sapiens
tgaccgacgggctgc

SEQ ID NO: 1485883 - DNA, 15 bp, Homo sapiens
atgaccgacgggctg

SEQ ID NO: 1485884 - DNA, 15 bp, Homo sapiens
gatgaccgacgggct

SEQ ID NO: 1485885 - DNA, 15 bp, Homo sapiens
tgatgaccgacgggc

SEQ ID NO: 1485886 - DNA, 15 bp, Homo sapiens
ctgatgaccgacggg

SEQ ID NO: 1485887 - DNA, 15 bp, Homo sapiens
gctgatgaccgacgg

SEQ ID NO: 1485888 - DNA, 15 bp, Homo sapiens
cgctgatgaccgacg

SEQ ID NO: 1485889 - DNA, 15 bp, Homo sapiens
acgctgatgaccgac

SEQ ID NO: 1485890 - DNA, 15 bp, Homo sapiens
gacgctgatgaccga

SEQ ID NO: 1485891 - DNA, 15 bp, Homo sapiens
tgacgctgatgaccg

SEQ ID NO: 1485892 - DNA, 15 bp, Homo sapiens
ctgacgctgatgacc

SEQ ID NO: 1485893 - DNA, 15 bp, Homo sapiens
gctgacgctgatgac

SEQ ID NO: 1485894 - DNA, 15 bp, Homo sapiens
tgctgacgctgatga

SEQ ID NO: 1485895 - DNA, 15 bp, Homo sapiens
ttgctgacgctgatg

SEQ ID NO: 1485896 - DNA, 15 bp, Homo sapiens
tttgctgacgctgat

SEQ ID NO: 1485897 - DNA, 15 bp, Homo sapiens
ctttgctgacgctga

SEQ ID NO: 1485898 - DNA, 15 bp, Homo sapiens
cctttgctgacgctg

SEQ ID NO: 1485899 - DNA, 15 bp, Homo sapiens
gcctttgctgacgct

SEQ ID NO: 1485900 - DNA, 15 bp, Homo sapiens
tgcctttgctgacgc

SEQ ID NO: 1485901 - DNA, 15 bp, Homo sapiens
ctgcctttgctgacg

SEQ ID NO: 1485902 - DNA, 15 bp, Homo sapiens
gctgcctttgctgac

SEQ ID NO: 1485903 - DNA, 15 bp, Homo sapiens
ggctgcctttgctga

SEQ ID NO: 1485904 - DNA, 15 bp, Homo sapiens
gggctgcctttgctg

SEQ ID NO: 1485905 - DNA, 15 bp, Homo sapiens
agggctgcctttgct

SEQ ID NO: 1485906 - DNA, 15 bp, Homo sapiens
cagggctgcctttgc

SEQ ID NO: 1485907 - DNA, 15 bp, Homo sapiens
tcagggctgcctttg

SEQ ID NO: 1485908 - DNA, 15 bp, Homo sapiens
gtcagggctgccttt

SEQ ID NO: 1485909 - DNA, 15 bp, Homo sapiens
cgtcagggctgcctt

SEQ ID NO: 1485910 - DNA, 15 bp, Homo sapiens
ccgtcagggctgcct

SEQ ID NO: 1485911 - DNA, 15 bp, Homo sapiens
gccgtcagggctgcc

SEQ ID NO: 1485912 - DNA, 15 bp, Homo sapiens
tgccgtcagggctgc

SEQ ID NO: 1485913 - DNA, 15 bp, Homo sapiens
ctgccgtcagggctg

SEQ ID NO: 1485914 - DNA, 15 bp, Homo sapiens
gctgccgtcagggct

SEQ ID NO: 1485915 - DNA, 15 bp, Homo sapiens
ggctgccgtcagggc

SEQ ID NO: 1485916 - DNA, 15 bp, Homo sapiens
tggctgccgtcaggg

SEQ ID NO: 1485917 - DNA, 15 bp, Homo sapiens
gtggctgccgtcagg

SEQ ID NO: 1485918 - DNA, 15 bp, Homo sapiens
ggtggctgccgtcag

SEQ ID NO: 1485919 - DNA, 15 bp, Homo sapiens
gggtggctgccgtca

SEQ ID NO: 1485920 - DNA, 15 bp, Homo sapiens
gtaattgggccccgg

SEQ ID NO: 1485921 - DNA, 15 bp, Homo sapiens
ggtaattgggccccg

SEQ ID NO: 1485922 - DNA, 15 bp, Homo sapiens
gggtaattgggcccc

SEQ ID NO: 1485923 - DNA, 15 bp, Homo sapiens
tgggtaattgggccc

SEQ ID NO: 1485924 - DNA, 15 bp, Homo sapiens
atgggtaattgggcc

SEQ ID NO: 1485925 - DNA, 15 bp, Homo sapiens
gatgggtaattgggc

SEQ ID NO: 1485926 - DNA, 15 bp, Homo sapiens
ggatgggtaattggg

SEQ ID NO: 1485927 - DNA, 15 bp, Homo sapiens
aggatgggtaattgg

SEQ ID NO: 1485928 - DNA, 15 bp, Homo sapiens
aaggatgggtaattg

SEQ ID NO: 1485929 - DNA, 15 bp, Homo sapiens
gaaggatgggtaatt

SEQ ID NO: 1485930 - DNA, 15 bp, Homo sapiens
ggaaggatgggtaat

SEQ ID NO: 1485931 - DNA, 15 bp, Homo sapiens
aggaaggatgggtaa

SEQ ID NO: 1485932 - DNA, 15 bp, Homo sapiens
caggaaggatgggta

SEQ ID NO: 1485933 - DNA, 15 bp, Homo sapiens
gcaggaaggatgggt

SEQ ID NO: 1485934 - DNA, 15 bp, Homo sapiens
ggcaggaaggatggg

SEQ ID NO: 1485935 - DNA, 15 bp, Homo sapiens
gggcaggaaggatgg

SEQ ID NO: 1485936 - DNA, 15 bp, Homo sapiens
cgggcaggaaggatg

SEQ ID NO: 1485937 - DNA, 15 bp, Homo sapiens
tcgggcaggaaggat

SEQ ID NO: 1485938 - DNA, 15 bp, Homo sapiens
atcgggcaggaagga

SEQ ID NO: 1485939 - DNA, 15 bp, Homo sapiens
gatcgggcaggaagg

SEQ ID NO: 1485940 - DNA, 15 bp, Homo sapiens
tgatcgggcaggaag

SEQ ID NO: 1485941 - DNA, 15 bp, Homo sapiens
ctgatcgggcaggaa

SEQ ID NO: 1485942 - DNA, 15 bp, Homo sapiens
tctgatcgggcagga

SEQ ID NO: 1485943 - DNA, 15 bp, Homo sapiens
atctgatcgggcagg

SEQ ID NO: 1485944 - DNA, 15 bp, Homo sapiens
catctgatcgggcag

SEQ ID NO: 1485945 - DNA, 15 bp, Homo sapiens
gcatctgatcgggca

SEQ ID NO: 1485946 - DNA, 15 bp, Homo sapiens
tgcatctgatcgggc

SEQ ID NO: 1485947 - DNA, 15 bp, Homo sapiens
ctgcatctgatcggg

SEQ ID NO: 1485948 - DNA, 15 bp, Homo sapiens
gctgcatctgatcgg

SEQ ID NO: 1485949 - DNA, 15 bp, Homo sapiens
ggctgcatctgatcg

SEQ ID NO: 1485950 - DNA, 15 bp, Homo sapiens
cggctgcatctgatc

SEQ ID NO: 1485951 - DNA, 15 bp, Homo sapiens
gcggctgcatctgat

SEQ ID NO: 1485952 - DNA, 15 bp, Homo sapiens
tgcggctgcatctga

SEQ ID NO: 1485953 - DNA, 15 bp, Homo sapiens
ttgcggctgcatctg

SEQ ID NO: 1485954 - DNA, 15 bp, Homo sapiens
cttgcggctgcatct

SEQ ID NO: 1485955 - DNA, 15 bp, Homo sapiens
acttgcggctgcatc

SEQ ID NO: 1485956 - DNA, 15 bp, Homo sapiens
gacttgcggctgcat

SEQ ID NO: 1485957 - DNA, 15 bp, Homo sapiens
ggacttgcggctgca

SEQ ID NO: 1485958 - DNA, 15 bp, Homo sapiens
gggacttgcggctgc

SEQ ID NO: 1485959 - DNA, 15 bp, Homo sapiens
cgggacttgcggctg

SEQ ID NO: 1485960 - DNA, 15 bp, Homo sapiens
gcgggacttgcggct

SEQ ID NO: 1485961 - DNA, 15 bp, Homo sapiens
ggcgggacttgcggc

SEQ ID NO: 1485962 - DNA, 15 bp, Homo sapiens
cggcgggacttgcgg

SEQ ID NO: 1485963 - DNA, 15 bp, Homo sapiens
gcggcgggacttgcg

SEQ ID NO: 1485964 - DNA, 15 bp, Homo sapiens
agcggcgggacttgc

SEQ ID NO: 1485965 - DNA, 15 bp, Homo sapiens
gagcggcgggacttg

SEQ ID NO: 1485966 - DNA, 15 bp, Homo sapiens
ggagcggcgggactt

SEQ ID NO: 1485967 - DNA, 15 bp, Homo sapiens
tggagcggcgggact

SEQ ID NO: 1485968 - DNA, 15 bp, Homo sapiens
atggagcggcgggac

SEQ ID NO: 1485969 - DNA, 15 bp, Homo sapiens
aatggagcggcggga

SEQ ID NO: 1485970 - DNA, 15 bp, Homo sapiens
taatggagcggcggg

SEQ ID NO: 1485971 - DNA, 15 bp, Homo sapiens
gtaatggagcggcgg

SEQ ID NO: 1485972 - DNA, 15 bp, Homo sapiens
ggtaatggagcggcg

SEQ ID NO: 1485973 - DNA, 15 bp, Homo sapiens
tggtaatggagcggc

SEQ ID NO: 1485974 - DNA, 15 bp, Homo sapiens
ttggtaatggagcgg

SEQ ID NO: 1485975 - DNA, 15 bp, Homo sapiens
cttggtaatggagcg

SEQ ID NO: 1485976 - DNA, 15 bp, Homo sapiens
ccttggtaatggagc

SEQ ID NO: 1485977 - DNA, 15 bp, Homo sapiens
accttggtaatggag

SEQ ID NO: 1485978 - DNA, 15 bp, Homo sapiens
gaccttggtaatgga

SEQ ID NO: 1485979 - DNA, 15 bp, Homo sapiens
tgaccttggtaatgg

SEQ ID NO: 1485980 - DNA, 15 bp, Homo sapiens
ctgaccttggtaatg

SEQ ID NO: 1485981 - DNA, 15 bp, Homo sapiens
actgaccttggtaat

SEQ ID NO: 1485982 - DNA, 15 bp, Homo sapiens
gactgaccttggtaa

SEQ ID NO: 1485983 - DNA, 15 bp, Homo sapiens
ggactgaccttggta

SEQ ID NO: 1485984 - DNA, 15 bp, Homo sapiens
gggactgaccttggt

SEQ ID NO: 1485985 - DNA, 15 bp, Homo sapiens
cgggactgaccttgg

SEQ ID NO: 1485986 - DNA, 15 bp, Homo sapiens
ccgggactgaccttg

SEQ ID NO: 1485987 - DNA, 15 bp, Homo sapiens
cccgggactgacctt

SEQ ID NO: 1485988 - DNA, 15 bp, Homo sapiens
ccccgggactgacct

SEQ ID NO: 1485989 - DNA, 15 bp, Homo sapiens
tccccgggactgacc

SEQ ID NO: 1485990 - DNA, 15 bp, Homo sapiens
atccccgggactgac

SEQ ID NO: 1485991 - DNA, 15 bp, Homo sapiens
aatccccgggactga

SEQ ID NO: 1485992 - DNA, 15 bp, Homo sapiens
aaatccccgggactg

SEQ ID NO: 1485993 - DNA, 15 bp, Homo sapiens
caaatccccgggact

SEQ ID NO: 1485994 - DNA, 15 bp, Homo sapiens
acaaatccccgggac

SEQ ID NO: 1485995 - DNA, 15 bp, Homo sapiens
tacaaatccccggga

SEQ ID NO: 1485996 - DNA, 15 bp, Homo sapiens
ctacaaatccccggg

SEQ ID NO: 1485997 - DNA, 15 bp, Homo sapiens
gctacaaatccccgg

SEQ ID NO: 1485998 - DNA, 15 bp, Homo sapiens
agctacaaatccccg

SEQ ID NO: 1485999 - DNA, 15 bp, Homo sapiens
gagctacaaatcccc

SEQ ID NO: 1486000 - DNA, 15 bp, Homo sapiens
cgagctacaaatccc

SEQ ID NO: 1486001 - DNA, 15 bp, Homo sapiens
ccgagctacaaatcc

SEQ ID NO: 1486002 - DNA, 15 bp, Homo sapiens
cccgagctacaaatc

SEQ ID NO: 1486003 - DNA, 15 bp, Homo sapiens
gcccgagctacaaat

SEQ ID NO: 1486004 - DNA, 15 bp, Homo sapiens
agcccgagctacaaa

SEQ ID NO: 1486005 - DNA, 15 bp, Homo sapiens
cagcccgagctacaa

SEQ ID NO: 1486006 - DNA, 15 bp, Homo sapiens
ccagcccgagctaca

SEQ ID NO: 1486007 - DNA, 15 bp, Homo sapiens
cccagcccgagctac

SEQ ID NO: 1486008 - DNA, 15 bp, Homo sapiens
ccccagcccgagcta

SEQ ID NO: 1486009 - DNA, 15 bp, Homo sapiens
tccccagcccgagct

SEQ ID NO: 1486010 - DNA, 15 bp, Homo sapiens
ctccccagcccgagc

SEQ ID NO: 1486011 - DNA, 15 bp, Homo sapiens
gctccccagcccgag

SEQ ID NO: 1486012 - DNA, 15 bp, Homo sapiens
ggctccccagcccga

SEQ ID NO: 1486013 - DNA, 15 bp, Homo sapiens
gggctccccagcccg

SEQ ID NO: 1486014 - DNA, 15 bp, Homo sapiens
agggctccccagccc

SEQ ID NO: 1486015 - DNA, 15 bp, Homo sapiens
cagggctccccagcc

SEQ ID NO: 1486016 - DNA, 15 bp, Homo sapiens
acagggctccccagc

SEQ ID NO: 1486017 - DNA, 15 bp, Homo sapiens
cacagggctccccag

SEQ ID NO: 1486018 - DNA, 15 bp, Homo sapiens
acacagggctcccca

SEQ ID NO: 1486019 - DNA, 15 bp, Homo sapiens
cacacagggctcccc

SEQ ID NO: 1486020 - DNA, 15 bp, Homo sapiens
acacacagggctccc

SEQ ID NO: 1486021 - DNA, 15 bp, Homo sapiens
cacacacagggctcc

SEQ ID NO: 1486022 - DNA, 15 bp, Homo sapiens
gcacacacagggctc

SEQ ID NO: 1486023 - DNA, 15 bp, Homo sapiens
agcacacacagggct

SEQ ID NO: 1486024 - DNA, 15 bp, Homo sapiens
cagcacacacagggc

SEQ ID NO: 1486025 - DNA, 15 bp, Homo sapiens
ttttccggggccacg

SEQ ID NO: 1486026 - DNA, 15 bp, Homo sapiens
cttttccggggccac

SEQ ID NO: 1486027 - DNA, 15 bp, Homo sapiens
ccttttccggggcca

SEQ ID NO: 1486028 - DNA, 15 bp, Homo sapiens
tccttttccggggcc

SEQ ID NO: 1486029 - DNA, 15 bp, Homo sapiens
gtccttttccggggc

SEQ ID NO: 1486030 - DNA, 15 bp, Homo sapiens
ggtccttttccgggg

SEQ ID NO: 1486031 - DNA, 15 bp, Homo sapiens
cggtccttttccggg

SEQ ID NO: 1486032 - DNA, 15 bp, Homo sapiens
gcggtccttttccgg

SEQ ID NO: 1486033 - DNA, 15 bp, Homo sapiens
ggcggtccttttccg

SEQ ID NO: 1486034 - DNA, 15 bp, Homo sapiens
tggcggtccttttcc

SEQ ID NO: 1486035 - DNA, 15 bp, Homo sapiens
gtggcggtccttttc

SEQ ID NO: 1486036 - DNA, 15 bp, Homo sapiens
ggtggcggtcctttt

SEQ ID NO: 1486037 - DNA, 15 bp, Homo sapiens
gggtggcggtccttt

SEQ ID NO: 1486038 - DNA, 15 bp, Homo sapiens
tgggtggcggtcctt

SEQ ID NO: 1486039 - DNA, 15 bp, Homo sapiens
gtgggtggcggtcct

SEQ ID NO: 1486040 - DNA, 15 bp, Homo sapiens
tgtgggtggcggtcc

SEQ ID NO: 1486041 - DNA, 15 bp, Homo sapiens
gtgtgggtggcggtc

SEQ ID NO: 1486042 - DNA, 15 bp, Homo sapiens
agtgtgggtggcggt

SEQ ID NO: 1486043 - DNA, 15 bp, Homo sapiens
aagtgtgggtggcgg

SEQ ID NO: 1486044 - DNA, 15 bp, Homo sapiens
caagtgtgggtggcg

SEQ ID NO: 1486045 - DNA, 15 bp, Homo sapiens
acaagtgtgggtggc

SEQ ID NO: 1486046 - DNA, 15 bp, Homo sapiens
cacaagtgtgggtgg

SEQ ID NO: 1486047 - DNA, 15 bp, Homo sapiens
tcacaagtgtgggtg

SEQ ID NO: 1486048 - DNA, 15 bp, Homo sapiens
atcacaagtgtgggt

SEQ ID NO: 1486049 - DNA, 15 bp, Homo sapiens
aatcacaagtgtggg

SEQ ID NO: 1486050 - DNA, 15 bp, Homo sapiens
taatcacaagtgtgg

SEQ ID NO: 1486051 - DNA, 15 bp, Homo sapiens
aggcactgaggagtg

SEQ ID NO: 1486052 - DNA, 15 bp, Homo sapiens
gaggcactgaggagt

SEQ ID NO: 1486053 - DNA, 15 bp, Homo sapiens
ggaggcactgaggag

SEQ ID NO: 1486054 - DNA, 15 bp, Homo sapiens
aggaggcactgagga

SEQ ID NO: 1486055 - DNA, 15 bp, Homo sapiens
aaggaggcactgagg

SEQ ID NO: 1486056 - DNA, 15 bp, Homo sapiens
caaggaggcactgag

SEQ ID NO: 1486057 - DNA, 15 bp, Homo sapiens
tcaaggaggcactga

SEQ ID NO: 1486058 - DNA, 15 bp, Homo sapiens
gtcaaggaggcactg

SEQ ID NO: 1486059 - DNA, 15 bp, Homo sapiens
agtcaaggaggcact

SEQ ID NO: 1486060 - DNA, 15 bp, Homo sapiens
aagtcaaggaggcac

SEQ ID NO: 1486061 - DNA, 15 bp, Homo sapiens
gaagtcaaggaggca

SEQ ID NO: 1486062 - DNA, 15 bp, Homo sapiens
ggaagtcaaggaggc

SEQ ID NO: 1486063 - DNA, 15 bp, Homo sapiens
gggaagtcaaggagg

SEQ ID NO: 1486064 - DNA, 15 bp, Homo sapiens
tgggaagtcaaggag

SEQ ID NO: 1486065 - DNA, 15 bp, Homo sapiens
ctgggaagtcaagga

SEQ ID NO: 1486066 - DNA, 15 bp, Homo sapiens
cctgggaagtcaagg

SEQ ID NO: 1486067 - DNA, 15 bp, Homo sapiens
acctgggaagtcaag

SEQ ID NO: 1486068 - DNA, 15 bp, Homo sapiens
aacctgggaagtcaa

SEQ ID NO: 1486069 - DNA, 15 bp, Homo sapiens
taacctgggaagtca

SEQ ID NO: 1486070 - DNA, 15 bp, Homo sapiens
ctaacctgggaagtc

SEQ ID NO: 1486071 - DNA, 15 bp, Homo sapiens
gctaacctgggaagt

SEQ ID NO: 1486072 - DNA, 15 bp, Homo sapiens
agctaacctgggaag

SEQ ID NO: 1486073 - DNA, 15 bp, Homo sapiens
aagctaacctgggaa

SEQ ID NO: 1486074 - DNA, 15 bp, Homo sapiens
gaagctaacctggga

SEQ ID NO: 1486075 - DNA, 15 bp, Homo sapiens
ggaagctaacctggg

SEQ ID NO: 1486076 - DNA, 15 bp, Homo sapiens
tggaagctaacctgg

SEQ ID NO: 1486077 - DNA, 15 bp, Homo sapiens
ctggaagctaacctg

SEQ ID NO: 1486078 - DNA, 15 bp, Homo sapiens
gctggaagctaacct

SEQ ID NO: 1486079 - DNA, 15 bp, Homo sapiens
ccaaggaggcactga

SEQ ID NO: 1486080 - DNA, 15 bp, Homo sapiens
gccaaggaggcactg

SEQ ID NO: 1486081 - DNA, 15 bp, Homo sapiens
agccaaggaggcact

SEQ ID NO: 1486082 - DNA, 15 bp, Homo sapiens
aagccaaggaggcac

SEQ ID NO: 1486083 - DNA, 15 bp, Homo sapiens
gaagccaaggaggca

SEQ ID NO: 1486084 - DNA, 15 bp, Homo sapiens
ggaagccaaggaggc

SEQ ID NO: 1486085 - DNA, 15 bp, Homo sapiens
gggaagccaaggagg

SEQ ID NO: 1486086 - DNA, 15 bp, Homo sapiens
tgggaagccaaggag

SEQ ID NO: 1486087 - DNA, 15 bp, Homo sapiens
ctgggaagccaagga

SEQ ID NO: 1486088 - DNA, 15 bp, Homo sapiens
cctgggaagccaagg

SEQ ID NO: 1486089 - DNA, 15 bp, Homo sapiens
ccctgggaagccaag

SEQ ID NO: 1486090 - DNA, 15 bp, Homo sapiens
gccctgggaagccaa

SEQ ID NO: 1486091 - DNA, 15 bp, Homo sapiens
tgccctgggaagcca

SEQ ID NO: 1486092 - DNA, 15 bp, Homo sapiens
ctgccctgggaagcc

SEQ ID NO: 1486093 - DNA, 15 bp, Homo sapiens
actgccctgggaagc

SEQ ID NO: 1486094 - DNA, 15 bp, Homo sapiens
gactgccctgggaag

SEQ ID NO: 1486095 - DNA, 15 bp, Homo sapiens
agactgccctgggaa

SEQ ID NO: 1486096 - DNA, 15 bp, Homo sapiens
tagactgccctggga

SEQ ID NO: 1486097 - DNA, 15 bp, Homo sapiens
atagactgccctggg

SEQ ID NO: 1486098 - DNA, 15 bp, Homo sapiens
gatagactgccctgg

SEQ ID NO: 1486099 - DNA, 15 bp, Homo sapiens
cgatagactgccctg

SEQ ID NO: 1486100 - DNA, 15 bp, Homo sapiens
gcgatagactgccct

SEQ ID NO: 1486101 - DNA, 15 bp, Homo sapiens
ggcgatagactgccc

SEQ ID NO: 1486102 - DNA, 15 bp, Homo sapiens
aggcgatagactgcc

SEQ ID NO: 1486103 - DNA, 15 bp, Homo sapiens
aaggcgatagactgc

SEQ ID NO: 1486104 - DNA, 15 bp, Homo sapiens
caaggcgatagactg

SEQ ID NO: 1486105 - DNA, 15 bp, Homo sapiens
tcaaggcgatagact

SEQ ID NO: 1486106 - DNA, 15 bp, Homo sapiens
atcaaggcgatagac

SEQ ID NO: 1486107 - DNA, 15 bp, Homo sapiens
gatcaaggcgataga

SEQ ID NO: 1486108 - DNA, 15 bp, Homo sapiens
agatcaaggcgatag

SEQ ID NO: 1486109 - DNA, 15 bp, Homo sapiens
gagatcaaggcgata

SEQ ID NO: 1486110 - DNA, 15 bp, Homo sapiens
ggagatcaaggcgat

SEQ ID NO: 1486111 - DNA, 15 bp, Homo sapiens
cggagatcaaggcga

SEQ ID NO: 1486112 - DNA, 15 bp, Homo sapiens
ccggagatcaaggcg

SEQ ID NO: 1486113 - DNA, 15 bp, Homo sapiens
cccggagatcaaggc

SEQ ID NO: 1486114 - DNA, 15 bp, Homo sapiens
tcccggagatcaagg

SEQ ID NO: 1486115 - DNA, 15 bp, Homo sapiens
atcccggagatcaag

SEQ ID NO: 1486116 - DNA, 15 bp, Homo sapiens
gatcccggagatcaa

SEQ ID NO: 1486117 - DNA, 15 bp, Homo sapiens
tgatcccggagatca

SEQ ID NO: 1486118 - DNA, 15 bp, Homo sapiens
gtgatcccggagatc

SEQ ID NO: 1486119 - DNA, 15 bp, Homo sapiens
agtgatcccggagat

SEQ ID NO: 1486120 - DNA, 15 bp, Homo sapiens
cagtgatcccggaga

SEQ ID NO: 1486121 - DNA, 15 bp, Homo sapiens
ccagtgatcccggag

SEQ ID NO: 1486122 - DNA, 15 bp, Homo sapiens
tccagtgatcccgga

SEQ ID NO: 1486123 - DNA, 15 bp, Homo sapiens
ctccagtgatcccgg

SEQ ID NO: 1486124 - DNA, 15 bp, Homo sapiens
tctccagtgatcccg

SEQ ID NO: 1486125 - DNA, 15 bp, Homo sapiens
ctctccagtgatccc

SEQ ID NO: 1486126 - DNA, 15 bp, Homo sapiens
tctctccagtgatcc

SEQ ID NO: 1486127 - DNA, 15 bp, Homo sapiens
ttctctccagtgatc

SEQ ID NO: 1486128 - DNA, 15 bp, Homo sapiens
gttctctccagtgat

SEQ ID NO: 1486129 - DNA, 15 bp, Homo sapiens
tgttctctccagtga

SEQ ID NO: 1486130 - DNA, 15 bp, Homo sapiens
ctgttctctccagtg

SEQ ID NO: 1486131 - DNA, 15 bp, Homo sapiens
gctgttctctccagt

SEQ ID NO: 1486132 - DNA, 15 bp, Homo sapiens
tgctgttctctccag

SEQ ID NO: 1486133 - DNA, 15 bp, Homo sapiens
ttgctgttctctcca

SEQ ID NO: 1486134 - DNA, 15 bp, Homo sapiens
tttgctgttctctcc

SEQ ID NO: 1486135 - DNA, 15 bp, Homo sapiens
gtttgctgttctctc

SEQ ID NO: 1486136 - DNA, 15 bp, Homo sapiens
ggtttgctgttctct

SEQ ID NO: 1486137 - DNA, 15 bp, Homo sapiens
cggtttgctgttctc

SEQ ID NO: 1486138 - DNA, 15 bp, Homo sapiens
ccggtttgctgttct

SEQ ID NO: 1486139 - DNA, 15 bp, Homo sapiens
gccggtttgctgttc

SEQ ID NO: 1486140 - DNA, 15 bp, Homo sapiens
cgccggtttgctgtt

SEQ ID NO: 1486141 - DNA, 15 bp, Homo sapiens
gcgccggtttgctgt

SEQ ID NO: 1486142 - DNA, 15 bp, Homo sapiens
ggcgccggtttgctg

SEQ ID NO: 1486143 - DNA, 15 bp, Homo sapiens
aggcgccggtttgct

SEQ ID NO: 1486144 - DNA, 15 bp, Homo sapiens
taggcgccggtttgc

SEQ ID NO: 1486145 - DNA, 15 bp, Homo sapiens
gtaggcgccggtttg

SEQ ID NO: 1486146 - DNA, 15 bp, Homo sapiens
agtaggcgccggttt

SEQ ID NO: 1486147 - DNA, 15 bp, Homo sapiens
aagtaggcgccggtt

SEQ ID NO: 1486148 - DNA, 15 bp, Homo sapiens
aaagtaggcgccggt

SEQ ID NO: 1486149 - DNA, 15 bp, Homo sapiens
aaaagtaggcgccgg

SEQ ID NO: 1486150 - DNA, 15 bp, Homo sapiens
gaaaagtaggcgccg

SEQ ID NO: 1486151 - DNA, 15 bp, Homo sapiens
agaaaagtaggcgcc

SEQ ID NO: 1486152 - DNA, 15 bp, Homo sapiens
cagaaaagtaggcgc

SEQ ID NO: 1486153 - DNA, 15 bp, Homo sapiens
gcagaaaagtaggcg

SEQ ID NO: 1486154 - DNA, 15 bp, Homo sapiens
ggcagaaaagtaggc

SEQ ID NO: 1486155 - DNA, 15 bp, Homo sapiens
gggcagaaaagtagg

SEQ ID NO: 1486156 - DNA, 15 bp, Homo sapiens
tgggcagaaaagtag

SEQ ID NO: 1486157 - DNA, 15 bp, Homo sapiens
ctgggcagaaaagta

SEQ ID NO: 1486158 - DNA, 15 bp, Homo sapiens
cctgggcagaaaagt

SEQ ID NO: 1486159 - DNA, 15 bp, Homo sapiens
tcctgggcagaaaag

SEQ ID NO: 1486160 - DNA, 15 bp, Homo sapiens
ctcctgggcagaaaa

SEQ ID NO: 1486161 - DNA, 15 bp, Homo sapiens
gctcctgggcagaaa

SEQ ID NO: 1486162 - DNA, 15 bp, Homo sapiens
ggctcctgggcagaa

SEQ ID NO: 1486163 - DNA, 15 bp, Homo sapiens
aggctcctgggcaga

SEQ ID NO: 1486164 - DNA, 15 bp, Homo sapiens
aaggctcctgggcag

SEQ ID NO: 1486165 - DNA, 15 bp, Homo sapiens
aaaggctcctgggca

SEQ ID NO: 1486166 - DNA, 15 bp, Homo sapiens
aaaaggctcctgggc

SEQ ID NO: 1486167 - DNA, 15 bp, Homo sapiens
caaaaggctcctggg

SEQ ID NO: 1486168 - DNA, 15 bp, Homo sapiens
gcaaaaggctcctgg

SEQ ID NO: 1486169 - DNA, 15 bp, Homo sapiens
agcaaaaggctcctg

SEQ ID NO: 1486170 - DNA, 15 bp, Homo sapiens
aagcaaaaggctcct

SEQ ID NO: 1486171 - DNA, 15 bp, Homo sapiens
caagcaaaaggctcc

SEQ ID NO: 1486172 - DNA, 15 bp, Homo sapiens
tcaagcaaaaggctc

SEQ ID NO: 1486173 - DNA, 15 bp, Homo sapiens
atcaagcaaaaggct

SEQ ID NO: 1486174 - DNA, 15 bp, Homo sapiens
catcaagcaaaaggc

SEQ ID NO: 1486175 - DNA, 15 bp, Homo sapiens
ccatcaagcaaaagg

SEQ ID NO: 1486176 - DNA, 15 bp, Homo sapiens
tccatcaagcaaaag

SEQ ID NO: 1486177 - DNA, 15 bp, Homo sapiens
atccatcaagcaaaa

SEQ ID NO: 1486178 - DNA, 15 bp, Homo sapiens
catccatcaagcaaa

SEQ ID NO: 1486179 - DNA, 15 bp, Homo sapiens
ccatccatcaagcaa

SEQ ID NO: 1486180 - DNA, 15 bp, Homo sapiens
accatccatcaagca

SEQ ID NO: 1486181 - DNA, 15 bp, Homo sapiens
taccatccatcaagc

SEQ ID NO: 1486182 - DNA, 15 bp, Homo sapiens
ataccatccatcaag

SEQ ID NO: 1486183 - DNA, 15 bp, Homo sapiens
gataccatccatcaa

SEQ ID NO: 1486184 - DNA, 15 bp, Homo sapiens
agataccatccatca

SEQ ID NO: 1486185 - DNA, 15 bp, Homo sapiens
cagataccatccatc

SEQ ID NO: 1486186 - DNA, 15 bp, Homo sapiens
acagataccatccat

SEQ ID NO: 1486187 - DNA, 15 bp, Homo sapiens
cacagataccatcca

SEQ ID NO: 1486188 - DNA, 15 bp, Homo sapiens
acacagataccatcc

SEQ ID NO: 1486189 - DNA, 15 bp, Homo sapiens
aacacagataccatc

SEQ ID NO: 1486190 - DNA, 15 bp, Homo sapiens
aaacacagataccat

SEQ ID NO: 1486191 - DNA, 15 bp, Homo sapiens
caaacacagatacca

SEQ ID NO: 1486192 - DNA, 15 bp, Homo sapiens
tcaaacacagatacc

SEQ ID NO: 1486193 - DNA, 15 bp, Homo sapiens
ttcaaacacagatac

SEQ ID NO: 1486194 - DNA, 15 bp, Homo sapiens
attcaaacacagata

SEQ ID NO: 1486195 - DNA, 15 bp, Homo sapiens
cattcaaacacagat

SEQ ID NO: 1486196 - DNA, 15 bp, Homo sapiens
acattcaaacacaga

SEQ ID NO: 1486197 - DNA, 15 bp, Homo sapiens
cacattcaaacacag

SEQ ID NO: 1486198 - DNA, 15 bp, Homo sapiens
gcacattcaaacaca

SEQ ID NO: 1486199 - DNA, 15 bp, Homo sapiens
tgcacattcaaacac

SEQ ID NO: 1486200 - DNA, 15 bp, Homo sapiens
ttgcacattcaaaca

SEQ ID NO: 1486201 - DNA, 15 bp, Homo sapiens
attgcacattcaaac

SEQ ID NO: 1486202 - DNA, 15 bp, Homo sapiens
aattgcacattcaaa

SEQ ID NO: 1486203 - DNA, 15 bp, Homo sapiens
aaattgcacattcaa

SEQ ID NO: 1486204 - DNA, 15 bp, Homo sapiens
aaaattgcacattca

SEQ ID NO: 1486205 - DNA, 15 bp, Homo sapiens
caaaattgcacattc

SEQ ID NO: 1486206 - DNA, 15 bp, Homo sapiens
acaaaattgcacatt

SEQ ID NO: 1486207 - DNA, 15 bp, Homo sapiens
aacaaaattgcacat

SEQ ID NO: 1486208 - DNA, 15 bp, Homo sapiens
taacaaaattgcaca

SEQ ID NO: 1486209 - DNA, 15 bp, Homo sapiens
ctaacaaaattgcac

SEQ ID NO: 1486210 - DNA, 15 bp, Homo sapiens
cctaacaaaattgca

SEQ ID NO: 1486211 - DNA, 15 bp, Homo sapiens
gcctaacaaaattgc

SEQ ID NO: 1486212 - DNA, 15 bp, Homo sapiens
agcctaacaaaattg

SEQ ID NO: 1486213 - DNA, 15 bp, Homo sapiens
aagcctaacaaaatt

SEQ ID NO: 1486214 - DNA, 15 bp, Homo sapiens
aaagcctaacaaaat

SEQ ID NO: 1486215 - DNA, 15 bp, Homo sapiens
aaaagcctaacaaaa

SEQ ID NO: 1486216 - DNA, 15 bp, Homo sapiens
taaaagcctaacaaa

SEQ ID NO: 1486217 - DNA, 15 bp, Homo sapiens
ttaaaagcctaacaa

SEQ ID NO: 1486218 - DNA, 15 bp, Homo sapiens
tttaaaagcctaaca

SEQ ID NO: 1486219 - DNA, 15 bp, Homo sapiens
ttttaaaagcctaac

SEQ ID NO: 1486220 - DNA, 15 bp, Homo sapiens
cttttaaaagcctaa

SEQ ID NO: 1486221 - DNA, 15 bp, Homo sapiens
ccttttaaaagccta

SEQ ID NO: 1486222 - DNA, 15 bp, Homo sapiens
gccttttaaaagcct

SEQ ID NO: 1486223 - DNA, 15 bp, Homo sapiens
tgccttttaaaagcc

SEQ ID NO: 1486224 - DNA, 15 bp, Homo sapiens
ctgccttttaaaagc

SEQ ID NO: 1486225 - DNA, 15 bp, Homo sapiens
cctgccttttaaaag

SEQ ID NO: 1486226 - DNA, 15 bp, Homo sapiens
tcctgccttttaaaa

SEQ ID NO: 1486227 - DNA, 15 bp, Homo sapiens
ctcctgccttttaaa

SEQ ID NO: 1486228 - DNA, 15 bp, Homo sapiens
tctcctgccttttaa

SEQ ID NO: 1486229 - DNA, 15 bp, Homo sapiens
atctcctgcctttta

SEQ ID NO: 1486230 - DNA, 15 bp, Homo sapiens
aatctcctgcctttt

SEQ ID NO: 1486231 - DNA, 15 bp, Homo sapiens
gaatctcctgccttt

SEQ ID NO: 1486232 - DNA, 15 bp, Homo sapiens
ggaatctcctgcctt

SEQ ID NO: 1486233 - DNA, 15 bp, Homo sapiens
gggaatctcctgcct

SEQ ID NO: 1486234 - DNA, 15 bp, Homo sapiens
ggggaatctcctgcc

SEQ ID NO: 1486235 - DNA, 15 bp, Homo sapiens
cggggaatctcctgc

SEQ ID NO: 1486236 - DNA, 15 bp, Homo sapiens
gcggggaatctcctg

SEQ ID NO: 1486237 - DNA, 15 bp, Homo sapiens
cgcggggaatctcct

SEQ ID NO: 1486238 - DNA, 15 bp, Homo sapiens
ccgcggggaatctcc

SEQ ID NO: 1486239 - DNA, 15 bp, Homo sapiens
accgcggggaatctc

SEQ ID NO: 1486240 - DNA, 15 bp, Homo sapiens
gaccgcggggaatct

SEQ ID NO: 1486241 - DNA, 15 bp, Homo sapiens
agaccgcggggaatc

SEQ ID NO: 1486242 - DNA, 15 bp, Homo sapiens
cagaccgcggggaat

SEQ ID NO: 1486243 - DNA, 15 bp, Homo sapiens
acagaccgcggggaa

SEQ ID NO: 1486244 - DNA, 15 bp, Homo sapiens
cacagaccgcgggga

SEQ ID NO: 1486245 - DNA, 15 bp, Homo sapiens
ccacagaccgcgggg

SEQ ID NO: 1486246 - DNA, 15 bp, Homo sapiens
cccacagaccgcggg

SEQ ID NO: 1486247 - DNA, 15 bp, Homo sapiens
gcccacagaccgcgg

SEQ ID NO: 1486248 - DNA, 15 bp, Homo sapiens
ggcccacagaccgcg

SEQ ID NO: 1486249 - DNA, 15 bp, Homo sapiens
aggcccacagaccgc

SEQ ID NO: 1486250 - DNA, 15 bp, Homo sapiens
gaggcccacagaccg

SEQ ID NO: 1486251 - DNA, 15 bp, Homo sapiens
agaggcccacagacc

SEQ ID NO: 1486252 - DNA, 15 bp, Homo sapiens
gagaggcccacagac

SEQ ID NO: 1486253 - DNA, 15 bp, Homo sapiens
ggagaggcccacaga

SEQ ID NO: 1486254 - DNA, 15 bp, Homo sapiens
aggagaggcccacag

SEQ ID NO: 1486255 - DNA, 15 bp, Homo sapiens
taggagaggcccaca

SEQ ID NO: 1486256 - DNA, 15 bp, Homo sapiens
ctaggagaggcccac

SEQ ID NO: 1486257 - DNA, 15 bp, Homo sapiens
gctaggagaggccca

SEQ ID NO: 1486258 - DNA, 15 bp, Homo sapiens
agctaggagaggccc

SEQ ID NO: 1486259 - DNA, 15 bp, Homo sapiens
aagctaggagaggcc

SEQ ID NO: 1486260 - DNA, 15 bp, Homo sapiens
caagctaggagaggc

SEQ ID NO: 1486261 - DNA, 15 bp, Homo sapiens
ccaagctaggagagg

SEQ ID NO: 1486262 - DNA, 15 bp, Homo sapiens
gccaagctaggagag

SEQ ID NO: 1486263 - DNA, 15 bp, Homo sapiens
tgccaagctaggaga

SEQ ID NO: 1486264 - DNA, 15 bp, Homo sapiens
atgccaagctaggag

SEQ ID NO: 1486265 - DNA, 15 bp, Homo sapiens
aatgccaagctagga

SEQ ID NO: 1486266 - DNA, 15 bp, Homo sapiens
taatgccaagctagg

SEQ ID NO: 1486267 - DNA, 15 bp, Homo sapiens
ataatgccaagctag

SEQ ID NO: 1486268 - DNA, 15 bp, Homo sapiens
tataatgccaagcta

SEQ ID NO: 1486269 - DNA, 15 bp, Homo sapiens
ttataatgccaagct

SEQ ID NO: 1486270 - DNA, 15 bp, Homo sapiens
attataatgccaagc

SEQ ID NO: 1486271 - DNA, 15 bp, Homo sapiens
gattataatgccaag

SEQ ID NO: 1486272 - DNA, 15 bp, Homo sapiens
tgattataatgccaa

SEQ ID NO: 1486273 - DNA, 15 bp, Homo sapiens
ttgattataatgcca

SEQ ID NO: 1486274 - DNA, 15 bp, Homo sapiens
cttgattataatgcc

SEQ ID NO: 1486275 - DNA, 15 bp, Homo sapiens
tcttgattataatgc

SEQ ID NO: 1486276 - DNA, 15 bp, Homo sapiens
ttcttgattataatg

SEQ ID NO: 1486277 - DNA, 15 bp, Homo sapiens
tttcttgattataat

SEQ ID NO: 1486278 - DNA, 15 bp, Homo sapiens
atttcttgattataa

SEQ ID NO: 1486279 - DNA, 15 bp, Homo sapiens
aatttcttgattata

SEQ ID NO: 1486280 - DNA, 15 bp, Homo sapiens
taatttcttgattat

SEQ ID NO: 1486281 - DNA, 15 bp, Homo sapiens
ataatttcttgatta

SEQ ID NO: 1486282 - DNA, 15 bp, Homo sapiens
tataatttcttgatt

SEQ ID NO: 1486283 - DNA, 15 bp, Homo sapiens
gtataatttcttgat

SEQ ID NO: 1486284 - DNA, 15 bp, Homo sapiens
agtataatttcttga

SEQ ID NO: 1486285 - DNA, 15 bp, Homo sapiens
aagtataatttcttg

SEQ ID NO: 1486286 - DNA, 15 bp, Homo sapiens
aaagtataatttctt

SEQ ID NO: 1486287 - DNA, 15 bp, Homo sapiens
caaagtataatttct

SEQ ID NO: 1486288 - DNA, 15 bp, Homo sapiens
gcaaagtataatttc

SEQ ID NO: 1486289 - DNA, 15 bp, Homo sapiens
atagcaaagtataat

SEQ ID NO: 1486290 - DNA, 15 bp, Homo sapiens
catagcaaagtataa

SEQ ID NO: 1486291 - DNA, 15 bp, Homo sapiens
gcatagcaaagtata

SEQ ID NO: 1486292 - DNA, 15 bp, Homo sapiens
tgcatagcaaagtat

SEQ ID NO: 1486293 - DNA, 15 bp, Homo sapiens
ttgcatagcaaagta

SEQ ID NO: 1486294 - DNA, 15 bp, Homo sapiens
tttgcatagcaaagt

SEQ ID NO: 1486295 - DNA, 15 bp, Homo sapiens
ttttgcatagcaaag

SEQ ID NO: 1486296 - DNA, 15 bp, Homo sapiens
cttttgcatagcaaa

SEQ ID NO: 1486297 - DNA, 15 bp, Homo sapiens
gcttttgcatagcaa

SEQ ID NO: 1486298 - DNA, 15 bp, Homo sapiens
tgcttttgcatagca

SEQ ID NO: 1486299 - DNA, 15 bp, Homo sapiens
atgcttttgcatagc

SEQ ID NO: 1486300 - DNA, 15 bp, Homo sapiens
catgcttttgcatag

SEQ ID NO: 1486301 - DNA, 15 bp, Homo sapiens
tcatgcttttgcata

SEQ ID NO: 1486302 - DNA, 15 bp, Homo sapiens
atcatgcttttgcat

SEQ ID NO: 1486303 - DNA, 15 bp, Homo sapiens
catcatgcttttgca

SEQ ID NO: 1486304 - DNA, 15 bp, Homo sapiens
ccatcatgcttttgc

SEQ ID NO: 1486305 - DNA, 15 bp, Homo sapiens
gccatcatgcttttg

SEQ ID NO: 1486306 - DNA, 15 bp, Homo sapiens
agccatcatgctttt

SEQ ID NO: 1486307 - DNA, 15 bp, Homo sapiens
aagccatcatgcttt

SEQ ID NO: 1486308 - DNA, 15 bp, Homo sapiens
aaagccatcatgctt

SEQ ID NO: 1486309 - DNA, 15 bp, Homo sapiens
aaaagccatcatgct

SEQ ID NO: 1486310 - DNA, 15 bp, Homo sapiens
aaaaagccatcatgc

SEQ ID NO: 1486311 - DNA, 15 bp, Homo sapiens
aaaaaagccatcatg

SEQ ID NO: 1486312 - DNA, 15 bp, Homo sapiens
taaaaaagccatcat

SEQ ID NO: 1486313 - DNA, 15 bp, Homo sapiens
ttaaaaaagccatca

SEQ ID NO: 1486314 - DNA, 15 bp, Homo sapiens
tttaaaaaagccatc

SEQ ID NO: 1486315 - DNA, 15 bp, Homo sapiens
ttttaaaaaagccat

SEQ ID NO: 1486316 - DNA, 15 bp, Homo sapiens
tttttaaaaaagcca

SEQ ID NO: 1486317 - DNA, 15 bp, Homo sapiens
ttttttaaaaaagcc

SEQ ID NO: 1486318 - DNA, 15 bp, Homo sapiens
tttttttaaaaaagc

SEQ ID NO: 1486319 - DNA, 15 bp, Homo sapiens
atttttttaaaaaag

SEQ ID NO: 1486320 - DNA, 15 bp, Homo sapiens
gatttttttaaaaaa

SEQ ID NO: 1486321 - DNA, 15 bp, Homo sapiens
cgatttttttaaaaa

SEQ ID NO: 1486322 - DNA, 15 bp, Homo sapiens
acgatttttttaaaa

SEQ ID NO: 1486323 - DNA, 15 bp, Homo sapiens
aacgatttttttaaa

SEQ ID NO: 1486324 - DNA, 15 bp, Homo sapiens
aaacgatttttttaa

SEQ ID NO: 1486325 - DNA, 15 bp, Homo sapiens
aaaacgattttttta

SEQ ID NO: 1486326 - DNA, 15 bp, Homo sapiens
aaaaacgattttttt

SEQ ID NO: 1486327 - DNA, 15 bp, Homo sapiens
aaaaaacgatttttt

SEQ ID NO: 1486328 - DNA, 15 bp, Homo sapiens
taaaaaacgattttt

SEQ ID NO: 1486329 - DNA, 15 bp, Homo sapiens
ttaaaaaacgatttt

SEQ ID NO: 1486330 - DNA, 15 bp, Homo sapiens
attaaaaaacgattt

SEQ ID NO: 1486331 - DNA, 15 bp, Homo sapiens
cattaaaaaacgatt

SEQ ID NO: 1486332 - DNA, 15 bp, Homo sapiens
acattaaaaaacgat

SEQ ID NO: 1486333 - DNA, 15 bp, Homo sapiens
aacattaaaaaacga

SEQ ID NO: 1486334 - DNA, 15 bp, Homo sapiens
gaacattaaaaaacg

SEQ ID NO: 1486335 - DNA, 15 bp, Homo sapiens
ggaacattaaaaaac

SEQ ID NO: 1486336 - DNA, 15 bp, Homo sapiens
gggaacattaaaaaa

SEQ ID NO: 1486337 - DNA, 15 bp, Homo sapiens
agggaacattaaaaa

SEQ ID NO: 1486338 - DNA, 15 bp, Homo sapiens
aagggaacattaaaa

SEQ ID NO: 1486339 - DNA, 15 bp, Homo sapiens
gaagggaacattaaa

SEQ ID NO: 1486340 - DNA, 15 bp, Homo sapiens
ggaagggaacattaa

SEQ ID NO: 1486341 - DNA, 15 bp, Homo sapiens
gggaagggaacatta

SEQ ID NO: 1486342 - DNA, 15 bp, Homo sapiens
tgggaagggaacatt

SEQ ID NO: 1486343 - DNA, 15 bp, Homo sapiens
ctgggaagggaacat

SEQ ID NO: 1486344 - DNA, 15 bp, Homo sapiens
cctgggaagggaaca

SEQ ID NO: 1486345 - DNA, 15 bp, Homo sapiens
acctgggaagggaac

SEQ ID NO: 1486346 - DNA, 15 bp, Homo sapiens
aacctgggaagggaa

SEQ ID NO: 1486347 - DNA, 15 bp, Homo sapiens
gaacctgggaaggga

SEQ ID NO: 1486348 - DNA, 15 bp, Homo sapiens
tgaacctgggaaggg

SEQ ID NO: 1486349 - DNA, 15 bp, Homo sapiens
gtgaacctgggaagg

SEQ ID NO: 1486350 - DNA, 15 bp, Homo sapiens
ggtgaacctgggaag

SEQ ID NO: 1486351 - DNA, 15 bp, Homo sapiens
gggtgaacctgggaa

SEQ ID NO: 1486352 - DNA, 15 bp, Homo sapiens
agggtgaacctggga

SEQ ID NO: 1486353 - DNA, 15 bp, Homo sapiens
gagggtgaacctggg

SEQ ID NO: 1486354 - DNA, 15 bp, Homo sapiens
ggagggtgaacctgg

SEQ ID NO: 1486355 - DNA, 15 bp, Homo sapiens
gggagggtgaacctg

SEQ ID NO: 1486356 - DNA, 15 bp, Homo sapiens
agggagggtgaacct

SEQ ID NO: 1486357 - DNA, 15 bp, Homo sapiens
aagggagggtgaacc

SEQ ID NO: 1486358 - DNA, 15 bp, Homo sapiens
aaagggagggtgaac

SEQ ID NO: 1486359 - DNA, 15 bp, Homo sapiens
aaaagggagggtgaa

SEQ ID NO: 1486360 - DNA, 15 bp, Homo sapiens
aaaaagggagggtga

SEQ ID NO: 1486361 - DNA, 15 bp, Homo sapiens
caaaaagggagggtg

SEQ ID NO: 1486362 - DNA, 15 bp, Homo sapiens
acaaaaagggagggt

SEQ ID NO: 1486363 - DNA, 15 bp, Homo sapiens
aacaaaaagggaggg

SEQ ID NO: 1486364 - DNA, 15 bp, Homo sapiens
taacaaaaagggagg

SEQ ID NO: 1486365 - DNA, 15 bp, Homo sapiens
ataacaaaaagggag

SEQ ID NO: 1486366 - DNA, 15 bp, Homo sapiens
aataacaaaaaggga

SEQ ID NO: 1486367 - DNA, 15 bp, Homo sapiens
aaataacaaaaaggg

SEQ ID NO: 1486368 - DNA, 15 bp, Homo sapiens
aaaataacaaaaagg

SEQ ID NO: 1486369 - DNA, 15 bp, Homo sapiens
caaaataacaaaaag

SEQ ID NO: 1486370 - DNA, 15 bp, Homo sapiens
tcaaaataacaaaaa

SEQ ID NO: 1486371 - DNA, 15 bp, Homo sapiens
ttcaaaataacaaaa

SEQ ID NO: 1486372 - DNA, 15 bp, Homo sapiens
attcaaaataacaaa

SEQ ID NO: 1486373 - DNA, 15 bp, Homo sapiens
aattcaaaataacaa

SEQ ID NO: 1486374 - DNA, 15 bp, Homo sapiens
gaattcaaaataaca

SEQ ID NO: 1486375 - DNA, 15 bp, Homo sapiens
agaattcaaaataac

SEQ ID NO: 1486376 - DNA, 15 bp, Homo sapiens
cagaattcaaaataa

SEQ ID NO: 1486377 - DNA, 15 bp, Homo sapiens
ccagaattcaaaata

SEQ ID NO: 1486378 - DNA, 15 bp, Homo sapiens
accagaattcaaaat

SEQ ID NO: 1486379 - DNA, 15 bp, Homo sapiens
gaccagaattcaaaa

SEQ ID NO: 1486380 - DNA, 15 bp, Homo sapiens
cgaccagaattcaaa

SEQ ID NO: 1486381 - DNA, 15 bp, Homo sapiens
acgaccagaattcaa

SEQ ID NO: 1486382 - DNA, 15 bp, Homo sapiens
tacgaccagaattca

SEQ ID NO: 1486383 - DNA, 15 bp, Homo sapiens
ttacgaccagaattc

SEQ ID NO: 1486384 - DNA, 15 bp, Homo sapiens
gttacgaccagaatt

SEQ ID NO: 1486385 - DNA, 15 bp, Homo sapiens
tgttacgaccagaat

SEQ ID NO: 1486386 - DNA, 15 bp, Homo sapiens
ttgttacgaccagaa

SEQ ID NO: 1486387 - DNA, 15 bp, Homo sapiens
attgttacgaccaga

SEQ ID NO: 1486388 - DNA, 15 bp, Homo sapiens
aattgttacgaccag

SEQ ID NO: 1486389 - DNA, 15 bp, Homo sapiens
gaattgttacgacca

SEQ ID NO: 1486390 - DNA, 15 bp, Homo sapiens
cgaattgttacgacc

SEQ ID NO: 1486391 - DNA, 15 bp, Homo sapiens
ccgaattgttacgac

SEQ ID NO: 1486392 - DNA, 15 bp, Homo sapiens
accgaattgttacga

SEQ ID NO: 1486393 - DNA, 15 bp, Homo sapiens
gaccgaattgttacg

SEQ ID NO: 1486394 - DNA, 15 bp, Homo sapiens
agaccgaattgttac

SEQ ID NO: 1486395 - DNA, 15 bp, Homo sapiens
aagaccgaattgtta

SEQ ID NO: 1486396 - DNA, 15 bp, Homo sapiens
taagaccgaattgtt

SEQ ID NO: 1486397 - DNA, 15 bp, Homo sapiens
gtaagaccgaattgt

SEQ ID NO: 1486398 - DNA, 15 bp, Homo sapiens
agtaagaccgaattg

SEQ ID NO: 1486399 - DNA, 15 bp, Homo sapiens
aagtaagaccgaatt

SEQ ID NO: 1486400 - DNA, 15 bp, Homo sapiens
aaagtaagaccgaat

SEQ ID NO: 1486401 - DNA, 15 bp, Homo sapiens
aaaagtaagaccgaa

SEQ ID NO: 1486402 - DNA, 15 bp, Homo sapiens
aaaaagtaagaccga

SEQ ID NO: 1486403 - DNA, 15 bp, Homo sapiens
aaaaaagtaagaccg

SEQ ID NO: 1486404 - DNA, 15 bp, Homo sapiens
taaaaaagtaagacc

SEQ ID NO: 1486405 - DNA, 15 bp, Homo sapiens
ataaaaaagtaagac

SEQ ID NO: 1486406 - DNA, 15 bp, Homo sapiens
aataaaaaagtaaga

SEQ ID NO: 1486407 - DNA, 15 bp, Homo sapiens
aaataaaaaagtaag

SEQ ID NO: 1486408 - DNA, 15 bp, Homo sapiens
aaaataaaaaagtaa

SEQ ID NO: 1486409 - DNA, 15 bp, Homo sapiens
aaaaataaaaaagta

SEQ ID NO: 1486410 - DNA, 15 bp, Homo sapiens
aaaaaataaaaaagt

SEQ ID NO: 1486411 - DNA, 15 bp, Homo sapiens
taaaaaataaaaaag

SEQ ID NO: 1486412 - DNA, 15 bp, Homo sapiens
caaaaaataaaaaat

SEQ ID NO: 1486413 - DNA, 15 bp, Homo sapiens
acaaaaaataaaaaa

SEQ ID NO: 1486414 - DNA, 15 bp, Homo sapiens
gaacaaaaaataaaa

SEQ ID NO: 1486415 - DNA, 15 bp, Homo sapiens
cgaacaaaaaataaa

SEQ ID NO: 1486416 - DNA, 15 bp, Homo sapiens
acgaacaaaaaataa

SEQ ID NO: 1486417 - DNA, 15 bp, Homo sapiens
aacgaacaaaaaata

SEQ ID NO: 1486418 - DNA, 15 bp, Homo sapiens
aaacgaacaaaaaat

SEQ ID NO: 1486419 - DNA, 15 bp, Homo sapiens
aaaacgaacaaaaaa

SEQ ID NO: 1486420 - DNA, 15 bp, Homo sapiens
caaaacgaacaaaaa

SEQ ID NO: 1486421 - DNA, 15 bp, Homo sapiens
tcaaaacgaacaaaa

SEQ ID NO: 1486422 - DNA, 15 bp, Homo sapiens
atcaaaacgaacaaa

SEQ ID NO: 1486423 - DNA, 15 bp, Homo sapiens
aatcaaaacgaacaa

SEQ ID NO: 1486424 - DNA, 15 bp, Homo sapiens
aaatcaaaacgaaca

SEQ ID NO: 1486425 - DNA, 15 bp, Homo sapiens
taaatcaaaacgaac

SEQ ID NO: 1486426 - DNA, 15 bp, Homo sapiens
gtaaatcaaaacgaa

SEQ ID NO: 1486427 - DNA, 15 bp, Homo sapiens
tgtaaatcaaaacga

SEQ ID NO: 1486428 - DNA, 15 bp, Homo sapiens
atgtaaatcaaaacg

SEQ ID NO: 1486429 - DNA, 15 bp, Homo sapiens
aatgtaaatcaaaac

SEQ ID NO: 1486430 - DNA, 15 bp, Homo sapiens
aaatgtaaatcaaaa

SEQ ID NO: 1486431 - DNA, 15 bp, Homo sapiens
aaaatgtaaatcaaa

SEQ ID NO: 1486432 - DNA, 15 bp, Homo sapiens
aaaaatgtaaatcaa

SEQ ID NO: 1486433 - DNA, 15 bp, Homo sapiens
taaaaatgtaaatca

SEQ ID NO: 1486434 - DNA, 15 bp, Homo sapiens
ataaaaatgtaaatc

SEQ ID NO: 1486435 - DNA, 15 bp, Homo sapiens
aataaaaatgtaaat

SEQ ID NO: 1486436 - DNA, 15 bp, Homo sapiens
aaataaaaatgtaaa

SEQ ID NO: 1486437 - DNA, 15 bp, Homo sapiens
aaaataaaaatgtaa

SEQ ID NO: 1486438 - DNA, 15 bp, Homo sapiens
aaaaataaaaatgta

SEQ ID NO: 1486439 - DNA, 15 bp, Homo sapiens
aaaaaaataaaaatg

SEQ ID NO: 1486440 - DNA, 15 bp, Homo sapiens
gaaaaaaaataaaaa

SEQ ID NO: 1486441 - DNA, 15 bp, Homo sapiens
ggaaaaaaaataaaa

SEQ ID NO: 1486442 - DNA, 15 bp, Homo sapiens
gggaaaaaaaataaa

SEQ ID NO: 1486443 - DNA, 15 bp, Homo sapiens
ggggaaaaaaaataa

SEQ ID NO: 1486444 - DNA, 15 bp, Homo sapiens
gggggaaaaaaaata

SEQ ID NO: 1486445 - DNA, 15 bp, Homo sapiens
tgggggaaaaaaaat

SEQ ID NO: 1486446 - DNA, 15 bp, Homo sapiens
gtgggggaaaaaaaa

SEQ ID NO: 1486447 - DNA, 15 bp, Homo sapiens
tgtgggggaaaaaaa

SEQ ID NO: 1486448 - DNA, 15 bp, Homo sapiens
ttgtgggggaaaaaa

SEQ ID NO: 1486449 - DNA, 15 bp, Homo sapiens
cttgtgggggaaaaa

SEQ ID NO: 1486450 - DNA, 15 bp, Homo sapiens
gcttgtgggggaaaa

SEQ ID NO: 1486451 - DNA, 15 bp, Homo sapiens
tgcttgtgggggaaa

SEQ ID NO: 1486452 - DNA, 15 bp, Homo sapiens
ctgcttgtgggggaa

SEQ ID NO: 1486453 - DNA, 15 bp, Homo sapiens
tctgcttgtggggga

SEQ ID NO: 1486454 - DNA, 15 bp, Homo sapiens
ttctgcttgtggggg

SEQ ID NO: 1486455 - DNA, 15 bp, Homo sapiens
cttctgcttgtgggg

SEQ ID NO: 1486456 - DNA, 15 bp, Homo sapiens
ccttctgcttgtggg

SEQ ID NO: 1486457 - DNA, 15 bp, Homo sapiens
accttctgcttgtgg

SEQ ID NO: 1486458 - DNA, 15 bp, Homo sapiens
aaccttctgcttgtg

SEQ ID NO: 1486459 - DNA, 15 bp, Homo sapiens
aaaccttctgcttgt

SEQ ID NO: 1486460 - DNA, 15 bp, Homo sapiens
aaaaccttctgcttg

SEQ ID NO: 1486461 - DNA, 15 bp, Homo sapiens
taaaaccttctgctt

SEQ ID NO: 1486462 - DNA, 15 bp, Homo sapiens
ataaaaccttctgct

SEQ ID NO: 1486463 - DNA, 15 bp, Homo sapiens
aataaaaccttctgc

SEQ ID NO: 1486464 - DNA, 15 bp, Homo sapiens
aaataaaaccttctg

SEQ ID NO: 1486465 - DNA, 15 bp, Homo sapiens
aaaataaaaccttct

SEQ ID NO: 1486466 - DNA, 15 bp, Homo sapiens
taaaataaaaccttc

SEQ ID NO: 1486467 - DNA, 15 bp, Homo sapiens
ttaaaataaaacctt

SEQ ID NO: 1486468 - DNA, 15 bp, Homo sapiens
tttaaaataaaacct

SEQ ID NO: 1486469 - DNA, 15 bp, Homo sapiens
atttaaaataaaacc

SEQ ID NO: 1486470 - DNA, 15 bp, Homo sapiens
aatttaaaataaaac

SEQ ID NO: 1486471 - DNA, 15 bp, Homo sapiens
gaatttaaaataaaa

SEQ ID NO: 1486472 - DNA, 15 bp, Homo sapiens
ggaatttaaaataaa

SEQ ID NO: 1486473 - DNA, 15 bp, Homo sapiens
tggaatttaaaataa

SEQ ID NO: 1486474 - DNA, 15 bp, Homo sapiens
ttggaatttaaaata

SEQ ID NO: 1486475 - DNA, 15 bp, Homo sapiens
cttggaatttaaaat

SEQ ID NO: 1486476 - DNA, 15 bp, Homo sapiens
tcttggaatttaaaa

SEQ ID NO: 1486477 - DNA, 15 bp, Homo sapiens
ttcttggaatttaaa

SEQ ID NO: 1486478 - DNA, 15 bp, Homo sapiens
attcttggaatttaa

SEQ ID NO: 1486479 - DNA, 15 bp, Homo sapiens
tattcttggaattta

SEQ ID NO: 1486480 - DNA, 15 bp, Homo sapiens
atattcttggaattt

SEQ ID NO: 1486481 - DNA, 15 bp, Homo sapiens
catattcttggaatt

SEQ ID NO: 1486482 - DNA, 15 bp, Homo sapiens
tcatattcttggaat

SEQ ID NO: 1486483 - DNA, 15 bp, Homo sapiens
atcatattcttggaa

SEQ ID NO: 1486484 - DNA, 15 bp, Homo sapiens
catcatattcttgga

SEQ ID NO: 1486485 - DNA, 15 bp, Homo sapiens
ccatcatattcttgg

SEQ ID NO: 1486486 - DNA, 15 bp, Homo sapiens
accatcatattcttg

SEQ ID NO: 1486487 - DNA, 15 bp, Homo sapiens
gaccatcatattctt

SEQ ID NO: 1486488 - DNA, 15 bp, Homo sapiens
tgaccatcatattct

SEQ ID NO: 1486489 - DNA, 15 bp, Homo sapiens
ttgaccatcatattc

SEQ ID NO: 1486490 - DNA, 15 bp, Homo sapiens
tttgaccatcatatt

SEQ ID NO: 1486491 - DNA, 15 bp, Homo sapiens
ttttgaccatcatat

SEQ ID NO: 1486492 - DNA, 15 bp, Homo sapiens
attttgaccatcata

SEQ ID NO: 1486493 - DNA, 15 bp, Homo sapiens
aattttgaccatcat

SEQ ID NO: 1486494 - DNA, 15 bp, Homo sapiens
caattttgaccatca

SEQ ID NO: 1486495 - DNA, 15 bp, Homo sapiens
gcaattttgaccatc

SEQ ID NO: 1486496 - DNA, 15 bp, Homo sapiens
agcaattttgaccat

SEQ ID NO: 1486497 - DNA, 15 bp, Homo sapiens
cagcaattttgacca

SEQ ID NO: 1486498 - DNA, 15 bp, Homo sapiens
ccagcaattttgacc

SEQ ID NO: 1486499 - DNA, 15 bp, Homo sapiens
cccagcaattttgac

SEQ ID NO: 1486500 - DNA, 15 bp, Homo sapiens
tcccagcaattttga

SEQ ID NO: 1486501 - DNA, 15 bp, Homo sapiens
ttcccagcaattttg

SEQ ID NO: 1486502 - DNA, 15 bp, Homo sapiens
cttcccagcaatttt

SEQ ID NO: 1486503 - DNA, 15 bp, Homo sapiens
tcttcccagcaattt

SEQ ID NO: 1486504 - DNA, 15 bp, Homo sapiens
atcttcccagcaatt

SEQ ID NO: 1486505 - DNA, 15 bp, Homo sapiens
aatcttcccagcaat

SEQ ID NO: 1486506 - DNA, 15 bp, Homo sapiens
gaatcttcccagcaa

SEQ ID NO: 1486507 - DNA, 15 bp, Homo sapiens
agaatcttcccagca

SEQ ID NO: 1486508 - DNA, 15 bp, Homo sapiens
cagaatcttcccagc

SEQ ID NO: 1486509 - DNA, 15 bp, Homo sapiens
tcagaatcttcccag

SEQ ID NO: 1486510 - DNA, 15 bp, Homo sapiens
atcagaatcttccca

SEQ ID NO: 1486511 - DNA, 15 bp, Homo sapiens
aatcagaatcttccc

SEQ ID NO: 1486512 - DNA, 15 bp, Homo sapiens
aaatcagaatcttcc

SEQ ID NO: 1486513 - DNA, 15 bp, Homo sapiens
taaatcagaatcttc

SEQ ID NO: 1486514 - DNA, 15 bp, Homo sapiens
ctaaatcagaatctt

SEQ ID NO: 1486515 - DNA, 15 bp, Homo sapiens
cctaaatcagaatct

SEQ ID NO: 1486516 - DNA, 15 bp, Homo sapiens
ccctaaatcagaatc

SEQ ID NO: 1486517 - DNA, 15 bp, Homo sapiens
accctaaatcagaat

SEQ ID NO: 1486518 - DNA, 15 bp, Homo sapiens
aaccctaaatcagaa

SEQ ID NO: 1486519 - DNA, 15 bp, Homo sapiens
caaccctaaatcaga

SEQ ID NO: 1486520 - DNA, 15 bp, Homo sapiens
acaaccctaaatcag

SEQ ID NO: 1486521 - DNA, 15 bp, Homo sapiens
gacaaccctaaatca

SEQ ID NO: 1486522 - DNA, 15 bp, Homo sapiens
tgacaaccctaaatc

SEQ ID NO: 1486523 - DNA, 15 bp, Homo sapiens
gtgacaaccctaaat

SEQ ID NO: 1486524 - DNA, 15 bp, Homo sapiens
agtgacaaccctaaa

SEQ ID NO: 1486525 - DNA, 15 bp, Homo sapiens
cagtgacaaccctaa

SEQ ID NO: 1486526 - DNA, 15 bp, Homo sapiens
gcagtgacaacccta

SEQ ID NO: 1486527 - DNA, 15 bp, Homo sapiens
tgcagtgacaaccct

SEQ ID NO: 1486528 - DNA, 15 bp, Homo sapiens
ctgcagtgacaaccc

SEQ ID NO: 1486529 - DNA, 15 bp, Homo sapiens
tctgcagtgacaacc

SEQ ID NO: 1486530 - DNA, 15 bp, Homo sapiens
ctctgcagtgacaac

SEQ ID NO: 1486531 - DNA, 15 bp, Homo sapiens
gctctgcagtgacaa

SEQ ID NO: 1486532 - DNA, 15 bp, Homo sapiens
tgctctgcagtgaca

SEQ ID NO: 1486533 - DNA, 15 bp, Homo sapiens
atgctctgcagtgac

SEQ ID NO: 1486534 - DNA, 15 bp, Homo sapiens
aatgctctgcagtga

SEQ ID NO: 1486535 - DNA, 15 bp, Homo sapiens
aaatgctctgcagtg

SEQ ID NO: 1486536 - DNA, 15 bp, Homo sapiens
gaaatgctctgcagt

SEQ ID NO: 1486537 - DNA, 15 bp, Homo sapiens
ggaaatgctctgcag

SEQ ID NO: 1486538 - DNA, 15 bp, Homo sapiens
tggaaatgctctgca

SEQ ID NO: 1486539 - DNA, 15 bp, Homo sapiens
atggaaatgctctgc

SEQ ID NO: 1486540 - DNA, 15 bp, Homo sapiens
catggaaatgctctg

SEQ ID NO: 1486541 - DNA, 15 bp, Homo sapiens
acatggaaatgctct

SEQ ID NO: 1486542 - DNA, 15 bp, Homo sapiens
gacatggaaatgctc

SEQ ID NO: 1486543 - DNA, 15 bp, Homo sapiens
tgacatggaaatgct

SEQ ID NO: 1486544 - DNA, 15 bp, Homo sapiens
ttgacatggaaatgc

SEQ ID NO: 1486545 - DNA, 15 bp, Homo sapiens
attgacatggaaatg

SEQ ID NO: 1486546 - DNA, 15 bp, Homo sapiens
cattgacatggaaat

SEQ ID NO: 1486547 - DNA, 15 bp, Homo sapiens
acattgacatggaaa

SEQ ID NO: 1486548 - DNA, 15 bp, Homo sapiens
tacattgacatggaa

SEQ ID NO: 1486549 - DNA, 15 bp, Homo sapiens
ttacattgacatgga

SEQ ID NO: 1486550 - DNA, 15 bp, Homo sapiens
cttacattgacatgg

SEQ ID NO: 1486551 - DNA, 15 bp, Homo sapiens
acttacattgacatg

SEQ ID NO: 1486552 - DNA, 15 bp, Homo sapiens
tacttacattgacat

SEQ ID NO: 1486553 - DNA, 15 bp, Homo sapiens
ctacttacattgaca

SEQ ID NO: 1486554 - DNA, 15 bp, Homo sapiens
cctacttacattgac

SEQ ID NO: 1486555 - DNA, 15 bp, Homo sapiens
acctacttacattga

SEQ ID NO: 1486556 - DNA, 15 bp, Homo sapiens
tacctacttacattg

SEQ ID NO: 1486557 - DNA, 15 bp, Homo sapiens
gtacctacttacatt

SEQ ID NO: 1486558 - DNA, 15 bp, Homo sapiens
ggtacctacttacat

SEQ ID NO: 1486559 - DNA, 15 bp, Homo sapiens
gggtacctacttaca

SEQ ID NO: 1486560 - DNA, 15 bp, Homo sapiens
tgggtacctacttac

SEQ ID NO: 1486561 - DNA, 15 bp, Homo sapiens
ttgggtacctactta

SEQ ID NO: 1486562 - DNA, 15 bp, Homo sapiens
tttgggtacctactt

SEQ ID NO: 1486563 - DNA, 15 bp, Homo sapiens
ctttgggtacctact

SEQ ID NO: 1486564 - DNA, 15 bp, Homo sapiens
actttgggtacctac

SEQ ID NO: 1486565 - DNA, 15 bp, Homo sapiens
gactttgggtaccta

SEQ ID NO: 1486566 - DNA, 15 bp, Homo sapiens
cgactttgggtacct

SEQ ID NO: 1486567 - DNA, 15 bp, Homo sapiens
acgactttgggtacc

SEQ ID NO: 1486568 - DNA, 15 bp, Homo sapiens
aacgactttgggtac

SEQ ID NO: 1486569 - DNA, 15 bp, Homo sapiens
aaacgactttgggta

SEQ ID NO: 1486570 - DNA, 15 bp, Homo sapiens
taaacgactttgggt

SEQ ID NO: 1486571 - DNA, 15 bp, Homo sapiens
ctaaacgactttggg

SEQ ID NO: 1486572 - DNA, 15 bp, Homo sapiens
cctaaacgactttgg

SEQ ID NO: 1486573 - DNA, 15 bp, Homo sapiens
acctaaacgactttg

SEQ ID NO: 1486574 - DNA, 15 bp, Homo sapiens
cacctaaacgacttt

SEQ ID NO: 1486575 - DNA, 15 bp, Homo sapiens
gcacctaaacgactt

SEQ ID NO: 1486576 - DNA, 15 bp, Homo sapiens
tgcacctaaacgact

SEQ ID NO: 1486577 - DNA, 15 bp, Homo sapiens
ctgcacctaaacgac

SEQ ID NO: 1486578 - DNA, 15 bp, Homo sapiens
gctgcacctaaacga

SEQ ID NO: 1486579 - DNA, 15 bp, Homo sapiens
tgctgcacctaaacg

SEQ ID NO: 1486580 - DNA, 15 bp, Homo sapiens
atgctgcacctaaac

SEQ ID NO: 1486581 - DNA, 15 bp, Homo sapiens
aatgctgcacctaaa

SEQ ID NO: 1486582 - DNA, 15 bp, Homo sapiens
gaatgctgcacctaa

SEQ ID NO: 1486583 - DNA, 15 bp, Homo sapiens
tgaatgctgcaccta

SEQ ID NO: 1486584 - DNA, 15 bp, Homo sapiens
ctgaatgctgcacct

SEQ ID NO: 1486585 - DNA, 15 bp, Homo sapiens
actgaatgctgcacc

SEQ ID NO: 1486586 - DNA, 15 bp, Homo sapiens
tactgaatgctgcac

SEQ ID NO: 1486587 - DNA, 15 bp, Homo sapiens
ttactgaatgctgca

SEQ ID NO: 1486588 - DNA, 15 bp, Homo sapiens
gttactgaatgctgc

SEQ ID NO: 1486589 - DNA, 15 bp, Homo sapiens
cgttactgaatgctg

SEQ ID NO: 1486590 - DNA, 15 bp, Homo sapiens
acgttactgaatgct

SEQ ID NO: 1486591 - DNA, 15 bp, Homo sapiens
tacgttactgaatgc

SEQ ID NO: 1486592 - DNA, 15 bp, Homo sapiens
ttacgttactgaatg

SEQ ID NO: 1486593 - DNA, 15 bp, Homo sapiens
tttacgttactgaat

SEQ ID NO: 1486594 - DNA, 15 bp, Homo sapiens
ctttacgttactgaa

SEQ ID NO: 1486595 - DNA, 15 bp, Homo sapiens
cctttacgttactga

SEQ ID NO: 1486596 - DNA, 15 bp, Homo sapiens
acctttacgttactg

SEQ ID NO: 1486597 - DNA, 15 bp, Homo sapiens
tacctttacgttact

SEQ ID NO: 1486598 - DNA, 15 bp, Homo sapiens
ttacctttacgttac

SEQ ID NO: 1486599 - DNA, 15 bp, Homo sapiens
tttacctttacgtta

SEQ ID NO: 1486600 - DNA, 15 bp, Homo sapiens
ctttacctttacgtt

SEQ ID NO: 1486601 - DNA, 15 bp, Homo sapiens
tctttacctttacgt

SEQ ID NO: 1486602 - DNA, 15 bp, Homo sapiens
ttctttacctttacg

SEQ ID NO: 1486603 - DNA, 15 bp, Homo sapiens
tttctttacctttac

SEQ ID NO: 1486604 - DNA, 15 bp, Homo sapiens
ttttctttaccttta

SEQ ID NO: 1486605 - DNA, 15 bp, Homo sapiens
tttttctttaccttt

SEQ ID NO: 1486606 - DNA, 15 bp, Homo sapiens
ttttttctttacctt

SEQ ID NO: 1486607 - DNA, 15 bp, Homo sapiens
tttttttctttacct

SEQ ID NO: 1486608 - DNA, 15 bp, Homo sapiens
ttttttttctttacc

SEQ ID NO: 1486609 - DNA, 15 bp, Homo sapiens
tttttttttctttac

SEQ ID NO: 1486610 - DNA, 15 bp, Homo sapiens
ctttttttttcttta

SEQ ID NO: 1486611 - DNA, 15 bp, Homo sapiens
actttttttttcttt

SEQ ID NO: 1486612 - DNA, 15 bp, Homo sapiens
tactttttttttctt

SEQ ID NO: 1486613 - DNA, 15 bp, Homo sapiens
ctactttttttttct

SEQ ID NO: 1486614 - DNA, 15 bp, Homo sapiens
gctactttttttttc

SEQ ID NO: 1486615 - DNA, 15 bp, Homo sapiens
ggctacttttttttt

SEQ ID NO: 1486616 - DNA, 15 bp, Homo sapiens
tggctactttttttt

SEQ ID NO: 1486617 - DNA, 15 bp, Homo sapiens
gtggctacttttttt

SEQ ID NO: 1486618 - DNA, 15 bp, Homo sapiens
ggtggctactttttt

SEQ ID NO: 1486619 - DNA, 15 bp, Homo sapiens
aggtggctacttttt

SEQ ID NO: 1486620 - DNA, 15 bp, Homo sapiens
caggtggctactttt

SEQ ID NO: 1486621 - DNA, 15 bp, Homo sapiens
acaggtggctacttt

SEQ ID NO: 1486622 - DNA, 15 bp, Homo sapiens
cacaggtggctactt

SEQ ID NO: 1486623 - DNA, 15 bp, Homo sapiens
ccacaggtggctact

SEQ ID NO: 1486624 - DNA, 15 bp, Homo sapiens
gccacaggtggctac

SEQ ID NO: 1486625 - DNA, 15 bp, Homo sapiens
agccacaggtggcta

SEQ ID NO: 1486626 - DNA, 15 bp, Homo sapiens
aagccacaggtggct

SEQ ID NO: 1486627 - DNA, 15 bp, Homo sapiens
aaagccacaggtggc

SEQ ID NO: 1486628 - DNA, 15 bp, Homo sapiens
aaaagccacaggtgg

SEQ ID NO: 1486629 - DNA, 15 bp, Homo sapiens
aaaaagccacaggtg

SEQ ID NO: 1486630 - DNA, 15 bp, Homo sapiens
taaaaagccacaggt

SEQ ID NO: 1486631 - DNA, 15 bp, Homo sapiens
ataaaaagccacagg

SEQ ID NO: 1486632 - DNA, 15 bp, Homo sapiens
gataaaaagccacag

SEQ ID NO: 1486633 - DNA, 15 bp, Homo sapiens
ggataaaaagccaca

SEQ ID NO: 1486634 - DNA, 15 bp, Homo sapiens
gggataaaaagccac

SEQ ID NO: 1486635 - DNA, 15 bp, Homo sapiens
ggggataaaaagcca

SEQ ID NO: 1486636 - DNA, 15 bp, Homo sapiens
tggggataaaaagcc

SEQ ID NO: 1486637 - DNA, 15 bp, Homo sapiens
ctggggataaaaagc

SEQ ID NO: 1486638 - DNA, 15 bp, Homo sapiens
ggaagacaaatatag

SEQ ID NO: 1486639 - DNA, 15 bp, Homo sapiens
cggaagacaaatata

SEQ ID NO: 1486640 - DNA, 15 bp, Homo sapiens
tcggaagacaaatat

SEQ ID NO: 1486641 - DNA, 15 bp, Homo sapiens
atcggaagacaaata

SEQ ID NO: 1486642 - DNA, 15 bp, Homo sapiens
gatcggaagacaaat

SEQ ID NO: 1486643 - DNA, 15 bp, Homo sapiens
tgatcggaagacaaa

SEQ ID NO: 1486644 - DNA, 15 bp, Homo sapiens
ttgatcggaagacaa

SEQ ID NO: 1486645 - DNA, 15 bp, Homo sapiens
gttgatcggaagaca

SEQ ID NO: 1486646 - DNA, 15 bp, Homo sapiens
tgttgatcggaagac

SEQ ID NO: 1486647 - DNA, 15 bp, Homo sapiens
atgttgatcggaaga

SEQ ID NO: 1486648 - DNA, 15 bp, Homo sapiens
aatgttgatcggaag

SEQ ID NO: 1486649 - DNA, 15 bp, Homo sapiens
aaatgttgatcggaa

SEQ ID NO: 1486650 - DNA, 15 bp, Homo sapiens
taaatgttgatcgga

SEQ ID NO: 1486651 - DNA, 15 bp, Homo sapiens
ataaatgttgatcgg

SEQ ID NO: 1486652 - DNA, 15 bp, Homo sapiens
cataaatgttgatcg

SEQ ID NO: 1486653 - DNA, 15 bp, Homo sapiens
tcataaatgttgatc

SEQ ID NO: 1486654 - DNA, 15 bp, Homo sapiens
gtcataaatgttgat

SEQ ID NO: 1486655 - DNA, 15 bp, Homo sapiens
ggtcataaatgttga

SEQ ID NO: 1486656 - DNA, 15 bp, Homo sapiens
aggtcataaatgttg

SEQ ID NO: 1486657 - DNA, 15 bp, Homo sapiens
taggtcataaatgtt

SEQ ID NO: 1486658 - DNA, 15 bp, Homo sapiens
ttaggtcataaatgt

SEQ ID NO: 1486659 - DNA, 15 bp, Homo sapiens
cttaggtcataaatg

SEQ ID NO: 1486660 - DNA, 15 bp, Homo sapiens
acttaggtcataaat

SEQ ID NO: 1486661 - DNA, 15 bp, Homo sapiens
gacttaggtcataaa

SEQ ID NO: 1486662 - DNA, 15 bp, Homo sapiens
tgacttaggtcataa

SEQ ID NO: 1486663 - DNA, 15 bp, Homo sapiens
ctgacttaggtcata

SEQ ID NO: 1486664 - DNA, 15 bp, Homo sapiens
cctgacttaggtcat

SEQ ID NO: 1486665 - DNA, 15 bp, Homo sapiens
acctgacttaggtca

SEQ ID NO: 1486666 - DNA, 15 bp, Homo sapiens
tacctgacttaggtc

SEQ ID NO: 1486667 - DNA, 15 bp, Homo sapiens
ttacctgacttaggt

SEQ ID NO: 1486668 - DNA, 15 bp, Homo sapiens
attacctgacttagg

SEQ ID NO: 1486669 - DNA, 15 bp, Homo sapiens
tattacctgacttag

SEQ ID NO: 1486670 - DNA, 15 bp, Homo sapiens
atattacctgactta

SEQ ID NO: 1486671 - DNA, 15 bp, Homo sapiens
tatattacctgactt

SEQ ID NO: 1486672 - DNA, 15 bp, Homo sapiens
gtatattacctgact

SEQ ID NO: 1486673 - DNA, 15 bp, Homo sapiens
ggtatattacctgac

SEQ ID NO: 1486674 - DNA, 15 bp, Homo sapiens
aggtatattacctga

SEQ ID NO: 1486675 - DNA, 15 bp, Homo sapiens
caggtatattacctg

SEQ ID NO: 1486676 - DNA, 15 bp, Homo sapiens
ccaggtatattacct

SEQ ID NO: 1486677 - DNA, 15 bp, Homo sapiens
accaggtatattacc

SEQ ID NO: 1486678 - DNA, 15 bp, Homo sapiens
aaccaggtatattac

SEQ ID NO: 1486679 - DNA, 15 bp, Homo sapiens
aaaccaggtatatta

SEQ ID NO: 1486680 - DNA, 15 bp, Homo sapiens
taaaccaggtatatt

SEQ ID NO: 1486681 - DNA, 15 bp, Homo sapiens
gtaaaccaggtatat

SEQ ID NO: 1486682 - DNA, 15 bp, Homo sapiens
agtaaaccaggtata

SEQ ID NO: 1486683 - DNA, 15 bp, Homo sapiens
aagtaaaccaggtat

SEQ ID NO: 1486684 - DNA, 15 bp, Homo sapiens
gaagtaaaccaggta

SEQ ID NO: 1486685 - DNA, 15 bp, Homo sapiens
agaagtaaaccaggt

SEQ ID NO: 1486686 - DNA, 15 bp, Homo sapiens
aagaagtaaaccagg

SEQ ID NO: 1486687 - DNA, 15 bp, Homo sapiens
aaagaagtaaaccag

SEQ ID NO: 1486688 - DNA, 15 bp, Homo sapiens
taaagaagtaaacca

SEQ ID NO: 1486689 - DNA, 15 bp, Homo sapiens
ctaaagaagtaaacc

SEQ ID NO: 1486690 - DNA, 15 bp, Homo sapiens
gctaaagaagtaaac

SEQ ID NO: 1486691 - DNA, 15 bp, Homo sapiens
tgctaaagaagtaaa

SEQ ID NO: 1486692 - DNA, 15 bp, Homo sapiens
atgctaaagaagtaa

SEQ ID NO: 1486693 - DNA, 15 bp, Homo sapiens
aatgctaaagaagta

SEQ ID NO: 1486694 - DNA, 15 bp, Homo sapiens
aaatgctaaagaagt

SEQ ID NO: 1486695 - DNA, 15 bp, Homo sapiens
aaaatgctaaagaag

SEQ ID NO: 1486696 - DNA, 15 bp, Homo sapiens
aaaaatgctaaagaa

SEQ ID NO: 1486697 - DNA, 15 bp, Homo sapiens
taaaaatgctaaaga

SEQ ID NO: 1486698 - DNA, 15 bp, Homo sapiens
ataaaaatgctaaag

SEQ ID NO: 1486699 - DNA, 15 bp, Homo sapiens
cataaaaatgctaaa

SEQ ID NO: 1486700 - DNA, 15 bp, Homo sapiens
gcataaaaatgctaa

SEQ ID NO: 1486701 - DNA, 15 bp, Homo sapiens
tgcataaaaatgcta

SEQ ID NO: 1486702 - DNA, 15 bp, Homo sapiens
ctgcataaaaatgct

SEQ ID NO: 1486703 - DNA, 15 bp, Homo sapiens
tctgcataaaaatgc

SEQ ID NO: 1486704 - DNA, 15 bp, Homo sapiens
gtctgcataaaaatg

SEQ ID NO: 1486705 - DNA, 15 bp, Homo sapiens
tgtctgcataaaaat

SEQ ID NO: 1486706 - DNA, 15 bp, Homo sapiens
ctgtctgcataaaaa

SEQ ID NO: 1486707 - DNA, 15 bp, Homo sapiens
actgtctgcataaaa

SEQ ID NO: 1486708 - DNA, 15 bp, Homo sapiens
gactgtctgcataaa

SEQ ID NO: 1486709 - DNA, 15 bp, Homo sapiens
agactgtctgcataa

SEQ ID NO: 1486710 - DNA, 15 bp, Homo sapiens
cagactgtctgcata

SEQ ID NO: 1486711 - DNA, 15 bp, Homo sapiens
acagactgtctgcat

SEQ ID NO: 1486712 - DNA, 15 bp, Homo sapiens
aacagactgtctgca

SEQ ID NO: 1486713 - DNA, 15 bp, Homo sapiens
taacagactgtctgc

SEQ ID NO: 1486714 - DNA, 15 bp, Homo sapiens
ataacagactgtctg

SEQ ID NO: 1486715 - DNA, 15 bp, Homo sapiens
cataacagactgtct

SEQ ID NO: 1486716 - DNA, 15 bp, Homo sapiens
tgcataacagactgt

SEQ ID NO: 1486717 - DNA, 15 bp, Homo sapiens
gtgcataacagactg

SEQ ID NO: 1486718 - DNA, 15 bp, Homo sapiens
agtgcataacagact

SEQ ID NO: 1486719 - DNA, 15 bp, Homo sapiens
cagtgcataacagac

SEQ ID NO: 1486720 - DNA, 15 bp, Homo sapiens
acagtgcataacaga

SEQ ID NO: 1486721 - DNA, 15 bp, Homo sapiens
cacagtgcataacag

SEQ ID NO: 1486722 - DNA, 15 bp, Homo sapiens
ccacagtgcataaca

SEQ ID NO: 1486723 - DNA, 15 bp, Homo sapiens
accacagtgcataac

SEQ ID NO: 1486724 - DNA, 15 bp, Homo sapiens
aaccacagtgcataa

SEQ ID NO: 1486725 - DNA, 15 bp, Homo sapiens
aaaccacagtgcata

SEQ ID NO: 1486726 - DNA, 15 bp, Homo sapiens
gaaaccacagtgcat

SEQ ID NO: 1486727 - DNA, 15 bp, Homo sapiens
tgaaaccacagtgca

SEQ ID NO: 1486728 - DNA, 15 bp, Homo sapiens
ctgaaaccacagtgc

SEQ ID NO: 1486729 - DNA, 15 bp, Homo sapiens
tctgaaaccacagtg

SEQ ID NO: 1486730 - DNA, 15 bp, Homo sapiens
atctgaaaccacagt

SEQ ID NO: 1486731 - DNA, 15 bp, Homo sapiens
catctgaaaccacag

SEQ ID NO: 1486732 - DNA, 15 bp, Homo sapiens
acatctgaaaccaca

SEQ ID NO: 1486733 - DNA, 15 bp, Homo sapiens
cacatctgaaaccac

SEQ ID NO: 1486734 - DNA, 15 bp, Homo sapiens
gcacatctgaaacca

SEQ ID NO: 1486735 - DNA, 15 bp, Homo sapiens
tgcacatctgaaacc

SEQ ID NO: 1486736 - DNA, 15 bp, Homo sapiens
ttgcacatctgaaac

SEQ ID NO: 1486737 - DNA, 15 bp, Homo sapiens
attgcacatctgaaa

SEQ ID NO: 1486738 - DNA, 15 bp, Homo sapiens
tattgcacatctgaa

SEQ ID NO: 1486739 - DNA, 15 bp, Homo sapiens
gtcttgagggctgaa

SEQ ID NO: 1486740 - DNA, 15 bp, Homo sapiens
agtcttgagggctga

SEQ ID NO: 1486741 - DNA, 15 bp, Homo sapiens
tagtcttgagggctg

SEQ ID NO: 1486742 - DNA, 15 bp, Homo sapiens
ctagtcttgagggct

SEQ ID NO: 1486743 - DNA, 15 bp, Homo sapiens
tctagtcttgagggc

SEQ ID NO: 1486744 - DNA, 15 bp, Homo sapiens
gtctagtcttgaggg

SEQ ID NO: 1486745 - DNA, 15 bp, Homo sapiens
cgtctagtcttgagg

SEQ ID NO: 1486746 - DNA, 15 bp, Homo sapiens
gcgtctagtcttgag

SEQ ID NO: 1486747 - DNA, 15 bp, Homo sapiens
tgcgtctagtcttga

SEQ ID NO: 1486748 - DNA, 15 bp, Homo sapiens
gtgcgtctagtcttg

SEQ ID NO: 1486749 - DNA, 15 bp, Homo sapiens
agtgcgtctagtctt

SEQ ID NO: 1486750 - DNA, 15 bp, Homo sapiens
cagtgcgtctagtct

SEQ ID NO: 1486751 - DNA, 15 bp, Homo sapiens
acagtgcgtctagtc

SEQ ID NO: 1486752 - DNA, 15 bp, Homo sapiens
tacagtgcgtctagt

SEQ ID NO: 1486753 - DNA, 15 bp, Homo sapiens
atacagtgcgtctag

SEQ ID NO: 1486754 - DNA, 15 bp, Homo sapiens
aatacagtgcgtcta

SEQ ID NO: 1486755 - DNA, 15 bp, Homo sapiens
aaatacagtgcgtct

SEQ ID NO: 1486756 - DNA, 15 bp, Homo sapiens
aaaatacagtgcgtc

SEQ ID NO: 1486757 - DNA, 15 bp, Homo sapiens
caaaatacagtgcgt

SEQ ID NO: 1486758 - DNA, 15 bp, Homo sapiens
acaaaatacagtgcg

SEQ ID NO: 1486759 - DNA, 15 bp, Homo sapiens
aacaaaatacagtgc

SEQ ID NO: 1486760 - DNA, 15 bp, Homo sapiens
taacaaaatacagtg

SEQ ID NO: 1486761 - DNA, 15 bp, Homo sapiens
ttaacaaaatacagt

SEQ ID NO: 1486762 - DNA, 15 bp, Homo sapiens
gttaacaaaatacag

SEQ ID NO: 1486763 - DNA, 15 bp, Homo sapiens
tgttaacaaaataca

SEQ ID NO: 1486764 - DNA, 15 bp, Homo sapiens
ttgttaacaaaatac

SEQ ID NO: 1486765 - DNA, 15 bp, Homo sapiens
tttgttaacaaaata

SEQ ID NO: 1486766 - DNA, 15 bp, Homo sapiens
ttttgttaacaaaat

SEQ ID NO: 1486767 - DNA, 15 bp, Homo sapiens
gttttgttaacaaaa

SEQ ID NO: 1486768 - DNA, 15 bp, Homo sapiens
tgttttgttaacaaa

SEQ ID NO: 1486769 - DNA, 15 bp, Homo sapiens
ttgttttgttaacaa

SEQ ID NO: 1486770 - DNA, 15 bp, Homo sapiens
cttgttttgttaaca

SEQ ID NO: 1486771 - DNA, 15 bp, Homo sapiens
ccttgttttgttaac

SEQ ID NO: 1486772 - DNA, 15 bp, Homo sapiens
gccttgttttgttaa

SEQ ID NO: 1486773 - DNA, 15 bp, Homo sapiens
ggccttgttttgtta

SEQ ID NO: 1486774 - DNA, 15 bp, Homo sapiens
tggccttgttttgtt

SEQ ID NO: 1486775 - DNA, 15 bp, Homo sapiens
atggccttgttttgt

SEQ ID NO: 1486776 - DNA, 15 bp, Homo sapiens
tatggccttgttttg

SEQ ID NO: 1486777 - DNA, 15 bp, Homo sapiens
atatggccttgtttt

SEQ ID NO: 1486778 - DNA, 15 bp, Homo sapiens
tatatggccttgttt

SEQ ID NO: 1486779 - DNA, 15 bp, Homo sapiens
gtatatggccttgtt

SEQ ID NO: 1486780 - DNA, 15 bp, Homo sapiens
ggtatatggccttgt

SEQ ID NO: 1486781 - DNA, 15 bp, Homo sapiens
gggtatatggccttg

SEQ ID NO: 1486782 - DNA, 15 bp, Homo sapiens
tgggtatatggcctt

SEQ ID NO: 1486783 - DNA, 15 bp, Homo sapiens
ctgggtatatggcct

SEQ ID NO: 1486784 - DNA, 15 bp, Homo sapiens
cctgggtatatggcc

SEQ ID NO: 1486785 - DNA, 15 bp, Homo sapiens
gcctgggtatatggc

SEQ ID NO: 1486786 - DNA, 15 bp, Homo sapiens
cgcctgggtatatgg

SEQ ID NO: 1486787 - DNA, 15 bp, Homo sapiens
acgcctgggtatatg

SEQ ID NO: 1486788 - DNA, 15 bp, Homo sapiens
gacgcctgggtatat

SEQ ID NO: 1486789 - DNA, 15 bp, Homo sapiens
tgacgcctgggtata

SEQ ID NO: 1486790 - DNA, 15 bp, Homo sapiens
ctgacgcctgggtat

SEQ ID NO: 1486791 - DNA, 15 bp, Homo sapiens
actgacgcctgggta

SEQ ID NO: 1486792 - DNA, 15 bp, Homo sapiens
cactgacgcctgggt

SEQ ID NO: 1486793 - DNA, 15 bp, Homo sapiens
ccactgacgcctggg

SEQ ID NO: 1486794 - DNA, 15 bp, Homo sapiens
gccactgacgcctgg

SEQ ID NO: 1486795 - DNA, 15 bp, Homo sapiens
agccactgacgcctg

SEQ ID NO: 1486796 - DNA, 15 bp, Homo sapiens
cagccactgacgcct

SEQ ID NO: 1486797 - DNA, 15 bp, Homo sapiens
acagccactgacgcc

SEQ ID NO: 1486798 - DNA, 15 bp, Homo sapiens
gacagccactgacgc

SEQ ID NO: 1486799 - DNA, 15 bp, Homo sapiens
ggacagccactgacg

SEQ ID NO: 1486800 - DNA, 15 bp, Homo sapiens
gggacagccactgac

SEQ ID NO: 1486801 - DNA, 15 bp, Homo sapiens
ggggacagccactga

SEQ ID NO: 1486802 - DNA, 15 bp, Homo sapiens
aggggacagccactg

SEQ ID NO: 1486803 - DNA, 15 bp, Homo sapiens
gaggggacagccact

SEQ ID NO: 1486804 - DNA, 15 bp, Homo sapiens
agaggggacagccac

SEQ ID NO: 1486805 - DNA, 15 bp, Homo sapiens
cagaggggacagcca

SEQ ID NO: 1486806 - DNA, 15 bp, Homo sapiens
ccagaggggacagcc

SEQ ID NO: 1486807 - DNA, 15 bp, Homo sapiens
gccagaggggacagc

SEQ ID NO: 1486808 - DNA, 15 bp, Homo sapiens
tgccagaggggacag

SEQ ID NO: 1486809 - DNA, 15 bp, Homo sapiens
ctgccagaggggaca

SEQ ID NO: 1486810 - DNA, 15 bp, Homo sapiens
actgccagaggggac

SEQ ID NO: 1486811 - DNA, 15 bp, Homo sapiens
gactgccagagggga

SEQ ID NO: 1486812 - DNA, 15 bp, Homo sapiens
agactgccagagggg

SEQ ID NO: 1486813 - DNA, 15 bp, Homo sapiens
gagactgccagaggg

SEQ ID NO: 1486814 - DNA, 15 bp, Homo sapiens
agagactgccagagg

SEQ ID NO: 1486815 - DNA, 15 bp, Homo sapiens
gagagactgccagag

SEQ ID NO: 1486816 - DNA, 15 bp, Homo sapiens
agagagactgccaga

SEQ ID NO: 1486817 - DNA, 15 bp, Homo sapiens
gagagagactgccag

SEQ ID NO: 1486818 - DNA, 15 bp, Homo sapiens
ggagagagactgcca

SEQ ID NO: 1486819 - DNA, 15 bp, Homo sapiens
tggagagagactgcc

SEQ ID NO: 1486820 - DNA, 15 bp, Homo sapiens
gtggagagagactgc

SEQ ID NO: 1486821 - DNA, 15 bp, Homo sapiens
ggtggagagagactg

SEQ ID NO: 1486822 - DNA, 15 bp, Homo sapiens
gggtggagagagact

SEQ ID NO: 1486823 - DNA, 15 bp, Homo sapiens
agggtggagagagac

SEQ ID NO: 1486824 - DNA, 15 bp, Homo sapiens
cagggtggagagaga

SEQ ID NO: 1486825 - DNA, 15 bp, Homo sapiens
acagggtggagagag

SEQ ID NO: 1486826 - DNA, 15 bp, Homo sapiens
aacagggtggagaga

SEQ ID NO: 1486827 - DNA, 15 bp, Homo sapiens
taacagggtggagag

SEQ ID NO: 1486828 - DNA, 15 bp, Homo sapiens
ctaacagggtggaga

SEQ ID NO: 1486829 - DNA, 15 bp, Homo sapiens
tctaacagggtggag

SEQ ID NO: 1486830 - DNA, 15 bp, Homo sapiens
ttctaacagggtgga

SEQ ID NO: 1486831 - DNA, 15 bp, Homo sapiens
tttctaacagggtgg

SEQ ID NO: 1486832 - DNA, 15 bp, Homo sapiens
gtttctaacagggtg

SEQ ID NO: 1486833 - DNA, 15 bp, Homo sapiens
agtttctaacagggt

SEQ ID NO: 1486834 - DNA, 15 bp, Homo sapiens
gagtttctaacaggg

SEQ ID NO: 1486835 - DNA, 15 bp, Homo sapiens
agagtttctaacagg

SEQ ID NO: 1486836 - DNA, 15 bp, Homo sapiens
cagagtttctaacag

SEQ ID NO: 1486837 - DNA, 15 bp, Homo sapiens
tcagagtttctaaca

SEQ ID NO: 1486838 - DNA, 15 bp, Homo sapiens
ttcagagtttctaac

SEQ ID NO: 1486839 - DNA, 15 bp, Homo sapiens
tttcagagtttctaa

SEQ ID NO: 1486840 - DNA, 15 bp, Homo sapiens
ctttcagagtttcta

SEQ ID NO: 1486841 - DNA, 15 bp, Homo sapiens
tctttcagagtttct

SEQ ID NO: 1486842 - DNA, 15 bp, Homo sapiens
atctttcagagtttc

SEQ ID NO: 1486843 - DNA, 15 bp, Homo sapiens
aatctttcagagttt

SEQ ID NO: 1486844 - DNA, 15 bp, Homo sapiens
gaatctttcagagtt

SEQ ID NO: 1486845 - DNA, 15 bp, Homo sapiens
tgaatctttcagagt

SEQ ID NO: 1486846 - DNA, 15 bp, Homo sapiens
ttgaatctttcagag

SEQ ID NO: 1486847 - DNA, 15 bp, Homo sapiens
tttgaatctttcaga

SEQ ID NO: 1486848 - DNA, 15 bp, Homo sapiens
ctttgaatctttcag

SEQ ID NO: 1486849 - DNA, 15 bp, Homo sapiens
cctttgaatctttca

SEQ ID NO: 1486850 - DNA, 15 bp, Homo sapiens
ccctttgaatctttc

SEQ ID NO: 1486851 - DNA, 15 bp, Homo sapiens
gccctttgaatcttt

SEQ ID NO: 1486852 - DNA, 15 bp, Homo sapiens
cgccctttgaatctt

SEQ ID NO: 1486853 - DNA, 15 bp, Homo sapiens
tcgccctttgaatct

SEQ ID NO: 1486854 - DNA, 15 bp, Homo sapiens
ctcgccctttgaatc

SEQ ID NO: 1486855 - DNA, 15 bp, Homo sapiens
cctcgccctttgaat

SEQ ID NO: 1486856 - DNA, 15 bp, Homo sapiens
tcctcgccctttgaa

SEQ ID NO: 1486857 - DNA, 15 bp, Homo sapiens
ctcctcgccctttga

SEQ ID NO: 1486858 - DNA, 15 bp, Homo sapiens
tctcctcgccctttg

SEQ ID NO: 1486859 - DNA, 15 bp, Homo sapiens
atctcctcgcccttt

SEQ ID NO: 1486860 - DNA, 15 bp, Homo sapiens
aatctcctcgccctt

SEQ ID NO: 1486861 - DNA, 15 bp, Homo sapiens
taatctcctcgccct

SEQ ID NO: 1486862 - DNA, 15 bp, Homo sapiens
ttaatctcctcgccc

SEQ ID NO: 1486863 - DNA, 15 bp, Homo sapiens
cttaatctcctcgcc

SEQ ID NO: 1486864 - DNA, 15 bp, Homo sapiens
ccttaatctcctcgc

SEQ ID NO: 1486865 - DNA, 15 bp, Homo sapiens
cccttaatctcctcg

SEQ ID NO: 1486866 - DNA, 15 bp, Homo sapiens
tcccttaatctcctc

SEQ ID NO: 1486867 - DNA, 15 bp, Homo sapiens
gtcccttaatctcct

SEQ ID NO: 1486868 - DNA, 15 bp, Homo sapiens
agtcccttaatctcc

SEQ ID NO: 1486869 - DNA, 15 bp, Homo sapiens
gagtcccttaatctc

SEQ ID NO: 1486870 - DNA, 15 bp, Homo sapiens
tgagtcccttaatct

SEQ ID NO: 1486871 - DNA, 15 bp, Homo sapiens
ttgagtcccttaatc

SEQ ID NO: 1486872 - DNA, 15 bp, Homo sapiens
tttgagtcccttaat

SEQ ID NO: 1486873 - DNA, 15 bp, Homo sapiens
ctttgagtcccttaa

SEQ ID NO: 1486874 - DNA, 15 bp, Homo sapiens
tctttgagtccctta

SEQ ID NO: 1486875 - DNA, 15 bp, Homo sapiens
ttctttgagtccctt

SEQ ID NO: 1486876 - DNA, 15 bp, Homo sapiens
attctttgagtccct

SEQ ID NO: 1486877 - DNA, 15 bp, Homo sapiens
aattctttgagtccc

SEQ ID NO: 1486878 - DNA, 15 bp, Homo sapiens
aaattctttgagtcc

SEQ ID NO: 1486879 - DNA, 15 bp, Homo sapiens
taaattctttgagtc

SEQ ID NO: 1486880 - DNA, 15 bp, Homo sapiens
ttaaattctttgagt

SEQ ID NO: 1486881 - DNA, 15 bp, Homo sapiens
tttaaattctttgag

SEQ ID NO: 1486882 - DNA, 15 bp, Homo sapiens
gtttaaattctttga

SEQ ID NO: 1486883 - DNA, 15 bp, Homo sapiens
agtttaaattctttg

SEQ ID NO: 1486884 - DNA, 15 bp, Homo sapiens
gagtttaaattcttt

SEQ ID NO: 1486885 - DNA, 15 bp, Homo sapiens
tgagtttaaattctt

SEQ ID NO: 1486886 - DNA, 15 bp, Homo sapiens
ttgagtttaaattct

SEQ ID NO: 1486887 - DNA, 15 bp, Homo sapiens
cttgagtttaaattc

SEQ ID NO: 1486888 - DNA, 15 bp, Homo sapiens
acttgagtttaaatt

SEQ ID NO: 1486889 - DNA, 15 bp, Homo sapiens
aacttgagtttaaat

SEQ ID NO: 1486890 - DNA, 15 bp, Homo sapiens
aaacttgagtttaaa

SEQ ID NO: 1486891 - DNA, 15 bp, Homo sapiens
caaacttgagtttaa

SEQ ID NO: 1486892 - DNA, 15 bp, Homo sapiens
ccaaacttgagttta

SEQ ID NO: 1486893 - DNA, 15 bp, Homo sapiens
tccaaacttgagttt

SEQ ID NO: 1486894 - DNA, 15 bp, Homo sapiens
atccaaacttgagtt

SEQ ID NO: 1486895 - DNA, 15 bp, Homo sapiens
tatccaaacttgagt

SEQ ID NO: 1486896 - DNA, 15 bp, Homo sapiens
ctatccaaacttgag

SEQ ID NO: 1486897 - DNA, 15 bp, Homo sapiens
actatccaaacttga

SEQ ID NO: 1486898 - DNA, 15 bp, Homo sapiens
cactatccaaacttg

SEQ ID NO: 1486899 - DNA, 15 bp, Homo sapiens
gcactatccaaactt

SEQ ID NO: 1486900 - DNA, 15 bp, Homo sapiens
agcactatccaaact

SEQ ID NO: 1486901 - DNA, 15 bp, Homo sapiens
aagcactatccaaac

SEQ ID NO: 1486902 - DNA, 15 bp, Homo sapiens
aaagcactatccaaa

SEQ ID NO: 1486903 - DNA, 15 bp, Homo sapiens
taaagcactatccaa

SEQ ID NO: 1486904 - DNA, 15 bp, Homo sapiens
ataaagcactatcca

SEQ ID NO: 1486905 - DNA, 15 bp, Homo sapiens
tataaagcactatcc

SEQ ID NO: 1486906 - DNA, 15 bp, Homo sapiens
ctataaagcactatc

SEQ ID NO: 1486907 - DNA, 15 bp, Homo sapiens
gctataaagcactat

SEQ ID NO: 1486908 - DNA, 15 bp, Homo sapiens
tgctataaagcacta

SEQ ID NO: 1486909 - DNA, 15 bp, Homo sapiens
gtgctataaagcact

SEQ ID NO: 1486910 - DNA, 15 bp, Homo sapiens
agtgctataaagcac

SEQ ID NO: 1486911 - DNA, 15 bp, Homo sapiens
aagtgctataaagca

SEQ ID NO: 1486912 - DNA, 15 bp, Homo sapiens
aaagtgctataaagc

SEQ ID NO: 1486913 - DNA, 15 bp, Homo sapiens
aaaagtgctataaag

SEQ ID NO: 1486914 - DNA, 15 bp, Homo sapiens
gaaaagtgctataaa

SEQ ID NO: 1486915 - DNA, 15 bp, Homo sapiens
tgaaaagtgctataa

SEQ ID NO: 1486916 - DNA, 15 bp, Homo sapiens
gtgaaaagtgctata

SEQ ID NO: 1486917 - DNA, 15 bp, Homo sapiens
ggtgaaaagtgctat

SEQ ID NO: 1486918 - DNA, 15 bp, Homo sapiens
cggtgaaaagtgcta

SEQ ID NO: 1486919 - DNA, 15 bp, Homo sapiens
acggtgaaaagtgct

SEQ ID NO: 1486920 - DNA, 15 bp, Homo sapiens
tacggtgaaaagtgc

SEQ ID NO: 1486921 - DNA, 15 bp, Homo sapiens
atacggtgaaaagtg

SEQ ID NO: 1486922 - DNA, 15 bp, Homo sapiens
aatacggtgaaaagt

SEQ ID NO: 1486923 - DNA, 15 bp, Homo sapiens
taatacggtgaaaag

SEQ ID NO: 1486924 - DNA, 15 bp, Homo sapiens
ataatacggtgaaaa

SEQ ID NO: 1486925 - DNA, 15 bp, Homo sapiens
gataatacggtgaaa

SEQ ID NO: 1486926 - DNA, 15 bp, Homo sapiens
agataatacggtgaa

SEQ ID NO: 1486927 - DNA, 15 bp, Homo sapiens
aagataatacggtga

SEQ ID NO: 1486928 - DNA, 15 bp, Homo sapiens
taagataatacggtg

SEQ ID NO: 1486929 - DNA, 15 bp, Homo sapiens
ataagataatacggt

SEQ ID NO: 1486930 - DNA, 15 bp, Homo sapiens
gataagataatacgg

SEQ ID NO: 1486931 - DNA, 15 bp, Homo sapiens
agataagataatacg

SEQ ID NO: 1486932 - DNA, 15 bp, Homo sapiens
gagataagataatac

SEQ ID NO: 1486933 - DNA, 15 bp, Homo sapiens
ggagataagataata

SEQ ID NO: 1486934 - DNA, 15 bp, Homo sapiens
aggagataagataat

SEQ ID NO: 1486935 - DNA, 15 bp, Homo sapiens
gaggagataagataa

SEQ ID NO: 1486936 - DNA, 15 bp, Homo sapiens
agaggagataagata

SEQ ID NO: 1486937 - DNA, 15 bp, Homo sapiens
cagaggagataagat

SEQ ID NO: 1486938 - DNA, 15 bp, Homo sapiens
acagaggagataaga

SEQ ID NO: 1486939 - DNA, 15 bp, Homo sapiens
tacagaggagataag

SEQ ID NO: 1486940 - DNA, 15 bp, Homo sapiens
ctacagaggagataa

SEQ ID NO: 1486941 - DNA, 15 bp, Homo sapiens
cctacagaggagata

SEQ ID NO: 1486942 - DNA, 15 bp, Homo sapiens
ccctacagaggagat

SEQ ID NO: 1486943 - DNA, 15 bp, Homo sapiens
gccctacagaggaga

SEQ ID NO: 1486944 - DNA, 15 bp, Homo sapiens
tgccctacagaggag

SEQ ID NO: 1486945 - DNA, 15 bp, Homo sapiens
ctgccctacagagga

SEQ ID NO: 1486946 - DNA, 15 bp, Homo sapiens
gctgccctacagagg

SEQ ID NO: 1486947 - DNA, 15 bp, Homo sapiens
tgctgccctacagag

SEQ ID NO: 1486948 - DNA, 15 bp, Homo sapiens
ctgctgccctacaga

SEQ ID NO: 1486949 - DNA, 15 bp, Homo sapiens
gctgctgccctacag

SEQ ID NO: 1486950 - DNA, 15 bp, Homo sapiens
ggctgctgccctaca

SEQ ID NO: 1486951 - DNA, 15 bp, Homo sapiens
cggctgctgccctac

SEQ ID NO: 1486952 - DNA, 15 bp, Homo sapiens
ccggctgctgcccta

SEQ ID NO: 1486953 - DNA, 15 bp, Homo sapiens
gccggctgctgccct

SEQ ID NO: 1486954 - DNA, 15 bp, Homo sapiens
ggccggctgctgccc

SEQ ID NO: 1486955 - DNA, 15 bp, Homo sapiens
aggccggctgctgcc

SEQ ID NO: 1486956 - DNA, 15 bp, Homo sapiens
gaggccggctgctgc

SEQ ID NO: 1486957 - DNA, 15 bp, Homo sapiens
agaggccggctgctg

SEQ ID NO: 1486958 - DNA, 15 bp, Homo sapiens
aagaggccggctgct

SEQ ID NO: 1486959 - DNA, 15 bp, Homo sapiens
taagaggccggctgc

SEQ ID NO: 1486960 - DNA, 15 bp, Homo sapiens
ttaagaggccggctg

SEQ ID NO: 1486961 - DNA, 15 bp, Homo sapiens
gttaagaggccggct

SEQ ID NO: 1486962 - DNA, 15 bp, Homo sapiens
tgttaagaggccggc

SEQ ID NO: 1486963 - DNA, 15 bp, Homo sapiens
ctgttaagaggccgg

SEQ ID NO: 1486964 - DNA, 15 bp, Homo sapiens
tctgttaagaggccg

SEQ ID NO: 1486965 - DNA, 15 bp, Homo sapiens
atctgttaagaggcc

SEQ ID NO: 1486966 - DNA, 15 bp, Homo sapiens
catctgttaagaggc

SEQ ID NO: 1486967 - DNA, 15 bp, Homo sapiens
tcatctgttaagagg

SEQ ID NO: 1486968 - DNA, 15 bp, Homo sapiens
ctcatctgttaagag

SEQ ID NO: 1486969 - DNA, 15 bp, Homo sapiens
cctcatctgttaaga

SEQ ID NO: 1486970 - DNA, 15 bp, Homo sapiens
tcctcatctgttaag

SEQ ID NO: 1486971 - DNA, 15 bp, Homo sapiens
gtcctcatctgttaa

SEQ ID NO: 1486972 - DNA, 15 bp, Homo sapiens
tgtcctcatctgtta

SEQ ID NO: 1486973 - DNA, 15 bp, Homo sapiens
atgtcctcatctgtt

SEQ ID NO: 1486974 - DNA, 15 bp, Homo sapiens
aatgtcctcatctgt

SEQ ID NO: 1486975 - DNA, 15 bp, Homo sapiens
aaatgtcctcatctg

SEQ ID NO: 1486976 - DNA, 15 bp, Homo sapiens
gaaatgtcctcatct

SEQ ID NO: 1486977 - DNA, 15 bp, Homo sapiens
tgaaatgtcctcatc

SEQ ID NO: 1486978 - DNA, 15 bp, Homo sapiens
ctgaaatgtcctcat

SEQ ID NO: 1486979 - DNA, 15 bp, Homo sapiens
gctgaaatgtcctca

SEQ ID NO: 1486980 - DNA, 15 bp, Homo sapiens
tgctgaaatgtcctc

SEQ ID NO: 1486981 - DNA, 15 bp, Homo sapiens
ttgctgaaatgtcct

SEQ ID NO: 1486982 - DNA, 15 bp, Homo sapiens
tttgctgaaatgtcc

SEQ ID NO: 1486983 - DNA, 15 bp, Homo sapiens
ctttgctgaaatgtc

SEQ ID NO: 1486984 - DNA, 15 bp, Homo sapiens
actttgctgaaatgt

SEQ ID NO: 1486985 - DNA, 15 bp, Homo sapiens
aactttgctgaaatg

SEQ ID NO: 1486986 - DNA, 15 bp, Homo sapiens
gaactttgctgaaat

SEQ ID NO: 1486987 - DNA, 15 bp, Homo sapiens
tgaactttgctgaaa

SEQ ID NO: 1486988 - DNA, 15 bp, Homo sapiens
ctgaactttgctgaa

SEQ ID NO: 1486989 - DNA, 15 bp, Homo sapiens
tctgaactttgctga

SEQ ID NO: 1486990 - DNA, 15 bp, Homo sapiens
ctctgaactttgctg

SEQ ID NO: 1486991 - DNA, 15 bp, Homo sapiens
tctctgaactttgct

SEQ ID NO: 1486992 - DNA, 15 bp, Homo sapiens
ctctctgaactttgc

SEQ ID NO: 1486993 - DNA, 15 bp, Homo sapiens
cctctctgaactttg

SEQ ID NO: 1486994 - DNA, 15 bp, Homo sapiens
tcctctctgaacttt

SEQ ID NO: 1486995 - DNA, 15 bp, Homo sapiens
ttcctctctgaactt

SEQ ID NO: 1486996 - DNA, 15 bp, Homo sapiens
attcctctctgaact

SEQ ID NO: 1486997 - DNA, 15 bp, Homo sapiens
gattcctctctgaac

SEQ ID NO: 1486998 - DNA, 15 bp, Homo sapiens
cgattcctctctgaa

SEQ ID NO: 1486999 - DNA, 15 bp, Homo sapiens
ccgattcctctctga

SEQ ID NO: 1487000 - DNA, 15 bp, Homo sapiens
gccgattcctctctg

SEQ ID NO: 1487001 - DNA, 15 bp, Homo sapiens
tgccgattcctctct

SEQ ID NO: 1487002 - DNA, 15 bp, Homo sapiens
ctgccgattcctctc

SEQ ID NO: 1487003 - DNA, 15 bp, Homo sapiens
actgccgattcctct

SEQ ID NO: 1487004 - DNA, 15 bp, Homo sapiens
aactgccgattcctc

SEQ ID NO: 1487005 - DNA, 15 bp, Homo sapiens
aaactgccgattcct

SEQ ID NO: 1487006 - DNA, 15 bp, Homo sapiens
caaactgccgattcc

SEQ ID NO: 1487007 - DNA, 15 bp, Homo sapiens
ccaaactgccgattc

SEQ ID NO: 1487008 - DNA, 15 bp, Homo sapiens
cccaaactgccgatt

SEQ ID NO: 1487009 - DNA, 15 bp, Homo sapiens
gcccaaactgccgat

SEQ ID NO: 1487010 - DNA, 15 bp, Homo sapiens
ggcccaaactgccga

SEQ ID NO: 1487011 - DNA, 15 bp, Homo sapiens
aggcccaaactgccg

SEQ ID NO: 1487012 - DNA, 15 bp, Homo sapiens
caggcccaaactgcc

SEQ ID NO: 1487013 - DNA, 15 bp, Homo sapiens
tcaggcccaaactgc

SEQ ID NO: 1487014 - DNA, 15 bp, Homo sapiens
gtcaggcccaaactg

SEQ ID NO: 1487015 - DNA, 15 bp, Homo sapiens
ggtcaggcccaaact

SEQ ID NO: 1487016 - DNA, 15 bp, Homo sapiens
tggtcaggcccaaac

SEQ ID NO: 1487017 - DNA, 15 bp, Homo sapiens
ttggtcaggcccaaa

SEQ ID NO: 1487018 - DNA, 15 bp, Homo sapiens
tttggtcaggcccaa

SEQ ID NO: 1487019 - DNA, 15 bp, Homo sapiens
ttttggtcaggccca

SEQ ID NO: 1487020 - DNA, 15 bp, Homo sapiens
tttttggtcaggccc

SEQ ID NO: 1487021 - DNA, 15 bp, Homo sapiens
ttttttggtcaggcc

SEQ ID NO: 1487022 - DNA, 15 bp, Homo sapiens
tttttttggtcaggc

SEQ ID NO: 1487023 - DNA, 15 bp, Homo sapiens
ttttttttggtcagg

SEQ ID NO: 1487024 - DNA, 15 bp, Homo sapiens
tttttttttggtcag

SEQ ID NO: 1487025 - DNA, 15 bp, Homo sapiens
ttttttttttggtca

SEQ ID NO: 1487026 - DNA, 15 bp, Homo sapiens
tttttttttttggtc

SEQ ID NO: 1487027 - DNA, 15 bp, Homo sapiens
ccccagctttttttt

SEQ ID NO: 1487028 - DNA, 15 bp, Homo sapiens
tccccagcttttttt

SEQ ID NO: 1487029 - DNA, 15 bp, Homo sapiens
gtccccagctttttt

SEQ ID NO: 1487030 - DNA, 15 bp, Homo sapiens
ggtccccagcttttt

SEQ ID NO: 1487031 - DNA, 15 bp, Homo sapiens
tggtccccagctttt

SEQ ID NO: 1487032 - DNA, 15 bp, Homo sapiens
atggtccccagcttt

SEQ ID NO: 1487033 - DNA, 15 bp, Homo sapiens
aatggtccccagctt

SEQ ID NO: 1487034 - DNA, 15 bp, Homo sapiens
aaatggtccccagct

SEQ ID NO: 1487035 - DNA, 15 bp, Homo sapiens
taaatggtccccagc

SEQ ID NO: 1487036 - DNA, 15 bp, Homo sapiens
ttaaatggtccccag

SEQ ID NO: 1487037 - DNA, 15 bp, Homo sapiens
attaaatggtcccca

SEQ ID NO: 1487038 - DNA, 15 bp, Homo sapiens
cattaaatggtcccc

SEQ ID NO: 1487039 - DNA, 15 bp, Homo sapiens
tcattaaatggtccc

SEQ ID NO: 1487040 - DNA, 15 bp, Homo sapiens
atcattaaatggtcc

SEQ ID NO: 1487041 - DNA, 15 bp, Homo sapiens
gatcattaaatggtc

SEQ ID NO: 1487042 - DNA, 15 bp, Homo sapiens
tgatcattaaatggt

SEQ ID NO: 1487043 - DNA, 15 bp, Homo sapiens
gtgatcattaaatgg

SEQ ID NO: 1487044 - DNA, 15 bp, Homo sapiens
ggtgatcattaaatg

SEQ ID NO: 1487045 - DNA, 15 bp, Homo sapiens
aggtgatcattaaat

SEQ ID NO: 1487046 - DNA, 15 bp, Homo sapiens
taggtgatcattaaa

SEQ ID NO: 1487047 - DNA, 15 bp, Homo sapiens
gtaggtgatcattaa

SEQ ID NO: 1487048 - DNA, 15 bp, Homo sapiens
ggtaggtgatcatta

SEQ ID NO: 1487049 - DNA, 15 bp, Homo sapiens
tggtaggtgatcatt

SEQ ID NO: 1487050 - DNA, 15 bp, Homo sapiens
ctggtaggtgatcat

SEQ ID NO: 1487051 - DNA, 15 bp, Homo sapiens
cctggtaggtgatca

SEQ ID NO: 1487052 - DNA, 15 bp, Homo sapiens
acctggtaggtgatc

SEQ ID NO: 1487053 - DNA, 15 bp, Homo sapiens
cacctggtaggtgat

SEQ ID NO: 1487054 - DNA, 15 bp, Homo sapiens
ccacctggtaggtga

SEQ ID NO: 1487055 - DNA, 15 bp, Homo sapiens
gccacctggtaggtg

SEQ ID NO: 1487056 - DNA, 15 bp, Homo sapiens
tgccacctggtaggt

SEQ ID NO: 1487057 - DNA, 15 bp, Homo sapiens
ctgccacctggtagg

SEQ ID NO: 1487058 - DNA, 15 bp, Homo sapiens
tctgccacctggtag

SEQ ID NO: 1487059 - DNA, 15 bp, Homo sapiens
gtctgccacctggta

SEQ ID NO: 1487060 - DNA, 15 bp, Homo sapiens
tgtctgccacctggt

SEQ ID NO: 1487061 - DNA, 15 bp, Homo sapiens
ctgtctgccacctgg

SEQ ID NO: 1487062 - DNA, 15 bp, Homo sapiens
tctgtctgccacctg

SEQ ID NO: 1487063 - DNA, 15 bp, Homo sapiens
gtctgtctgccacct

SEQ ID NO: 1487064 - DNA, 15 bp, Homo sapiens
tgtctgtctgccacc

SEQ ID NO: 1487065 - DNA, 15 bp, Homo sapiens
ctgtctgtctgccac

SEQ ID NO: 1487066 - DNA, 15 bp, Homo sapiens
cctgtctgtctgcca

SEQ ID NO: 1487067 - DNA, 15 bp, Homo sapiens
ccctgtctgtctgcc

SEQ ID NO: 1487068 - DNA, 15 bp, Homo sapiens
gccctgtctgtctgc

SEQ ID NO: 1487069 - DNA, 15 bp, Homo sapiens
agccctgtctgtctg

SEQ ID NO: 1487070 - DNA, 15 bp, Homo sapiens
gagccctgtctgtct

SEQ ID NO: 1487071 - DNA, 15 bp, Homo sapiens
agagccctgtctgtc

SEQ ID NO: 1487072 - DNA, 15 bp, Homo sapiens
cagagccctgtctgt

SEQ ID NO: 1487073 - DNA, 15 bp, Homo sapiens
ccagagccctgtctg

SEQ ID NO: 1487074 - DNA, 15 bp, Homo sapiens
cccagagccctgtct

SEQ ID NO: 1487075 - DNA, 15 bp, Homo sapiens
acccagagccctgtc

SEQ ID NO: 1487076 - DNA, 15 bp, Homo sapiens
tacccagagccctgt

SEQ ID NO: 1487077 - DNA, 15 bp, Homo sapiens
gtacccagagccctg

SEQ ID NO: 1487078 - DNA, 15 bp, Homo sapiens
agtacccagagccct

SEQ ID NO: 1487079 - DNA, 15 bp, Homo sapiens
gagtacccagagccc

SEQ ID NO: 1487080 - DNA, 15 bp, Homo sapiens
agagtacccagagcc

SEQ ID NO: 1487081 - DNA, 15 bp, Homo sapiens
aagagtacccagagc

SEQ ID NO: 1487082 - DNA, 15 bp, Homo sapiens
taagagtacccagag

SEQ ID NO: 1487083 - DNA, 15 bp, Homo sapiens
ttaagagtacccaga

SEQ ID NO: 1487084 - DNA, 15 bp, Homo sapiens
tttaagagtacccag

SEQ ID NO: 1487085 - DNA, 15 bp, Homo sapiens
ttttaagagtaccca

SEQ ID NO: 1487086 - DNA, 15 bp, Homo sapiens
attttaagagtaccc

SEQ ID NO: 1487087 - DNA, 15 bp, Homo sapiens
aattttaagagtacc

SEQ ID NO: 1487088 - DNA, 15 bp, Homo sapiens
aaattttaagagtac

SEQ ID NO: 1487089 - DNA, 15 bp, Homo sapiens
aaaattttaagagta

SEQ ID NO: 1487090 - DNA, 15 bp, Homo sapiens
taaaattttaagagt

SEQ ID NO: 1487091 - DNA, 15 bp, Homo sapiens
ctaaaattttaagag

SEQ ID NO: 1487092 - DNA, 15 bp, Homo sapiens
actaaaattttaaga

SEQ ID NO: 1487093 - DNA, 15 bp, Homo sapiens
tactaaaattttaag

SEQ ID NO: 1487094 - DNA, 15 bp, Homo sapiens
gtactaaaattttaa

SEQ ID NO: 1487095 - DNA, 15 bp, Homo sapiens
agtactaaaatttta

SEQ ID NO: 1487096 - DNA, 15 bp, Homo sapiens
cagtactaaaatttt

SEQ ID NO: 1487097 - DNA, 15 bp, Homo sapiens
acagtactaaaattt

SEQ ID NO: 1487098 - DNA, 15 bp, Homo sapiens
cacagtactaaaatt

SEQ ID NO: 1487099 - DNA, 15 bp, Homo sapiens
ccacagtactaaaat

SEQ ID NO: 1487100 - DNA, 15 bp, Homo sapiens
tccacagtactaaaa

SEQ ID NO: 1487101 - DNA, 15 bp, Homo sapiens
gtccacagtactaaa

SEQ ID NO: 1487102 - DNA, 15 bp, Homo sapiens
ggtccacagtactaa

SEQ ID NO: 1487103 - DNA, 15 bp, Homo sapiens
tggtccacagtacta

SEQ ID NO: 1487104 - DNA, 15 bp, Homo sapiens
gtggtccacagtact

SEQ ID NO: 1487105 - DNA, 15 bp, Homo sapiens
tgtggtccacagtac

SEQ ID NO: 1487106 - DNA, 15 bp, Homo sapiens
atgtggtccacagta

SEQ ID NO: 1487107 - DNA, 15 bp, Homo sapiens
aatgtggtccacagt

SEQ ID NO: 1487108 - DNA, 15 bp, Homo sapiens
caatgtggtccacag

SEQ ID NO: 1487109 - DNA, 15 bp, Homo sapiens
tcaatgtggtccaca

SEQ ID NO: 1487110 - DNA, 15 bp, Homo sapiens
ctcaatgtggtccac

SEQ ID NO: 1487111 - DNA, 15 bp, Homo sapiens
cctcaatgtggtcca

SEQ ID NO: 1487112 - DNA, 15 bp, Homo sapiens
ccctcaatgtggtcc

SEQ ID NO: 1487113 - DNA, 15 bp, Homo sapiens
tccctcaatgtggtc

SEQ ID NO: 1487114 - DNA, 15 bp, Homo sapiens
atccctcaatgtggt

SEQ ID NO: 1487115 - DNA, 15 bp, Homo sapiens
aatccctcaatgtgg

SEQ ID NO: 1487116 - DNA, 15 bp, Homo sapiens
taatccctcaatgtg

SEQ ID NO: 1487117 - DNA, 15 bp, Homo sapiens
ctaatccctcaatgt

SEQ ID NO: 1487118 - DNA, 15 bp, Homo sapiens
actaatccctcaatg

SEQ ID NO: 1487119 - DNA, 15 bp, Homo sapiens
cactaatccctcaat

SEQ ID NO: 1487120 - DNA, 15 bp, Homo sapiens
acactaatccctcaa

SEQ ID NO: 1487121 - DNA, 15 bp, Homo sapiens
aacactaatccctca

SEQ ID NO: 1487122 - DNA, 15 bp, Homo sapiens
taacactaatccctc

SEQ ID NO: 1487123 - DNA, 15 bp, Homo sapiens
gtaacactaatccct

SEQ ID NO: 1487124 - DNA, 15 bp, Homo sapiens
agtaacactaatccc

SEQ ID NO: 1487125 - DNA, 15 bp, Homo sapiens
aagtaacactaatcc

SEQ ID NO: 1487126 - DNA, 15 bp, Homo sapiens
taagtaacactaatc

SEQ ID NO: 1487127 - DNA, 15 bp, Homo sapiens
gtaagtaacactaat

SEQ ID NO: 1487128 - DNA, 15 bp, Homo sapiens
ggtaagtaacactaa

SEQ ID NO: 1487129 - DNA, 15 bp, Homo sapiens
gggtaagtaacacta

SEQ ID NO: 1487130 - DNA, 15 bp, Homo sapiens
tgggtaagtaacact

SEQ ID NO: 1487131 - DNA, 15 bp, Homo sapiens
gtgggtaagtaacac

SEQ ID NO: 1487132 - DNA, 15 bp, Homo sapiens
agtgggtaagtaaca

SEQ ID NO: 1487133 - DNA, 15 bp, Homo sapiens
aagtgggtaagtaac

SEQ ID NO: 1487134 - DNA, 15 bp, Homo sapiens
aaagtgggtaagtaa

SEQ ID NO: 1487135 - DNA, 15 bp, Homo sapiens
taaagtgggtaagta

SEQ ID NO: 1487136 - DNA, 15 bp, Homo sapiens
ataaagtgggtaagt

SEQ ID NO: 1487137 - DNA, 15 bp, Homo sapiens
gataaagtgggtaag

SEQ ID NO: 1487138 - DNA, 15 bp, Homo sapiens
cgataaagtgggtaa

SEQ ID NO: 1487139 - DNA, 15 bp, Homo sapiens
tcgataaagtgggta

SEQ ID NO: 1487140 - DNA, 15 bp, Homo sapiens
gtcgataaagtgggt

SEQ ID NO: 1487141 - DNA, 15 bp, Homo sapiens
tgtcgataaagtggg

SEQ ID NO: 1487142 - DNA, 15 bp, Homo sapiens
ctgtcgataaagtgg

SEQ ID NO: 1487143 - DNA, 15 bp, Homo sapiens
actgtcgataaagtg

SEQ ID NO: 1487144 - DNA, 15 bp, Homo sapiens
cactgtcgataaagt

SEQ ID NO: 1487145 - DNA, 15 bp, Homo sapiens
tcactgtcgataaag

SEQ ID NO: 1487146 - DNA, 15 bp, Homo sapiens
ctcactgtcgataaa

SEQ ID NO: 1487147 - DNA, 15 bp, Homo sapiens
cctcactgtcgataa

SEQ ID NO: 1487148 - DNA, 15 bp, Homo sapiens
acctcactgtcgata

SEQ ID NO: 1487149 - DNA, 15 bp, Homo sapiens
tacctcactgtcgat

SEQ ID NO: 1487150 - DNA, 15 bp, Homo sapiens
ctacctcactgtcga

SEQ ID NO: 1487151 - DNA, 15 bp, Homo sapiens
tctacctcactgtcg

SEQ ID NO: 1487152 - DNA, 15 bp, Homo sapiens
ctctacctcactgtc

SEQ ID NO: 1487153 - DNA, 15 bp, Homo sapiens
cctctacctcactgt

SEQ ID NO: 1487154 - DNA, 15 bp, Homo sapiens
gcctctacctcactg

SEQ ID NO: 1487155 - DNA, 15 bp, Homo sapiens
agcctctacctcact

SEQ ID NO: 1487156 - DNA, 15 bp, Homo sapiens
gagcctctacctcac

SEQ ID NO: 1487157 - DNA, 15 bp, Homo sapiens
tgagcctctacctca

SEQ ID NO: 1487158 - DNA, 15 bp, Homo sapiens
ctgagcctctacctc

SEQ ID NO: 1487159 - DNA, 15 bp, Homo sapiens
tctgagcctctacct

SEQ ID NO: 1487160 - DNA, 15 bp, Homo sapiens
ttctgagcctctacc

SEQ ID NO: 1487161 - DNA, 15 bp, Homo sapiens
tttctgagcctctac

SEQ ID NO: 1487162 - DNA, 15 bp, Homo sapiens
ttttctgagcctcta

SEQ ID NO: 1487163 - DNA, 15 bp, Homo sapiens
attttctgagcctct

SEQ ID NO: 1487164 - DNA, 15 bp, Homo sapiens
aattttctgagcctc

SEQ ID NO: 1487165 - DNA, 15 bp, Homo sapiens
taattttctgagcct

SEQ ID NO: 1487166 - DNA, 15 bp, Homo sapiens
ttaattttctgagcc

SEQ ID NO: 1487167 - DNA, 15 bp, Homo sapiens
tttaattttctgagc

SEQ ID NO: 1487168 - DNA, 15 bp, Homo sapiens
ttttaattttctgag

SEQ ID NO: 1487169 - DNA, 15 bp, Homo sapiens
cttttaattttctga

SEQ ID NO: 1487170 - DNA, 15 bp, Homo sapiens
tcttttaattttctg

SEQ ID NO: 1487171 - DNA, 15 bp, Homo sapiens
gtcttttaattttct

SEQ ID NO: 1487172 - DNA, 15 bp, Homo sapiens
agtcttttaattttc

SEQ ID NO: 1487173 - DNA, 15 bp, Homo sapiens
aagtcttttaatttt

SEQ ID NO: 1487174 - DNA, 15 bp, Homo sapiens
taagtcttttaattt

SEQ ID NO: 1487175 - DNA, 15 bp, Homo sapiens
ttaagtcttttaatt

SEQ ID NO: 1487176 - DNA, 15 bp, Homo sapiens
attaagtcttttaat

SEQ ID NO: 1487177 - DNA, 15 bp, Homo sapiens
aattaagtcttttaa

SEQ ID NO: 1487178 - DNA, 15 bp, Homo sapiens
aaattaagtctttta

SEQ ID NO: 1487179 - DNA, 15 bp, Homo sapiens
caaattaagtctttt

SEQ ID NO: 1487180 - DNA, 15 bp, Homo sapiens
acaaattaagtcttt

SEQ ID NO: 1487181 - DNA, 15 bp, Homo sapiens
aacaaattaagtctt

SEQ ID NO: 1487182 - DNA, 15 bp, Homo sapiens
aaacaaattaagtct

SEQ ID NO: 1487183 - DNA, 15 bp, Homo sapiens
taaacaaattaagtc

SEQ ID NO: 1487184 - DNA, 15 bp, Homo sapiens
ttaaacaaattaagt

SEQ ID NO: 1487185 - DNA, 15 bp, Homo sapiens
gttaaacaaattaag

SEQ ID NO: 1487186 - DNA, 15 bp, Homo sapiens
tgttaaacaaattaa

SEQ ID NO: 1487187 - DNA, 15 bp, Homo sapiens
ttgttaaacaaatta

SEQ ID NO: 1487188 - DNA, 15 bp, Homo sapiens
tttgttaaacaaatt

SEQ ID NO: 1487189 - DNA, 15 bp, Homo sapiens
atttgttaaacaaat

SEQ ID NO: 1487190 - DNA, 15 bp, Homo sapiens
tatttgttaaacaaa

SEQ ID NO: 1487191 - DNA, 15 bp, Homo sapiens
atatttgttaaacaa

SEQ ID NO: 1487192 - DNA, 15 bp, Homo sapiens
aatatttgttaaaca

SEQ ID NO: 1487193 - DNA, 15 bp, Homo sapiens
caatatttgttaaac

SEQ ID NO: 1487194 - DNA, 15 bp, Homo sapiens
tcaatatttgttaaa

SEQ ID NO: 1487195 - DNA, 15 bp, Homo sapiens
ctcaatatttgttaa

SEQ ID NO: 1487196 - DNA, 15 bp, Homo sapiens
actcaatatttgtta

SEQ ID NO: 1487197 - DNA, 15 bp, Homo sapiens
tactcaatatttgtt

SEQ ID NO: 1487198 - DNA, 15 bp, Homo sapiens
gtactcaatatttgt

SEQ ID NO: 1487199 - DNA, 15 bp, Homo sapiens
tgtactcaatatttg

SEQ ID NO: 1487200 - DNA, 15 bp, Homo sapiens
atgtactcaatattt

SEQ ID NO: 1487201 - DNA, 15 bp, Homo sapiens
tatgtactcaatatt

SEQ ID NO: 1487202 - DNA, 15 bp, Homo sapiens
ctatgtactcaatat

SEQ ID NO: 1487203 - DNA, 15 bp, Homo sapiens
gctatgtactcaata

SEQ ID NO: 1487204 - DNA, 15 bp, Homo sapiens
ggctatgtactcaat

SEQ ID NO: 1487205 - DNA, 15 bp, Homo sapiens
aggctatgtactcaa

SEQ ID NO: 1487206 - DNA, 15 bp, Homo sapiens
taggctatgtactca

SEQ ID NO: 1487207 - DNA, 15 bp, Homo sapiens
gtaggctatgtactc

SEQ ID NO: 1487208 - DNA, 15 bp, Homo sapiens
cgtaggctatgtact

SEQ ID NO: 1487209 - DNA, 15 bp, Homo sapiens
gcgtaggctatgtac

SEQ ID NO: 1487210 - DNA, 15 bp, Homo sapiens
ggcgtaggctatgta

SEQ ID NO: 1487211 - DNA, 15 bp, Homo sapiens
aggcgtaggctatgt

SEQ ID NO: 1487212 - DNA, 15 bp, Homo sapiens
taggcgtaggctatg

SEQ ID NO: 1487213 - DNA, 15 bp, Homo sapiens
ataggcgtaggctat

SEQ ID NO: 1487214 - DNA, 15 bp, Homo sapiens
cataggcgtaggcta

SEQ ID NO: 1487215 - DNA, 15 bp, Homo sapiens
gcataggcgtaggct

SEQ ID NO: 1487216 - DNA, 15 bp, Homo sapiens
ggcataggcgtaggc

SEQ ID NO: 1487217 - DNA, 15 bp, Homo sapiens
gggcataggcgtagg

SEQ ID NO: 1487218 - DNA, 15 bp, Homo sapiens
tgggcataggcgtag

SEQ ID NO: 1487219 - DNA, 15 bp, Homo sapiens
ctgggcataggcgta

SEQ ID NO: 1487220 - DNA, 15 bp, Homo sapiens
gctgggcataggcgt

SEQ ID NO: 1487221 - DNA, 15 bp, Homo sapiens
ggctgggcataggcg

SEQ ID NO: 1487222 - DNA, 15 bp, Homo sapiens
tggctgggcataggc

SEQ ID NO: 1487223 - DNA, 15 bp, Homo sapiens
ttggctgggcatagg

SEQ ID NO: 1487224 - DNA, 15 bp, Homo sapiens
attggctgggcatag

SEQ ID NO: 1487225 - DNA, 15 bp, Homo sapiens
cattggctgggcata

SEQ ID NO: 1487226 - DNA, 15 bp, Homo sapiens
tcattggctgggcat

SEQ ID NO: 1487227 - DNA, 15 bp, Homo sapiens
atcattggctgggca

SEQ ID NO: 1487228 - DNA, 15 bp, Homo sapiens
tatcattggctgggc

SEQ ID NO: 1487229 - DNA, 15 bp, Homo sapiens
gtatcattggctggg

SEQ ID NO: 1487230 - DNA, 15 bp, Homo sapiens
tgtatcattggctgg

SEQ ID NO: 1487231 - DNA, 15 bp, Homo sapiens
ctgtatcattggctg

SEQ ID NO: 1487232 - DNA, 15 bp, Homo sapiens
cctgtatcattggct

SEQ ID NO: 1487233 - DNA, 15 bp, Homo sapiens
gcctgtatcattggc

SEQ ID NO: 1487234 - DNA, 15 bp, Homo sapiens
ggcctgtatcattgg

SEQ ID NO: 1487235 - DNA, 15 bp, Homo sapiens
aggcctgtatcattg

SEQ ID NO: 1487236 - DNA, 15 bp, Homo sapiens
aaggcctgtatcatt

SEQ ID NO: 1487237 - DNA, 15 bp, Homo sapiens
taaggcctgtatcat

SEQ ID NO: 1487238 - DNA, 15 bp, Homo sapiens
ttaaggcctgtatca

SEQ ID NO: 1487239 - DNA, 15 bp, Homo sapiens
tttaaggcctgtatc

SEQ ID NO: 1487240 - DNA, 15 bp, Homo sapiens
atttaaggcctgtat

SEQ ID NO: 1487241 - DNA, 15 bp, Homo sapiens
catttaaggcctgta

SEQ ID NO: 1487242 - DNA, 15 bp, Homo sapiens
ccatttaaggcctgt

SEQ ID NO: 1487243 - DNA, 15 bp, Homo sapiens
tccatttaaggcctg

SEQ ID NO: 1487244 - DNA, 15 bp, Homo sapiens
ctccatttaaggcct

SEQ ID NO: 1487245 - DNA, 15 bp, Homo sapiens
actccatttaaggcc

SEQ ID NO: 1487246 - DNA, 15 bp, Homo sapiens
tactccatttaaggc

SEQ ID NO: 1487247 - DNA, 15 bp, Homo sapiens
ctactccatttaagg

SEQ ID NO: 1487248 - DNA, 15 bp, Homo sapiens
actactccatttaag

SEQ ID NO: 1487249 - DNA, 15 bp, Homo sapiens
cactactccatttaa

SEQ ID NO: 1487250 - DNA, 15 bp, Homo sapiens
acactactccattta

SEQ ID NO: 1487251 - DNA, 15 bp, Homo sapiens
gacactactccattt

SEQ ID NO: 1487252 - DNA, 15 bp, Homo sapiens
ggacactactccatt

SEQ ID NO: 1487253 - DNA, 15 bp, Homo sapiens
tggacactactccat

SEQ ID NO: 1487254 - DNA, 15 bp, Homo sapiens
ctggacactactcca

SEQ ID NO: 1487255 - DNA, 15 bp, Homo sapiens
tctggacactactcc

SEQ ID NO: 1487256 - DNA, 15 bp, Homo sapiens
ctctggacactactc

SEQ ID NO: 1487257 - DNA, 15 bp, Homo sapiens
cctctggacactact

SEQ ID NO: 1487258 - DNA, 15 bp, Homo sapiens
acctctggacactac

SEQ ID NO: 1487259 - DNA, 15 bp, Homo sapiens
aacctctggacacta

SEQ ID NO: 1487260 - DNA, 15 bp, Homo sapiens
taacctctggacact

SEQ ID NO: 1487261 - DNA, 15 bp, Homo sapiens
ctaacctctggacac

SEQ ID NO: 1487262 - DNA, 15 bp, Homo sapiens
cctaacctctggaca

SEQ ID NO: 1487263 - DNA, 15 bp, Homo sapiens
tcctaacctctggac

SEQ ID NO: 1487264 - DNA, 15 bp, Homo sapiens
ttcctaacctctgga

SEQ ID NO: 1487265 - DNA, 15 bp, Homo sapiens
attcctaacctctgg

SEQ ID NO: 1487266 - DNA, 15 bp, Homo sapiens
gattcctaacctctg

SEQ ID NO: 1487267 - DNA, 15 bp, Homo sapiens
ggattcctaacctct

SEQ ID NO: 1487268 - DNA, 15 bp, Homo sapiens
aggattcctaacctc

SEQ ID NO: 1487269 - DNA, 15 bp, Homo sapiens
caggattcctaacct

SEQ ID NO: 1487270 - DNA, 15 bp, Homo sapiens
gcaggattcctaacc

SEQ ID NO: 1487271 - DNA, 15 bp, Homo sapiens
ggcaggattcctaac

SEQ ID NO: 1487272 - DNA, 15 bp, Homo sapiens
tggcaggattcctaa

SEQ ID NO: 1487273 - DNA, 15 bp, Homo sapiens
atggcaggattccta

SEQ ID NO: 1487274 - DNA, 15 bp, Homo sapiens
gatggcaggattcct

SEQ ID NO: 1487275 - DNA, 15 bp, Homo sapiens
ggatggcaggattcc

SEQ ID NO: 1487276 - DNA, 15 bp, Homo sapiens
aggatggcaggattc

SEQ ID NO: 1487277 - DNA, 15 bp, Homo sapiens
aaggatggcaggatt

SEQ ID NO: 1487278 - DNA, 15 bp, Homo sapiens
aaaggatggcaggat

SEQ ID NO: 1487279 - DNA, 15 bp, Homo sapiens
taaaggatggcagga

SEQ ID NO: 1487280 - DNA, 15 bp, Homo sapiens
ctaaaggatggcagg

SEQ ID NO: 1487281 - DNA, 15 bp, Homo sapiens
cctaaaggatggcag

SEQ ID NO: 1487282 - DNA, 15 bp, Homo sapiens
gcctaaaggatggca

SEQ ID NO: 1487283 - DNA, 15 bp, Homo sapiens
ggcctaaaggatggc

SEQ ID NO: 1487284 - DNA, 15 bp, Homo sapiens
aggcctaaaggatgg

SEQ ID NO: 1487285 - DNA, 15 bp, Homo sapiens
caggcctaaaggatg

SEQ ID NO: 1487286 - DNA, 15 bp, Homo sapiens
acaggcctaaaggat

SEQ ID NO: 1487287 - DNA, 15 bp, Homo sapiens
cacaggcctaaagga

SEQ ID NO: 1487288 - DNA, 15 bp, Homo sapiens
ccacaggcctaaagg

SEQ ID NO: 1487289 - DNA, 15 bp, Homo sapiens
cccacaggcctaaag

SEQ ID NO: 1487290 - DNA, 15 bp, Homo sapiens
acccacaggcctaaa

SEQ ID NO: 1487291 - DNA, 15 bp, Homo sapiens
gacccacaggcctaa

SEQ ID NO: 1487292 - DNA, 15 bp, Homo sapiens
agacccacaggccta

SEQ ID NO: 1487293 - DNA, 15 bp, Homo sapiens
cagacccacaggcct

SEQ ID NO: 1487294 - DNA, 15 bp, Homo sapiens
ccagacccacaggcc

SEQ ID NO: 1487295 - DNA, 15 bp, Homo sapiens
tccagacccacaggc

SEQ ID NO: 1487296 - DNA, 15 bp, Homo sapiens
ttccagacccacagg

SEQ ID NO: 1487297 - DNA, 15 bp, Homo sapiens
tttccagacccacag

SEQ ID NO: 1487298 - DNA, 15 bp, Homo sapiens
ctttccagacccaca

SEQ ID NO: 1487299 - DNA, 15 bp, Homo sapiens
cctttccagacccac

SEQ ID NO: 1487300 - DNA, 15 bp, Homo sapiens
gcctttccagaccca

SEQ ID NO: 1487301 - DNA, 15 bp, Homo sapiens
tgcctttccagaccc

SEQ ID NO: 1487302 - DNA, 15 bp, Homo sapiens
ttgcctttccagacc

SEQ ID NO: 1487303 - DNA, 15 bp, Homo sapiens
attgcctttccagac

SEQ ID NO: 1487304 - DNA, 15 bp, Homo sapiens
cattgcctttccaga

SEQ ID NO: 1487305 - DNA, 15 bp, Homo sapiens
tcattgcctttccag

SEQ ID NO: 1487306 - DNA, 15 bp, Homo sapiens
gtcattgcctttcca

SEQ ID NO: 1487307 - DNA, 15 bp, Homo sapiens
agtcattgcctttcc

SEQ ID NO: 1487308 - DNA, 15 bp, Homo sapiens
tagtcattgcctttc

SEQ ID NO: 1487309 - DNA, 15 bp, Homo sapiens
gtagtcattgccttt

SEQ ID NO: 1487310 - DNA, 15 bp, Homo sapiens
agtagtcattgcctt

SEQ ID NO: 1487311 - DNA, 15 bp, Homo sapiens
tagtagtcattgcct

SEQ ID NO: 1487312 - DNA, 15 bp, Homo sapiens
gtagtagtcattgcc

SEQ ID NO: 1487313 - DNA, 15 bp, Homo sapiens
ggtagtagtcattgc

SEQ ID NO: 1487314 - DNA, 15 bp, Homo sapiens
gggtagtagtcattg

SEQ ID NO: 1487315 - DNA, 15 bp, Homo sapiens
ggggtagtagtcatt

SEQ ID NO: 1487316 - DNA, 15 bp, Homo sapiens
aggggtagtagtcat

SEQ ID NO: 1487317 - DNA, 15 bp, Homo sapiens
gaggggtagtagtca

SEQ ID NO: 1487318 - DNA, 15 bp, Homo sapiens
agaggggtagtagtc

SEQ ID NO: 1487319 - DNA, 15 bp, Homo sapiens
tagaggggtagtagt

SEQ ID NO: 1487320 - DNA, 15 bp, Homo sapiens
ttagaggggtagtag

SEQ ID NO: 1487321 - DNA, 15 bp, Homo sapiens
tttagaggggtagta

SEQ ID NO: 1487322 - DNA, 15 bp, Homo sapiens
gtttagaggggtagt

SEQ ID NO: 1487323 - DNA, 15 bp, Homo sapiens
tgtttagaggggtag

SEQ ID NO: 1487324 - DNA, 15 bp, Homo sapiens
atgtttagaggggta

SEQ ID NO: 1487325 - DNA, 15 bp, Homo sapiens
gatgtttagaggggt

SEQ ID NO: 1487326 - DNA, 15 bp, Homo sapiens
agatgtttagagggg

SEQ ID NO: 1487327 - DNA, 15 bp, Homo sapiens
gagatgtttagaggg

SEQ ID NO: 1487328 - DNA, 15 bp, Homo sapiens
agagatgtttagagg

SEQ ID NO: 1487329 - DNA, 15 bp, Homo sapiens
cagagatgtttagag

SEQ ID NO: 1487330 - DNA, 15 bp, Homo sapiens
gcagagatgtttaga

SEQ ID NO: 1487331 - DNA, 15 bp, Homo sapiens
ggcagagatgtttag

SEQ ID NO: 1487332 - DNA, 15 bp, Homo sapiens
gggcagagatgttta

SEQ ID NO: 1487333 - DNA, 15 bp, Homo sapiens
agggcagagatgttt

SEQ ID NO: 1487334 - DNA, 15 bp, Homo sapiens
cagggcagagatgtt

SEQ ID NO: 1487335 - DNA, 15 bp, Homo sapiens
acagggcagagatgt

SEQ ID NO: 1487336 - DNA, 15 bp, Homo sapiens
cacagggcagagatg

SEQ ID NO: 1487337 - DNA, 15 bp, Homo sapiens
gcacagggcagagat

SEQ ID NO: 1487338 - DNA, 15 bp, Homo sapiens
agcacagggcagaga

SEQ ID NO: 1487339 - DNA, 15 bp, Homo sapiens
gagcacagggcagag

SEQ ID NO: 1487340 - DNA, 15 bp, Homo sapiens
tgagcacagggcaga

SEQ ID NO: 1487341 - DNA, 15 bp, Homo sapiens
ttgagcacagggcag

SEQ ID NO: 1487342 - DNA, 15 bp, Homo sapiens
cttgagcacagggca

SEQ ID NO: 1487343 - DNA, 15 bp, Homo sapiens
gcttgagcacagggc

SEQ ID NO: 1487344 - DNA, 15 bp, Homo sapiens
agcttgagcacaggg

SEQ ID NO: 1487345 - DNA, 15 bp, Homo sapiens
aagcttgagcacagg

SEQ ID NO: 1487346 - DNA, 15 bp, Homo sapiens
gaagcttgagcacag

SEQ ID NO: 1487347 - DNA, 15 bp, Homo sapiens
ggaagcttgagcaca

SEQ ID NO: 1487348 - DNA, 15 bp, Homo sapiens
gggaagcttgagcac

SEQ ID NO: 1487349 - DNA, 15 bp, Homo sapiens
agggaagcttgagca

SEQ ID NO: 1487350 - DNA, 15 bp, Homo sapiens
cagggaagcttgagc

SEQ ID NO: 1487351 - DNA, 15 bp, Homo sapiens
gcagggaagcttgag

SEQ ID NO: 1487352 - DNA, 15 bp, Homo sapiens
agcagggaagcttga

SEQ ID NO: 1487353 - DNA, 15 bp, Homo sapiens
gagcagggaagcttg

SEQ ID NO: 1487354 - DNA, 15 bp, Homo sapiens
agagcagggaagctt

SEQ ID NO: 1487355 - DNA, 15 bp, Homo sapiens
cagagcagggaagct

SEQ ID NO: 1487356 - DNA, 15 bp, Homo sapiens
ccagagcagggaagc

SEQ ID NO: 1487357 - DNA, 15 bp, Homo sapiens
cccagagcagggaag

SEQ ID NO: 1487358 - DNA, 15 bp, Homo sapiens
acccagagcagggaa

SEQ ID NO: 1487359 - DNA, 15 bp, Homo sapiens
tacccagagcaggga

SEQ ID NO: 1487360 - DNA, 15 bp, Homo sapiens
ttacccagagcaggg

SEQ ID NO: 1487361 - DNA, 15 bp, Homo sapiens
cttacccagagcagg

SEQ ID NO: 1487362 - DNA, 15 bp, Homo sapiens
ccttacccagagcag

SEQ ID NO: 1487363 - DNA, 15 bp, Homo sapiens
gccttacccagagca

SEQ ID NO: 1487364 - DNA, 15 bp, Homo sapiens
tgccttacccagagc

SEQ ID NO: 1487365 - DNA, 15 bp, Homo sapiens
ttgccttacccagag

SEQ ID NO: 1487366 - DNA, 15 bp, Homo sapiens
gttgccttacccaga

SEQ ID NO: 1487367 - DNA, 15 bp, Homo sapiens
ggttgccttacccag

SEQ ID NO: 1487368 - DNA, 15 bp, Homo sapiens
aggttgccttaccca

SEQ ID NO: 1487369 - DNA, 15 bp, Homo sapiens
gaggttgccttaccc

SEQ ID NO: 1487370 - DNA, 15 bp, Homo sapiens
cgaggttgccttacc

SEQ ID NO: 1487371 - DNA, 15 bp, Homo sapiens
ccgaggttgccttac

SEQ ID NO: 1487372 - DNA, 15 bp, Homo sapiens
cccgaggttgcctta

SEQ ID NO: 1487373 - DNA, 15 bp, Homo sapiens
gcccgaggttgcctt

SEQ ID NO: 1487374 - DNA, 15 bp, Homo sapiens
ggcccgaggttgcct

SEQ ID NO: 1487375 - DNA, 15 bp, Homo sapiens
gggcccgaggttgcc

SEQ ID NO: 1487376 - DNA, 15 bp, Homo sapiens
tgggcccgaggttgc

SEQ ID NO: 1487377 - DNA, 15 bp, Homo sapiens
ctgggcccgaggttg

SEQ ID NO: 1487378 - DNA, 15 bp, Homo sapiens
cctgggcccgaggtt

SEQ ID NO: 1487379 - DNA, 15 bp, Homo sapiens
gcctgggcccgaggt

SEQ ID NO: 1487380 - DNA, 15 bp, Homo sapiens
agcctgggcccgagg

SEQ ID NO: 1487381 - DNA, 15 bp, Homo sapiens
cagcctgggcccgag

SEQ ID NO: 1487382 - DNA, 15 bp, Homo sapiens
acagcctgggcccga

SEQ ID NO: 1487383 - DNA, 15 bp, Homo sapiens
cacagcctgggcccg

SEQ ID NO: 1487384 - DNA, 15 bp, Homo sapiens
tcacagcctgggccc

SEQ ID NO: 1487385 - DNA, 15 bp, Homo sapiens
gtcacagcctgggcc

SEQ ID NO: 1487386 - DNA, 15 bp, Homo sapiens
ggtcacagcctgggc

SEQ ID NO: 1487387 - DNA, 15 bp, Homo sapiens
aggtcacagcctggg

SEQ ID NO: 1487388 - DNA, 15 bp, Homo sapiens
aaggtcacagcctgg

SEQ ID NO: 1487389 - DNA, 15 bp, Homo sapiens
gaaggtcacagcctg

SEQ ID NO: 1487390 - DNA, 15 bp, Homo sapiens
ggaaggtcacagcct

SEQ ID NO: 1487391 - DNA, 15 bp, Homo sapiens
gggaaggtcacagcc

SEQ ID NO: 1487392 - DNA, 15 bp, Homo sapiens
tgggaaggtcacagc

SEQ ID NO: 1487393 - DNA, 15 bp, Homo sapiens
atgggaaggtcacag

SEQ ID NO: 1487394 - DNA, 15 bp, Homo sapiens
catgggaaggtcaca

SEQ ID NO: 1487395 - DNA, 15 bp, Homo sapiens
tcatgggaaggtcac

SEQ ID NO: 1487396 - DNA, 15 bp, Homo sapiens
ttcatgggaaggtca

SEQ ID NO: 1487397 - DNA, 15 bp, Homo sapiens
tttcatgggaaggtc

SEQ ID NO: 1487398 - DNA, 15 bp, Homo sapiens
ttttcatgggaaggt

SEQ ID NO: 1487399 - DNA, 15 bp, Homo sapiens
cttttcatgggaagg

SEQ ID NO: 1487400 - DNA, 15 bp, Homo sapiens
tcttttcatgggaag

SEQ ID NO: 1487401 - DNA, 15 bp, Homo sapiens
ttcttttcatgggaa

SEQ ID NO: 1487402 - DNA, 15 bp, Homo sapiens
gttcttttcatggga

SEQ ID NO: 1487403 - DNA, 15 bp, Homo sapiens
ggttcttttcatggg

SEQ ID NO: 1487404 - DNA, 15 bp, Homo sapiens
tggttcttttcatgg

SEQ ID NO: 1487405 - DNA, 15 bp, Homo sapiens
ctggttcttttcatg

SEQ ID NO: 1487406 - DNA, 15 bp, Homo sapiens
tctggttcttttcat

SEQ ID NO: 1487407 - DNA, 15 bp, Homo sapiens
ttctggttcttttca

SEQ ID NO: 1487408 - DNA, 15 bp, Homo sapiens
tttctggttcttttc

SEQ ID NO: 1487409 - DNA, 15 bp, Homo sapiens
atttctggttctttt

SEQ ID NO: 1487410 - DNA, 15 bp, Homo sapiens
aatttctggttcttt

SEQ ID NO: 1487411 - DNA, 15 bp, Homo sapiens
gaatttctggttctt

SEQ ID NO: 1487412 - DNA, 15 bp, Homo sapiens
agaatttctggttct

SEQ ID NO: 1487413 - DNA, 15 bp, Homo sapiens
cagaatttctggttc

SEQ ID NO: 1487414 - DNA, 15 bp, Homo sapiens
tcagaatttctggtt

SEQ ID NO: 1487415 - DNA, 15 bp, Homo sapiens
ctcagaatttctggt

SEQ ID NO: 1487416 - DNA, 15 bp, Homo sapiens
tctcagaatttctgg

SEQ ID NO: 1487417 - DNA, 15 bp, Homo sapiens
ttctcagaatttctg

SEQ ID NO: 1487418 - DNA, 15 bp, Homo sapiens
gttctcagaatttct

SEQ ID NO: 1487419 - DNA, 15 bp, Homo sapiens
ggttctcagaatttc

SEQ ID NO: 1487420 - DNA, 15 bp, Homo sapiens
cggttctcagaattt

SEQ ID NO: 1487421 - DNA, 15 bp, Homo sapiens
tcggttctcagaatt

SEQ ID NO: 1487422 - DNA, 15 bp, Homo sapiens
ctcggttctcagaat

SEQ ID NO: 1487423 - DNA, 15 bp, Homo sapiens
actcggttctcagaa

SEQ ID NO: 1487424 - DNA, 15 bp, Homo sapiens
aactcggttctcaga

SEQ ID NO: 1487425 - DNA, 15 bp, Homo sapiens
aaactcggttctcag

SEQ ID NO: 1487426 - DNA, 15 bp, Homo sapiens
taaactcggttctca

SEQ ID NO: 1487427 - DNA, 15 bp, Homo sapiens
ataaactcggttctc

SEQ ID NO: 1487428 - DNA, 15 bp, Homo sapiens
tataaactcggttct

SEQ ID NO: 1487429 - DNA, 15 bp, Homo sapiens
ttataaactcggttc

SEQ ID NO: 1487430 - DNA, 15 bp, Homo sapiens
gttataaactcggtt

SEQ ID NO: 1487431 - DNA, 15 bp, Homo sapiens
ggttataaactcggt

SEQ ID NO: 1487432 - DNA, 15 bp, Homo sapiens
aggttataaactcgg

SEQ ID NO: 1487433 - DNA, 15 bp, Homo sapiens
caggttataaactcg

SEQ ID NO: 1487434 - DNA, 15 bp, Homo sapiens
gcaggttataaactc

SEQ ID NO: 1487435 - DNA, 15 bp, Homo sapiens
tgcaggttataaact

SEQ ID NO: 1487436 - DNA, 15 bp, Homo sapiens
gtgcaggttataaac

SEQ ID NO: 1487437 - DNA, 15 bp, Homo sapiens
tgtgcaggttataaa

SEQ ID NO: 1487438 - DNA, 15 bp, Homo sapiens
atgtgcaggttataa

SEQ ID NO: 1487439 - DNA, 15 bp, Homo sapiens
aatgtgcaggttata

SEQ ID NO: 1487440 - DNA, 15 bp, Homo sapiens
gaatgtgcaggttat

SEQ ID NO: 1487441 - DNA, 15 bp, Homo sapiens
agaatgtgcaggtta

SEQ ID NO: 1487442 - DNA, 15 bp, Homo sapiens
cagaatgtgcaggtt

SEQ ID NO: 1487443 - DNA, 15 bp, Homo sapiens
gcagaatgtgcaggt

SEQ ID NO: 1487444 - DNA, 15 bp, Homo sapiens
tgcagaatgtgcagg

SEQ ID NO: 1487445 - DNA, 15 bp, Homo sapiens
gtgcagaatgtgcag

SEQ ID NO: 1487446 - DNA, 15 bp, Homo sapiens
tgtgcagaatgtgca

SEQ ID NO: 1487447 - DNA, 15 bp, Homo sapiens
atgtgcagaatgtgc

SEQ ID NO: 1487448 - DNA, 15 bp, Homo sapiens
catgtgcagaatgtg

SEQ ID NO: 1487449 - DNA, 15 bp, Homo sapiens
acatgtgcagaatgt

SEQ ID NO: 1487450 - DNA, 15 bp, Homo sapiens
tacatgtgcagaatg

SEQ ID NO: 1487451 - DNA, 15 bp, Homo sapiens
atacatgtgcagaat

SEQ ID NO: 1487452 - DNA, 15 bp, Homo sapiens
gatacatgtgcagaa

SEQ ID NO: 1487453 - DNA, 15 bp, Homo sapiens
ggatacatgtgcaga

SEQ ID NO: 1487454 - DNA, 15 bp, Homo sapiens
gggatacatgtgcag

SEQ ID NO: 1487455 - DNA, 15 bp, Homo sapiens
cgggatacatgtgca

SEQ ID NO: 1487456 - DNA, 15 bp, Homo sapiens
ccgggatacatgtgc

SEQ ID NO: 1487457 - DNA, 15 bp, Homo sapiens
tccgggatacatgtg

SEQ ID NO: 1487458 - DNA, 15 bp, Homo sapiens
ttccgggatacatgt

SEQ ID NO: 1487459 - DNA, 15 bp, Homo sapiens
gttccgggatacatg

SEQ ID NO: 1487460 - DNA, 15 bp, Homo sapiens
agttccgggatacat

SEQ ID NO: 1487461 - DNA, 15 bp, Homo sapiens
aagttccgggataca

SEQ ID NO: 1487462 - DNA, 15 bp, Homo sapiens
taagttccgggatac

SEQ ID NO: 1487463 - DNA, 15 bp, Homo sapiens
ttaagttccgggata

SEQ ID NO: 1487464 - DNA, 15 bp, Homo sapiens
tttaagttccgggat

SEQ ID NO: 1487465 - DNA, 15 bp, Homo sapiens
ctttaagttccggga

SEQ ID NO: 1487466 - DNA, 15 bp, Homo sapiens
actttaagttccggg

SEQ ID NO: 1487467 - DNA, 15 bp, Homo sapiens
tactttaagttccgg

SEQ ID NO: 1487468 - DNA, 15 bp, Homo sapiens
ttactttaagttccg

SEQ ID NO: 1487469 - DNA, 15 bp, Homo sapiens
tttactttaagttcc

SEQ ID NO: 1487470 - DNA, 15 bp, Homo sapiens
ttttactttaagttc

SEQ ID NO: 1487471 - DNA, 15 bp, Homo sapiens
tttttactttaagtt

SEQ ID NO: 1487472 - DNA, 15 bp, Homo sapiens
ttttttactttaagt

SEQ ID NO: 1487473 - DNA, 15 bp, Homo sapiens
tttttttactttaag

SEQ ID NO: 1487474 - DNA, 15 bp, Homo sapiens
ttttttttactttaa

SEQ ID NO: 1487475 - DNA, 15 bp, Homo sapiens
tttttttttacttta

SEQ ID NO: 1487476 - DNA, 15 bp, Homo sapiens
gtttttttttacttt

SEQ ID NO: 1487477 - DNA, 15 bp, Homo sapiens
tgtttttttttactt

SEQ ID NO: 1487478 - DNA, 15 bp, Homo sapiens
ttgtttttttttact

SEQ ID NO: 1487479 - DNA, 15 bp, Homo sapiens
tttgtttttttttac

SEQ ID NO: 1487480 - DNA, 15 bp, Homo sapiens
ttttgttttttttta

SEQ ID NO: 1487481 - DNA, 15 bp, Homo sapiens
tgtttttttgttttt

SEQ ID NO: 1487482 - DNA, 15 bp, Homo sapiens
ttgtttttttgtttt

SEQ ID NO: 1487483 - DNA, 15 bp, Homo sapiens
tttgtttttttgttt

SEQ ID NO: 1487484 - DNA, 15 bp, Homo sapiens
tttttgtttttttgt

SEQ ID NO: 1487485 - DNA, 15 bp, Homo sapiens
ttttttgtttttttg

SEQ ID NO: 1487486 - DNA, 15 bp, Homo sapiens
ttttttttttgtttt

SEQ ID NO: 1487487 - DNA, 15 bp, Homo sapiens
tgttttttttttgtt

SEQ ID NO: 1487488 - DNA, 15 bp, Homo sapiens
gtgttttttttttgt

SEQ ID NO: 1487489 - DNA, 15 bp, Homo sapiens
ggtgttttttttttg

SEQ ID NO: 1487490 - DNA, 15 bp, Homo sapiens
tggtgtttttttttt

SEQ ID NO: 1487491 - DNA, 15 bp, Homo sapiens
atggtgttttttttt

SEQ ID NO: 1487492 - DNA, 15 bp, Homo sapiens
catggtgtttttttt

SEQ ID NO: 1487493 - DNA, 15 bp, Homo sapiens
tcatggtgttttttt

SEQ ID NO: 1487494 - DNA, 15 bp, Homo sapiens
ttcatggtgtttttt

SEQ ID NO: 1487495 - DNA, 15 bp, Homo sapiens
cttcatggtgttttt

SEQ ID NO: 1487496 - DNA, 15 bp, Homo sapiens
tcttcatggtgtttt

SEQ ID NO: 1487497 - DNA, 15 bp, Homo sapiens
ttcttcatggtgttt

SEQ ID NO: 1487498 - DNA, 15 bp, Homo sapiens
attcttcatggtgtt

SEQ ID NO: 1487499 - DNA, 15 bp, Homo sapiens
aattcttcatggtgt

SEQ ID NO: 1487500 - DNA, 15 bp, Homo sapiens
caattcttcatggtg

SEQ ID NO: 1487501 - DNA, 15 bp, Homo sapiens
acaattcttcatggt

SEQ ID NO: 1487502 - DNA, 15 bp, Homo sapiens
aacaattcttcatgg

SEQ ID NO: 1487503 - DNA, 15 bp, Homo sapiens
caacaattcttcatg

SEQ ID NO: 1487504 - DNA, 15 bp, Homo sapiens
ccaacaattcttcat

SEQ ID NO: 1487505 - DNA, 15 bp, Homo sapiens
accaacaattcttca

SEQ ID NO: 1487506 - DNA, 15 bp, Homo sapiens
caccaacaattcttc

SEQ ID NO: 1487507 - DNA, 15 bp, Homo sapiens
gcaccaacaattctt

SEQ ID NO: 1487508 - DNA, 15 bp, Homo sapiens
agcaccaacaattct

SEQ ID NO: 1487509 - DNA, 15 bp, Homo sapiens
aagcaccaacaattc

SEQ ID NO: 1487510 - DNA, 15 bp, Homo sapiens
aaagcaccaacaatt

SEQ ID NO: 1487511 - DNA, 15 bp, Homo sapiens
caaagcaccaacaat

SEQ ID NO: 1487512 - DNA, 15 bp, Homo sapiens
ccaaagcaccaacaa

SEQ ID NO: 1487513 - DNA, 15 bp, Homo sapiens
cccaaagcaccaaca

SEQ ID NO: 1487514 - DNA, 15 bp, Homo sapiens
gcccaaagcaccaac

SEQ ID NO: 1487515 - DNA, 15 bp, Homo sapiens
ggcccaaagcaccaa

SEQ ID NO: 1487516 - DNA, 15 bp, Homo sapiens
aggcccaaagcacca

SEQ ID NO: 1487517 - DNA, 15 bp, Homo sapiens
caggcccaaagcacc

SEQ ID NO: 1487518 - DNA, 15 bp, Homo sapiens
ccaggcccaaagcac

SEQ ID NO: 1487519 - DNA, 15 bp, Homo sapiens
tccaggcccaaagca

SEQ ID NO: 1487520 - DNA, 15 bp, Homo sapiens
ctccaggcccaaagc

SEQ ID NO: 1487521 - DNA, 15 bp, Homo sapiens
cctccaggcccaaag

SEQ ID NO: 1487522 - DNA, 15 bp, Homo sapiens
acctccaggcccaaa

SEQ ID NO: 1487523 - DNA, 15 bp, Homo sapiens
cacctccaggcccaa

SEQ ID NO: 1487524 - DNA, 15 bp, Homo sapiens
ccacctccaggccca

SEQ ID NO: 1487525 - DNA, 15 bp, Homo sapiens
gccacctccaggccc

SEQ ID NO: 1487526 - DNA, 15 bp, Homo sapiens
tgccacctccaggcc

SEQ ID NO: 1487527 - DNA, 15 bp, Homo sapiens
ctgccacctccaggc

SEQ ID NO: 1487528 - DNA, 15 bp, Homo sapiens
gctgccacctccagg

SEQ ID NO: 1487529 - DNA, 15 bp, Homo sapiens
cgctgccacctccag

SEQ ID NO: 1487530 - DNA, 15 bp, Homo sapiens
ccgctgccacctcca

SEQ ID NO: 1487531 - DNA, 15 bp, Homo sapiens
cccgctgccacctcc

SEQ ID NO: 1487532 - DNA, 15 bp, Homo sapiens
tcccgctgccacctc

SEQ ID NO: 1487533 - DNA, 15 bp, Homo sapiens
ttcccgctgccacct

SEQ ID NO: 1487534 - DNA, 15 bp, Homo sapiens
gttcccgctgccacc

SEQ ID NO: 1487535 - DNA, 15 bp, Homo sapiens
ggttcccgctgccac

SEQ ID NO: 1487536 - DNA, 15 bp, Homo sapiens
gggttcccgctgcca

SEQ ID NO: 1487537 - DNA, 15 bp, Homo sapiens
agggttcccgctgcc

SEQ ID NO: 1487538 - DNA, 15 bp, Homo sapiens
cagggttcccgctgc

SEQ ID NO: 1487539 - DNA, 15 bp, Homo sapiens
acagggttcccgctg

SEQ ID NO: 1487540 - DNA, 15 bp, Homo sapiens
cacagggttcccgct

SEQ ID NO: 1487541 - DNA, 15 bp, Homo sapiens
ccacagggttcccgc

SEQ ID NO: 1487542 - DNA, 15 bp, Homo sapiens
accacagggttcccg

SEQ ID NO: 1487543 - DNA, 15 bp, Homo sapiens
gaccacagggttccc

SEQ ID NO: 1487544 - DNA, 15 bp, Homo sapiens
tgaccacagggttcc

SEQ ID NO: 1487545 - DNA, 15 bp, Homo sapiens
ctgaccacagggttc

SEQ ID NO: 1487546 - DNA, 15 bp, Homo sapiens
tctgaccacagggtt

SEQ ID NO: 1487547 - DNA, 15 bp, Homo sapiens
ctctgaccacagggt

SEQ ID NO: 1487548 - DNA, 15 bp, Homo sapiens
actctgaccacaggg

SEQ ID NO: 1487549 - DNA, 15 bp, Homo sapiens
tactctgaccacagg

SEQ ID NO: 1487550 - DNA, 15 bp, Homo sapiens
ctactctgaccacag

SEQ ID NO: 1487551 - DNA, 15 bp, Homo sapiens
actactctgaccaca

SEQ ID NO: 1487552 - DNA, 15 bp, Homo sapiens
cactactctgaccac

SEQ ID NO: 1487553 - DNA, 15 bp, Homo sapiens
ccactactctgacca

SEQ ID NO: 1487554 - DNA, 15 bp, Homo sapiens
cccactactctgacc

SEQ ID NO: 1487555 - DNA, 15 bp, Homo sapiens
acccactactctgac

SEQ ID NO: 1487556 - DNA, 15 bp, Homo sapiens
gacccactactctga

SEQ ID NO: 1487557 - DNA, 15 bp, Homo sapiens
ggacccactactctg

SEQ ID NO: 1487558 - DNA, 15 bp, Homo sapiens
aggacccactactct

SEQ ID NO: 1487559 - DNA, 15 bp, Homo sapiens
caggacccactactc

SEQ ID NO: 1487560 - DNA, 15 bp, Homo sapiens
tcaggacccactact

SEQ ID NO: 1487561 - DNA, 15 bp, Homo sapiens
ctcaggacccactac

SEQ ID NO: 1487562 - DNA, 15 bp, Homo sapiens
tctcaggacccacta

SEQ ID NO: 1487563 - DNA, 15 bp, Homo sapiens
ttctcaggacccact

SEQ ID NO: 1487564 - DNA, 15 bp, Homo sapiens
attctcaggacccac

SEQ ID NO: 1487565 - DNA, 15 bp, Homo sapiens
cattctcaggaccca

SEQ ID NO: 1487566 - DNA, 15 bp, Homo sapiens
gcattctcaggaccc

SEQ ID NO: 1487567 - DNA, 15 bp, Homo sapiens
ggcattctcaggacc

SEQ ID NO: 1487568 - DNA, 15 bp, Homo sapiens
tggcattctcaggac

SEQ ID NO: 1487569 - DNA, 15 bp, Homo sapiens
ctggcattctcagga

SEQ ID NO: 1487570 - DNA, 15 bp, Homo sapiens
cctggcattctcagg

SEQ ID NO: 1487571 - DNA, 15 bp, Homo sapiens
gcctggcattctcag

SEQ ID NO: 1487572 - DNA, 15 bp, Homo sapiens
cgcctggcattctca

SEQ ID NO: 1487573 - DNA, 15 bp, Homo sapiens
tcgcctggcattctc

SEQ ID NO: 1487574 - DNA, 15 bp, Homo sapiens
gtcgcctggcattct

SEQ ID NO: 1487575 - DNA, 15 bp, Homo sapiens
cgtcgcctggcattc

SEQ ID NO: 1487576 - DNA, 15 bp, Homo sapiens
ccgtcgcctggcatt

SEQ ID NO: 1487577 - DNA, 15 bp, Homo sapiens
tccgtcgcctggcat

SEQ ID NO: 1487578 - DNA, 15 bp, Homo sapiens
ctccgtcgcctggca

SEQ ID NO: 1487579 - DNA, 15 bp, Homo sapiens
gctccgtcgcctggc

SEQ ID NO: 1487580 - DNA, 15 bp, Homo sapiens
ggctccgtcgcctgg

SEQ ID NO: 1487581 - DNA, 15 bp, Homo sapiens
aggctccgtcgcctg

SEQ ID NO: 1487582 - DNA, 15 bp, Homo sapiens
caggctccgtcgcct

SEQ ID NO: 1487583 - DNA, 15 bp, Homo sapiens
ccaggctccgtcgcc

SEQ ID NO: 1487584 - DNA, 15 bp, Homo sapiens
cccaggctccgtcgc

SEQ ID NO: 1487585 - DNA, 15 bp, Homo sapiens
ccccaggctccgtcg

SEQ ID NO: 1487586 - DNA, 15 bp, Homo sapiens
gccccaggctccgtc

SEQ ID NO: 1487587 - DNA, 15 bp, Homo sapiens
cgccccaggctccgt

SEQ ID NO: 1487588 - DNA, 15 bp, Homo sapiens
tcgccccaggctccg

SEQ ID NO: 1487589 - DNA, 15 bp, Homo sapiens
ctcgccccaggctcc

SEQ ID NO: 1487590 - DNA, 15 bp, Homo sapiens
tctcgccccaggctc

SEQ ID NO: 1487591 - DNA, 15 bp, Homo sapiens
ctctcgccccaggct

SEQ ID NO: 1487592 - DNA, 15 bp, Homo sapiens
cctctcgccccaggc

SEQ ID NO: 1487593 - DNA, 15 bp, Homo sapiens
ccctctcgccccagg

SEQ ID NO: 1487594 - DNA, 15 bp, Homo sapiens
tccctctcgccccag

SEQ ID NO: 1487595 - DNA, 15 bp, Homo sapiens
ctccctctcgcccca

SEQ ID NO: 1487596 - DNA, 15 bp, Homo sapiens
gctccctctcgcccc

SEQ ID NO: 1487597 - DNA, 15 bp, Homo sapiens
agctccctctcgccc

SEQ ID NO: 1487598 - DNA, 15 bp, Homo sapiens
tagctccctctcgcc

SEQ ID NO: 1487599 - DNA, 15 bp, Homo sapiens
gtagctccctctcgc

SEQ ID NO: 1487600 - DNA, 15 bp, Homo sapiens
ggtagctccctctcg

SEQ ID NO: 1487601 - DNA, 15 bp, Homo sapiens
gggtagctccctctc

SEQ ID NO: 1487602 - DNA, 15 bp, Homo sapiens
cgggtagctccctct

SEQ ID NO: 1487603 - DNA, 15 bp, Homo sapiens
gcgggtagctccctc

SEQ ID NO: 1487604 - DNA, 15 bp, Homo sapiens
ggcgggtagctccct

SEQ ID NO: 1487605 - DNA, 15 bp, Homo sapiens
gggcgggtagctccc

SEQ ID NO: 1487606 - DNA, 15 bp, Homo sapiens
cgggcgggtagctcc

SEQ ID NO: 1487607 - DNA, 15 bp, Homo sapiens
ccgggcgggtagctc

SEQ ID NO: 1487608 - DNA, 15 bp, Homo sapiens
cccgggcgggtagct

SEQ ID NO: 1487609 - DNA, 15 bp, Homo sapiens
gcccgggcgggtagc

SEQ ID NO: 1487610 - DNA, 15 bp, Homo sapiens
ggcccgggcgggtag

SEQ ID NO: 1487611 - DNA, 15 bp, Homo sapiens
aggcccgggcgggta

SEQ ID NO: 1487612 - DNA, 15 bp, Homo sapiens
caggcccgggcgggt

SEQ ID NO: 1487613 - DNA, 15 bp, Homo sapiens
tcaggcccgggcggg

SEQ ID NO: 1487614 - DNA, 15 bp, Homo sapiens
atcaggcccgggcgg

SEQ ID NO: 1487615 - DNA, 15 bp, Homo sapiens
aatcaggcccgggcg

SEQ ID NO: 1487616 - DNA, 15 bp, Homo sapiens
aaatcaggcccgggc

SEQ ID NO: 1487617 - DNA, 15 bp, Homo sapiens
aaaatcaggcccggg

SEQ ID NO: 1487618 - DNA, 15 bp, Homo sapiens
caaaatcaggcccgg

SEQ ID NO: 1487619 - DNA, 15 bp, Homo sapiens
acaaaatcaggcccg

SEQ ID NO: 1487620 - DNA, 15 bp, Homo sapiens
aacaaaatcaggccc

SEQ ID NO: 1487621 - DNA, 15 bp, Homo sapiens
taacaaaatcaggcc

SEQ ID NO: 1487622 - DNA, 15 bp, Homo sapiens
ataacaaaatcaggc

SEQ ID NO: 1487623 - DNA, 15 bp, Homo sapiens
aataacaaaatcagg

SEQ ID NO: 1487624 - DNA, 15 bp, Homo sapiens
aaataacaaaatcag

SEQ ID NO: 1487625 - DNA, 15 bp, Homo sapiens
caaataacaaaatca

SEQ ID NO: 1487626 - DNA, 15 bp, Homo sapiens
ccaaataacaaaatc

SEQ ID NO: 1487627 - DNA, 15 bp, Homo sapiens
tccaaataacaaaat

SEQ ID NO: 1487628 - DNA, 15 bp, Homo sapiens
ctccaaataacaaaa

SEQ ID NO: 1487629 - DNA, 15 bp, Homo sapiens
cctccaaataacaaa

SEQ ID NO: 1487630 - DNA, 15 bp, Homo sapiens
tcctccaaataacaa

SEQ ID NO: 1487631 - DNA, 15 bp, Homo sapiens
ttcctccaaataaca

SEQ ID NO: 1487632 - DNA, 15 bp, Homo sapiens
cttcctccaaataac

SEQ ID NO: 1487633 - DNA, 15 bp, Homo sapiens
acttcctccaaataa

SEQ ID NO: 1487634 - DNA, 15 bp, Homo sapiens
tacttcctccaaata

SEQ ID NO: 1487635 - DNA, 15 bp, Homo sapiens
ctacttcctccaaat

SEQ ID NO: 1487636 - DNA, 15 bp, Homo sapiens
cctacttcctccaaa

SEQ ID NO: 1487637 - DNA, 15 bp, Homo sapiens
tcctacttcctccaa

SEQ ID NO: 1487638 - DNA, 15 bp, Homo sapiens
atcctacttcctcca

SEQ ID NO: 1487639 - DNA, 15 bp, Homo sapiens
tatcctacttcctcc

SEQ ID NO: 1487640 - DNA, 15 bp, Homo sapiens
ttatcctacttcctc

SEQ ID NO: 1487641 - DNA, 15 bp, Homo sapiens
tttatcctacttcct

SEQ ID NO: 1487642 - DNA, 15 bp, Homo sapiens
gtttatcctacttcc

SEQ ID NO: 1487643 - DNA, 15 bp, Homo sapiens
cgtttatcctacttc

SEQ ID NO: 1487644 - DNA, 15 bp, Homo sapiens
gcgtttatcctactt

SEQ ID NO: 1487645 - DNA, 15 bp, Homo sapiens
agcgtttatcctact

SEQ ID NO: 1487646 - DNA, 15 bp, Homo sapiens
cagcgtttatcctac

SEQ ID NO: 1487647 - DNA, 15 bp, Homo sapiens
acagcgtttatccta

SEQ ID NO: 1487648 - DNA, 15 bp, Homo sapiens
aacagcgtttatcct

SEQ ID NO: 1487649 - DNA, 15 bp, Homo sapiens
aaacagcgtttatcc

SEQ ID NO: 1487650 - DNA, 15 bp, Homo sapiens
aaaacagcgtttatc

SEQ ID NO: 1487651 - DNA, 15 bp, Homo sapiens
caaaacagcgtttat

SEQ ID NO: 1487652 - DNA, 15 bp, Homo sapiens
gcaaaacagcgttta

SEQ ID NO: 1487653 - DNA, 15 bp, Homo sapiens
ggcaaaacagcgttt

SEQ ID NO: 1487654 - DNA, 15 bp, Homo sapiens
aggcaaaacagcgtt

SEQ ID NO: 1487655 - DNA, 15 bp, Homo sapiens
aaggcaaaacagcgt

SEQ ID NO: 1487656 - DNA, 15 bp, Homo sapiens
taaggcaaaacagcg

SEQ ID NO: 1487657 - DNA, 15 bp, Homo sapiens
ataaggcaaaacagc

SEQ ID NO: 1487658 - DNA, 15 bp, Homo sapiens
tataaggcaaaacag

SEQ ID NO: 1487659 - DNA, 15 bp, Homo sapiens
atataaggcaaaaca

SEQ ID NO: 1487660 - DNA, 15 bp, Homo sapiens
tatataaggcaaaac

SEQ ID NO: 1487661 - DNA, 15 bp, Homo sapiens
ttatataaggcaaaa

SEQ ID NO: 1487662 - DNA, 15 bp, Homo sapiens
attatataaggcaaa

SEQ ID NO: 1487663 - DNA, 15 bp, Homo sapiens
gattatataaggcaa

SEQ ID NO: 1487664 - DNA, 15 bp, Homo sapiens
cgattatataaggca

SEQ ID NO: 1487665 - DNA, 15 bp, Homo sapiens
gcgattatataaggc

SEQ ID NO: 1487666 - DNA, 15 bp, Homo sapiens
tgcgattatataagg

SEQ ID NO: 1487667 - DNA, 15 bp, Homo sapiens
atgcgattatataag

SEQ ID NO: 1487668 - DNA, 15 bp, Homo sapiens
gatgcgattatataa

SEQ ID NO: 1487669 - DNA, 15 bp, Homo sapiens
ggatgcgattatata

SEQ ID NO: 1487670 - DNA, 15 bp, Homo sapiens
aggatgcgattatat

SEQ ID NO: 1487671 - DNA, 15 bp, Homo sapiens
aaggatgcgattata

SEQ ID NO: 1487672 - DNA, 15 bp, Homo sapiens
gaaggatgcgattat

SEQ ID NO: 1487673 - DNA, 15 bp, Homo sapiens
ggaaggatgcgatta

SEQ ID NO: 1487674 - DNA, 15 bp, Homo sapiens
aggaaggatgcgatt

SEQ ID NO: 1487675 - DNA, 15 bp, Homo sapiens
gaggaaggatgcgat

SEQ ID NO: 1487676 - DNA, 15 bp, Homo sapiens
agaggaaggatgcga

SEQ ID NO: 1487677 - DNA, 15 bp, Homo sapiens
cagaggaaggatgcg

SEQ ID NO: 1487678 - DNA, 15 bp, Homo sapiens
ccagaggaaggatgc

SEQ ID NO: 1487679 - DNA, 15 bp, Homo sapiens
gccagaggaaggatg

SEQ ID NO: 1487680 - DNA, 15 bp, Homo sapiens
agccagaggaaggat

SEQ ID NO: 1487681 - DNA, 15 bp, Homo sapiens
cagccagaggaagga

SEQ ID NO: 1487682 - DNA, 15 bp, Homo sapiens
ccagccagaggaagg

SEQ ID NO: 1487683 - DNA, 15 bp, Homo sapiens
accagccagaggaag

SEQ ID NO: 1487684 - DNA, 15 bp, Homo sapiens
aaccagccagaggaa

SEQ ID NO: 1487685 - DNA, 15 bp, Homo sapiens
aaaccagccagagga

SEQ ID NO: 1487686 - DNA, 15 bp, Homo sapiens
taaaccagccagagg

SEQ ID NO: 1487687 - DNA, 15 bp, Homo sapiens
ttaaaccagccagag

SEQ ID NO: 1487688 - DNA, 15 bp, Homo sapiens
tttaaaccagccaga

SEQ ID NO: 1487689 - DNA, 15 bp, Homo sapiens
ttttaaaccagccag

SEQ ID NO: 1487690 - DNA, 15 bp, Homo sapiens
attttaaaccagcca

SEQ ID NO: 1487691 - DNA, 15 bp, Homo sapiens
aattttaaaccagcc

SEQ ID NO: 1487692 - DNA, 15 bp, Homo sapiens
taattttaaaccagc

SEQ ID NO: 1487693 - DNA, 15 bp, Homo sapiens
ctaattttaaaccag

SEQ ID NO: 1487694 - DNA, 15 bp, Homo sapiens
cctaattttaaacca

SEQ ID NO: 1487695 - DNA, 15 bp, Homo sapiens
acctaattttaaacc

SEQ ID NO: 1487696 - DNA, 15 bp, Homo sapiens
cacctaattttaaac

SEQ ID NO: 1487697 - DNA, 15 bp, Homo sapiens
ccacctaattttaaa

SEQ ID NO: 1487698 - DNA, 15 bp, Homo sapiens
cccacctaattttaa

SEQ ID NO: 1487699 - DNA, 15 bp, Homo sapiens
ccccacctaatttta

SEQ ID NO: 1487700 - DNA, 15 bp, Homo sapiens
cccccacctaatttt

SEQ ID NO: 1487701 - DNA, 15 bp, Homo sapiens
acccccacctaattt

SEQ ID NO: 1487702 - DNA, 15 bp, Homo sapiens
cacccccacctaatt

SEQ ID NO: 1487703 - DNA, 15 bp, Homo sapiens
ccacccccacctaat

SEQ ID NO: 1487704 - DNA, 15 bp, Homo sapiens
tccacccccacctaa

SEQ ID NO: 1487705 - DNA, 15 bp, Homo sapiens
ctccacccccaccta

SEQ ID NO: 1487706 - DNA, 15 bp, Homo sapiens
cctccacccccacct

SEQ ID NO: 1487707 - DNA, 15 bp, Homo sapiens
ccctccacccccacc

SEQ ID NO: 1487708 - DNA, 15 bp, Homo sapiens
tccctccacccccac

SEQ ID NO: 1487709 - DNA, 15 bp, Homo sapiens
atccctccaccccca

SEQ ID NO: 1487710 - DNA, 15 bp, Homo sapiens
catccctccaccccc

SEQ ID NO: 1487711 - DNA, 15 bp, Homo sapiens
ccatccctccacccc

SEQ ID NO: 1487712 - DNA, 15 bp, Homo sapiens
cccatccctccaccc

SEQ ID NO: 1487713 - DNA, 15 bp, Homo sapiens
ccccatccctccacc

SEQ ID NO: 1487714 - DNA, 15 bp, Homo sapiens
tccccatccctccac

SEQ ID NO: 1487715 - DNA, 15 bp, Homo sapiens
ctccccatccctcca

SEQ ID NO: 1487716 - DNA, 15 bp, Homo sapiens
actccccatccctcc

SEQ ID NO: 1487717 - DNA, 15 bp, Homo sapiens
cactccccatccctc

SEQ ID NO: 1487718 - DNA, 15 bp, Homo sapiens
acactccccatccct

SEQ ID NO: 1487719 - DNA, 15 bp, Homo sapiens
aacactccccatccc

SEQ ID NO: 1487720 - DNA, 15 bp, Homo sapiens
caacactccccatcc

SEQ ID NO: 1487721 - DNA, 15 bp, Homo sapiens
gcaacactccccatc

SEQ ID NO: 1487722 - DNA, 15 bp, Homo sapiens
tgcaacactccccat

SEQ ID NO: 1487723 - DNA, 15 bp, Homo sapiens
atgcaacactcccca

SEQ ID NO: 1487724 - DNA, 15 bp, Homo sapiens
aatgcaacactcccc

SEQ ID NO: 1487725 - DNA, 15 bp, Homo sapiens
caatgcaacactccc

SEQ ID NO: 1487726 - DNA, 15 bp, Homo sapiens
ccaatgcaacactcc

SEQ ID NO: 1487727 - DNA, 15 bp, Homo sapiens
cccaatgcaacactc

SEQ ID NO: 1487728 - DNA, 15 bp, Homo sapiens
tcccaatgcaacact

SEQ ID NO: 1487729 - DNA, 15 bp, Homo sapiens
ctcccaatgcaacac

SEQ ID NO: 1487730 - DNA, 15 bp, Homo sapiens
cctcccaatgcaaca

SEQ ID NO: 1487731 - DNA, 15 bp, Homo sapiens
tcctcccaatgcaac

SEQ ID NO: 1487732 - DNA, 15 bp, Homo sapiens
ttcctcccaatgcaa

SEQ ID NO: 1487733 - DNA, 15 bp, Homo sapiens
cttcctcccaatgca

SEQ ID NO: 1487734 - DNA, 15 bp, Homo sapiens
gcttcctcccaatgc

SEQ ID NO: 1487735 - DNA, 15 bp, Homo sapiens
ggcttcctcccaatg

SEQ ID NO: 1487736 - DNA, 15 bp, Homo sapiens
aggcttcctcccaat

SEQ ID NO: 1487737 - DNA, 15 bp, Homo sapiens
gaggcttcctcccaa

SEQ ID NO: 1487738 - DNA, 15 bp, Homo sapiens
tgaggcttcctccca

SEQ ID NO: 1487739 - DNA, 15 bp, Homo sapiens
atgaggcttcctccc

SEQ ID NO: 1487740 - DNA, 15 bp, Homo sapiens
tatgaggcttcctcc

SEQ ID NO: 1487741 - DNA, 15 bp, Homo sapiens
ctatgaggcttcctc

SEQ ID NO: 1487742 - DNA, 15 bp, Homo sapiens
gctatgaggcttcct

SEQ ID NO: 1487743 - DNA, 15 bp, Homo sapiens
agctatgaggcttcc

SEQ ID NO: 1487744 - DNA, 15 bp, Homo sapiens
aagctatgaggcttc

SEQ ID NO: 1487745 - DNA, 15 bp, Homo sapiens
gaagctatgaggctt

SEQ ID NO: 1487746 - DNA, 15 bp, Homo sapiens
tgaagctatgaggct

SEQ ID NO: 1487747 - DNA, 15 bp, Homo sapiens
atgaagctatgaggc

SEQ ID NO: 1487748 - DNA, 15 bp, Homo sapiens
catgaagctatgagg

SEQ ID NO: 1487749 - DNA, 15 bp, Homo sapiens
ccatgaagctatgag

SEQ ID NO: 1487750 - DNA, 15 bp, Homo sapiens
accatgaagctatga

SEQ ID NO: 1487751 - DNA, 15 bp, Homo sapiens
aaccatgaagctatg

SEQ ID NO: 1487752 - DNA, 15 bp, Homo sapiens
aaaccatgaagctat

SEQ ID NO: 1487753 - DNA, 15 bp, Homo sapiens
aaaaccatgaagcta

SEQ ID NO: 1487754 - DNA, 15 bp, Homo sapiens
caaaaccatgaagct

SEQ ID NO: 1487755 - DNA, 15 bp, Homo sapiens
tcaaaaccatgaagc

SEQ ID NO: 1487756 - DNA, 15 bp, Homo sapiens
atcaaaaccatgaag

SEQ ID NO: 1487757 - DNA, 15 bp, Homo sapiens
tatcaaaaccatgaa

SEQ ID NO: 1487758 - DNA, 15 bp, Homo sapiens
gtatcaaaaccatga

SEQ ID NO: 1487759 - DNA, 15 bp, Homo sapiens
tgtatcaaaaccatg

SEQ ID NO: 1487760 - DNA, 15 bp, Homo sapiens
gtgtatcaaaaccat

SEQ ID NO: 1487761 - DNA, 15 bp, Homo sapiens
tgtgtatcaaaacca

SEQ ID NO: 1487762 - DNA, 15 bp, Homo sapiens
atgtgtatcaaaacc

SEQ ID NO: 1487763 - DNA, 15 bp, Homo sapiens
catgtgtatcaaaac

SEQ ID NO: 1487764 - DNA, 15 bp, Homo sapiens
acatgtgtatcaaaa

SEQ ID NO: 1487765 - DNA, 15 bp, Homo sapiens
cacatgtgtatcaaa

SEQ ID NO: 1487766 - DNA, 15 bp, Homo sapiens
gcacatgtgtatcaa

SEQ ID NO: 1487767 - DNA, 15 bp, Homo sapiens
cgcacatgtgtatca

SEQ ID NO: 1487768 - DNA, 15 bp, Homo sapiens
tcgcacatgtgtatc

SEQ ID NO: 1487769 - DNA, 15 bp, Homo sapiens
atcgcacatgtgtat

SEQ ID NO: 1487770 - DNA, 15 bp, Homo sapiens
gatcgcacatgtgta

SEQ ID NO: 1487771 - DNA, 15 bp, Homo sapiens
ggatcgcacatgtgt

SEQ ID NO: 1487772 - DNA, 15 bp, Homo sapiens
gggatcgcacatgtg

SEQ ID NO: 1487773 - DNA, 15 bp, Homo sapiens
cgggatcgcacatgt

SEQ ID NO: 1487774 - DNA, 15 bp, Homo sapiens
ccgggatcgcacatg

SEQ ID NO: 1487775 - DNA, 15 bp, Homo sapiens
accgggatcgcacat

SEQ ID NO: 1487776 - DNA, 15 bp, Homo sapiens
gaccgggatcgcaca

SEQ ID NO: 1487777 - DNA, 15 bp, Homo sapiens
tgaccgggatcgcac

SEQ ID NO: 1487778 - DNA, 15 bp, Homo sapiens
gtgaccgggatcgca

SEQ ID NO: 1487779 - DNA, 15 bp, Homo sapiens
ggtgaccgggatcgc

SEQ ID NO: 1487780 - DNA, 15 bp, Homo sapiens
aggtgaccgggatcg

SEQ ID NO: 1487781 - DNA, 15 bp, Homo sapiens
caggtgaccgggatc

SEQ ID NO: 1487782 - DNA, 15 bp, Homo sapiens
ccaggtgaccgggat

SEQ ID NO: 1487783 - DNA, 15 bp, Homo sapiens
tccaggtgaccggga

SEQ ID NO: 1487784 - DNA, 15 bp, Homo sapiens
atccaggtgaccggg

SEQ ID NO: 1487785 - DNA, 15 bp, Homo sapiens
aatccaggtgaccgg

SEQ ID NO: 1487786 - DNA, 15 bp, Homo sapiens
aaatccaggtgaccg

SEQ ID NO: 1487787 - DNA, 15 bp, Homo sapiens
gaaatccaggtgacc

SEQ ID NO: 1487788 - DNA, 15 bp, Homo sapiens
tgaaatccaggtgac

SEQ ID NO: 1487789 - DNA, 15 bp, Homo sapiens
atgaaatccaggtga

SEQ ID NO: 1487790 - DNA, 15 bp, Homo sapiens
tatgaaatccaggtg

SEQ ID NO: 1487791 - DNA, 15 bp, Homo sapiens
ttatgaaatccaggt

SEQ ID NO: 1487792 - DNA, 15 bp, Homo sapiens
attatgaaatccagg

SEQ ID NO: 1487793 - DNA, 15 bp, Homo sapiens
aattatgaaatccag

SEQ ID NO: 1487794 - DNA, 15 bp, Homo sapiens
gaattatgaaatcca

SEQ ID NO: 1487795 - DNA, 15 bp, Homo sapiens
tgaattatgaaatcc

SEQ ID NO: 1487796 - DNA, 15 bp, Homo sapiens
ttgaattatgaaatc

SEQ ID NO: 1487797 - DNA, 15 bp, Homo sapiens
tttgaattatgaaat

SEQ ID NO: 1487798 - DNA, 15 bp, Homo sapiens
atttgaattatgaaa

SEQ ID NO: 1487799 - DNA, 15 bp, Homo sapiens
catttgaattatgaa

SEQ ID NO: 1487800 - DNA, 15 bp, Homo sapiens
acatttgaattatga

SEQ ID NO: 1487801 - DNA, 15 bp, Homo sapiens
tacatttgaattatg

SEQ ID NO: 1487802 - DNA, 15 bp, Homo sapiens
ttacatttgaattat

SEQ ID NO: 1487803 - DNA, 15 bp, Homo sapiens
gttacatttgaatta

SEQ ID NO: 1487804 - DNA, 15 bp, Homo sapiens
ggttacatttgaatt

SEQ ID NO: 1487805 - DNA, 15 bp, Homo sapiens
gggttacatttgaat

SEQ ID NO: 1487806 - DNA, 15 bp, Homo sapiens
cgggttacatttgaa

SEQ ID NO: 1487807 - DNA, 15 bp, Homo sapiens
tcgggttacatttga

SEQ ID NO: 1487808 - DNA, 15 bp, Homo sapiens
ttcgggttacatttg

SEQ ID NO: 1487809 - DNA, 15 bp, Homo sapiens
cttcgggttacattt

SEQ ID NO: 1487810 - DNA, 15 bp, Homo sapiens
ccttcgggttacatt

SEQ ID NO: 1487811 - DNA, 15 bp, Homo sapiens
tccttcgggttacat

SEQ ID NO: 1487812 - DNA, 15 bp, Homo sapiens
gtccttcgggttaca

SEQ ID NO: 1487813 - DNA, 15 bp, Homo sapiens
ggtccttcgggttac

SEQ ID NO: 1487814 - DNA, 15 bp, Homo sapiens
tggtccttcgggtta

SEQ ID NO: 1487815 - DNA, 15 bp, Homo sapiens
ctggtccttcgggtt

SEQ ID NO: 1487816 - DNA, 15 bp, Homo sapiens
gctggtccttcgggt

SEQ ID NO: 1487817 - DNA, 15 bp, Homo sapiens
agctggtccttcggg

SEQ ID NO: 1487818 - DNA, 15 bp, Homo sapiens
cagctggtccttcgg

SEQ ID NO: 1487819 - DNA, 15 bp, Homo sapiens
ccagctggtccttcg

SEQ ID NO: 1487820 - DNA, 15 bp, Homo sapiens
tccagctggtccttc

SEQ ID NO: 1487821 - DNA, 15 bp, Homo sapiens
ttccagctggtcctt

SEQ ID NO: 1487822 - DNA, 15 bp, Homo sapiens
attccagctggtcct

SEQ ID NO: 1487823 - DNA, 15 bp, Homo sapiens
aattccagctggtcc

SEQ ID NO: 1487824 - DNA, 15 bp, Homo sapiens
taattccagctggtc

SEQ ID NO: 1487825 - DNA, 15 bp, Homo sapiens
gtaattccagctggt

SEQ ID NO: 1487826 - DNA, 15 bp, Homo sapiens
ggtaattccagctgg

SEQ ID NO: 1487827 - DNA, 15 bp, Homo sapiens
gggtaattccagctg

SEQ ID NO: 1487828 - DNA, 15 bp, Homo sapiens
agggtaattccagct

SEQ ID NO: 1487829 - DNA, 15 bp, Homo sapiens
cagggtaattccagc

SEQ ID NO: 1487830 - DNA, 15 bp, Homo sapiens
gcagggtaattccag

SEQ ID NO: 1487831 - DNA, 15 bp, Homo sapiens
ggcagggtaattcca

SEQ ID NO: 1487832 - DNA, 15 bp, Homo sapiens
gggcagggtaattcc

SEQ ID NO: 1487833 - DNA, 15 bp, Homo sapiens
tgggcagggtaattc

SEQ ID NO: 1487834 - DNA, 15 bp, Homo sapiens
ctgggcagggtaatt

SEQ ID NO: 1487835 - DNA, 15 bp, Homo sapiens
cctgggcagggtaat

SEQ ID NO: 1487836 - DNA, 15 bp, Homo sapiens
gcctgggcagggtaa

SEQ ID NO: 1487837 - DNA, 15 bp, Homo sapiens
cgcctgggcagggta

SEQ ID NO: 1487838 - DNA, 15 bp, Homo sapiens
gcgcctgggcagggt

SEQ ID NO: 1487839 - DNA, 15 bp, Homo sapiens
tgcgcctgggcaggg

SEQ ID NO: 1487840 - DNA, 15 bp, Homo sapiens
gtgcgcctgggcagg

SEQ ID NO: 1487841 - DNA, 15 bp, Homo sapiens
tgtgcgcctgggcag

SEQ ID NO: 1487842 - DNA, 15 bp, Homo sapiens
ctgtgcgcctgggca

SEQ ID NO: 1487843 - DNA, 15 bp, Homo sapiens
actgtgcgcctgggc

SEQ ID NO: 1487844 - DNA, 15 bp, Homo sapiens
cactgtgcgcctggg

SEQ ID NO: 1487845 - DNA, 15 bp, Homo sapiens
gcactgtgcgcctgg

SEQ ID NO: 1487846 - DNA, 15 bp, Homo sapiens
agcactgtgcgcctg

SEQ ID NO: 1487847 - DNA, 15 bp, Homo sapiens
aagcactgtgcgcct

SEQ ID NO: 1487848 - DNA, 15 bp, Homo sapiens
gaagcactgtgcgcc

SEQ ID NO: 1487849 - DNA, 15 bp, Homo sapiens
tgaagcactgtgcgc

SEQ ID NO: 1487850 - DNA, 15 bp, Homo sapiens
ttgaagcactgtgcg

SEQ ID NO: 1487851 - DNA, 15 bp, Homo sapiens
tttgaagcactgtgc

SEQ ID NO: 1487852 - DNA, 15 bp, Homo sapiens
ttttgaagcactgtg

SEQ ID NO: 1487853 - DNA, 15 bp, Homo sapiens
gttttgaagcactgt

SEQ ID NO: 1487854 - DNA, 15 bp, Homo sapiens
ggttttgaagcactg

SEQ ID NO: 1487855 - DNA, 15 bp, Homo sapiens
gggttttgaagcact

SEQ ID NO: 1487856 - DNA, 15 bp, Homo sapiens
ggggttttgaagcac

SEQ ID NO: 1487857 - DNA, 15 bp, Homo sapiens
tggggttttgaagca

SEQ ID NO: 1487858 - DNA, 15 bp, Homo sapiens
gtggggttttgaagc

SEQ ID NO: 1487859 - DNA, 15 bp, Homo sapiens
cgtggggttttgaag

SEQ ID NO: 1487860 - DNA, 15 bp, Homo sapiens
acgtggggttttgaa

SEQ ID NO: 1487861 - DNA, 15 bp, Homo sapiens
tacgtggggttttga

SEQ ID NO: 1487862 - DNA, 15 bp, Homo sapiens
ctacgtggggttttg

SEQ ID NO: 1487863 - DNA, 15 bp, Homo sapiens
tctacgtggggtttt

SEQ ID NO: 1487864 - DNA, 15 bp, Homo sapiens
ctctacgtggggttt

SEQ ID NO: 1487865 - DNA, 15 bp, Homo sapiens
gctctacgtggggtt

SEQ ID NO: 1487866 - DNA, 15 bp, Homo sapiens
ggctctacgtggggt

SEQ ID NO: 1487867 - DNA, 15 bp, Homo sapiens
tggctctacgtgggg

SEQ ID NO: 1487868 - DNA, 15 bp, Homo sapiens
ctggctctacgtggg

SEQ ID NO: 1487869 - DNA, 15 bp, Homo sapiens
cctggctctacgtgg

SEQ ID NO: 1487870 - DNA, 15 bp, Homo sapiens
tcctggctctacgtg

SEQ ID NO: 1487871 - DNA, 15 bp, Homo sapiens
ctcctggctctacgt

SEQ ID NO: 1487872 - DNA, 15 bp, Homo sapiens
gctcctggctctacg

SEQ ID NO: 1487873 - DNA, 15 bp, Homo sapiens
tgctcctggctctac

SEQ ID NO: 1487874 - DNA, 15 bp, Homo sapiens
ttgctcctggctcta

SEQ ID NO: 1487875 - DNA, 15 bp, Homo sapiens
cttgctcctggctct

SEQ ID NO: 1487876 - DNA, 15 bp, Homo sapiens
tcttgctcctggctc

SEQ ID NO: 1487877 - DNA, 15 bp, Homo sapiens
ctcttgctcctggct

SEQ ID NO: 1487878 - DNA, 15 bp, Homo sapiens
actcttgctcctggc

SEQ ID NO: 1487879 - DNA, 15 bp, Homo sapiens
tactcttgctcctgg

SEQ ID NO: 1487880 - DNA, 15 bp, Homo sapiens
atactcttgctcctg

SEQ ID NO: 1487881 - DNA, 15 bp, Homo sapiens
tatactcttgctcct

SEQ ID NO: 1487882 - DNA, 15 bp, Homo sapiens
atatactcttgctcc

SEQ ID NO: 1487883 - DNA, 15 bp, Homo sapiens
tatatactcttgctc

SEQ ID NO: 1487884 - DNA, 15 bp, Homo sapiens
gtatatactcttgct

SEQ ID NO: 1487885 - DNA, 15 bp, Homo sapiens
tgtatatactcttgc

SEQ ID NO: 1487886 - DNA, 15 bp, Homo sapiens
gtgtatatactcttg

SEQ ID NO: 1487887 - DNA, 15 bp, Homo sapiens
cgtgtatatactctt

SEQ ID NO: 1487888 - DNA, 15 bp, Homo sapiens
gcgtgtatatactct

SEQ ID NO: 1487889 - DNA, 15 bp, Homo sapiens
agcgtgtatatactc

SEQ ID NO: 1487890 - DNA, 15 bp, Homo sapiens
tagcgtgtatatact

SEQ ID NO: 1487891 - DNA, 15 bp, Homo sapiens
ctagcgtgtatatac

SEQ ID NO: 1487892 - DNA, 15 bp, Homo sapiens
cctagcgtgtatata

SEQ ID NO: 1487893 - DNA, 15 bp, Homo sapiens
tcctagcgtgtatat

SEQ ID NO: 1487894 - DNA, 15 bp, Homo sapiens
ttcctagcgtgtata

SEQ ID NO: 1487895 - DNA, 15 bp, Homo sapiens
gttcctagcgtgtat

SEQ ID NO: 1487896 - DNA, 15 bp, Homo sapiens
agttcctagcgtgta

SEQ ID NO: 1487897 - DNA, 15 bp, Homo sapiens
aagttcctagcgtgt

SEQ ID NO: 1487898 - DNA, 15 bp, Homo sapiens
caagttcctagcgtg

SEQ ID NO: 1487899 - DNA, 15 bp, Homo sapiens
ccaagttcctagcgt

SEQ ID NO: 1487900 - DNA, 15 bp, Homo sapiens
accaagttcctagcg

SEQ ID NO: 1487901 - DNA, 15 bp, Homo sapiens
taccaagttcctagc

SEQ ID NO: 1487902 - DNA, 15 bp, Homo sapiens
ataccaagttcctag

SEQ ID NO: 1487903 - DNA, 15 bp, Homo sapiens
gataccaagttccta

SEQ ID NO: 1487904 - DNA, 15 bp, Homo sapiens
agataccaagttcct

SEQ ID NO: 1487905 - DNA, 15 bp, Homo sapiens
cagataccaagttcc

SEQ ID NO: 1487906 - DNA, 15 bp, Homo sapiens
tcagataccaagttc

SEQ ID NO: 1487907 - DNA, 15 bp, Homo sapiens
ctcagataccaagtt

SEQ ID NO: 1487908 - DNA, 15 bp, Homo sapiens
gctcagataccaagt

SEQ ID NO: 1487909 - DNA, 15 bp, Homo sapiens
agctcagataccaag

SEQ ID NO: 1487910 - DNA, 15 bp, Homo sapiens
cagctcagataccaa

SEQ ID NO: 1487911 - DNA, 15 bp, Homo sapiens
tcagctcagatacca

SEQ ID NO: 1487912 - DNA, 15 bp, Homo sapiens
ctcagctcagatacc

SEQ ID NO: 1487913 - DNA, 15 bp, Homo sapiens
tctcagctcagatac

SEQ ID NO: 1487914 - DNA, 15 bp, Homo sapiens
gtctcagctcagata

SEQ ID NO: 1487915 - DNA, 15 bp, Homo sapiens
tgtctcagctcagat

SEQ ID NO: 1487916 - DNA, 15 bp, Homo sapiens
gtgtctcagctcaga

SEQ ID NO: 1487917 - DNA, 15 bp, Homo sapiens
ggtgtctcagctcag

SEQ ID NO: 1487918 - DNA, 15 bp, Homo sapiens
aggtgtctcagctca

SEQ ID NO: 1487919 - DNA, 15 bp, Homo sapiens
caggtgtctcagctc

SEQ ID NO: 1487920 - DNA, 15 bp, Homo sapiens
tcaggtgtctcagct

SEQ ID NO: 1487921 - DNA, 15 bp, Homo sapiens
ctcaggtgtctcagc

SEQ ID NO: 1487922 - DNA, 15 bp, Homo sapiens
actcaggtgtctcag

SEQ ID NO: 1487923 - DNA, 15 bp, Homo sapiens
gactcaggtgtctca

SEQ ID NO: 1487924 - DNA, 15 bp, Homo sapiens
ggactcaggtgtctc

SEQ ID NO: 1487925 - DNA, 15 bp, Homo sapiens
aggactcaggtgtct

SEQ ID NO: 1487926 - DNA, 15 bp, Homo sapiens
gaggactcaggtgtc

SEQ ID NO: 1487927 - DNA, 15 bp, Homo sapiens
ggaggactcaggtgt

SEQ ID NO: 1487928 - DNA, 15 bp, Homo sapiens
aggaggactcaggtg

SEQ ID NO: 1487929 - DNA, 15 bp, Homo sapiens
caggaggactcaggt

SEQ ID NO: 1487930 - DNA, 15 bp, Homo sapiens
tcaggaggactcagg

SEQ ID NO: 1487931 - DNA, 15 bp, Homo sapiens
ctcaggaggactcag

SEQ ID NO: 1487932 - DNA, 15 bp, Homo sapiens
cctcaggaggactca

SEQ ID NO: 1487933 - DNA, 15 bp, Homo sapiens
ccctcaggaggactc

SEQ ID NO: 1487934 - DNA, 15 bp, Homo sapiens
gccctcaggaggact

SEQ ID NO: 1487935 - DNA, 15 bp, Homo sapiens
ggccctcaggaggac

SEQ ID NO: 1487936 - DNA, 15 bp, Homo sapiens
gggccctcaggagga

SEQ ID NO: 1487937 - DNA, 15 bp, Homo sapiens
cgggccctcaggagg

SEQ ID NO: 1487938 - DNA, 15 bp, Homo sapiens
ccgggccctcaggag

SEQ ID NO: 1487939 - DNA, 15 bp, Homo sapiens
gccgggccctcagga

SEQ ID NO: 1487940 - DNA, 15 bp, Homo sapiens
ggccgggccctcagg

SEQ ID NO: 1487941 - DNA, 15 bp, Homo sapiens
aggccgggccctcag

SEQ ID NO: 1487942 - DNA, 15 bp, Homo sapiens
taggccgggccctca

SEQ ID NO: 1487943 - DNA, 15 bp, Homo sapiens
ctaggccgggccctc

SEQ ID NO: 1487944 - DNA, 15 bp, Homo sapiens
actaggccgggccct

SEQ ID NO: 1487945 - DNA, 15 bp, Homo sapiens
aactaggccgggccc

SEQ ID NO: 1487946 - DNA, 15 bp, Homo sapiens
aaactaggccgggcc

SEQ ID NO: 1487947 - DNA, 15 bp, Homo sapiens
taaactaggccgggc

SEQ ID NO: 1487948 - DNA, 15 bp, Homo sapiens
ctaaactaggccggg

SEQ ID NO: 1487949 - DNA, 15 bp, Homo sapiens
tctaaactaggccgg

SEQ ID NO: 1487950 - DNA, 15 bp, Homo sapiens
ttctaaactaggccg

SEQ ID NO: 1487951 - DNA, 15 bp, Homo sapiens
tttctaaactaggcc

SEQ ID NO: 1487952 - DNA, 15 bp, Homo sapiens
ctttctaaactaggc

SEQ ID NO: 1487953 - DNA, 15 bp, Homo sapiens
cctttctaaactagg

SEQ ID NO: 1487954 - DNA, 15 bp, Homo sapiens
ccctttctaaactag

SEQ ID NO: 1487955 - DNA, 15 bp, Homo sapiens
gccctttctaaacta

SEQ ID NO: 1487956 - DNA, 15 bp, Homo sapiens
cgccctttctaaact

SEQ ID NO: 1487957 - DNA, 15 bp, Homo sapiens
tcgccctttctaaac

SEQ ID NO: 1487958 - DNA, 15 bp, Homo sapiens
ctcgccctttctaaa

SEQ ID NO: 1487959 - DNA, 15 bp, Homo sapiens
tctcgccctttctaa

SEQ ID NO: 1487960 - DNA, 15 bp, Homo sapiens
ttctcgccctttcta

SEQ ID NO: 1487961 - DNA, 15 bp, Homo sapiens
attctcgccctttct

SEQ ID NO: 1487962 - DNA, 15 bp, Homo sapiens
aattctcgccctttc

SEQ ID NO: 1487963 - DNA, 15 bp, Homo sapiens
aaattctcgcccttt

SEQ ID NO: 1487964 - DNA, 15 bp, Homo sapiens
aaaattctcgccctt

SEQ ID NO: 1487965 - DNA, 15 bp, Homo sapiens
caaaattctcgccct

SEQ ID NO: 1487966 - DNA, 15 bp, Homo sapiens
gcaaaattctcgccc

SEQ ID NO: 1487967 - DNA, 15 bp, Homo sapiens
tgcaaaattctcgcc

SEQ ID NO: 1487968 - DNA, 15 bp, Homo sapiens
ctgcaaaattctcgc

SEQ ID NO: 1487969 - DNA, 15 bp, Homo sapiens
cctgcaaaattctcg

SEQ ID NO: 1487970 - DNA, 15 bp, Homo sapiens
acctgcaaaattctc

SEQ ID NO: 1487971 - DNA, 15 bp, Homo sapiens
gacctgcaaaattct

SEQ ID NO: 1487972 - DNA, 15 bp, Homo sapiens
agacctgcaaaattc

SEQ ID NO: 1487973 - DNA, 15 bp, Homo sapiens
gagacctgcaaaatt

SEQ ID NO: 1487974 - DNA, 15 bp, Homo sapiens
agagacctgcaaaat

SEQ ID NO: 1487975 - DNA, 15 bp, Homo sapiens
aagagacctgcaaaa

SEQ ID NO: 1487976 - DNA, 15 bp, Homo sapiens
caagagacctgcaaa

SEQ ID NO: 1487977 - DNA, 15 bp, Homo sapiens
tcaagagacctgcaa

SEQ ID NO: 1487978 - DNA, 15 bp, Homo sapiens
ctcaagagacctgca

SEQ ID NO: 1487979 - DNA, 15 bp, Homo sapiens
tctcaagagacctgc

SEQ ID NO: 1487980 - DNA, 15 bp, Homo sapiens
ctctcaagagacctg

SEQ ID NO: 1487981 - DNA, 15 bp, Homo sapiens
actctcaagagacct

SEQ ID NO: 1487982 - DNA, 15 bp, Homo sapiens
gactctcaagagacc

SEQ ID NO: 1487983 - DNA, 15 bp, Homo sapiens
agactctcaagagac

SEQ ID NO: 1487984 - DNA, 15 bp, Homo sapiens
gagactctcaagaga

SEQ ID NO: 1487985 - DNA, 15 bp, Homo sapiens
agagactctcaagag

SEQ ID NO: 1487986 - DNA, 15 bp, Homo sapiens
cagagactctcaaga

SEQ ID NO: 1487987 - DNA, 15 bp, Homo sapiens
tcagagactctcaag

SEQ ID NO: 1487988 - DNA, 15 bp, Homo sapiens
gtcagagactctcaa

SEQ ID NO: 1487989 - DNA, 15 bp, Homo sapiens
tgtcagagactctca

SEQ ID NO: 1487990 - DNA, 15 bp, Homo sapiens
ctgtcagagactctc

SEQ ID NO: 1487991 - DNA, 15 bp, Homo sapiens
actgtcagagactct

SEQ ID NO: 1487992 - DNA, 15 bp, Homo sapiens
cactgtcagagactc

SEQ ID NO: 1487993 - DNA, 15 bp, Homo sapiens
acactgtcagagact

SEQ ID NO: 1487994 - DNA, 15 bp, Homo sapiens
aacactgtcagagac

SEQ ID NO: 1487995 - DNA, 15 bp, Homo sapiens
caacactgtcagaga

SEQ ID NO: 1487996 - DNA, 15 bp, Homo sapiens
acaacactgtcagag

SEQ ID NO: 1487997 - DNA, 15 bp, Homo sapiens
aacaacactgtcaga

SEQ ID NO: 1487998 - DNA, 15 bp, Homo sapiens
taacaacactgtcag

SEQ ID NO: 1487999 - DNA, 15 bp, Homo sapiens
ttaacaacactgtca

SEQ ID NO: 1488000 - DNA, 15 bp, Homo sapiens
attaacaacactgtc

SEQ ID NO: 1488001 - DNA, 15 bp, Homo sapiens
aattaacaacactgt

SEQ ID NO: 1488002 - DNA, 15 bp, Homo sapiens
aaattaacaacactg

SEQ ID NO: 1488003 - DNA, 15 bp, Homo sapiens
caaattaacaacact

SEQ ID NO: 1488004 - DNA, 15 bp, Homo sapiens
acaaattaacaacac

SEQ ID NO: 1488005 - DNA, 15 bp, Homo sapiens
tacaaattaacaaca

SEQ ID NO: 1488006 - DNA, 15 bp, Homo sapiens
ttacaaattaacaac

SEQ ID NO: 1488007 - DNA, 15 bp, Homo sapiens
tttacaaattaacaa

SEQ ID NO: 1488008 - DNA, 15 bp, Homo sapiens
atttacaaattaaca

SEQ ID NO: 1488009 - DNA, 15 bp, Homo sapiens
aatttacaaattaac

SEQ ID NO: 1488010 - DNA, 15 bp, Homo sapiens
taatttacaaattaa

SEQ ID NO: 1488011 - DNA, 15 bp, Homo sapiens
ttaatttacaaatta

SEQ ID NO: 1488012 - DNA, 15 bp, Homo sapiens
cttaatttacaaatt

SEQ ID NO: 1488013 - DNA, 15 bp, Homo sapiens
tcttaatttacaaat

SEQ ID NO: 1488014 - DNA, 15 bp, Homo sapiens
ttcttaatttacaaa

SEQ ID NO: 1488015 - DNA, 15 bp, Homo sapiens
cttcttaatttacaa

SEQ ID NO: 1488016 - DNA, 15 bp, Homo sapiens
gcttcttaatttaca

SEQ ID NO: 1488017 - DNA, 15 bp, Homo sapiens
agcttcttaatttac

SEQ ID NO: 1488018 - DNA, 15 bp, Homo sapiens
cagcttcttaattta

SEQ ID NO: 1488019 - DNA, 15 bp, Homo sapiens
ccagcttcttaattt

SEQ ID NO: 1488020 - DNA, 15 bp, Homo sapiens
gccagcttcttaatt

SEQ ID NO: 1488021 - DNA, 15 bp, Homo sapiens
agccagcttcttaat

SEQ ID NO: 1488022 - DNA, 15 bp, Homo sapiens
gagccagcttcttaa

SEQ ID NO: 1488023 - DNA, 15 bp, Homo sapiens
ggagccagcttctta

SEQ ID NO: 1488024 - DNA, 15 bp, Homo sapiens
gggagccagcttctt

SEQ ID NO: 1488025 - DNA, 15 bp, Homo sapiens
ggggagccagcttct

SEQ ID NO: 1488026 - DNA, 15 bp, Homo sapiens
cggggagccagcttc

SEQ ID NO: 1488027 - DNA, 15 bp, Homo sapiens
ccggggagccagctt

SEQ ID NO: 1488028 - DNA, 15 bp, Homo sapiens
gccggggagccagct

SEQ ID NO: 1488029 - DNA, 15 bp, Homo sapiens
agccggggagccagc

SEQ ID NO: 1488030 - DNA, 15 bp, Homo sapiens
cagccggggagccag

SEQ ID NO: 1488031 - DNA, 15 bp, Homo sapiens
acagccggggagcca

SEQ ID NO: 1488032 - DNA, 15 bp, Homo sapiens
gacagccggggagcc

SEQ ID NO: 1488033 - DNA, 15 bp, Homo sapiens
agacagccggggagc

SEQ ID NO: 1488034 - DNA, 15 bp, Homo sapiens
tagacagccggggag

SEQ ID NO: 1488035 - DNA, 15 bp, Homo sapiens
ctagacagccgggga

SEQ ID NO: 1488036 - DNA, 15 bp, Homo sapiens
actagacagccgggg

SEQ ID NO: 1488037 - DNA, 15 bp, Homo sapiens
tactagacagccggg

SEQ ID NO: 1488038 - DNA, 15 bp, Homo sapiens
ttactagacagccgg

SEQ ID NO: 1488039 - DNA, 15 bp, Homo sapiens
gttactagacagccg

SEQ ID NO: 1488040 - DNA, 15 bp, Homo sapiens
agttactagacagcc

SEQ ID NO: 1488041 - DNA, 15 bp, Homo sapiens
aagttactagacagc

SEQ ID NO: 1488042 - DNA, 15 bp, Homo sapiens
taagttactagacag

SEQ ID NO: 1488043 - DNA, 15 bp, Homo sapiens
ctaagttactagaca

SEQ ID NO: 1488044 - DNA, 15 bp, Homo sapiens
cctaagttactagac

SEQ ID NO: 1488045 - DNA, 15 bp, Homo sapiens
ccctaagttactaga

SEQ ID NO: 1488046 - DNA, 15 bp, Homo sapiens
tccctaagttactag

SEQ ID NO: 1488047 - DNA, 15 bp, Homo sapiens
atccctaagttacta

SEQ ID NO: 1488048 - DNA, 15 bp, Homo sapiens
aatccctaagttact

SEQ ID NO: 1488049 - DNA, 15 bp, Homo sapiens
taatccctaagttac

SEQ ID NO: 1488050 - DNA, 15 bp, Homo sapiens
ctaatccctaagtta

SEQ ID NO: 1488051 - DNA, 15 bp, Homo sapiens
gctaatccctaagtt

SEQ ID NO: 1488052 - DNA, 15 bp, Homo sapiens
tgctaatccctaagt

SEQ ID NO: 1488053 - DNA, 15 bp, Homo sapiens
ttgctaatccctaag

SEQ ID NO: 1488054 - DNA, 15 bp, Homo sapiens
tttgctaatccctaa

SEQ ID NO: 1488055 - DNA, 15 bp, Homo sapiens
atttgctaatcccta

SEQ ID NO: 1488056 - DNA, 15 bp, Homo sapiens
catttgctaatccct

SEQ ID NO: 1488057 - DNA, 15 bp, Homo sapiens
gcatttgctaatccc

SEQ ID NO: 1488058 - DNA, 15 bp, Homo sapiens
tgcatttgctaatcc

SEQ ID NO: 1488059 - DNA, 15 bp, Homo sapiens
ttgcatttgctaatc

SEQ ID NO: 1488060 - DNA, 15 bp, Homo sapiens
tttgcatttgctaat

SEQ ID NO: 1488061 - DNA, 15 bp, Homo sapiens
ttttgcatttgctaa

SEQ ID NO: 1488062 - DNA, 15 bp, Homo sapiens
cttttgcatttgcta

SEQ ID NO: 1488063 - DNA, 15 bp, Homo sapiens
acttttgcatttgct

SEQ ID NO: 1488064 - DNA, 15 bp, Homo sapiens
tacttttgcatttgc

SEQ ID NO: 1488065 - DNA, 15 bp, Homo sapiens
atacttttgcatttg

SEQ ID NO: 1488066 - DNA, 15 bp, Homo sapiens
tatacttttgcattt

SEQ ID NO: 1488067 - DNA, 15 bp, Homo sapiens
ctatacttttgcatt

SEQ ID NO: 1488068 - DNA, 15 bp, Homo sapiens
tctatacttttgcat

SEQ ID NO: 1488069 - DNA, 15 bp, Homo sapiens
gtctatacttttgca

SEQ ID NO: 1488070 - DNA, 15 bp, Homo sapiens
agtctatacttttgc

SEQ ID NO: 1488071 - DNA, 15 bp, Homo sapiens
aagtctatacttttg

SEQ ID NO: 1488072 - DNA, 15 bp, Homo sapiens
aaagtctatactttt

SEQ ID NO: 1488073 - DNA, 15 bp, Homo sapiens
aaaagtctatacttt

SEQ ID NO: 1488074 - DNA, 15 bp, Homo sapiens
taaaagtctatactt

SEQ ID NO: 1488075 - DNA, 15 bp, Homo sapiens
ataaaagtctatact

SEQ ID NO: 1488076 - DNA, 15 bp, Homo sapiens
cataaaagtctatac

SEQ ID NO: 1488077 - DNA, 15 bp, Homo sapiens
ccataaaagtctata

SEQ ID NO: 1488078 - DNA, 15 bp, Homo sapiens
accataaaagtctat

SEQ ID NO: 1488079 - DNA, 15 bp, Homo sapiens
taccataaaagtcta

SEQ ID NO: 1488080 - DNA, 15 bp, Homo sapiens
ctaccataaaagtct

SEQ ID NO: 1488081 - DNA, 15 bp, Homo sapiens
actaccataaaagtc

SEQ ID NO: 1488082 - DNA, 15 bp, Homo sapiens
aactaccataaaagt

SEQ ID NO: 1488083 - DNA, 15 bp, Homo sapiens
aaactaccataaaag

SEQ ID NO: 1488084 - DNA, 15 bp, Homo sapiens
gaaactaccataaaa

SEQ ID NO: 1488085 - DNA, 15 bp, Homo sapiens
agaaactaccataaa

SEQ ID NO: 1488086 - DNA, 15 bp, Homo sapiens
aagaaactaccataa

SEQ ID NO: 1488087 - DNA, 15 bp, Homo sapiens
taagaaactaccata

SEQ ID NO: 1488088 - DNA, 15 bp, Homo sapiens
ataagaaactaccat

SEQ ID NO: 1488089 - DNA, 15 bp, Homo sapiens
gataagaaactacca

SEQ ID NO: 1488090 - DNA, 15 bp, Homo sapiens
ggataagaaactacc

SEQ ID NO: 1488091 - DNA, 15 bp, Homo sapiens
aggataagaaactac

SEQ ID NO: 1488092 - DNA, 15 bp, Homo sapiens
aaggataagaaacta

SEQ ID NO: 1488093 - DNA, 15 bp, Homo sapiens
gaaggataagaaact

SEQ ID NO: 1488094 - DNA, 15 bp, Homo sapiens
ggaaggataagaaac

SEQ ID NO: 1488095 - DNA, 15 bp, Homo sapiens
gggaaggataagaaa

SEQ ID NO: 1488096 - DNA, 15 bp, Homo sapiens
agggaaggataagaa

SEQ ID NO: 1488097 - DNA, 15 bp, Homo sapiens
aagggaaggataaga

SEQ ID NO: 1488098 - DNA, 15 bp, Homo sapiens
aaagggaaggataag

SEQ ID NO: 1488099 - DNA, 15 bp, Homo sapiens
gaaagggaaggataa

SEQ ID NO: 1488100 - DNA, 15 bp, Homo sapiens
ggaaagggaaggata

SEQ ID NO: 1488101 - DNA, 15 bp, Homo sapiens
gggaaagggaaggat

SEQ ID NO: 1488102 - DNA, 15 bp, Homo sapiens
tgggaaagggaagga

SEQ ID NO: 1488103 - DNA, 15 bp, Homo sapiens
ctgggaaagggaagg

SEQ ID NO: 1488104 - DNA, 15 bp, Homo sapiens
tctgggaaagggaag

SEQ ID NO: 1488105 - DNA, 15 bp, Homo sapiens
atctgggaaagggaa

SEQ ID NO: 1488106 - DNA, 15 bp, Homo sapiens
aatctgggaaaggga

SEQ ID NO: 1488107 - DNA, 15 bp, Homo sapiens
aaatctgggaaaggg

SEQ ID NO: 1488108 - DNA, 15 bp, Homo sapiens
gaaatctgggaaagg

SEQ ID NO: 1488109 - DNA, 15 bp, Homo sapiens
agaaatctgggaaag

SEQ ID NO: 1488110 - DNA, 15 bp, Homo sapiens
cagaaatctgggaaa

SEQ ID NO: 1488111 - DNA, 15 bp, Homo sapiens
acagaaatctgggaa

SEQ ID NO: 1488112 - DNA, 15 bp, Homo sapiens
aacagaaatctggga

SEQ ID NO: 1488113 - DNA, 15 bp, Homo sapiens
gaacagaaatctggg

SEQ ID NO: 1488114 - DNA, 15 bp, Homo sapiens
agaacagaaatctgg

SEQ ID NO: 1488115 - DNA, 15 bp, Homo sapiens
aagaacagaaatctg

SEQ ID NO: 1488116 - DNA, 15 bp, Homo sapiens
aaagaacagaaatct

SEQ ID NO: 1488117 - DNA, 15 bp, Homo sapiens
caaagaacagaaatc

SEQ ID NO: 1488118 - DNA, 15 bp, Homo sapiens
ccaaagaacagaaat

SEQ ID NO: 1488119 - DNA, 15 bp, Homo sapiens
accaaagaacagaaa

SEQ ID NO: 1488120 - DNA, 15 bp, Homo sapiens
aaccaaagaacagaa

SEQ ID NO: 1488121 - DNA, 15 bp, Homo sapiens
ccaaccaaagaacag

SEQ ID NO: 1488122 - DNA, 15 bp, Homo sapiens
accaaccaaagaaca

SEQ ID NO: 1488123 - DNA, 15 bp, Homo sapiens
aaccaaccaaagaac

SEQ ID NO: 1488124 - DNA, 15 bp, Homo sapiens
taaccaaccaaagaa

SEQ ID NO: 1488125 - DNA, 15 bp, Homo sapiens
gtaaccaaccaaaga

SEQ ID NO: 1488126 - DNA, 15 bp, Homo sapiens
tgtaaccaaccaaag

SEQ ID NO: 1488127 - DNA, 15 bp, Homo sapiens
ttgtaaccaaccaaa

SEQ ID NO: 1488128 - DNA, 15 bp, Homo sapiens
tttgtaaccaaccaa

SEQ ID NO: 1488129 - DNA, 15 bp, Homo sapiens
ctttgtaaccaacca

SEQ ID NO: 1488130 - DNA, 15 bp, Homo sapiens
gctttgtaaccaacc

SEQ ID NO: 1488131 - DNA, 15 bp, Homo sapiens
ggctttgtaaccaac

SEQ ID NO: 1488132 - DNA, 15 bp, Homo sapiens
aggctttgtaaccaa

SEQ ID NO: 1488133 - DNA, 15 bp, Homo sapiens
gaggctttgtaacca

SEQ ID NO: 1488134 - DNA, 15 bp, Homo sapiens
agaggctttgtaacc

SEQ ID NO: 1488135 - DNA, 15 bp, Homo sapiens
aagaggctttgtaac

SEQ ID NO: 1488136 - DNA, 15 bp, Homo sapiens
taagaggctttgtaa

SEQ ID NO: 1488137 - DNA, 15 bp, Homo sapiens
ataagaggctttgta

SEQ ID NO: 1488138 - DNA, 15 bp, Homo sapiens
gataagaggctttgt

SEQ ID NO: 1488139 - DNA, 15 bp, Homo sapiens
agataagaggctttg

SEQ ID NO: 1488140 - DNA, 15 bp, Homo sapiens
gagataagaggcttt

SEQ ID NO: 1488141 - DNA, 15 bp, Homo sapiens
agagataagaggctt

SEQ ID NO: 1488142 - DNA, 15 bp, Homo sapiens
aagagataagaggct

SEQ ID NO: 1488143 - DNA, 15 bp, Homo sapiens
aaagagataagaggc

SEQ ID NO: 1488144 - DNA, 15 bp, Homo sapiens
aaaagagataagagg

SEQ ID NO: 1488145 - DNA, 15 bp, Homo sapiens
aaaaagagataagag

SEQ ID NO: 1488146 - DNA, 15 bp, Homo sapiens
caaaaagagataaga

SEQ ID NO: 1488147 - DNA, 15 bp, Homo sapiens
tcaaaaagagataag

SEQ ID NO: 1488148 - DNA, 15 bp, Homo sapiens
atcaaaaagagataa

SEQ ID NO: 1488149 - DNA, 15 bp, Homo sapiens
aatcaaaaagagata

SEQ ID NO: 1488150 - DNA, 15 bp, Homo sapiens
gaatcaaaaagagat

SEQ ID NO: 1488151 - DNA, 15 bp, Homo sapiens
tgaatcaaaaagaga

SEQ ID NO: 1488152 - DNA, 15 bp, Homo sapiens
ctgaatcaaaaagag

SEQ ID NO: 1488153 - DNA, 15 bp, Homo sapiens
actgaatcaaaaaga

SEQ ID NO: 1488154 - DNA, 15 bp, Homo sapiens
tactgaatcaaaaag

SEQ ID NO: 1488155 - DNA, 15 bp, Homo sapiens
ttactgaatcaaaaa

SEQ ID NO: 1488156 - DNA, 15 bp, Homo sapiens
tttactgaatcaaaa

SEQ ID NO: 1488157 - DNA, 15 bp, Homo sapiens
ctttactgaatcaaa

SEQ ID NO: 1488158 - DNA, 15 bp, Homo sapiens
actttactgaatcaa

SEQ ID NO: 1488159 - DNA, 15 bp, Homo sapiens
cactttactgaatca

SEQ ID NO: 1488160 - DNA, 15 bp, Homo sapiens
tcactttactgaatc

SEQ ID NO: 1488161 - DNA, 15 bp, Homo sapiens
atcactttactgaat

SEQ ID NO: 1488162 - DNA, 15 bp, Homo sapiens
catcactttactgaa

SEQ ID NO: 1488163 - DNA, 15 bp, Homo sapiens
ccatcactttactga

SEQ ID NO: 1488164 - DNA, 15 bp, Homo sapiens
cccatcactttactg

SEQ ID NO: 1488165 - DNA, 15 bp, Homo sapiens
acccatcactttact

SEQ ID NO: 1488166 - DNA, 15 bp, Homo sapiens
tacccatcactttac

SEQ ID NO: 1488167 - DNA, 15 bp, Homo sapiens
ttacccatcacttta

SEQ ID NO: 1488168 - DNA, 15 bp, Homo sapiens
attacccatcacttt

SEQ ID NO: 1488169 - DNA, 15 bp, Homo sapiens
tattacccatcactt

SEQ ID NO: 1488170 - DNA, 15 bp, Homo sapiens
ttattacccatcact

SEQ ID NO: 1488171 - DNA, 15 bp, Homo sapiens
attattacccatcac

SEQ ID NO: 1488172 - DNA, 15 bp, Homo sapiens
cattattacccatca

SEQ ID NO: 1488173 - DNA, 15 bp, Homo sapiens
gcattattacccatc

SEQ ID NO: 1488174 - DNA, 15 bp, Homo sapiens
cgcattattacccat

SEQ ID NO: 1488175 - DNA, 15 bp, Homo sapiens
tcgcattattaccca

SEQ ID NO: 1488176 - DNA, 15 bp, Homo sapiens
gtcgcattattaccc

SEQ ID NO: 1488177 - DNA, 15 bp, Homo sapiens
tgtcgcattattacc

SEQ ID NO: 1488178 - DNA, 15 bp, Homo sapiens
gtgtcgcattattac

SEQ ID NO: 1488179 - DNA, 15 bp, Homo sapiens
agtgtcgcattatta

SEQ ID NO: 1488180 - DNA, 15 bp, Homo sapiens
cagtgtcgcattatt

SEQ ID NO: 1488181 - DNA, 15 bp, Homo sapiens
ccagtgtcgcattat

SEQ ID NO: 1488182 - DNA, 15 bp, Homo sapiens
tccagtgtcgcatta

SEQ ID NO: 1488183 - DNA, 15 bp, Homo sapiens
ttccagtgtcgcatt

SEQ ID NO: 1488184 - DNA, 15 bp, Homo sapiens
gttccagtgtcgcat

SEQ ID NO: 1488185 - DNA, 15 bp, Homo sapiens
tgttccagtgtcgca

SEQ ID NO: 1488186 - DNA, 15 bp, Homo sapiens
ttgttccagtgtcgc

SEQ ID NO: 1488187 - DNA, 15 bp, Homo sapiens
tttgttccagtgtcg

SEQ ID NO: 1488188 - DNA, 15 bp, Homo sapiens
atttgttccagtgtc

SEQ ID NO: 1488189 - DNA, 15 bp, Homo sapiens
gatttgttccagtgt

SEQ ID NO: 1488190 - DNA, 15 bp, Homo sapiens
ggatttgttccagtg

SEQ ID NO: 1488191 - DNA, 15 bp, Homo sapiens
tggatttgttccagt

SEQ ID NO: 1488192 - DNA, 15 bp, Homo sapiens
atggatttgttccag

SEQ ID NO: 1488193 - DNA, 15 bp, Homo sapiens
gatggatttgttcca

SEQ ID NO: 1488194 - DNA, 15 bp, Homo sapiens
agatggatttgttcc

SEQ ID NO: 1488195 - DNA, 15 bp, Homo sapiens
gagatggatttgttc

SEQ ID NO: 1488196 - DNA, 15 bp, Homo sapiens
agagatggatttgtt

SEQ ID NO: 1488197 - DNA, 15 bp, Homo sapiens
aagagatggatttgt

SEQ ID NO: 1488198 - DNA, 15 bp, Homo sapiens
caagagatggatttg

SEQ ID NO: 1488199 - DNA, 15 bp, Homo sapiens
acaagagatggattt

SEQ ID NO: 1488200 - DNA, 15 bp, Homo sapiens
aacaagagatggatt

SEQ ID NO: 1488201 - DNA, 15 bp, Homo sapiens
caacaagagatggat

SEQ ID NO: 1488202 - DNA, 15 bp, Homo sapiens
ccaacaagagatgga

SEQ ID NO: 1488203 - DNA, 15 bp, Homo sapiens
tccaacaagagatgg

SEQ ID NO: 1488204 - DNA, 15 bp, Homo sapiens
ttccaacaagagatg

SEQ ID NO: 1488205 - DNA, 15 bp, Homo sapiens
tttccaacaagagat

SEQ ID NO: 1488206 - DNA, 15 bp, Homo sapiens
atttccaacaagaga

SEQ ID NO: 1488207 - DNA, 15 bp, Homo sapiens
catttccaacaagag

SEQ ID NO: 1488208 - DNA, 15 bp, Homo sapiens
ccatttccaacaaga

SEQ ID NO: 1488209 - DNA, 15 bp, Homo sapiens
cttccatttccaaca

SEQ ID NO: 1488210 - DNA, 15 bp, Homo sapiens
gcttccatttccaac

SEQ ID NO: 1488211 - DNA, 15 bp, Homo sapiens
agcttccatttccaa

SEQ ID NO: 1488212 - DNA, 15 bp, Homo sapiens
cagcttccatttcca

SEQ ID NO: 1488213 - DNA, 15 bp, Homo sapiens
ccagcttccatttcc

SEQ ID NO: 1488214 - DNA, 15 bp, Homo sapiens
cccagcttccatttc

SEQ ID NO: 1488215 - DNA, 15 bp, Homo sapiens
acccagcttccattt

SEQ ID NO: 1488216 - DNA, 15 bp, Homo sapiens
aacccagcttccatt

SEQ ID NO: 1488217 - DNA, 15 bp, Homo sapiens
caacccagcttccat

SEQ ID NO: 1488218 - DNA, 15 bp, Homo sapiens
ccaacccagcttcca

SEQ ID NO: 1488219 - DNA, 15 bp, Homo sapiens
cccaacccagcttcc

SEQ ID NO: 1488220 - DNA, 15 bp, Homo sapiens
tcccaacccagcttc

SEQ ID NO: 1488221 - DNA, 15 bp, Homo sapiens
gtcccaacccagctt

SEQ ID NO: 1488222 - DNA, 15 bp, Homo sapiens
agtcccaacccagct

SEQ ID NO: 1488223 - DNA, 15 bp, Homo sapiens
aagtcccaacccagc

SEQ ID NO: 1488224 - DNA, 15 bp, Homo sapiens
caagtcccaacccag

SEQ ID NO: 1488225 - DNA, 15 bp, Homo sapiens
acaagtcccaaccca

SEQ ID NO: 1488226 - DNA, 15 bp, Homo sapiens
cacaagtcccaaccc

SEQ ID NO: 1488227 - DNA, 15 bp, Homo sapiens
gcacaagtcccaacc

SEQ ID NO: 1488228 - DNA, 15 bp, Homo sapiens
agcacaagtcccaac

SEQ ID NO: 1488229 - DNA, 15 bp, Homo sapiens
cagcacaagtcccaa

SEQ ID NO: 1488230 - DNA, 15 bp, Homo sapiens
acagcacaagtccca

SEQ ID NO: 1488231 - DNA, 15 bp, Homo sapiens
cacagcacaagtccc

SEQ ID NO: 1488232 - DNA, 15 bp, Homo sapiens
acacagcacaagtcc

SEQ ID NO: 1488233 - DNA, 15 bp, Homo sapiens
gacacagcacaagtc

SEQ ID NO: 1488234 - DNA, 15 bp, Homo sapiens
tgacacagcacaagt

SEQ ID NO: 1488235 - DNA, 15 bp, Homo sapiens
gtgacacagcacaag

SEQ ID NO: 1488236 - DNA, 15 bp, Homo sapiens
ggtgacacagcacaa

SEQ ID NO: 1488237 - DNA, 15 bp, Homo sapiens
gggtgacacagcaca

SEQ ID NO: 1488238 - DNA, 15 bp, Homo sapiens
agggtgacacagcac

SEQ ID NO: 1488239 - DNA, 15 bp, Homo sapiens
gagggtgacacagca

SEQ ID NO: 1488240 - DNA, 15 bp, Homo sapiens
tgagggtgacacagc

SEQ ID NO: 1488241 - DNA, 15 bp, Homo sapiens
ttgagggtgacacag

SEQ ID NO: 1488242 - DNA, 15 bp, Homo sapiens
cttgagggtgacaca

SEQ ID NO: 1488243 - DNA, 15 bp, Homo sapiens
acttgagggtgacac

SEQ ID NO: 1488244 - DNA, 15 bp, Homo sapiens
tacttgagggtgaca

SEQ ID NO: 1488245 - DNA, 15 bp, Homo sapiens
atacttgagggtgac

SEQ ID NO: 1488246 - DNA, 15 bp, Homo sapiens
catacttgagggtga

SEQ ID NO: 1488247 - DNA, 15 bp, Homo sapiens
tcatacttgagggtg

SEQ ID NO: 1488248 - DNA, 15 bp, Homo sapiens
ttcatacttgagggt

SEQ ID NO: 1488249 - DNA, 15 bp, Homo sapiens
cttcatacttgaggg

SEQ ID NO: 1488250 - DNA, 15 bp, Homo sapiens
acttcatacttgagg

SEQ ID NO: 1488251 - DNA, 15 bp, Homo sapiens
cacttcatacttgag

SEQ ID NO: 1488252 - DNA, 15 bp, Homo sapiens
acacttcatacttga

SEQ ID NO: 1488253 - DNA, 15 bp, Homo sapiens
tacacttcatacttg

SEQ ID NO: 1488254 - DNA, 15 bp, Homo sapiens
ttacacttcatactt

SEQ ID NO: 1488255 - DNA, 15 bp, Homo sapiens
tttacacttcatact

SEQ ID NO: 1488256 - DNA, 15 bp, Homo sapiens
gtttacacttcatac

SEQ ID NO: 1488257 - DNA, 15 bp, Homo sapiens
agtttacacttcata

SEQ ID NO: 1488258 - DNA, 15 bp, Homo sapiens
gagtttacacttcat

SEQ ID NO: 1488259 - DNA, 15 bp, Homo sapiens
agagtttacacttca

SEQ ID NO: 1488260 - DNA, 15 bp, Homo sapiens
aagagtttacacttc

SEQ ID NO: 1488261 - DNA, 15 bp, Homo sapiens
aaagagtttacactt

SEQ ID NO: 1488262 - DNA, 15 bp, Homo sapiens
gaaagagtttacact

SEQ ID NO: 1488263 - DNA, 15 bp, Homo sapiens
agaaagagtttacac

SEQ ID NO: 1488264 - DNA, 15 bp, Homo sapiens
aagaaagagtttaca

SEQ ID NO: 1488265 - DNA, 15 bp, Homo sapiens
caagaaagagtttac

SEQ ID NO: 1488266 - DNA, 15 bp, Homo sapiens
ccaagaaagagttta

SEQ ID NO: 1488267 - DNA, 15 bp, Homo sapiens
cccaagaaagagttt

SEQ ID NO: 1488268 - DNA, 15 bp, Homo sapiens
gcccaagaaagagtt

SEQ ID NO: 1488269 - DNA, 15 bp, Homo sapiens
ggcccaagaaagagt

SEQ ID NO: 1488270 - DNA, 15 bp, Homo sapiens
tggcccaagaaagag

SEQ ID NO: 1488271 - DNA, 15 bp, Homo sapiens
gtggcccaagaaaga

SEQ ID NO: 1488272 - DNA, 15 bp, Homo sapiens
ggtggcccaagaaag

SEQ ID NO: 1488273 - DNA, 15 bp, Homo sapiens
tggtggcccaagaaa

SEQ ID NO: 1488274 - DNA, 15 bp, Homo sapiens
ttggtggcccaagaa

SEQ ID NO: 1488275 - DNA, 15 bp, Homo sapiens
tttggtggcccaaga

SEQ ID NO: 1488276 - DNA, 15 bp, Homo sapiens
actttggtggcccaa

SEQ ID NO: 1488277 - DNA, 15 bp, Homo sapiens
tactttggtggccca

SEQ ID NO: 1488278 - DNA, 15 bp, Homo sapiens
ttactttggtggccc

SEQ ID NO: 1488279 - DNA, 15 bp, Homo sapiens
gttactttggtggcc

SEQ ID NO: 1488280 - DNA, 15 bp, Homo sapiens
agttactttggtggc

SEQ ID NO: 1488281 - DNA, 15 bp, Homo sapiens
tagttactttggtgg

SEQ ID NO: 1488282 - DNA, 15 bp, Homo sapiens
ttagttactttggtg

SEQ ID NO: 1488283 - DNA, 15 bp, Homo sapiens
tttagttactttggt

SEQ ID NO: 1488284 - DNA, 15 bp, Homo sapiens
gtttagttactttgg

SEQ ID NO: 1488285 - DNA, 15 bp, Homo sapiens
tgtttagttactttg

SEQ ID NO: 1488286 - DNA, 15 bp, Homo sapiens
ttgtttagttacttt

SEQ ID NO: 1488287 - DNA, 15 bp, Homo sapiens
cttgtttagttactt

SEQ ID NO: 1488288 - DNA, 15 bp, Homo sapiens
tcttgtttagttact

SEQ ID NO: 1488289 - DNA, 15 bp, Homo sapiens
ttcttgtttagttac

SEQ ID NO: 1488290 - DNA, 15 bp, Homo sapiens
tttcttgtttagtta

SEQ ID NO: 1488291 - DNA, 15 bp, Homo sapiens
atttcttgtttagtt

SEQ ID NO: 1488292 - DNA, 15 bp, Homo sapiens
catttcttgtttagt

SEQ ID NO: 1488293 - DNA, 15 bp, Homo sapiens
gcatttcttgtttag

SEQ ID NO: 1488294 - DNA, 15 bp, Homo sapiens
tgcatttcttgttta

SEQ ID NO: 1488295 - DNA, 15 bp, Homo sapiens
ttgcatttcttgttt

SEQ ID NO: 1488296 - DNA, 15 bp, Homo sapiens
gttgcatttcttgtt

SEQ ID NO: 1488297 - DNA, 15 bp, Homo sapiens
tgttgcatttcttgt

SEQ ID NO: 1488298 - DNA, 15 bp, Homo sapiens
atgttgcatttcttg

SEQ ID NO: 1488299 - DNA, 15 bp, Homo sapiens
aatgttgcatttctt

SEQ ID NO: 1488300 - DNA, 15 bp, Homo sapiens
gaatgttgcatttct

SEQ ID NO: 1488301 - DNA, 15 bp, Homo sapiens
agaatgttgcatttc

SEQ ID NO: 1488302 - DNA, 15 bp, Homo sapiens
gagaatgttgcattt

SEQ ID NO: 1488303 - DNA, 15 bp, Homo sapiens
ggagaatgttgcatt

SEQ ID NO: 1488304 - DNA, 15 bp, Homo sapiens
gggagaatgttgcat

SEQ ID NO: 1488305 - DNA, 15 bp, Homo sapiens
tgggagaatgttgca

SEQ ID NO: 1488306 - DNA, 15 bp, Homo sapiens
atgggagaatgttgc

SEQ ID NO: 1488307 - DNA, 15 bp, Homo sapiens
catgggagaatgttg

SEQ ID NO: 1488308 - DNA, 15 bp, Homo sapiens
tcatgggagaatgtt

SEQ ID NO: 1488309 - DNA, 15 bp, Homo sapiens
ttcatgggagaatgt

SEQ ID NO: 1488310 - DNA, 15 bp, Homo sapiens
attcatgggagaatg

SEQ ID NO: 1488311 - DNA, 15 bp, Homo sapiens
tattcatgggagaat

SEQ ID NO: 1488312 - DNA, 15 bp, Homo sapiens
gtattcatgggagaa

SEQ ID NO: 1488313 - DNA, 15 bp, Homo sapiens
tgtattcatgggaga

SEQ ID NO: 1488314 - DNA, 15 bp, Homo sapiens
atgtattcatgggag

SEQ ID NO: 1488315 - DNA, 15 bp, Homo sapiens
aatgtattcatggga

SEQ ID NO: 1488316 - DNA, 15 bp, Homo sapiens
taatgtattcatggg

SEQ ID NO: 1488317 - DNA, 15 bp, Homo sapiens
ctaatgtattcatgg

SEQ ID NO: 1488318 - DNA, 15 bp, Homo sapiens
tctaatgtattcatg

SEQ ID NO: 1488319 - DNA, 15 bp, Homo sapiens
ctctaatgtattcat

SEQ ID NO: 1488320 - DNA, 15 bp, Homo sapiens
actctaatgtattca

SEQ ID NO: 1488321 - DNA, 15 bp, Homo sapiens
aactctaatgtattc

SEQ ID NO: 1488322 - DNA, 15 bp, Homo sapiens
taactctaatgtatt

SEQ ID NO: 1488323 - DNA, 15 bp, Homo sapiens
ttaactctaatgtat

SEQ ID NO: 1488324 - DNA, 15 bp, Homo sapiens
attaactctaatgta

SEQ ID NO: 1488325 - DNA, 15 bp, Homo sapiens
tattaactctaatgt

SEQ ID NO: 1488326 - DNA, 15 bp, Homo sapiens
gtattaactctaatg

SEQ ID NO: 1488327 - DNA, 15 bp, Homo sapiens
agtattaactctaat

SEQ ID NO: 1488328 - DNA, 15 bp, Homo sapiens
cagtattaactctaa

SEQ ID NO: 1488329 - DNA, 15 bp, Homo sapiens
acagtattaactcta

SEQ ID NO: 1488330 - DNA, 15 bp, Homo sapiens
cacagtattaactct

SEQ ID NO: 1488331 - DNA, 15 bp, Homo sapiens
ccacagtattaactc

SEQ ID NO: 1488332 - DNA, 15 bp, Homo sapiens
gccacagtattaact

SEQ ID NO: 1488333 - DNA, 15 bp, Homo sapiens
ggccacagtattaac

SEQ ID NO: 1488334 - DNA, 15 bp, Homo sapiens
tggccacagtattaa

SEQ ID NO: 1488335 - DNA, 15 bp, Homo sapiens
gtggccacagtatta

SEQ ID NO: 1488336 - DNA, 15 bp, Homo sapiens
tgtggccacagtatt

SEQ ID NO: 1488337 - DNA, 15 bp, Homo sapiens
atgtggccacagtat

SEQ ID NO: 1488338 - DNA, 15 bp, Homo sapiens
aatgtggccacagta

SEQ ID NO: 1488339 - DNA, 15 bp, Homo sapiens
aaatgtggccacagt

SEQ ID NO: 1488340 - DNA, 15 bp, Homo sapiens
caaatgtggccacag

SEQ ID NO: 1488341 - DNA, 15 bp, Homo sapiens
ccaaatgtggccaca

SEQ ID NO: 1488342 - DNA, 15 bp, Homo sapiens
tccaaatgtggccac

SEQ ID NO: 1488343 - DNA, 15 bp, Homo sapiens
ttccaaatgtggcca

SEQ ID NO: 1488344 - DNA, 15 bp, Homo sapiens
tttccaaatgtggcc

SEQ ID NO: 1488345 - DNA, 15 bp, Homo sapiens
ttttccaaatgtggc

SEQ ID NO: 1488346 - DNA, 15 bp, Homo sapiens
attttccaaatgtgg

SEQ ID NO: 1488347 - DNA, 15 bp, Homo sapiens
aattttccaaatgtg

SEQ ID NO: 1488348 - DNA, 15 bp, Homo sapiens
taattttccaaatgt

SEQ ID NO: 1488349 - DNA, 15 bp, Homo sapiens
ctaattttccaaatg

SEQ ID NO: 1488350 - DNA, 15 bp, Homo sapiens
gctaattttccaaat

SEQ ID NO: 1488351 - DNA, 15 bp, Homo sapiens
tgctaattttccaaa

SEQ ID NO: 1488352 - DNA, 15 bp, Homo sapiens
atgctaattttccaa

SEQ ID NO: 1488353 - DNA, 15 bp, Homo sapiens
tatgctaattttcca

SEQ ID NO: 1488354 - DNA, 15 bp, Homo sapiens
ctatgctaattttcc

SEQ ID NO: 1488355 - DNA, 15 bp, Homo sapiens
gctatgctaattttc

SEQ ID NO: 1488356 - DNA, 15 bp, Homo sapiens
agctatgctaatttt

SEQ ID NO: 1488357 - DNA, 15 bp, Homo sapiens
gagctatgctaattt

SEQ ID NO: 1488358 - DNA, 15 bp, Homo sapiens
cgagctatgctaatt

SEQ ID NO: 1488359 - DNA, 15 bp, Homo sapiens
acgagctatgctaat

SEQ ID NO: 1488360 - DNA, 15 bp, Homo sapiens
tacgagctatgctaa

SEQ ID NO: 1488361 - DNA, 15 bp, Homo sapiens
ttacgagctatgcta

SEQ ID NO: 1488362 - DNA, 15 bp, Homo sapiens
tttacgagctatgct

SEQ ID NO: 1488363 - DNA, 15 bp, Homo sapiens
ttttacgagctatgc

SEQ ID NO: 1488364 - DNA, 15 bp, Homo sapiens
cttttacgagctatg

SEQ ID NO: 1488365 - DNA, 15 bp, Homo sapiens
gcttttacgagctat

SEQ ID NO: 1488366 - DNA, 15 bp, Homo sapiens
ggcttttacgagcta

SEQ ID NO: 1488367 - DNA, 15 bp, Homo sapiens
tggcttttacgagct

SEQ ID NO: 1488368 - DNA, 15 bp, Homo sapiens
ttggcttttacgagc

SEQ ID NO: 1488369 - DNA, 15 bp, Homo sapiens
tttggcttttacgag

SEQ ID NO: 1488370 - DNA, 15 bp, Homo sapiens
atttggcttttacga

SEQ ID NO: 1488371 - DNA, 15 bp, Homo sapiens
catttggcttttacg

SEQ ID NO: 1488372 - DNA, 15 bp, Homo sapiens
gcatttggcttttac

SEQ ID NO: 1488373 - DNA, 15 bp, Homo sapiens
tgcatttggctttta

SEQ ID NO: 1488374 - DNA, 15 bp, Homo sapiens
ctgcatttggctttt

SEQ ID NO: 1488375 - DNA, 15 bp, Homo sapiens
tctgcatttggcttt

SEQ ID NO: 1488376 - DNA, 15 bp, Homo sapiens
ttctgcatttggctt

SEQ ID NO: 1488377 - DNA, 15 bp, Homo sapiens
tttctgcatttggct

SEQ ID NO: 1488378 - DNA, 15 bp, Homo sapiens
ttttctgcatttggc

SEQ ID NO: 1488379 - DNA, 15 bp, Homo sapiens
attttctgcatttgg

SEQ ID NO: 1488380 - DNA, 15 bp, Homo sapiens
aattttctgcatttg

SEQ ID NO: 1488381 - DNA, 15 bp, Homo sapiens
taattttctgcattt

SEQ ID NO: 1488382 - DNA, 15 bp, Homo sapiens
ttaattttctgcatt

SEQ ID NO: 1488383 - DNA, 15 bp, Homo sapiens
attaattttctgcat

SEQ ID NO: 1488384 - DNA, 15 bp, Homo sapiens
aattaattttctgca

SEQ ID NO: 1488385 - DNA, 15 bp, Homo sapiens
caattaattttctgc

SEQ ID NO: 1488386 - DNA, 15 bp, Homo sapiens
acaattaattttctg

SEQ ID NO: 1488387 - DNA, 15 bp, Homo sapiens
aacaattaattttct

SEQ ID NO: 1488388 - DNA, 15 bp, Homo sapiens
taacaattaattttc

SEQ ID NO: 1488389 - DNA, 15 bp, Homo sapiens
ttaacaattaatttt

SEQ ID NO: 1488390 - DNA, 15 bp, Homo sapiens
cttaacaattaattt

SEQ ID NO: 1488391 - DNA, 15 bp, Homo sapiens
acttaacaattaatt

SEQ ID NO: 1488392 - DNA, 15 bp, Homo sapiens
tacttaacaattaat

SEQ ID NO: 1488393 - DNA, 15 bp, Homo sapiens
atacttaacaattaa

SEQ ID NO: 1488394 - DNA, 15 bp, Homo sapiens
aatacttaacaatta

SEQ ID NO: 1488395 - DNA, 15 bp, Homo sapiens
gaatacttaacaatt

SEQ ID NO: 1488396 - DNA, 15 bp, Homo sapiens
agaatacttaacaat

SEQ ID NO: 1488397 - DNA, 15 bp, Homo sapiens
tagaatacttaacaa

SEQ ID NO: 1488398 - DNA, 15 bp, Homo sapiens
atagaatacttaaca

SEQ ID NO: 1488399 - DNA, 15 bp, Homo sapiens
gatagaatacttaac

SEQ ID NO: 1488400 - DNA, 15 bp, Homo sapiens
tgatagaatacttaa

SEQ ID NO: 1488401 - DNA, 15 bp, Homo sapiens
gtgatagaatactta

SEQ ID NO: 1488402 - DNA, 15 bp, Homo sapiens
ggtgatagaatactt

SEQ ID NO: 1488403 - DNA, 15 bp, Homo sapiens
tggtgatagaatact

SEQ ID NO: 1488404 - DNA, 15 bp, Homo sapiens
gtggtgatagaatac

SEQ ID NO: 1488405 - DNA, 15 bp, Homo sapiens
tgtggtgatagaata

SEQ ID NO: 1488406 - DNA, 15 bp, Homo sapiens
ctgtggtgatagaat

SEQ ID NO: 1488407 - DNA, 15 bp, Homo sapiens
gctgtggtgatagaa

SEQ ID NO: 1488408 - DNA, 15 bp, Homo sapiens
agctgtggtgataga

SEQ ID NO: 1488409 - DNA, 15 bp, Homo sapiens
gagctgtggtgatag

SEQ ID NO: 1488410 - DNA, 15 bp, Homo sapiens
agagctgtggtgata

SEQ ID NO: 1488411 - DNA, 15 bp, Homo sapiens
tagagctgtggtgat

SEQ ID NO: 1488412 - DNA, 15 bp, Homo sapiens
atagagctgtggtga

SEQ ID NO: 1488413 - DNA, 15 bp, Homo sapiens
gatagagctgtggtg

SEQ ID NO: 1488414 - DNA, 15 bp, Homo sapiens
ggatagagctgtggt

SEQ ID NO: 1488415 - DNA, 15 bp, Homo sapiens
aggatagagctgtgg

SEQ ID NO: 1488416 - DNA, 15 bp, Homo sapiens
gaggatagagctgtg

SEQ ID NO: 1488417 - DNA, 15 bp, Homo sapiens
ggaggatagagctgt

SEQ ID NO: 1488418 - DNA, 15 bp, Homo sapiens
aggaggatagagctg

SEQ ID NO: 1488419 - DNA, 15 bp, Homo sapiens
gaggaggatagagct

SEQ ID NO: 1488420 - DNA, 15 bp, Homo sapiens
ggaggaggatagagc

SEQ ID NO: 1488421 - DNA, 15 bp, Homo sapiens
cggaggaggatagag

SEQ ID NO: 1488422 - DNA, 15 bp, Homo sapiens
gcggaggaggataga

SEQ ID NO: 1488423 - DNA, 15 bp, Homo sapiens
ggcggaggaggatag

SEQ ID NO: 1488424 - DNA, 15 bp, Homo sapiens
gggcggaggaggata

SEQ ID NO: 1488425 - DNA, 15 bp, Homo sapiens
tgggcggaggaggat

SEQ ID NO: 1488426 - DNA, 15 bp, Homo sapiens
gtgggcggaggagga

SEQ ID NO: 1488427 - DNA, 15 bp, Homo sapiens
ggtgggcggaggagg

SEQ ID NO: 1488428 - DNA, 15 bp, Homo sapiens
gggtgggcggaggag

SEQ ID NO: 1488429 - DNA, 15 bp, Homo sapiens
tgggtgggcggagga

SEQ ID NO: 1488430 - DNA, 15 bp, Homo sapiens
gtgggtgggcggagg

SEQ ID NO: 1488431 - DNA, 15 bp, Homo sapiens
ggtgggtgggcggag

SEQ ID NO: 1488432 - DNA, 15 bp, Homo sapiens
gggtgggtgggcgga

SEQ ID NO: 1488433 - DNA, 15 bp, Homo sapiens
agggtgggtgggcgg

SEQ ID NO: 1488434 - DNA, 15 bp, Homo sapiens
aagggtgggtgggcg

SEQ ID NO: 1488435 - DNA, 15 bp, Homo sapiens
caagggtgggtgggc

SEQ ID NO: 1488436 - DNA, 15 bp, Homo sapiens
tcaagggtgggtggg

SEQ ID NO: 1488437 - DNA, 15 bp, Homo sapiens
ctcaagggtgggtgg

SEQ ID NO: 1488438 - DNA, 15 bp, Homo sapiens
cctcaagggtgggtg

SEQ ID NO: 1488439 - DNA, 15 bp, Homo sapiens
tcctcaagggtgggt

SEQ ID NO: 1488440 - DNA, 15 bp, Homo sapiens
ttcctcaagggtggg

SEQ ID NO: 1488441 - DNA, 15 bp, Homo sapiens
cttcctcaagggtgg

SEQ ID NO: 1488442 - DNA, 15 bp, Homo sapiens
tcttcctcaagggtg

SEQ ID NO: 1488443 - DNA, 15 bp, Homo sapiens
gtcttcctcaagggt

SEQ ID NO: 1488444 - DNA, 15 bp, Homo sapiens
tgtcttcctcaaggg

SEQ ID NO: 1488445 - DNA, 15 bp, Homo sapiens
ttgtcttcctcaagg

SEQ ID NO: 1488446 - DNA, 15 bp, Homo sapiens
cttgtcttcctcaag

SEQ ID NO: 1488447 - DNA, 15 bp, Homo sapiens
gcttgtcttcctcaa

SEQ ID NO: 1488448 - DNA, 15 bp, Homo sapiens
ggcttgtcttcctca

SEQ ID NO: 1488449 - DNA, 15 bp, Homo sapiens
gggcttgtcttcctc

SEQ ID NO: 1488450 - DNA, 15 bp, Homo sapiens
tgggcttgtcttcct

SEQ ID NO: 1488451 - DNA, 15 bp, Homo sapiens
ttgggcttgtcttcc

SEQ ID NO: 1488452 - DNA, 15 bp, Homo sapiens
tttgggcttgtcttc

SEQ ID NO: 1488453 - DNA, 15 bp, Homo sapiens
ctttgggcttgtctt

SEQ ID NO: 1488454 - DNA, 15 bp, Homo sapiens
actttgggcttgtct

SEQ ID NO: 1488455 - DNA, 15 bp, Homo sapiens
aactttgggcttgtc

SEQ ID NO: 1488456 - DNA, 15 bp, Homo sapiens
taactttgggcttgt

SEQ ID NO: 1488457 - DNA, 15 bp, Homo sapiens
ctaactttgggcttg

SEQ ID NO: 1488458 - DNA, 15 bp, Homo sapiens
actaactttgggctt

SEQ ID NO: 1488459 - DNA, 15 bp, Homo sapiens
aactaactttgggct

SEQ ID NO: 1488460 - DNA, 15 bp, Homo sapiens
caactaactttgggc

SEQ ID NO: 1488461 - DNA, 15 bp, Homo sapiens
tcaactaactttggg

SEQ ID NO: 1488462 - DNA, 15 bp, Homo sapiens
atcaactaactttgg

SEQ ID NO: 1488463 - DNA, 15 bp, Homo sapiens
catcaactaactttg

SEQ ID NO: 1488464 - DNA, 15 bp, Homo sapiens
gcatcaactaacttt

SEQ ID NO: 1488465 - DNA, 15 bp, Homo sapiens
agcatcaactaactt

SEQ ID NO: 1488466 - DNA, 15 bp, Homo sapiens
tagcatcaactaact

SEQ ID NO: 1488467 - DNA, 15 bp, Homo sapiens
atagcatcaactaac

SEQ ID NO: 1488468 - DNA, 15 bp, Homo sapiens
catagcatcaactaa

SEQ ID NO: 1488469 - DNA, 15 bp, Homo sapiens
ccatagcatcaacta

SEQ ID NO: 1488470 - DNA, 15 bp, Homo sapiens
tccatagcatcaact

SEQ ID NO: 1488471 - DNA, 15 bp, Homo sapiens
ttccatagcatcaac

SEQ ID NO: 1488472 - DNA, 15 bp, Homo sapiens
attccatagcatcaa

SEQ ID NO: 1488473 - DNA, 15 bp, Homo sapiens
gattccatagcatca

SEQ ID NO: 1488474 - DNA, 15 bp, Homo sapiens
tgattccatagcatc

SEQ ID NO: 1488475 - DNA, 15 bp, Homo sapiens
gtgattccatagcat

SEQ ID NO: 1488476 - DNA, 15 bp, Homo sapiens
tgtgattccatagca

SEQ ID NO: 1488477 - DNA, 15 bp, Homo sapiens
ttgtgattccatagc

SEQ ID NO: 1488478 - DNA, 15 bp, Homo sapiens
cttgtgattccatag

SEQ ID NO: 1488479 - DNA, 15 bp, Homo sapiens
ccttgtgattccata

SEQ ID NO: 1488480 - DNA, 15 bp, Homo sapiens
tccttgtgattccat

SEQ ID NO: 1488481 - DNA, 15 bp, Homo sapiens
atccttgtgattcca

SEQ ID NO: 1488482 - DNA, 15 bp, Homo sapiens
catccttgtgattcc

SEQ ID NO: 1488483 - DNA, 15 bp, Homo sapiens
acatccttgtgattc

SEQ ID NO: 1488484 - DNA, 15 bp, Homo sapiens
gacatccttgtgatt

SEQ ID NO: 1488485 - DNA, 15 bp, Homo sapiens
ggacatccttgtgat

SEQ ID NO: 1488486 - DNA, 15 bp, Homo sapiens
gggacatccttgtga

SEQ ID NO: 1488487 - DNA, 15 bp, Homo sapiens
tgggacatccttgtg

SEQ ID NO: 1488488 - DNA, 15 bp, Homo sapiens
ctgggacatccttgt

SEQ ID NO: 1488489 - DNA, 15 bp, Homo sapiens
actgggacatccttg

SEQ ID NO: 1488490 - DNA, 15 bp, Homo sapiens
ggactgggacatcct

SEQ ID NO: 1488491 - DNA, 15 bp, Homo sapiens
cggactgggacatcc

SEQ ID NO: 1488492 - DNA, 15 bp, Homo sapiens
acggactgggacatc

SEQ ID NO: 1488493 - DNA, 15 bp, Homo sapiens
cacggactgggacat

SEQ ID NO: 1488494 - DNA, 15 bp, Homo sapiens
tcacggactgggaca

SEQ ID NO: 1488495 - DNA, 15 bp, Homo sapiens
atcacggactgggac

SEQ ID NO: 1488496 - DNA, 15 bp, Homo sapiens
aatcacggactggga

SEQ ID NO: 1488497 - DNA, 15 bp, Homo sapiens
aaatcacggactggg

SEQ ID NO: 1488498 - DNA, 15 bp, Homo sapiens
caaatcacggactgg

SEQ ID NO: 1488499 - DNA, 15 bp, Homo sapiens
gcaaatcacggactg

SEQ ID NO: 1488500 - DNA, 15 bp, Homo sapiens
agcaaatcacggact

SEQ ID NO: 1488501 - DNA, 15 bp, Homo sapiens
cagcaaatcacggac

SEQ ID NO: 1488502 - DNA, 15 bp, Homo sapiens
acagcaaatcacgga

SEQ ID NO: 1488503 - DNA, 15 bp, Homo sapiens
tacagcaaatcacgg

SEQ ID NO: 1488504 - DNA, 15 bp, Homo sapiens
ttacagcaaatcacg

SEQ ID NO: 1488505 - DNA, 15 bp, Homo sapiens
attacagcaaatcac

SEQ ID NO: 1488506 - DNA, 15 bp, Homo sapiens
aattacagcaaatca

SEQ ID NO: 1488507 - DNA, 15 bp, Homo sapiens
caattacagcaaatc

SEQ ID NO: 1488508 - DNA, 15 bp, Homo sapiens
tcaattacagcaaat

SEQ ID NO: 1488509 - DNA, 15 bp, Homo sapiens
ttcaattacagcaaa

SEQ ID NO: 1488510 - DNA, 15 bp, Homo sapiens
attcaattacagcaa

SEQ ID NO: 1488511 - DNA, 15 bp, Homo sapiens
gattcaattacagca

SEQ ID NO: 1488512 - DNA, 15 bp, Homo sapiens
ggattcaattacagc

SEQ ID NO: 1488513 - DNA, 15 bp, Homo sapiens
tggattcaattacag

SEQ ID NO: 1488514 - DNA, 15 bp, Homo sapiens
atggattcaattaca

SEQ ID NO: 1488515 - DNA, 15 bp, Homo sapiens
aatggattcaattac

SEQ ID NO: 1488516 - DNA, 15 bp, Homo sapiens
aaatggattcaatta

SEQ ID NO: 1488517 - DNA, 15 bp, Homo sapiens
aaaatggattcaatt

SEQ ID NO: 1488518 - DNA, 15 bp, Homo sapiens
taaaatggattcaat

SEQ ID NO: 1488519 - DNA, 15 bp, Homo sapiens
ttaaaatggattcaa

SEQ ID NO: 1488520 - DNA, 15 bp, Homo sapiens
tttaaaatggattca

SEQ ID NO: 1488521 - DNA, 15 bp, Homo sapiens
atttaaaatggattc

SEQ ID NO: 1488522 - DNA, 15 bp, Homo sapiens
catttaaaatggatt

SEQ ID NO: 1488523 - DNA, 15 bp, Homo sapiens
acatttaaaatggat

SEQ ID NO: 1488524 - DNA, 15 bp, Homo sapiens
cacatttaaaatgga

SEQ ID NO: 1488525 - DNA, 15 bp, Homo sapiens
ccacatttaaaatgg

SEQ ID NO: 1488526 - DNA, 15 bp, Homo sapiens
tccacatttaaaatg

SEQ ID NO: 1488527 - DNA, 15 bp, Homo sapiens
ctccacatttaaaat

SEQ ID NO: 1488528 - DNA, 15 bp, Homo sapiens
actccacatttaaaa

SEQ ID NO: 1488529 - DNA, 15 bp, Homo sapiens
gactccacatttaaa

SEQ ID NO: 1488530 - DNA, 15 bp, Homo sapiens
agactccacatttaa

SEQ ID NO: 1488531 - DNA, 15 bp, Homo sapiens
cagactccacattta

SEQ ID NO: 1488532 - DNA, 15 bp, Homo sapiens
ccagactccacattt

SEQ ID NO: 1488533 - DNA, 15 bp, Homo sapiens
tccagactccacatt

SEQ ID NO: 1488534 - DNA, 15 bp, Homo sapiens
atccagactccacat

SEQ ID NO: 1488535 - DNA, 15 bp, Homo sapiens
catccagactccaca

SEQ ID NO: 1488536 - DNA, 15 bp, Homo sapiens
gcatccagactccac

SEQ ID NO: 1488537 - DNA, 15 bp, Homo sapiens
agcatccagactcca

SEQ ID NO: 1488538 - DNA, 15 bp, Homo sapiens
cagcatccagactcc

SEQ ID NO: 1488539 - DNA, 15 bp, Homo sapiens
acagcatccagactc

SEQ ID NO: 1488540 - DNA, 15 bp, Homo sapiens
aacagcatccagact

SEQ ID NO: 1488541 - DNA, 15 bp, Homo sapiens
caacagcatccagac

SEQ ID NO: 1488542 - DNA, 15 bp, Homo sapiens
ccaacagcatccaga

SEQ ID NO: 1488543 - DNA, 15 bp, Homo sapiens
gccaacagcatccag

SEQ ID NO: 1488544 - DNA, 15 bp, Homo sapiens
tgccaacagcatcca

SEQ ID NO: 1488545 - DNA, 15 bp, Homo sapiens
atgccaacagcatcc

SEQ ID NO: 1488546 - DNA, 15 bp, Homo sapiens
tatgccaacagcatc

SEQ ID NO: 1488547 - DNA, 15 bp, Homo sapiens
gtatgccaacagcat

SEQ ID NO: 1488548 - DNA, 15 bp, Homo sapiens
ggtatgccaacagca

SEQ ID NO: 1488549 - DNA, 15 bp, Homo sapiens
aggtatgccaacagc

SEQ ID NO: 1488550 - DNA, 15 bp, Homo sapiens
aaggtatgccaacag

SEQ ID NO: 1488551 - DNA, 15 bp, Homo sapiens
aaaggtatgccaaca

SEQ ID NO: 1488552 - DNA, 15 bp, Homo sapiens
taaaggtatgccaac

SEQ ID NO: 1488553 - DNA, 15 bp, Homo sapiens
ataaaggtatgccaa

SEQ ID NO: 1488554 - DNA, 15 bp, Homo sapiens
aataaaggtatgcca

SEQ ID NO: 1488555 - DNA, 15 bp, Homo sapiens
aaataaaggtatgcc

SEQ ID NO: 1488556 - DNA, 15 bp, Homo sapiens
aaaataaaggtatgc

SEQ ID NO: 1488557 - DNA, 15 bp, Homo sapiens
caaaataaaggtatg

SEQ ID NO: 1488558 - DNA, 15 bp, Homo sapiens
gcaaaataaaggtat

SEQ ID NO: 1488559 - DNA, 15 bp, Homo sapiens
agcaaaataaaggta

SEQ ID NO: 1488560 - DNA, 15 bp, Homo sapiens
aagcaaaataaaggt

SEQ ID NO: 1488561 - DNA, 15 bp, Homo sapiens
caagcaaaataaagg

SEQ ID NO: 1488562 - DNA, 15 bp, Homo sapiens
acaagcaaaataaag

SEQ ID NO: 1488563 - DNA, 15 bp, Homo sapiens
aacaagcaaaataaa

SEQ ID NO: 1488564 - DNA, 15 bp, Homo sapiens
aaacaagcaaaataa

SEQ ID NO: 1488565 - DNA, 15 bp, Homo sapiens
aaaacaagcaaaata

SEQ ID NO: 1488566 - DNA, 15 bp, Homo sapiens
aaaaacaagcaaaat

SEQ ID NO: 1488567 - DNA, 15 bp, Homo sapiens
gaaaaacaagcaaaa

SEQ ID NO: 1488568 - DNA, 15 bp, Homo sapiens
ggaaaaacaagcaaa

SEQ ID NO: 1488569 - DNA, 15 bp, Homo sapiens
gggaaaaacaagcaa

SEQ ID NO: 1488570 - DNA, 15 bp, Homo sapiens
ggggaaaaacaagca

SEQ ID NO: 1488571 - DNA, 15 bp, Homo sapiens
gggggaaaaacaagc

SEQ ID NO: 1488572 - DNA, 15 bp, Homo sapiens
agggggaaaaacaag

SEQ ID NO: 1488573 - DNA, 15 bp, Homo sapiens
cagggggaaaaacaa

SEQ ID NO: 1488574 - DNA, 15 bp, Homo sapiens
tcagggggaaaaaca

SEQ ID NO: 1488575 - DNA, 15 bp, Homo sapiens
gtcagggggaaaaac

SEQ ID NO: 1488576 - DNA, 15 bp, Homo sapiens
tgtcagggggaaaaa

SEQ ID NO: 1488577 - DNA, 15 bp, Homo sapiens
ttgtcagggggaaaa

SEQ ID NO: 1488578 - DNA, 15 bp, Homo sapiens
tttgtcagggggaaa

SEQ ID NO: 1488579 - DNA, 15 bp, Homo sapiens
gtttgtcagggggaa

SEQ ID NO: 1488580 - DNA, 15 bp, Homo sapiens
tgtttgtcaggggga

SEQ ID NO: 1488581 - DNA, 15 bp, Homo sapiens
ttgtttgtcaggggg

SEQ ID NO: 1488582 - DNA, 15 bp, Homo sapiens
tttgtttgtcagggg

SEQ ID NO: 1488583 - DNA, 15 bp, Homo sapiens
atttgtttgtcaggg

SEQ ID NO: 1488584 - DNA, 15 bp, Homo sapiens
gatttgtttgtcagg

SEQ ID NO: 1488585 - DNA, 15 bp, Homo sapiens
tgatttgtttgtcag

SEQ ID NO: 1488586 - DNA, 15 bp, Homo sapiens
atgatttgtttgtca

SEQ ID NO: 1488587 - DNA, 15 bp, Homo sapiens
aatgatttgtttgtc

SEQ ID NO: 1488588 - DNA, 15 bp, Homo sapiens
aaatgatttgtttgt

SEQ ID NO: 1488589 - DNA, 15 bp, Homo sapiens
taaatgatttgtttg

SEQ ID NO: 1488590 - DNA, 15 bp, Homo sapiens
gtaaatgatttgttt

SEQ ID NO: 1488591 - DNA, 15 bp, Homo sapiens
tgtaaatgatttgtt

SEQ ID NO: 1488592 - DNA, 15 bp, Homo sapiens
gtgtaaatgatttgt

SEQ ID NO: 1488593 - DNA, 15 bp, Homo sapiens
tgtgtaaatgatttg

SEQ ID NO: 1488594 - DNA, 15 bp, Homo sapiens
atgtgtaaatgattt

SEQ ID NO: 1488595 - DNA, 15 bp, Homo sapiens
aatgtgtaaatgatt

SEQ ID NO: 1488596 - DNA, 15 bp, Homo sapiens
aaatgtgtaaatgat

SEQ ID NO: 1488597 - DNA, 15 bp, Homo sapiens
caaatgtgtaaatga

SEQ ID NO: 1488598 - DNA, 15 bp, Homo sapiens
gcaaatgtgtaaatg

SEQ ID NO: 1488599 - DNA, 15 bp, Homo sapiens
ggcaaatgtgtaaat

SEQ ID NO: 1488600 - DNA, 15 bp, Homo sapiens
gggcaaatgtgtaaa

SEQ ID NO: 1488601 - DNA, 15 bp, Homo sapiens
cgggcaaatgtgtaa

SEQ ID NO: 1488602 - DNA, 15 bp, Homo sapiens
tcgggcaaatgtgta

SEQ ID NO: 1488603 - DNA, 15 bp, Homo sapiens
ttcgggcaaatgtgt

SEQ ID NO: 1488604 - DNA, 15 bp, Homo sapiens
cttcgggcaaatgtg

SEQ ID NO: 1488605 - DNA, 15 bp, Homo sapiens
gcttcgggcaaatgt

SEQ ID NO: 1488606 - DNA, 15 bp, Homo sapiens
ggcttcgggcaaatg

SEQ ID NO: 1488607 - DNA, 15 bp, Homo sapiens
tggcttcgggcaaat

SEQ ID NO: 1488608 - DNA, 15 bp, Homo sapiens
atggcttcgggcaaa

SEQ ID NO: 1488609 - DNA, 15 bp, Homo sapiens
tatggcttcgggcaa

SEQ ID NO: 1488610 - DNA, 15 bp, Homo sapiens
ctatggcttcgggca

SEQ ID NO: 1488611 - DNA, 15 bp, Homo sapiens
tctatggcttcgggc

SEQ ID NO: 1488612 - DNA, 15 bp, Homo sapiens
ttctatggcttcggg

SEQ ID NO: 1488613 - DNA, 15 bp, Homo sapiens
attctatggcttcgg

SEQ ID NO: 1488614 - DNA, 15 bp, Homo sapiens
cattctatggcttcg

SEQ ID NO: 1488615 - DNA, 15 bp, Homo sapiens
ccattctatggcttc

SEQ ID NO: 1488616 - DNA, 15 bp, Homo sapiens
cccattctatggctt

SEQ ID NO: 1488617 - DNA, 15 bp, Homo sapiens
acccattctatggct

SEQ ID NO: 1488618 - DNA, 15 bp, Homo sapiens
tacccattctatggc

SEQ ID NO: 1488619 - DNA, 15 bp, Homo sapiens
ctacccattctatgg

SEQ ID NO: 1488620 - DNA, 15 bp, Homo sapiens
tctacccattctatg

SEQ ID NO: 1488621 - DNA, 15 bp, Homo sapiens
ctctacccattctat

SEQ ID NO: 1488622 - DNA, 15 bp, Homo sapiens
cctctacccattcta

SEQ ID NO: 1488623 - DNA, 15 bp, Homo sapiens
ccctctacccattct

SEQ ID NO: 1488624 - DNA, 15 bp, Homo sapiens
cccctctacccattc

SEQ ID NO: 1488625 - DNA, 15 bp, Homo sapiens
tcccctctacccatt

SEQ ID NO: 1488626 - DNA, 15 bp, Homo sapiens
atcccctctacccat

SEQ ID NO: 1488627 - DNA, 15 bp, Homo sapiens
catcccctctaccca

SEQ ID NO: 1488628 - DNA, 15 bp, Homo sapiens
tcatcccctctaccc

SEQ ID NO: 1488629 - DNA, 15 bp, Homo sapiens
gtcatcccctctacc

SEQ ID NO: 1488630 - DNA, 15 bp, Homo sapiens
agtcatcccctctac

SEQ ID NO: 1488631 - DNA, 15 bp, Homo sapiens
tagtcatcccctcta

SEQ ID NO: 1488632 - DNA, 15 bp, Homo sapiens
ttagtcatcccctct

SEQ ID NO: 1488633 - DNA, 15 bp, Homo sapiens
cttagtcatcccctc

SEQ ID NO: 1488634 - DNA, 15 bp, Homo sapiens
tcttagtcatcccct

SEQ ID NO: 1488635 - DNA, 15 bp, Homo sapiens
atcttagtcatcccc

SEQ ID NO: 1488636 - DNA, 15 bp, Homo sapiens
catcttagtcatccc

SEQ ID NO: 1488637 - DNA, 15 bp, Homo sapiens
acatcttagtcatcc

SEQ ID NO: 1488638 - DNA, 15 bp, Homo sapiens
gacatcttagtcatc

SEQ ID NO: 1488639 - DNA, 15 bp, Homo sapiens
tgacatcttagtcat

SEQ ID NO: 1488640 - DNA, 15 bp, Homo sapiens
atgacatcttagtca

SEQ ID NO: 1488641 - DNA, 15 bp, Homo sapiens
gatgacatcttagtc

SEQ ID NO: 1488642 - DNA, 15 bp, Homo sapiens
tgatgacatcttagt

SEQ ID NO: 1488643 - DNA, 15 bp, Homo sapiens
gtgatgacatcttag

SEQ ID NO: 1488644 - DNA, 15 bp, Homo sapiens
cgtgatgacatctta

SEQ ID NO: 1488645 - DNA, 15 bp, Homo sapiens
acgtgatgacatctt

SEQ ID NO: 1488646 - DNA, 15 bp, Homo sapiens
cacgtgatgacatct

SEQ ID NO: 1488647 - DNA, 15 bp, Homo sapiens
gcacgtgatgacatc

SEQ ID NO: 1488648 - DNA, 15 bp, Homo sapiens
agcacgtgatgacat

SEQ ID NO: 1488649 - DNA, 15 bp, Homo sapiens
gagcacgtgatgaca

SEQ ID NO: 1488650 - DNA, 15 bp, Homo sapiens
agagcacgtgatgac

SEQ ID NO: 1488651 - DNA, 15 bp, Homo sapiens
gagagcacgtgatga

SEQ ID NO: 1488652 - DNA, 15 bp, Homo sapiens
tgagagcacgtgatg

SEQ ID NO: 1488653 - DNA, 15 bp, Homo sapiens
ttgagagcacgtgat

SEQ ID NO: 1488654 - DNA, 15 bp, Homo sapiens
attgagagcacgtga

SEQ ID NO: 1488655 - DNA, 15 bp, Homo sapiens
aattgagagcacgtg

SEQ ID NO: 1488656 - DNA, 15 bp, Homo sapiens
aaattgagagcacgt

SEQ ID NO: 1488657 - DNA, 15 bp, Homo sapiens
caaattgagagcacg

SEQ ID NO: 1488658 - DNA, 15 bp, Homo sapiens
ccaaattgagagcac

SEQ ID NO: 1488659 - DNA, 15 bp, Homo sapiens
tccaaattgagagca

SEQ ID NO: 1488660 - DNA, 15 bp, Homo sapiens
ctccaaattgagagc

SEQ ID NO: 1488661 - DNA, 15 bp, Homo sapiens
cctccaaattgagag

SEQ ID NO: 1488662 - DNA, 15 bp, Homo sapiens
gcctccaaattgaga

SEQ ID NO: 1488663 - DNA, 15 bp, Homo sapiens
tgcctccaaattgag

SEQ ID NO: 1488664 - DNA, 15 bp, Homo sapiens
ctgcctccaaattga

SEQ ID NO: 1488665 - DNA, 15 bp, Homo sapiens
gctgcctccaaattg

SEQ ID NO: 1488666 - DNA, 15 bp, Homo sapiens
tgctgcctccaaatt

SEQ ID NO: 1488667 - DNA, 15 bp, Homo sapiens
atgctgcctccaaat

SEQ ID NO: 1488668 - DNA, 15 bp, Homo sapiens
catgctgcctccaaa

SEQ ID NO: 1488669 - DNA, 15 bp, Homo sapiens
tcatgctgcctccaa

SEQ ID NO: 1488670 - DNA, 15 bp, Homo sapiens
atcatgctgcctcca

SEQ ID NO: 1488671 - DNA, 15 bp, Homo sapiens
aatcatgctgcctcc

SEQ ID NO: 1488672 - DNA, 15 bp, Homo sapiens
aaatcatgctgcctc

SEQ ID NO: 1488673 - DNA, 15 bp, Homo sapiens
gaaatcatgctgcct

SEQ ID NO: 1488674 - DNA, 15 bp, Homo sapiens
ggaaatcatgctgcc

SEQ ID NO: 1488675 - DNA, 15 bp, Homo sapiens
gggaaatcatgctgc

SEQ ID NO: 1488676 - DNA, 15 bp, Homo sapiens
ggggaaatcatgctg

SEQ ID NO: 1488677 - DNA, 15 bp, Homo sapiens
aggggaaatcatgct

SEQ ID NO: 1488678 - DNA, 15 bp, Homo sapiens
caggggaaatcatgc

SEQ ID NO: 1488679 - DNA, 15 bp, Homo sapiens
tcaggggaaatcatg

SEQ ID NO: 1488680 - DNA, 15 bp, Homo sapiens
gtcaggggaaatcat

SEQ ID NO: 1488681 - DNA, 15 bp, Homo sapiens
tgtcaggggaaatca

SEQ ID NO: 1488682 - DNA, 15 bp, Homo sapiens
atgtcaggggaaatc

SEQ ID NO: 1488683 - DNA, 15 bp, Homo sapiens
aatgtcaggggaaat

SEQ ID NO: 1488684 - DNA, 15 bp, Homo sapiens
aaatgtcaggggaaa

SEQ ID NO: 1488685 - DNA, 15 bp, Homo sapiens
taaatgtcaggggaa

SEQ ID NO: 1488686 - DNA, 15 bp, Homo sapiens
gtaaatgtcagggga

SEQ ID NO: 1488687 - DNA, 15 bp, Homo sapiens
tgtaaatgtcagggg

SEQ ID NO: 1488688 - DNA, 15 bp, Homo sapiens
atgtaaatgtcaggg

SEQ ID NO: 1488689 - DNA, 15 bp, Homo sapiens
aatgtaaatgtcagg

SEQ ID NO: 1488690 - DNA, 15 bp, Homo sapiens
aaatgtaaatgtcag

SEQ ID NO: 1488691 - DNA, 15 bp, Homo sapiens
taaatgtaaatgtca

SEQ ID NO: 1488692 - DNA, 15 bp, Homo sapiens
ataaatgtaaatgtc

SEQ ID NO: 1488693 - DNA, 15 bp, Homo sapiens
cataaatgtaaatgt

SEQ ID NO: 1488694 - DNA, 15 bp, Homo sapiens
ccataaatgtaaatg

SEQ ID NO: 1488695 - DNA, 15 bp, Homo sapiens
cccataaatgtaaat

SEQ ID NO: 1488696 - DNA, 15 bp, Homo sapiens
gcccataaatgtaaa

SEQ ID NO: 1488697 - DNA, 15 bp, Homo sapiens
agcccataaatgtaa

SEQ ID NO: 1488698 - DNA, 15 bp, Homo sapiens
tagcccataaatgta

SEQ ID NO: 1488699 - DNA, 15 bp, Homo sapiens
ctagcccataaatgt

SEQ ID NO: 1488700 - DNA, 15 bp, Homo sapiens
gctagcccataaatg

SEQ ID NO: 1488701 - DNA, 15 bp, Homo sapiens
agctagcccataaat

SEQ ID NO: 1488702 - DNA, 15 bp, Homo sapiens
tagctagcccataaa

SEQ ID NO: 1488703 - DNA, 15 bp, Homo sapiens
ttagctagcccataa

SEQ ID NO: 1488704 - DNA, 15 bp, Homo sapiens
attagctagcccata

SEQ ID NO: 1488705 - DNA, 15 bp, Homo sapiens
aattagctagcccat

SEQ ID NO: 1488706 - DNA, 15 bp, Homo sapiens
aaattagctagccca

SEQ ID NO: 1488707 - DNA, 15 bp, Homo sapiens
aaaattagctagccc

SEQ ID NO: 1488708 - DNA, 15 bp, Homo sapiens
aaaaattagctagcc

SEQ ID NO: 1488709 - DNA, 15 bp, Homo sapiens
gaaaaattagctagc

SEQ ID NO: 1488710 - DNA, 15 bp, Homo sapiens
ggaaaaattagctag

SEQ ID NO: 1488711 - DNA, 15 bp, Homo sapiens
gggaaaaattagcta

SEQ ID NO: 1488712 - DNA, 15 bp, Homo sapiens
agggaaaaattagct

SEQ ID NO: 1488713 - DNA, 15 bp, Homo sapiens
aagggaaaaattagc

SEQ ID NO: 1488714 - DNA, 15 bp, Homo sapiens
gaagggaaaaattag

SEQ ID NO: 1488715 - DNA, 15 bp, Homo sapiens
cgaagggaaaaatta

SEQ ID NO: 1488716 - DNA, 15 bp, Homo sapiens
acgaagggaaaaatt

SEQ ID NO: 1488717 - DNA, 15 bp, Homo sapiens
gacgaagggaaaaat

SEQ ID NO: 1488718 - DNA, 15 bp, Homo sapiens
agacgaagggaaaaa

SEQ ID NO: 1488719 - DNA, 15 bp, Homo sapiens
aagacgaagggaaaa

SEQ ID NO: 1488720 - DNA, 15 bp, Homo sapiens
taagacgaagggaaa

SEQ ID NO: 1488721 - DNA, 15 bp, Homo sapiens
ctaagacgaagggaa

SEQ ID NO: 1488722 - DNA, 15 bp, Homo sapiens
accacaccattcact

SEQ ID NO: 1488723 - DNA, 15 bp, Homo sapiens
caccacaccattcac

SEQ ID NO: 1488724 - DNA, 15 bp, Homo sapiens
acaccacaccattca

SEQ ID NO: 1488725 - DNA, 15 bp, Homo sapiens
tacaccacaccattc

SEQ ID NO: 1488726 - DNA, 15 bp, Homo sapiens
ttacaccacaccatt

SEQ ID NO: 1488727 - DNA, 15 bp, Homo sapiens
cttacaccacaccat

SEQ ID NO: 1488728 - DNA, 15 bp, Homo sapiens
gcttacaccacacca

SEQ ID NO: 1488729 - DNA, 15 bp, Homo sapiens
tgcttacaccacacc

SEQ ID NO: 1488730 - DNA, 15 bp, Homo sapiens
atgcttacaccacac

SEQ ID NO: 1488731 - DNA, 15 bp, Homo sapiens
catgcttacaccaca

SEQ ID NO: 1488732 - DNA, 15 bp, Homo sapiens
acatgcttacaccac

SEQ ID NO: 1488733 - DNA, 15 bp, Homo sapiens
cacatgcttacacca

SEQ ID NO: 1488734 - DNA, 15 bp, Homo sapiens
acacatgcttacacc

SEQ ID NO: 1488735 - DNA, 15 bp, Homo sapiens
cacacacacatgctt

SEQ ID NO: 1488736 - DNA, 15 bp, Homo sapiens
tcacacacacatgct

SEQ ID NO: 1488737 - DNA, 15 bp, Homo sapiens
ctcacacacacatgc

SEQ ID NO: 1488738 - DNA, 15 bp, Homo sapiens
gctcacacacacatg

SEQ ID NO: 1488739 - DNA, 15 bp, Homo sapiens
tgctcacacacacat

SEQ ID NO: 1488740 - DNA, 15 bp, Homo sapiens
ctgctcacacacaca

SEQ ID NO: 1488741 - DNA, 15 bp, Homo sapiens
ccctgctcacacaca

SEQ ID NO: 1488742 - DNA, 15 bp, Homo sapiens
tgcccctgctcacac

SEQ ID NO: 1488743 - DNA, 15 bp, Homo sapiens
atgcccctgctcaca

SEQ ID NO: 1488744 - DNA, 15 bp, Homo sapiens
catgcccctgctcac

SEQ ID NO: 1488745 - DNA, 15 bp, Homo sapiens
acatgcccctgctca

SEQ ID NO: 1488746 - DNA, 15 bp, Homo sapiens
cacatgcccctgctc

SEQ ID NO: 1488747 - DNA, 15 bp, Homo sapiens
acacatgcccctgct

SEQ ID NO: 1488748 - DNA, 15 bp, Homo sapiens
cacacatgcccctgc

SEQ ID NO: 1488749 - DNA, 15 bp, Homo sapiens
acacacatgcccctg

SEQ ID NO: 1488750 - DNA, 15 bp, Homo sapiens
cacacacatgcccct

SEQ ID NO: 1488751 - DNA, 15 bp, Homo sapiens
gcacacacatgcccc

SEQ ID NO: 1488752 - DNA, 15 bp, Homo sapiens
tgcacacacatgccc

SEQ ID NO: 1488753 - DNA, 15 bp, Homo sapiens
ttgcacacacatgcc

SEQ ID NO: 1488754 - DNA, 15 bp, Homo sapiens
cttgcacacacatgc

SEQ ID NO: 1488755 - DNA, 15 bp, Homo sapiens
ccttgcacacacatg

SEQ ID NO: 1488756 - DNA, 15 bp, Homo sapiens
cccttgcacacacat

SEQ ID NO: 1488757 - DNA, 15 bp, Homo sapiens
acccttgcacacaca

SEQ ID NO: 1488758 - DNA, 15 bp, Homo sapiens
cacccttgcacacac

SEQ ID NO: 1488759 - DNA, 15 bp, Homo sapiens
tcacccttgcacaca

SEQ ID NO: 1488760 - DNA, 15 bp, Homo sapiens
ctcacccttgcacac

SEQ ID NO: 1488761 - DNA, 15 bp, Homo sapiens
gctcacccttgcaca

SEQ ID NO: 1488762 - DNA, 15 bp, Homo sapiens
tgctcacccttgcac

SEQ ID NO: 1488763 - DNA, 15 bp, Homo sapiens
ttgctcacccttgca

SEQ ID NO: 1488764 - DNA, 15 bp, Homo sapiens
attgctcacccttgc

SEQ ID NO: 1488765 - DNA, 15 bp, Homo sapiens
cattgctcacccttg

SEQ ID NO: 1488766 - DNA, 15 bp, Homo sapiens
acattgctcaccctt

SEQ ID NO: 1488767 - DNA, 15 bp, Homo sapiens
tacattgctcaccct

SEQ ID NO: 1488768 - DNA, 15 bp, Homo sapiens
ttacattgctcaccc

SEQ ID NO: 1488769 - DNA, 15 bp, Homo sapiens
cttacattgctcacc

SEQ ID NO: 1488770 - DNA, 15 bp, Homo sapiens
ccttacattgctcac

SEQ ID NO: 1488771 - DNA, 15 bp, Homo sapiens
accttacattgctca

SEQ ID NO: 1488772 - DNA, 15 bp, Homo sapiens
caccttacattgctc

SEQ ID NO: 1488773 - DNA, 15 bp, Homo sapiens
acaccttacattgct

SEQ ID NO: 1488774 - DNA, 15 bp, Homo sapiens
cacaccttacattgc

SEQ ID NO: 1488775 - DNA, 15 bp, Homo sapiens
tcacaccttacattg

SEQ ID NO: 1488776 - DNA, 15 bp, Homo sapiens
ctcacaccttacatt

SEQ ID NO: 1488777 - DNA, 15 bp, Homo sapiens
cctcacaccttacat

SEQ ID NO: 1488778 - DNA, 15 bp, Homo sapiens
ccctcacaccttaca

SEQ ID NO: 1488779 - DNA, 15 bp, Homo sapiens
accctcacaccttac

SEQ ID NO: 1488780 - DNA, 15 bp, Homo sapiens
caccctcacacctta

SEQ ID NO: 1488781 - DNA, 15 bp, Homo sapiens
tcaccctcacacctt

SEQ ID NO: 1488782 - DNA, 15 bp, Homo sapiens
ctcaccctcacacct

SEQ ID NO: 1488783 - DNA, 15 bp, Homo sapiens
gctcaccctcacacc

SEQ ID NO: 1488784 - DNA, 15 bp, Homo sapiens
tgctcaccctcacac

SEQ ID NO: 1488785 - DNA, 15 bp, Homo sapiens
ctgctcaccctcaca

SEQ ID NO: 1488786 - DNA, 15 bp, Homo sapiens
actgctcaccctcac

SEQ ID NO: 1488787 - DNA, 15 bp, Homo sapiens
cactgctcaccctca

SEQ ID NO: 1488788 - DNA, 15 bp, Homo sapiens
acactgctcaccctc

SEQ ID NO: 1488789 - DNA, 15 bp, Homo sapiens
tacactgctcaccct

SEQ ID NO: 1488790 - DNA, 15 bp, Homo sapiens
ttacactgctcaccc

SEQ ID NO: 1488791 - DNA, 15 bp, Homo sapiens
cttacactgctcacc

SEQ ID NO: 1488792 - DNA, 15 bp, Homo sapiens
tcttacactgctcac

SEQ ID NO: 1488793 - DNA, 15 bp, Homo sapiens
atcttacactgctca

SEQ ID NO: 1488794 - DNA, 15 bp, Homo sapiens
catcttacactgctc

SEQ ID NO: 1488795 - DNA, 15 bp, Homo sapiens
acatcttacactgct

SEQ ID NO: 1488796 - DNA, 15 bp, Homo sapiens
cacatcttacactgc

SEQ ID NO: 1488797 - DNA, 15 bp, Homo sapiens
acacatcttacactg

SEQ ID NO: 1488798 - DNA, 15 bp, Homo sapiens
tacacatcttacact

SEQ ID NO: 1488799 - DNA, 15 bp, Homo sapiens
ttacacatcttacac

SEQ ID NO: 1488800 - DNA, 15 bp, Homo sapiens
cttacacatcttaca

SEQ ID NO: 1488801 - DNA, 15 bp, Homo sapiens
gcttacacatcttac

SEQ ID NO: 1488802 - DNA, 15 bp, Homo sapiens
tgcttacacatctta

SEQ ID NO: 1488803 - DNA, 15 bp, Homo sapiens
ctgcttacacatctt

SEQ ID NO: 1488804 - DNA, 15 bp, Homo sapiens
cctgcttacacatct

SEQ ID NO: 1488805 - DNA, 15 bp, Homo sapiens
acctgcttacacatc

SEQ ID NO: 1488806 - DNA, 15 bp, Homo sapiens
cacctgcttacacat

SEQ ID NO: 1488807 - DNA, 15 bp, Homo sapiens
aacacacctgcttac

SEQ ID NO: 1488808 - DNA, 15 bp, Homo sapiens
aaacacacctgctta

SEQ ID NO: 1488809 - DNA, 15 bp, Homo sapiens
caaacacacctgctt

SEQ ID NO: 1488810 - DNA, 15 bp, Homo sapiens
acaaacacacctgct

SEQ ID NO: 1488811 - DNA, 15 bp, Homo sapiens
cacaaacacacctgc

SEQ ID NO: 1488812 - DNA, 15 bp, Homo sapiens
gcacaaacacacctg

SEQ ID NO: 1488813 - DNA, 15 bp, Homo sapiens
tgcacaaacacacct

SEQ ID NO: 1488814 - DNA, 15 bp, Homo sapiens
ttgcacaaacacacc

SEQ ID NO: 1488815 - DNA, 15 bp, Homo sapiens
cttgcacaaacacac

SEQ ID NO: 1488816 - DNA, 15 bp, Homo sapiens
gcttgcacaaacaca

SEQ ID NO: 1488817 - DNA, 15 bp, Homo sapiens
tgcttgcacaaacac

SEQ ID NO: 1488818 - DNA, 15 bp, Homo sapiens
atgcttgcacaaaca

SEQ ID NO: 1488819 - DNA, 15 bp, Homo sapiens
catgcttgcacaaac

SEQ ID NO: 1488820 - DNA, 15 bp, Homo sapiens
acatgcttgcacaaa

SEQ ID NO: 1488821 - DNA, 15 bp, Homo sapiens
cacatgcttgcacaa

SEQ ID NO: 1488822 - DNA, 15 bp, Homo sapiens
acacatgcttgcaca

SEQ ID NO: 1488823 - DNA, 15 bp, Homo sapiens
tacacatgcttgcac

SEQ ID NO: 1488824 - DNA, 15 bp, Homo sapiens
ttacacatgcttgca

SEQ ID NO: 1488825 - DNA, 15 bp, Homo sapiens
cttacacatgcttgc

SEQ ID NO: 1488826 - DNA, 15 bp, Homo sapiens
gcttacacatgcttg

SEQ ID NO: 1488827 - DNA, 15 bp, Homo sapiens
tgcttacacatgctt

SEQ ID NO: 1488828 - DNA, 15 bp, Homo sapiens
ttgcttacacatgct

SEQ ID NO: 1488829 - DNA, 15 bp, Homo sapiens
cttgcttacacatgc

SEQ ID NO: 1488830 - DNA, 15 bp, Homo sapiens
acttgcttacacatg

SEQ ID NO: 1488831 - DNA, 15 bp, Homo sapiens
tacttgcttacacat

SEQ ID NO: 1488832 - DNA, 15 bp, Homo sapiens
atacttgcttacaca

SEQ ID NO: 1488833 - DNA, 15 bp, Homo sapiens
tatacttgcttacac

SEQ ID NO: 1488834 - DNA, 15 bp, Homo sapiens
ttatacttgcttaca

SEQ ID NO: 1488835 - DNA, 15 bp, Homo sapiens
cttatacttgcttac

SEQ ID NO: 1488836 - DNA, 15 bp, Homo sapiens
gcttatacttgctta

SEQ ID NO: 1488837 - DNA, 15 bp, Homo sapiens
tgcttatacttgctt

SEQ ID NO: 1488838 - DNA, 15 bp, Homo sapiens
ctgcttatacttgct

SEQ ID NO: 1488839 - DNA, 15 bp, Homo sapiens
cctgcttatacttgc

SEQ ID NO: 1488840 - DNA, 15 bp, Homo sapiens
acctgcttatacttg

SEQ ID NO: 1488841 - DNA, 15 bp, Homo sapiens
cacctgcttatactt

SEQ ID NO: 1488842 - DNA, 15 bp, Homo sapiens
acacctgcttatact

SEQ ID NO: 1488843 - DNA, 15 bp, Homo sapiens
cacacctgcttatac

SEQ ID NO: 1488844 - DNA, 15 bp, Homo sapiens
tcacacctgcttata

SEQ ID NO: 1488845 - DNA, 15 bp, Homo sapiens
atcacacctgcttat

SEQ ID NO: 1488846 - DNA, 15 bp, Homo sapiens
aatcacacctgctta

SEQ ID NO: 1488847 - DNA, 15 bp, Homo sapiens
taatcacacctgctt

SEQ ID NO: 1488848 - DNA, 15 bp, Homo sapiens
ataatcacacctgct

SEQ ID NO: 1488849 - DNA, 15 bp, Homo sapiens
cataatcacacctgc

SEQ ID NO: 1488850 - DNA, 15 bp, Homo sapiens
tcataatcacacctg

SEQ ID NO: 1488851 - DNA, 15 bp, Homo sapiens
ctcataatcacacct

SEQ ID NO: 1488852 - DNA, 15 bp, Homo sapiens
tctcataatcacacc

SEQ ID NO: 1488853 - DNA, 15 bp, Homo sapiens
gtctcataatcacac

SEQ ID NO: 1488854 - DNA, 15 bp, Homo sapiens
ggtctcataatcaca

SEQ ID NO: 1488855 - DNA, 15 bp, Homo sapiens
aggtctcataatcac

SEQ ID NO: 1488856 - DNA, 15 bp, Homo sapiens
caggtctcataatca

SEQ ID NO: 1488857 - DNA, 15 bp, Homo sapiens
ccaggtctcataatc

SEQ ID NO: 1488858 - DNA, 15 bp, Homo sapiens
accaggtctcataat

SEQ ID NO: 1488859 - DNA, 15 bp, Homo sapiens
caccaggtctcataa

SEQ ID NO: 1488860 - DNA, 15 bp, Homo sapiens
acaccaggtctcata

SEQ ID NO: 1488861 - DNA, 15 bp, Homo sapiens
cacaccaggtctcat

SEQ ID NO: 1488862 - DNA, 15 bp, Homo sapiens
tcacaccaggtctca

SEQ ID NO: 1488863 - DNA, 15 bp, Homo sapiens
ctcacaccaggtctc

SEQ ID NO: 1488864 - DNA, 15 bp, Homo sapiens
cctcacaccaggtct

SEQ ID NO: 1488865 - DNA, 15 bp, Homo sapiens
acctcacaccaggtc

SEQ ID NO: 1488866 - DNA, 15 bp, Homo sapiens
cacctcacaccaggt

SEQ ID NO: 1488867 - DNA, 15 bp, Homo sapiens
acacctcacaccagg

SEQ ID NO: 1488868 - DNA, 15 bp, Homo sapiens
tacacctcacaccag

SEQ ID NO: 1488869 - DNA, 15 bp, Homo sapiens
atacacctcacacca

SEQ ID NO: 1488870 - DNA, 15 bp, Homo sapiens
catacacctcacacc

SEQ ID NO: 1488871 - DNA, 15 bp, Homo sapiens
tcatacacctcacac

SEQ ID NO: 1488872 - DNA, 15 bp, Homo sapiens
ctcatacacctcaca

SEQ ID NO: 1488873 - DNA, 15 bp, Homo sapiens
gctcatacacctcac

SEQ ID NO: 1488874 - DNA, 15 bp, Homo sapiens
tgctcatacacctca

SEQ ID NO: 1488875 - DNA, 15 bp, Homo sapiens
ctgctcatacacctc

SEQ ID NO: 1488876 - DNA, 15 bp, Homo sapiens
cctgctcatacacct

SEQ ID NO: 1488877 - DNA, 15 bp, Homo sapiens
acctgctcatacacc

SEQ ID NO: 1488878 - DNA, 15 bp, Homo sapiens
cacctgctcatacac

SEQ ID NO: 1488879 - DNA, 15 bp, Homo sapiens
acacctgctcataca

SEQ ID NO: 1488880 - DNA, 15 bp, Homo sapiens
cacacctgctcatac

SEQ ID NO: 1488881 - DNA, 15 bp, Homo sapiens
acacacctgctcata

SEQ ID NO: 1488882 - DNA, 15 bp, Homo sapiens
cacacacctgctcat

SEQ ID NO: 1488883 - DNA, 15 bp, Homo sapiens
tcacacacctgctca

SEQ ID NO: 1488884 - DNA, 15 bp, Homo sapiens
ttcacacacctgctc

SEQ ID NO: 1488885 - DNA, 15 bp, Homo sapiens
gttcacacacctgct

SEQ ID NO: 1488886 - DNA, 15 bp, Homo sapiens
tgttcacacacctgc

SEQ ID NO: 1488887 - DNA, 15 bp, Homo sapiens
atgttcacacacctg

SEQ ID NO: 1488888 - DNA, 15 bp, Homo sapiens
catgttcacacacct

SEQ ID NO: 1488889 - DNA, 15 bp, Homo sapiens
tcatgttcacacacc

SEQ ID NO: 1488890 - DNA, 15 bp, Homo sapiens
ctcatgttcacacac

SEQ ID NO: 1488891 - DNA, 15 bp, Homo sapiens
actcatgttcacaca

SEQ ID NO: 1488892 - DNA, 15 bp, Homo sapiens
cactcatgttcacac

SEQ ID NO: 1488893 - DNA, 15 bp, Homo sapiens
acactcatgttcaca

SEQ ID NO: 1488894 - DNA, 15 bp, Homo sapiens
cacactcatgttcac

SEQ ID NO: 1488895 - DNA, 15 bp, Homo sapiens
acacactcatgttca

SEQ ID NO: 1488896 - DNA, 15 bp, Homo sapiens
cacacactcatgttc

SEQ ID NO: 1488897 - DNA, 15 bp, Homo sapiens
tcacacactcatgtt

SEQ ID NO: 1488898 - DNA, 15 bp, Homo sapiens
ttcacacactcatgt

SEQ ID NO: 1488899 - DNA, 15 bp, Homo sapiens
gttcacacactcatg

SEQ ID NO: 1488900 - DNA, 15 bp, Homo sapiens
ggttcacacactcat

SEQ ID NO: 1488901 - DNA, 15 bp, Homo sapiens
aggttcacacactca

SEQ ID NO: 1488902 - DNA, 15 bp, Homo sapiens
caggttcacacactc

SEQ ID NO: 1488903 - DNA, 15 bp, Homo sapiens
ccaggttcacacact

SEQ ID NO: 1488904 - DNA, 15 bp, Homo sapiens
accaggttcacacac

SEQ ID NO: 1488905 - DNA, 15 bp, Homo sapiens
caccaggttcacaca

SEQ ID NO: 1488906 - DNA, 15 bp, Homo sapiens
acaccaggttcacac

SEQ ID NO: 1488907 - DNA, 15 bp, Homo sapiens
cacaccaggttcaca

SEQ ID NO: 1488908 - DNA, 15 bp, Homo sapiens
tcacaccaggttcac

SEQ ID NO: 1488909 - DNA, 15 bp, Homo sapiens
ctcacaccaggttca

SEQ ID NO: 1488910 - DNA, 15 bp, Homo sapiens
cctcacaccaggttc

SEQ ID NO: 1488911 - DNA, 15 bp, Homo sapiens
acctcacaccaggtt

SEQ ID NO: 1488912 - DNA, 15 bp, Homo sapiens
cacacctcacaccag

SEQ ID NO: 1488913 - DNA, 15 bp, Homo sapiens
acacacacctcacac

SEQ ID NO: 1488914 - DNA, 15 bp, Homo sapiens
cacacacacctcaca

SEQ ID NO: 1488915 - DNA, 15 bp, Homo sapiens
tcacacacacctcac

SEQ ID NO: 1488916 - DNA, 15 bp, Homo sapiens
ctcacacacacctca

SEQ ID NO: 1488917 - DNA, 15 bp, Homo sapiens
gctcacacacacctc

SEQ ID NO: 1488918 - DNA, 15 bp, Homo sapiens
tcacacctgctcaca

SEQ ID NO: 1488919 - DNA, 15 bp, Homo sapiens
actcacacctgctca

SEQ ID NO: 1488920 - DNA, 15 bp, Homo sapiens
cactcacacctgctc

SEQ ID NO: 1488921 - DNA, 15 bp, Homo sapiens
ccactcacacctgct

SEQ ID NO: 1488922 - DNA, 15 bp, Homo sapiens
cccactcacacctgc

SEQ ID NO: 1488923 - DNA, 15 bp, Homo sapiens
gcccactcacacctg

SEQ ID NO: 1488924 - DNA, 15 bp, Homo sapiens
tgcccactcacacct

SEQ ID NO: 1488925 - DNA, 15 bp, Homo sapiens
atgcccactcacacc

SEQ ID NO: 1488926 - DNA, 15 bp, Homo sapiens
tatgcccactcacac

SEQ ID NO: 1488927 - DNA, 15 bp, Homo sapiens
atatgcccactcaca

SEQ ID NO: 1488928 - DNA, 15 bp, Homo sapiens
catatgcccactcac

SEQ ID NO: 1488929 - DNA, 15 bp, Homo sapiens
tcatatgcccactca

SEQ ID NO: 1488930 - DNA, 15 bp, Homo sapiens
ctcatatgcccactc

SEQ ID NO: 1488931 - DNA, 15 bp, Homo sapiens
actcatatgcccact

SEQ ID NO: 1488932 - DNA, 15 bp, Homo sapiens
cactcatatgcccac

SEQ ID NO: 1488933 - DNA, 15 bp, Homo sapiens
acactcatatgccca

SEQ ID NO: 1488934 - DNA, 15 bp, Homo sapiens
cacactcatatgccc

SEQ ID NO: 1488935 - DNA, 15 bp, Homo sapiens
tcacactcatatgcc

SEQ ID NO: 1488936 - DNA, 15 bp, Homo sapiens
ctcacactcatatgc

SEQ ID NO: 1488937 - DNA, 15 bp, Homo sapiens
tctcacactcatatg

SEQ ID NO: 1488938 - DNA, 15 bp, Homo sapiens
ttctcacactcatat

SEQ ID NO: 1488939 - DNA, 15 bp, Homo sapiens
cttctcacactcata

SEQ ID NO: 1488940 - DNA, 15 bp, Homo sapiens
ccttctcacactcat

SEQ ID NO: 1488941 - DNA, 15 bp, Homo sapiens
accttctcacactca

SEQ ID NO: 1488942 - DNA, 15 bp, Homo sapiens
caccttctcacactc

SEQ ID NO: 1488943 - DNA, 15 bp, Homo sapiens
gcaccttctcacact

SEQ ID NO: 1488944 - DNA, 15 bp, Homo sapiens
tgcaccttctcacac

SEQ ID NO: 1488945 - DNA, 15 bp, Homo sapiens
atgcaccttctcaca

SEQ ID NO: 1488946 - DNA, 15 bp, Homo sapiens
aatgcaccttctcac

SEQ ID NO: 1488947 - DNA, 15 bp, Homo sapiens
caatgcaccttctca

SEQ ID NO: 1488948 - DNA, 15 bp, Homo sapiens
ccaatgcaccttctc

SEQ ID NO: 1488949 - DNA, 15 bp, Homo sapiens
cccaatgcaccttct

SEQ ID NO: 1488950 - DNA, 15 bp, Homo sapiens
acccaatgcaccttc

SEQ ID NO: 1488951 - DNA, 15 bp, Homo sapiens
cacccaatgcacctt

SEQ ID NO: 1488952 - DNA, 15 bp, Homo sapiens
acacccaatgcacct

SEQ ID NO: 1488953 - DNA, 15 bp, Homo sapiens
cacacccaatgcacc

SEQ ID NO: 1488954 - DNA, 15 bp, Homo sapiens
tcacacccaatgcac

SEQ ID NO: 1488955 - DNA, 15 bp, Homo sapiens
gtcacacccaatgca

SEQ ID NO: 1488956 - DNA, 15 bp, Homo sapiens
ggtcacacccaatgc

SEQ ID NO: 1488957 - DNA, 15 bp, Homo sapiens
cggtcacacccaatg

SEQ ID NO: 1488958 - DNA, 15 bp, Homo sapiens
acggtcacacccaat

SEQ ID NO: 1488959 - DNA, 15 bp, Homo sapiens
cacggtcacacccaa

SEQ ID NO: 1488960 - DNA, 15 bp, Homo sapiens
acacggtcacaccca

SEQ ID NO: 1488961 - DNA, 15 bp, Homo sapiens
cacacggtcacaccc

SEQ ID NO: 1488962 - DNA, 15 bp, Homo sapiens
acacacggtcacacc

SEQ ID NO: 1488963 - DNA, 15 bp, Homo sapiens
cacacacggtcacac

SEQ ID NO: 1488964 - DNA, 15 bp, Homo sapiens
ccacacacggtcaca

SEQ ID NO: 1488965 - DNA, 15 bp, Homo sapiens
cccacacacggtcac

SEQ ID NO: 1488966 - DNA, 15 bp, Homo sapiens
ccccacacacggtca

SEQ ID NO: 1488967 - DNA, 15 bp, Homo sapiens
cccccacacacggtc

SEQ ID NO: 1488968 - DNA, 15 bp, Homo sapiens
gcccccacacacggt

SEQ ID NO: 1488969 - DNA, 15 bp, Homo sapiens
tgcccccacacacgg

SEQ ID NO: 1488970 - DNA, 15 bp, Homo sapiens
ctgcccccacacacg

SEQ ID NO: 1488971 - DNA, 15 bp, Homo sapiens
actgcccccacacac

SEQ ID NO: 1488972 - DNA, 15 bp, Homo sapiens
tactgcccccacaca

SEQ ID NO: 1488973 - DNA, 15 bp, Homo sapiens
ttactgcccccacac

SEQ ID NO: 1488974 - DNA, 15 bp, Homo sapiens
cttactgcccccaca

SEQ ID NO: 1488975 - DNA, 15 bp, Homo sapiens
acttactgcccccac

SEQ ID NO: 1488976 - DNA, 15 bp, Homo sapiens
cacttactgccccca

SEQ ID NO: 1488977 - DNA, 15 bp, Homo sapiens
ccacttactgccccc

SEQ ID NO: 1488978 - DNA, 15 bp, Homo sapiens
cccacttactgcccc

SEQ ID NO: 1488979 - DNA, 15 bp, Homo sapiens
acccacttactgccc

SEQ ID NO: 1488980 - DNA, 15 bp, Homo sapiens
gacccacttactgcc

SEQ ID NO: 1488981 - DNA, 15 bp, Homo sapiens
agacccacttactgc

SEQ ID NO: 1488982 - DNA, 15 bp, Homo sapiens
cagacccacttactg

SEQ ID NO: 1488983 - DNA, 15 bp, Homo sapiens
tcagacccacttact

SEQ ID NO: 1488984 - DNA, 15 bp, Homo sapiens
ctcagacccacttac

SEQ ID NO: 1488985 - DNA, 15 bp, Homo sapiens
actcagacccactta

SEQ ID NO: 1488986 - DNA, 15 bp, Homo sapiens
cactcagacccactt

SEQ ID NO: 1488987 - DNA, 15 bp, Homo sapiens
acactcagacccact

SEQ ID NO: 1488988 - DNA, 15 bp, Homo sapiens
cacactcagacccac

SEQ ID NO: 1488989 - DNA, 15 bp, Homo sapiens
acacactcagaccca

SEQ ID NO: 1488990 - DNA, 15 bp, Homo sapiens
cacacactcagaccc

SEQ ID NO: 1488991 - DNA, 15 bp, Homo sapiens
acacacactcagacc

SEQ ID NO: 1488992 - DNA, 15 bp, Homo sapiens
cacacacactcagac

SEQ ID NO: 1488993 - DNA, 15 bp, Homo sapiens
gcacacacactcaga

SEQ ID NO: 1488994 - DNA, 15 bp, Homo sapiens
tgcacacacactcag

SEQ ID NO: 1488995 - DNA, 15 bp, Homo sapiens
atgcacacacactca

SEQ ID NO: 1488996 - DNA, 15 bp, Homo sapiens
catgcacacacactc

SEQ ID NO: 1488997 - DNA, 15 bp, Homo sapiens
acatgcacacacact

SEQ ID NO: 1488998 - DNA, 15 bp, Homo sapiens
ctcacacacatgcac

SEQ ID NO: 1488999 - DNA, 15 bp, Homo sapiens
actcacacacatgca

SEQ ID NO: 1489000 - DNA, 15 bp, Homo sapiens
cactcacacacatgc

SEQ ID NO: 1489001 - DNA, 15 bp, Homo sapiens
ccactcacacacatg

SEQ ID NO: 1489002 - DNA, 15 bp, Homo sapiens
cccactcacacacat

SEQ ID NO: 1489003 - DNA, 15 bp, Homo sapiens
gcacccactcacaca

SEQ ID NO: 1489004 - DNA, 15 bp, Homo sapiens
tgcacccactcacac

SEQ ID NO: 1489005 - DNA, 15 bp, Homo sapiens
atgcacccactcaca

SEQ ID NO: 1489006 - DNA, 15 bp, Homo sapiens
aatgcacccactcac

SEQ ID NO: 1489007 - DNA, 15 bp, Homo sapiens
caatgcacccactca

SEQ ID NO: 1489008 - DNA, 15 bp, Homo sapiens
ccaatgcacccactc

SEQ ID NO: 1489009 - DNA, 15 bp, Homo sapiens
cccaatgcacccact

SEQ ID NO: 1489010 - DNA, 15 bp, Homo sapiens
acccaatgcacccac

SEQ ID NO: 1489011 - DNA, 15 bp, Homo sapiens
cacccaatgcaccca

SEQ ID NO: 1489012 - DNA, 15 bp, Homo sapiens
ccacccaatgcaccc

SEQ ID NO: 1489013 - DNA, 15 bp, Homo sapiens
cccacccaatgcacc

SEQ ID NO: 1489014 - DNA, 15 bp, Homo sapiens
acccacccaatgcac

SEQ ID NO: 1489015 - DNA, 15 bp, Homo sapiens
cacccacccaatgca

SEQ ID NO: 1489016 - DNA, 15 bp, Homo sapiens
acacccacccaatgc

SEQ ID NO: 1489017 - DNA, 15 bp, Homo sapiens
cacacccacccaatg

SEQ ID NO: 1489018 - DNA, 15 bp, Homo sapiens
tcacacccacccaat

SEQ ID NO: 1489019 - DNA, 15 bp, Homo sapiens
ctcacacccacccaa

SEQ ID NO: 1489020 - DNA, 15 bp, Homo sapiens
actcacacccaccca

SEQ ID NO: 1489021 - DNA, 15 bp, Homo sapiens
cactcacacccaccc

SEQ ID NO: 1489022 - DNA, 15 bp, Homo sapiens
acactcacacccacc

SEQ ID NO: 1489023 - DNA, 15 bp, Homo sapiens
cacactcacacccac

SEQ ID NO: 1489024 - DNA, 15 bp, Homo sapiens
gcacactcacaccca

SEQ ID NO: 1489025 - DNA, 15 bp, Homo sapiens
tgcacactcacaccc

SEQ ID NO: 1489026 - DNA, 15 bp, Homo sapiens
atgcacactcacacc

SEQ ID NO: 1489027 - DNA, 15 bp, Homo sapiens
catgcacactcacac

SEQ ID NO: 1489028 - DNA, 15 bp, Homo sapiens
acatgcacactcaca

SEQ ID NO: 1489029 - DNA, 15 bp, Homo sapiens
cacatgcacactcac

SEQ ID NO: 1489030 - DNA, 15 bp, Homo sapiens
tcacatgcacactca

SEQ ID NO: 1489031 - DNA, 15 bp, Homo sapiens
ctcacatgcacactc

SEQ ID NO: 1489032 - DNA, 15 bp, Homo sapiens
actcacatgcacact

SEQ ID NO: 1489033 - DNA, 15 bp, Homo sapiens
cactcacatgcacac

SEQ ID NO: 1489034 - DNA, 15 bp, Homo sapiens
ccactcacatgcaca

SEQ ID NO: 1489035 - DNA, 15 bp, Homo sapiens
cccactcacatgcac

SEQ ID NO: 1489036 - DNA, 15 bp, Homo sapiens
acccactcacatgca

SEQ ID NO: 1489037 - DNA, 15 bp, Homo sapiens
tcattcacacccact

SEQ ID NO: 1489038 - DNA, 15 bp, Homo sapiens
ctcattcacacccac

SEQ ID NO: 1489039 - DNA, 15 bp, Homo sapiens
cctcattcacaccca

SEQ ID NO: 1489040 - DNA, 15 bp, Homo sapiens
acctcattcacaccc

SEQ ID NO: 1489041 - DNA, 15 bp, Homo sapiens
cacctcattcacacc

SEQ ID NO: 1489042 - DNA, 15 bp, Homo sapiens
acacctcattcacac

SEQ ID NO: 1489043 - DNA, 15 bp, Homo sapiens
cacacctcattcaca

SEQ ID NO: 1489044 - DNA, 15 bp, Homo sapiens
tcacacctcattcac

SEQ ID NO: 1489045 - DNA, 15 bp, Homo sapiens
ctcacacctcattca

SEQ ID NO: 1489046 - DNA, 15 bp, Homo sapiens
gctcacacctcattc

SEQ ID NO: 1489047 - DNA, 15 bp, Homo sapiens
tgctcacacctcatt

SEQ ID NO: 1489048 - DNA, 15 bp, Homo sapiens
tcatgctcacacctc

SEQ ID NO: 1489049 - DNA, 15 bp, Homo sapiens
ctcatgctcacacct

SEQ ID NO: 1489050 - DNA, 15 bp, Homo sapiens
actcatgctcacacc

SEQ ID NO: 1489051 - DNA, 15 bp, Homo sapiens
cactcatgctcacac

SEQ ID NO: 1489052 - DNA, 15 bp, Homo sapiens
ccactcatgctcaca

SEQ ID NO: 1489053 - DNA, 15 bp, Homo sapiens
cccactcatgctcac

SEQ ID NO: 1489054 - DNA, 15 bp, Homo sapiens
acccactcatgctca

SEQ ID NO: 1489055 - DNA, 15 bp, Homo sapiens
cacccactcatgctc

SEQ ID NO: 1489056 - DNA, 15 bp, Homo sapiens
acacccactcatgct

SEQ ID NO: 1489057 - DNA, 15 bp, Homo sapiens
cacacccactcatgc

SEQ ID NO: 1489058 - DNA, 15 bp, Homo sapiens
tcacacccactcatg

SEQ ID NO: 1489059 - DNA, 15 bp, Homo sapiens
gtcacacccactcat

SEQ ID NO: 1489060 - DNA, 15 bp, Homo sapiens
ggtcacacccactca

SEQ ID NO: 1489061 - DNA, 15 bp, Homo sapiens
tggtcacacccactc

SEQ ID NO: 1489062 - DNA, 15 bp, Homo sapiens
ctggtcacacccact

SEQ ID NO: 1489063 - DNA, 15 bp, Homo sapiens
cctggtcacacccac

SEQ ID NO: 1489064 - DNA, 15 bp, Homo sapiens
acctggtcacaccca

SEQ ID NO: 1489065 - DNA, 15 bp, Homo sapiens
cacctggtcacaccc

SEQ ID NO: 1489066 - DNA, 15 bp, Homo sapiens
acacctggtcacacc

SEQ ID NO: 1489067 - DNA, 15 bp, Homo sapiens
cacacctggtcacac

SEQ ID NO: 1489068 - DNA, 15 bp, Homo sapiens
acacacctggtcaca

SEQ ID NO: 1489069 - DNA, 15 bp, Homo sapiens
cacacacctggtcac

SEQ ID NO: 1489070 - DNA, 15 bp, Homo sapiens
acacacacctggtca

SEQ ID NO: 1489071 - DNA, 15 bp, Homo sapiens
cacacacacctggtc

SEQ ID NO: 1489072 - DNA, 15 bp, Homo sapiens
tcacacacacctggt

SEQ ID NO: 1489073 - DNA, 15 bp, Homo sapiens
ctcacacacacctgg

SEQ ID NO: 1489074 - DNA, 15 bp, Homo sapiens
aacccactcacacac

SEQ ID NO: 1489075 - DNA, 15 bp, Homo sapiens
caacccactcacaca

SEQ ID NO: 1489076 - DNA, 15 bp, Homo sapiens
acaacccactcacac

SEQ ID NO: 1489077 - DNA, 15 bp, Homo sapiens
cacaacccactcaca

SEQ ID NO: 1489078 - DNA, 15 bp, Homo sapiens
tcacaacccactcac

SEQ ID NO: 1489079 - DNA, 15 bp, Homo sapiens
ttcacaacccactca

SEQ ID NO: 1489080 - DNA, 15 bp, Homo sapiens
attcacaacccactc

SEQ ID NO: 1489081 - DNA, 15 bp, Homo sapiens
cattcacaacccact

SEQ ID NO: 1489082 - DNA, 15 bp, Homo sapiens
acattcacaacccac

SEQ ID NO: 1489083 - DNA, 15 bp, Homo sapiens
cacattcacaaccca

SEQ ID NO: 1489084 - DNA, 15 bp, Homo sapiens
acacattcacaaccc

SEQ ID NO: 1489085 - DNA, 15 bp, Homo sapiens
tacacattcacaacc

SEQ ID NO: 1489086 - DNA, 15 bp, Homo sapiens
ttacacattcacaac

SEQ ID NO: 1489087 - DNA, 15 bp, Homo sapiens
cttacacattcacaa

SEQ ID NO: 1489088 - DNA, 15 bp, Homo sapiens
gcttacacattcaca

SEQ ID NO: 1489089 - DNA, 15 bp, Homo sapiens
tgcttacacattcac

SEQ ID NO: 1489090 - DNA, 15 bp, Homo sapiens
ctgcttacacattca

SEQ ID NO: 1489091 - DNA, 15 bp, Homo sapiens
tctgcttacacattc

SEQ ID NO: 1489092 - DNA, 15 bp, Homo sapiens
atctgcttacacatt

SEQ ID NO: 1489093 - DNA, 15 bp, Homo sapiens
catctgcttacacat

SEQ ID NO: 1489094 - DNA, 15 bp, Homo sapiens
gcatctgcttacaca

SEQ ID NO: 1489095 - DNA, 15 bp, Homo sapiens
tgcatctgcttacac

SEQ ID NO: 1489096 - DNA, 15 bp, Homo sapiens
ctgcatctgcttaca

SEQ ID NO: 1489097 - DNA, 15 bp, Homo sapiens
actgcatctgcttac

SEQ ID NO: 1489098 - DNA, 15 bp, Homo sapiens
cactgcatctgctta

SEQ ID NO: 1489099 - DNA, 15 bp, Homo sapiens
acactgcatctgctt

SEQ ID NO: 1489100 - DNA, 15 bp, Homo sapiens
cacactgcatctgct

SEQ ID NO: 1489101 - DNA, 15 bp, Homo sapiens
ccacactgcatctgc

SEQ ID NO: 1489102 - DNA, 15 bp, Homo sapiens
cccacactgcatctg

SEQ ID NO: 1489103 - DNA, 15 bp, Homo sapiens
acccacactgcatct

SEQ ID NO: 1489104 - DNA, 15 bp, Homo sapiens
aacccacactgcatc

SEQ ID NO: 1489105 - DNA, 15 bp, Homo sapiens
aaacccacactgcat

SEQ ID NO: 1489106 - DNA, 15 bp, Homo sapiens
caaacccacactgca

SEQ ID NO: 1489107 - DNA, 15 bp, Homo sapiens
tcaaacccacactgc

SEQ ID NO: 1489108 - DNA, 15 bp, Homo sapiens
ttcaaacccacactg

SEQ ID NO: 1489109 - DNA, 15 bp, Homo sapiens
gttcaaacccacact

SEQ ID NO: 1489110 - DNA, 15 bp, Homo sapiens
tgttcaaacccacac

SEQ ID NO: 1489111 - DNA, 15 bp, Homo sapiens
atgttcaaacccaca

SEQ ID NO: 1489112 - DNA, 15 bp, Homo sapiens
catgttcaaacccac

SEQ ID NO: 1489113 - DNA, 15 bp, Homo sapiens
acatgttcaaaccca

SEQ ID NO: 1489114 - DNA, 15 bp, Homo sapiens
cacatgttcaaaccc

SEQ ID NO: 1489115 - DNA, 15 bp, Homo sapiens
ccacatgttcaaacc

SEQ ID NO: 1489116 - DNA, 15 bp, Homo sapiens
cccacatgttcaaac

SEQ ID NO: 1489117 - DNA, 15 bp, Homo sapiens
acccacatgttcaaa

SEQ ID NO: 1489118 - DNA, 15 bp, Homo sapiens
cacccacatgttcaa

SEQ ID NO: 1489119 - DNA, 15 bp, Homo sapiens
ccacccacatgttca

SEQ ID NO: 1489120 - DNA, 15 bp, Homo sapiens
cccacccacatgttc

SEQ ID NO: 1489121 - DNA, 15 bp, Homo sapiens
acccacccacatgtt

SEQ ID NO: 1489122 - DNA, 15 bp, Homo sapiens
cacccacccacatgt

SEQ ID NO: 1489123 - DNA, 15 bp, Homo sapiens
gcacccacccacatg

SEQ ID NO: 1489124 - DNA, 15 bp, Homo sapiens
tgcacccacccacat

SEQ ID NO: 1489125 - DNA, 15 bp, Homo sapiens
ttgcacccacccaca

SEQ ID NO: 1489126 - DNA, 15 bp, Homo sapiens
cttgcacccacccac

SEQ ID NO: 1489127 - DNA, 15 bp, Homo sapiens
gcttgcacccaccca

SEQ ID NO: 1489128 - DNA, 15 bp, Homo sapiens
tgcttgcacccaccc

SEQ ID NO: 1489129 - DNA, 15 bp, Homo sapiens
atgcttgcacccacc

SEQ ID NO: 1489130 - DNA, 15 bp, Homo sapiens
catgcttgcacccac

SEQ ID NO: 1489131 - DNA, 15 bp, Homo sapiens
acatgcttgcaccca

SEQ ID NO: 1489132 - DNA, 15 bp, Homo sapiens
cacatgcttgcaccc

SEQ ID NO: 1489133 - DNA, 15 bp, Homo sapiens
tcacatgcttgcacc

SEQ ID NO: 1489134 - DNA, 15 bp, Homo sapiens
ctcacatgcttgcac

SEQ ID NO: 1489135 - DNA, 15 bp, Homo sapiens
actcacatgcttgca

SEQ ID NO: 1489136 - DNA, 15 bp, Homo sapiens
cactcacatgcttgc

SEQ ID NO: 1489137 - DNA, 15 bp, Homo sapiens
ccactcacatgcttg

SEQ ID NO: 1489138 - DNA, 15 bp, Homo sapiens
cccactcacatgctt

SEQ ID NO: 1489139 - DNA, 15 bp, Homo sapiens
gacacacccactcac

SEQ ID NO: 1489140 - DNA, 15 bp, Homo sapiens
cgacacacccactca

SEQ ID NO: 1489141 - DNA, 15 bp, Homo sapiens
acgacacacccactc

SEQ ID NO: 1489142 - DNA, 15 bp, Homo sapiens
cacgacacacccact

SEQ ID NO: 1489143 - DNA, 15 bp, Homo sapiens
acacgacacacccac

SEQ ID NO: 1489144 - DNA, 15 bp, Homo sapiens
cacacgacacaccca

SEQ ID NO: 1489145 - DNA, 15 bp, Homo sapiens
ccacacgacacaccc

SEQ ID NO: 1489146 - DNA, 15 bp, Homo sapiens
cccacacgacacacc

SEQ ID NO: 1489147 - DNA, 15 bp, Homo sapiens
acccacacgacacac

SEQ ID NO: 1489148 - DNA, 15 bp, Homo sapiens
cacccacacgacaca

SEQ ID NO: 1489149 - DNA, 15 bp, Homo sapiens
gcacccacacgacac

SEQ ID NO: 1489150 - DNA, 15 bp, Homo sapiens
ggcacccacacgaca

SEQ ID NO: 1489151 - DNA, 15 bp, Homo sapiens
tggcacccacacgac

SEQ ID NO: 1489152 - DNA, 15 bp, Homo sapiens
ctggcacccacacga

SEQ ID NO: 1489153 - DNA, 15 bp, Homo sapiens
actggcacccacacg

SEQ ID NO: 1489154 - DNA, 15 bp, Homo sapiens
cactggcacccacac

SEQ ID NO: 1489155 - DNA, 15 bp, Homo sapiens
acactggcacccaca

SEQ ID NO: 1489156 - DNA, 15 bp, Homo sapiens
cacactggcacccac

SEQ ID NO: 1489157 - DNA, 15 bp, Homo sapiens
acacactggcaccca

SEQ ID NO: 1489158 - DNA, 15 bp, Homo sapiens
cacacactggcaccc

SEQ ID NO: 1489159 - DNA, 15 bp, Homo sapiens
ccacacactggcacc

SEQ ID NO: 1489160 - DNA, 15 bp, Homo sapiens
cccacacactggcac

SEQ ID NO: 1489161 - DNA, 15 bp, Homo sapiens
ccccacacactggca

SEQ ID NO: 1489162 - DNA, 15 bp, Homo sapiens
cccccacacactggc

SEQ ID NO: 1489163 - DNA, 15 bp, Homo sapiens
gcccccacacactgg

SEQ ID NO: 1489164 - DNA, 15 bp, Homo sapiens
tgcccccacacactg

SEQ ID NO: 1489165 - DNA, 15 bp, Homo sapiens
atgcccccacacact

SEQ ID NO: 1489166 - DNA, 15 bp, Homo sapiens
catgcccccacacac

SEQ ID NO: 1489167 - DNA, 15 bp, Homo sapiens
acatgcccccacaca

SEQ ID NO: 1489168 - DNA, 15 bp, Homo sapiens
aacatgcccccacac

SEQ ID NO: 1489169 - DNA, 15 bp, Homo sapiens
taacatgcccccaca

SEQ ID NO: 1489170 - DNA, 15 bp, Homo sapiens
ctaacatgcccccac

SEQ ID NO: 1489171 - DNA, 15 bp, Homo sapiens
actaacatgccccca

SEQ ID NO: 1489172 - DNA, 15 bp, Homo sapiens
cactaacatgccccc

SEQ ID NO: 1489173 - DNA, 15 bp, Homo sapiens
tcactaacatgcccc

SEQ ID NO: 1489174 - DNA, 15 bp, Homo sapiens
ttcactaacatgccc

SEQ ID NO: 1489175 - DNA, 15 bp, Homo sapiens
attcactaacatgcc

SEQ ID NO: 1489176 - DNA, 15 bp, Homo sapiens
cattcactaacatgc

SEQ ID NO: 1489177 - DNA, 15 bp, Homo sapiens
tcattcactaacatg

SEQ ID NO: 1489178 - DNA, 15 bp, Homo sapiens
ctcattcactaacat

SEQ ID NO: 1489179 - DNA, 15 bp, Homo sapiens
actcattcactaaca

SEQ ID NO: 1489180 - DNA, 15 bp, Homo sapiens
cactcattcactaac

SEQ ID NO: 1489181 - DNA, 15 bp, Homo sapiens
acactcattcactaa

SEQ ID NO: 1489182 - DNA, 15 bp, Homo sapiens
cacactcattcacta

SEQ ID NO: 1489183 - DNA, 15 bp, Homo sapiens
acacactcattcact

SEQ ID NO: 1489184 - DNA, 15 bp, Homo sapiens
acatgctcacacact

SEQ ID NO: 1489185 - DNA, 15 bp, Homo sapiens
cacatgctcacacac

SEQ ID NO: 1489186 - DNA, 15 bp, Homo sapiens
actcacacacatgct

SEQ ID NO: 1489187 - DNA, 15 bp, Homo sapiens
acactcacacacatg

SEQ ID NO: 1489188 - DNA, 15 bp, Homo sapiens
cacactcacacacat

SEQ ID NO: 1489189 - DNA, 15 bp, Homo sapiens
tcacactcacacaca

SEQ ID NO: 1489190 - DNA, 15 bp, Homo sapiens
ctcacactcacacac

SEQ ID NO: 1489191 - DNA, 15 bp, Homo sapiens
gctcacactcacaca

SEQ ID NO: 1489192 - DNA, 15 bp, Homo sapiens
agctcacactcacac

SEQ ID NO: 1489193 - DNA, 15 bp, Homo sapiens
cagctcacactcaca

SEQ ID NO: 1489194 - DNA, 15 bp, Homo sapiens
ccagctcacactcac

SEQ ID NO: 1489195 - DNA, 15 bp, Homo sapiens
accagctcacactca

SEQ ID NO: 1489196 - DNA, 15 bp, Homo sapiens
caccagctcacactc

SEQ ID NO: 1489197 - DNA, 15 bp, Homo sapiens
gcaccagctcacact

SEQ ID NO: 1489198 - DNA, 15 bp, Homo sapiens
tgcaccagctcacac

SEQ ID NO: 1489199 - DNA, 15 bp, Homo sapiens
atgcaccagctcaca

SEQ ID NO: 1489200 - DNA, 15 bp, Homo sapiens
aatgcaccagctcac

SEQ ID NO: 1489201 - DNA, 15 bp, Homo sapiens
caatgcaccagctca

SEQ ID NO: 1489202 - DNA, 15 bp, Homo sapiens
acaatgcaccagctc

SEQ ID NO: 1489203 - DNA, 15 bp, Homo sapiens
cacaatgcaccagct

SEQ ID NO: 1489204 - DNA, 15 bp, Homo sapiens
acacaatgcaccagc

SEQ ID NO: 1489205 - DNA, 15 bp, Homo sapiens
cacacaatgcaccag

SEQ ID NO: 1489206 - DNA, 15 bp, Homo sapiens
ccacacaatgcacca

SEQ ID NO: 1489207 - DNA, 15 bp, Homo sapiens
cccacacaatgcacc

SEQ ID NO: 1489208 - DNA, 15 bp, Homo sapiens
acccacacaatgcac

SEQ ID NO: 1489209 - DNA, 15 bp, Homo sapiens
cacccacacaatgca

SEQ ID NO: 1489210 - DNA, 15 bp, Homo sapiens
acacccacacaatgc

SEQ ID NO: 1489211 - DNA, 15 bp, Homo sapiens
cacacccacacaatg

SEQ ID NO: 1489212 - DNA, 15 bp, Homo sapiens
acacacccacacaat

SEQ ID NO: 1489213 - DNA, 15 bp, Homo sapiens
cacacacccacacaa

SEQ ID NO: 1489214 - DNA, 15 bp, Homo sapiens
tcacacacccacaca

SEQ ID NO: 1489215 - DNA, 15 bp, Homo sapiens
ctcacacacccacac

SEQ ID NO: 1489216 - DNA, 15 bp, Homo sapiens
tctcacacacccaca

SEQ ID NO: 1489217 - DNA, 15 bp, Homo sapiens
tttctcacacaccca

SEQ ID NO: 1489218 - DNA, 15 bp, Homo sapiens
ctttctcacacaccc

SEQ ID NO: 1489219 - DNA, 15 bp, Homo sapiens
actttctcacacacc

SEQ ID NO: 1489220 - DNA, 15 bp, Homo sapiens
cactttctcacacac

SEQ ID NO: 1489221 - DNA, 15 bp, Homo sapiens
tcactttctcacaca

SEQ ID NO: 1489222 - DNA, 15 bp, Homo sapiens
gtcactttctcacac

SEQ ID NO: 1489223 - DNA, 15 bp, Homo sapiens
tgtcactttctcaca

SEQ ID NO: 1489224 - DNA, 15 bp, Homo sapiens
ctgtcactttctcac

SEQ ID NO: 1489225 - DNA, 15 bp, Homo sapiens
actgtcactttctca

SEQ ID NO: 1489226 - DNA, 15 bp, Homo sapiens
cactgtcactttctc

SEQ ID NO: 1489227 - DNA, 15 bp, Homo sapiens
acactgtcactttct

SEQ ID NO: 1489228 - DNA, 15 bp, Homo sapiens
cacactgtcactttc

SEQ ID NO: 1489229 - DNA, 15 bp, Homo sapiens
acacactgtcacttt

SEQ ID NO: 1489230 - DNA, 15 bp, Homo sapiens
cacacactgtcactt

SEQ ID NO: 1489231 - DNA, 15 bp, Homo sapiens
tcacacactgtcact

SEQ ID NO: 1489232 - DNA, 15 bp, Homo sapiens
ctcacacactgtcac

SEQ ID NO: 1489233 - DNA, 15 bp, Homo sapiens
cctcacacactgtca

SEQ ID NO: 1489234 - DNA, 15 bp, Homo sapiens
ccctcacacactgtc

SEQ ID NO: 1489235 - DNA, 15 bp, Homo sapiens
gccctcacacactgt

SEQ ID NO: 1489236 - DNA, 15 bp, Homo sapiens
tgccctcacacactg

SEQ ID NO: 1489237 - DNA, 15 bp, Homo sapiens
ctgccctcacacact

SEQ ID NO: 1489238 - DNA, 15 bp, Homo sapiens
tctgccctcacacac

SEQ ID NO: 1489239 - DNA, 15 bp, Homo sapiens
atctgccctcacaca

SEQ ID NO: 1489240 - DNA, 15 bp, Homo sapiens
catctgccctcacac

SEQ ID NO: 1489241 - DNA, 15 bp, Homo sapiens
acatctgccctcaca

SEQ ID NO: 1489242 - DNA, 15 bp, Homo sapiens
cacatctgccctcac

SEQ ID NO: 1489243 - DNA, 15 bp, Homo sapiens
ccacatctgccctca

SEQ ID NO: 1489244 - DNA, 15 bp, Homo sapiens
cccacatctgccctc

SEQ ID NO: 1489245 - DNA, 15 bp, Homo sapiens
acccacatctgccct

SEQ ID NO: 1489246 - DNA, 15 bp, Homo sapiens
cacccacatctgccc

SEQ ID NO: 1489247 - DNA, 15 bp, Homo sapiens
acacccacatctgcc

SEQ ID NO: 1489248 - DNA, 15 bp, Homo sapiens
cacacccacatctgc

SEQ ID NO: 1489249 - DNA, 15 bp, Homo sapiens
tcacacccacatctg

SEQ ID NO: 1489250 - DNA, 15 bp, Homo sapiens
ttcacacccacatct

SEQ ID NO: 1489251 - DNA, 15 bp, Homo sapiens
attcacacccacatc

SEQ ID NO: 1489252 - DNA, 15 bp, Homo sapiens
cattcacacccacat

SEQ ID NO: 1489253 - DNA, 15 bp, Homo sapiens
acattcacacccaca

SEQ ID NO: 1489254 - DNA, 15 bp, Homo sapiens
gcacattcacaccca

SEQ ID NO: 1489255 - DNA, 15 bp, Homo sapiens
tgcacattcacaccc

SEQ ID NO: 1489256 - DNA, 15 bp, Homo sapiens
ttgcacattcacacc

SEQ ID NO: 1489257 - DNA, 15 bp, Homo sapiens
cttgcacattcacac

SEQ ID NO: 1489258 - DNA, 15 bp, Homo sapiens
acttgcacattcaca

SEQ ID NO: 1489259 - DNA, 15 bp, Homo sapiens
cacttgcacattcac

SEQ ID NO: 1489260 - DNA, 15 bp, Homo sapiens
ccacttgcacattca

SEQ ID NO: 1489261 - DNA, 15 bp, Homo sapiens
cccacttgcacattc

SEQ ID NO: 1489262 - DNA, 15 bp, Homo sapiens
acccacttgcacatt

SEQ ID NO: 1489263 - DNA, 15 bp, Homo sapiens
cacccacttgcacat

SEQ ID NO: 1489264 - DNA, 15 bp, Homo sapiens
ccacccacttgcaca

SEQ ID NO: 1489265 - DNA, 15 bp, Homo sapiens
cccacccacttgcac

SEQ ID NO: 1489266 - DNA, 15 bp, Homo sapiens
acccacccacttgca

SEQ ID NO: 1489267 - DNA, 15 bp, Homo sapiens
cacccacccacttgc

SEQ ID NO: 1489268 - DNA, 15 bp, Homo sapiens
acacccacccacttg

SEQ ID NO: 1489269 - DNA, 15 bp, Homo sapiens
cacacccacccactt

SEQ ID NO: 1489270 - DNA, 15 bp, Homo sapiens
ccacacccacccact

SEQ ID NO: 1489271 - DNA, 15 bp, Homo sapiens
cccacacccacccac

SEQ ID NO: 1489272 - DNA, 15 bp, Homo sapiens
acccacacccaccca

SEQ ID NO: 1489273 - DNA, 15 bp, Homo sapiens
cacccacacccaccc

SEQ ID NO: 1489274 - DNA, 15 bp, Homo sapiens
gcacccacacccacc

SEQ ID NO: 1489275 - DNA, 15 bp, Homo sapiens
tgcacccacacccac

SEQ ID NO: 1489276 - DNA, 15 bp, Homo sapiens
ttgcacccacaccca

SEQ ID NO: 1489277 - DNA, 15 bp, Homo sapiens
attgcacccacaccc

SEQ ID NO: 1489278 - DNA, 15 bp, Homo sapiens
gattgcacccacacc

SEQ ID NO: 1489279 - DNA, 15 bp, Homo sapiens
agattgcacccacac

SEQ ID NO: 1489280 - DNA, 15 bp, Homo sapiens
cagattgcacccaca

SEQ ID NO: 1489281 - DNA, 15 bp, Homo sapiens
ccagattgcacccac

SEQ ID NO: 1489282 - DNA, 15 bp, Homo sapiens
gccagattgcaccca

SEQ ID NO: 1489283 - DNA, 15 bp, Homo sapiens
cgccagattgcaccc

SEQ ID NO: 1489284 - DNA, 15 bp, Homo sapiens
acgccagattgcacc

SEQ ID NO: 1489285 - DNA, 15 bp, Homo sapiens
aacgccagattgcac

SEQ ID NO: 1489286 - DNA, 15 bp, Homo sapiens
aaacgccagattgca

SEQ ID NO: 1489287 - DNA, 15 bp, Homo sapiens
caaacgccagattgc

SEQ ID NO: 1489288 - DNA, 15 bp, Homo sapiens
ccaaacgccagattg

SEQ ID NO: 1489289 - DNA, 15 bp, Homo sapiens
cccaaacgccagatt

SEQ ID NO: 1489290 - DNA, 15 bp, Homo sapiens
acccaaacgccagat

SEQ ID NO: 1489291 - DNA, 15 bp, Homo sapiens
cacccaaacgccaga

SEQ ID NO: 1489292 - DNA, 15 bp, Homo sapiens
gcacccaaacgccag

SEQ ID NO: 1489293 - DNA, 15 bp, Homo sapiens
tgcacccaaacgcca

SEQ ID NO: 1489294 - DNA, 15 bp, Homo sapiens
atgcacccaaacgcc

SEQ ID NO: 1489295 - DNA, 15 bp, Homo sapiens
aatgcacccaaacgc

SEQ ID NO: 1489296 - DNA, 15 bp, Homo sapiens
caatgcacccaaacg

SEQ ID NO: 1489297 - DNA, 15 bp, Homo sapiens
gcaatgcacccaaac

SEQ ID NO: 1489298 - DNA, 15 bp, Homo sapiens
tgcaatgcacccaaa

SEQ ID NO: 1489299 - DNA, 15 bp, Homo sapiens
gtgcaatgcacccaa

SEQ ID NO: 1489300 - DNA, 15 bp, Homo sapiens
tgtgcaatgcaccca

SEQ ID NO: 1489301 - DNA, 15 bp, Homo sapiens
ttgtgcaatgcaccc

SEQ ID NO: 1489302 - DNA, 15 bp, Homo sapiens
cttgtgcaatgcacc

SEQ ID NO: 1489303 - DNA, 15 bp, Homo sapiens
gcttgtgcaatgcac

SEQ ID NO: 1489304 - DNA, 15 bp, Homo sapiens
tgcttgtgcaatgca

SEQ ID NO: 1489305 - DNA, 15 bp, Homo sapiens
atgcttgtgcaatgc

SEQ ID NO: 1489306 - DNA, 15 bp, Homo sapiens
catgcttgtgcaatg

SEQ ID NO: 1489307 - DNA, 15 bp, Homo sapiens
acatgcttgtgcaat

SEQ ID NO: 1489308 - DNA, 15 bp, Homo sapiens
cacatgcttgtgcaa

SEQ ID NO: 1489309 - DNA, 15 bp, Homo sapiens
acacatgcttgtgca

SEQ ID NO: 1489310 - DNA, 15 bp, Homo sapiens
cacacatgcttgtgc

SEQ ID NO: 1489311 - DNA, 15 bp, Homo sapiens
acacacatgcttgtg

SEQ ID NO: 1489312 - DNA, 15 bp, Homo sapiens
cacacacatgcttgt

SEQ ID NO: 1489313 - DNA, 15 bp, Homo sapiens
tcacacacatgcttg

SEQ ID NO: 1489314 - DNA, 15 bp, Homo sapiens
ctcacacacatgctt

SEQ ID NO: 1489315 - DNA, 15 bp, Homo sapiens
acatgctcacacaca

SEQ ID NO: 1489316 - DNA, 15 bp, Homo sapiens
ccacatgctcacaca

SEQ ID NO: 1489317 - DNA, 15 bp, Homo sapiens
cccacatgctcacac

SEQ ID NO: 1489318 - DNA, 15 bp, Homo sapiens
acccacatgctcaca

SEQ ID NO: 1489319 - DNA, 15 bp, Homo sapiens
cacccacatgctcac

SEQ ID NO: 1489320 - DNA, 15 bp, Homo sapiens
acacccacatgctca

SEQ ID NO: 1489321 - DNA, 15 bp, Homo sapiens
cacacccacatgctc

SEQ ID NO: 1489322 - DNA, 15 bp, Homo sapiens
tcacacccacatgct

SEQ ID NO: 1489323 - DNA, 15 bp, Homo sapiens
ctcacacccacatgc

SEQ ID NO: 1489324 - DNA, 15 bp, Homo sapiens
actcacacccacatg

SEQ ID NO: 1489325 - DNA, 15 bp, Homo sapiens
gactcacacccacat

SEQ ID NO: 1489326 - DNA, 15 bp, Homo sapiens
agactcacacccaca

SEQ ID NO: 1489327 - DNA, 15 bp, Homo sapiens
cagactcacacccac

SEQ ID NO: 1489328 - DNA, 15 bp, Homo sapiens
acagactcacaccca

SEQ ID NO: 1489329 - DNA, 15 bp, Homo sapiens
cacagactcacaccc

SEQ ID NO: 1489330 - DNA, 15 bp, Homo sapiens
tcacagactcacacc

SEQ ID NO: 1489331 - DNA, 15 bp, Homo sapiens
ctcacagactcacac

SEQ ID NO: 1489332 - DNA, 15 bp, Homo sapiens
gctcacagactcaca

SEQ ID NO: 1489333 - DNA, 15 bp, Homo sapiens
tgctcacagactcac

SEQ ID NO: 1489334 - DNA, 15 bp, Homo sapiens
gtgctcacagactca

SEQ ID NO: 1489335 - DNA, 15 bp, Homo sapiens
cgtgctcacagactc

SEQ ID NO: 1489336 - DNA, 15 bp, Homo sapiens
acgtgctcacagact

SEQ ID NO: 1489337 - DNA, 15 bp, Homo sapiens
cacgtgctcacagac

SEQ ID NO: 1489338 - DNA, 15 bp, Homo sapiens
gcacgtgctcacaga

SEQ ID NO: 1489339 - DNA, 15 bp, Homo sapiens
tgcacgtgctcacag

SEQ ID NO: 1489340 - DNA, 15 bp, Homo sapiens
atgcacgtgctcaca

SEQ ID NO: 1489341 - DNA, 15 bp, Homo sapiens
aatgcacgtgctcac

SEQ ID NO: 1489342 - DNA, 15 bp, Homo sapiens
caatgcacgtgctca

SEQ ID NO: 1489343 - DNA, 15 bp, Homo sapiens
acaatgcacgtgctc

SEQ ID NO: 1489344 - DNA, 15 bp, Homo sapiens
cacaatgcacgtgct

SEQ ID NO: 1489345 - DNA, 15 bp, Homo sapiens
acacaatgcacgtgc

SEQ ID NO: 1489346 - DNA, 15 bp, Homo sapiens
cacacaatgcacgtg

SEQ ID NO: 1489347 - DNA, 15 bp, Homo sapiens
acacacaatgcacgt

SEQ ID NO: 1489348 - DNA, 15 bp, Homo sapiens
cacacacaatgcacg

SEQ ID NO: 1489349 - DNA, 15 bp, Homo sapiens
gcacacacaatgcac

SEQ ID NO: 1489350 - DNA, 15 bp, Homo sapiens
tgcacacacaatgca

SEQ ID NO: 1489351 - DNA, 15 bp, Homo sapiens
atgcacacacaatgc

SEQ ID NO: 1489352 - DNA, 15 bp, Homo sapiens
catgcacacacaatg

SEQ ID NO: 1489353 - DNA, 15 bp, Homo sapiens
acatgcacacacaat

SEQ ID NO: 1489354 - DNA, 15 bp, Homo sapiens
cacatgcacacacaa

SEQ ID NO: 1489355 - DNA, 15 bp, Homo sapiens
gtcacacacatgcac

SEQ ID NO: 1489356 - DNA, 15 bp, Homo sapiens
tgtcacacacatgca

SEQ ID NO: 1489357 - DNA, 15 bp, Homo sapiens
ctgtcacacacatgc

SEQ ID NO: 1489358 - DNA, 15 bp, Homo sapiens
gctgtcacacacatg

SEQ ID NO: 1489359 - DNA, 15 bp, Homo sapiens
tgctgtcacacacat

SEQ ID NO: 1489360 - DNA, 15 bp, Homo sapiens
atgctgtcacacaca

SEQ ID NO: 1489361 - DNA, 15 bp, Homo sapiens
catgctgtcacacac

SEQ ID NO: 1489362 - DNA, 15 bp, Homo sapiens
acatgctgtcacaca

SEQ ID NO: 1489363 - DNA, 15 bp, Homo sapiens
cacatgctgtcacac

SEQ ID NO: 1489364 - DNA, 15 bp, Homo sapiens
acacatgctgtcaca

SEQ ID NO: 1489365 - DNA, 15 bp, Homo sapiens
cacacatgctgtcac

SEQ ID NO: 1489366 - DNA, 15 bp, Homo sapiens
acacacatgctgtca

SEQ ID NO: 1489367 - DNA, 15 bp, Homo sapiens
cacacacatgctgtc

SEQ ID NO: 1489368 - DNA, 15 bp, Homo sapiens
tcacacacatgctgt

SEQ ID NO: 1489369 - DNA, 15 bp, Homo sapiens
atcacacacatgctg

SEQ ID NO: 1489370 - DNA, 15 bp, Homo sapiens
gatcacacacatgct

SEQ ID NO: 1489371 - DNA, 15 bp, Homo sapiens
tgatcacacacatgc

SEQ ID NO: 1489372 - DNA, 15 bp, Homo sapiens
ctgatcacacacatg

SEQ ID NO: 1489373 - DNA, 15 bp, Homo sapiens
tctgatcacacacat

SEQ ID NO: 1489374 - DNA, 15 bp, Homo sapiens
atctgatcacacaca

SEQ ID NO: 1489375 - DNA, 15 bp, Homo sapiens
tatctgatcacacac

SEQ ID NO: 1489376 - DNA, 15 bp, Homo sapiens
gtatctgatcacaca

SEQ ID NO: 1489377 - DNA, 15 bp, Homo sapiens
tgtatctgatcacac

SEQ ID NO: 1489378 - DNA, 15 bp, Homo sapiens
atgtatctgatcaca

SEQ ID NO: 1489379 - DNA, 15 bp, Homo sapiens
aatgtatctgatcac

SEQ ID NO: 1489380 - DNA, 15 bp, Homo sapiens
caatgtatctgatca

SEQ ID NO: 1489381 - DNA, 15 bp, Homo sapiens
acaatgtatctgatc

SEQ ID NO: 1489382 - DNA, 15 bp, Homo sapiens
tacaatgtatctgat

SEQ ID NO: 1489383 - DNA, 15 bp, Homo sapiens
gtacaatgtatctga

SEQ ID NO: 1489384 - DNA, 15 bp, Homo sapiens
cgtacaatgtatctg

SEQ ID NO: 1489385 - DNA, 15 bp, Homo sapiens
acgtacaatgtatct

SEQ ID NO: 1489386 - DNA, 15 bp, Homo sapiens
cacgtacaatgtatc

SEQ ID NO: 1489387 - DNA, 15 bp, Homo sapiens
acacgtacaatgtat

SEQ ID NO: 1489388 - DNA, 15 bp, Homo sapiens
cacacgtacaatgta

SEQ ID NO: 1489389 - DNA, 15 bp, Homo sapiens
tcacacgtacaatgt

SEQ ID NO: 1489390 - DNA, 15 bp, Homo sapiens
ctcacacgtacaatg

SEQ ID NO: 1489391 - DNA, 15 bp, Homo sapiens
gctcacacgtacaat

SEQ ID NO: 1489392 - DNA, 15 bp, Homo sapiens
cgctcacacgtacaa

SEQ ID NO: 1489393 - DNA, 15 bp, Homo sapiens
acgctcacacgtaca

SEQ ID NO: 1489394 - DNA, 15 bp, Homo sapiens
cacgctcacacgtac

SEQ ID NO: 1489395 - DNA, 15 bp, Homo sapiens
acacgctcacacgta

SEQ ID NO: 1489396 - DNA, 15 bp, Homo sapiens
cacacgctcacacgt

SEQ ID NO: 1489397 - DNA, 15 bp, Homo sapiens
acacacgctcacacg

SEQ ID NO: 1489398 - DNA, 15 bp, Homo sapiens
cacacacgctcacac

SEQ ID NO: 1489399 - DNA, 15 bp, Homo sapiens
ccacacacgctcaca

SEQ ID NO: 1489400 - DNA, 15 bp, Homo sapiens
cccacacacgctcac

SEQ ID NO: 1489401 - DNA, 15 bp, Homo sapiens
acccacacacgctca

SEQ ID NO: 1489402 - DNA, 15 bp, Homo sapiens
cacccacacacgctc

SEQ ID NO: 1489403 - DNA, 15 bp, Homo sapiens
acacccacacacgct

SEQ ID NO: 1489404 - DNA, 15 bp, Homo sapiens
cacacccacacacgc

SEQ ID NO: 1489405 - DNA, 15 bp, Homo sapiens
tcacacccacacacg

SEQ ID NO: 1489406 - DNA, 15 bp, Homo sapiens
ctcacacccacacac

SEQ ID NO: 1489407 - DNA, 15 bp, Homo sapiens
gctcacacccacaca

SEQ ID NO: 1489408 - DNA, 15 bp, Homo sapiens
tgctcacacccacac

SEQ ID NO: 1489409 - DNA, 15 bp, Homo sapiens
atgctcacacccaca

SEQ ID NO: 1489410 - DNA, 15 bp, Homo sapiens
catgctcacacccac

SEQ ID NO: 1489411 - DNA, 15 bp, Homo sapiens
tcatgctcacaccca

SEQ ID NO: 1489412 - DNA, 15 bp, Homo sapiens
ctcatgctcacaccc

SEQ ID NO: 1489413 - DNA, 15 bp, Homo sapiens
tcactcatgctcaca

SEQ ID NO: 1489414 - DNA, 15 bp, Homo sapiens
ctcactcatgctcac

SEQ ID NO: 1489415 - DNA, 15 bp, Homo sapiens
actcactcatgctca

SEQ ID NO: 1489416 - DNA, 15 bp, Homo sapiens
cactcactcatgctc

SEQ ID NO: 1489417 - DNA, 15 bp, Homo sapiens
ccactcactcatgct

SEQ ID NO: 1489418 - DNA, 15 bp, Homo sapiens
accactcactcatgc

SEQ ID NO: 1489419 - DNA, 15 bp, Homo sapiens
aaccactcactcatg

SEQ ID NO: 1489420 - DNA, 15 bp, Homo sapiens
caaccactcactcat

SEQ ID NO: 1489421 - DNA, 15 bp, Homo sapiens
gcaaccactcactca

SEQ ID NO: 1489422 - DNA, 15 bp, Homo sapiens
tgcaaccactcactc

SEQ ID NO: 1489423 - DNA, 15 bp, Homo sapiens
atgcaaccactcact

SEQ ID NO: 1489424 - DNA, 15 bp, Homo sapiens
aatgcaaccactcac

SEQ ID NO: 1489425 - DNA, 15 bp, Homo sapiens
caatgcaaccactca

SEQ ID NO: 1489426 - DNA, 15 bp, Homo sapiens
acaatgcaaccactc

SEQ ID NO: 1489427 - DNA, 15 bp, Homo sapiens
cacaatgcaaccact

SEQ ID NO: 1489428 - DNA, 15 bp, Homo sapiens
acacaatgcaaccac

SEQ ID NO: 1489429 - DNA, 15 bp, Homo sapiens
aacacaatgcaacca

SEQ ID NO: 1489430 - DNA, 15 bp, Homo sapiens
aaacacaatgcaacc

SEQ ID NO: 1489431 - DNA, 15 bp, Homo sapiens
taaacacaatgcaac

SEQ ID NO: 1489432 - DNA, 15 bp, Homo sapiens
ttaaacacaatgcaa

SEQ ID NO: 1489433 - DNA, 15 bp, Homo sapiens
cttaaacacaatgca

SEQ ID NO: 1489434 - DNA, 15 bp, Homo sapiens
gcttaaacacaatgc

SEQ ID NO: 1489435 - DNA, 15 bp, Homo sapiens
tgcttaaacacaatg

SEQ ID NO: 1489436 - DNA, 15 bp, Homo sapiens
atgcttaaacacaat

SEQ ID NO: 1489437 - DNA, 15 bp, Homo sapiens
catgcttaaacacaa

SEQ ID NO: 1489438 - DNA, 15 bp, Homo sapiens
tcatgcttaaacaca

SEQ ID NO: 1489439 - DNA, 15 bp, Homo sapiens
ctcatgcttaaacac

SEQ ID NO: 1489440 - DNA, 15 bp, Homo sapiens
actcatgcttaaaca

SEQ ID NO: 1489441 - DNA, 15 bp, Homo sapiens
cactcatgcttaaac

SEQ ID NO: 1489442 - DNA, 15 bp, Homo sapiens
acactcatgcttaaa

SEQ ID NO: 1489443 - DNA, 15 bp, Homo sapiens
cacactcatgcttaa

SEQ ID NO: 1489444 - DNA, 15 bp, Homo sapiens
tcacactcatgctta

SEQ ID NO: 1489445 - DNA, 15 bp, Homo sapiens
ctcacactcatgctt

SEQ ID NO: 1489446 - DNA, 15 bp, Homo sapiens
actcacactcatgct

SEQ ID NO: 1489447 - DNA, 15 bp, Homo sapiens
cactcacactcatgc

SEQ ID NO: 1489448 - DNA, 15 bp, Homo sapiens
ccactcacactcatg

SEQ ID NO: 1489449 - DNA, 15 bp, Homo sapiens
cccactcacactcat

SEQ ID NO: 1489450 - DNA, 15 bp, Homo sapiens
acccactcacactca

SEQ ID NO: 1489451 - DNA, 15 bp, Homo sapiens
cacccactcacactc

SEQ ID NO: 1489452 - DNA, 15 bp, Homo sapiens
acacccactcacact

SEQ ID NO: 1489453 - DNA, 15 bp, Homo sapiens
ttctcacacccactc

SEQ ID NO: 1489454 - DNA, 15 bp, Homo sapiens
cttctcacacccact

SEQ ID NO: 1489455 - DNA, 15 bp, Homo sapiens
ccttctcacacccac

SEQ ID NO: 1489456 - DNA, 15 bp, Homo sapiens
accttctcacaccca

SEQ ID NO: 1489457 - DNA, 15 bp, Homo sapiens
caccttctcacaccc

SEQ ID NO: 1489458 - DNA, 15 bp, Homo sapiens
gcaccttctcacacc

SEQ ID NO: 1489459 - DNA, 15 bp, Homo sapiens
cgcaccttctcacac

SEQ ID NO: 1489460 - DNA, 15 bp, Homo sapiens
acgcaccttctcaca

SEQ ID NO: 1489461 - DNA, 15 bp, Homo sapiens
aacgcaccttctcac

SEQ ID NO: 1489462 - DNA, 15 bp, Homo sapiens
caacgcaccttctca

SEQ ID NO: 1489463 - DNA, 15 bp, Homo sapiens
acaacgcaccttctc

SEQ ID NO: 1489464 - DNA, 15 bp, Homo sapiens
cacaacgcaccttct

SEQ ID NO: 1489465 - DNA, 15 bp, Homo sapiens
acacaacgcaccttc

SEQ ID NO: 1489466 - DNA, 15 bp, Homo sapiens
cacacaacgcacctt

SEQ ID NO: 1489467 - DNA, 15 bp, Homo sapiens
tcacacaacgcacct

SEQ ID NO: 1489468 - DNA, 15 bp, Homo sapiens
ctcacacaacgcacc

SEQ ID NO: 1489469 - DNA, 15 bp, Homo sapiens
gctcacacaacgcac

SEQ ID NO: 1489470 - DNA, 15 bp, Homo sapiens
tgctcacacaacgca

SEQ ID NO: 1489471 - DNA, 15 bp, Homo sapiens
gtgctcacacaacgc

SEQ ID NO: 1489472 - DNA, 15 bp, Homo sapiens
cgtgctcacacaacg

SEQ ID NO: 1489473 - DNA, 15 bp, Homo sapiens
acgtgctcacacaac

SEQ ID NO: 1489474 - DNA, 15 bp, Homo sapiens
cacgtgctcacacaa

SEQ ID NO: 1489475 - DNA, 15 bp, Homo sapiens
acacgtgctcacaca

SEQ ID NO: 1489476 - DNA, 15 bp, Homo sapiens
cacacgtgctcacac

SEQ ID NO: 1489477 - DNA, 15 bp, Homo sapiens
acacacgtgctcaca

SEQ ID NO: 1489478 - DNA, 15 bp, Homo sapiens
cacacacgtgctcac

SEQ ID NO: 1489479 - DNA, 15 bp, Homo sapiens
tcacacacgtgctca

SEQ ID NO: 1489480 - DNA, 15 bp, Homo sapiens
ctcacacacgtgctc

SEQ ID NO: 1489481 - DNA, 15 bp, Homo sapiens
actcacacacgtgct

SEQ ID NO: 1489482 - DNA, 15 bp, Homo sapiens
cactcacacacgtgc

SEQ ID NO: 1489483 - DNA, 15 bp, Homo sapiens
ccactcacacacgtg

SEQ ID NO: 1489484 - DNA, 15 bp, Homo sapiens
cccactcacacacgt

SEQ ID NO: 1489485 - DNA, 15 bp, Homo sapiens
acccactcacacacg

SEQ ID NO: 1489486 - DNA, 15 bp, Homo sapiens
ccacacccactcaca

SEQ ID NO: 1489487 - DNA, 15 bp, Homo sapiens
cccacacccactcac

SEQ ID NO: 1489488 - DNA, 15 bp, Homo sapiens
gcccacacccactca

SEQ ID NO: 1489489 - DNA, 15 bp, Homo sapiens
cgcccacacccactc

SEQ ID NO: 1489490 - DNA, 15 bp, Homo sapiens
acgcccacacccact

SEQ ID NO: 1489491 - DNA, 15 bp, Homo sapiens
cacgcccacacccac

SEQ ID NO: 1489492 - DNA, 15 bp, Homo sapiens
tcacgcccacaccca

SEQ ID NO: 1489493 - DNA, 15 bp, Homo sapiens
atcacgcccacaccc

SEQ ID NO: 1489494 - DNA, 15 bp, Homo sapiens
catcacgcccacacc

SEQ ID NO: 1489495 - DNA, 15 bp, Homo sapiens
acatcacgcccacac

SEQ ID NO: 1489496 - DNA, 15 bp, Homo sapiens
cacatcacgcccaca

SEQ ID NO: 1489497 - DNA, 15 bp, Homo sapiens
acacatcacgcccac

SEQ ID NO: 1489498 - DNA, 15 bp, Homo sapiens
cacacatcacgccca

SEQ ID NO: 1489499 - DNA, 15 bp, Homo sapiens
tcacacatcacgccc

SEQ ID NO: 1489500 - DNA, 15 bp, Homo sapiens
ctcacacatcacgcc

SEQ ID NO: 1489501 - DNA, 15 bp, Homo sapiens
gctcacacatcacgc

SEQ ID NO: 1489502 - DNA, 15 bp, Homo sapiens
tgctcacacatcacg

SEQ ID NO: 1489503 - DNA, 15 bp, Homo sapiens
catgctcacacatca

SEQ ID NO: 1489504 - DNA, 15 bp, Homo sapiens
acatgctcacacatc

SEQ ID NO: 1489505 - DNA, 15 bp, Homo sapiens
tacacatgctcacac

SEQ ID NO: 1489506 - DNA, 15 bp, Homo sapiens
ttacacatgctcaca

SEQ ID NO: 1489507 - DNA, 15 bp, Homo sapiens
cttacacatgctcac

SEQ ID NO: 1489508 - DNA, 15 bp, Homo sapiens
ccttacacatgctca

SEQ ID NO: 1489509 - DNA, 15 bp, Homo sapiens
tccttacacatgctc

SEQ ID NO: 1489510 - DNA, 15 bp, Homo sapiens
ctccttacacatgct

SEQ ID NO: 1489511 - DNA, 15 bp, Homo sapiens
cctccttacacatgc

SEQ ID NO: 1489512 - DNA, 15 bp, Homo sapiens
acctccttacacatg

SEQ ID NO: 1489513 - DNA, 15 bp, Homo sapiens
cacctccttacacat

SEQ ID NO: 1489514 - DNA, 15 bp, Homo sapiens
acacctccttacaca

SEQ ID NO: 1489515 - DNA, 15 bp, Homo sapiens
cacacctccttacac

SEQ ID NO: 1489516 - DNA, 15 bp, Homo sapiens
ccacacctccttaca

SEQ ID NO: 1489517 - DNA, 15 bp, Homo sapiens
cccacacctccttac

SEQ ID NO: 1489518 - DNA, 15 bp, Homo sapiens
acccacacctcctta

SEQ ID NO: 1489519 - DNA, 15 bp, Homo sapiens
cacccacacctcctt

SEQ ID NO: 1489520 - DNA, 15 bp, Homo sapiens
gcacccacacctcct

SEQ ID NO: 1489521 - DNA, 15 bp, Homo sapiens
cgcacccacacctcc

SEQ ID NO: 1489522 - DNA, 15 bp, Homo sapiens
acgcacccacacctc

SEQ ID NO: 1489523 - DNA, 15 bp, Homo sapiens
aacgcacccacacct

SEQ ID NO: 1489524 - DNA, 15 bp, Homo sapiens
taacgcacccacacc

SEQ ID NO: 1489525 - DNA, 15 bp, Homo sapiens
ataacgcacccacac

SEQ ID NO: 1489526 - DNA, 15 bp, Homo sapiens
cataacgcacccaca

SEQ ID NO: 1489527 - DNA, 15 bp, Homo sapiens
acataacgcacccac

SEQ ID NO: 1489528 - DNA, 15 bp, Homo sapiens
cacataacgcaccca

SEQ ID NO: 1489529 - DNA, 15 bp, Homo sapiens
ccacataacgcaccc

SEQ ID NO: 1489530 - DNA, 15 bp, Homo sapiens
tccacataacgcacc

SEQ ID NO: 1489531 - DNA, 15 bp, Homo sapiens
atccacataacgcac

SEQ ID NO: 1489532 - DNA, 15 bp, Homo sapiens
catccacataacgca

SEQ ID NO: 1489533 - DNA, 15 bp, Homo sapiens
acatccacataacgc

SEQ ID NO: 1489534 - DNA, 15 bp, Homo sapiens
cacatccacataacg

SEQ ID NO: 1489535 - DNA, 15 bp, Homo sapiens
tcacatccacataac

SEQ ID NO: 1489536 - DNA, 15 bp, Homo sapiens
ctcacatccacataa

SEQ ID NO: 1489537 - DNA, 15 bp, Homo sapiens
gctcacatccacata

SEQ ID NO: 1489538 - DNA, 15 bp, Homo sapiens
tgctcacatccacat

SEQ ID NO: 1489539 - DNA, 15 bp, Homo sapiens
atgctcacatccaca

SEQ ID NO: 1489540 - DNA, 15 bp, Homo sapiens
catgctcacatccac

SEQ ID NO: 1489541 - DNA, 15 bp, Homo sapiens
acatgctcacatcca

SEQ ID NO: 1489542 - DNA, 15 bp, Homo sapiens
cacatgctcacatcc

SEQ ID NO: 1489543 - DNA, 15 bp, Homo sapiens
tacacacacatgctc

SEQ ID NO: 1489544 - DNA, 15 bp, Homo sapiens
gtacacacacatgct

SEQ ID NO: 1489545 - DNA, 15 bp, Homo sapiens
agtacacacacatgc

SEQ ID NO: 1489546 - DNA, 15 bp, Homo sapiens
aagtacacacacatg

SEQ ID NO: 1489547 - DNA, 15 bp, Homo sapiens
caagtacacacacat

SEQ ID NO: 1489548 - DNA, 15 bp, Homo sapiens
ccaagtacacacaca

SEQ ID NO: 1489549 - DNA, 15 bp, Homo sapiens
accaagtacacacac

SEQ ID NO: 1489550 - DNA, 15 bp, Homo sapiens
caccaagtacacaca

SEQ ID NO: 1489551 - DNA, 15 bp, Homo sapiens
gcaccaagtacacac

SEQ ID NO: 1489552 - DNA, 15 bp, Homo sapiens
tgcaccaagtacaca

SEQ ID NO: 1489553 - DNA, 15 bp, Homo sapiens
gtgcaccaagtacac

SEQ ID NO: 1489554 - DNA, 15 bp, Homo sapiens
agtgcaccaagtaca

SEQ ID NO: 1489555 - DNA, 15 bp, Homo sapiens
cagtgcaccaagtac

SEQ ID NO: 1489556 - DNA, 15 bp, Homo sapiens
acagtgcaccaagta

SEQ ID NO: 1489557 - DNA, 15 bp, Homo sapiens
cacagtgcaccaagt

SEQ ID NO: 1489558 - DNA, 15 bp, Homo sapiens
acacagtgcaccaag

SEQ ID NO: 1489559 - DNA, 15 bp, Homo sapiens
cacacagtgcaccaa

SEQ ID NO: 1489560 - DNA, 15 bp, Homo sapiens
ccacacagtgcacca

SEQ ID NO: 1489561 - DNA, 15 bp, Homo sapiens
cccacacagtgcacc

SEQ ID NO: 1489562 - DNA, 15 bp, Homo sapiens
acccacacagtgcac

SEQ ID NO: 1489563 - DNA, 15 bp, Homo sapiens
cacccacacagtgca

SEQ ID NO: 1489564 - DNA, 15 bp, Homo sapiens
gcacccacacagtgc

SEQ ID NO: 1489565 - DNA, 15 bp, Homo sapiens
cgcacccacacagtg

SEQ ID NO: 1489566 - DNA, 15 bp, Homo sapiens
tcgcacccacacagt

SEQ ID NO: 1489567 - DNA, 15 bp, Homo sapiens
ctcgcacccacacag

SEQ ID NO: 1489568 - DNA, 15 bp, Homo sapiens
actcgcacccacaca

SEQ ID NO: 1489569 - DNA, 15 bp, Homo sapiens
cactcgcacccacac

SEQ ID NO: 1489570 - DNA, 15 bp, Homo sapiens
acactcgcacccaca

SEQ ID NO: 1489571 - DNA, 15 bp, Homo sapiens
cacactcgcacccac

SEQ ID NO: 1489572 - DNA, 15 bp, Homo sapiens
acacactcgcaccca

SEQ ID NO: 1489573 - DNA, 15 bp, Homo sapiens
cacacactcgcaccc

SEQ ID NO: 1489574 - DNA, 15 bp, Homo sapiens
gcacacactcgcacc

SEQ ID NO: 1489575 - DNA, 15 bp, Homo sapiens
cgcacacactcgcac

SEQ ID NO: 1489576 - DNA, 15 bp, Homo sapiens
gcgcacacactcgca

SEQ ID NO: 1489577 - DNA, 15 bp, Homo sapiens
cgcgcacacactcgc

SEQ ID NO: 1489578 - DNA, 15 bp, Homo sapiens
acgcgcacacactcg

SEQ ID NO: 1489579 - DNA, 15 bp, Homo sapiens
cacgcgcacacactc

SEQ ID NO: 1489580 - DNA, 15 bp, Homo sapiens
ccacgcgcacacact

SEQ ID NO: 1489581 - DNA, 15 bp, Homo sapiens
cccacgcgcacacac

SEQ ID NO: 1489582 - DNA, 15 bp, Homo sapiens
ccccacgcgcacaca

SEQ ID NO: 1489583 - DNA, 15 bp, Homo sapiens
cccccacgcgcacac

SEQ ID NO: 1489584 - DNA, 15 bp, Homo sapiens
ccccccacgcgcaca

SEQ ID NO: 1489585 - DNA, 15 bp, Homo sapiens
cccccccacgcgcac

SEQ ID NO: 1489586 - DNA, 15 bp, Homo sapiens
ccccccccacgcgca

SEQ ID NO: 1489587 - DNA, 15 bp, Homo sapiens
accccccccacgcgc

SEQ ID NO: 1489588 - DNA, 15 bp, Homo sapiens
caccccccccacgcg

SEQ ID NO: 1489589 - DNA, 15 bp, Homo sapiens
tcaccccccccacgc

SEQ ID NO: 1489590 - DNA, 15 bp, Homo sapiens
ctcaccccccccacg

SEQ ID NO: 1489591 - DNA, 15 bp, Homo sapiens
actcaccccccccac

SEQ ID NO: 1489592 - DNA, 15 bp, Homo sapiens
cactcacccccccca

SEQ ID NO: 1489593 - DNA, 15 bp, Homo sapiens
gcactcacccccccc

SEQ ID NO: 1489594 - DNA, 15 bp, Homo sapiens
cgcactcaccccccc

SEQ ID NO: 1489595 - DNA, 15 bp, Homo sapiens
acgcactcacccccc

SEQ ID NO: 1489596 - DNA, 15 bp, Homo sapiens
cacgcactcaccccc

SEQ ID NO: 1489597 - DNA, 15 bp, Homo sapiens
ccacgcactcacccc

SEQ ID NO: 1489598 - DNA, 15 bp, Homo sapiens
cccacgcactcaccc

SEQ ID NO: 1489599 - DNA, 15 bp, Homo sapiens
acccacgcactcacc

SEQ ID NO: 1489600 - DNA, 15 bp, Homo sapiens
cacccacgcactcac

SEQ ID NO: 1489601 - DNA, 15 bp, Homo sapiens
acacccacgcactca

SEQ ID NO: 1489602 - DNA, 15 bp, Homo sapiens
cacacccacgcactc

SEQ ID NO: 1489603 - DNA, 15 bp, Homo sapiens
tcacacccacgcact

SEQ ID NO: 1489604 - DNA, 15 bp, Homo sapiens
ctcacacccacgcac

SEQ ID NO: 1489605 - DNA, 15 bp, Homo sapiens
actcacacccacgca

SEQ ID NO: 1489606 - DNA, 15 bp, Homo sapiens
cactcacacccacgc

SEQ ID NO: 1489607 - DNA, 15 bp, Homo sapiens
ccactcacacccacg

SEQ ID NO: 1489608 - DNA, 15 bp, Homo sapiens
cccactcacacccac

SEQ ID NO: 1489609 - DNA, 15 bp, Homo sapiens
acccactcacaccca

SEQ ID NO: 1489610 - DNA, 15 bp, Homo sapiens
cacccactcacaccc

SEQ ID NO: 1489611 - DNA, 15 bp, Homo sapiens
acacccactcacacc

SEQ ID NO: 1489612 - DNA, 15 bp, Homo sapiens
acacacacccactca

SEQ ID NO: 1489613 - DNA, 15 bp, Homo sapiens
cacacacacccactc

SEQ ID NO: 1489614 - DNA, 15 bp, Homo sapiens
tcacacacacccact

SEQ ID NO: 1489615 - DNA, 15 bp, Homo sapiens
ttcacacacacccac

SEQ ID NO: 1489616 - DNA, 15 bp, Homo sapiens
gttcacacacaccca

SEQ ID NO: 1489617 - DNA, 15 bp, Homo sapiens
cgttcacacacaccc

SEQ ID NO: 1489618 - DNA, 15 bp, Homo sapiens
gcgttcacacacacc

SEQ ID NO: 1489619 - DNA, 15 bp, Homo sapiens
ggcgttcacacacac

SEQ ID NO: 1489620 - DNA, 15 bp, Homo sapiens
aggcgttcacacaca

SEQ ID NO: 1489621 - DNA, 15 bp, Homo sapiens
caggcgttcacacac

SEQ ID NO: 1489622 - DNA, 15 bp, Homo sapiens
acaggcgttcacaca

SEQ ID NO: 1489623 - DNA, 15 bp, Homo sapiens
cacaggcgttcacac

SEQ ID NO: 1489624 - DNA, 15 bp, Homo sapiens
acacaggcgttcaca

SEQ ID NO: 1489625 - DNA, 15 bp, Homo sapiens
cacacaggcgttcac

SEQ ID NO: 1489626 - DNA, 15 bp, Homo sapiens
acacacaggcgttca

SEQ ID NO: 1489627 - DNA, 15 bp, Homo sapiens
cacacacaggcgttc

SEQ ID NO: 1489628 - DNA, 15 bp, Homo sapiens
gcacacacaggcgtt

SEQ ID NO: 1489629 - DNA, 15 bp, Homo sapiens
cgcacacacaggcgt

SEQ ID NO: 1489630 - DNA, 15 bp, Homo sapiens
gcgcacacacaggcg

SEQ ID NO: 1489631 - DNA, 15 bp, Homo sapiens
tgcgcacacacaggc

SEQ ID NO: 1489632 - DNA, 15 bp, Homo sapiens
ttgcgcacacacagg

SEQ ID NO: 1489633 - DNA, 15 bp, Homo sapiens
cttgcgcacacacag

SEQ ID NO: 1489634 - DNA, 15 bp, Homo sapiens
gcttgcgcacacaca

SEQ ID NO: 1489635 - DNA, 15 bp, Homo sapiens
tgcttgcgcacacac

SEQ ID NO: 1489636 - DNA, 15 bp, Homo sapiens
atgcttgcgcacaca

SEQ ID NO: 1489637 - DNA, 15 bp, Homo sapiens
catgcttgcgcacac

SEQ ID NO: 1489638 - DNA, 15 bp, Homo sapiens
acatgcttgcgcaca

SEQ ID NO: 1489639 - DNA, 15 bp, Homo sapiens
cacatgcttgcgcac

SEQ ID NO: 1489640 - DNA, 15 bp, Homo sapiens
acacatgcttgcgca

SEQ ID NO: 1489641 - DNA, 15 bp, Homo sapiens
cacacatgcttgcgc

SEQ ID NO: 1489642 - DNA, 15 bp, Homo sapiens
acacacatgcttgcg

SEQ ID NO: 1489643 - DNA, 15 bp, Homo sapiens
cacacacatgcttgc

SEQ ID NO: 1489644 - DNA, 15 bp, Homo sapiens
acacacacatgcttg

SEQ ID NO: 1489645 - DNA, 15 bp, Homo sapiens
acacacacacatgct

SEQ ID NO: 1489646 - DNA, 15 bp, Homo sapiens
cacactcacacacac

SEQ ID NO: 1489647 - DNA, 15 bp, Homo sapiens
ccacactcacacaca

SEQ ID NO: 1489648 - DNA, 15 bp, Homo sapiens
cccacactcacacac

SEQ ID NO: 1489649 - DNA, 15 bp, Homo sapiens
acccacactcacaca

SEQ ID NO: 1489650 - DNA, 15 bp, Homo sapiens
cacccacactcacac

SEQ ID NO: 1489651 - DNA, 15 bp, Homo sapiens
gcacccacactcaca

SEQ ID NO: 1489652 - DNA, 15 bp, Homo sapiens
cgcacccacactcac

SEQ ID NO: 1489653 - DNA, 15 bp, Homo sapiens
acgcacccacactca

SEQ ID NO: 1489654 - DNA, 15 bp, Homo sapiens
aacgcacccacactc

SEQ ID NO: 1489655 - DNA, 15 bp, Homo sapiens
caacgcacccacact

SEQ ID NO: 1489656 - DNA, 15 bp, Homo sapiens
acaacgcacccacac

SEQ ID NO: 1489657 - DNA, 15 bp, Homo sapiens
cacaacgcacccaca

SEQ ID NO: 1489658 - DNA, 15 bp, Homo sapiens
acacaacgcacccac

SEQ ID NO: 1489659 - DNA, 15 bp, Homo sapiens
tacacaacgcaccca

SEQ ID NO: 1489660 - DNA, 15 bp, Homo sapiens
atacacaacgcaccc

SEQ ID NO: 1489661 - DNA, 15 bp, Homo sapiens
catacacaacgcacc

SEQ ID NO: 1489662 - DNA, 15 bp, Homo sapiens
gcatacacaacgcac

SEQ ID NO: 1489663 - DNA, 15 bp, Homo sapiens
tgcatacacaacgca

SEQ ID NO: 1489664 - DNA, 15 bp, Homo sapiens
gtgcatacacaacgc

SEQ ID NO: 1489665 - DNA, 15 bp, Homo sapiens
cgtgcatacacaacg

SEQ ID NO: 1489666 - DNA, 15 bp, Homo sapiens
gcgtgcatacacaac

SEQ ID NO: 1489667 - DNA, 15 bp, Homo sapiens
ggcgtgcatacacaa

SEQ ID NO: 1489668 - DNA, 15 bp, Homo sapiens
gggcgtgcatacaca

SEQ ID NO: 1489669 - DNA, 15 bp, Homo sapiens
cgggcgtgcatacac

SEQ ID NO: 1489670 - DNA, 15 bp, Homo sapiens
ccgggcgtgcataca

SEQ ID NO: 1489671 - DNA, 15 bp, Homo sapiens
gccgggcgtgcatac

SEQ ID NO: 1489672 - DNA, 15 bp, Homo sapiens
cgccgggcgtgcata

SEQ ID NO: 1489673 - DNA, 15 bp, Homo sapiens
gcgccgggcgtgcat

SEQ ID NO: 1489674 - DNA, 15 bp, Homo sapiens
cgcgccgggcgtgca

SEQ ID NO: 1489675 - DNA, 15 bp, Homo sapiens
ccgcgccgggcgtgc

SEQ ID NO: 1489676 - DNA, 15 bp, Homo sapiens
cccgcgccgggcgtg

SEQ ID NO: 1489677 - DNA, 15 bp, Homo sapiens
gcccgcgccgggcgt

SEQ ID NO: 1489678 - DNA, 15 bp, Homo sapiens
agcccgcgccgggcg

SEQ ID NO: 1489679 - DNA, 15 bp, Homo sapiens
cagcccgcgccgggc

SEQ ID NO: 1489680 - DNA, 15 bp, Homo sapiens
ccagcccgcgccggg

SEQ ID NO: 1489681 - DNA, 15 bp, Homo sapiens
cccagcccgcgccgg

SEQ ID NO: 1489682 - DNA, 15 bp, Homo sapiens
ccccagcccgcgccg

SEQ ID NO: 1489683 - DNA, 15 bp, Homo sapiens
gccccagcccgcgcc

SEQ ID NO: 1489684 - DNA, 15 bp, Homo sapiens
tgccccagcccgcgc

SEQ ID NO: 1489685 - DNA, 15 bp, Homo sapiens
ctgccccagcccgcg

SEQ ID NO: 1489686 - DNA, 15 bp, Homo sapiens
gctgccccagcccgc

SEQ ID NO: 1489687 - DNA, 15 bp, Homo sapiens
ggctgccccagcccg

SEQ ID NO: 1489688 - DNA, 15 bp, Homo sapiens
cggctgccccagccc

SEQ ID NO: 1489689 - DNA, 15 bp, Homo sapiens
acggctgccccagcc

SEQ ID NO: 1489690 - DNA, 15 bp, Homo sapiens
aacggctgccccagc

SEQ ID NO: 1489691 - DNA, 15 bp, Homo sapiens
gaacggctgccccag

SEQ ID NO: 1489692 - DNA, 15 bp, Homo sapiens
ggaacggctgcccca

SEQ ID NO: 1489693 - DNA, 15 bp, Homo sapiens
gggaacggctgcccc

SEQ ID NO: 1489694 - DNA, 15 bp, Homo sapiens
ggggaacggctgccc

SEQ ID NO: 1489695 - DNA, 15 bp, Homo sapiens
aggggaacggctgcc

SEQ ID NO: 1489696 - DNA, 15 bp, Homo sapiens
caggggaacggctgc

SEQ ID NO: 1489697 - DNA, 15 bp, Homo sapiens
gcaggggaacggctg

SEQ ID NO: 1489698 - DNA, 15 bp, Homo sapiens
ggcaggggaacggct

SEQ ID NO: 1489699 - DNA, 15 bp, Homo sapiens
gggcaggggaacggc

SEQ ID NO: 1489700 - DNA, 15 bp, Homo sapiens
agggcaggggaacgg

SEQ ID NO: 1489701 - DNA, 15 bp, Homo sapiens
aagggcaggggaacg

SEQ ID NO: 1489702 - DNA, 15 bp, Homo sapiens
gaagggcaggggaac

SEQ ID NO: 1489703 - DNA, 15 bp, Homo sapiens
ggaagggcaggggaa

SEQ ID NO: 1489704 - DNA, 15 bp, Homo sapiens
gggaagggcagggga

SEQ ID NO: 1489705 - DNA, 15 bp, Homo sapiens
cgggaagggcagggg

SEQ ID NO: 1489706 - DNA, 15 bp, Homo sapiens
ccgggaagggcaggg

SEQ ID NO: 1489707 - DNA, 15 bp, Homo sapiens
gccgggaagggcagg

SEQ ID NO: 1489708 - DNA, 15 bp, Homo sapiens
ggccgggaagggcag

SEQ ID NO: 1489709 - DNA, 15 bp, Homo sapiens
tggccgggaagggca

SEQ ID NO: 1489710 - DNA, 15 bp, Homo sapiens
gtggccgggaagggc

SEQ ID NO: 1489711 - DNA, 15 bp, Homo sapiens
ggtggccgggaaggg

SEQ ID NO: 1489712 - DNA, 15 bp, Homo sapiens
gggtggccgggaagg

SEQ ID NO: 1489713 - DNA, 15 bp, Homo sapiens
ggggtggccgggaag

SEQ ID NO: 1489714 - DNA, 15 bp, Homo sapiens
cggggtggccgggaa

SEQ ID NO: 1489715 - DNA, 15 bp, Homo sapiens
acggggtggccggga

SEQ ID NO: 1489716 - DNA, 15 bp, Homo sapiens
gacggggtggccggg

SEQ ID NO: 1489717 - DNA, 15 bp, Homo sapiens
ggacggggtggccgg

SEQ ID NO: 1489718 - DNA, 15 bp, Homo sapiens
gggacggggtggccg

SEQ ID NO: 1489719 - DNA, 15 bp, Homo sapiens
ggggacggggtggcc

SEQ ID NO: 1489720 - DNA, 15 bp, Homo sapiens
cggggacggggtggc

SEQ ID NO: 1489721 - DNA, 15 bp, Homo sapiens
ccggggacggggtgg

SEQ ID NO: 1489722 - DNA, 15 bp, Homo sapiens
cccggggacggggtg

SEQ ID NO: 1489723 - DNA, 15 bp, Homo sapiens
gcccggggacggggt

SEQ ID NO: 1489724 - DNA, 15 bp, Homo sapiens
ggcccggggacgggg

SEQ ID NO: 1489725 - DNA, 15 bp, Homo sapiens
gggcccggggacggg

SEQ ID NO: 1489726 - DNA, 15 bp, Homo sapiens
ggggcccggggacgg

SEQ ID NO: 1489727 - DNA, 15 bp, Homo sapiens
aggggcccggggacg

SEQ ID NO: 1489728 - DNA, 15 bp, Homo sapiens
caggggcccggggac

SEQ ID NO: 1489729 - DNA, 15 bp, Homo sapiens
acaggggcccgggga

SEQ ID NO: 1489730 - DNA, 15 bp, Homo sapiens
cacaggggcccgggg

SEQ ID NO: 1489731 - DNA, 15 bp, Homo sapiens
gcacaggggcccggg

SEQ ID NO: 1489732 - DNA, 15 bp, Homo sapiens
cgcacaggggcccgg

SEQ ID NO: 1489733 - DNA, 15 bp, Homo sapiens
acgcacaggggcccg

SEQ ID NO: 1489734 - DNA, 15 bp, Homo sapiens
tacgcacaggggccc

SEQ ID NO: 1489735 - DNA, 15 bp, Homo sapiens
gtacgcacaggggcc

SEQ ID NO: 1489736 - DNA, 15 bp, Homo sapiens
cgtacgcacaggggc

SEQ ID NO: 1489737 - DNA, 15 bp, Homo sapiens
gcgtacgcacagggg

SEQ ID NO: 1489738 - DNA, 15 bp, Homo sapiens
tgcgtacgcacaggg

SEQ ID NO: 1489739 - DNA, 15 bp, Homo sapiens
ttgcgtacgcacagg

SEQ ID NO: 1489740 - DNA, 15 bp, Homo sapiens
cttgcgtacgcacag

SEQ ID NO: 1489741 - DNA, 15 bp, Homo sapiens
ccttgcgtacgcaca

SEQ ID NO: 1489742 - DNA, 15 bp, Homo sapiens
gccttgcgtacgcac

SEQ ID NO: 1489743 - DNA, 15 bp, Homo sapiens
cgccttgcgtacgca

SEQ ID NO: 1489744 - DNA, 15 bp, Homo sapiens
ccgccttgcgtacgc

SEQ ID NO: 1489745 - DNA, 15 bp, Homo sapiens
accgccttgcgtacg

SEQ ID NO: 1489746 - DNA, 15 bp, Homo sapiens
caccgccttgcgtac

SEQ ID NO: 1489747 - DNA, 15 bp, Homo sapiens
ccaccgccttgcgta

SEQ ID NO: 1489748 - DNA, 15 bp, Homo sapiens
cccaccgccttgcgt

SEQ ID NO: 1489749 - DNA, 15 bp, Homo sapiens
ccccaccgccttgcg

SEQ ID NO: 1489750 - DNA, 15 bp, Homo sapiens
cccccaccgccttgc

SEQ ID NO: 1489751 - DNA, 15 bp, Homo sapiens
gcccccaccgccttg

SEQ ID NO: 1489752 - DNA, 15 bp, Homo sapiens
cgcccccaccgcctt

SEQ ID NO: 1489753 - DNA, 15 bp, Homo sapiens
ccgcccccaccgcct

SEQ ID NO: 1489754 - DNA, 15 bp, Homo sapiens
gccgcccccaccgcc

SEQ ID NO: 1489755 - DNA, 15 bp, Homo sapiens
agccgcccccaccgc

SEQ ID NO: 1489756 - DNA, 15 bp, Homo sapiens
gagccgcccccaccg

SEQ ID NO: 1489757 - DNA, 15 bp, Homo sapiens
ggagccgcccccacc

SEQ ID NO: 1489758 - DNA, 15 bp, Homo sapiens
gggagccgcccccac

SEQ ID NO: 1489759 - DNA, 15 bp, Homo sapiens
tgggagccgccccca

SEQ ID NO: 1489760 - DNA, 15 bp, Homo sapiens
atgggagccgccccc

SEQ ID NO: 1489761 - DNA, 15 bp, Homo sapiens
catgggagccgcccc

SEQ ID NO: 1489762 - DNA, 15 bp, Homo sapiens
acatgggagccgccc

SEQ ID NO: 1489763 - DNA, 15 bp, Homo sapiens
cacatgggagccgcc

SEQ ID NO: 1489764 - DNA, 15 bp, Homo sapiens
ccacatgggagccgc

SEQ ID NO: 1489765 - DNA, 15 bp, Homo sapiens
cccacatgggagccg

SEQ ID NO: 1489766 - DNA, 15 bp, Homo sapiens
gcccacatgggagcc

SEQ ID NO: 1489767 - DNA, 15 bp, Homo sapiens
ggcccacatgggagc

SEQ ID NO: 1489768 - DNA, 15 bp, Homo sapiens
gggcccacatgggag

SEQ ID NO: 1489769 - DNA, 15 bp, Homo sapiens
ggggcccacatggga

SEQ ID NO: 1489770 - DNA, 15 bp, Homo sapiens
cggggcccacatggg

SEQ ID NO: 1489771 - DNA, 15 bp, Homo sapiens
ccggggcccacatgg

SEQ ID NO: 1489772 - DNA, 15 bp, Homo sapiens
cccggggcccacatg

SEQ ID NO: 1489773 - DNA, 15 bp, Homo sapiens
gcccggggcccacat

SEQ ID NO: 1489774 - DNA, 15 bp, Homo sapiens
ggcccggggcccaca

SEQ ID NO: 1489775 - DNA, 15 bp, Homo sapiens
gggcccggggcccac

SEQ ID NO: 1489776 - DNA, 15 bp, Homo sapiens
ggggcccggggccca

SEQ ID NO: 1489777 - DNA, 15 bp, Homo sapiens
gggggcccggggccc

SEQ ID NO: 1489778 - DNA, 15 bp, Homo sapiens
agggggcccggggcc

SEQ ID NO: 1489779 - DNA, 15 bp, Homo sapiens
gagggggcccggggc

SEQ ID NO: 1489780 - DNA, 15 bp, Homo sapiens
ggagggggcccgggg

SEQ ID NO: 1489781 - DNA, 15 bp, Homo sapiens
gggagggggcccggg

SEQ ID NO: 1489782 - DNA, 15 bp, Homo sapiens
tgggagggggcccgg

SEQ ID NO: 1489783 - DNA, 15 bp, Homo sapiens
gtgggagggggcccg

SEQ ID NO: 1489784 - DNA, 15 bp, Homo sapiens
ggtgggagggggccc

SEQ ID NO: 1489785 - DNA, 15 bp, Homo sapiens
cggtgggagggggcc

SEQ ID NO: 1489786 - DNA, 15 bp, Homo sapiens
ccggtgggagggggc

SEQ ID NO: 1489787 - DNA, 15 bp, Homo sapiens
cccggtgggaggggg

SEQ ID NO: 1489788 - DNA, 15 bp, Homo sapiens
gcccggtgggagggg

SEQ ID NO: 1489789 - DNA, 15 bp, Homo sapiens
ggcccggtgggaggg

SEQ ID NO: 1489790 - DNA, 15 bp, Homo sapiens
gggcccggtgggagg

SEQ ID NO: 1489791 - DNA, 15 bp, Homo sapiens
agggcccggtgggag

SEQ ID NO: 1489792 - DNA, 15 bp, Homo sapiens
gagggcccggtggga

SEQ ID NO: 1489793 - DNA, 15 bp, Homo sapiens
ggagggcccggtggg

SEQ ID NO: 1489794 - DNA, 15 bp, Homo sapiens
gggagggcccggtgg

SEQ ID NO: 1489795 - DNA, 15 bp, Homo sapiens
ggggagggcccggtg

SEQ ID NO: 1489796 - DNA, 15 bp, Homo sapiens
gggggagggcccggt

SEQ ID NO: 1489797 - DNA, 15 bp, Homo sapiens
ggggggagggcccgg

SEQ ID NO: 1489798 - DNA, 15 bp, Homo sapiens
gggggggagggcccg

SEQ ID NO: 1489799 - DNA, 15 bp, Homo sapiens
cgggggggagggccc

SEQ ID NO: 1489800 - DNA, 15 bp, Homo sapiens
gcgggggggagggcc

SEQ ID NO: 1489801 - DNA, 15 bp, Homo sapiens
tgcgggggggagggc

SEQ ID NO: 1489802 - DNA, 15 bp, Homo sapiens
ctgcgggggggaggg

SEQ ID NO: 1489803 - DNA, 15 bp, Homo sapiens
cctgcgggggggagg

SEQ ID NO: 1489804 - DNA, 15 bp, Homo sapiens
gcctgcgggggggag

SEQ ID NO: 1489805 - DNA, 15 bp, Homo sapiens
tgcctgcggggggga

SEQ ID NO: 1489806 - DNA, 15 bp, Homo sapiens
ctgcctgcggggggg

SEQ ID NO: 1489807 - DNA, 15 bp, Homo sapiens
gctgcctgcgggggg

SEQ ID NO: 1489808 - DNA, 15 bp, Homo sapiens
tgctgcctgcggggg

SEQ ID NO: 1489809 - DNA, 15 bp, Homo sapiens
ttgctgcctgcgggg

SEQ ID NO: 1489810 - DNA, 15 bp, Homo sapiens
cttgctgcctgcggg

SEQ ID NO: 1489811 - DNA, 15 bp, Homo sapiens
tcttgctgcctgcgg

SEQ ID NO: 1489812 - DNA, 15 bp, Homo sapiens
ttcttgctgcctgcg

SEQ ID NO: 1489813 - DNA, 15 bp, Homo sapiens
cttcttgctgcctgc

SEQ ID NO: 1489814 - DNA, 15 bp, Homo sapiens
tcttcttgctgcctg

SEQ ID NO: 1489815 - DNA, 15 bp, Homo sapiens
ttcttcttgctgcct

SEQ ID NO: 1489816 - DNA, 15 bp, Homo sapiens
cttcttcttgctgcc

SEQ ID NO: 1489817 - DNA, 15 bp, Homo sapiens
tcttcttcttgctgc

SEQ ID NO: 1489818 - DNA, 15 bp, Homo sapiens
atcttcttcttgctg

SEQ ID NO: 1489819 - DNA, 15 bp, Homo sapiens
gatcttcttcttgct

SEQ ID NO: 1489820 - DNA, 15 bp, Homo sapiens
ggatcttcttcttgc

SEQ ID NO: 1489821 - DNA, 15 bp, Homo sapiens
cggatcttcttcttg

SEQ ID NO: 1489822 - DNA, 15 bp, Homo sapiens
gcggatcttcttctt

SEQ ID NO: 1489823 - DNA, 15 bp, Homo sapiens
ggcggatcttcttct

SEQ ID NO: 1489824 - DNA, 15 bp, Homo sapiens
aggcggatcttcttc

SEQ ID NO: 1489825 - DNA, 15 bp, Homo sapiens
caggcggatcttctt

SEQ ID NO: 1489826 - DNA, 15 bp, Homo sapiens
acaggcggatcttct

SEQ ID NO: 1489827 - DNA, 15 bp, Homo sapiens
tacaggcggatcttc

SEQ ID NO: 1489828 - DNA, 15 bp, Homo sapiens
gtacaggcggatctt

SEQ ID NO: 1489829 - DNA, 15 bp, Homo sapiens
ggtacaggcggatct

SEQ ID NO: 1489830 - DNA, 15 bp, Homo sapiens
tggtacaggcggatc

SEQ ID NO: 1489831 - DNA, 15 bp, Homo sapiens
ctggtacaggcggat

SEQ ID NO: 1489832 - DNA, 15 bp, Homo sapiens
actggtacaggcgga

SEQ ID NO: 1489833 - DNA, 15 bp, Homo sapiens
aactggtacaggcgg

SEQ ID NO: 1489834 - DNA, 15 bp, Homo sapiens
gaactggtacaggcg

SEQ ID NO: 1489835 - DNA, 15 bp, Homo sapiens
ggaactggtacaggc

SEQ ID NO: 1489836 - DNA, 15 bp, Homo sapiens
aggaactggtacagg

SEQ ID NO: 1489837 - DNA, 15 bp, Homo sapiens
caggaactggtacag

SEQ ID NO: 1489838 - DNA, 15 bp, Homo sapiens
acaggaactggtaca

SEQ ID NO: 1489839 - DNA, 15 bp, Homo sapiens
aacaggaactggtac

SEQ ID NO: 1489840 - DNA, 15 bp, Homo sapiens
caacaggaactggta

SEQ ID NO: 1489841 - DNA, 15 bp, Homo sapiens
ccaacaggaactggt

SEQ ID NO: 1489842 - DNA, 15 bp, Homo sapiens
tccaacaggaactgg

SEQ ID NO: 1489843 - DNA, 15 bp, Homo sapiens
gtccaacaggaactg

SEQ ID NO: 1489844 - DNA, 15 bp, Homo sapiens
ggtccaacaggaact

SEQ ID NO: 1489845 - DNA, 15 bp, Homo sapiens
aggtccaacaggaac

SEQ ID NO: 1489846 - DNA, 15 bp, Homo sapiens
caggtccaacaggaa

SEQ ID NO: 1489847 - DNA, 15 bp, Homo sapiens
gcaggtccaacagga

SEQ ID NO: 1489848 - DNA, 15 bp, Homo sapiens
agcaggtccaacagg

SEQ ID NO: 1489849 - DNA, 15 bp, Homo sapiens
gagcaggtccaacag

SEQ ID NO: 1489850 - DNA, 15 bp, Homo sapiens
ggagcaggtccaaca

SEQ ID NO: 1489851 - DNA, 15 bp, Homo sapiens
cggagcaggtccaac

SEQ ID NO: 1489852 - DNA, 15 bp, Homo sapiens
gcggagcaggtccaa

SEQ ID NO: 1489853 - DNA, 15 bp, Homo sapiens
tgcggagcaggtcca

SEQ ID NO: 1489854 - DNA, 15 bp, Homo sapiens
ctgcggagcaggtcc

SEQ ID NO: 1489855 - DNA, 15 bp, Homo sapiens
gctgcggagcaggtc

SEQ ID NO: 1489856 - DNA, 15 bp, Homo sapiens
cgctgcggagcaggt

SEQ ID NO: 1489857 - DNA, 15 bp, Homo sapiens
ccgctgcggagcagg

SEQ ID NO: 1489858 - DNA, 15 bp, Homo sapiens
gccgctgcggagcag

SEQ ID NO: 1489859 - DNA, 15 bp, Homo sapiens
cgccgctgcggagca

SEQ ID NO: 1489860 - DNA, 15 bp, Homo sapiens
tcgccgctgcggagc

SEQ ID NO: 1489861 - DNA, 15 bp, Homo sapiens
gtcgccgctgcggag

SEQ ID NO: 1489862 - DNA, 15 bp, Homo sapiens
tgtcgccgctgcgga

SEQ ID NO: 1489863 - DNA, 15 bp, Homo sapiens
atgtcgccgctgcgg

SEQ ID NO: 1489864 - DNA, 15 bp, Homo sapiens
catgtcgccgctgcg

SEQ ID NO: 1489865 - DNA, 15 bp, Homo sapiens
tcatgtcgccgctgc

SEQ ID NO: 1489866 - DNA, 15 bp, Homo sapiens
ttcatgtcgccgctg

SEQ ID NO: 1489867 - DNA, 15 bp, Homo sapiens
cttcatgtcgccgct

SEQ ID NO: 1489868 - DNA, 15 bp, Homo sapiens
ccttcatgtcgccgc

SEQ ID NO: 1489869 - DNA, 15 bp, Homo sapiens
tccttcatgtcgccg

SEQ ID NO: 1489870 - DNA, 15 bp, Homo sapiens
gtccttcatgtcgcc

SEQ ID NO: 1489871 - DNA, 15 bp, Homo sapiens
tgtccttcatgtcgc

SEQ ID NO: 1489872 - DNA, 15 bp, Homo sapiens
ctgtccttcatgtcg

SEQ ID NO: 1489873 - DNA, 15 bp, Homo sapiens
gctgtccttcatgtc

SEQ ID NO: 1489874 - DNA, 15 bp, Homo sapiens
tgctgtccttcatgt

SEQ ID NO: 1489875 - DNA, 15 bp, Homo sapiens
atgctgtccttcatg

SEQ ID NO: 1489876 - DNA, 15 bp, Homo sapiens
gatgctgtccttcat

SEQ ID NO: 1489877 - DNA, 15 bp, Homo sapiens
agatgctgtccttca

SEQ ID NO: 1489878 - DNA, 15 bp, Homo sapiens
cagatgctgtccttc

SEQ ID NO: 1489879 - DNA, 15 bp, Homo sapiens
ccagatgctgtcctt

SEQ ID NO: 1489880 - DNA, 15 bp, Homo sapiens
accagatgctgtcct

SEQ ID NO: 1489881 - DNA, 15 bp, Homo sapiens
caccagatgctgtcc

SEQ ID NO: 1489882 - DNA, 15 bp, Homo sapiens
ccaccagatgctgtc

SEQ ID NO: 1489883 - DNA, 15 bp, Homo sapiens
cccaccagatgctgt

SEQ ID NO: 1489884 - DNA, 15 bp, Homo sapiens
acccaccagatgctg

SEQ ID NO: 1489885 - DNA, 15 bp, Homo sapiens
cacccaccagatgct

SEQ ID NO: 1489886 - DNA, 15 bp, Homo sapiens
ccacccaccagatgc

SEQ ID NO: 1489887 - DNA, 15 bp, Homo sapiens
tccacccaccagatg

SEQ ID NO: 1489888 - DNA, 15 bp, Homo sapiens
gtccacccaccagat

SEQ ID NO: 1489889 - DNA, 15 bp, Homo sapiens
tgtccacccaccaga

SEQ ID NO: 1489890 - DNA, 15 bp, Homo sapiens
ttgtccacccaccag

SEQ ID NO: 1489891 - DNA, 15 bp, Homo sapiens
cttgtccacccacca

SEQ ID NO: 1489892 - DNA, 15 bp, Homo sapiens
ccttgtccacccacc

SEQ ID NO: 1489893 - DNA, 15 bp, Homo sapiens
tccttgtccacccac

SEQ ID NO: 1489894 - DNA, 15 bp, Homo sapiens
gtccttgtccaccca

SEQ ID NO: 1489895 - DNA, 15 bp, Homo sapiens
tgtccttgtccaccc

SEQ ID NO: 1489896 - DNA, 15 bp, Homo sapiens
ttgtccttgtccacc

SEQ ID NO: 1489897 - DNA, 15 bp, Homo sapiens
cttgtccttgtccac

SEQ ID NO: 1489898 - DNA, 15 bp, Homo sapiens
ccttgtccttgtcca

SEQ ID NO: 1489899 - DNA, 15 bp, Homo sapiens
cccttgtccttgtcc

SEQ ID NO: 1489900 - DNA, 15 bp, Homo sapiens
gcccttgtccttgtc

SEQ ID NO: 1489901 - DNA, 15 bp, Homo sapiens
tgcccttgtccttgt

SEQ ID NO: 1489902 - DNA, 15 bp, Homo sapiens
gtgcccttgtccttg

SEQ ID NO: 1489903 - DNA, 15 bp, Homo sapiens
ggtgcccttgtcctt

SEQ ID NO: 1489904 - DNA, 15 bp, Homo sapiens
aggtgcccttgtcct

SEQ ID NO: 1489905 - DNA, 15 bp, Homo sapiens
aaggtgcccttgtcc

SEQ ID NO: 1489906 - DNA, 15 bp, Homo sapiens
gaaggtgcccttgtc

SEQ ID NO: 1489907 - DNA, 15 bp, Homo sapiens
ggaaggtgcccttgt

SEQ ID NO: 1489908 - DNA, 15 bp, Homo sapiens
tggaaggtgcccttg

SEQ ID NO: 1489909 - DNA, 15 bp, Homo sapiens
ctggaaggtgccctt

SEQ ID NO: 1489910 - DNA, 15 bp, Homo sapiens
actggaaggtgccct

SEQ ID NO: 1489911 - DNA, 15 bp, Homo sapiens
aactggaaggtgccc

SEQ ID NO: 1489912 - DNA, 15 bp, Homo sapiens
gaactggaaggtgcc

SEQ ID NO: 1489913 - DNA, 15 bp, Homo sapiens
agaactggaaggtgc

SEQ ID NO: 1489914 - DNA, 15 bp, Homo sapiens
gagaactggaaggtg

SEQ ID NO: 1489915 - DNA, 15 bp, Homo sapiens
cgagaactggaaggt

SEQ ID NO: 1489916 - DNA, 15 bp, Homo sapiens
acgagaactggaagg

SEQ ID NO: 1489917 - DNA, 15 bp, Homo sapiens
gacgagaactggaag

SEQ ID NO: 1489918 - DNA, 15 bp, Homo sapiens
ggacgagaactggaa

SEQ ID NO: 1489919 - DNA, 15 bp, Homo sapiens
tggacgagaactgga

SEQ ID NO: 1489920 - DNA, 15 bp, Homo sapiens
ttggacgagaactgg

SEQ ID NO: 1489921 - DNA, 15 bp, Homo sapiens
cttggacgagaactg

SEQ ID NO: 1489922 - DNA, 15 bp, Homo sapiens
gcttggacgagaact

SEQ ID NO: 1489923 - DNA, 15 bp, Homo sapiens
tgcttggacgagaac

SEQ ID NO: 1489924 - DNA, 15 bp, Homo sapiens
gtgcttggacgagaa

SEQ ID NO: 1489925 - DNA, 15 bp, Homo sapiens
tgtgcttggacgaga

SEQ ID NO: 1489926 - DNA, 15 bp, Homo sapiens
ttgtgcttggacgag

SEQ ID NO: 1489927 - DNA, 15 bp, Homo sapiens
cttgtgcttggacga

SEQ ID NO: 1489928 - DNA, 15 bp, Homo sapiens
ccttgtgcttggacg

SEQ ID NO: 1489929 - DNA, 15 bp, Homo sapiens
tccttgtgcttggac

SEQ ID NO: 1489930 - DNA, 15 bp, Homo sapiens
ctccttgtgcttgga

SEQ ID NO: 1489931 - DNA, 15 bp, Homo sapiens
cctccttgtgcttgg

SEQ ID NO: 1489932 - DNA, 15 bp, Homo sapiens
gcctccttgtgcttg

SEQ ID NO: 1489933 - DNA, 15 bp, Homo sapiens
cgcctccttgtgctt

SEQ ID NO: 1489934 - DNA, 15 bp, Homo sapiens
gcgcctccttgtgct

SEQ ID NO: 1489935 - DNA, 15 bp, Homo sapiens
agcgcctccttgtgc

SEQ ID NO: 1489936 - DNA, 15 bp, Homo sapiens
cagcgcctccttgtg

SEQ ID NO: 1489937 - DNA, 15 bp, Homo sapiens
ccagcgcctccttgt

SEQ ID NO: 1489938 - DNA, 15 bp, Homo sapiens
gccagcgcctccttg

SEQ ID NO: 1489939 - DNA, 15 bp, Homo sapiens
cgccagcgcctcctt

SEQ ID NO: 1489940 - DNA, 15 bp, Homo sapiens
gcgccagcgcctcct

SEQ ID NO: 1489941 - DNA, 15 bp, Homo sapiens
tgcgccagcgcctcc

SEQ ID NO: 1489942 - DNA, 15 bp, Homo sapiens
gtgcgccagcgcctc

SEQ ID NO: 1489943 - DNA, 15 bp, Homo sapiens
ggtgcgccagcgcct

SEQ ID NO: 1489944 - DNA, 15 bp, Homo sapiens
cggtgcgccagcgcc

SEQ ID NO: 1489945 - DNA, 15 bp, Homo sapiens
gcggtgcgccagcgc

SEQ ID NO: 1489946 - DNA, 15 bp, Homo sapiens
agcggtgcgccagcg

SEQ ID NO: 1489947 - DNA, 15 bp, Homo sapiens
cagcggtgcgccagc

SEQ ID NO: 1489948 - DNA, 15 bp, Homo sapiens
ccagcggtgcgccag

SEQ ID NO: 1489949 - DNA, 15 bp, Homo sapiens
cccagcggtgcgcca

SEQ ID NO: 1489950 - DNA, 15 bp, Homo sapiens
ccccagcggtgcgcc

SEQ ID NO: 1489951 - DNA, 15 bp, Homo sapiens
gccccagcggtgcgc

SEQ ID NO: 1489952 - DNA, 15 bp, Homo sapiens
tgccccagcggtgcg

SEQ ID NO: 1489953 - DNA, 15 bp, Homo sapiens
atgccccagcggtgc

SEQ ID NO: 1489954 - DNA, 15 bp, Homo sapiens
gatgccccagcggtg

SEQ ID NO: 1489955 - DNA, 15 bp, Homo sapiens
ggatgccccagcggt

SEQ ID NO: 1489956 - DNA, 15 bp, Homo sapiens
tggatgccccagcgg

SEQ ID NO: 1489957 - DNA, 15 bp, Homo sapiens
ctggatgccccagcg

SEQ ID NO: 1489958 - DNA, 15 bp, Homo sapiens
tctggatgccccagc

SEQ ID NO: 1489959 - DNA, 15 bp, Homo sapiens
ttctggatgccccag

SEQ ID NO: 1489960 - DNA, 15 bp, Homo sapiens
cttctggatgcccca

SEQ ID NO: 1489961 - DNA, 15 bp, Homo sapiens
ccttctggatgcccc

SEQ ID NO: 1489962 - DNA, 15 bp, Homo sapiens
cccttctggatgccc

SEQ ID NO: 1489963 - DNA, 15 bp, Homo sapiens
gcccttctggatgcc

SEQ ID NO: 1489964 - DNA, 15 bp, Homo sapiens
tgcccttctggatgc

SEQ ID NO: 1489965 - DNA, 15 bp, Homo sapiens
ttgcccttctggatg

SEQ ID NO: 1489966 - DNA, 15 bp, Homo sapiens
gttgcccttctggat

SEQ ID NO: 1489967 - DNA, 15 bp, Homo sapiens
ggttgcccttctgga

SEQ ID NO: 1489968 - DNA, 15 bp, Homo sapiens
cggttgcccttctgg

SEQ ID NO: 1489969 - DNA, 15 bp, Homo sapiens
gcggttgcccttctg

SEQ ID NO: 1489970 - DNA, 15 bp, Homo sapiens
tgcggttgcccttct

SEQ ID NO: 1489971 - DNA, 15 bp, Homo sapiens
ttgcggttgcccttc

SEQ ID NO: 1489972 - DNA, 15 bp, Homo sapiens
cttgcggttgccctt

SEQ ID NO: 1489973 - DNA, 15 bp, Homo sapiens
tcttgcggttgccct

SEQ ID NO: 1489974 - DNA, 15 bp, Homo sapiens
ttcttgcggttgccc

SEQ ID NO: 1489975 - DNA, 15 bp, Homo sapiens
cttcttgcggttgcc

SEQ ID NO: 1489976 - DNA, 15 bp, Homo sapiens
tcttcttgcggttgc

SEQ ID NO: 1489977 - DNA, 15 bp, Homo sapiens
atcttcttgcggttg

SEQ ID NO: 1489978 - DNA, 15 bp, Homo sapiens
catcttcttgcggtt

SEQ ID NO: 1489979 - DNA, 15 bp, Homo sapiens
tcatcttcttgcggt

SEQ ID NO: 1489980 - DNA, 15 bp, Homo sapiens
gtcatcttcttgcgg

SEQ ID NO: 1489981 - DNA, 15 bp, Homo sapiens
ggtcatcttcttgcg

SEQ ID NO: 1489982 - DNA, 15 bp, Homo sapiens
aggtcatcttcttgc

SEQ ID NO: 1489983 - DNA, 15 bp, Homo sapiens
taggtcatcttcttg

SEQ ID NO: 1489984 - DNA, 15 bp, Homo sapiens
gtaggtcatcttctt

SEQ ID NO: 1489985 - DNA, 15 bp, Homo sapiens
ggtaggtcatcttct

SEQ ID NO: 1489986 - DNA, 15 bp, Homo sapiens
tggtaggtcatcttc

SEQ ID NO: 1489987 - DNA, 15 bp, Homo sapiens
ctggtaggtcatctt

SEQ ID NO: 1489988 - DNA, 15 bp, Homo sapiens
tctggtaggtcatct

SEQ ID NO: 1489989 - DNA, 15 bp, Homo sapiens
ttctggtaggtcatc

SEQ ID NO: 1489990 - DNA, 15 bp, Homo sapiens
cttctggtaggtcat

SEQ ID NO: 1489991 - DNA, 15 bp, Homo sapiens
tcttctggtaggtca

SEQ ID NO: 1489992 - DNA, 15 bp, Homo sapiens
atcttctggtaggtc

SEQ ID NO: 1489993 - DNA, 15 bp, Homo sapiens
catcttctggtaggt

SEQ ID NO: 1489994 - DNA, 15 bp, Homo sapiens
ccatcttctggtagg

SEQ ID NO: 1489995 - DNA, 15 bp, Homo sapiens
gccatcttctggtag

SEQ ID NO: 1489996 - DNA, 15 bp, Homo sapiens
cgccatcttctggta

SEQ ID NO: 1489997 - DNA, 15 bp, Homo sapiens
gcgccatcttctggt

SEQ ID NO: 1489998 - DNA, 15 bp, Homo sapiens
cgcgccatcttctgg

SEQ ID NO: 1489999 - DNA, 15 bp, Homo sapiens
gcgcgccatcttctg

SEQ ID NO: 1490000 - DNA, 15 bp, Homo sapiens
cgcgcgccatcttct

SEQ ID NO: 1490001 - DNA, 15 bp, Homo sapiens
gcgcgcgccatcttc

SEQ ID NO: 1490002 - DNA, 15 bp, Homo sapiens
cgcgcgcgccatctt

SEQ ID NO: 1490003 - DNA, 15 bp, Homo sapiens
gcgcgcgcgccatct

SEQ ID NO: 1490004 - DNA, 15 bp, Homo sapiens
agcgcgcgcgccatc

SEQ ID NO: 1490005 - DNA, 15 bp, Homo sapiens
cagcgcgcgcgccat

SEQ ID NO: 1490006 - DNA, 15 bp, Homo sapiens
gcagcgcgcgcgcca

SEQ ID NO: 1490007 - DNA, 15 bp, Homo sapiens
cgcagcgcgcgcgcc

SEQ ID NO: 1490008 - DNA, 15 bp, Homo sapiens
gcgcagcgcgcgcgc

SEQ ID NO: 1490009 - DNA, 15 bp, Homo sapiens
tgcgcagcgcgcgcg

SEQ ID NO: 1490010 - DNA, 15 bp, Homo sapiens
ttgcgcagcgcgcgc

SEQ ID NO: 1490011 - DNA, 15 bp, Homo sapiens
gttgcgcagcgcgcg

SEQ ID NO: 1490012 - DNA, 15 bp, Homo sapiens
agttgcgcagcgcgc

SEQ ID NO: 1490013 - DNA, 15 bp, Homo sapiens
tagttgcgcagcgcg

SEQ ID NO: 1490014 - DNA, 15 bp, Homo sapiens
gtagttgcgcagcgc

SEQ ID NO: 1490015 - DNA, 15 bp, Homo sapiens
cgtagttgcgcagcg

SEQ ID NO: 1490016 - DNA, 15 bp, Homo sapiens
ccgtagttgcgcagc

SEQ ID NO: 1490017 - DNA, 15 bp, Homo sapiens
gccgtagttgcgcag

SEQ ID NO: 1490018 - DNA, 15 bp, Homo sapiens
tgccgtagttgcgca

SEQ ID NO: 1490019 - DNA, 15 bp, Homo sapiens
ttgccgtagttgcgc

SEQ ID NO: 1490020 - DNA, 15 bp, Homo sapiens
cttgccgtagttgcg

SEQ ID NO: 1490021 - DNA, 15 bp, Homo sapiens
tcttgccgtagttgc

SEQ ID NO: 1490022 - DNA, 15 bp, Homo sapiens
gtcttgccgtagttg

SEQ ID NO: 1490023 - DNA, 15 bp, Homo sapiens
cgtcttgccgtagtt

SEQ ID NO: 1490024 - DNA, 15 bp, Homo sapiens
ccgtcttgccgtagt

SEQ ID NO: 1490025 - DNA, 15 bp, Homo sapiens
cccgtcttgccgtag

SEQ ID NO: 1490026 - DNA, 15 bp, Homo sapiens
gcccgtcttgccgta

SEQ ID NO: 1490027 - DNA, 15 bp, Homo sapiens
cgcccgtcttgccgt

SEQ ID NO: 1490028 - DNA, 15 bp, Homo sapiens
tcgcccgtcttgccg

SEQ ID NO: 1490029 - DNA, 15 bp, Homo sapiens
ctcgcccgtcttgcc

SEQ ID NO: 1490030 - DNA, 15 bp, Homo sapiens
cctcgcccgtcttgc

SEQ ID NO: 1490031 - DNA, 15 bp, Homo sapiens
acctcgcccgtcttg

SEQ ID NO: 1490032 - DNA, 15 bp, Homo sapiens
gacctcgcccgtctt

SEQ ID NO: 1490033 - DNA, 15 bp, Homo sapiens
tgacctcgcccgtct

SEQ ID NO: 1490034 - DNA, 15 bp, Homo sapiens
ttgacctcgcccgtc

SEQ ID NO: 1490035 - DNA, 15 bp, Homo sapiens
cttgacctcgcccgt

SEQ ID NO: 1490036 - DNA, 15 bp, Homo sapiens
tcttgacctcgcccg

SEQ ID NO: 1490037 - DNA, 15 bp, Homo sapiens
ttcttgacctcgccc

SEQ ID NO: 1490038 - DNA, 15 bp, Homo sapiens
cttcttgacctcgcc

SEQ ID NO: 1490039 - DNA, 15 bp, Homo sapiens
ccttcttgacctcgc

SEQ ID NO: 1490040 - DNA, 15 bp, Homo sapiens
accttcttgacctcg

SEQ ID NO: 1490041 - DNA, 15 bp, Homo sapiens
caccttcttgacctc

SEQ ID NO: 1490042 - DNA, 15 bp, Homo sapiens
tcaccttcttgacct

SEQ ID NO: 1490043 - DNA, 15 bp, Homo sapiens
ttcaccttcttgacc

SEQ ID NO: 1490044 - DNA, 15 bp, Homo sapiens
cttcaccttcttgac

SEQ ID NO: 1490045 - DNA, 15 bp, Homo sapiens
tcttcaccttcttga

SEQ ID NO: 1490046 - DNA, 15 bp, Homo sapiens
ttcttcaccttcttg

SEQ ID NO: 1490047 - DNA, 15 bp, Homo sapiens
cttcttcaccttctt

SEQ ID NO: 1490048 - DNA, 15 bp, Homo sapiens
tcttcttcaccttct

SEQ ID NO: 1490049 - DNA, 15 bp, Homo sapiens
ttcttcttcaccttc

SEQ ID NO: 1490050 - DNA, 15 bp, Homo sapiens
cttcttcttcacctt

SEQ ID NO: 1490051 - DNA, 15 bp, Homo sapiens
gcttcttcttcacct

SEQ ID NO: 1490052 - DNA, 15 bp, Homo sapiens
agcttcttcttcacc

SEQ ID NO: 1490053 - DNA, 15 bp, Homo sapiens
gagcttcttcttcac

SEQ ID NO: 1490054 - DNA, 15 bp, Homo sapiens
tgagcttcttcttca

SEQ ID NO: 1490055 - DNA, 15 bp, Homo sapiens
gtgagcttcttcttc

SEQ ID NO: 1490056 - DNA, 15 bp, Homo sapiens
ggtgagcttcttctt

SEQ ID NO: 1490057 - DNA, 15 bp, Homo sapiens
aggtgagcttcttct

SEQ ID NO: 1490058 - DNA, 15 bp, Homo sapiens
taggtgagcttcttc

SEQ ID NO: 1490059 - DNA, 15 bp, Homo sapiens
gtaggtgagcttctt

SEQ ID NO: 1490060 - DNA, 15 bp, Homo sapiens
ggtaggtgagcttct

SEQ ID NO: 1490061 - DNA, 15 bp, Homo sapiens
tggtaggtgagcttc

SEQ ID NO: 1490062 - DNA, 15 bp, Homo sapiens
ctggtaggtgagctt

SEQ ID NO: 1490063 - DNA, 15 bp, Homo sapiens
actggtaggtgagct

SEQ ID NO: 1490064 - DNA, 15 bp, Homo sapiens
aactggtaggtgagc

SEQ ID NO: 1490065 - DNA, 15 bp, Homo sapiens
gaactggtaggtgag

SEQ ID NO: 1490066 - DNA, 15 bp, Homo sapiens
tgaactggtaggtga

SEQ ID NO: 1490067 - DNA, 15 bp, Homo sapiens
ctgaactggtaggtg

SEQ ID NO: 1490068 - DNA, 15 bp, Homo sapiens
gctgaactggtaggt

SEQ ID NO: 1490069 - DNA, 15 bp, Homo sapiens
cgctgaactggtagg

SEQ ID NO: 1490070 - DNA, 15 bp, Homo sapiens
ccgctgaactggtag

SEQ ID NO: 1490071 - DNA, 15 bp, Homo sapiens
gccgctgaactggta

SEQ ID NO: 1490072 - DNA, 15 bp, Homo sapiens
cgccgctgaactggt

SEQ ID NO: 1490073 - DNA, 15 bp, Homo sapiens
tcgccgctgaactgg

SEQ ID NO: 1490074 - DNA, 15 bp, Homo sapiens
ttcgccgctgaactg

SEQ ID NO: 1490075 - DNA, 15 bp, Homo sapiens
cttcgccgctgaact

SEQ ID NO: 1490076 - DNA, 15 bp, Homo sapiens
acttcgccgctgaac

SEQ ID NO: 1490077 - DNA, 15 bp, Homo sapiens
cacttcgccgctgaa

SEQ ID NO: 1490078 - DNA, 15 bp, Homo sapiens
gcacttcgccgctga

SEQ ID NO: 1490079 - DNA, 15 bp, Homo sapiens
agcacttcgccgctg

SEQ ID NO: 1490080 - DNA, 15 bp, Homo sapiens
cagcacttcgccgct

SEQ ID NO: 1490081 - DNA, 15 bp, Homo sapiens
ccagcacttcgccgc

SEQ ID NO: 1490082 - DNA, 15 bp, Homo sapiens
cccagcacttcgccg

SEQ ID NO: 1490083 - DNA, 15 bp, Homo sapiens
gcccagcacttcgcc

SEQ ID NO: 1490084 - DNA, 15 bp, Homo sapiens
ggcccagcacttcgc

SEQ ID NO: 1490085 - DNA, 15 bp, Homo sapiens
cggcccagcacttcg

SEQ ID NO: 1490086 - DNA, 15 bp, Homo sapiens
gcggcccagcacttc

SEQ ID NO: 1490087 - DNA, 15 bp, Homo sapiens
cgcggcccagcactt

SEQ ID NO: 1490088 - DNA, 15 bp, Homo sapiens
ccgcggcccagcact

SEQ ID NO: 1490089 - DNA, 15 bp, Homo sapiens
cccgcggcccagcac

SEQ ID NO: 1490090 - DNA, 15 bp, Homo sapiens
ccccgcggcccagca

SEQ ID NO: 1490091 - DNA, 15 bp, Homo sapiens
cccccgcggcccagc

SEQ ID NO: 1490092 - DNA, 15 bp, Homo sapiens
gcccccgcggcccag

SEQ ID NO: 1490093 - DNA, 15 bp, Homo sapiens
ggcccccgcggccca

SEQ ID NO: 1490094 - DNA, 15 bp, Homo sapiens
aggcccccgcggccc

SEQ ID NO: 1490095 - DNA, 15 bp, Homo sapiens
caggcccccgcggcc

SEQ ID NO: 1490096 - DNA, 15 bp, Homo sapiens
ccaggcccccgcggc

SEQ ID NO: 1490097 - DNA, 15 bp, Homo sapiens
gccaggcccccgcgg

SEQ ID NO: 1490098 - DNA, 15 bp, Homo sapiens
ggccaggcccccgcg

SEQ ID NO: 1490099 - DNA, 15 bp, Homo sapiens
cggccaggcccccgc

SEQ ID NO: 1490100 - DNA, 15 bp, Homo sapiens
tcggccaggcccccg

SEQ ID NO: 1490101 - DNA, 15 bp, Homo sapiens
ctcggccaggccccc

SEQ ID NO: 1490102 - DNA, 15 bp, Homo sapiens
gctcggccaggcccc

SEQ ID NO: 1490103 - DNA, 15 bp, Homo sapiens
cgctcggccaggccc

SEQ ID NO: 1490104 - DNA, 15 bp, Homo sapiens
ccgctcggccaggcc

SEQ ID NO: 1490105 - DNA, 15 bp, Homo sapiens
gccgctcggccaggc

SEQ ID NO: 1490106 - DNA, 15 bp, Homo sapiens
cgccgctcggccagg

SEQ ID NO: 1490107 - DNA, 15 bp, Homo sapiens
gcgccgctcggccag

SEQ ID NO: 1490108 - DNA, 15 bp, Homo sapiens
ggcgccgctcggcca

SEQ ID NO: 1490109 - DNA, 15 bp, Homo sapiens
tggcgccgctcggcc

SEQ ID NO: 1490110 - DNA, 15 bp, Homo sapiens
gtggcgccgctcggc

SEQ ID NO: 1490111 - DNA, 15 bp, Homo sapiens
ggtggcgccgctcgg

SEQ ID NO: 1490112 - DNA, 15 bp, Homo sapiens
gggtggcgccgctcg

SEQ ID NO: 1490113 - DNA, 15 bp, Homo sapiens
cgggtggcgccgctc

SEQ ID NO: 1490114 - DNA, 15 bp, Homo sapiens
gcgggtggcgccgct

SEQ ID NO: 1490115 - DNA, 15 bp, Homo sapiens
ggcgggtggcgccgc

SEQ ID NO: 1490116 - DNA, 15 bp, Homo sapiens
gggcgggtggcgccg

SEQ ID NO: 1490117 - DNA, 15 bp, Homo sapiens
ggggcgggtggcgcc

SEQ ID NO: 1490118 - DNA, 15 bp, Homo sapiens
tggggcgggtggcgc

SEQ ID NO: 1490119 - DNA, 15 bp, Homo sapiens
gtggggcgggtggcg

SEQ ID NO: 1490120 - DNA, 15 bp, Homo sapiens
agtggggcgggtggc

SEQ ID NO: 1490121 - DNA, 15 bp, Homo sapiens
cagtggggcgggtgg

SEQ ID NO: 1490122 - DNA, 15 bp, Homo sapiens
tcagtggggcgggtg

SEQ ID NO: 1490123 - DNA, 15 bp, Homo sapiens
ctcagtggggcgggt

SEQ ID NO: 1490124 - DNA, 15 bp, Homo sapiens
gctcagtggggcggg

SEQ ID NO: 1490125 - DNA, 15 bp, Homo sapiens
ggctcagtggggcgg

SEQ ID NO: 1490126 - DNA, 15 bp, Homo sapiens
gggctcagtggggcg

SEQ ID NO: 1490127 - DNA, 15 bp, Homo sapiens
cgggctcagtggggc

SEQ ID NO: 1490128 - DNA, 15 bp, Homo sapiens
gcgggctcagtgggg

SEQ ID NO: 1490129 - DNA, 15 bp, Homo sapiens
tgcgggctcagtggg

SEQ ID NO: 1490130 - DNA, 15 bp, Homo sapiens
ctgcgggctcagtgg

SEQ ID NO: 1490131 - DNA, 15 bp, Homo sapiens
gctgcgggctcagtg

SEQ ID NO: 1490132 - DNA, 15 bp, Homo sapiens
ggctgcgggctcagt

SEQ ID NO: 1490133 - DNA, 15 bp, Homo sapiens
gggctgcgggctcag

SEQ ID NO: 1490134 - DNA, 15 bp, Homo sapiens
ggggctgcgggctca

SEQ ID NO: 1490135 - DNA, 15 bp, Homo sapiens
gggggctgcgggctc

SEQ ID NO: 1490136 - DNA, 15 bp, Homo sapiens
cgggggctgcgggct

SEQ ID NO: 1490137 - DNA, 15 bp, Homo sapiens
gcgggggctgcgggc

SEQ ID NO: 1490138 - DNA, 15 bp, Homo sapiens
ggcgggggctgcggg

SEQ ID NO: 1490139 - DNA, 15 bp, Homo sapiens
cggcgggggctgcgg

SEQ ID NO: 1490140 - DNA, 15 bp, Homo sapiens
ccggcgggggctgcg

SEQ ID NO: 1490141 - DNA, 15 bp, Homo sapiens
cccggcgggggctgc

SEQ ID NO: 1490142 - DNA, 15 bp, Homo sapiens
gcccggcgggggctg

SEQ ID NO: 1490143 - DNA, 15 bp, Homo sapiens
ggcccggcgggggct

SEQ ID NO: 1490144 - DNA, 15 bp, Homo sapiens
gggcccggcgggggc

SEQ ID NO: 1490145 - DNA, 15 bp, Homo sapiens
ggggcccggcggggg

SEQ ID NO: 1490146 - DNA, 15 bp, Homo sapiens
gcggggcccggcggg

SEQ ID NO: 1490147 - DNA, 15 bp, Homo sapiens
ggcggggcccggcgg

SEQ ID NO: 1490148 - DNA, 15 bp, Homo sapiens
tggcggggcccggcg

SEQ ID NO: 1490149 - DNA, 15 bp, Homo sapiens
ctggcggggcccggc

SEQ ID NO: 1490150 - DNA, 15 bp, Homo sapiens
cctggcggggcccgg

SEQ ID NO: 1490151 - DNA, 15 bp, Homo sapiens
gcctggcggggcccg

SEQ ID NO: 1490152 - DNA, 15 bp, Homo sapiens
ggcctggcggggccc

SEQ ID NO: 1490153 - DNA, 15 bp, Homo sapiens
aggcctggcggggcc

SEQ ID NO: 1490154 - DNA, 15 bp, Homo sapiens
gaggcctggcggggc

SEQ ID NO: 1490155 - DNA, 15 bp, Homo sapiens
ggaggcctggcgggg

SEQ ID NO: 1490156 - DNA, 15 bp, Homo sapiens
gggaggcctggcggg

SEQ ID NO: 1490157 - DNA, 15 bp, Homo sapiens
ggggaggcctggcgg

SEQ ID NO: 1490158 - DNA, 15 bp, Homo sapiens
cggggaggcctggcg

SEQ ID NO: 1490159 - DNA, 15 bp, Homo sapiens
gcggggaggcctggc

SEQ ID NO: 1490160 - DNA, 15 bp, Homo sapiens
agcggggaggcctgg

SEQ ID NO: 1490161 - DNA, 15 bp, Homo sapiens
cagcggggaggcctg

SEQ ID NO: 1490162 - DNA, 15 bp, Homo sapiens
ccagcggggaggcct

SEQ ID NO: 1490163 - DNA, 15 bp, Homo sapiens
gccagcggggaggcc

SEQ ID NO: 1490164 - DNA, 15 bp, Homo sapiens
ggccagcggggaggc

SEQ ID NO: 1490165 - DNA, 15 bp, Homo sapiens
tggccagcggggagg

SEQ ID NO: 1490166 - DNA, 15 bp, Homo sapiens
atggccagcggggag

SEQ ID NO: 1490167 - DNA, 15 bp, Homo sapiens
tatggccagcgggga

SEQ ID NO: 1490168 - DNA, 15 bp, Homo sapiens
ctatggccagcgggg

SEQ ID NO: 1490169 - DNA, 15 bp, Homo sapiens
gctatggccagcggg

SEQ ID NO: 1490170 - DNA, 15 bp, Homo sapiens
tgctatggccagcgg

SEQ ID NO: 1490171 - DNA, 15 bp, Homo sapiens
atgctatggccagcg

SEQ ID NO: 1490172 - DNA, 15 bp, Homo sapiens
aatgctatggccagc

SEQ ID NO: 1490173 - DNA, 15 bp, Homo sapiens
taatgctatggccag

SEQ ID NO: 1490174 - DNA, 15 bp, Homo sapiens
ttaatgctatggcca

SEQ ID NO: 1490175 - DNA, 15 bp, Homo sapiens
cttaatgctatggcc

SEQ ID NO: 1490176 - DNA, 15 bp, Homo sapiens
gcttaatgctatggc

SEQ ID NO: 1490177 - DNA, 15 bp, Homo sapiens
ggcttaatgctatgg

SEQ ID NO: 1490178 - DNA, 15 bp, Homo sapiens
gggcttaatgctatg

SEQ ID NO: 1490179 - DNA, 15 bp, Homo sapiens
agggcttaatgctat

SEQ ID NO: 1490180 - DNA, 15 bp, Homo sapiens
gagggcttaatgcta

SEQ ID NO: 1490181 - DNA, 15 bp, Homo sapiens
cgagggcttaatgct

SEQ ID NO: 1490182 - DNA, 15 bp, Homo sapiens
gcgagggcttaatgc

SEQ ID NO: 1490183 - DNA, 15 bp, Homo sapiens
ggcgagggcttaatg

SEQ ID NO: 1490184 - DNA, 15 bp, Homo sapiens
gggcgagggcttaat

SEQ ID NO: 1490185 - DNA, 15 bp, Homo sapiens
cgggcgagggcttaa

SEQ ID NO: 1490186 - DNA, 15 bp, Homo sapiens
ccgggcgagggctta

SEQ ID NO: 1490187 - DNA, 15 bp, Homo sapiens
gccgggcgagggctt

SEQ ID NO: 1490188 - DNA, 15 bp, Homo sapiens
ggccgggcgagggct

SEQ ID NO: 1490189 - DNA, 15 bp, Homo sapiens
gggccgggcgagggc

SEQ ID NO: 1490190 - DNA, 15 bp, Homo sapiens
cgggccgggcgaggg

SEQ ID NO: 1490191 - DNA, 15 bp, Homo sapiens
ccgggccgggcgagg

SEQ ID NO: 1490192 - DNA, 15 bp, Homo sapiens
tccgggccgggcgag

SEQ ID NO: 1490193 - DNA, 15 bp, Homo sapiens
gtccgggccgggcga

SEQ ID NO: 1490194 - DNA, 15 bp, Homo sapiens
tgtccgggccgggcg

SEQ ID NO: 1490195 - DNA, 15 bp, Homo sapiens
gtgtccgggccgggc

SEQ ID NO: 1490196 - DNA, 15 bp, Homo sapiens
tgtgtccgggccggg

SEQ ID NO: 1490197 - DNA, 15 bp, Homo sapiens
ctgtgtccgggccgg

SEQ ID NO: 1490198 - DNA, 15 bp, Homo sapiens
cctgtgtccgggccg

SEQ ID NO: 1490199 - DNA, 15 bp, Homo sapiens
ccctgtgtccgggcc

SEQ ID NO: 1490200 - DNA, 15 bp, Homo sapiens
tccctgtgtccgggc

SEQ ID NO: 1490201 - DNA, 15 bp, Homo sapiens
ctccctgtgtccggg

SEQ ID NO: 1490202 - DNA, 15 bp, Homo sapiens
cctccctgtgtccgg

SEQ ID NO: 1490203 - DNA, 15 bp, Homo sapiens
tcctccctgtgtccg

SEQ ID NO: 1490204 - DNA, 15 bp, Homo sapiens
gtcctccctgtgtcc

SEQ ID NO: 1490205 - DNA, 15 bp, Homo sapiens
cgtcctccctgtgtc

SEQ ID NO: 1490206 - DNA, 15 bp, Homo sapiens
gcgtcctccctgtgt

SEQ ID NO: 1490207 - DNA, 15 bp, Homo sapiens
agcgtcctccctgtg

SEQ ID NO: 1490208 - DNA, 15 bp, Homo sapiens
gagcgtcctccctgt

SEQ ID NO: 1490209 - DNA, 15 bp, Homo sapiens
ggagcgtcctccctg

SEQ ID NO: 1490210 - DNA, 15 bp, Homo sapiens
gggagcgtcctccct

SEQ ID NO: 1490211 - DNA, 15 bp, Homo sapiens
cgggagcgtcctccc

SEQ ID NO: 1490212 - DNA, 15 bp, Homo sapiens
ccgggagcgtcctcc

SEQ ID NO: 1490213 - DNA, 15 bp, Homo sapiens
cccgggagcgtcctc

SEQ ID NO: 1490214 - DNA, 15 bp, Homo sapiens
ccccgggagcgtcct

SEQ ID NO: 1490215 - DNA, 15 bp, Homo sapiens
gccccgggagcgtcc

SEQ ID NO: 1490216 - DNA, 15 bp, Homo sapiens
ggccccgggagcgtc

SEQ ID NO: 1490217 - DNA, 15 bp, Homo sapiens
gggccccgggagcgt

SEQ ID NO: 1490218 - DNA, 15 bp, Homo sapiens
tgggccccgggagcg

SEQ ID NO: 1490219 - DNA, 15 bp, Homo sapiens
ctgggccccgggagc

SEQ ID NO: 1490220 - DNA, 15 bp, Homo sapiens
tctgggccccgggag

SEQ ID NO: 1490221 - DNA, 15 bp, Homo sapiens
ctctgggccccggga

SEQ ID NO: 1490222 - DNA, 15 bp, Homo sapiens
cctctgggccccggg

SEQ ID NO: 1490223 - DNA, 15 bp, Homo sapiens
gcctctgggccccgg

SEQ ID NO: 1490224 - DNA, 15 bp, Homo sapiens
tgcctctgggccccg

SEQ ID NO: 1490225 - DNA, 15 bp, Homo sapiens
ctgcctctgggcccc

SEQ ID NO: 1490226 - DNA, 15 bp, Homo sapiens
cctgcctctgggccc

SEQ ID NO: 1490227 - DNA, 15 bp, Homo sapiens
tcctgcctctgggcc

SEQ ID NO: 1490228 - DNA, 15 bp, Homo sapiens
gtcctgcctctgggc

SEQ ID NO: 1490229 - DNA, 15 bp, Homo sapiens
agtcctgcctctggg

SEQ ID NO: 1490230 - DNA, 15 bp, Homo sapiens
cagtcctgcctctgg

SEQ ID NO: 1490231 - DNA, 15 bp, Homo sapiens
acagtcctgcctctg

SEQ ID NO: 1490232 - DNA, 15 bp, Homo sapiens
cacagtcctgcctct

SEQ ID NO: 1490233 - DNA, 15 bp, Homo sapiens
ccacagtcctgcctc

SEQ ID NO: 1490234 - DNA, 15 bp, Homo sapiens
gccacagtcctgcct

SEQ ID NO: 1490235 - DNA, 15 bp, Homo sapiens
cgccacagtcctgcc

SEQ ID NO: 1490236 - DNA, 15 bp, Homo sapiens
ccgccacagtcctgc

SEQ ID NO: 1490237 - DNA, 15 bp, Homo sapiens
cccgccacagtcctg

SEQ ID NO: 1490238 - DNA, 15 bp, Homo sapiens
gcccgccacagtcct

SEQ ID NO: 1490239 - DNA, 15 bp, Homo sapiens
ggcccgccacagtcc

SEQ ID NO: 1490240 - DNA, 15 bp, Homo sapiens
cggcccgccacagtc

SEQ ID NO: 1490241 - DNA, 15 bp, Homo sapiens
ccggcccgccacagt

SEQ ID NO: 1490242 - DNA, 15 bp, Homo sapiens
cccggcccgccacag

SEQ ID NO: 1490243 - DNA, 15 bp, Homo sapiens
gcccggcccgccaca

SEQ ID NO: 1490244 - DNA, 15 bp, Homo sapiens
ggcccggcccgccac

SEQ ID NO: 1490245 - DNA, 15 bp, Homo sapiens
aggcccggcccgcca

SEQ ID NO: 1490246 - DNA, 15 bp, Homo sapiens
gaggcccggcccgcc

SEQ ID NO: 1490247 - DNA, 15 bp, Homo sapiens
cgaggcccggcccgc

SEQ ID NO: 1490248 - DNA, 15 bp, Homo sapiens
gcgaggcccggcccg

SEQ ID NO: 1490249 - DNA, 15 bp, Homo sapiens
ggcgaggcccggccc

SEQ ID NO: 1490250 - DNA, 15 bp, Homo sapiens
aggcgaggcccggcc

SEQ ID NO: 1490251 - DNA, 15 bp, Homo sapiens
gaggcgaggcccggc

SEQ ID NO: 1490252 - DNA, 15 bp, Homo sapiens
tgaggcgaggcccgg

SEQ ID NO: 1490253 - DNA, 15 bp, Homo sapiens
gtgaggcgaggcccg

SEQ ID NO: 1490254 - DNA, 15 bp, Homo sapiens
ggtgaggcgaggccc

SEQ ID NO: 1490255 - DNA, 15 bp, Homo sapiens
gggtgaggcgaggcc

SEQ ID NO: 1490256 - DNA, 15 bp, Homo sapiens
cgggtgaggcgaggc

SEQ ID NO: 1490257 - DNA, 15 bp, Homo sapiens
gcgggtgaggcgagg

SEQ ID NO: 1490258 - DNA, 15 bp, Homo sapiens
ggcgggtgaggcgag

SEQ ID NO: 1490259 - DNA, 15 bp, Homo sapiens
gggcgggtgaggcga

SEQ ID NO: 1490260 - DNA, 15 bp, Homo sapiens
ggggcgggtgaggcg

SEQ ID NO: 1490261 - DNA, 15 bp, Homo sapiens
gggggcgggtgaggc

SEQ ID NO: 1490262 - DNA, 15 bp, Homo sapiens
agggggcgggtgagg

SEQ ID NO: 1490263 - DNA, 15 bp, Homo sapiens
gagggggcgggtgag

SEQ ID NO: 1490264 - DNA, 15 bp, Homo sapiens
ggagggggcgggtga

SEQ ID NO: 1490265 - DNA, 15 bp, Homo sapiens
gggagggggcgggtg

SEQ ID NO: 1490266 - DNA, 15 bp, Homo sapiens
ggggagggggcgggt

SEQ ID NO: 1490267 - DNA, 15 bp, Homo sapiens
ggggggagggggcgg

SEQ ID NO: 1490268 - DNA, 15 bp, Homo sapiens
tggggggagggggcg

SEQ ID NO: 1490269 - DNA, 15 bp, Homo sapiens
gtggggggagggggc

SEQ ID NO: 1490270 - DNA, 15 bp, Homo sapiens
agtggggggaggggg

SEQ ID NO: 1490271 - DNA, 15 bp, Homo sapiens
gagtggggggagggg

SEQ ID NO: 1490272 - DNA, 15 bp, Homo sapiens
ggagtggggggaggg

SEQ ID NO: 1490273 - DNA, 15 bp, Homo sapiens
tggagtggggggagg

SEQ ID NO: 1490274 - DNA, 15 bp, Homo sapiens
ctggagtggggggag

SEQ ID NO: 1490275 - DNA, 15 bp, Homo sapiens
cctggagtgggggga

SEQ ID NO: 1490276 - DNA, 15 bp, Homo sapiens
gcctggagtgggggg

SEQ ID NO: 1490277 - DNA, 15 bp, Homo sapiens
ggcctggagtggggg

SEQ ID NO: 1490278 - DNA, 15 bp, Homo sapiens
gggcctggagtgggg

SEQ ID NO: 1490279 - DNA, 15 bp, Homo sapiens
ggggcctggagtggg

SEQ ID NO: 1490280 - DNA, 15 bp, Homo sapiens
gggggcctggagtgg

SEQ ID NO: 1490281 - DNA, 15 bp, Homo sapiens
agggggcctggagtg

SEQ ID NO: 1490282 - DNA, 15 bp, Homo sapiens
gagggggcctggagt

SEQ ID NO: 1490283 - DNA, 15 bp, Homo sapiens
ggagggggcctggag

SEQ ID NO: 1490284 - DNA, 15 bp, Homo sapiens
tggagggggcctgga

SEQ ID NO: 1490285 - DNA, 15 bp, Homo sapiens
gtggagggggcctgg

SEQ ID NO: 1490286 - DNA, 15 bp, Homo sapiens
tgtggagggggcctg

SEQ ID NO: 1490287 - DNA, 15 bp, Homo sapiens
atgtggagggggcct

SEQ ID NO: 1490288 - DNA, 15 bp, Homo sapiens
gatgtggagggggcc

SEQ ID NO: 1490289 - DNA, 15 bp, Homo sapiens
ggatgtggagggggc

SEQ ID NO: 1490290 - DNA, 15 bp, Homo sapiens
gggatgtggaggggg

SEQ ID NO: 1490291 - DNA, 15 bp, Homo sapiens
cgggatgtggagggg

SEQ ID NO: 1490292 - DNA, 15 bp, Homo sapiens
gcgggatgtggaggg

SEQ ID NO: 1490293 - DNA, 15 bp, Homo sapiens
agcgggatgtggagg

SEQ ID NO: 1490294 - DNA, 15 bp, Homo sapiens
aagcgggatgtggag

SEQ ID NO: 1490295 - DNA, 15 bp, Homo sapiens
gaagcgggatgtgga

SEQ ID NO: 1490296 - DNA, 15 bp, Homo sapiens
cgaagcgggatgtgg

SEQ ID NO: 1490297 - DNA, 15 bp, Homo sapiens
gcgaagcgggatgtg

SEQ ID NO: 1490298 - DNA, 15 bp, Homo sapiens
ggcgaagcgggatgt

SEQ ID NO: 1490299 - DNA, 15 bp, Homo sapiens
aggcgaagcgggatg

SEQ ID NO: 1490300 - DNA, 15 bp, Homo sapiens
gaggcgaagcgggat

SEQ ID NO: 1490301 - DNA, 15 bp, Homo sapiens
ggaggcgaagcggga

SEQ ID NO: 1490302 - DNA, 15 bp, Homo sapiens
gggaggcgaagcggg

SEQ ID NO: 1490303 - DNA, 15 bp, Homo sapiens
agggaggcgaagcgg

SEQ ID NO: 1490304 - DNA, 15 bp, Homo sapiens
gagggaggcgaagcg

SEQ ID NO: 1490305 - DNA, 15 bp, Homo sapiens
ggagggaggcgaagc

SEQ ID NO: 1490306 - DNA, 15 bp, Homo sapiens
tggagggaggcgaag

SEQ ID NO: 1490307 - DNA, 15 bp, Homo sapiens
ctggagggaggcgaa

SEQ ID NO: 1490308 - DNA, 15 bp, Homo sapiens
cctggagggaggcga

SEQ ID NO: 1490309 - DNA, 15 bp, Homo sapiens
tcctggagggaggcg

SEQ ID NO: 1490310 - DNA, 15 bp, Homo sapiens
gtcctggagggaggc

SEQ ID NO: 1490311 - DNA, 15 bp, Homo sapiens
agtcctggagggagg

SEQ ID NO: 1490312 - DNA, 15 bp, Homo sapiens
gagtcctggagggag

SEQ ID NO: 1490313 - DNA, 15 bp, Homo sapiens
ggagtcctggaggga

SEQ ID NO: 1490314 - DNA, 15 bp, Homo sapiens
tggagtcctggaggg

SEQ ID NO: 1490315 - DNA, 15 bp, Homo sapiens
gtggagtcctggagg

SEQ ID NO: 1490316 - DNA, 15 bp, Homo sapiens
ggtggagtcctggag

SEQ ID NO: 1490317 - DNA, 15 bp, Homo sapiens
gggtggagtcctgga

SEQ ID NO: 1490318 - DNA, 15 bp, Homo sapiens
ggggtggagtcctgg

SEQ ID NO: 1490319 - DNA, 15 bp, Homo sapiens
cggggtggagtcctg

SEQ ID NO: 1490320 - DNA, 15 bp, Homo sapiens
ccggggtggagtcct

SEQ ID NO: 1490321 - DNA, 15 bp, Homo sapiens
gccggggtggagtcc

SEQ ID NO: 1490322 - DNA, 15 bp, Homo sapiens
agccggggtggagtc

SEQ ID NO: 1490323 - DNA, 15 bp, Homo sapiens
gagccggggtggagt

SEQ ID NO: 1490324 - DNA, 15 bp, Homo sapiens
ggagccggggtggag

SEQ ID NO: 1490325 - DNA, 15 bp, Homo sapiens
gggagccggggtgga

SEQ ID NO: 1490326 - DNA, 15 bp, Homo sapiens
cgggagccggggtgg

SEQ ID NO: 1490327 - DNA, 15 bp, Homo sapiens
ccgggagccggggtg

SEQ ID NO: 1490328 - DNA, 15 bp, Homo sapiens
tccgggagccggggt

SEQ ID NO: 1490329 - DNA, 15 bp, Homo sapiens
gtccgggagccgggg

SEQ ID NO: 1490330 - DNA, 15 bp, Homo sapiens
cgtccgggagccggg

SEQ ID NO: 1490331 - DNA, 15 bp, Homo sapiens
gcgtccgggagccgg

SEQ ID NO: 1490332 - DNA, 15 bp, Homo sapiens
ggcgtccgggagccg

SEQ ID NO: 1490333 - DNA, 15 bp, Homo sapiens
tggcgtccgggagcc

SEQ ID NO: 1490334 - DNA, 15 bp, Homo sapiens
ctggcgtccgggagc

SEQ ID NO: 1490335 - DNA, 15 bp, Homo sapiens
gctggcgtccgggag

SEQ ID NO: 1490336 - DNA, 15 bp, Homo sapiens
agctggcgtccggga

SEQ ID NO: 1490337 - DNA, 15 bp, Homo sapiens
cagctggcgtccggg

SEQ ID NO: 1490338 - DNA, 15 bp, Homo sapiens
ccagctggcgtccgg

SEQ ID NO: 1490339 - DNA, 15 bp, Homo sapiens
cccagctggcgtccg

SEQ ID NO: 1490340 - DNA, 15 bp, Homo sapiens
gcccagctggcgtcc

SEQ ID NO: 1490341 - DNA, 15 bp, Homo sapiens
cgcccagctggcgtc

SEQ ID NO: 1490342 - DNA, 15 bp, Homo sapiens
acgcccagctggcgt

SEQ ID NO: 1490343 - DNA, 15 bp, Homo sapiens
gacgcccagctggcg

SEQ ID NO: 1490344 - DNA, 15 bp, Homo sapiens
tgacgcccagctggc

SEQ ID NO: 1490345 - DNA, 15 bp, Homo sapiens
ctgacgcccagctgg

SEQ ID NO: 1490346 - DNA, 15 bp, Homo sapiens
tctgacgcccagctg

SEQ ID NO: 1490347 - DNA, 15 bp, Homo sapiens
gtctgacgcccagct

SEQ ID NO: 1490348 - DNA, 15 bp, Homo sapiens
ggtctgacgcccagc

SEQ ID NO: 1490349 - DNA, 15 bp, Homo sapiens
gggtctgacgcccag

SEQ ID NO: 1490350 - DNA, 15 bp, Homo sapiens
ggggtctgacgccca

SEQ ID NO: 1490351 - DNA, 15 bp, Homo sapiens
tggggtctgacgccc

SEQ ID NO: 1490352 - DNA, 15 bp, Homo sapiens
gtggggtctgacgcc

SEQ ID NO: 1490353 - DNA, 15 bp, Homo sapiens
ggtggggtctgacgc

SEQ ID NO: 1490354 - DNA, 15 bp, Homo sapiens
cggtggggtctgacg

SEQ ID NO: 1490355 - DNA, 15 bp, Homo sapiens
ccggtggggtctgac

SEQ ID NO: 1490356 - DNA, 15 bp, Homo sapiens
cccggtggggtctga

SEQ ID NO: 1490357 - DNA, 15 bp, Homo sapiens
ccccggtggggtctg

SEQ ID NO: 1490358 - DNA, 15 bp, Homo sapiens
gccccggtggggtct

SEQ ID NO: 1490359 - DNA, 15 bp, Homo sapiens
tgccccggtggggtc

SEQ ID NO: 1490360 - DNA, 15 bp, Homo sapiens
ttgccccggtggggt

SEQ ID NO: 1490361 - DNA, 15 bp, Homo sapiens
gttgccccggtgggg

SEQ ID NO: 1490362 - DNA, 15 bp, Homo sapiens
ggttgccccggtggg

SEQ ID NO: 1490363 - DNA, 15 bp, Homo sapiens
aggttgccccggtgg

SEQ ID NO: 1490364 - DNA, 15 bp, Homo sapiens
aaggttgccccggtg

SEQ ID NO: 1490365 - DNA, 15 bp, Homo sapiens
caaggttgccccggt

SEQ ID NO: 1490366 - DNA, 15 bp, Homo sapiens
gcaaggttgccccgg

SEQ ID NO: 1490367 - DNA, 15 bp, Homo sapiens
tgcaaggttgccccg

SEQ ID NO: 1490368 - DNA, 15 bp, Homo sapiens
ctgcaaggttgcccc

SEQ ID NO: 1490369 - DNA, 15 bp, Homo sapiens
tctgcaaggttgccc

SEQ ID NO: 1490370 - DNA, 15 bp, Homo sapiens
ctctgcaaggttgcc

SEQ ID NO: 1490371 - DNA, 15 bp, Homo sapiens
cctctgcaaggttgc

SEQ ID NO: 1490372 - DNA, 15 bp, Homo sapiens
tcctctgcaaggttg

SEQ ID NO: 1490373 - DNA, 15 bp, Homo sapiens
gtcctctgcaaggtt

SEQ ID NO: 1490374 - DNA, 15 bp, Homo sapiens
cgtcctctgcaaggt

SEQ ID NO: 1490375 - DNA, 15 bp, Homo sapiens
tcgtcctctgcaagg

SEQ ID NO: 1490376 - DNA, 15 bp, Homo sapiens
gtcgtcctctgcaag

SEQ ID NO: 1490377 - DNA, 15 bp, Homo sapiens
ggtcgtcctctgcaa

SEQ ID NO: 1490378 - DNA, 15 bp, Homo sapiens
gggtcgtcctctgca

SEQ ID NO: 1490379 - DNA, 15 bp, Homo sapiens
cgggtcgtcctctgc

SEQ ID NO: 1490380 - DNA, 15 bp, Homo sapiens
ccgggtcgtcctctg

SEQ ID NO: 1490381 - DNA, 15 bp, Homo sapiens
cccgggtcgtcctct

SEQ ID NO: 1490382 - DNA, 15 bp, Homo sapiens
ccccgggtcgtcctc

SEQ ID NO: 1490383 - DNA, 15 bp, Homo sapiens
accccgggtcgtcct

SEQ ID NO: 1490384 - DNA, 15 bp, Homo sapiens
taccccgggtcgtcc

SEQ ID NO: 1490385 - DNA, 15 bp, Homo sapiens
gtaccccgggtcgtc

SEQ ID NO: 1490386 - DNA, 15 bp, Homo sapiens
agtaccccgggtcgt

SEQ ID NO: 1490387 - DNA, 15 bp, Homo sapiens
cagtaccccgggtcg

SEQ ID NO: 1490388 - DNA, 15 bp, Homo sapiens
gcagtaccccgggtc

SEQ ID NO: 1490389 - DNA, 15 bp, Homo sapiens
ggcagtaccccgggt

SEQ ID NO: 1490390 - DNA, 15 bp, Homo sapiens
aggcagtaccccggg

SEQ ID NO: 1490391 - DNA, 15 bp, Homo sapiens
aaggcagtaccccgg

SEQ ID NO: 1490392 - DNA, 15 bp, Homo sapiens
caaggcagtaccccg

SEQ ID NO: 1490393 - DNA, 15 bp, Homo sapiens
ccaaggcagtacccc

SEQ ID NO: 1490394 - DNA, 15 bp, Homo sapiens
cccaaggcagtaccc

SEQ ID NO: 1490395 - DNA, 15 bp, Homo sapiens
tcccaaggcagtacc

SEQ ID NO: 1490396 - DNA, 15 bp, Homo sapiens
ctcccaaggcagtac

SEQ ID NO: 1490397 - DNA, 15 bp, Homo sapiens
actcccaaggcagta

SEQ ID NO: 1490398 - DNA, 15 bp, Homo sapiens
gactcccaaggcagt

SEQ ID NO: 1490399 - DNA, 15 bp, Homo sapiens
agactcccaaggcag

SEQ ID NO: 1490400 - DNA, 15 bp, Homo sapiens
gagactcccaaggca

SEQ ID NO: 1490401 - DNA, 15 bp, Homo sapiens
tgagactcccaaggc

SEQ ID NO: 1490402 - DNA, 15 bp, Homo sapiens
ttgagactcccaagg

SEQ ID NO: 1490403 - DNA, 15 bp, Homo sapiens
cttgagactcccaag

SEQ ID NO: 1490404 - DNA, 15 bp, Homo sapiens
acttgagactcccaa

SEQ ID NO: 1490405 - DNA, 15 bp, Homo sapiens
gacttgagactccca

SEQ ID NO: 1490406 - DNA, 15 bp, Homo sapiens
ggacttgagactccc

SEQ ID NO: 1490407 - DNA, 15 bp, Homo sapiens
cggacttgagactcc

SEQ ID NO: 1490408 - DNA, 15 bp, Homo sapiens
acggacttgagactc

SEQ ID NO: 1490409 - DNA, 15 bp, Homo sapiens
tacggacttgagact

SEQ ID NO: 1490410 - DNA, 15 bp, Homo sapiens
atacggacttgagac

SEQ ID NO: 1490411 - DNA, 15 bp, Homo sapiens
catacggacttgaga

SEQ ID NO: 1490412 - DNA, 15 bp, Homo sapiens
acatacggacttgag

SEQ ID NO: 1490413 - DNA, 15 bp, Homo sapiens
tacatacggacttga

SEQ ID NO: 1490414 - DNA, 15 bp, Homo sapiens
ttacatacggacttg

SEQ ID NO: 1490415 - DNA, 15 bp, Homo sapiens
tttacatacggactt

SEQ ID NO: 1490416 - DNA, 15 bp, Homo sapiens
atttacatacggact

SEQ ID NO: 1490417 - DNA, 15 bp, Homo sapiens
gatttacatacggac

SEQ ID NO: 1490418 - DNA, 15 bp, Homo sapiens
tgatttacatacgga

SEQ ID NO: 1490419 - DNA, 15 bp, Homo sapiens
ctgatttacatacgg

SEQ ID NO: 1490420 - DNA, 15 bp, Homo sapiens
tctgatttacatacg

SEQ ID NO: 1490421 - DNA, 15 bp, Homo sapiens
atctgatttacatac

SEQ ID NO: 1490422 - DNA, 15 bp, Homo sapiens
gatctgatttacata

SEQ ID NO: 1490423 - DNA, 15 bp, Homo sapiens
agatctgatttacat

SEQ ID NO: 1490424 - DNA, 15 bp, Homo sapiens
gagatctgatttaca

SEQ ID NO: 1490425 - DNA, 15 bp, Homo sapiens
ggagatctgatttac

SEQ ID NO: 1490426 - DNA, 15 bp, Homo sapiens
gggagatctgattta

SEQ ID NO: 1490427 - DNA, 15 bp, Homo sapiens
ggggagatctgattt

SEQ ID NO: 1490428 - DNA, 15 bp, Homo sapiens
aggggagatctgatt

SEQ ID NO: 1490429 - DNA, 15 bp, Homo sapiens
gaggggagatctgat

SEQ ID NO: 1490430 - DNA, 15 bp, Homo sapiens
agaggggagatctga

SEQ ID NO: 1490431 - DNA, 15 bp, Homo sapiens
gagaggggagatctg

SEQ ID NO: 1490432 - DNA, 15 bp, Homo sapiens
tgagaggggagatct

SEQ ID NO: 1490433 - DNA, 15 bp, Homo sapiens
gtgagaggggagatc

SEQ ID NO: 1490434 - DNA, 15 bp, Homo sapiens
ggtgagaggggagat

SEQ ID NO: 1490435 - DNA, 15 bp, Homo sapiens
gggtgagaggggaga

SEQ ID NO: 1490436 - DNA, 15 bp, Homo sapiens
aggggtgagagggga

SEQ ID NO: 1490437 - DNA, 15 bp, Homo sapiens
gaggggtgagagggg

SEQ ID NO: 1490438 - DNA, 15 bp, Homo sapiens
ggaggggtgagaggg

SEQ ID NO: 1490439 - DNA, 15 bp, Homo sapiens
gggaggggtgagagg

SEQ ID NO: 1490440 - DNA, 15 bp, Homo sapiens
tgggaggggtgagag

SEQ ID NO: 1490441 - DNA, 15 bp, Homo sapiens
gtgggaggggtgaga

SEQ ID NO: 1490442 - DNA, 15 bp, Homo sapiens
ggtgggaggggtgag

SEQ ID NO: 1490443 - DNA, 15 bp, Homo sapiens
gggtgggaggggtga

SEQ ID NO: 1490444 - DNA, 15 bp, Homo sapiens
tgggtgggaggggtg

SEQ ID NO: 1490445 - DNA, 15 bp, Homo sapiens
atgggtgggaggggt

SEQ ID NO: 1490446 - DNA, 15 bp, Homo sapiens
aatgggtgggagggg

SEQ ID NO: 1490447 - DNA, 15 bp, Homo sapiens
taatgggtgggaggg

SEQ ID NO: 1490448 - DNA, 15 bp, Homo sapiens
ttaatgggtgggagg

SEQ ID NO: 1490449 - DNA, 15 bp, Homo sapiens
gttaatgggtgggag

SEQ ID NO: 1490450 - DNA, 15 bp, Homo sapiens
ggttaatgggtggga

SEQ ID NO: 1490451 - DNA, 15 bp, Homo sapiens
aggttaatgggtggg

SEQ ID NO: 1490452 - DNA, 15 bp, Homo sapiens
gaggttaatgggtgg

SEQ ID NO: 1490453 - DNA, 15 bp, Homo sapiens
ggaggttaatgggtg

SEQ ID NO: 1490454 - DNA, 15 bp, Homo sapiens
aggaggttaatgggt

SEQ ID NO: 1490455 - DNA, 15 bp, Homo sapiens
gaggaggttaatggg

SEQ ID NO: 1490456 - DNA, 15 bp, Homo sapiens
ggaggaggttaatgg

SEQ ID NO: 1490457 - DNA, 15 bp, Homo sapiens
gggaggaggttaatg

SEQ ID NO: 1490458 - DNA, 15 bp, Homo sapiens
tgggaggaggttaat

SEQ ID NO: 1490459 - DNA, 15 bp, Homo sapiens
ttgggaggaggttaa

SEQ ID NO: 1490460 - DNA, 15 bp, Homo sapiens
tttgggaggaggtta

SEQ ID NO: 1490461 - DNA, 15 bp, Homo sapiens
ttttgggaggaggtt

SEQ ID NO: 1490462 - DNA, 15 bp, Homo sapiens
tttttgggaggaggt

SEQ ID NO: 1490463 - DNA, 15 bp, Homo sapiens
ttttttgggaggagg

SEQ ID NO: 1490464 - DNA, 15 bp, Homo sapiens
gttttttgggaggag

SEQ ID NO: 1490465 - DNA, 15 bp, Homo sapiens
tgttttttgggagga

SEQ ID NO: 1490466 - DNA, 15 bp, Homo sapiens
ttgttttttgggagg

SEQ ID NO: 1490467 - DNA, 15 bp, Homo sapiens
cttgttttttgggag

SEQ ID NO: 1490468 - DNA, 15 bp, Homo sapiens
acttgttttttggga

SEQ ID NO: 1490469 - DNA, 15 bp, Homo sapiens
tacttgttttttggg

SEQ ID NO: 1490470 - DNA, 15 bp, Homo sapiens
ttacttgttttttgg

SEQ ID NO: 1490471 - DNA, 15 bp, Homo sapiens
tttacttgttttttg

SEQ ID NO: 1490472 - DNA, 15 bp, Homo sapiens
ctttacttgtttttt

SEQ ID NO: 1490473 - DNA, 15 bp, Homo sapiens
actttacttgttttt

SEQ ID NO: 1490474 - DNA, 15 bp, Homo sapiens
aactttacttgtttt

SEQ ID NO: 1490475 - DNA, 15 bp, Homo sapiens
taactttacttgttt

SEQ ID NO: 1490476 - DNA, 15 bp, Homo sapiens
ataactttacttgtt

SEQ ID NO: 1490477 - DNA, 15 bp, Homo sapiens
aataactttacttgt

SEQ ID NO: 1490478 - DNA, 15 bp, Homo sapiens
gaataactttacttg

SEQ ID NO: 1490479 - DNA, 15 bp, Homo sapiens
agaataactttactt

SEQ ID NO: 1490480 - DNA, 15 bp, Homo sapiens
gagaataactttact

SEQ ID NO: 1490481 - DNA, 15 bp, Homo sapiens
tgagaataactttac

SEQ ID NO: 1490482 - DNA, 15 bp, Homo sapiens
ttgagaataacttta

SEQ ID NO: 1490483 - DNA, 15 bp, Homo sapiens
attgagaataacttt

SEQ ID NO: 1490484 - DNA, 15 bp, Homo sapiens
gattgagaataactt

SEQ ID NO: 1490485 - DNA, 15 bp, Homo sapiens
ggattgagaataact

SEQ ID NO: 1490486 - DNA, 15 bp, Homo sapiens
tggattgagaataac

SEQ ID NO: 1490487 - DNA, 15 bp, Homo sapiens
atggattgagaataa

SEQ ID NO: 1490488 - DNA, 15 bp, Homo sapiens
gatggattgagaata

SEQ ID NO: 1490489 - DNA, 15 bp, Homo sapiens
ggatggattgagaat

SEQ ID NO: 1490490 - DNA, 15 bp, Homo sapiens
aggatggattgagaa

SEQ ID NO: 1490491 - DNA, 15 bp, Homo sapiens
gaggatggattgaga

SEQ ID NO: 1490492 - DNA, 15 bp, Homo sapiens
agaggatggattgag

SEQ ID NO: 1490493 - DNA, 15 bp, Homo sapiens
aagaggatggattga

SEQ ID NO: 1490494 - DNA, 15 bp, Homo sapiens
caagaggatggattg

SEQ ID NO: 1490495 - DNA, 15 bp, Homo sapiens
gcaagaggatggatt

SEQ ID NO: 1490496 - DNA, 15 bp, Homo sapiens
tgcaagaggatggat

SEQ ID NO: 1490497 - DNA, 15 bp, Homo sapiens
ctgcaagaggatgga

SEQ ID NO: 1490498 - DNA, 15 bp, Homo sapiens
gctgcaagaggatgg

SEQ ID NO: 1490499 - DNA, 15 bp, Homo sapiens
tgctgcaagaggatg

SEQ ID NO: 1490500 - DNA, 15 bp, Homo sapiens
gtgctgcaagaggat

SEQ ID NO: 1490501 - DNA, 15 bp, Homo sapiens
tgtgctgcaagagga

SEQ ID NO: 1490502 - DNA, 15 bp, Homo sapiens
ctgtgctgcaagagg

SEQ ID NO: 1490503 - DNA, 15 bp, Homo sapiens
tctgtgctgcaagag

SEQ ID NO: 1490504 - DNA, 15 bp, Homo sapiens
ctctgtgctgcaaga

SEQ ID NO: 1490505 - DNA, 15 bp, Homo sapiens
actctgtgctgcaag

SEQ ID NO: 1490506 - DNA, 15 bp, Homo sapiens
gactctgtgctgcaa

SEQ ID NO: 1490507 - DNA, 15 bp, Homo sapiens
agactctgtgctgca

SEQ ID NO: 1490508 - DNA, 15 bp, Homo sapiens
gagactctgtgctgc

SEQ ID NO: 1490509 - DNA, 15 bp, Homo sapiens
agagactctgtgctg

SEQ ID NO: 1490510 - DNA, 15 bp, Homo sapiens
aagagactctgtgct

SEQ ID NO: 1490511 - DNA, 15 bp, Homo sapiens
aaagagactctgtgc

SEQ ID NO: 1490512 - DNA, 15 bp, Homo sapiens
aaaagagactctgtg

SEQ ID NO: 1490513 - DNA, 15 bp, Homo sapiens
taaaagagactctgt

SEQ ID NO: 1490514 - DNA, 15 bp, Homo sapiens
ttaaaagagactctg

SEQ ID NO: 1490515 - DNA, 15 bp, Homo sapiens
tttaaaagagactct

SEQ ID NO: 1490516 - DNA, 15 bp, Homo sapiens
ttttaaaagagactc

SEQ ID NO: 1490517 - DNA, 15 bp, Homo sapiens
attttaaaagagact

SEQ ID NO: 1490518 - DNA, 15 bp, Homo sapiens
aattttaaaagagac

SEQ ID NO: 1490519 - DNA, 15 bp, Homo sapiens
aaattttaaaagaga

SEQ ID NO: 1490520 - DNA, 15 bp, Homo sapiens
caaattttaaaagag

SEQ ID NO: 1490521 - DNA, 15 bp, Homo sapiens
acaaattttaaaaga

SEQ ID NO: 1490522 - DNA, 15 bp, Homo sapiens
aacaaattttaaaag

SEQ ID NO: 1490523 - DNA, 15 bp, Homo sapiens
caacaaattttaaaa

SEQ ID NO: 1490524 - DNA, 15 bp, Homo sapiens
acaacaaattttaaa

SEQ ID NO: 1490525 - DNA, 15 bp, Homo sapiens
cacaacaaattttaa

SEQ ID NO: 1490526 - DNA, 15 bp, Homo sapiens
acacaacaaatttta

SEQ ID NO: 1490527 - DNA, 15 bp, Homo sapiens
tacacaacaaatttt

SEQ ID NO: 1490528 - DNA, 15 bp, Homo sapiens
atacacaacaaattt

SEQ ID NO: 1490529 - DNA, 15 bp, Homo sapiens
gatacacaacaaatt

SEQ ID NO: 1490530 - DNA, 15 bp, Homo sapiens
agatacacaacaaat

SEQ ID NO: 1490531 - DNA, 15 bp, Homo sapiens
gagatacacaacaaa

SEQ ID NO: 1490532 - DNA, 15 bp, Homo sapiens
agagatacacaacaa

SEQ ID NO: 1490533 - DNA, 15 bp, Homo sapiens
aagagatacacaaca

SEQ ID NO: 1490534 - DNA, 15 bp, Homo sapiens
aaagagatacacaac

SEQ ID NO: 1490535 - DNA, 15 bp, Homo sapiens
aaaagagatacacaa

SEQ ID NO: 1490536 - DNA, 15 bp, Homo sapiens
caaaagagatacaca

SEQ ID NO: 1490537 - DNA, 15 bp, Homo sapiens
ccaaaagagatacac

SEQ ID NO: 1490538 - DNA, 15 bp, Homo sapiens
gccaaaagagataca

SEQ ID NO: 1490539 - DNA, 15 bp, Homo sapiens
ggccaaaagagatac

SEQ ID NO: 1490540 - DNA, 15 bp, Homo sapiens
gggccaaaagagata

SEQ ID NO: 1490541 - DNA, 15 bp, Homo sapiens
ggggccaaaagagat

SEQ ID NO: 1490542 - DNA, 15 bp, Homo sapiens
aggggccaaaagaga

SEQ ID NO: 1490543 - DNA, 15 bp, Homo sapiens
caggggccaaaagag

SEQ ID NO: 1490544 - DNA, 15 bp, Homo sapiens
acaggggccaaaaga

SEQ ID NO: 1490545 - DNA, 15 bp, Homo sapiens
cacaggggccaaaag

SEQ ID NO: 1490546 - DNA, 15 bp, Homo sapiens
acacaggggccaaaa

SEQ ID NO: 1490547 - DNA, 15 bp, Homo sapiens
cacacaggggccaaa

SEQ ID NO: 1490548 - DNA, 15 bp, Homo sapiens
gcacacaggggccaa

SEQ ID NO: 1490549 - DNA, 15 bp, Homo sapiens
agcacacaggggcca

SEQ ID NO: 1490550 - DNA, 15 bp, Homo sapiens
cagcacacaggggcc

SEQ ID NO: 1490551 - DNA, 15 bp, Homo sapiens
gcagcacacaggggc

SEQ ID NO: 1490552 - DNA, 15 bp, Homo sapiens
cgcagcacacagggg

SEQ ID NO: 1490553 - DNA, 15 bp, Homo sapiens
tcgcagcacacaggg

SEQ ID NO: 1490554 - DNA, 15 bp, Homo sapiens
gtcgcagcacacagg

SEQ ID NO: 1490555 - DNA, 15 bp, Homo sapiens
cgtcgcagcacacag

SEQ ID NO: 1490556 - DNA, 15 bp, Homo sapiens
acgtcgcagcacaca

SEQ ID NO: 1490557 - DNA, 15 bp, Homo sapiens
gacgtcgcagcacac

SEQ ID NO: 1490558 - DNA, 15 bp, Homo sapiens
agacgtcgcagcaca

SEQ ID NO: 1490559 - DNA, 15 bp, Homo sapiens
gagacgtcgcagcac

SEQ ID NO: 1490560 - DNA, 15 bp, Homo sapiens
agagacgtcgcagca

SEQ ID NO: 1490561 - DNA, 15 bp, Homo sapiens
aagagacgtcgcagc

SEQ ID NO: 1490562 - DNA, 15 bp, Homo sapiens
aaagagacgtcgcag

SEQ ID NO: 1490563 - DNA, 15 bp, Homo sapiens
aaaagagacgtcgca

SEQ ID NO: 1490564 - DNA, 15 bp, Homo sapiens
aaaaagagacgtcgc

SEQ ID NO: 1490565 - DNA, 15 bp, Homo sapiens
caaaaagagacgtcg

SEQ ID NO: 1490566 - DNA, 15 bp, Homo sapiens
acaaaaagagacgtc

SEQ ID NO: 1490567 - DNA, 15 bp, Homo sapiens
gacaaaaagagacgt

SEQ ID NO: 1490568 - DNA, 15 bp, Homo sapiens
tgacaaaaagagacg

SEQ ID NO: 1490569 - DNA, 15 bp, Homo sapiens
atgacaaaaagagac

SEQ ID NO: 1490570 - DNA, 15 bp, Homo sapiens
aatgacaaaaagaga

SEQ ID NO: 1490571 - DNA, 15 bp, Homo sapiens
aaatgacaaaaagag

SEQ ID NO: 1490572 - DNA, 15 bp, Homo sapiens
caaatgacaaaaaga

SEQ ID NO: 1490573 - DNA, 15 bp, Homo sapiens
acaaatgacaaaaag

SEQ ID NO: 1490574 - DNA, 15 bp, Homo sapiens
gacaaatgacaaaaa

SEQ ID NO: 1490575 - DNA, 15 bp, Homo sapiens
ggacaaatgacaaaa

SEQ ID NO: 1490576 - DNA, 15 bp, Homo sapiens
tggacaaatgacaaa

SEQ ID NO: 1490577 - DNA, 15 bp, Homo sapiens
atggacaaatgacaa

SEQ ID NO: 1490578 - DNA, 15 bp, Homo sapiens
gatggacaaatgaca

SEQ ID NO: 1490579 - DNA, 15 bp, Homo sapiens
cgatggacaaatgac

SEQ ID NO: 1490580 - DNA, 15 bp, Homo sapiens
ccgatggacaaatga

SEQ ID NO: 1490581 - DNA, 15 bp, Homo sapiens
cccgatggacaaatg

SEQ ID NO: 1490582 - DNA, 15 bp, Homo sapiens
acccgatggacaaat

SEQ ID NO: 1490583 - DNA, 15 bp, Homo sapiens
cacccgatggacaaa

SEQ ID NO: 1490584 - DNA, 15 bp, Homo sapiens
acacccgatggacaa

SEQ ID NO: 1490585 - DNA, 15 bp, Homo sapiens
aacacccgatggaca

SEQ ID NO: 1490586 - DNA, 15 bp, Homo sapiens
aaacacccgatggac

SEQ ID NO: 1490587 - DNA, 15 bp, Homo sapiens
taaacacccgatgga

SEQ ID NO: 1490588 - DNA, 15 bp, Homo sapiens
gtaaacacccgatgg

SEQ ID NO: 1490589 - DNA, 15 bp, Homo sapiens
ggtaaacacccgatg

SEQ ID NO: 1490590 - DNA, 15 bp, Homo sapiens
cggtaaacacccgat

SEQ ID NO: 1490591 - DNA, 15 bp, Homo sapiens
tcggtaaacacccga

SEQ ID NO: 1490592 - DNA, 15 bp, Homo sapiens
ctcggtaaacacccg

SEQ ID NO: 1490593 - DNA, 15 bp, Homo sapiens
cctcggtaaacaccc

SEQ ID NO: 1490594 - DNA, 15 bp, Homo sapiens
tcctcggtaaacacc

SEQ ID NO: 1490595 - DNA, 15 bp, Homo sapiens
gtcctcggtaaacac

SEQ ID NO: 1490596 - DNA, 15 bp, Homo sapiens
agtcctcggtaaaca

SEQ ID NO: 1490597 - DNA, 15 bp, Homo sapiens
cagtcctcggtaaac

SEQ ID NO: 1490598 - DNA, 15 bp, Homo sapiens
acagtcctcggtaaa

SEQ ID NO: 1490599 - DNA, 15 bp, Homo sapiens
tacagtcctcggtaa

SEQ ID NO: 1490600 - DNA, 15 bp, Homo sapiens
gtacagtcctcggta

SEQ ID NO: 1490601 - DNA, 15 bp, Homo sapiens
ggtacagtcctcggt

SEQ ID NO: 1490602 - DNA, 15 bp, Homo sapiens
gggtacagtcctcgg

SEQ ID NO: 1490603 - DNA, 15 bp, Homo sapiens
tgggtacagtcctcg

SEQ ID NO: 1490604 - DNA, 15 bp, Homo sapiens
ttgggtacagtcctc

SEQ ID NO: 1490605 - DNA, 15 bp, Homo sapiens
attgggtacagtcct

SEQ ID NO: 1490606 - DNA, 15 bp, Homo sapiens
cattgggtacagtcc

SEQ ID NO: 1490607 - DNA, 15 bp, Homo sapiens
gcattgggtacagtc

SEQ ID NO: 1490608 - DNA, 15 bp, Homo sapiens
agcattgggtacagt

SEQ ID NO: 1490609 - DNA, 15 bp, Homo sapiens
cagcattgggtacag

SEQ ID NO: 1490610 - DNA, 15 bp, Homo sapiens
ccagcattgggtaca

SEQ ID NO: 1490611 - DNA, 15 bp, Homo sapiens
tccagcattgggtac

SEQ ID NO: 1490612 - DNA, 15 bp, Homo sapiens
gtccagcattgggta

SEQ ID NO: 1490613 - DNA, 15 bp, Homo sapiens
ggtccagcattgggt

SEQ ID NO: 1490614 - DNA, 15 bp, Homo sapiens
gggtccagcattggg

SEQ ID NO: 1490615 - DNA, 15 bp, Homo sapiens
agggtccagcattgg

SEQ ID NO: 1490616 - DNA, 15 bp, Homo sapiens
cagggtccagcattg

SEQ ID NO: 1490617 - DNA, 15 bp, Homo sapiens
ccagggtccagcatt

SEQ ID NO: 1490618 - DNA, 15 bp, Homo sapiens
cccagggtccagcat

SEQ ID NO: 1490619 - DNA, 15 bp, Homo sapiens
tcccagggtccagca

SEQ ID NO: 1490620 - DNA, 15 bp, Homo sapiens
ttcccagggtccagc

SEQ ID NO: 1490621 - DNA, 15 bp, Homo sapiens
gttcccagggtccag

SEQ ID NO: 1490622 - DNA, 15 bp, Homo sapiens
tgttcccagggtcca

SEQ ID NO: 1490623 - DNA, 15 bp, Homo sapiens
atgttcccagggtcc

SEQ ID NO: 1490624 - DNA, 15 bp, Homo sapiens
catgttcccagggtc

SEQ ID NO: 1490625 - DNA, 15 bp, Homo sapiens
tcatgttcccagggt

SEQ ID NO: 1490626 - DNA, 15 bp, Homo sapiens
ctcatgttcccaggg

SEQ ID NO: 1490627 - DNA, 15 bp, Homo sapiens
cctcatgttcccagg

SEQ ID NO: 1490628 - DNA, 15 bp, Homo sapiens
tcctcatgttcccag

SEQ ID NO: 1490629 - DNA, 15 bp, Homo sapiens
gtcctcatgttccca

SEQ ID NO: 1490630 - DNA, 15 bp, Homo sapiens
ggtcctcatgttccc

SEQ ID NO: 1490631 - DNA, 15 bp, Homo sapiens
tggtcctcatgttcc

SEQ ID NO: 1490632 - DNA, 15 bp, Homo sapiens
ttggtcctcatgttc

SEQ ID NO: 1490633 - DNA, 15 bp, Homo sapiens
attggtcctcatgtt

SEQ ID NO: 1490634 - DNA, 15 bp, Homo sapiens
cattggtcctcatgt

SEQ ID NO: 1490635 - DNA, 15 bp, Homo sapiens
tcattggtcctcatg

SEQ ID NO: 1490636 - DNA, 15 bp, Homo sapiens
gtcattggtcctcat

SEQ ID NO: 1490637 - DNA, 15 bp, Homo sapiens
tgtcattggtcctca

SEQ ID NO: 1490638 - DNA, 15 bp, Homo sapiens
gtgtcattggtcctc

SEQ ID NO: 1490639 - DNA, 15 bp, Homo sapiens
tgtgtcattggtcct

SEQ ID NO: 1490640 - DNA, 15 bp, Homo sapiens
ctgtgtcattggtcc

SEQ ID NO: 1490641 - DNA, 15 bp, Homo sapiens
tctgtgtcattggtc

SEQ ID NO: 1490642 - DNA, 15 bp, Homo sapiens
ctctgtgtcattggt

SEQ ID NO: 1490643 - DNA, 15 bp, Homo sapiens
gctctgtgtcattgg

SEQ ID NO: 1490644 - DNA, 15 bp, Homo sapiens
cgctctgtgtcattg

SEQ ID NO: 1490645 - DNA, 15 bp, Homo sapiens
gcgctctgtgtcatt

SEQ ID NO: 1490646 - DNA, 15 bp, Homo sapiens
ggcgctctgtgtcat

SEQ ID NO: 1490647 - DNA, 15 bp, Homo sapiens
aggcgctctgtgtca

SEQ ID NO: 1490648 - DNA, 15 bp, Homo sapiens
caggcgctctgtgtc

SEQ ID NO: 1490649 - DNA, 15 bp, Homo sapiens
tcaggcgctctgtgt

SEQ ID NO: 1490650 - DNA, 15 bp, Homo sapiens
ttcaggcgctctgtg

SEQ ID NO: 1490651 - DNA, 15 bp, Homo sapiens
gttcaggcgctctgt

SEQ ID NO: 1490652 - DNA, 15 bp, Homo sapiens
tgttcaggcgctctg

SEQ ID NO: 1490653 - DNA, 15 bp, Homo sapiens
ctgttcaggcgctct

SEQ ID NO: 1490654 - DNA, 15 bp, Homo sapiens
cctgttcaggcgctc

SEQ ID NO: 1490655 - DNA, 15 bp, Homo sapiens
tcctgttcaggcgct

SEQ ID NO: 1490656 - DNA, 15 bp, Homo sapiens
ctcctgttcaggcgc

SEQ ID NO: 1490657 - DNA, 15 bp, Homo sapiens
actcctgttcaggcg

SEQ ID NO: 1490658 - DNA, 15 bp, Homo sapiens
aactcctgttcaggc

SEQ ID NO: 1490659 - DNA, 15 bp, Homo sapiens
taactcctgttcagg

SEQ ID NO: 1490660 - DNA, 15 bp, Homo sapiens
ctaactcctgttcag

SEQ ID NO: 1490661 - DNA, 15 bp, Homo sapiens
tctaactcctgttca

SEQ ID NO: 1490662 - DNA, 15 bp, Homo sapiens
ctctaactcctgttc

SEQ ID NO: 1490663 - DNA, 15 bp, Homo sapiens
actctaactcctgtt

SEQ ID NO: 1490664 - DNA, 15 bp, Homo sapiens
aactctaactcctgt

SEQ ID NO: 1490665 - DNA, 15 bp, Homo sapiens
aaactctaactcctg

SEQ ID NO: 1490666 - DNA, 15 bp, Homo sapiens
caaactctaactcct

SEQ ID NO: 1490667 - DNA, 15 bp, Homo sapiens
ccaaactctaactcc

SEQ ID NO: 1490668 - DNA, 15 bp, Homo sapiens
caccaaactctaact

SEQ ID NO: 1490669 - DNA, 15 bp, Homo sapiens
ccaccaaactctaac

SEQ ID NO: 1490670 - DNA, 15 bp, Homo sapiens
tccaccaaactctaa

SEQ ID NO: 1490671 - DNA, 15 bp, Homo sapiens
ttccaccaaactcta

SEQ ID NO: 1490672 - DNA, 15 bp, Homo sapiens
tttccaccaaactct

SEQ ID NO: 1490673 - DNA, 15 bp, Homo sapiens
ctttccaccaaactc

SEQ ID NO: 1490674 - DNA, 15 bp, Homo sapiens
tctttccaccaaact

SEQ ID NO: 1490675 - DNA, 15 bp, Homo sapiens
ttctttccaccaaac

SEQ ID NO: 1490676 - DNA, 15 bp, Homo sapiens
gttctttccaccaaa

SEQ ID NO: 1490677 - DNA, 15 bp, Homo sapiens
tgttctttccaccaa

SEQ ID NO: 1490678 - DNA, 15 bp, Homo sapiens
ttgttctttccacca

SEQ ID NO: 1490679 - DNA, 15 bp, Homo sapiens
cttgttctttccacc

SEQ ID NO: 1490680 - DNA, 15 bp, Homo sapiens
acttgttctttccac

SEQ ID NO: 1490681 - DNA, 15 bp, Homo sapiens
gacttgttctttcca

SEQ ID NO: 1490682 - DNA, 15 bp, Homo sapiens
ggacttgttctttcc

SEQ ID NO: 1490683 - DNA, 15 bp, Homo sapiens
aggacttgttctttc

SEQ ID NO: 1490684 - DNA, 15 bp, Homo sapiens
gaggacttgttcttt

SEQ ID NO: 1490685 - DNA, 15 bp, Homo sapiens
tgaggacttgttctt

SEQ ID NO: 1490686 - DNA, 15 bp, Homo sapiens
ttgaggacttgttct

SEQ ID NO: 1490687 - DNA, 15 bp, Homo sapiens
attgaggacttgttc

SEQ ID NO: 1490688 - DNA, 15 bp, Homo sapiens
aattgaggacttgtt

SEQ ID NO: 1490689 - DNA, 15 bp, Homo sapiens
caattgaggacttgt

SEQ ID NO: 1490690 - DNA, 15 bp, Homo sapiens
acaattgaggacttg

SEQ ID NO: 1490691 - DNA, 15 bp, Homo sapiens
cacaattgaggactt

SEQ ID NO: 1490692 - DNA, 15 bp, Homo sapiens
tcacaattgaggact

SEQ ID NO: 1490693 - DNA, 15 bp, Homo sapiens
atcacaattgaggac

SEQ ID NO: 1490694 - DNA, 15 bp, Homo sapiens
aatcacaattgagga

SEQ ID NO: 1490695 - DNA, 15 bp, Homo sapiens
taatcacaattgagg

SEQ ID NO: 1490696 - DNA, 15 bp, Homo sapiens
ctaatcacaattgag

SEQ ID NO: 1490697 - DNA, 15 bp, Homo sapiens
cctaatcacaattga

SEQ ID NO: 1490698 - DNA, 15 bp, Homo sapiens
tcctaatcacaattg

SEQ ID NO: 1490699 - DNA, 15 bp, Homo sapiens
ctcctaatcacaatt

SEQ ID NO: 1490700 - DNA, 15 bp, Homo sapiens
tctcctaatcacaat

SEQ ID NO: 1490701 - DNA, 15 bp, Homo sapiens
ctctcctaatcacaa

SEQ ID NO: 1490702 - DNA, 15 bp, Homo sapiens
gctctcctaatcaca

SEQ ID NO: 1490703 - DNA, 15 bp, Homo sapiens
tgctctcctaatcac

SEQ ID NO: 1490704 - DNA, 15 bp, Homo sapiens
ctgctctcctaatca

SEQ ID NO: 1490705 - DNA, 15 bp, Homo sapiens
tctgctctcctaatc

SEQ ID NO: 1490706 - DNA, 15 bp, Homo sapiens
atctgctctcctaat

SEQ ID NO: 1490707 - DNA, 15 bp, Homo sapiens
gatctgctctcctaa

SEQ ID NO: 1490708 - DNA, 15 bp, Homo sapiens
ggatctgctctccta

SEQ ID NO: 1490709 - DNA, 15 bp, Homo sapiens
aggatctgctctcct

SEQ ID NO: 1490710 - DNA, 15 bp, Homo sapiens
taggatctgctctcc

SEQ ID NO: 1490711 - DNA, 15 bp, Homo sapiens
ataggatctgctctc

SEQ ID NO: 1490712 - DNA, 15 bp, Homo sapiens
aataggatctgctct

SEQ ID NO: 1490713 - DNA, 15 bp, Homo sapiens
aaataggatctgctc

SEQ ID NO: 1490714 - DNA, 15 bp, Homo sapiens
taaataggatctgct

SEQ ID NO: 1490715 - DNA, 15 bp, Homo sapiens
ttaaataggatctgc

SEQ ID NO: 1490716 - DNA, 15 bp, Homo sapiens
tttaaataggatctg

SEQ ID NO: 1490717 - DNA, 15 bp, Homo sapiens
ttttaaataggatct

SEQ ID NO: 1490718 - DNA, 15 bp, Homo sapiens
cttttaaataggatc

SEQ ID NO: 1490719 - DNA, 15 bp, Homo sapiens
gcttttaaataggat

SEQ ID NO: 1490720 - DNA, 15 bp, Homo sapiens
agcttttaaatagga

SEQ ID NO: 1490721 - DNA, 15 bp, Homo sapiens
gagcttttaaatagg

SEQ ID NO: 1490722 - DNA, 15 bp, Homo sapiens
agagcttttaaatag

SEQ ID NO: 1490723 - DNA, 15 bp, Homo sapiens
gagagcttttaaata

SEQ ID NO: 1490724 - DNA, 15 bp, Homo sapiens
agagagcttttaaat

SEQ ID NO: 1490725 - DNA, 15 bp, Homo sapiens
tagagagcttttaaa

SEQ ID NO: 1490726 - DNA, 15 bp, Homo sapiens
gtagagagcttttaa

SEQ ID NO: 1490727 - DNA, 15 bp, Homo sapiens
agtagagagctttta

SEQ ID NO: 1490728 - DNA, 15 bp, Homo sapiens
gagtagagagctttt

SEQ ID NO: 1490729 - DNA, 15 bp, Homo sapiens
ggagtagagagcttt

SEQ ID NO: 1490730 - DNA, 15 bp, Homo sapiens
aggagtagagagctt

SEQ ID NO: 1490731 - DNA, 15 bp, Homo sapiens
caggagtagagagct

SEQ ID NO: 1490732 - DNA, 15 bp, Homo sapiens
tcaggagtagagagc

SEQ ID NO: 1490733 - DNA, 15 bp, Homo sapiens
atcaggagtagagag

SEQ ID NO: 1490734 - DNA, 15 bp, Homo sapiens
tatcaggagtagaga

SEQ ID NO: 1490735 - DNA, 15 bp, Homo sapiens
ctatcaggagtagag

SEQ ID NO: 1490736 - DNA, 15 bp, Homo sapiens
actatcaggagtaga

SEQ ID NO: 1490737 - DNA, 15 bp, Homo sapiens
aactatcaggagtag

SEQ ID NO: 1490738 - DNA, 15 bp, Homo sapiens
caactatcaggagta

SEQ ID NO: 1490739 - DNA, 15 bp, Homo sapiens
acaactatcaggagt

SEQ ID NO: 1490740 - DNA, 15 bp, Homo sapiens
aacaactatcaggag

SEQ ID NO: 1490741 - DNA, 15 bp, Homo sapiens
caacaactatcagga

SEQ ID NO: 1490742 - DNA, 15 bp, Homo sapiens
acaacaactatcagg

SEQ ID NO: 1490743 - DNA, 15 bp, Homo sapiens
aacaacaactatcag

SEQ ID NO: 1490744 - DNA, 15 bp, Homo sapiens
aaacaacaactatca

SEQ ID NO: 1490745 - DNA, 15 bp, Homo sapiens
aaaacaacaactatc

SEQ ID NO: 1490746 - DNA, 15 bp, Homo sapiens
aaaaacaacaactat

SEQ ID NO: 1490747 - DNA, 15 bp, Homo sapiens
taaaaacaacaacta

SEQ ID NO: 1490748 - DNA, 15 bp, Homo sapiens
ttaaaaacaacaact

SEQ ID NO: 1490749 - DNA, 15 bp, Homo sapiens
cttaaaaacaacaac

SEQ ID NO: 1490750 - DNA, 15 bp, Homo sapiens
gcttaaaaacaacaa

SEQ ID NO: 1490751 - DNA, 15 bp, Homo sapiens
ggcttaaaaacaaca

SEQ ID NO: 1490752 - DNA, 15 bp, Homo sapiens
aggcttaaaaacaac

SEQ ID NO: 1490753 - DNA, 15 bp, Homo sapiens
aaggcttaaaaacaa

SEQ ID NO: 1490754 - DNA, 15 bp, Homo sapiens
caaggcttaaaaaca

SEQ ID NO: 1490755 - DNA, 15 bp, Homo sapiens
tcaaggcttaaaaac

SEQ ID NO: 1490756 - DNA, 15 bp, Homo sapiens
atcaaggcttaaaaa

SEQ ID NO: 1490757 - DNA, 15 bp, Homo sapiens
catcaaggcttaaaa

SEQ ID NO: 1490758 - DNA, 15 bp, Homo sapiens
tcatcaaggcttaaa

SEQ ID NO: 1490759 - DNA, 15 bp, Homo sapiens
ctcatcaaggcttaa

SEQ ID NO: 1490760 - DNA, 15 bp, Homo sapiens
cctcatcaaggctta

SEQ ID NO: 1490761 - DNA, 15 bp, Homo sapiens
acctcatcaaggctt

SEQ ID NO: 1490762 - DNA, 15 bp, Homo sapiens
aacctcatcaaggct

SEQ ID NO: 1490763 - DNA, 15 bp, Homo sapiens
aaacctcatcaaggc

SEQ ID NO: 1490764 - DNA, 15 bp, Homo sapiens
caaacctcatcaagg

SEQ ID NO: 1490765 - DNA, 15 bp, Homo sapiens
tcaaacctcatcaag

SEQ ID NO: 1490766 - DNA, 15 bp, Homo sapiens
ttcaaacctcatcaa

SEQ ID NO: 1490767 - DNA, 15 bp, Homo sapiens
gttcaaacctcatca

SEQ ID NO: 1490768 - DNA, 15 bp, Homo sapiens
agttcaaacctcatc

SEQ ID NO: 1490769 - DNA, 15 bp, Homo sapiens
gagttcaaacctcat

SEQ ID NO: 1490770 - DNA, 15 bp, Homo sapiens
tgagttcaaacctca

SEQ ID NO: 1490771 - DNA, 15 bp, Homo sapiens
atgagttcaaacctc

SEQ ID NO: 1490772 - DNA, 15 bp, Homo sapiens
catgagttcaaacct

SEQ ID NO: 1490773 - DNA, 15 bp, Homo sapiens
tcatgagttcaaacc

SEQ ID NO: 1490774 - DNA, 15 bp, Homo sapiens
atcatgagttcaaac

SEQ ID NO: 1490775 - DNA, 15 bp, Homo sapiens
catcatgagttcaaa

SEQ ID NO: 1490776 - DNA, 15 bp, Homo sapiens
tcatcatgagttcaa

SEQ ID NO: 1490777 - DNA, 15 bp, Homo sapiens
atcatcatgagttca

SEQ ID NO: 1490778 - DNA, 15 bp, Homo sapiens
catcatcatgagttc

SEQ ID NO: 1490779 - DNA, 15 bp, Homo sapiens
tcatcatcatgagtt

SEQ ID NO: 1490780 - DNA, 15 bp, Homo sapiens
atcatcatcatgagt

SEQ ID NO: 1490781 - DNA, 15 bp, Homo sapiens
catcatcatcatgag

SEQ ID NO: 1490782 - DNA, 15 bp, Homo sapiens
tcatcatcatcatga

SEQ ID NO: 1490783 - DNA, 15 bp, Homo sapiens
atcatcatcatcatg

SEQ ID NO: 1490784 - DNA, 15 bp, Homo sapiens
atcatcatcatcatc

SEQ ID NO: 1490785 - DNA, 15 bp, Homo sapiens
ggtcatcatcatcat

SEQ ID NO: 1490786 - DNA, 15 bp, Homo sapiens
tggtcatcatcatca

SEQ ID NO: 1490787 - DNA, 15 bp, Homo sapiens
atggtcatcatcatc

SEQ ID NO: 1490788 - DNA, 15 bp, Homo sapiens
catggtcatcatcat

SEQ ID NO: 1490789 - DNA, 15 bp, Homo sapiens
tcatggtcatcatca

SEQ ID NO: 1490790 - DNA, 15 bp, Homo sapiens
gtcatggtcatcatc

SEQ ID NO: 1490791 - DNA, 15 bp, Homo sapiens
ggtcatggtcatcat

SEQ ID NO: 1490792 - DNA, 15 bp, Homo sapiens
tggtcatggtcatca

SEQ ID NO: 1490793 - DNA, 15 bp, Homo sapiens
ctggtcatggtcatc

SEQ ID NO: 1490794 - DNA, 15 bp, Homo sapiens
gctggtcatggtcat

SEQ ID NO: 1490795 - DNA, 15 bp, Homo sapiens
tgctggtcatggtca

SEQ ID NO: 1490796 - DNA, 15 bp, Homo sapiens
ttgctggtcatggtc

SEQ ID NO: 1490797 - DNA, 15 bp, Homo sapiens
gttgctggtcatggt

SEQ ID NO: 1490798 - DNA, 15 bp, Homo sapiens
tgttgctggtcatgg

SEQ ID NO: 1490799 - DNA, 15 bp, Homo sapiens
ttgttgctggtcatg

SEQ ID NO: 1490800 - DNA, 15 bp, Homo sapiens
gttgttgctggtcat

SEQ ID NO: 1490801 - DNA, 15 bp, Homo sapiens
tgttgttgctggtca

SEQ ID NO: 1490802 - DNA, 15 bp, Homo sapiens
atgttgttgctggtc

SEQ ID NO: 1490803 - DNA, 15 bp, Homo sapiens
aatgttgttgctggt

SEQ ID NO: 1490804 - DNA, 15 bp, Homo sapiens
aaatgttgttgctgg

SEQ ID NO: 1490805 - DNA, 15 bp, Homo sapiens
caaatgttgttgctg

SEQ ID NO: 1490806 - DNA, 15 bp, Homo sapiens
tcaaatgttgttgct

SEQ ID NO: 1490807 - DNA, 15 bp, Homo sapiens
atcaaatgttgttgc

SEQ ID NO: 1490808 - DNA, 15 bp, Homo sapiens
tatcaaatgttgttg

SEQ ID NO: 1490809 - DNA, 15 bp, Homo sapiens
atatcaaatgttgtt

SEQ ID NO: 1490810 - DNA, 15 bp, Homo sapiens
aatatcaaatgttgt

SEQ ID NO: 1490811 - DNA, 15 bp, Homo sapiens
gaatatcaaatgttg

SEQ ID NO: 1490812 - DNA, 15 bp, Homo sapiens
agaatatcaaatgtt

SEQ ID NO: 1490813 - DNA, 15 bp, Homo sapiens
cagaatatcaaatgt

SEQ ID NO: 1490814 - DNA, 15 bp, Homo sapiens
ccagaatatcaaatg

SEQ ID NO: 1490815 - DNA, 15 bp, Homo sapiens
accagaatatcaaat

SEQ ID NO: 1490816 - DNA, 15 bp, Homo sapiens
gaccagaatatcaaa

SEQ ID NO: 1490817 - DNA, 15 bp, Homo sapiens
tgaccagaatatcaa

SEQ ID NO: 1490818 - DNA, 15 bp, Homo sapiens
ttgaccagaatatca

SEQ ID NO: 1490819 - DNA, 15 bp, Homo sapiens
attgaccagaatatc

SEQ ID NO: 1490820 - DNA, 15 bp, Homo sapiens
aattgaccagaatat

SEQ ID NO: 1490821 - DNA, 15 bp, Homo sapiens
taattgaccagaata

SEQ ID NO: 1490822 - DNA, 15 bp, Homo sapiens
ctaattgaccagaat

SEQ ID NO: 1490823 - DNA, 15 bp, Homo sapiens
actaattgaccagaa

SEQ ID NO: 1490824 - DNA, 15 bp, Homo sapiens
tactaattgaccaga

SEQ ID NO: 1490825 - DNA, 15 bp, Homo sapiens
atactaattgaccag

SEQ ID NO: 1490826 - DNA, 15 bp, Homo sapiens
gatactaattgacca

SEQ ID NO: 1490827 - DNA, 15 bp, Homo sapiens
agatactaattgacc

SEQ ID NO: 1490828 - DNA, 15 bp, Homo sapiens
cagatactaattgac

SEQ ID NO: 1490829 - DNA, 15 bp, Homo sapiens
gcagatactaattga

SEQ ID NO: 1490830 - DNA, 15 bp, Homo sapiens
ggcagatactaattg

SEQ ID NO: 1490831 - DNA, 15 bp, Homo sapiens
tggcagatactaatt

SEQ ID NO: 1490832 - DNA, 15 bp, Homo sapiens
ttggcagatactaat

SEQ ID NO: 1490833 - DNA, 15 bp, Homo sapiens
gttggcagatactaa

SEQ ID NO: 1490834 - DNA, 15 bp, Homo sapiens
ggttggcagatacta

SEQ ID NO: 1490835 - DNA, 15 bp, Homo sapiens
aggttggcagatact

SEQ ID NO: 1490836 - DNA, 15 bp, Homo sapiens
aaggttggcagatac

SEQ ID NO: 1490837 - DNA, 15 bp, Homo sapiens
caaggttggcagata

SEQ ID NO: 1490838 - DNA, 15 bp, Homo sapiens
tcaaggttggcagat

SEQ ID NO: 1490839 - DNA, 15 bp, Homo sapiens
ctcaaggttggcaga

SEQ ID NO: 1490840 - DNA, 15 bp, Homo sapiens
tctcaaggttggcag

SEQ ID NO: 1490841 - DNA, 15 bp, Homo sapiens
atctcaaggttggca

SEQ ID NO: 1490842 - DNA, 15 bp, Homo sapiens
catctcaaggttggc

SEQ ID NO: 1490843 - DNA, 15 bp, Homo sapiens
acatctcaaggttgg

SEQ ID NO: 1490844 - DNA, 15 bp, Homo sapiens
cacatctcaaggttg

SEQ ID NO: 1490845 - DNA, 15 bp, Homo sapiens
ccacatctcaaggtt

SEQ ID NO: 1490846 - DNA, 15 bp, Homo sapiens
tccacatctcaaggt

SEQ ID NO: 1490847 - DNA, 15 bp, Homo sapiens
ctccacatctcaagg

SEQ ID NO: 1490848 - DNA, 15 bp, Homo sapiens
actccacatctcaag

SEQ ID NO: 1490849 - DNA, 15 bp, Homo sapiens
gactccacatctcaa

SEQ ID NO: 1490850 - DNA, 15 bp, Homo sapiens
agactccacatctca

SEQ ID NO: 1490851 - DNA, 15 bp, Homo sapiens
tagactccacatctc

SEQ ID NO: 1490852 - DNA, 15 bp, Homo sapiens
ttagactccacatct

SEQ ID NO: 1490853 - DNA, 15 bp, Homo sapiens
attagactccacatc

SEQ ID NO: 1490854 - DNA, 15 bp, Homo sapiens
tattagactccacat

SEQ ID NO: 1490855 - DNA, 15 bp, Homo sapiens
atattagactccaca

SEQ ID NO: 1490856 - DNA, 15 bp, Homo sapiens
gatattagactccac

SEQ ID NO: 1490857 - DNA, 15 bp, Homo sapiens
tgatattagactcca

SEQ ID NO: 1490858 - DNA, 15 bp, Homo sapiens
gtgatattagactcc

SEQ ID NO: 1490859 - DNA, 15 bp, Homo sapiens
agtgatattagactc

SEQ ID NO: 1490860 - DNA, 15 bp, Homo sapiens
gagtgatattagact

SEQ ID NO: 1490861 - DNA, 15 bp, Homo sapiens
ggagtgatattagac

SEQ ID NO: 1490862 - DNA, 15 bp, Homo sapiens
tggagtgatattaga

SEQ ID NO: 1490863 - DNA, 15 bp, Homo sapiens
atggagtgatattag

SEQ ID NO: 1490864 - DNA, 15 bp, Homo sapiens
aatggagtgatatta

SEQ ID NO: 1490865 - DNA, 15 bp, Homo sapiens
aaatggagtgatatt

SEQ ID NO: 1490866 - DNA, 15 bp, Homo sapiens
aaaatggagtgatat

SEQ ID NO: 1490867 - DNA, 15 bp, Homo sapiens
taaaatggagtgata

SEQ ID NO: 1490868 - DNA, 15 bp, Homo sapiens
ataaaatggagtgat

SEQ ID NO: 1490869 - DNA, 15 bp, Homo sapiens
tataaaatggagtga

SEQ ID NO: 1490870 - DNA, 15 bp, Homo sapiens
ctataaaatggagtg

SEQ ID NO: 1490871 - DNA, 15 bp, Homo sapiens
tctataaaatggagt

SEQ ID NO: 1490872 - DNA, 15 bp, Homo sapiens
ttctataaaatggag

SEQ ID NO: 1490873 - DNA, 15 bp, Homo sapiens
attctataaaatgga

SEQ ID NO: 1490874 - DNA, 15 bp, Homo sapiens
cattctataaaatgg

SEQ ID NO: 1490875 - DNA, 15 bp, Homo sapiens
ccattctataaaatg

SEQ ID NO: 1490876 - DNA, 15 bp, Homo sapiens
cccattctataaaat

SEQ ID NO: 1490877 - DNA, 15 bp, Homo sapiens
tcccattctataaaa

SEQ ID NO: 1490878 - DNA, 15 bp, Homo sapiens
ttcccattctataaa

SEQ ID NO: 1490879 - DNA, 15 bp, Homo sapiens
tttcccattctataa

SEQ ID NO: 1490880 - DNA, 15 bp, Homo sapiens
gtttcccattctata

SEQ ID NO: 1490881 - DNA, 15 bp, Homo sapiens
agtttcccattctat

SEQ ID NO: 1490882 - DNA, 15 bp, Homo sapiens
cagtttcccattcta

SEQ ID NO: 1490883 - DNA, 15 bp, Homo sapiens
ctcagtttcccattc

SEQ ID NO: 1490884 - DNA, 15 bp, Homo sapiens
cctcagtttcccatt

SEQ ID NO: 1490885 - DNA, 15 bp, Homo sapiens
gcctcagtttcccat

SEQ ID NO: 1490886 - DNA, 15 bp, Homo sapiens
agcctcagtttccca

SEQ ID NO: 1490887 - DNA, 15 bp, Homo sapiens
aagcctcagtttccc

SEQ ID NO: 1490888 - DNA, 15 bp, Homo sapiens
caagcctcagtttcc

SEQ ID NO: 1490889 - DNA, 15 bp, Homo sapiens
acaagcctcagtttc

SEQ ID NO: 1490890 - DNA, 15 bp, Homo sapiens
tacaagcctcagttt

SEQ ID NO: 1490891 - DNA, 15 bp, Homo sapiens
ctacaagcctcagtt

SEQ ID NO: 1490892 - DNA, 15 bp, Homo sapiens
tctacaagcctcagt

SEQ ID NO: 1490893 - DNA, 15 bp, Homo sapiens
ctctacaagcctcag

SEQ ID NO: 1490894 - DNA, 15 bp, Homo sapiens
cctctacaagcctca

SEQ ID NO: 1490895 - DNA, 15 bp, Homo sapiens
acctctacaagcctc

SEQ ID NO: 1490896 - DNA, 15 bp, Homo sapiens
gacctctacaagcct

SEQ ID NO: 1490897 - DNA, 15 bp, Homo sapiens
tgacctctacaagcc

SEQ ID NO: 1490898 - DNA, 15 bp, Homo sapiens
ttgacctctacaagc

SEQ ID NO: 1490899 - DNA, 15 bp, Homo sapiens
tttgacctctacaag

SEQ ID NO: 1490900 - DNA, 15 bp, Homo sapiens
atttgacctctacaa

SEQ ID NO: 1490901 - DNA, 15 bp, Homo sapiens
aatttgacctctaca

SEQ ID NO: 1490902 - DNA, 15 bp, Homo sapiens
taatttgacctctac

SEQ ID NO: 1490903 - DNA, 15 bp, Homo sapiens
ataatttgacctcta

SEQ ID NO: 1490904 - DNA, 15 bp, Homo sapiens
gaaataatttgacct

SEQ ID NO: 1490905 - DNA, 15 bp, Homo sapiens
ggaaataatttgacc

SEQ ID NO: 1490906 - DNA, 15 bp, Homo sapiens
gggaaataatttgac

SEQ ID NO: 1490907 - DNA, 15 bp, Homo sapiens
ggggaaataatttga

SEQ ID NO: 1490908 - DNA, 15 bp, Homo sapiens
tggggaaataatttg

SEQ ID NO: 1490909 - DNA, 15 bp, Homo sapiens
ttggggaaataattt

SEQ ID NO: 1490910 - DNA, 15 bp, Homo sapiens
cttggggaaataatt

SEQ ID NO: 1490911 - DNA, 15 bp, Homo sapiens
ccttggggaaataat

SEQ ID NO: 1490912 - DNA, 15 bp, Homo sapiens
accttggggaaataa

SEQ ID NO: 1490913 - DNA, 15 bp, Homo sapiens
gaccttggggaaata

SEQ ID NO: 1490914 - DNA, 15 bp, Homo sapiens
tgaccttggggaaat

SEQ ID NO: 1490915 - DNA, 15 bp, Homo sapiens
gtgaccttggggaaa

SEQ ID NO: 1490916 - DNA, 15 bp, Homo sapiens
tgtgaccttggggaa

SEQ ID NO: 1490917 - DNA, 15 bp, Homo sapiens
ctgtgaccttgggga

SEQ ID NO: 1490918 - DNA, 15 bp, Homo sapiens
gctgtgaccttgggg

SEQ ID NO: 1490919 - DNA, 15 bp, Homo sapiens
ggctgtgaccttggg

SEQ ID NO: 1490920 - DNA, 15 bp, Homo sapiens
cggctgtgaccttgg

SEQ ID NO: 1490921 - DNA, 15 bp, Homo sapiens
acggctgtgaccttg

SEQ ID NO: 1490922 - DNA, 15 bp, Homo sapiens
aacggctgtgacctt

SEQ ID NO: 1490923 - DNA, 15 bp, Homo sapiens
caacggctgtgacct

SEQ ID NO: 1490924 - DNA, 15 bp, Homo sapiens
tcaacggctgtgacc

SEQ ID NO: 1490925 - DNA, 15 bp, Homo sapiens
ctcaacggctgtgac

SEQ ID NO: 1490926 - DNA, 15 bp, Homo sapiens
actcaacggctgtga

SEQ ID NO: 1490927 - DNA, 15 bp, Homo sapiens
cactcaacggctgtg

SEQ ID NO: 1490928 - DNA, 15 bp, Homo sapiens
ccactcaacggctgt

SEQ ID NO: 1490929 - DNA, 15 bp, Homo sapiens
gccactcaacggctg

SEQ ID NO: 1490930 - DNA, 15 bp, Homo sapiens
ggccactcaacggct

SEQ ID NO: 1490931 - DNA, 15 bp, Homo sapiens
tggccactcaacggc

SEQ ID NO: 1490932 - DNA, 15 bp, Homo sapiens
ttggccactcaacgg

SEQ ID NO: 1490933 - DNA, 15 bp, Homo sapiens
cttggccactcaacg

SEQ ID NO: 1490934 - DNA, 15 bp, Homo sapiens
acttggccactcaac

SEQ ID NO: 1490935 - DNA, 15 bp, Homo sapiens
aacttggccactcaa

SEQ ID NO: 1490936 - DNA, 15 bp, Homo sapiens
caacttggccactca

SEQ ID NO: 1490937 - DNA, 15 bp, Homo sapiens
ccaacttggccactc

SEQ ID NO: 1490938 - DNA, 15 bp, Homo sapiens
tccaacttggccact

SEQ ID NO: 1490939 - DNA, 15 bp, Homo sapiens
atccaacttggccac

SEQ ID NO: 1490940 - DNA, 15 bp, Homo sapiens
gatccaacttggcca

SEQ ID NO: 1490941 - DNA, 15 bp, Homo sapiens
tgatccaacttggcc

SEQ ID NO: 1490942 - DNA, 15 bp, Homo sapiens
gtgatccaacttggc

SEQ ID NO: 1490943 - DNA, 15 bp, Homo sapiens
tgtgatccaacttgg

SEQ ID NO: 1490944 - DNA, 15 bp, Homo sapiens
gtgtgatccaacttg

SEQ ID NO: 1490945 - DNA, 15 bp, Homo sapiens
agtgtgatccaactt

SEQ ID NO: 1490946 - DNA, 15 bp, Homo sapiens
gagtgtgatccaact

SEQ ID NO: 1490947 - DNA, 15 bp, Homo sapiens
ggagtgtgatccaac

SEQ ID NO: 1490948 - DNA, 15 bp, Homo sapiens
tggagtgtgatccaa

SEQ ID NO: 1490949 - DNA, 15 bp, Homo sapiens
ctggagtgtgatcca

SEQ ID NO: 1490950 - DNA, 15 bp, Homo sapiens
cctggagtgtgatcc

SEQ ID NO: 1490951 - DNA, 15 bp, Homo sapiens
acctggagtgtgatc

SEQ ID NO: 1490952 - DNA, 15 bp, Homo sapiens
gacctggagtgtgat

SEQ ID NO: 1490953 - DNA, 15 bp, Homo sapiens
agacctggagtgtga

SEQ ID NO: 1490954 - DNA, 15 bp, Homo sapiens
cagacctggagtgtg

SEQ ID NO: 1490955 - DNA, 15 bp, Homo sapiens
acagacctggagtgt

SEQ ID NO: 1490956 - DNA, 15 bp, Homo sapiens
gacagacctggagtg

SEQ ID NO: 1490957 - DNA, 15 bp, Homo sapiens
ggacagacctggagt

SEQ ID NO: 1490958 - DNA, 15 bp, Homo sapiens
gggacagacctggag

SEQ ID NO: 1490959 - DNA, 15 bp, Homo sapiens
cgggacagacctgga

SEQ ID NO: 1490960 - DNA, 15 bp, Homo sapiens
tcgggacagacctgg

SEQ ID NO: 1490961 - DNA, 15 bp, Homo sapiens
gtcgggacagacctg

SEQ ID NO: 1490962 - DNA, 15 bp, Homo sapiens
tgtcgggacagacct

SEQ ID NO: 1490963 - DNA, 15 bp, Homo sapiens
gtgtcgggacagacc

SEQ ID NO: 1490964 - DNA, 15 bp, Homo sapiens
cgtgtcgggacagac

SEQ ID NO: 1490965 - DNA, 15 bp, Homo sapiens
acgtgtcgggacaga

SEQ ID NO: 1490966 - DNA, 15 bp, Homo sapiens
gacgtgtcgggacag

SEQ ID NO: 1490967 - DNA, 15 bp, Homo sapiens
tgacgtgtcgggaca

SEQ ID NO: 1490968 - DNA, 15 bp, Homo sapiens
ttgacgtgtcgggac

SEQ ID NO: 1490969 - DNA, 15 bp, Homo sapiens
gttgacgtgtcggga

SEQ ID NO: 1490970 - DNA, 15 bp, Homo sapiens
tgttgacgtgtcggg

SEQ ID NO: 1490971 - DNA, 15 bp, Homo sapiens
atgttgacgtgtcgg

SEQ ID NO: 1490972 - DNA, 15 bp, Homo sapiens
catgttgacgtgtcg

SEQ ID NO: 1490973 - DNA, 15 bp, Homo sapiens
ccatgttgacgtgtc

SEQ ID NO: 1490974 - DNA, 15 bp, Homo sapiens
tccatgttgacgtgt

SEQ ID NO: 1490975 - DNA, 15 bp, Homo sapiens
ctccatgttgacgtg

SEQ ID NO: 1490976 - DNA, 15 bp, Homo sapiens
actccatgttgacgt

SEQ ID NO: 1490977 - DNA, 15 bp, Homo sapiens
cactccatgttgacg

SEQ ID NO: 1490978 - DNA, 15 bp, Homo sapiens
ccactccatgttgac

SEQ ID NO: 1490979 - DNA, 15 bp, Homo sapiens
cccactccatgttga

SEQ ID NO: 1490980 - DNA, 15 bp, Homo sapiens
tcccactccatgttg

SEQ ID NO: 1490981 - DNA, 15 bp, Homo sapiens
ctcccactccatgtt

SEQ ID NO: 1490982 - DNA, 15 bp, Homo sapiens
cctcccactccatgt

SEQ ID NO: 1490983 - DNA, 15 bp, Homo sapiens
gcctcccactccatg

SEQ ID NO: 1490984 - DNA, 15 bp, Homo sapiens
ggcctcccactccat

SEQ ID NO: 1490985 - DNA, 15 bp, Homo sapiens
aggcctcccactcca

SEQ ID NO: 1490986 - DNA, 15 bp, Homo sapiens
aaggcctcccactcc

SEQ ID NO: 1490987 - DNA, 15 bp, Homo sapiens
caaggcctcccactc

SEQ ID NO: 1490988 - DNA, 15 bp, Homo sapiens
gcaaggcctcccact

SEQ ID NO: 1490989 - DNA, 15 bp, Homo sapiens
agcaaggcctcccac

SEQ ID NO: 1490990 - DNA, 15 bp, Homo sapiens
aagcaaggcctccca

SEQ ID NO: 1490991 - DNA, 15 bp, Homo sapiens
taagcaaggcctccc

SEQ ID NO: 1490992 - DNA, 15 bp, Homo sapiens
ataagcaaggcctcc

SEQ ID NO: 1490993 - DNA, 15 bp, Homo sapiens
gataagcaaggcctc

SEQ ID NO: 1490994 - DNA, 15 bp, Homo sapiens
agataagcaaggcct

SEQ ID NO: 1490995 - DNA, 15 bp, Homo sapiens
cagataagcaaggcc

SEQ ID NO: 1490996 - DNA, 15 bp, Homo sapiens
ccagataagcaaggc

SEQ ID NO: 1490997 - DNA, 15 bp, Homo sapiens
tccagataagcaagg

SEQ ID NO: 1490998 - DNA, 15 bp, Homo sapiens
ttccagataagcaag

SEQ ID NO: 1490999 - DNA, 15 bp, Homo sapiens
cttccagataagcaa

SEQ ID NO: 1491000 - DNA, 15 bp, Homo sapiens
tcttccagataagca

SEQ ID NO: 1491001 - DNA, 15 bp, Homo sapiens
ctcttccagataagc

SEQ ID NO: 1491002 - DNA, 15 bp, Homo sapiens
cctcttccagataag

SEQ ID NO: 1491003 - DNA, 15 bp, Homo sapiens
tcctcttccagataa

SEQ ID NO: 1491004 - DNA, 15 bp, Homo sapiens
atcctcttccagata

SEQ ID NO: 1491005 - DNA, 15 bp, Homo sapiens
tatcctcttccagat

SEQ ID NO: 1491006 - DNA, 15 bp, Homo sapiens
gtatcctcttccaga

SEQ ID NO: 1491007 - DNA, 15 bp, Homo sapiens
agtatcctcttccag

SEQ ID NO: 1491008 - DNA, 15 bp, Homo sapiens
gagtatcctcttcca

SEQ ID NO: 1491009 - DNA, 15 bp, Homo sapiens
agagtatcctcttcc

SEQ ID NO: 1491010 - DNA, 15 bp, Homo sapiens
aagagtatcctcttc

SEQ ID NO: 1491011 - DNA, 15 bp, Homo sapiens
gaagagtatcctctt

SEQ ID NO: 1491012 - DNA, 15 bp, Homo sapiens
tgaagagtatcctct

SEQ ID NO: 1491013 - DNA, 15 bp, Homo sapiens
ctgaagagtatcctc

SEQ ID NO: 1491014 - DNA, 15 bp, Homo sapiens
gctgaagagtatcct

SEQ ID NO: 1491015 - DNA, 15 bp, Homo sapiens
tgctgaagagtatcc

SEQ ID NO: 1491016 - DNA, 15 bp, Homo sapiens
atgctgaagagtatc

SEQ ID NO: 1491017 - DNA, 15 bp, Homo sapiens
aatgctgaagagtat

SEQ ID NO: 1491018 - DNA, 15 bp, Homo sapiens
gaatgctgaagagta

SEQ ID NO: 1491019 - DNA, 15 bp, Homo sapiens
ggaatgctgaagagt

SEQ ID NO: 1491020 - DNA, 15 bp, Homo sapiens
cggaatgctgaagag

SEQ ID NO: 1491021 - DNA, 15 bp, Homo sapiens
tcggaatgctgaaga

SEQ ID NO: 1491022 - DNA, 15 bp, Homo sapiens
ctcggaatgctgaag

SEQ ID NO: 1491023 - DNA, 15 bp, Homo sapiens
cctcggaatgctgaa

SEQ ID NO: 1491024 - DNA, 15 bp, Homo sapiens
tcctcggaatgctga

SEQ ID NO: 1491025 - DNA, 15 bp, Homo sapiens
gtcctcggaatgctg

SEQ ID NO: 1491026 - DNA, 15 bp, Homo sapiens
tgtcctcggaatgct

SEQ ID NO: 1491027 - DNA, 15 bp, Homo sapiens
ctgtcctcggaatgc

SEQ ID NO: 1491028 - DNA, 15 bp, Homo sapiens
cctgtcctcggaatg

SEQ ID NO: 1491029 - DNA, 15 bp, Homo sapiens
tcctgtcctcggaat

SEQ ID NO: 1491030 - DNA, 15 bp, Homo sapiens
ttcctgtcctcggaa

SEQ ID NO: 1491031 - DNA, 15 bp, Homo sapiens
attcctgtcctcgga

SEQ ID NO: 1491032 - DNA, 15 bp, Homo sapiens
aattcctgtcctcgg

SEQ ID NO: 1491033 - DNA, 15 bp, Homo sapiens
taattcctgtcctcg

SEQ ID NO: 1491034 - DNA, 15 bp, Homo sapiens
ttaattcctgtcctc

SEQ ID NO: 1491035 - DNA, 15 bp, Homo sapiens
cttaattcctgtcct

SEQ ID NO: 1491036 - DNA, 15 bp, Homo sapiens
gcttaattcctgtcc

SEQ ID NO: 1491037 - DNA, 15 bp, Homo sapiens
ggcttaattcctgtc

SEQ ID NO: 1491038 - DNA, 15 bp, Homo sapiens
gggcttaattcctgt

SEQ ID NO: 1491039 - DNA, 15 bp, Homo sapiens
ggggcttaattcctg

SEQ ID NO: 1491040 - DNA, 15 bp, Homo sapiens
tggggcttaattcct

SEQ ID NO: 1491041 - DNA, 15 bp, Homo sapiens
ttggggcttaattcc

SEQ ID NO: 1491042 - DNA, 15 bp, Homo sapiens
tttggggcttaattc

SEQ ID NO: 1491043 - DNA, 15 bp, Homo sapiens
ctttggggcttaatt

SEQ ID NO: 1491044 - DNA, 15 bp, Homo sapiens
gctttggggcttaat

SEQ ID NO: 1491045 - DNA, 15 bp, Homo sapiens
agctttggggcttaa

SEQ ID NO: 1491046 - DNA, 15 bp, Homo sapiens
gagctttggggctta

SEQ ID NO: 1491047 - DNA, 15 bp, Homo sapiens
ggagctttggggctt

SEQ ID NO: 1491048 - DNA, 15 bp, Homo sapiens
aggagctttggggct

SEQ ID NO: 1491049 - DNA, 15 bp, Homo sapiens
caggagctttggggc

SEQ ID NO: 1491050 - DNA, 15 bp, Homo sapiens
acaggagctttgggg

SEQ ID NO: 1491051 - DNA, 15 bp, Homo sapiens
cacaggagctttggg

SEQ ID NO: 1491052 - DNA, 15 bp, Homo sapiens
ccacaggagctttgg

SEQ ID NO: 1491053 - DNA, 15 bp, Homo sapiens
cccacaggagctttg

SEQ ID NO: 1491054 - DNA, 15 bp, Homo sapiens
gcccacaggagcttt

SEQ ID NO: 1491055 - DNA, 15 bp, Homo sapiens
ggcccacaggagctt

SEQ ID NO: 1491056 - DNA, 15 bp, Homo sapiens
cggcccacaggagct

SEQ ID NO: 1491057 - DNA, 15 bp, Homo sapiens
gcggcccacaggagc

SEQ ID NO: 1491058 - DNA, 15 bp, Homo sapiens
tgcggcccacaggag

SEQ ID NO: 1491059 - DNA, 15 bp, Homo sapiens
ttgcggcccacagga

SEQ ID NO: 1491060 - DNA, 15 bp, Homo sapiens
tttgcggcccacagg

SEQ ID NO: 1491061 - DNA, 15 bp, Homo sapiens
ctttgcggcccacag

SEQ ID NO: 1491062 - DNA, 15 bp, Homo sapiens
cctttgcggcccaca

SEQ ID NO: 1491063 - DNA, 15 bp, Homo sapiens
ccctttgcggcccac

SEQ ID NO: 1491064 - DNA, 15 bp, Homo sapiens
accctttgcggccca

SEQ ID NO: 1491065 - DNA, 15 bp, Homo sapiens
aaccctttgcggccc

SEQ ID NO: 1491066 - DNA, 15 bp, Homo sapiens
gaaccctttgcggcc

SEQ ID NO: 1491067 - DNA, 15 bp, Homo sapiens
agaaccctttgcggc

SEQ ID NO: 1491068 - DNA, 15 bp, Homo sapiens
gagaaccctttgcgg

SEQ ID NO: 1491069 - DNA, 15 bp, Homo sapiens
tgagaaccctttgcg

SEQ ID NO: 1491070 - DNA, 15 bp, Homo sapiens
gtgagaaccctttgc

SEQ ID NO: 1491071 - DNA, 15 bp, Homo sapiens
cgtgagaaccctttg

SEQ ID NO: 1491072 - DNA, 15 bp, Homo sapiens
tcgtgagaacccttt

SEQ ID NO: 1491073 - DNA, 15 bp, Homo sapiens
ctcgtgagaaccctt

SEQ ID NO: 1491074 - DNA, 15 bp, Homo sapiens
gctcgtgagaaccct

SEQ ID NO: 1491075 - DNA, 15 bp, Homo sapiens
agctcgtgagaaccc

SEQ ID NO: 1491076 - DNA, 15 bp, Homo sapiens
cagctcgtgagaacc

SEQ ID NO: 1491077 - DNA, 15 bp, Homo sapiens
gcagctcgtgagaac

SEQ ID NO: 1491078 - DNA, 15 bp, Homo sapiens
tgcagctcgtgagaa

SEQ ID NO: 1491079 - DNA, 15 bp, Homo sapiens
gtgcagctcgtgaga

SEQ ID NO: 1491080 - DNA, 15 bp, Homo sapiens
cgtgcagctcgtgag

SEQ ID NO: 1491081 - DNA, 15 bp, Homo sapiens
gcgtgcagctcgtga

SEQ ID NO: 1491082 - DNA, 15 bp, Homo sapiens
ggcgtgcagctcgtg

SEQ ID NO: 1491083 - DNA, 15 bp, Homo sapiens
gggcgtgcagctcgt

SEQ ID NO: 1491084 - DNA, 15 bp, Homo sapiens
tgggcgtgcagctcg

SEQ ID NO: 1491085 - DNA, 15 bp, Homo sapiens
ctgggcgtgcagctc

SEQ ID NO: 1491086 - DNA, 15 bp, Homo sapiens
gctgggcgtgcagct

SEQ ID NO: 1491087 - DNA, 15 bp, Homo sapiens
tgctgggcgtgcagc

SEQ ID NO: 1491088 - DNA, 15 bp, Homo sapiens
ctgctgggcgtgcag

SEQ ID NO: 1491089 - DNA, 15 bp, Homo sapiens
cctgctgggcgtgca

SEQ ID NO: 1491090 - DNA, 15 bp, Homo sapiens
tcctgctgggcgtgc

SEQ ID NO: 1491091 - DNA, 15 bp, Homo sapiens
gtcctgctgggcgtg

SEQ ID NO: 1491092 - DNA, 15 bp, Homo sapiens
agtcctgctgggcgt

SEQ ID NO: 1491093 - DNA, 15 bp, Homo sapiens
aagtcctgctgggcg

SEQ ID NO: 1491094 - DNA, 15 bp, Homo sapiens
aaagtcctgctgggc

SEQ ID NO: 1491095 - DNA, 15 bp, Homo sapiens
taaagtcctgctggg

SEQ ID NO: 1491096 - DNA, 15 bp, Homo sapiens
ctaaagtcctgctgg

SEQ ID NO: 1491097 - DNA, 15 bp, Homo sapiens
tctaaagtcctgctg

SEQ ID NO: 1491098 - DNA, 15 bp, Homo sapiens
gtctaaagtcctgct

SEQ ID NO: 1491099 - DNA, 15 bp, Homo sapiens
ggtctaaagtcctgc

SEQ ID NO: 1491100 - DNA, 15 bp, Homo sapiens
gggtctaaagtcctg

SEQ ID NO: 1491101 - DNA, 15 bp, Homo sapiens
tgggtctaaagtcct

SEQ ID NO: 1491102 - DNA, 15 bp, Homo sapiens
ttgggtctaaagtcc

SEQ ID NO: 1491103 - DNA, 15 bp, Homo sapiens
cttgggtctaaagtc

SEQ ID NO: 1491104 - DNA, 15 bp, Homo sapiens
acttgggtctaaagt

SEQ ID NO: 1491105 - DNA, 15 bp, Homo sapiens
cacttgggtctaaag

SEQ ID NO: 1491106 - DNA, 15 bp, Homo sapiens
tcacttgggtctaaa

SEQ ID NO: 1491107 - DNA, 15 bp, Homo sapiens
ttcacttgggtctaa

SEQ ID NO: 1491108 - DNA, 15 bp, Homo sapiens
attcacttgggtcta

SEQ ID NO: 1491109 - DNA, 15 bp, Homo sapiens
gattcacttgggtct

SEQ ID NO: 1491110 - DNA, 15 bp, Homo sapiens
ggattcacttgggtc

SEQ ID NO: 1491111 - DNA, 15 bp, Homo sapiens
gggattcacttgggt

SEQ ID NO: 1491112 - DNA, 15 bp, Homo sapiens
agggattcacttggg

SEQ ID NO: 1491113 - DNA, 15 bp, Homo sapiens
cagggattcacttgg

SEQ ID NO: 1491114 - DNA, 15 bp, Homo sapiens
ccagggattcacttg

SEQ ID NO: 1491115 - DNA, 15 bp, Homo sapiens
accagggattcactt

SEQ ID NO: 1491116 - DNA, 15 bp, Homo sapiens
caccagggattcact

SEQ ID NO: 1491117 - DNA, 15 bp, Homo sapiens
ccaccagggattcac

SEQ ID NO: 1491118 - DNA, 15 bp, Homo sapiens
cccaccagggattca

SEQ ID NO: 1491119 - DNA, 15 bp, Homo sapiens
tcccaccagggattc

SEQ ID NO: 1491120 - DNA, 15 bp, Homo sapiens
gtcccaccagggatt

SEQ ID NO: 1491121 - DNA, 15 bp, Homo sapiens
ggtcccaccagggat

SEQ ID NO: 1491122 - DNA, 15 bp, Homo sapiens
gggtcccaccaggga

SEQ ID NO: 1491123 - DNA, 15 bp, Homo sapiens
ggggtcccaccaggg

SEQ ID NO: 1491124 - DNA, 15 bp, Homo sapiens
gggggtcccaccagg

SEQ ID NO: 1491125 - DNA, 15 bp, Homo sapiens
tgggggtcccaccag

SEQ ID NO: 1491126 - DNA, 15 bp, Homo sapiens
ctgggggtcccacca

SEQ ID NO: 1491127 - DNA, 15 bp, Homo sapiens
cctgggggtcccacc

SEQ ID NO: 1491128 - DNA, 15 bp, Homo sapiens
acctgggggtcccac

SEQ ID NO: 1491129 - DNA, 15 bp, Homo sapiens
aacctgggggtccca

SEQ ID NO: 1491130 - DNA, 15 bp, Homo sapiens
gaacctgggggtccc

SEQ ID NO: 1491131 - DNA, 15 bp, Homo sapiens
agaacctgggggtcc

SEQ ID NO: 1491132 - DNA, 15 bp, Homo sapiens
tagaacctgggggtc

SEQ ID NO: 1491133 - DNA, 15 bp, Homo sapiens
atagaacctgggggt

SEQ ID NO: 1491134 - DNA, 15 bp, Homo sapiens
aatagaacctggggg

SEQ ID NO: 1491135 - DNA, 15 bp, Homo sapiens
aaatagaacctgggg

SEQ ID NO: 1491136 - DNA, 15 bp, Homo sapiens
caaatagaacctggg

SEQ ID NO: 1491137 - DNA, 15 bp, Homo sapiens
gcaaatagaacctgg

SEQ ID NO: 1491138 - DNA, 15 bp, Homo sapiens
agcaaatagaacctg

SEQ ID NO: 1491139 - DNA, 15 bp, Homo sapiens
aagcaaatagaacct

SEQ ID NO: 1491140 - DNA, 15 bp, Homo sapiens
aaagcaaatagaacc

SEQ ID NO: 1491141 - DNA, 15 bp, Homo sapiens
gaaagcaaatagaac

SEQ ID NO: 1491142 - DNA, 15 bp, Homo sapiens
agaaagcaaatagaa

SEQ ID NO: 1491143 - DNA, 15 bp, Homo sapiens
tagaaagcaaataga

SEQ ID NO: 1491144 - DNA, 15 bp, Homo sapiens
ctagaaagcaaatag

SEQ ID NO: 1491145 - DNA, 15 bp, Homo sapiens
gctagaaagcaaata

SEQ ID NO: 1491146 - DNA, 15 bp, Homo sapiens
agctagaaagcaaat

SEQ ID NO: 1491147 - DNA, 15 bp, Homo sapiens
gagctagaaagcaaa

SEQ ID NO: 1491148 - DNA, 15 bp, Homo sapiens
ggagctagaaagcaa

SEQ ID NO: 1491149 - DNA, 15 bp, Homo sapiens
aggagctagaaagca

SEQ ID NO: 1491150 - DNA, 15 bp, Homo sapiens
taggagctagaaagc

SEQ ID NO: 1491151 - DNA, 15 bp, Homo sapiens
ctaggagctagaaag

SEQ ID NO: 1491152 - DNA, 15 bp, Homo sapiens
gctaggagctagaaa

SEQ ID NO: 1491153 - DNA, 15 bp, Homo sapiens
ggctaggagctagaa

SEQ ID NO: 1491154 - DNA, 15 bp, Homo sapiens
tggctaggagctaga

SEQ ID NO: 1491155 - DNA, 15 bp, Homo sapiens
gtggctaggagctag

SEQ ID NO: 1491156 - DNA, 15 bp, Homo sapiens
tgtggctaggagcta

SEQ ID NO: 1491157 - DNA, 15 bp, Homo sapiens
ctgtggctaggagct

SEQ ID NO: 1491158 - DNA, 15 bp, Homo sapiens
gctgtggctaggagc

SEQ ID NO: 1491159 - DNA, 15 bp, Homo sapiens
tgctgtggctaggag

SEQ ID NO: 1491160 - DNA, 15 bp, Homo sapiens
ctgctgtggctagga

SEQ ID NO: 1491161 - DNA, 15 bp, Homo sapiens
cctgctgtggctagg

SEQ ID NO: 1491162 - DNA, 15 bp, Homo sapiens
ccctgctgtggctag

SEQ ID NO: 1491163 - DNA, 15 bp, Homo sapiens
cccctgctgtggcta

SEQ ID NO: 1491164 - DNA, 15 bp, Homo sapiens
tcccctgctgtggct

SEQ ID NO: 1491165 - DNA, 15 bp, Homo sapiens
ctcccctgctgtggc

SEQ ID NO: 1491166 - DNA, 15 bp, Homo sapiens
tctcccctgctgtgg

SEQ ID NO: 1491167 - DNA, 15 bp, Homo sapiens
ttctcccctgctgtg

SEQ ID NO: 1491168 - DNA, 15 bp, Homo sapiens
tttctcccctgctgt

SEQ ID NO: 1491169 - DNA, 15 bp, Homo sapiens
gtttctcccctgctg

SEQ ID NO: 1491170 - DNA, 15 bp, Homo sapiens
tgtttctcccctgct

SEQ ID NO: 1491171 - DNA, 15 bp, Homo sapiens
ctgtttctcccctgc

SEQ ID NO: 1491172 - DNA, 15 bp, Homo sapiens
tctgtttctcccctg

SEQ ID NO: 1491173 - DNA, 15 bp, Homo sapiens
gtctgtttctcccct

SEQ ID NO: 1491174 - DNA, 15 bp, Homo sapiens
ggtctgtttctcccc

SEQ ID NO: 1491175 - DNA, 15 bp, Homo sapiens
tggtctgtttctccc

SEQ ID NO: 1491176 - DNA, 15 bp, Homo sapiens
ttggtctgtttctcc

SEQ ID NO: 1491177 - DNA, 15 bp, Homo sapiens
cttggtctgtttctc

SEQ ID NO: 1491178 - DNA, 15 bp, Homo sapiens
gcttggtctgtttct

SEQ ID NO: 1491179 - DNA, 15 bp, Homo sapiens
agcttggtctgtttc

SEQ ID NO: 1491180 - DNA, 15 bp, Homo sapiens
cagcttggtctgttt

SEQ ID NO: 1491181 - DNA, 15 bp, Homo sapiens
tcagcttggtctgtt

SEQ ID NO: 1491182 - DNA, 15 bp, Homo sapiens
ctcagcttggtctgt

SEQ ID NO: 1491183 - DNA, 15 bp, Homo sapiens
gctcagcttggtctg

SEQ ID NO: 1491184 - DNA, 15 bp, Homo sapiens
cgctcagcttggtct

SEQ ID NO: 1491185 - DNA, 15 bp, Homo sapiens
ccgctcagcttggtc

SEQ ID NO: 1491186 - DNA, 15 bp, Homo sapiens
tccgctcagcttggt

SEQ ID NO: 1491187 - DNA, 15 bp, Homo sapiens
ctccgctcagcttgg

SEQ ID NO: 1491188 - DNA, 15 bp, Homo sapiens
tctccgctcagcttg

SEQ ID NO: 1491189 - DNA, 15 bp, Homo sapiens
ttctccgctcagctt

SEQ ID NO: 1491190 - DNA, 15 bp, Homo sapiens
cttctccgctcagct

SEQ ID NO: 1491191 - DNA, 15 bp, Homo sapiens
gcttctccgctcagc

SEQ ID NO: 1491192 - DNA, 15 bp, Homo sapiens
ggcttctccgctcag

SEQ ID NO: 1491193 - DNA, 15 bp, Homo sapiens
aggcttctccgctca

SEQ ID NO: 1491194 - DNA, 15 bp, Homo sapiens
caggcttctccgctc

SEQ ID NO: 1491195 - DNA, 15 bp, Homo sapiens
acaggcttctccgct

SEQ ID NO: 1491196 - DNA, 15 bp, Homo sapiens
tacaggcttctccgc

SEQ ID NO: 1491197 - DNA, 15 bp, Homo sapiens
ttacaggcttctccg

SEQ ID NO: 1491198 - DNA, 15 bp, Homo sapiens
cttacaggcttctcc

SEQ ID NO: 1491199 - DNA, 15 bp, Homo sapiens
acttacaggcttctc

SEQ ID NO: 1491200 - DNA, 15 bp, Homo sapiens
gacttacaggcttct

SEQ ID NO: 1491201 - DNA, 15 bp, Homo sapiens
ggacttacaggcttc

SEQ ID NO: 1491202 - DNA, 15 bp, Homo sapiens
aggacttacaggctt

SEQ ID NO: 1491203 - DNA, 15 bp, Homo sapiens
caggacttacaggct

SEQ ID NO: 1491204 - DNA, 15 bp, Homo sapiens
acaggacttacaggc

SEQ ID NO: 1491205 - DNA, 15 bp, Homo sapiens
cacaggacttacagg

SEQ ID NO: 1491206 - DNA, 15 bp, Homo sapiens
acacaggacttacag

SEQ ID NO: 1491207 - DNA, 15 bp, Homo sapiens
aacacaggacttaca

SEQ ID NO: 1491208 - DNA, 15 bp, Homo sapiens
aaacacaggacttac

SEQ ID NO: 1491209 - DNA, 15 bp, Homo sapiens
ggaaaacacaggact

SEQ ID NO: 1491210 - DNA, 15 bp, Homo sapiens
aggaaaacacaggac

SEQ ID NO: 1491211 - DNA, 15 bp, Homo sapiens
gaggaaaacacagga

SEQ ID NO: 1491212 - DNA, 15 bp, Homo sapiens
ggaggaaaacacagg

SEQ ID NO: 1491213 - DNA, 15 bp, Homo sapiens
tggaggaaaacacag

SEQ ID NO: 1491214 - DNA, 15 bp, Homo sapiens
ctggaggaaaacaca

SEQ ID NO: 1491215 - DNA, 15 bp, Homo sapiens
tctggaggaaaacac

SEQ ID NO: 1491216 - DNA, 15 bp, Homo sapiens
gtctggaggaaaaca

SEQ ID NO: 1491217 - DNA, 15 bp, Homo sapiens
cgtctggaggaaaac

SEQ ID NO: 1491218 - DNA, 15 bp, Homo sapiens
ccgtctggaggaaaa

SEQ ID NO: 1491219 - DNA, 15 bp, Homo sapiens
accgtctggaggaaa

SEQ ID NO: 1491220 - DNA, 15 bp, Homo sapiens
taccgtctggaggaa

SEQ ID NO: 1491221 - DNA, 15 bp, Homo sapiens
ctaccgtctggagga

SEQ ID NO: 1491222 - DNA, 15 bp, Homo sapiens
gctaccgtctggagg

SEQ ID NO: 1491223 - DNA, 15 bp, Homo sapiens
tgctaccgtctggag

SEQ ID NO: 1491224 - DNA, 15 bp, Homo sapiens
ttgctaccgtctgga

SEQ ID NO: 1491225 - DNA, 15 bp, Homo sapiens
cttgctaccgtctgg

SEQ ID NO: 1491226 - DNA, 15 bp, Homo sapiens
acttgctaccgtctg

SEQ ID NO: 1491227 - DNA, 15 bp, Homo sapiens
tacttgctaccgtct

SEQ ID NO: 1491228 - DNA, 15 bp, Homo sapiens
ctacttgctaccgtc

SEQ ID NO: 1491229 - DNA, 15 bp, Homo sapiens
actacttgctaccgt

SEQ ID NO: 1491230 - DNA, 15 bp, Homo sapiens
cactacttgctaccg

SEQ ID NO: 1491231 - DNA, 15 bp, Homo sapiens
ccactacttgctacc

SEQ ID NO: 1491232 - DNA, 15 bp, Homo sapiens
gccactacttgctac

SEQ ID NO: 1491233 - DNA, 15 bp, Homo sapiens
tgccactacttgcta

SEQ ID NO: 1491234 - DNA, 15 bp, Homo sapiens
ctgccactacttgct

SEQ ID NO: 1491235 - DNA, 15 bp, Homo sapiens
actgccactacttgc

SEQ ID NO: 1491236 - DNA, 15 bp, Homo sapiens
tactgccactacttg

SEQ ID NO: 1491237 - DNA, 15 bp, Homo sapiens
ctactgccactactt

SEQ ID NO: 1491238 - DNA, 15 bp, Homo sapiens
tctactgccactact

SEQ ID NO: 1491239 - DNA, 15 bp, Homo sapiens
gtctactgccactac

SEQ ID NO: 1491240 - DNA, 15 bp, Homo sapiens
tgtctactgccacta

SEQ ID NO: 1491241 - DNA, 15 bp, Homo sapiens
ctgtctactgccact

SEQ ID NO: 1491242 - DNA, 15 bp, Homo sapiens
gctgtctactgccac

SEQ ID NO: 1491243 - DNA, 15 bp, Homo sapiens
ggctgtctactgcca

SEQ ID NO: 1491244 - DNA, 15 bp, Homo sapiens
aggctgtctactgcc

SEQ ID NO: 1491245 - DNA, 15 bp, Homo sapiens
caggctgtctactgc

SEQ ID NO: 1491246 - DNA, 15 bp, Homo sapiens
ccaggctgtctactg

SEQ ID NO: 1491247 - DNA, 15 bp, Homo sapiens
cccaggctgtctact

SEQ ID NO: 1491248 - DNA, 15 bp, Homo sapiens
tcccaggctgtctac

SEQ ID NO: 1491249 - DNA, 15 bp, Homo sapiens
ctcccaggctgtcta

SEQ ID NO: 1491250 - DNA, 15 bp, Homo sapiens
actcccaggctgtct

SEQ ID NO: 1491251 - DNA, 15 bp, Homo sapiens
cactcccaggctgtc

SEQ ID NO: 1491252 - DNA, 15 bp, Homo sapiens
tcactcccaggctgt

SEQ ID NO: 1491253 - DNA, 15 bp, Homo sapiens
ctcactcccaggctg

SEQ ID NO: 1491254 - DNA, 15 bp, Homo sapiens
cctcactcccaggct

SEQ ID NO: 1491255 - DNA, 15 bp, Homo sapiens
ccctcactcccaggc

SEQ ID NO: 1491256 - DNA, 15 bp, Homo sapiens
tccctcactcccagg

SEQ ID NO: 1491257 - DNA, 15 bp, Homo sapiens
gtccctcactcccag

SEQ ID NO: 1491258 - DNA, 15 bp, Homo sapiens
agtccctcactccca

SEQ ID NO: 1491259 - DNA, 15 bp, Homo sapiens
aagtccctcactccc

SEQ ID NO: 1491260 - DNA, 15 bp, Homo sapiens
gaagtccctcactcc

SEQ ID NO: 1491261 - DNA, 15 bp, Homo sapiens
ggaagtccctcactc

SEQ ID NO: 1491262 - DNA, 15 bp, Homo sapiens
gggaagtccctcact

SEQ ID NO: 1491263 - DNA, 15 bp, Homo sapiens
tgggaagtccctcac

SEQ ID NO: 1491264 - DNA, 15 bp, Homo sapiens
ttgggaagtccctca

SEQ ID NO: 1491265 - DNA, 15 bp, Homo sapiens
gttgggaagtccctc

SEQ ID NO: 1491266 - DNA, 15 bp, Homo sapiens
cgttgggaagtccct

SEQ ID NO: 1491267 - DNA, 15 bp, Homo sapiens
gcgttgggaagtccc

SEQ ID NO: 1491268 - DNA, 15 bp, Homo sapiens
agcgttgggaagtcc

SEQ ID NO: 1491269 - DNA, 15 bp, Homo sapiens
cagcgttgggaagtc

SEQ ID NO: 1491270 - DNA, 15 bp, Homo sapiens
acagcgttgggaagt

SEQ ID NO: 1491271 - DNA, 15 bp, Homo sapiens
gacagcgttgggaag

SEQ ID NO: 1491272 - DNA, 15 bp, Homo sapiens
tgacagcgttgggaa

SEQ ID NO: 1491273 - DNA, 15 bp, Homo sapiens
ttgacagcgttggga

SEQ ID NO: 1491274 - DNA, 15 bp, Homo sapiens
tttgacagcgttggg

SEQ ID NO: 1491275 - DNA, 15 bp, Homo sapiens
ctttgacagcgttgg

SEQ ID NO: 1491276 - DNA, 15 bp, Homo sapiens
tctttgacagcgttg

SEQ ID NO: 1491277 - DNA, 15 bp, Homo sapiens
gtctttgacagcgtt

SEQ ID NO: 1491278 - DNA, 15 bp, Homo sapiens
ggtctttgacagcgt

SEQ ID NO: 1491279 - DNA, 15 bp, Homo sapiens
aggtctttgacagcg

SEQ ID NO: 1491280 - DNA, 15 bp, Homo sapiens
aaggtctttgacagc

SEQ ID NO: 1491281 - DNA, 15 bp, Homo sapiens
taaggtctttgacag

SEQ ID NO: 1491282 - DNA, 15 bp, Homo sapiens
ctaaggtctttgaca

SEQ ID NO: 1491283 - DNA, 15 bp, Homo sapiens
cctaaggtctttgac

SEQ ID NO: 1491284 - DNA, 15 bp, Homo sapiens
ccctaaggtctttga

SEQ ID NO: 1491285 - DNA, 15 bp, Homo sapiens
tccctaaggtctttg

SEQ ID NO: 1491286 - DNA, 15 bp, Homo sapiens
ttccctaaggtcttt

SEQ ID NO: 1491287 - DNA, 15 bp, Homo sapiens
gttccctaaggtctt

SEQ ID NO: 1491288 - DNA, 15 bp, Homo sapiens
ggttccctaaggtct

SEQ ID NO: 1491289 - DNA, 15 bp, Homo sapiens
gggttccctaaggtc

SEQ ID NO: 1491290 - DNA, 15 bp, Homo sapiens
tgggttccctaaggt

SEQ ID NO: 1491291 - DNA, 15 bp, Homo sapiens
ctgggttccctaagg

SEQ ID NO: 1491292 - DNA, 15 bp, Homo sapiens
tctgggttccctaag

SEQ ID NO: 1491293 - DNA, 15 bp, Homo sapiens
atctgggttccctaa

SEQ ID NO: 1491294 - DNA, 15 bp, Homo sapiens
aatctgggttcccta

SEQ ID NO: 1491295 - DNA, 15 bp, Homo sapiens
gaatctgggttccct

SEQ ID NO: 1491296 - DNA, 15 bp, Homo sapiens
agaatctgggttccc

SEQ ID NO: 1491297 - DNA, 15 bp, Homo sapiens
cagaatctgggttcc

SEQ ID NO: 1491298 - DNA, 15 bp, Homo sapiens
ccagaatctgggttc

SEQ ID NO: 1491299 - DNA, 15 bp, Homo sapiens
cccagaatctgggtt

SEQ ID NO: 1491300 - DNA, 15 bp, Homo sapiens
ccccagaatctgggt

SEQ ID NO: 1491301 - DNA, 15 bp, Homo sapiens
gccccagaatctggg

SEQ ID NO: 1491302 - DNA, 15 bp, Homo sapiens
ggccccagaatctgg

SEQ ID NO: 1491303 - DNA, 15 bp, Homo sapiens
tggccccagaatctg

SEQ ID NO: 1491304 - DNA, 15 bp, Homo sapiens
atggccccagaatct

SEQ ID NO: 1491305 - DNA, 15 bp, Homo sapiens
aatggccccagaatc

SEQ ID NO: 1491306 - DNA, 15 bp, Homo sapiens
taatggccccagaat

SEQ ID NO: 1491307 - DNA, 15 bp, Homo sapiens
ataatggccccagaa

SEQ ID NO: 1491308 - DNA, 15 bp, Homo sapiens
gataatggccccaga

SEQ ID NO: 1491309 - DNA, 15 bp, Homo sapiens
cgataatggccccag

SEQ ID NO: 1491310 - DNA, 15 bp, Homo sapiens
acgataatggcccca

SEQ ID NO: 1491311 - DNA, 15 bp, Homo sapiens
tacgataatggcccc

SEQ ID NO: 1491312 - DNA, 15 bp, Homo sapiens
ctacgataatggccc

SEQ ID NO: 1491313 - DNA, 15 bp, Homo sapiens
cctacgataatggcc

SEQ ID NO: 1491314 - DNA, 15 bp, Homo sapiens
ccctacgataatggc

SEQ ID NO: 1491315 - DNA, 15 bp, Homo sapiens
tccctacgataatgg

SEQ ID NO: 1491316 - DNA, 15 bp, Homo sapiens
gtccctacgataatg

SEQ ID NO: 1491317 - DNA, 15 bp, Homo sapiens
tgtccctacgataat

SEQ ID NO: 1491318 - DNA, 15 bp, Homo sapiens
ttgtccctacgataa

SEQ ID NO: 1491319 - DNA, 15 bp, Homo sapiens
tttgtccctacgata

SEQ ID NO: 1491320 - DNA, 15 bp, Homo sapiens
atttgtccctacgat

SEQ ID NO: 1491321 - DNA, 15 bp, Homo sapiens
tatttgtccctacga

SEQ ID NO: 1491322 - DNA, 15 bp, Homo sapiens
gtatttgtccctacg

SEQ ID NO: 1491323 - DNA, 15 bp, Homo sapiens
ggtatttgtccctac

SEQ ID NO: 1491324 - DNA, 15 bp, Homo sapiens
gggtatttgtcccta

SEQ ID NO: 1491325 - DNA, 15 bp, Homo sapiens
cgggtatttgtccct

SEQ ID NO: 1491326 - DNA, 15 bp, Homo sapiens
gcgggtatttgtccc

SEQ ID NO: 1491327 - DNA, 15 bp, Homo sapiens
ggcgggtatttgtcc

SEQ ID NO: 1491328 - DNA, 15 bp, Homo sapiens
gggcgggtatttgtc

SEQ ID NO: 1491329 - DNA, 15 bp, Homo sapiens
ggggcgggtatttgt

SEQ ID NO: 1491330 - DNA, 15 bp, Homo sapiens
tggggcgggtatttg

SEQ ID NO: 1491331 - DNA, 15 bp, Homo sapiens
gtggggcgggtattt

SEQ ID NO: 1491332 - DNA, 15 bp, Homo sapiens
tgtggggcgggtatt

SEQ ID NO: 1491333 - DNA, 15 bp, Homo sapiens
gtgtggggcgggtat

SEQ ID NO: 1491334 - DNA, 15 bp, Homo sapiens
ggtgtggggcgggta

SEQ ID NO: 1491335 - DNA, 15 bp, Homo sapiens
aggtgtggggcgggt

SEQ ID NO: 1491336 - DNA, 15 bp, Homo sapiens
gaggtgtggggcggg

SEQ ID NO: 1491337 - DNA, 15 bp, Homo sapiens
ggaggtgtggggcgg

SEQ ID NO: 1491338 - DNA, 15 bp, Homo sapiens
aggaggtgtggggcg

SEQ ID NO: 1491339 - DNA, 15 bp, Homo sapiens
gaggaggtgtggggc

SEQ ID NO: 1491340 - DNA, 15 bp, Homo sapiens
tgaggaggtgtgggg

SEQ ID NO: 1491341 - DNA, 15 bp, Homo sapiens
ttgaggaggtgtggg

SEQ ID NO: 1491342 - DNA, 15 bp, Homo sapiens
gttgaggaggtgtgg

SEQ ID NO: 1491343 - DNA, 15 bp, Homo sapiens
ggttgaggaggtgtg

SEQ ID NO: 1491344 - DNA, 15 bp, Homo sapiens
gggttgaggaggtgt

SEQ ID NO: 1491345 - DNA, 15 bp, Homo sapiens
ggggttgaggaggtg

SEQ ID NO: 1491346 - DNA, 15 bp, Homo sapiens
tggggttgaggaggt

SEQ ID NO: 1491347 - DNA, 15 bp, Homo sapiens
ctggggttgaggagg

SEQ ID NO: 1491348 - DNA, 15 bp, Homo sapiens
tctggggttgaggag

SEQ ID NO: 1491349 - DNA, 15 bp, Homo sapiens
ctctggggttgagga

SEQ ID NO: 1491350 - DNA, 15 bp, Homo sapiens
cctctggggttgagg

SEQ ID NO: 1491351 - DNA, 15 bp, Homo sapiens
ccctctggggttgag

SEQ ID NO: 1491352 - DNA, 15 bp, Homo sapiens
gccctctggggttga

SEQ ID NO: 1491353 - DNA, 15 bp, Homo sapiens
agccctctggggttg

SEQ ID NO: 1491354 - DNA, 15 bp, Homo sapiens
gagccctctggggtt

SEQ ID NO: 1491355 - DNA, 15 bp, Homo sapiens
tgagccctctggggt

SEQ ID NO: 1491356 - DNA, 15 bp, Homo sapiens
gtgagccctctgggg

SEQ ID NO: 1491357 - DNA, 15 bp, Homo sapiens
agtgagccctctggg

SEQ ID NO: 1491358 - DNA, 15 bp, Homo sapiens
cagtgagccctctgg

SEQ ID NO: 1491359 - DNA, 15 bp, Homo sapiens
gcagtgagccctctg

SEQ ID NO: 1491360 - DNA, 15 bp, Homo sapiens
tgcagtgagccctct

SEQ ID NO: 1491361 - DNA, 15 bp, Homo sapiens
ctgcagtgagccctc

SEQ ID NO: 1491362 - DNA, 15 bp, Homo sapiens
gctgcagtgagccct

SEQ ID NO: 1491363 - DNA, 15 bp, Homo sapiens
ggctgcagtgagccc

SEQ ID NO: 1491364 - DNA, 15 bp, Homo sapiens
gggctgcagtgagcc

SEQ ID NO: 1491365 - DNA, 15 bp, Homo sapiens
tgggctgcagtgagc

SEQ ID NO: 1491366 - DNA, 15 bp, Homo sapiens
ttgggctgcagtgag

SEQ ID NO: 1491367 - DNA, 15 bp, Homo sapiens
gttgggctgcagtga

SEQ ID NO: 1491368 - DNA, 15 bp, Homo sapiens
ggttgggctgcagtg

SEQ ID NO: 1491369 - DNA, 15 bp, Homo sapiens
gggttgggctgcagt

SEQ ID NO: 1491370 - DNA, 15 bp, Homo sapiens
agggttgggctgcag

SEQ ID NO: 1491371 - DNA, 15 bp, Homo sapiens
cagggttgggctgca

SEQ ID NO: 1491372 - DNA, 15 bp, Homo sapiens
gcagggttgggctgc

SEQ ID NO: 1491373 - DNA, 15 bp, Homo sapiens
tgcagggttgggctg

SEQ ID NO: 1491374 - DNA, 15 bp, Homo sapiens
ctgcagggttgggct

SEQ ID NO: 1491375 - DNA, 15 bp, Homo sapiens
gctgcagggttgggc

SEQ ID NO: 1491376 - DNA, 15 bp, Homo sapiens
agctgcagggttggg

SEQ ID NO: 1491377 - DNA, 15 bp, Homo sapiens
gagctgcagggttgg

SEQ ID NO: 1491378 - DNA, 15 bp, Homo sapiens
ggagctgcagggttg

SEQ ID NO: 1491379 - DNA, 15 bp, Homo sapiens
gggagctgcagggtt

SEQ ID NO: 1491380 - DNA, 15 bp, Homo sapiens
agggagctgcagggt

SEQ ID NO: 1491381 - DNA, 15 bp, Homo sapiens
tagggagctgcaggg

SEQ ID NO: 1491382 - DNA, 15 bp, Homo sapiens
ctagggagctgcagg

SEQ ID NO: 1491383 - DNA, 15 bp, Homo sapiens
actagggagctgcag

SEQ ID NO: 1491384 - DNA, 15 bp, Homo sapiens
gactagggagctgca

SEQ ID NO: 1491385 - DNA, 15 bp, Homo sapiens
ggactagggagctgc

SEQ ID NO: 1491386 - DNA, 15 bp, Homo sapiens
aggactagggagctg

SEQ ID NO: 1491387 - DNA, 15 bp, Homo sapiens
taggactagggagct

SEQ ID NO: 1491388 - DNA, 15 bp, Homo sapiens
gtaggactagggagc

SEQ ID NO: 1491389 - DNA, 15 bp, Homo sapiens
agtaggactagggag

SEQ ID NO: 1491390 - DNA, 15 bp, Homo sapiens
cagtaggactaggga

SEQ ID NO: 1491391 - DNA, 15 bp, Homo sapiens
gcagtaggactaggg

SEQ ID NO: 1491392 - DNA, 15 bp, Homo sapiens
tgcagtaggactagg

SEQ ID NO: 1491393 - DNA, 15 bp, Homo sapiens
ctgcagtaggactag

SEQ ID NO: 1491394 - DNA, 15 bp, Homo sapiens
cctgcagtaggacta

SEQ ID NO: 1491395 - DNA, 15 bp, Homo sapiens
ccctgcagtaggact

SEQ ID NO: 1491396 - DNA, 15 bp, Homo sapiens
gccctgcagtaggac

SEQ ID NO: 1491397 - DNA, 15 bp, Homo sapiens
ggccctgcagtagga

SEQ ID NO: 1491398 - DNA, 15 bp, Homo sapiens
tggccctgcagtagg

SEQ ID NO: 1491399 - DNA, 15 bp, Homo sapiens
gtggccctgcagtag

SEQ ID NO: 1491400 - DNA, 15 bp, Homo sapiens
tgtggccctgcagta

SEQ ID NO: 1491401 - DNA, 15 bp, Homo sapiens
ttgtggccctgcagt

SEQ ID NO: 1491402 - DNA, 15 bp, Homo sapiens
cttgtggccctgcag

SEQ ID NO: 1491403 - DNA, 15 bp, Homo sapiens
tcttgtggccctgca

SEQ ID NO: 1491404 - DNA, 15 bp, Homo sapiens
ctcttgtggccctgc

SEQ ID NO: 1491405 - DNA, 15 bp, Homo sapiens
tctcttgtggccctg

SEQ ID NO: 1491406 - DNA, 15 bp, Homo sapiens
ttctcttgtggccct

SEQ ID NO: 1491407 - DNA, 15 bp, Homo sapiens
cttctcttgtggccc

SEQ ID NO: 1491408 - DNA, 15 bp, Homo sapiens
ccttctcttgtggcc

SEQ ID NO: 1491409 - DNA, 15 bp, Homo sapiens
gccttctcttgtggc

SEQ ID NO: 1491410 - DNA, 15 bp, Homo sapiens
tgccttctcttgtgg

SEQ ID NO: 1491411 - DNA, 15 bp, Homo sapiens
ttgccttctcttgtg

SEQ ID NO: 1491412 - DNA, 15 bp, Homo sapiens
tttgccttctcttgt

SEQ ID NO: 1491413 - DNA, 15 bp, Homo sapiens
ttttgccttctcttg

SEQ ID NO: 1491414 - DNA, 15 bp, Homo sapiens
attttgccttctctt

SEQ ID NO: 1491415 - DNA, 15 bp, Homo sapiens
cattttgccttctct

SEQ ID NO: 1491416 - DNA, 15 bp, Homo sapiens
ccattttgccttctc

SEQ ID NO: 1491417 - DNA, 15 bp, Homo sapiens
accattttgccttct

SEQ ID NO: 1491418 - DNA, 15 bp, Homo sapiens
caccattttgccttc

SEQ ID NO: 1491419 - DNA, 15 bp, Homo sapiens
acaccattttgcctt

SEQ ID NO: 1491420 - DNA, 15 bp, Homo sapiens
aacaccattttgcct

SEQ ID NO: 1491421 - DNA, 15 bp, Homo sapiens
caacaccattttgcc

SEQ ID NO: 1491422 - DNA, 15 bp, Homo sapiens
acaacaccattttgc

SEQ ID NO: 1491423 - DNA, 15 bp, Homo sapiens
cacaacaccattttg

SEQ ID NO: 1491424 - DNA, 15 bp, Homo sapiens
acacaacaccatttt

SEQ ID NO: 1491425 - DNA, 15 bp, Homo sapiens
gacacaacaccattt

SEQ ID NO: 1491426 - DNA, 15 bp, Homo sapiens
agacacaacaccatt

SEQ ID NO: 1491427 - DNA, 15 bp, Homo sapiens
aagacacaacaccat

SEQ ID NO: 1491428 - DNA, 15 bp, Homo sapiens
gaagacacaacacca

SEQ ID NO: 1491429 - DNA, 15 bp, Homo sapiens
tgaagacacaacacc

SEQ ID NO: 1491430 - DNA, 15 bp, Homo sapiens
atgaagacacaacac

SEQ ID NO: 1491431 - DNA, 15 bp, Homo sapiens
aatgaagacacaaca

SEQ ID NO: 1491432 - DNA, 15 bp, Homo sapiens
gaatgaagacacaac

SEQ ID NO: 1491433 - DNA, 15 bp, Homo sapiens
agaatgaagacacaa

SEQ ID NO: 1491434 - DNA, 15 bp, Homo sapiens
aagaatgaagacaca

SEQ ID NO: 1491435 - DNA, 15 bp, Homo sapiens
gaagaatgaagacac

SEQ ID NO: 1491436 - DNA, 15 bp, Homo sapiens
agaagaatgaagaca

SEQ ID NO: 1491437 - DNA, 15 bp, Homo sapiens
tagaagaatgaagac

SEQ ID NO: 1491438 - DNA, 15 bp, Homo sapiens
atagaagaatgaaga

SEQ ID NO: 1491439 - DNA, 15 bp, Homo sapiens
aatagaagaatgaag

SEQ ID NO: 1491440 - DNA, 15 bp, Homo sapiens
aaatagaagaatgaa

SEQ ID NO: 1491441 - DNA, 15 bp, Homo sapiens
aaaatagaagaatga

SEQ ID NO: 1491442 - DNA, 15 bp, Homo sapiens
aaaaatagaagaatg

SEQ ID NO: 1491443 - DNA, 15 bp, Homo sapiens
taaaaatagaagaat

SEQ ID NO: 1491444 - DNA, 15 bp, Homo sapiens
ataaaaatagaagaa

SEQ ID NO: 1491445 - DNA, 15 bp, Homo sapiens
aataaaaatagaaga

SEQ ID NO: 1491446 - DNA, 15 bp, Homo sapiens
aaataaaaatagaag

SEQ ID NO: 1491447 - DNA, 15 bp, Homo sapiens
aaaataaaaatagaa

SEQ ID NO: 1491448 - DNA, 15 bp, Homo sapiens
aaaaataaaaataga

SEQ ID NO: 1491449 - DNA, 15 bp, Homo sapiens
aaaaaataaaaatag

SEQ ID NO: 1491450 - DNA, 15 bp, Homo sapiens
taagaccctgtctca

SEQ ID NO: 1491451 - DNA, 15 bp, Homo sapiens
gtaagaccctgtctc

SEQ ID NO: 1491452 - DNA, 15 bp, Homo sapiens
agtaagaccctgtct

SEQ ID NO: 1491453 - DNA, 15 bp, Homo sapiens
aagtaagaccctgtc

SEQ ID NO: 1491454 - DNA, 15 bp, Homo sapiens
aaagtaagaccctgt

SEQ ID NO: 1491455 - DNA, 15 bp, Homo sapiens
caaagtaagaccctg

SEQ ID NO: 1491456 - DNA, 15 bp, Homo sapiens
acaaagtaagaccct

SEQ ID NO: 1491457 - DNA, 15 bp, Homo sapiens
aacaaagtaagaccc

SEQ ID NO: 1491458 - DNA, 15 bp, Homo sapiens
caacaaagtaagacc

SEQ ID NO: 1491459 - DNA, 15 bp, Homo sapiens
gcaacaaagtaagac

SEQ ID NO: 1491460 - DNA, 15 bp, Homo sapiens
ggcaacaaagtaaga

SEQ ID NO: 1491461 - DNA, 15 bp, Homo sapiens
gggcaacaaagtaag

SEQ ID NO: 1491462 - DNA, 15 bp, Homo sapiens
tgggcaacaaagtaa

SEQ ID NO: 1491463 - DNA, 15 bp, Homo sapiens
ctgggcaacaaagta

SEQ ID NO: 1491464 - DNA, 15 bp, Homo sapiens
cctgggcaacaaagt

SEQ ID NO: 1491465 - DNA, 15 bp, Homo sapiens
gcctgggcaacaaag

SEQ ID NO: 1491466 - DNA, 15 bp, Homo sapiens
agcctgggcaacaaa

SEQ ID NO: 1491467 - DNA, 15 bp, Homo sapiens
ttcgtgccactgcac

SEQ ID NO: 1491468 - DNA, 15 bp, Homo sapiens
gttcgtgccactgca

SEQ ID NO: 1491469 - DNA, 15 bp, Homo sapiens
tgttcgtgccactgc

SEQ ID NO: 1491470 - DNA, 15 bp, Homo sapiens
atgttcgtgccactg

SEQ ID NO: 1491471 - DNA, 15 bp, Homo sapiens
catgttcgtgccact

SEQ ID NO: 1491472 - DNA, 15 bp, Homo sapiens
ccatgttcgtgccac

SEQ ID NO: 1491473 - DNA, 15 bp, Homo sapiens
gccatgttcgtgcca

SEQ ID NO: 1491474 - DNA, 15 bp, Homo sapiens
agccatgttcgtgcc

SEQ ID NO: 1491475 - DNA, 15 bp, Homo sapiens
gagccatgttcgtgc

SEQ ID NO: 1491476 - DNA, 15 bp, Homo sapiens
tgagccatgttcgtg

SEQ ID NO: 1491477 - DNA, 15 bp, Homo sapiens
gtgagccatgttcgt

SEQ ID NO: 1491478 - DNA, 15 bp, Homo sapiens
agtgagccatgttcg

SEQ ID NO: 1491479 - DNA, 15 bp, Homo sapiens
cagtgagccatgttc

SEQ ID NO: 1491480 - DNA, 15 bp, Homo sapiens
gcagtgagccatgtt

SEQ ID NO: 1491481 - DNA, 15 bp, Homo sapiens
tgcagtgagccatgt

SEQ ID NO: 1491482 - DNA, 15 bp, Homo sapiens
ctgcagtgagccatg

SEQ ID NO: 1491483 - DNA, 15 bp, Homo sapiens
agggctgcagtgagc

SEQ ID NO: 1491484 - DNA, 15 bp, Homo sapiens
cagggctgcagtgag

SEQ ID NO: 1491485 - DNA, 15 bp, Homo sapiens
tcagggctgcagtga

SEQ ID NO: 1491486 - DNA, 15 bp, Homo sapiens
gtcagggctgcagtg

SEQ ID NO: 1491487 - DNA, 15 bp, Homo sapiens
ggtcagggctgcagt

SEQ ID NO: 1491488 - DNA, 15 bp, Homo sapiens
gggtcagggctgcag

SEQ ID NO: 1491489 - DNA, 15 bp, Homo sapiens
ggggtcagggctgca

SEQ ID NO: 1491490 - DNA, 15 bp, Homo sapiens
gggggtcagggctgc

SEQ ID NO: 1491491 - DNA, 15 bp, Homo sapiens
ggggggtcagggctg

SEQ ID NO: 1491492 - DNA, 15 bp, Homo sapiens
cggggggtcagggct

SEQ ID NO: 1491493 - DNA, 15 bp, Homo sapiens
ccggggggtcagggc

SEQ ID NO: 1491494 - DNA, 15 bp, Homo sapiens
cccggggggtcaggg

SEQ ID NO: 1491495 - DNA, 15 bp, Homo sapiens
gcccggggggtcagg

SEQ ID NO: 1491496 - DNA, 15 bp, Homo sapiens
agcccggggggtcag

SEQ ID NO: 1491497 - DNA, 15 bp, Homo sapiens
gagcccggggggtca

SEQ ID NO: 1491498 - DNA, 15 bp, Homo sapiens
tgagcccggggggtc

SEQ ID NO: 1491499 - DNA, 15 bp, Homo sapiens
ttgagcccggggggt

SEQ ID NO: 1491500 - DNA, 15 bp, Homo sapiens
cttgagcccgggggg

SEQ ID NO: 1491501 - DNA, 15 bp, Homo sapiens
acttgagcccggggg

SEQ ID NO: 1491502 - DNA, 15 bp, Homo sapiens
cacttgagcccgggg

SEQ ID NO: 1491503 - DNA, 15 bp, Homo sapiens
tcacttgagcccggg

SEQ ID NO: 1491504 - DNA, 15 bp, Homo sapiens
atcacttgagcccgg

SEQ ID NO: 1491505 - DNA, 15 bp, Homo sapiens
aatcacttgagcccg

SEQ ID NO: 1491506 - DNA, 15 bp, Homo sapiens
gaatcacttgagccc

SEQ ID NO: 1491507 - DNA, 15 bp, Homo sapiens
agaatcacttgagcc

SEQ ID NO: 1491508 - DNA, 15 bp, Homo sapiens
gagaatcacttgagc

SEQ ID NO: 1491509 - DNA, 15 bp, Homo sapiens
ggagaatcacttgag

SEQ ID NO: 1491510 - DNA, 15 bp, Homo sapiens
atgctcgggaggctg

SEQ ID NO: 1491511 - DNA, 15 bp, Homo sapiens
gatgctcgggaggct

SEQ ID NO: 1491512 - DNA, 15 bp, Homo sapiens
agatgctcgggaggc

SEQ ID NO: 1491513 - DNA, 15 bp, Homo sapiens
cagatgctcgggagg

SEQ ID NO: 1491514 - DNA, 15 bp, Homo sapiens
ccagatgctcgggag

SEQ ID NO: 1491515 - DNA, 15 bp, Homo sapiens
cccagatgctcggga

SEQ ID NO: 1491516 - DNA, 15 bp, Homo sapiens
tcccagatgctcggg

SEQ ID NO: 1491517 - DNA, 15 bp, Homo sapiens
gtcccagatgctcgg

SEQ ID NO: 1491518 - DNA, 15 bp, Homo sapiens
agtcccagatgctcg

SEQ ID NO: 1491519 - DNA, 15 bp, Homo sapiens
tagtcccagatgctc

SEQ ID NO: 1491520 - DNA, 15 bp, Homo sapiens
gtagtcccagatgct

SEQ ID NO: 1491521 - DNA, 15 bp, Homo sapiens
tgtagtcccagatgc

SEQ ID NO: 1491522 - DNA, 15 bp, Homo sapiens
ctgtagtcccagatg

SEQ ID NO: 1491523 - DNA, 15 bp, Homo sapiens
cctgtagtcccagat

SEQ ID NO: 1491524 - DNA, 15 bp, Homo sapiens
acctgtagtcccaga

SEQ ID NO: 1491525 - DNA, 15 bp, Homo sapiens
cacacctgtagtccc

SEQ ID NO: 1491526 - DNA, 15 bp, Homo sapiens
acgcacacctgtagt

SEQ ID NO: 1491527 - DNA, 15 bp, Homo sapiens
gacgcacacctgtag

SEQ ID NO: 1491528 - DNA, 15 bp, Homo sapiens
tgacgcacacctgta

SEQ ID NO: 1491529 - DNA, 15 bp, Homo sapiens
gtgacgcacacctgt

SEQ ID NO: 1491530 - DNA, 15 bp, Homo sapiens
tgtgacgcacacctg

SEQ ID NO: 1491531 - DNA, 15 bp, Homo sapiens
atgtgacgcacacct

SEQ ID NO: 1491532 - DNA, 15 bp, Homo sapiens
catgtgacgcacacc

SEQ ID NO: 1491533 - DNA, 15 bp, Homo sapiens
gcatgtgacgcacac

SEQ ID NO: 1491534 - DNA, 15 bp, Homo sapiens
ggcatgtgacgcaca

SEQ ID NO: 1491535 - DNA, 15 bp, Homo sapiens
aggcatgtgacgcac

SEQ ID NO: 1491536 - DNA, 15 bp, Homo sapiens
caggcatgtgacgca

SEQ ID NO: 1491537 - DNA, 15 bp, Homo sapiens
tcaggcatgtgacgc

SEQ ID NO: 1491538 - DNA, 15 bp, Homo sapiens
gtcaggcatgtgacg

SEQ ID NO: 1491539 - DNA, 15 bp, Homo sapiens
agtcaggcatgtgac

SEQ ID NO: 1491540 - DNA, 15 bp, Homo sapiens
cagtcaggcatgtga

SEQ ID NO: 1491541 - DNA, 15 bp, Homo sapiens
tcagtcaggcatgtg

SEQ ID NO: 1491542 - DNA, 15 bp, Homo sapiens
atcagtcaggcatgt

SEQ ID NO: 1491543 - DNA, 15 bp, Homo sapiens
aatcagtcaggcatg

SEQ ID NO: 1491544 - DNA, 15 bp, Homo sapiens
aaatcagtcaggcat

SEQ ID NO: 1491545 - DNA, 15 bp, Homo sapiens
aaaatcagtcaggca

SEQ ID NO: 1491546 - DNA, 15 bp, Homo sapiens
aaaaatcagtcaggc

SEQ ID NO: 1491547 - DNA, 15 bp, Homo sapiens
caaaaatcagtcagg

SEQ ID NO: 1491548 - DNA, 15 bp, Homo sapiens
acaaaaatcagtcag

SEQ ID NO: 1491549 - DNA, 15 bp, Homo sapiens
tacaaaaatcagtca

SEQ ID NO: 1491550 - DNA, 15 bp, Homo sapiens
atacaaaaatcagtc

SEQ ID NO: 1491551 - DNA, 15 bp, Homo sapiens
aatacaaaaatcagt

SEQ ID NO: 1491552 - DNA, 15 bp, Homo sapiens
aaatacaaaaatcag

SEQ ID NO: 1491553 - DNA, 15 bp, Homo sapiens
aaaatacaaaaatca

SEQ ID NO: 1491554 - DNA, 15 bp, Homo sapiens
aaaaatacaaaaatc

SEQ ID NO: 1491555 - DNA, 15 bp, Homo sapiens
gtacaaaaaatacaa

SEQ ID NO: 1491556 - DNA, 15 bp, Homo sapiens
tgtacaaaaaataca

SEQ ID NO: 1491557 - DNA, 15 bp, Homo sapiens
ctgtacaaaaaatac

SEQ ID NO: 1491558 - DNA, 15 bp, Homo sapiens
tctgtacaaaaaata

SEQ ID NO: 1491559 - DNA, 15 bp, Homo sapiens
atctgtacaaaaaat

SEQ ID NO: 1491560 - DNA, 15 bp, Homo sapiens
catctgtacaaaaaa

SEQ ID NO: 1491561 - DNA, 15 bp, Homo sapiens
ccatctgtacaaaaa

SEQ ID NO: 1491562 - DNA, 15 bp, Homo sapiens
cccatctgtacaaaa

SEQ ID NO: 1491563 - DNA, 15 bp, Homo sapiens
ccccatctgtacaaa

SEQ ID NO: 1491564 - DNA, 15 bp, Homo sapiens
accccatctgtacaa

SEQ ID NO: 1491565 - DNA, 15 bp, Homo sapiens
aaccccatctgtaca

SEQ ID NO: 1491566 - DNA, 15 bp, Homo sapiens
atgaaaccccatctg

SEQ ID NO: 1491567 - DNA, 15 bp, Homo sapiens
gcaacatgatgaaac

SEQ ID NO: 1491568 - DNA, 15 bp, Homo sapiens
ggcaacatgatgaaa

SEQ ID NO: 1491569 - DNA, 15 bp, Homo sapiens
gggcaacatgatgaa

SEQ ID NO: 1491570 - DNA, 15 bp, Homo sapiens
tgggcaacatgatga

SEQ ID NO: 1491571 - DNA, 15 bp, Homo sapiens
ctgggcaacatgatg

SEQ ID NO: 1491572 - DNA, 15 bp, Homo sapiens
cctgggcaacatgat

SEQ ID NO: 1491573 - DNA, 15 bp, Homo sapiens
gcctgggcaacatga

SEQ ID NO: 1491574 - DNA, 15 bp, Homo sapiens
ctcaggagttcgaga

SEQ ID NO: 1491575 - DNA, 15 bp, Homo sapiens
gctcaggagttcgag

SEQ ID NO: 1491576 - DNA, 15 bp, Homo sapiens
agctcaggagttcga

SEQ ID NO: 1491577 - DNA, 15 bp, Homo sapiens
gagctcaggagttcg

SEQ ID NO: 1491578 - DNA, 15 bp, Homo sapiens
agatcacttgagctc

SEQ ID NO: 1491579 - DNA, 15 bp, Homo sapiens
cagatcacttgagct

SEQ ID NO: 1491580 - DNA, 15 bp, Homo sapiens
gcagatcacttgagc

SEQ ID NO: 1491581 - DNA, 15 bp, Homo sapiens
aagtggctcacacct

SEQ ID NO: 1491582 - DNA, 15 bp, Homo sapiens
gaagtggctcacacc

SEQ ID NO: 1491583 - DNA, 15 bp, Homo sapiens
cgaagtggctcacac

SEQ ID NO: 1491584 - DNA, 15 bp, Homo sapiens
gcgaagtggctcaca

SEQ ID NO: 1491585 - DNA, 15 bp, Homo sapiens
ggcgaagtggctcac

SEQ ID NO: 1491586 - DNA, 15 bp, Homo sapiens
gggcgaagtggctca

SEQ ID NO: 1491587 - DNA, 15 bp, Homo sapiens
tgggcgaagtggctc

SEQ ID NO: 1491588 - DNA, 15 bp, Homo sapiens
ctgggcgaagtggct

SEQ ID NO: 1491589 - DNA, 15 bp, Homo sapiens
gctgggcgaagtggc

SEQ ID NO: 1491590 - DNA, 15 bp, Homo sapiens
ggctgggcgaagtgg

SEQ ID NO: 1491591 - DNA, 15 bp, Homo sapiens
gggctgggcgaagtg

SEQ ID NO: 1491592 - DNA, 15 bp, Homo sapiens
tgggctgggcgaagt

SEQ ID NO: 1491593 - DNA, 15 bp, Homo sapiens
atgggctgggcgaag

SEQ ID NO: 1491594 - DNA, 15 bp, Homo sapiens
aatgggctgggcgaa

SEQ ID NO: 1491595 - DNA, 15 bp, Homo sapiens
aaatgggctgggcga

SEQ ID NO: 1491596 - DNA, 15 bp, Homo sapiens
aaaatgggctgggcg

SEQ ID NO: 1491597 - DNA, 15 bp, Homo sapiens
aaaaatgggctgggc

SEQ ID NO: 1491598 - DNA, 15 bp, Homo sapiens
taaaaatgggctggg

SEQ ID NO: 1491599 - DNA, 15 bp, Homo sapiens
ataaaaatgggctgg

SEQ ID NO: 1491600 - DNA, 15 bp, Homo sapiens
aataaaaatgggctg

SEQ ID NO: 1491601 - DNA, 15 bp, Homo sapiens
aaataaaaatgggct

SEQ ID NO: 1491602 - DNA, 15 bp, Homo sapiens
aaaataaaaatgggc

SEQ ID NO: 1491603 - DNA, 15 bp, Homo sapiens
aaaaataaaaatggg

SEQ ID NO: 1491604 - DNA, 15 bp, Homo sapiens
aaaaaataaaaatgg

SEQ ID NO: 1491605 - DNA, 15 bp, Homo sapiens
aaaaaaataaaaatg

SEQ ID NO: 1491606 - DNA, 15 bp, Homo sapiens
taaaaaaataaaaat

SEQ ID NO: 1491607 - DNA, 15 bp, Homo sapiens
ataataaaaaaataa

SEQ ID NO: 1491608 - DNA, 15 bp, Homo sapiens
aataataaaaaaata

SEQ ID NO: 1491609 - DNA, 15 bp, Homo sapiens
taataataaaaaaat

SEQ ID NO: 1491610 - DNA, 15 bp, Homo sapiens
ataataataaaaaaa

SEQ ID NO: 1491611 - DNA, 15 bp, Homo sapiens
aataataataaaaaa

SEQ ID NO: 1491612 - DNA, 15 bp, Homo sapiens
gaataataataaaaa

SEQ ID NO: 1491613 - DNA, 15 bp, Homo sapiens
agaataataataaaa

SEQ ID NO: 1491614 - DNA, 15 bp, Homo sapiens
aagaataataataaa

SEQ ID NO: 1491615 - DNA, 15 bp, Homo sapiens
aaagaataataataa

SEQ ID NO: 1491616 - DNA, 15 bp, Homo sapiens
caaagaataataata

SEQ ID NO: 1491617 - DNA, 15 bp, Homo sapiens
tcaaagaataataat

SEQ ID NO: 1491618 - DNA, 15 bp, Homo sapiens
ctcaaagaataataa

SEQ ID NO: 1491619 - DNA, 15 bp, Homo sapiens
tctcaaagaataata

SEQ ID NO: 1491620 - DNA, 15 bp, Homo sapiens
atctcaaagaataat

SEQ ID NO: 1491621 - DNA, 15 bp, Homo sapiens
tatctcaaagaataa

SEQ ID NO: 1491622 - DNA, 15 bp, Homo sapiens
atatctcaaagaata

SEQ ID NO: 1491623 - DNA, 15 bp, Homo sapiens
aatatctcaaagaat

SEQ ID NO: 1491624 - DNA, 15 bp, Homo sapiens
taatatctcaaagaa

SEQ ID NO: 1491625 - DNA, 15 bp, Homo sapiens
ttaatatctcaaaga

SEQ ID NO: 1491626 - DNA, 15 bp, Homo sapiens
attaatatctcaaag

SEQ ID NO: 1491627 - DNA, 15 bp, Homo sapiens
tattaatatctcaaa

SEQ ID NO: 1491628 - DNA, 15 bp, Homo sapiens
ttattaatatctcaa

SEQ ID NO: 1491629 - DNA, 15 bp, Homo sapiens
attattaatatctca

SEQ ID NO: 1491630 - DNA, 15 bp, Homo sapiens
tattattaatatctc

SEQ ID NO: 1491631 - DNA, 15 bp, Homo sapiens
ttattattaatatct

SEQ ID NO: 1491632 - DNA, 15 bp, Homo sapiens
tttattattaatatc

SEQ ID NO: 1491633 - DNA, 15 bp, Homo sapiens
ttttattattaatat

SEQ ID NO: 1491634 - DNA, 15 bp, Homo sapiens
tttttattattaata

SEQ ID NO: 1491635 - DNA, 15 bp, Homo sapiens
ttttttattattaat

SEQ ID NO: 1491636 - DNA, 15 bp, Homo sapiens
attttttattattaa

SEQ ID NO: 1491637 - DNA, 15 bp, Homo sapiens
tattttttattatta

SEQ ID NO: 1491638 - DNA, 15 bp, Homo sapiens
ttattttttattatt

SEQ ID NO: 1491639 - DNA, 15 bp, Homo sapiens
attattttttattat

SEQ ID NO: 1491640 - DNA, 15 bp, Homo sapiens
tattattttttatta

SEQ ID NO: 1491641 - DNA, 15 bp, Homo sapiens
ttattattttttatt

SEQ ID NO: 1491642 - DNA, 15 bp, Homo sapiens
attattattttttat

SEQ ID NO: 1491643 - DNA, 15 bp, Homo sapiens
ttatttattattatt

SEQ ID NO: 1491644 - DNA, 15 bp, Homo sapiens
attatttattattat

SEQ ID NO: 1491645 - DNA, 15 bp, Homo sapiens
tattatttattatta

SEQ ID NO: 1491646 - DNA, 15 bp, Homo sapiens
atattatttattatt

SEQ ID NO: 1491647 - DNA, 15 bp, Homo sapiens
aatattatttattat

SEQ ID NO: 1491648 - DNA, 15 bp, Homo sapiens
aaatattatttatta

SEQ ID NO: 1491649 - DNA, 15 bp, Homo sapiens
aaaatattatttatt

SEQ ID NO: 1491650 - DNA, 15 bp, Homo sapiens
aaaaatattatttat

SEQ ID NO: 1491651 - DNA, 15 bp, Homo sapiens
taaaaatattattta

SEQ ID NO: 1491652 - DNA, 15 bp, Homo sapiens
ataaaaatattattt

SEQ ID NO: 1491653 - DNA, 15 bp, Homo sapiens
aataaaaatattatt

SEQ ID NO: 1491654 - DNA, 15 bp, Homo sapiens
taataaaaatattat

SEQ ID NO: 1491655 - DNA, 15 bp, Homo sapiens
ataataaaaatatta

SEQ ID NO: 1491656 - DNA, 15 bp, Homo sapiens
aataataaaaatatt

SEQ ID NO: 1491657 - DNA, 15 bp, Homo sapiens
taataataaaaatat

SEQ ID NO: 1491658 - DNA, 15 bp, Homo sapiens
ataataataaaaata

SEQ ID NO: 1491659 - DNA, 15 bp, Homo sapiens
aataataataaaaat

SEQ ID NO: 1491660 - DNA, 15 bp, Homo sapiens
taataataataaaaa

SEQ ID NO: 1491661 - DNA, 15 bp, Homo sapiens
ataataataataaaa

SEQ ID NO: 1491662 - DNA, 15 bp, Homo sapiens
gataataataataaa

SEQ ID NO: 1491663 - DNA, 15 bp, Homo sapiens
tgataataataataa

SEQ ID NO: 1491664 - DNA, 15 bp, Homo sapiens
gtgataataataata

SEQ ID NO: 1491665 - DNA, 15 bp, Homo sapiens
agtgataataataat

SEQ ID NO: 1491666 - DNA, 15 bp, Homo sapiens
gagtgataataataa

SEQ ID NO: 1491667 - DNA, 15 bp, Homo sapiens
agagtgataataata

SEQ ID NO: 1491668 - DNA, 15 bp, Homo sapiens
cagagtgataataat

SEQ ID NO: 1491669 - DNA, 15 bp, Homo sapiens
acagagtgataataa

SEQ ID NO: 1491670 - DNA, 15 bp, Homo sapiens
gacagagtgataata

SEQ ID NO: 1491671 - DNA, 15 bp, Homo sapiens
tgacagagtgataat

SEQ ID NO: 1491672 - DNA, 15 bp, Homo sapiens
gtgacagagtgataa

SEQ ID NO: 1491673 - DNA, 15 bp, Homo sapiens
ggtgacagagtgata

SEQ ID NO: 1491674 - DNA, 15 bp, Homo sapiens
gggtgacagagtgat

SEQ ID NO: 1491675 - DNA, 15 bp, Homo sapiens
accactgcactgcag

SEQ ID NO: 1491676 - DNA, 15 bp, Homo sapiens
caccactgcactgca

SEQ ID NO: 1491677 - DNA, 15 bp, Homo sapiens
aatcgcaccactgca

SEQ ID NO: 1491678 - DNA, 15 bp, Homo sapiens
aaatcgcaccactgc

SEQ ID NO: 1491679 - DNA, 15 bp, Homo sapiens
aaaatcgcaccactg

SEQ ID NO: 1491680 - DNA, 15 bp, Homo sapiens
caaaatcgcaccact

SEQ ID NO: 1491681 - DNA, 15 bp, Homo sapiens
ccaaaatcgcaccac

SEQ ID NO: 1491682 - DNA, 15 bp, Homo sapiens
gccaaaatcgcacca

SEQ ID NO: 1491683 - DNA, 15 bp, Homo sapiens
agccaaaatcgcacc

SEQ ID NO: 1491684 - DNA, 15 bp, Homo sapiens
gagccaaaatcgcac

SEQ ID NO: 1491685 - DNA, 15 bp, Homo sapiens
tgagccaaaatcgca

SEQ ID NO: 1491686 - DNA, 15 bp, Homo sapiens
gtgagccaaaatcgc

SEQ ID NO: 1491687 - DNA, 15 bp, Homo sapiens
agtgagccaaaatcg

SEQ ID NO: 1491688 - DNA, 15 bp, Homo sapiens
cgggctgcagtgagc

SEQ ID NO: 1491689 - DNA, 15 bp, Homo sapiens
ccgggctgcagtgag

SEQ ID NO: 1491690 - DNA, 15 bp, Homo sapiens
tccgggctgcagtga

SEQ ID NO: 1491691 - DNA, 15 bp, Homo sapiens
ttccgggctgcagtg

SEQ ID NO: 1491692 - DNA, 15 bp, Homo sapiens
gttccgggctgcagt

SEQ ID NO: 1491693 - DNA, 15 bp, Homo sapiens
agttccgggctgcag

SEQ ID NO: 1491694 - DNA, 15 bp, Homo sapiens
gagttccgggctgca

SEQ ID NO: 1491695 - DNA, 15 bp, Homo sapiens
ggagttccgggctgc

SEQ ID NO: 1491696 - DNA, 15 bp, Homo sapiens
aggagttccgggctg

SEQ ID NO: 1491697 - DNA, 15 bp, Homo sapiens
aaggagttccgggct

SEQ ID NO: 1491698 - DNA, 15 bp, Homo sapiens
caaggagttccgggc

SEQ ID NO: 1491699 - DNA, 15 bp, Homo sapiens
ccaaggagttccggg

SEQ ID NO: 1491700 - DNA, 15 bp, Homo sapiens
tccaaggagttccgg

SEQ ID NO: 1491701 - DNA, 15 bp, Homo sapiens
gtccaaggagttccg

SEQ ID NO: 1491702 - DNA, 15 bp, Homo sapiens
agtccaaggagttcc

SEQ ID NO: 1491703 - DNA, 15 bp, Homo sapiens
gagtccaaggagttc

SEQ ID NO: 1491704 - DNA, 15 bp, Homo sapiens
tgagtccaaggagtt

SEQ ID NO: 1491705 - DNA, 15 bp, Homo sapiens
ttgagtccaaggagt

SEQ ID NO: 1491706 - DNA, 15 bp, Homo sapiens
cttgagtccaaggag

SEQ ID NO: 1491707 - DNA, 15 bp, Homo sapiens
gcttgagtccaagga

SEQ ID NO: 1491708 - DNA, 15 bp, Homo sapiens
cgcttgagtccaagg

SEQ ID NO: 1491709 - DNA, 15 bp, Homo sapiens
tcgcttgagtccaag

SEQ ID NO: 1491710 - DNA, 15 bp, Homo sapiens
atcgcttgagtccaa

SEQ ID NO: 1491711 - DNA, 15 bp, Homo sapiens
tgggaggatcgcttg

SEQ ID NO: 1491712 - DNA, 15 bp, Homo sapiens
gtgggaggatcgctt

SEQ ID NO: 1491713 - DNA, 15 bp, Homo sapiens
ggtgggaggatcgct

SEQ ID NO: 1491714 - DNA, 15 bp, Homo sapiens
aggtgggaggatcgc

SEQ ID NO: 1491715 - DNA, 15 bp, Homo sapiens
gaggtgggaggatcg

SEQ ID NO: 1491716 - DNA, 15 bp, Homo sapiens
caggaggctgaggtg

SEQ ID NO: 1491717 - DNA, 15 bp, Homo sapiens
ccaggaggctgaggt

SEQ ID NO: 1491718 - DNA, 15 bp, Homo sapiens
cccaggaggctgagg

SEQ ID NO: 1491719 - DNA, 15 bp, Homo sapiens
acccaggaggctgag

SEQ ID NO: 1491720 - DNA, 15 bp, Homo sapiens
tacccaggaggctga

SEQ ID NO: 1491721 - DNA, 15 bp, Homo sapiens
tcagctacccaggag

SEQ ID NO: 1491722 - DNA, 15 bp, Homo sapiens
atcagctacccagga

SEQ ID NO: 1491723 - DNA, 15 bp, Homo sapiens
tatcagctacccagg

SEQ ID NO: 1491724 - DNA, 15 bp, Homo sapiens
gtatcagctacccag

SEQ ID NO: 1491725 - DNA, 15 bp, Homo sapiens
agtatcagctaccca

SEQ ID NO: 1491726 - DNA, 15 bp, Homo sapiens
tagtatcagctaccc

SEQ ID NO: 1491727 - DNA, 15 bp, Homo sapiens
gtagtatcagctacc

SEQ ID NO: 1491728 - DNA, 15 bp, Homo sapiens
tgtagtatcagctac

SEQ ID NO: 1491729 - DNA, 15 bp, Homo sapiens
ctgtagtatcagcta

SEQ ID NO: 1491730 - DNA, 15 bp, Homo sapiens
cctgtagtatcagct

SEQ ID NO: 1491731 - DNA, 15 bp, Homo sapiens
acctgtagtatcagc

SEQ ID NO: 1491732 - DNA, 15 bp, Homo sapiens
gacctgtagtatcag

SEQ ID NO: 1491733 - DNA, 15 bp, Homo sapiens
ggacctgtagtatca

SEQ ID NO: 1491734 - DNA, 15 bp, Homo sapiens
tggacctgtagtatc

SEQ ID NO: 1491735 - DNA, 15 bp, Homo sapiens
gtggacctgtagtat

SEQ ID NO: 1491736 - DNA, 15 bp, Homo sapiens
tgtggacctgtagta

SEQ ID NO: 1491737 - DNA, 15 bp, Homo sapiens
gtgtggacctgtagt

SEQ ID NO: 1491738 - DNA, 15 bp, Homo sapiens
ggtgtggacctgtag

SEQ ID NO: 1491739 - DNA, 15 bp, Homo sapiens
tggtgtggacctgta

SEQ ID NO: 1491740 - DNA, 15 bp, Homo sapiens
gtggtgtggacctgt

SEQ ID NO: 1491741 - DNA, 15 bp, Homo sapiens
ggtggtgtggacctg

SEQ ID NO: 1491742 - DNA, 15 bp, Homo sapiens
tggtggtgtggacct

SEQ ID NO: 1491743 - DNA, 15 bp, Homo sapiens
gtggtggtgtggacc

SEQ ID NO: 1491744 - DNA, 15 bp, Homo sapiens
tgtggtggtgtggac

SEQ ID NO: 1491745 - DNA, 15 bp, Homo sapiens
gtgtggtggtgtgga

SEQ ID NO: 1491746 - DNA, 15 bp, Homo sapiens
ggtgtggtggtgtgg

SEQ ID NO: 1491747 - DNA, 15 bp, Homo sapiens
caaattagccaggtg

SEQ ID NO: 1491748 - DNA, 15 bp, Homo sapiens
acaaattagccaggt

SEQ ID NO: 1491749 - DNA, 15 bp, Homo sapiens
cacaaattagccagg

SEQ ID NO: 1491750 - DNA, 15 bp, Homo sapiens
acacaaattagccag

SEQ ID NO: 1491751 - DNA, 15 bp, Homo sapiens
cacacaaattagcca

SEQ ID NO: 1491752 - DNA, 15 bp, Homo sapiens
acacacaaattagcc

SEQ ID NO: 1491753 - DNA, 15 bp, Homo sapiens
cacacacaaattagc

SEQ ID NO: 1491754 - DNA, 15 bp, Homo sapiens
acacacacaaattag

SEQ ID NO: 1491755 - DNA, 15 bp, Homo sapiens
cacacacacaaatta

SEQ ID NO: 1491756 - DNA, 15 bp, Homo sapiens
taaatacacacacac

SEQ ID NO: 1491757 - DNA, 15 bp, Homo sapiens
ataaatacacacaca

SEQ ID NO: 1491758 - DNA, 15 bp, Homo sapiens
aataaatacacacac

SEQ ID NO: 1491759 - DNA, 15 bp, Homo sapiens
aaataaatacacaca

SEQ ID NO: 1491760 - DNA, 15 bp, Homo sapiens
aaaataaatacacac

SEQ ID NO: 1491761 - DNA, 15 bp, Homo sapiens
taaaataaatacaca

SEQ ID NO: 1491762 - DNA, 15 bp, Homo sapiens
ataaaataaatacac

SEQ ID NO: 1491763 - DNA, 15 bp, Homo sapiens
ctaaaaaaataaaaa

SEQ ID NO: 1491764 - DNA, 15 bp, Homo sapiens
actaaaaaaataaaa

SEQ ID NO: 1491765 - DNA, 15 bp, Homo sapiens
tactaaaaaaataaa

SEQ ID NO: 1491766 - DNA, 15 bp, Homo sapiens
ctactaaaaaaataa

SEQ ID NO: 1491767 - DNA, 15 bp, Homo sapiens
tctactaaaaaaata

SEQ ID NO: 1491768 - DNA, 15 bp, Homo sapiens
ctctactaaaaaaat

SEQ ID NO: 1491769 - DNA, 15 bp, Homo sapiens
tctctactaaaaaaa

SEQ ID NO: 1491770 - DNA, 15 bp, Homo sapiens
caaaaccccatctct

SEQ ID NO: 1491771 - DNA, 15 bp, Homo sapiens
gcaacatggcaaaac

SEQ ID NO: 1491772 - DNA, 15 bp, Homo sapiens
gggcaacatggcaaa

SEQ ID NO: 1491773 - DNA, 15 bp, Homo sapiens
tgggcaacatggcaa

SEQ ID NO: 1491774 - DNA, 15 bp, Homo sapiens
ctgggcaacatggca

SEQ ID NO: 1491775 - DNA, 15 bp, Homo sapiens
cctgggcaacatggc

SEQ ID NO: 1491776 - DNA, 15 bp, Homo sapiens
tttgaggccaggagt

SEQ ID NO: 1491777 - DNA, 15 bp, Homo sapiens
atttgaggccaggag

SEQ ID NO: 1491778 - DNA, 15 bp, Homo sapiens
tatttgaggccagga

SEQ ID NO: 1491779 - DNA, 15 bp, Homo sapiens
ttatttgaggccagg

SEQ ID NO: 1491780 - DNA, 15 bp, Homo sapiens
attatttgaggccag

SEQ ID NO: 1491781 - DNA, 15 bp, Homo sapiens
gattatttgaggcca

SEQ ID NO: 1491782 - DNA, 15 bp, Homo sapiens
agattatttgaggcc

SEQ ID NO: 1491783 - DNA, 15 bp, Homo sapiens
cagattatttgaggc

SEQ ID NO: 1491784 - DNA, 15 bp, Homo sapiens
gcagattatttgagg

SEQ ID NO: 1491785 - DNA, 15 bp, Homo sapiens
ggcagattatttgag

SEQ ID NO: 1491786 - DNA, 15 bp, Homo sapiens
aggcagattatttga

SEQ ID NO: 1491787 - DNA, 15 bp, Homo sapiens
caggcagattatttg

SEQ ID NO: 1491788 - DNA, 15 bp, Homo sapiens
gcaggcagattattt

SEQ ID NO: 1491789 - DNA, 15 bp, Homo sapiens
ggcaggcagattatt

SEQ ID NO: 1491790 - DNA, 15 bp, Homo sapiens
aggcaggcagattat

SEQ ID NO: 1491791 - DNA, 15 bp, Homo sapiens
cgaggcaggcagatt

SEQ ID NO: 1491792 - DNA, 15 bp, Homo sapiens
tctgtaatcccagca

SEQ ID NO: 1491793 - DNA, 15 bp, Homo sapiens
atctgtaatcccagc

SEQ ID NO: 1491794 - DNA, 15 bp, Homo sapiens
catctgtaatcccag

SEQ ID NO: 1491795 - DNA, 15 bp, Homo sapiens
tcatctgtaatccca

SEQ ID NO: 1491796 - DNA, 15 bp, Homo sapiens
ctcatctgtaatccc

SEQ ID NO: 1491797 - DNA, 15 bp, Homo sapiens
gctcatctgtaatcc

SEQ ID NO: 1491798 - DNA, 15 bp, Homo sapiens
ggctcatctgtaatc

SEQ ID NO: 1491799 - DNA, 15 bp, Homo sapiens
tggctcatctgtaat

SEQ ID NO: 1491800 - DNA, 15 bp, Homo sapiens
gtggctcatctgtaa

SEQ ID NO: 1491801 - DNA, 15 bp, Homo sapiens
ggtggctcatctgta

SEQ ID NO: 1491802 - DNA, 15 bp, Homo sapiens
tggtggctcatctgt

SEQ ID NO: 1491803 - DNA, 15 bp, Homo sapiens
gtggtggctcatctg

SEQ ID NO: 1491804 - DNA, 15 bp, Homo sapiens
tgtggtggctcatct

SEQ ID NO: 1491805 - DNA, 15 bp, Homo sapiens
gtgtggtggctcatc

SEQ ID NO: 1491806 - DNA, 15 bp, Homo sapiens
taggccgggtgtggt

SEQ ID NO: 1491807 - DNA, 15 bp, Homo sapiens
ttaggccgggtgtgg

SEQ ID NO: 1491808 - DNA, 15 bp, Homo sapiens
gttaggccgggtgtg

SEQ ID NO: 1491809 - DNA, 15 bp, Homo sapiens
tgttaggccgggtgt

SEQ ID NO: 1491810 - DNA, 15 bp, Homo sapiens
atgttaggccgggtg

SEQ ID NO: 1491811 - DNA, 15 bp, Homo sapiens
aatgttaggccgggt

SEQ ID NO: 1491812 - DNA, 15 bp, Homo sapiens
aaatgttaggccggg

SEQ ID NO: 1491813 - DNA, 15 bp, Homo sapiens
aaaatgttaggccgg

SEQ ID NO: 1491814 - DNA, 15 bp, Homo sapiens
aaaaatgttaggccg

SEQ ID NO: 1491815 - DNA, 15 bp, Homo sapiens
taaaaatgttaggcc

SEQ ID NO: 1491816 - DNA, 15 bp, Homo sapiens
ttaaaaatgttaggc

SEQ ID NO: 1491817 - DNA, 15 bp, Homo sapiens
tttaaaaatgttagg

SEQ ID NO: 1491818 - DNA, 15 bp, Homo sapiens
ttttaaaaatgttag

SEQ ID NO: 1491819 - DNA, 15 bp, Homo sapiens
taattttaaaaatgt

SEQ ID NO: 1491820 - DNA, 15 bp, Homo sapiens
ataattttaaaaatg

SEQ ID NO: 1491821 - DNA, 15 bp, Homo sapiens
tataattttaaaaat

SEQ ID NO: 1491822 - DNA, 15 bp, Homo sapiens
ttataattttaaaaa

SEQ ID NO: 1491823 - DNA, 15 bp, Homo sapiens
tttataattttaaaa

SEQ ID NO: 1491824 - DNA, 15 bp, Homo sapiens
gtttataattttaaa

SEQ ID NO: 1491825 - DNA, 15 bp, Homo sapiens
ggtttataattttaa

SEQ ID NO: 1491826 - DNA, 15 bp, Homo sapiens
gggtttataatttta

SEQ ID NO: 1491827 - DNA, 15 bp, Homo sapiens
tgggtttataatttt

SEQ ID NO: 1491828 - DNA, 15 bp, Homo sapiens
gtgggtttataattt

SEQ ID NO: 1491829 - DNA, 15 bp, Homo sapiens
agtgggtttataatt

SEQ ID NO: 1491830 - DNA, 15 bp, Homo sapiens
aagtgggtttataat

SEQ ID NO: 1491831 - DNA, 15 bp, Homo sapiens
gaagtgggtttataa

SEQ ID NO: 1491832 - DNA, 15 bp, Homo sapiens
tgaagtgggtttata

SEQ ID NO: 1491833 - DNA, 15 bp, Homo sapiens
atgaagtgggtttat

SEQ ID NO: 1491834 - DNA, 15 bp, Homo sapiens
tatgaagtgggttta

SEQ ID NO: 1491835 - DNA, 15 bp, Homo sapiens
gtatgaagtgggttt

SEQ ID NO: 1491836 - DNA, 15 bp, Homo sapiens
cgtatgaagtgggtt

SEQ ID NO: 1491837 - DNA, 15 bp, Homo sapiens
acgtatgaagtgggt

SEQ ID NO: 1491838 - DNA, 15 bp, Homo sapiens
cacgtatgaagtggg

SEQ ID NO: 1491839 - DNA, 15 bp, Homo sapiens
acacgtatgaagtgg

SEQ ID NO: 1491840 - DNA, 15 bp, Homo sapiens
cacacgtatgaagtg

SEQ ID NO: 1491841 - DNA, 15 bp, Homo sapiens
tcacacgtatgaagt

SEQ ID NO: 1491842 - DNA, 15 bp, Homo sapiens
gtcacacgtatgaag

SEQ ID NO: 1491843 - DNA, 15 bp, Homo sapiens
tgtcacacgtatgaa

SEQ ID NO: 1491844 - DNA, 15 bp, Homo sapiens
ttgtcacacgtatga

SEQ ID NO: 1491845 - DNA, 15 bp, Homo sapiens
attgtcacacgtatg

SEQ ID NO: 1491846 - DNA, 15 bp, Homo sapiens
gattgtcacacgtat

SEQ ID NO: 1491847 - DNA, 15 bp, Homo sapiens
ggattgtcacacgta

SEQ ID NO: 1491848 - DNA, 15 bp, Homo sapiens
aggattgtcacacgt

SEQ ID NO: 1491849 - DNA, 15 bp, Homo sapiens
caggattgtcacacg

SEQ ID NO: 1491850 - DNA, 15 bp, Homo sapiens
acaggattgtcacac

SEQ ID NO: 1491851 - DNA, 15 bp, Homo sapiens
cacaggattgtcaca

SEQ ID NO: 1491852 - DNA, 15 bp, Homo sapiens
gcacaggattgtcac

SEQ ID NO: 1491853 - DNA, 15 bp, Homo sapiens
tgcacaggattgtca

SEQ ID NO: 1491854 - DNA, 15 bp, Homo sapiens
ctgcacaggattgtc

SEQ ID NO: 1491855 - DNA, 15 bp, Homo sapiens
actgcacaggattgt

SEQ ID NO: 1491856 - DNA, 15 bp, Homo sapiens
cactgcacaggattg

SEQ ID NO: 1491857 - DNA, 15 bp, Homo sapiens
ccactgcacaggatt

SEQ ID NO: 1491858 - DNA, 15 bp, Homo sapiens
cccactgcacaggat

SEQ ID NO: 1491859 - DNA, 15 bp, Homo sapiens
acccactgcacagga

SEQ ID NO: 1491860 - DNA, 15 bp, Homo sapiens
cacccactgcacagg

SEQ ID NO: 1491861 - DNA, 15 bp, Homo sapiens
gcacccactgcacag

SEQ ID NO: 1491862 - DNA, 15 bp, Homo sapiens
agcacccactgcaca

SEQ ID NO: 1491863 - DNA, 15 bp, Homo sapiens
cagcacccactgcac

SEQ ID NO: 1491864 - DNA, 15 bp, Homo sapiens
gcagcacccactgca

SEQ ID NO: 1491865 - DNA, 15 bp, Homo sapiens
agcagcacccactgc

SEQ ID NO: 1491866 - DNA, 15 bp, Homo sapiens
aagcagcacccactg

SEQ ID NO: 1491867 - DNA, 15 bp, Homo sapiens
aaagcagcacccact

SEQ ID NO: 1491868 - DNA, 15 bp, Homo sapiens
gaaagcagcacccac

SEQ ID NO: 1491869 - DNA, 15 bp, Homo sapiens
tgaaagcagcaccca

SEQ ID NO: 1491870 - DNA, 15 bp, Homo sapiens
gtgaaagcagcaccc

SEQ ID NO: 1491871 - DNA, 15 bp, Homo sapiens
ggtgaaagcagcacc

SEQ ID NO: 1491872 - DNA, 15 bp, Homo sapiens
gggtgaaagcagcac

SEQ ID NO: 1491873 - DNA, 15 bp, Homo sapiens
tgggtgaaagcagca

SEQ ID NO: 1491874 - DNA, 15 bp, Homo sapiens
gtgggtgaaagcagc

SEQ ID NO: 1491875 - DNA, 15 bp, Homo sapiens
ggtgggtgaaagcag

SEQ ID NO: 1491876 - DNA, 15 bp, Homo sapiens
gggtgggtgaaagca

SEQ ID NO: 1491877 - DNA, 15 bp, Homo sapiens
ggggtgggtgaaagc

SEQ ID NO: 1491878 - DNA, 15 bp, Homo sapiens
cggggtgggtgaaag

SEQ ID NO: 1491879 - DNA, 15 bp, Homo sapiens
gcggggtgggtgaaa

SEQ ID NO: 1491880 - DNA, 15 bp, Homo sapiens
agcggggtgggtgaa

SEQ ID NO: 1491881 - DNA, 15 bp, Homo sapiens
aagcggggtgggtga

SEQ ID NO: 1491882 - DNA, 15 bp, Homo sapiens
aaagcggggtgggtg

SEQ ID NO: 1491883 - DNA, 15 bp, Homo sapiens
taaagcggggtgggt

SEQ ID NO: 1491884 - DNA, 15 bp, Homo sapiens
gtaaagcggggtggg

SEQ ID NO: 1491885 - DNA, 15 bp, Homo sapiens
tgtaaagcggggtgg

SEQ ID NO: 1491886 - DNA, 15 bp, Homo sapiens
ctgtaaagcggggtg

SEQ ID NO: 1491887 - DNA, 15 bp, Homo sapiens
tctgtaaagcggggt

SEQ ID NO: 1491888 - DNA, 15 bp, Homo sapiens
atctgtaaagcgggg

SEQ ID NO: 1491889 - DNA, 15 bp, Homo sapiens
catctgtaaagcggg

SEQ ID NO: 1491890 - DNA, 15 bp, Homo sapiens
tcatctgtaaagcgg

SEQ ID NO: 1491891 - DNA, 15 bp, Homo sapiens
ctcatctgtaaagcg

SEQ ID NO: 1491892 - DNA, 15 bp, Homo sapiens
cctcatctgtaaagc

SEQ ID NO: 1491893 - DNA, 15 bp, Homo sapiens
tcctcatctgtaaag

SEQ ID NO: 1491894 - DNA, 15 bp, Homo sapiens
ggtttcctcatctgt

SEQ ID NO: 1491895 - DNA, 15 bp, Homo sapiens
tggtttcctcatctg

SEQ ID NO: 1491896 - DNA, 15 bp, Homo sapiens
ctggtttcctcatct

SEQ ID NO: 1491897 - DNA, 15 bp, Homo sapiens
cctggtttcctcatc

SEQ ID NO: 1491898 - DNA, 15 bp, Homo sapiens
acctggtttcctcat

SEQ ID NO: 1491899 - DNA, 15 bp, Homo sapiens
cacctggtttcctca

SEQ ID NO: 1491900 - DNA, 15 bp, Homo sapiens
gcacctggtttcctc

SEQ ID NO: 1491901 - DNA, 15 bp, Homo sapiens
agcacctggtttcct

SEQ ID NO: 1491902 - DNA, 15 bp, Homo sapiens
aagcacctggtttcc

SEQ ID NO: 1491903 - DNA, 15 bp, Homo sapiens
aaagcacctggtttc

SEQ ID NO: 1491904 - DNA, 15 bp, Homo sapiens
caaagcacctggttt

SEQ ID NO: 1491905 - DNA, 15 bp, Homo sapiens
tcaaagcacctggtt

SEQ ID NO: 1491906 - DNA, 15 bp, Homo sapiens
ctcaaagcacctggt

SEQ ID NO: 1491907 - DNA, 15 bp, Homo sapiens
tctcaaagcacctgg

SEQ ID NO: 1491908 - DNA, 15 bp, Homo sapiens
atctcaaagcacctg

SEQ ID NO: 1491909 - DNA, 15 bp, Homo sapiens
aatctcaaagcacct

SEQ ID NO: 1491910 - DNA, 15 bp, Homo sapiens
taatctcaaagcacc

SEQ ID NO: 1491911 - DNA, 15 bp, Homo sapiens
ttaatctcaaagcac

SEQ ID NO: 1491912 - DNA, 15 bp, Homo sapiens
tttaatctcaaagca

SEQ ID NO: 1491913 - DNA, 15 bp, Homo sapiens
ctttaatctcaaagc

SEQ ID NO: 1491914 - DNA, 15 bp, Homo sapiens
tctttaatctcaaag

SEQ ID NO: 1491915 - DNA, 15 bp, Homo sapiens
ctctttaatctcaaa

SEQ ID NO: 1491916 - DNA, 15 bp, Homo sapiens
tctctttaatctcaa

SEQ ID NO: 1491917 - DNA, 15 bp, Homo sapiens
atctctttaatctca

SEQ ID NO: 1491918 - DNA, 15 bp, Homo sapiens
catctctttaatctc

SEQ ID NO: 1491919 - DNA, 15 bp, Homo sapiens
ccatctctttaatct

SEQ ID NO: 1491920 - DNA, 15 bp, Homo sapiens
gccatctctttaatc

SEQ ID NO: 1491921 - DNA, 15 bp, Homo sapiens
tgccatctctttaat

SEQ ID NO: 1491922 - DNA, 15 bp, Homo sapiens
ctgccatctctttaa

SEQ ID NO: 1491923 - DNA, 15 bp, Homo sapiens
actgccatctcttta

SEQ ID NO: 1491924 - DNA, 15 bp, Homo sapiens
cactgccatctcttt

SEQ ID NO: 1491925 - DNA, 15 bp, Homo sapiens
gcactgccatctctt

SEQ ID NO: 1491926 - DNA, 15 bp, Homo sapiens
agcactgccatctct

SEQ ID NO: 1491927 - DNA, 15 bp, Homo sapiens
tagcactgccatctc

SEQ ID NO: 1491928 - DNA, 15 bp, Homo sapiens
ctagcactgccatct

SEQ ID NO: 1491929 - DNA, 15 bp, Homo sapiens
cctagcactgccatc

SEQ ID NO: 1491930 - DNA, 15 bp, Homo sapiens
tcctagcactgccat

SEQ ID NO: 1491931 - DNA, 15 bp, Homo sapiens
gtcctagcactgcca

SEQ ID NO: 1491932 - DNA, 15 bp, Homo sapiens
agtcctagcactgcc

SEQ ID NO: 1491933 - DNA, 15 bp, Homo sapiens
gagtcctagcactgc

SEQ ID NO: 1491934 - DNA, 15 bp, Homo sapiens
tgagtcctagcactg

SEQ ID NO: 1491935 - DNA, 15 bp, Homo sapiens
ctgagtcctagcact

SEQ ID NO: 1491936 - DNA, 15 bp, Homo sapiens
tctgagtcctagcac

SEQ ID NO: 1491937 - DNA, 15 bp, Homo sapiens
ctctgagtcctagca

SEQ ID NO: 1491938 - DNA, 15 bp, Homo sapiens
tctctgagtcctagc

SEQ ID NO: 1491939 - DNA, 15 bp, Homo sapiens
gtctctgagtcctag

SEQ ID NO: 1491940 - DNA, 15 bp, Homo sapiens
tgtctctgagtccta

SEQ ID NO: 1491941 - DNA, 15 bp, Homo sapiens
gtgtctctgagtcct

SEQ ID NO: 1491942 - DNA, 15 bp, Homo sapiens
ggtgtctctgagtcc

SEQ ID NO: 1491943 - DNA, 15 bp, Homo sapiens
gggtgtctctgagtc

SEQ ID NO: 1491944 - DNA, 15 bp, Homo sapiens
agggtgtctctgagt

SEQ ID NO: 1491945 - DNA, 15 bp, Homo sapiens
cagggtgtctctgag

SEQ ID NO: 1491946 - DNA, 15 bp, Homo sapiens
ccagggtgtctctga

SEQ ID NO: 1491947 - DNA, 15 bp, Homo sapiens
gccagggtgtctctg

SEQ ID NO: 1491948 - DNA, 15 bp, Homo sapiens
ggccagggtgtctct

SEQ ID NO: 1491949 - DNA, 15 bp, Homo sapiens
gggccagggtgtctc

SEQ ID NO: 1491950 - DNA, 15 bp, Homo sapiens
ggggccagggtgtct

SEQ ID NO: 1491951 - DNA, 15 bp, Homo sapiens
tggggccagggtgtc

SEQ ID NO: 1491952 - DNA, 15 bp, Homo sapiens
ctggggccagggtgt

SEQ ID NO: 1491953 - DNA, 15 bp, Homo sapiens
cctggggccagggtg

SEQ ID NO: 1491954 - DNA, 15 bp, Homo sapiens
ccctggggccagggt

SEQ ID NO: 1491955 - DNA, 15 bp, Homo sapiens
accctggggccaggg

SEQ ID NO: 1491956 - DNA, 15 bp, Homo sapiens
gaccctggggccagg

SEQ ID NO: 1491957 - DNA, 15 bp, Homo sapiens
agaccctggggccag

SEQ ID NO: 1491958 - DNA, 15 bp, Homo sapiens
cagaccctggggcca

SEQ ID NO: 1491959 - DNA, 15 bp, Homo sapiens
acagaccctggggcc

SEQ ID NO: 1491960 - DNA, 15 bp, Homo sapiens
cacagaccctggggc

SEQ ID NO: 1491961 - DNA, 15 bp, Homo sapiens
ccacagaccctgggg

SEQ ID NO: 1491962 - DNA, 15 bp, Homo sapiens
tccacagaccctggg

SEQ ID NO: 1491963 - DNA, 15 bp, Homo sapiens
gtccacagaccctgg

SEQ ID NO: 1491964 - DNA, 15 bp, Homo sapiens
tgtccacagaccctg

SEQ ID NO: 1491965 - DNA, 15 bp, Homo sapiens
atgtccacagaccct

SEQ ID NO: 1491966 - DNA, 15 bp, Homo sapiens
catgtccacagaccc

SEQ ID NO: 1491967 - DNA, 15 bp, Homo sapiens
tcatgtccacagacc

SEQ ID NO: 1491968 - DNA, 15 bp, Homo sapiens
gtcatgtccacagac

SEQ ID NO: 1491969 - DNA, 15 bp, Homo sapiens
ggtcatgtccacaga

SEQ ID NO: 1491970 - DNA, 15 bp, Homo sapiens
tggtcatgtccacag

SEQ ID NO: 1491971 - DNA, 15 bp, Homo sapiens
gtggtcatgtccaca

SEQ ID NO: 1491972 - DNA, 15 bp, Homo sapiens
agtggtcatgtccac

SEQ ID NO: 1491973 - DNA, 15 bp, Homo sapiens
cagtggtcatgtcca

SEQ ID NO: 1491974 - DNA, 15 bp, Homo sapiens
gcagtggtcatgtcc

SEQ ID NO: 1491975 - DNA, 15 bp, Homo sapiens
ggcagtggtcatgtc

SEQ ID NO: 1491976 - DNA, 15 bp, Homo sapiens
aggcagtggtcatgt

SEQ ID NO: 1491977 - DNA, 15 bp, Homo sapiens
caggcagtggtcatg

SEQ ID NO: 1491978 - DNA, 15 bp, Homo sapiens
tcaggcagtggtcat

SEQ ID NO: 1491979 - DNA, 15 bp, Homo sapiens
ttcaggcagtggtca

SEQ ID NO: 1491980 - DNA, 15 bp, Homo sapiens
gttcaggcagtggtc

SEQ ID NO: 1491981 - DNA, 15 bp, Homo sapiens
agttcaggcagtggt

SEQ ID NO: 1491982 - DNA, 15 bp, Homo sapiens
cagttcaggcagtgg

SEQ ID NO: 1491983 - DNA, 15 bp, Homo sapiens
gcagttcaggcagtg

SEQ ID NO: 1491984 - DNA, 15 bp, Homo sapiens
ggcagttcaggcagt

SEQ ID NO: 1491985 - DNA, 15 bp, Homo sapiens
aggcagttcaggcag

SEQ ID NO: 1491986 - DNA, 15 bp, Homo sapiens
caggcagttcaggca

SEQ ID NO: 1491987 - DNA, 15 bp, Homo sapiens
gcaggcagttcaggc

SEQ ID NO: 1491988 - DNA, 15 bp, Homo sapiens
cgcaggcagttcagg

SEQ ID NO: 1491989 - DNA, 15 bp, Homo sapiens
tcgcaggcagttcag

SEQ ID NO: 1491990 - DNA, 15 bp, Homo sapiens
ctcgcaggcagttca

SEQ ID NO: 1491991 - DNA, 15 bp, Homo sapiens
cctcgcaggcagttc

SEQ ID NO: 1491992 - DNA, 15 bp, Homo sapiens
tcctcgcaggcagtt

SEQ ID NO: 1491993 - DNA, 15 bp, Homo sapiens
atcctcgcaggcagt

SEQ ID NO: 1491994 - DNA, 15 bp, Homo sapiens
catcctcgcaggcag

SEQ ID NO: 1491995 - DNA, 15 bp, Homo sapiens
gcatcctcgcaggca

SEQ ID NO: 1491996 - DNA, 15 bp, Homo sapiens
agcatcctcgcaggc

SEQ ID NO: 1491997 - DNA, 15 bp, Homo sapiens
gagcatcctcgcagg

SEQ ID NO: 1491998 - DNA, 15 bp, Homo sapiens
ggagcatcctcgcag

SEQ ID NO: 1491999 - DNA, 15 bp, Homo sapiens
aggagcatcctcgca

SEQ ID NO: 1492000 - DNA, 15 bp, Homo sapiens
caggagcatcctcgc

SEQ ID NO: 1492001 - DNA, 15 bp, Homo sapiens
tcaggagcatcctcg

SEQ ID NO: 1492002 - DNA, 15 bp, Homo sapiens
gtcaggagcatcctc

SEQ ID NO: 1492003 - DNA, 15 bp, Homo sapiens
ggtcaggagcatcct

SEQ ID NO: 1492004 - DNA, 15 bp, Homo sapiens
gggtcaggagcatcc

SEQ ID NO: 1492005 - DNA, 15 bp, Homo sapiens
cgggtcaggagcatc

SEQ ID NO: 1492006 - DNA, 15 bp, Homo sapiens
acgggtcaggagcat

SEQ ID NO: 1492007 - DNA, 15 bp, Homo sapiens
aacgggtcaggagca

SEQ ID NO: 1492008 - DNA, 15 bp, Homo sapiens
taacgggtcaggagc

SEQ ID NO: 1492009 - DNA, 15 bp, Homo sapiens
ctaacgggtcaggag

SEQ ID NO: 1492010 - DNA, 15 bp, Homo sapiens
gctaacgggtcagga

SEQ ID NO: 1492011 - DNA, 15 bp, Homo sapiens
ggctaacgggtcagg

SEQ ID NO: 1492012 - DNA, 15 bp, Homo sapiens
aggctaacgggtcag

SEQ ID NO: 1492013 - DNA, 15 bp, Homo sapiens
aaggctaacgggtca

SEQ ID NO: 1492014 - DNA, 15 bp, Homo sapiens
taaggctaacgggtc

SEQ ID NO: 1492015 - DNA, 15 bp, Homo sapiens
ctaaggctaacgggt

SEQ ID NO: 1492016 - DNA, 15 bp, Homo sapiens
cctaaggctaacggg

SEQ ID NO: 1492017 - DNA, 15 bp, Homo sapiens
ccctaaggctaacgg

SEQ ID NO: 1492018 - DNA, 15 bp, Homo sapiens
accctaaggctaacg

SEQ ID NO: 1492019 - DNA, 15 bp, Homo sapiens
aaccctaaggctaac

SEQ ID NO: 1492020 - DNA, 15 bp, Homo sapiens
taaccctaaggctaa

SEQ ID NO: 1492021 - DNA, 15 bp, Homo sapiens
ataaccctaaggcta

SEQ ID NO: 1492022 - DNA, 15 bp, Homo sapiens
cataaccctaaggct

SEQ ID NO: 1492023 - DNA, 15 bp, Homo sapiens
ccataaccctaaggc

SEQ ID NO: 1492024 - DNA, 15 bp, Homo sapiens
cccataaccctaagg

SEQ ID NO: 1492025 - DNA, 15 bp, Homo sapiens
gcccataaccctaag

SEQ ID NO: 1492026 - DNA, 15 bp, Homo sapiens
ggcccataaccctaa

SEQ ID NO: 1492027 - DNA, 15 bp, Homo sapiens
gggcccataacccta

SEQ ID NO: 1492028 - DNA, 15 bp, Homo sapiens
tgggcccataaccct

SEQ ID NO: 1492029 - DNA, 15 bp, Homo sapiens
ctgggcccataaccc

SEQ ID NO: 1492030 - DNA, 15 bp, Homo sapiens
gctgggcccataacc

SEQ ID NO: 1492031 - DNA, 15 bp, Homo sapiens
tgctgggcccataac

SEQ ID NO: 1492032 - DNA, 15 bp, Homo sapiens
atgctgggcccataa

SEQ ID NO: 1492033 - DNA, 15 bp, Homo sapiens
catgctgggcccata

SEQ ID NO: 1492034 - DNA, 15 bp, Homo sapiens
gcatgctgggcccat

SEQ ID NO: 1492035 - DNA, 15 bp, Homo sapiens
agcatgctgggccca

SEQ ID NO: 1492036 - DNA, 15 bp, Homo sapiens
gagcatgctgggccc

SEQ ID NO: 1492037 - DNA, 15 bp, Homo sapiens
ggagcatgctgggcc

SEQ ID NO: 1492038 - DNA, 15 bp, Homo sapiens
gggagcatgctgggc

SEQ ID NO: 1492039 - DNA, 15 bp, Homo sapiens
tgggagcatgctggg

SEQ ID NO: 1492040 - DNA, 15 bp, Homo sapiens
gtgggagcatgctgg

SEQ ID NO: 1492041 - DNA, 15 bp, Homo sapiens
ggtgggagcatgctg

SEQ ID NO: 1492042 - DNA, 15 bp, Homo sapiens
cggtgggagcatgct

SEQ ID NO: 1492043 - DNA, 15 bp, Homo sapiens
acggtgggagcatgc

SEQ ID NO: 1492044 - DNA, 15 bp, Homo sapiens
tacggtgggagcatg

SEQ ID NO: 1492045 - DNA, 15 bp, Homo sapiens
gtacggtgggagcat

SEQ ID NO: 1492046 - DNA, 15 bp, Homo sapiens
tgtacggtgggagca

SEQ ID NO: 1492047 - DNA, 15 bp, Homo sapiens
ttgtacggtgggagc

SEQ ID NO: 1492048 - DNA, 15 bp, Homo sapiens
attgtacggtgggag

SEQ ID NO: 1492049 - DNA, 15 bp, Homo sapiens
aattgtacggtggga

SEQ ID NO: 1492050 - DNA, 15 bp, Homo sapiens
aaattgtacggtggg

SEQ ID NO: 1492051 - DNA, 15 bp, Homo sapiens
caaattgtacggtgg

SEQ ID NO: 1492052 - DNA, 15 bp, Homo sapiens
gcaaattgtacggtg

SEQ ID NO: 1492053 - DNA, 15 bp, Homo sapiens
agcaaattgtacggt

SEQ ID NO: 1492054 - DNA, 15 bp, Homo sapiens
cagcaaattgtacgg

SEQ ID NO: 1492055 - DNA, 15 bp, Homo sapiens
acagcaaattgtacg

SEQ ID NO: 1492056 - DNA, 15 bp, Homo sapiens
tacagcaaattgtac

SEQ ID NO: 1492057 - DNA, 15 bp, Homo sapiens
ttacagcaaattgta

SEQ ID NO: 1492058 - DNA, 15 bp, Homo sapiens
cttacagcaaattgt

SEQ ID NO: 1492059 - DNA, 15 bp, Homo sapiens
tcttacagcaaattg

SEQ ID NO: 1492060 - DNA, 15 bp, Homo sapiens
ctcttacagcaaatt

SEQ ID NO: 1492061 - DNA, 15 bp, Homo sapiens
cctcttacagcaaat

SEQ ID NO: 1492062 - DNA, 15 bp, Homo sapiens
ccctcttacagcaaa

SEQ ID NO: 1492063 - DNA, 15 bp, Homo sapiens
tccctcttacagcaa

SEQ ID NO: 1492064 - DNA, 15 bp, Homo sapiens
gtccctcttacagca

SEQ ID NO: 1492065 - DNA, 15 bp, Homo sapiens
tgtccctcttacagc

SEQ ID NO: 1492066 - DNA, 15 bp, Homo sapiens
gtgtccctcttacag

SEQ ID NO: 1492067 - DNA, 15 bp, Homo sapiens
tgtgtccctcttaca

SEQ ID NO: 1492068 - DNA, 15 bp, Homo sapiens
gtgtgtccctcttac

SEQ ID NO: 1492069 - DNA, 15 bp, Homo sapiens
tgtgtgtccctctta

SEQ ID NO: 1492070 - DNA, 15 bp, Homo sapiens
gtgtgtgtccctctt

SEQ ID NO: 1492071 - DNA, 15 bp, Homo sapiens
cgtgtgtgtccctct

SEQ ID NO: 1492072 - DNA, 15 bp, Homo sapiens
ccgtgtgtgtccctc

SEQ ID NO: 1492073 - DNA, 15 bp, Homo sapiens
cccgtgtgtgtccct

SEQ ID NO: 1492074 - DNA, 15 bp, Homo sapiens
ccccgtgtgtgtccc

SEQ ID NO: 1492075 - DNA, 15 bp, Homo sapiens
gccccgtgtgtgtcc

SEQ ID NO: 1492076 - DNA, 15 bp, Homo sapiens
agccccgtgtgtgtc

SEQ ID NO: 1492077 - DNA, 15 bp, Homo sapiens
aagccccgtgtgtgt

SEQ ID NO: 1492078 - DNA, 15 bp, Homo sapiens
caagccccgtgtgtg

SEQ ID NO: 1492079 - DNA, 15 bp, Homo sapiens
ccaagccccgtgtgt

SEQ ID NO: 1492080 - DNA, 15 bp, Homo sapiens
tccaagccccgtgtg

SEQ ID NO: 1492081 - DNA, 15 bp, Homo sapiens
ctccaagccccgtgt

SEQ ID NO: 1492082 - DNA, 15 bp, Homo sapiens
actccaagccccgtg

SEQ ID NO: 1492083 - DNA, 15 bp, Homo sapiens
tactccaagccccgt

SEQ ID NO: 1492084 - DNA, 15 bp, Homo sapiens
gtactccaagccccg

SEQ ID NO: 1492085 - DNA, 15 bp, Homo sapiens
ggtactccaagcccc

SEQ ID NO: 1492086 - DNA, 15 bp, Homo sapiens
gggtactccaagccc

SEQ ID NO: 1492087 - DNA, 15 bp, Homo sapiens
ggggtactccaagcc

SEQ ID NO: 1492088 - DNA, 15 bp, Homo sapiens
aggggtactccaagc

SEQ ID NO: 1492089 - DNA, 15 bp, Homo sapiens
caggggtactccaag

SEQ ID NO: 1492090 - DNA, 15 bp, Homo sapiens
tcaggggtactccaa

SEQ ID NO: 1492091 - DNA, 15 bp, Homo sapiens
ctcaggggtactcca

SEQ ID NO: 1492092 - DNA, 15 bp, Homo sapiens
cctcaggggtactcc

SEQ ID NO: 1492093 - DNA, 15 bp, Homo sapiens
gcctcaggggtactc

SEQ ID NO: 1492094 - DNA, 15 bp, Homo sapiens
agcctcaggggtact

SEQ ID NO: 1492095 - DNA, 15 bp, Homo sapiens
aagcctcaggggtac

SEQ ID NO: 1492096 - DNA, 15 bp, Homo sapiens
caagcctcaggggta

SEQ ID NO: 1492097 - DNA, 15 bp, Homo sapiens
gcaagcctcaggggt

SEQ ID NO: 1492098 - DNA, 15 bp, Homo sapiens
ggcaagcctcagggg

SEQ ID NO: 1492099 - DNA, 15 bp, Homo sapiens
tggcaagcctcaggg

SEQ ID NO: 1492100 - DNA, 15 bp, Homo sapiens
ttggcaagcctcagg

SEQ ID NO: 1492101 - DNA, 15 bp, Homo sapiens
tttggcaagcctcag

SEQ ID NO: 1492102 - DNA, 15 bp, Homo sapiens
ctttggcaagcctca

SEQ ID NO: 1492103 - DNA, 15 bp, Homo sapiens
cctttggcaagcctc

SEQ ID NO: 1492104 - DNA, 15 bp, Homo sapiens
acctttggcaagcct

SEQ ID NO: 1492105 - DNA, 15 bp, Homo sapiens
aacctttggcaagcc

SEQ ID NO: 1492106 - DNA, 15 bp, Homo sapiens
caacctttggcaagc

SEQ ID NO: 1492107 - DNA, 15 bp, Homo sapiens
ccaacctttggcaag

SEQ ID NO: 1492108 - DNA, 15 bp, Homo sapiens
cccaacctttggcaa

SEQ ID NO: 1492109 - DNA, 15 bp, Homo sapiens
ccccaacctttggca

SEQ ID NO: 1492110 - DNA, 15 bp, Homo sapiens
tccccaacctttggc

SEQ ID NO: 1492111 - DNA, 15 bp, Homo sapiens
ctccccaacctttgg

SEQ ID NO: 1492112 - DNA, 15 bp, Homo sapiens
cctccccaacctttg

SEQ ID NO: 1492113 - DNA, 15 bp, Homo sapiens
gcctccccaaccttt

SEQ ID NO: 1492114 - DNA, 15 bp, Homo sapiens
tgcctccccaacctt

SEQ ID NO: 1492115 - DNA, 15 bp, Homo sapiens
ctgcctccccaacct

SEQ ID NO: 1492116 - DNA, 15 bp, Homo sapiens
tctgcctccccaacc

SEQ ID NO: 1492117 - DNA, 15 bp, Homo sapiens
ttctgcctccccaac

SEQ ID NO: 1492118 - DNA, 15 bp, Homo sapiens
attctgcctccccaa

SEQ ID NO: 1492119 - DNA, 15 bp, Homo sapiens
aattctgcctcccca

SEQ ID NO: 1492120 - DNA, 15 bp, Homo sapiens
caattctgcctcccc

SEQ ID NO: 1492121 - DNA, 15 bp, Homo sapiens
acaattctgcctccc

SEQ ID NO: 1492122 - DNA, 15 bp, Homo sapiens
cacaattctgcctcc

SEQ ID NO: 1492123 - DNA, 15 bp, Homo sapiens
gcacaattctgcctc

SEQ ID NO: 1492124 - DNA, 15 bp, Homo sapiens
agcacaattctgcct

SEQ ID NO: 1492125 - DNA, 15 bp, Homo sapiens
cagcacaattctgcc

SEQ ID NO: 1492126 - DNA, 15 bp, Homo sapiens
gcagcacaattctgc

SEQ ID NO: 1492127 - DNA, 15 bp, Homo sapiens
cgcagcacaattctg

SEQ ID NO: 1492128 - DNA, 15 bp, Homo sapiens
ccgcagcacaattct

SEQ ID NO: 1492129 - DNA, 15 bp, Homo sapiens
cccgcagcacaattc

SEQ ID NO: 1492130 - DNA, 15 bp, Homo sapiens
ccccgcagcacaatt

SEQ ID NO: 1492131 - DNA, 15 bp, Homo sapiens
cccccgcagcacaat

SEQ ID NO: 1492132 - DNA, 15 bp, Homo sapiens
ccccccgcagcacaa

SEQ ID NO: 1492133 - DNA, 15 bp, Homo sapiens
accccccgcagcaca

SEQ ID NO: 1492134 - DNA, 15 bp, Homo sapiens
caccccccgcagcac

SEQ ID NO: 1492135 - DNA, 15 bp, Homo sapiens
tcaccccccgcagca

SEQ ID NO: 1492136 - DNA, 15 bp, Homo sapiens
ctcaccccccgcagc

SEQ ID NO: 1492137 - DNA, 15 bp, Homo sapiens
cctcaccccccgcag

SEQ ID NO: 1492138 - DNA, 15 bp, Homo sapiens
ccctcaccccccgca

SEQ ID NO: 1492139 - DNA, 15 bp, Homo sapiens
cccctcaccccccgc

SEQ ID NO: 1492140 - DNA, 15 bp, Homo sapiens
ccccctcaccccccg

SEQ ID NO: 1492141 - DNA, 15 bp, Homo sapiens
cccccctcacccccc

SEQ ID NO: 1492142 - DNA, 15 bp, Homo sapiens
tcccccctcaccccc

SEQ ID NO: 1492143 - DNA, 15 bp, Homo sapiens
ttcccccctcacccc

SEQ ID NO: 1492144 - DNA, 15 bp, Homo sapiens
cttcccccctcaccc

SEQ ID NO: 1492145 - DNA, 15 bp, Homo sapiens
ccttcccccctcacc

SEQ ID NO: 1492146 - DNA, 15 bp, Homo sapiens
cccttcccccctcac

SEQ ID NO: 1492147 - DNA, 15 bp, Homo sapiens
tcccttcccccctca

SEQ ID NO: 1492148 - DNA, 15 bp, Homo sapiens
gtcccttcccccctc

SEQ ID NO: 1492149 - DNA, 15 bp, Homo sapiens
tgtcccttcccccct

SEQ ID NO: 1492150 - DNA, 15 bp, Homo sapiens
ctgtcccttcccccc

SEQ ID NO: 1492151 - DNA, 15 bp, Homo sapiens
cctgtcccttccccc

SEQ ID NO: 1492152 - DNA, 15 bp, Homo sapiens
tcctgtcccttcccc

SEQ ID NO: 1492153 - DNA, 15 bp, Homo sapiens
ctcctgtcccttccc

SEQ ID NO: 1492154 - DNA, 15 bp, Homo sapiens
gctcctgtcccttcc

SEQ ID NO: 1492155 - DNA, 15 bp, Homo sapiens
ggctcctgtcccttc

SEQ ID NO: 1492156 - DNA, 15 bp, Homo sapiens
tggctcctgtccctt

SEQ ID NO: 1492157 - DNA, 15 bp, Homo sapiens
ctggctcctgtccct

SEQ ID NO: 1492158 - DNA, 15 bp, Homo sapiens
gctggctcctgtccc

SEQ ID NO: 1492159 - DNA, 15 bp, Homo sapiens
ggctggctcctgtcc

SEQ ID NO: 1492160 - DNA, 15 bp, Homo sapiens
tggctggctcctgtc

SEQ ID NO: 1492161 - DNA, 15 bp, Homo sapiens
ctggctggctcctgt

SEQ ID NO: 1492162 - DNA, 15 bp, Homo sapiens
cctggctggctcctg

SEQ ID NO: 1492163 - DNA, 15 bp, Homo sapiens
ccctggctggctcct

SEQ ID NO: 1492164 - DNA, 15 bp, Homo sapiens
tccctggctggctcc

SEQ ID NO: 1492165 - DNA, 15 bp, Homo sapiens
gtccctggctggctc

SEQ ID NO: 1492166 - DNA, 15 bp, Homo sapiens
tgtccctggctggct

SEQ ID NO: 1492167 - DNA, 15 bp, Homo sapiens
ttgtccctggctggc

SEQ ID NO: 1492168 - DNA, 15 bp, Homo sapiens
attgtccctggctgg

SEQ ID NO: 1492169 - DNA, 15 bp, Homo sapiens
cattgtccctggctg

SEQ ID NO: 1492170 - DNA, 15 bp, Homo sapiens
acattgtccctggct

SEQ ID NO: 1492171 - DNA, 15 bp, Homo sapiens
cacattgtccctggc

SEQ ID NO: 1492172 - DNA, 15 bp, Homo sapiens
ccacattgtccctgg

SEQ ID NO: 1492173 - DNA, 15 bp, Homo sapiens
gccacattgtccctg

SEQ ID NO: 1492174 - DNA, 15 bp, Homo sapiens
ggccacattgtccct

SEQ ID NO: 1492175 - DNA, 15 bp, Homo sapiens
gggccacattgtccc

SEQ ID NO: 1492176 - DNA, 15 bp, Homo sapiens
agggccacattgtcc

SEQ ID NO: 1492177 - DNA, 15 bp, Homo sapiens
tagggccacattgtc

SEQ ID NO: 1492178 - DNA, 15 bp, Homo sapiens
gtagggccacattgt

SEQ ID NO: 1492179 - DNA, 15 bp, Homo sapiens
ggtagggccacattg

SEQ ID NO: 1492180 - DNA, 15 bp, Homo sapiens
aggtagggccacatt

SEQ ID NO: 1492181 - DNA, 15 bp, Homo sapiens
aaggtagggccacat

SEQ ID NO: 1492182 - DNA, 15 bp, Homo sapiens
gaaggtagggccaca

SEQ ID NO: 1492183 - DNA, 15 bp, Homo sapiens
agaaggtagggccac

SEQ ID NO: 1492184 - DNA, 15 bp, Homo sapiens
gagaaggtagggcca

SEQ ID NO: 1492185 - DNA, 15 bp, Homo sapiens
ggagaaggtagggcc

SEQ ID NO: 1492186 - DNA, 15 bp, Homo sapiens
gggagaaggtagggc

SEQ ID NO: 1492187 - DNA, 15 bp, Homo sapiens
agggagaaggtaggg

SEQ ID NO: 1492188 - DNA, 15 bp, Homo sapiens
cagggagaaggtagg

SEQ ID NO: 1492189 - DNA, 15 bp, Homo sapiens
ccagggagaaggtag

SEQ ID NO: 1492190 - DNA, 15 bp, Homo sapiens
tccagggagaaggta

SEQ ID NO: 1492191 - DNA, 15 bp, Homo sapiens
ctccagggagaaggt

SEQ ID NO: 1492192 - DNA, 15 bp, Homo sapiens
tctccagggagaagg

SEQ ID NO: 1492193 - DNA, 15 bp, Homo sapiens
ctctccagggagaag

SEQ ID NO: 1492194 - DNA, 15 bp, Homo sapiens
tctctccagggagaa

SEQ ID NO: 1492195 - DNA, 15 bp, Homo sapiens
gtctctccagggaga

SEQ ID NO: 1492196 - DNA, 15 bp, Homo sapiens
ggtctctccagggag

SEQ ID NO: 1492197 - DNA, 15 bp, Homo sapiens
aggtctctccaggga

SEQ ID NO: 1492198 - DNA, 15 bp, Homo sapiens
gaggtctctccaggg

SEQ ID NO: 1492199 - DNA, 15 bp, Homo sapiens
tgaggtctctccagg

SEQ ID NO: 1492200 - DNA, 15 bp, Homo sapiens
ctgaggtctctccag

SEQ ID NO: 1492201 - DNA, 15 bp, Homo sapiens
gctgaggtctctcca

SEQ ID NO: 1492202 - DNA, 15 bp, Homo sapiens
agctgaggtctctcc

SEQ ID NO: 1492203 - DNA, 15 bp, Homo sapiens
gagctgaggtctctc

SEQ ID NO: 1492204 - DNA, 15 bp, Homo sapiens
agagctgaggtctct

SEQ ID NO: 1492205 - DNA, 15 bp, Homo sapiens
gagagctgaggtctc

SEQ ID NO: 1492206 - DNA, 15 bp, Homo sapiens
agagagctgaggtct

SEQ ID NO: 1492207 - DNA, 15 bp, Homo sapiens
cagagagctgaggtc

SEQ ID NO: 1492208 - DNA, 15 bp, Homo sapiens
ccagagagctgaggt

SEQ ID NO: 1492209 - DNA, 15 bp, Homo sapiens
tccagagagctgagg

SEQ ID NO: 1492210 - DNA, 15 bp, Homo sapiens
ttccagagagctgag

SEQ ID NO: 1492211 - DNA, 15 bp, Homo sapiens
attccagagagctga

SEQ ID NO: 1492212 - DNA, 15 bp, Homo sapiens
aattccagagagctg

SEQ ID NO: 1492213 - DNA, 15 bp, Homo sapiens
gaattccagagagct

SEQ ID NO: 1492214 - DNA, 15 bp, Homo sapiens
tgaattccagagagc

SEQ ID NO: 1492215 - DNA, 15 bp, Homo sapiens
atgaattccagagag

SEQ ID NO: 1492216 - DNA, 15 bp, Homo sapiens
gatgaattccagaga

SEQ ID NO: 1492217 - DNA, 15 bp, Homo sapiens
agatgaattccagag

SEQ ID NO: 1492218 - DNA, 15 bp, Homo sapiens
tagatgaattccaga

SEQ ID NO: 1492219 - DNA, 15 bp, Homo sapiens
atagatgaattccag

SEQ ID NO: 1492220 - DNA, 15 bp, Homo sapiens
tatagatgaattcca

SEQ ID NO: 1492221 - DNA, 15 bp, Homo sapiens
atatagatgaattcc

SEQ ID NO: 1492222 - DNA, 15 bp, Homo sapiens
aatatagatgaattc

SEQ ID NO: 1492223 - DNA, 15 bp, Homo sapiens
aaatatagatgaatt

SEQ ID NO: 1492224 - DNA, 15 bp, Homo sapiens
taaatatagatgaat

SEQ ID NO: 1492225 - DNA, 15 bp, Homo sapiens
ctaaatatagatgaa

SEQ ID NO: 1492226 - DNA, 15 bp, Homo sapiens
gctaaatatagatga

SEQ ID NO: 1492227 - DNA, 15 bp, Homo sapiens
tgctaaatatagatg

SEQ ID NO: 1492228 - DNA, 15 bp, Homo sapiens
ctgctaaatatagat

SEQ ID NO: 1492229 - DNA, 15 bp, Homo sapiens
cctgctaaatataga

SEQ ID NO: 1492230 - DNA, 15 bp, Homo sapiens
acctgctaaatatag

SEQ ID NO: 1492231 - DNA, 15 bp, Homo sapiens
cacctgctaaatata

SEQ ID NO: 1492232 - DNA, 15 bp, Homo sapiens
ccacctgctaaatat

SEQ ID NO: 1492233 - DNA, 15 bp, Homo sapiens
gccacctgctaaata

SEQ ID NO: 1492234 - DNA, 15 bp, Homo sapiens
agccacctgctaaat

SEQ ID NO: 1492235 - DNA, 15 bp, Homo sapiens
cagccacctgctaaa

SEQ ID NO: 1492236 - DNA, 15 bp, Homo sapiens
ccagccacctgctaa

SEQ ID NO: 1492237 - DNA, 15 bp, Homo sapiens
tccagccacctgcta

SEQ ID NO: 1492238 - DNA, 15 bp, Homo sapiens
gtccagccacctgct

SEQ ID NO: 1492239 - DNA, 15 bp, Homo sapiens
tgtccagccacctgc

SEQ ID NO: 1492240 - DNA, 15 bp, Homo sapiens
ctgtccagccacctg

SEQ ID NO: 1492241 - DNA, 15 bp, Homo sapiens
cctgtccagccacct

SEQ ID NO: 1492242 - DNA, 15 bp, Homo sapiens
tcctgtccagccacc

SEQ ID NO: 1492243 - DNA, 15 bp, Homo sapiens
ctcctgtccagccac

SEQ ID NO: 1492244 - DNA, 15 bp, Homo sapiens
cctcctgtccagcca

SEQ ID NO: 1492245 - DNA, 15 bp, Homo sapiens
gcctcctgtccagcc

SEQ ID NO: 1492246 - DNA, 15 bp, Homo sapiens
tgcctcctgtccagc

SEQ ID NO: 1492247 - DNA, 15 bp, Homo sapiens
ctgcctcctgtccag

SEQ ID NO: 1492248 - DNA, 15 bp, Homo sapiens
tctgcctcctgtcca

SEQ ID NO: 1492249 - DNA, 15 bp, Homo sapiens
atctgcctcctgtcc

SEQ ID NO: 1492250 - DNA, 15 bp, Homo sapiens
tatctgcctcctgtc

SEQ ID NO: 1492251 - DNA, 15 bp, Homo sapiens
ttatctgcctcctgt

SEQ ID NO: 1492252 - DNA, 15 bp, Homo sapiens
cttatctgcctcctg

SEQ ID NO: 1492253 - DNA, 15 bp, Homo sapiens
gcttatctgcctcct

SEQ ID NO: 1492254 - DNA, 15 bp, Homo sapiens
tgcttatctgcctcc

SEQ ID NO: 1492255 - DNA, 15 bp, Homo sapiens
ctgcttatctgcctc

SEQ ID NO: 1492256 - DNA, 15 bp, Homo sapiens
tctgcttatctgcct

SEQ ID NO: 1492257 - DNA, 15 bp, Homo sapiens
ctctgcttatctgcc

SEQ ID NO: 1492258 - DNA, 15 bp, Homo sapiens
gctctgcttatctgc

SEQ ID NO: 1492259 - DNA, 15 bp, Homo sapiens
ggctctgcttatctg

SEQ ID NO: 1492260 - DNA, 15 bp, Homo sapiens
aggctctgcttatct

SEQ ID NO: 1492261 - DNA, 15 bp, Homo sapiens
caggctctgcttatc

SEQ ID NO: 1492262 - DNA, 15 bp, Homo sapiens
ccaggctctgcttat

SEQ ID NO: 1492263 - DNA, 15 bp, Homo sapiens
cccaggctctgctta

SEQ ID NO: 1492264 - DNA, 15 bp, Homo sapiens
ccccaggctctgctt

SEQ ID NO: 1492265 - DNA, 15 bp, Homo sapiens
tccccaggctctgct

SEQ ID NO: 1492266 - DNA, 15 bp, Homo sapiens
ctccccaggctctgc

SEQ ID NO: 1492267 - DNA, 15 bp, Homo sapiens
cctccccaggctctg

SEQ ID NO: 1492268 - DNA, 15 bp, Homo sapiens
ccctccccaggctct

SEQ ID NO: 1492269 - DNA, 15 bp, Homo sapiens
cccctccccaggctc

SEQ ID NO: 1492270 - DNA, 15 bp, Homo sapiens
ccccctccccaggct

SEQ ID NO: 1492271 - DNA, 15 bp, Homo sapiens
cccccctccccaggc

SEQ ID NO: 1492272 - DNA, 15 bp, Homo sapiens
tcccccctccccagg

SEQ ID NO: 1492273 - DNA, 15 bp, Homo sapiens
ctcccccctccccag

SEQ ID NO: 1492274 - DNA, 15 bp, Homo sapiens
cctcccccctcccca

SEQ ID NO: 1492275 - DNA, 15 bp, Homo sapiens
acctcccccctcccc

SEQ ID NO: 1492276 - DNA, 15 bp, Homo sapiens
gacctcccccctccc

SEQ ID NO: 1492277 - DNA, 15 bp, Homo sapiens
ggacctcccccctcc

SEQ ID NO: 1492278 - DNA, 15 bp, Homo sapiens
gggacctcccccctc

SEQ ID NO: 1492279 - DNA, 15 bp, Homo sapiens
ggggacctcccccct

SEQ ID NO: 1492280 - DNA, 15 bp, Homo sapiens
tggggacctcccccc

SEQ ID NO: 1492281 - DNA, 15 bp, Homo sapiens
atggggacctccccc

SEQ ID NO: 1492282 - DNA, 15 bp, Homo sapiens
tatggggacctcccc

SEQ ID NO: 1492283 - DNA, 15 bp, Homo sapiens
atatggggacctccc

SEQ ID NO: 1492284 - DNA, 15 bp, Homo sapiens
tatatggggacctcc

SEQ ID NO: 1492285 - DNA, 15 bp, Homo sapiens
atatatggggacctc

SEQ ID NO: 1492286 - DNA, 15 bp, Homo sapiens
tatatatggggacct

SEQ ID NO: 1492287 - DNA, 15 bp, Homo sapiens
ctatatatggggacc

SEQ ID NO: 1492288 - DNA, 15 bp, Homo sapiens
actatatatggggac

SEQ ID NO: 1492289 - DNA, 15 bp, Homo sapiens
cactatatatgggga

SEQ ID NO: 1492290 - DNA, 15 bp, Homo sapiens
ccactatatatgggg

SEQ ID NO: 1492291 - DNA, 15 bp, Homo sapiens
cccactatatatggg

SEQ ID NO: 1492292 - DNA, 15 bp, Homo sapiens
tcccactatatatgg

SEQ ID NO: 1492293 - DNA, 15 bp, Homo sapiens
ttcccactatatatg

SEQ ID NO: 1492294 - DNA, 15 bp, Homo sapiens
cttcccactatatat

SEQ ID NO: 1492295 - DNA, 15 bp, Homo sapiens
ccttcccactatata

SEQ ID NO: 1492296 - DNA, 15 bp, Homo sapiens
tccttcccactatat

SEQ ID NO: 1492297 - DNA, 15 bp, Homo sapiens
gtccttcccactata

SEQ ID NO: 1492298 - DNA, 15 bp, Homo sapiens
tgtccttcccactat

SEQ ID NO: 1492299 - DNA, 15 bp, Homo sapiens
ctgtccttcccacta

SEQ ID NO: 1492300 - DNA, 15 bp, Homo sapiens
cctgtccttcccact

SEQ ID NO: 1492301 - DNA, 15 bp, Homo sapiens
tcctgtccttcccac

SEQ ID NO: 1492302 - DNA, 15 bp, Homo sapiens
gtcctgtccttccca

SEQ ID NO: 1492303 - DNA, 15 bp, Homo sapiens
ggtcctgtccttccc

SEQ ID NO: 1492304 - DNA, 15 bp, Homo sapiens
gggtcctgtccttcc

SEQ ID NO: 1492305 - DNA, 15 bp, Homo sapiens
ggggtcctgtccttc

SEQ ID NO: 1492306 - DNA, 15 bp, Homo sapiens
tggggtcctgtcctt

SEQ ID NO: 1492307 - DNA, 15 bp, Homo sapiens
gtggggtcctgtcct

SEQ ID NO: 1492308 - DNA, 15 bp, Homo sapiens
agtggggtcctgtcc

SEQ ID NO: 1492309 - DNA, 15 bp, Homo sapiens
gagtggggtcctgtc

SEQ ID NO: 1492310 - DNA, 15 bp, Homo sapiens
tgagtggggtcctgt

SEQ ID NO: 1492311 - DNA, 15 bp, Homo sapiens
ctgagtggggtcctg

SEQ ID NO: 1492312 - DNA, 15 bp, Homo sapiens
actgagtggggtcct

SEQ ID NO: 1492313 - DNA, 15 bp, Homo sapiens
gactgagtggggtcc

SEQ ID NO: 1492314 - DNA, 15 bp, Homo sapiens
ggactgagtggggtc

SEQ ID NO: 1492315 - DNA, 15 bp, Homo sapiens
gggactgagtggggt

SEQ ID NO: 1492316 - DNA, 15 bp, Homo sapiens
agggactgagtgggg

SEQ ID NO: 1492317 - DNA, 15 bp, Homo sapiens
gagggactgagtggg

SEQ ID NO: 1492318 - DNA, 15 bp, Homo sapiens
agagggactgagtgg

SEQ ID NO: 1492319 - DNA, 15 bp, Homo sapiens
aagagggactgagtg

SEQ ID NO: 1492320 - DNA, 15 bp, Homo sapiens
aaagagggactgagt

SEQ ID NO: 1492321 - DNA, 15 bp, Homo sapiens
caaagagggactgag

SEQ ID NO: 1492322 - DNA, 15 bp, Homo sapiens
ccaaagagggactga

SEQ ID NO: 1492323 - DNA, 15 bp, Homo sapiens
cccaaagagggactg

SEQ ID NO: 1492324 - DNA, 15 bp, Homo sapiens
acccaaagagggact

SEQ ID NO: 1492325 - DNA, 15 bp, Homo sapiens
cacccaaagagggac

SEQ ID NO: 1492326 - DNA, 15 bp, Homo sapiens
tcacccaaagaggga

SEQ ID NO: 1492327 - DNA, 15 bp, Homo sapiens
gtcacccaaagaggg

SEQ ID NO: 1492328 - DNA, 15 bp, Homo sapiens
ggtcacccaaagagg

SEQ ID NO: 1492329 - DNA, 15 bp, Homo sapiens
aggtcacccaaagag

SEQ ID NO: 1492330 - DNA, 15 bp, Homo sapiens
caggtcacccaaaga

SEQ ID NO: 1492331 - DNA, 15 bp, Homo sapiens
acaggtcacccaaag

SEQ ID NO: 1492332 - DNA, 15 bp, Homo sapiens
cacaggtcacccaaa

SEQ ID NO: 1492333 - DNA, 15 bp, Homo sapiens
gcacaggtcacccaa

SEQ ID NO: 1492334 - DNA, 15 bp, Homo sapiens
ggcacaggtcaccca

SEQ ID NO: 1492335 - DNA, 15 bp, Homo sapiens
aggcacaggtcaccc

SEQ ID NO: 1492336 - DNA, 15 bp, Homo sapiens
caggcacaggtcacc

SEQ ID NO: 1492337 - DNA, 15 bp, Homo sapiens
gcaggcacaggtcac

SEQ ID NO: 1492338 - DNA, 15 bp, Homo sapiens
cctcggaggtcccca

SEQ ID NO: 1492339 - DNA, 15 bp, Homo sapiens
ccctcggaggtcccc

SEQ ID NO: 1492340 - DNA, 15 bp, Homo sapiens
accctcggaggtccc

SEQ ID NO: 1492341 - DNA, 15 bp, Homo sapiens
taccctcggaggtcc

SEQ ID NO: 1492342 - DNA, 15 bp, Homo sapiens
ctaccctcggaggtc

SEQ ID NO: 1492343 - DNA, 15 bp, Homo sapiens
cctaccctcggaggt

SEQ ID NO: 1492344 - DNA, 15 bp, Homo sapiens
ccctaccctcggagg

SEQ ID NO: 1492345 - DNA, 15 bp, Homo sapiens
cccctaccctcggag

SEQ ID NO: 1492346 - DNA, 15 bp, Homo sapiens
acccctaccctcgga

SEQ ID NO: 1492347 - DNA, 15 bp, Homo sapiens
cacccctaccctcgg

SEQ ID NO: 1492348 - DNA, 15 bp, Homo sapiens
acacccctaccctcg

SEQ ID NO: 1492349 - DNA, 15 bp, Homo sapiens
gacacccctaccctc

SEQ ID NO: 1492350 - DNA, 15 bp, Homo sapiens
agacacccctaccct

SEQ ID NO: 1492351 - DNA, 15 bp, Homo sapiens
aagacacccctaccc

SEQ ID NO: 1492352 - DNA, 15 bp, Homo sapiens
gaagacacccctacc

SEQ ID NO: 1492353 - DNA, 15 bp, Homo sapiens
ggaagacacccctac

SEQ ID NO: 1492354 - DNA, 15 bp, Homo sapiens
tggaagacaccccta

SEQ ID NO: 1492355 - DNA, 15 bp, Homo sapiens
ctggaagacacccct

SEQ ID NO: 1492356 - DNA, 15 bp, Homo sapiens
cctggaagacacccc

SEQ ID NO: 1492357 - DNA, 15 bp, Homo sapiens
tcctggaagacaccc

SEQ ID NO: 1492358 - DNA, 15 bp, Homo sapiens
ttcctggaagacacc

SEQ ID NO: 1492359 - DNA, 15 bp, Homo sapiens
attcctggaagacac

SEQ ID NO: 1492360 - DNA, 15 bp, Homo sapiens
tattcctggaagaca

SEQ ID NO: 1492361 - DNA, 15 bp, Homo sapiens
ctattcctggaagac

SEQ ID NO: 1492362 - DNA, 15 bp, Homo sapiens
gctattcctggaaga

SEQ ID NO: 1492363 - DNA, 15 bp, Homo sapiens
tgctattcctggaag

SEQ ID NO: 1492364 - DNA, 15 bp, Homo sapiens
ttgctattcctggaa

SEQ ID NO: 1492365 - DNA, 15 bp, Homo sapiens
gttgctattcctgga

SEQ ID NO: 1492366 - DNA, 15 bp, Homo sapiens
tgttgctattcctgg

SEQ ID NO: 1492367 - DNA, 15 bp, Homo sapiens
ttgttgctattcctg

SEQ ID NO: 1492368 - DNA, 15 bp, Homo sapiens
gttgttgctattcct

SEQ ID NO: 1492369 - DNA, 15 bp, Homo sapiens
tgttgttgctattcc

SEQ ID NO: 1492370 - DNA, 15 bp, Homo sapiens
ctgttgttgctattc

SEQ ID NO: 1492371 - DNA, 15 bp, Homo sapiens
actgttgttgctatt

SEQ ID NO: 1492372 - DNA, 15 bp, Homo sapiens
tactgttgttgctat

SEQ ID NO: 1492373 - DNA, 15 bp, Homo sapiens
ttactgttgttgcta

SEQ ID NO: 1492374 - DNA, 15 bp, Homo sapiens
tttactgttgttgct

SEQ ID NO: 1492375 - DNA, 15 bp, Homo sapiens
ttttactgttgttgc

SEQ ID NO: 1492376 - DNA, 15 bp, Homo sapiens
tttttactgttgttg

SEQ ID NO: 1492377 - DNA, 15 bp, Homo sapiens
ctttttactgttgtt

SEQ ID NO: 1492378 - DNA, 15 bp, Homo sapiens
tctttttactgttgt

SEQ ID NO: 1492379 - DNA, 15 bp, Homo sapiens
ctctttttactgttg

SEQ ID NO: 1492380 - DNA, 15 bp, Homo sapiens
gctctttttactgtt

SEQ ID NO: 1492381 - DNA, 15 bp, Homo sapiens
tgctctttttactgt

SEQ ID NO: 1492382 - DNA, 15 bp, Homo sapiens
ttgctctttttactg

SEQ ID NO: 1492383 - DNA, 15 bp, Homo sapiens
tttgctctttttact

SEQ ID NO: 1492384 - DNA, 15 bp, Homo sapiens
atttgctctttttac

SEQ ID NO: 1492385 - DNA, 15 bp, Homo sapiens
aatttgctcttttta

SEQ ID NO: 1492386 - DNA, 15 bp, Homo sapiens
caatttgctcttttt

SEQ ID NO: 1492387 - DNA, 15 bp, Homo sapiens
gcaatttgctctttt

SEQ ID NO: 1492388 - DNA, 15 bp, Homo sapiens
agcaatttgctcttt

SEQ ID NO: 1492389 - DNA, 15 bp, Homo sapiens
cagcaatttgctctt

SEQ ID NO: 1492390 - DNA, 15 bp, Homo sapiens
ccagcaatttgctct

SEQ ID NO: 1492391 - DNA, 15 bp, Homo sapiens
gccagcaatttgctc

SEQ ID NO: 1492392 - DNA, 15 bp, Homo sapiens
ggccagcaatttgct

SEQ ID NO: 1492393 - DNA, 15 bp, Homo sapiens
tggccagcaatttgc

SEQ ID NO: 1492394 - DNA, 15 bp, Homo sapiens
ctggccagcaatttg

SEQ ID NO: 1492395 - DNA, 15 bp, Homo sapiens
cctggccagcaattt

SEQ ID NO: 1492396 - DNA, 15 bp, Homo sapiens
acctggccagcaatt

SEQ ID NO: 1492397 - DNA, 15 bp, Homo sapiens
cacctggccagcaat

SEQ ID NO: 1492398 - DNA, 15 bp, Homo sapiens
gcacctggccagcaa

SEQ ID NO: 1492399 - DNA, 15 bp, Homo sapiens
tgcacctggccagca

SEQ ID NO: 1492400 - DNA, 15 bp, Homo sapiens
ctgcacctggccagc

SEQ ID NO: 1492401 - DNA, 15 bp, Homo sapiens
actgcacctggccag

SEQ ID NO: 1492402 - DNA, 15 bp, Homo sapiens
cgtgagccactgcac

SEQ ID NO: 1492403 - DNA, 15 bp, Homo sapiens
gcgtgagccactgca

SEQ ID NO: 1492404 - DNA, 15 bp, Homo sapiens
ggcgtgagccactgc

SEQ ID NO: 1492405 - DNA, 15 bp, Homo sapiens
aggcgtgagccactg

SEQ ID NO: 1492406 - DNA, 15 bp, Homo sapiens
taacctcaggtgatc

SEQ ID NO: 1492407 - DNA, 15 bp, Homo sapiens
ctaacctcaggtgat

SEQ ID NO: 1492408 - DNA, 15 bp, Homo sapiens
cctaacctcaggtga

SEQ ID NO: 1492409 - DNA, 15 bp, Homo sapiens
gcctaacctcaggtg

SEQ ID NO: 1492410 - DNA, 15 bp, Homo sapiens
cgcctaacctcaggt

SEQ ID NO: 1492411 - DNA, 15 bp, Homo sapiens
acgcctaacctcagg

SEQ ID NO: 1492412 - DNA, 15 bp, Homo sapiens
aacgcctaacctcag

SEQ ID NO: 1492413 - DNA, 15 bp, Homo sapiens
gaacgcctaacctca

SEQ ID NO: 1492414 - DNA, 15 bp, Homo sapiens
tgaacgcctaacctc

SEQ ID NO: 1492415 - DNA, 15 bp, Homo sapiens
ttgaacgcctaacct

SEQ ID NO: 1492416 - DNA, 15 bp, Homo sapiens
cttgaacgcctaacc

SEQ ID NO: 1492417 - DNA, 15 bp, Homo sapiens
tcttgaacgcctaac

SEQ ID NO: 1492418 - DNA, 15 bp, Homo sapiens
gtcttgaacgcctaa

SEQ ID NO: 1492419 - DNA, 15 bp, Homo sapiens
ggtcttgaacgccta

SEQ ID NO: 1492420 - DNA, 15 bp, Homo sapiens
tggtcttgaacgcct

SEQ ID NO: 1492421 - DNA, 15 bp, Homo sapiens
ctggtcttgaacgcc

SEQ ID NO: 1492422 - DNA, 15 bp, Homo sapiens
gctggtcttgaacgc

SEQ ID NO: 1492423 - DNA, 15 bp, Homo sapiens
ggctggtcttgaacg

SEQ ID NO: 1492424 - DNA, 15 bp, Homo sapiens
tcaggctggtcttga

SEQ ID NO: 1492425 - DNA, 15 bp, Homo sapiens
gtcaggctggtcttg

SEQ ID NO: 1492426 - DNA, 15 bp, Homo sapiens
ggtcaggctggtctt

SEQ ID NO: 1492427 - DNA, 15 bp, Homo sapiens
gtaattttgtatttt

SEQ ID NO: 1492428 - DNA, 15 bp, Homo sapiens
ggtaattttgtattt

SEQ ID NO: 1492429 - DNA, 15 bp, Homo sapiens
aggtaattttgtatt

SEQ ID NO: 1492430 - DNA, 15 bp, Homo sapiens
caggtaattttgtat

SEQ ID NO: 1492431 - DNA, 15 bp, Homo sapiens
ccaggtaattttgta

SEQ ID NO: 1492432 - DNA, 15 bp, Homo sapiens
cccaggtaattttgt

SEQ ID NO: 1492433 - DNA, 15 bp, Homo sapiens
gcccaggtaattttg

SEQ ID NO: 1492434 - DNA, 15 bp, Homo sapiens
tgcccaggtaatttt

SEQ ID NO: 1492435 - DNA, 15 bp, Homo sapiens
atgcccaggtaattt

SEQ ID NO: 1492436 - DNA, 15 bp, Homo sapiens
catgcccaggtaatt

SEQ ID NO: 1492437 - DNA, 15 bp, Homo sapiens
ccatgcccaggtaat

SEQ ID NO: 1492438 - DNA, 15 bp, Homo sapiens
accatgcccaggtaa

SEQ ID NO: 1492439 - DNA, 15 bp, Homo sapiens
caccatgcccaggta

SEQ ID NO: 1492440 - DNA, 15 bp, Homo sapiens
ccaccatgcccaggt

SEQ ID NO: 1492441 - DNA, 15 bp, Homo sapiens
gccaccatgcccagg

SEQ ID NO: 1492442 - DNA, 15 bp, Homo sapiens
ctgactcactgcaac

SEQ ID NO: 1492443 - DNA, 15 bp, Homo sapiens
cctgactcactgcaa

SEQ ID NO: 1492444 - DNA, 15 bp, Homo sapiens
tcctgactcactgca

SEQ ID NO: 1492445 - DNA, 15 bp, Homo sapiens
atcctgactcactgc

SEQ ID NO: 1492446 - DNA, 15 bp, Homo sapiens
aatcctgactcactg

SEQ ID NO: 1492447 - DNA, 15 bp, Homo sapiens
caatcctgactcact

SEQ ID NO: 1492448 - DNA, 15 bp, Homo sapiens
acaatcctgactcac

SEQ ID NO: 1492449 - DNA, 15 bp, Homo sapiens
cacaatcctgactca

SEQ ID NO: 1492450 - DNA, 15 bp, Homo sapiens
gcacaatcctgactc

SEQ ID NO: 1492451 - DNA, 15 bp, Homo sapiens
ggcacaatcctgact

SEQ ID NO: 1492452 - DNA, 15 bp, Homo sapiens
tggcacaatcctgac

SEQ ID NO: 1492453 - DNA, 15 bp, Homo sapiens
atggcacaatcctga

SEQ ID NO: 1492454 - DNA, 15 bp, Homo sapiens
aatggcacaatcctg

SEQ ID NO: 1492455 - DNA, 15 bp, Homo sapiens
caatggcacaatcct

SEQ ID NO: 1492456 - DNA, 15 bp, Homo sapiens
gcaatggcacaatcc

SEQ ID NO: 1492457 - DNA, 15 bp, Homo sapiens
ttggagtgcaatggc

SEQ ID NO: 1492458 - DNA, 15 bp, Homo sapiens
gttggagtgcaatgg

SEQ ID NO: 1492459 - DNA, 15 bp, Homo sapiens
ggttggagtgcaatg

SEQ ID NO: 1492460 - DNA, 15 bp, Homo sapiens
aggttggagtgcaat

SEQ ID NO: 1492461 - DNA, 15 bp, Homo sapiens
caggttggagtgcaa

SEQ ID NO: 1492462 - DNA, 15 bp, Homo sapiens
tctgtcacccaggtt

SEQ ID NO: 1492463 - DNA, 15 bp, Homo sapiens
ttctgtcacccaggt

SEQ ID NO: 1492464 - DNA, 15 bp, Homo sapiens
agtctcattctgtca

SEQ ID NO: 1492465 - DNA, 15 bp, Homo sapiens
gagtctcattctgtc

SEQ ID NO: 1492466 - DNA, 15 bp, Homo sapiens
ggagtctcattctgt

SEQ ID NO: 1492467 - DNA, 15 bp, Homo sapiens
tggagtctcattctg

SEQ ID NO: 1492468 - DNA, 15 bp, Homo sapiens
atggagtctcattct

SEQ ID NO: 1492469 - DNA, 15 bp, Homo sapiens
gatggagtctcattc

SEQ ID NO: 1492470 - DNA, 15 bp, Homo sapiens
agatggagtctcatt

SEQ ID NO: 1492471 - DNA, 15 bp, Homo sapiens
gagatggagtctcat

SEQ ID NO: 1492472 - DNA, 15 bp, Homo sapiens
actttttttgagatg

SEQ ID NO: 1492473 - DNA, 15 bp, Homo sapiens
cactttttttgagat

SEQ ID NO: 1492474 - DNA, 15 bp, Homo sapiens
tcactttttttgaga

SEQ ID NO: 1492475 - DNA, 15 bp, Homo sapiens
ctcactttttttgag

SEQ ID NO: 1492476 - DNA, 15 bp, Homo sapiens
actcactttttttga

SEQ ID NO: 1492477 - DNA, 15 bp, Homo sapiens
cactcactttttttg

SEQ ID NO: 1492478 - DNA, 15 bp, Homo sapiens
tcactcacttttttt

SEQ ID NO: 1492479 - DNA, 15 bp, Homo sapiens
ctcactcactttttt

SEQ ID NO: 1492480 - DNA, 15 bp, Homo sapiens
actcactcacttttt

SEQ ID NO: 1492481 - DNA, 15 bp, Homo sapiens
aactcactcactttt

SEQ ID NO: 1492482 - DNA, 15 bp, Homo sapiens
gaactcactcacttt

SEQ ID NO: 1492483 - DNA, 15 bp, Homo sapiens
ggaactcactcactt

SEQ ID NO: 1492484 - DNA, 15 bp, Homo sapiens
aggaactcactcact

SEQ ID NO: 1492485 - DNA, 15 bp, Homo sapiens
aaggaactcactcac

SEQ ID NO: 1492486 - DNA, 15 bp, Homo sapiens
gaaggaactcactca

SEQ ID NO: 1492487 - DNA, 15 bp, Homo sapiens
ggaaggaactcactc

SEQ ID NO: 1492488 - DNA, 15 bp, Homo sapiens
aggaaggaactcact

SEQ ID NO: 1492489 - DNA, 15 bp, Homo sapiens
taggaaggaactcac

SEQ ID NO: 1492490 - DNA, 15 bp, Homo sapiens
ttaggaaggaactca

SEQ ID NO: 1492491 - DNA, 15 bp, Homo sapiens
cttaggaaggaactc

SEQ ID NO: 1492492 - DNA, 15 bp, Homo sapiens
gcttaggaaggaact

SEQ ID NO: 1492493 - DNA, 15 bp, Homo sapiens
ggcttaggaaggaac

SEQ ID NO: 1492494 - DNA, 15 bp, Homo sapiens
tggcttaggaaggaa

SEQ ID NO: 1492495 - DNA, 15 bp, Homo sapiens
ctggcttaggaagga

SEQ ID NO: 1492496 - DNA, 15 bp, Homo sapiens
gctggcttaggaagg

SEQ ID NO: 1492497 - DNA, 15 bp, Homo sapiens
ggctggcttaggaag

SEQ ID NO: 1492498 - DNA, 15 bp, Homo sapiens
tggctggcttaggaa

SEQ ID NO: 1492499 - DNA, 15 bp, Homo sapiens
gtggctggcttagga

SEQ ID NO: 1492500 - DNA, 15 bp, Homo sapiens
agtggctggcttagg

SEQ ID NO: 1492501 - DNA, 15 bp, Homo sapiens
tagtggctggcttag

SEQ ID NO: 1492502 - DNA, 15 bp, Homo sapiens
ctagtggctggctta

SEQ ID NO: 1492503 - DNA, 15 bp, Homo sapiens
cctagtggctggctt

SEQ ID NO: 1492504 - DNA, 15 bp, Homo sapiens
acctagtggctggct

SEQ ID NO: 1492505 - DNA, 15 bp, Homo sapiens
cacctagtggctggc

SEQ ID NO: 1492506 - DNA, 15 bp, Homo sapiens
gcacctagtggctgg

SEQ ID NO: 1492507 - DNA, 15 bp, Homo sapiens
agcacctagtggctg

SEQ ID NO: 1492508 - DNA, 15 bp, Homo sapiens
aagcacctagtggct

SEQ ID NO: 1492509 - DNA, 15 bp, Homo sapiens
aaagcacctagtggc

SEQ ID NO: 1492510 - DNA, 15 bp, Homo sapiens
taaagcacctagtgg

SEQ ID NO: 1492511 - DNA, 15 bp, Homo sapiens
ataaagcacctagtg

SEQ ID NO: 1492512 - DNA, 15 bp, Homo sapiens
cataaagcacctagt

SEQ ID NO: 1492513 - DNA, 15 bp, Homo sapiens
acataaagcacctag

SEQ ID NO: 1492514 - DNA, 15 bp, Homo sapiens
tacataaagcaccta

SEQ ID NO: 1492515 - DNA, 15 bp, Homo sapiens
ttacataaagcacct

SEQ ID NO: 1492516 - DNA, 15 bp, Homo sapiens
attacataaagcacc

SEQ ID NO: 1492517 - DNA, 15 bp, Homo sapiens
aattacataaagcac

SEQ ID NO: 1492518 - DNA, 15 bp, Homo sapiens
taattacataaagca

SEQ ID NO: 1492519 - DNA, 15 bp, Homo sapiens
ataattacataaagc

SEQ ID NO: 1492520 - DNA, 15 bp, Homo sapiens
gataattacataaag

SEQ ID NO: 1492521 - DNA, 15 bp, Homo sapiens
agataattacataaa

SEQ ID NO: 1492522 - DNA, 15 bp, Homo sapiens
gagataattacataa

SEQ ID NO: 1492523 - DNA, 15 bp, Homo sapiens
tgagataattacata

SEQ ID NO: 1492524 - DNA, 15 bp, Homo sapiens
atgagataattacat

SEQ ID NO: 1492525 - DNA, 15 bp, Homo sapiens
aatgagataattaca

SEQ ID NO: 1492526 - DNA, 15 bp, Homo sapiens
aaatgagataattac

SEQ ID NO: 1492527 - DNA, 15 bp, Homo sapiens
attaaatgagataat

SEQ ID NO: 1492528 - DNA, 15 bp, Homo sapiens
aattaaatgagataa

SEQ ID NO: 1492529 - DNA, 15 bp, Homo sapiens
gaattaaatgagata

SEQ ID NO: 1492530 - DNA, 15 bp, Homo sapiens
agaattaaatgagat

SEQ ID NO: 1492531 - DNA, 15 bp, Homo sapiens
gagaattaaatgaga

SEQ ID NO: 1492532 - DNA, 15 bp, Homo sapiens
cgagaattaaatgag

SEQ ID NO: 1492533 - DNA, 15 bp, Homo sapiens
tcgagaattaaatga

SEQ ID NO: 1492534 - DNA, 15 bp, Homo sapiens
ttcgagaattaaatg

SEQ ID NO: 1492535 - DNA, 15 bp, Homo sapiens
tttcgagaattaaat

SEQ ID NO: 1492536 - DNA, 15 bp, Homo sapiens
gtttcgagaattaaa

SEQ ID NO: 1492537 - DNA, 15 bp, Homo sapiens
tgtttcgagaattaa

SEQ ID NO: 1492538 - DNA, 15 bp, Homo sapiens
ttgtttcgagaatta

SEQ ID NO: 1492539 - DNA, 15 bp, Homo sapiens
gttgtttcgagaatt

SEQ ID NO: 1492540 - DNA, 15 bp, Homo sapiens
tgttgtttcgagaat

SEQ ID NO: 1492541 - DNA, 15 bp, Homo sapiens
gtgttgtttcgagaa

SEQ ID NO: 1492542 - DNA, 15 bp, Homo sapiens
agtgttgtttcgaga

SEQ ID NO: 1492543 - DNA, 15 bp, Homo sapiens
tagtgttgtttcgag

SEQ ID NO: 1492544 - DNA, 15 bp, Homo sapiens
atagtgttgtttcga

SEQ ID NO: 1492545 - DNA, 15 bp, Homo sapiens
catagtgttgtttcg

SEQ ID NO: 1492546 - DNA, 15 bp, Homo sapiens
tcatagtgttgtttc

SEQ ID NO: 1492547 - DNA, 15 bp, Homo sapiens
atcatagtgttgttt

SEQ ID NO: 1492548 - DNA, 15 bp, Homo sapiens
catcatagtgttgtt

SEQ ID NO: 1492549 - DNA, 15 bp, Homo sapiens
ccatcatagtgttgt

SEQ ID NO: 1492550 - DNA, 15 bp, Homo sapiens
tccatcatagtgttg

SEQ ID NO: 1492551 - DNA, 15 bp, Homo sapiens
ttccatcatagtgtt

SEQ ID NO: 1492552 - DNA, 15 bp, Homo sapiens
cttccatcatagtgt

SEQ ID NO: 1492553 - DNA, 15 bp, Homo sapiens
ccttccatcatagtg

SEQ ID NO: 1492554 - DNA, 15 bp, Homo sapiens
tccttccatcatagt

SEQ ID NO: 1492555 - DNA, 15 bp, Homo sapiens
gtccttccatcatag

SEQ ID NO: 1492556 - DNA, 15 bp, Homo sapiens
agtccttccatcata

SEQ ID NO: 1492557 - DNA, 15 bp, Homo sapiens
tagtccttccatcat

SEQ ID NO: 1492558 - DNA, 15 bp, Homo sapiens
atagtccttccatca

SEQ ID NO: 1492559 - DNA, 15 bp, Homo sapiens
aatagtccttccatc

SEQ ID NO: 1492560 - DNA, 15 bp, Homo sapiens
taatagtccttccat

SEQ ID NO: 1492561 - DNA, 15 bp, Homo sapiens
gtaatagtccttcca

SEQ ID NO: 1492562 - DNA, 15 bp, Homo sapiens
ggtaatagtccttcc

SEQ ID NO: 1492563 - DNA, 15 bp, Homo sapiens
tggtaatagtccttc

SEQ ID NO: 1492564 - DNA, 15 bp, Homo sapiens
atggtaatagtcctt

SEQ ID NO: 1492565 - DNA, 15 bp, Homo sapiens
aatggtaatagtcct

SEQ ID NO: 1492566 - DNA, 15 bp, Homo sapiens
aaatggtaatagtcc

SEQ ID NO: 1492567 - DNA, 15 bp, Homo sapiens
gaaatggtaatagtc

SEQ ID NO: 1492568 - DNA, 15 bp, Homo sapiens
ggaaatggtaatagt

SEQ ID NO: 1492569 - DNA, 15 bp, Homo sapiens
tggaaatggtaatag

SEQ ID NO: 1492570 - DNA, 15 bp, Homo sapiens
atggaaatggtaata

SEQ ID NO: 1492571 - DNA, 15 bp, Homo sapiens
catggaaatggtaat

SEQ ID NO: 1492572 - DNA, 15 bp, Homo sapiens
acatggaaatggtaa

SEQ ID NO: 1492573 - DNA, 15 bp, Homo sapiens
aacatggaaatggta

SEQ ID NO: 1492574 - DNA, 15 bp, Homo sapiens
taacatggaaatggt

SEQ ID NO: 1492575 - DNA, 15 bp, Homo sapiens
gtaacatggaaatgg

SEQ ID NO: 1492576 - DNA, 15 bp, Homo sapiens
agtaacatggaaatg

SEQ ID NO: 1492577 - DNA, 15 bp, Homo sapiens
cagtaacatggaaat

SEQ ID NO: 1492578 - DNA, 15 bp, Homo sapiens
tcagtaacatggaaa

SEQ ID NO: 1492579 - DNA, 15 bp, Homo sapiens
ctcagtaacatggaa

SEQ ID NO: 1492580 - DNA, 15 bp, Homo sapiens
cctcagtaacatgga

SEQ ID NO: 1492581 - DNA, 15 bp, Homo sapiens
tcctcagtaacatgg

SEQ ID NO: 1492582 - DNA, 15 bp, Homo sapiens
ttcctcagtaacatg

SEQ ID NO: 1492583 - DNA, 15 bp, Homo sapiens
tttcctcagtaacat

SEQ ID NO: 1492584 - DNA, 15 bp, Homo sapiens
gtttcctcagtaaca

SEQ ID NO: 1492585 - DNA, 15 bp, Homo sapiens
ggtttcctcagtaac

SEQ ID NO: 1492586 - DNA, 15 bp, Homo sapiens
cggtttcctcagtaa

SEQ ID NO: 1492587 - DNA, 15 bp, Homo sapiens
tcggtttcctcagta

SEQ ID NO: 1492588 - DNA, 15 bp, Homo sapiens
ctcggtttcctcagt

SEQ ID NO: 1492589 - DNA, 15 bp, Homo sapiens
cctcggtttcctcag

SEQ ID NO: 1492590 - DNA, 15 bp, Homo sapiens
gcctcggtttcctca

SEQ ID NO: 1492591 - DNA, 15 bp, Homo sapiens
tgcctcggtttcctc

SEQ ID NO: 1492592 - DNA, 15 bp, Homo sapiens
gtgcctcggtttcct

SEQ ID NO: 1492593 - DNA, 15 bp, Homo sapiens
tgtgcctcggtttcc

SEQ ID NO: 1492594 - DNA, 15 bp, Homo sapiens
ctgtgcctcggtttc

SEQ ID NO: 1492595 - DNA, 15 bp, Homo sapiens
tctgtgcctcggttt

SEQ ID NO: 1492596 - DNA, 15 bp, Homo sapiens
ctctgtgcctcggtt

SEQ ID NO: 1492597 - DNA, 15 bp, Homo sapiens
cctctgtgcctcggt

SEQ ID NO: 1492598 - DNA, 15 bp, Homo sapiens
ccctctgtgcctcgg

SEQ ID NO: 1492599 - DNA, 15 bp, Homo sapiens
accctctgtgcctcg

SEQ ID NO: 1492600 - DNA, 15 bp, Homo sapiens
aaccctctgtgcctc

SEQ ID NO: 1492601 - DNA, 15 bp, Homo sapiens
aaaccctctgtgcct

SEQ ID NO: 1492602 - DNA, 15 bp, Homo sapiens
taaaccctctgtgcc

SEQ ID NO: 1492603 - DNA, 15 bp, Homo sapiens
ttaaaccctctgtgc

SEQ ID NO: 1492604 - DNA, 15 bp, Homo sapiens
cttaaaccctctgtg

SEQ ID NO: 1492605 - DNA, 15 bp, Homo sapiens
ccttaaaccctctgt

SEQ ID NO: 1492606 - DNA, 15 bp, Homo sapiens
tccttaaaccctctg

SEQ ID NO: 1492607 - DNA, 15 bp, Homo sapiens
ttccttaaaccctct

SEQ ID NO: 1492608 - DNA, 15 bp, Homo sapiens
gttccttaaaccctc

SEQ ID NO: 1492609 - DNA, 15 bp, Homo sapiens
agttccttaaaccct

SEQ ID NO: 1492610 - DNA, 15 bp, Homo sapiens
tagttccttaaaccc

SEQ ID NO: 1492611 - DNA, 15 bp, Homo sapiens
ctagttccttaaacc

SEQ ID NO: 1492612 - DNA, 15 bp, Homo sapiens
gctagttccttaaac

SEQ ID NO: 1492613 - DNA, 15 bp, Homo sapiens
cgctagttccttaaa

SEQ ID NO: 1492614 - DNA, 15 bp, Homo sapiens
gcgctagttccttaa

SEQ ID NO: 1492615 - DNA, 15 bp, Homo sapiens
tgcgctagttcctta

SEQ ID NO: 1492616 - DNA, 15 bp, Homo sapiens
ttgcgctagttcctt

SEQ ID NO: 1492617 - DNA, 15 bp, Homo sapiens
cttgcgctagttcct

SEQ ID NO: 1492618 - DNA, 15 bp, Homo sapiens
ccttgcgctagttcc

SEQ ID NO: 1492619 - DNA, 15 bp, Homo sapiens
accttgcgctagttc

SEQ ID NO: 1492620 - DNA, 15 bp, Homo sapiens
gaccttgcgctagtt

SEQ ID NO: 1492621 - DNA, 15 bp, Homo sapiens
tgaccttgcgctagt

SEQ ID NO: 1492622 - DNA, 15 bp, Homo sapiens
gtgaccttgcgctag

SEQ ID NO: 1492623 - DNA, 15 bp, Homo sapiens
tgtgaccttgcgcta

SEQ ID NO: 1492624 - DNA, 15 bp, Homo sapiens
ctgtgaccttgcgct

SEQ ID NO: 1492625 - DNA, 15 bp, Homo sapiens
tctgtgaccttgcgc

SEQ ID NO: 1492626 - DNA, 15 bp, Homo sapiens
ctctgtgaccttgcg

SEQ ID NO: 1492627 - DNA, 15 bp, Homo sapiens
gctctgtgaccttgc

SEQ ID NO: 1492628 - DNA, 15 bp, Homo sapiens
tgctctgtgaccttg

SEQ ID NO: 1492629 - DNA, 15 bp, Homo sapiens
gtgctctgtgacctt

SEQ ID NO: 1492630 - DNA, 15 bp, Homo sapiens
ggtgctctgtgacct

SEQ ID NO: 1492631 - DNA, 15 bp, Homo sapiens
gggtgctctgtgacc

SEQ ID NO: 1492632 - DNA, 15 bp, Homo sapiens
tgggtgctctgtgac

SEQ ID NO: 1492633 - DNA, 15 bp, Homo sapiens
ctgggtgctctgtga

SEQ ID NO: 1492634 - DNA, 15 bp, Homo sapiens
gctgggtgctctgtg

SEQ ID NO: 1492635 - DNA, 15 bp, Homo sapiens
tgctgggtgctctgt

SEQ ID NO: 1492636 - DNA, 15 bp, Homo sapiens
ctgctgggtgctctg

SEQ ID NO: 1492637 - DNA, 15 bp, Homo sapiens
actgctgggtgctct

SEQ ID NO: 1492638 - DNA, 15 bp, Homo sapiens
tactgctgggtgctc

SEQ ID NO: 1492639 - DNA, 15 bp, Homo sapiens
ctactgctgggtgct

SEQ ID NO: 1492640 - DNA, 15 bp, Homo sapiens
tctactgctgggtgc

SEQ ID NO: 1492641 - DNA, 15 bp, Homo sapiens
atctactgctgggtg

SEQ ID NO: 1492642 - DNA, 15 bp, Homo sapiens
gatctactgctgggt

SEQ ID NO: 1492643 - DNA, 15 bp, Homo sapiens
agatctactgctggg

SEQ ID NO: 1492644 - DNA, 15 bp, Homo sapiens
gagatctactgctgg

SEQ ID NO: 1492645 - DNA, 15 bp, Homo sapiens
agagatctactgctg

SEQ ID NO: 1492646 - DNA, 15 bp, Homo sapiens
cagagatctactgct

SEQ ID NO: 1492647 - DNA, 15 bp, Homo sapiens
gcagagatctactgc

SEQ ID NO: 1492648 - DNA, 15 bp, Homo sapiens
ggcagagatctactg

SEQ ID NO: 1492649 - DNA, 15 bp, Homo sapiens
gggcagagatctact

SEQ ID NO: 1492650 - DNA, 15 bp, Homo sapiens
ggggcagagatctac

SEQ ID NO: 1492651 - DNA, 15 bp, Homo sapiens
aggggcagagatcta

SEQ ID NO: 1492652 - DNA, 15 bp, Homo sapiens
gaggggcagagatct

SEQ ID NO: 1492653 - DNA, 15 bp, Homo sapiens
ggaggggcagagatc

SEQ ID NO: 1492654 - DNA, 15 bp, Homo sapiens
cggaggggcagagat

SEQ ID NO: 1492655 - DNA, 15 bp, Homo sapiens
gcggaggggcagaga

SEQ ID NO: 1492656 - DNA, 15 bp, Homo sapiens
tgcggaggggcagag

SEQ ID NO: 1492657 - DNA, 15 bp, Homo sapiens
ctgcggaggggcaga

SEQ ID NO: 1492658 - DNA, 15 bp, Homo sapiens
gctgcggaggggcag

SEQ ID NO: 1492659 - DNA, 15 bp, Homo sapiens
agctgcggaggggca

SEQ ID NO: 1492660 - DNA, 15 bp, Homo sapiens
cagctgcggaggggc

SEQ ID NO: 1492661 - DNA, 15 bp, Homo sapiens
tcagctgcggagggg

SEQ ID NO: 1492662 - DNA, 15 bp, Homo sapiens
gtcagctgcggaggg

SEQ ID NO: 1492663 - DNA, 15 bp, Homo sapiens
agtcagctgcggagg

SEQ ID NO: 1492664 - DNA, 15 bp, Homo sapiens
gagtcagctgcggag

SEQ ID NO: 1492665 - DNA, 15 bp, Homo sapiens
ggagtcagctgcgga

SEQ ID NO: 1492666 - DNA, 15 bp, Homo sapiens
tggagtcagctgcgg

SEQ ID NO: 1492667 - DNA, 15 bp, Homo sapiens
ctggagtcagctgcg

SEQ ID NO: 1492668 - DNA, 15 bp, Homo sapiens
cctggagtcagctgc

SEQ ID NO: 1492669 - DNA, 15 bp, Homo sapiens
gcctggagtcagctg

SEQ ID NO: 1492670 - DNA, 15 bp, Homo sapiens
ggcctggagtcagct

SEQ ID NO: 1492671 - DNA, 15 bp, Homo sapiens
gggcctggagtcagc

SEQ ID NO: 1492672 - DNA, 15 bp, Homo sapiens
tgggcctggagtcag

SEQ ID NO: 1492673 - DNA, 15 bp, Homo sapiens
ctgggcctggagtca

SEQ ID NO: 1492674 - DNA, 15 bp, Homo sapiens
gctgggcctggagtc

SEQ ID NO: 1492675 - DNA, 15 bp, Homo sapiens
ggctgggcctggagt

SEQ ID NO: 1492676 - DNA, 15 bp, Homo sapiens
tggctgggcctggag

SEQ ID NO: 1492677 - DNA, 15 bp, Homo sapiens
ctggctgggcctgga

SEQ ID NO: 1492678 - DNA, 15 bp, Homo sapiens
tctggctgggcctgg

SEQ ID NO: 1492679 - DNA, 15 bp, Homo sapiens
ctctggctgggcctg

SEQ ID NO: 1492680 - DNA, 15 bp, Homo sapiens
actctggctgggcct

SEQ ID NO: 1492681 - DNA, 15 bp, Homo sapiens
tactctggctgggcc

SEQ ID NO: 1492682 - DNA, 15 bp, Homo sapiens
atactctggctgggc

SEQ ID NO: 1492683 - DNA, 15 bp, Homo sapiens
aatactctggctggg

SEQ ID NO: 1492684 - DNA, 15 bp, Homo sapiens
aaatactctggctgg

SEQ ID NO: 1492685 - DNA, 15 bp, Homo sapiens
caaatactctggctg

SEQ ID NO: 1492686 - DNA, 15 bp, Homo sapiens
tcaaatactctggct

SEQ ID NO: 1492687 - DNA, 15 bp, Homo sapiens
ctcaaatactctggc

SEQ ID NO: 1492688 - DNA, 15 bp, Homo sapiens
cctcaaatactctgg

SEQ ID NO: 1492689 - DNA, 15 bp, Homo sapiens
tcctcaaatactctg

SEQ ID NO: 1492690 - DNA, 15 bp, Homo sapiens
gtcctcaaatactct

SEQ ID NO: 1492691 - DNA, 15 bp, Homo sapiens
agtcctcaaatactc

SEQ ID NO: 1492692 - DNA, 15 bp, Homo sapiens
gagtcctcaaatact

SEQ ID NO: 1492693 - DNA, 15 bp, Homo sapiens
tgagtcctcaaatac

SEQ ID NO: 1492694 - DNA, 15 bp, Homo sapiens
ctgagtcctcaaata

SEQ ID NO: 1492695 - DNA, 15 bp, Homo sapiens
cctgagtcctcaaat

SEQ ID NO: 1492696 - DNA, 15 bp, Homo sapiens
ccctgagtcctcaaa

SEQ ID NO: 1492697 - DNA, 15 bp, Homo sapiens
cccctgagtcctcaa

SEQ ID NO: 1492698 - DNA, 15 bp, Homo sapiens
acccctgagtcctca

SEQ ID NO: 1492699 - DNA, 15 bp, Homo sapiens
gacccctgagtcctc

SEQ ID NO: 1492700 - DNA, 15 bp, Homo sapiens
ggacccctgagtcct

SEQ ID NO: 1492701 - DNA, 15 bp, Homo sapiens
aggacccctgagtcc

SEQ ID NO: 1492702 - DNA, 15 bp, Homo sapiens
aaggacccctgagtc

SEQ ID NO: 1492703 - DNA, 15 bp, Homo sapiens
gaaggacccctgagt

SEQ ID NO: 1492704 - DNA, 15 bp, Homo sapiens
agaaggacccctgag

SEQ ID NO: 1492705 - DNA, 15 bp, Homo sapiens
gagaaggacccctga

SEQ ID NO: 1492706 - DNA, 15 bp, Homo sapiens
agagaaggacccctg

SEQ ID NO: 1492707 - DNA, 15 bp, Homo sapiens
cagagaaggacccct

SEQ ID NO: 1492708 - DNA, 15 bp, Homo sapiens
gcagagaaggacccc

SEQ ID NO: 1492709 - DNA, 15 bp, Homo sapiens
agcagagaaggaccc

SEQ ID NO: 1492710 - DNA, 15 bp, Homo sapiens
gagcagagaaggacc

SEQ ID NO: 1492711 - DNA, 15 bp, Homo sapiens
cgagcagagaaggac

SEQ ID NO: 1492712 - DNA, 15 bp, Homo sapiens
ccgagcagagaagga

SEQ ID NO: 1492713 - DNA, 15 bp, Homo sapiens
accgagcagagaagg

SEQ ID NO: 1492714 - DNA, 15 bp, Homo sapiens
caccgagcagagaag

SEQ ID NO: 1492715 - DNA, 15 bp, Homo sapiens
ccaccgagcagagaa

SEQ ID NO: 1492716 - DNA, 15 bp, Homo sapiens
tccaccgagcagaga

SEQ ID NO: 1492717 - DNA, 15 bp, Homo sapiens
atccaccgagcagag

SEQ ID NO: 1492718 - DNA, 15 bp, Homo sapiens
catccaccgagcaga

SEQ ID NO: 1492719 - DNA, 15 bp, Homo sapiens
ccatccaccgagcag

SEQ ID NO: 1492720 - DNA, 15 bp, Homo sapiens
tccatccaccgagca

SEQ ID NO: 1492721 - DNA, 15 bp, Homo sapiens
ctccatccaccgagc

SEQ ID NO: 1492722 - DNA, 15 bp, Homo sapiens
gctccatccaccgag

SEQ ID NO: 1492723 - DNA, 15 bp, Homo sapiens
ggctccatccaccga

SEQ ID NO: 1492724 - DNA, 15 bp, Homo sapiens
gggctccatccaccg

SEQ ID NO: 1492725 - DNA, 15 bp, Homo sapiens
ggggctccatccacc

SEQ ID NO: 1492726 - DNA, 15 bp, Homo sapiens
gggggctccatccac

SEQ ID NO: 1492727 - DNA, 15 bp, Homo sapiens
tgggggctccatcca

SEQ ID NO: 1492728 - DNA, 15 bp, Homo sapiens
gtgggggctccatcc

SEQ ID NO: 1492729 - DNA, 15 bp, Homo sapiens
agtgggggctccatc

SEQ ID NO: 1492730 - DNA, 15 bp, Homo sapiens
aagtgggggctccat

SEQ ID NO: 1492731 - DNA, 15 bp, Homo sapiens
gaagtgggggctcca

SEQ ID NO: 1492732 - DNA, 15 bp, Homo sapiens
ggaagtgggggctcc

SEQ ID NO: 1492733 - DNA, 15 bp, Homo sapiens
aggaagtgggggctc

SEQ ID NO: 1492734 - DNA, 15 bp, Homo sapiens
gaggaagtgggggct

SEQ ID NO: 1492735 - DNA, 15 bp, Homo sapiens
ggaggaagtgggggc

SEQ ID NO: 1492736 - DNA, 15 bp, Homo sapiens
gggaggaagtggggg

SEQ ID NO: 1492737 - DNA, 15 bp, Homo sapiens
agggaggaagtgggg

SEQ ID NO: 1492738 - DNA, 15 bp, Homo sapiens
cagggaggaagtggg

SEQ ID NO: 1492739 - DNA, 15 bp, Homo sapiens
ccagggaggaagtgg

SEQ ID NO: 1492740 - DNA, 15 bp, Homo sapiens
cccagggaggaagtg

SEQ ID NO: 1492741 - DNA, 15 bp, Homo sapiens
gcccagggaggaagt

SEQ ID NO: 1492742 - DNA, 15 bp, Homo sapiens
agcccagggaggaag

SEQ ID NO: 1492743 - DNA, 15 bp, Homo sapiens
gagcccagggaggaa

SEQ ID NO: 1492744 - DNA, 15 bp, Homo sapiens
tgagcccagggagga

SEQ ID NO: 1492745 - DNA, 15 bp, Homo sapiens
ctgagcccagggagg

SEQ ID NO: 1492746 - DNA, 15 bp, Homo sapiens
gctgagcccagggag

SEQ ID NO: 1492747 - DNA, 15 bp, Homo sapiens
tgctgagcccaggga

SEQ ID NO: 1492748 - DNA, 15 bp, Homo sapiens
ctgctgagcccaggg

SEQ ID NO: 1492749 - DNA, 15 bp, Homo sapiens
gctgctgagcccagg

SEQ ID NO: 1492750 - DNA, 15 bp, Homo sapiens
tgctgctgagcccag

SEQ ID NO: 1492751 - DNA, 15 bp, Homo sapiens
ctgctgctgagccca

SEQ ID NO: 1492752 - DNA, 15 bp, Homo sapiens
gctgctgctgagccc

SEQ ID NO: 1492753 - DNA, 15 bp, Homo sapiens
tgctgctgctgagcc

SEQ ID NO: 1492754 - DNA, 15 bp, Homo sapiens
ttgctgctgctgagc

SEQ ID NO: 1492755 - DNA, 15 bp, Homo sapiens
gttgctgctgctgag

SEQ ID NO: 1492756 - DNA, 15 bp, Homo sapiens
tgttgctgctgctga

SEQ ID NO: 1492757 - DNA, 15 bp, Homo sapiens
atgttgctgctgctg

SEQ ID NO: 1492758 - DNA, 15 bp, Homo sapiens
catgttgctgctgct

SEQ ID NO: 1492759 - DNA, 15 bp, Homo sapiens
ccatgttgctgctgc

SEQ ID NO: 1492760 - DNA, 15 bp, Homo sapiens
cccatgttgctgctg

SEQ ID NO: 1492761 - DNA, 15 bp, Homo sapiens
gcccatgttgctgct

SEQ ID NO: 1492762 - DNA, 15 bp, Homo sapiens
agcccatgttgctgc

SEQ ID NO: 1492763 - DNA, 15 bp, Homo sapiens
aagcccatgttgctg

SEQ ID NO: 1492764 - DNA, 15 bp, Homo sapiens
aaagcccatgttgct

SEQ ID NO: 1492765 - DNA, 15 bp, Homo sapiens
aaaagcccatgttgc

SEQ ID NO: 1492766 - DNA, 15 bp, Homo sapiens
taaaagcccatgttg

SEQ ID NO: 1492767 - DNA, 15 bp, Homo sapiens
gtaaaagcccatgtt

SEQ ID NO: 1492768 - DNA, 15 bp, Homo sapiens
tgtaaaagcccatgt

SEQ ID NO: 1492769 - DNA, 15 bp, Homo sapiens
ttgtaaaagcccatg

SEQ ID NO: 1492770 - DNA, 15 bp, Homo sapiens
tttgtaaaagcccat

SEQ ID NO: 1492771 - DNA, 15 bp, Homo sapiens
gtttgtaaaagccca

SEQ ID NO: 1492772 - DNA, 15 bp, Homo sapiens
tgtttgtaaaagccc

SEQ ID NO: 1492773 - DNA, 15 bp, Homo sapiens
gtgtttgtaaaagcc

SEQ ID NO: 1492774 - DNA, 15 bp, Homo sapiens
cgtgtttgtaaaagc

SEQ ID NO: 1492775 - DNA, 15 bp, Homo sapiens
ccgtgtttgtaaaag

SEQ ID NO: 1492776 - DNA, 15 bp, Homo sapiens
gccgtgtttgtaaaa

SEQ ID NO: 1492777 - DNA, 15 bp, Homo sapiens
ggccgtgtttgtaaa

SEQ ID NO: 1492778 - DNA, 15 bp, Homo sapiens
cggccgtgtttgtaa

SEQ ID NO: 1492779 - DNA, 15 bp, Homo sapiens
gcggccgtgtttgta

SEQ ID NO: 1492780 - DNA, 15 bp, Homo sapiens
tgcggccgtgtttgt

SEQ ID NO: 1492781 - DNA, 15 bp, Homo sapiens
ttgcggccgtgtttg

SEQ ID NO: 1492782 - DNA, 15 bp, Homo sapiens
cttgcggccgtgttt

SEQ ID NO: 1492783 - DNA, 15 bp, Homo sapiens
tcttgcggccgtgtt

SEQ ID NO: 1492784 - DNA, 15 bp, Homo sapiens
ctcttgcggccgtgt

SEQ ID NO: 1492785 - DNA, 15 bp, Homo sapiens
cctcttgcggccgtg

SEQ ID NO: 1492786 - DNA, 15 bp, Homo sapiens
tcctcttgcggccgt

SEQ ID NO: 1492787 - DNA, 15 bp, Homo sapiens
ctcctcttgcggccg

SEQ ID NO: 1492788 - DNA, 15 bp, Homo sapiens
cctcctcttgcggcc

SEQ ID NO: 1492789 - DNA, 15 bp, Homo sapiens
gcctcctcttgcggc

SEQ ID NO: 1492790 - DNA, 15 bp, Homo sapiens
tgcctcctcttgcgg

SEQ ID NO: 1492791 - DNA, 15 bp, Homo sapiens
atgcctcctcttgcg

SEQ ID NO: 1492792 - DNA, 15 bp, Homo sapiens
aatgcctcctcttgc

SEQ ID NO: 1492793 - DNA, 15 bp, Homo sapiens
caatgcctcctcttg

SEQ ID NO: 1492794 - DNA, 15 bp, Homo sapiens
acaatgcctcctctt

SEQ ID NO: 1492795 - DNA, 15 bp, Homo sapiens
aacaatgcctcctct

SEQ ID NO: 1492796 - DNA, 15 bp, Homo sapiens
caacaatgcctcctc

SEQ ID NO: 1492797 - DNA, 15 bp, Homo sapiens
acaacaatgcctcct

SEQ ID NO: 1492798 - DNA, 15 bp, Homo sapiens
cacaacaatgcctcc

SEQ ID NO: 1492799 - DNA, 15 bp, Homo sapiens
ccacaacaatgcctc

SEQ ID NO: 1492800 - DNA, 15 bp, Homo sapiens
tccacaacaatgcct

SEQ ID NO: 1492801 - DNA, 15 bp, Homo sapiens
ctccacaacaatgcc

SEQ ID NO: 1492802 - DNA, 15 bp, Homo sapiens
gctccacaacaatgc

SEQ ID NO: 1492803 - DNA, 15 bp, Homo sapiens
tgctccacaacaatg

SEQ ID NO: 1492804 - DNA, 15 bp, Homo sapiens
ctgctccacaacaat

SEQ ID NO: 1492805 - DNA, 15 bp, Homo sapiens
cctgctccacaacaa

SEQ ID NO: 1492806 - DNA, 15 bp, Homo sapiens
ccctgctccacaaca

SEQ ID NO: 1492807 - DNA, 15 bp, Homo sapiens
gccctgctccacaac

SEQ ID NO: 1492808 - DNA, 15 bp, Homo sapiens
agccctgctccacaa

SEQ ID NO: 1492809 - DNA, 15 bp, Homo sapiens
cagccctgctccaca

SEQ ID NO: 1492810 - DNA, 15 bp, Homo sapiens
ccagccctgctccac

SEQ ID NO: 1492811 - DNA, 15 bp, Homo sapiens
cccagccctgctcca

SEQ ID NO: 1492812 - DNA, 15 bp, Homo sapiens
gcccagccctgctcc

SEQ ID NO: 1492813 - DNA, 15 bp, Homo sapiens
agcccagccctgctc

SEQ ID NO: 1492814 - DNA, 15 bp, Homo sapiens
gagcccagccctgct

SEQ ID NO: 1492815 - DNA, 15 bp, Homo sapiens
tgagcccagccctgc

SEQ ID NO: 1492816 - DNA, 15 bp, Homo sapiens
ttgagcccagccctg

SEQ ID NO: 1492817 - DNA, 15 bp, Homo sapiens
cttgagcccagccct

SEQ ID NO: 1492818 - DNA, 15 bp, Homo sapiens
tcttgagcccagccc

SEQ ID NO: 1492819 - DNA, 15 bp, Homo sapiens
gtcttgagcccagcc

SEQ ID NO: 1492820 - DNA, 15 bp, Homo sapiens
ggtcttgagcccagc

SEQ ID NO: 1492821 - DNA, 15 bp, Homo sapiens
gggtcttgagcccag

SEQ ID NO: 1492822 - DNA, 15 bp, Homo sapiens
tgggtcttgagccca

SEQ ID NO: 1492823 - DNA, 15 bp, Homo sapiens
ctgggtcttgagccc

SEQ ID NO: 1492824 - DNA, 15 bp, Homo sapiens
gctgggtcttgagcc

SEQ ID NO: 1492825 - DNA, 15 bp, Homo sapiens
agctgggtcttgagc

SEQ ID NO: 1492826 - DNA, 15 bp, Homo sapiens
gagctgggtcttgag

SEQ ID NO: 1492827 - DNA, 15 bp, Homo sapiens
agagctgggtcttga

SEQ ID NO: 1492828 - DNA, 15 bp, Homo sapiens
cagagctgggtcttg

SEQ ID NO: 1492829 - DNA, 15 bp, Homo sapiens
gcagagctgggtctt

SEQ ID NO: 1492830 - DNA, 15 bp, Homo sapiens
ggcagagctgggtct

SEQ ID NO: 1492831 - DNA, 15 bp, Homo sapiens
tggcagagctgggtc

SEQ ID NO: 1492832 - DNA, 15 bp, Homo sapiens
gtggcagagctgggt

SEQ ID NO: 1492833 - DNA, 15 bp, Homo sapiens
tgtggcagagctggg

SEQ ID NO: 1492834 - DNA, 15 bp, Homo sapiens
gtgtggcagagctgg

SEQ ID NO: 1492835 - DNA, 15 bp, Homo sapiens
tgtgtggcagagctg

SEQ ID NO: 1492836 - DNA, 15 bp, Homo sapiens
gtgtgtggcagagct

SEQ ID NO: 1492837 - DNA, 15 bp, Homo sapiens
ggtgtgtggcagagc

SEQ ID NO: 1492838 - DNA, 15 bp, Homo sapiens
aggtgtgtggcagag

SEQ ID NO: 1492839 - DNA, 15 bp, Homo sapiens
caggtgtgtggcaga

SEQ ID NO: 1492840 - DNA, 15 bp, Homo sapiens
gcaggtgtgtggcag

SEQ ID NO: 1492841 - DNA, 15 bp, Homo sapiens
agcaggtgtgtggca

SEQ ID NO: 1492842 - DNA, 15 bp, Homo sapiens
cagcaggtgtgtggc

SEQ ID NO: 1492843 - DNA, 15 bp, Homo sapiens
ccagcaggtgtgtgg

SEQ ID NO: 1492844 - DNA, 15 bp, Homo sapiens
cccagcaggtgtgtg

SEQ ID NO: 1492845 - DNA, 15 bp, Homo sapiens
gcccagcaggtgtgt

SEQ ID NO: 1492846 - DNA, 15 bp, Homo sapiens
agcccagcaggtgtg

SEQ ID NO: 1492847 - DNA, 15 bp, Homo sapiens
cagcccagcaggtgt

SEQ ID NO: 1492848 - DNA, 15 bp, Homo sapiens
ccagcccagcaggtg

SEQ ID NO: 1492849 - DNA, 15 bp, Homo sapiens
accagcccagcaggt

SEQ ID NO: 1492850 - DNA, 15 bp, Homo sapiens
caccagcccagcagg

SEQ ID NO: 1492851 - DNA, 15 bp, Homo sapiens
ccaccagcccagcag

SEQ ID NO: 1492852 - DNA, 15 bp, Homo sapiens
gccaccagcccagca

SEQ ID NO: 1492853 - DNA, 15 bp, Homo sapiens
tgccaccagcccagc

SEQ ID NO: 1492854 - DNA, 15 bp, Homo sapiens
atgccaccagcccag

SEQ ID NO: 1492855 - DNA, 15 bp, Homo sapiens
aatgccaccagccca

SEQ ID NO: 1492856 - DNA, 15 bp, Homo sapiens
caatgccaccagccc

SEQ ID NO: 1492857 - DNA, 15 bp, Homo sapiens
ccaatgccaccagcc

SEQ ID NO: 1492858 - DNA, 15 bp, Homo sapiens
cccaatgccaccagc

SEQ ID NO: 1492859 - DNA, 15 bp, Homo sapiens
gcccaatgccaccag

SEQ ID NO: 1492860 - DNA, 15 bp, Homo sapiens
ggcccaatgccacca

SEQ ID NO: 1492861 - DNA, 15 bp, Homo sapiens
tggcccaatgccacc

SEQ ID NO: 1492862 - DNA, 15 bp, Homo sapiens
ctggcccaatgccac

SEQ ID NO: 1492863 - DNA, 15 bp, Homo sapiens
actggcccaatgcca

SEQ ID NO: 1492864 - DNA, 15 bp, Homo sapiens
gactggcccaatgcc

SEQ ID NO: 1492865 - DNA, 15 bp, Homo sapiens
cgactggcccaatgc

SEQ ID NO: 1492866 - DNA, 15 bp, Homo sapiens
gcgactggcccaatg

SEQ ID NO: 1492867 - DNA, 15 bp, Homo sapiens
ggcgactggcccaat

SEQ ID NO: 1492868 - DNA, 15 bp, Homo sapiens
aggcgactggcccaa

SEQ ID NO: 1492869 - DNA, 15 bp, Homo sapiens
gaggcgactggccca

SEQ ID NO: 1492870 - DNA, 15 bp, Homo sapiens
agaggcgactggccc

SEQ ID NO: 1492871 - DNA, 15 bp, Homo sapiens
gagaggcgactggcc

SEQ ID NO: 1492872 - DNA, 15 bp, Homo sapiens
agagaggcgactggc

SEQ ID NO: 1492873 - DNA, 15 bp, Homo sapiens
cagagaggcgactgg

SEQ ID NO: 1492874 - DNA, 15 bp, Homo sapiens
tcagagaggcgactg

SEQ ID NO: 1492875 - DNA, 15 bp, Homo sapiens
ctcagagaggcgact

SEQ ID NO: 1492876 - DNA, 15 bp, Homo sapiens
gctcagagaggcgac

SEQ ID NO: 1492877 - DNA, 15 bp, Homo sapiens
ggctcagagaggcga

SEQ ID NO: 1492878 - DNA, 15 bp, Homo sapiens
gggctcagagaggcg

SEQ ID NO: 1492879 - DNA, 15 bp, Homo sapiens
agggctcagagaggc

SEQ ID NO: 1492880 - DNA, 15 bp, Homo sapiens
tagggctcagagagg

SEQ ID NO: 1492881 - DNA, 15 bp, Homo sapiens
atagggctcagagag

SEQ ID NO: 1492882 - DNA, 15 bp, Homo sapiens
aatagggctcagaga

SEQ ID NO: 1492883 - DNA, 15 bp, Homo sapiens
aaatagggctcagag

SEQ ID NO: 1492884 - DNA, 15 bp, Homo sapiens
gaaatagggctcaga

SEQ ID NO: 1492885 - DNA, 15 bp, Homo sapiens
ggaaatagggctcag

SEQ ID NO: 1492886 - DNA, 15 bp, Homo sapiens
gggaaatagggctca

SEQ ID NO: 1492887 - DNA, 15 bp, Homo sapiens
ggggaaatagggctc

SEQ ID NO: 1492888 - DNA, 15 bp, Homo sapiens
gggggaaatagggct

SEQ ID NO: 1492889 - DNA, 15 bp, Homo sapiens
tgggggaaatagggc

SEQ ID NO: 1492890 - DNA, 15 bp, Homo sapiens
gtgggggaaataggg

SEQ ID NO: 1492891 - DNA, 15 bp, Homo sapiens
agtgggggaaatagg

SEQ ID NO: 1492892 - DNA, 15 bp, Homo sapiens
cagtgggggaaatag

SEQ ID NO: 1492893 - DNA, 15 bp, Homo sapiens
gcagtgggggaaata

SEQ ID NO: 1492894 - DNA, 15 bp, Homo sapiens
tgcagtgggggaaat

SEQ ID NO: 1492895 - DNA, 15 bp, Homo sapiens
ctgcagtgggggaaa

SEQ ID NO: 1492896 - DNA, 15 bp, Homo sapiens
gctgcagtgggggaa

SEQ ID NO: 1492897 - DNA, 15 bp, Homo sapiens
tgctgcagtggggga

SEQ ID NO: 1492898 - DNA, 15 bp, Homo sapiens
ctgctgcagtggggg

SEQ ID NO: 1492899 - DNA, 15 bp, Homo sapiens
gctgctgcagtgggg

SEQ ID NO: 1492900 - DNA, 15 bp, Homo sapiens
tgctgctgcagtggg

SEQ ID NO: 1492901 - DNA, 15 bp, Homo sapiens
atgctgctgcagtgg

SEQ ID NO: 1492902 - DNA, 15 bp, Homo sapiens
catgctgctgcagtg

SEQ ID NO: 1492903 - DNA, 15 bp, Homo sapiens
ccatgctgctgcagt

SEQ ID NO: 1492904 - DNA, 15 bp, Homo sapiens
cccatgctgctgcag

SEQ ID NO: 1492905 - DNA, 15 bp, Homo sapiens
ccccatgctgctgca

SEQ ID NO: 1492906 - DNA, 15 bp, Homo sapiens
tccccatgctgctgc

SEQ ID NO: 1492907 - DNA, 15 bp, Homo sapiens
gtccccatgctgctg

SEQ ID NO: 1492908 - DNA, 15 bp, Homo sapiens
ggtccccatgctgct

SEQ ID NO: 1492909 - DNA, 15 bp, Homo sapiens
tggtccccatgctgc

SEQ ID NO: 1492910 - DNA, 15 bp, Homo sapiens
gtggtccccatgctg

SEQ ID NO: 1492911 - DNA, 15 bp, Homo sapiens
ggtggtccccatgct

SEQ ID NO: 1492912 - DNA, 15 bp, Homo sapiens
cggtggtccccatgc

SEQ ID NO: 1492913 - DNA, 15 bp, Homo sapiens
gcggtggtccccatg

SEQ ID NO: 1492914 - DNA, 15 bp, Homo sapiens
tgcggtggtccccat

SEQ ID NO: 1492915 - DNA, 15 bp, Homo sapiens
gtgcggtggtcccca

SEQ ID NO: 1492916 - DNA, 15 bp, Homo sapiens
agtgcggtggtcccc

SEQ ID NO: 1492917 - DNA, 15 bp, Homo sapiens
cagtgcggtggtccc

SEQ ID NO: 1492918 - DNA, 15 bp, Homo sapiens
ccagtgcggtggtcc

SEQ ID NO: 1492919 - DNA, 15 bp, Homo sapiens
gccagtgcggtggtc

SEQ ID NO: 1492920 - DNA, 15 bp, Homo sapiens
ggccagtgcggtggt

SEQ ID NO: 1492921 - DNA, 15 bp, Homo sapiens
gggccagtgcggtgg

SEQ ID NO: 1492922 - DNA, 15 bp, Homo sapiens
agggccagtgcggtg

SEQ ID NO: 1492923 - DNA, 15 bp, Homo sapiens
cagggccagtgcggt

SEQ ID NO: 1492924 - DNA, 15 bp, Homo sapiens
ccagggccagtgcgg

SEQ ID NO: 1492925 - DNA, 15 bp, Homo sapiens
cccagggccagtgcg

SEQ ID NO: 1492926 - DNA, 15 bp, Homo sapiens
ccccagggccagtgc

SEQ ID NO: 1492927 - DNA, 15 bp, Homo sapiens
cccccagggccagtg

SEQ ID NO: 1492928 - DNA, 15 bp, Homo sapiens
gcccccagggccagt

SEQ ID NO: 1492929 - DNA, 15 bp, Homo sapiens
agcccccagggccag

SEQ ID NO: 1492930 - DNA, 15 bp, Homo sapiens
cagcccccagggcca

SEQ ID NO: 1492931 - DNA, 15 bp, Homo sapiens
tcagcccccagggcc

SEQ ID NO: 1492932 - DNA, 15 bp, Homo sapiens
ctcagcccccagggc

SEQ ID NO: 1492933 - DNA, 15 bp, Homo sapiens
tctcagcccccaggg

SEQ ID NO: 1492934 - DNA, 15 bp, Homo sapiens
atctcagcccccagg

SEQ ID NO: 1492935 - DNA, 15 bp, Homo sapiens
catctcagcccccag

SEQ ID NO: 1492936 - DNA, 15 bp, Homo sapiens
ccatctcagccccca

SEQ ID NO: 1492937 - DNA, 15 bp, Homo sapiens
cccatctcagccccc

SEQ ID NO: 1492938 - DNA, 15 bp, Homo sapiens
tcccatctcagcccc

SEQ ID NO: 1492939 - DNA, 15 bp, Homo sapiens
ctcccatctcagccc

SEQ ID NO: 1492940 - DNA, 15 bp, Homo sapiens
actcccatctcagcc

SEQ ID NO: 1492941 - DNA, 15 bp, Homo sapiens
cactcccatctcagc

SEQ ID NO: 1492942 - DNA, 15 bp, Homo sapiens
tcactcccatctcag

SEQ ID NO: 1492943 - DNA, 15 bp, Homo sapiens
ctcactcccatctca

SEQ ID NO: 1492944 - DNA, 15 bp, Homo sapiens
tctcactcccatctc

SEQ ID NO: 1492945 - DNA, 15 bp, Homo sapiens
ctctcactcccatct

SEQ ID NO: 1492946 - DNA, 15 bp, Homo sapiens
actctcactcccatc

SEQ ID NO: 1492947 - DNA, 15 bp, Homo sapiens
cactctcactcccat

SEQ ID NO: 1492948 - DNA, 15 bp, Homo sapiens
gcactctcactccca

SEQ ID NO: 1492949 - DNA, 15 bp, Homo sapiens
agcactctcactccc

SEQ ID NO: 1492950 - DNA, 15 bp, Homo sapiens
cagcactctcactcc

SEQ ID NO: 1492951 - DNA, 15 bp, Homo sapiens
ccagcactctcactc

SEQ ID NO: 1492952 - DNA, 15 bp, Homo sapiens
cccagcactctcact

SEQ ID NO: 1492953 - DNA, 15 bp, Homo sapiens
gcccagcactctcac

SEQ ID NO: 1492954 - DNA, 15 bp, Homo sapiens
tgcccagcactctca

SEQ ID NO: 1492955 - DNA, 15 bp, Homo sapiens
gtgcccagcactctc

SEQ ID NO: 1492956 - DNA, 15 bp, Homo sapiens
tgtgcccagcactct

SEQ ID NO: 1492957 - DNA, 15 bp, Homo sapiens
ctgtgcccagcactc

SEQ ID NO: 1492958 - DNA, 15 bp, Homo sapiens
tctgtgcccagcact

SEQ ID NO: 1492959 - DNA, 15 bp, Homo sapiens
ctctgtgcccagcac

SEQ ID NO: 1492960 - DNA, 15 bp, Homo sapiens
cctctgtgcccagca

SEQ ID NO: 1492961 - DNA, 15 bp, Homo sapiens
ccctctgtgcccagc

SEQ ID NO: 1492962 - DNA, 15 bp, Homo sapiens
gccctctgtgcccag

SEQ ID NO: 1492963 - DNA, 15 bp, Homo sapiens
agccctctgtgccca

SEQ ID NO: 1492964 - DNA, 15 bp, Homo sapiens
cagccctctgtgccc

SEQ ID NO: 1492965 - DNA, 15 bp, Homo sapiens
gcagccctctgtgcc

SEQ ID NO: 1492966 - DNA, 15 bp, Homo sapiens
agcagccctctgtgc

SEQ ID NO: 1492967 - DNA, 15 bp, Homo sapiens
tagcagccctctgtg

SEQ ID NO: 1492968 - DNA, 15 bp, Homo sapiens
ctagcagccctctgt

SEQ ID NO: 1492969 - DNA, 15 bp, Homo sapiens
cctagcagccctctg

SEQ ID NO: 1492970 - DNA, 15 bp, Homo sapiens
acctagcagccctct

SEQ ID NO: 1492971 - DNA, 15 bp, Homo sapiens
cacctagcagccctc

SEQ ID NO: 1492972 - DNA, 15 bp, Homo sapiens
ccacctagcagccct

SEQ ID NO: 1492973 - DNA, 15 bp, Homo sapiens
cccacctagcagccc

SEQ ID NO: 1492974 - DNA, 15 bp, Homo sapiens
tcccacctagcagcc

SEQ ID NO: 1492975 - DNA, 15 bp, Homo sapiens
ctcccacctagcagc

SEQ ID NO: 1492976 - DNA, 15 bp, Homo sapiens
gctcccacctagcag

SEQ ID NO: 1492977 - DNA, 15 bp, Homo sapiens
cgctcccacctagca

SEQ ID NO: 1492978 - DNA, 15 bp, Homo sapiens
gcgctcccacctagc

SEQ ID NO: 1492979 - DNA, 15 bp, Homo sapiens
ggcgctcccacctag

SEQ ID NO: 1492980 - DNA, 15 bp, Homo sapiens
aggcgctcccaccta

SEQ ID NO: 1492981 - DNA, 15 bp, Homo sapiens
caggcgctcccacct

SEQ ID NO: 1492982 - DNA, 15 bp, Homo sapiens
ccaggcgctcccacc

SEQ ID NO: 1492983 - DNA, 15 bp, Homo sapiens
cccaggcgctcccac

SEQ ID NO: 1492984 - DNA, 15 bp, Homo sapiens
tcccaggcgctccca

SEQ ID NO: 1492985 - DNA, 15 bp, Homo sapiens
ttcccaggcgctccc

SEQ ID NO: 1492986 - DNA, 15 bp, Homo sapiens
cttcccaggcgctcc

SEQ ID NO: 1492987 - DNA, 15 bp, Homo sapiens
tcttcccaggcgctc

SEQ ID NO: 1492988 - DNA, 15 bp, Homo sapiens
ctcttcccaggcgct

SEQ ID NO: 1492989 - DNA, 15 bp, Homo sapiens
actcttcccaggcgc

SEQ ID NO: 1492990 - DNA, 15 bp, Homo sapiens
tactcttcccaggcg

SEQ ID NO: 1492991 - DNA, 15 bp, Homo sapiens
gtactcttcccaggc

SEQ ID NO: 1492992 - DNA, 15 bp, Homo sapiens
tgtactcttcccagg

SEQ ID NO: 1492993 - DNA, 15 bp, Homo sapiens
gtgtactcttcccag

SEQ ID NO: 1492994 - DNA, 15 bp, Homo sapiens
tgtgtactcttccca

SEQ ID NO: 1492995 - DNA, 15 bp, Homo sapiens
ttgtgtactcttccc

SEQ ID NO: 1492996 - DNA, 15 bp, Homo sapiens
gttgtgtactcttcc

SEQ ID NO: 1492997 - DNA, 15 bp, Homo sapiens
agttgtgtactcttc

SEQ ID NO: 1492998 - DNA, 15 bp, Homo sapiens
gagttgtgtactctt

SEQ ID NO: 1492999 - DNA, 15 bp, Homo sapiens
tgagttgtgtactct

SEQ ID NO: 1493000 - DNA, 15 bp, Homo sapiens
ctgagttgtgtactc

SEQ ID NO: 1493001 - DNA, 15 bp, Homo sapiens
cctgagttgtgtact

SEQ ID NO: 1493002 - DNA, 15 bp, Homo sapiens
ccctgagttgtgtac

SEQ ID NO: 1493003 - DNA, 15 bp, Homo sapiens
cccctgagttgtgta

SEQ ID NO: 1493004 - DNA, 15 bp, Homo sapiens
acccctgagttgtgt

SEQ ID NO: 1493005 - DNA, 15 bp, Homo sapiens
aacccctgagttgtg

SEQ ID NO: 1493006 - DNA, 15 bp, Homo sapiens
caacccctgagttgt

SEQ ID NO: 1493007 - DNA, 15 bp, Homo sapiens
gcaacccctgagttg

SEQ ID NO: 1493008 - DNA, 15 bp, Homo sapiens
agcaacccctgagtt

SEQ ID NO: 1493009 - DNA, 15 bp, Homo sapiens
cagcaacccctgagt

SEQ ID NO: 1493010 - DNA, 15 bp, Homo sapiens
tcagcaacccctgag

SEQ ID NO: 1493011 - DNA, 15 bp, Homo sapiens
ctcagcaacccctga

SEQ ID NO: 1493012 - DNA, 15 bp, Homo sapiens
tctcagcaacccctg

SEQ ID NO: 1493013 - DNA, 15 bp, Homo sapiens
ctctcagcaacccct

SEQ ID NO: 1493014 - DNA, 15 bp, Homo sapiens
tctctcagcaacccc

SEQ ID NO: 1493015 - DNA, 15 bp, Homo sapiens
ttctctcagcaaccc

SEQ ID NO: 1493016 - DNA, 15 bp, Homo sapiens
cttctctcagcaacc

SEQ ID NO: 1493017 - DNA, 15 bp, Homo sapiens
tcttctctcagcaac

SEQ ID NO: 1493018 - DNA, 15 bp, Homo sapiens
ctcttctctcagcaa

SEQ ID NO: 1493019 - DNA, 15 bp, Homo sapiens
tctcttctctcagca

SEQ ID NO: 1493020 - DNA, 15 bp, Homo sapiens
ttctcttctctcagc

SEQ ID NO: 1493021 - DNA, 15 bp, Homo sapiens
cttctcttctctcag

SEQ ID NO: 1493022 - DNA, 15 bp, Homo sapiens
ccttctcttctctca

SEQ ID NO: 1493023 - DNA, 15 bp, Homo sapiens
gccttctcttctctc

SEQ ID NO: 1493024 - DNA, 15 bp, Homo sapiens
tgccttctcttctct

SEQ ID NO: 1493025 - DNA, 15 bp, Homo sapiens
gtgccttctcttctc

SEQ ID NO: 1493026 - DNA, 15 bp, Homo sapiens
tgtgccttctcttct

SEQ ID NO: 1493027 - DNA, 15 bp, Homo sapiens
ctgtgccttctcttc

SEQ ID NO: 1493028 - DNA, 15 bp, Homo sapiens
gctgtgccttctctt

SEQ ID NO: 1493029 - DNA, 15 bp, Homo sapiens
agctgtgccttctct

SEQ ID NO: 1493030 - DNA, 15 bp, Homo sapiens
cagctgtgccttctc

SEQ ID NO: 1493031 - DNA, 15 bp, Homo sapiens
acagctgtgccttct

SEQ ID NO: 1493032 - DNA, 15 bp, Homo sapiens
gacagctgtgccttc

SEQ ID NO: 1493033 - DNA, 15 bp, Homo sapiens
ggacagctgtgcctt

SEQ ID NO: 1493034 - DNA, 15 bp, Homo sapiens
gggacagctgtgcct

SEQ ID NO: 1493035 - DNA, 15 bp, Homo sapiens
tgggacagctgtgcc

SEQ ID NO: 1493036 - DNA, 15 bp, Homo sapiens
ctgggacagctgtgc

SEQ ID NO: 1493037 - DNA, 15 bp, Homo sapiens
gctgggacagctgtg

SEQ ID NO: 1493038 - DNA, 15 bp, Homo sapiens
ggctgggacagctgt

SEQ ID NO: 1493039 - DNA, 15 bp, Homo sapiens
gggctgggacagctg

SEQ ID NO: 1493040 - DNA, 15 bp, Homo sapiens
ggggctgggacagct

SEQ ID NO: 1493041 - DNA, 15 bp, Homo sapiens
tggggctgggacagc

SEQ ID NO: 1493042 - DNA, 15 bp, Homo sapiens
ctggggctgggacag

SEQ ID NO: 1493043 - DNA, 15 bp, Homo sapiens
actggggctgggaca

SEQ ID NO: 1493044 - DNA, 15 bp, Homo sapiens
aactggggctgggac

SEQ ID NO: 1493045 - DNA, 15 bp, Homo sapiens
gaactggggctggga

SEQ ID NO: 1493046 - DNA, 15 bp, Homo sapiens
agaactggggctggg

SEQ ID NO: 1493047 - DNA, 15 bp, Homo sapiens
gagaactggggctgg

SEQ ID NO: 1493048 - DNA, 15 bp, Homo sapiens
ggagaactggggctg

SEQ ID NO: 1493049 - DNA, 15 bp, Homo sapiens
aggagaactggggct

SEQ ID NO: 1493050 - DNA, 15 bp, Homo sapiens
caggagaactggggc

SEQ ID NO: 1493051 - DNA, 15 bp, Homo sapiens
tcaggagaactgggg

SEQ ID NO: 1493052 - DNA, 15 bp, Homo sapiens
gtcaggagaactggg

SEQ ID NO: 1493053 - DNA, 15 bp, Homo sapiens
tgtcaggagaactgg

SEQ ID NO: 1493054 - DNA, 15 bp, Homo sapiens
ttgtcaggagaactg

SEQ ID NO: 1493055 - DNA, 15 bp, Homo sapiens
cttgtcaggagaact

SEQ ID NO: 1493056 - DNA, 15 bp, Homo sapiens
gcttgtcaggagaac

SEQ ID NO: 1493057 - DNA, 15 bp, Homo sapiens
agcttgtcaggagaa

SEQ ID NO: 1493058 - DNA, 15 bp, Homo sapiens
aagcttgtcaggaga

SEQ ID NO: 1493059 - DNA, 15 bp, Homo sapiens
gaagcttgtcaggag

SEQ ID NO: 1493060 - DNA, 15 bp, Homo sapiens
agaagcttgtcagga

SEQ ID NO: 1493061 - DNA, 15 bp, Homo sapiens
cagaagcttgtcagg

SEQ ID NO: 1493062 - DNA, 15 bp, Homo sapiens
acagaagcttgtcag

SEQ ID NO: 1493063 - DNA, 15 bp, Homo sapiens
gacagaagcttgtca

SEQ ID NO: 1493064 - DNA, 15 bp, Homo sapiens
agacagaagcttgtc

SEQ ID NO: 1493065 - DNA, 15 bp, Homo sapiens
aagacagaagcttgt

SEQ ID NO: 1493066 - DNA, 15 bp, Homo sapiens
aaagacagaagcttg

SEQ ID NO: 1493067 - DNA, 15 bp, Homo sapiens
gaaagacagaagctt

SEQ ID NO: 1493068 - DNA, 15 bp, Homo sapiens
agaaagacagaagct

SEQ ID NO: 1493069 - DNA, 15 bp, Homo sapiens
cagaaagacagaagc

SEQ ID NO: 1493070 - DNA, 15 bp, Homo sapiens
ccagaaagacagaag

SEQ ID NO: 1493071 - DNA, 15 bp, Homo sapiens
tccagaaagacagaa

SEQ ID NO: 1493072 - DNA, 15 bp, Homo sapiens
ttccagaaagacaga

SEQ ID NO: 1493073 - DNA, 15 bp, Homo sapiens
cttccagaaagacag

SEQ ID NO: 1493074 - DNA, 15 bp, Homo sapiens
gcttccagaaagaca

SEQ ID NO: 1493075 - DNA, 15 bp, Homo sapiens
ggcttccagaaagac

SEQ ID NO: 1493076 - DNA, 15 bp, Homo sapiens
gggcttccagaaaga

SEQ ID NO: 1493077 - DNA, 15 bp, Homo sapiens
ggggcttccagaaag

SEQ ID NO: 1493078 - DNA, 15 bp, Homo sapiens
aggggcttccagaaa

SEQ ID NO: 1493079 - DNA, 15 bp, Homo sapiens
taggggcttccagaa

SEQ ID NO: 1493080 - DNA, 15 bp, Homo sapiens
ttaggggcttccaga

SEQ ID NO: 1493081 - DNA, 15 bp, Homo sapiens
gttaggggcttccag

SEQ ID NO: 1493082 - DNA, 15 bp, Homo sapiens
ggttaggggcttcca

SEQ ID NO: 1493083 - DNA, 15 bp, Homo sapiens
gggttaggggcttcc

SEQ ID NO: 1493084 - DNA, 15 bp, Homo sapiens
tgggttaggggcttc

SEQ ID NO: 1493085 - DNA, 15 bp, Homo sapiens
ttgggttaggggctt

SEQ ID NO: 1493086 - DNA, 15 bp, Homo sapiens
attgggttaggggct

SEQ ID NO: 1493087 - DNA, 15 bp, Homo sapiens
gattgggttaggggc

SEQ ID NO: 1493088 - DNA, 15 bp, Homo sapiens
ggattgggttagggg

SEQ ID NO: 1493089 - DNA, 15 bp, Homo sapiens
gggattgggttaggg

SEQ ID NO: 1493090 - DNA, 15 bp, Homo sapiens
agggattgggttagg

SEQ ID NO: 1493091 - DNA, 15 bp, Homo sapiens
cagggattgggttag

SEQ ID NO: 1493092 - DNA, 15 bp, Homo sapiens
tcagggattgggtta

SEQ ID NO: 1493093 - DNA, 15 bp, Homo sapiens
ctcagggattgggtt

SEQ ID NO: 1493094 - DNA, 15 bp, Homo sapiens
gctcagggattgggt

SEQ ID NO: 1493095 - DNA, 15 bp, Homo sapiens
agctcagggattggg

SEQ ID NO: 1493096 - DNA, 15 bp, Homo sapiens
cagctcagggattgg

SEQ ID NO: 1493097 - DNA, 15 bp, Homo sapiens
tcagctcagggattg

SEQ ID NO: 1493098 - DNA, 15 bp, Homo sapiens
ctcagctcagggatt

SEQ ID NO: 1493099 - DNA, 15 bp, Homo sapiens
gctcagctcagggat

SEQ ID NO: 1493100 - DNA, 15 bp, Homo sapiens
tgctcagctcaggga

SEQ ID NO: 1493101 - DNA, 15 bp, Homo sapiens
ctgctcagctcaggg

SEQ ID NO: 1493102 - DNA, 15 bp, Homo sapiens
cctgctcagctcagg

SEQ ID NO: 1493103 - DNA, 15 bp, Homo sapiens
acctgctcagctcag

SEQ ID NO: 1493104 - DNA, 15 bp, Homo sapiens
cacctgctcagctca

SEQ ID NO: 1493105 - DNA, 15 bp, Homo sapiens
ccacctgctcagctc

SEQ ID NO: 1493106 - DNA, 15 bp, Homo sapiens
tccacctgctcagct

SEQ ID NO: 1493107 - DNA, 15 bp, Homo sapiens
ctccacctgctcagc

SEQ ID NO: 1493108 - DNA, 15 bp, Homo sapiens
tctccacctgctcag

SEQ ID NO: 1493109 - DNA, 15 bp, Homo sapiens
ctctccacctgctca

SEQ ID NO: 1493110 - DNA, 15 bp, Homo sapiens
cctctccacctgctc

SEQ ID NO: 1493111 - DNA, 15 bp, Homo sapiens
tcctctccacctgct

SEQ ID NO: 1493112 - DNA, 15 bp, Homo sapiens
gtcctctccacctgc

SEQ ID NO: 1493113 - DNA, 15 bp, Homo sapiens
ggtcctctccacctg

SEQ ID NO: 1493114 - DNA, 15 bp, Homo sapiens
gggtcctctccacct

SEQ ID NO: 1493115 - DNA, 15 bp, Homo sapiens
ggggtcctctccacc

SEQ ID NO: 1493116 - DNA, 15 bp, Homo sapiens
tggggtcctctccac

SEQ ID NO: 1493117 - DNA, 15 bp, Homo sapiens
ttggggtcctctcca

SEQ ID NO: 1493118 - DNA, 15 bp, Homo sapiens
cttggggtcctctcc

SEQ ID NO: 1493119 - DNA, 15 bp, Homo sapiens
ccttggggtcctctc

SEQ ID NO: 1493120 - DNA, 15 bp, Homo sapiens
tccttggggtcctct

SEQ ID NO: 1493121 - DNA, 15 bp, Homo sapiens
ttccttggggtcctc

SEQ ID NO: 1493122 - DNA, 15 bp, Homo sapiens
cttccttggggtcct

SEQ ID NO: 1493123 - DNA, 15 bp, Homo sapiens
tcttccttggggtcc

SEQ ID NO: 1493124 - DNA, 15 bp, Homo sapiens
gtcttccttggggtc

SEQ ID NO: 1493125 - DNA, 15 bp, Homo sapiens
tgtcttccttggggt

SEQ ID NO: 1493126 - DNA, 15 bp, Homo sapiens
ctgtcttccttgggg

SEQ ID NO: 1493127 - DNA, 15 bp, Homo sapiens
tctgtcttccttggg

SEQ ID NO: 1493128 - DNA, 15 bp, Homo sapiens
ttctgtcttccttgg

SEQ ID NO: 1493129 - DNA, 15 bp, Homo sapiens
cttctgtcttccttg

SEQ ID NO: 1493130 - DNA, 15 bp, Homo sapiens
ccttctgtcttcctt

SEQ ID NO: 1493131 - DNA, 15 bp, Homo sapiens
tccttctgtcttcct

SEQ ID NO: 1493132 - DNA, 15 bp, Homo sapiens
gtccttctgtcttcc

SEQ ID NO: 1493133 - DNA, 15 bp, Homo sapiens
tgtccttctgtcttc

SEQ ID NO: 1493134 - DNA, 15 bp, Homo sapiens
ttgtccttctgtctt

SEQ ID NO: 1493135 - DNA, 15 bp, Homo sapiens
cttgtccttctgtct

SEQ ID NO: 1493136 - DNA, 15 bp, Homo sapiens
ccttgtccttctgtc

SEQ ID NO: 1493137 - DNA, 15 bp, Homo sapiens
accttgtccttctgt

SEQ ID NO: 1493138 - DNA, 15 bp, Homo sapiens
gaccttgtccttctg

SEQ ID NO: 1493139 - DNA, 15 bp, Homo sapiens
tgaccttgtccttct

SEQ ID NO: 1493140 - DNA, 15 bp, Homo sapiens
ctgaccttgtccttc

SEQ ID NO: 1493141 - DNA, 15 bp, Homo sapiens
tctgaccttgtcctt

SEQ ID NO: 1493142 - DNA, 15 bp, Homo sapiens
gtctgaccttgtcct

SEQ ID NO: 1493143 - DNA, 15 bp, Homo sapiens
tgtctgaccttgtcc

SEQ ID NO: 1493144 - DNA, 15 bp, Homo sapiens
ctgtctgaccttgtc

SEQ ID NO: 1493145 - DNA, 15 bp, Homo sapiens
tctgtctgaccttgt

SEQ ID NO: 1493146 - DNA, 15 bp, Homo sapiens
gtctgtctgaccttg

SEQ ID NO: 1493147 - DNA, 15 bp, Homo sapiens
tgtctgtctgacctt

SEQ ID NO: 1493148 - DNA, 15 bp, Homo sapiens
ctgtctgtctgacct

SEQ ID NO: 1493149 - DNA, 15 bp, Homo sapiens
tctgtctgtctgacc

SEQ ID NO: 1493150 - DNA, 15 bp, Homo sapiens
ctctgtctgtctgac

SEQ ID NO: 1493151 - DNA, 15 bp, Homo sapiens
tctctgtctgtctga

SEQ ID NO: 1493152 - DNA, 15 bp, Homo sapiens
tcttctgcctcagcc

SEQ ID NO: 1493153 - DNA, 15 bp, Homo sapiens
ttcttctgcctcagc

SEQ ID NO: 1493154 - DNA, 15 bp, Homo sapiens
attcttctgcctcag

SEQ ID NO: 1493155 - DNA, 15 bp, Homo sapiens
gattcttctgcctca

SEQ ID NO: 1493156 - DNA, 15 bp, Homo sapiens
cgattcttctgcctc

SEQ ID NO: 1493157 - DNA, 15 bp, Homo sapiens
gcgattcttctgcct

SEQ ID NO: 1493158 - DNA, 15 bp, Homo sapiens
agcgattcttctgcc

SEQ ID NO: 1493159 - DNA, 15 bp, Homo sapiens
aagcgattcttctgc

SEQ ID NO: 1493160 - DNA, 15 bp, Homo sapiens
caagcgattcttctg

SEQ ID NO: 1493161 - DNA, 15 bp, Homo sapiens
ccaagcgattcttct

SEQ ID NO: 1493162 - DNA, 15 bp, Homo sapiens
tccaagcgattcttc

SEQ ID NO: 1493163 - DNA, 15 bp, Homo sapiens
gtccaagcgattctt

SEQ ID NO: 1493164 - DNA, 15 bp, Homo sapiens
ggtccaagcgattct

SEQ ID NO: 1493165 - DNA, 15 bp, Homo sapiens
gggtccaagcgattc

SEQ ID NO: 1493166 - DNA, 15 bp, Homo sapiens
cgggtccaagcgatt

SEQ ID NO: 1493167 - DNA, 15 bp, Homo sapiens
ccgggtccaagcgat

SEQ ID NO: 1493168 - DNA, 15 bp, Homo sapiens
cccgggtccaagcga

SEQ ID NO: 1493169 - DNA, 15 bp, Homo sapiens
tcccgggtccaagcg

SEQ ID NO: 1493170 - DNA, 15 bp, Homo sapiens
ctcccgggtccaagc

SEQ ID NO: 1493171 - DNA, 15 bp, Homo sapiens
cctcccgggtccaag

SEQ ID NO: 1493172 - DNA, 15 bp, Homo sapiens
gccacctcccgggtc

SEQ ID NO: 1493173 - DNA, 15 bp, Homo sapiens
tgccacctcccgggt

SEQ ID NO: 1493174 - DNA, 15 bp, Homo sapiens
ctgccacctcccggg

SEQ ID NO: 1493175 - DNA, 15 bp, Homo sapiens
actgccacctcccgg

SEQ ID NO: 1493176 - DNA, 15 bp, Homo sapiens
aactgccacctcccg

SEQ ID NO: 1493177 - DNA, 15 bp, Homo sapiens
caactgccacctccc

SEQ ID NO: 1493178 - DNA, 15 bp, Homo sapiens
gcaactgccacctcc

SEQ ID NO: 1493179 - DNA, 15 bp, Homo sapiens
tgcaactgccacctc

SEQ ID NO: 1493180 - DNA, 15 bp, Homo sapiens
ttgcaactgccacct

SEQ ID NO: 1493181 - DNA, 15 bp, Homo sapiens
attgcaactgccacc

SEQ ID NO: 1493182 - DNA, 15 bp, Homo sapiens
cattgcaactgccac

SEQ ID NO: 1493183 - DNA, 15 bp, Homo sapiens
tcattgcaactgcca

SEQ ID NO: 1493184 - DNA, 15 bp, Homo sapiens
ctcattgcaactgcc

SEQ ID NO: 1493185 - DNA, 15 bp, Homo sapiens
gctcattgcaactgc

SEQ ID NO: 1493186 - DNA, 15 bp, Homo sapiens
agctcattgcaactg

SEQ ID NO: 1493187 - DNA, 15 bp, Homo sapiens
cagctcattgcaact

SEQ ID NO: 1493188 - DNA, 15 bp, Homo sapiens
tcagctcattgcaac

SEQ ID NO: 1493189 - DNA, 15 bp, Homo sapiens
ctcagctcattgcaa

SEQ ID NO: 1493190 - DNA, 15 bp, Homo sapiens
tctcagctcattgca

SEQ ID NO: 1493191 - DNA, 15 bp, Homo sapiens
atctcagctcattgc

SEQ ID NO: 1493192 - DNA, 15 bp, Homo sapiens
gatctcagctcattg

SEQ ID NO: 1493193 - DNA, 15 bp, Homo sapiens
tgatctcagctcatt

SEQ ID NO: 1493194 - DNA, 15 bp, Homo sapiens
gtgatctcagctcat

SEQ ID NO: 1493195 - DNA, 15 bp, Homo sapiens
agtgtgatctcagct

SEQ ID NO: 1493196 - DNA, 15 bp, Homo sapiens
tagtgtgatctcagc

SEQ ID NO: 1493197 - DNA, 15 bp, Homo sapiens
atagtgtgatctcag

SEQ ID NO: 1493198 - DNA, 15 bp, Homo sapiens
aatagtgtgatctca

SEQ ID NO: 1493199 - DNA, 15 bp, Homo sapiens
caatagtgtgatctc

SEQ ID NO: 1493200 - DNA, 15 bp, Homo sapiens
gcaatagtgtgatct

SEQ ID NO: 1493201 - DNA, 15 bp, Homo sapiens
tgcaatagtgtgatc

SEQ ID NO: 1493202 - DNA, 15 bp, Homo sapiens
gtgcaatagtgtgat

SEQ ID NO: 1493203 - DNA, 15 bp, Homo sapiens
agtgcaatagtgtga

SEQ ID NO: 1493204 - DNA, 15 bp, Homo sapiens
gagtgcaatagtgtg

SEQ ID NO: 1493205 - DNA, 15 bp, Homo sapiens
ggagtgcaatagtgt

SEQ ID NO: 1493206 - DNA, 15 bp, Homo sapiens
tggagtgcaatagtg

SEQ ID NO: 1493207 - DNA, 15 bp, Homo sapiens
ctggagtgcaatagt

SEQ ID NO: 1493208 - DNA, 15 bp, Homo sapiens
actggagtgcaatag

SEQ ID NO: 1493209 - DNA, 15 bp, Homo sapiens
gactggagtgcaata

SEQ ID NO: 1493210 - DNA, 15 bp, Homo sapiens
agactggagtgcaat

SEQ ID NO: 1493211 - DNA, 15 bp, Homo sapiens
cagactggagtgcaa

SEQ ID NO: 1493212 - DNA, 15 bp, Homo sapiens
ttgtctcactctgtc

SEQ ID NO: 1493213 - DNA, 15 bp, Homo sapiens
gttgtctcactctgt

SEQ ID NO: 1493214 - DNA, 15 bp, Homo sapiens
cgttgtctcactctg

SEQ ID NO: 1493215 - DNA, 15 bp, Homo sapiens
acgttgtctcactct

SEQ ID NO: 1493216 - DNA, 15 bp, Homo sapiens
gacgttgtctcactc

SEQ ID NO: 1493217 - DNA, 15 bp, Homo sapiens
agacgttgtctcact

SEQ ID NO: 1493218 - DNA, 15 bp, Homo sapiens
gagacgttgtctcac

SEQ ID NO: 1493219 - DNA, 15 bp, Homo sapiens
tgagacgttgtctca

SEQ ID NO: 1493220 - DNA, 15 bp, Homo sapiens
ttgagacgttgtctc

SEQ ID NO: 1493221 - DNA, 15 bp, Homo sapiens
tttgagacgttgtct

SEQ ID NO: 1493222 - DNA, 15 bp, Homo sapiens
ttttgagacgttgtc

SEQ ID NO: 1493223 - DNA, 15 bp, Homo sapiens
tttttgagacgttgt

SEQ ID NO: 1493224 - DNA, 15 bp, Homo sapiens
ttttttgagacgttg

SEQ ID NO: 1493225 - DNA, 15 bp, Homo sapiens
tttttttgagacgtt

SEQ ID NO: 1493226 - DNA, 15 bp, Homo sapiens
ttttttttgagacgt

SEQ ID NO: 1493227 - DNA, 15 bp, Homo sapiens
tgcactttttttttt

SEQ ID NO: 1493228 - DNA, 15 bp, Homo sapiens
ctgcacttttttttt

SEQ ID NO: 1493229 - DNA, 15 bp, Homo sapiens
tctgcactttttttt

SEQ ID NO: 1493230 - DNA, 15 bp, Homo sapiens
ttctgcacttttttt

SEQ ID NO: 1493231 - DNA, 15 bp, Homo sapiens
tttctgcactttttt

SEQ ID NO: 1493232 - DNA, 15 bp, Homo sapiens
ctttctgcacttttt

SEQ ID NO: 1493233 - DNA, 15 bp, Homo sapiens
cctttctgcactttt

SEQ ID NO: 1493234 - DNA, 15 bp, Homo sapiens
ccctttctgcacttt

SEQ ID NO: 1493235 - DNA, 15 bp, Homo sapiens
gccctttctgcactt

SEQ ID NO: 1493236 - DNA, 15 bp, Homo sapiens
agccctttctgcact

SEQ ID NO: 1493237 - DNA, 15 bp, Homo sapiens
gagccctttctgcac

SEQ ID NO: 1493238 - DNA, 15 bp, Homo sapiens
agagccctttctgca

SEQ ID NO: 1493239 - DNA, 15 bp, Homo sapiens
gagagccctttctgc

SEQ ID NO: 1493240 - DNA, 15 bp, Homo sapiens
agagagccctttctg

SEQ ID NO: 1493241 - DNA, 15 bp, Homo sapiens
aagagagccctttct

SEQ ID NO: 1493242 - DNA, 15 bp, Homo sapiens
caagagagccctttc

SEQ ID NO: 1493243 - DNA, 15 bp, Homo sapiens
ccaagagagcccttt

SEQ ID NO: 1493244 - DNA, 15 bp, Homo sapiens
accaagagagccctt

SEQ ID NO: 1493245 - DNA, 15 bp, Homo sapiens
caccaagagagccct

SEQ ID NO: 1493246 - DNA, 15 bp, Homo sapiens
acaccaagagagccc

SEQ ID NO: 1493247 - DNA, 15 bp, Homo sapiens
tacaccaagagagcc

SEQ ID NO: 1493248 - DNA, 15 bp, Homo sapiens
atacaccaagagagc

SEQ ID NO: 1493249 - DNA, 15 bp, Homo sapiens
catacaccaagagag

SEQ ID NO: 1493250 - DNA, 15 bp, Homo sapiens
acatacaccaagaga

SEQ ID NO: 1493251 - DNA, 15 bp, Homo sapiens
gacatacaccaagag

SEQ ID NO: 1493252 - DNA, 15 bp, Homo sapiens
tgacatacaccaaga

SEQ ID NO: 1493253 - DNA, 15 bp, Homo sapiens
ctgacatacaccaag

SEQ ID NO: 1493254 - DNA, 15 bp, Homo sapiens
actgacatacaccaa

SEQ ID NO: 1493255 - DNA, 15 bp, Homo sapiens
gactgacatacacca

SEQ ID NO: 1493256 - DNA, 15 bp, Homo sapiens
ggactgacatacacc

SEQ ID NO: 1493257 - DNA, 15 bp, Homo sapiens
gggactgacatacac

SEQ ID NO: 1493258 - DNA, 15 bp, Homo sapiens
agggactgacataca

SEQ ID NO: 1493259 - DNA, 15 bp, Homo sapiens
aagggactgacatac

SEQ ID NO: 1493260 - DNA, 15 bp, Homo sapiens
taagggactgacata

SEQ ID NO: 1493261 - DNA, 15 bp, Homo sapiens
ctaagggactgacat

SEQ ID NO: 1493262 - DNA, 15 bp, Homo sapiens
actaagggactgaca

SEQ ID NO: 1493263 - DNA, 15 bp, Homo sapiens
aactaagggactgac

SEQ ID NO: 1493264 - DNA, 15 bp, Homo sapiens
gaactaagggactga

SEQ ID NO: 1493265 - DNA, 15 bp, Homo sapiens
agaactaagggactg

SEQ ID NO: 1493266 - DNA, 15 bp, Homo sapiens
cagaactaagggact

SEQ ID NO: 1493267 - DNA, 15 bp, Homo sapiens
ccagaactaagggac

SEQ ID NO: 1493268 - DNA, 15 bp, Homo sapiens
tccagaactaaggga

SEQ ID NO: 1493269 - DNA, 15 bp, Homo sapiens
ttccagaactaaggg

SEQ ID NO: 1493270 - DNA, 15 bp, Homo sapiens
gttccagaactaagg

SEQ ID NO: 1493271 - DNA, 15 bp, Homo sapiens
tgttccagaactaag

SEQ ID NO: 1493272 - DNA, 15 bp, Homo sapiens
ctgttccagaactaa

SEQ ID NO: 1493273 - DNA, 15 bp, Homo sapiens
cctgttccagaacta

SEQ ID NO: 1493274 - DNA, 15 bp, Homo sapiens
ccctgttccagaact

SEQ ID NO: 1493275 - DNA, 15 bp, Homo sapiens
tccctgttccagaac

SEQ ID NO: 1493276 - DNA, 15 bp, Homo sapiens
ttccctgttccagaa

SEQ ID NO: 1493277 - DNA, 15 bp, Homo sapiens
tttccctgttccaga

SEQ ID NO: 1493278 - DNA, 15 bp, Homo sapiens
ctttccctgttccag

SEQ ID NO: 1493279 - DNA, 15 bp, Homo sapiens
actttccctgttcca

SEQ ID NO: 1493280 - DNA, 15 bp, Homo sapiens
tactttccctgttcc

SEQ ID NO: 1493281 - DNA, 15 bp, Homo sapiens
ttactttccctgttc

SEQ ID NO: 1493282 - DNA, 15 bp, Homo sapiens
tttactttccctgtt

SEQ ID NO: 1493283 - DNA, 15 bp, Homo sapiens
ttttactttccctgt

SEQ ID NO: 1493284 - DNA, 15 bp, Homo sapiens
cttttactttccctg

SEQ ID NO: 1493285 - DNA, 15 bp, Homo sapiens
gcttttactttccct

SEQ ID NO: 1493286 - DNA, 15 bp, Homo sapiens
ggcttttactttccc

SEQ ID NO: 1493287 - DNA, 15 bp, Homo sapiens
tggcttttactttcc

SEQ ID NO: 1493288 - DNA, 15 bp, Homo sapiens
gtggcttttactttc

SEQ ID NO: 1493289 - DNA, 15 bp, Homo sapiens
tgtggcttttacttt

SEQ ID NO: 1493290 - DNA, 15 bp, Homo sapiens
ctgtggcttttactt

SEQ ID NO: 1493291 - DNA, 15 bp, Homo sapiens
actgtggcttttact

SEQ ID NO: 1493292 - DNA, 15 bp, Homo sapiens
tactgtggcttttac

SEQ ID NO: 1493293 - DNA, 15 bp, Homo sapiens
gtactgtggctttta

SEQ ID NO: 1493294 - DNA, 15 bp, Homo sapiens
ggtactgtggctttt

SEQ ID NO: 1493295 - DNA, 15 bp, Homo sapiens
gggtactgtggcttt

SEQ ID NO: 1493296 - DNA, 15 bp, Homo sapiens
tgggtactgtggctt

SEQ ID NO: 1493297 - DNA, 15 bp, Homo sapiens
ttgggtactgtggct

SEQ ID NO: 1493298 - DNA, 15 bp, Homo sapiens
cttgggtactgtggc

SEQ ID NO: 1493299 - DNA, 15 bp, Homo sapiens
gcttgggtactgtgg

SEQ ID NO: 1493300 - DNA, 15 bp, Homo sapiens
agcttgggtactgtg

SEQ ID NO: 1493301 - DNA, 15 bp, Homo sapiens
gagcttgggtactgt

SEQ ID NO: 1493302 - DNA, 15 bp, Homo sapiens
agagcttgggtactg

SEQ ID NO: 1493303 - DNA, 15 bp, Homo sapiens
gagagcttgggtact

SEQ ID NO: 1493304 - DNA, 15 bp, Homo sapiens
agagagcttgggtac

SEQ ID NO: 1493305 - DNA, 15 bp, Homo sapiens
aagagagcttgggta

SEQ ID NO: 1493306 - DNA, 15 bp, Homo sapiens
gaagagagcttgggt

SEQ ID NO: 1493307 - DNA, 15 bp, Homo sapiens
ggaagagagcttggg

SEQ ID NO: 1493308 - DNA, 15 bp, Homo sapiens
tggaagagagcttgg

SEQ ID NO: 1493309 - DNA, 15 bp, Homo sapiens
ctggaagagagcttg

SEQ ID NO: 1493310 - DNA, 15 bp, Homo sapiens
cctggaagagagctt

SEQ ID NO: 1493311 - DNA, 15 bp, Homo sapiens
tcctggaagagagct

SEQ ID NO: 1493312 - DNA, 15 bp, Homo sapiens
ctcctggaagagagc

SEQ ID NO: 1493313 - DNA, 15 bp, Homo sapiens
actcctggaagagag

SEQ ID NO: 1493314 - DNA, 15 bp, Homo sapiens
cactcctggaagaga

SEQ ID NO: 1493315 - DNA, 15 bp, Homo sapiens
acactcctggaagag

SEQ ID NO: 1493316 - DNA, 15 bp, Homo sapiens
gacactcctggaaga

SEQ ID NO: 1493317 - DNA, 15 bp, Homo sapiens
agacactcctggaag

SEQ ID NO: 1493318 - DNA, 15 bp, Homo sapiens
gagacactcctggaa

SEQ ID NO: 1493319 - DNA, 15 bp, Homo sapiens
tgagacactcctgga

SEQ ID NO: 1493320 - DNA, 15 bp, Homo sapiens
ctgagacactcctgg

SEQ ID NO: 1493321 - DNA, 15 bp, Homo sapiens
gctgagacactcctg

SEQ ID NO: 1493322 - DNA, 15 bp, Homo sapiens
agctgagacactcct

SEQ ID NO: 1493323 - DNA, 15 bp, Homo sapiens
gagctgagacactcc

SEQ ID NO: 1493324 - DNA, 15 bp, Homo sapiens
ggagctgagacactc

SEQ ID NO: 1493325 - DNA, 15 bp, Homo sapiens
tggagctgagacact

SEQ ID NO: 1493326 - DNA, 15 bp, Homo sapiens
ttggagctgagacac

SEQ ID NO: 1493327 - DNA, 15 bp, Homo sapiens
gttggagctgagaca

SEQ ID NO: 1493328 - DNA, 15 bp, Homo sapiens
tgttggagctgagac

SEQ ID NO: 1493329 - DNA, 15 bp, Homo sapiens
ctgttggagctgaga

SEQ ID NO: 1493330 - DNA, 15 bp, Homo sapiens
cctgttggagctgag

SEQ ID NO: 1493331 - DNA, 15 bp, Homo sapiens
acctgttggagctga

SEQ ID NO: 1493332 - DNA, 15 bp, Homo sapiens
tacctgttggagctg

SEQ ID NO: 1493333 - DNA, 15 bp, Homo sapiens
ttacctgttggagct

SEQ ID NO: 1493334 - DNA, 15 bp, Homo sapiens
tttacctgttggagc

SEQ ID NO: 1493335 - DNA, 15 bp, Homo sapiens
atttacctgttggag

SEQ ID NO: 1493336 - DNA, 15 bp, Homo sapiens
tatttacctgttgga

SEQ ID NO: 1493337 - DNA, 15 bp, Homo sapiens
atatttacctgttgg

SEQ ID NO: 1493338 - DNA, 15 bp, Homo sapiens
aatatttacctgttg

SEQ ID NO: 1493339 - DNA, 15 bp, Homo sapiens
caatatttacctgtt

SEQ ID NO: 1493340 - DNA, 15 bp, Homo sapiens
acaatatttacctgt

SEQ ID NO: 1493341 - DNA, 15 bp, Homo sapiens
gacaatatttacctg

SEQ ID NO: 1493342 - DNA, 15 bp, Homo sapiens
agacaatatttacct

SEQ ID NO: 1493343 - DNA, 15 bp, Homo sapiens
tagacaatatttacc

SEQ ID NO: 1493344 - DNA, 15 bp, Homo sapiens
atagacaatatttac

SEQ ID NO: 1493345 - DNA, 15 bp, Homo sapiens
catagacaatattta

SEQ ID NO: 1493346 - DNA, 15 bp, Homo sapiens
acatagacaatattt

SEQ ID NO: 1493347 - DNA, 15 bp, Homo sapiens
tacatagacaatatt

SEQ ID NO: 1493348 - DNA, 15 bp, Homo sapiens
ctacatagacaatat

SEQ ID NO: 1493349 - DNA, 15 bp, Homo sapiens
actacatagacaata

SEQ ID NO: 1493350 - DNA, 15 bp, Homo sapiens
gactacatagacaat

SEQ ID NO: 1493351 - DNA, 15 bp, Homo sapiens
tgactacatagacaa

SEQ ID NO: 1493352 - DNA, 15 bp, Homo sapiens
ctgactacatagaca

SEQ ID NO: 1493353 - DNA, 15 bp, Homo sapiens
tctgactacatagac

SEQ ID NO: 1493354 - DNA, 15 bp, Homo sapiens
atctgactacataga

SEQ ID NO: 1493355 - DNA, 15 bp, Homo sapiens
aatctgactacatag

SEQ ID NO: 1493356 - DNA, 15 bp, Homo sapiens
caatctgactacata

SEQ ID NO: 1493357 - DNA, 15 bp, Homo sapiens
ccaatctgactacat

SEQ ID NO: 1493358 - DNA, 15 bp, Homo sapiens
accaatctgactaca

SEQ ID NO: 1493359 - DNA, 15 bp, Homo sapiens
gaccaatctgactac

SEQ ID NO: 1493360 - DNA, 15 bp, Homo sapiens
ggaccaatctgacta

SEQ ID NO: 1493361 - DNA, 15 bp, Homo sapiens
gggaccaatctgact

SEQ ID NO: 1493362 - DNA, 15 bp, Homo sapiens
agggaccaatctgac

SEQ ID NO: 1493363 - DNA, 15 bp, Homo sapiens
gagggaccaatctga

SEQ ID NO: 1493364 - DNA, 15 bp, Homo sapiens
agagggaccaatctg

SEQ ID NO: 1493365 - DNA, 15 bp, Homo sapiens
cagagggaccaatct

SEQ ID NO: 1493366 - DNA, 15 bp, Homo sapiens
ccagagggaccaatc

SEQ ID NO: 1493367 - DNA, 15 bp, Homo sapiens
cccagagggaccaat

SEQ ID NO: 1493368 - DNA, 15 bp, Homo sapiens
tcccagagggaccaa

SEQ ID NO: 1493369 - DNA, 15 bp, Homo sapiens
atcccagagggacca

SEQ ID NO: 1493370 - DNA, 15 bp, Homo sapiens
gatcccagagggacc

SEQ ID NO: 1493371 - DNA, 15 bp, Homo sapiens
ggatcccagagggac

SEQ ID NO: 1493372 - DNA, 15 bp, Homo sapiens
tggatcccagaggga

SEQ ID NO: 1493373 - DNA, 15 bp, Homo sapiens
gtggatcccagaggg

SEQ ID NO: 1493374 - DNA, 15 bp, Homo sapiens
agtggatcccagagg

SEQ ID NO: 1493375 - DNA, 15 bp, Homo sapiens
aagtggatcccagag

SEQ ID NO: 1493376 - DNA, 15 bp, Homo sapiens
gaagtggatcccaga

SEQ ID NO: 1493377 - DNA, 15 bp, Homo sapiens
ggaagtggatcccag

SEQ ID NO: 1493378 - DNA, 15 bp, Homo sapiens
gggaagtggatccca

SEQ ID NO: 1493379 - DNA, 15 bp, Homo sapiens
tgggaagtggatccc

SEQ ID NO: 1493380 - DNA, 15 bp, Homo sapiens
atgggaagtggatcc

SEQ ID NO: 1493381 - DNA, 15 bp, Homo sapiens
aatgggaagtggatc

SEQ ID NO: 1493382 - DNA, 15 bp, Homo sapiens
gaatgggaagtggat

SEQ ID NO: 1493383 - DNA, 15 bp, Homo sapiens
ggaatgggaagtgga

SEQ ID NO: 1493384 - DNA, 15 bp, Homo sapiens
aggaatgggaagtgg

SEQ ID NO: 1493385 - DNA, 15 bp, Homo sapiens
aaggaatgggaagtg

SEQ ID NO: 1493386 - DNA, 15 bp, Homo sapiens
aaaggaatgggaagt

SEQ ID NO: 1493387 - DNA, 15 bp, Homo sapiens
caaaggaatgggaag

SEQ ID NO: 1493388 - DNA, 15 bp, Homo sapiens
acaaaggaatgggaa

SEQ ID NO: 1493389 - DNA, 15 bp, Homo sapiens
aacaaaggaatggga

SEQ ID NO: 1493390 - DNA, 15 bp, Homo sapiens
gaacaaaggaatggg

SEQ ID NO: 1493391 - DNA, 15 bp, Homo sapiens
ggaacaaaggaatgg

SEQ ID NO: 1493392 - DNA, 15 bp, Homo sapiens
aggaacaaaggaatg

SEQ ID NO: 1493393 - DNA, 15 bp, Homo sapiens
aaggaacaaaggaat

SEQ ID NO: 1493394 - DNA, 15 bp, Homo sapiens
caaggaacaaaggaa

SEQ ID NO: 1493395 - DNA, 15 bp, Homo sapiens
acaaggaacaaagga

SEQ ID NO: 1493396 - DNA, 15 bp, Homo sapiens
gacaaggaacaaagg

SEQ ID NO: 1493397 - DNA, 15 bp, Homo sapiens
ggacaaggaacaaag

SEQ ID NO: 1493398 - DNA, 15 bp, Homo sapiens
gggacaaggaacaaa

SEQ ID NO: 1493399 - DNA, 15 bp, Homo sapiens
tgggacaaggaacaa

SEQ ID NO: 1493400 - DNA, 15 bp, Homo sapiens
ttgggacaaggaaca

SEQ ID NO: 1493401 - DNA, 15 bp, Homo sapiens
gttgggacaaggaac

SEQ ID NO: 1493402 - DNA, 15 bp, Homo sapiens
tgttgggacaaggaa

SEQ ID NO: 1493403 - DNA, 15 bp, Homo sapiens
ttgttgggacaagga

SEQ ID NO: 1493404 - DNA, 15 bp, Homo sapiens
tttgttgggacaagg

SEQ ID NO: 1493405 - DNA, 15 bp, Homo sapiens
ctttgttgggacaag

SEQ ID NO: 1493406 - DNA, 15 bp, Homo sapiens
cctttgttgggacaa

SEQ ID NO: 1493407 - DNA, 15 bp, Homo sapiens
ccctttgttgggaca

SEQ ID NO: 1493408 - DNA, 15 bp, Homo sapiens
accctttgttgggac

SEQ ID NO: 1493409 - DNA, 15 bp, Homo sapiens
gaccctttgttggga

SEQ ID NO: 1493410 - DNA, 15 bp, Homo sapiens
ggaccctttgttggg

SEQ ID NO: 1493411 - DNA, 15 bp, Homo sapiens
tggaccctttgttgg

SEQ ID NO: 1493412 - DNA, 15 bp, Homo sapiens
atggaccctttgttg

SEQ ID NO: 1493413 - DNA, 15 bp, Homo sapiens
gatggaccctttgtt

SEQ ID NO: 1493414 - DNA, 15 bp, Homo sapiens
agatggaccctttgt

SEQ ID NO: 1493415 - DNA, 15 bp, Homo sapiens
aagatggaccctttg

SEQ ID NO: 1493416 - DNA, 15 bp, Homo sapiens
aaagatggacccttt

SEQ ID NO: 1493417 - DNA, 15 bp, Homo sapiens
aaaagatggaccctt

SEQ ID NO: 1493418 - DNA, 15 bp, Homo sapiens
caaaagatggaccct

SEQ ID NO: 1493419 - DNA, 15 bp, Homo sapiens
acaaaagatggaccc

SEQ ID NO: 1493420 - DNA, 15 bp, Homo sapiens
tacaaaagatggacc

SEQ ID NO: 1493421 - DNA, 15 bp, Homo sapiens
ttacaaaagatggac

SEQ ID NO: 1493422 - DNA, 15 bp, Homo sapiens
cttacaaaagatgga

SEQ ID NO: 1493423 - DNA, 15 bp, Homo sapiens
ccttacaaaagatgg

SEQ ID NO: 1493424 - DNA, 15 bp, Homo sapiens
tccttacaaaagatg

SEQ ID NO: 1493425 - DNA, 15 bp, Homo sapiens
atccttacaaaagat

SEQ ID NO: 1493426 - DNA, 15 bp, Homo sapiens
aatccttacaaaaga

SEQ ID NO: 1493427 - DNA, 15 bp, Homo sapiens
caatccttacaaaag

SEQ ID NO: 1493428 - DNA, 15 bp, Homo sapiens
ccaatccttacaaaa

SEQ ID NO: 1493429 - DNA, 15 bp, Homo sapiens
accaatccttacaaa

SEQ ID NO: 1493430 - DNA, 15 bp, Homo sapiens
aaccaatccttacaa

SEQ ID NO: 1493431 - DNA, 15 bp, Homo sapiens
gaaccaatccttaca

SEQ ID NO: 1493432 - DNA, 15 bp, Homo sapiens
agaaccaatccttac

SEQ ID NO: 1493433 - DNA, 15 bp, Homo sapiens
gagaaccaatcctta

SEQ ID NO: 1493434 - DNA, 15 bp, Homo sapiens
tgagaaccaatcctt

SEQ ID NO: 1493435 - DNA, 15 bp, Homo sapiens
ttgagaaccaatcct

SEQ ID NO: 1493436 - DNA, 15 bp, Homo sapiens
tttgagaaccaatcc

SEQ ID NO: 1493437 - DNA, 15 bp, Homo sapiens
ctttgagaaccaatc

SEQ ID NO: 1493438 - DNA, 15 bp, Homo sapiens
gctttgagaaccaat

SEQ ID NO: 1493439 - DNA, 15 bp, Homo sapiens
agctttgagaaccaa

SEQ ID NO: 1493440 - DNA, 15 bp, Homo sapiens
cagctttgagaacca

SEQ ID NO: 1493441 - DNA, 15 bp, Homo sapiens
ccagctttgagaacc

SEQ ID NO: 1493442 - DNA, 15 bp, Homo sapiens
tccagctttgagaac

SEQ ID NO: 1493443 - DNA, 15 bp, Homo sapiens
ttccagctttgagaa

SEQ ID NO: 1493444 - DNA, 15 bp, Homo sapiens
gttccagctttgaga

SEQ ID NO: 1493445 - DNA, 15 bp, Homo sapiens
cgttccagctttgag

SEQ ID NO: 1493446 - DNA, 15 bp, Homo sapiens
tcgttccagctttga

SEQ ID NO: 1493447 - DNA, 15 bp, Homo sapiens
ctcgttccagctttg

SEQ ID NO: 1493448 - DNA, 15 bp, Homo sapiens
cctcgttccagcttt

SEQ ID NO: 1493449 - DNA, 15 bp, Homo sapiens
gcctcgttccagctt

SEQ ID NO: 1493450 - DNA, 15 bp, Homo sapiens
tgcctcgttccagct

SEQ ID NO: 1493451 - DNA, 15 bp, Homo sapiens
ctgcctcgttccagc

SEQ ID NO: 1493452 - DNA, 15 bp, Homo sapiens
gctgcctcgttccag

SEQ ID NO: 1493453 - DNA, 15 bp, Homo sapiens
tgctgcctcgttcca

SEQ ID NO: 1493454 - DNA, 15 bp, Homo sapiens
ttgctgcctcgttcc

SEQ ID NO: 1493455 - DNA, 15 bp, Homo sapiens
tttgctgcctcgttc

SEQ ID NO: 1493456 - DNA, 15 bp, Homo sapiens
gtttgctgcctcgtt

SEQ ID NO: 1493457 - DNA, 15 bp, Homo sapiens
agtttgctgcctcgt

SEQ ID NO: 1493458 - DNA, 15 bp, Homo sapiens
gagtttgctgcctcg

SEQ ID NO: 1493459 - DNA, 15 bp, Homo sapiens
tgagtttgctgcctc

SEQ ID NO: 1493460 - DNA, 15 bp, Homo sapiens
ctgagtttgctgcct

SEQ ID NO: 1493461 - DNA, 15 bp, Homo sapiens
cctgagtttgctgcc

SEQ ID NO: 1493462 - DNA, 15 bp, Homo sapiens
acctgagtttgctgc

SEQ ID NO: 1493463 - DNA, 15 bp, Homo sapiens
cacctgagtttgctg

SEQ ID NO: 1493464 - DNA, 15 bp, Homo sapiens
ccacctgagtttgct

SEQ ID NO: 1493465 - DNA, 15 bp, Homo sapiens
accacctgagtttgc

SEQ ID NO: 1493466 - DNA, 15 bp, Homo sapiens
taccacctgagtttg

SEQ ID NO: 1493467 - DNA, 15 bp, Homo sapiens
ttaccacctgagttt

SEQ ID NO: 1493468 - DNA, 15 bp, Homo sapiens
gttaccacctgagtt

SEQ ID NO: 1493469 - DNA, 15 bp, Homo sapiens
tacaccccaaggtgg

SEQ ID NO: 1493470 - DNA, 15 bp, Homo sapiens
atacaccccaaggtg

SEQ ID NO: 1493471 - DNA, 15 bp, Homo sapiens
catacaccccaaggt

SEQ ID NO: 1493472 - DNA, 15 bp, Homo sapiens
ccatacaccccaagg

SEQ ID NO: 1493473 - DNA, 15 bp, Homo sapiens
tccatacaccccaag

SEQ ID NO: 1493474 - DNA, 15 bp, Homo sapiens
gtccatacaccccaa

SEQ ID NO: 1493475 - DNA, 15 bp, Homo sapiens
ggtccatacacccca

SEQ ID NO: 1493476 - DNA, 15 bp, Homo sapiens
cggtccatacacccc

SEQ ID NO: 1493477 - DNA, 15 bp, Homo sapiens
ccggtccatacaccc

SEQ ID NO: 1493478 - DNA, 15 bp, Homo sapiens
cccggtccatacacc

SEQ ID NO: 1493479 - DNA, 15 bp, Homo sapiens
acccggtccatacac

SEQ ID NO: 1493480 - DNA, 15 bp, Homo sapiens
aacccggtccataca

SEQ ID NO: 1493481 - DNA, 15 bp, Homo sapiens
gaacccggtccatac

SEQ ID NO: 1493482 - DNA, 15 bp, Homo sapiens
ggaacccggtccata

SEQ ID NO: 1493483 - DNA, 15 bp, Homo sapiens
aggaacccggtccat

SEQ ID NO: 1493484 - DNA, 15 bp, Homo sapiens
gaggaacccggtcca

SEQ ID NO: 1493485 - DNA, 15 bp, Homo sapiens
ggaggaacccggtcc

SEQ ID NO: 1493486 - DNA, 15 bp, Homo sapiens
gggaggaacccggtc

SEQ ID NO: 1493487 - DNA, 15 bp, Homo sapiens
ggggaggaacccggt

SEQ ID NO: 1493488 - DNA, 15 bp, Homo sapiens
gggggaggaacccgg

SEQ ID NO: 1493489 - DNA, 15 bp, Homo sapiens
agggggaggaacccg

SEQ ID NO: 1493490 - DNA, 15 bp, Homo sapiens
cagggggaggaaccc

SEQ ID NO: 1493491 - DNA, 15 bp, Homo sapiens
ccagggggaggaacc

SEQ ID NO: 1493492 - DNA, 15 bp, Homo sapiens
cccagggggaggaac

SEQ ID NO: 1493493 - DNA, 15 bp, Homo sapiens
gcccagggggaggaa

SEQ ID NO: 1493494 - DNA, 15 bp, Homo sapiens
tgcccagggggagga

SEQ ID NO: 1493495 - DNA, 15 bp, Homo sapiens
ctgcccagggggagg

SEQ ID NO: 1493496 - DNA, 15 bp, Homo sapiens
cctgcccagggggag

SEQ ID NO: 1493497 - DNA, 15 bp, Homo sapiens
ccctgcccaggggga

SEQ ID NO: 1493498 - DNA, 15 bp, Homo sapiens
gccctgcccaggggg

SEQ ID NO: 1493499 - DNA, 15 bp, Homo sapiens
ggccctgcccagggg

SEQ ID NO: 1493500 - DNA, 15 bp, Homo sapiens
tggccctgcccaggg

SEQ ID NO: 1493501 - DNA, 15 bp, Homo sapiens
atggccctgcccagg

SEQ ID NO: 1493502 - DNA, 15 bp, Homo sapiens
catggccctgcccag

SEQ ID NO: 1493503 - DNA, 15 bp, Homo sapiens
ccatggccctgccca

SEQ ID NO: 1493504 - DNA, 15 bp, Homo sapiens
accatggccctgccc

SEQ ID NO: 1493505 - DNA, 15 bp, Homo sapiens
taccatggccctgcc

SEQ ID NO: 1493506 - DNA, 15 bp, Homo sapiens
gtaccatggccctgc

SEQ ID NO: 1493507 - DNA, 15 bp, Homo sapiens
agtaccatggccctg

SEQ ID NO: 1493508 - DNA, 15 bp, Homo sapiens
gagtaccatggccct

SEQ ID NO: 1493509 - DNA, 15 bp, Homo sapiens
tgagtaccatggccc

SEQ ID NO: 1493510 - DNA, 15 bp, Homo sapiens
gtgagtaccatggcc

SEQ ID NO: 1493511 - DNA, 15 bp, Homo sapiens
agtgagtaccatggc

SEQ ID NO: 1493512 - DNA, 15 bp, Homo sapiens
gagtgagtaccatgg

SEQ ID NO: 1493513 - DNA, 15 bp, Homo sapiens
agagtgagtaccatg

SEQ ID NO: 1493514 - DNA, 15 bp, Homo sapiens
aagagtgagtaccat

SEQ ID NO: 1493515 - DNA, 15 bp, Homo sapiens
caagagtgagtacca

SEQ ID NO: 1493516 - DNA, 15 bp, Homo sapiens
ccaagagtgagtacc

SEQ ID NO: 1493517 - DNA, 15 bp, Homo sapiens
accaagagtgagtac

SEQ ID NO: 1493518 - DNA, 15 bp, Homo sapiens
aaccaagagtgagta

SEQ ID NO: 1493519 - DNA, 15 bp, Homo sapiens
gaaccaagagtgagt

SEQ ID NO: 1493520 - DNA, 15 bp, Homo sapiens
ggaaccaagagtgag

SEQ ID NO: 1493521 - DNA, 15 bp, Homo sapiens
tggaaccaagagtga

SEQ ID NO: 1493522 - DNA, 15 bp, Homo sapiens
atggaaccaagagtg

SEQ ID NO: 1493523 - DNA, 15 bp, Homo sapiens
catggaaccaagagt

SEQ ID NO: 1493524 - DNA, 15 bp, Homo sapiens
acatggaaccaagag

SEQ ID NO: 1493525 - DNA, 15 bp, Homo sapiens
aacatggaaccaaga

SEQ ID NO: 1493526 - DNA, 15 bp, Homo sapiens
aaacatggaaccaag

SEQ ID NO: 1493527 - DNA, 15 bp, Homo sapiens
caaacatggaaccaa

SEQ ID NO: 1493528 - DNA, 15 bp, Homo sapiens
acaaacatggaacca

SEQ ID NO: 1493529 - DNA, 15 bp, Homo sapiens
aacaaacatggaacc

SEQ ID NO: 1493530 - DNA, 15 bp, Homo sapiens
aaacaaacatggaac

SEQ ID NO: 1493531 - DNA, 15 bp, Homo sapiens
gaaacaaacatggaa

SEQ ID NO: 1493532 - DNA, 15 bp, Homo sapiens
ggaaacaaacatgga

SEQ ID NO: 1493533 - DNA, 15 bp, Homo sapiens
tggaaacaaacatgg

SEQ ID NO: 1493534 - DNA, 15 bp, Homo sapiens
ctggaaacaaacatg

SEQ ID NO: 1493535 - DNA, 15 bp, Homo sapiens
gctggaaacaaacat

SEQ ID NO: 1493536 - DNA, 15 bp, Homo sapiens
ggctggaaacaaaca

SEQ ID NO: 1493537 - DNA, 15 bp, Homo sapiens
aggctggaaacaaac

SEQ ID NO: 1493538 - DNA, 15 bp, Homo sapiens
aaggctggaaacaaa

SEQ ID NO: 1493539 - DNA, 15 bp, Homo sapiens
caaggctggaaacaa

SEQ ID NO: 1493540 - DNA, 15 bp, Homo sapiens
ccaaggctggaaaca

SEQ ID NO: 1493541 - DNA, 15 bp, Homo sapiens
cccaaggctggaaac

SEQ ID NO: 1493542 - DNA, 15 bp, Homo sapiens
gcccaaggctggaaa

SEQ ID NO: 1493543 - DNA, 15 bp, Homo sapiens
tgcccaaggctggaa

SEQ ID NO: 1493544 - DNA, 15 bp, Homo sapiens
atgcccaaggctgga

SEQ ID NO: 1493545 - DNA, 15 bp, Homo sapiens
tatgcccaaggctgg

SEQ ID NO: 1493546 - DNA, 15 bp, Homo sapiens
ctatgcccaaggctg

SEQ ID NO: 1493547 - DNA, 15 bp, Homo sapiens
actatgcccaaggct

SEQ ID NO: 1493548 - DNA, 15 bp, Homo sapiens
gactatgcccaaggc

SEQ ID NO: 1493549 - DNA, 15 bp, Homo sapiens
tgactatgcccaagg

SEQ ID NO: 1493550 - DNA, 15 bp, Homo sapiens
ctgactatgcccaag

SEQ ID NO: 1493551 - DNA, 15 bp, Homo sapiens
cctgactatgcccaa

SEQ ID NO: 1493552 - DNA, 15 bp, Homo sapiens
ccctgactatgccca

SEQ ID NO: 1493553 - DNA, 15 bp, Homo sapiens
tccctgactatgccc

SEQ ID NO: 1493554 - DNA, 15 bp, Homo sapiens
gtccctgactatgcc

SEQ ID NO: 1493555 - DNA, 15 bp, Homo sapiens
agtccctgactatgc

SEQ ID NO: 1493556 - DNA, 15 bp, Homo sapiens
gagtccctgactatg

SEQ ID NO: 1493557 - DNA, 15 bp, Homo sapiens
agagtccctgactat

SEQ ID NO: 1493558 - DNA, 15 bp, Homo sapiens
gagagtccctgacta

SEQ ID NO: 1493559 - DNA, 15 bp, Homo sapiens
cgagagtccctgact

SEQ ID NO: 1493560 - DNA, 15 bp, Homo sapiens
acgagagtccctgac

SEQ ID NO: 1493561 - DNA, 15 bp, Homo sapiens
cacgagagtccctga

SEQ ID NO: 1493562 - DNA, 15 bp, Homo sapiens
ccacgagagtccctg

SEQ ID NO: 1493563 - DNA, 15 bp, Homo sapiens
cccacgagagtccct

SEQ ID NO: 1493564 - DNA, 15 bp, Homo sapiens
tcccacgagagtccc

SEQ ID NO: 1493565 - DNA, 15 bp, Homo sapiens
gtcccacgagagtcc

SEQ ID NO: 1493566 - DNA, 15 bp, Homo sapiens
ggtcccacgagagtc

SEQ ID NO: 1493567 - DNA, 15 bp, Homo sapiens
gggtcccacgagagt

SEQ ID NO: 1493568 - DNA, 15 bp, Homo sapiens
ggggtcccacgagag

SEQ ID NO: 1493569 - DNA, 15 bp, Homo sapiens
gggggtcccacgaga

SEQ ID NO: 1493570 - DNA, 15 bp, Homo sapiens
ggggggtcccacgag

SEQ ID NO: 1493571 - DNA, 15 bp, Homo sapiens
cggggggtcccacga

SEQ ID NO: 1493572 - DNA, 15 bp, Homo sapiens
tcggggggtcccacg

SEQ ID NO: 1493573 - DNA, 15 bp, Homo sapiens
ctcggggggtcccac

SEQ ID NO: 1493574 - DNA, 15 bp, Homo sapiens
actcggggggtccca

SEQ ID NO: 1493575 - DNA, 15 bp, Homo sapiens
tactcggggggtccc

SEQ ID NO: 1493576 - DNA, 15 bp, Homo sapiens
ctactcggggggtcc

SEQ ID NO: 1493577 - DNA, 15 bp, Homo sapiens
tctactcggggggtc

SEQ ID NO: 1493578 - DNA, 15 bp, Homo sapiens
ttctactcggggggt

SEQ ID NO: 1493579 - DNA, 15 bp, Homo sapiens
tttctactcgggggg

SEQ ID NO: 1493580 - DNA, 15 bp, Homo sapiens
gtttctactcggggg

SEQ ID NO: 1493581 - DNA, 15 bp, Homo sapiens
tgtttctactcgggg

SEQ ID NO: 1493582 - DNA, 15 bp, Homo sapiens
gtgtttctactcggg

SEQ ID NO: 1493583 - DNA, 15 bp, Homo sapiens
tgtgtttctactcgg

SEQ ID NO: 1493584 - DNA, 15 bp, Homo sapiens
ctgtgtttctactcg

SEQ ID NO: 1493585 - DNA, 15 bp, Homo sapiens
tctgtgtttctactc

SEQ ID NO: 1493586 - DNA, 15 bp, Homo sapiens
atctgtgtttctact

SEQ ID NO: 1493587 - DNA, 15 bp, Homo sapiens
catctgtgtttctac

SEQ ID NO: 1493588 - DNA, 15 bp, Homo sapiens
acatctgtgtttcta

SEQ ID NO: 1493589 - DNA, 15 bp, Homo sapiens
cacatctgtgtttct

SEQ ID NO: 1493590 - DNA, 15 bp, Homo sapiens
acacatctgtgtttc

SEQ ID NO: 1493591 - DNA, 15 bp, Homo sapiens
gacacatctgtgttt

SEQ ID NO: 1493592 - DNA, 15 bp, Homo sapiens
agacacatctgtgtt

SEQ ID NO: 1493593 - DNA, 15 bp, Homo sapiens
gagacacatctgtgt

SEQ ID NO: 1493594 - DNA, 15 bp, Homo sapiens
ggagacacatctgtg

SEQ ID NO: 1493595 - DNA, 15 bp, Homo sapiens
gggagacacatctgt

SEQ ID NO: 1493596 - DNA, 15 bp, Homo sapiens
agggagacacatctg

SEQ ID NO: 1493597 - DNA, 15 bp, Homo sapiens
cagggagacacatct

SEQ ID NO: 1493598 - DNA, 15 bp, Homo sapiens
ccagggagacacatc

SEQ ID NO: 1493599 - DNA, 15 bp, Homo sapiens
cccagggagacacat

SEQ ID NO: 1493600 - DNA, 15 bp, Homo sapiens
acccagggagacaca

SEQ ID NO: 1493601 - DNA, 15 bp, Homo sapiens
gacccagggagacac

SEQ ID NO: 1493602 - DNA, 15 bp, Homo sapiens
ggacccagggagaca

SEQ ID NO: 1493603 - DNA, 15 bp, Homo sapiens
gggacccagggagac

SEQ ID NO: 1493604 - DNA, 15 bp, Homo sapiens
agggacccagggaga

SEQ ID NO: 1493605 - DNA, 15 bp, Homo sapiens
cagggacccagggag

SEQ ID NO: 1493606 - DNA, 15 bp, Homo sapiens
gcagggacccaggga

SEQ ID NO: 1493607 - DNA, 15 bp, Homo sapiens
ggcagggacccaggg

SEQ ID NO: 1493608 - DNA, 15 bp, Homo sapiens
tggcagggacccagg

SEQ ID NO: 1493609 - DNA, 15 bp, Homo sapiens
ctggcagggacccag

SEQ ID NO: 1493610 - DNA, 15 bp, Homo sapiens
cctggcagggaccca

SEQ ID NO: 1493611 - DNA, 15 bp, Homo sapiens
acctggcagggaccc

SEQ ID NO: 1493612 - DNA, 15 bp, Homo sapiens
gacctggcagggacc

SEQ ID NO: 1493613 - DNA, 15 bp, Homo sapiens
ggacctggcagggac

SEQ ID NO: 1493614 - DNA, 15 bp, Homo sapiens
gggacctggcaggga

SEQ ID NO: 1493615 - DNA, 15 bp, Homo sapiens
ggggacctggcaggg

SEQ ID NO: 1493616 - DNA, 15 bp, Homo sapiens
aggggacctggcagg

SEQ ID NO: 1493617 - DNA, 15 bp, Homo sapiens
gaggggacctggcag

SEQ ID NO: 1493618 - DNA, 15 bp, Homo sapiens
agaggggacctggca

SEQ ID NO: 1493619 - DNA, 15 bp, Homo sapiens
gagaggggacctggc

SEQ ID NO: 1493620 - DNA, 15 bp, Homo sapiens
tgagaggggacctgg

SEQ ID NO: 1493621 - DNA, 15 bp, Homo sapiens
ctgagaggggacctg

SEQ ID NO: 1493622 - DNA, 15 bp, Homo sapiens
gctgagaggggacct

SEQ ID NO: 1493623 - DNA, 15 bp, Homo sapiens
ggctgagaggggacc

SEQ ID NO: 1493624 - DNA, 15 bp, Homo sapiens
aggctgagaggggac

SEQ ID NO: 1493625 - DNA, 15 bp, Homo sapiens
caggctgagagggga

SEQ ID NO: 1493626 - DNA, 15 bp, Homo sapiens
ccaggctgagagggg

SEQ ID NO: 1493627 - DNA, 15 bp, Homo sapiens
tccaggctgagaggg

SEQ ID NO: 1493628 - DNA, 15 bp, Homo sapiens
atccaggctgagagg

SEQ ID NO: 1493629 - DNA, 15 bp, Homo sapiens
catccaggctgagag

SEQ ID NO: 1493630 - DNA, 15 bp, Homo sapiens
ccatccaggctgaga

SEQ ID NO: 1493631 - DNA, 15 bp, Homo sapiens
gccatccaggctgag

SEQ ID NO: 1493632 - DNA, 15 bp, Homo sapiens
agccatccaggctga

SEQ ID NO: 1493633 - DNA, 15 bp, Homo sapiens
aagccatccaggctg

SEQ ID NO: 1493634 - DNA, 15 bp, Homo sapiens
gaagccatccaggct

SEQ ID NO: 1493635 - DNA, 15 bp, Homo sapiens
ggaagccatccaggc

SEQ ID NO: 1493636 - DNA, 15 bp, Homo sapiens
gggaagccatccagg

SEQ ID NO: 1493637 - DNA, 15 bp, Homo sapiens
agggaagccatccag

SEQ ID NO: 1493638 - DNA, 15 bp, Homo sapiens
gagggaagccatcca

SEQ ID NO: 1493639 - DNA, 15 bp, Homo sapiens
ggagggaagccatcc

SEQ ID NO: 1493640 - DNA, 15 bp, Homo sapiens
gggagggaagccatc

SEQ ID NO: 1493641 - DNA, 15 bp, Homo sapiens
agggagggaagccat

SEQ ID NO: 1493642 - DNA, 15 bp, Homo sapiens
gagggagggaagcca

SEQ ID NO: 1493643 - DNA, 15 bp, Homo sapiens
agagggagggaagcc

SEQ ID NO: 1493644 - DNA, 15 bp, Homo sapiens
gagagggagggaagc

SEQ ID NO: 1493645 - DNA, 15 bp, Homo sapiens
aagagagggagggaa

SEQ ID NO: 1493646 - DNA, 15 bp, Homo sapiens
aaagagagggaggga

SEQ ID NO: 1493647 - DNA, 15 bp, Homo sapiens
taaagagagggaggg

SEQ ID NO: 1493648 - DNA, 15 bp, Homo sapiens
gtaaagagagggagg

SEQ ID NO: 1493649 - DNA, 15 bp, Homo sapiens
ggtaaagagagggag

SEQ ID NO: 1493650 - DNA, 15 bp, Homo sapiens
aggtaaagagaggga

SEQ ID NO: 1493651 - DNA, 15 bp, Homo sapiens
aaggtaaagagaggg

SEQ ID NO: 1493652 - DNA, 15 bp, Homo sapiens
taaggtaaagagagg

SEQ ID NO: 1493653 - DNA, 15 bp, Homo sapiens
ataaggtaaagagag

SEQ ID NO: 1493654 - DNA, 15 bp, Homo sapiens
aataaggtaaagaga

SEQ ID NO: 1493655 - DNA, 15 bp, Homo sapiens
aaataaggtaaagag

SEQ ID NO: 1493656 - DNA, 15 bp, Homo sapiens
taaataaggtaaaga

SEQ ID NO: 1493657 - DNA, 15 bp, Homo sapiens
ataaataaggtaaag

SEQ ID NO: 1493658 - DNA, 15 bp, Homo sapiens
tataaataaggtaaa

SEQ ID NO: 1493659 - DNA, 15 bp, Homo sapiens
ctataaataaggtaa

SEQ ID NO: 1493660 - DNA, 15 bp, Homo sapiens
gctataaataaggta

SEQ ID NO: 1493661 - DNA, 15 bp, Homo sapiens
ggctataaataaggt

SEQ ID NO: 1493662 - DNA, 15 bp, Homo sapiens
gggctataaataagg

SEQ ID NO: 1493663 - DNA, 15 bp, Homo sapiens
tgggctataaataag

SEQ ID NO: 1493664 - DNA, 15 bp, Homo sapiens
cttgggctataaata

SEQ ID NO: 1493665 - DNA, 15 bp, Homo sapiens
tcttgggctataaat

SEQ ID NO: 1493666 - DNA, 15 bp, Homo sapiens
atcttgggctataaa

SEQ ID NO: 1493667 - DNA, 15 bp, Homo sapiens
aatcttgggctataa

SEQ ID NO: 1493668 - DNA, 15 bp, Homo sapiens
aaatcttgggctata

SEQ ID NO: 1493669 - DNA, 15 bp, Homo sapiens
gaaatcttgggctat

SEQ ID NO: 1493670 - DNA, 15 bp, Homo sapiens
ggaaatcttgggcta

SEQ ID NO: 1493671 - DNA, 15 bp, Homo sapiens
aggaaatcttgggct

SEQ ID NO: 1493672 - DNA, 15 bp, Homo sapiens
caggaaatcttgggc

SEQ ID NO: 1493673 - DNA, 15 bp, Homo sapiens
ccaggaaatcttggg

SEQ ID NO: 1493674 - DNA, 15 bp, Homo sapiens
accaggaaatcttgg

SEQ ID NO: 1493675 - DNA, 15 bp, Homo sapiens
aaccaggaaatcttg

SEQ ID NO: 1493676 - DNA, 15 bp, Homo sapiens
gaaccaggaaatctt

SEQ ID NO: 1493677 - DNA, 15 bp, Homo sapiens
tgaaccaggaaatct

SEQ ID NO: 1493678 - DNA, 15 bp, Homo sapiens
ttgaaccaggaaatc

SEQ ID NO: 1493679 - DNA, 15 bp, Homo sapiens
cttgaaccaggaaat

SEQ ID NO: 1493680 - DNA, 15 bp, Homo sapiens
tcttgaaccaggaaa

SEQ ID NO: 1493681 - DNA, 15 bp, Homo sapiens
ttcttgaaccaggaa

SEQ ID NO: 1493682 - DNA, 15 bp, Homo sapiens
attcttgaaccagga

SEQ ID NO: 1493683 - DNA, 15 bp, Homo sapiens
cattcttgaaccagg

SEQ ID NO: 1493684 - DNA, 15 bp, Homo sapiens
ccattcttgaaccag

SEQ ID NO: 1493685 - DNA, 15 bp, Homo sapiens
gccattcttgaacca

SEQ ID NO: 1493686 - DNA, 15 bp, Homo sapiens
ggccattcttgaacc

SEQ ID NO: 1493687 - DNA, 15 bp, Homo sapiens
aggccattcttgaac

SEQ ID NO: 1493688 - DNA, 15 bp, Homo sapiens
caggccattcttgaa

SEQ ID NO: 1493689 - DNA, 15 bp, Homo sapiens
ccaggccattcttga

SEQ ID NO: 1493690 - DNA, 15 bp, Homo sapiens
tccaggccattcttg

SEQ ID NO: 1493691 - DNA, 15 bp, Homo sapiens
gtccaggccattctt

SEQ ID NO: 1493692 - DNA, 15 bp, Homo sapiens
ggtccaggccattct

SEQ ID NO: 1493693 - DNA, 15 bp, Homo sapiens
aggtccaggccattc

SEQ ID NO: 1493694 - DNA, 15 bp, Homo sapiens
caggtccaggccatt

SEQ ID NO: 1493695 - DNA, 15 bp, Homo sapiens
ccaggtccaggccat

SEQ ID NO: 1493696 - DNA, 15 bp, Homo sapiens
cccaggtccaggcca

SEQ ID NO: 1493697 - DNA, 15 bp, Homo sapiens
tcccaggtccaggcc

SEQ ID NO: 1493698 - DNA, 15 bp, Homo sapiens
ctcccaggtccaggc

SEQ ID NO: 1493699 - DNA, 15 bp, Homo sapiens
tctcccaggtccagg

SEQ ID NO: 1493700 - DNA, 15 bp, Homo sapiens
ttctcccaggtccag

SEQ ID NO: 1493701 - DNA, 15 bp, Homo sapiens
cttctcccaggtcca

SEQ ID NO: 1493702 - DNA, 15 bp, Homo sapiens
tcttctcccaggtcc

SEQ ID NO: 1493703 - DNA, 15 bp, Homo sapiens
gtcttctcccaggtc

SEQ ID NO: 1493704 - DNA, 15 bp, Homo sapiens
cgtcttctcccaggt

SEQ ID NO: 1493705 - DNA, 15 bp, Homo sapiens
gcgtcttctcccagg

SEQ ID NO: 1493706 - DNA, 15 bp, Homo sapiens
ggcgtcttctcccag

SEQ ID NO: 1493707 - DNA, 15 bp, Homo sapiens
gggcgtcttctccca

SEQ ID NO: 1493708 - DNA, 15 bp, Homo sapiens
cgggcgtcttctccc

SEQ ID NO: 1493709 - DNA, 15 bp, Homo sapiens
gcgggcgtcttctcc

SEQ ID NO: 1493710 - DNA, 15 bp, Homo sapiens
agcgggcgtcttctc

SEQ ID NO: 1493711 - DNA, 15 bp, Homo sapiens
aagcgggcgtcttct

SEQ ID NO: 1493712 - DNA, 15 bp, Homo sapiens
gaagcgggcgtcttc

SEQ ID NO: 1493713 - DNA, 15 bp, Homo sapiens
ggaagcgggcgtctt

SEQ ID NO: 1493714 - DNA, 15 bp, Homo sapiens
cggaagcgggcgtct

SEQ ID NO: 1493715 - DNA, 15 bp, Homo sapiens
gcggaagcgggcgtc

SEQ ID NO: 1493716 - DNA, 15 bp, Homo sapiens
tgcggaagcgggcgt

SEQ ID NO: 1493717 - DNA, 15 bp, Homo sapiens
atgcggaagcgggcg

SEQ ID NO: 1493718 - DNA, 15 bp, Homo sapiens
catgcggaagcgggc

SEQ ID NO: 1493719 - DNA, 15 bp, Homo sapiens
acatgcggaagcggg

SEQ ID NO: 1493720 - DNA, 15 bp, Homo sapiens
aacatgcggaagcgg

SEQ ID NO: 1493721 - DNA, 15 bp, Homo sapiens
gaacatgcggaagcg

SEQ ID NO: 1493722 - DNA, 15 bp, Homo sapiens
tgaacatgcggaagc

SEQ ID NO: 1493723 - DNA, 15 bp, Homo sapiens
ctgaacatgcggaag

SEQ ID NO: 1493724 - DNA, 15 bp, Homo sapiens
gctgaacatgcggaa

SEQ ID NO: 1493725 - DNA, 15 bp, Homo sapiens
tgctgaacatgcgga

SEQ ID NO: 1493726 - DNA, 15 bp, Homo sapiens
ttgctgaacatgcgg

SEQ ID NO: 1493727 - DNA, 15 bp, Homo sapiens
cttgctgaacatgcg

SEQ ID NO: 1493728 - DNA, 15 bp, Homo sapiens
gcttgctgaacatgc

SEQ ID NO: 1493729 - DNA, 15 bp, Homo sapiens
tgcttgctgaacatg

SEQ ID NO: 1493730 - DNA, 15 bp, Homo sapiens
ctgcttgctgaacat

SEQ ID NO: 1493731 - DNA, 15 bp, Homo sapiens
cctgcttgctgaaca

SEQ ID NO: 1493732 - DNA, 15 bp, Homo sapiens
ccctgcttgctgaac

SEQ ID NO: 1493733 - DNA, 15 bp, Homo sapiens
tccctgcttgctgaa

SEQ ID NO: 1493734 - DNA, 15 bp, Homo sapiens
ctccctgcttgctga

SEQ ID NO: 1493735 - DNA, 15 bp, Homo sapiens
actccctgcttgctg

SEQ ID NO: 1493736 - DNA, 15 bp, Homo sapiens
cactccctgcttgct

SEQ ID NO: 1493737 - DNA, 15 bp, Homo sapiens
acactccctgcttgc

SEQ ID NO: 1493738 - DNA, 15 bp, Homo sapiens
aacactccctgcttg

SEQ ID NO: 1493739 - DNA, 15 bp, Homo sapiens
caacactccctgctt

SEQ ID NO: 1493740 - DNA, 15 bp, Homo sapiens
tcaacactccctgct

SEQ ID NO: 1493741 - DNA, 15 bp, Homo sapiens
gtcaacactccctgc

SEQ ID NO: 1493742 - DNA, 15 bp, Homo sapiens
agtcaacactccctg

SEQ ID NO: 1493743 - DNA, 15 bp, Homo sapiens
gagtcaacactccct

SEQ ID NO: 1493744 - DNA, 15 bp, Homo sapiens
agagtcaacactccc

SEQ ID NO: 1493745 - DNA, 15 bp, Homo sapiens
cagagtcaacactcc

SEQ ID NO: 1493746 - DNA, 15 bp, Homo sapiens
ccagagtcaacactc

SEQ ID NO: 1493747 - DNA, 15 bp, Homo sapiens
tccagagtcaacact

SEQ ID NO: 1493748 - DNA, 15 bp, Homo sapiens
ctccagagtcaacac

SEQ ID NO: 1493749 - DNA, 15 bp, Homo sapiens
tctccagagtcaaca

SEQ ID NO: 1493750 - DNA, 15 bp, Homo sapiens
atctccagagtcaac

SEQ ID NO: 1493751 - DNA, 15 bp, Homo sapiens
aatctccagagtcaa

SEQ ID NO: 1493752 - DNA, 15 bp, Homo sapiens
taatctccagagtca

SEQ ID NO: 1493753 - DNA, 15 bp, Homo sapiens
ctaatctccagagtc

SEQ ID NO: 1493754 - DNA, 15 bp, Homo sapiens
tctaatctccagagt

SEQ ID NO: 1493755 - DNA, 15 bp, Homo sapiens
ttctaatctccagag

SEQ ID NO: 1493756 - DNA, 15 bp, Homo sapiens
tttctaatctccaga

SEQ ID NO: 1493757 - DNA, 15 bp, Homo sapiens
ctttctaatctccag

SEQ ID NO: 1493758 - DNA, 15 bp, Homo sapiens
gctttctaatctcca

SEQ ID NO: 1493759 - DNA, 15 bp, Homo sapiens
ggctttctaatctcc

SEQ ID NO: 1493760 - DNA, 15 bp, Homo sapiens
gggctttctaatctc

SEQ ID NO: 1493761 - DNA, 15 bp, Homo sapiens
agggctttctaatct

SEQ ID NO: 1493762 - DNA, 15 bp, Homo sapiens
cagggctttctaatc

SEQ ID NO: 1493763 - DNA, 15 bp, Homo sapiens
gcagggctttctaat

SEQ ID NO: 1493764 - DNA, 15 bp, Homo sapiens
ggcagggctttctaa

SEQ ID NO: 1493765 - DNA, 15 bp, Homo sapiens
gggcagggctttcta

SEQ ID NO: 1493766 - DNA, 15 bp, Homo sapiens
ggggcagggctttct

SEQ ID NO: 1493767 - DNA, 15 bp, Homo sapiens
aggggcagggctttc

SEQ ID NO: 1493768 - DNA, 15 bp, Homo sapiens
aaggggcagggcttt

SEQ ID NO: 1493769 - DNA, 15 bp, Homo sapiens
aaaggggcagggctt

SEQ ID NO: 1493770 - DNA, 15 bp, Homo sapiens
caaaggggcagggct

SEQ ID NO: 1493771 - DNA, 15 bp, Homo sapiens
tcaaaggggcagggc

SEQ ID NO: 1493772 - DNA, 15 bp, Homo sapiens
gtcaaaggggcaggg

SEQ ID NO: 1493773 - DNA, 15 bp, Homo sapiens
cgtcaaaggggcagg

SEQ ID NO: 1493774 - DNA, 15 bp, Homo sapiens
ccgtcaaaggggcag

SEQ ID NO: 1493775 - DNA, 15 bp, Homo sapiens
cccgtcaaaggggca

SEQ ID NO: 1493776 - DNA, 15 bp, Homo sapiens
ccccgtcaaaggggc

SEQ ID NO: 1493777 - DNA, 15 bp, Homo sapiens
cccccgtcaaagggg

SEQ ID NO: 1493778 - DNA, 15 bp, Homo sapiens
gcccccgtcaaaggg

SEQ ID NO: 1493779 - DNA, 15 bp, Homo sapiens
tgcccccgtcaaagg

SEQ ID NO: 1493780 - DNA, 15 bp, Homo sapiens
atgcccccgtcaaag

SEQ ID NO: 1493781 - DNA, 15 bp, Homo sapiens
gatgcccccgtcaaa

SEQ ID NO: 1493782 - DNA, 15 bp, Homo sapiens
agatgcccccgtcaa

SEQ ID NO: 1493783 - DNA, 15 bp, Homo sapiens
tagatgcccccgtca

SEQ ID NO: 1493784 - DNA, 15 bp, Homo sapiens
atagatgcccccgtc

SEQ ID NO: 1493785 - DNA, 15 bp, Homo sapiens
catagatgcccccgt

SEQ ID NO: 1493786 - DNA, 15 bp, Homo sapiens
acatagatgcccccg

SEQ ID NO: 1493787 - DNA, 15 bp, Homo sapiens
gacatagatgccccc

SEQ ID NO: 1493788 - DNA, 15 bp, Homo sapiens
agacatagatgcccc

SEQ ID NO: 1493789 - DNA, 15 bp, Homo sapiens
cagacatagatgccc

SEQ ID NO: 1493790 - DNA, 15 bp, Homo sapiens
gcagacatagatgcc

SEQ ID NO: 1493791 - DNA, 15 bp, Homo sapiens
tgcagacatagatgc

SEQ ID NO: 1493792 - DNA, 15 bp, Homo sapiens
ctgcagacatagatg

SEQ ID NO: 1493793 - DNA, 15 bp, Homo sapiens
cctgcagacatagat

SEQ ID NO: 1493794 - DNA, 15 bp, Homo sapiens
ccctgcagacataga

SEQ ID NO: 1493795 - DNA, 15 bp, Homo sapiens
gccctgcagacatag

SEQ ID NO: 1493796 - DNA, 15 bp, Homo sapiens
ggccctgcagacata

SEQ ID NO: 1493797 - DNA, 15 bp, Homo sapiens
tggccctgcagacat

SEQ ID NO: 1493798 - DNA, 15 bp, Homo sapiens
gtggccctgcagaca

SEQ ID NO: 1493799 - DNA, 15 bp, Homo sapiens
ggtggccctgcagac

SEQ ID NO: 1493800 - DNA, 15 bp, Homo sapiens
tggtggccctgcaga

SEQ ID NO: 1493801 - DNA, 15 bp, Homo sapiens
gaaggaccaatgtcc

SEQ ID NO: 1493802 - DNA, 15 bp, Homo sapiens
agaaggaccaatgtc

SEQ ID NO: 1493803 - DNA, 15 bp, Homo sapiens
aagaaggaccaatgt

SEQ ID NO: 1493804 - DNA, 15 bp, Homo sapiens
taagaaggaccaatg

SEQ ID NO: 1493805 - DNA, 15 bp, Homo sapiens
gtaagaaggaccaat

SEQ ID NO: 1493806 - DNA, 15 bp, Homo sapiens
tgtaagaaggaccaa

SEQ ID NO: 1493807 - DNA, 15 bp, Homo sapiens
ctgtaagaaggacca

SEQ ID NO: 1493808 - DNA, 15 bp, Homo sapiens
tctgtaagaaggacc

SEQ ID NO: 1493809 - DNA, 15 bp, Homo sapiens
atctgtaagaaggac

SEQ ID NO: 1493810 - DNA, 15 bp, Homo sapiens
catctgtaagaagga

SEQ ID NO: 1493811 - DNA, 15 bp, Homo sapiens
ccatctgtaagaagg

SEQ ID NO: 1493812 - DNA, 15 bp, Homo sapiens
tccatctgtaagaag

SEQ ID NO: 1493813 - DNA, 15 bp, Homo sapiens
ttccatctgtaagaa

SEQ ID NO: 1493814 - DNA, 15 bp, Homo sapiens
gttccatctgtaaga

SEQ ID NO: 1493815 - DNA, 15 bp, Homo sapiens
cgttccatctgtaag

SEQ ID NO: 1493816 - DNA, 15 bp, Homo sapiens
tcgttccatctgtaa

SEQ ID NO: 1493817 - DNA, 15 bp, Homo sapiens
gtcgttccatctgta

SEQ ID NO: 1493818 - DNA, 15 bp, Homo sapiens
tgtcgttccatctgt

SEQ ID NO: 1493819 - DNA, 15 bp, Homo sapiens
ctgtcgttccatctg

SEQ ID NO: 1493820 - DNA, 15 bp, Homo sapiens
cctgtcgttccatct

SEQ ID NO: 1493821 - DNA, 15 bp, Homo sapiens
ccctgtcgttccatc

SEQ ID NO: 1493822 - DNA, 15 bp, Homo sapiens
tccctgtcgttccat

SEQ ID NO: 1493823 - DNA, 15 bp, Homo sapiens
ctccctgtcgttcca

SEQ ID NO: 1493824 - DNA, 15 bp, Homo sapiens
gctccctgtcgttcc

SEQ ID NO: 1493825 - DNA, 15 bp, Homo sapiens
ggctccctgtcgttc

SEQ ID NO: 1493826 - DNA, 15 bp, Homo sapiens
aggctccctgtcgtt

SEQ ID NO: 1493827 - DNA, 15 bp, Homo sapiens
gaggctccctgtcgt

SEQ ID NO: 1493828 - DNA, 15 bp, Homo sapiens
cgaggctccctgtcg

SEQ ID NO: 1493829 - DNA, 15 bp, Homo sapiens
acgaggctccctgtc

SEQ ID NO: 1493830 - DNA, 15 bp, Homo sapiens
cacgaggctccctgt

SEQ ID NO: 1493831 - DNA, 15 bp, Homo sapiens
gcacgaggctccctg

SEQ ID NO: 1493832 - DNA, 15 bp, Homo sapiens
agcacgaggctccct

SEQ ID NO: 1493833 - DNA, 15 bp, Homo sapiens
cagcacgaggctccc

SEQ ID NO: 1493834 - DNA, 15 bp, Homo sapiens
gcagcacgaggctcc

SEQ ID NO: 1493835 - DNA, 15 bp, Homo sapiens
ggcagcacgaggctc

SEQ ID NO: 1493836 - DNA, 15 bp, Homo sapiens
cggcagcacgaggct

SEQ ID NO: 1493837 - DNA, 15 bp, Homo sapiens
gcggcagcacgaggc

SEQ ID NO: 1493838 - DNA, 15 bp, Homo sapiens
agcggcagcacgagg

SEQ ID NO: 1493839 - DNA, 15 bp, Homo sapiens
gagcggcagcacgag

SEQ ID NO: 1493840 - DNA, 15 bp, Homo sapiens
cgagcggcagcacga

SEQ ID NO: 1493841 - DNA, 15 bp, Homo sapiens
gcgagcggcagcacg

SEQ ID NO: 1493842 - DNA, 15 bp, Homo sapiens
tgcgagcggcagcac

SEQ ID NO: 1493843 - DNA, 15 bp, Homo sapiens
gtgcgagcggcagca

SEQ ID NO: 1493844 - DNA, 15 bp, Homo sapiens
ggtgcgagcggcagc

SEQ ID NO: 1493845 - DNA, 15 bp, Homo sapiens
aggtgcgagcggcag

SEQ ID NO: 1493846 - DNA, 15 bp, Homo sapiens
taggtgcgagcggca

SEQ ID NO: 1493847 - DNA, 15 bp, Homo sapiens
gtaggtgcgagcggc

SEQ ID NO: 1493848 - DNA, 15 bp, Homo sapiens
ggtaggtgcgagcgg

SEQ ID NO: 1493849 - DNA, 15 bp, Homo sapiens
aggtaggtgcgagcg

SEQ ID NO: 1493850 - DNA, 15 bp, Homo sapiens
caggtaggtgcgagc

SEQ ID NO: 1493851 - DNA, 15 bp, Homo sapiens
tcaggtaggtgcgag

SEQ ID NO: 1493852 - DNA, 15 bp, Homo sapiens
atcaggtaggtgcga

SEQ ID NO: 1493853 - DNA, 15 bp, Homo sapiens
aatcaggtaggtgcg

SEQ ID NO: 1493854 - DNA, 15 bp, Homo sapiens
caatcaggtaggtgc

SEQ ID NO: 1493855 - DNA, 15 bp, Homo sapiens
acaatcaggtaggtg

SEQ ID NO: 1493856 - DNA, 15 bp, Homo sapiens
cacaatcaggtaggt

SEQ ID NO: 1493857 - DNA, 15 bp, Homo sapiens
gcacaatcaggtagg

SEQ ID NO: 1493858 - DNA, 15 bp, Homo sapiens
tgcacaatcaggtag

SEQ ID NO: 1493859 - DNA, 15 bp, Homo sapiens
atgcacaatcaggta

SEQ ID NO: 1493860 - DNA, 15 bp, Homo sapiens
catgcacaatcaggt

SEQ ID NO: 1493861 - DNA, 15 bp, Homo sapiens
tcatgcacaatcagg

SEQ ID NO: 1493862 - DNA, 15 bp, Homo sapiens
ttcatgcacaatcag

SEQ ID NO: 1493863 - DNA, 15 bp, Homo sapiens
attcatgcacaatca

SEQ ID NO: 1493864 - DNA, 15 bp, Homo sapiens
aattcatgcacaatc

SEQ ID NO: 1493865 - DNA, 15 bp, Homo sapiens
aaattcatgcacaat

SEQ ID NO: 1493866 - DNA, 15 bp, Homo sapiens
caaattcatgcacaa

SEQ ID NO: 1493867 - DNA, 15 bp, Homo sapiens
tcaaattcatgcaca

SEQ ID NO: 1493868 - DNA, 15 bp, Homo sapiens
ctcaaattcatgcac

SEQ ID NO: 1493869 - DNA, 15 bp, Homo sapiens
cctcaaattcatgca

SEQ ID NO: 1493870 - DNA, 15 bp, Homo sapiens
acctcaaattcatgc

SEQ ID NO: 1493871 - DNA, 15 bp, Homo sapiens
aacctcaaattcatg

SEQ ID NO: 1493872 - DNA, 15 bp, Homo sapiens
caacctcaaattcat

SEQ ID NO: 1493873 - DNA, 15 bp, Homo sapiens
tcaacctcaaattca

SEQ ID NO: 1493874 - DNA, 15 bp, Homo sapiens
atcaacctcaaattc

SEQ ID NO: 1493875 - DNA, 15 bp, Homo sapiens
gatcaacctcaaatt

SEQ ID NO: 1493876 - DNA, 15 bp, Homo sapiens
ggatcaacctcaaat

SEQ ID NO: 1493877 - DNA, 15 bp, Homo sapiens
gggatcaacctcaaa

SEQ ID NO: 1493878 - DNA, 15 bp, Homo sapiens
agggatcaacctcaa

SEQ ID NO: 1493879 - DNA, 15 bp, Homo sapiens
aagggatcaacctca

SEQ ID NO: 1493880 - DNA, 15 bp, Homo sapiens
gaagggatcaacctc

SEQ ID NO: 1493881 - DNA, 15 bp, Homo sapiens
ggaagggatcaacct

SEQ ID NO: 1493882 - DNA, 15 bp, Homo sapiens
tggaagggatcaacc

SEQ ID NO: 1493883 - DNA, 15 bp, Homo sapiens
ctggaagggatcaac

SEQ ID NO: 1493884 - DNA, 15 bp, Homo sapiens
cctggaagggatcaa

SEQ ID NO: 1493885 - DNA, 15 bp, Homo sapiens
ccctggaagggatca

SEQ ID NO: 1493886 - DNA, 15 bp, Homo sapiens
accctggaagggatc

SEQ ID NO: 1493887 - DNA, 15 bp, Homo sapiens
gaccctggaagggat

SEQ ID NO: 1493888 - DNA, 15 bp, Homo sapiens
tgaccctggaaggga

SEQ ID NO: 1493889 - DNA, 15 bp, Homo sapiens
gtgaccctggaaggg

SEQ ID NO: 1493890 - DNA, 15 bp, Homo sapiens
ggtgaccctggaagg

SEQ ID NO: 1493891 - DNA, 15 bp, Homo sapiens
aggtgaccctggaag

SEQ ID NO: 1493892 - DNA, 15 bp, Homo sapiens
caggtgaccctggaa

SEQ ID NO: 1493893 - DNA, 15 bp, Homo sapiens
gcaggtgaccctgga

SEQ ID NO: 1493894 - DNA, 15 bp, Homo sapiens
tgcaggtgaccctgg

SEQ ID NO: 1493895 - DNA, 15 bp, Homo sapiens
ctgcaggtgaccctg

SEQ ID NO: 1493896 - DNA, 15 bp, Homo sapiens
gctgcaggtgaccct

SEQ ID NO: 1493897 - DNA, 15 bp, Homo sapiens
tgctgcaggtgaccc

SEQ ID NO: 1493898 - DNA, 15 bp, Homo sapiens
ctgctgcaggtgacc

SEQ ID NO: 1493899 - DNA, 15 bp, Homo sapiens
cctgctgcaggtgac

SEQ ID NO: 1493900 - DNA, 15 bp, Homo sapiens
gcctgctgcaggtga

SEQ ID NO: 1493901 - DNA, 15 bp, Homo sapiens
ggcctgctgcaggtg

SEQ ID NO: 1493902 - DNA, 15 bp, Homo sapiens
tggcctgctgcaggt

SEQ ID NO: 1493903 - DNA, 15 bp, Homo sapiens
gtggcctgctgcagg

SEQ ID NO: 1493904 - DNA, 15 bp, Homo sapiens
ggtggcctgctgcag

SEQ ID NO: 1493905 - DNA, 15 bp, Homo sapiens
gggtggcctgctgca

SEQ ID NO: 1493906 - DNA, 15 bp, Homo sapiens
agggtggcctgctgc

SEQ ID NO: 1493907 - DNA, 15 bp, Homo sapiens
gagggtggcctgctg

SEQ ID NO: 1493908 - DNA, 15 bp, Homo sapiens
tgagggtggcctgct

SEQ ID NO: 1493909 - DNA, 15 bp, Homo sapiens
gtgagggtggcctgc

SEQ ID NO: 1493910 - DNA, 15 bp, Homo sapiens
ggtgagggtggcctg

SEQ ID NO: 1493911 - DNA, 15 bp, Homo sapiens
tggtgagggtggcct

SEQ ID NO: 1493912 - DNA, 15 bp, Homo sapiens
ctggtgagggtggcc

SEQ ID NO: 1493913 - DNA, 15 bp, Homo sapiens
actggtgagggtggc

SEQ ID NO: 1493914 - DNA, 15 bp, Homo sapiens
gactggtgagggtgg

SEQ ID NO: 1493915 - DNA, 15 bp, Homo sapiens
agactggtgagggtg

SEQ ID NO: 1493916 - DNA, 15 bp, Homo sapiens
aagactggtgagggt

SEQ ID NO: 1493917 - DNA, 15 bp, Homo sapiens
gaagactggtgaggg

SEQ ID NO: 1493918 - DNA, 15 bp, Homo sapiens
tgaagactggtgagg

SEQ ID NO: 1493919 - DNA, 15 bp, Homo sapiens
ctgaagactggtgag

SEQ ID NO: 1493920 - DNA, 15 bp, Homo sapiens
cctgaagactggtga

SEQ ID NO: 1493921 - DNA, 15 bp, Homo sapiens
acctgaagactggtg

SEQ ID NO: 1493922 - DNA, 15 bp, Homo sapiens
gacctgaagactggt

SEQ ID NO: 1493923 - DNA, 15 bp, Homo sapiens
ggacctgaagactgg

SEQ ID NO: 1493924 - DNA, 15 bp, Homo sapiens
aggacctgaagactg

SEQ ID NO: 1493925 - DNA, 15 bp, Homo sapiens
caggacctgaagact

SEQ ID NO: 1493926 - DNA, 15 bp, Homo sapiens
gcaggacctgaagac

SEQ ID NO: 1493927 - DNA, 15 bp, Homo sapiens
tgcaggacctgaaga

SEQ ID NO: 1493928 - DNA, 15 bp, Homo sapiens
gtgcaggacctgaag

SEQ ID NO: 1493929 - DNA, 15 bp, Homo sapiens
tgtgcaggacctgaa

SEQ ID NO: 1493930 - DNA, 15 bp, Homo sapiens
ctgtgcaggacctga

SEQ ID NO: 1493931 - DNA, 15 bp, Homo sapiens
cctgtgcaggacctg

SEQ ID NO: 1493932 - DNA, 15 bp, Homo sapiens
ccctgtgcaggacct

SEQ ID NO: 1493933 - DNA, 15 bp, Homo sapiens
tccctgtgcaggacc

SEQ ID NO: 1493934 - DNA, 15 bp, Homo sapiens
ttccctgtgcaggac

SEQ ID NO: 1493935 - DNA, 15 bp, Homo sapiens
gttccctgtgcagga

SEQ ID NO: 1493936 - DNA, 15 bp, Homo sapiens
agttccctgtgcagg

SEQ ID NO: 1493937 - DNA, 15 bp, Homo sapiens
gagttccctgtgcag

SEQ ID NO: 1493938 - DNA, 15 bp, Homo sapiens
cgagttccctgtgca

SEQ ID NO: 1493939 - DNA, 15 bp, Homo sapiens
gcgagttccctgtgc

SEQ ID NO: 1493940 - DNA, 15 bp, Homo sapiens
ggcgagttccctgtg

SEQ ID NO: 1493941 - DNA, 15 bp, Homo sapiens
tggcgagttccctgt

SEQ ID NO: 1493942 - DNA, 15 bp, Homo sapiens
gtggcgagttccctg

SEQ ID NO: 1493943 - DNA, 15 bp, Homo sapiens
ggtggcgagttccct

SEQ ID NO: 1493944 - DNA, 15 bp, Homo sapiens
gggtggcgagttccc

SEQ ID NO: 1493945 - DNA, 15 bp, Homo sapiens
tgggtggcgagttcc

SEQ ID NO: 1493946 - DNA, 15 bp, Homo sapiens
ttgggtggcgagttc

SEQ ID NO: 1493947 - DNA, 15 bp, Homo sapiens
attgggtggcgagtt

SEQ ID NO: 1493948 - DNA, 15 bp, Homo sapiens
aattgggtggcgagt

SEQ ID NO: 1493949 - DNA, 15 bp, Homo sapiens
gaattgggtggcgag

SEQ ID NO: 1493950 - DNA, 15 bp, Homo sapiens
tgaattgggtggcga

SEQ ID NO: 1493951 - DNA, 15 bp, Homo sapiens
ctgaattgggtggcg

SEQ ID NO: 1493952 - DNA, 15 bp, Homo sapiens
cctgaattgggtggc

SEQ ID NO: 1493953 - DNA, 15 bp, Homo sapiens
acctgaattgggtgg

SEQ ID NO: 1493954 - DNA, 15 bp, Homo sapiens
gacctgaattgggtg

SEQ ID NO: 1493955 - DNA, 15 bp, Homo sapiens
ggacctgaattgggt

SEQ ID NO: 1493956 - DNA, 15 bp, Homo sapiens
aggacctgaattggg

SEQ ID NO: 1493957 - DNA, 15 bp, Homo sapiens
caggacctgaattgg

SEQ ID NO: 1493958 - DNA, 15 bp, Homo sapiens
acaggacctgaattg

SEQ ID NO: 1493959 - DNA, 15 bp, Homo sapiens
cacaggacctgaatt

SEQ ID NO: 1493960 - DNA, 15 bp, Homo sapiens
ccacaggacctgaat

SEQ ID NO: 1493961 - DNA, 15 bp, Homo sapiens
accacaggacctgaa

SEQ ID NO: 1493962 - DNA, 15 bp, Homo sapiens
caccacaggacctga

SEQ ID NO: 1493963 - DNA, 15 bp, Homo sapiens
tcaccacaggacctg

SEQ ID NO: 1493964 - DNA, 15 bp, Homo sapiens
ctcaccacaggacct

SEQ ID NO: 1493965 - DNA, 15 bp, Homo sapiens
cctcaccacaggacc

SEQ ID NO: 1493966 - DNA, 15 bp, Homo sapiens
ccctcaccacaggac

SEQ ID NO: 1493967 - DNA, 15 bp, Homo sapiens
tccctcaccacagga

SEQ ID NO: 1493968 - DNA, 15 bp, Homo sapiens
ctccctcaccacagg

SEQ ID NO: 1493969 - DNA, 15 bp, Homo sapiens
cctccctcaccacag

SEQ ID NO: 1493970 - DNA, 15 bp, Homo sapiens
ccctccctcaccaca

SEQ ID NO: 1493971 - DNA, 15 bp, Homo sapiens
cccctccctcaccac

SEQ ID NO: 1493972 - DNA, 15 bp, Homo sapiens
ccccctccctcacca

SEQ ID NO: 1493973 - DNA, 15 bp, Homo sapiens
gccccctccctcacc

SEQ ID NO: 1493974 - DNA, 15 bp, Homo sapiens
agccccctccctcac

SEQ ID NO: 1493975 - DNA, 15 bp, Homo sapiens
tagccccctccctca

SEQ ID NO: 1493976 - DNA, 15 bp, Homo sapiens
atagccccctccctc

SEQ ID NO: 1493977 - DNA, 15 bp, Homo sapiens
gatagccccctccct

SEQ ID NO: 1493978 - DNA, 15 bp, Homo sapiens
tgatagccccctccc

SEQ ID NO: 1493979 - DNA, 15 bp, Homo sapiens
ctgatagccccctcc

SEQ ID NO: 1493980 - DNA, 15 bp, Homo sapiens
gctgatagccccctc

SEQ ID NO: 1493981 - DNA, 15 bp, Homo sapiens
agctgatagccccct

SEQ ID NO: 1493982 - DNA, 15 bp, Homo sapiens
gagctgatagccccc

SEQ ID NO: 1493983 - DNA, 15 bp, Homo sapiens
tgagctgatagcccc

SEQ ID NO: 1493984 - DNA, 15 bp, Homo sapiens
gtgagctgatagccc

SEQ ID NO: 1493985 - DNA, 15 bp, Homo sapiens
agtgagctgatagcc

SEQ ID NO: 1493986 - DNA, 15 bp, Homo sapiens
cagtgagctgatagc

SEQ ID NO: 1493987 - DNA, 15 bp, Homo sapiens
ccagtgagctgatag

SEQ ID NO: 1493988 - DNA, 15 bp, Homo sapiens
accagtgagctgata

SEQ ID NO: 1493989 - DNA, 15 bp, Homo sapiens
caccagtgagctgat

SEQ ID NO: 1493990 - DNA, 15 bp, Homo sapiens
tcaccagtgagctga

SEQ ID NO: 1493991 - DNA, 15 bp, Homo sapiens
ctcaccagtgagctg

SEQ ID NO: 1493992 - DNA, 15 bp, Homo sapiens
cctcaccagtgagct

SEQ ID NO: 1493993 - DNA, 15 bp, Homo sapiens
acctcaccagtgagc

SEQ ID NO: 1493994 - DNA, 15 bp, Homo sapiens
cacctcaccagtgag

SEQ ID NO: 1493995 - DNA, 15 bp, Homo sapiens
ccacctcaccagtga

SEQ ID NO: 1493996 - DNA, 15 bp, Homo sapiens
cccacctcaccagtg

SEQ ID NO: 1493997 - DNA, 15 bp, Homo sapiens
ccccacctcaccagt

SEQ ID NO: 1493998 - DNA, 15 bp, Homo sapiens
tccccacctcaccag

SEQ ID NO: 1493999 - DNA, 15 bp, Homo sapiens
ttccccacctcacca

SEQ ID NO: 1494000 - DNA, 15 bp, Homo sapiens
attccccacctcacc

SEQ ID NO: 1494001 - DNA, 15 bp, Homo sapiens
gattccccacctcac

SEQ ID NO: 1494002 - DNA, 15 bp, Homo sapiens
ggattccccacctca

SEQ ID NO: 1494003 - DNA, 15 bp, Homo sapiens
gggattccccacctc

SEQ ID NO: 1494004 - DNA, 15 bp, Homo sapiens
tgggattccccacct

SEQ ID NO: 1494005 - DNA, 15 bp, Homo sapiens
gtgggattccccacc

SEQ ID NO: 1494006 - DNA, 15 bp, Homo sapiens
ggtgggattccccac

SEQ ID NO: 1494007 - DNA, 15 bp, Homo sapiens
gggtgggattcccca

SEQ ID NO: 1494008 - DNA, 15 bp, Homo sapiens
ggggtgggattcccc

SEQ ID NO: 1494009 - DNA, 15 bp, Homo sapiens
aggggtgggattccc

SEQ ID NO: 1494010 - DNA, 15 bp, Homo sapiens
caggggtgggattcc

SEQ ID NO: 1494011 - DNA, 15 bp, Homo sapiens
tcaggggtgggattc

SEQ ID NO: 1494012 - DNA, 15 bp, Homo sapiens
gtcaggggtgggatt

SEQ ID NO: 1494013 - DNA, 15 bp, Homo sapiens
agtcaggggtgggat

SEQ ID NO: 1494014 - DNA, 15 bp, Homo sapiens
aagtcaggggtggga

SEQ ID NO: 1494015 - DNA, 15 bp, Homo sapiens
gaagtcaggggtggg

SEQ ID NO: 1494016 - DNA, 15 bp, Homo sapiens
ggaagtcaggggtgg

SEQ ID NO: 1494017 - DNA, 15 bp, Homo sapiens
gggaagtcaggggtg

SEQ ID NO: 1494018 - DNA, 15 bp, Homo sapiens
agggaagtcaggggt

SEQ ID NO: 1494019 - DNA, 15 bp, Homo sapiens
cagggaagtcagggg

SEQ ID NO: 1494020 - DNA, 15 bp, Homo sapiens
gcagggaagtcaggg

SEQ ID NO: 1494021 - DNA, 15 bp, Homo sapiens
ggcagggaagtcagg

SEQ ID NO: 1494022 - DNA, 15 bp, Homo sapiens
tggcagggaagtcag

SEQ ID NO: 1494023 - DNA, 15 bp, Homo sapiens
ctggcagggaagtca

SEQ ID NO: 1494024 - DNA, 15 bp, Homo sapiens
cctggcagggaagtc

SEQ ID NO: 1494025 - DNA, 15 bp, Homo sapiens
gcctggcagggaagt

SEQ ID NO: 1494026 - DNA, 15 bp, Homo sapiens
ggcctggcagggaag

SEQ ID NO: 1494027 - DNA, 15 bp, Homo sapiens
gggcctggcagggaa

SEQ ID NO: 1494028 - DNA, 15 bp, Homo sapiens
ggggcctggcaggga

SEQ ID NO: 1494029 - DNA, 15 bp, Homo sapiens
aggggcctggcaggg

SEQ ID NO: 1494030 - DNA, 15 bp, Homo sapiens
caggggcctggcagg

SEQ ID NO: 1494031 - DNA, 15 bp, Homo sapiens
tcaggggcctggcag

SEQ ID NO: 1494032 - DNA, 15 bp, Homo sapiens
gtcaggggcctggca

SEQ ID NO: 1494033 - DNA, 15 bp, Homo sapiens
tgtcaggggcctggc

SEQ ID NO: 1494034 - DNA, 15 bp, Homo sapiens
gtgtcaggggcctgg

SEQ ID NO: 1494035 - DNA, 15 bp, Homo sapiens
agtgtcaggggcctg

SEQ ID NO: 1494036 - DNA, 15 bp, Homo sapiens
gagtgtcaggggcct

SEQ ID NO: 1494037 - DNA, 15 bp, Homo sapiens
tgagtgtcaggggcc

SEQ ID NO: 1494038 - DNA, 15 bp, Homo sapiens
ctgagtgtcaggggc

SEQ ID NO: 1494039 - DNA, 15 bp, Homo sapiens
tctgagtgtcagggg

SEQ ID NO: 1494040 - DNA, 15 bp, Homo sapiens
ttctgagtgtcaggg

SEQ ID NO: 1494041 - DNA, 15 bp, Homo sapiens
cttctgagtgtcagg

SEQ ID NO: 1494042 - DNA, 15 bp, Homo sapiens
ccttctgagtgtcag

SEQ ID NO: 1494043 - DNA, 15 bp, Homo sapiens
tccttctgagtgtca

SEQ ID NO: 1494044 - DNA, 15 bp, Homo sapiens
gtccttctgagtgtc

SEQ ID NO: 1494045 - DNA, 15 bp, Homo sapiens
agtccttctgagtgt

SEQ ID NO: 1494046 - DNA, 15 bp, Homo sapiens
cagtccttctgagtg

SEQ ID NO: 1494047 - DNA, 15 bp, Homo sapiens
ccagtccttctgagt

SEQ ID NO: 1494048 - DNA, 15 bp, Homo sapiens
accagtccttctgag

SEQ ID NO: 1494049 - DNA, 15 bp, Homo sapiens
taccagtccttctga

SEQ ID NO: 1494050 - DNA, 15 bp, Homo sapiens
ctaccagtccttctg

SEQ ID NO: 1494051 - DNA, 15 bp, Homo sapiens
tctaccagtccttct

SEQ ID NO: 1494052 - DNA, 15 bp, Homo sapiens
ttctaccagtccttc

SEQ ID NO: 1494053 - DNA, 15 bp, Homo sapiens
tttctaccagtcctt

SEQ ID NO: 1494054 - DNA, 15 bp, Homo sapiens
gtttctaccagtcct

SEQ ID NO: 1494055 - DNA, 15 bp, Homo sapiens
tgtttctaccagtcc

SEQ ID NO: 1494056 - DNA, 15 bp, Homo sapiens
ctgtttctaccagtc

SEQ ID NO: 1494057 - DNA, 15 bp, Homo sapiens
cctgtttctaccagt

SEQ ID NO: 1494058 - DNA, 15 bp, Homo sapiens
ccctgtttctaccag

SEQ ID NO: 1494059 - DNA, 15 bp, Homo sapiens
tccctgtttctacca

SEQ ID NO: 1494060 - DNA, 15 bp, Homo sapiens
ttccctgtttctacc

SEQ ID NO: 1494061 - DNA, 15 bp, Homo sapiens
cttccctgtttctac

SEQ ID NO: 1494062 - DNA, 15 bp, Homo sapiens
tcttccctgtttcta

SEQ ID NO: 1494063 - DNA, 15 bp, Homo sapiens
gtcttccctgtttct

SEQ ID NO: 1494064 - DNA, 15 bp, Homo sapiens
tgtcttccctgtttc

SEQ ID NO: 1494065 - DNA, 15 bp, Homo sapiens
gtgtcttccctgttt

SEQ ID NO: 1494066 - DNA, 15 bp, Homo sapiens
agtgtcttccctgtt

SEQ ID NO: 1494067 - DNA, 15 bp, Homo sapiens
gagtgtcttccctgt

SEQ ID NO: 1494068 - DNA, 15 bp, Homo sapiens
agagtgtcttccctg

SEQ ID NO: 1494069 - DNA, 15 bp, Homo sapiens
gagagtgtcttccct

SEQ ID NO: 1494070 - DNA, 15 bp, Homo sapiens
tgagagtgtcttccc

SEQ ID NO: 1494071 - DNA, 15 bp, Homo sapiens
ctgagagtgtcttcc

SEQ ID NO: 1494072 - DNA, 15 bp, Homo sapiens
cctgagagtgtcttc

SEQ ID NO: 1494073 - DNA, 15 bp, Homo sapiens
tcctgagagtgtctt

SEQ ID NO: 1494074 - DNA, 15 bp, Homo sapiens
ttcctgagagtgtct

SEQ ID NO: 1494075 - DNA, 15 bp, Homo sapiens
tttcctgagagtgtc

SEQ ID NO: 1494076 - DNA, 15 bp, Homo sapiens
ttttcctgagagtgt

SEQ ID NO: 1494077 - DNA, 15 bp, Homo sapiens
tttttcctgagagtg

SEQ ID NO: 1494078 - DNA, 15 bp, Homo sapiens
agtttttcctgagag

SEQ ID NO: 1494079 - DNA, 15 bp, Homo sapiens
gagtttttcctgaga

SEQ ID NO: 1494080 - DNA, 15 bp, Homo sapiens
agagtttttcctgag

SEQ ID NO: 1494081 - DNA, 15 bp, Homo sapiens
gagagtttttcctga

SEQ ID NO: 1494082 - DNA, 15 bp, Homo sapiens
ggagagtttttcctg

SEQ ID NO: 1494083 - DNA, 15 bp, Homo sapiens
aggagagtttttcct

SEQ ID NO: 1494084 - DNA, 15 bp, Homo sapiens
gaggagagtttttcc

SEQ ID NO: 1494085 - DNA, 15 bp, Homo sapiens
tgaggagagtttttc

SEQ ID NO: 1494086 - DNA, 15 bp, Homo sapiens
gtgaggagagttttt

SEQ ID NO: 1494087 - DNA, 15 bp, Homo sapiens
ggtgaggagagtttt

SEQ ID NO: 1494088 - DNA, 15 bp, Homo sapiens
cggtgaggagagttt

SEQ ID NO: 1494089 - DNA, 15 bp, Homo sapiens
ccggtgaggagagtt

SEQ ID NO: 1494090 - DNA, 15 bp, Homo sapiens
cccggtgaggagagt

SEQ ID NO: 1494091 - DNA, 15 bp, Homo sapiens
acccggtgaggagag

SEQ ID NO: 1494092 - DNA, 15 bp, Homo sapiens
aacccggtgaggaga

SEQ ID NO: 1494093 - DNA, 15 bp, Homo sapiens
aaacccggtgaggag

SEQ ID NO: 1494094 - DNA, 15 bp, Homo sapiens
caaacccggtgagga

SEQ ID NO: 1494095 - DNA, 15 bp, Homo sapiens
tcaaacccggtgagg

SEQ ID NO: 1494096 - DNA, 15 bp, Homo sapiens
atcaaacccggtgag

SEQ ID NO: 1494097 - DNA, 15 bp, Homo sapiens
catcaaacccggtga

SEQ ID NO: 1494098 - DNA, 15 bp, Homo sapiens
gcatcaaacccggtg

SEQ ID NO: 1494099 - DNA, 15 bp, Homo sapiens
agcatcaaacccggt

SEQ ID NO: 1494100 - DNA, 15 bp, Homo sapiens
aagcatcaaacccgg

SEQ ID NO: 1494101 - DNA, 15 bp, Homo sapiens
aaagcatcaaacccg

SEQ ID NO: 1494102 - DNA, 15 bp, Homo sapiens
caaagcatcaaaccc

SEQ ID NO: 1494103 - DNA, 15 bp, Homo sapiens
gcaaagcatcaaacc

SEQ ID NO: 1494104 - DNA, 15 bp, Homo sapiens
agcaaagcatcaaac

SEQ ID NO: 1494105 - DNA, 15 bp, Homo sapiens
cagcaaagcatcaaa

SEQ ID NO: 1494106 - DNA, 15 bp, Homo sapiens
acagcaaagcatcaa

SEQ ID NO: 1494107 - DNA, 15 bp, Homo sapiens
gacagcaaagcatca

SEQ ID NO: 1494108 - DNA, 15 bp, Homo sapiens
cgacagcaaagcatc

SEQ ID NO: 1494109 - DNA, 15 bp, Homo sapiens
ccgacagcaaagcat

SEQ ID NO: 1494110 - DNA, 15 bp, Homo sapiens
cccgacagcaaagca

SEQ ID NO: 1494111 - DNA, 15 bp, Homo sapiens
gcccgacagcaaagc

SEQ ID NO: 1494112 - DNA, 15 bp, Homo sapiens
cgcccgacagcaaag

SEQ ID NO: 1494113 - DNA, 15 bp, Homo sapiens
ccgcccgacagcaaa

SEQ ID NO: 1494114 - DNA, 15 bp, Homo sapiens
gccgcccgacagcaa

SEQ ID NO: 1494115 - DNA, 15 bp, Homo sapiens
tgccgcccgacagca

SEQ ID NO: 1494116 - DNA, 15 bp, Homo sapiens
ctgccgcccgacagc

SEQ ID NO: 1494117 - DNA, 15 bp, Homo sapiens
gctgccgcccgacag

SEQ ID NO: 1494118 - DNA, 15 bp, Homo sapiens
cgctgccgcccgaca

SEQ ID NO: 1494119 - DNA, 15 bp, Homo sapiens
gcgctgccgcccgac

SEQ ID NO: 1494120 - DNA, 15 bp, Homo sapiens
cgcgctgccgcccga

SEQ ID NO: 1494121 - DNA, 15 bp, Homo sapiens
gcgcgctgccgcccg

SEQ ID NO: 1494122 - DNA, 15 bp, Homo sapiens
agcgcgctgccgccc

SEQ ID NO: 1494123 - DNA, 15 bp, Homo sapiens
gagcgcgctgccgcc

SEQ ID NO: 1494124 - DNA, 15 bp, Homo sapiens
ggagcgcgctgccgc

SEQ ID NO: 1494125 - DNA, 15 bp, Homo sapiens
tggagcgcgctgccg

SEQ ID NO: 1494126 - DNA, 15 bp, Homo sapiens
atggagcgcgctgcc

SEQ ID NO: 1494127 - DNA, 15 bp, Homo sapiens
catggagcgcgctgc

SEQ ID NO: 1494128 - DNA, 15 bp, Homo sapiens
gcatggagcgcgctg

SEQ ID NO: 1494129 - DNA, 15 bp, Homo sapiens
agcatggagcgcgct

SEQ ID NO: 1494130 - DNA, 15 bp, Homo sapiens
cagcatggagcgcgc

SEQ ID NO: 1494131 - DNA, 15 bp, Homo sapiens
acagcatggagcgcg

SEQ ID NO: 1494132 - DNA, 15 bp, Homo sapiens
gacagcatggagcgc

SEQ ID NO: 1494133 - DNA, 15 bp, Homo sapiens
ggacagcatggagcg

SEQ ID NO: 1494134 - DNA, 15 bp, Homo sapiens
aggacagcatggagc

SEQ ID NO: 1494135 - DNA, 15 bp, Homo sapiens
aaggacagcatggag

SEQ ID NO: 1494136 - DNA, 15 bp, Homo sapiens
gaaggacagcatgga

SEQ ID NO: 1494137 - DNA, 15 bp, Homo sapiens
gtgaaggacagcatg

SEQ ID NO: 1494138 - DNA, 15 bp, Homo sapiens
tgtgaaggacagcat

SEQ ID NO: 1494139 - DNA, 15 bp, Homo sapiens
gtgtgaaggacagca

SEQ ID NO: 1494140 - DNA, 15 bp, Homo sapiens
tgtgtgaaggacagc

SEQ ID NO: 1494141 - DNA, 15 bp, Homo sapiens
ctgtgtgaaggacag

SEQ ID NO: 1494142 - DNA, 15 bp, Homo sapiens
actgtgtgaaggaca

SEQ ID NO: 1494143 - DNA, 15 bp, Homo sapiens
tactgtgtgaaggac

SEQ ID NO: 1494144 - DNA, 15 bp, Homo sapiens
ctactgtgtgaagga

SEQ ID NO: 1494145 - DNA, 15 bp, Homo sapiens
actactgtgtgaagg

SEQ ID NO: 1494146 - DNA, 15 bp, Homo sapiens
tactactgtgtgaag

SEQ ID NO: 1494147 - DNA, 15 bp, Homo sapiens
gtactactgtgtgaa

SEQ ID NO: 1494148 - DNA, 15 bp, Homo sapiens
tgtactactgtgtga

SEQ ID NO: 1494149 - DNA, 15 bp, Homo sapiens
ctgtactactgtgtg

SEQ ID NO: 1494150 - DNA, 15 bp, Homo sapiens
gctgtactactgtgt

SEQ ID NO: 1494151 - DNA, 15 bp, Homo sapiens
agctgtactactgtg

SEQ ID NO: 1494152 - DNA, 15 bp, Homo sapiens
gagctgtactactgt

SEQ ID NO: 1494153 - DNA, 15 bp, Homo sapiens
ggagctgtactactg

SEQ ID NO: 1494154 - DNA, 15 bp, Homo sapiens
gggagctgtactact

SEQ ID NO: 1494155 - DNA, 15 bp, Homo sapiens
cgggagctgtactac

SEQ ID NO: 1494156 - DNA, 15 bp, Homo sapiens
tcgggagctgtacta

SEQ ID NO: 1494157 - DNA, 15 bp, Homo sapiens
gtcgggagctgtact

SEQ ID NO: 1494158 - DNA, 15 bp, Homo sapiens
tgtcgggagctgtac

SEQ ID NO: 1494159 - DNA, 15 bp, Homo sapiens
gtgtcgggagctgta

SEQ ID NO: 1494160 - DNA, 15 bp, Homo sapiens
agtgtcgggagctgt

SEQ ID NO: 1494161 - DNA, 15 bp, Homo sapiens
cagtgtcgggagctg

SEQ ID NO: 1494162 - DNA, 15 bp, Homo sapiens
acagtgtcgggagct

SEQ ID NO: 1494163 - DNA, 15 bp, Homo sapiens
cacagtgtcgggagc

SEQ ID NO: 1494164 - DNA, 15 bp, Homo sapiens
ccacagtgtcgggag

SEQ ID NO: 1494165 - DNA, 15 bp, Homo sapiens
gccacagtgtcggga

SEQ ID NO: 1494166 - DNA, 15 bp, Homo sapiens
tgccacagtgtcggg

SEQ ID NO: 1494167 - DNA, 15 bp, Homo sapiens
gtgccacagtgtcgg

SEQ ID NO: 1494168 - DNA, 15 bp, Homo sapiens
tgtgccacagtgtcg

SEQ ID NO: 1494169 - DNA, 15 bp, Homo sapiens
ctgtgccacagtgtc

SEQ ID NO: 1494170 - DNA, 15 bp, Homo sapiens
cctgtgccacagtgt

SEQ ID NO: 1494171 - DNA, 15 bp, Homo sapiens
ccctgtgccacagtg

SEQ ID NO: 1494172 - DNA, 15 bp, Homo sapiens
cccctgtgccacagt

SEQ ID NO: 1494173 - DNA, 15 bp, Homo sapiens
ccccctgtgccacag

SEQ ID NO: 1494174 - DNA, 15 bp, Homo sapiens
tccccctgtgccaca

SEQ ID NO: 1494175 - DNA, 15 bp, Homo sapiens
ctccccctgtgccac

SEQ ID NO: 1494176 - DNA, 15 bp, Homo sapiens
tctccccctgtgcca

SEQ ID NO: 1494177 - DNA, 15 bp, Homo sapiens
ctctccccctgtgcc

SEQ ID NO: 1494178 - DNA, 15 bp, Homo sapiens
actctccccctgtgc

SEQ ID NO: 1494179 - DNA, 15 bp, Homo sapiens
cactctccccctgtg

SEQ ID NO: 1494180 - DNA, 15 bp, Homo sapiens
ccactctccccctgt

SEQ ID NO: 1494181 - DNA, 15 bp, Homo sapiens
accactctccccctg

SEQ ID NO: 1494182 - DNA, 15 bp, Homo sapiens
gaccactctccccct

SEQ ID NO: 1494183 - DNA, 15 bp, Homo sapiens
ggaccactctccccc

SEQ ID NO: 1494184 - DNA, 15 bp, Homo sapiens
gggaccactctcccc

SEQ ID NO: 1494185 - DNA, 15 bp, Homo sapiens
tgggaccactctccc

SEQ ID NO: 1494186 - DNA, 15 bp, Homo sapiens
atgggaccactctcc

SEQ ID NO: 1494187 - DNA, 15 bp, Homo sapiens
gatgggaccactctc

SEQ ID NO: 1494188 - DNA, 15 bp, Homo sapiens
tgatgggaccactct

SEQ ID NO: 1494189 - DNA, 15 bp, Homo sapiens
atgatgggaccactc

SEQ ID NO: 1494190 - DNA, 15 bp, Homo sapiens
catgatgggaccact

SEQ ID NO: 1494191 - DNA, 15 bp, Homo sapiens
tcatgatgggaccac

SEQ ID NO: 1494192 - DNA, 15 bp, Homo sapiens
ctcatgatgggacca

SEQ ID NO: 1494193 - DNA, 15 bp, Homo sapiens
cctcatgatgggacc

SEQ ID NO: 1494194 - DNA, 15 bp, Homo sapiens
ccctcatgatgggac

SEQ ID NO: 1494195 - DNA, 15 bp, Homo sapiens
gccctcatgatggga

SEQ ID NO: 1494196 - DNA, 15 bp, Homo sapiens
agccctcatgatggg

SEQ ID NO: 1494197 - DNA, 15 bp, Homo sapiens
cagccctcatgatgg

SEQ ID NO: 1494198 - DNA, 15 bp, Homo sapiens
acagccctcatgatg

SEQ ID NO: 1494199 - DNA, 15 bp, Homo sapiens
gacagccctcatgat

SEQ ID NO: 1494200 - DNA, 15 bp, Homo sapiens
ggacagccctcatga

SEQ ID NO: 1494201 - DNA, 15 bp, Homo sapiens
tggacagccctcatg

SEQ ID NO: 1494202 - DNA, 15 bp, Homo sapiens
ctggacagccctcat

SEQ ID NO: 1494203 - DNA, 15 bp, Homo sapiens
cctggacagccctca

SEQ ID NO: 1494204 - DNA, 15 bp, Homo sapiens
ccctggacagccctc

SEQ ID NO: 1494205 - DNA, 15 bp, Homo sapiens
accctggacagccct

SEQ ID NO: 1494206 - DNA, 15 bp, Homo sapiens
aaccctggacagccc

SEQ ID NO: 1494207 - DNA, 15 bp, Homo sapiens
gaaccctggacagcc

SEQ ID NO: 1494208 - DNA, 15 bp, Homo sapiens
ggaaccctggacagc

SEQ ID NO: 1494209 - DNA, 15 bp, Homo sapiens
gggaaccctggacag

SEQ ID NO: 1494210 - DNA, 15 bp, Homo sapiens
ggggaaccctggaca

SEQ ID NO: 1494211 - DNA, 15 bp, Homo sapiens
tggggaaccctggac

SEQ ID NO: 1494212 - DNA, 15 bp, Homo sapiens
gtggggaaccctgga

SEQ ID NO: 1494213 - DNA, 15 bp, Homo sapiens
ggtggggaaccctgg

SEQ ID NO: 1494214 - DNA, 15 bp, Homo sapiens
gggtggggaaccctg

SEQ ID NO: 1494215 - DNA, 15 bp, Homo sapiens
tgggtggggaaccct

SEQ ID NO: 1494216 - DNA, 15 bp, Homo sapiens
gtgggtggggaaccc

SEQ ID NO: 1494217 - DNA, 15 bp, Homo sapiens
agtgggtggggaacc

SEQ ID NO: 1494218 - DNA, 15 bp, Homo sapiens
cagtgggtggggaac

SEQ ID NO: 1494219 - DNA, 15 bp, Homo sapiens
gcagtgggtggggaa

SEQ ID NO: 1494220 - DNA, 15 bp, Homo sapiens
agcagtgggtgggga

SEQ ID NO: 1494221 - DNA, 15 bp, Homo sapiens
gagcagtgggtgggg

SEQ ID NO: 1494222 - DNA, 15 bp, Homo sapiens
agagcagtgggtggg

SEQ ID NO: 1494223 - DNA, 15 bp, Homo sapiens
tagagcagtgggtgg

SEQ ID NO: 1494224 - DNA, 15 bp, Homo sapiens
atagagcagtgggtg

SEQ ID NO: 1494225 - DNA, 15 bp, Homo sapiens
tatagagcagtgggt

SEQ ID NO: 1494226 - DNA, 15 bp, Homo sapiens
ttatagagcagtggg

SEQ ID NO: 1494227 - DNA, 15 bp, Homo sapiens
attatagagcagtgg

SEQ ID NO: 1494228 - DNA, 15 bp, Homo sapiens
cattatagagcagtg

SEQ ID NO: 1494229 - DNA, 15 bp, Homo sapiens
ccattatagagcagt

SEQ ID NO: 1494230 - DNA, 15 bp, Homo sapiens
gccattatagagcag

SEQ ID NO: 1494231 - DNA, 15 bp, Homo sapiens
ggccattatagagca

SEQ ID NO: 1494232 - DNA, 15 bp, Homo sapiens
tggccattatagagc

SEQ ID NO: 1494233 - DNA, 15 bp, Homo sapiens
gtggccattatagag

SEQ ID NO: 1494234 - DNA, 15 bp, Homo sapiens
agtggccattataga

SEQ ID NO: 1494235 - DNA, 15 bp, Homo sapiens
cagtggccattatag

SEQ ID NO: 1494236 - DNA, 15 bp, Homo sapiens
tcagtggccattata

SEQ ID NO: 1494237 - DNA, 15 bp, Homo sapiens
ttcagtggccattat

SEQ ID NO: 1494238 - DNA, 15 bp, Homo sapiens
cttcagtggccatta

SEQ ID NO: 1494239 - DNA, 15 bp, Homo sapiens
ccttcagtggccatt

SEQ ID NO: 1494240 - DNA, 15 bp, Homo sapiens
gccttcagtggccat

SEQ ID NO: 1494241 - DNA, 15 bp, Homo sapiens
agccttcagtggcca

SEQ ID NO: 1494242 - DNA, 15 bp, Homo sapiens
cagccttcagtggcc

SEQ ID NO: 1494243 - DNA, 15 bp, Homo sapiens
ccagccttcagtggc

SEQ ID NO: 1494244 - DNA, 15 bp, Homo sapiens
tccagccttcagtgg

SEQ ID NO: 1494245 - DNA, 15 bp, Homo sapiens
ctccagccttcagtg

SEQ ID NO: 1494246 - DNA, 15 bp, Homo sapiens
cctccagccttcagt

SEQ ID NO: 1494247 - DNA, 15 bp, Homo sapiens
acctccagccttcag

SEQ ID NO: 1494248 - DNA, 15 bp, Homo sapiens
aacctccagccttca

SEQ ID NO: 1494249 - DNA, 15 bp, Homo sapiens
caacctccagccttc

SEQ ID NO: 1494250 - DNA, 15 bp, Homo sapiens
tcaacctccagcctt

SEQ ID NO: 1494251 - DNA, 15 bp, Homo sapiens
ttcaacctccagcct

SEQ ID NO: 1494252 - DNA, 15 bp, Homo sapiens
cttcaacctccagcc

SEQ ID NO: 1494253 - DNA, 15 bp, Homo sapiens
acttcaacctccagc

SEQ ID NO: 1494254 - DNA, 15 bp, Homo sapiens
cacttcaacctccag

SEQ ID NO: 1494255 - DNA, 15 bp, Homo sapiens
tcacttcaacctcca

SEQ ID NO: 1494256 - DNA, 15 bp, Homo sapiens
ctcacttcaacctcc

SEQ ID NO: 1494257 - DNA, 15 bp, Homo sapiens
cctcacttcaacctc

SEQ ID NO: 1494258 - DNA, 15 bp, Homo sapiens
ccctcacttcaacct

SEQ ID NO: 1494259 - DNA, 15 bp, Homo sapiens
cccctcacttcaacc

SEQ ID NO: 1494260 - DNA, 15 bp, Homo sapiens
acccctcacttcaac

SEQ ID NO: 1494261 - DNA, 15 bp, Homo sapiens
tacccctcacttcaa

SEQ ID NO: 1494262 - DNA, 15 bp, Homo sapiens
ttacccctcacttca

SEQ ID NO: 1494263 - DNA, 15 bp, Homo sapiens
tttacccctcacttc

SEQ ID NO: 1494264 - DNA, 15 bp, Homo sapiens
ttttacccctcactt

SEQ ID NO: 1494265 - DNA, 15 bp, Homo sapiens
attttacccctcact

SEQ ID NO: 1494266 - DNA, 15 bp, Homo sapiens
aattttacccctcac

SEQ ID NO: 1494267 - DNA, 15 bp, Homo sapiens
aaattttacccctca

SEQ ID NO: 1494268 - DNA, 15 bp, Homo sapiens
aaaattttacccctc

SEQ ID NO: 1494269 - DNA, 15 bp, Homo sapiens
taaaattttacccct

SEQ ID NO: 1494270 - DNA, 15 bp, Homo sapiens
ttaaaattttacccc

SEQ ID NO: 1494271 - DNA, 15 bp, Homo sapiens
cttaaaattttaccc

SEQ ID NO: 1494272 - DNA, 15 bp, Homo sapiens
acttaaaattttacc

SEQ ID NO: 1494273 - DNA, 15 bp, Homo sapiens
tacttaaaattttac

SEQ ID NO: 1494274 - DNA, 15 bp, Homo sapiens
ctacttaaaatttta

SEQ ID NO: 1494275 - DNA, 15 bp, Homo sapiens
actacttaaaatttt

SEQ ID NO: 1494276 - DNA, 15 bp, Homo sapiens
gactacttaaaattt

SEQ ID NO: 1494277 - DNA, 15 bp, Homo sapiens
ggactacttaaaatt

SEQ ID NO: 1494278 - DNA, 15 bp, Homo sapiens
aggactacttaaaat

SEQ ID NO: 1494279 - DNA, 15 bp, Homo sapiens
gaggactacttaaaa

SEQ ID NO: 1494280 - DNA, 15 bp, Homo sapiens
ggaggactacttaaa

SEQ ID NO: 1494281 - DNA, 15 bp, Homo sapiens
aggaggactacttaa

SEQ ID NO: 1494282 - DNA, 15 bp, Homo sapiens
taggaggactactta

SEQ ID NO: 1494283 - DNA, 15 bp, Homo sapiens
ataggaggactactt

SEQ ID NO: 1494284 - DNA, 15 bp, Homo sapiens
aataggaggactact

SEQ ID NO: 1494285 - DNA, 15 bp, Homo sapiens
aaataggaggactac

SEQ ID NO: 1494286 - DNA, 15 bp, Homo sapiens
aaaataggaggacta

SEQ ID NO: 1494287 - DNA, 15 bp, Homo sapiens
aaaaataggaggact

SEQ ID NO: 1494288 - DNA, 15 bp, Homo sapiens
gaaaaataggaggac

SEQ ID NO: 1494289 - DNA, 15 bp, Homo sapiens
cgaaaaataggagga

SEQ ID NO: 1494290 - DNA, 15 bp, Homo sapiens
ccgaaaaataggagg

SEQ ID NO: 1494291 - DNA, 15 bp, Homo sapiens
tccgaaaaataggag

SEQ ID NO: 1494292 - DNA, 15 bp, Homo sapiens
atccgaaaaatagga

SEQ ID NO: 1494293 - DNA, 15 bp, Homo sapiens
catccgaaaaatagg

SEQ ID NO: 1494294 - DNA, 15 bp, Homo sapiens
acatccgaaaaatag

SEQ ID NO: 1494295 - DNA, 15 bp, Homo sapiens
gacatccgaaaaata

SEQ ID NO: 1494296 - DNA, 15 bp, Homo sapiens
agacatccgaaaaat

SEQ ID NO: 1494297 - DNA, 15 bp, Homo sapiens
aagacatccgaaaaa

SEQ ID NO: 1494298 - DNA, 15 bp, Homo sapiens
taagacatccgaaaa

SEQ ID NO: 1494299 - DNA, 15 bp, Homo sapiens
ataagacatccgaaa

SEQ ID NO: 1494300 - DNA, 15 bp, Homo sapiens
aataagacatccgaa

SEQ ID NO: 1494301 - DNA, 15 bp, Homo sapiens
gaataagacatccga

SEQ ID NO: 1494302 - DNA, 15 bp, Homo sapiens
tgaataagacatccg

SEQ ID NO: 1494303 - DNA, 15 bp, Homo sapiens
atgaataagacatcc

SEQ ID NO: 1494304 - DNA, 15 bp, Homo sapiens
aatgaataagacatc

SEQ ID NO: 1494305 - DNA, 15 bp, Homo sapiens
caatgaataagacat

SEQ ID NO: 1494306 - DNA, 15 bp, Homo sapiens
acaatgaataagaca

SEQ ID NO: 1494307 - DNA, 15 bp, Homo sapiens
aacaatgaataagac

SEQ ID NO: 1494308 - DNA, 15 bp, Homo sapiens
caacaatgaataaga

SEQ ID NO: 1494309 - DNA, 15 bp, Homo sapiens
tcaacaatgaataag

SEQ ID NO: 1494310 - DNA, 15 bp, Homo sapiens
ctcaacaatgaataa

SEQ ID NO: 1494311 - DNA, 15 bp, Homo sapiens
cctcaacaatgaata

SEQ ID NO: 1494312 - DNA, 15 bp, Homo sapiens
acctcaacaatgaat

SEQ ID NO: 1494313 - DNA, 15 bp, Homo sapiens
aacctcaacaatgaa

SEQ ID NO: 1494314 - DNA, 15 bp, Homo sapiens
taacctcaacaatga

SEQ ID NO: 1494315 - DNA, 15 bp, Homo sapiens
ataacctcaacaatg

SEQ ID NO: 1494316 - DNA, 15 bp, Homo sapiens
cataacctcaacaat

SEQ ID NO: 1494317 - DNA, 15 bp, Homo sapiens
tcataacctcaacaa

SEQ ID NO: 1494318 - DNA, 15 bp, Homo sapiens
ttcataacctcaaca

SEQ ID NO: 1494319 - DNA, 15 bp, Homo sapiens
attcataacctcaac

SEQ ID NO: 1494320 - DNA, 15 bp, Homo sapiens
cattcataacctcaa

SEQ ID NO: 1494321 - DNA, 15 bp, Homo sapiens
tcattcataacctca

SEQ ID NO: 1494322 - DNA, 15 bp, Homo sapiens
atcattcataacctc

SEQ ID NO: 1494323 - DNA, 15 bp, Homo sapiens
tatcattcataacct

SEQ ID NO: 1494324 - DNA, 15 bp, Homo sapiens
ctatcattcataacc

SEQ ID NO: 1494325 - DNA, 15 bp, Homo sapiens
tctatcattcataac

SEQ ID NO: 1494326 - DNA, 15 bp, Homo sapiens
atctatcattcataa

SEQ ID NO: 1494327 - DNA, 15 bp, Homo sapiens
gatctatcattcata

SEQ ID NO: 1494328 - DNA, 15 bp, Homo sapiens
ggatctatcattcat

SEQ ID NO: 1494329 - DNA, 15 bp, Homo sapiens
cggatctatcattca

SEQ ID NO: 1494330 - DNA, 15 bp, Homo sapiens
ccggatctatcattc

SEQ ID NO: 1494331 - DNA, 15 bp, Homo sapiens
tccggatctatcatt

SEQ ID NO: 1494332 - DNA, 15 bp, Homo sapiens
ctccggatctatcat

SEQ ID NO: 1494333 - DNA, 15 bp, Homo sapiens
gctccggatctatca

SEQ ID NO: 1494334 - DNA, 15 bp, Homo sapiens
tgctccggatctatc

SEQ ID NO: 1494335 - DNA, 15 bp, Homo sapiens
atgctccggatctat

SEQ ID NO: 1494336 - DNA, 15 bp, Homo sapiens
tatgctccggatcta

SEQ ID NO: 1494337 - DNA, 15 bp, Homo sapiens
atatgctccggatct

SEQ ID NO: 1494338 - DNA, 15 bp, Homo sapiens
catatgctccggatc

SEQ ID NO: 1494339 - DNA, 15 bp, Homo sapiens
tcatatgctccggat

SEQ ID NO: 1494340 - DNA, 15 bp, Homo sapiens
ttcatatgctccgga

SEQ ID NO: 1494341 - DNA, 15 bp, Homo sapiens
attcatatgctccgg

SEQ ID NO: 1494342 - DNA, 15 bp, Homo sapiens
tattcatatgctccg

SEQ ID NO: 1494343 - DNA, 15 bp, Homo sapiens
ctattcatatgctcc

SEQ ID NO: 1494344 - DNA, 15 bp, Homo sapiens
actattcatatgctc

SEQ ID NO: 1494345 - DNA, 15 bp, Homo sapiens
tactattcatatgct

SEQ ID NO: 1494346 - DNA, 15 bp, Homo sapiens
atactattcatatgc

SEQ ID NO: 1494347 - DNA, 15 bp, Homo sapiens
catactattcatatg

SEQ ID NO: 1494348 - DNA, 15 bp, Homo sapiens
ccatactattcatat

SEQ ID NO: 1494349 - DNA, 15 bp, Homo sapiens
gccatactattcata

SEQ ID NO: 1494350 - DNA, 15 bp, Homo sapiens
agccatactattcat

SEQ ID NO: 1494351 - DNA, 15 bp, Homo sapiens
aagccatactattca

SEQ ID NO: 1494352 - DNA, 15 bp, Homo sapiens
aaagccatactattc

SEQ ID NO: 1494353 - DNA, 15 bp, Homo sapiens
taaagccatactatt

SEQ ID NO: 1494354 - DNA, 15 bp, Homo sapiens
ttaaagccatactat

SEQ ID NO: 1494355 - DNA, 15 bp, Homo sapiens
tttaaagccatacta

SEQ ID NO: 1494356 - DNA, 15 bp, Homo sapiens
ctttaaagccatact

SEQ ID NO: 1494357 - DNA, 15 bp, Homo sapiens
tctttaaagccatac

SEQ ID NO: 1494358 - DNA, 15 bp, Homo sapiens
ttctttaaagccata

SEQ ID NO: 1494359 - DNA, 15 bp, Homo sapiens
cttctttaaagccat

SEQ ID NO: 1494360 - DNA, 15 bp, Homo sapiens
ccttctttaaagcca

SEQ ID NO: 1494361 - DNA, 15 bp, Homo sapiens
gccttctttaaagcc

SEQ ID NO: 1494362 - DNA, 15 bp, Homo sapiens
tgccttctttaaagc

SEQ ID NO: 1494363 - DNA, 15 bp, Homo sapiens
atgccttctttaaag

SEQ ID NO: 1494364 - DNA, 15 bp, Homo sapiens
catgccttctttaaa

SEQ ID NO: 1494365 - DNA, 15 bp, Homo sapiens
ccatgccttctttaa

SEQ ID NO: 1494366 - DNA, 15 bp, Homo sapiens
cccatgccttcttta

SEQ ID NO: 1494367 - DNA, 15 bp, Homo sapiens
acccatgccttcttt

SEQ ID NO: 1494368 - DNA, 15 bp, Homo sapiens
tacccatgccttctt

SEQ ID NO: 1494369 - DNA, 15 bp, Homo sapiens
gtacccatgccttct

SEQ ID NO: 1494370 - DNA, 15 bp, Homo sapiens
tgtacccatgccttc

SEQ ID NO: 1494371 - DNA, 15 bp, Homo sapiens
ctgtacccatgcctt

SEQ ID NO: 1494372 - DNA, 15 bp, Homo sapiens
tctgtacccatgcct

SEQ ID NO: 1494373 - DNA, 15 bp, Homo sapiens
atctgtacccatgcc

SEQ ID NO: 1494374 - DNA, 15 bp, Homo sapiens
catctgtacccatgc

SEQ ID NO: 1494375 - DNA, 15 bp, Homo sapiens
acatctgtacccatg

SEQ ID NO: 1494376 - DNA, 15 bp, Homo sapiens
cacatctgtacccat

SEQ ID NO: 1494377 - DNA, 15 bp, Homo sapiens
acacatctgtaccca

SEQ ID NO: 1494378 - DNA, 15 bp, Homo sapiens
tacacatctgtaccc

SEQ ID NO: 1494379 - DNA, 15 bp, Homo sapiens
ctacacatctgtacc

SEQ ID NO: 1494380 - DNA, 15 bp, Homo sapiens
cctacacatctgtac

SEQ ID NO: 1494381 - DNA, 15 bp, Homo sapiens
tcctacacatctgta

SEQ ID NO: 1494382 - DNA, 15 bp, Homo sapiens
ttcctacacatctgt

SEQ ID NO: 1494383 - DNA, 15 bp, Homo sapiens
attcctacacatctg

SEQ ID NO: 1494384 - DNA, 15 bp, Homo sapiens
cattcctacacatct

SEQ ID NO: 1494385 - DNA, 15 bp, Homo sapiens
gcattcctacacatc

SEQ ID NO: 1494386 - DNA, 15 bp, Homo sapiens
agcattcctacacat

SEQ ID NO: 1494387 - DNA, 15 bp, Homo sapiens
tagcattcctacaca

SEQ ID NO: 1494388 - DNA, 15 bp, Homo sapiens
ctagcattcctacac

SEQ ID NO: 1494389 - DNA, 15 bp, Homo sapiens
tctagcattcctaca

SEQ ID NO: 1494390 - DNA, 15 bp, Homo sapiens
atctagcattcctac

SEQ ID NO: 1494391 - DNA, 15 bp, Homo sapiens
tatctagcattccta

SEQ ID NO: 1494392 - DNA, 15 bp, Homo sapiens
atatctagcattcct

SEQ ID NO: 1494393 - DNA, 15 bp, Homo sapiens
catatctagcattcc

SEQ ID NO: 1494394 - DNA, 15 bp, Homo sapiens
ccatatctagcattc

SEQ ID NO: 1494395 - DNA, 15 bp, Homo sapiens
accatatctagcatt

SEQ ID NO: 1494396 - DNA, 15 bp, Homo sapiens
aaccatatctagcat

SEQ ID NO: 1494397 - DNA, 15 bp, Homo sapiens
caaccatatctagca

SEQ ID NO: 1494398 - DNA, 15 bp, Homo sapiens
ccaaccatatctagc

SEQ ID NO: 1494399 - DNA, 15 bp, Homo sapiens
accaaccatatctag

SEQ ID NO: 1494400 - DNA, 15 bp, Homo sapiens
aaccaaccatatcta

SEQ ID NO: 1494401 - DNA, 15 bp, Homo sapiens
taaccaaccatatct

SEQ ID NO: 1494402 - DNA, 15 bp, Homo sapiens
ttaaccaaccatatc

SEQ ID NO: 1494403 - DNA, 15 bp, Homo sapiens
attaaccaaccatat

SEQ ID NO: 1494404 - DNA, 15 bp, Homo sapiens
tattaaccaaccata

SEQ ID NO: 1494405 - DNA, 15 bp, Homo sapiens
gtattaaccaaccat

SEQ ID NO: 1494406 - DNA, 15 bp, Homo sapiens
ggtattaaccaacca

SEQ ID NO: 1494407 - DNA, 15 bp, Homo sapiens
cggtattaaccaacc

SEQ ID NO: 1494408 - DNA, 15 bp, Homo sapiens
tcggtattaaccaac

SEQ ID NO: 1494409 - DNA, 15 bp, Homo sapiens
atcggtattaaccaa

SEQ ID NO: 1494410 - DNA, 15 bp, Homo sapiens
aatcggtattaacca

SEQ ID NO: 1494411 - DNA, 15 bp, Homo sapiens
caatcggtattaacc

SEQ ID NO: 1494412 - DNA, 15 bp, Homo sapiens
acaatcggtattaac

SEQ ID NO: 1494413 - DNA, 15 bp, Homo sapiens
cacaatcggtattaa

SEQ ID NO: 1494414 - DNA, 15 bp, Homo sapiens
tcacaatcggtatta

SEQ ID NO: 1494415 - DNA, 15 bp, Homo sapiens
gtcacaatcggtatt

SEQ ID NO: 1494416 - DNA, 15 bp, Homo sapiens
agtcacaatcggtat

SEQ ID NO: 1494417 - DNA, 15 bp, Homo sapiens
tagtcacaatcggta

SEQ ID NO: 1494418 - DNA, 15 bp, Homo sapiens
gtagtcacaatcggt

SEQ ID NO: 1494419 - DNA, 15 bp, Homo sapiens
agtagtcacaatcgg

SEQ ID NO: 1494420 - DNA, 15 bp, Homo sapiens
tagtagtcacaatcg

SEQ ID NO: 1494421 - DNA, 15 bp, Homo sapiens
atagtagtcacaatc

SEQ ID NO: 1494422 - DNA, 15 bp, Homo sapiens
aatagtagtcacaat

SEQ ID NO: 1494423 - DNA, 15 bp, Homo sapiens
taatagtagtcacaa

SEQ ID NO: 1494424 - DNA, 15 bp, Homo sapiens
ctaatagtagtcaca

SEQ ID NO: 1494425 - DNA, 15 bp, Homo sapiens
cctaatagtagtcac

SEQ ID NO: 1494426 - DNA, 15 bp, Homo sapiens
gcctaatagtagtca

SEQ ID NO: 1494427 - DNA, 15 bp, Homo sapiens
ggcctaatagtagtc

SEQ ID NO: 1494428 - DNA, 15 bp, Homo sapiens
aggcctaatagtagt

SEQ ID NO: 1494429 - DNA, 15 bp, Homo sapiens
taggcctaatagtag

SEQ ID NO: 1494430 - DNA, 15 bp, Homo sapiens
ctaggcctaatagta

SEQ ID NO: 1494431 - DNA, 15 bp, Homo sapiens
actaggcctaatagt

SEQ ID NO: 1494432 - DNA, 15 bp, Homo sapiens
aactaggcctaatag

SEQ ID NO: 1494433 - DNA, 15 bp, Homo sapiens
caactaggcctaata

SEQ ID NO: 1494434 - DNA, 15 bp, Homo sapiens
ccaactaggcctaat

SEQ ID NO: 1494435 - DNA, 15 bp, Homo sapiens
gccaactaggcctaa

SEQ ID NO: 1494436 - DNA, 15 bp, Homo sapiens
agccaactaggccta

SEQ ID NO: 1494437 - DNA, 15 bp, Homo sapiens
aagccaactaggcct

SEQ ID NO: 1494438 - DNA, 15 bp, Homo sapiens
caagccaactaggcc

SEQ ID NO: 1494439 - DNA, 15 bp, Homo sapiens
tcaagccaactaggc

SEQ ID NO: 1494440 - DNA, 15 bp, Homo sapiens
gtcaagccaactagg

SEQ ID NO: 1494441 - DNA, 15 bp, Homo sapiens
tgtcaagccaactag

SEQ ID NO: 1494442 - DNA, 15 bp, Homo sapiens
ctgtcaagccaacta

SEQ ID NO: 1494443 - DNA, 15 bp, Homo sapiens
tctgtcaagccaact

SEQ ID NO: 1494444 - DNA, 15 bp, Homo sapiens
ctctgtcaagccaac

SEQ ID NO: 1494445 - DNA, 15 bp, Homo sapiens
tctctgtcaagccaa

SEQ ID NO: 1494446 - DNA, 15 bp, Homo sapiens
gtctctgtcaagcca

SEQ ID NO: 1494447 - DNA, 15 bp, Homo sapiens
tgtctctgtcaagcc

SEQ ID NO: 1494448 - DNA, 15 bp, Homo sapiens
ctgtctctgtcaagc

SEQ ID NO: 1494449 - DNA, 15 bp, Homo sapiens
gctgtctctgtcaag

SEQ ID NO: 1494450 - DNA, 15 bp, Homo sapiens
agctgtctctgtcaa

SEQ ID NO: 1494451 - DNA, 15 bp, Homo sapiens
aagctgtctctgtca

SEQ ID NO: 1494452 - DNA, 15 bp, Homo sapiens
aaagctgtctctgtc

SEQ ID NO: 1494453 - DNA, 15 bp, Homo sapiens
taaagctgtctctgt

SEQ ID NO: 1494454 - DNA, 15 bp, Homo sapiens
ctaaagctgtctctg

SEQ ID NO: 1494455 - DNA, 15 bp, Homo sapiens
cctaaagctgtctct

SEQ ID NO: 1494456 - DNA, 15 bp, Homo sapiens
acctaaagctgtctc

SEQ ID NO: 1494457 - DNA, 15 bp, Homo sapiens
tacctaaagctgtct

SEQ ID NO: 1494458 - DNA, 15 bp, Homo sapiens
gtacctaaagctgtc

SEQ ID NO: 1494459 - DNA, 15 bp, Homo sapiens
agtacctaaagctgt

SEQ ID NO: 1494460 - DNA, 15 bp, Homo sapiens
gagtacctaaagctg

SEQ ID NO: 1494461 - DNA, 15 bp, Homo sapiens
ggagtacctaaagct

SEQ ID NO: 1494462 - DNA, 15 bp, Homo sapiens
tggagtacctaaagc

SEQ ID NO: 1494463 - DNA, 15 bp, Homo sapiens
gtggagtacctaaag

SEQ ID NO: 1494464 - DNA, 15 bp, Homo sapiens
ggtggagtacctaaa

SEQ ID NO: 1494465 - DNA, 15 bp, Homo sapiens
gggtggagtacctaa

SEQ ID NO: 1494466 - DNA, 15 bp, Homo sapiens
tgggtggagtaccta

SEQ ID NO: 1494467 - DNA, 15 bp, Homo sapiens
ttgggtggagtacct

SEQ ID NO: 1494468 - DNA, 15 bp, Homo sapiens
gttgggtggagtacc

SEQ ID NO: 1494469 - DNA, 15 bp, Homo sapiens
tgttgggtggagtac

SEQ ID NO: 1494470 - DNA, 15 bp, Homo sapiens
ctgttgggtggagta

SEQ ID NO: 1494471 - DNA, 15 bp, Homo sapiens
gctgttgggtggagt

SEQ ID NO: 1494472 - DNA, 15 bp, Homo sapiens
agctgttgggtggag

SEQ ID NO: 1494473 - DNA, 15 bp, Homo sapiens
cagctgttgggtgga

SEQ ID NO: 1494474 - DNA, 15 bp, Homo sapiens
ccagctgttgggtgg

SEQ ID NO: 1494475 - DNA, 15 bp, Homo sapiens
tccagctgttgggtg

SEQ ID NO: 1494476 - DNA, 15 bp, Homo sapiens
ctccagctgttgggt

SEQ ID NO: 1494477 - DNA, 15 bp, Homo sapiens
tctccagctgttggg

SEQ ID NO: 1494478 - DNA, 15 bp, Homo sapiens
gtctccagctgttgg

SEQ ID NO: 1494479 - DNA, 15 bp, Homo sapiens
tgtctccagctgttg

SEQ ID NO: 1494480 - DNA, 15 bp, Homo sapiens
ctgtctccagctgtt

SEQ ID NO: 1494481 - DNA, 15 bp, Homo sapiens
tctgtctccagctgt

SEQ ID NO: 1494482 - DNA, 15 bp, Homo sapiens
ttctgtctccagctg

SEQ ID NO: 1494483 - DNA, 15 bp, Homo sapiens
cttctgtctccagct

SEQ ID NO: 1494484 - DNA, 15 bp, Homo sapiens
acttctgtctccagc

SEQ ID NO: 1494485 - DNA, 15 bp, Homo sapiens
cacttctgtctccag

SEQ ID NO: 1494486 - DNA, 15 bp, Homo sapiens
acacttctgtctcca

SEQ ID NO: 1494487 - DNA, 15 bp, Homo sapiens
cacacttctgtctcc

SEQ ID NO: 1494488 - DNA, 15 bp, Homo sapiens
ccacacttctgtctc

SEQ ID NO: 1494489 - DNA, 15 bp, Homo sapiens
gccacacttctgtct

SEQ ID NO: 1494490 - DNA, 15 bp, Homo sapiens
agccacacttctgtc

SEQ ID NO: 1494491 - DNA, 15 bp, Homo sapiens
gagccacacttctgt

SEQ ID NO: 1494492 - DNA, 15 bp, Homo sapiens
ggagccacacttctg

SEQ ID NO: 1494493 - DNA, 15 bp, Homo sapiens
tggagccacacttct

SEQ ID NO: 1494494 - DNA, 15 bp, Homo sapiens
ctggagccacacttc

SEQ ID NO: 1494495 - DNA, 15 bp, Homo sapiens
tctggagccacactt

SEQ ID NO: 1494496 - DNA, 15 bp, Homo sapiens
atctggagccacact

SEQ ID NO: 1494497 - DNA, 15 bp, Homo sapiens
catctggagccacac

SEQ ID NO: 1494498 - DNA, 15 bp, Homo sapiens
acatctggagccaca

SEQ ID NO: 1494499 - DNA, 15 bp, Homo sapiens
cacatctggagccac

SEQ ID NO: 1494500 - DNA, 15 bp, Homo sapiens
acacatctggagcca

SEQ ID NO: 1494501 - DNA, 15 bp, Homo sapiens
cacacatctggagcc

SEQ ID NO: 1494502 - DNA, 15 bp, Homo sapiens
acacacatctggagc

SEQ ID NO: 1494503 - DNA, 15 bp, Homo sapiens
aacacacatctggag

SEQ ID NO: 1494504 - DNA, 15 bp, Homo sapiens
aaacacacatctgga

SEQ ID NO: 1494505 - DNA, 15 bp, Homo sapiens
aaaacacacatctgg

SEQ ID NO: 1494506 - DNA, 15 bp, Homo sapiens
caaaacacacatctg

SEQ ID NO: 1494507 - DNA, 15 bp, Homo sapiens
ccaaaacacacatct

SEQ ID NO: 1494508 - DNA, 15 bp, Homo sapiens
tccaaaacacacatc

SEQ ID NO: 1494509 - DNA, 15 bp, Homo sapiens
ttccaaaacacacat

SEQ ID NO: 1494510 - DNA, 15 bp, Homo sapiens
attccaaaacacaca

SEQ ID NO: 1494511 - DNA, 15 bp, Homo sapiens
aattccaaaacacac

SEQ ID NO: 1494512 - DNA, 15 bp, Homo sapiens
aaattccaaaacaca

SEQ ID NO: 1494513 - DNA, 15 bp, Homo sapiens
aaaattccaaaacac

SEQ ID NO: 1494514 - DNA, 15 bp, Homo sapiens
taaaattccaaaaca

SEQ ID NO: 1494515 - DNA, 15 bp, Homo sapiens
ttaaaattccaaaac

SEQ ID NO: 1494516 - DNA, 15 bp, Homo sapiens
gttaaaattccaaaa

SEQ ID NO: 1494517 - DNA, 15 bp, Homo sapiens
agttaaaattccaaa

SEQ ID NO: 1494518 - DNA, 15 bp, Homo sapiens
aagttaaaattccaa

SEQ ID NO: 1494519 - DNA, 15 bp, Homo sapiens
gaagttaaaattcca

SEQ ID NO: 1494520 - DNA, 15 bp, Homo sapiens
ggaagttaaaattcc

SEQ ID NO: 1494521 - DNA, 15 bp, Homo sapiens
gggaagttaaaattc

SEQ ID NO: 1494522 - DNA, 15 bp, Homo sapiens
tgggaagttaaaatt

SEQ ID NO: 1494523 - DNA, 15 bp, Homo sapiens
ttgggaagttaaaat

SEQ ID NO: 1494524 - DNA, 15 bp, Homo sapiens
tttgggaagttaaaa

SEQ ID NO: 1494525 - DNA, 15 bp, Homo sapiens
ctttgggaagttaaa

SEQ ID NO: 1494526 - DNA, 15 bp, Homo sapiens
tctttgggaagttaa

SEQ ID NO: 1494527 - DNA, 15 bp, Homo sapiens
ctctttgggaagtta

SEQ ID NO: 1494528 - DNA, 15 bp, Homo sapiens
tctctttgggaagtt

SEQ ID NO: 1494529 - DNA, 15 bp, Homo sapiens
ttctctttgggaagt

SEQ ID NO: 1494530 - DNA, 15 bp, Homo sapiens
tttctctttgggaag

SEQ ID NO: 1494531 - DNA, 15 bp, Homo sapiens
atttctctttgggaa

SEQ ID NO: 1494532 - DNA, 15 bp, Homo sapiens
aatttctctttggga

SEQ ID NO: 1494533 - DNA, 15 bp, Homo sapiens
gaatttctctttggg

SEQ ID NO: 1494534 - DNA, 15 bp, Homo sapiens
tgaatttctctttgg

SEQ ID NO: 1494535 - DNA, 15 bp, Homo sapiens
gtgaatttctctttg

SEQ ID NO: 1494536 - DNA, 15 bp, Homo sapiens
agtgaatttctcttt

SEQ ID NO: 1494537 - DNA, 15 bp, Homo sapiens
tagtgaatttctctt

SEQ ID NO: 1494538 - DNA, 15 bp, Homo sapiens
atagtgaatttctct

SEQ ID NO: 1494539 - DNA, 15 bp, Homo sapiens
aatagtgaatttctc

SEQ ID NO: 1494540 - DNA, 15 bp, Homo sapiens
aaatagtgaatttct

SEQ ID NO: 1494541 - DNA, 15 bp, Homo sapiens
caaatagtgaatttc

SEQ ID NO: 1494542 - DNA, 15 bp, Homo sapiens
ccaaatagtgaattt

SEQ ID NO: 1494543 - DNA, 15 bp, Homo sapiens
accaaatagtgaatt

SEQ ID NO: 1494544 - DNA, 15 bp, Homo sapiens
gaccaaatagtgaat

SEQ ID NO: 1494545 - DNA, 15 bp, Homo sapiens
agaccaaatagtgaa

SEQ ID NO: 1494546 - DNA, 15 bp, Homo sapiens
aagaccaaatagtga

SEQ ID NO: 1494547 - DNA, 15 bp, Homo sapiens
gaagaccaaatagtg

SEQ ID NO: 1494548 - DNA, 15 bp, Homo sapiens
tgaagaccaaatagt

SEQ ID NO: 1494549 - DNA, 15 bp, Homo sapiens
ttgaagaccaaatag

SEQ ID NO: 1494550 - DNA, 15 bp, Homo sapiens
attgaagaccaaata

SEQ ID NO: 1494551 - DNA, 15 bp, Homo sapiens
cattgaagaccaaat

SEQ ID NO: 1494552 - DNA, 15 bp, Homo sapiens
gcattgaagaccaaa

SEQ ID NO: 1494553 - DNA, 15 bp, Homo sapiens
ggcattgaagaccaa

SEQ ID NO: 1494554 - DNA, 15 bp, Homo sapiens
aggcattgaagacca

SEQ ID NO: 1494555 - DNA, 15 bp, Homo sapiens
taggcattgaagacc

SEQ ID NO: 1494556 - DNA, 15 bp, Homo sapiens
gtaggcattgaagac

SEQ ID NO: 1494557 - DNA, 15 bp, Homo sapiens
agtaggcattgaaga

SEQ ID NO: 1494558 - DNA, 15 bp, Homo sapiens
tagtaggcattgaag

SEQ ID NO: 1494559 - DNA, 15 bp, Homo sapiens
ctagtaggcattgaa

SEQ ID NO: 1494560 - DNA, 15 bp, Homo sapiens
gctagtaggcattga

SEQ ID NO: 1494561 - DNA, 15 bp, Homo sapiens
ggctagtaggcattg

SEQ ID NO: 1494562 - DNA, 15 bp, Homo sapiens
gggctagtaggcatt

SEQ ID NO: 1494563 - DNA, 15 bp, Homo sapiens
ggggctagtaggcat

SEQ ID NO: 1494564 - DNA, 15 bp, Homo sapiens
tggggctagtaggca

SEQ ID NO: 1494565 - DNA, 15 bp, Homo sapiens
ttggggctagtaggc

SEQ ID NO: 1494566 - DNA, 15 bp, Homo sapiens
gttggggctagtagg

SEQ ID NO: 1494567 - DNA, 15 bp, Homo sapiens
ggttggggctagtag

SEQ ID NO: 1494568 - DNA, 15 bp, Homo sapiens
gggttggggctagta

SEQ ID NO: 1494569 - DNA, 15 bp, Homo sapiens
tgggttggggctagt

SEQ ID NO: 1494570 - DNA, 15 bp, Homo sapiens
ttgggttggggctag

SEQ ID NO: 1494571 - DNA, 15 bp, Homo sapiens
tttgggttggggcta

SEQ ID NO: 1494572 - DNA, 15 bp, Homo sapiens
gtttgggttggggct

SEQ ID NO: 1494573 - DNA, 15 bp, Homo sapiens
tgtttgggttggggc

SEQ ID NO: 1494574 - DNA, 15 bp, Homo sapiens
gtgtttgggttgggg

SEQ ID NO: 1494575 - DNA, 15 bp, Homo sapiens
tgtgtttgggttggg

SEQ ID NO: 1494576 - DNA, 15 bp, Homo sapiens
ctgtgtttgggttgg

SEQ ID NO: 1494577 - DNA, 15 bp, Homo sapiens
tctgtgtttgggttg

SEQ ID NO: 1494578 - DNA, 15 bp, Homo sapiens
atctgtgtttgggtt

SEQ ID NO: 1494579 - DNA, 15 bp, Homo sapiens
gatctgtgtttgggt

SEQ ID NO: 1494580 - DNA, 15 bp, Homo sapiens
ggatctgtgtttggg

SEQ ID NO: 1494581 - DNA, 15 bp, Homo sapiens
aggatctgtgtttgg

SEQ ID NO: 1494582 - DNA, 15 bp, Homo sapiens
caggatctgtgtttg

SEQ ID NO: 1494583 - DNA, 15 bp, Homo sapiens
gcaggatctgtgttt

SEQ ID NO: 1494584 - DNA, 15 bp, Homo sapiens
cgcaggatctgtgtt

SEQ ID NO: 1494585 - DNA, 15 bp, Homo sapiens
acgcaggatctgtgt

SEQ ID NO: 1494586 - DNA, 15 bp, Homo sapiens
tacgcaggatctgtg

SEQ ID NO: 1494587 - DNA, 15 bp, Homo sapiens
gtacgcaggatctgt

SEQ ID NO: 1494588 - DNA, 15 bp, Homo sapiens
ggtacgcaggatctg

SEQ ID NO: 1494589 - DNA, 15 bp, Homo sapiens
aggtacgcaggatct

SEQ ID NO: 1494590 - DNA, 15 bp, Homo sapiens
aaggtacgcaggatc

SEQ ID NO: 1494591 - DNA, 15 bp, Homo sapiens
aaaggtacgcaggat

SEQ ID NO: 1494592 - DNA, 15 bp, Homo sapiens
aaaaggtacgcagga

SEQ ID NO: 1494593 - DNA, 15 bp, Homo sapiens
aaaaaggtacgcagg

SEQ ID NO: 1494594 - DNA, 15 bp, Homo sapiens
taaaaaggtacgcag

SEQ ID NO: 1494595 - DNA, 15 bp, Homo sapiens
ctaaaaaggtacgca

SEQ ID NO: 1494596 - DNA, 15 bp, Homo sapiens
actaaaaaggtacgc

SEQ ID NO: 1494597 - DNA, 15 bp, Homo sapiens
tactaaaaaggtacg

SEQ ID NO: 1494598 - DNA, 15 bp, Homo sapiens
atactaaaaaggtac

SEQ ID NO: 1494599 - DNA, 15 bp, Homo sapiens
tatactaaaaaggta

SEQ ID NO: 1494600 - DNA, 15 bp, Homo sapiens
ctatactaaaaaggt

SEQ ID NO: 1494601 - DNA, 15 bp, Homo sapiens
tctatactaaaaagg

SEQ ID NO: 1494602 - DNA, 15 bp, Homo sapiens
ttctatactaaaaag

SEQ ID NO: 1494603 - DNA, 15 bp, Homo sapiens
gttctatactaaaaa

SEQ ID NO: 1494604 - DNA, 15 bp, Homo sapiens
agttctatactaaaa

SEQ ID NO: 1494605 - DNA, 15 bp, Homo sapiens
aagttctatactaaa

SEQ ID NO: 1494606 - DNA, 15 bp, Homo sapiens
caagttctatactaa

SEQ ID NO: 1494607 - DNA, 15 bp, Homo sapiens
acaagttctatacta

SEQ ID NO: 1494608 - DNA, 15 bp, Homo sapiens
aacaagttctatact

SEQ ID NO: 1494609 - DNA, 15 bp, Homo sapiens
caacaagttctatac

SEQ ID NO: 1494610 - DNA, 15 bp, Homo sapiens
tcaacaagttctata

SEQ ID NO: 1494611 - DNA, 15 bp, Homo sapiens
ctcaacaagttctat

SEQ ID NO: 1494612 - DNA, 15 bp, Homo sapiens
gctcaacaagttcta

SEQ ID NO: 1494613 - DNA, 15 bp, Homo sapiens
agctcaacaagttct

SEQ ID NO: 1494614 - DNA, 15 bp, Homo sapiens
cagctcaacaagttc

SEQ ID NO: 1494615 - DNA, 15 bp, Homo sapiens
ccagctcaacaagtt

SEQ ID NO: 1494616 - DNA, 15 bp, Homo sapiens
cccagctcaacaagt

SEQ ID NO: 1494617 - DNA, 15 bp, Homo sapiens
acccagctcaacaag

SEQ ID NO: 1494618 - DNA, 15 bp, Homo sapiens
gacccagctcaacaa

SEQ ID NO: 1494619 - DNA, 15 bp, Homo sapiens
agacccagctcaaca

SEQ ID NO: 1494620 - DNA, 15 bp, Homo sapiens
gagacccagctcaac

SEQ ID NO: 1494621 - DNA, 15 bp, Homo sapiens
tgagacccagctcaa

SEQ ID NO: 1494622 - DNA, 15 bp, Homo sapiens
ctgagacccagctca

SEQ ID NO: 1494623 - DNA, 15 bp, Homo sapiens
tctgagacccagctc

SEQ ID NO: 1494624 - DNA, 15 bp, Homo sapiens
ctctgagacccagct

SEQ ID NO: 1494625 - DNA, 15 bp, Homo sapiens
gctctgagacccagc

SEQ ID NO: 1494626 - DNA, 15 bp, Homo sapiens
ggctctgagacccag

SEQ ID NO: 1494627 - DNA, 15 bp, Homo sapiens
tggctctgagaccca

SEQ ID NO: 1494628 - DNA, 15 bp, Homo sapiens
atggctctgagaccc

SEQ ID NO: 1494629 - DNA, 15 bp, Homo sapiens
aatggctctgagacc

SEQ ID NO: 1494630 - DNA, 15 bp, Homo sapiens
aaatggctctgagac

SEQ ID NO: 1494631 - DNA, 15 bp, Homo sapiens
gaaatggctctgaga

SEQ ID NO: 1494632 - DNA, 15 bp, Homo sapiens
agaaatggctctgag

SEQ ID NO: 1494633 - DNA, 15 bp, Homo sapiens
tagaaatggctctga

SEQ ID NO: 1494634 - DNA, 15 bp, Homo sapiens
gtagaaatggctctg

SEQ ID NO: 1494635 - DNA, 15 bp, Homo sapiens
cgtagaaatggctct

SEQ ID NO: 1494636 - DNA, 15 bp, Homo sapiens
gcgtagaaatggctc

SEQ ID NO: 1494637 - DNA, 15 bp, Homo sapiens
ggcgtagaaatggct

SEQ ID NO: 1494638 - DNA, 15 bp, Homo sapiens
tggcgtagaaatggc

SEQ ID NO: 1494639 - DNA, 15 bp, Homo sapiens
gtggcgtagaaatgg

SEQ ID NO: 1494640 - DNA, 15 bp, Homo sapiens
tgtggcgtagaaatg

SEQ ID NO: 1494641 - DNA, 15 bp, Homo sapiens
ttgtggcgtagaaat

SEQ ID NO: 1494642 - DNA, 15 bp, Homo sapiens
cttgtggcgtagaaa

SEQ ID NO: 1494643 - DNA, 15 bp, Homo sapiens
gcttgtggcgtagaa

SEQ ID NO: 1494644 - DNA, 15 bp, Homo sapiens
tgcttgtggcgtaga

SEQ ID NO: 1494645 - DNA, 15 bp, Homo sapiens
gtgcttgtggcgtag

SEQ ID NO: 1494646 - DNA, 15 bp, Homo sapiens
tgtgcttgtggcgta

SEQ ID NO: 1494647 - DNA, 15 bp, Homo sapiens
ttgtgcttgtggcgt

SEQ ID NO: 1494648 - DNA, 15 bp, Homo sapiens
gttgtgcttgtggcg

SEQ ID NO: 1494649 - DNA, 15 bp, Homo sapiens
tgttgtgcttgtggc

SEQ ID NO: 1494650 - DNA, 15 bp, Homo sapiens
gtgttgtgcttgtgg

SEQ ID NO: 1494651 - DNA, 15 bp, Homo sapiens
ggtgttgtgcttgtg

SEQ ID NO: 1494652 - DNA, 15 bp, Homo sapiens
aggtgttgtgcttgt

SEQ ID NO: 1494653 - DNA, 15 bp, Homo sapiens
aaggtgttgtgcttg

SEQ ID NO: 1494654 - DNA, 15 bp, Homo sapiens
gaaggtgttgtgctt

SEQ ID NO: 1494655 - DNA, 15 bp, Homo sapiens
cgaaggtgttgtgct

SEQ ID NO: 1494656 - DNA, 15 bp, Homo sapiens
acgaaggtgttgtgc

SEQ ID NO: 1494657 - DNA, 15 bp, Homo sapiens
gacgaaggtgttgtg

SEQ ID NO: 1494658 - DNA, 15 bp, Homo sapiens
agacgaaggtgttgt

SEQ ID NO: 1494659 - DNA, 15 bp, Homo sapiens
aagacgaaggtgttg

SEQ ID NO: 1494660 - DNA, 15 bp, Homo sapiens
caagacgaaggtgtt

SEQ ID NO: 1494661 - DNA, 15 bp, Homo sapiens
ccaagacgaaggtgt

SEQ ID NO: 1494662 - DNA, 15 bp, Homo sapiens
cccaagacgaaggtg

SEQ ID NO: 1494663 - DNA, 15 bp, Homo sapiens
tcccaagacgaaggt

SEQ ID NO: 1494664 - DNA, 15 bp, Homo sapiens
gtcccaagacgaagg

SEQ ID NO: 1494665 - DNA, 15 bp, Homo sapiens
tgtcccaagacgaag

SEQ ID NO: 1494666 - DNA, 15 bp, Homo sapiens
ctgtcccaagacgaa

SEQ ID NO: 1494667 - DNA, 15 bp, Homo sapiens
actgtcccaagacga

SEQ ID NO: 1494668 - DNA, 15 bp, Homo sapiens
tactgtcccaagacg

SEQ ID NO: 1494669 - DNA, 15 bp, Homo sapiens
ctactgtcccaagac

SEQ ID NO: 1494670 - DNA, 15 bp, Homo sapiens
cctactgtcccaaga

SEQ ID NO: 1494671 - DNA, 15 bp, Homo sapiens
acctactgtcccaag

SEQ ID NO: 1494672 - DNA, 15 bp, Homo sapiens
gacctactgtcccaa

SEQ ID NO: 1494673 - DNA, 15 bp, Homo sapiens
tgacctactgtccca

SEQ ID NO: 1494674 - DNA, 15 bp, Homo sapiens
atgacctactgtccc

SEQ ID NO: 1494675 - DNA, 15 bp, Homo sapiens
catgacctactgtcc

SEQ ID NO: 1494676 - DNA, 15 bp, Homo sapiens
acatgacctactgtc

SEQ ID NO: 1494677 - DNA, 15 bp, Homo sapiens
aacatgacctactgt

SEQ ID NO: 1494678 - DNA, 15 bp, Homo sapiens
caacatgacctactg

SEQ ID NO: 1494679 - DNA, 15 bp, Homo sapiens
tcaacatgacctact

SEQ ID NO: 1494680 - DNA, 15 bp, Homo sapiens
atcaacatgacctac

SEQ ID NO: 1494681 - DNA, 15 bp, Homo sapiens
catcaacatgaccta

SEQ ID NO: 1494682 - DNA, 15 bp, Homo sapiens
tcatcaacatgacct

SEQ ID NO: 1494683 - DNA, 15 bp, Homo sapiens
ctcatcaacatgacc

SEQ ID NO: 1494684 - DNA, 15 bp, Homo sapiens
gctcatcaacatgac

SEQ ID NO: 1494685 - DNA, 15 bp, Homo sapiens
agctcatcaacatga

SEQ ID NO: 1494686 - DNA, 15 bp, Homo sapiens
aagctcatcaacatg

SEQ ID NO: 1494687 - DNA, 15 bp, Homo sapiens
gaagctcatcaacat

SEQ ID NO: 1494688 - DNA, 15 bp, Homo sapiens
agaagctcatcaaca

SEQ ID NO: 1494689 - DNA, 15 bp, Homo sapiens
gagaagctcatcaac

SEQ ID NO: 1494690 - DNA, 15 bp, Homo sapiens
cgagaagctcatcaa

SEQ ID NO: 1494691 - DNA, 15 bp, Homo sapiens
acgagaagctcatca

SEQ ID NO: 1494692 - DNA, 15 bp, Homo sapiens
tacgagaagctcatc

SEQ ID NO: 1494693 - DNA, 15 bp, Homo sapiens
gtacgagaagctcat

SEQ ID NO: 1494694 - DNA, 15 bp, Homo sapiens
ggtacgagaagctca

SEQ ID NO: 1494695 - DNA, 15 bp, Homo sapiens
tggtacgagaagctc

SEQ ID NO: 1494696 - DNA, 15 bp, Homo sapiens
gtggtacgagaagct

SEQ ID NO: 1494697 - DNA, 15 bp, Homo sapiens
ggtggtacgagaagc

SEQ ID NO: 1494698 - DNA, 15 bp, Homo sapiens
tggtggtacgagaag

SEQ ID NO: 1494699 - DNA, 15 bp, Homo sapiens
ctggtggtacgagaa

SEQ ID NO: 1494700 - DNA, 15 bp, Homo sapiens
gctggtggtacgaga

SEQ ID NO: 1494701 - DNA, 15 bp, Homo sapiens
cgctggtggtacgag

SEQ ID NO: 1494702 - DNA, 15 bp, Homo sapiens
gcgctggtggtacga

SEQ ID NO: 1494703 - DNA, 15 bp, Homo sapiens
agcgctggtggtacg

SEQ ID NO: 1494704 - DNA, 15 bp, Homo sapiens
gagcgctggtggtac

SEQ ID NO: 1494705 - DNA, 15 bp, Homo sapiens
tgagcgctggtggta

SEQ ID NO: 1494706 - DNA, 15 bp, Homo sapiens
atgagcgctggtggt

SEQ ID NO: 1494707 - DNA, 15 bp, Homo sapiens
tatgagcgctggtgg

SEQ ID NO: 1494708 - DNA, 15 bp, Homo sapiens
gtatgagcgctggtg

SEQ ID NO: 1494709 - DNA, 15 bp, Homo sapiens
tgtatgagcgctggt

SEQ ID NO: 1494710 - DNA, 15 bp, Homo sapiens
gtgtatgagcgctgg

SEQ ID NO: 1494711 - DNA, 15 bp, Homo sapiens
agtgtatgagcgctg

SEQ ID NO: 1494712 - DNA, 15 bp, Homo sapiens
cagtgtatgagcgct

SEQ ID NO: 1494713 - DNA, 15 bp, Homo sapiens
acagtgtatgagcgc

SEQ ID NO: 1494714 - DNA, 15 bp, Homo sapiens
aacagtgtatgagcg

SEQ ID NO: 1494715 - DNA, 15 bp, Homo sapiens
gaacagtgtatgagc

SEQ ID NO: 1494716 - DNA, 15 bp, Homo sapiens
ggaacagtgtatgag

SEQ ID NO: 1494717 - DNA, 15 bp, Homo sapiens
cggaacagtgtatga

SEQ ID NO: 1494718 - DNA, 15 bp, Homo sapiens
tcggaacagtgtatg

SEQ ID NO: 1494719 - DNA, 15 bp, Homo sapiens
atcggaacagtgtat

SEQ ID NO: 1494720 - DNA, 15 bp, Homo sapiens
catcggaacagtgta

SEQ ID NO: 1494721 - DNA, 15 bp, Homo sapiens
acatcggaacagtgt

SEQ ID NO: 1494722 - DNA, 15 bp, Homo sapiens
aacatcggaacagtg

SEQ ID NO: 1494723 - DNA, 15 bp, Homo sapiens
taacatcggaacagt

SEQ ID NO: 1494724 - DNA, 15 bp, Homo sapiens
gtaacatcggaacag

SEQ ID NO: 1494725 - DNA, 15 bp, Homo sapiens
agtaacatcggaaca

SEQ ID NO: 1494726 - DNA, 15 bp, Homo sapiens
tagtaacatcggaac

SEQ ID NO: 1494727 - DNA, 15 bp, Homo sapiens
gtagtaacatcggaa

SEQ ID NO: 1494728 - DNA, 15 bp, Homo sapiens
cgtagtaacatcgga

SEQ ID NO: 1494729 - DNA, 15 bp, Homo sapiens
gcgtagtaacatcgg

SEQ ID NO: 1494730 - DNA, 15 bp, Homo sapiens
tgcgtagtaacatcg

SEQ ID NO: 1494731 - DNA, 15 bp, Homo sapiens
ttgcgtagtaacatc

SEQ ID NO: 1494732 - DNA, 15 bp, Homo sapiens
gttgcgtagtaacat

SEQ ID NO: 1494733 - DNA, 15 bp, Homo sapiens
tgttgcgtagtaaca

SEQ ID NO: 1494734 - DNA, 15 bp, Homo sapiens
gtgttgcgtagtaac

SEQ ID NO: 1494735 - DNA, 15 bp, Homo sapiens
ggtgttgcgtagtaa

SEQ ID NO: 1494736 - DNA, 15 bp, Homo sapiens
tggtgttgcgtagta

SEQ ID NO: 1494737 - DNA, 15 bp, Homo sapiens
gtggtgttgcgtagt

SEQ ID NO: 1494738 - DNA, 15 bp, Homo sapiens
tgtggtgttgcgtag

SEQ ID NO: 1494739 - DNA, 15 bp, Homo sapiens
gtgtggtgttgcgta

SEQ ID NO: 1494740 - DNA, 15 bp, Homo sapiens
tgtgtggtgttgcgt

SEQ ID NO: 1494741 - DNA, 15 bp, Homo sapiens
ctgtgtggtgttgcg

SEQ ID NO: 1494742 - DNA, 15 bp, Homo sapiens
actgtgtggtgttgc

SEQ ID NO: 1494743 - DNA, 15 bp, Homo sapiens
gactgtgtggtgttg

SEQ ID NO: 1494744 - DNA, 15 bp, Homo sapiens
tgactgtgtggtgtt

SEQ ID NO: 1494745 - DNA, 15 bp, Homo sapiens
atgactgtgtggtgt

SEQ ID NO: 1494746 - DNA, 15 bp, Homo sapiens
gatgactgtgtggtg

SEQ ID NO: 1494747 - DNA, 15 bp, Homo sapiens
cgatgactgtgtggt

SEQ ID NO: 1494748 - DNA, 15 bp, Homo sapiens
gcgatgactgtgtgg

SEQ ID NO: 1494749 - DNA, 15 bp, Homo sapiens
tgcgatgactgtgtg

SEQ ID NO: 1494750 - DNA, 15 bp, Homo sapiens
gtgcgatgactgtgt

SEQ ID NO: 1494751 - DNA, 15 bp, Homo sapiens
tgtgcgatgactgtg

SEQ ID NO: 1494752 - DNA, 15 bp, Homo sapiens
gtgtgcgatgactgt

SEQ ID NO: 1494753 - DNA, 15 bp, Homo sapiens
ggtgtgcgatgactg

SEQ ID NO: 1494754 - DNA, 15 bp, Homo sapiens
aggtgtgcgatgact

SEQ ID NO: 1494755 - DNA, 15 bp, Homo sapiens
caggtgtgcgatgac

SEQ ID NO: 1494756 - DNA, 15 bp, Homo sapiens
ccaggtgtgcgatga

SEQ ID NO: 1494757 - DNA, 15 bp, Homo sapiens
tccaggtgtgcgatg

SEQ ID NO: 1494758 - DNA, 15 bp, Homo sapiens
ctccaggtgtgcgat

SEQ ID NO: 1494759 - DNA, 15 bp, Homo sapiens
tctccaggtgtgcga

SEQ ID NO: 1494760 - DNA, 15 bp, Homo sapiens
ttctccaggtgtgcg

SEQ ID NO: 1494761 - DNA, 15 bp, Homo sapiens
cttctccaggtgtgc

SEQ ID NO: 1494762 - DNA, 15 bp, Homo sapiens
acttctccaggtgtg

SEQ ID NO: 1494763 - DNA, 15 bp, Homo sapiens
cacttctccaggtgt

SEQ ID NO: 1494764 - DNA, 15 bp, Homo sapiens
gcacttctccaggtg

SEQ ID NO: 1494765 - DNA, 15 bp, Homo sapiens
tgcacttctccaggt

SEQ ID NO: 1494766 - DNA, 15 bp, Homo sapiens
gtgcacttctccagg

SEQ ID NO: 1494767 - DNA, 15 bp, Homo sapiens
tgtgcacttctccag

SEQ ID NO: 1494768 - DNA, 15 bp, Homo sapiens
ttgtgcacttctcca

SEQ ID NO: 1494769 - DNA, 15 bp, Homo sapiens
tttgtgcacttctcc

SEQ ID NO: 1494770 - DNA, 15 bp, Homo sapiens
ctttgtgcacttctc

SEQ ID NO: 1494771 - DNA, 15 bp, Homo sapiens
gctttgtgcacttct

SEQ ID NO: 1494772 - DNA, 15 bp, Homo sapiens
cgctttgtgcacttc

SEQ ID NO: 1494773 - DNA, 15 bp, Homo sapiens
ccgctttgtgcactt

SEQ ID NO: 1494774 - DNA, 15 bp, Homo sapiens
gccgctttgtgcact

SEQ ID NO: 1494775 - DNA, 15 bp, Homo sapiens
agccgctttgtgcac

SEQ ID NO: 1494776 - DNA, 15 bp, Homo sapiens
gagccgctttgtgca

SEQ ID NO: 1494777 - DNA, 15 bp, Homo sapiens
tgagccgctttgtgc

SEQ ID NO: 1494778 - DNA, 15 bp, Homo sapiens
ctgagccgctttgtg

SEQ ID NO: 1494779 - DNA, 15 bp, Homo sapiens
actgagccgctttgt

SEQ ID NO: 1494780 - DNA, 15 bp, Homo sapiens
cactgagccgctttg

SEQ ID NO: 1494781 - DNA, 15 bp, Homo sapiens
ccactgagccgcttt

SEQ ID NO: 1494782 - DNA, 15 bp, Homo sapiens
accactgagccgctt

SEQ ID NO: 1494783 - DNA, 15 bp, Homo sapiens
aaccactgagccgct

SEQ ID NO: 1494784 - DNA, 15 bp, Homo sapiens
gaaccactgagccgc

SEQ ID NO: 1494785 - DNA, 15 bp, Homo sapiens
ggaaccactgagccg

SEQ ID NO: 1494786 - DNA, 15 bp, Homo sapiens
aggaaccactgagcc

SEQ ID NO: 1494787 - DNA, 15 bp, Homo sapiens
caggaaccactgagc

SEQ ID NO: 1494788 - DNA, 15 bp, Homo sapiens
acaggaaccactgag

SEQ ID NO: 1494789 - DNA, 15 bp, Homo sapiens
gacaggaaccactga

SEQ ID NO: 1494790 - DNA, 15 bp, Homo sapiens
agacaggaaccactg

SEQ ID NO: 1494791 - DNA, 15 bp, Homo sapiens
gagacaggaaccact

SEQ ID NO: 1494792 - DNA, 15 bp, Homo sapiens
agagacaggaaccac

SEQ ID NO: 1494793 - DNA, 15 bp, Homo sapiens
cagagacaggaacca

SEQ ID NO: 1494794 - DNA, 15 bp, Homo sapiens
tcagagacaggaacc

SEQ ID NO: 1494795 - DNA, 15 bp, Homo sapiens
gtcagagacaggaac

SEQ ID NO: 1494796 - DNA, 15 bp, Homo sapiens
tgtcagagacaggaa

SEQ ID NO: 1494797 - DNA, 15 bp, Homo sapiens
ctgtcagagacagga

SEQ ID NO: 1494798 - DNA, 15 bp, Homo sapiens
gctgtcagagacagg

SEQ ID NO: 1494799 - DNA, 15 bp, Homo sapiens
ggctgtcagagacag

SEQ ID NO: 1494800 - DNA, 15 bp, Homo sapiens
aggctgtcagagaca

SEQ ID NO: 1494801 - DNA, 15 bp, Homo sapiens
gaggctgtcagagac

SEQ ID NO: 1494802 - DNA, 15 bp, Homo sapiens
agaggctgtcagaga

SEQ ID NO: 1494803 - DNA, 15 bp, Homo sapiens
gagaggctgtcagag

SEQ ID NO: 1494804 - DNA, 15 bp, Homo sapiens
ggagaggctgtcaga

SEQ ID NO: 1494805 - DNA, 15 bp, Homo sapiens
gggagaggctgtcag

SEQ ID NO: 1494806 - DNA, 15 bp, Homo sapiens
agggagaggctgtca

SEQ ID NO: 1494807 - DNA, 15 bp, Homo sapiens
tagggagaggctgtc

SEQ ID NO: 1494808 - DNA, 15 bp, Homo sapiens
ctagggagaggctgt

SEQ ID NO: 1494809 - DNA, 15 bp, Homo sapiens
tctagggagaggctg

SEQ ID NO: 1494810 - DNA, 15 bp, Homo sapiens
gtctagggagaggct

SEQ ID NO: 1494811 - DNA, 15 bp, Homo sapiens
agtctagggagaggc

SEQ ID NO: 1494812 - DNA, 15 bp, Homo sapiens
cagtctagggagagg

SEQ ID NO: 1494813 - DNA, 15 bp, Homo sapiens
acagtctagggagag

SEQ ID NO: 1494814 - DNA, 15 bp, Homo sapiens
aacagtctagggaga

SEQ ID NO: 1494815 - DNA, 15 bp, Homo sapiens
aaacagtctagggag

SEQ ID NO: 1494816 - DNA, 15 bp, Homo sapiens
gaaacagtctaggga

SEQ ID NO: 1494817 - DNA, 15 bp, Homo sapiens
ggaaacagtctaggg

SEQ ID NO: 1494818 - DNA, 15 bp, Homo sapiens
aggaaacagtctagg

SEQ ID NO: 1494819 - DNA, 15 bp, Homo sapiens
taggaaacagtctag

SEQ ID NO: 1494820 - DNA, 15 bp, Homo sapiens
gtaggaaacagtcta

SEQ ID NO: 1494821 - DNA, 15 bp, Homo sapiens
tgtaggaaacagtct

SEQ ID NO: 1494822 - DNA, 15 bp, Homo sapiens
ctgtaggaaacagtc

SEQ ID NO: 1494823 - DNA, 15 bp, Homo sapiens
cctgtaggaaacagt

SEQ ID NO: 1494824 - DNA, 15 bp, Homo sapiens
ccctgtaggaaacag

SEQ ID NO: 1494825 - DNA, 15 bp, Homo sapiens
tccctgtaggaaaca

SEQ ID NO: 1494826 - DNA, 15 bp, Homo sapiens
ttccctgtaggaaac

SEQ ID NO: 1494827 - DNA, 15 bp, Homo sapiens
tttccctgtaggaaa

SEQ ID NO: 1494828 - DNA, 15 bp, Homo sapiens
ctttccctgtaggaa

SEQ ID NO: 1494829 - DNA, 15 bp, Homo sapiens
cctttccctgtagga

SEQ ID NO: 1494830 - DNA, 15 bp, Homo sapiens
acctttccctgtagg

SEQ ID NO: 1494831 - DNA, 15 bp, Homo sapiens
cacctttccctgtag

SEQ ID NO: 1494832 - DNA, 15 bp, Homo sapiens
ccacctttccctgta

SEQ ID NO: 1494833 - DNA, 15 bp, Homo sapiens
accacctttccctgt

SEQ ID NO: 1494834 - DNA, 15 bp, Homo sapiens
gaccacctttccctg

SEQ ID NO: 1494835 - DNA, 15 bp, Homo sapiens
ggaccacctttccct

SEQ ID NO: 1494836 - DNA, 15 bp, Homo sapiens
aggaccacctttccc

SEQ ID NO: 1494837 - DNA, 15 bp, Homo sapiens
caggaccacctttcc

SEQ ID NO: 1494838 - DNA, 15 bp, Homo sapiens
ccaggaccacctttc

SEQ ID NO: 1494839 - DNA, 15 bp, Homo sapiens
cccaggaccaccttt

SEQ ID NO: 1494840 - DNA, 15 bp, Homo sapiens
ccccaggaccacctt

SEQ ID NO: 1494841 - DNA, 15 bp, Homo sapiens
gccccaggaccacct

SEQ ID NO: 1494842 - DNA, 15 bp, Homo sapiens
tgccccaggaccacc

SEQ ID NO: 1494843 - DNA, 15 bp, Homo sapiens
atgccccaggaccac

SEQ ID NO: 1494844 - DNA, 15 bp, Homo sapiens
gatgccccaggacca

SEQ ID NO: 1494845 - DNA, 15 bp, Homo sapiens
ggatgccccaggacc

SEQ ID NO: 1494846 - DNA, 15 bp, Homo sapiens
gggatgccccaggac

SEQ ID NO: 1494847 - DNA, 15 bp, Homo sapiens
ggggatgccccagga

SEQ ID NO: 1494848 - DNA, 15 bp, Homo sapiens
tggggatgccccagg

SEQ ID NO: 1494849 - DNA, 15 bp, Homo sapiens
atggggatgccccag

SEQ ID NO: 1494850 - DNA, 15 bp, Homo sapiens
catggggatgcccca

SEQ ID NO: 1494851 - DNA, 15 bp, Homo sapiens
ccatggggatgcccc

SEQ ID NO: 1494852 - DNA, 15 bp, Homo sapiens
accatggggatgccc

SEQ ID NO: 1494853 - DNA, 15 bp, Homo sapiens
gaccatggggatgcc

SEQ ID NO: 1494854 - DNA, 15 bp, Homo sapiens
tgaccatggggatgc

SEQ ID NO: 1494855 - DNA, 15 bp, Homo sapiens
ctgaccatggggatg

SEQ ID NO: 1494856 - DNA, 15 bp, Homo sapiens
cctgaccatggggat

SEQ ID NO: 1494857 - DNA, 15 bp, Homo sapiens
acctgaccatgggga

SEQ ID NO: 1494858 - DNA, 15 bp, Homo sapiens
aacctgaccatgggg

SEQ ID NO: 1494859 - DNA, 15 bp, Homo sapiens
aaacctgaccatggg

SEQ ID NO: 1494860 - DNA, 15 bp, Homo sapiens
aaaacctgaccatgg

SEQ ID NO: 1494861 - DNA, 15 bp, Homo sapiens
gaaaacctgaccatg

SEQ ID NO: 1494862 - DNA, 15 bp, Homo sapiens
agaaaacctgaccat

SEQ ID NO: 1494863 - DNA, 15 bp, Homo sapiens
cagaaaacctgacca

SEQ ID NO: 1494864 - DNA, 15 bp, Homo sapiens
gcagaaaacctgacc

SEQ ID NO: 1494865 - DNA, 15 bp, Homo sapiens
ggcagaaaacctgac

SEQ ID NO: 1494866 - DNA, 15 bp, Homo sapiens
aggcagaaaacctga

SEQ ID NO: 1494867 - DNA, 15 bp, Homo sapiens
aaggcagaaaacctg

SEQ ID NO: 1494868 - DNA, 15 bp, Homo sapiens
taaggcagaaaacct

SEQ ID NO: 1494869 - DNA, 15 bp, Homo sapiens
gtaaggcagaaaacc

SEQ ID NO: 1494870 - DNA, 15 bp, Homo sapiens
cgtaaggcagaaaac

SEQ ID NO: 1494871 - DNA, 15 bp, Homo sapiens
gcgtaaggcagaaaa

SEQ ID NO: 1494872 - DNA, 15 bp, Homo sapiens
agcgtaaggcagaaa

SEQ ID NO: 1494873 - DNA, 15 bp, Homo sapiens
gagcgtaaggcagaa

SEQ ID NO: 1494874 - DNA, 15 bp, Homo sapiens
tgagcgtaaggcaga

SEQ ID NO: 1494875 - DNA, 15 bp, Homo sapiens
atgagcgtaaggcag

SEQ ID NO: 1494876 - DNA, 15 bp, Homo sapiens
catgagcgtaaggca

SEQ ID NO: 1494877 - DNA, 15 bp, Homo sapiens
ccatgagcgtaaggc

SEQ ID NO: 1494878 - DNA, 15 bp, Homo sapiens
accatgagcgtaagg

SEQ ID NO: 1494879 - DNA, 15 bp, Homo sapiens
aaccatgagcgtaag

SEQ ID NO: 1494880 - DNA, 15 bp, Homo sapiens
aaaccatgagcgtaa

SEQ ID NO: 1494881 - DNA, 15 bp, Homo sapiens
gaaaccatgagcgta

SEQ ID NO: 1494882 - DNA, 15 bp, Homo sapiens
ggaaaccatgagcgt

SEQ ID NO: 1494883 - DNA, 15 bp, Homo sapiens
gggaaaccatgagcg

SEQ ID NO: 1494884 - DNA, 15 bp, Homo sapiens
agggaaaccatgagc

SEQ ID NO: 1494885 - DNA, 15 bp, Homo sapiens
tagggaaaccatgag

SEQ ID NO: 1494886 - DNA, 15 bp, Homo sapiens
ctagggaaaccatga

SEQ ID NO: 1494887 - DNA, 15 bp, Homo sapiens
cctagggaaaccatg

SEQ ID NO: 1494888 - DNA, 15 bp, Homo sapiens
acctagggaaaccat

SEQ ID NO: 1494889 - DNA, 15 bp, Homo sapiens
cacctagggaaacca

SEQ ID NO: 1494890 - DNA, 15 bp, Homo sapiens
tcacctagggaaacc

SEQ ID NO: 1494891 - DNA, 15 bp, Homo sapiens
ttcacctagggaaac

SEQ ID NO: 1494892 - DNA, 15 bp, Homo sapiens
cttcacctagggaaa

SEQ ID NO: 1494893 - DNA, 15 bp, Homo sapiens
tcttcacctagggaa

SEQ ID NO: 1494894 - DNA, 15 bp, Homo sapiens
gtcttcacctaggga

SEQ ID NO: 1494895 - DNA, 15 bp, Homo sapiens
tgtcttcacctaggg

SEQ ID NO: 1494896 - DNA, 15 bp, Homo sapiens
gtgtcttcacctagg

SEQ ID NO: 1494897 - DNA, 15 bp, Homo sapiens
tgtgtcttcacctag

SEQ ID NO: 1494898 - DNA, 15 bp, Homo sapiens
ttgtgtcttcaccta

SEQ ID NO: 1494899 - DNA, 15 bp, Homo sapiens
tttgtgtcttcacct

SEQ ID NO: 1494900 - DNA, 15 bp, Homo sapiens
ttttgtgtcttcacc

SEQ ID NO: 1494901 - DNA, 15 bp, Homo sapiens
gttttgtgtcttcac

SEQ ID NO: 1494902 - DNA, 15 bp, Homo sapiens
tgttttgtgtcttca

SEQ ID NO: 1494903 - DNA, 15 bp, Homo sapiens
ctgttttgtgtcttc

SEQ ID NO: 1494904 - DNA, 15 bp, Homo sapiens
tctgttttgtgtctt

SEQ ID NO: 1494905 - DNA, 15 bp, Homo sapiens
ttctgttttgtgtct

SEQ ID NO: 1494906 - DNA, 15 bp, Homo sapiens
gttctgttttgtgtc

SEQ ID NO: 1494907 - DNA, 15 bp, Homo sapiens
agttctgttttgtgt

SEQ ID NO: 1494908 - DNA, 15 bp, Homo sapiens
tagttctgttttgtg

SEQ ID NO: 1494909 - DNA, 15 bp, Homo sapiens
gtagttctgttttgt

SEQ ID NO: 1494910 - DNA, 15 bp, Homo sapiens
agtagttctgttttg

SEQ ID NO: 1494911 - DNA, 15 bp, Homo sapiens
cagtagttctgtttt

SEQ ID NO: 1494912 - DNA, 15 bp, Homo sapiens
tcagtagttctgttt

SEQ ID NO: 1494913 - DNA, 15 bp, Homo sapiens
gtcagtagttctgtt

SEQ ID NO: 1494914 - DNA, 15 bp, Homo sapiens
tgtcagtagttctgt

SEQ ID NO: 1494915 - DNA, 15 bp, Homo sapiens
atgtcagtagttctg

SEQ ID NO: 1494916 - DNA, 15 bp, Homo sapiens
catgtcagtagttct

SEQ ID NO: 1494917 - DNA, 15 bp, Homo sapiens
gcatgtcagtagttc

SEQ ID NO: 1494918 - DNA, 15 bp, Homo sapiens
agcatgtcagtagtt

SEQ ID NO: 1494919 - DNA, 15 bp, Homo sapiens
cagcatgtcagtagt

SEQ ID NO: 1494920 - DNA, 15 bp, Homo sapiens
gcagcatgtcagtag

SEQ ID NO: 1494921 - DNA, 15 bp, Homo sapiens
ggcagcatgtcagta

SEQ ID NO: 1494922 - DNA, 15 bp, Homo sapiens
aggcagcatgtcagt

SEQ ID NO: 1494923 - DNA, 15 bp, Homo sapiens
caggcagcatgtcag

SEQ ID NO: 1494924 - DNA, 15 bp, Homo sapiens
gcaggcagcatgtca

SEQ ID NO: 1494925 - DNA, 15 bp, Homo sapiens
agcaggcagcatgtc

SEQ ID NO: 1494926 - DNA, 15 bp, Homo sapiens
tagcaggcagcatgt

SEQ ID NO: 1494927 - DNA, 15 bp, Homo sapiens
gtagcaggcagcatg

SEQ ID NO: 1494928 - DNA, 15 bp, Homo sapiens
tgtagcaggcagcat

SEQ ID NO: 1494929 - DNA, 15 bp, Homo sapiens
ttgtagcaggcagca

SEQ ID NO: 1494930 - DNA, 15 bp, Homo sapiens
cttgtagcaggcagc

SEQ ID NO: 1494931 - DNA, 15 bp, Homo sapiens
ccttgtagcaggcag

SEQ ID NO: 1494932 - DNA, 15 bp, Homo sapiens
tccttgtagcaggca

SEQ ID NO: 1494933 - DNA, 15 bp, Homo sapiens
atccttgtagcaggc

SEQ ID NO: 1494934 - DNA, 15 bp, Homo sapiens
aatccttgtagcagg

SEQ ID NO: 1494935 - DNA, 15 bp, Homo sapiens
caatccttgtagcag

SEQ ID NO: 1494936 - DNA, 15 bp, Homo sapiens
acaatccttgtagca

SEQ ID NO: 1494937 - DNA, 15 bp, Homo sapiens
aacaatccttgtagc

SEQ ID NO: 1494938 - DNA, 15 bp, Homo sapiens
caacaatccttgtag

SEQ ID NO: 1494939 - DNA, 15 bp, Homo sapiens
ccaacaatccttgta

SEQ ID NO: 1494940 - DNA, 15 bp, Homo sapiens
tccaacaatccttgt

SEQ ID NO: 1494941 - DNA, 15 bp, Homo sapiens
ttccaacaatccttg

SEQ ID NO: 1494942 - DNA, 15 bp, Homo sapiens
cttccaacaatcctt

SEQ ID NO: 1494943 - DNA, 15 bp, Homo sapiens
tcttccaacaatcct

SEQ ID NO: 1494944 - DNA, 15 bp, Homo sapiens
ctcttccaacaatcc

SEQ ID NO: 1494945 - DNA, 15 bp, Homo sapiens
tctcttccaacaatc

SEQ ID NO: 1494946 - DNA, 15 bp, Homo sapiens
atctcttccaacaat

SEQ ID NO: 1494947 - DNA, 15 bp, Homo sapiens
catctcttccaacaa

SEQ ID NO: 1494948 - DNA, 15 bp, Homo sapiens
ccatctcttccaaca

SEQ ID NO: 1494949 - DNA, 15 bp, Homo sapiens
tccatctcttccaac

SEQ ID NO: 1494950 - DNA, 15 bp, Homo sapiens
ctccatctcttccaa

SEQ ID NO: 1494951 - DNA, 15 bp, Homo sapiens
actccatctcttcca

SEQ ID NO: 1494952 - DNA, 15 bp, Homo sapiens
gactccatctcttcc

SEQ ID NO: 1494953 - DNA, 15 bp, Homo sapiens
tgactccatctcttc

SEQ ID NO: 1494954 - DNA, 15 bp, Homo sapiens
atgactccatctctt

SEQ ID NO: 1494955 - DNA, 15 bp, Homo sapiens
aatgactccatctct

SEQ ID NO: 1494956 - DNA, 15 bp, Homo sapiens
taatgactccatctc

SEQ ID NO: 1494957 - DNA, 15 bp, Homo sapiens
ctaatgactccatct

SEQ ID NO: 1494958 - DNA, 15 bp, Homo sapiens
tctaatgactccatc

SEQ ID NO: 1494959 - DNA, 15 bp, Homo sapiens
ttctaatgactccat

SEQ ID NO: 1494960 - DNA, 15 bp, Homo sapiens
cttctaatgactcca

SEQ ID NO: 1494961 - DNA, 15 bp, Homo sapiens
ccttctaatgactcc

SEQ ID NO: 1494962 - DNA, 15 bp, Homo sapiens
tccttctaatgactc

SEQ ID NO: 1494963 - DNA, 15 bp, Homo sapiens
ttccttctaatgact

SEQ ID NO: 1494964 - DNA, 15 bp, Homo sapiens
gttccttctaatgac

SEQ ID NO: 1494965 - DNA, 15 bp, Homo sapiens
ggttccttctaatga

SEQ ID NO: 1494966 - DNA, 15 bp, Homo sapiens
cggttccttctaatg

SEQ ID NO: 1494967 - DNA, 15 bp, Homo sapiens
tcggttccttctaat

SEQ ID NO: 1494968 - DNA, 15 bp, Homo sapiens
atcggttccttctaa

SEQ ID NO: 1494969 - DNA, 15 bp, Homo sapiens
catcggttccttcta

SEQ ID NO: 1494970 - DNA, 15 bp, Homo sapiens
acatcggttccttct

SEQ ID NO: 1494971 - DNA, 15 bp, Homo sapiens
tacatcggttccttc

SEQ ID NO: 1494972 - DNA, 15 bp, Homo sapiens
atacatcggttcctt

SEQ ID NO: 1494973 - DNA, 15 bp, Homo sapiens
tatacatcggttcct

SEQ ID NO: 1494974 - DNA, 15 bp, Homo sapiens
ttatacatcggttcc

SEQ ID NO: 1494975 - DNA, 15 bp, Homo sapiens
cttatacatcggttc

SEQ ID NO: 1494976 - DNA, 15 bp, Homo sapiens
ccttatacatcggtt

SEQ ID NO: 1494977 - DNA, 15 bp, Homo sapiens
cccttatacatcggt

SEQ ID NO: 1494978 - DNA, 15 bp, Homo sapiens
tcccttatacatcgg

SEQ ID NO: 1494979 - DNA, 15 bp, Homo sapiens
ctcccttatacatcg

SEQ ID NO: 1494980 - DNA, 15 bp, Homo sapiens
cctcccttatacatc

SEQ ID NO: 1494981 - DNA, 15 bp, Homo sapiens
tcctcccttatacat

SEQ ID NO: 1494982 - DNA, 15 bp, Homo sapiens
ctcctcccttataca

SEQ ID NO: 1494983 - DNA, 15 bp, Homo sapiens
cctcctcccttatac

SEQ ID NO: 1494984 - DNA, 15 bp, Homo sapiens
gcctcctcccttata

SEQ ID NO: 1494985 - DNA, 15 bp, Homo sapiens
tgcctcctcccttat

SEQ ID NO: 1494986 - DNA, 15 bp, Homo sapiens
gtgcctcctccctta

SEQ ID NO: 1494987 - DNA, 15 bp, Homo sapiens
tgtgcctcctccctt

SEQ ID NO: 1494988 - DNA, 15 bp, Homo sapiens
ttgtgcctcctccct

SEQ ID NO: 1494989 - DNA, 15 bp, Homo sapiens
tttgtgcctcctccc

SEQ ID NO: 1494990 - DNA, 15 bp, Homo sapiens
atttgtgcctcctcc

SEQ ID NO: 1494991 - DNA, 15 bp, Homo sapiens
gatttgtgcctcctc

SEQ ID NO: 1494992 - DNA, 15 bp, Homo sapiens
tgatttgtgcctcct

SEQ ID NO: 1494993 - DNA, 15 bp, Homo sapiens
ttgatttgtgcctcc

SEQ ID NO: 1494994 - DNA, 15 bp, Homo sapiens
attgatttgtgcctc

SEQ ID NO: 1494995 - DNA, 15 bp, Homo sapiens
gattgatttgtgcct

SEQ ID NO: 1494996 - DNA, 15 bp, Homo sapiens
tgattgatttgtgcc

SEQ ID NO: 1494997 - DNA, 15 bp, Homo sapiens
ctgattgatttgtgc

SEQ ID NO: 1494998 - DNA, 15 bp, Homo sapiens
actgattgatttgtg

SEQ ID NO: 1494999 - DNA, 15 bp, Homo sapiens
aactgattgatttgt

SEQ ID NO: 1495000 - DNA, 15 bp, Homo sapiens
taactgattgatttg

SEQ ID NO: 1495001 - DNA, 15 bp, Homo sapiens
ataactgattgattt

SEQ ID NO: 1495002 - DNA, 15 bp, Homo sapiens
aataactgattgatt

SEQ ID NO: 1495003 - DNA, 15 bp, Homo sapiens
aaataactgattgat

SEQ ID NO: 1495004 - DNA, 15 bp, Homo sapiens
taaataactgattga

SEQ ID NO: 1495005 - DNA, 15 bp, Homo sapiens
ataaataactgattg

SEQ ID NO: 1495006 - DNA, 15 bp, Homo sapiens
aataaataactgatt

SEQ ID NO: 1495007 - DNA, 15 bp, Homo sapiens
taataaataactgat

SEQ ID NO: 1495008 - DNA, 15 bp, Homo sapiens
gtaataaataactga

SEQ ID NO: 1495009 - DNA, 15 bp, Homo sapiens
ggtaataaataactg

SEQ ID NO: 1495010 - DNA, 15 bp, Homo sapiens
aggtaataaataact

SEQ ID NO: 1495011 - DNA, 15 bp, Homo sapiens
gaggtaataaataac

SEQ ID NO: 1495012 - DNA, 15 bp, Homo sapiens
agaggtaataaataa

SEQ ID NO: 1495013 - DNA, 15 bp, Homo sapiens
aagaggtaataaata

SEQ ID NO: 1495014 - DNA, 15 bp, Homo sapiens
aaagaggtaataaat

SEQ ID NO: 1495015 - DNA, 15 bp, Homo sapiens
aaaagaggtaataaa

SEQ ID NO: 1495016 - DNA, 15 bp, Homo sapiens
aaaaagaggtaataa

SEQ ID NO: 1495017 - DNA, 15 bp, Homo sapiens
aaaaaagaggtaata

SEQ ID NO: 1495018 - DNA, 15 bp, Homo sapiens
aaaaaaagaggtaat

SEQ ID NO: 1495019 - DNA, 15 bp, Homo sapiens
aaaaaaaagaggtaa

SEQ ID NO: 1495020 - DNA, 15 bp, Homo sapiens
aaaaaaaaagaggta

SEQ ID NO: 1495021 - DNA, 15 bp, Homo sapiens
aaaaaaaaaagaggt

SEQ ID NO: 1495022 - DNA, 15 bp, Homo sapiens
aagtgagaccctgtc

SEQ ID NO: 1495023 - DNA, 15 bp, Homo sapiens
aaagtgagaccctgt

SEQ ID NO: 1495024 - DNA, 15 bp, Homo sapiens
caaagtgagaccctg

SEQ ID NO: 1495025 - DNA, 15 bp, Homo sapiens
acaaagtgagaccct

SEQ ID NO: 1495026 - DNA, 15 bp, Homo sapiens
tacaaagtgagaccc

SEQ ID NO: 1495027 - DNA, 15 bp, Homo sapiens
gtacaaagtgagacc

SEQ ID NO: 1495028 - DNA, 15 bp, Homo sapiens
ggtacaaagtgagac

SEQ ID NO: 1495029 - DNA, 15 bp, Homo sapiens
gggtacaaagtgaga

SEQ ID NO: 1495030 - DNA, 15 bp, Homo sapiens
ggggtacaaagtgag

SEQ ID NO: 1495031 - DNA, 15 bp, Homo sapiens
tggggtacaaagtga

SEQ ID NO: 1495032 - DNA, 15 bp, Homo sapiens
ctggggtacaaagtg

SEQ ID NO: 1495033 - DNA, 15 bp, Homo sapiens
cctggggtacaaagt

SEQ ID NO: 1495034 - DNA, 15 bp, Homo sapiens
gcctggggtacaaag

SEQ ID NO: 1495035 - DNA, 15 bp, Homo sapiens
agcctggggtacaaa

SEQ ID NO: 1495036 - DNA, 15 bp, Homo sapiens
aagcctggggtacaa

SEQ ID NO: 1495037 - DNA, 15 bp, Homo sapiens
caagcctggggtaca

SEQ ID NO: 1495038 - DNA, 15 bp, Homo sapiens
tcaagcctggggtac

SEQ ID NO: 1495039 - DNA, 15 bp, Homo sapiens
gtcaagcctggggta

SEQ ID NO: 1495040 - DNA, 15 bp, Homo sapiens
agtcaagcctggggt

SEQ ID NO: 1495041 - DNA, 15 bp, Homo sapiens
cagtcaagcctgggg

SEQ ID NO: 1495042 - DNA, 15 bp, Homo sapiens
gcagtcaagcctggg

SEQ ID NO: 1495043 - DNA, 15 bp, Homo sapiens
tgcagtcaagcctgg

SEQ ID NO: 1495044 - DNA, 15 bp, Homo sapiens
ctgcagtcaagcctg

SEQ ID NO: 1495045 - DNA, 15 bp, Homo sapiens
actgcagtcaagcct

SEQ ID NO: 1495046 - DNA, 15 bp, Homo sapiens
cactgcagtcaagcc

SEQ ID NO: 1495047 - DNA, 15 bp, Homo sapiens
ccactgcagtcaagc

SEQ ID NO: 1495048 - DNA, 15 bp, Homo sapiens
gccactgcagtcaag

SEQ ID NO: 1495049 - DNA, 15 bp, Homo sapiens
cgccactgcagtcaa

SEQ ID NO: 1495050 - DNA, 15 bp, Homo sapiens
gcgccactgcagtca

SEQ ID NO: 1495051 - DNA, 15 bp, Homo sapiens
ggcgccactgcagtc

SEQ ID NO: 1495052 - DNA, 15 bp, Homo sapiens
tggcgccactgcagt

SEQ ID NO: 1495053 - DNA, 15 bp, Homo sapiens
atggcgccactgcag

SEQ ID NO: 1495054 - DNA, 15 bp, Homo sapiens
gtcgaggctgcagtg

SEQ ID NO: 1495055 - DNA, 15 bp, Homo sapiens
ggtcgaggctgcagt

SEQ ID NO: 1495056 - DNA, 15 bp, Homo sapiens
tggtcgaggctgcag

SEQ ID NO: 1495057 - DNA, 15 bp, Homo sapiens
ctggtcgaggctgca

SEQ ID NO: 1495058 - DNA, 15 bp, Homo sapiens
gctggtcgaggctgc

SEQ ID NO: 1495059 - DNA, 15 bp, Homo sapiens
ggctggtcgaggctg

SEQ ID NO: 1495060 - DNA, 15 bp, Homo sapiens
tggctggtcgaggct

SEQ ID NO: 1495061 - DNA, 15 bp, Homo sapiens
ctggctggtcgaggc

SEQ ID NO: 1495062 - DNA, 15 bp, Homo sapiens
cctggctggtcgagg

SEQ ID NO: 1495063 - DNA, 15 bp, Homo sapiens
acctggctggtcgag

SEQ ID NO: 1495064 - DNA, 15 bp, Homo sapiens
aacctggctggtcga

SEQ ID NO: 1495065 - DNA, 15 bp, Homo sapiens
gaacctggctggtcg

SEQ ID NO: 1495066 - DNA, 15 bp, Homo sapiens
agaacctggctggtc

SEQ ID NO: 1495067 - DNA, 15 bp, Homo sapiens
aagaacctggctggt

SEQ ID NO: 1495068 - DNA, 15 bp, Homo sapiens
gaagaacctggctgg

SEQ ID NO: 1495069 - DNA, 15 bp, Homo sapiens
ggaagaacctggctg

SEQ ID NO: 1495070 - DNA, 15 bp, Homo sapiens
aggaagaacctggct

SEQ ID NO: 1495071 - DNA, 15 bp, Homo sapiens
caggaagaacctggc

SEQ ID NO: 1495072 - DNA, 15 bp, Homo sapiens
gcaggaagaacctgg

SEQ ID NO: 1495073 - DNA, 15 bp, Homo sapiens
ggcaggaagaacctg

SEQ ID NO: 1495074 - DNA, 15 bp, Homo sapiens
aggcaggaagaacct

SEQ ID NO: 1495075 - DNA, 15 bp, Homo sapiens
gaggcaggaagaacc

SEQ ID NO: 1495076 - DNA, 15 bp, Homo sapiens
tgaggcaggaagaac

SEQ ID NO: 1495077 - DNA, 15 bp, Homo sapiens
ctgaggcaggaagaa

SEQ ID NO: 1495078 - DNA, 15 bp, Homo sapiens
gggctgaggcaggaa

SEQ ID NO: 1495079 - DNA, 15 bp, Homo sapiens
ggggctgaggcagga

SEQ ID NO: 1495080 - DNA, 15 bp, Homo sapiens
gggggctgaggcagg

SEQ ID NO: 1495081 - DNA, 15 bp, Homo sapiens
tgggggctgaggcag

SEQ ID NO: 1495082 - DNA, 15 bp, Homo sapiens
ttgggggctgaggca

SEQ ID NO: 1495083 - DNA, 15 bp, Homo sapiens
tttgggggctgaggc

SEQ ID NO: 1495084 - DNA, 15 bp, Homo sapiens
ctttgggggctgagg

SEQ ID NO: 1495085 - DNA, 15 bp, Homo sapiens
actttgggggctgag

SEQ ID NO: 1495086 - DNA, 15 bp, Homo sapiens
tactttgggggctga

SEQ ID NO: 1495087 - DNA, 15 bp, Homo sapiens
ctactttgggggctg

SEQ ID NO: 1495088 - DNA, 15 bp, Homo sapiens
gctactttgggggct

SEQ ID NO: 1495089 - DNA, 15 bp, Homo sapiens
tgctactttgggggc

SEQ ID NO: 1495090 - DNA, 15 bp, Homo sapiens
ctgctactttggggg

SEQ ID NO: 1495091 - DNA, 15 bp, Homo sapiens
cctgctactttgggg

SEQ ID NO: 1495092 - DNA, 15 bp, Homo sapiens
ccctgctactttggg

SEQ ID NO: 1495093 - DNA, 15 bp, Homo sapiens
tccctgctactttgg

SEQ ID NO: 1495094 - DNA, 15 bp, Homo sapiens
gtccctgctactttg

SEQ ID NO: 1495095 - DNA, 15 bp, Homo sapiens
agtccctgctacttt

SEQ ID NO: 1495096 - DNA, 15 bp, Homo sapiens
tagtccctgctactt

SEQ ID NO: 1495097 - DNA, 15 bp, Homo sapiens
gtagtccctgctact

SEQ ID NO: 1495098 - DNA, 15 bp, Homo sapiens
tgtagtccctgctac

SEQ ID NO: 1495099 - DNA, 15 bp, Homo sapiens
ctgtagtccctgcta

SEQ ID NO: 1495100 - DNA, 15 bp, Homo sapiens
cctgtagtccctgct

SEQ ID NO: 1495101 - DNA, 15 bp, Homo sapiens
acctgtagtccctgc

SEQ ID NO: 1495102 - DNA, 15 bp, Homo sapiens
cacctgtagtccctg

SEQ ID NO: 1495103 - DNA, 15 bp, Homo sapiens
gcacctgtagtccct

SEQ ID NO: 1495104 - DNA, 15 bp, Homo sapiens
gtgcacctgtagtcc

SEQ ID NO: 1495105 - DNA, 15 bp, Homo sapiens
tgtgcacctgtagtc

SEQ ID NO: 1495106 - DNA, 15 bp, Homo sapiens
gtgtgcacctgtagt

SEQ ID NO: 1495107 - DNA, 15 bp, Homo sapiens
ggtgtgcacctgtag

SEQ ID NO: 1495108 - DNA, 15 bp, Homo sapiens
tggtgtgcacctgta

SEQ ID NO: 1495109 - DNA, 15 bp, Homo sapiens
atggtgtgcacctgt

SEQ ID NO: 1495110 - DNA, 15 bp, Homo sapiens
gatggtgtgcacctg

SEQ ID NO: 1495111 - DNA, 15 bp, Homo sapiens
tgatggtgtgcacct

SEQ ID NO: 1495112 - DNA, 15 bp, Homo sapiens
gtgatggtgtgcacc

SEQ ID NO: 1495113 - DNA, 15 bp, Homo sapiens
tgtgatggtgtgcac

SEQ ID NO: 1495114 - DNA, 15 bp, Homo sapiens
atgtgatggtgtgca

SEQ ID NO: 1495115 - DNA, 15 bp, Homo sapiens
ctcatttagtcttca

SEQ ID NO: 1495116 - DNA, 15 bp, Homo sapiens
actcatttagtcttc

SEQ ID NO: 1495117 - DNA, 15 bp, Homo sapiens
aactcatttagtctt

SEQ ID NO: 1495118 - DNA, 15 bp, Homo sapiens
taactcatttagtct

SEQ ID NO: 1495119 - DNA, 15 bp, Homo sapiens
ttaactcatttagtc

SEQ ID NO: 1495120 - DNA, 15 bp, Homo sapiens
attaactcatttagt

SEQ ID NO: 1495121 - DNA, 15 bp, Homo sapiens
cattaactcatttag

SEQ ID NO: 1495122 - DNA, 15 bp, Homo sapiens
cacattaactcattt

SEQ ID NO: 1495123 - DNA, 15 bp, Homo sapiens
gcacattaactcatt

SEQ ID NO: 1495124 - DNA, 15 bp, Homo sapiens
tgcacattaactcat

SEQ ID NO: 1495125 - DNA, 15 bp, Homo sapiens
atgcacattaactca

SEQ ID NO: 1495126 - DNA, 15 bp, Homo sapiens
tatgcacattaactc

SEQ ID NO: 1495127 - DNA, 15 bp, Homo sapiens
ttatgcacattaact

SEQ ID NO: 1495128 - DNA, 15 bp, Homo sapiens
tttatgcacattaac

SEQ ID NO: 1495129 - DNA, 15 bp, Homo sapiens
ctttatgcacattaa

SEQ ID NO: 1495130 - DNA, 15 bp, Homo sapiens
actttatgcacatta

SEQ ID NO: 1495131 - DNA, 15 bp, Homo sapiens
tactttatgcacatt

SEQ ID NO: 1495132 - DNA, 15 bp, Homo sapiens
atactttatgcacat

SEQ ID NO: 1495133 - DNA, 15 bp, Homo sapiens
aatactttatgcaca

SEQ ID NO: 1495134 - DNA, 15 bp, Homo sapiens
aaatactttatgcac

SEQ ID NO: 1495135 - DNA, 15 bp, Homo sapiens
taaatactttatgca

SEQ ID NO: 1495136 - DNA, 15 bp, Homo sapiens
ttaaatactttatgc

SEQ ID NO: 1495137 - DNA, 15 bp, Homo sapiens
cttaaatactttatg

SEQ ID NO: 1495138 - DNA, 15 bp, Homo sapiens
ccttaaatactttat

SEQ ID NO: 1495139 - DNA, 15 bp, Homo sapiens
accttaaatacttta

SEQ ID NO: 1495140 - DNA, 15 bp, Homo sapiens
caccttaaatacttt

SEQ ID NO: 1495141 - DNA, 15 bp, Homo sapiens
gcaccttaaatactt

SEQ ID NO: 1495142 - DNA, 15 bp, Homo sapiens
tgcaccttaaatact

SEQ ID NO: 1495143 - DNA, 15 bp, Homo sapiens
gtgcaccttaaatac

SEQ ID NO: 1495144 - DNA, 15 bp, Homo sapiens
tgtgcaccttaaata

SEQ ID NO: 1495145 - DNA, 15 bp, Homo sapiens
gtgtgcaccttaaat

SEQ ID NO: 1495146 - DNA, 15 bp, Homo sapiens
tgtgtgcaccttaaa

SEQ ID NO: 1495147 - DNA, 15 bp, Homo sapiens
ttgtgtgcaccttaa

SEQ ID NO: 1495148 - DNA, 15 bp, Homo sapiens
tttgtgtgcacctta

SEQ ID NO: 1495149 - DNA, 15 bp, Homo sapiens
ctttgtgtgcacctt

SEQ ID NO: 1495150 - DNA, 15 bp, Homo sapiens
gctttgtgtgcacct

SEQ ID NO: 1495151 - DNA, 15 bp, Homo sapiens
ggctttgtgtgcacc

SEQ ID NO: 1495152 - DNA, 15 bp, Homo sapiens
tggctttgtgtgcac

SEQ ID NO: 1495153 - DNA, 15 bp, Homo sapiens
ctggctttgtgtgca

SEQ ID NO: 1495154 - DNA, 15 bp, Homo sapiens
cctggctttgtgtgc

SEQ ID NO: 1495155 - DNA, 15 bp, Homo sapiens
gcctggctttgtgtg

SEQ ID NO: 1495156 - DNA, 15 bp, Homo sapiens
tgcctggctttgtgt

SEQ ID NO: 1495157 - DNA, 15 bp, Homo sapiens
gtgcctggctttgtg

SEQ ID NO: 1495158 - DNA, 15 bp, Homo sapiens
tgtgcctggctttgt

SEQ ID NO: 1495159 - DNA, 15 bp, Homo sapiens
gtgtgcctggctttg

SEQ ID NO: 1495160 - DNA, 15 bp, Homo sapiens
tgtgtgcctggcttt

SEQ ID NO: 1495161 - DNA, 15 bp, Homo sapiens
ctgtgtgcctggctt

SEQ ID NO: 1495162 - DNA, 15 bp, Homo sapiens
tctgtgtgcctggct

SEQ ID NO: 1495163 - DNA, 15 bp, Homo sapiens
ttctgtgtgcctggc

SEQ ID NO: 1495164 - DNA, 15 bp, Homo sapiens
tttctgtgtgcctgg

SEQ ID NO: 1495165 - DNA, 15 bp, Homo sapiens
ctttctgtgtgcctg

SEQ ID NO: 1495166 - DNA, 15 bp, Homo sapiens
actttctgtgtgcct

SEQ ID NO: 1495167 - DNA, 15 bp, Homo sapiens
tactttctgtgtgcc

SEQ ID NO: 1495168 - DNA, 15 bp, Homo sapiens
gtactttctgtgtgc

SEQ ID NO: 1495169 - DNA, 15 bp, Homo sapiens
ggtactttctgtgtg

SEQ ID NO: 1495170 - DNA, 15 bp, Homo sapiens
gggtactttctgtgt

SEQ ID NO: 1495171 - DNA, 15 bp, Homo sapiens
agggtactttctgtg

SEQ ID NO: 1495172 - DNA, 15 bp, Homo sapiens
tagggtactttctgt

SEQ ID NO: 1495173 - DNA, 15 bp, Homo sapiens
ttagggtactttctg

SEQ ID NO: 1495174 - DNA, 15 bp, Homo sapiens
attagggtactttct

SEQ ID NO: 1495175 - DNA, 15 bp, Homo sapiens
aattagggtactttc

SEQ ID NO: 1495176 - DNA, 15 bp, Homo sapiens
taattagggtacttt

SEQ ID NO: 1495177 - DNA, 15 bp, Homo sapiens
ctaattagggtactt

SEQ ID NO: 1495178 - DNA, 15 bp, Homo sapiens
gctaattagggtact

SEQ ID NO: 1495179 - DNA, 15 bp, Homo sapiens
agctaattagggtac

SEQ ID NO: 1495180 - DNA, 15 bp, Homo sapiens
tagctaattagggta

SEQ ID NO: 1495181 - DNA, 15 bp, Homo sapiens
gtagctaattagggt

SEQ ID NO: 1495182 - DNA, 15 bp, Homo sapiens
agtagctaattaggg

SEQ ID NO: 1495183 - DNA, 15 bp, Homo sapiens
tagtagctaattagg

SEQ ID NO: 1495184 - DNA, 15 bp, Homo sapiens
ctagtagctaattag

SEQ ID NO: 1495185 - DNA, 15 bp, Homo sapiens
tctagtagctaatta

SEQ ID NO: 1495186 - DNA, 15 bp, Homo sapiens
atctagtagctaatt

SEQ ID NO: 1495187 - DNA, 15 bp, Homo sapiens
tatctagtagctaat

SEQ ID NO: 1495188 - DNA, 15 bp, Homo sapiens
atatctagtagctaa

SEQ ID NO: 1495189 - DNA, 15 bp, Homo sapiens
gatatctagtagcta

SEQ ID NO: 1495190 - DNA, 15 bp, Homo sapiens
tgatatctagtagct

SEQ ID NO: 1495191 - DNA, 15 bp, Homo sapiens
ctgatatctagtagc

SEQ ID NO: 1495192 - DNA, 15 bp, Homo sapiens
tctgatatctagtag

SEQ ID NO: 1495193 - DNA, 15 bp, Homo sapiens
ttctgatatctagta

SEQ ID NO: 1495194 - DNA, 15 bp, Homo sapiens
gttctgatatctagt

SEQ ID NO: 1495195 - DNA, 15 bp, Homo sapiens
agttctgatatctag

SEQ ID NO: 1495196 - DNA, 15 bp, Homo sapiens
tagttctgatatcta

SEQ ID NO: 1495197 - DNA, 15 bp, Homo sapiens
atagttctgatatct

SEQ ID NO: 1495198 - DNA, 15 bp, Homo sapiens
catagttctgatatc

SEQ ID NO: 1495199 - DNA, 15 bp, Homo sapiens
tcatagttctgatat

SEQ ID NO: 1495200 - DNA, 15 bp, Homo sapiens
atcatagttctgata

SEQ ID NO: 1495201 - DNA, 15 bp, Homo sapiens
tatcatagttctgat

SEQ ID NO: 1495202 - DNA, 15 bp, Homo sapiens
gtatcatagttctga

SEQ ID NO: 1495203 - DNA, 15 bp, Homo sapiens
agtatcatagttctg

SEQ ID NO: 1495204 - DNA, 15 bp, Homo sapiens
tagtatcatagttct

SEQ ID NO: 1495205 - DNA, 15 bp, Homo sapiens
ttagtatcatagttc

SEQ ID NO: 1495206 - DNA, 15 bp, Homo sapiens
attagtatcatagtt

SEQ ID NO: 1495207 - DNA, 15 bp, Homo sapiens
cattagtatcatagt

SEQ ID NO: 1495208 - DNA, 15 bp, Homo sapiens
tcattagtatcatag

SEQ ID NO: 1495209 - DNA, 15 bp, Homo sapiens
atcattagtatcata

SEQ ID NO: 1495210 - DNA, 15 bp, Homo sapiens
aatcattagtatcat

SEQ ID NO: 1495211 - DNA, 15 bp, Homo sapiens
taatcattagtatca

SEQ ID NO: 1495212 - DNA, 15 bp, Homo sapiens
ataatcattagtatc

SEQ ID NO: 1495213 - DNA, 15 bp, Homo sapiens
aataatcattagtat

SEQ ID NO: 1495214 - DNA, 15 bp, Homo sapiens
taataatcattagta

SEQ ID NO: 1495215 - DNA, 15 bp, Homo sapiens
gtaataatcattagt

SEQ ID NO: 1495216 - DNA, 15 bp, Homo sapiens
ggtaataatcattag

SEQ ID NO: 1495217 - DNA, 15 bp, Homo sapiens
tggtaataatcatta

SEQ ID NO: 1495218 - DNA, 15 bp, Homo sapiens
atggtaataatcatt

SEQ ID NO: 1495219 - DNA, 15 bp, Homo sapiens
catggtaataatcat

SEQ ID NO: 1495220 - DNA, 15 bp, Homo sapiens
acatggtaataatca

SEQ ID NO: 1495221 - DNA, 15 bp, Homo sapiens
aacatggtaataatc

SEQ ID NO: 1495222 - DNA, 15 bp, Homo sapiens
caacatggtaataat

SEQ ID NO: 1495223 - DNA, 15 bp, Homo sapiens
tcaacatggtaataa

SEQ ID NO: 1495224 - DNA, 15 bp, Homo sapiens
atcaacatggtaata

SEQ ID NO: 1495225 - DNA, 15 bp, Homo sapiens
catcaacatggtaat

SEQ ID NO: 1495226 - DNA, 15 bp, Homo sapiens
ccatcaacatggtaa

SEQ ID NO: 1495227 - DNA, 15 bp, Homo sapiens
accatcaacatggta

SEQ ID NO: 1495228 - DNA, 15 bp, Homo sapiens
aaccatcaacatggt

SEQ ID NO: 1495229 - DNA, 15 bp, Homo sapiens
gaaccatcaacatgg

SEQ ID NO: 1495230 - DNA, 15 bp, Homo sapiens
agaaccatcaacatg

SEQ ID NO: 1495231 - DNA, 15 bp, Homo sapiens
aagaaccatcaacat

SEQ ID NO: 1495232 - DNA, 15 bp, Homo sapiens
taagaaccatcaaca

SEQ ID NO: 1495233 - DNA, 15 bp, Homo sapiens
gtaagaaccatcaac

SEQ ID NO: 1495234 - DNA, 15 bp, Homo sapiens
ggtaagaaccatcaa

SEQ ID NO: 1495235 - DNA, 15 bp, Homo sapiens
aggtaagaaccatca

SEQ ID NO: 1495236 - DNA, 15 bp, Homo sapiens
aaggtaagaaccatc

SEQ ID NO: 1495237 - DNA, 15 bp, Homo sapiens
aaaggtaagaaccat

SEQ ID NO: 1495238 - DNA, 15 bp, Homo sapiens
gaaaggtaagaacca

SEQ ID NO: 1495239 - DNA, 15 bp, Homo sapiens
agaaaggtaagaacc

SEQ ID NO: 1495240 - DNA, 15 bp, Homo sapiens
gagaaaggtaagaac

SEQ ID NO: 1495241 - DNA, 15 bp, Homo sapiens
ggagaaaggtaagaa

SEQ ID NO: 1495242 - DNA, 15 bp, Homo sapiens
tggagaaaggtaaga

SEQ ID NO: 1495243 - DNA, 15 bp, Homo sapiens
atggagaaaggtaag

SEQ ID NO: 1495244 - DNA, 15 bp, Homo sapiens
gatggagaaaggtaa

SEQ ID NO: 1495245 - DNA, 15 bp, Homo sapiens
agatggagaaaggta

SEQ ID NO: 1495246 - DNA, 15 bp, Homo sapiens
aagatggagaaaggt

SEQ ID NO: 1495247 - DNA, 15 bp, Homo sapiens
taagatggagaaagg

SEQ ID NO: 1495248 - DNA, 15 bp, Homo sapiens
ctaagatggagaaag

SEQ ID NO: 1495249 - DNA, 15 bp, Homo sapiens
tctaagatggagaaa

SEQ ID NO: 1495250 - DNA, 15 bp, Homo sapiens
gtctaagatggagaa

SEQ ID NO: 1495251 - DNA, 15 bp, Homo sapiens
ggtctaagatggaga

SEQ ID NO: 1495252 - DNA, 15 bp, Homo sapiens
aggtctaagatggag

SEQ ID NO: 1495253 - DNA, 15 bp, Homo sapiens
gaggtctaagatgga

SEQ ID NO: 1495254 - DNA, 15 bp, Homo sapiens
agaggtctaagatgg

SEQ ID NO: 1495255 - DNA, 15 bp, Homo sapiens
gagaggtctaagatg

SEQ ID NO: 1495256 - DNA, 15 bp, Homo sapiens
agagaggtctaagat

SEQ ID NO: 1495257 - DNA, 15 bp, Homo sapiens
aagagaggtctaaga

SEQ ID NO: 1495258 - DNA, 15 bp, Homo sapiens
gaagagaggtctaag

SEQ ID NO: 1495259 - DNA, 15 bp, Homo sapiens
ggaagagaggtctaa

SEQ ID NO: 1495260 - DNA, 15 bp, Homo sapiens
aggaagagaggtcta

SEQ ID NO: 1495261 - DNA, 15 bp, Homo sapiens
caggaagagaggtct

SEQ ID NO: 1495262 - DNA, 15 bp, Homo sapiens
tcaggaagagaggtc

SEQ ID NO: 1495263 - DNA, 15 bp, Homo sapiens
ctcaggaagagaggt

SEQ ID NO: 1495264 - DNA, 15 bp, Homo sapiens
gctcaggaagagagg

SEQ ID NO: 1495265 - DNA, 15 bp, Homo sapiens
agctcaggaagagag

SEQ ID NO: 1495266 - DNA, 15 bp, Homo sapiens
gagctcaggaagaga

SEQ ID NO: 1495267 - DNA, 15 bp, Homo sapiens
ggagctcaggaagag

SEQ ID NO: 1495268 - DNA, 15 bp, Homo sapiens
aggagctcaggaaga

SEQ ID NO: 1495269 - DNA, 15 bp, Homo sapiens
caggagctcaggaag

SEQ ID NO: 1495270 - DNA, 15 bp, Homo sapiens
tcaggagctcaggaa

SEQ ID NO: 1495271 - DNA, 15 bp, Homo sapiens
ctcaggagctcagga

SEQ ID NO: 1495272 - DNA, 15 bp, Homo sapiens
gctcaggagctcagg

SEQ ID NO: 1495273 - DNA, 15 bp, Homo sapiens
agctcaggagctcag

SEQ ID NO: 1495274 - DNA, 15 bp, Homo sapiens
aagctcaggagctca

SEQ ID NO: 1495275 - DNA, 15 bp, Homo sapiens
gaagctcaggagctc

SEQ ID NO: 1495276 - DNA, 15 bp, Homo sapiens
agaagctcaggagct

SEQ ID NO: 1495277 - DNA, 15 bp, Homo sapiens
gagaagctcaggagc

SEQ ID NO: 1495278 - DNA, 15 bp, Homo sapiens
tgagaagctcaggag

SEQ ID NO: 1495279 - DNA, 15 bp, Homo sapiens
ctgagaagctcagga

SEQ ID NO: 1495280 - DNA, 15 bp, Homo sapiens
actgagaagctcagg

SEQ ID NO: 1495281 - DNA, 15 bp, Homo sapiens
cactgagaagctcag

SEQ ID NO: 1495282 - DNA, 15 bp, Homo sapiens
acactgagaagctca

SEQ ID NO: 1495283 - DNA, 15 bp, Homo sapiens
gacactgagaagctc

SEQ ID NO: 1495284 - DNA, 15 bp, Homo sapiens
agacactgagaagct

SEQ ID NO: 1495285 - DNA, 15 bp, Homo sapiens
cagacactgagaagc

SEQ ID NO: 1495286 - DNA, 15 bp, Homo sapiens
ccagacactgagaag

SEQ ID NO: 1495287 - DNA, 15 bp, Homo sapiens
tccagacactgagaa

SEQ ID NO: 1495288 - DNA, 15 bp, Homo sapiens
catccagacactgag

SEQ ID NO: 1495289 - DNA, 15 bp, Homo sapiens
gcatccagacactga

SEQ ID NO: 1495290 - DNA, 15 bp, Homo sapiens
agcatccagacactg

SEQ ID NO: 1495291 - DNA, 15 bp, Homo sapiens
aagcatccagacact

SEQ ID NO: 1495292 - DNA, 15 bp, Homo sapiens
gaagcatccagacac

SEQ ID NO: 1495293 - DNA, 15 bp, Homo sapiens
tgaagcatccagaca

SEQ ID NO: 1495294 - DNA, 15 bp, Homo sapiens
gtgaagcatccagac

SEQ ID NO: 1495295 - DNA, 15 bp, Homo sapiens
tgtgaagcatccaga

SEQ ID NO: 1495296 - DNA, 15 bp, Homo sapiens
atgtgaagcatccag

SEQ ID NO: 1495297 - DNA, 15 bp, Homo sapiens
catgtgaagcatcca

SEQ ID NO: 1495298 - DNA, 15 bp, Homo sapiens
acatgtgaagcatcc

SEQ ID NO: 1495299 - DNA, 15 bp, Homo sapiens
tacatgtgaagcatc

SEQ ID NO: 1495300 - DNA, 15 bp, Homo sapiens
ctacatgtgaagcat

SEQ ID NO: 1495301 - DNA, 15 bp, Homo sapiens
gctacatgtgaagca

SEQ ID NO: 1495302 - DNA, 15 bp, Homo sapiens
tgctacatgtgaagc

SEQ ID NO: 1495303 - DNA, 15 bp, Homo sapiens
gtgctacatgtgaag

SEQ ID NO: 1495304 - DNA, 15 bp, Homo sapiens
ggtgctacatgtgaa

SEQ ID NO: 1495305 - DNA, 15 bp, Homo sapiens
aggtgctacatgtga

SEQ ID NO: 1495306 - DNA, 15 bp, Homo sapiens
gaggtgctacatgtg

SEQ ID NO: 1495307 - DNA, 15 bp, Homo sapiens
tgaggtgctacatgt

SEQ ID NO: 1495308 - DNA, 15 bp, Homo sapiens
ttgaggtgctacatg

SEQ ID NO: 1495309 - DNA, 15 bp, Homo sapiens
tttgaggtgctacat

SEQ ID NO: 1495310 - DNA, 15 bp, Homo sapiens
gtttgaggtgctaca

SEQ ID NO: 1495311 - DNA, 15 bp, Homo sapiens
agtttgaggtgctac

SEQ ID NO: 1495312 - DNA, 15 bp, Homo sapiens
gagtttgaggtgcta

SEQ ID NO: 1495313 - DNA, 15 bp, Homo sapiens
tgagtttgaggtgct

SEQ ID NO: 1495314 - DNA, 15 bp, Homo sapiens
atgagtttgaggtgc

SEQ ID NO: 1495315 - DNA, 15 bp, Homo sapiens
aatgagtttgaggtg

SEQ ID NO: 1495316 - DNA, 15 bp, Homo sapiens
caatgagtttgaggt

SEQ ID NO: 1495317 - DNA, 15 bp, Homo sapiens
acaatgagtttgagg

SEQ ID NO: 1495318 - DNA, 15 bp, Homo sapiens
cacaatgagtttgag

SEQ ID NO: 1495319 - DNA, 15 bp, Homo sapiens
acacaatgagtttga

SEQ ID NO: 1495320 - DNA, 15 bp, Homo sapiens
gacacaatgagtttg

SEQ ID NO: 1495321 - DNA, 15 bp, Homo sapiens
ggacacaatgagttt

SEQ ID NO: 1495322 - DNA, 15 bp, Homo sapiens
tggacacaatgagtt

SEQ ID NO: 1495323 - DNA, 15 bp, Homo sapiens
ttggacacaatgagt

SEQ ID NO: 1495324 - DNA, 15 bp, Homo sapiens
tttggacacaatgag

SEQ ID NO: 1495325 - DNA, 15 bp, Homo sapiens
atttggacacaatga

SEQ ID NO: 1495326 - DNA, 15 bp, Homo sapiens
gatttggacacaatg

SEQ ID NO: 1495327 - DNA, 15 bp, Homo sapiens
agatttggacacaat

SEQ ID NO: 1495328 - DNA, 15 bp, Homo sapiens
cagatttggacacaa

SEQ ID NO: 1495329 - DNA, 15 bp, Homo sapiens
tcagatttggacaca

SEQ ID NO: 1495330 - DNA, 15 bp, Homo sapiens
ttcagatttggacac

SEQ ID NO: 1495331 - DNA, 15 bp, Homo sapiens
gttcagatttggaca

SEQ ID NO: 1495332 - DNA, 15 bp, Homo sapiens
agttcagatttggac

SEQ ID NO: 1495333 - DNA, 15 bp, Homo sapiens
gagttcagatttgga

SEQ ID NO: 1495334 - DNA, 15 bp, Homo sapiens
tgagttcagatttgg

SEQ ID NO: 1495335 - DNA, 15 bp, Homo sapiens
ttgagttcagatttg

SEQ ID NO: 1495336 - DNA, 15 bp, Homo sapiens
gttgagttcagattt

SEQ ID NO: 1495337 - DNA, 15 bp, Homo sapiens
tgttgagttcagatt

SEQ ID NO: 1495338 - DNA, 15 bp, Homo sapiens
atgttgagttcagat

SEQ ID NO: 1495339 - DNA, 15 bp, Homo sapiens
gatgttgagttcaga

SEQ ID NO: 1495340 - DNA, 15 bp, Homo sapiens
agatgttgagttcag

SEQ ID NO: 1495341 - DNA, 15 bp, Homo sapiens
gagatgttgagttca

SEQ ID NO: 1495342 - DNA, 15 bp, Homo sapiens
ggagatgttgagttc

SEQ ID NO: 1495343 - DNA, 15 bp, Homo sapiens
aggagatgttgagtt

SEQ ID NO: 1495344 - DNA, 15 bp, Homo sapiens
gaggagatgttgagt

SEQ ID NO: 1495345 - DNA, 15 bp, Homo sapiens
ggaggagatgttgag

SEQ ID NO: 1495346 - DNA, 15 bp, Homo sapiens
aggaggagatgttga

SEQ ID NO: 1495347 - DNA, 15 bp, Homo sapiens
caggaggagatgttg

SEQ ID NO: 1495348 - DNA, 15 bp, Homo sapiens
ccaggaggagatgtt

SEQ ID NO: 1495349 - DNA, 15 bp, Homo sapiens
cccaggaggagatgt

SEQ ID NO: 1495350 - DNA, 15 bp, Homo sapiens
gcccaggaggagatg

SEQ ID NO: 1495351 - DNA, 15 bp, Homo sapiens
tgcccaggaggagat

SEQ ID NO: 1495352 - DNA, 15 bp, Homo sapiens
ctgcccaggaggaga

SEQ ID NO: 1495353 - DNA, 15 bp, Homo sapiens
tctgcccaggaggag

SEQ ID NO: 1495354 - DNA, 15 bp, Homo sapiens
atctgcccaggagga

SEQ ID NO: 1495355 - DNA, 15 bp, Homo sapiens
gatctgcccaggagg

SEQ ID NO: 1495356 - DNA, 15 bp, Homo sapiens
ggatctgcccaggag

SEQ ID NO: 1495357 - DNA, 15 bp, Homo sapiens
aggatctgcccagga

SEQ ID NO: 1495358 - DNA, 15 bp, Homo sapiens
gaggatctgcccagg

SEQ ID NO: 1495359 - DNA, 15 bp, Homo sapiens
ggaggatctgcccag

SEQ ID NO: 1495360 - DNA, 15 bp, Homo sapiens
aggaggatctgccca

SEQ ID NO: 1495361 - DNA, 15 bp, Homo sapiens
aaggaggatctgccc

SEQ ID NO: 1495362 - DNA, 15 bp, Homo sapiens
aaaggaggatctgcc

SEQ ID NO: 1495363 - DNA, 15 bp, Homo sapiens
aaaaggaggatctgc

SEQ ID NO: 1495364 - DNA, 15 bp, Homo sapiens
taaaaggaggatctg

SEQ ID NO: 1495365 - DNA, 15 bp, Homo sapiens
ttaaaaggaggatct

SEQ ID NO: 1495366 - DNA, 15 bp, Homo sapiens
cttaaaaggaggatc

SEQ ID NO: 1495367 - DNA, 15 bp, Homo sapiens
acttaaaaggaggat

SEQ ID NO: 1495368 - DNA, 15 bp, Homo sapiens
gacttaaaaggagga

SEQ ID NO: 1495369 - DNA, 15 bp, Homo sapiens
agacttaaaaggagg

SEQ ID NO: 1495370 - DNA, 15 bp, Homo sapiens
cagacttaaaaggag

SEQ ID NO: 1495371 - DNA, 15 bp, Homo sapiens
gcagacttaaaagga

SEQ ID NO: 1495372 - DNA, 15 bp, Homo sapiens
agcagacttaaaagg

SEQ ID NO: 1495373 - DNA, 15 bp, Homo sapiens
tagcagacttaaaag

SEQ ID NO: 1495374 - DNA, 15 bp, Homo sapiens
atagcagacttaaaa

SEQ ID NO: 1495375 - DNA, 15 bp, Homo sapiens
aatagcagacttaaa

SEQ ID NO: 1495376 - DNA, 15 bp, Homo sapiens
aaatagcagacttaa

SEQ ID NO: 1495377 - DNA, 15 bp, Homo sapiens
caaatagcagactta

SEQ ID NO: 1495378 - DNA, 15 bp, Homo sapiens
tcaaatagcagactt

SEQ ID NO: 1495379 - DNA, 15 bp, Homo sapiens
ctcaaatagcagact

SEQ ID NO: 1495380 - DNA, 15 bp, Homo sapiens
cctcaaatagcagac

SEQ ID NO: 1495381 - DNA, 15 bp, Homo sapiens
tcctcaaatagcaga

SEQ ID NO: 1495382 - DNA, 15 bp, Homo sapiens
ttcctcaaatagcag

SEQ ID NO: 1495383 - DNA, 15 bp, Homo sapiens
tttcctcaaatagca

SEQ ID NO: 1495384 - DNA, 15 bp, Homo sapiens
atttcctcaaatagc

SEQ ID NO: 1495385 - DNA, 15 bp, Homo sapiens
catttcctcaaatag

SEQ ID NO: 1495386 - DNA, 15 bp, Homo sapiens
ccatttcctcaaata

SEQ ID NO: 1495387 - DNA, 15 bp, Homo sapiens
gccatttcctcaaat

SEQ ID NO: 1495388 - DNA, 15 bp, Homo sapiens
tgccatttcctcaaa

SEQ ID NO: 1495389 - DNA, 15 bp, Homo sapiens
gtgccatttcctcaa

SEQ ID NO: 1495390 - DNA, 15 bp, Homo sapiens
ggtgccatttcctca

SEQ ID NO: 1495391 - DNA, 15 bp, Homo sapiens
tggtgccatttcctc

SEQ ID NO: 1495392 - DNA, 15 bp, Homo sapiens
gtggtgccatttcct

SEQ ID NO: 1495393 - DNA, 15 bp, Homo sapiens
ggtggtgccatttcc

SEQ ID NO: 1495394 - DNA, 15 bp, Homo sapiens
tggtggtgccatttc

SEQ ID NO: 1495395 - DNA, 15 bp, Homo sapiens
atggtggtgccattt

SEQ ID NO: 1495396 - DNA, 15 bp, Homo sapiens
gatggtggtgccatt

SEQ ID NO: 1495397 - DNA, 15 bp, Homo sapiens
ggatggtggtgccat

SEQ ID NO: 1495398 - DNA, 15 bp, Homo sapiens
tggatggtggtgcca

SEQ ID NO: 1495399 - DNA, 15 bp, Homo sapiens
gtggatggtggtgcc

SEQ ID NO: 1495400 - DNA, 15 bp, Homo sapiens
ggtggatggtggtgc

SEQ ID NO: 1495401 - DNA, 15 bp, Homo sapiens
gggtggatggtggtg

SEQ ID NO: 1495402 - DNA, 15 bp, Homo sapiens
tgggtggatggtggt

SEQ ID NO: 1495403 - DNA, 15 bp, Homo sapiens
ctgggtggatggtgg

SEQ ID NO: 1495404 - DNA, 15 bp, Homo sapiens
gctgggtggatggtg

SEQ ID NO: 1495405 - DNA, 15 bp, Homo sapiens
agctgggtggatggt

SEQ ID NO: 1495406 - DNA, 15 bp, Homo sapiens
cagctgggtggatgg

SEQ ID NO: 1495407 - DNA, 15 bp, Homo sapiens
gcagctgggtggatg

SEQ ID NO: 1495408 - DNA, 15 bp, Homo sapiens
ggcagctgggtggat

SEQ ID NO: 1495409 - DNA, 15 bp, Homo sapiens
gggcagctgggtgga

SEQ ID NO: 1495410 - DNA, 15 bp, Homo sapiens
ggggcagctgggtgg

SEQ ID NO: 1495411 - DNA, 15 bp, Homo sapiens
tggggcagctgggtg

SEQ ID NO: 1495412 - DNA, 15 bp, Homo sapiens
ctggggcagctgggt

SEQ ID NO: 1495413 - DNA, 15 bp, Homo sapiens
gctggggcagctggg

SEQ ID NO: 1495414 - DNA, 15 bp, Homo sapiens
ggctggggcagctgg

SEQ ID NO: 1495415 - DNA, 15 bp, Homo sapiens
aggctggggcagctg

SEQ ID NO: 1495416 - DNA, 15 bp, Homo sapiens
caggctggggcagct

SEQ ID NO: 1495417 - DNA, 15 bp, Homo sapiens
tcaggctggggcagc

SEQ ID NO: 1495418 - DNA, 15 bp, Homo sapiens
ttcaggctggggcag

SEQ ID NO: 1495419 - DNA, 15 bp, Homo sapiens
tttcaggctggggca

SEQ ID NO: 1495420 - DNA, 15 bp, Homo sapiens
atttcaggctggggc

SEQ ID NO: 1495421 - DNA, 15 bp, Homo sapiens
catttcaggctgggg

SEQ ID NO: 1495422 - DNA, 15 bp, Homo sapiens
tcatttcaggctggg

SEQ ID NO: 1495423 - DNA, 15 bp, Homo sapiens
ttcatttcaggctgg

SEQ ID NO: 1495424 - DNA, 15 bp, Homo sapiens
cttcatttcaggctg

SEQ ID NO: 1495425 - DNA, 15 bp, Homo sapiens
tcttcatttcaggct

SEQ ID NO: 1495426 - DNA, 15 bp, Homo sapiens
ttcttcatttcaggc

SEQ ID NO: 1495427 - DNA, 15 bp, Homo sapiens
attcttcatttcagg

SEQ ID NO: 1495428 - DNA, 15 bp, Homo sapiens
aattcttcatttcag

SEQ ID NO: 1495429 - DNA, 15 bp, Homo sapiens
caattcttcatttca

SEQ ID NO: 1495430 - DNA, 15 bp, Homo sapiens
tcaattcttcatttc

SEQ ID NO: 1495431 - DNA, 15 bp, Homo sapiens
atcaattcttcattt

SEQ ID NO: 1495432 - DNA, 15 bp, Homo sapiens
catcaattcttcatt

SEQ ID NO: 1495433 - DNA, 15 bp, Homo sapiens
gcatcaattcttcat

SEQ ID NO: 1495434 - DNA, 15 bp, Homo sapiens
ggcatcaattcttca

SEQ ID NO: 1495435 - DNA, 15 bp, Homo sapiens
gggcatcaattcttc

SEQ ID NO: 1495436 - DNA, 15 bp, Homo sapiens
cgggcatcaattctt

SEQ ID NO: 1495437 - DNA, 15 bp, Homo sapiens
tcgggcatcaattct

SEQ ID NO: 1495438 - DNA, 15 bp, Homo sapiens
gtcgggcatcaattc

SEQ ID NO: 1495439 - DNA, 15 bp, Homo sapiens
agtcgggcatcaatt

SEQ ID NO: 1495440 - DNA, 15 bp, Homo sapiens
gagtcgggcatcaat

SEQ ID NO: 1495441 - DNA, 15 bp, Homo sapiens
ggagtcgggcatcaa

SEQ ID NO: 1495442 - DNA, 15 bp, Homo sapiens
aggagtcgggcatca

SEQ ID NO: 1495443 - DNA, 15 bp, Homo sapiens
aaggagtcgggcatc

SEQ ID NO: 1495444 - DNA, 15 bp, Homo sapiens
gaaggagtcgggcat

SEQ ID NO: 1495445 - DNA, 15 bp, Homo sapiens
ggaaggagtcgggca

SEQ ID NO: 1495446 - DNA, 15 bp, Homo sapiens
aggaaggagtcgggc

SEQ ID NO: 1495447 - DNA, 15 bp, Homo sapiens
gaggaaggagtcggg

SEQ ID NO: 1495448 - DNA, 15 bp, Homo sapiens
agaggaaggagtcgg

SEQ ID NO: 1495449 - DNA, 15 bp, Homo sapiens
aagaggaaggagtcg

SEQ ID NO: 1495450 - DNA, 15 bp, Homo sapiens
gaagaggaaggagtc

SEQ ID NO: 1495451 - DNA, 15 bp, Homo sapiens
ggaagaggaaggagt

SEQ ID NO: 1495452 - DNA, 15 bp, Homo sapiens
gggaagaggaaggag

SEQ ID NO: 1495453 - DNA, 15 bp, Homo sapiens
agggaagaggaagga

SEQ ID NO: 1495454 - DNA, 15 bp, Homo sapiens
gagggaagaggaagg

SEQ ID NO: 1495455 - DNA, 15 bp, Homo sapiens
tagagggaagaggaa

SEQ ID NO: 1495456 - DNA, 15 bp, Homo sapiens
ttagagggaagagga

SEQ ID NO: 1495457 - DNA, 15 bp, Homo sapiens
gttagagggaagagg

SEQ ID NO: 1495458 - DNA, 15 bp, Homo sapiens
agttagagggaagag

SEQ ID NO: 1495459 - DNA, 15 bp, Homo sapiens
tagttagagggaaga

SEQ ID NO: 1495460 - DNA, 15 bp, Homo sapiens
ttagttagagggaag

SEQ ID NO: 1495461 - DNA, 15 bp, Homo sapiens
gttagttagagggaa

SEQ ID NO: 1495462 - DNA, 15 bp, Homo sapiens
agttagttagaggga

SEQ ID NO: 1495463 - DNA, 15 bp, Homo sapiens
tagttagttagaggg

SEQ ID NO: 1495464 - DNA, 15 bp, Homo sapiens
gtagttagttagagg

SEQ ID NO: 1495465 - DNA, 15 bp, Homo sapiens
tgtagttagttagag

SEQ ID NO: 1495466 - DNA, 15 bp, Homo sapiens
gtgtagttagttaga

SEQ ID NO: 1495467 - DNA, 15 bp, Homo sapiens
agtgtagttagttag

SEQ ID NO: 1495468 - DNA, 15 bp, Homo sapiens
gagtgtagttagtta

SEQ ID NO: 1495469 - DNA, 15 bp, Homo sapiens
ggagtgtagttagtt

SEQ ID NO: 1495470 - DNA, 15 bp, Homo sapiens
tggagtgtagttagt

SEQ ID NO: 1495471 - DNA, 15 bp, Homo sapiens
atggagtgtagttag

SEQ ID NO: 1495472 - DNA, 15 bp, Homo sapiens
gatggagtgtagtta

SEQ ID NO: 1495473 - DNA, 15 bp, Homo sapiens
tgatggagtgtagtt

SEQ ID NO: 1495474 - DNA, 15 bp, Homo sapiens
gtgatggagtgtagt

SEQ ID NO: 1495475 - DNA, 15 bp, Homo sapiens
agtgatggagtgtag

SEQ ID NO: 1495476 - DNA, 15 bp, Homo sapiens
cagtgatggagtgta

SEQ ID NO: 1495477 - DNA, 15 bp, Homo sapiens
tcagtgatggagtgt

SEQ ID NO: 1495478 - DNA, 15 bp, Homo sapiens
ctcagtgatggagtg

SEQ ID NO: 1495479 - DNA, 15 bp, Homo sapiens
actcagtgatggagt

SEQ ID NO: 1495480 - DNA, 15 bp, Homo sapiens
gactcagtgatggag

SEQ ID NO: 1495481 - DNA, 15 bp, Homo sapiens
ggactcagtgatgga

SEQ ID NO: 1495482 - DNA, 15 bp, Homo sapiens
gggactcagtgatgg

SEQ ID NO: 1495483 - DNA, 15 bp, Homo sapiens
tgggactcagtgatg

SEQ ID NO: 1495484 - DNA, 15 bp, Homo sapiens
atgggactcagtgat

SEQ ID NO: 1495485 - DNA, 15 bp, Homo sapiens
aatgggactcagtga

SEQ ID NO: 1495486 - DNA, 15 bp, Homo sapiens
caatgggactcagtg

SEQ ID NO: 1495487 - DNA, 15 bp, Homo sapiens
ccaatgggactcagt

SEQ ID NO: 1495488 - DNA, 15 bp, Homo sapiens
accaatgggactcag

SEQ ID NO: 1495489 - DNA, 15 bp, Homo sapiens
aaccaatgggactca

SEQ ID NO: 1495490 - DNA, 15 bp, Homo sapiens
gaaccaatgggactc

SEQ ID NO: 1495491 - DNA, 15 bp, Homo sapiens
agaaccaatgggact

SEQ ID NO: 1495492 - DNA, 15 bp, Homo sapiens
tagaaccaatgggac

SEQ ID NO: 1495493 - DNA, 15 bp, Homo sapiens
ctagaaccaatggga

SEQ ID NO: 1495494 - DNA, 15 bp, Homo sapiens
gctagaaccaatggg

SEQ ID NO: 1495495 - DNA, 15 bp, Homo sapiens
agctagaaccaatgg

SEQ ID NO: 1495496 - DNA, 15 bp, Homo sapiens
gagctagaaccaatg

SEQ ID NO: 1495497 - DNA, 15 bp, Homo sapiens
tgagctagaaccaat

SEQ ID NO: 1495498 - DNA, 15 bp, Homo sapiens
ttgagctagaaccaa

SEQ ID NO: 1495499 - DNA, 15 bp, Homo sapiens
tttgagctagaacca

SEQ ID NO: 1495500 - DNA, 15 bp, Homo sapiens
atttgagctagaacc

SEQ ID NO: 1495501 - DNA, 15 bp, Homo sapiens
tatttgagctagaac

SEQ ID NO: 1495502 - DNA, 15 bp, Homo sapiens
atatttgagctagaa

SEQ ID NO: 1495503 - DNA, 15 bp, Homo sapiens
gatatttgagctaga

SEQ ID NO: 1495504 - DNA, 15 bp, Homo sapiens
ggatatttgagctag

SEQ ID NO: 1495505 - DNA, 15 bp, Homo sapiens
gggatatttgagcta

SEQ ID NO: 1495506 - DNA, 15 bp, Homo sapiens
agggatatttgagct

SEQ ID NO: 1495507 - DNA, 15 bp, Homo sapiens
cagggatatttgagc

SEQ ID NO: 1495508 - DNA, 15 bp, Homo sapiens
tcagggatatttgag

SEQ ID NO: 1495509 - DNA, 15 bp, Homo sapiens
gtcagggatatttga

SEQ ID NO: 1495510 - DNA, 15 bp, Homo sapiens
agtcagggatatttg

SEQ ID NO: 1495511 - DNA, 15 bp, Homo sapiens
cagtcagggatattt

SEQ ID NO: 1495512 - DNA, 15 bp, Homo sapiens
gcagtcagggatatt

SEQ ID NO: 1495513 - DNA, 15 bp, Homo sapiens
agcagtcagggatat

SEQ ID NO: 1495514 - DNA, 15 bp, Homo sapiens
gagcagtcagggata

SEQ ID NO: 1495515 - DNA, 15 bp, Homo sapiens
agagcagtcagggat

SEQ ID NO: 1495516 - DNA, 15 bp, Homo sapiens
aagagcagtcaggga

SEQ ID NO: 1495517 - DNA, 15 bp, Homo sapiens
gaagagcagtcaggg

SEQ ID NO: 1495518 - DNA, 15 bp, Homo sapiens
ggaagagcagtcagg

SEQ ID NO: 1495519 - DNA, 15 bp, Homo sapiens
tggaagagcagtcag

SEQ ID NO: 1495520 - DNA, 15 bp, Homo sapiens
gtggaagagcagtca

SEQ ID NO: 1495521 - DNA, 15 bp, Homo sapiens
agtggaagagcagtc

SEQ ID NO: 1495522 - DNA, 15 bp, Homo sapiens
gagtggaagagcagt

SEQ ID NO: 1495523 - DNA, 15 bp, Homo sapiens
ggagtggaagagcag

SEQ ID NO: 1495524 - DNA, 15 bp, Homo sapiens
gggagtggaagagca

SEQ ID NO: 1495525 - DNA, 15 bp, Homo sapiens
ggggagtggaagagc

SEQ ID NO: 1495526 - DNA, 15 bp, Homo sapiens
tggggagtggaagag

SEQ ID NO: 1495527 - DNA, 15 bp, Homo sapiens
ttggggagtggaaga

SEQ ID NO: 1495528 - DNA, 15 bp, Homo sapiens
gttggggagtggaag

SEQ ID NO: 1495529 - DNA, 15 bp, Homo sapiens
ggttggggagtggaa

SEQ ID NO: 1495530 - DNA, 15 bp, Homo sapiens
tggttggggagtgga

SEQ ID NO: 1495531 - DNA, 15 bp, Homo sapiens
atggttggggagtgg

SEQ ID NO: 1495532 - DNA, 15 bp, Homo sapiens
aatggttggggagtg

SEQ ID NO: 1495533 - DNA, 15 bp, Homo sapiens
taatggttggggagt

SEQ ID NO: 1495534 - DNA, 15 bp, Homo sapiens
ttaatggttggggag

SEQ ID NO: 1495535 - DNA, 15 bp, Homo sapiens
gttaatggttgggga

SEQ ID NO: 1495536 - DNA, 15 bp, Homo sapiens
agttaatggttgggg

SEQ ID NO: 1495537 - DNA, 15 bp, Homo sapiens
gagttaatggttggg

SEQ ID NO: 1495538 - DNA, 15 bp, Homo sapiens
agagttaatggttgg

SEQ ID NO: 1495539 - DNA, 15 bp, Homo sapiens
aagagttaatggttg

SEQ ID NO: 1495540 - DNA, 15 bp, Homo sapiens
taagagttaatggtt

SEQ ID NO: 1495541 - DNA, 15 bp, Homo sapiens
gtaagagttaatggt

SEQ ID NO: 1495542 - DNA, 15 bp, Homo sapiens
agtaagagttaatgg

SEQ ID NO: 1495543 - DNA, 15 bp, Homo sapiens
gagtaagagttaatg

SEQ ID NO: 1495544 - DNA, 15 bp, Homo sapiens
agagtaagagttaat

SEQ ID NO: 1495545 - DNA, 15 bp, Homo sapiens
aagagtaagagttaa

SEQ ID NO: 1495546 - DNA, 15 bp, Homo sapiens
aaagagtaagagtta

SEQ ID NO: 1495547 - DNA, 15 bp, Homo sapiens
gaaagagtaagagtt

SEQ ID NO: 1495548 - DNA, 15 bp, Homo sapiens
agaaagagtaagagt

SEQ ID NO: 1495549 - DNA, 15 bp, Homo sapiens
aagaaagagtaagag

SEQ ID NO: 1495550 - DNA, 15 bp, Homo sapiens
gaagaaagagtaaga

SEQ ID NO: 1495551 - DNA, 15 bp, Homo sapiens
tgaagaaagagtaag

SEQ ID NO: 1495552 - DNA, 15 bp, Homo sapiens
ttgaagaaagagtaa

SEQ ID NO: 1495553 - DNA, 15 bp, Homo sapiens
cttgaagaaagagta

SEQ ID NO: 1495554 - DNA, 15 bp, Homo sapiens
acttgaagaaagagt

SEQ ID NO: 1495555 - DNA, 15 bp, Homo sapiens
gacttgaagaaagag

SEQ ID NO: 1495556 - DNA, 15 bp, Homo sapiens
agacttgaagaaaga

SEQ ID NO: 1495557 - DNA, 15 bp, Homo sapiens
tagacttgaagaaag

SEQ ID NO: 1495558 - DNA, 15 bp, Homo sapiens
ttagacttgaagaaa

SEQ ID NO: 1495559 - DNA, 15 bp, Homo sapiens
cttagacttgaagaa

SEQ ID NO: 1495560 - DNA, 15 bp, Homo sapiens
gcttagacttgaaga

SEQ ID NO: 1495561 - DNA, 15 bp, Homo sapiens
agcttagacttgaag

SEQ ID NO: 1495562 - DNA, 15 bp, Homo sapiens
gagcttagacttgaa

SEQ ID NO: 1495563 - DNA, 15 bp, Homo sapiens
tgagcttagacttga

SEQ ID NO: 1495564 - DNA, 15 bp, Homo sapiens
ttgagcttagacttg

SEQ ID NO: 1495565 - DNA, 15 bp, Homo sapiens
tttgagcttagactt

SEQ ID NO: 1495566 - DNA, 15 bp, Homo sapiens
ctttgagcttagact

SEQ ID NO: 1495567 - DNA, 15 bp, Homo sapiens
cctttgagcttagac

SEQ ID NO: 1495568 - DNA, 15 bp, Homo sapiens
acctttgagcttaga

SEQ ID NO: 1495569 - DNA, 15 bp, Homo sapiens
gacctttgagcttag

SEQ ID NO: 1495570 - DNA, 15 bp, Homo sapiens
tgacctttgagctta

SEQ ID NO: 1495571 - DNA, 15 bp, Homo sapiens
ttgacctttgagctt

SEQ ID NO: 1495572 - DNA, 15 bp, Homo sapiens
gttgacctttgagct

SEQ ID NO: 1495573 - DNA, 15 bp, Homo sapiens
agttgacctttgagc

SEQ ID NO: 1495574 - DNA, 15 bp, Homo sapiens
aagttgacctttgag

SEQ ID NO: 1495575 - DNA, 15 bp, Homo sapiens
gaagttgacctttga

SEQ ID NO: 1495576 - DNA, 15 bp, Homo sapiens
agaagttgacctttg

SEQ ID NO: 1495577 - DNA, 15 bp, Homo sapiens
gagaagttgaccttt

SEQ ID NO: 1495578 - DNA, 15 bp, Homo sapiens
tgagaagttgacctt

SEQ ID NO: 1495579 - DNA, 15 bp, Homo sapiens
ttgagaagttgacct

SEQ ID NO: 1495580 - DNA, 15 bp, Homo sapiens
tttgagaagttgacc

SEQ ID NO: 1495581 - DNA, 15 bp, Homo sapiens
ctttgagaagttgac

SEQ ID NO: 1495582 - DNA, 15 bp, Homo sapiens
cctttgagaagttga

SEQ ID NO: 1495583 - DNA, 15 bp, Homo sapiens
tcctttgagaagttg

SEQ ID NO: 1495584 - DNA, 15 bp, Homo sapiens
ctcctttgagaagtt

SEQ ID NO: 1495585 - DNA, 15 bp, Homo sapiens
actcctttgagaagt

SEQ ID NO: 1495586 - DNA, 15 bp, Homo sapiens
aactcctttgagaag

SEQ ID NO: 1495587 - DNA, 15 bp, Homo sapiens
caactcctttgagaa

SEQ ID NO: 1495588 - DNA, 15 bp, Homo sapiens
acaactcctttgaga

SEQ ID NO: 1495589 - DNA, 15 bp, Homo sapiens
gacaactcctttgag

SEQ ID NO: 1495590 - DNA, 15 bp, Homo sapiens
ggacaactcctttga

SEQ ID NO: 1495591 - DNA, 15 bp, Homo sapiens
tggacaactcctttg

SEQ ID NO: 1495592 - DNA, 15 bp, Homo sapiens
gtggacaactccttt

SEQ ID NO: 1495593 - DNA, 15 bp, Homo sapiens
tgtggacaactcctt

SEQ ID NO: 1495594 - DNA, 15 bp, Homo sapiens
ctgtggacaactcct

SEQ ID NO: 1495595 - DNA, 15 bp, Homo sapiens
gctgtggacaactcc

SEQ ID NO: 1495596 - DNA, 15 bp, Homo sapiens
agctgtggacaactc

SEQ ID NO: 1495597 - DNA, 15 bp, Homo sapiens
gagctgtggacaact

SEQ ID NO: 1495598 - DNA, 15 bp, Homo sapiens
ggagctgtggacaac

SEQ ID NO: 1495599 - DNA, 15 bp, Homo sapiens
aggagctgtggacaa

SEQ ID NO: 1495600 - DNA, 15 bp, Homo sapiens
taggagctgtggaca

SEQ ID NO: 1495601 - DNA, 15 bp, Homo sapiens
ctaggagctgtggac

SEQ ID NO: 1495602 - DNA, 15 bp, Homo sapiens
cctaggagctgtgga

SEQ ID NO: 1495603 - DNA, 15 bp, Homo sapiens
gcctaggagctgtgg

SEQ ID NO: 1495604 - DNA, 15 bp, Homo sapiens
ggcctaggagctgtg

SEQ ID NO: 1495605 - DNA, 15 bp, Homo sapiens
gggcctaggagctgt

SEQ ID NO: 1495606 - DNA, 15 bp, Homo sapiens
agggcctaggagctg

SEQ ID NO: 1495607 - DNA, 15 bp, Homo sapiens
gagggcctaggagct

SEQ ID NO: 1495608 - DNA, 15 bp, Homo sapiens
agagggcctaggagc

SEQ ID NO: 1495609 - DNA, 15 bp, Homo sapiens
cagagggcctaggag

SEQ ID NO: 1495610 - DNA, 15 bp, Homo sapiens
ccagagggcctagga

SEQ ID NO: 1495611 - DNA, 15 bp, Homo sapiens
accagagggcctagg

SEQ ID NO: 1495612 - DNA, 15 bp, Homo sapiens
taccagagggcctag

SEQ ID NO: 1495613 - DNA, 15 bp, Homo sapiens
ataccagagggccta

SEQ ID NO: 1495614 - DNA, 15 bp, Homo sapiens
aataccagagggcct

SEQ ID NO: 1495615 - DNA, 15 bp, Homo sapiens
aaataccagagggcc

SEQ ID NO: 1495616 - DNA, 15 bp, Homo sapiens
taaataccagagggc

SEQ ID NO: 1495617 - DNA, 15 bp, Homo sapiens
ataaataccagaggg

SEQ ID NO: 1495618 - DNA, 15 bp, Homo sapiens
aataaataccagagg

SEQ ID NO: 1495619 - DNA, 15 bp, Homo sapiens
gaataaataccagag

SEQ ID NO: 1495620 - DNA, 15 bp, Homo sapiens
agaataaataccaga

SEQ ID NO: 1495621 - DNA, 15 bp, Homo sapiens
cagaataaataccag

SEQ ID NO: 1495622 - DNA, 15 bp, Homo sapiens
gcagaataaatacca

SEQ ID NO: 1495623 - DNA, 15 bp, Homo sapiens
ggcagaataaatacc

SEQ ID NO: 1495624 - DNA, 15 bp, Homo sapiens
gggcagaataaatac

SEQ ID NO: 1495625 - DNA, 15 bp, Homo sapiens
ggggcagaataaata

SEQ ID NO: 1495626 - DNA, 15 bp, Homo sapiens
gggggcagaataaat

SEQ ID NO: 1495627 - DNA, 15 bp, Homo sapiens
ggggggcagaataaa

SEQ ID NO: 1495628 - DNA, 15 bp, Homo sapiens
gggggggcagaataa

SEQ ID NO: 1495629 - DNA, 15 bp, Homo sapiens
agggggggcagaata

SEQ ID NO: 1495630 - DNA, 15 bp, Homo sapiens
cagggggggcagaat

SEQ ID NO: 1495631 - DNA, 15 bp, Homo sapiens
tcagggggggcagaa

SEQ ID NO: 1495632 - DNA, 15 bp, Homo sapiens
ctcagggggggcaga

SEQ ID NO: 1495633 - DNA, 15 bp, Homo sapiens
gctcagggggggcag

SEQ ID NO: 1495634 - DNA, 15 bp, Homo sapiens
agctcagggggggca

SEQ ID NO: 1495635 - DNA, 15 bp, Homo sapiens
aagctcagggggggc

SEQ ID NO: 1495636 - DNA, 15 bp, Homo sapiens
gaagctcaggggggg

SEQ ID NO: 1495637 - DNA, 15 bp, Homo sapiens
agaagctcagggggg

SEQ ID NO: 1495638 - DNA, 15 bp, Homo sapiens
aagaagctcaggggg

SEQ ID NO: 1495639 - DNA, 15 bp, Homo sapiens
aaagaagctcagggg

SEQ ID NO: 1495640 - DNA, 15 bp, Homo sapiens
gaaagaagctcaggg

SEQ ID NO: 1495641 - DNA, 15 bp, Homo sapiens
tgaaagaagctcagg

SEQ ID NO: 1495642 - DNA, 15 bp, Homo sapiens
atgaaagaagctcag

SEQ ID NO: 1495643 - DNA, 15 bp, Homo sapiens
tatgaaagaagctca

SEQ ID NO: 1495644 - DNA, 15 bp, Homo sapiens
ttatgaaagaagctc

SEQ ID NO: 1495645 - DNA, 15 bp, Homo sapiens
attatgaaagaagct

SEQ ID NO: 1495646 - DNA, 15 bp, Homo sapiens
cattatgaaagaagc

SEQ ID NO: 1495647 - DNA, 15 bp, Homo sapiens
gcattatgaaagaag

SEQ ID NO: 1495648 - DNA, 15 bp, Homo sapiens
agcattatgaaagaa

SEQ ID NO: 1495649 - DNA, 15 bp, Homo sapiens
gagcattatgaaaga

SEQ ID NO: 1495650 - DNA, 15 bp, Homo sapiens
tgagcattatgaaag

SEQ ID NO: 1495651 - DNA, 15 bp, Homo sapiens
gtgagcattatgaaa

SEQ ID NO: 1495652 - DNA, 15 bp, Homo sapiens
ggtgagcattatgaa

SEQ ID NO: 1495653 - DNA, 15 bp, Homo sapiens
tggtgagcattatga

SEQ ID NO: 1495654 - DNA, 15 bp, Homo sapiens
atggtgagcattatg

SEQ ID NO: 1495655 - DNA, 15 bp, Homo sapiens
tatggtgagcattat

SEQ ID NO: 1495656 - DNA, 15 bp, Homo sapiens
atatggtgagcatta

SEQ ID NO: 1495657 - DNA, 15 bp, Homo sapiens
aatatggtgagcatt

SEQ ID NO: 1495658 - DNA, 15 bp, Homo sapiens
aaatatggtgagcat

SEQ ID NO: 1495659 - DNA, 15 bp, Homo sapiens
aaaatatggtgagca

SEQ ID NO: 1495660 - DNA, 15 bp, Homo sapiens
taaaatatggtgagc

SEQ ID NO: 1495661 - DNA, 15 bp, Homo sapiens
ataaaatatggtgag

SEQ ID NO: 1495662 - DNA, 15 bp, Homo sapiens
tataaaatatggtga

SEQ ID NO: 1495663 - DNA, 15 bp, Homo sapiens
ttataaaatatggtg

SEQ ID NO: 1495664 - DNA, 15 bp, Homo sapiens
attataaaatatggt

SEQ ID NO: 1495665 - DNA, 15 bp, Homo sapiens
tattataaaatatgg

SEQ ID NO: 1495666 - DNA, 15 bp, Homo sapiens
gtattataaaatatg

SEQ ID NO: 1495667 - DNA, 15 bp, Homo sapiens
agtattataaaatat
